United States Patent Application Publication US 2005/0244851 A1 - sequence listing, part 132

SEQ ID NO: 5152122 - DNA, 25 bp, Homo sapien
gaggcactggtataaaatgctggtg

SEQ ID NO: 5152123 - DNA, 25 bp, Homo sapien
ctatagatatgttgagggtgtggac

SEQ ID NO: 5152124 - DNA, 25 bp, Homo sapien
cctgaaattgtggtcctggtggtga

SEQ ID NO: 5152125 - DNA, 25 bp, Homo sapien
gtgtggactgcttccctgaaattgt

SEQ ID NO: 5152126 - DNA, 25 bp, Homo sapien
ggtccaggacctggacttgacccag

SEQ ID NO: 5152127 - DNA, 25 bp, Homo sapien
gttaggtccaggacctggacttgac

SEQ ID NO: 5152128 - DNA, 25 bp, Homo sapien
taggtccaggacctggacttgaccc

SEQ ID NO: 5152129 - DNA, 25 bp, Homo sapien
tccaggacctggacttgacccagaa

SEQ ID NO: 5152130 - DNA, 25 bp, Homo sapien
acaggactactgtgtccctgagaca

SEQ ID NO: 5152131 - DNA, 25 bp, Homo sapien
caggactactgtgtccctgagacat

SEQ ID NO: 5152132 - DNA, 25 bp, Homo sapien
cacaggactactgtgtccctgagac

SEQ ID NO: 5152133 - DNA, 25 bp, Homo sapien
gcactggtagaccaggaggtcctgc

SEQ ID NO: 5152134 - DNA, 25 bp, Homo sapien
ggcactggtagaccaggaggtcctg

SEQ ID NO: 5152135 - DNA, 25 bp, Homo sapien
tggaccaggtggtaaaggtgggctc

SEQ ID NO: 5152136 - DNA, 25 bp, Homo sapien
gaccaggtggtaaaggtgggctctg

SEQ ID NO: 5152137 - DNA, 25 bp, Homo sapien
atgtgtctggttgaacaagcactcc

SEQ ID NO: 5152138 - DNA, 25 bp, Homo sapien
tggtgtcaaagatgtgtctggttga

SEQ ID NO: 5152139 - DNA, 25 bp, Homo sapien
cccacccatacttggtggtgtcaaa

SEQ ID NO: 5152140 - DNA, 25 bp, Homo sapien
agtggtaagccccacccatacttgg

SEQ ID NO: 5152141 - DNA, 25 bp, Homo sapien
accaggactttgctggtatgatgaa

SEQ ID NO: 5152142 - DNA, 25 bp, Homo sapien
ccaggactttgctggtatgatgaac

SEQ ID NO: 5152143 - DNA, 25 bp, Homo sapien
tatgtatagaatgctgtgcatagta

SEQ ID NO: 5152144 - DNA, 25 bp, Homo sapien
gtaattatcgtaaaactcagctggg

SEQ ID NO: 5152145 - DNA, 25 bp, Homo sapien
cagctgggttttgcagggactcata

SEQ ID NO: 5152146 - DNA, 25 bp, Homo sapien
cagggactcataattggtgttgagc

SEQ ID NO: 5152147 - DNA, 25 bp, Homo sapien
cctggtacaggcagagggccatggc

SEQ ID NO: 5152148 - DNA, 25 bp, Homo sapien
gccatggcctgtcctagtgctgctg

SEQ ID NO: 5152149 - DNA, 25 bp, Homo sapien
gtgagtcttgaacaacaggaggctg

SEQ ID NO: 5152150 - DNA, 25 bp, Homo sapien
cagacccactcccatggttaggtga

SEQ ID NO: 5152151 - DNA, 25 bp, Homo sapien
tccttgcttggtgccctatgaggtt

SEQ ID NO: 5152152 - DNA, 25 bp, Homo sapien
tatgaggttgggtgctggtttgttc

SEQ ID NO: 5152153 - DNA, 25 bp, Homo sapien
ctgagtaagtcttacaaaaagagct

SEQ ID NO: 5152154 - DNA, 25 bp, Homo sapien
ctctgagtaagtcttacaaaaagag

SEQ ID NO: 5152155 - DNA, 25 bp, Homo sapien
ggaagtaagtcttcgggagcccaca

SEQ ID NO: 5152156 - DNA, 25 bp, Homo sapien
ccttgggatagtcctaagcctaggg

SEQ ID NO: 5152157 - DNA, 25 bp, Homo sapien
ccaggtgaggcatccaaaggtatta

SEQ ID NO: 5152158 - DNA, 25 bp, Homo sapien
tcctgggatcccacgcaagtctaag

SEQ ID NO: 5152159 - DNA, 25 bp, Homo sapien
aggatctcctaatttagctcctgaa

SEQ ID NO: 5152160 - DNA, 25 bp, Homo sapien
tctgtattgggcagtctgtgaagcc

SEQ ID NO: 5152161 - DNA, 25 bp, Homo sapien
ttttttgtagtctaggatctcctaa

SEQ ID NO: 5152162 - DNA, 25 bp, Homo sapien
ctgtgaagcctaggatcaaaatttt

SEQ ID NO: 5152163 - DNA, 25 bp, Homo sapien
ttgatgcatgtgaatccttcataac

SEQ ID NO: 5152164 - DNA, 25 bp, Homo sapien
cctttgatgcatgtgaatccttcat

SEQ ID NO: 5152165 - DNA, 25 bp, Homo sapien
gatgcatgtgaatccttcataacca

SEQ ID NO: 5152166 - DNA, 25 bp, Homo sapien
ctttgatgcatgtgaatccttcata

SEQ ID NO: 5152167 - DNA, 25 bp, Homo sapien
gcagagccccggaaccagaattgct

SEQ ID NO: 5152168 - DNA, 25 bp, Homo sapien
cagagccccggaaccagaattgcta

SEQ ID NO: 5152169 - DNA, 25 bp, Homo sapien
gagccccggaaccagaattgctagt

SEQ ID NO: 5152170 - DNA, 25 bp, Homo sapien
agggctgtgatgaaccagggtttga

SEQ ID NO: 5152171 - DNA, 25 bp, Homo sapien
gatgatgaaccgtgatccctagggt

SEQ ID NO: 5152172 - DNA, 25 bp, Homo sapien
agagtgactcccacgtttggactgg

SEQ ID NO: 5152173 - DNA, 25 bp, Homo sapien
aactgaagtggaagttcccagtgga

SEQ ID NO: 5152174 - DNA, 25 bp, Homo sapien
cctgaagaagctgttgctagctctg

SEQ ID NO: 5152175 - DNA, 25 bp, Homo sapien
aaatggtgaagcagttggatcaaaa

SEQ ID NO: 5152176 - DNA, 25 bp, Homo sapien
ttctctaccgggatcattatctggg

SEQ ID NO: 5152177 - DNA, 25 bp, Homo sapien
gaaggctgtgcactgctgggacctg

SEQ ID NO: 5152178 - DNA, 25 bp, Homo sapien
tcatctgtttctctaccgggatcat

SEQ ID NO: 5152179 - DNA, 25 bp, Homo sapien
cacaggctttagaggctataacttc

SEQ ID NO: 5152180 - DNA, 25 bp, Homo sapien
tctgatactagcagctgaaaagtgt

SEQ ID NO: 5152181 - DNA, 25 bp, Homo sapien
ggtcaattactacagtctcttaaag

SEQ ID NO: 5152182 - DNA, 25 bp, Homo sapien
cagcagaggactgagatagtcacaa

SEQ ID NO: 5152183 - DNA, 25 bp, Homo sapien
tctgttacagaatgccagccgggtg

SEQ ID NO: 5152184 - DNA, 25 bp, Homo sapien
tctgtgctgacaaataagagaggtc

SEQ ID NO: 5152185 - DNA, 25 bp, Homo sapien
tacacattggagttgttaccagcaa

SEQ ID NO: 5152186 - DNA, 25 bp, Homo sapien
taatcactacagactctcactgggt

SEQ ID NO: 5152187 - DNA, 25 bp, Homo sapien
cagtaactctccttccacttagaac

SEQ ID NO: 5152188 - DNA, 25 bp, Homo sapien
acttcttaggtaggcagagttctcg

SEQ ID NO: 5152189 - DNA, 25 bp, Homo sapien
gagttctcgttcacttaaccacaac

SEQ ID NO: 5152190 - DNA, 25 bp, Homo sapien
ttatccagagccattttagacaaca

SEQ ID NO: 5152191 - DNA, 25 bp, Homo sapien
caggtgggctgtctaccaaaagaga

SEQ ID NO: 5152192 - DNA, 25 bp, Homo sapien
tcaggaagccatcaacaagcagtta

SEQ ID NO: 5152193 - DNA, 25 bp, Homo sapien
tctttcaggaagaccgcagtgtgac

SEQ ID NO: 5152194 - DNA, 25 bp, Homo sapien
gaagtcagatcttgaagaggcccaa

SEQ ID NO: 5152195 - DNA, 25 bp, Homo sapien
gaaggtcaagaataaacaacgctgt

SEQ ID NO: 5152196 - DNA, 25 bp, Homo sapien
gaaaaaatcctgcagacctttatag

SEQ ID NO: 5152197 - DNA, 25 bp, Homo sapien
tcagtaatgagccaagaagtatggg

SEQ ID NO: 5152198 - DNA, 25 bp, Homo sapien
gaaacatggagctcctaagttgcca

SEQ ID NO: 5152199 - DNA, 25 bp, Homo sapien
tacaaagatgccctgcctagactgt

SEQ ID NO: 5152200 - DNA, 25 bp, Homo sapien
gactgtggaggacaaaagccctaga

SEQ ID NO: 5152201 - DNA, 25 bp, Homo sapien
ggtataacctggatttcagcccaca

SEQ ID NO: 5152202 - DNA, 25 bp, Homo sapien
tataaaaggtatagtctaggccagg

SEQ ID NO: 5152203 - DNA, 25 bp, Homo sapien
tagagcttacgccaaattacccgac

SEQ ID NO: 5152204 - DNA, 25 bp, Homo sapien
gagaattcactcaccccgtaggatg

SEQ ID NO: 5152205 - DNA, 25 bp, Homo sapien
gctacttaggcacaagacggctcat

SEQ ID NO: 5152206 - DNA, 25 bp, Homo sapien
ggctcatgaggataccagaccagat

SEQ ID NO: 5152207 - DNA, 25 bp, Homo sapien
tgacgaataacttggggcatgttct

SEQ ID NO: 5152208 - DNA, 25 bp, Homo sapien
cctcactgacgaataacttggggca

SEQ ID NO: 5152209 - DNA, 25 bp, Homo sapien
cactgacgaataacttggggcatgt

SEQ ID NO: 5152210 - DNA, 25 bp, Homo sapien
gcctcactgacgaataacttggggc

SEQ ID NO: 5152211 - DNA, 25 bp, Homo sapien
gtagaccgtagtacctgccatgtct

SEQ ID NO: 5152212 - DNA, 25 bp, Homo sapien
cgtagtacctgccatgtctgacacc

SEQ ID NO: 5152213 - DNA, 25 bp, Homo sapien
tagtacctgccatgtctgacaccct

SEQ ID NO: 5152214 - DNA, 25 bp, Homo sapien
gaccgtagtacctgccatgtctgac

SEQ ID NO: 5152215 - DNA, 25 bp, Homo sapien
gactagatccaaactgtgttgttct

SEQ ID NO: 5152216 - DNA, 25 bp, Homo sapien
tagagctggctagtgtaacactgac

SEQ ID NO: 5152217 - DNA, 25 bp, Homo sapien
actgactatgagtaggtgggcccac

SEQ ID NO: 5152218 - DNA, 25 bp, Homo sapien
cattatgttgtcagagccctagagc

SEQ ID NO: 5152219 - DNA, 25 bp, Homo sapien
taaagatgaggaagaaaatccttcc

SEQ ID NO: 5152220 - DNA, 25 bp, Homo sapien
gagcatcctatcttcgtagttggtt

SEQ ID NO: 5152221 - DNA, 25 bp, Homo sapien
tggatgagcatcctatcttcgtagt

SEQ ID NO: 5152222 - DNA, 25 bp, Homo sapien
aaatccttcccgttcttctggatga

SEQ ID NO: 5152223 - DNA, 25 bp, Homo sapien
tacagtggctcgtgactgcaatccc

SEQ ID NO: 5152224 - DNA, 25 bp, Homo sapien
tgcattgaagtctcatcacgccact

SEQ ID NO: 5152225 - DNA, 25 bp, Homo sapien
acaccttgtggtcccagttgcttgg

SEQ ID NO: 5152226 - DNA, 25 bp, Homo sapien
gagatcaaggctgcattgaagtctc

SEQ ID NO: 5152227 - DNA, 25 bp, Homo sapien
gcccatcagagcaaacaagtacctt

SEQ ID NO: 5152228 - DNA, 25 bp, Homo sapien
gcattttgttaccaaggccttgaaa

SEQ ID NO: 5152229 - DNA, 25 bp, Homo sapien
ggtcgaaatcctggtcacgccactg

SEQ ID NO: 5152230 - DNA, 25 bp, Homo sapien
tcaaaagaatacaagctgggctcaa

SEQ ID NO: 5152231 - DNA, 25 bp, Homo sapien
gagagaagtctgcagctaacctgga

SEQ ID NO: 5152232 - DNA, 25 bp, Homo sapien
aatccactttctaggcaaatgcagc

SEQ ID NO: 5152233 - DNA, 25 bp, Homo sapien
caaatagcttaggacaatggagtcc

SEQ ID NO: 5152234 - DNA, 25 bp, Homo sapien
ggagttccggttttcatgtcaaatg

SEQ ID NO: 5152235 - DNA, 25 bp, Homo sapien
aaagtagacaccagaaacatctagg

SEQ ID NO: 5152236 - DNA, 25 bp, Homo sapien
gagttcttatgacccaggccctggg

SEQ ID NO: 5152237 - DNA, 25 bp, Homo sapien
tcatagctgtctgaaaagtacatgc

SEQ ID NO: 5152238 - DNA, 25 bp, Homo sapien
ggccactagctatccttgtcagatt

SEQ ID NO: 5152239 - DNA, 25 bp, Homo sapien
caaaaacatgttccttgaggcctat

SEQ ID NO: 5152240 - DNA, 25 bp, Homo sapien
tattagagccgcacagtttagagtc

SEQ ID NO: 5152241 - DNA, 25 bp, Homo sapien
gagatcctgtgcgtgaatttgtcag

SEQ ID NO: 5152242 - DNA, 25 bp, Homo sapien
gagtcagtagtcaattaaagtccct

SEQ ID NO: 5152243 - DNA, 25 bp, Homo sapien
taatgagctcataggagatactcag

SEQ ID NO: 5152244 - DNA, 25 bp, Homo sapien
tactagtcatgctcaacaattcatg

SEQ ID NO: 5152245 - DNA, 25 bp, Homo sapien
caaatggcagttggtagttttgcca

SEQ ID NO: 5152246 - DNA, 25 bp, Homo sapien
gttgtgtgtagatgagctagcctgt

SEQ ID NO: 5152247 - DNA, 25 bp, Homo sapien
ttggctcagcctgccacgaagccag

SEQ ID NO: 5152248 - DNA, 25 bp, Homo sapien
agccaggactacagacagtcacatg

SEQ ID NO: 5152249 - DNA, 25 bp, Homo sapien
ttactgcggcttcaacctcctagct

SEQ ID NO: 5152250 - DNA, 25 bp, Homo sapien
tacatacctcggtcttgacccttta

SEQ ID NO: 5152251 - DNA, 25 bp, Homo sapien
gatcagagaataagagcttgtccct

SEQ ID NO: 5152252 - DNA, 25 bp, Homo sapien
gttcagaaatcagtgtatcagatca

SEQ ID NO: 5152253 - DNA, 25 bp, Homo sapien
gcttgtccctgttctcctatggcca

SEQ ID NO: 5152254 - DNA, 25 bp, Homo sapien
ccagaccttttcatctaaagtgcaa

SEQ ID NO: 5152255 - DNA, 25 bp, Homo sapien
tggaaatgatgaactgtcagctact

SEQ ID NO: 5152256 - DNA, 25 bp, Homo sapien
tgatagtgctcttcagtctgcgaaa

SEQ ID NO: 5152257 - DNA, 25 bp, Homo sapien
tctgcgaaatcttctttgggtggaa

SEQ ID NO: 5152258 - DNA, 25 bp, Homo sapien
tgttcaatggcgagctctttctgag

SEQ ID NO: 5152259 - DNA, 25 bp, Homo sapien
ccagggttaatacaaagtagcctag

SEQ ID NO: 5152260 - DNA, 25 bp, Homo sapien
tctattatagggataagaattttca

SEQ ID NO: 5152261 - DNA, 25 bp, Homo sapien
cttttagtgcatttgagcctgattc

SEQ ID NO: 5152262 - DNA, 25 bp, Homo sapien
gaattagttgactgagttttccact

SEQ ID NO: 5152263 - DNA, 25 bp, Homo sapien
ggcggccgagaaggcggctcagcgc

SEQ ID NO: 5152264 - DNA, 25 bp, Homo sapien
ctcagcgcggaccccgcccgggcgc

SEQ ID NO: 5152265 - DNA, 25 bp, Homo sapien
cgcccgcgccggctaccgcgcctct

SEQ ID NO: 5152266 - DNA, 25 bp, Homo sapien
ctaccgcgcctctcgggtgccggcg

SEQ ID NO: 5152267 - DNA, 25 bp, Homo sapien
gagacctcggcgtagacgctgctgt

SEQ ID NO: 5152268 - DNA, 25 bp, Homo sapien
tcatcgcgtaccacgaaggtgtaca

SEQ ID NO: 5152269 - DNA, 25 bp, Homo sapien
tctcccagcatcaggttgaatctgg

SEQ ID NO: 5152270 - DNA, 25 bp, Homo sapien
tctcgccgcagcctcttccagtggc

SEQ ID NO: 5152271 - DNA, 25 bp, Homo sapien
ttaagcaccagggtaatgccagtca

SEQ ID NO: 5152272 - DNA, 25 bp, Homo sapien
tctgggcaacttctggatgacatca

SEQ ID NO: 5152273 - DNA, 25 bp, Homo sapien
caaaggctctgtctatggaagctca

SEQ ID NO: 5152274 - DNA, 25 bp, Homo sapien
tgacatcacttacaaaggagccgct

SEQ ID NO: 5152275 - DNA, 25 bp, Homo sapien
tcaaaagtttcaggcaggcattagc

SEQ ID NO: 5152276 - DNA, 25 bp, Homo sapien
gacagacctgattcccacctgaact

SEQ ID NO: 5152277 - DNA, 25 bp, Homo sapien
ctccttggctttcatgtagtacact

SEQ ID NO: 5152278 - DNA, 25 bp, Homo sapien
taaatatcccttaacagtgatggca

SEQ ID NO: 5152279 - DNA, 25 bp, Homo sapien
tgtcagcacccctgtagtaattcac

SEQ ID NO: 5152280 - DNA, 25 bp, Homo sapien
acccctgtagtaattcaccaactgt

SEQ ID NO: 5152281 - DNA, 25 bp, Homo sapien
agaagctttgcgacacagtttgtca

SEQ ID NO: 5152282 - DNA, 25 bp, Homo sapien
taattcaccaactgtaccagcccgg

SEQ ID NO: 5152283 - DNA, 25 bp, Homo sapien
tcacagaattttacctacatgcaaa

SEQ ID NO: 5152284 - DNA, 25 bp, Homo sapien
cacagaattttacctacatgcaaaa

SEQ ID NO: 5152285 - DNA, 25 bp, Homo sapien
ttaaaacgaaggcatactactgacg

SEQ ID NO: 5152286 - DNA, 25 bp, Homo sapien
gctagctacaaataccacaattggg

SEQ ID NO: 5152287 - DNA, 25 bp, Homo sapien
tgtatcgcagcatgcacgtcagggc

SEQ ID NO: 5152288 - DNA, 25 bp, Homo sapien
cacatcgctattctattcagggaca

SEQ ID NO: 5152289 - DNA, 25 bp, Homo sapien
tgaaagttcaactccgtatctgcat

SEQ ID NO: 5152290 - DNA, 25 bp, Homo sapien
tcttactccccaggaatcagagaca

SEQ ID NO: 5152291 - DNA, 25 bp, Homo sapien
tgaacaaatggtggaaataacgaca

SEQ ID NO: 5152292 - DNA, 25 bp, Homo sapien
caagtcttaactggaaacctgctct

SEQ ID NO: 5152293 - DNA, 25 bp, Homo sapien
gttactgattggtggctgaattcca

SEQ ID NO: 5152294 - DNA, 25 bp, Homo sapien
tttggcaccggctgatgactttgca

SEQ ID NO: 5152295 - DNA, 25 bp, Homo sapien
tcacataagattcagggaaccatgt

SEQ ID NO: 5152296 - DNA, 25 bp, Homo sapien
gctggagcaactggagtcttgagat

SEQ ID NO: 5152297 - DNA, 25 bp, Homo sapien
tacaaagcatgtagtgggtaccaaa

SEQ ID NO: 5152298 - DNA, 25 bp, Homo sapien
tagatgtagtgtgttcccacgctcc

SEQ ID NO: 5152299 - DNA, 25 bp, Homo sapien
caatcccaaacccacaggagaaggg

SEQ ID NO: 5152300 - DNA, 25 bp, Homo sapien
tcttagtgagggtccagggatcacc

SEQ ID NO: 5152301 - DNA, 25 bp, Homo sapien
tgtcaaacttgcgatgacctggctc

SEQ ID NO: 5152302 - DNA, 25 bp, Homo sapien
tcaaacttgcgatgacctggctcaa

SEQ ID NO: 5152303 - DNA, 25 bp, Homo sapien
aacttgcgatgacctggctcaagca

SEQ ID NO: 5152304 - DNA, 25 bp, Homo sapien
ttgcgatgacctggctcaagcagca

SEQ ID NO: 5152305 - DNA, 25 bp, Homo sapien
gaaaatccataatcgtagtaacatt

SEQ ID NO: 5152306 - DNA, 25 bp, Homo sapien
ttttggtaacatattaaacatggtc

SEQ ID NO: 5152307 - DNA, 25 bp, Homo sapien
attaggtacagaaggtaagttccat

SEQ ID NO: 5152308 - DNA, 25 bp, Homo sapien
catggtcaaacgcttcctcatattc

SEQ ID NO: 5152309 - DNA, 25 bp, Homo sapien
gtagatattatactgatgatccacc

SEQ ID NO: 5152310 - DNA, 25 bp, Homo sapien
gatattatactgatgatccaccaag

SEQ ID NO: 5152311 - DNA, 25 bp, Homo sapien
ggtagatattatactgatgatccac

SEQ ID NO: 5152312 - DNA, 25 bp, Homo sapien
tagatattatactgatgatccacca

SEQ ID NO: 5152313 - DNA, 25 bp, Homo sapien
catgatatggttctgaagcagtccg

SEQ ID NO: 5152314 - DNA, 25 bp, Homo sapien
gttcaaagcacttgttaggtactga

SEQ ID NO: 5152315 - DNA, 25 bp, Homo sapien
tgttaggtactgattgaactccttg

SEQ ID NO: 5152316 - DNA, 25 bp, Homo sapien
tgaatactctttttgaatgcagtga

SEQ ID NO: 5152317 - DNA, 25 bp, Homo sapien
tctcagtcattgtgacagggtagca

SEQ ID NO: 5152318 - DNA, 25 bp, Homo sapien
tgaacaatgcggaaaggatgccgca

SEQ ID NO: 5152319 - DNA, 25 bp, Homo sapien
taattattctactgggctctacgtg

SEQ ID NO: 5152320 - DNA, 25 bp, Homo sapien
tcatcagagacttatacagtgcatc

SEQ ID NO: 5152321 - DNA, 25 bp, Homo sapien
gcatttgttagaaaactgcaaccac

SEQ ID NO: 5152322 - DNA, 25 bp, Homo sapien
gttactcaagagaatgttacttatc

SEQ ID NO: 5152323 - DNA, 25 bp, Homo sapien
tcaacttattaccattaggttactc

SEQ ID NO: 5152324 - DNA, 25 bp, Homo sapien
gcccggcctaattctctcttttcaa

SEQ ID NO: 5152325 - DNA, 25 bp, Homo sapien
ttcagctcctcatcgaccatgaagt

SEQ ID NO: 5152326 - DNA, 25 bp, Homo sapien
agtcaaagccgaagagctggaagct

SEQ ID NO: 5152327 - DNA, 25 bp, Homo sapien
gtgctaatggcaggctccacgctca

SEQ ID NO: 5152328 - DNA, 25 bp, Homo sapien
ctggaagctctggtaagggaggtgc

SEQ ID NO: 5152329 - DNA, 25 bp, Homo sapien
ggggcaccgttgacctcaatgagcc

SEQ ID NO: 5152330 - DNA, 25 bp, Homo sapien
gcaggggcaccgttgacctcaatga

SEQ ID NO: 5152331 - DNA, 25 bp, Homo sapien
catgcaggggcaccgttgacctcaa

SEQ ID NO: 5152332 - DNA, 25 bp, Homo sapien
agcacatgcaggggcaccgttgacc

SEQ ID NO: 5152333 - DNA, 25 bp, Homo sapien
cacactgggcctatctggcctatac

SEQ ID NO: 5152334 - DNA, 25 bp, Homo sapien
aagtgactacacttgtacccacaga

SEQ ID NO: 5152335 - DNA, 25 bp, Homo sapien
gggctcagacagtctacctgacagt

SEQ ID NO: 5152336 - DNA, 25 bp, Homo sapien
caagggtctcctatcactgtggcat

SEQ ID NO: 5152337 - DNA, 25 bp, Homo sapien
gaagttccggagagcaggttctcag

SEQ ID NO: 5152338 - DNA, 25 bp, Homo sapien
tgacgctcatgctacaaccagcctt

SEQ ID NO: 5152339 - DNA, 25 bp, Homo sapien
tcctccttaatgactccatgacgct

SEQ ID NO: 5152340 - DNA, 25 bp, Homo sapien
tctcccgagagaagcagaagttccg

SEQ ID NO: 5152341 - DNA, 25 bp, Homo sapien
cctcgaatgctgctgacaggtccaa

SEQ ID NO: 5152342 - DNA, 25 bp, Homo sapien
tgaagaagacggagtccagcttgcc

SEQ ID NO: 5152343 - DNA, 25 bp, Homo sapien
caagtgctgtcggttgcctcgaatg

SEQ ID NO: 5152344 - DNA, 25 bp, Homo sapien
gaacagtttctgtgaggcaatcagg

SEQ ID NO: 5152345 - DNA, 25 bp, Homo sapien
caatgagaccacttggacgtaggat

SEQ ID NO: 5152346 - DNA, 25 bp, Homo sapien
tttcaagagcatgtaagagccacct

SEQ ID NO: 5152347 - DNA, 25 bp, Homo sapien
gagccaccttgcattacagacaggg

SEQ ID NO: 5152348 - DNA, 25 bp, Homo sapien
tgttttttaccaagatctgccctag

SEQ ID NO: 5152349 - DNA, 25 bp, Homo sapien
ctggaaatggctatgtccacgatgc

SEQ ID NO: 5152350 - DNA, 25 bp, Homo sapien
gctatgtccacgatgccttggcaca

SEQ ID NO: 5152351 - DNA, 25 bp, Homo sapien
tatgtccacgatgccttggcacagt

SEQ ID NO: 5152352 - DNA, 25 bp, Homo sapien
aatggctatgtccacgatgccttgg

SEQ ID NO: 5152353 - DNA, 25 bp, Homo sapien
gagcaggaccccgtgctttttccaa

SEQ ID NO: 5152354 - DNA, 25 bp, Homo sapien
ttcaaaagtctcaacagcactgctg

SEQ ID NO: 5152355 - DNA, 25 bp, Homo sapien
gcactgctgagagctacatctggga

SEQ ID NO: 5152356 - DNA, 25 bp, Homo sapien
caaagctgcctttgtgtaccaaagt

SEQ ID NO: 5152357 - DNA, 25 bp, Homo sapien
cagccgggcatggagctaaggcact

SEQ ID NO: 5152358 - DNA, 25 bp, Homo sapien
gcttagtgtggcagagtgttaccga

SEQ ID NO: 5152359 - DNA, 25 bp, Homo sapien
gatgagggaaaccacctttgccgag

SEQ ID NO: 5152360 - DNA, 25 bp, Homo sapien
aaaactaaggactgttggtgcatgc

SEQ ID NO: 5152361 - DNA, 25 bp, Homo sapien
tactgctagtgatgtggcctcctga

SEQ ID NO: 5152362 - DNA, 25 bp, Homo sapien
caacgggtagcacttacatggacca

SEQ ID NO: 5152363 - DNA, 25 bp, Homo sapien
caaaagcccttgaggtagtccctgg

SEQ ID NO: 5152364 - DNA, 25 bp, Homo sapien
tgggagccaggcataaccttctgtg

SEQ ID NO: 5152365 - DNA, 25 bp, Homo sapien
gcttgatgtagcctccactgtgaat

SEQ ID NO: 5152366 - DNA, 25 bp, Homo sapien
tgtccagaaccagagccatgtacgt

SEQ ID NO: 5152367 - DNA, 25 bp, Homo sapien
caagcatggttcaaggcatctcaag

SEQ ID NO: 5152368 - DNA, 25 bp, Homo sapien
gctggacctccccttgcttgatgta

SEQ ID NO: 5152369 - DNA, 25 bp, Homo sapien
ttaaatattcatacaatcgccttat

SEQ ID NO: 5152370 - DNA, 25 bp, Homo sapien
tactttactttagtgttccaggcat

SEQ ID NO: 5152371 - DNA, 25 bp, Homo sapien
cctacaacaagaaccaaagagcaca

SEQ ID NO: 5152372 - DNA, 25 bp, Homo sapien
aaatgaccagtgatatcccaggaca

SEQ ID NO: 5152373 - DNA, 25 bp, Homo sapien
tgaaacctgtttggagtggagtgcc

SEQ ID NO: 5152374 - DNA, 25 bp, Homo sapien
aaaggccctacatggtttgcaaagc

SEQ ID NO: 5152375 - DNA, 25 bp, Homo sapien
cacgtaagaaacgatgggctgggac

SEQ ID NO: 5152376 - DNA, 25 bp, Homo sapien
tggagtgcctacacagggcttctgg

SEQ ID NO: 5152377 - DNA, 25 bp, Homo sapien
tctaggactcctattatgtgtatgt

SEQ ID NO: 5152378 - DNA, 25 bp, Homo sapien
tacttagtggctggtgtgtcttgag

SEQ ID NO: 5152379 - DNA, 25 bp, Homo sapien
tccagtatatgttttatccccttcc

SEQ ID NO: 5152380 - DNA, 25 bp, Homo sapien
tgtctgacgggtgtctgaagcactg

SEQ ID NO: 5152381 - DNA, 25 bp, Homo sapien
gaccagatttaatcatgttgcccag

SEQ ID NO: 5152382 - DNA, 25 bp, Homo sapien
tatcagggtattaagagtgacctca

SEQ ID NO: 5152383 - DNA, 25 bp, Homo sapien
gtcacctaggacagagagcagttgt

SEQ ID NO: 5152384 - DNA, 25 bp, Homo sapien
gaggacactcttctcaattgaggag

SEQ ID NO: 5152385 - DNA, 25 bp, Homo sapien
cgatgtaatcatcacaggagggtag

SEQ ID NO: 5152386 - DNA, 25 bp, Homo sapien
tgaattaaaccaccactacccagta

SEQ ID NO: 5152387 - DNA, 25 bp, Homo sapien
gcgcccggccaactgagtagttgta

SEQ ID NO: 5152388 - DNA, 25 bp, Homo sapien
ataaaaaattcgagccgggagtctg

SEQ ID NO: 5152389 - DNA, 25 bp, Homo sapien
ttcaacgaaaaagcggatgccgggc

SEQ ID NO: 5152390 - DNA, 25 bp, Homo sapien
attaaggccgtgtccagccagagcg

SEQ ID NO: 5152391 - DNA, 25 bp, Homo sapien
cattggctcagtcaattaggatcgg

SEQ ID NO: 5152392 - DNA, 25 bp, Homo sapien
gagtcatccggccaaagtcgttgct

SEQ ID NO: 5152393 - DNA, 25 bp, Homo sapien
gccagtctctcggtacacgccggac

SEQ ID NO: 5152394 - DNA, 25 bp, Homo sapien
gccagtctctcggtacacgccggaa

SEQ ID NO: 5152395 - DNA, 25 bp, Homo sapien
cgccggaagtagtggccgcagtccc

SEQ ID NO: 5152396 - DNA, 25 bp, Homo sapien
agtggccgcagtcccgtttccgcag

SEQ ID NO: 5152397 - DNA, 25 bp, Homo sapien
tagttgaaggactccacgtgcgccc

SEQ ID NO: 5152398 - DNA, 25 bp, Homo sapien
tgttcccgcgggattccataagagg

SEQ ID NO: 5152399 - DNA, 25 bp, Homo sapien
gagaccctcgtgcacagcgtagttg

SEQ ID NO: 5152400 - DNA, 25 bp, Homo sapien
tcagtcaagtgctttaggctaggcc

SEQ ID NO: 5152401 - DNA, 25 bp, Homo sapien
cccaatatttgggagaccgagagag

SEQ ID NO: 5152402 - DNA, 25 bp, Homo sapien
gagaccgagagaggaggactacttg

SEQ ID NO: 5152403 - DNA, 25 bp, Homo sapien
ggagaccgagagaggaggactactt

SEQ ID NO: 5152404 - DNA, 25 bp, Homo sapien
ccaatatttgggagaccgagagagg

SEQ ID NO: 5152405 - DNA, 25 bp, Homo sapien
agtaaaagagatacgctcatctttg

SEQ ID NO: 5152406 - DNA, 25 bp, Homo sapien
cagaatagtaaaagagatacgctca

SEQ ID NO: 5152407 - DNA, 25 bp, Homo sapien
gaatagtaaaagagatacgctcatc

SEQ ID NO: 5152408 - DNA, 25 bp, Homo sapien
tccagaatagtaaaagagatacgct

SEQ ID NO: 5152409 - DNA, 25 bp, Homo sapien
gccccggcattctgctggataaaca

SEQ ID NO: 5152410 - DNA, 25 bp, Homo sapien
tgtcaacttcccacggtaggtactc

SEQ ID NO: 5152411 - DNA, 25 bp, Homo sapien
cttcggccccggcattctgctggat

SEQ ID NO: 5152412 - DNA, 25 bp, Homo sapien
attctgctggataaacattggcctc

SEQ ID NO: 5152413 - DNA, 25 bp, Homo sapien
ggttacgtaagttgcaaagcttgga

SEQ ID NO: 5152414 - DNA, 25 bp, Homo sapien
ttacgtaagttgcaaagcttggatt

SEQ ID NO: 5152415 - DNA, 25 bp, Homo sapien
aaggttacgtaagttgcaaagcttg

SEQ ID NO: 5152416 - DNA, 25 bp, Homo sapien
gaaactgcttaatgattccttttga

SEQ ID NO: 5152417 - DNA, 25 bp, Homo sapien
tccccccgaacaataatattctcta

SEQ ID NO: 5152418 - DNA, 25 bp, Homo sapien
attttggtcttatcattgcaatggg

SEQ ID NO: 5152419 - DNA, 25 bp, Homo sapien
acattcggatgactttttcaatgcc

SEQ ID NO: 5152420 - DNA, 25 bp, Homo sapien
tactgagtataaccaggccctctgg

SEQ ID NO: 5152421 - DNA, 25 bp, Homo sapien
gggaaaatttctccgaggcataatc

SEQ ID NO: 5152422 - DNA, 25 bp, Homo sapien
caaatcactaagtttagccaagact

SEQ ID NO: 5152423 - DNA, 25 bp, Homo sapien
gaacaatcttaacctcttagacaca

SEQ ID NO: 5152424 - DNA, 25 bp, Homo sapien
tcactaagtttagccaagactggca

SEQ ID NO: 5152425 - DNA, 25 bp, Homo sapien
tgatatcttaattgcttcaaccatt

SEQ ID NO: 5152426 - DNA, 25 bp, Homo sapien
gttcaacataacagtgccattttcc

SEQ ID NO: 5152427 - DNA, 25 bp, Homo sapien
tattgacagcggaatgttcttccct

SEQ ID NO: 5152428 - DNA, 25 bp, Homo sapien
ggaggttcatattgacagcggaatg

SEQ ID NO: 5152429 - DNA, 25 bp, Homo sapien
tccctcacacagtgcattgaaactc

SEQ ID NO: 5152430 - DNA, 25 bp, Homo sapien
catctgagaaacagagttcctaagg

SEQ ID NO: 5152431 - DNA, 25 bp, Homo sapien
cagcttgctcatttgggtaccagtc

SEQ ID NO: 5152432 - DNA, 25 bp, Homo sapien
taaacaggaactccgcagcttgctc

SEQ ID NO: 5152433 - DNA, 25 bp, Homo sapien
gcattcacctaggtagttaaggacc

SEQ ID NO: 5152434 - DNA, 25 bp, Homo sapien
gaacataaggaagagctgacccggt

SEQ ID NO: 5152435 - DNA, 25 bp, Homo sapien
ggttcaccaaactatcaggattgtc

SEQ ID NO: 5152436 - DNA, 25 bp, Homo sapien
gcaaagagctttcgcgtcatgagac

SEQ ID NO: 5152437 - DNA, 25 bp, Homo sapien
ctgacccggtgtgaggacttcctgg

SEQ ID NO: 5152438 - DNA, 25 bp, Homo sapien
tgtaaggtctatgcccattgtaaaa

SEQ ID NO: 5152439 - DNA, 25 bp, Homo sapien
tgttttagaacgcagattcccagta

SEQ ID NO: 5152440 - DNA, 25 bp, Homo sapien
agaacgcagattcccagtagcaaaa

SEQ ID NO: 5152441 - DNA, 25 bp, Homo sapien
taatagacactaaccaaccttccag

SEQ ID NO: 5152442 - DNA, 25 bp, Homo sapien
ggtatgcacgggacaaaggaagccc

SEQ ID NO: 5152443 - DNA, 25 bp, Homo sapien
gcctgcgtactgtggtggtcctcat

SEQ ID NO: 5152444 - DNA, 25 bp, Homo sapien
tagatgccgtatacacaaactgtgt

SEQ ID NO: 5152445 - DNA, 25 bp, Homo sapien
catacggcagttaggtggttcatca

SEQ ID NO: 5152446 - DNA, 25 bp, Homo sapien
gcgatgcctggagcaagatccttat

SEQ ID NO: 5152447 - DNA, 25 bp, Homo sapien
ttaaaatgacgaagagaatctgcga

SEQ ID NO: 5152448 - DNA, 25 bp, Homo sapien
ggagctccatcaatgggagtgaccc

SEQ ID NO: 5152449 - DNA, 25 bp, Homo sapien
tagcactcactgtatgatcggtggg

SEQ ID NO: 5152450 - DNA, 25 bp, Homo sapien
aaataaaagactggtggttggcagc

SEQ ID NO: 5152451 - DNA, 25 bp, Homo sapien
tggttggcagcatctaggtggcttc

SEQ ID NO: 5152452 - DNA, 25 bp, Homo sapien
ttggcagcatctaggtggcttcagg

SEQ ID NO: 5152453 - DNA, 25 bp, Homo sapien
aagactggtggttggcagcatctag

SEQ ID NO: 5152454 - DNA, 25 bp, Homo sapien
tctttgcccaatgctaagttctgca

SEQ ID NO: 5152455 - DNA, 25 bp, Homo sapien
gtcatgggtataaggaccacttcca

SEQ ID NO: 5152456 - DNA, 25 bp, Homo sapien
aagttctgcacaggccgtaccagtc

SEQ ID NO: 5152457 - DNA, 25 bp, Homo sapien
aggaacaatcctgggtacagacttg

SEQ ID NO: 5152458 - DNA, 25 bp, Homo sapien
aactaccccagaccaattgtgaagg

SEQ ID NO: 5152459 - DNA, 25 bp, Homo sapien
ggaatgttttcacttcacggctgag

SEQ ID NO: 5152460 - DNA, 25 bp, Homo sapien
cagggaagcgaccagttagaaatac

SEQ ID NO: 5152461 - DNA, 25 bp, Homo sapien
gaggcaggtaatgtgaccaccagcc

SEQ ID NO: 5152462 - DNA, 25 bp, Homo sapien
aaagggatgaagttggcaatcacac

SEQ ID NO: 5152463 - DNA, 25 bp, Homo sapien
ggtgtgtggtaactccagcaaaaac

SEQ ID NO: 5152464 - DNA, 25 bp, Homo sapien
ccatctggcattggtacatgttccg

SEQ ID NO: 5152465 - DNA, 25 bp, Homo sapien
cgtggactctggttgtgatcagaga

SEQ ID NO: 5152466 - DNA, 25 bp, Homo sapien
gaaaacttgaatcttgcagcaggaa

SEQ ID NO: 5152467 - DNA, 25 bp, Homo sapien
taaatacaatgagtgatcctgggct

SEQ ID NO: 5152468 - DNA, 25 bp, Homo sapien
tcaggcacacccaaatctatggaca

SEQ ID NO: 5152469 - DNA, 25 bp, Homo sapien
taaatatgcgggtgactataattgc

SEQ ID NO: 5152470 - DNA, 25 bp, Homo sapien
cagcaacgatggcattggtcccaat

SEQ ID NO: 5152471 - DNA, 25 bp, Homo sapien
tgataagtgagaagtggaaagccca

SEQ ID NO: 5152472 - DNA, 25 bp, Homo sapien
tacatggagggtctcaccaagggac

SEQ ID NO: 5152473 - DNA, 25 bp, Homo sapien
gatacagtttgttatccgatcggtc

SEQ ID NO: 5152474 - DNA, 25 bp, Homo sapien
gaggtagctgtaatacggatctccg

SEQ ID NO: 5152475 - DNA, 25 bp, Homo sapien
tgggcaaagcctcgttcccaagagg

SEQ ID NO: 5152476 - DNA, 25 bp, Homo sapien
gacttgtagacacttccatgggcaa

SEQ ID NO: 5152477 - DNA, 25 bp, Homo sapien
aacttctgcagaacgcgtgggtcac

SEQ ID NO: 5152478 - DNA, 25 bp, Homo sapien
tctcggtgccatagaaattgtagcc

SEQ ID NO: 5152479 - DNA, 25 bp, Homo sapien
taccgaccgatctgagcagttgaag

SEQ ID NO: 5152480 - DNA, 25 bp, Homo sapien
caaagtattctaaggccgagttctc

SEQ ID NO: 5152481 - DNA, 25 bp, Homo sapien
tccgatagttgggttccgaggcact

SEQ ID NO: 5152482 - DNA, 25 bp, Homo sapien
tgctttaatctgatagtcctcttaa

SEQ ID NO: 5152483 - DNA, 25 bp, Homo sapien
gatagtcctcttaatccaaaaggtc

SEQ ID NO: 5152484 - DNA, 25 bp, Homo sapien
taatctgatagtcctcttaatccaa

SEQ ID NO: 5152485 - DNA, 25 bp, Homo sapien
cttaatccaaaaggtcaacatcaag

SEQ ID NO: 5152486 - DNA, 25 bp, Homo sapien
gacttgtcaccgtatgctcttccat

SEQ ID NO: 5152487 - DNA, 25 bp, Homo sapien
gtgtgtgcatatagtcagacccatc

SEQ ID NO: 5152488 - DNA, 25 bp, Homo sapien
caggtcttggttgagagttctaaca

SEQ ID NO: 5152489 - DNA, 25 bp, Homo sapien
tatagtactgtcctgctcaagatgg

SEQ ID NO: 5152490 - DNA, 25 bp, Homo sapien
tataaaatactcaccggaggccagg

SEQ ID NO: 5152491 - DNA, 25 bp, Homo sapien
gatgacaatagacctcagctgtggg

SEQ ID NO: 5152492 - DNA, 25 bp, Homo sapien
ggatcattcagtagccagaacctgg

SEQ ID NO: 5152493 - DNA, 25 bp, Homo sapien
gaataagctctgtggactgttccaa

SEQ ID NO: 5152494 - DNA, 25 bp, Homo sapien
agtctgaaaatatgtgagaacagta

SEQ ID NO: 5152495 - DNA, 25 bp, Homo sapien
cagtctgaaaatatgtgagaacagt

SEQ ID NO: 5152496 - DNA, 25 bp, Homo sapien
gacctcaagtgatctgcacacctca

SEQ ID NO: 5152497 - DNA, 25 bp, Homo sapien
gcccaggttgctgtgcagtggcgtg

SEQ ID NO: 5152498 - DNA, 25 bp, Homo sapien
ttttttgagactctagtcttgctct

SEQ ID NO: 5152499 - DNA, 25 bp, Homo sapien
gttgcccaggttgctgtgcagtggc

SEQ ID NO: 5152500 - DNA, 25 bp, Homo sapien
aaataggagacaacagagttcagac

SEQ ID NO: 5152501 - DNA, 25 bp, Homo sapien
acaagcattgtagcacagtggtccc

SEQ ID NO: 5152502 - DNA, 25 bp, Homo sapien
tgcgttagaaacataggccaagtac

SEQ ID NO: 5152503 - DNA, 25 bp, Homo sapien
tacggtggtggcttctgcgttagaa

SEQ ID NO: 5152504 - DNA, 25 bp, Homo sapien
cataaatcagtacatggaaggtaca

SEQ ID NO: 5152505 - DNA, 25 bp, Homo sapien
agtgtgcctgagacagtagaattac

SEQ ID NO: 5152506 - DNA, 25 bp, Homo sapien
tttaggtggacaggagttacagaca

SEQ ID NO: 5152507 - DNA, 25 bp, Homo sapien
cagtacatggaaggtacagattgtg

SEQ ID NO: 5152508 - DNA, 25 bp, Homo sapien
gacatccgaggaccagcactggtca

SEQ ID NO: 5152509 - DNA, 25 bp, Homo sapien
cctggttggcagttgacatccgagg

SEQ ID NO: 5152510 - DNA, 25 bp, Homo sapien
aactttacaccttgagatccctcca

SEQ ID NO: 5152511 - DNA, 25 bp, Homo sapien
cactggtcatcgcacagaaagaaaa

SEQ ID NO: 5152512 - DNA, 25 bp, Homo sapien
ttgttcccattttcgttgggtgctg

SEQ ID NO: 5152513 - DNA, 25 bp, Homo sapien
gttcccattttcgttgggtgctgta

SEQ ID NO: 5152514 - DNA, 25 bp, Homo sapien
ttcccattttcgttgggtgctgtag

SEQ ID NO: 5152515 - DNA, 25 bp, Homo sapien
tgttcccattttcgttgggtgctgt

SEQ ID NO: 5152516 - DNA, 25 bp, Homo sapien
caaatctccgactgtagctggtggg

SEQ ID NO: 5152517 - DNA, 25 bp, Homo sapien
agacacaagcgctccaaatctccga

SEQ ID NO: 5152518 - DNA, 25 bp, Homo sapien
ctgacgggattgagcctcagacaca

SEQ ID NO: 5152519 - DNA, 25 bp, Homo sapien
gcgctccaaatctccgactgtagct

SEQ ID NO: 5152520 - DNA, 25 bp, Homo sapien
tcttcttccggcccggctcgtcatg

SEQ ID NO: 5152521 - DNA, 25 bp, Homo sapien
ttcttccggcccggctcgtcatggc

SEQ ID NO: 5152522 - DNA, 25 bp, Homo sapien
ctcttcttccggcccggctcgtcat

SEQ ID NO: 5152523 - DNA, 25 bp, Homo sapien
cttccggcccggctcgtcatggcgg

SEQ ID NO: 5152524 - DNA, 25 bp, Homo sapien
ttccggtagccaattgaactaacaa

SEQ ID NO: 5152525 - DNA, 25 bp, Homo sapien
tccggtagccaattgaactaacaac

SEQ ID NO: 5152526 - DNA, 25 bp, Homo sapien
tttccggtagccaattgaactaaca

SEQ ID NO: 5152527 - DNA, 25 bp, Homo sapien
cgccttttccggtatcggttgtcat

SEQ ID NO: 5152528 - DNA, 25 bp, Homo sapien
tcgagacctttgccggcgtagggct

SEQ ID NO: 5152529 - DNA, 25 bp, Homo sapien
acctttgccggcgtagggctgtccg

SEQ ID NO: 5152530 - DNA, 25 bp, Homo sapien
agacctttgccggcgtagggctgtc

SEQ ID NO: 5152531 - DNA, 25 bp, Homo sapien
ctcgagacctttgccggcgtagggc

SEQ ID NO: 5152532 - DNA, 25 bp, Homo sapien
gactaggtctagatcactgggtaaa

SEQ ID NO: 5152533 - DNA, 25 bp, Homo sapien
gctcgtgagcgaaggcgctgaatcc

SEQ ID NO: 5152534 - DNA, 25 bp, Homo sapien
tcctgagggtcagatctccaagaag

SEQ ID NO: 5152535 - DNA, 25 bp, Homo sapien
gaggctggtcctagttcccgaggtc

SEQ ID NO: 5152536 - DNA, 25 bp, Homo sapien
ggcagagattgggtgaagagtgact

SEQ ID NO: 5152537 - DNA, 25 bp, Homo sapien
gcagagattgggtgaagagtgactg

SEQ ID NO: 5152538 - DNA, 25 bp, Homo sapien
ctggggtactgggggcagagattgg

SEQ ID NO: 5152539 - DNA, 25 bp, Homo sapien
ggggcagagattgggtgaagagtga

SEQ ID NO: 5152540 - DNA, 25 bp, Homo sapien
tcctgggcaaggtcagagtggtcta

SEQ ID NO: 5152541 - DNA, 25 bp, Homo sapien
gatgaaacctaaggccctggtgcgg

SEQ ID NO: 5152542 - DNA, 25 bp, Homo sapien
ggaacaagtctgtggaccctatagg

SEQ ID NO: 5152543 - DNA, 25 bp, Homo sapien
ggcataagctatggtgctccgcaaa

SEQ ID NO: 5152544 - DNA, 25 bp, Homo sapien
cttaaggtagtgacagtcccgctgc

SEQ ID NO: 5152545 - DNA, 25 bp, Homo sapien
agctcccggccacagtagcgagcgg

SEQ ID NO: 5152546 - DNA, 25 bp, Homo sapien
agcggtgacctctagggccgcctgc

SEQ ID NO: 5152547 - DNA, 25 bp, Homo sapien
gtcccgctgccaggattccggcttg

SEQ ID NO: 5152548 - DNA, 25 bp, Homo sapien
agggcagttcagcccctgggagatt

SEQ ID NO: 5152549 - DNA, 25 bp, Homo sapien
agttcagcccctgggagattcccac

SEQ ID NO: 5152550 - DNA, 25 bp, Homo sapien
ggcagttcagcccctgggagattcc

SEQ ID NO: 5152551 - DNA, 25 bp, Homo sapien
cagttcagcccctgggagattccca

SEQ ID NO: 5152552 - DNA, 25 bp, Homo sapien
cacagttgcaggtgagcgtggcggc

SEQ ID NO: 5152553 - DNA, 25 bp, Homo sapien
cagctgcctcgttctgtcgaagaca

SEQ ID NO: 5152554 - DNA, 25 bp, Homo sapien
tgctcagcgcactgcaggaagcggc

SEQ ID NO: 5152555 - DNA, 25 bp, Homo sapien
gaagcggcgcatatgctctgcacag

SEQ ID NO: 5152556 - DNA, 25 bp, Homo sapien
caaagtctttaccctgaacaaccag

SEQ ID NO: 5152557 - DNA, 25 bp, Homo sapien
ctatatggggcaagaagtgatgatg

SEQ ID NO: 5152558 - DNA, 25 bp, Homo sapien
gactccaaagtctttaccctgaaca

SEQ ID NO: 5152559 - DNA, 25 bp, Homo sapien
tatggggcaagaagtgatgatgttc

SEQ ID NO: 5152560 - DNA, 25 bp, Homo sapien
taaagtctgtatgccatgctgcagg

SEQ ID NO: 5152561 - DNA, 25 bp, Homo sapien
gaaaaactgtaactgggatgccatc

SEQ ID NO: 5152562 - DNA, 25 bp, Homo sapien
cagcggagacgtgcacttgagtaac

SEQ ID NO: 5152563 - DNA, 25 bp, Homo sapien
cccaggccgctttatggaggcaaga

SEQ ID NO: 5152564 - DNA, 25 bp, Homo sapien
tatgtagacaccacagagggagacc

SEQ ID NO: 5152565 - DNA, 25 bp, Homo sapien
cagagggagaccctgcagagcccac

SEQ ID NO: 5152566 - DNA, 25 bp, Homo sapien
agggagaccctgcagagcccacagt

SEQ ID NO: 5152567 - DNA, 25 bp, Homo sapien
ctatgtagacaccacagagggagac

SEQ ID NO: 5152568 - DNA, 25 bp, Homo sapien
gaaagtacatcaacatctagtagca

SEQ ID NO: 5152569 - DNA, 25 bp, Homo sapien
aagtacatcaacatctagtagcacc

SEQ ID NO: 5152570 - DNA, 25 bp, Homo sapien
agtacatcaacatctagtagcacct

SEQ ID NO: 5152571 - DNA, 25 bp, Homo sapien
aaagtacatcaacatctagtagcac

SEQ ID NO: 5152572 - DNA, 25 bp, Homo sapien
gtccagttttcctgccgtcagagga

SEQ ID NO: 5152573 - DNA, 25 bp, Homo sapien
tccagttttcctgccgtcagaggag

SEQ ID NO: 5152574 - DNA, 25 bp, Homo sapien
ccagttttcctgccgtcagaggagt

SEQ ID NO: 5152575 - DNA, 25 bp, Homo sapien
ctttatttattggaagtcctgatat

SEQ ID NO: 5152576 - DNA, 25 bp, Homo sapien
ccgggcccatgtccagggctcagga

SEQ ID NO: 5152577 - DNA, 25 bp, Homo sapien
atatccaggaaagccgggcccatgt

SEQ ID NO: 5152578 - DNA, 25 bp, Homo sapien
atttattggaagtcctgatatccag

SEQ ID NO: 5152579 - DNA, 25 bp, Homo sapien
ctctcaggtacggatggcaggaatc

SEQ ID NO: 5152580 - DNA, 25 bp, Homo sapien
tggcagagttcacaagggaggcagg

SEQ ID NO: 5152581 - DNA, 25 bp, Homo sapien
gggaacagatgactctgcccagcca

SEQ ID NO: 5152582 - DNA, 25 bp, Homo sapien
ttccttggcacacccggtgaagctg

SEQ ID NO: 5152583 - DNA, 25 bp, Homo sapien
tagagtggaagggattgagggtctt

SEQ ID NO: 5152584 - DNA, 25 bp, Homo sapien
atgctagagtggaagggattgaggg

SEQ ID NO: 5152585 - DNA, 25 bp, Homo sapien
gctagagtggaagggattgagggtc

SEQ ID NO: 5152586 - DNA, 25 bp, Homo sapien
gagtggaagggattgagggtcttta

SEQ ID NO: 5152587 - DNA, 25 bp, Homo sapien
agcctgtatcaaacagcaggagcct

SEQ ID NO: 5152588 - DNA, 25 bp, Homo sapien
tatcaaacagcaggagcctgtattc

SEQ ID NO: 5152589 - DNA, 25 bp, Homo sapien
ctattctttaggaccagtccctact

SEQ ID NO: 5152590 - DNA, 25 bp, Homo sapien
tattctttaggaccagtccctactg

SEQ ID NO: 5152591 - DNA, 25 bp, Homo sapien
acaataacaataccaaaccttctgc

SEQ ID NO: 5152592 - DNA, 25 bp, Homo sapien
aacaataacaataccaaaccttctg

SEQ ID NO: 5152593 - DNA, 25 bp, Homo sapien
acgcccagctaagttaatacaaaca

SEQ ID NO: 5152594 - DNA, 25 bp, Homo sapien
cgacgcccagctaagttaatacaaa

SEQ ID NO: 5152595 - DNA, 25 bp, Homo sapien
acgacgcccagctaagttaatacaa

SEQ ID NO: 5152596 - DNA, 25 bp, Homo sapien
gcccagctaagttaatacaaacatg

SEQ ID NO: 5152597 - DNA, 25 bp, Homo sapien
cacttgatgcttggacctgcctaac

SEQ ID NO: 5152598 - DNA, 25 bp, Homo sapien
cacttggttaagttgatggaagccc

SEQ ID NO: 5152599 - DNA, 25 bp, Homo sapien
gccaaatggcgatatgataggaacc

SEQ ID NO: 5152600 - DNA, 25 bp, Homo sapien
cacaggctgtatcgatctgttcagg

SEQ ID NO: 5152601 - DNA, 25 bp, Homo sapien
gtcgaagctatcctcttatgctgag

SEQ ID NO: 5152602 - DNA, 25 bp, Homo sapien
ccgattggttggcttgaggatgaac

SEQ ID NO: 5152603 - DNA, 25 bp, Homo sapien
gccaggagcaccgattggttggctt

SEQ ID NO: 5152604 - DNA, 25 bp, Homo sapien
gaggatgaactcataggcagtcgaa

SEQ ID NO: 5152605 - DNA, 25 bp, Homo sapien
ttgagcaggcggttttaccaccaca

SEQ ID NO: 5152606 - DNA, 25 bp, Homo sapien
ggatctcccaacacagcatgcgagc

SEQ ID NO: 5152607 - DNA, 25 bp, Homo sapien
tccctgctgggtcgaagcttccaga

SEQ ID NO: 5152608 - DNA, 25 bp, Homo sapien
caaggctgccgtgttcagactgcga

SEQ ID NO: 5152609 - DNA, 25 bp, Homo sapien
ctatcgagagaccttaaatcgagga

SEQ ID NO: 5152610 - DNA, 25 bp, Homo sapien
tcgagagaccttaaatcgaggacct

SEQ ID NO: 5152611 - DNA, 25 bp, Homo sapien
gagaccttaaatcgaggacctccaa

SEQ ID NO: 5152612 - DNA, 25 bp, Homo sapien
gagagaccttaaatcgaggacctcc

SEQ ID NO: 5152613 - DNA, 25 bp, Homo sapien
ttttactgtccagttatgcttcctg

SEQ ID NO: 5152614 - DNA, 25 bp, Homo sapien
tgggcaattatagatactgatgata

SEQ ID NO: 5152615 - DNA, 25 bp, Homo sapien
cctggatctgggcaattatagatac

SEQ ID NO: 5152616 - DNA, 25 bp, Homo sapien
ttactgtccagttatgcttcctgga

SEQ ID NO: 5152617 - DNA, 25 bp, Homo sapien
cacaggaagccaccgaagtctggta

SEQ ID NO: 5152618 - DNA, 25 bp, Homo sapien
caatcagacttgtgccttccaggta

SEQ ID NO: 5152619 - DNA, 25 bp, Homo sapien
tctacagtgcaggactgggacccaa

SEQ ID NO: 5152620 - DNA, 25 bp, Homo sapien
ccagggcacatataaactcaggaca

SEQ ID NO: 5152621 - DNA, 25 bp, Homo sapien
tgtgtgatgacttaatcagaggcgc

SEQ ID NO: 5152622 - DNA, 25 bp, Homo sapien
cctggaaaaggtgtgtgatgactta

SEQ ID NO: 5152623 - DNA, 25 bp, Homo sapien
gaaaaggtgtgtgatgacttaatca

SEQ ID NO: 5152624 - DNA, 25 bp, Homo sapien
gatgacttaatcagaggcgcaaagg

SEQ ID NO: 5152625 - DNA, 25 bp, Homo sapien
ctctccagttccacaacaatttcct

SEQ ID NO: 5152626 - DNA, 25 bp, Homo sapien
atccccagtatctgtccctccacat

SEQ ID NO: 5152627 - DNA, 25 bp, Homo sapien
tgggatcagcatgggtaaccaaacc

SEQ ID NO: 5152628 - DNA, 25 bp, Homo sapien
ggtggttgttatgggatcagcatgg

SEQ ID NO: 5152629 - DNA, 25 bp, Homo sapien
gttatgggatcagcatgggtaacca

SEQ ID NO: 5152630 - DNA, 25 bp, Homo sapien
tatgggatcagcatgggtaaccaaa

SEQ ID NO: 5152631 - DNA, 25 bp, Homo sapien
ccaccttgcttgttgatgttccctg

SEQ ID NO: 5152632 - DNA, 25 bp, Homo sapien
tgcactttctggaacagccccacag

SEQ ID NO: 5152633 - DNA, 25 bp, Homo sapien
tggttttgtggcaaggtcatcctca

SEQ ID NO: 5152634 - DNA, 25 bp, Homo sapien
tttgtggcaaggtcatcctcatggt

SEQ ID NO: 5152635 - DNA, 25 bp, Homo sapien
catggggtttcgcaacttgttcttg

SEQ ID NO: 5152636 - DNA, 25 bp, Homo sapien
gcacgtcactgcatatagatcttct

SEQ ID NO: 5152637 - DNA, 25 bp, Homo sapien
acgtcactgcatatagatcttcttg

SEQ ID NO: 5152638 - DNA, 25 bp, Homo sapien
tttgcacgtcactgcatatagatct

SEQ ID NO: 5152639 - DNA, 25 bp, Homo sapien
tcacttgtctgatcccttcagcaag

SEQ ID NO: 5152640 - DNA, 25 bp, Homo sapien
caagagaaagcttcccaacaagacc

SEQ ID NO: 5152641 - DNA, 25 bp, Homo sapien
tccaccactgccgaggctcttgctc

SEQ ID NO: 5152642 - DNA, 25 bp, Homo sapien
gctcttgctccccagcattcctctt

SEQ ID NO: 5152643 - DNA, 25 bp, Homo sapien
ggaagggtgcttgaaagcacccaga

SEQ ID NO: 5152644 - DNA, 25 bp, Homo sapien
agtccaagggatgcttgggatccag

SEQ ID NO: 5152645 - DNA, 25 bp, Homo sapien
gggtgcttgaaagcacccagacagc

SEQ ID NO: 5152646 - DNA, 25 bp, Homo sapien
catttcccccggcatctgtggctct

SEQ ID NO: 5152647 - DNA, 25 bp, Homo sapien
tagggtacagcccttggagaccagg

SEQ ID NO: 5152648 - DNA, 25 bp, Homo sapien
taggaggaccgtcagttgtcagttc

SEQ ID NO: 5152649 - DNA, 25 bp, Homo sapien
gtcagttcgtgcacaaatggcattg

SEQ ID NO: 5152650 - DNA, 25 bp, Homo sapien
ttgcctccggatcagtagggtacag

SEQ ID NO: 5152651 - DNA, 25 bp, Homo sapien
tgtaggtcccaaggtcggtctgaaa

SEQ ID NO: 5152652 - DNA, 25 bp, Homo sapien
tggcaccttaaaacgtactgctccc

SEQ ID NO: 5152653 - DNA, 25 bp, Homo sapien
actgaccccgtagtgtaatcctggc

SEQ ID NO: 5152654 - DNA, 25 bp, Homo sapien
gttcatatccgggagcactgacccc

SEQ ID NO: 5152655 - DNA, 25 bp, Homo sapien
acgctgcgggagatcttgcgccctg

SEQ ID NO: 5152656 - DNA, 25 bp, Homo sapien
tctggcacgttgttgcacctgtgac

SEQ ID NO: 5152657 - DNA, 25 bp, Homo sapien
gggctccggatccagttctggcacg

SEQ ID NO: 5152658 - DNA, 25 bp, Homo sapien
gcacctgtgacttgtccttggcctg

SEQ ID NO: 5152659 - DNA, 25 bp, Homo sapien
ctccagcggagcaccccgccggccc

SEQ ID NO: 5152660 - DNA, 25 bp, Homo sapien
agaaccacgcagagagcgccggcag

SEQ ID NO: 5152661 - DNA, 25 bp, Homo sapien
tttcagcggccgagaagaagaacca

SEQ ID NO: 5152662 - DNA, 25 bp, Homo sapien
ccgagaagaagaaccacgcagagag

SEQ ID NO: 5152663 - DNA, 25 bp, Homo sapien
gtttcagcggccgagaagaagaacc

SEQ ID NO: 5152664 - DNA, 25 bp, Homo sapien
acagcggctggagccacgggcacac

SEQ ID NO: 5152665 - DNA, 25 bp, Homo sapien
aagggagggcggagcgggagacgag

SEQ ID NO: 5152666 - DNA, 25 bp, Homo sapien
accggggacagctcagcgggactca

SEQ ID NO: 5152667 - DNA, 25 bp, Homo sapien
cgggagacgaggagatcgaggcgac

SEQ ID NO: 5152668 - DNA, 25 bp, Homo sapien
aatagcctctgccggctactccaga

SEQ ID NO: 5152669 - DNA, 25 bp, Homo sapien
gaaataacaatagctgcgtgcccct

SEQ ID NO: 5152670 - DNA, 25 bp, Homo sapien
ataacaatagctgcgtgcccctggg

SEQ ID NO: 5152671 - DNA, 25 bp, Homo sapien
ggtcccgcaatagcctctgccggct

SEQ ID NO: 5152672 - DNA, 25 bp, Homo sapien
cagaatatgaggtatcaaaaatgct

SEQ ID NO: 5152673 - DNA, 25 bp, Homo sapien
gggagttactgctatacgctgcgta

SEQ ID NO: 5152674 - DNA, 25 bp, Homo sapien
actacggcacagaaaccgagctggg

SEQ ID NO: 5152675 - DNA, 25 bp, Homo sapien
gctaaaagcacggagcagaattcca

SEQ ID NO: 5152676 - DNA, 25 bp, Homo sapien
gtttagtaagagaactactgagcgc

SEQ ID NO: 5152677 - DNA, 25 bp, Homo sapien
gagtagtggttgtttagtaagagaa

SEQ ID NO: 5152678 - DNA, 25 bp, Homo sapien
tggttgtttagtaagagaactactg

SEQ ID NO: 5152679 - DNA, 25 bp, Homo sapien
ctggagtagtggttgtttagtaaga

SEQ ID NO: 5152680 - DNA, 25 bp, Homo sapien
tagtactggtaatcagcgttgccat

SEQ ID NO: 5152681 - DNA, 25 bp, Homo sapien
gtagtactggtaatcagcgttgcca

SEQ ID NO: 5152682 - DNA, 25 bp, Homo sapien
gatgagcatccataggtagtccacc

SEQ ID NO: 5152683 - DNA, 25 bp, Homo sapien
gcagcccttgagtcgagttgtacat

SEQ ID NO: 5152684 - DNA, 25 bp, Homo sapien
caaagatgctagctaggatgcaggc

SEQ ID NO: 5152685 - DNA, 25 bp, Homo sapien
tgctacatcattggctcccacggag

SEQ ID NO: 5152686 - DNA, 25 bp, Homo sapien
gaaaggttatgcacaaaaatggaac

SEQ ID NO: 5152687 - DNA, 25 bp, Homo sapien
aattccattatgtaagtggcacatt

SEQ ID NO: 5152688 - DNA, 25 bp, Homo sapien
cacattcagaaaggttaatcggaaa

SEQ ID NO: 5152689 - DNA, 25 bp, Homo sapien
tccattatgtaagtggcacattcag

SEQ ID NO: 5152690 - DNA, 25 bp, Homo sapien
gagggagaaaccaatagttgcacca

SEQ ID NO: 5152691 - DNA, 25 bp, Homo sapien
gttgcaccaacaatacaatgggttc

SEQ ID NO: 5152692 - DNA, 25 bp, Homo sapien
tatcagttcagaccacttgacaccc

SEQ ID NO: 5152693 - DNA, 25 bp, Homo sapien
ttcaaaaacgaagccacgagttgcc

SEQ ID NO: 5152694 - DNA, 25 bp, Homo sapien
cctcccatacctaatgccatggtaa

SEQ ID NO: 5152695 - DNA, 25 bp, Homo sapien
gccatggtaacatatgacgaaaacg

SEQ ID NO: 5152696 - DNA, 25 bp, Homo sapien
gacgttagaacacatcctcccatac

SEQ ID NO: 5152697 - DNA, 25 bp, Homo sapien
tcttgggtctgtccctcgacgttag

SEQ ID NO: 5152698 - DNA, 25 bp, Homo sapien
tggaggatgaatgcacgaaccagga

SEQ ID NO: 5152699 - DNA, 25 bp, Homo sapien
cagacataattccagaaagcagtgg

SEQ ID NO: 5152700 - DNA, 25 bp, Homo sapien
gaataaaattccagacataattcca

SEQ ID NO: 5152701 - DNA, 25 bp, Homo sapien
aggatgaatgcacgaaccaggaaga

SEQ ID NO: 5152702 - DNA, 25 bp, Homo sapien
tgggtgtgctccatgaaaggtcttc

SEQ ID NO: 5152703 - DNA, 25 bp, Homo sapien
cacatctgcaaaagtaccactgggt

SEQ ID NO: 5152704 - DNA, 25 bp, Homo sapien
tgaaaggtcttcatacgggggagaa

SEQ ID NO: 5152705 - DNA, 25 bp, Homo sapien
gtaccactgggtttgaaatcgattg

SEQ ID NO: 5152706 - DNA, 25 bp, Homo sapien
tggagtcaagtcactatgggaggca

SEQ ID NO: 5152707 - DNA, 25 bp, Homo sapien
tatgataatcagcacggcagagacc

SEQ ID NO: 5152708 - DNA, 25 bp, Homo sapien
taaaaactcgctttcagagaactcc

SEQ ID NO: 5152709 - DNA, 25 bp, Homo sapien
gcagagacccatttaactggcagct

SEQ ID NO: 5152710 - DNA, 25 bp, Homo sapien
tcaacacagggccagcataaacctt

SEQ ID NO: 5152711 - DNA, 25 bp, Homo sapien
acttcagccctcaataacaccgtgg

SEQ ID NO: 5152712 - DNA, 25 bp, Homo sapien
tcctgttactgagggattggcctgc

SEQ ID NO: 5152713 - DNA, 25 bp, Homo sapien
tctggtccatgactactggtgagcc

SEQ ID NO: 5152714 - DNA, 25 bp, Homo sapien
cagtctaaggatattttcttgaaat

SEQ ID NO: 5152715 - DNA, 25 bp, Homo sapien
tctaaggatattttcttgaaattta

SEQ ID NO: 5152716 - DNA, 25 bp, Homo sapien
agtctaaggatattttcttgaaatt

SEQ ID NO: 5152717 - DNA, 25 bp, Homo sapien
tattccttctgtgcgatgccagtcc

SEQ ID NO: 5152718 - DNA, 25 bp, Homo sapien
taaatagaagtacctcacctccatt

SEQ ID NO: 5152719 - DNA, 25 bp, Homo sapien
tgagaatgccaaaagccctattttc

SEQ ID NO: 5152720 - DNA, 25 bp, Homo sapien
aggagcactgaagcatattccttct

SEQ ID NO: 5152721 - DNA, 25 bp, Homo sapien
gcatagcccaattaagtattccctg

SEQ ID NO: 5152722 - DNA, 25 bp, Homo sapien
gtattccctgaggtaaacaaatctg

SEQ ID NO: 5152723 - DNA, 25 bp, Homo sapien
tgaggtattctctacgcaaagttgt

SEQ ID NO: 5152724 - DNA, 25 bp, Homo sapien
taattgactagtctgaagtagcagc

SEQ ID NO: 5152725 - DNA, 25 bp, Homo sapien
cacctgattatttgggcgctgaatg

SEQ ID NO: 5152726 - DNA, 25 bp, Homo sapien
aacatgcagactatgcgtacgccaa

SEQ ID NO: 5152727 - DNA, 25 bp, Homo sapien
ttaaggaacagtaaggccagtgact

SEQ ID NO: 5152728 - DNA, 25 bp, Homo sapien
tctgggcaccgaaatataggaggga

SEQ ID NO: 5152729 - DNA, 25 bp, Homo sapien
ctgtaaaacatcattaagatcaata

SEQ ID NO: 5152730 - DNA, 25 bp, Homo sapien
tgtaaaacatcattaagatcaatat

SEQ ID NO: 5152731 - DNA, 25 bp, Homo sapien
caaagctcgcaaaccattaggaact

SEQ ID NO: 5152732 - DNA, 25 bp, Homo sapien
aactgtgcaggcatagaaaactggc

SEQ ID NO: 5152733 - DNA, 25 bp, Homo sapien
acggtgctccagtatacatgatgga

SEQ ID NO: 5152734 - DNA, 25 bp, Homo sapien
gcatagaaaactggcaaagctcgca

SEQ ID NO: 5152735 - DNA, 25 bp, Homo sapien
gggtaaattgggcatttaatgcaag

SEQ ID NO: 5152736 - DNA, 25 bp, Homo sapien
ggtaaattgggcatttaatgcaagt

SEQ ID NO: 5152737 - DNA, 25 bp, Homo sapien
aggggtaaattgggcatttaatgca

SEQ ID NO: 5152738 - DNA, 25 bp, Homo sapien
taaattgggcatttaatgcaagttt

SEQ ID NO: 5152739 - DNA, 25 bp, Homo sapien
ggttaactcagcgtacactagcctg

SEQ ID NO: 5152740 - DNA, 25 bp, Homo sapien
cagccaccttctaggagatttcagc

SEQ ID NO: 5152741 - DNA, 25 bp, Homo sapien
tatgtagtcacagaccatcaggcca

SEQ ID NO: 5152742 - DNA, 25 bp, Homo sapien
tgagaatatccagcaaaccagtcct

SEQ ID NO: 5152743 - DNA, 25 bp, Homo sapien
tcttcaccggcacatagcagttcag

SEQ ID NO: 5152744 - DNA, 25 bp, Homo sapien
taaagttgtctgtttcgttcctgat

SEQ ID NO: 5152745 - DNA, 25 bp, Homo sapien
gcagttcagtatagtctaagtaaga

SEQ ID NO: 5152746 - DNA, 25 bp, Homo sapien
aaatattggcgaggtgcggtgatca

SEQ ID NO: 5152747 - DNA, 25 bp, Homo sapien
tctccactgaaaattaaaaaaatca

SEQ ID NO: 5152748 - DNA, 25 bp, Homo sapien
cagctggatgtggtggtgggcttct

SEQ ID NO: 5152749 - DNA, 25 bp, Homo sapien
ctggatgtggtggtgggcttctata

SEQ ID NO: 5152750 - DNA, 25 bp, Homo sapien
tcagctggatgtggtggtgggcttc

SEQ ID NO: 5152751 - DNA, 25 bp, Homo sapien
taaaatggtgcatcttgaaaacccc

SEQ ID NO: 5152752 - DNA, 25 bp, Homo sapien
aatattgtgtaaaccctcctctggg

SEQ ID NO: 5152753 - DNA, 25 bp, Homo sapien
gatcactacacgctaaggacctatg

SEQ ID NO: 5152754 - DNA, 25 bp, Homo sapien
tagcccacttgaacacctgcgggac

SEQ ID NO: 5152755 - DNA, 25 bp, Homo sapien
ccacagaggaagtttgtcaaagccc

SEQ ID NO: 5152756 - DNA, 25 bp, Homo sapien
atcccaccgagatgaggatggtacc

SEQ ID NO: 5152757 - DNA, 25 bp, Homo sapien
gaaccagacgataagggcacagaaa

SEQ ID NO: 5152758 - DNA, 25 bp, Homo sapien
catacaaagaaccagacgataaggg

SEQ ID NO: 5152759 - DNA, 25 bp, Homo sapien
cagtatgctgacctatccatccagg

SEQ ID NO: 5152760 - DNA, 25 bp, Homo sapien
ccttcacatcgatgaaaagggcaga

SEQ ID NO: 5152761 - DNA, 25 bp, Homo sapien
cagactagcacagaacctctcggag

SEQ ID NO: 5152762 - DNA, 25 bp, Homo sapien
tatgcatccctcagcttcgaaacga

SEQ ID NO: 5152763 - DNA, 25 bp, Homo sapien
caatgcagaacaccctatgtcaggg

SEQ ID NO: 5152764 - DNA, 25 bp, Homo sapien
ggccatactactttgttccacgtct

SEQ ID NO: 5152765 - DNA, 25 bp, Homo sapien
cacttgggaacaaccagcaatgcag

SEQ ID NO: 5152766 - DNA, 25 bp, Homo sapien
tttgccagcaactctcacttgggaa

SEQ ID NO: 5152767 - DNA, 25 bp, Homo sapien
tccattaaggggctttcagaaggac

SEQ ID NO: 5152768 - DNA, 25 bp, Homo sapien
caggatgcttgttttcaatatcacc

SEQ ID NO: 5152769 - DNA, 25 bp, Homo sapien
gaaacaggatgcttgttttcaatat

SEQ ID NO: 5152770 - DNA, 25 bp, Homo sapien
ggctttcagaaggactacactttat

SEQ ID NO: 5152771 - DNA, 25 bp, Homo sapien
ttgaatgagactgttctctcctcca

SEQ ID NO: 5152772 - DNA, 25 bp, Homo sapien
caagtttgaatgagactgttctctc

SEQ ID NO: 5152773 - DNA, 25 bp, Homo sapien
tctccaagtttgaatgagactgttc

SEQ ID NO: 5152774 - DNA, 25 bp, Homo sapien
cacggtgctatctatgctggtttcc

SEQ ID NO: 5152775 - DNA, 25 bp, Homo sapien
aaaacaataagcctcctcaccactg

SEQ ID NO: 5152776 - DNA, 25 bp, Homo sapien
ttcaatacaaaaagcatcaaatcca

SEQ ID NO: 5152777 - DNA, 25 bp, Homo sapien
aggtgacattcaatacaaaaagcat

SEQ ID NO: 5152778 - DNA, 25 bp, Homo sapien
aatccaaaacaataagcctcctcac

SEQ ID NO: 5152779 - DNA, 25 bp, Homo sapien
ggcgaatgacccaaagcaggctgta

SEQ ID NO: 5152780 - DNA, 25 bp, Homo sapien
tacaggccggaatccttatgcacgg

SEQ ID NO: 5152781 - DNA, 25 bp, Homo sapien
tgcgccttaagggtttgtcaccgga

SEQ ID NO: 5152782 - DNA, 25 bp, Homo sapien
gaatgaatccagaggcatgccacat

SEQ ID NO: 5152783 - DNA, 25 bp, Homo sapien
aatataaagcaaccagaggcccaat

SEQ ID NO: 5152784 - DNA, 25 bp, Homo sapien
tattggtgttgccacttttgaagaa

SEQ ID NO: 5152785 - DNA, 25 bp, Homo sapien
tataaagcaaccagaggcccaatgg

SEQ ID NO: 5152786 - DNA, 25 bp, Homo sapien
ccaaatataaagcaaccagaggccc

SEQ ID NO: 5152787 - DNA, 25 bp, Homo sapien
caacacagataccaacaccaccata

SEQ ID NO: 5152788 - DNA, 25 bp, Homo sapien
ctagagggtgtgatcggtgtcagat

SEQ ID NO: 5152789 - DNA, 25 bp, Homo sapien
gtgatcggtgtcagatccttcccca

SEQ ID NO: 5152790 - DNA, 25 bp, Homo sapien
cagaccaacacagataccaacacca

SEQ ID NO: 5152791 - DNA, 25 bp, Homo sapien
tactgacatttgtagaacctgctcc

SEQ ID NO: 5152792 - DNA, 25 bp, Homo sapien
tacacctcaagttaacacagtcctg

SEQ ID NO: 5152793 - DNA, 25 bp, Homo sapien
ccaaaatgtttaagggccagacaag

SEQ ID NO: 5152794 - DNA, 25 bp, Homo sapien
gagatttgtgttagcactcgacagt

SEQ ID NO: 5152795 - DNA, 25 bp, Homo sapien
ccacagtgagggcagatgccagttc

SEQ ID NO: 5152796 - DNA, 25 bp, Homo sapien
cagtgagggcagatgccagttcaat

SEQ ID NO: 5152797 - DNA, 25 bp, Homo sapien
gtgagggcagatgccagttcaatac

SEQ ID NO: 5152798 - DNA, 25 bp, Homo sapien
agggcagatgccagttcaatactga

SEQ ID NO: 5152799 - DNA, 25 bp, Homo sapien
ccagtggtattctggcaaacagaca

SEQ ID NO: 5152800 - DNA, 25 bp, Homo sapien
gaaacaggttattgaagtgccagtg

SEQ ID NO: 5152801 - DNA, 25 bp, Homo sapien
agacacctgagactgtttggacaag

SEQ ID NO: 5152802 - DNA, 25 bp, Homo sapien
tagaagagaagcagaccaaggaaac

SEQ ID NO: 5152803 - DNA, 25 bp, Homo sapien
gaggatgacatatctgaagattgcc

SEQ ID NO: 5152804 - DNA, 25 bp, Homo sapien
aaatgttacgaaagagacgccagtc

SEQ ID NO: 5152805 - DNA, 25 bp, Homo sapien
cagtcaacagccttcttggaccgga

SEQ ID NO: 5152806 - DNA, 25 bp, Homo sapien
ttggaccggagccagccaacagaca

SEQ ID NO: 5152807 - DNA, 25 bp, Homo sapien
tatagcacaagtaacacttccctcc

SEQ ID NO: 5152808 - DNA, 25 bp, Homo sapien
tcaggggagcaggaatacctaagat

SEQ ID NO: 5152809 - DNA, 25 bp, Homo sapien
gttatagcacaagtaacacttccct

SEQ ID NO: 5152810 - DNA, 25 bp, Homo sapien
cagttatagcacaagtaacacttcc

SEQ ID NO: 5152811 - DNA, 25 bp, Homo sapien
tggaacccgggctattttacacagc

SEQ ID NO: 5152812 - DNA, 25 bp, Homo sapien
gaagctcccgaatatgccaatagat

SEQ ID NO: 5152813 - DNA, 25 bp, Homo sapien
gcatgctctgtcaaacggctcttca

SEQ ID NO: 5152814 - DNA, 25 bp, Homo sapien
tggtgaaaccaacaacgcagagcat

SEQ ID NO: 5152815 - DNA, 25 bp, Homo sapien
aacttgcccaaagttcacattccac

SEQ ID NO: 5152816 - DNA, 25 bp, Homo sapien
tttattcagttaagaggtagacaaa

SEQ ID NO: 5152817 - DNA, 25 bp, Homo sapien
ttttattcagttaagaggtagacaa

SEQ ID NO: 5152818 - DNA, 25 bp, Homo sapien
ttcactcccttagggcagtggagga

SEQ ID NO: 5152819 - DNA, 25 bp, Homo sapien
catttaccttcactcccttagggca

SEQ ID NO: 5152820 - DNA, 25 bp, Homo sapien
ccttagggcagtggaggaatattgt

SEQ ID NO: 5152821 - DNA, 25 bp, Homo sapien
actactaaaataccaactagtcaag

SEQ ID NO: 5152822 - DNA, 25 bp, Homo sapien
tgtattttgtattcaccatgttggc

SEQ ID NO: 5152823 - DNA, 25 bp, Homo sapien
ttgagactgagtcccactttgtcac

SEQ ID NO: 5152824 - DNA, 25 bp, Homo sapien
tgtattcttagtattttgtattttg

SEQ ID NO: 5152825 - DNA, 25 bp, Homo sapien
tgagctcttgacctcaagcaatctg

SEQ ID NO: 5152826 - DNA, 25 bp, Homo sapien
ctgtgtgtgggcacctggtaaactg

SEQ ID NO: 5152827 - DNA, 25 bp, Homo sapien
gaggagcaatccaattggcatctag

SEQ ID NO: 5152828 - DNA, 25 bp, Homo sapien
atggtttcaatggtccgtaaataat

SEQ ID NO: 5152829 - DNA, 25 bp, Homo sapien
ttaggaggagcaatccaattggcat

SEQ ID NO: 5152830 - DNA, 25 bp, Homo sapien
ctcagattctccttaggaggagcaa

SEQ ID NO: 5152831 - DNA, 25 bp, Homo sapien
gaccagcaggcgcatagctgcctga

SEQ ID NO: 5152832 - DNA, 25 bp, Homo sapien
aaagggcgcctgataggacctggaa

SEQ ID NO: 5152833 - DNA, 25 bp, Homo sapien
cagggtcatctggtaaacctggcgg

SEQ ID NO: 5152834 - DNA, 25 bp, Homo sapien
cttcgagtcagggagttgcacattg

SEQ ID NO: 5152835 - DNA, 25 bp, Homo sapien
gaatctggggcaagggagagcccca

SEQ ID NO: 5152836 - DNA, 25 bp, Homo sapien
cagaatctggggcaagggagagccc

SEQ ID NO: 5152837 - DNA, 25 bp, Homo sapien
aatctggggcaagggagagccccac

SEQ ID NO: 5152838 - DNA, 25 bp, Homo sapien
gcagaatctggggcaagggagagcc

SEQ ID NO: 5152839 - DNA, 25 bp, Homo sapien
gcctacacgaagctcatagccaaag

SEQ ID NO: 5152840 - DNA, 25 bp, Homo sapien
gagctgaagttggttctgcctctcc

SEQ ID NO: 5152841 - DNA, 25 bp, Homo sapien
cggtagtccttacgctggagctgaa

SEQ ID NO: 5152842 - DNA, 25 bp, Homo sapien
tctccaattgcctgtgagctgcaag

SEQ ID NO: 5152843 - DNA, 25 bp, Homo sapien
aaagcagactcaaggacggaacacc

SEQ ID NO: 5152844 - DNA, 25 bp, Homo sapien
tggctgtcggcagatccactttcca

SEQ ID NO: 5152845 - DNA, 25 bp, Homo sapien
acggaacacccacgatggctgtcgg

SEQ ID NO: 5152846 - DNA, 25 bp, Homo sapien
gatgagtaacatcatgaaaagcaga

SEQ ID NO: 5152847 - DNA, 25 bp, Homo sapien
ctgtgtctgaatcagaaattagtca

SEQ ID NO: 5152848 - DNA, 25 bp, Homo sapien
cctgtgtctgaatcagaaattagtc

SEQ ID NO: 5152849 - DNA, 25 bp, Homo sapien
acctctgcgcctgctccgctttcct

SEQ ID NO: 5152850 - DNA, 25 bp, Homo sapien
agatgtacagcaacgggcacctctg

SEQ ID NO: 5152851 - DNA, 25 bp, Homo sapien
ctacagatgtacagcaacgggcacc

SEQ ID NO: 5152852 - DNA, 25 bp, Homo sapien
ttcctgcctcgtttccatgaagaca

SEQ ID NO: 5152853 - DNA, 25 bp, Homo sapien
ctaccaattttagcgccaggtttgc

SEQ ID NO: 5152854 - DNA, 25 bp, Homo sapien
attttagcgccaggtttgctctcac

SEQ ID NO: 5152855 - DNA, 25 bp, Homo sapien
caattttagcgccaggtttgctctc

SEQ ID NO: 5152856 - DNA, 25 bp, Homo sapien
ctgctaccaattttagcgccaggtt

SEQ ID NO: 5152857 - DNA, 25 bp, Homo sapien
ggatttccaatgatggctgggccag

SEQ ID NO: 5152858 - DNA, 25 bp, Homo sapien
ctgaagccaggtggatttccaatga

SEQ ID NO: 5152859 - DNA, 25 bp, Homo sapien
ttaagtaggacaccgtgggcagcgc

SEQ ID NO: 5152860 - DNA, 25 bp, Homo sapien
cagatgccttgttaagtaggacacc

SEQ ID NO: 5152861 - DNA, 25 bp, Homo sapien
gtgctatgacggctccgctgcactc

SEQ ID NO: 5152862 - DNA, 25 bp, Homo sapien
gctatgacggctccgctgcactcgg

SEQ ID NO: 5152863 - DNA, 25 bp, Homo sapien
gtgtgctatgacggctccgctgcac

SEQ ID NO: 5152864 - DNA, 25 bp, Homo sapien
tatgacggctccgctgcactcggcc

SEQ ID NO: 5152865 - DNA, 25 bp, Homo sapien
atacactcctcccatgggaaggtgc

SEQ ID NO: 5152866 - DNA, 25 bp, Homo sapien
tacactcctcccatgggaaggtgct

SEQ ID NO: 5152867 - DNA, 25 bp, Homo sapien
aaagccaaggaagcaagggaataca

SEQ ID NO: 5152868 - DNA, 25 bp, Homo sapien
cctaaagccaaggaagcaagggaat

SEQ ID NO: 5152869 - DNA, 25 bp, Homo sapien
tgtaaggtttcagatgtggagcagc

SEQ ID NO: 5152870 - DNA, 25 bp, Homo sapien
aaatgtaaggtttcagatgtggagc

SEQ ID NO: 5152871 - DNA, 25 bp, Homo sapien
taaaatgtaaggtttcagatgtgga

SEQ ID NO: 5152872 - DNA, 25 bp, Homo sapien
aatgtaaggtttcagatgtggagca

SEQ ID NO: 5152873 - DNA, 25 bp, Homo sapien
tgcagctggtacagagggattgagc

SEQ ID NO: 5152874 - DNA, 25 bp, Homo sapien
gacagggccttccttgcacaggtgc

SEQ ID NO: 5152875 - DNA, 25 bp, Homo sapien
agaaacctccttccagacagggcct

SEQ ID NO: 5152876 - DNA, 25 bp, Homo sapien
gattgagcgggggacctaaccagta

SEQ ID NO: 5152877 - DNA, 25 bp, Homo sapien
ctggggatggggcaacttccattct

SEQ ID NO: 5152878 - DNA, 25 bp, Homo sapien
gatggggcaacttccattctcctga

SEQ ID NO: 5152879 - DNA, 25 bp, Homo sapien
attccagatccccacagtgcatcca

SEQ ID NO: 5152880 - DNA, 25 bp, Homo sapien
catccaccacagctttagcagtgca

SEQ ID NO: 5152881 - DNA, 25 bp, Homo sapien
cacttcagtggtttctcgggtccct

SEQ ID NO: 5152882 - DNA, 25 bp, Homo sapien
gggtcaactcgacagtgtgggactt

SEQ ID NO: 5152883 - DNA, 25 bp, Homo sapien
tcaggtacgatgaatcacttcagtg

SEQ ID NO: 5152884 - DNA, 25 bp, Homo sapien
ggacttatccgcagccacactggta

SEQ ID NO: 5152885 - DNA, 25 bp, Homo sapien
tgcttcgggccttgaggggagacca

SEQ ID NO: 5152886 - DNA, 25 bp, Homo sapien
ttgaggggagaccagtccctccggc

SEQ ID NO: 5152887 - DNA, 25 bp, Homo sapien
cgctggtgccagtcctgcttcgggc

SEQ ID NO: 5152888 - DNA, 25 bp, Homo sapien
agtccctccggctctctccagtcta

SEQ ID NO: 5152889 - DNA, 25 bp, Homo sapien
caaccctgtaagaaagtaggtgcag

SEQ ID NO: 5152890 - DNA, 25 bp, Homo sapien
ccaaccctgtaagaaagtaggtgca

SEQ ID NO: 5152891 - DNA, 25 bp, Homo sapien
catgcaggcatgttataggcatcca

SEQ ID NO: 5152892 - DNA, 25 bp, Homo sapien
tgttataggcatccaaccctgtaag

SEQ ID NO: 5152893 - DNA, 25 bp, Homo sapien
cgccaggctgcggttgacaaaaatc

SEQ ID NO: 5152894 - DNA, 25 bp, Homo sapien
ccagcgccaggctgcggttgacaaa

SEQ ID NO: 5152895 - DNA, 25 bp, Homo sapien
cagccagagtgtagtccatgtcgaa

SEQ ID NO: 5152896 - DNA, 25 bp, Homo sapien
agccaaagcaacgaatcttccccag

SEQ ID NO: 5152897 - DNA, 25 bp, Homo sapien
cagaggcccggacagaatcagggct

SEQ ID NO: 5152898 - DNA, 25 bp, Homo sapien
gaggcccggacagaatcagggcttt

SEQ ID NO: 5152899 - DNA, 25 bp, Homo sapien
aggcccggacagaatcagggctttg

SEQ ID NO: 5152900 - DNA, 25 bp, Homo sapien
ctgcagaggcccggacagaatcagg

SEQ ID NO: 5152901 - DNA, 25 bp, Homo sapien
tagcgcaggatctcatgcgggtacc

SEQ ID NO: 5152902 - DNA, 25 bp, Homo sapien
gggtacccaatgcacaccaggcgct

SEQ ID NO: 5152903 - DNA, 25 bp, Homo sapien
agcagctcgaaggtcagggcctcat

SEQ ID NO: 5152904 - DNA, 25 bp, Homo sapien
gatctcatgcgggtacccaatgcac

SEQ ID NO: 5152905 - DNA, 25 bp, Homo sapien
tcccgtgggcgtccaccttcagcag

SEQ ID NO: 5152906 - DNA, 25 bp, Homo sapien
agcaggttcccatagagttcatcga

SEQ ID NO: 5152907 - DNA, 25 bp, Homo sapien
aaggtgaagccataggcacccagca

SEQ ID NO: 5152908 - DNA, 25 bp, Homo sapien
agcagcacattcccgtgggcgtcca

SEQ ID NO: 5152909 - DNA, 25 bp, Homo sapien
gaagagcatgttgagtatgtagaaa

SEQ ID NO: 5152910 - DNA, 25 bp, Homo sapien
cctctgaatgaacttgctggggtag

SEQ ID NO: 5152911 - DNA, 25 bp, Homo sapien
tatgtagaaacactgcaggtcgtcc

SEQ ID NO: 5152912 - DNA, 25 bp, Homo sapien
aaacactgcaggtcgtccctctgaa

SEQ ID NO: 5152913 - DNA, 25 bp, Homo sapien
agtccaccaagcaggcatagaggta

SEQ ID NO: 5152914 - DNA, 25 bp, Homo sapien
ttagtgtaacgggagcagccagaga

SEQ ID NO: 5152915 - DNA, 25 bp, Homo sapien
caccaagcaggcatagaggtaggtt

SEQ ID NO: 5152916 - DNA, 25 bp, Homo sapien
gccagagaagaagtccaccaagcag

SEQ ID NO: 5152917 - DNA, 25 bp, Homo sapien
tgaaatgacctccaaccctgagtcc

SEQ ID NO: 5152918 - DNA, 25 bp, Homo sapien
ccaataagggggcctgaaatgacct

SEQ ID NO: 5152919 - DNA, 25 bp, Homo sapien
ctggggcaggcaaagaggggacggg

SEQ ID NO: 5152920 - DNA, 25 bp, Homo sapien
gcctgaaatgacctccaaccctgag

SEQ ID NO: 5152921 - DNA, 25 bp, Homo sapien
cgactggtggatgttattcatggca

SEQ ID NO: 5152922 - DNA, 25 bp, Homo sapien
cccatgctgatagccggtgtcacaa

SEQ ID NO: 5152923 - DNA, 25 bp, Homo sapien
gaggttcccatgctgatagccggtg

SEQ ID NO: 5152924 - DNA, 25 bp, Homo sapien
ttcatggcatcagtcacatcctgga

SEQ ID NO: 5152925 - DNA, 25 bp, Homo sapien
ttcacatatttctccaagtcctcca

SEQ ID NO: 5152926 - DNA, 25 bp, Homo sapien
tcttcacatatttctccaagtcctc

SEQ ID NO: 5152927 - DNA, 25 bp, Homo sapien
cctccagggtcttcttgagacagcc

SEQ ID NO: 5152928 - DNA, 25 bp, Homo sapien
ccttcttcacatatttctccaagtc

SEQ ID NO: 5152929 - DNA, 25 bp, Homo sapien
cctaaacctcgaagaaagccagaga

SEQ ID NO: 5152930 - DNA, 25 bp, Homo sapien
agccagagaagggttgcgggggcag

SEQ ID NO: 5152931 - DNA, 25 bp, Homo sapien
agcctaaacctcgaagaaagccaga

SEQ ID NO: 5152932 - DNA, 25 bp, Homo sapien
tcagcctaaacctcgaagaaagcca

SEQ ID NO: 5152933 - DNA, 25 bp, Homo sapien
attggtgtagttgtagctgctgttg

SEQ ID NO: 5152934 - DNA, 25 bp, Homo sapien
ttgtagctgctgttggtggccagaa

SEQ ID NO: 5152935 - DNA, 25 bp, Homo sapien
aacactttcccaacctccttcatct

SEQ ID NO: 5152936 - DNA, 25 bp, Homo sapien
tggtggccagaaacactttcccaac

SEQ ID NO: 5152937 - DNA, 25 bp, Homo sapien
cactgatgctgaacaggtaggtcat

SEQ ID NO: 5152938 - DNA, 25 bp, Homo sapien
ctgatgctgaacaggtaggtcatga

SEQ ID NO: 5152939 - DNA, 25 bp, Homo sapien
tgctgaacaggtaggtcatgatggc

SEQ ID NO: 5152940 - DNA, 25 bp, Homo sapien
ctcactgatgctgaacaggtaggtc

SEQ ID NO: 5152941 - DNA, 25 bp, Homo sapien
aacctcccagctggatgagacctct

SEQ ID NO: 5152942 - DNA, 25 bp, Homo sapien
gtggcaccagcacggctacctagtt

SEQ ID NO: 5152943 - DNA, 25 bp, Homo sapien
tgggtgttgaacatcatgtgcagcc

SEQ ID NO: 5152944 - DNA, 25 bp, Homo sapien
tcagcatcgtggtgcagcctggcac

SEQ ID NO: 5152945 - DNA, 25 bp, Homo sapien
gatcaggtcaaagtaggacctccag

SEQ ID NO: 5152946 - DNA, 25 bp, Homo sapien
caggtcaaagtaggacctccagggc

SEQ ID NO: 5152947 - DNA, 25 bp, Homo sapien
accacgatcaggtcaaagtaggacc

SEQ ID NO: 5152948 - DNA, 25 bp, Homo sapien
cacgatcaggtcaaagtaggacctc

SEQ ID NO: 5152949 - DNA, 25 bp, Homo sapien
tataaaggcaggtcaagtctaaggg

SEQ ID NO: 5152950 - DNA, 25 bp, Homo sapien
tagctagggagggtcgcagggagct

SEQ ID NO: 5152951 - DNA, 25 bp, Homo sapien
ccaaccgtggtccatgggtgcaggt

SEQ ID NO: 5152952 - DNA, 25 bp, Homo sapien
ggagaaccacatctttggtctctag

SEQ ID NO: 5152953 - DNA, 25 bp, Homo sapien
cctgtgtaggtgcccacgtggagct

SEQ ID NO: 5152954 - DNA, 25 bp, Homo sapien
gtgtaggtgcccacgtggagctttc

SEQ ID NO: 5152955 - DNA, 25 bp, Homo sapien
tgtgtaggtgcccacgtggagcttt

SEQ ID NO: 5152956 - DNA, 25 bp, Homo sapien
gccctgtgtaggtgcccacgtggag

SEQ ID NO: 5152957 - DNA, 25 bp, Homo sapien
tggtccccaatgtacaggatgtcca

SEQ ID NO: 5152958 - DNA, 25 bp, Homo sapien
ccctgacgcttcttggacttgagaa

SEQ ID NO: 5152959 - DNA, 25 bp, Homo sapien
cagctcgcacaccatgtccgaagag

SEQ ID NO: 5152960 - DNA, 25 bp, Homo sapien
aaatgtggtccccaatgtacaggat

SEQ ID NO: 5152961 - DNA, 25 bp, Homo sapien
tggtatatgtctgccaggtgcgtgt

SEQ ID NO: 5152962 - DNA, 25 bp, Homo sapien
tgccaggtgcgtgtccagtctcttc

SEQ ID NO: 5152963 - DNA, 25 bp, Homo sapien
tgacttgcagctcacaactgctccc

SEQ ID NO: 5152964 - DNA, 25 bp, Homo sapien
atgacttgcagctcacaactgctcc

SEQ ID NO: 5152965 - DNA, 25 bp, Homo sapien
gatgacttgcagctcacaactgctc

SEQ ID NO: 5152966 - DNA, 25 bp, Homo sapien
gggggacattgaaacctgtgactct

SEQ ID NO: 5152967 - DNA, 25 bp, Homo sapien
cgggggacattgaaacctgtgactc

SEQ ID NO: 5152968 - DNA, 25 bp, Homo sapien
agaagagtgtctggcggaaaccgca

SEQ ID NO: 5152969 - DNA, 25 bp, Homo sapien
cagtgtagaggtcggcatagcgcat

SEQ ID NO: 5152970 - DNA, 25 bp, Homo sapien
accgcagcggaacaagctgcccatg

SEQ ID NO: 5152971 - DNA, 25 bp, Homo sapien
catggtgctgtagcacaggtccagc

SEQ ID NO: 5152972 - DNA, 25 bp, Homo sapien
attccgcagggacccaccaactccg

SEQ ID NO: 5152973 - DNA, 25 bp, Homo sapien
tcacaaacagccgtggagattccgc

SEQ ID NO: 5152974 - DNA, 25 bp, Homo sapien
acaaacagccgtggagattccgcag

SEQ ID NO: 5152975 - DNA, 25 bp, Homo sapien
acagccgtggagattccgcagggac

SEQ ID NO: 5152976 - DNA, 25 bp, Homo sapien
gctccacaactgactcatgtggcat

SEQ ID NO: 5152977 - DNA, 25 bp, Homo sapien
cttgctccacaactgactcatgtgg

SEQ ID NO: 5152978 - DNA, 25 bp, Homo sapien
gtctagattggcctgttcttgctcc

SEQ ID NO: 5152979 - DNA, 25 bp, Homo sapien
gcaggaggcagggtctagattggcc

SEQ ID NO: 5152980 - DNA, 25 bp, Homo sapien
tctaggttaagagcaatactgcctc

SEQ ID NO: 5152981 - DNA, 25 bp, Homo sapien
ctaaaagaagtgtttgcaggctcca

SEQ ID NO: 5152982 - DNA, 25 bp, Homo sapien
gagaagcttctaacacattcgagag

SEQ ID NO: 5152983 - DNA, 25 bp, Homo sapien
caggattccgtcagcctcgatgtaa

SEQ ID NO: 5152984 - DNA, 25 bp, Homo sapien
tcagaaccaacataagacaagaaat

SEQ ID NO: 5152985 - DNA, 25 bp, Homo sapien
cgctgcctgtaacattggggtttca

SEQ ID NO: 5152986 - DNA, 25 bp, Homo sapien
tccgtagaaatgaggcgctgcctgt

SEQ ID NO: 5152987 - DNA, 25 bp, Homo sapien
tttcaaacccctgaatcataatttc

SEQ ID NO: 5152988 - DNA, 25 bp, Homo sapien
tgaaatttatcactcctgtacggcg

SEQ ID NO: 5152989 - DNA, 25 bp, Homo sapien
gatgccggaagtgcaagacatgaaa

SEQ ID NO: 5152990 - DNA, 25 bp, Homo sapien
agtgtcccgctacccagaaatgctg

SEQ ID NO: 5152991 - DNA, 25 bp, Homo sapien
ctctcagaataaatgggatgccgga

SEQ ID NO: 5152992 - DNA, 25 bp, Homo sapien
cttccttggaatcctagatggcaga

SEQ ID NO: 5152993 - DNA, 25 bp, Homo sapien
agctgtaccagtaaaaatcatccag

SEQ ID NO: 5152994 - DNA, 25 bp, Homo sapien
tcttgcaagactcaaacagaaccac

SEQ ID NO: 5152995 - DNA, 25 bp, Homo sapien
gccaatacaagagttgcggaaagtt

SEQ ID NO: 5152996 - DNA, 25 bp, Homo sapien
caagccagaagggaaccaaaccagt

SEQ ID NO: 5152997 - DNA, 25 bp, Homo sapien
catggtagtgctccccattcgttgg

SEQ ID NO: 5152998 - DNA, 25 bp, Homo sapien
tgtcactgtcctgcttacggcacaa

SEQ ID NO: 5152999 - DNA, 25 bp, Homo sapien
cagatgtattcttcagcgctgtcca

SEQ ID NO: 5153000 - DNA, 25 bp, Homo sapien
caactgtaaggaaggcatactaccc

SEQ ID NO: 5153001 - DNA, 25 bp, Homo sapien
gaaatatgccaaagtctgtcactgg

SEQ ID NO: 5153002 - DNA, 25 bp, Homo sapien
catactacccagcagatgatggagg

SEQ ID NO: 5153003 - DNA, 25 bp, Homo sapien
ccactgggtctaggagaacaaagag

SEQ ID NO: 5153004 - DNA, 25 bp, Homo sapien
caacagcagaggatcgaaggtactt

SEQ ID NO: 5153005 - DNA, 25 bp, Homo sapien
gctgatgtcacaaccgtaaatggga

SEQ ID NO: 5153006 - DNA, 25 bp, Homo sapien
gatcagaagtccagccaagtttgta

SEQ ID NO: 5153007 - DNA, 25 bp, Homo sapien
gaaactaagatacggtcataccctg

SEQ ID NO: 5153008 - DNA, 25 bp, Homo sapien
cattgctcccagaagctaaatatct

SEQ ID NO: 5153009 - DNA, 25 bp, Homo sapien
aagagatggtatgcattgctcccag

SEQ ID NO: 5153010 - DNA, 25 bp, Homo sapien
cctgaaaatgttatccctgttgaag

SEQ ID NO: 5153011 - DNA, 25 bp, Homo sapien
tgttatccctgttgaagctttcaag

SEQ ID NO: 5153012 - DNA, 25 bp, Homo sapien
caattgtcacatgaaacgcatcaca

SEQ ID NO: 5153013 - DNA, 25 bp, Homo sapien
ggcagtgagatagtgcaggtaaact

SEQ ID NO: 5153014 - DNA, 25 bp, Homo sapien
ggacccacaagctccaatcttataa

SEQ ID NO: 5153015 - DNA, 25 bp, Homo sapien
taaaacatatccagtcacccaccaa

SEQ ID NO: 5153016 - DNA, 25 bp, Homo sapien
gactcgagtatctttatgcagtgga

SEQ ID NO: 5153017 - DNA, 25 bp, Homo sapien
caaggatcctagagttactgaatga

SEQ ID NO: 5153018 - DNA, 25 bp, Homo sapien
tactgaatgatagcacgtttgaggg

SEQ ID NO: 5153019 - DNA, 25 bp, Homo sapien
cagtcttgtgatcttgggttggtca

SEQ ID NO: 5153020 - DNA, 25 bp, Homo sapien
agtaggatactttgaactagaactc

SEQ ID NO: 5153021 - DNA, 25 bp, Homo sapien
ttttttacttatgggtgagaagcca

SEQ ID NO: 5153022 - DNA, 25 bp, Homo sapien
tctcttcactaaggcaccagggtca

SEQ ID NO: 5153023 - DNA, 25 bp, Homo sapien
ccagggtcactaagtagtaggatac

SEQ ID NO: 5153024 - DNA, 25 bp, Homo sapien
agccactcttatgttgctataaaga

SEQ ID NO: 5153025 - DNA, 25 bp, Homo sapien
cccagcctgtattaagccactctta

SEQ ID NO: 5153026 - DNA, 25 bp, Homo sapien
cctgtattaagccactcttatgttg

SEQ ID NO: 5153027 - DNA, 25 bp, Homo sapien
gtattaagccactcttatgttgcta

SEQ ID NO: 5153028 - DNA, 25 bp, Homo sapien
gatgaaccacagctgtcggctccct

SEQ ID NO: 5153029 - DNA, 25 bp, Homo sapien
attccctcccatcttccggcttctg

SEQ ID NO: 5153030 - DNA, 25 bp, Homo sapien
cacaccgattttatctctacgtgga

SEQ ID NO: 5153031 - DNA, 25 bp, Homo sapien
tatctctacgtggatgaaccacagc

SEQ ID NO: 5153032 - DNA, 25 bp, Homo sapien
cagaggttgctggaaagagcaatga

SEQ ID NO: 5153033 - DNA, 25 bp, Homo sapien
atcaggccagaggttgctggaaaga

SEQ ID NO: 5153034 - DNA, 25 bp, Homo sapien
tgctggaaagagcaatgaggaacac

SEQ ID NO: 5153035 - DNA, 25 bp, Homo sapien
gcaatgaggagccggtgatgatttt

SEQ ID NO: 5153036 - DNA, 25 bp, Homo sapien
ttcatgtggtaatctgttgtgttca

SEQ ID NO: 5153037 - DNA, 25 bp, Homo sapien
tcatgtggtaatctgttgtgttcat

SEQ ID NO: 5153038 - DNA, 25 bp, Homo sapien
agcaataacaggaacagtgcctggg

SEQ ID NO: 5153039 - DNA, 25 bp, Homo sapien
cttcacaggcaatgagctctcagca

SEQ ID NO: 5153040 - DNA, 25 bp, Homo sapien
caggcaatgagctctcagcaataac

SEQ ID NO: 5153041 - DNA, 25 bp, Homo sapien
tgagctctcagcaataacaggaaca

SEQ ID NO: 5153042 - DNA, 25 bp, Homo sapien
gggtcctcagaggagagaggcctcc

SEQ ID NO: 5153043 - DNA, 25 bp, Homo sapien
gaggagagaggcctccacagtggac

SEQ ID NO: 5153044 - DNA, 25 bp, Homo sapien
ggagagaggcctccacagtggacac

SEQ ID NO: 5153045 - DNA, 25 bp, Homo sapien
acatgggtcctcagaggagagaggc

SEQ ID NO: 5153046 - DNA, 25 bp, Homo sapien
gcagaatggccacaggccttaaaac

SEQ ID NO: 5153047 - DNA, 25 bp, Homo sapien
cgaatgcagaatggccacaggcctt

SEQ ID NO: 5153048 - DNA, 25 bp, Homo sapien
ccgaatgcagaatggccacaggcct

SEQ ID NO: 5153049 - DNA, 25 bp, Homo sapien
aatgcagaatggccacaggccttaa

SEQ ID NO: 5153050 - DNA, 25 bp, Homo sapien
taagttggagcccaagaagaggcac

SEQ ID NO: 5153051 - DNA, 25 bp, Homo sapien
agtcttttgtacgtggtacttgccg

SEQ ID NO: 5153052 - DNA, 25 bp, Homo sapien
agggcagcaggtccatccttcactc

SEQ ID NO: 5153053 - DNA, 25 bp, Homo sapien
tcttccacctctaagttggagccca

SEQ ID NO: 5153054 - DNA, 25 bp, Homo sapien
ttgtatccctgatcatgaaaaagac

SEQ ID NO: 5153055 - DNA, 25 bp, Homo sapien
taagtctgccttggcaggcacttgc

SEQ ID NO: 5153056 - DNA, 25 bp, Homo sapien
aagggaactcaattaactatgctag

SEQ ID NO: 5153057 - DNA, 25 bp, Homo sapien
tactttaaaaggacatgtgcccagc

SEQ ID NO: 5153058 - DNA, 25 bp, Homo sapien
cacggccacatttggttctaagaaa

SEQ ID NO: 5153059 - DNA, 25 bp, Homo sapien
tcccacattctgatgagcaaccgct

SEQ ID NO: 5153060 - DNA, 25 bp, Homo sapien
tactcacttaaagcccgcctgacag

SEQ ID NO: 5153061 - DNA, 25 bp, Homo sapien
aatccccagcccttttgttgagcca

SEQ ID NO: 5153062 - DNA, 25 bp, Homo sapien
gacaaggtcttattggtctcccaga

SEQ ID NO: 5153063 - DNA, 25 bp, Homo sapien
gacatagagtaggagagccctgcca

SEQ ID NO: 5153064 - DNA, 25 bp, Homo sapien
cccactaggtgtgagaaaagacata

SEQ ID NO: 5153065 - DNA, 25 bp, Homo sapien
tccagaccctggataagtggtacca

SEQ ID NO: 5153066 - DNA, 25 bp, Homo sapien
ggtgaacagtatatgccagccctga

SEQ ID NO: 5153067 - DNA, 25 bp, Homo sapien
gatgttcaagactcacacagcacag

SEQ ID NO: 5153068 - DNA, 25 bp, Homo sapien
ggatgatattcacggagcaccacca

SEQ ID NO: 5153069 - DNA, 25 bp, Homo sapien
tattaaaggtgcagaattcccatgg

SEQ ID NO: 5153070 - DNA, 25 bp, Homo sapien
acacagcaaaggtggcaccacccat

SEQ ID NO: 5153071 - DNA, 25 bp, Homo sapien
acaggtatttctggtaagacacagc

SEQ ID NO: 5153072 - DNA, 25 bp, Homo sapien
ctgccacaggtatttctggtaagac

SEQ ID NO: 5153073 - DNA, 25 bp, Homo sapien
agacacagcaaaggtggcaccaccc

SEQ ID NO: 5153074 - DNA, 25 bp, Homo sapien
gagattcgatggcagcaatgaagac

SEQ ID NO: 5153075 - DNA, 25 bp, Homo sapien
ctgtgaccactgatccctgttgggt

SEQ ID NO: 5153076 - DNA, 25 bp, Homo sapien
catcagagattcgatggcagcaatg

SEQ ID NO: 5153077 - DNA, 25 bp, Homo sapien
ctgttgggtgaccactgacatcaga

SEQ ID NO: 5153078 - DNA, 25 bp, Homo sapien
tggaaaactcaagacgtccctgatc

SEQ ID NO: 5153079 - DNA, 25 bp, Homo sapien
caatgcaggtctccattcggacaaa

SEQ ID NO: 5153080 - DNA, 25 bp, Homo sapien
ccattcggacaaaggcctcagggaa

SEQ ID NO: 5153081 - DNA, 25 bp, Homo sapien
agacgtccctgatcctgagcctgag

SEQ ID NO: 5153082 - DNA, 25 bp, Homo sapien
ttagctatggaacccacagcatggg

SEQ ID NO: 5153083 - DNA, 25 bp, Homo sapien
caaacccaggctgtcgtggtaggaa

SEQ ID NO: 5153084 - DNA, 25 bp, Homo sapien
tttagggctctcatgcagcagacgg

SEQ ID NO: 5153085 - DNA, 25 bp, Homo sapien
gaagaccgctcactaccgttctaga

SEQ ID NO: 5153086 - DNA, 25 bp, Homo sapien
ggattatggaagatggtatcaattt

SEQ ID NO: 5153087 - DNA, 25 bp, Homo sapien
gattatggaagatggtatcaatttt

SEQ ID NO: 5153088 - DNA, 25 bp, Homo sapien
attatggaagatggtatcaattttt

SEQ ID NO: 5153089 - DNA, 25 bp, Homo sapien
aggattatggaagatggtatcaatt

SEQ ID NO: 5153090 - DNA, 25 bp, Homo sapien
ttttcttaatgtctttgaaactgaa

SEQ ID NO: 5153091 - DNA, 25 bp, Homo sapien
tattttcttaatgtctttgaaactg

SEQ ID NO: 5153092 - DNA, 25 bp, Homo sapien
tcttaatgtctttgaaactgaaccc

SEQ ID NO: 5153093 - DNA, 25 bp, Homo sapien
ttaatgtctttgaaactgaacccca

SEQ ID NO: 5153094 - DNA, 25 bp, Homo sapien
tcccagatgtctgaattttttcctc

SEQ ID NO: 5153095 - DNA, 25 bp, Homo sapien
ctgcaatcagaacctcaagtgattt

SEQ ID NO: 5153096 - DNA, 25 bp, Homo sapien
ccagatgtctgaattttttcctcca

SEQ ID NO: 5153097 - DNA, 25 bp, Homo sapien
agtgatttacagttgctcccagatg

SEQ ID NO: 5153098 - DNA, 25 bp, Homo sapien
gagacatttgtcaaccacttcagca

SEQ ID NO: 5153099 - DNA, 25 bp, Homo sapien
gacatttgtcaaccacttcagcaca

SEQ ID NO: 5153100 - DNA, 25 bp, Homo sapien
cacttgagacatttgtcaaccactt

SEQ ID NO: 5153101 - DNA, 25 bp, Homo sapien
ttgagacatttgtcaaccacttcag

SEQ ID NO: 5153102 - DNA, 25 bp, Homo sapien
tttttttgcttgaaagtaatgactg

SEQ ID NO: 5153103 - DNA, 25 bp, Homo sapien
ttttgcttgaaagtaatgactgcgt

SEQ ID NO: 5153104 - DNA, 25 bp, Homo sapien
ttgcttgaaagtaatgactgcgtac

SEQ ID NO: 5153105 - DNA, 25 bp, Homo sapien
tttttgcttgaaagtaatgactgcg

SEQ ID NO: 5153106 - DNA, 25 bp, Homo sapien
accatgcccagccatgtttaaatct

SEQ ID NO: 5153107 - DNA, 25 bp, Homo sapien
atgcccagccatgtttaaatcttta

SEQ ID NO: 5153108 - DNA, 25 bp, Homo sapien
gctaaccagttttcccaacatcatt

SEQ ID NO: 5153109 - DNA, 25 bp, Homo sapien
atggctaaccagttttcccaacatc

SEQ ID NO: 5153110 - DNA, 25 bp, Homo sapien
ccatagctataacttccagaagcct

SEQ ID NO: 5153111 - DNA, 25 bp, Homo sapien
aaatttttatcttgaccatagctat

SEQ ID NO: 5153112 - DNA, 25 bp, Homo sapien
taaaacacttgatgaaaggtcattg

SEQ ID NO: 5153113 - DNA, 25 bp, Homo sapien
aaacacttgatgaaaggtcattgta

SEQ ID NO: 5153114 - DNA, 25 bp, Homo sapien
aatggctaattatcctggctgattt

SEQ ID NO: 5153115 - DNA, 25 bp, Homo sapien
ctagagtgcaacgacagatcacagc

SEQ ID NO: 5153116 - DNA, 25 bp, Homo sapien
gaaaatggctaattatcctggctga

SEQ ID NO: 5153117 - DNA, 25 bp, Homo sapien
aaaatggctaattatcctggctgat

SEQ ID NO: 5153118 - DNA, 25 bp, Homo sapien
tcttttcagggactagaccccatcc

SEQ ID NO: 5153119 - DNA, 25 bp, Homo sapien
tctccctagaggtctgaagggttgg

SEQ ID NO: 5153120 - DNA, 25 bp, Homo sapien
gggaggattcattacataggtatca

SEQ ID NO: 5153121 - DNA, 25 bp, Homo sapien
gccctgccatgagttagctcattaa

SEQ ID NO: 5153122 - DNA, 25 bp, Homo sapien
tgctctcttgcaccctctaccaggg

SEQ ID NO: 5153123 - DNA, 25 bp, Homo sapien
taccagggctaaccggcctgctcac

SEQ ID NO: 5153124 - DNA, 25 bp, Homo sapien
gcagattccgcactgctctcttgca

SEQ ID NO: 5153125 - DNA, 25 bp, Homo sapien
gtctccctggcagattccgcactgc

SEQ ID NO: 5153126 - DNA, 25 bp, Homo sapien
ccaggcccctttagatccccaatat

SEQ ID NO: 5153127 - DNA, 25 bp, Homo sapien
caggcccctttagatccccaatatt

SEQ ID NO: 5153128 - DNA, 25 bp, Homo sapien
gtttctcccaacttgacctgattct

SEQ ID NO: 5153129 - DNA, 25 bp, Homo sapien
caagtttctcccaacttgacctgat

SEQ ID NO: 5153130 - DNA, 25 bp, Homo sapien
caagaacagaatagctgcctcttcc

SEQ ID NO: 5153131 - DNA, 25 bp, Homo sapien
gaacagaatagctgcctcttccttt

SEQ ID NO: 5153132 - DNA, 25 bp, Homo sapien
aagaacagaatagctgcctcttcct

SEQ ID NO: 5153133 - DNA, 25 bp, Homo sapien
gccaagaacagaatagctgcctctt

SEQ ID NO: 5153134 - DNA, 25 bp, Homo sapien
actgttactgcccattttgcatgtg

SEQ ID NO: 5153135 - DNA, 25 bp, Homo sapien
cactgttactgcccattttgcatgt

SEQ ID NO: 5153136 - DNA, 25 bp, Homo sapien
gccactgttactgcccattttgcat

SEQ ID NO: 5153137 - DNA, 25 bp, Homo sapien
ctgccactgttactgcccattttgc

SEQ ID NO: 5153138 - DNA, 25 bp, Homo sapien
ctggcccgtgttccttaatatcatg

SEQ ID NO: 5153139 - DNA, 25 bp, Homo sapien
ttactggcccgtgttccttaatatc

SEQ ID NO: 5153140 - DNA, 25 bp, Homo sapien
attgcttggagggttactggcccgt

SEQ ID NO: 5153141 - DNA, 25 bp, Homo sapien
ccattgcttggagggttactggccc

SEQ ID NO: 5153142 - DNA, 25 bp, Homo sapien
gatgggaccctctggtagcttgaca

SEQ ID NO: 5153143 - DNA, 25 bp, Homo sapien
gcttcaaagaagatccaagcaccga

SEQ ID NO: 5153144 - DNA, 25 bp, Homo sapien
ctcatctgatctgtcatggagggct

SEQ ID NO: 5153145 - DNA, 25 bp, Homo sapien
cacatgggcggacccagattcctct

SEQ ID NO: 5153146 - DNA, 25 bp, Homo sapien
ggtgatgcgccctcaactgtgggaa

SEQ ID NO: 5153147 - DNA, 25 bp, Homo sapien
gccctcaactgtgggaatgagcccc

SEQ ID NO: 5153148 - DNA, 25 bp, Homo sapien
tggacaatcaacatgaactcctcac

SEQ ID NO: 5153149 - DNA, 25 bp, Homo sapien
ttttcctcctggacaatcaacatga

SEQ ID NO: 5153150 - DNA, 25 bp, Homo sapien
aatggcagcaaaggtctgggcagaa

SEQ ID NO: 5153151 - DNA, 25 bp, Homo sapien
ctaaaaacagcagaacagcaagaaa

SEQ ID NO: 5153152 - DNA, 25 bp, Homo sapien
agcagaacagcaagaaatggcagca

SEQ ID NO: 5153153 - DNA, 25 bp, Homo sapien
cagcaaaggtctgggcagaatcatc

SEQ ID NO: 5153154 - DNA, 25 bp, Homo sapien
tctgggatgggtggacgataaaacc

SEQ ID NO: 5153155 - DNA, 25 bp, Homo sapien
ccctggtgcaaaggaagaggctctg

SEQ ID NO: 5153156 - DNA, 25 bp, Homo sapien
catctgagcgtggagaggactttgc

SEQ ID NO: 5153157 - DNA, 25 bp, Homo sapien
tccaacagataggaagaggctgccc

SEQ ID NO: 5153158 - DNA, 25 bp, Homo sapien
gaaatcgctgatttaacagcagtca

SEQ ID NO: 5153159 - DNA, 25 bp, Homo sapien
gcttcctattggctacctctccaca

SEQ ID NO: 5153160 - DNA, 25 bp, Homo sapien
gatttaacagcagtcaatatcccaa

SEQ ID NO: 5153161 - DNA, 25 bp, Homo sapien
acagggagaaatcgctgatttaaca

SEQ ID NO: 5153162 - DNA, 25 bp, Homo sapien
aagccctgtgattggcacgtactgg

SEQ ID NO: 5153163 - DNA, 25 bp, Homo sapien
ttccttggcccaaaagctaggaagc

SEQ ID NO: 5153164 - DNA, 25 bp, Homo sapien
tgggaatctggtaaaactgctcagt

SEQ ID NO: 5153165 - DNA, 25 bp, Homo sapien
gggaatctggtaaaactgctcagtc

SEQ ID NO: 5153166 - DNA, 25 bp, Homo sapien
tgacaggaaagccggtgttaaagta

SEQ ID NO: 5153167 - DNA, 25 bp, Homo sapien
atgacaggaaagccggtgttaaagt

SEQ ID NO: 5153168 - DNA, 25 bp, Homo sapien
gatgacaggaaagccggtgttaaag

SEQ ID NO: 5153169 - DNA, 25 bp, Homo sapien
gtagggtggtgagacaaggacacca

SEQ ID NO: 5153170 - DNA, 25 bp, Homo sapien
gaggtggaggatcacaggtgagtca

SEQ ID NO: 5153171 - DNA, 25 bp, Homo sapien
aggtggaggatcacaggtgagtcaa

SEQ ID NO: 5153172 - DNA, 25 bp, Homo sapien
ggaggtggaggatcacaggtgagtc

SEQ ID NO: 5153173 - DNA, 25 bp, Homo sapien
taccccattccaggaacttgggcca

SEQ ID NO: 5153174 - DNA, 25 bp, Homo sapien
gtgctgacatagtaataccccattc

SEQ ID NO: 5153175 - DNA, 25 bp, Homo sapien
gcatttctgggttaaggggcagcca

SEQ ID NO: 5153176 - DNA, 25 bp, Homo sapien
agtgattgtcctcaatgcttgaggc

SEQ ID NO: 5153177 - DNA, 25 bp, Homo sapien
tttcaacgttgagtttattactcaa

SEQ ID NO: 5153178 - DNA, 25 bp, Homo sapien
ttattactcaacagaaaatggaatg

SEQ ID NO: 5153179 - DNA, 25 bp, Homo sapien
caacgttgagtttattactcaacag

SEQ ID NO: 5153180 - DNA, 25 bp, Homo sapien
cgttgagtttattactcaacagaaa

SEQ ID NO: 5153181 - DNA, 25 bp, Homo sapien
actcctgagttctcccccacaaagg

SEQ ID NO: 5153182 - DNA, 25 bp, Homo sapien
ctcctgagttctcccccacaaagga

SEQ ID NO: 5153183 - DNA, 25 bp, Homo sapien
ttcactcctgagttctcccccacaa

SEQ ID NO: 5153184 - DNA, 25 bp, Homo sapien
tcactcctgagttctcccccacaaa

SEQ ID NO: 5153185 - DNA, 25 bp, Homo sapien
tgtgaacaaaattcatggtggggag

SEQ ID NO: 5153186 - DNA, 25 bp, Homo sapien
gtgaacaaaattcatggtggggagg

SEQ ID NO: 5153187 - DNA, 25 bp, Homo sapien
tcttaagcgcttcttaaagctgttc

SEQ ID NO: 5153188 - DNA, 25 bp, Homo sapien
ctcttaagcgcttcttaaagctgtt

SEQ ID NO: 5153189 - DNA, 25 bp, Homo sapien
gaatgctgaatttcttcgggtttaa

SEQ ID NO: 5153190 - DNA, 25 bp, Homo sapien
agtactttgtgatcctggtcatgaa

SEQ ID NO: 5153191 - DNA, 25 bp, Homo sapien
tgggcgtatgtagtttttatctgga

SEQ ID NO: 5153192 - DNA, 25 bp, Homo sapien
aggaccagtactttgtgatcctggt

SEQ ID NO: 5153193 - DNA, 25 bp, Homo sapien
ccctgctaggtggaggcagaaaaca

SEQ ID NO: 5153194 - DNA, 25 bp, Homo sapien
ctaggtggaggcagaaaacacagcc

SEQ ID NO: 5153195 - DNA, 25 bp, Homo sapien
ctgctaggtggaggcagaaaacaca

SEQ ID NO: 5153196 - DNA, 25 bp, Homo sapien
aaacacagccaaaactgagagtcac

SEQ ID NO: 5153197 - DNA, 25 bp, Homo sapien
cagtagagacaaaactcccctttag

SEQ ID NO: 5153198 - DNA, 25 bp, Homo sapien
ttcagctgaagggatggatgacttt

SEQ ID NO: 5153199 - DNA, 25 bp, Homo sapien
cctttatccttgtcacagtagagac

SEQ ID NO: 5153200 - DNA, 25 bp, Homo sapien
ggacttcctttctccgcagaggctg

SEQ ID NO: 5153201 - DNA, 25 bp, Homo sapien
gtctccccgctgtgaggagtctctc

SEQ ID NO: 5153202 - DNA, 25 bp, Homo sapien
tgtctccccgctgtgaggagtctct

SEQ ID NO: 5153203 - DNA, 25 bp, Homo sapien
aattgtgttgcttgccacatggagg

SEQ ID NO: 5153204 - DNA, 25 bp, Homo sapien
cctggcccaattgtgttgcttgcca

SEQ ID NO: 5153205 - DNA, 25 bp, Homo sapien
tgctgattccttttgggcagccagc

SEQ ID NO: 5153206 - DNA, 25 bp, Homo sapien
tgaagggccggcgtgctgattcctt

SEQ ID NO: 5153207 - DNA, 25 bp, Homo sapien
ccggcgtgctgattccttttgggca

SEQ ID NO: 5153208 - DNA, 25 bp, Homo sapien
agggccggcgtgctgattccttttg

SEQ ID NO: 5153209 - DNA, 25 bp, Homo sapien
ttacaattgcaggaggtgcagatga

SEQ ID NO: 5153210 - DNA, 25 bp, Homo sapien
gttctcaaatttatctgtcacccca

SEQ ID NO: 5153211 - DNA, 25 bp, Homo sapien
cagatgaaccatccggggtgagccg

SEQ ID NO: 5153212 - DNA, 25 bp, Homo sapien
tgcaaactggttgaaatgaaaattc

SEQ ID NO: 5153213 - DNA, 25 bp, Homo sapien
tcaaattagcgaggaaggcgttcaa

SEQ ID NO: 5153214 - DNA, 25 bp, Homo sapien
aattagcgaggaaggcgttcaatgg

SEQ ID NO: 5153215 - DNA, 25 bp, Homo sapien
ttagttcaaattagcgaggaaggcg

SEQ ID NO: 5153216 - DNA, 25 bp, Homo sapien
caattagttcaaattagcgaggaag

SEQ ID NO: 5153217 - DNA, 25 bp, Homo sapien
ggccatggtcagtaagccccatctc

SEQ ID NO: 5153218 - DNA, 25 bp, Homo sapien
tggcctgcatgttcggcctcctcaa

SEQ ID NO: 5153219 - DNA, 25 bp, Homo sapien
catggtcagtaagccccatctcctt

SEQ ID NO: 5153220 - DNA, 25 bp, Homo sapien
tccatttggcctgcatgttcggcct

SEQ ID NO: 5153221 - DNA, 25 bp, Homo sapien
gaccagctgtgaaaggagcttctgg

SEQ ID NO: 5153222 - DNA, 25 bp, Homo sapien
ctgtgaaaggagcttctggttggaa

SEQ ID NO: 5153223 - DNA, 25 bp, Homo sapien
ggaggagtgaccagctgtgaaagga

SEQ ID NO: 5153224 - DNA, 25 bp, Homo sapien
gagtgaccagctgtgaaaggagctt

SEQ ID NO: 5153225 - DNA, 25 bp, Homo sapien
tgcccccttggtgcaactgacatct

SEQ ID NO: 5153226 - DNA, 25 bp, Homo sapien
aggaccatgacggtgcactgaacag

SEQ ID NO: 5153227 - DNA, 25 bp, Homo sapien
gcccctgcatggagccgctctgata

SEQ ID NO: 5153228 - DNA, 25 bp, Homo sapien
ctgaacagtcccttctgcatggtca

SEQ ID NO: 5153229 - DNA, 25 bp, Homo sapien
caacggttttcacgggcctgacaga

SEQ ID NO: 5153230 - DNA, 25 bp, Homo sapien
tattatcagaatgctgcgacacctg

SEQ ID NO: 5153231 - DNA, 25 bp, Homo sapien
taaatatcccatgacacctcgtgag

SEQ ID NO: 5153232 - DNA, 25 bp, Homo sapien
gagtgtgctgaggtgccctacagtc

SEQ ID NO: 5153233 - DNA, 25 bp, Homo sapien
cattgagtattctgtccagccagtc

SEQ ID NO: 5153234 - DNA, 25 bp, Homo sapien
ccagtcatggtaataaggattacca

SEQ ID NO: 5153235 - DNA, 25 bp, Homo sapien
tagtaagaaacttctgaagcaagtg

SEQ ID NO: 5153236 - DNA, 25 bp, Homo sapien
tattgggtccatagtaagaaacttc

SEQ ID NO: 5153237 - DNA, 25 bp, Homo sapien
ggtagctgagtatcctacactgctc

SEQ ID NO: 5153238 - DNA, 25 bp, Homo sapien
cagcattcacaacagtgcacggaca

SEQ ID NO: 5153239 - DNA, 25 bp, Homo sapien
ttcccacggagagctgcacagtcag

SEQ ID NO: 5153240 - DNA, 25 bp, Homo sapien
tgcagctcagtacccgtgtgtctga

SEQ ID NO: 5153241 - DNA, 25 bp, Homo sapien
tgcacggacaagattccgatgcagc

SEQ ID NO: 5153242 - DNA, 25 bp, Homo sapien
tggagctactggcagagctgcgctt

SEQ ID NO: 5153243 - DNA, 25 bp, Homo sapien
tgtagaacatcacgacttaacagct

SEQ ID NO: 5153244 - DNA, 25 bp, Homo sapien
gcgccatgacattgaatggccacat

SEQ ID NO: 5153245 - DNA, 25 bp, Homo sapien
aggaccagtagagggcgccatgaca

SEQ ID NO: 5153246 - DNA, 25 bp, Homo sapien
tttcatgaatgcacacgtttggttc

SEQ ID NO: 5153247 - DNA, 25 bp, Homo sapien
tgcttgctcacagaagtttcatgaa

SEQ ID NO: 5153248 - DNA, 25 bp, Homo sapien
gtttggttcatcacaaatgtctaag

SEQ ID NO: 5153249 - DNA, 25 bp, Homo sapien
tcatcacaaatgtctaagagagcca

SEQ ID NO: 5153250 - DNA, 25 bp, Homo sapien
tccacactctcatcaggatcctgcc

SEQ ID NO: 5153251 - DNA, 25 bp, Homo sapien
catccacactctcatcaggatcctg

SEQ ID NO: 5153252 - DNA, 25 bp, Homo sapien
cacactctcatcaggatcctgcctg

SEQ ID NO: 5153253 - DNA, 25 bp, Homo sapien
acactctcatcaggatcctgcctga

SEQ ID NO: 5153254 - DNA, 25 bp, Homo sapien
ccaccagccagtccaactgtgctac

SEQ ID NO: 5153255 - DNA, 25 bp, Homo sapien
cagtccaactgtgctacctgcacag

SEQ ID NO: 5153256 - DNA, 25 bp, Homo sapien
gtccaactgtgctacctgcacagca

SEQ ID NO: 5153257 - DNA, 25 bp, Homo sapien
agccagtccaactgtgctacctgca

SEQ ID NO: 5153258 - DNA, 25 bp, Homo sapien
gccacctgcagtgttagcaccttaa

SEQ ID NO: 5153259 - DNA, 25 bp, Homo sapien
ttaagctgagttccttgcaccagga

SEQ ID NO: 5153260 - DNA, 25 bp, Homo sapien
aggatgctgtcacgcccagtcagtg

SEQ ID NO: 5153261 - DNA, 25 bp, Homo sapien
tatctggtgacaggtaacagggccg

SEQ ID NO: 5153262 - DNA, 25 bp, Homo sapien
ggaatacagccattagcatcatcca

SEQ ID NO: 5153263 - DNA, 25 bp, Homo sapien
ctactgggaatacagccattagcat

SEQ ID NO: 5153264 - DNA, 25 bp, Homo sapien
actgggaatacagccattagcatca

SEQ ID NO: 5153265 - DNA, 25 bp, Homo sapien
tgggaatacagccattagcatcatc

SEQ ID NO: 5153266 - DNA, 25 bp, Homo sapien
ggccaagtcccccaggatgctattc

SEQ ID NO: 5153267 - DNA, 25 bp, Homo sapien
ccacagagcccagtgcttggtgact

SEQ ID NO: 5153268 - DNA, 25 bp, Homo sapien
caggtcaatttgagaattgccccac

SEQ ID NO: 5153269 - DNA, 25 bp, Homo sapien
tgggactcagttgggaagagattgg

SEQ ID NO: 5153270 - DNA, 25 bp, Homo sapien
ctgtgtagatgggagggaaacagtt

SEQ ID NO: 5153271 - DNA, 25 bp, Homo sapien
gtgtagatgggagggaaacagttac

SEQ ID NO: 5153272 - DNA, 25 bp, Homo sapien
ggagggaaacagttacaggactgac

SEQ ID NO: 5153273 - DNA, 25 bp, Homo sapien
gatgggagggaaacagttacaggac

SEQ ID NO: 5153274 - DNA, 25 bp, Homo sapien
ctgacagcttgcttttctcagcctt

SEQ ID NO: 5153275 - DNA, 25 bp, Homo sapien
gcttgcttttctcagccttctttgc

SEQ ID NO: 5153276 - DNA, 25 bp, Homo sapien
acagcttgcttttctcagccttctt

SEQ ID NO: 5153277 - DNA, 25 bp, Homo sapien
ttgcttttctcagccttctttgcat

SEQ ID NO: 5153278 - DNA, 25 bp, Homo sapien
tggaacatgccctttaagcctctgc

SEQ ID NO: 5153279 - DNA, 25 bp, Homo sapien
agcctctgccatggataccaagttt

SEQ ID NO: 5153280 - DNA, 25 bp, Homo sapien
ctggaacatgccctttaagcctctg

SEQ ID NO: 5153281 - DNA, 25 bp, Homo sapien
catggataccaagtttcaaaagtag

SEQ ID NO: 5153282 - DNA, 25 bp, Homo sapien
gatgccactggggaatttggaaata

SEQ ID NO: 5153283 - DNA, 25 bp, Homo sapien
cttgatgccactggggaatttggaa

SEQ ID NO: 5153284 - DNA, 25 bp, Homo sapien
ctatccagagatgctgatttccttg

SEQ ID NO: 5153285 - DNA, 25 bp, Homo sapien
gagatgctgatttccttgatgccac

SEQ ID NO: 5153286 - DNA, 25 bp, Homo sapien
gatccattacatcttcctgaagctg

SEQ ID NO: 5153287 - DNA, 25 bp, Homo sapien
tcaaagacttgcttcctatgagctg

SEQ ID NO: 5153288 - DNA, 25 bp, Homo sapien
gaagctggtttctatgaaaccccag

SEQ ID NO: 5153289 - DNA, 25 bp, Homo sapien
cctgaagctggtttctatgaaaccc

SEQ ID NO: 5153290 - DNA, 25 bp, Homo sapien
ccaacgtagatggaatgatgtgcat

SEQ ID NO: 5153291 - DNA, 25 bp, Homo sapien
atggacatggccgaaagcctctgct

SEQ ID NO: 5153292 - DNA, 25 bp, Homo sapien
aatgatgtgcatggacatggccgaa

SEQ ID NO: 5153293 - DNA, 25 bp, Homo sapien
gtgcatggacatggccgaaagcctc

SEQ ID NO: 5153294 - DNA, 25 bp, Homo sapien
aagggtctttatctacagtccaggg

SEQ ID NO: 5153295 - DNA, 25 bp, Homo sapien
gcttccaaggtcagtgatgggttct

SEQ ID NO: 5153296 - DNA, 25 bp, Homo sapien
ggactgaatcgtggctccagcagct

SEQ ID NO: 5153297 - DNA, 25 bp, Homo sapien
tgggttctaatggagcctggatcat

SEQ ID NO: 5153298 - DNA, 25 bp, Homo sapien
ccacatctgggacgaaacttgaagg

SEQ ID NO: 5153299 - DNA, 25 bp, Homo sapien
tccagatagtatggtagtgtctccc

SEQ ID NO: 5153300 - DNA, 25 bp, Homo sapien
ggcctgacacgaagctctgggcaga

SEQ ID NO: 5153301 - DNA, 25 bp, Homo sapien
cttgaaggaagcatcagcaaaggga

SEQ ID NO: 5153302 - DNA, 25 bp, Homo sapien
ccaccatcagcgtctcctggagtgc

SEQ ID NO: 5153303 - DNA, 25 bp, Homo sapien
cagcgtctcctggagtgcctctcat

SEQ ID NO: 5153304 - DNA, 25 bp, Homo sapien
catcagcgtctcctggagtgcctct

SEQ ID NO: 5153305 - DNA, 25 bp, Homo sapien
ttgattgatagacggcccttcctcc

SEQ ID NO: 5153306 - DNA, 25 bp, Homo sapien
cagggcccagtggtaggtgggcagc

SEQ ID NO: 5153307 - DNA, 25 bp, Homo sapien
tagcgtgagtgcagagggcctaagc

SEQ ID NO: 5153308 - DNA, 25 bp, Homo sapien
ccacaggagatagcgtgagtgcaga

SEQ ID NO: 5153309 - DNA, 25 bp, Homo sapien
ggcttccacaggagatagcgtgagt

SEQ ID NO: 5153310 - DNA, 25 bp, Homo sapien
ttcaaatcattaatagtcccagtaa

SEQ ID NO: 5153311 - DNA, 25 bp, Homo sapien
gaactgccacaaggttctgaccctg

SEQ ID NO: 5153312 - DNA, 25 bp, Homo sapien
cattaatagtcccagtaataggttt

SEQ ID NO: 5153313 - DNA, 25 bp, Homo sapien
gggtcacactgtcacttcgtggaac

SEQ ID NO: 5153314 - DNA, 25 bp, Homo sapien
ctctgccttgctcaagagcctctgg

SEQ ID NO: 5153315 - DNA, 25 bp, Homo sapien
caaataaatgggatcccctctgcct

SEQ ID NO: 5153316 - DNA, 25 bp, Homo sapien
ttgcatgtgataacagcaacagtga

SEQ ID NO: 5153317 - DNA, 25 bp, Homo sapien
tcaagagcctctggatacttgcatg

SEQ ID NO: 5153318 - DNA, 25 bp, Homo sapien
ctgcatactcttaacaattgtctgc

SEQ ID NO: 5153319 - DNA, 25 bp, Homo sapien
tgctgcatactcttaacaattgtct

SEQ ID NO: 5153320 - DNA, 25 bp, Homo sapien
tttgctgcatactcttaacaattgt

SEQ ID NO: 5153321 - DNA, 25 bp, Homo sapien
gctgcatactcttaacaattgtctg

SEQ ID NO: 5153322 - DNA, 25 bp, Homo sapien
ggttggccatacagatccatgatct

SEQ ID NO: 5153323 - DNA, 25 bp, Homo sapien
cagtcttggcacggtagaaaaggaa

SEQ ID NO: 5153324 - DNA, 25 bp, Homo sapien
gctcgggttggccatacagatccat

SEQ ID NO: 5153325 - DNA, 25 bp, Homo sapien
gtttcacgggctcgggttggccata

SEQ ID NO: 5153326 - DNA, 25 bp, Homo sapien
gaatgatgggctggtctctcttgga

SEQ ID NO: 5153327 - DNA, 25 bp, Homo sapien
aaaggcagtgttgtatgacttccca

SEQ ID NO: 5153328 - DNA, 25 bp, Homo sapien
tcttggaggaggcaatgaaccagtc

SEQ ID NO: 5153329 - DNA, 25 bp, Homo sapien
aaccagtccgggaaggccacagact

SEQ ID NO: 5153330 - DNA, 25 bp, Homo sapien
tttaagacaaagaccaagctgccac

SEQ ID NO: 5153331 - DNA, 25 bp, Homo sapien
tctgtgctagtcatgccatcgtggg

SEQ ID NO: 5153332 - DNA, 25 bp, Homo sapien
tacacagcaccagcttgagaggaca

SEQ ID NO: 5153333 - DNA, 25 bp, Homo sapien
catcgtgggtaacgcgcatgagctc

SEQ ID NO: 5153334 - DNA, 25 bp, Homo sapien
tgccgtgccgcgtgccaccacccac

SEQ ID NO: 5153335 - DNA, 25 bp, Homo sapien
ccgtgccgcgtgccaccacccacat

SEQ ID NO: 5153336 - DNA, 25 bp, Homo sapien
gccgtgccgcgtgccaccacccaca

SEQ ID NO: 5153337 - DNA, 25 bp, Homo sapien
tcctctacatcgtcagcccgtggat

SEQ ID NO: 5153338 - DNA, 25 bp, Homo sapien
atcgtcagcccgtggatcgctgccg

SEQ ID NO: 5153339 - DNA, 25 bp, Homo sapien
tgaagtgtcctcctctacatcgtca

SEQ ID NO: 5153340 - DNA, 25 bp, Homo sapien
aaaaaggagctgtgaagtgtcctcc

SEQ ID NO: 5153341 - DNA, 25 bp, Homo sapien
atagttcactcaaagaccatgaaca

SEQ ID NO: 5153342 - DNA, 25 bp, Homo sapien
aaatagttcactcaaagaccatgaa

SEQ ID NO: 5153343 - DNA, 25 bp, Homo sapien
aatagttcactcaaagaccatgaac

SEQ ID NO: 5153344 - DNA, 25 bp, Homo sapien
aaaatagttcactcaaagaccatga

SEQ ID NO: 5153345 - DNA, 25 bp, Homo sapien
gattgacctgtttatctcagtcagc

SEQ ID NO: 5153346 - DNA, 25 bp, Homo sapien
attgacctgtttatctcagtcagca

SEQ ID NO: 5153347 - DNA, 25 bp, Homo sapien
accaagccccagattgacctgttta

SEQ ID NO: 5153348 - DNA, 25 bp, Homo sapien
ttgacctgtttatctcagtcagcat

SEQ ID NO: 5153349 - DNA, 25 bp, Homo sapien
tccagtgaccctcctccagcttctc

SEQ ID NO: 5153350 - DNA, 25 bp, Homo sapien
ccagcttctcagagccactgtgcat

SEQ ID NO: 5153351 - DNA, 25 bp, Homo sapien
ctccagcttctcagagccactgtgc

SEQ ID NO: 5153352 - DNA, 25 bp, Homo sapien
cagtgaccctcctccagcttctcag

SEQ ID NO: 5153353 - DNA, 25 bp, Homo sapien
ggttttctgacaggctgtaacaggg

SEQ ID NO: 5153354 - DNA, 25 bp, Homo sapien
aacaatggcttctactgcacttggg

SEQ ID NO: 5153355 - DNA, 25 bp, Homo sapien
cctaccattatgaacaatggcttct

SEQ ID NO: 5153356 - DNA, 25 bp, Homo sapien
ctgttacgaaggaccctgtatccct

SEQ ID NO: 5153357 - DNA, 25 bp, Homo sapien
ccaaggataggagtccttttatgtg

SEQ ID NO: 5153358 - DNA, 25 bp, Homo sapien
caaggataggagtccttttatgtgc

SEQ ID NO: 5153359 - DNA, 25 bp, Homo sapien
aaggataggagtccttttatgtgca

SEQ ID NO: 5153360 - DNA, 25 bp, Homo sapien
aggataggagtccttttatgtgcag

SEQ ID NO: 5153361 - DNA, 25 bp, Homo sapien
ctgctgaggtgtgtcaattttcaat

SEQ ID NO: 5153362 - DNA, 25 bp, Homo sapien
tgctgaggtgtgtcaattttcaatg

SEQ ID NO: 5153363 - DNA, 25 bp, Homo sapien
ccctgctgaggtgtgtcaattttca

SEQ ID NO: 5153364 - DNA, 25 bp, Homo sapien
cctgctgaggtgtgtcaattttcaa

SEQ ID NO: 5153365 - DNA, 25 bp, Homo sapien
tgaagaacccacacccgatgattga

SEQ ID NO: 5153366 - DNA, 25 bp, Homo sapien
tggagacatacggtccttcctcggg

SEQ ID NO: 5153367 - DNA, 25 bp, Homo sapien
tatgagcgtctggtcctgaagaacc

SEQ ID NO: 5153368 - DNA, 25 bp, Homo sapien
tccttcctcgggactgctatgagcg

SEQ ID NO: 5153369 - DNA, 25 bp, Homo sapien
cacatcaggcagagattgagtccat

SEQ ID NO: 5153370 - DNA, 25 bp, Homo sapien
ggctggtccccgactttagcacaca

SEQ ID NO: 5153371 - DNA, 25 bp, Homo sapien
tcggcatgagattaaggcaatagtg

SEQ ID NO: 5153372 - DNA, 25 bp, Homo sapien
caagggtctccacatgtcggcatga

SEQ ID NO: 5153373 - DNA, 25 bp, Homo sapien
aagtcagtagtgttggctttcccca

SEQ ID NO: 5153374 - DNA, 25 bp, Homo sapien
cagcatagttaacccaaagtcagta

SEQ ID NO: 5153375 - DNA, 25 bp, Homo sapien
gctgacagcgatgaaccagccaggg

SEQ ID NO: 5153376 - DNA, 25 bp, Homo sapien
aaaggacttcacaggctcgggttgg

SEQ ID NO: 5153377 - DNA, 25 bp, Homo sapien
aaccagcaccagcatatgtaacttc

SEQ ID NO: 5153378 - DNA, 25 bp, Homo sapien
cagttcttcacccaaaccagcacca

SEQ ID NO: 5153379 - DNA, 25 bp, Homo sapien
taacttcactgagacataagccaag

SEQ ID NO: 5153380 - DNA, 25 bp, Homo sapien
caggagtggcgcagttttctttttg

SEQ ID NO: 5153381 - DNA, 25 bp, Homo sapien
cagtgataacactttaggtgaaagc

SEQ ID NO: 5153382 - DNA, 25 bp, Homo sapien
cacaaatttaatgcttttgaggtcc

SEQ ID NO: 5153383 - DNA, 25 bp, Homo sapien
ttaatgcttttgaggtccagtgata

SEQ ID NO: 5153384 - DNA, 25 bp, Homo sapien
gaggtccagtgataacactttaggt

SEQ ID NO: 5153385 - DNA, 25 bp, Homo sapien
gacaccagtgtggatcggggtctcc

SEQ ID NO: 5153386 - DNA, 25 bp, Homo sapien
ggatcagaggccagtagcttccagc

SEQ ID NO: 5153387 - DNA, 25 bp, Homo sapien
agcacaagcaaagaccctcatcgat

SEQ ID NO: 5153388 - DNA, 25 bp, Homo sapien
gctgggccaaggagtccagacacca

SEQ ID NO: 5153389 - DNA, 25 bp, Homo sapien
ctccaactgtggtcgctgatccaca

SEQ ID NO: 5153390 - DNA, 25 bp, Homo sapien
caactgtggtcgctgatccacacag

SEQ ID NO: 5153391 - DNA, 25 bp, Homo sapien
ggaaggtacagagggagcggccacc

SEQ ID NO: 5153392 - DNA, 25 bp, Homo sapien
cacacagatgctcacgctcatcatg

SEQ ID NO: 5153393 - DNA, 25 bp, Homo sapien
agcctcgtggacgttgagagccata

SEQ ID NO: 5153394 - DNA, 25 bp, Homo sapien
tcgtggacgttgagagccataggta

SEQ ID NO: 5153395 - DNA, 25 bp, Homo sapien
cctcgtggacgttgagagccatagg

SEQ ID NO: 5153396 - DNA, 25 bp, Homo sapien
cgtggacgttgagagccataggtac

SEQ ID NO: 5153397 - DNA, 25 bp, Homo sapien
gaaggacatggataggtggacacac

SEQ ID NO: 5153398 - DNA, 25 bp, Homo sapien
gggcctgtgacacggaaggacatgg

SEQ ID NO: 5153399 - DNA, 25 bp, Homo sapien
ctgtgacacggaaggacatggatag

SEQ ID NO: 5153400 - DNA, 25 bp, Homo sapien
cggaaggacatggataggtggacac

SEQ ID NO: 5153401 - DNA, 25 bp, Homo sapien
cattaagaagaacaatagctagcat

SEQ ID NO: 5153402 - DNA, 25 bp, Homo sapien
aacacaactgccatcatcagtatca

SEQ ID NO: 5153403 - DNA, 25 bp, Homo sapien
tatcattattgtgtgatgcttcctc

SEQ ID NO: 5153404 - DNA, 25 bp, Homo sapien
atcattaagaagaacaatagctagc

SEQ ID NO: 5153405 - DNA, 25 bp, Homo sapien
ttctgtaccccagatccacattcag

SEQ ID NO: 5153406 - DNA, 25 bp, Homo sapien
ttcaggcgctttcctcgtctgtgcc

SEQ ID NO: 5153407 - DNA, 25 bp, Homo sapien
tgctgactgagtcccatgaacaggg

SEQ ID NO: 5153408 - DNA, 25 bp, Homo sapien
cgcctccgccggactgtgtagtttg

SEQ ID NO: 5153409 - DNA, 25 bp, Homo sapien
atggcaataaccctggaggtagatg

SEQ ID NO: 5153410 - DNA, 25 bp, Homo sapien
ccctggaggtagatgtggcctctgc

SEQ ID NO: 5153411 - DNA, 25 bp, Homo sapien
gagatgacttagggcaggtgtattc

SEQ ID NO: 5153412 - DNA, 25 bp, Homo sapien
caataaccctggaggtagatgtggc

SEQ ID NO: 5153413 - DNA, 25 bp, Homo sapien
gccattgccaggcctacaggagatg

SEQ ID NO: 5153414 - DNA, 25 bp, Homo sapien
tgccaggcctacaggagatgttaga

SEQ ID NO: 5153415 - DNA, 25 bp, Homo sapien
ttgccaggcctacaggagatgttag

SEQ ID NO: 5153416 - DNA, 25 bp, Homo sapien
cattgccaggcctacaggagatgtt

SEQ ID NO: 5153417 - DNA, 25 bp, Homo sapien
gggccctgaaactgccaggacctga

SEQ ID NO: 5153418 - DNA, 25 bp, Homo sapien
gcctcagccttttaagtaaggccta

SEQ ID NO: 5153419 - DNA, 25 bp, Homo sapien
tggcgggagctgtggagtctgcctg

SEQ ID NO: 5153420 - DNA, 25 bp, Homo sapien
gttcctttctcctggcgggagctgt

SEQ ID NO: 5153421 - DNA, 25 bp, Homo sapien
ggtcaggagagagctccggtaccac

SEQ ID NO: 5153422 - DNA, 25 bp, Homo sapien
gggagcaagcagctgcaccgagctc

SEQ ID NO: 5153423 - DNA, 25 bp, Homo sapien
cctccacggagcagattctgggtct

SEQ ID NO: 5153424 - DNA, 25 bp, Homo sapien
acagaaaatcatggagagagaggct

SEQ ID NO: 5153425 - DNA, 25 bp, Homo sapien
cttgagctccacagggtgtagactc

SEQ ID NO: 5153426 - DNA, 25 bp, Homo sapien
tgagctccacagggtgtagactccc

SEQ ID NO: 5153427 - DNA, 25 bp, Homo sapien
ttgagctccacagggtgtagactcc

SEQ ID NO: 5153428 - DNA, 25 bp, Homo sapien
aagcacagcgccccactcaggacca

SEQ ID NO: 5153429 - DNA, 25 bp, Homo sapien
ggaagcacagcgccccactcaggac

SEQ ID NO: 5153430 - DNA, 25 bp, Homo sapien
agcacagcgccccactcaggaccat

SEQ ID NO: 5153431 - DNA, 25 bp, Homo sapien
cggaagcacagcgccccactcagga

SEQ ID NO: 5153432 - DNA, 25 bp, Homo sapien
cagccctccagctagaagctggtta

SEQ ID NO: 5153433 - DNA, 25 bp, Homo sapien
ccctccagctagaagctggttatta

SEQ ID NO: 5153434 - DNA, 25 bp, Homo sapien
tccagctagaagctggttattatgc

SEQ ID NO: 5153435 - DNA, 25 bp, Homo sapien
tgcagccctccagctagaagctggt

SEQ ID NO: 5153436 - DNA, 25 bp, Homo sapien
ggcacaggactgctgtaagacggcc

SEQ ID NO: 5153437 - DNA, 25 bp, Homo sapien
cacaggactgctgtaagacggcctg

SEQ ID NO: 5153438 - DNA, 25 bp, Homo sapien
caggactgctgtaagacggcctgcc

SEQ ID NO: 5153439 - DNA, 25 bp, Homo sapien
aggactgctgtaagacggcctgccc

SEQ ID NO: 5153440 - DNA, 25 bp, Homo sapien
ccaccgattggggaccacgctgatc

SEQ ID NO: 5153441 - DNA, 25 bp, Homo sapien
atccagccaccgattggggaccacg

SEQ ID NO: 5153442 - DNA, 25 bp, Homo sapien
tggcatccagccaccgattggggac

SEQ ID NO: 5153443 - DNA, 25 bp, Homo sapien
cagccaccgattggggaccacgctg

SEQ ID NO: 5153444 - DNA, 25 bp, Homo sapien
ctctagtgttagagtcggctcctgc

SEQ ID NO: 5153445 - DNA, 25 bp, Homo sapien
gtgttagagtcggctcctgccccac

SEQ ID NO: 5153446 - DNA, 25 bp, Homo sapien
tagtgttagagtcggctcctgcccc

SEQ ID NO: 5153447 - DNA, 25 bp, Homo sapien
tctagtgttagagtcggctcctgcc

SEQ ID NO: 5153448 - DNA, 25 bp, Homo sapien
cattctcgggaagctgggtgagtct

SEQ ID NO: 5153449 - DNA, 25 bp, Homo sapien
gagtctgacaggctgatcggcttca

SEQ ID NO: 5153450 - DNA, 25 bp, Homo sapien
tccttggcaccaagatagagctcca

SEQ ID NO: 5153451 - DNA, 25 bp, Homo sapien
atgtcccgccggtagaaggtgaagc

SEQ ID NO: 5153452 - DNA, 25 bp, Homo sapien
agaagtctgtgatgggggcattcca

SEQ ID NO: 5153453 - DNA, 25 bp, Homo sapien
ggaagtagaagtctgtgatgggggc

SEQ ID NO: 5153454 - DNA, 25 bp, Homo sapien
tgctggaagtagaagtctgtgatgg

SEQ ID NO: 5153455 - DNA, 25 bp, Homo sapien
tagaagtctgtgatgggggcattcc

SEQ ID NO: 5153456 - DNA, 25 bp, Homo sapien
ccagggagttctggggggcacgttg

SEQ ID NO: 5153457 - DNA, 25 bp, Homo sapien
cagggagttctggggggcacgttgc

SEQ ID NO: 5153458 - DNA, 25 bp, Homo sapien
cagagagagtgattgtccgccatgg

SEQ ID NO: 5153459 - DNA, 25 bp, Homo sapien
gagattaaggtttcagcagagccgt

SEQ ID NO: 5153460 - DNA, 25 bp, Homo sapien
ttctttcttcgttcaggaggctgga

SEQ ID NO: 5153461 - DNA, 25 bp, Homo sapien
tggagagctactgaccctataaggc

SEQ ID NO: 5153462 - DNA, 25 bp, Homo sapien
ggtgacatcttagcagggtattgaa

SEQ ID NO: 5153463 - DNA, 25 bp, Homo sapien
gctgcctgttgcctgaggacttcag

SEQ ID NO: 5153464 - DNA, 25 bp, Homo sapien
gaaacacagcctagcatccggagct

SEQ ID NO: 5153465 - DNA, 25 bp, Homo sapien
gatggatggaggacccaaaagcaga

SEQ ID NO: 5153466 - DNA, 25 bp, Homo sapien
aaccccacatgatgtgagtattgca

SEQ ID NO: 5153467 - DNA, 25 bp, Homo sapien
agcctgcccttggaacattctctgt

SEQ ID NO: 5153468 - DNA, 25 bp, Homo sapien
atcgtagcctcttccctacagcctg

SEQ ID NO: 5153469 - DNA, 25 bp, Homo sapien
ctcgatgtctgcaatttgtacaaac

SEQ ID NO: 5153470 - DNA, 25 bp, Homo sapien
tataccgtctggtacaggtgggtca

SEQ ID NO: 5153471 - DNA, 25 bp, Homo sapien
ggcctgcaccaatctctataattgg

SEQ ID NO: 5153472 - DNA, 25 bp, Homo sapien
tgggtcaggcctgcaccaatctcta

SEQ ID NO: 5153473 - DNA, 25 bp, Homo sapien
tgcgctgtgtttataccgtctggta

SEQ ID NO: 5153474 - DNA, 25 bp, Homo sapien
ctgagttcctggaaccctgatccct

SEQ ID NO: 5153475 - DNA, 25 bp, Homo sapien
atccctggagactccaactgatttc

SEQ ID NO: 5153476 - DNA, 25 bp, Homo sapien
ttcctggaaccctgatccctggaga

SEQ ID NO: 5153477 - DNA, 25 bp, Homo sapien
tggaaccctgatccctggagactcc

SEQ ID NO: 5153478 - DNA, 25 bp, Homo sapien
ctggaagaaattcaatgctggtcca

SEQ ID NO: 5153479 - DNA, 25 bp, Homo sapien
agaaattcaatgctggtccagtcca

SEQ ID NO: 5153480 - DNA, 25 bp, Homo sapien
ggaagaaattcaatgctggtccagt

SEQ ID NO: 5153481 - DNA, 25 bp, Homo sapien
aagaaattcaatgctggtccagtcc

SEQ ID NO: 5153482 - DNA, 25 bp, Homo sapien
ggtggatagcaagctgatgactccc

SEQ ID NO: 5153483 - DNA, 25 bp, Homo sapien
ccttggccaaaccactggggcttct

SEQ ID NO: 5153484 - DNA, 25 bp, Homo sapien
gcagtgtggtagctgtgcccagatc

SEQ ID NO: 5153485 - DNA, 25 bp, Homo sapien
ttgatgatgggctccccttggccaa

SEQ ID NO: 5153486 - DNA, 25 bp, Homo sapien
cctgactgaggctatccgggagcaa

SEQ ID NO: 5153487 - DNA, 25 bp, Homo sapien
tataattggcctgccagaatccacc

SEQ ID NO: 5153488 - DNA, 25 bp, Homo sapien
ggttccccaggccattcgtctataa

SEQ ID NO: 5153489 - DNA, 25 bp, Homo sapien
gtgctgtagcctccctcacagttgg

SEQ ID NO: 5153490 - DNA, 25 bp, Homo sapien
ctgcaatcagtggtgtctggtcctc

SEQ ID NO: 5153491 - DNA, 25 bp, Homo sapien
tgcaatcagtggtgtctggtcctca

SEQ ID NO: 5153492 - DNA, 25 bp, Homo sapien
tgtagtatcttgccatggggaggga

SEQ ID NO: 5153493 - DNA, 25 bp, Homo sapien
atgtagtatcttgccatggggaggg

SEQ ID NO: 5153494 - DNA, 25 bp, Homo sapien
gtagtatcttgccatggggagggaa

SEQ ID NO: 5153495 - DNA, 25 bp, Homo sapien
cagccctggacattacagggtccat

SEQ ID NO: 5153496 - DNA, 25 bp, Homo sapien
caggacacagccctggacattacag

SEQ ID NO: 5153497 - DNA, 25 bp, Homo sapien
cacagccctggacattacagggtcc

SEQ ID NO: 5153498 - DNA, 25 bp, Homo sapien
gacacagccctggacattacagggt

SEQ ID NO: 5153499 - DNA, 25 bp, Homo sapien
tccacttccatgctctgaatcacca

SEQ ID NO: 5153500 - DNA, 25 bp, Homo sapien
tgaatcaccaccttgagcatttggg

SEQ ID NO: 5153501 - DNA, 25 bp, Homo sapien
tgatggcccattccctttatgcacc

SEQ ID NO: 5153502 - DNA, 25 bp, Homo sapien
aaacagtatgacagtgctgatggcc

SEQ ID NO: 5153503 - DNA, 25 bp, Homo sapien
tgtctgcaacaggatctcccaccag

SEQ ID NO: 5153504 - DNA, 25 bp, Homo sapien
cagctggccatctcttgtgtataga

SEQ ID NO: 5153505 - DNA, 25 bp, Homo sapien
tgcacagcagttgtctgcaacagga

SEQ ID NO: 5153506 - DNA, 25 bp, Homo sapien
gagccttctggtctgcatatttaat

SEQ ID NO: 5153507 - DNA, 25 bp, Homo sapien
caggagtcatgtcccctcgctagga

SEQ ID NO: 5153508 - DNA, 25 bp, Homo sapien
catgtcccctcgctaggagaggcca

SEQ ID NO: 5153509 - DNA, 25 bp, Homo sapien
gccctgcatgcagactggacggtga

SEQ ID NO: 5153510 - DNA, 25 bp, Homo sapien
gcctggccctgcatgcagactggac

SEQ ID NO: 5153511 - DNA, 25 bp, Homo sapien
ggacaagggaaccccatgttgcagg

SEQ ID NO: 5153512 - DNA, 25 bp, Homo sapien
gggaaccccatgttgcaggctcttg

SEQ ID NO: 5153513 - DNA, 25 bp, Homo sapien
gaaccccatgttgcaggctcttggc

SEQ ID NO: 5153514 - DNA, 25 bp, Homo sapien
aagggaaccccatgttgcaggctct

SEQ ID NO: 5153515 - DNA, 25 bp, Homo sapien
cttggtgcgggccaagcctctgtta

SEQ ID NO: 5153516 - DNA, 25 bp, Homo sapien
tctgttaggaagtatgcagatcttc

SEQ ID NO: 5153517 - DNA, 25 bp, Homo sapien
cgggccaagcctctgttaggaagta

SEQ ID NO: 5153518 - DNA, 25 bp, Homo sapien
ctccacacatgccaggcagcggctc

SEQ ID NO: 5153519 - DNA, 25 bp, Homo sapien
aaacttggtacgggctgagggctca

SEQ ID NO: 5153520 - DNA, 25 bp, Homo sapien
tgtacagttcctcaatgttcacatc

SEQ ID NO: 5153521 - DNA, 25 bp, Homo sapien
gaaggtgaagcgtgtggcctcttca

SEQ ID NO: 5153522 - DNA, 25 bp, Homo sapien
cctcaagcctgaaggcggagcctga

SEQ ID NO: 5153523 - DNA, 25 bp, Homo sapien
gggcacaaggctaaaacgcagtttc

SEQ ID NO: 5153524 - DNA, 25 bp, Homo sapien
ccttcttgtgattaaactgagccca

SEQ ID NO: 5153525 - DNA, 25 bp, Homo sapien
tccatgtgtcaagagctgtgttcct

SEQ ID NO: 5153526 - DNA, 25 bp, Homo sapien
tgagcccacaaggataacccaggat

SEQ ID NO: 5153527 - DNA, 25 bp, Homo sapien
taagttgtaagcagcccagggcttt

SEQ ID NO: 5153528 - DNA, 25 bp, Homo sapien
tggcagatagcggactgtaccaaca

SEQ ID NO: 5153529 - DNA, 25 bp, Homo sapien
tggtagaaaatcacaagacttgagc

SEQ ID NO: 5153530 - DNA, 25 bp, Homo sapien
tgtaccaacagtcaaccacggaatt

SEQ ID NO: 5153531 - DNA, 25 bp, Homo sapien
tatggagcggtttatgaatttgcat

SEQ ID NO: 5153532 - DNA, 25 bp, Homo sapien
aaggccagtccctctgcatttgctt

SEQ ID NO: 5153533 - DNA, 25 bp, Homo sapien
ctcaaggctctcacatcatcagtca

SEQ ID NO: 5153534 - DNA, 25 bp, Homo sapien
caaggccagtccctctgcatttgct

SEQ ID NO: 5153535 - DNA, 25 bp, Homo sapien
tgctttgtgtcccattcaggctcct

SEQ ID NO: 5153536 - DNA, 25 bp, Homo sapien
taggagagatcttgcactggtcaca

SEQ ID NO: 5153537 - DNA, 25 bp, Homo sapien
atgcaggtaggagagatcttgcact

SEQ ID NO: 5153538 - DNA, 25 bp, Homo sapien
ggagagatcttgcactggtcacagc

SEQ ID NO: 5153539 - DNA, 25 bp, Homo sapien
agagatcttgcactggtcacagctt

SEQ ID NO: 5153540 - DNA, 25 bp, Homo sapien
tgctttgctttccagtggttccctg

SEQ ID NO: 5153541 - DNA, 25 bp, Homo sapien
caaccctgatacagcaagtgtctgc

SEQ ID NO: 5153542 - DNA, 25 bp, Homo sapien
ccagtggttccctgacccatggagt

SEQ ID NO: 5153543 - DNA, 25 bp, Homo sapien
tcaaaggcttcctccaaccctgata

SEQ ID NO: 5153544 - DNA, 25 bp, Homo sapien
ccaagcttcaatgagtgtcatgtct

SEQ ID NO: 5153545 - DNA, 25 bp, Homo sapien
tcaacctgagaatgccattcctctc

SEQ ID NO: 5153546 - DNA, 25 bp, Homo sapien
tctgaagtgctagccacttcccttt

SEQ ID NO: 5153547 - DNA, 25 bp, Homo sapien
tgagtgtcatgtctgaagtgctagc

SEQ ID NO: 5153548 - DNA, 25 bp, Homo sapien
gagttcgctcgttttctcagctggg

SEQ ID NO: 5153549 - DNA, 25 bp, Homo sapien
ccatgggacagtcgaggaactgtga

SEQ ID NO: 5153550 - DNA, 25 bp, Homo sapien
tccatgggacagtcgaggaactgtg

SEQ ID NO: 5153551 - DNA, 25 bp, Homo sapien
gaggaactgtgagttcgctcgtttt

SEQ ID NO: 5153552 - DNA, 25 bp, Homo sapien
tcaactgtctccttgctttcgttgt

SEQ ID NO: 5153553 - DNA, 25 bp, Homo sapien
aactgtctccttgctttcgttgttg

SEQ ID NO: 5153554 - DNA, 25 bp, Homo sapien
gatttacagattcattacaatgtat

SEQ ID NO: 5153555 - DNA, 25 bp, Homo sapien
actgtctccttgctttcgttgttgt

SEQ ID NO: 5153556 - DNA, 25 bp, Homo sapien
caaaacaagcccttatatgcgaatg

SEQ ID NO: 5153557 - DNA, 25 bp, Homo sapien
tgccaagatcaattcaaaacaagcc

SEQ ID NO: 5153558 - DNA, 25 bp, Homo sapien
ccttatatgcgaatgtgctttgtga

SEQ ID NO: 5153559 - DNA, 25 bp, Homo sapien
tcatagaattgctgccaagatcaat

SEQ ID NO: 5153560 - DNA, 25 bp, Homo sapien
ggcgggaaggactagcaacttttca

SEQ ID NO: 5153561 - DNA, 25 bp, Homo sapien
ctggcgggaaggactagcaactttt

SEQ ID NO: 5153562 - DNA, 25 bp, Homo sapien
cgggaaggactagcaacttttcaat

SEQ ID NO: 5153563 - DNA, 25 bp, Homo sapien
gaaggactagcaacttttcaatttg

SEQ ID NO: 5153564 - DNA, 25 bp, Homo sapien
gggcagagttggggactccagaact

SEQ ID NO: 5153565 - DNA, 25 bp, Homo sapien
gtgacccaactcagaccgatacgaa

SEQ ID NO: 5153566 - DNA, 25 bp, Homo sapien
aggtgcagttcctattcctcttgtg

SEQ ID NO: 5153567 - DNA, 25 bp, Homo sapien
catcctcagctatagcacgtcgggt

SEQ ID NO: 5153568 - DNA, 25 bp, Homo sapien
cctgatattattcaagctgaaactg

SEQ ID NO: 5153569 - DNA, 25 bp, Homo sapien
tgaacagtgttgcaaactccaatca

SEQ ID NO: 5153570 - DNA, 25 bp, Homo sapien
gaacagtgttgcaaactccaatcag

SEQ ID NO: 5153571 - DNA, 25 bp, Homo sapien
cattcatccaccagttgacatttag

SEQ ID NO: 5153572 - DNA, 25 bp, Homo sapien
ctttttgccgttgggagcgaacctg

SEQ ID NO: 5153573 - DNA, 25 bp, Homo sapien
gccgttgggagcgaacctgcttgta

SEQ ID NO: 5153574 - DNA, 25 bp, Homo sapien
gttgggagcgaacctgcttgtagct

SEQ ID NO: 5153575 - DNA, 25 bp, Homo sapien
tcctcctttttgccgttgggagcga

SEQ ID NO: 5153576 - DNA, 25 bp, Homo sapien
ggcctctgccgtgacattgtccaca

SEQ ID NO: 5153577 - DNA, 25 bp, Homo sapien
ggccagatactctctccctgctttc

SEQ ID NO: 5153578 - DNA, 25 bp, Homo sapien
tggcctctgccgtgacattgtccac

SEQ ID NO: 5153579 - DNA, 25 bp, Homo sapien
catgtcttagggaataacagggtcc

SEQ ID NO: 5153580 - DNA, 25 bp, Homo sapien
ataacagggtccatcccgcttccag

SEQ ID NO: 5153581 - DNA, 25 bp, Homo sapien
tagggaataacagggtccatcccgc

SEQ ID NO: 5153582 - DNA, 25 bp, Homo sapien
gtggaagccatgtcttagggaataa

SEQ ID NO: 5153583 - DNA, 25 bp, Homo sapien
tcttccaggcattgggaacaagcca

SEQ ID NO: 5153584 - DNA, 25 bp, Homo sapien
gggaacaagccagacaaggtcccca

SEQ ID NO: 5153585 - DNA, 25 bp, Homo sapien
tgttggcttaatcctgtgtgccagg

SEQ ID NO: 5153586 - DNA, 25 bp, Homo sapien
aaacatatgtgttggcttaatcctg

SEQ ID NO: 5153587 - DNA, 25 bp, Homo sapien
ttccaggagggtgactcaggctagc

SEQ ID NO: 5153588 - DNA, 25 bp, Homo sapien
tgatgccaagcaggcccagtttcca

SEQ ID NO: 5153589 - DNA, 25 bp, Homo sapien
gccaagcaggcccagtttccaggag

SEQ ID NO: 5153590 - DNA, 25 bp, Homo sapien
aggctagcagaaaccaaactggttc

SEQ ID NO: 5153591 - DNA, 25 bp, Homo sapien
gactctaactcaactgagctgctgc

SEQ ID NO: 5153592 - DNA, 25 bp, Homo sapien
cctcataggacaggaggtcttctga

SEQ ID NO: 5153593 - DNA, 25 bp, Homo sapien
cccataaagtagcacccgggcagta

SEQ ID NO: 5153594 - DNA, 25 bp, Homo sapien
tgctgcccataaagtagcacccggg

SEQ ID NO: 5153595 - DNA, 25 bp, Homo sapien
tcctccacctccttcttcatacaag

SEQ ID NO: 5153596 - DNA, 25 bp, Homo sapien
cctttgagtcagcattgtcttcacc

SEQ ID NO: 5153597 - DNA, 25 bp, Homo sapien
tccacctccttcttcatacaagtca

SEQ ID NO: 5153598 - DNA, 25 bp, Homo sapien
ccacctccttcttcatacaagtcag

SEQ ID NO: 5153599 - DNA, 25 bp, Homo sapien
tgggttagctatgaatctgcactga

SEQ ID NO: 5153600 - DNA, 25 bp, Homo sapien
gcggtacatgcttgctcttgccttc

SEQ ID NO: 5153601 - DNA, 25 bp, Homo sapien
tctgcactgaaagtcattacttatg

SEQ ID NO: 5153602 - DNA, 25 bp, Homo sapien
gcagttatcttgtgttttcagcggt

SEQ ID NO: 5153603 - DNA, 25 bp, Homo sapien
catatacaccattggatcctgctgg

SEQ ID NO: 5153604 - DNA, 25 bp, Homo sapien
tactgacatgatatcactgaatggg

SEQ ID NO: 5153605 - DNA, 25 bp, Homo sapien
gagaggcagggagattcagtccttc

SEQ ID NO: 5153606 - DNA, 25 bp, Homo sapien
ggcctttaaagccagcccgatgagc

SEQ ID NO: 5153607 - DNA, 25 bp, Homo sapien
tgggtggggattatcagggaccctc

SEQ ID NO: 5153608 - DNA, 25 bp, Homo sapien
tgacccagatttccaaattgggtgg

SEQ ID NO: 5153609 - DNA, 25 bp, Homo sapien
tgaaggctgacccagatttccaaat

SEQ ID NO: 5153610 - DNA, 25 bp, Homo sapien
ctgtgaaggctgacccagatttcca

SEQ ID NO: 5153611 - DNA, 25 bp, Homo sapien
agcaccccccgagttctgcttcctg

SEQ ID NO: 5153612 - DNA, 25 bp, Homo sapien
ctctgactaatcttattctcggttc

SEQ ID NO: 5153613 - DNA, 25 bp, Homo sapien
gaaatctctgactaatcttattctc

SEQ ID NO: 5153614 - DNA, 25 bp, Homo sapien
agttggcgtccttatgatttctgcc

SEQ ID NO: 5153615 - DNA, 25 bp, Homo sapien
aagtgtcgcaatggagtgttgtaac

SEQ ID NO: 5153616 - DNA, 25 bp, Homo sapien
gaagcggaaataccctcctcgcatt

SEQ ID NO: 5153617 - DNA, 25 bp, Homo sapien
tgccccactgcgagaagcggaaata

SEQ ID NO: 5153618 - DNA, 25 bp, Homo sapien
ccaagctaggcgtctgccaccctgc

SEQ ID NO: 5153619 - DNA, 25 bp, Homo sapien
tggactgccattgcgggcccagagt

SEQ ID NO: 5153620 - DNA, 25 bp, Homo sapien
agtggactgccattgcgggcccaga

SEQ ID NO: 5153621 - DNA, 25 bp, Homo sapien
gcagtggactgccattgcgggccca

SEQ ID NO: 5153622 - DNA, 25 bp, Homo sapien
ggcagtggactgccattgcgggccc

SEQ ID NO: 5153623 - DNA, 25 bp, Homo sapien
ggaagaggaggagagtgattaggtg

SEQ ID NO: 5153624 - DNA, 25 bp, Homo sapien
gtgactgcggaggcctctgcagatt

SEQ ID NO: 5153625 - DNA, 25 bp, Homo sapien
gagagtgattaggtgactgcggagg

SEQ ID NO: 5153626 - DNA, 25 bp, Homo sapien
aggaggagagtgattaggtgactgc

SEQ ID NO: 5153627 - DNA, 25 bp, Homo sapien
tggattttctcccagagggtcggca

SEQ ID NO: 5153628 - DNA, 25 bp, Homo sapien
gattttctcccagagggtcggcaga

SEQ ID NO: 5153629 - DNA, 25 bp, Homo sapien
cttgctggattttctcccagagggt

SEQ ID NO: 5153630 - DNA, 25 bp, Homo sapien
ctcccagagggtcggcagatcgtct

SEQ ID NO: 5153631 - DNA, 25 bp, Homo sapien
ggtcgcactatccacatctgggata

SEQ ID NO: 5153632 - DNA, 25 bp, Homo sapien
tggcagctgtgatatgtttccagtc

SEQ ID NO: 5153633 - DNA, 25 bp, Homo sapien
tctctgggaaagtaagacagccctc

SEQ ID NO: 5153634 - DNA, 25 bp, Homo sapien
ttgaaacacaagtcctgaagcccat

SEQ ID NO: 5153635 - DNA, 25 bp, Homo sapien
cctctctggttgagagcaggactca

SEQ ID NO: 5153636 - DNA, 25 bp, Homo sapien
ctctggttgagagcaggactcaaag

SEQ ID NO: 5153637 - DNA, 25 bp, Homo sapien
cctgattctgggtcccaatcctttc

SEQ ID NO: 5153638 - DNA, 25 bp, Homo sapien
ctcagccagtgacctgattctgggt

SEQ ID NO: 5153639 - DNA, 25 bp, Homo sapien
gacatttggtccttgcaagtatcca

SEQ ID NO: 5153640 - DNA, 25 bp, Homo sapien
tggttgttcctcagatagaaggtct

SEQ ID NO: 5153641 - DNA, 25 bp, Homo sapien
gatagaaggtcttctggttaacatc

SEQ ID NO: 5153642 - DNA, 25 bp, Homo sapien
tatccagcaactagttggttgttcc

SEQ ID NO: 5153643 - DNA, 25 bp, Homo sapien
tcatatgtgcccttcagtagccagg

SEQ ID NO: 5153644 - DNA, 25 bp, Homo sapien
tgaacaacataggaacatggagcct

SEQ ID NO: 5153645 - DNA, 25 bp, Homo sapien
gacgtgatgcccacatacattggct

SEQ ID NO: 5153646 - DNA, 25 bp, Homo sapien
tcatccactttcagagcgaggcaca

SEQ ID NO: 5153647 - DNA, 25 bp, Homo sapien
ctaaaatcccgaggtcagaagggca

SEQ ID NO: 5153648 - DNA, 25 bp, Homo sapien
taaaatcccgaggtcagaagggcag

SEQ ID NO: 5153649 - DNA, 25 bp, Homo sapien
catgaggctcaatgggtaccacatc

SEQ ID NO: 5153650 - DNA, 25 bp, Homo sapien
aagaacagagcatgaggctcaatgg

SEQ ID NO: 5153651 - DNA, 25 bp, Homo sapien
catcaccagacttgacacaggacag

SEQ ID NO: 5153652 - DNA, 25 bp, Homo sapien
tggagtctggtctcatcaccagact

SEQ ID NO: 5153653 - DNA, 25 bp, Homo sapien
cgtcctcctggaagtagaatttggt

SEQ ID NO: 5153654 - DNA, 25 bp, Homo sapien
caggcggcagactcaaaactggtgg

SEQ ID NO: 5153655 - DNA, 25 bp, Homo sapien
ggtcagcttccatcgctgtgcagag

SEQ ID NO: 5153656 - DNA, 25 bp, Homo sapien
atttggtgaccatgacgccttcgtc

SEQ ID NO: 5153657 - DNA, 25 bp, Homo sapien
taaaaacctccctcatggactggtc

SEQ ID NO: 5153658 - DNA, 25 bp, Homo sapien
ttgtgacgccttctgagggtccacc

SEQ ID NO: 5153659 - DNA, 25 bp, Homo sapien
ccttgccatgcaagaatgggaacag

SEQ ID NO: 5153660 - DNA, 25 bp, Homo sapien
cctgtgaccaggttgttgtgacgcc

SEQ ID NO: 5153661 - DNA, 25 bp, Homo sapien
caggaagtagggaactttgcaccca

SEQ ID NO: 5153662 - DNA, 25 bp, Homo sapien
cagggacctgagacatatacgagtc

SEQ ID NO: 5153663 - DNA, 25 bp, Homo sapien
tcattcgctgagtacctgccaagag

SEQ ID NO: 5153664 - DNA, 25 bp, Homo sapien
cttctgataggaggtaaagtactgc

SEQ ID NO: 5153665 - DNA, 25 bp, Homo sapien
aggctctctacaagcagcaacaacc

SEQ ID NO: 5153666 - DNA, 25 bp, Homo sapien
caggctctctacaagcagcaacaac

SEQ ID NO: 5153667 - DNA, 25 bp, Homo sapien
ggctctctacaagcagcaacaacca

SEQ ID NO: 5153668 - DNA, 25 bp, Homo sapien
gctctctacaagcagcaacaaccat

SEQ ID NO: 5153669 - DNA, 25 bp, Homo sapien
gcacggcacacggtcaccgtcgagg

SEQ ID NO: 5153670 - DNA, 25 bp, Homo sapien
acggcacacggtcaccgtcgagggc

SEQ ID NO: 5153671 - DNA, 25 bp, Homo sapien
gagagcgctgcacggcacacggtca

SEQ ID NO: 5153672 - DNA, 25 bp, Homo sapien
cggcgtggcgagagcgctgcacggc

SEQ ID NO: 5153673 - DNA, 25 bp, Homo sapien
gagcaaagccctcagtgtcgcctga

SEQ ID NO: 5153674 - DNA, 25 bp, Homo sapien
aggagcaaagccctcagtgtcgcct

SEQ ID NO: 5153675 - DNA, 25 bp, Homo sapien
tgtcgcctgattctgacacctggat

SEQ ID NO: 5153676 - DNA, 25 bp, Homo sapien
ggatggctttaagggctcctcctgc

SEQ ID NO: 5153677 - DNA, 25 bp, Homo sapien
tccagcaaagaactcactcacattc

SEQ ID NO: 5153678 - DNA, 25 bp, Homo sapien
tcactcacattcttagctccatcat

SEQ ID NO: 5153679 - DNA, 25 bp, Homo sapien
aaatccagcaaagaactcactcaca

SEQ ID NO: 5153680 - DNA, 25 bp, Homo sapien
agaactcactcacattcttagctcc

SEQ ID NO: 5153681 - DNA, 25 bp, Homo sapien
gacacagaggtctggcgagtgcatt

SEQ ID NO: 5153682 - DNA, 25 bp, Homo sapien
tgacctagacatgcggaccatggac

SEQ ID NO: 5153683 - DNA, 25 bp, Homo sapien
tcactttgatactggtcccctgacc

SEQ ID NO: 5153684 - DNA, 25 bp, Homo sapien
gtgcattgaccagagcagcaagtcc

SEQ ID NO: 5153685 - DNA, 25 bp, Homo sapien
ccaattagttgctaattaacattca

SEQ ID NO: 5153686 - DNA, 25 bp, Homo sapien
cctgaccttggtgtgttctttatgt

SEQ ID NO: 5153687 - DNA, 25 bp, Homo sapien
gtagagagtctcatggacatccaat

SEQ ID NO: 5153688 - DNA, 25 bp, Homo sapien
ctttatgtagagagtctcatggaca

SEQ ID NO: 5153689 - DNA, 25 bp, Homo sapien
taagagcagtagtattcgcagtgcc

SEQ ID NO: 5153690 - DNA, 25 bp, Homo sapien
catgcctgattcgtagttgacactc

SEQ ID NO: 5153691 - DNA, 25 bp, Homo sapien
cagtaaatatctgctagatgagtga

SEQ ID NO: 5153692 - DNA, 25 bp, Homo sapien
tacaggaaatatcacgtctggaaga

SEQ ID NO: 5153693 - DNA, 25 bp, Homo sapien
aactgcatagacttgctgcgggaat

SEQ ID NO: 5153694 - DNA, 25 bp, Homo sapien
ccggccagccacgactattttataa

SEQ ID NO: 5153695 - DNA, 25 bp, Homo sapien
cacaagttacccaaagtagggcctg

SEQ ID NO: 5153696 - DNA, 25 bp, Homo sapien
ggagcttctccaaaagttagggcag

SEQ ID NO: 5153697 - DNA, 25 bp, Homo sapien
taaatacatccaaatctaaggataa

SEQ ID NO: 5153698 - DNA, 25 bp, Homo sapien
tagtgcaatttatgtagggttaaaa

SEQ ID NO: 5153699 - DNA, 25 bp, Homo sapien
cagctccatagtgcaatttatgtag

SEQ ID NO: 5153700 - DNA, 25 bp, Homo sapien
tcttaaatacatccaaatctaagga

SEQ ID NO: 5153701 - DNA, 25 bp, Homo sapien
ctctgagcacatgtgtgcgctggtg

SEQ ID NO: 5153702 - DNA, 25 bp, Homo sapien
gtgcgctggtgctgccctgggtgtt

SEQ ID NO: 5153703 - DNA, 25 bp, Homo sapien
tgtgtgcgctggtgctgccctgggt

SEQ ID NO: 5153704 - DNA, 25 bp, Homo sapien
tctgagcacatgtgtgcgctggtgc

SEQ ID NO: 5153705 - DNA, 25 bp, Homo sapien
aaacccttgtgctaatggagctgaa

SEQ ID NO: 5153706 - DNA, 25 bp, Homo sapien
cccttgtgctaatggagctgaaata

SEQ ID NO: 5153707 - DNA, 25 bp, Homo sapien
gaaaacccttgtgctaatggagctg

SEQ ID NO: 5153708 - DNA, 25 bp, Homo sapien
aggaaaacccttgtgctaatggagc

SEQ ID NO: 5153709 - DNA, 25 bp, Homo sapien
gccctggggatttcagcatacagcc

SEQ ID NO: 5153710 - DNA, 25 bp, Homo sapien
ccctggggatttcagcatacagccc

SEQ ID NO: 5153711 - DNA, 25 bp, Homo sapien
tggggatttcagcatacagcccctc

SEQ ID NO: 5153712 - DNA, 25 bp, Homo sapien
ggggccctggggatttcagcataca

SEQ ID NO: 5153713 - DNA, 25 bp, Homo sapien
acaggtggcttctccacacagagca

SEQ ID NO: 5153714 - DNA, 25 bp, Homo sapien
cacacagagcacagaccagggagtg

SEQ ID NO: 5153715 - DNA, 25 bp, Homo sapien
ccctcaaggtaagatgcttcctgtt

SEQ ID NO: 5153716 - DNA, 25 bp, Homo sapien
ctgcctccctcaaggtaagatgctt

SEQ ID NO: 5153717 - DNA, 25 bp, Homo sapien
gacccaagaatggatggcttggcct

SEQ ID NO: 5153718 - DNA, 25 bp, Homo sapien
ggacccaagaatggatggcttggcc

SEQ ID NO: 5153719 - DNA, 25 bp, Homo sapien
ttcactattgcagacctccagaggc

SEQ ID NO: 5153720 - DNA, 25 bp, Homo sapien
cttcactattgcagacctccagagg

SEQ ID NO: 5153721 - DNA, 25 bp, Homo sapien
ccttcactattgcagacctccagag

SEQ ID NO: 5153722 - DNA, 25 bp, Homo sapien
tcactattgcagacctccagaggct

SEQ ID NO: 5153723 - DNA, 25 bp, Homo sapien
aggattagcaaggagcttccttcac

SEQ ID NO: 5153724 - DNA, 25 bp, Homo sapien
gaggattagcaaggagcttccttca

SEQ ID NO: 5153725 - DNA, 25 bp, Homo sapien
ctcctcgagcttctccaggatggtc

SEQ ID NO: 5153726 - DNA, 25 bp, Homo sapien
ctctcctcgagcttctccaggatgg

SEQ ID NO: 5153727 - DNA, 25 bp, Homo sapien
tctcctcgagcttctccaggatggt

SEQ ID NO: 5153728 - DNA, 25 bp, Homo sapien
gaaccatgagtggaactccctggcc

SEQ ID NO: 5153729 - DNA, 25 bp, Homo sapien
tctgaagcaccgtgagagaaatgac

SEQ ID NO: 5153730 - DNA, 25 bp, Homo sapien
tccaaggacttaggaggtgacctgt

SEQ ID NO: 5153731 - DNA, 25 bp, Homo sapien
tatgaaggcttctggccggtccaag

SEQ ID NO: 5153732 - DNA, 25 bp, Homo sapien
ctctacattaaagtggcccttcagt

SEQ ID NO: 5153733 - DNA, 25 bp, Homo sapien
ctacattaaagtggcccttcagttt

SEQ ID NO: 5153734 - DNA, 25 bp, Homo sapien
tctacattaaagtggcccttcagtt

SEQ ID NO: 5153735 - DNA, 25 bp, Homo sapien
ggctgcagcagctttccgagcaaag

SEQ ID NO: 5153736 - DNA, 25 bp, Homo sapien
cagcagctttccgagcaaagagaag

SEQ ID NO: 5153737 - DNA, 25 bp, Homo sapien
tgcagcagctttccgagcaaagaga

SEQ ID NO: 5153738 - DNA, 25 bp, Homo sapien
cagctttccgagcaaagagaagaga

SEQ ID NO: 5153739 - DNA, 25 bp, Homo sapien
ggcaagaggcctgagacggttctac

SEQ ID NO: 5153740 - DNA, 25 bp, Homo sapien
gcccattgtcaccctcagtgctctc

SEQ ID NO: 5153741 - DNA, 25 bp, Homo sapien
gcaagaggcctgagacggttctact

SEQ ID NO: 5153742 - DNA, 25 bp, Homo sapien
caagaggcctgagacggttctactt

SEQ ID NO: 5153743 - DNA, 25 bp, Homo sapien
gacttgctggatgacaccctcagga

SEQ ID NO: 5153744 - DNA, 25 bp, Homo sapien
tacgggtatccttaatccagcagcc

SEQ ID NO: 5153745 - DNA, 25 bp, Homo sapien
taagaggtcggctcaagatacgggt

SEQ ID NO: 5153746 - DNA, 25 bp, Homo sapien
caacaggctgactttccgagaggag

SEQ ID NO: 5153747 - DNA, 25 bp, Homo sapien
tgcccaggagtgccccggagcatct

SEQ ID NO: 5153748 - DNA, 25 bp, Homo sapien
gctggagaaactgggaatccatatc

SEQ ID NO: 5153749 - DNA, 25 bp, Homo sapien
tggccgctggagaaactgggaatcc

SEQ ID NO: 5153750 - DNA, 25 bp, Homo sapien
cactggccgctggagaaactgggaa

SEQ ID NO: 5153751 - DNA, 25 bp, Homo sapien
aaaggctccggtggatcctcatggc

SEQ ID NO: 5153752 - DNA, 25 bp, Homo sapien
cccaagtacaggttgagaatttcca

SEQ ID NO: 5153753 - DNA, 25 bp, Homo sapien
tggctgcacgtttcccttgggcact

SEQ ID NO: 5153754 - DNA, 25 bp, Homo sapien
ccaggtttgctcctcgaaaggctcc

SEQ ID NO: 5153755 - DNA, 25 bp, Homo sapien
gggctccccggtagatggctgttca

SEQ ID NO: 5153756 - DNA, 25 bp, Homo sapien
ttgggctccccggtagatggctgtt

SEQ ID NO: 5153757 - DNA, 25 bp, Homo sapien
tccccggtagatggctgttcactgg

SEQ ID NO: 5153758 - DNA, 25 bp, Homo sapien
gtagatggctgttcactggtgaccc

SEQ ID NO: 5153759 - DNA, 25 bp, Homo sapien
gatgcctgcccagaacactacctgt

SEQ ID NO: 5153760 - DNA, 25 bp, Homo sapien
tcctccaggtctaggacacacatct

SEQ ID NO: 5153761 - DNA, 25 bp, Homo sapien
gcctgcccagaacactacctgtgtg

SEQ ID NO: 5153762 - DNA, 25 bp, Homo sapien
caggtctaggacacacatctgggcc

SEQ ID NO: 5153763 - DNA, 25 bp, Homo sapien
atgcctggccctctccctcaggctc

SEQ ID NO: 5153764 - DNA, 25 bp, Homo sapien
gttccctctctcagccatgcctggc

SEQ ID NO: 5153765 - DNA, 25 bp, Homo sapien
tgcctggccctctccctcaggctca

SEQ ID NO: 5153766 - DNA, 25 bp, Homo sapien
ctggggttccctctctcagccatgc

SEQ ID NO: 5153767 - DNA, 25 bp, Homo sapien
gcaaggactcgccaggaagaggggg

SEQ ID NO: 5153768 - DNA, 25 bp, Homo sapien
agcactgttctctgagcaaggactc

SEQ ID NO: 5153769 - DNA, 25 bp, Homo sapien
cactgttctctgagcaaggactcgc

SEQ ID NO: 5153770 - DNA, 25 bp, Homo sapien
gagcaaggactcgccaggaagaggg

SEQ ID NO: 5153771 - DNA, 25 bp, Homo sapien
ggaggctccagagtcgctgggctct

SEQ ID NO: 5153772 - DNA, 25 bp, Homo sapien
cacctgcatgggagtctgaagcccc

SEQ ID NO: 5153773 - DNA, 25 bp, Homo sapien
ggctctcaggtccagtcctcacacc

SEQ ID NO: 5153774 - DNA, 25 bp, Homo sapien
cacagcactgtgtcttctgggaggg

SEQ ID NO: 5153775 - DNA, 25 bp, Homo sapien
aatgcccactgatagcagcgccgtc

SEQ ID NO: 5153776 - DNA, 25 bp, Homo sapien
cagcagatggagtgtggtttataga

SEQ ID NO: 5153777 - DNA, 25 bp, Homo sapien
tggtttatagatgggcacagggaat

SEQ ID NO: 5153778 - DNA, 25 bp, Homo sapien
ggaatggaggggtacaatgcccact

SEQ ID NO: 5153779 - DNA, 25 bp, Homo sapien
ggccaagatcagatccgacacatcc

SEQ ID NO: 5153780 - DNA, 25 bp, Homo sapien
caggtcaatgcttcgtccacacacg

SEQ ID NO: 5153781 - DNA, 25 bp, Homo sapien
gatcagatccgacacatcctgattc

SEQ ID NO: 5153782 - DNA, 25 bp, Homo sapien
aatgcttcgtccacacacggtgctg

SEQ ID NO: 5153783 - DNA, 25 bp, Homo sapien
agagaggcaaaggcattcccatgag

SEQ ID NO: 5153784 - DNA, 25 bp, Homo sapien
tgagagaggcaaaggcattcccatg

SEQ ID NO: 5153785 - DNA, 25 bp, Homo sapien
ttgagagaggcaaaggcattcccat

SEQ ID NO: 5153786 - DNA, 25 bp, Homo sapien
gagagaggcaaaggcattcccatga

SEQ ID NO: 5153787 - DNA, 25 bp, Homo sapien
tcctgggagttaagagtcacctggg

SEQ ID NO: 5153788 - DNA, 25 bp, Homo sapien
tctgtcctgggagttaagagtcacc

SEQ ID NO: 5153789 - DNA, 25 bp, Homo sapien
tgtcctgggagttaagagtcacctg

SEQ ID NO: 5153790 - DNA, 25 bp, Homo sapien
gggccaaaaaggacctcctctctgc

SEQ ID NO: 5153791 - DNA, 25 bp, Homo sapien
cccattaatggcaaccatggatcca

SEQ ID NO: 5153792 - DNA, 25 bp, Homo sapien
gaggcaggatttaaccccaagtctg

SEQ ID NO: 5153793 - DNA, 25 bp, Homo sapien
caaccatggatccaagaatgatctt

SEQ ID NO: 5153794 - DNA, 25 bp, Homo sapien
aagaaatgctggtccttttgtacgt

SEQ ID NO: 5153795 - DNA, 25 bp, Homo sapien
ggcaactaagggctcaggacctttg

SEQ ID NO: 5153796 - DNA, 25 bp, Homo sapien
tcgggcagtgacctctcccacttgc

SEQ ID NO: 5153797 - DNA, 25 bp, Homo sapien
aagaacatgaagtgaggcgggcaca

SEQ ID NO: 5153798 - DNA, 25 bp, Homo sapien
caagcctccaggcaactaagggctc

SEQ ID NO: 5153799 - DNA, 25 bp, Homo sapien
gggccaaggtgcagggaagagattc

SEQ ID NO: 5153800 - DNA, 25 bp, Homo sapien
gcagggggccaaggtgcagggaaga

SEQ ID NO: 5153801 - DNA, 25 bp, Homo sapien
ccaaggtgcagggaagagattcctg

SEQ ID NO: 5153802 - DNA, 25 bp, Homo sapien
ctgggggtgtccaccctccctctca

SEQ ID NO: 5153803 - DNA, 25 bp, Homo sapien
tgctctcagattctgggctgctagg

SEQ ID NO: 5153804 - DNA, 25 bp, Homo sapien
gctctcagattctgggctgctaggc

SEQ ID NO: 5153805 - DNA, 25 bp, Homo sapien
gacgatgcagggctgggcctgggac

SEQ ID NO: 5153806 - DNA, 25 bp, Homo sapien
ggacgatgcagggctgggcctggga

SEQ ID NO: 5153807 - DNA, 25 bp, Homo sapien
tgggacgatgcagggctgggcctgg

SEQ ID NO: 5153808 - DNA, 25 bp, Homo sapien
ctgggacgatgcagggctgggcctg

SEQ ID NO: 5153809 - DNA, 25 bp, Homo sapien
gttccccatccgtctccaagagtga

SEQ ID NO: 5153810 - DNA, 25 bp, Homo sapien
ctctttacttcctcgcctggttttg

SEQ ID NO: 5153811 - DNA, 25 bp, Homo sapien
tgaagcatctagtgtccacttgggc

SEQ ID NO: 5153812 - DNA, 25 bp, Homo sapien
gtgaatgtcaggctggacgtctcca

SEQ ID NO: 5153813 - DNA, 25 bp, Homo sapien
catattttagggcttcgtcagttga

SEQ ID NO: 5153814 - DNA, 25 bp, Homo sapien
gcaaagaccctgacccgtctgtgtt

SEQ ID NO: 5153815 - DNA, 25 bp, Homo sapien
ccacgtgacttgtgaggtctttcaa

SEQ ID NO: 5153816 - DNA, 25 bp, Homo sapien
cattatgtagtgttcatgagcctca

SEQ ID NO: 5153817 - DNA, 25 bp, Homo sapien
tctagcctccactcctagatctgga

SEQ ID NO: 5153818 - DNA, 25 bp, Homo sapien
tgtgaggcccctagcgttgttttct

SEQ ID NO: 5153819 - DNA, 25 bp, Homo sapien
caaggcacgtgggattgtctccctc

SEQ ID NO: 5153820 - DNA, 25 bp, Homo sapien
aacctgtaaggatgagctgagaaca

SEQ ID NO: 5153821 - DNA, 25 bp, Homo sapien
gccaagaagagttcatcggtgtcct

SEQ ID NO: 5153822 - DNA, 25 bp, Homo sapien
agaagagttcatcggtgtcctcaga

SEQ ID NO: 5153823 - DNA, 25 bp, Homo sapien
gagttcatcggtgtcctcagattct

SEQ ID NO: 5153824 - DNA, 25 bp, Homo sapien
ggaagccaagaagagttcatcggtg

SEQ ID NO: 5153825 - DNA, 25 bp, Homo sapien
gacgccattagctagcttgtctcca

SEQ ID NO: 5153826 - DNA, 25 bp, Homo sapien
gccattagctagcttgtctccagct

SEQ ID NO: 5153827 - DNA, 25 bp, Homo sapien
acgccattagctagcttgtctccag

SEQ ID NO: 5153828 - DNA, 25 bp, Homo sapien
ctgacgccattagctagcttgtctc

SEQ ID NO: 5153829 - DNA, 25 bp, Homo sapien
gaagccctccaggcgatagaggcgt

SEQ ID NO: 5153830 - DNA, 25 bp, Homo sapien
tccaggcgatagaggcgtgaggcca

SEQ ID NO: 5153831 - DNA, 25 bp, Homo sapien
caagttccaggctaccttgttgttc

SEQ ID NO: 5153832 - DNA, 25 bp, Homo sapien
aggccaagttccaggctaccttgtt

SEQ ID NO: 5153833 - DNA, 25 bp, Homo sapien
tgctaccctattcagtgtacactgg

SEQ ID NO: 5153834 - DNA, 25 bp, Homo sapien
cagccagggtctggtatgccctgct

SEQ ID NO: 5153835 - DNA, 25 bp, Homo sapien
agtaagcagcagatacagtgagggt

SEQ ID NO: 5153836 - DNA, 25 bp, Homo sapien
catgactgagagtaagcagcagata

SEQ ID NO: 5153837 - DNA, 25 bp, Homo sapien
agccacagccctgctaaagtcattg

SEQ ID NO: 5153838 - DNA, 25 bp, Homo sapien
tagaggattcgctcccgttcctgag

SEQ ID NO: 5153839 - DNA, 25 bp, Homo sapien
cgtctggagaactggtagaggattc

SEQ ID NO: 5153840 - DNA, 25 bp, Homo sapien
ccggattgcaatggtggaagcgtct

SEQ ID NO: 5153841 - DNA, 25 bp, Homo sapien
ccccggattgcaatggtggaagcgt

SEQ ID NO: 5153842 - DNA, 25 bp, Homo sapien
gattgcacatgtcaaggtgtgtaca

SEQ ID NO: 5153843 - DNA, 25 bp, Homo sapien
gcagcatgattgcacatgtcaaggt

SEQ ID NO: 5153844 - DNA, 25 bp, Homo sapien
ggtccgtgttaagcagcatgattgc

SEQ ID NO: 5153845 - DNA, 25 bp, Homo sapien
ctgtccatgcaggtccgtgttaagc

SEQ ID NO: 5153846 - DNA, 25 bp, Homo sapien
gttatgaattcctggcagctcatgc

SEQ ID NO: 5153847 - DNA, 25 bp, Homo sapien
catccctcagcccattcaggttggt

SEQ ID NO: 5153848 - DNA, 25 bp, Homo sapien
cagctccttggggaagttcccgcca

SEQ ID NO: 5153849 - DNA, 25 bp, Homo sapien
cattcaggttggttatgaattcctg

SEQ ID NO: 5153850 - DNA, 25 bp, Homo sapien
caaggatattttggcaaagccagtc

SEQ ID NO: 5153851 - DNA, 25 bp, Homo sapien
gcatctcccttggaacaaagaacca

SEQ ID NO: 5153852 - DNA, 25 bp, Homo sapien
aggctcataagaagaccccgtggca

SEQ ID NO: 5153853 - DNA, 25 bp, Homo sapien
tagcccttcaataaacaagtcctgt

SEQ ID NO: 5153854 - DNA, 25 bp, Homo sapien
acggcccactcgagcttctcgctgc

SEQ ID NO: 5153855 - DNA, 25 bp, Homo sapien
ccactcgagcttctcgctgcggata

SEQ ID NO: 5153856 - DNA, 25 bp, Homo sapien
gagcttctcgctgcggatagaccag

SEQ ID NO: 5153857 - DNA, 25 bp, Homo sapien
ctcgctgcggatagaccagtagagg

SEQ ID NO: 5153858 - DNA, 25 bp, Homo sapien
tgaacatcagagaatcgggctggaa

SEQ ID NO: 5153859 - DNA, 25 bp, Homo sapien
gaacatcagagaatcgggctggaag

SEQ ID NO: 5153860 - DNA, 25 bp, Homo sapien
aacatcagagaatcgggctggaagt

SEQ ID NO: 5153861 - DNA, 25 bp, Homo sapien
gatgccctgcttgtaggtgggcact

SEQ ID NO: 5153862 - DNA, 25 bp, Homo sapien
tgcattttccgagccaggatgccct

SEQ ID NO: 5153863 - DNA, 25 bp, Homo sapien
cttgccgtctgcatcttgatgcatt

SEQ ID NO: 5153864 - DNA, 25 bp, Homo sapien
acggctgggccttctcaggtctggc

SEQ ID NO: 5153865 - DNA, 25 bp, Homo sapien
tgcatgcatcggcacaggtccctga

SEQ ID NO: 5153866 - DNA, 25 bp, Homo sapien
gcacgccaccctgtttgtgggcagc

SEQ ID NO: 5153867 - DNA, 25 bp, Homo sapien
tgtgcatgcatcggcacaggtccct

SEQ ID NO: 5153868 - DNA, 25 bp, Homo sapien
tcccagcacgccaccctgtttgtgg

SEQ ID NO: 5153869 - DNA, 25 bp, Homo sapien
catccagcacatggtcactgttcag

SEQ ID NO: 5153870 - DNA, 25 bp, Homo sapien
actaggcctgttttgtctgggttct

SEQ ID NO: 5153871 - DNA, 25 bp, Homo sapien
tgcctgtcctcaacgcgggctgtct

SEQ ID NO: 5153872 - DNA, 25 bp, Homo sapien
cactgttcagtacgcactgaggaag

SEQ ID NO: 5153873 - DNA, 25 bp, Homo sapien
gtagtggcaaacacccaggcacaaa

SEQ ID NO: 5153874 - DNA, 25 bp, Homo sapien
caatgcccgctggaaacaaaaccat

SEQ ID NO: 5153875 - DNA, 25 bp, Homo sapien
gttccaggaacagaacacaaatgtt

SEQ ID NO: 5153876 - DNA, 25 bp, Homo sapien
aatgcagaacatgccaacacaagaa

SEQ ID NO: 5153877 - DNA, 25 bp, Homo sapien
cagtaaggtgtggaacatcttccag

SEQ ID NO: 5153878 - DNA, 25 bp, Homo sapien
cttcaggaagtagagaaccatccct

SEQ ID NO: 5153879 - DNA, 25 bp, Homo sapien
agaaccatccctcgcagtaaggtgt

SEQ ID NO: 5153880 - DNA, 25 bp, Homo sapien
ttccagccacgcttgccccatggcg

SEQ ID NO: 5153881 - DNA, 25 bp, Homo sapien
ctctcagtctcccattctgacaggg

SEQ ID NO: 5153882 - DNA, 25 bp, Homo sapien
gacaggggtgttggctcctttccta

SEQ ID NO: 5153883 - DNA, 25 bp, Homo sapien
gaggttatcatcagctgcccaccct

SEQ ID NO: 5153884 - DNA, 25 bp, Homo sapien
gaagaggttatcatcagctgcccac

SEQ ID NO: 5153885 - DNA, 25 bp, Homo sapien
ggaagaggtagaggcgccagtcagc

SEQ ID NO: 5153886 - DNA, 25 bp, Homo sapien
gaagacgtgcggcttcttggtgtaa

SEQ ID NO: 5153887 - DNA, 25 bp, Homo sapien
gggtggccagcgagtggtgcacccc

SEQ ID NO: 5153888 - DNA, 25 bp, Homo sapien
agccgtgcgcagctggaagacgtgc

SEQ ID NO: 5153889 - DNA, 25 bp, Homo sapien
gccgcacgaatctgcgctgggagcc

SEQ ID NO: 5153890 - DNA, 25 bp, Homo sapien
agtgcgtggccgcagccaagttgat

SEQ ID NO: 5153891 - DNA, 25 bp, Homo sapien
ggcccacgggcaggatgggccgcac

SEQ ID NO: 5153892 - DNA, 25 bp, Homo sapien
tgatgcgcgcgatccaggagctcat

SEQ ID NO: 5153893 - DNA, 25 bp, Homo sapien
gtgaggggcgctgtcccgggcgtcc

SEQ ID NO: 5153894 - DNA, 25 bp, Homo sapien
gttcccaggccaagtgcgcagcccg

SEQ ID NO: 5153895 - DNA, 25 bp, Homo sapien
cagcgggcggtgaggggcgctgtcc

SEQ ID NO: 5153896 - DNA, 25 bp, Homo sapien
gccgcctcggttcccaggccaagtg

SEQ ID NO: 5153897 - DNA, 25 bp, Homo sapien
gtactccttccgcaggcggtgctcc

SEQ ID NO: 5153898 - DNA, 25 bp, Homo sapien
tctcgtgggatcgatgctgctcctc

SEQ ID NO: 5153899 - DNA, 25 bp, Homo sapien
tccaggcagttctcgtgggatcgat

SEQ ID NO: 5153900 - DNA, 25 bp, Homo sapien
cggcagcgtccaggcagttctcgtg

SEQ ID NO: 5153901 - DNA, 25 bp, Homo sapien
accgaggcggccacgagagggcgga

SEQ ID NO: 5153902 - DNA, 25 bp, Homo sapien
gcggagagggcgctgcgcagcggcg

SEQ ID NO: 5153903 - DNA, 25 bp, Homo sapien
agagggcggagagggcgctgcgcag

SEQ ID NO: 5153904 - DNA, 25 bp, Homo sapien
cgagagggcggagagggcgctgcgc

SEQ ID NO: 5153905 - DNA, 25 bp, Homo sapien
gccccggcgcggtcagggcagtgac

SEQ ID NO: 5153906 - DNA, 25 bp, Homo sapien
cccgccccggcgcggtcagggcagt

SEQ ID NO: 5153907 - DNA, 25 bp, Homo sapien
ccgccccggcgcggtcagggcagtg

SEQ ID NO: 5153908 - DNA, 25 bp, Homo sapien
cgccccggcgcggtcagggcagtga

SEQ ID NO: 5153909 - DNA, 25 bp, Homo sapien
tacaaccaacaagccaagggatagc

SEQ ID NO: 5153910 - DNA, 25 bp, Homo sapien
aacaagccaagggatagcctgggac

SEQ ID NO: 5153911 - DNA, 25 bp, Homo sapien
catggatacaaccaacaagccaagg

SEQ ID NO: 5153912 - DNA, 25 bp, Homo sapien
ggagttcacagccatggatacaacc

SEQ ID NO: 5153913 - DNA, 25 bp, Homo sapien
gctctgagatgttgcgcttcacctt

SEQ ID NO: 5153914 - DNA, 25 bp, Homo sapien
gacgggctcgagtgggacttcttca

SEQ ID NO: 5153915 - DNA, 25 bp, Homo sapien
cagctgcacgtaggtctcgtagcgg

SEQ ID NO: 5153916 - DNA, 25 bp, Homo sapien
gatgatcttccggtaggttctgcgc

SEQ ID NO: 5153917 - DNA, 25 bp, Homo sapien
gaaacaaggtttgtccttcagcagg

SEQ ID NO: 5153918 - DNA, 25 bp, Homo sapien
agcaagtctaggaaatgaggccact

SEQ ID NO: 5153919 - DNA, 25 bp, Homo sapien
ggaggttcatctcaggtctaccctg

SEQ ID NO: 5153920 - DNA, 25 bp, Homo sapien
cagtggtctgaacatagagaacctc

SEQ ID NO: 5153921 - DNA, 25 bp, Homo sapien
ctcttggcgggcagcctacttgcac

SEQ ID NO: 5153922 - DNA, 25 bp, Homo sapien
cccagagctggttacaagcatggga

SEQ ID NO: 5153923 - DNA, 25 bp, Homo sapien
gaggcagtgtgtcagccggcaggca

SEQ ID NO: 5153924 - DNA, 25 bp, Homo sapien
agagccccaagtccatgagtctccg

SEQ ID NO: 5153925 - DNA, 25 bp, Homo sapien
tgcacccattgggtgcatggcctag

SEQ ID NO: 5153926 - DNA, 25 bp, Homo sapien
cattgggtgcatggcctagccctag

SEQ ID NO: 5153927 - DNA, 25 bp, Homo sapien
ggcctagccctaggccctggccgga

SEQ ID NO: 5153928 - DNA, 25 bp, Homo sapien
cacccattgggtgcatggcctagcc

SEQ ID NO: 5153929 - DNA, 25 bp, Homo sapien
gatggcctatgaccgtgtgactcct

SEQ ID NO: 5153930 - DNA, 25 bp, Homo sapien
ggcacatagaaagcgtcccatatta

SEQ ID NO: 5153931 - DNA, 25 bp, Homo sapien
gaatcccctggtactggcacataga

SEQ ID NO: 5153932 - DNA, 25 bp, Homo sapien
catacacacttggagcaaagaggga

SEQ ID NO: 5153933 - DNA, 25 bp, Homo sapien
gacacattccatatgtctccgtctc

SEQ ID NO: 5153934 - DNA, 25 bp, Homo sapien
gttgcactgcacattcacaaaaagc

SEQ ID NO: 5153935 - DNA, 25 bp, Homo sapien
aaaaaggtgcgggtcttggtgatct

SEQ ID NO: 5153936 - DNA, 25 bp, Homo sapien
ggagaccctgtatgatctggcctca

SEQ ID NO: 5153937 - DNA, 25 bp, Homo sapien
gcatttgcaggccatattctgaccc

SEQ ID NO: 5153938 - DNA, 25 bp, Homo sapien
ggccatattctgaccctacccattg

SEQ ID NO: 5153939 - DNA, 25 bp, Homo sapien
tagtacagtgcatttgcaggccata

SEQ ID NO: 5153940 - DNA, 25 bp, Homo sapien
acacaaatagtacagtgcatttgca

SEQ ID NO: 5153941 - DNA, 25 bp, Homo sapien
cataagaggctaactggccacggtc

SEQ ID NO: 5153942 - DNA, 25 bp, Homo sapien
gactagtttgcaggagatgacaccg

SEQ ID NO: 5153943 - DNA, 25 bp, Homo sapien
gaaaagctggactcaattcccggca

SEQ ID NO: 5153944 - DNA, 25 bp, Homo sapien
tgactggctcagatatgggcacacg

SEQ ID NO: 5153945 - DNA, 25 bp, Homo sapien
gaatgaggcctaagtctctgcagct

SEQ ID NO: 5153946 - DNA, 25 bp, Homo sapien
gcatctggagtttcgaagcggctta

SEQ ID NO: 5153947 - DNA, 25 bp, Homo sapien
ggaccacaagcctagaaccagaagg

SEQ ID NO: 5153948 - DNA, 25 bp, Homo sapien
tgagcatgtcgcctgctaaggagga

SEQ ID NO: 5153949 - DNA, 25 bp, Homo sapien
ctttggtaggcaccaggagaaaaca

SEQ ID NO: 5153950 - DNA, 25 bp, Homo sapien
tttatgaactacctgctatgaacgt

SEQ ID NO: 5153951 - DNA, 25 bp, Homo sapien
gaagtcttttatgaactacctgcta

SEQ ID NO: 5153952 - DNA, 25 bp, Homo sapien
acaagatgaacccaaaaggactcct

SEQ ID NO: 5153953 - DNA, 25 bp, Homo sapien
taacaaatactggttgaaggtctac

SEQ ID NO: 5153954 - DNA, 25 bp, Homo sapien
tattcctggagcttataacctaatg

SEQ ID NO: 5153955 - DNA, 25 bp, Homo sapien
actactttagattgggctgtcaggg

SEQ ID NO: 5153956 - DNA, 25 bp, Homo sapien
gaaggtctactgtataggatgctgg

SEQ ID NO: 5153957 - DNA, 25 bp, Homo sapien
cataaagcaggaaacccccgaggtg

SEQ ID NO: 5153958 - DNA, 25 bp, Homo sapien
cgccataaagcaggaaacccccgag

SEQ ID NO: 5153959 - DNA, 25 bp, Homo sapien
tcgccataaagcaggaaacccccga

SEQ ID NO: 5153960 - DNA, 25 bp, Homo sapien
tccagtcctaggccgggcctcaagg

SEQ ID NO: 5153961 - DNA, 25 bp, Homo sapien
gcggctcccgcaaggtgggccgagg

SEQ ID NO: 5153962 - DNA, 25 bp, Homo sapien
aggcggctcccgcaaggtgggccga

SEQ ID NO: 5153963 - DNA, 25 bp, Homo sapien
cggtcctaggccgggcctcaagctg

SEQ ID NO: 5153964 - DNA, 25 bp, Homo sapien
tggcaggtacaacgcccggagcctc

SEQ ID NO: 5153965 - DNA, 25 bp, Homo sapien
gtggcaggtacaacgcccggagcct

SEQ ID NO: 5153966 - DNA, 25 bp, Homo sapien
cccgtggtggcaggtacaacgcccg

SEQ ID NO: 5153967 - DNA, 25 bp, Homo sapien
gtggtggcaggtacaacgcccggag

SEQ ID NO: 5153968 - DNA, 25 bp, Homo sapien
caatgagcatgaacgaaacgtgccg

SEQ ID NO: 5153969 - DNA, 25 bp, Homo sapien
gccaagtcctaagacacaggctcag

SEQ ID NO: 5153970 - DNA, 25 bp, Homo sapien
gaatctgaatcctatctttggccca

SEQ ID NO: 5153971 - DNA, 25 bp, Homo sapien
tgagactctctatcccacgtctggg

SEQ ID NO: 5153972 - DNA, 25 bp, Homo sapien
tgcagaacccagctcgatggaaatc

SEQ ID NO: 5153973 - DNA, 25 bp, Homo sapien
gctatgtgctaatggtgccctggtg

SEQ ID NO: 5153974 - DNA, 25 bp, Homo sapien
taaggtcatagctgtgctcctggga

SEQ ID NO: 5153975 - DNA, 25 bp, Homo sapien
catgcaaccggaaagtgctgtggat

SEQ ID NO: 5153976 - DNA, 25 bp, Homo sapien
gcttgggcaacaagagcaaaactcc

SEQ ID NO: 5153977 - DNA, 25 bp, Homo sapien
ttgcagtaagcgaagatcgcaccat

SEQ ID NO: 5153978 - DNA, 25 bp, Homo sapien
tgcactccagcttgggcaacaagag

SEQ ID NO: 5153979 - DNA, 25 bp, Homo sapien
ccagcttgggcaacaagagcaaaac

SEQ ID NO: 5153980 - DNA, 25 bp, Homo sapien
tagactaaagctacttggcaggtca

SEQ ID NO: 5153981 - DNA, 25 bp, Homo sapien
tcattgcagaaccagggctcagagt

SEQ ID NO: 5153982 - DNA, 25 bp, Homo sapien
gagtctatgattcccatacaggtga

SEQ ID NO: 5153983 - DNA, 25 bp, Homo sapien
gataactctcattgggcatctgctg

SEQ ID NO: 5153984 - DNA, 25 bp, Homo sapien
tctggtaactgactgtgctgccaaa

SEQ ID NO: 5153985 - DNA, 25 bp, Homo sapien
tattcatacctgaccttaggacagg

SEQ ID NO: 5153986 - DNA, 25 bp, Homo sapien
ggtccagcagtgtccataaattatt

SEQ ID NO: 5153987 - DNA, 25 bp, Homo sapien
gctctctcacctgggcataggaatg

SEQ ID NO: 5153988 - DNA, 25 bp, Homo sapien
tatgcctttaagaaccgagtaggac

SEQ ID NO: 5153989 - DNA, 25 bp, Homo sapien
taacaggttggtgtccgtgaaaagc

SEQ ID NO: 5153990 - DNA, 25 bp, Homo sapien
tcaaccagatgaggagtgtcttcag

SEQ ID NO: 5153991 - DNA, 25 bp, Homo sapien
tatcagcgttgactgtggcaaccac

SEQ ID NO: 5153992 - DNA, 25 bp, Homo sapien
gatccttttctaagccatcagaccc

SEQ ID NO: 5153993 - DNA, 25 bp, Homo sapien
gctgagggcgtctgtgacaatgaca

SEQ ID NO: 5153994 - DNA, 25 bp, Homo sapien
agagaaagcagcctctggtgtcagg

SEQ ID NO: 5153995 - DNA, 25 bp, Homo sapien
ggctccaggcagatatcatacctcc

SEQ ID NO: 5153996 - DNA, 25 bp, Homo sapien
gcttaacaagttggacctggctggg

SEQ ID NO: 5153997 - DNA, 25 bp, Homo sapien
aagaggaggatatgctgacacaggc

SEQ ID NO: 5153998 - DNA, 25 bp, Homo sapien
tttgaaccgtgaaaagccctggctc

SEQ ID NO: 5153999 - DNA, 25 bp, Homo sapien
gacacaggcggttgatctgccaaag

SEQ ID NO: 5154000 - DNA, 25 bp, Homo sapien
ctgagtctgcctgaagagtccccaa

SEQ ID NO: 5154001 - DNA, 25 bp, Homo sapien
ttccccaaggtcaaacggctcagta

SEQ ID NO: 5154002 - DNA, 25 bp, Homo sapien
tgctatctatgcctgtgaggaccct

SEQ ID NO: 5154003 - DNA, 25 bp, Homo sapien
ggtgaaaatcacctgtgccgtcatt

SEQ ID NO: 5154004 - DNA, 25 bp, Homo sapien
ggcagttctgaatgtgctaagtcag

SEQ ID NO: 5154005 - DNA, 25 bp, Homo sapien
tgggcccctgaggagacattgcaag

SEQ ID NO: 5154006 - DNA, 25 bp, Homo sapien
gacaagcatccaggcatagctctag

SEQ ID NO: 5154007 - DNA, 25 bp, Homo sapien
taagtcagtgggtgataatgggcac

SEQ ID NO: 5154008 - DNA, 25 bp, Homo sapien
caggcataagttttgttaagctcca

SEQ ID NO: 5154009 - DNA, 25 bp, Homo sapien
ggtttaagtcagcagcaggcataag

SEQ ID NO: 5154010 - DNA, 25 bp, Homo sapien
caggcagtgtcaaagaagggatcag

SEQ ID NO: 5154011 - DNA, 25 bp, Homo sapien
gggatcaggcccaagactctttcca

SEQ ID NO: 5154012 - DNA, 25 bp, Homo sapien
tgtcttgttcaaggttgtattccca

SEQ ID NO: 5154013 - DNA, 25 bp, Homo sapien
accattaacatggtgattcctaatg

SEQ ID NO: 5154014 - DNA, 25 bp, Homo sapien
atcatatcccccaaaaggttcgaag

SEQ ID NO: 5154015 - DNA, 25 bp, Homo sapien
tcctaatgtgtcttatcatatcccc

SEQ ID NO: 5154016 - DNA, 25 bp, Homo sapien
cccgagctgggtagcaaaggttcac

SEQ ID NO: 5154017 - DNA, 25 bp, Homo sapien
gttagggcatcaggttcaaggctca

SEQ ID NO: 5154018 - DNA, 25 bp, Homo sapien
gatttagatgtgttgctcccgagct

SEQ ID NO: 5154019 - DNA, 25 bp, Homo sapien
taggagggagcttcctgaaccgact

SEQ ID NO: 5154020 - DNA, 25 bp, Homo sapien
gtgtgggcttcactagacttgtaga

SEQ ID NO: 5154021 - DNA, 25 bp, Homo sapien
tgtgggcttcactagacttgtagat

SEQ ID NO: 5154022 - DNA, 25 bp, Homo sapien
aggtgtgggcttcactagacttgta

SEQ ID NO: 5154023 - DNA, 25 bp, Homo sapien
ggtgtgggcttcactagacttgtag

SEQ ID NO: 5154024 - DNA, 25 bp, Homo sapien
gactccttcagaagcagggcaaacc

SEQ ID NO: 5154025 - DNA, 25 bp, Homo sapien
taactcatttctgtgagtatatgtg

SEQ ID NO: 5154026 - DNA, 25 bp, Homo sapien
ttttggactgtggaatctggaccgt

SEQ ID NO: 5154027 - DNA, 25 bp, Homo sapien
tatgtgagccaacaggaagacctct

SEQ ID NO: 5154028 - DNA, 25 bp, Homo sapien
tatgcatgcagcactgcctacacag

SEQ ID NO: 5154029 - DNA, 25 bp, Homo sapien
cagagctatcaacccagtgagggag

SEQ ID NO: 5154030 - DNA, 25 bp, Homo sapien
aacagtgtgagcctggcaagcactc

SEQ ID NO: 5154031 - DNA, 25 bp, Homo sapien
gcactaatctcacagaagactcctg

SEQ ID NO: 5154032 - DNA, 25 bp, Homo sapien
tggtcagatgaaagctgcacctccc

SEQ ID NO: 5154033 - DNA, 25 bp, Homo sapien
ggtgtctgcgggaagaacttgacaa

SEQ ID NO: 5154034 - DNA, 25 bp, Homo sapien
gcaaagcacgcctgcatggtcagat

SEQ ID NO: 5154035 - DNA, 25 bp, Homo sapien
tgtggattagccatacccaaagcca

SEQ ID NO: 5154036 - DNA, 25 bp, Homo sapien
caggtgagtttataaccaacattta

SEQ ID NO: 5154037 - DNA, 25 bp, Homo sapien
tataaccaacatttagactggatcc

SEQ ID NO: 5154038 - DNA, 25 bp, Homo sapien
ggtcctggtaattggagggaatcca

SEQ ID NO: 5154039 - DNA, 25 bp, Homo sapien
agggaatccagcctggcatttggaa

SEQ ID NO: 5154040 - DNA, 25 bp, Homo sapien
gtattttggaagggccctgtggatg

SEQ ID NO: 5154041 - DNA, 25 bp, Homo sapien
gacagtattttggaagggccctgtg

SEQ ID NO: 5154042 - DNA, 25 bp, Homo sapien
ttgacagtattttggaagggccctg

SEQ ID NO: 5154043 - DNA, 25 bp, Homo sapien
acagtattttggaagggccctgtgg

SEQ ID NO: 5154044 - DNA, 25 bp, Homo sapien
tgggatacctgcctggtcctagagg

SEQ ID NO: 5154045 - DNA, 25 bp, Homo sapien
gcacagaagcctatgcttgaaggcc

SEQ ID NO: 5154046 - DNA, 25 bp, Homo sapien
tagaggcatcttgtaggcacagaag

SEQ ID NO: 5154047 - DNA, 25 bp, Homo sapien
gccagatagccaggttgagcagcaa

SEQ ID NO: 5154048 - DNA, 25 bp, Homo sapien
caccatgtggccagatcatcttagg

SEQ ID NO: 5154049 - DNA, 25 bp, Homo sapien
tactaagcccctcagtgtggcaggc

SEQ ID NO: 5154050 - DNA, 25 bp, Homo sapien
tctcccaagtgtgtgctcagtctgc

SEQ ID NO: 5154051 - DNA, 25 bp, Homo sapien
tatggaactcaggagaccatgcctc

SEQ ID NO: 5154052 - DNA, 25 bp, Homo sapien
ccagtatagcacatgtgtattggtc

SEQ ID NO: 5154053 - DNA, 25 bp, Homo sapien
caccagtatagcacatgtgtattgg

SEQ ID NO: 5154054 - DNA, 25 bp, Homo sapien
cagtatagcacatgtgtattggtca

SEQ ID NO: 5154055 - DNA, 25 bp, Homo sapien
gcaccagtatagcacatgtgtattg

SEQ ID NO: 5154056 - DNA, 25 bp, Homo sapien
gatctgggatcggacttagcaacac

SEQ ID NO: 5154057 - DNA, 25 bp, Homo sapien
catcagtaggatccccagcatggag

SEQ ID NO: 5154058 - DNA, 25 bp, Homo sapien
gaaatgatgagatcgacatgcctcc

SEQ ID NO: 5154059 - DNA, 25 bp, Homo sapien
cgggtgccccatgtgctgacaagtg

SEQ ID NO: 5154060 - DNA, 25 bp, Homo sapien
tatgcttaggaacatccaaaccggg

SEQ ID NO: 5154061 - DNA, 25 bp, Homo sapien
gatcaaagagtaaagctggttccca

SEQ ID NO: 5154062 - DNA, 25 bp, Homo sapien
tatggttctgagtacacgagaagcc

SEQ ID NO: 5154063 - DNA, 25 bp, Homo sapien
tgaaacgaatgagggacacactggc

SEQ ID NO: 5154064 - DNA, 25 bp, Homo sapien
gatgcgcgctttcccactagcttgg

SEQ ID NO: 5154065 - DNA, 25 bp, Homo sapien
taaccgcatagactgctgaaggcgc

SEQ ID NO: 5154066 - DNA, 25 bp, Homo sapien
gcttggatgcaaatcgcgcttgggt

SEQ ID NO: 5154067 - DNA, 25 bp, Homo sapien
cagtcccagatgatgagatgcgcgc

SEQ ID NO: 5154068 - DNA, 25 bp, Homo sapien
ggagcagtggtcttccctcgaggct

SEQ ID NO: 5154069 - DNA, 25 bp, Homo sapien
agcagtggtcttccctcgaggctgg

SEQ ID NO: 5154070 - DNA, 25 bp, Homo sapien
ggtcttccctcgaggctggtctctg

SEQ ID NO: 5154071 - DNA, 25 bp, Homo sapien
cagtggtcttccctcgaggctggtc

SEQ ID NO: 5154072 - DNA, 25 bp, Homo sapien
tcttcctgaagggatgtactttagt

SEQ ID NO: 5154073 - DNA, 25 bp, Homo sapien
gatgtactttagtcccaacaatggt

SEQ ID NO: 5154074 - DNA, 25 bp, Homo sapien
ctctgatgcaaagtagagagctgct

SEQ ID NO: 5154075 - DNA, 25 bp, Homo sapien
ctgatgcaaagtagagagctgctgt

SEQ ID NO: 5154076 - DNA, 25 bp, Homo sapien
ggtggagcgaaaactgccagtgccc

SEQ ID NO: 5154077 - DNA, 25 bp, Homo sapien
gagggtggagcgaaaactgccagtg

SEQ ID NO: 5154078 - DNA, 25 bp, Homo sapien
atgaagtcgctgctggaagttctgc

SEQ ID NO: 5154079 - DNA, 25 bp, Homo sapien
aagtcgctgctggaagttctgctgg

SEQ ID NO: 5154080 - DNA, 25 bp, Homo sapien
gtggcttcggcaggattgggcaagt

SEQ ID NO: 5154081 - DNA, 25 bp, Homo sapien
aatgattgattttcaggcactgcca

SEQ ID NO: 5154082 - DNA, 25 bp, Homo sapien
ccagggcaggctgtcggccatttcc

SEQ ID NO: 5154083 - DNA, 25 bp, Homo sapien
cccagggcaggctgtcggccatttc

SEQ ID NO: 5154084 - DNA, 25 bp, Homo sapien
ctggccactccctgggttccagaaa

SEQ ID NO: 5154085 - DNA, 25 bp, Homo sapien
cctggccactccctgggttccagaa

SEQ ID NO: 5154086 - DNA, 25 bp, Homo sapien
tggccactccctgggttccagaaac

SEQ ID NO: 5154087 - DNA, 25 bp, Homo sapien
tcaggacgcgcatcctaaacttctg

SEQ ID NO: 5154088 - DNA, 25 bp, Homo sapien
ctcccttcttacacttccctacctg

SEQ ID NO: 5154089 - DNA, 25 bp, Homo sapien
taaacttctgtacaccttggtcact

SEQ ID NO: 5154090 - DNA, 25 bp, Homo sapien
gggaatctctccaggtactcccttc

SEQ ID NO: 5154091 - DNA, 25 bp, Homo sapien
taagcaaaactgacttgtccacgat

SEQ ID NO: 5154092 - DNA, 25 bp, Homo sapien
taacccaagtgtggtgcaactcaaa

SEQ ID NO: 5154093 - DNA, 25 bp, Homo sapien
gatgttcacacattgctcaccaagc

SEQ ID NO: 5154094 - DNA, 25 bp, Homo sapien
tgtgggccgatcaactacttcaaac

SEQ ID NO: 5154095 - DNA, 25 bp, Homo sapien
tttgccagggcaacgtgggatgtca

SEQ ID NO: 5154096 - DNA, 25 bp, Homo sapien
tggccacctcattattgggctgctc

SEQ ID NO: 5154097 - DNA, 25 bp, Homo sapien
cacctcattattgggctgctcggcc

SEQ ID NO: 5154098 - DNA, 25 bp, Homo sapien
ctttgccagggcaacgtgggatgtc

SEQ ID NO: 5154099 - DNA, 25 bp, Homo sapien
gctgcattgggatctttccgagtgc

SEQ ID NO: 5154100 - DNA, 25 bp, Homo sapien
taccgctgcattgggatctttccga

SEQ ID NO: 5154101 - DNA, 25 bp, Homo sapien
attgggatctttccgagtgcgcagc

SEQ ID NO: 5154102 - DNA, 25 bp, Homo sapien
cataccgctgcattgggatctttcc

SEQ ID NO: 5154103 - DNA, 25 bp, Homo sapien
aaaatcttccagttcaatgggaatg

SEQ ID NO: 5154104 - DNA, 25 bp, Homo sapien
ttccagttcaatgggaatgcagagc

SEQ ID NO: 5154105 - DNA, 25 bp, Homo sapien
tcttccagttcaatgggaatgcaga

SEQ ID NO: 5154106 - DNA, 25 bp, Homo sapien
aatcttccagttcaatgggaatgca

SEQ ID NO: 5154107 - DNA, 25 bp, Homo sapien
caagctcgtgttctcccaaagcagg

SEQ ID NO: 5154108 - DNA, 25 bp, Homo sapien
gaaccactgattattgccactgatg

SEQ ID NO: 5154109 - DNA, 25 bp, Homo sapien
gctgggctgaccctagctgatattt

SEQ ID NO: 5154110 - DNA, 25 bp, Homo sapien
tttctgatgagcagcgaaccactga

SEQ ID NO: 5154111 - DNA, 25 bp, Homo sapien
tcctgcttagctcagaaactgtggg

SEQ ID NO: 5154112 - DNA, 25 bp, Homo sapien
tgcttctctgattcacccctttctc

SEQ ID NO: 5154113 - DNA, 25 bp, Homo sapien
gctcctgcttagctcagaaactgtg

SEQ ID NO: 5154114 - DNA, 25 bp, Homo sapien
ccttcctgattactggcatggagcc

SEQ ID NO: 5154115 - DNA, 25 bp, Homo sapien
cagtggggcgcacgtggatgcattt

SEQ ID NO: 5154116 - DNA, 25 bp, Homo sapien
ggccccagtggggcgcacgtggatg

SEQ ID NO: 5154117 - DNA, 25 bp, Homo sapien
ccagtggggcgcacgtggatgcatt

SEQ ID NO: 5154118 - DNA, 25 bp, Homo sapien
ccccagtggggcgcacgtggatgca

SEQ ID NO: 5154119 - DNA, 25 bp, Homo sapien
ttttcagcgccacatcccaggaaag

SEQ ID NO: 5154120 - DNA, 25 bp, Homo sapien
cttttcagcgccacatcccaggaaa

SEQ ID NO: 5154121 - DNA, 25 bp, Homo sapien
tgttgcttgtgccttactagaggtt

SEQ ID NO: 5154122 - DNA, 25 bp, Homo sapien
tcctctctgtccggtttcttccagg

SEQ ID NO: 5154123 - DNA, 25 bp, Homo sapien
tccacccccaatctgttgcttgtgc

SEQ ID NO: 5154124 - DNA, 25 bp, Homo sapien
ttgtgccttactagaggtttctgcc

SEQ ID NO: 5154125 - DNA, 25 bp, Homo sapien
tccttggactgaggttggagccagc

SEQ ID NO: 5154126 - DNA, 25 bp, Homo sapien
tctgggcctgcagctacttcctcag

SEQ ID NO: 5154127 - DNA, 25 bp, Homo sapien
gactgcctgtcccattgcccttgga

SEQ ID NO: 5154128 - DNA, 25 bp, Homo sapien
tctctgccaaggacctctgaggctt

SEQ ID NO: 5154129 - DNA, 25 bp, Homo sapien
gtagacgcctcctctttccttcatg

SEQ ID NO: 5154130 - DNA, 25 bp, Homo sapien
cagtagacgcctcctctttccttca

SEQ ID NO: 5154131 - DNA, 25 bp, Homo sapien
agacgcctcctctttccttcatgat

SEQ ID NO: 5154132 - DNA, 25 bp, Homo sapien
attcagtagacgcctcctctttcct

SEQ ID NO: 5154133 - DNA, 25 bp, Homo sapien
tcagattggcttgtgcaatatccct

SEQ ID NO: 5154134 - DNA, 25 bp, Homo sapien
tatcaaacaaattgcctcttcactg

SEQ ID NO: 5154135 - DNA, 25 bp, Homo sapien
cactgagacagtttaatgtgacggg

SEQ ID NO: 5154136 - DNA, 25 bp, Homo sapien
tatccctggcataaccgctctgtgc

SEQ ID NO: 5154137 - DNA, 25 bp, Homo sapien
cctgagcgtttgctatcactaaccg

SEQ ID NO: 5154138 - DNA, 25 bp, Homo sapien
tctacttaggcgttgtcagtgctgc

SEQ ID NO: 5154139 - DNA, 25 bp, Homo sapien
ggaaccatggcattcagatgtcaag

SEQ ID NO: 5154140 - DNA, 25 bp, Homo sapien
cagacgcattgtcagtgcaggctgc

SEQ ID NO: 5154141 - DNA, 25 bp, Homo sapien
ggaaatcgcccttaactttagcaga

SEQ ID NO: 5154142 - DNA, 25 bp, Homo sapien
gggtctctgccgaagaagcttggaa

SEQ ID NO: 5154143 - DNA, 25 bp, Homo sapien
catagaattaaatcctgagctcctc

SEQ ID NO: 5154144 - DNA, 25 bp, Homo sapien
ccactaatgtaatgtcagcgtgctg

SEQ ID NO: 5154145 - DNA, 25 bp, Homo sapien
gggcggccagcagcaatggcacccg

SEQ ID NO: 5154146 - DNA, 25 bp, Homo sapien
cattcgggcggccagcagcaatggc

SEQ ID NO: 5154147 - DNA, 25 bp, Homo sapien
ggccagcagcaatggcacccgccat

SEQ ID NO: 5154148 - DNA, 25 bp, Homo sapien
gcggccagcagcaatggcacccgcc

SEQ ID NO: 5154149 - DNA, 25 bp, Homo sapien
tgcaatgattctgtggggcgagcac

SEQ ID NO: 5154150 - DNA, 25 bp, Homo sapien
gcaatgattctgtggggcgagcaca

SEQ ID NO: 5154151 - DNA, 25 bp, Homo sapien
caatgattctgtggggcgagcacat

SEQ ID NO: 5154152 - DNA, 25 bp, Homo sapien
gcatttagcataccccaccaggcag

SEQ ID NO: 5154153 - DNA, 25 bp, Homo sapien
aatcggcatttagcataccccacca

SEQ ID NO: 5154154 - DNA, 25 bp, Homo sapien
ggcatttagcataccccaccaggca

SEQ ID NO: 5154155 - DNA, 25 bp, Homo sapien
tcggcatttagcataccccaccagg

SEQ ID NO: 5154156 - DNA, 25 bp, Homo sapien
cacaaggtgggagcatgcgtccagt

SEQ ID NO: 5154157 - DNA, 25 bp, Homo sapien
tgtgctgcgcactgagagcactcgg

SEQ ID NO: 5154158 - DNA, 25 bp, Homo sapien
tgcgtccagtcaatcgagagatcct

SEQ ID NO: 5154159 - DNA, 25 bp, Homo sapien
gagcactcggagagaaatcgtcaac

SEQ ID NO: 5154160 - DNA, 25 bp, Homo sapien
ctttgtagcccataattgtgatgat

SEQ ID NO: 5154161 - DNA, 25 bp, Homo sapien
agccaagtgagtccagactcagcca

SEQ ID NO: 5154162 - DNA, 25 bp, Homo sapien
tctctgacgcccttccaatctgtgc

SEQ ID NO: 5154163 - DNA, 25 bp, Homo sapien
aaatacaatcatgcagccaagtgag

SEQ ID NO: 5154164 - DNA, 25 bp, Homo sapien
agctgtcttccctccattgtcataa

SEQ ID NO: 5154165 - DNA, 25 bp, Homo sapien
agacaggaaaggagaatgatcgaca

SEQ ID NO: 5154166 - DNA, 25 bp, Homo sapien
gaaaggagaatgatcgacagcacct

SEQ ID NO: 5154167 - DNA, 25 bp, Homo sapien
caggaaaggagaatgatcgacagca

SEQ ID NO: 5154168 - DNA, 25 bp, Homo sapien
cctccatagaaccccactgctgagt

SEQ ID NO: 5154169 - DNA, 25 bp, Homo sapien
tccggagaatttttactaacacatc

SEQ ID NO: 5154170 - DNA, 25 bp, Homo sapien
atccggagaatttttactaacacat

SEQ ID NO: 5154171 - DNA, 25 bp, Homo sapien
cggagaatttttactaacacatcca

SEQ ID NO: 5154172 - DNA, 25 bp, Homo sapien
gagaatttttactaacacatccaaa

SEQ ID NO: 5154173 - DNA, 25 bp, Homo sapien
tcagcatttagctcctaagttcctc

SEQ ID NO: 5154174 - DNA, 25 bp, Homo sapien
cagcatttagctcctaagttcctct

SEQ ID NO: 5154175 - DNA, 25 bp, Homo sapien
cccattatgttatgactgctgtcca

SEQ ID NO: 5154176 - DNA, 25 bp, Homo sapien
gcttcaagataccattaaagatata

SEQ ID NO: 5154177 - DNA, 25 bp, Homo sapien
tgttccatgtcgcaattctccatct

SEQ ID NO: 5154178 - DNA, 25 bp, Homo sapien
tcatcctcatgtacttgagctttgt

SEQ ID NO: 5154179 - DNA, 25 bp, Homo sapien
tatccccgattaatcagaattacta

SEQ ID NO: 5154180 - DNA, 25 bp, Homo sapien
gctgtgcctagcaaagctgtcctgt

SEQ ID NO: 5154181 - DNA, 25 bp, Homo sapien
gtttataatcaatatccccgattaa

SEQ ID NO: 5154182 - DNA, 25 bp, Homo sapien
aaatgctgtgcctagcaaagctgtc

SEQ ID NO: 5154183 - DNA, 25 bp, Homo sapien
cctgagatgttatttcccagatccc

SEQ ID NO: 5154184 - DNA, 25 bp, Homo sapien
tgcctgcacgcatggcagaccacag

SEQ ID NO: 5154185 - DNA, 25 bp, Homo sapien
tctggagtaactgatgtaggaaaag

SEQ ID NO: 5154186 - DNA, 25 bp, Homo sapien
cattccagagggatgcaactccagg

SEQ ID NO: 5154187 - DNA, 25 bp, Homo sapien
gccccaggagctgagcggggaccct

SEQ ID NO: 5154188 - DNA, 25 bp, Homo sapien
ccaggagctgagcggggaccctcat

SEQ ID NO: 5154189 - DNA, 25 bp, Homo sapien
ctcggagccagagcagcaggagccc

SEQ ID NO: 5154190 - DNA, 25 bp, Homo sapien
gagccccaggagctgagcggggacc

SEQ ID NO: 5154191 - DNA, 25 bp, Homo sapien
cagggaagatggagactgggtcacc

SEQ ID NO: 5154192 - DNA, 25 bp, Homo sapien
aagatggagactgggtcacctggat

SEQ ID NO: 5154193 - DNA, 25 bp, Homo sapien
gacgcagacagggaagatggagact

SEQ ID NO: 5154194 - DNA, 25 bp, Homo sapien
actgggtcacctggatgtcacatct

SEQ ID NO: 5154195 - DNA, 25 bp, Homo sapien
tgcccggcaggtgatggtgactctg

SEQ ID NO: 5154196 - DNA, 25 bp, Homo sapien
ttgcccggcaggtgatggtgactct

SEQ ID NO: 5154197 - DNA, 25 bp, Homo sapien
cggcaggtgatggtgactctgtctc

SEQ ID NO: 5154198 - DNA, 25 bp, Homo sapien
cccggcaggtgatggtgactctgtc

SEQ ID NO: 5154199 - DNA, 25 bp, Homo sapien
gaatggggtagtataatcctgtaga

SEQ ID NO: 5154200 - DNA, 25 bp, Homo sapien
ggtagtataatcctgtagacagtaa

SEQ ID NO: 5154201 - DNA, 25 bp, Homo sapien
atgggacccccgactgcaaactgga

SEQ ID NO: 5154202 - DNA, 25 bp, Homo sapien
ggcttgtaacactgtgaatggggta

SEQ ID NO: 5154203 - DNA, 25 bp, Homo sapien
ggcaccaggaggagtagctaggaca

SEQ ID NO: 5154204 - DNA, 25 bp, Homo sapien
tcaaagtgtggatgcaatttgggaa

SEQ ID NO: 5154205 - DNA, 25 bp, Homo sapien
caccaggaggagtagctaggacagt

SEQ ID NO: 5154206 - DNA, 25 bp, Homo sapien
cagaaacttcaaagtgtggatgcaa

SEQ ID NO: 5154207 - DNA, 25 bp, Homo sapien
aggagagggtttgccctgtctgtgc

SEQ ID NO: 5154208 - DNA, 25 bp, Homo sapien
aaagatagttaaggtatagaggagg

SEQ ID NO: 5154209 - DNA, 25 bp, Homo sapien
tagttaaggtatagaggaggcttca

SEQ ID NO: 5154210 - DNA, 25 bp, Homo sapien
gccgctggggatgccgtgaaggaaa

SEQ ID NO: 5154211 - DNA, 25 bp, Homo sapien
aagcatgggaaggtgcggagcttcc

SEQ ID NO: 5154212 - DNA, 25 bp, Homo sapien
atgggctccggacaccagcgtggct

SEQ ID NO: 5154213 - DNA, 25 bp, Homo sapien
attgatatgggctccggacaccagc

SEQ ID NO: 5154214 - DNA, 25 bp, Homo sapien
agcttccagctacagagaccacctg

SEQ ID NO: 5154215 - DNA, 25 bp, Homo sapien
tgtgggtgcacttgtagtgacagca

SEQ ID NO: 5154216 - DNA, 25 bp, Homo sapien
gctcagggtctgagttgccaacaca

SEQ ID NO: 5154217 - DNA, 25 bp, Homo sapien
ctgagttgccaacacaggatgaggt

SEQ ID NO: 5154218 - DNA, 25 bp, Homo sapien
agtgtgggtgcacttgtagtgacag

SEQ ID NO: 5154219 - DNA, 25 bp, Homo sapien
tcttcatgtacctcaataacttgtg

SEQ ID NO: 5154220 - DNA, 25 bp, Homo sapien
gatcatgactgtcagtctcttcatg

SEQ ID NO: 5154221 - DNA, 25 bp, Homo sapien
gtgacccttcaactaatgcttcata

SEQ ID NO: 5154222 - DNA, 25 bp, Homo sapien
tttctgtacactaggcaaattctga

SEQ ID NO: 5154223 - DNA, 25 bp, Homo sapien
atttctgtgtccatgttccagggga

SEQ ID NO: 5154224 - DNA, 25 bp, Homo sapien
tctgtgtccatgttccaggggattc

SEQ ID NO: 5154225 - DNA, 25 bp, Homo sapien
gtgtccatgttccaggggattcctc

SEQ ID NO: 5154226 - DNA, 25 bp, Homo sapien
tgtgtccatgttccaggggattcct

SEQ ID NO: 5154227 - DNA, 25 bp, Homo sapien
tcacacaaggctactttcattgggc

SEQ ID NO: 5154228 - DNA, 25 bp, Homo sapien
agaagttgggagtccttcacttcag

SEQ ID NO: 5154229 - DNA, 25 bp, Homo sapien
cattgggcagttccagaagttggga

SEQ ID NO: 5154230 - DNA, 25 bp, Homo sapien
gctactttcattgggcagttccaga

SEQ ID NO: 5154231 - DNA, 25 bp, Homo sapien
tcttctggagccaatttcattaacc

SEQ ID NO: 5154232 - DNA, 25 bp, Homo sapien
cttctggagccaatttcattaaccc

SEQ ID NO: 5154233 - DNA, 25 bp, Homo sapien
gctggtgtcctctgttcgttgtact

SEQ ID NO: 5154234 - DNA, 25 bp, Homo sapien
tctgttcgttgtacttctgaggttg

SEQ ID NO: 5154235 - DNA, 25 bp, Homo sapien
tctgaggttgccagaatgtaaatgt

SEQ ID NO: 5154236 - DNA, 25 bp, Homo sapien
tcctctgttcgttgtacttctgagg

SEQ ID NO: 5154237 - DNA, 25 bp, Homo sapien
tcagtagacattgaagagaaaagta

SEQ ID NO: 5154238 - DNA, 25 bp, Homo sapien
catgtaacagcaaaagggggcgcac

SEQ ID NO: 5154239 - DNA, 25 bp, Homo sapien
cagagcacgcatctgataaacatgt

SEQ ID NO: 5154240 - DNA, 25 bp, Homo sapien
taatgtaatacaacagaaacagagc

SEQ ID NO: 5154241 - DNA, 25 bp, Homo sapien
tcacatggaaccagacaggagaaga

SEQ ID NO: 5154242 - DNA, 25 bp, Homo sapien
cacatggaaccagacaggagaagag

SEQ ID NO: 5154243 - DNA, 25 bp, Homo sapien
aaaatgagtcatggcttcccaaccg

SEQ ID NO: 5154244 - DNA, 25 bp, Homo sapien
aatgagtcatggcttcccaaccgtc

SEQ ID NO: 5154245 - DNA, 25 bp, Homo sapien
tttaaaatgagtcatggcttcccaa

SEQ ID NO: 5154246 - DNA, 25 bp, Homo sapien
attttaaaatgagtcatggcttccc

SEQ ID NO: 5154247 - DNA, 25 bp, Homo sapien
atggcggaaggtgaaagtcatgtct

SEQ ID NO: 5154248 - DNA, 25 bp, Homo sapien
ggcggaaggtgaaagtcatgtctta

SEQ ID NO: 5154249 - DNA, 25 bp, Homo sapien
gcggaaggtgaaagtcatgtcttac

SEQ ID NO: 5154250 - DNA, 25 bp, Homo sapien
tggcggaaggtgaaagtcatgtctt

SEQ ID NO: 5154251 - DNA, 25 bp, Homo sapien
agcctgggcgataacagagaaaatc

SEQ ID NO: 5154252 - DNA, 25 bp, Homo sapien
gcctgggcgataacagagaaaatcc

SEQ ID NO: 5154253 - DNA, 25 bp, Homo sapien
gcttccaagatggtacctcaaaagc

SEQ ID NO: 5154254 - DNA, 25 bp, Homo sapien
aaaagctgtgtcctcctgaggggat

SEQ ID NO: 5154255 - DNA, 25 bp, Homo sapien
tgtgtcctcctgaggggatgaacac

SEQ ID NO: 5154256 - DNA, 25 bp, Homo sapien
tgccaggaagtttgtgtctagtgag

SEQ ID NO: 5154257 - DNA, 25 bp, Homo sapien
tgagcccctaagcatctgataggca

SEQ ID NO: 5154258 - DNA, 25 bp, Homo sapien
caaggtaaatactatttgtgtgccc

SEQ ID NO: 5154259 - DNA, 25 bp, Homo sapien
gcctgacactaaatctcctgctctt

SEQ ID NO: 5154260 - DNA, 25 bp, Homo sapien
caatcagtaaatggcagcccttggg

SEQ ID NO: 5154261 - DNA, 25 bp, Homo sapien
atgctttgccagctttgacaatgta

SEQ ID NO: 5154262 - DNA, 25 bp, Homo sapien
gaatgctttgccagctttgacaatg

SEQ ID NO: 5154263 - DNA, 25 bp, Homo sapien
aatgctttgccagctttgacaatgt

SEQ ID NO: 5154264 - DNA, 25 bp, Homo sapien
gcacgtccctacctcagctgaaccg

SEQ ID NO: 5154265 - DNA, 25 bp, Homo sapien
cgtccctacctcagctgaaccgctg

SEQ ID NO: 5154266 - DNA, 25 bp, Homo sapien
gaaccgctgggaccaacacgccgta

SEQ ID NO: 5154267 - DNA, 25 bp, Homo sapien
acgccgtaccgcagccgcgcacgcc

SEQ ID NO: 5154268 - DNA, 25 bp, Homo sapien
tcttggcgccgaggccagacttttc

SEQ ID NO: 5154269 - DNA, 25 bp, Homo sapien
tcaggacaatcctcctccgcaggat

SEQ ID NO: 5154270 - DNA, 25 bp, Homo sapien
tgataattgtgactgggatcttggc

SEQ ID NO: 5154271 - DNA, 25 bp, Homo sapien
aattcaggacaatcctcctccgcag

SEQ ID NO: 5154272 - DNA, 25 bp, Homo sapien
gggccgggcatcattaactcccaag

SEQ ID NO: 5154273 - DNA, 25 bp, Homo sapien
gacatttgctcttgatcatgaggcc

SEQ ID NO: 5154274 - DNA, 25 bp, Homo sapien
gagaaatgggaatctaacgcagagg

SEQ ID NO: 5154275 - DNA, 25 bp, Homo sapien
gaggcaacccatacgagaagcaagt

SEQ ID NO: 5154276 - DNA, 25 bp, Homo sapien
tgaaatacattgttttggacaagaa

SEQ ID NO: 5154277 - DNA, 25 bp, Homo sapien
ctagggctttttaaccatattatga

SEQ ID NO: 5154278 - DNA, 25 bp, Homo sapien
ttccagtgttttactattacagtgc

SEQ ID NO: 5154279 - DNA, 25 bp, Homo sapien
actagggctttttaaccatattatg

SEQ ID NO: 5154280 - DNA, 25 bp, Homo sapien
tgttttactattacagtgctgctaa

SEQ ID NO: 5154281 - DNA, 25 bp, Homo sapien
atatagttcagaagtgttgtcttcc

SEQ ID NO: 5154282 - DNA, 25 bp, Homo sapien
aaatgaccgctactcttttactatg

SEQ ID NO: 5154283 - DNA, 25 bp, Homo sapien
taaaatgaccgctactcttttacta

SEQ ID NO: 5154284 - DNA, 25 bp, Homo sapien
tgaccgctactcttttactatgttg

SEQ ID NO: 5154285 - DNA, 25 bp, Homo sapien
gaccgctactcttttactatgttgc

SEQ ID NO: 5154286 - DNA, 25 bp, Homo sapien
ttggctgacagctaaggatttctcc

SEQ ID NO: 5154287 - DNA, 25 bp, Homo sapien
ccgtttctaagttccagccactctt

SEQ ID NO: 5154288 - DNA, 25 bp, Homo sapien
accttggctgacagctaaggatttc

SEQ ID NO: 5154289 - DNA, 25 bp, Homo sapien
aacagcagaggcaaccgtttctaag

SEQ ID NO: 5154290 - DNA, 25 bp, Homo sapien
aatgaagcaaactgtgtaaattcag

SEQ ID NO: 5154291 - DNA, 25 bp, Homo sapien
caatgaagcaaactgtgtaaattca

SEQ ID NO: 5154292 - DNA, 25 bp, Homo sapien
tgaagcaaactgtgtaaattcagtt

SEQ ID NO: 5154293 - DNA, 25 bp, Homo sapien
atgaagcaaactgtgtaaattcagt

SEQ ID NO: 5154294 - DNA, 25 bp, Homo sapien
gagactttcatgcactagagattaa

SEQ ID NO: 5154295 - DNA, 25 bp, Homo sapien
tatgaccaatgacagattaaattca

SEQ ID NO: 5154296 - DNA, 25 bp, Homo sapien
ttaaataagccctgacatcaaaagc

SEQ ID NO: 5154297 - DNA, 25 bp, Homo sapien
aggaccaaaacattagagcagatag

SEQ ID NO: 5154298 - DNA, 25 bp, Homo sapien
gggagtaaatgatgccgaagagatt

SEQ ID NO: 5154299 - DNA, 25 bp, Homo sapien
gtaaatgatgccgaagagatttaat

SEQ ID NO: 5154300 - DNA, 25 bp, Homo sapien
aatgatgccgaagagatttaattca

SEQ ID NO: 5154301 - DNA, 25 bp, Homo sapien
tttggttgttcaagaaagtctgtta

SEQ ID NO: 5154302 - DNA, 25 bp, Homo sapien
tttgcatcaaattctcaatagctct

SEQ ID NO: 5154303 - DNA, 25 bp, Homo sapien
ttttgcatcaaattctcaatagctc

SEQ ID NO: 5154304 - DNA, 25 bp, Homo sapien
aaagttagaagcaagaaacattaag

SEQ ID NO: 5154305 - DNA, 25 bp, Homo sapien
gaatgttccatctttacccaaacaa

SEQ ID NO: 5154306 - DNA, 25 bp, Homo sapien
acaatttgtataaaagctttctctg

SEQ ID NO: 5154307 - DNA, 25 bp, Homo sapien
ctctgaaaagctgaatcgtgtttaa

SEQ ID NO: 5154308 - DNA, 25 bp, Homo sapien
aactaagcccacaatatccctgcgg

SEQ ID NO: 5154309 - DNA, 25 bp, Homo sapien
tcagtttactgcagtgatatggaac

SEQ ID NO: 5154310 - DNA, 25 bp, Homo sapien
tctgggttggtcaagaatttgcctt

SEQ ID NO: 5154311 - DNA, 25 bp, Homo sapien
ggctgtacagtataagaatcacctg

SEQ ID NO: 5154312 - DNA, 25 bp, Homo sapien
tatcactccctaattcagcatcaac

SEQ ID NO: 5154313 - DNA, 25 bp, Homo sapien
taaatatcactccctaattcagcat

SEQ ID NO: 5154314 - DNA, 25 bp, Homo sapien
aatatcactccctaattcagcatca

SEQ ID NO: 5154315 - DNA, 25 bp, Homo sapien
aaatatcactccctaattcagcatc

SEQ ID NO: 5154316 - DNA, 25 bp, Homo sapien
ccatattttgaatccactatagtta

SEQ ID NO: 5154317 - DNA, 25 bp, Homo sapien
aatccatattttgaatccactatag

SEQ ID NO: 5154318 - DNA, 25 bp, Homo sapien
tattttgaatccactatagttatga

SEQ ID NO: 5154319 - DNA, 25 bp, Homo sapien
tttaatccatattttgaatccacta

SEQ ID NO: 5154320 - DNA, 25 bp, Homo sapien
cagggtaccatttctcagctttact

SEQ ID NO: 5154321 - DNA, 25 bp, Homo sapien
ggccacagggtaccatttctcagct

SEQ ID NO: 5154322 - DNA, 25 bp, Homo sapien
agctttacttgtgatgggctggctc

SEQ ID NO: 5154323 - DNA, 25 bp, Homo sapien
cagctttacttgtgatgggctggct

SEQ ID NO: 5154324 - DNA, 25 bp, Homo sapien
atagagagctgtcattttaagttgt

SEQ ID NO: 5154325 - DNA, 25 bp, Homo sapien
ttaaatgctgtcacatttgtagaac

SEQ ID NO: 5154326 - DNA, 25 bp, Homo sapien
ctattgcattaaatgctgtcacatt

SEQ ID NO: 5154327 - DNA, 25 bp, Homo sapien
cagaatagagagctgtcattttaag

SEQ ID NO: 5154328 - DNA, 25 bp, Homo sapien
tagcttcattgataaggccatcagg

SEQ ID NO: 5154329 - DNA, 25 bp, Homo sapien
cattgataaggccatcaggtttctc

SEQ ID NO: 5154330 - DNA, 25 bp, Homo sapien
ctagtagcttcattgataaggccat

SEQ ID NO: 5154331 - DNA, 25 bp, Homo sapien
gcttcattgataaggccatcaggtt

SEQ ID NO: 5154332 - DNA, 25 bp, Homo sapien
tttattaatgagaatggcatctgcc

SEQ ID NO: 5154333 - DNA, 25 bp, Homo sapien
tctggaaccaagtctgttttattaa

SEQ ID NO: 5154334 - DNA, 25 bp, Homo sapien
tgtcgctcttaatttctttacatct

SEQ ID NO: 5154335 - DNA, 25 bp, Homo sapien
aatggcatctgccaaagcaacttgc

SEQ ID NO: 5154336 - DNA, 25 bp, Homo sapien
taacgttcttgaagcagctcaacct

SEQ ID NO: 5154337 - DNA, 25 bp, Homo sapien
tcttgaagcagctcaaccttatacc

SEQ ID NO: 5154338 - DNA, 25 bp, Homo sapien
gaagcagctcaaccttataccttaa

SEQ ID NO: 5154339 - DNA, 25 bp, Homo sapien
gcagctcaaccttataccttaagtt

SEQ ID NO: 5154340 - DNA, 25 bp, Homo sapien
cagtgtcagagatttagcttaggtc

SEQ ID NO: 5154341 - DNA, 25 bp, Homo sapien
tgatataaagggagggtaaaagcca

SEQ ID NO: 5154342 - DNA, 25 bp, Homo sapien
tgttaacaagctggctaatagtcaa

SEQ ID NO: 5154343 - DNA, 25 bp, Homo sapien
gatggctaattcctctcaaacatgt

SEQ ID NO: 5154344 - DNA, 25 bp, Homo sapien
ctaagatttgtcctagtccatttat

SEQ ID NO: 5154345 - DNA, 25 bp, Homo sapien
tctaagatttgtcctagtccattta

SEQ ID NO: 5154346 - DNA, 25 bp, Homo sapien
ttctaagatttgtcctagtccattt

SEQ ID NO: 5154347 - DNA, 25 bp, Homo sapien
gagactgagtggaactagactgcca

SEQ ID NO: 5154348 - DNA, 25 bp, Homo sapien
ttgctgagtctatcagctgctgagc

SEQ ID NO: 5154349 - DNA, 25 bp, Homo sapien
cctgttgctgagtctatcagctgct

SEQ ID NO: 5154350 - DNA, 25 bp, Homo sapien
gaatttctcaagtagagactgagtg

SEQ ID NO: 5154351 - DNA, 25 bp, Homo sapien
ggcattcttctgctacctctgccag

SEQ ID NO: 5154352 - DNA, 25 bp, Homo sapien
gggcattcttctgctacctctgcca

SEQ ID NO: 5154353 - DNA, 25 bp, Homo sapien
ctacctctgccagcagatgagtggc

SEQ ID NO: 5154354 - DNA, 25 bp, Homo sapien
ctgctacctctgccagcagatgagt

SEQ ID NO: 5154355 - DNA, 25 bp, Homo sapien
taaactaatcaagacacaactttta

SEQ ID NO: 5154356 - DNA, 25 bp, Homo sapien
gttagaaatgtcaaacacactaaat

SEQ ID NO: 5154357 - DNA, 25 bp, Homo sapien
aagttagaaatgtcaaacacactaa

SEQ ID NO: 5154358 - DNA, 25 bp, Homo sapien
tagaaatgtcaaacacactaaattg

SEQ ID NO: 5154359 - DNA, 25 bp, Homo sapien
aaaatcaatcactgcatgtttattg

SEQ ID NO: 5154360 - DNA, 25 bp, Homo sapien
tgctcactcatccacttgaagtaag

SEQ ID NO: 5154361 - DNA, 25 bp, Homo sapien
cactcatccacttgaagtaagaaaa

SEQ ID NO: 5154362 - DNA, 25 bp, Homo sapien
acttgctcactcatccacttgaagt

SEQ ID NO: 5154363 - DNA, 25 bp, Homo sapien
caaggaagtactatttcagaaagtc

SEQ ID NO: 5154364 - DNA, 25 bp, Homo sapien
agaaagtccctagattctcagatgc

SEQ ID NO: 5154365 - DNA, 25 bp, Homo sapien
tccaacttcagtcctcatagcaagg

SEQ ID NO: 5154366 - DNA, 25 bp, Homo sapien
cctcatagcaaggaagtactatttc

SEQ ID NO: 5154367 - DNA, 25 bp, Homo sapien
aaggacaggagagtgaaaacgaaga

SEQ ID NO: 5154368 - DNA, 25 bp, Homo sapien
gggtgcaccagccaatccaagtatc

SEQ ID NO: 5154369 - DNA, 25 bp, Homo sapien
tgagtctcacaaacagggtgcacca

SEQ ID NO: 5154370 - DNA, 25 bp, Homo sapien
gggtggaattgcagctactgcttag

SEQ ID NO: 5154371 - DNA, 25 bp, Homo sapien
aatttttccctatgtctaaaggctg

SEQ ID NO: 5154372 - DNA, 25 bp, Homo sapien
tttttccctatgtctaaaggctgct

SEQ ID NO: 5154373 - DNA, 25 bp, Homo sapien
atttttccctatgtctaaaggctgc

SEQ ID NO: 5154374 - DNA, 25 bp, Homo sapien
tttccctatgtctaaaggctgcttt

SEQ ID NO: 5154375 - DNA, 25 bp, Homo sapien
tccccccattactgagcatatttat

SEQ ID NO: 5154376 - DNA, 25 bp, Homo sapien
tttaaaactgagtaagagaatgaag

SEQ ID NO: 5154377 - DNA, 25 bp, Homo sapien
gagcatatttatattgacaggtcac

SEQ ID NO: 5154378 - DNA, 25 bp, Homo sapien
gcatatttatattgacaggtcacaa

SEQ ID NO: 5154379 - DNA, 25 bp, Homo sapien
caaaggcatgaagatctaatacatt

SEQ ID NO: 5154380 - DNA, 25 bp, Homo sapien
cagagagactatcaaaggcatgaag

SEQ ID NO: 5154381 - DNA, 25 bp, Homo sapien
gatctaatacattagagagatcaac

SEQ ID NO: 5154382 - DNA, 25 bp, Homo sapien
atctaatacattagagagatcaact

SEQ ID NO: 5154383 - DNA, 25 bp, Homo sapien
cctcacaggttactgtaggtattgt

SEQ ID NO: 5154384 - DNA, 25 bp, Homo sapien
taagggcatggctaaggcaaaatta

SEQ ID NO: 5154385 - DNA, 25 bp, Homo sapien
tgtgaacaatactacagactgaagg

SEQ ID NO: 5154386 - DNA, 25 bp, Homo sapien
aacactatcatgtcctacctcacag

SEQ ID NO: 5154387 - DNA, 25 bp, Homo sapien
gaacttgtaggaactattggaggga

SEQ ID NO: 5154388 - DNA, 25 bp, Homo sapien
cagatgctttgccttgaagaagagt

SEQ ID NO: 5154389 - DNA, 25 bp, Homo sapien
caaaaaagtcatgcaacggccttcc

SEQ ID NO: 5154390 - DNA, 25 bp, Homo sapien
aattaaatccttcccagctggttgc

SEQ ID NO: 5154391 - DNA, 25 bp, Homo sapien
aaacaactgattagaaattcagaga

SEQ ID NO: 5154392 - DNA, 25 bp, Homo sapien
aaaactagtcttttagcaacactat

SEQ ID NO: 5154393 - DNA, 25 bp, Homo sapien
gaagtgactttccataactgactat

SEQ ID NO: 5154394 - DNA, 25 bp, Homo sapien
gcaacactattttgtatggttaaat

SEQ ID NO: 5154395 - DNA, 25 bp, Homo sapien
gtgttcctggcacatgctgaagttt

SEQ ID NO: 5154396 - DNA, 25 bp, Homo sapien
cctggcacatgctgaagttttttct

SEQ ID NO: 5154397 - DNA, 25 bp, Homo sapien
tcaaggtgaggttgtgttcctggca

SEQ ID NO: 5154398 - DNA, 25 bp, Homo sapien
ctgatcaaggtgaggttgtgttcct

SEQ ID NO: 5154399 - DNA, 25 bp, Homo sapien
cagatccactaaaccaaatgaaatt

SEQ ID NO: 5154400 - DNA, 25 bp, Homo sapien
tcagccatgaatctagtgataggcg

SEQ ID NO: 5154401 - DNA, 25 bp, Homo sapien
ctgaatcccatagccctttggctgt

SEQ ID NO: 5154402 - DNA, 25 bp, Homo sapien
tctgttagagagacctcagccatga

SEQ ID NO: 5154403 - DNA, 25 bp, Homo sapien
taggaaagattttctgaccttccgc

SEQ ID NO: 5154404 - DNA, 25 bp, Homo sapien
tctgaccttccgctgatgcaggtca

SEQ ID NO: 5154405 - DNA, 25 bp, Homo sapien
tgccctctctatacacagaggaaaa

SEQ ID NO: 5154406 - DNA, 25 bp, Homo sapien
tctatacacagaggaaaagaacatc

SEQ ID NO: 5154407 - DNA, 25 bp, Homo sapien
attttggatatcttttgtatcttga

SEQ ID NO: 5154408 - DNA, 25 bp, Homo sapien
aattttggatatcttttgtatcttg

SEQ ID NO: 5154409 - DNA, 25 bp, Homo sapien
ttttggatatcttttgtatcttgac

SEQ ID NO: 5154410 - DNA, 25 bp, Homo sapien
caattttggatatcttttgtatctt

SEQ ID NO: 5154411 - DNA, 25 bp, Homo sapien
cagggatagagccttaataacacat

SEQ ID NO: 5154412 - DNA, 25 bp, Homo sapien
taacacatatatactaggtcctagg

SEQ ID NO: 5154413 - DNA, 25 bp, Homo sapien
caaagaatccatgaaaaatagataa

SEQ ID NO: 5154414 - DNA, 25 bp, Homo sapien
atactaggtcctaggtattacccat

SEQ ID NO: 5154415 - DNA, 25 bp, Homo sapien
aatgtctagggctgaaggttgttgt

SEQ ID NO: 5154416 - DNA, 25 bp, Homo sapien
cttttgtcatactaccagggtcggt

SEQ ID NO: 5154417 - DNA, 25 bp, Homo sapien
tcagattctttcgtcctacggggtg

SEQ ID NO: 5154418 - DNA, 25 bp, Homo sapien
tctggtgccttagcttaataaccaa

SEQ ID NO: 5154419 - DNA, 25 bp, Homo sapien
tttgatgggactgcttttcttgctg

SEQ ID NO: 5154420 - DNA, 25 bp, Homo sapien
tgcttccacgtttttgcaattgcga

SEQ ID NO: 5154421 - DNA, 25 bp, Homo sapien
gttgcttccacgtttttgcaattgc

SEQ ID NO: 5154422 - DNA, 25 bp, Homo sapien
gttactttatccacgcattgattga

SEQ ID NO: 5154423 - DNA, 25 bp, Homo sapien
gagaatcgctaaagtattaaagacc

SEQ ID NO: 5154424 - DNA, 25 bp, Homo sapien
tcaagagaatcgctaaagtattaaa

SEQ ID NO: 5154425 - DNA, 25 bp, Homo sapien
aagagaatcgctaaagtattaaaga

SEQ ID NO: 5154426 - DNA, 25 bp, Homo sapien
ctcaagagaatcgctaaagtattaa

SEQ ID NO: 5154427 - DNA, 25 bp, Homo sapien
gcacatctttgcataacttcctaga

SEQ ID NO: 5154428 - DNA, 25 bp, Homo sapien
tggctttagtaagggtgacatcatc

SEQ ID NO: 5154429 - DNA, 25 bp, Homo sapien
gaagcttaacatttcctctaacagg

SEQ ID NO: 5154430 - DNA, 25 bp, Homo sapien
tgaataagcatgtgccaagaggaga

SEQ ID NO: 5154431 - DNA, 25 bp, Homo sapien
ttgcatttcctggtacttcaaatgt

SEQ ID NO: 5154432 - DNA, 25 bp, Homo sapien
cttcaaatgtgattgtaacaatact

SEQ ID NO: 5154433 - DNA, 25 bp, Homo sapien
tattaagatgttcttcctttgcatt

SEQ ID NO: 5154434 - DNA, 25 bp, Homo sapien
gaataaacatattaagatgttcttc

SEQ ID NO: 5154435 - DNA, 25 bp, Homo sapien
cagccttatgacctccatgcagtga

SEQ ID NO: 5154436 - DNA, 25 bp, Homo sapien
ccttatgacctccatgcagtgattg

SEQ ID NO: 5154437 - DNA, 25 bp, Homo sapien
ttatgacctccatgcagtgattgtc

SEQ ID NO: 5154438 - DNA, 25 bp, Homo sapien
ttcagccttatgacctccatgcagt

SEQ ID NO: 5154439 - DNA, 25 bp, Homo sapien
atgagctcattgtgtattgatttgc

SEQ ID NO: 5154440 - DNA, 25 bp, Homo sapien
ttgtgaacacacaagagtagacact

SEQ ID NO: 5154441 - DNA, 25 bp, Homo sapien
tatctgataaactggctcctatggg

SEQ ID NO: 5154442 - DNA, 25 bp, Homo sapien
tagaaatgggttgcaatcaatgaac

SEQ ID NO: 5154443 - DNA, 25 bp, Homo sapien
caatcgatttgttctctcagtgtca

SEQ ID NO: 5154444 - DNA, 25 bp, Homo sapien
atagagctcatggacaccctggaca

SEQ ID NO: 5154445 - DNA, 25 bp, Homo sapien
cctccagatcatagagctcatggac

SEQ ID NO: 5154446 - DNA, 25 bp, Homo sapien
cacttgttgtgatttgtctttgatt

SEQ ID NO: 5154447 - DNA, 25 bp, Homo sapien
gatgaaacattgaccacaagcttat

SEQ ID NO: 5154448 - DNA, 25 bp, Homo sapien
gacacagttcacctatcaattccag

SEQ ID NO: 5154449 - DNA, 25 bp, Homo sapien
tccaggtcagtacatcaaagtcaca

SEQ ID NO: 5154450 - DNA, 25 bp, Homo sapien
tcacattggtccttggattaaccac

SEQ ID NO: 5154451 - DNA, 25 bp, Homo sapien
cacagtagctataaacagctgttta

SEQ ID NO: 5154452 - DNA, 25 bp, Homo sapien
ctgtcacagtagctataaacagctg

SEQ ID NO: 5154453 - DNA, 25 bp, Homo sapien
tagctataaacagctgtttaaggat

SEQ ID NO: 5154454 - DNA, 25 bp, Homo sapien
ctgtttctgtcacagtagctataaa

SEQ ID NO: 5154455 - DNA, 25 bp, Homo sapien
tattatccaatccttttgataagaa

SEQ ID NO: 5154456 - DNA, 25 bp, Homo sapien
ccaatccttttgataagaaatgcct

SEQ ID NO: 5154457 - DNA, 25 bp, Homo sapien
ccttttgataagaaatgcctctagt

SEQ ID NO: 5154458 - DNA, 25 bp, Homo sapien
atccttttgataagaaatgcctcta

SEQ ID NO: 5154459 - DNA, 25 bp, Homo sapien
tatattggaattcgtaactaaagta

SEQ ID NO: 5154460 - DNA, 25 bp, Homo sapien
taatcattatatctctgcaatcagc

SEQ ID NO: 5154461 - DNA, 25 bp, Homo sapien
tcagtatatgtaaactccaaagcca

SEQ ID NO: 5154462 - DNA, 25 bp, Homo sapien
actttcatgttcagtatatgtaaac

SEQ ID NO: 5154463 - DNA, 25 bp, Homo sapien
catgtcataaaatggtgacacttac

SEQ ID NO: 5154464 - DNA, 25 bp, Homo sapien
cataaccttttatttcatgtcataa

SEQ ID NO: 5154465 - DNA, 25 bp, Homo sapien
tcatgtcataaaatggtgacactta

SEQ ID NO: 5154466 - DNA, 25 bp, Homo sapien
cagtcataaccttttatttcatgtc

SEQ ID NO: 5154467 - DNA, 25 bp, Homo sapien
ggagagctcacacggagtcctctgt

SEQ ID NO: 5154468 - DNA, 25 bp, Homo sapien
tgtccccttgtagcaatggttctcc

SEQ ID NO: 5154469 - DNA, 25 bp, Homo sapien
gaaatgcacccactctataagggct

SEQ ID NO: 5154470 - DNA, 25 bp, Homo sapien
acataccagtatgggcccagtttga

SEQ ID NO: 5154471 - DNA, 25 bp, Homo sapien
gaagcaggaacgctagtggttaccc

SEQ ID NO: 5154472 - DNA, 25 bp, Homo sapien
agcaggaacgctagtggttaccctt

SEQ ID NO: 5154473 - DNA, 25 bp, Homo sapien
caagaagcaggaacgctagtggtta

SEQ ID NO: 5154474 - DNA, 25 bp, Homo sapien
gttgcaagaagcaggaacgctagtg

SEQ ID NO: 5154475 - DNA, 25 bp, Homo sapien
cgtcttccccatcggagtcccggag

SEQ ID NO: 5154476 - DNA, 25 bp, Homo sapien
tcctctcccaggacatcgattttac

SEQ ID NO: 5154477 - DNA, 25 bp, Homo sapien
gccccggctggagcgactgctctag

SEQ ID NO: 5154478 - DNA, 25 bp, Homo sapien
cccggctggagcgactgctctagga

SEQ ID NO: 5154479 - DNA, 25 bp, Homo sapien
agccccggctggagcgactgctcta

SEQ ID NO: 5154480 - DNA, 25 bp, Homo sapien
cagccccggctggagcgactgctct

SEQ ID NO: 5154481 - DNA, 25 bp, Homo sapien
ctcggtgccaaactctgaggggtcg

SEQ ID NO: 5154482 - DNA, 25 bp, Homo sapien
cggtgccaaactctgaggggtcgct

SEQ ID NO: 5154483 - DNA, 25 bp, Homo sapien
ctcgggccgccgccctcgatgtgct

SEQ ID NO: 5154484 - DNA, 25 bp, Homo sapien
gtcgctcgggccgccgccctcgatg

SEQ ID NO: 5154485 - DNA, 25 bp, Homo sapien
aatgaaggcgcagatgccgctgagc

SEQ ID NO: 5154486 - DNA, 25 bp, Homo sapien
cgggcatcttcagaggccgccgcag

SEQ ID NO: 5154487 - DNA, 25 bp, Homo sapien
ctaatgaaggcgcagatgccgctga

SEQ ID NO: 5154488 - DNA, 25 bp, Homo sapien
ggctttgccggctgccgggcatctt

SEQ ID NO: 5154489 - DNA, 25 bp, Homo sapien
gaggatgcgggtgcagcagagcgta

SEQ ID NO: 5154490 - DNA, 25 bp, Homo sapien
tgctttcttcggtgccccggcatag

SEQ ID NO: 5154491 - DNA, 25 bp, Homo sapien
tcccggtggcgacgccagacccttg

SEQ ID NO: 5154492 - DNA, 25 bp, Homo sapien
cagcagagcgtaagggcgtctcccg

SEQ ID NO: 5154493 - DNA, 25 bp, Homo sapien
tgtccgacaggcttgacggtcgctg

SEQ ID NO: 5154494 - DNA, 25 bp, Homo sapien
gcaaaattgtccgacaggcttgacg

SEQ ID NO: 5154495 - DNA, 25 bp, Homo sapien
aaattgtccgacaggcttgacggtc

SEQ ID NO: 5154496 - DNA, 25 bp, Homo sapien
tccgacaggcttgacggtcgctgga

SEQ ID NO: 5154497 - DNA, 25 bp, Homo sapien
tgccaccgcctgataccgcagcagc

SEQ ID NO: 5154498 - DNA, 25 bp, Homo sapien
caccgcctgataccgcagcagcgcc

SEQ ID NO: 5154499 - DNA, 25 bp, Homo sapien
gccaccgcctgataccgcagcagcg

SEQ ID NO: 5154500 - DNA, 25 bp, Homo sapien
ccaccgcctgataccgcagcagcgc

SEQ ID NO: 5154501 - DNA, 25 bp, Homo sapien
atggagaatatatttacatgccctc

SEQ ID NO: 5154502 - DNA, 25 bp, Homo sapien
aattgatctcaaacggttttccagc

SEQ ID NO: 5154503 - DNA, 25 bp, Homo sapien
gagaatatatttacatgccctccta

SEQ ID NO: 5154504 - DNA, 25 bp, Homo sapien
acatgttggccactacattccaaat

SEQ ID NO: 5154505 - DNA, 25 bp, Homo sapien
tgtttgatcggagaacaacgttcaa

SEQ ID NO: 5154506 - DNA, 25 bp, Homo sapien
caacgttcaatttactccgccacgg

SEQ ID NO: 5154507 - DNA, 25 bp, Homo sapien
gatcggagaacaacgttcaatttac

SEQ ID NO: 5154508 - DNA, 25 bp, Homo sapien
agctcctgtttgatcggagaacaac

SEQ ID NO: 5154509 - DNA, 25 bp, Homo sapien
agcactcggccgacgctgtcactgt

SEQ ID NO: 5154510 - DNA, 25 bp, Homo sapien
tcggccgacgctgtcactgtcatcg

SEQ ID NO: 5154511 - DNA, 25 bp, Homo sapien
gggaagcactcggccgacgctgtca

SEQ ID NO: 5154512 - DNA, 25 bp, Homo sapien
acgctgtcactgtcatcggcgtcat

SEQ ID NO: 5154513 - DNA, 25 bp, Homo sapien
gcgtcttcttcagtgcgtgctgcga

SEQ ID NO: 5154514 - DNA, 25 bp, Homo sapien
aggacgcgcagaacgcccccgtgaa

SEQ ID NO: 5154515 - DNA, 25 bp, Homo sapien
tcagcggttccgaaagcaaacctgg

SEQ ID NO: 5154516 - DNA, 25 bp, Homo sapien
gggtctcggcgagagcaaagcgcgt

SEQ ID NO: 5154517 - DNA, 25 bp, Homo sapien
gatactcgatgtacgcggaatgggc

SEQ ID NO: 5154518 - DNA, 25 bp, Homo sapien
ggtcccctctgcttgcgaccctcgg

SEQ ID NO: 5154519 - DNA, 25 bp, Homo sapien
ttgggacttgctggcagccgccggt

SEQ ID NO: 5154520 - DNA, 25 bp, Homo sapien
cagccgccgggaccctggtgcacct

SEQ ID NO: 5154521 - DNA, 25 bp, Homo sapien
tatatgacgtgacatgaagtgctgg

SEQ ID NO: 5154522 - DNA, 25 bp, Homo sapien
tacacgcaaatataaaatacccgac

SEQ ID NO: 5154523 - DNA, 25 bp, Homo sapien
aatacttaagcactgtgacctgttg

SEQ ID NO: 5154524 - DNA, 25 bp, Homo sapien
gccaaatcggcattaaatacttaag

SEQ ID NO: 5154525 - DNA, 25 bp, Homo sapien
caaaatcgctgtgggtatacacccc

SEQ ID NO: 5154526 - DNA, 25 bp, Homo sapien
tactgcccatatcacagggtgtgta

SEQ ID NO: 5154527 - DNA, 25 bp, Homo sapien
ggtagacactccttctttgatatgg

SEQ ID NO: 5154528 - DNA, 25 bp, Homo sapien
gggtgtgtacaccagaactgctatg

SEQ ID NO: 5154529 - DNA, 25 bp, Homo sapien
gccagcgggggaggggaagatatta

SEQ ID NO: 5154530 - DNA, 25 bp, Homo sapien
gaagatattacccccaatatcgcag

SEQ ID NO: 5154531 - DNA, 25 bp, Homo sapien
gggaagatattacccccaatatcgc

SEQ ID NO: 5154532 - DNA, 25 bp, Homo sapien
agccagcgggggaggggaagatatt

SEQ ID NO: 5154533 - DNA, 25 bp, Homo sapien
cagaagaggtgtacactccctgcga

SEQ ID NO: 5154534 - DNA, 25 bp, Homo sapien
cattgctatgttgggagtcatgtca

SEQ ID NO: 5154535 - DNA, 25 bp, Homo sapien
taggagcaatatcaccgggtggctg

SEQ ID NO: 5154536 - DNA, 25 bp, Homo sapien
cagtgtcacagggtgagtgtacacc

SEQ ID NO: 5154537 - DNA, 25 bp, Homo sapien
tgcattataaaggaccatctcctgt

SEQ ID NO: 5154538 - DNA, 25 bp, Homo sapien
tctattgcagcacagatcacactgc

SEQ ID NO: 5154539 - DNA, 25 bp, Homo sapien
cacactgcattataaaggaccatct

SEQ ID NO: 5154540 - DNA, 25 bp, Homo sapien
caggctcaataaaggctggtagaat

SEQ ID NO: 5154541 - DNA, 25 bp, Homo sapien
ccccactcatttctgtacagcttcc

SEQ ID NO: 5154542 - DNA, 25 bp, Homo sapien
catttctgtacagcttcccatgtgc

SEQ ID NO: 5154543 - DNA, 25 bp, Homo sapien
tcatttctgtacagcttcccatgtg

SEQ ID NO: 5154544 - DNA, 25 bp, Homo sapien
ccactcatttctgtacagcttccca

SEQ ID NO: 5154545 - DNA, 25 bp, Homo sapien
gccatttatttactccatgtcccag

SEQ ID NO: 5154546 - DNA, 25 bp, Homo sapien
aggttgaacagtatccacacacccc

SEQ ID NO: 5154547 - DNA, 25 bp, Homo sapien
catttaaccctatctccctctttag

SEQ ID NO: 5154548 - DNA, 25 bp, Homo sapien
ccctatctccctctttagcttaaag

SEQ ID NO: 5154549 - DNA, 25 bp, Homo sapien
gagctgcactgtcacgcttcgcccc

SEQ ID NO: 5154550 - DNA, 25 bp, Homo sapien
ttcagctgctcgttctgccatctgc

SEQ ID NO: 5154551 - DNA, 25 bp, Homo sapien
gaacacctccagcgtgcttggagct

SEQ ID NO: 5154552 - DNA, 25 bp, Homo sapien
cacctccagcgtgcttggagctgca

SEQ ID NO: 5154553 - DNA, 25 bp, Homo sapien
ttcttcctctgctgccctcatacat

SEQ ID NO: 5154554 - DNA, 25 bp, Homo sapien
tgtttctgggctgctttgccaactc

SEQ ID NO: 5154555 - DNA, 25 bp, Homo sapien
ctgggctgctttgccaactcttctt

SEQ ID NO: 5154556 - DNA, 25 bp, Homo sapien
tcactcctcctcttcatgtgtttct

SEQ ID NO: 5154557 - DNA, 25 bp, Homo sapien
ctgcaagttgtagtggaagtaagca

SEQ ID NO: 5154558 - DNA, 25 bp, Homo sapien
tgcaagttgtagtggaagtaagcat

SEQ ID NO: 5154559 - DNA, 25 bp, Homo sapien
gaccaaggatatacattactaggcg

SEQ ID NO: 5154560 - DNA, 25 bp, Homo sapien
tggtcccttcatccaacattctcag

SEQ ID NO: 5154561 - DNA, 25 bp, Homo sapien
tgctgtcaaaagaccgcagccaatc

SEQ ID NO: 5154562 - DNA, 25 bp, Homo sapien
acaggcagttaattcttccacacgg

SEQ ID NO: 5154563 - DNA, 25 bp, Homo sapien
aggagggggccctacgggctgtgca

SEQ ID NO: 5154564 - DNA, 25 bp, Homo sapien
tccccttcgtaaggcaaggtactga

SEQ ID NO: 5154565 - DNA, 25 bp, Homo sapien
tatgctaacattggaaaactcattt

SEQ ID NO: 5154566 - DNA, 25 bp, Homo sapien
cattttctccccttcgtaaggcaag

SEQ ID NO: 5154567 - DNA, 25 bp, Homo sapien
gaggaacaatatccccaacacattg

SEQ ID NO: 5154568 - DNA, 25 bp, Homo sapien
tatgtgccctgcctgaccagtgttc

SEQ ID NO: 5154569 - DNA, 25 bp, Homo sapien
tggacacactgtttcaacccaagag

SEQ ID NO: 5154570 - DNA, 25 bp, Homo sapien
tgttcattccctcagagcacagcta

SEQ ID NO: 5154571 - DNA, 25 bp, Homo sapien
ttctgttggaatcaggggagcgtgt

SEQ ID NO: 5154572 - DNA, 25 bp, Homo sapien
tgttcttctataatcccctggctga

SEQ ID NO: 5154573 - DNA, 25 bp, Homo sapien
gtgttcttctataatcccctggctg

SEQ ID NO: 5154574 - DNA, 25 bp, Homo sapien
aatcaggggagcgtgttcttctata

SEQ ID NO: 5154575 - DNA, 25 bp, Homo sapien
gcttataaagtgtttggtcacagta

SEQ ID NO: 5154576 - DNA, 25 bp, Homo sapien
tactgtcctgaaatatcctgctgct

SEQ ID NO: 5154577 - DNA, 25 bp, Homo sapien
gagtaataacacacattgtatactg

SEQ ID NO: 5154578 - DNA, 25 bp, Homo sapien
cacagtaagacaactgtgagtaata

SEQ ID NO: 5154579 - DNA, 25 bp, Homo sapien
gtcctgctgcggctcccggggccgg

SEQ ID NO: 5154580 - DNA, 25 bp, Homo sapien
ccgcggcgcctcccggccggtcctg

SEQ ID NO: 5154581 - DNA, 25 bp, Homo sapien
gccggtcctgctgcggctcccgggg

SEQ ID NO: 5154582 - DNA, 25 bp, Homo sapien
ctgctgcggctcccggggccggagg

SEQ ID NO: 5154583 - DNA, 25 bp, Homo sapien
gggcactgtccgcaccgggatgcga

SEQ ID NO: 5154584 - DNA, 25 bp, Homo sapien
gtcgccggtcctcgcagggcgcggt

SEQ ID NO: 5154585 - DNA, 25 bp, Homo sapien
gcactgtccgcaccgggatgcgact

SEQ ID NO: 5154586 - DNA, 25 bp, Homo sapien
ggtgggtcgccggtcctcgcagggc

SEQ ID NO: 5154587 - DNA, 25 bp, Homo sapien
gaagttgggcgggtagctgcgctgg

SEQ ID NO: 5154588 - DNA, 25 bp, Homo sapien
cgacagcgcgctccggatgaagttg

SEQ ID NO: 5154589 - DNA, 25 bp, Homo sapien
cccgtggtgcggccctgacggtcgc

SEQ ID NO: 5154590 - DNA, 25 bp, Homo sapien
atgaagttgggcgggtagctgcgct

SEQ ID NO: 5154591 - DNA, 25 bp, Homo sapien
tggccgcggccatcggccccccgac

SEQ ID NO: 5154592 - DNA, 25 bp, Homo sapien
gccccgttggccgcggccatcggcc

SEQ ID NO: 5154593 - DNA, 25 bp, Homo sapien
tcgccccgttggccgcggccatcgg

SEQ ID NO: 5154594 - DNA, 25 bp, Homo sapien
ttggccgcggccatcggccccccga

SEQ ID NO: 5154595 - DNA, 25 bp, Homo sapien
aactgcgagctcaggctgtttagca

SEQ ID NO: 5154596 - DNA, 25 bp, Homo sapien
gggtctatgccaaaaggtgcttcta

SEQ ID NO: 5154597 - DNA, 25 bp, Homo sapien
ttgcagaagactaccgaggtcgtgg

SEQ ID NO: 5154598 - DNA, 25 bp, Homo sapien
cttgccaaatatgtcagggatcgtg

SEQ ID NO: 5154599 - DNA, 25 bp, Homo sapien
cttgtagatgtccttgagatgctgc

SEQ ID NO: 5154600 - DNA, 25 bp, Homo sapien
agatgtccttgagatgctgctggac

SEQ ID NO: 5154601 - DNA, 25 bp, Homo sapien
tatccctcttgtagatgtccttgag

SEQ ID NO: 5154602 - DNA, 25 bp, Homo sapien
ttaggtatccctcttgtagatgtcc

SEQ ID NO: 5154603 - DNA, 25 bp, Homo sapien
cccacatataattcagagacccctg

SEQ ID NO: 5154604 - DNA, 25 bp, Homo sapien
ttctatgagtgtgggtctggttgca

SEQ ID NO: 5154605 - DNA, 25 bp, Homo sapien
tatacatctgcaagacactcccctt

SEQ ID NO: 5154606 - DNA, 25 bp, Homo sapien
gaaggagggaattcaaatgccagag

SEQ ID NO: 5154607 - DNA, 25 bp, Homo sapien
cacaaacagggagatagatggagcc

SEQ ID NO: 5154608 - DNA, 25 bp, Homo sapien
caaacttccagagttcacaaaaggc

SEQ ID NO: 5154609 - DNA, 25 bp, Homo sapien
catagaagggctcattcaagttttc

SEQ ID NO: 5154610 - DNA, 25 bp, Homo sapien
tgaagaccacagactaaaagcatcc

SEQ ID NO: 5154611 - DNA, 25 bp, Homo sapien
tgccttgatcttcctgataatgcag

SEQ ID NO: 5154612 - DNA, 25 bp, Homo sapien
cattggcaacattaaacttcactcc

SEQ ID NO: 5154613 - DNA, 25 bp, Homo sapien
ttcactccaaactctccccctggtc

SEQ ID NO: 5154614 - DNA, 25 bp, Homo sapien
cctgataatgcaggagaccgcaggt

SEQ ID NO: 5154615 - DNA, 25 bp, Homo sapien
taaaccagtagatacgctgcacaaa

SEQ ID NO: 5154616 - DNA, 25 bp, Homo sapien
tctgagacgagattgggcaccctca

SEQ ID NO: 5154617 - DNA, 25 bp, Homo sapien
aaaggacaggagctataggctgctc

SEQ ID NO: 5154618 - DNA, 25 bp, Homo sapien
tctaccttgggatcatggacactaa

SEQ ID NO: 5154619 - DNA, 25 bp, Homo sapien
tatttaaacctcactctgggctccg

SEQ ID NO: 5154620 - DNA, 25 bp, Homo sapien
cctcagctgaacataaaggtaaact

SEQ ID NO: 5154621 - DNA, 25 bp, Homo sapien
gtatgtttcaaaatgacctcagctg

SEQ ID NO: 5154622 - DNA, 25 bp, Homo sapien
gaaacctaggcagctttcctgatac

SEQ ID NO: 5154623 - DNA, 25 bp, Homo sapien
cctagagtttcgtataaattgcatc

SEQ ID NO: 5154624 - DNA, 25 bp, Homo sapien
tgagggttataatggctacagccgc

SEQ ID NO: 5154625 - DNA, 25 bp, Homo sapien
taaccacatcacaattgagatacag

SEQ ID NO: 5154626 - DNA, 25 bp, Homo sapien
tccattgtatagatggaccaccatt

SEQ ID NO: 5154627 - DNA, 25 bp, Homo sapien
tgctgatattcccattgaggactgg

SEQ ID NO: 5154628 - DNA, 25 bp, Homo sapien
gatattcccattgaggactggtggg

SEQ ID NO: 5154629 - DNA, 25 bp, Homo sapien
ggcgtcttgctgatattcccattga

SEQ ID NO: 5154630 - DNA, 25 bp, Homo sapien
tgtggactggcgtcttgctgatatt

SEQ ID NO: 5154631 - DNA, 25 bp, Homo sapien
cggagaaccagagtggccccgccag

SEQ ID NO: 5154632 - DNA, 25 bp, Homo sapien
gagccggagaaccagagtggccccg

SEQ ID NO: 5154633 - DNA, 25 bp, Homo sapien
tgtccagctctcctgtacactcctc

SEQ ID NO: 5154634 - DNA, 25 bp, Homo sapien
gggcgttggccaggcaaagaagagc

SEQ ID NO: 5154635 - DNA, 25 bp, Homo sapien
gaatgtgggttgaatttggatcaga

SEQ ID NO: 5154636 - DNA, 25 bp, Homo sapien
gaatttggatcagacaggatgatga

SEQ ID NO: 5154637 - DNA, 25 bp, Homo sapien
agggcagatgtggtcccggctccca

SEQ ID NO: 5154638 - DNA, 25 bp, Homo sapien
ggttgaatttggatcagacaggatg

SEQ ID NO: 5154639 - DNA, 25 bp, Homo sapien
gaagccataaatgcatccttctcgg

SEQ ID NO: 5154640 - DNA, 25 bp, Homo sapien
ggcctgccctctgtagggtgagaaa

SEQ ID NO: 5154641 - DNA, 25 bp, Homo sapien
ggagaccttacagctctcctgtcac

SEQ ID NO: 5154642 - DNA, 25 bp, Homo sapien
atgacccactggagaccttacagct

SEQ ID NO: 5154643 - DNA, 25 bp, Homo sapien
aatattaccatctttcccttttatg

SEQ ID NO: 5154644 - DNA, 25 bp, Homo sapien
tattaccatctttcccttttatgat

SEQ ID NO: 5154645 - DNA, 25 bp, Homo sapien
taccatctttcccttttatgattgg

SEQ ID NO: 5154646 - DNA, 25 bp, Homo sapien
catctttcccttttatgattggaga

SEQ ID NO: 5154647 - DNA, 25 bp, Homo sapien
actcctgcttcctaacaagtgttta

SEQ ID NO: 5154648 - DNA, 25 bp, Homo sapien
tagagcttaatcgtgttcaaaatac

SEQ ID NO: 5154649 - DNA, 25 bp, Homo sapien
tttgtttcaaatgctactcctgctt

SEQ ID NO: 5154650 - DNA, 25 bp, Homo sapien
cctaacaagtgtttagagcttaatc

SEQ ID NO: 5154651 - DNA, 25 bp, Homo sapien
taatctcaattctgtgagggcatcc

SEQ ID NO: 5154652 - DNA, 25 bp, Homo sapien
tacgtacataatctcaattctgtga

SEQ ID NO: 5154653 - DNA, 25 bp, Homo sapien
tctcaattctgtgagggcatccgac

SEQ ID NO: 5154654 - DNA, 25 bp, Homo sapien
ttacgtacataatctcaattctgtg

SEQ ID NO: 5154655 - DNA, 25 bp, Homo sapien
tggattccactgaccacgtgctgga

SEQ ID NO: 5154656 - DNA, 25 bp, Homo sapien
ccacaagcagcttggtgcctctgaa

SEQ ID NO: 5154657 - DNA, 25 bp, Homo sapien
ctgggtcttccacaattgccgtgct

SEQ ID NO: 5154658 - DNA, 25 bp, Homo sapien
tatttctcactaagggaacatccaa

SEQ ID NO: 5154659 - DNA, 25 bp, Homo sapien
tgctgtaaccaactataaacaaata

SEQ ID NO: 5154660 - DNA, 25 bp, Homo sapien
ggcagttgctgtaaccaactataaa

SEQ ID NO: 5154661 - DNA, 25 bp, Homo sapien
gaaggcagttgctgtaaccaactat

SEQ ID NO: 5154662 - DNA, 25 bp, Homo sapien
cagttgctgtaaccaactataaaca

SEQ ID NO: 5154663 - DNA, 25 bp, Homo sapien
aatgtgacagggtgtcctaagcccc

SEQ ID NO: 5154664 - DNA, 25 bp, Homo sapien
aagataagaaccttccctgtgggag

SEQ ID NO: 5154665 - DNA, 25 bp, Homo sapien
taaacagatagacagatgcagccag

SEQ ID NO: 5154666 - DNA, 25 bp, Homo sapien
gtctagaagtctacccagagggctc

SEQ ID NO: 5154667 - DNA, 25 bp, Homo sapien
gtgggcagctcccttgtgatctgtt

SEQ ID NO: 5154668 - DNA, 25 bp, Homo sapien
aattaaatagagaagccagacgcaa

SEQ ID NO: 5154669 - DNA, 25 bp, Homo sapien
ttgtgatctgtttagttcccacccc

SEQ ID NO: 5154670 - DNA, 25 bp, Homo sapien
gcgtctctcagcctatctgaccttg

SEQ ID NO: 5154671 - DNA, 25 bp, Homo sapien
tgccttcccctcaagctcagggcca

SEQ ID NO: 5154672 - DNA, 25 bp, Homo sapien
gtcctttgtcccatcgctgccttcc

SEQ ID NO: 5154673 - DNA, 25 bp, Homo sapien
tcttcctagacctccgtcctttgtc

SEQ ID NO: 5154674 - DNA, 25 bp, Homo sapien
gttgtcttccgagcgtcaggccgcc

SEQ ID NO: 5154675 - DNA, 25 bp, Homo sapien
aggaccccgtcgacccggagcgctg

SEQ ID NO: 5154676 - DNA, 25 bp, Homo sapien
tcgcgggcctgggcacggaactcac

SEQ ID NO: 5154677 - DNA, 25 bp, Homo sapien
cgagtcgcgggcctgggcacggaac

SEQ ID NO: 5154678 - DNA, 25 bp, Homo sapien
caggaccccgtcgacccggagcgct

SEQ ID NO: 5154679 - DNA, 25 bp, Homo sapien
gcgagccgccctcccggaagctccc

SEQ ID NO: 5154680 - DNA, 25 bp, Homo sapien
tggcttccctgctagggccgggcaa

SEQ ID NO: 5154681 - DNA, 25 bp, Homo sapien
cagcggcggcgttcgcagtggagcc

SEQ ID NO: 5154682 - DNA, 25 bp, Homo sapien
cagcagctgcggaagagccgcgcga

SEQ ID NO: 5154683 - DNA, 25 bp, Homo sapien
aagctccggggcgagcccaagacgc

SEQ ID NO: 5154684 - DNA, 25 bp, Homo sapien
ccgggaacccaacgcggtgtcagag

SEQ ID NO: 5154685 - DNA, 25 bp, Homo sapien
gggaacccaacgcggtgtcagagaa

SEQ ID NO: 5154686 - DNA, 25 bp, Homo sapien
gaacccaacgcggtgtcagagaagt

SEQ ID NO: 5154687 - DNA, 25 bp, Homo sapien
acccaacgcggtgtcagagaagtgg

SEQ ID NO: 5154688 - DNA, 25 bp, Homo sapien
tatactttcgaagtgctcggagccc

SEQ ID NO: 5154689 - DNA, 25 bp, Homo sapien
agcacgcctctttgggaccgcggtt

SEQ ID NO: 5154690 - DNA, 25 bp, Homo sapien
gaaaatgcagacacagcacgcctct

SEQ ID NO: 5154691 - DNA, 25 bp, Homo sapien
agaatgtaaaccgtgcactcccagg

SEQ ID NO: 5154692 - DNA, 25 bp, Homo sapien
ttagtatacatcaccccagttgttt

SEQ ID NO: 5154693 - DNA, 25 bp, Homo sapien
ccagcccgtagtgtgtggtcaacac

SEQ ID NO: 5154694 - DNA, 25 bp, Homo sapien
ggaatctaacactaaccagcccgta

SEQ ID NO: 5154695 - DNA, 25 bp, Homo sapien
tgtttgtcttcaccacacactttgg

SEQ ID NO: 5154696 - DNA, 25 bp, Homo sapien
atacttacacgttagaaccattctg

SEQ ID NO: 5154697 - DNA, 25 bp, Homo sapien
gctaatacttacacgttagaaccat

SEQ ID NO: 5154698 - DNA, 25 bp, Homo sapien
gactgctaatacttacacgttagaa

SEQ ID NO: 5154699 - DNA, 25 bp, Homo sapien
gtatgactgctaatacttacacgtt

SEQ ID NO: 5154700 - DNA, 25 bp, Homo sapien
cttgagtaagttgccgtctctgaat

SEQ ID NO: 5154701 - DNA, 25 bp, Homo sapien
agtaagttgccgtctctgaatctga

SEQ ID NO: 5154702 - DNA, 25 bp, Homo sapien
gtaagttgccgtctctgaatctgat

SEQ ID NO: 5154703 - DNA, 25 bp, Homo sapien
tgagtaagttgccgtctctgaatct

SEQ ID NO: 5154704 - DNA, 25 bp, Homo sapien
aagcagcaatcacactgcagacagc

SEQ ID NO: 5154705 - DNA, 25 bp, Homo sapien
aaagcagcaatcacactgcagacag

SEQ ID NO: 5154706 - DNA, 25 bp, Homo sapien
ggcagaatattaagggaccaggccc

SEQ ID NO: 5154707 - DNA, 25 bp, Homo sapien
ggcacggcataggtctgacctgcca

SEQ ID NO: 5154708 - DNA, 25 bp, Homo sapien
gcacggcataggtctgacctgccag

SEQ ID NO: 5154709 - DNA, 25 bp, Homo sapien
cataggtctgacctgccagggagtg

SEQ ID NO: 5154710 - DNA, 25 bp, Homo sapien
gggcacggcataggtctgacctgcc

SEQ ID NO: 5154711 - DNA, 25 bp, Homo sapien
ccagaatgtgcgctccaggtggaga

SEQ ID NO: 5154712 - DNA, 25 bp, Homo sapien
gactcccaggagtaaaagcttccaa

SEQ ID NO: 5154713 - DNA, 25 bp, Homo sapien
gagaggtatgttgccttatccgtgg

SEQ ID NO: 5154714 - DNA, 25 bp, Homo sapien
gcaggaaaacgtgaaggaataggcc

SEQ ID NO: 5154715 - DNA, 25 bp, Homo sapien
gaccacgagaggcacctgagtcagg

SEQ ID NO: 5154716 - DNA, 25 bp, Homo sapien
cacgagaggcacctgagtcaggcag

SEQ ID NO: 5154717 - DNA, 25 bp, Homo sapien
gagaggcacctgagtcaggcagtca

SEQ ID NO: 5154718 - DNA, 25 bp, Homo sapien
gaggcacctgagtcaggcagtcaca

SEQ ID NO: 5154719 - DNA, 25 bp, Homo sapien
gattctgggatagacatgaggacca

SEQ ID NO: 5154720 - DNA, 25 bp, Homo sapien
cccacgcggttcatgctagcaatta

SEQ ID NO: 5154721 - DNA, 25 bp, Homo sapien
gagctcctcagtctaagccaagtgg

SEQ ID NO: 5154722 - DNA, 25 bp, Homo sapien
tccgaaggctgctctactgattggt

SEQ ID NO: 5154723 - DNA, 25 bp, Homo sapien
gagaggtggcggtgctccccactcc

SEQ ID NO: 5154724 - DNA, 25 bp, Homo sapien
tccgtgcaggaggagcatgtttaag

SEQ ID NO: 5154725 - DNA, 25 bp, Homo sapien
ctgcctgcgtcactgggcacagacg

SEQ ID NO: 5154726 - DNA, 25 bp, Homo sapien
gcccatggacaacgaaaagcccact

SEQ ID NO: 5154727 - DNA, 25 bp, Homo sapien
tagaatccgacccaataagccaaag

SEQ ID NO: 5154728 - DNA, 25 bp, Homo sapien
gggtctgccctgattactcctggct

SEQ ID NO: 5154729 - DNA, 25 bp, Homo sapien
cactcaagcggcttaagtgttccat

SEQ ID NO: 5154730 - DNA, 25 bp, Homo sapien
tccaccaacgttagaaggccttggc

SEQ ID NO: 5154731 - DNA, 25 bp, Homo sapien
aaggcagaggcgcgactggggttca

SEQ ID NO: 5154732 - DNA, 25 bp, Homo sapien
gtgtggtgcgcagggatgagaaggc

SEQ ID NO: 5154733 - DNA, 25 bp, Homo sapien
cgggcacgagcgagcctgtgtggtg

SEQ ID NO: 5154734 - DNA, 25 bp, Homo sapien
aggcagaggcgcgactggggttcat

SEQ ID NO: 5154735 - DNA, 25 bp, Homo sapien
cacagggccacactccatgtgcaga

SEQ ID NO: 5154736 - DNA, 25 bp, Homo sapien
cagggccacactccatgtgcagagc

SEQ ID NO: 5154737 - DNA, 25 bp, Homo sapien
catgtgcagagcagcctcagcactc

SEQ ID NO: 5154738 - DNA, 25 bp, Homo sapien
cccacagggccacactccatgtgca

SEQ ID NO: 5154739 - DNA, 25 bp, Homo sapien
caaagttaactctgatgcgtgtgta

SEQ ID NO: 5154740 - DNA, 25 bp, Homo sapien
tgttccccagatgtgccaagtgcat

SEQ ID NO: 5154741 - DNA, 25 bp, Homo sapien
tccatgttctttggccgcagcaagg

SEQ ID NO: 5154742 - DNA, 25 bp, Homo sapien
caagtgtctgatgctttaaggcaca

SEQ ID NO: 5154743 - DNA, 25 bp, Homo sapien
gagtgtcgtcacctaaattcagacg

SEQ ID NO: 5154744 - DNA, 25 bp, Homo sapien
cctgcacatagtgaacggctcactg

SEQ ID NO: 5154745 - DNA, 25 bp, Homo sapien
cgcctcagtgtggtctagctcctca

SEQ ID NO: 5154746 - DNA, 25 bp, Homo sapien
cctcatgatcacgtgcagcagacaa

SEQ ID NO: 5154747 - DNA, 25 bp, Homo sapien
aggagttgacggtgctgagttccct

SEQ ID NO: 5154748 - DNA, 25 bp, Homo sapien
cggtgctgagttccctgcactctca

SEQ ID NO: 5154749 - DNA, 25 bp, Homo sapien
ttgacggtgctgagttccctgcact

SEQ ID NO: 5154750 - DNA, 25 bp, Homo sapien
tgcagggtcgaggagttgacggtgc

SEQ ID NO: 5154751 - DNA, 25 bp, Homo sapien
atccagggggcctctacaaggataa

SEQ ID NO: 5154752 - DNA, 25 bp, Homo sapien
tccagggggcctctacaaggataat

SEQ ID NO: 5154753 - DNA, 25 bp, Homo sapien
gcaagggctctgaagtcagggtcac

SEQ ID NO: 5154754 - DNA, 25 bp, Homo sapien
ctcaggcaagggctctgaagtcagg

SEQ ID NO: 5154755 - DNA, 25 bp, Homo sapien
gccaggccctcaggcaagggctctg

SEQ ID NO: 5154756 - DNA, 25 bp, Homo sapien
caggccctcaggcaagggctctgaa

SEQ ID NO: 5154757 - DNA, 25 bp, Homo sapien
tgggccaaggagaccttctctccaa

SEQ ID NO: 5154758 - DNA, 25 bp, Homo sapien
aggagaccttctctccaatggcctg

SEQ ID NO: 5154759 - DNA, 25 bp, Homo sapien
tcaatcttggcctgggccaaggaga

SEQ ID NO: 5154760 - DNA, 25 bp, Homo sapien
gcccttgatcttctcaatcttggcc

SEQ ID NO: 5154761 - DNA, 25 bp, Homo sapien
cagggcccgctcgtccagggggcgg

SEQ ID NO: 5154762 - DNA, 25 bp, Homo sapien
ggagccatattcctgcaggcgctct

SEQ ID NO: 5154763 - DNA, 25 bp, Homo sapien
agggtcctgggcgcccgtgaagatg

SEQ ID NO: 5154764 - DNA, 25 bp, Homo sapien
cggtgcttgctctggatcctgtggc

SEQ ID NO: 5154765 - DNA, 25 bp, Homo sapien
agtccctcttctgcatcgtcctcgg

SEQ ID NO: 5154766 - DNA, 25 bp, Homo sapien
tggtgctcacgcacacaggaaagtc

SEQ ID NO: 5154767 - DNA, 25 bp, Homo sapien
ttggtgctcacgcacacaggaaagt

SEQ ID NO: 5154768 - DNA, 25 bp, Homo sapien
ctaggtggtgttgaagagcagcaag

SEQ ID NO: 5154769 - DNA, 25 bp, Homo sapien
gtggtgttgaagagcagcaaggagc

SEQ ID NO: 5154770 - DNA, 25 bp, Homo sapien
ggtgttgaagagcagcaaggagctg

SEQ ID NO: 5154771 - DNA, 25 bp, Homo sapien
tgttgaagagcagcaaggagctgac

SEQ ID NO: 5154772 - DNA, 25 bp, Homo sapien
tgccctgggtccccactaagccagg

SEQ ID NO: 5154773 - DNA, 25 bp, Homo sapien
gccctgggtccccactaagccaggc

SEQ ID NO: 5154774 - DNA, 25 bp, Homo sapien
ctgggtccccactaagccaggccgg

SEQ ID NO: 5154775 - DNA, 25 bp, Homo sapien
ggggtcaggcaagctgacacccgct

SEQ ID NO: 5154776 - DNA, 25 bp, Homo sapien
atgggggtcaggcaagctgacaccc

SEQ ID NO: 5154777 - DNA, 25 bp, Homo sapien
gtcaggcaagctgacacccgctgtc

SEQ ID NO: 5154778 - DNA, 25 bp, Homo sapien
acatgggggtcaggcaagctgacac

SEQ ID NO: 5154779 - DNA, 25 bp, Homo sapien
tgggtctttgttacagcaccagcca

SEQ ID NO: 5154780 - DNA, 25 bp, Homo sapien
gggtctttgttacagcaccagccag

SEQ ID NO: 5154781 - DNA, 25 bp, Homo sapien
catgggtctttgttacagcaccagc

SEQ ID NO: 5154782 - DNA, 25 bp, Homo sapien
cacatgggtctttgttacagcacca

SEQ ID NO: 5154783 - DNA, 25 bp, Homo sapien
atggacaagggggcatcaaacagct

SEQ ID NO: 5154784 - DNA, 25 bp, Homo sapien
tgatggacaagggggcatcaaacag

SEQ ID NO: 5154785 - DNA, 25 bp, Homo sapien
gatggacaagggggcatcaaacagc

SEQ ID NO: 5154786 - DNA, 25 bp, Homo sapien
tggacaagggggcatcaaacagctt

SEQ ID NO: 5154787 - DNA, 25 bp, Homo sapien
ctgctgttccagctgctctctcttg

SEQ ID NO: 5154788 - DNA, 25 bp, Homo sapien
tgctgttccagctgctctctcttgc

SEQ ID NO: 5154789 - DNA, 25 bp, Homo sapien
ggctcggctacctcagtgtggaagg

SEQ ID NO: 5154790 - DNA, 25 bp, Homo sapien
gtggtgttagtaccccatcttgtag

SEQ ID NO: 5154791 - DNA, 25 bp, Homo sapien
ctacaggggccgcggttgagggtgg

SEQ ID NO: 5154792 - DNA, 25 bp, Homo sapien
ggtggtgttagtaccccatcttgta

SEQ ID NO: 5154793 - DNA, 25 bp, Homo sapien
ctgctgtcgtcctgcctggcgcctt

SEQ ID NO: 5154794 - DNA, 25 bp, Homo sapien
ctgaaggagacgcgctgctgctgct

SEQ ID NO: 5154795 - DNA, 25 bp, Homo sapien
ctgctgctgtcgtcctgcctggcgc

SEQ ID NO: 5154796 - DNA, 25 bp, Homo sapien
tgctgtcgtcctgcctggcgccttg

SEQ ID NO: 5154797 - DNA, 25 bp, Homo sapien
tgagcacgccagaaatcaggtggcc

SEQ ID NO: 5154798 - DNA, 25 bp, Homo sapien
cctctgccctagaagtgagaagtcc

SEQ ID NO: 5154799 - DNA, 25 bp, Homo sapien
gaagtccagagctctacagtttgaa

SEQ ID NO: 5154800 - DNA, 25 bp, Homo sapien
aatccacccgagtgcactgagcacg

SEQ ID NO: 5154801 - DNA, 25 bp, Homo sapien
ggcggatggactctagcagagtggc

SEQ ID NO: 5154802 - DNA, 25 bp, Homo sapien
ccagctttcgctccttcatgctgcg

SEQ ID NO: 5154803 - DNA, 25 bp, Homo sapien
ttctccagctttcgctccttcatgc

SEQ ID NO: 5154804 - DNA, 25 bp, Homo sapien
cttctccagctttcgctccttcatg

SEQ ID NO: 5154805 - DNA, 25 bp, Homo sapien
gctcaaaaccatagtgcccagggca

SEQ ID NO: 5154806 - DNA, 25 bp, Homo sapien
gtgtctgcgttcacagcaggcatca

SEQ ID NO: 5154807 - DNA, 25 bp, Homo sapien
gcaaaagcagcgctgggtacaagct

SEQ ID NO: 5154808 - DNA, 25 bp, Homo sapien
tgaccattgccttggaccgctcttg

SEQ ID NO: 5154809 - DNA, 25 bp, Homo sapien
tgcccaccttggctcgtggctctca

SEQ ID NO: 5154810 - DNA, 25 bp, Homo sapien
caagtgcccaccttggctcgtggct

SEQ ID NO: 5154811 - DNA, 25 bp, Homo sapien
atcaagtgcccaccttggctcgtgg

SEQ ID NO: 5154812 - DNA, 25 bp, Homo sapien
agtgcccaccttggctcgtggctct

SEQ ID NO: 5154813 - DNA, 25 bp, Homo sapien
tcatgaccagcttgttgaagagatc

SEQ ID NO: 5154814 - DNA, 25 bp, Homo sapien
ccttgcgcctcatgaccagcttgtt

SEQ ID NO: 5154815 - DNA, 25 bp, Homo sapien
catgaccagcttgttgaagagatcc

SEQ ID NO: 5154816 - DNA, 25 bp, Homo sapien
gcctcatgaccagcttgttgaagag

SEQ ID NO: 5154817 - DNA, 25 bp, Homo sapien
ccagcccccggagacttaaatacag

SEQ ID NO: 5154818 - DNA, 25 bp, Homo sapien
cagcccccggagacttaaatacagg

SEQ ID NO: 5154819 - DNA, 25 bp, Homo sapien
acacacgggcaaaggctcctccggg

SEQ ID NO: 5154820 - DNA, 25 bp, Homo sapien
cagaggagggatggagtctgacaca

SEQ ID NO: 5154821 - DNA, 25 bp, Homo sapien
ggattcccagtcatcctcgtcctcc

SEQ ID NO: 5154822 - DNA, 25 bp, Homo sapien
gatggagtctgacacacgggcaaag

SEQ ID NO: 5154823 - DNA, 25 bp, Homo sapien
atgtcagagcaacggcccaagtctg

SEQ ID NO: 5154824 - DNA, 25 bp, Homo sapien
gaagcaggtctgagcagcttgtcct

SEQ ID NO: 5154825 - DNA, 25 bp, Homo sapien
cacacagtgctggttccgtcacccc

SEQ ID NO: 5154826 - DNA, 25 bp, Homo sapien
gtccatgtcagagcaacggcccaag

SEQ ID NO: 5154827 - DNA, 25 bp, Homo sapien
tcaagccagccttccgctccttgaa

SEQ ID NO: 5154828 - DNA, 25 bp, Homo sapien
agtccccgccccagctgtgtggcct

SEQ ID NO: 5154829 - DNA, 25 bp, Homo sapien
gtacaggcagacagaagtccccgcc

SEQ ID NO: 5154830 - DNA, 25 bp, Homo sapien
tgtgtggcctcaagccagccttccg

SEQ ID NO: 5154831 - DNA, 25 bp, Homo sapien
aagaacacagtggcgcaggctgggt

SEQ ID NO: 5154832 - DNA, 25 bp, Homo sapien
agaacacagtggcgcaggctgggtg

SEQ ID NO: 5154833 - DNA, 25 bp, Homo sapien
tcagttctttattgattggtgtgcc

SEQ ID NO: 5154834 - DNA, 25 bp, Homo sapien
tgctcagttctttattgattggtgt

SEQ ID NO: 5154835 - DNA, 25 bp, Homo sapien
ctcagttctttattgattggtgtgc

SEQ ID NO: 5154836 - DNA, 25 bp, Homo sapien
gctcagttctttattgattggtgtg

SEQ ID NO: 5154837 - DNA, 25 bp, Homo sapien
cctgcacagctagaggtcctttatt

SEQ ID NO: 5154838 - DNA, 25 bp, Homo sapien
acagctagaggtcctttattaaaag

SEQ ID NO: 5154839 - DNA, 25 bp, Homo sapien
agctagaggtcctttattaaaagca

SEQ ID NO: 5154840 - DNA, 25 bp, Homo sapien
tgcacagctagaggtcctttattaa

SEQ ID NO: 5154841 - DNA, 25 bp, Homo sapien
cactgcctagggaccaacaggggca

SEQ ID NO: 5154842 - DNA, 25 bp, Homo sapien
tgtgggagactattcctcccatctg

SEQ ID NO: 5154843 - DNA, 25 bp, Homo sapien
ggcagtcactgaccccgagacgttt

SEQ ID NO: 5154844 - DNA, 25 bp, Homo sapien
gagaccccgtgtctgtcactgaaac

SEQ ID NO: 5154845 - DNA, 25 bp, Homo sapien
gttagctgccctggactattcaccc

SEQ ID NO: 5154846 - DNA, 25 bp, Homo sapien
accttcttagaagcgagacggagca

SEQ ID NO: 5154847 - DNA, 25 bp, Homo sapien
gagacggagcagacccatctgctac

SEQ ID NO: 5154848 - DNA, 25 bp, Homo sapien
taataactaaagttagctgccctgg

SEQ ID NO: 5154849 - DNA, 25 bp, Homo sapien
tcccaaagaaatggtgggtcctggc

SEQ ID NO: 5154850 - DNA, 25 bp, Homo sapien
cattagtgcccgttggagaaaacgg

SEQ ID NO: 5154851 - DNA, 25 bp, Homo sapien
tctgtggaacccaatctgtcttcca

SEQ ID NO: 5154852 - DNA, 25 bp, Homo sapien
ctggccatccgtgagatcttcccag

SEQ ID NO: 5154853 - DNA, 25 bp, Homo sapien
ctgtgactgctcagaccagccggct

SEQ ID NO: 5154854 - DNA, 25 bp, Homo sapien
tgactgctcagaccagccggctgga

SEQ ID NO: 5154855 - DNA, 25 bp, Homo sapien
actgctcagaccagccggctggagg

SEQ ID NO: 5154856 - DNA, 25 bp, Homo sapien
tctgctgccatcggagcccaaagcc

SEQ ID NO: 5154857 - DNA, 25 bp, Homo sapien
taagtagtgcttgtgctcatctcct

SEQ ID NO: 5154858 - DNA, 25 bp, Homo sapien
ctaggccagtaagtagtgcttgtgc

SEQ ID NO: 5154859 - DNA, 25 bp, Homo sapien
ccagtaagtagtgcttgtgctcatc

SEQ ID NO: 5154860 - DNA, 25 bp, Homo sapien
gtgcttgtgctcatctccttggctg

SEQ ID NO: 5154861 - DNA, 25 bp, Homo sapien
gtcttgatctgcaggtgtctgactt

SEQ ID NO: 5154862 - DNA, 25 bp, Homo sapien
tgctgtggtcttgatctgcaggtgt

SEQ ID NO: 5154863 - DNA, 25 bp, Homo sapien
ctgtgccagggtgcaagctgagcac

SEQ ID NO: 5154864 - DNA, 25 bp, Homo sapien
tgtgccagggtgcaagctgagcact

SEQ ID NO: 5154865 - DNA, 25 bp, Homo sapien
tttgctgtctcttagcccagacttc

SEQ ID NO: 5154866 - DNA, 25 bp, Homo sapien
tgtctcttagcccagacttcccgtg

SEQ ID NO: 5154867 - DNA, 25 bp, Homo sapien
tagcccagacttcccgtgtcctttc

SEQ ID NO: 5154868 - DNA, 25 bp, Homo sapien
cttagcccagacttcccgtgtcctt

SEQ ID NO: 5154869 - DNA, 25 bp, Homo sapien
tagatggaacgctctgtaaaaactg

SEQ ID NO: 5154870 - DNA, 25 bp, Homo sapien
actgcatggtagcttttgatgggaa

SEQ ID NO: 5154871 - DNA, 25 bp, Homo sapien
tccaacaggtggctttcaattcaag

SEQ ID NO: 5154872 - DNA, 25 bp, Homo sapien
gttacatgggagatactcagggaaa

SEQ ID NO: 5154873 - DNA, 25 bp, Homo sapien
aaaggcattccctaaggtggcacag

SEQ ID NO: 5154874 - DNA, 25 bp, Homo sapien
taatgacttagccatgcctgcaaaa

SEQ ID NO: 5154875 - DNA, 25 bp, Homo sapien
ggtggaacacatagtcagcagaggt

SEQ ID NO: 5154876 - DNA, 25 bp, Homo sapien
caagggtcctaatgggatgagatcc

SEQ ID NO: 5154877 - DNA, 25 bp, Homo sapien
tccggaggcagcccagatagcctca

SEQ ID NO: 5154878 - DNA, 25 bp, Homo sapien
gccaaggtcaccaccctgatttgtc

SEQ ID NO: 5154879 - DNA, 25 bp, Homo sapien
ggccaaggtcaccaccctgatttgt

SEQ ID NO: 5154880 - DNA, 25 bp, Homo sapien
gcccagatagcctcagaagagcacc

SEQ ID NO: 5154881 - DNA, 25 bp, Homo sapien
ggagtcctgtcttggagacgaacat

SEQ ID NO: 5154882 - DNA, 25 bp, Homo sapien
tgtcttggagacgaacattctgacc

SEQ ID NO: 5154883 - DNA, 25 bp, Homo sapien
agtcctgtcttggagacgaacattc

SEQ ID NO: 5154884 - DNA, 25 bp, Homo sapien
gggagtcctgtcttggagacgaaca

SEQ ID NO: 5154885 - DNA, 25 bp, Homo sapien
caaccttacttccttaaaattgctg

SEQ ID NO: 5154886 - DNA, 25 bp, Homo sapien
tataatctttgaggaagaactttcc

SEQ ID NO: 5154887 - DNA, 25 bp, Homo sapien
tataaaaatagtgggtagttgtgac

SEQ ID NO: 5154888 - DNA, 25 bp, Homo sapien
cataactgatcttaggtacacttcc

SEQ ID NO: 5154889 - DNA, 25 bp, Homo sapien
tccttaagactgacctgggagacgt

SEQ ID NO: 5154890 - DNA, 25 bp, Homo sapien
gtccttaagactgacctgggagacg

SEQ ID NO: 5154891 - DNA, 25 bp, Homo sapien
tggaaaggtaatgagttcctgctaa

SEQ ID NO: 5154892 - DNA, 25 bp, Homo sapien
tttcatgaggttctactacatacca

SEQ ID NO: 5154893 - DNA, 25 bp, Homo sapien
taccatgttccagaaagctaaatgc

SEQ ID NO: 5154894 - DNA, 25 bp, Homo sapien
taaatcatggacaaaacgggcttcc

SEQ ID NO: 5154895 - DNA, 25 bp, Homo sapien
ttgagcaattttctcgacttgtcga

SEQ ID NO: 5154896 - DNA, 25 bp, Homo sapien
agaggaacccggtcctctccacaca

SEQ ID NO: 5154897 - DNA, 25 bp, Homo sapien
attcgttattaactgagcaggaatc

SEQ ID NO: 5154898 - DNA, 25 bp, Homo sapien
agcccagcaggtacgccgcccatgt

SEQ ID NO: 5154899 - DNA, 25 bp, Homo sapien
gcgtcctcgcagctgctacgcaacc

SEQ ID NO: 5154900 - DNA, 25 bp, Homo sapien
gtgcggttccgagtgagggctggag

SEQ ID NO: 5154901 - DNA, 25 bp, Homo sapien
agtctggactctgcgcgctctcgaa

SEQ ID NO: 5154902 - DNA, 25 bp, Homo sapien
ggagagaccagggacgctgcgggtc

SEQ ID NO: 5154903 - DNA, 25 bp, Homo sapien
tgtccccgcgtgctaagccagccac

SEQ ID NO: 5154904 - DNA, 25 bp, Homo sapien
cacaccgctagggaggcctcggagg

SEQ ID NO: 5154905 - DNA, 25 bp, Homo sapien
ctaagccagccaccggggcggattt

SEQ ID NO: 5154906 - DNA, 25 bp, Homo sapien
cctctcgcccacaccgctagggagg

SEQ ID NO: 5154907 - DNA, 25 bp, Homo sapien
cgatgtcctcgccatctaagtgggt

SEQ ID NO: 5154908 - DNA, 25 bp, Homo sapien
tgtcgatgtcctcgccatctaagtg

SEQ ID NO: 5154909 - DNA, 25 bp, Homo sapien
gcttgtcgatgtcctcgccatctaa

SEQ ID NO: 5154910 - DNA, 25 bp, Homo sapien
ttgcttgtcgatgtcctcgccatct

SEQ ID NO: 5154911 - DNA, 25 bp, Homo sapien
gatagcagcaataggtgagccttac

SEQ ID NO: 5154912 - DNA, 25 bp, Homo sapien
cattcctgagaatgtaaccacagtc

SEQ ID NO: 5154913 - DNA, 25 bp, Homo sapien
tcctcacacctaaatatgactttgc

SEQ ID NO: 5154914 - DNA, 25 bp, Homo sapien
tgcaacattatgtctagctctgttt

SEQ ID NO: 5154915 - DNA, 25 bp, Homo sapien
gaatgtaaccacagtccagactctt

SEQ ID NO: 5154916 - DNA, 25 bp, Homo sapien
ctgtagagaggggtccagcccaagg

SEQ ID NO: 5154917 - DNA, 25 bp, Homo sapien
agctgtagagaggggtccagcccaa

SEQ ID NO: 5154918 - DNA, 25 bp, Homo sapien
cagcccaagggaggggagggtattg

SEQ ID NO: 5154919 - DNA, 25 bp, Homo sapien
gtagagaggggtccagcccaaggga

SEQ ID NO: 5154920 - DNA, 25 bp, Homo sapien
gatcttcacgttgtcatcagcatca

SEQ ID NO: 5154921 - DNA, 25 bp, Homo sapien
caactcactcggtttggttttgtct

SEQ ID NO: 5154922 - DNA, 25 bp, Homo sapien
cccttggtccaactcactcggtttg

SEQ ID NO: 5154923 - DNA, 25 bp, Homo sapien
caggcagatgatcttcacgttgtca

SEQ ID NO: 5154924 - DNA, 25 bp, Homo sapien
tttattccctaatctcccaacatac

SEQ ID NO: 5154925 - DNA, 25 bp, Homo sapien
gcctctggaggactttttaaatgac

SEQ ID NO: 5154926 - DNA, 25 bp, Homo sapien
atttattccctaatctcccaacata

SEQ ID NO: 5154927 - DNA, 25 bp, Homo sapien
tcccccatgaacatctgggctccag

SEQ ID NO: 5154928 - DNA, 25 bp, Homo sapien
catggtctttgtatctgggacaacc

SEQ ID NO: 5154929 - DNA, 25 bp, Homo sapien
atggtctttgtatctgggacaacct

SEQ ID NO: 5154930 - DNA, 25 bp, Homo sapien
tggtctttgtatctgggacaacctt

SEQ ID NO: 5154931 - DNA, 25 bp, Homo sapien
gcctgagatactgctagtggatgaa

SEQ ID NO: 5154932 - DNA, 25 bp, Homo sapien
gccatccatgagaaatctctccatg

SEQ ID NO: 5154933 - DNA, 25 bp, Homo sapien
aagccatccatgagaaatctctcca

SEQ ID NO: 5154934 - DNA, 25 bp, Homo sapien
atccatgagaaatctctccatgagt

SEQ ID NO: 5154935 - DNA, 25 bp, Homo sapien
catccatgagaaatctctccatgag

SEQ ID NO: 5154936 - DNA, 25 bp, Homo sapien
cagtgggacactgatacatgagcgt

SEQ ID NO: 5154937 - DNA, 25 bp, Homo sapien
agcgtgggaagacccacaggaacaa

SEQ ID NO: 5154938 - DNA, 25 bp, Homo sapien
catgagcgtgggaagacccacagga

SEQ ID NO: 5154939 - DNA, 25 bp, Homo sapien
gacactgatacatgagcgtgggaag

SEQ ID NO: 5154940 - DNA, 25 bp, Homo sapien
aatcatggatggagctttcgcaggc

SEQ ID NO: 5154941 - DNA, 25 bp, Homo sapien
ggtagcaacatgaccattccaggga

SEQ ID NO: 5154942 - DNA, 25 bp, Homo sapien
ccatgtgggtcaatcggcaagaaac

SEQ ID NO: 5154943 - DNA, 25 bp, Homo sapien
gggattaacaccttccgaggctgca

SEQ ID NO: 5154944 - DNA, 25 bp, Homo sapien
cactggtacaagctccatggaaggg

SEQ ID NO: 5154945 - DNA, 25 bp, Homo sapien
agatgagagtgtgtcctggccatcg

SEQ ID NO: 5154946 - DNA, 25 bp, Homo sapien
ggaggagatgagagtgtgtcctggc

SEQ ID NO: 5154947 - DNA, 25 bp, Homo sapien
tgagagtgtgtcctggccatcgaag

SEQ ID NO: 5154948 - DNA, 25 bp, Homo sapien
catctaccgtggctgtgtgcttgta

SEQ ID NO: 5154949 - DNA, 25 bp, Homo sapien
taccgtggctgtgtgcttgtacagg

SEQ ID NO: 5154950 - DNA, 25 bp, Homo sapien
gggtcagggcgtacgtggacagctg

SEQ ID NO: 5154951 - DNA, 25 bp, Homo sapien
tgtgtgcttgtacagggtcagggcg

SEQ ID NO: 5154952 - DNA, 25 bp, Homo sapien
gctctctgggttctctctagcaccc

SEQ ID NO: 5154953 - DNA, 25 bp, Homo sapien
aggaaaactactgcctcgtcgaagg

SEQ ID NO: 5154954 - DNA, 25 bp, Homo sapien
ggtgctggcctggacgccaggtcag

SEQ ID NO: 5154955 - DNA, 25 bp, Homo sapien
cctggacgccaggtcagagggctgg

SEQ ID NO: 5154956 - DNA, 25 bp, Homo sapien
tccaacttctcacgtgcgatgacca

SEQ ID NO: 5154957 - DNA, 25 bp, Homo sapien
aacttctcacgtgcgatgaccacag

SEQ ID NO: 5154958 - DNA, 25 bp, Homo sapien
cacacatgcggcacaaaccacagca

SEQ ID NO: 5154959 - DNA, 25 bp, Homo sapien
actattccaacttctcacgtgcgat

SEQ ID NO: 5154960 - DNA, 25 bp, Homo sapien
acctacatgcctggtgcatttctgt

SEQ ID NO: 5154961 - DNA, 25 bp, Homo sapien
agacagacctacatgcctggtgcat

SEQ ID NO: 5154962 - DNA, 25 bp, Homo sapien
agacctacatgcctggtgcatttct

SEQ ID NO: 5154963 - DNA, 25 bp, Homo sapien
acagacctacatgcctggtgcattt

SEQ ID NO: 5154964 - DNA, 25 bp, Homo sapien
gcatgcatgctctggaaccgctcct

SEQ ID NO: 5154965 - DNA, 25 bp, Homo sapien
tgcatgctctggaaccgctcctggc

SEQ ID NO: 5154966 - DNA, 25 bp, Homo sapien
tgggccttgtggtagtaggaggcat

SEQ ID NO: 5154967 - DNA, 25 bp, Homo sapien
gccttgtggtagtaggaggcatgca

SEQ ID NO: 5154968 - DNA, 25 bp, Homo sapien
agacttgcccagtgcctttgtccac

SEQ ID NO: 5154969 - DNA, 25 bp, Homo sapien
gccagacttgcccagtgcctttgtc

SEQ ID NO: 5154970 - DNA, 25 bp, Homo sapien
cagacttgcccagtgcctttgtcca

SEQ ID NO: 5154971 - DNA, 25 bp, Homo sapien
ccagacttgcccagtgcctttgtcc

SEQ ID NO: 5154972 - DNA, 25 bp, Homo sapien
tgcctcttggatgctacacctgatg

SEQ ID NO: 5154973 - DNA, 25 bp, Homo sapien
ccttgggagcttgtctgacaggtta

SEQ ID NO: 5154974 - DNA, 25 bp, Homo sapien
cagacttggttacaagggcccaggg

SEQ ID NO: 5154975 - DNA, 25 bp, Homo sapien
tgacaggttaggtccatcagaggga

SEQ ID NO: 5154976 - DNA, 25 bp, Homo sapien
gactgcttcaccacacccgggtcac

SEQ ID NO: 5154977 - DNA, 25 bp, Homo sapien
ttggagcgactgcttcaccacaccc

SEQ ID NO: 5154978 - DNA, 25 bp, Homo sapien
catttaaaagtggtggcctgagaac

SEQ ID NO: 5154979 - DNA, 25 bp, Homo sapien
cagcatttaaaagtggtggcctgag

SEQ ID NO: 5154980 - DNA, 25 bp, Homo sapien
agccatgcatctctctcagtgccaa

SEQ ID NO: 5154981 - DNA, 25 bp, Homo sapien
caggtgacaatgagcagaacagagc

SEQ ID NO: 5154982 - DNA, 25 bp, Homo sapien
gagatgacacctactcagccatgca

SEQ ID NO: 5154983 - DNA, 25 bp, Homo sapien
caaggtaaggccgtgcgtatttaca

SEQ ID NO: 5154984 - DNA, 25 bp, Homo sapien
aatgacaaacatcagaggaggctgc

SEQ ID NO: 5154985 - DNA, 25 bp, Homo sapien
cacacacggaagagctaagctaatg

SEQ ID NO: 5154986 - DNA, 25 bp, Homo sapien
tgttgtggaagggatcagtggtgca

SEQ ID NO: 5154987 - DNA, 25 bp, Homo sapien
gcatcctgcacacgtgcatcacaga

SEQ ID NO: 5154988 - DNA, 25 bp, Homo sapien
aaagagaggtgagctcaaaatacca

SEQ ID NO: 5154989 - DNA, 25 bp, Homo sapien
gaagcagtcactccaagagaaaaag

SEQ ID NO: 5154990 - DNA, 25 bp, Homo sapien
aaaataccaaatgccactgtaggcc

SEQ ID NO: 5154991 - DNA, 25 bp, Homo sapien
ccactggtatctgtactgtgcctac

SEQ ID NO: 5154992 - DNA, 25 bp, Homo sapien
tgccctagtacaacagtcagtggat

SEQ ID NO: 5154993 - DNA, 25 bp, Homo sapien
tctgaaagacaactgagctgctgct

SEQ ID NO: 5154994 - DNA, 25 bp, Homo sapien
caggagctcctccaaagtgtctagc

SEQ ID NO: 5154995 - DNA, 25 bp, Homo sapien
gggagggtcagcaactgtcacatct

SEQ ID NO: 5154996 - DNA, 25 bp, Homo sapien
gatctcaagggatctccatatatgg

SEQ ID NO: 5154997 - DNA, 25 bp, Homo sapien
tcattatattaacgaggctggtctt

SEQ ID NO: 5154998 - DNA, 25 bp, Homo sapien
gtgttagccatcacaactgcccgat

SEQ ID NO: 5154999 - DNA, 25 bp, Homo sapien
caagggatctccatatatggagtct

SEQ ID NO: 5155000 - DNA, 25 bp, Homo sapien
tcctctgtagtaactgtaaatgttt

SEQ ID NO: 5155001 - DNA, 25 bp, Homo sapien
cctctgtagtaactgtaaatgtttc

SEQ ID NO: 5155002 - DNA, 25 bp, Homo sapien
ttcctctgtagtaactgtaaatgtt

SEQ ID NO: 5155003 - DNA, 25 bp, Homo sapien
tgctgtttgtgggaacgctctgaat

SEQ ID NO: 5155004 - DNA, 25 bp, Homo sapien
tgaattgcagcctctctgaccgcag

SEQ ID NO: 5155005 - DNA, 25 bp, Homo sapien
tttgtgggaacgctctgaattgcag

SEQ ID NO: 5155006 - DNA, 25 bp, Homo sapien
atggtgctgtttgtgggaacgctct

SEQ ID NO: 5155007 - DNA, 25 bp, Homo sapien
gaggaagaaagatagctcaggtatg

SEQ ID NO: 5155008 - DNA, 25 bp, Homo sapien
gaaagatagctcaggtatgtcaatg

SEQ ID NO: 5155009 - DNA, 25 bp, Homo sapien
aggtatgtcaatgtttctgcacccc

SEQ ID NO: 5155010 - DNA, 25 bp, Homo sapien
gctcaggtatgtcaatgtttctgca

SEQ ID NO: 5155011 - DNA, 25 bp, Homo sapien
aggtgctcaggttcctataggtgac

SEQ ID NO: 5155012 - DNA, 25 bp, Homo sapien
gggatctctggcctgaactcccgaa

SEQ ID NO: 5155013 - DNA, 25 bp, Homo sapien
aactcccgaagctctgtataccagg

SEQ ID NO: 5155014 - DNA, 25 bp, Homo sapien
ttttattggccaccacgatgcatgg

SEQ ID NO: 5155015 - DNA, 25 bp, Homo sapien
caggtccccagtgaattgctaacac

SEQ ID NO: 5155016 - DNA, 25 bp, Homo sapien
gaatgcaagcaaccaaccaagggtt

SEQ ID NO: 5155017 - DNA, 25 bp, Homo sapien
gaggccttcattccagaaagtggga

SEQ ID NO: 5155018 - DNA, 25 bp, Homo sapien
caatcactgaaggttgcctgcccgg

SEQ ID NO: 5155019 - DNA, 25 bp, Homo sapien
tgtagagagaaggtaggacattggt

SEQ ID NO: 5155020 - DNA, 25 bp, Homo sapien
ctgtagagagaaggtaggacattgg

SEQ ID NO: 5155021 - DNA, 25 bp, Homo sapien
tcagcagccgagacgaaatacaggg

SEQ ID NO: 5155022 - DNA, 25 bp, Homo sapien
gtaccatcagcagccgagacgaaat

SEQ ID NO: 5155023 - DNA, 25 bp, Homo sapien
tagctacctctgcagtcaaccacac

SEQ ID NO: 5155024 - DNA, 25 bp, Homo sapien
cttgctagctacctctgcagtcaac

SEQ ID NO: 5155025 - DNA, 25 bp, Homo sapien
gctagctacctctgcagtcaaccac

SEQ ID NO: 5155026 - DNA, 25 bp, Homo sapien
tgctagctacctctgcagtcaacca

SEQ ID NO: 5155027 - DNA, 25 bp, Homo sapien
ctaatcgaattgcatcattgaagag

SEQ ID NO: 5155028 - DNA, 25 bp, Homo sapien
tgtttgtaagacacagctaatcgaa

SEQ ID NO: 5155029 - DNA, 25 bp, Homo sapien
gaagtcctgggagttctgtttgtaa

SEQ ID NO: 5155030 - DNA, 25 bp, Homo sapien
gacacagctaatcgaattgcatcat

SEQ ID NO: 5155031 - DNA, 25 bp, Homo sapien
tgctgctgctctgttcctggtctgg

SEQ ID NO: 5155032 - DNA, 25 bp, Homo sapien
tgctctgttcctggtctggcacgtc

SEQ ID NO: 5155033 - DNA, 25 bp, Homo sapien
gggtctcgatgctgctgctctgttc

SEQ ID NO: 5155034 - DNA, 25 bp, Homo sapien
tcctggtctggcacgtcctcctctt

SEQ ID NO: 5155035 - DNA, 25 bp, Homo sapien
ggggatggcctagagagtttctcca

SEQ ID NO: 5155036 - DNA, 25 bp, Homo sapien
tcttccaccagtccagagtttgctg

SEQ ID NO: 5155037 - DNA, 25 bp, Homo sapien
gaggctaataggatgggtgggttgc

SEQ ID NO: 5155038 - DNA, 25 bp, Homo sapien
cagtccagagtttgctggtgctgac

SEQ ID NO: 5155039 - DNA, 25 bp, Homo sapien
ccaaggaattgtccccgaggtgagc

SEQ ID NO: 5155040 - DNA, 25 bp, Homo sapien
taactatagctaggcctgtcacctg

SEQ ID NO: 5155041 - DNA, 25 bp, Homo sapien
gctcctgaaacagagtgggtacacg

SEQ ID NO: 5155042 - DNA, 25 bp, Homo sapien
cacggaaatctggaatgaatagcta

SEQ ID NO: 5155043 - DNA, 25 bp, Homo sapien
tagcaagccacaagtaccagagagg

SEQ ID NO: 5155044 - DNA, 25 bp, Homo sapien
caaacaatgcccgagattatcataa

SEQ ID NO: 5155045 - DNA, 25 bp, Homo sapien
taaacacaatgcaaacaatgcccga

SEQ ID NO: 5155046 - DNA, 25 bp, Homo sapien
gggtgaacaggcatatctgctagct

SEQ ID NO: 5155047 - DNA, 25 bp, Homo sapien
gacattaaccttgatccgttggtca

SEQ ID NO: 5155048 - DNA, 25 bp, Homo sapien
cacatcctatcaggagtctacaaca

SEQ ID NO: 5155049 - DNA, 25 bp, Homo sapien
gaccttgacaaatttgagggatagt

SEQ ID NO: 5155050 - DNA, 25 bp, Homo sapien
tttgggaaaaagtctcatagagaca

SEQ ID NO: 5155051 - DNA, 25 bp, Homo sapien
tggtgtactgcgccgcctgctcgat

SEQ ID NO: 5155052 - DNA, 25 bp, Homo sapien
agtttcctgatctcattgtcagaaa

SEQ ID NO: 5155053 - DNA, 25 bp, Homo sapien
caaactggtctaacgtagcacctag

SEQ ID NO: 5155054 - DNA, 25 bp, Homo sapien
tagcacctagattttcaatgacggg

SEQ ID NO: 5155055 - DNA, 25 bp, Homo sapien
tcagcgatttgagagatgccagagg

SEQ ID NO: 5155056 - DNA, 25 bp, Homo sapien
ctgatcaagtccctcacctatacgg

SEQ ID NO: 5155057 - DNA, 25 bp, Homo sapien
gggcagagcctgatcaagtccctca

SEQ ID NO: 5155058 - DNA, 25 bp, Homo sapien
aatgagttctgtcagacagggcaga

SEQ ID NO: 5155059 - DNA, 25 bp, Homo sapien
tgtgcaccccgtttgcccttgaaca

SEQ ID NO: 5155060 - DNA, 25 bp, Homo sapien
tctcctggcaatatcctttgcaagc

SEQ ID NO: 5155061 - DNA, 25 bp, Homo sapien
taaatcacatacaatctgtaatgct

SEQ ID NO: 5155062 - DNA, 25 bp, Homo sapien
ctttttgtcagttggcaaaccagca

SEQ ID NO: 5155063 - DNA, 25 bp, Homo sapien
tcaccagtgggccccgatttgcgtt

SEQ ID NO: 5155064 - DNA, 25 bp, Homo sapien
accagtgggccccgatttgcgttct

SEQ ID NO: 5155065 - DNA, 25 bp, Homo sapien
caccagtgggccccgatttgcgttc

SEQ ID NO: 5155066 - DNA, 25 bp, Homo sapien
ccagtgggccccgatttgcgttctc

SEQ ID NO: 5155067 - DNA, 25 bp, Homo sapien
cactttgctaacacaaacaaggcta

SEQ ID NO: 5155068 - DNA, 25 bp, Homo sapien
tttgctaacacaaacaaggctatta

SEQ ID NO: 5155069 - DNA, 25 bp, Homo sapien
actttgctaacacaaacaaggctat

SEQ ID NO: 5155070 - DNA, 25 bp, Homo sapien
ctttgctaacacaaacaaggctatt

SEQ ID NO: 5155071 - DNA, 25 bp, Homo sapien
cagcagcttttttctaccccagaga

SEQ ID NO: 5155072 - DNA, 25 bp, Homo sapien
acagcggcagcttgggattcaccct

SEQ ID NO: 5155073 - DNA, 25 bp, Homo sapien
taagcatacaaaatgcaaggccccg

SEQ ID NO: 5155074 - DNA, 25 bp, Homo sapien
caggtgggccagcacgtagaagtat

SEQ ID NO: 5155075 - DNA, 25 bp, Homo sapien
cattccaattttagttcacgtgctg

SEQ ID NO: 5155076 - DNA, 25 bp, Homo sapien
tttagttcacgtgctgctgaagtga

SEQ ID NO: 5155077 - DNA, 25 bp, Homo sapien
caattttagttcacgtgctgctgaa

SEQ ID NO: 5155078 - DNA, 25 bp, Homo sapien
ccaattttagttcacgtgctgctga

SEQ ID NO: 5155079 - DNA, 25 bp, Homo sapien
gatacggatccacaaaggaagcaat

SEQ ID NO: 5155080 - DNA, 25 bp, Homo sapien
tctgactgtcagtctagtgttctct

SEQ ID NO: 5155081 - DNA, 25 bp, Homo sapien
cctggtttcccagtttgacggcact

SEQ ID NO: 5155082 - DNA, 25 bp, Homo sapien
cagtctttggattagtgagaggtga

SEQ ID NO: 5155083 - DNA, 25 bp, Homo sapien
ggaatttccttggatactgcaattg

SEQ ID NO: 5155084 - DNA, 25 bp, Homo sapien
taaactgctgactgtggggtgccca

SEQ ID NO: 5155085 - DNA, 25 bp, Homo sapien
gggtgcccacaggatgagcactggt

SEQ ID NO: 5155086 - DNA, 25 bp, Homo sapien
ccacaggatgagcactggtggcatg

SEQ ID NO: 5155087 - DNA, 25 bp, Homo sapien
cacctgaaggccttgttgaatacac

SEQ ID NO: 5155088 - DNA, 25 bp, Homo sapien
tgtcagtcagaccatgtaacatcaa

SEQ ID NO: 5155089 - DNA, 25 bp, Homo sapien
tatgaagaaatccagtgtcagtcag

SEQ ID NO: 5155090 - DNA, 25 bp, Homo sapien
gccaccatttgcttacttggaatag

SEQ ID NO: 5155091 - DNA, 25 bp, Homo sapien
tggcatgtgcccccattcctgatta

SEQ ID NO: 5155092 - DNA, 25 bp, Homo sapien
gcatgtgcccccattcctgattagt

SEQ ID NO: 5155093 - DNA, 25 bp, Homo sapien
actactggcatgtgcccccattcct

SEQ ID NO: 5155094 - DNA, 25 bp, Homo sapien
ccattcctgattagtttttttgtat

SEQ ID NO: 5155095 - DNA, 25 bp, Homo sapien
tttggcaccaccaataacgcaagtt

SEQ ID NO: 5155096 - DNA, 25 bp, Homo sapien
tgttcgacagttcacaaagaccttc

SEQ ID NO: 5155097 - DNA, 25 bp, Homo sapien
tttagctcaacagggtgaaggcatg

SEQ ID NO: 5155098 - DNA, 25 bp, Homo sapien
tactaagccgtagttaacaggctgg

SEQ ID NO: 5155099 - DNA, 25 bp, Homo sapien
aataagctacctgtaataagtgtgg

SEQ ID NO: 5155100 - DNA, 25 bp, Homo sapien
tttaaatctgtgacaaaccatggca

SEQ ID NO: 5155101 - DNA, 25 bp, Homo sapien
aaatatctggttcacttacactaca

SEQ ID NO: 5155102 - DNA, 25 bp, Homo sapien
aatcacttaagtgttcatagaccag

SEQ ID NO: 5155103 - DNA, 25 bp, Homo sapien
tgtagctgtgtacatatcactacag

SEQ ID NO: 5155104 - DNA, 25 bp, Homo sapien
cactacagttataggaagtttcagt

SEQ ID NO: 5155105 - DNA, 25 bp, Homo sapien
tttcagtctacagtccatccaaagg

SEQ ID NO: 5155106 - DNA, 25 bp, Homo sapien
caaaggaccaacctgccttacacat

SEQ ID NO: 5155107 - DNA, 25 bp, Homo sapien
ttagcttgataatggaactatacag

SEQ ID NO: 5155108 - DNA, 25 bp, Homo sapien
gtatacagtgaaaataggtatttca

SEQ ID NO: 5155109 - DNA, 25 bp, Homo sapien
tctgtggtttctgtttttagcttga

SEQ ID NO: 5155110 - DNA, 25 bp, Homo sapien
tacagcgaagagacaatctctggca

SEQ ID NO: 5155111 - DNA, 25 bp, Homo sapien
gatgctggacaaacctttctcatgg

SEQ ID NO: 5155112 - DNA, 25 bp, Homo sapien
ccaacatttggcagggctcatgcct

SEQ ID NO: 5155113 - DNA, 25 bp, Homo sapien
tcactgaaacgagacttaaaaggta

SEQ ID NO: 5155114 - DNA, 25 bp, Homo sapien
ggtaagaggtacactacatcgcgac

SEQ ID NO: 5155115 - DNA, 25 bp, Homo sapien
taaaagggcccgagatacatctcag

SEQ ID NO: 5155116 - DNA, 25 bp, Homo sapien
ttaaaagtgggtagcaactcctcca

SEQ ID NO: 5155117 - DNA, 25 bp, Homo sapien
tcagtgcaaattacgagaaagagcc

SEQ ID NO: 5155118 - DNA, 25 bp, Homo sapien
aaagagattggaagtattgtgcccc

SEQ ID NO: 5155119 - DNA, 25 bp, Homo sapien
cccacaagaatctccctcctgctca

SEQ ID NO: 5155120 - DNA, 25 bp, Homo sapien
ggcactgaaattttgaatttagctg

SEQ ID NO: 5155121 - DNA, 25 bp, Homo sapien
cacgctatggtgatcttcagactag

SEQ ID NO: 5155122 - DNA, 25 bp, Homo sapien
gaatctggacataaggtcccaggta

SEQ ID NO: 5155123 - DNA, 25 bp, Homo sapien
ctggctttaagtgtggaatctggac

SEQ ID NO: 5155124 - DNA, 25 bp, Homo sapien
gctttttgtctacctctaagaggca

SEQ ID NO: 5155125 - DNA, 25 bp, Homo sapien
tatcataggcaagccggtagaggtc

SEQ ID NO: 5155126 - DNA, 25 bp, Homo sapien
tcccttggtgattttgaagagcagc

SEQ ID NO: 5155127 - DNA, 25 bp, Homo sapien
gggcattagcttacctcttcctaaa

SEQ ID NO: 5155128 - DNA, 25 bp, Homo sapien
ggagggagatctgaaaataagtact

SEQ ID NO: 5155129 - DNA, 25 bp, Homo sapien
tcttgcacaatattccctcatggct

SEQ ID NO: 5155130 - DNA, 25 bp, Homo sapien
tataatgagagatatcaggctggag

SEQ ID NO: 5155131 - DNA, 25 bp, Homo sapien
agtgcaaagtctccaggcatgcaag

SEQ ID NO: 5155132 - DNA, 25 bp, Homo sapien
tctaaggtcataaaggtaaggctca

SEQ ID NO: 5155133 - DNA, 25 bp, Homo sapien
cagtgtgtactcagacaccttaaag

SEQ ID NO: 5155134 - DNA, 25 bp, Homo sapien
cctcgagtctcttcaaggcagtgac

SEQ ID NO: 5155135 - DNA, 25 bp, Homo sapien
tgactttgaaatttcaaaaccttca

SEQ ID NO: 5155136 - DNA, 25 bp, Homo sapien
cgagtctcttcaaggcagtgacttt

SEQ ID NO: 5155137 - DNA, 25 bp, Homo sapien
tgtacacactccaaacctcgagtct

SEQ ID NO: 5155138 - DNA, 25 bp, Homo sapien
tgcctttcttgcagataagtgccct

SEQ ID NO: 5155139 - DNA, 25 bp, Homo sapien
ctgttcgtggattggatgattcctc

SEQ ID NO: 5155140 - DNA, 25 bp, Homo sapien
ttctgttcgtggattggatgattcc

SEQ ID NO: 5155141 - DNA, 25 bp, Homo sapien
tcattctgttcgtggattggatgat

SEQ ID NO: 5155142 - DNA, 25 bp, Homo sapien
cacagaagcaaaggatgtcagagac

SEQ ID NO: 5155143 - DNA, 25 bp, Homo sapien
cagaagcaaaggatgtcagagacag

SEQ ID NO: 5155144 - DNA, 25 bp, Homo sapien
agcaaaggatgtcagagacagttca

SEQ ID NO: 5155145 - DNA, 25 bp, Homo sapien
aaacacagaagcaaaggatgtcaga

SEQ ID NO: 5155146 - DNA, 25 bp, Homo sapien
ctgggtggaaaagagcggtatcaga

SEQ ID NO: 5155147 - DNA, 25 bp, Homo sapien
agcagtcggggaacggatgaacaaa

SEQ ID NO: 5155148 - DNA, 25 bp, Homo sapien
ggggaacggatgaacaaagacttgc

SEQ ID NO: 5155149 - DNA, 25 bp, Homo sapien
aagagcggtatcagacagggtgagc

SEQ ID NO: 5155150 - DNA, 25 bp, Homo sapien
aatccactgcgggttttccaggagt

SEQ ID NO: 5155151 - DNA, 25 bp, Homo sapien
cctgagagaaaacggcctaatcgaa

SEQ ID NO: 5155152 - DNA, 25 bp, Homo sapien
tgcctgggctccgatcctgaagttg

SEQ ID NO: 5155153 - DNA, 25 bp, Homo sapien
taatcgaaaacgtccgcggcataca

SEQ ID NO: 5155154 - DNA, 25 bp, Homo sapien
cttccgctccgagcgggaggggcta

SEQ ID NO: 5155155 - DNA, 25 bp, Homo sapien
gctagcgagcatgcgcaataaggta

SEQ ID NO: 5155156 - DNA, 25 bp, Homo sapien
caacttcttcccctcacgccgcctt

SEQ ID NO: 5155157 - DNA, 25 bp, Homo sapien
agatggccgccggtgccgacgcccc

SEQ ID NO: 5155158 - DNA, 25 bp, Homo sapien
gaagccgaagcagtagcaagaaagc

SEQ ID NO: 5155159 - DNA, 25 bp, Homo sapien
gggtagccgggaagccgaagcagta

SEQ ID NO: 5155160 - DNA, 25 bp, Homo sapien
tggcggcgggagacaagggctatct

SEQ ID NO: 5155161 - DNA, 25 bp, Homo sapien
gggccagagattggcggcgggagac

SEQ ID NO: 5155162 - DNA, 25 bp, Homo sapien
tgctgccgccgtctgctccgtgctg

SEQ ID NO: 5155163 - DNA, 25 bp, Homo sapien
gctgctgccgccgtctgctccgtgc

SEQ ID NO: 5155164 - DNA, 25 bp, Homo sapien
ctgctgctgccgccgtctgctccgt

SEQ ID NO: 5155165 - DNA, 25 bp, Homo sapien
ctgctgccgccgtctgctccgtgct

SEQ ID NO: 5155166 - DNA, 25 bp, Homo sapien
cacacaggccggcagccgtcccgcc

SEQ ID NO: 5155167 - DNA, 25 bp, Homo sapien
accacacaggccggcagccgtcccg

SEQ ID NO: 5155168 - DNA, 25 bp, Homo sapien
gtgccacagtccaccacacaggccg

SEQ ID NO: 5155169 - DNA, 25 bp, Homo sapien
ccgtgccacagtccaccacacaggc

SEQ ID NO: 5155170 - DNA, 25 bp, Homo sapien
ccgactggcaaaaacgggcgcggag

SEQ ID NO: 5155171 - DNA, 25 bp, Homo sapien
ccaagacgaccgtccccagcgccct

SEQ ID NO: 5155172 - DNA, 25 bp, Homo sapien
agacgaccgtccccagcgccctttg

SEQ ID NO: 5155173 - DNA, 25 bp, Homo sapien
cgactggcaaaaacgggcgcggagg

SEQ ID NO: 5155174 - DNA, 25 bp, Homo sapien
ccactaatagcaggtttgagttctg

SEQ ID NO: 5155175 - DNA, 25 bp, Homo sapien
gttgagttttgctggacgatcccta

SEQ ID NO: 5155176 - DNA, 25 bp, Homo sapien
caatgctttccaatacagaccaaaa

SEQ ID NO: 5155177 - DNA, 25 bp, Homo sapien
agccaccaatgggaatctatgtgcc

SEQ ID NO: 5155178 - DNA, 25 bp, Homo sapien
tgaccatagggctatattaacctct

SEQ ID NO: 5155179 - DNA, 25 bp, Homo sapien
taacctctgctatcataatcagtgg

SEQ ID NO: 5155180 - DNA, 25 bp, Homo sapien
taattgctgaattgtggccacaaga

SEQ ID NO: 5155181 - DNA, 25 bp, Homo sapien
cactgacacctacaagatatttaag

SEQ ID NO: 5155182 - DNA, 25 bp, Homo sapien
tctgaaaaggcagtcaggagtcccc

SEQ ID NO: 5155183 - DNA, 25 bp, Homo sapien
tacagaactcaggtccaaatagcag

SEQ ID NO: 5155184 - DNA, 25 bp, Homo sapien
cagatcgaaccacctgccaggtaga

SEQ ID NO: 5155185 - DNA, 25 bp, Homo sapien
caggtagacggcatcaaaaaggtaa

SEQ ID NO: 5155186 - DNA, 25 bp, Homo sapien
aatttagctagagctaaactctcct

SEQ ID NO: 5155187 - DNA, 25 bp, Homo sapien
tagtccaatcctttagctgtttcca

SEQ ID NO: 5155188 - DNA, 25 bp, Homo sapien
tctcctcctgattaaggattttgcc

SEQ ID NO: 5155189 - DNA, 25 bp, Homo sapien
gctgtttccacaagttgggggagca

SEQ ID NO: 5155190 - DNA, 25 bp, Homo sapien
ttataaccctggagtgcaggagact

SEQ ID NO: 5155191 - DNA, 25 bp, Homo sapien
gcctcagcagttaccaccaagaaaa

SEQ ID NO: 5155192 - DNA, 25 bp, Homo sapien
taccgcacatgttaaagcaggataa

SEQ ID NO: 5155193 - DNA, 25 bp, Homo sapien
gaaaataatactggatacctaccgc

SEQ ID NO: 5155194 - DNA, 25 bp, Homo sapien
tgtatttccagcatatcctagtttt

SEQ ID NO: 5155195 - DNA, 25 bp, Homo sapien
ctgtatttccagcatatcctagttt

SEQ ID NO: 5155196 - DNA, 25 bp, Homo sapien
gcacttaaactgatctggcattcaa

SEQ ID NO: 5155197 - DNA, 25 bp, Homo sapien
aaatgtacgaatccatcaagttcag

SEQ ID NO: 5155198 - DNA, 25 bp, Homo sapien
tcaattcatttaggtgaaacccaca

SEQ ID NO: 5155199 - DNA, 25 bp, Homo sapien
acttacagtgtacatagacatccag

SEQ ID NO: 5155200 - DNA, 25 bp, Homo sapien
aaataagttagacatgtcaaagaat

SEQ ID NO: 5155201 - DNA, 25 bp, Homo sapien
ctttaaaataagttagacatgtcaa

SEQ ID NO: 5155202 - DNA, 25 bp, Homo sapien
ttaaaataagttagacatgtcaaag

SEQ ID NO: 5155203 - DNA, 25 bp, Homo sapien
taagttagacatgtcaaagaattca

SEQ ID NO: 5155204 - DNA, 25 bp, Homo sapien
tgaagaagtctaggtcatcaacacc

SEQ ID NO: 5155205 - DNA, 25 bp, Homo sapien
aagtctaggtcatcaacacctttca

SEQ ID NO: 5155206 - DNA, 25 bp, Homo sapien
gtctaggtcatcaacacctttcatc

SEQ ID NO: 5155207 - DNA, 25 bp, Homo sapien
agaagtctaggtcatcaacaccttt

SEQ ID NO: 5155208 - DNA, 25 bp, Homo sapien
cctttccattaagtcccaatcttca

SEQ ID NO: 5155209 - DNA, 25 bp, Homo sapien
taagtcccaatcttcaactatacca

SEQ ID NO: 5155210 - DNA, 25 bp, Homo sapien
tttccattaagtcccaatcttcaac

SEQ ID NO: 5155211 - DNA, 25 bp, Homo sapien
cattaagtcccaatcttcaactata

SEQ ID NO: 5155212 - DNA, 25 bp, Homo sapien
gttttctggagtattcaatggaggt

SEQ ID NO: 5155213 - DNA, 25 bp, Homo sapien
tttctggagtattcaatggaggttc

SEQ ID NO: 5155214 - DNA, 25 bp, Homo sapien
tctggagtattcaatggaggttcag

SEQ ID NO: 5155215 - DNA, 25 bp, Homo sapien
ctggagtattcaatggaggttcagt

SEQ ID NO: 5155216 - DNA, 25 bp, Homo sapien
ctgtctattaccgtaccggtcaacg

SEQ ID NO: 5155217 - DNA, 25 bp, Homo sapien
tccactgtctattaccgtaccggtc

SEQ ID NO: 5155218 - DNA, 25 bp, Homo sapien
cgtccgttctcctacttgtcttgag

SEQ ID NO: 5155219 - DNA, 25 bp, Homo sapien
cggtcaacgtccgttctcctacttg

SEQ ID NO: 5155220 - DNA, 25 bp, Homo sapien
acagttaccctgtacaccagtctga

SEQ ID NO: 5155221 - DNA, 25 bp, Homo sapien
aatggctaacacacatccaactgga

SEQ ID NO: 5155222 - DNA, 25 bp, Homo sapien
gagcaaaacatagctataactggac

SEQ ID NO: 5155223 - DNA, 25 bp, Homo sapien
gaactgaagcacaacggccttggaa

SEQ ID NO: 5155224 - DNA, 25 bp, Homo sapien
agacattgcctgatgcattaaacac

SEQ ID NO: 5155225 - DNA, 25 bp, Homo sapien
gacattgcctgatgcattaaacact

SEQ ID NO: 5155226 - DNA, 25 bp, Homo sapien
tcacaaaggaatagagagcactaga

SEQ ID NO: 5155227 - DNA, 25 bp, Homo sapien
tatggtacgtgaataaaagaactca

SEQ ID NO: 5155228 - DNA, 25 bp, Homo sapien
ggaaaatgatactaggtggaaatct

SEQ ID NO: 5155229 - DNA, 25 bp, Homo sapien
tgatactaggtggaaatctggacct

SEQ ID NO: 5155230 - DNA, 25 bp, Homo sapien
tgtgtttaatacagctgccaatcac

SEQ ID NO: 5155231 - DNA, 25 bp, Homo sapien
tgtttaatacagctgccaatcacat

SEQ ID NO: 5155232 - DNA, 25 bp, Homo sapien
gtgtttaatacagctgccaatcaca

SEQ ID NO: 5155233 - DNA, 25 bp, Homo sapien
aaaatctctcataaccaacatcgat

SEQ ID NO: 5155234 - DNA, 25 bp, Homo sapien
gcattgattccagtatactgtttaa

SEQ ID NO: 5155235 - DNA, 25 bp, Homo sapien
taaccaacatcgatagaaaactctt

SEQ ID NO: 5155236 - DNA, 25 bp, Homo sapien
gattccagtatactgtttaatccat

SEQ ID NO: 5155237 - DNA, 25 bp, Homo sapien
tttgtgccccacaaagggtgatgac

SEQ ID NO: 5155238 - DNA, 25 bp, Homo sapien
tcctgtaactggagtaagccctctt

SEQ ID NO: 5155239 - DNA, 25 bp, Homo sapien
tacaaatttcagtggatggcacact

SEQ ID NO: 5155240 - DNA, 25 bp, Homo sapien
gaaacgcctcccctatgatcatcaa

SEQ ID NO: 5155241 - DNA, 25 bp, Homo sapien
tatatagaatgagacccaccctcct

SEQ ID NO: 5155242 - DNA, 25 bp, Homo sapien
tccagaccgtgtataacaagaaagt

SEQ ID NO: 5155243 - DNA, 25 bp, Homo sapien
tacaatatttcaatcctgtttggaa

SEQ ID NO: 5155244 - DNA, 25 bp, Homo sapien
tggacacgggtatgggcaaagattc

SEQ ID NO: 5155245 - DNA, 25 bp, Homo sapien
tacctttcctaagcaatatgaaaca

SEQ ID NO: 5155246 - DNA, 25 bp, Homo sapien
tagtttttgttaggatacgcagacc

SEQ ID NO: 5155247 - DNA, 25 bp, Homo sapien
tacaatggtgcaatgccagctcgtt

SEQ ID NO: 5155248 - DNA, 25 bp, Homo sapien
caggtttctcatagaagaaattact

SEQ ID NO: 5155249 - DNA, 25 bp, Homo sapien
tacaggctgcgcatacaatgaaaag

SEQ ID NO: 5155250 - DNA, 25 bp, Homo sapien
agagatttaatgttatcaaagtgac

SEQ ID NO: 5155251 - DNA, 25 bp, Homo sapien
gttctaaattatttacaggctgcgc

SEQ ID NO: 5155252 - DNA, 25 bp, Homo sapien
agttctaaattatttacaggctgcg

SEQ ID NO: 5155253 - DNA, 25 bp, Homo sapien
catataacgctgtgagagtatacac

SEQ ID NO: 5155254 - DNA, 25 bp, Homo sapien
catacatatactatgagctggcaaa

SEQ ID NO: 5155255 - DNA, 25 bp, Homo sapien
tagtaacatagtgacatggtctggc

SEQ ID NO: 5155256 - DNA, 25 bp, Homo sapien
gagtgaataagttgcacaaggtctg

SEQ ID NO: 5155257 - DNA, 25 bp, Homo sapien
caacttctgagataggttgtgtaaa

SEQ ID NO: 5155258 - DNA, 25 bp, Homo sapien
catctacaacttctgagataggttg

SEQ ID NO: 5155259 - DNA, 25 bp, Homo sapien
cttgtagagaggacgtctgacatca

SEQ ID NO: 5155260 - DNA, 25 bp, Homo sapien
ggacgtctgacatcaataggacaat

SEQ ID NO: 5155261 - DNA, 25 bp, Homo sapien
ctctttgcaagcgacgtccaaagtc

SEQ ID NO: 5155262 - DNA, 25 bp, Homo sapien
tttgcaagcgacgtccaaagtccct

SEQ ID NO: 5155263 - DNA, 25 bp, Homo sapien
taatttcagccgggcatctacagtt

SEQ ID NO: 5155264 - DNA, 25 bp, Homo sapien
aaatctctttgcaagcgacgtccaa

SEQ ID NO: 5155265 - DNA, 25 bp, Homo sapien
aactaaggtgaagaaggcagagtcc

SEQ ID NO: 5155266 - DNA, 25 bp, Homo sapien
taaaccaccgatttgactgcacact

SEQ ID NO: 5155267 - DNA, 25 bp, Homo sapien
tcgatacggtactgatcactgggta

SEQ ID NO: 5155268 - DNA, 25 bp, Homo sapien
gaaggcctagactcagtgatacccc

SEQ ID NO: 5155269 - DNA, 25 bp, Homo sapien
gaagccagcattgatcctccaaacc

SEQ ID NO: 5155270 - DNA, 25 bp, Homo sapien
gccagcattgatcctccaaaccaaa

SEQ ID NO: 5155271 - DNA, 25 bp, Homo sapien
cgtggaagccagcattgatcctcca

SEQ ID NO: 5155272 - DNA, 25 bp, Homo sapien
tggaagccagcattgatcctccaaa

SEQ ID NO: 5155273 - DNA, 25 bp, Homo sapien
ttaatggtattagaacactagaaca

SEQ ID NO: 5155274 - DNA, 25 bp, Homo sapien
taaatccaaagttgtacagttattc

SEQ ID NO: 5155275 - DNA, 25 bp, Homo sapien
gaacaaagcaccaatacttcctagg

SEQ ID NO: 5155276 - DNA, 25 bp, Homo sapien
aaaacatcatactttctatgcaatg

SEQ ID NO: 5155277 - DNA, 25 bp, Homo sapien
ttcataatcctttttggtgtggcat

SEQ ID NO: 5155278 - DNA, 25 bp, Homo sapien
cctaaccccaataactatgaagcca

SEQ ID NO: 5155279 - DNA, 25 bp, Homo sapien
aaccccaataactatgaagccaatt

SEQ ID NO: 5155280 - DNA, 25 bp, Homo sapien
taaccccaataactatgaagccaat

SEQ ID NO: 5155281 - DNA, 25 bp, Homo sapien
ctccctaaccccaataactatgaag

SEQ ID NO: 5155282 - DNA, 25 bp, Homo sapien
gaatcccacgagtgtgtatgccaag

SEQ ID NO: 5155283 - DNA, 25 bp, Homo sapien
gcaggcatcagttaatccaagatac

SEQ ID NO: 5155284 - DNA, 25 bp, Homo sapien
tggaagcactccataataactggaa

SEQ ID NO: 5155285 - DNA, 25 bp, Homo sapien
taaacaagctcttgcactgcacact

SEQ ID NO: 5155286 - DNA, 25 bp, Homo sapien
tcagactgcaaatgagttatacaaa

SEQ ID NO: 5155287 - DNA, 25 bp, Homo sapien
caaaagtcagcttgctaactgttgt

SEQ ID NO: 5155288 - DNA, 25 bp, Homo sapien
ttcaatgatatgttcagggactggc

SEQ ID NO: 5155289 - DNA, 25 bp, Homo sapien
ttttaaagaactattgcagaagtct

SEQ ID NO: 5155290 - DNA, 25 bp, Homo sapien
ttgggccaggagcatgacatcttta

SEQ ID NO: 5155291 - DNA, 25 bp, Homo sapien
caagtgttcactgatactgctagta

SEQ ID NO: 5155292 - DNA, 25 bp, Homo sapien
gaatagacgtattccaatcctaacg

SEQ ID NO: 5155293 - DNA, 25 bp, Homo sapien
caagtagtctgtgtaatgatggaaa

SEQ ID NO: 5155294 - DNA, 25 bp, Homo sapien
catgcctggtgactatgaactacga

SEQ ID NO: 5155295 - DNA, 25 bp, Homo sapien
gaatgctgctaccatcctattaggg

SEQ ID NO: 5155296 - DNA, 25 bp, Homo sapien
gagaatacctcagacgaccacagat

SEQ ID NO: 5155297 - DNA, 25 bp, Homo sapien
tatcagaacatacacaagaagggct

SEQ ID NO: 5155298 - DNA, 25 bp, Homo sapien
tactattagactaagccaaggacag

SEQ ID NO: 5155299 - DNA, 25 bp, Homo sapien
tatgccaagcaatatgtcaggcact

SEQ ID NO: 5155300 - DNA, 25 bp, Homo sapien
tatttgtccctcctctaagagtgcc

SEQ ID NO: 5155301 - DNA, 25 bp, Homo sapien
gattgaaggctcaaaacttgatgca

SEQ ID NO: 5155302 - DNA, 25 bp, Homo sapien
cactaccttacgcagaatgtcactt

SEQ ID NO: 5155303 - DNA, 25 bp, Homo sapien
caatctgatttagagcctgtgatca

SEQ ID NO: 5155304 - DNA, 25 bp, Homo sapien
tgtggttccaattccgatatcgact

SEQ ID NO: 5155305 - DNA, 25 bp, Homo sapien
ttaacatgggatctggacaatatca

SEQ ID NO: 5155306 - DNA, 25 bp, Homo sapien
agtacactgtattcccgccaaggtc

SEQ ID NO: 5155307 - DNA, 25 bp, Homo sapien
tgcaaaactgaaggcaagccaatcc

SEQ ID NO: 5155308 - DNA, 25 bp, Homo sapien
gaagagcttcccacttgcaaaactg

SEQ ID NO: 5155309 - DNA, 25 bp, Homo sapien
ggcacagtgtctcttatatggtaca

SEQ ID NO: 5155310 - DNA, 25 bp, Homo sapien
caggatggctccgttgtcatcaggg

SEQ ID NO: 5155311 - DNA, 25 bp, Homo sapien
catctagccttaataaatctacagc

SEQ ID NO: 5155312 - DNA, 25 bp, Homo sapien
tacagcattaggaatcagattggca

SEQ ID NO: 5155313 - DNA, 25 bp, Homo sapien
tctcccaggaggttcatcacggtca

SEQ ID NO: 5155314 - DNA, 25 bp, Homo sapien
ttggaaatgtctgcgttttacccac

SEQ ID NO: 5155315 - DNA, 25 bp, Homo sapien
tttggaaatgtctgcgttttaccca

SEQ ID NO: 5155316 - DNA, 25 bp, Homo sapien
ggagacattgtttagcatcagcaaa

SEQ ID NO: 5155317 - DNA, 25 bp, Homo sapien
gagaaaaggagctcgacacagtctg

SEQ ID NO: 5155318 - DNA, 25 bp, Homo sapien
gaaaactagacccattccccagaga

SEQ ID NO: 5155319 - DNA, 25 bp, Homo sapien
gacacataagatagtgatgtataaa

SEQ ID NO: 5155320 - DNA, 25 bp, Homo sapien
ctcttttcttcacatggatttgatt

SEQ ID NO: 5155321 - DNA, 25 bp, Homo sapien
tgattatgtctgggcctgaaatagc

SEQ ID NO: 5155322 - DNA, 25 bp, Homo sapien
tatgtctgggcctgaaatagcaacc

SEQ ID NO: 5155323 - DNA, 25 bp, Homo sapien
gtctgggcctgaaatagcaaccacc

SEQ ID NO: 5155324 - DNA, 25 bp, Homo sapien
gagggcctggctctttatcgccgtg

SEQ ID NO: 5155325 - DNA, 25 bp, Homo sapien
tgggtcccatgcttagcccacggcg

SEQ ID NO: 5155326 - DNA, 25 bp, Homo sapien
aaagcacggaatgtatatggcggga

SEQ ID NO: 5155327 - DNA, 25 bp, Homo sapien
gcatcggtgttacgggaaagctcct

SEQ ID NO: 5155328 - DNA, 25 bp, Homo sapien
tgtgtttaccatgaaggtgaatgaa

SEQ ID NO: 5155329 - DNA, 25 bp, Homo sapien
tatctcttctttgtgtttaccatga

SEQ ID NO: 5155330 - DNA, 25 bp, Homo sapien
gaaggtgaatgaatggcacgaccat

SEQ ID NO: 5155331 - DNA, 25 bp, Homo sapien
aatcctatctcttctttgtgtttac

SEQ ID NO: 5155332 - DNA, 25 bp, Homo sapien
tcacctcagggagcacagaacttct

SEQ ID NO: 5155333 - DNA, 25 bp, Homo sapien
cacctcagggagcacagaacttcta

SEQ ID NO: 5155334 - DNA, 25 bp, Homo sapien
acctcagggagcacagaacttctac

SEQ ID NO: 5155335 - DNA, 25 bp, Homo sapien
tggagcataggaagaggaactcatc

SEQ ID NO: 5155336 - DNA, 25 bp, Homo sapien
tcaacagaatgcatggaagatagta

SEQ ID NO: 5155337 - DNA, 25 bp, Homo sapien
tccaaaatgactgaagttctcacct

SEQ ID NO: 5155338 - DNA, 25 bp, Homo sapien
tgtcacagcggagaatcaacagaat

SEQ ID NO: 5155339 - DNA, 25 bp, Homo sapien
aacactgtccgggtgtctcctagca

SEQ ID NO: 5155340 - DNA, 25 bp, Homo sapien
tctcctagcagatacattgacgtcc

SEQ ID NO: 5155341 - DNA, 25 bp, Homo sapien
gacgctgagtaatgtgcccacagac

SEQ ID NO: 5155342 - DNA, 25 bp, Homo sapien
gaaacccatgaactctggcatcctc

SEQ ID NO: 5155343 - DNA, 25 bp, Homo sapien
gcggaagtgacttgcatggtccgta

SEQ ID NO: 5155344 - DNA, 25 bp, Homo sapien
catggtccgtacaagcaagcgtttg

SEQ ID NO: 5155345 - DNA, 25 bp, Homo sapien
tgacttgcatggtccgtacaagcaa

SEQ ID NO: 5155346 - DNA, 25 bp, Homo sapien
gtacaagcaagcgtttggtgctctg

SEQ ID NO: 5155347 - DNA, 25 bp, Homo sapien
gagagcggggagtctttgagagcat

SEQ ID NO: 5155348 - DNA, 25 bp, Homo sapien
ggcagcttcgaatctggcctttctt

SEQ ID NO: 5155349 - DNA, 25 bp, Homo sapien
ggcctttcttgttggtgtggtcttg

SEQ ID NO: 5155350 - DNA, 25 bp, Homo sapien
ctcatgggcagcttcgaatctggcc

SEQ ID NO: 5155351 - DNA, 25 bp, Homo sapien
tccctatagggctggtctacttggc

SEQ ID NO: 5155352 - DNA, 25 bp, Homo sapien
ttggcccacacgagctctaacatct

SEQ ID NO: 5155353 - DNA, 25 bp, Homo sapien
caactttccagtgtagcctttggag

SEQ ID NO: 5155354 - DNA, 25 bp, Homo sapien
cctgttgctcaggataagacgaaaa

SEQ ID NO: 5155355 - DNA, 25 bp, Homo sapien
tatttacgcctaagaccctagtctg

SEQ ID NO: 5155356 - DNA, 25 bp, Homo sapien
caattacaggcttttgcagggaaga

SEQ ID NO: 5155357 - DNA, 25 bp, Homo sapien
cactctgtgtgcaagatcctatcta

SEQ ID NO: 5155358 - DNA, 25 bp, Homo sapien
ccctagtctggagtttggcaaatgc

SEQ ID NO: 5155359 - DNA, 25 bp, Homo sapien
caaataagactactgtcagtaacag

SEQ ID NO: 5155360 - DNA, 25 bp, Homo sapien
gcagtcactggccattgtagtttct

SEQ ID NO: 5155361 - DNA, 25 bp, Homo sapien
cacatgcataaactcaatgtgcaat

SEQ ID NO: 5155362 - DNA, 25 bp, Homo sapien
tgtgcaatgatggagtaacactcaa

SEQ ID NO: 5155363 - DNA, 25 bp, Homo sapien
tttgaaatgcctgaagaaattctgg

SEQ ID NO: 5155364 - DNA, 25 bp, Homo sapien
catgtggctgcccatagctcagtgg

SEQ ID NO: 5155365 - DNA, 25 bp, Homo sapien
cacagcatgtctcctcgtgtccagg

SEQ ID NO: 5155366 - DNA, 25 bp, Homo sapien
gatactcagtcccttccatcaggaa

SEQ ID NO: 5155367 - DNA, 25 bp, Homo sapien
actctaactgttgtttggcttctga

SEQ ID NO: 5155368 - DNA, 25 bp, Homo sapien
cctgactgcatgaacatcaatcaaa

SEQ ID NO: 5155369 - DNA, 25 bp, Homo sapien
actgaaagaaaggattactcaagag

SEQ ID NO: 5155370 - DNA, 25 bp, Homo sapien
atcaaaagactatcacgcataagcc

SEQ ID NO: 5155371 - DNA, 25 bp, Homo sapien
ccattggcatagagccttgctagtt

SEQ ID NO: 5155372 - DNA, 25 bp, Homo sapien
tttatgtagggccattggcatagag

SEQ ID NO: 5155373 - DNA, 25 bp, Homo sapien
gaaggttttatgtagggccattggc

SEQ ID NO: 5155374 - DNA, 25 bp, Homo sapien
tagagccttgctagttaaactaccc

SEQ ID NO: 5155375 - DNA, 25 bp, Homo sapien
tctgctgggaccaatcccagtttct

SEQ ID NO: 5155376 - DNA, 25 bp, Homo sapien
gttgagcatgtttttgtcttggagc

SEQ ID NO: 5155377 - DNA, 25 bp, Homo sapien
caaagaggcatgtaatgacaccagg

SEQ ID NO: 5155378 - DNA, 25 bp, Homo sapien
gcatgtttttgtcttggagcactct

SEQ ID NO: 5155379 - DNA, 25 bp, Homo sapien
gtcttagatccctgccttgtccaat

SEQ ID NO: 5155380 - DNA, 25 bp, Homo sapien
gttgccttgtaactggagcgtcaga

SEQ ID NO: 5155381 - DNA, 25 bp, Homo sapien
tcatctaacttcataaaaaggtcag

SEQ ID NO: 5155382 - DNA, 25 bp, Homo sapien
taactggagcgtcagaaaagtgatg

SEQ ID NO: 5155383 - DNA, 25 bp, Homo sapien
agaacccctctccgggtctcagcaa

SEQ ID NO: 5155384 - DNA, 25 bp, Homo sapien
ccctctccgggtctcagcaagttcc

SEQ ID NO: 5155385 - DNA, 25 bp, Homo sapien
cctctccgggtctcagcaagttccc

SEQ ID NO: 5155386 - DNA, 25 bp, Homo sapien
acccctctccgggtctcagcaagtt

SEQ ID NO: 5155387 - DNA, 25 bp, Homo sapien
tactctcctgagaatcaaggattgg

SEQ ID NO: 5155388 - DNA, 25 bp, Homo sapien
tgtatttggaaacgttggcatgttg

SEQ ID NO: 5155389 - DNA, 25 bp, Homo sapien
acaggccagttgtattactctcctg

SEQ ID NO: 5155390 - DNA, 25 bp, Homo sapien
ggaaacgttggcatgttgaatagag

SEQ ID NO: 5155391 - DNA, 25 bp, Homo sapien
ggtgtctgaagtggactcttcctct

SEQ ID NO: 5155392 - DNA, 25 bp, Homo sapien
tcctctcctgatgtgctttgctgtt

SEQ ID NO: 5155393 - DNA, 25 bp, Homo sapien
gctgctggcatagttgagatctgga

SEQ ID NO: 5155394 - DNA, 25 bp, Homo sapien
ccgttcggccactgcaggtgtctga

SEQ ID NO: 5155395 - DNA, 25 bp, Homo sapien
ttgactagtgtcagaatcttcagag

SEQ ID NO: 5155396 - DNA, 25 bp, Homo sapien
catctcaatttgactagtgtcagaa

SEQ ID NO: 5155397 - DNA, 25 bp, Homo sapien
gatttgcacagtccatttgctccat

SEQ ID NO: 5155398 - DNA, 25 bp, Homo sapien
ataagatttgcacagtccatttgct

SEQ ID NO: 5155399 - DNA, 25 bp, Homo sapien
tcagaaacaccgagaagaagcaccc

SEQ ID NO: 5155400 - DNA, 25 bp, Homo sapien
caccagtgttcttgaaatggacacc

SEQ ID NO: 5155401 - DNA, 25 bp, Homo sapien
gaccagtagaaatcagcgtaggaga

SEQ ID NO: 5155402 - DNA, 25 bp, Homo sapien
gaagcacccttagcagggtcaccag

SEQ ID NO: 5155403 - DNA, 25 bp, Homo sapien
ccgcaatgtaaaggctttctcattc

SEQ ID NO: 5155404 - DNA, 25 bp, Homo sapien
gcaatgtaaaggctttctcattccc

SEQ ID NO: 5155405 - DNA, 25 bp, Homo sapien
aggctttctcattcccccagtccat

SEQ ID NO: 5155406 - DNA, 25 bp, Homo sapien
taaaggctttctcattcccccagtc

SEQ ID NO: 5155407 - DNA, 25 bp, Homo sapien
caaatggaccacataagcttgaacc

SEQ ID NO: 5155408 - DNA, 25 bp, Homo sapien
agcagcccaagatgccatgccaatg

SEQ ID NO: 5155409 - DNA, 25 bp, Homo sapien
aggaaagcagtgaagccaaccacct

SEQ ID NO: 5155410 - DNA, 25 bp, Homo sapien
tgccaatgctcgacaggaaagcagt

SEQ ID NO: 5155411 - DNA, 25 bp, Homo sapien
tggtagccatatccccaaggaggtg

SEQ ID NO: 5155412 - DNA, 25 bp, Homo sapien
catcaaactttggtagccatatccc

SEQ ID NO: 5155413 - DNA, 25 bp, Homo sapien
aactttggtagccatatccccaagg

SEQ ID NO: 5155414 - DNA, 25 bp, Homo sapien
tgctgcccccatcaaactttggtag

SEQ ID NO: 5155415 - DNA, 25 bp, Homo sapien
gccacggtctcctccggagaataac

SEQ ID NO: 5155416 - DNA, 25 bp, Homo sapien
gaacaaggataatagctgagtataa

SEQ ID NO: 5155417 - DNA, 25 bp, Homo sapien
taacacagtgactccaacaatctca

SEQ ID NO: 5155418 - DNA, 25 bp, Homo sapien
gagtataaacaagcaacaagccact

SEQ ID NO: 5155419 - DNA, 25 bp, Homo sapien
accagcatgatggattcttcagtaa

SEQ ID NO: 5155420 - DNA, 25 bp, Homo sapien
tcaccagcatgatggattcttcagt

SEQ ID NO: 5155421 - DNA, 25 bp, Homo sapien
gcagaaatgaagccccctcatgagt

SEQ ID NO: 5155422 - DNA, 25 bp, Homo sapien
caccagcatgatggattcttcagta

SEQ ID NO: 5155423 - DNA, 25 bp, Homo sapien
tatcaaggatcctggtacaagcatg

SEQ ID NO: 5155424 - DNA, 25 bp, Homo sapien
aactgtctctactgacagccagtgg

SEQ ID NO: 5155425 - DNA, 25 bp, Homo sapien
gcctgacacagtagatgcttcacag

SEQ ID NO: 5155426 - DNA, 25 bp, Homo sapien
tccccactggattgaggacagaacc

SEQ ID NO: 5155427 - DNA, 25 bp, Homo sapien
actcattaatctcagggccaacaca

SEQ ID NO: 5155428 - DNA, 25 bp, Homo sapien
ccaccagggcttttgctggaaactc

SEQ ID NO: 5155429 - DNA, 25 bp, Homo sapien
ttccaggaaacaacggagaccctga

SEQ ID NO: 5155430 - DNA, 25 bp, Homo sapien
ggaaacaacggagaccctgatgcag

SEQ ID NO: 5155431 - DNA, 25 bp, Homo sapien
tgagaggcagatgtacgtgtcacct

SEQ ID NO: 5155432 - DNA, 25 bp, Homo sapien
gtggagccacagagaatcacaccca

SEQ ID NO: 5155433 - DNA, 25 bp, Homo sapien
cagtagtgtctctacacttggaggt

SEQ ID NO: 5155434 - DNA, 25 bp, Homo sapien
tgggctgctcagacagtagtgtctc

SEQ ID NO: 5155435 - DNA, 25 bp, Homo sapien
atcctttctctaccgctgaactgag

SEQ ID NO: 5155436 - DNA, 25 bp, Homo sapien
tcctttctctaccgctgaactgagg

SEQ ID NO: 5155437 - DNA, 25 bp, Homo sapien
tcatcctttctctaccgctgaactg

SEQ ID NO: 5155438 - DNA, 25 bp, Homo sapien
ctttctctaccgctgaactgaggag

SEQ ID NO: 5155439 - DNA, 25 bp, Homo sapien
caacatccgaagcaagaaaggagaa

SEQ ID NO: 5155440 - DNA, 25 bp, Homo sapien
aaacacatagacaacaccctttgag

SEQ ID NO: 5155441 - DNA, 25 bp, Homo sapien
caccctttgaggacttcttgaacta

SEQ ID NO: 5155442 - DNA, 25 bp, Homo sapien
tccaagcccaacatccgaagcaaga

SEQ ID NO: 5155443 - DNA, 25 bp, Homo sapien
tctttgtccaaggatcttggagaca

SEQ ID NO: 5155444 - DNA, 25 bp, Homo sapien
catggtctttgtccaaggatcttgg

SEQ ID NO: 5155445 - DNA, 25 bp, Homo sapien
tgtccaaggatcttggagacagctc

SEQ ID NO: 5155446 - DNA, 25 bp, Homo sapien
ctcccaggcatggtctttgtccaag

SEQ ID NO: 5155447 - DNA, 25 bp, Homo sapien
ctgtcatccagatattccagtgtca

SEQ ID NO: 5155448 - DNA, 25 bp, Homo sapien
cctgtcatccagatattccagtgtc

SEQ ID NO: 5155449 - DNA, 25 bp, Homo sapien
tgtcatccagatattccagtgtcat

SEQ ID NO: 5155450 - DNA, 25 bp, Homo sapien
caaggttgtcgtaagcttctcctgg

SEQ ID NO: 5155451 - DNA, 25 bp, Homo sapien
gagtaaactatcttgggtccgagca

SEQ ID NO: 5155452 - DNA, 25 bp, Homo sapien
ggtccgagcagagatgtaactggtt

SEQ ID NO: 5155453 - DNA, 25 bp, Homo sapien
gaggtgacaacagcaatggcaaggt

SEQ ID NO: 5155454 - DNA, 25 bp, Homo sapien
agcatggacatcattgagtggggca

SEQ ID NO: 5155455 - DNA, 25 bp, Homo sapien
cctattagcaatccctggtgaagca

SEQ ID NO: 5155456 - DNA, 25 bp, Homo sapien
tctccatcctattagcaatccctgg

SEQ ID NO: 5155457 - DNA, 25 bp, Homo sapien
ccatgtgttctccttctctgagccc

SEQ ID NO: 5155458 - DNA, 25 bp, Homo sapien
ccttctcaagatccacacactgctc

SEQ ID NO: 5155459 - DNA, 25 bp, Homo sapien
atccttctcaagatccacacactgc

SEQ ID NO: 5155460 - DNA, 25 bp, Homo sapien
ccacacactgctccccgtgggtcat

SEQ ID NO: 5155461 - DNA, 25 bp, Homo sapien
tccttctcaagatccacacactgct

SEQ ID NO: 5155462 - DNA, 25 bp, Homo sapien
aggccccatatcacctggagggtgg

SEQ ID NO: 5155463 - DNA, 25 bp, Homo sapien
ctacaggccaagggagccgttccta

SEQ ID NO: 5155464 - DNA, 25 bp, Homo sapien
gaagacagtataggatgaggcccca

SEQ ID NO: 5155465 - DNA, 25 bp, Homo sapien
aagggagccgttcctagaagacagt

SEQ ID NO: 5155466 - DNA, 25 bp, Homo sapien
caacgttagttgttgaataatccat

SEQ ID NO: 5155467 - DNA, 25 bp, Homo sapien
ccaacgttagttgttgaataatcca

SEQ ID NO: 5155468 - DNA, 25 bp, Homo sapien
tccaacgttagttgttgaataatcc

SEQ ID NO: 5155469 - DNA, 25 bp, Homo sapien
ctctcgttcatcaaaggaccacttg

SEQ ID NO: 5155470 - DNA, 25 bp, Homo sapien
gaagcattgagagagcagacccagt

SEQ ID NO: 5155471 - DNA, 25 bp, Homo sapien
gtaatatttctctctcgttcatcaa

SEQ ID NO: 5155472 - DNA, 25 bp, Homo sapien
caggtgtacacagttgggtcacagt

SEQ ID NO: 5155473 - DNA, 25 bp, Homo sapien
ttagtacacgctggaatccatcaaa

SEQ ID NO: 5155474 - DNA, 25 bp, Homo sapien
tagtacacgctggaatccatcaaac

SEQ ID NO: 5155475 - DNA, 25 bp, Homo sapien
ggaaaattcaggctcttctttctac

SEQ ID NO: 5155476 - DNA, 25 bp, Homo sapien
actctccaggaaaattcaggctctt

SEQ ID NO: 5155477 - DNA, 25 bp, Homo sapien
gaaactctccaggaaaattcaggct

SEQ ID NO: 5155478 - DNA, 25 bp, Homo sapien
ggaaactctccaggaaaattcaggc

SEQ ID NO: 5155479 - DNA, 25 bp, Homo sapien
tctaaataggaatttgttgctacaa

SEQ ID NO: 5155480 - DNA, 25 bp, Homo sapien
tttcctgatctaaataggaatttgt

SEQ ID NO: 5155481 - DNA, 25 bp, Homo sapien
cctgatctaaataggaatttgttgc

SEQ ID NO: 5155482 - DNA, 25 bp, Homo sapien
aaataggaatttgttgctacaagca

SEQ ID NO: 5155483 - DNA, 25 bp, Homo sapien
taatctggttagaatgtaagtgagg

SEQ ID NO: 5155484 - DNA, 25 bp, Homo sapien
gtctttaatctggttagaatgtaag

SEQ ID NO: 5155485 - DNA, 25 bp, Homo sapien
catcagtgtctttaatctggttaga

SEQ ID NO: 5155486 - DNA, 25 bp, Homo sapien
ggttagaatgtaagtgaggttttca

SEQ ID NO: 5155487 - DNA, 25 bp, Homo sapien
gcaatcagtgcctttcccaatgcag

SEQ ID NO: 5155488 - DNA, 25 bp, Homo sapien
ttgtcagggctttatctgcagaaca

SEQ ID NO: 5155489 - DNA, 25 bp, Homo sapien
ccagtggacaagaagagctgactca

SEQ ID NO: 5155490 - DNA, 25 bp, Homo sapien
tgcagctgtttgagcactgaatgct

SEQ ID NO: 5155491 - DNA, 25 bp, Homo sapien
cacggacatcgtgggcattaggatt

SEQ ID NO: 5155492 - DNA, 25 bp, Homo sapien
ccaagcagctgaggaatggtttttt

SEQ ID NO: 5155493 - DNA, 25 bp, Homo sapien
ccaagatgactgtgatgagcaaggc

SEQ ID NO: 5155494 - DNA, 25 bp, Homo sapien
aattcacaacggtccctgtgctggc

SEQ ID NO: 5155495 - DNA, 25 bp, Homo sapien
tgtggctcccctgcatcttgttctg

SEQ ID NO: 5155496 - DNA, 25 bp, Homo sapien
tctggaaatgccaggcgtcatcctc

SEQ ID NO: 5155497 - DNA, 25 bp, Homo sapien
ggcctgatccctgctggttcatcta

SEQ ID NO: 5155498 - DNA, 25 bp, Homo sapien
ttgttctgaaacaccgtgctgcgtg

SEQ ID NO: 5155499 - DNA, 25 bp, Homo sapien
ctcaatgagtcccgttgctctttct

SEQ ID NO: 5155500 - DNA, 25 bp, Homo sapien
tcaatgagtcccgttgctctttctc

SEQ ID NO: 5155501 - DNA, 25 bp, Homo sapien
cctcaatgagtcccgttgctctttc

SEQ ID NO: 5155502 - DNA, 25 bp, Homo sapien
caatgagtcccgttgctctttctca

SEQ ID NO: 5155503 - DNA, 25 bp, Homo sapien
gtgcaaggagctcacagctgccatc

SEQ ID NO: 5155504 - DNA, 25 bp, Homo sapien
tgaccatttcaccaagtgcaaggag

SEQ ID NO: 5155505 - DNA, 25 bp, Homo sapien
caggtgaccatttcaccaagtgcaa

SEQ ID NO: 5155506 - DNA, 25 bp, Homo sapien
ggtgaccatttcaccaagtgcaagg

SEQ ID NO: 5155507 - DNA, 25 bp, Homo sapien
ccctgattgatctactatccactgt

SEQ ID NO: 5155508 - DNA, 25 bp, Homo sapien
gattgatctactatccactgtggaa

SEQ ID NO: 5155509 - DNA, 25 bp, Homo sapien
tctggagcatgaatttcattgtctt

SEQ ID NO: 5155510 - DNA, 25 bp, Homo sapien
cttctggagcatgaatttcattgtc

SEQ ID NO: 5155511 - DNA, 25 bp, Homo sapien
caaagaggcaaagacaaatgctgct

SEQ ID NO: 5155512 - DNA, 25 bp, Homo sapien
tggttgccagttatcatcctggcag

SEQ ID NO: 5155513 - DNA, 25 bp, Homo sapien
tgtcctctgtggctacgtggttgcc

SEQ ID NO: 5155514 - DNA, 25 bp, Homo sapien
gacagccgctcttccatccaaggct

SEQ ID NO: 5155515 - DNA, 25 bp, Homo sapien
cttgcagtgcctgtaagcaagtgca

SEQ ID NO: 5155516 - DNA, 25 bp, Homo sapien
tctaggcttctctccttcgtggaca

SEQ ID NO: 5155517 - DNA, 25 bp, Homo sapien
gacatccttgattatgctgcttgca

SEQ ID NO: 5155518 - DNA, 25 bp, Homo sapien
tctccttcgtggacatccttgatta

SEQ ID NO: 5155519 - DNA, 25 bp, Homo sapien
aatgcatgtttaatgggcatcctgg

SEQ ID NO: 5155520 - DNA, 25 bp, Homo sapien
aaatgcatgtttaatgggcatcctg

SEQ ID NO: 5155521 - DNA, 25 bp, Homo sapien
atttgcaaagttagggcatctgatt

SEQ ID NO: 5155522 - DNA, 25 bp, Homo sapien
aatttgcaaagttagggcatctgat

SEQ ID NO: 5155523 - DNA, 25 bp, Homo sapien
agaaagtatttcgtagcttgatagg

SEQ ID NO: 5155524 - DNA, 25 bp, Homo sapien
gaaagtatttcgtagcttgataggg

SEQ ID NO: 5155525 - DNA, 25 bp, Homo sapien
aaagtatttcgtagcttgataggga

SEQ ID NO: 5155526 - DNA, 25 bp, Homo sapien
cactgatgccccctcatcagattat

SEQ ID NO: 5155527 - DNA, 25 bp, Homo sapien
tcaggtcatgggtgagaaagctgcc

SEQ ID NO: 5155528 - DNA, 25 bp, Homo sapien
caggtcatgggtgagaaagctgcca

SEQ ID NO: 5155529 - DNA, 25 bp, Homo sapien
tggcactgatgccccctcatcagat

SEQ ID NO: 5155530 - DNA, 25 bp, Homo sapien
ttcttagccaaaaggttgagaagtg

SEQ ID NO: 5155531 - DNA, 25 bp, Homo sapien
acacttgttcttagccaaaaggttg

SEQ ID NO: 5155532 - DNA, 25 bp, Homo sapien
ttgttcttagccaaaaggttgagaa

SEQ ID NO: 5155533 - DNA, 25 bp, Homo sapien
cttgttcttagccaaaaggttgaga

SEQ ID NO: 5155534 - DNA, 25 bp, Homo sapien
aatgatgagaccacaacccactggt

SEQ ID NO: 5155535 - DNA, 25 bp, Homo sapien
actaagaaaatggagtcgcctgctt

SEQ ID NO: 5155536 - DNA, 25 bp, Homo sapien
atggagtcgcctgcttggaaatcgc

SEQ ID NO: 5155537 - DNA, 25 bp, Homo sapien
aacccactggtgaaagagttctagg

SEQ ID NO: 5155538 - DNA, 25 bp, Homo sapien
gtgcccaatacccagccagagagag

SEQ ID NO: 5155539 - DNA, 25 bp, Homo sapien
ctcaggccggagactgcggaatgtt

SEQ ID NO: 5155540 - DNA, 25 bp, Homo sapien
tgccgaccctgcaattcaggttttc

SEQ ID NO: 5155541 - DNA, 25 bp, Homo sapien
gactgcggaatgttgccgaccctgc

SEQ ID NO: 5155542 - DNA, 25 bp, Homo sapien
tacagagatcaattgcagtcctgca

SEQ ID NO: 5155543 - DNA, 25 bp, Homo sapien
gcagtgtaccttttcagtatggaga

SEQ ID NO: 5155544 - DNA, 25 bp, Homo sapien
tcactccggaggctgaaacgctatc

SEQ ID NO: 5155545 - DNA, 25 bp, Homo sapien
caatcccaggcggagttccagaatg

SEQ ID NO: 5155546 - DNA, 25 bp, Homo sapien
atgtgatgggacacgctggcagttt

SEQ ID NO: 5155547 - DNA, 25 bp, Homo sapien
ttgtttttgagggttgacacttgat

SEQ ID NO: 5155548 - DNA, 25 bp, Homo sapien
cttgattgtttttgagggttgacac

SEQ ID NO: 5155549 - DNA, 25 bp, Homo sapien
cttgatgtgatgggacacgctggca

SEQ ID NO: 5155550 - DNA, 25 bp, Homo sapien
gaattttacccactatagacttcat

SEQ ID NO: 5155551 - DNA, 25 bp, Homo sapien
aagaaaaagccatccgatctgcctt

SEQ ID NO: 5155552 - DNA, 25 bp, Homo sapien
gatctgccttatatccgtttgcagg

SEQ ID NO: 5155553 - DNA, 25 bp, Homo sapien
tagtagggcaggctgtatgcatttt

SEQ ID NO: 5155554 - DNA, 25 bp, Homo sapien
tatccgtttgcaggtagtagggcag

SEQ ID NO: 5155555 - DNA, 25 bp, Homo sapien
gcatttaagctttgccgtcagagta

SEQ ID NO: 5155556 - DNA, 25 bp, Homo sapien
gaatttagatcccaagatcttgtcc

SEQ ID NO: 5155557 - DNA, 25 bp, Homo sapien
tttgccgtcagagtacagccaaatc

SEQ ID NO: 5155558 - DNA, 25 bp, Homo sapien
gggtcatagaactgtgtcctgaatt

SEQ ID NO: 5155559 - DNA, 25 bp, Homo sapien
caagtatttgtctccgaagagcagg

SEQ ID NO: 5155560 - DNA, 25 bp, Homo sapien
taattaacatgtccctggctaggag

SEQ ID NO: 5155561 - DNA, 25 bp, Homo sapien
taggaggcttttaagtgcagacggc

SEQ ID NO: 5155562 - DNA, 25 bp, Homo sapien
tccaatttacggatggcagcactga

SEQ ID NO: 5155563 - DNA, 25 bp, Homo sapien
tctctccacctgtctctttttcatt

SEQ ID NO: 5155564 - DNA, 25 bp, Homo sapien
ctcctaaccagcataccagctccac

SEQ ID NO: 5155565 - DNA, 25 bp, Homo sapien
accagcataccagctccacgcagct

SEQ ID NO: 5155566 - DNA, 25 bp, Homo sapien
gctccacgcagctctcatctccctc

SEQ ID NO: 5155567 - DNA, 25 bp, Homo sapien
ctgtatcttagatggtcgaggcctc

SEQ ID NO: 5155568 - DNA, 25 bp, Homo sapien
gatggtcgaggcctcattatttcct

SEQ ID NO: 5155569 - DNA, 25 bp, Homo sapien
tggtcgaggcctcattatttcctac

SEQ ID NO: 5155570 - DNA, 25 bp, Homo sapien
tcttagatggtcgaggcctcattat

SEQ ID NO: 5155571 - DNA, 25 bp, Homo sapien
gaaagctccatatccatttgcattg

SEQ ID NO: 5155572 - DNA, 25 bp, Homo sapien
gtagcacttcctttcgattcagcag

SEQ ID NO: 5155573 - DNA, 25 bp, Homo sapien
tccagttttctctcaactgcgatga

SEQ ID NO: 5155574 - DNA, 25 bp, Homo sapien
tgcattgatcatcctggtgaagccc

SEQ ID NO: 5155575 - DNA, 25 bp, Homo sapien
cagtcctgaagccactcttcatgta

SEQ ID NO: 5155576 - DNA, 25 bp, Homo sapien
agtcctgaagccactcttcatgtat

SEQ ID NO: 5155577 - DNA, 25 bp, Homo sapien
atttctttttgcctcatttcacaat

SEQ ID NO: 5155578 - DNA, 25 bp, Homo sapien
gtgaaccagcttcagcatttctttt

SEQ ID NO: 5155579 - DNA, 25 bp, Homo sapien
tttctttttgcctcatttcacaatg

SEQ ID NO: 5155580 - DNA, 25 bp, Homo sapien
ttctgtgaaccagcttcagcatttc

SEQ ID NO: 5155581 - DNA, 25 bp, Homo sapien
tccttgatcttccaccccgttgcca

SEQ ID NO: 5155582 - DNA, 25 bp, Homo sapien
tgatcttccaccccgttgccaagtt

SEQ ID NO: 5155583 - DNA, 25 bp, Homo sapien
tccaccccgttgccaagttcagtat

SEQ ID NO: 5155584 - DNA, 25 bp, Homo sapien
ccaccccgttgccaagttcagtatt

SEQ ID NO: 5155585 - DNA, 25 bp, Homo sapien
ctggagagaagaaggggatgaatat

SEQ ID NO: 5155586 - DNA, 25 bp, Homo sapien
gctgctcaggaaggctgtctctgtg

SEQ ID NO: 5155587 - DNA, 25 bp, Homo sapien
tctgtgtttaatattagttgcacac

SEQ ID NO: 5155588 - DNA, 25 bp, Homo sapien
aagggctgtgcatctgttggcagct

SEQ ID NO: 5155589 - DNA, 25 bp, Homo sapien
cagctgaacttggcccaagggctgt

SEQ ID NO: 5155590 - DNA, 25 bp, Homo sapien
aaatgggtgttgggccttctatagc

SEQ ID NO: 5155591 - DNA, 25 bp, Homo sapien
gctacaattactgtgctagagtgga

SEQ ID NO: 5155592 - DNA, 25 bp, Homo sapien
aaaacccctgctacaattactgtgc

SEQ ID NO: 5155593 - DNA, 25 bp, Homo sapien
ggccttctatagctgatggaagtag

SEQ ID NO: 5155594 - DNA, 25 bp, Homo sapien
tccacaaagtctttctcggctgcct

SEQ ID NO: 5155595 - DNA, 25 bp, Homo sapien
ggctgcctccagtctacaccggtgg

SEQ ID NO: 5155596 - DNA, 25 bp, Homo sapien
gtctacaccggtggcctctgaatgt

SEQ ID NO: 5155597 - DNA, 25 bp, Homo sapien
cataagccaagttctatcaattctt

SEQ ID NO: 5155598 - DNA, 25 bp, Homo sapien
gctgtgtgacgccacctgctgcaca

SEQ ID NO: 5155599 - DNA, 25 bp, Homo sapien
gtgtgacgccacctgctgcacaagc

SEQ ID NO: 5155600 - DNA, 25 bp, Homo sapien
cagcattaaagtaagtccctctctt

SEQ ID NO: 5155601 - DNA, 25 bp, Homo sapien
tacatgctgtgtgacgccacctgct

SEQ ID NO: 5155602 - DNA, 25 bp, Homo sapien
tagacgagtgagcatctccctagaa

SEQ ID NO: 5155603 - DNA, 25 bp, Homo sapien
cttccgtagacgagtgagcatctcc

SEQ ID NO: 5155604 - DNA, 25 bp, Homo sapien
acgagtgagcatctccctagaatca

SEQ ID NO: 5155605 - DNA, 25 bp, Homo sapien
tccgtagacgagtgagcatctccct

SEQ ID NO: 5155606 - DNA, 25 bp, Homo sapien
catatgacacccgagatacagcttc

SEQ ID NO: 5155607 - DNA, 25 bp, Homo sapien
tctagcaccaaaaccataagcagga

SEQ ID NO: 5155608 - DNA, 25 bp, Homo sapien
aatgaaattgaaccgctctagcacc

SEQ ID NO: 5155609 - DNA, 25 bp, Homo sapien
tgacagatattgattgtgccccaag

SEQ ID NO: 5155610 - DNA, 25 bp, Homo sapien
cagagaaagtggagtccatagacag

SEQ ID NO: 5155611 - DNA, 25 bp, Homo sapien
cagcaaataatctagattcacagag

SEQ ID NO: 5155612 - DNA, 25 bp, Homo sapien
gacttccttcaaatatccaacacta

SEQ ID NO: 5155613 - DNA, 25 bp, Homo sapien
caggagccctctcaatgcctattac

SEQ ID NO: 5155614 - DNA, 25 bp, Homo sapien
tataggaccatactggcttataatc

SEQ ID NO: 5155615 - DNA, 25 bp, Homo sapien
ccttataggaccatactggcttata

SEQ ID NO: 5155616 - DNA, 25 bp, Homo sapien
atagtccttataggaccatactggc

SEQ ID NO: 5155617 - DNA, 25 bp, Homo sapien
gtccttataggaccatactggctta

SEQ ID NO: 5155618 - DNA, 25 bp, Homo sapien
gaacctcttcgattgtccagaccag

SEQ ID NO: 5155619 - DNA, 25 bp, Homo sapien
tgtgtttgagtgtacaattgtcact

SEQ ID NO: 5155620 - DNA, 25 bp, Homo sapien
tgtgatatttacatctagatttgtg

SEQ ID NO: 5155621 - DNA, 25 bp, Homo sapien
ggaaatgacgtgcatcactgtgaac

SEQ ID NO: 5155622 - DNA, 25 bp, Homo sapien
aaataacaaggctgacaccgtggtc

SEQ ID NO: 5155623 - DNA, 25 bp, Homo sapien
tgaaccacactaggctctctaaggg

SEQ ID NO: 5155624 - DNA, 25 bp, Homo sapien
tgaagctgtacgaaagtcaagagca

SEQ ID NO: 5155625 - DNA, 25 bp, Homo sapien
aatcgagacctccaagttgtgcatc

SEQ ID NO: 5155626 - DNA, 25 bp, Homo sapien
gaagccatgatatctattggcaata

SEQ ID NO: 5155627 - DNA, 25 bp, Homo sapien
tctattggcaataggagtaatgggt

SEQ ID NO: 5155628 - DNA, 25 bp, Homo sapien
taggagtaatgggtaactcctgttg

SEQ ID NO: 5155629 - DNA, 25 bp, Homo sapien
ctgagtatggtttaggagtgaagcc

SEQ ID NO: 5155630 - DNA, 25 bp, Homo sapien
cttttccagggttgggagagctgca

SEQ ID NO: 5155631 - DNA, 25 bp, Homo sapien
taagagctgagaacaaaatcatcat

SEQ ID NO: 5155632 - DNA, 25 bp, Homo sapien
tcttcatcttttccagggttgggag

SEQ ID NO: 5155633 - DNA, 25 bp, Homo sapien
tcatcttttccagggttgggagagc

SEQ ID NO: 5155634 - DNA, 25 bp, Homo sapien
taattcagaccttctgtcttcacag

SEQ ID NO: 5155635 - DNA, 25 bp, Homo sapien
ctgtcttcacagtcttaatcactac

SEQ ID NO: 5155636 - DNA, 25 bp, Homo sapien
ctaattcagaccttctgtcttcaca

SEQ ID NO: 5155637 - DNA, 25 bp, Homo sapien
cttctgtcttcacagtcttaatcac

SEQ ID NO: 5155638 - DNA, 25 bp, Homo sapien
tgttttaggtcttctgctcacggtg

SEQ ID NO: 5155639 - DNA, 25 bp, Homo sapien
gaccagagttctgcccaagaatcgg

SEQ ID NO: 5155640 - DNA, 25 bp, Homo sapien
cacggtgcttcttggaataaggaaa

SEQ ID NO: 5155641 - DNA, 25 bp, Homo sapien
tgatctggagaagctatcagtttcc

SEQ ID NO: 5155642 - DNA, 25 bp, Homo sapien
ctttgcttcagggacgcaggagtgg

SEQ ID NO: 5155643 - DNA, 25 bp, Homo sapien
cgcaggagtggaggatgctgtcaat

SEQ ID NO: 5155644 - DNA, 25 bp, Homo sapien
ctgtcaatgttggaaattagcccct

SEQ ID NO: 5155645 - DNA, 25 bp, Homo sapien
caatgttggaaattagccccttggc

SEQ ID NO: 5155646 - DNA, 25 bp, Homo sapien
gaaatgtgatgtacagcaattccaa

SEQ ID NO: 5155647 - DNA, 25 bp, Homo sapien
agcaattccaactgtgaagccacca

SEQ ID NO: 5155648 - DNA, 25 bp, Homo sapien
caagaggaagagacgaatgccacat

SEQ ID NO: 5155649 - DNA, 25 bp, Homo sapien
cagaccggcataaaggatgtccttg

SEQ ID NO: 5155650 - DNA, 25 bp, Homo sapien
ccgggaacagactgtggtaataact

SEQ ID NO: 5155651 - DNA, 25 bp, Homo sapien
gaacagctgatgtggaaggtacagc

SEQ ID NO: 5155652 - DNA, 25 bp, Homo sapien
caaggagctgcgtttcaactccagc

SEQ ID NO: 5155653 - DNA, 25 bp, Homo sapien
cacttataagatttaacctggaaat

SEQ ID NO: 5155654 - DNA, 25 bp, Homo sapien
cagattcagtgtgacaaagttgagg

SEQ ID NO: 5155655 - DNA, 25 bp, Homo sapien
caaagttgaggggtgtagggtagca

SEQ ID NO: 5155656 - DNA, 25 bp, Homo sapien
tgtagggtagcactgagagcctcat

SEQ ID NO: 5155657 - DNA, 25 bp, Homo sapien
ttccaggtcagattcagtgtgacaa

SEQ ID NO: 5155658 - DNA, 25 bp, Homo sapien
gctttgagttgagggtggtagcaaa

SEQ ID NO: 5155659 - DNA, 25 bp, Homo sapien
tccgtgcatgctgttgtatccaagg

SEQ ID NO: 5155660 - DNA, 25 bp, Homo sapien
tagcaaagggattaatcagaaaagc

SEQ ID NO: 5155661 - DNA, 25 bp, Homo sapien
cagaaaagcaaatgtccgtgcatgc

SEQ ID NO: 5155662 - DNA, 25 bp, Homo sapien
ctggggctgtcaggaaagccacatt

SEQ ID NO: 5155663 - DNA, 25 bp, Homo sapien
tctggggctgtcaggaaagccacat

SEQ ID NO: 5155664 - DNA, 25 bp, Homo sapien
gatgtactcggacatggagatatac

SEQ ID NO: 5155665 - DNA, 25 bp, Homo sapien
gggatgtacttgaatgtacttgtac

SEQ ID NO: 5155666 - DNA, 25 bp, Homo sapien
cacgtatgtcgacatggagatgtat

SEQ ID NO: 5155667 - DNA, 25 bp, Homo sapien
taagcttcggtatcctcaggtgtat

SEQ ID NO: 5155668 - DNA, 25 bp, Homo sapien
ctagctaatagggaacagggatggc

SEQ ID NO: 5155669 - DNA, 25 bp, Homo sapien
tgggagagtcccacactctagaact

SEQ ID NO: 5155670 - DNA, 25 bp, Homo sapien
ggagtaactactcaccctcaaggcc

SEQ ID NO: 5155671 - DNA, 25 bp, Homo sapien
catgacctactccaaccactgatgg

SEQ ID NO: 5155672 - DNA, 25 bp, Homo sapien
ccattttcagcgtcatcaaatgtcc

SEQ ID NO: 5155673 - DNA, 25 bp, Homo sapien
ctttccattttcagcgtcatcaaat

SEQ ID NO: 5155674 - DNA, 25 bp, Homo sapien
cactttccattttcagcgtcatcaa

SEQ ID NO: 5155675 - DNA, 25 bp, Homo sapien
ttttcagcgtcatcaaatgtcccat

SEQ ID NO: 5155676 - DNA, 25 bp, Homo sapien
tgttattatttcatcacgcatctct

SEQ ID NO: 5155677 - DNA, 25 bp, Homo sapien
ttcatcacgcatctctgatattcct

SEQ ID NO: 5155678 - DNA, 25 bp, Homo sapien
tatttcatcacgcatctctgatatt

SEQ ID NO: 5155679 - DNA, 25 bp, Homo sapien
ctgttattatttcatcacgcatctc

SEQ ID NO: 5155680 - DNA, 25 bp, Homo sapien
tgagagtagcaaagagagtatgacg

SEQ ID NO: 5155681 - DNA, 25 bp, Homo sapien
gggtaccagccaaatctgactaaag

SEQ ID NO: 5155682 - DNA, 25 bp, Homo sapien
tagaagaggatcaggtatatgccat

SEQ ID NO: 5155683 - DNA, 25 bp, Homo sapien
taaagcatccagaacaccgtctcaa

SEQ ID NO: 5155684 - DNA, 25 bp, Homo sapien
agtcagtgcccctcaaaattgcaaa

SEQ ID NO: 5155685 - DNA, 25 bp, Homo sapien
gcatatgtcaagtcagtgcccctca

SEQ ID NO: 5155686 - DNA, 25 bp, Homo sapien
cactcaaagcccagcgcatatgtca

SEQ ID NO: 5155687 - DNA, 25 bp, Homo sapien
ttataaagggctcccactcaaagcc

SEQ ID NO: 5155688 - DNA, 25 bp, Homo sapien
tgtccatcggatgtccactctgcag

SEQ ID NO: 5155689 - DNA, 25 bp, Homo sapien
gaaattgctcccacatgttggtgtc

SEQ ID NO: 5155690 - DNA, 25 bp, Homo sapien
catttctaatgggacactgtgtagc

SEQ ID NO: 5155691 - DNA, 25 bp, Homo sapien
gaccttctagggacatcaagttgag

SEQ ID NO: 5155692 - DNA, 25 bp, Homo sapien
taaattttccatcgactctctaagt

SEQ ID NO: 5155693 - DNA, 25 bp, Homo sapien
tataaaagctcagcatatgtttgag

SEQ ID NO: 5155694 - DNA, 25 bp, Homo sapien
tatgtttgagctacatacagcctaa

SEQ ID NO: 5155695 - DNA, 25 bp, Homo sapien
gagctgtcacactttcgaaagaaac

SEQ ID NO: 5155696 - DNA, 25 bp, Homo sapien
aagtcacaagtcctccaactctaat

SEQ ID NO: 5155697 - DNA, 25 bp, Homo sapien
gggtataggcagtgaaataatcgcc

SEQ ID NO: 5155698 - DNA, 25 bp, Homo sapien
gtttaccatcaaacaggaagtagca

SEQ ID NO: 5155699 - DNA, 25 bp, Homo sapien
ttcatgtgaccaagcaattgtccca

SEQ ID NO: 5155700 - DNA, 25 bp, Homo sapien
gcatcattcctcagctctacaagca

SEQ ID NO: 5155701 - DNA, 25 bp, Homo sapien
gacaaagcttctaagctatacacag

SEQ ID NO: 5155702 - DNA, 25 bp, Homo sapien
tcatgtagttactgtcaaaagacaa

SEQ ID NO: 5155703 - DNA, 25 bp, Homo sapien
tccaccagattcgatgaatgtcatg

SEQ ID NO: 5155704 - DNA, 25 bp, Homo sapien
tagtcactgatactctcttggtaga

SEQ ID NO: 5155705 - DNA, 25 bp, Homo sapien
cacacaggcaatatagcctctatat

SEQ ID NO: 5155706 - DNA, 25 bp, Homo sapien
cacaggcaatatagcctctatatgc

SEQ ID NO: 5155707 - DNA, 25 bp, Homo sapien
tacacacaggcaatatagcctctat

SEQ ID NO: 5155708 - DNA, 25 bp, Homo sapien
caatatagcctctatatgctgaatg

SEQ ID NO: 5155709 - DNA, 25 bp, Homo sapien
ttgcgtggttgactggtagaaagac

SEQ ID NO: 5155710 - DNA, 25 bp, Homo sapien
aaagagatgcctggtccattgggcc

SEQ ID NO: 5155711 - DNA, 25 bp, Homo sapien
tccatgatgtcgaggaacagcaggc

SEQ ID NO: 5155712 - DNA, 25 bp, Homo sapien
ggtccattgggccaaggaattctcc

SEQ ID NO: 5155713 - DNA, 25 bp, Homo sapien
caatgcttggccctgctagagtgtt

SEQ ID NO: 5155714 - DNA, 25 bp, Homo sapien
gaatgcagactccttcaatgcttgg

SEQ ID NO: 5155715 - DNA, 25 bp, Homo sapien
cctgctagagtgttactgggaccga

SEQ ID NO: 5155716 - DNA, 25 bp, Homo sapien
ccaagaccgggttgacttgctgtct

SEQ ID NO: 5155717 - DNA, 25 bp, Homo sapien
caggttctaggctggctttactccc

SEQ ID NO: 5155718 - DNA, 25 bp, Homo sapien
acaggttctaggctggctttactcc

SEQ ID NO: 5155719 - DNA, 25 bp, Homo sapien
gagacagccaatgggaaattctttc

SEQ ID NO: 5155720 - DNA, 25 bp, Homo sapien
cagttttagttagttcagctttgca

SEQ ID NO: 5155721 - DNA, 25 bp, Homo sapien
taaatagctctggtattttcagcag

SEQ ID NO: 5155722 - DNA, 25 bp, Homo sapien
caagtcgtggaatctgaggaaaacc

SEQ ID NO: 5155723 - DNA, 25 bp, Homo sapien
ctgcctttgtcatcccttgcacgca

SEQ ID NO: 5155724 - DNA, 25 bp, Homo sapien
cccttgcacgcactgaccctttttt

SEQ ID NO: 5155725 - DNA, 25 bp, Homo sapien
tgcctttgtcatcccttgcacgcac

SEQ ID NO: 5155726 - DNA, 25 bp, Homo sapien
cagaagtgctaggtctttgaatagc

SEQ ID NO: 5155727 - DNA, 25 bp, Homo sapien
gccttggaacctaagtagaagcaga

SEQ ID NO: 5155728 - DNA, 25 bp, Homo sapien
tgcagtttactcgtatgtacagaag

SEQ ID NO: 5155729 - DNA, 25 bp, Homo sapien
gaataccatttcgagtgcagtttac

SEQ ID NO: 5155730 - DNA, 25 bp, Homo sapien
cccgcgtgccgaggagattttggac

SEQ ID NO: 5155731 - DNA, 25 bp, Homo sapien
agttgtctgcgtcccgcgaagtctc

SEQ ID NO: 5155732 - DNA, 25 bp, Homo sapien
gggtctgacacacgcattcaagttg

SEQ ID NO: 5155733 - DNA, 25 bp, Homo sapien
cacggttgcgtgtctgcttttccag

SEQ ID NO: 5155734 - DNA, 25 bp, Homo sapien
gccaaagcgccatgcgggaaaggct

SEQ ID NO: 5155735 - DNA, 25 bp, Homo sapien
gttctcagggaagaacggcgccctc

SEQ ID NO: 5155736 - DNA, 25 bp, Homo sapien
cgccctctgagaaccggaagtgtct

SEQ ID NO: 5155737 - DNA, 25 bp, Homo sapien
gcgttgtggtcacgttctttctgga

SEQ ID NO: 5155738 - DNA, 25 bp, Homo sapien
tatgccatcttttggatgctctatg

SEQ ID NO: 5155739 - DNA, 25 bp, Homo sapien
tgccatcttttggatgctctatgcc

SEQ ID NO: 5155740 - DNA, 25 bp, Homo sapien
ctctgtgccatcttttggatgctct

SEQ ID NO: 5155741 - DNA, 25 bp, Homo sapien
ctgccatcttttggatgctctatgc

SEQ ID NO: 5155742 - DNA, 25 bp, Homo sapien
ctatgcgatttcaggggactccaga

SEQ ID NO: 5155743 - DNA, 25 bp, Homo sapien
tatgcgatttcaggggactccagag

SEQ ID NO: 5155744 - DNA, 25 bp, Homo sapien
atgcgatttcaggggactccagagt

SEQ ID NO: 5155745 - DNA, 25 bp, Homo sapien
gctgctcagatagctggtaagataa

SEQ ID NO: 5155746 - DNA, 25 bp, Homo sapien
aactttactgggctaaggctgctca

SEQ ID NO: 5155747 - DNA, 25 bp, Homo sapien
tctttctgcgctaggacattcatct

SEQ ID NO: 5155748 - DNA, 25 bp, Homo sapien
ccagttatacacaagttcccagagc

SEQ ID NO: 5155749 - DNA, 25 bp, Homo sapien
ttaggcagacatcaacaagatcttt

SEQ ID NO: 5155750 - DNA, 25 bp, Homo sapien
gtaaacaatgaaatttaggcagaca

SEQ ID NO: 5155751 - DNA, 25 bp, Homo sapien
caatgaaatttaggcagacatcaac

SEQ ID NO: 5155752 - DNA, 25 bp, Homo sapien
tgaaatttaggcagacatcaacaag

SEQ ID NO: 5155753 - DNA, 25 bp, Homo sapien
caaacagccataggctctggatata

SEQ ID NO: 5155754 - DNA, 25 bp, Homo sapien
ctttccatccactcagctggttggt

SEQ ID NO: 5155755 - DNA, 25 bp, Homo sapien
tgaacaacacagacataagagcctc

SEQ ID NO: 5155756 - DNA, 25 bp, Homo sapien
acataagagcctccatcttctttct

SEQ ID NO: 5155757 - DNA, 25 bp, Homo sapien
gtgaacaacacagacataagagcct

SEQ ID NO: 5155758 - DNA, 25 bp, Homo sapien
gggcccatgtaaacagcaatggatc

SEQ ID NO: 5155759 - DNA, 25 bp, Homo sapien
taactccatttaatgggcccatgta

SEQ ID NO: 5155760 - DNA, 25 bp, Homo sapien
atttaatgggcccatgtaaacagca

SEQ ID NO: 5155761 - DNA, 25 bp, Homo sapien
taatgggcccatgtaaacagcaatg

SEQ ID NO: 5155762 - DNA, 25 bp, Homo sapien
cctatatgctaggacggttctcaga

SEQ ID NO: 5155763 - DNA, 25 bp, Homo sapien
gagggtgcgctactctcccaggtat

SEQ ID NO: 5155764 - DNA, 25 bp, Homo sapien
gaagacctgctttaactgacatctg

SEQ ID NO: 5155765 - DNA, 25 bp, Homo sapien
tatttacttatgctacagggcagca

SEQ ID NO: 5155766 - DNA, 25 bp, Homo sapien
tgataatggtcaaaaggtagctact

SEQ ID NO: 5155767 - DNA, 25 bp, Homo sapien
tggattaaacgtgcaaagtacaatt

SEQ ID NO: 5155768 - DNA, 25 bp, Homo sapien
tttatatgcattccccaacgacaca

SEQ ID NO: 5155769 - DNA, 25 bp, Homo sapien
ccaccacacgagtgtaattattgta

SEQ ID NO: 5155770 - DNA, 25 bp, Homo sapien
gaaattttcactagtttcgctctag

SEQ ID NO: 5155771 - DNA, 25 bp, Homo sapien
actatggtcttgatacttcggtgtg

SEQ ID NO: 5155772 - DNA, 25 bp, Homo sapien
tctgtggtgctatgcagtttcagcc

SEQ ID NO: 5155773 - DNA, 25 bp, Homo sapien
agatccatgggaagttgcaacaaaa

SEQ ID NO: 5155774 - DNA, 25 bp, Homo sapien
attagagtgtcaatttcatcataca

SEQ ID NO: 5155775 - DNA, 25 bp, Homo sapien
ttagagtgtcaatttcatcatacat

SEQ ID NO: 5155776 - DNA, 25 bp, Homo sapien
tatctgcatccaagcacagtgaacc

SEQ ID NO: 5155777 - DNA, 25 bp, Homo sapien
tgcatccaagcacagtgaacctcct

SEQ ID NO: 5155778 - DNA, 25 bp, Homo sapien
caccatctctgggaagacattcttg

SEQ ID NO: 5155779 - DNA, 25 bp, Homo sapien
gctatctgcatccaagcacagtgaa

SEQ ID NO: 5155780 - DNA, 25 bp, Homo sapien
ggttttggttgtacatgcgcaggtc

SEQ ID NO: 5155781 - DNA, 25 bp, Homo sapien
ttggttgtacatgcgcaggtcaggt

SEQ ID NO: 5155782 - DNA, 25 bp, Homo sapien
ttctggttttggttgtacatgcgca

SEQ ID NO: 5155783 - DNA, 25 bp, Homo sapien
ttttggttgtacatgcgcaggtcag

SEQ ID NO: 5155784 - DNA, 25 bp, Homo sapien
agaaacctagaattccagcattaga

SEQ ID NO: 5155785 - DNA, 25 bp, Homo sapien
taggcagtcgccagtgacatcttca

SEQ ID NO: 5155786 - DNA, 25 bp, Homo sapien
gattagcccgtttggatcaaccatg

SEQ ID NO: 5155787 - DNA, 25 bp, Homo sapien
ggatcaaccatgtgctctctggaat

SEQ ID NO: 5155788 - DNA, 25 bp, Homo sapien
gatgaatttcgacgaggtgaccaca

SEQ ID NO: 5155789 - DNA, 25 bp, Homo sapien
tactgggcaacacaccccttagtta

SEQ ID NO: 5155790 - DNA, 25 bp, Homo sapien
gcccttattctcagtatgggtaaga

SEQ ID NO: 5155791 - DNA, 25 bp, Homo sapien
aacagggcatgtctataaccttagc

SEQ ID NO: 5155792 - DNA, 25 bp, Homo sapien
tgcagaagatgcctgagcattatcc

SEQ ID NO: 5155793 - DNA, 25 bp, Homo sapien
gcagaagatgcctgagcattatcca

SEQ ID NO: 5155794 - DNA, 25 bp, Homo sapien
ctgcagaagatgcctgagcattatc

SEQ ID NO: 5155795 - DNA, 25 bp, Homo sapien
cagaagatgcctgagcattatccat

SEQ ID NO: 5155796 - DNA, 25 bp, Homo sapien
tgtcccatccccaaacccgtagaca

SEQ ID NO: 5155797 - DNA, 25 bp, Homo sapien
taatcttcagctggacagcaacagc

SEQ ID NO: 5155798 - DNA, 25 bp, Homo sapien
agctcctccacggttggttctacct

SEQ ID NO: 5155799 - DNA, 25 bp, Homo sapien
tagacaacaaaagcccatggcagct

SEQ ID NO: 5155800 - DNA, 25 bp, Homo sapien
gataacgaatagatacccaggagga

SEQ ID NO: 5155801 - DNA, 25 bp, Homo sapien
ccatgaggcatgcattgggtcccaa

SEQ ID NO: 5155802 - DNA, 25 bp, Homo sapien
ggtcaaagcactatagcatacctgt

SEQ ID NO: 5155803 - DNA, 25 bp, Homo sapien
gagaaggtctgtaagtcatcttgca

SEQ ID NO: 5155804 - DNA, 25 bp, Homo sapien
cagttcaccagaatcactcatctct

SEQ ID NO: 5155805 - DNA, 25 bp, Homo sapien
cactcatctctgggtgcttcaccat

SEQ ID NO: 5155806 - DNA, 25 bp, Homo sapien
ttcaccagaatcactcatctctggg

SEQ ID NO: 5155807 - DNA, 25 bp, Homo sapien
agttcaccagaatcactcatctctg

SEQ ID NO: 5155808 - DNA, 25 bp, Homo sapien
gaggacaggagtcagtaggcccagg

SEQ ID NO: 5155809 - DNA, 25 bp, Homo sapien
gtgagaggacaggagtcagtaggcc

SEQ ID NO: 5155810 - DNA, 25 bp, Homo sapien
aggcgttttcggccatcagcccagg

SEQ ID NO: 5155811 - DNA, 25 bp, Homo sapien
agggaggcgttttcggccatcagcc

SEQ ID NO: 5155812 - DNA, 25 bp, Homo sapien
ccagcatgagtgccgggtgtctcca

SEQ ID NO: 5155813 - DNA, 25 bp, Homo sapien
tcttggaaacctcaatctgagggat

SEQ ID NO: 5155814 - DNA, 25 bp, Homo sapien
ttaacttagcatgacccagcatgag

SEQ ID NO: 5155815 - DNA, 25 bp, Homo sapien
atttctgtatagctcccaatcatgg

SEQ ID NO: 5155816 - DNA, 25 bp, Homo sapien
cctgactaaggaagtggtacaactg

SEQ ID NO: 5155817 - DNA, 25 bp, Homo sapien
caaagcctgactaaggaagtggtac

SEQ ID NO: 5155818 - DNA, 25 bp, Homo sapien
tgtgcaaagcctgactaaggaagtg

SEQ ID NO: 5155819 - DNA, 25 bp, Homo sapien
ctagttcatgtgcaaagcctgacta

SEQ ID NO: 5155820 - DNA, 25 bp, Homo sapien
tcaaaaacagcaattagggcacaag

SEQ ID NO: 5155821 - DNA, 25 bp, Homo sapien
tagggcacaaggaagaagggtcacc

SEQ ID NO: 5155822 - DNA, 25 bp, Homo sapien
aaacagcaattagggcacaaggaag

SEQ ID NO: 5155823 - DNA, 25 bp, Homo sapien
caattagggcacaaggaagaagggt

SEQ ID NO: 5155824 - DNA, 25 bp, Homo sapien
tccccttggtatacctgttctgcta

SEQ ID NO: 5155825 - DNA, 25 bp, Homo sapien
tcaaaagctgcctgattttcaagac

SEQ ID NO: 5155826 - DNA, 25 bp, Homo sapien
tcctattctacagccaagaaaagct

SEQ ID NO: 5155827 - DNA, 25 bp, Homo sapien
tttcaagaccatacctaaatgccat

SEQ ID NO: 5155828 - DNA, 25 bp, Homo sapien
aaccctgtggttcctagcctctgct

SEQ ID NO: 5155829 - DNA, 25 bp, Homo sapien
tgctactgaaggtcctccatgatca

SEQ ID NO: 5155830 - DNA, 25 bp, Homo sapien
gatcacctcctatatgccatcttgt

SEQ ID NO: 5155831 - DNA, 25 bp, Homo sapien
tccatgatcacctcctatatgccat

SEQ ID NO: 5155832 - DNA, 25 bp, Homo sapien
cgttcagagtagtgtggccataaaa

SEQ ID NO: 5155833 - DNA, 25 bp, Homo sapien
aagagattgggcacgttcagagtag

SEQ ID NO: 5155834 - DNA, 25 bp, Homo sapien
ggcacgttcagagtagtgtggccat

SEQ ID NO: 5155835 - DNA, 25 bp, Homo sapien
attgggcacgttcagagtagtgtgg

SEQ ID NO: 5155836 - DNA, 25 bp, Homo sapien
aacccaaggcggcagtcgcgaattt

SEQ ID NO: 5155837 - DNA, 25 bp, Homo sapien
caaggcggcagtcgcgaatttgccc

SEQ ID NO: 5155838 - DNA, 25 bp, Homo sapien
cggcagtcgcgaatttgccccagac

SEQ ID NO: 5155839 - DNA, 25 bp, Homo sapien
ggaacccaaggcggcagtcgcgaat

SEQ ID NO: 5155840 - DNA, 25 bp, Homo sapien
caaatggaatactaggagtaggttc

SEQ ID NO: 5155841 - DNA, 25 bp, Homo sapien
gaatactaggagtaggttctgggaa

SEQ ID NO: 5155842 - DNA, 25 bp, Homo sapien
ttttgacaaatggaatactaggagt

SEQ ID NO: 5155843 - DNA, 25 bp, Homo sapien
ttgacaaatggaatactaggagtag

SEQ ID NO: 5155844 - DNA, 25 bp, Homo sapien
taaatagacatactctccatgctct

SEQ ID NO: 5155845 - DNA, 25 bp, Homo sapien
gacatactctccatgctcttggtaa

SEQ ID NO: 5155846 - DNA, 25 bp, Homo sapien
ttttaaatagacatactctccatgc

SEQ ID NO: 5155847 - DNA, 25 bp, Homo sapien
tactctccatgctcttggtaatttg

SEQ ID NO: 5155848 - DNA, 25 bp, Homo sapien
aattaatgtcccatcacttttccta

SEQ ID NO: 5155849 - DNA, 25 bp, Homo sapien
ttttcctaacataatctagtgaggc

SEQ ID NO: 5155850 - DNA, 25 bp, Homo sapien
tattggaataacacaaattaatgtc

SEQ ID NO: 5155851 - DNA, 25 bp, Homo sapien
ttcaagacagttggtatcttattgt

SEQ ID NO: 5155852 - DNA, 25 bp, Homo sapien
gctctggcaggcaaaactgaccttg

SEQ ID NO: 5155853 - DNA, 25 bp, Homo sapien
tgctaatatatcaaacaccacgtct

SEQ ID NO: 5155854 - DNA, 25 bp, Homo sapien
tcgatacgaagtgcagtttcagatg

SEQ ID NO: 5155855 - DNA, 25 bp, Homo sapien
tgtatgtttggaccattaaccacct

SEQ ID NO: 5155856 - DNA, 25 bp, Homo sapien
ctcttattattttgaaatatatgtc

SEQ ID NO: 5155857 - DNA, 25 bp, Homo sapien
tattattttgaaatatatgtcccat

SEQ ID NO: 5155858 - DNA, 25 bp, Homo sapien
attttgaaatatatgtcccatcaat

SEQ ID NO: 5155859 - DNA, 25 bp, Homo sapien
cttattattttgaaatatatgtccc

SEQ ID NO: 5155860 - DNA, 25 bp, Homo sapien
cataaggctaggataccactgtcct

SEQ ID NO: 5155861 - DNA, 25 bp, Homo sapien
gtctcctcgtgaattcttgcttcct

SEQ ID NO: 5155862 - DNA, 25 bp, Homo sapien
tgtgcattctgctccataaggctag

SEQ ID NO: 5155863 - DNA, 25 bp, Homo sapien
tctgtctcctcgtgaattcttgctt

SEQ ID NO: 5155864 - DNA, 25 bp, Homo sapien
caggtaaaagagcagggttgttgta

SEQ ID NO: 5155865 - DNA, 25 bp, Homo sapien
gtcttggagtcccactcctttgcct

SEQ ID NO: 5155866 - DNA, 25 bp, Homo sapien
cacatcttctgtcttggagtcccac

SEQ ID NO: 5155867 - DNA, 25 bp, Homo sapien
ggctataagccgatatccccatatt

SEQ ID NO: 5155868 - DNA, 25 bp, Homo sapien
gaagcgaagtctattcccaatctgc

SEQ ID NO: 5155869 - DNA, 25 bp, Homo sapien
gaaccttgaaagtgaagcgaagtct

SEQ ID NO: 5155870 - DNA, 25 bp, Homo sapien
tctcctcttttagacttaattgagg

SEQ ID NO: 5155871 - DNA, 25 bp, Homo sapien
tgaggaaaggaaccttgaaagtgaa

SEQ ID NO: 5155872 - DNA, 25 bp, Homo sapien
ggactataaccactttctacaaatg

SEQ ID NO: 5155873 - DNA, 25 bp, Homo sapien
ctgtgatgaccattgctaagtggac

SEQ ID NO: 5155874 - DNA, 25 bp, Homo sapien
tcagaaccatctactggtccctcag

SEQ ID NO: 5155875 - DNA, 25 bp, Homo sapien
cctcacagaatcttacttcaatgtc

SEQ ID NO: 5155876 - DNA, 25 bp, Homo sapien
tattttgttcccttagtcatcttca

SEQ ID NO: 5155877 - DNA, 25 bp, Homo sapien
tgagcatcaggttcccagtaattat

SEQ ID NO: 5155878 - DNA, 25 bp, Homo sapien
cttcatccttttaatgcctaataca

SEQ ID NO: 5155879 - DNA, 25 bp, Homo sapien
gtactgagcatcaggttcccagtaa

SEQ ID NO: 5155880 - DNA, 25 bp, Homo sapien
ctagtccctgaagactcaatccaca

SEQ ID NO: 5155881 - DNA, 25 bp, Homo sapien
gctggcaagtactagtccctgaaga

SEQ ID NO: 5155882 - DNA, 25 bp, Homo sapien
tatgcaccaatttgtctagctggca

SEQ ID NO: 5155883 - DNA, 25 bp, Homo sapien
tccagccccagtatgcaccaatttg

SEQ ID NO: 5155884 - DNA, 25 bp, Homo sapien
tgggtagtatagtttccagagtgca

SEQ ID NO: 5155885 - DNA, 25 bp, Homo sapien
tagtatagtttccagagtgcagtgc

SEQ ID NO: 5155886 - DNA, 25 bp, Homo sapien
cttgggtagtatagtttccagagtg

SEQ ID NO: 5155887 - DNA, 25 bp, Homo sapien
ggtagtatagtttccagagtgcagt

SEQ ID NO: 5155888 - DNA, 25 bp, Homo sapien
tagcaccatatgtttcaagaacaca

SEQ ID NO: 5155889 - DNA, 25 bp, Homo sapien
ccatatgtttcaagaacacaaaaac

SEQ ID NO: 5155890 - DNA, 25 bp, Homo sapien
gcaccatatgtttcaagaacacaaa

SEQ ID NO: 5155891 - DNA, 25 bp, Homo sapien
ctagcaccatatgtttcaagaacac

SEQ ID NO: 5155892 - DNA, 25 bp, Homo sapien
tggattcagcatatggaccacaaac

SEQ ID NO: 5155893 - DNA, 25 bp, Homo sapien
tagctgctgggagagatttcagctc

SEQ ID NO: 5155894 - DNA, 25 bp, Homo sapien
caaactggcggagagcctgagctct

SEQ ID NO: 5155895 - DNA, 25 bp, Homo sapien
cagtgtccctccgttgttttcttag

SEQ ID NO: 5155896 - DNA, 25 bp, Homo sapien
gatgtgtaatcaggtagcccagact

SEQ ID NO: 5155897 - DNA, 25 bp, Homo sapien
gagatatgtgtcagccaaccacgag

SEQ ID NO: 5155898 - DNA, 25 bp, Homo sapien
gacaaatatgactggtgggccgagc

SEQ ID NO: 5155899 - DNA, 25 bp, Homo sapien
gaatcacaatgtacacccctagagt

SEQ ID NO: 5155900 - DNA, 25 bp, Homo sapien
ctctatttagaccagcaatgttggc

SEQ ID NO: 5155901 - DNA, 25 bp, Homo sapien
gcttcaatttctaaacttggtctgc

SEQ ID NO: 5155902 - DNA, 25 bp, Homo sapien
taaacttggtctgcctctatttaga

SEQ ID NO: 5155903 - DNA, 25 bp, Homo sapien
tgcctctatttagaccagcaatgtt

SEQ ID NO: 5155904 - DNA, 25 bp, Homo sapien
gctatcatgatatgacctactgtcc

SEQ ID NO: 5155905 - DNA, 25 bp, Homo sapien
tatcatgatatgacctactgtccct

SEQ ID NO: 5155906 - DNA, 25 bp, Homo sapien
ccactgctatcatgatatgacctac

SEQ ID NO: 5155907 - DNA, 25 bp, Homo sapien
gctcatccactgctatcatgatatg

SEQ ID NO: 5155908 - DNA, 25 bp, Homo sapien
ggaaggaacagtgtctctgcatgag

SEQ ID NO: 5155909 - DNA, 25 bp, Homo sapien
ctaacaggtacatggggaaggaaca

SEQ ID NO: 5155910 - DNA, 25 bp, Homo sapien
caagatacatttccccgtggagagc

SEQ ID NO: 5155911 - DNA, 25 bp, Homo sapien
ccaaagaacaagatacatttccccg

SEQ ID NO: 5155912 - DNA, 25 bp, Homo sapien
tctcttcggcaaccgcagccggggg

SEQ ID NO: 5155913 - DNA, 25 bp, Homo sapien
ccaagcggcaagttagtgcagcggc

SEQ ID NO: 5155914 - DNA, 25 bp, Homo sapien
cgcgcggtgctcagcgcgccaggtg

SEQ ID NO: 5155915 - DNA, 25 bp, Homo sapien
gagctgcggcgacgcctcgtgcctt

SEQ ID NO: 5155916 - DNA, 25 bp, Homo sapien
gttcgcaggtcacgggcgcccgtcg

SEQ ID NO: 5155917 - DNA, 25 bp, Homo sapien
gcgttcgcaggtcacgggcgcccgt

SEQ ID NO: 5155918 - DNA, 25 bp, Homo sapien
gcagcgttcgcaggtcacgggcgcc

SEQ ID NO: 5155919 - DNA, 25 bp, Homo sapien
cttggcagcgttcgcaggtcacggg

SEQ ID NO: 5155920 - DNA, 25 bp, Homo sapien
tcgcgggcgcttcagactcggggac

SEQ ID NO: 5155921 - DNA, 25 bp, Homo sapien
cgctcgcttcctcgcgggcgcttca

SEQ ID NO: 5155922 - DNA, 25 bp, Homo sapien
gcgctcgcttcctcgcgggcgcttc

SEQ ID NO: 5155923 - DNA, 25 bp, Homo sapien
gcggctcctgcttcgcggccgtcat

SEQ ID NO: 5155924 - DNA, 25 bp, Homo sapien
tgcggctcctgcttcgcggccgtca

SEQ ID NO: 5155925 - DNA, 25 bp, Homo sapien
tctaacttcccgcagagtccgtgga

SEQ ID NO: 5155926 - DNA, 25 bp, Homo sapien
taacttcccgcagagtccgtggaga

SEQ ID NO: 5155927 - DNA, 25 bp, Homo sapien
gaggctctaacttcccgcagagtcc

SEQ ID NO: 5155928 - DNA, 25 bp, Homo sapien
gggccccggagcgcacgcagaggct

SEQ ID NO: 5155929 - DNA, 25 bp, Homo sapien
cccttccccgcggctctccaccttg

SEQ ID NO: 5155930 - DNA, 25 bp, Homo sapien
ttccccgcggctctccaccttgcgc

SEQ ID NO: 5155931 - DNA, 25 bp, Homo sapien
ccccgcggctctccaccttgcgcat

SEQ ID NO: 5155932 - DNA, 25 bp, Homo sapien
cttccccgcggctctccaccttgcg

SEQ ID NO: 5155933 - DNA, 25 bp, Homo sapien
cggccgtcaggagcgcagcagattt

SEQ ID NO: 5155934 - DNA, 25 bp, Homo sapien
gctcgaacccggtgagcggccgtca

SEQ ID NO: 5155935 - DNA, 25 bp, Homo sapien
gatttcttcagcgtgcgttaatggg

SEQ ID NO: 5155936 - DNA, 25 bp, Homo sapien
caagaggccccattccttggtcccg

SEQ ID NO: 5155937 - DNA, 25 bp, Homo sapien
ctaaaggtcattcgcctgctcgggt

SEQ ID NO: 5155938 - DNA, 25 bp, Homo sapien
aaggtcattcgcctgctcgggtcgc

SEQ ID NO: 5155939 - DNA, 25 bp, Homo sapien
ctgctcgggtcgctttggccagcga

SEQ ID NO: 5155940 - DNA, 25 bp, Homo sapien
cattcgcctgctcgggtcgctttgg

SEQ ID NO: 5155941 - DNA, 25 bp, Homo sapien
aagaagaaaatatccttctgagatg

SEQ ID NO: 5155942 - DNA, 25 bp, Homo sapien
aaaagaagaaaatatccttctgaga

SEQ ID NO: 5155943 - DNA, 25 bp, Homo sapien
gaagaaaatatccttctgagatgat

SEQ ID NO: 5155944 - DNA, 25 bp, Homo sapien
taaaagaagaaaatatccttctgag

SEQ ID NO: 5155945 - DNA, 25 bp, Homo sapien
gagacccagaatcaagtactgcttc

SEQ ID NO: 5155946 - DNA, 25 bp, Homo sapien
gatgtgctaccatgacaccaccgaa

SEQ ID NO: 5155947 - DNA, 25 bp, Homo sapien
caccgaaggctttgtaccagcagct

SEQ ID NO: 5155948 - DNA, 25 bp, Homo sapien
ggaatggctagatggaaagagaccc

SEQ ID NO: 5155949 - DNA, 25 bp, Homo sapien
acagctcaagaactgtagctctgag

SEQ ID NO: 5155950 - DNA, 25 bp, Homo sapien
ctgtgattccatattagtttttttg

SEQ ID NO: 5155951 - DNA, 25 bp, Homo sapien
tttggattcgctgttacagctcaag

SEQ ID NO: 5155952 - DNA, 25 bp, Homo sapien
agtttttttggattcgctgttacag

SEQ ID NO: 5155953 - DNA, 25 bp, Homo sapien
tcttagtctcaactagctctttgcc

SEQ ID NO: 5155954 - DNA, 25 bp, Homo sapien
ctgacattcacccaggaccctgatt

SEQ ID NO: 5155955 - DNA, 25 bp, Homo sapien
caactagctctttgcctgtagccca

SEQ ID NO: 5155956 - DNA, 25 bp, Homo sapien
atttccaatcttagtctcaactagc

SEQ ID NO: 5155957 - DNA, 25 bp, Homo sapien
ttggttgtcatgacaaatccagttt

SEQ ID NO: 5155958 - DNA, 25 bp, Homo sapien
tcaagatgtgttctttatctctgct

SEQ ID NO: 5155959 - DNA, 25 bp, Homo sapien
caagatgtgttctttatctctgctt

SEQ ID NO: 5155960 - DNA, 25 bp, Homo sapien
gaaagttgctgcttcaacagctggt

SEQ ID NO: 5155961 - DNA, 25 bp, Homo sapien
aatgatataatgtgtttgccgatct

SEQ ID NO: 5155962 - DNA, 25 bp, Homo sapien
agttgctgcttcaacagctggtatc

SEQ ID NO: 5155963 - DNA, 25 bp, Homo sapien
gtgtttgccgatctgcaaaatcatt

SEQ ID NO: 5155964 - DNA, 25 bp, Homo sapien
aaaccaggctaactgaagagacagc

SEQ ID NO: 5155965 - DNA, 25 bp, Homo sapien
caaaaccaggctaactgaagagaca

SEQ ID NO: 5155966 - DNA, 25 bp, Homo sapien
accaggctaactgaagagacagctg

SEQ ID NO: 5155967 - DNA, 25 bp, Homo sapien
agcaaaaccaggctaactgaagaga

SEQ ID NO: 5155968 - DNA, 25 bp, Homo sapien
caaatccaagggtgttgacctgtct

SEQ ID NO: 5155969 - DNA, 25 bp, Homo sapien
aaaggaccgttagcatcttactgcc

SEQ ID NO: 5155970 - DNA, 25 bp, Homo sapien
gagctaagacatgcaccctgggtca

SEQ ID NO: 5155971 - DNA, 25 bp, Homo sapien
tgcataaggagctaaacagtcacag

SEQ ID NO: 5155972 - DNA, 25 bp, Homo sapien
ggctgctccgataatctttgcttaa

SEQ ID NO: 5155973 - DNA, 25 bp, Homo sapien
taatataaaactgcctcacatcttc

SEQ ID NO: 5155974 - DNA, 25 bp, Homo sapien
ccataaagcaggctgctccgataat

SEQ ID NO: 5155975 - DNA, 25 bp, Homo sapien
catgtacattgggttgattctttcc

SEQ ID NO: 5155976 - DNA, 25 bp, Homo sapien
gccagatggctaatatttcaagaga

SEQ ID NO: 5155977 - DNA, 25 bp, Homo sapien
taacacaaatgagtgaagtgagcca

SEQ ID NO: 5155978 - DNA, 25 bp, Homo sapien
tgagctatgtagtgcagtgcatggc

SEQ ID NO: 5155979 - DNA, 25 bp, Homo sapien
tgaatatgagcctaacacagccaga

SEQ ID NO: 5155980 - DNA, 25 bp, Homo sapien
tccaactttctagcatattgttgct

SEQ ID NO: 5155981 - DNA, 25 bp, Homo sapien
gctgctggactgcattttcgtttac

SEQ ID NO: 5155982 - DNA, 25 bp, Homo sapien
tttcagctgaacatatcttacactc

SEQ ID NO: 5155983 - DNA, 25 bp, Homo sapien
ttgctgctggactgcattttcgttt

SEQ ID NO: 5155984 - DNA, 25 bp, Homo sapien
cccagtaactcacagactagagtac

SEQ ID NO: 5155985 - DNA, 25 bp, Homo sapien
tgagaaggtggcacgccgtattaac

SEQ ID NO: 5155986 - DNA, 25 bp, Homo sapien
tcttgccttcaaatgttccccagta

SEQ ID NO: 5155987 - DNA, 25 bp, Homo sapien
cagactagagtacagaaaactgcta

SEQ ID NO: 5155988 - DNA, 25 bp, Homo sapien
gaaagtatcctcaatactatcgtga

SEQ ID NO: 5155989 - DNA, 25 bp, Homo sapien
cctggtctttggatgtaatcacatg

SEQ ID NO: 5155990 - DNA, 25 bp, Homo sapien
ttcatcttctcggttacatggtgca

SEQ ID NO: 5155991 - DNA, 25 bp, Homo sapien
ttacatggtgcattaacacaagcat

SEQ ID NO: 5155992 - DNA, 25 bp, Homo sapien
tcaagcactctttccaaagtaaagg

SEQ ID NO: 5155993 - DNA, 25 bp, Homo sapien
catctattaaataggaatggtacct

SEQ ID NO: 5155994 - DNA, 25 bp, Homo sapien
tgttatcctacgtttcaatcagcta

SEQ ID NO: 5155995 - DNA, 25 bp, Homo sapien
agtgtgtaagctagaacaattttgt

SEQ ID NO: 5155996 - DNA, 25 bp, Homo sapien
taaactctctgaataactttatcat

SEQ ID NO: 5155997 - DNA, 25 bp, Homo sapien
gatcacagaatgatcctcaggttgg

SEQ ID NO: 5155998 - DNA, 25 bp, Homo sapien
taggcaggatgattggaattccagc

SEQ ID NO: 5155999 - DNA, 25 bp, Homo sapien
gaagacaaatgttagcaaggtgcaa

SEQ ID NO: 5156000 - DNA, 25 bp, Homo sapien
ttccagcagtaattgtagatcacag

SEQ ID NO: 5156001 - DNA, 25 bp, Homo sapien
tttaggactgacataggtccctgcc

SEQ ID NO: 5156002 - DNA, 25 bp, Homo sapien
caccagagtcatgggaataagctcc

SEQ ID NO: 5156003 - DNA, 25 bp, Homo sapien
tgtttcacatagttgctgcctcagc

SEQ ID NO: 5156004 - DNA, 25 bp, Homo sapien
gctcaataaaggcatggccccacag

SEQ ID NO: 5156005 - DNA, 25 bp, Homo sapien
tgaaattctagttcagctgaataaa

SEQ ID NO: 5156006 - DNA, 25 bp, Homo sapien
tgtgcaatgatacctagtatctcta

SEQ ID NO: 5156007 - DNA, 25 bp, Homo sapien
tgggctgtgcaatgatacctagtat

SEQ ID NO: 5156008 - DNA, 25 bp, Homo sapien
tgtaagtttgaagcttgtcacattt

SEQ ID NO: 5156009 - DNA, 25 bp, Homo sapien
cagaaaaagagcaccaatgtgagcc

SEQ ID NO: 5156010 - DNA, 25 bp, Homo sapien
ccgcagaaaaagagcaccaatgtga

SEQ ID NO: 5156011 - DNA, 25 bp, Homo sapien
ctcagcgcagcccgcagaaaaagag

SEQ ID NO: 5156012 - DNA, 25 bp, Homo sapien
aaagagcaccaatgtgagccagtgc

SEQ ID NO: 5156013 - DNA, 25 bp, Homo sapien
catagattttgtaacccgagccttt

SEQ ID NO: 5156014 - DNA, 25 bp, Homo sapien
tgaattcactgatcaaatccgggag

SEQ ID NO: 5156015 - DNA, 25 bp, Homo sapien
ggaaatgagttaatgtgatgcctcc

SEQ ID NO: 5156016 - DNA, 25 bp, Homo sapien
ggtcattgtatcatagcagcgctac

SEQ ID NO: 5156017 - DNA, 25 bp, Homo sapien
caaaagtaatgagtctacaataagg

SEQ ID NO: 5156018 - DNA, 25 bp, Homo sapien
cattccatcgtcacaaaagatcagt

SEQ ID NO: 5156019 - DNA, 25 bp, Homo sapien
taatgagtctacaataaggatctgg

SEQ ID NO: 5156020 - DNA, 25 bp, Homo sapien
aaggatctggtcagtgaccattcca

SEQ ID NO: 5156021 - DNA, 25 bp, Homo sapien
agaagggcctgaccgcactgacccg

SEQ ID NO: 5156022 - DNA, 25 bp, Homo sapien
tgaccgcactgacccgcatcctgcc

SEQ ID NO: 5156023 - DNA, 25 bp, Homo sapien
ctgaccgcactgacccgcatcctgc

SEQ ID NO: 5156024 - DNA, 25 bp, Homo sapien
ggacagaagggcctgaccgcactga

SEQ ID NO: 5156025 - DNA, 25 bp, Homo sapien
gatgagtgagcatacaactaaaatc

SEQ ID NO: 5156026 - DNA, 25 bp, Homo sapien
aaatcaccagcagagcaatagcaat

SEQ ID NO: 5156027 - DNA, 25 bp, Homo sapien
gtggagggctgttacttcccagttc

SEQ ID NO: 5156028 - DNA, 25 bp, Homo sapien
gggttaagaggatgactgacatagt

SEQ ID NO: 5156029 - DNA, 25 bp, Homo sapien
caggataagatcacaagcttgtttc

SEQ ID NO: 5156030 - DNA, 25 bp, Homo sapien
aatgtttcctaacttatcacctaga

SEQ ID NO: 5156031 - DNA, 25 bp, Homo sapien
cagcagatgaaatatggtctaaatt

SEQ ID NO: 5156032 - DNA, 25 bp, Homo sapien
tccctaggatgctgaaactttaggc

SEQ ID NO: 5156033 - DNA, 25 bp, Homo sapien
aaatatttactcttaatcgtattct

SEQ ID NO: 5156034 - DNA, 25 bp, Homo sapien
atatttactcttaatcgtattcttc

SEQ ID NO: 5156035 - DNA, 25 bp, Homo sapien
atttactcttaatcgtattcttcat

SEQ ID NO: 5156036 - DNA, 25 bp, Homo sapien
taaatatttactcttaatcgtattc

SEQ ID NO: 5156037 - DNA, 25 bp, Homo sapien
agcctctggatcgtgaagcacaaag

SEQ ID NO: 5156038 - DNA, 25 bp, Homo sapien
caccgagcctctggatcgtgaagca

SEQ ID NO: 5156039 - DNA, 25 bp, Homo sapien
cctaaagaggtcttccaaagacaat

SEQ ID NO: 5156040 - DNA, 25 bp, Homo sapien
ggtttctgacgaatttgtgagttca

SEQ ID NO: 5156041 - DNA, 25 bp, Homo sapien
tctatgatgacctccaagaattaaa

SEQ ID NO: 5156042 - DNA, 25 bp, Homo sapien
ttaaatgatgcttccaaataagctg

SEQ ID NO: 5156043 - DNA, 25 bp, Homo sapien
ccttcaagtgacttatgtacaaaga

SEQ ID NO: 5156044 - DNA, 25 bp, Homo sapien
tcgaactccttcaagtgacttatgt

SEQ ID NO: 5156045 - DNA, 25 bp, Homo sapien
tctagctatggcactaatgtcctca

SEQ ID NO: 5156046 - DNA, 25 bp, Homo sapien
gaagggttgaccactggtccagagc

SEQ ID NO: 5156047 - DNA, 25 bp, Homo sapien
tcttactacagccagttggtgaagg

SEQ ID NO: 5156048 - DNA, 25 bp, Homo sapien
tatggagcactcattgaatactgac

SEQ ID NO: 5156049 - DNA, 25 bp, Homo sapien
tgaatggttcagaccactgatgcca

SEQ ID NO: 5156050 - DNA, 25 bp, Homo sapien
tcaggtactgtacactgattcacag

SEQ ID NO: 5156051 - DNA, 25 bp, Homo sapien
ggccttagagaacaacacagctgaa

SEQ ID NO: 5156052 - DNA, 25 bp, Homo sapien
ccttctctaccttggtggttggttg

SEQ ID NO: 5156053 - DNA, 25 bp, Homo sapien
ctagttgagctctcaacagaatcaa

SEQ ID NO: 5156054 - DNA, 25 bp, Homo sapien
gagctctcaacagaatcaatcttgg

SEQ ID NO: 5156055 - DNA, 25 bp, Homo sapien
tcatctagttgagctctcaacagaa

SEQ ID NO: 5156056 - DNA, 25 bp, Homo sapien
ctctcaacagaatcaatcttggctc

SEQ ID NO: 5156057 - DNA, 25 bp, Homo sapien
ggaagagacctattttcttagctag

SEQ ID NO: 5156058 - DNA, 25 bp, Homo sapien
gcaaaatgtccctacttttacctca

SEQ ID NO: 5156059 - DNA, 25 bp, Homo sapien
gagactattagaagatggccgaata

SEQ ID NO: 5156060 - DNA, 25 bp, Homo sapien
tgagagatgcagaagaccagtgatt

SEQ ID NO: 5156061 - DNA, 25 bp, Homo sapien
gaggatttctgggtcatctaactga

SEQ ID NO: 5156062 - DNA, 25 bp, Homo sapien
aaagaggatttctgggtcatctaac

SEQ ID NO: 5156063 - DNA, 25 bp, Homo sapien
gcaaaagaggatttctgggtcatct

SEQ ID NO: 5156064 - DNA, 25 bp, Homo sapien
aggatttctgggtcatctaactgaa

SEQ ID NO: 5156065 - DNA, 25 bp, Homo sapien
ccattggagccttctattgctagaa

SEQ ID NO: 5156066 - DNA, 25 bp, Homo sapien
ccttctattgctagaaacaagtgtg

SEQ ID NO: 5156067 - DNA, 25 bp, Homo sapien
tattgctagaaacaagtgtgggggt

SEQ ID NO: 5156068 - DNA, 25 bp, Homo sapien
catctccattggagccttctattgc

SEQ ID NO: 5156069 - DNA, 25 bp, Homo sapien
tgaaggtaatggattctttcaaata

SEQ ID NO: 5156070 - DNA, 25 bp, Homo sapien
attttgaaggtaatggattctttca

SEQ ID NO: 5156071 - DNA, 25 bp, Homo sapien
ataactttagtttcttatactggca

SEQ ID NO: 5156072 - DNA, 25 bp, Homo sapien
tagtttcttatactggcaaagaaaa

SEQ ID NO: 5156073 - DNA, 25 bp, Homo sapien
caaactgaggaagttccccatgcat

SEQ ID NO: 5156074 - DNA, 25 bp, Homo sapien
aaagccataggttttcacttgctac

SEQ ID NO: 5156075 - DNA, 25 bp, Homo sapien
agctggcaaagccataggttttcac

SEQ ID NO: 5156076 - DNA, 25 bp, Homo sapien
cacttgctactccaaactgaggaag

SEQ ID NO: 5156077 - DNA, 25 bp, Homo sapien
cactgttgggaggtactgcctttaa

SEQ ID NO: 5156078 - DNA, 25 bp, Homo sapien
cattgtgagtacatgagttataggg

SEQ ID NO: 5156079 - DNA, 25 bp, Homo sapien
ttgaaccatgttccccaatgtggca

SEQ ID NO: 5156080 - DNA, 25 bp, Homo sapien
gagccagggatagaatgctgtgatt

SEQ ID NO: 5156081 - DNA, 25 bp, Homo sapien
caggccagcagactccaaatggtca

SEQ ID NO: 5156082 - DNA, 25 bp, Homo sapien
gcctaacacgctggcaaaaaggtaa

SEQ ID NO: 5156083 - DNA, 25 bp, Homo sapien
ccttttgccaggaacgcttagattg

SEQ ID NO: 5156084 - DNA, 25 bp, Homo sapien
atgtacacacccgtaaaagacctcg

SEQ ID NO: 5156085 - DNA, 25 bp, Homo sapien
ggcttttgatgcatgaattgtccaa

SEQ ID NO: 5156086 - DNA, 25 bp, Homo sapien
gacttgacttgcaaatagtggctct

SEQ ID NO: 5156087 - DNA, 25 bp, Homo sapien
tttcctggagatagtataccatctt

SEQ ID NO: 5156088 - DNA, 25 bp, Homo sapien
gcagttggcttttgatgcatgaatt

SEQ ID NO: 5156089 - DNA, 25 bp, Homo sapien
atcctttagaaagaagtcgacatca

SEQ ID NO: 5156090 - DNA, 25 bp, Homo sapien
tatcctttagaaagaagtcgacatc

SEQ ID NO: 5156091 - DNA, 25 bp, Homo sapien
cctcatccctccagtaacaatatcc

SEQ ID NO: 5156092 - DNA, 25 bp, Homo sapien
tccctccagtaacaatatcctttag

SEQ ID NO: 5156093 - DNA, 25 bp, Homo sapien
tagccactattccacattgtgcttc

SEQ ID NO: 5156094 - DNA, 25 bp, Homo sapien
gccactattccacattgtgcttcca

SEQ ID NO: 5156095 - DNA, 25 bp, Homo sapien
ccactattccacattgtgcttccat

SEQ ID NO: 5156096 - DNA, 25 bp, Homo sapien
cttagccactattccacattgtgct

SEQ ID NO: 5156097 - DNA, 25 bp, Homo sapien
tgtgctcccatgaccatcttagcca

SEQ ID NO: 5156098 - DNA, 25 bp, Homo sapien
tccatgaccatcttagccactattc

SEQ ID NO: 5156099 - DNA, 25 bp, Homo sapien
catgaccatcttagccactattcca

SEQ ID NO: 5156100 - DNA, 25 bp, Homo sapien
tcccatgaccatcttagccactatt

SEQ ID NO: 5156101 - DNA, 25 bp, Homo sapien
gtggccagccctgggattattaacc

SEQ ID NO: 5156102 - DNA, 25 bp, Homo sapien
gatctggttagtgaacatcccaaga

SEQ ID NO: 5156103 - DNA, 25 bp, Homo sapien
tcaaccacattagccccactgagtg

SEQ ID NO: 5156104 - DNA, 25 bp, Homo sapien
cagagcaatagtaagcaggttaata

SEQ ID NO: 5156105 - DNA, 25 bp, Homo sapien
gctcttcctttttaatccttcagga

SEQ ID NO: 5156106 - DNA, 25 bp, Homo sapien
ctgctcttcctttttaatccttcag

SEQ ID NO: 5156107 - DNA, 25 bp, Homo sapien
cttcctttttaatccttcaggatct

SEQ ID NO: 5156108 - DNA, 25 bp, Homo sapien
catgggagatggtgccacacaagtg

SEQ ID NO: 5156109 - DNA, 25 bp, Homo sapien
tttcaagatgtaagactgcgaacct

SEQ ID NO: 5156110 - DNA, 25 bp, Homo sapien
aacctctcagaagccggtggtggaa

SEQ ID NO: 5156111 - DNA, 25 bp, Homo sapien
gaatcctggtccatttcacaaactg

SEQ ID NO: 5156112 - DNA, 25 bp, Homo sapien
aaaagaagaatcctggtccatttca

SEQ ID NO: 5156113 - DNA, 25 bp, Homo sapien
tgggctgaacccattagagcctggc

SEQ ID NO: 5156114 - DNA, 25 bp, Homo sapien
aagttccaaagatccataaggcatg

SEQ ID NO: 5156115 - DNA, 25 bp, Homo sapien
ctaagcagttcaagtcgatatggtc

SEQ ID NO: 5156116 - DNA, 25 bp, Homo sapien
tgctcgcacatacgaatataggctt

SEQ ID NO: 5156117 - DNA, 25 bp, Homo sapien
aaacaagtcaatgcgctctaagctc

SEQ ID NO: 5156118 - DNA, 25 bp, Homo sapien
tttgggaagagatgaactttctcct

SEQ ID NO: 5156119 - DNA, 25 bp, Homo sapien
ttctccttcgcaaagagaagctctg

SEQ ID NO: 5156120 - DNA, 25 bp, Homo sapien
tacttcaagatctcattgcatgcac

SEQ ID NO: 5156121 - DNA, 25 bp, Homo sapien
tatattcagtttaatgacatgtcca

SEQ ID NO: 5156122 - DNA, 25 bp, Homo sapien
tccaataataatgtggtagcatttg

SEQ ID NO: 5156123 - DNA, 25 bp, Homo sapien
taatgacatgtccattctcgctttt

SEQ ID NO: 5156124 - DNA, 25 bp, Homo sapien
ttctcgcttttatacaccacatctg

SEQ ID NO: 5156125 - DNA, 25 bp, Homo sapien
ccactaccatggcattctttgtttc

SEQ ID NO: 5156126 - DNA, 25 bp, Homo sapien
cactaccatggcattctttgtttct

SEQ ID NO: 5156127 - DNA, 25 bp, Homo sapien
gcatgatctggccactacttaattc

SEQ ID NO: 5156128 - DNA, 25 bp, Homo sapien
cgcatgatctggccactacttaatt

SEQ ID NO: 5156129 - DNA, 25 bp, Homo sapien
ccgcatgatctggccactacttaat

SEQ ID NO: 5156130 - DNA, 25 bp, Homo sapien
taatgtccctattaagaggccccat

SEQ ID NO: 5156131 - DNA, 25 bp, Homo sapien
gtaatgtccctattaagaggcccca

SEQ ID NO: 5156132 - DNA, 25 bp, Homo sapien
ttgccacggtaatgtccctattaag

SEQ ID NO: 5156133 - DNA, 25 bp, Homo sapien
ccacggtaatgtccctattaagagg

SEQ ID NO: 5156134 - DNA, 25 bp, Homo sapien
gtacaaagggcataaaaatgcatga

SEQ ID NO: 5156135 - DNA, 25 bp, Homo sapien
ccacatgtgttcattgccattactc

SEQ ID NO: 5156136 - DNA, 25 bp, Homo sapien
gcctgtccagttttcgacatccaaa

SEQ ID NO: 5156137 - DNA, 25 bp, Homo sapien
attactcagcaatgatgcctgcctg

SEQ ID NO: 5156138 - DNA, 25 bp, Homo sapien
tggtgaaactgaatgtcttgatgct

SEQ ID NO: 5156139 - DNA, 25 bp, Homo sapien
ctggtgaaactgaatgtcttgatgc

SEQ ID NO: 5156140 - DNA, 25 bp, Homo sapien
tgaaactgaatgtcttgatgctttg

SEQ ID NO: 5156141 - DNA, 25 bp, Homo sapien
ggtgaaactgaatgtcttgatgctt

SEQ ID NO: 5156142 - DNA, 25 bp, Homo sapien
gtaaaattatgcattgtcaccccaa

SEQ ID NO: 5156143 - DNA, 25 bp, Homo sapien
gtcaccccaatgcatcacaaagaaa

SEQ ID NO: 5156144 - DNA, 25 bp, Homo sapien
tactgtcctccggtagttactagac

SEQ ID NO: 5156145 - DNA, 25 bp, Homo sapien
gttactagacatgccagattttgct

SEQ ID NO: 5156146 - DNA, 25 bp, Homo sapien
tgtgcagatatggaagatgtttgga

SEQ ID NO: 5156147 - DNA, 25 bp, Homo sapien
cagatatggaagatgtttggacatt

SEQ ID NO: 5156148 - DNA, 25 bp, Homo sapien
atatggaagatgtttggacattatc

SEQ ID NO: 5156149 - DNA, 25 bp, Homo sapien
tgcagatatggaagatgtttggaca

SEQ ID NO: 5156150 - DNA, 25 bp, Homo sapien
aaactttcacaagcccgcatttgtt

SEQ ID NO: 5156151 - DNA, 25 bp, Homo sapien
ggatttgctaaactctgccacattc

SEQ ID NO: 5156152 - DNA, 25 bp, Homo sapien
ggacttggatcagcacaggcactgg

SEQ ID NO: 5156153 - DNA, 25 bp, Homo sapien
aagagatggacttggatcagcacag

SEQ ID NO: 5156154 - DNA, 25 bp, Homo sapien
tctaggcacagccactaggaaagtc

SEQ ID NO: 5156155 - DNA, 25 bp, Homo sapien
tctctaatctgtacacacatgaaac

SEQ ID NO: 5156156 - DNA, 25 bp, Homo sapien
cacatgaaacactcaagtatatggt

SEQ ID NO: 5156157 - DNA, 25 bp, Homo sapien
gaaacactcaagtatatggtaaggc

SEQ ID NO: 5156158 - DNA, 25 bp, Homo sapien
cccagagccttaactacagcccagt

SEQ ID NO: 5156159 - DNA, 25 bp, Homo sapien
ccagtcttgggaagttcttgctacc

SEQ ID NO: 5156160 - DNA, 25 bp, Homo sapien
gagagagaatccatagccacagctg

SEQ ID NO: 5156161 - DNA, 25 bp, Homo sapien
gcaaaatgatcaacagctttgagaa

SEQ ID NO: 5156162 - DNA, 25 bp, Homo sapien
gcttctatatggtaggctttcatca

SEQ ID NO: 5156163 - DNA, 25 bp, Homo sapien
tcttgcttctatatggtaggctttc

SEQ ID NO: 5156164 - DNA, 25 bp, Homo sapien
caaaatgacagactggtaatctgtt

SEQ ID NO: 5156165 - DNA, 25 bp, Homo sapien
tgttttgaaaggcacttcaaacctc

SEQ ID NO: 5156166 - DNA, 25 bp, Homo sapien
tgtaacagctctctcgagtgcaggg

SEQ ID NO: 5156167 - DNA, 25 bp, Homo sapien
tgctcttttcggatcagaaaatata

SEQ ID NO: 5156168 - DNA, 25 bp, Homo sapien
tttctcatttgattgtaacagctct

SEQ ID NO: 5156169 - DNA, 25 bp, Homo sapien
agtgcaggggcttttgctcttttcg

SEQ ID NO: 5156170 - DNA, 25 bp, Homo sapien
tgggtctggcacagcaggtaaacaa

SEQ ID NO: 5156171 - DNA, 25 bp, Homo sapien
ggcacagcaggtaaacaagccgcca

SEQ ID NO: 5156172 - DNA, 25 bp, Homo sapien
agcaggtaaacaagccgccacggac

SEQ ID NO: 5156173 - DNA, 25 bp, Homo sapien
aaacaagccgccacggacaacactg

SEQ ID NO: 5156174 - DNA, 25 bp, Homo sapien
tgagttcataggtgcagcgaaacac

SEQ ID NO: 5156175 - DNA, 25 bp, Homo sapien
gagcacggactctggaacaaaactg

SEQ ID NO: 5156176 - DNA, 25 bp, Homo sapien
taagttctgcactggatggagccca

SEQ ID NO: 5156177 - DNA, 25 bp, Homo sapien
tacgcatcaaagtaaggtgaccaag

SEQ ID NO: 5156178 - DNA, 25 bp, Homo sapien
aagatgcttgttccttaaattccat

SEQ ID NO: 5156179 - DNA, 25 bp, Homo sapien
tccttatgagaacagtgcaatgaaa

SEQ ID NO: 5156180 - DNA, 25 bp, Homo sapien
caagtcctggaggtctaatgtgcag

SEQ ID NO: 5156181 - DNA, 25 bp, Homo sapien
gcatggctgctagtgaatgtgtgaa

SEQ ID NO: 5156182 - DNA, 25 bp, Homo sapien
gctaatcactgcacattacatatgt

SEQ ID NO: 5156183 - DNA, 25 bp, Homo sapien
gtttaatgtctagggaatgggctga

SEQ ID NO: 5156184 - DNA, 25 bp, Homo sapien
ctgactggtgttgggttgcctagca

SEQ ID NO: 5156185 - DNA, 25 bp, Homo sapien
gatatgcgttttacttccagctgtg

SEQ ID NO: 5156186 - DNA, 25 bp, Homo sapien
caggattcaatgtgcaaatgggatc

SEQ ID NO: 5156187 - DNA, 25 bp, Homo sapien
gatataaatttgattgtaaggtctt

SEQ ID NO: 5156188 - DNA, 25 bp, Homo sapien
aatttatatgactccaaagagcaaa

SEQ ID NO: 5156189 - DNA, 25 bp, Homo sapien
gaaaatatggcgttgaaatggacta

SEQ ID NO: 5156190 - DNA, 25 bp, Homo sapien
ggacacagaagtaacgataaataga

SEQ ID NO: 5156191 - DNA, 25 bp, Homo sapien
taaacatgtcaggtagaacgtcagg

SEQ ID NO: 5156192 - DNA, 25 bp, Homo sapien
ttccgaaggtaacatgccaataagc

SEQ ID NO: 5156193 - DNA, 25 bp, Homo sapien
gaacgtcaggtagaatggcaaatgc

SEQ ID NO: 5156194 - DNA, 25 bp, Homo sapien
ggcaaatgcaccaactttccgaagg

SEQ ID NO: 5156195 - DNA, 25 bp, Homo sapien
ctggcttttaggcacacatctaaag

SEQ ID NO: 5156196 - DNA, 25 bp, Homo sapien
taggcacacatctaaagagaaaaag

SEQ ID NO: 5156197 - DNA, 25 bp, Homo sapien
ggcttttaggcacacatctaaagag

SEQ ID NO: 5156198 - DNA, 25 bp, Homo sapien
gcttttaggcacacatctaaagaga

SEQ ID NO: 5156199 - DNA, 25 bp, Homo sapien
tgttgtaaatcacatatgaagcagt

SEQ ID NO: 5156200 - DNA, 25 bp, Homo sapien
gttgtaaatcacatatgaagcagta

SEQ ID NO: 5156201 - DNA, 25 bp, Homo sapien
aagcagtatacgaataatgaaaaat

SEQ ID NO: 5156202 - DNA, 25 bp, Homo sapien
ttgtaaatcacatatgaagcagtat

SEQ ID NO: 5156203 - DNA, 25 bp, Homo sapien
caggccgcgtactgcaagacggagt

SEQ ID NO: 5156204 - DNA, 25 bp, Homo sapien
aagacggagtcctctacttctggag

SEQ ID NO: 5156205 - DNA, 25 bp, Homo sapien
tgcaagacggagtcctctacttctg

SEQ ID NO: 5156206 - DNA, 25 bp, Homo sapien
gcgtactgcaagacggagtcctcta

SEQ ID NO: 5156207 - DNA, 25 bp, Homo sapien
cttgcctctcttctataataccagg

SEQ ID NO: 5156208 - DNA, 25 bp, Homo sapien
tctataataccaggaatttctttta

SEQ ID NO: 5156209 - DNA, 25 bp, Homo sapien
tcttttacagcaaataagattagaa

SEQ ID NO: 5156210 - DNA, 25 bp, Homo sapien
tcagtaaattatgtcaatcccttgc

SEQ ID NO: 5156211 - DNA, 25 bp, Homo sapien
caagtatatcttgactctctagtaa

SEQ ID NO: 5156212 - DNA, 25 bp, Homo sapien
tgccccacttgatggtattccatag

SEQ ID NO: 5156213 - DNA, 25 bp, Homo sapien
tattccataggtcccttaggttctg

SEQ ID NO: 5156214 - DNA, 25 bp, Homo sapien
tgacaagcgaggagggcctctctca

SEQ ID NO: 5156215 - DNA, 25 bp, Homo sapien
gatcaccgttcattttgcatacatg

SEQ ID NO: 5156216 - DNA, 25 bp, Homo sapien
gtataatgatcaccgttcattttgc

SEQ ID NO: 5156217 - DNA, 25 bp, Homo sapien
cattaagtataatgatcaccgttca

SEQ ID NO: 5156218 - DNA, 25 bp, Homo sapien
ccattaagtataatgatcaccgttc

SEQ ID NO: 5156219 - DNA, 25 bp, Homo sapien
cagaagatgtcagtcgcaatgaact

SEQ ID NO: 5156220 - DNA, 25 bp, Homo sapien
gctctttatatcaggttgatagtag

SEQ ID NO: 5156221 - DNA, 25 bp, Homo sapien
taaccagtcagcaatcccattaaaa

SEQ ID NO: 5156222 - DNA, 25 bp, Homo sapien
cttcatataaccagtcagcaatccc

SEQ ID NO: 5156223 - DNA, 25 bp, Homo sapien
ctctaagttctatgagatttgaaga

SEQ ID NO: 5156224 - DNA, 25 bp, Homo sapien
gaagatacaaagataccccgttggc

SEQ ID NO: 5156225 - DNA, 25 bp, Homo sapien
aagaaacaggttctgtcgtaggtgc

SEQ ID NO: 5156226 - DNA, 25 bp, Homo sapien
ggctaaaatcaatactctagatttc

SEQ ID NO: 5156227 - DNA, 25 bp, Homo sapien
tacaatttggttaaggagacatgag

SEQ ID NO: 5156228 - DNA, 25 bp, Homo sapien
tagcttaaactccttgaattactcc

SEQ ID NO: 5156229 - DNA, 25 bp, Homo sapien
gaattactcccttttgaacgtgcca

SEQ ID NO: 5156230 - DNA, 25 bp, Homo sapien
gacactgatttatgcaactaactta

SEQ ID NO: 5156231 - DNA, 25 bp, Homo sapien
ctccatctggtgaccaccagtgggc

SEQ ID NO: 5156232 - DNA, 25 bp, Homo sapien
aaagagtcatttatcatcaggaagg

SEQ ID NO: 5156233 - DNA, 25 bp, Homo sapien
accaaagagtcatttatcatcagga

SEQ ID NO: 5156234 - DNA, 25 bp, Homo sapien
caccagtgggcgatgtgagaatgca

SEQ ID NO: 5156235 - DNA, 25 bp, Homo sapien
ctccagtaaaccgagggataaccat

SEQ ID NO: 5156236 - DNA, 25 bp, Homo sapien
tgggatacaacgctccagtaaaccg

SEQ ID NO: 5156237 - DNA, 25 bp, Homo sapien
caacgctccagtaaaccgagggata

SEQ ID NO: 5156238 - DNA, 25 bp, Homo sapien
cttaggatacggatactgctttcct

SEQ ID NO: 5156239 - DNA, 25 bp, Homo sapien
aagtgtgagttggtccatacaggtt

SEQ ID NO: 5156240 - DNA, 25 bp, Homo sapien
gttggtccatacaggtttacaacat

SEQ ID NO: 5156241 - DNA, 25 bp, Homo sapien
tggcatgagctccaaagtgtgagtt

SEQ ID NO: 5156242 - DNA, 25 bp, Homo sapien
aagctgtcaggtggcatgagctcca

SEQ ID NO: 5156243 - DNA, 25 bp, Homo sapien
ctttcttataactgggtttcctgct

SEQ ID NO: 5156244 - DNA, 25 bp, Homo sapien
tacccaggaagtcctcgaggatctg

SEQ ID NO: 5156245 - DNA, 25 bp, Homo sapien
tctccatggctctggattacccagg

SEQ ID NO: 5156246 - DNA, 25 bp, Homo sapien
cacattagatctggtgttccacgac

SEQ ID NO: 5156247 - DNA, 25 bp, Homo sapien
caagcacctgtagtggtctcacaga

SEQ ID NO: 5156248 - DNA, 25 bp, Homo sapien
tacccatttaaccatagtgatatag

SEQ ID NO: 5156249 - DNA, 25 bp, Homo sapien
ccacagtcttggtattgcttaccca

SEQ ID NO: 5156250 - DNA, 25 bp, Homo sapien
gatggagatgttctgagctcggttt

SEQ ID NO: 5156251 - DNA, 25 bp, Homo sapien
gagagccacgtatctgatgtcatct

SEQ ID NO: 5156252 - DNA, 25 bp, Homo sapien
gccacgtatctgatgtcatctcata

SEQ ID NO: 5156253 - DNA, 25 bp, Homo sapien
tgctgagagagccacgtatctgatg

SEQ ID NO: 5156254 - DNA, 25 bp, Homo sapien
gagagagccacgtatctgatgtcat

SEQ ID NO: 5156255 - DNA, 25 bp, Homo sapien
tgtcataaagaatttgctgccgtct

SEQ ID NO: 5156256 - DNA, 25 bp, Homo sapien
tgccgtctctagaaaacacgggctc

SEQ ID NO: 5156257 - DNA, 25 bp, Homo sapien
cccttgcttaacaggcactgtcata

SEQ ID NO: 5156258 - DNA, 25 bp, Homo sapien
catagctacgtggtgaaattctcca

SEQ ID NO: 5156259 - DNA, 25 bp, Homo sapien
tacatattaggctggtttgactgag

SEQ ID NO: 5156260 - DNA, 25 bp, Homo sapien
catttgaaagcacagcagggtacct

SEQ ID NO: 5156261 - DNA, 25 bp, Homo sapien
ttcagaaatacaggaatttgcctac

SEQ ID NO: 5156262 - DNA, 25 bp, Homo sapien
cagggtacctacagtcaaggataga

SEQ ID NO: 5156263 - DNA, 25 bp, Homo sapien
tgagtagtttcatcgtatgccaaga

SEQ ID NO: 5156264 - DNA, 25 bp, Homo sapien
tcatcgtatgccaagatctttatca

SEQ ID NO: 5156265 - DNA, 25 bp, Homo sapien
acttcccagtttcctgatgtcagat

SEQ ID NO: 5156266 - DNA, 25 bp, Homo sapien
gatgccgcacggtaatttgctcact

SEQ ID NO: 5156267 - DNA, 25 bp, Homo sapien
ttcctctgggagaagattcagtgct

SEQ ID NO: 5156268 - DNA, 25 bp, Homo sapien
tcctctgggagaagattcagtgctc

SEQ ID NO: 5156269 - DNA, 25 bp, Homo sapien
tacatgaaatgcattggcgattcaa

SEQ ID NO: 5156270 - DNA, 25 bp, Homo sapien
gattcaataatccttcagtagaagc

SEQ ID NO: 5156271 - DNA, 25 bp, Homo sapien
aatatgtacattgttctttcatgaa

SEQ ID NO: 5156272 - DNA, 25 bp, Homo sapien
cattgttctttcatgaaattacatg

SEQ ID NO: 5156273 - DNA, 25 bp, Homo sapien
ttgctgggttgtccgtactatgtag

SEQ ID NO: 5156274 - DNA, 25 bp, Homo sapien
tccgtactatgtaggctgaccactg

SEQ ID NO: 5156275 - DNA, 25 bp, Homo sapien
gttgtccgtactatgtaggctgacc

SEQ ID NO: 5156276 - DNA, 25 bp, Homo sapien
actatgtaggctgaccactgggacc

SEQ ID NO: 5156277 - DNA, 25 bp, Homo sapien
caataactctatttgacttaggtag

SEQ ID NO: 5156278 - DNA, 25 bp, Homo sapien
tatttgacttaggtagtagatatcc

SEQ ID NO: 5156279 - DNA, 25 bp, Homo sapien
gtagatatcctatttcgggcatata

SEQ ID NO: 5156280 - DNA, 25 bp, Homo sapien
gcatataagattcacctcccacctg

SEQ ID NO: 5156281 - DNA, 25 bp, Homo sapien
catagtcgtcaatatgaaggatttt

SEQ ID NO: 5156282 - DNA, 25 bp, Homo sapien
atagtcgtcaatatgaaggatttta

SEQ ID NO: 5156283 - DNA, 25 bp, Homo sapien
tcatttgcaggtaaaactataagac

SEQ ID NO: 5156284 - DNA, 25 bp, Homo sapien
ctataagacgcagagaaagttgttc

SEQ ID NO: 5156285 - DNA, 25 bp, Homo sapien
ggtaaaactataagacgcagagaaa

SEQ ID NO: 5156286 - DNA, 25 bp, Homo sapien
ttcttgaataacatagcatgcacaa

SEQ ID NO: 5156287 - DNA, 25 bp, Homo sapien
attattaacagaagagcatactggt

SEQ ID NO: 5156288 - DNA, 25 bp, Homo sapien
ttaacagaagagcatactggtttcg

SEQ ID NO: 5156289 - DNA, 25 bp, Homo sapien
gagcatactggtttcggtccataaa

SEQ ID NO: 5156290 - DNA, 25 bp, Homo sapien
cagaagagcatactggtttcggtcc

SEQ ID NO: 5156291 - DNA, 25 bp, Homo sapien
tctgggacacattcaaagcagtgtg

SEQ ID NO: 5156292 - DNA, 25 bp, Homo sapien
ggaaagatctaaaattgacacccta

SEQ ID NO: 5156293 - DNA, 25 bp, Homo sapien
ggacacattcaaagcagtgtgtaga

SEQ ID NO: 5156294 - DNA, 25 bp, Homo sapien
accaatgagaacaaagacacaatat

SEQ ID NO: 5156295 - DNA, 25 bp, Homo sapien
gcatcaataattcctgcactctcat

SEQ ID NO: 5156296 - DNA, 25 bp, Homo sapien
tctctatgcaactctgcatcaataa

SEQ ID NO: 5156297 - DNA, 25 bp, Homo sapien
cattcctcttgtagaagctgagcca

SEQ ID NO: 5156298 - DNA, 25 bp, Homo sapien
gagccacccaaatctgactatctct

SEQ ID NO: 5156299 - DNA, 25 bp, Homo sapien
catattggaccaaaacaagagcaac

SEQ ID NO: 5156300 - DNA, 25 bp, Homo sapien
aacatattggaccaaaacaagagca

SEQ ID NO: 5156301 - DNA, 25 bp, Homo sapien
ataccaacatattggaccaaaacaa

SEQ ID NO: 5156302 - DNA, 25 bp, Homo sapien
ccaacatattggaccaaaacaagag

SEQ ID NO: 5156303 - DNA, 25 bp, Homo sapien
caatatggaacttatctgtaaccag

SEQ ID NO: 5156304 - DNA, 25 bp, Homo sapien
caaaattttcagaccctggaatcca

SEQ ID NO: 5156305 - DNA, 25 bp, Homo sapien
tgtcaatgagtacggaatcccagtc

SEQ ID NO: 5156306 - DNA, 25 bp, Homo sapien
taatcttcgatgaatctcctgcaaa

SEQ ID NO: 5156307 - DNA, 25 bp, Homo sapien
tcttttggagtcaatgtaaggcagt

SEQ ID NO: 5156308 - DNA, 25 bp, Homo sapien
tggagtcaatgtaaggcagtttcag

SEQ ID NO: 5156309 - DNA, 25 bp, Homo sapien
ttaatcttttggagtcaatgtaagg

SEQ ID NO: 5156310 - DNA, 25 bp, Homo sapien
tttggagtcaatgtaaggcagtttc

SEQ ID NO: 5156311 - DNA, 25 bp, Homo sapien
gtctgtgataggtgcaaccacggat

SEQ ID NO: 5156312 - DNA, 25 bp, Homo sapien
ggtgcaaccacggatccacatttaa

SEQ ID NO: 5156313 - DNA, 25 bp, Homo sapien
catctgattttaagatcattgatgc

SEQ ID NO: 5156314 - DNA, 25 bp, Homo sapien
ccacggatccacatttaaaaagctt

SEQ ID NO: 5156315 - DNA, 25 bp, Homo sapien
gatggcatcccaaggtatctttcag

SEQ ID NO: 5156316 - DNA, 25 bp, Homo sapien
aagccatgaacattatgtagcacac

SEQ ID NO: 5156317 - DNA, 25 bp, Homo sapien
ttcaagccatgaacattatgtagca

SEQ ID NO: 5156318 - DNA, 25 bp, Homo sapien
caagccatgaacattatgtagcaca

SEQ ID NO: 5156319 - DNA, 25 bp, Homo sapien
ctttcaagccatgaacattatgtag

SEQ ID NO: 5156320 - DNA, 25 bp, Homo sapien
ccagcttttattaggtgcttgatta

SEQ ID NO: 5156321 - DNA, 25 bp, Homo sapien
cagcttttattaggtgcttgattaa

SEQ ID NO: 5156322 - DNA, 25 bp, Homo sapien
catagtataattcactccagctttt

SEQ ID NO: 5156323 - DNA, 25 bp, Homo sapien
ctgcatagtataattcactccagct

SEQ ID NO: 5156324 - DNA, 25 bp, Homo sapien
cttctggttcctgtggtagcacaga

SEQ ID NO: 5156325 - DNA, 25 bp, Homo sapien
tctcagatacgttatgaccttcatc

SEQ ID NO: 5156326 - DNA, 25 bp, Homo sapien
aagaatttgaggattgtgctgtaga

SEQ ID NO: 5156327 - DNA, 25 bp, Homo sapien
gctgtagagatgatacttgctcttc

SEQ ID NO: 5156328 - DNA, 25 bp, Homo sapien
gtgacatctccgtaagctgcccttg

SEQ ID NO: 5156329 - DNA, 25 bp, Homo sapien
tctcatacaaagaaacgggttctgc

SEQ ID NO: 5156330 - DNA, 25 bp, Homo sapien
taaagtgttagattgcagctcagcc

SEQ ID NO: 5156331 - DNA, 25 bp, Homo sapien
ggttctgcacccctagcaacacagt

SEQ ID NO: 5156332 - DNA, 25 bp, Homo sapien
caaacgtttactctttatagcatga

SEQ ID NO: 5156333 - DNA, 25 bp, Homo sapien
tattgtgagacatacactcgtgtgt

SEQ ID NO: 5156334 - DNA, 25 bp, Homo sapien
gataactggctgaactttggaaggt

SEQ ID NO: 5156335 - DNA, 25 bp, Homo sapien
cattaactgtatatgcacacttgtg

SEQ ID NO: 5156336 - DNA, 25 bp, Homo sapien
gcatccagggaaaaagttgaatacc

SEQ ID NO: 5156337 - DNA, 25 bp, Homo sapien
tactgcaagtcaacacagcacagga

SEQ ID NO: 5156338 - DNA, 25 bp, Homo sapien
cagtaacagatgaattgggcaggca

SEQ ID NO: 5156339 - DNA, 25 bp, Homo sapien
gaagacacgattccaaagcatccag

SEQ ID NO: 5156340 - DNA, 25 bp, Homo sapien
cacatcggtttgcagcatgtaagcg

SEQ ID NO: 5156341 - DNA, 25 bp, Homo sapien
gagaggccagattgtatccatacag

SEQ ID NO: 5156342 - DNA, 25 bp, Homo sapien
aaaattagtatcagagaatccccag

SEQ ID NO: 5156343 - DNA, 25 bp, Homo sapien
tcagagaacttgaggagggacacaa

SEQ ID NO: 5156344 - DNA, 25 bp, Homo sapien
tctcactcgattaatcattctagag

SEQ ID NO: 5156345 - DNA, 25 bp, Homo sapien
attgagaatctcactcgattaatca

SEQ ID NO: 5156346 - DNA, 25 bp, Homo sapien
ggttttagttgcagatttattgaga

SEQ ID NO: 5156347 - DNA, 25 bp, Homo sapien
tcgattaatcattctagaggttttc

SEQ ID NO: 5156348 - DNA, 25 bp, Homo sapien
tggatcatttgacacgagagcagct

SEQ ID NO: 5156349 - DNA, 25 bp, Homo sapien
tcatttccgttgagtgatggatcat

SEQ ID NO: 5156350 - DNA, 25 bp, Homo sapien
tgatggatcatttgacacgagagca

SEQ ID NO: 5156351 - DNA, 25 bp, Homo sapien
tatggagtgatgagttcatttccgt

SEQ ID NO: 5156352 - DNA, 25 bp, Homo sapien
gaagatgagaagagtcgttcagcta

SEQ ID NO: 5156353 - DNA, 25 bp, Homo sapien
gaagagtcgttcagctactaaagca

SEQ ID NO: 5156354 - DNA, 25 bp, Homo sapien
gatgagaagagtcgttcagctacta

SEQ ID NO: 5156355 - DNA, 25 bp, Homo sapien
gtcgttcagctactaaagcagccat

SEQ ID NO: 5156356 - DNA, 25 bp, Homo sapien
aagaaaaacacgtcttccctgagct

SEQ ID NO: 5156357 - DNA, 25 bp, Homo sapien
ttaattgctggtgccaaacacaacc

SEQ ID NO: 5156358 - DNA, 25 bp, Homo sapien
cctgagctagagcatttaattgctg

SEQ ID NO: 5156359 - DNA, 25 bp, Homo sapien
tcatctcgattagtgtcccgcaaca

SEQ ID NO: 5156360 - DNA, 25 bp, Homo sapien
tgagtgaggtgtatgactagttatg

SEQ ID NO: 5156361 - DNA, 25 bp, Homo sapien
gaggtgtatgactagttatggccat

SEQ ID NO: 5156362 - DNA, 25 bp, Homo sapien
ccccttgtggttgagtgaggtgtat

SEQ ID NO: 5156363 - DNA, 25 bp, Homo sapien
accccttgtggttgagtgaggtgta

SEQ ID NO: 5156364 - DNA, 25 bp, Homo sapien
tctgaagtaggcactggagaataag

SEQ ID NO: 5156365 - DNA, 25 bp, Homo sapien
ctaatgcttcatcttaatgttttca

SEQ ID NO: 5156366 - DNA, 25 bp, Homo sapien
tggtgacctctgaagtaggcactgg

SEQ ID NO: 5156367 - DNA, 25 bp, Homo sapien
gaagtaggcactggagaataagtct

SEQ ID NO: 5156368 - DNA, 25 bp, Homo sapien
tcacttgctaagtcctctttgtcaa

SEQ ID NO: 5156369 - DNA, 25 bp, Homo sapien
ctgtatatcacttgctaagtcctct

SEQ ID NO: 5156370 - DNA, 25 bp, Homo sapien
tgctaagtcctctttgtcaacactt

SEQ ID NO: 5156371 - DNA, 25 bp, Homo sapien
tatatcacttgctaagtcctctttg

SEQ ID NO: 5156372 - DNA, 25 bp, Homo sapien
atccaatatttatttgagcctgctg

SEQ ID NO: 5156373 - DNA, 25 bp, Homo sapien
tggaacctggcaaggtccctttgaa

SEQ ID NO: 5156374 - DNA, 25 bp, Homo sapien
gagcaggttgctggaacctggcaag

SEQ ID NO: 5156375 - DNA, 25 bp, Homo sapien
aggttgctggaacctggcaaggtcc

SEQ ID NO: 5156376 - DNA, 25 bp, Homo sapien
tactgtcttctttcttcgtgctcat

SEQ ID NO: 5156377 - DNA, 25 bp, Homo sapien
cttatactgtcttctttcttcgtgc

SEQ ID NO: 5156378 - DNA, 25 bp, Homo sapien
atactgtcttctttcttcgtgctca

SEQ ID NO: 5156379 - DNA, 25 bp, Homo sapien
tatactgtcttctttcttcgtgctc

SEQ ID NO: 5156380 - DNA, 25 bp, Homo sapien
tcaatctttcctggtaggtaaagcc

SEQ ID NO: 5156381 - DNA, 25 bp, Homo sapien
atttatattcaaggcggacccatcc

SEQ ID NO: 5156382 - DNA, 25 bp, Homo sapien
gagatataaatgctaccaacattta

SEQ ID NO: 5156383 - DNA, 25 bp, Homo sapien
gcctgctgccattattgcttgactg

SEQ ID NO: 5156384 - DNA, 25 bp, Homo sapien
tgcttccagttgagcatagaagaaa

SEQ ID NO: 5156385 - DNA, 25 bp, Homo sapien
ttctgcttccagttgagcatagaag

SEQ ID NO: 5156386 - DNA, 25 bp, Homo sapien
tctgcttccagttgagcatagaaga

SEQ ID NO: 5156387 - DNA, 25 bp, Homo sapien
gcttctgcttccagttgagcataga

SEQ ID NO: 5156388 - DNA, 25 bp, Homo sapien
ccaggtaacaaggcgaactccaaca

SEQ ID NO: 5156389 - DNA, 25 bp, Homo sapien
taacaaggcgaactccaacagtgcc

SEQ ID NO: 5156390 - DNA, 25 bp, Homo sapien
ggcgaactccaacagtgccttctgc

SEQ ID NO: 5156391 - DNA, 25 bp, Homo sapien
aaggcgaactccaacagtgccttct

SEQ ID NO: 5156392 - DNA, 25 bp, Homo sapien
cctccctggaagtcgcttcaggaca

SEQ ID NO: 5156393 - DNA, 25 bp, Homo sapien
agagcctccctggaagtcgcttcag

SEQ ID NO: 5156394 - DNA, 25 bp, Homo sapien
cagagcctccctggaagtcgcttca

SEQ ID NO: 5156395 - DNA, 25 bp, Homo sapien
agcctccctggaagtcgcttcagga

SEQ ID NO: 5156396 - DNA, 25 bp, Homo sapien
aggaagctgccagttgactacactc

SEQ ID NO: 5156397 - DNA, 25 bp, Homo sapien
ccatattcatttggggaatagctac

SEQ ID NO: 5156398 - DNA, 25 bp, Homo sapien
tgccagttgactacactcttcatag

SEQ ID NO: 5156399 - DNA, 25 bp, Homo sapien
gaaaagcaggtccttacttgaagga

SEQ ID NO: 5156400 - DNA, 25 bp, Homo sapien
cattgactaagaccaccagcaggag

SEQ ID NO: 5156401 - DNA, 25 bp, Homo sapien
tcattgactaagaccaccagcagga

SEQ ID NO: 5156402 - DNA, 25 bp, Homo sapien
tgggctcttatagtccactccaggt

SEQ ID NO: 5156403 - DNA, 25 bp, Homo sapien
tgtcctcattaaaagtgggagctgg

SEQ ID NO: 5156404 - DNA, 25 bp, Homo sapien
tcctcattaaaagtgggagctgggc

SEQ ID NO: 5156405 - DNA, 25 bp, Homo sapien
tagtccactccaggtttcagcctgt

SEQ ID NO: 5156406 - DNA, 25 bp, Homo sapien
cgagtgttctccctcgccgtggtgt

SEQ ID NO: 5156407 - DNA, 25 bp, Homo sapien
agtgttctccctcgccgtggtgtgc

SEQ ID NO: 5156408 - DNA, 25 bp, Homo sapien
tcgccgtggtgtgcggtgagcagcc

SEQ ID NO: 5156409 - DNA, 25 bp, Homo sapien
tctccctcgccgtggtgtgcggtga

SEQ ID NO: 5156410 - DNA, 25 bp, Homo sapien
agtctgtcctgattggacacagaca

SEQ ID NO: 5156411 - DNA, 25 bp, Homo sapien
aaagtctgtcctgattggacacaga

SEQ ID NO: 5156412 - DNA, 25 bp, Homo sapien
gaaagtctgtcctgattggacacag

SEQ ID NO: 5156413 - DNA, 25 bp, Homo sapien
agaaagtctgtcctgattggacaca

SEQ ID NO: 5156414 - DNA, 25 bp, Homo sapien
ttatcctttgtccactgatttcctg

SEQ ID NO: 5156415 - DNA, 25 bp, Homo sapien
gatcaacagatttcatatttggccc

SEQ ID NO: 5156416 - DNA, 25 bp, Homo sapien
gacttcttgattgccacaacctcca

SEQ ID NO: 5156417 - DNA, 25 bp, Homo sapien
gatactgcaacccaggtatattctg

SEQ ID NO: 5156418 - DNA, 25 bp, Homo sapien
tatttggccctacactcagtctctt

SEQ ID NO: 5156419 - DNA, 25 bp, Homo sapien
gataattccttgcagaatttttggc

SEQ ID NO: 5156420 - DNA, 25 bp, Homo sapien
gaatttttggcaagctctttggaag

SEQ ID NO: 5156421 - DNA, 25 bp, Homo sapien
atttttggcaagctctttggaagac

SEQ ID NO: 5156422 - DNA, 25 bp, Homo sapien
tgggataattccttgcagaattttt

SEQ ID NO: 5156423 - DNA, 25 bp, Homo sapien
caagggaacagagcccttctggggt

SEQ ID NO: 5156424 - DNA, 25 bp, Homo sapien
agcccttctggggtcgtctgcagca

SEQ ID NO: 5156425 - DNA, 25 bp, Homo sapien
gcagcattttctaccttcttggtca

SEQ ID NO: 5156426 - DNA, 25 bp, Homo sapien
gcagcagcattttctaccttcttgg

SEQ ID NO: 5156427 - DNA, 25 bp, Homo sapien
caagtccccattcttttgctagttc

SEQ ID NO: 5156428 - DNA, 25 bp, Homo sapien
cttcaagtccccattcttttgctag

SEQ ID NO: 5156429 - DNA, 25 bp, Homo sapien
gtccccattcttttgctagttccac

SEQ ID NO: 5156430 - DNA, 25 bp, Homo sapien
ttcacttcaagtccccattcttttg

SEQ ID NO: 5156431 - DNA, 25 bp, Homo sapien
aattgtaagggccatgctcatgcac

SEQ ID NO: 5156432 - DNA, 25 bp, Homo sapien
caacactggggatccaggaaatgcc

SEQ ID NO: 5156433 - DNA, 25 bp, Homo sapien
cagggacacatgtctctctggtctg

SEQ ID NO: 5156434 - DNA, 25 bp, Homo sapien
ctctggtctggccatggagtgggcc

SEQ ID NO: 5156435 - DNA, 25 bp, Homo sapien
tagacccttgtggagagttagaaaa

SEQ ID NO: 5156436 - DNA, 25 bp, Homo sapien
caacatcatagacccttgtggagag

SEQ ID NO: 5156437 - DNA, 25 bp, Homo sapien
tgttcttcgctctcaacatcataga

SEQ ID NO: 5156438 - DNA, 25 bp, Homo sapien
gctctcaacatcatagacccttgtg

SEQ ID NO: 5156439 - DNA, 25 bp, Homo sapien
tcctatgtaggaacgctcactgaat

SEQ ID NO: 5156440 - DNA, 25 bp, Homo sapien
tgtttcaccattgcaagagacgagc

SEQ ID NO: 5156441 - DNA, 25 bp, Homo sapien
tatgtgcctttgcttaagctctgcc

SEQ ID NO: 5156442 - DNA, 25 bp, Homo sapien
tttgagttgttccagtaagcgacac

SEQ ID NO: 5156443 - DNA, 25 bp, Homo sapien
gaataagagtgatatccaagaacaa

SEQ ID NO: 5156444 - DNA, 25 bp, Homo sapien
taggtagaaatgactgcccattgac

SEQ ID NO: 5156445 - DNA, 25 bp, Homo sapien
gactgattgggccttttgcatccat

SEQ ID NO: 5156446 - DNA, 25 bp, Homo sapien
taagtgacctctatctaggtagaaa

SEQ ID NO: 5156447 - DNA, 25 bp, Homo sapien
tctctattaacctggagagtctttc

SEQ ID NO: 5156448 - DNA, 25 bp, Homo sapien
ctctccttatctctattaacctgga

SEQ ID NO: 5156449 - DNA, 25 bp, Homo sapien
tccttatctctattaacctggagag

SEQ ID NO: 5156450 - DNA, 25 bp, Homo sapien
cttatctctattaacctggagagtc

SEQ ID NO: 5156451 - DNA, 25 bp, Homo sapien
tctatagtgctattaggtgcagctc

SEQ ID NO: 5156452 - DNA, 25 bp, Homo sapien
cttctctatagtgctattaggtgca

SEQ ID NO: 5156453 - DNA, 25 bp, Homo sapien
tatagtgctattaggtgcagctcca

SEQ ID NO: 5156454 - DNA, 25 bp, Homo sapien
agtgctattaggtgcagctccagga

SEQ ID NO: 5156455 - DNA, 25 bp, Homo sapien
ttttgcacagcacaatctttctgat

SEQ ID NO: 5156456 - DNA, 25 bp, Homo sapien
cagcacaatctttctgatacgccat

SEQ ID NO: 5156457 - DNA, 25 bp, Homo sapien
gccatacaagggcaatgaaattgtt

SEQ ID NO: 5156458 - DNA, 25 bp, Homo sapien
ttgttgttatcaaatggaagaatat

SEQ ID NO: 5156459 - DNA, 25 bp, Homo sapien
gatctaaatgatcccagtacatccc

SEQ ID NO: 5156460 - DNA, 25 bp, Homo sapien
ccagtacatccccatgacttcccca

SEQ ID NO: 5156461 - DNA, 25 bp, Homo sapien
aaaatcaggaagatctaaatgatcc

SEQ ID NO: 5156462 - DNA, 25 bp, Homo sapien
ggaagatctaaatgatcccagtaca

SEQ ID NO: 5156463 - DNA, 25 bp, Homo sapien
tagccataggggcaatcagaggact

SEQ ID NO: 5156464 - DNA, 25 bp, Homo sapien
cataggggcaatcagaggactgtgc

SEQ ID NO: 5156465 - DNA, 25 bp, Homo sapien
actgtagccataggggcaatcagag

SEQ ID NO: 5156466 - DNA, 25 bp, Homo sapien
aaaactgtagccataggggcaatca

SEQ ID NO: 5156467 - DNA, 25 bp, Homo sapien
actttcaactctcctatggcagtta

SEQ ID NO: 5156468 - DNA, 25 bp, Homo sapien
ctataactcccagattcgaacctac

SEQ ID NO: 5156469 - DNA, 25 bp, Homo sapien
tcaactctcctatggcagttaccat

SEQ ID NO: 5156470 - DNA, 25 bp, Homo sapien
gattcgaacctactttcaactctcc

SEQ ID NO: 5156471 - DNA, 25 bp, Homo sapien
gtttctcccactacctcactaagga

SEQ ID NO: 5156472 - DNA, 25 bp, Homo sapien
catgatgcaccaattgtttctccca

SEQ ID NO: 5156473 - DNA, 25 bp, Homo sapien
ttacatgatgcaccaattgtttctc

SEQ ID NO: 5156474 - DNA, 25 bp, Homo sapien
gatgcaccaattgtttctcccacta

SEQ ID NO: 5156475 - DNA, 25 bp, Homo sapien
tcattgattaacatataaggagatg

SEQ ID NO: 5156476 - DNA, 25 bp, Homo sapien
tgattaacatataaggagatgtaac

SEQ ID NO: 5156477 - DNA, 25 bp, Homo sapien
ttaacatataaggagatgtaacttg

SEQ ID NO: 5156478 - DNA, 25 bp, Homo sapien
aacatataaggagatgtaacttgca

SEQ ID NO: 5156479 - DNA, 25 bp, Homo sapien
tgactttcttccatcaggggagctt

SEQ ID NO: 5156480 - DNA, 25 bp, Homo sapien
gactttcttccatcaggggagcttg

SEQ ID NO: 5156481 - DNA, 25 bp, Homo sapien
ctttcttccatcaggggagcttgtc

SEQ ID NO: 5156482 - DNA, 25 bp, Homo sapien
actttcttccatcaggggagcttgt

SEQ ID NO: 5156483 - DNA, 25 bp, Homo sapien
ttgggtactcaaatgtgcagataca

SEQ ID NO: 5156484 - DNA, 25 bp, Homo sapien
tcagatgaggcatacttgatactcc

SEQ ID NO: 5156485 - DNA, 25 bp, Homo sapien
tacttgatactccacactttgggga

SEQ ID NO: 5156486 - DNA, 25 bp, Homo sapien
actccacactttggggagtctttgg

SEQ ID NO: 5156487 - DNA, 25 bp, Homo sapien
gaaaatgaacagtcagtaattcagt

SEQ ID NO: 5156488 - DNA, 25 bp, Homo sapien
tattggtgattagtgcataaaagct

SEQ ID NO: 5156489 - DNA, 25 bp, Homo sapien
gaattagttgggttcttattggtga

SEQ ID NO: 5156490 - DNA, 25 bp, Homo sapien
ggtgattagtgcataaaagctcttc

SEQ ID NO: 5156491 - DNA, 25 bp, Homo sapien
agcttgatcttcctcaggatggtga

SEQ ID NO: 5156492 - DNA, 25 bp, Homo sapien
gaaggagttccctgagtaaattgcc

SEQ ID NO: 5156493 - DNA, 25 bp, Homo sapien
gagttccctgagtaaattgccagtg

SEQ ID NO: 5156494 - DNA, 25 bp, Homo sapien
gttccctgagtaaattgccagtgct

SEQ ID NO: 5156495 - DNA, 25 bp, Homo sapien
tcatgagtgcacacaacatatgttc

SEQ ID NO: 5156496 - DNA, 25 bp, Homo sapien
cacaacatatgttcgcttggcattc

SEQ ID NO: 5156497 - DNA, 25 bp, Homo sapien
tgcacacaacatatgttcgcttggc

SEQ ID NO: 5156498 - DNA, 25 bp, Homo sapien
catatgttcgcttggcattcttttt

SEQ ID NO: 5156499 - DNA, 25 bp, Homo sapien
tctcgtagacccacattgaatttcc

SEQ ID NO: 5156500 - DNA, 25 bp, Homo sapien
atcattttctcgtagacccacattg

SEQ ID NO: 5156501 - DNA, 25 bp, Homo sapien
tagacccacattgaatttcccatct

SEQ ID NO: 5156502 - DNA, 25 bp, Homo sapien
cattttctcgtagacccacattgaa

SEQ ID NO: 5156503 - DNA, 25 bp, Homo sapien
ggcgcacttccatctgttgctgttg

SEQ ID NO: 5156504 - DNA, 25 bp, Homo sapien
aggcgcacttccatctgttgctgtt

SEQ ID NO: 5156505 - DNA, 25 bp, Homo sapien
caggcgcacttccatctgttgctgt

SEQ ID NO: 5156506 - DNA, 25 bp, Homo sapien
ccaggcgcacttccatctgttgctg

SEQ ID NO: 5156507 - DNA, 25 bp, Homo sapien
ccttggtgaacatatgctcattagt

SEQ ID NO: 5156508 - DNA, 25 bp, Homo sapien
gccttggtgaacatatgctcattag

SEQ ID NO: 5156509 - DNA, 25 bp, Homo sapien
agccttggtgaacatatgctcatta

SEQ ID NO: 5156510 - DNA, 25 bp, Homo sapien
gagccttggtgaacatatgctcatt

SEQ ID NO: 5156511 - DNA, 25 bp, Homo sapien
tgggcgagtgtgatatgttgtccat

SEQ ID NO: 5156512 - DNA, 25 bp, Homo sapien
ccagtgcctgtgtgatgggcgagtg

SEQ ID NO: 5156513 - DNA, 25 bp, Homo sapien
tgcctgtgtgatgggcgagtgtgat

SEQ ID NO: 5156514 - DNA, 25 bp, Homo sapien
tgtgtgatgggcgagtgtgatatgt

SEQ ID NO: 5156515 - DNA, 25 bp, Homo sapien
ttgagatttcagtacagccagtgtg

SEQ ID NO: 5156516 - DNA, 25 bp, Homo sapien
gagtctctcacttgtttctgcacct

SEQ ID NO: 5156517 - DNA, 25 bp, Homo sapien
gctcattagacttcctcatcatttg

SEQ ID NO: 5156518 - DNA, 25 bp, Homo sapien
caactaggaagatatttgcttcctc

SEQ ID NO: 5156519 - DNA, 25 bp, Homo sapien
cacagcatctcacgttgatgcaggg

SEQ ID NO: 5156520 - DNA, 25 bp, Homo sapien
gctgcaaaacgctcagagtctgaat

SEQ ID NO: 5156521 - DNA, 25 bp, Homo sapien
tggaagccagagtgatgcctagtct

SEQ ID NO: 5156522 - DNA, 25 bp, Homo sapien
tagtctgaacagatttggagaaaca

SEQ ID NO: 5156523 - DNA, 25 bp, Homo sapien
cagacagaaacgctgggaaagtgca

SEQ ID NO: 5156524 - DNA, 25 bp, Homo sapien
gcagacagaaacgctgggaaagtgc

SEQ ID NO: 5156525 - DNA, 25 bp, Homo sapien
caaagatttctagggcttcgtgttt

SEQ ID NO: 5156526 - DNA, 25 bp, Homo sapien
agatttctagggcttcgtgtttttg

SEQ ID NO: 5156527 - DNA, 25 bp, Homo sapien
tcaaagatttctagggcttcgtgtt

SEQ ID NO: 5156528 - DNA, 25 bp, Homo sapien
tccctgcttctaatctcaatcttca

SEQ ID NO: 5156529 - DNA, 25 bp, Homo sapien
cccatcctattagggagcagctcct

SEQ ID NO: 5156530 - DNA, 25 bp, Homo sapien
agaggctatatagcccatcctatta

SEQ ID NO: 5156531 - DNA, 25 bp, Homo sapien
tttctccctgcttctaatctcaatc

SEQ ID NO: 5156532 - DNA, 25 bp, Homo sapien
tgatggaagttgggccctctgtgta

SEQ ID NO: 5156533 - DNA, 25 bp, Homo sapien
tctgtgtacccgcacctttctttac

SEQ ID NO: 5156534 - DNA, 25 bp, Homo sapien
ctacctttctcatggcagggtcctg

SEQ ID NO: 5156535 - DNA, 25 bp, Homo sapien
tctttactttcataggcagttgggc

SEQ ID NO: 5156536 - DNA, 25 bp, Homo sapien
ataaaatcccctatgccaaaagcac

SEQ ID NO: 5156537 - DNA, 25 bp, Homo sapien
taaaatcccctatgccaaaagcaca

SEQ ID NO: 5156538 - DNA, 25 bp, Homo sapien
ccggagagagttgctcacaggactt

SEQ ID NO: 5156539 - DNA, 25 bp, Homo sapien
ccagggagttggcccggagagagtt

SEQ ID NO: 5156540 - DNA, 25 bp, Homo sapien
tcctccagggagttggcccggagag

SEQ ID NO: 5156541 - DNA, 25 bp, Homo sapien
cccggagagagttgctcacaggact

SEQ ID NO: 5156542 - DNA, 25 bp, Homo sapien
tgtgaaagttagaggcaggtaggcc

SEQ ID NO: 5156543 - DNA, 25 bp, Homo sapien
ctgtgaaagttagaggcaggtaggc

SEQ ID NO: 5156544 - DNA, 25 bp, Homo sapien
ttctgtgaaagttagaggcaggtag

SEQ ID NO: 5156545 - DNA, 25 bp, Homo sapien
tctgtgaaagttagaggcaggtagg

SEQ ID NO: 5156546 - DNA, 25 bp, Homo sapien
ctagtttcattcctgtcccaaccat

SEQ ID NO: 5156547 - DNA, 25 bp, Homo sapien
tgtcttcattatgaccatgattctc

SEQ ID NO: 5156548 - DNA, 25 bp, Homo sapien
tctcttccactaatgctagcagaag

SEQ ID NO: 5156549 - DNA, 25 bp, Homo sapien
gttgtcttcattatgaccatgattc

SEQ ID NO: 5156550 - DNA, 25 bp, Homo sapien
gcagaaggcctttacatctgttcgc

SEQ ID NO: 5156551 - DNA, 25 bp, Homo sapien
ctaaacctccagatcatagtctcca

SEQ ID NO: 5156552 - DNA, 25 bp, Homo sapien
acctccagatcatagtctccatggg

SEQ ID NO: 5156553 - DNA, 25 bp, Homo sapien
tccagatcatagtctccatgggatt

SEQ ID NO: 5156554 - DNA, 25 bp, Homo sapien
gatcatagtctccatgggattcctg

SEQ ID NO: 5156555 - DNA, 25 bp, Homo sapien
cagtttaaggtacctgtctcctcca

SEQ ID NO: 5156556 - DNA, 25 bp, Homo sapien
cagtcactgtcctcataaaccctgg

SEQ ID NO: 5156557 - DNA, 25 bp, Homo sapien
cttctcttggcacagtcactgtcct

SEQ ID NO: 5156558 - DNA, 25 bp, Homo sapien
cctccatagtgtttaagatagggca

SEQ ID NO: 5156559 - DNA, 25 bp, Homo sapien
tcagagacccttagggcaccttaag

SEQ ID NO: 5156560 - DNA, 25 bp, Homo sapien
tctgcatagtagttcgctttaaggt

SEQ ID NO: 5156561 - DNA, 25 bp, Homo sapien
ctagagatgcagcatactgagctcc

SEQ ID NO: 5156562 - DNA, 25 bp, Homo sapien
taggtaatacaatggctagagatgc

SEQ ID NO: 5156563 - DNA, 25 bp, Homo sapien
ctttaacatagcagtgtttcctttc

SEQ ID NO: 5156564 - DNA, 25 bp, Homo sapien
ctgttgattgttccacttttccttc

SEQ ID NO: 5156565 - DNA, 25 bp, Homo sapien
tcctttccatcactgttgattgttc

SEQ ID NO: 5156566 - DNA, 25 bp, Homo sapien
ttaacatagcagtgtttcctttcca

SEQ ID NO: 5156567 - DNA, 25 bp, Homo sapien
tatagagacaggtaaaatcacattt

SEQ ID NO: 5156568 - DNA, 25 bp, Homo sapien
cagaactatagagacaggtaaaatc

SEQ ID NO: 5156569 - DNA, 25 bp, Homo sapien
gaactatagagacaggtaaaatcac

SEQ ID NO: 5156570 - DNA, 25 bp, Homo sapien
ctatagagacaggtaaaatcacatt

SEQ ID NO: 5156571 - DNA, 25 bp, Homo sapien
tcagccatgatctccattccaatca

SEQ ID NO: 5156572 - DNA, 25 bp, Homo sapien
tcatgactgtctctattaatatagc

SEQ ID NO: 5156573 - DNA, 25 bp, Homo sapien
tcatgttaggtgtccagtcagcttc

SEQ ID NO: 5156574 - DNA, 25 bp, Homo sapien
tcatcattggcagtatctgtcatct

SEQ ID NO: 5156575 - DNA, 25 bp, Homo sapien
gacaaataatctgtatcgacaatct

SEQ ID NO: 5156576 - DNA, 25 bp, Homo sapien
ggtggtattagttgccaaatgataa

SEQ ID NO: 5156577 - DNA, 25 bp, Homo sapien
taatctgtatcgacaatctgaacac

SEQ ID NO: 5156578 - DNA, 25 bp, Homo sapien
tagttgccaaatgataaccttgaac

SEQ ID NO: 5156579 - DNA, 25 bp, Homo sapien
atatccatttctgcatacatgctcc

SEQ ID NO: 5156580 - DNA, 25 bp, Homo sapien
gacccaggcaggccctacaaggcct

SEQ ID NO: 5156581 - DNA, 25 bp, Homo sapien
aggcaggccctacaaggcctacaag

SEQ ID NO: 5156582 - DNA, 25 bp, Homo sapien
gctttgatatccttgatatccattt

SEQ ID NO: 5156583 - DNA, 25 bp, Homo sapien
tgaagtctcgatatatgaggccacg

SEQ ID NO: 5156584 - DNA, 25 bp, Homo sapien
gaatttggacactggttgaatctcc

SEQ ID NO: 5156585 - DNA, 25 bp, Homo sapien
tatgaggccacgtcgcaatttttcc

SEQ ID NO: 5156586 - DNA, 25 bp, Homo sapien
agcttctactatgtgaatttggaca

SEQ ID NO: 5156587 - DNA, 25 bp, Homo sapien
taacaatatgacagtagtacctcct

SEQ ID NO: 5156588 - DNA, 25 bp, Homo sapien
ccttagctctcaacaataacactga

SEQ ID NO: 5156589 - DNA, 25 bp, Homo sapien
cctatcatagatacaccaaaaataa

SEQ ID NO: 5156590 - DNA, 25 bp, Homo sapien
gcaaaaccctatcatagatacacca

SEQ ID NO: 5156591 - DNA, 25 bp, Homo sapien
tgcagcatggacactggactctgta

SEQ ID NO: 5156592 - DNA, 25 bp, Homo sapien
catggacactggactctgtactcat

SEQ ID NO: 5156593 - DNA, 25 bp, Homo sapien
agcatggacactggactctgtactc

SEQ ID NO: 5156594 - DNA, 25 bp, Homo sapien
ccctgcagcatggacactggactct

SEQ ID NO: 5156595 - DNA, 25 bp, Homo sapien
tcttcccagccctactctatctgtg

SEQ ID NO: 5156596 - DNA, 25 bp, Homo sapien
actctatctgtggtccccggtgcca

SEQ ID NO: 5156597 - DNA, 25 bp, Homo sapien
gagtatccatagcatacagctcatc

SEQ ID NO: 5156598 - DNA, 25 bp, Homo sapien
cccagagaactgacaatatcacaca

SEQ ID NO: 5156599 - DNA, 25 bp, Homo sapien
cctctgtgaggtagcagaatggcag

SEQ ID NO: 5156600 - DNA, 25 bp, Homo sapien
ccagctattgcagtattgcaagcag

SEQ ID NO: 5156601 - DNA, 25 bp, Homo sapien
cagtccattccacaaatggtggaag

SEQ ID NO: 5156602 - DNA, 25 bp, Homo sapien
ctattgcagtattgcaagcagaggc

SEQ ID NO: 5156603 - DNA, 25 bp, Homo sapien
tttggagactgggatgccgctctaa

SEQ ID NO: 5156604 - DNA, 25 bp, Homo sapien
ttggagactgggatgccgctctaat

SEQ ID NO: 5156605 - DNA, 25 bp, Homo sapien
actttggagactgggatgccgctct

SEQ ID NO: 5156606 - DNA, 25 bp, Homo sapien
tggagactgggatgccgctctaatc

SEQ ID NO: 5156607 - DNA, 25 bp, Homo sapien
ctctctgggtgcaaacatattcaga

SEQ ID NO: 5156608 - DNA, 25 bp, Homo sapien
tctctgggtgcaaacatattcagaa

SEQ ID NO: 5156609 - DNA, 25 bp, Homo sapien
cctctatagcagctactgctgatct

SEQ ID NO: 5156610 - DNA, 25 bp, Homo sapien
cctttctcctctatagcagctactg

SEQ ID NO: 5156611 - DNA, 25 bp, Homo sapien
tgttattgcctccagtgtccgcatt

SEQ ID NO: 5156612 - DNA, 25 bp, Homo sapien
tattgcctccagtgtccgcattctt

SEQ ID NO: 5156613 - DNA, 25 bp, Homo sapien
tagctgttgacttgggcattctgaa

SEQ ID NO: 5156614 - DNA, 25 bp, Homo sapien
cagttggtgagaatgtttcaggcac

SEQ ID NO: 5156615 - DNA, 25 bp, Homo sapien
cagaaatctctggtactcacagtct

SEQ ID NO: 5156616 - DNA, 25 bp, Homo sapien
cagattcctgaaaagcagtagctgt

SEQ ID NO: 5156617 - DNA, 25 bp, Homo sapien
tttcatccttcagaacggtatcctg

SEQ ID NO: 5156618 - DNA, 25 bp, Homo sapien
gaattttgtatgaccaattactttc

SEQ ID NO: 5156619 - DNA, 25 bp, Homo sapien
ttcagaacggtatcctgaattttgt

SEQ ID NO: 5156620 - DNA, 25 bp, Homo sapien
tccttcagaacggtatcctgaattt

SEQ ID NO: 5156621 - DNA, 25 bp, Homo sapien
ttggtgcttccatcctaacgggtac

SEQ ID NO: 5156622 - DNA, 25 bp, Homo sapien
tactttcagggcaagtagactaacg

SEQ ID NO: 5156623 - DNA, 25 bp, Homo sapien
agagtagacccatgcttcttggtgc

SEQ ID NO: 5156624 - DNA, 25 bp, Homo sapien
taacagtgccataagcaggtcctct

SEQ ID NO: 5156625 - DNA, 25 bp, Homo sapien
taaccatgtggacaagggatgtccg

SEQ ID NO: 5156626 - DNA, 25 bp, Homo sapien
gggatgtccggactaaaatttgcca

SEQ ID NO: 5156627 - DNA, 25 bp, Homo sapien
tagggtggcagtcactagtccattg

SEQ ID NO: 5156628 - DNA, 25 bp, Homo sapien
ctaagaggttggttgattaagagac

SEQ ID NO: 5156629 - DNA, 25 bp, Homo sapien
ctttgaataattaacatccattaac

SEQ ID NO: 5156630 - DNA, 25 bp, Homo sapien
tggtgtggacccaactagacatttt

SEQ ID NO: 5156631 - DNA, 25 bp, Homo sapien
tgttcatcgggtggtgtggacccaa

SEQ ID NO: 5156632 - DNA, 25 bp, Homo sapien
gctttgaataattaacatccattaa

SEQ ID NO: 5156633 - DNA, 25 bp, Homo sapien
atagccttttaagggtttgctgaag

SEQ ID NO: 5156634 - DNA, 25 bp, Homo sapien
ctggacatacaaaatatagcccatt

SEQ ID NO: 5156635 - DNA, 25 bp, Homo sapien
acttgtgcttactctatagcctttt

SEQ ID NO: 5156636 - DNA, 25 bp, Homo sapien
ccttgagtccttagatttcataaga

SEQ ID NO: 5156637 - DNA, 25 bp, Homo sapien
tgatcaggtcatgctgaaatattct

SEQ ID NO: 5156638 - DNA, 25 bp, Homo sapien
tgctgaaatattctgggtataagcc

SEQ ID NO: 5156639 - DNA, 25 bp, Homo sapien
ctgaaatattctgggtataagccgg

SEQ ID NO: 5156640 - DNA, 25 bp, Homo sapien
gctgaaatattctgggtataagccg

SEQ ID NO: 5156641 - DNA, 25 bp, Homo sapien
tgttaagaagaggagtcgaacctct

SEQ ID NO: 5156642 - DNA, 25 bp, Homo sapien
taagatttatgcaattgctgggctc

SEQ ID NO: 5156643 - DNA, 25 bp, Homo sapien
ttttaagatttatgcaattgctggg

SEQ ID NO: 5156644 - DNA, 25 bp, Homo sapien
taagaagaggagtcgaacctctgat

SEQ ID NO: 5156645 - DNA, 25 bp, Homo sapien
cctcataagacattgtctgggccat

SEQ ID NO: 5156646 - DNA, 25 bp, Homo sapien
ttcttgcattatgacgagtgtttgg

SEQ ID NO: 5156647 - DNA, 25 bp, Homo sapien
tggtaagttaaacgagccgcttctc

SEQ ID NO: 5156648 - DNA, 25 bp, Homo sapien
tggtaggagcagtcatacgaattct

SEQ ID NO: 5156649 - DNA, 25 bp, Homo sapien
aataagaggaatttaatctctatta

SEQ ID NO: 5156650 - DNA, 25 bp, Homo sapien
tagaaataagaggaatttaatctct

SEQ ID NO: 5156651 - DNA, 25 bp, Homo sapien
gaaataagaggaatttaatctctat

SEQ ID NO: 5156652 - DNA, 25 bp, Homo sapien
atctctattatttactctatcaaag

SEQ ID NO: 5156653 - DNA, 25 bp, Homo sapien
ggtctgatggtttatttaggtgacc

SEQ ID NO: 5156654 - DNA, 25 bp, Homo sapien
ttttcagggtatgggtctgatggtt

SEQ ID NO: 5156655 - DNA, 25 bp, Homo sapien
cagggtatgggtctgatggtttatt

SEQ ID NO: 5156656 - DNA, 25 bp, Homo sapien
atgggtctgatggtttatttaggtg

SEQ ID NO: 5156657 - DNA, 25 bp, Homo sapien
cagaaattaagtgtgacttacttac

SEQ ID NO: 5156658 - DNA, 25 bp, Homo sapien
attaagtgtgacttacttactaagg

SEQ ID NO: 5156659 - DNA, 25 bp, Homo sapien
taagtgtgacttacttactaagggc

SEQ ID NO: 5156660 - DNA, 25 bp, Homo sapien
gaaattaagtgtgacttacttacta

SEQ ID NO: 5156661 - DNA, 25 bp, Homo sapien
gcacgttgcctcctggtggactctg

SEQ ID NO: 5156662 - DNA, 25 bp, Homo sapien
tgcacgttgcctcctggtggactct

SEQ ID NO: 5156663 - DNA, 25 bp, Homo sapien
ctcctggtggactctgcagatggct

SEQ ID NO: 5156664 - DNA, 25 bp, Homo sapien
tggactctgcagatggctttcagag

SEQ ID NO: 5156665 - DNA, 25 bp, Homo sapien
atgaaaatgtcactaagccagctga

SEQ ID NO: 5156666 - DNA, 25 bp, Homo sapien
tggcacgtgctcattgctccagtct

SEQ ID NO: 5156667 - DNA, 25 bp, Homo sapien
gacatcccttctggcacgtgctcat

SEQ ID NO: 5156668 - DNA, 25 bp, Homo sapien
cagctctggtagctgcacttcacct

SEQ ID NO: 5156669 - DNA, 25 bp, Homo sapien
ggtaaccttttgctagacactccag

SEQ ID NO: 5156670 - DNA, 25 bp, Homo sapien
ggctgaagtaggagttccagaattc

SEQ ID NO: 5156671 - DNA, 25 bp, Homo sapien
gacactccagctatgtgggctgaag

SEQ ID NO: 5156672 - DNA, 25 bp, Homo sapien
taaagcacaatattgctcggtaacc

SEQ ID NO: 5156673 - DNA, 25 bp, Homo sapien
tctcatctagaattaggatccccat

SEQ ID NO: 5156674 - DNA, 25 bp, Homo sapien
tgtaccagaaacagcgtctaagttt

SEQ ID NO: 5156675 - DNA, 25 bp, Homo sapien
ccccatgggtcgaggaaggaacctg

SEQ ID NO: 5156676 - DNA, 25 bp, Homo sapien
ccacatggtgcctataaaagggctt

SEQ ID NO: 5156677 - DNA, 25 bp, Homo sapien
cccatgaggctaggttgataatgca

SEQ ID NO: 5156678 - DNA, 25 bp, Homo sapien
tgataatgcagaaagcctcggcctc

SEQ ID NO: 5156679 - DNA, 25 bp, Homo sapien
ccataggtcaatcccatgaggctag

SEQ ID NO: 5156680 - DNA, 25 bp, Homo sapien
tggcaccgagctcagaaaggcctca

SEQ ID NO: 5156681 - DNA, 25 bp, Homo sapien
ttttcttttgatcccgtatcttcat

SEQ ID NO: 5156682 - DNA, 25 bp, Homo sapien
tcactagtgggtcttcacgatctgg

SEQ ID NO: 5156683 - DNA, 25 bp, Homo sapien
aacaccagttcactagtgggtcttc

SEQ ID NO: 5156684 - DNA, 25 bp, Homo sapien
tgggtcttcacgatctggtttcttt

SEQ ID NO: 5156685 - DNA, 25 bp, Homo sapien
ccagttcactagtgggtcttcacga

SEQ ID NO: 5156686 - DNA, 25 bp, Homo sapien
gggctgcttcagtgttattagacct

SEQ ID NO: 5156687 - DNA, 25 bp, Homo sapien
ttttctgcattgaagcagccaattt

SEQ ID NO: 5156688 - DNA, 25 bp, Homo sapien
ctgcttcagtgttattagacctgcc

SEQ ID NO: 5156689 - DNA, 25 bp, Homo sapien
cagccaatttgaagggctgcttcag

SEQ ID NO: 5156690 - DNA, 25 bp, Homo sapien
tccctccttcaggataatggctggc

SEQ ID NO: 5156691 - DNA, 25 bp, Homo sapien
aacactccctccttcaggataatgg

SEQ ID NO: 5156692 - DNA, 25 bp, Homo sapien
ctccttcaggataatggctggcacc

SEQ ID NO: 5156693 - DNA, 25 bp, Homo sapien
cactccctccttcaggataatggct

SEQ ID NO: 5156694 - DNA, 25 bp, Homo sapien
accacctttaccctcagaatctgaa

SEQ ID NO: 5156695 - DNA, 25 bp, Homo sapien
gatgtgagcgttgatgtttgactct

SEQ ID NO: 5156696 - DNA, 25 bp, Homo sapien
tcagaatctgaattgatgtgagcgt

SEQ ID NO: 5156697 - DNA, 25 bp, Homo sapien
tggaaagcagtgtgtataccacctt

SEQ ID NO: 5156698 - DNA, 25 bp, Homo sapien
tccaaaatcctgactaagtcagtca

SEQ ID NO: 5156699 - DNA, 25 bp, Homo sapien
tcctgactaagtcagtcatgtctct

SEQ ID NO: 5156700 - DNA, 25 bp, Homo sapien
aaatcctgactaagtcagtcatgtc

SEQ ID NO: 5156701 - DNA, 25 bp, Homo sapien
cctgactaagtcagtcatgtctctg

SEQ ID NO: 5156702 - DNA, 25 bp, Homo sapien
caatcaacacttaggagtgtgccca

SEQ ID NO: 5156703 - DNA, 25 bp, Homo sapien
cccacttctgagtggttatccttac

SEQ ID NO: 5156704 - DNA, 25 bp, Homo sapien
atcaaaaagccaatcaacacttagg

SEQ ID NO: 5156705 - DNA, 25 bp, Homo sapien
cacttaggagtgtgcccacttctga

SEQ ID NO: 5156706 - DNA, 25 bp, Homo sapien
actgcgcccagcctatttagaatct

SEQ ID NO: 5156707 - DNA, 25 bp, Homo sapien
catataaggccaagagtactgtccc

SEQ ID NO: 5156708 - DNA, 25 bp, Homo sapien
tttgacccacagactcatatgtgag

SEQ ID NO: 5156709 - DNA, 25 bp, Homo sapien
tcttcacaacccagtctagattctc

SEQ ID NO: 5156710 - DNA, 25 bp, Homo sapien
gtctcaatagacaggcccacctgag

SEQ ID NO: 5156711 - DNA, 25 bp, Homo sapien
gtctgtggctcgttgagtgcacaac

SEQ ID NO: 5156712 - DNA, 25 bp, Homo sapien
gagtgcacaactgctctgatcgaga

SEQ ID NO: 5156713 - DNA, 25 bp, Homo sapien
actgctctgatcgagagtaattcca

SEQ ID NO: 5156714 - DNA, 25 bp, Homo sapien
gctcgttgagtgcacaactgctctg

SEQ ID NO: 5156715 - DNA, 25 bp, Homo sapien
gcagtctctttacagcccattggtg

SEQ ID NO: 5156716 - DNA, 25 bp, Homo sapien
agtctctttacagcccattggtggg

SEQ ID NO: 5156717 - DNA, 25 bp, Homo sapien
cggtctttgacataggtagtaaaat

SEQ ID NO: 5156718 - DNA, 25 bp, Homo sapien
gggtaataagtcttgaccagtatcg

SEQ ID NO: 5156719 - DNA, 25 bp, Homo sapien
ttgcagaattgatttcccttgttgc

SEQ ID NO: 5156720 - DNA, 25 bp, Homo sapien
atttgcagaattgatttcccttgtt

SEQ ID NO: 5156721 - DNA, 25 bp, Homo sapien
tttgcagaattgatttcccttgttg

SEQ ID NO: 5156722 - DNA, 25 bp, Homo sapien
tagaaagccaaccttaaccctgagc

SEQ ID NO: 5156723 - DNA, 25 bp, Homo sapien
cctcatgtttctctgcaatcacagc

SEQ ID NO: 5156724 - DNA, 25 bp, Homo sapien
gacattcagaagttggtcccaaaag

SEQ ID NO: 5156725 - DNA, 25 bp, Homo sapien
tctgcaatcacagcaacagtccctg

SEQ ID NO: 5156726 - DNA, 25 bp, Homo sapien
ctatttaaacgcagctccatctgtt

SEQ ID NO: 5156727 - DNA, 25 bp, Homo sapien
tccatctgttagagctgggtcctgc

SEQ ID NO: 5156728 - DNA, 25 bp, Homo sapien
gatttcagattatcatttgttgtgt

SEQ ID NO: 5156729 - DNA, 25 bp, Homo sapien
tgcaggtagagtgtcatgtttgatt

SEQ ID NO: 5156730 - DNA, 25 bp, Homo sapien
ttggaatggtagaggtcttgaagct

SEQ ID NO: 5156731 - DNA, 25 bp, Homo sapien
ttatttactagtttgatggctcagg

SEQ ID NO: 5156732 - DNA, 25 bp, Homo sapien
cccctatggcatggactttttaatt

SEQ ID NO: 5156733 - DNA, 25 bp, Homo sapien
tggtgtgtgagcaaatttactgtct

SEQ ID NO: 5156734 - DNA, 25 bp, Homo sapien
tacaggaacacagaagttgcataga

SEQ ID NO: 5156735 - DNA, 25 bp, Homo sapien
ggaacacagaagttgcatagaagaa

SEQ ID NO: 5156736 - DNA, 25 bp, Homo sapien
gcatagaagaaaagacgcatgttcc

SEQ ID NO: 5156737 - DNA, 25 bp, Homo sapien
cgcatgttcctttggtgtcatccat

SEQ ID NO: 5156738 - DNA, 25 bp, Homo sapien
agaagatggcatgtgtgagcagtca

SEQ ID NO: 5156739 - DNA, 25 bp, Homo sapien
gaagatggcatgtgtgagcagtcat

SEQ ID NO: 5156740 - DNA, 25 bp, Homo sapien
aagaagatggcatgtgtgagcagtc

SEQ ID NO: 5156741 - DNA, 25 bp, Homo sapien
ggaagaagatggcatgtgtgagcag

SEQ ID NO: 5156742 - DNA, 25 bp, Homo sapien
tagccttatcctggtatgcttgaga

SEQ ID NO: 5156743 - DNA, 25 bp, Homo sapien
tgcttgagacttggcagtaaggagt

SEQ ID NO: 5156744 - DNA, 25 bp, Homo sapien
gaatgtgcacagtcaacatagctcc

SEQ ID NO: 5156745 - DNA, 25 bp, Homo sapien
actcccttccttatgcggtagcctt

SEQ ID NO: 5156746 - DNA, 25 bp, Homo sapien
caacattggtgccatcgaatgctca

SEQ ID NO: 5156747 - DNA, 25 bp, Homo sapien
tggtgccatcgaatgctcattgctt

SEQ ID NO: 5156748 - DNA, 25 bp, Homo sapien
ttgccaacattggtgccatcgaatg

SEQ ID NO: 5156749 - DNA, 25 bp, Homo sapien
tatttgccaacattggtgccatcga

SEQ ID NO: 5156750 - DNA, 25 bp, Homo sapien
tctgaatccgattaaactgaaattt

SEQ ID NO: 5156751 - DNA, 25 bp, Homo sapien
taacatctgaatccgattaaactga

SEQ ID NO: 5156752 - DNA, 25 bp, Homo sapien
gatcactaacatctgaatccgatta

SEQ ID NO: 5156753 - DNA, 25 bp, Homo sapien
tgatctgatcactaacatctgaatc

SEQ ID NO: 5156754 - DNA, 25 bp, Homo sapien
atacagtatttcacaaagtcaataa

SEQ ID NO: 5156755 - DNA, 25 bp, Homo sapien
acagtatttcacaaagtcaataaaa

SEQ ID NO: 5156756 - DNA, 25 bp, Homo sapien
tacagtatttcacaaagtcaataaa

SEQ ID NO: 5156757 - DNA, 25 bp, Homo sapien
cattgtgggcctgagattcctgggt

SEQ ID NO: 5156758 - DNA, 25 bp, Homo sapien
tggaggttaattctcagtggaaaca

SEQ ID NO: 5156759 - DNA, 25 bp, Homo sapien
ttttggaggttaattctcagtggaa

SEQ ID NO: 5156760 - DNA, 25 bp, Homo sapien
aagacattcacaagcattgtgggcc

SEQ ID NO: 5156761 - DNA, 25 bp, Homo sapien
atgccgtaggctctttaacaattgc

SEQ ID NO: 5156762 - DNA, 25 bp, Homo sapien
ttaagtcaaacatgccgtaggctct

SEQ ID NO: 5156763 - DNA, 25 bp, Homo sapien
caaacatgccgtaggctctttaaca

SEQ ID NO: 5156764 - DNA, 25 bp, Homo sapien
gtcaaacatgccgtaggctctttaa

SEQ ID NO: 5156765 - DNA, 25 bp, Homo sapien
caatgcaggcattgtaagtggaaaa

SEQ ID NO: 5156766 - DNA, 25 bp, Homo sapien
agtggaaaatctagttctattagaa

SEQ ID NO: 5156767 - DNA, 25 bp, Homo sapien
gaaaatctagttctattagaatacc

SEQ ID NO: 5156768 - DNA, 25 bp, Homo sapien
ttgtaagtggaaaatctagttctat

SEQ ID NO: 5156769 - DNA, 25 bp, Homo sapien
ctagaaatctccttttttggcttgt

SEQ ID NO: 5156770 - DNA, 25 bp, Homo sapien
catccttggcatccttagtattctg

SEQ ID NO: 5156771 - DNA, 25 bp, Homo sapien
gctgctctacattacaaggttcttt

SEQ ID NO: 5156772 - DNA, 25 bp, Homo sapien
cattacaaggttctttcctggacat

SEQ ID NO: 5156773 - DNA, 25 bp, Homo sapien
gatctgctgctctacattacaaggt

SEQ ID NO: 5156774 - DNA, 25 bp, Homo sapien
tctacattacaaggttctttcctgg

SEQ ID NO: 5156775 - DNA, 25 bp, Homo sapien
caattgacttgatggagggaacctt

SEQ ID NO: 5156776 - DNA, 25 bp, Homo sapien
aaaagcatccttgggtaccctgcca

SEQ ID NO: 5156777 - DNA, 25 bp, Homo sapien
cttagagacattaagcggcatggag

SEQ ID NO: 5156778 - DNA, 25 bp, Homo sapien
agcggcatggagagcaaaagcatcc

SEQ ID NO: 5156779 - DNA, 25 bp, Homo sapien
gcacatacggtaactacagagacct

SEQ ID NO: 5156780 - DNA, 25 bp, Homo sapien
tgttcgagtctgaaggcacatacgg

SEQ ID NO: 5156781 - DNA, 25 bp, Homo sapien
tgagttgcacaacccatccagaacc

SEQ ID NO: 5156782 - DNA, 25 bp, Homo sapien
gagacctcctttgatacttctgaag

SEQ ID NO: 5156783 - DNA, 25 bp, Homo sapien
tttggcatttcataggcaggccgca

SEQ ID NO: 5156784 - DNA, 25 bp, Homo sapien
ttggcatttcataggcaggccgcag

SEQ ID NO: 5156785 - DNA, 25 bp, Homo sapien
cctttttctgcggctttggcatttc

SEQ ID NO: 5156786 - DNA, 25 bp, Homo sapien
ctttttctgcggctttggcatttca

SEQ ID NO: 5156787 - DNA, 25 bp, Homo sapien
gacataagaggaattgagaggaggc

SEQ ID NO: 5156788 - DNA, 25 bp, Homo sapien
tggacataagaggaattgagaggag

SEQ ID NO: 5156789 - DNA, 25 bp, Homo sapien
acataagaggaattgagaggaggca

SEQ ID NO: 5156790 - DNA, 25 bp, Homo sapien
cataagaggaattgagaggaggcat

SEQ ID NO: 5156791 - DNA, 25 bp, Homo sapien
tctcaataaggttgtcaccaatgcc

SEQ ID NO: 5156792 - DNA, 25 bp, Homo sapien
tgatctcaataaggttgtcaccaat

SEQ ID NO: 5156793 - DNA, 25 bp, Homo sapien
ctcttctaggtctgggatgtaaaat

SEQ ID NO: 5156794 - DNA, 25 bp, Homo sapien
tcaataaggttgtcaccaatgccac

SEQ ID NO: 5156795 - DNA, 25 bp, Homo sapien
cacttggcagagtgggacttgtata

SEQ ID NO: 5156796 - DNA, 25 bp, Homo sapien
agagtgggacttgtatactgttgac

SEQ ID NO: 5156797 - DNA, 25 bp, Homo sapien
tggcagagtgggacttgtatactgt

SEQ ID NO: 5156798 - DNA, 25 bp, Homo sapien
tcagtgggacatacagtgggaaggc

SEQ ID NO: 5156799 - DNA, 25 bp, Homo sapien
tggtactattgacagctccttgaga

SEQ ID NO: 5156800 - DNA, 25 bp, Homo sapien
tgacagctccttgagagtaggcagc

SEQ ID NO: 5156801 - DNA, 25 bp, Homo sapien
gtgtcatcttcgtgtagcttggatt

SEQ ID NO: 5156802 - DNA, 25 bp, Homo sapien
tctggtttcctggtactattgacag

SEQ ID NO: 5156803 - DNA, 25 bp, Homo sapien
cttccatcccggcaaacattatctt

SEQ ID NO: 5156804 - DNA, 25 bp, Homo sapien
ttccatcccggcaaacattatcttc

SEQ ID NO: 5156805 - DNA, 25 bp, Homo sapien
atctcttccatcccggcaaacatta

SEQ ID NO: 5156806 - DNA, 25 bp, Homo sapien
tcttccatcccggcaaacattatct

SEQ ID NO: 5156807 - DNA, 25 bp, Homo sapien
tctggttaccctattgattcaggga

SEQ ID NO: 5156808 - DNA, 25 bp, Homo sapien
tggattatttgggtataggccacaa

SEQ ID NO: 5156809 - DNA, 25 bp, Homo sapien
gctctatagtattttcctcaaccat

SEQ ID NO: 5156810 - DNA, 25 bp, Homo sapien
tgtatcttttaacccctattgccac

SEQ ID NO: 5156811 - DNA, 25 bp, Homo sapien
tggcttttgcaactcatgagcgtga

SEQ ID NO: 5156812 - DNA, 25 bp, Homo sapien
tgttttcccgtgcaattgtaatgac

SEQ ID NO: 5156813 - DNA, 25 bp, Homo sapien
tggaccgcaggatgatgttttcccg

SEQ ID NO: 5156814 - DNA, 25 bp, Homo sapien
caggcttttctgacgagttcctcaa

SEQ ID NO: 5156815 - DNA, 25 bp, Homo sapien
tggagtggtcattttgttgtcatgg

SEQ ID NO: 5156816 - DNA, 25 bp, Homo sapien
caacttttggagtggtcattttgtt

SEQ ID NO: 5156817 - DNA, 25 bp, Homo sapien
gttgtcatggttgctccaatcaatg

SEQ ID NO: 5156818 - DNA, 25 bp, Homo sapien
caatgagatggatatagggtcttgg

SEQ ID NO: 5156819 - DNA, 25 bp, Homo sapien
ggtcatcatgacacccaggatgtca

SEQ ID NO: 5156820 - DNA, 25 bp, Homo sapien
catcatgacacccaggatgtcattc

SEQ ID NO: 5156821 - DNA, 25 bp, Homo sapien
gtcatcatgacacccaggatgtcat

SEQ ID NO: 5156822 - DNA, 25 bp, Homo sapien
gggtcatcatgacacccaggatgtc

SEQ ID NO: 5156823 - DNA, 25 bp, Homo sapien
attgtcacatccagtcctcctttcc

SEQ ID NO: 5156824 - DNA, 25 bp, Homo sapien
cggttccaatcttgcatcagtgacg

SEQ ID NO: 5156825 - DNA, 25 bp, Homo sapien
tcagtgacggccacattgtcacatc

SEQ ID NO: 5156826 - DNA, 25 bp, Homo sapien
caatcttgcatcagtgacggccaca

SEQ ID NO: 5156827 - DNA, 25 bp, Homo sapien
caggagatgtattcagtcaacttca

SEQ ID NO: 5156828 - DNA, 25 bp, Homo sapien
catcctccttgtttgtgatcataga

SEQ ID NO: 5156829 - DNA, 25 bp, Homo sapien
gccagagcaggagatgtattcagtc

SEQ ID NO: 5156830 - DNA, 25 bp, Homo sapien
tcctccttgtttgtgatcatagatt

SEQ ID NO: 5156831 - DNA, 25 bp, Homo sapien
gatacatagaagtggatgcttcccc

SEQ ID NO: 5156832 - DNA, 25 bp, Homo sapien
cacatgcgagtgattttaggacaga

SEQ ID NO: 5156833 - DNA, 25 bp, Homo sapien
taaaagatgtctgcgtgtgcactgt

SEQ ID NO: 5156834 - DNA, 25 bp, Homo sapien
tttcatggatattgaccctccgggt

SEQ ID NO: 5156835 - DNA, 25 bp, Homo sapien
tgcagaactgatggaggcactaccc

SEQ ID NO: 5156836 - DNA, 25 bp, Homo sapien
actgatggaggcactacccactgct

SEQ ID NO: 5156837 - DNA, 25 bp, Homo sapien
tacactctatcctggggtctctggc

SEQ ID NO: 5156838 - DNA, 25 bp, Homo sapien
tccttgcagaactgatggaggcact

SEQ ID NO: 5156839 - DNA, 25 bp, Homo sapien
cagagaaacccattattagcagaac

SEQ ID NO: 5156840 - DNA, 25 bp, Homo sapien
gtgtcagtgttaggcatttgcaggc

SEQ ID NO: 5156841 - DNA, 25 bp, Homo sapien
gatttgagccaacgtctgtctgatt

SEQ ID NO: 5156842 - DNA, 25 bp, Homo sapien
tcaaagctcatgttcttacaaaggc

SEQ ID NO: 5156843 - DNA, 25 bp, Homo sapien
accctgggctgccaatgcaaactga

SEQ ID NO: 5156844 - DNA, 25 bp, Homo sapien
ggctagggacaagactatgagcacc

SEQ ID NO: 5156845 - DNA, 25 bp, Homo sapien
gacagaccttaagggtcaggagcac

SEQ ID NO: 5156846 - DNA, 25 bp, Homo sapien
cagatctgcgcaccagaaagaggtc

SEQ ID NO: 5156847 - DNA, 25 bp, Homo sapien
gatcacattgatcccaggtttatat

SEQ ID NO: 5156848 - DNA, 25 bp, Homo sapien
gctgagggctcgagtgtccccaggg

SEQ ID NO: 5156849 - DNA, 25 bp, Homo sapien
tatatctgcggccattacttgcaga

SEQ ID NO: 5156850 - DNA, 25 bp, Homo sapien
gccattacttgcagaagtggactct

SEQ ID NO: 5156851 - DNA, 25 bp, Homo sapien
atctctcttgcaatgagaatgccgg

SEQ ID NO: 5156852 - DNA, 25 bp, Homo sapien
ctcttgcaatgagaatgccgggcca

SEQ ID NO: 5156853 - DNA, 25 bp, Homo sapien
tctcttgcaatgagaatgccgggcc

SEQ ID NO: 5156854 - DNA, 25 bp, Homo sapien
tctctcttgcaatgagaatgccggg

SEQ ID NO: 5156855 - DNA, 25 bp, Homo sapien
aatgcaaggctagtgtcacactcat

SEQ ID NO: 5156856 - DNA, 25 bp, Homo sapien
gtgtagcgtagaagaataattttcc

SEQ ID NO: 5156857 - DNA, 25 bp, Homo sapien
tgtgtagcgtagaagaataattttc

SEQ ID NO: 5156858 - DNA, 25 bp, Homo sapien
tgcttggatgtaatggattgttgtg

SEQ ID NO: 5156859 - DNA, 25 bp, Homo sapien
tattcttcttcaggatgcttggact

SEQ ID NO: 5156860 - DNA, 25 bp, Homo sapien
ggatgtaatggattgttgtgtatca

SEQ ID NO: 5156861 - DNA, 25 bp, Homo sapien
tttccctctggttgtagctcttgcc

SEQ ID NO: 5156862 - DNA, 25 bp, Homo sapien
ggcaagagacaccagacatcacatc

SEQ ID NO: 5156863 - DNA, 25 bp, Homo sapien
tctgtggcaagagacaccagacatc

SEQ ID NO: 5156864 - DNA, 25 bp, Homo sapien
atctgtggcaagagacaccagacat

SEQ ID NO: 5156865 - DNA, 25 bp, Homo sapien
tgtggcaagagacaccagacatcac

SEQ ID NO: 5156866 - DNA, 25 bp, Homo sapien
tgtgatagaattgccgctggtcatc

SEQ ID NO: 5156867 - DNA, 25 bp, Homo sapien
ctctgtgatagaattgccgctggtc

SEQ ID NO: 5156868 - DNA, 25 bp, Homo sapien
tagaattgccgctggtcatcattca

SEQ ID NO: 5156869 - DNA, 25 bp, Homo sapien
atagaattgccgctggtcatcattc

SEQ ID NO: 5156870 - DNA, 25 bp, Homo sapien
gctacatcacttgggcagcaactgg

SEQ ID NO: 5156871 - DNA, 25 bp, Homo sapien
gatgttggctggcataaacacgact

SEQ ID NO: 5156872 - DNA, 25 bp, Homo sapien
gctcggaggacaagggctattgcta

SEQ ID NO: 5156873 - DNA, 25 bp, Homo sapien
tgtatgttaacctagagacaccttg

SEQ ID NO: 5156874 - DNA, 25 bp, Homo sapien
ccagacaccagacactgggaattct

SEQ ID NO: 5156875 - DNA, 25 bp, Homo sapien
tcttggggaatgtcagcaatgcacc

SEQ ID NO: 5156876 - DNA, 25 bp, Homo sapien
gacaccagacactgggaattcttct

SEQ ID NO: 5156877 - DNA, 25 bp, Homo sapien
gaattcttcttggggaatgtcagca

SEQ ID NO: 5156878 - DNA, 25 bp, Homo sapien
ctgtcaagcacagacagcgacagca

SEQ ID NO: 5156879 - DNA, 25 bp, Homo sapien
aatgaaggaggggagcaggagggtg

SEQ ID NO: 5156880 - DNA, 25 bp, Homo sapien
atgaaggaggggagcaggagggtgg

SEQ ID NO: 5156881 - DNA, 25 bp, Homo sapien
gggagcaggagggtggggattgtgc

SEQ ID NO: 5156882 - DNA, 25 bp, Homo sapien
ctgaatgaaggaggggagcaggagg

SEQ ID NO: 5156883 - DNA, 25 bp, Homo sapien
tatctgactgggctttgaccggcag

SEQ ID NO: 5156884 - DNA, 25 bp, Homo sapien
gagacatttcgtctgttgatcataa

SEQ ID NO: 5156885 - DNA, 25 bp, Homo sapien
caggtagatgtttgccctttgcata

SEQ ID NO: 5156886 - DNA, 25 bp, Homo sapien
cctgcaacgtgaaggctgttgctgt

SEQ ID NO: 5156887 - DNA, 25 bp, Homo sapien
catagatttgcgtggaatttctcac

SEQ ID NO: 5156888 - DNA, 25 bp, Homo sapien
tttgtttccaatccctgaagcccat

SEQ ID NO: 5156889 - DNA, 25 bp, Homo sapien
ttgttcttttgtttccaatccctga

SEQ ID NO: 5156890 - DNA, 25 bp, Homo sapien
ttttgtttccaatccctgaagccca

SEQ ID NO: 5156891 - DNA, 25 bp, Homo sapien
ttcttttgtttccaatccctgaagc

SEQ ID NO: 5156892 - DNA, 25 bp, Homo sapien
ggttgttcaacaagcctcgcccata

SEQ ID NO: 5156893 - DNA, 25 bp, Homo sapien
ttccagttctaggccaataagcagg

SEQ ID NO: 5156894 - DNA, 25 bp, Homo sapien
cctgccagtagctgtcctgcatggt

SEQ ID NO: 5156895 - DNA, 25 bp, Homo sapien
cgcccatagatctttgagccactgt

SEQ ID NO: 5156896 - DNA, 25 bp, Homo sapien
caatcaagctagctggtggctcaag

SEQ ID NO: 5156897 - DNA, 25 bp, Homo sapien
aagggtgtcccatgcagttagcctg

SEQ ID NO: 5156898 - DNA, 25 bp, Homo sapien
tactggtgataagtgcatgatccaa

SEQ ID NO: 5156899 - DNA, 25 bp, Homo sapien
cctgggcctggtaagacattctgtg

SEQ ID NO: 5156900 - DNA, 25 bp, Homo sapien
gatactgaattcctttatcaactag

SEQ ID NO: 5156901 - DNA, 25 bp, Homo sapien
ctttatcaactaggacatacaccat

SEQ ID NO: 5156902 - DNA, 25 bp, Homo sapien
gaattcctttatcaactaggacata

SEQ ID NO: 5156903 - DNA, 25 bp, Homo sapien
tcctttatcaactaggacatacacc

SEQ ID NO: 5156904 - DNA, 25 bp, Homo sapien
ctgctggcacaccaagtgatagaaa

SEQ ID NO: 5156905 - DNA, 25 bp, Homo sapien
gctgctggcacaccaagtgatagaa

SEQ ID NO: 5156906 - DNA, 25 bp, Homo sapien
gctgatcaaattgacacagtctccc

SEQ ID NO: 5156907 - DNA, 25 bp, Homo sapien
ggcctgctgatcaaattgacacagt

SEQ ID NO: 5156908 - DNA, 25 bp, Homo sapien
cagacgcgcgcaccgtgatatcttt

SEQ ID NO: 5156909 - DNA, 25 bp, Homo sapien
tggcacccggcggaacgaaaatgct

SEQ ID NO: 5156910 - DNA, 25 bp, Homo sapien
tttggcgaccaaaatctttgcagcg

SEQ ID NO: 5156911 - DNA, 25 bp, Homo sapien
gagcggaaatgcttccagacgcgcg

SEQ ID NO: 5156912 - DNA, 25 bp, Homo sapien
ataaggcgccacacagtacagctac

SEQ ID NO: 5156913 - DNA, 25 bp, Homo sapien
agaataaggcgccacacagtacagc

SEQ ID NO: 5156914 - DNA, 25 bp, Homo sapien
acagctactcagttctcaggctgac

SEQ ID NO: 5156915 - DNA, 25 bp, Homo sapien
tactcagttctcaggctgacgttac

SEQ ID NO: 5156916 - DNA, 25 bp, Homo sapien
tcttcttacgcaggagtttcatcgg

SEQ ID NO: 5156917 - DNA, 25 bp, Homo sapien
cttacgcaggagtttcatcggcagg

SEQ ID NO: 5156918 - DNA, 25 bp, Homo sapien
tacgcaggagtttcatcggcaggtg

SEQ ID NO: 5156919 - DNA, 25 bp, Homo sapien
ctcgatcttcttacgcaggagtttc

SEQ ID NO: 5156920 - DNA, 25 bp, Homo sapien
ccattttgagtttccgatagggtca

SEQ ID NO: 5156921 - DNA, 25 bp, Homo sapien
tttctacttcccattgtttcttcag

SEQ ID NO: 5156922 - DNA, 25 bp, Homo sapien
tgtttcttcagatacatctccattt

SEQ ID NO: 5156923 - DNA, 25 bp, Homo sapien
tacatctccattttgagtttccgat

SEQ ID NO: 5156924 - DNA, 25 bp, Homo sapien
tgagacatgcctccattttgagttt

SEQ ID NO: 5156925 - DNA, 25 bp, Homo sapien
gatatctctgcttatacaaatctca

SEQ ID NO: 5156926 - DNA, 25 bp, Homo sapien
tataatgtccattctttcatccgag

SEQ ID NO: 5156927 - DNA, 25 bp, Homo sapien
catccgagcttactgaaattccatc

SEQ ID NO: 5156928 - DNA, 25 bp, Homo sapien
ccattctttcatccgagcttactga

SEQ ID NO: 5156929 - DNA, 25 bp, Homo sapien
tttctttagtagtctcggcactttc

SEQ ID NO: 5156930 - DNA, 25 bp, Homo sapien
ctttagtagtctcggcactttcttc

SEQ ID NO: 5156931 - DNA, 25 bp, Homo sapien
tcatcattatctggcttctccacat

SEQ ID NO: 5156932 - DNA, 25 bp, Homo sapien
tagtagtctcggcactttcttcttc

SEQ ID NO: 5156933 - DNA, 25 bp, Homo sapien
gggcagactgggcacctcactctca

SEQ ID NO: 5156934 - DNA, 25 bp, Homo sapien
caggggcagactgggcacctcactc

SEQ ID NO: 5156935 - DNA, 25 bp, Homo sapien
ggcagactgggcacctcactctcat

SEQ ID NO: 5156936 - DNA, 25 bp, Homo sapien
ctgtcagtcccaggggcagactggg

SEQ ID NO: 5156937 - DNA, 25 bp, Homo sapien
tacatagagaagcaaacgaagtatc

SEQ ID NO: 5156938 - DNA, 25 bp, Homo sapien
aagattacatagagaagcaaacgaa

SEQ ID NO: 5156939 - DNA, 25 bp, Homo sapien
catagagaagcaaacgaagtatcct

SEQ ID NO: 5156940 - DNA, 25 bp, Homo sapien
gattacatagagaagcaaacgaagt

SEQ ID NO: 5156941 - DNA, 25 bp, Homo sapien
taacaatgagttcaactgcagggat

SEQ ID NO: 5156942 - DNA, 25 bp, Homo sapien
cattcctgggcatgaaccttaactt

SEQ ID NO: 5156943 - DNA, 25 bp, Homo sapien
tgcagggatgagaaaagccagggtt

SEQ ID NO: 5156944 - DNA, 25 bp, Homo sapien
tgtttttgcagctgctagaagatcc

SEQ ID NO: 5156945 - DNA, 25 bp, Homo sapien
ggctagttctctagtaggtgagaga

SEQ ID NO: 5156946 - DNA, 25 bp, Homo sapien
gcatggctagttctctagtaggtga

SEQ ID NO: 5156947 - DNA, 25 bp, Homo sapien
gtttgcatggctagttctctagtag

SEQ ID NO: 5156948 - DNA, 25 bp, Homo sapien
gttctctagtaggtgagagaataag

SEQ ID NO: 5156949 - DNA, 25 bp, Homo sapien
catcagctccttaagaacaccaaag

SEQ ID NO: 5156950 - DNA, 25 bp, Homo sapien
ataggtatgcacgtggtgagtcatc

SEQ ID NO: 5156951 - DNA, 25 bp, Homo sapien
tatcaagccataggtatgcacgtgg

SEQ ID NO: 5156952 - DNA, 25 bp, Homo sapien
tatgcacgtggtgagtcatcagctc

SEQ ID NO: 5156953 - DNA, 25 bp, Homo sapien
gcatatggtccagcagacggcctgg

SEQ ID NO: 5156954 - DNA, 25 bp, Homo sapien
ctgcatatggtccagcagacggcct

SEQ ID NO: 5156955 - DNA, 25 bp, Homo sapien
tatggtccagcagacggcctggtgt

SEQ ID NO: 5156956 - DNA, 25 bp, Homo sapien
catatggtccagcagacggcctggt

SEQ ID NO: 5156957 - DNA, 25 bp, Homo sapien
tcaaaccccacatccaagatacgat

SEQ ID NO: 5156958 - DNA, 25 bp, Homo sapien
tcatcaataaccagacactgcaggt

SEQ ID NO: 5156959 - DNA, 25 bp, Homo sapien
aaccccacatccaagatacgatcag

SEQ ID NO: 5156960 - DNA, 25 bp, Homo sapien
cacatccaagatacgatcagcttca

SEQ ID NO: 5156961 - DNA, 25 bp, Homo sapien
taaccaaggtatgtacaagtaaggc

SEQ ID NO: 5156962 - DNA, 25 bp, Homo sapien
tatgtgaagactgcttaacgtgcct

SEQ ID NO: 5156963 - DNA, 25 bp, Homo sapien
ggcaaaaaatctgcggcttcttggg

SEQ ID NO: 5156964 - DNA, 25 bp, Homo sapien
tgattgcagcgatgatgtcacagtg

SEQ ID NO: 5156965 - DNA, 25 bp, Homo sapien
tgggttacatgactcaatactgtct

SEQ ID NO: 5156966 - DNA, 25 bp, Homo sapien
cccctaagatcagaaccaagataag

SEQ ID NO: 5156967 - DNA, 25 bp, Homo sapien
tattaaagcaacgagcaattggaac

SEQ ID NO: 5156968 - DNA, 25 bp, Homo sapien
caggattaactgtcttgctagatac

SEQ ID NO: 5156969 - DNA, 25 bp, Homo sapien
gatgaaatggacaaactcctttgaa

SEQ ID NO: 5156970 - DNA, 25 bp, Homo sapien
ggagatatgatgtttctacagaatc

SEQ ID NO: 5156971 - DNA, 25 bp, Homo sapien
aacactaggtctataaatttgagga

SEQ ID NO: 5156972 - DNA, 25 bp, Homo sapien
ccaggcccaaatggattccattggt

SEQ ID NO: 5156973 - DNA, 25 bp, Homo sapien
gaaaagagcatagtctgtctacgtg

SEQ ID NO: 5156974 - DNA, 25 bp, Homo sapien
aacgccaacatacaatggctccttt

SEQ ID NO: 5156975 - DNA, 25 bp, Homo sapien
cgctttatcatcatcaacgccaaca

SEQ ID NO: 5156976 - DNA, 25 bp, Homo sapien
cttgccaggtcttcaacttttcgag

SEQ ID NO: 5156977 - DNA, 25 bp, Homo sapien
taaagagcagaaggaatctcttttc

SEQ ID NO: 5156978 - DNA, 25 bp, Homo sapien
ctcttttcagaaggacaaacaacat

SEQ ID NO: 5156979 - DNA, 25 bp, Homo sapien
aaggaatgtaaagagcagaaggaat

SEQ ID NO: 5156980 - DNA, 25 bp, Homo sapien
cttttcagaaggacaaacaacatat

SEQ ID NO: 5156981 - DNA, 25 bp, Homo sapien
ccaagacgggcaaatcaatgtagtt

SEQ ID NO: 5156982 - DNA, 25 bp, Homo sapien
gaagaccataagcttcttctttcgg

SEQ ID NO: 5156983 - DNA, 25 bp, Homo sapien
caactcatagtggtatttcacagac

SEQ ID NO: 5156984 - DNA, 25 bp, Homo sapien
atgaatggccaagacgggcaaatca

SEQ ID NO: 5156985 - DNA, 25 bp, Homo sapien
tttcaatgagctcatcatcatcact

SEQ ID NO: 5156986 - DNA, 25 bp, Homo sapien
cctgttttcaatgagctcatcatca

SEQ ID NO: 5156987 - DNA, 25 bp, Homo sapien
gttttcaatgagctcatcatcatca

SEQ ID NO: 5156988 - DNA, 25 bp, Homo sapien
tcaatgagctcatcatcatcactta

SEQ ID NO: 5156989 - DNA, 25 bp, Homo sapien
tcaggaatgtctagtcctctcgctg

SEQ ID NO: 5156990 - DNA, 25 bp, Homo sapien
acacaatagtgttcccgaatctgca

SEQ ID NO: 5156991 - DNA, 25 bp, Homo sapien
ggaatgtctagtcctctcgctgcca

SEQ ID NO: 5156992 - DNA, 25 bp, Homo sapien
tgttcccgaatctgcattgcagaac

SEQ ID NO: 5156993 - DNA, 25 bp, Homo sapien
gcacagcccgtttgagccctgaaaa

SEQ ID NO: 5156994 - DNA, 25 bp, Homo sapien
ctgcagtcactgtatagtagggatc

SEQ ID NO: 5156995 - DNA, 25 bp, Homo sapien
tcaggcatctgctgttcttaagaga

SEQ ID NO: 5156996 - DNA, 25 bp, Homo sapien
tggaatgcagtttccgtcagggaac

SEQ ID NO: 5156997 - DNA, 25 bp, Homo sapien
tctgagttaacgcagtgacttccac

SEQ ID NO: 5156998 - DNA, 25 bp, Homo sapien
aagaaaatctgagttaacgcagtga

SEQ ID NO: 5156999 - DNA, 25 bp, Homo sapien
taacgcagtgacttccacatgagcc

SEQ ID NO: 5157000 - DNA, 25 bp, Homo sapien
gagttaacgcagtgacttccacatg

SEQ ID NO: 5157001 - DNA, 25 bp, Homo sapien
gaaaacccaattcttctgggcgcaa

SEQ ID NO: 5157002 - DNA, 25 bp, Homo sapien
gggcgcaaaatgagcaaggcatgcc

SEQ ID NO: 5157003 - DNA, 25 bp, Homo sapien
aaggcatgccctctcccatttaggc

SEQ ID NO: 5157004 - DNA, 25 bp, Homo sapien
ctggctgttctacccacacgatgaa

SEQ ID NO: 5157005 - DNA, 25 bp, Homo sapien
caaattaggctggttagggactgag

SEQ ID NO: 5157006 - DNA, 25 bp, Homo sapien
ggtcctgatggattcaattctggtg

SEQ ID NO: 5157007 - DNA, 25 bp, Homo sapien
ggactgagagggaggtaaatggcaa

SEQ ID NO: 5157008 - DNA, 25 bp, Homo sapien
gaagaggccacttagggtcctgatg

SEQ ID NO: 5157009 - DNA, 25 bp, Homo sapien
tcccagcaaagacagaggcgagctg

SEQ ID NO: 5157010 - DNA, 25 bp, Homo sapien
tcaagactatgccagaaaggccaat

SEQ ID NO: 5157011 - DNA, 25 bp, Homo sapien
gagctgaaaccaagcattctggaca

SEQ ID NO: 5157012 - DNA, 25 bp, Homo sapien
aggagaaggcctgatatgcatcccc

SEQ ID NO: 5157013 - DNA, 25 bp, Homo sapien
gagaaagataagtaatgaaatgtca

SEQ ID NO: 5157014 - DNA, 25 bp, Homo sapien
agaaagataagtaatgaaatgtcaa

SEQ ID NO: 5157015 - DNA, 25 bp, Homo sapien
agagcttgccgtcttgagggggaga

SEQ ID NO: 5157016 - DNA, 25 bp, Homo sapien
cctcagagagcttgccgtcttgagg

SEQ ID NO: 5157017 - DNA, 25 bp, Homo sapien
gaaaagtcaaattcacttaatggaa

SEQ ID NO: 5157018 - DNA, 25 bp, Homo sapien
gaccaggaaaagtcaaattcactta

SEQ ID NO: 5157019 - DNA, 25 bp, Homo sapien
tgagactgaatgtcagaaattttag

SEQ ID NO: 5157020 - DNA, 25 bp, Homo sapien
tttagaccaggaaaagtcaaattca

SEQ ID NO: 5157021 - DNA, 25 bp, Homo sapien
ggctcgtatgtatgacttatatgct

SEQ ID NO: 5157022 - DNA, 25 bp, Homo sapien
gaatcataggctcgtatgtatgact

SEQ ID NO: 5157023 - DNA, 25 bp, Homo sapien
agagcaacctgaggcaaatttaggt

SEQ ID NO: 5157024 - DNA, 25 bp, Homo sapien
atgggaatcataggctcgtatgtat

SEQ ID NO: 5157025 - DNA, 25 bp, Homo sapien
gagaactgcctgctgtcagatgatt

SEQ ID NO: 5157026 - DNA, 25 bp, Homo sapien
tgcttgccttcattactgttgacgt

SEQ ID NO: 5157027 - DNA, 25 bp, Homo sapien
aactgcctgctgtcagatgatttct

SEQ ID NO: 5157028 - DNA, 25 bp, Homo sapien
ctggtagccaaatccaccaccacct

SEQ ID NO: 5157029 - DNA, 25 bp, Homo sapien
gcagtgagcacagcaatccatgcca

SEQ ID NO: 5157030 - DNA, 25 bp, Homo sapien
cagtgctcagtgcttgcaacccaag

SEQ ID NO: 5157031 - DNA, 25 bp, Homo sapien
taggtcaccttttacagcagtgagc

SEQ ID NO: 5157032 - DNA, 25 bp, Homo sapien
caaaaatcttcgcaaaacaagaagg

SEQ ID NO: 5157033 - DNA, 25 bp, Homo sapien
tgtcaaggtccaagaaataactaaa

SEQ ID NO: 5157034 - DNA, 25 bp, Homo sapien
gtcattagatactgtcaaggtccaa

SEQ ID NO: 5157035 - DNA, 25 bp, Homo sapien
caggaggagtcattagatactgtca

SEQ ID NO: 5157036 - DNA, 25 bp, Homo sapien
tgcagcattttcaggaggagtcatt

SEQ ID NO: 5157037 - DNA, 25 bp, Homo sapien
taatcttaaggtgcttcttaggtat

SEQ ID NO: 5157038 - DNA, 25 bp, Homo sapien
gaaaggcctgttgctttaaaatcaa

SEQ ID NO: 5157039 - DNA, 25 bp, Homo sapien
tcaaattacaacccatagtttttgc

SEQ ID NO: 5157040 - DNA, 25 bp, Homo sapien
taaggtgcttcttaggtatttccca

SEQ ID NO: 5157041 - DNA, 25 bp, Homo sapien
atgaggctcaaacatctcaattcca

SEQ ID NO: 5157042 - DNA, 25 bp, Homo sapien
cctctattgatgtaaatgaggctca

SEQ ID NO: 5157043 - DNA, 25 bp, Homo sapien
taatgaggagcatcatcgttctttg

SEQ ID NO: 5157044 - DNA, 25 bp, Homo sapien
gaaatgcagtacattacacctctat

SEQ ID NO: 5157045 - DNA, 25 bp, Homo sapien
tctctatattcgatgttagcacact

SEQ ID NO: 5157046 - DNA, 25 bp, Homo sapien
tggctctaactccaagtaagttgcc

SEQ ID NO: 5157047 - DNA, 25 bp, Homo sapien
taagtactctacagagtgcaaaggc

SEQ ID NO: 5157048 - DNA, 25 bp, Homo sapien
tttcaatcttcacagcaaatgtatt

SEQ ID NO: 5157049 - DNA, 25 bp, Homo sapien
tatgaaacaagctggttacaagtag

SEQ ID NO: 5157050 - DNA, 25 bp, Homo sapien
aacaagctggttacaagtagtaggt

SEQ ID NO: 5157051 - DNA, 25 bp, Homo sapien
aataacatgttatgaaacaagctgg

SEQ ID NO: 5157052 - DNA, 25 bp, Homo sapien
catgttatgaaacaagctggttaca

SEQ ID NO: 5157053 - DNA, 25 bp, Homo sapien
catagatgaggctgctaatggacct

SEQ ID NO: 5157054 - DNA, 25 bp, Homo sapien
ccagtttggcacattcaggtaggta

SEQ ID NO: 5157055 - DNA, 25 bp, Homo sapien
taaatcctggcagaccaaacaaggg

SEQ ID NO: 5157056 - DNA, 25 bp, Homo sapien
gaaactgtggacaacactgaaccct

SEQ ID NO: 5157057 - DNA, 25 bp, Homo sapien
ctcacattctgccttcgaaccttca

SEQ ID NO: 5157058 - DNA, 25 bp, Homo sapien
tcacattctgccttcgaaccttcat

SEQ ID NO: 5157059 - DNA, 25 bp, Homo sapien
gcatgtagtgatgtgcttggctccc

SEQ ID NO: 5157060 - DNA, 25 bp, Homo sapien
tgtagtgatgtgcttggctccccca

SEQ ID NO: 5157061 - DNA, 25 bp, Homo sapien
ctgcatgtagtgatgtgcttggctc

SEQ ID NO: 5157062 - DNA, 25 bp, Homo sapien
catgtagtgatgtgcttggctcccc

SEQ ID NO: 5157063 - DNA, 25 bp, Homo sapien
ccctgaggttagcaagtggcacagc

SEQ ID NO: 5157064 - DNA, 25 bp, Homo sapien
cacggtttgggatgagcctctgtac

SEQ ID NO: 5157065 - DNA, 25 bp, Homo sapien
ttttcacgtaggatgcacggaggcc

SEQ ID NO: 5157066 - DNA, 25 bp, Homo sapien
gaatgggttctagtctggttgctcc

SEQ ID NO: 5157067 - DNA, 25 bp, Homo sapien
ggttccatgaagctaggctgtcctt

SEQ ID NO: 5157068 - DNA, 25 bp, Homo sapien
caacgtactaacaccattgcctgtg

SEQ ID NO: 5157069 - DNA, 25 bp, Homo sapien
tgggcagccctagtttgtgaatgac

SEQ ID NO: 5157070 - DNA, 25 bp, Homo sapien
ttctctctcgaaagtcccagcctgt

SEQ ID NO: 5157071 - DNA, 25 bp, Homo sapien
gaatggtggcaagcaacctggacat

SEQ ID NO: 5157072 - DNA, 25 bp, Homo sapien
ttttttcgacgcatccttgccctag

SEQ ID NO: 5157073 - DNA, 25 bp, Homo sapien
tgccctagatgtttcaaagtcctgg

SEQ ID NO: 5157074 - DNA, 25 bp, Homo sapien
ctgtcccgaggtggtgagtttgcca

SEQ ID NO: 5157075 - DNA, 25 bp, Homo sapien
tgtgagaaaccggtaagtcctagaa

SEQ ID NO: 5157076 - DNA, 25 bp, Homo sapien
agggaattcacttgctccaaggctc

SEQ ID NO: 5157077 - DNA, 25 bp, Homo sapien
tctgacttggcctgactgtacacct

SEQ ID NO: 5157078 - DNA, 25 bp, Homo sapien
cattccttccattctacggatgagg

SEQ ID NO: 5157079 - DNA, 25 bp, Homo sapien
tttgcagttttttggcctaatgcct

SEQ ID NO: 5157080 - DNA, 25 bp, Homo sapien
cagaaggaggctcccttttgcagtt

SEQ ID NO: 5157081 - DNA, 25 bp, Homo sapien
gagccgcggaagggccggagacttc

SEQ ID NO: 5157082 - DNA, 25 bp, Homo sapien
tggagacgccgggagccgcggaagg

SEQ ID NO: 5157083 - DNA, 25 bp, Homo sapien
taaaatgaaccctcgatagcgctcc

SEQ ID NO: 5157084 - DNA, 25 bp, Homo sapien
tcagcgcatgctctcggcatgactg

SEQ ID NO: 5157085 - DNA, 25 bp, Homo sapien
tgactgggtcgcgtgtttgtcccac

SEQ ID NO: 5157086 - DNA, 25 bp, Homo sapien
tgctgctctgacaagcgtagccggc

SEQ ID NO: 5157087 - DNA, 25 bp, Homo sapien
gcgtccgggtaagactgtccttcca

SEQ ID NO: 5157088 - DNA, 25 bp, Homo sapien
cgtggcgtccgggtaagactgtcct

SEQ ID NO: 5157089 - DNA, 25 bp, Homo sapien
tggcgtccgggtaagactgtccttc

SEQ ID NO: 5157090 - DNA, 25 bp, Homo sapien
cagggctgccgggagaccaccgtgg

SEQ ID NO: 5157091 - DNA, 25 bp, Homo sapien
tgccgggagaccaccgtggcgtccg

SEQ ID NO: 5157092 - DNA, 25 bp, Homo sapien
cgctggcgtccgggttaggccatcg

SEQ ID NO: 5157093 - DNA, 25 bp, Homo sapien
ggccatcgccctcccgtctgcggct

SEQ ID NO: 5157094 - DNA, 25 bp, Homo sapien
tggcgtccgggttaggccatcgccc

SEQ ID NO: 5157095 - DNA, 25 bp, Homo sapien
atcgccctcccgtctgcggctgact

SEQ ID NO: 5157096 - DNA, 25 bp, Homo sapien
agcagggagggaagggcagctcggc

SEQ ID NO: 5157097 - DNA, 25 bp, Homo sapien
gcagcagggagggaagggcagctcg

SEQ ID NO: 5157098 - DNA, 25 bp, Homo sapien
ggggcagcagggagggaagggcagc

SEQ ID NO: 5157099 - DNA, 25 bp, Homo sapien
gggcagcagggagggaagggcagct

SEQ ID NO: 5157100 - DNA, 25 bp, Homo sapien
tcctgcccgcatctgaggacaccag

SEQ ID NO: 5157101 - DNA, 25 bp, Homo sapien
ctgtgtcttcgccccagcacctcca

SEQ ID NO: 5157102 - DNA, 25 bp, Homo sapien
tggtaaccgtctgttaccagggatg

SEQ ID NO: 5157103 - DNA, 25 bp, Homo sapien
ccaaagccgccctggtaaccgtctg

SEQ ID NO: 5157104 - DNA, 25 bp, Homo sapien
gaatggagtccagggcgctgctccc

SEQ ID NO: 5157105 - DNA, 25 bp, Homo sapien
gatgagaatggagtccagggcgctg

SEQ ID NO: 5157106 - DNA, 25 bp, Homo sapien
tgagaatggagtccagggcgctgct

SEQ ID NO: 5157107 - DNA, 25 bp, Homo sapien
cccagggagtctgacctttttcaat

SEQ ID NO: 5157108 - DNA, 25 bp, Homo sapien
ggaagttccttgctagtcagtgaca

SEQ ID NO: 5157109 - DNA, 25 bp, Homo sapien
tgctgttagaacatccttcgggact

SEQ ID NO: 5157110 - DNA, 25 bp, Homo sapien
gagcgttcagccctttagatggcga

SEQ ID NO: 5157111 - DNA, 25 bp, Homo sapien
tctttccatgtgacagccacgaggc

SEQ ID NO: 5157112 - DNA, 25 bp, Homo sapien
gataatctgtgttgcaggcgtcctg

SEQ ID NO: 5157113 - DNA, 25 bp, Homo sapien
tctccagatgttgttaagtgtgccc

SEQ ID NO: 5157114 - DNA, 25 bp, Homo sapien
caaaactgacttcaattgggaacca

SEQ ID NO: 5157115 - DNA, 25 bp, Homo sapien
taactccggcactattgacgtttgg

SEQ ID NO: 5157116 - DNA, 25 bp, Homo sapien
tgaattctcagctctaaactaaatc

SEQ ID NO: 5157117 - DNA, 25 bp, Homo sapien
caataaaattatgatggctggataa

SEQ ID NO: 5157118 - DNA, 25 bp, Homo sapien
actcaataaaattatgatggctgga

SEQ ID NO: 5157119 - DNA, 25 bp, Homo sapien
tgccagagcccctatggctgtccag

SEQ ID NO: 5157120 - DNA, 25 bp, Homo sapien
tttttaagccatttgttgtattcta

SEQ ID NO: 5157121 - DNA, 25 bp, Homo sapien
ttttaagccatttgttgtattctat

SEQ ID NO: 5157122 - DNA, 25 bp, Homo sapien
tttaagccatttgttgtattctatt

SEQ ID NO: 5157123 - DNA, 25 bp, Homo sapien
ttctgagaaattgggactacaggtg

SEQ ID NO: 5157124 - DNA, 25 bp, Homo sapien
ctacaggtgtgagccaccacgcccg

SEQ ID NO: 5157125 - DNA, 25 bp, Homo sapien
cctcagccttctgagaaattgggac

SEQ ID NO: 5157126 - DNA, 25 bp, Homo sapien
caatccacctgcctcggcctcacaa

SEQ ID NO: 5157127 - DNA, 25 bp, Homo sapien
catgtagtctcctagcccaagatgg

SEQ ID NO: 5157128 - DNA, 25 bp, Homo sapien
ggtacttcctctgacacctcattgg

SEQ ID NO: 5157129 - DNA, 25 bp, Homo sapien
gatgtgaccccatctttctaggcta

SEQ ID NO: 5157130 - DNA, 25 bp, Homo sapien
ctgttttccagcgagagagatcaaa

SEQ ID NO: 5157131 - DNA, 25 bp, Homo sapien
cagccatcccaccacaattatacct

SEQ ID NO: 5157132 - DNA, 25 bp, Homo sapien
catcccaccacaattataccttgtg

SEQ ID NO: 5157133 - DNA, 25 bp, Homo sapien
acaattataccttgtggcaaggtcc

SEQ ID NO: 5157134 - DNA, 25 bp, Homo sapien
ccaccacaattataccttgtggcaa

SEQ ID NO: 5157135 - DNA, 25 bp, Homo sapien
atcgcttggcatccaggggaacagg

SEQ ID NO: 5157136 - DNA, 25 bp, Homo sapien
cccatcgcttggcatccaggggaac

SEQ ID NO: 5157137 - DNA, 25 bp, Homo sapien
tcaggcccatcgcttggcatccagg

SEQ ID NO: 5157138 - DNA, 25 bp, Homo sapien
caggcccatcgcttggcatccaggg

SEQ ID NO: 5157139 - DNA, 25 bp, Homo sapien
ctcattccacagaataccactgctg

SEQ ID NO: 5157140 - DNA, 25 bp, Homo sapien
gaccaagacaagtgggcagctcaac

SEQ ID NO: 5157141 - DNA, 25 bp, Homo sapien
gatggagactgtgtggctgtggtcc

SEQ ID NO: 5157142 - DNA, 25 bp, Homo sapien
cactgcacatccaaagtcctgaggg

SEQ ID NO: 5157143 - DNA, 25 bp, Homo sapien
ccaaaaatatgcctaagtgtgttcc

SEQ ID NO: 5157144 - DNA, 25 bp, Homo sapien
aaaatatgcctaagtgtgttccatc

SEQ ID NO: 5157145 - DNA, 25 bp, Homo sapien
gaccaaaaatatgcctaagtgtgtt

SEQ ID NO: 5157146 - DNA, 25 bp, Homo sapien
ctttgaccaaaaatatgcctaagtg

SEQ ID NO: 5157147 - DNA, 25 bp, Homo sapien
gactttgcttcatctgctaccctca

SEQ ID NO: 5157148 - DNA, 25 bp, Homo sapien
gcatttactttgagcattgtgttgg

SEQ ID NO: 5157149 - DNA, 25 bp, Homo sapien
tcaggttttggagcacttccgattt

SEQ ID NO: 5157150 - DNA, 25 bp, Homo sapien
gattctactactcgcctgccagctt

SEQ ID NO: 5157151 - DNA, 25 bp, Homo sapien
gctccttatagccaaagatgctcag

SEQ ID NO: 5157152 - DNA, 25 bp, Homo sapien
gaatgtgactctgctccttatagcc

SEQ ID NO: 5157153 - DNA, 25 bp, Homo sapien
cagagtggcacttttgaaacaaaaa

SEQ ID NO: 5157154 - DNA, 25 bp, Homo sapien
taggaaagtgtcatacaggttgagt

SEQ ID NO: 5157155 - DNA, 25 bp, Homo sapien
aggactcctgagaaatgtgtacacg

SEQ ID NO: 5157156 - DNA, 25 bp, Homo sapien
caaaggcaggtacattgctctgtcc

SEQ ID NO: 5157157 - DNA, 25 bp, Homo sapien
tagaaagggcttaatccacctggaa

SEQ ID NO: 5157158 - DNA, 25 bp, Homo sapien
gttcaatgcagaagtccagcctctt

SEQ ID NO: 5157159 - DNA, 25 bp, Homo sapien
cagaatttcgaaggagtaatacttt

SEQ ID NO: 5157160 - DNA, 25 bp, Homo sapien
tgattccctggtgtgctgactggca

SEQ ID NO: 5157161 - DNA, 25 bp, Homo sapien
atgaattcaaattctccagctgcag

SEQ ID NO: 5157162 - DNA, 25 bp, Homo sapien
cattcgtctccaggaagtttctgaa

SEQ ID NO: 5157163 - DNA, 25 bp, Homo sapien
tccatggcgcttgggatcgcagctc

SEQ ID NO: 5157164 - DNA, 25 bp, Homo sapien
tcctcagtgagttcggcgtggaccg

SEQ ID NO: 5157165 - DNA, 25 bp, Homo sapien
gcagcagcccacctttggcacgtat

SEQ ID NO: 5157166 - DNA, 25 bp, Homo sapien
actgaaaggctagcggcctccatgg

SEQ ID NO: 5157167 - DNA, 25 bp, Homo sapien
aggaaagtggcagcgatcagcagca

SEQ ID NO: 5157168 - DNA, 25 bp, Homo sapien
agcactagcagcgtcaccaccagga

SEQ ID NO: 5157169 - DNA, 25 bp, Homo sapien
tcaccaccaggaccgtgaagacaga

SEQ ID NO: 5157170 - DNA, 25 bp, Homo sapien
acaggaaagtggcagcgatcagcag

SEQ ID NO: 5157171 - DNA, 25 bp, Homo sapien
gccaccaagttatgcggcacgcggt

SEQ ID NO: 5157172 - DNA, 25 bp, Homo sapien
tagttcgtccgagacggccgtcgag

SEQ ID NO: 5157173 - DNA, 25 bp, Homo sapien
ggccgtcgaggccaccaagttatgc

SEQ ID NO: 5157174 - DNA, 25 bp, Homo sapien
ggtggcatcgccagcgctgccacta

SEQ ID NO: 5157175 - DNA, 25 bp, Homo sapien
tccggcccagcagccgacgtcgccc

SEQ ID NO: 5157176 - DNA, 25 bp, Homo sapien
agcagccgacgtcgcccggtcgaca

SEQ ID NO: 5157177 - DNA, 25 bp, Homo sapien
cccggtcgacagctcactcgccagg

SEQ ID NO: 5157178 - DNA, 25 bp, Homo sapien
gacgtcgcccggtcgacagctcact

SEQ ID NO: 5157179 - DNA, 25 bp, Homo sapien
ctccggcgtcgaaggagatccacac

SEQ ID NO: 5157180 - DNA, 25 bp, Homo sapien
gcagcacagccgtggaaggagatcc

SEQ ID NO: 5157181 - DNA, 25 bp, Homo sapien
gtgccgtgtgatggccccgtcgcgg

SEQ ID NO: 5157182 - DNA, 25 bp, Homo sapien
agggcgatggccgccacgttcccga

SEQ ID NO: 5157183 - DNA, 25 bp, Homo sapien
tgcaggtgccgtgtgatggccccgt

SEQ ID NO: 5157184 - DNA, 25 bp, Homo sapien
atcatgagcaacgaggcgcggctgc

SEQ ID NO: 5157185 - DNA, 25 bp, Homo sapien
gatcttccggtagacaaacggcacc

SEQ ID NO: 5157186 - DNA, 25 bp, Homo sapien
catggtggccggcaacggcagcaca

SEQ ID NO: 5157187 - DNA, 25 bp, Homo sapien
cataggagggttcccggctcacctg

SEQ ID NO: 5157188 - DNA, 25 bp, Homo sapien
tgggcgcgcgctccattagtacaag

SEQ ID NO: 5157189 - DNA, 25 bp, Homo sapien
tgatggcaaacttgtcctcgtgcgc

SEQ ID NO: 5157190 - DNA, 25 bp, Homo sapien
cccgcttcagaagaactgatggcaa

SEQ ID NO: 5157191 - DNA, 25 bp, Homo sapien
tcacttgcgtgccaggtgagccggt

SEQ ID NO: 5157192 - DNA, 25 bp, Homo sapien
ctaacgtgcagattgtgaaaccctt

SEQ ID NO: 5157193 - DNA, 25 bp, Homo sapien
tttctctccatcctcctccgttatt

SEQ ID NO: 5157194 - DNA, 25 bp, Homo sapien
ttgttatatctcttttgtttctctc

SEQ ID NO: 5157195 - DNA, 25 bp, Homo sapien
tgtttctctccatcctcctccgtta

SEQ ID NO: 5157196 - DNA, 25 bp, Homo sapien
tctctccatcctcctccgttattct

SEQ ID NO: 5157197 - DNA, 25 bp, Homo sapien
gacagtggtacagagtaggccctca

SEQ ID NO: 5157198 - DNA, 25 bp, Homo sapien
ggccctcagtaaaggtcaacttcat

SEQ ID NO: 5157199 - DNA, 25 bp, Homo sapien
ctgaaggagacagtggtacagagta

SEQ ID NO: 5157200 - DNA, 25 bp, Homo sapien
taggccctcagtaaaggtcaacttc

SEQ ID NO: 5157201 - DNA, 25 bp, Homo sapien
ctctatcacaggctcattgtgagga

SEQ ID NO: 5157202 - DNA, 25 bp, Homo sapien
tgtgccgtgaacaccacttcagcct

SEQ ID NO: 5157203 - DNA, 25 bp, Homo sapien
tcatctctgcttagtaaagaggctc

SEQ ID NO: 5157204 - DNA, 25 bp, Homo sapien
ggctgatgagttccgtcaggaagaa

SEQ ID NO: 5157205 - DNA, 25 bp, Homo sapien
gacaccgttgctttgcaatgtgccg

SEQ ID NO: 5157206 - DNA, 25 bp, Homo sapien
tagctgcctagggtgctgtcctgga

SEQ ID NO: 5157207 - DNA, 25 bp, Homo sapien
ggattctgagaccaagttcctgctc

SEQ ID NO: 5157208 - DNA, 25 bp, Homo sapien
gcattagcactcagctgtggaggga

SEQ ID NO: 5157209 - DNA, 25 bp, Homo sapien
cagatcactgacgaaaaagtccaag

SEQ ID NO: 5157210 - DNA, 25 bp, Homo sapien
tacggtgaataaaggatgtagagag

SEQ ID NO: 5157211 - DNA, 25 bp, Homo sapien
aattgggatacactatcctgttggg

SEQ ID NO: 5157212 - DNA, 25 bp, Homo sapien
aggctgaggaagataagctaagtac

SEQ ID NO: 5157213 - DNA, 25 bp, Homo sapien
acaaattgggatacactatcctgtt

SEQ ID NO: 5157214 - DNA, 25 bp, Homo sapien
cggtgtctatcaaaagtgcaaatgc

SEQ ID NO: 5157215 - DNA, 25 bp, Homo sapien
gcatatgcctaggatgtctctggga

SEQ ID NO: 5157216 - DNA, 25 bp, Homo sapien
tgtgtactaccatagaatgggcccc

SEQ ID NO: 5157217 - DNA, 25 bp, Homo sapien
ggccccaagatgcatgattaagtga

SEQ ID NO: 5157218 - DNA, 25 bp, Homo sapien
aagtaagggcttgtcttaccacact

SEQ ID NO: 5157219 - DNA, 25 bp, Homo sapien
tgactgggaaattccggttggataa

SEQ ID NO: 5157220 - DNA, 25 bp, Homo sapien
tccccagcatctagctcaaggtaga

SEQ ID NO: 5157221 - DNA, 25 bp, Homo sapien
tgtccagtggccctgcgcaacaaaa

SEQ ID NO: 5157222 - DNA, 25 bp, Homo sapien
ccgtatagggtaaggagatgcccca

SEQ ID NO: 5157223 - DNA, 25 bp, Homo sapien
gggacctcctgaaaccttgagcaga

SEQ ID NO: 5157224 - DNA, 25 bp, Homo sapien
gtcaggccccagtacgtctctagtg

SEQ ID NO: 5157225 - DNA, 25 bp, Homo sapien
caaaatatgcgcttcaggaggaacc

SEQ ID NO: 5157226 - DNA, 25 bp, Homo sapien
tacacggttttattatatgagcaca

SEQ ID NO: 5157227 - DNA, 25 bp, Homo sapien
cacagttaacatttcgggctagata

SEQ ID NO: 5157228 - DNA, 25 bp, Homo sapien
ggcaaaatagctcctagttgagaat

SEQ ID NO: 5157229 - DNA, 25 bp, Homo sapien
cagtagcacccacttctcgcagttg

SEQ ID NO: 5157230 - DNA, 25 bp, Homo sapien
tacgtcagatggaacagattgtgga

SEQ ID NO: 5157231 - DNA, 25 bp, Homo sapien
tgtgcgttacaaagacctgattgcc

SEQ ID NO: 5157232 - DNA, 25 bp, Homo sapien
gctaatttccatgccttctcagagg

SEQ ID NO: 5157233 - DNA, 25 bp, Homo sapien
tgtgtgccggtcataactctactgg

SEQ ID NO: 5157234 - DNA, 25 bp, Homo sapien
tataccccacggtagaggcagagct

SEQ ID NO: 5157235 - DNA, 25 bp, Homo sapien
gcacagtaactgacaccatgtaggt

SEQ ID NO: 5157236 - DNA, 25 bp, Homo sapien
gaataccttgctggcatagcagctg

SEQ ID NO: 5157237 - DNA, 25 bp, Homo sapien
aatgattagatgcagtaaacccggg

SEQ ID NO: 5157238 - DNA, 25 bp, Homo sapien
gaggtttcagtgcttaagaggattt

SEQ ID NO: 5157239 - DNA, 25 bp, Homo sapien
cttaagcactattccttatgacccc

SEQ ID NO: 5157240 - DNA, 25 bp, Homo sapien
aatgagaactctcgtcttaagcact

SEQ ID NO: 5157241 - DNA, 25 bp, Homo sapien
tcttactggctgtgtagggatctat

SEQ ID NO: 5157242 - DNA, 25 bp, Homo sapien
gctactcagcactaggtcccattgg

SEQ ID NO: 5157243 - DNA, 25 bp, Homo sapien
taacatcttggatacccagctggtt

SEQ ID NO: 5157244 - DNA, 25 bp, Homo sapien
ttaaagctcctgcacggctactcag

SEQ ID NO: 5157245 - DNA, 25 bp, Homo sapien
ccagctggttgcttttcctatagaa

SEQ ID NO: 5157246 - DNA, 25 bp, Homo sapien
gtacatcaaataagggacgcggcgg

SEQ ID NO: 5157247 - DNA, 25 bp, Homo sapien
gaaaacttcagagtacgggcgcgat

SEQ ID NO: 5157248 - DNA, 25 bp, Homo sapien
gagcaagatataccacacaggaggg

SEQ ID NO: 5157249 - DNA, 25 bp, Homo sapien
gacgcggcggctcaaatgacatgaa

SEQ ID NO: 5157250 - DNA, 25 bp, Homo sapien
ataagcaggtgccacctagccctgt

SEQ ID NO: 5157251 - DNA, 25 bp, Homo sapien
tttcaactcattattaaaggcactt

SEQ ID NO: 5157252 - DNA, 25 bp, Homo sapien
aaaggcacttatttcaacatgcgtc

SEQ ID NO: 5157253 - DNA, 25 bp, Homo sapien
gactgtgcatgctcatcccagagct

SEQ ID NO: 5157254 - DNA, 25 bp, Homo sapien
ctgtgctgtgatgattggttgactg

SEQ ID NO: 5157255 - DNA, 25 bp, Homo sapien
ttaagatcttcttgccctaagaaat

SEQ ID NO: 5157256 - DNA, 25 bp, Homo sapien
cacagatggtgattttctcagttcc

SEQ ID NO: 5157257 - DNA, 25 bp, Homo sapien
taaaatatcacagatggtgattttc

SEQ ID NO: 5157258 - DNA, 25 bp, Homo sapien
cttcttgccctaagaaataaaatat

SEQ ID NO: 5157259 - DNA, 25 bp, Homo sapien
caaaagcacccccagcagaaacggt

SEQ ID NO: 5157260 - DNA, 25 bp, Homo sapien
ctacgcaaaagcacccccagcagaa

SEQ ID NO: 5157261 - DNA, 25 bp, Homo sapien
acgcaaaagcacccccagcagaaac

SEQ ID NO: 5157262 - DNA, 25 bp, Homo sapien
gcaaaagcacccccagcagaaacgg

SEQ ID NO: 5157263 - DNA, 25 bp, Homo sapien
actgcagtgggaatggtctgaagtt

SEQ ID NO: 5157264 - DNA, 25 bp, Homo sapien
gtttcgtcattgaaatggacagaga

SEQ ID NO: 5157265 - DNA, 25 bp, Homo sapien
gatgcttgtgtagaacaaagaaggg

SEQ ID NO: 5157266 - DNA, 25 bp, Homo sapien
tgggaatggtctgaagtttcgtcat

SEQ ID NO: 5157267 - DNA, 25 bp, Homo sapien
gctgctctgtagtaatcctgttcag

SEQ ID NO: 5157268 - DNA, 25 bp, Homo sapien
tctttgctgctctgtagtaatcctg

SEQ ID NO: 5157269 - DNA, 25 bp, Homo sapien
gctctgtagtaatcctgttcagtcc

SEQ ID NO: 5157270 - DNA, 25 bp, Homo sapien
cctttggtgccccacttctttgctg

SEQ ID NO: 5157271 - DNA, 25 bp, Homo sapien
cgaatgttcactcgcattaagtgag

SEQ ID NO: 5157272 - DNA, 25 bp, Homo sapien
ctcgaatgttcactcgcattaagtg

SEQ ID NO: 5157273 - DNA, 25 bp, Homo sapien
aatgttcactcgcattaagtgaggg

SEQ ID NO: 5157274 - DNA, 25 bp, Homo sapien
ctccctcgaatgttcactcgcatta

SEQ ID NO: 5157275 - DNA, 25 bp, Homo sapien
ttgtgataattgttttcccttgatg

SEQ ID NO: 5157276 - DNA, 25 bp, Homo sapien
ctttgtgataattgttttcccttga

SEQ ID NO: 5157277 - DNA, 25 bp, Homo sapien
gataattgttttcccttgatgtctg

SEQ ID NO: 5157278 - DNA, 25 bp, Homo sapien
gtgataattgttttcccttgatgtc

SEQ ID NO: 5157279 - DNA, 25 bp, Homo sapien
ccaccttgactggctttaacctttg

SEQ ID NO: 5157280 - DNA, 25 bp, Homo sapien
aaggatgcttccgtgacagcgaggt

SEQ ID NO: 5157281 - DNA, 25 bp, Homo sapien
aaaggatgcttccgtgacagcgagg

SEQ ID NO: 5157282 - DNA, 25 bp, Homo sapien
cttgactggctttaacctttgccca

SEQ ID NO: 5157283 - DNA, 25 bp, Homo sapien
tgccctcagctctcgaaggtcaaat

SEQ ID NO: 5157284 - DNA, 25 bp, Homo sapien
ctgccctcagctctcgaaggtcaaa

SEQ ID NO: 5157285 - DNA, 25 bp, Homo sapien
ggaggacgatccacattctcagcct

SEQ ID NO: 5157286 - DNA, 25 bp, Homo sapien
gggaccactatgaacaaagttgaag

SEQ ID NO: 5157287 - DNA, 25 bp, Homo sapien
caggtcttccctggacagcgtcttc

SEQ ID NO: 5157288 - DNA, 25 bp, Homo sapien
taaaagtagggaccactatgaacaa

SEQ ID NO: 5157289 - DNA, 25 bp, Homo sapien
ccaccaggagtgaaagagcttgtaa

SEQ ID NO: 5157290 - DNA, 25 bp, Homo sapien
aaatgctgttaagtgccaccaggag

SEQ ID NO: 5157291 - DNA, 25 bp, Homo sapien
tctgttcaggccaatattgaggctc

SEQ ID NO: 5157292 - DNA, 25 bp, Homo sapien
agcaggattcgtggcgatgtcatca

SEQ ID NO: 5157293 - DNA, 25 bp, Homo sapien
aaaactttaagtcatccctcctgtg

SEQ ID NO: 5157294 - DNA, 25 bp, Homo sapien
ggattggtgaccaagctcctgacaa

SEQ ID NO: 5157295 - DNA, 25 bp, Homo sapien
tctatattctggagccggaaatgcc

SEQ ID NO: 5157296 - DNA, 25 bp, Homo sapien
cttaaactgggagctcttgtcatca

SEQ ID NO: 5157297 - DNA, 25 bp, Homo sapien
tcagcccacctctacagaagcaagt

SEQ ID NO: 5157298 - DNA, 25 bp, Homo sapien
aatgcagaagttaggtcagcccacc

SEQ ID NO: 5157299 - DNA, 25 bp, Homo sapien
tacagaagcaagtcaactgagaact

SEQ ID NO: 5157300 - DNA, 25 bp, Homo sapien
cctggaaatgcagaagttaggtcag

SEQ ID NO: 5157301 - DNA, 25 bp, Homo sapien
tcctccactcccacaactccgcccg

SEQ ID NO: 5157302 - DNA, 25 bp, Homo sapien
ccactcccacaactccgcccgagct

SEQ ID NO: 5157303 - DNA, 25 bp, Homo sapien
ctccactcccacaactccgcccgag

SEQ ID NO: 5157304 - DNA, 25 bp, Homo sapien
actcccacaactccgcccgagctcc

SEQ ID NO: 5157305 - DNA, 25 bp, Homo sapien
gcttcgccgggagacccccaactca

SEQ ID NO: 5157306 - DNA, 25 bp, Homo sapien
ggccgctttcctcagcaccacgtca

SEQ ID NO: 5157307 - DNA, 25 bp, Homo sapien
ccctctcaggtaagcggagcccctt

SEQ ID NO: 5157308 - DNA, 25 bp, Homo sapien
ctcctcaggccgctttcctcagcac

SEQ ID NO: 5157309 - DNA, 25 bp, Homo sapien
ctctcaggtaagcggagccccttgc

SEQ ID NO: 5157310 - DNA, 25 bp, Homo sapien
gcttggtcactgtacagcagatgtg

SEQ ID NO: 5157311 - DNA, 25 bp, Homo sapien
attttttctgcaccaggacgggagc

SEQ ID NO: 5157312 - DNA, 25 bp, Homo sapien
cacaatgacaaaacacagtactgag

SEQ ID NO: 5157313 - DNA, 25 bp, Homo sapien
cagatgtgaactgagaactacgaca

SEQ ID NO: 5157314 - DNA, 25 bp, Homo sapien
tgtcctaaagtaggacctaccagaa

SEQ ID NO: 5157315 - DNA, 25 bp, Homo sapien
gacgcttcaacggtaccacatcttg

SEQ ID NO: 5157316 - DNA, 25 bp, Homo sapien
tcataggttcagaaagccgttaaaa

SEQ ID NO: 5157317 - DNA, 25 bp, Homo sapien
ctgtgaatcaaagactgacgcttca

SEQ ID NO: 5157318 - DNA, 25 bp, Homo sapien
caatcacatcaggtggaaagagcgt

SEQ ID NO: 5157319 - DNA, 25 bp, Homo sapien
aaaaatagcactactcctcgaatca

SEQ ID NO: 5157320 - DNA, 25 bp, Homo sapien
tactcctcgaatcatcaagttcaca

SEQ ID NO: 5157321 - DNA, 25 bp, Homo sapien
tctgaagtaaatttaacactaatgc

SEQ ID NO: 5157322 - DNA, 25 bp, Homo sapien
ctgaagccgtgccacagcatggggg

SEQ ID NO: 5157323 - DNA, 25 bp, Homo sapien
gccgtgccacagcatgggggtaccc

SEQ ID NO: 5157324 - DNA, 25 bp, Homo sapien
aagccgtgccacagcatgggggtac

SEQ ID NO: 5157325 - DNA, 25 bp, Homo sapien
cgtgccacagcatgggggtacccac

SEQ ID NO: 5157326 - DNA, 25 bp, Homo sapien
cttcagaaacaagactacagcacat

SEQ ID NO: 5157327 - DNA, 25 bp, Homo sapien
gagtacatacgttatgagcccattt

SEQ ID NO: 5157328 - DNA, 25 bp, Homo sapien
tgagatgggttgaagaaagaacaaa

SEQ ID NO: 5157329 - DNA, 25 bp, Homo sapien
cagcacatgcatcaaacccttaaaa

SEQ ID NO: 5157330 - DNA, 25 bp, Homo sapien
tcatacgtttggacacaaccaggct

SEQ ID NO: 5157331 - DNA, 25 bp, Homo sapien
gaggtcttgaaaatccacgccaaca

SEQ ID NO: 5157332 - DNA, 25 bp, Homo sapien
taattccaattctggtgcatggcac

SEQ ID NO: 5157333 - DNA, 25 bp, Homo sapien
taagatggtaagaccctagcgaggt

SEQ ID NO: 5157334 - DNA, 25 bp, Homo sapien
aaactgctggtgttaagaggaagct

SEQ ID NO: 5157335 - DNA, 25 bp, Homo sapien
gcttcagacacaaagggagctgcag

SEQ ID NO: 5157336 - DNA, 25 bp, Homo sapien
aactgctggtgttaagaggaagctg

SEQ ID NO: 5157337 - DNA, 25 bp, Homo sapien
tgctggtgttaagaggaagctgtaa

SEQ ID NO: 5157338 - DNA, 25 bp, Homo sapien
tacttaagccctgacaatatgtctg

SEQ ID NO: 5157339 - DNA, 25 bp, Homo sapien
tgcagggaggcactaaaaggaacac

SEQ ID NO: 5157340 - DNA, 25 bp, Homo sapien
ggaacacagttaaagtcagacattt

SEQ ID NO: 5157341 - DNA, 25 bp, Homo sapien
catgaggtatacttcgacgcaaaac

SEQ ID NO: 5157342 - DNA, 25 bp, Homo sapien
gaggctgtaggtcatattgtcaaag

SEQ ID NO: 5157343 - DNA, 25 bp, Homo sapien
aaggttctggctggcctcttacgta

SEQ ID NO: 5157344 - DNA, 25 bp, Homo sapien
tcttacgtagatcagtctcgcccct

SEQ ID NO: 5157345 - DNA, 25 bp, Homo sapien
cagcttcccgttttagtcttcagca

SEQ ID NO: 5157346 - DNA, 25 bp, Homo sapien
gactggactaaatgattcgtgctac

SEQ ID NO: 5157347 - DNA, 25 bp, Homo sapien
tcgtgctactaaatgattcatgcta

SEQ ID NO: 5157348 - DNA, 25 bp, Homo sapien
tgatacctacgagacctgaaaaaag

SEQ ID NO: 5157349 - DNA, 25 bp, Homo sapien
aaagtatcaaaccagttagcagtta

SEQ ID NO: 5157350 - DNA, 25 bp, Homo sapien
aaatttatgtggttctcctagatgt

SEQ ID NO: 5157351 - DNA, 25 bp, Homo sapien
aatgcaggggtataataacccaatc

SEQ ID NO: 5157352 - DNA, 25 bp, Homo sapien
ctcctagatgtctgtcaatgcaggg

SEQ ID NO: 5157353 - DNA, 25 bp, Homo sapien
gcaggggtataataacccaatcaca

SEQ ID NO: 5157354 - DNA, 25 bp, Homo sapien
caaagactgctacacaccgcattac

SEQ ID NO: 5157355 - DNA, 25 bp, Homo sapien
acaaagactgctacacaccgcatta

SEQ ID NO: 5157356 - DNA, 25 bp, Homo sapien
caacaaagactgctacacaccgcat

SEQ ID NO: 5157357 - DNA, 25 bp, Homo sapien
aacaaagactgctacacaccgcatt

SEQ ID NO: 5157358 - DNA, 25 bp, Homo sapien
aatcttaaaatagtgccatatgggc

SEQ ID NO: 5157359 - DNA, 25 bp, Homo sapien
cttaaaatagtgccatatgggccag

SEQ ID NO: 5157360 - DNA, 25 bp, Homo sapien
atcttaaaatagtgccatatgggcc

SEQ ID NO: 5157361 - DNA, 25 bp, Homo sapien
tcttaaaatagtgccatatgggcca

SEQ ID NO: 5157362 - DNA, 25 bp, Homo sapien
aagaaattgcaacgaagccatttcc

SEQ ID NO: 5157363 - DNA, 25 bp, Homo sapien
gaaattgcaacgaagccatttccca

SEQ ID NO: 5157364 - DNA, 25 bp, Homo sapien
aattgcaacgaagccatttcccact

SEQ ID NO: 5157365 - DNA, 25 bp, Homo sapien
aaaagaaattgcaacgaagccattt

SEQ ID NO: 5157366 - DNA, 25 bp, Homo sapien
ctggtataggacagtttgctcaaat

SEQ ID NO: 5157367 - DNA, 25 bp, Homo sapien
catcacctacttaagcatctattca

SEQ ID NO: 5157368 - DNA, 25 bp, Homo sapien
cctacttaagcatctattcacaaat

SEQ ID NO: 5157369 - DNA, 25 bp, Homo sapien
ggtataggacagtttgctcaaatga

SEQ ID NO: 5157370 - DNA, 25 bp, Homo sapien
acctgccaagctattttggtgcctg

SEQ ID NO: 5157371 - DNA, 25 bp, Homo sapien
gaacattatcttacaacctgccaag

SEQ ID NO: 5157372 - DNA, 25 bp, Homo sapien
caaggacacagtatccctttctatt

SEQ ID NO: 5157373 - DNA, 25 bp, Homo sapien
taaagccttgaagtgaacattatct

SEQ ID NO: 5157374 - DNA, 25 bp, Homo sapien
aaaccaatattacttctccaacagg

SEQ ID NO: 5157375 - DNA, 25 bp, Homo sapien
acttgagaatcgtacaggaacttga

SEQ ID NO: 5157376 - DNA, 25 bp, Homo sapien
tatcactaaaggaacacacttttgc

SEQ ID NO: 5157377 - DNA, 25 bp, Homo sapien
taacagggtaccacattctctctat

SEQ ID NO: 5157378 - DNA, 25 bp, Homo sapien
ctgagatcagtgttaagaagtcatc

SEQ ID NO: 5157379 - DNA, 25 bp, Homo sapien
tagatctatcaaaagtccaccacag

SEQ ID NO: 5157380 - DNA, 25 bp, Homo sapien
tgagtgaccacagttgccaagaagg

SEQ ID NO: 5157381 - DNA, 25 bp, Homo sapien
tagtgcagccagtgtgagagacaac

SEQ ID NO: 5157382 - DNA, 25 bp, Homo sapien
gaaggcaattcctactccaaggcca

SEQ ID NO: 5157383 - DNA, 25 bp, Homo sapien
gattaaactggctaacctcatttca

SEQ ID NO: 5157384 - DNA, 25 bp, Homo sapien
gacatgtctttaatacccacagagg

SEQ ID NO: 5157385 - DNA, 25 bp, Homo sapien
gaactgcaatgacacttaagataat

SEQ ID NO: 5157386 - DNA, 25 bp, Homo sapien
tctcaattctgaaagcggttatcat

SEQ ID NO: 5157387 - DNA, 25 bp, Homo sapien
gccagttgtcgaccaatgtttccca

SEQ ID NO: 5157388 - DNA, 25 bp, Homo sapien
tgtttcccattgttatgcctccagc

SEQ ID NO: 5157389 - DNA, 25 bp, Homo sapien
tggtaaccaagaacgaacatagagg

SEQ ID NO: 5157390 - DNA, 25 bp, Homo sapien
tatacatggtaaccaagaacgaaca

SEQ ID NO: 5157391 - DNA, 25 bp, Homo sapien
tgccctatccataacacattttgag

SEQ ID NO: 5157392 - DNA, 25 bp, Homo sapien
cagtggctcctcaacttttaaaaca

SEQ ID NO: 5157393 - DNA, 25 bp, Homo sapien
tgattaaattcttccaaatgattta

SEQ ID NO: 5157394 - DNA, 25 bp, Homo sapien
gttccacatcttattcagaaaagtg

SEQ ID NO: 5157395 - DNA, 25 bp, Homo sapien
atgagatttttctgcgataacttta

SEQ ID NO: 5157396 - DNA, 25 bp, Homo sapien
tgagatttttctgcgataactttac

SEQ ID NO: 5157397 - DNA, 25 bp, Homo sapien
ttttctgcgataactttacattcgt

SEQ ID NO: 5157398 - DNA, 25 bp, Homo sapien
tttctgcgataactttacattcgta

SEQ ID NO: 5157399 - DNA, 25 bp, Homo sapien
gggaaaactgcatcctggcaatttt

SEQ ID NO: 5157400 - DNA, 25 bp, Homo sapien
tcacagattgcagtaatatgtgtgt

SEQ ID NO: 5157401 - DNA, 25 bp, Homo sapien
caaatatgtaaaggtttacaactga

SEQ ID NO: 5157402 - DNA, 25 bp, Homo sapien
cagtctgaagttttgttggtatatc

SEQ ID NO: 5157403 - DNA, 25 bp, Homo sapien
gctgtctccagtaacgcaggtttga

SEQ ID NO: 5157404 - DNA, 25 bp, Homo sapien
gagtcatatgactgaacccagctaa

SEQ ID NO: 5157405 - DNA, 25 bp, Homo sapien
tatagtagtatgttttccaccacga

SEQ ID NO: 5157406 - DNA, 25 bp, Homo sapien
taggcattccaccaacgagtcatat

SEQ ID NO: 5157407 - DNA, 25 bp, Homo sapien
catatgcatcattgagaggtcccaa

SEQ ID NO: 5157408 - DNA, 25 bp, Homo sapien
tcagcctactactcagcatgaagat

SEQ ID NO: 5157409 - DNA, 25 bp, Homo sapien
gcacttttgtagaatttatccccag

SEQ ID NO: 5157410 - DNA, 25 bp, Homo sapien
atggttttcagctgtgtgggcccac

SEQ ID NO: 5157411 - DNA, 25 bp, Homo sapien
tgacaggtgtgagctttcctcctac

SEQ ID NO: 5157412 - DNA, 25 bp, Homo sapien
tatgcataactacaccagtgagtgg

SEQ ID NO: 5157413 - DNA, 25 bp, Homo sapien
aaatcctaatgctcagggcataccc

SEQ ID NO: 5157414 - DNA, 25 bp, Homo sapien
caacctgggttgcacatcagaatca

SEQ ID NO: 5157415 - DNA, 25 bp, Homo sapien
ggaaaggaaccaatacttcactgga

SEQ ID NO: 5157416 - DNA, 25 bp, Homo sapien
tggaaagcccttatgagctaagcct

SEQ ID NO: 5157417 - DNA, 25 bp, Homo sapien
taaatgccaatgtgctggctccaca

SEQ ID NO: 5157418 - DNA, 25 bp, Homo sapien
cctgttaactaaccgatgagtggag

SEQ ID NO: 5157419 - DNA, 25 bp, Homo sapien
tcagcacttgtgtaaccgtggggga

SEQ ID NO: 5157420 - DNA, 25 bp, Homo sapien
gaggtctggtaacaggatttccagg

SEQ ID NO: 5157421 - DNA, 25 bp, Homo sapien
cgtgggggagaacttgacaattaat

SEQ ID NO: 5157422 - DNA, 25 bp, Homo sapien
gacaattaatatcctgaggtctggt

SEQ ID NO: 5157423 - DNA, 25 bp, Homo sapien
ggtatttggacctttatccagagcc

SEQ ID NO: 5157424 - DNA, 25 bp, Homo sapien
cactggcttcactacatgcgtgaag

SEQ ID NO: 5157425 - DNA, 25 bp, Homo sapien
gctgccgggagaactaaaactagac

SEQ ID NO: 5157426 - DNA, 25 bp, Homo sapien
gaacttgagtctgctaagcaagctg

SEQ ID NO: 5157427 - DNA, 25 bp, Homo sapien
catatctacgtttgtgattatgtcg

SEQ ID NO: 5157428 - DNA, 25 bp, Homo sapien
caaattgatttgagaggatgtgctg

SEQ ID NO: 5157429 - DNA, 25 bp, Homo sapien
tatgtcgcttaggtctttttatatc

SEQ ID NO: 5157430 - DNA, 25 bp, Homo sapien
gctttttcgaaactgagatgtagag

SEQ ID NO: 5157431 - DNA, 25 bp, Homo sapien
gattctttcctcctgatcgctggtc

SEQ ID NO: 5157432 - DNA, 25 bp, Homo sapien
gatcgctggtccaacctttctccat

SEQ ID NO: 5157433 - DNA, 25 bp, Homo sapien
agtcaatctccgatccccctgggat

SEQ ID NO: 5157434 - DNA, 25 bp, Homo sapien
tcctgatcgctggtccaacctttct

SEQ ID NO: 5157435 - DNA, 25 bp, Homo sapien
ggactcctctagccaaagcccttcc

SEQ ID NO: 5157436 - DNA, 25 bp, Homo sapien
aggactcctctagccaaagcccttc

SEQ ID NO: 5157437 - DNA, 25 bp, Homo sapien
gccagtagaacctggttctcgattg

SEQ ID NO: 5157438 - DNA, 25 bp, Homo sapien
acctgacttggccagtagaacctgg

SEQ ID NO: 5157439 - DNA, 25 bp, Homo sapien
tcctcatgtggttccctcagcttca

SEQ ID NO: 5157440 - DNA, 25 bp, Homo sapien
gccaacctggagcaaaatgaagaga

SEQ ID NO: 5157441 - DNA, 25 bp, Homo sapien
cccctggagctcgagagagatacca

SEQ ID NO: 5157442 - DNA, 25 bp, Homo sapien
taaggcccatgtatatgcaagcagt

SEQ ID NO: 5157443 - DNA, 25 bp, Homo sapien
gagataccagcctgtcatgtccctg

SEQ ID NO: 5157444 - DNA, 25 bp, Homo sapien
caagcagttgggagttattacgggc

SEQ ID NO: 5157445 - DNA, 25 bp, Homo sapien
tgcacaaagaacaagttccccaact

SEQ ID NO: 5157446 - DNA, 25 bp, Homo sapien
gctaaaataccaggaaacaaatcaa

SEQ ID NO: 5157447 - DNA, 25 bp, Homo sapien
caggacaaagacgccactgcacaaa

SEQ ID NO: 5157448 - DNA, 25 bp, Homo sapien
tccagggctaaaataccaggaaaca

SEQ ID NO: 5157449 - DNA, 25 bp, Homo sapien
gagcccctatcgctgggtaatgaac

SEQ ID NO: 5157450 - DNA, 25 bp, Homo sapien
cagtttaccttggatggagtgggcc

SEQ ID NO: 5157451 - DNA, 25 bp, Homo sapien
tgaagttgccctttacagggtggga

SEQ ID NO: 5157452 - DNA, 25 bp, Homo sapien
gccctagaaacagcccagtggattt

SEQ ID NO: 5157453 - DNA, 25 bp, Homo sapien
gatttcactgatcattagcccatgg

SEQ ID NO: 5157454 - DNA, 25 bp, Homo sapien
ccaggcaaagcggtccagtggcttc

SEQ ID NO: 5157455 - DNA, 25 bp, Homo sapien
ttgtggattagctgggcctctcggc

SEQ ID NO: 5157456 - DNA, 25 bp, Homo sapien
ggcggatgatccaatttgtggatta

SEQ ID NO: 5157457 - DNA, 25 bp, Homo sapien
ctctgcgtgctgatgatcaaagaga

SEQ ID NO: 5157458 - DNA, 25 bp, Homo sapien
tgtgtcctctgcgtgctgatgatca

SEQ ID NO: 5157459 - DNA, 25 bp, Homo sapien
tgtcctctgcgtgctgatgatcaaa

SEQ ID NO: 5157460 - DNA, 25 bp, Homo sapien
tcctctgcgtgctgatgatcaaaga

SEQ ID NO: 5157461 - DNA, 25 bp, Homo sapien
cagcctcgaattccccagaggactc

SEQ ID NO: 5157462 - DNA, 25 bp, Homo sapien
gcctcgaattccccagaggactccc

SEQ ID NO: 5157463 - DNA, 25 bp, Homo sapien
ctcgaattccccagaggactcccac

SEQ ID NO: 5157464 - DNA, 25 bp, Homo sapien
cctcgaattccccagaggactccca

SEQ ID NO: 5157465 - DNA, 25 bp, Homo sapien
cattaaaacagtacccagggacact

SEQ ID NO: 5157466 - DNA, 25 bp, Homo sapien
gacactgggattttttagtcctgca

SEQ ID NO: 5157467 - DNA, 25 bp, Homo sapien
atttcaattctctcctcgctgtcac

SEQ ID NO: 5157468 - DNA, 25 bp, Homo sapien
catttgaattgtatctggccaaaca

SEQ ID NO: 5157469 - DNA, 25 bp, Homo sapien
tctgctgaggcccagatgtcacttg

SEQ ID NO: 5157470 - DNA, 25 bp, Homo sapien
ctgctgaggcccagatgtcacttgt

SEQ ID NO: 5157471 - DNA, 25 bp, Homo sapien
ctcttttgggccccactgaagacag

SEQ ID NO: 5157472 - DNA, 25 bp, Homo sapien
gggttctgtaaacatggagcctctt

SEQ ID NO: 5157473 - DNA, 25 bp, Homo sapien
ccctttgtactggacactgtgagta

SEQ ID NO: 5157474 - DNA, 25 bp, Homo sapien
tgtgtgctttgatggcccaagaagc

SEQ ID NO: 5157475 - DNA, 25 bp, Homo sapien
actgtgagtagctctgcctagatcc

SEQ ID NO: 5157476 - DNA, 25 bp, Homo sapien
tcctgagcttcagtgtacttttcta

SEQ ID NO: 5157477 - DNA, 25 bp, Homo sapien
catggtaatgccaagtataattacc

SEQ ID NO: 5157478 - DNA, 25 bp, Homo sapien
gtactgtacaaataaccatgtaatg

SEQ ID NO: 5157479 - DNA, 25 bp, Homo sapien
catgtaatgacatcgttggaatttc

SEQ ID NO: 5157480 - DNA, 25 bp, Homo sapien
tacactgctgtattgtactgtacaa

SEQ ID NO: 5157481 - DNA, 25 bp, Homo sapien
gccccactgggagctaatatctgtc

SEQ ID NO: 5157482 - DNA, 25 bp, Homo sapien
ggagctaatatctgtcctgtatgca

SEQ ID NO: 5157483 - DNA, 25 bp, Homo sapien
gtgctgaagaaaggacgaggcttac

SEQ ID NO: 5157484 - DNA, 25 bp, Homo sapien
tattgtcctcaccactcctcctgcc

SEQ ID NO: 5157485 - DNA, 25 bp, Homo sapien
tcagggccgaaagagaccctttcta

SEQ ID NO: 5157486 - DNA, 25 bp, Homo sapien
cctttaaaagtgcagcgcaacaatg

SEQ ID NO: 5157487 - DNA, 25 bp, Homo sapien
ggtgggtctgaaatccttggctttc

SEQ ID NO: 5157488 - DNA, 25 bp, Homo sapien
ctcacgtccccactgggatgctgag

SEQ ID NO: 5157489 - DNA, 25 bp, Homo sapien
atttattaagtgtagcaagggtcag

SEQ ID NO: 5157490 - DNA, 25 bp, Homo sapien
cagcatttccgggggaaaatactca

SEQ ID NO: 5157491 - DNA, 25 bp, Homo sapien
tgatttattaagtgtagcaagggtc

SEQ ID NO: 5157492 - DNA, 25 bp, Homo sapien
taattgatttattaagtgtagcaag

SEQ ID NO: 5157493 - DNA, 25 bp, Homo sapien
gctcttctgactggagttagcttgt

SEQ ID NO: 5157494 - DNA, 25 bp, Homo sapien
ttgacataaccaaattcacataggt

SEQ ID NO: 5157495 - DNA, 25 bp, Homo sapien
gaaacgggctggtgtattcttctct

SEQ ID NO: 5157496 - DNA, 25 bp, Homo sapien
tgactggagttagcttgttccttct

SEQ ID NO: 5157497 - DNA, 25 bp, Homo sapien
ctgtctgtacagatgatgtgaggaa

SEQ ID NO: 5157498 - DNA, 25 bp, Homo sapien
agaccccagtcacaagactctcagt

SEQ ID NO: 5157499 - DNA, 25 bp, Homo sapien
tggccaggaaaaggccatgctaaat

SEQ ID NO: 5157500 - DNA, 25 bp, Homo sapien
tctcagtccttagatgcattggcca

SEQ ID NO: 5157501 - DNA, 25 bp, Homo sapien
ccatttgcattaggtgaggagcgcg

SEQ ID NO: 5157502 - DNA, 25 bp, Homo sapien
cacaagtggcatcattaagcgggct

SEQ ID NO: 5157503 - DNA, 25 bp, Homo sapien
cgggctaagccggattaatgctgat

SEQ ID NO: 5157504 - DNA, 25 bp, Homo sapien
gctgccttcggagtgccacaagtgg

SEQ ID NO: 5157505 - DNA, 25 bp, Homo sapien
ccgcgctgccccgaaacccaagtcg

SEQ ID NO: 5157506 - DNA, 25 bp, Homo sapien
gctgccccgaaacccaagtcggctg

SEQ ID NO: 5157507 - DNA, 25 bp, Homo sapien
cctccttcgcccacagaagttttct

SEQ ID NO: 5157508 - DNA, 25 bp, Homo sapien
tggaaagaagggagcccgcgctgcc

SEQ ID NO: 5157509 - DNA, 25 bp, Homo sapien
cagggctccacgataaatttcgtcc

SEQ ID NO: 5157510 - DNA, 25 bp, Homo sapien
atttcgtccttaatcctagcttcac

SEQ ID NO: 5157511 - DNA, 25 bp, Homo sapien
ctgtcccagggctccacgataaatt

SEQ ID NO: 5157512 - DNA, 25 bp, Homo sapien
ctagcttcacctgcacagactcccc

SEQ ID NO: 5157513 - DNA, 25 bp, Homo sapien
atcaacttcccctgccatgccgtga

SEQ ID NO: 5157514 - DNA, 25 bp, Homo sapien
cgtgcccattagaaaatgctgcttc

SEQ ID NO: 5157515 - DNA, 25 bp, Homo sapien
tctcttcatcaacttcccctgccat

SEQ ID NO: 5157516 - DNA, 25 bp, Homo sapien
ctgccatgccgtgatcccaggtcat

SEQ ID NO: 5157517 - DNA, 25 bp, Homo sapien
agagccaggtaaagtcattgaaggc

SEQ ID NO: 5157518 - DNA, 25 bp, Homo sapien
agacacacagttcttaagccaaatg

SEQ ID NO: 5157519 - DNA, 25 bp, Homo sapien
gagccaggtaaagtcattgaaggcc

SEQ ID NO: 5157520 - DNA, 25 bp, Homo sapien
gccaggtaaagtcattgaaggccaa

SEQ ID NO: 5157521 - DNA, 25 bp, Homo sapien
gagcagcaaagcgtaaaaccaaacc

SEQ ID NO: 5157522 - DNA, 25 bp, Homo sapien
aggagcagcaaagcgtaaaaccaaa

SEQ ID NO: 5157523 - DNA, 25 bp, Homo sapien
ggagcagcaaagcgtaaaaccaaac

SEQ ID NO: 5157524 - DNA, 25 bp, Homo sapien
agcagcaaagcgtaaaaccaaaccg

SEQ ID NO: 5157525 - DNA, 25 bp, Homo sapien
tccttacagacatactgaccagctg

SEQ ID NO: 5157526 - DNA, 25 bp, Homo sapien
cttacagacatactgaccagctggc

SEQ ID NO: 5157527 - DNA, 25 bp, Homo sapien
tacagacatactgaccagctggcca

SEQ ID NO: 5157528 - DNA, 25 bp, Homo sapien
cttccttacagacatactgaccagc

SEQ ID NO: 5157529 - DNA, 25 bp, Homo sapien
ctgttgggccaagaaaagagtagct

SEQ ID NO: 5157530 - DNA, 25 bp, Homo sapien
agagtagcttctggcattgactttg

SEQ ID NO: 5157531 - DNA, 25 bp, Homo sapien
caccagccactgttgggccaagaaa

SEQ ID NO: 5157532 - DNA, 25 bp, Homo sapien
caggaagggttagcaccagccactg

SEQ ID NO: 5157533 - DNA, 25 bp, Homo sapien
tgtccatcaaatcctacctcacaat

SEQ ID NO: 5157534 - DNA, 25 bp, Homo sapien
ccatcaaatcctacctcacaatcca

SEQ ID NO: 5157535 - DNA, 25 bp, Homo sapien
aaatgtccatcaaatcctacctcac

SEQ ID NO: 5157536 - DNA, 25 bp, Homo sapien
catcaaatcctacctcacaatccat

SEQ ID NO: 5157537 - DNA, 25 bp, Homo sapien
tcagctcagcattgcaccgaagtct

SEQ ID NO: 5157538 - DNA, 25 bp, Homo sapien
cagcattgcaccgaagtcttctctc

SEQ ID NO: 5157539 - DNA, 25 bp, Homo sapien
gctcagcattgcaccgaagtcttct

SEQ ID NO: 5157540 - DNA, 25 bp, Homo sapien
attcagctcagcattgcaccgaagt

SEQ ID NO: 5157541 - DNA, 25 bp, Homo sapien
aggcccgctccaaacactcctgtgg

SEQ ID NO: 5157542 - DNA, 25 bp, Homo sapien
agcacttgcaactgtcaggaaggtt

SEQ ID NO: 5157543 - DNA, 25 bp, Homo sapien
cacttgcaactgtcaggaaggtttc

SEQ ID NO: 5157544 - DNA, 25 bp, Homo sapien
aacactcctgtggagcacttgcaac

SEQ ID NO: 5157545 - DNA, 25 bp, Homo sapien
ccaagctgccaaatctgtgaagcgc

SEQ ID NO: 5157546 - DNA, 25 bp, Homo sapien
tctcattgttccagcgaatctgagt

SEQ ID NO: 5157547 - DNA, 25 bp, Homo sapien
ccatccaagctgttttgatgtgagg

SEQ ID NO: 5157548 - DNA, 25 bp, Homo sapien
tgaagcgctagctcccatccaagct

SEQ ID NO: 5157549 - DNA, 25 bp, Homo sapien
cttttgagtaggtgatggagcccct

SEQ ID NO: 5157550 - DNA, 25 bp, Homo sapien
catcccactgttaattcagcgttca

SEQ ID NO: 5157551 - DNA, 25 bp, Homo sapien
gtgatggagcccctacccaagagag

SEQ ID NO: 5157552 - DNA, 25 bp, Homo sapien
aagagaggacaaacaagcacgaagc

SEQ ID NO: 5157553 - DNA, 25 bp, Homo sapien
cttgcgggtccctggaggcaaagca

SEQ ID NO: 5157554 - DNA, 25 bp, Homo sapien
ttttctgtataaggagtcaaataga

SEQ ID NO: 5157555 - DNA, 25 bp, Homo sapien
gaaaaggtttatcaagctgaaataa

SEQ ID NO: 5157556 - DNA, 25 bp, Homo sapien
taattttgcctgaattcgctgacag

SEQ ID NO: 5157557 - DNA, 25 bp, Homo sapien
tgtcctacttgtggtacaatgcgcg

SEQ ID NO: 5157558 - DNA, 25 bp, Homo sapien
cactgtttccagaggcgcctcatca

SEQ ID NO: 5157559 - DNA, 25 bp, Homo sapien
ataatcagcgcccaggcaggtggag

SEQ ID NO: 5157560 - DNA, 25 bp, Homo sapien
aatctccggtctctgataagatggg

SEQ ID NO: 5157561 - DNA, 25 bp, Homo sapien
ggcagacaaatttccgatggtctta

SEQ ID NO: 5157562 - DNA, 25 bp, Homo sapien
tctttcgggaacagtagctgtgcag

SEQ ID NO: 5157563 - DNA, 25 bp, Homo sapien
gacagtaatcagagtggttgggagg

SEQ ID NO: 5157564 - DNA, 25 bp, Homo sapien
gaatttgcagacttcaatttgtggc

SEQ ID NO: 5157565 - DNA, 25 bp, Homo sapien
ttttgcctggaaataataatgattc

SEQ ID NO: 5157566 - DNA, 25 bp, Homo sapien
tgagtagggaagttgagtcaatcta

SEQ ID NO: 5157567 - DNA, 25 bp, Homo sapien
tcttttagtatcaggccattggtgt

SEQ ID NO: 5157568 - DNA, 25 bp, Homo sapien
cattgttgcaaactgaccacaaagt

SEQ ID NO: 5157569 - DNA, 25 bp, Homo sapien
atgtcattgttgatgccggtgtctg

SEQ ID NO: 5157570 - DNA, 25 bp, Homo sapien
gaatgctatctctggttctactgag

SEQ ID NO: 5157571 - DNA, 25 bp, Homo sapien
cattgttgatgccggtgtctgtcat

SEQ ID NO: 5157572 - DNA, 25 bp, Homo sapien
aatgctatctctggttctactgaga

SEQ ID NO: 5157573 - DNA, 25 bp, Homo sapien
tcgtttcaagcttacagcttgcagt

SEQ ID NO: 5157574 - DNA, 25 bp, Homo sapien
ctcgtttcaagcttacagcttgcag

SEQ ID NO: 5157575 - DNA, 25 bp, Homo sapien
cgtttcaagcttacagcttgcagtt

SEQ ID NO: 5157576 - DNA, 25 bp, Homo sapien
cctcgtttcaagcttacagcttgca

SEQ ID NO: 5157577 - DNA, 25 bp, Homo sapien
cagaaagaaaagtcggatgtgattc

SEQ ID NO: 5157578 - DNA, 25 bp, Homo sapien
aagtcggatgtgattcagtggccat

SEQ ID NO: 5157579 - DNA, 25 bp, Homo sapien
gcagaaagaaaagtcggatgtgatt

SEQ ID NO: 5157580 - DNA, 25 bp, Homo sapien
gaaaagtcggatgtgattcagtggc

SEQ ID NO: 5157581 - DNA, 25 bp, Homo sapien
tgtaaaagggacgtagacttctctg

SEQ ID NO: 5157582 - DNA, 25 bp, Homo sapien
tcaaagccacctccattatcaacag

SEQ ID NO: 5157583 - DNA, 25 bp, Homo sapien
gatttcagtaatgaaaccctggtgt

SEQ ID NO: 5157584 - DNA, 25 bp, Homo sapien
tattattcattaagattgccaagcc

SEQ ID NO: 5157585 - DNA, 25 bp, Homo sapien
ctccagattcaggagcgacttcact

SEQ ID NO: 5157586 - DNA, 25 bp, Homo sapien
tccagattcaggagcgacttcactc

SEQ ID NO: 5157587 - DNA, 25 bp, Homo sapien
cagattcaggagcgacttcactcac

SEQ ID NO: 5157588 - DNA, 25 bp, Homo sapien
aaacaagaaggtctccagattcagg

SEQ ID NO: 5157589 - DNA, 25 bp, Homo sapien
cactgagctaagtaaacagtgctga

SEQ ID NO: 5157590 - DNA, 25 bp, Homo sapien
tgcagtcccacagcgctgaaagagt

SEQ ID NO: 5157591 - DNA, 25 bp, Homo sapien
cagtgctgaataaggaactgatcca

SEQ ID NO: 5157592 - DNA, 25 bp, Homo sapien
gacccatatggagaaggaacctcgc

SEQ ID NO: 5157593 - DNA, 25 bp, Homo sapien
tccctacccataacagaaagctgga

SEQ ID NO: 5157594 - DNA, 25 bp, Homo sapien
cctacccataacagaaagctggaga

SEQ ID NO: 5157595 - DNA, 25 bp, Homo sapien
ttcatccctacccataacagaaagc

SEQ ID NO: 5157596 - DNA, 25 bp, Homo sapien
catccctacccataacagaaagctg

SEQ ID NO: 5157597 - DNA, 25 bp, Homo sapien
tttccagggctgaagctcacatata

SEQ ID NO: 5157598 - DNA, 25 bp, Homo sapien
ccttttccagggctgaagctcacat

SEQ ID NO: 5157599 - DNA, 25 bp, Homo sapien
aggtcgatgccaatgggcccaggcc

SEQ ID NO: 5157600 - DNA, 25 bp, Homo sapien
ttccaagtcatacaggtcgatgcca

SEQ ID NO: 5157601 - DNA, 25 bp, Homo sapien
gcaggggtcccttcctgcagaaagc

SEQ ID NO: 5157602 - DNA, 25 bp, Homo sapien
gacagggcaggggtcccttcctgca

SEQ ID NO: 5157603 - DNA, 25 bp, Homo sapien
aggggtcccttcctgcagaaagcct

SEQ ID NO: 5157604 - DNA, 25 bp, Homo sapien
gggcaggggtcccttcctgcagaaa

SEQ ID NO: 5157605 - DNA, 25 bp, Homo sapien
ttccccctttgaggacactggcaag

SEQ ID NO: 5157606 - DNA, 25 bp, Homo sapien
tccccctttgaggacactggcaagg

SEQ ID NO: 5157607 - DNA, 25 bp, Homo sapien
cttccccctttgaggacactggcaa

SEQ ID NO: 5157608 - DNA, 25 bp, Homo sapien
tgaccgcaggacacgaatcacaagt

SEQ ID NO: 5157609 - DNA, 25 bp, Homo sapien
tgagaaggcattgaccgcaggacac

SEQ ID NO: 5157610 - DNA, 25 bp, Homo sapien
tgtctcttgtcaggaggcatttctt

SEQ ID NO: 5157611 - DNA, 25 bp, Homo sapien
ttcttaagtgttccgatgcccatta

SEQ ID NO: 5157612 - DNA, 25 bp, Homo sapien
cgctgtgtatgttatgattaggtgc

SEQ ID NO: 5157613 - DNA, 25 bp, Homo sapien
aatggattccaagtgggacaattga

SEQ ID NO: 5157614 - DNA, 25 bp, Homo sapien
caagtgggacaattgagctccaaca

SEQ ID NO: 5157615 - DNA, 25 bp, Homo sapien
aaataaatcgctgtgtatgttatga

SEQ ID NO: 5157616 - DNA, 25 bp, Homo sapien
ggacattgcctgagagccatataag

SEQ ID NO: 5157617 - DNA, 25 bp, Homo sapien
cttcaggacattgcctgagagccat

SEQ ID NO: 5157618 - DNA, 25 bp, Homo sapien
aggacattgcctgagagccatataa

SEQ ID NO: 5157619 - DNA, 25 bp, Homo sapien
tcaggacattgcctgagagccatat

SEQ ID NO: 5157620 - DNA, 25 bp, Homo sapien
caaagagctgccgaaggtttgtgca

SEQ ID NO: 5157621 - DNA, 25 bp, Homo sapien
aaagagctgccgaaggtttgtgcat

SEQ ID NO: 5157622 - DNA, 25 bp, Homo sapien
ccaaagagctgccgaaggtttgtgc

SEQ ID NO: 5157623 - DNA, 25 bp, Homo sapien
aggcaatggcagcgcatcaaagtcc

SEQ ID NO: 5157624 - DNA, 25 bp, Homo sapien
aatggcagcgcatcaaagtccctac

SEQ ID NO: 5157625 - DNA, 25 bp, Homo sapien
agtccctactctcaatgactttttc

SEQ ID NO: 5157626 - DNA, 25 bp, Homo sapien
tcacgacttttaaattgcctgcagt

SEQ ID NO: 5157627 - DNA, 25 bp, Homo sapien
tcacgatctgagctacccacagtgc

SEQ ID NO: 5157628 - DNA, 25 bp, Homo sapien
catgcctgtatggtaggatgcggta

SEQ ID NO: 5157629 - DNA, 25 bp, Homo sapien
ggattgctgcaggaataatgacttc

SEQ ID NO: 5157630 - DNA, 25 bp, Homo sapien
ggatgcggtactgtccttgagcaga

SEQ ID NO: 5157631 - DNA, 25 bp, Homo sapien
taaccactgtaggaaagggctgctc

SEQ ID NO: 5157632 - DNA, 25 bp, Homo sapien
catactgggttgctctcaggtgggc

SEQ ID NO: 5157633 - DNA, 25 bp, Homo sapien
tcaatgaaatgagcaatacgagtcc

SEQ ID NO: 5157634 - DNA, 25 bp, Homo sapien
gattgttacatatcagggctgcaga

SEQ ID NO: 5157635 - DNA, 25 bp, Homo sapien
aactgcacaactggtccaaggatgc

SEQ ID NO: 5157636 - DNA, 25 bp, Homo sapien
aaataacagctatattactggcggg

SEQ ID NO: 5157637 - DNA, 25 bp, Homo sapien
tgggctcatggtgcagaaattatac

SEQ ID NO: 5157638 - DNA, 25 bp, Homo sapien
aattatacatgcaactgcacaactg

SEQ ID NO: 5157639 - DNA, 25 bp, Homo sapien
cccatgtcctgtcagtggtaaagac

SEQ ID NO: 5157640 - DNA, 25 bp, Homo sapien
agtggtaaagacctctggtgcccag

SEQ ID NO: 5157641 - DNA, 25 bp, Homo sapien
tcaaatcccattctcttagccaccc

SEQ ID NO: 5157642 - DNA, 25 bp, Homo sapien
tcctgtcagtggtaaagacctctgg

SEQ ID NO: 5157643 - DNA, 25 bp, Homo sapien
caaagtgatatcttgccttcatccc

SEQ ID NO: 5157644 - DNA, 25 bp, Homo sapien
catgtgcggtaagcgagaagttcaa

SEQ ID NO: 5157645 - DNA, 25 bp, Homo sapien
ctttcgtagacacaaggaaggcagc

SEQ ID NO: 5157646 - DNA, 25 bp, Homo sapien
ggacctgtgcgtggaggctgctgaa

SEQ ID NO: 5157647 - DNA, 25 bp, Homo sapien
gcaacactgtccttgggccaaatgc

SEQ ID NO: 5157648 - DNA, 25 bp, Homo sapien
caatcccctgaagtgactggcaaca

SEQ ID NO: 5157649 - DNA, 25 bp, Homo sapien
tgaaggccgtatgggattgcatcca

SEQ ID NO: 5157650 - DNA, 25 bp, Homo sapien
agatagtgtgcggaaggcacctccg

SEQ ID NO: 5157651 - DNA, 25 bp, Homo sapien
cctctttttgggacaatgacctgcc

SEQ ID NO: 5157652 - DNA, 25 bp, Homo sapien
actggatccttcctcgctaagccca

SEQ ID NO: 5157653 - DNA, 25 bp, Homo sapien
gccctctttttgggacaatgacctg

SEQ ID NO: 5157654 - DNA, 25 bp, Homo sapien
ctggatccttcctcgctaagcccat

SEQ ID NO: 5157655 - DNA, 25 bp, Homo sapien
gattatctccagaattcttccaagt

SEQ ID NO: 5157656 - DNA, 25 bp, Homo sapien
taggattatctccagaattcttcca

SEQ ID NO: 5157657 - DNA, 25 bp, Homo sapien
ggattatctccagaattcttccaag

SEQ ID NO: 5157658 - DNA, 25 bp, Homo sapien
ctaggattatctccagaattcttcc

SEQ ID NO: 5157659 - DNA, 25 bp, Homo sapien
cgtgccagggcaatggatgatgctt

SEQ ID NO: 5157660 - DNA, 25 bp, Homo sapien
tggatgatgcttggactcctccaca

SEQ ID NO: 5157661 - DNA, 25 bp, Homo sapien
ggatgatgcttggactcctccacag

SEQ ID NO: 5157662 - DNA, 25 bp, Homo sapien
ctgatgaatgcgacgtgccagggca

SEQ ID NO: 5157663 - DNA, 25 bp, Homo sapien
gcttggtctaagttcaccctgtggc

SEQ ID NO: 5157664 - DNA, 25 bp, Homo sapien
accctgtggctagagttatccataa

SEQ ID NO: 5157665 - DNA, 25 bp, Homo sapien
ggatatcaaattagcttggtctaag

SEQ ID NO: 5157666 - DNA, 25 bp, Homo sapien
ccaaagctagatgattctctgatac

SEQ ID NO: 5157667 - DNA, 25 bp, Homo sapien
gcttccttaagtagtaacgttgtca

SEQ ID NO: 5157668 - DNA, 25 bp, Homo sapien
aagtgaatataagaaggaggccttt

SEQ ID NO: 5157669 - DNA, 25 bp, Homo sapien
gaattgatacttcctacctttgtga

SEQ ID NO: 5157670 - DNA, 25 bp, Homo sapien
tttgatggacatcttcagcactgga

SEQ ID NO: 5157671 - DNA, 25 bp, Homo sapien
gaccaactcattggaggtcaacaat

SEQ ID NO: 5157672 - DNA, 25 bp, Homo sapien
cagcacagctgtcccgtaatatcct

SEQ ID NO: 5157673 - DNA, 25 bp, Homo sapien
gctctcctgaatgctgtagaggacc

SEQ ID NO: 5157674 - DNA, 25 bp, Homo sapien
cagctgtcccgtaatatcctggatc

SEQ ID NO: 5157675 - DNA, 25 bp, Homo sapien
gtgtttcctcctgcaaaagggcaat

SEQ ID NO: 5157676 - DNA, 25 bp, Homo sapien
gttctcagacatgagtacgtagaga

SEQ ID NO: 5157677 - DNA, 25 bp, Homo sapien
gagtacgtagagaagcagatggaca

SEQ ID NO: 5157678 - DNA, 25 bp, Homo sapien
cacaattttgctggtgacatggagt

SEQ ID NO: 5157679 - DNA, 25 bp, Homo sapien
caattgctcgatgcaaagggcctcc

SEQ ID NO: 5157680 - DNA, 25 bp, Homo sapien
tcttcaattgctcgatgcaaagggc

SEQ ID NO: 5157681 - DNA, 25 bp, Homo sapien
ttcaattgctcgatgcaaagggcct

SEQ ID NO: 5157682 - DNA, 25 bp, Homo sapien
ccttcttcaattgctcgatgcaaag

SEQ ID NO: 5157683 - DNA, 25 bp, Homo sapien
ctcagggtgccatgggtccctgcgt

SEQ ID NO: 5157684 - DNA, 25 bp, Homo sapien
ttccagcctttgagtgctgccagtc

SEQ ID NO: 5157685 - DNA, 25 bp, Homo sapien
tcagtcatggagagtgggctcaggg

SEQ ID NO: 5157686 - DNA, 25 bp, Homo sapien
tgcgtctcagtgcacctttcttcca

SEQ ID NO: 5157687 - DNA, 25 bp, Homo sapien
gccagctttaagcagggtgatctgg

SEQ ID NO: 5157688 - DNA, 25 bp, Homo sapien
aagttcactgaggaatcctctccca

SEQ ID NO: 5157689 - DNA, 25 bp, Homo sapien
catctcccatatggtgggcatgaag

SEQ ID NO: 5157690 - DNA, 25 bp, Homo sapien
ggatgtccttgataaactctaccat

SEQ ID NO: 5157691 - DNA, 25 bp, Homo sapien
aagataagcatcttcgggagtgaga

SEQ ID NO: 5157692 - DNA, 25 bp, Homo sapien
aatgagattgtttatgcatcaagga

SEQ ID NO: 5157693 - DNA, 25 bp, Homo sapien
tgcctccccttgaagaagataagca

SEQ ID NO: 5157694 - DNA, 25 bp, Homo sapien
gcatcaaggaataagtattaatagc

SEQ ID NO: 5157695 - DNA, 25 bp, Homo sapien
gccacgttagtactcaaggaacctg

SEQ ID NO: 5157696 - DNA, 25 bp, Homo sapien
aggcattctcgacacgtgtccagga

SEQ ID NO: 5157697 - DNA, 25 bp, Homo sapien
ccacgtcacagatgcagcgctggga

SEQ ID NO: 5157698 - DNA, 25 bp, Homo sapien
ttcaacaagtgcctgtaaaagcgga

SEQ ID NO: 5157699 - DNA, 25 bp, Homo sapien
ccggtaccctctgcaattgcctgtt

SEQ ID NO: 5157700 - DNA, 25 bp, Homo sapien
gcagatcaaaagcctctcccggtac

SEQ ID NO: 5157701 - DNA, 25 bp, Homo sapien
ctgcaattgcctgtttctcattggg

SEQ ID NO: 5157702 - DNA, 25 bp, Homo sapien
cagggccgccataaatctgacactg

SEQ ID NO: 5157703 - DNA, 25 bp, Homo sapien
ttgagattgtatctccaagcaactg

SEQ ID NO: 5157704 - DNA, 25 bp, Homo sapien
ccattgcaaaaattgagattgtatc

SEQ ID NO: 5157705 - DNA, 25 bp, Homo sapien
caaaaattgagattgtatctccaag

SEQ ID NO: 5157706 - DNA, 25 bp, Homo sapien
ggccattgcaaaaattgagattgta

SEQ ID NO: 5157707 - DNA, 25 bp, Homo sapien
ccaaattcatgggaacgtgttgttc

SEQ ID NO: 5157708 - DNA, 25 bp, Homo sapien
gctgaataatctcagggaggctctg

SEQ ID NO: 5157709 - DNA, 25 bp, Homo sapien
tcttgtacaaactgcctggcatgca

SEQ ID NO: 5157710 - DNA, 25 bp, Homo sapien
aggggcaaattgatcactgactgac

SEQ ID NO: 5157711 - DNA, 25 bp, Homo sapien
actgcagatcatagcttggaaacca

SEQ ID NO: 5157712 - DNA, 25 bp, Homo sapien
caccgaggccggaggagtcactgca

SEQ ID NO: 5157713 - DNA, 25 bp, Homo sapien
ccaccgaggccggaggagtcactgc

SEQ ID NO: 5157714 - DNA, 25 bp, Homo sapien
gatcatagcttggaaaccagatcca

SEQ ID NO: 5157715 - DNA, 25 bp, Homo sapien
aatcggttcagctagggtgtcggac

SEQ ID NO: 5157716 - DNA, 25 bp, Homo sapien
ggtgtcggactgtctggtgccctcc

SEQ ID NO: 5157717 - DNA, 25 bp, Homo sapien
tgtgccaaatcggttcagctagggt

SEQ ID NO: 5157718 - DNA, 25 bp, Homo sapien
gctggcgtgtgtgccaaatcggttc

SEQ ID NO: 5157719 - DNA, 25 bp, Homo sapien
gactttgatggattcagacaaattt

SEQ ID NO: 5157720 - DNA, 25 bp, Homo sapien
cagtatgactttgatggattcagac

SEQ ID NO: 5157721 - DNA, 25 bp, Homo sapien
tcaggctcagtggaccttcgcccag

SEQ ID NO: 5157722 - DNA, 25 bp, Homo sapien
agacaaatttctcaggctcagtgga

SEQ ID NO: 5157723 - DNA, 25 bp, Homo sapien
tcttctactaccttttgtccatccc

SEQ ID NO: 5157724 - DNA, 25 bp, Homo sapien
tgtcttctactaccttttgtccatc

SEQ ID NO: 5157725 - DNA, 25 bp, Homo sapien
gccccatcccatgtcctccacccag

SEQ ID NO: 5157726 - DNA, 25 bp, Homo sapien
ttctactaccttttgtccatccctg

SEQ ID NO: 5157727 - DNA, 25 bp, Homo sapien
tcatgcattccaggttttcttccca

SEQ ID NO: 5157728 - DNA, 25 bp, Homo sapien
gtagttgagtttttcatgcattcca

SEQ ID NO: 5157729 - DNA, 25 bp, Homo sapien
gactctaagtttctcaaatgggcca

SEQ ID NO: 5157730 - DNA, 25 bp, Homo sapien
tcccaaacagactctaagtttctca

SEQ ID NO: 5157731 - DNA, 25 bp, Homo sapien
gaacggacacttcagcctcagatgc

SEQ ID NO: 5157732 - DNA, 25 bp, Homo sapien
ctgttgggggaacggacacttcagc

SEQ ID NO: 5157733 - DNA, 25 bp, Homo sapien
acggacacttcagcctcagatgcct

SEQ ID NO: 5157734 - DNA, 25 bp, Homo sapien
gggaacggacacttcagcctcagat

SEQ ID NO: 5157735 - DNA, 25 bp, Homo sapien
tatgattagggaattagcaagggct

SEQ ID NO: 5157736 - DNA, 25 bp, Homo sapien
ggagccctcctaagacagttttgcc

SEQ ID NO: 5157737 - DNA, 25 bp, Homo sapien
gaatataaatctgtcacgggagccc

SEQ ID NO: 5157738 - DNA, 25 bp, Homo sapien
gaatctgtaggtgaccagggatgac

SEQ ID NO: 5157739 - DNA, 25 bp, Homo sapien
tggtggtgggcagggaggagcagca

SEQ ID NO: 5157740 - DNA, 25 bp, Homo sapien
ggtgggcagggaggagcagcaatag

SEQ ID NO: 5157741 - DNA, 25 bp, Homo sapien
cttggtggtgggcagggaggagcag

SEQ ID NO: 5157742 - DNA, 25 bp, Homo sapien
gtggtgggcagggaggagcagcaat

SEQ ID NO: 5157743 - DNA, 25 bp, Homo sapien
ggtccagctagcgatgtcttcatct

SEQ ID NO: 5157744 - DNA, 25 bp, Homo sapien
gcccattgttgcattattaacagtt

SEQ ID NO: 5157745 - DNA, 25 bp, Homo sapien
gggttttggagagcatccctgcttg

SEQ ID NO: 5157746 - DNA, 25 bp, Homo sapien
tccaagtctcttttggtccagctag

SEQ ID NO: 5157747 - DNA, 25 bp, Homo sapien
tctagtccagtagcttcaaatcccc

SEQ ID NO: 5157748 - DNA, 25 bp, Homo sapien
cacaggttctcaggaacatggtgtc

SEQ ID NO: 5157749 - DNA, 25 bp, Homo sapien
tagttcacagtggtctatcatccaa

SEQ ID NO: 5157750 - DNA, 25 bp, Homo sapien
aaagtccacctcacgtagttcacag

SEQ ID NO: 5157751 - DNA, 25 bp, Homo sapien
tcagggcaaattgctgtatcagagt

SEQ ID NO: 5157752 - DNA, 25 bp, Homo sapien
cacttgtagaacttgtattgtaacc

SEQ ID NO: 5157753 - DNA, 25 bp, Homo sapien
tgtattgtaacctcaaatctatgct

SEQ ID NO: 5157754 - DNA, 25 bp, Homo sapien
agtttttatgtggtaacaatgccac

SEQ ID NO: 5157755 - DNA, 25 bp, Homo sapien
tgttctcatcagcatttccctctag

SEQ ID NO: 5157756 - DNA, 25 bp, Homo sapien
tctcatcagcatttccctctaggtc

SEQ ID NO: 5157757 - DNA, 25 bp, Homo sapien
tcagcatttccctctaggtcctctg

SEQ ID NO: 5157758 - DNA, 25 bp, Homo sapien
tcatcagcatttccctctaggtcct

SEQ ID NO: 5157759 - DNA, 25 bp, Homo sapien
tgcggagaaagataataacccaaag

SEQ ID NO: 5157760 - DNA, 25 bp, Homo sapien
gcttgcggagaaagataataaccca

SEQ ID NO: 5157761 - DNA, 25 bp, Homo sapien
ctttgcttgcggagaaagataataa

SEQ ID NO: 5157762 - DNA, 25 bp, Homo sapien
tgtgattgtgttctcggggcctccg

SEQ ID NO: 5157763 - DNA, 25 bp, Homo sapien
ctggttggggaaactggatgggtat

SEQ ID NO: 5157764 - DNA, 25 bp, Homo sapien
cacagactgtagattcgttgagtcc

SEQ ID NO: 5157765 - DNA, 25 bp, Homo sapien
gagcaatgggtcatcacagactgta

SEQ ID NO: 5157766 - DNA, 25 bp, Homo sapien
aaggctcctctttctaggattgata

SEQ ID NO: 5157767 - DNA, 25 bp, Homo sapien
cagtctgtagatgcagcaggcactc

SEQ ID NO: 5157768 - DNA, 25 bp, Homo sapien
tgtgatgcaggaggaacagtgtctt

SEQ ID NO: 5157769 - DNA, 25 bp, Homo sapien
ggaactcgtgtttaagatgacacca

SEQ ID NO: 5157770 - DNA, 25 bp, Homo sapien
tgaagaaggtttgtagacgctctct

SEQ ID NO: 5157771 - DNA, 25 bp, Homo sapien
gacgctctctcgtcagtgtgatgca

SEQ ID NO: 5157772 - DNA, 25 bp, Homo sapien
gtggaggccagggagtcattcttta

SEQ ID NO: 5157773 - DNA, 25 bp, Homo sapien
aatggcttgacggtaggtgatggtg

SEQ ID NO: 5157774 - DNA, 25 bp, Homo sapien
gaataaatggcttgacggtaggtga

SEQ ID NO: 5157775 - DNA, 25 bp, Homo sapien
tggaggccagggagtcattctttag

SEQ ID NO: 5157776 - DNA, 25 bp, Homo sapien
cctgcaacagagctctttgggaatt

SEQ ID NO: 5157777 - DNA, 25 bp, Homo sapien
cttcttccctggagatagaatcagg

SEQ ID NO: 5157778 - DNA, 25 bp, Homo sapien
tttgggaattgtccgctttgctgct

SEQ ID NO: 5157779 - DNA, 25 bp, Homo sapien
ctggagatagaatcaggctgaaaga

SEQ ID NO: 5157780 - DNA, 25 bp, Homo sapien
ctggacgaagatattcaccctgaaa

SEQ ID NO: 5157781 - DNA, 25 bp, Homo sapien
cgaagatattcaccctgaaaggtca

SEQ ID NO: 5157782 - DNA, 25 bp, Homo sapien
gacgaagatattcaccctgaaaggt

SEQ ID NO: 5157783 - DNA, 25 bp, Homo sapien
tggacgaagatattcaccctgaaag

SEQ ID NO: 5157784 - DNA, 25 bp, Homo sapien
ggctcctgactctgtaccatcacca

SEQ ID NO: 5157785 - DNA, 25 bp, Homo sapien
ttattccttggcagttttcatgtct

SEQ ID NO: 5157786 - DNA, 25 bp, Homo sapien
gttggtttcagactcccaagggctc

SEQ ID NO: 5157787 - DNA, 25 bp, Homo sapien
acttggcagaggtgttggtttcaga

SEQ ID NO: 5157788 - DNA, 25 bp, Homo sapien
tgacttcctctgggccgctggttcc

SEQ ID NO: 5157789 - DNA, 25 bp, Homo sapien
ccaatgaaggcttttaagggctggt

SEQ ID NO: 5157790 - DNA, 25 bp, Homo sapien
agggctggtctctaagctgtttttc

SEQ ID NO: 5157791 - DNA, 25 bp, Homo sapien
tggttcctgtggagccaatgaaggc

SEQ ID NO: 5157792 - DNA, 25 bp, Homo sapien
tttcagtctgtctgtaagactgggt

SEQ ID NO: 5157793 - DNA, 25 bp, Homo sapien
ctgggttctccttctagtactgtga

SEQ ID NO: 5157794 - DNA, 25 bp, Homo sapien
cagtctgtctgtaagactgggttct

SEQ ID NO: 5157795 - DNA, 25 bp, Homo sapien
ttctccttctagtactgtgacttca

SEQ ID NO: 5157796 - DNA, 25 bp, Homo sapien
gagcagggcttaagggttgccccat

SEQ ID NO: 5157797 - DNA, 25 bp, Homo sapien
cccatagggtagtggaacagtgcag

SEQ ID NO: 5157798 - DNA, 25 bp, Homo sapien
actgggagcattctttgacattgta

SEQ ID NO: 5157799 - DNA, 25 bp, Homo sapien
agtgcagatgtcttgtgccttgcca

SEQ ID NO: 5157800 - DNA, 25 bp, Homo sapien
acctaaggggcatgggaggccacac

SEQ ID NO: 5157801 - DNA, 25 bp, Homo sapien
cacaactttggcagacttggctggc

SEQ ID NO: 5157802 - DNA, 25 bp, Homo sapien
aggccacacaactttggcagacttg

SEQ ID NO: 5157803 - DNA, 25 bp, Homo sapien
ccacacaactttggcagacttggct

SEQ ID NO: 5157804 - DNA, 25 bp, Homo sapien
agatgctttcgtggcttgtcccctg

SEQ ID NO: 5157805 - DNA, 25 bp, Homo sapien
tcctgcagagccctttcaaacctag

SEQ ID NO: 5157806 - DNA, 25 bp, Homo sapien
tgtactcgacaatgcaaagcagatg

SEQ ID NO: 5157807 - DNA, 25 bp, Homo sapien
gcatttggtgccctttattgctaac

SEQ ID NO: 5157808 - DNA, 25 bp, Homo sapien
tagagaatgatttggttaggagcca

SEQ ID NO: 5157809 - DNA, 25 bp, Homo sapien
tgctcaaagcagccttgtggaaggg

SEQ ID NO: 5157810 - DNA, 25 bp, Homo sapien
taatctatgttccacttttagcatc

SEQ ID NO: 5157811 - DNA, 25 bp, Homo sapien
ctttcctatagtgtaacgtgtcacg

SEQ ID NO: 5157812 - DNA, 25 bp, Homo sapien
agccatagcttggtccctttcaaag

SEQ ID NO: 5157813 - DNA, 25 bp, Homo sapien
tcttgggaacaacatcagtgctcat

SEQ ID NO: 5157814 - DNA, 25 bp, Homo sapien
tttcttgggaacaacatcagtgctc

SEQ ID NO: 5157815 - DNA, 25 bp, Homo sapien
ctctcgagtgcagtgccagtcttcc

SEQ ID NO: 5157816 - DNA, 25 bp, Homo sapien
gccagtcttccctattgatattttc

SEQ ID NO: 5157817 - DNA, 25 bp, Homo sapien
ttgtaagggtcagtagcgtctggtc

SEQ ID NO: 5157818 - DNA, 25 bp, Homo sapien
cttgtaagggtcagtagcgtctggt

SEQ ID NO: 5157819 - DNA, 25 bp, Homo sapien
tgtaagggtcagtagcgtctggtcc

SEQ ID NO: 5157820 - DNA, 25 bp, Homo sapien
tcttttgcatcccttctgagcctct

SEQ ID NO: 5157821 - DNA, 25 bp, Homo sapien
gagcctctgggcctcgccttcttct

SEQ ID NO: 5157822 - DNA, 25 bp, Homo sapien
gggcctcgccttcttcttggtccag

SEQ ID NO: 5157823 - DNA, 25 bp, Homo sapien
ctcttttgcatcccttctgagcctc

SEQ ID NO: 5157824 - DNA, 25 bp, Homo sapien
tcctccagcaaatcatttgatagag

SEQ ID NO: 5157825 - DNA, 25 bp, Homo sapien
ctccagcaaatcatttgatagagaa

SEQ ID NO: 5157826 - DNA, 25 bp, Homo sapien
aaatcctccagcaaatcatttgata

SEQ ID NO: 5157827 - DNA, 25 bp, Homo sapien
aatcctccagcaaatcatttgatag

SEQ ID NO: 5157828 - DNA, 25 bp, Homo sapien
ctctgagattccaaggcatggatgc

SEQ ID NO: 5157829 - DNA, 25 bp, Homo sapien
tcaacttctcatctttgtactggtt

SEQ ID NO: 5157830 - DNA, 25 bp, Homo sapien
ggcatggatgctgacattcattcaa

SEQ ID NO: 5157831 - DNA, 25 bp, Homo sapien
catggatgctgacattcattcaact

SEQ ID NO: 5157832 - DNA, 25 bp, Homo sapien
ccagccagtggagctttggctccat

SEQ ID NO: 5157833 - DNA, 25 bp, Homo sapien
tccagccagtggagctttggctcca

SEQ ID NO: 5157834 - DNA, 25 bp, Homo sapien
ctccagccagtggagctttggctcc

SEQ ID NO: 5157835 - DNA, 25 bp, Homo sapien
ttggcagacctctcacccaggcact

SEQ ID NO: 5157836 - DNA, 25 bp, Homo sapien
ttctgatgcagcagtgtgactaccc

SEQ ID NO: 5157837 - DNA, 25 bp, Homo sapien
caatgcgaataacagtgacagccct

SEQ ID NO: 5157838 - DNA, 25 bp, Homo sapien
taccctatgagcactacatctttcc

SEQ ID NO: 5157839 - DNA, 25 bp, Homo sapien
gttgactttgcacaacttccctctg

SEQ ID NO: 5157840 - DNA, 25 bp, Homo sapien
gactttgcacaacttccctctgcag

SEQ ID NO: 5157841 - DNA, 25 bp, Homo sapien
ttcgatgctgtgtcaccgccctcca

SEQ ID NO: 5157842 - DNA, 25 bp, Homo sapien
actttgcacaacttccctctgcagg

SEQ ID NO: 5157843 - DNA, 25 bp, Homo sapien
ctttggtaacccccatgagcccaga

SEQ ID NO: 5157844 - DNA, 25 bp, Homo sapien
tggctttggtaacccccatgagccc

SEQ ID NO: 5157845 - DNA, 25 bp, Homo sapien
ctctggctttggtaacccccatgag

SEQ ID NO: 5157846 - DNA, 25 bp, Homo sapien
tcctctggctttggtaacccccatg

SEQ ID NO: 5157847 - DNA, 25 bp, Homo sapien
cacatacttgatgaatccatctgac

SEQ ID NO: 5157848 - DNA, 25 bp, Homo sapien
tctgaccagtgggttcggaattttg

SEQ ID NO: 5157849 - DNA, 25 bp, Homo sapien
tggagaccctttgcacacatacttg

SEQ ID NO: 5157850 - DNA, 25 bp, Homo sapien
cagtgagtggaagtggatcctttga

SEQ ID NO: 5157851 - DNA, 25 bp, Homo sapien
tgtgccttctaccttgttaccagag

SEQ ID NO: 5157852 - DNA, 25 bp, Homo sapien
tgtggtttccgcacagtgctttgtt

SEQ ID NO: 5157853 - DNA, 25 bp, Homo sapien
caggtcttgaaagtggggtcgtgta

SEQ ID NO: 5157854 - DNA, 25 bp, Homo sapien
atggttgtggtttccgcacagtgct

SEQ ID NO: 5157855 - DNA, 25 bp, Homo sapien
ccaagcacagggctatccacattgt

SEQ ID NO: 5157856 - DNA, 25 bp, Homo sapien
gccaagcacagggctatccacattg

SEQ ID NO: 5157857 - DNA, 25 bp, Homo sapien
cactgtgatcacaagcccagtcaca

SEQ ID NO: 5157858 - DNA, 25 bp, Homo sapien
agtcacagttgaggcattgagtctt

SEQ ID NO: 5157859 - DNA, 25 bp, Homo sapien
ctgtgatcacaagcccagtcacagt

SEQ ID NO: 5157860 - DNA, 25 bp, Homo sapien
ccccactgtgatcacaagcccagtc

SEQ ID NO: 5157861 - DNA, 25 bp, Homo sapien
tcaaatctacgtccagtgtgatgag

SEQ ID NO: 5157862 - DNA, 25 bp, Homo sapien
tcaagtctatgcctgtcagaccact

SEQ ID NO: 5157863 - DNA, 25 bp, Homo sapien
tggtctggccccagggcacgtgaac

SEQ ID NO: 5157864 - DNA, 25 bp, Homo sapien
gaggttggtgattggtaaaatgcca

SEQ ID NO: 5157865 - DNA, 25 bp, Homo sapien
catctgttggtactctctgtcacga

SEQ ID NO: 5157866 - DNA, 25 bp, Homo sapien
gggaaagaaacatctgttggtactc

SEQ ID NO: 5157867 - DNA, 25 bp, Homo sapien
tactctctgtcacgaatcattctca

SEQ ID NO: 5157868 - DNA, 25 bp, Homo sapien
tgttggtactctctgtcacgaatca

SEQ ID NO: 5157869 - DNA, 25 bp, Homo sapien
cagctgtaagatgactggttagatc

SEQ ID NO: 5157870 - DNA, 25 bp, Homo sapien
tctggcccttatctccaccgttagg

SEQ ID NO: 5157871 - DNA, 25 bp, Homo sapien
caagagagctgtaccagctgtaaga

SEQ ID NO: 5157872 - DNA, 25 bp, Homo sapien
aattgaaaaggctacttctccagct

SEQ ID NO: 5157873 - DNA, 25 bp, Homo sapien
ttgccctgtaacttgtgccctcatc

SEQ ID NO: 5157874 - DNA, 25 bp, Homo sapien
ttaaagtgagtccataaaacagtat

SEQ ID NO: 5157875 - DNA, 25 bp, Homo sapien
ctgaggaggattttaaagtgagtcc

SEQ ID NO: 5157876 - DNA, 25 bp, Homo sapien
ccgtgtgaaaaggtgtggcttggcc

SEQ ID NO: 5157877 - DNA, 25 bp, Homo sapien
ctacaaattcatatgactcagaatt

SEQ ID NO: 5157878 - DNA, 25 bp, Homo sapien
tacaaattcatatgactcagaattt

SEQ ID NO: 5157879 - DNA, 25 bp, Homo sapien
ccaagaaggttgtacattgtccccg

SEQ ID NO: 5157880 - DNA, 25 bp, Homo sapien
tgttgtaagaattccccaggtggga

SEQ ID NO: 5157881 - DNA, 25 bp, Homo sapien
tgtggactccgttatagacagtggg

SEQ ID NO: 5157882 - DNA, 25 bp, Homo sapien
gatgtgtgcccaaaaatatcctgtc

SEQ ID NO: 5157883 - DNA, 25 bp, Homo sapien
tagatgcattcccacccttagcaac

SEQ ID NO: 5157884 - DNA, 25 bp, Homo sapien
tttgagttgaggtagatgcattccc

SEQ ID NO: 5157885 - DNA, 25 bp, Homo sapien
tctggccttcccatatggctttgaa

SEQ ID NO: 5157886 - DNA, 25 bp, Homo sapien
gggtctgacttggtgtttatctctc

SEQ ID NO: 5157887 - DNA, 25 bp, Homo sapien
tacatgtctctagtttgtcccccat

SEQ ID NO: 5157888 - DNA, 25 bp, Homo sapien
tatcttaatacatgtctctagtttg

SEQ ID NO: 5157889 - DNA, 25 bp, Homo sapien
gtttgactttttatcttaatacatg

SEQ ID NO: 5157890 - DNA, 25 bp, Homo sapien
tttttatcttaatacatgtctctag

SEQ ID NO: 5157891 - DNA, 25 bp, Homo sapien
gtgaccttgtgcgtccaggttcttg

SEQ ID NO: 5157892 - DNA, 25 bp, Homo sapien
gctgtgaccttgtgcgtccaggttc

SEQ ID NO: 5157893 - DNA, 25 bp, Homo sapien
tgtgaccttgtgcgtccaggttctt

SEQ ID NO: 5157894 - DNA, 25 bp, Homo sapien
ctgtgaccttgtgcgtccaggttct

SEQ ID NO: 5157895 - DNA, 25 bp, Homo sapien
cctattccaagtggcctcatcccag

SEQ ID NO: 5157896 - DNA, 25 bp, Homo sapien
attccaagtggcctcatcccagttc

SEQ ID NO: 5157897 - DNA, 25 bp, Homo sapien
tttctcgggccgtctctcaacccta

SEQ ID NO: 5157898 - DNA, 25 bp, Homo sapien
tttatttttctcgggccgtctctca

SEQ ID NO: 5157899 - DNA, 25 bp, Homo sapien
ggcatagagaaaggaagcagtgtcc

SEQ ID NO: 5157900 - DNA, 25 bp, Homo sapien
actggagtccgttctgccatcttgc

SEQ ID NO: 5157901 - DNA, 25 bp, Homo sapien
gattctggagatgaaacctaatgag

SEQ ID NO: 5157902 - DNA, 25 bp, Homo sapien
tccacttggggtggattctggagat

SEQ ID NO: 5157903 - DNA, 25 bp, Homo sapien
ctgggattcgagactggagggcttg

SEQ ID NO: 5157904 - DNA, 25 bp, Homo sapien
cctcttattggctggtactctggca

SEQ ID NO: 5157905 - DNA, 25 bp, Homo sapien
tgtgacaagtctaggaacagccatt

SEQ ID NO: 5157906 - DNA, 25 bp, Homo sapien
caatctcccaaataatcaatctgta

SEQ ID NO: 5157907 - DNA, 25 bp, Homo sapien
agaagacaacccctccaactgggag

SEQ ID NO: 5157908 - DNA, 25 bp, Homo sapien
tcagaggagcctcttgaggccccat

SEQ ID NO: 5157909 - DNA, 25 bp, Homo sapien
aggagcctcttgaggccccatctgt

SEQ ID NO: 5157910 - DNA, 25 bp, Homo sapien
cagaggagcctcttgaggccccatc

SEQ ID NO: 5157911 - DNA, 25 bp, Homo sapien
caggagctgttgtagggtgacggaa

SEQ ID NO: 5157912 - DNA, 25 bp, Homo sapien
tgacggaaaggaattggaatggccc

SEQ ID NO: 5157913 - DNA, 25 bp, Homo sapien
gaatggcccatcaccctacagatct

SEQ ID NO: 5157914 - DNA, 25 bp, Homo sapien
ttctcacctatcctcaggtttgggt

SEQ ID NO: 5157915 - DNA, 25 bp, Homo sapien
tgctgcccaatagcctggcacttac

SEQ ID NO: 5157916 - DNA, 25 bp, Homo sapien
cttcttgctgcccaatagcctggca

SEQ ID NO: 5157917 - DNA, 25 bp, Homo sapien
ttgctgcccaatagcctggcactta

SEQ ID NO: 5157918 - DNA, 25 bp, Homo sapien
tcttgctgcccaatagcctggcact

SEQ ID NO: 5157919 - DNA, 25 bp, Homo sapien
agtgcgccgagccagtgaggaacaa

SEQ ID NO: 5157920 - DNA, 25 bp, Homo sapien
ataagtacaactgagaagcacccgg

SEQ ID NO: 5157921 - DNA, 25 bp, Homo sapien
ggttcatggaactctgttgagggac

SEQ ID NO: 5157922 - DNA, 25 bp, Homo sapien
gcagaaggcagataagggtaggcat

SEQ ID NO: 5157923 - DNA, 25 bp, Homo sapien
tcagaaaaggccatgtaaatcagag

SEQ ID NO: 5157924 - DNA, 25 bp, Homo sapien
tggctctcagaaaaggccatgtaaa

SEQ ID NO: 5157925 - DNA, 25 bp, Homo sapien
gctctcagaaaaggccatgtaaatc

SEQ ID NO: 5157926 - DNA, 25 bp, Homo sapien
ctctggctctcagaaaaggccatgt

SEQ ID NO: 5157927 - DNA, 25 bp, Homo sapien
gagggcttagcaatctttatcatcc

SEQ ID NO: 5157928 - DNA, 25 bp, Homo sapien
agaactgctgcccagtcatgggcca

SEQ ID NO: 5157929 - DNA, 25 bp, Homo sapien
gatacaaatagattcatggtgctgg

SEQ ID NO: 5157930 - DNA, 25 bp, Homo sapien
tgtgactgtgcataggaggtttcca

SEQ ID NO: 5157931 - DNA, 25 bp, Homo sapien
ctgcctttttataaactgtggtcat

SEQ ID NO: 5157932 - DNA, 25 bp, Homo sapien
cttctcttggacatctggaccaaac

SEQ ID NO: 5157933 - DNA, 25 bp, Homo sapien
ctcttggacatctggaccaaactct

SEQ ID NO: 5157934 - DNA, 25 bp, Homo sapien
gacatctggaccaaactctgccttt

SEQ ID NO: 5157935 - DNA, 25 bp, Homo sapien
gaagcgcagacagacaatgtgagaa

SEQ ID NO: 5157936 - DNA, 25 bp, Homo sapien
tgctgtttttagtcgctacccctgg

SEQ ID NO: 5157937 - DNA, 25 bp, Homo sapien
acacagggcctacgggtcatctggc

SEQ ID NO: 5157938 - DNA, 25 bp, Homo sapien
gccacgcaatttagtgtcttccaga

SEQ ID NO: 5157939 - DNA, 25 bp, Homo sapien
ctgctcagcacgcttttcccggctg

SEQ ID NO: 5157940 - DNA, 25 bp, Homo sapien
tcagcacgcttttcccggctgacag

SEQ ID NO: 5157941 - DNA, 25 bp, Homo sapien
tgcttcccgatgctctgctcagcac

SEQ ID NO: 5157942 - DNA, 25 bp, Homo sapien
tcactgcttcccgatgctctgctca

SEQ ID NO: 5157943 - DNA, 25 bp, Homo sapien
tctcagcatattctggacccacaac

SEQ ID NO: 5157944 - DNA, 25 bp, Homo sapien
gatacccgtgattcagcagacccaa

SEQ ID NO: 5157945 - DNA, 25 bp, Homo sapien
attctggacccacaacggatacccg

SEQ ID NO: 5157946 - DNA, 25 bp, Homo sapien
aacggatacccgtgattcagcagac

SEQ ID NO: 5157947 - DNA, 25 bp, Homo sapien
cctagttgttaaacacatcctttca

SEQ ID NO: 5157948 - DNA, 25 bp, Homo sapien
ctttcaattaatctcccagccggtg

SEQ ID NO: 5157949 - DNA, 25 bp, Homo sapien
cagccggtgaagtgctgctccctgg

SEQ ID NO: 5157950 - DNA, 25 bp, Homo sapien
gatcttgagcaatgtgggttgcctg

SEQ ID NO: 5157951 - DNA, 25 bp, Homo sapien
tctggaactgtcaaagaggtagcgc

SEQ ID NO: 5157952 - DNA, 25 bp, Homo sapien
tcatggccataattgcagaacaaca

SEQ ID NO: 5157953 - DNA, 25 bp, Homo sapien
cacagttcctcaagcaggaggtatt

SEQ ID NO: 5157954 - DNA, 25 bp, Homo sapien
ggtatttcatcttcgcaacatctgg

SEQ ID NO: 5157955 - DNA, 25 bp, Homo sapien
tatcctttgtgttggaccatctcca

SEQ ID NO: 5157956 - DNA, 25 bp, Homo sapien
tcctaccctctgcagtagagcaggg

SEQ ID NO: 5157957 - DNA, 25 bp, Homo sapien
gatctcatgattgcaacagcggtcc

SEQ ID NO: 5157958 - DNA, 25 bp, Homo sapien
tcagagctcatgaccacacttggtt

SEQ ID NO: 5157959 - DNA, 25 bp, Homo sapien
tcaagagacgacttgctgtttggaa

SEQ ID NO: 5157960 - DNA, 25 bp, Homo sapien
gacgacttgctgtttggaagccaaa

SEQ ID NO: 5157961 - DNA, 25 bp, Homo sapien
tgtttggaagccaaataaagattcc

SEQ ID NO: 5157962 - DNA, 25 bp, Homo sapien
ccaaataaagattccgaatgtgaga

SEQ ID NO: 5157963 - DNA, 25 bp, Homo sapien
ccttgagcatgggtcttcttaggct

SEQ ID NO: 5157964 - DNA, 25 bp, Homo sapien
acaaactggtggcaaagctagcctt

SEQ ID NO: 5157965 - DNA, 25 bp, Homo sapien
ttgagcatgggtcttcttaggctgg

SEQ ID NO: 5157966 - DNA, 25 bp, Homo sapien
gtggcaaagctagccttgagcatgg

SEQ ID NO: 5157967 - DNA, 25 bp, Homo sapien
taacagtagtaatgtatgtctgtgc

SEQ ID NO: 5157968 - DNA, 25 bp, Homo sapien
tgtattatcttcactgtctgtctcc

SEQ ID NO: 5157969 - DNA, 25 bp, Homo sapien
agaatgtaacgtccacaatgtttac

SEQ ID NO: 5157970 - DNA, 25 bp, Homo sapien
tcctcccagtagaatgtaacgtcca

SEQ ID NO: 5157971 - DNA, 25 bp, Homo sapien
ggtgggacagtgtttgggcaggtgg

SEQ ID NO: 5157972 - DNA, 25 bp, Homo sapien
tggtgggacagtgtttgggcaggtg

SEQ ID NO: 5157973 - DNA, 25 bp, Homo sapien
ttggtgggacagtgtttgggcaggt

SEQ ID NO: 5157974 - DNA, 25 bp, Homo sapien
cttggtgggacagtgtttgggcagg

SEQ ID NO: 5157975 - DNA, 25 bp, Homo sapien
tccagccttaacaagccagtggcct

SEQ ID NO: 5157976 - DNA, 25 bp, Homo sapien
atttccgggtgggaagaacatccag

SEQ ID NO: 5157977 - DNA, 25 bp, Homo sapien
ggtgggaagaacatccagccttaac

SEQ ID NO: 5157978 - DNA, 25 bp, Homo sapien
gccttaacaagccagtggcctcttg

SEQ ID NO: 5157979 - DNA, 25 bp, Homo sapien
aacgcaacttcaatacgggattcca

SEQ ID NO: 5157980 - DNA, 25 bp, Homo sapien
tgactgccgacgaggccggcaaatg

SEQ ID NO: 5157981 - DNA, 25 bp, Homo sapien
cttcaatacgggattccagattcca

SEQ ID NO: 5157982 - DNA, 25 bp, Homo sapien
atctcagcaccatgactgccgacga

SEQ ID NO: 5157983 - DNA, 25 bp, Homo sapien
ctctacggcaccggtaatgaggaga

SEQ ID NO: 5157984 - DNA, 25 bp, Homo sapien
tctacggcaccggtaatgaggagaa

SEQ ID NO: 5157985 - DNA, 25 bp, Homo sapien
ggcaccggtaatgaggagaagtgtt

SEQ ID NO: 5157986 - DNA, 25 bp, Homo sapien
tacggcaccggtaatgaggagaagt

SEQ ID NO: 5157987 - DNA, 25 bp, Homo sapien
ggtcctctttccaggagagaaacat

SEQ ID NO: 5157988 - DNA, 25 bp, Homo sapien
gcatcattctggtcctctttccagg

SEQ ID NO: 5157989 - DNA, 25 bp, Homo sapien
ctgggaaatggcatcattctggtcc

SEQ ID NO: 5157990 - DNA, 25 bp, Homo sapien
tctggtcctctttccaggagagaaa

SEQ ID NO: 5157991 - DNA, 25 bp, Homo sapien
ccaggaatccaaggcacgaagctgt

SEQ ID NO: 5157992 - DNA, 25 bp, Homo sapien
tctttagaacagtattggcatcccc

SEQ ID NO: 5157993 - DNA, 25 bp, Homo sapien
cgtagtcctattaaacacctctgat

SEQ ID NO: 5157994 - DNA, 25 bp, Homo sapien
gctgttgaattcctggcaatctgaa

SEQ ID NO: 5157995 - DNA, 25 bp, Homo sapien
tccagcagcagtgcctagtagcaga

SEQ ID NO: 5157996 - DNA, 25 bp, Homo sapien
cctagtagcagagtgagcagcaaga

SEQ ID NO: 5157997 - DNA, 25 bp, Homo sapien
attcaaagaaggagtggacggcaga

SEQ ID NO: 5157998 - DNA, 25 bp, Homo sapien
catcctggaagtgcgggaaggattc

SEQ ID NO: 5157999 - DNA, 25 bp, Homo sapien
tgggtgctggctgggttgcaaagcc

SEQ ID NO: 5158000 - DNA, 25 bp, Homo sapien
cctcttctggtaggggttcctcaat

SEQ ID NO: 5158001 - DNA, 25 bp, Homo sapien
gggtgctggctgggttgcaaagcct

SEQ ID NO: 5158002 - DNA, 25 bp, Homo sapien
ctcttctggtaggggttcctcaatg

SEQ ID NO: 5158003 - DNA, 25 bp, Homo sapien
ttgtacccaagggccagacggttgc

SEQ ID NO: 5158004 - DNA, 25 bp, Homo sapien
gaggcacgtgaggttcttagggaag

SEQ ID NO: 5158005 - DNA, 25 bp, Homo sapien
ccagcgctgttcaggggatgaagta

SEQ ID NO: 5158006 - DNA, 25 bp, Homo sapien
cagaagctaaggtgcactcctccaa

SEQ ID NO: 5158007 - DNA, 25 bp, Homo sapien
gaatgctcagtgtgcatgggaggag

SEQ ID NO: 5158008 - DNA, 25 bp, Homo sapien
gtgcttaatcgagccctgctgtagg

SEQ ID NO: 5158009 - DNA, 25 bp, Homo sapien
tctcactgggtgaggtgcgtgaaga

SEQ ID NO: 5158010 - DNA, 25 bp, Homo sapien
tctttatggagggagtacacagtgc

SEQ ID NO: 5158011 - DNA, 25 bp, Homo sapien
gcctggtgctgtgtgcctgtgccat

SEQ ID NO: 5158012 - DNA, 25 bp, Homo sapien
gccagcctggtgctgtgtgcctgtg

SEQ ID NO: 5158013 - DNA, 25 bp, Homo sapien
agcctggtgctgtgtgcctgtgcca

SEQ ID NO: 5158014 - DNA, 25 bp, Homo sapien
cagcctggtgctgtgtgcctgtgcc

SEQ ID NO: 5158015 - DNA, 25 bp, Homo sapien
cttcacttccaggtccaaggaagac

SEQ ID NO: 5158016 - DNA, 25 bp, Homo sapien
acttccaggtccaaggaagacttgc

SEQ ID NO: 5158017 - DNA, 25 bp, Homo sapien
ttccaggtccaaggaagacttgctt

SEQ ID NO: 5158018 - DNA, 25 bp, Homo sapien
tagttgtcttcacttccaggtccaa

SEQ ID NO: 5158019 - DNA, 25 bp, Homo sapien
catttgaaccgaatgaatttctgaa

SEQ ID NO: 5158020 - DNA, 25 bp, Homo sapien
ttttaacttccataatgtcaaggca

SEQ ID NO: 5158021 - DNA, 25 bp, Homo sapien
cctgggtgtttggaatatgtcagaa

SEQ ID NO: 5158022 - DNA, 25 bp, Homo sapien
caagtgcctgcgatgttcttggtac

SEQ ID NO: 5158023 - DNA, 25 bp, Homo sapien
caaggggcagttggaaggaagtgat

SEQ ID NO: 5158024 - DNA, 25 bp, Homo sapien
ttcacaaggggcagttggaaggaag

SEQ ID NO: 5158025 - DNA, 25 bp, Homo sapien
ggggcagttggaaggaagtgataat

SEQ ID NO: 5158026 - DNA, 25 bp, Homo sapien
cacaaggggcagttggaaggaagtg

SEQ ID NO: 5158027 - DNA, 25 bp, Homo sapien
gatctggcggttgtctcctccgcga

SEQ ID NO: 5158028 - DNA, 25 bp, Homo sapien
ctcctccgcgatcagggatgctttg

SEQ ID NO: 5158029 - DNA, 25 bp, Homo sapien
tcctccgcgatcagggatgctttga

SEQ ID NO: 5158030 - DNA, 25 bp, Homo sapien
ctggcggttgtctcctccgcgatca

SEQ ID NO: 5158031 - DNA, 25 bp, Homo sapien
acgttcccatccaaccttacaccag

SEQ ID NO: 5158032 - DNA, 25 bp, Homo sapien
tctcattcacgttcccatccaacct

SEQ ID NO: 5158033 - DNA, 25 bp, Homo sapien
ccatccaaccttacaccagcccctg

SEQ ID NO: 5158034 - DNA, 25 bp, Homo sapien
cagcccctgtaaccttttccgtgct

SEQ ID NO: 5158035 - DNA, 25 bp, Homo sapien
gcacattacacagggagagccagga

SEQ ID NO: 5158036 - DNA, 25 bp, Homo sapien
gaacttggggcacattacacaggga

SEQ ID NO: 5158037 - DNA, 25 bp, Homo sapien
cttccactccctattttcagtggaa

SEQ ID NO: 5158038 - DNA, 25 bp, Homo sapien
cactccctattttcagtggaatcca

SEQ ID NO: 5158039 - DNA, 25 bp, Homo sapien
ttggctgtgagacgccgtcggggaa

SEQ ID NO: 5158040 - DNA, 25 bp, Homo sapien
cgtcggggaaagcccctgcgtggct

SEQ ID NO: 5158041 - DNA, 25 bp, Homo sapien
gctgtgagacgccgtcggggaaagc

SEQ ID NO: 5158042 - DNA, 25 bp, Homo sapien
tcggggaaagcccctgcgtggcttc

SEQ ID NO: 5158043 - DNA, 25 bp, Homo sapien
tgcgcgacttttgccccaggaagaa

SEQ ID NO: 5158044 - DNA, 25 bp, Homo sapien
caccaggaagggaaccaggtatgct

SEQ ID NO: 5158045 - DNA, 25 bp, Homo sapien
gaggcgcagagtcctttgtgcccat

SEQ ID NO: 5158046 - DNA, 25 bp, Homo sapien
tgtgcccatcgcatgcaaactttgg

SEQ ID NO: 5158047 - DNA, 25 bp, Homo sapien
aatggagggattattgcccactccc

SEQ ID NO: 5158048 - DNA, 25 bp, Homo sapien
tcagccagaagttaacaaagtttgc

SEQ ID NO: 5158049 - DNA, 25 bp, Homo sapien
ggagaatggagggattattgcccac

SEQ ID NO: 5158050 - DNA, 25 bp, Homo sapien
cccctccgccgtgccaaattcagcc

SEQ ID NO: 5158051 - DNA, 25 bp, Homo sapien
cagggctgaccgcattgtggtgcaa

SEQ ID NO: 5158052 - DNA, 25 bp, Homo sapien
tagttccacgcttatctggcctcga

SEQ ID NO: 5158053 - DNA, 25 bp, Homo sapien
caaagtgacaagtcgagtgttgact

SEQ ID NO: 5158054 - DNA, 25 bp, Homo sapien
ggcctcgagtttcatatccattctt

SEQ ID NO: 5158055 - DNA, 25 bp, Homo sapien
acccctgtatccctttgactcttgg

SEQ ID NO: 5158056 - DNA, 25 bp, Homo sapien
ttgactcttgggcttccgagtaggg

SEQ ID NO: 5158057 - DNA, 25 bp, Homo sapien
tggacatccgaacgctccgactgtc

SEQ ID NO: 5158058 - DNA, 25 bp, Homo sapien
accagcgctgaccttgggtgaggcc

SEQ ID NO: 5158059 - DNA, 25 bp, Homo sapien
cccgggccacgttcattgcacagtt

SEQ ID NO: 5158060 - DNA, 25 bp, Homo sapien
cttctgcgaccagccttctccggcc

SEQ ID NO: 5158061 - DNA, 25 bp, Homo sapien
gttctcccgggccacgttcattgca

SEQ ID NO: 5158062 - DNA, 25 bp, Homo sapien
cacagtttcgatttgtttaggccgg

SEQ ID NO: 5158063 - DNA, 25 bp, Homo sapien
ctgcgtccagactgggtccgccgaa

SEQ ID NO: 5158064 - DNA, 25 bp, Homo sapien
ttcttacaggcacttccggtcagcg

SEQ ID NO: 5158065 - DNA, 25 bp, Homo sapien
tggccttgctccaacccggctggag

SEQ ID NO: 5158066 - DNA, 25 bp, Homo sapien
ccaggccgcaggagggtacggccct

SEQ ID NO: 5158067 - DNA, 25 bp, Homo sapien
gaatgattcgcagtcgcatagcgca

SEQ ID NO: 5158068 - DNA, 25 bp, Homo sapien
cgcatagcgcagtgtcaagtctcca

SEQ ID NO: 5158069 - DNA, 25 bp, Homo sapien
ccacattggtcctggactttggcac

SEQ ID NO: 5158070 - DNA, 25 bp, Homo sapien
ttataaatagaagaatgattcgcag

SEQ ID NO: 5158071 - DNA, 25 bp, Homo sapien
ctgattcaaccacgactactgcaag

SEQ ID NO: 5158072 - DNA, 25 bp, Homo sapien
gacagcaaccatttcctgcagcgag

SEQ ID NO: 5158073 - DNA, 25 bp, Homo sapien
tccaaagacagaagggacccaggag

SEQ ID NO: 5158074 - DNA, 25 bp, Homo sapien
cggctctgccatctgataaatagaa

SEQ ID NO: 5158075 - DNA, 25 bp, Homo sapien
ctagctgagtctaaacagtattgat

SEQ ID NO: 5158076 - DNA, 25 bp, Homo sapien
gctgagtctaaacagtattgatccc

SEQ ID NO: 5158077 - DNA, 25 bp, Homo sapien
gagtctaaacagtattgatccctgg

SEQ ID NO: 5158078 - DNA, 25 bp, Homo sapien
tctaaacagtattgatccctggttc

SEQ ID NO: 5158079 - DNA, 25 bp, Homo sapien
tgcacttcgtttgcgggagggcttc

SEQ ID NO: 5158080 - DNA, 25 bp, Homo sapien
caaatgctgggaaagctgttcggag

SEQ ID NO: 5158081 - DNA, 25 bp, Homo sapien
gctgcttgggccttgaacccgaggt

SEQ ID NO: 5158082 - DNA, 25 bp, Homo sapien
aggtgggcgcacgtctgccgtatct

SEQ ID NO: 5158083 - DNA, 25 bp, Homo sapien
cggctctcctgtttgcgggctcggg

SEQ ID NO: 5158084 - DNA, 25 bp, Homo sapien
gctctcctgtttgcgggctcgggaa

SEQ ID NO: 5158085 - DNA, 25 bp, Homo sapien
ggctctcctgtttgcgggctcggga

SEQ ID NO: 5158086 - DNA, 25 bp, Homo sapien
ctctcctgtttgcgggctcgggaag

SEQ ID NO: 5158087 - DNA, 25 bp, Homo sapien
tctttgtgtgcgagagtgtgtttcc

SEQ ID NO: 5158088 - DNA, 25 bp, Homo sapien
gaccccacagactgcgagactgaac

SEQ ID NO: 5158089 - DNA, 25 bp, Homo sapien
ttcgttttccggagacttgttgaga

SEQ ID NO: 5158090 - DNA, 25 bp, Homo sapien
gcatcgccggccctggtttctctgg

SEQ ID NO: 5158091 - DNA, 25 bp, Homo sapien
gcaccaccaactttttcatcgacaa

SEQ ID NO: 5158092 - DNA, 25 bp, Homo sapien
acaacatcctgaggccggacttcgg

SEQ ID NO: 5158093 - DNA, 25 bp, Homo sapien
cggacttcggctgcaaaaaggagca

SEQ ID NO: 5158094 - DNA, 25 bp, Homo sapien
tttttcatcgacaacatcctgaggc

SEQ ID NO: 5158095 - DNA, 25 bp, Homo sapien
ataataacgcggcacttgtagcaga

SEQ ID NO: 5158096 - DNA, 25 bp, Homo sapien
cacttgtagcagaaatctcctcgca

SEQ ID NO: 5158097 - DNA, 25 bp, Homo sapien
tattgtgttgcgacaactcattcat

SEQ ID NO: 5158098 - DNA, 25 bp, Homo sapien
tggtcatccagtccccgtaggaagg

SEQ ID NO: 5158099 - DNA, 25 bp, Homo sapien
gaaccacttggagaaagatccttcc

SEQ ID NO: 5158100 - DNA, 25 bp, Homo sapien
caagttacgggcctctgaatgcacc

SEQ ID NO: 5158101 - DNA, 25 bp, Homo sapien
catgatcaggattggacatttctca

SEQ ID NO: 5158102 - DNA, 25 bp, Homo sapien
tggttgtaaacctcgcagcacttcc

SEQ ID NO: 5158103 - DNA, 25 bp, Homo sapien
tgggtctcactcaagagctcgtcct

SEQ ID NO: 5158104 - DNA, 25 bp, Homo sapien
gaaaagcagcttgttgggtctcact

SEQ ID NO: 5158105 - DNA, 25 bp, Homo sapien
tgcaatttggtgaaaagcagcttgt

SEQ ID NO: 5158106 - DNA, 25 bp, Homo sapien
gagctcgtcctccttgagaattttc

SEQ ID NO: 5158107 - DNA, 25 bp, Homo sapien
aaacacaagccaggaggaaggaggc

SEQ ID NO: 5158108 - DNA, 25 bp, Homo sapien
tgaaacacaagccaggaggaaggag

SEQ ID NO: 5158109 - DNA, 25 bp, Homo sapien
acacaagccaggaggaaggaggctg

SEQ ID NO: 5158110 - DNA, 25 bp, Homo sapien
ctgaaacacaagccaggaggaagga

SEQ ID NO: 5158111 - DNA, 25 bp, Homo sapien
ggatcaggtagatgaccaccacagc

SEQ ID NO: 5158112 - DNA, 25 bp, Homo sapien
caggatcaggtagatgaccaccaca

SEQ ID NO: 5158113 - DNA, 25 bp, Homo sapien
tagggagaagttcaccccatttctc

SEQ ID NO: 5158114 - DNA, 25 bp, Homo sapien
accaccacagctagggagaagttca

SEQ ID NO: 5158115 - DNA, 25 bp, Homo sapien
agcaagtgctcatggctgacgcgga

SEQ ID NO: 5158116 - DNA, 25 bp, Homo sapien
ggaaatacatctccaggacccggag

SEQ ID NO: 5158117 - DNA, 25 bp, Homo sapien
gagtgaagttgtctacccgctgcag

SEQ ID NO: 5158118 - DNA, 25 bp, Homo sapien
gatgcaccctgagccaggtgttctc

SEQ ID NO: 5158119 - DNA, 25 bp, Homo sapien
ggctcttggaggtcacactttgctt

SEQ ID NO: 5158120 - DNA, 25 bp, Homo sapien
aatttcctggttcctgatcccgctg

SEQ ID NO: 5158121 - DNA, 25 bp, Homo sapien
tcccagacctctgttgagaagtcct

SEQ ID NO: 5158122 - DNA, 25 bp, Homo sapien
cattgagctggttgctctaagtccc

SEQ ID NO: 5158123 - DNA, 25 bp, Homo sapien
ctggggcgccttgttcacctttgat

SEQ ID NO: 5158124 - DNA, 25 bp, Homo sapien
cttgttcacctttgattctgaacat

SEQ ID NO: 5158125 - DNA, 25 bp, Homo sapien
ggcgccttgttcacctttgattctg

SEQ ID NO: 5158126 - DNA, 25 bp, Homo sapien
ccttgttcacctttgattctgaaca

SEQ ID NO: 5158127 - DNA, 25 bp, Homo sapien
cttctcagcaggtggtcccggcggg

SEQ ID NO: 5158128 - DNA, 25 bp, Homo sapien
ccatagcccccttggctcccttctc

SEQ ID NO: 5158129 - DNA, 25 bp, Homo sapien
ttctcagcaggtggtcccggcgggc

SEQ ID NO: 5158130 - DNA, 25 bp, Homo sapien
tgctccatctcgtcccatagccccc

SEQ ID NO: 5158131 - DNA, 25 bp, Homo sapien
ctcccttgactcccggtgggccttg

SEQ ID NO: 5158132 - DNA, 25 bp, Homo sapien
ctctcccttgactcccggtgggcct

SEQ ID NO: 5158133 - DNA, 25 bp, Homo sapien
ccgcctctcccttgactcccggtgg

SEQ ID NO: 5158134 - DNA, 25 bp, Homo sapien
gcctctcccttgactcccggtgggc

SEQ ID NO: 5158135 - DNA, 25 bp, Homo sapien
tagtaaaggtcttaatgtcttcgca

SEQ ID NO: 5158136 - DNA, 25 bp, Homo sapien
actcccttgtaaatcctctcatctg

SEQ ID NO: 5158137 - DNA, 25 bp, Homo sapien
tcatctgccctttgtctagtaaagg

SEQ ID NO: 5158138 - DNA, 25 bp, Homo sapien
gcctcaaccccttgcggaatttgca

SEQ ID NO: 5158139 - DNA, 25 bp, Homo sapien
catatggagtacagactggaggtgc

SEQ ID NO: 5158140 - DNA, 25 bp, Homo sapien
gctagcatatggagtacagactgga

SEQ ID NO: 5158141 - DNA, 25 bp, Homo sapien
gcccaggtatccaaggctagcatat

SEQ ID NO: 5158142 - DNA, 25 bp, Homo sapien
tatccaaggctagcatatggagtac

SEQ ID NO: 5158143 - DNA, 25 bp, Homo sapien
cctggagcaccctggggtccttgga

SEQ ID NO: 5158144 - DNA, 25 bp, Homo sapien
tggagcaccctggggtccttggagg

SEQ ID NO: 5158145 - DNA, 25 bp, Homo sapien
cagtggctccttgcttccctggagc

SEQ ID NO: 5158146 - DNA, 25 bp, Homo sapien
gtggctccttgcttccctggagcac

SEQ ID NO: 5158147 - DNA, 25 bp, Homo sapien
ccttttgggccaatgagacccccat

SEQ ID NO: 5158148 - DNA, 25 bp, Homo sapien
aatgagacccccatcgcctttgctg

SEQ ID NO: 5158149 - DNA, 25 bp, Homo sapien
cagaaccatccagggcatttgaaac

SEQ ID NO: 5158150 - DNA, 25 bp, Homo sapien
gcatttgaaacagaccctcgagccc

SEQ ID NO: 5158151 - DNA, 25 bp, Homo sapien
ggcatttgaaacagaccctcgagcc

SEQ ID NO: 5158152 - DNA, 25 bp, Homo sapien
gtcagaaccatccagggcatttgaa

SEQ ID NO: 5158153 - DNA, 25 bp, Homo sapien
tgccttttttgctgtgggccaggac

SEQ ID NO: 5158154 - DNA, 25 bp, Homo sapien
cactccccagcaaagggaatggctt

SEQ ID NO: 5158155 - DNA, 25 bp, Homo sapien
agagggcagtatcacatcagtcaga

SEQ ID NO: 5158156 - DNA, 25 bp, Homo sapien
gggccaggaccatcaagttacagca

SEQ ID NO: 5158157 - DNA, 25 bp, Homo sapien
cccatgacccctgcatctcctttca

SEQ ID NO: 5158158 - DNA, 25 bp, Homo sapien
gaggccccatgacccctgcatctcc

SEQ ID NO: 5158159 - DNA, 25 bp, Homo sapien
caggaggccccatgacccctgcatc

SEQ ID NO: 5158160 - DNA, 25 bp, Homo sapien
ctttactcccctgggctccaggagg

SEQ ID NO: 5158161 - DNA, 25 bp, Homo sapien
ctggtgggcctggcctcccgaagtc

SEQ ID NO: 5158162 - DNA, 25 bp, Homo sapien
ggtgggcctggcctcccgaagtcac

SEQ ID NO: 5158163 - DNA, 25 bp, Homo sapien
tggtgggcctggcctcccgaagtca

SEQ ID NO: 5158164 - DNA, 25 bp, Homo sapien
cctttagctccaggaaaaccagcca

SEQ ID NO: 5158165 - DNA, 25 bp, Homo sapien
gatctcctttagctccaggaaaacc

SEQ ID NO: 5158166 - DNA, 25 bp, Homo sapien
ctcctttagctccaggaaaaccagc

SEQ ID NO: 5158167 - DNA, 25 bp, Homo sapien
cttgatctcctttagctccaggaaa

SEQ ID NO: 5158168 - DNA, 25 bp, Homo sapien
ggagctctgggtgtgactgtccaac

SEQ ID NO: 5158169 - DNA, 25 bp, Homo sapien
ctgggtgtgactgtccaactccacc

SEQ ID NO: 5158170 - DNA, 25 bp, Homo sapien
caactccaccccctgggtggcaaag

SEQ ID NO: 5158171 - DNA, 25 bp, Homo sapien
taggagctctgggtgtgactgtcca

SEQ ID NO: 5158172 - DNA, 25 bp, Homo sapien
caggagggcccggaacaccctgcag

SEQ ID NO: 5158173 - DNA, 25 bp, Homo sapien
ggagggcccggaacaccctgcagtc

SEQ ID NO: 5158174 - DNA, 25 bp, Homo sapien
cccggaacaccctgcagtccaggtt

SEQ ID NO: 5158175 - DNA, 25 bp, Homo sapien
cggaacaccctgcagtccaggttgt

SEQ ID NO: 5158176 - DNA, 25 bp, Homo sapien
gcactgccaggctcacccttggcac

SEQ ID NO: 5158177 - DNA, 25 bp, Homo sapien
ctgctcgcccaggggagccagcact

SEQ ID NO: 5158178 - DNA, 25 bp, Homo sapien
ctcgcccaggggagccagcactgcc

SEQ ID NO: 5158179 - DNA, 25 bp, Homo sapien
agcactgccaggctcacccttggca

SEQ ID NO: 5158180 - DNA, 25 bp, Homo sapien
tgtggctcctggactcccggggctc

SEQ ID NO: 5158181 - DNA, 25 bp, Homo sapien
ctttgcttcctttcaggcctgtggc

SEQ ID NO: 5158182 - DNA, 25 bp, Homo sapien
ttgcttcctttcaggcctgtggctc

SEQ ID NO: 5158183 - DNA, 25 bp, Homo sapien
cctgtggctcctggactcccggggc

SEQ ID NO: 5158184 - DNA, 25 bp, Homo sapien
cttcccaggaatggaacaagctgct

SEQ ID NO: 5158185 - DNA, 25 bp, Homo sapien
ttcccaggaatggaacaagctgcta

SEQ ID NO: 5158186 - DNA, 25 bp, Homo sapien
agaaccatgatagggcctgaaagct

SEQ ID NO: 5158187 - DNA, 25 bp, Homo sapien
ctaagaaccatgatagggcctgaaa

SEQ ID NO: 5158188 - DNA, 25 bp, Homo sapien
tattgtgaccacctaaagagatgca

SEQ ID NO: 5158189 - DNA, 25 bp, Homo sapien
tgtgaccaccctttattgtgaccac

SEQ ID NO: 5158190 - DNA, 25 bp, Homo sapien
gaaggggcctcaaaacactgtgacc

SEQ ID NO: 5158191 - DNA, 25 bp, Homo sapien
ctaaagagatgcacccctccaactg

SEQ ID NO: 5158192 - DNA, 25 bp, Homo sapien
catatagattgtggtctttctcccc

SEQ ID NO: 5158193 - DNA, 25 bp, Homo sapien
caccctctgggatgcagatagaagg

SEQ ID NO: 5158194 - DNA, 25 bp, Homo sapien
ctagggacacgctcttaaggtagag

SEQ ID NO: 5158195 - DNA, 25 bp, Homo sapien
gacatatagattgtggtctttctcc

SEQ ID NO: 5158196 - DNA, 25 bp, Homo sapien
tggaataacgagcaagagaagttgt

SEQ ID NO: 5158197 - DNA, 25 bp, Homo sapien
ggccccttcttggaataacgagcaa

SEQ ID NO: 5158198 - DNA, 25 bp, Homo sapien
taacgagcaagagaagttgtgactc

SEQ ID NO: 5158199 - DNA, 25 bp, Homo sapien
ccttcttggaataacgagcaagaga

SEQ ID NO: 5158200 - DNA, 25 bp, Homo sapien
tttcttccttgctgtccttgaagtc

SEQ ID NO: 5158201 - DNA, 25 bp, Homo sapien
ccttttcttccttgctgtccttgaa

SEQ ID NO: 5158202 - DNA, 25 bp, Homo sapien
ctggaactcctgattctccttttct

SEQ ID NO: 5158203 - DNA, 25 bp, Homo sapien
ggaactcctgattctccttttcttc

SEQ ID NO: 5158204 - DNA, 25 bp, Homo sapien
ctacagtgagctatcctgtcctggc

SEQ ID NO: 5158205 - DNA, 25 bp, Homo sapien
gagctatcctgtcctggcaccactg

SEQ ID NO: 5158206 - DNA, 25 bp, Homo sapien
agtgagctatcctgtcctggcacca

SEQ ID NO: 5158207 - DNA, 25 bp, Homo sapien
tacagtgagctatcctgtcctggca

SEQ ID NO: 5158208 - DNA, 25 bp, Homo sapien
ccagcttgtccaggggctcccttgg

SEQ ID NO: 5158209 - DNA, 25 bp, Homo sapien
tggtctcccttctggccagcttgtc

SEQ ID NO: 5158210 - DNA, 25 bp, Homo sapien
ctttcactccctggtctcccttctg

SEQ ID NO: 5158211 - DNA, 25 bp, Homo sapien
ccctggtctcccttctggccagctt

SEQ ID NO: 5158212 - DNA, 25 bp, Homo sapien
ccctttactccttgctccccagaag

SEQ ID NO: 5158213 - DNA, 25 bp, Homo sapien
ttctccctttactccttgctcccca

SEQ ID NO: 5158214 - DNA, 25 bp, Homo sapien
ctccctttactccttgctccccaga

SEQ ID NO: 5158215 - DNA, 25 bp, Homo sapien
tttactccttgctccccagaagatc

SEQ ID NO: 5158216 - DNA, 25 bp, Homo sapien
ctttgggtaagtgcgggctctttct

SEQ ID NO: 5158217 - DNA, 25 bp, Homo sapien
gctttgggtaagtgcgggctctttc

SEQ ID NO: 5158218 - DNA, 25 bp, Homo sapien
gtaagtgcgggctctttcttttcat

SEQ ID NO: 5158219 - DNA, 25 bp, Homo sapien
ggtaagtgcgggctctttcttttca

SEQ ID NO: 5158220 - DNA, 25 bp, Homo sapien
gttactactgccgacaatcctgacg

SEQ ID NO: 5158221 - DNA, 25 bp, Homo sapien
aatcctgacggacactgagttttca

SEQ ID NO: 5158222 - DNA, 25 bp, Homo sapien
tttggagtaacccagcatgcggcag

SEQ ID NO: 5158223 - DNA, 25 bp, Homo sapien
taccactgtagtaaacttcagcccg

SEQ ID NO: 5158224 - DNA, 25 bp, Homo sapien
tccgtgccccgacactgaacattat

SEQ ID NO: 5158225 - DNA, 25 bp, Homo sapien
ttatccagccagatctgcccagtgc

SEQ ID NO: 5158226 - DNA, 25 bp, Homo sapien
gatggccccagctattcttggtgca

SEQ ID NO: 5158227 - DNA, 25 bp, Homo sapien
tgcagctccacagggtactctccgt

SEQ ID NO: 5158228 - DNA, 25 bp, Homo sapien
ttcccacatatgagcccgaggacac

SEQ ID NO: 5158229 - DNA, 25 bp, Homo sapien
gacacctcgggagcagagaagtgaa

SEQ ID NO: 5158230 - DNA, 25 bp, Homo sapien
gagctttattaatggcccctctcca

SEQ ID NO: 5158231 - DNA, 25 bp, Homo sapien
tgatgttgagctttattaatggccc

SEQ ID NO: 5158232 - DNA, 25 bp, Homo sapien
cacagcagtcatgtgcatgcggcag

SEQ ID NO: 5158233 - DNA, 25 bp, Homo sapien
cagtggccccagatgacgctgtagt

SEQ ID NO: 5158234 - DNA, 25 bp, Homo sapien
tcttcagcttagcacagcctgagag

SEQ ID NO: 5158235 - DNA, 25 bp, Homo sapien
cctgagagcttatgggaggagtcac

SEQ ID NO: 5158236 - DNA, 25 bp, Homo sapien
acgtctcctgccacagagtcatgtg

SEQ ID NO: 5158237 - DNA, 25 bp, Homo sapien
tctcctgccacagagtcatgtggag

SEQ ID NO: 5158238 - DNA, 25 bp, Homo sapien
cgtctcctgccacagagtcatgtgg

SEQ ID NO: 5158239 - DNA, 25 bp, Homo sapien
tcctgccacagagtcatgtggaggc

SEQ ID NO: 5158240 - DNA, 25 bp, Homo sapien
aagaccgaaagcctgaactcaggag

SEQ ID NO: 5158241 - DNA, 25 bp, Homo sapien
gtttctgggttcttcgatgatgcat

SEQ ID NO: 5158242 - DNA, 25 bp, Homo sapien
gcagacccacgacgaccaagaccga

SEQ ID NO: 5158243 - DNA, 25 bp, Homo sapien
acgacgaccaagaccgaaagcctga

SEQ ID NO: 5158244 - DNA, 25 bp, Homo sapien
tcctgtcctagaatgggcccgccca

SEQ ID NO: 5158245 - DNA, 25 bp, Homo sapien
cctgtcctagaatgggcccgcccac

SEQ ID NO: 5158246 - DNA, 25 bp, Homo sapien
ctcctgtcctagaatgggcccgccc

SEQ ID NO: 5158247 - DNA, 25 bp, Homo sapien
cagcgaccccgcgtgccgggagaga

SEQ ID NO: 5158248 - DNA, 25 bp, Homo sapien
aaagcaacctcctgcggcgcggccg

SEQ ID NO: 5158249 - DNA, 25 bp, Homo sapien
ggcgcggccgccactggactaagcc

SEQ ID NO: 5158250 - DNA, 25 bp, Homo sapien
cccgcgtgccgggagagagaaagca

SEQ ID NO: 5158251 - DNA, 25 bp, Homo sapien
ctgtccagggtcaacagtgaatttg

SEQ ID NO: 5158252 - DNA, 25 bp, Homo sapien
aagagaggcgtctgtcttccgaggt

SEQ ID NO: 5158253 - DNA, 25 bp, Homo sapien
aggagggagtttggcggagcctggg

SEQ ID NO: 5158254 - DNA, 25 bp, Homo sapien
gggtcaacagtgaatttgttattac

SEQ ID NO: 5158255 - DNA, 25 bp, Homo sapien
ggccccctgcacgtagctttttgaa

SEQ ID NO: 5158256 - DNA, 25 bp, Homo sapien
actggccccctgcacgtagcttttt

SEQ ID NO: 5158257 - DNA, 25 bp, Homo sapien
tgtactggccccctgcacgtagctt

SEQ ID NO: 5158258 - DNA, 25 bp, Homo sapien
cccctgcacgtagctttttgaacac

SEQ ID NO: 5158259 - DNA, 25 bp, Homo sapien
gatccaggagtcttccatgcacaaa

SEQ ID NO: 5158260 - DNA, 25 bp, Homo sapien
ccaacatgagttgcgtgaaggcctc

SEQ ID NO: 5158261 - DNA, 25 bp, Homo sapien
ggcctctggtatccagcaacctcac

SEQ ID NO: 5158262 - DNA, 25 bp, Homo sapien
gcaacctcacttcgcagatggcaca

SEQ ID NO: 5158263 - DNA, 25 bp, Homo sapien
ttcactgacaccctcaggaagatct

SEQ ID NO: 5158264 - DNA, 25 bp, Homo sapien
tgtgaagtcgttttgtcactgcgtc

SEQ ID NO: 5158265 - DNA, 25 bp, Homo sapien
ggaagatctcctacaaagtgtctga

SEQ ID NO: 5158266 - DNA, 25 bp, Homo sapien
tgtctgagatgttccctaccaccag

SEQ ID NO: 5158267 - DNA, 25 bp, Homo sapien
ttctgcaaaaccctgcgagcagcct

SEQ ID NO: 5158268 - DNA, 25 bp, Homo sapien
tgctggcttatccctgtccaaatct

SEQ ID NO: 5158269 - DNA, 25 bp, Homo sapien
caaaaccctgcgagcagcctcttct

SEQ ID NO: 5158270 - DNA, 25 bp, Homo sapien
tgcaaaaccctgcgagcagcctctt

SEQ ID NO: 5158271 - DNA, 25 bp, Homo sapien
tctgggaacaactaaagccgtggga

SEQ ID NO: 5158272 - DNA, 25 bp, Homo sapien
tgggaacaactaaagccgtgggaga

SEQ ID NO: 5158273 - DNA, 25 bp, Homo sapien
agcttggagtccctttcaagagaca

SEQ ID NO: 5158274 - DNA, 25 bp, Homo sapien
atgtctgggaacaactaaagccgtg

SEQ ID NO: 5158275 - DNA, 25 bp, Homo sapien
tgcttagaccctggcacacaaagat

SEQ ID NO: 5158276 - DNA, 25 bp, Homo sapien
aagattgatcaaaggccgtggccac

SEQ ID NO: 5158277 - DNA, 25 bp, Homo sapien
ggacacttatgtgtcccaccctgct

SEQ ID NO: 5158278 - DNA, 25 bp, Homo sapien
ctttctcctgctggacacttatgtg

SEQ ID NO: 5158279 - DNA, 25 bp, Homo sapien
gacgagatgattcagtttgttcaca

SEQ ID NO: 5158280 - DNA, 25 bp, Homo sapien
tgcccctgctgaaatagtgttgctg

SEQ ID NO: 5158281 - DNA, 25 bp, Homo sapien
gatgagaccactagaacaccttcct

SEQ ID NO: 5158282 - DNA, 25 bp, Homo sapien
ttcctccccgcatgggatgagacca

SEQ ID NO: 5158283 - DNA, 25 bp, Homo sapien
gtcccaaatgggcttttaagcatct

SEQ ID NO: 5158284 - DNA, 25 bp, Homo sapien
ccaaatgggcttttaagcatctggg

SEQ ID NO: 5158285 - DNA, 25 bp, Homo sapien
agcatctgggggtagcgctgtcctc

SEQ ID NO: 5158286 - DNA, 25 bp, Homo sapien
caggcatccatcagggggtcccaaa

SEQ ID NO: 5158287 - DNA, 25 bp, Homo sapien
agacagttaaagctagagctcttgc

SEQ ID NO: 5158288 - DNA, 25 bp, Homo sapien
actcaggtaacccagtgtgggccca

SEQ ID NO: 5158289 - DNA, 25 bp, Homo sapien
gctttggcgttactcaggtaaccca

SEQ ID NO: 5158290 - DNA, 25 bp, Homo sapien
catactctgatggattctattctca

SEQ ID NO: 5158291 - DNA, 25 bp, Homo sapien
cctggacatactcctccccaagccc

SEQ ID NO: 5158292 - DNA, 25 bp, Homo sapien
ttctcctggacatactcctccccaa

SEQ ID NO: 5158293 - DNA, 25 bp, Homo sapien
ctcctggacatactcctccccaagc

SEQ ID NO: 5158294 - DNA, 25 bp, Homo sapien
tctcctggacatactcctccccaag

SEQ ID NO: 5158295 - DNA, 25 bp, Homo sapien
tgagctcagaggctattccttgctg

SEQ ID NO: 5158296 - DNA, 25 bp, Homo sapien
cttccatccgaacccagggctccca

SEQ ID NO: 5158297 - DNA, 25 bp, Homo sapien
gctcagaggctattccttgctgcca

SEQ ID NO: 5158298 - DNA, 25 bp, Homo sapien
tcccttccatccgaacccagggctc

SEQ ID NO: 5158299 - DNA, 25 bp, Homo sapien
actttcttgggagagaaagtatctg

SEQ ID NO: 5158300 - DNA, 25 bp, Homo sapien
tgggagagaaagtatctgtattctg

SEQ ID NO: 5158301 - DNA, 25 bp, Homo sapien
tttactagtactttcttgggagaga

SEQ ID NO: 5158302 - DNA, 25 bp, Homo sapien
tgaatattttactagtactttcttg

SEQ ID NO: 5158303 - DNA, 25 bp, Homo sapien
ctctgatgactgtcacactcggcac

SEQ ID NO: 5158304 - DNA, 25 bp, Homo sapien
cctctgatgactgtcacactcggca

SEQ ID NO: 5158305 - DNA, 25 bp, Homo sapien
ggtgacatttggctggaattgctgt

SEQ ID NO: 5158306 - DNA, 25 bp, Homo sapien
gtgacatttggctggaattgctgtt

SEQ ID NO: 5158307 - DNA, 25 bp, Homo sapien
ccagcacagtgagtctgcttcgcag

SEQ ID NO: 5158308 - DNA, 25 bp, Homo sapien
gcacagtgagtctgcttcgcagagc

SEQ ID NO: 5158309 - DNA, 25 bp, Homo sapien
agcacagtgagtctgcttcgcagag

SEQ ID NO: 5158310 - DNA, 25 bp, Homo sapien
cagcacagtgagtctgcttcgcaga

SEQ ID NO: 5158311 - DNA, 25 bp, Homo sapien
aaccttcagctcgtatctgggccag

SEQ ID NO: 5158312 - DNA, 25 bp, Homo sapien
tccaacaaccttcagctcgtatctg

SEQ ID NO: 5158313 - DNA, 25 bp, Homo sapien
aacaaccttcagctcgtatctgggc

SEQ ID NO: 5158314 - DNA, 25 bp, Homo sapien
caaccttcagctcgtatctgggcca

SEQ ID NO: 5158315 - DNA, 25 bp, Homo sapien
tagctccaagcataaccttggctgc

SEQ ID NO: 5158316 - DNA, 25 bp, Homo sapien
tccaatgtgtccgttgtatccaccc

SEQ ID NO: 5158317 - DNA, 25 bp, Homo sapien
tgctggatttctgcagtgacctcat

SEQ ID NO: 5158318 - DNA, 25 bp, Homo sapien
ttcctttttagctccaagcataacc

SEQ ID NO: 5158319 - DNA, 25 bp, Homo sapien
acctggtaattgtgagtccggagat

SEQ ID NO: 5158320 - DNA, 25 bp, Homo sapien
ttgtgagtccggagattcccaccat

SEQ ID NO: 5158321 - DNA, 25 bp, Homo sapien
catggcctgagtaacttgatggtgc

SEQ ID NO: 5158322 - DNA, 25 bp, Homo sapien
tgatggtgcgggaaaatctctccac

SEQ ID NO: 5158323 - DNA, 25 bp, Homo sapien
agatacaggttgagggcccacagac

SEQ ID NO: 5158324 - DNA, 25 bp, Homo sapien
gcagcatttactaaagcagatacag

SEQ ID NO: 5158325 - DNA, 25 bp, Homo sapien
atctaactttcggatgcaaggattc

SEQ ID NO: 5158326 - DNA, 25 bp, Homo sapien
ccaaagatctaactttcggatgcaa

SEQ ID NO: 5158327 - DNA, 25 bp, Homo sapien
tggtaaaattatcctctgagtcgtt

SEQ ID NO: 5158328 - DNA, 25 bp, Homo sapien
tttggtaaaattatcctctgagtcg

SEQ ID NO: 5158329 - DNA, 25 bp, Homo sapien
ttggtaaaattatcctctgagtcgt

SEQ ID NO: 5158330 - DNA, 25 bp, Homo sapien
cgcttttgtaggttggggcatttca

SEQ ID NO: 5158331 - DNA, 25 bp, Homo sapien
gggcatttcataacaaccaaactcc

SEQ ID NO: 5158332 - DNA, 25 bp, Homo sapien
gctgctaccccaatccgcttttgta

SEQ ID NO: 5158333 - DNA, 25 bp, Homo sapien
gacgaattccagctgctaccccaat

SEQ ID NO: 5158334 - DNA, 25 bp, Homo sapien
aagcacaggcaagggaaactttgca

SEQ ID NO: 5158335 - DNA, 25 bp, Homo sapien
cagcgcagcggccaagctgattaca

SEQ ID NO: 5158336 - DNA, 25 bp, Homo sapien
cccgaaagcatatagatcttggctc

SEQ ID NO: 5158337 - DNA, 25 bp, Homo sapien
ggctagctaagtccgacatcacccg

SEQ ID NO: 5158338 - DNA, 25 bp, Homo sapien
gaagatgctgataattttatccagg

SEQ ID NO: 5158339 - DNA, 25 bp, Homo sapien
cctgggggcatggaagatgctgata

SEQ ID NO: 5158340 - DNA, 25 bp, Homo sapien
ttttatccaggatcacagagaaacc

SEQ ID NO: 5158341 - DNA, 25 bp, Homo sapien
tgctgataattttatccaggatcac

SEQ ID NO: 5158342 - DNA, 25 bp, Homo sapien
agtctgccgaatgctccgcagccag

SEQ ID NO: 5158343 - DNA, 25 bp, Homo sapien
tgcctgcagtctgccgaatgctccg

SEQ ID NO: 5158344 - DNA, 25 bp, Homo sapien
tgcagtctgccgaatgctccgcagc

SEQ ID NO: 5158345 - DNA, 25 bp, Homo sapien
ctgcctgcagtctgccgaatgctcc

SEQ ID NO: 5158346 - DNA, 25 bp, Homo sapien
tgtctgtgccagggacaggaagtgt

SEQ ID NO: 5158347 - DNA, 25 bp, Homo sapien
gtctgtgccagggacaggaagtgtc

SEQ ID NO: 5158348 - DNA, 25 bp, Homo sapien
gagatgcttacacccacgtgggact

SEQ ID NO: 5158349 - DNA, 25 bp, Homo sapien
acgtgggacttgtgactcgtgctcc

SEQ ID NO: 5158350 - DNA, 25 bp, Homo sapien
ggtggcttccatccacggcagtgca

SEQ ID NO: 5158351 - DNA, 25 bp, Homo sapien
gcagtgcagcaggtatggaaccttc

SEQ ID NO: 5158352 - DNA, 25 bp, Homo sapien
tccccagtgttgaggaagactgagg

SEQ ID NO: 5158353 - DNA, 25 bp, Homo sapien
cagagctccccagtgttgaggaaga

SEQ ID NO: 5158354 - DNA, 25 bp, Homo sapien
tgggtggtggcggccttccacctgc

SEQ ID NO: 5158355 - DNA, 25 bp, Homo sapien
tgcgtgggtggtggcggccttccac

SEQ ID NO: 5158356 - DNA, 25 bp, Homo sapien
tgcccactgtcaacgtcgtggaaac

SEQ ID NO: 5158357 - DNA, 25 bp, Homo sapien
acagtggccctttccgccgtgccca

SEQ ID NO: 5158358 - DNA, 25 bp, Homo sapien
gccgtgcccactgtcaacgtcgtgg

SEQ ID NO: 5158359 - DNA, 25 bp, Homo sapien
cttggactggcacttcaaacagtgg

SEQ ID NO: 5158360 - DNA, 25 bp, Homo sapien
caggtgggaacccaagccagcgcct

SEQ ID NO: 5158361 - DNA, 25 bp, Homo sapien
cacagttcccaggtgggaacccaag

SEQ ID NO: 5158362 - DNA, 25 bp, Homo sapien
tcacacagttcccaggtgggaaccc

SEQ ID NO: 5158363 - DNA, 25 bp, Homo sapien
gtgggaacccaagccagcgcctctc

SEQ ID NO: 5158364 - DNA, 25 bp, Homo sapien
tgccaagttagggaccccatggtcc

SEQ ID NO: 5158365 - DNA, 25 bp, Homo sapien
ccctggactaatggggctgccaagt

SEQ ID NO: 5158366 - DNA, 25 bp, Homo sapien
tctttcatatccctggactaatggg

SEQ ID NO: 5158367 - DNA, 25 bp, Homo sapien
atggtccaaaccctcaaacagcaag

SEQ ID NO: 5158368 - DNA, 25 bp, Homo sapien
tgacgcctcttccctgctgcactgt

SEQ ID NO: 5158369 - DNA, 25 bp, Homo sapien
gacgcctcttccctgctgcactgtg

SEQ ID NO: 5158370 - DNA, 25 bp, Homo sapien
ccaggcctgagttttgcagaatggc

SEQ ID NO: 5158371 - DNA, 25 bp, Homo sapien
ccccaggcctgagttttgcagaatg

SEQ ID NO: 5158372 - DNA, 25 bp, Homo sapien
ccatgactgatctgcaagggagttt

SEQ ID NO: 5158373 - DNA, 25 bp, Homo sapien
cccaatgggcactccgggtgcacta

SEQ ID NO: 5158374 - DNA, 25 bp, Homo sapien
tgatgctgaacattgtatgggcccc

SEQ ID NO: 5158375 - DNA, 25 bp, Homo sapien
gatgtcaccgcagctttctgagtag

SEQ ID NO: 5158376 - DNA, 25 bp, Homo sapien
agggccctgaggccagcatgttcat

SEQ ID NO: 5158377 - DNA, 25 bp, Homo sapien
gtgttgtgagggccctgaggccagc

SEQ ID NO: 5158378 - DNA, 25 bp, Homo sapien
ctgtgttgtgagggccctgaggcca

SEQ ID NO: 5158379 - DNA, 25 bp, Homo sapien
tgagggccctgaggccagcatgttc

SEQ ID NO: 5158380 - DNA, 25 bp, Homo sapien
aacagcagaaaatcttgatcctcaa

SEQ ID NO: 5158381 - DNA, 25 bp, Homo sapien
tcttgatcctcaattaactttgaaa

SEQ ID NO: 5158382 - DNA, 25 bp, Homo sapien
ccttgttgtgtgcatggtttccatt

SEQ ID NO: 5158383 - DNA, 25 bp, Homo sapien
taactttgaaaccttgttgtgtgca

SEQ ID NO: 5158384 - DNA, 25 bp, Homo sapien
gcatgggccactgcttccagcagca

SEQ ID NO: 5158385 - DNA, 25 bp, Homo sapien
ctgggcatgggccactgcttccagc

SEQ ID NO: 5158386 - DNA, 25 bp, Homo sapien
tgggcatgggccactgcttccagca

SEQ ID NO: 5158387 - DNA, 25 bp, Homo sapien
ccagcagcagctttccccttcccat

SEQ ID NO: 5158388 - DNA, 25 bp, Homo sapien
cagggccggatggtcctacggtaag

SEQ ID NO: 5158389 - DNA, 25 bp, Homo sapien
gcagggccggatggtcctacggtaa

SEQ ID NO: 5158390 - DNA, 25 bp, Homo sapien
catagacccaaatccctggtgggag

SEQ ID NO: 5158391 - DNA, 25 bp, Homo sapien
acccaaatccctggtgggagtatct

SEQ ID NO: 5158392 - DNA, 25 bp, Homo sapien
tatctgactgtctgaacttggggca

SEQ ID NO: 5158393 - DNA, 25 bp, Homo sapien
ggtgggagtatctgactgtctgaac

SEQ ID NO: 5158394 - DNA, 25 bp, Homo sapien
attttgggcacatctaggaagacct

SEQ ID NO: 5158395 - DNA, 25 bp, Homo sapien
ttgttattttgggcacatctaggaa

SEQ ID NO: 5158396 - DNA, 25 bp, Homo sapien
tgttattttgggcacatctaggaag

SEQ ID NO: 5158397 - DNA, 25 bp, Homo sapien
ttattttgggcacatctaggaagac

SEQ ID NO: 5158398 - DNA, 25 bp, Homo sapien
tgccctcagccacatcattatctag

SEQ ID NO: 5158399 - DNA, 25 bp, Homo sapien
cacctggtgagtgtgggcacagtcc

SEQ ID NO: 5158400 - DNA, 25 bp, Homo sapien
atgcacctggtgagtgtgggcacag

SEQ ID NO: 5158401 - DNA, 25 bp, Homo sapien
cctgccctcagccacatcattatct

SEQ ID NO: 5158402 - DNA, 25 bp, Homo sapien
ggttcagaagcatccattctgcatc

SEQ ID NO: 5158403 - DNA, 25 bp, Homo sapien
gggttcagaagcatccattctgcat

SEQ ID NO: 5158404 - DNA, 25 bp, Homo sapien
aacactggcaggtggctgcgtgtca

SEQ ID NO: 5158405 - DNA, 25 bp, Homo sapien
gaacatagatggaggattgtcccag

SEQ ID NO: 5158406 - DNA, 25 bp, Homo sapien
gccggtgtaagtgaggaacatagat

SEQ ID NO: 5158407 - DNA, 25 bp, Homo sapien
agccacacacgtgctctgacatgta

SEQ ID NO: 5158408 - DNA, 25 bp, Homo sapien
gcaggaagcccctccatatggctgt

SEQ ID NO: 5158409 - DNA, 25 bp, Homo sapien
tgtttctcagttgagaacacgaatc

SEQ ID NO: 5158410 - DNA, 25 bp, Homo sapien
gaacacgaatcctttagtggttaga

SEQ ID NO: 5158411 - DNA, 25 bp, Homo sapien
aggaagcccctccatatggctgttt

SEQ ID NO: 5158412 - DNA, 25 bp, Homo sapien
tctctgttcctaggcctggtgcctg

SEQ ID NO: 5158413 - DNA, 25 bp, Homo sapien
ggattgagctggaacctccctcctt

SEQ ID NO: 5158414 - DNA, 25 bp, Homo sapien
tcttagggcagacttgtccaggcca

SEQ ID NO: 5158415 - DNA, 25 bp, Homo sapien
gcagtcatctgccttaaagatccta

SEQ ID NO: 5158416 - DNA, 25 bp, Homo sapien
agcaggagacagcaagcaactatgg

SEQ ID NO: 5158417 - DNA, 25 bp, Homo sapien
tccacacagtccctcttcacagcag

SEQ ID NO: 5158418 - DNA, 25 bp, Homo sapien
agacagcaagcaactatggtacacc

SEQ ID NO: 5158419 - DNA, 25 bp, Homo sapien
agtccctcttcacagcaggcttcag

SEQ ID NO: 5158420 - DNA, 25 bp, Homo sapien
tactctgagagttgctaggaacagg

SEQ ID NO: 5158421 - DNA, 25 bp, Homo sapien
gcactcctgccagcttgaggtatct

SEQ ID NO: 5158422 - DNA, 25 bp, Homo sapien
taaaatctcttcttgttggacctcg

SEQ ID NO: 5158423 - DNA, 25 bp, Homo sapien
ggaacaggccctgccttgtgcaagg

SEQ ID NO: 5158424 - DNA, 25 bp, Homo sapien
tgagatctgcacagctcggatgcag

SEQ ID NO: 5158425 - DNA, 25 bp, Homo sapien
tgcacagctcggatgcaggtctgtg

SEQ ID NO: 5158426 - DNA, 25 bp, Homo sapien
gatctgcacagctcggatgcaggtc

SEQ ID NO: 5158427 - DNA, 25 bp, Homo sapien
cagctcggatgcaggtctgtggaat

SEQ ID NO: 5158428 - DNA, 25 bp, Homo sapien
agagctcacctcaacacatctggag

SEQ ID NO: 5158429 - DNA, 25 bp, Homo sapien
cccagcataggcaaggtgtaaaagt

SEQ ID NO: 5158430 - DNA, 25 bp, Homo sapien
tggaaagacacatgtcagctgaggc

SEQ ID NO: 5158431 - DNA, 25 bp, Homo sapien
caaggtcatacgcaaacacactgtg

SEQ ID NO: 5158432 - DNA, 25 bp, Homo sapien
ggtgcatgacaatatcatacttttt

SEQ ID NO: 5158433 - DNA, 25 bp, Homo sapien
tatcatactttttgcttgctaaaaa

SEQ ID NO: 5158434 - DNA, 25 bp, Homo sapien
ccttgtgaggcaaatagtctgataa

SEQ ID NO: 5158435 - DNA, 25 bp, Homo sapien
cttgtgaggcaaatagtctgataat

SEQ ID NO: 5158436 - DNA, 25 bp, Homo sapien
ttccaatgccgatggcttcacagca

SEQ ID NO: 5158437 - DNA, 25 bp, Homo sapien
ccctccgcacttccaatgccgatgg

SEQ ID NO: 5158438 - DNA, 25 bp, Homo sapien
cacttccaatgccgatggcttcaca

SEQ ID NO: 5158439 - DNA, 25 bp, Homo sapien
ctccgcacttccaatgccgatggct

SEQ ID NO: 5158440 - DNA, 25 bp, Homo sapien
cccgccgctcggagcgaccgcggca

SEQ ID NO: 5158441 - DNA, 25 bp, Homo sapien
aggtccgcggcgaaggcggtggctc

SEQ ID NO: 5158442 - DNA, 25 bp, Homo sapien
gcggcgaaggcggtggctcggcccg

SEQ ID NO: 5158443 - DNA, 25 bp, Homo sapien
agcgaccgcggcagctgaaggtccg

SEQ ID NO: 5158444 - DNA, 25 bp, Homo sapien
acctgtggactcagccggggtcatc

SEQ ID NO: 5158445 - DNA, 25 bp, Homo sapien
ggcgcccacatctgcacccggggct

SEQ ID NO: 5158446 - DNA, 25 bp, Homo sapien
gggtcatccggaggggcgcccacat

SEQ ID NO: 5158447 - DNA, 25 bp, Homo sapien
ctaacctgcgcggcgcaagcggctt

SEQ ID NO: 5158448 - DNA, 25 bp, Homo sapien
tgaggtgggacgaccagtagaaccc

SEQ ID NO: 5158449 - DNA, 25 bp, Homo sapien
tcacgggtgataattagtggctcag

SEQ ID NO: 5158450 - DNA, 25 bp, Homo sapien
ctacaggaactgaggtgggacgacc

SEQ ID NO: 5158451 - DNA, 25 bp, Homo sapien
gaacccaggatgcataaaatgaata

SEQ ID NO: 5158452 - DNA, 25 bp, Homo sapien
ctgacgtgagggtctgaggctctca

SEQ ID NO: 5158453 - DNA, 25 bp, Homo sapien
tcaccgtgaggtgagccaccctttc

SEQ ID NO: 5158454 - DNA, 25 bp, Homo sapien
aggctctcaggtcactcgacagcct

SEQ ID NO: 5158455 - DNA, 25 bp, Homo sapien
gcctggctttggttctgactctcgg

SEQ ID NO: 5158456 - DNA, 25 bp, Homo sapien
gagctcaaaagtctggtccaggcag

SEQ ID NO: 5158457 - DNA, 25 bp, Homo sapien
agctttgatgttcgccagggtccca

SEQ ID NO: 5158458 - DNA, 25 bp, Homo sapien
cctaggacagggaggacttcacgct

SEQ ID NO: 5158459 - DNA, 25 bp, Homo sapien
ttcacgctctgggactaactctgca

SEQ ID NO: 5158460 - DNA, 25 bp, Homo sapien
gcctgggccacacagggaggtccca

SEQ ID NO: 5158461 - DNA, 25 bp, Homo sapien
ctgggccacacagggaggtcccatc

SEQ ID NO: 5158462 - DNA, 25 bp, Homo sapien
gtaatcttagcacttcaggaggtca

SEQ ID NO: 5158463 - DNA, 25 bp, Homo sapien
atcttagcacttcaggaggtcaagg

SEQ ID NO: 5158464 - DNA, 25 bp, Homo sapien
ggtgagcatgtccctatgcttgtct

SEQ ID NO: 5158465 - DNA, 25 bp, Homo sapien
gagcatgtccctatgcttgtctaca

SEQ ID NO: 5158466 - DNA, 25 bp, Homo sapien
tatgcttgtctacattttgcatctt

SEQ ID NO: 5158467 - DNA, 25 bp, Homo sapien
gcatgtccctatgcttgtctacatt

SEQ ID NO: 5158468 - DNA, 25 bp, Homo sapien
gagatgacattgaaggccttgacca

SEQ ID NO: 5158469 - DNA, 25 bp, Homo sapien
tgctctgtagggttgctcacatcca

SEQ ID NO: 5158470 - DNA, 25 bp, Homo sapien
tcacttgggccgctgagggaaacag

SEQ ID NO: 5158471 - DNA, 25 bp, Homo sapien
tgaagagtagtgctcccggaacaca

SEQ ID NO: 5158472 - DNA, 25 bp, Homo sapien
agctcctcgtggcaagaaacgtatg

SEQ ID NO: 5158473 - DNA, 25 bp, Homo sapien
ttctgagaaatcagttcttggaagc

SEQ ID NO: 5158474 - DNA, 25 bp, Homo sapien
gtatgcagctctagctgttccgtgg

SEQ ID NO: 5158475 - DNA, 25 bp, Homo sapien
ggagccattatctagccccagaaaa

SEQ ID NO: 5158476 - DNA, 25 bp, Homo sapien
tctggctggtcaccgcagatgggca

SEQ ID NO: 5158477 - DNA, 25 bp, Homo sapien
tgcacatagggctgcagaacgtccc

SEQ ID NO: 5158478 - DNA, 25 bp, Homo sapien
cgtcccggacgaagttgtaggcata

SEQ ID NO: 5158479 - DNA, 25 bp, Homo sapien
acgccgggcaagtacacgagtgaca

SEQ ID NO: 5158480 - DNA, 25 bp, Homo sapien
agcagggacaacgtgccgagggcca

SEQ ID NO: 5158481 - DNA, 25 bp, Homo sapien
ccagcactcccagggagaggtagat

SEQ ID NO: 5158482 - DNA, 25 bp, Homo sapien
ctgaactccctccagttgagcgagt

SEQ ID NO: 5158483 - DNA, 25 bp, Homo sapien
ttgagcgagtttgcaatggacggca

SEQ ID NO: 5158484 - DNA, 25 bp, Homo sapien
gggctaggctcgctcactccctaga

SEQ ID NO: 5158485 - DNA, 25 bp, Homo sapien
tcatccacgctgcatgaatcaaggg

SEQ ID NO: 5158486 - DNA, 25 bp, Homo sapien
actccctagactcctacctagatgg

SEQ ID NO: 5158487 - DNA, 25 bp, Homo sapien
aaaaagctgtgtcgcatcccctata

SEQ ID NO: 5158488 - DNA, 25 bp, Homo sapien
cacgccggatactccaggtgggaag

SEQ ID NO: 5158489 - DNA, 25 bp, Homo sapien
tcttgcagtggcaaaaggactgtcc

SEQ ID NO: 5158490 - DNA, 25 bp, Homo sapien
cagagccagggcatgtaatctatgg

SEQ ID NO: 5158491 - DNA, 25 bp, Homo sapien
tgtggataaaccatgcacgccggat

SEQ ID NO: 5158492 - DNA, 25 bp, Homo sapien
tggacacaggcacaagtgagcagca

SEQ ID NO: 5158493 - DNA, 25 bp, Homo sapien
ggtcttgggactgagattcaggtct

SEQ ID NO: 5158494 - DNA, 25 bp, Homo sapien
ccgagggcctaggaaacttgtctga

SEQ ID NO: 5158495 - DNA, 25 bp, Homo sapien
caaatcctcttgatgaccatatggg

SEQ ID NO: 5158496 - DNA, 25 bp, Homo sapien
aaagccagcatgccactgttggctg

SEQ ID NO: 5158497 - DNA, 25 bp, Homo sapien
aaaagccagcatgccactgttggct

SEQ ID NO: 5158498 - DNA, 25 bp, Homo sapien
caaaagccagcatgccactgttggc

SEQ ID NO: 5158499 - DNA, 25 bp, Homo sapien
tatgataactctcaactctctgtgc

SEQ ID NO: 5158500 - DNA, 25 bp, Homo sapien
tgctgaaggtgtctaaggacccacc

SEQ ID NO: 5158501 - DNA, 25 bp, Homo sapien
tggctttagtactcaccgctatggg

SEQ ID NO: 5158502 - DNA, 25 bp, Homo sapien
gatcctgccaacgactcatctgctg

SEQ ID NO: 5158503 - DNA, 25 bp, Homo sapien
tttggccaggatgacgacgcagggc

SEQ ID NO: 5158504 - DNA, 25 bp, Homo sapien
ttgtagcggctctcctcgaaggcgc

SEQ ID NO: 5158505 - DNA, 25 bp, Homo sapien
cagcgtgaacttgatggtgctctcc

SEQ ID NO: 5158506 - DNA, 25 bp, Homo sapien
atcctggcgagtctgcggctgatgc

SEQ ID NO: 5158507 - DNA, 25 bp, Homo sapien
cctcgtgtgcccggggtccagagcc

SEQ ID NO: 5158508 - DNA, 25 bp, Homo sapien
tcgtgtgcccggggtccagagccca

SEQ ID NO: 5158509 - DNA, 25 bp, Homo sapien
tccctcgtgtgcccggggtccagag

SEQ ID NO: 5158510 - DNA, 25 bp, Homo sapien
cgtccctcgtgtgcccggggtccag

SEQ ID NO: 5158511 - DNA, 25 bp, Homo sapien
tctaggccttcctgggagtcattca

SEQ ID NO: 5158512 - DNA, 25 bp, Homo sapien
catttgcaggctctatggtgacttc

SEQ ID NO: 5158513 - DNA, 25 bp, Homo sapien
gtttaaaggacgctcatcgccaggt

SEQ ID NO: 5158514 - DNA, 25 bp, Homo sapien
ttgaagtgtaatgccccatgaggag

SEQ ID NO: 5158515 - DNA, 25 bp, Homo sapien
gcagatcaacctggttctgcagagg

SEQ ID NO: 5158516 - DNA, 25 bp, Homo sapien
gggctcagccgagaacacctgtttc

SEQ ID NO: 5158517 - DNA, 25 bp, Homo sapien
agccgagaacacctgtttcttcaca

SEQ ID NO: 5158518 - DNA, 25 bp, Homo sapien
tttttctgtggcagatcaacctggt

SEQ ID NO: 5158519 - DNA, 25 bp, Homo sapien
gaagaacccttatgtgctgcataga

SEQ ID NO: 5158520 - DNA, 25 bp, Homo sapien
atgagctcatgaaacctccctggcg

SEQ ID NO: 5158521 - DNA, 25 bp, Homo sapien
cctaatgagctatccttgcagtggg

SEQ ID NO: 5158522 - DNA, 25 bp, Homo sapien
tcattagtagggaatcgatgggccc

SEQ ID NO: 5158523 - DNA, 25 bp, Homo sapien
tgccacccaccttataattgcttcc

SEQ ID NO: 5158524 - DNA, 25 bp, Homo sapien
tcctgccacccaccttataattgct

SEQ ID NO: 5158525 - DNA, 25 bp, Homo sapien
cacccaccttataattgcttccctc

SEQ ID NO: 5158526 - DNA, 25 bp, Homo sapien
cccaccttataattgcttccctctt

SEQ ID NO: 5158527 - DNA, 25 bp, Homo sapien
tttcgtgtgattgtccagcaggtgg

SEQ ID NO: 5158528 - DNA, 25 bp, Homo sapien
tacacagcccgcctgcctttcgtgt

SEQ ID NO: 5158529 - DNA, 25 bp, Homo sapien
agacagcagtggacgcacagtcagg

SEQ ID NO: 5158530 - DNA, 25 bp, Homo sapien
agcagtggacgcacagtcagggccc

SEQ ID NO: 5158531 - DNA, 25 bp, Homo sapien
tggagatgatgtgctctcgggatgc

SEQ ID NO: 5158532 - DNA, 25 bp, Homo sapien
atgtgctctcgggatgctgctgcca

SEQ ID NO: 5158533 - DNA, 25 bp, Homo sapien
gctgtggagatgatgtgctctcggg

SEQ ID NO: 5158534 - DNA, 25 bp, Homo sapien
agatgatgtgctctcgggatgctgc

SEQ ID NO: 5158535 - DNA, 25 bp, Homo sapien
tgggatttccagagcatgtcgttga

SEQ ID NO: 5158536 - DNA, 25 bp, Homo sapien
ttgaggcacttttgtacccagaggc

SEQ ID NO: 5158537 - DNA, 25 bp, Homo sapien
ttccagagcatgtcgttgaggcact

SEQ ID NO: 5158538 - DNA, 25 bp, Homo sapien
tggcatttgggatttccagagcatg

SEQ ID NO: 5158539 - DNA, 25 bp, Homo sapien
gactcttttgaaggcatagatttta

SEQ ID NO: 5158540 - DNA, 25 bp, Homo sapien
tgcttttatactgtctaccaggtta

SEQ ID NO: 5158541 - DNA, 25 bp, Homo sapien
gcttttatactgtctaccaggttaa

SEQ ID NO: 5158542 - DNA, 25 bp, Homo sapien
aaaaacagagactcttttgaaggca

SEQ ID NO: 5158543 - DNA, 25 bp, Homo sapien
accgaggcctcagccttcagaccac

SEQ ID NO: 5158544 - DNA, 25 bp, Homo sapien
cccacccgacactctgtcacctgga

SEQ ID NO: 5158545 - DNA, 25 bp, Homo sapien
gacactctgtcacctggatcttgcc

SEQ ID NO: 5158546 - DNA, 25 bp, Homo sapien
ccgacactctgtcacctggatcttg

SEQ ID NO: 5158547 - DNA, 25 bp, Homo sapien
tgtacagattagtgtgccatagact

SEQ ID NO: 5158548 - DNA, 25 bp, Homo sapien
gattagtgtgccatagactaagcac

SEQ ID NO: 5158549 - DNA, 25 bp, Homo sapien
tgccatagactaagcacagcagagg

SEQ ID NO: 5158550 - DNA, 25 bp, Homo sapien
tgtgtgtgtacagattagtgtgcca

SEQ ID NO: 5158551 - DNA, 25 bp, Homo sapien
tgtacagacgtgtaccttgccaggg

SEQ ID NO: 5158552 - DNA, 25 bp, Homo sapien
tttaagagaacacgggggtcataga

SEQ ID NO: 5158553 - DNA, 25 bp, Homo sapien
gggtcatagatagcattgtacagac

SEQ ID NO: 5158554 - DNA, 25 bp, Homo sapien
gatagcattgtacagacgtgtacct

SEQ ID NO: 5158555 - DNA, 25 bp, Homo sapien
tgttttcctgatggacccagggcca

SEQ ID NO: 5158556 - DNA, 25 bp, Homo sapien
gtgccgcagccctcgtgaagcacaa

SEQ ID NO: 5158557 - DNA, 25 bp, Homo sapien
gctccaagatggagtgtttctccct

SEQ ID NO: 5158558 - DNA, 25 bp, Homo sapien
gctgcatggtagttgggtggtctct

SEQ ID NO: 5158559 - DNA, 25 bp, Homo sapien
tgcactccaagagctagcttcattg

SEQ ID NO: 5158560 - DNA, 25 bp, Homo sapien
tctctcctgaactgatatgcgtgat

SEQ ID NO: 5158561 - DNA, 25 bp, Homo sapien
caactctctcttggttgagaccagg

SEQ ID NO: 5158562 - DNA, 25 bp, Homo sapien
gaaaagattcaacgtgtcaaacagc

SEQ ID NO: 5158563 - DNA, 25 bp, Homo sapien
cttggtgtcagccatagggtggttt

SEQ ID NO: 5158564 - DNA, 25 bp, Homo sapien
gcttttgctattaggtaccagtcct

SEQ ID NO: 5158565 - DNA, 25 bp, Homo sapien
ctgctgcttttgctattaggtacca

SEQ ID NO: 5158566 - DNA, 25 bp, Homo sapien
ctttcctttcaccttggtgtcagcc

SEQ ID NO: 5158567 - DNA, 25 bp, Homo sapien
gatgtatttgtagtaatacacacat

SEQ ID NO: 5158568 - DNA, 25 bp, Homo sapien
ttgccggaacagatgtatttgtagt

SEQ ID NO: 5158569 - DNA, 25 bp, Homo sapien
tatttgtagtaatacacacatgcac

SEQ ID NO: 5158570 - DNA, 25 bp, Homo sapien
cttgccggaacagatgtatttgtag

SEQ ID NO: 5158571 - DNA, 25 bp, Homo sapien
gtttttcaccttatgctacctatag

SEQ ID NO: 5158572 - DNA, 25 bp, Homo sapien
gattctgttgacaaatacccatgaa

SEQ ID NO: 5158573 - DNA, 25 bp, Homo sapien
cccatcccagaatacgggttcaaat

SEQ ID NO: 5158574 - DNA, 25 bp, Homo sapien
gctttttggtagatgacctcctctg

SEQ ID NO: 5158575 - DNA, 25 bp, Homo sapien
aggtcactttgtgccgagactatcg

SEQ ID NO: 5158576 - DNA, 25 bp, Homo sapien
tccaagttacgtgaccctgatgaag

SEQ ID NO: 5158577 - DNA, 25 bp, Homo sapien
cacatgaacagggaaacgggacaga

SEQ ID NO: 5158578 - DNA, 25 bp, Homo sapien
cagctactgaggacgcaacacatga

SEQ ID NO: 5158579 - DNA, 25 bp, Homo sapien
caaacgatgtggctctccctgaggt

SEQ ID NO: 5158580 - DNA, 25 bp, Homo sapien
caggcttactcttgcatctccatgg

SEQ ID NO: 5158581 - DNA, 25 bp, Homo sapien
cacactgggagttgataaatgcaag

SEQ ID NO: 5158582 - DNA, 25 bp, Homo sapien
tatactgaccttccccaaacgatgt

SEQ ID NO: 5158583 - DNA, 25 bp, Homo sapien
tcatctttacatcttgccgagcagc

SEQ ID NO: 5158584 - DNA, 25 bp, Homo sapien
taatgcccagccgttcatctttaca

SEQ ID NO: 5158585 - DNA, 25 bp, Homo sapien
cgagcagcttctcctcggtatgaca

SEQ ID NO: 5158586 - DNA, 25 bp, Homo sapien
tgccaggcaccagccgattaatgcc

SEQ ID NO: 5158587 - DNA, 25 bp, Homo sapien
acttgcattttcatgcggctgacag

SEQ ID NO: 5158588 - DNA, 25 bp, Homo sapien
cgctagggctctgcgtatgcccgga

SEQ ID NO: 5158589 - DNA, 25 bp, Homo sapien
tagtttgtttttgtcggtctgactc

SEQ ID NO: 5158590 - DNA, 25 bp, Homo sapien
gactcgggtcactgctgcacttgca

SEQ ID NO: 5158591 - DNA, 25 bp, Homo sapien
aggaacttctttgccgtagcaaacg

SEQ ID NO: 5158592 - DNA, 25 bp, Homo sapien
ttgggccaggtttcatgtgactttg

SEQ ID NO: 5158593 - DNA, 25 bp, Homo sapien
ggccctggtcccacgagttgggcca

SEQ ID NO: 5158594 - DNA, 25 bp, Homo sapien
ttgaggaacttctttgccgtagcaa

SEQ ID NO: 5158595 - DNA, 25 bp, Homo sapien
taacaccgctttatgatcatcacct

SEQ ID NO: 5158596 - DNA, 25 bp, Homo sapien
ctgatggttttaacaccgctttatg

SEQ ID NO: 5158597 - DNA, 25 bp, Homo sapien
cgctttatgatcatcacctacactc

SEQ ID NO: 5158598 - DNA, 25 bp, Homo sapien
gttttaacaccgctttatgatcatc

SEQ ID NO: 5158599 - DNA, 25 bp, Homo sapien
tcaagtgatccgtcagtgatctgcc

SEQ ID NO: 5158600 - DNA, 25 bp, Homo sapien
taaagcagttacagcatggagaagc

SEQ ID NO: 5158601 - DNA, 25 bp, Homo sapien
tgattatggttcttcctcagggaag

SEQ ID NO: 5158602 - DNA, 25 bp, Homo sapien
tctgtcagtgaaagatgatttaacc

SEQ ID NO: 5158603 - DNA, 25 bp, Homo sapien
aggaggcgaggaccaggaagcgatc

SEQ ID NO: 5158604 - DNA, 25 bp, Homo sapien
tggccgacttgcaagaactccaggg

SEQ ID NO: 5158605 - DNA, 25 bp, Homo sapien
caagcgcctttagaggcgcggtcca

SEQ ID NO: 5158606 - DNA, 25 bp, Homo sapien
gaagcgatcgcccagattgcactgg

SEQ ID NO: 5158607 - DNA, 25 bp, Homo sapien
gcagcctggctgtgcacgcgctgta

SEQ ID NO: 5158608 - DNA, 25 bp, Homo sapien
cttcgcagcctggctgtgcacgcgc

SEQ ID NO: 5158609 - DNA, 25 bp, Homo sapien
tcgcagcctggctgtgcacgcgctg

SEQ ID NO: 5158610 - DNA, 25 bp, Homo sapien
cagcctggctgtgcacgcgctgtac

SEQ ID NO: 5158611 - DNA, 25 bp, Homo sapien
ctctgtccaacgaatcagggctagg

SEQ ID NO: 5158612 - DNA, 25 bp, Homo sapien
aacgaatcagggctaggcatgggcc

SEQ ID NO: 5158613 - DNA, 25 bp, Homo sapien
gaatcagggctaggcatgggcccat

SEQ ID NO: 5158614 - DNA, 25 bp, Homo sapien
tccaacgaatcagggctaggcatgg

SEQ ID NO: 5158615 - DNA, 25 bp, Homo sapien
tggggactgagtctcctcgctcctc

SEQ ID NO: 5158616 - DNA, 25 bp, Homo sapien
atctctccatcaagcaccctcgact

SEQ ID NO: 5158617 - DNA, 25 bp, Homo sapien
gcagatttagaaatccccaaacgga

SEQ ID NO: 5158618 - DNA, 25 bp, Homo sapien
accccatgggcaactttccggcagt

SEQ ID NO: 5158619 - DNA, 25 bp, Homo sapien
gcagccggccccgtacttcccctga

SEQ ID NO: 5158620 - DNA, 25 bp, Homo sapien
ccgcgattctcctcgtcccgcactc

SEQ ID NO: 5158621 - DNA, 25 bp, Homo sapien
gcgattctcctcgtcccgcactctg

SEQ ID NO: 5158622 - DNA, 25 bp, Homo sapien
gattctcctcgtcccgcactctgag

SEQ ID NO: 5158623 - DNA, 25 bp, Homo sapien
tgcccggattggcagaggcaggcgg

SEQ ID NO: 5158624 - DNA, 25 bp, Homo sapien
tgtcccagtgcccggattggcagag

SEQ ID NO: 5158625 - DNA, 25 bp, Homo sapien
tcccagtgcccggattggcagaggc

SEQ ID NO: 5158626 - DNA, 25 bp, Homo sapien
ccagtgcccggattggcagaggcag

SEQ ID NO: 5158627 - DNA, 25 bp, Homo sapien
cggggcacagtatgctggaaacagc

SEQ ID NO: 5158628 - DNA, 25 bp, Homo sapien
ccctctgcgggagaagcagcgcggc

SEQ ID NO: 5158629 - DNA, 25 bp, Homo sapien
cagggcatgagtgccgcggtgtcag

SEQ ID NO: 5158630 - DNA, 25 bp, Homo sapien
accaccgggccaggcactagggagt

SEQ ID NO: 5158631 - DNA, 25 bp, Homo sapien
agcatctcctcatccgatggcttgg

SEQ ID NO: 5158632 - DNA, 25 bp, Homo sapien
gtcttaaggtgcctaacctcctctg

SEQ ID NO: 5158633 - DNA, 25 bp, Homo sapien
tcctcatccgatggcttggtcttaa

SEQ ID NO: 5158634 - DNA, 25 bp, Homo sapien
cttaaggtgcctaacctcctctgca

SEQ ID NO: 5158635 - DNA, 25 bp, Homo sapien
gctttgatgagcagatgcccttcca

SEQ ID NO: 5158636 - DNA, 25 bp, Homo sapien
tccctagtagagagtagctgctggt

SEQ ID NO: 5158637 - DNA, 25 bp, Homo sapien
gaaatgctctgacctagcccaagaa

SEQ ID NO: 5158638 - DNA, 25 bp, Homo sapien
gagacactgagaatccggaacatgg

SEQ ID NO: 5158639 - DNA, 25 bp, Homo sapien
tatgaactgtttatatcctagcccc

SEQ ID NO: 5158640 - DNA, 25 bp, Homo sapien
tctaatggagaacttgatcaacctt

SEQ ID NO: 5158641 - DNA, 25 bp, Homo sapien
gctgatctgtgggagatttcaccga

SEQ ID NO: 5158642 - DNA, 25 bp, Homo sapien
tctgccctaagaaaaccaatgtatg

SEQ ID NO: 5158643 - DNA, 25 bp, Homo sapien
ggccttgcccgtgaagtccaacatc

SEQ ID NO: 5158644 - DNA, 25 bp, Homo sapien
acttggccttgcccgtgaagtccaa

SEQ ID NO: 5158645 - DNA, 25 bp, Homo sapien
cgtgaagtccaacatcccgggccgt

SEQ ID NO: 5158646 - DNA, 25 bp, Homo sapien
ttgcccgtgaagtccaacatcccgg

SEQ ID NO: 5158647 - DNA, 25 bp, Homo sapien
atgaagactctttcactactgggtt

SEQ ID NO: 5158648 - DNA, 25 bp, Homo sapien
cactactgggtttcacaaatgagag

SEQ ID NO: 5158649 - DNA, 25 bp, Homo sapien
aaatgagagaaattgattagaacaa

SEQ ID NO: 5158650 - DNA, 25 bp, Homo sapien
gactctttcactactgggtttcaca

SEQ ID NO: 5158651 - DNA, 25 bp, Homo sapien
gtagcatggtaggaaacaagcagcc

SEQ ID NO: 5158652 - DNA, 25 bp, Homo sapien
gtaactctcctaggctcagtttctc

SEQ ID NO: 5158653 - DNA, 25 bp, Homo sapien
ctgtaaggaatcgacaggattatgt

SEQ ID NO: 5158654 - DNA, 25 bp, Homo sapien
taaggaatcgacaggattatgtgtc

SEQ ID NO: 5158655 - DNA, 25 bp, Homo sapien
tctttagctcttctactttgttgat

SEQ ID NO: 5158656 - DNA, 25 bp, Homo sapien
tgttgatgtaagctttcatggcatc

SEQ ID NO: 5158657 - DNA, 25 bp, Homo sapien
ttcatggcatcttccttggaagtcc

SEQ ID NO: 5158658 - DNA, 25 bp, Homo sapien
tactttgttgatgtaagctttcatg

SEQ ID NO: 5158659 - DNA, 25 bp, Homo sapien
acacatggcacagtaaccaaatcca

SEQ ID NO: 5158660 - DNA, 25 bp, Homo sapien
atggcacagtaaccaaatccagtct

SEQ ID NO: 5158661 - DNA, 25 bp, Homo sapien
acatggcacagtaaccaaatccagt

SEQ ID NO: 5158662 - DNA, 25 bp, Homo sapien
aacacatggcacagtaaccaaatcc

SEQ ID NO: 5158663 - DNA, 25 bp, Homo sapien
tactcaaggaaagtcagtaatcgtt

SEQ ID NO: 5158664 - DNA, 25 bp, Homo sapien
tgagtagctggtttaactggttatt

SEQ ID NO: 5158665 - DNA, 25 bp, Homo sapien
gccgtatggtgagcagccttgagta

SEQ ID NO: 5158666 - DNA, 25 bp, Homo sapien
tttagcccctaatctgttagagccg

SEQ ID NO: 5158667 - DNA, 25 bp, Homo sapien
tgcaacctgggtgctccctgaaggc

SEQ ID NO: 5158668 - DNA, 25 bp, Homo sapien
ttgcaacctgggtgctccctgaagg

SEQ ID NO: 5158669 - DNA, 25 bp, Homo sapien
cacttgcaacctgggtgctccctga

SEQ ID NO: 5158670 - DNA, 25 bp, Homo sapien
aacctgggtgctccctgaaggcctg

SEQ ID NO: 5158671 - DNA, 25 bp, Homo sapien
tggtcttgaagaacacacaatggcc

SEQ ID NO: 5158672 - DNA, 25 bp, Homo sapien
tttgtgacaaaagcttgcccaggtg

SEQ ID NO: 5158673 - DNA, 25 bp, Homo sapien
tgaatcacagagtggtcaccccacc

SEQ ID NO: 5158674 - DNA, 25 bp, Homo sapien
gacttcggtcttcctgccatatgag

SEQ ID NO: 5158675 - DNA, 25 bp, Homo sapien
ctctccaggtcttgccttgtctgtg

SEQ ID NO: 5158676 - DNA, 25 bp, Homo sapien
ctgctgccccgcctttaccaaccag

SEQ ID NO: 5158677 - DNA, 25 bp, Homo sapien
tgctgccccgcctttaccaaccagg

SEQ ID NO: 5158678 - DNA, 25 bp, Homo sapien
tgccttgtctgtggcccatggcctc

SEQ ID NO: 5158679 - DNA, 25 bp, Homo sapien
gaagtgcctggaattaaaatcagaa

SEQ ID NO: 5158680 - DNA, 25 bp, Homo sapien
caagagggaagtgcctggaattaaa

SEQ ID NO: 5158681 - DNA, 25 bp, Homo sapien
gccaagagggaagtgcctggaatta

SEQ ID NO: 5158682 - DNA, 25 bp, Homo sapien
gagggaagtgcctggaattaaaatc

SEQ ID NO: 5158683 - DNA, 25 bp, Homo sapien
agtcaagggtcccagaagccagact

SEQ ID NO: 5158684 - DNA, 25 bp, Homo sapien
gataaagagcccacatgggaaagga

SEQ ID NO: 5158685 - DNA, 25 bp, Homo sapien
agaaccactgagctaaggcaaaggg

SEQ ID NO: 5158686 - DNA, 25 bp, Homo sapien
gtttgagttcttgccaccattctgc

SEQ ID NO: 5158687 - DNA, 25 bp, Homo sapien
aacctccgaggacagcttcgcctgg

SEQ ID NO: 5158688 - DNA, 25 bp, Homo sapien
acgagggcctgagggttcgattcct

SEQ ID NO: 5158689 - DNA, 25 bp, Homo sapien
tcgagggctgggacggcgacgaggg

SEQ ID NO: 5158690 - DNA, 25 bp, Homo sapien
aaggatcgggaagtcactccgacgc

SEQ ID NO: 5158691 - DNA, 25 bp, Homo sapien
cccgccgccctccgcggctcggatt

SEQ ID NO: 5158692 - DNA, 25 bp, Homo sapien
cgccgccctccgcggctcggattac

SEQ ID NO: 5158693 - DNA, 25 bp, Homo sapien
ccgccgccctccgcggctcggatta

SEQ ID NO: 5158694 - DNA, 25 bp, Homo sapien
tgctccgctgtggccgccggcgcca

SEQ ID NO: 5158695 - DNA, 25 bp, Homo sapien
gctgcagcctcgatcgctccagctg

SEQ ID NO: 5158696 - DNA, 25 bp, Homo sapien
acggcagtcatgctgcgcccggcgg

SEQ ID NO: 5158697 - DNA, 25 bp, Homo sapien
gcgccagcccgggacttctccgcag

SEQ ID NO: 5158698 - DNA, 25 bp, Homo sapien
ctatgtgaggcaggcaggccccccg

SEQ ID NO: 5158699 - DNA, 25 bp, Homo sapien
gtgcttgcaaggccgcgagcagaag

SEQ ID NO: 5158700 - DNA, 25 bp, Homo sapien
aatgaagtttgggagcctcgggtgc

SEQ ID NO: 5158701 - DNA, 25 bp, Homo sapien
atgaagtttgggagcctcgggtgct

SEQ ID NO: 5158702 - DNA, 25 bp, Homo sapien
gcctcgggtgcttgcaaggccgcga

SEQ ID NO: 5158703 - DNA, 25 bp, Homo sapien
ctgggcatgggaaggccattgcagc

SEQ ID NO: 5158704 - DNA, 25 bp, Homo sapien
ccagagcttgccaaccccattgtct

SEQ ID NO: 5158705 - DNA, 25 bp, Homo sapien
tgggcatgggaaggccattgcagct

SEQ ID NO: 5158706 - DNA, 25 bp, Homo sapien
tgccaaccccattgtctgctcctgc

SEQ ID NO: 5158707 - DNA, 25 bp, Homo sapien
agaaaacctgtcgtgcctgcatccc

SEQ ID NO: 5158708 - DNA, 25 bp, Homo sapien
tcttttgtgatcttcagagtgggtg

SEQ ID NO: 5158709 - DNA, 25 bp, Homo sapien
gcctgcatcccatgaccttgagcat

SEQ ID NO: 5158710 - DNA, 25 bp, Homo sapien
gggtgagaagtccaaaccgactggc

SEQ ID NO: 5158711 - DNA, 25 bp, Homo sapien
gtctcctgtgaagcccggaacagac

SEQ ID NO: 5158712 - DNA, 25 bp, Homo sapien
aaaaccgtaggaagcaccctgtcag

SEQ ID NO: 5158713 - DNA, 25 bp, Homo sapien
tgtgaagcccggaacagaccagacc

SEQ ID NO: 5158714 - DNA, 25 bp, Homo sapien
ctgctccgcactgtcttattctctg

SEQ ID NO: 5158715 - DNA, 25 bp, Homo sapien
cacacgtgatgatgagggtccggat

SEQ ID NO: 5158716 - DNA, 25 bp, Homo sapien
cacaaatggagaccgaggacaggac

SEQ ID NO: 5158717 - DNA, 25 bp, Homo sapien
tctgaagcagatcgtctggttggtg

SEQ ID NO: 5158718 - DNA, 25 bp, Homo sapien
tgccagagcccgaagaggcggtcct

SEQ ID NO: 5158719 - DNA, 25 bp, Homo sapien
aaggcgcccacgctgcgtaccaggc

SEQ ID NO: 5158720 - DNA, 25 bp, Homo sapien
acaactgggacaccatgaggaactc

SEQ ID NO: 5158721 - DNA, 25 bp, Homo sapien
ggaggaggatggaacccatgaccca

SEQ ID NO: 5158722 - DNA, 25 bp, Homo sapien
ggaactccaggccaaaaatggcggc

SEQ ID NO: 5158723 - DNA, 25 bp, Homo sapien
aagccgatgagtgtgacttggttcc

SEQ ID NO: 5158724 - DNA, 25 bp, Homo sapien
caaaacattagggtgaagccgatga

SEQ ID NO: 5158725 - DNA, 25 bp, Homo sapien
cgccggaggagaggacgaaagacac

SEQ ID NO: 5158726 - DNA, 25 bp, Homo sapien
aggagcccgccggaggagaggacga

SEQ ID NO: 5158727 - DNA, 25 bp, Homo sapien
cccagggatgggtgatgctgttgat

SEQ ID NO: 5158728 - DNA, 25 bp, Homo sapien
gctgttgatgtgaaggccgctgatg

SEQ ID NO: 5158729 - DNA, 25 bp, Homo sapien
ggacatacatacgaaggccctttga

SEQ ID NO: 5158730 - DNA, 25 bp, Homo sapien
tgtattagcagtcaggtgggccctc

SEQ ID NO: 5158731 - DNA, 25 bp, Homo sapien
gattaaaaatggtgccctgaggctg

SEQ ID NO: 5158732 - DNA, 25 bp, Homo sapien
gcactgattggacccttagctggaa

SEQ ID NO: 5158733 - DNA, 25 bp, Homo sapien
ctgtgactactgaccatctatctgg

SEQ ID NO: 5158734 - DNA, 25 bp, Homo sapien
gaaactccctagttcccagatcagt

SEQ ID NO: 5158735 - DNA, 25 bp, Homo sapien
cagcctctggcttaatccgggattc

SEQ ID NO: 5158736 - DNA, 25 bp, Homo sapien
gaggactcgagcctcacatggagca

SEQ ID NO: 5158737 - DNA, 25 bp, Homo sapien
ttcatccttaatgatcgcagaatca

SEQ ID NO: 5158738 - DNA, 25 bp, Homo sapien
tgaggcctgccctatatacactgga

SEQ ID NO: 5158739 - DNA, 25 bp, Homo sapien
tagcccatgcaacgggcagcatcct

SEQ ID NO: 5158740 - DNA, 25 bp, Homo sapien
cgcagaatcacggtggaaattagta

SEQ ID NO: 5158741 - DNA, 25 bp, Homo sapien
caggttctagggaggatgcctcact

SEQ ID NO: 5158742 - DNA, 25 bp, Homo sapien
ccacggtagggcgatattgtccagc

SEQ ID NO: 5158743 - DNA, 25 bp, Homo sapien
gggttgctacacagaaacaaatacg

SEQ ID NO: 5158744 - DNA, 25 bp, Homo sapien
gctctgttcagggtagggtcttcct

SEQ ID NO: 5158745 - DNA, 25 bp, Homo sapien
caaaataacgtaagcgcggatggcc

SEQ ID NO: 5158746 - DNA, 25 bp, Homo sapien
ccagaggacgctatggagatccagc

SEQ ID NO: 5158747 - DNA, 25 bp, Homo sapien
gaaaactcctcaagtggcgacacca

SEQ ID NO: 5158748 - DNA, 25 bp, Homo sapien
ggatggccaagtcatcaaacactgg

SEQ ID NO: 5158749 - DNA, 25 bp, Homo sapien
tgtaacttagcctcctctttcaaga

SEQ ID NO: 5158750 - DNA, 25 bp, Homo sapien
caccagttgatttgattaggcccca

SEQ ID NO: 5158751 - DNA, 25 bp, Homo sapien
cagaggaggatgaccttcggtttca

SEQ ID NO: 5158752 - DNA, 25 bp, Homo sapien
agattttagggaagtgcgtgatcca

SEQ ID NO: 5158753 - DNA, 25 bp, Homo sapien
caggacaaccctggatgaaggacgg

SEQ ID NO: 5158754 - DNA, 25 bp, Homo sapien
gataaactgatttgccatggcttca

SEQ ID NO: 5158755 - DNA, 25 bp, Homo sapien
taagcaagcccgctgttattctggg

SEQ ID NO: 5158756 - DNA, 25 bp, Homo sapien
tatctccctaccaacctagcatggg

SEQ ID NO: 5158757 - DNA, 25 bp, Homo sapien
gatgatgtcacctactgcgatgccc

SEQ ID NO: 5158758 - DNA, 25 bp, Homo sapien
tgttacccggaaagagctgaagtct

SEQ ID NO: 5158759 - DNA, 25 bp, Homo sapien
cagggtaatatgtctgggtgcccca

SEQ ID NO: 5158760 - DNA, 25 bp, Homo sapien
tatgctcacagaatgtgttacccgg

SEQ ID NO: 5158761 - DNA, 25 bp, Homo sapien
cctgatggaaaggactcgaagctct

SEQ ID NO: 5158762 - DNA, 25 bp, Homo sapien
ccaggctggtcaggtgcaaggtcac

SEQ ID NO: 5158763 - DNA, 25 bp, Homo sapien
tggaccatgtccacacaacgtgagg

SEQ ID NO: 5158764 - DNA, 25 bp, Homo sapien
tacccttggattgctcatggtccgc

SEQ ID NO: 5158765 - DNA, 25 bp, Homo sapien
gggactcagtaagatcttatcactg

SEQ ID NO: 5158766 - DNA, 25 bp, Homo sapien
tggttcatagcattcaaagtaactg

SEQ ID NO: 5158767 - DNA, 25 bp, Homo sapien
cttgtttaatttgtgagggactcag

SEQ ID NO: 5158768 - DNA, 25 bp, Homo sapien
gaatacctgccgaacagcttgttta

SEQ ID NO: 5158769 - DNA, 25 bp, Homo sapien
cagaggcctttggaaacctaagcca

SEQ ID NO: 5158770 - DNA, 25 bp, Homo sapien
agaggcctttggaaacctaagccag

SEQ ID NO: 5158771 - DNA, 25 bp, Homo sapien
tgtgcgtccagccatcacaaaggag

SEQ ID NO: 5158772 - DNA, 25 bp, Homo sapien
ggagctcgtcctaagccactgtggg

SEQ ID NO: 5158773 - DNA, 25 bp, Homo sapien
tacacgatgcaattgggaaacaggc

SEQ ID NO: 5158774 - DNA, 25 bp, Homo sapien
gaatcagttcttcacgcatgctggc

SEQ ID NO: 5158775 - DNA, 25 bp, Homo sapien
tgtgtatgttatacattgtgtctac

SEQ ID NO: 5158776 - DNA, 25 bp, Homo sapien
aattaaagatgagtgagtactcata

SEQ ID NO: 5158777 - DNA, 25 bp, Homo sapien
atgttatacattgtgtctacataca

SEQ ID NO: 5158778 - DNA, 25 bp, Homo sapien
tctacacatgataccaaattaaaga

SEQ ID NO: 5158779 - DNA, 25 bp, Homo sapien
ggtgaagaccttagacccagacacg

SEQ ID NO: 5158780 - DNA, 25 bp, Homo sapien
cctaagtataagtcagggctctttc

SEQ ID NO: 5158781 - DNA, 25 bp, Homo sapien
cttgtgtagtcatgtggtgaagacc

SEQ ID NO: 5158782 - DNA, 25 bp, Homo sapien
gcagagcaagtttattgcacttgtg

SEQ ID NO: 5158783 - DNA, 25 bp, Homo sapien
ccccttgatttgcctcctcctcgcc

SEQ ID NO: 5158784 - DNA, 25 bp, Homo sapien
ggcggcgggtgattcctgggagctc

SEQ ID NO: 5158785 - DNA, 25 bp, Homo sapien
tgctgcgggccacgaccggaggcgg

SEQ ID NO: 5158786 - DNA, 25 bp, Homo sapien
ttcctgggagctcggagcagtttgc

SEQ ID NO: 5158787 - DNA, 25 bp, Homo sapien
cgggtgattcctgggagctcggagc

SEQ ID NO: 5158788 - DNA, 25 bp, Homo sapien
gggccggattcggccggcgccagcg

SEQ ID NO: 5158789 - DNA, 25 bp, Homo sapien
gccggattcggccggcgccagcgcc

SEQ ID NO: 5158790 - DNA, 25 bp, Homo sapien
ggccggattcggccggcgccagcgc

SEQ ID NO: 5158791 - DNA, 25 bp, Homo sapien
cggattcggccggcgccagcgccgg

SEQ ID NO: 5158792 - DNA, 25 bp, Homo sapien
tttagcattctttagtcctctgctg

SEQ ID NO: 5158793 - DNA, 25 bp, Homo sapien
tttcggctcctccactaggttcttc

SEQ ID NO: 5158794 - DNA, 25 bp, Homo sapien
tccactaggttcttcaagagatggg

SEQ ID NO: 5158795 - DNA, 25 bp, Homo sapien
gggtgatgcattattaaagggttct

SEQ ID NO: 5158796 - DNA, 25 bp, Homo sapien
aatgtattatgccaggtcttgcctg

SEQ ID NO: 5158797 - DNA, 25 bp, Homo sapien
tattattcacaagttttgcataaac

SEQ ID NO: 5158798 - DNA, 25 bp, Homo sapien
tatgccaggtcttgcctgtatgacc

SEQ ID NO: 5158799 - DNA, 25 bp, Homo sapien
gcctgtatgaccttattattcacaa

SEQ ID NO: 5158800 - DNA, 25 bp, Homo sapien
cattattaactctaatagttgccat

SEQ ID NO: 5158801 - DNA, 25 bp, Homo sapien
gttcattattaactctaatagttgc

SEQ ID NO: 5158802 - DNA, 25 bp, Homo sapien
tcattattaactctaatagttgcca

SEQ ID NO: 5158803 - DNA, 25 bp, Homo sapien
cagttcattattaactctaatagtt

SEQ ID NO: 5158804 - DNA, 25 bp, Homo sapien
gacaatctggtgagtgcaaaagacc

SEQ ID NO: 5158805 - DNA, 25 bp, Homo sapien
gcagctgggacttcgtgagattaca

SEQ ID NO: 5158806 - DNA, 25 bp, Homo sapien
gttgtcatacctgcggccatcaaag

SEQ ID NO: 5158807 - DNA, 25 bp, Homo sapien
taaagtattcggtcagccagttgtc

SEQ ID NO: 5158808 - DNA, 25 bp, Homo sapien
ctcatttatgtagacttcatctgtt

SEQ ID NO: 5158809 - DNA, 25 bp, Homo sapien
tcatttatgtagacttcatctgttc

SEQ ID NO: 5158810 - DNA, 25 bp, Homo sapien
acataattgatctcaaagtatttgg

SEQ ID NO: 5158811 - DNA, 25 bp, Homo sapien
aacacgtgtgtcttcattggaaaca

SEQ ID NO: 5158812 - DNA, 25 bp, Homo sapien
gatctcaaagtatttggtttgcggg

SEQ ID NO: 5158813 - DNA, 25 bp, Homo sapien
tgcgggggtaaaatatgaacacgtg

SEQ ID NO: 5158814 - DNA, 25 bp, Homo sapien
aagacaggtggcatcttgttgggac

SEQ ID NO: 5158815 - DNA, 25 bp, Homo sapien
gacaggtggcatcttgttgggacaa

SEQ ID NO: 5158816 - DNA, 25 bp, Homo sapien
agacaggtggcatcttgttgggaca

SEQ ID NO: 5158817 - DNA, 25 bp, Homo sapien
gaagacaggtggcatcttgttggga

SEQ ID NO: 5158818 - DNA, 25 bp, Homo sapien
taacggtgaccgtgagggacaagcc

SEQ ID NO: 5158819 - DNA, 25 bp, Homo sapien
tggagaaaatgtaacggtgaccgtg

SEQ ID NO: 5158820 - DNA, 25 bp, Homo sapien
cttacagtgaacacggatgcagtca

SEQ ID NO: 5158821 - DNA, 25 bp, Homo sapien
taatagtatcgccactcatctggag

SEQ ID NO: 5158822 - DNA, 25 bp, Homo sapien
ggaagcctgcagcaaaccgcgtctc

SEQ ID NO: 5158823 - DNA, 25 bp, Homo sapien
ggcaacaagctttgcacgccagtca

SEQ ID NO: 5158824 - DNA, 25 bp, Homo sapien
taacactttcccatcttgggccatg

SEQ ID NO: 5158825 - DNA, 25 bp, Homo sapien
ggccatgtcactgggcaacaagctt

SEQ ID NO: 5158826 - DNA, 25 bp, Homo sapien
attgtgcagattgtaggaaatttgc

SEQ ID NO: 5158827 - DNA, 25 bp, Homo sapien
ttattgtgcagattgtaggaaattt

SEQ ID NO: 5158828 - DNA, 25 bp, Homo sapien
tattgtgcagattgtaggaaatttg

SEQ ID NO: 5158829 - DNA, 25 bp, Homo sapien
gaaaaagtcaagtttaacattctga

SEQ ID NO: 5158830 - DNA, 25 bp, Homo sapien
gaaacttcagcgcttaactacaaca

SEQ ID NO: 5158831 - DNA, 25 bp, Homo sapien
aacttttagacaaacttgtagatgc

SEQ ID NO: 5158832 - DNA, 25 bp, Homo sapien
tcttagccataaacaaagcgtagaa

SEQ ID NO: 5158833 - DNA, 25 bp, Homo sapien
taaatgaaggaaagtctagtgagtt

SEQ ID NO: 5158834 - DNA, 25 bp, Homo sapien
catgaataggaacaagcaaagtgtc

SEQ ID NO: 5158835 - DNA, 25 bp, Homo sapien
tgactggataggcatgaataggaac

SEQ ID NO: 5158836 - DNA, 25 bp, Homo sapien
ctagtgagttcatgactggataggc

SEQ ID NO: 5158837 - DNA, 25 bp, Homo sapien
tcacatcctatacattttgttgaca

SEQ ID NO: 5158838 - DNA, 25 bp, Homo sapien
gaaggatgaacttccattaggaaaa

SEQ ID NO: 5158839 - DNA, 25 bp, Homo sapien
aggttttgtatgagtatctcttagt

SEQ ID NO: 5158840 - DNA, 25 bp, Homo sapien
gtggaaggatgaacttccattagga

SEQ ID NO: 5158841 - DNA, 25 bp, Homo sapien
tagggctcagaagctgccaggtagc

SEQ ID NO: 5158842 - DNA, 25 bp, Homo sapien
gattgtaacaaatacggcacttggg

SEQ ID NO: 5158843 - DNA, 25 bp, Homo sapien
taatccaatgacaaactgcccctgc

SEQ ID NO: 5158844 - DNA, 25 bp, Homo sapien
tcatgacaagtagacggttaagcca

SEQ ID NO: 5158845 - DNA, 25 bp, Homo sapien
gaatgttgttaatgtggccctgcag

SEQ ID NO: 5158846 - DNA, 25 bp, Homo sapien
tgcaggctacagagcctctatagcc

SEQ ID NO: 5158847 - DNA, 25 bp, Homo sapien
ttcaagaagctaaagtatcctggct

SEQ ID NO: 5158848 - DNA, 25 bp, Homo sapien
tgagatgagtacatggtccacttgc

SEQ ID NO: 5158849 - DNA, 25 bp, Homo sapien
atattctgaccttggttgttcccac

SEQ ID NO: 5158850 - DNA, 25 bp, Homo sapien
ggcccagatgctttaagctccaggg

SEQ ID NO: 5158851 - DNA, 25 bp, Homo sapien
atgtggcccagatgctttaagctcc

SEQ ID NO: 5158852 - DNA, 25 bp, Homo sapien
tctgaccttggttgttcccacgctt

SEQ ID NO: 5158853 - DNA, 25 bp, Homo sapien
tgttgactatatcaaggtggcgccc

SEQ ID NO: 5158854 - DNA, 25 bp, Homo sapien
gagcagagtatcaccattttcaagg

SEQ ID NO: 5158855 - DNA, 25 bp, Homo sapien
ggtggcgcccacttcggtaaatgaa

SEQ ID NO: 5158856 - DNA, 25 bp, Homo sapien
ggcttttataaggtcaacactggct

SEQ ID NO: 5158857 - DNA, 25 bp, Homo sapien
ggcccgagaacacggcgagctggca

SEQ ID NO: 5158858 - DNA, 25 bp, Homo sapien
tcaggagggccgactggaggtggga

SEQ ID NO: 5158859 - DNA, 25 bp, Homo sapien
cgagctggcatcaggagcgaaagcc

SEQ ID NO: 5158860 - DNA, 25 bp, Homo sapien
aaggagattcaggagggccgactgg

SEQ ID NO: 5158861 - DNA, 25 bp, Homo sapien
gtaaagggaatcaaatagcaaacta

SEQ ID NO: 5158862 - DNA, 25 bp, Homo sapien
aactactggctattaggtactaggc

SEQ ID NO: 5158863 - DNA, 25 bp, Homo sapien
tacacctagagaattaaacaccacc

SEQ ID NO: 5158864 - DNA, 25 bp, Homo sapien
agaaaaaagtgagtggaatggaaga

SEQ ID NO: 5158865 - DNA, 25 bp, Homo sapien
aatcttcactctgtgagatgtttcc

SEQ ID NO: 5158866 - DNA, 25 bp, Homo sapien
tcactctgtgagatgtttcctaatt

SEQ ID NO: 5158867 - DNA, 25 bp, Homo sapien
cttcactctgtgagatgtttcctaa

SEQ ID NO: 5158868 - DNA, 25 bp, Homo sapien
tcaatcttcactctgtgagatgttt

SEQ ID NO: 5158869 - DNA, 25 bp, Homo sapien
ttattttaggtgtgtctccagaaag

SEQ ID NO: 5158870 - DNA, 25 bp, Homo sapien
tatgacttggcagctatagattgca

SEQ ID NO: 5158871 - DNA, 25 bp, Homo sapien
cctcttgctggactgattgctttta

SEQ ID NO: 5158872 - DNA, 25 bp, Homo sapien
tatgtcttattgacagctgggtgct

SEQ ID NO: 5158873 - DNA, 25 bp, Homo sapien
gactgaatcaaggtgatataaaact

SEQ ID NO: 5158874 - DNA, 25 bp, Homo sapien
tgaatcaaggtgatataaaactcaa

SEQ ID NO: 5158875 - DNA, 25 bp, Homo sapien
aggcttgatgagactgaatcaaggt

SEQ ID NO: 5158876 - DNA, 25 bp, Homo sapien
tgatgagactgaatcaaggtgatat

SEQ ID NO: 5158877 - DNA, 25 bp, Homo sapien
gaagtgaaccttgccaaaggcctgc

SEQ ID NO: 5158878 - DNA, 25 bp, Homo sapien
tctgccggttatctcactaatttcc

SEQ ID NO: 5158879 - DNA, 25 bp, Homo sapien
tggaagtttatcattatcagaggcc

SEQ ID NO: 5158880 - DNA, 25 bp, Homo sapien
cttggaagtgaaccttgccaaaggc

SEQ ID NO: 5158881 - DNA, 25 bp, Homo sapien
gtcgatcacgaaagccacattctct

SEQ ID NO: 5158882 - DNA, 25 bp, Homo sapien
ccagtgttgtgggacccgcagaagt

SEQ ID NO: 5158883 - DNA, 25 bp, Homo sapien
gaagtgcctgctgtcgatcacgaaa

SEQ ID NO: 5158884 - DNA, 25 bp, Homo sapien
cccagaccagtgttgtgggacccgc

SEQ ID NO: 5158885 - DNA, 25 bp, Homo sapien
cgtatggttgagagttgaactgcga

SEQ ID NO: 5158886 - DNA, 25 bp, Homo sapien
tgtgcagtcccatactgaaagggtg

SEQ ID NO: 5158887 - DNA, 25 bp, Homo sapien
tgaactgcgaaatccataactgcat

SEQ ID NO: 5158888 - DNA, 25 bp, Homo sapien
gcatgttccggtgaagacacattcg

SEQ ID NO: 5158889 - DNA, 25 bp, Homo sapien
tacagacaggatgccacgtcaaggt

SEQ ID NO: 5158890 - DNA, 25 bp, Homo sapien
tccacttgtaatatgcttaatgatg

SEQ ID NO: 5158891 - DNA, 25 bp, Homo sapien
tatttatactgtgacaacttttttg

SEQ ID NO: 5158892 - DNA, 25 bp, Homo sapien
tgtatccatgcgcaaagaagaggaa

SEQ ID NO: 5158893 - DNA, 25 bp, Homo sapien
aatatcctacagttgacttaggctg

SEQ ID NO: 5158894 - DNA, 25 bp, Homo sapien
caatgatggttatttgcaggatttg

SEQ ID NO: 5158895 - DNA, 25 bp, Homo sapien
tgttgcccgagtgatttcaatgatg

SEQ ID NO: 5158896 - DNA, 25 bp, Homo sapien
tcagttctacttgtttgttgcccga

SEQ ID NO: 5158897 - DNA, 25 bp, Homo sapien
tagccaggtagcgaactgaggttca

SEQ ID NO: 5158898 - DNA, 25 bp, Homo sapien
gaaaatttcagagagcactacagcc

SEQ ID NO: 5158899 - DNA, 25 bp, Homo sapien
taagagcatccttacaacccagggc

SEQ ID NO: 5158900 - DNA, 25 bp, Homo sapien
gaggttcagcatccctgtctcagtg

SEQ ID NO: 5158901 - DNA, 25 bp, Homo sapien
gactttggacatggtagttagaggt

SEQ ID NO: 5158902 - DNA, 25 bp, Homo sapien
gcccgcagaagctattcaggttatc

SEQ ID NO: 5158903 - DNA, 25 bp, Homo sapien
tagaggtagtgcagctaatagcccg

SEQ ID NO: 5158904 - DNA, 25 bp, Homo sapien
caggttatctgttatgagatgcagt

SEQ ID NO: 5158905 - DNA, 25 bp, Homo sapien
attcaacctttcaaactcttctaat

SEQ ID NO: 5158906 - DNA, 25 bp, Homo sapien
tattcaacctttcaaactcttctaa

SEQ ID NO: 5158907 - DNA, 25 bp, Homo sapien
cattgctttttctggaggaacgttt

SEQ ID NO: 5158908 - DNA, 25 bp, Homo sapien
gtattcaacctttcaaactcttcta

SEQ ID NO: 5158909 - DNA, 25 bp, Homo sapien
gcttcgctggcggtcggtgaaaatt

SEQ ID NO: 5158910 - DNA, 25 bp, Homo sapien
cttctgaggcttcggcttcgctggc

SEQ ID NO: 5158911 - DNA, 25 bp, Homo sapien
cttcggcttcgctggcggtcggtga

SEQ ID NO: 5158912 - DNA, 25 bp, Homo sapien
gcggtcggtgaaaatttatatgcat

SEQ ID NO: 5158913 - DNA, 25 bp, Homo sapien
aatggattcgataaatctactggaa

SEQ ID NO: 5158914 - DNA, 25 bp, Homo sapien
ccacagcaaatggattcgataaatc

SEQ ID NO: 5158915 - DNA, 25 bp, Homo sapien
caaatggattcgataaatctactgg

SEQ ID NO: 5158916 - DNA, 25 bp, Homo sapien
cagcaaatggattcgataaatctac

SEQ ID NO: 5158917 - DNA, 25 bp, Homo sapien
tcttcgtgaatgtcctgtctgactt

SEQ ID NO: 5158918 - DNA, 25 bp, Homo sapien
gtcctgtctgactttctgttcaaag

SEQ ID NO: 5158919 - DNA, 25 bp, Homo sapien
catctcttcgtgaatgtcctgtctg

SEQ ID NO: 5158920 - DNA, 25 bp, Homo sapien
cgtgaatgtcctgtctgactttctg

SEQ ID NO: 5158921 - DNA, 25 bp, Homo sapien
cataggatctttaccaaggtgcacc

SEQ ID NO: 5158922 - DNA, 25 bp, Homo sapien
taggatctttaccaaggtgcacctg

SEQ ID NO: 5158923 - DNA, 25 bp, Homo sapien
agacataggatctttaccaaggtgc

SEQ ID NO: 5158924 - DNA, 25 bp, Homo sapien
actcttcagtaagctcttttttaag

SEQ ID NO: 5158925 - DNA, 25 bp, Homo sapien
caacccgtttatggctaacttctgt

SEQ ID NO: 5158926 - DNA, 25 bp, Homo sapien
gaaattcctcatccaaaataggatc

SEQ ID NO: 5158927 - DNA, 25 bp, Homo sapien
cttctgttttaagtcgctgaaattc

SEQ ID NO: 5158928 - DNA, 25 bp, Homo sapien
cttcttgattgcgaacaacccgttt

SEQ ID NO: 5158929 - DNA, 25 bp, Homo sapien
tgcgtgctacttgttgaaaccgttt

SEQ ID NO: 5158930 - DNA, 25 bp, Homo sapien
tgagtggatcaaaagtaggatgaaa

SEQ ID NO: 5158931 - DNA, 25 bp, Homo sapien
gctgagccaagtgttattaatgagt

SEQ ID NO: 5158932 - DNA, 25 bp, Homo sapien
cttgcgtgctacttgttgaaaccgt

SEQ ID NO: 5158933 - DNA, 25 bp, Homo sapien
tggaggctggtaaataggtgagggt

SEQ ID NO: 5158934 - DNA, 25 bp, Homo sapien
ttgaataatcgtccctgaatcatga

SEQ ID NO: 5158935 - DNA, 25 bp, Homo sapien
gcttggccaatctttctcagtatac

SEQ ID NO: 5158936 - DNA, 25 bp, Homo sapien
gtgctatcgattgttttgcttggcc

SEQ ID NO: 5158937 - DNA, 25 bp, Homo sapien
ttcacgaacagcactcagcatattg

SEQ ID NO: 5158938 - DNA, 25 bp, Homo sapien
cttgggcgacacagagaaccggctg

SEQ ID NO: 5158939 - DNA, 25 bp, Homo sapien
cgacacagagaaccggctggtataa

SEQ ID NO: 5158940 - DNA, 25 bp, Homo sapien
tgatccgcctcaggaagaatttgaa

SEQ ID NO: 5158941 - DNA, 25 bp, Homo sapien
aatcatcctgactgatccgcctcag

SEQ ID NO: 5158942 - DNA, 25 bp, Homo sapien
tctgggaaagcgaagggcagcacct

SEQ ID NO: 5158943 - DNA, 25 bp, Homo sapien
gtctgggaaagcgaagggcagcacc

SEQ ID NO: 5158944 - DNA, 25 bp, Homo sapien
ggcaggagatgatccctggttttcc

SEQ ID NO: 5158945 - DNA, 25 bp, Homo sapien
agctctgtgcaggtgtatcaggagc

SEQ ID NO: 5158946 - DNA, 25 bp, Homo sapien
tggcaggagatgatccctggttttc

SEQ ID NO: 5158947 - DNA, 25 bp, Homo sapien
caggtgtatcaggagcaaggcagat

SEQ ID NO: 5158948 - DNA, 25 bp, Homo sapien
tgatttgaacttctgaagacttaat

SEQ ID NO: 5158949 - DNA, 25 bp, Homo sapien
ataactctgcttgatttgaacttct

SEQ ID NO: 5158950 - DNA, 25 bp, Homo sapien
ggaataactctgcttgatttgaact

SEQ ID NO: 5158951 - DNA, 25 bp, Homo sapien
gaagaaggaataactctgcttgatt

SEQ ID NO: 5158952 - DNA, 25 bp, Homo sapien
tgctttagggctcgggcaagctttt

SEQ ID NO: 5158953 - DNA, 25 bp, Homo sapien
gcaagcttttgaggtctgtaacttg

SEQ ID NO: 5158954 - DNA, 25 bp, Homo sapien
gctccttgctttagggctcgggcaa

SEQ ID NO: 5158955 - DNA, 25 bp, Homo sapien
cttgctttagggctcgggcaagctt

SEQ ID NO: 5158956 - DNA, 25 bp, Homo sapien
ccagagagctgagttgtggagtcct

SEQ ID NO: 5158957 - DNA, 25 bp, Homo sapien
gtggtttcatgctcaagactgatgt

SEQ ID NO: 5158958 - DNA, 25 bp, Homo sapien
catggctaaggcctcaggtggtttc

SEQ ID NO: 5158959 - DNA, 25 bp, Homo sapien
catacagaggatcataatctagaga

SEQ ID NO: 5158960 - DNA, 25 bp, Homo sapien
tcctatagagtaattgctgaaataa

SEQ ID NO: 5158961 - DNA, 25 bp, Homo sapien
aatattcccaatgagtgctctgttt

SEQ ID NO: 5158962 - DNA, 25 bp, Homo sapien
tcttctttggcctatatgtacatat

SEQ ID NO: 5158963 - DNA, 25 bp, Homo sapien
ggcctatatgtacatattatagata

SEQ ID NO: 5158964 - DNA, 25 bp, Homo sapien
tgctaaaagacggaatcactgatat

SEQ ID NO: 5158965 - DNA, 25 bp, Homo sapien
caggaattgctaaaagacggaatca

SEQ ID NO: 5158966 - DNA, 25 bp, Homo sapien
tatgtagtgatgtcatcttcctcat

SEQ ID NO: 5158967 - DNA, 25 bp, Homo sapien
tataaagctattttggctatttatc

SEQ ID NO: 5158968 - DNA, 25 bp, Homo sapien
tcctgatcagttaggttacaggttt

SEQ ID NO: 5158969 - DNA, 25 bp, Homo sapien
gatcagttaggttacaggtttattc

SEQ ID NO: 5158970 - DNA, 25 bp, Homo sapien
ccctagtgaaggcctctgggcctgg

SEQ ID NO: 5158971 - DNA, 25 bp, Homo sapien
tctgggcctggaggtttctttgtgg

SEQ ID NO: 5158972 - DNA, 25 bp, Homo sapien
tgggcctggaggtttctttgtggga

SEQ ID NO: 5158973 - DNA, 25 bp, Homo sapien
cctctgggcctggaggtttctttgt

SEQ ID NO: 5158974 - DNA, 25 bp, Homo sapien
tatcccgcacttgctgatagtgttc

SEQ ID NO: 5158975 - DNA, 25 bp, Homo sapien
tactccgtttgatgttggctctagg

SEQ ID NO: 5158976 - DNA, 25 bp, Homo sapien
tatacttgatcttaggaggaaggca

SEQ ID NO: 5158977 - DNA, 25 bp, Homo sapien
tattcctggttcaagcccctatttg

SEQ ID NO: 5158978 - DNA, 25 bp, Homo sapien
gctggaaaggaggtaagcgttggtg

SEQ ID NO: 5158979 - DNA, 25 bp, Homo sapien
agggcccagcggtggtgagtcaaga

SEQ ID NO: 5158980 - DNA, 25 bp, Homo sapien
cattccggcacccagatgcaaggta

SEQ ID NO: 5158981 - DNA, 25 bp, Homo sapien
ggaggtaagcgttggtgcagaggct

SEQ ID NO: 5158982 - DNA, 25 bp, Homo sapien
ctatcaacgtttctgcataggtcag

SEQ ID NO: 5158983 - DNA, 25 bp, Homo sapien
tgagagcatagatggtaatctatca

SEQ ID NO: 5158984 - DNA, 25 bp, Homo sapien
ggtcagaggatgcattacagcaaat

SEQ ID NO: 5158985 - DNA, 25 bp, Homo sapien
ccgtggcgggactctttggtgaatt

SEQ ID NO: 5158986 - DNA, 25 bp, Homo sapien
cgtgaacattaggtgcagccttcca

SEQ ID NO: 5158987 - DNA, 25 bp, Homo sapien
ggcggtgttaccattcttgttctgc

SEQ ID NO: 5158988 - DNA, 25 bp, Homo sapien
gaatgttgacaaagggtagcaggca

SEQ ID NO: 5158989 - DNA, 25 bp, Homo sapien
acccctttagggctggcggtatgag

SEQ ID NO: 5158990 - DNA, 25 bp, Homo sapien
agcttttccagtgcattattccggg

SEQ ID NO: 5158991 - DNA, 25 bp, Homo sapien
gaagcttttccagtgcattattccg

SEQ ID NO: 5158992 - DNA, 25 bp, Homo sapien
cttttccagtgcattattccgggaa

SEQ ID NO: 5158993 - DNA, 25 bp, Homo sapien
tttccagtgcattattccgggaata

SEQ ID NO: 5158994 - DNA, 25 bp, Homo sapien
gacctagagtcttacatcccgtgga

SEQ ID NO: 5158995 - DNA, 25 bp, Homo sapien
tacacgctgacaacgggtggacatg

SEQ ID NO: 5158996 - DNA, 25 bp, Homo sapien
tgattctcaagaacggtacacgctg

SEQ ID NO: 5158997 - DNA, 25 bp, Homo sapien
tattcaagcccaaggtaactgcatt

SEQ ID NO: 5158998 - DNA, 25 bp, Homo sapien
tcttctggtaaggcatcaaggatgg

SEQ ID NO: 5158999 - DNA, 25 bp, Homo sapien
gacgtctatcggaagcataaatgaa

SEQ ID NO: 5159000 - DNA, 25 bp, Homo sapien
aaggatggcagggacgtctatcgga

SEQ ID NO: 5159001 - DNA, 25 bp, Homo sapien
cgttctactgtttctagtctgtcct

SEQ ID NO: 5159002 - DNA, 25 bp, Homo sapien
gactctgtcgtcacagatacagcag

SEQ ID NO: 5159003 - DNA, 25 bp, Homo sapien
aaggaatgggtcttcagtaacagga

SEQ ID NO: 5159004 - DNA, 25 bp, Homo sapien
tctttgtgctataccccgactctgt

SEQ ID NO: 5159005 - DNA, 25 bp, Homo sapien
caagagtcttcctaatgtgccggag

SEQ ID NO: 5159006 - DNA, 25 bp, Homo sapien
ccaaatgcagaatgatcaggcaggc

SEQ ID NO: 5159007 - DNA, 25 bp, Homo sapien
caaggcaatgcagtaccaggtaact

SEQ ID NO: 5159008 - DNA, 25 bp, Homo sapien
agaaccaaatgcagaatgatcaggc

SEQ ID NO: 5159009 - DNA, 25 bp, Homo sapien
ccaggtaactgctaccagcgcagga

SEQ ID NO: 5159010 - DNA, 25 bp, Homo sapien
ggccacatttggttccgagctatag

SEQ ID NO: 5159011 - DNA, 25 bp, Homo sapien
tctggaattacaaacagggacactt

SEQ ID NO: 5159012 - DNA, 25 bp, Homo sapien
ttacaaatacaggtggtgggccaca

SEQ ID NO: 5159013 - DNA, 25 bp, Homo sapien
caggaatgggctgtatcttgtctgc

SEQ ID NO: 5159014 - DNA, 25 bp, Homo sapien
cttctacattctgctcacagagctc

SEQ ID NO: 5159015 - DNA, 25 bp, Homo sapien
aacatagggaattccactttgatca

SEQ ID NO: 5159016 - DNA, 25 bp, Homo sapien
tcctgatgtccttgtagttcaacat

SEQ ID NO: 5159017 - DNA, 25 bp, Homo sapien
tttctggagtcaacataacttctac

SEQ ID NO: 5159018 - DNA, 25 bp, Homo sapien
gaatgattcaaacctggcttctggc

SEQ ID NO: 5159019 - DNA, 25 bp, Homo sapien
tgtttcctgatgtgcgaatggtgta

SEQ ID NO: 5159020 - DNA, 25 bp, Homo sapien
gtttctgagcatgggcaagttaccc

SEQ ID NO: 5159021 - DNA, 25 bp, Homo sapien
acagagatcctggtgtgaggtcttc

SEQ ID NO: 5159022 - DNA, 25 bp, Homo sapien
tggttgtgcttgatctttcacttct

SEQ ID NO: 5159023 - DNA, 25 bp, Homo sapien
gctggttgtgcttgatctttcactt

SEQ ID NO: 5159024 - DNA, 25 bp, Homo sapien
tgctggttgtgcttgatctttcact

SEQ ID NO: 5159025 - DNA, 25 bp, Homo sapien
ctgctggttgtgcttgatctttcac

SEQ ID NO: 5159026 - DNA, 25 bp, Homo sapien
atcaggtatgtgttgagtgctttgc

SEQ ID NO: 5159027 - DNA, 25 bp, Homo sapien
ctagaatcaggtatgtgttgagtgc

SEQ ID NO: 5159028 - DNA, 25 bp, Homo sapien
gaatcaggtatgtgttgagtgcttt

SEQ ID NO: 5159029 - DNA, 25 bp, Homo sapien
tagaatcaggtatgtgttgagtgct

SEQ ID NO: 5159030 - DNA, 25 bp, Homo sapien
gcatgtaaatggacgcaaggggcca

SEQ ID NO: 5159031 - DNA, 25 bp, Homo sapien
tgtaaatggacgcaaggggccacag

SEQ ID NO: 5159032 - DNA, 25 bp, Homo sapien
taaatggacgcaaggggccacagtg

SEQ ID NO: 5159033 - DNA, 25 bp, Homo sapien
gcccacggaaagcaaatggaaggga

SEQ ID NO: 5159034 - DNA, 25 bp, Homo sapien
aaaagatatatacatcctctacatt

SEQ ID NO: 5159035 - DNA, 25 bp, Homo sapien
agatatatacatcctctacatttca

SEQ ID NO: 5159036 - DNA, 25 bp, Homo sapien
aagatatatacatcctctacatttc

SEQ ID NO: 5159037 - DNA, 25 bp, Homo sapien
aaagatatatacatcctctacattt

SEQ ID NO: 5159038 - DNA, 25 bp, Homo sapien
gactgggtaccaggatcatggctca

SEQ ID NO: 5159039 - DNA, 25 bp, Homo sapien
cgtggtcaacgatttcaccgaagga

SEQ ID NO: 5159040 - DNA, 25 bp, Homo sapien
gcctggctaggcaacgaaacctttg

SEQ ID NO: 5159041 - DNA, 25 bp, Homo sapien
taaggaacccggatgattgatccca

SEQ ID NO: 5159042 - DNA, 25 bp, Homo sapien
cagggtggggctagacgacattcca

SEQ ID NO: 5159043 - DNA, 25 bp, Homo sapien
gctagacgacattccatgtccttcc

SEQ ID NO: 5159044 - DNA, 25 bp, Homo sapien
ggtggggctagacgacattccatgt

SEQ ID NO: 5159045 - DNA, 25 bp, Homo sapien
gggctagacgacattccatgtcctt

SEQ ID NO: 5159046 - DNA, 25 bp, Homo sapien
ttaagctttttcaggacagaggtgg

SEQ ID NO: 5159047 - DNA, 25 bp, Homo sapien
aagctttttcaggacagaggtggtt

SEQ ID NO: 5159048 - DNA, 25 bp, Homo sapien
tcacttaagctttttcaggacagag

SEQ ID NO: 5159049 - DNA, 25 bp, Homo sapien
tcaggttgggccctgttccaggggc

SEQ ID NO: 5159050 - DNA, 25 bp, Homo sapien
cacagagcagcgtgccatctgtcat

SEQ ID NO: 5159051 - DNA, 25 bp, Homo sapien
ccttggcggggagctctgagcttta

SEQ ID NO: 5159052 - DNA, 25 bp, Homo sapien
tcccaggtgcttcacactgtacagt

SEQ ID NO: 5159053 - DNA, 25 bp, Homo sapien
tgtttattaccatgttcgctgcccc

SEQ ID NO: 5159054 - DNA, 25 bp, Homo sapien
tcagggggcggagctcgccggccgg

SEQ ID NO: 5159055 - DNA, 25 bp, Homo sapien
gggggcggagctcgccggccggaga

SEQ ID NO: 5159056 - DNA, 25 bp, Homo sapien
gatggggacttcagggggcggagct

SEQ ID NO: 5159057 - DNA, 25 bp, Homo sapien
cttcagggggcggagctcgccggcc

SEQ ID NO: 5159058 - DNA, 25 bp, Homo sapien
gccgccgctcggaacgcctacatgt

SEQ ID NO: 5159059 - DNA, 25 bp, Homo sapien
gcagggcggccgcaaagcacgccgg

SEQ ID NO: 5159060 - DNA, 25 bp, Homo sapien
aacgcctacatgtgcgcgcggcagg

SEQ ID NO: 5159061 - DNA, 25 bp, Homo sapien
cgctcggaacgcctacatgtgcgcg

SEQ ID NO: 5159062 - DNA, 25 bp, Homo sapien
ggtccctcccgctcgtccgtgcgct

SEQ ID NO: 5159063 - DNA, 25 bp, Homo sapien
gtccctagggccatcgcgctgcggg

SEQ ID NO: 5159064 - DNA, 25 bp, Homo sapien
gcagaggggtcctcgctacgcttcc

SEQ ID NO: 5159065 - DNA, 25 bp, Homo sapien
ggtgggcctagaacacagtaccatg

SEQ ID NO: 5159066 - DNA, 25 bp, Homo sapien
taggctactccgcagtctgaacgcg

SEQ ID NO: 5159067 - DNA, 25 bp, Homo sapien
aaacgcagggtaccgcttggcctat

SEQ ID NO: 5159068 - DNA, 25 bp, Homo sapien
tcctgtccgtgaaaagtgcttaatg

SEQ ID NO: 5159069 - DNA, 25 bp, Homo sapien
gagttgccgcaaacaaaaacgcagg

SEQ ID NO: 5159070 - DNA, 25 bp, Homo sapien
taatgagcaacgaatgagttgccgc

SEQ ID NO: 5159071 - DNA, 25 bp, Homo sapien
gacagggtctttaaggagataatta

SEQ ID NO: 5159072 - DNA, 25 bp, Homo sapien
cagactgtggctgtatttggagaca

SEQ ID NO: 5159073 - DNA, 25 bp, Homo sapien
taaggagataattaagataaaatga

SEQ ID NO: 5159074 - DNA, 25 bp, Homo sapien
ggagacagggtctttaaggagataa

SEQ ID NO: 5159075 - DNA, 25 bp, Homo sapien
gtcgtaatggcccacctctagggtg

SEQ ID NO: 5159076 - DNA, 25 bp, Homo sapien
ttccccatgtgccaaacaggtgtgt

SEQ ID NO: 5159077 - DNA, 25 bp, Homo sapien
ctgtgcgtcaatttccccatgtgcc

SEQ ID NO: 5159078 - DNA, 25 bp, Homo sapien
tgggtcagcctgcagactgaacatc

SEQ ID NO: 5159079 - DNA, 25 bp, Homo sapien
cacaaatgctgcggtccgccacagg

SEQ ID NO: 5159080 - DNA, 25 bp, Homo sapien
tgcacaaatgctgcggtccgccaca

SEQ ID NO: 5159081 - DNA, 25 bp, Homo sapien
gcacaaatgctgcggtccgccacag

SEQ ID NO: 5159082 - DNA, 25 bp, Homo sapien
tctgcacaaatgctgcggtccgcca

SEQ ID NO: 5159083 - DNA, 25 bp, Homo sapien
tacgagattggaactccaaacaggc

SEQ ID NO: 5159084 - DNA, 25 bp, Homo sapien
gccctgaggccagtactggtagagc

SEQ ID NO: 5159085 - DNA, 25 bp, Homo sapien
ggatccgggaagaggtggtacgaga

SEQ ID NO: 5159086 - DNA, 25 bp, Homo sapien
ctgaggccagtactggtagagccat

SEQ ID NO: 5159087 - DNA, 25 bp, Homo sapien
aagggcttgtagcaatggcctgaag

SEQ ID NO: 5159088 - DNA, 25 bp, Homo sapien
gaaggaacacctatgtcctgtagca

SEQ ID NO: 5159089 - DNA, 25 bp, Homo sapien
tgaagggcttgtagcaatggcctga

SEQ ID NO: 5159090 - DNA, 25 bp, Homo sapien
tatgtcctgtagcacctcttggaag

SEQ ID NO: 5159091 - DNA, 25 bp, Homo sapien
cgaacttctgggcttcacgggacaa

SEQ ID NO: 5159092 - DNA, 25 bp, Homo sapien
aatcctgggagaaggcgtaggccac

SEQ ID NO: 5159093 - DNA, 25 bp, Homo sapien
tctttgcccaagagactgcgcaggg

SEQ ID NO: 5159094 - DNA, 25 bp, Homo sapien
caggttgcccgacagaagcttctca

SEQ ID NO: 5159095 - DNA, 25 bp, Homo sapien
tgcaaggcggtttacatcatctcca

SEQ ID NO: 5159096 - DNA, 25 bp, Homo sapien
tgtctgcacaagctggaagtgtcct

SEQ ID NO: 5159097 - DNA, 25 bp, Homo sapien
ttttctggccgtgagctataggtcc

SEQ ID NO: 5159098 - DNA, 25 bp, Homo sapien
tataggtccaaaggctccaacaggg

SEQ ID NO: 5159099 - DNA, 25 bp, Homo sapien
tgttctgccacttacaaagttttat

SEQ ID NO: 5159100 - DNA, 25 bp, Homo sapien
gttctgccacttacaaagttttatg

SEQ ID NO: 5159101 - DNA, 25 bp, Homo sapien
gatcgccctgttaaagtggtaggcc

SEQ ID NO: 5159102 - DNA, 25 bp, Homo sapien
aagtcacttgttccagatcgccctg

SEQ ID NO: 5159103 - DNA, 25 bp, Homo sapien
gatagccactgggaaaactgcccta

SEQ ID NO: 5159104 - DNA, 25 bp, Homo sapien
ctaaacatggtaggctggttgtccc

SEQ ID NO: 5159105 - DNA, 25 bp, Homo sapien
gtgtggatctcttgagaacagaagt

SEQ ID NO: 5159106 - DNA, 25 bp, Homo sapien
cagtatgggccaggtgaagtgactc

SEQ ID NO: 5159107 - DNA, 25 bp, Homo sapien
ggtgtgtggatctcttgagaacaga

SEQ ID NO: 5159108 - DNA, 25 bp, Homo sapien
tgaggtgtgtggatctcttgagaac

SEQ ID NO: 5159109 - DNA, 25 bp, Homo sapien
tccctatgtatcacgggagggacct

SEQ ID NO: 5159110 - DNA, 25 bp, Homo sapien
ggattaatacatgcagtctcatctg

SEQ ID NO: 5159111 - DNA, 25 bp, Homo sapien
gattctattccaggctcacacggtt

SEQ ID NO: 5159112 - DNA, 25 bp, Homo sapien
catctgaaagcttgagtagggaagg

SEQ ID NO: 5159113 - DNA, 25 bp, Homo sapien
aggaatccaggcacaggttagctgc

SEQ ID NO: 5159114 - DNA, 25 bp, Homo sapien
ggcacaggttagctgcttctctgct

SEQ ID NO: 5159115 - DNA, 25 bp, Homo sapien
ttactacaacatggatttattgtct

SEQ ID NO: 5159116 - DNA, 25 bp, Homo sapien
aatccaggcacaggttagctgcttc

SEQ ID NO: 5159117 - DNA, 25 bp, Homo sapien
tctatttctgcataccaagttacca

SEQ ID NO: 5159118 - DNA, 25 bp, Homo sapien
tatttctgcataccaagttaccaca

SEQ ID NO: 5159119 - DNA, 25 bp, Homo sapien
cataccaagttaccacaccaaatgg

SEQ ID NO: 5159120 - DNA, 25 bp, Homo sapien
tctgcataccaagttaccacaccaa

SEQ ID NO: 5159121 - DNA, 25 bp, Homo sapien
cagggtacctctgagtaggccttca

SEQ ID NO: 5159122 - DNA, 25 bp, Homo sapien
ggcccagtagcaaaggtgacaccat

SEQ ID NO: 5159123 - DNA, 25 bp, Homo sapien
tcagtcggcgaggaaccacgtatat

SEQ ID NO: 5159124 - DNA, 25 bp, Homo sapien
cagaatctgtcaccttgatgcaggg

SEQ ID NO: 5159125 - DNA, 25 bp, Homo sapien
caaagcatgggtggacggagagaaa

SEQ ID NO: 5159126 - DNA, 25 bp, Homo sapien
gtctgagtggcacattttcatgggc

SEQ ID NO: 5159127 - DNA, 25 bp, Homo sapien
gggctgtcagtcaaatccgctccgc

SEQ ID NO: 5159128 - DNA, 25 bp, Homo sapien
aatccgctccgcagcaggtctgagt

SEQ ID NO: 5159129 - DNA, 25 bp, Homo sapien
tggaggagtcccacgatccacttgc

SEQ ID NO: 5159130 - DNA, 25 bp, Homo sapien
ctgtccccacgctccatcgctggtg

SEQ ID NO: 5159131 - DNA, 25 bp, Homo sapien
agtactgtccccacgctccatcgct

SEQ ID NO: 5159132 - DNA, 25 bp, Homo sapien
agtcccacgatccacttgcagcagt

SEQ ID NO: 5159133 - DNA, 25 bp, Homo sapien
ggagatccttcagaccacagtacag

SEQ ID NO: 5159134 - DNA, 25 bp, Homo sapien
gggagatccttcagaccacagtaca

SEQ ID NO: 5159135 - DNA, 25 bp, Homo sapien
agggagatccttcagaccacagtac

SEQ ID NO: 5159136 - DNA, 25 bp, Homo sapien
ggctgagggtactcacagcaagtgt

SEQ ID NO: 5159137 - DNA, 25 bp, Homo sapien
tacttgtcagtctcttcggtagaac

SEQ ID NO: 5159138 - DNA, 25 bp, Homo sapien
ttcggtagaactctgagctggctga

SEQ ID NO: 5159139 - DNA, 25 bp, Homo sapien
ttgtcactgcaggtgtacttgtcag

SEQ ID NO: 5159140 - DNA, 25 bp, Homo sapien
gctttgccgtatccgctgacactga

SEQ ID NO: 5159141 - DNA, 25 bp, Homo sapien
tgcacaatcattgcccgatgtttgt

SEQ ID NO: 5159142 - DNA, 25 bp, Homo sapien
agaagggctttgccgtatccgctga

SEQ ID NO: 5159143 - DNA, 25 bp, Homo sapien
cattgcccgatgtttgtttttcaga

SEQ ID NO: 5159144 - DNA, 25 bp, Homo sapien
caggtctgtgtctggccatgtgaga

SEQ ID NO: 5159145 - DNA, 25 bp, Homo sapien
ggcagggtgcttccctcagagaccg

SEQ ID NO: 5159146 - DNA, 25 bp, Homo sapien
tgctggaactgtcagcaccagcctg

SEQ ID NO: 5159147 - DNA, 25 bp, Homo sapien
catgtgagaatttccccagggcagg

SEQ ID NO: 5159148 - DNA, 25 bp, Homo sapien
tgttcttctgagggccactccaaga

SEQ ID NO: 5159149 - DNA, 25 bp, Homo sapien
tgagggccactccaagagattaccg

SEQ ID NO: 5159150 - DNA, 25 bp, Homo sapien
caagagattaccggggagactttgc

SEQ ID NO: 5159151 - DNA, 25 bp, Homo sapien
gagggccactccaagagattaccgg

SEQ ID NO: 5159152 - DNA, 25 bp, Homo sapien
gggagtgacctcttggtgagacagc

SEQ ID NO: 5159153 - DNA, 25 bp, Homo sapien
aactccaaccggcttgcaccctggg

SEQ ID NO: 5159154 - DNA, 25 bp, Homo sapien
gccttgggaaattcactccttttgc

SEQ ID NO: 5159155 - DNA, 25 bp, Homo sapien
ccctagtagggactctagcctaaca

SEQ ID NO: 5159156 - DNA, 25 bp, Homo sapien
tagtgcaacaaaaactcagcactct

SEQ ID NO: 5159157 - DNA, 25 bp, Homo sapien
agtgcaacaaaaactcagcactctt

SEQ ID NO: 5159158 - DNA, 25 bp, Homo sapien
ctagtgcaacaaaaactcagcactc

SEQ ID NO: 5159159 - DNA, 25 bp, Homo sapien
ctggaggggcattttacgtgcttta

SEQ ID NO: 5159160 - DNA, 25 bp, Homo sapien
taatcaaccatgagctctctaagtc

SEQ ID NO: 5159161 - DNA, 25 bp, Homo sapien
gttaatcaaccatgagctctctaag

SEQ ID NO: 5159162 - DNA, 25 bp, Homo sapien
ggcattttacgtgctttattcacct

SEQ ID NO: 5159163 - DNA, 25 bp, Homo sapien
tagtttcttctgcgctaactttttc

SEQ ID NO: 5159164 - DNA, 25 bp, Homo sapien
tgctgaatttattccagagccatac

SEQ ID NO: 5159165 - DNA, 25 bp, Homo sapien
tgctttaaatgtcccggaaagccaa

SEQ ID NO: 5159166 - DNA, 25 bp, Homo sapien
cgggaactctcaggctcccaacaag

SEQ ID NO: 5159167 - DNA, 25 bp, Homo sapien
acaatgccacgggaactctcaggct

SEQ ID NO: 5159168 - DNA, 25 bp, Homo sapien
ccatgtggacaagctcgagttgacc

SEQ ID NO: 5159169 - DNA, 25 bp, Homo sapien
ctattcatgaaagaggccgggacag

SEQ ID NO: 5159170 - DNA, 25 bp, Homo sapien
tctcttgtccccaggatcagtcaga

SEQ ID NO: 5159171 - DNA, 25 bp, Homo sapien
ctcttgtccccaggatcagtcagac

SEQ ID NO: 5159172 - DNA, 25 bp, Homo sapien
cagaactaccaggtcaccacacatt

SEQ ID NO: 5159173 - DNA, 25 bp, Homo sapien
ttcagaactaccaggtcaccacaca

SEQ ID NO: 5159174 - DNA, 25 bp, Homo sapien
tcactgcgctgggacaccggacttt

SEQ ID NO: 5159175 - DNA, 25 bp, Homo sapien
cctctgtggccttgtcactgcgctg

SEQ ID NO: 5159176 - DNA, 25 bp, Homo sapien
tgggattcactggaacccctctgtg

SEQ ID NO: 5159177 - DNA, 25 bp, Homo sapien
cattgggcggttacactgggattca

SEQ ID NO: 5159178 - DNA, 25 bp, Homo sapien
gtgatccggagcatgggaccaacct

SEQ ID NO: 5159179 - DNA, 25 bp, Homo sapien
tgcccagtggaagctgcagtcctgg

SEQ ID NO: 5159180 - DNA, 25 bp, Homo sapien
ggctgaatccagcttggagccagag

SEQ ID NO: 5159181 - DNA, 25 bp, Homo sapien
gctgttaccacccttaggatcaagg

SEQ ID NO: 5159182 - DNA, 25 bp, Homo sapien
taaatttgaatctggtgtcaacact

SEQ ID NO: 5159183 - DNA, 25 bp, Homo sapien
tccatggagacattattagaccatg

SEQ ID NO: 5159184 - DNA, 25 bp, Homo sapien
gtcaacactcctttcggctgcattc

SEQ ID NO: 5159185 - DNA, 25 bp, Homo sapien
ttattagaccatgctttcaaatgct

SEQ ID NO: 5159186 - DNA, 25 bp, Homo sapien
taggcaggaaccaccaattattaac

SEQ ID NO: 5159187 - DNA, 25 bp, Homo sapien
tctctaaatggccacgactgcactg

SEQ ID NO: 5159188 - DNA, 25 bp, Homo sapien
cagagccacaatctgtcaggccaca

SEQ ID NO: 5159189 - DNA, 25 bp, Homo sapien
caccaaaggcttctgatatccctaa

SEQ ID NO: 5159190 - DNA, 25 bp, Homo sapien
tcaggaccatgcacgtggaaattct

SEQ ID NO: 5159191 - DNA, 25 bp, Homo sapien
tctcccatcaggtgtccagtgacag

SEQ ID NO: 5159192 - DNA, 25 bp, Homo sapien
tgggtgccaggctaacagggtattt

SEQ ID NO: 5159193 - DNA, 25 bp, Homo sapien
cgtggaaattctgctgccggagctg

SEQ ID NO: 5159194 - DNA, 25 bp, Homo sapien
aagcagaccaactttcagtgtcagg

SEQ ID NO: 5159195 - DNA, 25 bp, Homo sapien
gctgcaggaaggaacattttgtcac

SEQ ID NO: 5159196 - DNA, 25 bp, Homo sapien
taacaagagtcatgccagtcagtga

SEQ ID NO: 5159197 - DNA, 25 bp, Homo sapien
ggctgccctaacgaagtaccatgga

SEQ ID NO: 5159198 - DNA, 25 bp, Homo sapien
ctttgctgcttcatagccaagccct

SEQ ID NO: 5159199 - DNA, 25 bp, Homo sapien
cttcatagccaagcccttaaccagg

SEQ ID NO: 5159200 - DNA, 25 bp, Homo sapien
atagccaagcccttaaccaggctgg

SEQ ID NO: 5159201 - DNA, 25 bp, Homo sapien
tgctgcttcatagccaagcccttaa

SEQ ID NO: 5159202 - DNA, 25 bp, Homo sapien
gagacatggggtgcaccaggtcctg

SEQ ID NO: 5159203 - DNA, 25 bp, Homo sapien
gacatggggtgcaccaggtcctggg

SEQ ID NO: 5159204 - DNA, 25 bp, Homo sapien
agacatggggtgcaccaggtcctgg

SEQ ID NO: 5159205 - DNA, 25 bp, Homo sapien
tctggggaatccgacttaacaacac

SEQ ID NO: 5159206 - DNA, 25 bp, Homo sapien
acaggctttgccagccagcggtcac

SEQ ID NO: 5159207 - DNA, 25 bp, Homo sapien
acttaacaacacagggacaggcttt

SEQ ID NO: 5159208 - DNA, 25 bp, Homo sapien
ggacaggctttgccagccagcggtc

SEQ ID NO: 5159209 - DNA, 25 bp, Homo sapien
cctggctgggactcgagcattgcaa

SEQ ID NO: 5159210 - DNA, 25 bp, Homo sapien
tggagctccaagtcaacacaaattg

SEQ ID NO: 5159211 - DNA, 25 bp, Homo sapien
tgactaattgcctgagactcttgaa

SEQ ID NO: 5159212 - DNA, 25 bp, Homo sapien
gataggaatcatacccattgagtag

SEQ ID NO: 5159213 - DNA, 25 bp, Homo sapien
ctttctctcctttcaacaatttgtt

SEQ ID NO: 5159214 - DNA, 25 bp, Homo sapien
caatccctactcagtggcagctgtt

SEQ ID NO: 5159215 - DNA, 25 bp, Homo sapien
tctcttcaactgttcttcactttct

SEQ ID NO: 5159216 - DNA, 25 bp, Homo sapien
ttttcataaaacaggggctcaggca

SEQ ID NO: 5159217 - DNA, 25 bp, Homo sapien
tagccaatcacaataatcccctgtg

SEQ ID NO: 5159218 - DNA, 25 bp, Homo sapien
catttctaggttcttgtgggcagga

SEQ ID NO: 5159219 - DNA, 25 bp, Homo sapien
tcaagtgatatgtccacgtatcccc

SEQ ID NO: 5159220 - DNA, 25 bp, Homo sapien
caaaatagctaacatgggccaaggg

SEQ ID NO: 5159221 - DNA, 25 bp, Homo sapien
atttaataaatggtggaaagtggct

SEQ ID NO: 5159222 - DNA, 25 bp, Homo sapien
tatttaataaatggtggaaagtggc

SEQ ID NO: 5159223 - DNA, 25 bp, Homo sapien
aagtctgggtgcgactcagaccggc

SEQ ID NO: 5159224 - DNA, 25 bp, Homo sapien
ctggaacaaagcctgatgtaaagtc

SEQ ID NO: 5159225 - DNA, 25 bp, Homo sapien
gaacaaagcctgatgtaaagtctgg

SEQ ID NO: 5159226 - DNA, 25 bp, Homo sapien
gcctgatgtaaagtctgggtgcgac

SEQ ID NO: 5159227 - DNA, 25 bp, Homo sapien
ttgaaaaggcggaacttggctctcc

SEQ ID NO: 5159228 - DNA, 25 bp, Homo sapien
gaggacgttcagcttagcattgcca

SEQ ID NO: 5159229 - DNA, 25 bp, Homo sapien
cttggatgtctttcaggccgcagta

SEQ ID NO: 5159230 - DNA, 25 bp, Homo sapien
gccctgccagctgtaagagcttgaa

SEQ ID NO: 5159231 - DNA, 25 bp, Homo sapien
gtgtgctgggcctttttctcacgtt

SEQ ID NO: 5159232 - DNA, 25 bp, Homo sapien
ggagcatttaatgacagttaagcaa

SEQ ID NO: 5159233 - DNA, 25 bp, Homo sapien
tttggctaattgatcagcagatcct

SEQ ID NO: 5159234 - DNA, 25 bp, Homo sapien
ctcacgttggatgtttggctaattg

SEQ ID NO: 5159235 - DNA, 25 bp, Homo sapien
catttagaagattccgagaatctgc

SEQ ID NO: 5159236 - DNA, 25 bp, Homo sapien
aggaaggtgtaaacctggcctgcca

SEQ ID NO: 5159237 - DNA, 25 bp, Homo sapien
ctgccaggaaggtgtaaacctggcc

SEQ ID NO: 5159238 - DNA, 25 bp, Homo sapien
tactagcatgaggtaggctgcctgt

SEQ ID NO: 5159239 - DNA, 25 bp, Homo sapien
tcagatagatactctaagggtgatc

SEQ ID NO: 5159240 - DNA, 25 bp, Homo sapien
gcagagaaaagtggacaagcatcca

SEQ ID NO: 5159241 - DNA, 25 bp, Homo sapien
cataagggcaagaggatcagataga

SEQ ID NO: 5159242 - DNA, 25 bp, Homo sapien
aagggtgatccgttcagtttgcaca

SEQ ID NO: 5159243 - DNA, 25 bp, Homo sapien
cttagcctctgaccgcatactggaa

SEQ ID NO: 5159244 - DNA, 25 bp, Homo sapien
gtgtgggtggccctcttagcctctg

SEQ ID NO: 5159245 - DNA, 25 bp, Homo sapien
attcccctcccacgagtgtgggtgg

SEQ ID NO: 5159246 - DNA, 25 bp, Homo sapien
cattcccctcccacgagtgtgggtg

SEQ ID NO: 5159247 - DNA, 25 bp, Homo sapien
acacgcagggctgcttgcaaagtgg

SEQ ID NO: 5159248 - DNA, 25 bp, Homo sapien
gttctcaggcttacaagcaactcat

SEQ ID NO: 5159249 - DNA, 25 bp, Homo sapien
gctgcttctggggagtattcggcat

SEQ ID NO: 5159250 - DNA, 25 bp, Homo sapien
agtgggttttcgtcctgttctcagg

SEQ ID NO: 5159251 - DNA, 25 bp, Homo sapien
cggaaggtgatgactgctttggcaa

SEQ ID NO: 5159252 - DNA, 25 bp, Homo sapien
caaacatttatgattcacggaaggt

SEQ ID NO: 5159253 - DNA, 25 bp, Homo sapien
tgaattcgctcaattactcaggaaa

SEQ ID NO: 5159254 - DNA, 25 bp, Homo sapien
catggttcagtttgaagtccagcag

SEQ ID NO: 5159255 - DNA, 25 bp, Homo sapien
tacagcaccgtcagctgtgtaataa

SEQ ID NO: 5159256 - DNA, 25 bp, Homo sapien
gcaccgtcagctgtgtaataaacac

SEQ ID NO: 5159257 - DNA, 25 bp, Homo sapien
tggtacagcaccgtcagctgtgtaa

SEQ ID NO: 5159258 - DNA, 25 bp, Homo sapien
cagctgtgtaataaacacctgttgt

SEQ ID NO: 5159259 - DNA, 25 bp, Homo sapien
ctgtgttccttgaggaggcaggctc

SEQ ID NO: 5159260 - DNA, 25 bp, Homo sapien
tggacatcaaaagtccaaaacaggt

SEQ ID NO: 5159261 - DNA, 25 bp, Homo sapien
tccaaaacaggttgccaagctgtgt

SEQ ID NO: 5159262 - DNA, 25 bp, Homo sapien
tgccaagctgtgttccttgaggagg

SEQ ID NO: 5159263 - DNA, 25 bp, Homo sapien
acacgcaggtgcgagagagagcggc

SEQ ID NO: 5159264 - DNA, 25 bp, Homo sapien
agagggacacgcaggtgcgagagag

SEQ ID NO: 5159265 - DNA, 25 bp, Homo sapien
aagtcgcaccagtcggagcgcagag

SEQ ID NO: 5159266 - DNA, 25 bp, Homo sapien
gcagggagaagtcgcaccagtcgga

SEQ ID NO: 5159267 - DNA, 25 bp, Homo sapien
ccgccagtcagtggccaggagcggc

SEQ ID NO: 5159268 - DNA, 25 bp, Homo sapien
cgatctcgcgagaggcgaggccaaa

SEQ ID NO: 5159269 - DNA, 25 bp, Homo sapien
gcaggcgccgccagtcagtggccag

SEQ ID NO: 5159270 - DNA, 25 bp, Homo sapien
gaggcgaggccaaaaccctgcctcg

SEQ ID NO: 5159271 - DNA, 25 bp, Homo sapien
aggccgcagcatagcaaccgaacat

SEQ ID NO: 5159272 - DNA, 25 bp, Homo sapien
gccgcagcatagcaaccgaacatgg

SEQ ID NO: 5159273 - DNA, 25 bp, Homo sapien
gcagcatagcaaccgaacatggcgg

SEQ ID NO: 5159274 - DNA, 25 bp, Homo sapien
tcctaggccgcagcatagcaaccga

SEQ ID NO: 5159275 - DNA, 25 bp, Homo sapien
atctcttcctcctccctcaagcaca

SEQ ID NO: 5159276 - DNA, 25 bp, Homo sapien
ctctatctcttcctcctccctcaag

SEQ ID NO: 5159277 - DNA, 25 bp, Homo sapien
ctcctctatctcttcctcctccctc

SEQ ID NO: 5159278 - DNA, 25 bp, Homo sapien
ctatctcttcctcctccctcaagca

SEQ ID NO: 5159279 - DNA, 25 bp, Homo sapien
ggagtcctgagagaacaatgttggt

SEQ ID NO: 5159280 - DNA, 25 bp, Homo sapien
taatcctgggcagcgtttgtgtgtg

SEQ ID NO: 5159281 - DNA, 25 bp, Homo sapien
tgcagggatgagataatccacaccc

SEQ ID NO: 5159282 - DNA, 25 bp, Homo sapien
tcaggcccaattccggcccctggga

SEQ ID NO: 5159283 - DNA, 25 bp, Homo sapien
gcagccggcgacctctcctacctcc

SEQ ID NO: 5159284 - DNA, 25 bp, Homo sapien
gggcagccggcgacctctcctacct

SEQ ID NO: 5159285 - DNA, 25 bp, Homo sapien
gggaggcgggcagccggcgacctct

SEQ ID NO: 5159286 - DNA, 25 bp, Homo sapien
gaggcgggcagccggcgacctctcc

SEQ ID NO: 5159287 - DNA, 25 bp, Homo sapien
cgcagcggtcgcgccacgacccgga

SEQ ID NO: 5159288 - DNA, 25 bp, Homo sapien
cgccgcagcggtcgcgccacgaccc

SEQ ID NO: 5159289 - DNA, 25 bp, Homo sapien
ccacgacccggagccgccagcacca

SEQ ID NO: 5159290 - DNA, 25 bp, Homo sapien
gccacgacccggagccgccagcacc

SEQ ID NO: 5159291 - DNA, 25 bp, Homo sapien
aggagaagcgcgtcctccgtgccgc

SEQ ID NO: 5159292 - DNA, 25 bp, Homo sapien
cgcagaggagaagcgcgtcctccgt

SEQ ID NO: 5159293 - DNA, 25 bp, Homo sapien
ggagaagcgcgtcctccgtgccgct

SEQ ID NO: 5159294 - DNA, 25 bp, Homo sapien
cggcgcgcagaggagaagcgcgtcc

SEQ ID NO: 5159295 - DNA, 25 bp, Homo sapien
gtatatcacagccgcgtcctctcgg

SEQ ID NO: 5159296 - DNA, 25 bp, Homo sapien
ttcgtatatcacagccgcgtcctct

SEQ ID NO: 5159297 - DNA, 25 bp, Homo sapien
tcgtatatcacagccgcgtcctctc

SEQ ID NO: 5159298 - DNA, 25 bp, Homo sapien
cttcgtatatcacagccgcgtcctc

SEQ ID NO: 5159299 - DNA, 25 bp, Homo sapien
tcttgcttatcatctggtactggtt

SEQ ID NO: 5159300 - DNA, 25 bp, Homo sapien
aaatctttatattatggtaccaatc

SEQ ID NO: 5159301 - DNA, 25 bp, Homo sapien
atctttatattatggtaccaatcgt

SEQ ID NO: 5159302 - DNA, 25 bp, Homo sapien
cttcttgcttatcatctggtactgg

SEQ ID NO: 5159303 - DNA, 25 bp, Homo sapien
tggaattataaaccccaccatattc

SEQ ID NO: 5159304 - DNA, 25 bp, Homo sapien
tctacgcactgctttaagttgtccc

SEQ ID NO: 5159305 - DNA, 25 bp, Homo sapien
ctaaccttctgcctcgctgatctgt

SEQ ID NO: 5159306 - DNA, 25 bp, Homo sapien
tctttctaaccttctgcctcgctga

SEQ ID NO: 5159307 - DNA, 25 bp, Homo sapien
ctacgcactgctttaagttgtccca

SEQ ID NO: 5159308 - DNA, 25 bp, Homo sapien
ccagaagaaggatgttgcaaaccac

SEQ ID NO: 5159309 - DNA, 25 bp, Homo sapien
tctcgggccaactctgatgctcgta

SEQ ID NO: 5159310 - DNA, 25 bp, Homo sapien
tgccagcaggcaatcggaaacgtga

SEQ ID NO: 5159311 - DNA, 25 bp, Homo sapien
gaaagcttgtacagtgttatccaga

SEQ ID NO: 5159312 - DNA, 25 bp, Homo sapien
tccattccaatgaatactgaaagtt

SEQ ID NO: 5159313 - DNA, 25 bp, Homo sapien
ctccattccaatgaatactgaaagt

SEQ ID NO: 5159314 - DNA, 25 bp, Homo sapien
caactccattccaatgaatactgaa

SEQ ID NO: 5159315 - DNA, 25 bp, Homo sapien
cattccaatgaatactgaaagtttc

SEQ ID NO: 5159316 - DNA, 25 bp, Homo sapien
tccatgtagggaacagttgtgtccc

SEQ ID NO: 5159317 - DNA, 25 bp, Homo sapien
gggacatcaagcatagtggaaagca

SEQ ID NO: 5159318 - DNA, 25 bp, Homo sapien
aaaagagtgtcatattgcaagctgg

SEQ ID NO: 5159319 - DNA, 25 bp, Homo sapien
gaagtggcttcaaatctagggacat

SEQ ID NO: 5159320 - DNA, 25 bp, Homo sapien
ctatagctttttttgagttgtcatc

SEQ ID NO: 5159321 - DNA, 25 bp, Homo sapien
tcttgtgttgagtggatttccacca

SEQ ID NO: 5159322 - DNA, 25 bp, Homo sapien
tgtcatcttgtgttgagtggatttc

SEQ ID NO: 5159323 - DNA, 25 bp, Homo sapien
catcttgtgttgagtggatttccac

SEQ ID NO: 5159324 - DNA, 25 bp, Homo sapien
gaatcatcagccaactgtaaaccaa

SEQ ID NO: 5159325 - DNA, 25 bp, Homo sapien
agacgacatccaacaagacttgccc

SEQ ID NO: 5159326 - DNA, 25 bp, Homo sapien
ctcagtcaaatctagatgcttgaag

SEQ ID NO: 5159327 - DNA, 25 bp, Homo sapien
atcagccaactgtaaaccaaaatag

SEQ ID NO: 5159328 - DNA, 25 bp, Homo sapien
tggtacacctgcatacaagcattta

SEQ ID NO: 5159329 - DNA, 25 bp, Homo sapien
ctgcatacaagcatttaataatgtt

SEQ ID NO: 5159330 - DNA, 25 bp, Homo sapien
caagcatttaataatgttagatgct

SEQ ID NO: 5159331 - DNA, 25 bp, Homo sapien
gtacacctgcatacaagcatttaat

SEQ ID NO: 5159332 - DNA, 25 bp, Homo sapien
agggaaagtgacttttactctgagt

SEQ ID NO: 5159333 - DNA, 25 bp, Homo sapien
aggaaaggcttgagagggaaagtga

SEQ ID NO: 5159334 - DNA, 25 bp, Homo sapien
ctggggagtagtggtagtcaggaaa

SEQ ID NO: 5159335 - DNA, 25 bp, Homo sapien
gggagtagtggtagtcaggaaaggc

SEQ ID NO: 5159336 - DNA, 25 bp, Homo sapien
tattggtttgtttggatccagccac

SEQ ID NO: 5159337 - DNA, 25 bp, Homo sapien
tctttagctgcttccttattggttt

SEQ ID NO: 5159338 - DNA, 25 bp, Homo sapien
cttattggtttgtttggatccagcc

SEQ ID NO: 5159339 - DNA, 25 bp, Homo sapien
ttggtttgtttggatccagccacct

SEQ ID NO: 5159340 - DNA, 25 bp, Homo sapien
gtcacttacaaaaaatttgactcta

SEQ ID NO: 5159341 - DNA, 25 bp, Homo sapien
aagttcaaactgtaaggagatcctc

SEQ ID NO: 5159342 - DNA, 25 bp, Homo sapien
taaagttcaaactgtaaggagatcc

SEQ ID NO: 5159343 - DNA, 25 bp, Homo sapien
tctaaagttcaaactgtaaggagat

SEQ ID NO: 5159344 - DNA, 25 bp, Homo sapien
gaaaacgttatcttggaatagccat

SEQ ID NO: 5159345 - DNA, 25 bp, Homo sapien
cctactgacccgcaaataatggtta

SEQ ID NO: 5159346 - DNA, 25 bp, Homo sapien
tattctgtgtactgactggaaagct

SEQ ID NO: 5159347 - DNA, 25 bp, Homo sapien
actagaatatgctttcacatgggaa

SEQ ID NO: 5159348 - DNA, 25 bp, Homo sapien
acataatccagagactacattactg

SEQ ID NO: 5159349 - DNA, 25 bp, Homo sapien
ttcaagaggaattagcttggattct

SEQ ID NO: 5159350 - DNA, 25 bp, Homo sapien
taatccagagactacattactgagt

SEQ ID NO: 5159351 - DNA, 25 bp, Homo sapien
ggattctactaatagttgcaagcat

SEQ ID NO: 5159352 - DNA, 25 bp, Homo sapien
cttgtttaatttgcaaaaaatactg

SEQ ID NO: 5159353 - DNA, 25 bp, Homo sapien
agaatgtcttgtttaatttgcaaaa

SEQ ID NO: 5159354 - DNA, 25 bp, Homo sapien
cttccagtaagaatgtcttgtttaa

SEQ ID NO: 5159355 - DNA, 25 bp, Homo sapien
gtaagaatgtcttgtttaatttgca

SEQ ID NO: 5159356 - DNA, 25 bp, Homo sapien
agcagtattagaaggacagggtaat

SEQ ID NO: 5159357 - DNA, 25 bp, Homo sapien
gactgatcgtagtctccaagttcag

SEQ ID NO: 5159358 - DNA, 25 bp, Homo sapien
caaaatcttgaggttgattaggaat

SEQ ID NO: 5159359 - DNA, 25 bp, Homo sapien
agaataatctgagaggtagcctgac

SEQ ID NO: 5159360 - DNA, 25 bp, Homo sapien
ggtagcctgacaagttctctgactg

SEQ ID NO: 5159361 - DNA, 25 bp, Homo sapien
ttgcatagtggaattcaactccata

SEQ ID NO: 5159362 - DNA, 25 bp, Homo sapien
ggaattcaactccatagagttctaa

SEQ ID NO: 5159363 - DNA, 25 bp, Homo sapien
ccatagagttctaaggtacgtgctg

SEQ ID NO: 5159364 - DNA, 25 bp, Homo sapien
taaggtacgtgctgtgtttaggtaa

SEQ ID NO: 5159365 - DNA, 25 bp, Homo sapien
tgtaaagaggtgttctgcatggaac

SEQ ID NO: 5159366 - DNA, 25 bp, Homo sapien
tgcatggaacattataatcagactg

SEQ ID NO: 5159367 - DNA, 25 bp, Homo sapien
caatagcctacatcagtctgaagaa

SEQ ID NO: 5159368 - DNA, 25 bp, Homo sapien
tgaggcaagataaggtgaccaaatt

SEQ ID NO: 5159369 - DNA, 25 bp, Homo sapien
cacccatagccagtacacatgagta

SEQ ID NO: 5159370 - DNA, 25 bp, Homo sapien
catctgacaaagctgactgctcctg

SEQ ID NO: 5159371 - DNA, 25 bp, Homo sapien
ttgaattgcctacccctctttcgtg

SEQ ID NO: 5159372 - DNA, 25 bp, Homo sapien
caaaatctgattactgtccaccacc

SEQ ID NO: 5159373 - DNA, 25 bp, Homo sapien
tacagtagagtgacatggataaagt

SEQ ID NO: 5159374 - DNA, 25 bp, Homo sapien
gctgtgtcacaataagtgaaagcac

SEQ ID NO: 5159375 - DNA, 25 bp, Homo sapien
tatgctttatataggcctaatggag

SEQ ID NO: 5159376 - DNA, 25 bp, Homo sapien
gctccaatctgagaaaagagttcct

SEQ ID NO: 5159377 - DNA, 25 bp, Homo sapien
taacagtacgataacgcaaacccac

SEQ ID NO: 5159378 - DNA, 25 bp, Homo sapien
gcaaacccactcaatgttatgatgt

SEQ ID NO: 5159379 - DNA, 25 bp, Homo sapien
tacctagggtacttaaatgttctga

SEQ ID NO: 5159380 - DNA, 25 bp, Homo sapien
taattttacacggtggagacagccg

SEQ ID NO: 5159381 - DNA, 25 bp, Homo sapien
catgcagtggctatatggcttgaaa

SEQ ID NO: 5159382 - DNA, 25 bp, Homo sapien
gctatcaaagctagaccaagatcat

SEQ ID NO: 5159383 - DNA, 25 bp, Homo sapien
agcatccttagcacccacactgaga

SEQ ID NO: 5159384 - DNA, 25 bp, Homo sapien
tgaccaacccagtaggaataagcat

SEQ ID NO: 5159385 - DNA, 25 bp, Homo sapien
taccttgtactcttttgcagcatga

SEQ ID NO: 5159386 - DNA, 25 bp, Homo sapien
gaatggctccctattattgtctgta

SEQ ID NO: 5159387 - DNA, 25 bp, Homo sapien
gggcagttcccaaggcattcctaga

SEQ ID NO: 5159388 - DNA, 25 bp, Homo sapien
cccaagtaacagagagtagagctat

SEQ ID NO: 5159389 - DNA, 25 bp, Homo sapien
gcatggctgcctttgactagcaata

SEQ ID NO: 5159390 - DNA, 25 bp, Homo sapien
tagagagtttagaagaccccggaga

SEQ ID NO: 5159391 - DNA, 25 bp, Homo sapien
aagtaacctaatacaggaggcacgc

SEQ ID NO: 5159392 - DNA, 25 bp, Homo sapien
taacctacactaatgagagaatggg

SEQ ID NO: 5159393 - DNA, 25 bp, Homo sapien
ttcattcgtaccctgttcttataaa

SEQ ID NO: 5159394 - DNA, 25 bp, Homo sapien
ctcctgacatcactccaatcataat

SEQ ID NO: 5159395 - DNA, 25 bp, Homo sapien
atggaaaggtattcattcgtaccct

SEQ ID NO: 5159396 - DNA, 25 bp, Homo sapien
gacatcactccaatcataatttcat

SEQ ID NO: 5159397 - DNA, 25 bp, Homo sapien
aaaagactggaaagctctgatcatc

SEQ ID NO: 5159398 - DNA, 25 bp, Homo sapien
cgatcttcggtgcttctcaggtcaa

SEQ ID NO: 5159399 - DNA, 25 bp, Homo sapien
caggtcaacccctccttaggtgaga

SEQ ID NO: 5159400 - DNA, 25 bp, Homo sapien
tctggtaggtgctaactaagtggga

SEQ ID NO: 5159401 - DNA, 25 bp, Homo sapien
taagggactcctaaacaatctgagc

SEQ ID NO: 5159402 - DNA, 25 bp, Homo sapien
tgtacaaaccgtaggtgtcagaggt

SEQ ID NO: 5159403 - DNA, 25 bp, Homo sapien
ccatgttgatgtggcagtaaggtgt

SEQ ID NO: 5159404 - DNA, 25 bp, Homo sapien
agttttatgtagacctggcaaggca

SEQ ID NO: 5159405 - DNA, 25 bp, Homo sapien
tcaggtgatcctggctaggctggct

SEQ ID NO: 5159406 - DNA, 25 bp, Homo sapien
gataactttgctacagacttccagg

SEQ ID NO: 5159407 - DNA, 25 bp, Homo sapien
caagtgcctccgtgactctagtcag

SEQ ID NO: 5159408 - DNA, 25 bp, Homo sapien
caagggcctctctcatataagaagg

SEQ ID NO: 5159409 - DNA, 25 bp, Homo sapien
gctccagtattaggtacatatttac

SEQ ID NO: 5159410 - DNA, 25 bp, Homo sapien
gtttctctatctttaacaatattta

SEQ ID NO: 5159411 - DNA, 25 bp, Homo sapien
cctttatcatttgatattgaccttg

SEQ ID NO: 5159412 - DNA, 25 bp, Homo sapien
aataactgcttctgtacgctcttgg

SEQ ID NO: 5159413 - DNA, 25 bp, Homo sapien
gttgttagttgatttttatcacttc

SEQ ID NO: 5159414 - DNA, 25 bp, Homo sapien
attgctataaatagctctcttagca

SEQ ID NO: 5159415 - DNA, 25 bp, Homo sapien
tagcaatgctattgctgtatctcac

SEQ ID NO: 5159416 - DNA, 25 bp, Homo sapien
gctgtatctcacaggttctagtatg

SEQ ID NO: 5159417 - DNA, 25 bp, Homo sapien
tgaataaaaaactgtttgcacttaa

SEQ ID NO: 5159418 - DNA, 25 bp, Homo sapien
taagttgaataaaaaactgtttgca

SEQ ID NO: 5159419 - DNA, 25 bp, Homo sapien
agttgaataaaaaactgtttgcact

SEQ ID NO: 5159420 - DNA, 25 bp, Homo sapien
ttgaataaaaaactgtttgcactta

SEQ ID NO: 5159421 - DNA, 25 bp, Homo sapien
taaattagaaccacatacacactgg

SEQ ID NO: 5159422 - DNA, 25 bp, Homo sapien
tatactacatatcttggaggtgctg

SEQ ID NO: 5159423 - DNA, 25 bp, Homo sapien
ttctaagctcgagaaacagcaagag

SEQ ID NO: 5159424 - DNA, 25 bp, Homo sapien
aattcattacctcagcgggcagtta

SEQ ID NO: 5159425 - DNA, 25 bp, Homo sapien
acccaatagcatgaaaatctaatca

SEQ ID NO: 5159426 - DNA, 25 bp, Homo sapien
cacccaatagcatgaaaatctaatc

SEQ ID NO: 5159427 - DNA, 25 bp, Homo sapien
ctcacccaatagcatgaaaatctaa

SEQ ID NO: 5159428 - DNA, 25 bp, Homo sapien
ccaatagcatgaaaatctaatcatc

SEQ ID NO: 5159429 - DNA, 25 bp, Homo sapien
ccaataatgtttctctagattcatg

SEQ ID NO: 5159430 - DNA, 25 bp, Homo sapien
ccatattaaatcccaataatgtttc

SEQ ID NO: 5159431 - DNA, 25 bp, Homo sapien
tcccaataatgtttctctagattca

SEQ ID NO: 5159432 - DNA, 25 bp, Homo sapien
taaatcccaataatgtttctctaga

SEQ ID NO: 5159433 - DNA, 25 bp, Homo sapien
gatactgatatagaggctgcaatcc

SEQ ID NO: 5159434 - DNA, 25 bp, Homo sapien
tctcaagcctgtagcatatcacaag

SEQ ID NO: 5159435 - DNA, 25 bp, Homo sapien
cccaaagatttgttgccgtcaggaa

SEQ ID NO: 5159436 - DNA, 25 bp, Homo sapien
ttaggcataagataccttgggtgtc

SEQ ID NO: 5159437 - DNA, 25 bp, Homo sapien
gccatactgaactgattggacttca

SEQ ID NO: 5159438 - DNA, 25 bp, Homo sapien
aactgattggacttcagttctccca

SEQ ID NO: 5159439 - DNA, 25 bp, Homo sapien
cttgcaaataccctgtctttatttg

SEQ ID NO: 5159440 - DNA, 25 bp, Homo sapien
ttgccatactgaactgattggactt

SEQ ID NO: 5159441 - DNA, 25 bp, Homo sapien
ctgcagaaataaattaaataatatg

SEQ ID NO: 5159442 - DNA, 25 bp, Homo sapien
gcagaaataaattaaataatatgtt

SEQ ID NO: 5159443 - DNA, 25 bp, Homo sapien
tgcagaaataaattaaataatatgt

SEQ ID NO: 5159444 - DNA, 25 bp, Homo sapien
tgtgtttctaacctgtcatcagata

SEQ ID NO: 5159445 - DNA, 25 bp, Homo sapien
cattaatttccgtgccaagggctta

SEQ ID NO: 5159446 - DNA, 25 bp, Homo sapien
gatggaagactttgtgtttctaacc

SEQ ID NO: 5159447 - DNA, 25 bp, Homo sapien
cccggtggagatcgtgatggaagac

SEQ ID NO: 5159448 - DNA, 25 bp, Homo sapien
gacggagatctctgatttacaaaca

SEQ ID NO: 5159449 - DNA, 25 bp, Homo sapien
taccaaatgaccaactgaagatggt

SEQ ID NO: 5159450 - DNA, 25 bp, Homo sapien
gggaagtatgaaccatatggtctac

SEQ ID NO: 5159451 - DNA, 25 bp, Homo sapien
ttagcttgtgttgatgacggagatc

SEQ ID NO: 5159452 - DNA, 25 bp, Homo sapien
catgctacagaaagcccgagtttct

SEQ ID NO: 5159453 - DNA, 25 bp, Homo sapien
gcagctctctgttgccgcctttaga

SEQ ID NO: 5159454 - DNA, 25 bp, Homo sapien
catgctgtgttgtagactgtggtct

SEQ ID NO: 5159455 - DNA, 25 bp, Homo sapien
tattcgagtgtactatgctggtagc

SEQ ID NO: 5159456 - DNA, 25 bp, Homo sapien
tggtaaagctggaggcttcccatct

SEQ ID NO: 5159457 - DNA, 25 bp, Homo sapien
gggtggtaaagctggaggcttccca

SEQ ID NO: 5159458 - DNA, 25 bp, Homo sapien
ctttctagatcttgttgcgaatgtg

SEQ ID NO: 5159459 - DNA, 25 bp, Homo sapien
ggtaaagctggaggcttcccatctc

SEQ ID NO: 5159460 - DNA, 25 bp, Homo sapien
gattaggacaagattatcatgtgga

SEQ ID NO: 5159461 - DNA, 25 bp, Homo sapien
caggtttcattctgattaggacaag

SEQ ID NO: 5159462 - DNA, 25 bp, Homo sapien
tttacattgaatccaaacctcccat

SEQ ID NO: 5159463 - DNA, 25 bp, Homo sapien
caagattatcatgtggaataccacc

SEQ ID NO: 5159464 - DNA, 25 bp, Homo sapien
gctactcgagacacaatcacaggca

SEQ ID NO: 5159465 - DNA, 25 bp, Homo sapien
ggtgttcctggtgctactcgagaca

SEQ ID NO: 5159466 - DNA, 25 bp, Homo sapien
tcctggtgctactcgagacacaatc

SEQ ID NO: 5159467 - DNA, 25 bp, Homo sapien
tggtgctactcgagacacaatcaca

SEQ ID NO: 5159468 - DNA, 25 bp, Homo sapien
tataaaataagtacatattcttgaa

SEQ ID NO: 5159469 - DNA, 25 bp, Homo sapien
tatttgaaacatttagataactcac

SEQ ID NO: 5159470 - DNA, 25 bp, Homo sapien
catattcttgaaaacaggatttatt

SEQ ID NO: 5159471 - DNA, 25 bp, Homo sapien
tgaaaacaggatttatttgaaacat

SEQ ID NO: 5159472 - DNA, 25 bp, Homo sapien
actgtggtttccaattagaaggttg

SEQ ID NO: 5159473 - DNA, 25 bp, Homo sapien
tttatggaacatagttctacatggc

SEQ ID NO: 5159474 - DNA, 25 bp, Homo sapien
ctaaattccagccaatatttatgga

SEQ ID NO: 5159475 - DNA, 25 bp, Homo sapien
ggttgtggtgatctctaaattaaca

SEQ ID NO: 5159476 - DNA, 25 bp, Homo sapien
tgagtgtgttctgcaatgtcccgac

SEQ ID NO: 5159477 - DNA, 25 bp, Homo sapien
cattaggtcgaactagaagcatgag

SEQ ID NO: 5159478 - DNA, 25 bp, Homo sapien
taaacagcacaacctgatcatgagt

SEQ ID NO: 5159479 - DNA, 25 bp, Homo sapien
gatcagtacaacttggtccccttca

SEQ ID NO: 5159480 - DNA, 25 bp, Homo sapien
gtggggctttctcaggaatatactg

SEQ ID NO: 5159481 - DNA, 25 bp, Homo sapien
tggggctttctcaggaatatactgg

SEQ ID NO: 5159482 - DNA, 25 bp, Homo sapien
ggggctttctcaggaatatactgga

SEQ ID NO: 5159483 - DNA, 25 bp, Homo sapien
cccctcagctagctggatcattgac

SEQ ID NO: 5159484 - DNA, 25 bp, Homo sapien
tggatcattgactcccgcagggaat

SEQ ID NO: 5159485 - DNA, 25 bp, Homo sapien
ggaatggtcatcctgatgcacacta

SEQ ID NO: 5159486 - DNA, 25 bp, Homo sapien
ctgtgtcaggactgttccagtgata

SEQ ID NO: 5159487 - DNA, 25 bp, Homo sapien
tctgaggtaatttggcacaggacat

SEQ ID NO: 5159488 - DNA, 25 bp, Homo sapien
atattctgaggtaatttggcacagg

SEQ ID NO: 5159489 - DNA, 25 bp, Homo sapien
ggtaatttggcacaggacattgtca

SEQ ID NO: 5159490 - DNA, 25 bp, Homo sapien
cattccaggttttttccgatacagt

SEQ ID NO: 5159491 - DNA, 25 bp, Homo sapien
tttaaaatgacccgtgtggcatcat

SEQ ID NO: 5159492 - DNA, 25 bp, Homo sapien
cttttaaaatgacccgtgtggcatc

SEQ ID NO: 5159493 - DNA, 25 bp, Homo sapien
ccttttaaaatgacccgtgtggcat

SEQ ID NO: 5159494 - DNA, 25 bp, Homo sapien
ttttaaaatgacccgtgtggcatca

SEQ ID NO: 5159495 - DNA, 25 bp, Homo sapien
tcaacattacaaccatagaggagcc

SEQ ID NO: 5159496 - DNA, 25 bp, Homo sapien
tctgccacgttcaacttgtgtggtc

SEQ ID NO: 5159497 - DNA, 25 bp, Homo sapien
tgccaaaaatctgtacaagtgtgtg

SEQ ID NO: 5159498 - DNA, 25 bp, Homo sapien
ggcccttgacaagcaatgtactgat

SEQ ID NO: 5159499 - DNA, 25 bp, Homo sapien
tgggttctggccaatattggtgaca

SEQ ID NO: 5159500 - DNA, 25 bp, Homo sapien
catccataagatgaactgcctgtgg

SEQ ID NO: 5159501 - DNA, 25 bp, Homo sapien
gcaggtaacttggtagcatccataa

SEQ ID NO: 5159502 - DNA, 25 bp, Homo sapien
ggttaaatagggtcatcttcctgaa

SEQ ID NO: 5159503 - DNA, 25 bp, Homo sapien
agtcctgggcactcatagcttgggc

SEQ ID NO: 5159504 - DNA, 25 bp, Homo sapien
gttctcatttccaaaggcttgacca

SEQ ID NO: 5159505 - DNA, 25 bp, Homo sapien
cttgaccattgatgggatagtcctg

SEQ ID NO: 5159506 - DNA, 25 bp, Homo sapien
gcactcatagcttgggctatttgct

SEQ ID NO: 5159507 - DNA, 25 bp, Homo sapien
tactggatctgagtgagtggacgac

SEQ ID NO: 5159508 - DNA, 25 bp, Homo sapien
tagaaagtcactcgaatcatcaggg

SEQ ID NO: 5159509 - DNA, 25 bp, Homo sapien
ccatggtcaggccaggctatgtact

SEQ ID NO: 5159510 - DNA, 25 bp, Homo sapien
tgcaatggacaacaacgggttcttc

SEQ ID NO: 5159511 - DNA, 25 bp, Homo sapien
agaaccccagttcttccgattccag

SEQ ID NO: 5159512 - DNA, 25 bp, Homo sapien
tgtttggatcatcatggctcgctga

SEQ ID NO: 5159513 - DNA, 25 bp, Homo sapien
ggctgattgcattcaatgagacaca

SEQ ID NO: 5159514 - DNA, 25 bp, Homo sapien
tctagtggataaactggctgattgc

SEQ ID NO: 5159515 - DNA, 25 bp, Homo sapien
catactgcagtacagataaaccttt

SEQ ID NO: 5159516 - DNA, 25 bp, Homo sapien
cataaaaattcatggcagcattact

SEQ ID NO: 5159517 - DNA, 25 bp, Homo sapien
cactcctgggtatacccaagataaa

SEQ ID NO: 5159518 - DNA, 25 bp, Homo sapien
ttagaaaagaccaaagtgtatgatc

SEQ ID NO: 5159519 - DNA, 25 bp, Homo sapien
cagaaagaccatcctgtgttcatgc

SEQ ID NO: 5159520 - DNA, 25 bp, Homo sapien
caagagccctgagacaattcaatgg

SEQ ID NO: 5159521 - DNA, 25 bp, Homo sapien
tgtagtactagcataggaacagaga

SEQ ID NO: 5159522 - DNA, 25 bp, Homo sapien
gcatagaatagctaaatcaagctgg

SEQ ID NO: 5159523 - DNA, 25 bp, Homo sapien
tgttgatgttgttaagggtttaaca

SEQ ID NO: 5159524 - DNA, 25 bp, Homo sapien
catacaaggacgtctcaaggcactt

SEQ ID NO: 5159525 - DNA, 25 bp, Homo sapien
gaaaaatgtgctgcatccataggca

SEQ ID NO: 5159526 - DNA, 25 bp, Homo sapien
aaatgacgacagtgggtagttccca

SEQ ID NO: 5159527 - DNA, 25 bp, Homo sapien
tttgaacaattccatagcagcagtg

SEQ ID NO: 5159528 - DNA, 25 bp, Homo sapien
tactctagacctgatcagaccctgc

SEQ ID NO: 5159529 - DNA, 25 bp, Homo sapien
gctgaaccctatttcctaatgccga

SEQ ID NO: 5159530 - DNA, 25 bp, Homo sapien
gatcatataagaccagactgctaaa

SEQ ID NO: 5159531 - DNA, 25 bp, Homo sapien
cctgccagcagatgataacccagaa

SEQ ID NO: 5159532 - DNA, 25 bp, Homo sapien
tgtggcagctcacataatgcaccag

SEQ ID NO: 5159533 - DNA, 25 bp, Homo sapien
ctatataatggttgcagacacggta

SEQ ID NO: 5159534 - DNA, 25 bp, Homo sapien
gctgatggattgcaccctagcagat

SEQ ID NO: 5159535 - DNA, 25 bp, Homo sapien
tatgcactgaaccaatgctgatgga

SEQ ID NO: 5159536 - DNA, 25 bp, Homo sapien
gctacaattcagagttgggccaagt

SEQ ID NO: 5159537 - DNA, 25 bp, Homo sapien
aactcgtaagcatataagacatcac

SEQ ID NO: 5159538 - DNA, 25 bp, Homo sapien
gttcagctgaattaatataaactcg

SEQ ID NO: 5159539 - DNA, 25 bp, Homo sapien
taagatgtagttcttgttcagctga

SEQ ID NO: 5159540 - DNA, 25 bp, Homo sapien
taataattgtacttagcgatgtggc

SEQ ID NO: 5159541 - DNA, 25 bp, Homo sapien
ggaagtacccaactgccaatttgtg

SEQ ID NO: 5159542 - DNA, 25 bp, Homo sapien
cctgcaaagctaagatcacacaagt

SEQ ID NO: 5159543 - DNA, 25 bp, Homo sapien
ccagcacctgtttgggtctaagggt

SEQ ID NO: 5159544 - DNA, 25 bp, Homo sapien
tagatgaaactagctgtgagaactc

SEQ ID NO: 5159545 - DNA, 25 bp, Homo sapien
cctgatgctggagaacactgggttg

SEQ ID NO: 5159546 - DNA, 25 bp, Homo sapien
cagtctcttaaatcgtgcccctcaa

SEQ ID NO: 5159547 - DNA, 25 bp, Homo sapien
caacatgtatataaagtgtcgggac

SEQ ID NO: 5159548 - DNA, 25 bp, Homo sapien
tgtcatgtttgtacctgaacaactg

SEQ ID NO: 5159549 - DNA, 25 bp, Homo sapien
aaacccttagcttctttgcctcaat

SEQ ID NO: 5159550 - DNA, 25 bp, Homo sapien
ggcctttcaagcatacagtaagctg

SEQ ID NO: 5159551 - DNA, 25 bp, Homo sapien
cattaagagtcatagctagagttgt

SEQ ID NO: 5159552 - DNA, 25 bp, Homo sapien
tccattcctgataaccagttactaa

SEQ ID NO: 5159553 - DNA, 25 bp, Homo sapien
aaatacagccactatgtgagtcaat

SEQ ID NO: 5159554 - DNA, 25 bp, Homo sapien
agcccatgaaaaactcccataaaat

SEQ ID NO: 5159555 - DNA, 25 bp, Homo sapien
gccactatgtgagtcaataactcca

SEQ ID NO: 5159556 - DNA, 25 bp, Homo sapien
aggattaccagaatagagggttggt

SEQ ID NO: 5159557 - DNA, 25 bp, Homo sapien
ggattaccagaatagagggttggta

SEQ ID NO: 5159558 - DNA, 25 bp, Homo sapien
cttaggattaccagaatagagggtt

SEQ ID NO: 5159559 - DNA, 25 bp, Homo sapien
taaaaatgtcctcatatccctcccg

SEQ ID NO: 5159560 - DNA, 25 bp, Homo sapien
tagagtaaagcccttgcaggtagac

SEQ ID NO: 5159561 - DNA, 25 bp, Homo sapien
tctagcgtaattgagagcagtcaac

SEQ ID NO: 5159562 - DNA, 25 bp, Homo sapien
tggaactggaagagctctagcgtaa

SEQ ID NO: 5159563 - DNA, 25 bp, Homo sapien
ctcctcggtagacgccgagaaatgg

SEQ ID NO: 5159564 - DNA, 25 bp, Homo sapien
agacgccgagaaatggcgcccacaa

SEQ ID NO: 5159565 - DNA, 25 bp, Homo sapien
agcccaccggctctaatccccggag

SEQ ID NO: 5159566 - DNA, 25 bp, Homo sapien
agaaatggcgcccacaacgagccca

SEQ ID NO: 5159567 - DNA, 25 bp, Homo sapien
ccggccgccctagggtctgggtgcg

SEQ ID NO: 5159568 - DNA, 25 bp, Homo sapien
cgcgggcgaggaagggtccactcgg

SEQ ID NO: 5159569 - DNA, 25 bp, Homo sapien
cactcggctaggagcgcagcggact

SEQ ID NO: 5159570 - DNA, 25 bp, Homo sapien
acaaggccgctaccgcaggcgcggg

SEQ ID NO: 5159571 - DNA, 25 bp, Homo sapien
tatcgaccgaaactcggcggccctg

SEQ ID NO: 5159572 - DNA, 25 bp, Homo sapien
gcccgtcgcgcggtatcgaccgaaa

SEQ ID NO: 5159573 - DNA, 25 bp, Homo sapien
gcggtatcgaccgaaactcggcggc

SEQ ID NO: 5159574 - DNA, 25 bp, Homo sapien
gtcgcgcggtatcgaccgaaactcg

SEQ ID NO: 5159575 - DNA, 25 bp, Homo sapien
gacttttgtctctcccgctggacgg

SEQ ID NO: 5159576 - DNA, 25 bp, Homo sapien
gctcgaaaagtccaccaagacagtg

SEQ ID NO: 5159577 - DNA, 25 bp, Homo sapien
gagcgcgtccgctcggcaaacatta

SEQ ID NO: 5159578 - DNA, 25 bp, Homo sapien
tgacacaaactcagttcgtttttcc

SEQ ID NO: 5159579 - DNA, 25 bp, Homo sapien
tgcctctcctttcccaagagactga

SEQ ID NO: 5159580 - DNA, 25 bp, Homo sapien
cctctcctttcccaagagactgaag

SEQ ID NO: 5159581 - DNA, 25 bp, Homo sapien
agagactgaagtttttctcaaatac

SEQ ID NO: 5159582 - DNA, 25 bp, Homo sapien
ctcctttcccaagagactgaagttt

SEQ ID NO: 5159583 - DNA, 25 bp, Homo sapien
tctagttcctaactagaaggatttc

SEQ ID NO: 5159584 - DNA, 25 bp, Homo sapien
ctgacacactagaatgacacagtgg

SEQ ID NO: 5159585 - DNA, 25 bp, Homo sapien
ttggcccaacagctggcttaacccg

SEQ ID NO: 5159586 - DNA, 25 bp, Homo sapien
cccgcatctcgcctgacacactaga

SEQ ID NO: 5159587 - DNA, 25 bp, Homo sapien
acaggtgcccgccgctacgaccggc

SEQ ID NO: 5159588 - DNA, 25 bp, Homo sapien
ctacaggtgcccgccgctacgaccg

SEQ ID NO: 5159589 - DNA, 25 bp, Homo sapien
aggtgcccgccgctacgaccggcta

SEQ ID NO: 5159590 - DNA, 25 bp, Homo sapien
gtgcccgccgctacgaccggctaat

SEQ ID NO: 5159591 - DNA, 25 bp, Homo sapien
cataccatcccaccgggctaacgtt

SEQ ID NO: 5159592 - DNA, 25 bp, Homo sapien
tcatctaccatgctcaagggattct

SEQ ID NO: 5159593 - DNA, 25 bp, Homo sapien
attctcccacctagggctacgggca

SEQ ID NO: 5159594 - DNA, 25 bp, Homo sapien
tgcggccttcatctaccatgctcaa

SEQ ID NO: 5159595 - DNA, 25 bp, Homo sapien
ggaacaggatttttcggagcataac

SEQ ID NO: 5159596 - DNA, 25 bp, Homo sapien
cacctcgccggaccaatactagaaa

SEQ ID NO: 5159597 - DNA, 25 bp, Homo sapien
cattttatgatatcccaccagtgca

SEQ ID NO: 5159598 - DNA, 25 bp, Homo sapien
caaagagcaagatacgaaaaagtcc

SEQ ID NO: 5159599 - DNA, 25 bp, Homo sapien
tgatgatggacttagaatctccagc

SEQ ID NO: 5159600 - DNA, 25 bp, Homo sapien
tgatggacttagaatctccagctgc

SEQ ID NO: 5159601 - DNA, 25 bp, Homo sapien
gatggacttagaatctccagctgca

SEQ ID NO: 5159602 - DNA, 25 bp, Homo sapien
gatgatggacttagaatctccagct

SEQ ID NO: 5159603 - DNA, 25 bp, Homo sapien
gaggagagccctaacaagagaaaat

SEQ ID NO: 5159604 - DNA, 25 bp, Homo sapien
gagaaaggcctgactctagtctgta

SEQ ID NO: 5159605 - DNA, 25 bp, Homo sapien
tgtatcagcaacatttagcactgag

SEQ ID NO: 5159606 - DNA, 25 bp, Homo sapien
gaggtgcttgcgctcatttgtctcc

SEQ ID NO: 5159607 - DNA, 25 bp, Homo sapien
taacaagattaagtctccaaattct

SEQ ID NO: 5159608 - DNA, 25 bp, Homo sapien
ggctcccttcagattccatatggat

SEQ ID NO: 5159609 - DNA, 25 bp, Homo sapien
gcatttaatctatggatcactttgg

SEQ ID NO: 5159610 - DNA, 25 bp, Homo sapien
tccaaattcttgaacgtgggatatc

SEQ ID NO: 5159611 - DNA, 25 bp, Homo sapien
tttggaataatgctgccacgaacac

SEQ ID NO: 5159612 - DNA, 25 bp, Homo sapien
atacacctaggagtgaaagtgctgg

SEQ ID NO: 5159613 - DNA, 25 bp, Homo sapien
cctctgaaagtgtataacaattcca

SEQ ID NO: 5159614 - DNA, 25 bp, Homo sapien
caagagtgcaaaggcatcatctagg

SEQ ID NO: 5159615 - DNA, 25 bp, Homo sapien
aaaatagtcgctttcaatcaggtcc

SEQ ID NO: 5159616 - DNA, 25 bp, Homo sapien
aatagtcgctttcaatcaggtccag

SEQ ID NO: 5159617 - DNA, 25 bp, Homo sapien
atctcagaccaaaatagtcgctttc

SEQ ID NO: 5159618 - DNA, 25 bp, Homo sapien
gaccaaaatagtcgctttcaatcag

SEQ ID NO: 5159619 - DNA, 25 bp, Homo sapien
acttctaccactccatatcaattag

SEQ ID NO: 5159620 - DNA, 25 bp, Homo sapien
ttatactgccttataatcctttatg

SEQ ID NO: 5159621 - DNA, 25 bp, Homo sapien
caattatactgccttataatccttt

SEQ ID NO: 5159622 - DNA, 25 bp, Homo sapien
gactacttctaccactccatatcaa

SEQ ID NO: 5159623 - DNA, 25 bp, Homo sapien
gatgctttttgtaccatccaaccaa

SEQ ID NO: 5159624 - DNA, 25 bp, Homo sapien
tgatgctttttgtaccatccaacca

SEQ ID NO: 5159625 - DNA, 25 bp, Homo sapien
tgctttttgtaccatccaaccaatg

SEQ ID NO: 5159626 - DNA, 25 bp, Homo sapien
tttgatgctttttgtaccatccaac

SEQ ID NO: 5159627 - DNA, 25 bp, Homo sapien
aataaaacttaactcgaagatgcag

SEQ ID NO: 5159628 - DNA, 25 bp, Homo sapien
cgggttagctcctcacgaaggttat

SEQ ID NO: 5159629 - DNA, 25 bp, Homo sapien
tagctcctcacgaaggttatttggt

SEQ ID NO: 5159630 - DNA, 25 bp, Homo sapien
agatgcagacaatagggtgaaccaa

SEQ ID NO: 5159631 - DNA, 25 bp, Homo sapien
aataaccctggcacaattctagatg

SEQ ID NO: 5159632 - DNA, 25 bp, Homo sapien
tggaggatgctaagaaaccaactct

SEQ ID NO: 5159633 - DNA, 25 bp, Homo sapien
gcacaattctagatggtgttcttac

SEQ ID NO: 5159634 - DNA, 25 bp, Homo sapien
ttgaggtcttgttaccaggggacag

SEQ ID NO: 5159635 - DNA, 25 bp, Homo sapien
tccactgagaatatcttgttttaac

SEQ ID NO: 5159636 - DNA, 25 bp, Homo sapien
ctgagaatatcttgttttaactgaa

SEQ ID NO: 5159637 - DNA, 25 bp, Homo sapien
tttccactgagaatatcttgtttta

SEQ ID NO: 5159638 - DNA, 25 bp, Homo sapien
gaatatcttgttttaactgaagaac

SEQ ID NO: 5159639 - DNA, 25 bp, Homo sapien
attataagctgccaattgcactgct

SEQ ID NO: 5159640 - DNA, 25 bp, Homo sapien
aattgcactgctgtatcaaagggac

SEQ ID NO: 5159641 - DNA, 25 bp, Homo sapien
cttgcagattataagctgccaattg

SEQ ID NO: 5159642 - DNA, 25 bp, Homo sapien
tgctgtatcaaagggacagtctaat

SEQ ID NO: 5159643 - DNA, 25 bp, Homo sapien
aagttcaggactatgctcagcaaga

SEQ ID NO: 5159644 - DNA, 25 bp, Homo sapien
cagttccatctcttcagtctgaata

SEQ ID NO: 5159645 - DNA, 25 bp, Homo sapien
tctgaataggcacgaatctgaactc

SEQ ID NO: 5159646 - DNA, 25 bp, Homo sapien
ctcagcaagatcatagtcaccaagt

SEQ ID NO: 5159647 - DNA, 25 bp, Homo sapien
ttgaccacatgcatatcaaccccat

SEQ ID NO: 5159648 - DNA, 25 bp, Homo sapien
tggctttattcagataattggtttc

SEQ ID NO: 5159649 - DNA, 25 bp, Homo sapien
cacatgcatatcaaccccatacatt

SEQ ID NO: 5159650 - DNA, 25 bp, Homo sapien
accacatgcatatcaaccccataca

SEQ ID NO: 5159651 - DNA, 25 bp, Homo sapien
atctccttcaaaaacaaggactcct

SEQ ID NO: 5159652 - DNA, 25 bp, Homo sapien
gtgttagtcccaaactatagtcatt

SEQ ID NO: 5159653 - DNA, 25 bp, Homo sapien
tagtcccaaactatagtcattccca

SEQ ID NO: 5159654 - DNA, 25 bp, Homo sapien
caaggactcctgttggtgttagtcc

SEQ ID NO: 5159655 - DNA, 25 bp, Homo sapien
tccgagctgatcaagaaaatgtacc

SEQ ID NO: 5159656 - DNA, 25 bp, Homo sapien
cagttgtgagttccaggacttccga

SEQ ID NO: 5159657 - DNA, 25 bp, Homo sapien
gcaggaccctagctgagaacacagg

SEQ ID NO: 5159658 - DNA, 25 bp, Homo sapien
aaaagctggaaagcaacctgtgcag

SEQ ID NO: 5159659 - DNA, 25 bp, Homo sapien
taaaatccaatctggttatcttcgg

SEQ ID NO: 5159660 - DNA, 25 bp, Homo sapien
aaaatccaatctggttatcttcggc

SEQ ID NO: 5159661 - DNA, 25 bp, Homo sapien
atcttctacaaccaccaaggttaat

SEQ ID NO: 5159662 - DNA, 25 bp, Homo sapien
cgaataaatcctgatcgatgagaac

SEQ ID NO: 5159663 - DNA, 25 bp, Homo sapien
tttggatgatccagtctaaagacaa

SEQ ID NO: 5159664 - DNA, 25 bp, Homo sapien
gcctcgaaggcggaagaaagcatga

SEQ ID NO: 5159665 - DNA, 25 bp, Homo sapien
atcgatgagaactcttttggacggg

SEQ ID NO: 5159666 - DNA, 25 bp, Homo sapien
tcgtctagaatatcgtttgctgggc

SEQ ID NO: 5159667 - DNA, 25 bp, Homo sapien
tattggtttttgtggtctgatactc

SEQ ID NO: 5159668 - DNA, 25 bp, Homo sapien
ttcatttgtagagttcgtctagaat

SEQ ID NO: 5159669 - DNA, 25 bp, Homo sapien
cgtttgctgggccttctttcaaagg

SEQ ID NO: 5159670 - DNA, 25 bp, Homo sapien
agttcttcaggttttgtagcacatg

SEQ ID NO: 5159671 - DNA, 25 bp, Homo sapien
aagttcttcaggttttgtagcacat

SEQ ID NO: 5159672 - DNA, 25 bp, Homo sapien
taagttcttcaggttttgtagcaca

SEQ ID NO: 5159673 - DNA, 25 bp, Homo sapien
ctaagttcttcaggttttgtagcac

SEQ ID NO: 5159674 - DNA, 25 bp, Homo sapien
taaaactaagaatgtcagatacctg

SEQ ID NO: 5159675 - DNA, 25 bp, Homo sapien
actactgctagtacctaaaactaag

SEQ ID NO: 5159676 - DNA, 25 bp, Homo sapien
gacagcaacacaatcccacataaac

SEQ ID NO: 5159677 - DNA, 25 bp, Homo sapien
caacagctatcaaggatggcctaac

SEQ ID NO: 5159678 - DNA, 25 bp, Homo sapien
ggaaatggaaggactcacaggcaga

SEQ ID NO: 5159679 - DNA, 25 bp, Homo sapien
gaggaaatggaaggactcacaggca

SEQ ID NO: 5159680 - DNA, 25 bp, Homo sapien
gaaatggaaggactcacaggcagag

SEQ ID NO: 5159681 - DNA, 25 bp, Homo sapien
aaatggaaggactcacaggcagagc

SEQ ID NO: 5159682 - DNA, 25 bp, Homo sapien
ggcaaggcccttgtgttccactggt

SEQ ID NO: 5159683 - DNA, 25 bp, Homo sapien
tcatatctcagtcatggctgtatgg

SEQ ID NO: 5159684 - DNA, 25 bp, Homo sapien
tccaccacgttgacagcagtcgctg

SEQ ID NO: 5159685 - DNA, 25 bp, Homo sapien
aatgaacatcatgacggattcctgc

SEQ ID NO: 5159686 - DNA, 25 bp, Homo sapien
taatgggcaccttgttcacaaacac

SEQ ID NO: 5159687 - DNA, 25 bp, Homo sapien
catcaacttgcatgacaaagagtcc

SEQ ID NO: 5159688 - DNA, 25 bp, Homo sapien
taacctcgatctctttggatggcat

SEQ ID NO: 5159689 - DNA, 25 bp, Homo sapien
tatgcctagacatgcttccactgtg

SEQ ID NO: 5159690 - DNA, 25 bp, Homo sapien
taaaccaaggagcttgaaattctaa

SEQ ID NO: 5159691 - DNA, 25 bp, Homo sapien
aaccaaggagcttgaaattctaaag

SEQ ID NO: 5159692 - DNA, 25 bp, Homo sapien
aatatctataaatttctatgtacat

SEQ ID NO: 5159693 - DNA, 25 bp, Homo sapien
taaaacaactataagggccatacat

SEQ ID NO: 5159694 - DNA, 25 bp, Homo sapien
aatcagccatgacaatacttagcaa

SEQ ID NO: 5159695 - DNA, 25 bp, Homo sapien
aacttcattgtgcctctttggtttt

SEQ ID NO: 5159696 - DNA, 25 bp, Homo sapien
gccatgacaatacttagcaattatc

SEQ ID NO: 5159697 - DNA, 25 bp, Homo sapien
gatcttactcttcaattacaatctg

SEQ ID NO: 5159698 - DNA, 25 bp, Homo sapien
tacaatctgctaagatatatatggg

SEQ ID NO: 5159699 - DNA, 25 bp, Homo sapien
gggcattatatgagcatgtcctgca

SEQ ID NO: 5159700 - DNA, 25 bp, Homo sapien
gaaatggccactttcaatatgaact

SEQ ID NO: 5159701 - DNA, 25 bp, Homo sapien
gatggtgacccagtaaggtgcttct

SEQ ID NO: 5159702 - DNA, 25 bp, Homo sapien
tcatgcgtgaaagtgtgaaggtcac

SEQ ID NO: 5159703 - DNA, 25 bp, Homo sapien
actccaagataggtaaacgcctttg

SEQ ID NO: 5159704 - DNA, 25 bp, Homo sapien
cttataaatacctgagagctctgga

SEQ ID NO: 5159705 - DNA, 25 bp, Homo sapien
tgaggccacagcttgtaacacagaa

SEQ ID NO: 5159706 - DNA, 25 bp, Homo sapien
tagtcatgtctgtagatgcgagctt

SEQ ID NO: 5159707 - DNA, 25 bp, Homo sapien
agttgtttccccaccgcagaattat

SEQ ID NO: 5159708 - DNA, 25 bp, Homo sapien
tcctggaaagcaagatataactgat

SEQ ID NO: 5159709 - DNA, 25 bp, Homo sapien
cagttgcctcagcaccatgatgaat

SEQ ID NO: 5159710 - DNA, 25 bp, Homo sapien
tgatgcaaacacacggacacaagga

SEQ ID NO: 5159711 - DNA, 25 bp, Homo sapien
ggaagccattaaactaatgtaggaa

SEQ ID NO: 5159712 - DNA, 25 bp, Homo sapien
ttctatgtggacatacagttgcctc

SEQ ID NO: 5159713 - DNA, 25 bp, Homo sapien
tccatatttcataaatagtgctggg

SEQ ID NO: 5159714 - DNA, 25 bp, Homo sapien
caaggcaataccattcacgacagag

SEQ ID NO: 5159715 - DNA, 25 bp, Homo sapien
cacgacagaggcattggcaaagatt

SEQ ID NO: 5159716 - DNA, 25 bp, Homo sapien
tgggataactgcctagctataggca

SEQ ID NO: 5159717 - DNA, 25 bp, Homo sapien
taaacaatcctagggtgtatgttcc

SEQ ID NO: 5159718 - DNA, 25 bp, Homo sapien
aggtgtaacagcctagatggtctgt

SEQ ID NO: 5159719 - DNA, 25 bp, Homo sapien
aaacttacagttctcaatcccctca

SEQ ID NO: 5159720 - DNA, 25 bp, Homo sapien
ggtaactgcttctacttgcccacag

SEQ ID NO: 5159721 - DNA, 25 bp, Homo sapien
tatacgctggatcaggaggaaaaac

SEQ ID NO: 5159722 - DNA, 25 bp, Homo sapien
tacaaaagaactggtgtagactcct

SEQ ID NO: 5159723 - DNA, 25 bp, Homo sapien
gaggaaaaacagctatacaaggtat

SEQ ID NO: 5159724 - DNA, 25 bp, Homo sapien
taaaatgacactccacagattacac

SEQ ID NO: 5159725 - DNA, 25 bp, Homo sapien
tctgggctattcagcaaatcaatat

SEQ ID NO: 5159726 - DNA, 25 bp, Homo sapien
tccaataagtctgggctattcagca

SEQ ID NO: 5159727 - DNA, 25 bp, Homo sapien
atcaccaatcgttgcttccaataag

SEQ ID NO: 5159728 - DNA, 25 bp, Homo sapien
tcgttgcttccaataagtctgggct

SEQ ID NO: 5159729 - DNA, 25 bp, Homo sapien
cctaatcccggaagcctggtggcta

SEQ ID NO: 5159730 - DNA, 25 bp, Homo sapien
cattcagtgcttgggatgtttccat

SEQ ID NO: 5159731 - DNA, 25 bp, Homo sapien
gcctggtggctacattaacgtcatt

SEQ ID NO: 5159732 - DNA, 25 bp, Homo sapien
catattcaacttcaggttcccctaa

SEQ ID NO: 5159733 - DNA, 25 bp, Homo sapien
aatattattggagaagctgatttaa

SEQ ID NO: 5159734 - DNA, 25 bp, Homo sapien
caagagggcataactcttctgaatt

SEQ ID NO: 5159735 - DNA, 25 bp, Homo sapien
tattggagaagctgatttaaatatc

SEQ ID NO: 5159736 - DNA, 25 bp, Homo sapien
caaaaaggcaagagggcataactct

SEQ ID NO: 5159737 - DNA, 25 bp, Homo sapien
ctggctgtttatgttaacatcgatg

SEQ ID NO: 5159738 - DNA, 25 bp, Homo sapien
gggacagcaaaggactgttctccat

SEQ ID NO: 5159739 - DNA, 25 bp, Homo sapien
gacagcaaaggactgttctccatct

SEQ ID NO: 5159740 - DNA, 25 bp, Homo sapien
gttaacatcgatgttggatcgaggg

SEQ ID NO: 5159741 - DNA, 25 bp, Homo sapien
caaaactaatgcagcagactctctg

SEQ ID NO: 5159742 - DNA, 25 bp, Homo sapien
tcatagtgagataagcaggacattt

SEQ ID NO: 5159743 - DNA, 25 bp, Homo sapien
gcttcattctttagggtcattccag

SEQ ID NO: 5159744 - DNA, 25 bp, Homo sapien
tatgatggttcacctgatttccggt

SEQ ID NO: 5159745 - DNA, 25 bp, Homo sapien
ccttttgaagctatactctagatct

SEQ ID NO: 5159746 - DNA, 25 bp, Homo sapien
cctgtgaggtgtctgctgaaaagtc

SEQ ID NO: 5159747 - DNA, 25 bp, Homo sapien
gtctgcttggcgttctatatccttc

SEQ ID NO: 5159748 - DNA, 25 bp, Homo sapien
cgacttactgaagcacctttgtatg

SEQ ID NO: 5159749 - DNA, 25 bp, Homo sapien
tactcaagttgactagagttaaggc

SEQ ID NO: 5159750 - DNA, 25 bp, Homo sapien
gagttaaggcaaggtagtcacatgt

SEQ ID NO: 5159751 - DNA, 25 bp, Homo sapien
gggtacacgagatatgtagatacag

SEQ ID NO: 5159752 - DNA, 25 bp, Homo sapien
tagccattaaccatacccacttttc

SEQ ID NO: 5159753 - DNA, 25 bp, Homo sapien
tactcttgaagtcaggaggaactct

SEQ ID NO: 5159754 - DNA, 25 bp, Homo sapien
tattaaggcatttctcagtcaactt

SEQ ID NO: 5159755 - DNA, 25 bp, Homo sapien
tctcatgacattcaatcctgggctc

SEQ ID NO: 5159756 - DNA, 25 bp, Homo sapien
ggctctcaatgacattattaaggca

SEQ ID NO: 5159757 - DNA, 25 bp, Homo sapien
tctatggaaataccagcagtgtacc

SEQ ID NO: 5159758 - DNA, 25 bp, Homo sapien
gcagtgtacctagtacaatcttacc

SEQ ID NO: 5159759 - DNA, 25 bp, Homo sapien
tagatggttctcaataatgcaccca

SEQ ID NO: 5159760 - DNA, 25 bp, Homo sapien
tctggtaacaacagaaatatcagtt

SEQ ID NO: 5159761 - DNA, 25 bp, Homo sapien
ctgtttgtggcagcatcctgaacat

SEQ ID NO: 5159762 - DNA, 25 bp, Homo sapien
taattcagtctacccagaactgtac

SEQ ID NO: 5159763 - DNA, 25 bp, Homo sapien
caaagatagataagaacatcaattt

SEQ ID NO: 5159764 - DNA, 25 bp, Homo sapien
ataagaacatcaatttaattcagtc

SEQ ID NO: 5159765 - DNA, 25 bp, Homo sapien
caatttaattcagtctacccagaac

SEQ ID NO: 5159766 - DNA, 25 bp, Homo sapien
ggcagaatagtcagtgaacttaaag

SEQ ID NO: 5159767 - DNA, 25 bp, Homo sapien
gatttcaatagcagattcaagcagg

SEQ ID NO: 5159768 - DNA, 25 bp, Homo sapien
cctgcaactcgagtgtccgtggtgg

SEQ ID NO: 5159769 - DNA, 25 bp, Homo sapien
ggtgacagcagattgctccttgcca

SEQ ID NO: 5159770 - DNA, 25 bp, Homo sapien
atttgctgaggaatactctatgttc

SEQ ID NO: 5159771 - DNA, 25 bp, Homo sapien
tactctatgttcgattatgtaatca

SEQ ID NO: 5159772 - DNA, 25 bp, Homo sapien
gctgaggaatactctatgttcgatt

SEQ ID NO: 5159773 - DNA, 25 bp, Homo sapien
gaggaatactctatgttcgattatg

SEQ ID NO: 5159774 - DNA, 25 bp, Homo sapien
gtgtttttttgtgtcttgatctcct

SEQ ID NO: 5159775 - DNA, 25 bp, Homo sapien
gtctgaagtacctgggataacaggc

SEQ ID NO: 5159776 - DNA, 25 bp, Homo sapien
ttacagccattgagtcactatgccc

SEQ ID NO: 5159777 - DNA, 25 bp, Homo sapien
tgtgcctcagcgtctgaagtacctg

SEQ ID NO: 5159778 - DNA, 25 bp, Homo sapien
gtaatattctctgatagttatgtgt

SEQ ID NO: 5159779 - DNA, 25 bp, Homo sapien
agtctacctagcggtctattatttt

SEQ ID NO: 5159780 - DNA, 25 bp, Homo sapien
ggtaatattctctgatagttatgtg

SEQ ID NO: 5159781 - DNA, 25 bp, Homo sapien
tagtctacctagcggtctattattt

SEQ ID NO: 5159782 - DNA, 25 bp, Homo sapien
cttgaatacttcttttattgagagt

SEQ ID NO: 5159783 - DNA, 25 bp, Homo sapien
ttgcacattgggtagaattcaactg

SEQ ID NO: 5159784 - DNA, 25 bp, Homo sapien
cattgccaggtgttcgtatcaggat

SEQ ID NO: 5159785 - DNA, 25 bp, Homo sapien
gctatttgattgtggtggactgatg

SEQ ID NO: 5159786 - DNA, 25 bp, Homo sapien
tagaacagaaccactgtcggcaggt

SEQ ID NO: 5159787 - DNA, 25 bp, Homo sapien
tggggaggggcacattattctcatt

SEQ ID NO: 5159788 - DNA, 25 bp, Homo sapien
tgtcggcaggtgtgataagcatcag

SEQ ID NO: 5159789 - DNA, 25 bp, Homo sapien
tcagagtctcaagagactctttggg

SEQ ID NO: 5159790 - DNA, 25 bp, Homo sapien
ttagagatgcaagcaaggcatccaa

SEQ ID NO: 5159791 - DNA, 25 bp, Homo sapien
tctcagttagagatgcaagcaaggc

SEQ ID NO: 5159792 - DNA, 25 bp, Homo sapien
tgtgatcaattagattctcagttag

SEQ ID NO: 5159793 - DNA, 25 bp, Homo sapien
caattagattctcagttagagatgc

SEQ ID NO: 5159794 - DNA, 25 bp, Homo sapien
ggaacaatccaccggggtgtgatca

SEQ ID NO: 5159795 - DNA, 25 bp, Homo sapien
tccaccggggtgtgatcatggatgt

SEQ ID NO: 5159796 - DNA, 25 bp, Homo sapien
caatccaccggggtgtgatcatgga

SEQ ID NO: 5159797 - DNA, 25 bp, Homo sapien
gaacaatccaccggggtgtgatcat

SEQ ID NO: 5159798 - DNA, 25 bp, Homo sapien
agcatttcacatcccgcaagtccat

SEQ ID NO: 5159799 - DNA, 25 bp, Homo sapien
catcccgcaagtccattagacatgg

SEQ ID NO: 5159800 - DNA, 25 bp, Homo sapien
gcaagtccattagacatggcaccac

SEQ ID NO: 5159801 - DNA, 25 bp, Homo sapien
tttcacatcccgcaagtccattaga

SEQ ID NO: 5159802 - DNA, 25 bp, Homo sapien
aagaatggcgctgggggagagatca

SEQ ID NO: 5159803 - DNA, 25 bp, Homo sapien
gggggagagatcagtgagattccat

SEQ ID NO: 5159804 - DNA, 25 bp, Homo sapien
ctggtcacagcatctaccaagaatg

SEQ ID NO: 5159805 - DNA, 25 bp, Homo sapien
cagcatctaccaagaatggcgctgg

SEQ ID NO: 5159806 - DNA, 25 bp, Homo sapien
gttggaaatttcacccttcagtgtg

SEQ ID NO: 5159807 - DNA, 25 bp, Homo sapien
tcatcagaggatccaaaaatgtatg

SEQ ID NO: 5159808 - DNA, 25 bp, Homo sapien
cacatatctgacaatcgttagctct

SEQ ID NO: 5159809 - DNA, 25 bp, Homo sapien
tgggcaaaactcatcaacgaatggg

SEQ ID NO: 5159810 - DNA, 25 bp, Homo sapien
ttcttctgccaaaatgggaccagag

SEQ ID NO: 5159811 - DNA, 25 bp, Homo sapien
gtggtcagtaaacacttctgcttca

SEQ ID NO: 5159812 - DNA, 25 bp, Homo sapien
tctgcttcaggacagcttcttctgc

SEQ ID NO: 5159813 - DNA, 25 bp, Homo sapien
tcagtggtcagtaaacacttctgct

SEQ ID NO: 5159814 - DNA, 25 bp, Homo sapien
caaatagaaccgctaggtggagcca

SEQ ID NO: 5159815 - DNA, 25 bp, Homo sapien
taagatcagttctccataacgaggg

SEQ ID NO: 5159816 - DNA, 25 bp, Homo sapien
tattctagctgaaacggatcccagg

SEQ ID NO: 5159817 - DNA, 25 bp, Homo sapien
tataattaagaactggcaagagccc

SEQ ID NO: 5159818 - DNA, 25 bp, Homo sapien
agatggtgcagctttcccgtgaata

SEQ ID NO: 5159819 - DNA, 25 bp, Homo sapien
agcaaaccaagtgagagtttccagg

SEQ ID NO: 5159820 - DNA, 25 bp, Homo sapien
tcccgtgaatacctatgaattcacc

SEQ ID NO: 5159821 - DNA, 25 bp, Homo sapien
gcaaaccaagtgagagtttccaggg

SEQ ID NO: 5159822 - DNA, 25 bp, Homo sapien
tgaacaatcatttgagatgaatcac

SEQ ID NO: 5159823 - DNA, 25 bp, Homo sapien
tcatttgagatgaatcactaccttc

SEQ ID NO: 5159824 - DNA, 25 bp, Homo sapien
tttgagatgaatcactaccttcagg

SEQ ID NO: 5159825 - DNA, 25 bp, Homo sapien
caatcatttgagatgaatcactacc

SEQ ID NO: 5159826 - DNA, 25 bp, Homo sapien
tcttcatgatacacttttgaggagt

SEQ ID NO: 5159827 - DNA, 25 bp, Homo sapien
ggcatacaattgttcgtagcattct

SEQ ID NO: 5159828 - DNA, 25 bp, Homo sapien
tagatctatccagattatccaggat

SEQ ID NO: 5159829 - DNA, 25 bp, Homo sapien
tcctattagttatagatctatccag

SEQ ID NO: 5159830 - DNA, 25 bp, Homo sapien
tgcaactgctacctccaagttcaag

SEQ ID NO: 5159831 - DNA, 25 bp, Homo sapien
caactgctacctccaagttcaagga

SEQ ID NO: 5159832 - DNA, 25 bp, Homo sapien
gaaacagtgttagcttttgtcaaag

SEQ ID NO: 5159833 - DNA, 25 bp, Homo sapien
gtttttatcatgaaacagtgttagc

SEQ ID NO: 5159834 - DNA, 25 bp, Homo sapien
gtggagggctgagcagcggcactcc

SEQ ID NO: 5159835 - DNA, 25 bp, Homo sapien
gctgagcagcggcactcctggaggc

SEQ ID NO: 5159836 - DNA, 25 bp, Homo sapien
gagggctgagcagcggcactcctgg

SEQ ID NO: 5159837 - DNA, 25 bp, Homo sapien
ggctgagcagcggcactcctggagg

SEQ ID NO: 5159838 - DNA, 25 bp, Homo sapien
tgggtcagagcatccctgcacttgc

SEQ ID NO: 5159839 - DNA, 25 bp, Homo sapien
gtcagagcatccctgcacttgctca

SEQ ID NO: 5159840 - DNA, 25 bp, Homo sapien
cgtgggtcagagcatccctgcactt

SEQ ID NO: 5159841 - DNA, 25 bp, Homo sapien
cacaggcgcccccaagtggcttgcc

SEQ ID NO: 5159842 - DNA, 25 bp, Homo sapien
tgtgcccgccctcagcgtgcagcca

SEQ ID NO: 5159843 - DNA, 25 bp, Homo sapien
gctgtgcccgccctcagcgtgcagc

SEQ ID NO: 5159844 - DNA, 25 bp, Homo sapien
gcagctgtgcccgccctcagcgtgc

SEQ ID NO: 5159845 - DNA, 25 bp, Homo sapien
agctgtgcccgccctcagcgtgcag

SEQ ID NO: 5159846 - DNA, 25 bp, Homo sapien
tcatctttggggggtgaactttgtg

SEQ ID NO: 5159847 - DNA, 25 bp, Homo sapien
catctttggggggtgaactttgtga

SEQ ID NO: 5159848 - DNA, 25 bp, Homo sapien
ttcaggatgtcctgtttgttaaaca

SEQ ID NO: 5159849 - DNA, 25 bp, Homo sapien
ctctgttttcaggatgtcctgtttg

SEQ ID NO: 5159850 - DNA, 25 bp, Homo sapien
ctgttttcaggatgtcctgtttgtt

SEQ ID NO: 5159851 - DNA, 25 bp, Homo sapien
ccttctctgttttcaggatgtcctg

SEQ ID NO: 5159852 - DNA, 25 bp, Homo sapien
tactctcttttggatactatggaaa

SEQ ID NO: 5159853 - DNA, 25 bp, Homo sapien
ctctcttttggatactatggaaact

SEQ ID NO: 5159854 - DNA, 25 bp, Homo sapien
ctcttttggatactatggaaactaa

SEQ ID NO: 5159855 - DNA, 25 bp, Homo sapien
tttggatactatggaaactaattgt

SEQ ID NO: 5159856 - DNA, 25 bp, Homo sapien
gcaaatatggcctatcataatctaa

SEQ ID NO: 5159857 - DNA, 25 bp, Homo sapien
ttggcaaatatggcctatcataatc

SEQ ID NO: 5159858 - DNA, 25 bp, Homo sapien
tgcgtcaaaatcacttattttgact

SEQ ID NO: 5159859 - DNA, 25 bp, Homo sapien
taatgcgtcaaaatcacttattttg

SEQ ID NO: 5159860 - DNA, 25 bp, Homo sapien
aagttagctgtccttgcgtaatttc

SEQ ID NO: 5159861 - DNA, 25 bp, Homo sapien
gttagctgtccttgcgtaatttctt

SEQ ID NO: 5159862 - DNA, 25 bp, Homo sapien
agttagctgtccttgcgtaatttct

SEQ ID NO: 5159863 - DNA, 25 bp, Homo sapien
taagaccaatagacaactctaattc

SEQ ID NO: 5159864 - DNA, 25 bp, Homo sapien
ctaagaccaatagacaactctaatt

SEQ ID NO: 5159865 - DNA, 25 bp, Homo sapien
agaccaatagacaactctaattctt

SEQ ID NO: 5159866 - DNA, 25 bp, Homo sapien
aagaccaatagacaactctaattct

SEQ ID NO: 5159867 - DNA, 25 bp, Homo sapien
tgtaggtgcaaggctgccaataata

SEQ ID NO: 5159868 - DNA, 25 bp, Homo sapien
cggtttcgatgataaggtctttaga

SEQ ID NO: 5159869 - DNA, 25 bp, Homo sapien
gtatttgcggtttcgatgataaggt

SEQ ID NO: 5159870 - DNA, 25 bp, Homo sapien
tggtgtatgatgtatttgcggtttc

SEQ ID NO: 5159871 - DNA, 25 bp, Homo sapien
gcgttggtgtatgatgtatttgcgg

SEQ ID NO: 5159872 - DNA, 25 bp, Homo sapien
tccctctggtttggtcatggctctc

SEQ ID NO: 5159873 - DNA, 25 bp, Homo sapien
tctgccagaactcactcgataaaag

SEQ ID NO: 5159874 - DNA, 25 bp, Homo sapien
tgtagcttccagaacatgcgaggag

SEQ ID NO: 5159875 - DNA, 25 bp, Homo sapien
tatgattgggcaaacctcaggcatg

SEQ ID NO: 5159876 - DNA, 25 bp, Homo sapien
ggttttgcgagaataacacagagac

SEQ ID NO: 5159877 - DNA, 25 bp, Homo sapien
tgagaaacgtccgttgctccaccag

SEQ ID NO: 5159878 - DNA, 25 bp, Homo sapien
aaggtaggagccctgtatctgcgac

SEQ ID NO: 5159879 - DNA, 25 bp, Homo sapien
tctgcgacgcgattctctgttaacc

SEQ ID NO: 5159880 - DNA, 25 bp, Homo sapien
ccttaactgcgtggaaaagtgctcg

SEQ ID NO: 5159881 - DNA, 25 bp, Homo sapien
aaagtgctcggtccttgggaacaag

SEQ ID NO: 5159882 - DNA, 25 bp, Homo sapien
ccttgaagggcacggtaaagcgtat

SEQ ID NO: 5159883 - DNA, 25 bp, Homo sapien
tgtcctgagaaacgagaagtcagct

SEQ ID NO: 5159884 - DNA, 25 bp, Homo sapien
aggtaaccagataaaagccgccacg

SEQ ID NO: 5159885 - DNA, 25 bp, Homo sapien
ctccaggtaaccagataaaagccgc

SEQ ID NO: 5159886 - DNA, 25 bp, Homo sapien
gataaaagccgccacggggtgacag

SEQ ID NO: 5159887 - DNA, 25 bp, Homo sapien
gggtgacagctgcgaagtactccat

SEQ ID NO: 5159888 - DNA, 25 bp, Homo sapien
tgcccctcggacacgcagctggtaa

SEQ ID NO: 5159889 - DNA, 25 bp, Homo sapien
tccaccgatttgtcattgagctgcc

SEQ ID NO: 5159890 - DNA, 25 bp, Homo sapien
gccaatccgaggctgattttccaag

SEQ ID NO: 5159891 - DNA, 25 bp, Homo sapien
tttcaccaatgagaagctgccccag

SEQ ID NO: 5159892 - DNA, 25 bp, Homo sapien
gcccagttcacggcgcgtgcaagtt

SEQ ID NO: 5159893 - DNA, 25 bp, Homo sapien
ctttaggaacaccgcccagttcacg

SEQ ID NO: 5159894 - DNA, 25 bp, Homo sapien
aagccgcggccggaggactgaggaa

SEQ ID NO: 5159895 - DNA, 25 bp, Homo sapien
tgcaagttccgagggcagttaagtt

SEQ ID NO: 5159896 - DNA, 25 bp, Homo sapien
agtgtggacgcagcaagctccgcgc

SEQ ID NO: 5159897 - DNA, 25 bp, Homo sapien
cgtttctcgttggaaatgagcacag

SEQ ID NO: 5159898 - DNA, 25 bp, Homo sapien
tcccacaggcggcaagaaccgggac

SEQ ID NO: 5159899 - DNA, 25 bp, Homo sapien
agtccaggcgcttccccttagaagc

SEQ ID NO: 5159900 - DNA, 25 bp, Homo sapien
acacatactccttattttgcctaat

SEQ ID NO: 5159901 - DNA, 25 bp, Homo sapien
cactgagtggatcttaattatttat

SEQ ID NO: 5159902 - DNA, 25 bp, Homo sapien
aacacatactccttattttgcctaa

SEQ ID NO: 5159903 - DNA, 25 bp, Homo sapien
aagaggcagacctccccaaaaggct

SEQ ID NO: 5159904 - DNA, 25 bp, Homo sapien
tggcctcatttctggtccacactgt

SEQ ID NO: 5159905 - DNA, 25 bp, Homo sapien
taggaaggtgaaactacttctggcc

SEQ ID NO: 5159906 - DNA, 25 bp, Homo sapien
tggaacctccagaccatcaacctgt

SEQ ID NO: 5159907 - DNA, 25 bp, Homo sapien
gtgacacacagatgacccactgaag

SEQ ID NO: 5159908 - DNA, 25 bp, Homo sapien
gacacacagatgacccactgaagag

SEQ ID NO: 5159909 - DNA, 25 bp, Homo sapien
tgtgacacacagatgacccactgaa

SEQ ID NO: 5159910 - DNA, 25 bp, Homo sapien
ctgtgacacacagatgacccactga

SEQ ID NO: 5159911 - DNA, 25 bp, Homo sapien
ggcccttactcttgttggcagccat

SEQ ID NO: 5159912 - DNA, 25 bp, Homo sapien
tggcccttactcttgttggcagcca

SEQ ID NO: 5159913 - DNA, 25 bp, Homo sapien
ctgacttgccaacgcctccgctgcc

SEQ ID NO: 5159914 - DNA, 25 bp, Homo sapien
gacttgccaacgcctccgctgccaa

SEQ ID NO: 5159915 - DNA, 25 bp, Homo sapien
atgaactgaagcgtcagggctgact

SEQ ID NO: 5159916 - DNA, 25 bp, Homo sapien
aactgaagcgtcagggctgacttgc

SEQ ID NO: 5159917 - DNA, 25 bp, Homo sapien
cttgtcatatgccaatgattttgaa

SEQ ID NO: 5159918 - DNA, 25 bp, Homo sapien
ttcttgtcatatgccaatgattttg

SEQ ID NO: 5159919 - DNA, 25 bp, Homo sapien
tttcttgtcatatgccaatgatttt

SEQ ID NO: 5159920 - DNA, 25 bp, Homo sapien
tgtcatatgccaatgattttgaaac

SEQ ID NO: 5159921 - DNA, 25 bp, Homo sapien
catgttctgtgattgagaacacaag

SEQ ID NO: 5159922 - DNA, 25 bp, Homo sapien
actgtcagctttggtaggttcatag

SEQ ID NO: 5159923 - DNA, 25 bp, Homo sapien
tgcccagcggtgtccagaatatcta

SEQ ID NO: 5159924 - DNA, 25 bp, Homo sapien
aaagtagttatctcgaatggctgcg

SEQ ID NO: 5159925 - DNA, 25 bp, Homo sapien
gaaagtccttaagtagcagcaaatg

SEQ ID NO: 5159926 - DNA, 25 bp, Homo sapien
tggaagcaccatgtgtctacactgt

SEQ ID NO: 5159927 - DNA, 25 bp, Homo sapien
caatggagggtagccaggttcttgc

SEQ ID NO: 5159928 - DNA, 25 bp, Homo sapien
tggatattctactcactatggaagc

SEQ ID NO: 5159929 - DNA, 25 bp, Homo sapien
cttcccttctaagtaagtcacagaa

SEQ ID NO: 5159930 - DNA, 25 bp, Homo sapien
ccacttcccttctaagtaagtcaca

SEQ ID NO: 5159931 - DNA, 25 bp, Homo sapien
cacttcccttctaagtaagtcacag

SEQ ID NO: 5159932 - DNA, 25 bp, Homo sapien
cccttctaagtaagtcacagaacaa

SEQ ID NO: 5159933 - DNA, 25 bp, Homo sapien
tgacttgagtttagccacagggctc

SEQ ID NO: 5159934 - DNA, 25 bp, Homo sapien
agaacgcccgagtgctatctgtgca

SEQ ID NO: 5159935 - DNA, 25 bp, Homo sapien
caacatgagaaacctacgcagaggt

SEQ ID NO: 5159936 - DNA, 25 bp, Homo sapien
tgctccaactctgtgagaacgcccg

SEQ ID NO: 5159937 - DNA, 25 bp, Homo sapien
tcccacgacgagcagtggaatttta

SEQ ID NO: 5159938 - DNA, 25 bp, Homo sapien
tcagccttcacacggagaatctgtt

SEQ ID NO: 5159939 - DNA, 25 bp, Homo sapien
taggtcagacttgtttcccacgacg

SEQ ID NO: 5159940 - DNA, 25 bp, Homo sapien
gggtcttcgctgacgtctccacgta

SEQ ID NO: 5159941 - DNA, 25 bp, Homo sapien
gttttctgacatcttctttgttctg

SEQ ID NO: 5159942 - DNA, 25 bp, Homo sapien
tttcttgccattcttgtctttgttt

SEQ ID NO: 5159943 - DNA, 25 bp, Homo sapien
ctttgttctgatttctctcattagg

SEQ ID NO: 5159944 - DNA, 25 bp, Homo sapien
tctgatttctctcattaggtcaaag

SEQ ID NO: 5159945 - DNA, 25 bp, Homo sapien
atagtaagcaacatctttctttaaa

SEQ ID NO: 5159946 - DNA, 25 bp, Homo sapien
tcatagtaagcaacatctttcttta

SEQ ID NO: 5159947 - DNA, 25 bp, Homo sapien
tagtaagcaacatctttctttaaaa

SEQ ID NO: 5159948 - DNA, 25 bp, Homo sapien
catagtaagcaacatctttctttaa

SEQ ID NO: 5159949 - DNA, 25 bp, Homo sapien
gcttggtattgacctatctggcgca

SEQ ID NO: 5159950 - DNA, 25 bp, Homo sapien
tgtgtgacacttagcaagaggctca

SEQ ID NO: 5159951 - DNA, 25 bp, Homo sapien
gatccacagggtattgccaagaagc

SEQ ID NO: 5159952 - DNA, 25 bp, Homo sapien
tagacctccgtgtgcagtgatgctg

SEQ ID NO: 5159953 - DNA, 25 bp, Homo sapien
gttggccacccaatctaaatcagct

SEQ ID NO: 5159954 - DNA, 25 bp, Homo sapien
actctctcggagaagcctgttggcc

SEQ ID NO: 5159955 - DNA, 25 bp, Homo sapien
tagagctcgacaccaagtaggtgct

SEQ ID NO: 5159956 - DNA, 25 bp, Homo sapien
gtttcaaatctataagcagcatggc

SEQ ID NO: 5159957 - DNA, 25 bp, Homo sapien
aacactgttaagcttctatggtgct

SEQ ID NO: 5159958 - DNA, 25 bp, Homo sapien
tagaaagtagctcatagaccaacag

SEQ ID NO: 5159959 - DNA, 25 bp, Homo sapien
agggttcctagtggtacataaattg

SEQ ID NO: 5159960 - DNA, 25 bp, Homo sapien
cgaggtcaagtttactgctataaca

SEQ ID NO: 5159961 - DNA, 25 bp, Homo sapien
caaaagttagtctcccctgaagcct

SEQ ID NO: 5159962 - DNA, 25 bp, Homo sapien
accacggtgcgtggctagagagcct

SEQ ID NO: 5159963 - DNA, 25 bp, Homo sapien
agctgaaacccagacgtgagccgtt

SEQ ID NO: 5159964 - DNA, 25 bp, Homo sapien
catgtacatggaactcctggccgac

SEQ ID NO: 5159965 - DNA, 25 bp, Homo sapien
tgtgcttctcagacacgaccagagg

SEQ ID NO: 5159966 - DNA, 25 bp, Homo sapien
ggaggccgaatcctcagcttagcca

SEQ ID NO: 5159967 - DNA, 25 bp, Homo sapien
ggtgggaggccgaatcctcagctta

SEQ ID NO: 5159968 - DNA, 25 bp, Homo sapien
gccgaatcctcagcttagccaggtt

SEQ ID NO: 5159969 - DNA, 25 bp, Homo sapien
tacttaagccagctgccaaggcagg

SEQ ID NO: 5159970 - DNA, 25 bp, Homo sapien
caggagtgcaatctgggtagtactt

SEQ ID NO: 5159971 - DNA, 25 bp, Homo sapien
gcaggagtgcaatctgggtagtact

SEQ ID NO: 5159972 - DNA, 25 bp, Homo sapien
aatgaattgcatgagaagaggcaca

SEQ ID NO: 5159973 - DNA, 25 bp, Homo sapien
ctgtgtgattcctcagccagagcaa

SEQ ID NO: 5159974 - DNA, 25 bp, Homo sapien
tatgccaagtacaggcactgctcag

SEQ ID NO: 5159975 - DNA, 25 bp, Homo sapien
caatcacctgtgaggccactctaac

SEQ ID NO: 5159976 - DNA, 25 bp, Homo sapien
agtgtggagctcgagatgtgggaca

SEQ ID NO: 5159977 - DNA, 25 bp, Homo sapien
acagtgtggagctcgagatgtggga

SEQ ID NO: 5159978 - DNA, 25 bp, Homo sapien
aaggagcacctttgcggggtggtgg

SEQ ID NO: 5159979 - DNA, 25 bp, Homo sapien
tgtggagctcgagatgtgggacatc

SEQ ID NO: 5159980 - DNA, 25 bp, Homo sapien
cacctgtagttgacgctgacagccc

SEQ ID NO: 5159981 - DNA, 25 bp, Homo sapien
cctctgttgaaggagtcaggtgcga

SEQ ID NO: 5159982 - DNA, 25 bp, Homo sapien
gaaaagagttcaatagggtgaccag

SEQ ID NO: 5159983 - DNA, 25 bp, Homo sapien
atggtcagaaggcaatcagagcaca

SEQ ID NO: 5159984 - DNA, 25 bp, Homo sapien
taatacagacaataggtacatcaca

SEQ ID NO: 5159985 - DNA, 25 bp, Homo sapien
aatattagatatacctctttattac

SEQ ID NO: 5159986 - DNA, 25 bp, Homo sapien
tatgaaattttcaaccttaaaatgc

SEQ ID NO: 5159987 - DNA, 25 bp, Homo sapien
taaacccatctaatatagcagtaaa

SEQ ID NO: 5159988 - DNA, 25 bp, Homo sapien
gggaaggcgatggagcccggtgctc

SEQ ID NO: 5159989 - DNA, 25 bp, Homo sapien
tgggggaaggcgatggagcccggtg

SEQ ID NO: 5159990 - DNA, 25 bp, Homo sapien
cccggtgctcctcggggcgggcgtg

SEQ ID NO: 5159991 - DNA, 25 bp, Homo sapien
ggcgggcgtggctccgcctggctgt

SEQ ID NO: 5159992 - DNA, 25 bp, Homo sapien
cacggcgggaatgtttcttgaaatc

SEQ ID NO: 5159993 - DNA, 25 bp, Homo sapien
gccattgcgtcggttcacagcgggt

SEQ ID NO: 5159994 - DNA, 25 bp, Homo sapien
tgaagtgaaggccattgcgtcggtt

SEQ ID NO: 5159995 - DNA, 25 bp, Homo sapien
ctctgaggtcagcttgctcgggtgt

SEQ ID NO: 5159996 - DNA, 25 bp, Homo sapien
cgggtgagagtggtgcgtcccctgc

SEQ ID NO: 5159997 - DNA, 25 bp, Homo sapien
gtcccgtggtccagctcacaggtca

SEQ ID NO: 5159998 - DNA, 25 bp, Homo sapien
ccaagcagaatatgccaaaagtgtc

SEQ ID NO: 5159999 - DNA, 25 bp, Homo sapien
agctcacaggtcacggtcagaaccc

SEQ ID NO: 5160000 - DNA, 25 bp, Homo sapien
tatgccaaaagtgtcccgtggtcca

SEQ ID NO: 5160001 - DNA, 25 bp, Homo sapien
cgcatacaggtggggaaggaggagg

SEQ ID NO: 5160002 - DNA, 25 bp, Homo sapien
aagagcttgctcagtctggctgtgg

SEQ ID NO: 5160003 - DNA, 25 bp, Homo sapien
tgtggctgttaaaagtgtgcttggc

SEQ ID NO: 5160004 - DNA, 25 bp, Homo sapien
ctttgcgctgcttcagaagagcttg

SEQ ID NO: 5160005 - DNA, 25 bp, Homo sapien
tggctgtggctgttaaaagtgtgct

SEQ ID NO: 5160006 - DNA, 25 bp, Homo sapien
cttgaagcccgtggagtgaagagtg

SEQ ID NO: 5160007 - DNA, 25 bp, Homo sapien
gaagagtgttcaggacagagatggg

SEQ ID NO: 5160008 - DNA, 25 bp, Homo sapien
agagtgttcaggacagagatgggaa

SEQ ID NO: 5160009 - DNA, 25 bp, Homo sapien
aagcccgtggagtgaagagtgttca

SEQ ID NO: 5160010 - DNA, 25 bp, Homo sapien
gcagcgagctcacactggtattaga

SEQ ID NO: 5160011 - DNA, 25 bp, Homo sapien
cagcgagctcacactggtattagag

SEQ ID NO: 5160012 - DNA, 25 bp, Homo sapien
cagcagcgagctcacactggtatta

SEQ ID NO: 5160013 - DNA, 25 bp, Homo sapien
gcgagctcacactggtattagagtg

SEQ ID NO: 5160014 - DNA, 25 bp, Homo sapien
aaagtgaagaagtgcgaggtgctcg

SEQ ID NO: 5160015 - DNA, 25 bp, Homo sapien
tgcgaggtgctcgtggggtcaccag

SEQ ID NO: 5160016 - DNA, 25 bp, Homo sapien
ccaggtttggggctcaaagttccag

SEQ ID NO: 5160017 - DNA, 25 bp, Homo sapien
atgtgatgtaaaaccgaggaaaagt

SEQ ID NO: 5160018 - DNA, 25 bp, Homo sapien
tggtggcagcgggtacagttgtagc

SEQ ID NO: 5160019 - DNA, 25 bp, Homo sapien
agggtctagcttggtggcagcgggt

SEQ ID NO: 5160020 - DNA, 25 bp, Homo sapien
cgagggtctagcttggtggcagcgg

SEQ ID NO: 5160021 - DNA, 25 bp, Homo sapien
ctccgagggtctagcttggtggcag

SEQ ID NO: 5160022 - DNA, 25 bp, Homo sapien
gcccccaggcctgtcaagcctgtct

SEQ ID NO: 5160023 - DNA, 25 bp, Homo sapien
tctccctctggtagtgaacgtcctc

SEQ ID NO: 5160024 - DNA, 25 bp, Homo sapien
caggggtccctttcagcagaccgcc

SEQ ID NO: 5160025 - DNA, 25 bp, Homo sapien
tctggtagtgaacgtcctccccatc

SEQ ID NO: 5160026 - DNA, 25 bp, Homo sapien
acgatgctggtgagttcccgcatca

SEQ ID NO: 5160027 - DNA, 25 bp, Homo sapien
cacgatgctggtgagttcccgcatc

SEQ ID NO: 5160028 - DNA, 25 bp, Homo sapien
cagaagcgacaaaggacaatgagca

SEQ ID NO: 5160029 - DNA, 25 bp, Homo sapien
tcagaagcgacaaaggacaatgagc

SEQ ID NO: 5160030 - DNA, 25 bp, Homo sapien
aaggtgtcggcacggttgatgtctc

SEQ ID NO: 5160031 - DNA, 25 bp, Homo sapien
cggcacggttgatgtctcctgcagc

SEQ ID NO: 5160032 - DNA, 25 bp, Homo sapien
tcaaggtgtcggcacggttgatgtc

SEQ ID NO: 5160033 - DNA, 25 bp, Homo sapien
tgtcggcacggttgatgtctcctgc

SEQ ID NO: 5160034 - DNA, 25 bp, Homo sapien
tgatgtaatggttccaaaccatgag

SEQ ID NO: 5160035 - DNA, 25 bp, Homo sapien
ctgatgtaatggttccaaaccatga

SEQ ID NO: 5160036 - DNA, 25 bp, Homo sapien
atgtaatggttccaaaccatgagaa

SEQ ID NO: 5160037 - DNA, 25 bp, Homo sapien
gatgtaatggttccaaaccatgaga

SEQ ID NO: 5160038 - DNA, 25 bp, Homo sapien
tcgcattgaagggaactccacaggg

SEQ ID NO: 5160039 - DNA, 25 bp, Homo sapien
ccaccctgacataagactctaattg

SEQ ID NO: 5160040 - DNA, 25 bp, Homo sapien
tgttgggcttcgcataagttctccc

SEQ ID NO: 5160041 - DNA, 25 bp, Homo sapien
ggtaccacggtaaagcagatcaaaa

SEQ ID NO: 5160042 - DNA, 25 bp, Homo sapien
agctgggtgcctcctacctcaggag

SEQ ID NO: 5160043 - DNA, 25 bp, Homo sapien
gggcagctgggtgcctcctacctca

SEQ ID NO: 5160044 - DNA, 25 bp, Homo sapien
gggtgcctcctacctcaggagggcc

SEQ ID NO: 5160045 - DNA, 25 bp, Homo sapien
gctgggtgcctcctacctcaggagg

SEQ ID NO: 5160046 - DNA, 25 bp, Homo sapien
cagggaggggcaaaagccgccgtgt

SEQ ID NO: 5160047 - DNA, 25 bp, Homo sapien
aggggcaaaagccgccgtgtccttg

SEQ ID NO: 5160048 - DNA, 25 bp, Homo sapien
ccagggaggggcaaaagccgccgtg

SEQ ID NO: 5160049 - DNA, 25 bp, Homo sapien
tgggccaggaggaacgccccgattg

SEQ ID NO: 5160050 - DNA, 25 bp, Homo sapien
acgccccgattgtgcgggatcccag

SEQ ID NO: 5160051 - DNA, 25 bp, Homo sapien
aggaacgccccgattgtgcgggatc

SEQ ID NO: 5160052 - DNA, 25 bp, Homo sapien
ccaggaggaacgccccgattgtgcg

SEQ ID NO: 5160053 - DNA, 25 bp, Homo sapien
gtcgcactggccgaggcgtggaccc

SEQ ID NO: 5160054 - DNA, 25 bp, Homo sapien
ccgccgtcgcactggccgaggcgtg

SEQ ID NO: 5160055 - DNA, 25 bp, Homo sapien
tcgcactggccgaggcgtggaccct

SEQ ID NO: 5160056 - DNA, 25 bp, Homo sapien
ccgtcgcactggccgaggcgtggac

SEQ ID NO: 5160057 - DNA, 25 bp, Homo sapien
cggcgcgtcacacggcaaagttgtc

SEQ ID NO: 5160058 - DNA, 25 bp, Homo sapien
gcgtcacacggcaaagttgtctcca

SEQ ID NO: 5160059 - DNA, 25 bp, Homo sapien
tcccggcgcgtcacacggcaaagtt

SEQ ID NO: 5160060 - DNA, 25 bp, Homo sapien
ccctgcagtcctcccggcgcgtcac

SEQ ID NO: 5160061 - DNA, 25 bp, Homo sapien
agacggaagcgaaggcgctggagcc

SEQ ID NO: 5160062 - DNA, 25 bp, Homo sapien
agcaagcttggtgcccgggagagcc

SEQ ID NO: 5160063 - DNA, 25 bp, Homo sapien
gggccccgcgctcgcacctgagcgc

SEQ ID NO: 5160064 - DNA, 25 bp, Homo sapien
actgcctcgcgccaggaagggccgc

SEQ ID NO: 5160065 - DNA, 25 bp, Homo sapien
ggtggcgaaagagcgggtccacgca

SEQ ID NO: 5160066 - DNA, 25 bp, Homo sapien
aaggtggcgaaagagcgggtccacg

SEQ ID NO: 5160067 - DNA, 25 bp, Homo sapien
gtggcgaaagagcgggtccacgcaa

SEQ ID NO: 5160068 - DNA, 25 bp, Homo sapien
aggtggcgaaagagcgggtccacgc

SEQ ID NO: 5160069 - DNA, 25 bp, Homo sapien
gggcgcctcggcatctgcagccttc

SEQ ID NO: 5160070 - DNA, 25 bp, Homo sapien
gcagccccggttcgggtgaagcgaa

SEQ ID NO: 5160071 - DNA, 25 bp, Homo sapien
cagcgtcagtgggagcggcggttcg

SEQ ID NO: 5160072 - DNA, 25 bp, Homo sapien
ttcgggtgaagcgaaagcagcgtca

SEQ ID NO: 5160073 - DNA, 25 bp, Homo sapien
ccgccgcgaggcgagccgagtcgag

SEQ ID NO: 5160074 - DNA, 25 bp, Homo sapien
cggaggtcgcgggtcactgccgcac

SEQ ID NO: 5160075 - DNA, 25 bp, Homo sapien
gagtcgagccgagcgcagggccggg

SEQ ID NO: 5160076 - DNA, 25 bp, Homo sapien
gctgccgccggctcgcagggggagg

SEQ ID NO: 5160077 - DNA, 25 bp, Homo sapien
ctgcgagccacccggggatccgggt

SEQ ID NO: 5160078 - DNA, 25 bp, Homo sapien
cagcagaaggcaggcggcccccagc

SEQ ID NO: 5160079 - DNA, 25 bp, Homo sapien
gcgggggcgtgggtgagccccaggc

SEQ ID NO: 5160080 - DNA, 25 bp, Homo sapien
cggcggcgcggcaggcgtcggcggg

SEQ ID NO: 5160081 - DNA, 25 bp, Homo sapien
tctgcaggcggctcaagatgtgccg

SEQ ID NO: 5160082 - DNA, 25 bp, Homo sapien
accatggcggccttaggcacggcgt

SEQ ID NO: 5160083 - DNA, 25 bp, Homo sapien
gatgatttcggaaacgcgctcctgg

SEQ ID NO: 5160084 - DNA, 25 bp, Homo sapien
tgtctcggcgaagctgatgatttcg

SEQ ID NO: 5160085 - DNA, 25 bp, Homo sapien
tagggcaggagtttcaggtaaagcc

SEQ ID NO: 5160086 - DNA, 25 bp, Homo sapien
tggaagtacactttgacccgcacct

SEQ ID NO: 5160087 - DNA, 25 bp, Homo sapien
tggaccacaaacaggttctggttgc

SEQ ID NO: 5160088 - DNA, 25 bp, Homo sapien
agatgaagaagtataggcggacccg

SEQ ID NO: 5160089 - DNA, 25 bp, Homo sapien
cacaatcatgttgggcacgtcccgc

SEQ ID NO: 5160090 - DNA, 25 bp, Homo sapien
tgcacgtctaggttgagtcgccgct

SEQ ID NO: 5160091 - DNA, 25 bp, Homo sapien
ctcacagtagttcccgtagtagccg

SEQ ID NO: 5160092 - DNA, 25 bp, Homo sapien
aatgcagcaggagttcaccgtgccg

SEQ ID NO: 5160093 - DNA, 25 bp, Homo sapien
gtagaaaaatatctcaggccgcacc

SEQ ID NO: 5160094 - DNA, 25 bp, Homo sapien
ataagtcatgtcagaggcccaagcc

SEQ ID NO: 5160095 - DNA, 25 bp, Homo sapien
cttttatgtgtgctcggaaggcgca

SEQ ID NO: 5160096 - DNA, 25 bp, Homo sapien
ttgaagcacgaaggatcccaggctg

SEQ ID NO: 5160097 - DNA, 25 bp, Homo sapien
gtcatgtgcgttcaggcaggtctgc

SEQ ID NO: 5160098 - DNA, 25 bp, Homo sapien
cagtttcgtctagtgtgggtcaacc

SEQ ID NO: 5160099 - DNA, 25 bp, Homo sapien
tcataccctgaaacgttggcaggcc

SEQ ID NO: 5160100 - DNA, 25 bp, Homo sapien
cacttggacatctagagggcgagcg

SEQ ID NO: 5160101 - DNA, 25 bp, Homo sapien
tggacacacgcagatcggcaagtgc

SEQ ID NO: 5160102 - DNA, 25 bp, Homo sapien
cccacacgacacagagcccccacag

SEQ ID NO: 5160103 - DNA, 25 bp, Homo sapien
cagtccccacacgacacagagcccc

SEQ ID NO: 5160104 - DNA, 25 bp, Homo sapien
ccacagtccccacacgacacagagc

SEQ ID NO: 5160105 - DNA, 25 bp, Homo sapien
ccacacgacacagagcccccacagc

SEQ ID NO: 5160106 - DNA, 25 bp, Homo sapien
cacctgattctgaaggtagccagac

SEQ ID NO: 5160107 - DNA, 25 bp, Homo sapien
acctgattctgaaggtagccagacc

SEQ ID NO: 5160108 - DNA, 25 bp, Homo sapien
gtgcacacctgattctgaaggtagc

SEQ ID NO: 5160109 - DNA, 25 bp, Homo sapien
cacacctgattctgaaggtagccag

SEQ ID NO: 5160110 - DNA, 25 bp, Homo sapien
tcagacagttccctcttcctgctgg

SEQ ID NO: 5160111 - DNA, 25 bp, Homo sapien
tgcaggtctgccatgacctcagaca

SEQ ID NO: 5160112 - DNA, 25 bp, Homo sapien
cctcatcagattccctgcaggtctg

SEQ ID NO: 5160113 - DNA, 25 bp, Homo sapien
ttcctgctggcagaatggccattct

SEQ ID NO: 5160114 - DNA, 25 bp, Homo sapien
gattggcattgcctttgcctgcggc

SEQ ID NO: 5160115 - DNA, 25 bp, Homo sapien
ggatgaggctgagcttcaccatgaa

SEQ ID NO: 5160116 - DNA, 25 bp, Homo sapien
tgctattacatgaatcacctgcggg

SEQ ID NO: 5160117 - DNA, 25 bp, Homo sapien
caaacgctggcgcaaattataggct

SEQ ID NO: 5160118 - DNA, 25 bp, Homo sapien
gatgccggcgggaagggctgccttc

SEQ ID NO: 5160119 - DNA, 25 bp, Homo sapien
agatgccggcgggaagggctgcctt

SEQ ID NO: 5160120 - DNA, 25 bp, Homo sapien
aaggtggaagatgccggcgggaagg

SEQ ID NO: 5160121 - DNA, 25 bp, Homo sapien
tcctgaaggtggaagatgccggcgg

SEQ ID NO: 5160122 - DNA, 25 bp, Homo sapien
catgatggaacctgagtgccttcaa

SEQ ID NO: 5160123 - DNA, 25 bp, Homo sapien
cgggcgacctggttccatgatggaa

SEQ ID NO: 5160124 - DNA, 25 bp, Homo sapien
atgcgcacccgctgatgcagaagga

SEQ ID NO: 5160125 - DNA, 25 bp, Homo sapien
taagcactgctcaccaatctgtgtc

SEQ ID NO: 5160126 - DNA, 25 bp, Homo sapien
tcaaagtcctgcttcacactcgctg

SEQ ID NO: 5160127 - DNA, 25 bp, Homo sapien
caaagtcctgcttcacactcgctgt

SEQ ID NO: 5160128 - DNA, 25 bp, Homo sapien
aaggtggacctcctcttgacagcca

SEQ ID NO: 5160129 - DNA, 25 bp, Homo sapien
gggcgtttgcaaagccttctgagaa

SEQ ID NO: 5160130 - DNA, 25 bp, Homo sapien
aatctgggagccagcaaggtggacc

SEQ ID NO: 5160131 - DNA, 25 bp, Homo sapien
gaacaggggcgtttgcaaagccttc

SEQ ID NO: 5160132 - DNA, 25 bp, Homo sapien
acagagcccgcctcttgctgaactt

SEQ ID NO: 5160133 - DNA, 25 bp, Homo sapien
tgtgatggccttaacccctttcctg

SEQ ID NO: 5160134 - DNA, 25 bp, Homo sapien
cgcctcttgctgaactttgtgatgg

SEQ ID NO: 5160135 - DNA, 25 bp, Homo sapien
tctgagcaacgagttctggtggccc

SEQ ID NO: 5160136 - DNA, 25 bp, Homo sapien
gcaggtgtcttatgtgaacggtaga

SEQ ID NO: 5160137 - DNA, 25 bp, Homo sapien
gaaggatactgccttcagcacatgg

SEQ ID NO: 5160138 - DNA, 25 bp, Homo sapien
cagccagggagaaggatactgcctt

SEQ ID NO: 5160139 - DNA, 25 bp, Homo sapien
ttatgtgaacggtagacttcccagc

SEQ ID NO: 5160140 - DNA, 25 bp, Homo sapien
tcatgggacaaactgaagccaaccg

SEQ ID NO: 5160141 - DNA, 25 bp, Homo sapien
gtctcatgggacaaactgaagccaa

SEQ ID NO: 5160142 - DNA, 25 bp, Homo sapien
tgggacaaactgaagccaaccgagg

SEQ ID NO: 5160143 - DNA, 25 bp, Homo sapien
acaaactgaagccaaccgaggtggg

SEQ ID NO: 5160144 - DNA, 25 bp, Homo sapien
gctagagtcatagcgagttgaggcc

SEQ ID NO: 5160145 - DNA, 25 bp, Homo sapien
gagaggagagcgcagcatggggccg

SEQ ID NO: 5160146 - DNA, 25 bp, Homo sapien
agagtcatagcgagttgaggccaga

SEQ ID NO: 5160147 - DNA, 25 bp, Homo sapien
agaggagagcgcagcatggggccgg

SEQ ID NO: 5160148 - DNA, 25 bp, Homo sapien
ctttgagttgtgagcccagtgcctg

SEQ ID NO: 5160149 - DNA, 25 bp, Homo sapien
gggacaaggcaacgcacagaaaatg

SEQ ID NO: 5160150 - DNA, 25 bp, Homo sapien
tcacaggctgttacgaggcccaaat

SEQ ID NO: 5160151 - DNA, 25 bp, Homo sapien
tcacagcgggcttatgggccatggc

SEQ ID NO: 5160152 - DNA, 25 bp, Homo sapien
taattgtgactttgatgtcctttat

SEQ ID NO: 5160153 - DNA, 25 bp, Homo sapien
ttcgatattgtcaagccttttcttc

SEQ ID NO: 5160154 - DNA, 25 bp, Homo sapien
ttctttaattgtgactttgatgtcc

SEQ ID NO: 5160155 - DNA, 25 bp, Homo sapien
aatctttaatttcgatattgtcaag

SEQ ID NO: 5160156 - DNA, 25 bp, Homo sapien
gacagcatcagcggggcagggggca

SEQ ID NO: 5160157 - DNA, 25 bp, Homo sapien
ctaaatgacagcatcagcggggcag

SEQ ID NO: 5160158 - DNA, 25 bp, Homo sapien
aatgacagcatcagcggggcagggg

SEQ ID NO: 5160159 - DNA, 25 bp, Homo sapien
taaatgacagcatcagcggggcagg

SEQ ID NO: 5160160 - DNA, 25 bp, Homo sapien
tcggcccacatccaaacccagccag

SEQ ID NO: 5160161 - DNA, 25 bp, Homo sapien
cagttctcggcccacatccaaaccc

SEQ ID NO: 5160162 - DNA, 25 bp, Homo sapien
accagagacaggacgtctgctgaac

SEQ ID NO: 5160163 - DNA, 25 bp, Homo sapien
acgtctgctgaacctacattatctg

SEQ ID NO: 5160164 - DNA, 25 bp, Homo sapien
tctctttaaaaggccctttgctggc

SEQ ID NO: 5160165 - DNA, 25 bp, Homo sapien
aaacaggggctccacactgggccag

SEQ ID NO: 5160166 - DNA, 25 bp, Homo sapien
ggccagggggagcatctgaagccac

SEQ ID NO: 5160167 - DNA, 25 bp, Homo sapien
gctcagcatcaaaacaggggctcca

SEQ ID NO: 5160168 - DNA, 25 bp, Homo sapien
agcatcaaaacaggggctccacact

SEQ ID NO: 5160169 - DNA, 25 bp, Homo sapien
aggaaagcagagggcgaggatttca

SEQ ID NO: 5160170 - DNA, 25 bp, Homo sapien
gcagagggcgaggatttcagcagag

SEQ ID NO: 5160171 - DNA, 25 bp, Homo sapien
aaagcagagggcgaggatttcagca

SEQ ID NO: 5160172 - DNA, 25 bp, Homo sapien
gagggcgaggatttcagcagagagg

SEQ ID NO: 5160173 - DNA, 25 bp, Homo sapien
ccagggacctgatatcagcagggca

SEQ ID NO: 5160174 - DNA, 25 bp, Homo sapien
caggcgacaaccgtaagaacacaca

SEQ ID NO: 5160175 - DNA, 25 bp, Homo sapien
atatcagcagggcaggcgacaaccg

SEQ ID NO: 5160176 - DNA, 25 bp, Homo sapien
gctccagggacctgatatcagcagg

SEQ ID NO: 5160177 - DNA, 25 bp, Homo sapien
actctggcaggataagggtcaggta

SEQ ID NO: 5160178 - DNA, 25 bp, Homo sapien
ccttggagatggatcactgggcttg

SEQ ID NO: 5160179 - DNA, 25 bp, Homo sapien
taggcaatgctgatgtcaggaggcc

SEQ ID NO: 5160180 - DNA, 25 bp, Homo sapien
tttctctgactctggcaggataagg

SEQ ID NO: 5160181 - DNA, 25 bp, Homo sapien
acaactatccctgcctgcagttgga

SEQ ID NO: 5160182 - DNA, 25 bp, Homo sapien
tcacaactatccctgcctgcagttg

SEQ ID NO: 5160183 - DNA, 25 bp, Homo sapien
cctgcagttggaacagcaactcttg

SEQ ID NO: 5160184 - DNA, 25 bp, Homo sapien
tgcctgcagttggaacagcaactct

SEQ ID NO: 5160185 - DNA, 25 bp, Homo sapien
gggtgctgcgtataatgctgagaat

SEQ ID NO: 5160186 - DNA, 25 bp, Homo sapien
aatgctgagaattgacgatgatacc

SEQ ID NO: 5160187 - DNA, 25 bp, Homo sapien
ttgacgatgataccaagtctctcac

SEQ ID NO: 5160188 - DNA, 25 bp, Homo sapien
ttttgctgtgttccttaggctctga

SEQ ID NO: 5160189 - DNA, 25 bp, Homo sapien
tcaatggttaccattggtatttgca

SEQ ID NO: 5160190 - DNA, 25 bp, Homo sapien
gtggcagcaacttcagctgtgctgg

SEQ ID NO: 5160191 - DNA, 25 bp, Homo sapien
aggtggcagcaacttcagctgtgct

SEQ ID NO: 5160192 - DNA, 25 bp, Homo sapien
ggcagcaacttcagctgtgctggtc

SEQ ID NO: 5160193 - DNA, 25 bp, Homo sapien
tcaggtggcagcaacttcagctgtg

SEQ ID NO: 5160194 - DNA, 25 bp, Homo sapien
tcccctgctagatgagggctcctca

SEQ ID NO: 5160195 - DNA, 25 bp, Homo sapien
tgtcccctgctagatgagggctcct

SEQ ID NO: 5160196 - DNA, 25 bp, Homo sapien
gggctcctcaagtgcaggactttgt

SEQ ID NO: 5160197 - DNA, 25 bp, Homo sapien
ccctgctagatgagggctcctcaag

SEQ ID NO: 5160198 - DNA, 25 bp, Homo sapien
acccatacttaagaagaagctacca

SEQ ID NO: 5160199 - DNA, 25 bp, Homo sapien
cagagaggtgaccaggcgggacttg

SEQ ID NO: 5160200 - DNA, 25 bp, Homo sapien
ccatacttaagaagaagctaccaag

SEQ ID NO: 5160201 - DNA, 25 bp, Homo sapien
cccatacttaagaagaagctaccaa

SEQ ID NO: 5160202 - DNA, 25 bp, Homo sapien
tacacaggacatcgaaagcacagga

SEQ ID NO: 5160203 - DNA, 25 bp, Homo sapien
caggacatcgaaagcacaggaagtt

SEQ ID NO: 5160204 - DNA, 25 bp, Homo sapien
ttccaacaggtaactcatacacagg

SEQ ID NO: 5160205 - DNA, 25 bp, Homo sapien
taactcatacacaggacatcgaaag

SEQ ID NO: 5160206 - DNA, 25 bp, Homo sapien
tccccagcccccacagggccttcat

SEQ ID NO: 5160207 - DNA, 25 bp, Homo sapien
ctccccagcccccacagggccttca

SEQ ID NO: 5160208 - DNA, 25 bp, Homo sapien
cagggcccctccccagcccccacag

SEQ ID NO: 5160209 - DNA, 25 bp, Homo sapien
gtttctgcagggcccctccccagcc

SEQ ID NO: 5160210 - DNA, 25 bp, Homo sapien
ctgttgaagcctgttttggaccatc

SEQ ID NO: 5160211 - DNA, 25 bp, Homo sapien
tgggaggcgaggaagagcccatggc

SEQ ID NO: 5160212 - DNA, 25 bp, Homo sapien
aagagcccatggcaccatctgactt

SEQ ID NO: 5160213 - DNA, 25 bp, Homo sapien
ggtcctcaccggctgatgctttggg

SEQ ID NO: 5160214 - DNA, 25 bp, Homo sapien
ggcactggggcgctaaggtcctcac

SEQ ID NO: 5160215 - DNA, 25 bp, Homo sapien
tgctctgttgcttgggcactgccca

SEQ ID NO: 5160216 - DNA, 25 bp, Homo sapien
ctgttgcttgggcactgcccattta

SEQ ID NO: 5160217 - DNA, 25 bp, Homo sapien
ctctgttgcttgggcactgcccatt

SEQ ID NO: 5160218 - DNA, 25 bp, Homo sapien
ctgctctgttgcttgggcactgccc

SEQ ID NO: 5160219 - DNA, 25 bp, Homo sapien
cagtttgatctcctccaatcatcca

SEQ ID NO: 5160220 - DNA, 25 bp, Homo sapien
gccatttgcgttttcctcatcagtt

SEQ ID NO: 5160221 - DNA, 25 bp, Homo sapien
tgctgggtggacatgtgaagtaaaa

SEQ ID NO: 5160222 - DNA, 25 bp, Homo sapien
tgaaggatgccatttgcgttttcct

SEQ ID NO: 5160223 - DNA, 25 bp, Homo sapien
gcttccaggacccaccatgttgctg

SEQ ID NO: 5160224 - DNA, 25 bp, Homo sapien
aaagcccctttgacaggcctgtcaa

SEQ ID NO: 5160225 - DNA, 25 bp, Homo sapien
tcaaagcggtcaggtttctgagatg

SEQ ID NO: 5160226 - DNA, 25 bp, Homo sapien
agcccctttgacaggcctgtcaact

SEQ ID NO: 5160227 - DNA, 25 bp, Homo sapien
caaagcccctttgacaggcctgtca

SEQ ID NO: 5160228 - DNA, 25 bp, Homo sapien
cacaggccaccctcggtccaaattc

SEQ ID NO: 5160229 - DNA, 25 bp, Homo sapien
gatcacaggccaccctcggtccaaa

SEQ ID NO: 5160230 - DNA, 25 bp, Homo sapien
aagactctcgaaagagctgatcaca

SEQ ID NO: 5160231 - DNA, 25 bp, Homo sapien
ggaagactctcgaaagagctgatca

SEQ ID NO: 5160232 - DNA, 25 bp, Homo sapien
cttggccaggacaggtttctatgag

SEQ ID NO: 5160233 - DNA, 25 bp, Homo sapien
ctgtaggacaggtcataggtatgcc

SEQ ID NO: 5160234 - DNA, 25 bp, Homo sapien
ggcacacgggtggagcactgatggt

SEQ ID NO: 5160235 - DNA, 25 bp, Homo sapien
tggagcttggcaggtctggcgatgc

SEQ ID NO: 5160236 - DNA, 25 bp, Homo sapien
ccaagcatgcaaagtatgggaaact

SEQ ID NO: 5160237 - DNA, 25 bp, Homo sapien
gcctgcagagttgggtgcgagctca

SEQ ID NO: 5160238 - DNA, 25 bp, Homo sapien
tcctcgctggtgtcccaggatccca

SEQ ID NO: 5160239 - DNA, 25 bp, Homo sapien
tgggcccactcgagaggagtacttt

SEQ ID NO: 5160240 - DNA, 25 bp, Homo sapien
cggttctgtcgttccttcctggaga

SEQ ID NO: 5160241 - DNA, 25 bp, Homo sapien
gagatccaggcaccaaaactttgca

SEQ ID NO: 5160242 - DNA, 25 bp, Homo sapien
gaggcccagagaacctgctgaacaa

SEQ ID NO: 5160243 - DNA, 25 bp, Homo sapien
aactgtatgtaggtggcagagatcc

SEQ ID NO: 5160244 - DNA, 25 bp, Homo sapien
caggagccacggagggccacaccat

SEQ ID NO: 5160245 - DNA, 25 bp, Homo sapien
cagcaggagccacggagggccacac

SEQ ID NO: 5160246 - DNA, 25 bp, Homo sapien
gagctggcagtgagcagtggccggg

SEQ ID NO: 5160247 - DNA, 25 bp, Homo sapien
gcagcaggagccacggagggccaca

SEQ ID NO: 5160248 - DNA, 25 bp, Homo sapien
gagcgccaagctgttggcggtgcct

SEQ ID NO: 5160249 - DNA, 25 bp, Homo sapien
atggggtttgcatttgtcgagaaca

SEQ ID NO: 5160250 - DNA, 25 bp, Homo sapien
gtttgcatttgtcgagaacagcaaa

SEQ ID NO: 5160251 - DNA, 25 bp, Homo sapien
gggtttgcatttgtcgagaacagca

SEQ ID NO: 5160252 - DNA, 25 bp, Homo sapien
gagctgacaggatcaggcagcacca

SEQ ID NO: 5160253 - DNA, 25 bp, Homo sapien
tcatccccgaatcaggagagcgtgg

SEQ ID NO: 5160254 - DNA, 25 bp, Homo sapien
tcaggtgtgccagaagcaagtgaca

SEQ ID NO: 5160255 - DNA, 25 bp, Homo sapien
tttcaggctctgcaagcagcctctg

SEQ ID NO: 5160256 - DNA, 25 bp, Homo sapien
acagacaagtgtgcatccagaatga

SEQ ID NO: 5160257 - DNA, 25 bp, Homo sapien
agagacaggacacgctcaggagcta

SEQ ID NO: 5160258 - DNA, 25 bp, Homo sapien
tctggtgtggtccagaagagctgaa

SEQ ID NO: 5160259 - DNA, 25 bp, Homo sapien
aagggctgaggcaagacaccagtga

SEQ ID NO: 5160260 - DNA, 25 bp, Homo sapien
tcaccctgctccacgctgatgaaca

SEQ ID NO: 5160261 - DNA, 25 bp, Homo sapien
agaagaaggcgccgcggttatgccc

SEQ ID NO: 5160262 - DNA, 25 bp, Homo sapien
acgctgatgaacagccggcaggggc

SEQ ID NO: 5160263 - DNA, 25 bp, Homo sapien
aggcgccgcggttatgcccttggcc

SEQ ID NO: 5160264 - DNA, 25 bp, Homo sapien
agttgtggagcccttgggatcttcc

SEQ ID NO: 5160265 - DNA, 25 bp, Homo sapien
tgcaggtggagttgtggagcccttg

SEQ ID NO: 5160266 - DNA, 25 bp, Homo sapien
gaagcccacagctctagccgctctg

SEQ ID NO: 5160267 - DNA, 25 bp, Homo sapien
tctgatgttggcactcctgcaggtg

SEQ ID NO: 5160268 - DNA, 25 bp, Homo sapien
acaacatggcaagtggatcaaatag

SEQ ID NO: 5160269 - DNA, 25 bp, Homo sapien
actcctccactcagatttgactcca

SEQ ID NO: 5160270 - DNA, 25 bp, Homo sapien
acatggcaagtggatcaaatagctt

SEQ ID NO: 5160271 - DNA, 25 bp, Homo sapien
gatttgactccatagcgcggaggac

SEQ ID NO: 5160272 - DNA, 25 bp, Homo sapien
ttcctctccagacatcttgaagggg

SEQ ID NO: 5160273 - DNA, 25 bp, Homo sapien
cctctccagacatcttgaagggggg

SEQ ID NO: 5160274 - DNA, 25 bp, Homo sapien
tcctctccagacatcttgaaggggg

SEQ ID NO: 5160275 - DNA, 25 bp, Homo sapien
cttcctctccagacatcttgaaggg

SEQ ID NO: 5160276 - DNA, 25 bp, Homo sapien
ctcctgtgagagctggcaaaagctt

SEQ ID NO: 5160277 - DNA, 25 bp, Homo sapien
cctgtgagagctggcaaaagctttc

SEQ ID NO: 5160278 - DNA, 25 bp, Homo sapien
acatccacggaaaagagcacccggg

SEQ ID NO: 5160279 - DNA, 25 bp, Homo sapien
aaagctttccaagttcacatccacg

SEQ ID NO: 5160280 - DNA, 25 bp, Homo sapien
ttttgcttagcaccactgccctcac

SEQ ID NO: 5160281 - DNA, 25 bp, Homo sapien
attttgcttagcaccactgccctca

SEQ ID NO: 5160282 - DNA, 25 bp, Homo sapien
caatgtccagacaggtgtgggccag

SEQ ID NO: 5160283 - DNA, 25 bp, Homo sapien
cagggatagaagaggtcctggtgcc

SEQ ID NO: 5160284 - DNA, 25 bp, Homo sapien
ggtgtggacactgggtttcaatgtc

SEQ ID NO: 5160285 - DNA, 25 bp, Homo sapien
ggccaggtgctcctttagacaggga

SEQ ID NO: 5160286 - DNA, 25 bp, Homo sapien
tctttccggtctggcttccgtctcg

SEQ ID NO: 5160287 - DNA, 25 bp, Homo sapien
tgtcctggtccctgtcttcgggcca

SEQ ID NO: 5160288 - DNA, 25 bp, Homo sapien
gcttccgtctcgtgctgtcttcatc

SEQ ID NO: 5160289 - DNA, 25 bp, Homo sapien
ctatgtggtgtcgtctttccggtct

SEQ ID NO: 5160290 - DNA, 25 bp, Homo sapien
gacatggccacctcttttggcttgg

SEQ ID NO: 5160291 - DNA, 25 bp, Homo sapien
ttttggcttggggtcatcagcctgg

SEQ ID NO: 5160292 - DNA, 25 bp, Homo sapien
aagagcatattggacatggccacct

SEQ ID NO: 5160293 - DNA, 25 bp, Homo sapien
cacaaagagcatattggacatggcc

SEQ ID NO: 5160294 - DNA, 25 bp, Homo sapien
aaggaacaagtaaatctgtcactgt

SEQ ID NO: 5160295 - DNA, 25 bp, Homo sapien
gtacataccactaaactcaaaccac

SEQ ID NO: 5160296 - DNA, 25 bp, Homo sapien
gaacaagtaaatctgtcactgttta

SEQ ID NO: 5160297 - DNA, 25 bp, Homo sapien
aattagttgtacataccactaaact

SEQ ID NO: 5160298 - DNA, 25 bp, Homo sapien
acctcagcctgaggtccaaggccat

SEQ ID NO: 5160299 - DNA, 25 bp, Homo sapien
cgctcggtctccagccaggggacag

SEQ ID NO: 5160300 - DNA, 25 bp, Homo sapien
ctggggtccacacctcagcctgagg

SEQ ID NO: 5160301 - DNA, 25 bp, Homo sapien
cagggacctggggtccacacctcag

SEQ ID NO: 5160302 - DNA, 25 bp, Homo sapien
gattcaaaaggtatacacagtgtca

SEQ ID NO: 5160303 - DNA, 25 bp, Homo sapien
cagtgacccatacccttgtgaaaaa

SEQ ID NO: 5160304 - DNA, 25 bp, Homo sapien
taatctagtacatgaaatatgcaca

SEQ ID NO: 5160305 - DNA, 25 bp, Homo sapien
gaccaactagtcatggtatgatatg

SEQ ID NO: 5160306 - DNA, 25 bp, Homo sapien
cacacatttttggtggtcccagcga

SEQ ID NO: 5160307 - DNA, 25 bp, Homo sapien
ccagcgacttaaggtgtggatggct

SEQ ID NO: 5160308 - DNA, 25 bp, Homo sapien
aggaaaggccagcattgttgttctc

SEQ ID NO: 5160309 - DNA, 25 bp, Homo sapien
cagcagatttttggcgacgaagacc

SEQ ID NO: 5160310 - DNA, 25 bp, Homo sapien
cagcctgtatggaggtgccacacgg

SEQ ID NO: 5160311 - DNA, 25 bp, Homo sapien
cccaggaggcctaaggagttttcag

SEQ ID NO: 5160312 - DNA, 25 bp, Homo sapien
gctttttgaagctttcactcccaag

SEQ ID NO: 5160313 - DNA, 25 bp, Homo sapien
tgtctgcagagcttggacccaattc

SEQ ID NO: 5160314 - DNA, 25 bp, Homo sapien
cattgtggtgtcagccgatgatggc

SEQ ID NO: 5160315 - DNA, 25 bp, Homo sapien
aggccctcctgttatgaccgtccat

SEQ ID NO: 5160316 - DNA, 25 bp, Homo sapien
caggtcacttcaggccctcctgtta

SEQ ID NO: 5160317 - DNA, 25 bp, Homo sapien
cctcgactccgcagtggtggctcgg

SEQ ID NO: 5160318 - DNA, 25 bp, Homo sapien
tgcaccataattccctcctgccatt

SEQ ID NO: 5160319 - DNA, 25 bp, Homo sapien
ctgaccagcaggccatagagcaggg

SEQ ID NO: 5160320 - DNA, 25 bp, Homo sapien
tgccattctcaaacctctggaaaag

SEQ ID NO: 5160321 - DNA, 25 bp, Homo sapien
ttgtatctggtgctcgccatgtttg

SEQ ID NO: 5160322 - DNA, 25 bp, Homo sapien
ccgttgacgggcagaaagagggccg

SEQ ID NO: 5160323 - DNA, 25 bp, Homo sapien
cgtgaacttgataacaagggaggag

SEQ ID NO: 5160324 - DNA, 25 bp, Homo sapien
ctgttgggtccaagaacgtgaactt

SEQ ID NO: 5160325 - DNA, 25 bp, Homo sapien
ctgtaaatggtcattctcactggga

SEQ ID NO: 5160326 - DNA, 25 bp, Homo sapien
tgtcgtcccttcgtttacaatctct

SEQ ID NO: 5160327 - DNA, 25 bp, Homo sapien
gtcgtcccttcgtttacaatctcta

SEQ ID NO: 5160328 - DNA, 25 bp, Homo sapien
cgtcccttcgtttacaatctctata

SEQ ID NO: 5160329 - DNA, 25 bp, Homo sapien
cctgtcgtcccttcgtttacaatct

SEQ ID NO: 5160330 - DNA, 25 bp, Homo sapien
gaaagcccatgtgaagcgactgtct

SEQ ID NO: 5160331 - DNA, 25 bp, Homo sapien
tgtgtggtccttccacggctgacgc

SEQ ID NO: 5160332 - DNA, 25 bp, Homo sapien
tcctgcctgtttattgagggctccg

SEQ ID NO: 5160333 - DNA, 25 bp, Homo sapien
gattttagctctgtcctcggcgtgc

SEQ ID NO: 5160334 - DNA, 25 bp, Homo sapien
gagggctgatgtcgggggcgaaggc

SEQ ID NO: 5160335 - DNA, 25 bp, Homo sapien
gggctgaacggcaggagctgatctg

SEQ ID NO: 5160336 - DNA, 25 bp, Homo sapien
ggcttggggctgaacggcaggagct

SEQ ID NO: 5160337 - DNA, 25 bp, Homo sapien
gctgaacggcaggagctgatctgaa

SEQ ID NO: 5160338 - DNA, 25 bp, Homo sapien
tttgcctctagcacgcaggtggcct

SEQ ID NO: 5160339 - DNA, 25 bp, Homo sapien
aaaagtttgcctctagcacgcaggt

SEQ ID NO: 5160340 - DNA, 25 bp, Homo sapien
gcaggtggcctctcgggcgccgggc

SEQ ID NO: 5160341 - DNA, 25 bp, Homo sapien
gagacaaaagtttgcctctagcacg

SEQ ID NO: 5160342 - DNA, 25 bp, Homo sapien
tattcttgatcacagatgcggtgcc

SEQ ID NO: 5160343 - DNA, 25 bp, Homo sapien
tgaacgttttagacatcgcatcatc

SEQ ID NO: 5160344 - DNA, 25 bp, Homo sapien
gatgtgtcggtaaagcagcacatgt

SEQ ID NO: 5160345 - DNA, 25 bp, Homo sapien
tatagcattattgtaggagtccacg

SEQ ID NO: 5160346 - DNA, 25 bp, Homo sapien
cctcgccacacacacgaagactgtg

SEQ ID NO: 5160347 - DNA, 25 bp, Homo sapien
ctgagctgcatccttaagacacctt

SEQ ID NO: 5160348 - DNA, 25 bp, Homo sapien
ctcgccacacacacgaagactgtga

SEQ ID NO: 5160349 - DNA, 25 bp, Homo sapien
gagctgcatccttaagacaccttcc

SEQ ID NO: 5160350 - DNA, 25 bp, Homo sapien
gccaacgagcccagccaagaatttt

SEQ ID NO: 5160351 - DNA, 25 bp, Homo sapien
caccacccagattcaaaagattctc

SEQ ID NO: 5160352 - DNA, 25 bp, Homo sapien
gagccaacgagcccagccaagaatt

SEQ ID NO: 5160353 - DNA, 25 bp, Homo sapien
ctccaccacccagattcaaaagatt

SEQ ID NO: 5160354 - DNA, 25 bp, Homo sapien
ccgctcatcgtcctgggtggcaatc

SEQ ID NO: 5160355 - DNA, 25 bp, Homo sapien
gccgctcatcgtcctgggtggcaat

SEQ ID NO: 5160356 - DNA, 25 bp, Homo sapien
cttcttgcttctcggaggcagtggc

SEQ ID NO: 5160357 - DNA, 25 bp, Homo sapien
ttcttgcttctcggaggcagtggct

SEQ ID NO: 5160358 - DNA, 25 bp, Homo sapien
gcttcttgcttctcggaggcagtgg

SEQ ID NO: 5160359 - DNA, 25 bp, Homo sapien
tccttgggcagctaccgctgctgct

SEQ ID NO: 5160360 - DNA, 25 bp, Homo sapien
ctccttgggcagctaccgctgctgc

SEQ ID NO: 5160361 - DNA, 25 bp, Homo sapien
gctgcagccaccaccaaaggagagg

SEQ ID NO: 5160362 - DNA, 25 bp, Homo sapien
agccaccaccaaaggagaggccttt

SEQ ID NO: 5160363 - DNA, 25 bp, Homo sapien
gcagcaaacgcttctggcccatgaa

SEQ ID NO: 5160364 - DNA, 25 bp, Homo sapien
ggctgagtgcccaactcctcagtgg

SEQ ID NO: 5160365 - DNA, 25 bp, Homo sapien
gaagacccttgggtacccctcatgc

SEQ ID NO: 5160366 - DNA, 25 bp, Homo sapien
ttctcctacaccattccagtcccag

SEQ ID NO: 5160367 - DNA, 25 bp, Homo sapien
cacatctggataccttacagatgcc

SEQ ID NO: 5160368 - DNA, 25 bp, Homo sapien
tgtactgtttcaaccaactcaagcc

SEQ ID NO: 5160369 - DNA, 25 bp, Homo sapien
gccatgcaattctagccgtggaatg

SEQ ID NO: 5160370 - DNA, 25 bp, Homo sapien
tagccgtggaatggaagctctcgga

SEQ ID NO: 5160371 - DNA, 25 bp, Homo sapien
gtgactctaagtggaaacacccagc

SEQ ID NO: 5160372 - DNA, 25 bp, Homo sapien
cccaacaggtccgacctcatggact

SEQ ID NO: 5160373 - DNA, 25 bp, Homo sapien
atagtgactctaagtggaaacaccc

SEQ ID NO: 5160374 - DNA, 25 bp, Homo sapien
ccaacaggtccgacctcatggactc

SEQ ID NO: 5160375 - DNA, 25 bp, Homo sapien
atagtgattgtcacgagagtctaag

SEQ ID NO: 5160376 - DNA, 25 bp, Homo sapien
tgtcacgagagtctaaggcttggcc

SEQ ID NO: 5160377 - DNA, 25 bp, Homo sapien
aggcttggccagctttagtaacctt

SEQ ID NO: 5160378 - DNA, 25 bp, Homo sapien
gattgtcacgagagtctaaggcttg

SEQ ID NO: 5160379 - DNA, 25 bp, Homo sapien
tcccagtagctctctcattctttaa

SEQ ID NO: 5160380 - DNA, 25 bp, Homo sapien
ttcccagtagctctctcattcttta

SEQ ID NO: 5160381 - DNA, 25 bp, Homo sapien
ccagtagctctctcattctttaagg

SEQ ID NO: 5160382 - DNA, 25 bp, Homo sapien
cccagtagctctctcattctttaag

SEQ ID NO: 5160383 - DNA, 25 bp, Homo sapien
ggaaaagagaggtcagagcccgcat

SEQ ID NO: 5160384 - DNA, 25 bp, Homo sapien
ccaggaaaagagaggtcagagcccg

SEQ ID NO: 5160385 - DNA, 25 bp, Homo sapien
acacagcccaggagaaaaagttcca

SEQ ID NO: 5160386 - DNA, 25 bp, Homo sapien
cagcccaggagaaaaagttccagga

SEQ ID NO: 5160387 - DNA, 25 bp, Homo sapien
tgggccagcaccagaggttcagaga

SEQ ID NO: 5160388 - DNA, 25 bp, Homo sapien
gggccagcaccagaggttcagagac

SEQ ID NO: 5160389 - DNA, 25 bp, Homo sapien
ctgggccagcaccagaggttcagag

SEQ ID NO: 5160390 - DNA, 25 bp, Homo sapien
ttcaggcagctgtgaacctcaacca

SEQ ID NO: 5160391 - DNA, 25 bp, Homo sapien
gcaaggccccagtgttcaggcagct

SEQ ID NO: 5160392 - DNA, 25 bp, Homo sapien
tctgcaaggccccagtgttcaggca

SEQ ID NO: 5160393 - DNA, 25 bp, Homo sapien
agctgtgaacctcaaccagatgcag

SEQ ID NO: 5160394 - DNA, 25 bp, Homo sapien
tgcggccgctgcatgtcaaacacag

SEQ ID NO: 5160395 - DNA, 25 bp, Homo sapien
acggtgtgcggccgctgcatgtcaa

SEQ ID NO: 5160396 - DNA, 25 bp, Homo sapien
gtgtgcggccgctgcatgtcaaaca

SEQ ID NO: 5160397 - DNA, 25 bp, Homo sapien
gtgcggccgctgcatgtcaaacaca

SEQ ID NO: 5160398 - DNA, 25 bp, Homo sapien
tcgtgaacgtaagagccaaagctca

SEQ ID NO: 5160399 - DNA, 25 bp, Homo sapien
cagcgctcgtgaacgtaagagccaa

SEQ ID NO: 5160400 - DNA, 25 bp, Homo sapien
tgagccccagcgctcgtgaacgtaa

SEQ ID NO: 5160401 - DNA, 25 bp, Homo sapien
tcccggggtggcgagggacaatcac

SEQ ID NO: 5160402 - DNA, 25 bp, Homo sapien
tccttatagccaggtgcactcacag

SEQ ID NO: 5160403 - DNA, 25 bp, Homo sapien
aggagcacactccttatagccaggt

SEQ ID NO: 5160404 - DNA, 25 bp, Homo sapien
actccttatagccaggtgcactcac

SEQ ID NO: 5160405 - DNA, 25 bp, Homo sapien
cacactccttatagccaggtgcact

SEQ ID NO: 5160406 - DNA, 25 bp, Homo sapien
ggtgcacgctcacagtcaggtgcat

SEQ ID NO: 5160407 - DNA, 25 bp, Homo sapien
ccggtgcacgctcacagtcaggtgc

SEQ ID NO: 5160408 - DNA, 25 bp, Homo sapien
gtccggtgcacgctcacagtcaggt

SEQ ID NO: 5160409 - DNA, 25 bp, Homo sapien
agtccggtgcacgctcacagtcagg

SEQ ID NO: 5160410 - DNA, 25 bp, Homo sapien
ggacatggagggagggctgtcatca

SEQ ID NO: 5160411 - DNA, 25 bp, Homo sapien
gagggctgtcatcaaggcagctttc

SEQ ID NO: 5160412 - DNA, 25 bp, Homo sapien
gagggagggctgtcatcaaggcagc

SEQ ID NO: 5160413 - DNA, 25 bp, Homo sapien
agggatctgatgtctgcaggaagca

SEQ ID NO: 5160414 - DNA, 25 bp, Homo sapien
gacactcgggtttggctgtgccaac

SEQ ID NO: 5160415 - DNA, 25 bp, Homo sapien
agacactcgggtttggctgtgccaa

SEQ ID NO: 5160416 - DNA, 25 bp, Homo sapien
acactcgggtttggctgtgccaact

SEQ ID NO: 5160417 - DNA, 25 bp, Homo sapien
tgagagctcgaatgtcctcggagtc

SEQ ID NO: 5160418 - DNA, 25 bp, Homo sapien
tctgtctggggttgagagctcgaat

SEQ ID NO: 5160419 - DNA, 25 bp, Homo sapien
ggttgagagctcgaatgtcctcgga

SEQ ID NO: 5160420 - DNA, 25 bp, Homo sapien
tctggggttgagagctcgaatgtcc

SEQ ID NO: 5160421 - DNA, 25 bp, Homo sapien
gtttcagccatacgatcaacaaggg

SEQ ID NO: 5160422 - DNA, 25 bp, Homo sapien
cacgtagggccagataacaaaggga

SEQ ID NO: 5160423 - DNA, 25 bp, Homo sapien
aaaacaacagcgtagcgacttcgag

SEQ ID NO: 5160424 - DNA, 25 bp, Homo sapien
tttagcgaccatgcagtgagaggac

SEQ ID NO: 5160425 - DNA, 25 bp, Homo sapien
ccagactggcttgcaatggtcctcc

SEQ ID NO: 5160426 - DNA, 25 bp, Homo sapien
gcacacagaagaccctcggtaaata

SEQ ID NO: 5160427 - DNA, 25 bp, Homo sapien
catactctgagcaggctagaaggca

SEQ ID NO: 5160428 - DNA, 25 bp, Homo sapien
cacgcattctgctctgcactggaat

SEQ ID NO: 5160429 - DNA, 25 bp, Homo sapien
gggcctttctgaggataccaatggg

SEQ ID NO: 5160430 - DNA, 25 bp, Homo sapien
tagtcaaatactccatcacctgcct

SEQ ID NO: 5160431 - DNA, 25 bp, Homo sapien
tggacgttgctctttcacatagcag

SEQ ID NO: 5160432 - DNA, 25 bp, Homo sapien
tcctcctgaattccgctgctttggg

SEQ ID NO: 5160433 - DNA, 25 bp, Homo sapien
taatgggtgacatgaaacacgaccc

SEQ ID NO: 5160434 - DNA, 25 bp, Homo sapien
taagaaccccatgctaggcaaacag

SEQ ID NO: 5160435 - DNA, 25 bp, Homo sapien
cgtgtcccaggcattgaaagcagaa

SEQ ID NO: 5160436 - DNA, 25 bp, Homo sapien
tccaagtgtgttctgggccaacagc

SEQ ID NO: 5160437 - DNA, 25 bp, Homo sapien
ctgcttatggataaccagcctccgg

SEQ ID NO: 5160438 - DNA, 25 bp, Homo sapien
tgcttatggataaccagcctccggc

SEQ ID NO: 5160439 - DNA, 25 bp, Homo sapien
cttatggataaccagcctccggcca

SEQ ID NO: 5160440 - DNA, 25 bp, Homo sapien
ttcctgcttatggataaccagcctc

SEQ ID NO: 5160441 - DNA, 25 bp, Homo sapien
gcgcagggaacatcaagtggccgcc

SEQ ID NO: 5160442 - DNA, 25 bp, Homo sapien
gaatcatttataaccggcggcggcc

SEQ ID NO: 5160443 - DNA, 25 bp, Homo sapien
ctttctcagactagggcccgcatga

SEQ ID NO: 5160444 - DNA, 25 bp, Homo sapien
ggagaagctgacgtcggcatgcctt

SEQ ID NO: 5160445 - DNA, 25 bp, Homo sapien
ctgagtcagtgttaaagcccaggct

SEQ ID NO: 5160446 - DNA, 25 bp, Homo sapien
gcctgagtcagtgttaaagcccagg

SEQ ID NO: 5160447 - DNA, 25 bp, Homo sapien
tgctgcctgagtcagtgttaaagcc

SEQ ID NO: 5160448 - DNA, 25 bp, Homo sapien
agtcagtgttaaagcccaggctctg

SEQ ID NO: 5160449 - DNA, 25 bp, Homo sapien
ggctttgggataaagaggctcctat

SEQ ID NO: 5160450 - DNA, 25 bp, Homo sapien
cctatggacatccatggcaggggct

SEQ ID NO: 5160451 - DNA, 25 bp, Homo sapien
tgtgtgggcaccaggaaagcaggga

SEQ ID NO: 5160452 - DNA, 25 bp, Homo sapien
gagtaaacactcatggagcgtccac

SEQ ID NO: 5160453 - DNA, 25 bp, Homo sapien
tgtgacgtcgtggttgtcatgccca

SEQ ID NO: 5160454 - DNA, 25 bp, Homo sapien
tctggcacaatgtgacgtcgtggtt

SEQ ID NO: 5160455 - DNA, 25 bp, Homo sapien
ttttgcctctggcacaatgtgacgt

SEQ ID NO: 5160456 - DNA, 25 bp, Homo sapien
ttgtcatgcccagaccccgggggtc

SEQ ID NO: 5160457 - DNA, 25 bp, Homo sapien
ggagcccgcacagaccgggctctgt

SEQ ID NO: 5160458 - DNA, 25 bp, Homo sapien
aaggaggcaccaggcggttgaacac

SEQ ID NO: 5160459 - DNA, 25 bp, Homo sapien
cagaccgggctctgttggctgggag

SEQ ID NO: 5160460 - DNA, 25 bp, Homo sapien
cggttgaacaccgtcactctggcca

SEQ ID NO: 5160461 - DNA, 25 bp, Homo sapien
gacatctaccacttgccatgtggga

SEQ ID NO: 5160462 - DNA, 25 bp, Homo sapien
caggctccggctggaattgatctaa

SEQ ID NO: 5160463 - DNA, 25 bp, Homo sapien
tttggaaatccaacacgcagcccag

SEQ ID NO: 5160464 - DNA, 25 bp, Homo sapien
gaatattcccaggtcgcctgagctg

SEQ ID NO: 5160465 - DNA, 25 bp, Homo sapien
gctagtgaagacacgtgacgtaatt

SEQ ID NO: 5160466 - DNA, 25 bp, Homo sapien
aagcatagatgtcccgaaggaggcc

SEQ ID NO: 5160467 - DNA, 25 bp, Homo sapien
tgaagacacgtgacgtaattcgcat

SEQ ID NO: 5160468 - DNA, 25 bp, Homo sapien
cacggcttgcttacttgaggacaag

SEQ ID NO: 5160469 - DNA, 25 bp, Homo sapien
tcagtgaagactggcattggtcaca

SEQ ID NO: 5160470 - DNA, 25 bp, Homo sapien
cacgtcatccaacaacaaggacaaa

SEQ ID NO: 5160471 - DNA, 25 bp, Homo sapien
cctccacgtcatccaacaacaagga

SEQ ID NO: 5160472 - DNA, 25 bp, Homo sapien
ttctccctccacgtcatccaacaac

SEQ ID NO: 5160473 - DNA, 25 bp, Homo sapien
tccacgtcatccaacaacaaggaca

SEQ ID NO: 5160474 - DNA, 25 bp, Homo sapien
gaaagagccggaagggaaaagagca

SEQ ID NO: 5160475 - DNA, 25 bp, Homo sapien
ctggcagtttagcaggatcctgggc

SEQ ID NO: 5160476 - DNA, 25 bp, Homo sapien
ggccatcacctggtgtgtgtttaaa

SEQ ID NO: 5160477 - DNA, 25 bp, Homo sapien
gacctgtggattcagaagctggcag

SEQ ID NO: 5160478 - DNA, 25 bp, Homo sapien
aagtgagtgaccagacagattctct

SEQ ID NO: 5160479 - DNA, 25 bp, Homo sapien
tgaagatttacacctgccagccaag

SEQ ID NO: 5160480 - DNA, 25 bp, Homo sapien
gatggatccgcattctgaaatctga

SEQ ID NO: 5160481 - DNA, 25 bp, Homo sapien
tctgaacccacaactctgaacctga

SEQ ID NO: 5160482 - DNA, 25 bp, Homo sapien
tctcctaatggaaggacctaggcac

SEQ ID NO: 5160483 - DNA, 25 bp, Homo sapien
gccagtgcggtagctgcatccatga

SEQ ID NO: 5160484 - DNA, 25 bp, Homo sapien
cttacttggcacgtctctgggatga

SEQ ID NO: 5160485 - DNA, 25 bp, Homo sapien
actcttacgtgaggagtggactcca

SEQ ID NO: 5160486 - DNA, 25 bp, Homo sapien
cctggtgtcgcatgtcaatcggtag

SEQ ID NO: 5160487 - DNA, 25 bp, Homo sapien
tgaggctcgtaatggtaccttcctt

SEQ ID NO: 5160488 - DNA, 25 bp, Homo sapien
acaccgtggacagaatgaggctcgt

SEQ ID NO: 5160489 - DNA, 25 bp, Homo sapien
ttccttcctggtgtcgcatgtcaat

SEQ ID NO: 5160490 - DNA, 25 bp, Homo sapien
gccacggggccattttcctcacaag

SEQ ID NO: 5160491 - DNA, 25 bp, Homo sapien
catcatggaagccagagccacgggg

SEQ ID NO: 5160492 - DNA, 25 bp, Homo sapien
cagggagaagcgagctacaacatgg

SEQ ID NO: 5160493 - DNA, 25 bp, Homo sapien
gatggatcgggattctccaccgggc

SEQ ID NO: 5160494 - DNA, 25 bp, Homo sapien
ggtggacatgcctttcggaagtctc

SEQ ID NO: 5160495 - DNA, 25 bp, Homo sapien
gcaggtggacatgcctttcggaagt

SEQ ID NO: 5160496 - DNA, 25 bp, Homo sapien
catgcctttcggaagtctcctcctt

SEQ ID NO: 5160497 - DNA, 25 bp, Homo sapien
ggacatgcctttcggaagtctcctc

SEQ ID NO: 5160498 - DNA, 25 bp, Homo sapien
tggtcagcaacagccggttttaagg

SEQ ID NO: 5160499 - DNA, 25 bp, Homo sapien
agtggtcagcaacagccggttttaa

SEQ ID NO: 5160500 - DNA, 25 bp, Homo sapien
gcaacagccggttttaaggaagagc

SEQ ID NO: 5160501 - DNA, 25 bp, Homo sapien
cagcaacagccggttttaaggaaga

SEQ ID NO: 5160502 - DNA, 25 bp, Homo sapien
gaaaggaagctggagtccccaaagc

SEQ ID NO: 5160503 - DNA, 25 bp, Homo sapien
tggaaaggaagctggagtccccaaa

SEQ ID NO: 5160504 - DNA, 25 bp, Homo sapien
ggaagctggagtccccaaagcttgc

SEQ ID NO: 5160505 - DNA, 25 bp, Homo sapien
tggagtccccaaagcttgccctgca

SEQ ID NO: 5160506 - DNA, 25 bp, Homo sapien
ccccagactggtccaacagctgttg

SEQ ID NO: 5160507 - DNA, 25 bp, Homo sapien
cacaggcaggaacagctccttcatg

SEQ ID NO: 5160508 - DNA, 25 bp, Homo sapien
ccatttaacagacagcactgctgag

SEQ ID NO: 5160509 - DNA, 25 bp, Homo sapien
gctttgctccaagatctgtgctggt

SEQ ID NO: 5160510 - DNA, 25 bp, Homo sapien
ggaaagccggatcaaggagatgtca

SEQ ID NO: 5160511 - DNA, 25 bp, Homo sapien
agccggatcaaggagatgtcagaga

SEQ ID NO: 5160512 - DNA, 25 bp, Homo sapien
ctgctgtgcacagaacggaggtagt

SEQ ID NO: 5160513 - DNA, 25 bp, Homo sapien
cagaacggaggtagtgctccatgtg

SEQ ID NO: 5160514 - DNA, 25 bp, Homo sapien
cctgccacgagggtcatctggtggt

SEQ ID NO: 5160515 - DNA, 25 bp, Homo sapien
gcatcagcaggtccccgtagggcgc

SEQ ID NO: 5160516 - DNA, 25 bp, Homo sapien
tcatctggtggtaatagtctgaggg

SEQ ID NO: 5160517 - DNA, 25 bp, Homo sapien
cccctctccttaaggtgctcctggg

SEQ ID NO: 5160518 - DNA, 25 bp, Homo sapien
gacattcgggtgtggcaatttgcac

SEQ ID NO: 5160519 - DNA, 25 bp, Homo sapien
gcaaggagcgtgtctagcacacaac

SEQ ID NO: 5160520 - DNA, 25 bp, Homo sapien
tgatccttcatgcactcggttgctg

SEQ ID NO: 5160521 - DNA, 25 bp, Homo sapien
tctgacacctcactgtggcttgtgg

SEQ ID NO: 5160522 - DNA, 25 bp, Homo sapien
tacgagggcgatatgtcactgtctg

SEQ ID NO: 5160523 - DNA, 25 bp, Homo sapien
ccgggaggggtgacacgccactctt

SEQ ID NO: 5160524 - DNA, 25 bp, Homo sapien
ctacgagggcgatatgtcactgtct

SEQ ID NO: 5160525 - DNA, 25 bp, Homo sapien
gagggcgatatgtcactgtctggcc

SEQ ID NO: 5160526 - DNA, 25 bp, Homo sapien
tcccgctagtgcagtggagctagtt

SEQ ID NO: 5160527 - DNA, 25 bp, Homo sapien
gaggacctgctccttgccagatgtg

SEQ ID NO: 5160528 - DNA, 25 bp, Homo sapien
agatgtgctcccagacctgacaggg

SEQ ID NO: 5160529 - DNA, 25 bp, Homo sapien
gggccatcggccatacgtaaggaga

SEQ ID NO: 5160530 - DNA, 25 bp, Homo sapien
ccgcacccacctactgaacaagccg

SEQ ID NO: 5160531 - DNA, 25 bp, Homo sapien
acccacctactgaacaagccgcaag

SEQ ID NO: 5160532 - DNA, 25 bp, Homo sapien
tgaacaagccgcaagccctgggatc

SEQ ID NO: 5160533 - DNA, 25 bp, Homo sapien
acctactgaacaagccgcaagccct

SEQ ID NO: 5160534 - DNA, 25 bp, Homo sapien
tggccgccgagctgcttcgggagtt

SEQ ID NO: 5160535 - DNA, 25 bp, Homo sapien
agatgcccgtaggaaccgctggccg

SEQ ID NO: 5160536 - DNA, 25 bp, Homo sapien
aggtgcggatcatccgctgcaggtc

SEQ ID NO: 5160537 - DNA, 25 bp, Homo sapien
ttgatgtaggccactagcgagttgg

SEQ ID NO: 5160538 - DNA, 25 bp, Homo sapien
tctgctggctcagaatctgctggta

SEQ ID NO: 5160539 - DNA, 25 bp, Homo sapien
gaaggtgggtgagggctggatcagg

SEQ ID NO: 5160540 - DNA, 25 bp, Homo sapien
aatctgctggtaggccacggggttg

SEQ ID NO: 5160541 - DNA, 25 bp, Homo sapien
tgtgtgtccaaaggctgaccccaga

SEQ ID NO: 5160542 - DNA, 25 bp, Homo sapien
ctggttggtgtcactcagacagttg

SEQ ID NO: 5160543 - DNA, 25 bp, Homo sapien
tgggcgtggcattgatggaggtgag

SEQ ID NO: 5160544 - DNA, 25 bp, Homo sapien
tgtcactcagacagttgctgctgct

SEQ ID NO: 5160545 - DNA, 25 bp, Homo sapien
gtgggcgtggcattgatggaggtga

SEQ ID NO: 5160546 - DNA, 25 bp, Homo sapien
tgaatggcgacagggttgacggtgc

SEQ ID NO: 5160547 - DNA, 25 bp, Homo sapien
tcttgaccttgctgcgcttgtgaat

SEQ ID NO: 5160548 - DNA, 25 bp, Homo sapien
ggccctcaggctcggtcttgacctt

SEQ ID NO: 5160549 - DNA, 25 bp, Homo sapien
tgacggccgactcactgctctgctt

SEQ ID NO: 5160550 - DNA, 25 bp, Homo sapien
gctgcaaagacctcttccgagaagg

SEQ ID NO: 5160551 - DNA, 25 bp, Homo sapien
caacaggaaagcaacaacatgtcgt

SEQ ID NO: 5160552 - DNA, 25 bp, Homo sapien
tccgagaagggttcctgattgtttc

SEQ ID NO: 5160553 - DNA, 25 bp, Homo sapien
aacatgtcgtacaatagctccaggg

SEQ ID NO: 5160554 - DNA, 25 bp, Homo sapien
atgagccgtgtccagacacctggcc

SEQ ID NO: 5160555 - DNA, 25 bp, Homo sapien
gggcacacccacatgagccgtgtcc

SEQ ID NO: 5160556 - DNA, 25 bp, Homo sapien
cacatgagccgtgtccagacacctg

SEQ ID NO: 5160557 - DNA, 25 bp, Homo sapien
acacccacatgagccgtgtccagac

SEQ ID NO: 5160558 - DNA, 25 bp, Homo sapien
gctcctgggtgtcgtactccttggt

SEQ ID NO: 5160559 - DNA, 25 bp, Homo sapien
cagcctcctgcttacagtcatccct

SEQ ID NO: 5160560 - DNA, 25 bp, Homo sapien
cgtactccttggtgcagtcttccca

SEQ ID NO: 5160561 - DNA, 25 bp, Homo sapien
ggtctcatagatgaccacctcagcc

SEQ ID NO: 5160562 - DNA, 25 bp, Homo sapien
ccccgtggatgtgctcgttgttgat

SEQ ID NO: 5160563 - DNA, 25 bp, Homo sapien
tcgcccgtgtgtcgccgcatgtgca

SEQ ID NO: 5160564 - DNA, 25 bp, Homo sapien
agggcttctgctcccgcgtgcaggc

SEQ ID NO: 5160565 - DNA, 25 bp, Homo sapien
tgtgcaccaccagcatgtactgcgc

SEQ ID NO: 5160566 - DNA, 25 bp, Homo sapien
gagatgctcacacccagagagcaag

SEQ ID NO: 5160567 - DNA, 25 bp, Homo sapien
gatgctcacacccagagagcaagtc

SEQ ID NO: 5160568 - DNA, 25 bp, Homo sapien
agatgctcacacccagagagcaagt

SEQ ID NO: 5160569 - DNA, 25 bp, Homo sapien
cgagatgctcacacccagagagcaa

SEQ ID NO: 5160570 - DNA, 25 bp, Homo sapien
aacccgtcagcgcactcagaagcat

SEQ ID NO: 5160571 - DNA, 25 bp, Homo sapien
tgctccaacccgtcagcgcactcag

SEQ ID NO: 5160572 - DNA, 25 bp, Homo sapien
tctgctctgctccaacccgtcagcg

SEQ ID NO: 5160573 - DNA, 25 bp, Homo sapien
ccgtcagcgcactcagaagcatgca

SEQ ID NO: 5160574 - DNA, 25 bp, Homo sapien
gttggagtgggtgcgattctggtgc

SEQ ID NO: 5160575 - DNA, 25 bp, Homo sapien
ttctccaggcgggagtaggccttcg

SEQ ID NO: 5160576 - DNA, 25 bp, Homo sapien
cggtccgaggcgttggagaaggctt

SEQ ID NO: 5160577 - DNA, 25 bp, Homo sapien
agtaggccttcgagcagccctcgaa

SEQ ID NO: 5160578 - DNA, 25 bp, Homo sapien
gcatctgggccgtggaccgttttca

SEQ ID NO: 5160579 - DNA, 25 bp, Homo sapien
cggaggtgcacgtcattgcgctgct

SEQ ID NO: 5160580 - DNA, 25 bp, Homo sapien
cattctctttgagcagcggtgtgcg

SEQ ID NO: 5160581 - DNA, 25 bp, Homo sapien
tcttgatggctctgacgtgcaggca

SEQ ID NO: 5160582 - DNA, 25 bp, Homo sapien
tcttgagctgctcgaaccggtgcat

SEQ ID NO: 5160583 - DNA, 25 bp, Homo sapien
tgttccgcgtgtgtggagtcggccc

SEQ ID NO: 5160584 - DNA, 25 bp, Homo sapien
tgcatggtggtcatgtgtttgcgca

SEQ ID NO: 5160585 - DNA, 25 bp, Homo sapien
catgagcaggaatccttgagtgact

SEQ ID NO: 5160586 - DNA, 25 bp, Homo sapien
atggtcacctcgctcgcggacagct

SEQ ID NO: 5160587 - DNA, 25 bp, Homo sapien
agcggagctcgcgttgtgcgggcgg

SEQ ID NO: 5160588 - DNA, 25 bp, Homo sapien
gccgagctgaccgtgctggtggagc

SEQ ID NO: 5160589 - DNA, 25 bp, Homo sapien
gacagccgcgggttcggcagcagcc

SEQ ID NO: 5160590 - DNA, 25 bp, Homo sapien
tgctgcgccggcgtgaggttgagca

SEQ ID NO: 5160591 - DNA, 25 bp, Homo sapien
tacttggcccgcaggctgtactgct

SEQ ID NO: 5160592 - DNA, 25 bp, Homo sapien
gcgccgcgacgcgtccgtggagatg

SEQ ID NO: 5160593 - DNA, 25 bp, Homo sapien
gctgcactggctggcctcgctcgag

SEQ ID NO: 5160594 - DNA, 25 bp, Homo sapien
tggccgtggccataggtcggcccgt

SEQ ID NO: 5160595 - DNA, 25 bp, Homo sapien
cgtggccataggtcggcccgtcgct

SEQ ID NO: 5160596 - DNA, 25 bp, Homo sapien
gccgtggccataggtcggcccgtcg

SEQ ID NO: 5160597 - DNA, 25 bp, Homo sapien
cgtggccgtggccataggtcggccc

SEQ ID NO: 5160598 - DNA, 25 bp, Homo sapien
tgcgccttgatgtactgcaccacgt

SEQ ID NO: 5160599 - DNA, 25 bp, Homo sapien
accacgtcgtctggaagcaccaggt

SEQ ID NO: 5160600 - DNA, 25 bp, Homo sapien
gaagccagtgctttccgtgggatac

SEQ ID NO: 5160601 - DNA, 25 bp, Homo sapien
tcgccacgttctcgctgatgctagg

SEQ ID NO: 5160602 - DNA, 25 bp, Homo sapien
tggccagggcgtctacggtgccgga

SEQ ID NO: 5160603 - DNA, 25 bp, Homo sapien
gctggccagggcgtctacggtgccg

SEQ ID NO: 5160604 - DNA, 25 bp, Homo sapien
ctggctggccagggcgtctacggtg

SEQ ID NO: 5160605 - DNA, 25 bp, Homo sapien
tggctggccagggcgtctacggtgc

SEQ ID NO: 5160606 - DNA, 25 bp, Homo sapien
actgtagcccgggtactggccaaag

SEQ ID NO: 5160607 - DNA, 25 bp, Homo sapien
cctgtaggccttgcggactgtagcc

SEQ ID NO: 5160608 - DNA, 25 bp, Homo sapien
ggtgtggctgcgtgctgtccaggcc

SEQ ID NO: 5160609 - DNA, 25 bp, Homo sapien
caccgccaggttgccctgaggaaag

SEQ ID NO: 5160610 - DNA, 25 bp, Homo sapien
catagtggtagtcatgccaggacac

SEQ ID NO: 5160611 - DNA, 25 bp, Homo sapien
ggaactggttgagggccccactgat

SEQ ID NO: 5160612 - DNA, 25 bp, Homo sapien
ccccaagttccctgtggcgattgcc

SEQ ID NO: 5160613 - DNA, 25 bp, Homo sapien
tggacttggccatagcaggcatggg

SEQ ID NO: 5160614 - DNA, 25 bp, Homo sapien
agccacccccatcgggcctgtttgg

SEQ ID NO: 5160615 - DNA, 25 bp, Homo sapien
ccggggctgcactaggccaaagcct

SEQ ID NO: 5160616 - DNA, 25 bp, Homo sapien
tgctgcacagcacgtaccccacggt

SEQ ID NO: 5160617 - DNA, 25 bp, Homo sapien
gggacctggtggtagccctcctggc

SEQ ID NO: 5160618 - DNA, 25 bp, Homo sapien
tttcctgactggacggcatggcagc

SEQ ID NO: 5160619 - DNA, 25 bp, Homo sapien
cctgttcgtacatgtggatctggcc

SEQ ID NO: 5160620 - DNA, 25 bp, Homo sapien
gacacctggttgacccctggtgagg

SEQ ID NO: 5160621 - DNA, 25 bp, Homo sapien
gaacaaactcgagtgatcgccatca

SEQ ID NO: 5160622 - DNA, 25 bp, Homo sapien
tgtccccgacagccatgttgctgat

SEQ ID NO: 5160623 - DNA, 25 bp, Homo sapien
atgtccccgacagccatgttgctga

SEQ ID NO: 5160624 - DNA, 25 bp, Homo sapien
tccccgacagccatgttgctgatgc

SEQ ID NO: 5160625 - DNA, 25 bp, Homo sapien
gtccccgacagccatgttgctgatg

SEQ ID NO: 5160626 - DNA, 25 bp, Homo sapien
gaacttgctctcctcggcgaggctg

SEQ ID NO: 5160627 - DNA, 25 bp, Homo sapien
gcggtcctgtaagcaccaaaggctg

SEQ ID NO: 5160628 - DNA, 25 bp, Homo sapien
ctcgttagccgaatgtcagccgtga

SEQ ID NO: 5160629 - DNA, 25 bp, Homo sapien
tcagccgtgaagaagccggaacagc

SEQ ID NO: 5160630 - DNA, 25 bp, Homo sapien
caacatctgtcatctgaagcggcca

SEQ ID NO: 5160631 - DNA, 25 bp, Homo sapien
tatgacaaggtatgttagagacctc

SEQ ID NO: 5160632 - DNA, 25 bp, Homo sapien
gagacctcaagagttaggcttcata

SEQ ID NO: 5160633 - DNA, 25 bp, Homo sapien
tgtgcttttcctctatgacaaggta

SEQ ID NO: 5160634 - DNA, 25 bp, Homo sapien
tgaatcatccaggtataatctgtgc

SEQ ID NO: 5160635 - DNA, 25 bp, Homo sapien
tcccagactcggctttacggagtag

SEQ ID NO: 5160636 - DNA, 25 bp, Homo sapien
tacggagtagaagagccagctctac

SEQ ID NO: 5160637 - DNA, 25 bp, Homo sapien
tcggctttacggagtagaagagcca

SEQ ID NO: 5160638 - DNA, 25 bp, Homo sapien
gaagagccagctctaccaaacctgg

SEQ ID NO: 5160639 - DNA, 25 bp, Homo sapien
ttctggtgatacttacatactttat

SEQ ID NO: 5160640 - DNA, 25 bp, Homo sapien
tggtgatacttacatactttattca

SEQ ID NO: 5160641 - DNA, 25 bp, Homo sapien
attcattcatatatacttggatgct

SEQ ID NO: 5160642 - DNA, 25 bp, Homo sapien
tatacttggatgctttattcattca

SEQ ID NO: 5160643 - DNA, 25 bp, Homo sapien
ctgtaaacacggtctggagaggcca

SEQ ID NO: 5160644 - DNA, 25 bp, Homo sapien
cagccccgaggtatttagaaacaag

SEQ ID NO: 5160645 - DNA, 25 bp, Homo sapien
ctcgaggcctcagtccatccctaac

SEQ ID NO: 5160646 - DNA, 25 bp, Homo sapien
tgcaaacactgtaaacacggtctgg

SEQ ID NO: 5160647 - DNA, 25 bp, Homo sapien
tataaatttggctggacgactcacc

SEQ ID NO: 5160648 - DNA, 25 bp, Homo sapien
tgggactggcaagggaaatcctatc

SEQ ID NO: 5160649 - DNA, 25 bp, Homo sapien
aatccggaggataccaggcatgcac

SEQ ID NO: 5160650 - DNA, 25 bp, Homo sapien
aaaattcaacgatgctccctcagag

SEQ ID NO: 5160651 - DNA, 25 bp, Homo sapien
cattaactactgtcaagggggaagc

SEQ ID NO: 5160652 - DNA, 25 bp, Homo sapien
cgaatgcaccaaatttactgcccag

SEQ ID NO: 5160653 - DNA, 25 bp, Homo sapien
tggcaaaggcgggatagtcaatttt

SEQ ID NO: 5160654 - DNA, 25 bp, Homo sapien
caagggggaagcagatagacaagat

SEQ ID NO: 5160655 - DNA, 25 bp, Homo sapien
tgcatgggtgctggccacgtgactt

SEQ ID NO: 5160656 - DNA, 25 bp, Homo sapien
tgtgcatgcttacttcctccctggg

SEQ ID NO: 5160657 - DNA, 25 bp, Homo sapien
tgactgtggccatcgttacctgaca

SEQ ID NO: 5160658 - DNA, 25 bp, Homo sapien
cattgctagtgtcttggtcctggga

SEQ ID NO: 5160659 - DNA, 25 bp, Homo sapien
gggacaccggcagcaggcctaatgg

SEQ ID NO: 5160660 - DNA, 25 bp, Homo sapien
agggacaccggcagcaggcctaatg

SEQ ID NO: 5160661 - DNA, 25 bp, Homo sapien
tgtggcctcctatcgcctggttgcg

SEQ ID NO: 5160662 - DNA, 25 bp, Homo sapien
gcgtctggctgtcgtgtggcctcct

SEQ ID NO: 5160663 - DNA, 25 bp, Homo sapien
tgtcgtgtggcctcctatcgcctgg

SEQ ID NO: 5160664 - DNA, 25 bp, Homo sapien
tggctgtcgtgtggcctcctatcgc

SEQ ID NO: 5160665 - DNA, 25 bp, Homo sapien
ctctggaaatgtcctgcgagcccga

SEQ ID NO: 5160666 - DNA, 25 bp, Homo sapien
gaaatgtcctgcgagcccgaccagg

SEQ ID NO: 5160667 - DNA, 25 bp, Homo sapien
tggaaatgtcctgcgagcccgacca

SEQ ID NO: 5160668 - DNA, 25 bp, Homo sapien
aatgtcctgcgagcccgaccaggca

SEQ ID NO: 5160669 - DNA, 25 bp, Homo sapien
gggttgatgctcccatgtcccagtg

SEQ ID NO: 5160670 - DNA, 25 bp, Homo sapien
tctttcttgtctcatgagtagtatc

SEQ ID NO: 5160671 - DNA, 25 bp, Homo sapien
gtctcatgagtagtatctccagcca

SEQ ID NO: 5160672 - DNA, 25 bp, Homo sapien
cgtgggggttgatgctcccatgtcc

SEQ ID NO: 5160673 - DNA, 25 bp, Homo sapien
tagatcctccagtaacagaatcagc

SEQ ID NO: 5160674 - DNA, 25 bp, Homo sapien
aacagaatcagctggaagagccctc

SEQ ID NO: 5160675 - DNA, 25 bp, Homo sapien
tgtctggtcctatagatcctccagt

SEQ ID NO: 5160676 - DNA, 25 bp, Homo sapien
tggctttgtctggtcctatagatcc

SEQ ID NO: 5160677 - DNA, 25 bp, Homo sapien
actggttttaatcctgactgttcaa

SEQ ID NO: 5160678 - DNA, 25 bp, Homo sapien
ggattgcggattccctgtggcctca

SEQ ID NO: 5160679 - DNA, 25 bp, Homo sapien
caaaggttagatccaggcacagaaa

SEQ ID NO: 5160680 - DNA, 25 bp, Homo sapien
gtggccacgttacagaaacagctct

SEQ ID NO: 5160681 - DNA, 25 bp, Homo sapien
gtccacagtcagaagcagaactttc

SEQ ID NO: 5160682 - DNA, 25 bp, Homo sapien
gaagcagaactttccagtgcagaaa

SEQ ID NO: 5160683 - DNA, 25 bp, Homo sapien
ctgcagacgattggcggtgctccca

SEQ ID NO: 5160684 - DNA, 25 bp, Homo sapien
ttctgcagacgattggcggtgctcc

SEQ ID NO: 5160685 - DNA, 25 bp, Homo sapien
gaagtcaaatcctcagtctgaagaa

SEQ ID NO: 5160686 - DNA, 25 bp, Homo sapien
cctaggagaccaagcagaagtcaaa

SEQ ID NO: 5160687 - DNA, 25 bp, Homo sapien
tctgaagaagatactggggtccagg

SEQ ID NO: 5160688 - DNA, 25 bp, Homo sapien
agcagaagtcaaatcctcagtctga

SEQ ID NO: 5160689 - DNA, 25 bp, Homo sapien
gtagtaggggaaggcactccagaga

SEQ ID NO: 5160690 - DNA, 25 bp, Homo sapien
ctgtagtaggggaaggcactccaga

SEQ ID NO: 5160691 - DNA, 25 bp, Homo sapien
gtaggggaaggcactccagagagga

SEQ ID NO: 5160692 - DNA, 25 bp, Homo sapien
agtaggggaaggcactccagagagg

SEQ ID NO: 5160693 - DNA, 25 bp, Homo sapien
tcagtcgtagagacagctgcctttt

SEQ ID NO: 5160694 - DNA, 25 bp, Homo sapien
aactgattttgtaaccaggaccctg

SEQ ID NO: 5160695 - DNA, 25 bp, Homo sapien
gacacagaaagctgatggctggcca

SEQ ID NO: 5160696 - DNA, 25 bp, Homo sapien
tctaacgtcatgtaagtgcttctct

SEQ ID NO: 5160697 - DNA, 25 bp, Homo sapien
tctgaagaggctgatggctcaattc

SEQ ID NO: 5160698 - DNA, 25 bp, Homo sapien
gaggctgatggctcaattccagtct

SEQ ID NO: 5160699 - DNA, 25 bp, Homo sapien
ttaactccaggaacacgttgtcata

SEQ ID NO: 5160700 - DNA, 25 bp, Homo sapien
tagctgtgacccagggaatcgggaa

SEQ ID NO: 5160701 - DNA, 25 bp, Homo sapien
tgccggaccttgccgtccctttgtg

SEQ ID NO: 5160702 - DNA, 25 bp, Homo sapien
accttgtagagtctgcggctgcctc

SEQ ID NO: 5160703 - DNA, 25 bp, Homo sapien
gagaccttgtagagtctgcggctgc

SEQ ID NO: 5160704 - DNA, 25 bp, Homo sapien
ggaccttgccgtccctttgtgccat

SEQ ID NO: 5160705 - DNA, 25 bp, Homo sapien
tgtgccacgtgaaagccgaacacaa

SEQ ID NO: 5160706 - DNA, 25 bp, Homo sapien
aacacaacgtggagcaggatttcag

SEQ ID NO: 5160707 - DNA, 25 bp, Homo sapien
ggactgacttcagagggtccacgct

SEQ ID NO: 5160708 - DNA, 25 bp, Homo sapien
ctcgagattttggtgcccagatagg

SEQ ID NO: 5160709 - DNA, 25 bp, Homo sapien
tagatcccgtagagctagccagagc

SEQ ID NO: 5160710 - DNA, 25 bp, Homo sapien
ttttaagaaggctgacctagatccc

SEQ ID NO: 5160711 - DNA, 25 bp, Homo sapien
gtagagctagccagagctacccagt

SEQ ID NO: 5160712 - DNA, 25 bp, Homo sapien
caacctcttccatctttttaagaag

SEQ ID NO: 5160713 - DNA, 25 bp, Homo sapien
acttggtactcaggtcctccaggcc

SEQ ID NO: 5160714 - DNA, 25 bp, Homo sapien
tgcaggcctccacagtgaggcactt

SEQ ID NO: 5160715 - DNA, 25 bp, Homo sapien
tccaggccactgtcagggctgggca

SEQ ID NO: 5160716 - DNA, 25 bp, Homo sapien
tccacagtgaggcacttggtactca

SEQ ID NO: 5160717 - DNA, 25 bp, Homo sapien
ctgacttccataagggacggcaggg

SEQ ID NO: 5160718 - DNA, 25 bp, Homo sapien
tgacgtgctgacttccataagggac

SEQ ID NO: 5160719 - DNA, 25 bp, Homo sapien
cagggatgtcccctgacgtgctgac

SEQ ID NO: 5160720 - DNA, 25 bp, Homo sapien
cccctgacgtgctgacttccataag

SEQ ID NO: 5160721 - DNA, 25 bp, Homo sapien
ggtgagtgagcgctctttacctggc

SEQ ID NO: 5160722 - DNA, 25 bp, Homo sapien
ggcccatgggtgacaagtgactgct

SEQ ID NO: 5160723 - DNA, 25 bp, Homo sapien
ccttgtcgtggatgcatgggaagca

SEQ ID NO: 5160724 - DNA, 25 bp, Homo sapien
agagagcgatgggagggccaagagt

SEQ ID NO: 5160725 - DNA, 25 bp, Homo sapien
tattattctgcggcaaagcacctgt

SEQ ID NO: 5160726 - DNA, 25 bp, Homo sapien
ttattctgcggcaaagcacctgtcc

SEQ ID NO: 5160727 - DNA, 25 bp, Homo sapien
attattctgcggcaaagcacctgtc

SEQ ID NO: 5160728 - DNA, 25 bp, Homo sapien
tattctgcggcaaagcacctgtcct

SEQ ID NO: 5160729 - DNA, 25 bp, Homo sapien
agagcagccaggctttctgtagaat

SEQ ID NO: 5160730 - DNA, 25 bp, Homo sapien
agcagccaggctttctgtagaattt

SEQ ID NO: 5160731 - DNA, 25 bp, Homo sapien
tgtagaatttctccatctgcacagt

SEQ ID NO: 5160732 - DNA, 25 bp, Homo sapien
ggtagagcagccaggctttctgtag

SEQ ID NO: 5160733 - DNA, 25 bp, Homo sapien
gacacagccagtcttaatactctca

SEQ ID NO: 5160734 - DNA, 25 bp, Homo sapien
tgactgctgcggttgcaggctgatg

SEQ ID NO: 5160735 - DNA, 25 bp, Homo sapien
aagggtgactgctgcggttgcaggc

SEQ ID NO: 5160736 - DNA, 25 bp, Homo sapien
aacagacacagccagtcttaatact

SEQ ID NO: 5160737 - DNA, 25 bp, Homo sapien
tctgaactctgactggtgcaggtgg

SEQ ID NO: 5160738 - DNA, 25 bp, Homo sapien
tccacttctctgaactctgactggt

SEQ ID NO: 5160739 - DNA, 25 bp, Homo sapien
ctgaactctgactggtgcaggtggc

SEQ ID NO: 5160740 - DNA, 25 bp, Homo sapien
ttctctgaactctgactggtgcagg

SEQ ID NO: 5160741 - DNA, 25 bp, Homo sapien
ctgaaatgacaggaataggtcctgt

SEQ ID NO: 5160742 - DNA, 25 bp, Homo sapien
cagtcagcattgcttatgatcagac

SEQ ID NO: 5160743 - DNA, 25 bp, Homo sapien
tcagactagggtggtatctgggcat

SEQ ID NO: 5160744 - DNA, 25 bp, Homo sapien
aggaataggtcctgtgcagccgcag

SEQ ID NO: 5160745 - DNA, 25 bp, Homo sapien
gacagtgagttgtgacctgtggacc

SEQ ID NO: 5160746 - DNA, 25 bp, Homo sapien
ggagccggacacacattcaatgagg

SEQ ID NO: 5160747 - DNA, 25 bp, Homo sapien
cactgtcagtggtggcgtcttgtca

SEQ ID NO: 5160748 - DNA, 25 bp, Homo sapien
tacacattggaactttgcagctaca

SEQ ID NO: 5160749 - DNA, 25 bp, Homo sapien
cattgacatctgtccccagtcagac

SEQ ID NO: 5160750 - DNA, 25 bp, Homo sapien
gacctctttacgcagcattctagcc

SEQ ID NO: 5160751 - DNA, 25 bp, Homo sapien
ccagtcagacctctttacgcagcat

SEQ ID NO: 5160752 - DNA, 25 bp, Homo sapien
agcattctagcctctcgttctctgc

SEQ ID NO: 5160753 - DNA, 25 bp, Homo sapien
gtcacgctggtgccacaggcttgaa

SEQ ID NO: 5160754 - DNA, 25 bp, Homo sapien
cacgctggtgccacaggcttgaact

SEQ ID NO: 5160755 - DNA, 25 bp, Homo sapien
tcacgctggtgccacaggcttgaac

SEQ ID NO: 5160756 - DNA, 25 bp, Homo sapien
accagccatcggagggtcggcgagc

SEQ ID NO: 5160757 - DNA, 25 bp, Homo sapien
gaaatccctagtccttctaacttca

SEQ ID NO: 5160758 - DNA, 25 bp, Homo sapien
gagcaggacgttctcttcttcagga

SEQ ID NO: 5160759 - DNA, 25 bp, Homo sapien
gtcggcgagcagtagctgacatgct

SEQ ID NO: 5160760 - DNA, 25 bp, Homo sapien
gcatcccactgagttgccatgtgat

SEQ ID NO: 5160761 - DNA, 25 bp, Homo sapien
actgagttgccatgtgatgtgggcc

SEQ ID NO: 5160762 - DNA, 25 bp, Homo sapien
gcctcccacgtggcttcaggagctg

SEQ ID NO: 5160763 - DNA, 25 bp, Homo sapien
cacgtgcccacgccctggagtgtgg

SEQ ID NO: 5160764 - DNA, 25 bp, Homo sapien
ggaaaggatgttctcggctccggcc

SEQ ID NO: 5160765 - DNA, 25 bp, Homo sapien
cctcacccaagctcgcagcattgtg

SEQ ID NO: 5160766 - DNA, 25 bp, Homo sapien
gcattgtgccgggaaaggatgttct

SEQ ID NO: 5160767 - DNA, 25 bp, Homo sapien
gatgttctcggctccggcctttttc

SEQ ID NO: 5160768 - DNA, 25 bp, Homo sapien
cactgaggctaccagaaaaagaagc

SEQ ID NO: 5160769 - DNA, 25 bp, Homo sapien
gaaatccagcagagatgcgcatttt

SEQ ID NO: 5160770 - DNA, 25 bp, Homo sapien
attttcgtccgtgcactgccgcctg

SEQ ID NO: 5160771 - DNA, 25 bp, Homo sapien
aagaagccatttgaactccaggagc

SEQ ID NO: 5160772 - DNA, 25 bp, Homo sapien
ttcctgaatcgatggagtcccattc

SEQ ID NO: 5160773 - DNA, 25 bp, Homo sapien
tgtgggcttcctgaatcgatggagt

SEQ ID NO: 5160774 - DNA, 25 bp, Homo sapien
catgtgcagtccgtgggcttggcct

SEQ ID NO: 5160775 - DNA, 25 bp, Homo sapien
cctgcgatggagtcagagggttgca

SEQ ID NO: 5160776 - DNA, 25 bp, Homo sapien
ctaagtgtaagagtcatgtagggtg

SEQ ID NO: 5160777 - DNA, 25 bp, Homo sapien
gagtcatgtagggtgcttgccagac

SEQ ID NO: 5160778 - DNA, 25 bp, Homo sapien
aagtgtaagagtcatgtagggtgct

SEQ ID NO: 5160779 - DNA, 25 bp, Homo sapien
gtcatgtagggtgcttgccagacac

SEQ ID NO: 5160780 - DNA, 25 bp, Homo sapien
tcctctccattcagaggtttcttag

SEQ ID NO: 5160781 - DNA, 25 bp, Homo sapien
ctctccattcagaggtttcttagct

SEQ ID NO: 5160782 - DNA, 25 bp, Homo sapien
cctctccattcagaggtttcttagc

SEQ ID NO: 5160783 - DNA, 25 bp, Homo sapien
cccaaacaccgcctgtcactgtctg

SEQ ID NO: 5160784 - DNA, 25 bp, Homo sapien
gggagccaccgccatgggaatagat

SEQ ID NO: 5160785 - DNA, 25 bp, Homo sapien
ctggaggcagcaccaactttacatc

SEQ ID NO: 5160786 - DNA, 25 bp, Homo sapien
tcactgtctgggtacgcatggctgt

SEQ ID NO: 5160787 - DNA, 25 bp, Homo sapien
cgtagccccacaatgcatccagctg

SEQ ID NO: 5160788 - DNA, 25 bp, Homo sapien
caagtaagcagagacggttggtgct

SEQ ID NO: 5160789 - DNA, 25 bp, Homo sapien
cagtgatactgaacagatgcaggaa

SEQ ID NO: 5160790 - DNA, 25 bp, Homo sapien
tgcaggaaaacctggataaaccaag

SEQ ID NO: 5160791 - DNA, 25 bp, Homo sapien
acaggtcaagcacggcaatgggcag

SEQ ID NO: 5160792 - DNA, 25 bp, Homo sapien
tcaagcacggcaatgggcagcggat

SEQ ID NO: 5160793 - DNA, 25 bp, Homo sapien
aatgggcagcggatctcccctgggc

SEQ ID NO: 5160794 - DNA, 25 bp, Homo sapien
tccgggtgcagatctccactgacca

SEQ ID NO: 5160795 - DNA, 25 bp, Homo sapien
tgctcacacagctttttaaaatcac

SEQ ID NO: 5160796 - DNA, 25 bp, Homo sapien
ttcttgctcacacagctttttaaaa

SEQ ID NO: 5160797 - DNA, 25 bp, Homo sapien
cttgctcacacagctttttaaaatc

SEQ ID NO: 5160798 - DNA, 25 bp, Homo sapien
tttcttgctcacacagctttttaaa

SEQ ID NO: 5160799 - DNA, 25 bp, Homo sapien
taggcacagagcctgatgactatgg

SEQ ID NO: 5160800 - DNA, 25 bp, Homo sapien
agagcctgatgactatggctgctga

SEQ ID NO: 5160801 - DNA, 25 bp, Homo sapien
cctaggcacagagcctgatgactat

SEQ ID NO: 5160802 - DNA, 25 bp, Homo sapien
cacagagcctgatgactatggctgc

SEQ ID NO: 5160803 - DNA, 25 bp, Homo sapien
tattgtagactaagcaggttgacat

SEQ ID NO: 5160804 - DNA, 25 bp, Homo sapien
gaccacatatctgggtattgtagac

SEQ ID NO: 5160805 - DNA, 25 bp, Homo sapien
caagatccatcccacgtattgtgtg

SEQ ID NO: 5160806 - DNA, 25 bp, Homo sapien
tattccaaggaatgtatgtaactag

SEQ ID NO: 5160807 - DNA, 25 bp, Homo sapien
gaaattcacccacattcgctttggc

SEQ ID NO: 5160808 - DNA, 25 bp, Homo sapien
tgactggaactgagcaactattgcc

SEQ ID NO: 5160809 - DNA, 25 bp, Homo sapien
gaagcacagtcatcagttacatgca

SEQ ID NO: 5160810 - DNA, 25 bp, Homo sapien
actattgccaaaaaatcacccttgg

SEQ ID NO: 5160811 - DNA, 25 bp, Homo sapien
catagatggagctgcttacagaggt

SEQ ID NO: 5160812 - DNA, 25 bp, Homo sapien
cacacagggaaaggttggtgggaca

SEQ ID NO: 5160813 - DNA, 25 bp, Homo sapien
acacctacttccctgaagatcactg

SEQ ID NO: 5160814 - DNA, 25 bp, Homo sapien
ggtcagtgcgccatgaaagcacaca

SEQ ID NO: 5160815 - DNA, 25 bp, Homo sapien
taaacagcaggaacagtgacgtgca

SEQ ID NO: 5160816 - DNA, 25 bp, Homo sapien
ctaaacagcaggaacagtgacgtgc

SEQ ID NO: 5160817 - DNA, 25 bp, Homo sapien
aaacagcaggaacagtgacgtgcac

SEQ ID NO: 5160818 - DNA, 25 bp, Homo sapien
ttgcagggtgcaagatcaatataca

SEQ ID NO: 5160819 - DNA, 25 bp, Homo sapien
gatgctttcaccgtaaaatcgggaa

SEQ ID NO: 5160820 - DNA, 25 bp, Homo sapien
caagaaagtggtatctactctcatc

SEQ ID NO: 5160821 - DNA, 25 bp, Homo sapien
tactagaactaatgagcaaggttgc

SEQ ID NO: 5160822 - DNA, 25 bp, Homo sapien
aagctccctcgttgatttcttcacc

SEQ ID NO: 5160823 - DNA, 25 bp, Homo sapien
ccaagctccctcgttgatttcttca

SEQ ID NO: 5160824 - DNA, 25 bp, Homo sapien
agaggccaagctccctcgttgattt

SEQ ID NO: 5160825 - DNA, 25 bp, Homo sapien
ggccaagctccctcgttgatttctt

SEQ ID NO: 5160826 - DNA, 25 bp, Homo sapien
gaatgagacagtggccacaaaacac

SEQ ID NO: 5160827 - DNA, 25 bp, Homo sapien
gggacagaatgagacagtggccaca

SEQ ID NO: 5160828 - DNA, 25 bp, Homo sapien
tgctgggacagaatgagacagtggc

SEQ ID NO: 5160829 - DNA, 25 bp, Homo sapien
gacagaatgagacagtggccacaaa

SEQ ID NO: 5160830 - DNA, 25 bp, Homo sapien
tgcaggaagagtcagagtatcaagt

SEQ ID NO: 5160831 - DNA, 25 bp, Homo sapien
catcctgacagcttcccaggtgttc

SEQ ID NO: 5160832 - DNA, 25 bp, Homo sapien
cagcttcccaggtgttcgatgacag

SEQ ID NO: 5160833 - DNA, 25 bp, Homo sapien
gtcagagtatcaagtgtgatgcatc

SEQ ID NO: 5160834 - DNA, 25 bp, Homo sapien
tttcgtgtccctcccttcactagca

SEQ ID NO: 5160835 - DNA, 25 bp, Homo sapien
catcaacacaagttcaggatacatt

SEQ ID NO: 5160836 - DNA, 25 bp, Homo sapien
ccttcactagcagacgattggctga

SEQ ID NO: 5160837 - DNA, 25 bp, Homo sapien
cgattggctgagtggacccagtaca

SEQ ID NO: 5160838 - DNA, 25 bp, Homo sapien
tctcttgagccctttgattcgtatc

SEQ ID NO: 5160839 - DNA, 25 bp, Homo sapien
cctccgtgcacacatgtaatgtgca

SEQ ID NO: 5160840 - DNA, 25 bp, Homo sapien
tttgattcgtatcctgtcggcctgg

SEQ ID NO: 5160841 - DNA, 25 bp, Homo sapien
tatcctgtcggcctggttcctccgt

SEQ ID NO: 5160842 - DNA, 25 bp, Homo sapien
tctgttctgatgtccaggtttatac

SEQ ID NO: 5160843 - DNA, 25 bp, Homo sapien
taatttttctgttctgatgtccagg

SEQ ID NO: 5160844 - DNA, 25 bp, Homo sapien
cagcctggcagttttgagatccagc

SEQ ID NO: 5160845 - DNA, 25 bp, Homo sapien
aatccccctgctgatcagcctggca

SEQ ID NO: 5160846 - DNA, 25 bp, Homo sapien
agcaacctatacaaatggttattag

SEQ ID NO: 5160847 - DNA, 25 bp, Homo sapien
ctcactaagcaacctatacaaatgg

SEQ ID NO: 5160848 - DNA, 25 bp, Homo sapien
ggcggctcccacatcgctgactggg

SEQ ID NO: 5160849 - DNA, 25 bp, Homo sapien
tgtggcggctcccacatcgctgact

SEQ ID NO: 5160850 - DNA, 25 bp, Homo sapien
gctgtggcggctcccacatcgctga

SEQ ID NO: 5160851 - DNA, 25 bp, Homo sapien
gggctgtggcggctcccacatcgct

SEQ ID NO: 5160852 - DNA, 25 bp, Homo sapien
gggtggtgtggcccttggatgggtc

SEQ ID NO: 5160853 - DNA, 25 bp, Homo sapien
tccagattgggtgactcttttctaa

SEQ ID NO: 5160854 - DNA, 25 bp, Homo sapien
tcaaagttgtcctactgccatgttt

SEQ ID NO: 5160855 - DNA, 25 bp, Homo sapien
agattgggtgactcttttctaaagg

SEQ ID NO: 5160856 - DNA, 25 bp, Homo sapien
ctggagcctgcaagcctcttcccat

SEQ ID NO: 5160857 - DNA, 25 bp, Homo sapien
cttggggactgaggaccttttggct

SEQ ID NO: 5160858 - DNA, 25 bp, Homo sapien
gggactgaggaccttttggcttctc

SEQ ID NO: 5160859 - DNA, 25 bp, Homo sapien
cttctctggagcctgcaagcctctt

SEQ ID NO: 5160860 - DNA, 25 bp, Homo sapien
tatcacgcatctcgtgtcctgtgtg

SEQ ID NO: 5160861 - DNA, 25 bp, Homo sapien
aatgacttggtttgcgcttggaagc

SEQ ID NO: 5160862 - DNA, 25 bp, Homo sapien
gatgagcggtttctgcattaaccct

SEQ ID NO: 5160863 - DNA, 25 bp, Homo sapien
cagaaaaagtctgctgactactgag

SEQ ID NO: 5160864 - DNA, 25 bp, Homo sapien
agcagcctcagcttggcaaggtgtg

SEQ ID NO: 5160865 - DNA, 25 bp, Homo sapien
ggtagctcgatgatcctcttttgat

SEQ ID NO: 5160866 - DNA, 25 bp, Homo sapien
caggctccctcggtagctcgatgat

SEQ ID NO: 5160867 - DNA, 25 bp, Homo sapien
ggaaaacaggctccctcggtagctc

SEQ ID NO: 5160868 - DNA, 25 bp, Homo sapien
caccagtgctcctgcagtgcaaggc

SEQ ID NO: 5160869 - DNA, 25 bp, Homo sapien
ccaccagtgctcctgcagtgcaagg

SEQ ID NO: 5160870 - DNA, 25 bp, Homo sapien
ggtcacaagtttccaagtccagcat

SEQ ID NO: 5160871 - DNA, 25 bp, Homo sapien
gccagggtcacaagtttccaagtcc

SEQ ID NO: 5160872 - DNA, 25 bp, Homo sapien
cagggtcacaagtttccaagtccag

SEQ ID NO: 5160873 - DNA, 25 bp, Homo sapien
gggtcacaagtttccaagtccagca

SEQ ID NO: 5160874 - DNA, 25 bp, Homo sapien
cagagctattaacctagggaaggct

SEQ ID NO: 5160875 - DNA, 25 bp, Homo sapien
agagctattaacctagggaaggctt

SEQ ID NO: 5160876 - DNA, 25 bp, Homo sapien
acagagctattaacctagggaaggc

SEQ ID NO: 5160877 - DNA, 25 bp, Homo sapien
aggaataataggtttgctggaggag

SEQ ID NO: 5160878 - DNA, 25 bp, Homo sapien
ggaataataggtttgctggaggagg

SEQ ID NO: 5160879 - DNA, 25 bp, Homo sapien
ttaccaggttgtcctttctggatga

SEQ ID NO: 5160880 - DNA, 25 bp, Homo sapien
taccaggttgtcctttctggatgaa

SEQ ID NO: 5160881 - DNA, 25 bp, Homo sapien
tgcaaggttgagataaaccctttcc

SEQ ID NO: 5160882 - DNA, 25 bp, Homo sapien
tttttgcggggtatctgcaaggttg

SEQ ID NO: 5160883 - DNA, 25 bp, Homo sapien
agctgagttccttactcttaggtcg

SEQ ID NO: 5160884 - DNA, 25 bp, Homo sapien
tgaactggaagcccaaagctgagtt

SEQ ID NO: 5160885 - DNA, 25 bp, Homo sapien
tgggcatggctgtgctcggccagtg

SEQ ID NO: 5160886 - DNA, 25 bp, Homo sapien
ggcatggctgtgctcggccagtgtc

SEQ ID NO: 5160887 - DNA, 25 bp, Homo sapien
ccagtgggcatggctgtgctcggcc

SEQ ID NO: 5160888 - DNA, 25 bp, Homo sapien
catggctgtgctcggccagtgtcat

SEQ ID NO: 5160889 - DNA, 25 bp, Homo sapien
cacctggacattgggcctcatgcta

SEQ ID NO: 5160890 - DNA, 25 bp, Homo sapien
gggcctcatgctagggccgctgtca

SEQ ID NO: 5160891 - DNA, 25 bp, Homo sapien
cattgggcctcatgctagggccgct

SEQ ID NO: 5160892 - DNA, 25 bp, Homo sapien
tggacattgggcctcatgctagggc

SEQ ID NO: 5160893 - DNA, 25 bp, Homo sapien
tgggcctggtgtaactgaccctggc

SEQ ID NO: 5160894 - DNA, 25 bp, Homo sapien
agaggtgggcctggtgtaactgacc

SEQ ID NO: 5160895 - DNA, 25 bp, Homo sapien
ggcctggtgtaactgaccctggctg

SEQ ID NO: 5160896 - DNA, 25 bp, Homo sapien
aggtgggcctggtgtaactgaccct

SEQ ID NO: 5160897 - DNA, 25 bp, Homo sapien
tgagaacggattaaagcaagtccct

SEQ ID NO: 5160898 - DNA, 25 bp, Homo sapien
gatagacttcctcgattgagaacgg

SEQ ID NO: 5160899 - DNA, 25 bp, Homo sapien
cactggggatgtgatagacttcctc

SEQ ID NO: 5160900 - DNA, 25 bp, Homo sapien
cagggcaggtcaccctttcactggg

SEQ ID NO: 5160901 - DNA, 25 bp, Homo sapien
gctctggaggtatgtccagggccag

SEQ ID NO: 5160902 - DNA, 25 bp, Homo sapien
ggctctggaggtatgtccagggcca

SEQ ID NO: 5160903 - DNA, 25 bp, Homo sapien
cgtgaggacttggaaggctctggag

SEQ ID NO: 5160904 - DNA, 25 bp, Homo sapien
gtgaggacttggaaggctctggagg

SEQ ID NO: 5160905 - DNA, 25 bp, Homo sapien
ggtactgaggctgttagcattcttg

SEQ ID NO: 5160906 - DNA, 25 bp, Homo sapien
cttggctgatgaacttcacactttg

SEQ ID NO: 5160907 - DNA, 25 bp, Homo sapien
tagcatcttgctgtaggacatgtcc

SEQ ID NO: 5160908 - DNA, 25 bp, Homo sapien
tcctgaaatactatcgacggacgca

SEQ ID NO: 5160909 - DNA, 25 bp, Homo sapien
taccaccctgtgcaggtaatgcaac

SEQ ID NO: 5160910 - DNA, 25 bp, Homo sapien
gatgccacgggcctgccttttctat

SEQ ID NO: 5160911 - DNA, 25 bp, Homo sapien
cacaaaagagcagagcacctaagcc

SEQ ID NO: 5160912 - DNA, 25 bp, Homo sapien
gtgtgcttcccggacctgcggcgat

SEQ ID NO: 5160913 - DNA, 25 bp, Homo sapien
ttggcctcaatctgaaaactgctgc

SEQ ID NO: 5160914 - DNA, 25 bp, Homo sapien
gccgaggagactcgcatgccgccac

SEQ ID NO: 5160915 - DNA, 25 bp, Homo sapien
tgggagggcgccgagcccaccgtcg

SEQ ID NO: 5160916 - DNA, 25 bp, Homo sapien
tcacaggtctcttggcctcaatctg

SEQ ID NO: 5160917 - DNA, 25 bp, Homo sapien
tcatagtactcacaaagggctagcc

SEQ ID NO: 5160918 - DNA, 25 bp, Homo sapien
tgtgcgtcgggctaggttatccatg

SEQ ID NO: 5160919 - DNA, 25 bp, Homo sapien
gacccctttgttgcaggaatgtgcg

SEQ ID NO: 5160920 - DNA, 25 bp, Homo sapien
gaaaggatctcgaacattgctggac

SEQ ID NO: 5160921 - DNA, 25 bp, Homo sapien
tgggtgccagagcacgtgattctta

SEQ ID NO: 5160922 - DNA, 25 bp, Homo sapien
cactgcaactgctaggactgaaagc

SEQ ID NO: 5160923 - DNA, 25 bp, Homo sapien
gccctgaccctctgcattggatgca

SEQ ID NO: 5160924 - DNA, 25 bp, Homo sapien
tgaaggccccatagtgcataggaac

SEQ ID NO: 5160925 - DNA, 25 bp, Homo sapien
catctctgggctacacggtgattca

SEQ ID NO: 5160926 - DNA, 25 bp, Homo sapien
tcagcgtagaattgggagtgcaccc

SEQ ID NO: 5160927 - DNA, 25 bp, Homo sapien
tcaaagttctgcctaagccgttcag

SEQ ID NO: 5160928 - DNA, 25 bp, Homo sapien
gagatggcagttcatgaagcacaga

SEQ ID NO: 5160929 - DNA, 25 bp, Homo sapien
ccttgcctgtctttccccggtgtcg

SEQ ID NO: 5160930 - DNA, 25 bp, Homo sapien
ctgtctttccccggtgtcgtcccat

SEQ ID NO: 5160931 - DNA, 25 bp, Homo sapien
cttgcctgtctttccccggtgtcgt

SEQ ID NO: 5160932 - DNA, 25 bp, Homo sapien
tgcctgtctttccccggtgtcgtcc

SEQ ID NO: 5160933 - DNA, 25 bp, Homo sapien
tattgcccagtgtggctaggacaaa

SEQ ID NO: 5160934 - DNA, 25 bp, Homo sapien
caagtctgaaaacagaccattgaca

SEQ ID NO: 5160935 - DNA, 25 bp, Homo sapien
ttgtcggaaatgagaaatacctgtg

SEQ ID NO: 5160936 - DNA, 25 bp, Homo sapien
tatacatgaatgtacagggtatcat

SEQ ID NO: 5160937 - DNA, 25 bp, Homo sapien
tctttaaagtgacaatactctttaa

SEQ ID NO: 5160938 - DNA, 25 bp, Homo sapien
attctttaaagtgacaatactcttt

SEQ ID NO: 5160939 - DNA, 25 bp, Homo sapien
ttctttaaagtgacaatactcttta

SEQ ID NO: 5160940 - DNA, 25 bp, Homo sapien
aattcttagcgaatttcttagtgcc

SEQ ID NO: 5160941 - DNA, 25 bp, Homo sapien
catggttggtgctcagaataataga

SEQ ID NO: 5160942 - DNA, 25 bp, Homo sapien
ttagcgaatttcttagtgcctggga

SEQ ID NO: 5160943 - DNA, 25 bp, Homo sapien
gagaataactgtcatacttgtagat

SEQ ID NO: 5160944 - DNA, 25 bp, Homo sapien
agtttctggcgtcctattttctgtc

SEQ ID NO: 5160945 - DNA, 25 bp, Homo sapien
ggccattgtgaagaatgattctttg

SEQ ID NO: 5160946 - DNA, 25 bp, Homo sapien
taaaatacttcatcaccctcacgtc

SEQ ID NO: 5160947 - DNA, 25 bp, Homo sapien
gaacaagattccattgtgtgattag

SEQ ID NO: 5160948 - DNA, 25 bp, Homo sapien
tgaggatcccttgtgcacaatgagt

SEQ ID NO: 5160949 - DNA, 25 bp, Homo sapien
tatattatctattcccaccctgctc

SEQ ID NO: 5160950 - DNA, 25 bp, Homo sapien
gagctgttgtacagtgtcctttcat

SEQ ID NO: 5160951 - DNA, 25 bp, Homo sapien
tcctgtttggagtagcttgttaaat

SEQ ID NO: 5160952 - DNA, 25 bp, Homo sapien
tgaacttaaactcgcctgcctgggc

SEQ ID NO: 5160953 - DNA, 25 bp, Homo sapien
tgaacttgcctgaactcgaactcct

SEQ ID NO: 5160954 - DNA, 25 bp, Homo sapien
tcctgaccttgaactcgcctgaact

SEQ ID NO: 5160955 - DNA, 25 bp, Homo sapien
ttgaactcgcctgaacttgaacttg

SEQ ID NO: 5160956 - DNA, 25 bp, Homo sapien
caaaagctctagttgatgcgggtgt

SEQ ID NO: 5160957 - DNA, 25 bp, Homo sapien
ctagttgatgcgggtgtgttgttca

SEQ ID NO: 5160958 - DNA, 25 bp, Homo sapien
tgcaccaaaataaagcaaaagctct

SEQ ID NO: 5160959 - DNA, 25 bp, Homo sapien
gttgttcaggcgttagcagtactgc

SEQ ID NO: 5160960 - DNA, 25 bp, Homo sapien
cacaacaacccacgaggcagctgtt

SEQ ID NO: 5160961 - DNA, 25 bp, Homo sapien
caggtaacacctcattccataaaac

SEQ ID NO: 5160962 - DNA, 25 bp, Homo sapien
cagaattgtgtattccagtgagcca

SEQ ID NO: 5160963 - DNA, 25 bp, Homo sapien
agtgagccatgcagaagaagttggt

SEQ ID NO: 5160964 - DNA, 25 bp, Homo sapien
tattgccccataacacaagcttcat

SEQ ID NO: 5160965 - DNA, 25 bp, Homo sapien
cagaaaaggcctaaagttccattgt

SEQ ID NO: 5160966 - DNA, 25 bp, Homo sapien
ttttgtgtacaattcagcggcatga

SEQ ID NO: 5160967 - DNA, 25 bp, Homo sapien
tttactcctgtagataatgatgctg

SEQ ID NO: 5160968 - DNA, 25 bp, Homo sapien
caggtactctgtgcagttaaccggg

SEQ ID NO: 5160969 - DNA, 25 bp, Homo sapien
tgcagttcggtggattgattgttca

SEQ ID NO: 5160970 - DNA, 25 bp, Homo sapien
tataatcccaccaataatgtttgag

SEQ ID NO: 5160971 - DNA, 25 bp, Homo sapien
acagtgccgtggctctaaaagtttt

SEQ ID NO: 5160972 - DNA, 25 bp, Homo sapien
gtgaagcccaaggtgaaaatcctat

SEQ ID NO: 5160973 - DNA, 25 bp, Homo sapien
gaaatgcctggtactgatgtgatac

SEQ ID NO: 5160974 - DNA, 25 bp, Homo sapien
tgcacccagcatttaacttcaagga

SEQ ID NO: 5160975 - DNA, 25 bp, Homo sapien
gatgtgataccccttattcctagag

SEQ ID NO: 5160976 - DNA, 25 bp, Homo sapien
tctcctgcttatcccagtgtcccag

SEQ ID NO: 5160977 - DNA, 25 bp, Homo sapien
ttctcctgcttatcccagtgtccca

SEQ ID NO: 5160978 - DNA, 25 bp, Homo sapien
cattctcctgcttatcccagtgtcc

SEQ ID NO: 5160979 - DNA, 25 bp, Homo sapien
attctcctgcttatcccagtgtccc

SEQ ID NO: 5160980 - DNA, 25 bp, Homo sapien
cagaccatgatacttttgggccaaa

SEQ ID NO: 5160981 - DNA, 25 bp, Homo sapien
gaaattttgtgtctccccagcggaa

SEQ ID NO: 5160982 - DNA, 25 bp, Homo sapien
caggacacagttgcccattagcttt

SEQ ID NO: 5160983 - DNA, 25 bp, Homo sapien
tgtagtgaatgtggtaatccagacc

SEQ ID NO: 5160984 - DNA, 25 bp, Homo sapien
tgggtgctgaagattgtctgatgaa

SEQ ID NO: 5160985 - DNA, 25 bp, Homo sapien
cttggctttcatcgaggtttttatt

SEQ ID NO: 5160986 - DNA, 25 bp, Homo sapien
caaaaccttggctttcatcgaggtt

SEQ ID NO: 5160987 - DNA, 25 bp, Homo sapien
ccttggctttcatcgaggtttttat

SEQ ID NO: 5160988 - DNA, 25 bp, Homo sapien
ctccaaaaccttggctttcatcgag

SEQ ID NO: 5160989 - DNA, 25 bp, Homo sapien
cacattatttttcgctgacaagtca

SEQ ID NO: 5160990 - DNA, 25 bp, Homo sapien
acattgttaaggcacagctctcttt

SEQ ID NO: 5160991 - DNA, 25 bp, Homo sapien
gaagcaatcataactcgttttggaa

SEQ ID NO: 5160992 - DNA, 25 bp, Homo sapien
gagctgctgtatgtagtacaaccca

SEQ ID NO: 5160993 - DNA, 25 bp, Homo sapien
aatttccttgtgcattctggctctg

SEQ ID NO: 5160994 - DNA, 25 bp, Homo sapien
caaaacagaagatatgacctgacca

SEQ ID NO: 5160995 - DNA, 25 bp, Homo sapien
gacctgaccagaatatacagctgtt

SEQ ID NO: 5160996 - DNA, 25 bp, Homo sapien
ggagggcagtgttaattgtagcacc

SEQ ID NO: 5160997 - DNA, 25 bp, Homo sapien
tacgggtccccatcagggtcaacta

SEQ ID NO: 5160998 - DNA, 25 bp, Homo sapien
tgctgtggccacttagttccgacct

SEQ ID NO: 5160999 - DNA, 25 bp, Homo sapien
tatcacgctccctgcttgctggtgc

SEQ ID NO: 5161000 - DNA, 25 bp, Homo sapien
cgagttttgtcgcaactttccaagg

SEQ ID NO: 5161001 - DNA, 25 bp, Homo sapien
cacagctctgttacgggaagtcgca

SEQ ID NO: 5161002 - DNA, 25 bp, Homo sapien
tggacacacagctctgttacgggaa

SEQ ID NO: 5161003 - DNA, 25 bp, Homo sapien
ctcggaaaagggagcgtggacacac

SEQ ID NO: 5161004 - DNA, 25 bp, Homo sapien
aaaagggagcgtggacacacagctc

SEQ ID NO: 5161005 - DNA, 25 bp, Homo sapien
gcgctcaagtaagaaaccctgctcg

SEQ ID NO: 5161006 - DNA, 25 bp, Homo sapien
atcccagggaaacgcacgcgacgga

SEQ ID NO: 5161007 - DNA, 25 bp, Homo sapien
gactcaagggtctccaaagccttct

SEQ ID NO: 5161008 - DNA, 25 bp, Homo sapien
gcgtttatttgtggaggcgctcaag

SEQ ID NO: 5161009 - DNA, 25 bp, Homo sapien
atccggcctgggcgacggcggtgag

SEQ ID NO: 5161010 - DNA, 25 bp, Homo sapien
tccatccggcctgggcgacggcggt

SEQ ID NO: 5161011 - DNA, 25 bp, Homo sapien
ccggcctgggcgacggcggtgagac

SEQ ID NO: 5161012 - DNA, 25 bp, Homo sapien
cactccatccggcctgggcgacggc

SEQ ID NO: 5161013 - DNA, 25 bp, Homo sapien
cctgatgcggcaaatctgtgggtcc

SEQ ID NO: 5161014 - DNA, 25 bp, Homo sapien
ctgtgggtccttcgggatccttgaa

SEQ ID NO: 5161015 - DNA, 25 bp, Homo sapien
tttcgaagacccaagacggcggatc

SEQ ID NO: 5161016 - DNA, 25 bp, Homo sapien
tccaaaacactttccgggccagatg

SEQ ID NO: 5161017 - DNA, 25 bp, Homo sapien
gactggccgcacgaggtaaatatac

SEQ ID NO: 5161018 - DNA, 25 bp, Homo sapien
cagtaaaaacaacgcactgggcagt

SEQ ID NO: 5161019 - DNA, 25 bp, Homo sapien
tttatagatccaaccaggagtcgca

SEQ ID NO: 5161020 - DNA, 25 bp, Homo sapien
gaagggcctacacacggctttcata

SEQ ID NO: 5161021 - DNA, 25 bp, Homo sapien
gaatggaggttaccaaggctagctg

SEQ ID NO: 5161022 - DNA, 25 bp, Homo sapien
ttacacggggtacacagtcaaattc

SEQ ID NO: 5161023 - DNA, 25 bp, Homo sapien
tcacagagacagaactagaatggag

SEQ ID NO: 5161024 - DNA, 25 bp, Homo sapien
aaaccacaaggagattatgctatgt

SEQ ID NO: 5161025 - DNA, 25 bp, Homo sapien
ggagcacaaggagaacaaggagttt

SEQ ID NO: 5161026 - DNA, 25 bp, Homo sapien
ttgagaagtggagcacaaggagaac

SEQ ID NO: 5161027 - DNA, 25 bp, Homo sapien
ccaagtgcagtggttgagaagtgga

SEQ ID NO: 5161028 - DNA, 25 bp, Homo sapien
cagtggttgagaagtggagcacaag

SEQ ID NO: 5161029 - DNA, 25 bp, Homo sapien
gactcttctttgtcttacggaagcc

SEQ ID NO: 5161030 - DNA, 25 bp, Homo sapien
gcatgtctgctttcagcctggtgac

SEQ ID NO: 5161031 - DNA, 25 bp, Homo sapien
ggaagccaaatacttccagtcagca

SEQ ID NO: 5161032 - DNA, 25 bp, Homo sapien
gcctggtgacacaatcgtttttaac

SEQ ID NO: 5161033 - DNA, 25 bp, Homo sapien
gaggcaagaggtcacttgtgtccag

SEQ ID NO: 5161034 - DNA, 25 bp, Homo sapien
gaaatataagcaccaaattcagtgg

SEQ ID NO: 5161035 - DNA, 25 bp, Homo sapien
ggaaaaccacatgaataggtatgga

SEQ ID NO: 5161036 - DNA, 25 bp, Homo sapien
ctggaaactcactagatgtcaatca

SEQ ID NO: 5161037 - DNA, 25 bp, Homo sapien
tacacacaagttaattcctggcaca

SEQ ID NO: 5161038 - DNA, 25 bp, Homo sapien
tggtcaggctggatcatgcttctta

SEQ ID NO: 5161039 - DNA, 25 bp, Homo sapien
taacctgactgatagagagtccagg

SEQ ID NO: 5161040 - DNA, 25 bp, Homo sapien
tccaggatatatgatgaaagtgcca

SEQ ID NO: 5161041 - DNA, 25 bp, Homo sapien
agataggacctcaatcacttctggc

SEQ ID NO: 5161042 - DNA, 25 bp, Homo sapien
gatgctaaagataggacctcaatca

SEQ ID NO: 5161043 - DNA, 25 bp, Homo sapien
gaattcttgtctagcaattattttg

SEQ ID NO: 5161044 - DNA, 25 bp, Homo sapien
aaatgtatgctttaaggagtttcta

SEQ ID NO: 5161045 - DNA, 25 bp, Homo sapien
cggctgtccctgactattattgtgt

SEQ ID NO: 5161046 - DNA, 25 bp, Homo sapien
acccggctgtccctgactattattg

SEQ ID NO: 5161047 - DNA, 25 bp, Homo sapien
cccggctgtccctgactattattgt

SEQ ID NO: 5161048 - DNA, 25 bp, Homo sapien
ccggctgtccctgactattattgtg

SEQ ID NO: 5161049 - DNA, 25 bp, Homo sapien
gaacaaagacagcttatatgctaga

SEQ ID NO: 5161050 - DNA, 25 bp, Homo sapien
cttgagagaaatttagggagggtca

SEQ ID NO: 5161051 - DNA, 25 bp, Homo sapien
tcagttcatgggcaggggctacaag

SEQ ID NO: 5161052 - DNA, 25 bp, Homo sapien
tgctagaggcaagatggtcagttaa

SEQ ID NO: 5161053 - DNA, 25 bp, Homo sapien
gatggcccaccgaaggaactataga

SEQ ID NO: 5161054 - DNA, 25 bp, Homo sapien
gccagtgtacctagatcaaattcct

SEQ ID NO: 5161055 - DNA, 25 bp, Homo sapien
actatagacagggaactattggcca

SEQ ID NO: 5161056 - DNA, 25 bp, Homo sapien
cctcttttggtgttagatggcccac

SEQ ID NO: 5161057 - DNA, 25 bp, Homo sapien
tcctggcagatagggagcgtgcaaa

SEQ ID NO: 5161058 - DNA, 25 bp, Homo sapien
ccctggcaacaagctgatcctggca

SEQ ID NO: 5161059 - DNA, 25 bp, Homo sapien
tctatactgaaggagacagacacta

SEQ ID NO: 5161060 - DNA, 25 bp, Homo sapien
tatctactgagagcccgctatgtgc

SEQ ID NO: 5161061 - DNA, 25 bp, Homo sapien
aatgctaggtcataggtatgtttac

SEQ ID NO: 5161062 - DNA, 25 bp, Homo sapien
gcgcccggccgaacgcttccatttc

SEQ ID NO: 5161063 - DNA, 25 bp, Homo sapien
tgtgagtagataactcaggagtgaa

SEQ ID NO: 5161064 - DNA, 25 bp, Homo sapien
aggagtgaaatgctaggtcataggt

SEQ ID NO: 5161065 - DNA, 25 bp, Homo sapien
actgggccacgatcttgacctcaat

SEQ ID NO: 5161066 - DNA, 25 bp, Homo sapien
gaagagctggcttggagcgccacac

SEQ ID NO: 5161067 - DNA, 25 bp, Homo sapien
cctagagcgatctaaacatgcggct

SEQ ID NO: 5161068 - DNA, 25 bp, Homo sapien
ctgtatcgtaatggagatgaatctc

SEQ ID NO: 5161069 - DNA, 25 bp, Homo sapien
gggacatttaactcatggaggtgct

SEQ ID NO: 5161070 - DNA, 25 bp, Homo sapien
actctgcctggatagaaagttgacc

SEQ ID NO: 5161071 - DNA, 25 bp, Homo sapien
gaaggcagttccagttttagcacag

SEQ ID NO: 5161072 - DNA, 25 bp, Homo sapien
ttctgtcgccagcaattaaagacca

SEQ ID NO: 5161073 - DNA, 25 bp, Homo sapien
atctttacttgttgaatccagggcc

SEQ ID NO: 5161074 - DNA, 25 bp, Homo sapien
tgcaatagtatcaccaaaagatggt

SEQ ID NO: 5161075 - DNA, 25 bp, Homo sapien
ggcgaaaatctcaagtggctgaact

SEQ ID NO: 5161076 - DNA, 25 bp, Homo sapien
gtcagacgtctacaaaaggccaggt

SEQ ID NO: 5161077 - DNA, 25 bp, Homo sapien
cttccagataggatatagttgggtc

SEQ ID NO: 5161078 - DNA, 25 bp, Homo sapien
gaaaagatctctttgcatagctttg

SEQ ID NO: 5161079 - DNA, 25 bp, Homo sapien
gtggttactctaaatgttgcgtgtg

SEQ ID NO: 5161080 - DNA, 25 bp, Homo sapien
tattattgacctgttagcacttaag

SEQ ID NO: 5161081 - DNA, 25 bp, Homo sapien
ctgaggccttcagacaggcatcgcc

SEQ ID NO: 5161082 - DNA, 25 bp, Homo sapien
aggcatcgccagaaacaacctgcga

SEQ ID NO: 5161083 - DNA, 25 bp, Homo sapien
gttcggaaccgaggcgcgcgtccaa

SEQ ID NO: 5161084 - DNA, 25 bp, Homo sapien
gccgtccgctgcgttcggaaccgag

SEQ ID NO: 5161085 - DNA, 25 bp, Homo sapien
ggcgcgccggaggacgggctgtccg

SEQ ID NO: 5161086 - DNA, 25 bp, Homo sapien
ccggtcttacgccacgaccgtcgct

SEQ ID NO: 5161087 - DNA, 25 bp, Homo sapien
gtcttacgccacgaccgtcgctagg

SEQ ID NO: 5161088 - DNA, 25 bp, Homo sapien
cttacgccacgaccgtcgctagggt

SEQ ID NO: 5161089 - DNA, 25 bp, Homo sapien
gcaaccagcgcaatcaatcgcaacg

SEQ ID NO: 5161090 - DNA, 25 bp, Homo sapien
atcagccagtgtagcaagggcggcc

SEQ ID NO: 5161091 - DNA, 25 bp, Homo sapien
ccaaggaagtggacgccgcaggcaa

SEQ ID NO: 5161092 - DNA, 25 bp, Homo sapien
tgcacaacaatcagccagtgtagca

SEQ ID NO: 5161093 - DNA, 25 bp, Homo sapien
ctctcggatgtcctgctcggcagcc

SEQ ID NO: 5161094 - DNA, 25 bp, Homo sapien
ggaaaactgacacaaacgaggcaag

SEQ ID NO: 5161095 - DNA, 25 bp, Homo sapien
tgaagaccaggtgctaatcgagcct

SEQ ID NO: 5161096 - DNA, 25 bp, Homo sapien
gggagtgcctaacctaaagctagag

SEQ ID NO: 5161097 - DNA, 25 bp, Homo sapien
gacgccaatgagataaatacgagac

SEQ ID NO: 5161098 - DNA, 25 bp, Homo sapien
catgcccagttaatgttcttttata

SEQ ID NO: 5161099 - DNA, 25 bp, Homo sapien
accatgcccagttaatgttctttta

SEQ ID NO: 5161100 - DNA, 25 bp, Homo sapien
caaccatgcccagttaatgttcttt

SEQ ID NO: 5161101 - DNA, 25 bp, Homo sapien
gcaaccatgcccagttaatgttctt

SEQ ID NO: 5161102 - DNA, 25 bp, Homo sapien
acccagcaccctgatggaccccttg

SEQ ID NO: 5161103 - DNA, 25 bp, Homo sapien
gctgtttgttctaaactctgtacaa

SEQ ID NO: 5161104 - DNA, 25 bp, Homo sapien
aatctctcgagctgtttgttctaaa

SEQ ID NO: 5161105 - DNA, 25 bp, Homo sapien
gcagtagagttaaaatctctcgagc

SEQ ID NO: 5161106 - DNA, 25 bp, Homo sapien
ttctggatagaaactctccctctaa

SEQ ID NO: 5161107 - DNA, 25 bp, Homo sapien
tctaaataagagactgataattgga

SEQ ID NO: 5161108 - DNA, 25 bp, Homo sapien
aactctccctctaaataagagactg

SEQ ID NO: 5161109 - DNA, 25 bp, Homo sapien
gtcttctggatagaaactctccctc

SEQ ID NO: 5161110 - DNA, 25 bp, Homo sapien
aaggttccatgtctaaacttgacat

SEQ ID NO: 5161111 - DNA, 25 bp, Homo sapien
aatgaaggttccatgtctaaacttg

SEQ ID NO: 5161112 - DNA, 25 bp, Homo sapien
ggttccatgtctaaacttgacatat

SEQ ID NO: 5161113 - DNA, 25 bp, Homo sapien
aaaagtcactagataacacaaaaga

SEQ ID NO: 5161114 - DNA, 25 bp, Homo sapien
tttagctgtgctggcaataccttac

SEQ ID NO: 5161115 - DNA, 25 bp, Homo sapien
gctcctttagctgtgctggcaatac

SEQ ID NO: 5161116 - DNA, 25 bp, Homo sapien
agctcctttagctgtgctggcaata

SEQ ID NO: 5161117 - DNA, 25 bp, Homo sapien
tcctttagctgtgctggcaatacct

SEQ ID NO: 5161118 - DNA, 25 bp, Homo sapien
gggaatatattaggagacacactgg

SEQ ID NO: 5161119 - DNA, 25 bp, Homo sapien
taaggagatgcacaccagctgctat

SEQ ID NO: 5161120 - DNA, 25 bp, Homo sapien
cagaggatgcctaaaattggattgc

SEQ ID NO: 5161121 - DNA, 25 bp, Homo sapien
cataaataacgtcatccttaaggag

SEQ ID NO: 5161122 - DNA, 25 bp, Homo sapien
cttcaaagatgttagatgtgttttt

SEQ ID NO: 5161123 - DNA, 25 bp, Homo sapien
gtcttcaaagatgttagatgtgttt

SEQ ID NO: 5161124 - DNA, 25 bp, Homo sapien
aatgttctcgagctttcaaacacct

SEQ ID NO: 5161125 - DNA, 25 bp, Homo sapien
tgtaccaaaatgttctcgagctttc

SEQ ID NO: 5161126 - DNA, 25 bp, Homo sapien
tgctgccaagaagaccaagcgctgc

SEQ ID NO: 5161127 - DNA, 25 bp, Homo sapien
gcttctcgagtcactagtgtttctg

SEQ ID NO: 5161128 - DNA, 25 bp, Homo sapien
ttccaaatacacaacaaatgctgcc

SEQ ID NO: 5161129 - DNA, 25 bp, Homo sapien
ttctgtaactgcttctcgagtcact

SEQ ID NO: 5161130 - DNA, 25 bp, Homo sapien
tacatccagatgaaatcctttctcc

SEQ ID NO: 5161131 - DNA, 25 bp, Homo sapien
gaaatcctttctcccgatctggctc

SEQ ID NO: 5161132 - DNA, 25 bp, Homo sapien
ctgagagataatcttctacatccag

SEQ ID NO: 5161133 - DNA, 25 bp, Homo sapien
gaattagaactcctgagagataatc

SEQ ID NO: 5161134 - DNA, 25 bp, Homo sapien
gtcatatttcaatccgtcgtagcgc

SEQ ID NO: 5161135 - DNA, 25 bp, Homo sapien
gtcgtagcgcttcctcagggagtca

SEQ ID NO: 5161136 - DNA, 25 bp, Homo sapien
ttgagaaggcgaaaaccggaatcca

SEQ ID NO: 5161137 - DNA, 25 bp, Homo sapien
ccagcagtcacgctgttgacagaca

SEQ ID NO: 5161138 - DNA, 25 bp, Homo sapien
gcaactgagcatcctaactaccgta

SEQ ID NO: 5161139 - DNA, 25 bp, Homo sapien
tacatcaacagtcaaggtaagcaag

SEQ ID NO: 5161140 - DNA, 25 bp, Homo sapien
cctgggtgtggatggctaactcgca

SEQ ID NO: 5161141 - DNA, 25 bp, Homo sapien
tatactgtatccaggctatgcctgg

SEQ ID NO: 5161142 - DNA, 25 bp, Homo sapien
tcttttacagtttgatggcagtgag

SEQ ID NO: 5161143 - DNA, 25 bp, Homo sapien
gctgcaatagcagaatattaaggca

SEQ ID NO: 5161144 - DNA, 25 bp, Homo sapien
tgttgagcttgacttcgcagtttaa

SEQ ID NO: 5161145 - DNA, 25 bp, Homo sapien
tgcagctataattcccttggcaaaa

SEQ ID NO: 5161146 - DNA, 25 bp, Homo sapien
caaatggccccttgtacaaacagga

SEQ ID NO: 5161147 - DNA, 25 bp, Homo sapien
ctgtgaaaggtatgccaaatggccc

SEQ ID NO: 5161148 - DNA, 25 bp, Homo sapien
caaacgtattgtctgtgggatgatc

SEQ ID NO: 5161149 - DNA, 25 bp, Homo sapien
cattttaagtgaccatcatgggcac

SEQ ID NO: 5161150 - DNA, 25 bp, Homo sapien
gctttacaacaagccagcaacaaac

SEQ ID NO: 5161151 - DNA, 25 bp, Homo sapien
aaatcctcaaatggaattccaagac

SEQ ID NO: 5161152 - DNA, 25 bp, Homo sapien
aatcctcaaatggaattccaagacc

SEQ ID NO: 5161153 - DNA, 25 bp, Homo sapien
attgctttacaacaagccagcaaca

SEQ ID NO: 5161154 - DNA, 25 bp, Homo sapien
taattccccaatcaaggtataacac

SEQ ID NO: 5161155 - DNA, 25 bp, Homo sapien
tttacagtatagaactctgagtggc

SEQ ID NO: 5161156 - DNA, 25 bp, Homo sapien
ttggttagtgtaaccattacacagc

SEQ ID NO: 5161157 - DNA, 25 bp, Homo sapien
cacacaaatgttatctgcgctttac

SEQ ID NO: 5161158 - DNA, 25 bp, Homo sapien
ttatgaaactatgccagtagcgacc

SEQ ID NO: 5161159 - DNA, 25 bp, Homo sapien
gacagtgtcccctaattcatctcta

SEQ ID NO: 5161160 - DNA, 25 bp, Homo sapien
agtagcgacctgcatgtttgtctca

SEQ ID NO: 5161161 - DNA, 25 bp, Homo sapien
ggcaaatctccccaagtgtatatgg

SEQ ID NO: 5161162 - DNA, 25 bp, Homo sapien
tagcacagtaaactcaacacttgca

SEQ ID NO: 5161163 - DNA, 25 bp, Homo sapien
gcaacatctagcacagtaaactcaa

SEQ ID NO: 5161164 - DNA, 25 bp, Homo sapien
aaaaagtacagccagccgtgcaaca

SEQ ID NO: 5161165 - DNA, 25 bp, Homo sapien
caggcacccaaaattctagtccaaa

SEQ ID NO: 5161166 - DNA, 25 bp, Homo sapien
gaagactgacggccaaactctcccg

SEQ ID NO: 5161167 - DNA, 25 bp, Homo sapien
tccctgctgatcctttgttctttgc

SEQ ID NO: 5161168 - DNA, 25 bp, Homo sapien
cctgctgatcctttgttctttgcct

SEQ ID NO: 5161169 - DNA, 25 bp, Homo sapien
caggaagactgacggccaaactctc

SEQ ID NO: 5161170 - DNA, 25 bp, Homo sapien
ctttgactagctagcaagaaacaca

SEQ ID NO: 5161171 - DNA, 25 bp, Homo sapien
tttgactagctagcaagaaacacaa

SEQ ID NO: 5161172 - DNA, 25 bp, Homo sapien
tgactagctagcaagaaacacaaag

SEQ ID NO: 5161173 - DNA, 25 bp, Homo sapien
gactagctagcaagaaacacaaagc

SEQ ID NO: 5161174 - DNA, 25 bp, Homo sapien
gtgttccgcccacattcgacagaag

SEQ ID NO: 5161175 - DNA, 25 bp, Homo sapien
gactgccctgacctacgtcttgaaa

SEQ ID NO: 5161176 - DNA, 25 bp, Homo sapien
caaaggtgtctccatattagggtcc

SEQ ID NO: 5161177 - DNA, 25 bp, Homo sapien
tcaactcaggacctcatggaacata

SEQ ID NO: 5161178 - DNA, 25 bp, Homo sapien
ctgaatttgttcctcaaatttcttt

SEQ ID NO: 5161179 - DNA, 25 bp, Homo sapien
tttgttcctcaaatttcttttggca

SEQ ID NO: 5161180 - DNA, 25 bp, Homo sapien
ttttggcatgtattatttttctatc

SEQ ID NO: 5161181 - DNA, 25 bp, Homo sapien
gttcctcaaatttcttttggcatgt

SEQ ID NO: 5161182 - DNA, 25 bp, Homo sapien
aaagccggggaaaatctagagtcag

SEQ ID NO: 5161183 - DNA, 25 bp, Homo sapien
tgctgagatcccaggaatgcgcagc

SEQ ID NO: 5161184 - DNA, 25 bp, Homo sapien
gggtaaatgctgattcagtctacat

SEQ ID NO: 5161185 - DNA, 25 bp, Homo sapien
tagagtcagcccagaaaccgtgact

SEQ ID NO: 5161186 - DNA, 25 bp, Homo sapien
ggtgctcattaaagctggccccata

SEQ ID NO: 5161187 - DNA, 25 bp, Homo sapien
agtaaatcagccgtgggtccaacca

SEQ ID NO: 5161188 - DNA, 25 bp, Homo sapien
ttcacagtgcaggagtcaaaggcat

SEQ ID NO: 5161189 - DNA, 25 bp, Homo sapien
ggtccaaccatcttgtgtcactggg

SEQ ID NO: 5161190 - DNA, 25 bp, Homo sapien
gggccccggccatcatccaatcttc

SEQ ID NO: 5161191 - DNA, 25 bp, Homo sapien
ccccggccatcatccaatcttcaca

SEQ ID NO: 5161192 - DNA, 25 bp, Homo sapien
ccggccatcatccaatcttcacaag

SEQ ID NO: 5161193 - DNA, 25 bp, Homo sapien
cggccatcatccaatcttcacaagc

SEQ ID NO: 5161194 - DNA, 25 bp, Homo sapien
gccacagaaatgacgaacaggtgtt

SEQ ID NO: 5161195 - DNA, 25 bp, Homo sapien
ataagaatctttgtggctgcacaga

SEQ ID NO: 5161196 - DNA, 25 bp, Homo sapien
gaagagtaagactccctgggaagcc

SEQ ID NO: 5161197 - DNA, 25 bp, Homo sapien
gaaactgctcagagtcaaacccagc

SEQ ID NO: 5161198 - DNA, 25 bp, Homo sapien
agccctggttagtgtttaatcaggg

SEQ ID NO: 5161199 - DNA, 25 bp, Homo sapien
gtaaatctgttgttgacgtcaccca

SEQ ID NO: 5161200 - DNA, 25 bp, Homo sapien
gacactgacatgcacagaggagaga

SEQ ID NO: 5161201 - DNA, 25 bp, Homo sapien
gatcttggaaagacgcggagaagac

SEQ ID NO: 5161202 - DNA, 25 bp, Homo sapien
ctggacattcctggatgctgagaag

SEQ ID NO: 5161203 - DNA, 25 bp, Homo sapien
atgtctggacattcctggatgctga

SEQ ID NO: 5161204 - DNA, 25 bp, Homo sapien
aagactccgataagcgggcacattg

SEQ ID NO: 5161205 - DNA, 25 bp, Homo sapien
agcgggcacattgcaaccatgagct

SEQ ID NO: 5161206 - DNA, 25 bp, Homo sapien
caaaagaaacccagcgccccatagc

SEQ ID NO: 5161207 - DNA, 25 bp, Homo sapien
cattcgcaaagttcaccgcaatcaa

SEQ ID NO: 5161208 - DNA, 25 bp, Homo sapien
caccgcaatcaataatagaacatgt

SEQ ID NO: 5161209 - DNA, 25 bp, Homo sapien
catcacatacaattctcccattgaa

SEQ ID NO: 5161210 - DNA, 25 bp, Homo sapien
gcagcccagacttgcgacataacca

SEQ ID NO: 5161211 - DNA, 25 bp, Homo sapien
tgcatcagacgtcacttgcaccaag

SEQ ID NO: 5161212 - DNA, 25 bp, Homo sapien
cagtaaacgtgcaacaggtggtgca

SEQ ID NO: 5161213 - DNA, 25 bp, Homo sapien
caagcgccgagaggaatcagaagca

SEQ ID NO: 5161214 - DNA, 25 bp, Homo sapien
ctgggtgatgatgggccttccccca

SEQ ID NO: 5161215 - DNA, 25 bp, Homo sapien
gggcgggagtgccagctgggtgatg

SEQ ID NO: 5161216 - DNA, 25 bp, Homo sapien
cttcccccacgcaggcagaagtgtc

SEQ ID NO: 5161217 - DNA, 25 bp, Homo sapien
ccacagccatccgggctggtggctc

SEQ ID NO: 5161218 - DNA, 25 bp, Homo sapien
tcaggcccgcaggaacacggctggt

SEQ ID NO: 5161219 - DNA, 25 bp, Homo sapien
caggcccgcaggaacacggctggtg

SEQ ID NO: 5161220 - DNA, 25 bp, Homo sapien
aggcccgcaggaacacggctggtga

SEQ ID NO: 5161221 - DNA, 25 bp, Homo sapien
ggcccgcaggaacacggctggtgaa

SEQ ID NO: 5161222 - DNA, 25 bp, Homo sapien
gcttcgaggagaagctcatcgtcct

SEQ ID NO: 5161223 - DNA, 25 bp, Homo sapien
gaggagaagctcatcgtcctggctg

SEQ ID NO: 5161224 - DNA, 25 bp, Homo sapien
ggcagcttcgaggagaagctcatcg

SEQ ID NO: 5161225 - DNA, 25 bp, Homo sapien
gaagctcatcgtcctggctgcatct

SEQ ID NO: 5161226 - DNA, 25 bp, Homo sapien
caggatctcacaaggatgaaagcta

SEQ ID NO: 5161227 - DNA, 25 bp, Homo sapien
tggccaggatctcacaaggatgaaa

SEQ ID NO: 5161228 - DNA, 25 bp, Homo sapien
aagctagcatcttggtcgtggccca

SEQ ID NO: 5161229 - DNA, 25 bp, Homo sapien
agccaagtggccaggatctcacaag

SEQ ID NO: 5161230 - DNA, 25 bp, Homo sapien
cccagggccggtgaccacgtgtgca

SEQ ID NO: 5161231 - DNA, 25 bp, Homo sapien
gccggtgaccacgtgtgcagctaca

SEQ ID NO: 5161232 - DNA, 25 bp, Homo sapien
acgtgtgcagctacagtaggtgtta

SEQ ID NO: 5161233 - DNA, 25 bp, Homo sapien
gtgaccacgtgtgcagctacagtag

SEQ ID NO: 5161234 - DNA, 25 bp, Homo sapien
gtggcttgttattgattcctgttcc

SEQ ID NO: 5161235 - DNA, 25 bp, Homo sapien
tattgattcctgttccatacacctc

SEQ ID NO: 5161236 - DNA, 25 bp, Homo sapien
gcttgttattgattcctgttccata

SEQ ID NO: 5161237 - DNA, 25 bp, Homo sapien
tgattcctgttccatacacctccat

SEQ ID NO: 5161238 - DNA, 25 bp, Homo sapien
tttctctgaagccctcagtgtttac

SEQ ID NO: 5161239 - DNA, 25 bp, Homo sapien
cttttctctgaagccctcagtgttt

SEQ ID NO: 5161240 - DNA, 25 bp, Homo sapien
ttttctctgaagccctcagtgttta

SEQ ID NO: 5161241 - DNA, 25 bp, Homo sapien
tacagtgactcaaatcgtccctgtt

SEQ ID NO: 5161242 - DNA, 25 bp, Homo sapien
cagcacctctctttggacatctaca

SEQ ID NO: 5161243 - DNA, 25 bp, Homo sapien
gatatgtgcatccatttttatctca

SEQ ID NO: 5161244 - DNA, 25 bp, Homo sapien
ctctctttggacatctacagtgact

SEQ ID NO: 5161245 - DNA, 25 bp, Homo sapien
taaatccttcaaacagtggacaaaa

SEQ ID NO: 5161246 - DNA, 25 bp, Homo sapien
cagaagacaatctggctgaaagcag

SEQ ID NO: 5161247 - DNA, 25 bp, Homo sapien
ctgaaagcaggctggccagaatgca

SEQ ID NO: 5161248 - DNA, 25 bp, Homo sapien
tgactgggcagaagacaatctggct

SEQ ID NO: 5161249 - DNA, 25 bp, Homo sapien
ccagaggctgggtgtcgccctgggc

SEQ ID NO: 5161250 - DNA, 25 bp, Homo sapien
gtgtcgccctgggccccgctcactg

SEQ ID NO: 5161251 - DNA, 25 bp, Homo sapien
gccagaggctgggtgtcgccctggg

SEQ ID NO: 5161252 - DNA, 25 bp, Homo sapien
tgtcgccctgggccccgctcactgg

SEQ ID NO: 5161253 - DNA, 25 bp, Homo sapien
ggttccatcacttccgtgtccggct

SEQ ID NO: 5161254 - DNA, 25 bp, Homo sapien
tccatcacttccgtgtccggctcag

SEQ ID NO: 5161255 - DNA, 25 bp, Homo sapien
gaggttccatcacttccgtgtccgg

SEQ ID NO: 5161256 - DNA, 25 bp, Homo sapien
ggaggttccatcacttccgtgtccg

SEQ ID NO: 5161257 - DNA, 25 bp, Homo sapien
ccccttggggagtactgcacactgt

SEQ ID NO: 5161258 - DNA, 25 bp, Homo sapien
agtgctccatccacgggagccgcag

SEQ ID NO: 5161259 - DNA, 25 bp, Homo sapien
gtactgcacactgtccccaagagag

SEQ ID NO: 5161260 - DNA, 25 bp, Homo sapien
ggatgagttccaactctgttcccac

SEQ ID NO: 5161261 - DNA, 25 bp, Homo sapien
tgcggtggcacagctacaaaccttg

SEQ ID NO: 5161262 - DNA, 25 bp, Homo sapien
tggcaatcttccaacacagttgtct

SEQ ID NO: 5161263 - DNA, 25 bp, Homo sapien
catctctgaagtctgcggtggcaca

SEQ ID NO: 5161264 - DNA, 25 bp, Homo sapien
tcctcctcgtctccaaggcagtgtt

SEQ ID NO: 5161265 - DNA, 25 bp, Homo sapien
agaacaaagcaagagccgataaaaa

SEQ ID NO: 5161266 - DNA, 25 bp, Homo sapien
tagctgggcacggttgcatatacca

SEQ ID NO: 5161267 - DNA, 25 bp, Homo sapien
ttggctgagtgtagtagttcgcacc

SEQ ID NO: 5161268 - DNA, 25 bp, Homo sapien
aagatcaggctgtacttagctatga

SEQ ID NO: 5161269 - DNA, 25 bp, Homo sapien
agctctccatacctgccaggcccag

SEQ ID NO: 5161270 - DNA, 25 bp, Homo sapien
tttccaaatcccagcacgagggatg

SEQ ID NO: 5161271 - DNA, 25 bp, Homo sapien
caaagccagcaggagtgagatggac

SEQ ID NO: 5161272 - DNA, 25 bp, Homo sapien
gaagctctgaagagctttccaaatc

SEQ ID NO: 5161273 - DNA, 25 bp, Homo sapien
tgatgaagctaccataggccacgct

SEQ ID NO: 5161274 - DNA, 25 bp, Homo sapien
caaggagtttctgtagcagcgtctg

SEQ ID NO: 5161275 - DNA, 25 bp, Homo sapien
cagtaatcacgaaaagcatagccaa

SEQ ID NO: 5161276 - DNA, 25 bp, Homo sapien
taacagccttgatccatccggaaca

SEQ ID NO: 5161277 - DNA, 25 bp, Homo sapien
tgatgcaaaagaggaggacccagag

SEQ ID NO: 5161278 - DNA, 25 bp, Homo sapien
agaagccacgctagctgcctcatcc

SEQ ID NO: 5161279 - DNA, 25 bp, Homo sapien
ggatgggaccccattgacaagcacc

SEQ ID NO: 5161280 - DNA, 25 bp, Homo sapien
ctgaatggacacacgggatgggacc

SEQ ID NO: 5161281 - DNA, 25 bp, Homo sapien
cccattgacaagcaccttcaaactg

SEQ ID NO: 5161282 - DNA, 25 bp, Homo sapien
tggtgacagccttagccaagaacag

SEQ ID NO: 5161283 - DNA, 25 bp, Homo sapien
tttcctccattgcacagaaatgtgg

SEQ ID NO: 5161284 - DNA, 25 bp, Homo sapien
tggcacttcctctctaccactatta

SEQ ID NO: 5161285 - DNA, 25 bp, Homo sapien
cgggaagagcgccttcttggtgaca

SEQ ID NO: 5161286 - DNA, 25 bp, Homo sapien
gatgaagtgcgcagcaacaacatgc

SEQ ID NO: 5161287 - DNA, 25 bp, Homo sapien
aacatgcaccttgcaaggccctgct

SEQ ID NO: 5161288 - DNA, 25 bp, Homo sapien
gcaacaacatgcaccttgcaaggcc

SEQ ID NO: 5161289 - DNA, 25 bp, Homo sapien
catgactgatgaagtgcgcagcaac

SEQ ID NO: 5161290 - DNA, 25 bp, Homo sapien
ctggttccaagttgaacaaggagta

SEQ ID NO: 5161291 - DNA, 25 bp, Homo sapien
ccatgaacccaatctctttgaggac

SEQ ID NO: 5161292 - DNA, 25 bp, Homo sapien
tgtcgtcgcgagagccaaccatttt

SEQ ID NO: 5161293 - DNA, 25 bp, Homo sapien
tgtcgtccgtattgttccaccatga

SEQ ID NO: 5161294 - DNA, 25 bp, Homo sapien
atgaaaatcggccaataacaaacac

SEQ ID NO: 5161295 - DNA, 25 bp, Homo sapien
caaacacataagtgccattgtttac

SEQ ID NO: 5161296 - DNA, 25 bp, Homo sapien
agcaacgcccttggcaagagatccc

SEQ ID NO: 5161297 - DNA, 25 bp, Homo sapien
ttgtttaccacagcaacgcccttgg

SEQ ID NO: 5161298 - DNA, 25 bp, Homo sapien
cacgtgaagacttcgtaaagaagac

SEQ ID NO: 5161299 - DNA, 25 bp, Homo sapien
actcctggggcacgtgaagacttcg

SEQ ID NO: 5161300 - DNA, 25 bp, Homo sapien
taaagaagactggtacttcaagcag

SEQ ID NO: 5161301 - DNA, 25 bp, Homo sapien
tagtaatttctgaacctagagtgac

SEQ ID NO: 5161302 - DNA, 25 bp, Homo sapien
cagctccaaggaatagcttgcccaa

SEQ ID NO: 5161303 - DNA, 25 bp, Homo sapien
tacaatatgagccaaacgagaaaac

SEQ ID NO: 5161304 - DNA, 25 bp, Homo sapien
gaggcagttgggtaattagtcttcc

SEQ ID NO: 5161305 - DNA, 25 bp, Homo sapien
tcaatcttgtcagtcggaggcagtt

SEQ ID NO: 5161306 - DNA, 25 bp, Homo sapien
taccaaggcacaagcagttttaccc

SEQ ID NO: 5161307 - DNA, 25 bp, Homo sapien
gaagcactgcattagcatgacactg

SEQ ID NO: 5161308 - DNA, 25 bp, Homo sapien
tgccctaccctgatttgtaccaagg

SEQ ID NO: 5161309 - DNA, 25 bp, Homo sapien
tagttttgaccttaccgagctcctg

SEQ ID NO: 5161310 - DNA, 25 bp, Homo sapien
gtataacacactgggagcacgaggc

SEQ ID NO: 5161311 - DNA, 25 bp, Homo sapien
gctctagggtccatgtggctgaaca

SEQ ID NO: 5161312 - DNA, 25 bp, Homo sapien
cattatatggtatagacccacccag

SEQ ID NO: 5161313 - DNA, 25 bp, Homo sapien
tctgctatttcgaggagagactgta

SEQ ID NO: 5161314 - DNA, 25 bp, Homo sapien
tgagtaaatccacagcagtggacgt

SEQ ID NO: 5161315 - DNA, 25 bp, Homo sapien
ctgagtaaatccacagcagtggacg

SEQ ID NO: 5161316 - DNA, 25 bp, Homo sapien
gagtaaatccacagcagtggacgtg

SEQ ID NO: 5161317 - DNA, 25 bp, Homo sapien
tcttaggtctgcttagctggctgcc

SEQ ID NO: 5161318 - DNA, 25 bp, Homo sapien
ctttccacgtatcagatggccggtg

SEQ ID NO: 5161319 - DNA, 25 bp, Homo sapien
cggtgatgtaagaggagttctccca

SEQ ID NO: 5161320 - DNA, 25 bp, Homo sapien
gaaaagtggtctccccataaagctg

SEQ ID NO: 5161321 - DNA, 25 bp, Homo sapien
atggttaccacattgcaaaggtgag

SEQ ID NO: 5161322 - DNA, 25 bp, Homo sapien
catcaggttttgtcccgggatggtt

SEQ ID NO: 5161323 - DNA, 25 bp, Homo sapien
ctggctgcatcaggttttgtcccgg

SEQ ID NO: 5161324 - DNA, 25 bp, Homo sapien
gctgcatcaggttttgtcccgggat

SEQ ID NO: 5161325 - DNA, 25 bp, Homo sapien
aactgataccgctgcattctttttc

SEQ ID NO: 5161326 - DNA, 25 bp, Homo sapien
caatttcctccgtacactgtaactg

SEQ ID NO: 5161327 - DNA, 25 bp, Homo sapien
atagctgacaatttcctccgtacac

SEQ ID NO: 5161328 - DNA, 25 bp, Homo sapien
tacactgtaactgataccgctgcat

SEQ ID NO: 5161329 - DNA, 25 bp, Homo sapien
gcaaaccagttttgctaacccagca

SEQ ID NO: 5161330 - DNA, 25 bp, Homo sapien
atatttgttgcgctaggatgcagag

SEQ ID NO: 5161331 - DNA, 25 bp, Homo sapien
cttgatatttgttgcgctaggatgc

SEQ ID NO: 5161332 - DNA, 25 bp, Homo sapien
gaggcctcctggtgcagtaaggcac

SEQ ID NO: 5161333 - DNA, 25 bp, Homo sapien
acctttgttccattcaagaaactgg

SEQ ID NO: 5161334 - DNA, 25 bp, Homo sapien
cacctttgttccattcaagaaactg

SEQ ID NO: 5161335 - DNA, 25 bp, Homo sapien
tttgttccattcaagaaactggaaa

SEQ ID NO: 5161336 - DNA, 25 bp, Homo sapien
cagggtgcggcttcttcaagaagca

SEQ ID NO: 5161337 - DNA, 25 bp, Homo sapien
gctcggctatcaccgcctgtggaca

SEQ ID NO: 5161338 - DNA, 25 bp, Homo sapien
ttgatcccagggagtcgcaatccac

SEQ ID NO: 5161339 - DNA, 25 bp, Homo sapien
tgctgtttccagataccgctcggct

SEQ ID NO: 5161340 - DNA, 25 bp, Homo sapien
tatgacaatgttcatgtcttcaaaa

SEQ ID NO: 5161341 - DNA, 25 bp, Homo sapien
cttcaaaatcttgtcggaggccgaa

SEQ ID NO: 5161342 - DNA, 25 bp, Homo sapien
taccattatgattagttctcaaaga

SEQ ID NO: 5161343 - DNA, 25 bp, Homo sapien
gggcgctccttacttttgcaagtaa

SEQ ID NO: 5161344 - DNA, 25 bp, Homo sapien
cagtataagccagaaaagtctggtt

SEQ ID NO: 5161345 - DNA, 25 bp, Homo sapien
gtataagccagaaaagtctggttga

SEQ ID NO: 5161346 - DNA, 25 bp, Homo sapien
agtataagccagaaaagtctggttg

SEQ ID NO: 5161347 - DNA, 25 bp, Homo sapien
tctgccccatttcaaccttcagtgc

SEQ ID NO: 5161348 - DNA, 25 bp, Homo sapien
gtagattctcctccggtagttcctg

SEQ ID NO: 5161349 - DNA, 25 bp, Homo sapien
tgatatagatccgtaccactcgcgc

SEQ ID NO: 5161350 - DNA, 25 bp, Homo sapien
tctgcttccacagacataaactgga

SEQ ID NO: 5161351 - DNA, 25 bp, Homo sapien
aggctcactgcggtgcgttcagcgc

SEQ ID NO: 5161352 - DNA, 25 bp, Homo sapien
tcccaggctcactgcggtgcgttca

SEQ ID NO: 5161353 - DNA, 25 bp, Homo sapien
tcactgcggtgcgttcagcgctgtc

SEQ ID NO: 5161354 - DNA, 25 bp, Homo sapien
tgcggtgcgttcagcgctgtcctgt

SEQ ID NO: 5161355 - DNA, 25 bp, Homo sapien
catctccccaggtaccagtcagttt

SEQ ID NO: 5161356 - DNA, 25 bp, Homo sapien
atctccccaggtaccagtcagtttt

SEQ ID NO: 5161357 - DNA, 25 bp, Homo sapien
cacatctccccaggtaccagtcagt

SEQ ID NO: 5161358 - DNA, 25 bp, Homo sapien
acatctccccaggtaccagtcagtt

SEQ ID NO: 5161359 - DNA, 25 bp, Homo sapien
gagcgagacgtgctatgcagggacc

SEQ ID NO: 5161360 - DNA, 25 bp, Homo sapien
cagagcgagacgtgctatgcaggga

SEQ ID NO: 5161361 - DNA, 25 bp, Homo sapien
cgagacgtgctatgcagggaccaaa

SEQ ID NO: 5161362 - DNA, 25 bp, Homo sapien
ccctctgaccccctccatatgtgat

SEQ ID NO: 5161363 - DNA, 25 bp, Homo sapien
gcctggaagttgctagggaagcact

SEQ ID NO: 5161364 - DNA, 25 bp, Homo sapien
ttctctcgataattgctaggatggc

SEQ ID NO: 5161365 - DNA, 25 bp, Homo sapien
cagtgtttctagctgaactggaggc

SEQ ID NO: 5161366 - DNA, 25 bp, Homo sapien
gctttaccaacacggttacctcaga

SEQ ID NO: 5161367 - DNA, 25 bp, Homo sapien
ttctccagtgttgagcaaagcctca

SEQ ID NO: 5161368 - DNA, 25 bp, Homo sapien
cagtgttgagcaaagcctcatgtct

SEQ ID NO: 5161369 - DNA, 25 bp, Homo sapien
ccaccgtgtctcaagtttgaggttt

SEQ ID NO: 5161370 - DNA, 25 bp, Homo sapien
tcctgatttcccaccgtgtctcaag

SEQ ID NO: 5161371 - DNA, 25 bp, Homo sapien
tctaccttaggctccaacacaagtc

SEQ ID NO: 5161372 - DNA, 25 bp, Homo sapien
cactgagctaggatgcagcaggatc

SEQ ID NO: 5161373 - DNA, 25 bp, Homo sapien
ccttcaggcctcttgaatgatcatc

SEQ ID NO: 5161374 - DNA, 25 bp, Homo sapien
tgtagaatccaaggccagatcggtc

SEQ ID NO: 5161375 - DNA, 25 bp, Homo sapien
cacttcaacctggtggattctggtg

SEQ ID NO: 5161376 - DNA, 25 bp, Homo sapien
acttcaacctggtggattctggtgc

SEQ ID NO: 5161377 - DNA, 25 bp, Homo sapien
ttcaacctggtggattctggtgctt

SEQ ID NO: 5161378 - DNA, 25 bp, Homo sapien
accacttcaacctggtggattctgg

SEQ ID NO: 5161379 - DNA, 25 bp, Homo sapien
ggaggacagtggaggagaagtcaag

SEQ ID NO: 5161380 - DNA, 25 bp, Homo sapien
cagtggaggagaagtcaagaataag

SEQ ID NO: 5161381 - DNA, 25 bp, Homo sapien
gaggagaagtcaagaataaggctgg

SEQ ID NO: 5161382 - DNA, 25 bp, Homo sapien
aggacagtggaggagaagtcaagaa

SEQ ID NO: 5161383 - DNA, 25 bp, Homo sapien
taaggtggccgctgtacagcagcca

SEQ ID NO: 5161384 - DNA, 25 bp, Homo sapien
tgccacatcaaatctgcaccagcca

SEQ ID NO: 5161385 - DNA, 25 bp, Homo sapien
tggccccaatgccacatcaaatctg

SEQ ID NO: 5161386 - DNA, 25 bp, Homo sapien
tggccgctgtacagcagccatccag

SEQ ID NO: 5161387 - DNA, 25 bp, Homo sapien
agtgacaaaatgcccagacactttc

SEQ ID NO: 5161388 - DNA, 25 bp, Homo sapien
tgacaaaatgcccagacactttcca

SEQ ID NO: 5161389 - DNA, 25 bp, Homo sapien
acaaaatgcccagacactttccatc

SEQ ID NO: 5161390 - DNA, 25 bp, Homo sapien
gacaaaatgcccagacactttccat

SEQ ID NO: 5161391 - DNA, 25 bp, Homo sapien
gaagggccatctaggactcttctgt

SEQ ID NO: 5161392 - DNA, 25 bp, Homo sapien
catcaagcctgatctcataggaagg

SEQ ID NO: 5161393 - DNA, 25 bp, Homo sapien
caagcagtcacaagggtgctggact

SEQ ID NO: 5161394 - DNA, 25 bp, Homo sapien
tggacttcactcaagtcatcaagcc

SEQ ID NO: 5161395 - DNA, 25 bp, Homo sapien
cagcggccacacagatgagtaaccc

SEQ ID NO: 5161396 - DNA, 25 bp, Homo sapien
ccagcggccacacagatgagtaacc

SEQ ID NO: 5161397 - DNA, 25 bp, Homo sapien
ttccttgtgtctgcccagcggccac

SEQ ID NO: 5161398 - DNA, 25 bp, Homo sapien
atcaatggatgtcaagaatccagct

SEQ ID NO: 5161399 - DNA, 25 bp, Homo sapien
gatgaagtaataggtttctagcttg

SEQ ID NO: 5161400 - DNA, 25 bp, Homo sapien
tctagcttgagatcaatggatgtca

SEQ ID NO: 5161401 - DNA, 25 bp, Homo sapien
agaaacacattgaagatgatgaagt

SEQ ID NO: 5161402 - DNA, 25 bp, Homo sapien
gaagtcccagctatgtcgacagccc

SEQ ID NO: 5161403 - DNA, 25 bp, Homo sapien
cttgaaggctgaggagatgcctcca

SEQ ID NO: 5161404 - DNA, 25 bp, Homo sapien
aaggctgaggagatgcctccaatgg

SEQ ID NO: 5161405 - DNA, 25 bp, Homo sapien
tccttgaaggctgaggagatgcctc

SEQ ID NO: 5161406 - DNA, 25 bp, Homo sapien
atcctgtcccagttttgtgtagcac

SEQ ID NO: 5161407 - DNA, 25 bp, Homo sapien
gagtttcttagctgagtatcgccaa

SEQ ID NO: 5161408 - DNA, 25 bp, Homo sapien
tctacatacaactctggcatggaca

SEQ ID NO: 5161409 - DNA, 25 bp, Homo sapien
tcaccttgtagatcctccaaacagc

SEQ ID NO: 5161410 - DNA, 25 bp, Homo sapien
gttcctccagatcagacccccaacc

SEQ ID NO: 5161411 - DNA, 25 bp, Homo sapien
caaccctggtaacttacatcaccaa

SEQ ID NO: 5161412 - DNA, 25 bp, Homo sapien
tcctccagatcagacccccaaccct

SEQ ID NO: 5161413 - DNA, 25 bp, Homo sapien
gtaacttacatcaccaaaaacaaca

SEQ ID NO: 5161414 - DNA, 25 bp, Homo sapien
ttcatggagaaatgcgtgatgctgg

SEQ ID NO: 5161415 - DNA, 25 bp, Homo sapien
cccttatatgacaggctctggtgca

SEQ ID NO: 5161416 - DNA, 25 bp, Homo sapien
cactaaaggtattgtagcacagact

SEQ ID NO: 5161417 - DNA, 25 bp, Homo sapien
atcagaatgcaccagagcctgtcag

SEQ ID NO: 5161418 - DNA, 25 bp, Homo sapien
attccaggtgtgtggaccgcagcag

SEQ ID NO: 5161419 - DNA, 25 bp, Homo sapien
agaccatccacttgggggtgatgaa

SEQ ID NO: 5161420 - DNA, 25 bp, Homo sapien
tgaaggaggggggatgccgtgtgca

SEQ ID NO: 5161421 - DNA, 25 bp, Homo sapien
gggatgccgtgtgcagggtgcagag

SEQ ID NO: 5161422 - DNA, 25 bp, Homo sapien
tctcataagagcgtactgcccatca

SEQ ID NO: 5161423 - DNA, 25 bp, Homo sapien
taaagtctcataagagcgtactgcc

SEQ ID NO: 5161424 - DNA, 25 bp, Homo sapien
ctcataagagcgtactgcccatcac

SEQ ID NO: 5161425 - DNA, 25 bp, Homo sapien
agtctcataagagcgtactgcccat

SEQ ID NO: 5161426 - DNA, 25 bp, Homo sapien
tcctaaggagtaactgccaggcaag

SEQ ID NO: 5161427 - DNA, 25 bp, Homo sapien
ccagagcctggtatcctcctaagga

SEQ ID NO: 5161428 - DNA, 25 bp, Homo sapien
acatggatgtgagccaacatatggc

SEQ ID NO: 5161429 - DNA, 25 bp, Homo sapien
gccaggcaagctgggatccactggc

SEQ ID NO: 5161430 - DNA, 25 bp, Homo sapien
caaagaaattaaatcgcttcttgtc

SEQ ID NO: 5161431 - DNA, 25 bp, Homo sapien
aattaaatcgcttcttgtcacacaa

SEQ ID NO: 5161432 - DNA, 25 bp, Homo sapien
tcttcttagggaatgctattgttac

SEQ ID NO: 5161433 - DNA, 25 bp, Homo sapien
cacacaaagcatgttccacaaggca

SEQ ID NO: 5161434 - DNA, 25 bp, Homo sapien
tctatgtgccttttaagggcaattg

SEQ ID NO: 5161435 - DNA, 25 bp, Homo sapien
gctcaggtccgatgatattctgaaa

SEQ ID NO: 5161436 - DNA, 25 bp, Homo sapien
taagggcaattgaatctgaaactcg

SEQ ID NO: 5161437 - DNA, 25 bp, Homo sapien
tcctttctgctaaggactgttatat

SEQ ID NO: 5161438 - DNA, 25 bp, Homo sapien
aatgcttgtgggactccaaggtgtt

SEQ ID NO: 5161439 - DNA, 25 bp, Homo sapien
cataaaatgcttgtgggactccaag

SEQ ID NO: 5161440 - DNA, 25 bp, Homo sapien
atgtcataaaatgcttgtgggactc

SEQ ID NO: 5161441 - DNA, 25 bp, Homo sapien
tgggactccaaggtgttgtagttct

SEQ ID NO: 5161442 - DNA, 25 bp, Homo sapien
gcggaggtgggtcactttcctctgc

SEQ ID NO: 5161443 - DNA, 25 bp, Homo sapien
cctagcggaggtgggtcactttcct

SEQ ID NO: 5161444 - DNA, 25 bp, Homo sapien
tagcggaggtgggtcactttcctct

SEQ ID NO: 5161445 - DNA, 25 bp, Homo sapien
agcggaggtgggtcactttcctctg

SEQ ID NO: 5161446 - DNA, 25 bp, Homo sapien
gaccctctgcccattcgtgcatttt

SEQ ID NO: 5161447 - DNA, 25 bp, Homo sapien
gcccttctgatgctcgcctgtgact

SEQ ID NO: 5161448 - DNA, 25 bp, Homo sapien
ttcgtgcattttcatctggcccttc

SEQ ID NO: 5161449 - DNA, 25 bp, Homo sapien
cacagtcattgatacacacaggatg

SEQ ID NO: 5161450 - DNA, 25 bp, Homo sapien
gaatcatcgagtcgcttccaatcta

SEQ ID NO: 5161451 - DNA, 25 bp, Homo sapien
gcttccaatctatgattttctgctg

SEQ ID NO: 5161452 - DNA, 25 bp, Homo sapien
taggccgagctcagcagaatcatcg

SEQ ID NO: 5161453 - DNA, 25 bp, Homo sapien
ttctgctgatgctgacaaaggccac

SEQ ID NO: 5161454 - DNA, 25 bp, Homo sapien
accctccaagtgtcaaccaagtcat

SEQ ID NO: 5161455 - DNA, 25 bp, Homo sapien
ctggaatacctttgcaccctccaag

SEQ ID NO: 5161456 - DNA, 25 bp, Homo sapien
atccttcctttagcttgatcctcag

SEQ ID NO: 5161457 - DNA, 25 bp, Homo sapien
gggatccttcctttagcttgatcct

SEQ ID NO: 5161458 - DNA, 25 bp, Homo sapien
ggcttagatctgcaagctcctcttt

SEQ ID NO: 5161459 - DNA, 25 bp, Homo sapien
catgctccaacggatagaaccaaaa

SEQ ID NO: 5161460 - DNA, 25 bp, Homo sapien
caacggatagaaccaaaagcagcac

SEQ ID NO: 5161461 - DNA, 25 bp, Homo sapien
ccctccctgactaatctgcaaatgg

SEQ ID NO: 5161462 - DNA, 25 bp, Homo sapien
acactcccatagaggaactgaagag

SEQ ID NO: 5161463 - DNA, 25 bp, Homo sapien
gaggaactgaagaggtcatcgagtt

SEQ ID NO: 5161464 - DNA, 25 bp, Homo sapien
gaactgaagaggtcatcgagttttc

SEQ ID NO: 5161465 - DNA, 25 bp, Homo sapien
aacccaaccacactcccatagagga

SEQ ID NO: 5161466 - DNA, 25 bp, Homo sapien
tccaacggatgagctaggtgggtct

SEQ ID NO: 5161467 - DNA, 25 bp, Homo sapien
tcatggttatgaccaggaggtccaa

SEQ ID NO: 5161468 - DNA, 25 bp, Homo sapien
gcaactcaccagttacccgatcatg

SEQ ID NO: 5161469 - DNA, 25 bp, Homo sapien
gcagccgctgctatactgtaaagca

SEQ ID NO: 5161470 - DNA, 25 bp, Homo sapien
ggttgtccattcttggatcactcag

SEQ ID NO: 5161471 - DNA, 25 bp, Homo sapien
ttggttgtccattcttggatcactc

SEQ ID NO: 5161472 - DNA, 25 bp, Homo sapien
tggttgtccattcttggatcactca

SEQ ID NO: 5161473 - DNA, 25 bp, Homo sapien
gttgtccattcttggatcactcaga

SEQ ID NO: 5161474 - DNA, 25 bp, Homo sapien
cagcagacttggcaaagtggactcc

SEQ ID NO: 5161475 - DNA, 25 bp, Homo sapien
tcaactagttggatgacagcagact

SEQ ID NO: 5161476 - DNA, 25 bp, Homo sapien
cagagaagcaatgtaggtgtctacc

SEQ ID NO: 5161477 - DNA, 25 bp, Homo sapien
tggtcagtaccagcagtaactctct

SEQ ID NO: 5161478 - DNA, 25 bp, Homo sapien
ttaattgcagcactcagttccccag

SEQ ID NO: 5161479 - DNA, 25 bp, Homo sapien
tgcttaattgcagcactcagttccc

SEQ ID NO: 5161480 - DNA, 25 bp, Homo sapien
tttgcttaattgcagcactcagttc

SEQ ID NO: 5161481 - DNA, 25 bp, Homo sapien
gcttaattgcagcactcagttcccc

SEQ ID NO: 5161482 - DNA, 25 bp, Homo sapien
ggaaatagggtctttagagagtcca

SEQ ID NO: 5161483 - DNA, 25 bp, Homo sapien
caatgtgcctgtaattggaaatagg

SEQ ID NO: 5161484 - DNA, 25 bp, Homo sapien
taacaaattcttgagggtatgagga

SEQ ID NO: 5161485 - DNA, 25 bp, Homo sapien
cagaaggacggcatgattagggcca

SEQ ID NO: 5161486 - DNA, 25 bp, Homo sapien
tggagatgtcgtcttgctgcccctg

SEQ ID NO: 5161487 - DNA, 25 bp, Homo sapien
gctgcccctgcttttagcaggctgc

SEQ ID NO: 5161488 - DNA, 25 bp, Homo sapien
ggtacatgtgtctctcagctggaga

SEQ ID NO: 5161489 - DNA, 25 bp, Homo sapien
ctaagtggtacatgtgtctctcagc

SEQ ID NO: 5161490 - DNA, 25 bp, Homo sapien
tggttgactcaattacagacagcct

SEQ ID NO: 5161491 - DNA, 25 bp, Homo sapien
tcctgggcctgttcaaattgctaaa

SEQ ID NO: 5161492 - DNA, 25 bp, Homo sapien
taacactgcgagtctaacactggcc

SEQ ID NO: 5161493 - DNA, 25 bp, Homo sapien
tttcgattaaagaactggagcccat

SEQ ID NO: 5161494 - DNA, 25 bp, Homo sapien
tcatgtctgaggcttttggcgaaaa

SEQ ID NO: 5161495 - DNA, 25 bp, Homo sapien
cattccatctgctgtcttggggctg

SEQ ID NO: 5161496 - DNA, 25 bp, Homo sapien
tctgaggcttttggcgaaaacctgg

SEQ ID NO: 5161497 - DNA, 25 bp, Homo sapien
tgctcttggcaggacctactcatgt

SEQ ID NO: 5161498 - DNA, 25 bp, Homo sapien
actgtggttagcagactgagtagca

SEQ ID NO: 5161499 - DNA, 25 bp, Homo sapien
agctgtcgcagctgatcccttcagg

SEQ ID NO: 5161500 - DNA, 25 bp, Homo sapien
gcaacaattatctgtgaaaaccaag

SEQ ID NO: 5161501 - DNA, 25 bp, Homo sapien
ggaactctgggataattctcttgca

SEQ ID NO: 5161502 - DNA, 25 bp, Homo sapien
tcactcttacagaaatacgcaagca

SEQ ID NO: 5161503 - DNA, 25 bp, Homo sapien
gattcactcttacagaaatacgcaa

SEQ ID NO: 5161504 - DNA, 25 bp, Homo sapien
tcagttgattcactcttacagaaat

SEQ ID NO: 5161505 - DNA, 25 bp, Homo sapien
gttgattcactcttacagaaatacg

SEQ ID NO: 5161506 - DNA, 25 bp, Homo sapien
cagtcaccttccacacaccaggaac

SEQ ID NO: 5161507 - DNA, 25 bp, Homo sapien
tattgcctagggtttttgcatttgt

SEQ ID NO: 5161508 - DNA, 25 bp, Homo sapien
gagaaagattggcccttaaattgtc

SEQ ID NO: 5161509 - DNA, 25 bp, Homo sapien
ttattaattcgtaaaggctatacaa

SEQ ID NO: 5161510 - DNA, 25 bp, Homo sapien
atatttgtgcagttttgcccttaaa

SEQ ID NO: 5161511 - DNA, 25 bp, Homo sapien
cagctagaacactactgatgtatag

SEQ ID NO: 5161512 - DNA, 25 bp, Homo sapien
gacctgtctaacaaaattgggcaaa

SEQ ID NO: 5161513 - DNA, 25 bp, Homo sapien
ttttttggcattgaccctggatagt

SEQ ID NO: 5161514 - DNA, 25 bp, Homo sapien
tagaattataccatcagcaaagagc

SEQ ID NO: 5161515 - DNA, 25 bp, Homo sapien
gtattttgacagcgatagcattaag

SEQ ID NO: 5161516 - DNA, 25 bp, Homo sapien
tttgacagcgatagcattaagttta

SEQ ID NO: 5161517 - DNA, 25 bp, Homo sapien
ttttgacagcgatagcattaagttt

SEQ ID NO: 5161518 - DNA, 25 bp, Homo sapien
tattttgacagcgatagcattaagt

SEQ ID NO: 5161519 - DNA, 25 bp, Homo sapien
gattactagaacctcaatgagcccg

SEQ ID NO: 5161520 - DNA, 25 bp, Homo sapien
gagcccgtgatcgatctgactttca

SEQ ID NO: 5161521 - DNA, 25 bp, Homo sapien
cgtgcctcagacataccgtgctcat

SEQ ID NO: 5161522 - DNA, 25 bp, Homo sapien
gaatactttagcaggctccgtgcct

SEQ ID NO: 5161523 - DNA, 25 bp, Homo sapien
tttctttgagcactatggtcttgcc

SEQ ID NO: 5161524 - DNA, 25 bp, Homo sapien
tgccttgttcatgactatacgtgtg

SEQ ID NO: 5161525 - DNA, 25 bp, Homo sapien
ttactgttgcatttgaggcttcctg

SEQ ID NO: 5161526 - DNA, 25 bp, Homo sapien
acacgagtgtctaatgtcctaatca

SEQ ID NO: 5161527 - DNA, 25 bp, Homo sapien
cctgcagggatctgatatttgacct

SEQ ID NO: 5161528 - DNA, 25 bp, Homo sapien
tgagctgtcagatgctgagattcca

SEQ ID NO: 5161529 - DNA, 25 bp, Homo sapien
ccctgaagagcagtgagctgtcaga

SEQ ID NO: 5161530 - DNA, 25 bp, Homo sapien
gattccatcagacaaagagcccagg

SEQ ID NO: 5161531 - DNA, 25 bp, Homo sapien
aactccttgcctgggttgtagtcaa

SEQ ID NO: 5161532 - DNA, 25 bp, Homo sapien
ggctcactgctagctggcaggttaa

SEQ ID NO: 5161533 - DNA, 25 bp, Homo sapien
ggtcctaggtggtctctcagccttg

SEQ ID NO: 5161534 - DNA, 25 bp, Homo sapien
gttcgctgacttgagagaagctttc

SEQ ID NO: 5161535 - DNA, 25 bp, Homo sapien
ttcacccataagaaagcggcattga

SEQ ID NO: 5161536 - DNA, 25 bp, Homo sapien
tcgccaatgacatgcagctaagttc

SEQ ID NO: 5161537 - DNA, 25 bp, Homo sapien
gagtaactgactgcttgaccgaaac

SEQ ID NO: 5161538 - DNA, 25 bp, Homo sapien
tgagaacattggtcccttctgcaag

SEQ ID NO: 5161539 - DNA, 25 bp, Homo sapien
gaggcacacggatgtccaggtttgc

SEQ ID NO: 5161540 - DNA, 25 bp, Homo sapien
ggcacacggatgtccaggtttgcag

SEQ ID NO: 5161541 - DNA, 25 bp, Homo sapien
tggaggcacacggatgtccaggttt

SEQ ID NO: 5161542 - DNA, 25 bp, Homo sapien
cacacggatgtccaggtttgcagag

SEQ ID NO: 5161543 - DNA, 25 bp, Homo sapien
tgaagagtctctctttgaacttatc

SEQ ID NO: 5161544 - DNA, 25 bp, Homo sapien
tttgtttagctctttgaacatgtca

SEQ ID NO: 5161545 - DNA, 25 bp, Homo sapien
ttatccaacttagagtttgttgagc

SEQ ID NO: 5161546 - DNA, 25 bp, Homo sapien
ctctatggtttctgagaatgtctat

SEQ ID NO: 5161547 - DNA, 25 bp, Homo sapien
caagaggcagccaatcttcggatta

SEQ ID NO: 5161548 - DNA, 25 bp, Homo sapien
tcttcggattattttgcactgtcat

SEQ ID NO: 5161549 - DNA, 25 bp, Homo sapien
ggatcagaagttcattaaccagaga

SEQ ID NO: 5161550 - DNA, 25 bp, Homo sapien
gaaatggttatatccctcaagaggc

SEQ ID NO: 5161551 - DNA, 25 bp, Homo sapien
gaagaagttgattcctggatcactg

SEQ ID NO: 5161552 - DNA, 25 bp, Homo sapien
agtcctgagtgcctccagtacctga

SEQ ID NO: 5161553 - DNA, 25 bp, Homo sapien
atgcctgaagaagttgattcctgga

SEQ ID NO: 5161554 - DNA, 25 bp, Homo sapien
tccagtacctgatatatgcctgaag

SEQ ID NO: 5161555 - DNA, 25 bp, Homo sapien
tgaaaggttgttattcttgactcgt

SEQ ID NO: 5161556 - DNA, 25 bp, Homo sapien
tactagtacaagtcaagttttggtg

SEQ ID NO: 5161557 - DNA, 25 bp, Homo sapien
gtttacacaccatagttaacagtta

SEQ ID NO: 5161558 - DNA, 25 bp, Homo sapien
tctacactttaactgtgttgcttgg

SEQ ID NO: 5161559 - DNA, 25 bp, Homo sapien
gagccaaatcttgttcaatgtggag

SEQ ID NO: 5161560 - DNA, 25 bp, Homo sapien
tgttccaaacagacagtcacggtgt

SEQ ID NO: 5161561 - DNA, 25 bp, Homo sapien
taatgttgcagcatgtcctcctctg

SEQ ID NO: 5161562 - DNA, 25 bp, Homo sapien
cacggtgttcataaatccagcgagc

SEQ ID NO: 5161563 - DNA, 25 bp, Homo sapien
tggaagggtaagcaaggctctgggg

SEQ ID NO: 5161564 - DNA, 25 bp, Homo sapien
ggattcagaatattccacggagagc

SEQ ID NO: 5161565 - DNA, 25 bp, Homo sapien
tgccaggaccacatcaaatgaaggg

SEQ ID NO: 5161566 - DNA, 25 bp, Homo sapien
ccagtaaatgatgccatggacacca

SEQ ID NO: 5161567 - DNA, 25 bp, Homo sapien
agcaaaacagctgacgcctcaatcc

SEQ ID NO: 5161568 - DNA, 25 bp, Homo sapien
gagtgtggcaatatcgtgctaaact

SEQ ID NO: 5161569 - DNA, 25 bp, Homo sapien
gctaaatgtggtaagcactggcctt

SEQ ID NO: 5161570 - DNA, 25 bp, Homo sapien
aaactaggactcaccgagagagaag

SEQ ID NO: 5161571 - DNA, 25 bp, Homo sapien
ccatttgaaatcgtggggtcgagtc

SEQ ID NO: 5161572 - DNA, 25 bp, Homo sapien
caacctcttcagttttatcagccat

SEQ ID NO: 5161573 - DNA, 25 bp, Homo sapien
tcaacctcttcagttttatcagcca

SEQ ID NO: 5161574 - DNA, 25 bp, Homo sapien
gttcaacctcttcagttttatcagc

SEQ ID NO: 5161575 - DNA, 25 bp, Homo sapien
atgttcaacctcttcagttttatca

SEQ ID NO: 5161576 - DNA, 25 bp, Homo sapien
ggtatgtccgctttctgactttttc

SEQ ID NO: 5161577 - DNA, 25 bp, Homo sapien
ggttctacccataagcttgaagcca

SEQ ID NO: 5161578 - DNA, 25 bp, Homo sapien
gccacacagttctggtatgtccgct

SEQ ID NO: 5161579 - DNA, 25 bp, Homo sapien
gcactggcagcaatggttctaccca

SEQ ID NO: 5161580 - DNA, 25 bp, Homo sapien
tggcgcccagagaggcggaccaggc

SEQ ID NO: 5161581 - DNA, 25 bp, Homo sapien
aggctgccccaaagggagcagccag

SEQ ID NO: 5161582 - DNA, 25 bp, Homo sapien
caggctgccccaaagggagcagcca

SEQ ID NO: 5161583 - DNA, 25 bp, Homo sapien
gcgcccagagaggcggaccaggctg

SEQ ID NO: 5161584 - DNA, 25 bp, Homo sapien
cctctactgtgccagagtgtccctc

SEQ ID NO: 5161585 - DNA, 25 bp, Homo sapien
cagagtgtccctcaaatttgctctt

SEQ ID NO: 5161586 - DNA, 25 bp, Homo sapien
ccagagtgtccctcaaatttgctct

SEQ ID NO: 5161587 - DNA, 25 bp, Homo sapien
agagtgtccctcaaatttgctcttc

SEQ ID NO: 5161588 - DNA, 25 bp, Homo sapien
gtgcccgggattctgcagccaccac

SEQ ID NO: 5161589 - DNA, 25 bp, Homo sapien
agccaccaccgcagtcctcatgact

SEQ ID NO: 5161590 - DNA, 25 bp, Homo sapien
caccaccgcagtcctcatgactggt

SEQ ID NO: 5161591 - DNA, 25 bp, Homo sapien
caccgcagtcctcatgactggtgac

SEQ ID NO: 5161592 - DNA, 25 bp, Homo sapien
agtctatgttatcacagcaaaggag

SEQ ID NO: 5161593 - DNA, 25 bp, Homo sapien
gctgccagacagaacagtctatgtt

SEQ ID NO: 5161594 - DNA, 25 bp, Homo sapien
cagcaaaggagctcagggataaaag

SEQ ID NO: 5161595 - DNA, 25 bp, Homo sapien
caggagtcctgtagatgaccaggaa

SEQ ID NO: 5161596 - DNA, 25 bp, Homo sapien
aatcctggttggggaccccaagctg

SEQ ID NO: 5161597 - DNA, 25 bp, Homo sapien
tcctggttggggaccccaagctgac

SEQ ID NO: 5161598 - DNA, 25 bp, Homo sapien
atcctggttggggaccccaagctga

SEQ ID NO: 5161599 - DNA, 25 bp, Homo sapien
tcaggaatcctggttggggacccca

SEQ ID NO: 5161600 - DNA, 25 bp, Homo sapien
taataagatacactgactctttctc

SEQ ID NO: 5161601 - DNA, 25 bp, Homo sapien
tcatttcagggtctctaacatagcc

SEQ ID NO: 5161602 - DNA, 25 bp, Homo sapien
gaatctttggaatatcatctttgtc

SEQ ID NO: 5161603 - DNA, 25 bp, Homo sapien
agccctcatgtcatagattctacta

SEQ ID NO: 5161604 - DNA, 25 bp, Homo sapien
tttgcttcaggcaagcgagcccagc

SEQ ID NO: 5161605 - DNA, 25 bp, Homo sapien
ctagtgatctgtgggacacccggtt

SEQ ID NO: 5161606 - DNA, 25 bp, Homo sapien
tctgtctgctagcatcactggccct

SEQ ID NO: 5161607 - DNA, 25 bp, Homo sapien
tctcagtgcctcttcatggagcgag

SEQ ID NO: 5161608 - DNA, 25 bp, Homo sapien
ttctgtaagtaccaattgacccact

SEQ ID NO: 5161609 - DNA, 25 bp, Homo sapien
cttgtgtgggaagacgtagagtccc

SEQ ID NO: 5161610 - DNA, 25 bp, Homo sapien
gacttattcttaggtcatctgctgc

SEQ ID NO: 5161611 - DNA, 25 bp, Homo sapien
ggaagctagctcattagtgcactgg

SEQ ID NO: 5161612 - DNA, 25 bp, Homo sapien
agttttgcaaagtgaagacttgaga

SEQ ID NO: 5161613 - DNA, 25 bp, Homo sapien
ttttgcaaagtgaagacttgagatt

SEQ ID NO: 5161614 - DNA, 25 bp, Homo sapien
gattagttttgcaaagtgaagactt

SEQ ID NO: 5161615 - DNA, 25 bp, Homo sapien
tgggaatgcatgattagttttgcaa

SEQ ID NO: 5161616 - DNA, 25 bp, Homo sapien
cttgatgccacatatgcattcttct

SEQ ID NO: 5161617 - DNA, 25 bp, Homo sapien
gatgccacatatgcattcttcttta

SEQ ID NO: 5161618 - DNA, 25 bp, Homo sapien
atgccacatatgcattcttctttat

SEQ ID NO: 5161619 - DNA, 25 bp, Homo sapien
tgatgccacatatgcattcttcttt

SEQ ID NO: 5161620 - DNA, 25 bp, Homo sapien
tctatcatttggtagcactttgcac

SEQ ID NO: 5161621 - DNA, 25 bp, Homo sapien
gaccaaatgtccctgtcctttaatg

SEQ ID NO: 5161622 - DNA, 25 bp, Homo sapien
aatgtgcggtcttcttcaatatcca

SEQ ID NO: 5161623 - DNA, 25 bp, Homo sapien
caaggactgtctatgttccagcaga

SEQ ID NO: 5161624 - DNA, 25 bp, Homo sapien
gcacagctgattggattctctttcg

SEQ ID NO: 5161625 - DNA, 25 bp, Homo sapien
tccagtttggaaatgcaccagtggc

SEQ ID NO: 5161626 - DNA, 25 bp, Homo sapien
acagcaattccttgtgtcatttcca

SEQ ID NO: 5161627 - DNA, 25 bp, Homo sapien
ctttcgaaaacagcaattccttgtg

SEQ ID NO: 5161628 - DNA, 25 bp, Homo sapien
gagctgtgaccacaagaacagttaa

SEQ ID NO: 5161629 - DNA, 25 bp, Homo sapien
gctgtgaccacaagaacagttaaaa

SEQ ID NO: 5161630 - DNA, 25 bp, Homo sapien
ctgtgaccacaagaacagttaaaag

SEQ ID NO: 5161631 - DNA, 25 bp, Homo sapien
gggagctgtgaccacaagaacagtt

SEQ ID NO: 5161632 - DNA, 25 bp, Homo sapien
tcacttctcatccagataaaccgca

SEQ ID NO: 5161633 - DNA, 25 bp, Homo sapien
ttccagggattcacagacattagct

SEQ ID NO: 5161634 - DNA, 25 bp, Homo sapien
cagggcaccaggtaaagtgatctgc

SEQ ID NO: 5161635 - DNA, 25 bp, Homo sapien
agtgatctgctagagtctgagtctc

SEQ ID NO: 5161636 - DNA, 25 bp, Homo sapien
ttcagcctcattcctcagtgtgtgc

SEQ ID NO: 5161637 - DNA, 25 bp, Homo sapien
acattgcactgctatttcagcctca

SEQ ID NO: 5161638 - DNA, 25 bp, Homo sapien
cagcctcattcctcagtgtgtgcgt

SEQ ID NO: 5161639 - DNA, 25 bp, Homo sapien
aaagacattgcactgctatttcagc

SEQ ID NO: 5161640 - DNA, 25 bp, Homo sapien
atccagagtcccgactagtaatcgt

SEQ ID NO: 5161641 - DNA, 25 bp, Homo sapien
tgatgtttccagttggatccagagt

SEQ ID NO: 5161642 - DNA, 25 bp, Homo sapien
gagtcccgactagtaatcgtagagc

SEQ ID NO: 5161643 - DNA, 25 bp, Homo sapien
tagtaatcgtagagctttcctagtt

SEQ ID NO: 5161644 - DNA, 25 bp, Homo sapien
tttccactgatacgttcagagctct

SEQ ID NO: 5161645 - DNA, 25 bp, Homo sapien
ctgtgttggcccttcctgcattttc

SEQ ID NO: 5161646 - DNA, 25 bp, Homo sapien
ccactgatacgttcagagctcttgg

SEQ ID NO: 5161647 - DNA, 25 bp, Homo sapien
ttatttccactgatacgttcagagc

SEQ ID NO: 5161648 - DNA, 25 bp, Homo sapien
aggctgtgggtagtccaagtccagc

SEQ ID NO: 5161649 - DNA, 25 bp, Homo sapien
cagccatcagccgaccaaaggctgt

SEQ ID NO: 5161650 - DNA, 25 bp, Homo sapien
ctgtgggtagtccaagtccagctcc

SEQ ID NO: 5161651 - DNA, 25 bp, Homo sapien
gccgaccaaaggctgtgggtagtcc

SEQ ID NO: 5161652 - DNA, 25 bp, Homo sapien
tagaggaaagagattcaatcggctt

SEQ ID NO: 5161653 - DNA, 25 bp, Homo sapien
ggtggcaggaggtgcaacacattta

SEQ ID NO: 5161654 - DNA, 25 bp, Homo sapien
gttctatgggctgaacaggtttctg

SEQ ID NO: 5161655 - DNA, 25 bp, Homo sapien
agtaaagaggcagccagtacatctt

SEQ ID NO: 5161656 - DNA, 25 bp, Homo sapien
ttctacatcccaaactgagaagcac

SEQ ID NO: 5161657 - DNA, 25 bp, Homo sapien
ctttctacatcccaaactgagaagc

SEQ ID NO: 5161658 - DNA, 25 bp, Homo sapien
tgacaggcttaacaccctcctgaag

SEQ ID NO: 5161659 - DNA, 25 bp, Homo sapien
ctacatcccaaactgagaagcacct

SEQ ID NO: 5161660 - DNA, 25 bp, Homo sapien
gctaccctcttattgcttccacagg

SEQ ID NO: 5161661 - DNA, 25 bp, Homo sapien
actgcagggtgaaagagttcctggg

SEQ ID NO: 5161662 - DNA, 25 bp, Homo sapien
tgttcattgcattacacatctgccg

SEQ ID NO: 5161663 - DNA, 25 bp, Homo sapien
catctgccgggctaccctcttattg

SEQ ID NO: 5161664 - DNA, 25 bp, Homo sapien
gcccaatatgccaccatccagaaag

SEQ ID NO: 5161665 - DNA, 25 bp, Homo sapien
tatttacggcccaatatgccaccat

SEQ ID NO: 5161666 - DNA, 25 bp, Homo sapien
atttacggcccaatatgccaccatc

SEQ ID NO: 5161667 - DNA, 25 bp, Homo sapien
tgccctgctgaaatacctgcttgac

SEQ ID NO: 5161668 - DNA, 25 bp, Homo sapien
tacccagggaattgaacagcagata

SEQ ID NO: 5161669 - DNA, 25 bp, Homo sapien
caagatcttgaagcaagtatggcgc

SEQ ID NO: 5161670 - DNA, 25 bp, Homo sapien
ttctcagcacgaggaagaccaatcg

SEQ ID NO: 5161671 - DNA, 25 bp, Homo sapien
atagatgcggaatgcaaaataaaga

SEQ ID NO: 5161672 - DNA, 25 bp, Homo sapien
taaggaatagatgcggaatgcaaaa

SEQ ID NO: 5161673 - DNA, 25 bp, Homo sapien
ggaatagatgcggaatgcaaaataa

SEQ ID NO: 5161674 - DNA, 25 bp, Homo sapien
gaaactggggtagagtgaaatatct

SEQ ID NO: 5161675 - DNA, 25 bp, Homo sapien
ggctcatgttcttttctctcttccc

SEQ ID NO: 5161676 - DNA, 25 bp, Homo sapien
tcatgttcttttctctcttccccat

SEQ ID NO: 5161677 - DNA, 25 bp, Homo sapien
tgaggcatggctcatgttcttttct

SEQ ID NO: 5161678 - DNA, 25 bp, Homo sapien
ctgaggcatggctcatgttcttttc

SEQ ID NO: 5161679 - DNA, 25 bp, Homo sapien
tctgccggtgcatcctctgtttctg

SEQ ID NO: 5161680 - DNA, 25 bp, Homo sapien
ctgtttctgacactgtctcctgttt

SEQ ID NO: 5161681 - DNA, 25 bp, Homo sapien
ctctgccggtgcatcctctgtttct

SEQ ID NO: 5161682 - DNA, 25 bp, Homo sapien
cctgtttgcctccttttgcttggtg

SEQ ID NO: 5161683 - DNA, 25 bp, Homo sapien
cacattggctaacacagccagcgtg

SEQ ID NO: 5161684 - DNA, 25 bp, Homo sapien
tgaagtctgctcttgcccagaactg

SEQ ID NO: 5161685 - DNA, 25 bp, Homo sapien
ggtttccactttacacactgatgca

SEQ ID NO: 5161686 - DNA, 25 bp, Homo sapien
tgttgggtgacttctttacacaggg

SEQ ID NO: 5161687 - DNA, 25 bp, Homo sapien
gacagccgtcttattaagtgattgc

SEQ ID NO: 5161688 - DNA, 25 bp, Homo sapien
attccagttttaccaccgacagccg

SEQ ID NO: 5161689 - DNA, 25 bp, Homo sapien
cccaatccaggcaattggacaaggg

SEQ ID NO: 5161690 - DNA, 25 bp, Homo sapien
tagcaacaaccaattccagttttac

SEQ ID NO: 5161691 - DNA, 25 bp, Homo sapien
cattcttctggttatggtggatccc

SEQ ID NO: 5161692 - DNA, 25 bp, Homo sapien
tgtggcatcacactgtttggaggat

SEQ ID NO: 5161693 - DNA, 25 bp, Homo sapien
ctgaggtgggactgatctagcattc

SEQ ID NO: 5161694 - DNA, 25 bp, Homo sapien
tcatctgtatgtccgcagtgtggca

SEQ ID NO: 5161695 - DNA, 25 bp, Homo sapien
tgtcaaaacacaggccagcaccaga

SEQ ID NO: 5161696 - DNA, 25 bp, Homo sapien
aagcatgttgtcaaaacacaggcca

SEQ ID NO: 5161697 - DNA, 25 bp, Homo sapien
caccagaaccaaacgaaacaggtgg

SEQ ID NO: 5161698 - DNA, 25 bp, Homo sapien
agcaccagaaccaaacgaaacaggt

SEQ ID NO: 5161699 - DNA, 25 bp, Homo sapien
catctttgtcctcccgcagatttgc

SEQ ID NO: 5161700 - DNA, 25 bp, Homo sapien
tctttgtcctcccgcagatttgctt

SEQ ID NO: 5161701 - DNA, 25 bp, Homo sapien
ctttgtcctcccgcagatttgcttt

SEQ ID NO: 5161702 - DNA, 25 bp, Homo sapien
atctttgtcctcccgcagatttgct

SEQ ID NO: 5161703 - DNA, 25 bp, Homo sapien
atgatgctggcacaggaagttagat

SEQ ID NO: 5161704 - DNA, 25 bp, Homo sapien
atgctggcacaggaagttagatcac

SEQ ID NO: 5161705 - DNA, 25 bp, Homo sapien
tgatgatgctggcacaggaagttag

SEQ ID NO: 5161706 - DNA, 25 bp, Homo sapien
tattgtaaaatgatgatgctggcac

SEQ ID NO: 5161707 - DNA, 25 bp, Homo sapien
tgcagttgaggaccagagtctccca

SEQ ID NO: 5161708 - DNA, 25 bp, Homo sapien
cagagttgaggatatgggcccttct

SEQ ID NO: 5161709 - DNA, 25 bp, Homo sapien
tctcccaatagcctgttcttgcttc

SEQ ID NO: 5161710 - DNA, 25 bp, Homo sapien
gtggcagagttgaggatatgggccc

SEQ ID NO: 5161711 - DNA, 25 bp, Homo sapien
cagcagtgaaatctccaggcttcca

SEQ ID NO: 5161712 - DNA, 25 bp, Homo sapien
gcagtgaaatctccaggcttccaac

SEQ ID NO: 5161713 - DNA, 25 bp, Homo sapien
agcagtgaaatctccaggcttccaa

SEQ ID NO: 5161714 - DNA, 25 bp, Homo sapien
gaagtagccccagcaattttctttg

SEQ ID NO: 5161715 - DNA, 25 bp, Homo sapien
ttctttgggccataatcattcgatc

SEQ ID NO: 5161716 - DNA, 25 bp, Homo sapien
aacatcagctcatcactccagttgg

SEQ ID NO: 5161717 - DNA, 25 bp, Homo sapien
gtagctttgatatttagaagtgcaa

SEQ ID NO: 5161718 - DNA, 25 bp, Homo sapien
tcaggagagagcgtaaaacagacca

SEQ ID NO: 5161719 - DNA, 25 bp, Homo sapien
caatacctcatgcactgtagaagca

SEQ ID NO: 5161720 - DNA, 25 bp, Homo sapien
gcttacatccattatgctcatcaaa

SEQ ID NO: 5161721 - DNA, 25 bp, Homo sapien
aaaatcagggcccatcaatacctca

SEQ ID NO: 5161722 - DNA, 25 bp, Homo sapien
tctttatggagccaaattccacaat

SEQ ID NO: 5161723 - DNA, 25 bp, Homo sapien
atctttatggagccaaattccacaa

SEQ ID NO: 5161724 - DNA, 25 bp, Homo sapien
ctttatggagccaaattccacaatg

SEQ ID NO: 5161725 - DNA, 25 bp, Homo sapien
tggagatgtcacgtctccagcaaaa

SEQ ID NO: 5161726 - DNA, 25 bp, Homo sapien
tatggagatgtcacgtctccagcaa

SEQ ID NO: 5161727 - DNA, 25 bp, Homo sapien
tgtatggagatgtcacgtctccagc

SEQ ID NO: 5161728 - DNA, 25 bp, Homo sapien
gagatgtcacgtctccagcaaaatc

SEQ ID NO: 5161729 - DNA, 25 bp, Homo sapien
tatatcttttgggtggattgaacat

SEQ ID NO: 5161730 - DNA, 25 bp, Homo sapien
tctgtgtagctgtatttatcaatca

SEQ ID NO: 5161731 - DNA, 25 bp, Homo sapien
aatatgttagtaattaagtaggcca

SEQ ID NO: 5161732 - DNA, 25 bp, Homo sapien
tgaattctccaactataactgtata

SEQ ID NO: 5161733 - DNA, 25 bp, Homo sapien
tcgttggaatgaatgaacgggtata

SEQ ID NO: 5161734 - DNA, 25 bp, Homo sapien
tcagaaattttgtgtcgttggaatg

SEQ ID NO: 5161735 - DNA, 25 bp, Homo sapien
atgaatgaacgggtataaacatctg

SEQ ID NO: 5161736 - DNA, 25 bp, Homo sapien
ttttgtgtcgttggaatgaatgaac

SEQ ID NO: 5161737 - DNA, 25 bp, Homo sapien
tcatcctgtagaagaactgatattt

SEQ ID NO: 5161738 - DNA, 25 bp, Homo sapien
tcctgtagaagaactgatatttgca

SEQ ID NO: 5161739 - DNA, 25 bp, Homo sapien
cctgtagaagaactgatatttgcaa

SEQ ID NO: 5161740 - DNA, 25 bp, Homo sapien
catcctgtagaagaactgatatttg

SEQ ID NO: 5161741 - DNA, 25 bp, Homo sapien
caacctgtgattccttacttccctt

SEQ ID NO: 5161742 - DNA, 25 bp, Homo sapien
tagattccgtttccatgaaagccat

SEQ ID NO: 5161743 - DNA, 25 bp, Homo sapien
gagttagattccgtttccatgaaag

SEQ ID NO: 5161744 - DNA, 25 bp, Homo sapien
aaactgagttagattccgtttccat

SEQ ID NO: 5161745 - DNA, 25 bp, Homo sapien
cactttctaaagaggaagcattgag

SEQ ID NO: 5161746 - DNA, 25 bp, Homo sapien
gttttcacctcgctttgactccaaa

SEQ ID NO: 5161747 - DNA, 25 bp, Homo sapien
taagttgcttgacttggtttgtgtc

SEQ ID NO: 5161748 - DNA, 25 bp, Homo sapien
taatttcctggcactcatttggttc

SEQ ID NO: 5161749 - DNA, 25 bp, Homo sapien
ctgttggcatccctcagaagactcc

SEQ ID NO: 5161750 - DNA, 25 bp, Homo sapien
cagatattccttggcagcataactc

SEQ ID NO: 5161751 - DNA, 25 bp, Homo sapien
gctccagatattccttggcagcata

SEQ ID NO: 5161752 - DNA, 25 bp, Homo sapien
tgttggcatccctcagaagactcca

SEQ ID NO: 5161753 - DNA, 25 bp, Homo sapien
tatttaaaagattgtgcgccacact

SEQ ID NO: 5161754 - DNA, 25 bp, Homo sapien
tttctggatgggtaagacttagcac

SEQ ID NO: 5161755 - DNA, 25 bp, Homo sapien
cagacccctggatttatttcaagca

SEQ ID NO: 5161756 - DNA, 25 bp, Homo sapien
tctgtgttaacaagtccccaagtaa

SEQ ID NO: 5161757 - DNA, 25 bp, Homo sapien
tgaccaaggccagcaaattgataag

SEQ ID NO: 5161758 - DNA, 25 bp, Homo sapien
cctgaaagttaagcttccttgtaag

SEQ ID NO: 5161759 - DNA, 25 bp, Homo sapien
cataaattatatcgcagagggagtt

SEQ ID NO: 5161760 - DNA, 25 bp, Homo sapien
gaaagataggcgagatcaagcaaca

SEQ ID NO: 5161761 - DNA, 25 bp, Homo sapien
actttgtacgtatgactgcgtctca

SEQ ID NO: 5161762 - DNA, 25 bp, Homo sapien
tagcagactttgtacgtatgactgc

SEQ ID NO: 5161763 - DNA, 25 bp, Homo sapien
cagactttgtacgtatgactgcgtc

SEQ ID NO: 5161764 - DNA, 25 bp, Homo sapien
cttgtagcagactttgtacgtatga

SEQ ID NO: 5161765 - DNA, 25 bp, Homo sapien
ccagagcaggtattcaatggatttt

SEQ ID NO: 5161766 - DNA, 25 bp, Homo sapien
ctgtggactcttgtgattcgtagca

SEQ ID NO: 5161767 - DNA, 25 bp, Homo sapien
agagcaggtattcaatggattttgc

SEQ ID NO: 5161768 - DNA, 25 bp, Homo sapien
gattcgtagcaatattttccctctc

SEQ ID NO: 5161769 - DNA, 25 bp, Homo sapien
tcatcattgtgaattgctaagagca

SEQ ID NO: 5161770 - DNA, 25 bp, Homo sapien
accattatgaagtgccttgccttgg

SEQ ID NO: 5161771 - DNA, 25 bp, Homo sapien
aagagcataaccattatgaagtgcc

SEQ ID NO: 5161772 - DNA, 25 bp, Homo sapien
cttgggcttgctgagtgttttgtat

SEQ ID NO: 5161773 - DNA, 25 bp, Homo sapien
ctgtgattataccattctctaagtt

SEQ ID NO: 5161774 - DNA, 25 bp, Homo sapien
tgtgattataccattctctaagttt

SEQ ID NO: 5161775 - DNA, 25 bp, Homo sapien
gccctgaaatgctcctagaactctg

SEQ ID NO: 5161776 - DNA, 25 bp, Homo sapien
tgctcctagaactctggaaaccacc

SEQ ID NO: 5161777 - DNA, 25 bp, Homo sapien
agtctgccctgaaatgctcctagaa

SEQ ID NO: 5161778 - DNA, 25 bp, Homo sapien
gaaatgctcctagaactctggaaac

SEQ ID NO: 5161779 - DNA, 25 bp, Homo sapien
ccattgcaccccagcacccactcac

SEQ ID NO: 5161780 - DNA, 25 bp, Homo sapien
caggggttgtagctacattagaaca

SEQ ID NO: 5161781 - DNA, 25 bp, Homo sapien
gcctatcctcataggatccattttc

SEQ ID NO: 5161782 - DNA, 25 bp, Homo sapien
catagtcactgggtgcctatcctca

SEQ ID NO: 5161783 - DNA, 25 bp, Homo sapien
gttaaatggcatagtcactgggtgc

SEQ ID NO: 5161784 - DNA, 25 bp, Homo sapien
cattaacatccgaaaggataaataa

SEQ ID NO: 5161785 - DNA, 25 bp, Homo sapien
caaaagttcattaacatccgaaagg

SEQ ID NO: 5161786 - DNA, 25 bp, Homo sapien
tgtaatacctaaccatttgaaacaa

SEQ ID NO: 5161787 - DNA, 25 bp, Homo sapien
catacatcactatatgtaataccta

SEQ ID NO: 5161788 - DNA, 25 bp, Homo sapien
ggctatgatcttggagacactcctg

SEQ ID NO: 5161789 - DNA, 25 bp, Homo sapien
cctatgaccccttcccgtgaatgtt

SEQ ID NO: 5161790 - DNA, 25 bp, Homo sapien
cacaggctagtttcccctatgaccc

SEQ ID NO: 5161791 - DNA, 25 bp, Homo sapien
cgtgaatgttccagaagttccacca

SEQ ID NO: 5161792 - DNA, 25 bp, Homo sapien
tttccagtagaactttgtgcccatc

SEQ ID NO: 5161793 - DNA, 25 bp, Homo sapien
ttccagtagaactttgtgcccatca

SEQ ID NO: 5161794 - DNA, 25 bp, Homo sapien
ctttccagtagaactttgtgcccat

SEQ ID NO: 5161795 - DNA, 25 bp, Homo sapien
tggggctcgtgttgattttgtcctc

SEQ ID NO: 5161796 - DNA, 25 bp, Homo sapien
cattcctttactctgacttttcttc

SEQ ID NO: 5161797 - DNA, 25 bp, Homo sapien
aggttggaaacttccacatctgctt

SEQ ID NO: 5161798 - DNA, 25 bp, Homo sapien
ccttcacattcctttactctgactt

SEQ ID NO: 5161799 - DNA, 25 bp, Homo sapien
ccttgagtccagaaaagagctgagt

SEQ ID NO: 5161800 - DNA, 25 bp, Homo sapien
aaaagagctgagtgcctcgtaggag

SEQ ID NO: 5161801 - DNA, 25 bp, Homo sapien
tcatttttccatagtactccttgag

SEQ ID NO: 5161802 - DNA, 25 bp, Homo sapien
tttttccatagtactccttgagtcc

SEQ ID NO: 5161803 - DNA, 25 bp, Homo sapien
gcccatgctcagcttttggtttaat

SEQ ID NO: 5161804 - DNA, 25 bp, Homo sapien
tgcgcgcaggctctagagagcagac

SEQ ID NO: 5161805 - DNA, 25 bp, Homo sapien
ttttggtttaatctgcgcgcaggct

SEQ ID NO: 5161806 - DNA, 25 bp, Homo sapien
aatctgcgcgcaggctctagagagc

SEQ ID NO: 5161807 - DNA, 25 bp, Homo sapien
ctgtttgcattttcacgggtttagg

SEQ ID NO: 5161808 - DNA, 25 bp, Homo sapien
actgtttgcattttcacgggtttag

SEQ ID NO: 5161809 - DNA, 25 bp, Homo sapien
ctgttattgtcttggtcaccagtaa

SEQ ID NO: 5161810 - DNA, 25 bp, Homo sapien
ggatatccagacctgtaaactttgg

SEQ ID NO: 5161811 - DNA, 25 bp, Homo sapien
gaagccgtagtctgaatcttgggtc

SEQ ID NO: 5161812 - DNA, 25 bp, Homo sapien
atcttgggtctgacatggatatcca

SEQ ID NO: 5161813 - DNA, 25 bp, Homo sapien
taactttgtctccaactttgttgtg

SEQ ID NO: 5161814 - DNA, 25 bp, Homo sapien
ccgtattgccaataaaggcctcttt

SEQ ID NO: 5161815 - DNA, 25 bp, Homo sapien
gcattatgattaaacggagccccaa

SEQ ID NO: 5161816 - DNA, 25 bp, Homo sapien
ataggcagcctttgttaactttgtc

SEQ ID NO: 5161817 - DNA, 25 bp, Homo sapien
tgagggagaacttagtgactgctcc

SEQ ID NO: 5161818 - DNA, 25 bp, Homo sapien
gaaacgaacagcaagcagtgctagt

SEQ ID NO: 5161819 - DNA, 25 bp, Homo sapien
ttctgggcaccagtctcatactggc

SEQ ID NO: 5161820 - DNA, 25 bp, Homo sapien
tagtaacctgcccttgatattggta

SEQ ID NO: 5161821 - DNA, 25 bp, Homo sapien
tgccttttttggaacttcgctacca

SEQ ID NO: 5161822 - DNA, 25 bp, Homo sapien
cttaagttcctttgttctatgcctt

SEQ ID NO: 5161823 - DNA, 25 bp, Homo sapien
tctatgccttttttggaacttcgct

SEQ ID NO: 5161824 - DNA, 25 bp, Homo sapien
tcctttgttctatgccttttttgga

SEQ ID NO: 5161825 - DNA, 25 bp, Homo sapien
cattgtttctggtgtcccggattca

SEQ ID NO: 5161826 - DNA, 25 bp, Homo sapien
ggctccataatccaacataaccaga

SEQ ID NO: 5161827 - DNA, 25 bp, Homo sapien
gctgagtttgatgcatagactctga

SEQ ID NO: 5161828 - DNA, 25 bp, Homo sapien
tatttaaccttgctgatgatttcac

SEQ ID NO: 5161829 - DNA, 25 bp, Homo sapien
atatcaactctttcgggtgtgtcag

SEQ ID NO: 5161830 - DNA, 25 bp, Homo sapien
tctttcgggtgtgtcagtgagtcca

SEQ ID NO: 5161831 - DNA, 25 bp, Homo sapien
caactctttcgggtgtgtcagtgag

SEQ ID NO: 5161832 - DNA, 25 bp, Homo sapien
tcgggtgtgtcagtgagtccaagat

SEQ ID NO: 5161833 - DNA, 25 bp, Homo sapien
gaacgaggctcttctgctatccaac

SEQ ID NO: 5161834 - DNA, 25 bp, Homo sapien
cagtgccagtgagcaacatgaaact

SEQ ID NO: 5161835 - DNA, 25 bp, Homo sapien
ggaaggccaccccaatcagtactgt

SEQ ID NO: 5161836 - DNA, 25 bp, Homo sapien
tccttctggatactgttgagggcac

SEQ ID NO: 5161837 - DNA, 25 bp, Homo sapien
cttcaaattcctgttcaaattccgt

SEQ ID NO: 5161838 - DNA, 25 bp, Homo sapien
gccattcttcaaattcctgttcaaa

SEQ ID NO: 5161839 - DNA, 25 bp, Homo sapien
tgttcaaattccgtttgttcttcca

SEQ ID NO: 5161840 - DNA, 25 bp, Homo sapien
ctgccattcttcaaattcctgttca

SEQ ID NO: 5161841 - DNA, 25 bp, Homo sapien
ttgccagacttaaccaatttctgct

SEQ ID NO: 5161842 - DNA, 25 bp, Homo sapien
ccaatttctgctggcttaaccaatt

SEQ ID NO: 5161843 - DNA, 25 bp, Homo sapien
cagacttaaccaatttctgctggct

SEQ ID NO: 5161844 - DNA, 25 bp, Homo sapien
ttaaccaatttctgctggcttaacc

SEQ ID NO: 5161845 - DNA, 25 bp, Homo sapien
tcaagtaagtgcctctctttcactt

SEQ ID NO: 5161846 - DNA, 25 bp, Homo sapien
gaaacagcctgcttcaagtaagtgc

SEQ ID NO: 5161847 - DNA, 25 bp, Homo sapien
gtaagtgcctctctttcacttcaaa

SEQ ID NO: 5161848 - DNA, 25 bp, Homo sapien
ttttggaaaaatgatacgttttgca

SEQ ID NO: 5161849 - DNA, 25 bp, Homo sapien
ccaggaaacagggttgcatatttgc

SEQ ID NO: 5161850 - DNA, 25 bp, Homo sapien
gaatgctactactaatgccgagaag

SEQ ID NO: 5161851 - DNA, 25 bp, Homo sapien
gctaaaccagctttataccagtgga

SEQ ID NO: 5161852 - DNA, 25 bp, Homo sapien
tgcagatgtgagaggagattgccct

SEQ ID NO: 5161853 - DNA, 25 bp, Homo sapien
tgccagggtaaagtttggtcagtcc

SEQ ID NO: 5161854 - DNA, 25 bp, Homo sapien
accagagagttcacagttcactgtg

SEQ ID NO: 5161855 - DNA, 25 bp, Homo sapien
gtcctcttagcacagcatttaggca

SEQ ID NO: 5161856 - DNA, 25 bp, Homo sapien
taggcaagtcctctgtgccaccaga

SEQ ID NO: 5161857 - DNA, 25 bp, Homo sapien
catagtctactgaaaccaagggcat

SEQ ID NO: 5161858 - DNA, 25 bp, Homo sapien
tcattcatagtctactgaaaccaag

SEQ ID NO: 5161859 - DNA, 25 bp, Homo sapien
ttcatagtctactgaaaccaagggc

SEQ ID NO: 5161860 - DNA, 25 bp, Homo sapien
gtctactgaaaccaagggcatatcc

SEQ ID NO: 5161861 - DNA, 25 bp, Homo sapien
cgatatgtagtctattgcagaggcc

SEQ ID NO: 5161862 - DNA, 25 bp, Homo sapien
catctcattgagataatatgtctca

SEQ ID NO: 5161863 - DNA, 25 bp, Homo sapien
aatatgtctcaatggctaattgtgc

SEQ ID NO: 5161864 - DNA, 25 bp, Homo sapien
tgcaagcctgtatgacacagtgtgt

SEQ ID NO: 5161865 - DNA, 25 bp, Homo sapien
gcagtcagcttgaactgttctatgt

SEQ ID NO: 5161866 - DNA, 25 bp, Homo sapien
agcagtcagcttgaactgttctatg

SEQ ID NO: 5161867 - DNA, 25 bp, Homo sapien
ctacagcatcttgaacaggtggaaa

SEQ ID NO: 5161868 - DNA, 25 bp, Homo sapien
tggtaggcatcattaactcaaagtc

SEQ ID NO: 5161869 - DNA, 25 bp, Homo sapien
taagagtcctaattccaagtgttgt

SEQ ID NO: 5161870 - DNA, 25 bp, Homo sapien
ggaggatgagcaccgtttctacagc

SEQ ID NO: 5161871 - DNA, 25 bp, Homo sapien
gggcacagagtgtcagaaaaacaaa

SEQ ID NO: 5161872 - DNA, 25 bp, Homo sapien
ccacatcagacagcataagggcaca

SEQ ID NO: 5161873 - DNA, 25 bp, Homo sapien
cagcataagggcacagagtgtcaga

SEQ ID NO: 5161874 - DNA, 25 bp, Homo sapien
aagctggggtacaaaacttgtccat

SEQ ID NO: 5161875 - DNA, 25 bp, Homo sapien
atctggagaggcgttttagtgttac

SEQ ID NO: 5161876 - DNA, 25 bp, Homo sapien
tttagtgttacggtcttatcttcca

SEQ ID NO: 5161877 - DNA, 25 bp, Homo sapien
ggatgttcctaaggcatctggagag

SEQ ID NO: 5161878 - DNA, 25 bp, Homo sapien
tacggtcttatcttccaagattttc

SEQ ID NO: 5161879 - DNA, 25 bp, Homo sapien
gccttggatcttgcttgtccccata

SEQ ID NO: 5161880 - DNA, 25 bp, Homo sapien
catttctgccttggatcttgcttgt

SEQ ID NO: 5161881 - DNA, 25 bp, Homo sapien
tctgccttggatcttgcttgtcccc

SEQ ID NO: 5161882 - DNA, 25 bp, Homo sapien
ggatcttgcttgtccccataggctg

SEQ ID NO: 5161883 - DNA, 25 bp, Homo sapien
gaattcagggaggcaccagagtgac

SEQ ID NO: 5161884 - DNA, 25 bp, Homo sapien
ttccctggaattcagggaggcacca

SEQ ID NO: 5161885 - DNA, 25 bp, Homo sapien
tcagggaggcaccagagtgacagct

SEQ ID NO: 5161886 - DNA, 25 bp, Homo sapien
ctggaattcagggaggcaccagagt

SEQ ID NO: 5161887 - DNA, 25 bp, Homo sapien
ccatagtttttcaatatctttcatg

SEQ ID NO: 5161888 - DNA, 25 bp, Homo sapien
actcccatagtttttcaatatcttt

SEQ ID NO: 5161889 - DNA, 25 bp, Homo sapien
tcccatagtttttcaatatctttca

SEQ ID NO: 5161890 - DNA, 25 bp, Homo sapien
ttactcccatagtttttcaatatct

SEQ ID NO: 5161891 - DNA, 25 bp, Homo sapien
ctgcagagtaccacggaaggactgg

SEQ ID NO: 5161892 - DNA, 25 bp, Homo sapien
tctaggtgagtggacaaatttccaa

SEQ ID NO: 5161893 - DNA, 25 bp, Homo sapien
ggacaaatttccaaagcgtcctgaa

SEQ ID NO: 5161894 - DNA, 25 bp, Homo sapien
aaagcgtcctgaactcctattgagg

SEQ ID NO: 5161895 - DNA, 25 bp, Homo sapien
tccaaaaggtagtgttcttactaga

SEQ ID NO: 5161896 - DNA, 25 bp, Homo sapien
tttctaatatagaaggctctctctc

SEQ ID NO: 5161897 - DNA, 25 bp, Homo sapien
cacttctcataatgcattcctgttg

SEQ ID NO: 5161898 - DNA, 25 bp, Homo sapien
gttacaattgtctattcagtgcagt

SEQ ID NO: 5161899 - DNA, 25 bp, Homo sapien
taggttatactacacagcctaggtg

SEQ ID NO: 5161900 - DNA, 25 bp, Homo sapien
gaaccatgtggttcccaagaagatg

SEQ ID NO: 5161901 - DNA, 25 bp, Homo sapien
gatggaacgtccagaccctgggaaa

SEQ ID NO: 5161902 - DNA, 25 bp, Homo sapien
tcatggcggatttctgaaccagagt

SEQ ID NO: 5161903 - DNA, 25 bp, Homo sapien
ccttcatagtctgcatctgggtgag

SEQ ID NO: 5161904 - DNA, 25 bp, Homo sapien
acaccaggtatttctgggtacatgc

SEQ ID NO: 5161905 - DNA, 25 bp, Homo sapien
cactgtctgtaggatcccattcttc

SEQ ID NO: 5161906 - DNA, 25 bp, Homo sapien
caccaggtatttctgggtacatgct

SEQ ID NO: 5161907 - DNA, 25 bp, Homo sapien
gtaggatcccattcttcttgactgc

SEQ ID NO: 5161908 - DNA, 25 bp, Homo sapien
tgatggggtccgaacacggccataa

SEQ ID NO: 5161909 - DNA, 25 bp, Homo sapien
gtccgaacacggccataatcagaag

SEQ ID NO: 5161910 - DNA, 25 bp, Homo sapien
tagatgatggggtccgaacacggcc

SEQ ID NO: 5161911 - DNA, 25 bp, Homo sapien
tggggtccgaacacggccataatca

SEQ ID NO: 5161912 - DNA, 25 bp, Homo sapien
cttgcttccacgaacagcttgactg

SEQ ID NO: 5161913 - DNA, 25 bp, Homo sapien
gcttgactgagatttgagtctcgcg

SEQ ID NO: 5161914 - DNA, 25 bp, Homo sapien
tgagtctcgcgttgcgtcttgtcag

SEQ ID NO: 5161915 - DNA, 25 bp, Homo sapien
gcgttgcgtcttgtcagtaattcta

SEQ ID NO: 5161916 - DNA, 25 bp, Homo sapien
gaaggaacgcatgggtgaaggactc

SEQ ID NO: 5161917 - DNA, 25 bp, Homo sapien
agctgctcacagttggcttgtagca

SEQ ID NO: 5161918 - DNA, 25 bp, Homo sapien
caggagcaagaaggaacgcatgggt

SEQ ID NO: 5161919 - DNA, 25 bp, Homo sapien
acgcatgggtgaaggactctgagct

SEQ ID NO: 5161920 - DNA, 25 bp, Homo sapien
gaacactgcatggcctctgcctcat

SEQ ID NO: 5161921 - DNA, 25 bp, Homo sapien
ctcgaacactgcatggcctctgcct

SEQ ID NO: 5161922 - DNA, 25 bp, Homo sapien
tcgaacactgcatggcctctgcctc

SEQ ID NO: 5161923 - DNA, 25 bp, Homo sapien
cgaacactgcatggcctctgcctca

SEQ ID NO: 5161924 - DNA, 25 bp, Homo sapien
atttgtacaatgtgagtaaagagct

SEQ ID NO: 5161925 - DNA, 25 bp, Homo sapien
cattgcaggcttcatttgtacaatg

SEQ ID NO: 5161926 - DNA, 25 bp, Homo sapien
tgtcagaaaatacatctctgtatgt

SEQ ID NO: 5161927 - DNA, 25 bp, Homo sapien
agtaaagagcttgcctatttgtttc

SEQ ID NO: 5161928 - DNA, 25 bp, Homo sapien
agcttcagacccgtaacttccattg

SEQ ID NO: 5161929 - DNA, 25 bp, Homo sapien
ttcagacccgtaacttccattggaa

SEQ ID NO: 5161930 - DNA, 25 bp, Homo sapien
cagcatctccgtgctttaacatttt

SEQ ID NO: 5161931 - DNA, 25 bp, Homo sapien
tccaagcttcagacccgtaacttcc

SEQ ID NO: 5161932 - DNA, 25 bp, Homo sapien
tgagtactgatatccaccccagaaa

SEQ ID NO: 5161933 - DNA, 25 bp, Homo sapien
tctgacaagccttcaaaactcggct

SEQ ID NO: 5161934 - DNA, 25 bp, Homo sapien
ggaatccacaaccaccgtcaaagct

SEQ ID NO: 5161935 - DNA, 25 bp, Homo sapien
tcccttttacactccgaatggaatc

SEQ ID NO: 5161936 - DNA, 25 bp, Homo sapien
tttaagtgactcatatttgaagttg

SEQ ID NO: 5161937 - DNA, 25 bp, Homo sapien
catccatcaattattgcctggatag

SEQ ID NO: 5161938 - DNA, 25 bp, Homo sapien
tatttgaagttgttagtcttggttc

SEQ ID NO: 5161939 - DNA, 25 bp, Homo sapien
tcatccatcaattattgcctggata

SEQ ID NO: 5161940 - DNA, 25 bp, Homo sapien
cagtttccactgtggttccgttcca

SEQ ID NO: 5161941 - DNA, 25 bp, Homo sapien
tgtgaatgagattgctttctgattt

SEQ ID NO: 5161942 - DNA, 25 bp, Homo sapien
ggcagtatagccattacagtgatat

SEQ ID NO: 5161943 - DNA, 25 bp, Homo sapien
gaaggagtctttgggctgagactct

SEQ ID NO: 5161944 - DNA, 25 bp, Homo sapien
cattgattagctgcattcctaggca

SEQ ID NO: 5161945 - DNA, 25 bp, Homo sapien
tcttttgaactcatcatccgcctgc

SEQ ID NO: 5161946 - DNA, 25 bp, Homo sapien
tcgatcttttgaactcatcatccgc

SEQ ID NO: 5161947 - DNA, 25 bp, Homo sapien
aaagtgctgcgattctttctgttta

SEQ ID NO: 5161948 - DNA, 25 bp, Homo sapien
taaatgctaatagggaataacttac

SEQ ID NO: 5161949 - DNA, 25 bp, Homo sapien
ctgccatgccaaatttctccaggac

SEQ ID NO: 5161950 - DNA, 25 bp, Homo sapien
tctgccatgccaaatttctccagga

SEQ ID NO: 5161951 - DNA, 25 bp, Homo sapien
ttctgccatgccaaatttctccagg

SEQ ID NO: 5161952 - DNA, 25 bp, Homo sapien
cttctgccatgccaaatttctccag

SEQ ID NO: 5161953 - DNA, 25 bp, Homo sapien
gcttaccatagattcaataaatgac

SEQ ID NO: 5161954 - DNA, 25 bp, Homo sapien
tatattggcggaaatcttttcacca

SEQ ID NO: 5161955 - DNA, 25 bp, Homo sapien
tttcaccaaagcttaccatagattc

SEQ ID NO: 5161956 - DNA, 25 bp, Homo sapien
taaatgacacccaaaggctgtccat

SEQ ID NO: 5161957 - DNA, 25 bp, Homo sapien
cttgtaaaaaccaatctccattatt

SEQ ID NO: 5161958 - DNA, 25 bp, Homo sapien
tcattgctgcaacagataaagctgg

SEQ ID NO: 5161959 - DNA, 25 bp, Homo sapien
gaaccacattgtggactgagatact

SEQ ID NO: 5161960 - DNA, 25 bp, Homo sapien
actgtatcaccaaaggaaacagatg

SEQ ID NO: 5161961 - DNA, 25 bp, Homo sapien
tccaattgtgtcttcagacagactc

SEQ ID NO: 5161962 - DNA, 25 bp, Homo sapien
tcttctcccctttcgtcacacagaa

SEQ ID NO: 5161963 - DNA, 25 bp, Homo sapien
tgcacatccatttagcacaacctgc

SEQ ID NO: 5161964 - DNA, 25 bp, Homo sapien
gtgtttgatgtgcacatccatttag

SEQ ID NO: 5161965 - DNA, 25 bp, Homo sapien
gcttatagcctggactttcactact

SEQ ID NO: 5161966 - DNA, 25 bp, Homo sapien
ggagcctagagtactggctctgcct

SEQ ID NO: 5161967 - DNA, 25 bp, Homo sapien
gaaaatgaggagcttatagcctgga

SEQ ID NO: 5161968 - DNA, 25 bp, Homo sapien
cccttggcaccactggcactacttc

SEQ ID NO: 5161969 - DNA, 25 bp, Homo sapien
ggtgaaagtatagctccctgatagc

SEQ ID NO: 5161970 - DNA, 25 bp, Homo sapien
tgggtatgtatagctctctgtgtcc

SEQ ID NO: 5161971 - DNA, 25 bp, Homo sapien
gaagtggaataccaaatagggctgc

SEQ ID NO: 5161972 - DNA, 25 bp, Homo sapien
gctgcacgacggagaacagaagttc

SEQ ID NO: 5161973 - DNA, 25 bp, Homo sapien
agttaaaggacagcgtgaaaacttg

SEQ ID NO: 5161974 - DNA, 25 bp, Homo sapien
cagcgtgaaaacttggaatcatcaa

SEQ ID NO: 5161975 - DNA, 25 bp, Homo sapien
cagaacctaaggtgacactctaaaa

SEQ ID NO: 5161976 - DNA, 25 bp, Homo sapien
taaggtgacactctaaaaatgttaa

SEQ ID NO: 5161977 - DNA, 25 bp, Homo sapien
tattagcaagttggagcaggcccag

SEQ ID NO: 5161978 - DNA, 25 bp, Homo sapien
tacacaggcctacagatgcttctgc

SEQ ID NO: 5161979 - DNA, 25 bp, Homo sapien
aaatgccctcatttgtgggaagcgc

SEQ ID NO: 5161980 - DNA, 25 bp, Homo sapien
tgaaaacataactgccgggaagcgg

SEQ ID NO: 5161981 - DNA, 25 bp, Homo sapien
tggttcactggcgtctcagggagac

SEQ ID NO: 5161982 - DNA, 25 bp, Homo sapien
tggcgcgttgcttcgggcaagtact

SEQ ID NO: 5161983 - DNA, 25 bp, Homo sapien
tgttccggggctctggattccaagc

SEQ ID NO: 5161984 - DNA, 25 bp, Homo sapien
ggcaagtactgcaaggtgttccggg

SEQ ID NO: 5161985 - DNA, 25 bp, Homo sapien
aacccaattagaacgacaggcgccg

SEQ ID NO: 5161986 - DNA, 25 bp, Homo sapien
gaatcccaaattcgcagtagccagc

SEQ ID NO: 5161987 - DNA, 25 bp, Homo sapien
cccgcttggagaggcactcgctctt

SEQ ID NO: 5161988 - DNA, 25 bp, Homo sapien
ggagctcggtggacagccaaatcca

SEQ ID NO: 5161989 - DNA, 25 bp, Homo sapien
tcaaaacgctggtcagccgtggtaa

SEQ ID NO: 5161990 - DNA, 25 bp, Homo sapien
agtttgtcgctgttaatcctaaatg

SEQ ID NO: 5161991 - DNA, 25 bp, Homo sapien
acagcaaagtcaaaacgctggtcag

SEQ ID NO: 5161992 - DNA, 25 bp, Homo sapien
gcaaagtcaaaacgctggtcagccg

SEQ ID NO: 5161993 - DNA, 25 bp, Homo sapien
ctgcaaatccgaggcactgcattca

SEQ ID NO: 5161994 - DNA, 25 bp, Homo sapien
aaatccgaggcactgcattcagaga

SEQ ID NO: 5161995 - DNA, 25 bp, Homo sapien
gcaaatccgaggcactgcattcaga

SEQ ID NO: 5161996 - DNA, 25 bp, Homo sapien
atccgaggcactgcattcagagatg

SEQ ID NO: 5161997 - DNA, 25 bp, Homo sapien
tagggcagaacgcagagccacgtat

SEQ ID NO: 5161998 - DNA, 25 bp, Homo sapien
aatcctgttaaaccggtgcccattg

SEQ ID NO: 5161999 - DNA, 25 bp, Homo sapien
tgcccattggttgcaagatacccca

SEQ ID NO: 5162000 - DNA, 25 bp, Homo sapien
caactggagccttctgcctagggca

SEQ ID NO: 5162001 - DNA, 25 bp, Homo sapien
cccaagtccaggatatgtaccctca

SEQ ID NO: 5162002 - DNA, 25 bp, Homo sapien
tccaggatatgtaccctcagtccct

SEQ ID NO: 5162003 - DNA, 25 bp, Homo sapien
caagtccaggatatgtaccctcagt

SEQ ID NO: 5162004 - DNA, 25 bp, Homo sapien
aggatatgtaccctcagtccctctt

SEQ ID NO: 5162005 - DNA, 25 bp, Homo sapien
cagaaattgaatcaggggtatttgt

SEQ ID NO: 5162006 - DNA, 25 bp, Homo sapien
ctagacccacagaaattgaatcagg

SEQ ID NO: 5162007 - DNA, 25 bp, Homo sapien
ggtatttgttattaagcttgcttgt

SEQ ID NO: 5162008 - DNA, 25 bp, Homo sapien
gaatcaggggtatttgttattaagc

SEQ ID NO: 5162009 - DNA, 25 bp, Homo sapien
taaggagggactgcagcacacagag

SEQ ID NO: 5162010 - DNA, 25 bp, Homo sapien
taccatgtaaggagggactgcagca

SEQ ID NO: 5162011 - DNA, 25 bp, Homo sapien
caaaggtaccatgtaaggagggact

SEQ ID NO: 5162012 - DNA, 25 bp, Homo sapien
ctgccagtgtgtcaaaggtaccatg

SEQ ID NO: 5162013 - DNA, 25 bp, Homo sapien
ctgtgaaagttgaacaggatatagg

SEQ ID NO: 5162014 - DNA, 25 bp, Homo sapien
gagtcactggacgagaacattctgg

SEQ ID NO: 5162015 - DNA, 25 bp, Homo sapien
ccactggtaaggagtcactggacga

SEQ ID NO: 5162016 - DNA, 25 bp, Homo sapien
tgttgacagcccctgtgatcatatc

SEQ ID NO: 5162017 - DNA, 25 bp, Homo sapien
cattctggggagtattcatgaaaga

SEQ ID NO: 5162018 - DNA, 25 bp, Homo sapien
taaggaggtccataaaggcccatac

SEQ ID NO: 5162019 - DNA, 25 bp, Homo sapien
tgcttctcagacgtaagtgtaggct

SEQ ID NO: 5162020 - DNA, 25 bp, Homo sapien
gacttttccgtaatgctgcttctca

SEQ ID NO: 5162021 - DNA, 25 bp, Homo sapien
ggtccaaactaaagcctgcccaatg

SEQ ID NO: 5162022 - DNA, 25 bp, Homo sapien
tgaaaattgatggatgcaggagacc

SEQ ID NO: 5162023 - DNA, 25 bp, Homo sapien
tagctgaagcccagtggtagtcacg

SEQ ID NO: 5162024 - DNA, 25 bp, Homo sapien
tggcgtatccactatagagaggtac

SEQ ID NO: 5162025 - DNA, 25 bp, Homo sapien
tccacaatagtgatccaggtatgca

SEQ ID NO: 5162026 - DNA, 25 bp, Homo sapien
tcttagatccatttgctgtacagtg

SEQ ID NO: 5162027 - DNA, 25 bp, Homo sapien
tgaggtctactatatggtctatcct

SEQ ID NO: 5162028 - DNA, 25 bp, Homo sapien
tatctggaagttctgtctaatcctg

SEQ ID NO: 5162029 - DNA, 25 bp, Homo sapien
tctaatcctgaaaatggagtactga

SEQ ID NO: 5162030 - DNA, 25 bp, Homo sapien
aatcttggcaggctgtgtatgtcta

SEQ ID NO: 5162031 - DNA, 25 bp, Homo sapien
tggtatcagggtaagagaagcctca

SEQ ID NO: 5162032 - DNA, 25 bp, Homo sapien
gagtaggatttggtatcagttcttc

SEQ ID NO: 5162033 - DNA, 25 bp, Homo sapien
ataaattggcctcttagaattaatt

SEQ ID NO: 5162034 - DNA, 25 bp, Homo sapien
tgtttctgcatctagccctgtgtct

SEQ ID NO: 5162035 - DNA, 25 bp, Homo sapien
gaattgctagatccaacaccatgca

SEQ ID NO: 5162036 - DNA, 25 bp, Homo sapien
cttggaattgctagatccaacacca

SEQ ID NO: 5162037 - DNA, 25 bp, Homo sapien
gtttctgcatctagccctgtgtctt

SEQ ID NO: 5162038 - DNA, 25 bp, Homo sapien
gactggtctgtactccgctgtttgg

SEQ ID NO: 5162039 - DNA, 25 bp, Homo sapien
cttaatgtattgaacagagcacagg

SEQ ID NO: 5162040 - DNA, 25 bp, Homo sapien
cctatcaggtgcgatgtacactccc

SEQ ID NO: 5162041 - DNA, 25 bp, Homo sapien
caggtgaggtcttatttgtttccca

SEQ ID NO: 5162042 - DNA, 25 bp, Homo sapien
cacagagcacgggagcaacagtatc

SEQ ID NO: 5162043 - DNA, 25 bp, Homo sapien
tctgttacaaatattaacgagacag

SEQ ID NO: 5162044 - DNA, 25 bp, Homo sapien
tatcatacgtgcaaactctgttaca

SEQ ID NO: 5162045 - DNA, 25 bp, Homo sapien
caaatattaacgagacagagagatg

SEQ ID NO: 5162046 - DNA, 25 bp, Homo sapien
tcatttgccttgggccttcgagttt

SEQ ID NO: 5162047 - DNA, 25 bp, Homo sapien
tgccttgggccttcgagttttgaaa

SEQ ID NO: 5162048 - DNA, 25 bp, Homo sapien
tttttagttactgacatcagtgatg

SEQ ID NO: 5162049 - DNA, 25 bp, Homo sapien
tttgtttcagttgtactgtggcttc

SEQ ID NO: 5162050 - DNA, 25 bp, Homo sapien
gcatgctactatctctccacagcga

SEQ ID NO: 5162051 - DNA, 25 bp, Homo sapien
ttcaatggcaagtacaagtccacca

SEQ ID NO: 5162052 - DNA, 25 bp, Homo sapien
ttagtctctaggctcatggccctct

SEQ ID NO: 5162053 - DNA, 25 bp, Homo sapien
gaacctcctctgatgctgttgactt

SEQ ID NO: 5162054 - DNA, 25 bp, Homo sapien
caaactcggggaccaattctccaat

SEQ ID NO: 5162055 - DNA, 25 bp, Homo sapien
tgccgtatttcggagattctagaca

SEQ ID NO: 5162056 - DNA, 25 bp, Homo sapien
cggagattctagacaaataatagag

SEQ ID NO: 5162057 - DNA, 25 bp, Homo sapien
ttctctcaaactcggggaccaattc

SEQ ID NO: 5162058 - DNA, 25 bp, Homo sapien
caaaggctgctactgatgggcagga

SEQ ID NO: 5162059 - DNA, 25 bp, Homo sapien
gaagggaacctcctgtagactcagg

SEQ ID NO: 5162060 - DNA, 25 bp, Homo sapien
tatatagcaccctagtagagtactg

SEQ ID NO: 5162061 - DNA, 25 bp, Homo sapien
gacctttgttttcgagtggctcata

SEQ ID NO: 5162062 - DNA, 25 bp, Homo sapien
gtggcaagtatcctgcttctgagag

SEQ ID NO: 5162063 - DNA, 25 bp, Homo sapien
tctgaagtaaactaccaggtgaagg

SEQ ID NO: 5162064 - DNA, 25 bp, Homo sapien
gtcctctttcccgagactctcttgt

SEQ ID NO: 5162065 - DNA, 25 bp, Homo sapien
cctcctctgaagtaaactaccaggt

SEQ ID NO: 5162066 - DNA, 25 bp, Homo sapien
gctaacggccggctttattcggcat

SEQ ID NO: 5162067 - DNA, 25 bp, Homo sapien
atgaatcagcatcgtgttcgcaaag

SEQ ID NO: 5162068 - DNA, 25 bp, Homo sapien
cggccggctttattcggcatctcag

SEQ ID NO: 5162069 - DNA, 25 bp, Homo sapien
tgttcgcaaaggctaacggccggct

SEQ ID NO: 5162070 - DNA, 25 bp, Homo sapien
gcttataagccttgacaacctgaga

SEQ ID NO: 5162071 - DNA, 25 bp, Homo sapien
cagtgtgagtgaaagtgcccgcagc

SEQ ID NO: 5162072 - DNA, 25 bp, Homo sapien
tcctgtgaaaccttggtgtgaggca

SEQ ID NO: 5162073 - DNA, 25 bp, Homo sapien
caacctgagacagttatcctgtgaa

SEQ ID NO: 5162074 - DNA, 25 bp, Homo sapien
tcggattggcgctgctcactccact

SEQ ID NO: 5162075 - DNA, 25 bp, Homo sapien
attggcgctgctcactccactactg

SEQ ID NO: 5162076 - DNA, 25 bp, Homo sapien
tgctctcagacctggtgatagcctt

SEQ ID NO: 5162077 - DNA, 25 bp, Homo sapien
ctttacaaaagagtttagtctgtct

SEQ ID NO: 5162078 - DNA, 25 bp, Homo sapien
tcaggaatggtctgagagggtgaag

SEQ ID NO: 5162079 - DNA, 25 bp, Homo sapien
caaggggattgttttggcggcaaca

SEQ ID NO: 5162080 - DNA, 25 bp, Homo sapien
ttgttttggcggcaacagaagacac

SEQ ID NO: 5162081 - DNA, 25 bp, Homo sapien
ttctgcactgttcacggatgccaag

SEQ ID NO: 5162082 - DNA, 25 bp, Homo sapien
ctttttgtccgacaaatggagtcat

SEQ ID NO: 5162083 - DNA, 25 bp, Homo sapien
ccaaccacatcggagcaggtttgct

SEQ ID NO: 5162084 - DNA, 25 bp, Homo sapien
agaactttttgtccgacaaatggag

SEQ ID NO: 5162085 - DNA, 25 bp, Homo sapien
tgctccaactctttcttaacatcca

SEQ ID NO: 5162086 - DNA, 25 bp, Homo sapien
gaagctgcggcactcttgcctgcct

SEQ ID NO: 5162087 - DNA, 25 bp, Homo sapien
gatgtcccaagacgccactcatctg

SEQ ID NO: 5162088 - DNA, 25 bp, Homo sapien
tgcctttcatagaatggcagaggac

SEQ ID NO: 5162089 - DNA, 25 bp, Homo sapien
aaaaggccctgtagtttatctggag

SEQ ID NO: 5162090 - DNA, 25 bp, Homo sapien
gggccccattcaaggtgaacaataa

SEQ ID NO: 5162091 - DNA, 25 bp, Homo sapien
catgaaaaggtagctgagggcccca

SEQ ID NO: 5162092 - DNA, 25 bp, Homo sapien
cacagcagagcttgaattatttggg

SEQ ID NO: 5162093 - DNA, 25 bp, Homo sapien
gaacaataagaggaaatgagctggc

SEQ ID NO: 5162094 - DNA, 25 bp, Homo sapien
gtatctctgacctagctcttttcct

SEQ ID NO: 5162095 - DNA, 25 bp, Homo sapien
ccttgggtatctctgacctagctct

SEQ ID NO: 5162096 - DNA, 25 bp, Homo sapien
aagcccttggcttttaccaggcttg

SEQ ID NO: 5162097 - DNA, 25 bp, Homo sapien
ccttggcttttaccaggcttgatac

SEQ ID NO: 5162098 - DNA, 25 bp, Homo sapien
tgttaatgtattggtctaaatgagt

SEQ ID NO: 5162099 - DNA, 25 bp, Homo sapien
aatgtattggtctaaatgagttgac

SEQ ID NO: 5162100 - DNA, 25 bp, Homo sapien
ctaaatgagttgactggctagaatt

SEQ ID NO: 5162101 - DNA, 25 bp, Homo sapien
tattggtctaaatgagttgactggc

SEQ ID NO: 5162102 - DNA, 25 bp, Homo sapien
tactgcacgggatgtaaatactcca

SEQ ID NO: 5162103 - DNA, 25 bp, Homo sapien
gttgtagcacacaggtccttgagct

SEQ ID NO: 5162104 - DNA, 25 bp, Homo sapien
ggaccagctcggtgacaggtgttta

SEQ ID NO: 5162105 - DNA, 25 bp, Homo sapien
tgtataatactccacctccactagg

SEQ ID NO: 5162106 - DNA, 25 bp, Homo sapien
atttgccaatttattggctgtgttt

SEQ ID NO: 5162107 - DNA, 25 bp, Homo sapien
tctgtcttgaatgcccgcacatcac

SEQ ID NO: 5162108 - DNA, 25 bp, Homo sapien
caatctgtgcttggatttgccaatt

SEQ ID NO: 5162109 - DNA, 25 bp, Homo sapien
atttgactctgtcttgaatgcccgc

SEQ ID NO: 5162110 - DNA, 25 bp, Homo sapien
atgccagccttgagcttggcttcca

SEQ ID NO: 5162111 - DNA, 25 bp, Homo sapien
ccagccttgagcttggcttccaggg

SEQ ID NO: 5162112 - DNA, 25 bp, Homo sapien
ggtatgccagccttgagcttggctt

SEQ ID NO: 5162113 - DNA, 25 bp, Homo sapien
aaggtatgccagccttgagcttggc

SEQ ID NO: 5162114 - DNA, 25 bp, Homo sapien
ccattggagagagcagggatgctag

SEQ ID NO: 5162115 - DNA, 25 bp, Homo sapien
cattggagagagcagggatgctagt

SEQ ID NO: 5162116 - DNA, 25 bp, Homo sapien
cagggatgctagtggatcatcacag

SEQ ID NO: 5162117 - DNA, 25 bp, Homo sapien
tcactcctctcctcgtaaatatttt

SEQ ID NO: 5162118 - DNA, 25 bp, Homo sapien
cactcctctcctcgtaaatattttc

SEQ ID NO: 5162119 - DNA, 25 bp, Homo sapien
tatattcgagagcatctgagatttc

SEQ ID NO: 5162120 - DNA, 25 bp, Homo sapien
tgagatttcaaaccatgtggtacaa

SEQ ID NO: 5162121 - DNA, 25 bp, Homo sapien
tctgcatgtatattcgagagcatct

SEQ ID NO: 5162122 - DNA, 25 bp, Homo sapien
catctgagatttcaaaccatgtggt

SEQ ID NO: 5162123 - DNA, 25 bp, Homo sapien
cctgcagagtctctcatagtacagg

SEQ ID NO: 5162124 - DNA, 25 bp, Homo sapien
catttggacatctccttggtaactg

SEQ ID NO: 5162125 - DNA, 25 bp, Homo sapien
aagtcatttggacatctccttggta

SEQ ID NO: 5162126 - DNA, 25 bp, Homo sapien
ctcctgcagagtctctcatagtaca

SEQ ID NO: 5162127 - DNA, 25 bp, Homo sapien
cgtggccactgctgtaatctctact

SEQ ID NO: 5162128 - DNA, 25 bp, Homo sapien
tactgtttccagttgcgtcctgtgt

SEQ ID NO: 5162129 - DNA, 25 bp, Homo sapien
gagcttccgtatcttccctgcgtgg

SEQ ID NO: 5162130 - DNA, 25 bp, Homo sapien
gctgtaactcgtcacccagtcagag

SEQ ID NO: 5162131 - DNA, 25 bp, Homo sapien
cattggaaggaaaaagatgtcctac

SEQ ID NO: 5162132 - DNA, 25 bp, Homo sapien
tcattggaaggaaaaagatgtccta

SEQ ID NO: 5162133 - DNA, 25 bp, Homo sapien
attcattggaaggaaaaagatgtcc

SEQ ID NO: 5162134 - DNA, 25 bp, Homo sapien
tttattcattggaaggaaaaagatg

SEQ ID NO: 5162135 - DNA, 25 bp, Homo sapien
tgaagctacctccaggtgacttttg

SEQ ID NO: 5162136 - DNA, 25 bp, Homo sapien
cagtgcctgaggttctgaagctacc

SEQ ID NO: 5162137 - DNA, 25 bp, Homo sapien
acccacacagtgaggtcaagagtgt

SEQ ID NO: 5162138 - DNA, 25 bp, Homo sapien
gacttttgctatctgcttcacctcc

SEQ ID NO: 5162139 - DNA, 25 bp, Homo sapien
tgggctctgtgagcctcaagcctct

SEQ ID NO: 5162140 - DNA, 25 bp, Homo sapien
tggttgtgtgagcttggattgggct

SEQ ID NO: 5162141 - DNA, 25 bp, Homo sapien
tctgtgagcctcaagcctcttgttc

SEQ ID NO: 5162142 - DNA, 25 bp, Homo sapien
gctctgtgagcctcaagcctcttgt

SEQ ID NO: 5162143 - DNA, 25 bp, Homo sapien
tctctgtacttccaatactcccttc

SEQ ID NO: 5162144 - DNA, 25 bp, Homo sapien
gcttagcagcatcacccaacaggag

SEQ ID NO: 5162145 - DNA, 25 bp, Homo sapien
ctatcctgggagcatgcttagcagc

SEQ ID NO: 5162146 - DNA, 25 bp, Homo sapien
tgttacttagtaacccatgtctacc

SEQ ID NO: 5162147 - DNA, 25 bp, Homo sapien
acaggagaaaggctggactgcgcag

SEQ ID NO: 5162148 - DNA, 25 bp, Homo sapien
ccttttgccctgtgttagtacatcc

SEQ ID NO: 5162149 - DNA, 25 bp, Homo sapien
tacatccctcagacatgattctgga

SEQ ID NO: 5162150 - DNA, 25 bp, Homo sapien
ccagagttggtctcattccatccca

SEQ ID NO: 5162151 - DNA, 25 bp, Homo sapien
gactggactgactctcaggctgacc

SEQ ID NO: 5162152 - DNA, 25 bp, Homo sapien
caccaaggaatgaggcgaatgagca

SEQ ID NO: 5162153 - DNA, 25 bp, Homo sapien
aatggcggcagaaggtgaaattgac

SEQ ID NO: 5162154 - DNA, 25 bp, Homo sapien
gatgagctgcgctggaaaagataca

SEQ ID NO: 5162155 - DNA, 25 bp, Homo sapien
tacagttctcgcttaagggattcca

SEQ ID NO: 5162156 - DNA, 25 bp, Homo sapien
gctgttcggcctgagcctgaggaag

SEQ ID NO: 5162157 - DNA, 25 bp, Homo sapien
tctggcttaaaaggtcccatccggc

SEQ ID NO: 5162158 - DNA, 25 bp, Homo sapien
cgtagtcggtcagcaacaaccctga

SEQ ID NO: 5162159 - DNA, 25 bp, Homo sapien
gagctctaaaagatgcctctcgctt

SEQ ID NO: 5162160 - DNA, 25 bp, Homo sapien
taagaggaaatgctacggaagtcag

SEQ ID NO: 5162161 - DNA, 25 bp, Homo sapien
gaaatcaagtgcttctacacacacg

SEQ ID NO: 5162162 - DNA, 25 bp, Homo sapien
ggcattccaggtggctaagctttag

SEQ ID NO: 5162163 - DNA, 25 bp, Homo sapien
tagttccagcaagtagacgcaagca

SEQ ID NO: 5162164 - DNA, 25 bp, Homo sapien
aggaggcattgcagacctgatgacc

SEQ ID NO: 5162165 - DNA, 25 bp, Homo sapien
gctgtcccctctacaggaggcattg

SEQ ID NO: 5162166 - DNA, 25 bp, Homo sapien
ttctatccctgccactcgcctgtgg

SEQ ID NO: 5162167 - DNA, 25 bp, Homo sapien
tgcagacctgatgaccttcctccat

SEQ ID NO: 5162168 - DNA, 25 bp, Homo sapien
ggccaaacctgttctaagtccttgc

SEQ ID NO: 5162169 - DNA, 25 bp, Homo sapien
cctcaggccaaacctgttctaagtc

SEQ ID NO: 5162170 - DNA, 25 bp, Homo sapien
caaacctgttctaagtccttgcagc

SEQ ID NO: 5162171 - DNA, 25 bp, Homo sapien
tgttgtccctcaggccaaacctgtt

SEQ ID NO: 5162172 - DNA, 25 bp, Homo sapien
tttcctgtgggcaagtagatttccc

SEQ ID NO: 5162173 - DNA, 25 bp, Homo sapien
gatgcctaatcccaaaactgctaaa

SEQ ID NO: 5162174 - DNA, 25 bp, Homo sapien
gagtcatgccctttggccctctggt

SEQ ID NO: 5162175 - DNA, 25 bp, Homo sapien
caagcactgctgtccggtttttgga

SEQ ID NO: 5162176 - DNA, 25 bp, Homo sapien
caacagttgctgttgcatcaggagt

SEQ ID NO: 5162177 - DNA, 25 bp, Homo sapien
gagtgtcctccaacaataatctgaa

SEQ ID NO: 5162178 - DNA, 25 bp, Homo sapien
cataggcctgatacagtgccaagat

SEQ ID NO: 5162179 - DNA, 25 bp, Homo sapien
gatccagaaattagtcacccaagag

SEQ ID NO: 5162180 - DNA, 25 bp, Homo sapien
cagtgacattttcccgtaaggagtc

SEQ ID NO: 5162181 - DNA, 25 bp, Homo sapien
tcagtgacattttcccgtaaggagt

SEQ ID NO: 5162182 - DNA, 25 bp, Homo sapien
gtgacattttcccgtaaggagtcac

SEQ ID NO: 5162183 - DNA, 25 bp, Homo sapien
ttcagtgacattttcccgtaaggag

SEQ ID NO: 5162184 - DNA, 25 bp, Homo sapien
caactatcttgatgggaaacatggt

SEQ ID NO: 5162185 - DNA, 25 bp, Homo sapien
tcaactatcttgatgggaaacatgg

SEQ ID NO: 5162186 - DNA, 25 bp, Homo sapien
gaaacatggtcatcagcaggggcct

SEQ ID NO: 5162187 - DNA, 25 bp, Homo sapien
catcagcaggggccttgggacacag

SEQ ID NO: 5162188 - DNA, 25 bp, Homo sapien
gcattaatgtcaacacagggttcca

SEQ ID NO: 5162189 - DNA, 25 bp, Homo sapien
aaatattcccgatgcctagtacagg

SEQ ID NO: 5162190 - DNA, 25 bp, Homo sapien
gcctcgtgaagatgaaaattgccca

SEQ ID NO: 5162191 - DNA, 25 bp, Homo sapien
tacaatctacatcagggaccgcaat

SEQ ID NO: 5162192 - DNA, 25 bp, Homo sapien
tagtacgagattgcatgttgccagc

SEQ ID NO: 5162193 - DNA, 25 bp, Homo sapien
tgaaaagacccgttgggccaacaca

SEQ ID NO: 5162194 - DNA, 25 bp, Homo sapien
tctaggccggcacgtctgaaagctt

SEQ ID NO: 5162195 - DNA, 25 bp, Homo sapien
tttactacaaatcatccacgcacgg

SEQ ID NO: 5162196 - DNA, 25 bp, Homo sapien
ctacggagattcaaatgagtcgctg

SEQ ID NO: 5162197 - DNA, 25 bp, Homo sapien
aatgagtcgctgcaaatcaaggaga

SEQ ID NO: 5162198 - DNA, 25 bp, Homo sapien
gattcaaatgagtcgctgcaaatca

SEQ ID NO: 5162199 - DNA, 25 bp, Homo sapien
caaggcacttttgaatttgagctat

SEQ ID NO: 5162200 - DNA, 25 bp, Homo sapien
cataggtggcttttgaaatgcctgg

SEQ ID NO: 5162201 - DNA, 25 bp, Homo sapien
aatacattcgtaaagtaggatatgc

SEQ ID NO: 5162202 - DNA, 25 bp, Homo sapien
gatgaactgatagttggataaatac

SEQ ID NO: 5162203 - DNA, 25 bp, Homo sapien
aaataagctgtcaaatacattcgta

SEQ ID NO: 5162204 - DNA, 25 bp, Homo sapien
gagctttgatgacaacacaaggacc

SEQ ID NO: 5162205 - DNA, 25 bp, Homo sapien
gaagactgcctggagagttgagctt

SEQ ID NO: 5162206 - DNA, 25 bp, Homo sapien
cagttctacccaactagaggagagg

SEQ ID NO: 5162207 - DNA, 25 bp, Homo sapien
ggacccagtaggtgctgtaatgatg

SEQ ID NO: 5162208 - DNA, 25 bp, Homo sapien
gcagttgctgcttgaaagactttac

SEQ ID NO: 5162209 - DNA, 25 bp, Homo sapien
ctttacaagatctccagaatgactg

SEQ ID NO: 5162210 - DNA, 25 bp, Homo sapien
tgactgcttatcatagccctggaac

SEQ ID NO: 5162211 - DNA, 25 bp, Homo sapien
catagccctggaacatagcgactcc

SEQ ID NO: 5162212 - DNA, 25 bp, Homo sapien
gattatgccaagtgcactggagaca

SEQ ID NO: 5162213 - DNA, 25 bp, Homo sapien
tctccagcctagtcaacaaacttgt

SEQ ID NO: 5162214 - DNA, 25 bp, Homo sapien
aacataaggcactcagcaagaatag

SEQ ID NO: 5162215 - DNA, 25 bp, Homo sapien
gagacctaccttgactcgttattga

SEQ ID NO: 5162216 - DNA, 25 bp, Homo sapien
gtacagatatcactgcttctgttct

SEQ ID NO: 5162217 - DNA, 25 bp, Homo sapien
tacagatatcactgcttctgttcta

SEQ ID NO: 5162218 - DNA, 25 bp, Homo sapien
acagatatcactgcttctgttctat

SEQ ID NO: 5162219 - DNA, 25 bp, Homo sapien
gtttgactccattgaaataagattt

SEQ ID NO: 5162220 - DNA, 25 bp, Homo sapien
agaaaatatggcgttcctgtagcct

SEQ ID NO: 5162221 - DNA, 25 bp, Homo sapien
aaaatatggcgttcctgtagcctct

SEQ ID NO: 5162222 - DNA, 25 bp, Homo sapien
cttattgagtttgactccattgaaa

SEQ ID NO: 5162223 - DNA, 25 bp, Homo sapien
gcttcccgtaggggcagtgccccat

SEQ ID NO: 5162224 - DNA, 25 bp, Homo sapien
aaagcccagcttcccgtaggggcag

SEQ ID NO: 5162225 - DNA, 25 bp, Homo sapien
ctggccccaggcagaaaagcccagc

SEQ ID NO: 5162226 - DNA, 25 bp, Homo sapien
aggcagaaaagcccagcttcccgta

SEQ ID NO: 5162227 - DNA, 25 bp, Homo sapien
ttgtaggttcttcaatacatgcaat

SEQ ID NO: 5162228 - DNA, 25 bp, Homo sapien
cattttgtaggttcttcaatacatg

SEQ ID NO: 5162229 - DNA, 25 bp, Homo sapien
gacacttcattttgtaggttcttca

SEQ ID NO: 5162230 - DNA, 25 bp, Homo sapien
tgacacttcattttgtaggttcttc

SEQ ID NO: 5162231 - DNA, 25 bp, Homo sapien
caattgaaatatgacttgggtgaaa

SEQ ID NO: 5162232 - DNA, 25 bp, Homo sapien
tttcaattgaaatatgacttgggtg

SEQ ID NO: 5162233 - DNA, 25 bp, Homo sapien
tccacgaactcgtactgagaacata

SEQ ID NO: 5162234 - DNA, 25 bp, Homo sapien
gagaacatacctaatttctcacgta

SEQ ID NO: 5162235 - DNA, 25 bp, Homo sapien
taggaacatccgtagacctcgactc

SEQ ID NO: 5162236 - DNA, 25 bp, Homo sapien
ttgtggtgcaccacgctgtcagcat

SEQ ID NO: 5162237 - DNA, 25 bp, Homo sapien
cactgagtgcaatagcttgtggtgc

SEQ ID NO: 5162238 - DNA, 25 bp, Homo sapien
gggcacaaagcgaacaaatcgggct

SEQ ID NO: 5162239 - DNA, 25 bp, Homo sapien
agcaatggtaaagggtacatgtgag

SEQ ID NO: 5162240 - DNA, 25 bp, Homo sapien
ggtaaagggtacatgtgagtactta

SEQ ID NO: 5162241 - DNA, 25 bp, Homo sapien
gtaaagggtacatgtgagtacttac

SEQ ID NO: 5162242 - DNA, 25 bp, Homo sapien
actcagcaatggtaaagggtacatg

SEQ ID NO: 5162243 - DNA, 25 bp, Homo sapien
tgtgtccgacaactccccaaggttg

SEQ ID NO: 5162244 - DNA, 25 bp, Homo sapien
tgaggcacatcataaagacattctg

SEQ ID NO: 5162245 - DNA, 25 bp, Homo sapien
cctgaaggcagtttatcccattgga

SEQ ID NO: 5162246 - DNA, 25 bp, Homo sapien
tcccattggaagatgcactagacct

SEQ ID NO: 5162247 - DNA, 25 bp, Homo sapien
gtaaactgtgccttctgaagttccc

SEQ ID NO: 5162248 - DNA, 25 bp, Homo sapien
tcacattggactgccaatgccccag

SEQ ID NO: 5162249 - DNA, 25 bp, Homo sapien
aatgccccaggtctgactgctgtca

SEQ ID NO: 5162250 - DNA, 25 bp, Homo sapien
ccttctgaagttccctgtgataggg

SEQ ID NO: 5162251 - DNA, 25 bp, Homo sapien
cattggcaggtattaagcatattct

SEQ ID NO: 5162252 - DNA, 25 bp, Homo sapien
cattactcctaaattcattggcagg

SEQ ID NO: 5162253 - DNA, 25 bp, Homo sapien
aattcattggcaggtattaagcata

SEQ ID NO: 5162254 - DNA, 25 bp, Homo sapien
attcattactcctaaattcattggc

SEQ ID NO: 5162255 - DNA, 25 bp, Homo sapien
gatacattggcagtcttctctagaa

SEQ ID NO: 5162256 - DNA, 25 bp, Homo sapien
aaggcaggctctacagtgcacaacc

SEQ ID NO: 5162257 - DNA, 25 bp, Homo sapien
gaaggagaggccaatcatgctccag

SEQ ID NO: 5162258 - DNA, 25 bp, Homo sapien
ccatcctggagtactgagaatgcca

SEQ ID NO: 5162259 - DNA, 25 bp, Homo sapien
caacttctgattgaacctgtacaga

SEQ ID NO: 5162260 - DNA, 25 bp, Homo sapien
tgtacagaagtgagcttcggccatc

SEQ ID NO: 5162261 - DNA, 25 bp, Homo sapien
tcagggagatcacatctttgagagt

SEQ ID NO: 5162262 - DNA, 25 bp, Homo sapien
gagcttcggccatcaaagtcagcaa

SEQ ID NO: 5162263 - DNA, 25 bp, Homo sapien
ccaaattgaggtgtagggcgagcct

SEQ ID NO: 5162264 - DNA, 25 bp, Homo sapien
aaggtgatgtggtctccacgctgac

SEQ ID NO: 5162265 - DNA, 25 bp, Homo sapien
ggtgtagggcgagcctccccttctg

SEQ ID NO: 5162266 - DNA, 25 bp, Homo sapien
tctggagttccaaggtgatgtggtc

SEQ ID NO: 5162267 - DNA, 25 bp, Homo sapien
tcttcactcttagcctgaatttctg

SEQ ID NO: 5162268 - DNA, 25 bp, Homo sapien
tcactcttagcctgaatttctgaat

SEQ ID NO: 5162269 - DNA, 25 bp, Homo sapien
actcttagcctgaatttctgaattg

SEQ ID NO: 5162270 - DNA, 25 bp, Homo sapien
aacttcttcactcttagcctgaatt

SEQ ID NO: 5162271 - DNA, 25 bp, Homo sapien
caatgtctaaggcatccgtctcgcc

SEQ ID NO: 5162272 - DNA, 25 bp, Homo sapien
cacccgctcaatgaggaccgagtgc

SEQ ID NO: 5162273 - DNA, 25 bp, Homo sapien
gcttgtccaccgtgaagttcacctg

SEQ ID NO: 5162274 - DNA, 25 bp, Homo sapien
gctgctgagccgcgctttgctgtca

SEQ ID NO: 5162275 - DNA, 25 bp, Homo sapien
cagccttctttgcattgaactggtt

SEQ ID NO: 5162276 - DNA, 25 bp, Homo sapien
gcagccttctttgcattgaactggt

SEQ ID NO: 5162277 - DNA, 25 bp, Homo sapien
agccttctttgcattgaactggttc

SEQ ID NO: 5162278 - DNA, 25 bp, Homo sapien
tccctaaagcagaggttacttcaga

SEQ ID NO: 5162279 - DNA, 25 bp, Homo sapien
ttataatcattggagcaagctggct

SEQ ID NO: 5162280 - DNA, 25 bp, Homo sapien
aagctggctgaacaatctggagaag

SEQ ID NO: 5162281 - DNA, 25 bp, Homo sapien
tcagagaaacgtttcaaggtgcctc

SEQ ID NO: 5162282 - DNA, 25 bp, Homo sapien
caggcctcatttgtgcacatatgga

SEQ ID NO: 5162283 - DNA, 25 bp, Homo sapien
tcattggcacacaaagacacgactg

SEQ ID NO: 5162284 - DNA, 25 bp, Homo sapien
cacatatggacgcatggcagaaagc

SEQ ID NO: 5162285 - DNA, 25 bp, Homo sapien
tctagctggtgatgtccaggcctca

SEQ ID NO: 5162286 - DNA, 25 bp, Homo sapien
tcgcagcgtttggagaagtcacatg

SEQ ID NO: 5162287 - DNA, 25 bp, Homo sapien
gacatggtcctattctgctacccag

SEQ ID NO: 5162288 - DNA, 25 bp, Homo sapien
taagagcttacaaaatagctatgta

SEQ ID NO: 5162289 - DNA, 25 bp, Homo sapien
aactgagctgctacaatccttctcg

SEQ ID NO: 5162290 - DNA, 25 bp, Homo sapien
aagtgcctgcgctcccttgcttcat

SEQ ID NO: 5162291 - DNA, 25 bp, Homo sapien
aaagcactgttcttgatagtgctcc

SEQ ID NO: 5162292 - DNA, 25 bp, Homo sapien
cactgttcttgatagtgctcctcat

SEQ ID NO: 5162293 - DNA, 25 bp, Homo sapien
ctcatttagaaagtgcctgcgctcc

SEQ ID NO: 5162294 - DNA, 25 bp, Homo sapien
aggtgagctccaacaggataaatcc

SEQ ID NO: 5162295 - DNA, 25 bp, Homo sapien
tagtccatctggtaacttgctggat

SEQ ID NO: 5162296 - DNA, 25 bp, Homo sapien
tgagctccaacaggataaatccccg

SEQ ID NO: 5162297 - DNA, 25 bp, Homo sapien
caatgtcttggacaacatagtccat

SEQ ID NO: 5162298 - DNA, 25 bp, Homo sapien
tggtcattgaatggtgtgcctttca

SEQ ID NO: 5162299 - DNA, 25 bp, Homo sapien
caggtattagattgcaaagtttcac

SEQ ID NO: 5162300 - DNA, 25 bp, Homo sapien
cattgatcttagtggtcaaaaatgc

SEQ ID NO: 5162301 - DNA, 25 bp, Homo sapien
cattgatcttagtggtcattgaatg

SEQ ID NO: 5162302 - DNA, 25 bp, Homo sapien
tccagaagtacccatagcagtgatg

SEQ ID NO: 5162303 - DNA, 25 bp, Homo sapien
tgcaagcctgttagagctgtctcaa

SEQ ID NO: 5162304 - DNA, 25 bp, Homo sapien
tctccctgagggattgaaactggat

SEQ ID NO: 5162305 - DNA, 25 bp, Homo sapien
tcagcatgatcccagagcaaatcag

SEQ ID NO: 5162306 - DNA, 25 bp, Homo sapien
tgctttcgtctcttagccaggtcaa

SEQ ID NO: 5162307 - DNA, 25 bp, Homo sapien
aaggttttcgatgcatccatggaag

SEQ ID NO: 5162308 - DNA, 25 bp, Homo sapien
tagccaggtcaattatgtttactcc

SEQ ID NO: 5162309 - DNA, 25 bp, Homo sapien
ttttcctggtactggaattcctcca

SEQ ID NO: 5162310 - DNA, 25 bp, Homo sapien
taatagctccaatctactgggtgct

SEQ ID NO: 5162311 - DNA, 25 bp, Homo sapien
tattgaggatgcttccaggaacact

SEQ ID NO: 5162312 - DNA, 25 bp, Homo sapien
caagatcccatagctgaataagcca

SEQ ID NO: 5162313 - DNA, 25 bp, Homo sapien
tattggcttagtattggccatcgcc

SEQ ID NO: 5162314 - DNA, 25 bp, Homo sapien
tctgcaccctccatccccacttttg

SEQ ID NO: 5162315 - DNA, 25 bp, Homo sapien
tgcaccctccatccccacttttgcc

SEQ ID NO: 5162316 - DNA, 25 bp, Homo sapien
ctctgcaccctccatccccactttt

SEQ ID NO: 5162317 - DNA, 25 bp, Homo sapien
tcctctgcaccctccatccccactt

SEQ ID NO: 5162318 - DNA, 25 bp, Homo sapien
ctagacatacgttgtgccttccttc

SEQ ID NO: 5162319 - DNA, 25 bp, Homo sapien
aaagcaaagctgtcctctagacata

SEQ ID NO: 5162320 - DNA, 25 bp, Homo sapien
ctcccttggattgtgtccctcgtca

SEQ ID NO: 5162321 - DNA, 25 bp, Homo sapien
gtcatcggcactaccctcactagag

SEQ ID NO: 5162322 - DNA, 25 bp, Homo sapien
gctgccgctggagttgacaaatgtg

SEQ ID NO: 5162323 - DNA, 25 bp, Homo sapien
ccttgttccatgttcgaaactggaa

SEQ ID NO: 5162324 - DNA, 25 bp, Homo sapien
gcacaatctgtggttcggagcagga

SEQ ID NO: 5162325 - DNA, 25 bp, Homo sapien
cggagcaggaaaaagtgacattgcc

SEQ ID NO: 5162326 - DNA, 25 bp, Homo sapien
ctgtgaggatttcagctacgcgttc

SEQ ID NO: 5162327 - DNA, 25 bp, Homo sapien
ttttctgaatcacgagtctcaggat

SEQ ID NO: 5162328 - DNA, 25 bp, Homo sapien
ttctgaatcacgagtctcaggattc

SEQ ID NO: 5162329 - DNA, 25 bp, Homo sapien
tcagctacgcgttctgtcattttct

SEQ ID NO: 5162330 - DNA, 25 bp, Homo sapien
aggccaagttttcgtgtcagcaaat

SEQ ID NO: 5162331 - DNA, 25 bp, Homo sapien
catttcctgctatcaaaatccatcc

SEQ ID NO: 5162332 - DNA, 25 bp, Homo sapien
tcttccaaggccaagttttcgtgtc

SEQ ID NO: 5162333 - DNA, 25 bp, Homo sapien
ccaagttttcgtgtcagcaaattct

SEQ ID NO: 5162334 - DNA, 25 bp, Homo sapien
tccagagtgagcgtgatgcggttcc

SEQ ID NO: 5162335 - DNA, 25 bp, Homo sapien
tgcttcatcatccagagtgagcgtg

SEQ ID NO: 5162336 - DNA, 25 bp, Homo sapien
ttgatgctaaccgagtgccacaggc

SEQ ID NO: 5162337 - DNA, 25 bp, Homo sapien
gaataaatctgcacccaagtgctgt

SEQ ID NO: 5162338 - DNA, 25 bp, Homo sapien
agggaaccttgctgaactgaaatga

SEQ ID NO: 5162339 - DNA, 25 bp, Homo sapien
gaggtccttgggctggttatcaata

SEQ ID NO: 5162340 - DNA, 25 bp, Homo sapien
aacattgggaatcggtgagattgtc

SEQ ID NO: 5162341 - DNA, 25 bp, Homo sapien
cacagatcaatgtgtaaatcactaa

SEQ ID NO: 5162342 - DNA, 25 bp, Homo sapien
tgatttaatttgcatatcccattta

SEQ ID NO: 5162343 - DNA, 25 bp, Homo sapien
ttttgatttaatttgcatatcccat

SEQ ID NO: 5162344 - DNA, 25 bp, Homo sapien
ttatgcataaaattttaatcctttc

SEQ ID NO: 5162345 - DNA, 25 bp, Homo sapien
gtattttgatttaatttgcatatcc

SEQ ID NO: 5162346 - DNA, 25 bp, Homo sapien
tggtttggcttcacaccttggagcc

SEQ ID NO: 5162347 - DNA, 25 bp, Homo sapien
tgctaatctgtctctcctgtcctgg

SEQ ID NO: 5162348 - DNA, 25 bp, Homo sapien
gatactcttggacagcatttgctaa

SEQ ID NO: 5162349 - DNA, 25 bp, Homo sapien
tgaacctcacaggactggacatggc

SEQ ID NO: 5162350 - DNA, 25 bp, Homo sapien
gagccctgagctcgttctgcgtcta

SEQ ID NO: 5162351 - DNA, 25 bp, Homo sapien
tctttaggagatagtgacagtgagc

SEQ ID NO: 5162352 - DNA, 25 bp, Homo sapien
tagggatgataacccgtgaggcacc

SEQ ID NO: 5162353 - DNA, 25 bp, Homo sapien
tgaggcaccgaggtgttccacagcc

SEQ ID NO: 5162354 - DNA, 25 bp, Homo sapien
ctgggctaatgtgaaacctttcttc

SEQ ID NO: 5162355 - DNA, 25 bp, Homo sapien
tctgattcgaatgctgctttctggg

SEQ ID NO: 5162356 - DNA, 25 bp, Homo sapien
cgtatctgattcgaatgctgctttc

SEQ ID NO: 5162357 - DNA, 25 bp, Homo sapien
ttctgggctaatgtgaaacctttct

SEQ ID NO: 5162358 - DNA, 25 bp, Homo sapien
gaagggtaaaagagtacttgagcaa

SEQ ID NO: 5162359 - DNA, 25 bp, Homo sapien
tggaagggtaaaagagtacttgagc

SEQ ID NO: 5162360 - DNA, 25 bp, Homo sapien
agggtaaaagagtacttgagcaagg

SEQ ID NO: 5162361 - DNA, 25 bp, Homo sapien
ctggaagggtaaaagagtacttgag

SEQ ID NO: 5162362 - DNA, 25 bp, Homo sapien
tagaaactcatttgtctatggtcac

SEQ ID NO: 5162363 - DNA, 25 bp, Homo sapien
ttgtctatggtcactcagaaaagcc

SEQ ID NO: 5162364 - DNA, 25 bp, Homo sapien
gaaagctctaagaaatatctgggca

SEQ ID NO: 5162365 - DNA, 25 bp, Homo sapien
tctctactacgggttggccagtctg

SEQ ID NO: 5162366 - DNA, 25 bp, Homo sapien
caaaatctacttcggcatgttggga

SEQ ID NO: 5162367 - DNA, 25 bp, Homo sapien
tggcacctgccccactttaaatgtt

SEQ ID NO: 5162368 - DNA, 25 bp, Homo sapien
ttcttctgcagtttaccttgtgcca

SEQ ID NO: 5162369 - DNA, 25 bp, Homo sapien
cttcttctgcagtttaccttgtgcc

SEQ ID NO: 5162370 - DNA, 25 bp, Homo sapien
gcttcttctgcagtttaccttgtgc

SEQ ID NO: 5162371 - DNA, 25 bp, Homo sapien
cccctgtccccacacgctgtttcct

SEQ ID NO: 5162372 - DNA, 25 bp, Homo sapien
ccccacacgctgtttcctttcacat

SEQ ID NO: 5162373 - DNA, 25 bp, Homo sapien
tgtccccacacgctgtttcctttca

SEQ ID NO: 5162374 - DNA, 25 bp, Homo sapien
gatcctggggggctagcactgtttt

SEQ ID NO: 5162375 - DNA, 25 bp, Homo sapien
tgatgtcctcatcccagtaaggatt

SEQ ID NO: 5162376 - DNA, 25 bp, Homo sapien
cttgatgtcctcatcccagtaagga

SEQ ID NO: 5162377 - DNA, 25 bp, Homo sapien
ggtaactcagagatcctgtcctgct

SEQ ID NO: 5162378 - DNA, 25 bp, Homo sapien
gagccttgatgtcctcatcccagta

SEQ ID NO: 5162379 - DNA, 25 bp, Homo sapien
gtgtcactgcagttacaatagaagg

SEQ ID NO: 5162380 - DNA, 25 bp, Homo sapien
tgtgtcactgcagttacaatagaag

SEQ ID NO: 5162381 - DNA, 25 bp, Homo sapien
aacttgtgtcactgcagttacaata

SEQ ID NO: 5162382 - DNA, 25 bp, Homo sapien
caatagaaggtagtccaggactggg

SEQ ID NO: 5162383 - DNA, 25 bp, Homo sapien
tctaagaacaaggacaaggtggaag

SEQ ID NO: 5162384 - DNA, 25 bp, Homo sapien
ggtgtgcccacgtggctttatttgg

SEQ ID NO: 5162385 - DNA, 25 bp, Homo sapien
tatttgaagtctccctaacactgcg

SEQ ID NO: 5162386 - DNA, 25 bp, Homo sapien
gattgcacttcagcccctattgagg

SEQ ID NO: 5162387 - DNA, 25 bp, Homo sapien
cttgctgagagtgaggcacaagctt

SEQ ID NO: 5162388 - DNA, 25 bp, Homo sapien
ggcacaagcttgctgatgaaatcac

SEQ ID NO: 5162389 - DNA, 25 bp, Homo sapien
gctgatgaaatcacttggtttgcaa

SEQ ID NO: 5162390 - DNA, 25 bp, Homo sapien
tgaaatcacttggtttgcaaaatga

SEQ ID NO: 5162391 - DNA, 25 bp, Homo sapien
aaggctgagaaatggtgaaaagatc

SEQ ID NO: 5162392 - DNA, 25 bp, Homo sapien
gcaaaggctgagaaatggtgaaaag

SEQ ID NO: 5162393 - DNA, 25 bp, Homo sapien
caaaggctgagaaatggtgaaaaga

SEQ ID NO: 5162394 - DNA, 25 bp, Homo sapien
ggcaaaggctgagaaatggtgaaaa

SEQ ID NO: 5162395 - DNA, 25 bp, Homo sapien
agaagaagcactacatcaggcttgg

SEQ ID NO: 5162396 - DNA, 25 bp, Homo sapien
gaagcactacatcaggcttggaaga

SEQ ID NO: 5162397 - DNA, 25 bp, Homo sapien
agctaaagggcattgttaggatgtc

SEQ ID NO: 5162398 - DNA, 25 bp, Homo sapien
tattgacttctccatagaagaagca

SEQ ID NO: 5162399 - DNA, 25 bp, Homo sapien
tgctgggctgttgtacctgaatgtc

SEQ ID NO: 5162400 - DNA, 25 bp, Homo sapien
tatctgaagaatcttggaaagagtc

SEQ ID NO: 5162401 - DNA, 25 bp, Homo sapien
tcttggaaagagtcacaatattcag

SEQ ID NO: 5162402 - DNA, 25 bp, Homo sapien
tgtctagagcatgatatatctgaag

SEQ ID NO: 5162403 - DNA, 25 bp, Homo sapien
gtgtacttcatgtcaagcgactgag

SEQ ID NO: 5162404 - DNA, 25 bp, Homo sapien
agtgtacttcatgtcaagcgactga

SEQ ID NO: 5162405 - DNA, 25 bp, Homo sapien
cagtgtacttcatgtcaagcgactg

SEQ ID NO: 5162406 - DNA, 25 bp, Homo sapien
catcgacactgcaatatgacggccg

SEQ ID NO: 5162407 - DNA, 25 bp, Homo sapien
gtaatgcaggtagtctttctcttcc

SEQ ID NO: 5162408 - DNA, 25 bp, Homo sapien
tatgacggccgcttttggagaatgg

SEQ ID NO: 5162409 - DNA, 25 bp, Homo sapien
ctttctcttcctggggatgcgtcat

SEQ ID NO: 5162410 - DNA, 25 bp, Homo sapien
tactgccacttgaatactgtccgat

SEQ ID NO: 5162411 - DNA, 25 bp, Homo sapien
tgaatactgtccgatgaggctgctt

SEQ ID NO: 5162412 - DNA, 25 bp, Homo sapien
aaagccaggtgagcaacaactactg

SEQ ID NO: 5162413 - DNA, 25 bp, Homo sapien
aaatcctggtttctggagtgagtaa

SEQ ID NO: 5162414 - DNA, 25 bp, Homo sapien
gaaggccaggtcttagcattctttc

SEQ ID NO: 5162415 - DNA, 25 bp, Homo sapien
tgagaaatgctcacgttagtgtctt

SEQ ID NO: 5162416 - DNA, 25 bp, Homo sapien
ggctgtggaatatctcggagctgaa

SEQ ID NO: 5162417 - DNA, 25 bp, Homo sapien
tgccttccaaggactttaatgtagg

SEQ ID NO: 5162418 - DNA, 25 bp, Homo sapien
ctgatgtttgacattcagattttcc

SEQ ID NO: 5162419 - DNA, 25 bp, Homo sapien
tgatactgatgtttgacattcagat

SEQ ID NO: 5162420 - DNA, 25 bp, Homo sapien
gatactgatgtttgacattcagatt

SEQ ID NO: 5162421 - DNA, 25 bp, Homo sapien
tactgatgtttgacattcagatttt

SEQ ID NO: 5162422 - DNA, 25 bp, Homo sapien
tgcctgtacacctcgcaggattgct

SEQ ID NO: 5162423 - DNA, 25 bp, Homo sapien
aggtcccagtgggccgctgccatct

SEQ ID NO: 5162424 - DNA, 25 bp, Homo sapien
gaagaagccggctgtattcccctgg

SEQ ID NO: 5162425 - DNA, 25 bp, Homo sapien
tgccatctgagtcgatgtagaagaa

SEQ ID NO: 5162426 - DNA, 25 bp, Homo sapien
taagtgtgagtagggctactgcacc

SEQ ID NO: 5162427 - DNA, 25 bp, Homo sapien
tgcttccttccatgaagtggggtgg

SEQ ID NO: 5162428 - DNA, 25 bp, Homo sapien
ttattcacgtaggtatccccctcca

SEQ ID NO: 5162429 - DNA, 25 bp, Homo sapien
taggtatccccctccagtgaattta

SEQ ID NO: 5162430 - DNA, 25 bp, Homo sapien
gtctcatgaaaattaacctagctgc

SEQ ID NO: 5162431 - DNA, 25 bp, Homo sapien
gaaaaccactgataattaattcttg

SEQ ID NO: 5162432 - DNA, 25 bp, Homo sapien
ttcttgcttcagtgaaacattatca

SEQ ID NO: 5162433 - DNA, 25 bp, Homo sapien
acctagctgcaaatttgcattactc

SEQ ID NO: 5162434 - DNA, 25 bp, Homo sapien
cagcaaataagttagtaaagggagg

SEQ ID NO: 5162435 - DNA, 25 bp, Homo sapien
ccaactgaataattgacagagtgac

SEQ ID NO: 5162436 - DNA, 25 bp, Homo sapien
taccatccatgtgggttggagtcaa

SEQ ID NO: 5162437 - DNA, 25 bp, Homo sapien
tggccgtgctaaaacgggtatgtga

SEQ ID NO: 5162438 - DNA, 25 bp, Homo sapien
ttagctgcttctactacaaaattca

SEQ ID NO: 5162439 - DNA, 25 bp, Homo sapien
ccagcctccttgtgtactttcaacc

SEQ ID NO: 5162440 - DNA, 25 bp, Homo sapien
cccagcctccttgtgtactttcaac

SEQ ID NO: 5162441 - DNA, 25 bp, Homo sapien
gctgcttctactacaaaattcagct

SEQ ID NO: 5162442 - DNA, 25 bp, Homo sapien
tccaccatggcattgagttaaggga

SEQ ID NO: 5162443 - DNA, 25 bp, Homo sapien
cctggaggagttttccaccatggca

SEQ ID NO: 5162444 - DNA, 25 bp, Homo sapien
gagttttccaccatggcattgagtt

SEQ ID NO: 5162445 - DNA, 25 bp, Homo sapien
ttcaaggctacttcctggaggagtt

SEQ ID NO: 5162446 - DNA, 25 bp, Homo sapien
tggatatcaccagtacaagctgcag

SEQ ID NO: 5162447 - DNA, 25 bp, Homo sapien
gctgaacctgagatgacggcttccc

SEQ ID NO: 5162448 - DNA, 25 bp, Homo sapien
gatccgcttgagaagacagtctgcc

SEQ ID NO: 5162449 - DNA, 25 bp, Homo sapien
gacactgacctgatgtccgctggga

SEQ ID NO: 5162450 - DNA, 25 bp, Homo sapien
tggagatttttgaataggcaggaac

SEQ ID NO: 5162451 - DNA, 25 bp, Homo sapien
ttgaataggcaggaacctgttcatc

SEQ ID NO: 5162452 - DNA, 25 bp, Homo sapien
ccagatcaattcttttacttaggag

SEQ ID NO: 5162453 - DNA, 25 bp, Homo sapien
caattcttttacttaggagaggact

SEQ ID NO: 5162454 - DNA, 25 bp, Homo sapien
atcatgacggaaggacatattttgc

SEQ ID NO: 5162455 - DNA, 25 bp, Homo sapien
gaggacctttaaatcatgacggaag

SEQ ID NO: 5162456 - DNA, 25 bp, Homo sapien
ctttaaatcatgacggaaggacata

SEQ ID NO: 5162457 - DNA, 25 bp, Homo sapien
aagatgaggacctttaaatcatgac

SEQ ID NO: 5162458 - DNA, 25 bp, Homo sapien
gctctgtattgttgtgctgcactga

SEQ ID NO: 5162459 - DNA, 25 bp, Homo sapien
cacagtgctcagagccgtcgatcac

SEQ ID NO: 5162460 - DNA, 25 bp, Homo sapien
cccgtagtccaaggccatggcatag

SEQ ID NO: 5162461 - DNA, 25 bp, Homo sapien
cccgcactcgggtcagctctgtatt

SEQ ID NO: 5162462 - DNA, 25 bp, Homo sapien
gagcaggcgggacctcctgcagtgg

SEQ ID NO: 5162463 - DNA, 25 bp, Homo sapien
gatgctgggtaaagggacacgaacc

SEQ ID NO: 5162464 - DNA, 25 bp, Homo sapien
tctgatctaatcagccctgcaagcc

SEQ ID NO: 5162465 - DNA, 25 bp, Homo sapien
gaaccagtacgtctgatctaatcag

SEQ ID NO: 5162466 - DNA, 25 bp, Homo sapien
aacattgactctggcagggcagcac

SEQ ID NO: 5162467 - DNA, 25 bp, Homo sapien
tgagtgcaagaggatgcctacaccg

SEQ ID NO: 5162468 - DNA, 25 bp, Homo sapien
tccattacttggagtggtgagtgca

SEQ ID NO: 5162469 - DNA, 25 bp, Homo sapien
tctgcctgcaagaggtcacagcttt

SEQ ID NO: 5162470 - DNA, 25 bp, Homo sapien
cagctttactgaagagggtttccac

SEQ ID NO: 5162471 - DNA, 25 bp, Homo sapien
cacagacctgagttgtcaaatcaag

SEQ ID NO: 5162472 - DNA, 25 bp, Homo sapien
ggctgtagaattctgtggcacctgg

SEQ ID NO: 5162473 - DNA, 25 bp, Homo sapien
taatatcaggaagatagcacagacc

SEQ ID NO: 5162474 - DNA, 25 bp, Homo sapien
tggcacctggagtacacacgtgtac

SEQ ID NO: 5162475 - DNA, 25 bp, Homo sapien
aaggagcaggtgcaatgagcaggtt

SEQ ID NO: 5162476 - DNA, 25 bp, Homo sapien
caaggagcaggtgcaatgagcaggt

SEQ ID NO: 5162477 - DNA, 25 bp, Homo sapien
ggcaaggagcaggtgcaatgagcag

SEQ ID NO: 5162478 - DNA, 25 bp, Homo sapien
caacggtactgatgaatgactgcaa

SEQ ID NO: 5162479 - DNA, 25 bp, Homo sapien
ggtactgatgaatgactgcaagagg

SEQ ID NO: 5162480 - DNA, 25 bp, Homo sapien
ccaccaaaacccaacggtactgatg

SEQ ID NO: 5162481 - DNA, 25 bp, Homo sapien
aacccaacggtactgatgaatgact

SEQ ID NO: 5162482 - DNA, 25 bp, Homo sapien
gaactagttccatcatattcgtctg

SEQ ID NO: 5162483 - DNA, 25 bp, Homo sapien
tgtctcaaggatgccactcttagct

SEQ ID NO: 5162484 - DNA, 25 bp, Homo sapien
catcctctgggtcgtttctcccaag

SEQ ID NO: 5162485 - DNA, 25 bp, Homo sapien
tctcccaaggactgtctttgatcag

SEQ ID NO: 5162486 - DNA, 25 bp, Homo sapien
tgcagattgcactgccaggttccca

SEQ ID NO: 5162487 - DNA, 25 bp, Homo sapien
taaacggcattgtaatttccatccc

SEQ ID NO: 5162488 - DNA, 25 bp, Homo sapien
tgtctgtcacaacactaaacggcat

SEQ ID NO: 5162489 - DNA, 25 bp, Homo sapien
gcagctccagcaaagacacataaat

SEQ ID NO: 5162490 - DNA, 25 bp, Homo sapien
cactgttacatttagtacaaaataa

SEQ ID NO: 5162491 - DNA, 25 bp, Homo sapien
gcatcttcactgttacatttagtac

SEQ ID NO: 5162492 - DNA, 25 bp, Homo sapien
ttatggtcgaaagcatcttcactgt

SEQ ID NO: 5162493 - DNA, 25 bp, Homo sapien
ttacttatggtcgaaagcatcttca

SEQ ID NO: 5162494 - DNA, 25 bp, Homo sapien
acaagagcatacaatcacgtctggc

SEQ ID NO: 5162495 - DNA, 25 bp, Homo sapien
tgggattacaagagcatacaatcac

SEQ ID NO: 5162496 - DNA, 25 bp, Homo sapien
agagcatacaatcacgtctggctaa

SEQ ID NO: 5162497 - DNA, 25 bp, Homo sapien
gattacaagagcatacaatcacgtc

SEQ ID NO: 5162498 - DNA, 25 bp, Homo sapien
caccgcagtcgtctttaggaaatga

SEQ ID NO: 5162499 - DNA, 25 bp, Homo sapien
ggacttcgacaaagtgtgccgtgga

SEQ ID NO: 5162500 - DNA, 25 bp, Homo sapien
ggtcgtgggaacagttttatgcaaa

SEQ ID NO: 5162501 - DNA, 25 bp, Homo sapien
gcaggtaaagatcacaaagaaaagg

SEQ ID NO: 5162502 - DNA, 25 bp, Homo sapien
gaagagaccaggcaacctaaagctt

SEQ ID NO: 5162503 - DNA, 25 bp, Homo sapien
aaggtactttgaaaatcatcagcat

SEQ ID NO: 5162504 - DNA, 25 bp, Homo sapien
gagaccaggcaacctaaagctttca

SEQ ID NO: 5162505 - DNA, 25 bp, Homo sapien
tgaaggtcatgagaaaaacatacag

SEQ ID NO: 5162506 - DNA, 25 bp, Homo sapien
ggaagacaagatattccaccagtca

SEQ ID NO: 5162507 - DNA, 25 bp, Homo sapien
ctggaagacaagatattccaccagt

SEQ ID NO: 5162508 - DNA, 25 bp, Homo sapien
gaagacaagatattccaccagtcag

SEQ ID NO: 5162509 - DNA, 25 bp, Homo sapien
agacaagatattccaccagtcaggg

SEQ ID NO: 5162510 - DNA, 25 bp, Homo sapien
atgtccaggcagctctcgtctaggc

SEQ ID NO: 5162511 - DNA, 25 bp, Homo sapien
tcagcgtcgcaattgcaaaagtgct

SEQ ID NO: 5162512 - DNA, 25 bp, Homo sapien
gaccgcccaatccaccaggtaaatg

SEQ ID NO: 5162513 - DNA, 25 bp, Homo sapien
gtctaggccacactcacactgctgg

SEQ ID NO: 5162514 - DNA, 25 bp, Homo sapien
gagtaaatgtaatgggcatggaagc

SEQ ID NO: 5162515 - DNA, 25 bp, Homo sapien
cagtaaaaaactagcagttcacctg

SEQ ID NO: 5162516 - DNA, 25 bp, Homo sapien
gggattgagactagcttaacataag

SEQ ID NO: 5162517 - DNA, 25 bp, Homo sapien
taagcaaaattgctaagccaaaacc

SEQ ID NO: 5162518 - DNA, 25 bp, Homo sapien
tgacgcctcttgctggatgactgtt

SEQ ID NO: 5162519 - DNA, 25 bp, Homo sapien
gccacgggtcatcatcatgagggac

SEQ ID NO: 5162520 - DNA, 25 bp, Homo sapien
tgagaagactcttcatttgggccac

SEQ ID NO: 5162521 - DNA, 25 bp, Homo sapien
gcctttgacgcctcttgctggatga

SEQ ID NO: 5162522 - DNA, 25 bp, Homo sapien
aaacaatgggtaggacaattggtgg

SEQ ID NO: 5162523 - DNA, 25 bp, Homo sapien
tgtgtatttattcctgcttttaagg

SEQ ID NO: 5162524 - DNA, 25 bp, Homo sapien
tgtgagtgacaggtaccattccagc

SEQ ID NO: 5162525 - DNA, 25 bp, Homo sapien
gagcctataggcaatggaaccatca

SEQ ID NO: 5162526 - DNA, 25 bp, Homo sapien
caagggaccaattctccaagcggct

SEQ ID NO: 5162527 - DNA, 25 bp, Homo sapien
gataactatctgagtgacaggcaag

SEQ ID NO: 5162528 - DNA, 25 bp, Homo sapien
ccaagcggcttctgagtttgatctg

SEQ ID NO: 5162529 - DNA, 25 bp, Homo sapien
gacaggcaagtggtctttgaaggaa

SEQ ID NO: 5162530 - DNA, 25 bp, Homo sapien
tctgtataaaatgagacggcgttcc

SEQ ID NO: 5162531 - DNA, 25 bp, Homo sapien
gaaatatcggcactgaattccgcat

SEQ ID NO: 5162532 - DNA, 25 bp, Homo sapien
ggaaaactccggataatgctgtggt

SEQ ID NO: 5162533 - DNA, 25 bp, Homo sapien
cgagtcgaatgaagtctttaatgcc

SEQ ID NO: 5162534 - DNA, 25 bp, Homo sapien
ctgtgcctcaaaacctggaggtaaa

SEQ ID NO: 5162535 - DNA, 25 bp, Homo sapien
gcacaaaattgcaggggcttccttt

SEQ ID NO: 5162536 - DNA, 25 bp, Homo sapien
attgtatgttctcttaagttctaac

SEQ ID NO: 5162537 - DNA, 25 bp, Homo sapien
ctcttaagttctaacattgtcaatc

SEQ ID NO: 5162538 - DNA, 25 bp, Homo sapien
gagaaggagactggactacaagctc

SEQ ID NO: 5162539 - DNA, 25 bp, Homo sapien
agctgcagtcgaaaatggccctcct

SEQ ID NO: 5162540 - DNA, 25 bp, Homo sapien
catcgatggcaaaggtgatctctga

SEQ ID NO: 5162541 - DNA, 25 bp, Homo sapien
tcagcccggacatagtgccattggt

SEQ ID NO: 5162542 - DNA, 25 bp, Homo sapien
cgacatgctcttacagctcattgca

SEQ ID NO: 5162543 - DNA, 25 bp, Homo sapien
tagaaatctgccatgaaacacagct

SEQ ID NO: 5162544 - DNA, 25 bp, Homo sapien
tgcatttgtgatcaatttaaccgaa

SEQ ID NO: 5162545 - DNA, 25 bp, Homo sapien
ccgaaacgtctgcagatagaaatct

SEQ ID NO: 5162546 - DNA, 25 bp, Homo sapien
gaccaggaatgcatactcagatctc

SEQ ID NO: 5162547 - DNA, 25 bp, Homo sapien
gcggtactattgagcattccaaagg

SEQ ID NO: 5162548 - DNA, 25 bp, Homo sapien
ggtgagaatgccacacgcttgcagc

SEQ ID NO: 5162549 - DNA, 25 bp, Homo sapien
cctcacattgatggacacattaggg

SEQ ID NO: 5162550 - DNA, 25 bp, Homo sapien
tctggcttgagtgtggaagatcccc

SEQ ID NO: 5162551 - DNA, 25 bp, Homo sapien
agatccccagacatgtgctaacagg

SEQ ID NO: 5162552 - DNA, 25 bp, Homo sapien
tgatgaagctaatgatgccagcgct

SEQ ID NO: 5162553 - DNA, 25 bp, Homo sapien
gacaggatgatcaaactcggtctgg

SEQ ID NO: 5162554 - DNA, 25 bp, Homo sapien
cgaaccacttgtggctctcatgcca

SEQ ID NO: 5162555 - DNA, 25 bp, Homo sapien
tgcaccaagcattccgaaccacttg

SEQ ID NO: 5162556 - DNA, 25 bp, Homo sapien
gacttcagtgcaccaagcattccga

SEQ ID NO: 5162557 - DNA, 25 bp, Homo sapien
caagcattccgaaccacttgtggct

SEQ ID NO: 5162558 - DNA, 25 bp, Homo sapien
agtgtaaggagcgaatgcatcctag

SEQ ID NO: 5162559 - DNA, 25 bp, Homo sapien
cctaggaagcctttctgtctggatg

SEQ ID NO: 5162560 - DNA, 25 bp, Homo sapien
aagtgtaaggagcgaatgcatccta

SEQ ID NO: 5162561 - DNA, 25 bp, Homo sapien
ctggcctgactccagatgtgacctt

SEQ ID NO: 5162562 - DNA, 25 bp, Homo sapien
cctggcctgactccagatgtgacct

SEQ ID NO: 5162563 - DNA, 25 bp, Homo sapien
taaggtgaattggtgcaatcacaca

SEQ ID NO: 5162564 - DNA, 25 bp, Homo sapien
ggtgcaatcacacaggtagccattg

SEQ ID NO: 5162565 - DNA, 25 bp, Homo sapien
tgcaaaagggcccttcataaggtga

SEQ ID NO: 5162566 - DNA, 25 bp, Homo sapien
gccattgtgcttctccacacacttg

SEQ ID NO: 5162567 - DNA, 25 bp, Homo sapien
tcacatggcctgaccatagcgtata

SEQ ID NO: 5162568 - DNA, 25 bp, Homo sapien
ccatagcgtataggtgatacagcac

SEQ ID NO: 5162569 - DNA, 25 bp, Homo sapien
ggagaaacaggagcgcctaaggtac

SEQ ID NO: 5162570 - DNA, 25 bp, Homo sapien
tacagcactgcactcaggagaaaca

SEQ ID NO: 5162571 - DNA, 25 bp, Homo sapien
tcttggtcacaggatagggttcttg

SEQ ID NO: 5162572 - DNA, 25 bp, Homo sapien
gaaacatgtaagtaaccgacgtgcc

SEQ ID NO: 5162573 - DNA, 25 bp, Homo sapien
taaagagcaaaagactgggtgcctg

SEQ ID NO: 5162574 - DNA, 25 bp, Homo sapien
tgcagagcagaacaaccacgaagtc

SEQ ID NO: 5162575 - DNA, 25 bp, Homo sapien
tcatggtttttgatgctgtaaatag

SEQ ID NO: 5162576 - DNA, 25 bp, Homo sapien
ttcatggtttttgatgctgtaaata

SEQ ID NO: 5162577 - DNA, 25 bp, Homo sapien
cattcatggtttttgatgctgtaaa

SEQ ID NO: 5162578 - DNA, 25 bp, Homo sapien
tcattcatggtttttgatgctgtaa

SEQ ID NO: 5162579 - DNA, 25 bp, Homo sapien
tcacaaaggttaagacagctagact

SEQ ID NO: 5162580 - DNA, 25 bp, Homo sapien
taacccagagtgctaaaattagagc

SEQ ID NO: 5162581 - DNA, 25 bp, Homo sapien
caaggctatcttcagtcacaaaggt

SEQ ID NO: 5162582 - DNA, 25 bp, Homo sapien
cattgtgcacaacctggaggcggat

SEQ ID NO: 5162583 - DNA, 25 bp, Homo sapien
tggaggcagcattacactttgaagg

SEQ ID NO: 5162584 - DNA, 25 bp, Homo sapien
tcaccatagatggatagccctagag

SEQ ID NO: 5162585 - DNA, 25 bp, Homo sapien
tgttttgaaaatgctccctccctgg

SEQ ID NO: 5162586 - DNA, 25 bp, Homo sapien
gaagggcttccataagatagcagga

SEQ ID NO: 5162587 - DNA, 25 bp, Homo sapien
gtacaagagattgttggaaagcaca

SEQ ID NO: 5162588 - DNA, 25 bp, Homo sapien
tggatgatgaaagtacaagagattg

SEQ ID NO: 5162589 - DNA, 25 bp, Homo sapien
cacagaaatgtagggaatgaaacaa

SEQ ID NO: 5162590 - DNA, 25 bp, Homo sapien
taaaacaaagtctgggagatagcaa

SEQ ID NO: 5162591 - DNA, 25 bp, Homo sapien
taaccctgtgataatggaagtgccc

SEQ ID NO: 5162592 - DNA, 25 bp, Homo sapien
caaacacaagtgctggctgactcgg

SEQ ID NO: 5162593 - DNA, 25 bp, Homo sapien
caatcttcttgggacttaggagcat

SEQ ID NO: 5162594 - DNA, 25 bp, Homo sapien
taatcctgtcggattagggctccga

SEQ ID NO: 5162595 - DNA, 25 bp, Homo sapien
gttttatagtttacaatctacacag

SEQ ID NO: 5162596 - DNA, 25 bp, Homo sapien
gatgcagatcattcatattattact

SEQ ID NO: 5162597 - DNA, 25 bp, Homo sapien
caatctacacagcatagttacttgc

SEQ ID NO: 5162598 - DNA, 25 bp, Homo sapien
gttacttgcatcatctcatttgacc

SEQ ID NO: 5162599 - DNA, 25 bp, Homo sapien
tgtttcctgtgactagagacagccg

SEQ ID NO: 5162600 - DNA, 25 bp, Homo sapien
ccaggtgtattgtgcaaggactagc

SEQ ID NO: 5162601 - DNA, 25 bp, Homo sapien
gagacagccggttttcaagaggaca

SEQ ID NO: 5162602 - DNA, 25 bp, Homo sapien
gctagctccacagccaaagttgttg

SEQ ID NO: 5162603 - DNA, 25 bp, Homo sapien
cacagtggcctgaacgttgctttca

SEQ ID NO: 5162604 - DNA, 25 bp, Homo sapien
agataatgttaatttcacagtggcc

SEQ ID NO: 5162605 - DNA, 25 bp, Homo sapien
catgtaggtgctccattaacagcat

SEQ ID NO: 5162606 - DNA, 25 bp, Homo sapien
ctttcatgtaggtgctccattaaca

SEQ ID NO: 5162607 - DNA, 25 bp, Homo sapien
ctttaactttgagtggtctaacctg

SEQ ID NO: 5162608 - DNA, 25 bp, Homo sapien
actttgagtggtctaacctggttct

SEQ ID NO: 5162609 - DNA, 25 bp, Homo sapien
tgagtggtctaacctggttcttaat

SEQ ID NO: 5162610 - DNA, 25 bp, Homo sapien
tctaacctggttcttaatttcagcc

SEQ ID NO: 5162611 - DNA, 25 bp, Homo sapien
ctctagagccttaagttgatatgca

SEQ ID NO: 5162612 - DNA, 25 bp, Homo sapien
tctgcaaatcaaatagctgtgtggc

SEQ ID NO: 5162613 - DNA, 25 bp, Homo sapien
tgatatgcaatttcaccaaccaggc

SEQ ID NO: 5162614 - DNA, 25 bp, Homo sapien
gaagttctatttgtttgtccaggtc

SEQ ID NO: 5162615 - DNA, 25 bp, Homo sapien
gcagtttcttaccatggtctactaa

SEQ ID NO: 5162616 - DNA, 25 bp, Homo sapien
aatctaactaaaagactggaacagg

SEQ ID NO: 5162617 - DNA, 25 bp, Homo sapien
tattggtgcccttcttgttgataac

SEQ ID NO: 5162618 - DNA, 25 bp, Homo sapien
atatgtttgccagggtattggtgcc

SEQ ID NO: 5162619 - DNA, 25 bp, Homo sapien
tgaaatgccactgacagtgacactt

SEQ ID NO: 5162620 - DNA, 25 bp, Homo sapien
ttgaaatgccactgacagtgacact

SEQ ID NO: 5162621 - DNA, 25 bp, Homo sapien
ggattccattaggagcagcaaacac

SEQ ID NO: 5162622 - DNA, 25 bp, Homo sapien
tttaagaatgttagcctgggtgcca

SEQ ID NO: 5162623 - DNA, 25 bp, Homo sapien
tgggtgccacaatgtacatataaga

SEQ ID NO: 5162624 - DNA, 25 bp, Homo sapien
ctgtttctgtaaagggggattccat

SEQ ID NO: 5162625 - DNA, 25 bp, Homo sapien
gcatctgagattgccttatatgccg

SEQ ID NO: 5162626 - DNA, 25 bp, Homo sapien
tattcaaatgatgcggacagtgaag

SEQ ID NO: 5162627 - DNA, 25 bp, Homo sapien
ccttatatgccgagtccagtagttt

SEQ ID NO: 5162628 - DNA, 25 bp, Homo sapien
gcaacactgtattcaaatgatgcgg

SEQ ID NO: 5162629 - DNA, 25 bp, Homo sapien
ctgaatggtaagctctcttccctct

SEQ ID NO: 5162630 - DNA, 25 bp, Homo sapien
aagtggtgcatccttctgttagcaa

SEQ ID NO: 5162631 - DNA, 25 bp, Homo sapien
gcaaagttatctgcatcaatggtga

SEQ ID NO: 5162632 - DNA, 25 bp, Homo sapien
tcttccctctcggttaatcttcaag

SEQ ID NO: 5162633 - DNA, 25 bp, Homo sapien
gctgtgcaagattaacattaatagg

SEQ ID NO: 5162634 - DNA, 25 bp, Homo sapien
taacattaataggaagcaggaactc

SEQ ID NO: 5162635 - DNA, 25 bp, Homo sapien
agattaacattaataggaagcagga

SEQ ID NO: 5162636 - DNA, 25 bp, Homo sapien
aacttgctgtgcaagattaacatta

SEQ ID NO: 5162637 - DNA, 25 bp, Homo sapien
tccggagagaagttataactgagtc

SEQ ID NO: 5162638 - DNA, 25 bp, Homo sapien
ggtgagtgaccttataaccctgaac

SEQ ID NO: 5162639 - DNA, 25 bp, Homo sapien
cctgaactctacttccggagagaag

SEQ ID NO: 5162640 - DNA, 25 bp, Homo sapien
ataactgagtcgaagttgctggtcc

SEQ ID NO: 5162641 - DNA, 25 bp, Homo sapien
gcaggggcccgtgatgctttttcca

SEQ ID NO: 5162642 - DNA, 25 bp, Homo sapien
gggcccgtgatgctttttccacagc

SEQ ID NO: 5162643 - DNA, 25 bp, Homo sapien
caaaagcaggggcccgtgatgcttt

SEQ ID NO: 5162644 - DNA, 25 bp, Homo sapien
ctttctactggcaagcaaaagcagg

SEQ ID NO: 5162645 - DNA, 25 bp, Homo sapien
tgtctgctgtgtatgatctgagcta

SEQ ID NO: 5162646 - DNA, 25 bp, Homo sapien
ctgctgtgtatgatctgagctaact

SEQ ID NO: 5162647 - DNA, 25 bp, Homo sapien
tctgctgtgtatgatctgagctaac

SEQ ID NO: 5162648 - DNA, 25 bp, Homo sapien
ctgtctgctgtgtatgatctgagct

SEQ ID NO: 5162649 - DNA, 25 bp, Homo sapien
gattccgtcaaggtcccatggacag

SEQ ID NO: 5162650 - DNA, 25 bp, Homo sapien
gcatccagcaaaacccatggcattt

SEQ ID NO: 5162651 - DNA, 25 bp, Homo sapien
tgtactggacggaagacatgcatcc

SEQ ID NO: 5162652 - DNA, 25 bp, Homo sapien
cgtggtcactgcattcacatctgag

SEQ ID NO: 5162653 - DNA, 25 bp, Homo sapien
ccgatgactgccgaatcacttcgaa

SEQ ID NO: 5162654 - DNA, 25 bp, Homo sapien
tgccgaatcacttcgaacagcattt

SEQ ID NO: 5162655 - DNA, 25 bp, Homo sapien
acttcgaacagcatttgtgagtggt

SEQ ID NO: 5162656 - DNA, 25 bp, Homo sapien
tttgtgagtggttcccgctcatctg

SEQ ID NO: 5162657 - DNA, 25 bp, Homo sapien
caaatcacttggtggggaatactcc

SEQ ID NO: 5162658 - DNA, 25 bp, Homo sapien
gactgcggcttcacccattgtctgc

SEQ ID NO: 5162659 - DNA, 25 bp, Homo sapien
tgctcattagacctaacccaaatca

SEQ ID NO: 5162660 - DNA, 25 bp, Homo sapien
aacatggcttcttccccgaatttag

SEQ ID NO: 5162661 - DNA, 25 bp, Homo sapien
gctcgtacgatgtgactgcttgtgc

SEQ ID NO: 5162662 - DNA, 25 bp, Homo sapien
tcatgatgccgatgatacagaagat

SEQ ID NO: 5162663 - DNA, 25 bp, Homo sapien
tagaggaaccgggtcatgatgccga

SEQ ID NO: 5162664 - DNA, 25 bp, Homo sapien
tccttcatctggctcgtacgatgtg

SEQ ID NO: 5162665 - DNA, 25 bp, Homo sapien
tgaaatattcccgtttacactcgct

SEQ ID NO: 5162666 - DNA, 25 bp, Homo sapien
aaatattcccgtttacactcgctca

SEQ ID NO: 5162667 - DNA, 25 bp, Homo sapien
aatattcccgtttacactcgctcac

SEQ ID NO: 5162668 - DNA, 25 bp, Homo sapien
gaaatattcccgtttacactcgctc

SEQ ID NO: 5162669 - DNA, 25 bp, Homo sapien
tatggtgtgctgtcccaacgtgtcg

SEQ ID NO: 5162670 - DNA, 25 bp, Homo sapien
tacaatgccaccaaagcaaaccagg

SEQ ID NO: 5162671 - DNA, 25 bp, Homo sapien
tgaaaatactcagggtctaagggtc

SEQ ID NO: 5162672 - DNA, 25 bp, Homo sapien
gaatgaccgtcatgtgcctaagagc

SEQ ID NO: 5162673 - DNA, 25 bp, Homo sapien
ttatttcaatttctttatgctgcag

SEQ ID NO: 5162674 - DNA, 25 bp, Homo sapien
taagatggtttaggctctttcattg

SEQ ID NO: 5162675 - DNA, 25 bp, Homo sapien
ggctctttcattgaaccgggtacta

SEQ ID NO: 5162676 - DNA, 25 bp, Homo sapien
tggtttaggctctttcattgaaccg

SEQ ID NO: 5162677 - DNA, 25 bp, Homo sapien
ttaggctctttcattgaaccgggta

SEQ ID NO: 5162678 - DNA, 25 bp, Homo sapien
tacacacgtgaggaagatgccagtt

SEQ ID NO: 5162679 - DNA, 25 bp, Homo sapien
tataggagtgacgtgtagacggcac

SEQ ID NO: 5162680 - DNA, 25 bp, Homo sapien
gccattgtggtcaggatagagcttc

SEQ ID NO: 5162681 - DNA, 25 bp, Homo sapien
tgtcctggcatctacatttaggtct

SEQ ID NO: 5162682 - DNA, 25 bp, Homo sapien
caaaaataattgtgcgggaccttgt

SEQ ID NO: 5162683 - DNA, 25 bp, Homo sapien
tcttaggtccaactcatgggaggca

SEQ ID NO: 5162684 - DNA, 25 bp, Homo sapien
tctggaagaacaacggcatgcaata

SEQ ID NO: 5162685 - DNA, 25 bp, Homo sapien
tagagtcaaaatggctcatcaggac

SEQ ID NO: 5162686 - DNA, 25 bp, Homo sapien
gactggcagaaccatacaggtatcc

SEQ ID NO: 5162687 - DNA, 25 bp, Homo sapien
tggataagttggctgtgcttgcacc

SEQ ID NO: 5162688 - DNA, 25 bp, Homo sapien
catctccctggatatcttggactgg

SEQ ID NO: 5162689 - DNA, 25 bp, Homo sapien
ggagcaagtatgaccttcaagacag

SEQ ID NO: 5162690 - DNA, 25 bp, Homo sapien
tggtcttggcttgggactaatctcc

SEQ ID NO: 5162691 - DNA, 25 bp, Homo sapien
gaaagacactggatggattccagaa

SEQ ID NO: 5162692 - DNA, 25 bp, Homo sapien
ttagatggtaggtccctggcggtac

SEQ ID NO: 5162693 - DNA, 25 bp, Homo sapien
tgattgataatagacctagggcagt

SEQ ID NO: 5162694 - DNA, 25 bp, Homo sapien
tacatggtctacaaaactgacttgg

SEQ ID NO: 5162695 - DNA, 25 bp, Homo sapien
ttggaatgaggcaacatcacttggg

SEQ ID NO: 5162696 - DNA, 25 bp, Homo sapien
caaggcaacacaggatatcaggagg

SEQ ID NO: 5162697 - DNA, 25 bp, Homo sapien
gaaaaggagggcctgaacatgccat

SEQ ID NO: 5162698 - DNA, 25 bp, Homo sapien
gagagcattcttgtgcactttcagc

SEQ ID NO: 5162699 - DNA, 25 bp, Homo sapien
taccagtcagcgctgtcattagggc

SEQ ID NO: 5162700 - DNA, 25 bp, Homo sapien
cacgcaggtgaaagatgtgctgtaa

SEQ ID NO: 5162701 - DNA, 25 bp, Homo sapien
aaagtgtcaggaaagtgagagctgc

SEQ ID NO: 5162702 - DNA, 25 bp, Homo sapien
gaagtcttgctcttcttgacgaagc

SEQ ID NO: 5162703 - DNA, 25 bp, Homo sapien
tatgaaacatgtcttaggcacatat

SEQ ID NO: 5162704 - DNA, 25 bp, Homo sapien
cagtaggcatccaattataaagttc

SEQ ID NO: 5162705 - DNA, 25 bp, Homo sapien
gcagttctaatttgtcttcgttgga

SEQ ID NO: 5162706 - DNA, 25 bp, Homo sapien
tcaacatagacacatgcagcagagg

SEQ ID NO: 5162707 - DNA, 25 bp, Homo sapien
cagccactgcaagcccagttctgaa

SEQ ID NO: 5162708 - DNA, 25 bp, Homo sapien
tctcatcagtattggaagcttctcc

SEQ ID NO: 5162709 - DNA, 25 bp, Homo sapien
ccctctaagcatcctttggagtttg

SEQ ID NO: 5162710 - DNA, 25 bp, Homo sapien
acatggtacagtgaaagggtactac

SEQ ID NO: 5162711 - DNA, 25 bp, Homo sapien
cattcttacatacttggtcacctgc

SEQ ID NO: 5162712 - DNA, 25 bp, Homo sapien
cttttaagggcaggttaggcagcag

SEQ ID NO: 5162713 - DNA, 25 bp, Homo sapien
caattctgggtaagtgtacattctt

SEQ ID NO: 5162714 - DNA, 25 bp, Homo sapien
gctccagaggctcccatcacaggga

SEQ ID NO: 5162715 - DNA, 25 bp, Homo sapien
cccatcacagggagccttgtgaata

SEQ ID NO: 5162716 - DNA, 25 bp, Homo sapien
acagggagccttgtgaatatttgtt

SEQ ID NO: 5162717 - DNA, 25 bp, Homo sapien
gaggctcccatcacagggagccttg

SEQ ID NO: 5162718 - DNA, 25 bp, Homo sapien
gacttcccttgctcggaagaaaggc

SEQ ID NO: 5162719 - DNA, 25 bp, Homo sapien
gtgacttcccttgctcggaagaaag

SEQ ID NO: 5162720 - DNA, 25 bp, Homo sapien
gcctcttcttgtgtgaaccttaagc

SEQ ID NO: 5162721 - DNA, 25 bp, Homo sapien
gtgtgaaccttaagctgtgtcttcc

SEQ ID NO: 5162722 - DNA, 25 bp, Homo sapien
cattctaattttaatatatgtgcta

SEQ ID NO: 5162723 - DNA, 25 bp, Homo sapien
ctaattttaatatatgtgctaccaa

SEQ ID NO: 5162724 - DNA, 25 bp, Homo sapien
ttctaattttaatatatgtgctacc

SEQ ID NO: 5162725 - DNA, 25 bp, Homo sapien
taattttaatatatgtgctaccaaa

SEQ ID NO: 5162726 - DNA, 25 bp, Homo sapien
gctcaccattttattgcgaagatta

SEQ ID NO: 5162727 - DNA, 25 bp, Homo sapien
tatatagtacctctgctctgtacct

SEQ ID NO: 5162728 - DNA, 25 bp, Homo sapien
taactcttccttgcctccaattgct

SEQ ID NO: 5162729 - DNA, 25 bp, Homo sapien
gaacatcaacttagccacttaccaa

SEQ ID NO: 5162730 - DNA, 25 bp, Homo sapien
gcatcatcaccagatattcctaggg

SEQ ID NO: 5162731 - DNA, 25 bp, Homo sapien
accagatattcctagggcaagagct

SEQ ID NO: 5162732 - DNA, 25 bp, Homo sapien
cagttgcatcatcaccagatattcc

SEQ ID NO: 5162733 - DNA, 25 bp, Homo sapien
gctccagttgcatcatcaccagata

SEQ ID NO: 5162734 - DNA, 25 bp, Homo sapien
tgaagttttgctcctgagtttgttc

SEQ ID NO: 5162735 - DNA, 25 bp, Homo sapien
ttttgcgatgaagttttgctcctga

SEQ ID NO: 5162736 - DNA, 25 bp, Homo sapien
cttttgcgatgaagttttgctcctg

SEQ ID NO: 5162737 - DNA, 25 bp, Homo sapien
cgatgaagttttgctcctgagtttg

SEQ ID NO: 5162738 - DNA, 25 bp, Homo sapien
ttagggtgtgatggctgtctcagca

SEQ ID NO: 5162739 - DNA, 25 bp, Homo sapien
tgtgatggctgtctcagcaccacct

SEQ ID NO: 5162740 - DNA, 25 bp, Homo sapien
acctggcaccttccaagcaaccaac

SEQ ID NO: 5162741 - DNA, 25 bp, Homo sapien
accttccaagcaaccaactgctgtg

SEQ ID NO: 5162742 - DNA, 25 bp, Homo sapien
tgaagatatcctcagacttgggagt

SEQ ID NO: 5162743 - DNA, 25 bp, Homo sapien
tgggttcctgactccataccagaga

SEQ ID NO: 5162744 - DNA, 25 bp, Homo sapien
gcataaggtctcatctaacggagta

SEQ ID NO: 5162745 - DNA, 25 bp, Homo sapien
tgattaagcggacaagctcatggtc

SEQ ID NO: 5162746 - DNA, 25 bp, Homo sapien
caaataggtatgactgctatattct

SEQ ID NO: 5162747 - DNA, 25 bp, Homo sapien
tgtttcccttcagccaattttgctg

SEQ ID NO: 5162748 - DNA, 25 bp, Homo sapien
tgctttacccctattgcttgtaccc

SEQ ID NO: 5162749 - DNA, 25 bp, Homo sapien
tgattttgctttacccctattgctt

SEQ ID NO: 5162750 - DNA, 25 bp, Homo sapien
tcccttcagccaattttgctgattt

SEQ ID NO: 5162751 - DNA, 25 bp, Homo sapien
ctgcccaggcagtgagtttgtgtca

SEQ ID NO: 5162752 - DNA, 25 bp, Homo sapien
catccattgggtccattgtctaaaa

SEQ ID NO: 5162753 - DNA, 25 bp, Homo sapien
gagaacatggaccttaaggaaccca

SEQ ID NO: 5162754 - DNA, 25 bp, Homo sapien
ttcacaagctaagaagttagactgc

SEQ ID NO: 5162755 - DNA, 25 bp, Homo sapien
tgttatcatgcacctttatcaccag

SEQ ID NO: 5162756 - DNA, 25 bp, Homo sapien
accagaaatccctggaaatcatgta

SEQ ID NO: 5162757 - DNA, 25 bp, Homo sapien
gtctatgttatcatgcacctttatc

SEQ ID NO: 5162758 - DNA, 25 bp, Homo sapien
gtaactgccgctttgagacagtggg

SEQ ID NO: 5162759 - DNA, 25 bp, Homo sapien
gtgtaagatttgacgtcacagcaac

SEQ ID NO: 5162760 - DNA, 25 bp, Homo sapien
tggtccaaatgcacctcacactgac

SEQ ID NO: 5162761 - DNA, 25 bp, Homo sapien
cagcaacaatggtccaaatgcacct

SEQ ID NO: 5162762 - DNA, 25 bp, Homo sapien
tgtgtaagatttgacgtcacagcaa

SEQ ID NO: 5162763 - DNA, 25 bp, Homo sapien
catcatccactgcaatgttacattc

SEQ ID NO: 5162764 - DNA, 25 bp, Homo sapien
tccatacagattgtaacattgtatg

SEQ ID NO: 5162765 - DNA, 25 bp, Homo sapien
cactgcaatgttacattccatacag

SEQ ID NO: 5162766 - DNA, 25 bp, Homo sapien
tatggaatgatcagggattgatcag

SEQ ID NO: 5162767 - DNA, 25 bp, Homo sapien
tgtagtgatcgctggaacttaaaat

SEQ ID NO: 5162768 - DNA, 25 bp, Homo sapien
gaactatattgctgccttgccgttt

SEQ ID NO: 5162769 - DNA, 25 bp, Homo sapien
tttccccagaactatattgctgcct

SEQ ID NO: 5162770 - DNA, 25 bp, Homo sapien
gctgccttgccgttttttctcagtt

SEQ ID NO: 5162771 - DNA, 25 bp, Homo sapien
aaaggaaacaacctgtctggcagtg

SEQ ID NO: 5162772 - DNA, 25 bp, Homo sapien
aaactaatgatttaccccagaggat

SEQ ID NO: 5162773 - DNA, 25 bp, Homo sapien
caattgcaaaggtaccatcaaagca

SEQ ID NO: 5162774 - DNA, 25 bp, Homo sapien
tctggcagtgagaccaaaatgtttc

SEQ ID NO: 5162775 - DNA, 25 bp, Homo sapien
tggccttcaaccacagttggaccct

SEQ ID NO: 5162776 - DNA, 25 bp, Homo sapien
catgatttgtcaagggcttctccac

SEQ ID NO: 5162777 - DNA, 25 bp, Homo sapien
gcttctggagcaaactgaatgacca

SEQ ID NO: 5162778 - DNA, 25 bp, Homo sapien
ggaacagcacgcatgcccattgcat

SEQ ID NO: 5162779 - DNA, 25 bp, Homo sapien
aggactgttatgagagcctgcaagg

SEQ ID NO: 5162780 - DNA, 25 bp, Homo sapien
aagggttaaatggagctgagcctcc

SEQ ID NO: 5162781 - DNA, 25 bp, Homo sapien
tggaaggagactccaacgggatgat

SEQ ID NO: 5162782 - DNA, 25 bp, Homo sapien
aaggtctttctcttgggtcattggc

SEQ ID NO: 5162783 - DNA, 25 bp, Homo sapien
aaggcaattgggctaaaatgctgac

SEQ ID NO: 5162784 - DNA, 25 bp, Homo sapien
gaaggcaattgggctaaaatgctga

SEQ ID NO: 5162785 - DNA, 25 bp, Homo sapien
tgaaggcaattgggctaaaatgctg

SEQ ID NO: 5162786 - DNA, 25 bp, Homo sapien
ctactccttaacccaccagaagtca

SEQ ID NO: 5162787 - DNA, 25 bp, Homo sapien
tttttgtctgctgaactgtattatc

SEQ ID NO: 5162788 - DNA, 25 bp, Homo sapien
ttttgtctgctgaactgtattatca

SEQ ID NO: 5162789 - DNA, 25 bp, Homo sapien
atattgcgaatcagtttttgtctgc

SEQ ID NO: 5162790 - DNA, 25 bp, Homo sapien
aacacttaatattgcgaatcagttt

SEQ ID NO: 5162791 - DNA, 25 bp, Homo sapien
gagtgactgttgtagccccatgagg

SEQ ID NO: 5162792 - DNA, 25 bp, Homo sapien
ccaggaaatataggcaggacactga

SEQ ID NO: 5162793 - DNA, 25 bp, Homo sapien
ggacactgagagtgactgttgtagc

SEQ ID NO: 5162794 - DNA, 25 bp, Homo sapien
ttagaccaggaaatataggcaggac

SEQ ID NO: 5162795 - DNA, 25 bp, Homo sapien
tcatgctagataacaggacgctctg

SEQ ID NO: 5162796 - DNA, 25 bp, Homo sapien
cccaaggctcatttgtaaaggtgct

SEQ ID NO: 5162797 - DNA, 25 bp, Homo sapien
tttgtgtgcaaaaaaccctgtgcct

SEQ ID NO: 5162798 - DNA, 25 bp, Homo sapien
gacgctctgatgcttagtaaattga

SEQ ID NO: 5162799 - DNA, 25 bp, Homo sapien
agtgagaaaatcttccgaagctggc

SEQ ID NO: 5162800 - DNA, 25 bp, Homo sapien
tatctaaggtcctttagggtctggc

SEQ ID NO: 5162801 - DNA, 25 bp, Homo sapien
tggtgagctcggcacaccatggctc

SEQ ID NO: 5162802 - DNA, 25 bp, Homo sapien
tgcatggcgtgcaaactgtgctcca

SEQ ID NO: 5162803 - DNA, 25 bp, Homo sapien
cagaagttatgcaggatcgcacaac

SEQ ID NO: 5162804 - DNA, 25 bp, Homo sapien
cataggttctggttaggattcagtg

SEQ ID NO: 5162805 - DNA, 25 bp, Homo sapien
gtcctgaggttttcaggcgtgacag

SEQ ID NO: 5162806 - DNA, 25 bp, Homo sapien
tttcagtagcctcataggttctggt

SEQ ID NO: 5162807 - DNA, 25 bp, Homo sapien
aatggcagttgaatttttaggaagt

SEQ ID NO: 5162808 - DNA, 25 bp, Homo sapien
caatatgacataaggcacagactgt

SEQ ID NO: 5162809 - DNA, 25 bp, Homo sapien
tgacataaggcacagactgtgaaaa

SEQ ID NO: 5162810 - DNA, 25 bp, Homo sapien
ataaggcacagactgtgaaaatggc

SEQ ID NO: 5162811 - DNA, 25 bp, Homo sapien
tttactcccttgtggcaacataaca

SEQ ID NO: 5162812 - DNA, 25 bp, Homo sapien
ggcaacataacattgttgtgctgct

SEQ ID NO: 5162813 - DNA, 25 bp, Homo sapien
tgcctgtgtaccccccgaacctgtc

SEQ ID NO: 5162814 - DNA, 25 bp, Homo sapien
caacataacattgttgtgctgctat

SEQ ID NO: 5162815 - DNA, 25 bp, Homo sapien
tgtagaagaactgggacatactaga

SEQ ID NO: 5162816 - DNA, 25 bp, Homo sapien
tactagaggcccagaattctagggc

SEQ ID NO: 5162817 - DNA, 25 bp, Homo sapien
ttcttctgacacatcgttgctactt

SEQ ID NO: 5162818 - DNA, 25 bp, Homo sapien
tactttggtgggcagtagagaaaaa

SEQ ID NO: 5162819 - DNA, 25 bp, Homo sapien
tgagaaagcttcttaaccacccgtg

SEQ ID NO: 5162820 - DNA, 25 bp, Homo sapien
gacccatctctgtaaccactcaaaa

SEQ ID NO: 5162821 - DNA, 25 bp, Homo sapien
gatacagtgcggagaagatgcttaa

SEQ ID NO: 5162822 - DNA, 25 bp, Homo sapien
aatgccctcttcatatgtgaacaag

SEQ ID NO: 5162823 - DNA, 25 bp, Homo sapien
cttatcatgaattctttccagctcc

SEQ ID NO: 5162824 - DNA, 25 bp, Homo sapien
tatcatgaattctttccagctccat

SEQ ID NO: 5162825 - DNA, 25 bp, Homo sapien
ttatcatgaattctttccagctcca

SEQ ID NO: 5162826 - DNA, 25 bp, Homo sapien
caaagcattgctgataacggtgatt

SEQ ID NO: 5162827 - DNA, 25 bp, Homo sapien
tgattgcattcacctcactggcagc

SEQ ID NO: 5162828 - DNA, 25 bp, Homo sapien
cagggtttgtgagttgcttatacaa

SEQ ID NO: 5162829 - DNA, 25 bp, Homo sapien
tacaacactcaactgcagtaaatcc

SEQ ID NO: 5162830 - DNA, 25 bp, Homo sapien
ctctttctgtaaggggattccttca

SEQ ID NO: 5162831 - DNA, 25 bp, Homo sapien
cactcctctttctgtaaggggattc

SEQ ID NO: 5162832 - DNA, 25 bp, Homo sapien
tctgtaaggggattccttcattaga

SEQ ID NO: 5162833 - DNA, 25 bp, Homo sapien
ctcctctttctgtaaggggattcct

SEQ ID NO: 5162834 - DNA, 25 bp, Homo sapien
aggtactgccccaaaatggattgtc

SEQ ID NO: 5162835 - DNA, 25 bp, Homo sapien
gtactgccccaaaatggattgtccc

SEQ ID NO: 5162836 - DNA, 25 bp, Homo sapien
agtcaggctaccaggtactgcccca

SEQ ID NO: 5162837 - DNA, 25 bp, Homo sapien
cctgagtcaggctaccaggtactgc

SEQ ID NO: 5162838 - DNA, 25 bp, Homo sapien
ttttccaggtctccaacatccatct

SEQ ID NO: 5162839 - DNA, 25 bp, Homo sapien
cagacagtcataaggcttcatgctt

SEQ ID NO: 5162840 - DNA, 25 bp, Homo sapien
ggcttcatgcttatgaagccttgta

SEQ ID NO: 5162841 - DNA, 25 bp, Homo sapien
ttccaggtctccaacatccatcttg

SEQ ID NO: 5162842 - DNA, 25 bp, Homo sapien
aagccactgtgacaaccctctaggg

SEQ ID NO: 5162843 - DNA, 25 bp, Homo sapien
gaggcactcctcctatgccacagag

SEQ ID NO: 5162844 - DNA, 25 bp, Homo sapien
tgggacaagcctgcaaccaggctct

SEQ ID NO: 5162845 - DNA, 25 bp, Homo sapien
gacatgagcattgatcttactagga

SEQ ID NO: 5162846 - DNA, 25 bp, Homo sapien
gtccattcaaagtccaaattaggcc

SEQ ID NO: 5162847 - DNA, 25 bp, Homo sapien
aagtccaaattaggcctatctcttc

SEQ ID NO: 5162848 - DNA, 25 bp, Homo sapien
ccattcaaagtccaaattaggccta

SEQ ID NO: 5162849 - DNA, 25 bp, Homo sapien
caaagtccaaattaggcctatctct

SEQ ID NO: 5162850 - DNA, 25 bp, Homo sapien
ttttgcaaagaatctctattcaatt

SEQ ID NO: 5162851 - DNA, 25 bp, Homo sapien
gttttgcaaagaatctctattcaat

SEQ ID NO: 5162852 - DNA, 25 bp, Homo sapien
tgttttgcaaagaatctctattcaa

SEQ ID NO: 5162853 - DNA, 25 bp, Homo sapien
ctattcctgcaggggacagaagaca

SEQ ID NO: 5162854 - DNA, 25 bp, Homo sapien
cacttgtgtaaagggtgtaagatct

SEQ ID NO: 5162855 - DNA, 25 bp, Homo sapien
tataaagtcaacaccatagccaatg

SEQ ID NO: 5162856 - DNA, 25 bp, Homo sapien
tagttgctggatttgtgagagactg

SEQ ID NO: 5162857 - DNA, 25 bp, Homo sapien
cctactgaaggttatcttggctggg

SEQ ID NO: 5162858 - DNA, 25 bp, Homo sapien
tagtaataatggaagggcaattctc

SEQ ID NO: 5162859 - DNA, 25 bp, Homo sapien
atagtaataatggaagggcaattct

SEQ ID NO: 5162860 - DNA, 25 bp, Homo sapien
tatagtaataatggaagggcaattc

SEQ ID NO: 5162861 - DNA, 25 bp, Homo sapien
tggagaaggggggtcactctggatc

SEQ ID NO: 5162862 - DNA, 25 bp, Homo sapien
ggatccactctattgccccacagag

SEQ ID NO: 5162863 - DNA, 25 bp, Homo sapien
cccacagagcctgataaactcttct

SEQ ID NO: 5162864 - DNA, 25 bp, Homo sapien
tcactctggatccactctattgccc

SEQ ID NO: 5162865 - DNA, 25 bp, Homo sapien
gaaacagactacgtcttgcctgcat

SEQ ID NO: 5162866 - DNA, 25 bp, Homo sapien
gggagctgcacaatgtcctgggatg

SEQ ID NO: 5162867 - DNA, 25 bp, Homo sapien
ttgcctgcatagctcctctgtaaga

SEQ ID NO: 5162868 - DNA, 25 bp, Homo sapien
cgtaagggtgtctctctacggccgc

SEQ ID NO: 5162869 - DNA, 25 bp, Homo sapien
gatgtagctttgaggtcacagaagc

SEQ ID NO: 5162870 - DNA, 25 bp, Homo sapien
ccattcagatgtagctttgaggtca

SEQ ID NO: 5162871 - DNA, 25 bp, Homo sapien
tttcccattcagatgtagctttgag

SEQ ID NO: 5162872 - DNA, 25 bp, Homo sapien
aggtcacagaagcaataccactgta

SEQ ID NO: 5162873 - DNA, 25 bp, Homo sapien
ggcacagtcacatcaaagcagaaac

SEQ ID NO: 5162874 - DNA, 25 bp, Homo sapien
aaggctatcattaggacctgtcatc

SEQ ID NO: 5162875 - DNA, 25 bp, Homo sapien
tggtaaggctatcattaggacctgt

SEQ ID NO: 5162876 - DNA, 25 bp, Homo sapien
gctaggcacagtcacatcaaagcag

SEQ ID NO: 5162877 - DNA, 25 bp, Homo sapien
tagcttcgcatgagggaaggtcatt

SEQ ID NO: 5162878 - DNA, 25 bp, Homo sapien
agcttcgcatgagggaaggtcattc

SEQ ID NO: 5162879 - DNA, 25 bp, Homo sapien
cttcgcatgagggaaggtcattcca

SEQ ID NO: 5162880 - DNA, 25 bp, Homo sapien
gcttcgcatgagggaaggtcattcc

SEQ ID NO: 5162881 - DNA, 25 bp, Homo sapien
tcttacgtccacatggcggctgctg

SEQ ID NO: 5162882 - DNA, 25 bp, Homo sapien
gtcttacgtccacatggcggctgct

SEQ ID NO: 5162883 - DNA, 25 bp, Homo sapien
catcagaagttagtgaggttaaccc

SEQ ID NO: 5162884 - DNA, 25 bp, Homo sapien
cctatgacaaatggaggtaatattc

SEQ ID NO: 5162885 - DNA, 25 bp, Homo sapien
tgtcgtggagtgtttagctgcttct

SEQ ID NO: 5162886 - DNA, 25 bp, Homo sapien
tgaggttaacccagagctatgtaca

SEQ ID NO: 5162887 - DNA, 25 bp, Homo sapien
tgaatcatatttgaggccggcttgt

SEQ ID NO: 5162888 - DNA, 25 bp, Homo sapien
atttgaggccggcttgtaagaagtg

SEQ ID NO: 5162889 - DNA, 25 bp, Homo sapien
tgtaagaagtggttaacaccctcaa

SEQ ID NO: 5162890 - DNA, 25 bp, Homo sapien
gagtcagtagatcctgaatcatatt

SEQ ID NO: 5162891 - DNA, 25 bp, Homo sapien
ccttattgtccaagaaagggtgttg

SEQ ID NO: 5162892 - DNA, 25 bp, Homo sapien
tattgtccaagaaagggtgttgtgg

SEQ ID NO: 5162893 - DNA, 25 bp, Homo sapien
tgttgtggtggtgtaaccttaactg

SEQ ID NO: 5162894 - DNA, 25 bp, Homo sapien
tgtggtggtgtaaccttaactgtag

SEQ ID NO: 5162895 - DNA, 25 bp, Homo sapien
tacccaaccatgaacattaacattg

SEQ ID NO: 5162896 - DNA, 25 bp, Homo sapien
accatgaacattaacattgtccacc

SEQ ID NO: 5162897 - DNA, 25 bp, Homo sapien
tttttctacccaaccatgaacatta

SEQ ID NO: 5162898 - DNA, 25 bp, Homo sapien
gaacattaacattgtccaccttcat

SEQ ID NO: 5162899 - DNA, 25 bp, Homo sapien
tcccaatgctctgctctgtgcctgt

SEQ ID NO: 5162900 - DNA, 25 bp, Homo sapien
atccagcccgtgacactaagcatct

SEQ ID NO: 5162901 - DNA, 25 bp, Homo sapien
tgtgcctgtaagcagtagcctctgc

SEQ ID NO: 5162902 - DNA, 25 bp, Homo sapien
tctccaactgtctcatcccaatgct

SEQ ID NO: 5162903 - DNA, 25 bp, Homo sapien
cagtccggtgcggtggctgcttcca

SEQ ID NO: 5162904 - DNA, 25 bp, Homo sapien
tagagcaaggcgctttccagtccgg

SEQ ID NO: 5162905 - DNA, 25 bp, Homo sapien
tgatctggacgctgagccacgctaa

SEQ ID NO: 5162906 - DNA, 25 bp, Homo sapien
tgtccgcagacgctgatctggacgc

SEQ ID NO: 5162907 - DNA, 25 bp, Homo sapien
tctcggtggtgaagccagctatttc

SEQ ID NO: 5162908 - DNA, 25 bp, Homo sapien
aaaatgccctcagtgacaggcccac

SEQ ID NO: 5162909 - DNA, 25 bp, Homo sapien
cttccaaagaggaatgctctagatc

SEQ ID NO: 5162910 - DNA, 25 bp, Homo sapien
tcaactgtttagtggatgaataact

SEQ ID NO: 5162911 - DNA, 25 bp, Homo sapien
acttcagaacattgttcttcagctt

SEQ ID NO: 5162912 - DNA, 25 bp, Homo sapien
cttcagaacattgttcttcagcttg

SEQ ID NO: 5162913 - DNA, 25 bp, Homo sapien
acatagcatgttgtccagttgtttt

SEQ ID NO: 5162914 - DNA, 25 bp, Homo sapien
ctaacatagcatgttgtccagttgt

SEQ ID NO: 5162915 - DNA, 25 bp, Homo sapien
tttccaacttatcagtatgctggtg

SEQ ID NO: 5162916 - DNA, 25 bp, Homo sapien
ttttccaacttatcagtatgctggt

SEQ ID NO: 5162917 - DNA, 25 bp, Homo sapien
cgtattgagcgagccatgctgctgg

SEQ ID NO: 5162918 - DNA, 25 bp, Homo sapien
cattccagcacattcgtattgagcg

SEQ ID NO: 5162919 - DNA, 25 bp, Homo sapien
tttcaggttaatccatatcccctgg

SEQ ID NO: 5162920 - DNA, 25 bp, Homo sapien
gatgccttctcagtgtatctaagat

SEQ ID NO: 5162921 - DNA, 25 bp, Homo sapien
gcatcaccgaacataactttggtaa

SEQ ID NO: 5162922 - DNA, 25 bp, Homo sapien
tttcatatgacatgcattagcatca

SEQ ID NO: 5162923 - DNA, 25 bp, Homo sapien
tgcattagcatcaccgaacataact

SEQ ID NO: 5162924 - DNA, 25 bp, Homo sapien
gacatgcattagcatcaccgaacat

SEQ ID NO: 5162925 - DNA, 25 bp, Homo sapien
ctgcaggaagctctcgcataatgtt

SEQ ID NO: 5162926 - DNA, 25 bp, Homo sapien
tggattagtctttccccacactttc

SEQ ID NO: 5162927 - DNA, 25 bp, Homo sapien
cgcataatgtttggccgaactctgg

SEQ ID NO: 5162928 - DNA, 25 bp, Homo sapien
tgtttggccgaactctggattagtc

SEQ ID NO: 5162929 - DNA, 25 bp, Homo sapien
gagaagcgattttactatgttccca

SEQ ID NO: 5162930 - DNA, 25 bp, Homo sapien
aggaatctgagaagcgattttacta

SEQ ID NO: 5162931 - DNA, 25 bp, Homo sapien
gaagcgattttactatgttcccaca

SEQ ID NO: 5162932 - DNA, 25 bp, Homo sapien
tctgagaagcgattttactatgttc

SEQ ID NO: 5162933 - DNA, 25 bp, Homo sapien
gaattttacacccagcaccagaatc

SEQ ID NO: 5162934 - DNA, 25 bp, Homo sapien
gcaccagaatcacctaagatttgaa

SEQ ID NO: 5162935 - DNA, 25 bp, Homo sapien
taagatttgaattgtcaccctttcc

SEQ ID NO: 5162936 - DNA, 25 bp, Homo sapien
agcagcaacaggaattttacaccca

SEQ ID NO: 5162937 - DNA, 25 bp, Homo sapien
cttgaaagagccaacatgcattcat

SEQ ID NO: 5162938 - DNA, 25 bp, Homo sapien
tgagtgcctcttgaaagagccaaca

SEQ ID NO: 5162939 - DNA, 25 bp, Homo sapien
tgcctcttgaaagagccaacatgca

SEQ ID NO: 5162940 - DNA, 25 bp, Homo sapien
gcagctgtgagtgcctcttgaaaga

SEQ ID NO: 5162941 - DNA, 25 bp, Homo sapien
tgcaggaagaacctcactccttctt

SEQ ID NO: 5162942 - DNA, 25 bp, Homo sapien
gactgcaggaagaacctcactcctt

SEQ ID NO: 5162943 - DNA, 25 bp, Homo sapien
ggcgtaagccctgtttgcctttgct

SEQ ID NO: 5162944 - DNA, 25 bp, Homo sapien
tggctgagactctctggcgtaagcc

SEQ ID NO: 5162945 - DNA, 25 bp, Homo sapien
aggtaatacccatatagccccaagc

SEQ ID NO: 5162946 - DNA, 25 bp, Homo sapien
gtaatacccatatagccccaagcct

SEQ ID NO: 5162947 - DNA, 25 bp, Homo sapien
ccaagcctgagaggccttggtagct

SEQ ID NO: 5162948 - DNA, 25 bp, Homo sapien
ggtaatacccatatagccccaagcc

SEQ ID NO: 5162949 - DNA, 25 bp, Homo sapien
ggccccttgaagggtacggtgcatg

SEQ ID NO: 5162950 - DNA, 25 bp, Homo sapien
ggtacggtgcatgagctagcagcat

SEQ ID NO: 5162951 - DNA, 25 bp, Homo sapien
caccacctgtcttgtgtgaaagtcc

SEQ ID NO: 5162952 - DNA, 25 bp, Homo sapien
tcttgtgtgaaagtccccatcctgg

SEQ ID NO: 5162953 - DNA, 25 bp, Homo sapien
tgatcccacagtctaataagcctgg

SEQ ID NO: 5162954 - DNA, 25 bp, Homo sapien
tgtaaatattgtcatgcgtgtccat

SEQ ID NO: 5162955 - DNA, 25 bp, Homo sapien
taaacacccagagtgtacttcctag

SEQ ID NO: 5162956 - DNA, 25 bp, Homo sapien
gggaaatgctatgtgctcttagctc

SEQ ID NO: 5162957 - DNA, 25 bp, Homo sapien
cggtgccaaattcttgtagaaactg

SEQ ID NO: 5162958 - DNA, 25 bp, Homo sapien
ttctacaagacccaaccggtgccaa

SEQ ID NO: 5162959 - DNA, 25 bp, Homo sapien
agacccaaccggtgccaaattcttg

SEQ ID NO: 5162960 - DNA, 25 bp, Homo sapien
atatttctacaagacccaaccggtg

SEQ ID NO: 5162961 - DNA, 25 bp, Homo sapien
gtccagactcttctttcaactccat

SEQ ID NO: 5162962 - DNA, 25 bp, Homo sapien
ctcccagtccagactcttctttcaa

SEQ ID NO: 5162963 - DNA, 25 bp, Homo sapien
ccagtccagactcttctttcaactc

SEQ ID NO: 5162964 - DNA, 25 bp, Homo sapien
tctcccagtccagactcttctttca

SEQ ID NO: 5162965 - DNA, 25 bp, Homo sapien
ggcaacgtgaacaataagaagagga

SEQ ID NO: 5162966 - DNA, 25 bp, Homo sapien
acggcaacgtgaacaataagaagag

SEQ ID NO: 5162967 - DNA, 25 bp, Homo sapien
taaacggcaacgtgaacaataagaa

SEQ ID NO: 5162968 - DNA, 25 bp, Homo sapien
cataaacggcaacgtgaacaataag

SEQ ID NO: 5162969 - DNA, 25 bp, Homo sapien
cctgacgtggttttctgatgatagt

SEQ ID NO: 5162970 - DNA, 25 bp, Homo sapien
cccagggaatttggtgagaaaggtg

SEQ ID NO: 5162971 - DNA, 25 bp, Homo sapien
gtaattctggaccacccaatctggg

SEQ ID NO: 5162972 - DNA, 25 bp, Homo sapien
gaagcaatgtctccacaaagtgacc

SEQ ID NO: 5162973 - DNA, 25 bp, Homo sapien
tggtgacacatcttgacctgtgcat

SEQ ID NO: 5162974 - DNA, 25 bp, Homo sapien
tcagggagaggtacagaggtacagc

SEQ ID NO: 5162975 - DNA, 25 bp, Homo sapien
gtacagaggtacagcgacacagagc

SEQ ID NO: 5162976 - DNA, 25 bp, Homo sapien
cattgatgttcacatgtcagggaga

SEQ ID NO: 5162977 - DNA, 25 bp, Homo sapien
tctgactgaatgtgctactcccagg

SEQ ID NO: 5162978 - DNA, 25 bp, Homo sapien
catcatgctggctacggattctggg

SEQ ID NO: 5162979 - DNA, 25 bp, Homo sapien
tgaatgtgctactcccagggtaggg

SEQ ID NO: 5162980 - DNA, 25 bp, Homo sapien
ctctgaactcatcatgctggctacg

SEQ ID NO: 5162981 - DNA, 25 bp, Homo sapien
tttaagattgggatccaaagagttc

SEQ ID NO: 5162982 - DNA, 25 bp, Homo sapien
tattttattgctactgtgaggccaa

SEQ ID NO: 5162983 - DNA, 25 bp, Homo sapien
gtctgtttacacctctgtgtaggtt

SEQ ID NO: 5162984 - DNA, 25 bp, Homo sapien
caggctcactgagactccagtgtag

SEQ ID NO: 5162985 - DNA, 25 bp, Homo sapien
ctattcatcatctctagcttgtttc

SEQ ID NO: 5162986 - DNA, 25 bp, Homo sapien
ctctgttgacctgttgtgatgtctc

SEQ ID NO: 5162987 - DNA, 25 bp, Homo sapien
tatacaggtcagcacagctcacact

SEQ ID NO: 5162988 - DNA, 25 bp, Homo sapien
gtctctttatacaggtcagcacagc

SEQ ID NO: 5162989 - DNA, 25 bp, Homo sapien
atactgatctgctctgaactctgcc

SEQ ID NO: 5162990 - DNA, 25 bp, Homo sapien
catactgatctgctctgaactctgc

SEQ ID NO: 5162991 - DNA, 25 bp, Homo sapien
ggtccatactgatctgctctgaact

SEQ ID NO: 5162992 - DNA, 25 bp, Homo sapien
tccatactgatctgctctgaactct

SEQ ID NO: 5162993 - DNA, 25 bp, Homo sapien
ggattcaaaatacccctggactgaa

SEQ ID NO: 5162994 - DNA, 25 bp, Homo sapien
ttctggaggattcaaaatacccctg

SEQ ID NO: 5162995 - DNA, 25 bp, Homo sapien
caaaatacccctggactgaagaatg

SEQ ID NO: 5162996 - DNA, 25 bp, Homo sapien
tgtttgttccgccagcaaaggctca

SEQ ID NO: 5162997 - DNA, 25 bp, Homo sapien
aataaggtcagtatccagtagctgc

SEQ ID NO: 5162998 - DNA, 25 bp, Homo sapien
caaaggtcaccgtcatccttcaata

SEQ ID NO: 5162999 - DNA, 25 bp, Homo sapien
aaatctgtaagagtgcgttatgtac

SEQ ID NO: 5163000 - DNA, 25 bp, Homo sapien
tttaaaaagacatcgctgaatccta

SEQ ID NO: 5163001 - DNA, 25 bp, Homo sapien
cacagatttaggagaaggagtggac

SEQ ID NO: 5163002 - DNA, 25 bp, Homo sapien
cccatcacagatttaggagaaggag

SEQ ID NO: 5163003 - DNA, 25 bp, Homo sapien
tagccatccactcccatcacagatt

SEQ ID NO: 5163004 - DNA, 25 bp, Homo sapien
ttaggagaaggagtggacatattcc

SEQ ID NO: 5163005 - DNA, 25 bp, Homo sapien
tacctaggactagaattatcgggtc

SEQ ID NO: 5163006 - DNA, 25 bp, Homo sapien
tacacggagttgtgggaccatcatc

SEQ ID NO: 5163007 - DNA, 25 bp, Homo sapien
tgttaacccaatatactgaggatgt

SEQ ID NO: 5163008 - DNA, 25 bp, Homo sapien
cacttccagaagctatgtatgagag

SEQ ID NO: 5163009 - DNA, 25 bp, Homo sapien
ttttatgcatgctaggtgcccaaag

SEQ ID NO: 5163010 - DNA, 25 bp, Homo sapien
tgacagaaatcttcacctgagactg

SEQ ID NO: 5163011 - DNA, 25 bp, Homo sapien
aaaatttcacagtggtccttagctg

SEQ ID NO: 5163012 - DNA, 25 bp, Homo sapien
tcaggttagtctaagttaggctgca

SEQ ID NO: 5163013 - DNA, 25 bp, Homo sapien
tgagtcccgcagacagtgttctact

SEQ ID NO: 5163014 - DNA, 25 bp, Homo sapien
aggtggtatggtctcttggcagtat

SEQ ID NO: 5163015 - DNA, 25 bp, Homo sapien
tgcacactacaagggaagtgagtcc

SEQ ID NO: 5163016 - DNA, 25 bp, Homo sapien
gggatgatgtgcacactacaaggga

SEQ ID NO: 5163017 - DNA, 25 bp, Homo sapien
gaccaactctaaatattggtatagc

SEQ ID NO: 5163018 - DNA, 25 bp, Homo sapien
ggccggcaagaaattgaccaactct

SEQ ID NO: 5163019 - DNA, 25 bp, Homo sapien
gatacctgctcttttgatcccggtg

SEQ ID NO: 5163020 - DNA, 25 bp, Homo sapien
tattggtatagcttagtgaaacttt

SEQ ID NO: 5163021 - DNA, 25 bp, Homo sapien
ctatcggcttgggtcatttgaatgg

SEQ ID NO: 5163022 - DNA, 25 bp, Homo sapien
tcggcttgggtcatttgaatggcca

SEQ ID NO: 5163023 - DNA, 25 bp, Homo sapien
gctctatcggcttgggtcatttgaa

SEQ ID NO: 5163024 - DNA, 25 bp, Homo sapien
gtggagctctatcggcttgggtcat

SEQ ID NO: 5163025 - DNA, 25 bp, Homo sapien
tgaagaacttacactggtgttggcc

SEQ ID NO: 5163026 - DNA, 25 bp, Homo sapien
gaagaacttacactggtgttggccc

SEQ ID NO: 5163027 - DNA, 25 bp, Homo sapien
agaacttacactggtgttggcccag

SEQ ID NO: 5163028 - DNA, 25 bp, Homo sapien
actgaagaacttacactggtgttgg

SEQ ID NO: 5163029 - DNA, 25 bp, Homo sapien
aaacctttgaccaatggagatggga

SEQ ID NO: 5163030 - DNA, 25 bp, Homo sapien
gtggttaaatgaatccactttctcc

SEQ ID NO: 5163031 - DNA, 25 bp, Homo sapien
atcctgtggttaaatgaatccactt

SEQ ID NO: 5163032 - DNA, 25 bp, Homo sapien
cctgagtctcataatgtgtctgctc

SEQ ID NO: 5163033 - DNA, 25 bp, Homo sapien
caggaaccacctgctaaggccttgc

SEQ ID NO: 5163034 - DNA, 25 bp, Homo sapien
tgtgggttctaacttcaaacaggaa

SEQ ID NO: 5163035 - DNA, 25 bp, Homo sapien
agggcctggctaagtcctgcttgtc

SEQ ID NO: 5163036 - DNA, 25 bp, Homo sapien
cccacattggatgtcggcttggtgc

SEQ ID NO: 5163037 - DNA, 25 bp, Homo sapien
ggctgtcttctcgatttgcggctat

SEQ ID NO: 5163038 - DNA, 25 bp, Homo sapien
tgcggctatcttctcgatttctggg

SEQ ID NO: 5163039 - DNA, 25 bp, Homo sapien
tgctatcttctcgatttgcggctgt

SEQ ID NO: 5163040 - DNA, 25 bp, Homo sapien
ttgtgttcagctttccagcgatggg

SEQ ID NO: 5163041 - DNA, 25 bp, Homo sapien
tttctcccattgtgtaggttgttca

SEQ ID NO: 5163042 - DNA, 25 bp, Homo sapien
tctcccattgtgtaggttgttcact

SEQ ID NO: 5163043 - DNA, 25 bp, Homo sapien
cccattgtgtaggttgttcactctg

SEQ ID NO: 5163044 - DNA, 25 bp, Homo sapien
tcccattgtgtaggttgttcactct

SEQ ID NO: 5163045 - DNA, 25 bp, Homo sapien
agttcccgtattattgctccatcca

SEQ ID NO: 5163046 - DNA, 25 bp, Homo sapien
gctgagtcttgtgctgacccagtta

SEQ ID NO: 5163047 - DNA, 25 bp, Homo sapien
taacgactctctggtgagtgcctcc

SEQ ID NO: 5163048 - DNA, 25 bp, Homo sapien
tgctacacctgctgctaacgactct

SEQ ID NO: 5163049 - DNA, 25 bp, Homo sapien
tccctggaaaacctgattttcttgc

SEQ ID NO: 5163050 - DNA, 25 bp, Homo sapien
ttctgccaccttttagtttgtttca

SEQ ID NO: 5163051 - DNA, 25 bp, Homo sapien
tcacttctcaaatttctgccacctt

SEQ ID NO: 5163052 - DNA, 25 bp, Homo sapien
cacgttttgaacctgaatttccctg

SEQ ID NO: 5163053 - DNA, 25 bp, Homo sapien
ttaaggtgctgccatttattagaga

SEQ ID NO: 5163054 - DNA, 25 bp, Homo sapien
gaggattaaattctccatgtattga

SEQ ID NO: 5163055 - DNA, 25 bp, Homo sapien
cagtgataaggtacagtaggtagac

SEQ ID NO: 5163056 - DNA, 25 bp, Homo sapien
gaaaaggccaaatagattcctgaac

SEQ ID NO: 5163057 - DNA, 25 bp, Homo sapien
gatgctataggttcacctgttttcc

SEQ ID NO: 5163058 - DNA, 25 bp, Homo sapien
tgctataggttcacctgttttcccc

SEQ ID NO: 5163059 - DNA, 25 bp, Homo sapien
gtgatgctataggttcacctgtttt

SEQ ID NO: 5163060 - DNA, 25 bp, Homo sapien
gctataggttcacctgttttcccca

SEQ ID NO: 5163061 - DNA, 25 bp, Homo sapien
cacgagtatgccaaatagttactaa

SEQ ID NO: 5163062 - DNA, 25 bp, Homo sapien
gttaagtaattcgtaaatcacagaa

SEQ ID NO: 5163063 - DNA, 25 bp, Homo sapien
tttgctatcactcttaacagcggag

SEQ ID NO: 5163064 - DNA, 25 bp, Homo sapien
tacttgtactttccatgggacattc

SEQ ID NO: 5163065 - DNA, 25 bp, Homo sapien
ttggatccgaggagttcagcaagag

SEQ ID NO: 5163066 - DNA, 25 bp, Homo sapien
tggatccgaggagttcagcaagagt

SEQ ID NO: 5163067 - DNA, 25 bp, Homo sapien
gtctgccaaaggtcagctgtatcat

SEQ ID NO: 5163068 - DNA, 25 bp, Homo sapien
ggatccgaggagttcagcaagagtc

SEQ ID NO: 5163069 - DNA, 25 bp, Homo sapien
gctcacaggagcagttgactgaaag

SEQ ID NO: 5163070 - DNA, 25 bp, Homo sapien
tgcatttgatcccatggacatgatc

SEQ ID NO: 5163071 - DNA, 25 bp, Homo sapien
cacaggagcagttgactgaaagaaa

SEQ ID NO: 5163072 - DNA, 25 bp, Homo sapien
aaagaaatgcatttgatcccatgga

SEQ ID NO: 5163073 - DNA, 25 bp, Homo sapien
gcagagcacgttttcttttacattg

SEQ ID NO: 5163074 - DNA, 25 bp, Homo sapien
caacccgatgatatgcatgagtgaa

SEQ ID NO: 5163075 - DNA, 25 bp, Homo sapien
tttacattgtgtgcttccaacccaa

SEQ ID NO: 5163076 - DNA, 25 bp, Homo sapien
gaatcaaggcgttgagcagagcacg

SEQ ID NO: 5163077 - DNA, 25 bp, Homo sapien
tggtctgcctatctgttgtttgtgt

SEQ ID NO: 5163078 - DNA, 25 bp, Homo sapien
tttttgttggtctgcctatctgttg

SEQ ID NO: 5163079 - DNA, 25 bp, Homo sapien
tgttggtctgcctatctgttgtttg

SEQ ID NO: 5163080 - DNA, 25 bp, Homo sapien
ttttgttggtctgcctatctgttgt

SEQ ID NO: 5163081 - DNA, 25 bp, Homo sapien
cctgcttgggacattgtgagaactc

SEQ ID NO: 5163082 - DNA, 25 bp, Homo sapien
cttcttctgtctatcccactctggt

SEQ ID NO: 5163083 - DNA, 25 bp, Homo sapien
tcttcttctgtctatcccactctgg

SEQ ID NO: 5163084 - DNA, 25 bp, Homo sapien
ttcttctgtctatcccactctggtt

SEQ ID NO: 5163085 - DNA, 25 bp, Homo sapien
tgaatatttcatatatccgtctgct

SEQ ID NO: 5163086 - DNA, 25 bp, Homo sapien
tttcatatatccgtctgcttcatcc

SEQ ID NO: 5163087 - DNA, 25 bp, Homo sapien
gaatatttcatatatccgtctgctt

SEQ ID NO: 5163088 - DNA, 25 bp, Homo sapien
tatttcatatatccgtctgcttcat

SEQ ID NO: 5163089 - DNA, 25 bp, Homo sapien
gaacaggactctcatcgatttgcag

SEQ ID NO: 5163090 - DNA, 25 bp, Homo sapien
gacactgaacaggactctcatcgat

SEQ ID NO: 5163091 - DNA, 25 bp, Homo sapien
gactctcatcgatttgcaggaaagg

SEQ ID NO: 5163092 - DNA, 25 bp, Homo sapien
ccatggcagcacttcaccctgaagg

SEQ ID NO: 5163093 - DNA, 25 bp, Homo sapien
caaagggtcttttcagcggtggcat

SEQ ID NO: 5163094 - DNA, 25 bp, Homo sapien
gaaaggtgaccatcctacattggca

SEQ ID NO: 5163095 - DNA, 25 bp, Homo sapien
taagagacgtgcaatgtgccagaag

SEQ ID NO: 5163096 - DNA, 25 bp, Homo sapien
tgaagaagcatggtcaacaagtgtg

SEQ ID NO: 5163097 - DNA, 25 bp, Homo sapien
tgctccttaggctcatccaacatat

SEQ ID NO: 5163098 - DNA, 25 bp, Homo sapien
tctgttgtcacttggccttttgcag

SEQ ID NO: 5163099 - DNA, 25 bp, Homo sapien
tatttctgttgtcacttggcctttt

SEQ ID NO: 5163100 - DNA, 25 bp, Homo sapien
taggctcatccaacatattactgag

SEQ ID NO: 5163101 - DNA, 25 bp, Homo sapien
cttctgatagggaggaaacacttcc

SEQ ID NO: 5163102 - DNA, 25 bp, Homo sapien
tgactccccagtggaaaatatagga

SEQ ID NO: 5163103 - DNA, 25 bp, Homo sapien
aaaagccttggattgcacagagcag

SEQ ID NO: 5163104 - DNA, 25 bp, Homo sapien
caaacttatgtctctatggctccaa

SEQ ID NO: 5163105 - DNA, 25 bp, Homo sapien
cctctaccgcctccactactgttta

SEQ ID NO: 5163106 - DNA, 25 bp, Homo sapien
tctaccgcctccactactgtttata

SEQ ID NO: 5163107 - DNA, 25 bp, Homo sapien
ccgcctccactactgtttatacatt

SEQ ID NO: 5163108 - DNA, 25 bp, Homo sapien
taccgcctccactactgtttataca

SEQ ID NO: 5163109 - DNA, 25 bp, Homo sapien
caggaaacagattgtcagggcacac

SEQ ID NO: 5163110 - DNA, 25 bp, Homo sapien
caagggccttgaaaccaggaaacag

SEQ ID NO: 5163111 - DNA, 25 bp, Homo sapien
acgagttcccctaaagctctgtgta

SEQ ID NO: 5163112 - DNA, 25 bp, Homo sapien
gctcttctttctgccttgaaggccc

SEQ ID NO: 5163113 - DNA, 25 bp, Homo sapien
ttagtggaactgaaaggataatgcc

SEQ ID NO: 5163114 - DNA, 25 bp, Homo sapien
cttctacatctacatacagcaggca

SEQ ID NO: 5163115 - DNA, 25 bp, Homo sapien
ctggtactgtcaggaaattgcagac

SEQ ID NO: 5163116 - DNA, 25 bp, Homo sapien
ggataatgccttaactcgttgactt

SEQ ID NO: 5163117 - DNA, 25 bp, Homo sapien
taaagggatacattaatctctggca

SEQ ID NO: 5163118 - DNA, 25 bp, Homo sapien
cattttgtcaactcaggcaattatg

SEQ ID NO: 5163119 - DNA, 25 bp, Homo sapien
tttacaggaagagaatcatccttgg

SEQ ID NO: 5163120 - DNA, 25 bp, Homo sapien
gagtagaatgggtatatagaagcac

SEQ ID NO: 5163121 - DNA, 25 bp, Homo sapien
tccacacatatgttgtgagtgcctg

SEQ ID NO: 5163122 - DNA, 25 bp, Homo sapien
gctgatcagaaagagtacttggtgt

SEQ ID NO: 5163123 - DNA, 25 bp, Homo sapien
ctatggctgatcagaaagagtactt

SEQ ID NO: 5163124 - DNA, 25 bp, Homo sapien
gtacaccaggcatgctcctggcagc

SEQ ID NO: 5163125 - DNA, 25 bp, Homo sapien
tagcatgatctgaaaccttaatatt

SEQ ID NO: 5163126 - DNA, 25 bp, Homo sapien
tacatgccttagcatgatctgaaac

SEQ ID NO: 5163127 - DNA, 25 bp, Homo sapien
tgccttagcatgatctgaaacctta

SEQ ID NO: 5163128 - DNA, 25 bp, Homo sapien
gaatttacatgccttagcatgatct

SEQ ID NO: 5163129 - DNA, 25 bp, Homo sapien
agtttctctgctgcaacctgtgcat

SEQ ID NO: 5163130 - DNA, 25 bp, Homo sapien
gtagtttctctgctgcaacctgtgc

SEQ ID NO: 5163131 - DNA, 25 bp, Homo sapien
ctgagtagtttctctgctgcaacct

SEQ ID NO: 5163132 - DNA, 25 bp, Homo sapien
gagtagtttctctgctgcaacctgt

SEQ ID NO: 5163133 - DNA, 25 bp, Homo sapien
tcagtccaagttgttgtcaattctt

SEQ ID NO: 5163134 - DNA, 25 bp, Homo sapien
aatccctgacactcatctgcaggac

SEQ ID NO: 5163135 - DNA, 25 bp, Homo sapien
gttgtcaattcttaatccctgacac

SEQ ID NO: 5163136 - DNA, 25 bp, Homo sapien
gtcaattcttaatccctgacactca

SEQ ID NO: 5163137 - DNA, 25 bp, Homo sapien
ttgtgaggactgacccatttgcgca

SEQ ID NO: 5163138 - DNA, 25 bp, Homo sapien
tcagttgtgaggactgacccatttg

SEQ ID NO: 5163139 - DNA, 25 bp, Homo sapien
tgaggactgacccatttgcgcagct

SEQ ID NO: 5163140 - DNA, 25 bp, Homo sapien
gactgacccatttgcgcagcttttt

SEQ ID NO: 5163141 - DNA, 25 bp, Homo sapien
gatccaggggacctgtcaagaacat

SEQ ID NO: 5163142 - DNA, 25 bp, Homo sapien
tccagagcgatccaggggacctgtc

SEQ ID NO: 5163143 - DNA, 25 bp, Homo sapien
tgacctggatgtgcctggattctcc

SEQ ID NO: 5163144 - DNA, 25 bp, Homo sapien
gatgtgcctggattctccagagcga

SEQ ID NO: 5163145 - DNA, 25 bp, Homo sapien
cagcatctgctatcacatcatactg

SEQ ID NO: 5163146 - DNA, 25 bp, Homo sapien
tcttcagcatctgctatcacatcat

SEQ ID NO: 5163147 - DNA, 25 bp, Homo sapien
ttcagcatctgctatcacatcatac

SEQ ID NO: 5163148 - DNA, 25 bp, Homo sapien
gatccactccacagttctcacttct

SEQ ID NO: 5163149 - DNA, 25 bp, Homo sapien
gaagagcaacaagccatactggtcc

SEQ ID NO: 5163150 - DNA, 25 bp, Homo sapien
taaagaggcgtatgcatgaagaaga

SEQ ID NO: 5163151 - DNA, 25 bp, Homo sapien
catgcgtctatactggtccttgttc

SEQ ID NO: 5163152 - DNA, 25 bp, Homo sapien
cattgttctctacctggagtctcag

SEQ ID NO: 5163153 - DNA, 25 bp, Homo sapien
cttgaaggatctcatcagaggagaa

SEQ ID NO: 5163154 - DNA, 25 bp, Homo sapien
ccactgaatgtagtaaagttgatct

SEQ ID NO: 5163155 - DNA, 25 bp, Homo sapien
tttcactggcatccctgtcaacttg

SEQ ID NO: 5163156 - DNA, 25 bp, Homo sapien
caacttgagaatctattcccactga

SEQ ID NO: 5163157 - DNA, 25 bp, Homo sapien
tgatctatctgctaactgacgaaac

SEQ ID NO: 5163158 - DNA, 25 bp, Homo sapien
tatcttctcatttaaagatgccaac

SEQ ID NO: 5163159 - DNA, 25 bp, Homo sapien
gaatgtggctaatgataacctggat

SEQ ID NO: 5163160 - DNA, 25 bp, Homo sapien
cagtgaatgtggctaatgataacct

SEQ ID NO: 5163161 - DNA, 25 bp, Homo sapien
tcttctcatttaaagatgccaacag

SEQ ID NO: 5163162 - DNA, 25 bp, Homo sapien
caatagatgtgatgatgcgatagga

SEQ ID NO: 5163163 - DNA, 25 bp, Homo sapien
gcctggactgaaggatctgtgaagc

SEQ ID NO: 5163164 - DNA, 25 bp, Homo sapien
tgtgagggtctacatggcctggact

SEQ ID NO: 5163165 - DNA, 25 bp, Homo sapien
tgatgatgcgataggagtccacagg

SEQ ID NO: 5163166 - DNA, 25 bp, Homo sapien
catttctcttgcatgggccagactc

SEQ ID NO: 5163167 - DNA, 25 bp, Homo sapien
caccacatcgtctacaaaaactcta

SEQ ID NO: 5163168 - DNA, 25 bp, Homo sapien
cagaggtggagtcaatacaccaggc

SEQ ID NO: 5163169 - DNA, 25 bp, Homo sapien
tctcagtgaatggactttgtgcagg

SEQ ID NO: 5163170 - DNA, 25 bp, Homo sapien
tagacgctagtcctgtgcagtttgg

SEQ ID NO: 5163171 - DNA, 25 bp, Homo sapien
tagtttggctttttagacgctagtc

SEQ ID NO: 5163172 - DNA, 25 bp, Homo sapien
agacgctagtcctgtgcagtttggc

SEQ ID NO: 5163173 - DNA, 25 bp, Homo sapien
tctcgcagcatggagcaataattcg

SEQ ID NO: 5163174 - DNA, 25 bp, Homo sapien
taagctagaattgcacattggaagg

SEQ ID NO: 5163175 - DNA, 25 bp, Homo sapien
ctttactggcgcatcttaatggtca

SEQ ID NO: 5163176 - DNA, 25 bp, Homo sapien
tttcctaggaacagggatctcgcag

SEQ ID NO: 5163177 - DNA, 25 bp, Homo sapien
gcatccttcatcagtatgtagttcc

SEQ ID NO: 5163178 - DNA, 25 bp, Homo sapien
tgactctaaatgctccagtgtttgg

SEQ ID NO: 5163179 - DNA, 25 bp, Homo sapien
gggttcctccaccattattgtgtgg

SEQ ID NO: 5163180 - DNA, 25 bp, Homo sapien
tgctgtcagtgaggtattgggttcc

SEQ ID NO: 5163181 - DNA, 25 bp, Homo sapien
catcgagttgtgagagttacttata

SEQ ID NO: 5163182 - DNA, 25 bp, Homo sapien
ttactttgggtctagatgttgacca

SEQ ID NO: 5163183 - DNA, 25 bp, Homo sapien
tagaagtctttaatcagatgtagga

SEQ ID NO: 5163184 - DNA, 25 bp, Homo sapien
cctagcaggtgtaaattggtatcgc

SEQ ID NO: 5163185 - DNA, 25 bp, Homo sapien
catctctgtgtagtgcaattatctc

SEQ ID NO: 5163186 - DNA, 25 bp, Homo sapien
catggttatgcggtacaggaaggta

SEQ ID NO: 5163187 - DNA, 25 bp, Homo sapien
tactgagtgcagaacttgatacttg

SEQ ID NO: 5163188 - DNA, 25 bp, Homo sapien
cttaacaactcaatgcatatgggac

SEQ ID NO: 5163189 - DNA, 25 bp, Homo sapien
tattgttcccccagtctgcttttgg

SEQ ID NO: 5163190 - DNA, 25 bp, Homo sapien
tgtatctctgctctgcgtagaattg

SEQ ID NO: 5163191 - DNA, 25 bp, Homo sapien
acttgttcatgtgatattgttcccc

SEQ ID NO: 5163192 - DNA, 25 bp, Homo sapien
tagtaaactggtctgccaggtcccc

SEQ ID NO: 5163193 - DNA, 25 bp, Homo sapien
ggatctttcaatgccatactagcac

SEQ ID NO: 5163194 - DNA, 25 bp, Homo sapien
aggctcgtgggtggagctcccagga

SEQ ID NO: 5163195 - DNA, 25 bp, Homo sapien
atactagcacaatttaccagtaggg

SEQ ID NO: 5163196 - DNA, 25 bp, Homo sapien
cctgcacggcctgtgcattaacccc

SEQ ID NO: 5163197 - DNA, 25 bp, Homo sapien
ctagggcaggcttcctaatgccctg

SEQ ID NO: 5163198 - DNA, 25 bp, Homo sapien
gctgcttccttcagctacagatcct

SEQ ID NO: 5163199 - DNA, 25 bp, Homo sapien
tagggcaggcttcctaatgccctgg

SEQ ID NO: 5163200 - DNA, 25 bp, Homo sapien
tattgaagtcactaggaggaagtag

SEQ ID NO: 5163201 - DNA, 25 bp, Homo sapien
gccagaggtagccagttcctgtgat

SEQ ID NO: 5163202 - DNA, 25 bp, Homo sapien
tatcacatttggtcgcctgggctct

SEQ ID NO: 5163203 - DNA, 25 bp, Homo sapien
tcctgtgatagagcctgactctgaa

SEQ ID NO: 5163204 - DNA, 25 bp, Homo sapien
ggctctgaaacaacagtgcgtgtgt

SEQ ID NO: 5163205 - DNA, 25 bp, Homo sapien
tttcgctacctaagaagcattgtcc

SEQ ID NO: 5163206 - DNA, 25 bp, Homo sapien
aaagctgtttcgctacctaagaagc

SEQ ID NO: 5163207 - DNA, 25 bp, Homo sapien
gctacctaagaagcattgtccagct

SEQ ID NO: 5163208 - DNA, 25 bp, Homo sapien
tgaagaaagctgtttcgctacctaa

SEQ ID NO: 5163209 - DNA, 25 bp, Homo sapien
gggaaactttcttgcttcagaatgt

SEQ ID NO: 5163210 - DNA, 25 bp, Homo sapien
catttgggaaactttcttgcttcag

SEQ ID NO: 5163211 - DNA, 25 bp, Homo sapien
gaaactttcttgcttcagaatgtgc

SEQ ID NO: 5163212 - DNA, 25 bp, Homo sapien
cttggcaacatttgggaaactttct

SEQ ID NO: 5163213 - DNA, 25 bp, Homo sapien
tgacagtcacgtctgaatacacgtg

SEQ ID NO: 5163214 - DNA, 25 bp, Homo sapien
gggctggaaaccacacatcccttgg

SEQ ID NO: 5163215 - DNA, 25 bp, Homo sapien
cagcagttccaagggtccatttcac

SEQ ID NO: 5163216 - DNA, 25 bp, Homo sapien
aacgctgaagccgtgtatgagttgg

SEQ ID NO: 5163217 - DNA, 25 bp, Homo sapien
gtccagtgttatgaagcatttcacc

SEQ ID NO: 5163218 - DNA, 25 bp, Homo sapien
tgtaatcccattgtctacttttcat

SEQ ID NO: 5163219 - DNA, 25 bp, Homo sapien
tgcagaagccttgtattttgatgta

SEQ ID NO: 5163220 - DNA, 25 bp, Homo sapien
taacaaaactttgtccagtccagtg

SEQ ID NO: 5163221 - DNA, 25 bp, Homo sapien
tctgagacatgatgcgtttcttgct

SEQ ID NO: 5163222 - DNA, 25 bp, Homo sapien
tggagcttctggagtatgtttcctc

SEQ ID NO: 5163223 - DNA, 25 bp, Homo sapien
gtagccacccttccgcttgatctga

SEQ ID NO: 5163224 - DNA, 25 bp, Homo sapien
tctggagtatgtttcctcgtagcca

SEQ ID NO: 5163225 - DNA, 25 bp, Homo sapien
aggtctccggctggcgatgcggctc

SEQ ID NO: 5163226 - DNA, 25 bp, Homo sapien
ggcgatgcggctccgagaaaaatcc

SEQ ID NO: 5163227 - DNA, 25 bp, Homo sapien
cgatgcggctccgagaaaaatcctg

SEQ ID NO: 5163228 - DNA, 25 bp, Homo sapien
ggtctccggctggcgatgcggctcc

SEQ ID NO: 5163229 - DNA, 25 bp, Homo sapien
gtttaacttccagtccagatcccaa

SEQ ID NO: 5163230 - DNA, 25 bp, Homo sapien
taatggtgtaataacatcgtgtttc

SEQ ID NO: 5163231 - DNA, 25 bp, Homo sapien
gatcccaaagacataatggttcttc

SEQ ID NO: 5163232 - DNA, 25 bp, Homo sapien
cttcctgtaggaaagtgtaaattat

SEQ ID NO: 5163233 - DNA, 25 bp, Homo sapien
caaacttcttctattggattccaaa

SEQ ID NO: 5163234 - DNA, 25 bp, Homo sapien
gcagtgcctcttccacacattatca

SEQ ID NO: 5163235 - DNA, 25 bp, Homo sapien
ggatatctcagtgacgcaaacttct

SEQ ID NO: 5163236 - DNA, 25 bp, Homo sapien
tggtaatcttgggatgcagtgcctc

SEQ ID NO: 5163237 - DNA, 25 bp, Homo sapien
gagcaagcgtgagaaagccagccat

SEQ ID NO: 5163238 - DNA, 25 bp, Homo sapien
agaaggaggtgagcaagcgtgagaa

SEQ ID NO: 5163239 - DNA, 25 bp, Homo sapien
tcatccatcctcaggggtgactcag

SEQ ID NO: 5163240 - DNA, 25 bp, Homo sapien
tgactcctgacagccctcttagcct

SEQ ID NO: 5163241 - DNA, 25 bp, Homo sapien
ccaagaagaccaggcatgtcatcct

SEQ ID NO: 5163242 - DNA, 25 bp, Homo sapien
agggtcacggcagtggaaaaagcca

SEQ ID NO: 5163243 - DNA, 25 bp, Homo sapien
tgagtgtgacatggaccaccagcag

SEQ ID NO: 5163244 - DNA, 25 bp, Homo sapien
cagggtatagatgagcagagaccca

SEQ ID NO: 5163245 - DNA, 25 bp, Homo sapien
tatctcaggaagtccaggggttcct

SEQ ID NO: 5163246 - DNA, 25 bp, Homo sapien
tatatctcaggaagtccaggggttc

SEQ ID NO: 5163247 - DNA, 25 bp, Homo sapien
ttatatctcaggaagtccaggggtt

SEQ ID NO: 5163248 - DNA, 25 bp, Homo sapien
atctcaggaagtccaggggttcctt

SEQ ID NO: 5163249 - DNA, 25 bp, Homo sapien
cgtatgttctactgtgcctagtata

SEQ ID NO: 5163250 - DNA, 25 bp, Homo sapien
ccgtatgttctactgtgcctagtat

SEQ ID NO: 5163251 - DNA, 25 bp, Homo sapien
gaaatgttcgtggataatccaagca

SEQ ID NO: 5163252 - DNA, 25 bp, Homo sapien
gttcgtggataatccaagcataatt

SEQ ID NO: 5163253 - DNA, 25 bp, Homo sapien
tgttcgtggataatccaagcataat

SEQ ID NO: 5163254 - DNA, 25 bp, Homo sapien
aatgttcgtggataatccaagcata

SEQ ID NO: 5163255 - DNA, 25 bp, Homo sapien
tacccaaggagacgaagctgaagca

SEQ ID NO: 5163256 - DNA, 25 bp, Homo sapien
tacttgactgaggttactgctggtg

SEQ ID NO: 5163257 - DNA, 25 bp, Homo sapien
gacaacttgacattgtggacatcgg

SEQ ID NO: 5163258 - DNA, 25 bp, Homo sapien
actgctggtgatgacaagataggga

SEQ ID NO: 5163259 - DNA, 25 bp, Homo sapien
ttgaagcctgatattataaattctc

SEQ ID NO: 5163260 - DNA, 25 bp, Homo sapien
actgtcttgagtgttgtagctttag

SEQ ID NO: 5163261 - DNA, 25 bp, Homo sapien
tctgcgtcaagattgacttaatcct

SEQ ID NO: 5163262 - DNA, 25 bp, Homo sapien
ttttgaacatactatggaagatatt

SEQ ID NO: 5163263 - DNA, 25 bp, Homo sapien
cccccagtcacgaacagatccaggg

SEQ ID NO: 5163264 - DNA, 25 bp, Homo sapien
ccagtcacgaacagatccagggaga

SEQ ID NO: 5163265 - DNA, 25 bp, Homo sapien
cttgcccccagtcacgaacagatcc

SEQ ID NO: 5163266 - DNA, 25 bp, Homo sapien
ttgcccccagtcacgaacagatcca

SEQ ID NO: 5163267 - DNA, 25 bp, Homo sapien
catgttctgctgatgaagcccttgc

SEQ ID NO: 5163268 - DNA, 25 bp, Homo sapien
tgcatgttctgctgatgaagccctt

SEQ ID NO: 5163269 - DNA, 25 bp, Homo sapien
ctgcatgttctgctgatgaagccct

SEQ ID NO: 5163270 - DNA, 25 bp, Homo sapien
gttctgctgatgaagcccttgcagt

SEQ ID NO: 5163271 - DNA, 25 bp, Homo sapien
cagtggcaaaatcggatacgattac

SEQ ID NO: 5163272 - DNA, 25 bp, Homo sapien
tgcagtggcaaaatcggatacgatt

SEQ ID NO: 5163273 - DNA, 25 bp, Homo sapien
atacgattacttgttgtcacttcgt

SEQ ID NO: 5163274 - DNA, 25 bp, Homo sapien
gttggtattccggtttagaatgagc

SEQ ID NO: 5163275 - DNA, 25 bp, Homo sapien
gctgcatgggggtgattcatgctgg

SEQ ID NO: 5163276 - DNA, 25 bp, Homo sapien
catgggggtgattcatgctggacac

SEQ ID NO: 5163277 - DNA, 25 bp, Homo sapien
gcacagctgcatgggggtgattcat

SEQ ID NO: 5163278 - DNA, 25 bp, Homo sapien
tgcatgggggtgattcatgctggac

SEQ ID NO: 5163279 - DNA, 25 bp, Homo sapien
tcattcaagggtagatctttcagca

SEQ ID NO: 5163280 - DNA, 25 bp, Homo sapien
tctggaagcttcctaatgggcatct

SEQ ID NO: 5163281 - DNA, 25 bp, Homo sapien
gatctttcagcatccagaatggccc

SEQ ID NO: 5163282 - DNA, 25 bp, Homo sapien
tccagaatggcccccttctggaagc

SEQ ID NO: 5163283 - DNA, 25 bp, Homo sapien
cggcgagaggaagcggcacctgggt

SEQ ID NO: 5163284 - DNA, 25 bp, Homo sapien
tggcccggagataggcagacttcat

SEQ ID NO: 5163285 - DNA, 25 bp, Homo sapien
tcctgaccctcggcggcgagaggaa

SEQ ID NO: 5163286 - DNA, 25 bp, Homo sapien
cacacacccgcccacttctgaactc

SEQ ID NO: 5163287 - DNA, 25 bp, Homo sapien
tcctgggcgtcagcccgggcagaga

SEQ ID NO: 5163288 - DNA, 25 bp, Homo sapien
gctgttggggcttctcgtcgaccac

SEQ ID NO: 5163289 - DNA, 25 bp, Homo sapien
ctgttggggcttctcgtcgaccaca

SEQ ID NO: 5163290 - DNA, 25 bp, Homo sapien
ccgtgctgttggggcttctcgtcga

SEQ ID NO: 5163291 - DNA, 25 bp, Homo sapien
gtgctgttggggcttctcgtcgacc

SEQ ID NO: 5163292 - DNA, 25 bp, Homo sapien
cactgcagatgggttcacttgttcc

SEQ ID NO: 5163293 - DNA, 25 bp, Homo sapien
gattgctgtgcatgactcacgcgca

SEQ ID NO: 5163294 - DNA, 25 bp, Homo sapien
ggcaaactgacttgacttggcccaa

SEQ ID NO: 5163295 - DNA, 25 bp, Homo sapien
tatttagagcgtgcttgttggccca

SEQ ID NO: 5163296 - DNA, 25 bp, Homo sapien
gccaaggtgctttaccttatgggtc

SEQ ID NO: 5163297 - DNA, 25 bp, Homo sapien
tagctgcactggtataaaggcaaat

SEQ ID NO: 5163298 - DNA, 25 bp, Homo sapien
aagaagctctaatactgttgtgggc

SEQ ID NO: 5163299 - DNA, 25 bp, Homo sapien
tgtactatttgatcttagaggttca

SEQ ID NO: 5163300 - DNA, 25 bp, Homo sapien
agacagaactgctaaggaaccagga

SEQ ID NO: 5163301 - DNA, 25 bp, Homo sapien
tagcatctactccagctgtgttagt

SEQ ID NO: 5163302 - DNA, 25 bp, Homo sapien
ctgccaacgtagaggaggatcagag

SEQ ID NO: 5163303 - DNA, 25 bp, Homo sapien
agggagtcctcccgtgacagacaga

SEQ ID NO: 5163304 - DNA, 25 bp, Homo sapien
ttttctcgggtagtgacgaacagcc

SEQ ID NO: 5163305 - DNA, 25 bp, Homo sapien
aacagccacgacaggtgaagaggtc

SEQ ID NO: 5163306 - DNA, 25 bp, Homo sapien
agggcaatgaaggatcctgaagatc

SEQ ID NO: 5163307 - DNA, 25 bp, Homo sapien
gactaagaagtctgcgttttctcgg

SEQ ID NO: 5163308 - DNA, 25 bp, Homo sapien
tctctgtgcttagggagaaaaagcc

SEQ ID NO: 5163309 - DNA, 25 bp, Homo sapien
catttatcatcagggttcttagcac

SEQ ID NO: 5163310 - DNA, 25 bp, Homo sapien
tgtctaatgatcaacaggaatgggt

SEQ ID NO: 5163311 - DNA, 25 bp, Homo sapien
aatacgtctcaatccatcaccctgg

SEQ ID NO: 5163312 - DNA, 25 bp, Homo sapien
catcctgataggtggcatagggagc

SEQ ID NO: 5163313 - DNA, 25 bp, Homo sapien
taaaagtgctttaagggtgcatcct

SEQ ID NO: 5163314 - DNA, 25 bp, Homo sapien
tgaatattggacagctatgtttggg

SEQ ID NO: 5163315 - DNA, 25 bp, Homo sapien
gggcagtggtgaagacaaatgcaca

SEQ ID NO: 5163316 - DNA, 25 bp, Homo sapien
catttgggtgcccttcgaggtacct

SEQ ID NO: 5163317 - DNA, 25 bp, Homo sapien
gactaaatgtcctcgattgggctgc

SEQ ID NO: 5163318 - DNA, 25 bp, Homo sapien
tcctccaccgggtttgacaggcagg

SEQ ID NO: 5163319 - DNA, 25 bp, Homo sapien
tgttattgggtttccagaaggctca

SEQ ID NO: 5163320 - DNA, 25 bp, Homo sapien
tgtaaaacccggtggcacaacagtg

SEQ ID NO: 5163321 - DNA, 25 bp, Homo sapien
tatgctcattgagagtccgctgcca

SEQ ID NO: 5163322 - DNA, 25 bp, Homo sapien
tgtgaacggtttcctagagacactg

SEQ ID NO: 5163323 - DNA, 25 bp, Homo sapien
gattaatactatggcctcggaacct

SEQ ID NO: 5163324 - DNA, 25 bp, Homo sapien
ggctggaagtcacactcctctgttg

SEQ ID NO: 5163325 - DNA, 25 bp, Homo sapien
tcagttgcaatggattctcagggcc

SEQ ID NO: 5163326 - DNA, 25 bp, Homo sapien
gatggcttcagactagaacacctag

SEQ ID NO: 5163327 - DNA, 25 bp, Homo sapien
tttttcagatgtggacggagagcag

SEQ ID NO: 5163328 - DNA, 25 bp, Homo sapien
gagtgtctgatgctcacaccaggtg

SEQ ID NO: 5163329 - DNA, 25 bp, Homo sapien
tgtttgaacctgaaccaccaggtca

SEQ ID NO: 5163330 - DNA, 25 bp, Homo sapien
tgcagtatgcctccactgagagtgg

SEQ ID NO: 5163331 - DNA, 25 bp, Homo sapien
tgacattcgcaaagagaccacaagg

SEQ ID NO: 5163332 - DNA, 25 bp, Homo sapien
taacatggtccttgcaacagttgca

SEQ ID NO: 5163333 - DNA, 25 bp, Homo sapien
aactaacaatcgcttactaggtgcc

SEQ ID NO: 5163334 - DNA, 25 bp, Homo sapien
caggtgcaggtctcaacatttaaag

SEQ ID NO: 5163335 - DNA, 25 bp, Homo sapien
tttcaatggcccgatgactgctcct

SEQ ID NO: 5163336 - DNA, 25 bp, Homo sapien
tcaacaagcacctcaaagttcagaa

SEQ ID NO: 5163337 - DNA, 25 bp, Homo sapien
tagaagctcaaatacccagaactgc

SEQ ID NO: 5163338 - DNA, 25 bp, Homo sapien
taacaccttgcttaagtaggcatgg

SEQ ID NO: 5163339 - DNA, 25 bp, Homo sapien
tgaacaagtgcagcctccagtttag

SEQ ID NO: 5163340 - DNA, 25 bp, Homo sapien
taggatccagcattcacggtgtttc

SEQ ID NO: 5163341 - DNA, 25 bp, Homo sapien
ctcaggatctgggtctcgggagcca

SEQ ID NO: 5163342 - DNA, 25 bp, Homo sapien
gtttctcagtagcaagacctgaagc

SEQ ID NO: 5163343 - DNA, 25 bp, Homo sapien
gaaccaggcagggtataggatccag

SEQ ID NO: 5163344 - DNA, 25 bp, Homo sapien
tccattctgccatccggccatccag

SEQ ID NO: 5163345 - DNA, 25 bp, Homo sapien
ctgcaatgacgacaatgtccattat

SEQ ID NO: 5163346 - DNA, 25 bp, Homo sapien
catccggccatccagacatccctgg

SEQ ID NO: 5163347 - DNA, 25 bp, Homo sapien
tgacgacaatgtccattatggtggg

SEQ ID NO: 5163348 - DNA, 25 bp, Homo sapien
cctgagttcctgtgagtcaaaagcc

SEQ ID NO: 5163349 - DNA, 25 bp, Homo sapien
tccttcaccaaaactgctgcctctc

SEQ ID NO: 5163350 - DNA, 25 bp, Homo sapien
tcaacctccttcaccaaaactgctg

SEQ ID NO: 5163351 - DNA, 25 bp, Homo sapien
gctcctgagttcctgtgagtcaaaa

SEQ ID NO: 5163352 - DNA, 25 bp, Homo sapien
tacgtgcccttgtgccggtacatgt

SEQ ID NO: 5163353 - DNA, 25 bp, Homo sapien
gagggagactaggacgatggccaca

SEQ ID NO: 5163354 - DNA, 25 bp, Homo sapien
gcctcattggtgtggtacgtgccct

SEQ ID NO: 5163355 - DNA, 25 bp, Homo sapien
tacatgtagcgcagcatgacgaaga

SEQ ID NO: 5163356 - DNA, 25 bp, Homo sapien
tcttggagggcagggtctccctgca

SEQ ID NO: 5163357 - DNA, 25 bp, Homo sapien
ggtctccctgcagggctgcatctgc

SEQ ID NO: 5163358 - DNA, 25 bp, Homo sapien
catcttggagggcagggtctccctg

SEQ ID NO: 5163359 - DNA, 25 bp, Homo sapien
cagcatcttggagggcagggtctcc

SEQ ID NO: 5163360 - DNA, 25 bp, Homo sapien
aagtactcctttctgctgctatcac

SEQ ID NO: 5163361 - DNA, 25 bp, Homo sapien
tcaaataaagtactcctttctgctg

SEQ ID NO: 5163362 - DNA, 25 bp, Homo sapien
ataaagtactcctttctgctgctat

SEQ ID NO: 5163363 - DNA, 25 bp, Homo sapien
caaataaagtactcctttctgctgc

SEQ ID NO: 5163364 - DNA, 25 bp, Homo sapien
ggcgatggggtgtatttttcctgat

SEQ ID NO: 5163365 - DNA, 25 bp, Homo sapien
tctctctgtctggtggtatcagcag

SEQ ID NO: 5163366 - DNA, 25 bp, Homo sapien
tctcgggaagaatcaagtgctctct

SEQ ID NO: 5163367 - DNA, 25 bp, Homo sapien
tggctatctcgggaagaatcaagtg

SEQ ID NO: 5163368 - DNA, 25 bp, Homo sapien
ttgtagcgcgagtcctcctccgttc

SEQ ID NO: 5163369 - DNA, 25 bp, Homo sapien
gagtggcctcttgtagcgcgagtcc

SEQ ID NO: 5163370 - DNA, 25 bp, Homo sapien
tggcctcttgtagcgcgagtcctcc

SEQ ID NO: 5163371 - DNA, 25 bp, Homo sapien
ccctgggcaggcacctagtgtttcc

SEQ ID NO: 5163372 - DNA, 25 bp, Homo sapien
tatccccagtcagcatacagatgac

SEQ ID NO: 5163373 - DNA, 25 bp, Homo sapien
aatcgttctgagctggatcaatggc

SEQ ID NO: 5163374 - DNA, 25 bp, Homo sapien
taccttttagctctggcacctgctg

SEQ ID NO: 5163375 - DNA, 25 bp, Homo sapien
gacatttgatgccattatccccagt

SEQ ID NO: 5163376 - DNA, 25 bp, Homo sapien
tttgccacactggtgttctgaagat

SEQ ID NO: 5163377 - DNA, 25 bp, Homo sapien
ttttgccacactggtgttctgaaga

SEQ ID NO: 5163378 - DNA, 25 bp, Homo sapien
tattcattgggcctatttatcgcca

SEQ ID NO: 5163379 - DNA, 25 bp, Homo sapien
ttctaaactgacttgtgcatattca

SEQ ID NO: 5163380 - DNA, 25 bp, Homo sapien
gcctgcactgctttcactttacatg

SEQ ID NO: 5163381 - DNA, 25 bp, Homo sapien
tccacactgggccagtgaagacgct

SEQ ID NO: 5163382 - DNA, 25 bp, Homo sapien
acttggtccacgagttcctagcagg

SEQ ID NO: 5163383 - DNA, 25 bp, Homo sapien
cctagcaggtatcgtgtgagcaaat

SEQ ID NO: 5163384 - DNA, 25 bp, Homo sapien
catgcttgggaaaggctatgtgcac

SEQ ID NO: 5163385 - DNA, 25 bp, Homo sapien
gggtctctggttcaacatgcttggg

SEQ ID NO: 5163386 - DNA, 25 bp, Homo sapien
acccagtagactgggagcagactgt

SEQ ID NO: 5163387 - DNA, 25 bp, Homo sapien
ctgggacaaaccagctctgcagctt

SEQ ID NO: 5163388 - DNA, 25 bp, Homo sapien
tgctgctgagcctgattctggctgg

SEQ ID NO: 5163389 - DNA, 25 bp, Homo sapien
ccatgtcatcactactgctgctgag

SEQ ID NO: 5163390 - DNA, 25 bp, Homo sapien
taaagtactgttggcccctaaatca

SEQ ID NO: 5163391 - DNA, 25 bp, Homo sapien
tagttctacttgtggcagtgggcca

SEQ ID NO: 5163392 - DNA, 25 bp, Homo sapien
ccctaaatcattcccgttgctatga

SEQ ID NO: 5163393 - DNA, 25 bp, Homo sapien
tgctatgatgataaaaatctttagg

SEQ ID NO: 5163394 - DNA, 25 bp, Homo sapien
tctcttattgcagccagtgtcctcc

SEQ ID NO: 5163395 - DNA, 25 bp, Homo sapien
ctccagggagccagtaaggccttgc

SEQ ID NO: 5163396 - DNA, 25 bp, Homo sapien
tcctccagggagccagtaaggcctt

SEQ ID NO: 5163397 - DNA, 25 bp, Homo sapien
tccagggagccagtaaggccttgct

SEQ ID NO: 5163398 - DNA, 25 bp, Homo sapien
catatcctgcaccacatacatcctt

SEQ ID NO: 5163399 - DNA, 25 bp, Homo sapien
atcctgcaccacatacatccttggg

SEQ ID NO: 5163400 - DNA, 25 bp, Homo sapien
gagccaggctgcccatatcctgcac

SEQ ID NO: 5163401 - DNA, 25 bp, Homo sapien
tgaagagccaggctgcccatatcct

SEQ ID NO: 5163402 - DNA, 25 bp, Homo sapien
aactccaaccccaccatcaacagaa

SEQ ID NO: 5163403 - DNA, 25 bp, Homo sapien
caaataccaagactcgcccctgcat

SEQ ID NO: 5163404 - DNA, 25 bp, Homo sapien
caaccccaccatcaacagaagcacc

SEQ ID NO: 5163405 - DNA, 25 bp, Homo sapien
gcccaaataccaagactcgcccctg

SEQ ID NO: 5163406 - DNA, 25 bp, Homo sapien
ttgctgacactgaagtactgggcag

SEQ ID NO: 5163407 - DNA, 25 bp, Homo sapien
cccagccagggagttcggaatgcat

SEQ ID NO: 5163408 - DNA, 25 bp, Homo sapien
ggagttcggaatgcattctggcgct

SEQ ID NO: 5163409 - DNA, 25 bp, Homo sapien
ggaatgcattctggcgctccttgct

SEQ ID NO: 5163410 - DNA, 25 bp, Homo sapien
cagggaatcattggaccactgaatg

SEQ ID NO: 5163411 - DNA, 25 bp, Homo sapien
aatccccagggaatcattggaccac

SEQ ID NO: 5163412 - DNA, 25 bp, Homo sapien
aatcattggaccactgaatgtctgg

SEQ ID NO: 5163413 - DNA, 25 bp, Homo sapien
tccccagggaatcattggaccactg

SEQ ID NO: 5163414 - DNA, 25 bp, Homo sapien
tcacacctcatcctgttcagctctg

SEQ ID NO: 5163415 - DNA, 25 bp, Homo sapien
ggagagccctttgggcctcacacct

SEQ ID NO: 5163416 - DNA, 25 bp, Homo sapien
cacagctcgatgagaggagagccct

SEQ ID NO: 5163417 - DNA, 25 bp, Homo sapien
agcatgtcacagctcgatgagagga

SEQ ID NO: 5163418 - DNA, 25 bp, Homo sapien
cacagtgcaggatgatcgggttctg

SEQ ID NO: 5163419 - DNA, 25 bp, Homo sapien
cctcttgcaggcggttttccagggc

SEQ ID NO: 5163420 - DNA, 25 bp, Homo sapien
atgatcgggttctgcccatcagggc

SEQ ID NO: 5163421 - DNA, 25 bp, Homo sapien
caggatgatcgggttctgcccatca

SEQ ID NO: 5163422 - DNA, 25 bp, Homo sapien
tgagccctggctgccttgccgagtg

SEQ ID NO: 5163423 - DNA, 25 bp, Homo sapien
gagccctggctgccttgccgagtgt

SEQ ID NO: 5163424 - DNA, 25 bp, Homo sapien
ctgagccctggctgccttgccgagt

SEQ ID NO: 5163425 - DNA, 25 bp, Homo sapien
agccctggctgccttgccgagtgtg

SEQ ID NO: 5163426 - DNA, 25 bp, Homo sapien
tgctgtgctcccaagtgcctggccc

SEQ ID NO: 5163427 - DNA, 25 bp, Homo sapien
ctgctgtgctcccaagtgcctggcc

SEQ ID NO: 5163428 - DNA, 25 bp, Homo sapien
ctgtgctcccaagtgcctggcccat

SEQ ID NO: 5163429 - DNA, 25 bp, Homo sapien
gctgtgctcccaagtgcctggccca

SEQ ID NO: 5163430 - DNA, 25 bp, Homo sapien
ctggggtcccgcgctgcaggcctgg

SEQ ID NO: 5163431 - DNA, 25 bp, Homo sapien
ctgcaggcctgggctccttgcttac

SEQ ID NO: 5163432 - DNA, 25 bp, Homo sapien
ggggtcccgcgctgcaggcctgggc

SEQ ID NO: 5163433 - DNA, 25 bp, Homo sapien
cgctgcaggcctgggctccttgctt

SEQ ID NO: 5163434 - DNA, 25 bp, Homo sapien
tgtaaagcattggcttcctccttta

SEQ ID NO: 5163435 - DNA, 25 bp, Homo sapien
ctgtaaagcattggcttcctccttt

SEQ ID NO: 5163436 - DNA, 25 bp, Homo sapien
cctgtaaagcattggcttcctcctt

SEQ ID NO: 5163437 - DNA, 25 bp, Homo sapien
aacctgggcaaacagcgtaggcaga

SEQ ID NO: 5163438 - DNA, 25 bp, Homo sapien
gcgttatggagcctggttcttcgct

SEQ ID NO: 5163439 - DNA, 25 bp, Homo sapien
acagcgtaggcagaattgaatgagt

SEQ ID NO: 5163440 - DNA, 25 bp, Homo sapien
tcgctgctcaaacctgggcaaacag

SEQ ID NO: 5163441 - DNA, 25 bp, Homo sapien
aaatatcctggagacacccggaagc

SEQ ID NO: 5163442 - DNA, 25 bp, Homo sapien
gggcttgcagctggcgccgcatctt

SEQ ID NO: 5163443 - DNA, 25 bp, Homo sapien
gccgcatcttcagaagctccaggtg

SEQ ID NO: 5163444 - DNA, 25 bp, Homo sapien
tgtgaggcttgaggcaaatatcctg

SEQ ID NO: 5163445 - DNA, 25 bp, Homo sapien
aagcagtttggttctccccaaggct

SEQ ID NO: 5163446 - DNA, 25 bp, Homo sapien
aagaaagcatcatgttgacatgtga

SEQ ID NO: 5163447 - DNA, 25 bp, Homo sapien
gaatgattgtcatcagttgaatgta

SEQ ID NO: 5163448 - DNA, 25 bp, Homo sapien
tctccccaaggctagttgcaggcca

SEQ ID NO: 5163449 - DNA, 25 bp, Homo sapien
gagcctgatgcaaaatgagcacgcc

SEQ ID NO: 5163450 - DNA, 25 bp, Homo sapien
gtgggcatctgcaaggcttgctgca

SEQ ID NO: 5163451 - DNA, 25 bp, Homo sapien
cacgccatagatgatggcttgtttc

SEQ ID NO: 5163452 - DNA, 25 bp, Homo sapien
aatgagcacgccatagatgatggct

SEQ ID NO: 5163453 - DNA, 25 bp, Homo sapien
aatctcacactgtgtaataatttca

SEQ ID NO: 5163454 - DNA, 25 bp, Homo sapien
gatgccatggccattgccagtttgc

SEQ ID NO: 5163455 - DNA, 25 bp, Homo sapien
tgaacaggagttgacccagcaggac

SEQ ID NO: 5163456 - DNA, 25 bp, Homo sapien
caggtgagtgaacaggagttgaccc

SEQ ID NO: 5163457 - DNA, 25 bp, Homo sapien
agggatccacatcagggaggccagc

SEQ ID NO: 5163458 - DNA, 25 bp, Homo sapien
cgtcacatcagagcgctcagagctg

SEQ ID NO: 5163459 - DNA, 25 bp, Homo sapien
tctaggtcctgctatcgggggctgt

SEQ ID NO: 5163460 - DNA, 25 bp, Homo sapien
gggcacagacctaggatccccatgt

SEQ ID NO: 5163461 - DNA, 25 bp, Homo sapien
aacgtgatttcgatcttaagtgtcc

SEQ ID NO: 5163462 - DNA, 25 bp, Homo sapien
gactcaaacgtgatttcgatcttaa

SEQ ID NO: 5163463 - DNA, 25 bp, Homo sapien
ttcgatcttaagtgtccagcagttt

SEQ ID NO: 5163464 - DNA, 25 bp, Homo sapien
tgggccagttgactcaaacgtgatt

SEQ ID NO: 5163465 - DNA, 25 bp, Homo sapien
gcctgcaccaggccagcaagtatga

SEQ ID NO: 5163466 - DNA, 25 bp, Homo sapien
tggggcctgcaccaggccagcaagt

SEQ ID NO: 5163467 - DNA, 25 bp, Homo sapien
cttgagtggggcctgcaccaggcca

SEQ ID NO: 5163468 - DNA, 25 bp, Homo sapien
gggcctgcaccaggccagcaagtat

SEQ ID NO: 5163469 - DNA, 25 bp, Homo sapien
tatagggtgagaccgcttggtgtct

SEQ ID NO: 5163470 - DNA, 25 bp, Homo sapien
ttccaaggctcctgttcaggttggg

SEQ ID NO: 5163471 - DNA, 25 bp, Homo sapien
tagtgctggacagtggcgttggacg

SEQ ID NO: 5163472 - DNA, 25 bp, Homo sapien
ttggtgtctcccgtgttgagacact

SEQ ID NO: 5163473 - DNA, 25 bp, Homo sapien
agctttagcaaacttcaaccatacc

SEQ ID NO: 5163474 - DNA, 25 bp, Homo sapien
cacagcaccaatgctgggatagtgg

SEQ ID NO: 5163475 - DNA, 25 bp, Homo sapien
ggatagtgggtggctctcagcaact

SEQ ID NO: 5163476 - DNA, 25 bp, Homo sapien
cacagctttagcaaacttcaaccat

SEQ ID NO: 5163477 - DNA, 25 bp, Homo sapien
gccacggcagagaacacctttgctt

SEQ ID NO: 5163478 - DNA, 25 bp, Homo sapien
gtgccgctagtcagttgctctggga

SEQ ID NO: 5163479 - DNA, 25 bp, Homo sapien
gaatccacggccagagggttcttgc

SEQ ID NO: 5163480 - DNA, 25 bp, Homo sapien
cccgagagcatgagcaagtggtgcc

SEQ ID NO: 5163481 - DNA, 25 bp, Homo sapien
ctgggcccaagggtgtccacgagac

SEQ ID NO: 5163482 - DNA, 25 bp, Homo sapien
aggcccctgtgcagagacgccacct

SEQ ID NO: 5163483 - DNA, 25 bp, Homo sapien
ccaagggtgtccacgagacctgcgg

SEQ ID NO: 5163484 - DNA, 25 bp, Homo sapien
ggcccaagggtgtccacgagacctg

SEQ ID NO: 5163485 - DNA, 25 bp, Homo sapien
cgtgtagtcccgcaagtcgctgttg

SEQ ID NO: 5163486 - DNA, 25 bp, Homo sapien
atttctccgcgtgctccagtgccag

SEQ ID NO: 5163487 - DNA, 25 bp, Homo sapien
tatgggatatcaatgctctgcctgg

SEQ ID NO: 5163488 - DNA, 25 bp, Homo sapien
ttagcgctgtggctatttctccgcg

SEQ ID NO: 5163489 - DNA, 25 bp, Homo sapien
acagaagttcttggagccgctgagc

SEQ ID NO: 5163490 - DNA, 25 bp, Homo sapien
cagaagttcttggagccgctgagcc

SEQ ID NO: 5163491 - DNA, 25 bp, Homo sapien
cccacagaagttcttggagccgctg

SEQ ID NO: 5163492 - DNA, 25 bp, Homo sapien
cacagaagttcttggagccgctgag

SEQ ID NO: 5163493 - DNA, 25 bp, Homo sapien
agagcccagcagtccccgaagcgtg

SEQ ID NO: 5163494 - DNA, 25 bp, Homo sapien
ccagcagtccccgaagcgtgattta

SEQ ID NO: 5163495 - DNA, 25 bp, Homo sapien
gcagtccccgaagcgtgatttaaaa

SEQ ID NO: 5163496 - DNA, 25 bp, Homo sapien
gagcccagcagtccccgaagcgtga

SEQ ID NO: 5163497 - DNA, 25 bp, Homo sapien
tccaagccgcctctagcctggcgct

SEQ ID NO: 5163498 - DNA, 25 bp, Homo sapien
atctgtacgtgagggtgctgcaggc

SEQ ID NO: 5163499 - DNA, 25 bp, Homo sapien
ggaatctgggccgagtccatctgta

SEQ ID NO: 5163500 - DNA, 25 bp, Homo sapien
cgctttgtgattcagggttgctgtc

SEQ ID NO: 5163501 - DNA, 25 bp, Homo sapien
gagtggattaagatgatgaccaata

SEQ ID NO: 5163502 - DNA, 25 bp, Homo sapien
tcatcacactcattgcttaacattt

SEQ ID NO: 5163503 - DNA, 25 bp, Homo sapien
catttctgagtggattaagatgatg

SEQ ID NO: 5163504 - DNA, 25 bp, Homo sapien
tctgagtggattaagatgatgacca

SEQ ID NO: 5163505 - DNA, 25 bp, Homo sapien
tcaccgtccttatagaggcctgcag

SEQ ID NO: 5163506 - DNA, 25 bp, Homo sapien
cgtccttatagaggcctgcagtctg

SEQ ID NO: 5163507 - DNA, 25 bp, Homo sapien
agagcaatggccctcaccgtcctta

SEQ ID NO: 5163508 - DNA, 25 bp, Homo sapien
tggccctcaccgtccttatagaggc

SEQ ID NO: 5163509 - DNA, 25 bp, Homo sapien
tagcgaatgtgcgttgagttcttac

SEQ ID NO: 5163510 - DNA, 25 bp, Homo sapien
catttagcgaatgtgcgttgagttc

SEQ ID NO: 5163511 - DNA, 25 bp, Homo sapien
tcatttagcgaatgtgcgttgagtt

SEQ ID NO: 5163512 - DNA, 25 bp, Homo sapien
tttagcgaatgtgcgttgagttctt

SEQ ID NO: 5163513 - DNA, 25 bp, Homo sapien
gtgtgatctgcttatagtagccctt

SEQ ID NO: 5163514 - DNA, 25 bp, Homo sapien
ttatagtagcccttgttgagctgtc

SEQ ID NO: 5163515 - DNA, 25 bp, Homo sapien
gatctgcttatagtagcccttgttg

SEQ ID NO: 5163516 - DNA, 25 bp, Homo sapien
tagtagcccttgttgagctgtctgt

SEQ ID NO: 5163517 - DNA, 25 bp, Homo sapien
agtgcagagactttcgttcattcac

SEQ ID NO: 5163518 - DNA, 25 bp, Homo sapien
gaggactgcttgcccggagtgcaga

SEQ ID NO: 5163519 - DNA, 25 bp, Homo sapien
cagagactttcgttcattcacgcat

SEQ ID NO: 5163520 - DNA, 25 bp, Homo sapien
gagactttcgttcattcacgcattc

SEQ ID NO: 5163521 - DNA, 25 bp, Homo sapien
ctgggtgcttggcatccggccagca

SEQ ID NO: 5163522 - DNA, 25 bp, Homo sapien
aggaggctgcccctatcctccttgt

SEQ ID NO: 5163523 - DNA, 25 bp, Homo sapien
ggaggctgcccctatcctccttgta

SEQ ID NO: 5163524 - DNA, 25 bp, Homo sapien
ggtgcttggcatccggccagcacac

SEQ ID NO: 5163525 - DNA, 25 bp, Homo sapien
gtcactgaccagtttgagggcctga

SEQ ID NO: 5163526 - DNA, 25 bp, Homo sapien
tgaccgtgtcactgaccagtttgag

SEQ ID NO: 5163527 - DNA, 25 bp, Homo sapien
ctgaccgtgtcactgaccagtttga

SEQ ID NO: 5163528 - DNA, 25 bp, Homo sapien
gtgtcactgaccagtttgagggcct

SEQ ID NO: 5163529 - DNA, 25 bp, Homo sapien
actgtcagggatgtgggttgttctt

SEQ ID NO: 5163530 - DNA, 25 bp, Homo sapien
tgagagggggataaggctgagtcga

SEQ ID NO: 5163531 - DNA, 25 bp, Homo sapien
ccactgtcagggatgtgggttgttc

SEQ ID NO: 5163532 - DNA, 25 bp, Homo sapien
gctgagtcgagtgggttaccgaatg

SEQ ID NO: 5163533 - DNA, 25 bp, Homo sapien
agtcggccccgcagaggctgatttt

SEQ ID NO: 5163534 - DNA, 25 bp, Homo sapien
tcggccccgcagaggctgattttat

SEQ ID NO: 5163535 - DNA, 25 bp, Homo sapien
gtcggccccgcagaggctgatttta

SEQ ID NO: 5163536 - DNA, 25 bp, Homo sapien
tcagtcggccccgcagaggctgatt

SEQ ID NO: 5163537 - DNA, 25 bp, Homo sapien
gaccatggatacagctgaggatgag

SEQ ID NO: 5163538 - DNA, 25 bp, Homo sapien
ggaccatggatacagctgaggatga

SEQ ID NO: 5163539 - DNA, 25 bp, Homo sapien
gaggatgagagcacggtatctcctc

SEQ ID NO: 5163540 - DNA, 25 bp, Homo sapien
agagcacggtatctcctctctgaag

SEQ ID NO: 5163541 - DNA, 25 bp, Homo sapien
ctagagagtcatgcagggctagggc

SEQ ID NO: 5163542 - DNA, 25 bp, Homo sapien
gagagtcatgcagggctagggctgg

SEQ ID NO: 5163543 - DNA, 25 bp, Homo sapien
agggctagggctggccgtcgccttg

SEQ ID NO: 5163544 - DNA, 25 bp, Homo sapien
tcatgcagggctagggctggccgtc

SEQ ID NO: 5163545 - DNA, 25 bp, Homo sapien
tgcctggaagttccacgtggaacac

SEQ ID NO: 5163546 - DNA, 25 bp, Homo sapien
gcctggaagttccacgtggaacact

SEQ ID NO: 5163547 - DNA, 25 bp, Homo sapien
ttctgggttcctcctactgtgcccc

SEQ ID NO: 5163548 - DNA, 25 bp, Homo sapien
gaaaattattatcctctaggaacaa

SEQ ID NO: 5163549 - DNA, 25 bp, Homo sapien
aaaattattatcctctaggaacaag

SEQ ID NO: 5163550 - DNA, 25 bp, Homo sapien
aaattattatcctctaggaacaagg

SEQ ID NO: 5163551 - DNA, 25 bp, Homo sapien
agtcaagggagtaagatcccaggtc

SEQ ID NO: 5163552 - DNA, 25 bp, Homo sapien
gatacaggtcaaagggaagtcaagg

SEQ ID NO: 5163553 - DNA, 25 bp, Homo sapien
caggtcaggtaaagaggccacatcc

SEQ ID NO: 5163554 - DNA, 25 bp, Homo sapien
agaggccacatccaatccctgatct

SEQ ID NO: 5163555 - DNA, 25 bp, Homo sapien
ttgagtgaagaatttggctgtttct

SEQ ID NO: 5163556 - DNA, 25 bp, Homo sapien
ccttcacaagacctcccacccatgg

SEQ ID NO: 5163557 - DNA, 25 bp, Homo sapien
tcccaccttcacaagacctcccacc

SEQ ID NO: 5163558 - DNA, 25 bp, Homo sapien
accttcacaagacctcccacccatg

SEQ ID NO: 5163559 - DNA, 25 bp, Homo sapien
ccaccttcacaagacctcccaccca

SEQ ID NO: 5163560 - DNA, 25 bp, Homo sapien
attcagcctctcagtaaagagattc

SEQ ID NO: 5163561 - DNA, 25 bp, Homo sapien
cagcccatcagatatcttattcagc

SEQ ID NO: 5163562 - DNA, 25 bp, Homo sapien
ctccttcagcccatcagatatctta

SEQ ID NO: 5163563 - DNA, 25 bp, Homo sapien
ttcttgtgcgtgtagatctcttcca

SEQ ID NO: 5163564 - DNA, 25 bp, Homo sapien
tggggatgatcgagggggctgcaga

SEQ ID NO: 5163565 - DNA, 25 bp, Homo sapien
ggccgtgtgcagggatcgtccccac

SEQ ID NO: 5163566 - DNA, 25 bp, Homo sapien
gggtgcaagtaggagatggagccgg

SEQ ID NO: 5163567 - DNA, 25 bp, Homo sapien
gatggagccgggaaggcattcatgg

SEQ ID NO: 5163568 - DNA, 25 bp, Homo sapien
ggtgagaaggtagagaaactgaggt

SEQ ID NO: 5163569 - DNA, 25 bp, Homo sapien
ccagggagggtgagaaggtagagaa

SEQ ID NO: 5163570 - DNA, 25 bp, Homo sapien
ctgccagggagggtgagaaggtaga

SEQ ID NO: 5163571 - DNA, 25 bp, Homo sapien
gtgagaaggtagagaaactgaggtg

SEQ ID NO: 5163572 - DNA, 25 bp, Homo sapien
ctagggggtgccaggtgcctttcat

SEQ ID NO: 5163573 - DNA, 25 bp, Homo sapien
tgccaggtgcctttcatccctcccc

SEQ ID NO: 5163574 - DNA, 25 bp, Homo sapien
cccaggcccagtccccatgcatact

SEQ ID NO: 5163575 - DNA, 25 bp, Homo sapien
ggggtgccaggtgcctttcatccct

SEQ ID NO: 5163576 - DNA, 25 bp, Homo sapien
tcattgcaggagaggaagtgagtcc

SEQ ID NO: 5163577 - DNA, 25 bp, Homo sapien
acagctggtgaccttcagtgtggac

SEQ ID NO: 5163578 - DNA, 25 bp, Homo sapien
cattgcaggagaggaagtgagtcct

SEQ ID NO: 5163579 - DNA, 25 bp, Homo sapien
tggtgaccttcagtgtggactgtat

SEQ ID NO: 5163580 - DNA, 25 bp, Homo sapien
gagcacgctgtgcgcccagcacata

SEQ ID NO: 5163581 - DNA, 25 bp, Homo sapien
tgagcacgctgtgcgcccagcacat

SEQ ID NO: 5163582 - DNA, 25 bp, Homo sapien
agcacgctgtgcgcccagcacatat

SEQ ID NO: 5163583 - DNA, 25 bp, Homo sapien
ccagctatggccaggagtagagcac

SEQ ID NO: 5163584 - DNA, 25 bp, Homo sapien
ccacagggaggtccgccggttcctg

SEQ ID NO: 5163585 - DNA, 25 bp, Homo sapien
ccaggagtagagcactgctgagact

SEQ ID NO: 5163586 - DNA, 25 bp, Homo sapien
ctatggccaggagtagagcactgct

SEQ ID NO: 5163587 - DNA, 25 bp, Homo sapien
gagtcagtcagggaataggtgtgtc

SEQ ID NO: 5163588 - DNA, 25 bp, Homo sapien
gtcagtcagggaataggtgtgtctt

SEQ ID NO: 5163589 - DNA, 25 bp, Homo sapien
agtcagtcagggaataggtgtgtct

SEQ ID NO: 5163590 - DNA, 25 bp, Homo sapien
cagggaataggtgtgtcttccctgg

SEQ ID NO: 5163591 - DNA, 25 bp, Homo sapien
tccttcttcctttgccagtaaaaga

SEQ ID NO: 5163592 - DNA, 25 bp, Homo sapien
tcttcctttgccagtaaaagaaaca

SEQ ID NO: 5163593 - DNA, 25 bp, Homo sapien
agactcccagggcacacccagcttt

SEQ ID NO: 5163594 - DNA, 25 bp, Homo sapien
ctctgggagccctagaattgggtcg

SEQ ID NO: 5163595 - DNA, 25 bp, Homo sapien
cagggcacacccagcttttccctct

SEQ ID NO: 5163596 - DNA, 25 bp, Homo sapien
actggggttccaggccctgagactc

SEQ ID NO: 5163597 - DNA, 25 bp, Homo sapien
cctgtctctctaacttcctcctggg

SEQ ID NO: 5163598 - DNA, 25 bp, Homo sapien
tccctgtctctctaacttcctcctg

SEQ ID NO: 5163599 - DNA, 25 bp, Homo sapien
tgtctctctaacttcctcctgggag

SEQ ID NO: 5163600 - DNA, 25 bp, Homo sapien
gtctctctaacttcctcctgggagt

SEQ ID NO: 5163601 - DNA, 25 bp, Homo sapien
caaaggtgtaggagtaggcaaacca

SEQ ID NO: 5163602 - DNA, 25 bp, Homo sapien
gtctcctaggcctcagagctttggg

SEQ ID NO: 5163603 - DNA, 25 bp, Homo sapien
ggcaaaccacgagacagcgcagtct

SEQ ID NO: 5163604 - DNA, 25 bp, Homo sapien
cccagagatgagtgaactttgtgac

SEQ ID NO: 5163605 - DNA, 25 bp, Homo sapien
ccaccttacatctgtggactcccca

SEQ ID NO: 5163606 - DNA, 25 bp, Homo sapien
aaggatgagcgttggagtcaagcat

SEQ ID NO: 5163607 - DNA, 25 bp, Homo sapien
atgagcgttggagtcaagcatgtgc

SEQ ID NO: 5163608 - DNA, 25 bp, Homo sapien
taatgaaggatgagcgttggagtca

SEQ ID NO: 5163609 - DNA, 25 bp, Homo sapien
gagcgttggagtcaagcatgtgcat

SEQ ID NO: 5163610 - DNA, 25 bp, Homo sapien
ggattagatttgagaccaagccaca

SEQ ID NO: 5163611 - DNA, 25 bp, Homo sapien
cagacccacagctgagccaatccca

SEQ ID NO: 5163612 - DNA, 25 bp, Homo sapien
ccagacccacagctgagccaatccc

SEQ ID NO: 5163613 - DNA, 25 bp, Homo sapien
aagggctcctagcaagacagaaggc

SEQ ID NO: 5163614 - DNA, 25 bp, Homo sapien
gacagaagggctcctagcaagacag

SEQ ID NO: 5163615 - DNA, 25 bp, Homo sapien
ggacagaagggctcctagcaagaca

SEQ ID NO: 5163616 - DNA, 25 bp, Homo sapien
cagaagggctcctagcaagacagaa

SEQ ID NO: 5163617 - DNA, 25 bp, Homo sapien
ttgttccctgcactggatgagctgc

SEQ ID NO: 5163618 - DNA, 25 bp, Homo sapien
tgttccctgcactggatgagctgcc

SEQ ID NO: 5163619 - DNA, 25 bp, Homo sapien
tcttgttccctgcactggatgagct

SEQ ID NO: 5163620 - DNA, 25 bp, Homo sapien
ctcttgttccctgcactggatgagc

SEQ ID NO: 5163621 - DNA, 25 bp, Homo sapien
tttcggcactgggtgtcgtgactct

SEQ ID NO: 5163622 - DNA, 25 bp, Homo sapien
ctgggtgtcgtgactctttctgcca

SEQ ID NO: 5163623 - DNA, 25 bp, Homo sapien
tctgcgagagagtgtggccttcctc

SEQ ID NO: 5163624 - DNA, 25 bp, Homo sapien
gctggcccctctgttttcggcactg

SEQ ID NO: 5163625 - DNA, 25 bp, Homo sapien
ctgttgggtggtaagtgccatcttg

SEQ ID NO: 5163626 - DNA, 25 bp, Homo sapien
ctgctctgttgggtggtaagtgcca

SEQ ID NO: 5163627 - DNA, 25 bp, Homo sapien
agcgtcatgtgggtctgctctgttg

SEQ ID NO: 5163628 - DNA, 25 bp, Homo sapien
tcagagcgtcatgtgggtctgctct

SEQ ID NO: 5163629 - DNA, 25 bp, Homo sapien
caagaacaaagtgccagcaggctca

SEQ ID NO: 5163630 - DNA, 25 bp, Homo sapien
agaacaaagtgccagcaggctcagt

SEQ ID NO: 5163631 - DNA, 25 bp, Homo sapien
ccaaaatggcgccttattgcagcat

SEQ ID NO: 5163632 - DNA, 25 bp, Homo sapien
aagaacaaagtgccagcaggctcag

SEQ ID NO: 5163633 - DNA, 25 bp, Homo sapien
agcttttgcacagcagaggccactc

SEQ ID NO: 5163634 - DNA, 25 bp, Homo sapien
cctccaccacgagcttttgcacagc

SEQ ID NO: 5163635 - DNA, 25 bp, Homo sapien
tgctcctccaccacgagcttttgca

SEQ ID NO: 5163636 - DNA, 25 bp, Homo sapien
gcttttgcacagcagaggccactct

SEQ ID NO: 5163637 - DNA, 25 bp, Homo sapien
cttttgttctgagcgagccactggg

SEQ ID NO: 5163638 - DNA, 25 bp, Homo sapien
gaaagcagactgtcacccttttgtt

SEQ ID NO: 5163639 - DNA, 25 bp, Homo sapien
tcttgctgccttgccgggaaagcag

SEQ ID NO: 5163640 - DNA, 25 bp, Homo sapien
acccttttgttctgagcgagccact

SEQ ID NO: 5163641 - DNA, 25 bp, Homo sapien
ctgctgtgccagctcggcaggcagc

SEQ ID NO: 5163642 - DNA, 25 bp, Homo sapien
ctccttcagaggtctgtcctgagct

SEQ ID NO: 5163643 - DNA, 25 bp, Homo sapien
gtgccagctcggcaggcagcagctg

SEQ ID NO: 5163644 - DNA, 25 bp, Homo sapien
ggccaggcacctctggtggagccat

SEQ ID NO: 5163645 - DNA, 25 bp, Homo sapien
aagccatacagccaagtaaatgttt

SEQ ID NO: 5163646 - DNA, 25 bp, Homo sapien
ctgaaggtggcagttgcctgagcta

SEQ ID NO: 5163647 - DNA, 25 bp, Homo sapien
tgtttttgagaaaggtgaggctgaa

SEQ ID NO: 5163648 - DNA, 25 bp, Homo sapien
cagttgcctgagctactgggaaggc

SEQ ID NO: 5163649 - DNA, 25 bp, Homo sapien
tgctgagagtcagtaggtagcacag

SEQ ID NO: 5163650 - DNA, 25 bp, Homo sapien
tagagtgagggagtaaagtcgtgcc

SEQ ID NO: 5163651 - DNA, 25 bp, Homo sapien
taaagtcgtgccttgagaagtgcaa

SEQ ID NO: 5163652 - DNA, 25 bp, Homo sapien
ccttgagaagtgcaatccagcagct

SEQ ID NO: 5163653 - DNA, 25 bp, Homo sapien
gaaggtgtttgagctgtagagtgag

SEQ ID NO: 5163654 - DNA, 25 bp, Homo sapien
atcatttcagtggaagggcatgtgc

SEQ ID NO: 5163655 - DNA, 25 bp, Homo sapien
caaggagtaagaccatctgatgacc

SEQ ID NO: 5163656 - DNA, 25 bp, Homo sapien
aggagaatctaaagggtacactgcc

SEQ ID NO: 5163657 - DNA, 25 bp, Homo sapien
gaccatctgatcttaccaaggagta

SEQ ID NO: 5163658 - DNA, 25 bp, Homo sapien
tattctctctggaggcttgatgttg

SEQ ID NO: 5163659 - DNA, 25 bp, Homo sapien
cttgatgttgtccagtcaggagaaa

SEQ ID NO: 5163660 - DNA, 25 bp, Homo sapien
tgggtcttgcttaccagtgcctcca

SEQ ID NO: 5163661 - DNA, 25 bp, Homo sapien
ggttgaaactcaattagccttccca

SEQ ID NO: 5163662 - DNA, 25 bp, Homo sapien
aggtgcggaagctgcctgtttccca

SEQ ID NO: 5163663 - DNA, 25 bp, Homo sapien
agcacgaatgtctggtgggcagcca

SEQ ID NO: 5163664 - DNA, 25 bp, Homo sapien
tgtaagtgcattggcgccttgccag

SEQ ID NO: 5163665 - DNA, 25 bp, Homo sapien
cagtggtgtaagtgcattggcgcct

SEQ ID NO: 5163666 - DNA, 25 bp, Homo sapien
tgcctcctcacactgattaaggacc

SEQ ID NO: 5163667 - DNA, 25 bp, Homo sapien
cattgcctcctcacactgattaagg

SEQ ID NO: 5163668 - DNA, 25 bp, Homo sapien
gccacgtgcattgcctcctcacact

SEQ ID NO: 5163669 - DNA, 25 bp, Homo sapien
ctgtacaaagcagggccacgtgcat

SEQ ID NO: 5163670 - DNA, 25 bp, Homo sapien
tgaatccattctgttaatcctgcac

SEQ ID NO: 5163671 - DNA, 25 bp, Homo sapien
ttactgaatccattctgttaatcct

SEQ ID NO: 5163672 - DNA, 25 bp, Homo sapien
actgaatccattctgttaatcctgc

SEQ ID NO: 5163673 - DNA, 25 bp, Homo sapien
ctgaatccattctgttaatcctgca

SEQ ID NO: 5163674 - DNA, 25 bp, Homo sapien
caggccgtccagtctaaaagaaaag

SEQ ID NO: 5163675 - DNA, 25 bp, Homo sapien
cccaccctgccccaagaagtgtgcc

SEQ ID NO: 5163676 - DNA, 25 bp, Homo sapien
gcggtgcccccaccctgccccaaga

SEQ ID NO: 5163677 - DNA, 25 bp, Homo sapien
tgcaggcggtgcccccaccctgccc

SEQ ID NO: 5163678 - DNA, 25 bp, Homo sapien
tgcccccaccctgccccaagaagtg

SEQ ID NO: 5163679 - DNA, 25 bp, Homo sapien
gctgatggagtgttccacagcagca

SEQ ID NO: 5163680 - DNA, 25 bp, Homo sapien
tttgcgttgccctgtttgcttctgg

SEQ ID NO: 5163681 - DNA, 25 bp, Homo sapien
caaaagtcctgtttgagtgagggag

SEQ ID NO: 5163682 - DNA, 25 bp, Homo sapien
tcttctggatcaatcgcggtggctg

SEQ ID NO: 5163683 - DNA, 25 bp, Homo sapien
gctcctgcatcattgcgatcagcat

SEQ ID NO: 5163684 - DNA, 25 bp, Homo sapien
tgaccacggccccataactattgtg

SEQ ID NO: 5163685 - DNA, 25 bp, Homo sapien
agctcctgcatcattgcgatcagca

SEQ ID NO: 5163686 - DNA, 25 bp, Homo sapien
ccataactattgtggctgtcttcac

SEQ ID NO: 5163687 - DNA, 25 bp, Homo sapien
tgggctctgtacatactccccttcc

SEQ ID NO: 5163688 - DNA, 25 bp, Homo sapien
ctgggctctgtacatactccccttc

SEQ ID NO: 5163689 - DNA, 25 bp, Homo sapien
ggctctgtacatactccccttccca

SEQ ID NO: 5163690 - DNA, 25 bp, Homo sapien
tctgtacatactccccttcccatcc

SEQ ID NO: 5163691 - DNA, 25 bp, Homo sapien
cactcagcacccataagggatgttg

SEQ ID NO: 5163692 - DNA, 25 bp, Homo sapien
cagaaaagatgctactccagggcca

SEQ ID NO: 5163693 - DNA, 25 bp, Homo sapien
tagaaacttcctcgctattgagcca

SEQ ID NO: 5163694 - DNA, 25 bp, Homo sapien
agtttgtggccccttgcctgcatgc

SEQ ID NO: 5163695 - DNA, 25 bp, Homo sapien
tcacatcaccacttggaagcgatga

SEQ ID NO: 5163696 - DNA, 25 bp, Homo sapien
cacttggaagcgatgagcctgtaca

SEQ ID NO: 5163697 - DNA, 25 bp, Homo sapien
tcaccacttggaagcgatgagcctg

SEQ ID NO: 5163698 - DNA, 25 bp, Homo sapien
tggaagcgatgagcctgtacaagtt

SEQ ID NO: 5163699 - DNA, 25 bp, Homo sapien
gtacactgataatgttcacaaatct

SEQ ID NO: 5163700 - DNA, 25 bp, Homo sapien
ctgtatgtttggtatatttggtgca

SEQ ID NO: 5163701 - DNA, 25 bp, Homo sapien
tctgagttccaatgtcagtttctga

SEQ ID NO: 5163702 - DNA, 25 bp, Homo sapien
gctcaggttatactggactgtatgt

SEQ ID NO: 5163703 - DNA, 25 bp, Homo sapien
cctcttgtctccaccgtagttcacg

SEQ ID NO: 5163704 - DNA, 25 bp, Homo sapien
ccacgcgtgaggaaactgggacgtc

SEQ ID NO: 5163705 - DNA, 25 bp, Homo sapien
aagctgcagcccacgcgtgaggaaa

SEQ ID NO: 5163706 - DNA, 25 bp, Homo sapien
aaactgggacgtcgctttgcgcacg

SEQ ID NO: 5163707 - DNA, 25 bp, Homo sapien
cgcacgtggacagtggtggtctcca

SEQ ID NO: 5163708 - DNA, 25 bp, Homo sapien
tactgtagactgcacttcctgccgc

SEQ ID NO: 5163709 - DNA, 25 bp, Homo sapien
ggagtcggatcatgtgccaagagca

SEQ ID NO: 5163710 - DNA, 25 bp, Homo sapien
tatgtgccgttgctaccgcagagca

SEQ ID NO: 5163711 - DNA, 25 bp, Homo sapien
tgctgctgcgaagattcccaacggc

SEQ ID NO: 5163712 - DNA, 25 bp, Homo sapien
gcgtcagccgatcagcaagggttaa

SEQ ID NO: 5163713 - DNA, 25 bp, Homo sapien
taagcaagtacgctgaccacgctgt

SEQ ID NO: 5163714 - DNA, 25 bp, Homo sapien
tcttgcgggaaatgagcaggaagcc

SEQ ID NO: 5163715 - DNA, 25 bp, Homo sapien
gacgtctcgcaatcctgaaagtaag

SEQ ID NO: 5163716 - DNA, 25 bp, Homo sapien
atcagttcaaataaatcaagaaaat

SEQ ID NO: 5163717 - DNA, 25 bp, Homo sapien
gttgagaaatgccactaatgaaaaa

SEQ ID NO: 5163718 - DNA, 25 bp, Homo sapien
aggagttgagaaatgccactaatga

SEQ ID NO: 5163719 - DNA, 25 bp, Homo sapien
aatcagttcaaataaatcaagaaaa

SEQ ID NO: 5163720 - DNA, 25 bp, Homo sapien
caagaacacttcctaggtggcgctg

SEQ ID NO: 5163721 - DNA, 25 bp, Homo sapien
taatgggtcccatcagtgagactca

SEQ ID NO: 5163722 - DNA, 25 bp, Homo sapien
gatctgtagaatggcccttatcctg

SEQ ID NO: 5163723 - DNA, 25 bp, Homo sapien
ggtgctcaatgatcccatcttaggg

SEQ ID NO: 5163724 - DNA, 25 bp, Homo sapien
caaacgtcacatctgtaagttattc

SEQ ID NO: 5163725 - DNA, 25 bp, Homo sapien
cagttttaacgatcacaaacgtcac

SEQ ID NO: 5163726 - DNA, 25 bp, Homo sapien
gatcatcttctatgcgctgtgtggc

SEQ ID NO: 5163727 - DNA, 25 bp, Homo sapien
gtacagtgaatagcagttaattgca

SEQ ID NO: 5163728 - DNA, 25 bp, Homo sapien
ctctgagtgttgtccagagtgggct

SEQ ID NO: 5163729 - DNA, 25 bp, Homo sapien
ggtgccatggctctgagtgttgtcc

SEQ ID NO: 5163730 - DNA, 25 bp, Homo sapien
tttcatacaggtaggtgccatggct

SEQ ID NO: 5163731 - DNA, 25 bp, Homo sapien
tccagagtgggctgaatccctggct

SEQ ID NO: 5163732 - DNA, 25 bp, Homo sapien
caatcactgttgtcaagaataggga

SEQ ID NO: 5163733 - DNA, 25 bp, Homo sapien
tgcagcgggcactaaatttctaact

SEQ ID NO: 5163734 - DNA, 25 bp, Homo sapien
gacacatggatcacagatgacagac

SEQ ID NO: 5163735 - DNA, 25 bp, Homo sapien
tcacatatcacggaatcaaggcttt

SEQ ID NO: 5163736 - DNA, 25 bp, Homo sapien
aggtggcagaaaattgagagctgcc

SEQ ID NO: 5163737 - DNA, 25 bp, Homo sapien
tgccctacgcgagcatttctgcagg

SEQ ID NO: 5163738 - DNA, 25 bp, Homo sapien
tcaagtggcaaacacgaatatgccc

SEQ ID NO: 5163739 - DNA, 25 bp, Homo sapien
tcaacacaactcaaagatccaggct

SEQ ID NO: 5163740 - DNA, 25 bp, Homo sapien
gggagcagctgtaaccaccgcttat

SEQ ID NO: 5163741 - DNA, 25 bp, Homo sapien
gactgttgctggaccatagcccggg

SEQ ID NO: 5163742 - DNA, 25 bp, Homo sapien
cctgctgtagatgaaggcggtgacc

SEQ ID NO: 5163743 - DNA, 25 bp, Homo sapien
tgaccagtaagccaaggcggcaagc

SEQ ID NO: 5163744 - DNA, 25 bp, Homo sapien
aattcaccagtgttcctgaagctgc

SEQ ID NO: 5163745 - DNA, 25 bp, Homo sapien
gcagacggtctgtgtgctgtttgaa

SEQ ID NO: 5163746 - DNA, 25 bp, Homo sapien
tctagttgagtttctggcgcccctg

SEQ ID NO: 5163747 - DNA, 25 bp, Homo sapien
gtcccggcaagtccggcggaattca

SEQ ID NO: 5163748 - DNA, 25 bp, Homo sapien
gaggcggccctggtgacttgaagtg

SEQ ID NO: 5163749 - DNA, 25 bp, Homo sapien
ccctggtgacttgaagtgcgtgcat

SEQ ID NO: 5163750 - DNA, 25 bp, Homo sapien
tgtcacataaggacacttcccttct

SEQ ID NO: 5163751 - DNA, 25 bp, Homo sapien
gcggccctggtgacttgaagtgcgt

SEQ ID NO: 5163752 - DNA, 25 bp, Homo sapien
agcatgagggcggaaagatccccga

SEQ ID NO: 5163753 - DNA, 25 bp, Homo sapien
gggcccctggagcatgagggcggaa

SEQ ID NO: 5163754 - DNA, 25 bp, Homo sapien
gacttgtcctgcgatgtccctggta

SEQ ID NO: 5163755 - DNA, 25 bp, Homo sapien
ccctggtctcggtgcagacttgtcc

SEQ ID NO: 5163756 - DNA, 25 bp, Homo sapien
tgagcatgagggaacgctgaaatgc

SEQ ID NO: 5163757 - DNA, 25 bp, Homo sapien
ctgagcatgagggaacgctgaaatg

SEQ ID NO: 5163758 - DNA, 25 bp, Homo sapien
tcggtcgcttcttcgctgcagagcc

SEQ ID NO: 5163759 - DNA, 25 bp, Homo sapien
aatctgagctcggtcgcttcttcgc

SEQ ID NO: 5163760 - DNA, 25 bp, Homo sapien
taaagcaggggtaataatctgcggc

SEQ ID NO: 5163761 - DNA, 25 bp, Homo sapien
aaagccacagaatctgagctcggtc

SEQ ID NO: 5163762 - DNA, 25 bp, Homo sapien
ccagctgcccgtagctttcccaagg

SEQ ID NO: 5163763 - DNA, 25 bp, Homo sapien
gctgcccgtagctttcccaaggagt

SEQ ID NO: 5163764 - DNA, 25 bp, Homo sapien
cagctgcccgtagctttcccaagga

SEQ ID NO: 5163765 - DNA, 25 bp, Homo sapien
ctgcccgtagctttcccaaggagtc

SEQ ID NO: 5163766 - DNA, 25 bp, Homo sapien
gctgcaggccataggcttatctaca

SEQ ID NO: 5163767 - DNA, 25 bp, Homo sapien
ggccataggcttatctacagaaccg

SEQ ID NO: 5163768 - DNA, 25 bp, Homo sapien
ttatctacagaaccggctggaattt

SEQ ID NO: 5163769 - DNA, 25 bp, Homo sapien
tggggtccacgtggcaccaccctgg

SEQ ID NO: 5163770 - DNA, 25 bp, Homo sapien
gctgtgtgctctgctcggggctccc

SEQ ID NO: 5163771 - DNA, 25 bp, Homo sapien
tgtgtgctctgctcggggctcccca

SEQ ID NO: 5163772 - DNA, 25 bp, Homo sapien
ggctccccaggccaccgcagcccac

SEQ ID NO: 5163773 - DNA, 25 bp, Homo sapien
ggggctccccaggccaccgcagccc

SEQ ID NO: 5163774 - DNA, 25 bp, Homo sapien
agtgtgaccaccacagccaccaggc

SEQ ID NO: 5163775 - DNA, 25 bp, Homo sapien
ccacagtgtgaccaccacagccacc

SEQ ID NO: 5163776 - DNA, 25 bp, Homo sapien
gtgtgaccaccacagccaccaggcc

SEQ ID NO: 5163777 - DNA, 25 bp, Homo sapien
acagtgtgaccaccacagccaccag

SEQ ID NO: 5163778 - DNA, 25 bp, Homo sapien
tggccacagcgggttgcaccaggct

SEQ ID NO: 5163779 - DNA, 25 bp, Homo sapien
gcccagcgtaatggggtggcttgca

SEQ ID NO: 5163780 - DNA, 25 bp, Homo sapien
ccacagcgggttgcaccaggctggc

SEQ ID NO: 5163781 - DNA, 25 bp, Homo sapien
cagcgggttgcaccaggctggcctt

SEQ ID NO: 5163782 - DNA, 25 bp, Homo sapien
tcaggatccagatggtagggcttga

SEQ ID NO: 5163783 - DNA, 25 bp, Homo sapien
ctgtctgagtttaggcctggggccc

SEQ ID NO: 5163784 - DNA, 25 bp, Homo sapien
tccagggagtccaggcctagctcag

SEQ ID NO: 5163785 - DNA, 25 bp, Homo sapien
tccgtgtgtatcctctagggccgtc

SEQ ID NO: 5163786 - DNA, 25 bp, Homo sapien
cctttttagggcgcccctgtatgca

SEQ ID NO: 5163787 - DNA, 25 bp, Homo sapien
ccaggccgttgactgggatggccat

SEQ ID NO: 5163788 - DNA, 25 bp, Homo sapien
tgtggccaggccgttgactgggatg

SEQ ID NO: 5163789 - DNA, 25 bp, Homo sapien
cccctgtatgcacggccctgtgtgg

SEQ ID NO: 5163790 - DNA, 25 bp, Homo sapien
tggcggctgggaggtctatcagtgg

SEQ ID NO: 5163791 - DNA, 25 bp, Homo sapien
ctggcggctgggaggtctatcagtg

SEQ ID NO: 5163792 - DNA, 25 bp, Homo sapien
ggcggctgggaggtctatcagtgga

SEQ ID NO: 5163793 - DNA, 25 bp, Homo sapien
ggtgacaccaggagggctgacgctg

SEQ ID NO: 5163794 - DNA, 25 bp, Homo sapien
ctgggcctggaggagtgacgctgct

SEQ ID NO: 5163795 - DNA, 25 bp, Homo sapien
ccctgtcccatgcatgcctgcttct

SEQ ID NO: 5163796 - DNA, 25 bp, Homo sapien
tgctgcacagcccagggtgacacca

SEQ ID NO: 5163797 - DNA, 25 bp, Homo sapien
tgacctagatcccaagtgcgacagc

SEQ ID NO: 5163798 - DNA, 25 bp, Homo sapien
cccttggacacattttgctggcttt

SEQ ID NO: 5163799 - DNA, 25 bp, Homo sapien
cttcggcccccgttgtgacctagat

SEQ ID NO: 5163800 - DNA, 25 bp, Homo sapien
tagatcccaagtgcgacagcaggtg

SEQ ID NO: 5163801 - DNA, 25 bp, Homo sapien
ggttcttgtgattggcccaggccca

SEQ ID NO: 5163802 - DNA, 25 bp, Homo sapien
gtaatgcttggtgcccacaaatggg

SEQ ID NO: 5163803 - DNA, 25 bp, Homo sapien
ggccagatgccaaatagggcttggc

SEQ ID NO: 5163804 - DNA, 25 bp, Homo sapien
agggcttggcctcggtcctctgcag

SEQ ID NO: 5163805 - DNA, 25 bp, Homo sapien
tgccaagggctgacaggggtcaggg

SEQ ID NO: 5163806 - DNA, 25 bp, Homo sapien
ctgccaagggctgacaggggtcagg

SEQ ID NO: 5163807 - DNA, 25 bp, Homo sapien
ccacctcctaaagaggccgcagggt

SEQ ID NO: 5163808 - DNA, 25 bp, Homo sapien
cacctcctaaagaggccgcagggtt

SEQ ID NO: 5163809 - DNA, 25 bp, Homo sapien
acctcctaaagaggccgcagggttg

SEQ ID NO: 5163810 - DNA, 25 bp, Homo sapien
cctcctaaagaggccgcagggttgt

SEQ ID NO: 5163811 - DNA, 25 bp, Homo sapien
tcttatgaatttgtaagagttctat

SEQ ID NO: 5163812 - DNA, 25 bp, Homo sapien
taaaataacgggctgtcatggtaaa

SEQ ID NO: 5163813 - DNA, 25 bp, Homo sapien
tggtaattaaaataacgggctgtca

SEQ ID NO: 5163814 - DNA, 25 bp, Homo sapien
tctggtaagtctgactttcgaaaac

SEQ ID NO: 5163815 - DNA, 25 bp, Homo sapien
cagaggaaatgatcaagccatgaag

SEQ ID NO: 5163816 - DNA, 25 bp, Homo sapien
ggaacattactcagtgccagaggaa

SEQ ID NO: 5163817 - DNA, 25 bp, Homo sapien
tctaacagtagacacgtaccattgt

SEQ ID NO: 5163818 - DNA, 25 bp, Homo sapien
tgtggtgcatccagaaaagggaaca

SEQ ID NO: 5163819 - DNA, 25 bp, Homo sapien
gcagcgctcagcacgcttggtgtgg

SEQ ID NO: 5163820 - DNA, 25 bp, Homo sapien
agcgctcagcacgcttggtgtggct

SEQ ID NO: 5163821 - DNA, 25 bp, Homo sapien
cagcgctcagcacgcttggtgtggc

SEQ ID NO: 5163822 - DNA, 25 bp, Homo sapien
cgctcagcacgcttggtgtggctgt

SEQ ID NO: 5163823 - DNA, 25 bp, Homo sapien
gatcttacggtctggcttcgtgagg

SEQ ID NO: 5163824 - DNA, 25 bp, Homo sapien
gcccctgtagatcttacggtctggc

SEQ ID NO: 5163825 - DNA, 25 bp, Homo sapien
ctgtagatcttacggtctggcttcg

SEQ ID NO: 5163826 - DNA, 25 bp, Homo sapien
tggtgtctgagagcccctgtagatc

SEQ ID NO: 5163827 - DNA, 25 bp, Homo sapien
cttcccgttccatcctgtttctagt

SEQ ID NO: 5163828 - DNA, 25 bp, Homo sapien
tcccgttccatcctgtttctagtct

SEQ ID NO: 5163829 - DNA, 25 bp, Homo sapien
tttctagtcttctctggttccttct

SEQ ID NO: 5163830 - DNA, 25 bp, Homo sapien
tgtttctagtcttctctggttcctt

SEQ ID NO: 5163831 - DNA, 25 bp, Homo sapien
tttggcccttgactggaggggcagg

SEQ ID NO: 5163832 - DNA, 25 bp, Homo sapien
ttggcccttgactggaggggcaggt

SEQ ID NO: 5163833 - DNA, 25 bp, Homo sapien
tctgaagcgggagggtgctttggcc

SEQ ID NO: 5163834 - DNA, 25 bp, Homo sapien
ggctctgaagcgggagggtgctttg

SEQ ID NO: 5163835 - DNA, 25 bp, Homo sapien
cactgagttggtgtcacccagaact

SEQ ID NO: 5163836 - DNA, 25 bp, Homo sapien
gagtttggccaaccattgccctttg

SEQ ID NO: 5163837 - DNA, 25 bp, Homo sapien
accctgagagggagcgtcagcatct

SEQ ID NO: 5163838 - DNA, 25 bp, Homo sapien
tcagcatctggacatagctccagga

SEQ ID NO: 5163839 - DNA, 25 bp, Homo sapien
tttattagcagatggtacaaccttc

SEQ ID NO: 5163840 - DNA, 25 bp, Homo sapien
cctgatgcctcagcttgaacgtctg

SEQ ID NO: 5163841 - DNA, 25 bp, Homo sapien
ggcctttcctatgttccagcaataa

SEQ ID NO: 5163842 - DNA, 25 bp, Homo sapien
gcaacaagctaatgtaggcctttcc

SEQ ID NO: 5163843 - DNA, 25 bp, Homo sapien
gacgaagcacagttaatctcagaaa

SEQ ID NO: 5163844 - DNA, 25 bp, Homo sapien
acagcaagcagagcacacggacgaa

SEQ ID NO: 5163845 - DNA, 25 bp, Homo sapien
aggaaacagactgatacccagataa

SEQ ID NO: 5163846 - DNA, 25 bp, Homo sapien
tgccatgactgggacgcagagcaca

SEQ ID NO: 5163847 - DNA, 25 bp, Homo sapien
ttgaagaagaaggcgttggtccctg

SEQ ID NO: 5163848 - DNA, 25 bp, Homo sapien
tgaagaagaaggcgttggtccctga

SEQ ID NO: 5163849 - DNA, 25 bp, Homo sapien
gaagaaggcgttggtccctgaagcc

SEQ ID NO: 5163850 - DNA, 25 bp, Homo sapien
aagaagaaggcgttggtccctgaag

SEQ ID NO: 5163851 - DNA, 25 bp, Homo sapien
gatcaggctgaggacgacagtcact

SEQ ID NO: 5163852 - DNA, 25 bp, Homo sapien
gacggtattggtgcctggtacttcc

SEQ ID NO: 5163853 - DNA, 25 bp, Homo sapien
gaggcgcaaaccctcgcaagaggga

SEQ ID NO: 5163854 - DNA, 25 bp, Homo sapien
agctgttcgggatgttaaactcctg

SEQ ID NO: 5163855 - DNA, 25 bp, Homo sapien
ggtttccaggatgcttcaaggcaag

SEQ ID NO: 5163856 - DNA, 25 bp, Homo sapien
aggacagtgatcatcaagtgggtta

SEQ ID NO: 5163857 - DNA, 25 bp, Homo sapien
agcaagatcagcagggaattccgta

SEQ ID NO: 5163858 - DNA, 25 bp, Homo sapien
gatcagcagggaattccgtaacaag

SEQ ID NO: 5163859 - DNA, 25 bp, Homo sapien
gcagggaattccgtaacaagctttc

SEQ ID NO: 5163860 - DNA, 25 bp, Homo sapien
ggaattccgtaacaagctttcctgc

SEQ ID NO: 5163861 - DNA, 25 bp, Homo sapien
cctggaatagcaggaaagcccagtc

SEQ ID NO: 5163862 - DNA, 25 bp, Homo sapien
agcaggaaagcccagtcacggcttc

SEQ ID NO: 5163863 - DNA, 25 bp, Homo sapien
aatagcaggaaagcccagtcacggc

SEQ ID NO: 5163864 - DNA, 25 bp, Homo sapien
ggaatagcaggaaagcccagtcacg

SEQ ID NO: 5163865 - DNA, 25 bp, Homo sapien
cagcctgcccggagagcactcaaga

SEQ ID NO: 5163866 - DNA, 25 bp, Homo sapien
cttgtgggctttagggcccttctct

SEQ ID NO: 5163867 - DNA, 25 bp, Homo sapien
actcaagaatgaccaggaagctacc

SEQ ID NO: 5163868 - DNA, 25 bp, Homo sapien
gcccttctctaagcccagggatgtc

SEQ ID NO: 5163869 - DNA, 25 bp, Homo sapien
ctgttggggcccaggtagcctttgc

SEQ ID NO: 5163870 - DNA, 25 bp, Homo sapien
cctgttggggcccaggtagcctttg

SEQ ID NO: 5163871 - DNA, 25 bp, Homo sapien
tgttggggcccaggtagcctttgca

SEQ ID NO: 5163872 - DNA, 25 bp, Homo sapien
gttggggcccaggtagcctttgcag

SEQ ID NO: 5163873 - DNA, 25 bp, Homo sapien
tcgcagctgcatagggcggagaatt

SEQ ID NO: 5163874 - DNA, 25 bp, Homo sapien
tcatggggttcgcagctgcataggg

SEQ ID NO: 5163875 - DNA, 25 bp, Homo sapien
gggttcgcagctgcatagggcggag

SEQ ID NO: 5163876 - DNA, 25 bp, Homo sapien
ctgcatagggcggagaattgcagaa

SEQ ID NO: 5163877 - DNA, 25 bp, Homo sapien
aggtggtaaagcctgtctctcggtt

SEQ ID NO: 5163878 - DNA, 25 bp, Homo sapien
tattccgcgtgctagagatttatcc

SEQ ID NO: 5163879 - DNA, 25 bp, Homo sapien
ccgtggtcatctggattggagttct

SEQ ID NO: 5163880 - DNA, 25 bp, Homo sapien
taacagccgtgacatctctattccg

SEQ ID NO: 5163881 - DNA, 25 bp, Homo sapien
cttaaacgtgtttgagtgtcgctag

SEQ ID NO: 5163882 - DNA, 25 bp, Homo sapien
gtgtcgctaggttcccgctctgcat

SEQ ID NO: 5163883 - DNA, 25 bp, Homo sapien
tgcagaacaagtttccattcggcaa

SEQ ID NO: 5163884 - DNA, 25 bp, Homo sapien
tctttactttggtgactcaaacaga

SEQ ID NO: 5163885 - DNA, 25 bp, Homo sapien
ggatgctggcagcatttggagccat

SEQ ID NO: 5163886 - DNA, 25 bp, Homo sapien
ttctgcctcttccatggagtgtggg

SEQ ID NO: 5163887 - DNA, 25 bp, Homo sapien
tcagcagcatttgctggatgctggc

SEQ ID NO: 5163888 - DNA, 25 bp, Homo sapien
actctctgctcttttgtcagcagca

SEQ ID NO: 5163889 - DNA, 25 bp, Homo sapien
catgtcccgggtaatctgtttggga

SEQ ID NO: 5163890 - DNA, 25 bp, Homo sapien
tctccatgtcccgggtaatctgttt

SEQ ID NO: 5163891 - DNA, 25 bp, Homo sapien
tccatgtcccgggtaatctgtttgg

SEQ ID NO: 5163892 - DNA, 25 bp, Homo sapien
tgtcccgggtaatctgtttgggatc

SEQ ID NO: 5163893 - DNA, 25 bp, Homo sapien
tccgcttgctgagcattctcgacag

SEQ ID NO: 5163894 - DNA, 25 bp, Homo sapien
cacttccgcttgctgagcattctcg

SEQ ID NO: 5163895 - DNA, 25 bp, Homo sapien
cgcttgctgagcattctcgacagca

SEQ ID NO: 5163896 - DNA, 25 bp, Homo sapien
aggagcacgcggcacatctggcaaa

SEQ ID NO: 5163897 - DNA, 25 bp, Homo sapien
aggaggtgggccggggaagagccag

SEQ ID NO: 5163898 - DNA, 25 bp, Homo sapien
agacttgaggaggaggtgggccggg

SEQ ID NO: 5163899 - DNA, 25 bp, Homo sapien
gtgcaagacttgaggaggaggtggg

SEQ ID NO: 5163900 - DNA, 25 bp, Homo sapien
tgaggaggaggtgggccggggaaga

SEQ ID NO: 5163901 - DNA, 25 bp, Homo sapien
atcatcaccgtgaccttgccgggca

SEQ ID NO: 5163902 - DNA, 25 bp, Homo sapien
gaaacatcatcaccgtgaccttgcc

SEQ ID NO: 5163903 - DNA, 25 bp, Homo sapien
catgcttatgttggtccttgtcctc

SEQ ID NO: 5163904 - DNA, 25 bp, Homo sapien
ttgccgggcaagttcaggattatat

SEQ ID NO: 5163905 - DNA, 25 bp, Homo sapien
tggtgtcaccatcatcagtattgtt

SEQ ID NO: 5163906 - DNA, 25 bp, Homo sapien
tccatctgatctgttggtgtcacca

SEQ ID NO: 5163907 - DNA, 25 bp, Homo sapien
gatctgttggtgtcaccatcatcag

SEQ ID NO: 5163908 - DNA, 25 bp, Homo sapien
ggtgtcaccatcatcagtattgtta

SEQ ID NO: 5163909 - DNA, 25 bp, Homo sapien
tccaagtggaggtaccaatggtggg

SEQ ID NO: 5163910 - DNA, 25 bp, Homo sapien
gtccaagtggaggtaccaatggtgg

SEQ ID NO: 5163911 - DNA, 25 bp, Homo sapien
ggtccaagtggaggtaccaatggtg

SEQ ID NO: 5163912 - DNA, 25 bp, Homo sapien
tcaagttgggcggtgcattgaaaac

SEQ ID NO: 5163913 - DNA, 25 bp, Homo sapien
tgggcggtgcattgaaaaccccagg

SEQ ID NO: 5163914 - DNA, 25 bp, Homo sapien
aatcatatcatctgccttgggccac

SEQ ID NO: 5163915 - DNA, 25 bp, Homo sapien
ctgaatcaagttgggcggtgcattg

SEQ ID NO: 5163916 - DNA, 25 bp, Homo sapien
taatctctgccttgggattagtgat

SEQ ID NO: 5163917 - DNA, 25 bp, Homo sapien
aagtaatctctgccttgggattagt

SEQ ID NO: 5163918 - DNA, 25 bp, Homo sapien
gccttgggattagtgatctgtggct

SEQ ID NO: 5163919 - DNA, 25 bp, Homo sapien
ggattagtgatctgtggcttggcac

SEQ ID NO: 5163920 - DNA, 25 bp, Homo sapien
ccagatttgggtgctgctttggcaa

SEQ ID NO: 5163921 - DNA, 25 bp, Homo sapien
accagatttgggtgctgctttggca

SEQ ID NO: 5163922 - DNA, 25 bp, Homo sapien
cagatttgggtgctgctttggcaag

SEQ ID NO: 5163923 - DNA, 25 bp, Homo sapien
gatgcttaggcagggtacttcgttc

SEQ ID NO: 5163924 - DNA, 25 bp, Homo sapien
agcaaggcgcccagcaaacatgtac

SEQ ID NO: 5163925 - DNA, 25 bp, Homo sapien
tacttcgttcaagaccggcgcttgg

SEQ ID NO: 5163926 - DNA, 25 bp, Homo sapien
tggagtaccactcatcgcggagcaa

SEQ ID NO: 5163927 - DNA, 25 bp, Homo sapien
aggagcagtggttggagttcccaga

SEQ ID NO: 5163928 - DNA, 25 bp, Homo sapien
gaacattatgagaattggagggaag

SEQ ID NO: 5163929 - DNA, 25 bp, Homo sapien
tgtgcacatcgtctgtactctggat

SEQ ID NO: 5163930 - DNA, 25 bp, Homo sapien
ggactcagatccttacttctaggaa

SEQ ID NO: 5163931 - DNA, 25 bp, Homo sapien
catgctggcctagaggacaagatgc

SEQ ID NO: 5163932 - DNA, 25 bp, Homo sapien
tgacacttcagacctctcatgctgg

SEQ ID NO: 5163933 - DNA, 25 bp, Homo sapien
gacaagatgcttgggttttgagccc

SEQ ID NO: 5163934 - DNA, 25 bp, Homo sapien
ctttatgcattggtgagagttccca

SEQ ID NO: 5163935 - DNA, 25 bp, Homo sapien
gttgaggtttacgtgcatgaaggcc

SEQ ID NO: 5163936 - DNA, 25 bp, Homo sapien
tatcactgggcaaggtcagactggg

SEQ ID NO: 5163937 - DNA, 25 bp, Homo sapien
catgaaggcctgcaataattagcac

SEQ ID NO: 5163938 - DNA, 25 bp, Homo sapien
cagatacagtgtggtacgtgcaaca

SEQ ID NO: 5163939 - DNA, 25 bp, Homo sapien
ggccaaattcttgcaatacacccta

SEQ ID NO: 5163940 - DNA, 25 bp, Homo sapien
gaagagaggactagttgaaacattt

SEQ ID NO: 5163941 - DNA, 25 bp, Homo sapien
tacagtgtctaaggataagaatact

SEQ ID NO: 5163942 - DNA, 25 bp, Homo sapien
gcttatgggcaatatgaagtgggcc

SEQ ID NO: 5163943 - DNA, 25 bp, Homo sapien
cacaagttcatttggccttagactg

SEQ ID NO: 5163944 - DNA, 25 bp, Homo sapien
taagatcaggacagttccttgagat

SEQ ID NO: 5163945 - DNA, 25 bp, Homo sapien
cagtgttatttatactaagatcagg

SEQ ID NO: 5163946 - DNA, 25 bp, Homo sapien
ccttagactgtgtattggtccttaa

SEQ ID NO: 5163947 - DNA, 25 bp, Homo sapien
gaaagcagcctcaaagaattacccc

SEQ ID NO: 5163948 - DNA, 25 bp, Homo sapien
cacaattggagggatactagtaaca

SEQ ID NO: 5163949 - DNA, 25 bp, Homo sapien
gatgatttcactaggcatttggcaa

SEQ ID NO: 5163950 - DNA, 25 bp, Homo sapien
tgccaaaagtggagcgaggatgatt

SEQ ID NO: 5163951 - DNA, 25 bp, Homo sapien
tgtgagcagtagaagagaccacatt

SEQ ID NO: 5163952 - DNA, 25 bp, Homo sapien
cactataatagatccacgttactgg

SEQ ID NO: 5163953 - DNA, 25 bp, Homo sapien
taaaccttgagggatagctttctgc

SEQ ID NO: 5163954 - DNA, 25 bp, Homo sapien
cctttttgctcagtaggagtcttga

SEQ ID NO: 5163955 - DNA, 25 bp, Homo sapien
gatgtggttcagagagataaagcac

SEQ ID NO: 5163956 - DNA, 25 bp, Homo sapien
catttggaatacctaaagattgtag

SEQ ID NO: 5163957 - DNA, 25 bp, Homo sapien
actgacacatcagtgacgatgggaa

SEQ ID NO: 5163958 - DNA, 25 bp, Homo sapien
agagtcattccctctatcactgaca

SEQ ID NO: 5163959 - DNA, 25 bp, Homo sapien
tagacccgtgaagtcataatgaaac

SEQ ID NO: 5163960 - DNA, 25 bp, Homo sapien
gattatattgctagggaaccaactc

SEQ ID NO: 5163961 - DNA, 25 bp, Homo sapien
ttcaagaactagttgctcttctgcc

SEQ ID NO: 5163962 - DNA, 25 bp, Homo sapien
tgttttacaaactagaccactgaag

SEQ ID NO: 5163963 - DNA, 25 bp, Homo sapien
catccttgcacaggggccgtgctaa

SEQ ID NO: 5163964 - DNA, 25 bp, Homo sapien
atatggaatgctttacaaatttgcg

SEQ ID NO: 5163965 - DNA, 25 bp, Homo sapien
tcttctctgtatcgttctaatttta

SEQ ID NO: 5163966 - DNA, 25 bp, Homo sapien
tggaatgctttacaaatttgcgtgt

SEQ ID NO: 5163967 - DNA, 25 bp, Homo sapien
ctgggacttgttcatgactcttagt

SEQ ID NO: 5163968 - DNA, 25 bp, Homo sapien
caggcaggatcacattaggtctgta

SEQ ID NO: 5163969 - DNA, 25 bp, Homo sapien
gtaggcaagtgcctaagctgctgca

SEQ ID NO: 5163970 - DNA, 25 bp, Homo sapien
caaaagtagcagtatcttggagaag

SEQ ID NO: 5163971 - DNA, 25 bp, Homo sapien
cttaaagaaggtcacatcaaatgct

SEQ ID NO: 5163972 - DNA, 25 bp, Homo sapien
cttcttaaagaaggtcacatcaaat

SEQ ID NO: 5163973 - DNA, 25 bp, Homo sapien
tcttaaagaaggtcacatcaaatgc

SEQ ID NO: 5163974 - DNA, 25 bp, Homo sapien
atgcttttattccagttgagatcat

SEQ ID NO: 5163975 - DNA, 25 bp, Homo sapien
cacagttataattattgcgttatgc

SEQ ID NO: 5163976 - DNA, 25 bp, Homo sapien
ttgtatacccagcaacacagttata

SEQ ID NO: 5163977 - DNA, 25 bp, Homo sapien
actgcacttggtcataaacaccttt

SEQ ID NO: 5163978 - DNA, 25 bp, Homo sapien
ttccctttcctgtgtgctgttaata

SEQ ID NO: 5163979 - DNA, 25 bp, Homo sapien
cgcgccctgcctaaatttgaatttt

SEQ ID NO: 5163980 - DNA, 25 bp, Homo sapien
catttacggtctggcaaacaaagga

SEQ ID NO: 5163981 - DNA, 25 bp, Homo sapien
tatgtaaccaatgacgacagatttg

SEQ ID NO: 5163982 - DNA, 25 bp, Homo sapien
cttgcaattaggatatatgtaacca

SEQ ID NO: 5163983 - DNA, 25 bp, Homo sapien
ttaaggctggattgggtacgttcta

SEQ ID NO: 5163984 - DNA, 25 bp, Homo sapien
taaggctggattgggtacgttctat

SEQ ID NO: 5163985 - DNA, 25 bp, Homo sapien
ggattgggtacgttctatggcctgt

SEQ ID NO: 5163986 - DNA, 25 bp, Homo sapien
gctggattgggtacgttctatggcc

SEQ ID NO: 5163987 - DNA, 25 bp, Homo sapien
gatgtgtagttttttagatctccat

SEQ ID NO: 5163988 - DNA, 25 bp, Homo sapien
ccagctgtgtaccagagtggagatg

SEQ ID NO: 5163989 - DNA, 25 bp, Homo sapien
gcctggctctagaatacgtgctcct

SEQ ID NO: 5163990 - DNA, 25 bp, Homo sapien
gatggtatttccagaaggccttgaa

SEQ ID NO: 5163991 - DNA, 25 bp, Homo sapien
tgaagcacagggacaataagcaact

SEQ ID NO: 5163992 - DNA, 25 bp, Homo sapien
acccggccggctgcgaggattcacg

SEQ ID NO: 5163993 - DNA, 25 bp, Homo sapien
aaaacaacgaccaggacgctcggcg

SEQ ID NO: 5163994 - DNA, 25 bp, Homo sapien
ttgcagcggctagaagtgccgagga

SEQ ID NO: 5163995 - DNA, 25 bp, Homo sapien
cttcatgtgaaagagggacgggcct

SEQ ID NO: 5163996 - DNA, 25 bp, Homo sapien
cttttcacgggatctactcggatgt

SEQ ID NO: 5163997 - DNA, 25 bp, Homo sapien
acgggatctactcggatgtctggga

SEQ ID NO: 5163998 - DNA, 25 bp, Homo sapien
ttttcacgggatctactcggatgtc

SEQ ID NO: 5163999 - DNA, 25 bp, Homo sapien
ttcacgggatctactcggatgtctg

SEQ ID NO: 5164000 - DNA, 25 bp, Homo sapien
aaacgtcgggatgcaggttagtcac

SEQ ID NO: 5164001 - DNA, 25 bp, Homo sapien
ataacacttagccagtctccaaggg

SEQ ID NO: 5164002 - DNA, 25 bp, Homo sapien
ggagggcctcaccactagtctgatt

SEQ ID NO: 5164003 - DNA, 25 bp, Homo sapien
ttaagaggcagacggcttttctcct

SEQ ID NO: 5164004 - DNA, 25 bp, Homo sapien
ggaaatgtggtctggaatatgcatg

SEQ ID NO: 5164005 - DNA, 25 bp, Homo sapien
tctggttcgggtgagtcccattccc

SEQ ID NO: 5164006 - DNA, 25 bp, Homo sapien
aatatgcatgaaaggggtggatcca

SEQ ID NO: 5164007 - DNA, 25 bp, Homo sapien
tccagaatgtacgaagaaaccaaga

SEQ ID NO: 5164008 - DNA, 25 bp, Homo sapien
ctctgttaatgggtctgtaataaaa

SEQ ID NO: 5164009 - DNA, 25 bp, Homo sapien
ccttgttcctgtgactttgacacct

SEQ ID NO: 5164010 - DNA, 25 bp, Homo sapien
tgtgactttgacacctctgttaatg

SEQ ID NO: 5164011 - DNA, 25 bp, Homo sapien
gacacctctgttaatgggtctgtaa

SEQ ID NO: 5164012 - DNA, 25 bp, Homo sapien
gacccagtaactgtggagaacaata

SEQ ID NO: 5164013 - DNA, 25 bp, Homo sapien
aatgcctgctatgtggtgacccagt

SEQ ID NO: 5164014 - DNA, 25 bp, Homo sapien
taaatactatcctccggcgttctga

SEQ ID NO: 5164015 - DNA, 25 bp, Homo sapien
gaccctcctttctgtggcatacagg

SEQ ID NO: 5164016 - DNA, 25 bp, Homo sapien
gatatctaccgctttgaacatttat

SEQ ID NO: 5164017 - DNA, 25 bp, Homo sapien
ggatatctaccgctttgaacattta

SEQ ID NO: 5164018 - DNA, 25 bp, Homo sapien
tatttaggatatctaccgctttgaa

SEQ ID NO: 5164019 - DNA, 25 bp, Homo sapien
ttaggatatctaccgctttgaacat

SEQ ID NO: 5164020 - DNA, 25 bp, Homo sapien
ctgcaacatggaccccctggatggt

SEQ ID NO: 5164021 - DNA, 25 bp, Homo sapien
gagggcttggatgaaggaagcctgt

SEQ ID NO: 5164022 - DNA, 25 bp, Homo sapien
aagcctgtggtgtcaaggatggcaa

SEQ ID NO: 5164023 - DNA, 25 bp, Homo sapien
ggatggtgcactgagagggcttagc

SEQ ID NO: 5164024 - DNA, 25 bp, Homo sapien
ctacatcgcactgggtcgaggcata

SEQ ID NO: 5164025 - DNA, 25 bp, Homo sapien
gctctctgaaactgagcagccttgg

SEQ ID NO: 5164026 - DNA, 25 bp, Homo sapien
ctctctgaaactgagcagccttggc

SEQ ID NO: 5164027 - DNA, 25 bp, Homo sapien
agctggcagccggcgtgtgaggcca

SEQ ID NO: 5164028 - DNA, 25 bp, Homo sapien
gcagccggcgtgtgaggccacaggg

SEQ ID NO: 5164029 - DNA, 25 bp, Homo sapien
tacggactcagcaaaatcaggctgc

SEQ ID NO: 5164030 - DNA, 25 bp, Homo sapien
tgctgagcactacacgcagagaggt

SEQ ID NO: 5164031 - DNA, 25 bp, Homo sapien
tgaaaagaaccacgccttccgatgg

SEQ ID NO: 5164032 - DNA, 25 bp, Homo sapien
cacaatcttgggagcaggatgcctt

SEQ ID NO: 5164033 - DNA, 25 bp, Homo sapien
gcagaacgccttgccagcttgcttc

SEQ ID NO: 5164034 - DNA, 25 bp, Homo sapien
ttcgctgcagaacgccttgccagct

SEQ ID NO: 5164035 - DNA, 25 bp, Homo sapien
gctgcagaacgccttgccagcttgc

SEQ ID NO: 5164036 - DNA, 25 bp, Homo sapien
cttcgctgcagaacgccttgccagc

SEQ ID NO: 5164037 - DNA, 25 bp, Homo sapien
gtcctgtagactgtcccctccgaca

SEQ ID NO: 5164038 - DNA, 25 bp, Homo sapien
gtggggccatctcatcagcaggcag

SEQ ID NO: 5164039 - DNA, 25 bp, Homo sapien
gtagactgtcccctccgacattgtc

SEQ ID NO: 5164040 - DNA, 25 bp, Homo sapien
tcccctccgacattgtccacagcac

SEQ ID NO: 5164041 - DNA, 25 bp, Homo sapien
aggggcgggtcgtggagatactgca

SEQ ID NO: 5164042 - DNA, 25 bp, Homo sapien
tgcaagttcgccgtcctgccgccat

SEQ ID NO: 5164043 - DNA, 25 bp, Homo sapien
agatactgcaagttcgccgtcctgc

SEQ ID NO: 5164044 - DNA, 25 bp, Homo sapien
ggggcgggtcgtggagatactgcaa

SEQ ID NO: 5164045 - DNA, 25 bp, Homo sapien
cattcttgccgactccctctgaggc

SEQ ID NO: 5164046 - DNA, 25 bp, Homo sapien
tccctctgaggccacttctgagatt

SEQ ID NO: 5164047 - DNA, 25 bp, Homo sapien
ctgggctccaaactgtctgttggaa

SEQ ID NO: 5164048 - DNA, 25 bp, Homo sapien
gagatttgttcaaatccgacacccc

SEQ ID NO: 5164049 - DNA, 25 bp, Homo sapien
gctggtgtgccggaaattccccagg

SEQ ID NO: 5164050 - DNA, 25 bp, Homo sapien
aggagctggtgtgccggaaattccc

SEQ ID NO: 5164051 - DNA, 25 bp, Homo sapien
tggtgtgccggaaattccccaggtg

SEQ ID NO: 5164052 - DNA, 25 bp, Homo sapien
gagctggtgtgccggaaattcccca

SEQ ID NO: 5164053 - DNA, 25 bp, Homo sapien
agagatggtggaagctgtgaaggcc

SEQ ID NO: 5164054 - DNA, 25 bp, Homo sapien
cttgtagaggccacaagggtcccgg

SEQ ID NO: 5164055 - DNA, 25 bp, Homo sapien
gagagatggtggaagctgtgaaggc

SEQ ID NO: 5164056 - DNA, 25 bp, Homo sapien
ttctgccagtacaccacgtgcagcc

SEQ ID NO: 5164057 - DNA, 25 bp, Homo sapien
cttctgccagtacaccacgtgcagc

SEQ ID NO: 5164058 - DNA, 25 bp, Homo sapien
tcttctgccagtacaccacgtgcag

SEQ ID NO: 5164059 - DNA, 25 bp, Homo sapien
ggagggggagctcaccttggtggag

SEQ ID NO: 5164060 - DNA, 25 bp, Homo sapien
gaagtcacagatctcctctatgcac

SEQ ID NO: 5164061 - DNA, 25 bp, Homo sapien
acgtttgcggatccgcagcacctgg

SEQ ID NO: 5164062 - DNA, 25 bp, Homo sapien
atgcactcccgctccaggctgctgt

SEQ ID NO: 5164063 - DNA, 25 bp, Homo sapien
gcacctggtgggcacgctcgctgct

SEQ ID NO: 5164064 - DNA, 25 bp, Homo sapien
tcatcctctggacccatggtggcct

SEQ ID NO: 5164065 - DNA, 25 bp, Homo sapien
gcctcatcctctggacccatggtgg

SEQ ID NO: 5164066 - DNA, 25 bp, Homo sapien
tgctggttaccagctcgcccctgag

SEQ ID NO: 5164067 - DNA, 25 bp, Homo sapien
tcgaggcccctgctggttaccagct

SEQ ID NO: 5164068 - DNA, 25 bp, Homo sapien
cgacgtgcttggaccagaaggccag

SEQ ID NO: 5164069 - DNA, 25 bp, Homo sapien
acaggctggcgcacgggtgctccaa

SEQ ID NO: 5164070 - DNA, 25 bp, Homo sapien
gaagctgccgatgccgtcgatgcac

SEQ ID NO: 5164071 - DNA, 25 bp, Homo sapien
gtcgatgcacgtgccgtgcccgcag

SEQ ID NO: 5164072 - DNA, 25 bp, Homo sapien
cagccgctgcggcagtcgcagctga

SEQ ID NO: 5164073 - DNA, 25 bp, Homo sapien
cagtaatgcgtgcagccgccgttgt

SEQ ID NO: 5164074 - DNA, 25 bp, Homo sapien
ggtcgtcccccagcttgtagccagg

SEQ ID NO: 5164075 - DNA, 25 bp, Homo sapien
ccgccgttgtccagcgagcaattga

SEQ ID NO: 5164076 - DNA, 25 bp, Homo sapien
ccacctcctctaggcagtaatgcgt

SEQ ID NO: 5164077 - DNA, 25 bp, Homo sapien
tgtgtctcgtttcaggtgactgcgc

SEQ ID NO: 5164078 - DNA, 25 bp, Homo sapien
ggtcttctgtgtctcgtttcaggtg

SEQ ID NO: 5164079 - DNA, 25 bp, Homo sapien
tctcgtttcaggtgactgcgcttct

SEQ ID NO: 5164080 - DNA, 25 bp, Homo sapien
cttctgtgtctcgtttcaggtgact

SEQ ID NO: 5164081 - DNA, 25 bp, Homo sapien
tgtctccccgcctggtcatcttccc

SEQ ID NO: 5164082 - DNA, 25 bp, Homo sapien
ctgtctccccgcctggtcatcttcc

SEQ ID NO: 5164083 - DNA, 25 bp, Homo sapien
gctgtctccccgcctggtcatcttc

SEQ ID NO: 5164084 - DNA, 25 bp, Homo sapien
caagcctgacaaggagcttcttgga

SEQ ID NO: 5164085 - DNA, 25 bp, Homo sapien
catccatgcagtgggccgctgtcag

SEQ ID NO: 5164086 - DNA, 25 bp, Homo sapien
tcttggactcatccatgcagtgggc

SEQ ID NO: 5164087 - DNA, 25 bp, Homo sapien
ccgcaggccagcttcttctttgagt

SEQ ID NO: 5164088 - DNA, 25 bp, Homo sapien
tcattgtgcgggaccacgggaatct

SEQ ID NO: 5164089 - DNA, 25 bp, Homo sapien
cagatgggcactatggtctgcgaga

SEQ ID NO: 5164090 - DNA, 25 bp, Homo sapien
gctgactttggtgtaaacgccgtag

SEQ ID NO: 5164091 - DNA, 25 bp, Homo sapien
gacgaagacctccttgatgtccagg

SEQ ID NO: 5164092 - DNA, 25 bp, Homo sapien
tccttgtctctgatgtgcccatgga

SEQ ID NO: 5164093 - DNA, 25 bp, Homo sapien
ccttgtctctgatgtgcccatggat

SEQ ID NO: 5164094 - DNA, 25 bp, Homo sapien
tctggggggcttccttgtctctgat

SEQ ID NO: 5164095 - DNA, 25 bp, Homo sapien
tacatgtccctttaatgtcccatcc

SEQ ID NO: 5164096 - DNA, 25 bp, Homo sapien
tgtccctttaatgtcccatccattg

SEQ ID NO: 5164097 - DNA, 25 bp, Homo sapien
aatgtcccatccattgccatgcaaa

SEQ ID NO: 5164098 - DNA, 25 bp, Homo sapien
cctttaatgtcccatccattgccat

SEQ ID NO: 5164099 - DNA, 25 bp, Homo sapien
tagaccccgcaaaacttggatctgc

SEQ ID NO: 5164100 - DNA, 25 bp, Homo sapien
cccacagagttgctctaggagttaa

SEQ ID NO: 5164101 - DNA, 25 bp, Homo sapien
tccagaagagcccaaaagagggatg

SEQ ID NO: 5164102 - DNA, 25 bp, Homo sapien
tgtgacatacaacaggtgctcagta

SEQ ID NO: 5164103 - DNA, 25 bp, Homo sapien
cagcttgccctggtccttttggcct

SEQ ID NO: 5164104 - DNA, 25 bp, Homo sapien
ttggccttgtttagttagcagtttc

SEQ ID NO: 5164105 - DNA, 25 bp, Homo sapien
tctgtccttcccataactcgtcccc

SEQ ID NO: 5164106 - DNA, 25 bp, Homo sapien
aacccccaggcctcggctccagcag

SEQ ID NO: 5164107 - DNA, 25 bp, Homo sapien
tgaacagagcctggtttaagagcct

SEQ ID NO: 5164108 - DNA, 25 bp, Homo sapien
gacttttcccgtgatgactactttg

SEQ ID NO: 5164109 - DNA, 25 bp, Homo sapien
ctagaaagattatggtgtgctcccc

SEQ ID NO: 5164110 - DNA, 25 bp, Homo sapien
taaagggcctagaacagtttcctgc

SEQ ID NO: 5164111 - DNA, 25 bp, Homo sapien
ggactgattataactaaaactgcag

SEQ ID NO: 5164112 - DNA, 25 bp, Homo sapien
tatggactgattataactaaaactg

SEQ ID NO: 5164113 - DNA, 25 bp, Homo sapien
ttgaaacctgatatggactgattat

SEQ ID NO: 5164114 - DNA, 25 bp, Homo sapien
cctgatatggactgattataactaa

SEQ ID NO: 5164115 - DNA, 25 bp, Homo sapien
tgtggtcaccggcaaagcagatggt

SEQ ID NO: 5164116 - DNA, 25 bp, Homo sapien
gattgattgccacttatcactgtca

SEQ ID NO: 5164117 - DNA, 25 bp, Homo sapien
caaagcagatggtggattgattgcc

SEQ ID NO: 5164118 - DNA, 25 bp, Homo sapien
tgctgtggtcaccggcaaagcagat

SEQ ID NO: 5164119 - DNA, 25 bp, Homo sapien
ccagaacactctagacagccagcca

SEQ ID NO: 5164120 - DNA, 25 bp, Homo sapien
ttccattccatactggggcagccag

SEQ ID NO: 5164121 - DNA, 25 bp, Homo sapien
attgtgcaggatgcttttgcaggga

SEQ ID NO: 5164122 - DNA, 25 bp, Homo sapien
tccctccccgccagaacactctaga

SEQ ID NO: 5164123 - DNA, 25 bp, Homo sapien
cctgaagaggactttgtcggaagct

SEQ ID NO: 5164124 - DNA, 25 bp, Homo sapien
tgtagaattcatgggcagcactctg

SEQ ID NO: 5164125 - DNA, 25 bp, Homo sapien
ttctaagtttccagtaagtccaggc

SEQ ID NO: 5164126 - DNA, 25 bp, Homo sapien
agtattagtatcattgcccctgaag

SEQ ID NO: 5164127 - DNA, 25 bp, Homo sapien
gcccgagcttgcagcctccggagca

SEQ ID NO: 5164128 - DNA, 25 bp, Homo sapien
agcccgagcttgcagcctccggagc

SEQ ID NO: 5164129 - DNA, 25 bp, Homo sapien
cccgagcttgcagcctccggagcag

SEQ ID NO: 5164130 - DNA, 25 bp, Homo sapien
aaagtaatgtgcttcttgtaactca

SEQ ID NO: 5164131 - DNA, 25 bp, Homo sapien
tgcttcttgtaactcatgaagatgc

SEQ ID NO: 5164132 - DNA, 25 bp, Homo sapien
aatgtgcttcttgtaactcatgaag

SEQ ID NO: 5164133 - DNA, 25 bp, Homo sapien
gcttcttgtaactcatgaagatgca

SEQ ID NO: 5164134 - DNA, 25 bp, Homo sapien
ccgttctagatcagtacagtcccag

SEQ ID NO: 5164135 - DNA, 25 bp, Homo sapien
gtcctcccgttctagatcagtacag

SEQ ID NO: 5164136 - DNA, 25 bp, Homo sapien
ccttgtcctcccgttctagatcagt

SEQ ID NO: 5164137 - DNA, 25 bp, Homo sapien
tgtccttgtcctcccgttctagatc

SEQ ID NO: 5164138 - DNA, 25 bp, Homo sapien
aacaaagtgtccaggcaacacccag

SEQ ID NO: 5164139 - DNA, 25 bp, Homo sapien
aagcttgccgtcagtaaggttcctg

SEQ ID NO: 5164140 - DNA, 25 bp, Homo sapien
ttcagaatggaagccagcacaaagc

SEQ ID NO: 5164141 - DNA, 25 bp, Homo sapien
aggagcctccacttcagaatggaag

SEQ ID NO: 5164142 - DNA, 25 bp, Homo sapien
tgatgaactaccactggaaacgagt

SEQ ID NO: 5164143 - DNA, 25 bp, Homo sapien
gaaacgagtacagacccattttggc

SEQ ID NO: 5164144 - DNA, 25 bp, Homo sapien
gaactaccactggaaacgagtacag

SEQ ID NO: 5164145 - DNA, 25 bp, Homo sapien
cactggaaacgagtacagacccatt

SEQ ID NO: 5164146 - DNA, 25 bp, Homo sapien
gctctcctggaagtcaatcaatgta

SEQ ID NO: 5164147 - DNA, 25 bp, Homo sapien
tcagtgagcactggtgtttcgaagg

SEQ ID NO: 5164148 - DNA, 25 bp, Homo sapien
gagcagcaattccaagctggcctct

SEQ ID NO: 5164149 - DNA, 25 bp, Homo sapien
gtagtcatgagcagcaattccaagc

SEQ ID NO: 5164150 - DNA, 25 bp, Homo sapien
gcaataatcactccttgagtaaacc

SEQ ID NO: 5164151 - DNA, 25 bp, Homo sapien
cactccttgagtaaacctcattggc

SEQ ID NO: 5164152 - DNA, 25 bp, Homo sapien
atcactccttgagtaaacctcattg

SEQ ID NO: 5164153 - DNA, 25 bp, Homo sapien
taatcactccttgagtaaacctcat

SEQ ID NO: 5164154 - DNA, 25 bp, Homo sapien
cccatggaatggtcttgcaagtctt

SEQ ID NO: 5164155 - DNA, 25 bp, Homo sapien
tgtgtctgtccccactgaagtcagg

SEQ ID NO: 5164156 - DNA, 25 bp, Homo sapien
aagtcaggacgtgtgagtcttccaa

SEQ ID NO: 5164157 - DNA, 25 bp, Homo sapien
tagaggtgctctgggtagtattgac

SEQ ID NO: 5164158 - DNA, 25 bp, Homo sapien
tgtaaatggttcagcgtgtatcaga

SEQ ID NO: 5164159 - DNA, 25 bp, Homo sapien
aaatgccattgtgaccttgcctgga

SEQ ID NO: 5164160 - DNA, 25 bp, Homo sapien
gaaatgcgcaatggactctttggag

SEQ ID NO: 5164161 - DNA, 25 bp, Homo sapien
tatcagatgttgtcataggactcac

SEQ ID NO: 5164162 - DNA, 25 bp, Homo sapien
tccccgctgagagtccgcctgccat

SEQ ID NO: 5164163 - DNA, 25 bp, Homo sapien
gggcgcggacactccccgctgagag

SEQ ID NO: 5164164 - DNA, 25 bp, Homo sapien
ggcgcggacactccccgctgagagt

SEQ ID NO: 5164165 - DNA, 25 bp, Homo sapien
ggacactccccgctgagagtccgcc

SEQ ID NO: 5164166 - DNA, 25 bp, Homo sapien
agctcgcgggcgtcatactacaagt

SEQ ID NO: 5164167 - DNA, 25 bp, Homo sapien
tgtggatcgcgccagttagtaacgc

SEQ ID NO: 5164168 - DNA, 25 bp, Homo sapien
ttagtaacgcatcacagctcgcggg

SEQ ID NO: 5164169 - DNA, 25 bp, Homo sapien
tatctgagtcacatggagacgggtg

SEQ ID NO: 5164170 - DNA, 25 bp, Homo sapien
ctatcaagtgattcggtttcgggca

SEQ ID NO: 5164171 - DNA, 25 bp, Homo sapien
gcctgagaagatgtcattcccacag

SEQ ID NO: 5164172 - DNA, 25 bp, Homo sapien
caccacttcggaaaggaatatccat

SEQ ID NO: 5164173 - DNA, 25 bp, Homo sapien
gaatatccatgaactctcttgcagg

SEQ ID NO: 5164174 - DNA, 25 bp, Homo sapien
gacataaatggtactgttatcccca

SEQ ID NO: 5164175 - DNA, 25 bp, Homo sapien
gagacctggattctctgacgtagaa

SEQ ID NO: 5164176 - DNA, 25 bp, Homo sapien
cctggtagggcttgctagtggctca

SEQ ID NO: 5164177 - DNA, 25 bp, Homo sapien
tagtggctcaagcacaagaagctgg

SEQ ID NO: 5164178 - DNA, 25 bp, Homo sapien
ttatttgagtgtgcggatagccacc

SEQ ID NO: 5164179 - DNA, 25 bp, Homo sapien
aggttttacttatacagagacagac

SEQ ID NO: 5164180 - DNA, 25 bp, Homo sapien
agacctcaactccaaacgaatgggt

SEQ ID NO: 5164181 - DNA, 25 bp, Homo sapien
gggttttatctctggcaccacttag

SEQ ID NO: 5164182 - DNA, 25 bp, Homo sapien
ctgggcaccctgaaagagccaggaa

SEQ ID NO: 5164183 - DNA, 25 bp, Homo sapien
atgggggtctggctgactccccttc

SEQ ID NO: 5164184 - DNA, 25 bp, Homo sapien
ccaccctgggcaccctgaaagagcc

SEQ ID NO: 5164185 - DNA, 25 bp, Homo sapien
gagccaggaaaggaggcaatgttgg

SEQ ID NO: 5164186 - DNA, 25 bp, Homo sapien
gaaacagccaccccataacactgcc

SEQ ID NO: 5164187 - DNA, 25 bp, Homo sapien
tccttgggttttgccccacagccaa

SEQ ID NO: 5164188 - DNA, 25 bp, Homo sapien
ctccttgggttttgccccacagcca

SEQ ID NO: 5164189 - DNA, 25 bp, Homo sapien
agccaccccataacactgcctccac

SEQ ID NO: 5164190 - DNA, 25 bp, Homo sapien
ccccaattttaactggtcagatatc

SEQ ID NO: 5164191 - DNA, 25 bp, Homo sapien
cagtcctgggcttgatacagggagt

SEQ ID NO: 5164192 - DNA, 25 bp, Homo sapien
gagtaggtggttccctgtcatccag

SEQ ID NO: 5164193 - DNA, 25 bp, Homo sapien
gtcagatatccatgaaaaccagtca

SEQ ID NO: 5164194 - DNA, 25 bp, Homo sapien
catttggcgttgatgcatcccgtgg

SEQ ID NO: 5164195 - DNA, 25 bp, Homo sapien
cttgcagttagtcgcattcccagag

SEQ ID NO: 5164196 - DNA, 25 bp, Homo sapien
tgtaattgtgagtaatagggcccca

SEQ ID NO: 5164197 - DNA, 25 bp, Homo sapien
catcccgtggcatattcctttgtga

SEQ ID NO: 5164198 - DNA, 25 bp, Homo sapien
aatccaaaaggaaccagcacagttc

SEQ ID NO: 5164199 - DNA, 25 bp, Homo sapien
gtaatccaaaaggaaccagcacagt

SEQ ID NO: 5164200 - DNA, 25 bp, Homo sapien
taatccaaaaggaaccagcacagtt

SEQ ID NO: 5164201 - DNA, 25 bp, Homo sapien
cccgatggccacgccggtcttgtgg

SEQ ID NO: 5164202 - DNA, 25 bp, Homo sapien
gcccccgatggccacgccggtcttg

SEQ ID NO: 5164203 - DNA, 25 bp, Homo sapien
tggccacgccggtcttgtgggtgga

SEQ ID NO: 5164204 - DNA, 25 bp, Homo sapien
gatggccacgccggtcttgtgggtg

SEQ ID NO: 5164205 - DNA, 25 bp, Homo sapien
gggtgcatgggactgaggacaccaa

SEQ ID NO: 5164206 - DNA, 25 bp, Homo sapien
caaagtcctctgctcggatccagtg

SEQ ID NO: 5164207 - DNA, 25 bp, Homo sapien
actgagttggggtgcatgggactga

SEQ ID NO: 5164208 - DNA, 25 bp, Homo sapien
aagtcctctgctcggatccagtgtt

SEQ ID NO: 5164209 - DNA, 25 bp, Homo sapien
ccatgcctgcctcgttcaggtcccc

SEQ ID NO: 5164210 - DNA, 25 bp, Homo sapien
atagatcttgtgctgctggtagcgg

SEQ ID NO: 5164211 - DNA, 25 bp, Homo sapien
atcaggaggttgtgcaccatgcctg

SEQ ID NO: 5164212 - DNA, 25 bp, Homo sapien
tagcggatcaggaggttgtgcacca

SEQ ID NO: 5164213 - DNA, 25 bp, Homo sapien
cggctgtagtagagctgtacctgct

SEQ ID NO: 5164214 - DNA, 25 bp, Homo sapien
gttgttggcgatggcaaagacatgc

SEQ ID NO: 5164215 - DNA, 25 bp, Homo sapien
cagctcgcccatatggcggctgtag

SEQ ID NO: 5164216 - DNA, 25 bp, Homo sapien
cctcttcatgctgaagtagcagttg

SEQ ID NO: 5164217 - DNA, 25 bp, Homo sapien
atgagcttggtggtctccgtcttgc

SEQ ID NO: 5164218 - DNA, 25 bp, Homo sapien
gatgagcttggtggtctccgtcttg

SEQ ID NO: 5164219 - DNA, 25 bp, Homo sapien
tccacgaatgctggccactgatggt

SEQ ID NO: 5164220 - DNA, 25 bp, Homo sapien
caggatgagcttggtggtctccgtc

SEQ ID NO: 5164221 - DNA, 25 bp, Homo sapien
gaaacagccccatacatggatggtc

SEQ ID NO: 5164222 - DNA, 25 bp, Homo sapien
ggtgcaaaggtaagtcaacagagaa

SEQ ID NO: 5164223 - DNA, 25 bp, Homo sapien
tctttttgacaaataggactggaat

SEQ ID NO: 5164224 - DNA, 25 bp, Homo sapien
tggagggcacatgctatctgattgc

SEQ ID NO: 5164225 - DNA, 25 bp, Homo sapien
agcgcccgctaagaggaagacaaaa

SEQ ID NO: 5164226 - DNA, 25 bp, Homo sapien
ctcgaattgaagaatgggcacggct

SEQ ID NO: 5164227 - DNA, 25 bp, Homo sapien
gctgcaccagacagtgacggaagcc

SEQ ID NO: 5164228 - DNA, 25 bp, Homo sapien
gtgacggaagccaagcgcccgctaa

SEQ ID NO: 5164229 - DNA, 25 bp, Homo sapien
ctgaaggtaagcgggcgatgcccat

SEQ ID NO: 5164230 - DNA, 25 bp, Homo sapien
gatgcccatgatgggagcagagagg

SEQ ID NO: 5164231 - DNA, 25 bp, Homo sapien
aatttgagtgggatcatgtaagagg

SEQ ID NO: 5164232 - DNA, 25 bp, Homo sapien
aggagaaaatgtaatttgagtggga

SEQ ID NO: 5164233 - DNA, 25 bp, Homo sapien
cttctccaggagaaattgctcgatg

SEQ ID NO: 5164234 - DNA, 25 bp, Homo sapien
caccccgctggggttaaagtagatg

SEQ ID NO: 5164235 - DNA, 25 bp, Homo sapien
aaattgctcgatgcgcgcgccctcg

SEQ ID NO: 5164236 - DNA, 25 bp, Homo sapien
caaagcggcttgagttgtcgttgcg

SEQ ID NO: 5164237 - DNA, 25 bp, Homo sapien
tacatgatcgcccagtgcaaaagga

SEQ ID NO: 5164238 - DNA, 25 bp, Homo sapien
taacatacctgaagatacggcccac

SEQ ID NO: 5164239 - DNA, 25 bp, Homo sapien
ggaaaagtatagcaccaggtcggag

SEQ ID NO: 5164240 - DNA, 25 bp, Homo sapien
tacattgacatggacagaccgcctc

SEQ ID NO: 5164241 - DNA, 25 bp, Homo sapien
gatatggtagttccgctcctcggga

SEQ ID NO: 5164242 - DNA, 25 bp, Homo sapien
catggtcaggtagtggtactcggag

SEQ ID NO: 5164243 - DNA, 25 bp, Homo sapien
tactcggagggcgtgcccaggctca

SEQ ID NO: 5164244 - DNA, 25 bp, Homo sapien
ccccatgagcatgcagtagaagata

SEQ ID NO: 5164245 - DNA, 25 bp, Homo sapien
gacgtcccagctctcggagtcggag

SEQ ID NO: 5164246 - DNA, 25 bp, Homo sapien
ccagcagcttgatgacgtcccagct

SEQ ID NO: 5164247 - DNA, 25 bp, Homo sapien
ggcgtagtccttggcgtcgttgagc

SEQ ID NO: 5164248 - DNA, 25 bp, Homo sapien
gaggatcttcatggccgagcggatg

SEQ ID NO: 5164249 - DNA, 25 bp, Homo sapien
gggcgtctccatcacgtctgaggcg

SEQ ID NO: 5164250 - DNA, 25 bp, Homo sapien
gtaacttcatcacggtgggaaaggc

SEQ ID NO: 5164251 - DNA, 25 bp, Homo sapien
ggaaaggcgggcgtctccatcacgt

SEQ ID NO: 5164252 - DNA, 25 bp, Homo sapien
ggcgtccaggttctcgaagaccgaa

SEQ ID NO: 5164253 - DNA, 25 bp, Homo sapien
agggcagggctagtctgatgggtgg

SEQ ID NO: 5164254 - DNA, 25 bp, Homo sapien
ggcagggctagtctgatgggtgggt

SEQ ID NO: 5164255 - DNA, 25 bp, Homo sapien
gcagggctagtctgatgggtgggtt

SEQ ID NO: 5164256 - DNA, 25 bp, Homo sapien
agggctagtctgatgggtgggttgg

SEQ ID NO: 5164257 - DNA, 25 bp, Homo sapien
tccactctcccagaatagtgcaagc

SEQ ID NO: 5164258 - DNA, 25 bp, Homo sapien
attccactctcccagaatagtgcaa

SEQ ID NO: 5164259 - DNA, 25 bp, Homo sapien
tctcccagaatagtgcaagccccgg

SEQ ID NO: 5164260 - DNA, 25 bp, Homo sapien
cagaatagtgcaagccccggagaag

SEQ ID NO: 5164261 - DNA, 25 bp, Homo sapien
gcgtcgcacctgtggagcagggcct

SEQ ID NO: 5164262 - DNA, 25 bp, Homo sapien
gctgcgtcgcacctgtggagcaggg

SEQ ID NO: 5164263 - DNA, 25 bp, Homo sapien
ggtgggggctgcgtcgcacctgtgg

SEQ ID NO: 5164264 - DNA, 25 bp, Homo sapien
gggctgcgtcgcacctgtggagcag

SEQ ID NO: 5164265 - DNA, 25 bp, Homo sapien
aaattcccctcggatgaggatggtg

SEQ ID NO: 5164266 - DNA, 25 bp, Homo sapien
ggtgtgcttgatcagacagtcccgg

SEQ ID NO: 5164267 - DNA, 25 bp, Homo sapien
ttgacaaaggcgtccctccggtcag

SEQ ID NO: 5164268 - DNA, 25 bp, Homo sapien
agcctgggcaatgttcagggacctg

SEQ ID NO: 5164269 - DNA, 25 bp, Homo sapien
aggaggccgatggccctccgcacat

SEQ ID NO: 5164270 - DNA, 25 bp, Homo sapien
ctccgcacatttttggggtcctggg

SEQ ID NO: 5164271 - DNA, 25 bp, Homo sapien
ctattgttctcgaaattttcaaagc

SEQ ID NO: 5164272 - DNA, 25 bp, Homo sapien
ctggtggtgtgaagatggcggcatt

SEQ ID NO: 5164273 - DNA, 25 bp, Homo sapien
tcctcttgctccatggtgaacacgt

SEQ ID NO: 5164274 - DNA, 25 bp, Homo sapien
caggagatgttctccgagcggtact

SEQ ID NO: 5164275 - DNA, 25 bp, Homo sapien
gagcggtactcctcttgctccatgg

SEQ ID NO: 5164276 - DNA, 25 bp, Homo sapien
ttctccgagcggtactcctcttgct

SEQ ID NO: 5164277 - DNA, 25 bp, Homo sapien
ggctttcttcgtccaggagggagat

SEQ ID NO: 5164278 - DNA, 25 bp, Homo sapien
tgcgggaagcggctttcttcgtcca

SEQ ID NO: 5164279 - DNA, 25 bp, Homo sapien
ccagggtgggccgattgtcggtgta

SEQ ID NO: 5164280 - DNA, 25 bp, Homo sapien
gccgattgtcggtgtagtggatata

SEQ ID NO: 5164281 - DNA, 25 bp, Homo sapien
ctggaagaacccagacaccctgtgg

SEQ ID NO: 5164282 - DNA, 25 bp, Homo sapien
tggaagaacccagacaccctgtggg

SEQ ID NO: 5164283 - DNA, 25 bp, Homo sapien
tctgcttggtagtacacctcgccgg

SEQ ID NO: 5164284 - DNA, 25 bp, Homo sapien
tgggcaatgccaaatctggcatcgt

SEQ ID NO: 5164285 - DNA, 25 bp, Homo sapien
gcatcgtggatgttcttgggctgta

SEQ ID NO: 5164286 - DNA, 25 bp, Homo sapien
acctcgccggcaaaatgggcaatgc

SEQ ID NO: 5164287 - DNA, 25 bp, Homo sapien
aagttgaatatctccctcagaaact

SEQ ID NO: 5164288 - DNA, 25 bp, Homo sapien
atatctgtgctcagcacgtctcggt

SEQ ID NO: 5164289 - DNA, 25 bp, Homo sapien
tgctcagcacgtctcggttcttctc

SEQ ID NO: 5164290 - DNA, 25 bp, Homo sapien
tggaggagtaaaccagggtgaggat

SEQ ID NO: 5164291 - DNA, 25 bp, Homo sapien
tttgcctggcggatggtcccatggc

SEQ ID NO: 5164292 - DNA, 25 bp, Homo sapien
ctttgcctggcggatggtcccatgg

SEQ ID NO: 5164293 - DNA, 25 bp, Homo sapien
ttgcctggcggatggtcccatggcc

SEQ ID NO: 5164294 - DNA, 25 bp, Homo sapien
tgcctggcggatggtcccatggccc

SEQ ID NO: 5164295 - DNA, 25 bp, Homo sapien
cagagcacaagtgggtctcaggagc

SEQ ID NO: 5164296 - DNA, 25 bp, Homo sapien
ctgtgaatggaagcacagagcacaa

SEQ ID NO: 5164297 - DNA, 25 bp, Homo sapien
gagcacaagtgggtctcaggagcca

SEQ ID NO: 5164298 - DNA, 25 bp, Homo sapien
agcacagagcacaagtgggtctcag

SEQ ID NO: 5164299 - DNA, 25 bp, Homo sapien
ggagggccgtttatttgagtctgca

SEQ ID NO: 5164300 - DNA, 25 bp, Homo sapien
ttgaactggcttcctaaggtggagg

SEQ ID NO: 5164301 - DNA, 25 bp, Homo sapien
cagctggtccagagactgtttgaac

SEQ ID NO: 5164302 - DNA, 25 bp, Homo sapien
tgtactcattaggtttgatgcagcg

SEQ ID NO: 5164303 - DNA, 25 bp, Homo sapien
gacttgcggatgtgcacggtctcca

SEQ ID NO: 5164304 - DNA, 25 bp, Homo sapien
tggcgttgggcagcaacacgccgaa

SEQ ID NO: 5164305 - DNA, 25 bp, Homo sapien
aactcctcgaacgtgtagcggatgg

SEQ ID NO: 5164306 - DNA, 25 bp, Homo sapien
catcatgcccgagtatcgcagctgc

SEQ ID NO: 5164307 - DNA, 25 bp, Homo sapien
tgtcttccccgctttccagtctttg

SEQ ID NO: 5164308 - DNA, 25 bp, Homo sapien
ccagtctttgtctgtccgcagccac

SEQ ID NO: 5164309 - DNA, 25 bp, Homo sapien
ctgtatctgtagccccgaaggactt

SEQ ID NO: 5164310 - DNA, 25 bp, Homo sapien
ttctggatgctgagcgccgctctgt

SEQ ID NO: 5164311 - DNA, 25 bp, Homo sapien
atctgtagccccgaaggactttctg

SEQ ID NO: 5164312 - DNA, 25 bp, Homo sapien
gagcgccgctctgtctagcacctgg

SEQ ID NO: 5164313 - DNA, 25 bp, Homo sapien
cgggaacatgtgatcctggtttgtg

SEQ ID NO: 5164314 - DNA, 25 bp, Homo sapien
acatgtgatcctggtttgtgggctg

SEQ ID NO: 5164315 - DNA, 25 bp, Homo sapien
ggcccagcgggaacatgtgatcctg

SEQ ID NO: 5164316 - DNA, 25 bp, Homo sapien
agggagggcccagcgggaacatgtg

SEQ ID NO: 5164317 - DNA, 25 bp, Homo sapien
tatgaccgagtggtgtttcctccag

SEQ ID NO: 5164318 - DNA, 25 bp, Homo sapien
tcactggagacttttgccaaacatt

SEQ ID NO: 5164319 - DNA, 25 bp, Homo sapien
cgtaactcaccacattgaaaggcta

SEQ ID NO: 5164320 - DNA, 25 bp, Homo sapien
tttcctccagggatgcaaagctggt

SEQ ID NO: 5164321 - DNA, 25 bp, Homo sapien
gcagggtcacagctgcccgcctctg

SEQ ID NO: 5164322 - DNA, 25 bp, Homo sapien
cctcctgttgcagtagcctctccac

SEQ ID NO: 5164323 - DNA, 25 bp, Homo sapien
tgcagggtcacagctgcccgcctct

SEQ ID NO: 5164324 - DNA, 25 bp, Homo sapien
ctgttgcagtagcctctccaccagg

SEQ ID NO: 5164325 - DNA, 25 bp, Homo sapien
ccgctggtcccgcggcccagccgcc

SEQ ID NO: 5164326 - DNA, 25 bp, Homo sapien
cggcccagccgccccagagagctct

SEQ ID NO: 5164327 - DNA, 25 bp, Homo sapien
cagccgccccagagagctctctcac

SEQ ID NO: 5164328 - DNA, 25 bp, Homo sapien
ctggtcccgcggcccagccgcccca

SEQ ID NO: 5164329 - DNA, 25 bp, Homo sapien
gggcaatagcctgcaggcgctcaaa

SEQ ID NO: 5164330 - DNA, 25 bp, Homo sapien
tggactgtcctctgccgcatggcct

SEQ ID NO: 5164331 - DNA, 25 bp, Homo sapien
gctggctccgggcaatagcctgcag

SEQ ID NO: 5164332 - DNA, 25 bp, Homo sapien
ctggtactgcctcgccagcggctgg

SEQ ID NO: 5164333 - DNA, 25 bp, Homo sapien
agccatgcccctggcatgggcctga

SEQ ID NO: 5164334 - DNA, 25 bp, Homo sapien
ctggcatgggcctgaatgaccacca

SEQ ID NO: 5164335 - DNA, 25 bp, Homo sapien
atgggcctgaatgaccaccactgcc

SEQ ID NO: 5164336 - DNA, 25 bp, Homo sapien
ccttcctttgctggaagttgcgccg

SEQ ID NO: 5164337 - DNA, 25 bp, Homo sapien
gcagggagagcgccttggcttttct

SEQ ID NO: 5164338 - DNA, 25 bp, Homo sapien
cctcggccgggatgaccagcggcgc

SEQ ID NO: 5164339 - DNA, 25 bp, Homo sapien
gcccctcggccgggatgaccagcgg

SEQ ID NO: 5164340 - DNA, 25 bp, Homo sapien
cagggagagcgccttggcttttctg

SEQ ID NO: 5164341 - DNA, 25 bp, Homo sapien
tgacggtgtcgtagatggatctgcg

SEQ ID NO: 5164342 - DNA, 25 bp, Homo sapien
tctccaccatctccgtgtcagtgac

SEQ ID NO: 5164343 - DNA, 25 bp, Homo sapien
catctccgtgtcagtgacggtgtcg

SEQ ID NO: 5164344 - DNA, 25 bp, Homo sapien
caccatctccgtgtcagtgacggtg

SEQ ID NO: 5164345 - DNA, 25 bp, Homo sapien
caggtcaacctcaagcagcttctgg

SEQ ID NO: 5164346 - DNA, 25 bp, Homo sapien
tcagtgtcatcttcgtggtaaagca

SEQ ID NO: 5164347 - DNA, 25 bp, Homo sapien
tgtgtggctggctgatttctggaag

SEQ ID NO: 5164348 - DNA, 25 bp, Homo sapien
gcagcttctgggtcttcgattccag

SEQ ID NO: 5164349 - DNA, 25 bp, Homo sapien
tcaggatgacgttccatatgaccag

SEQ ID NO: 5164350 - DNA, 25 bp, Homo sapien
tggatctgccgcatcactgagctgc

SEQ ID NO: 5164351 - DNA, 25 bp, Homo sapien
ccagcgtgtcatggatctgccgcat

SEQ ID NO: 5164352 - DNA, 25 bp, Homo sapien
gctctgggagatcacccatgaacct

SEQ ID NO: 5164353 - DNA, 25 bp, Homo sapien
tccaggtcttgtctctccgtcctgt

SEQ ID NO: 5164354 - DNA, 25 bp, Homo sapien
tgggttccatgggtaaggctgagga

SEQ ID NO: 5164355 - DNA, 25 bp, Homo sapien
ggctgggttccatgggtaaggctga

SEQ ID NO: 5164356 - DNA, 25 bp, Homo sapien
ttccatgggtaaggctgaggacagg

SEQ ID NO: 5164357 - DNA, 25 bp, Homo sapien
gaggagatatccttggtccccttgt

SEQ ID NO: 5164358 - DNA, 25 bp, Homo sapien
gacatgggccggtctgcaccaaggc

SEQ ID NO: 5164359 - DNA, 25 bp, Homo sapien
cgtagcccacgatgaagtgcacctt

SEQ ID NO: 5164360 - DNA, 25 bp, Homo sapien
aggatggcgtagcccacgatgaagt

SEQ ID NO: 5164361 - DNA, 25 bp, Homo sapien
tccaggttggacatgggccggtctg

SEQ ID NO: 5164362 - DNA, 25 bp, Homo sapien
gcgccctttgcacagcccatctgct

SEQ ID NO: 5164363 - DNA, 25 bp, Homo sapien
catggcctgtgctctcggtccttta

SEQ ID NO: 5164364 - DNA, 25 bp, Homo sapien
tctgctcccagatgtgcgggatccc

SEQ ID NO: 5164365 - DNA, 25 bp, Homo sapien
gtcctcagcagccgcgccctttgca

SEQ ID NO: 5164366 - DNA, 25 bp, Homo sapien
agctcttgtgcacctctgagaggtc

SEQ ID NO: 5164367 - DNA, 25 bp, Homo sapien
gacaggggtacctgggcacacagct

SEQ ID NO: 5164368 - DNA, 25 bp, Homo sapien
gacacagaccattaggagagtaggc

SEQ ID NO: 5164369 - DNA, 25 bp, Homo sapien
ctgagaggtcccatatgcagggcac

SEQ ID NO: 5164370 - DNA, 25 bp, Homo sapien
cttcatgaacctctctgagggtggg

SEQ ID NO: 5164371 - DNA, 25 bp, Homo sapien
tgcttgttttgaagttctccgagag

SEQ ID NO: 5164372 - DNA, 25 bp, Homo sapien
tgttttgaagttctccgagagctgc

SEQ ID NO: 5164373 - DNA, 25 bp, Homo sapien
ttgttttgaagttctccgagagctg

SEQ ID NO: 5164374 - DNA, 25 bp, Homo sapien
accccattggcataggtgcgtctca

SEQ ID NO: 5164375 - DNA, 25 bp, Homo sapien
gtcgccggcccttggccgatgaagt

SEQ ID NO: 5164376 - DNA, 25 bp, Homo sapien
cgtctcaggcgctcggcacagaagg

SEQ ID NO: 5164377 - DNA, 25 bp, Homo sapien
ggcccttggccgatgaagttcagta

SEQ ID NO: 5164378 - DNA, 25 bp, Homo sapien
ggagctcttgggaatctgagtccag

SEQ ID NO: 5164379 - DNA, 25 bp, Homo sapien
gagtccaggactcgggaacattttg

SEQ ID NO: 5164380 - DNA, 25 bp, Homo sapien
caatgttagccacaggcgtccaggt

SEQ ID NO: 5164381 - DNA, 25 bp, Homo sapien
acagcaaccaggcaagagcaatgtt

SEQ ID NO: 5164382 - DNA, 25 bp, Homo sapien
acaaaattcaggccaacaggtgttt

SEQ ID NO: 5164383 - DNA, 25 bp, Homo sapien
ggcttggcatagaaaacaaaattca

SEQ ID NO: 5164384 - DNA, 25 bp, Homo sapien
catgggcttggcatagaaaacaaaa

SEQ ID NO: 5164385 - DNA, 25 bp, Homo sapien
cttgccatcccgtgggttcccaggg

SEQ ID NO: 5164386 - DNA, 25 bp, Homo sapien
gacggttaggctctctccagtggcc

SEQ ID NO: 5164387 - DNA, 25 bp, Homo sapien
cgctgaggccctgcttgtgagcgat

SEQ ID NO: 5164388 - DNA, 25 bp, Homo sapien
cttgtcgtacacggcgacctggagg

SEQ ID NO: 5164389 - DNA, 25 bp, Homo sapien
tgtgcatgcacatttcccgagatgt

SEQ ID NO: 5164390 - DNA, 25 bp, Homo sapien
gtgaagaattccttccggaagtaga

SEQ ID NO: 5164391 - DNA, 25 bp, Homo sapien
taaataagctcggtgctgacagggt

SEQ ID NO: 5164392 - DNA, 25 bp, Homo sapien
tcctcggaggacttggcggtaaata

SEQ ID NO: 5164393 - DNA, 25 bp, Homo sapien
ttctcgaagctgtactcgccagacc

SEQ ID NO: 5164394 - DNA, 25 bp, Homo sapien
cgccgagctgcacgtagcagtgccg

SEQ ID NO: 5164395 - DNA, 25 bp, Homo sapien
tgctctctgctgaggcgccgagctg

SEQ ID NO: 5164396 - DNA, 25 bp, Homo sapien
tctgggggcttggtcctgtacagct

SEQ ID NO: 5164397 - DNA, 25 bp, Homo sapien
tcctgtacagcttgtgggggatgca

SEQ ID NO: 5164398 - DNA, 25 bp, Homo sapien
ggcgcaggcggcagtgacgaggctc

SEQ ID NO: 5164399 - DNA, 25 bp, Homo sapien
gcaggcggcagtgacgaggctcgcc

SEQ ID NO: 5164400 - DNA, 25 bp, Homo sapien
cgcaggcggcagtgacgaggctcgc

SEQ ID NO: 5164401 - DNA, 25 bp, Homo sapien
cttggcgcaggcggcagtgacgagg

SEQ ID NO: 5164402 - DNA, 25 bp, Homo sapien
agagcagcggccactgcaggcgggc

SEQ ID NO: 5164403 - DNA, 25 bp, Homo sapien
atgacttcgaagagccgggagaaga

SEQ ID NO: 5164404 - DNA, 25 bp, Homo sapien
tcgcacggccagtggtgtgacttgc

SEQ ID NO: 5164405 - DNA, 25 bp, Homo sapien
aggcgggcggcgtccaccacctgct

SEQ ID NO: 5164406 - DNA, 25 bp, Homo sapien
gaagcaaagccccttccagttaaca

SEQ ID NO: 5164407 - DNA, 25 bp, Homo sapien
cagccaagatcagctgcgtcttggg

SEQ ID NO: 5164408 - DNA, 25 bp, Homo sapien
aagccccttccagttaacagccaag

SEQ ID NO: 5164409 - DNA, 25 bp, Homo sapien
agccaagatcagctgcgtcttgggc

SEQ ID NO: 5164410 - DNA, 25 bp, Homo sapien
ctgcagggccatggcgaaaatggac

SEQ ID NO: 5164411 - DNA, 25 bp, Homo sapien
ctgctgggtgacacaaactcgtact

SEQ ID NO: 5164412 - DNA, 25 bp, Homo sapien
ggcgaaaatggacctctccttcagg

SEQ ID NO: 5164413 - DNA, 25 bp, Homo sapien
tcctcatgcatcgtggagagcagca

SEQ ID NO: 5164414 - DNA, 25 bp, Homo sapien
gcagggaggctatttgctgagggct

SEQ ID NO: 5164415 - DNA, 25 bp, Homo sapien
gggcagggaggctatttgctgaggg

SEQ ID NO: 5164416 - DNA, 25 bp, Homo sapien
gtaagggcagggaggctatttgctg

SEQ ID NO: 5164417 - DNA, 25 bp, Homo sapien
ctgtaagggcagggaggctatttgc

SEQ ID NO: 5164418 - DNA, 25 bp, Homo sapien
cctgtcctgtcgttctggccgaggg

SEQ ID NO: 5164419 - DNA, 25 bp, Homo sapien
tctttgtgaggaccaacaggtcccc

SEQ ID NO: 5164420 - DNA, 25 bp, Homo sapien
tgtgccgagggcttagtgaccgtgg

SEQ ID NO: 5164421 - DNA, 25 bp, Homo sapien
atggtgtagaggcaggccatgggca

SEQ ID NO: 5164422 - DNA, 25 bp, Homo sapien
tctctggtgacatggcaagcaagct

SEQ ID NO: 5164423 - DNA, 25 bp, Homo sapien
ctgaagaactcataggagaactcct

SEQ ID NO: 5164424 - DNA, 25 bp, Homo sapien
ggctcctcaggacgtggctctgtga

SEQ ID NO: 5164425 - DNA, 25 bp, Homo sapien
cataggagaactcctccagggtgtg

SEQ ID NO: 5164426 - DNA, 25 bp, Homo sapien
gcagcggctcgcaggaataggccca

SEQ ID NO: 5164427 - DNA, 25 bp, Homo sapien
cagcggctgtcgcagcggctcgcag

SEQ ID NO: 5164428 - DNA, 25 bp, Homo sapien
agcggctcgcaggaataggcccaca

SEQ ID NO: 5164429 - DNA, 25 bp, Homo sapien
tcgcttgagcagcggctgtcgcagc

SEQ ID NO: 5164430 - DNA, 25 bp, Homo sapien
tctggcaggcgatgtcccagaggtc

SEQ ID NO: 5164431 - DNA, 25 bp, Homo sapien
caggcgatgtcccagaggtcgacgt

SEQ ID NO: 5164432 - DNA, 25 bp, Homo sapien
agatctggcaggcgatgtcccagag

SEQ ID NO: 5164433 - DNA, 25 bp, Homo sapien
atgtcccagaggtcgacgttggcgt

SEQ ID NO: 5164434 - DNA, 25 bp, Homo sapien
gaggtgcaggcaggctggtggggaa

SEQ ID NO: 5164435 - DNA, 25 bp, Homo sapien
tgcaggcaggctggtggggaaggat

SEQ ID NO: 5164436 - DNA, 25 bp, Homo sapien
caggcaggctggtggggaaggatat

SEQ ID NO: 5164437 - DNA, 25 bp, Homo sapien
ggtgcaggcaggctggtggggaagg

SEQ ID NO: 5164438 - DNA, 25 bp, Homo sapien
tgtcaaggagcacagtgctggggca

SEQ ID NO: 5164439 - DNA, 25 bp, Homo sapien
tggggcagccccacgctgacacaga

SEQ ID NO: 5164440 - DNA, 25 bp, Homo sapien
ctgtcaaggagcacagtgctggggc

SEQ ID NO: 5164441 - DNA, 25 bp, Homo sapien
tgctggggcagccccacgctgacac

SEQ ID NO: 5164442 - DNA, 25 bp, Homo sapien
tagtcgcccatgtaccggaggatgg

SEQ ID NO: 5164443 - DNA, 25 bp, Homo sapien
ctgccgagaagggtagtcgcccatg

SEQ ID NO: 5164444 - DNA, 25 bp, Homo sapien
cagggccagtgtgaagatctggtcg

SEQ ID NO: 5164445 - DNA, 25 bp, Homo sapien
tctggcagtagacctcgtcctggag

SEQ ID NO: 5164446 - DNA, 25 bp, Homo sapien
tggagttgtgcgtcagctgcttcag

SEQ ID NO: 5164447 - DNA, 25 bp, Homo sapien
caggatctggcagtagacctcgtcc

SEQ ID NO: 5164448 - DNA, 25 bp, Homo sapien
gcagcttccccctccgagtgtctat

SEQ ID NO: 5164449 - DNA, 25 bp, Homo sapien
aggaccttctggattcggcggctgc

SEQ ID NO: 5164450 - DNA, 25 bp, Homo sapien
gcttccccctccgagtgtctataaa

SEQ ID NO: 5164451 - DNA, 25 bp, Homo sapien
ggaccttctggattcggcggctgca

SEQ ID NO: 5164452 - DNA, 25 bp, Homo sapien
ggaagtagatcttgtggcagatgcg

SEQ ID NO: 5164453 - DNA, 25 bp, Homo sapien
tggcagatgcgggagacgttctgct

SEQ ID NO: 5164454 - DNA, 25 bp, Homo sapien
agatgcgggagacgttctgctctgc

SEQ ID NO: 5164455 - DNA, 25 bp, Homo sapien
ctcactggtgtcattggggaagtag

SEQ ID NO: 5164456 - DNA, 25 bp, Homo sapien
gcagcctggtggcaatgctgtcaca

SEQ ID NO: 5164457 - DNA, 25 bp, Homo sapien
cctggtggcaatgctgtcacacaca

SEQ ID NO: 5164458 - DNA, 25 bp, Homo sapien
tgtcacacacatcccgcacccgtgt

SEQ ID NO: 5164459 - DNA, 25 bp, Homo sapien
gcacccgtgtgttggcaaccacctc

SEQ ID NO: 5164460 - DNA, 25 bp, Homo sapien
ggcagcacctagggcctcgctcact

SEQ ID NO: 5164461 - DNA, 25 bp, Homo sapien
aggcagcacctagggcctcgctcac

SEQ ID NO: 5164462 - DNA, 25 bp, Homo sapien
acaggcagcacctagggcctcgctc

SEQ ID NO: 5164463 - DNA, 25 bp, Homo sapien
cacaggcagcacctagggcctcgct

SEQ ID NO: 5164464 - DNA, 25 bp, Homo sapien
gctgtgcgtgggctattggcgtgtg

SEQ ID NO: 5164465 - DNA, 25 bp, Homo sapien
tgggctattggcgtgtggagctggc

SEQ ID NO: 5164466 - DNA, 25 bp, Homo sapien
ctggagtcggctgtgcgtgggctat

SEQ ID NO: 5164467 - DNA, 25 bp, Homo sapien
agtcggctgtgcgtgggctattggc

SEQ ID NO: 5164468 - DNA, 25 bp, Homo sapien
atcaaagaagaagtctccctccttc

SEQ ID NO: 5164469 - DNA, 25 bp, Homo sapien
gaatcaaagaagaagtctccctcct

SEQ ID NO: 5164470 - DNA, 25 bp, Homo sapien
aatcaaagaagaagtctccctcctt

SEQ ID NO: 5164471 - DNA, 25 bp, Homo sapien
cacacgggaacgaatggatggatga

SEQ ID NO: 5164472 - DNA, 25 bp, Homo sapien
ccagggacacacgggaacgaatgga

SEQ ID NO: 5164473 - DNA, 25 bp, Homo sapien
ggcatgggccgcacagaggccgcca

SEQ ID NO: 5164474 - DNA, 25 bp, Homo sapien
gacacacgggaacgaatggatggat

SEQ ID NO: 5164475 - DNA, 25 bp, Homo sapien
gcactcccagcccatgagggtcatg

SEQ ID NO: 5164476 - DNA, 25 bp, Homo sapien
atccttcatcactccaaggtgcagc

SEQ ID NO: 5164477 - DNA, 25 bp, Homo sapien
aggaacattcctggactcgcactcc

SEQ ID NO: 5164478 - DNA, 25 bp, Homo sapien
ctgtcccagcaggtacaccagccct

SEQ ID NO: 5164479 - DNA, 25 bp, Homo sapien
tgggcgagggccagcagtgggcacc

SEQ ID NO: 5164480 - DNA, 25 bp, Homo sapien
ggcgagggccagcagtgggcaccaa

SEQ ID NO: 5164481 - DNA, 25 bp, Homo sapien
cgagggccagcagtgggcaccaagc

SEQ ID NO: 5164482 - DNA, 25 bp, Homo sapien
ctgggcgagggccagcagtgggcac

SEQ ID NO: 5164483 - DNA, 25 bp, Homo sapien
gatatgttgagccacaatttccgca

SEQ ID NO: 5164484 - DNA, 25 bp, Homo sapien
atggtgtctgcattcacatccttcc

SEQ ID NO: 5164485 - DNA, 25 bp, Homo sapien
tccgcatgaagtacacctggtaggg

SEQ ID NO: 5164486 - DNA, 25 bp, Homo sapien
acatccttccctggagatatgttga

SEQ ID NO: 5164487 - DNA, 25 bp, Homo sapien
tgctccacccatgtggttggccctg

SEQ ID NO: 5164488 - DNA, 25 bp, Homo sapien
tgcaggtgccagtgcagtcactgtc

SEQ ID NO: 5164489 - DNA, 25 bp, Homo sapien
tgtccccaaacattgctgccctctg

SEQ ID NO: 5164490 - DNA, 25 bp, Homo sapien
catccaggacggactgagcagggta

SEQ ID NO: 5164491 - DNA, 25 bp, Homo sapien
tcccgcgaacacttgtggaatccgc

SEQ ID NO: 5164492 - DNA, 25 bp, Homo sapien
tagccagctgggaccggtcgttgtt

SEQ ID NO: 5164493 - DNA, 25 bp, Homo sapien
acatcaggcgtgtgaggttctcagg

SEQ ID NO: 5164494 - DNA, 25 bp, Homo sapien
tggaatccgcgcaggtacttgggca

SEQ ID NO: 5164495 - DNA, 25 bp, Homo sapien
catgtgcacccatgtgatcttggag

SEQ ID NO: 5164496 - DNA, 25 bp, Homo sapien
cataggaaggcgtggtgtgtgcaga

SEQ ID NO: 5164497 - DNA, 25 bp, Homo sapien
tgcagcatgggacagtctcggtgct

SEQ ID NO: 5164498 - DNA, 25 bp, Homo sapien
tctcggtgctgtggatggcatagga

SEQ ID NO: 5164499 - DNA, 25 bp, Homo sapien
tgtccttatgcttgtcataggctag

SEQ ID NO: 5164500 - DNA, 25 bp, Homo sapien
gcttgtcataggctagaaggatgct

SEQ ID NO: 5164501 - DNA, 25 bp, Homo sapien
cacctcgaagaaggcggatccgaag

SEQ ID NO: 5164502 - DNA, 25 bp, Homo sapien
cactgtcttgtccttatgcttgtca

SEQ ID NO: 5164503 - DNA, 25 bp, Homo sapien
ccccatgtcggttgatggcgatgag

SEQ ID NO: 5164504 - DNA, 25 bp, Homo sapien
tggcgatgaggatgacgtccgggta

SEQ ID NO: 5164505 - DNA, 25 bp, Homo sapien
gatgacgtccgggtaggaaggctcc

SEQ ID NO: 5164506 - DNA, 25 bp, Homo sapien
gggtggatgagcagaaccccatgtc

SEQ ID NO: 5164507 - DNA, 25 bp, Homo sapien
ggaggtctcgcacagcaggcggctg

SEQ ID NO: 5164508 - DNA, 25 bp, Homo sapien
agggaggtctcgcacagcaggcggc

SEQ ID NO: 5164509 - DNA, 25 bp, Homo sapien
ggtctcgcacagcaggcggctgcca

SEQ ID NO: 5164510 - DNA, 25 bp, Homo sapien
aggtctcgcacagcaggcggctgcc

SEQ ID NO: 5164511 - DNA, 25 bp, Homo sapien
ccattggggccgtcatttctgcttg

SEQ ID NO: 5164512 - DNA, 25 bp, Homo sapien
cctatgcatcttggatgggagaaag

SEQ ID NO: 5164513 - DNA, 25 bp, Homo sapien
tccctccttggaatgggccaagggc

SEQ ID NO: 5164514 - DNA, 25 bp, Homo sapien
ccctgtgactgagccctcttagtga

SEQ ID NO: 5164515 - DNA, 25 bp, Homo sapien
ggagccccgctgcttgttcatggca

SEQ ID NO: 5164516 - DNA, 25 bp, Homo sapien
gggccttggagccccgctgcttgtt

SEQ ID NO: 5164517 - DNA, 25 bp, Homo sapien
gagctgctgcacatatgaggtcagc

SEQ ID NO: 5164518 - DNA, 25 bp, Homo sapien
aggagctgctgcacatatgaggtca

SEQ ID NO: 5164519 - DNA, 25 bp, Homo sapien
gaagggcgcctgagcagacacgcca

SEQ ID NO: 5164520 - DNA, 25 bp, Homo sapien
ggaaggtgccgccaggctagaggtc

SEQ ID NO: 5164521 - DNA, 25 bp, Homo sapien
ggcagcatggaaggctgcccgccaa

SEQ ID NO: 5164522 - DNA, 25 bp, Homo sapien
cgagactcccgaccccattctgggc

SEQ ID NO: 5164523 - DNA, 25 bp, Homo sapien
cacccacaagctacctggagggaca

SEQ ID NO: 5164524 - DNA, 25 bp, Homo sapien
gacaggagcaaattgcaccacagct

SEQ ID NO: 5164525 - DNA, 25 bp, Homo sapien
cactaagcgcatgtggctcctgggc

SEQ ID NO: 5164526 - DNA, 25 bp, Homo sapien
tcaaccagtggcacagtgtccttgt

SEQ ID NO: 5164527 - DNA, 25 bp, Homo sapien
tgatcactgtcgatggcttcaaggg

SEQ ID NO: 5164528 - DNA, 25 bp, Homo sapien
tgagacagaaataattcctcgtggg

SEQ ID NO: 5164529 - DNA, 25 bp, Homo sapien
cctcgtgggttgagtgttgtcctga

SEQ ID NO: 5164530 - DNA, 25 bp, Homo sapien
gaggcgttgagctgattcctgcatc

SEQ ID NO: 5164531 - DNA, 25 bp, Homo sapien
ggtctctttcctgttgtgcccgcag

SEQ ID NO: 5164532 - DNA, 25 bp, Homo sapien
tggtctgttgagaagctgtttccca

SEQ ID NO: 5164533 - DNA, 25 bp, Homo sapien
cttccttcaagagagatgggcttcc

SEQ ID NO: 5164534 - DNA, 25 bp, Homo sapien
ctgttgtgcccgcaggcggctgtct

SEQ ID NO: 5164535 - DNA, 25 bp, Homo sapien
tgatctccgcccgtgggtgtcggtg

SEQ ID NO: 5164536 - DNA, 25 bp, Homo sapien
tcccttgttgtgtcgggctgctcct

SEQ ID NO: 5164537 - DNA, 25 bp, Homo sapien
tggaacgctggctatttaaggagag

SEQ ID NO: 5164538 - DNA, 25 bp, Homo sapien
tgaaaggctgcttcattcctgaggg

SEQ ID NO: 5164539 - DNA, 25 bp, Homo sapien
cagagggacgaaacaccgctttgtg

SEQ ID NO: 5164540 - DNA, 25 bp, Homo sapien
tggctcctctatgggtcaaggctgc

SEQ ID NO: 5164541 - DNA, 25 bp, Homo sapien
ggtcagccttcgatgcacaggtcag

SEQ ID NO: 5164542 - DNA, 25 bp, Homo sapien
ccaaagagatgggacgagacaggct

SEQ ID NO: 5164543 - DNA, 25 bp, Homo sapien
caggttccacagtactctgacttgg

SEQ ID NO: 5164544 - DNA, 25 bp, Homo sapien
taggactgctaaaaccacggtgagg

SEQ ID NO: 5164545 - DNA, 25 bp, Homo sapien
cagggtctgttcttagtccaatgtg

SEQ ID NO: 5164546 - DNA, 25 bp, Homo sapien
tcaagatgcctgaagttctaacacc

SEQ ID NO: 5164547 - DNA, 25 bp, Homo sapien
ctgaaaagattgcccccggcttcag

SEQ ID NO: 5164548 - DNA, 25 bp, Homo sapien
cagggctgtctcaggatgctggtgg

SEQ ID NO: 5164549 - DNA, 25 bp, Homo sapien
ctggtggcacggggcagagagggca

SEQ ID NO: 5164550 - DNA, 25 bp, Homo sapien
tgattccacagggctgtctcaggat

SEQ ID NO: 5164551 - DNA, 25 bp, Homo sapien
tgtctcaggatgctggtggcacggg

SEQ ID NO: 5164552 - DNA, 25 bp, Homo sapien
cagcccaccaactccgtttggacat

SEQ ID NO: 5164553 - DNA, 25 bp, Homo sapien
tccagcccaccaactccgtttggac

SEQ ID NO: 5164554 - DNA, 25 bp, Homo sapien
atccagcccaccaactccgtttgga

SEQ ID NO: 5164555 - DNA, 25 bp, Homo sapien
gatccagcccaccaactccgtttgg

SEQ ID NO: 5164556 - DNA, 25 bp, Homo sapien
aaggaggcgaacagcatgttctcca

SEQ ID NO: 5164557 - DNA, 25 bp, Homo sapien
atgttctccagtggcgtctcctggc

SEQ ID NO: 5164558 - DNA, 25 bp, Homo sapien
ccacattgctctgccgtggccaggg

SEQ ID NO: 5164559 - DNA, 25 bp, Homo sapien
gtagaaggaggcgaacagcatgttc

SEQ ID NO: 5164560 - DNA, 25 bp, Homo sapien
agagccagggtattgccaactaaag

SEQ ID NO: 5164561 - DNA, 25 bp, Homo sapien
gccagggtattgccaactaaagcca

SEQ ID NO: 5164562 - DNA, 25 bp, Homo sapien
gagccagggtattgccaactaaagc

SEQ ID NO: 5164563 - DNA, 25 bp, Homo sapien
agccagggtattgccaactaaagcc

SEQ ID NO: 5164564 - DNA, 25 bp, Homo sapien
ttcccagagaagtggtagaccaggc

SEQ ID NO: 5164565 - DNA, 25 bp, Homo sapien
atgcatcaggaacacgttggccggg

SEQ ID NO: 5164566 - DNA, 25 bp, Homo sapien
ccggacttgtggtctcggatgaaaa

SEQ ID NO: 5164567 - DNA, 25 bp, Homo sapien
gagacggcatgcgatttccccaaat

SEQ ID NO: 5164568 - DNA, 25 bp, Homo sapien
gacttgaccgggtgcacaatggcca

SEQ ID NO: 5164569 - DNA, 25 bp, Homo sapien
ctgcggagcttgagggacttgaccg

SEQ ID NO: 5164570 - DNA, 25 bp, Homo sapien
ccaggaaacggtcggcgctgatgca

SEQ ID NO: 5164571 - DNA, 25 bp, Homo sapien
aatggccaggaaacggtcggcgctg

SEQ ID NO: 5164572 - DNA, 25 bp, Homo sapien
gctgcaggcagaccaccgtgtggtt

SEQ ID NO: 5164573 - DNA, 25 bp, Homo sapien
tgatcagcaggtagcaggtgaccgt

SEQ ID NO: 5164574 - DNA, 25 bp, Homo sapien
gacttggcactcagcgagctctcgt

SEQ ID NO: 5164575 - DNA, 25 bp, Homo sapien
tatggcgatcatgcgcactgccttg

SEQ ID NO: 5164576 - DNA, 25 bp, Homo sapien
tgctgagtcctaaacagtctgcgct

SEQ ID NO: 5164577 - DNA, 25 bp, Homo sapien
gaagtcgttgagtgtctaggagcca

SEQ ID NO: 5164578 - DNA, 25 bp, Homo sapien
tggccgatggatcccctttgtcagt

SEQ ID NO: 5164579 - DNA, 25 bp, Homo sapien
ctagcgggaaagaaaggcctccatt

SEQ ID NO: 5164580 - DNA, 25 bp, Homo sapien
ggaaacgcttcatgttgaccaaaca

SEQ ID NO: 5164581 - DNA, 25 bp, Homo sapien
tagcaagggaaatagctcaggcgga

SEQ ID NO: 5164582 - DNA, 25 bp, Homo sapien
agtgcagaacctcagaatctgggca

SEQ ID NO: 5164583 - DNA, 25 bp, Homo sapien
aaggacatgttagggaaatatctgc

SEQ ID NO: 5164584 - DNA, 25 bp, Homo sapien
tacccacttgctgagggcgcagaag

SEQ ID NO: 5164585 - DNA, 25 bp, Homo sapien
caggcatcccaaacgcaatgaggca

SEQ ID NO: 5164586 - DNA, 25 bp, Homo sapien
ctgtatcagtgagaggcagcgccga

SEQ ID NO: 5164587 - DNA, 25 bp, Homo sapien
gagttcatcattggccgcgtcatca

SEQ ID NO: 5164588 - DNA, 25 bp, Homo sapien
ggccggaagtactgcgaacacgact

SEQ ID NO: 5164589 - DNA, 25 bp, Homo sapien
tccgtgctgtggatcctgcggtaag

SEQ ID NO: 5164590 - DNA, 25 bp, Homo sapien
tctgcgacccctttgcagtttgaag

SEQ ID NO: 5164591 - DNA, 25 bp, Homo sapien
gatgataggtggtttgcttgtcctc

SEQ ID NO: 5164592 - DNA, 25 bp, Homo sapien
ggaatattcacaccatggacactgg

SEQ ID NO: 5164593 - DNA, 25 bp, Homo sapien
tctgagagagctggatactcccaca

SEQ ID NO: 5164594 - DNA, 25 bp, Homo sapien
cagatcctcagtagacaccagtggc

SEQ ID NO: 5164595 - DNA, 25 bp, Homo sapien
acaggtcactgggtagggctatatc

SEQ ID NO: 5164596 - DNA, 25 bp, Homo sapien
ccagaagcagtggagtttcatttcc

SEQ ID NO: 5164597 - DNA, 25 bp, Homo sapien
tcatttccaccgtttcatgctgggt

SEQ ID NO: 5164598 - DNA, 25 bp, Homo sapien
gggcgagagttttcctgtcccagaa

SEQ ID NO: 5164599 - DNA, 25 bp, Homo sapien
tccatacacagggattgggccgggc

SEQ ID NO: 5164600 - DNA, 25 bp, Homo sapien
cctcaaatgacacagggatgacagt

SEQ ID NO: 5164601 - DNA, 25 bp, Homo sapien
caggcaatactactcgtcttagaga

SEQ ID NO: 5164602 - DNA, 25 bp, Homo sapien
tgacacagggatgacagtcagcctt

SEQ ID NO: 5164603 - DNA, 25 bp, Homo sapien
actgtgtagggcgttcctcgtccag

SEQ ID NO: 5164604 - DNA, 25 bp, Homo sapien
gaggcggctgaaggctttgaacttt

SEQ ID NO: 5164605 - DNA, 25 bp, Homo sapien
tgtgttgatattcggcaggtctctg

SEQ ID NO: 5164606 - DNA, 25 bp, Homo sapien
taactttggtctcgcaggaggcggc

SEQ ID NO: 5164607 - DNA, 25 bp, Homo sapien
ctgtgttttgccagttcccagtgcc

SEQ ID NO: 5164608 - DNA, 25 bp, Homo sapien
cccttgtccaagactcggtgctgct

SEQ ID NO: 5164609 - DNA, 25 bp, Homo sapien
tgttctcagtttcggccacaggcct

SEQ ID NO: 5164610 - DNA, 25 bp, Homo sapien
gtttggtgtcactctcgtgctctgg

SEQ ID NO: 5164611 - DNA, 25 bp, Homo sapien
cacaggcctggcaacatccttgact

SEQ ID NO: 5164612 - DNA, 25 bp, Homo sapien
catggggttgataaaggaagggttg

SEQ ID NO: 5164613 - DNA, 25 bp, Homo sapien
ttgataaaggaagggttgacaccca

SEQ ID NO: 5164614 - DNA, 25 bp, Homo sapien
cagcattaatagttggaaggcaggg

SEQ ID NO: 5164615 - DNA, 25 bp, Homo sapien
taccgtggcggtgatattgtgctag

SEQ ID NO: 5164616 - DNA, 25 bp, Homo sapien
gaaatgtcttatggcctcactgcgt

SEQ ID NO: 5164617 - DNA, 25 bp, Homo sapien
gaagtgacccttttgctgacggaaa

SEQ ID NO: 5164618 - DNA, 25 bp, Homo sapien
ggtgtccccaagtaccgtggtcgca

SEQ ID NO: 5164619 - DNA, 25 bp, Homo sapien
ggcgcccttgcggtctggctaagtc

SEQ ID NO: 5164620 - DNA, 25 bp, Homo sapien
tccttgttcggagtaggcgcccttg

SEQ ID NO: 5164621 - DNA, 25 bp, Homo sapien
tctgcggacttttgtggtgtcccca

SEQ ID NO: 5164622 - DNA, 25 bp, Homo sapien
tggcagaaaggaaaagctgcggctc

SEQ ID NO: 5164623 - DNA, 25 bp, Homo sapien
gcagaaaggaaaagctgcggctcac

SEQ ID NO: 5164624 - DNA, 25 bp, Homo sapien
cttggacaaggcggtggcagaaagg

SEQ ID NO: 5164625 - DNA, 25 bp, Homo sapien
tggacaaggcggtggcagaaaggaa

SEQ ID NO: 5164626 - DNA, 25 bp, Homo sapien
tccgccttctccgcggcgagcagcg

SEQ ID NO: 5164627 - DNA, 25 bp, Homo sapien
cacgtccagcgcaagcccgcgcggc

SEQ ID NO: 5164628 - DNA, 25 bp, Homo sapien
cgcgcccacgtccagcgcaagcccg

SEQ ID NO: 5164629 - DNA, 25 bp, Homo sapien
cagccactcctccgccggccggtcc

SEQ ID NO: 5164630 - DNA, 25 bp, Homo sapien
cagtgaccagagcagcgcgaacttg

SEQ ID NO: 5164631 - DNA, 25 bp, Homo sapien
gcagcagcaacaccggtgcgtagag

SEQ ID NO: 5164632 - DNA, 25 bp, Homo sapien
gacggcgcttcttcgcagcgcagca

SEQ ID NO: 5164633 - DNA, 25 bp, Homo sapien
gctaggccgaaacacagtgcagcca

SEQ ID NO: 5164634 - DNA, 25 bp, Homo sapien
cccggattagactcgcaggctgtta

SEQ ID NO: 5164635 - DNA, 25 bp, Homo sapien
tttcagagcgtgtgccaagtccagc

SEQ ID NO: 5164636 - DNA, 25 bp, Homo sapien
gtcgctaagctacatctaccactgg

SEQ ID NO: 5164637 - DNA, 25 bp, Homo sapien
tgatacccttctggattcgctgaca

SEQ ID NO: 5164638 - DNA, 25 bp, Homo sapien
ctatacaatgaggaataattcgagc

SEQ ID NO: 5164639 - DNA, 25 bp, Homo sapien
ccagatacaggtattccggatctag

SEQ ID NO: 5164640 - DNA, 25 bp, Homo sapien
ggatttccgaagagaccgttaagca

SEQ ID NO: 5164641 - DNA, 25 bp, Homo sapien
aattcgagcttgtagaaatccatgg

SEQ ID NO: 5164642 - DNA, 25 bp, Homo sapien
taactgctgaacctaaaatgaaggc

SEQ ID NO: 5164643 - DNA, 25 bp, Homo sapien
taccaaatctcagggcgggtagcct

SEQ ID NO: 5164644 - DNA, 25 bp, Homo sapien
tgatgtgcagtcaagcgcgaggacc

SEQ ID NO: 5164645 - DNA, 25 bp, Homo sapien
gacaccctgttaaggcaacactggg

SEQ ID NO: 5164646 - DNA, 25 bp, Homo sapien
gcatacatactagatgttgtgattt

SEQ ID NO: 5164647 - DNA, 25 bp, Homo sapien
ttaccttgaagctctactggacttg

SEQ ID NO: 5164648 - DNA, 25 bp, Homo sapien
gctctactggacttgacagatcaca

SEQ ID NO: 5164649 - DNA, 25 bp, Homo sapien
catactagatgttgtgatttgaagc

SEQ ID NO: 5164650 - DNA, 25 bp, Homo sapien
gtcctatggccaccttaacatttca

SEQ ID NO: 5164651 - DNA, 25 bp, Homo sapien
catttcattacattggcagcttcag

SEQ ID NO: 5164652 - DNA, 25 bp, Homo sapien
cagcttcagttttggcatcagtcaa

SEQ ID NO: 5164653 - DNA, 25 bp, Homo sapien
gagtttcaccactttgtctatgctg

SEQ ID NO: 5164654 - DNA, 25 bp, Homo sapien
tgtgtacagtttgtcagagaaaaac

SEQ ID NO: 5164655 - DNA, 25 bp, Homo sapien
ggacctcagggacagcagaacccag

SEQ ID NO: 5164656 - DNA, 25 bp, Homo sapien
tccaccccagggtggcatgcaagga

SEQ ID NO: 5164657 - DNA, 25 bp, Homo sapien
aacccagcaagagggccacatccat

SEQ ID NO: 5164658 - DNA, 25 bp, Homo sapien
gccccagggctctttaggacctcca

SEQ ID NO: 5164659 - DNA, 25 bp, Homo sapien
cccaggaattgcgagggcctccagg

SEQ ID NO: 5164660 - DNA, 25 bp, Homo sapien
ccccaggaattgcgagggcctccag

SEQ ID NO: 5164661 - DNA, 25 bp, Homo sapien
ccaggaattgcgagggcctccaggc

SEQ ID NO: 5164662 - DNA, 25 bp, Homo sapien
caggaattgcgagggcctccaggct

SEQ ID NO: 5164663 - DNA, 25 bp, Homo sapien
gtggactactgggacacggccctca

SEQ ID NO: 5164664 - DNA, 25 bp, Homo sapien
cctccaggtggactactgggacacg

SEQ ID NO: 5164665 - DNA, 25 bp, Homo sapien
tccaccccaaggatcaatgctggga

SEQ ID NO: 5164666 - DNA, 25 bp, Homo sapien
tcctcaggagatccgaggcatgcag

SEQ ID NO: 5164667 - DNA, 25 bp, Homo sapien
gattgaatccaagaggaatgcaggg

SEQ ID NO: 5164668 - DNA, 25 bp, Homo sapien
ctgatgggattgaatccaagaggaa

SEQ ID NO: 5164669 - DNA, 25 bp, Homo sapien
ggattgaatccaagaggaatgcagg

SEQ ID NO: 5164670 - DNA, 25 bp, Homo sapien
atgggattgaatccaagaggaatgc

SEQ ID NO: 5164671 - DNA, 25 bp, Homo sapien
gtactcaaggtatgcagggaccacc

SEQ ID NO: 5164672 - DNA, 25 bp, Homo sapien
tagttctggtcctcaaggtcatatg

SEQ ID NO: 5164673 - DNA, 25 bp, Homo sapien
tgcagaggcatcctggacctcatgg

SEQ ID NO: 5164674 - DNA, 25 bp, Homo sapien
tcctcatgggatccaaggcggacca

SEQ ID NO: 5164675 - DNA, 25 bp, Homo sapien
cttcttggttctgcgttttcttcct

SEQ ID NO: 5164676 - DNA, 25 bp, Homo sapien
tcttggttctgcgttttcttcctta

SEQ ID NO: 5164677 - DNA, 25 bp, Homo sapien
gggatctcgcaacctggcttcgtta

SEQ ID NO: 5164678 - DNA, 25 bp, Homo sapien
ctctctgggaaggatcgatagcaca

SEQ ID NO: 5164679 - DNA, 25 bp, Homo sapien
taagggtgagaaaccttcactccgc

SEQ ID NO: 5164680 - DNA, 25 bp, Homo sapien
tgccatatggaagcctgagatctgt

SEQ ID NO: 5164681 - DNA, 25 bp, Homo sapien
caagtcctcatttaatctgtttttc

SEQ ID NO: 5164682 - DNA, 25 bp, Homo sapien
tgggcttatgcgatccacctgagct

SEQ ID NO: 5164683 - DNA, 25 bp, Homo sapien
actcctaggctaagagattttccca

SEQ ID NO: 5164684 - DNA, 25 bp, Homo sapien
cttatgcgatccacctgagctttct

SEQ ID NO: 5164685 - DNA, 25 bp, Homo sapien
ggctaagagattttcccatcttggc

SEQ ID NO: 5164686 - DNA, 25 bp, Homo sapien
tggatgaacaagtgatagctctggt

SEQ ID NO: 5164687 - DNA, 25 bp, Homo sapien
tcttggatgagtaatgtgtcagcag

SEQ ID NO: 5164688 - DNA, 25 bp, Homo sapien
tcagcagtaaggtaggaatcttggg

SEQ ID NO: 5164689 - DNA, 25 bp, Homo sapien
ggccggtgcctagactgtttcatca

SEQ ID NO: 5164690 - DNA, 25 bp, Homo sapien
aagtcctttaaaagggctatgcgtg

SEQ ID NO: 5164691 - DNA, 25 bp, Homo sapien
ttcaacagatatgaacttagaattg

SEQ ID NO: 5164692 - DNA, 25 bp, Homo sapien
tgtttaaacaaagctgtcatgattt

SEQ ID NO: 5164693 - DNA, 25 bp, Homo sapien
tctataaatatgactacttgtttaa

SEQ ID NO: 5164694 - DNA, 25 bp, Homo sapien
tgagtgaaaggtcattcccaaagta

SEQ ID NO: 5164695 - DNA, 25 bp, Homo sapien
tgcacgcgcaggcttggagaaagcc

SEQ ID NO: 5164696 - DNA, 25 bp, Homo sapien
caatacaggcaaccttttgagctaa

SEQ ID NO: 5164697 - DNA, 25 bp, Homo sapien
tgtgagacaagtatgcagagagtgc

SEQ ID NO: 5164698 - DNA, 25 bp, Homo sapien
gtcacattgagggagtttactcact

SEQ ID NO: 5164699 - DNA, 25 bp, Homo sapien
ccaagggtggaagtgacatgttcaa

SEQ ID NO: 5164700 - DNA, 25 bp, Homo sapien
taagaatagggaacctgtcacattg

SEQ ID NO: 5164701 - DNA, 25 bp, Homo sapien
cactattagtcttggctgttaaaca

SEQ ID NO: 5164702 - DNA, 25 bp, Homo sapien
tctttatggaaacatcatccactgt

SEQ ID NO: 5164703 - DNA, 25 bp, Homo sapien
caaatacaagcctgaagaattgctg

SEQ ID NO: 5164704 - DNA, 25 bp, Homo sapien
gttggatgaacatgcttctgctttg

SEQ ID NO: 5164705 - DNA, 25 bp, Homo sapien
taaggttgtgccacccatgtgtggg

SEQ ID NO: 5164706 - DNA, 25 bp, Homo sapien
taaactagaagttagatctagagag

SEQ ID NO: 5164707 - DNA, 25 bp, Homo sapien
aaaaatacttcatagaggccaggtg

SEQ ID NO: 5164708 - DNA, 25 bp, Homo sapien
aaaaatgctgggtttggtggcctgc

SEQ ID NO: 5164709 - DNA, 25 bp, Homo sapien
ctagagaggtttgactaaatttggg

SEQ ID NO: 5164710 - DNA, 25 bp, Homo sapien
attccacctgtggccggagcccctt

SEQ ID NO: 5164711 - DNA, 25 bp, Homo sapien
ctgtggccggagccccttccaggag

SEQ ID NO: 5164712 - DNA, 25 bp, Homo sapien
tctgccagatttttaaattccacct

SEQ ID NO: 5164713 - DNA, 25 bp, Homo sapien
tccaggaggctttcgcttttagctc

SEQ ID NO: 5164714 - DNA, 25 bp, Homo sapien
gggtcaccattgcttcaggcacagg

SEQ ID NO: 5164715 - DNA, 25 bp, Homo sapien
agggtcaccattgcttcaggcacag

SEQ ID NO: 5164716 - DNA, 25 bp, Homo sapien
caaaaattcccctcatgacttggtt

SEQ ID NO: 5164717 - DNA, 25 bp, Homo sapien
gccagctctttgtgagcacgttgaa

SEQ ID NO: 5164718 - DNA, 25 bp, Homo sapien
cgttgaagacgtgctatagtacctt

SEQ ID NO: 5164719 - DNA, 25 bp, Homo sapien
ccagctaaatccaattaatgaggtc

SEQ ID NO: 5164720 - DNA, 25 bp, Homo sapien
cctgtactcctaggaagaattttgg

SEQ ID NO: 5164721 - DNA, 25 bp, Homo sapien
gaatatggtgcagtggtaaacctac

SEQ ID NO: 5164722 - DNA, 25 bp, Homo sapien
tatgctagttgtacctcttgtggca

SEQ ID NO: 5164723 - DNA, 25 bp, Homo sapien
ccttgaccgggagaagataaaatat

SEQ ID NO: 5164724 - DNA, 25 bp, Homo sapien
aggaactgggagaatcgacctcggg

SEQ ID NO: 5164725 - DNA, 25 bp, Homo sapien
cctgggcacaggttggaggaactgg

SEQ ID NO: 5164726 - DNA, 25 bp, Homo sapien
aggcagcggcactctccgccatttt

SEQ ID NO: 5164727 - DNA, 25 bp, Homo sapien
acacgggactgctcgcctgcagcag

SEQ ID NO: 5164728 - DNA, 25 bp, Homo sapien
gaaggcgaacgcttcgctggccatt

SEQ ID NO: 5164729 - DNA, 25 bp, Homo sapien
gagaccaaacaagagagacatttct

SEQ ID NO: 5164730 - DNA, 25 bp, Homo sapien
ggctctgaaggcgaacgcttcgctg

SEQ ID NO: 5164731 - DNA, 25 bp, Homo sapien
gaacgcttcgctggccatttaggag

SEQ ID NO: 5164732 - DNA, 25 bp, Homo sapien
gcgccgtcccgccagtgcgtgatga

SEQ ID NO: 5164733 - DNA, 25 bp, Homo sapien
accccagagcgtgcgttcggtggcc

SEQ ID NO: 5164734 - DNA, 25 bp, Homo sapien
ccgccagtgcgtgatgaccccagag

SEQ ID NO: 5164735 - DNA, 25 bp, Homo sapien
agtgcgtgatgaccccagagcgtgc

SEQ ID NO: 5164736 - DNA, 25 bp, Homo sapien
taggcacatgcgcagatcgaacctc

SEQ ID NO: 5164737 - DNA, 25 bp, Homo sapien
ggcacatgcgcagatcgaacctcac

SEQ ID NO: 5164738 - DNA, 25 bp, Homo sapien
aggcacatgcgcagatcgaacctca

SEQ ID NO: 5164739 - DNA, 25 bp, Homo sapien
ctaggcacatgcgcagatcgaacct

SEQ ID NO: 5164740 - DNA, 25 bp, Homo sapien
taagcgaggcgtaatctagaggcac

SEQ ID NO: 5164741 - DNA, 25 bp, Homo sapien
gactcagcaaggtgccacagtggct

SEQ ID NO: 5164742 - DNA, 25 bp, Homo sapien
tgcctttggtggacgtatgcactca

SEQ ID NO: 5164743 - DNA, 25 bp, Homo sapien
ccagctagctgcacgggtgaacaga

SEQ ID NO: 5164744 - DNA, 25 bp, Homo sapien
cattagtctgagctactagggaggc

SEQ ID NO: 5164745 - DNA, 25 bp, Homo sapien
gtgtcctggtacaggtcattagtct

SEQ ID NO: 5164746 - DNA, 25 bp, Homo sapien
ttatgatcaccctgggtgagagacc

SEQ ID NO: 5164747 - DNA, 25 bp, Homo sapien
gtgagttatgatcaccctgggtgag

SEQ ID NO: 5164748 - DNA, 25 bp, Homo sapien
cccacaagagcagcagtgataacag

SEQ ID NO: 5164749 - DNA, 25 bp, Homo sapien
actgagatcaaagagaatttcagca

SEQ ID NO: 5164750 - DNA, 25 bp, Homo sapien
cattaatcaaacgtcgatcccccaa

SEQ ID NO: 5164751 - DNA, 25 bp, Homo sapien
cactgagatcaaagagaatttcagc

SEQ ID NO: 5164752 - DNA, 25 bp, Homo sapien
taagatttattagacctgaggcatg

SEQ ID NO: 5164753 - DNA, 25 bp, Homo sapien
ttcaatgtatcaattgggtgggagg

SEQ ID NO: 5164754 - DNA, 25 bp, Homo sapien
gaatttctgacctctagcagtccac

SEQ ID NO: 5164755 - DNA, 25 bp, Homo sapien
acctgtttccgcctcccaaatgctg

SEQ ID NO: 5164756 - DNA, 25 bp, Homo sapien
tgcatgtcattcttgggcagtggcc

SEQ ID NO: 5164757 - DNA, 25 bp, Homo sapien
gcatgtcattcttgggcagtggcca

SEQ ID NO: 5164758 - DNA, 25 bp, Homo sapien
ttgggcagtggccatgctgtcttct

SEQ ID NO: 5164759 - DNA, 25 bp, Homo sapien
tcattcttgggcagtggccatgctg

SEQ ID NO: 5164760 - DNA, 25 bp, Homo sapien
gtatgaacttgtgatccaaggaaaa

SEQ ID NO: 5164761 - DNA, 25 bp, Homo sapien
cttgcttgactctgtatgaacttgt

SEQ ID NO: 5164762 - DNA, 25 bp, Homo sapien
gactctgtatgaacttgtgatccaa

SEQ ID NO: 5164763 - DNA, 25 bp, Homo sapien
taaaatcaggatggttttatgtttg

SEQ ID NO: 5164764 - DNA, 25 bp, Homo sapien
tatgaactgtggttgttgtgtgccc

SEQ ID NO: 5164765 - DNA, 25 bp, Homo sapien
tcatttgaaacgtagaggccgcagc

SEQ ID NO: 5164766 - DNA, 25 bp, Homo sapien
aaagaggtccacaaccaggtgtgca

SEQ ID NO: 5164767 - DNA, 25 bp, Homo sapien
caagtgctaagtattgtggagccca

SEQ ID NO: 5164768 - DNA, 25 bp, Homo sapien
tgatagtaaacagacccatagcaca

SEQ ID NO: 5164769 - DNA, 25 bp, Homo sapien
taagatcctgcaggaacgtaaggga

SEQ ID NO: 5164770 - DNA, 25 bp, Homo sapien
gaaggtcgccgtatattatgaaaag

SEQ ID NO: 5164771 - DNA, 25 bp, Homo sapien
tatgaatggttcctactctaaggga

SEQ ID NO: 5164772 - DNA, 25 bp, Homo sapien
tgggatcacaagcgcccaccaccat

SEQ ID NO: 5164773 - DNA, 25 bp, Homo sapien
caagcgcccaccaccatgcccggct

SEQ ID NO: 5164774 - DNA, 25 bp, Homo sapien
gggatcacaagcgcccaccaccatg

SEQ ID NO: 5164775 - DNA, 25 bp, Homo sapien
gactcaggagtcgaccaagggaaac

SEQ ID NO: 5164776 - DNA, 25 bp, Homo sapien
cacggtcgcctcatgaaagtgtgta

SEQ ID NO: 5164777 - DNA, 25 bp, Homo sapien
aagcggtctagaagtgtacggtcac

SEQ ID NO: 5164778 - DNA, 25 bp, Homo sapien
gagttcgtttcatccctagctgtga

SEQ ID NO: 5164779 - DNA, 25 bp, Homo sapien
tggtgtggctttccgaaatgggcaa

SEQ ID NO: 5164780 - DNA, 25 bp, Homo sapien
cagcctgctacgtttcccttggcaa

SEQ ID NO: 5164781 - DNA, 25 bp, Homo sapien
ggtttgctccacaccgtcctgtgct

SEQ ID NO: 5164782 - DNA, 25 bp, Homo sapien
gctgttctaggcatcgctggcaagt

SEQ ID NO: 5164783 - DNA, 25 bp, Homo sapien
ggcactgctaaaatgattcacaggg

SEQ ID NO: 5164784 - DNA, 25 bp, Homo sapien
tacaggacattaggaaacagttgtg

SEQ ID NO: 5164785 - DNA, 25 bp, Homo sapien
tgatttccaaatcgctgtcagcaat

SEQ ID NO: 5164786 - DNA, 25 bp, Homo sapien
tatcttgcctgacatgctgggaatc

SEQ ID NO: 5164787 - DNA, 25 bp, Homo sapien
tgtctgacctatcaaaagaaagcct

SEQ ID NO: 5164788 - DNA, 25 bp, Homo sapien
aagaaagccttgagccacctcgaag

SEQ ID NO: 5164789 - DNA, 25 bp, Homo sapien
cttttgcccagccagacacatgagt

SEQ ID NO: 5164790 - DNA, 25 bp, Homo sapien
aaaaaatgattcttcccaactgcag

SEQ ID NO: 5164791 - DNA, 25 bp, Homo sapien
gagtagctcaattctctagtagtgg

SEQ ID NO: 5164792 - DNA, 25 bp, Homo sapien
gtctcctcccggcatagcaagatgg

SEQ ID NO: 5164793 - DNA, 25 bp, Homo sapien
ggcgtgctgtccagtaattcttcag

SEQ ID NO: 5164794 - DNA, 25 bp, Homo sapien
cttcgagactaaggatggatgaccc

SEQ ID NO: 5164795 - DNA, 25 bp, Homo sapien
aggactcgggtcccggctcgactca

SEQ ID NO: 5164796 - DNA, 25 bp, Homo sapien
ctcgggtcccggctcgactcagtcc

SEQ ID NO: 5164797 - DNA, 25 bp, Homo sapien
gactcgggtcccggctcgactcagt

SEQ ID NO: 5164798 - DNA, 25 bp, Homo sapien
gaggactcgggtcccggctcgactc

SEQ ID NO: 5164799 - DNA, 25 bp, Homo sapien
gcctgaaactcggtcccacgaatgg

SEQ ID NO: 5164800 - DNA, 25 bp, Homo sapien
ccaataaagcgcacggatggaggcc

SEQ ID NO: 5164801 - DNA, 25 bp, Homo sapien
tcggtcccacgaatggcaggcagcg

SEQ ID NO: 5164802 - DNA, 25 bp, Homo sapien
tgatctctatggtttccgcggctcg

SEQ ID NO: 5164803 - DNA, 25 bp, Homo sapien
tagtcggctcgatttaaggctggta

SEQ ID NO: 5164804 - DNA, 25 bp, Homo sapien
gctcgagagcgaaagacacagatgg

SEQ ID NO: 5164805 - DNA, 25 bp, Homo sapien
gaagcctttgcactgctagagctga

SEQ ID NO: 5164806 - DNA, 25 bp, Homo sapien
cacagtaggtattccgctgaagcca

SEQ ID NO: 5164807 - DNA, 25 bp, Homo sapien
ttcagggcctagcagtttattttag

SEQ ID NO: 5164808 - DNA, 25 bp, Homo sapien
cagggcctagcagtttattttagcc

SEQ ID NO: 5164809 - DNA, 25 bp, Homo sapien
gcagtttattttagccataagggta

SEQ ID NO: 5164810 - DNA, 25 bp, Homo sapien
gcctagcagtttattttagccataa

SEQ ID NO: 5164811 - DNA, 25 bp, Homo sapien
catggggccgtattttaatacaaga

SEQ ID NO: 5164812 - DNA, 25 bp, Homo sapien
gagcatggggccgtattttaataca

SEQ ID NO: 5164813 - DNA, 25 bp, Homo sapien
tttaatacaagaaagacattgctct

SEQ ID NO: 5164814 - DNA, 25 bp, Homo sapien
aatacaagaaagacattgctctaga

SEQ ID NO: 5164815 - DNA, 25 bp, Homo sapien
tcctgggagcaatagactaaggcct

SEQ ID NO: 5164816 - DNA, 25 bp, Homo sapien
tgcttgcttatgtgaggtgacctca

SEQ ID NO: 5164817 - DNA, 25 bp, Homo sapien
gtgtcctcaacagcagataagcgta

SEQ ID NO: 5164818 - DNA, 25 bp, Homo sapien
tagaaactggcaaccgtgtcctcaa

SEQ ID NO: 5164819 - DNA, 25 bp, Homo sapien
gcccggccattactacatattctta

SEQ ID NO: 5164820 - DNA, 25 bp, Homo sapien
gatcatgcagaagccttgaaccacc

SEQ ID NO: 5164821 - DNA, 25 bp, Homo sapien
cataagggaggcagacaatttgttt

SEQ ID NO: 5164822 - DNA, 25 bp, Homo sapien
caagtatattatctgcccgctgctt

SEQ ID NO: 5164823 - DNA, 25 bp, Homo sapien
tacctttgacgtgcccaagtggaca

SEQ ID NO: 5164824 - DNA, 25 bp, Homo sapien
taacatccctatgaggcaggaatgc

SEQ ID NO: 5164825 - DNA, 25 bp, Homo sapien
cagaagaatgtgtatgcccagtata

SEQ ID NO: 5164826 - DNA, 25 bp, Homo sapien
caacattctaatgctcacgaggctc

SEQ ID NO: 5164827 - DNA, 25 bp, Homo sapien
taaaatgcttggttacagagtagcc

SEQ ID NO: 5164828 - DNA, 25 bp, Homo sapien
tgtccgtgaattcaagagcaggcaa

SEQ ID NO: 5164829 - DNA, 25 bp, Homo sapien
taatgttgaacgaaacagaccagac

SEQ ID NO: 5164830 - DNA, 25 bp, Homo sapien
cagaccagacccaaaggagtatgta

SEQ ID NO: 5164831 - DNA, 25 bp, Homo sapien
ttgccccatcgcgtctgcacatcaa

SEQ ID NO: 5164832 - DNA, 25 bp, Homo sapien
tcgttgccccatcgcgtctgcacat

SEQ ID NO: 5164833 - DNA, 25 bp, Homo sapien
gccccatcgcgtctgcacatcaagg

SEQ ID NO: 5164834 - DNA, 25 bp, Homo sapien
catcgcgtctgcacatcaaggcctc

SEQ ID NO: 5164835 - DNA, 25 bp, Homo sapien
caggtagaggcacgatgactgctca

SEQ ID NO: 5164836 - DNA, 25 bp, Homo sapien
gaaggtctcgtgtctaaatcgggca

SEQ ID NO: 5164837 - DNA, 25 bp, Homo sapien
aatggattacatggtcttggaggcc

SEQ ID NO: 5164838 - DNA, 25 bp, Homo sapien
cagaagttaagatcgctgccctaag

SEQ ID NO: 5164839 - DNA, 25 bp, Homo sapien
tagatcagggtgaccacaactgtgg

SEQ ID NO: 5164840 - DNA, 25 bp, Homo sapien
gaggtgcaactaccaggtcatattg

SEQ ID NO: 5164841 - DNA, 25 bp, Homo sapien
actgtggtcaaagatctcccttgag

SEQ ID NO: 5164842 - DNA, 25 bp, Homo sapien
tgggataagtgtccagaggtgcaac

SEQ ID NO: 5164843 - DNA, 25 bp, Homo sapien
ccaggagttctagaagcaaggcttc

SEQ ID NO: 5164844 - DNA, 25 bp, Homo sapien
aaatccaggcctcctgacgtgaagg

SEQ ID NO: 5164845 - DNA, 25 bp, Homo sapien
agagagtgactagcatcggcaggcc

SEQ ID NO: 5164846 - DNA, 25 bp, Homo sapien
tctccgtagcgaacagtggccattt

SEQ ID NO: 5164847 - DNA, 25 bp, Homo sapien
ccaggtgtctcttgggttaagatca

SEQ ID NO: 5164848 - DNA, 25 bp, Homo sapien
aatcattgttatccctgcaacatag

SEQ ID NO: 5164849 - DNA, 25 bp, Homo sapien
tcattgttatccctgcaacatagaa

SEQ ID NO: 5164850 - DNA, 25 bp, Homo sapien
atcattgttatccctgcaacataga

SEQ ID NO: 5164851 - DNA, 25 bp, Homo sapien
agtggctcatgcagactccatctca

SEQ ID NO: 5164852 - DNA, 25 bp, Homo sapien
tatcatgcaacttacccattgtaag

SEQ ID NO: 5164853 - DNA, 25 bp, Homo sapien
ggtgtactcattggtactacaaaac

SEQ ID NO: 5164854 - DNA, 25 bp, Homo sapien
ggcaatcattatactcaccatgttg

SEQ ID NO: 5164855 - DNA, 25 bp, Homo sapien
tatctagtggattcctgcaggcccc

SEQ ID NO: 5164856 - DNA, 25 bp, Homo sapien
ccttagttcccgtgtgaaagcagag

SEQ ID NO: 5164857 - DNA, 25 bp, Homo sapien
tccaagggcgtgaaaggatcagagc

SEQ ID NO: 5164858 - DNA, 25 bp, Homo sapien
tcataagtgactccggatgcatcag

SEQ ID NO: 5164859 - DNA, 25 bp, Homo sapien
cctgtattggtctttatactctact

SEQ ID NO: 5164860 - DNA, 25 bp, Homo sapien
ttccgcctccaaatattcccagtta

SEQ ID NO: 5164861 - DNA, 25 bp, Homo sapien
cgcctccaaatattcccagttaaat

SEQ ID NO: 5164862 - DNA, 25 bp, Homo sapien
agtctgttgaatgttgttacctgta

SEQ ID NO: 5164863 - DNA, 25 bp, Homo sapien
ttaggtcctttccattgtacttgga

SEQ ID NO: 5164864 - DNA, 25 bp, Homo sapien
gtttgaattttgacctaacatatgg

SEQ ID NO: 5164865 - DNA, 25 bp, Homo sapien
ggaaaagatctttagtttggattca

SEQ ID NO: 5164866 - DNA, 25 bp, Homo sapien
tagtttggattcagactttatgaat

SEQ ID NO: 5164867 - DNA, 25 bp, Homo sapien
ccgatgcggacagatcacctaaggc

SEQ ID NO: 5164868 - DNA, 25 bp, Homo sapien
agctggacatggtgggggccgcctg

SEQ ID NO: 5164869 - DNA, 25 bp, Homo sapien
gctggacatggtgggggccgcctgt

SEQ ID NO: 5164870 - DNA, 25 bp, Homo sapien
aggccgatgcggacagatcacctaa

SEQ ID NO: 5164871 - DNA, 25 bp, Homo sapien
tgccatgaggtaccaaagtctccct

SEQ ID NO: 5164872 - DNA, 25 bp, Homo sapien
ggcactcagactggctttatttgca

SEQ ID NO: 5164873 - DNA, 25 bp, Homo sapien
cagcaggtgcagaaatagggtgagc

SEQ ID NO: 5164874 - DNA, 25 bp, Homo sapien
atttgcagtagtcaatctgtggcac

SEQ ID NO: 5164875 - DNA, 25 bp, Homo sapien
tgcagccacagtagcacctattttg

SEQ ID NO: 5164876 - DNA, 25 bp, Homo sapien
tcagtactggcacgccagtggctgc

SEQ ID NO: 5164877 - DNA, 25 bp, Homo sapien
ccctggacgcagtggataatgttct

SEQ ID NO: 5164878 - DNA, 25 bp, Homo sapien
ctattttggcaaccaacaccattcc

SEQ ID NO: 5164879 - DNA, 25 bp, Homo sapien
taaggaccaccagtgaggccaaggt

SEQ ID NO: 5164880 - DNA, 25 bp, Homo sapien
tctgtttttacaggctggagacgcg

SEQ ID NO: 5164881 - DNA, 25 bp, Homo sapien
ggtctccagatcacataggccctta

SEQ ID NO: 5164882 - DNA, 25 bp, Homo sapien
cacactaaggacatggactcggctg

SEQ ID NO: 5164883 - DNA, 25 bp, Homo sapien
tgttcataaggctacaatatccaga

SEQ ID NO: 5164884 - DNA, 25 bp, Homo sapien
agtgcccatattgaccttgttaaga

SEQ ID NO: 5164885 - DNA, 25 bp, Homo sapien
gatgtccatcaggagaatccagtgc

SEQ ID NO: 5164886 - DNA, 25 bp, Homo sapien
gctgctatcttacactgggagactg

SEQ ID NO: 5164887 - DNA, 25 bp, Homo sapien
caggtcgctgtggattggtcctggg

SEQ ID NO: 5164888 - DNA, 25 bp, Homo sapien
caggttcgggggaagaggactgcga

SEQ ID NO: 5164889 - DNA, 25 bp, Homo sapien
ggcctccactgacgcgtcgggcgtg

SEQ ID NO: 5164890 - DNA, 25 bp, Homo sapien
attggctggcagtcggcgggagggt

SEQ ID NO: 5164891 - DNA, 25 bp, Homo sapien
aaatgtggcctcaaaagatatggct

SEQ ID NO: 5164892 - DNA, 25 bp, Homo sapien
tcttctacaggtgcataaactccaa

SEQ ID NO: 5164893 - DNA, 25 bp, Homo sapien
ctttataatccggaaagcgcgcgca

SEQ ID NO: 5164894 - DNA, 25 bp, Homo sapien
caagcagttgtcttacacagctgtg

SEQ ID NO: 5164895 - DNA, 25 bp, Homo sapien
cagaacccaaagccatagaggccat

SEQ ID NO: 5164896 - DNA, 25 bp, Homo sapien
ctacagaacccaaagccatagaggc

SEQ ID NO: 5164897 - DNA, 25 bp, Homo sapien
acagaacccaaagccatagaggcca

SEQ ID NO: 5164898 - DNA, 25 bp, Homo sapien
tacagaacccaaagccatagaggcc

SEQ ID NO: 5164899 - DNA, 25 bp, Homo sapien
ccagagcaggaccactacccttgag

SEQ ID NO: 5164900 - DNA, 25 bp, Homo sapien
cttctggctggtgcatggcagtcct

SEQ ID NO: 5164901 - DNA, 25 bp, Homo sapien
atggcagtcctgaggtcatggcact

SEQ ID NO: 5164902 - DNA, 25 bp, Homo sapien
tctggctggtgcatggcagtcctga

SEQ ID NO: 5164903 - DNA, 25 bp, Homo sapien
catggcagtcctgaggtcatggcac

SEQ ID NO: 5164904 - DNA, 25 bp, Homo sapien
cggcgatcggcttcttgggtggcct

SEQ ID NO: 5164905 - DNA, 25 bp, Homo sapien
aacggcgatcggcttcttgggtggc

SEQ ID NO: 5164906 - DNA, 25 bp, Homo sapien
cgatcggcttcttgggtggccttgt

SEQ ID NO: 5164907 - DNA, 25 bp, Homo sapien
ctaacggcgatcggcttcttgggtg

SEQ ID NO: 5164908 - DNA, 25 bp, Homo sapien
gtaactggctgtgatcaattggttg

SEQ ID NO: 5164909 - DNA, 25 bp, Homo sapien
tggctgtgatcaattggttgtaaac

SEQ ID NO: 5164910 - DNA, 25 bp, Homo sapien
tggagaaggaacaaataaatctgta

SEQ ID NO: 5164911 - DNA, 25 bp, Homo sapien
ggctagtcaagagatgcagtggaag

SEQ ID NO: 5164912 - DNA, 25 bp, Homo sapien
agtgagaggccgacacgcgcctttc

SEQ ID NO: 5164913 - DNA, 25 bp, Homo sapien
tggtcagtccgccacagtgccagag

SEQ ID NO: 5164914 - DNA, 25 bp, Homo sapien
agtgccagagacaacgccagggcag

SEQ ID NO: 5164915 - DNA, 25 bp, Homo sapien
aacacccagcctcgcaaagcaattg

SEQ ID NO: 5164916 - DNA, 25 bp, Homo sapien
cgctcgcgtctcccttgcagcccat

SEQ ID NO: 5164917 - DNA, 25 bp, Homo sapien
tgtcaccggcagcgcacccgcggca

SEQ ID NO: 5164918 - DNA, 25 bp, Homo sapien
accggcagcgcacccgcggcacacg

SEQ ID NO: 5164919 - DNA, 25 bp, Homo sapien
ctgtcaccggcagcgcacccgcggc

SEQ ID NO: 5164920 - DNA, 25 bp, Homo sapien
tcaccggcagcgcacccgcggcaca

SEQ ID NO: 5164921 - DNA, 25 bp, Homo sapien
agaagaccactgagggcaactcggg

SEQ ID NO: 5164922 - DNA, 25 bp, Homo sapien
tagaggcggaagctcaatgtgacag

SEQ ID NO: 5164923 - DNA, 25 bp, Homo sapien
taaactgagtcacggtagaggcgga

SEQ ID NO: 5164924 - DNA, 25 bp, Homo sapien
ggaagggataggacaccagagggta

SEQ ID NO: 5164925 - DNA, 25 bp, Homo sapien
tcaactcactgaggatcaagcttgg

SEQ ID NO: 5164926 - DNA, 25 bp, Homo sapien
gttcaagaccgctgaacagagcccg

SEQ ID NO: 5164927 - DNA, 25 bp, Homo sapien
taaatccatggtaggatacctcccc

SEQ ID NO: 5164928 - DNA, 25 bp, Homo sapien
aaagcacgtcgttctgcaatcaggg

SEQ ID NO: 5164929 - DNA, 25 bp, Homo sapien
cagtggccacagttcttgggagaca

SEQ ID NO: 5164930 - DNA, 25 bp, Homo sapien
gatccacacttacgctggctttggg

SEQ ID NO: 5164931 - DNA, 25 bp, Homo sapien
taaaaagccatactctgtgcagact

SEQ ID NO: 5164932 - DNA, 25 bp, Homo sapien
tgagaaccaaggcaagtccaaggat

SEQ ID NO: 5164933 - DNA, 25 bp, Homo sapien
taaaaataagtgaaagctcgaagat

SEQ ID NO: 5164934 - DNA, 25 bp, Homo sapien
tggagacagcgcatcatatgaactg

SEQ ID NO: 5164935 - DNA, 25 bp, Homo sapien
tagatgtgtacaccccagaaagtgg

SEQ ID NO: 5164936 - DNA, 25 bp, Homo sapien
tgatgacgaattggacgccactgca

SEQ ID NO: 5164937 - DNA, 25 bp, Homo sapien
tcgtttaccaaagtgcacagcatga

SEQ ID NO: 5164938 - DNA, 25 bp, Homo sapien
acagtgagtacaaccagaactccca

SEQ ID NO: 5164939 - DNA, 25 bp, Homo sapien
aacagtgagtacaaccagaactccc

SEQ ID NO: 5164940 - DNA, 25 bp, Homo sapien
gaacagtgagtacaaccagaactcc

SEQ ID NO: 5164941 - DNA, 25 bp, Homo sapien
cagtgagtacaaccagaactcccat

SEQ ID NO: 5164942 - DNA, 25 bp, Homo sapien
tgtaatggcttttgagtcggccttt

SEQ ID NO: 5164943 - DNA, 25 bp, Homo sapien
gtaatggcttttgagtcggccttta

SEQ ID NO: 5164944 - DNA, 25 bp, Homo sapien
tttaatgataatcaagtcctatctt

SEQ ID NO: 5164945 - DNA, 25 bp, Homo sapien
gttattaataacttagcctatgaat

SEQ ID NO: 5164946 - DNA, 25 bp, Homo sapien
caagtcctatcttattagttattaa

SEQ ID NO: 5164947 - DNA, 25 bp, Homo sapien
aatgtccatagtttgacttttaatc

SEQ ID NO: 5164948 - DNA, 25 bp, Homo sapien
gatgatccaatattttgactggctt

SEQ ID NO: 5164949 - DNA, 25 bp, Homo sapien
cttgactgtcttctgctaaaaactc

SEQ ID NO: 5164950 - DNA, 25 bp, Homo sapien
tctcttgactgtcttctgctaaaaa

SEQ ID NO: 5164951 - DNA, 25 bp, Homo sapien
tgatctgatgatccaatattttgac

SEQ ID NO: 5164952 - DNA, 25 bp, Homo sapien
aactccagtcattaaagacaacaat

SEQ ID NO: 5164953 - DNA, 25 bp, Homo sapien
gccacacatactataaagagacaat

SEQ ID NO: 5164954 - DNA, 25 bp, Homo sapien
tccattaactgccatgccacacata

SEQ ID NO: 5164955 - DNA, 25 bp, Homo sapien
gacaacaatgttttccattaactgc

SEQ ID NO: 5164956 - DNA, 25 bp, Homo sapien
ctgagtaagaacgaagggacagaca

SEQ ID NO: 5164957 - DNA, 25 bp, Homo sapien
gagtaagaacgaagggacagacaaa

SEQ ID NO: 5164958 - DNA, 25 bp, Homo sapien
tccaatattgcatgatagtaggaat

SEQ ID NO: 5164959 - DNA, 25 bp, Homo sapien
gcatgatagtaggaataatcggtac

SEQ ID NO: 5164960 - DNA, 25 bp, Homo sapien
agggtatcagattcacaagtcttct

SEQ ID NO: 5164961 - DNA, 25 bp, Homo sapien
aaaaacgaattacatccttctggtg

SEQ ID NO: 5164962 - DNA, 25 bp, Homo sapien
ctggtggaggttcatcagctgctat

SEQ ID NO: 5164963 - DNA, 25 bp, Homo sapien
cagtagaagagcctcaagggtatca

SEQ ID NO: 5164964 - DNA, 25 bp, Homo sapien
ctcagagccaatctcagagtagaaa

SEQ ID NO: 5164965 - DNA, 25 bp, Homo sapien
ctttttgatataagctggcggtgaa

SEQ ID NO: 5164966 - DNA, 25 bp, Homo sapien
tgtgatctcctttgaacaataaagg

SEQ ID NO: 5164967 - DNA, 25 bp, Homo sapien
acagggctttcaggattagacgagg

SEQ ID NO: 5164968 - DNA, 25 bp, Homo sapien
gagggagaatcaaaaactggacttc

SEQ ID NO: 5164969 - DNA, 25 bp, Homo sapien
cagagggagaatcaaaaactggact

SEQ ID NO: 5164970 - DNA, 25 bp, Homo sapien
gaatcaaaaactggacttcaataaa

SEQ ID NO: 5164971 - DNA, 25 bp, Homo sapien
ggagaatcaaaaactggacttcaat

SEQ ID NO: 5164972 - DNA, 25 bp, Homo sapien
cctttacatgttgtaggctgccaca

SEQ ID NO: 5164973 - DNA, 25 bp, Homo sapien
aatttaaatgccttcgagcggagct

SEQ ID NO: 5164974 - DNA, 25 bp, Homo sapien
gctgaaagtgctatggtcccaacca

SEQ ID NO: 5164975 - DNA, 25 bp, Homo sapien
gaagttccagaacctacagagcagg

SEQ ID NO: 5164976 - DNA, 25 bp, Homo sapien
catagccagagaggtaaacaggctc

SEQ ID NO: 5164977 - DNA, 25 bp, Homo sapien
taatggccaattccacgccatagcc

SEQ ID NO: 5164978 - DNA, 25 bp, Homo sapien
tgtactcagtgctcttaatggccaa

SEQ ID NO: 5164979 - DNA, 25 bp, Homo sapien
tttcacctgagtatcatccttggcc

SEQ ID NO: 5164980 - DNA, 25 bp, Homo sapien
tcaggtgtaacagaaccaggatgca

SEQ ID NO: 5164981 - DNA, 25 bp, Homo sapien
gaaaactgggatctagagaatctgc

SEQ ID NO: 5164982 - DNA, 25 bp, Homo sapien
gagaatctgcttaagggtcacccac

SEQ ID NO: 5164983 - DNA, 25 bp, Homo sapien
tattcctccccaatactggaagaga

SEQ ID NO: 5164984 - DNA, 25 bp, Homo sapien
caataggatcattttcaccaatcac

SEQ ID NO: 5164985 - DNA, 25 bp, Homo sapien
ccaatcactgtggtgtttacctcag

SEQ ID NO: 5164986 - DNA, 25 bp, Homo sapien
ccctgaacctcatcaataggatcat

SEQ ID NO: 5164987 - DNA, 25 bp, Homo sapien
aaagaggaacccctgaacctcatca

SEQ ID NO: 5164988 - DNA, 25 bp, Homo sapien
cttgcaactgccaaacctttaaagg

SEQ ID NO: 5164989 - DNA, 25 bp, Homo sapien
gctctctacaagatgctttctgagt

SEQ ID NO: 5164990 - DNA, 25 bp, Homo sapien
ctctacaagatgctttctgagttct

SEQ ID NO: 5164991 - DNA, 25 bp, Homo sapien
gccatttcattggtgctctctacaa

SEQ ID NO: 5164992 - DNA, 25 bp, Homo sapien
caggagaagccaagattcgagcagc

SEQ ID NO: 5164993 - DNA, 25 bp, Homo sapien
gacaaccaaagccaactcaacagga

SEQ ID NO: 5164994 - DNA, 25 bp, Homo sapien
ggtaggaaaattctgactaagatcc

SEQ ID NO: 5164995 - DNA, 25 bp, Homo sapien
caagattcgagcagcagtctggaaa

SEQ ID NO: 5164996 - DNA, 25 bp, Homo sapien
gttctgagctcacagctgtttttgt

SEQ ID NO: 5164997 - DNA, 25 bp, Homo sapien
cttcggttctaagttctgagctcac

SEQ ID NO: 5164998 - DNA, 25 bp, Homo sapien
tcttccacttcggttctaagttctg

SEQ ID NO: 5164999 - DNA, 25 bp, Homo sapien
ctgattctcttccacttcggttcta

SEQ ID NO: 5165000 - DNA, 25 bp, Homo sapien
caacaagaaacctgtgtcaccctgt

SEQ ID NO: 5165001 - DNA, 25 bp, Homo sapien
tagctaagttctgatataaagccct

SEQ ID NO: 5165002 - DNA, 25 bp, Homo sapien
tactgaaatgtcactagagctactt

SEQ ID NO: 5165003 - DNA, 25 bp, Homo sapien
gaaagctgaatgttagaccaacaac

SEQ ID NO: 5165004 - DNA, 25 bp, Homo sapien
cctgtgtatctaaatccatgtgaag

SEQ ID NO: 5165005 - DNA, 25 bp, Homo sapien
aatatatcctgtgtatctaaatcca

SEQ ID NO: 5165006 - DNA, 25 bp, Homo sapien
tatcctgtgtatctaaatccatgtg

SEQ ID NO: 5165007 - DNA, 25 bp, Homo sapien
gtatctaaatccatgtgaagtccat

SEQ ID NO: 5165008 - DNA, 25 bp, Homo sapien
cagagggctggatgttcagcttcaa

SEQ ID NO: 5165009 - DNA, 25 bp, Homo sapien
aaacattatgcagagaaaggccttc

SEQ ID NO: 5165010 - DNA, 25 bp, Homo sapien
tctattcccaatctatgcagaccct

SEQ ID NO: 5165011 - DNA, 25 bp, Homo sapien
tacggcatagtctgcctcagagggc

SEQ ID NO: 5165012 - DNA, 25 bp, Homo sapien
ctgatctgccgaataacaccaggaa

SEQ ID NO: 5165013 - DNA, 25 bp, Homo sapien
tatctgctatcaacctccaggttgt

SEQ ID NO: 5165014 - DNA, 25 bp, Homo sapien
caggaaaggtgggtcgaagcaactc

SEQ ID NO: 5165015 - DNA, 25 bp, Homo sapien
tcttgtaaactagaaggccacgaat

SEQ ID NO: 5165016 - DNA, 25 bp, Homo sapien
gtctcatgtgcaggatcaactatga

SEQ ID NO: 5165017 - DNA, 25 bp, Homo sapien
tgtgttcatcaactctgctgtggtc

SEQ ID NO: 5165018 - DNA, 25 bp, Homo sapien
tatgattactaaggaacatctcagc

SEQ ID NO: 5165019 - DNA, 25 bp, Homo sapien
tagtggtatatgattactaaggaac

SEQ ID NO: 5165020 - DNA, 25 bp, Homo sapien
caagatatacagataggtgataaat

SEQ ID NO: 5165021 - DNA, 25 bp, Homo sapien
ggtgataaatataagtagatcctga

SEQ ID NO: 5165022 - DNA, 25 bp, Homo sapien
caaacaagatatacagataggtgat

SEQ ID NO: 5165023 - DNA, 25 bp, Homo sapien
agtagatcctgaacatcatatgtca

SEQ ID NO: 5165024 - DNA, 25 bp, Homo sapien
catgcagtatgagaattattggtaa

SEQ ID NO: 5165025 - DNA, 25 bp, Homo sapien
caaaaaagactttgcactgaacata

SEQ ID NO: 5165026 - DNA, 25 bp, Homo sapien
tatgtatctatagatgggctggcaa

SEQ ID NO: 5165027 - DNA, 25 bp, Homo sapien
tacaactgtcccacgacaaaaagca

SEQ ID NO: 5165028 - DNA, 25 bp, Homo sapien
cataattatatgctctaagaacagc

SEQ ID NO: 5165029 - DNA, 25 bp, Homo sapien
ccacttcttgggcaacataattata

SEQ ID NO: 5165030 - DNA, 25 bp, Homo sapien
ttatatgctctaagaacagccactc

SEQ ID NO: 5165031 - DNA, 25 bp, Homo sapien
gggcaacataattatatgctctaag

SEQ ID NO: 5165032 - DNA, 25 bp, Homo sapien
tctgcagcaaaaacccgagcaccaa

SEQ ID NO: 5165033 - DNA, 25 bp, Homo sapien
cttcgtactgcccaagtttgcctgc

SEQ ID NO: 5165034 - DNA, 25 bp, Homo sapien
tgtgtacagtgctgccttcgtactg

SEQ ID NO: 5165035 - DNA, 25 bp, Homo sapien
caacaagtgacacggcagcaggtgg

SEQ ID NO: 5165036 - DNA, 25 bp, Homo sapien
tggagtctgtggtccgatgatagac

SEQ ID NO: 5165037 - DNA, 25 bp, Homo sapien
tgatagactgaaaaggatggcactc

SEQ ID NO: 5165038 - DNA, 25 bp, Homo sapien
gatggcactcaggtctctaagaaat

SEQ ID NO: 5165039 - DNA, 25 bp, Homo sapien
tctaagaaattcctgccgggtatgg

SEQ ID NO: 5165040 - DNA, 25 bp, Homo sapien
catcccctgcatggacagggacaag

SEQ ID NO: 5165041 - DNA, 25 bp, Homo sapien
caaaaggtgctgatcgtcggggaca

SEQ ID NO: 5165042 - DNA, 25 bp, Homo sapien
gatgagaatcaacctgccattcagc

SEQ ID NO: 5165043 - DNA, 25 bp, Homo sapien
gggacaagttctcctactagatgag

SEQ ID NO: 5165044 - DNA, 25 bp, Homo sapien
accacacctggccggaatcagctca

SEQ ID NO: 5165045 - DNA, 25 bp, Homo sapien
acctggccggaatcagctcagtctt

SEQ ID NO: 5165046 - DNA, 25 bp, Homo sapien
cacacctggccggaatcagctcagt

SEQ ID NO: 5165047 - DNA, 25 bp, Homo sapien
cacctggccggaatcagctcagtct

SEQ ID NO: 5165048 - DNA, 25 bp, Homo sapien
tcacttctacatacggatatttctt

SEQ ID NO: 5165049 - DNA, 25 bp, Homo sapien
cttccgattccgatcataagcagaa

SEQ ID NO: 5165050 - DNA, 25 bp, Homo sapien
tcaatccccaaaatgctattcactt

SEQ ID NO: 5165051 - DNA, 25 bp, Homo sapien
gatcataagcagaatcaatccccaa

SEQ ID NO: 5165052 - DNA, 25 bp, Homo sapien
catgcctgttctaacaacaatcaat

SEQ ID NO: 5165053 - DNA, 25 bp, Homo sapien
gccttttgtgagacaaatggaacac

SEQ ID NO: 5165054 - DNA, 25 bp, Homo sapien
tcttacatgcctgttctaacaacaa

SEQ ID NO: 5165055 - DNA, 25 bp, Homo sapien
gcatatttttcttacatgcctgttc

SEQ ID NO: 5165056 - DNA, 25 bp, Homo sapien
tccattgaacagcacaacgggcaga

SEQ ID NO: 5165057 - DNA, 25 bp, Homo sapien
caagtacaccgctctttggaagaag

SEQ ID NO: 5165058 - DNA, 25 bp, Homo sapien
acgggcagaggtccaactccagtct

SEQ ID NO: 5165059 - DNA, 25 bp, Homo sapien
ggtttctaactcatcagggtctagc

SEQ ID NO: 5165060 - DNA, 25 bp, Homo sapien
tactcgctgttaaatccaggtagtc

SEQ ID NO: 5165061 - DNA, 25 bp, Homo sapien
tctcgttcagctgtcaaaatcctag

SEQ ID NO: 5165062 - DNA, 25 bp, Homo sapien
gattcatgatatactctaccacatc

SEQ ID NO: 5165063 - DNA, 25 bp, Homo sapien
gattcgtggaacaacatttggctga

SEQ ID NO: 5165064 - DNA, 25 bp, Homo sapien
aaagcataaggttgttcctgaaatg

SEQ ID NO: 5165065 - DNA, 25 bp, Homo sapien
aaagattctgaagcacaagtcaaaa

SEQ ID NO: 5165066 - DNA, 25 bp, Homo sapien
gtaaagattctgaagcacaagtcaa

SEQ ID NO: 5165067 - DNA, 25 bp, Homo sapien
cataaggttgttcctgaaatgctcc

SEQ ID NO: 5165068 - DNA, 25 bp, Homo sapien
aaaattttgtcacaatcttgggcta

SEQ ID NO: 5165069 - DNA, 25 bp, Homo sapien
taaaattttgtcacaatcttgggct

SEQ ID NO: 5165070 - DNA, 25 bp, Homo sapien
aattttgtcacaatcttgggctatc

SEQ ID NO: 5165071 - DNA, 25 bp, Homo sapien
tttgtcacaatcttgggctatcttc

SEQ ID NO: 5165072 - DNA, 25 bp, Homo sapien
aggaggaaactcttgtgaatttaga

SEQ ID NO: 5165073 - DNA, 25 bp, Homo sapien
ggaggaaactcttgtgaatttagaa

SEQ ID NO: 5165074 - DNA, 25 bp, Homo sapien
taggaggaaactcttgtgaatttag

SEQ ID NO: 5165075 - DNA, 25 bp, Homo sapien
tgtcagatagttcatactattggct

SEQ ID NO: 5165076 - DNA, 25 bp, Homo sapien
ttgtcagatagttcatactattggc

SEQ ID NO: 5165077 - DNA, 25 bp, Homo sapien
tacagcagcagtcttgccttgggaa

SEQ ID NO: 5165078 - DNA, 25 bp, Homo sapien
tccaagatagtaaatctagcataat

SEQ ID NO: 5165079 - DNA, 25 bp, Homo sapien
ttgaccaaataatttgtaagaacca

SEQ ID NO: 5165080 - DNA, 25 bp, Homo sapien
ccaaataatttgtaagaaccatgca

SEQ ID NO: 5165081 - DNA, 25 bp, Homo sapien
tagttacagactaggaacatgcact

SEQ ID NO: 5165082 - DNA, 25 bp, Homo sapien
ttactataggaaagcaggggaatct

SEQ ID NO: 5165083 - DNA, 25 bp, Homo sapien
caatccaaaaagttactggcctaat

SEQ ID NO: 5165084 - DNA, 25 bp, Homo sapien
tccagaagggctatcaaaatcccca

SEQ ID NO: 5165085 - DNA, 25 bp, Homo sapien
catacagtaactgccgtccagaagg

SEQ ID NO: 5165086 - DNA, 25 bp, Homo sapien
ctgccgtccagaagggctatcaaaa

SEQ ID NO: 5165087 - DNA, 25 bp, Homo sapien
acaaaaatataaaatgaagtcatag

SEQ ID NO: 5165088 - DNA, 25 bp, Homo sapien
aaatataaaatgaagtcatagatac

SEQ ID NO: 5165089 - DNA, 25 bp, Homo sapien
aaaaatataaaatgaagtcatagat

SEQ ID NO: 5165090 - DNA, 25 bp, Homo sapien
caaaaatataaaatgaagtcataga

SEQ ID NO: 5165091 - DNA, 25 bp, Homo sapien
caaaatgggaaacgggagtcatatt

SEQ ID NO: 5165092 - DNA, 25 bp, Homo sapien
aatgggaaacgggagtcatattgta

SEQ ID NO: 5165093 - DNA, 25 bp, Homo sapien
ctgttcacaaaatgggaaacgggag

SEQ ID NO: 5165094 - DNA, 25 bp, Homo sapien
ttcacaaaatgggaaacgggagtca

SEQ ID NO: 5165095 - DNA, 25 bp, Homo sapien
aagtctgagtttggagagctgccca

SEQ ID NO: 5165096 - DNA, 25 bp, Homo sapien
caacagagaactccgcaatgtcagc

SEQ ID NO: 5165097 - DNA, 25 bp, Homo sapien
ctcatagcttatctctttggcagga

SEQ ID NO: 5165098 - DNA, 25 bp, Homo sapien
tcttagcagcgttggaagtctgagt

SEQ ID NO: 5165099 - DNA, 25 bp, Homo sapien
ccctgcagtacacggcatgagacaa

SEQ ID NO: 5165100 - DNA, 25 bp, Homo sapien
tcttcagcttcagaacatccctgca

SEQ ID NO: 5165101 - DNA, 25 bp, Homo sapien
cagtacacggcatgagacaaaatga

SEQ ID NO: 5165102 - DNA, 25 bp, Homo sapien
ccattttggaagactcaaagacctc

SEQ ID NO: 5165103 - DNA, 25 bp, Homo sapien
tactgactgactttctgagagccac

SEQ ID NO: 5165104 - DNA, 25 bp, Homo sapien
tgctgcaaagactgttcacggatct

SEQ ID NO: 5165105 - DNA, 25 bp, Homo sapien
cacagctccttggaaataggaggca

SEQ ID NO: 5165106 - DNA, 25 bp, Homo sapien
caagctggtaaggaaccctctggcg

SEQ ID NO: 5165107 - DNA, 25 bp, Homo sapien
cactatcctccagtggcccaatgat

SEQ ID NO: 5165108 - DNA, 25 bp, Homo sapien
tattttcgaggaggtggaaatcgtc

SEQ ID NO: 5165109 - DNA, 25 bp, Homo sapien
tacccgaagctgttgaatatgagat

SEQ ID NO: 5165110 - DNA, 25 bp, Homo sapien
aaatcgtcttgattaaagagctcac

SEQ ID NO: 5165111 - DNA, 25 bp, Homo sapien
aaaactggtactcgattcttggatc

SEQ ID NO: 5165112 - DNA, 25 bp, Homo sapien
caccttcattaccaagtcgcttgcc

SEQ ID NO: 5165113 - DNA, 25 bp, Homo sapien
tgcgctgacagaagagcatccacct

SEQ ID NO: 5165114 - DNA, 25 bp, Homo sapien
tcttggatctccttttggttgcgct

SEQ ID NO: 5165115 - DNA, 25 bp, Homo sapien
agcaatcctcgcgccccagccacca

SEQ ID NO: 5165116 - DNA, 25 bp, Homo sapien
cctcgcgccccagccaccaaagtag

SEQ ID NO: 5165117 - DNA, 25 bp, Homo sapien
caatcctcgcgccccagccaccaaa

SEQ ID NO: 5165118 - DNA, 25 bp, Homo sapien
atcctcgcgccccagccaccaaagt

SEQ ID NO: 5165119 - DNA, 25 bp, Homo sapien
ttccttcggcctcagtttgattgca

SEQ ID NO: 5165120 - DNA, 25 bp, Homo sapien
gggtcaacgacagccacaacatcaa

SEQ ID NO: 5165121 - DNA, 25 bp, Homo sapien
tggtgacagggtcaacgacagccac

SEQ ID NO: 5165122 - DNA, 25 bp, Homo sapien
gcaaaggagcaagtctctgtgcttc

SEQ ID NO: 5165123 - DNA, 25 bp, Homo sapien
gagcaaaggagcaagtctctgtgct

SEQ ID NO: 5165124 - DNA, 25 bp, Homo sapien
tttaaattacatgaggcagccaacc

SEQ ID NO: 5165125 - DNA, 25 bp, Homo sapien
aatctttgtaaagattgctctgccc

SEQ ID NO: 5165126 - DNA, 25 bp, Homo sapien
tgcaccaactttctagggctgtgag

SEQ ID NO: 5165127 - DNA, 25 bp, Homo sapien
gaggctgtttcacagccactgtcaa

SEQ ID NO: 5165128 - DNA, 25 bp, Homo sapien
tcatgtttatcagctgagccaaaac

SEQ ID NO: 5165129 - DNA, 25 bp, Homo sapien
ttcatgtttatcagctgagccaaaa

SEQ ID NO: 5165130 - DNA, 25 bp, Homo sapien
cataaatactctcagattcatgttt

SEQ ID NO: 5165131 - DNA, 25 bp, Homo sapien
gttcataaatactctcagattcatg

SEQ ID NO: 5165132 - DNA, 25 bp, Homo sapien
tatcaagatcatatggtgttctgac

SEQ ID NO: 5165133 - DNA, 25 bp, Homo sapien
ggtgttctgacagattctaccatcc

SEQ ID NO: 5165134 - DNA, 25 bp, Homo sapien
caaattcagagtgaacagtggagac

SEQ ID NO: 5165135 - DNA, 25 bp, Homo sapien
aaattttgcgattggacccttagca

SEQ ID NO: 5165136 - DNA, 25 bp, Homo sapien
cctctcaactgtacacgttaatggg

SEQ ID NO: 5165137 - DNA, 25 bp, Homo sapien
caactccgtgaagatactaaaacct

SEQ ID NO: 5165138 - DNA, 25 bp, Homo sapien
caaatgtccattcgtgaaaggataa

SEQ ID NO: 5165139 - DNA, 25 bp, Homo sapien
gtgaagcgtcgatacatactacagc

SEQ ID NO: 5165140 - DNA, 25 bp, Homo sapien
cagattggccataacaatggtgtcc

SEQ ID NO: 5165141 - DNA, 25 bp, Homo sapien
caatgaccgggttggctgaagttcc

SEQ ID NO: 5165142 - DNA, 25 bp, Homo sapien
gcctgtggtgatgtcgtagcaatga

SEQ ID NO: 5165143 - DNA, 25 bp, Homo sapien
gtagcaatgaccttccagtaacagg

SEQ ID NO: 5165144 - DNA, 25 bp, Homo sapien
cccttcctaagtctgaggatccaag

SEQ ID NO: 5165145 - DNA, 25 bp, Homo sapien
agagcgtcccttcctaagtctgagg

SEQ ID NO: 5165146 - DNA, 25 bp, Homo sapien
aaatatcttcagagcgtcccttcct

SEQ ID NO: 5165147 - DNA, 25 bp, Homo sapien
tatcttcagagcgtcccttcctaag

SEQ ID NO: 5165148 - DNA, 25 bp, Homo sapien
catctagcagagagtagggttctca

SEQ ID NO: 5165149 - DNA, 25 bp, Homo sapien
tcgctacggagctaattaaggcaag

SEQ ID NO: 5165150 - DNA, 25 bp, Homo sapien
taaggcaaggacatactacagagtg

SEQ ID NO: 5165151 - DNA, 25 bp, Homo sapien
gagggaatgttcttactatgccacc

SEQ ID NO: 5165152 - DNA, 25 bp, Homo sapien
tagtgttgtaaaggaaatctgctcg

SEQ ID NO: 5165153 - DNA, 25 bp, Homo sapien
cagccttcaggtagctgagtttaca

SEQ ID NO: 5165154 - DNA, 25 bp, Homo sapien
tcccggccactactctttaactgga

SEQ ID NO: 5165155 - DNA, 25 bp, Homo sapien
tctgccggaggcaacaatcagtcaa

SEQ ID NO: 5165156 - DNA, 25 bp, Homo sapien
gttgttgaggacgataaccacctca

SEQ ID NO: 5165157 - DNA, 25 bp, Homo sapien
tgaggacgataaccacctcatcagc

SEQ ID NO: 5165158 - DNA, 25 bp, Homo sapien
tgcttttgaagttgttgaggacgat

SEQ ID NO: 5165159 - DNA, 25 bp, Homo sapien
catcagggggagaatcagtgccatc

SEQ ID NO: 5165160 - DNA, 25 bp, Homo sapien
ccagattcattctcactcgttccat

SEQ ID NO: 5165161 - DNA, 25 bp, Homo sapien
tcttcgttcaccatatctgccttct

SEQ ID NO: 5165162 - DNA, 25 bp, Homo sapien
tcactcgttccatcactcagcaagt

SEQ ID NO: 5165163 - DNA, 25 bp, Homo sapien
actcagcaagtcttcgttcaccata

SEQ ID NO: 5165164 - DNA, 25 bp, Homo sapien
tcgtagagatgaccagatgcaacgg

SEQ ID NO: 5165165 - DNA, 25 bp, Homo sapien
gagatgaccagatgcaacggagaaa

SEQ ID NO: 5165166 - DNA, 25 bp, Homo sapien
cgaagaaatctttcgtagagatgac

SEQ ID NO: 5165167 - DNA, 25 bp, Homo sapien
tctttcgtagagatgaccagatgca

SEQ ID NO: 5165168 - DNA, 25 bp, Homo sapien
taatgaaataatcaacaagactgac

SEQ ID NO: 5165169 - DNA, 25 bp, Homo sapien
aattcattcatcatatataatgaaa

SEQ ID NO: 5165170 - DNA, 25 bp, Homo sapien
caattcattcatcatatataatgaa

SEQ ID NO: 5165171 - DNA, 25 bp, Homo sapien
atataatgaaataatcaacaagact

SEQ ID NO: 5165172 - DNA, 25 bp, Homo sapien
cttcagcacggatagcatcattatg

SEQ ID NO: 5165173 - DNA, 25 bp, Homo sapien
gggacaagtaattcttcaagaacca

SEQ ID NO: 5165174 - DNA, 25 bp, Homo sapien
gaatttcacaggagtcttggtattc

SEQ ID NO: 5165175 - DNA, 25 bp, Homo sapien
tggtattcttcagcacggatagcat

SEQ ID NO: 5165176 - DNA, 25 bp, Homo sapien
caatgtaaaccatcgctgtgctttc

SEQ ID NO: 5165177 - DNA, 25 bp, Homo sapien
gaaggaaacgttatctcagtaagac

SEQ ID NO: 5165178 - DNA, 25 bp, Homo sapien
tataagcacctttaggcgccagcag

SEQ ID NO: 5165179 - DNA, 25 bp, Homo sapien
ggaagcactacttccatacatcatc

SEQ ID NO: 5165180 - DNA, 25 bp, Homo sapien
tccaggaagaggatcttgtaacccc

SEQ ID NO: 5165181 - DNA, 25 bp, Homo sapien
ccccagatgatacgctgtttttcag

SEQ ID NO: 5165182 - DNA, 25 bp, Homo sapien
tgggaaaagtacatccaggaagagg

SEQ ID NO: 5165183 - DNA, 25 bp, Homo sapien
tttgtactgaacaagctcatactgg

SEQ ID NO: 5165184 - DNA, 25 bp, Homo sapien
tccacaaacaggaacttgtcaacaa

SEQ ID NO: 5165185 - DNA, 25 bp, Homo sapien
gcatccacaaacaggaacttgtcaa

SEQ ID NO: 5165186 - DNA, 25 bp, Homo sapien
gatcagcatccacaaacaggaactt

SEQ ID NO: 5165187 - DNA, 25 bp, Homo sapien
ctgatcagcatccacaaacaggaac

SEQ ID NO: 5165188 - DNA, 25 bp, Homo sapien
gctgtcacagaaaggagtgtaacca

SEQ ID NO: 5165189 - DNA, 25 bp, Homo sapien
gtccatttctcttcggctgtcacag

SEQ ID NO: 5165190 - DNA, 25 bp, Homo sapien
tccagaacctgtagccgtccatttc

SEQ ID NO: 5165191 - DNA, 25 bp, Homo sapien
gtgtaaccataaggagcaccatcca

SEQ ID NO: 5165192 - DNA, 25 bp, Homo sapien
gatatgatactttcgcccggctaaa

SEQ ID NO: 5165193 - DNA, 25 bp, Homo sapien
cgcccggctaaatgactggcccagt

SEQ ID NO: 5165194 - DNA, 25 bp, Homo sapien
ctgatatgatactttcgcccggcta

SEQ ID NO: 5165195 - DNA, 25 bp, Homo sapien
actttcgcccggctaaatgactggc

SEQ ID NO: 5165196 - DNA, 25 bp, Homo sapien
tgttaggagtgcttcttttcagtac

SEQ ID NO: 5165197 - DNA, 25 bp, Homo sapien
acagtgttaggagtgcttcttttca

SEQ ID NO: 5165198 - DNA, 25 bp, Homo sapien
cagtgttaggagtgcttcttttcag

SEQ ID NO: 5165199 - DNA, 25 bp, Homo sapien
gtgttaggagtgcttcttttcagta

SEQ ID NO: 5165200 - DNA, 25 bp, Homo sapien
tttgaaaggctgttagggtcctgac

SEQ ID NO: 5165201 - DNA, 25 bp, Homo sapien
tcctgactcagaccttggtactgtc

SEQ ID NO: 5165202 - DNA, 25 bp, Homo sapien
tgtcccctgagtctgtcaccagcag

SEQ ID NO: 5165203 - DNA, 25 bp, Homo sapien
tcttcagatccacaacatatagtgc

SEQ ID NO: 5165204 - DNA, 25 bp, Homo sapien
ccttaaactacaatctcacctctga

SEQ ID NO: 5165205 - DNA, 25 bp, Homo sapien
gttcttgaactaggttgtggtatct

SEQ ID NO: 5165206 - DNA, 25 bp, Homo sapien
taacaaacagtaatttagctagcct

SEQ ID NO: 5165207 - DNA, 25 bp, Homo sapien
ggtatctgggtatttgcttcataat

SEQ ID NO: 5165208 - DNA, 25 bp, Homo sapien
ttgagggagggatttaattggcacc

SEQ ID NO: 5165209 - DNA, 25 bp, Homo sapien
gcccttttcttagaggcgtcatcac

SEQ ID NO: 5165210 - DNA, 25 bp, Homo sapien
gatgaatcatgttattgggcagatc

SEQ ID NO: 5165211 - DNA, 25 bp, Homo sapien
gaggcgtcatcacaccacgtttcac

SEQ ID NO: 5165212 - DNA, 25 bp, Homo sapien
acatccagtggatgaacatgcagaa

SEQ ID NO: 5165213 - DNA, 25 bp, Homo sapien
acatgcagaagcacaccacatacgg

SEQ ID NO: 5165214 - DNA, 25 bp, Homo sapien
gcagaagcacaccacatacggctta

SEQ ID NO: 5165215 - DNA, 25 bp, Homo sapien
atccagtggatgaacatgcagaagc

SEQ ID NO: 5165216 - DNA, 25 bp, Homo sapien
tatggtagtgggctatgtaaagctg

SEQ ID NO: 5165217 - DNA, 25 bp, Homo sapien
agtgggctatgtaaagctgtattta

SEQ ID NO: 5165218 - DNA, 25 bp, Homo sapien
gcaatatggtagtgggctatgtaaa

SEQ ID NO: 5165219 - DNA, 25 bp, Homo sapien
cagaagcaatatggtagtgggctat

SEQ ID NO: 5165220 - DNA, 25 bp, Homo sapien
cacatgatagagaattcaaaggttc

SEQ ID NO: 5165221 - DNA, 25 bp, Homo sapien
ccacatgatagagaattcaaaggtt

SEQ ID NO: 5165222 - DNA, 25 bp, Homo sapien
gatctcttggtcgtagtcctgccac

SEQ ID NO: 5165223 - DNA, 25 bp, Homo sapien
tctctttgtacagtgctcccgtttc

SEQ ID NO: 5165224 - DNA, 25 bp, Homo sapien
cttctgaaagcggatctgtagctgt

SEQ ID NO: 5165225 - DNA, 25 bp, Homo sapien
gggacaatccgcacagctgcttcca

SEQ ID NO: 5165226 - DNA, 25 bp, Homo sapien
cataattcttcacgtttctgaggac

SEQ ID NO: 5165227 - DNA, 25 bp, Homo sapien
tcataattcttcacgtttctgagga

SEQ ID NO: 5165228 - DNA, 25 bp, Homo sapien
caaatggggtgatttcctgtccttc

SEQ ID NO: 5165229 - DNA, 25 bp, Homo sapien
tttcaaatggggtgatttcctgtcc

SEQ ID NO: 5165230 - DNA, 25 bp, Homo sapien
cagaaaaaactagcatttattataa

SEQ ID NO: 5165231 - DNA, 25 bp, Homo sapien
aatggggtgatttcctgtccttctc

SEQ ID NO: 5165232 - DNA, 25 bp, Homo sapien
ccaccagagtacagaagtcagaatc

SEQ ID NO: 5165233 - DNA, 25 bp, Homo sapien
ggcttatcagcagttgtatagacag

SEQ ID NO: 5165234 - DNA, 25 bp, Homo sapien
gcccagccggcttatcagcagttgt

SEQ ID NO: 5165235 - DNA, 25 bp, Homo sapien
tgctcagaatcaaaaggtgtggcac

SEQ ID NO: 5165236 - DNA, 25 bp, Homo sapien
cacgatgcagcgacatgaagacaga

SEQ ID NO: 5165237 - DNA, 25 bp, Homo sapien
agaaagccacgagttccacaagcag

SEQ ID NO: 5165238 - DNA, 25 bp, Homo sapien
agaacatggtggctctagctggccc

SEQ ID NO: 5165239 - DNA, 25 bp, Homo sapien
tacagagtccaaaggatcagccact

SEQ ID NO: 5165240 - DNA, 25 bp, Homo sapien
cagcccgttcaccagcaaagtatgc

SEQ ID NO: 5165241 - DNA, 25 bp, Homo sapien
agcccgttcaccagcaaagtatgcc

SEQ ID NO: 5165242 - DNA, 25 bp, Homo sapien
acagcccgttcaccagcaaagtatg

SEQ ID NO: 5165243 - DNA, 25 bp, Homo sapien
tttgctatgcaacctcctggacgag

SEQ ID NO: 5165244 - DNA, 25 bp, Homo sapien
caatgagtgacaccaggacatgcac

SEQ ID NO: 5165245 - DNA, 25 bp, Homo sapien
ttcacccaagcagacaggcaagcat

SEQ ID NO: 5165246 - DNA, 25 bp, Homo sapien
tgtgcctgaccggaaactgtttctt

SEQ ID NO: 5165247 - DNA, 25 bp, Homo sapien
ctcagggtgatgtctgactgtccaa

SEQ ID NO: 5165248 - DNA, 25 bp, Homo sapien
aatcgttcaggccacataggtaagg

SEQ ID NO: 5165249 - DNA, 25 bp, Homo sapien
gagccttgacaaggttcagaacacg

SEQ ID NO: 5165250 - DNA, 25 bp, Homo sapien
tatctaaatatacttccggagggcg

SEQ ID NO: 5165251 - DNA, 25 bp, Homo sapien
aatgacagcctgagggaatgggacc

SEQ ID NO: 5165252 - DNA, 25 bp, Homo sapien
ttacacaacaatgggacaggcgcgg

SEQ ID NO: 5165253 - DNA, 25 bp, Homo sapien
gcgcttgcaaataccgaccacagag

SEQ ID NO: 5165254 - DNA, 25 bp, Homo sapien
tgttgttaagagacgttatgcccat

SEQ ID NO: 5165255 - DNA, 25 bp, Homo sapien
tcccttcgaacgcagagattctgca

SEQ ID NO: 5165256 - DNA, 25 bp, Homo sapien
tcgaacgcagagattctgcagacat

SEQ ID NO: 5165257 - DNA, 25 bp, Homo sapien
ttctcaattcccttcgaacgcagag

SEQ ID NO: 5165258 - DNA, 25 bp, Homo sapien
gacatttaaaagcccaatgctgttc

SEQ ID NO: 5165259 - DNA, 25 bp, Homo sapien
gaatgatttcaacaccttggtttat

SEQ ID NO: 5165260 - DNA, 25 bp, Homo sapien
ttgaatgatttcaacaccttggttt

SEQ ID NO: 5165261 - DNA, 25 bp, Homo sapien
tattgaatgatttcaacaccttggt

SEQ ID NO: 5165262 - DNA, 25 bp, Homo sapien
tgatttcaacaccttggtttatggg

SEQ ID NO: 5165263 - DNA, 25 bp, Homo sapien
aggtcacaatatatgtataagcttt

SEQ ID NO: 5165264 - DNA, 25 bp, Homo sapien
caggtcacaatatatgtataagctt

SEQ ID NO: 5165265 - DNA, 25 bp, Homo sapien
ggtcacaatatatgtataagctttt

SEQ ID NO: 5165266 - DNA, 25 bp, Homo sapien
gtggcgcccatcaagaagctaaatc

SEQ ID NO: 5165267 - DNA, 25 bp, Homo sapien
gcccatcaagaagctaaatcgtctg

SEQ ID NO: 5165268 - DNA, 25 bp, Homo sapien
gaagctaaatcgtctgatagaaggg

SEQ ID NO: 5165269 - DNA, 25 bp, Homo sapien
cgtctgatagaagggtaagcagaag

SEQ ID NO: 5165270 - DNA, 25 bp, Homo sapien
tgaggtccagagatgtaagccactt

SEQ ID NO: 5165271 - DNA, 25 bp, Homo sapien
tataatcgcaaccagctttccagca

SEQ ID NO: 5165272 - DNA, 25 bp, Homo sapien
ggtccagagatgtaagccacttggc

SEQ ID NO: 5165273 - DNA, 25 bp, Homo sapien
cctgttctcatcaacaacatctata

SEQ ID NO: 5165274 - DNA, 25 bp, Homo sapien
tgcatgcatttaaatggcatggcct

SEQ ID NO: 5165275 - DNA, 25 bp, Homo sapien
gagctgcatgcatttaaatggcatg

SEQ ID NO: 5165276 - DNA, 25 bp, Homo sapien
gctgcatgcatttaaatggcatggc

SEQ ID NO: 5165277 - DNA, 25 bp, Homo sapien
agtgagctgcatgcatttaaatggc

SEQ ID NO: 5165278 - DNA, 25 bp, Homo sapien
tgtattgatggttgccttctgccag

SEQ ID NO: 5165279 - DNA, 25 bp, Homo sapien
tcttcttggcccattgtgtgcctgt

SEQ ID NO: 5165280 - DNA, 25 bp, Homo sapien
aatctatcattttggcttccccttc

SEQ ID NO: 5165281 - DNA, 25 bp, Homo sapien
tctgccaggcttcttggccatgcct

SEQ ID NO: 5165282 - DNA, 25 bp, Homo sapien
aagtagcagatacaatatgtcctac

SEQ ID NO: 5165283 - DNA, 25 bp, Homo sapien
tagcagatacaatatgtcctacttt

SEQ ID NO: 5165284 - DNA, 25 bp, Homo sapien
aaaagtagcagatacaatatgtcct

SEQ ID NO: 5165285 - DNA, 25 bp, Homo sapien
gcagatacaatatgtcctacttttt

SEQ ID NO: 5165286 - DNA, 25 bp, Homo sapien
tctagagccagctgtctaaacatca

SEQ ID NO: 5165287 - DNA, 25 bp, Homo sapien
ctagagccagctgtctaaacatcat

SEQ ID NO: 5165288 - DNA, 25 bp, Homo sapien
cacccttctagagccagctgtctaa

SEQ ID NO: 5165289 - DNA, 25 bp, Homo sapien
acctcccacccttctagagccagct

SEQ ID NO: 5165290 - DNA, 25 bp, Homo sapien
agtggggcttccagcgtcccgctgt

SEQ ID NO: 5165291 - DNA, 25 bp, Homo sapien
ggcttccagcgtcccgctgtgctcc

SEQ ID NO: 5165292 - DNA, 25 bp, Homo sapien
tgcagaggctgacgcggggcagggc

SEQ ID NO: 5165293 - DNA, 25 bp, Homo sapien
gggaacccaatgctggcgaggaagc

SEQ ID NO: 5165294 - DNA, 25 bp, Homo sapien
atgctgcccatcagggttcagcagg

SEQ ID NO: 5165295 - DNA, 25 bp, Homo sapien
gttcagcagggcaaaggtagcttag

SEQ ID NO: 5165296 - DNA, 25 bp, Homo sapien
tcagcagggcaaaggtagcttagac

SEQ ID NO: 5165297 - DNA, 25 bp, Homo sapien
agcagggcaaaggtagcttagacat

SEQ ID NO: 5165298 - DNA, 25 bp, Homo sapien
ccacgaagacatcaagtagccccat

SEQ ID NO: 5165299 - DNA, 25 bp, Homo sapien
gctgcccagcactgccacgaagaca

SEQ ID NO: 5165300 - DNA, 25 bp, Homo sapien
gcactgccacgaagacatcaagtag

SEQ ID NO: 5165301 - DNA, 25 bp, Homo sapien
cccagcactgccacgaagacatcaa

SEQ ID NO: 5165302 - DNA, 25 bp, Homo sapien
ctggagcaatggtccctatcgattt

SEQ ID NO: 5165303 - DNA, 25 bp, Homo sapien
aaagtgaacgtcgttcatcttctcc

SEQ ID NO: 5165304 - DNA, 25 bp, Homo sapien
gattttcccttggagaataaagtga

SEQ ID NO: 5165305 - DNA, 25 bp, Homo sapien
aataaagtgaacgtcgttcatcttc

SEQ ID NO: 5165306 - DNA, 25 bp, Homo sapien
cttgcttaggaagcggccctgcaca

SEQ ID NO: 5165307 - DNA, 25 bp, Homo sapien
tgcttctgggatctgccgagaagtg

SEQ ID NO: 5165308 - DNA, 25 bp, Homo sapien
tgaagtcggtccctttccagcgggc

SEQ ID NO: 5165309 - DNA, 25 bp, Homo sapien
tctgccgagaagtgccgctcgggaa

SEQ ID NO: 5165310 - DNA, 25 bp, Homo sapien
cagccccgggcctcgggcttcaggg

SEQ ID NO: 5165311 - DNA, 25 bp, Homo sapien
gctaacagcttagtcaccaggaccc

SEQ ID NO: 5165312 - DNA, 25 bp, Homo sapien
gctgtgaacttttcgggaactggaa

SEQ ID NO: 5165313 - DNA, 25 bp, Homo sapien
acctgcaaacgtcccctcctggaag

SEQ ID NO: 5165314 - DNA, 25 bp, Homo sapien
gaactgcccacaaaacaaggctgtg

SEQ ID NO: 5165315 - DNA, 25 bp, Homo sapien
agcatctcctaaattgtaaggactc

SEQ ID NO: 5165316 - DNA, 25 bp, Homo sapien
ttgggtcaacagttcctttgccagc

SEQ ID NO: 5165317 - DNA, 25 bp, Homo sapien
catctcctaaattgtaaggactctg

SEQ ID NO: 5165318 - DNA, 25 bp, Homo sapien
tcaggccacctgctttgggtcaaca

SEQ ID NO: 5165319 - DNA, 25 bp, Homo sapien
agtagattggtgtgctcaggccgca

SEQ ID NO: 5165320 - DNA, 25 bp, Homo sapien
gaatctgctcggacactcaacatgg

SEQ ID NO: 5165321 - DNA, 25 bp, Homo sapien
tatccgttgtaagcacgtgccctgt

SEQ ID NO: 5165322 - DNA, 25 bp, Homo sapien
aactcacacggaagcacgggtcttg

SEQ ID NO: 5165323 - DNA, 25 bp, Homo sapien
ggcagagaagactcgagtccagccc

SEQ ID NO: 5165324 - DNA, 25 bp, Homo sapien
ctggcccttggaggtgaccatccag

SEQ ID NO: 5165325 - DNA, 25 bp, Homo sapien
gatgctgccacttgtgcgtgagtcc

SEQ ID NO: 5165326 - DNA, 25 bp, Homo sapien
tctgttctcctttctgacccactgg

SEQ ID NO: 5165327 - DNA, 25 bp, Homo sapien
aagttctactacatcaccctgctac

SEQ ID NO: 5165328 - DNA, 25 bp, Homo sapien
tctactacatcaccctgctacgaga

SEQ ID NO: 5165329 - DNA, 25 bp, Homo sapien
atcaccctgctacgagaccccgtgt

SEQ ID NO: 5165330 - DNA, 25 bp, Homo sapien
gttctactacatcaccctgctacga

SEQ ID NO: 5165331 - DNA, 25 bp, Homo sapien
gcctcacgttgttgggccccagtgg

SEQ ID NO: 5165332 - DNA, 25 bp, Homo sapien
ggacagaggagtcagacctccacca

SEQ ID NO: 5165333 - DNA, 25 bp, Homo sapien
aggctagagagggagccacctgccc

SEQ ID NO: 5165334 - DNA, 25 bp, Homo sapien
cataccacatccaagggcacaggac

SEQ ID NO: 5165335 - DNA, 25 bp, Homo sapien
ccaggtgggagtgtgacagcgtctc

SEQ ID NO: 5165336 - DNA, 25 bp, Homo sapien
caggtgggagtgtgacagcgtctcc

SEQ ID NO: 5165337 - DNA, 25 bp, Homo sapien
ggctccgctgtgtgggcctcctgca

SEQ ID NO: 5165338 - DNA, 25 bp, Homo sapien
cccaaggcggcgctggtttgggaga

SEQ ID NO: 5165339 - DNA, 25 bp, Homo sapien
cggagggcaggctccgctgtgtggg

SEQ ID NO: 5165340 - DNA, 25 bp, Homo sapien
caaggcggcgctggtttgggagagg

SEQ ID NO: 5165341 - DNA, 25 bp, Homo sapien
ggcccccttgacgtggcccaggtgc

SEQ ID NO: 5165342 - DNA, 25 bp, Homo sapien
ggcaggcgtactgtggaagccacac

SEQ ID NO: 5165343 - DNA, 25 bp, Homo sapien
aggtagacacctccgcgaacacacg

SEQ ID NO: 5165344 - DNA, 25 bp, Homo sapien
cttcagggcccaagaacccagagat

SEQ ID NO: 5165345 - DNA, 25 bp, Homo sapien
ctttcagagaacgtcgagagtggag

SEQ ID NO: 5165346 - DNA, 25 bp, Homo sapien
atcctttcagagaacgtcgagagtg

SEQ ID NO: 5165347 - DNA, 25 bp, Homo sapien
tgggcagcaggtcggatgtgtgggc

SEQ ID NO: 5165348 - DNA, 25 bp, Homo sapien
aatgggcagcaggtcggatgtgtgg

SEQ ID NO: 5165349 - DNA, 25 bp, Homo sapien
tggggaccatgttccatgggttgcc

SEQ ID NO: 5165350 - DNA, 25 bp, Homo sapien
cctggggaccatgttccatgggttg

SEQ ID NO: 5165351 - DNA, 25 bp, Homo sapien
ctggggaccatgttccatgggttgc

SEQ ID NO: 5165352 - DNA, 25 bp, Homo sapien
aaggccctggggaccatgttccatg

SEQ ID NO: 5165353 - DNA, 25 bp, Homo sapien
gaccacagttgatggagggaaagcc

SEQ ID NO: 5165354 - DNA, 25 bp, Homo sapien
tctgtttgcgtcatcgtggccaggg

SEQ ID NO: 5165355 - DNA, 25 bp, Homo sapien
tctctagagcattggtgaccgtggg

SEQ ID NO: 5165356 - DNA, 25 bp, Homo sapien
tgcagctgcgttctccctggaatcc

SEQ ID NO: 5165357 - DNA, 25 bp, Homo sapien
catttgacaaaaggctgtctctacc

SEQ ID NO: 5165358 - DNA, 25 bp, Homo sapien
cccatttgacaaaaggctgtctcta

SEQ ID NO: 5165359 - DNA, 25 bp, Homo sapien
gcccatttgacaaaaggctgtctct

SEQ ID NO: 5165360 - DNA, 25 bp, Homo sapien
ccatttgacaaaaggctgtctctac

SEQ ID NO: 5165361 - DNA, 25 bp, Homo sapien
ctcatctggagagcgagccgtcagc

SEQ ID NO: 5165362 - DNA, 25 bp, Homo sapien
tctggagagcgagccgtcagcagct

SEQ ID NO: 5165363 - DNA, 25 bp, Homo sapien
cgtcagcagctgtccgcgtgccatg

SEQ ID NO: 5165364 - DNA, 25 bp, Homo sapien
tcctcatctggagagcgagccgtca

SEQ ID NO: 5165365 - DNA, 25 bp, Homo sapien
tgtgactggggccaatgaacaggac

SEQ ID NO: 5165366 - DNA, 25 bp, Homo sapien
tacccagagcatgtgactggggcca

SEQ ID NO: 5165367 - DNA, 25 bp, Homo sapien
cttcataatcgctttcttctttgag

SEQ ID NO: 5165368 - DNA, 25 bp, Homo sapien
tgtgatggggacagatgttacccag

SEQ ID NO: 5165369 - DNA, 25 bp, Homo sapien
accaactgcgtgcccggcgtgctgg

SEQ ID NO: 5165370 - DNA, 25 bp, Homo sapien
ccaactgcgtgcccggcgtgctgga

SEQ ID NO: 5165371 - DNA, 25 bp, Homo sapien
caccaactgcgtgcccggcgtgctg

SEQ ID NO: 5165372 - DNA, 25 bp, Homo sapien
cccaaccgccgcgagacttggctct

SEQ ID NO: 5165373 - DNA, 25 bp, Homo sapien
aaccgccgcgagacttggctcttct

SEQ ID NO: 5165374 - DNA, 25 bp, Homo sapien
caaccgccgcgagacttggctcttc

SEQ ID NO: 5165375 - DNA, 25 bp, Homo sapien
ggcccaaccgccgcgagacttggct

SEQ ID NO: 5165376 - DNA, 25 bp, Homo sapien
actacttcccggtccgcgagctgga

SEQ ID NO: 5165377 - DNA, 25 bp, Homo sapien
tcgtgcagaacgtacgcctcgaggt

SEQ ID NO: 5165378 - DNA, 25 bp, Homo sapien
cttcgacatgaagggcgacgacgtg

SEQ ID NO: 5165379 - DNA, 25 bp, Homo sapien
gacgacgtgatcgtcttcctgcaca

SEQ ID NO: 5165380 - DNA, 25 bp, Homo sapien
tcttctgggatcatcacagcctgcc

SEQ ID NO: 5165381 - DNA, 25 bp, Homo sapien
tcagactctgagaccgcacggtggg

SEQ ID NO: 5165382 - DNA, 25 bp, Homo sapien
tcctgaagccgaatgttaatgcctc

SEQ ID NO: 5165383 - DNA, 25 bp, Homo sapien
tttgccattaagtcagagatcacgc

SEQ ID NO: 5165384 - DNA, 25 bp, Homo sapien
ttatgtcagtacgataccatcttga

SEQ ID NO: 5165385 - DNA, 25 bp, Homo sapien
aatatccggtttgttttagcaccat

SEQ ID NO: 5165386 - DNA, 25 bp, Homo sapien
tatttctccattaacgcaggtgtta

SEQ ID NO: 5165387 - DNA, 25 bp, Homo sapien
aagcagttagtgtaagttgtccact

SEQ ID NO: 5165388 - DNA, 25 bp, Homo sapien
tcagctcactaggttggaagccagg

SEQ ID NO: 5165389 - DNA, 25 bp, Homo sapien
tgtgttgctgccatgacggaagtcg

SEQ ID NO: 5165390 - DNA, 25 bp, Homo sapien
gcggctggttcagacgtgagcataa

SEQ ID NO: 5165391 - DNA, 25 bp, Homo sapien
tcatgtcatcgtgcaggagtgaggc

SEQ ID NO: 5165392 - DNA, 25 bp, Homo sapien
gcaggtggagaggcgccagagcccc

SEQ ID NO: 5165393 - DNA, 25 bp, Homo sapien
gcccccacgccgagggagctgctcg

SEQ ID NO: 5165394 - DNA, 25 bp, Homo sapien
tgcaggtggagaggcgccagagccc

SEQ ID NO: 5165395 - DNA, 25 bp, Homo sapien
agagcccccacgccgagggagctgc

SEQ ID NO: 5165396 - DNA, 25 bp, Homo sapien
gtgtgggggtctcataacagctgcc

SEQ ID NO: 5165397 - DNA, 25 bp, Homo sapien
cagggcagtcaccaggctatagcct

SEQ ID NO: 5165398 - DNA, 25 bp, Homo sapien
gggcagggcagtcaccaggctatag

SEQ ID NO: 5165399 - DNA, 25 bp, Homo sapien
gcagtgtgggggtctcataacagct

SEQ ID NO: 5165400 - DNA, 25 bp, Homo sapien
atctcagggcctcatggacaccgag

SEQ ID NO: 5165401 - DNA, 25 bp, Homo sapien
tctggttgcctagctgaagggtgct

SEQ ID NO: 5165402 - DNA, 25 bp, Homo sapien
ctcagggcctcatggacaccgaggg

SEQ ID NO: 5165403 - DNA, 25 bp, Homo sapien
gaccctagcagtgtctggttgccta

SEQ ID NO: 5165404 - DNA, 25 bp, Homo sapien
ccagcatcagcaccattttggtcag

SEQ ID NO: 5165405 - DNA, 25 bp, Homo sapien
cagcatcagcaccattttggtcaga

SEQ ID NO: 5165406 - DNA, 25 bp, Homo sapien
ggagggtgacccaagctctccactc

SEQ ID NO: 5165407 - DNA, 25 bp, Homo sapien
tcagggtcaggaatggtattgtttt

SEQ ID NO: 5165408 - DNA, 25 bp, Homo sapien
gtcaggaatggtattgtttttgcaa

SEQ ID NO: 5165409 - DNA, 25 bp, Homo sapien
caggaatggtattgtttttgcaaag

SEQ ID NO: 5165410 - DNA, 25 bp, Homo sapien
caggacccccaacacggccgcggtg

SEQ ID NO: 5165411 - DNA, 25 bp, Homo sapien
aaactgccggatgtcagacaggaac

SEQ ID NO: 5165412 - DNA, 25 bp, Homo sapien
gcggtgccaccgcagggtcccaccg

SEQ ID NO: 5165413 - DNA, 25 bp, Homo sapien
caaaaactgccggatgtcagacagg

SEQ ID NO: 5165414 - DNA, 25 bp, Homo sapien
tgcagacctcggctgtgagcagcag

SEQ ID NO: 5165415 - DNA, 25 bp, Homo sapien
gccagaagcaggcataagtgcatga

SEQ ID NO: 5165416 - DNA, 25 bp, Homo sapien
agcgagtgccgagagccaggcaatc

SEQ ID NO: 5165417 - DNA, 25 bp, Homo sapien
cgcactcttggaggccctcgcaggt

SEQ ID NO: 5165418 - DNA, 25 bp, Homo sapien
taaaaggtgaatcatgcccatggtg

SEQ ID NO: 5165419 - DNA, 25 bp, Homo sapien
gggcaatggagacccgccactcctg

SEQ ID NO: 5165420 - DNA, 25 bp, Homo sapien
ggcataaaaggtgaatcatgcccat

SEQ ID NO: 5165421 - DNA, 25 bp, Homo sapien
tgccaaggcataaaaggtgaatcat

SEQ ID NO: 5165422 - DNA, 25 bp, Homo sapien
gcagatgttggagccggctctctga

SEQ ID NO: 5165423 - DNA, 25 bp, Homo sapien
cagatgttggagccggctctctgac

SEQ ID NO: 5165424 - DNA, 25 bp, Homo sapien
tggaagcgcagcctctcccccacgg

SEQ ID NO: 5165425 - DNA, 25 bp, Homo sapien
cagcctctcccccacggagctggct

SEQ ID NO: 5165426 - DNA, 25 bp, Homo sapien
gctgcagacaggcccgtgcagacag

SEQ ID NO: 5165427 - DNA, 25 bp, Homo sapien
ccatggaagcgcagcctctccccca

SEQ ID NO: 5165428 - DNA, 25 bp, Homo sapien
tccctggacacctctctatgatgtc

SEQ ID NO: 5165429 - DNA, 25 bp, Homo sapien
gtccctggacacctctctatgatgt

SEQ ID NO: 5165430 - DNA, 25 bp, Homo sapien
cttctcctcgccacatcccttttcc

SEQ ID NO: 5165431 - DNA, 25 bp, Homo sapien
ctgcatggggctcctagctgtttgg

SEQ ID NO: 5165432 - DNA, 25 bp, Homo sapien
ccttttcccctgcgagctgcatggg

SEQ ID NO: 5165433 - DNA, 25 bp, Homo sapien
atcccttttcccctgcgagctgcat

SEQ ID NO: 5165434 - DNA, 25 bp, Homo sapien
cgggtcggtgcacaacagtggatcc

SEQ ID NO: 5165435 - DNA, 25 bp, Homo sapien
atctaagaggcgattacatgctcgg

SEQ ID NO: 5165436 - DNA, 25 bp, Homo sapien
ggctcgcctccaggaacctcatcta

SEQ ID NO: 5165437 - DNA, 25 bp, Homo sapien
tacatgctcgggtcttgaagcggcc

SEQ ID NO: 5165438 - DNA, 25 bp, Homo sapien
agccgctgcagcacggagtcatggc

SEQ ID NO: 5165439 - DNA, 25 bp, Homo sapien
agggactctcggatggcagccctca

SEQ ID NO: 5165440 - DNA, 25 bp, Homo sapien
tccaccagtgtcaggagcaagggtg

SEQ ID NO: 5165441 - DNA, 25 bp, Homo sapien
catggcagactaggctcagtgggcc

SEQ ID NO: 5165442 - DNA, 25 bp, Homo sapien
gcaacagcatgagagtcctgggtcc

SEQ ID NO: 5165443 - DNA, 25 bp, Homo sapien
agcaacagcatgagagtcctgggtc

SEQ ID NO: 5165444 - DNA, 25 bp, Homo sapien
gagaagatgtattgcttgccaaacc

SEQ ID NO: 5165445 - DNA, 25 bp, Homo sapien
gcgggcccaacagagtactgtccat

SEQ ID NO: 5165446 - DNA, 25 bp, Homo sapien
caacagagtactgtccatacatggg

SEQ ID NO: 5165447 - DNA, 25 bp, Homo sapien
gcagccatgatgttagagcagagtc

SEQ ID NO: 5165448 - DNA, 25 bp, Homo sapien
cagaaggtatctccatgtctcaact

SEQ ID NO: 5165449 - DNA, 25 bp, Homo sapien
gagaaattcagcacatcgctggatg

SEQ ID NO: 5165450 - DNA, 25 bp, Homo sapien
ccttttcaacctgaggatttgggct

SEQ ID NO: 5165451 - DNA, 25 bp, Homo sapien
tggcacatccacgtagaggaatgct

SEQ ID NO: 5165452 - DNA, 25 bp, Homo sapien
cagcagactccacagctccgcacag

SEQ ID NO: 5165453 - DNA, 25 bp, Homo sapien
cccatcaccttcaaatacctggttt

SEQ ID NO: 5165454 - DNA, 25 bp, Homo sapien
acagctccgcacagcaagcttgacc

SEQ ID NO: 5165455 - DNA, 25 bp, Homo sapien
aggtggccctccatgcacggcagct

SEQ ID NO: 5165456 - DNA, 25 bp, Homo sapien
ggccctccatgcacggcagcttccc

SEQ ID NO: 5165457 - DNA, 25 bp, Homo sapien
gggccctcagcacttggtctgtcca

SEQ ID NO: 5165458 - DNA, 25 bp, Homo sapien
cagggccctcagcacttggtctgtc

SEQ ID NO: 5165459 - DNA, 25 bp, Homo sapien
cagaatctcagggcccagccttggt

SEQ ID NO: 5165460 - DNA, 25 bp, Homo sapien
cttggttccctgtggcccacagcat

SEQ ID NO: 5165461 - DNA, 25 bp, Homo sapien
gggcccagccttggttccctgtggc

SEQ ID NO: 5165462 - DNA, 25 bp, Homo sapien
ccagccttggttccctgtggcccac

SEQ ID NO: 5165463 - DNA, 25 bp, Homo sapien
tcctatcctctacaaaatgccacgg

SEQ ID NO: 5165464 - DNA, 25 bp, Homo sapien
atgtgatggtcaccggccaccagga

SEQ ID NO: 5165465 - DNA, 25 bp, Homo sapien
gttcacttcaataagccagtcttta

SEQ ID NO: 5165466 - DNA, 25 bp, Homo sapien
gccagtctttatcagttggtttgtc

SEQ ID NO: 5165467 - DNA, 25 bp, Homo sapien
agctcgtctgcttcactctgactgc

SEQ ID NO: 5165468 - DNA, 25 bp, Homo sapien
actgccgcagaagcctctattcttg

SEQ ID NO: 5165469 - DNA, 25 bp, Homo sapien
ttcactctgactgccgcagaagcct

SEQ ID NO: 5165470 - DNA, 25 bp, Homo sapien
accactgcactaagctcgtctgctt

SEQ ID NO: 5165471 - DNA, 25 bp, Homo sapien
aggaggtggcccctttggcatctct

SEQ ID NO: 5165472 - DNA, 25 bp, Homo sapien
aaagctgctgtagattttcctgagg

SEQ ID NO: 5165473 - DNA, 25 bp, Homo sapien
ggtggcccctttggcatctctggcc

SEQ ID NO: 5165474 - DNA, 25 bp, Homo sapien
ctgtagattttcctgaggaggcagg

SEQ ID NO: 5165475 - DNA, 25 bp, Homo sapien
ccagcccaggccacacttctgggtg

SEQ ID NO: 5165476 - DNA, 25 bp, Homo sapien
gcccagcccaggccacacttctggg

SEQ ID NO: 5165477 - DNA, 25 bp, Homo sapien
agcccaggccacacttctgggtggc

SEQ ID NO: 5165478 - DNA, 25 bp, Homo sapien
cctcccaggctagcccagcccaggc

SEQ ID NO: 5165479 - DNA, 25 bp, Homo sapien
tgagctgctcttcctacaaccagag

SEQ ID NO: 5165480 - DNA, 25 bp, Homo sapien
cagcgccagcagtacattttacaga

SEQ ID NO: 5165481 - DNA, 25 bp, Homo sapien
tcgacctactcctgactgaagtgca

SEQ ID NO: 5165482 - DNA, 25 bp, Homo sapien
cacccaggttgagtgtgccctctgt

SEQ ID NO: 5165483 - DNA, 25 bp, Homo sapien
gatggaggatggtagctgttacata

SEQ ID NO: 5165484 - DNA, 25 bp, Homo sapien
gaatgccggctatctttcctccagc

SEQ ID NO: 5165485 - DNA, 25 bp, Homo sapien
tccagctacctgcctcaagactggg

SEQ ID NO: 5165486 - DNA, 25 bp, Homo sapien
tcatcaagcacttccctgaaggctg

SEQ ID NO: 5165487 - DNA, 25 bp, Homo sapien
aggacggggctgagccagggaccat

SEQ ID NO: 5165488 - DNA, 25 bp, Homo sapien
ggcaggccacagagcaggctgaggg

SEQ ID NO: 5165489 - DNA, 25 bp, Homo sapien
gcaggctgagggggctggaggacgg

SEQ ID NO: 5165490 - DNA, 25 bp, Homo sapien
gctgagggggctggaggacggggct

SEQ ID NO: 5165491 - DNA, 25 bp, Homo sapien
gagccgcagccagtcagcagaacag

SEQ ID NO: 5165492 - DNA, 25 bp, Homo sapien
ccagtcagcagaacagcagctgtcc

SEQ ID NO: 5165493 - DNA, 25 bp, Homo sapien
ccggagccgcagccagtcagcagaa

SEQ ID NO: 5165494 - DNA, 25 bp, Homo sapien
cagtcagcagaacagcagctgtcca

SEQ ID NO: 5165495 - DNA, 25 bp, Homo sapien
tctttacacacacggccttctttgc

SEQ ID NO: 5165496 - DNA, 25 bp, Homo sapien
tacacacacggccttctttgctctt

SEQ ID NO: 5165497 - DNA, 25 bp, Homo sapien
cagcactgggctctttacacacacg

SEQ ID NO: 5165498 - DNA, 25 bp, Homo sapien
tgggctctttacacacacggccttc

SEQ ID NO: 5165499 - DNA, 25 bp, Homo sapien
gagataagacgagggcccacagagt

SEQ ID NO: 5165500 - DNA, 25 bp, Homo sapien
ctggaggtcacgtgatggatgggct

SEQ ID NO: 5165501 - DNA, 25 bp, Homo sapien
cagtgctggaggtcacgtgatggat

SEQ ID NO: 5165502 - DNA, 25 bp, Homo sapien
gggctggccggggagataagacgag

SEQ ID NO: 5165503 - DNA, 25 bp, Homo sapien
ttgtggacaattgtgcagagctgca

SEQ ID NO: 5165504 - DNA, 25 bp, Homo sapien
gactgtagctatcgtgttggccaga

SEQ ID NO: 5165505 - DNA, 25 bp, Homo sapien
tcgtgttggccagatgttgtggaca

SEQ ID NO: 5165506 - DNA, 25 bp, Homo sapien
ttcatgactgtagctatcgtgttgg

SEQ ID NO: 5165507 - DNA, 25 bp, Homo sapien
gctctttccccaacagagagcagat

SEQ ID NO: 5165508 - DNA, 25 bp, Homo sapien
acagagagcagatgggatcccgggg

SEQ ID NO: 5165509 - DNA, 25 bp, Homo sapien
ctgctctttccccaacagagagcag

SEQ ID NO: 5165510 - DNA, 25 bp, Homo sapien
tctttccccaacagagagcagatgg

SEQ ID NO: 5165511 - DNA, 25 bp, Homo sapien
ccagactattctttcctggacccca

SEQ ID NO: 5165512 - DNA, 25 bp, Homo sapien
agactattctttcctggaccccatt

SEQ ID NO: 5165513 - DNA, 25 bp, Homo sapien
cagactattctttcctggaccccat

SEQ ID NO: 5165514 - DNA, 25 bp, Homo sapien
cctctccctatacggcagcacaaac

SEQ ID NO: 5165515 - DNA, 25 bp, Homo sapien
tctccctatacggcagcacaaacag

SEQ ID NO: 5165516 - DNA, 25 bp, Homo sapien
aacagagaaactcctgccctggtct

SEQ ID NO: 5165517 - DNA, 25 bp, Homo sapien
tccctatacggcagcacaaacagag

SEQ ID NO: 5165518 - DNA, 25 bp, Homo sapien
gaggtggcttcaaaccaagtcctgg

SEQ ID NO: 5165519 - DNA, 25 bp, Homo sapien
taagtcctctgtgcgagtgttgctc

SEQ ID NO: 5165520 - DNA, 25 bp, Homo sapien
gaggaggtggcttcaaaccaagtcc

SEQ ID NO: 5165521 - DNA, 25 bp, Homo sapien
agccagctctaactctatgtaagtc

SEQ ID NO: 5165522 - DNA, 25 bp, Homo sapien
ccacgcagctgttcctggggccagc

SEQ ID NO: 5165523 - DNA, 25 bp, Homo sapien
cgcagctgttcctggggccagcttg

SEQ ID NO: 5165524 - DNA, 25 bp, Homo sapien
cacgcagctgttcctggggccagct

SEQ ID NO: 5165525 - DNA, 25 bp, Homo sapien
ctcccacgcagctgttcctggggcc

SEQ ID NO: 5165526 - DNA, 25 bp, Homo sapien
cctgaggaggacaggtaccagccac

SEQ ID NO: 5165527 - DNA, 25 bp, Homo sapien
ctgaggaggacaggtaccagccaca

SEQ ID NO: 5165528 - DNA, 25 bp, Homo sapien
cacacaaccccagaataatgagctg

SEQ ID NO: 5165529 - DNA, 25 bp, Homo sapien
tggagtgtgaatagcagaacctcct

SEQ ID NO: 5165530 - DNA, 25 bp, Homo sapien
gcactggagtgtgaatagcagaacc

SEQ ID NO: 5165531 - DNA, 25 bp, Homo sapien
gcagagcactggagtgtgaatagca

SEQ ID NO: 5165532 - DNA, 25 bp, Homo sapien
cacattgcccagcacgtacgagggt

SEQ ID NO: 5165533 - DNA, 25 bp, Homo sapien
cgtacgagggtctgaaaaatgtctt

SEQ ID NO: 5165534 - DNA, 25 bp, Homo sapien
tctttggactttgttcatgcttcac

SEQ ID NO: 5165535 - DNA, 25 bp, Homo sapien
tggactttgttcatgcttcacaaac

SEQ ID NO: 5165536 - DNA, 25 bp, Homo sapien
tgatcaatgtagagcctgggcatgg

SEQ ID NO: 5165537 - DNA, 25 bp, Homo sapien
aagctcaagctcttgtcccatggag

SEQ ID NO: 5165538 - DNA, 25 bp, Homo sapien
aatccattagccaggtgctctcaaa

SEQ ID NO: 5165539 - DNA, 25 bp, Homo sapien
tcccatggaggtgagatagcagcca

SEQ ID NO: 5165540 - DNA, 25 bp, Homo sapien
agggcgtgcacactcaccaggaaag

SEQ ID NO: 5165541 - DNA, 25 bp, Homo sapien
ctgagggcgtgcacactcaccagga

SEQ ID NO: 5165542 - DNA, 25 bp, Homo sapien
ggcgtgcacactcaccaggaaagcc

SEQ ID NO: 5165543 - DNA, 25 bp, Homo sapien
acacctgagggcgtgcacactcacc

SEQ ID NO: 5165544 - DNA, 25 bp, Homo sapien
agcgtgcacactcaccaggaaagcc

SEQ ID NO: 5165545 - DNA, 25 bp, Homo sapien
gcctggccacacctgagagcgtgca

SEQ ID NO: 5165546 - DNA, 25 bp, Homo sapien
tggccacacctgagagcgtgcacac

SEQ ID NO: 5165547 - DNA, 25 bp, Homo sapien
gagagcgtgcacactcaccaggaaa

SEQ ID NO: 5165548 - DNA, 25 bp, Homo sapien
caggaaagcctggccacacctgagg

SEQ ID NO: 5165549 - DNA, 25 bp, Homo sapien
ggccacacctgagggcgtgcacact

SEQ ID NO: 5165550 - DNA, 25 bp, Homo sapien
aagcctggccacacctgagggcgtg

SEQ ID NO: 5165551 - DNA, 25 bp, Homo sapien
ctggccacacctgagggcgtgcaca

SEQ ID NO: 5165552 - DNA, 25 bp, Homo sapien
gaaggctccgggacttggtctgaga

SEQ ID NO: 5165553 - DNA, 25 bp, Homo sapien
cgcaaaagagtgaccaggaaggctc

SEQ ID NO: 5165554 - DNA, 25 bp, Homo sapien
aagatacaagcagcacggccagaca

SEQ ID NO: 5165555 - DNA, 25 bp, Homo sapien
cataaagatacaagcagcacggcca

SEQ ID NO: 5165556 - DNA, 25 bp, Homo sapien
taaagatacaagcagcacggccaga

SEQ ID NO: 5165557 - DNA, 25 bp, Homo sapien
tcataaagatacaagcagcacggcc

SEQ ID NO: 5165558 - DNA, 25 bp, Homo sapien
aggaccagcaggaccgacgaaatca

SEQ ID NO: 5165559 - DNA, 25 bp, Homo sapien
aggaccgacgaaatcacaggcaggc

SEQ ID NO: 5165560 - DNA, 25 bp, Homo sapien
atgagcagaagccacgttaggacca

SEQ ID NO: 5165561 - DNA, 25 bp, Homo sapien
agaagccacgttaggaccagcagga

SEQ ID NO: 5165562 - DNA, 25 bp, Homo sapien
gcaggtcttgtctgaaatgcgttga

SEQ ID NO: 5165563 - DNA, 25 bp, Homo sapien
tgtctgaaatgcgttgatcttctct

SEQ ID NO: 5165564 - DNA, 25 bp, Homo sapien
aaaaagcaggtcttgtctgaaatgc

SEQ ID NO: 5165565 - DNA, 25 bp, Homo sapien
ctgaaatgcgttgatcttctctgcc

SEQ ID NO: 5165566 - DNA, 25 bp, Homo sapien
caacatggacgcctttgagaaccaa

SEQ ID NO: 5165567 - DNA, 25 bp, Homo sapien
ttgctggcgcctcccaacatggacg

SEQ ID NO: 5165568 - DNA, 25 bp, Homo sapien
acatggacgcctttgagaaccaaat

SEQ ID NO: 5165569 - DNA, 25 bp, Homo sapien
gcctcccaacatggacgcctttgag

SEQ ID NO: 5165570 - DNA, 25 bp, Homo sapien
tgggataccccattagagttacaaa

SEQ ID NO: 5165571 - DNA, 25 bp, Homo sapien
tgtcgcacgggagctgacagcaaac

SEQ ID NO: 5165572 - DNA, 25 bp, Homo sapien
cctttatggtaaatcacggtgtcaa

SEQ ID NO: 5165573 - DNA, 25 bp, Homo sapien
tcaaatggaccaggcagatgttggg

SEQ ID NO: 5165574 - DNA, 25 bp, Homo sapien
gcaggcctgcatcccagccaggagg

SEQ ID NO: 5165575 - DNA, 25 bp, Homo sapien
gacatgagctccgttcagggtgtct

SEQ ID NO: 5165576 - DNA, 25 bp, Homo sapien
agcagcaggcctgcatcccagccag

SEQ ID NO: 5165577 - DNA, 25 bp, Homo sapien
ggcctggacatgagctccgttcagg

SEQ ID NO: 5165578 - DNA, 25 bp, Homo sapien
tttccccagtttccagccacacagg

SEQ ID NO: 5165579 - DNA, 25 bp, Homo sapien
ataacatgtagctctcaacatcttt

SEQ ID NO: 5165580 - DNA, 25 bp, Homo sapien
actccaggaccgcctttgcagttga

SEQ ID NO: 5165581 - DNA, 25 bp, Homo sapien
tcataacatgtagctctcaacatct

SEQ ID NO: 5165582 - DNA, 25 bp, Homo sapien
tccaggaccgcctttgcagttgagc

SEQ ID NO: 5165583 - DNA, 25 bp, Homo sapien
gatggctacagcgtcactggacacc

SEQ ID NO: 5165584 - DNA, 25 bp, Homo sapien
tacttttacaagactggcagtacag

SEQ ID NO: 5165585 - DNA, 25 bp, Homo sapien
caagtacatgtgttgtatgcggaaa

SEQ ID NO: 5165586 - DNA, 25 bp, Homo sapien
tatattctagcaatgaacacttgga

SEQ ID NO: 5165587 - DNA, 25 bp, Homo sapien
tattggcttctgaatcatcgacaag

SEQ ID NO: 5165588 - DNA, 25 bp, Homo sapien
tcatcgacaagttgtacaaagtcat

SEQ ID NO: 5165589 - DNA, 25 bp, Homo sapien
agttgtacaaagtcatggagagcct

SEQ ID NO: 5165590 - DNA, 25 bp, Homo sapien
tctgaatcatcgacaagttgtacaa

SEQ ID NO: 5165591 - DNA, 25 bp, Homo sapien
cagacatcatgccagtgtacactcc

SEQ ID NO: 5165592 - DNA, 25 bp, Homo sapien
ggactgtacaatcgcccacagaaag

SEQ ID NO: 5165593 - DNA, 25 bp, Homo sapien
agacatcatgccagtgtacactcct

SEQ ID NO: 5165594 - DNA, 25 bp, Homo sapien
ctgtacaatcgcccacagaaaggtt

SEQ ID NO: 5165595 - DNA, 25 bp, Homo sapien
ttccgaagcccttttgtcttcagtg

SEQ ID NO: 5165596 - DNA, 25 bp, Homo sapien
gcccttttgtcttcagtgtaggaga

SEQ ID NO: 5165597 - DNA, 25 bp, Homo sapien
aagcccttttgtcttcagtgtagga

SEQ ID NO: 5165598 - DNA, 25 bp, Homo sapien
ccttttgtcttcagtgtaggagata

SEQ ID NO: 5165599 - DNA, 25 bp, Homo sapien
tcttgacaaggcaatgcggaaccca

SEQ ID NO: 5165600 - DNA, 25 bp, Homo sapien
gccctgcttggaacaggtcagcagt

SEQ ID NO: 5165601 - DNA, 25 bp, Homo sapien
ggtcagcagttccacgggctctcgg

SEQ ID NO: 5165602 - DNA, 25 bp, Homo sapien
gctctcggagaaagtccagtcttga

SEQ ID NO: 5165603 - DNA, 25 bp, Homo sapien
agcagactgcaccagcgccagtcgg

SEQ ID NO: 5165604 - DNA, 25 bp, Homo sapien
cagtcggcaccagggagcacctata

SEQ ID NO: 5165605 - DNA, 25 bp, Homo sapien
ccaaaggaaagacccacatcagctg

SEQ ID NO: 5165606 - DNA, 25 bp, Homo sapien
catggaaacggaaggaatatggact

SEQ ID NO: 5165607 - DNA, 25 bp, Homo sapien
tccaaaactttagctttgatctgtt

SEQ ID NO: 5165608 - DNA, 25 bp, Homo sapien
ttagctttgatctgttcacagcagg

SEQ ID NO: 5165609 - DNA, 25 bp, Homo sapien
gcagcctcgcgggtatctccttgct

SEQ ID NO: 5165610 - DNA, 25 bp, Homo sapien
ctccttgctgtgcacctggagtcat

SEQ ID NO: 5165611 - DNA, 25 bp, Homo sapien
cattgagtgaggtggagccagtgct

SEQ ID NO: 5165612 - DNA, 25 bp, Homo sapien
tacagcagacattgagtgaggtgga

SEQ ID NO: 5165613 - DNA, 25 bp, Homo sapien
ctacagcagacattgagtgaggtgg

SEQ ID NO: 5165614 - DNA, 25 bp, Homo sapien
agcagacattgagtgaggtggagcc

SEQ ID NO: 5165615 - DNA, 25 bp, Homo sapien
gcaggcagttaccatcagtggcctc

SEQ ID NO: 5165616 - DNA, 25 bp, Homo sapien
caggcagttaccatcagtggcctct

SEQ ID NO: 5165617 - DNA, 25 bp, Homo sapien
ggcaggcagttaccatcagtggcct

SEQ ID NO: 5165618 - DNA, 25 bp, Homo sapien
gatttgtttgccgaccctcagcaca

SEQ ID NO: 5165619 - DNA, 25 bp, Homo sapien
agcacacggtgttgggggatcccca

SEQ ID NO: 5165620 - DNA, 25 bp, Homo sapien
cttcactaaatgcatcctaatatct

SEQ ID NO: 5165621 - DNA, 25 bp, Homo sapien
tctcctctgatagacagccacaggt

SEQ ID NO: 5165622 - DNA, 25 bp, Homo sapien
caggcacccgcatagcctcctccat

SEQ ID NO: 5165623 - DNA, 25 bp, Homo sapien
cttcaggtgcttgtgtcagaagagg

SEQ ID NO: 5165624 - DNA, 25 bp, Homo sapien
ctcctttccaagcctagccctttct

SEQ ID NO: 5165625 - DNA, 25 bp, Homo sapien
caagcctagccctttcttcttcagg

SEQ ID NO: 5165626 - DNA, 25 bp, Homo sapien
ttcttcaggtgcttgtgtcagaaga

SEQ ID NO: 5165627 - DNA, 25 bp, Homo sapien
cttgggaaatgctaccttaagttca

SEQ ID NO: 5165628 - DNA, 25 bp, Homo sapien
atccaggcatgcttctgggtctgtg

SEQ ID NO: 5165629 - DNA, 25 bp, Homo sapien
tatcatccaggcatgcttctgggtc

SEQ ID NO: 5165630 - DNA, 25 bp, Homo sapien
catccaggcatgcttctgggtctgt

SEQ ID NO: 5165631 - DNA, 25 bp, Homo sapien
cgtatcatccaggcatgcttctggg

SEQ ID NO: 5165632 - DNA, 25 bp, Homo sapien
ccagggaagcgggtgacacactgcc

SEQ ID NO: 5165633 - DNA, 25 bp, Homo sapien
cagggaagcgggtgacacactgccc

SEQ ID NO: 5165634 - DNA, 25 bp, Homo sapien
gggaagcgggtgacacactgcccgc

SEQ ID NO: 5165635 - DNA, 25 bp, Homo sapien
caccagggaagcgggtgacacactg

SEQ ID NO: 5165636 - DNA, 25 bp, Homo sapien
tcggcctggcgccatcttgtggctc

SEQ ID NO: 5165637 - DNA, 25 bp, Homo sapien
tccacggccttgacggtcggcctgg

SEQ ID NO: 5165638 - DNA, 25 bp, Homo sapien
gctggggactccagaatcccgcgtt

SEQ ID NO: 5165639 - DNA, 25 bp, Homo sapien
ggctctccagagctcgctggttctc

SEQ ID NO: 5165640 - DNA, 25 bp, Homo sapien
tggagccgcggccccaaacgcggcc

SEQ ID NO: 5165641 - DNA, 25 bp, Homo sapien
gccgcggccccaaacgcggccgcac

SEQ ID NO: 5165642 - DNA, 25 bp, Homo sapien
caagtagagggaatagggctgccac

SEQ ID NO: 5165643 - DNA, 25 bp, Homo sapien
cactggtgcaatggtcgtctctcct

SEQ ID NO: 5165644 - DNA, 25 bp, Homo sapien
tgggaactcatacgtagcaggagca

SEQ ID NO: 5165645 - DNA, 25 bp, Homo sapien
actcatacgtagcaggagcaagtag

SEQ ID NO: 5165646 - DNA, 25 bp, Homo sapien
taaatccttggcttggagaagaaga

SEQ ID NO: 5165647 - DNA, 25 bp, Homo sapien
gatctctcccgctggcaatgacaga

SEQ ID NO: 5165648 - DNA, 25 bp, Homo sapien
tcctttccatcacatgccgtgtggc

SEQ ID NO: 5165649 - DNA, 25 bp, Homo sapien
gcacgtctatgatgtcagagcctat

SEQ ID NO: 5165650 - DNA, 25 bp, Homo sapien
aaagctgtgatactggaatggaccc

SEQ ID NO: 5165651 - DNA, 25 bp, Homo sapien
gacaataaaggactggtacgaacac

SEQ ID NO: 5165652 - DNA, 25 bp, Homo sapien
tggaattcggtaacatgcatgcgga

SEQ ID NO: 5165653 - DNA, 25 bp, Homo sapien
tacgaacaccatatgatgccaaagg

SEQ ID NO: 5165654 - DNA, 25 bp, Homo sapien
cgggaggcgctgctgcttgctcaag

SEQ ID NO: 5165655 - DNA, 25 bp, Homo sapien
ggaggcgctgctgcttgctcaagtc

SEQ ID NO: 5165656 - DNA, 25 bp, Homo sapien
aggagacttgtccccctgggctctg

SEQ ID NO: 5165657 - DNA, 25 bp, Homo sapien
aggcgctgctgcttgctcaagtcca

SEQ ID NO: 5165658 - DNA, 25 bp, Homo sapien
cacaccctgggcacccgtctcccgg

SEQ ID NO: 5165659 - DNA, 25 bp, Homo sapien
aagccatggagtcgcggttcccgga

SEQ ID NO: 5165660 - DNA, 25 bp, Homo sapien
cgctgaccagattcccttgttcatc

SEQ ID NO: 5165661 - DNA, 25 bp, Homo sapien
gcaaagccatggagtcgcggttccc

SEQ ID NO: 5165662 - DNA, 25 bp, Homo sapien
caggaatatcctggcaaaaggagga

SEQ ID NO: 5165663 - DNA, 25 bp, Homo sapien
tccttggctgggtttggagaccgct

SEQ ID NO: 5165664 - DNA, 25 bp, Homo sapien
ggcacagcatatttggcttcggacg

SEQ ID NO: 5165665 - DNA, 25 bp, Homo sapien
ctgagaaggcttctccaccaggtga

SEQ ID NO: 5165666 - DNA, 25 bp, Homo sapien
ctcccgctccacacccgcagggtct

SEQ ID NO: 5165667 - DNA, 25 bp, Homo sapien
agctcagcggtcctctgcagagtgg

SEQ ID NO: 5165668 - DNA, 25 bp, Homo sapien
cagctcagcggtcctctgcagagtg

SEQ ID NO: 5165669 - DNA, 25 bp, Homo sapien
ttcctgggctcccgctccacacccg

SEQ ID NO: 5165670 - DNA, 25 bp, Homo sapien
attcagctcaccagtaggcttgccc

SEQ ID NO: 5165671 - DNA, 25 bp, Homo sapien
agctcaccagtaggcttgcccctgc

SEQ ID NO: 5165672 - DNA, 25 bp, Homo sapien
ctcaccagtaggcttgcccctgcaa

SEQ ID NO: 5165673 - DNA, 25 bp, Homo sapien
accagtaggcttgcccctgcaagaa

SEQ ID NO: 5165674 - DNA, 25 bp, Homo sapien
gctcagcacagccataatctagtgg

SEQ ID NO: 5165675 - DNA, 25 bp, Homo sapien
cacagccataatctagtgggccagc

SEQ ID NO: 5165676 - DNA, 25 bp, Homo sapien
tcagcacagccataatctagtgggc

SEQ ID NO: 5165677 - DNA, 25 bp, Homo sapien
gccataatctagtgggccagctgca

SEQ ID NO: 5165678 - DNA, 25 bp, Homo sapien
aaaacggcgcagcacgagactatat

SEQ ID NO: 5165679 - DNA, 25 bp, Homo sapien
aacggcgcagcacgagactatatcc

SEQ ID NO: 5165680 - DNA, 25 bp, Homo sapien
taaaaaacggcgcagcacgagacta

SEQ ID NO: 5165681 - DNA, 25 bp, Homo sapien
cggcgcagcacgagactatatccca

SEQ ID NO: 5165682 - DNA, 25 bp, Homo sapien
gagtagcagggatctgatttatctt

SEQ ID NO: 5165683 - DNA, 25 bp, Homo sapien
agtagcagggatctgatttatcttc

SEQ ID NO: 5165684 - DNA, 25 bp, Homo sapien
ttctgcttaaggagtagcagggatc

SEQ ID NO: 5165685 - DNA, 25 bp, Homo sapien
acttctgcttaaggagtagcaggga

SEQ ID NO: 5165686 - DNA, 25 bp, Homo sapien
gaggcaagctgtgaggccatgttca

SEQ ID NO: 5165687 - DNA, 25 bp, Homo sapien
gcctcactcctcaagaaagcagaag

SEQ ID NO: 5165688 - DNA, 25 bp, Homo sapien
gaaagtacgcaaggatgaacacatg

SEQ ID NO: 5165689 - DNA, 25 bp, Homo sapien
cacgtgcggctatgtgtcttcagca

SEQ ID NO: 5165690 - DNA, 25 bp, Homo sapien
ttggtggtgacacaaattttcccag

SEQ ID NO: 5165691 - DNA, 25 bp, Homo sapien
gttggtggtgacacaaattttccca

SEQ ID NO: 5165692 - DNA, 25 bp, Homo sapien
tccagcccaaccttcaccagagcct

SEQ ID NO: 5165693 - DNA, 25 bp, Homo sapien
cttctccagcccaaccttcaccaga

SEQ ID NO: 5165694 - DNA, 25 bp, Homo sapien
aaaggttcaccttcccgttcagcag

SEQ ID NO: 5165695 - DNA, 25 bp, Homo sapien
tggcataggtgaccgctggtgcatt

SEQ ID NO: 5165696 - DNA, 25 bp, Homo sapien
tgaccgctggtgcattgaccctggg

SEQ ID NO: 5165697 - DNA, 25 bp, Homo sapien
aaaggtatggcataggtgaccgctg

SEQ ID NO: 5165698 - DNA, 25 bp, Homo sapien
taggtgaccgctggtgcattgaccc

SEQ ID NO: 5165699 - DNA, 25 bp, Homo sapien
caagctcccgaagagcaaagggcat

SEQ ID NO: 5165700 - DNA, 25 bp, Homo sapien
ccttattgtcttctgttaggcagac

SEQ ID NO: 5165701 - DNA, 25 bp, Homo sapien
ttaggcagacaagctcccgaagagc

SEQ ID NO: 5165702 - DNA, 25 bp, Homo sapien
tcttctgttaggcagacaagctccc

SEQ ID NO: 5165703 - DNA, 25 bp, Homo sapien
ttttagatgtattgttaccaatttc

SEQ ID NO: 5165704 - DNA, 25 bp, Homo sapien
caaatctgggttattcctattaagg

SEQ ID NO: 5165705 - DNA, 25 bp, Homo sapien
ctactttatgctctcaaaattcata

SEQ ID NO: 5165706 - DNA, 25 bp, Homo sapien
cctattaaggttcctgtgagaaatc

SEQ ID NO: 5165707 - DNA, 25 bp, Homo sapien
ctggaatgagagatacaggactact

SEQ ID NO: 5165708 - DNA, 25 bp, Homo sapien
agtgtcctccaaaccctgcgtgggt

SEQ ID NO: 5165709 - DNA, 25 bp, Homo sapien
catcagcgctagcaggcttgagact

SEQ ID NO: 5165710 - DNA, 25 bp, Homo sapien
tacttgagtcaaaaacatcagcgct

SEQ ID NO: 5165711 - DNA, 25 bp, Homo sapien
gccaggttctttccaccacggaggc

SEQ ID NO: 5165712 - DNA, 25 bp, Homo sapien
tcctgccaggttctttccaccacgg

SEQ ID NO: 5165713 - DNA, 25 bp, Homo sapien
cctgccaggttctttccaccacgga

SEQ ID NO: 5165714 - DNA, 25 bp, Homo sapien
ccaggttctttccaccacggaggct

SEQ ID NO: 5165715 - DNA, 25 bp, Homo sapien
taggtattgacggtgatgattccca

SEQ ID NO: 5165716 - DNA, 25 bp, Homo sapien
tattgacggtgatgattcccaaaaa

SEQ ID NO: 5165717 - DNA, 25 bp, Homo sapien
ctaggtattgacggtgatgattccc

SEQ ID NO: 5165718 - DNA, 25 bp, Homo sapien
ggtattgacggtgatgattcccaaa

SEQ ID NO: 5165719 - DNA, 25 bp, Homo sapien
tcattcttttcgaagagcagtccca

SEQ ID NO: 5165720 - DNA, 25 bp, Homo sapien
ggtcgcttgcctccattgttatgac

SEQ ID NO: 5165721 - DNA, 25 bp, Homo sapien
catcaagacagacacggtaatggtc

SEQ ID NO: 5165722 - DNA, 25 bp, Homo sapien
tatgacatttgtcctcagaatcgct

SEQ ID NO: 5165723 - DNA, 25 bp, Homo sapien
tgatgctctggctacagatctgatg

SEQ ID NO: 5165724 - DNA, 25 bp, Homo sapien
gctacagatctgatggattttcacc

SEQ ID NO: 5165725 - DNA, 25 bp, Homo sapien
tggattttcacccatccaggagggt

SEQ ID NO: 5165726 - DNA, 25 bp, Homo sapien
tctgatggattttcacccatccagg

SEQ ID NO: 5165727 - DNA, 25 bp, Homo sapien
tgtggctctgcacttgcggggcacc

SEQ ID NO: 5165728 - DNA, 25 bp, Homo sapien
tctgcacttgcggggcaccttgcct

SEQ ID NO: 5165729 - DNA, 25 bp, Homo sapien
tggctctgcacttgcggggcacctt

SEQ ID NO: 5165730 - DNA, 25 bp, Homo sapien
gctctgcacttgcggggcaccttgc

SEQ ID NO: 5165731 - DNA, 25 bp, Homo sapien
gacaccctggccatccatatacata

SEQ ID NO: 5165732 - DNA, 25 bp, Homo sapien
acaccctggccatccatatacatag

SEQ ID NO: 5165733 - DNA, 25 bp, Homo sapien
caagtgtccacacgggaagttgggt

SEQ ID NO: 5165734 - DNA, 25 bp, Homo sapien
ctgcaagtgtccacacgggaagttg

SEQ ID NO: 5165735 - DNA, 25 bp, Homo sapien
tgcaagtgtccacacgggaagttgg

SEQ ID NO: 5165736 - DNA, 25 bp, Homo sapien
ttcccaattcacccatcctgcaagt

SEQ ID NO: 5165737 - DNA, 25 bp, Homo sapien
atttcattggccatagacctcttct

SEQ ID NO: 5165738 - DNA, 25 bp, Homo sapien
caaatttcattggccatagacctct

SEQ ID NO: 5165739 - DNA, 25 bp, Homo sapien
aatttcattggccatagacctcttc

SEQ ID NO: 5165740 - DNA, 25 bp, Homo sapien
tcaaatttcattggccatagacctc

SEQ ID NO: 5165741 - DNA, 25 bp, Homo sapien
gcagcagcaatgacagcgccctcat

SEQ ID NO: 5165742 - DNA, 25 bp, Homo sapien
ctgctccttcccatcgtcatcctca

SEQ ID NO: 5165743 - DNA, 25 bp, Homo sapien
tgtgcagggtccctcattcccctgc

SEQ ID NO: 5165744 - DNA, 25 bp, Homo sapien
tcccatcgtcatcctcagctagcag

SEQ ID NO: 5165745 - DNA, 25 bp, Homo sapien
tgtggtaaatgccaatgaagccctg

SEQ ID NO: 5165746 - DNA, 25 bp, Homo sapien
tcttcaggcaagtcctggcatggca

SEQ ID NO: 5165747 - DNA, 25 bp, Homo sapien
cacagtatggaacaagatcttcagg

SEQ ID NO: 5165748 - DNA, 25 bp, Homo sapien
tgggctacccgataacagaaggtgg

SEQ ID NO: 5165749 - DNA, 25 bp, Homo sapien
tgcccacttccttcgctgtgaagga

SEQ ID NO: 5165750 - DNA, 25 bp, Homo sapien
gatcctgaggctgcggatgtctgtc

SEQ ID NO: 5165751 - DNA, 25 bp, Homo sapien
aactcaaaacagtggtagcggctgc

SEQ ID NO: 5165752 - DNA, 25 bp, Homo sapien
aaaacagtggtagcggctgcccact

SEQ ID NO: 5165753 - DNA, 25 bp, Homo sapien
ttgcgctcgcagctcagtgatgccc

SEQ ID NO: 5165754 - DNA, 25 bp, Homo sapien
tctttctcccggcttgtttcacagg

SEQ ID NO: 5165755 - DNA, 25 bp, Homo sapien
agtgatgcccccatgaggctccagt

SEQ ID NO: 5165756 - DNA, 25 bp, Homo sapien
atggaattgcgctcgcagctcagtg

SEQ ID NO: 5165757 - DNA, 25 bp, Homo sapien
tccatcttgctagagattttctcct

SEQ ID NO: 5165758 - DNA, 25 bp, Homo sapien
aagcatgtaaggcatgtggttcaca

SEQ ID NO: 5165759 - DNA, 25 bp, Homo sapien
gagatggctggcaatggtcctcacc

SEQ ID NO: 5165760 - DNA, 25 bp, Homo sapien
tttatccagtatagttcaaccattg

SEQ ID NO: 5165761 - DNA, 25 bp, Homo sapien
agaagttttattgatgcagtggcca

SEQ ID NO: 5165762 - DNA, 25 bp, Homo sapien
tttgcattccaggtcactactcagg

SEQ ID NO: 5165763 - DNA, 25 bp, Homo sapien
caagctcctgactagtagcacgctg

SEQ ID NO: 5165764 - DNA, 25 bp, Homo sapien
taaataaacagataggcagccaagc

SEQ ID NO: 5165765 - DNA, 25 bp, Homo sapien
tgtgatgtctttactgatacctgga

SEQ ID NO: 5165766 - DNA, 25 bp, Homo sapien
tgtctttactgatacctggaccctt

SEQ ID NO: 5165767 - DNA, 25 bp, Homo sapien
tgtgggtgtgatgtctttactgata

SEQ ID NO: 5165768 - DNA, 25 bp, Homo sapien
ttactgatacctggacccttttctc

SEQ ID NO: 5165769 - DNA, 25 bp, Homo sapien
tccattacgcttgacaagactgata

SEQ ID NO: 5165770 - DNA, 25 bp, Homo sapien
cattacgcttgacaagactgatact

SEQ ID NO: 5165771 - DNA, 25 bp, Homo sapien
ccattacgcttgacaagactgatac

SEQ ID NO: 5165772 - DNA, 25 bp, Homo sapien
cctccattacgcttgacaagactga

SEQ ID NO: 5165773 - DNA, 25 bp, Homo sapien
tgggctgaatccgtgaggccctttg

SEQ ID NO: 5165774 - DNA, 25 bp, Homo sapien
ctgaatccgtgaggccctttggggc

SEQ ID NO: 5165775 - DNA, 25 bp, Homo sapien
ggctgaatccgtgaggccctttggg

SEQ ID NO: 5165776 - DNA, 25 bp, Homo sapien
ggtgggctgaatccgtgaggccctt

SEQ ID NO: 5165777 - DNA, 25 bp, Homo sapien
ggtcaggcccactgtcagttcagca

SEQ ID NO: 5165778 - DNA, 25 bp, Homo sapien
gagcataggtctggcgggccctttc

SEQ ID NO: 5165779 - DNA, 25 bp, Homo sapien
cagggcaccccagacaaccaggact

SEQ ID NO: 5165780 - DNA, 25 bp, Homo sapien
gtagagagccattcgctcagggcac

SEQ ID NO: 5165781 - DNA, 25 bp, Homo sapien
aaggacaggttagtcgctggagcaa

SEQ ID NO: 5165782 - DNA, 25 bp, Homo sapien
aggcagaaggacaggttagtcgctg

SEQ ID NO: 5165783 - DNA, 25 bp, Homo sapien
tggagcaagtcgcagagggcttgtg

SEQ ID NO: 5165784 - DNA, 25 bp, Homo sapien
ggagcaagtcgcagagggcttgtgt

SEQ ID NO: 5165785 - DNA, 25 bp, Homo sapien
aggacagagtatgcaaccaaggatg

SEQ ID NO: 5165786 - DNA, 25 bp, Homo sapien
cagttgggtattaattgctgtatcc

SEQ ID NO: 5165787 - DNA, 25 bp, Homo sapien
gctgtatccattaatgcatgtgaga

SEQ ID NO: 5165788 - DNA, 25 bp, Homo sapien
gatgttcgggtcacatagcctgcaa

SEQ ID NO: 5165789 - DNA, 25 bp, Homo sapien
gtaagaatggccctaaacagttctg

SEQ ID NO: 5165790 - DNA, 25 bp, Homo sapien
aacagttctgtttgtgtaatcagca

SEQ ID NO: 5165791 - DNA, 25 bp, Homo sapien
gcaggtagccaaaatggtaatgaac

SEQ ID NO: 5165792 - DNA, 25 bp, Homo sapien
taagaatgtgatgtaagaatggccc

SEQ ID NO: 5165793 - DNA, 25 bp, Homo sapien
tgggctgcatagcacccctcaagaa

SEQ ID NO: 5165794 - DNA, 25 bp, Homo sapien
catcctcaatcagaggcacctgggc

SEQ ID NO: 5165795 - DNA, 25 bp, Homo sapien
tcatcctcaatcagaggcacctggg

SEQ ID NO: 5165796 - DNA, 25 bp, Homo sapien
ctcatcctcaatcagaggcacctgg

SEQ ID NO: 5165797 - DNA, 25 bp, Homo sapien
aaggtacgcaggtagtctatgagca

SEQ ID NO: 5165798 - DNA, 25 bp, Homo sapien
tcagtgaagtgtagtacagccacac

SEQ ID NO: 5165799 - DNA, 25 bp, Homo sapien
ccaggatagacctaaattcattgga

SEQ ID NO: 5165800 - DNA, 25 bp, Homo sapien
tagtctatgagcacgttattcaatc

SEQ ID NO: 5165801 - DNA, 25 bp, Homo sapien
agcattcacatgggttgcagtcagc

SEQ ID NO: 5165802 - DNA, 25 bp, Homo sapien
cagcaatgtacctcttctcccagta

SEQ ID NO: 5165803 - DNA, 25 bp, Homo sapien
gcaatgtacctcttctcccagtact

SEQ ID NO: 5165804 - DNA, 25 bp, Homo sapien
ctagcattcacatgggttgcagtca

SEQ ID NO: 5165805 - DNA, 25 bp, Homo sapien
tgtggtctggttacagatgactaag

SEQ ID NO: 5165806 - DNA, 25 bp, Homo sapien
tgtcctgtggtctggttacagatga

SEQ ID NO: 5165807 - DNA, 25 bp, Homo sapien
cctgtggtctggttacagatgacta

SEQ ID NO: 5165808 - DNA, 25 bp, Homo sapien
tcctgtggtctggttacagatgact

SEQ ID NO: 5165809 - DNA, 25 bp, Homo sapien
gcagcccagcttccactccagccat

SEQ ID NO: 5165810 - DNA, 25 bp, Homo sapien
ccagcagcccagcttccactccagc

SEQ ID NO: 5165811 - DNA, 25 bp, Homo sapien
tgtgaccagcagcccagcttccact

SEQ ID NO: 5165812 - DNA, 25 bp, Homo sapien
ctgtgaccagcagcccagcttccac

SEQ ID NO: 5165813 - DNA, 25 bp, Homo sapien
ctggaataggacctcgcatggcata

SEQ ID NO: 5165814 - DNA, 25 bp, Homo sapien
tggtcactgccgcaccctgagtctg

SEQ ID NO: 5165815 - DNA, 25 bp, Homo sapien
gccgcaccctgagtctggaatagga

SEQ ID NO: 5165816 - DNA, 25 bp, Homo sapien
tcgcatggcataggccggcagcaca

SEQ ID NO: 5165817 - DNA, 25 bp, Homo sapien
cacagccttcaaggcctggaggagc

SEQ ID NO: 5165818 - DNA, 25 bp, Homo sapien
tacacagccttcaaggcctggagga

SEQ ID NO: 5165819 - DNA, 25 bp, Homo sapien
ctacacagccttcaaggcctggagg

SEQ ID NO: 5165820 - DNA, 25 bp, Homo sapien
agccttcaaggcctggaggagcaga

SEQ ID NO: 5165821 - DNA, 25 bp, Homo sapien
catgcctgatgcagagagccaggag

SEQ ID NO: 5165822 - DNA, 25 bp, Homo sapien
caggaggccagtgcttggccagcag

SEQ ID NO: 5165823 - DNA, 25 bp, Homo sapien
gtggtcatgcctgatgcagagagcc

SEQ ID NO: 5165824 - DNA, 25 bp, Homo sapien
ggtcatgcctgatgcagagagccag

SEQ ID NO: 5165825 - DNA, 25 bp, Homo sapien
gaaagtgatgtacagcatctctaca

SEQ ID NO: 5165826 - DNA, 25 bp, Homo sapien
atctctacaggtgccccatcggcaa

SEQ ID NO: 5165827 - DNA, 25 bp, Homo sapien
ttggcaccctcagctggaaagtgat

SEQ ID NO: 5165828 - DNA, 25 bp, Homo sapien
gcttggcaccctcagctggaaagtg

SEQ ID NO: 5165829 - DNA, 25 bp, Homo sapien
tggccatgtagagaaagctgatcat

SEQ ID NO: 5165830 - DNA, 25 bp, Homo sapien
tgatcaggaagttgtgagatgtaaa

SEQ ID NO: 5165831 - DNA, 25 bp, Homo sapien
gatgtaaaacacatgggtgttgttg

SEQ ID NO: 5165832 - DNA, 25 bp, Homo sapien
agctgatcatcagtaaaggaaagta

SEQ ID NO: 5165833 - DNA, 25 bp, Homo sapien
tacttcagatataccttgggatggg

SEQ ID NO: 5165834 - DNA, 25 bp, Homo sapien
gggcaggtatgcactcataaaacac

SEQ ID NO: 5165835 - DNA, 25 bp, Homo sapien
gatccatgggtagcaccccagatga

SEQ ID NO: 5165836 - DNA, 25 bp, Homo sapien
tgaagagaaactgaaaccataacct

SEQ ID NO: 5165837 - DNA, 25 bp, Homo sapien
ttggaacaagatctgagagaggcac

SEQ ID NO: 5165838 - DNA, 25 bp, Homo sapien
gagaggcacgtctcacacttgagtg

SEQ ID NO: 5165839 - DNA, 25 bp, Homo sapien
aatgtactgacattggaacaagatc

SEQ ID NO: 5165840 - DNA, 25 bp, Homo sapien
cagatcggtaatgtactgacattgg

SEQ ID NO: 5165841 - DNA, 25 bp, Homo sapien
ctcctgagtctgctctgattgggtg

SEQ ID NO: 5165842 - DNA, 25 bp, Homo sapien
gatgcccggaaccatggtcagcaag

SEQ ID NO: 5165843 - DNA, 25 bp, Homo sapien
ggtaggcaagaagggctcctggaga

SEQ ID NO: 5165844 - DNA, 25 bp, Homo sapien
tccagaaggaagtagttgtgatgtc

SEQ ID NO: 5165845 - DNA, 25 bp, Homo sapien
cacagtgaatgcttactcccagtgt

SEQ ID NO: 5165846 - DNA, 25 bp, Homo sapien
gaaagactattctattatactcacg

SEQ ID NO: 5165847 - DNA, 25 bp, Homo sapien
tggttttccctacaatgtgagtgct

SEQ ID NO: 5165848 - DNA, 25 bp, Homo sapien
tattctattatactcacgcccacgt

SEQ ID NO: 5165849 - DNA, 25 bp, Homo sapien
gaagccttcctggactccgtcagcc

SEQ ID NO: 5165850 - DNA, 25 bp, Homo sapien
aagaagccttcctggactccgtcag

SEQ ID NO: 5165851 - DNA, 25 bp, Homo sapien
tccaagaagccttcctggactccgt

SEQ ID NO: 5165852 - DNA, 25 bp, Homo sapien
agccttcctggactccgtcagccca

SEQ ID NO: 5165853 - DNA, 25 bp, Homo sapien
ctgacaaagcagtcagtccaagcat

SEQ ID NO: 5165854 - DNA, 25 bp, Homo sapien
caactgggcacagacgggaaaggct

SEQ ID NO: 5165855 - DNA, 25 bp, Homo sapien
gccatggtcgtggaccccagagtga

SEQ ID NO: 5165856 - DNA, 25 bp, Homo sapien
gtgtaccccacaaagtcacaactgg

SEQ ID NO: 5165857 - DNA, 25 bp, Homo sapien
caccttgctggccatggtcgtggac

SEQ ID NO: 5165858 - DNA, 25 bp, Homo sapien
aacctgctcttcactctgtagctcc

SEQ ID NO: 5165859 - DNA, 25 bp, Homo sapien
tgcatcttccacagtcttttccatc

SEQ ID NO: 5165860 - DNA, 25 bp, Homo sapien
cttccacagtcttttccatcgccat

SEQ ID NO: 5165861 - DNA, 25 bp, Homo sapien
atccaacctgctcttcactctgtag

SEQ ID NO: 5165862 - DNA, 25 bp, Homo sapien
tgatgccggatagggatgatgggtg

SEQ ID NO: 5165863 - DNA, 25 bp, Homo sapien
agctgatggcactgatgccggatag

SEQ ID NO: 5165864 - DNA, 25 bp, Homo sapien
cagctgatggcactgatgccggata

SEQ ID NO: 5165865 - DNA, 25 bp, Homo sapien
gcactgatgccggatagggatgatg

SEQ ID NO: 5165866 - DNA, 25 bp, Homo sapien
gccttcacagtcagcagccactctc

SEQ ID NO: 5165867 - DNA, 25 bp, Homo sapien
aagtgaataaatcagagccctcaag

SEQ ID NO: 5165868 - DNA, 25 bp, Homo sapien
gtgaataaatcagagccctcaagac

SEQ ID NO: 5165869 - DNA, 25 bp, Homo sapien
agtgaataaatcagagccctcaaga

SEQ ID NO: 5165870 - DNA, 25 bp, Homo sapien
aacacgctgtagtgcgactttgttc

SEQ ID NO: 5165871 - DNA, 25 bp, Homo sapien
cgctgtagtgcgactttgttctggg

SEQ ID NO: 5165872 - DNA, 25 bp, Homo sapien
tcaggaagaacacgctgtagtgcga

SEQ ID NO: 5165873 - DNA, 25 bp, Homo sapien
cacactcaggaagaacacgctgtag

SEQ ID NO: 5165874 - DNA, 25 bp, Homo sapien
tgtttcaactctcagtgacctcctg

SEQ ID NO: 5165875 - DNA, 25 bp, Homo sapien
tccaggatcctcgtgttcatcctcc

SEQ ID NO: 5165876 - DNA, 25 bp, Homo sapien
cttgtctggcactcttatggaactt

SEQ ID NO: 5165877 - DNA, 25 bp, Homo sapien
gggctggatggacctggtacctcca

SEQ ID NO: 5165878 - DNA, 25 bp, Homo sapien
tctccaggcagattgagttctttct

SEQ ID NO: 5165879 - DNA, 25 bp, Homo sapien
ggcctctctgacaagccacggcttt

SEQ ID NO: 5165880 - DNA, 25 bp, Homo sapien
ttaattttgagtgcaaacatgactg

SEQ ID NO: 5165881 - DNA, 25 bp, Homo sapien
gcttttataggagcgctcttctcca

SEQ ID NO: 5165882 - DNA, 25 bp, Homo sapien
gtacagggctcctggtggcagcggc

SEQ ID NO: 5165883 - DNA, 25 bp, Homo sapien
tagtacagggctcctggtggcagcg

SEQ ID NO: 5165884 - DNA, 25 bp, Homo sapien
atagtacagggctcctggtggcagc

SEQ ID NO: 5165885 - DNA, 25 bp, Homo sapien
ctgatagtacagggctcctggtggc

SEQ ID NO: 5165886 - DNA, 25 bp, Homo sapien
ctcgctgtcaatggcaatgttgaag

SEQ ID NO: 5165887 - DNA, 25 bp, Homo sapien
gctcgctgtcaatggcaatgttgaa

SEQ ID NO: 5165888 - DNA, 25 bp, Homo sapien
ggctcgctgtcaatggcaatgttga

SEQ ID NO: 5165889 - DNA, 25 bp, Homo sapien
tgttatggtgtgtgaagtcaccacc

SEQ ID NO: 5165890 - DNA, 25 bp, Homo sapien
ctgttatggtgtgtgaagtcaccac

SEQ ID NO: 5165891 - DNA, 25 bp, Homo sapien
tgggaaccatttgtgctgggtccag

SEQ ID NO: 5165892 - DNA, 25 bp, Homo sapien
aaaaactgggaaccatttgtgctgg

SEQ ID NO: 5165893 - DNA, 25 bp, Homo sapien
gatgccatgacctgtatgctttagg

SEQ ID NO: 5165894 - DNA, 25 bp, Homo sapien
ctttaggatgaagttttcatcatca

SEQ ID NO: 5165895 - DNA, 25 bp, Homo sapien
tcatcttgccaaagaccacttgctt

SEQ ID NO: 5165896 - DNA, 25 bp, Homo sapien
tttcatcttgccaaagaccacttgc

SEQ ID NO: 5165897 - DNA, 25 bp, Homo sapien
catcttgccaaagaccacttgcttg

SEQ ID NO: 5165898 - DNA, 25 bp, Homo sapien
tctttcatcttgccaaagaccactt

SEQ ID NO: 5165899 - DNA, 25 bp, Homo sapien
tcataaacttaactcaagtctgcaa

SEQ ID NO: 5165900 - DNA, 25 bp, Homo sapien
caaagattctgggatactgtgagca

SEQ ID NO: 5165901 - DNA, 25 bp, Homo sapien
caagtctgcaatccagctatgcatg

SEQ ID NO: 5165902 - DNA, 25 bp, Homo sapien
ttaactcaagtctgcaatccagcta

SEQ ID NO: 5165903 - DNA, 25 bp, Homo sapien
cacgtaacaaatagcttgtgtggct

SEQ ID NO: 5165904 - DNA, 25 bp, Homo sapien
tgatgcgaggctcctggagaacctg

SEQ ID NO: 5165905 - DNA, 25 bp, Homo sapien
gagcatctgtcccaacacgtaacaa

SEQ ID NO: 5165906 - DNA, 25 bp, Homo sapien
gccaggatatttaggaaccggatgt

SEQ ID NO: 5165907 - DNA, 25 bp, Homo sapien
agggtccggctcctgagacctgcac

SEQ ID NO: 5165908 - DNA, 25 bp, Homo sapien
ggagcaggtgggagcactctctcca

SEQ ID NO: 5165909 - DNA, 25 bp, Homo sapien
tcacaggcaggtcagtaagtggcat

SEQ ID NO: 5165910 - DNA, 25 bp, Homo sapien
cagtaagtggcatagcacggatgag

SEQ ID NO: 5165911 - DNA, 25 bp, Homo sapien
tgggagctgccgtttttgccaccct

SEQ ID NO: 5165912 - DNA, 25 bp, Homo sapien
tgccacccttgacgtgctgtaaaag

SEQ ID NO: 5165913 - DNA, 25 bp, Homo sapien
gccttcgcaagcacgtgggagctgc

SEQ ID NO: 5165914 - DNA, 25 bp, Homo sapien
gcagaccccagaggatgtgagaata

SEQ ID NO: 5165915 - DNA, 25 bp, Homo sapien
tttgccactgagaacctcccaaaga

SEQ ID NO: 5165916 - DNA, 25 bp, Homo sapien
tcagaaaacactagagttgcaattt

SEQ ID NO: 5165917 - DNA, 25 bp, Homo sapien
atttgccactgagaacctcccaaag

SEQ ID NO: 5165918 - DNA, 25 bp, Homo sapien
aaaacactagagttgcaatttgcca

SEQ ID NO: 5165919 - DNA, 25 bp, Homo sapien
actctcatgagtgataatgtatttg

SEQ ID NO: 5165920 - DNA, 25 bp, Homo sapien
tcatgttcgtgttacagggataaca

SEQ ID NO: 5165921 - DNA, 25 bp, Homo sapien
gcaaactttactaccttaactctca

SEQ ID NO: 5165922 - DNA, 25 bp, Homo sapien
cactgaatccattctgagtgataaa

SEQ ID NO: 5165923 - DNA, 25 bp, Homo sapien
tattccaggcaggaatcatagagcc

SEQ ID NO: 5165924 - DNA, 25 bp, Homo sapien
acacctgggccaatgctttcctttg

SEQ ID NO: 5165925 - DNA, 25 bp, Homo sapien
ttcctttggcaacaatagaacggga

SEQ ID NO: 5165926 - DNA, 25 bp, Homo sapien
tcctacttcgtacatactgctgggc

SEQ ID NO: 5165927 - DNA, 25 bp, Homo sapien
gatttgattcatgtctatctttaaa

SEQ ID NO: 5165928 - DNA, 25 bp, Homo sapien
tggaccatcgactgactccctgtag

SEQ ID NO: 5165929 - DNA, 25 bp, Homo sapien
gccttggcaggtggtgttatctgat

SEQ ID NO: 5165930 - DNA, 25 bp, Homo sapien
ctcttcgaggtgacacatggctccc

SEQ ID NO: 5165931 - DNA, 25 bp, Homo sapien
tgtgatgcatgatctgacttccagc

SEQ ID NO: 5165932 - DNA, 25 bp, Homo sapien
tctgcagctgtgagaggccgctggt

SEQ ID NO: 5165933 - DNA, 25 bp, Homo sapien
gacttccagccggtgtgagtccttc

SEQ ID NO: 5165934 - DNA, 25 bp, Homo sapien
cagctctgggctgtgatgcatgatc

SEQ ID NO: 5165935 - DNA, 25 bp, Homo sapien
ctcggggcacctgctgattcacagt

SEQ ID NO: 5165936 - DNA, 25 bp, Homo sapien
ttcacagtatgggaggtagggttgg

SEQ ID NO: 5165937 - DNA, 25 bp, Homo sapien
gcacctgctgattcacagtatggga

SEQ ID NO: 5165938 - DNA, 25 bp, Homo sapien
ctgattcacagtatgggaggtaggg

SEQ ID NO: 5165939 - DNA, 25 bp, Homo sapien
tacacctattggcaggtggacagct

SEQ ID NO: 5165940 - DNA, 25 bp, Homo sapien
ccatttcggatgagtacacctattg

SEQ ID NO: 5165941 - DNA, 25 bp, Homo sapien
gctctctgggtttaggtagagacat

SEQ ID NO: 5165942 - DNA, 25 bp, Homo sapien
gatgagtacacctattggcaggtgg

SEQ ID NO: 5165943 - DNA, 25 bp, Homo sapien
tggaacagtctctgaagagggactg

SEQ ID NO: 5165944 - DNA, 25 bp, Homo sapien
gtggcgtcacccctgaggctggaac

SEQ ID NO: 5165945 - DNA, 25 bp, Homo sapien
gtccagatcttagctcgtggcgtca

SEQ ID NO: 5165946 - DNA, 25 bp, Homo sapien
aacagtctctgaagagggactgcac

SEQ ID NO: 5165947 - DNA, 25 bp, Homo sapien
tggagcccaggcaagaacggagtaa

SEQ ID NO: 5165948 - DNA, 25 bp, Homo sapien
gcatgcaccgagctgagcgcgcgct

SEQ ID NO: 5165949 - DNA, 25 bp, Homo sapien
ggaatgcactgtcccctttccagga

SEQ ID NO: 5165950 - DNA, 25 bp, Homo sapien
cagaagaggctttgcgttttcagga

SEQ ID NO: 5165951 - DNA, 25 bp, Homo sapien
tgagtcgccatgaggtatccactgt

SEQ ID NO: 5165952 - DNA, 25 bp, Homo sapien
gacgtcacaaagaggtcgcttcctt

SEQ ID NO: 5165953 - DNA, 25 bp, Homo sapien
tcacaaagaggtcgcagacgtcaca

SEQ ID NO: 5165954 - DNA, 25 bp, Homo sapien
cagggcttggagctcttaggcctca

SEQ ID NO: 5165955 - DNA, 25 bp, Homo sapien
gaccaggaataacaaagggattcca

SEQ ID NO: 5165956 - DNA, 25 bp, Homo sapien
gacccagggtgatgggtaatcatca

SEQ ID NO: 5165957 - DNA, 25 bp, Homo sapien
atctggcgggaacagcgaaagctca

SEQ ID NO: 5165958 - DNA, 25 bp, Homo sapien
gctgaatggaatcatgaccaggaat

SEQ ID NO: 5165959 - DNA, 25 bp, Homo sapien
caggaggccacagattgttgctggc

SEQ ID NO: 5165960 - DNA, 25 bp, Homo sapien
gccacagattgttgctggcatcagg

SEQ ID NO: 5165961 - DNA, 25 bp, Homo sapien
acctgttcgtggcatttgtggtcca

SEQ ID NO: 5165962 - DNA, 25 bp, Homo sapien
tcattcaggctggaaaccccaaagc

SEQ ID NO: 5165963 - DNA, 25 bp, Homo sapien
tcctatctcattaggggccaccgtg

SEQ ID NO: 5165964 - DNA, 25 bp, Homo sapien
ctgatgcgctcaaactggtgtgcaa

SEQ ID NO: 5165965 - DNA, 25 bp, Homo sapien
cctgttcttgtggttttcctatctc

SEQ ID NO: 5165966 - DNA, 25 bp, Homo sapien
ctctgccctgcattacgttctctga

SEQ ID NO: 5165967 - DNA, 25 bp, Homo sapien
ttacgttctctgatggtccttctgg

SEQ ID NO: 5165968 - DNA, 25 bp, Homo sapien
tccaagtccagccccgatgttcttt

SEQ ID NO: 5165969 - DNA, 25 bp, Homo sapien
ccttctggctacttgcatgggaatg

SEQ ID NO: 5165970 - DNA, 25 bp, Homo sapien
gagccccgtgcttcgttgagattgc

SEQ ID NO: 5165971 - DNA, 25 bp, Homo sapien
ttgagattgcttggccatgagctca

SEQ ID NO: 5165972 - DNA, 25 bp, Homo sapien
catcagtggcgttctgggtttgcaa

SEQ ID NO: 5165973 - DNA, 25 bp, Homo sapien
catgagctcagtgactgccagacat

SEQ ID NO: 5165974 - DNA, 25 bp, Homo sapien
gaactgtgaatgcaaacctctgctg

SEQ ID NO: 5165975 - DNA, 25 bp, Homo sapien
cagagtctgagcgaagaataaacac

SEQ ID NO: 5165976 - DNA, 25 bp, Homo sapien
ctgctgaaagcactgagggagtgta

SEQ ID NO: 5165977 - DNA, 25 bp, Homo sapien
gaataaacacgcagaggtgagaaag

SEQ ID NO: 5165978 - DNA, 25 bp, Homo sapien
gctgctgcttctgcccatctgcccc

SEQ ID NO: 5165979 - DNA, 25 bp, Homo sapien
gctgcttctgcccatctgcccccat

SEQ ID NO: 5165980 - DNA, 25 bp, Homo sapien
tgcagccgcactgcccaggctgctg

SEQ ID NO: 5165981 - DNA, 25 bp, Homo sapien
ctctgcagccgcactgcccaggctg

SEQ ID NO: 5165982 - DNA, 25 bp, Homo sapien
ttccaggggcattaaaggcttgcat

SEQ ID NO: 5165983 - DNA, 25 bp, Homo sapien
cagcataaattccaggggcattaaa

SEQ ID NO: 5165984 - DNA, 25 bp, Homo sapien
gcataaattccaggggcattaaagg

SEQ ID NO: 5165985 - DNA, 25 bp, Homo sapien
aaattccaggggcattaaaggcttg

SEQ ID NO: 5165986 - DNA, 25 bp, Homo sapien
tggacacggagccatgctgggtcac

SEQ ID NO: 5165987 - DNA, 25 bp, Homo sapien
gacacggagccatgctgggtcactg

SEQ ID NO: 5165988 - DNA, 25 bp, Homo sapien
ggacacggagccatgctgggtcact

SEQ ID NO: 5165989 - DNA, 25 bp, Homo sapien
catggagccatgctgagtcactgct

SEQ ID NO: 5165990 - DNA, 25 bp, Homo sapien
aaatcgaacttttgcggctcctagg

SEQ ID NO: 5165991 - DNA, 25 bp, Homo sapien
tgttctgagtggagcagccatgctg

SEQ ID NO: 5165992 - DNA, 25 bp, Homo sapien
ctgagttggaccgagcctgacagtg

SEQ ID NO: 5165993 - DNA, 25 bp, Homo sapien
gaaaatggtcttcagcgactgcgca

SEQ ID NO: 5165994 - DNA, 25 bp, Homo sapien
cactgtgtttatgccatacaggctt

SEQ ID NO: 5165995 - DNA, 25 bp, Homo sapien
agtcactgtgtttatgccatacagg

SEQ ID NO: 5165996 - DNA, 25 bp, Homo sapien
gaagtcactgtgtttatgccataca

SEQ ID NO: 5165997 - DNA, 25 bp, Homo sapien
gggaagtcactgtgtttatgccata

SEQ ID NO: 5165998 - DNA, 25 bp, Homo sapien
catccctacggacacataaggacag

SEQ ID NO: 5165999 - DNA, 25 bp, Homo sapien
tacggacacataaggacaggtcagg

SEQ ID NO: 5166000 - DNA, 25 bp, Homo sapien
gacacttgcggacaggtcaggttct

SEQ ID NO: 5166001 - DNA, 25 bp, Homo sapien
gtccctgtggacacttgcggacagg

SEQ ID NO: 5166002 - DNA, 25 bp, Homo sapien
tggtcacaaggaacaggtcaggctc

SEQ ID NO: 5166003 - DNA, 25 bp, Homo sapien
tggggaccctgctctgtgtctgctg

SEQ ID NO: 5166004 - DNA, 25 bp, Homo sapien
ctgtggtcacaaggaacaggtcagg

SEQ ID NO: 5166005 - DNA, 25 bp, Homo sapien
gtcaggctctgtggatggggaccct

SEQ ID NO: 5166006 - DNA, 25 bp, Homo sapien
gagatggacgacacaaagctatggt

SEQ ID NO: 5166007 - DNA, 25 bp, Homo sapien
tagtttggcagagatggacgacaca

SEQ ID NO: 5166008 - DNA, 25 bp, Homo sapien
gcagctttcatttcctagtttggca

SEQ ID NO: 5166009 - DNA, 25 bp, Homo sapien
tcatttcctagtttggcagagatgg

SEQ ID NO: 5166010 - DNA, 25 bp, Homo sapien
gcttgggcacatgctttaaggccat

SEQ ID NO: 5166011 - DNA, 25 bp, Homo sapien
tggaccaagcctgtccgtttgagtg

SEQ ID NO: 5166012 - DNA, 25 bp, Homo sapien
gtccgtttgagtgccagcctgtgtg

SEQ ID NO: 5166013 - DNA, 25 bp, Homo sapien
tgcttgggcacatgctttaaggcca

SEQ ID NO: 5166014 - DNA, 25 bp, Homo sapien
cccactctcacccagggcctggctc

SEQ ID NO: 5166015 - DNA, 25 bp, Homo sapien
cacccagggcctggctctcgggcct

SEQ ID NO: 5166016 - DNA, 25 bp, Homo sapien
tcacccagggcctggctctcgggcc

SEQ ID NO: 5166017 - DNA, 25 bp, Homo sapien
ccagggcctggctctcgggcctgca

SEQ ID NO: 5166018 - DNA, 25 bp, Homo sapien
accggctcacttccacaacatgtgg

SEQ ID NO: 5166019 - DNA, 25 bp, Homo sapien
tgcaagtctaaaatctaatagcgga

SEQ ID NO: 5166020 - DNA, 25 bp, Homo sapien
ccggctcacttccacaacatgtggg

SEQ ID NO: 5166021 - DNA, 25 bp, Homo sapien
atctaatagcggagttgttaaacct

SEQ ID NO: 5166022 - DNA, 25 bp, Homo sapien
tatttacatagctggcagggacacc

SEQ ID NO: 5166023 - DNA, 25 bp, Homo sapien
cacattgcagggattgtaatgggaa

SEQ ID NO: 5166024 - DNA, 25 bp, Homo sapien
gggaattggagatgatatatttaca

SEQ ID NO: 5166025 - DNA, 25 bp, Homo sapien
gatgtacacattgcagggattgtaa

SEQ ID NO: 5166026 - DNA, 25 bp, Homo sapien
gaaggtgtcttgtagttgccccagc

SEQ ID NO: 5166027 - DNA, 25 bp, Homo sapien
ctgaaggttgaggttcgggaacatc

SEQ ID NO: 5166028 - DNA, 25 bp, Homo sapien
gcccctcaggatggtaagcagagag

SEQ ID NO: 5166029 - DNA, 25 bp, Homo sapien
tgacatggcaaccactgttgatgat

SEQ ID NO: 5166030 - DNA, 25 bp, Homo sapien
cggtgaccagtgactgcctggcagc

SEQ ID NO: 5166031 - DNA, 25 bp, Homo sapien
cctcaggggtgcttcggtgaccagt

SEQ ID NO: 5166032 - DNA, 25 bp, Homo sapien
ggtgcttcggtgaccagtgactgcc

SEQ ID NO: 5166033 - DNA, 25 bp, Homo sapien
tgcttcggtgaccagtgactgcctg

SEQ ID NO: 5166034 - DNA, 25 bp, Homo sapien
ggatggggggtgctagtgtggttgt

SEQ ID NO: 5166035 - DNA, 25 bp, Homo sapien
gctgctgcatttgtgttctctttgc

SEQ ID NO: 5166036 - DNA, 25 bp, Homo sapien
gtggcagctgctccttgactgggcc

SEQ ID NO: 5166037 - DNA, 25 bp, Homo sapien
ggggtgctagtgtggttgtggcagc

SEQ ID NO: 5166038 - DNA, 25 bp, Homo sapien
tcaatgttcagtcaagtcatcattt

SEQ ID NO: 5166039 - DNA, 25 bp, Homo sapien
cctcggagtcgttgtcgtgtttgga

SEQ ID NO: 5166040 - DNA, 25 bp, Homo sapien
tcatcatttctcagcgggaggtgcg

SEQ ID NO: 5166041 - DNA, 25 bp, Homo sapien
gaggttttgactgcggcctgccatg

SEQ ID NO: 5166042 - DNA, 25 bp, Homo sapien
cagctgcagatttgtggaattcaaa

SEQ ID NO: 5166043 - DNA, 25 bp, Homo sapien
gaattcaaaggccttgacggcttca

SEQ ID NO: 5166044 - DNA, 25 bp, Homo sapien
caaaggccttgacggcttcacttgg

SEQ ID NO: 5166045 - DNA, 25 bp, Homo sapien
gacggcttcacttggggcaattgtt

SEQ ID NO: 5166046 - DNA, 25 bp, Homo sapien
gttggccctgactgatgacttccca

SEQ ID NO: 5166047 - DNA, 25 bp, Homo sapien
tcctgcgctgttggccctgactgat

SEQ ID NO: 5166048 - DNA, 25 bp, Homo sapien
tgatgacttcccaaacctccgacag

SEQ ID NO: 5166049 - DNA, 25 bp, Homo sapien
tgactgatgacttcccaaacctccg

SEQ ID NO: 5166050 - DNA, 25 bp, Homo sapien
gctttcatagtaacagcacagccct

SEQ ID NO: 5166051 - DNA, 25 bp, Homo sapien
ctgagaggtacaccccagaggccaa

SEQ ID NO: 5166052 - DNA, 25 bp, Homo sapien
cagccctcggtgtgaaaatgctctg

SEQ ID NO: 5166053 - DNA, 25 bp, Homo sapien
ggatgaattcccctgacttagcttt

SEQ ID NO: 5166054 - DNA, 25 bp, Homo sapien
tatgccaccccaattccatacagtt

SEQ ID NO: 5166055 - DNA, 25 bp, Homo sapien
caggtatgccaccccaattccatac

SEQ ID NO: 5166056 - DNA, 25 bp, Homo sapien
ggtatgccaccccaattccatacag

SEQ ID NO: 5166057 - DNA, 25 bp, Homo sapien
gccaccccaattccatacagttccc

SEQ ID NO: 5166058 - DNA, 25 bp, Homo sapien
acaatgagggtctggcgcattcgga

SEQ ID NO: 5166059 - DNA, 25 bp, Homo sapien
gaacaatgagggtctggcgcattcg

SEQ ID NO: 5166060 - DNA, 25 bp, Homo sapien
taggcctgcagcgtttccatgctcc

SEQ ID NO: 5166061 - DNA, 25 bp, Homo sapien
ttgtcctctgtcactgccttaggcc

SEQ ID NO: 5166062 - DNA, 25 bp, Homo sapien
tggtggatcccatgtggaagagcag

SEQ ID NO: 5166063 - DNA, 25 bp, Homo sapien
ctggtggatcccatgtggaagagca

SEQ ID NO: 5166064 - DNA, 25 bp, Homo sapien
tggtcatgcaacaaagacttaaaac

SEQ ID NO: 5166065 - DNA, 25 bp, Homo sapien
aaaggcacggttccttccaagagca

SEQ ID NO: 5166066 - DNA, 25 bp, Homo sapien
gtcacacacttgtacattcgtttgg

SEQ ID NO: 5166067 - DNA, 25 bp, Homo sapien
catccgggtcacacacttgtacatt

SEQ ID NO: 5166068 - DNA, 25 bp, Homo sapien
ttcggctgctgttcaacattttgac

SEQ ID NO: 5166069 - DNA, 25 bp, Homo sapien
tgggatacctgttttcggctgctgt

SEQ ID NO: 5166070 - DNA, 25 bp, Homo sapien
gggatacctgttttcggctgctgtt

SEQ ID NO: 5166071 - DNA, 25 bp, Homo sapien
ggatacctgttttcggctgctgttc

SEQ ID NO: 5166072 - DNA, 25 bp, Homo sapien
tgcaagggtcgatggccatggctgg

SEQ ID NO: 5166073 - DNA, 25 bp, Homo sapien
atctgcgcccgtgcaagggtcgatg

SEQ ID NO: 5166074 - DNA, 25 bp, Homo sapien
aagcgctgtctcaggggagactgga

SEQ ID NO: 5166075 - DNA, 25 bp, Homo sapien
ctggatctgcgcccgtgcaagggtc

SEQ ID NO: 5166076 - DNA, 25 bp, Homo sapien
cccagaacttgtctgctactctctg

SEQ ID NO: 5166077 - DNA, 25 bp, Homo sapien
aacttgtctgctactctctgaagcc

SEQ ID NO: 5166078 - DNA, 25 bp, Homo sapien
gccacagagctccataaggtcagga

SEQ ID NO: 5166079 - DNA, 25 bp, Homo sapien
cttgggagctaccaaggatggtgcc

SEQ ID NO: 5166080 - DNA, 25 bp, Homo sapien
aatgccaattaaggtggagaggctc

SEQ ID NO: 5166081 - DNA, 25 bp, Homo sapien
ctgcagaagcaacattgaactgctc

SEQ ID NO: 5166082 - DNA, 25 bp, Homo sapien
ttgaactgctcagaatgcacgccct

SEQ ID NO: 5166083 - DNA, 25 bp, Homo sapien
gcaacattgaactgctcagaatgca

SEQ ID NO: 5166084 - DNA, 25 bp, Homo sapien
agaatgcacgccctctccagaaggc

SEQ ID NO: 5166085 - DNA, 25 bp, Homo sapien
tcttgttatccccttccatggtgtg

SEQ ID NO: 5166086 - DNA, 25 bp, Homo sapien
gaaccagagtgaacgttgtggatca

SEQ ID NO: 5166087 - DNA, 25 bp, Homo sapien
tgatattcccaatagaaccagagtg

SEQ ID NO: 5166088 - DNA, 25 bp, Homo sapien
aacgttgtggatcagggaggctacc

SEQ ID NO: 5166089 - DNA, 25 bp, Homo sapien
cacagcccggctggatatagtaggc

SEQ ID NO: 5166090 - DNA, 25 bp, Homo sapien
tagtaggcgaatcctccccatctaa

SEQ ID NO: 5166091 - DNA, 25 bp, Homo sapien
tcggccctagacagaatgtttcttc

SEQ ID NO: 5166092 - DNA, 25 bp, Homo sapien
tgctcctcggccctagacagaatgt

SEQ ID NO: 5166093 - DNA, 25 bp, Homo sapien
cataactgtatccttctgtgtcctg

SEQ ID NO: 5166094 - DNA, 25 bp, Homo sapien
ggcggagccagtaccgctcctcatt

SEQ ID NO: 5166095 - DNA, 25 bp, Homo sapien
taccgctcctcatttgcggatgaac

SEQ ID NO: 5166096 - DNA, 25 bp, Homo sapien
tgaaggcttttgtcctgattctcca

SEQ ID NO: 5166097 - DNA, 25 bp, Homo sapien
ggactttcctcccacaccttgtggc

SEQ ID NO: 5166098 - DNA, 25 bp, Homo sapien
ttgtggctcccacgaggttctgcat

SEQ ID NO: 5166099 - DNA, 25 bp, Homo sapien
cacaccttgtggctcccacgaggtt

SEQ ID NO: 5166100 - DNA, 25 bp, Homo sapien
tgcaaggatggtgctactgaggcct

SEQ ID NO: 5166101 - DNA, 25 bp, Homo sapien
taacgttggcatcgtactgggctcc

SEQ ID NO: 5166102 - DNA, 25 bp, Homo sapien
catgttctgtgtaccgctgagggct

SEQ ID NO: 5166103 - DNA, 25 bp, Homo sapien
ctgcaggctgtaaattaacgttggc

SEQ ID NO: 5166104 - DNA, 25 bp, Homo sapien
actacaattgtgatgagggatctgc

SEQ ID NO: 5166105 - DNA, 25 bp, Homo sapien
aggtcagtttcattgagcagcatgt

SEQ ID NO: 5166106 - DNA, 25 bp, Homo sapien
tcagtttcattgagcagcatgtcct

SEQ ID NO: 5166107 - DNA, 25 bp, Homo sapien
gtcaggtcagtttcattgagcagca

SEQ ID NO: 5166108 - DNA, 25 bp, Homo sapien
agtcaggtcagtttcattgagcagc

SEQ ID NO: 5166109 - DNA, 25 bp, Homo sapien
aatgttcagacatgcccctgcaggg

SEQ ID NO: 5166110 - DNA, 25 bp, Homo sapien
tgggcactctgcaagccatcggaga

SEQ ID NO: 5166111 - DNA, 25 bp, Homo sapien
ccttgagtggatcccaatgttcaga

SEQ ID NO: 5166112 - DNA, 25 bp, Homo sapien
tcaataaatatcctgagcagtgggt

SEQ ID NO: 5166113 - DNA, 25 bp, Homo sapien
gcaaaacagctagccatgaagacat

SEQ ID NO: 5166114 - DNA, 25 bp, Homo sapien
ggcaaaacagctagccatgaagaca

SEQ ID NO: 5166115 - DNA, 25 bp, Homo sapien
gggaggcaaaacagctagccatgaa

SEQ ID NO: 5166116 - DNA, 25 bp, Homo sapien
gaggcaaaacagctagccatgaaga

SEQ ID NO: 5166117 - DNA, 25 bp, Homo sapien
tatccaagagagaggtgatctcccc

SEQ ID NO: 5166118 - DNA, 25 bp, Homo sapien
tggcctggaccccaatgatttatag

SEQ ID NO: 5166119 - DNA, 25 bp, Homo sapien
caacactcccagtatatgacggtgg

SEQ ID NO: 5166120 - DNA, 25 bp, Homo sapien
cacactcatagggagggaatcatgc

SEQ ID NO: 5166121 - DNA, 25 bp, Homo sapien
tttttttctgtagacttgtttgagc

SEQ ID NO: 5166122 - DNA, 25 bp, Homo sapien
tttttctgtagacttgtttgagctc

SEQ ID NO: 5166123 - DNA, 25 bp, Homo sapien
tttctgtagacttgtttgagctcct

SEQ ID NO: 5166124 - DNA, 25 bp, Homo sapien
tgattggattactagattttttttc

SEQ ID NO: 5166125 - DNA, 25 bp, Homo sapien
ctctgatggctagagacaagcattt

SEQ ID NO: 5166126 - DNA, 25 bp, Homo sapien
tgctggatcacatagcaattttatt

SEQ ID NO: 5166127 - DNA, 25 bp, Homo sapien
taggctattcttactagtgctgcaa

SEQ ID NO: 5166128 - DNA, 25 bp, Homo sapien
catctcttcggcatactgagttcag

SEQ ID NO: 5166129 - DNA, 25 bp, Homo sapien
ttagtgtttgcacagatgctctcca

SEQ ID NO: 5166130 - DNA, 25 bp, Homo sapien
cttagtgtttgcacagatgctctcc

SEQ ID NO: 5166131 - DNA, 25 bp, Homo sapien
tagtgtttgcacagatgctctccat

SEQ ID NO: 5166132 - DNA, 25 bp, Homo sapien
ttttgcttgaagtaagggtgaagct

SEQ ID NO: 5166133 - DNA, 25 bp, Homo sapien
agcttccaggcctgcataagccacg

SEQ ID NO: 5166134 - DNA, 25 bp, Homo sapien
taagggtgaagcttggagcccccat

SEQ ID NO: 5166135 - DNA, 25 bp, Homo sapien
tgcataagccacgttaaaaactgaa

SEQ ID NO: 5166136 - DNA, 25 bp, Homo sapien
caggcgcctggcacggcactgacag

SEQ ID NO: 5166137 - DNA, 25 bp, Homo sapien
ccaggcgcctggcacggcactgaca

SEQ ID NO: 5166138 - DNA, 25 bp, Homo sapien
cctggcacggcactgacaggactgg

SEQ ID NO: 5166139 - DNA, 25 bp, Homo sapien
cacggcactgacaggactgggcagg

SEQ ID NO: 5166140 - DNA, 25 bp, Homo sapien
tggctgttgagagtgtggtcttgac

SEQ ID NO: 5166141 - DNA, 25 bp, Homo sapien
catctctcataatggagcagctgct

SEQ ID NO: 5166142 - DNA, 25 bp, Homo sapien
agtgtggtcttgaccgggagtggca

SEQ ID NO: 5166143 - DNA, 25 bp, Homo sapien
tgttctttccaagccctttggtggc

SEQ ID NO: 5166144 - DNA, 25 bp, Homo sapien
aacgctgggctggtgcagacatacc

SEQ ID NO: 5166145 - DNA, 25 bp, Homo sapien
taccaactgtcaggggcgctgccct

SEQ ID NO: 5166146 - DNA, 25 bp, Homo sapien
ggtgcagacataccaactgtcaggg

SEQ ID NO: 5166147 - DNA, 25 bp, Homo sapien
cctggtgggaagctggaaacgctgg

SEQ ID NO: 5166148 - DNA, 25 bp, Homo sapien
cttgaactaagttgaacagatctga

SEQ ID NO: 5166149 - DNA, 25 bp, Homo sapien
ttagccctgggctgttcgcagccac

SEQ ID NO: 5166150 - DNA, 25 bp, Homo sapien
gcagctgggatgtcaacaggtgaac

SEQ ID NO: 5166151 - DNA, 25 bp, Homo sapien
tttcttgaactaagttgaacagatc

SEQ ID NO: 5166152 - DNA, 25 bp, Homo sapien
tgtagttgccactcaagtcatttat

SEQ ID NO: 5166153 - DNA, 25 bp, Homo sapien
tgttttgtagttgccactcaagtca

SEQ ID NO: 5166154 - DNA, 25 bp, Homo sapien
ttttgtagttgccactcaagtcatt

SEQ ID NO: 5166155 - DNA, 25 bp, Homo sapien
tagttgccactcaagtcatttatca

SEQ ID NO: 5166156 - DNA, 25 bp, Homo sapien
gaagccggcctactttgcttaaatc

SEQ ID NO: 5166157 - DNA, 25 bp, Homo sapien
gggtcttcagaaataacccctgcga

SEQ ID NO: 5166158 - DNA, 25 bp, Homo sapien
tatcaagcatacatggtcacagacc

SEQ ID NO: 5166159 - DNA, 25 bp, Homo sapien
tacgtctattgacaaagaagccggc

SEQ ID NO: 5166160 - DNA, 25 bp, Homo sapien
ctatctgagaagaaccggaggccgg

SEQ ID NO: 5166161 - DNA, 25 bp, Homo sapien
gacgacggggctatctgagaagaac

SEQ ID NO: 5166162 - DNA, 25 bp, Homo sapien
gaaggcattagtgcccgcttctggg

SEQ ID NO: 5166163 - DNA, 25 bp, Homo sapien
tcaacaactttcagcgttcagggaa

SEQ ID NO: 5166164 - DNA, 25 bp, Homo sapien
ttcatttccccctgaggagccactc

SEQ ID NO: 5166165 - DNA, 25 bp, Homo sapien
ctgttccaccccaaaaccgtcgcag

SEQ ID NO: 5166166 - DNA, 25 bp, Homo sapien
ttcattggccttctcacgactggag

SEQ ID NO: 5166167 - DNA, 25 bp, Homo sapien
ggagccactcctgttccaccccaaa

SEQ ID NO: 5166168 - DNA, 25 bp, Homo sapien
agggtgccccacctgtagccaccat

SEQ ID NO: 5166169 - DNA, 25 bp, Homo sapien
ccaaggaggtccatttcccaactgg

SEQ ID NO: 5166170 - DNA, 25 bp, Homo sapien
aggtccatttcccaactggcggtgc

SEQ ID NO: 5166171 - DNA, 25 bp, Homo sapien
accatccagggtgtacatcaggccc

SEQ ID NO: 5166172 - DNA, 25 bp, Homo sapien
caattcggaagatacagcagcacct

SEQ ID NO: 5166173 - DNA, 25 bp, Homo sapien
tactgtttgggtccagatacaaaag

SEQ ID NO: 5166174 - DNA, 25 bp, Homo sapien
tcatcaccgagcacgcagaaatcat

SEQ ID NO: 5166175 - DNA, 25 bp, Homo sapien
cagaaatcatctgcgttgtggcact

SEQ ID NO: 5166176 - DNA, 25 bp, Homo sapien
cagttggtgaagaagtcagcctccc

SEQ ID NO: 5166177 - DNA, 25 bp, Homo sapien
gggaactgagctgttttgggtggag

SEQ ID NO: 5166178 - DNA, 25 bp, Homo sapien
cagcctcccggtttccagggagctt

SEQ ID NO: 5166179 - DNA, 25 bp, Homo sapien
ccaggtggcctcaggtggttctgca

SEQ ID NO: 5166180 - DNA, 25 bp, Homo sapien
gatgcttacattggccatacctggg

SEQ ID NO: 5166181 - DNA, 25 bp, Homo sapien
cattctttagtctggtgtcaacggg

SEQ ID NO: 5166182 - DNA, 25 bp, Homo sapien
caaagttaacgtctccagtaatggg

SEQ ID NO: 5166183 - DNA, 25 bp, Homo sapien
tgggatgcagcaatatcacatgtgc

SEQ ID NO: 5166184 - DNA, 25 bp, Homo sapien
tgactccttcagcatgacagttaac

SEQ ID NO: 5166185 - DNA, 25 bp, Homo sapien
gagatagtcatcagcctgactcctt

SEQ ID NO: 5166186 - DNA, 25 bp, Homo sapien
tcaagttgccttgagagagatagtc

SEQ ID NO: 5166187 - DNA, 25 bp, Homo sapien
cggagcattgtccactgatatcagc

SEQ ID NO: 5166188 - DNA, 25 bp, Homo sapien
tgattatccaagcaaccatttattg

SEQ ID NO: 5166189 - DNA, 25 bp, Homo sapien
tgtttttagtcaattaacggccata

SEQ ID NO: 5166190 - DNA, 25 bp, Homo sapien
catatatggctgtttcactagctga

SEQ ID NO: 5166191 - DNA, 25 bp, Homo sapien
catgtaagttttgtgaagctctttc

SEQ ID NO: 5166192 - DNA, 25 bp, Homo sapien
cgcacccggctcagagacctgcggg

SEQ ID NO: 5166193 - DNA, 25 bp, Homo sapien
aaaccgcagatgtatccgggatctc

SEQ ID NO: 5166194 - DNA, 25 bp, Homo sapien
agcccaaaccgcagatgtatccggg

SEQ ID NO: 5166195 - DNA, 25 bp, Homo sapien
gagacctgcgggagagagacggagg

SEQ ID NO: 5166196 - DNA, 25 bp, Homo sapien
gggcggtgtcggcaggagccagggg

SEQ ID NO: 5166197 - DNA, 25 bp, Homo sapien
agggcggtgtcggcaggagccaggg

SEQ ID NO: 5166198 - DNA, 25 bp, Homo sapien
gcgggcgccgagctctctgcgcccc

SEQ ID NO: 5166199 - DNA, 25 bp, Homo sapien
ctctctgcgcccctgcaagggccgg

SEQ ID NO: 5166200 - DNA, 25 bp, Homo sapien
gggcgccgagctctctgcgcccctg

SEQ ID NO: 5166201 - DNA, 25 bp, Homo sapien
gccgagctctctgcgcccctgcaag

SEQ ID NO: 5166202 - DNA, 25 bp, Homo sapien
cttgaatttcctcagcggattcccg

SEQ ID NO: 5166203 - DNA, 25 bp, Homo sapien
ccccaggaacaccagcttgaatttc

SEQ ID NO: 5166204 - DNA, 25 bp, Homo sapien
aggaacaccagcttgaatttcctca

SEQ ID NO: 5166205 - DNA, 25 bp, Homo sapien
ttcctcagcggattcccgaagtctc

SEQ ID NO: 5166206 - DNA, 25 bp, Homo sapien
gccgtatcccacagccgaagcccga

SEQ ID NO: 5166207 - DNA, 25 bp, Homo sapien
agccgaagcccgattgttccatcct

SEQ ID NO: 5166208 - DNA, 25 bp, Homo sapien
gcccgattgttccatcctccaagta

SEQ ID NO: 5166209 - DNA, 25 bp, Homo sapien
atcccacagccgaagcccgattgtt

SEQ ID NO: 5166210 - DNA, 25 bp, Homo sapien
cctgtgtgctttccattcccggcaa

SEQ ID NO: 5166211 - DNA, 25 bp, Homo sapien
ctgttctgacatcatcaatccactt

SEQ ID NO: 5166212 - DNA, 25 bp, Homo sapien
gctttacattgtatccagcttttgc

SEQ ID NO: 5166213 - DNA, 25 bp, Homo sapien
aagctgctgctacacgtcgaaagag

SEQ ID NO: 5166214 - DNA, 25 bp, Homo sapien
tcaatgaaagagtaagggggcttct

SEQ ID NO: 5166215 - DNA, 25 bp, Homo sapien
ttgaagatgacatgggagagtagca

SEQ ID NO: 5166216 - DNA, 25 bp, Homo sapien
gggcttctgaggaagggttgaagat

SEQ ID NO: 5166217 - DNA, 25 bp, Homo sapien
agtcaatgaaagagtaagggggctt

SEQ ID NO: 5166218 - DNA, 25 bp, Homo sapien
ggaaaaggttcaagccaatattcac

SEQ ID NO: 5166219 - DNA, 25 bp, Homo sapien
gaaaaggttcaagccaatattcaca

SEQ ID NO: 5166220 - DNA, 25 bp, Homo sapien
aaacttttatggtgtcttgcctgca

SEQ ID NO: 5166221 - DNA, 25 bp, Homo sapien
gaggctaggtaagaacacggaaata

SEQ ID NO: 5166222 - DNA, 25 bp, Homo sapien
gcctaccgtgatcgctgaattctga

SEQ ID NO: 5166223 - DNA, 25 bp, Homo sapien
aattccagtgggcttggtcggactg

SEQ ID NO: 5166224 - DNA, 25 bp, Homo sapien
tgacctgtaactcgaagttttcttc

SEQ ID NO: 5166225 - DNA, 25 bp, Homo sapien
gcttttcctgacctgtaactcgaag

SEQ ID NO: 5166226 - DNA, 25 bp, Homo sapien
tcctgacctgtaactcgaagttttc

SEQ ID NO: 5166227 - DNA, 25 bp, Homo sapien
ctgtaactcgaagttttcttcctgc

SEQ ID NO: 5166228 - DNA, 25 bp, Homo sapien
ctgcagtaaatattcgtagacgtat

SEQ ID NO: 5166229 - DNA, 25 bp, Homo sapien
gggcaccaaggagcctttgcctttg

SEQ ID NO: 5166230 - DNA, 25 bp, Homo sapien
ctgcccgtccgagggcaccaaggag

SEQ ID NO: 5166231 - DNA, 25 bp, Homo sapien
taaagctaacttttccccagcctgc

SEQ ID NO: 5166232 - DNA, 25 bp, Homo sapien
ccaggcggttctcccaacgcgatgt

SEQ ID NO: 5166233 - DNA, 25 bp, Homo sapien
tgtttttttcccagcgaatctccga

SEQ ID NO: 5166234 - DNA, 25 bp, Homo sapien
gcgaatctccgataagaaggtctgt

SEQ ID NO: 5166235 - DNA, 25 bp, Homo sapien
tctgtgcagatttctgtgctcctac

SEQ ID NO: 5166236 - DNA, 25 bp, Homo sapien
tccccgcatcctattgttgggggga

SEQ ID NO: 5166237 - DNA, 25 bp, Homo sapien
cctccccgcatcctattgttggggg

SEQ ID NO: 5166238 - DNA, 25 bp, Homo sapien
cccgcatcctattgttggggggaat

SEQ ID NO: 5166239 - DNA, 25 bp, Homo sapien
cgcatcctattgttggggggaatgt

SEQ ID NO: 5166240 - DNA, 25 bp, Homo sapien
tcccatcatgctgctaggattgtga

SEQ ID NO: 5166241 - DNA, 25 bp, Homo sapien
catcatgctgctaggattgtgaggt

SEQ ID NO: 5166242 - DNA, 25 bp, Homo sapien
ccatcatgctgctaggattgtgagg

SEQ ID NO: 5166243 - DNA, 25 bp, Homo sapien
gggtcccatcatgctgctaggattg

SEQ ID NO: 5166244 - DNA, 25 bp, Homo sapien
agggttcattctctgcattgatcct

SEQ ID NO: 5166245 - DNA, 25 bp, Homo sapien
gtctgccggctcccgggcccatgtt

SEQ ID NO: 5166246 - DNA, 25 bp, Homo sapien
tgccggctcccgggcccatgttaat

SEQ ID NO: 5166247 - DNA, 25 bp, Homo sapien
ccgggcccatgttaatcccgggcat

SEQ ID NO: 5166248 - DNA, 25 bp, Homo sapien
agggtctgccggctcccgggcccat

SEQ ID NO: 5166249 - DNA, 25 bp, Homo sapien
cctaacaatccgttcatgtggtgtg

SEQ ID NO: 5166250 - DNA, 25 bp, Homo sapien
ctaacaatccgttcatgtggtgtgg

SEQ ID NO: 5166251 - DNA, 25 bp, Homo sapien
taacaatccgttcatgtggtgtggc

SEQ ID NO: 5166252 - DNA, 25 bp, Homo sapien
agaattttttggaagccatctatgt

SEQ ID NO: 5166253 - DNA, 25 bp, Homo sapien
ttggaagccatctatgtcgcctgac

SEQ ID NO: 5166254 - DNA, 25 bp, Homo sapien
aattttttggaagccatctatgtcg

SEQ ID NO: 5166255 - DNA, 25 bp, Homo sapien
ttttttggaagccatctatgtcgcc

SEQ ID NO: 5166256 - DNA, 25 bp, Homo sapien
gaagttccctcctaactctccgtca

SEQ ID NO: 5166257 - DNA, 25 bp, Homo sapien
cacactcatcgtcatgcttggagaa

SEQ ID NO: 5166258 - DNA, 25 bp, Homo sapien
ataattgtcattctgaaaggagtgg

SEQ ID NO: 5166259 - DNA, 25 bp, Homo sapien
ggtgcctggaggattgctaatacta

SEQ ID NO: 5166260 - DNA, 25 bp, Homo sapien
tcctagtagatctgtacctactaaa

SEQ ID NO: 5166261 - DNA, 25 bp, Homo sapien
cctagtagatctgtacctactaaaa

SEQ ID NO: 5166262 - DNA, 25 bp, Homo sapien
ctgtcaaccggaggcaccgtcgttc

SEQ ID NO: 5166263 - DNA, 25 bp, Homo sapien
gcgggtccgctcaggttgctgtcaa

SEQ ID NO: 5166264 - DNA, 25 bp, Homo sapien
gactgatcgctgaaaggaaacgggc

SEQ ID NO: 5166265 - DNA, 25 bp, Homo sapien
ggagcgctgggactgcgagcaacat

SEQ ID NO: 5166266 - DNA, 25 bp, Homo sapien
gcgggcacgtctgggccggcggtca

SEQ ID NO: 5166267 - DNA, 25 bp, Homo sapien
ggcgtccgcgggcacgtctgggccg

SEQ ID NO: 5166268 - DNA, 25 bp, Homo sapien
acaggcgctgtcagcggcgtccgcg

SEQ ID NO: 5166269 - DNA, 25 bp, Homo sapien
tgggccggcggtcagggcagcagct

SEQ ID NO: 5166270 - DNA, 25 bp, Homo sapien
ttcaatctcctgacactgcaagcgc

SEQ ID NO: 5166271 - DNA, 25 bp, Homo sapien
gtaggaatcgctgaactccagagta

SEQ ID NO: 5166272 - DNA, 25 bp, Homo sapien
gaatcgctgaactccagagtaggca

SEQ ID NO: 5166273 - DNA, 25 bp, Homo sapien
gttggttcgctccagttcaatctcc

SEQ ID NO: 5166274 - DNA, 25 bp, Homo sapien
aacgccccagtgagcggagagccct

SEQ ID NO: 5166275 - DNA, 25 bp, Homo sapien
agtgagcggagagccctccttaatg

SEQ ID NO: 5166276 - DNA, 25 bp, Homo sapien
tgtcctcaacgccccagtgagcgga

SEQ ID NO: 5166277 - DNA, 25 bp, Homo sapien
cccagtgagcggagagccctcctta

SEQ ID NO: 5166278 - DNA, 25 bp, Homo sapien
agatccccaacctgggtagaggtgt

SEQ ID NO: 5166279 - DNA, 25 bp, Homo sapien
ccaacctgggtagaggtgtgttcct

SEQ ID NO: 5166280 - DNA, 25 bp, Homo sapien
ggtaagggaactgggtaggcaatca

SEQ ID NO: 5166281 - DNA, 25 bp, Homo sapien
gaactgggtaggcaatcaacattac

SEQ ID NO: 5166282 - DNA, 25 bp, Homo sapien
ctgtttgagcattatcaatacattc

SEQ ID NO: 5166283 - DNA, 25 bp, Homo sapien
gtttgagcattatcaatacattcaa

SEQ ID NO: 5166284 - DNA, 25 bp, Homo sapien
cttgtaatgactgggaaaatttctg

SEQ ID NO: 5166285 - DNA, 25 bp, Homo sapien
aattggaaatcttgtaatgactggg

SEQ ID NO: 5166286 - DNA, 25 bp, Homo sapien
tagcgttttggatcagtcttcgcct

SEQ ID NO: 5166287 - DNA, 25 bp, Homo sapien
tcttcgcctttcttcttctactgca

SEQ ID NO: 5166288 - DNA, 25 bp, Homo sapien
gcaaattcttttagtgactgagtaa

SEQ ID NO: 5166289 - DNA, 25 bp, Homo sapien
tctactgcaatgagtagccttgcaa

SEQ ID NO: 5166290 - DNA, 25 bp, Homo sapien
gaaatttctcaagtggtgcaattaa

SEQ ID NO: 5166291 - DNA, 25 bp, Homo sapien
gcaccaatctgttcttttcgaaatt

SEQ ID NO: 5166292 - DNA, 25 bp, Homo sapien
aatctgttcttttcgaaatttctca

SEQ ID NO: 5166293 - DNA, 25 bp, Homo sapien
ctgcaccaatctgttcttttcgaaa

SEQ ID NO: 5166294 - DNA, 25 bp, Homo sapien
tcactctttgtcaaacttctttcca

SEQ ID NO: 5166295 - DNA, 25 bp, Homo sapien
cactctttgtcaaacttctttccac

SEQ ID NO: 5166296 - DNA, 25 bp, Homo sapien
ccttccatcgtccactggctgggtg

SEQ ID NO: 5166297 - DNA, 25 bp, Homo sapien
gccttccatcgtccactggctgggt

SEQ ID NO: 5166298 - DNA, 25 bp, Homo sapien
tagccttccatcgtccactggctgg

SEQ ID NO: 5166299 - DNA, 25 bp, Homo sapien
gatagccttccatcgtccactggct

SEQ ID NO: 5166300 - DNA, 25 bp, Homo sapien
atacaagattttgaacatttccggt

SEQ ID NO: 5166301 - DNA, 25 bp, Homo sapien
ctttcgtcggatacaagattttgaa

SEQ ID NO: 5166302 - DNA, 25 bp, Homo sapien
cgtcggatacaagattttgaacatt

SEQ ID NO: 5166303 - DNA, 25 bp, Homo sapien
caagattttgaacatttccggtgag

SEQ ID NO: 5166304 - DNA, 25 bp, Homo sapien
aatcgtttccttcccatccatggct

SEQ ID NO: 5166305 - DNA, 25 bp, Homo sapien
cagagtataaatcgtttccttccca

SEQ ID NO: 5166306 - DNA, 25 bp, Homo sapien
tatgtcgaagcagaagtggttgtca

SEQ ID NO: 5166307 - DNA, 25 bp, Homo sapien
ataaatcgtttccttcccatccatg

SEQ ID NO: 5166308 - DNA, 25 bp, Homo sapien
cacagcttgaatgcagtttctcaca

SEQ ID NO: 5166309 - DNA, 25 bp, Homo sapien
tgtttccacagcttgaatgcagttt

SEQ ID NO: 5166310 - DNA, 25 bp, Homo sapien
gtttctcacaaaattgaaccctgct

SEQ ID NO: 5166311 - DNA, 25 bp, Homo sapien
tctcacaaaattgaaccctgcttca

SEQ ID NO: 5166312 - DNA, 25 bp, Homo sapien
catggagtacccgtccctctggact

SEQ ID NO: 5166313 - DNA, 25 bp, Homo sapien
gcatggagtacccgtccctctggac

SEQ ID NO: 5166314 - DNA, 25 bp, Homo sapien
aacatcccctgggctagtgaccgaa

SEQ ID NO: 5166315 - DNA, 25 bp, Homo sapien
ctgcagagatggatctgagagaaga

SEQ ID NO: 5166316 - DNA, 25 bp, Homo sapien
agctgcagagatggatctgagagaa

SEQ ID NO: 5166317 - DNA, 25 bp, Homo sapien
gctgcagagatggatctgagagaag

SEQ ID NO: 5166318 - DNA, 25 bp, Homo sapien
tgcagagatggatctgagagaagaa

SEQ ID NO: 5166319 - DNA, 25 bp, Homo sapien
agttgatgctgattggagaagtgtc

SEQ ID NO: 5166320 - DNA, 25 bp, Homo sapien
gaagttgatgctgattggagaagtg

SEQ ID NO: 5166321 - DNA, 25 bp, Homo sapien
aagttgatgctgattggagaagtgt

SEQ ID NO: 5166322 - DNA, 25 bp, Homo sapien
ctgttaaggagtgtgcttttcttga

SEQ ID NO: 5166323 - DNA, 25 bp, Homo sapien
cttgaggtctttggctttataactc

SEQ ID NO: 5166324 - DNA, 25 bp, Homo sapien
gaactggctgttaaggagtgtgctt

SEQ ID NO: 5166325 - DNA, 25 bp, Homo sapien
aaggagtgtgcttttcttgaggtct

SEQ ID NO: 5166326 - DNA, 25 bp, Homo sapien
agctgggaagacggacaccggtgag

SEQ ID NO: 5166327 - DNA, 25 bp, Homo sapien
gctgggaagacggacaccggtgagt

SEQ ID NO: 5166328 - DNA, 25 bp, Homo sapien
aagctgggaagacggacaccggtga

SEQ ID NO: 5166329 - DNA, 25 bp, Homo sapien
ctgggaagacggacaccggtgagtg

SEQ ID NO: 5166330 - DNA, 25 bp, Homo sapien
caggcggcgcttgcggtacgggctg

SEQ ID NO: 5166331 - DNA, 25 bp, Homo sapien
tgcaggcggcgcttgcggtacgggc

SEQ ID NO: 5166332 - DNA, 25 bp, Homo sapien
gcaggcggcgcttgcggtacgggct

SEQ ID NO: 5166333 - DNA, 25 bp, Homo sapien
ctgcaggcggcgcttgcggtacggg

SEQ ID NO: 5166334 - DNA, 25 bp, Homo sapien
gacgccggtgccaccacaaggaggc

SEQ ID NO: 5166335 - DNA, 25 bp, Homo sapien
ccacataggtatgcctggtgttgca

SEQ ID NO: 5166336 - DNA, 25 bp, Homo sapien
cacttgtgtgctgcgcagatgtgcc

SEQ ID NO: 5166337 - DNA, 25 bp, Homo sapien
taggtctggccgtagccacataggt

SEQ ID NO: 5166338 - DNA, 25 bp, Homo sapien
gtgcaacctctctgctacatatgga

SEQ ID NO: 5166339 - DNA, 25 bp, Homo sapien
ctcagtgcaacctctctgctacata

SEQ ID NO: 5166340 - DNA, 25 bp, Homo sapien
cagtgcaacctctctgctacatatg

SEQ ID NO: 5166341 - DNA, 25 bp, Homo sapien
gcatgaacaagcctcagtgcaacct

SEQ ID NO: 5166342 - DNA, 25 bp, Homo sapien
ctttgggcctctagtccatgcctca

SEQ ID NO: 5166343 - DNA, 25 bp, Homo sapien
ccacagagaggaaacgagccgcagg

SEQ ID NO: 5166344 - DNA, 25 bp, Homo sapien
tagtccatgcctcagaactcgtatg

SEQ ID NO: 5166345 - DNA, 25 bp, Homo sapien
aactcgtatggcactgcaggcttct

SEQ ID NO: 5166346 - DNA, 25 bp, Homo sapien
gccatgtccggtagcaagtgaggtt

SEQ ID NO: 5166347 - DNA, 25 bp, Homo sapien
tactgatgtgccatgtccggtagca

SEQ ID NO: 5166348 - DNA, 25 bp, Homo sapien
gatgtgccatgtccggtagcaagtg

SEQ ID NO: 5166349 - DNA, 25 bp, Homo sapien
gaagtactgatgtgccatgtccggt

SEQ ID NO: 5166350 - DNA, 25 bp, Homo sapien
ttagggtagaagaaccgatgtacca

SEQ ID NO: 5166351 - DNA, 25 bp, Homo sapien
tagggtagaagaaccgatgtaccat

SEQ ID NO: 5166352 - DNA, 25 bp, Homo sapien
cagactaggctttgagaatcagtag

SEQ ID NO: 5166353 - DNA, 25 bp, Homo sapien
ccagccagaggcatggaaactttta

SEQ ID NO: 5166354 - DNA, 25 bp, Homo sapien
tgccttaataatattagatagtcca

SEQ ID NO: 5166355 - DNA, 25 bp, Homo sapien
taaaggcagtgaaaatggccagcca

SEQ ID NO: 5166356 - DNA, 25 bp, Homo sapien
atgtcatagtttggttcaggtagtt

SEQ ID NO: 5166357 - DNA, 25 bp, Homo sapien
tcgcgtggcagtgagttttagtccc

SEQ ID NO: 5166358 - DNA, 25 bp, Homo sapien
tagttttcgcgtggcagtgagtttt

SEQ ID NO: 5166359 - DNA, 25 bp, Homo sapien
ttggttcaggtagttttcgcgtggc

SEQ ID NO: 5166360 - DNA, 25 bp, Homo sapien
tgaaactggttggtagacgcgatct

SEQ ID NO: 5166361 - DNA, 25 bp, Homo sapien
cttcaaacagattggaaacccggag

SEQ ID NO: 5166362 - DNA, 25 bp, Homo sapien
ccggagttacctgctagttggtgaa

SEQ ID NO: 5166363 - DNA, 25 bp, Homo sapien
gacgcgatctgttggctactactgg

SEQ ID NO: 5166364 - DNA, 25 bp, Homo sapien
tgactcccacgaagtttgccggaac

SEQ ID NO: 5166365 - DNA, 25 bp, Homo sapien
cccacgaagtttgccggaactcaag

SEQ ID NO: 5166366 - DNA, 25 bp, Homo sapien
ctcccacgaagtttgccggaactca

SEQ ID NO: 5166367 - DNA, 25 bp, Homo sapien
acgaagtttgccggaactcaaggct

SEQ ID NO: 5166368 - DNA, 25 bp, Homo sapien
aacagcaccgccaggagtgtcctgg

SEQ ID NO: 5166369 - DNA, 25 bp, Homo sapien
cttgctgatggcctcgtgttctggg

SEQ ID NO: 5166370 - DNA, 25 bp, Homo sapien
cctgggctcggtgggcgtcttgtgc

SEQ ID NO: 5166371 - DNA, 25 bp, Homo sapien
tggctgcaatcctgtggccccaaat

SEQ ID NO: 5166372 - DNA, 25 bp, Homo sapien
agccacggtgtagcggctccagcct

SEQ ID NO: 5166373 - DNA, 25 bp, Homo sapien
cagcctccagcgtacggctggtgat

SEQ ID NO: 5166374 - DNA, 25 bp, Homo sapien
agcgaggcgagccacggtgtagcgg

SEQ ID NO: 5166375 - DNA, 25 bp, Homo sapien
tacggctggtgattacccattcctg

SEQ ID NO: 5166376 - DNA, 25 bp, Homo sapien
aaatgttacaataaaattgtatctg

SEQ ID NO: 5166377 - DNA, 25 bp, Homo sapien
aaattgtatctgtgtataaaatgta

SEQ ID NO: 5166378 - DNA, 25 bp, Homo sapien
acaataaaattgtatctgtgtataa

SEQ ID NO: 5166379 - DNA, 25 bp, Homo sapien
cgcgccaggccaatatttttaaata

SEQ ID NO: 5166380 - DNA, 25 bp, Homo sapien
gctgctcatcgtcctcaagcctgtg

SEQ ID NO: 5166381 - DNA, 25 bp, Homo sapien
cggacggtgccgttgttgctgcagt

SEQ ID NO: 5166382 - DNA, 25 bp, Homo sapien
cttgcagatcaggcggacggtgccg

SEQ ID NO: 5166383 - DNA, 25 bp, Homo sapien
ggtttatcatgcacttgggctccaa

SEQ ID NO: 5166384 - DNA, 25 bp, Homo sapien
ttgggggttgctctcttgcgccagc

SEQ ID NO: 5166385 - DNA, 25 bp, Homo sapien
gggggttgctctcttgcgccagcct

SEQ ID NO: 5166386 - DNA, 25 bp, Homo sapien
tgggggttgctctcttgcgccagcc

SEQ ID NO: 5166387 - DNA, 25 bp, Homo sapien
agttgggggttgctctcttgcgcca

SEQ ID NO: 5166388 - DNA, 25 bp, Homo sapien
ggcagaggcaatggccagtctgtcc

SEQ ID NO: 5166389 - DNA, 25 bp, Homo sapien
ctgtcctgggcccagaagacagagc

SEQ ID NO: 5166390 - DNA, 25 bp, Homo sapien
ggaggtgagggtgcgtgggctccgg

SEQ ID NO: 5166391 - DNA, 25 bp, Homo sapien
caggcaagcagagccgcatctgtgt

SEQ ID NO: 5166392 - DNA, 25 bp, Homo sapien
aaagcctggatgtctctctcactct

SEQ ID NO: 5166393 - DNA, 25 bp, Homo sapien
cgaacaggactcttcacacccaggg

SEQ ID NO: 5166394 - DNA, 25 bp, Homo sapien
ctgctcccgaacaggactcttcaca

SEQ ID NO: 5166395 - DNA, 25 bp, Homo sapien
ttgcggcaaagcctggatgtctctc

SEQ ID NO: 5166396 - DNA, 25 bp, Homo sapien
ggctgaagcaccaggaggagccctg

SEQ ID NO: 5166397 - DNA, 25 bp, Homo sapien
tggctgaagcaccaggaggagccct

SEQ ID NO: 5166398 - DNA, 25 bp, Homo sapien
acgcagtggtgcaccgacctgagga

SEQ ID NO: 5166399 - DNA, 25 bp, Homo sapien
ggtaaccgagtgcttttccaggctg

SEQ ID NO: 5166400 - DNA, 25 bp, Homo sapien
tgttccgggcacaggtgttgagcaa

SEQ ID NO: 5166401 - DNA, 25 bp, Homo sapien
agtcctggctaagcagccgaggcag

SEQ ID NO: 5166402 - DNA, 25 bp, Homo sapien
gaccctggacaggccacggcgagca

SEQ ID NO: 5166403 - DNA, 25 bp, Homo sapien
acaggccacggcgagcagcccgctc

SEQ ID NO: 5166404 - DNA, 25 bp, Homo sapien
ccctggacaggccacggcgagcagc

SEQ ID NO: 5166405 - DNA, 25 bp, Homo sapien
aggccacggcgagcagcccgctcca

SEQ ID NO: 5166406 - DNA, 25 bp, Homo sapien
gcagagaatccgatgtgtgtttgaa

SEQ ID NO: 5166407 - DNA, 25 bp, Homo sapien
tgtttgaagggtttcctatgtcctc

SEQ ID NO: 5166408 - DNA, 25 bp, Homo sapien
tgtgagcagagaatccgatgtgtgt

SEQ ID NO: 5166409 - DNA, 25 bp, Homo sapien
ccaaaactgtgagcagagaatccga

SEQ ID NO: 5166410 - DNA, 25 bp, Homo sapien
cggccctcacacgagtgacacaggg

SEQ ID NO: 5166411 - DNA, 25 bp, Homo sapien
cgtagtgttctgaggacgcgggtcc

SEQ ID NO: 5166412 - DNA, 25 bp, Homo sapien
gggacacggccctcacacgagtgac

SEQ ID NO: 5166413 - DNA, 25 bp, Homo sapien
agtgttctgaggacgcgggtccaga

SEQ ID NO: 5166414 - DNA, 25 bp, Homo sapien
gcccagtttcatggagtgggggaca

SEQ ID NO: 5166415 - DNA, 25 bp, Homo sapien
cccagtttcatggagtgggggacac

SEQ ID NO: 5166416 - DNA, 25 bp, Homo sapien
gacagtgcgtcagaaaggacagccc

SEQ ID NO: 5166417 - DNA, 25 bp, Homo sapien
caaggaatgggacagtgcgtcagaa

SEQ ID NO: 5166418 - DNA, 25 bp, Homo sapien
caggccaaggaatgggacagtgcgt

SEQ ID NO: 5166419 - DNA, 25 bp, Homo sapien
atgggacagtgcgtcagaaaggaca

SEQ ID NO: 5166420 - DNA, 25 bp, Homo sapien
gttggcattaatctcagcctcttcc

SEQ ID NO: 5166421 - DNA, 25 bp, Homo sapien
cacttcgttggcattaatctcagcc

SEQ ID NO: 5166422 - DNA, 25 bp, Homo sapien
ttcgttggcattaatctcagcctct

SEQ ID NO: 5166423 - DNA, 25 bp, Homo sapien
ccacttcgttggcattaatctcagc

SEQ ID NO: 5166424 - DNA, 25 bp, Homo sapien
ggtgctttgagctacccgcatctgg

SEQ ID NO: 5166425 - DNA, 25 bp, Homo sapien
tgcaggcaatgcagaaacggcgcct

SEQ ID NO: 5166426 - DNA, 25 bp, Homo sapien
gacacttccgctacttttaggcctg

SEQ ID NO: 5166427 - DNA, 25 bp, Homo sapien
cgaagaacaactttgccgagaggca

SEQ ID NO: 5166428 - DNA, 25 bp, Homo sapien
tcaaagacatggcaaccgttcagtg

SEQ ID NO: 5166429 - DNA, 25 bp, Homo sapien
cacggtcatcctcgggcttctggag

SEQ ID NO: 5166430 - DNA, 25 bp, Homo sapien
gctgttccaagactgggccgtagaa

SEQ ID NO: 5166431 - DNA, 25 bp, Homo sapien
gaattccatgtttcaggagcctaag

SEQ ID NO: 5166432 - DNA, 25 bp, Homo sapien
aggtgccggtcaggtttttccattg

SEQ ID NO: 5166433 - DNA, 25 bp, Homo sapien
gcccaggttaaatagtaatgaggct

SEQ ID NO: 5166434 - DNA, 25 bp, Homo sapien
tgtgcccaggttaaatagtaatgag

SEQ ID NO: 5166435 - DNA, 25 bp, Homo sapien
gtgccggtcaggtttttccattgta

SEQ ID NO: 5166436 - DNA, 25 bp, Homo sapien
caggctcacccactgtatatagtga

SEQ ID NO: 5166437 - DNA, 25 bp, Homo sapien
cagtgcctgtaaccacaccaggaag

SEQ ID NO: 5166438 - DNA, 25 bp, Homo sapien
cagtgtatttcctagaagcgaatgc

SEQ ID NO: 5166439 - DNA, 25 bp, Homo sapien
actttgctgcatgtgttggtttcca

SEQ ID NO: 5166440 - DNA, 25 bp, Homo sapien
ttagcctcccaaagttcagagatta

SEQ ID NO: 5166441 - DNA, 25 bp, Homo sapien
agcctcccaaagttcagagattaca

SEQ ID NO: 5166442 - DNA, 25 bp, Homo sapien
ctcccaaagttcagagattacaggc

SEQ ID NO: 5166443 - DNA, 25 bp, Homo sapien
cttagcctcccaaagttcagagatt

SEQ ID NO: 5166444 - DNA, 25 bp, Homo sapien
ctagtactataagcatgcaccccca

SEQ ID NO: 5166445 - DNA, 25 bp, Homo sapien
tgcacccccacacctagcttttatt

SEQ ID NO: 5166446 - DNA, 25 bp, Homo sapien
tagctagtactataagcatgcaccc

SEQ ID NO: 5166447 - DNA, 25 bp, Homo sapien
agtactataagcatgcacccccaca

SEQ ID NO: 5166448 - DNA, 25 bp, Homo sapien
gcaggccaggcctttacctacaatt

SEQ ID NO: 5166449 - DNA, 25 bp, Homo sapien
ccaggtagcggcagtgatcagtgac

SEQ ID NO: 5166450 - DNA, 25 bp, Homo sapien
tcacgtgtggacagattccccagag

SEQ ID NO: 5166451 - DNA, 25 bp, Homo sapien
cagatctgctggcatgtgtaaggca

SEQ ID NO: 5166452 - DNA, 25 bp, Homo sapien
tttggcagcctagatggtgtcctcg

SEQ ID NO: 5166453 - DNA, 25 bp, Homo sapien
gttcaatttcgtgttcagtggccca

SEQ ID NO: 5166454 - DNA, 25 bp, Homo sapien
gatggaatttctcgaccctgggtag

SEQ ID NO: 5166455 - DNA, 25 bp, Homo sapien
cctgtaagtaaaccacagtggcgag

SEQ ID NO: 5166456 - DNA, 25 bp, Homo sapien
gatgcgcgcctgagacggtccggcg

SEQ ID NO: 5166457 - DNA, 25 bp, Homo sapien
gcggcttccatctctgaggcgagcg

SEQ ID NO: 5166458 - DNA, 25 bp, Homo sapien
ttgatgacgactttcggcgccgtgg

SEQ ID NO: 5166459 - DNA, 25 bp, Homo sapien
aggcgagcgacgctatggatcccac

SEQ ID NO: 5166460 - DNA, 25 bp, Homo sapien
gcccggccggccttcgctttgcgca

SEQ ID NO: 5166461 - DNA, 25 bp, Homo sapien
cccggccggccttcgctttgcgcac

SEQ ID NO: 5166462 - DNA, 25 bp, Homo sapien
acaacgcaggcgcattcagctaagg

SEQ ID NO: 5166463 - DNA, 25 bp, Homo sapien
aacgcaggcgcattcagctaaggac

SEQ ID NO: 5166464 - DNA, 25 bp, Homo sapien
cgcaggcgcattcagctaaggacca

SEQ ID NO: 5166465 - DNA, 25 bp, Homo sapien
ggcgcattcagctaaggaccactcc

SEQ ID NO: 5166466 - DNA, 25 bp, Homo sapien
taatcaacaatactgcttacgcgca

SEQ ID NO: 5166467 - DNA, 25 bp, Homo sapien
tacgcgcacgcggattccttgctgg

SEQ ID NO: 5166468 - DNA, 25 bp, Homo sapien
tacattgggcgctcggtaaatgcct

SEQ ID NO: 5166469 - DNA, 25 bp, Homo sapien
caattttctggtccgcaccggtgca

SEQ ID NO: 5166470 - DNA, 25 bp, Homo sapien
ctgccgggccgcctccagccccggg

SEQ ID NO: 5166471 - DNA, 25 bp, Homo sapien
aacacgtcggggtcgatagcgccgc

SEQ ID NO: 5166472 - DNA, 25 bp, Homo sapien
gccgcctgcgccagctcgtacagct

SEQ ID NO: 5166473 - DNA, 25 bp, Homo sapien
agctcgtacagctccatctcctcgg

SEQ ID NO: 5166474 - DNA, 25 bp, Homo sapien
atctcctcggtgctcagcaccttct

SEQ ID NO: 5166475 - DNA, 25 bp, Homo sapien
ggacagacgcggggccggtgagccc

SEQ ID NO: 5166476 - DNA, 25 bp, Homo sapien
gacagacgcggggccggtgagccct

SEQ ID NO: 5166477 - DNA, 25 bp, Homo sapien
gacggcgaggggggccacgttcagc

SEQ ID NO: 5166478 - DNA, 25 bp, Homo sapien
agacggcgaggggggccacgttcag

SEQ ID NO: 5166479 - DNA, 25 bp, Homo sapien
gggtctcgggcacgctcgacgtggg

SEQ ID NO: 5166480 - DNA, 25 bp, Homo sapien
ctcgggcacgctcgacgtgggcaga

SEQ ID NO: 5166481 - DNA, 25 bp, Homo sapien
cgggtctcgggcacgctcgacgtgg

SEQ ID NO: 5166482 - DNA, 25 bp, Homo sapien
gtctcgggcacgctcgacgtgggca

SEQ ID NO: 5166483 - DNA, 25 bp, Homo sapien
ctagaccgacagacaggcctggcca

SEQ ID NO: 5166484 - DNA, 25 bp, Homo sapien
tagaccgacagacaggcctggccac

SEQ ID NO: 5166485 - DNA, 25 bp, Homo sapien
agaccgacagacaggcctggccact

SEQ ID NO: 5166486 - DNA, 25 bp, Homo sapien
ctcctaaggctggcagcgaagccca

SEQ ID NO: 5166487 - DNA, 25 bp, Homo sapien
cctaaggctggcagcgaagcccagg

SEQ ID NO: 5166488 - DNA, 25 bp, Homo sapien
tgcctcctaaggctggcagcgaagc

SEQ ID NO: 5166489 - DNA, 25 bp, Homo sapien
cagagcccacggatgggccctgcag

SEQ ID NO: 5166490 - DNA, 25 bp, Homo sapien
ggagctaagcggaggagccctaccc

SEQ ID NO: 5166491 - DNA, 25 bp, Homo sapien
agccccaaactgtcttgattcccga

SEQ ID NO: 5166492 - DNA, 25 bp, Homo sapien
tggggtcccaaagattataggcgtg

SEQ ID NO: 5166493 - DNA, 25 bp, Homo sapien
attcccgacgttgtaggatgaaggc

SEQ ID NO: 5166494 - DNA, 25 bp, Homo sapien
tctgcaccctgggagttccgcgtct

SEQ ID NO: 5166495 - DNA, 25 bp, Homo sapien
cctggatgctgtataccacaggaca

SEQ ID NO: 5166496 - DNA, 25 bp, Homo sapien
aggactggccaagcccctgcgcagg

SEQ ID NO: 5166497 - DNA, 25 bp, Homo sapien
ctggtccctgggcacttccctggat

SEQ ID NO: 5166498 - DNA, 25 bp, Homo sapien
cattggcctaggaggttgtgctgca

SEQ ID NO: 5166499 - DNA, 25 bp, Homo sapien
tccacgccttctcaggatgcctgtg

SEQ ID NO: 5166500 - DNA, 25 bp, Homo sapien
cgggctgtggagcagaaccggagag

SEQ ID NO: 5166501 - DNA, 25 bp, Homo sapien
cagacagagcgaaggtcagtgaaga

SEQ ID NO: 5166502 - DNA, 25 bp, Homo sapien
gcagcgatggcctgcatggtcctgc

SEQ ID NO: 5166503 - DNA, 25 bp, Homo sapien
ctgcccttggagctcaaagctgctt

SEQ ID NO: 5166504 - DNA, 25 bp, Homo sapien
atggcctgcatggtcctgcccttgg

SEQ ID NO: 5166505 - DNA, 25 bp, Homo sapien
taagcggcagggcagcgatggcctg

SEQ ID NO: 5166506 - DNA, 25 bp, Homo sapien
tctggccggctgtcttcccttggag

SEQ ID NO: 5166507 - DNA, 25 bp, Homo sapien
ctctggccggctgtcttcccttgga

SEQ ID NO: 5166508 - DNA, 25 bp, Homo sapien
taagaggccgaggtgtttgtcacgc

SEQ ID NO: 5166509 - DNA, 25 bp, Homo sapien
gtgagcagcaacatcccctggagtg

SEQ ID NO: 5166510 - DNA, 25 bp, Homo sapien
tggagtccagtcacaagctcttggc

SEQ ID NO: 5166511 - DNA, 25 bp, Homo sapien
gaaagtgtgctaactcaggagtgag

SEQ ID NO: 5166512 - DNA, 25 bp, Homo sapien
tctgtcttccatgagcagacgggcc

SEQ ID NO: 5166513 - DNA, 25 bp, Homo sapien
ttcaggaattgtgcgctctcagggt

SEQ ID NO: 5166514 - DNA, 25 bp, Homo sapien
ataccctgcagggataggacggccc

SEQ ID NO: 5166515 - DNA, 25 bp, Homo sapien
taaacgccaaagatagtcaatgacc

SEQ ID NO: 5166516 - DNA, 25 bp, Homo sapien
aggtacaaacgtgcccgggtagcag

SEQ ID NO: 5166517 - DNA, 25 bp, Homo sapien
taccagacactgatacacgtttagg

SEQ ID NO: 5166518 - DNA, 25 bp, Homo sapien
gaagtgccttgactactctgaccta

SEQ ID NO: 5166519 - DNA, 25 bp, Homo sapien
ctcagggtgttgacagcatcggcaa

SEQ ID NO: 5166520 - DNA, 25 bp, Homo sapien
gacagggttcctgccacagtctgaa

SEQ ID NO: 5166521 - DNA, 25 bp, Homo sapien
tacctacccgagtgttctgcagtgg

SEQ ID NO: 5166522 - DNA, 25 bp, Homo sapien
gctgccagattccatgacagggttc

SEQ ID NO: 5166523 - DNA, 25 bp, Homo sapien
aatgattaggaatgggcgtgccccg

SEQ ID NO: 5166524 - DNA, 25 bp, Homo sapien
ccttcgcggctgctgcgttccgcca

SEQ ID NO: 5166525 - DNA, 25 bp, Homo sapien
ggatccttcgcggctgctgcgttcc

SEQ ID NO: 5166526 - DNA, 25 bp, Homo sapien
atccttcgcggctgctgcgttccgc

SEQ ID NO: 5166527 - DNA, 25 bp, Homo sapien
gatccttcgcggctgctgcgttccg

SEQ ID NO: 5166528 - DNA, 25 bp, Homo sapien
gaaggaggtaacatgtagcctttgc

SEQ ID NO: 5166529 - DNA, 25 bp, Homo sapien
gaggtaacatgtagcctttgctggg

SEQ ID NO: 5166530 - DNA, 25 bp, Homo sapien
aggaggtaacatgtagcctttgctg

SEQ ID NO: 5166531 - DNA, 25 bp, Homo sapien
tgaaggaggtaacatgtagcctttg

SEQ ID NO: 5166532 - DNA, 25 bp, Homo sapien
tgtcacaggtactaggacacagccc

SEQ ID NO: 5166533 - DNA, 25 bp, Homo sapien
gccctttaggtagcttgggatccca

SEQ ID NO: 5166534 - DNA, 25 bp, Homo sapien
tactctgaatctatctgggtggaag

SEQ ID NO: 5166535 - DNA, 25 bp, Homo sapien
cctacttaggcaggcacatggacca

SEQ ID NO: 5166536 - DNA, 25 bp, Homo sapien
cccccgtagctgctgtgtgaaatct

SEQ ID NO: 5166537 - DNA, 25 bp, Homo sapien
ccgtagctgctgtgtgaaatcttgt

SEQ ID NO: 5166538 - DNA, 25 bp, Homo sapien
cccgtagctgctgtgtgaaatcttg

SEQ ID NO: 5166539 - DNA, 25 bp, Homo sapien
ccccgtagctgctgtgtgaaatctt

SEQ ID NO: 5166540 - DNA, 25 bp, Homo sapien
tgtcctccttctcctgccacaccat

SEQ ID NO: 5166541 - DNA, 25 bp, Homo sapien
gcatgtcctccttctcctgccacac

SEQ ID NO: 5166542 - DNA, 25 bp, Homo sapien
cttgtgcatgtcctccttctcctgc

SEQ ID NO: 5166543 - DNA, 25 bp, Homo sapien
tgcatgtcctccttctcctgccaca

SEQ ID NO: 5166544 - DNA, 25 bp, Homo sapien
tggcttgggatttcaatgtctctga

SEQ ID NO: 5166545 - DNA, 25 bp, Homo sapien
ggcttgggatttcaatgtctctgaa

SEQ ID NO: 5166546 - DNA, 25 bp, Homo sapien
cagtcaataccatcgctgaaatatc

SEQ ID NO: 5166547 - DNA, 25 bp, Homo sapien
cacatctggctaaacagcatcctct

SEQ ID NO: 5166548 - DNA, 25 bp, Homo sapien
cagatctcctgccacatcatgtcag

SEQ ID NO: 5166549 - DNA, 25 bp, Homo sapien
ttaaggtcatacaaaagtccagtca

SEQ ID NO: 5166550 - DNA, 25 bp, Homo sapien
cttccagcttcagtgcttgtgtttc

SEQ ID NO: 5166551 - DNA, 25 bp, Homo sapien
cttctggagagtattcggacttaga

SEQ ID NO: 5166552 - DNA, 25 bp, Homo sapien
agtattcggacttagagtcaaagcc

SEQ ID NO: 5166553 - DNA, 25 bp, Homo sapien
gtgcctcccgcgtctccgcttctgg

SEQ ID NO: 5166554 - DNA, 25 bp, Homo sapien
cccgcgtctccgcttctggagagta

SEQ ID NO: 5166555 - DNA, 25 bp, Homo sapien
ctctgtccttcagccgagagagctg

SEQ ID NO: 5166556 - DNA, 25 bp, Homo sapien
tctctgtccttcagccgagagagct

SEQ ID NO: 5166557 - DNA, 25 bp, Homo sapien
gtctctgtccttcagccgagagagc

SEQ ID NO: 5166558 - DNA, 25 bp, Homo sapien
cctcagagctgtccgagtcgctgaa

SEQ ID NO: 5166559 - DNA, 25 bp, Homo sapien
tcagagctgtccgagtcgctgaagt

SEQ ID NO: 5166560 - DNA, 25 bp, Homo sapien
agctgtccgagtcgctgaagtttag

SEQ ID NO: 5166561 - DNA, 25 bp, Homo sapien
ctcctcagagctgtccgagtcgctg

SEQ ID NO: 5166562 - DNA, 25 bp, Homo sapien
tcctccagcacatatggcagggagt

SEQ ID NO: 5166563 - DNA, 25 bp, Homo sapien
tggcttcctccagcacatatggcag

SEQ ID NO: 5166564 - DNA, 25 bp, Homo sapien
ggcttcctccagcacatatggcagg

SEQ ID NO: 5166565 - DNA, 25 bp, Homo sapien
cttcctccagcacatatggcaggga

SEQ ID NO: 5166566 - DNA, 25 bp, Homo sapien
ccccctcctctgctccatcctcatc

SEQ ID NO: 5166567 - DNA, 25 bp, Homo sapien
ctggggactctgtccccatcttccc

SEQ ID NO: 5166568 - DNA, 25 bp, Homo sapien
ccctcctctgctccatcctcatcct

SEQ ID NO: 5166569 - DNA, 25 bp, Homo sapien
gactctgtccccatcttccccctcc

SEQ ID NO: 5166570 - DNA, 25 bp, Homo sapien
gcgagggtcacaggaacacaattct

SEQ ID NO: 5166571 - DNA, 25 bp, Homo sapien
gagggtcacaggaacacaattcttc

SEQ ID NO: 5166572 - DNA, 25 bp, Homo sapien
ggcgagggtcacaggaacacaattc

SEQ ID NO: 5166573 - DNA, 25 bp, Homo sapien
gggtcacaggaacacaattcttctt

SEQ ID NO: 5166574 - DNA, 25 bp, Homo sapien
tgctgcctgcttccatctctcaacc

SEQ ID NO: 5166575 - DNA, 25 bp, Homo sapien
ctgcctgcttccatctctcaaccat

SEQ ID NO: 5166576 - DNA, 25 bp, Homo sapien
gctgcctgcttccatctctcaacca

SEQ ID NO: 5166577 - DNA, 25 bp, Homo sapien
tggaatttgttggcctcagcacttt

SEQ ID NO: 5166578 - DNA, 25 bp, Homo sapien
gaatttgttggcctcagcactttcc

SEQ ID NO: 5166579 - DNA, 25 bp, Homo sapien
acctggaatttgttggcctcagcac

SEQ ID NO: 5166580 - DNA, 25 bp, Homo sapien
cctggaatttgttggcctcagcact

SEQ ID NO: 5166581 - DNA, 25 bp, Homo sapien
cagagcattgaacacgaccagagca

SEQ ID NO: 5166582 - DNA, 25 bp, Homo sapien
cattgaacacgaccagagcattgaa

SEQ ID NO: 5166583 - DNA, 25 bp, Homo sapien
gagcattgaacacgaccagagcatt

SEQ ID NO: 5166584 - DNA, 25 bp, Homo sapien
gcattgaacacgaccagagcattga

SEQ ID NO: 5166585 - DNA, 25 bp, Homo sapien
gaccaggaaagccagcacccgcagg

SEQ ID NO: 5166586 - DNA, 25 bp, Homo sapien
cccgcagggactccttccctgtgct

SEQ ID NO: 5166587 - DNA, 25 bp, Homo sapien
agcacccgcagggactccttccctg

SEQ ID NO: 5166588 - DNA, 25 bp, Homo sapien
ccaggaaagccagcacccgcaggga

SEQ ID NO: 5166589 - DNA, 25 bp, Homo sapien
ccaggcgaggtgaacttgcagttcc

SEQ ID NO: 5166590 - DNA, 25 bp, Homo sapien
gcaccaggcgaggtgaacttgcagt

SEQ ID NO: 5166591 - DNA, 25 bp, Homo sapien
aaagtgtccttcttgtgccggcaga

SEQ ID NO: 5166592 - DNA, 25 bp, Homo sapien
gccaaggaaagtgtccttcttgtgc

SEQ ID NO: 5166593 - DNA, 25 bp, Homo sapien
tacacagacgtttccttcttgcggg

SEQ ID NO: 5166594 - DNA, 25 bp, Homo sapien
cgtttccttcttgcgggtggtcatg

SEQ ID NO: 5166595 - DNA, 25 bp, Homo sapien
cagacgtttccttcttgcgggtggt

SEQ ID NO: 5166596 - DNA, 25 bp, Homo sapien
cagttgtacacagacgtttccttct

SEQ ID NO: 5166597 - DNA, 25 bp, Homo sapien
cgtcagggcacggatgcagtgcatt

SEQ ID NO: 5166598 - DNA, 25 bp, Homo sapien
agggcacggatgcagtgcattcgca

SEQ ID NO: 5166599 - DNA, 25 bp, Homo sapien
agagcagcgtcagggcacggatgca

SEQ ID NO: 5166600 - DNA, 25 bp, Homo sapien
cccgagctccccgagagcagcgtca

SEQ ID NO: 5166601 - DNA, 25 bp, Homo sapien
gccttctcctgcaggttgacattgg

SEQ ID NO: 5166602 - DNA, 25 bp, Homo sapien
cttctcctgcaggttgacattggac

SEQ ID NO: 5166603 - DNA, 25 bp, Homo sapien
tacgccttctcctgcaggttgacat

SEQ ID NO: 5166604 - DNA, 25 bp, Homo sapien
ctggtacgccttctcctgcaggttg

SEQ ID NO: 5166605 - DNA, 25 bp, Homo sapien
cagctccgggaagccgatgcagtgt

SEQ ID NO: 5166606 - DNA, 25 bp, Homo sapien
gggtgaggtcgtacagctgctccac

SEQ ID NO: 5166607 - DNA, 25 bp, Homo sapien
gtactccagggtgaggtcgtacagc

SEQ ID NO: 5166608 - DNA, 25 bp, Homo sapien
tccagggtgaggtcgtacagctgct

SEQ ID NO: 5166609 - DNA, 25 bp, Homo sapien
tgcagatgtgttccgagttctcctg

SEQ ID NO: 5166610 - DNA, 25 bp, Homo sapien
tgttccgagttctcctgaaccttcc

SEQ ID NO: 5166611 - DNA, 25 bp, Homo sapien
gatgtgttccgagttctcctgaacc

SEQ ID NO: 5166612 - DNA, 25 bp, Homo sapien
gcggctgcagatgtgttccgagttc

SEQ ID NO: 5166613 - DNA, 25 bp, Homo sapien
tccagggtcagcttctgccaggctt

SEQ ID NO: 5166614 - DNA, 25 bp, Homo sapien
tcagcttctgccaggcttccactgc

SEQ ID NO: 5166615 - DNA, 25 bp, Homo sapien
cttccagggtcagcttctgccaggc

SEQ ID NO: 5166616 - DNA, 25 bp, Homo sapien
gggtcagcttctgccaggcttccac

SEQ ID NO: 5166617 - DNA, 25 bp, Homo sapien
ccagtggctgtagtacaaggtcagg

SEQ ID NO: 5166618 - DNA, 25 bp, Homo sapien
cttccttcgtttgatctcagggaag

SEQ ID NO: 5166619 - DNA, 25 bp, Homo sapien
tcgtttgatctcagggaagttcagg

SEQ ID NO: 5166620 - DNA, 25 bp, Homo sapien
ttcgtttgatctcagggaagttcag

SEQ ID NO: 5166621 - DNA, 25 bp, Homo sapien
ccttcgtttgatctcagggaagttc

SEQ ID NO: 5166622 - DNA, 25 bp, Homo sapien
aaagaggtctttaaattgcttcctg

SEQ ID NO: 5166623 - DNA, 25 bp, Homo sapien
aagaggtctttaaattgcttcctgt

SEQ ID NO: 5166624 - DNA, 25 bp, Homo sapien
cctccttgtcctctttatcctcttc

SEQ ID NO: 5166625 - DNA, 25 bp, Homo sapien
tccttgtcctctttatcctcttcca

SEQ ID NO: 5166626 - DNA, 25 bp, Homo sapien
cttgtcctctttatcctcttccacc

SEQ ID NO: 5166627 - DNA, 25 bp, Homo sapien
ctcctccttgtcctctttatcctct

SEQ ID NO: 5166628 - DNA, 25 bp, Homo sapien
tccccaggggccagccccgcctctg

SEQ ID NO: 5166629 - DNA, 25 bp, Homo sapien
ctgggccagccgctgcagctcccca

SEQ ID NO: 5166630 - DNA, 25 bp, Homo sapien
tgggccagccgctgcagctccccag

SEQ ID NO: 5166631 - DNA, 25 bp, Homo sapien
agctccccaggggccagccccgcct

SEQ ID NO: 5166632 - DNA, 25 bp, Homo sapien
tcctctgagagctgcagatcctcca

SEQ ID NO: 5166633 - DNA, 25 bp, Homo sapien
tgagagctgcagatcctccagctca

SEQ ID NO: 5166634 - DNA, 25 bp, Homo sapien
ctctgagagctgcagatcctccagc

SEQ ID NO: 5166635 - DNA, 25 bp, Homo sapien
agagctgcagatcctccagctcatc

SEQ ID NO: 5166636 - DNA, 25 bp, Homo sapien
gcctagctctcggtaagtttggtcg

SEQ ID NO: 5166637 - DNA, 25 bp, Homo sapien
agctctcggtaagtttggtcgttca

SEQ ID NO: 5166638 - DNA, 25 bp, Homo sapien
tcggtaagtttggtcgttcatgctg

SEQ ID NO: 5166639 - DNA, 25 bp, Homo sapien
cagcctagctctcggtaagtttggt

SEQ ID NO: 5166640 - DNA, 25 bp, Homo sapien
agtgaatgcagagcctggtgcggac

SEQ ID NO: 5166641 - DNA, 25 bp, Homo sapien
tctttcagttttagacgcaaaacaa

SEQ ID NO: 5166642 - DNA, 25 bp, Homo sapien
cggacggacaaggtctgcagacgga

SEQ ID NO: 5166643 - DNA, 25 bp, Homo sapien
actggtctccgtcagctgacgtcaa

SEQ ID NO: 5166644 - DNA, 25 bp, Homo sapien
tattgctcatgaagagcgaatgccc

SEQ ID NO: 5166645 - DNA, 25 bp, Homo sapien
caagttgcacgcatgtatacgtaca

SEQ ID NO: 5166646 - DNA, 25 bp, Homo sapien
ccgtaggagctggtgatatgacaag

SEQ ID NO: 5166647 - DNA, 25 bp, Homo sapien
tatgacaaggaacatacaagatggg

SEQ ID NO: 5166648 - DNA, 25 bp, Homo sapien
gtctgcttgggaggcgtgaggacac

SEQ ID NO: 5166649 - DNA, 25 bp, Homo sapien
ctgcttgaggaacctgacaatctct

SEQ ID NO: 5166650 - DNA, 25 bp, Homo sapien
tggctgctctggtgccagagagacc

SEQ ID NO: 5166651 - DNA, 25 bp, Homo sapien
cccatggtgggccagcagcttggct

SEQ ID NO: 5166652 - DNA, 25 bp, Homo sapien
tcccccatgacgggcgagttaccca

SEQ ID NO: 5166653 - DNA, 25 bp, Homo sapien
ctgccatgatgaagaaaagggtgcc

SEQ ID NO: 5166654 - DNA, 25 bp, Homo sapien
tgccatgatgaagaaaagggtgccg

SEQ ID NO: 5166655 - DNA, 25 bp, Homo sapien
aaagggtgccggtggagatggccat

SEQ ID NO: 5166656 - DNA, 25 bp, Homo sapien
tgaagaaaagggtgccggtggagat

SEQ ID NO: 5166657 - DNA, 25 bp, Homo sapien
gaggaatataacagagtccaggatg

SEQ ID NO: 5166658 - DNA, 25 bp, Homo sapien
ccagtgaggaatataacagagtcca

SEQ ID NO: 5166659 - DNA, 25 bp, Homo sapien
agtccaggatgtgatactgcaggga

SEQ ID NO: 5166660 - DNA, 25 bp, Homo sapien
tccaggatgtgatactgcagggaca

SEQ ID NO: 5166661 - DNA, 25 bp, Homo sapien
ttgccgggactatggcagctgctag

SEQ ID NO: 5166662 - DNA, 25 bp, Homo sapien
cagctgctagtggtggtgtggttga

SEQ ID NO: 5166663 - DNA, 25 bp, Homo sapien
tgtggttgacgtatctgctgcagct

SEQ ID NO: 5166664 - DNA, 25 bp, Homo sapien
tgagcagctggaggttgccgggact

SEQ ID NO: 5166665 - DNA, 25 bp, Homo sapien
tgaagttctggtgcgccatccctgg

SEQ ID NO: 5166666 - DNA, 25 bp, Homo sapien
catgactgagccgcgtttcataggg

SEQ ID NO: 5166667 - DNA, 25 bp, Homo sapien
tcatgggactctgaagttctggtgc

SEQ ID NO: 5166668 - DNA, 25 bp, Homo sapien
gcgtttaaagatccgggtcatggga

SEQ ID NO: 5166669 - DNA, 25 bp, Homo sapien
agggcgatctcaggcttccacaggg

SEQ ID NO: 5166670 - DNA, 25 bp, Homo sapien
ggtcatgcttgcgtttctccagggc

SEQ ID NO: 5166671 - DNA, 25 bp, Homo sapien
caggtcatgcttgcgtttctccagg

SEQ ID NO: 5166672 - DNA, 25 bp, Homo sapien
tccagggcgatctcaggcttccaca

SEQ ID NO: 5166673 - DNA, 25 bp, Homo sapien
cagttcatcattctcctgggcagcc

SEQ ID NO: 5166674 - DNA, 25 bp, Homo sapien
tgggcagccatctccagagtgcctt

SEQ ID NO: 5166675 - DNA, 25 bp, Homo sapien
cccatcgccatagccccaggtgcca

SEQ ID NO: 5166676 - DNA, 25 bp, Homo sapien
ccatgtggcccccatcgccatagcc

SEQ ID NO: 5166677 - DNA, 25 bp, Homo sapien
gcccccgtgtccacagtgcacggcc

SEQ ID NO: 5166678 - DNA, 25 bp, Homo sapien
aagcccccgtgtccacagtgcacgg

SEQ ID NO: 5166679 - DNA, 25 bp, Homo sapien
gaagcccccgtgtccacagtgcacg

SEQ ID NO: 5166680 - DNA, 25 bp, Homo sapien
ccccgtgtccacagtgcacggccgg

SEQ ID NO: 5166681 - DNA, 25 bp, Homo sapien
ttgaagaagcacagaacatcctcac

SEQ ID NO: 5166682 - DNA, 25 bp, Homo sapien
ggacagtgcaccttgtccaaggtcc

SEQ ID NO: 5166683 - DNA, 25 bp, Homo sapien
aacctggacagtgcaccttgtccaa

SEQ ID NO: 5166684 - DNA, 25 bp, Homo sapien
gcggttgatgtccttgaagaagcac

SEQ ID NO: 5166685 - DNA, 25 bp, Homo sapien
ggccctgtcccactgccgtactcac

SEQ ID NO: 5166686 - DNA, 25 bp, Homo sapien
tgggccaagagtggccctgtcccac

SEQ ID NO: 5166687 - DNA, 25 bp, Homo sapien
agcctgggccaagagtggccctgtc

SEQ ID NO: 5166688 - DNA, 25 bp, Homo sapien
gcagcctgggccaagagtggccctg

SEQ ID NO: 5166689 - DNA, 25 bp, Homo sapien
cctggaggtcctgggtatcctagag

SEQ ID NO: 5166690 - DNA, 25 bp, Homo sapien
gaggtcctgggtatcctagagggcc

SEQ ID NO: 5166691 - DNA, 25 bp, Homo sapien
gtcctgggtatcctagagggccctg

SEQ ID NO: 5166692 - DNA, 25 bp, Homo sapien
cctgggtatcctagagggccctgag

SEQ ID NO: 5166693 - DNA, 25 bp, Homo sapien
ccttcagaccccgatttccatctgc

SEQ ID NO: 5166694 - DNA, 25 bp, Homo sapien
gcccttcagaccccgatttccatct

SEQ ID NO: 5166695 - DNA, 25 bp, Homo sapien
tcagaccccgatttccatctgcacc

SEQ ID NO: 5166696 - DNA, 25 bp, Homo sapien
ttcagaccccgatttccatctgcac

SEQ ID NO: 5166697 - DNA, 25 bp, Homo sapien
agttcctggcatccggggtagccag

SEQ ID NO: 5166698 - DNA, 25 bp, Homo sapien
ctgagttcctggcatccggggtagc

SEQ ID NO: 5166699 - DNA, 25 bp, Homo sapien
tgagttcctggcatccggggtagcc

SEQ ID NO: 5166700 - DNA, 25 bp, Homo sapien
cctgagttcctggcatccggggtag

SEQ ID NO: 5166701 - DNA, 25 bp, Homo sapien
cccactgactccaggaaagccagga

SEQ ID NO: 5166702 - DNA, 25 bp, Homo sapien
tctccctatccccagcttcctcagg

SEQ ID NO: 5166703 - DNA, 25 bp, Homo sapien
tcaggctccgttctccccactgact

SEQ ID NO: 5166704 - DNA, 25 bp, Homo sapien
tccaggaaagccaggaaatcccagg

SEQ ID NO: 5166705 - DNA, 25 bp, Homo sapien
cgaggacccggctgaccctgtggac

SEQ ID NO: 5166706 - DNA, 25 bp, Homo sapien
tcgaggacccggctgaccctgtgga

SEQ ID NO: 5166707 - DNA, 25 bp, Homo sapien
tggaggccttcgcccccgatgttcc

SEQ ID NO: 5166708 - DNA, 25 bp, Homo sapien
cagggggacccaggttcccaatgcg

SEQ ID NO: 5166709 - DNA, 25 bp, Homo sapien
catctctccagggggacccaggttc

SEQ ID NO: 5166710 - DNA, 25 bp, Homo sapien
tgcgtcctggggcgctttgtgggcc

SEQ ID NO: 5166711 - DNA, 25 bp, Homo sapien
acccaggttcccaatgcgtcctggg

SEQ ID NO: 5166712 - DNA, 25 bp, Homo sapien
ttgtccattcacccccttcccagtg

SEQ ID NO: 5166713 - DNA, 25 bp, Homo sapien
tgtccattcacccccttcccagtga

SEQ ID NO: 5166714 - DNA, 25 bp, Homo sapien
gtccattcacccccttcccagtgac

SEQ ID NO: 5166715 - DNA, 25 bp, Homo sapien
tttatgtctccccaatcaaagttgt

SEQ ID NO: 5166716 - DNA, 25 bp, Homo sapien
gatccctggagatcctgaatctcct

SEQ ID NO: 5166717 - DNA, 25 bp, Homo sapien
ccctggatccctggagatcctgaat

SEQ ID NO: 5166718 - DNA, 25 bp, Homo sapien
cctggagatcctgaatctcctggct

SEQ ID NO: 5166719 - DNA, 25 bp, Homo sapien
ggagatcctgaatctcctggctccc

SEQ ID NO: 5166720 - DNA, 25 bp, Homo sapien
gttggaaagtagggccctggagctg

SEQ ID NO: 5166721 - DNA, 25 bp, Homo sapien
atttcaacctctgttgtttattctg

SEQ ID NO: 5166722 - DNA, 25 bp, Homo sapien
ggatttcaacctctgttgtttattc

SEQ ID NO: 5166723 - DNA, 25 bp, Homo sapien
agaaatatgaggatttcaacctctg

SEQ ID NO: 5166724 - DNA, 25 bp, Homo sapien
aatatgaggatttcaacctctgttg

SEQ ID NO: 5166725 - DNA, 25 bp, Homo sapien
atttttgggatatgggcctgatagc

SEQ ID NO: 5166726 - DNA, 25 bp, Homo sapien
aggatgtaaccaacatttttgggat

SEQ ID NO: 5166727 - DNA, 25 bp, Homo sapien
catttttgggatatgggcctgatag

SEQ ID NO: 5166728 - DNA, 25 bp, Homo sapien
tgtaaccaacatttttgggatatgg

SEQ ID NO: 5166729 - DNA, 25 bp, Homo sapien
gctaagagcttcgaaggctcttggt

SEQ ID NO: 5166730 - DNA, 25 bp, Homo sapien
cttgctaagagcttcgaaggctctt

SEQ ID NO: 5166731 - DNA, 25 bp, Homo sapien
cttaagtataatgtacttgctaaga

SEQ ID NO: 5166732 - DNA, 25 bp, Homo sapien
aatgtacttgctaagagcttcgaag

SEQ ID NO: 5166733 - DNA, 25 bp, Homo sapien
gatatatacggcttaacctataact

SEQ ID NO: 5166734 - DNA, 25 bp, Homo sapien
taagatatatacggcttaacctata

SEQ ID NO: 5166735 - DNA, 25 bp, Homo sapien
agatatatacggcttaacctataac

SEQ ID NO: 5166736 - DNA, 25 bp, Homo sapien
tatatacggcttaacctataactta

SEQ ID NO: 5166737 - DNA, 25 bp, Homo sapien
agaggtatgatttctctcgatcttt

SEQ ID NO: 5166738 - DNA, 25 bp, Homo sapien
ggtatgatttctctcgatctttaac

SEQ ID NO: 5166739 - DNA, 25 bp, Homo sapien
tatgatttctctcgatctttaactt

SEQ ID NO: 5166740 - DNA, 25 bp, Homo sapien
gaggtatgatttctctcgatcttta

SEQ ID NO: 5166741 - DNA, 25 bp, Homo sapien
gataagggccacagcagattggagc

SEQ ID NO: 5166742 - DNA, 25 bp, Homo sapien
tctttttcagatactatcgaaacta

SEQ ID NO: 5166743 - DNA, 25 bp, Homo sapien
actctttttcagatactatcgaaac

SEQ ID NO: 5166744 - DNA, 25 bp, Homo sapien
tctgtcataactaatgagtcaaaat

SEQ ID NO: 5166745 - DNA, 25 bp, Homo sapien
catgttctgtcataactaatgagtc

SEQ ID NO: 5166746 - DNA, 25 bp, Homo sapien
ttggtaaacatgttctgtcataact

SEQ ID NO: 5166747 - DNA, 25 bp, Homo sapien
tgttctgtcataactaatgagtcaa

SEQ ID NO: 5166748 - DNA, 25 bp, Homo sapien
ggtaaataagaagcagcagacttct

SEQ ID NO: 5166749 - DNA, 25 bp, Homo sapien
taagaagcagcagacttctattatt

SEQ ID NO: 5166750 - DNA, 25 bp, Homo sapien
acaatctaacattttgattaaactg

SEQ ID NO: 5166751 - DNA, 25 bp, Homo sapien
aagcagcagacttctattattagat

SEQ ID NO: 5166752 - DNA, 25 bp, Homo sapien
gagttagcagttcttgcacactttc

SEQ ID NO: 5166753 - DNA, 25 bp, Homo sapien
gagaaagccatattgtcaggcatgg

SEQ ID NO: 5166754 - DNA, 25 bp, Homo sapien
gttagcagttcttgcacactttctt

SEQ ID NO: 5166755 - DNA, 25 bp, Homo sapien
gccatattgtcaggcatgggggcat

SEQ ID NO: 5166756 - DNA, 25 bp, Homo sapien
cctaggaccaacagatagctcttat

SEQ ID NO: 5166757 - DNA, 25 bp, Homo sapien
tttggttcctaggaccaacagatag

SEQ ID NO: 5166758 - DNA, 25 bp, Homo sapien
tggttcctaggaccaacagatagct

SEQ ID NO: 5166759 - DNA, 25 bp, Homo sapien
gttcctaggaccaacagatagctct

SEQ ID NO: 5166760 - DNA, 25 bp, Homo sapien
catccttgccacagtcacccttagc

SEQ ID NO: 5166761 - DNA, 25 bp, Homo sapien
acagtcacccttagcactgtcctgg

SEQ ID NO: 5166762 - DNA, 25 bp, Homo sapien
gattgtcctggttcgccatccttgc

SEQ ID NO: 5166763 - DNA, 25 bp, Homo sapien
agattgtcctggttcgccatccttg

SEQ ID NO: 5166764 - DNA, 25 bp, Homo sapien
cccagggggtctgttctccccagtg

SEQ ID NO: 5166765 - DNA, 25 bp, Homo sapien
cacttgactagtggcccagggggtc

SEQ ID NO: 5166766 - DNA, 25 bp, Homo sapien
gggtctgttctccccagtgggacca

SEQ ID NO: 5166767 - DNA, 25 bp, Homo sapien
tctccccagtgggaccagggaatgc

SEQ ID NO: 5166768 - DNA, 25 bp, Homo sapien
cagggacagcacagatagcaggcat

SEQ ID NO: 5166769 - DNA, 25 bp, Homo sapien
cgccccatgcacacatcagggacag

SEQ ID NO: 5166770 - DNA, 25 bp, Homo sapien
acatcagggacagcacagatagcag

SEQ ID NO: 5166771 - DNA, 25 bp, Homo sapien
ccccgccccatgcacacatcaggga

SEQ ID NO: 5166772 - DNA, 25 bp, Homo sapien
cagactcataaacccgtgtgctcat

SEQ ID NO: 5166773 - DNA, 25 bp, Homo sapien
acattgcactcctctccgggctttt

SEQ ID NO: 5166774 - DNA, 25 bp, Homo sapien
cagtgactcacactgaaccccagag

SEQ ID NO: 5166775 - DNA, 25 bp, Homo sapien
atgaggaggagcaccccacattgca

SEQ ID NO: 5166776 - DNA, 25 bp, Homo sapien
tggaggccctgaaatgcacacaagg

SEQ ID NO: 5166777 - DNA, 25 bp, Homo sapien
cacaggactggaaggcccagcttgg

SEQ ID NO: 5166778 - DNA, 25 bp, Homo sapien
ctgtggctccaggtcggccttgctg

SEQ ID NO: 5166779 - DNA, 25 bp, Homo sapien
caggactggaaggcccagcttggcc

SEQ ID NO: 5166780 - DNA, 25 bp, Homo sapien
tggctccaggtcggccttgctgacc

SEQ ID NO: 5166781 - DNA, 25 bp, Homo sapien
gggccaggaagaccctgatccccat

SEQ ID NO: 5166782 - DNA, 25 bp, Homo sapien
tctccctttctgttcaggggagccc

SEQ ID NO: 5166783 - DNA, 25 bp, Homo sapien
tgagggccaggaagaccctgatccc

SEQ ID NO: 5166784 - DNA, 25 bp, Homo sapien
ctgagggccaggaagaccctgatcc

SEQ ID NO: 5166785 - DNA, 25 bp, Homo sapien
ctcctttggctccttttgagccagt

SEQ ID NO: 5166786 - DNA, 25 bp, Homo sapien
tttggctccttttgagccagtgtcc

SEQ ID NO: 5166787 - DNA, 25 bp, Homo sapien
tcctttggctccttttgagccagtg

SEQ ID NO: 5166788 - DNA, 25 bp, Homo sapien
tgcgcctcctttggctccttttgag

SEQ ID NO: 5166789 - DNA, 25 bp, Homo sapien
aatccagaaggcctcccaagcacag

SEQ ID NO: 5166790 - DNA, 25 bp, Homo sapien
gggtcccacaagcttcccctgttgc

SEQ ID NO: 5166791 - DNA, 25 bp, Homo sapien
tggcatcatcccagggggtcccaca

SEQ ID NO: 5166792 - DNA, 25 bp, Homo sapien
ccaagtggcagaaaatccagaaggc

SEQ ID NO: 5166793 - DNA, 25 bp, Homo sapien
ggtgcactatgggcagggacgggca

SEQ ID NO: 5166794 - DNA, 25 bp, Homo sapien
tccatttccacaaccgccaaaccac

SEQ ID NO: 5166795 - DNA, 25 bp, Homo sapien
acgggcagccagagaccagctcgca

SEQ ID NO: 5166796 - DNA, 25 bp, Homo sapien
ttccacaaccgccaaaccactgggc

SEQ ID NO: 5166797 - DNA, 25 bp, Homo sapien
taatctcatcactgcgatggggggc

SEQ ID NO: 5166798 - DNA, 25 bp, Homo sapien
ggaccacatgaaagtcctgaacatg

SEQ ID NO: 5166799 - DNA, 25 bp, Homo sapien
cctcacgaagtttaggaccacatga

SEQ ID NO: 5166800 - DNA, 25 bp, Homo sapien
aagtcctgaacatgcttccagtagg

SEQ ID NO: 5166801 - DNA, 25 bp, Homo sapien
ctgcgatctcgagccgtcccgtagg

SEQ ID NO: 5166802 - DNA, 25 bp, Homo sapien
ggtgtcgggcgtgcgggtggcagct

SEQ ID NO: 5166803 - DNA, 25 bp, Homo sapien
tcccgtaggtgtttgcgccgttcat

SEQ ID NO: 5166804 - DNA, 25 bp, Homo sapien
agccgtcccgtaggtgtttgcgccg

SEQ ID NO: 5166805 - DNA, 25 bp, Homo sapien
gaccggaggtcccagactatgaaca

SEQ ID NO: 5166806 - DNA, 25 bp, Homo sapien
ttctcgcagctgctctcgtgggacc

SEQ ID NO: 5166807 - DNA, 25 bp, Homo sapien
aggaggagtcggtcgccttctcgca

SEQ ID NO: 5166808 - DNA, 25 bp, Homo sapien
tatgaacaaatggtccaagtgcccc

SEQ ID NO: 5166809 - DNA, 25 bp, Homo sapien
gcctgggaatggacaatcacaggct

SEQ ID NO: 5166810 - DNA, 25 bp, Homo sapien
gacaatcacaggcttgtggatgatc

SEQ ID NO: 5166811 - DNA, 25 bp, Homo sapien
gaatggacaatcacaggcttgtgga

SEQ ID NO: 5166812 - DNA, 25 bp, Homo sapien
tttccagcattgagcctgggaatgg

SEQ ID NO: 5166813 - DNA, 25 bp, Homo sapien
gagcagccggtgcagtattttcctc

SEQ ID NO: 5166814 - DNA, 25 bp, Homo sapien
agcagccggtgcagtattttcctca

SEQ ID NO: 5166815 - DNA, 25 bp, Homo sapien
tctctgattaccctcttcgtcttct

SEQ ID NO: 5166816 - DNA, 25 bp, Homo sapien
cactcttctctgattaccctcttcg

SEQ ID NO: 5166817 - DNA, 25 bp, Homo sapien
tcttctctgattaccctcttcgtct

SEQ ID NO: 5166818 - DNA, 25 bp, Homo sapien
tctgattaccctcttcgtcttcttc

SEQ ID NO: 5166819 - DNA, 25 bp, Homo sapien
gagcacctgcgggattccacggctg

SEQ ID NO: 5166820 - DNA, 25 bp, Homo sapien
tatgggactccacgtcagggtgagt

SEQ ID NO: 5166821 - DNA, 25 bp, Homo sapien
ccagcagtcagagtggtagtggccc

SEQ ID NO: 5166822 - DNA, 25 bp, Homo sapien
ttcgcagatcaccagcagtcagact

SEQ ID NO: 5166823 - DNA, 25 bp, Homo sapien
ctgtgaggctgagacccagcaggct

SEQ ID NO: 5166824 - DNA, 25 bp, Homo sapien
agacccagcaggctgcacgtggcct

SEQ ID NO: 5166825 - DNA, 25 bp, Homo sapien
ccagcacctgggagcctgtgaggct

SEQ ID NO: 5166826 - DNA, 25 bp, Homo sapien
gggctcagtgggctgccagcacctg

SEQ ID NO: 5166827 - DNA, 25 bp, Homo sapien
acagaggcgctactcttgctcagct

SEQ ID NO: 5166828 - DNA, 25 bp, Homo sapien
cagcagtagctgcatgcaccatgcc

SEQ ID NO: 5166829 - DNA, 25 bp, Homo sapien
cagactggcaaagtataggggcaca

SEQ ID NO: 5166830 - DNA, 25 bp, Homo sapien
cctggttcacagaggcgctactctt

SEQ ID NO: 5166831 - DNA, 25 bp, Homo sapien
tagaaattgtccaggggtgtacagg

SEQ ID NO: 5166832 - DNA, 25 bp, Homo sapien
agagccagctgctaaatagccagta

SEQ ID NO: 5166833 - DNA, 25 bp, Homo sapien
gccagctgctaaatagccagtaatt

SEQ ID NO: 5166834 - DNA, 25 bp, Homo sapien
agaaattgtccaggggtgtacaggg

SEQ ID NO: 5166835 - DNA, 25 bp, Homo sapien
aaatcctacttcagagagcttgctg

SEQ ID NO: 5166836 - DNA, 25 bp, Homo sapien
taaatcctacttcagagagcttgct

SEQ ID NO: 5166837 - DNA, 25 bp, Homo sapien
tgtcacacgtgacttaggaccgcag

SEQ ID NO: 5166838 - DNA, 25 bp, Homo sapien
tgtaaaaaccgcacaccgactgaag

SEQ ID NO: 5166839 - DNA, 25 bp, Homo sapien
tccgtgctgcttctctaagggcgct

SEQ ID NO: 5166840 - DNA, 25 bp, Homo sapien
taataaatatgtccgcccaggcttc

SEQ ID NO: 5166841 - DNA, 25 bp, Homo sapien
cttgagtgccgcttccacgtgggtc

SEQ ID NO: 5166842 - DNA, 25 bp, Homo sapien
cttccacgtgggtccgggagaatct

SEQ ID NO: 5166843 - DNA, 25 bp, Homo sapien
gggctcctccagcgcgacacagtcc

SEQ ID NO: 5166844 - DNA, 25 bp, Homo sapien
gtccgggagaatctgtgggctcctc

SEQ ID NO: 5166845 - DNA, 25 bp, Homo sapien
tccgaaacaggagctcattctccta

SEQ ID NO: 5166846 - DNA, 25 bp, Homo sapien
ccgaaacaggagctcattctcctac

SEQ ID NO: 5166847 - DNA, 25 bp, Homo sapien
ctccgaaacaggagctcattctcct

SEQ ID NO: 5166848 - DNA, 25 bp, Homo sapien
tccccagcacttcacgcgccccgga

SEQ ID NO: 5166849 - DNA, 25 bp, Homo sapien
catccccagcacttcacgcgccccg

SEQ ID NO: 5166850 - DNA, 25 bp, Homo sapien
atccccagcacttcacgcgccccgg

SEQ ID NO: 5166851 - DNA, 25 bp, Homo sapien
ccccagcacttcacgcgccccggac

SEQ ID NO: 5166852 - DNA, 25 bp, Homo sapien
tgtgggaacagcaggcccagtcact

SEQ ID NO: 5166853 - DNA, 25 bp, Homo sapien
gggaacagcaggcccagtcactcac

SEQ ID NO: 5166854 - DNA, 25 bp, Homo sapien
gtgggaacagcaggcccagtcactc

SEQ ID NO: 5166855 - DNA, 25 bp, Homo sapien
ctgtgggaacagcaggcccagtcac

SEQ ID NO: 5166856 - DNA, 25 bp, Homo sapien
cggtacaggtactcgcggcgcaggc

SEQ ID NO: 5166857 - DNA, 25 bp, Homo sapien
ggtacaggtactcgcggcgcaggcg

SEQ ID NO: 5166858 - DNA, 25 bp, Homo sapien
ctcctcccgggccttgcggtacagg

SEQ ID NO: 5166859 - DNA, 25 bp, Homo sapien
aacaggagaacccaatgggcaagga

SEQ ID NO: 5166860 - DNA, 25 bp, Homo sapien
tcaaaaccaacaggagaacccaatg

SEQ ID NO: 5166861 - DNA, 25 bp, Homo sapien
ctctcaaaaccaacaggagaaccca

SEQ ID NO: 5166862 - DNA, 25 bp, Homo sapien
caggagaacccaatgggcaaggaaa

SEQ ID NO: 5166863 - DNA, 25 bp, Homo sapien
tgtaaggccagagcctctcggcgta

SEQ ID NO: 5166864 - DNA, 25 bp, Homo sapien
tccagggacccctgtaaggccagag

SEQ ID NO: 5166865 - DNA, 25 bp, Homo sapien
gagcctctcggcgtaactcagtggg

SEQ ID NO: 5166866 - DNA, 25 bp, Homo sapien
tctcggcgtaactcagtgggaatca

SEQ ID NO: 5166867 - DNA, 25 bp, Homo sapien
tcgactcctgcccatcggtattcat

SEQ ID NO: 5166868 - DNA, 25 bp, Homo sapien
ataaccttgggatcctcgactcctg

SEQ ID NO: 5166869 - DNA, 25 bp, Homo sapien
gactcctgcccatcggtattcatca

SEQ ID NO: 5166870 - DNA, 25 bp, Homo sapien
tcgggaggtagtgatcataaccttg

SEQ ID NO: 5166871 - DNA, 25 bp, Homo sapien
tggatggcagtgtacagtcaggact

SEQ ID NO: 5166872 - DNA, 25 bp, Homo sapien
ggtgtgccccgatgctcgtgaacga

SEQ ID NO: 5166873 - DNA, 25 bp, Homo sapien
gctcgtgaacgaccagcagatcggt

SEQ ID NO: 5166874 - DNA, 25 bp, Homo sapien
atcggtgacgccgttggctttgcag

SEQ ID NO: 5166875 - DNA, 25 bp, Homo sapien
tgtcgacctcggttcattcgctggg

SEQ ID NO: 5166876 - DNA, 25 bp, Homo sapien
cgtctgccctcagacggctcccacc

SEQ ID NO: 5166877 - DNA, 25 bp, Homo sapien
gctgtcagagaccccgtctgccctc

SEQ ID NO: 5166878 - DNA, 25 bp, Homo sapien
gagaccccgtctgccctcagacggc

SEQ ID NO: 5166879 - DNA, 25 bp, Homo sapien
tcagagaccccgtctgccctcagac

SEQ ID NO: 5166880 - DNA, 25 bp, Homo sapien
tctgggatgtcatgccgcatgacca

SEQ ID NO: 5166881 - DNA, 25 bp, Homo sapien
ttggcctccgacatggtgcccaggt

SEQ ID NO: 5166882 - DNA, 25 bp, Homo sapien
aagtaggcagtaggaccaaagggca

SEQ ID NO: 5166883 - DNA, 25 bp, Homo sapien
catgaccacattgcacagcgtgaag

SEQ ID NO: 5166884 - DNA, 25 bp, Homo sapien
gaaacagagtggcaaatgcctggcc

SEQ ID NO: 5166885 - DNA, 25 bp, Homo sapien
ctggggcacaaggaaagagagggaa

SEQ ID NO: 5166886 - DNA, 25 bp, Homo sapien
aacagagtggcaaatgcctggcctg

SEQ ID NO: 5166887 - DNA, 25 bp, Homo sapien
gagagggaaacagagtggcaaatgc

SEQ ID NO: 5166888 - DNA, 25 bp, Homo sapien
ataggtatcggaggatgtcagagac

SEQ ID NO: 5166889 - DNA, 25 bp, Homo sapien
tgatatgtagtcgtcctggtttgcg

SEQ ID NO: 5166890 - DNA, 25 bp, Homo sapien
ctttgggcacgggaaataggtatcg

SEQ ID NO: 5166891 - DNA, 25 bp, Homo sapien
ggtgatgacccggtggctgtcatct

SEQ ID NO: 5166892 - DNA, 25 bp, Homo sapien
caagcagcacgaggtacacagggtg

SEQ ID NO: 5166893 - DNA, 25 bp, Homo sapien
ggtcaacggcaagcagcacgaggta

SEQ ID NO: 5166894 - DNA, 25 bp, Homo sapien
acggcaagcagcacgaggtacacag

SEQ ID NO: 5166895 - DNA, 25 bp, Homo sapien
tttcctggggcatggcccgtggacc

SEQ ID NO: 5166896 - DNA, 25 bp, Homo sapien
tgagctccacgttgcggtggtctgt

SEQ ID NO: 5166897 - DNA, 25 bp, Homo sapien
tgcggtggtctgtcttcttatacac

SEQ ID NO: 5166898 - DNA, 25 bp, Homo sapien
ctcagtgagctccacgttgcggtgg

SEQ ID NO: 5166899 - DNA, 25 bp, Homo sapien
cacgttgcggtggtctgtcttctta

SEQ ID NO: 5166900 - DNA, 25 bp, Homo sapien
gcttcagctcaaagcggggcccgac

SEQ ID NO: 5166901 - DNA, 25 bp, Homo sapien
gacacgggattcagcctcaaactca

SEQ ID NO: 5166902 - DNA, 25 bp, Homo sapien
acacgggattcagcctcaaactcac

SEQ ID NO: 5166903 - DNA, 25 bp, Homo sapien
cccagacacgggattcagcctcaaa

SEQ ID NO: 5166904 - DNA, 25 bp, Homo sapien
cagacacgggattcagcctcaaact

SEQ ID NO: 5166905 - DNA, 25 bp, Homo sapien
gcagggatggcatcagccccggcac

SEQ ID NO: 5166906 - DNA, 25 bp, Homo sapien
catcagccccggcacagccagcctc

SEQ ID NO: 5166907 - DNA, 25 bp, Homo sapien
ctgcaggcagggatggcatcagccc

SEQ ID NO: 5166908 - DNA, 25 bp, Homo sapien
gggatggcatcagccccggcacagc

SEQ ID NO: 5166909 - DNA, 25 bp, Homo sapien
ctccagcgtgcccagacggatcatg

SEQ ID NO: 5166910 - DNA, 25 bp, Homo sapien
ccagcgtgcccagacggatcatgta

SEQ ID NO: 5166911 - DNA, 25 bp, Homo sapien
agcgtgcccagacggatcatgtaca

SEQ ID NO: 5166912 - DNA, 25 bp, Homo sapien
tgctccagcgtgcccagacggatca

SEQ ID NO: 5166913 - DNA, 25 bp, Homo sapien
gtgtaagggtgccagcgccactcca

SEQ ID NO: 5166914 - DNA, 25 bp, Homo sapien
gactctcttgcgtgcggtattggtg

SEQ ID NO: 5166915 - DNA, 25 bp, Homo sapien
ctcttgcgtgcggtattggtgtaag

SEQ ID NO: 5166916 - DNA, 25 bp, Homo sapien
aggaagactctcttgcgtgcggtat

SEQ ID NO: 5166917 - DNA, 25 bp, Homo sapien
acagttccacatcccagttcagcag

SEQ ID NO: 5166918 - DNA, 25 bp, Homo sapien
catcctgagttccaagtccatgtcc

SEQ ID NO: 5166919 - DNA, 25 bp, Homo sapien
tctgtgacagttcctactggtgggt

SEQ ID NO: 5166920 - DNA, 25 bp, Homo sapien
gacggtttattcagacctctccacc

SEQ ID NO: 5166921 - DNA, 25 bp, Homo sapien
ggcaaaagagctccctcgggcatct

SEQ ID NO: 5166922 - DNA, 25 bp, Homo sapien
tgctcagtatcaccaaccgttaggg

SEQ ID NO: 5166923 - DNA, 25 bp, Homo sapien
tgagttaacttggtgggctgcccct

SEQ ID NO: 5166924 - DNA, 25 bp, Homo sapien
cactaattctatgcaagagggcaga

SEQ ID NO: 5166925 - DNA, 25 bp, Homo sapien
ttactatctgtctcaacttgggctg

SEQ ID NO: 5166926 - DNA, 25 bp, Homo sapien
cactgacagcatatcacacatggcg

SEQ ID NO: 5166927 - DNA, 25 bp, Homo sapien
cagtgcaccagcaaggagttcagcc

SEQ ID NO: 5166928 - DNA, 25 bp, Homo sapien
caatggctatatctacagagtggga

SEQ ID NO: 5166929 - DNA, 25 bp, Homo sapien
tcaacctgcgctgtgaattgtgtaa

SEQ ID NO: 5166930 - DNA, 25 bp, Homo sapien
cgatcttagtcgaaacaagcacact

SEQ ID NO: 5166931 - DNA, 25 bp, Homo sapien
tagagtgacagctaatgcgtatggg

SEQ ID NO: 5166932 - DNA, 25 bp, Homo sapien
aaatcattgatgcacagggacgggc

SEQ ID NO: 5166933 - DNA, 25 bp, Homo sapien
cagggatcctgttgagggcctgtcc

SEQ ID NO: 5166934 - DNA, 25 bp, Homo sapien
ggctagaggatctctgtccagcagc

SEQ ID NO: 5166935 - DNA, 25 bp, Homo sapien
ggcatgtcgtccagctgaaggtctg

SEQ ID NO: 5166936 - DNA, 25 bp, Homo sapien
ggtggagggcatgtcgtccagctga

SEQ ID NO: 5166937 - DNA, 25 bp, Homo sapien
cgccgcgggccagcaaggtccagcc

SEQ ID NO: 5166938 - DNA, 25 bp, Homo sapien
cgcgcggcgagtgtggacgccgcgg

SEQ ID NO: 5166939 - DNA, 25 bp, Homo sapien
gctgaactcgccggcgaggactgcc

SEQ ID NO: 5166940 - DNA, 25 bp, Homo sapien
cgcgcttccagccgctccaggaagc

SEQ ID NO: 5166941 - DNA, 25 bp, Homo sapien
cgctccaggaagctccgcgccgagt

SEQ ID NO: 5166942 - DNA, 25 bp, Homo sapien
gaagctccgcgccgagtccaggctg

SEQ ID NO: 5166943 - DNA, 25 bp, Homo sapien
aggacaggcgtacgcagggccaggg

SEQ ID NO: 5166944 - DNA, 25 bp, Homo sapien
ctcgcggaccccgtgtgccactcac

SEQ ID NO: 5166945 - DNA, 25 bp, Homo sapien
ccggggacaccgagacagaaaggca

SEQ ID NO: 5166946 - DNA, 25 bp, Homo sapien
cagaaaggcagagcccgccgtgcgc

SEQ ID NO: 5166947 - DNA, 25 bp, Homo sapien
gacaccgggaacgagggtgtgcacg

SEQ ID NO: 5166948 - DNA, 25 bp, Homo sapien
ttccgggagcgcgacgaggacaccg

SEQ ID NO: 5166949 - DNA, 25 bp, Homo sapien
cagagagtgaagacggagacagcaa

SEQ ID NO: 5166950 - DNA, 25 bp, Homo sapien
cgcccgcagccaggttgttccggga

SEQ ID NO: 5166951 - DNA, 25 bp, Homo sapien
catctcagctgtgcagtggaaccat

SEQ ID NO: 5166952 - DNA, 25 bp, Homo sapien
tgtgcgcccaatatgtactaagtgc

SEQ ID NO: 5166953 - DNA, 25 bp, Homo sapien
aatctttataggcagtgacgaacgc

SEQ ID NO: 5166954 - DNA, 25 bp, Homo sapien
taatgctgggcttgcactacctgta

SEQ ID NO: 5166955 - DNA, 25 bp, Homo sapien
aggcagcacgtctttgtagcggttc

SEQ ID NO: 5166956 - DNA, 25 bp, Homo sapien
cggtggagcacacgccgtcagcctt

SEQ ID NO: 5166957 - DNA, 25 bp, Homo sapien
tctttgtagcggttcttcctcacgt

SEQ ID NO: 5166958 - DNA, 25 bp, Homo sapien
tcttcctcacgttctctggccgact

SEQ ID NO: 5166959 - DNA, 25 bp, Homo sapien
tggagtttgggtaggatagggtgac

SEQ ID NO: 5166960 - DNA, 25 bp, Homo sapien
atagggtgacggagcctctgacagc

SEQ ID NO: 5166961 - DNA, 25 bp, Homo sapien
gcagataaggtgagaaacgtggagt

SEQ ID NO: 5166962 - DNA, 25 bp, Homo sapien
cagataaggtgagaaacgtggagtt

SEQ ID NO: 5166963 - DNA, 25 bp, Homo sapien
gagcagggagaggattactcgcgtc

SEQ ID NO: 5166964 - DNA, 25 bp, Homo sapien
gagaggattactcgcgtctgatcat

SEQ ID NO: 5166965 - DNA, 25 bp, Homo sapien
cattaatgtagtcgctgtgtccctc

SEQ ID NO: 5166966 - DNA, 25 bp, Homo sapien
agttgccattaatgtagtcgctgtg

SEQ ID NO: 5166967 - DNA, 25 bp, Homo sapien
ctggtgaaggccgaattcacgactg

SEQ ID NO: 5166968 - DNA, 25 bp, Homo sapien
attcacgactgagattctgcggccc

SEQ ID NO: 5166969 - DNA, 25 bp, Homo sapien
ttcacgactgagattctgcggccca

SEQ ID NO: 5166970 - DNA, 25 bp, Homo sapien
gtgaaggccgaattcacgactgaga

SEQ ID NO: 5166971 - DNA, 25 bp, Homo sapien
tctccagaagtctagcagggtgtga

SEQ ID NO: 5166972 - DNA, 25 bp, Homo sapien
aaactcccagaccagtctccagaag

SEQ ID NO: 5166973 - DNA, 25 bp, Homo sapien
gcaagggtccttgcgtggcaatgta

SEQ ID NO: 5166974 - DNA, 25 bp, Homo sapien
ccttgcgtggcaatgtaggccaggc

SEQ ID NO: 5166975 - DNA, 25 bp, Homo sapien
actgccgagggggtacttagatgtt

SEQ ID NO: 5166976 - DNA, 25 bp, Homo sapien
attgtgccgcacccccaagtgctga

SEQ ID NO: 5166977 - DNA, 25 bp, Homo sapien
gggtacttagatgttgaccccacca

SEQ ID NO: 5166978 - DNA, 25 bp, Homo sapien
gatgttgaccccaccattgtgccgc

SEQ ID NO: 5166979 - DNA, 25 bp, Homo sapien
cgcccattctctatctctcgacagg

SEQ ID NO: 5166980 - DNA, 25 bp, Homo sapien
tctctatctctcgacaggccatcag

SEQ ID NO: 5166981 - DNA, 25 bp, Homo sapien
cattctctatctctcgacaggccat

SEQ ID NO: 5166982 - DNA, 25 bp, Homo sapien
tatctctcgacaggccatcaggatc

SEQ ID NO: 5166983 - DNA, 25 bp, Homo sapien
gaagcagtcagaatagggccttatg

SEQ ID NO: 5166984 - DNA, 25 bp, Homo sapien
tcaaggaggagctagcaagatccct

SEQ ID NO: 5166985 - DNA, 25 bp, Homo sapien
gcttcccacagagctacaataaggt

SEQ ID NO: 5166986 - DNA, 25 bp, Homo sapien
tccaagagctggaccctcgggtcct

SEQ ID NO: 5166987 - DNA, 25 bp, Homo sapien
gaccagcctggattatacgtgagac

SEQ ID NO: 5166988 - DNA, 25 bp, Homo sapien
taaacccaacattattgataattac

SEQ ID NO: 5166989 - DNA, 25 bp, Homo sapien
gatttaaaagtaagtcctggctaga

SEQ ID NO: 5166990 - DNA, 25 bp, Homo sapien
tattgataattacattaaaggctga

SEQ ID NO: 5166991 - DNA, 25 bp, Homo sapien
tggtaatagttgcatagctcaggaa

SEQ ID NO: 5166992 - DNA, 25 bp, Homo sapien
taagggaataattactatgcaatag

SEQ ID NO: 5166993 - DNA, 25 bp, Homo sapien
gggtaatcgaaatatactacagtaa

SEQ ID NO: 5166994 - DNA, 25 bp, Homo sapien
caactataatagcagtgtactgtgg

SEQ ID NO: 5166995 - DNA, 25 bp, Homo sapien
ccaagacggttcaatgggcaaagca

SEQ ID NO: 5166996 - DNA, 25 bp, Homo sapien
tgacctctgattagacaatgacttc

SEQ ID NO: 5166997 - DNA, 25 bp, Homo sapien
gagacctaactgtaagcaagaaaac

SEQ ID NO: 5166998 - DNA, 25 bp, Homo sapien
aagcacagcaacacaatagattgga

SEQ ID NO: 5166999 - DNA, 25 bp, Homo sapien
caaattcgatgaaactatgaaccca

SEQ ID NO: 5167000 - DNA, 25 bp, Homo sapien
tctgtagaaatataccagtctagtg

SEQ ID NO: 5167001 - DNA, 25 bp, Homo sapien
tctagtgtatgtgcacgtggagtcc

SEQ ID NO: 5167002 - DNA, 25 bp, Homo sapien
taaagaaagtcacgccaaggcagat

SEQ ID NO: 5167003 - DNA, 25 bp, Homo sapien
gaagagggagtcagcttcagagcta

SEQ ID NO: 5167004 - DNA, 25 bp, Homo sapien
ccaggtgctcgtggtggaagcacag

SEQ ID NO: 5167005 - DNA, 25 bp, Homo sapien
caggcagctatacttataacctata

SEQ ID NO: 5167006 - DNA, 25 bp, Homo sapien
gagctagctcaatcatgccacaaga

SEQ ID NO: 5167007 - DNA, 25 bp, Homo sapien
cagagtgatgcagaaaagcccagtc

SEQ ID NO: 5167008 - DNA, 25 bp, Homo sapien
ctcctgggcccagtaccgctcacac

SEQ ID NO: 5167009 - DNA, 25 bp, Homo sapien
tgggcccagtaccgctcacaccttt

SEQ ID NO: 5167010 - DNA, 25 bp, Homo sapien
cctgggcccagtaccgctcacacct

SEQ ID NO: 5167011 - DNA, 25 bp, Homo sapien
gaatgtgaccttgagggtcctgagc

SEQ ID NO: 5167012 - DNA, 25 bp, Homo sapien
ggtcctgagcatgatgtcctcattc

SEQ ID NO: 5167013 - DNA, 25 bp, Homo sapien
tctggaatgtgaccttgagggtcct

SEQ ID NO: 5167014 - DNA, 25 bp, Homo sapien
cttctggaatgtgaccttgagggtc

SEQ ID NO: 5167015 - DNA, 25 bp, Homo sapien
ccagatccctggaggcgacgggctt

SEQ ID NO: 5167016 - DNA, 25 bp, Homo sapien
ggcgagcatgtggtcaggactgctg

SEQ ID NO: 5167017 - DNA, 25 bp, Homo sapien
tctggccaggacatatactgtagct

SEQ ID NO: 5167018 - DNA, 25 bp, Homo sapien
tactgtagctggtacacagaacggg

SEQ ID NO: 5167019 - DNA, 25 bp, Homo sapien
agaccctcctgaagcccatttccaa

SEQ ID NO: 5167020 - DNA, 25 bp, Homo sapien
cagaccctcctgaagcccatttcca

SEQ ID NO: 5167021 - DNA, 25 bp, Homo sapien
gaccctcctgaagcccatttccaaa

SEQ ID NO: 5167022 - DNA, 25 bp, Homo sapien
gagcaagggttctcaaaataggcac

SEQ ID NO: 5167023 - DNA, 25 bp, Homo sapien
caagagaatcagagtgtgcctggtc

SEQ ID NO: 5167024 - DNA, 25 bp, Homo sapien
cacaattacagtccatggagggtga

SEQ ID NO: 5167025 - DNA, 25 bp, Homo sapien
agggtcctgatggatcccctgcaga

SEQ ID NO: 5167026 - DNA, 25 bp, Homo sapien
atccacggtgcacaggacgcctgtt

SEQ ID NO: 5167027 - DNA, 25 bp, Homo sapien
acggtgcacaggacgcctgttcgcc

SEQ ID NO: 5167028 - DNA, 25 bp, Homo sapien
acataatccacggtgcacaggacgc

SEQ ID NO: 5167029 - DNA, 25 bp, Homo sapien
agcagctgcctcacataatccacgg

SEQ ID NO: 5167030 - DNA, 25 bp, Homo sapien
tcttaaggaccacatcaaagagact

SEQ ID NO: 5167031 - DNA, 25 bp, Homo sapien
cttaaggaccacatcaaagagactg

SEQ ID NO: 5167032 - DNA, 25 bp, Homo sapien
tgtggtacaggaacctgtactgctc

SEQ ID NO: 5167033 - DNA, 25 bp, Homo sapien
ggagcagaacatctgagccaccgtg

SEQ ID NO: 5167034 - DNA, 25 bp, Homo sapien
gcattctggagtgtggagcagaaca

SEQ ID NO: 5167035 - DNA, 25 bp, Homo sapien
gccaccgtgtggtacaggaacctgt

SEQ ID NO: 5167036 - DNA, 25 bp, Homo sapien
catcgtcgtagagtggggcacaatt

SEQ ID NO: 5167037 - DNA, 25 bp, Homo sapien
tgggcggggtatggcgagaagtgcc

SEQ ID NO: 5167038 - DNA, 25 bp, Homo sapien
ggaagagggcatcgtcgtagagtgg

SEQ ID NO: 5167039 - DNA, 25 bp, Homo sapien
cctcctggtgggcggggtatggcga

SEQ ID NO: 5167040 - DNA, 25 bp, Homo sapien
cgggaggaagtgaaacggcggcgct

SEQ ID NO: 5167041 - DNA, 25 bp, Homo sapien
gaagtgaaacggcggcgctgggcag

SEQ ID NO: 5167042 - DNA, 25 bp, Homo sapien
gaggaagtgaaacggcggcgctggg

SEQ ID NO: 5167043 - DNA, 25 bp, Homo sapien
gggaggaagtgaaacggcggcgctg

SEQ ID NO: 5167044 - DNA, 25 bp, Homo sapien
caccgcgtaggtgtcagccatggcg

SEQ ID NO: 5167045 - DNA, 25 bp, Homo sapien
gcgtaggtgtcagccatggcgtggc

SEQ ID NO: 5167046 - DNA, 25 bp, Homo sapien
ggtgtcagccatggcgtggcccggg

SEQ ID NO: 5167047 - DNA, 25 bp, Homo sapien
cggggacccgggcacagagatgctc

SEQ ID NO: 5167048 - DNA, 25 bp, Homo sapien
cgtccccgtctgcgtcccactcccg

SEQ ID NO: 5167049 - DNA, 25 bp, Homo sapien
gcgcgcggcgtcaccttgctgtaga

SEQ ID NO: 5167050 - DNA, 25 bp, Homo sapien
ggcagcgtccccctcgcgtcctccg

SEQ ID NO: 5167051 - DNA, 25 bp, Homo sapien
cgtgcgccccgggtcgctgggcgcg

SEQ ID NO: 5167052 - DNA, 25 bp, Homo sapien
cggccaggcagcgtccccctcgcgt

SEQ ID NO: 5167053 - DNA, 25 bp, Homo sapien
gccagggcctgacggaccactgcag

SEQ ID NO: 5167054 - DNA, 25 bp, Homo sapien
tggaccgcgactgcgaccgccaggg

SEQ ID NO: 5167055 - DNA, 25 bp, Homo sapien
gacggaccactgcaggatggttccg

SEQ ID NO: 5167056 - DNA, 25 bp, Homo sapien
gccagggacgcctggacatcagcgt

SEQ ID NO: 5167057 - DNA, 25 bp, Homo sapien
ggcctccagcctttgggcgcggcca

SEQ ID NO: 5167058 - DNA, 25 bp, Homo sapien
ggccaagacaagtattgccaggaac

SEQ ID NO: 5167059 - DNA, 25 bp, Homo sapien
ggcgcggccaagacaagtattgcca

SEQ ID NO: 5167060 - DNA, 25 bp, Homo sapien
tttgggcgcggccaagacaagtatt

SEQ ID NO: 5167061 - DNA, 25 bp, Homo sapien
acgggtcagctccggaagccccagg

SEQ ID NO: 5167062 - DNA, 25 bp, Homo sapien
gcgccgggcgggagaaggcacacac

SEQ ID NO: 5167063 - DNA, 25 bp, Homo sapien
agcagaccccccacgggtcagctcc

SEQ ID NO: 5167064 - DNA, 25 bp, Homo sapien
ggcgccgggcgggagaaggcacaca

SEQ ID NO: 5167065 - DNA, 25 bp, Homo sapien
gatccggcaggactttggtcagcag

SEQ ID NO: 5167066 - DNA, 25 bp, Homo sapien
taggcgccagatccggcaggacttt

SEQ ID NO: 5167067 - DNA, 25 bp, Homo sapien
ctagcccaccggtctgagctccacc

SEQ ID NO: 5167068 - DNA, 25 bp, Homo sapien
cgccacgtcctcgtaggcgccagat

SEQ ID NO: 5167069 - DNA, 25 bp, Homo sapien
ccgggtccactcagcaggcgggtcc

SEQ ID NO: 5167070 - DNA, 25 bp, Homo sapien
ggtccactcagcaggcgggtcccgg

SEQ ID NO: 5167071 - DNA, 25 bp, Homo sapien
ccttcggcctcccaatgcgcaggtt

SEQ ID NO: 5167072 - DNA, 25 bp, Homo sapien
cggcctcccaatgcgcaggttgaaa

SEQ ID NO: 5167073 - DNA, 25 bp, Homo sapien
tttccattctgcgcacggcgctcag

SEQ ID NO: 5167074 - DNA, 25 bp, Homo sapien
actttaactttgatccaggcccact

SEQ ID NO: 5167075 - DNA, 25 bp, Homo sapien
caacaggcaggaactggcgttagac

SEQ ID NO: 5167076 - DNA, 25 bp, Homo sapien
agcagtccgagctcacaagaggcaa

SEQ ID NO: 5167077 - DNA, 25 bp, Homo sapien
accagccactataccctagctacct

SEQ ID NO: 5167078 - DNA, 25 bp, Homo sapien
ctataccctagctacctcctccagc

SEQ ID NO: 5167079 - DNA, 25 bp, Homo sapien
cactataccctagctacctcctcca

SEQ ID NO: 5167080 - DNA, 25 bp, Homo sapien
agccactataccctagctacctcct

SEQ ID NO: 5167081 - DNA, 25 bp, Homo sapien
cttctccccttcataactcaggggt

SEQ ID NO: 5167082 - DNA, 25 bp, Homo sapien
tccggaagctcatctgtcccttctc

SEQ ID NO: 5167083 - DNA, 25 bp, Homo sapien
cccttcataactcaggggtcatgcc

SEQ ID NO: 5167084 - DNA, 25 bp, Homo sapien
ctccggaagctcatctgtcccttct

SEQ ID NO: 5167085 - DNA, 25 bp, Homo sapien
gactgtatctctgaagctttggctg

SEQ ID NO: 5167086 - DNA, 25 bp, Homo sapien
tctggaggtctttttatcggtctgc

SEQ ID NO: 5167087 - DNA, 25 bp, Homo sapien
cactggtctatcaagctgttggctg

SEQ ID NO: 5167088 - DNA, 25 bp, Homo sapien
gctgtccagctagcagagatgtctg

SEQ ID NO: 5167089 - DNA, 25 bp, Homo sapien
catcaagatgagagtctggccggct

SEQ ID NO: 5167090 - DNA, 25 bp, Homo sapien
atctggaggatcatgtctgactagc

SEQ ID NO: 5167091 - DNA, 25 bp, Homo sapien
ccatgtggctgatgtctgcctgtct

SEQ ID NO: 5167092 - DNA, 25 bp, Homo sapien
cagtccatctggttggttaggagtc

SEQ ID NO: 5167093 - DNA, 25 bp, Homo sapien
gggtctgcctagataggtcctgatt

SEQ ID NO: 5167094 - DNA, 25 bp, Homo sapien
gggtccatctgtctgaatagctgga

SEQ ID NO: 5167095 - DNA, 25 bp, Homo sapien
tctggttgggagtctgtctggcggg

SEQ ID NO: 5167096 - DNA, 25 bp, Homo sapien
tactcggcaggctgtgtgaatagta

SEQ ID NO: 5167097 - DNA, 25 bp, Homo sapien
ccatgggccatttaaagtgtttcaa

SEQ ID NO: 5167098 - DNA, 25 bp, Homo sapien
ttttatcctagcaggaaccctacca

SEQ ID NO: 5167099 - DNA, 25 bp, Homo sapien
taatgttttatcctagcaggaaccc

SEQ ID NO: 5167100 - DNA, 25 bp, Homo sapien
agtgtttcaaatcttagggggctga

SEQ ID NO: 5167101 - DNA, 25 bp, Homo sapien
gggaaagagcatcttatactttttc

SEQ ID NO: 5167102 - DNA, 25 bp, Homo sapien
ccttgaggttcagggaaagagcatc

SEQ ID NO: 5167103 - DNA, 25 bp, Homo sapien
gacccttgaggttcagggaaagagc

SEQ ID NO: 5167104 - DNA, 25 bp, Homo sapien
ggttcagggaaagagcatcttatac

SEQ ID NO: 5167105 - DNA, 25 bp, Homo sapien
cactgtggcagtgcatacagggacc

SEQ ID NO: 5167106 - DNA, 25 bp, Homo sapien
gagtggagttcatgccaaggcactt

SEQ ID NO: 5167107 - DNA, 25 bp, Homo sapien
cggccggcgaaggtatgatatcaca

SEQ ID NO: 5167108 - DNA, 25 bp, Homo sapien
gagatcgaccatggatgcagccagg

SEQ ID NO: 5167109 - DNA, 25 bp, Homo sapien
tttagtcactttcccatgcccctat

SEQ ID NO: 5167110 - DNA, 25 bp, Homo sapien
catgtggatcgtaccagctgggcag

SEQ ID NO: 5167111 - DNA, 25 bp, Homo sapien
agcagccagaacagtatctttagtc

SEQ ID NO: 5167112 - DNA, 25 bp, Homo sapien
tcccatgcccctattcccaagaaga

SEQ ID NO: 5167113 - DNA, 25 bp, Homo sapien
tcctcgcatgctgacaaggtggcct

SEQ ID NO: 5167114 - DNA, 25 bp, Homo sapien
aactgtgcttgccatgctgggccag

SEQ ID NO: 5167115 - DNA, 25 bp, Homo sapien
tgaagtcagaaaccaagaaggcgca

SEQ ID NO: 5167116 - DNA, 25 bp, Homo sapien
cagagagaataaccagggcaaatgc

SEQ ID NO: 5167117 - DNA, 25 bp, Homo sapien
taaggtcgcattcacaggttctaga

SEQ ID NO: 5167118 - DNA, 25 bp, Homo sapien
gaggattgcctctcccattgctgag

SEQ ID NO: 5167119 - DNA, 25 bp, Homo sapien
gagaacggtttttatgtcagcctga

SEQ ID NO: 5167120 - DNA, 25 bp, Homo sapien
tactgtctgtgagggagaatcggcc

SEQ ID NO: 5167121 - DNA, 25 bp, Homo sapien
caactgagcaattacactgactgag

SEQ ID NO: 5167122 - DNA, 25 bp, Homo sapien
tccacaagcatttgcggagcactgc

SEQ ID NO: 5167123 - DNA, 25 bp, Homo sapien
ttgaacaaagagtgataagccatcg

SEQ ID NO: 5167124 - DNA, 25 bp, Homo sapien
tattttctatcaccttcgctgaggc

SEQ ID NO: 5167125 - DNA, 25 bp, Homo sapien
gagaggtgacatcgttcagcttgct

SEQ ID NO: 5167126 - DNA, 25 bp, Homo sapien
gaggtgacatcgttcagcttgctga

SEQ ID NO: 5167127 - DNA, 25 bp, Homo sapien
ctggagaggtgacatcgttcagctt

SEQ ID NO: 5167128 - DNA, 25 bp, Homo sapien
tgacatcgttcagcttgctgacctc

SEQ ID NO: 5167129 - DNA, 25 bp, Homo sapien
gaggacagctcagtcgtgctcagga

SEQ ID NO: 5167130 - DNA, 25 bp, Homo sapien
tgactgccaagagggtatgggcaca

SEQ ID NO: 5167131 - DNA, 25 bp, Homo sapien
aaattgatgacgcttctgaggacca

SEQ ID NO: 5167132 - DNA, 25 bp, Homo sapien
gaggcataactaccagctgctgagg

SEQ ID NO: 5167133 - DNA, 25 bp, Homo sapien
gaacagtcactgtcattgtgctctg

SEQ ID NO: 5167134 - DNA, 25 bp, Homo sapien
caagtgggtcaaagcgcataaatgt

SEQ ID NO: 5167135 - DNA, 25 bp, Homo sapien
aagcttgaggcctcttcacccatag

SEQ ID NO: 5167136 - DNA, 25 bp, Homo sapien
taatagccccgatggtaaggtctgg

SEQ ID NO: 5167137 - DNA, 25 bp, Homo sapien
agagacagccacgacaaacatgaca

SEQ ID NO: 5167138 - DNA, 25 bp, Homo sapien
tagttgtgccctgtgactgatgctg

SEQ ID NO: 5167139 - DNA, 25 bp, Homo sapien
cttctctcagaggacacgtgcacct

SEQ ID NO: 5167140 - DNA, 25 bp, Homo sapien
tttccgggaagaggctatttgcatg

SEQ ID NO: 5167141 - DNA, 25 bp, Homo sapien
agccatcttgtcctgagactggttg

SEQ ID NO: 5167142 - DNA, 25 bp, Homo sapien
ggaagccatcttgtcctgagactgg

SEQ ID NO: 5167143 - DNA, 25 bp, Homo sapien
gaagccatcttgtcctgagactggt

SEQ ID NO: 5167144 - DNA, 25 bp, Homo sapien
tggaagccatcttgtcctgagactg

SEQ ID NO: 5167145 - DNA, 25 bp, Homo sapien
cagccgccctaaacaaggaagctgg

SEQ ID NO: 5167146 - DNA, 25 bp, Homo sapien
tgggtccgaagggagaccccagcca

SEQ ID NO: 5167147 - DNA, 25 bp, Homo sapien
ccagccagggcgcattggctgcagc

SEQ ID NO: 5167148 - DNA, 25 bp, Homo sapien
aggaagctggaagcagacatccctg

SEQ ID NO: 5167149 - DNA, 25 bp, Homo sapien
gccggaagggcagggactgcacggg

SEQ ID NO: 5167150 - DNA, 25 bp, Homo sapien
gaagggcagggactgcacgggtacc

SEQ ID NO: 5167151 - DNA, 25 bp, Homo sapien
cgcgggccggaagggcagggactgc

SEQ ID NO: 5167152 - DNA, 25 bp, Homo sapien
cggaagggcagggactgcacgggta

SEQ ID NO: 5167153 - DNA, 25 bp, Homo sapien
ggagccatgtagaaactgatacagt

SEQ ID NO: 5167154 - DNA, 25 bp, Homo sapien
ctagaattgacacgaaataagccac

SEQ ID NO: 5167155 - DNA, 25 bp, Homo sapien
gaattgacacgaaataagccacgta

SEQ ID NO: 5167156 - DNA, 25 bp, Homo sapien
tgacacgaaataagccacgtaaggg

SEQ ID NO: 5167157 - DNA, 25 bp, Homo sapien
acgacgaaggcggacgtggcggcgc

SEQ ID NO: 5167158 - DNA, 25 bp, Homo sapien
gtgcgcgttccagacccccggcgaa

SEQ ID NO: 5167159 - DNA, 25 bp, Homo sapien
gaaggcggacgtggcggcgctcagg

SEQ ID NO: 5167160 - DNA, 25 bp, Homo sapien
tgggaggacgacgaaggcggacgtg

SEQ ID NO: 5167161 - DNA, 25 bp, Homo sapien
tgccggcctgatcctgagcaggcgc

SEQ ID NO: 5167162 - DNA, 25 bp, Homo sapien
cttcccagtggacagcgctgctgga

SEQ ID NO: 5167163 - DNA, 25 bp, Homo sapien
cgcttcaggtgcccgagagtccatt

SEQ ID NO: 5167164 - DNA, 25 bp, Homo sapien
gggattcatgtccaggtgccggcct

SEQ ID NO: 5167165 - DNA, 25 bp, Homo sapien
tatcaaatgagtctttgtgtcttgt

SEQ ID NO: 5167166 - DNA, 25 bp, Homo sapien
ggttgaaacttttatcaaatgagtc

SEQ ID NO: 5167167 - DNA, 25 bp, Homo sapien
ttttgtctgattacaatatggccac

SEQ ID NO: 5167168 - DNA, 25 bp, Homo sapien
tacaatatggccacgcagctttttc

SEQ ID NO: 5167169 - DNA, 25 bp, Homo sapien
ctcttagccctgctttcattacatc

SEQ ID NO: 5167170 - DNA, 25 bp, Homo sapien
tgttttcctattcactatttcatta

SEQ ID NO: 5167171 - DNA, 25 bp, Homo sapien
cattaatcttcactctaatcttttt

SEQ ID NO: 5167172 - DNA, 25 bp, Homo sapien
gatttttctattgttttcctattca

SEQ ID NO: 5167173 - DNA, 25 bp, Homo sapien
tcctgagtagcctgagtagcctgcc

SEQ ID NO: 5167174 - DNA, 25 bp, Homo sapien
tgcgcgctcatgtgaaagtaattct

SEQ ID NO: 5167175 - DNA, 25 bp, Homo sapien
cattgtcctcatcctgattgtacag

SEQ ID NO: 5167176 - DNA, 25 bp, Homo sapien
cacattgggtagtattgtcatctta

SEQ ID NO: 5167177 - DNA, 25 bp, Homo sapien
tgctctagccgtaactttcaggact

SEQ ID NO: 5167178 - DNA, 25 bp, Homo sapien
ctgcaccattttaaacttctatcaa

SEQ ID NO: 5167179 - DNA, 25 bp, Homo sapien
ttttaaacttctatcaacattgcat

SEQ ID NO: 5167180 - DNA, 25 bp, Homo sapien
gtgtcaccacatccaacttagttct

SEQ ID NO: 5167181 - DNA, 25 bp, Homo sapien
cttagttcttttgagtacataccta

SEQ ID NO: 5167182 - DNA, 25 bp, Homo sapien
tagcgttatggcaaaacaagagtca

SEQ ID NO: 5167183 - DNA, 25 bp, Homo sapien
agaaaagcccaacaatctgacatgt

SEQ ID NO: 5167184 - DNA, 25 bp, Homo sapien
tggcagttcctagaaagctgagaca

SEQ ID NO: 5167185 - DNA, 25 bp, Homo sapien
gacctttacatatcacacaacagaa

SEQ ID NO: 5167186 - DNA, 25 bp, Homo sapien
tgtcatcaagtataagttcagttca

SEQ ID NO: 5167187 - DNA, 25 bp, Homo sapien
actcttagccctaaatgttcatatg

SEQ ID NO: 5167188 - DNA, 25 bp, Homo sapien
tctacttctatggtgtggaaaaaat

SEQ ID NO: 5167189 - DNA, 25 bp, Homo sapien
caatagaggaaagattcaatcaaca

SEQ ID NO: 5167190 - DNA, 25 bp, Homo sapien
ctgttaaggagtgtgcttttcttga

SEQ ID NO: 5167191 - DNA, 25 bp, Homo sapien
cttgaggtctttggctttataactc

SEQ ID NO: 5167192 - DNA, 25 bp, Homo sapien
gaactggctgttaaggagtgtgctt

SEQ ID NO: 5167193 - DNA, 25 bp, Homo sapien
aaggagtgtgcttttcttgaggtct

SEQ ID NO: 5167194 - DNA, 25 bp, Homo sapien
aactccatttgcgagagctttgagg

SEQ ID NO: 5167195 - DNA, 25 bp, Homo sapien
caactccatttgcgagagctttgag

SEQ ID NO: 5167196 - DNA, 25 bp, Homo sapien
actccatttgcgagagctttgagga

SEQ ID NO: 5167197 - DNA, 25 bp, Homo sapien
ctccatttgcgagagctttgaggag

SEQ ID NO: 5167198 - DNA, 25 bp, Homo sapien
tgagcagccctcagtgcgcatctcc

SEQ ID NO: 5167199 - DNA, 25 bp, Homo sapien
tcagtgcgcatctccctgaagtcca

SEQ ID NO: 5167200 - DNA, 25 bp, Homo sapien
tccctgaagtccacattgatccggc

SEQ ID NO: 5167201 - DNA, 25 bp, Homo sapien
tgaagtccacattgatccggcagag

SEQ ID NO: 5167202 - DNA, 25 bp, Homo sapien
gcaggcggcgcttgcggtacgggct

SEQ ID NO: 5167203 - DNA, 25 bp, Homo sapien
caggcggcgcttgcggtacgggctg

SEQ ID NO: 5167204 - DNA, 25 bp, Homo sapien
ctgcaggcggcgcttgcggtacggg

SEQ ID NO: 5167205 - DNA, 25 bp, Homo sapien
tgcaggcggcgcttgcggtacgggc

SEQ ID NO: 5167206 - DNA, 25 bp, Homo sapien
tggctggtccgactgctcctggcac

SEQ ID NO: 5167207 - DNA, 25 bp, Homo sapien
tccagtccaagcctcgagtcgtata

SEQ ID NO: 5167208 - DNA, 25 bp, Homo sapien
gcctcgagtcgtatagcactgtggg

SEQ ID NO: 5167209 - DNA, 25 bp, Homo sapien
ctgcctttggggctccagtccaagc

SEQ ID NO: 5167210 - DNA, 25 bp, Homo sapien
gagtcgtatagcactgtgggcctct

SEQ ID NO: 5167211 - DNA, 25 bp, Homo sapien
cagactcagaatttgtgccaaggca

SEQ ID NO: 5167212 - DNA, 25 bp, Homo sapien
agactcagaatttgtgccaaggcag

SEQ ID NO: 5167213 - DNA, 25 bp, Homo sapien
caggattaccatccaggggactcgg

SEQ ID NO: 5167214 - DNA, 25 bp, Homo sapien
gccaggattaccatccaggggactc

SEQ ID NO: 5167215 - DNA, 25 bp, Homo sapien
tcaggcgtcatatggcactgcgggc

SEQ ID NO: 5167216 - DNA, 25 bp, Homo sapien
tcttagttgccaagaggcagaccac

SEQ ID NO: 5167217 - DNA, 25 bp, Homo sapien
caggcgtcatatggcactgcgggct

SEQ ID NO: 5167218 - DNA, 25 bp, Homo sapien
actgcgggcttcttagttgccaaga

SEQ ID NO: 5167219 - DNA, 25 bp, Homo sapien
tccctagttcacacaggggaggtga

SEQ ID NO: 5167220 - DNA, 25 bp, Homo sapien
aggagaatggcccagtcctctccct

SEQ ID NO: 5167221 - DNA, 25 bp, Homo sapien
cagtcctctccctagttcacacagg

SEQ ID NO: 5167222 - DNA, 25 bp, Homo sapien
gaatggcccagtcctctccctagtt

SEQ ID NO: 5167223 - DNA, 25 bp, Homo sapien
aatttagcacttgataatggtgatg

SEQ ID NO: 5167224 - DNA, 25 bp, Homo sapien
ttggagaaaactagctagattttta

SEQ ID NO: 5167225 - DNA, 25 bp, Homo sapien
aaaaagatggattgttcataattca

SEQ ID NO: 5167226 - DNA, 25 bp, Homo sapien
cacaaattgtttactaacagctgaa

SEQ ID NO: 5167227 - DNA, 25 bp, Homo sapien
acgcgcacgccgcacgcgcgtaatg

SEQ ID NO: 5167228 - DNA, 25 bp, Homo sapien
ccgcacgcgcgtaatggcttggctg

SEQ ID NO: 5167229 - DNA, 25 bp, Homo sapien
gcgtaatggcttggctggcctgtaa

SEQ ID NO: 5167230 - DNA, 25 bp, Homo sapien
cgccgcacgcgcgtaatggcttggc

SEQ ID NO: 5167231 - DNA, 25 bp, Homo sapien
gtctgtgccacatgcactgacgcca

SEQ ID NO: 5167232 - DNA, 25 bp, Homo sapien
tcggtgacattcgtggcgccaagat

SEQ ID NO: 5167233 - DNA, 25 bp, Homo sapien
taaacacgcggttgcacgcattggc

SEQ ID NO: 5167234 - DNA, 25 bp, Homo sapien
tcagtgggcatcttgtgctccggga

SEQ ID NO: 5167235 - DNA, 25 bp, Homo sapien
gcccctccgagcctgaagaacaatt

SEQ ID NO: 5167236 - DNA, 25 bp, Homo sapien
cttcctcagccaggagaaacgggat

SEQ ID NO: 5167237 - DNA, 25 bp, Homo sapien
cagaagatgtggatgttcccttccc

SEQ ID NO: 5167238 - DNA, 25 bp, Homo sapien
gaacaattccctctatgagacctgg

SEQ ID NO: 5167239 - DNA, 25 bp, Homo sapien
ctgtaatgccaaactgaccgtaaac

SEQ ID NO: 5167240 - DNA, 25 bp, Homo sapien
ttcccaaattgatgatctgtaatgc

SEQ ID NO: 5167241 - DNA, 25 bp, Homo sapien
taatgccaaactgaccgtaaacaga

SEQ ID NO: 5167242 - DNA, 25 bp, Homo sapien
cccaaattgatgatctgtaatgcca

SEQ ID NO: 5167243 - DNA, 25 bp, Homo sapien
tgactgtcggtgcttctgagtggca

SEQ ID NO: 5167244 - DNA, 25 bp, Homo sapien
gacttcctctctaccgccgttatgt

SEQ ID NO: 5167245 - DNA, 25 bp, Homo sapien
gtcacctctccgaaatgactggagg

SEQ ID NO: 5167246 - DNA, 25 bp, Homo sapien
ccaggagtatgggagcggctcctcc

SEQ ID NO: 5167247 - DNA, 25 bp, Homo sapien
gatgacgccaaacccaccggcgagg

SEQ ID NO: 5167248 - DNA, 25 bp, Homo sapien
gacagtgattaagcacaggcctcct

SEQ ID NO: 5167249 - DNA, 25 bp, Homo sapien
accacccacgggtgtgatgacgcca

SEQ ID NO: 5167250 - DNA, 25 bp, Homo sapien
cacgggtgtgatgacgccaaaccca

SEQ ID NO: 5167251 - DNA, 25 bp, Homo sapien
gaggcagtaaaatcagcctccagcc

SEQ ID NO: 5167252 - DNA, 25 bp, Homo sapien
accctgcttgttagggatgtgaaac

SEQ ID NO: 5167253 - DNA, 25 bp, Homo sapien
tgtgaaacaaactatcaggggtgcg

SEQ ID NO: 5167254 - DNA, 25 bp, Homo sapien
tgtgtttgctcaggtaaaccctgct

SEQ ID NO: 5167255 - DNA, 25 bp, Homo sapien
ctgcccagcacgcaggtaccgccgt

SEQ ID NO: 5167256 - DNA, 25 bp, Homo sapien
agcacgcaggtaccgccgttcctgc

SEQ ID NO: 5167257 - DNA, 25 bp, Homo sapien
gcaggtaccgccgttcctgcagcag

SEQ ID NO: 5167258 - DNA, 25 bp, Homo sapien
aggtaccgccgttcctgcagcagcg

SEQ ID NO: 5167259 - DNA, 25 bp, Homo sapien
cctctggtcatgctcgcagtagcgg

SEQ ID NO: 5167260 - DNA, 25 bp, Homo sapien
tagcggccggtgaagtgggccgggc

SEQ ID NO: 5167261 - DNA, 25 bp, Homo sapien
tctggtcatgctcgcagtagcggcc

SEQ ID NO: 5167262 - DNA, 25 bp, Homo sapien
cagtagcggccggtgaagtgggccg

SEQ ID NO: 5167263 - DNA, 25 bp, Homo sapien
agaggtggcaggcgcggagggtcca

SEQ ID NO: 5167264 - DNA, 25 bp, Homo sapien
ggtggcaggcgcggagggtccaggc

SEQ ID NO: 5167265 - DNA, 25 bp, Homo sapien
gaggtggcaggcgcggagggtccag

SEQ ID NO: 5167266 - DNA, 25 bp, Homo sapien
ctccgtgctccagggcgccgcattc

SEQ ID NO: 5167267 - DNA, 25 bp, Homo sapien
acagcggtcaggcgtctggaggggg

SEQ ID NO: 5167268 - DNA, 25 bp, Homo sapien
cacagcggtcaggcgtctggagggg

SEQ ID NO: 5167269 - DNA, 25 bp, Homo sapien
cagcggtcaggcgtctggaggggga

SEQ ID NO: 5167270 - DNA, 25 bp, Homo sapien
aagatgcactgtggatcggtatgga

SEQ ID NO: 5167271 - DNA, 25 bp, Homo sapien
agccgcaatgaaggcgcaaccgcgt

SEQ ID NO: 5167272 - DNA, 25 bp, Homo sapien
gatcggtatggagggtgagccgcaa

SEQ ID NO: 5167273 - DNA, 25 bp, Homo sapien
gggaccgaatcacagggcctcttac

SEQ ID NO: 5167274 - DNA, 25 bp, Homo sapien
tcaatgatgaatcgatctactttgc

SEQ ID NO: 5167275 - DNA, 25 bp, Homo sapien
tgatgaatcgatctactttgctaaa

SEQ ID NO: 5167276 - DNA, 25 bp, Homo sapien
tcttcaatgatgaatcgatctactt

SEQ ID NO: 5167277 - DNA, 25 bp, Homo sapien
caatgaatgcgactttcttcaatga

SEQ ID NO: 5167278 - DNA, 25 bp, Homo sapien
taagagtgtcccttgactgctggtc

SEQ ID NO: 5167279 - DNA, 25 bp, Homo sapien
ttaagagtgtcccttgactgctggt

SEQ ID NO: 5167280 - DNA, 25 bp, Homo sapien
gaatgtaaaatcatgaccagatatc

SEQ ID NO: 5167281 - DNA, 25 bp, Homo sapien
tgtccttggcaaatagcagtcccag

SEQ ID NO: 5167282 - DNA, 25 bp, Homo sapien
tccttggcaaatagcagtcccagca

SEQ ID NO: 5167283 - DNA, 25 bp, Homo sapien
ttatcattgtccttggcaaatagca

SEQ ID NO: 5167284 - DNA, 25 bp, Homo sapien
cacaaaggtgttactgccctctctg

SEQ ID NO: 5167285 - DNA, 25 bp, Homo sapien
caggatgaatgggtaaaagaacaca

SEQ ID NO: 5167286 - DNA, 25 bp, Homo sapien
tctgaaggatgactgcactattttg

SEQ ID NO: 5167287 - DNA, 25 bp, Homo sapien
tctctgcacctgacagatgactctg

SEQ ID NO: 5167288 - DNA, 25 bp, Homo sapien
ggatgttccatctatcatcactgtt

SEQ ID NO: 5167289 - DNA, 25 bp, Homo sapien
tgtcaaacttcaagtcatcataacc

SEQ ID NO: 5167290 - DNA, 25 bp, Homo sapien
gatgttccatctatcatcactgttg

SEQ ID NO: 5167291 - DNA, 25 bp, Homo sapien
ttgtcaaacttcaagtcatcataac

SEQ ID NO: 5167292 - DNA, 25 bp, Homo sapien
gcagtactgggtccgtgctggcctt

SEQ ID NO: 5167293 - DNA, 25 bp, Homo sapien
agtactgggtccgtgctggccttcc

SEQ ID NO: 5167294 - DNA, 25 bp, Homo sapien
gtactgggtccgtgctggccttccc

SEQ ID NO: 5167295 - DNA, 25 bp, Homo sapien
cagtactgggtccgtgctggccttc

SEQ ID NO: 5167296 - DNA, 25 bp, Homo sapien
gagtgcaatagaaacgcctgctccc

SEQ ID NO: 5167297 - DNA, 25 bp, Homo sapien
tcatttggcccgtgacctttcaggg

SEQ ID NO: 5167298 - DNA, 25 bp, Homo sapien
taaatgtttgtagaactcggagagc

SEQ ID NO: 5167299 - DNA, 25 bp, Homo sapien
aaatatttctttgacgagggacagc

SEQ ID NO: 5167300 - DNA, 25 bp, Homo sapien
aaggcgatgcccaagtcccggcctt

SEQ ID NO: 5167301 - DNA, 25 bp, Homo sapien
cagcaagagtagcaggctgggcgcg

SEQ ID NO: 5167302 - DNA, 25 bp, Homo sapien
tgcaggagtgcgcagggcagcaaga

SEQ ID NO: 5167303 - DNA, 25 bp, Homo sapien
tcccgctggaggacggaagggacca

SEQ ID NO: 5167304 - DNA, 25 bp, Homo sapien
cagtgcttcagcttacggtaaacta

SEQ ID NO: 5167305 - DNA, 25 bp, Homo sapien
cagcttacggtaaactaaacacatc

SEQ ID NO: 5167306 - DNA, 25 bp, Homo sapien
tacggtaaactaaacacatctatta

SEQ ID NO: 5167307 - DNA, 25 bp, Homo sapien
aaaatattcacccagtgcttcagct

SEQ ID NO: 5167308 - DNA, 25 bp, Homo sapien
tgaactctgcctgcgttgccttgcg

SEQ ID NO: 5167309 - DNA, 25 bp, Homo sapien
gactggttgtggacacgacagcctc

SEQ ID NO: 5167310 - DNA, 25 bp, Homo sapien
tcttgagggcacattccgcatggcc

SEQ ID NO: 5167311 - DNA, 25 bp, Homo sapien
caatgcaagtgccttctacccgaag

SEQ ID NO: 5167312 - DNA, 25 bp, Homo sapien
gccagatcaatgtgagtcgagcagc

SEQ ID NO: 5167313 - DNA, 25 bp, Homo sapien
tcctggggatccagctagctctgtg

SEQ ID NO: 5167314 - DNA, 25 bp, Homo sapien
gggtccaggtgctggccagatcaat

SEQ ID NO: 5167315 - DNA, 25 bp, Homo sapien
tgtgagtcgagcagctgtaaccatg

SEQ ID NO: 5167316 - DNA, 25 bp, Homo sapien
acatcttcggctgaggctcccatgg

SEQ ID NO: 5167317 - DNA, 25 bp, Homo sapien
tactttaaaggtatggctgtcacag

SEQ ID NO: 5167318 - DNA, 25 bp, Homo sapien
cacattacattgagcaaacagggtc

SEQ ID NO: 5167319 - DNA, 25 bp, Homo sapien
caggtggcctcggtcacttgggtca

SEQ ID NO: 5167320 - DNA, 25 bp, Homo sapien
tggagcagctgcctatcttaagagt

SEQ ID NO: 5167321 - DNA, 25 bp, Homo sapien
actgggagccttgctagtgcagaca

SEQ ID NO: 5167322 - DNA, 25 bp, Homo sapien
caatgcccaccgaaacacagtaggc

SEQ ID NO: 5167323 - DNA, 25 bp, Homo sapien
agctgctaagcccagggaatgcaca

SEQ ID NO: 5167324 - DNA, 25 bp, Homo sapien
tgaagttaccctgggcggctgtagc

SEQ ID NO: 5167325 - DNA, 25 bp, Homo sapien
taagaaggctgttcacactctgctc

SEQ ID NO: 5167326 - DNA, 25 bp, Homo sapien
cccgctcaggtgtcaggattgcaag

SEQ ID NO: 5167327 - DNA, 25 bp, Homo sapien
acacctcgtgacaaatgctgcctgg

SEQ ID NO: 5167328 - DNA, 25 bp, Homo sapien
gcaagaggggtcgtgcttaggacca

SEQ ID NO: 5167329 - DNA, 25 bp, Homo sapien
gccaggcaagaggggtcgtgcttag

SEQ ID NO: 5167330 - DNA, 25 bp, Homo sapien
aggggtcgtgcttaggaccagcagc

SEQ ID NO: 5167331 - DNA, 25 bp, Homo sapien
agaggggtcgtgcttaggaccagca

SEQ ID NO: 5167332 - DNA, 25 bp, Homo sapien
gggcattggtcaccagagcccttcc

SEQ ID NO: 5167333 - DNA, 25 bp, Homo sapien
gagaggccgtgagggcattggtcac

SEQ ID NO: 5167334 - DNA, 25 bp, Homo sapien
ttggtcaccagagcccttccgctga

SEQ ID NO: 5167335 - DNA, 25 bp, Homo sapien
ccgtgagggcattggtcaccagagc

SEQ ID NO: 5167336 - DNA, 25 bp, Homo sapien
ttgtgttgctgacggcatgggcagt

SEQ ID NO: 5167337 - DNA, 25 bp, Homo sapien
tgctgacggcatgggcagtgggaga

SEQ ID NO: 5167338 - DNA, 25 bp, Homo sapien
gttgctgacggcatgggcagtggga

SEQ ID NO: 5167339 - DNA, 25 bp, Homo sapien
gtgggagatgttgctctctgaggcc

SEQ ID NO: 5167340 - DNA, 25 bp, Homo sapien
gagggaggcggccagtgcgcagtgc

SEQ ID NO: 5167341 - DNA, 25 bp, Homo sapien
aggtggactagacgcgcagcggcag

SEQ ID NO: 5167342 - DNA, 25 bp, Homo sapien
ctgcagagagggacgaggtggacta

SEQ ID NO: 5167343 - DNA, 25 bp, Homo sapien
ggaggcggccagtgcgcagtgcccc

SEQ ID NO: 5167344 - DNA, 25 bp, Homo sapien
ggacaagtccaaggctcaggttgaa

SEQ ID NO: 5167345 - DNA, 25 bp, Homo sapien
acctggatgacccgggagcacacag

SEQ ID NO: 5167346 - DNA, 25 bp, Homo sapien
aaggctcaggttgaagccacgtggc

SEQ ID NO: 5167347 - DNA, 25 bp, Homo sapien
aagtccaaggctcaggttgaagcca

SEQ ID NO: 5167348 - DNA, 25 bp, Homo sapien
aggagactggcctgccatggccacc

SEQ ID NO: 5167349 - DNA, 25 bp, Homo sapien
ctaggtagaggagactggcctgcca

SEQ ID NO: 5167350 - DNA, 25 bp, Homo sapien
ggtagaggagactggcctgccatgg

SEQ ID NO: 5167351 - DNA, 25 bp, Homo sapien
ggagactggcctgccatggccaccg

SEQ ID NO: 5167352 - DNA, 25 bp, Homo sapien
ccagttgctgtcgatgagggcagct

SEQ ID NO: 5167353 - DNA, 25 bp, Homo sapien
gaggccacccagttgctgtcgatga

SEQ ID NO: 5167354 - DNA, 25 bp, Homo sapien
gcagaggccacccagttgctgtcga

SEQ ID NO: 5167355 - DNA, 25 bp, Homo sapien
ggagggaagatgcatctttggaagc

SEQ ID NO: 5167356 - DNA, 25 bp, Homo sapien
ggcttccctcttgcatgcactccca

SEQ ID NO: 5167357 - DNA, 25 bp, Homo sapien
tgggcttccctcttgcatgcactcc

SEQ ID NO: 5167358 - DNA, 25 bp, Homo sapien
gcttccctcttgcatgcactcccac

SEQ ID NO: 5167359 - DNA, 25 bp, Homo sapien
tttgggcttccctcttgcatgcact

SEQ ID NO: 5167360 - DNA, 25 bp, Homo sapien
aggtgttccccggacagcctgcaat

SEQ ID NO: 5167361 - DNA, 25 bp, Homo sapien
gtgttccccggacagcctgcaatga

SEQ ID NO: 5167362 - DNA, 25 bp, Homo sapien
gagcctccggcaggtgttccccgga

SEQ ID NO: 5167363 - DNA, 25 bp, Homo sapien
gttccccggacagcctgcaatgagc

SEQ ID NO: 5167364 - DNA, 25 bp, Homo sapien
tgggccggcaccctcaccccggctg

SEQ ID NO: 5167365 - DNA, 25 bp, Homo sapien
ctcctctgaatgctgggccggcacc

SEQ ID NO: 5167366 - DNA, 25 bp, Homo sapien
ctgaatgctgggccggcaccctcac

SEQ ID NO: 5167367 - DNA, 25 bp, Homo sapien
aggctcctctgaatgctgggccggc

SEQ ID NO: 5167368 - DNA, 25 bp, Homo sapien
catgcggtgcaactcgttatagtca

SEQ ID NO: 5167369 - DNA, 25 bp, Homo sapien
gttatagtcagcgtgcaccatgatc

SEQ ID NO: 5167370 - DNA, 25 bp, Homo sapien
ggtgatgtcactccccatgcggtgc

SEQ ID NO: 5167371 - DNA, 25 bp, Homo sapien
tggtcatacccaagcaggatccggt

SEQ ID NO: 5167372 - DNA, 25 bp, Homo sapien
cttcacctgcattgcctgccctgca

SEQ ID NO: 5167373 - DNA, 25 bp, Homo sapien
gcattgcctgccctgcactgctcac

SEQ ID NO: 5167374 - DNA, 25 bp, Homo sapien
acctgcattgcctgccctgcactgc

SEQ ID NO: 5167375 - DNA, 25 bp, Homo sapien
cctgcattgcctgccctgcactgct

SEQ ID NO: 5167376 - DNA, 25 bp, Homo sapien
ctttcctgttatgaggtccccagcg

SEQ ID NO: 5167377 - DNA, 25 bp, Homo sapien
aaaaggatccgcagacagtgttgtc

SEQ ID NO: 5167378 - DNA, 25 bp, Homo sapien
tcctcgtggatggtgtagtcactgc

SEQ ID NO: 5167379 - DNA, 25 bp, Homo sapien
tgttgtccatgacaccgacctctgc

SEQ ID NO: 5167380 - DNA, 25 bp, Homo sapien
tttgcaacagcctcagatgggaacc

SEQ ID NO: 5167381 - DNA, 25 bp, Homo sapien
catgtgcatgtctcatggcaaggca

SEQ ID NO: 5167382 - DNA, 25 bp, Homo sapien
gaatgggaacctatgtgctctgaaa

SEQ ID NO: 5167383 - DNA, 25 bp, Homo sapien
gactggcaacaacagggtgcaacct

SEQ ID NO: 5167384 - DNA, 25 bp, Homo sapien
agacagggagggacacgcattgttc

SEQ ID NO: 5167385 - DNA, 25 bp, Homo sapien
gggacacgcattgttcagggcacag

SEQ ID NO: 5167386 - DNA, 25 bp, Homo sapien
gacatgggtggtagggaccaagaca

SEQ ID NO: 5167387 - DNA, 25 bp, Homo sapien
gaggggaccttacgcttctccagga

SEQ ID NO: 5167388 - DNA, 25 bp, Homo sapien
tcttcttctggctgatccagttggt

SEQ ID NO: 5167389 - DNA, 25 bp, Homo sapien
agtcgaggctccaactagacagccc

SEQ ID NO: 5167390 - DNA, 25 bp, Homo sapien
agagcccgggcttgtggacgatgcc

SEQ ID NO: 5167391 - DNA, 25 bp, Homo sapien
tttcctgaggaggagccaaggcggg

SEQ ID NO: 5167392 - DNA, 25 bp, Homo sapien
ggttccaggcgcagaaacctacagg

SEQ ID NO: 5167393 - DNA, 25 bp, Homo sapien
tagcaaggctcccagtgagtcaacg

SEQ ID NO: 5167394 - DNA, 25 bp, Homo sapien
gacaagttcctaaccacgctgggct

SEQ ID NO: 5167395 - DNA, 25 bp, Homo sapien
gggcttcgggttccagatctataaa

SEQ ID NO: 5167396 - DNA, 25 bp, Homo sapien
ctttgtcttaggtcttattactaat

SEQ ID NO: 5167397 - DNA, 25 bp, Homo sapien
ttgtcttaggtcttattactaataa

SEQ ID NO: 5167398 - DNA, 25 bp, Homo sapien
ttctttgtcttaggtcttattacta

SEQ ID NO: 5167399 - DNA, 25 bp, Homo sapien
tctttgtcttaggtcttattactaa

SEQ ID NO: 5167400 - DNA, 25 bp, Homo sapien
gagcctcagccgaagatgtgggaat

SEQ ID NO: 5167401 - DNA, 25 bp, Homo sapien
ggctccaaagtccacactgtgacag

SEQ ID NO: 5167402 - DNA, 25 bp, Homo sapien
catacctttaaagtaacgactggct

SEQ ID NO: 5167403 - DNA, 25 bp, Homo sapien
caactaaagtggacgggctccaaag

SEQ ID NO: 5167404 - DNA, 25 bp, Homo sapien
tagcctagaaccaaatcgactcttc

SEQ ID NO: 5167405 - DNA, 25 bp, Homo sapien
cccagcgaatgcctgccggctgagg

SEQ ID NO: 5167406 - DNA, 25 bp, Homo sapien
cagcacagggctggtatgttcagcc

SEQ ID NO: 5167407 - DNA, 25 bp, Homo sapien
tgtgagcgttcaaaagcagtctctg

SEQ ID NO: 5167408 - DNA, 25 bp, Homo sapien
tcagtcatcccccacacatcctaga

SEQ ID NO: 5167409 - DNA, 25 bp, Homo sapien
ggctcagtcatcccccacacatcct

SEQ ID NO: 5167410 - DNA, 25 bp, Homo sapien
gcagtgtttatagaagctgcccttt

SEQ ID NO: 5167411 - DNA, 25 bp, Homo sapien
ctgcagtgtttatagaagctgccct

SEQ ID NO: 5167412 - DNA, 25 bp, Homo sapien
cagaacaacagcgagaaggagccaa

SEQ ID NO: 5167413 - DNA, 25 bp, Homo sapien
caggtcgcttcccaatctgaggagg

SEQ ID NO: 5167414 - DNA, 25 bp, Homo sapien
cacttcgggtagaaggcacttgcat

SEQ ID NO: 5167415 - DNA, 25 bp, Homo sapien
ccactgtgaccggtaggtagagaca

SEQ ID NO: 5167416 - DNA, 25 bp, Homo sapien
tactcttgctgccctgcgcactcct

SEQ ID NO: 5167417 - DNA, 25 bp, Homo sapien
gcccgcgcaccctcggtccctggtc

SEQ ID NO: 5167418 - DNA, 25 bp, Homo sapien
tggtcccttccgtcctccagcggga

SEQ ID NO: 5167419 - DNA, 25 bp, Homo sapien
cgggacttgggcatcgcctttaatt

SEQ ID NO: 5167420 - DNA, 25 bp, Homo sapien
ctcccacgctcacgggccgagcgcc

SEQ ID NO: 5167421 - DNA, 25 bp, Homo sapien
gcctcccacgctcacgggccgagcg

SEQ ID NO: 5167422 - DNA, 25 bp, Homo sapien
tggcctcccacgctcacgggccgag

SEQ ID NO: 5167423 - DNA, 25 bp, Homo sapien
tcctggcctcccacgctcacgggcc

SEQ ID NO: 5167424 - DNA, 25 bp, Homo sapien
ccctggagcacggagcctggaccct

SEQ ID NO: 5167425 - DNA, 25 bp, Homo sapien
tgcggcgccctggagcacggagcct

SEQ ID NO: 5167426 - DNA, 25 bp, Homo sapien
cacggagcctggaccctccgcgcct

SEQ ID NO: 5167427 - DNA, 25 bp, Homo sapien
tggagcacggagcctggaccctccg

SEQ ID NO: 5167428 - DNA, 25 bp, Homo sapien
gctactgcgagcatgaccagaggcg

SEQ ID NO: 5167429 - DNA, 25 bp, Homo sapien
ggccgctactgcgagcatgaccaga

SEQ ID NO: 5167430 - DNA, 25 bp, Homo sapien
ttcaccggccgctactgcgagcatg

SEQ ID NO: 5167431 - DNA, 25 bp, Homo sapien
tactgcgagcatgaccagaggcgca

SEQ ID NO: 5167432 - DNA, 25 bp, Homo sapien
ctgagcaaacacacttggctggagg

SEQ ID NO: 5167433 - DNA, 25 bp, Homo sapien
gagcaaacacacttggctggaggct

SEQ ID NO: 5167434 - DNA, 25 bp, Homo sapien
tgagcaaacacacttggctggaggc

SEQ ID NO: 5167435 - DNA, 25 bp, Homo sapien
aatatgtaggataaattcaggataa

SEQ ID NO: 5167436 - DNA, 25 bp, Homo sapien
gataaaatccaaggagagcattttg

SEQ ID NO: 5167437 - DNA, 25 bp, Homo sapien
aaatccaaggagagcattttgttat

SEQ ID NO: 5167438 - DNA, 25 bp, Homo sapien
agaatatgtaggataaattcaggat

SEQ ID NO: 5167439 - DNA, 25 bp, Homo sapien
taacggcggtagagaggaagtcacc

SEQ ID NO: 5167440 - DNA, 25 bp, Homo sapien
agagggtaagttgcagcgctgccca

SEQ ID NO: 5167441 - DNA, 25 bp, Homo sapien
ggaagtcaccaaggttgccactcag

SEQ ID NO: 5167442 - DNA, 25 bp, Homo sapien
tggacctccagtcatttcggagagg

SEQ ID NO: 5167443 - DNA, 25 bp, Homo sapien
tcactttcgttgtcaggaaattgct

SEQ ID NO: 5167444 - DNA, 25 bp, Homo sapien
ttcactttcgttgtcaggaaattgc

SEQ ID NO: 5167445 - DNA, 25 bp, Homo sapien
cttcactttcgttgtcaggaaattg

SEQ ID NO: 5167446 - DNA, 25 bp, Homo sapien
ccagtgactgcgcaaaatatagaat

SEQ ID NO: 5167447 - DNA, 25 bp, Homo sapien
ttcaaaaatttgtgtggccgcctta

SEQ ID NO: 5167448 - DNA, 25 bp, Homo sapien
tagtgaataaccacaatattgggct

SEQ ID NO: 5167449 - DNA, 25 bp, Homo sapien
ggagaaatgcatgaacccacgttgc

SEQ ID NO: 5167450 - DNA, 25 bp, Homo sapien
ttttcagaagagtattttggcatct

SEQ ID NO: 5167451 - DNA, 25 bp, Homo sapien
gttttcagaagagtattttggcatc

SEQ ID NO: 5167452 - DNA, 25 bp, Homo sapien
tttcagaagagtattttggcatctg

SEQ ID NO: 5167453 - DNA, 25 bp, Homo sapien
tgttttcagaagagtattttggcat

SEQ ID NO: 5167454 - DNA, 25 bp, Homo sapien
agagacagtgcacacagggaaaagg

SEQ ID NO: 5167455 - DNA, 25 bp, Homo sapien
tgccagcagctcagtaatgccagag

SEQ ID NO: 5167456 - DNA, 25 bp, Homo sapien
aaggatgagtgagtagggcattgcc

SEQ ID NO: 5167457 - DNA, 25 bp, Homo sapien
cagctcagtaatgccagagacagtg

SEQ ID NO: 5167458 - DNA, 25 bp, Homo sapien
ggagcgaggcctgaaagagtgaaag

SEQ ID NO: 5167459 - DNA, 25 bp, Homo sapien
cgaggcctgaaagagtgaaagtatt

SEQ ID NO: 5167460 - DNA, 25 bp, Homo sapien
catgcagcagcaagagcgggagcga

SEQ ID NO: 5167461 - DNA, 25 bp, Homo sapien
ggcctgaaagagtgaaagtatttgc

SEQ ID NO: 5167462 - DNA, 25 bp, Homo sapien
gtcccattctgcaagatatggttct

SEQ ID NO: 5167463 - DNA, 25 bp, Homo sapien
tgggttgcttttatgacctggttcc

SEQ ID NO: 5167464 - DNA, 25 bp, Homo sapien
gttcttgtaataggcagttgggttg

SEQ ID NO: 5167465 - DNA, 25 bp, Homo sapien
ttgcttttatgacctggttccctcc

SEQ ID NO: 5167466 - DNA, 25 bp, Homo sapien
gcagatgtaaaaacagaaggttaat

SEQ ID NO: 5167467 - DNA, 25 bp, Homo sapien
cagatgtaaaaacagaaggttaatt

SEQ ID NO: 5167468 - DNA, 25 bp, Homo sapien
cttcgatagccataaaattttctag

SEQ ID NO: 5167469 - DNA, 25 bp, Homo sapien
tcttcgatagccataaaattttcta

SEQ ID NO: 5167470 - DNA, 25 bp, Homo sapien
ttcttcgatagccataaaattttct

SEQ ID NO: 5167471 - DNA, 25 bp, Homo sapien
gaatccgacgtgagtacttccgtgc

SEQ ID NO: 5167472 - DNA, 25 bp, Homo sapien
agtcaggttttctgggaatccgacg

SEQ ID NO: 5167473 - DNA, 25 bp, Homo sapien
gttttctgggaatccgacgtgagta

SEQ ID NO: 5167474 - DNA, 25 bp, Homo sapien
tctgggaatccgacgtgagtacttc

SEQ ID NO: 5167475 - DNA, 25 bp, Homo sapien
acacagggaactgctaagtgcagag

SEQ ID NO: 5167476 - DNA, 25 bp, Homo sapien
cagtatagtcttactatcggaagca

SEQ ID NO: 5167477 - DNA, 25 bp, Homo sapien
tactatcggaagcaaaaaattccaa

SEQ ID NO: 5167478 - DNA, 25 bp, Homo sapien
ttcaaataccgaaggtccataatcc

SEQ ID NO: 5167479 - DNA, 25 bp, Homo sapien
ttatttcaaataccgaaggtccata

SEQ ID NO: 5167480 - DNA, 25 bp, Homo sapien
taattttcatgaaatactggagctg

SEQ ID NO: 5167481 - DNA, 25 bp, Homo sapien
ttttcatgaaatactggagctgtcc

SEQ ID NO: 5167482 - DNA, 25 bp, Homo sapien
attttaattttcatgaaatactgga

SEQ ID NO: 5167483 - DNA, 25 bp, Homo sapien
tttaattttcatgaaatactggagc

SEQ ID NO: 5167484 - DNA, 25 bp, Homo sapien
attgcttctgagtatcattttgttc

SEQ ID NO: 5167485 - DNA, 25 bp, Homo sapien
cattttttcaaccacttctatctgc

SEQ ID NO: 5167486 - DNA, 25 bp, Homo sapien
tgaatcagaatctcatcgtgtaata

SEQ ID NO: 5167487 - DNA, 25 bp, Homo sapien
gtgttctgttcttcacaaaattgct

SEQ ID NO: 5167488 - DNA, 25 bp, Homo sapien
aatcctttatatttccaaaatacag

SEQ ID NO: 5167489 - DNA, 25 bp, Homo sapien
acacacatataaaaacatttgaaaa

SEQ ID NO: 5167490 - DNA, 25 bp, Homo sapien
tatatttccaaaatacagttcttta

SEQ ID NO: 5167491 - DNA, 25 bp, Homo sapien
atacacacatataaaaacatttgaa

SEQ ID NO: 5167492 - DNA, 25 bp, Homo sapien
tcttagctggctctgatgtttcatt

SEQ ID NO: 5167493 - DNA, 25 bp, Homo sapien
ccgttgtcaatgacgagcacggcgg

SEQ ID NO: 5167494 - DNA, 25 bp, Homo sapien
caatgacgagcacggcggtatcatc

SEQ ID NO: 5167495 - DNA, 25 bp, Homo sapien
ttgtcaatgacgagcacggcggtat

SEQ ID NO: 5167496 - DNA, 25 bp, Homo sapien
gtcaatgacgagcacggcggtatca

SEQ ID NO: 5167497 - DNA, 25 bp, Homo sapien
gatgcatgccccccatcatgccctg

SEQ ID NO: 5167498 - DNA, 25 bp, Homo sapien
tgccctgctgcctggggcgccccac

SEQ ID NO: 5167499 - DNA, 25 bp, Homo sapien
tcatgccctgctgcctggggcgccc

SEQ ID NO: 5167500 - DNA, 25 bp, Homo sapien
ctgatgcatgccccccatcatgccc

SEQ ID NO: 5167501 - DNA, 25 bp, Homo sapien
gcctccttgcccacataggactctt

SEQ ID NO: 5167502 - DNA, 25 bp, Homo sapien
aggggccacacgcagctcgttgtag

SEQ ID NO: 5167503 - DNA, 25 bp, Homo sapien
cgatgccagtagtacggccagaggt

SEQ ID NO: 5167504 - DNA, 25 bp, Homo sapien
gatgatgccgtgttccatggggtac

SEQ ID NO: 5167505 - DNA, 25 bp, Homo sapien
ctaggcgcagggtggcatgggggag

SEQ ID NO: 5167506 - DNA, 25 bp, Homo sapien
catgggggagggcattcccatcata

SEQ ID NO: 5167507 - DNA, 25 bp, Homo sapien
ggagggcattcccatcatagatggg

SEQ ID NO: 5167508 - DNA, 25 bp, Homo sapien
ggggagggcattcccatcatagatg

SEQ ID NO: 5167509 - DNA, 25 bp, Homo sapien
catggtggtgaacctatagccacgc

SEQ ID NO: 5167510 - DNA, 25 bp, Homo sapien
atggtggtgaacctatagccacgct

SEQ ID NO: 5167511 - DNA, 25 bp, Homo sapien
ccatggtggtgaacctatagccacg

SEQ ID NO: 5167512 - DNA, 25 bp, Homo sapien
tggaagagcgcctcggggcagcgga

SEQ ID NO: 5167513 - DNA, 25 bp, Homo sapien
gcaaggctggaagagcgcctcgggg

SEQ ID NO: 5167514 - DNA, 25 bp, Homo sapien
gaagcaaggctggaagagcgcctcg

SEQ ID NO: 5167515 - DNA, 25 bp, Homo sapien
aggaagcaaggctggaagagcgcct

SEQ ID NO: 5167516 - DNA, 25 bp, Homo sapien
ttgcggatgtccacatcagacttca

SEQ ID NO: 5167517 - DNA, 25 bp, Homo sapien
gtctttgcggatgtccacatcagac

SEQ ID NO: 5167518 - DNA, 25 bp, Homo sapien
gtgttggtgtacaggtctttgcgga

SEQ ID NO: 5167519 - DNA, 25 bp, Homo sapien
tgttggtgtacaggtctttgcggat

SEQ ID NO: 5167520 - DNA, 25 bp, Homo sapien
cttcaacatgctaggcgccagggca

SEQ ID NO: 5167521 - DNA, 25 bp, Homo sapien
gagcaatgatcctgatcttcaacat

SEQ ID NO: 5167522 - DNA, 25 bp, Homo sapien
cattctgtgggccatgccagggtac

SEQ ID NO: 5167523 - DNA, 25 bp, Homo sapien
ctgatcttcaacatgctaggcgcca

SEQ ID NO: 5167524 - DNA, 25 bp, Homo sapien
tggagccaccgacccacacggagta

SEQ ID NO: 5167525 - DNA, 25 bp, Homo sapien
aggatggagccaccgacccacacgg

SEQ ID NO: 5167526 - DNA, 25 bp, Homo sapien
caggatggagccaccgacccacacg

SEQ ID NO: 5167527 - DNA, 25 bp, Homo sapien
gatggagccaccgacccacacggag

SEQ ID NO: 5167528 - DNA, 25 bp, Homo sapien
gccaatctcatgttgttttctgaga

SEQ ID NO: 5167529 - DNA, 25 bp, Homo sapien
tctgagaagtttggttttgtcaaga

SEQ ID NO: 5167530 - DNA, 25 bp, Homo sapien
aagggtgtaacgcaactaagtcaga

SEQ ID NO: 5167531 - DNA, 25 bp, Homo sapien
agccatgccaatctcatgttgtttt

SEQ ID NO: 5167532 - DNA, 25 bp, Homo sapien
ccctgtgtgaactagggagaggact

SEQ ID NO: 5167533 - DNA, 25 bp, Homo sapien
gaactagggagaggactgggccatt

SEQ ID NO: 5167534 - DNA, 25 bp, Homo sapien
aactagggagaggactgggccattc

SEQ ID NO: 5167535 - DNA, 25 bp, Homo sapien
ctcccctgtgtgaactagggagagg

SEQ ID NO: 5167536 - DNA, 25 bp, Homo sapien
aatctgcacaaaagcaatgctatca

SEQ ID NO: 5167537 - DNA, 25 bp, Homo sapien
tttatccaactctcctcaagtcaga

SEQ ID NO: 5167538 - DNA, 25 bp, Homo sapien
aattttgcattatgtaatctgcaca

SEQ ID NO: 5167539 - DNA, 25 bp, Homo sapien
ctcctcaagtcagagtacaggtaag

SEQ ID NO: 5167540 - DNA, 25 bp, Homo sapien
ctctctatggctccatttgtagcac

SEQ ID NO: 5167541 - DNA, 25 bp, Homo sapien
gctccatttgtagcactgttgttgc

SEQ ID NO: 5167542 - DNA, 25 bp, Homo sapien
tgctgctcgtttcctctctatggct

SEQ ID NO: 5167543 - DNA, 25 bp, Homo sapien
cactgttgttgcactgaggcttgtg

SEQ ID NO: 5167544 - DNA, 25 bp, Homo sapien
tacaaggctacggtctcttctgcca

SEQ ID NO: 5167545 - DNA, 25 bp, Homo sapien
agttcttttaaggtacgatgatggt

SEQ ID NO: 5167546 - DNA, 25 bp, Homo sapien
tgtaagaagttcaaagtcttacctg

SEQ ID NO: 5167547 - DNA, 25 bp, Homo sapien
ccagcaggccagtattcaaatctca

SEQ ID NO: 5167548 - DNA, 25 bp, Homo sapien
tggccaggctcccactaaacaggcc

SEQ ID NO: 5167549 - DNA, 25 bp, Homo sapien
gcagaaatagaagcaagacacagag

SEQ ID NO: 5167550 - DNA, 25 bp, Homo sapien
agaggtgccacagcccattatacaa

SEQ ID NO: 5167551 - DNA, 25 bp, Homo sapien
cctcctaaccacatcagaaggccaa

SEQ ID NO: 5167552 - DNA, 25 bp, Homo sapien
caaagactgaatgagtgtccagcat

SEQ ID NO: 5167553 - DNA, 25 bp, Homo sapien
taggtctacctagtaccaggcctcc

SEQ ID NO: 5167554 - DNA, 25 bp, Homo sapien
gaatgagtgtccagcatcaggaact

SEQ ID NO: 5167555 - DNA, 25 bp, Homo sapien
cagcagcccagacatctacagatgg

SEQ ID NO: 5167556 - DNA, 25 bp, Homo sapien
ggtttctaccacctagacatccagc

SEQ ID NO: 5167557 - DNA, 25 bp, Homo sapien
gtttctaccacctagacatccagca

SEQ ID NO: 5167558 - DNA, 25 bp, Homo sapien
tggtttctaccacctagacatccag

SEQ ID NO: 5167559 - DNA, 25 bp, Homo sapien
tttctaccacctagacatccagcag

SEQ ID NO: 5167560 - DNA, 25 bp, Homo sapien
ctggatgagcatggaaaggctgtac

SEQ ID NO: 5167561 - DNA, 25 bp, Homo sapien
ctgtggtgtctacattaccatctgt

SEQ ID NO: 5167562 - DNA, 25 bp, Homo sapien
aaacaaaggctcactgccacaaatg

SEQ ID NO: 5167563 - DNA, 25 bp, Homo sapien
ggaggaaaggaggtttcattccgca

SEQ ID NO: 5167564 - DNA, 25 bp, Homo sapien
ggaggtttcattccgcacaaagctc

SEQ ID NO: 5167565 - DNA, 25 bp, Homo sapien
tcagaacaaacaaaggctcactgcc

SEQ ID NO: 5167566 - DNA, 25 bp, Homo sapien
gggccaagaggagaaaccagcccaa

SEQ ID NO: 5167567 - DNA, 25 bp, Homo sapien
gccaagaggagaaaccagcccaacc

SEQ ID NO: 5167568 - DNA, 25 bp, Homo sapien
ggcagggccaagaggagaaaccagc

SEQ ID NO: 5167569 - DNA, 25 bp, Homo sapien
tagggcagggccaagaggagaaacc

SEQ ID NO: 5167570 - DNA, 25 bp, Homo sapien
atgtttgctggggacctcttgttct

SEQ ID NO: 5167571 - DNA, 25 bp, Homo sapien
ttccaaggccatctgtggatgtttg

SEQ ID NO: 5167572 - DNA, 25 bp, Homo sapien
gctggggacctcttgttcttctcct

SEQ ID NO: 5167573 - DNA, 25 bp, Homo sapien
aaggtgacttatttccaaggccatc

SEQ ID NO: 5167574 - DNA, 25 bp, Homo sapien
ttgatgccttatccctcccagaaca

SEQ ID NO: 5167575 - DNA, 25 bp, Homo sapien
ttatccctcccagaacatgacatgt

SEQ ID NO: 5167576 - DNA, 25 bp, Homo sapien
gccttatccctcccagaacatgaca

SEQ ID NO: 5167577 - DNA, 25 bp, Homo sapien
tcccagaacatgacatgtttctcac

SEQ ID NO: 5167578 - DNA, 25 bp, Homo sapien
cgccgttacactatgagggtactga

SEQ ID NO: 5167579 - DNA, 25 bp, Homo sapien
tgacgccgttacactatgagggtac

SEQ ID NO: 5167580 - DNA, 25 bp, Homo sapien
ctgacgccgttacactatgagggta

SEQ ID NO: 5167581 - DNA, 25 bp, Homo sapien
gacgccgttacactatgagggtact

SEQ ID NO: 5167582 - DNA, 25 bp, Homo sapien
aagcgcatcaatgaagtccgaagcc

SEQ ID NO: 5167583 - DNA, 25 bp, Homo sapien
caagcgcatcaatgaagtccgaagc

SEQ ID NO: 5167584 - DNA, 25 bp, Homo sapien
gcgcatcaatgaagtccgaagcctt

SEQ ID NO: 5167585 - DNA, 25 bp, Homo sapien
cgcatcaatgaagtccgaagccttg

SEQ ID NO: 5167586 - DNA, 25 bp, Homo sapien
acttgatctcaagctccattctacc

SEQ ID NO: 5167587 - DNA, 25 bp, Homo sapien
ttgatctcaagctccattctacctc

SEQ ID NO: 5167588 - DNA, 25 bp, Homo sapien
cttgatcagacacttgatctcaagc

SEQ ID NO: 5167589 - DNA, 25 bp, Homo sapien
cagacacttgatctcaagctccatt

SEQ ID NO: 5167590 - DNA, 25 bp, Homo sapien
tctcgaaaacatagctgactgtcac

SEQ ID NO: 5167591 - DNA, 25 bp, Homo sapien
agtcatctcgaaaacatagctgact

SEQ ID NO: 5167592 - DNA, 25 bp, Homo sapien
tcatctcgaaaacatagctgactgt

SEQ ID NO: 5167593 - DNA, 25 bp, Homo sapien
gaaaacatagctgactgtcactcct

SEQ ID NO: 5167594 - DNA, 25 bp, Homo sapien
agaggatgaacagcgcccatacact

SEQ ID NO: 5167595 - DNA, 25 bp, Homo sapien
gcagcactcccgatgtctgggtgtt

SEQ ID NO: 5167596 - DNA, 25 bp, Homo sapien
ttcaggattaggactcttgcatcac

SEQ ID NO: 5167597 - DNA, 25 bp, Homo sapien
agcactcccgatgtctgggtgtttt

SEQ ID NO: 5167598 - DNA, 25 bp, Homo sapien
gggccagacagcccacggtcaaagt

SEQ ID NO: 5167599 - DNA, 25 bp, Homo sapien
gccagacagcccacggtcaaagttg

SEQ ID NO: 5167600 - DNA, 25 bp, Homo sapien
gacagcccacggtcaaagttgaact

SEQ ID NO: 5167601 - DNA, 25 bp, Homo sapien
agacagcccacggtcaaagttgaac

SEQ ID NO: 5167602 - DNA, 25 bp, Homo sapien
ggacttagttatttgcaaaatacac

SEQ ID NO: 5167603 - DNA, 25 bp, Homo sapien
gtgccagccatgagctgcggttcca

SEQ ID NO: 5167604 - DNA, 25 bp, Homo sapien
acttacaggtatatatctgtttctg

SEQ ID NO: 5167605 - DNA, 25 bp, Homo sapien
atgagctgcggttccactggcacag

SEQ ID NO: 5167606 - DNA, 25 bp, Homo sapien
caatgtgttctatagcaggaagtca

SEQ ID NO: 5167607 - DNA, 25 bp, Homo sapien
tagagtcagctttcaccattcccct

SEQ ID NO: 5167608 - DNA, 25 bp, Homo sapien
gaagtcaagactactgtccaaggtc

SEQ ID NO: 5167609 - DNA, 25 bp, Homo sapien
caaaaagtacaagtgctagagtcag

SEQ ID NO: 5167610 - DNA, 25 bp, Homo sapien
gggcagccggaaaggataatacttg

SEQ ID NO: 5167611 - DNA, 25 bp, Homo sapien
gattgactgacctaagaccatttcc

SEQ ID NO: 5167612 - DNA, 25 bp, Homo sapien
ggctagtaccagttgctgtcattaa

SEQ ID NO: 5167613 - DNA, 25 bp, Homo sapien
catcagagcccaaaaatgtactggg

SEQ ID NO: 5167614 - DNA, 25 bp, Homo sapien
ctcccaaggccttgctataggtcta

SEQ ID NO: 5167615 - DNA, 25 bp, Homo sapien
tcccaaggccttgctataggtctaa

SEQ ID NO: 5167616 - DNA, 25 bp, Homo sapien
aggaaaagctggtgccacgttgctc

SEQ ID NO: 5167617 - DNA, 25 bp, Homo sapien
tgggttaatatttgattggctgcac

SEQ ID NO: 5167618 - DNA, 25 bp, Homo sapien
atgggttaatatttgattggctgca

SEQ ID NO: 5167619 - DNA, 25 bp, Homo sapien
aatgggttaatatttgattggctgc

SEQ ID NO: 5167620 - DNA, 25 bp, Homo sapien
tagagtggcagggctacttgcctca

SEQ ID NO: 5167621 - DNA, 25 bp, Homo sapien
cataataactgggacagatattgtt

SEQ ID NO: 5167622 - DNA, 25 bp, Homo sapien
gtggcagggctacttgcctcatttt

SEQ ID NO: 5167623 - DNA, 25 bp, Homo sapien
tattgtacataataactgggacaga

SEQ ID NO: 5167624 - DNA, 25 bp, Homo sapien
aggccaagcccaagcatgacagctg

SEQ ID NO: 5167625 - DNA, 25 bp, Homo sapien
cttgtggtggcaccggcgtccccgc

SEQ ID NO: 5167626 - DNA, 25 bp, Homo sapien
agtcgcccgcagtctccttgtggtg

SEQ ID NO: 5167627 - DNA, 25 bp, Homo sapien
ctggaggccaagcccaagcatgaca

SEQ ID NO: 5167628 - DNA, 25 bp, Homo sapien
tgcaggagcgctgaccctgcgccga

SEQ ID NO: 5167629 - DNA, 25 bp, Homo sapien
ccgtaccgcaagcgccgcctgcagg

SEQ ID NO: 5167630 - DNA, 25 bp, Homo sapien
gtaccgcaagcgccgcctgcaggag

SEQ ID NO: 5167631 - DNA, 25 bp, Homo sapien
cctgcaggagcgctgaccctgcgcc

SEQ ID NO: 5167632 - DNA, 25 bp, Homo sapien
caagtgaatccatcctgccgtccgt

SEQ ID NO: 5167633 - DNA, 25 bp, Homo sapien
gtcttcccagctccccgccatgtcg

SEQ ID NO: 5167634 - DNA, 25 bp, Homo sapien
tccccgccatgtcgccaagtgaatc

SEQ ID NO: 5167635 - DNA, 25 bp, Homo sapien
agtgaatccatcctgccgtccgtct

SEQ ID NO: 5167636 - DNA, 25 bp, Homo sapien
gatgtatacctgctttccatacaca

SEQ ID NO: 5167637 - DNA, 25 bp, Homo sapien
catgcaattataaactgcaggaagg

SEQ ID NO: 5167638 - DNA, 25 bp, Homo sapien
ccaatattggtagttctttcttgta

SEQ ID NO: 5167639 - DNA, 25 bp, Homo sapien
taaagcaaaatccttggcagaacca

SEQ ID NO: 5167640 - DNA, 25 bp, Homo sapien
cacagccattggagtagcttttatg

SEQ ID NO: 5167641 - DNA, 25 bp, Homo sapien
ccacagccattggagtagcttttat

SEQ ID NO: 5167642 - DNA, 25 bp, Homo sapien
acagccattggagtagcttttatgg

SEQ ID NO: 5167643 - DNA, 25 bp, Homo sapien
catcctacagctagtgggagactga

SEQ ID NO: 5167644 - DNA, 25 bp, Homo sapien
tacagtggtagactaacattgactt

SEQ ID NO: 5167645 - DNA, 25 bp, Homo sapien
cattttgctccggttgcagggattg

SEQ ID NO: 5167646 - DNA, 25 bp, Homo sapien
ggattgaggttaccagacgtacagt

SEQ ID NO: 5167647 - DNA, 25 bp, Homo sapien
ttttgctccggttgcagggattgag

SEQ ID NO: 5167648 - DNA, 25 bp, Homo sapien
gctgatggcattccagtactgggtt

SEQ ID NO: 5167649 - DNA, 25 bp, Homo sapien
gatggcattccagtactgggttgtg

SEQ ID NO: 5167650 - DNA, 25 bp, Homo sapien
tggcattccagtactgggttgtgaa

SEQ ID NO: 5167651 - DNA, 25 bp, Homo sapien
tggctgatggcattccagtactggg

SEQ ID NO: 5167652 - DNA, 25 bp, Homo sapien
taagctcccagtaagtgaggttgtc

SEQ ID NO: 5167653 - DNA, 25 bp, Homo sapien
tgaggttgtcatcattactggatat

SEQ ID NO: 5167654 - DNA, 25 bp, Homo sapien
taaaaatgggatcatcacgcatcct

SEQ ID NO: 5167655 - DNA, 25 bp, Homo sapien
ttgctgaattcatcaagcaggcgct

SEQ ID NO: 5167656 - DNA, 25 bp, Homo sapien
tgacagccgctttagcatcagcaca

SEQ ID NO: 5167657 - DNA, 25 bp, Homo sapien
gatgtcctatgtcacacagctgggt

SEQ ID NO: 5167658 - DNA, 25 bp, Homo sapien
tctctaagtagcagtaaatccggtc

SEQ ID NO: 5167659 - DNA, 25 bp, Homo sapien
tgatgagggtatcttccttcggtag

SEQ ID NO: 5167660 - DNA, 25 bp, Homo sapien
ttaggcaattacaatcatgtctccc

SEQ ID NO: 5167661 - DNA, 25 bp, Homo sapien
gcactgctaagaaagatgacaattc

SEQ ID NO: 5167662 - DNA, 25 bp, Homo sapien
tggacaaactctacattggctaagt

SEQ ID NO: 5167663 - DNA, 25 bp, Homo sapien
caagaactgagttatgagctccaaa

SEQ ID NO: 5167664 - DNA, 25 bp, Homo sapien
cacagagggcaatactgttcatgct

SEQ ID NO: 5167665 - DNA, 25 bp, Homo sapien
tattcctagctgagtatactaaggc

SEQ ID NO: 5167666 - DNA, 25 bp, Homo sapien
cacattaagcagcattcaaggattt

SEQ ID NO: 5167667 - DNA, 25 bp, Homo sapien
gatgtgcaataccatggctatggca

SEQ ID NO: 5167668 - DNA, 25 bp, Homo sapien
ttgcacaaaggattttaccaacctc

SEQ ID NO: 5167669 - DNA, 25 bp, Homo sapien
gtgagtagacttatgccctggtgcc

SEQ ID NO: 5167670 - DNA, 25 bp, Homo sapien
taagtgagtagacttatgccctggt

SEQ ID NO: 5167671 - DNA, 25 bp, Homo sapien
gatataagtgagtagacttatgccc

SEQ ID NO: 5167672 - DNA, 25 bp, Homo sapien
caaacagatataagtgagtagactt

SEQ ID NO: 5167673 - DNA, 25 bp, Homo sapien
cagttagataatccaagtcagcctt

SEQ ID NO: 5167674 - DNA, 25 bp, Homo sapien
gtgatattgcctttgtctatgggaa

SEQ ID NO: 5167675 - DNA, 25 bp, Homo sapien
tggactctacattttggctctgcag

SEQ ID NO: 5167676 - DNA, 25 bp, Homo sapien
caagtcagcctttattgcattggac

SEQ ID NO: 5167677 - DNA, 25 bp, Homo sapien
tggtataagcgaagtttagacaaat

SEQ ID NO: 5167678 - DNA, 25 bp, Homo sapien
cacactggtataagcgaagtttaga

SEQ ID NO: 5167679 - DNA, 25 bp, Homo sapien
actggtataagcgaagtttagacaa

SEQ ID NO: 5167680 - DNA, 25 bp, Homo sapien
gtataagcgaagtttagacaaatta

SEQ ID NO: 5167681 - DNA, 25 bp, Homo sapien
tggtgtagcatggtgagttctgcct

SEQ ID NO: 5167682 - DNA, 25 bp, Homo sapien
gacccagacaagatcattgcacaag

SEQ ID NO: 5167683 - DNA, 25 bp, Homo sapien
aagttcttcagagtgaaaatcaaga

SEQ ID NO: 5167684 - DNA, 25 bp, Homo sapien
caatagaagtaagccttggcctgga

SEQ ID NO: 5167685 - DNA, 25 bp, Homo sapien
ggtgagcatgttcacatttcaacac

SEQ ID NO: 5167686 - DNA, 25 bp, Homo sapien
gattgacaggttgaatgtccttggt

SEQ ID NO: 5167687 - DNA, 25 bp, Homo sapien
gtgctttccgtatcagctcctcaga

SEQ ID NO: 5167688 - DNA, 25 bp, Homo sapien
ttccacaagtaagagatgaaactcc

SEQ ID NO: 5167689 - DNA, 25 bp, Homo sapien
atgagctggatcagggccggccaag

SEQ ID NO: 5167690 - DNA, 25 bp, Homo sapien
gctgatgagctggatcagggccggc

SEQ ID NO: 5167691 - DNA, 25 bp, Homo sapien
ttgctgatgagctggatcagggccg

SEQ ID NO: 5167692 - DNA, 25 bp, Homo sapien
tgatgagctggatcagggccggcca

SEQ ID NO: 5167693 - DNA, 25 bp, Homo sapien
tcccccaggcccaaggaagtgttgc

SEQ ID NO: 5167694 - DNA, 25 bp, Homo sapien
gcccaaggaagtgttgctggctgct

SEQ ID NO: 5167695 - DNA, 25 bp, Homo sapien
cccaggcccaaggaagtgttgctgg

SEQ ID NO: 5167696 - DNA, 25 bp, Homo sapien
cccaaggaagtgttgctggctgctt

SEQ ID NO: 5167697 - DNA, 25 bp, Homo sapien
agggaaggaaaagccagtacagcat

SEQ ID NO: 5167698 - DNA, 25 bp, Homo sapien
cagccagcaggcttgagggaaggaa

SEQ ID NO: 5167699 - DNA, 25 bp, Homo sapien
ggaaggaaaagccagtacagcatgg

SEQ ID NO: 5167700 - DNA, 25 bp, Homo sapien
ctgcagccagcaggcttgagggaag

SEQ ID NO: 5167701 - DNA, 25 bp, Homo sapien
taggtaacaatgaccaggaggccac

SEQ ID NO: 5167702 - DNA, 25 bp, Homo sapien
cagaggaacagaacgcacagaatgg

SEQ ID NO: 5167703 - DNA, 25 bp, Homo sapien
cagtgagaatgccacaggccatgcg

SEQ ID NO: 5167704 - DNA, 25 bp, Homo sapien
caatgtgatcagcactgagtggatc

SEQ ID NO: 5167705 - DNA, 25 bp, Homo sapien
ttgccagactgtggactcaagaact

SEQ ID NO: 5167706 - DNA, 25 bp, Homo sapien
tcagcttgccagactgtggactcaa

SEQ ID NO: 5167707 - DNA, 25 bp, Homo sapien
ttagtcataagtggacactgctgca

SEQ ID NO: 5167708 - DNA, 25 bp, Homo sapien
tattgtgctgttctaagaagttagt

SEQ ID NO: 5167709 - DNA, 25 bp, Homo sapien
catgccgggccgaaattagacattt

SEQ ID NO: 5167710 - DNA, 25 bp, Homo sapien
atttatgtgcatagtctccagtgac

SEQ ID NO: 5167711 - DNA, 25 bp, Homo sapien
taggcaactagacaataactattcc

SEQ ID NO: 5167712 - DNA, 25 bp, Homo sapien
gcaacaaatacatcccttgaagttt

SEQ ID NO: 5167713 - DNA, 25 bp, Homo sapien
ccacggccggacttgactccagctt

SEQ ID NO: 5167714 - DNA, 25 bp, Homo sapien
gtgtcggcaacaacttcccaccagc

SEQ ID NO: 5167715 - DNA, 25 bp, Homo sapien
gagagcctgggatgttcgcaactct

SEQ ID NO: 5167716 - DNA, 25 bp, Homo sapien
cctgcaccgtgtcggcaacaacttc

SEQ ID NO: 5167717 - DNA, 25 bp, Homo sapien
ttgcatggcctccctcctcgggcat

SEQ ID NO: 5167718 - DNA, 25 bp, Homo sapien
ctcttgcatggcctccctcctcggg

SEQ ID NO: 5167719 - DNA, 25 bp, Homo sapien
ctgacctcttgcatggcctccctcc

SEQ ID NO: 5167720 - DNA, 25 bp, Homo sapien
tgacctcttgcatggcctccctcct

SEQ ID NO: 5167721 - DNA, 25 bp, Homo sapien
gacggcgaagagacaaatccagcaa

SEQ ID NO: 5167722 - DNA, 25 bp, Homo sapien
cggcgaagagacaaatccagcaagc

SEQ ID NO: 5167723 - DNA, 25 bp, Homo sapien
aagagacaaatccagcaagccacag

SEQ ID NO: 5167724 - DNA, 25 bp, Homo sapien
ctgacggcgaagagacaaatccagc

SEQ ID NO: 5167725 - DNA, 25 bp, Homo sapien
tgacggtggctacactgcattgatc

SEQ ID NO: 5167726 - DNA, 25 bp, Homo sapien
tccagtcattgacggtggctacact

SEQ ID NO: 5167727 - DNA, 25 bp, Homo sapien
ggtggctacactgcattgatctggg

SEQ ID NO: 5167728 - DNA, 25 bp, Homo sapien
tacactgcattgatctgggaacaca

SEQ ID NO: 5167729 - DNA, 25 bp, Homo sapien
tgtcatcggttatttgctgatcttt

SEQ ID NO: 5167730 - DNA, 25 bp, Homo sapien
cttttgtaaatggttgatcttttct

SEQ ID NO: 5167731 - DNA, 25 bp, Homo sapien
tttctgttgcttccaacttccctgg

SEQ ID NO: 5167732 - DNA, 25 bp, Homo sapien
ttctgttgcttccaacttccctggt

SEQ ID NO: 5167733 - DNA, 25 bp, Homo sapien
tgtgctctgccgcagtcttgaggga

SEQ ID NO: 5167734 - DNA, 25 bp, Homo sapien
tctgcacgcgtggttcagtgcctgg

SEQ ID NO: 5167735 - DNA, 25 bp, Homo sapien
tctgtctccgcagaactgaggacga

SEQ ID NO: 5167736 - DNA, 25 bp, Homo sapien
ggtgctgtgctctgccgcagtcttg

SEQ ID NO: 5167737 - DNA, 25 bp, Homo sapien
ccataaggactacacggaggcaacc

SEQ ID NO: 5167738 - DNA, 25 bp, Homo sapien
tgtggagaccttcagtacccaggaa

SEQ ID NO: 5167739 - DNA, 25 bp, Homo sapien
taagctttgcagctacctgccagag

SEQ ID NO: 5167740 - DNA, 25 bp, Homo sapien
tcagtactctgtcagtctggccagg

SEQ ID NO: 5167741 - DNA, 25 bp, Homo sapien
tgcatatggacagtggcgtccccag

SEQ ID NO: 5167742 - DNA, 25 bp, Homo sapien
catggtgatggcgagctcagtgtca

SEQ ID NO: 5167743 - DNA, 25 bp, Homo sapien
caaagtggcggtagtcgatcatgcg

SEQ ID NO: 5167744 - DNA, 25 bp, Homo sapien
tcacttgtggacacggattcgggct

SEQ ID NO: 5167745 - DNA, 25 bp, Homo sapien
tgttgtcgaagtggctgcagactcc

SEQ ID NO: 5167746 - DNA, 25 bp, Homo sapien
tggacacgatctcgacacctctggt

SEQ ID NO: 5167747 - DNA, 25 bp, Homo sapien
gctgggtgctgagcaaactgtcgcc

SEQ ID NO: 5167748 - DNA, 25 bp, Homo sapien
caagccttcagagtgacctcgtgtc

SEQ ID NO: 5167749 - DNA, 25 bp, Homo sapien
tgtctgctaataactcacaccggtg

SEQ ID NO: 5167750 - DNA, 25 bp, Homo sapien
tggtggtgacgcatcatagattgac

SEQ ID NO: 5167751 - DNA, 25 bp, Homo sapien
gattgcgtcttttgggattcacaca

SEQ ID NO: 5167752 - DNA, 25 bp, Homo sapien
cacaccggtgtaactgtctgtatac

SEQ ID NO: 5167753 - DNA, 25 bp, Homo sapien
gcatgttgtagccacctgtcctggg

SEQ ID NO: 5167754 - DNA, 25 bp, Homo sapien
gatgcggatggatgccaagttgaca

SEQ ID NO: 5167755 - DNA, 25 bp, Homo sapien
taggtggagctactgccttgcttgg

SEQ ID NO: 5167756 - DNA, 25 bp, Homo sapien
ttcagtgggccctcctaaggtcggc

SEQ ID NO: 5167757 - DNA, 25 bp, Homo sapien
gccatccatggctctagttagagag

SEQ ID NO: 5167758 - DNA, 25 bp, Homo sapien
tgcaagcggagggaaatcattgttt

SEQ ID NO: 5167759 - DNA, 25 bp, Homo sapien
tagcactgcccatcaacaagggtgg

SEQ ID NO: 5167760 - DNA, 25 bp, Homo sapien
caggcagagccgaggagaatccatt

SEQ ID NO: 5167761 - DNA, 25 bp, Homo sapien
tgcacatgtgttgtgacattttggg

SEQ ID NO: 5167762 - DNA, 25 bp, Homo sapien
gtccacagccccattcgaagttttc

SEQ ID NO: 5167763 - DNA, 25 bp, Homo sapien
gaggtccacagccccattcgaagtt

SEQ ID NO: 5167764 - DNA, 25 bp, Homo sapien
gggtgctgcacatgtgttgtgacat

SEQ ID NO: 5167765 - DNA, 25 bp, Homo sapien
acacctgtccctcctacagacacca

SEQ ID NO: 5167766 - DNA, 25 bp, Homo sapien
cctgtccctcctacagacaccagcc

SEQ ID NO: 5167767 - DNA, 25 bp, Homo sapien
tggcccaggacggacacctgtccct

SEQ ID NO: 5167768 - DNA, 25 bp, Homo sapien
acactggcccaggacggacacctgt

SEQ ID NO: 5167769 - DNA, 25 bp, Homo sapien
gtggatggcccatctgtccctgcac

SEQ ID NO: 5167770 - DNA, 25 bp, Homo sapien
tggaacctgtgatgtgcagcctgtg

SEQ ID NO: 5167771 - DNA, 25 bp, Homo sapien
taagcgaatctggtgaaacttgccc

SEQ ID NO: 5167772 - DNA, 25 bp, Homo sapien
acaactcacgctcctcttggtggga

SEQ ID NO: 5167773 - DNA, 25 bp, Homo sapien
caacaaggatttacagagcggctac

SEQ ID NO: 5167774 - DNA, 25 bp, Homo sapien
ccagtgaagactgtttttgttccaa

SEQ ID NO: 5167775 - DNA, 25 bp, Homo sapien
tcttcaaatactccaccggtgtctc

SEQ ID NO: 5167776 - DNA, 25 bp, Homo sapien
tcaaatactccaccggtgtctcctc

SEQ ID NO: 5167777 - DNA, 25 bp, Homo sapien
gccagtgaagactgtttttgttcca

SEQ ID NO: 5167778 - DNA, 25 bp, Homo sapien
gataagttatcaagtctgttctttc

SEQ ID NO: 5167779 - DNA, 25 bp, Homo sapien
tttgagataagttatcaagtctgtt

SEQ ID NO: 5167780 - DNA, 25 bp, Homo sapien
gagataagttatcaagtctgttctt

SEQ ID NO: 5167781 - DNA, 25 bp, Homo sapien
aagttatcaagtctgttctttctac

SEQ ID NO: 5167782 - DNA, 25 bp, Homo sapien
agggatcacgcccaacctgcctgga

SEQ ID NO: 5167783 - DNA, 25 bp, Homo sapien
tgagacgtacggagccataaggaga

SEQ ID NO: 5167784 - DNA, 25 bp, Homo sapien
tgacacattcggctgagctcctgcc

SEQ ID NO: 5167785 - DNA, 25 bp, Homo sapien
ggtgagcagtgtcgcaaagctgttc

SEQ ID NO: 5167786 - DNA, 25 bp, Homo sapien
taccagatattcactgtaaaagcgc

SEQ ID NO: 5167787 - DNA, 25 bp, Homo sapien
tcggccagagccaaggcgttcggcc

SEQ ID NO: 5167788 - DNA, 25 bp, Homo sapien
ggccgcctcggcctgaggaatgaag

SEQ ID NO: 5167789 - DNA, 25 bp, Homo sapien
gaatgaaggcgccttgtgtcgcttt

SEQ ID NO: 5167790 - DNA, 25 bp, Homo sapien
gctttagcaggcagcagtgacccgt

SEQ ID NO: 5167791 - DNA, 25 bp, Homo sapien
gcacttagtgtgtcagctggtccgt

SEQ ID NO: 5167792 - DNA, 25 bp, Homo sapien
ttaaaaacgcagtctgagcagccct

SEQ ID NO: 5167793 - DNA, 25 bp, Homo sapien
tgtcccaaataaggctcttgaggag

SEQ ID NO: 5167794 - DNA, 25 bp, Homo sapien
actttctgtctttcgtggtgaggcg

SEQ ID NO: 5167795 - DNA, 25 bp, Homo sapien
aatgcagctctcggtccatgcgtaa

SEQ ID NO: 5167796 - DNA, 25 bp, Homo sapien
catgcgtaagacagtggccgcatat

SEQ ID NO: 5167797 - DNA, 25 bp, Homo sapien
ctctcggtccatgcgtaagacagtg

SEQ ID NO: 5167798 - DNA, 25 bp, Homo sapien
gcaatagtttgagttgagttttaaa

SEQ ID NO: 5167799 - DNA, 25 bp, Homo sapien
gaaacctggtgtcgcaattgcctgc

SEQ ID NO: 5167800 - DNA, 25 bp, Homo sapien
cctgagacgcagacaagtgcttgta

SEQ ID NO: 5167801 - DNA, 25 bp, Homo sapien
caaggaactgtaggcattgcaaggc

SEQ ID NO: 5167802 - DNA, 25 bp, Homo sapien
gtgccaatgtcttatccaggagtga

SEQ ID NO: 5167803 - DNA, 25 bp, Homo sapien
tgagctgggacagctaggcgctggc

SEQ ID NO: 5167804 - DNA, 25 bp, Homo sapien
ctggccgcagagtgcactgagctgg

SEQ ID NO: 5167805 - DNA, 25 bp, Homo sapien
tggctgaccctgtgacggctgctct

SEQ ID NO: 5167806 - DNA, 25 bp, Homo sapien
tgtgtgagttcacaagaacctttgg

SEQ ID NO: 5167807 - DNA, 25 bp, Homo sapien
gtggattctgtgaattctgtgtccc

SEQ ID NO: 5167808 - DNA, 25 bp, Homo sapien
ctgtggattctgtgaattctgtgtc

SEQ ID NO: 5167809 - DNA, 25 bp, Homo sapien
gcccaggctgtggattctgtgaatt

SEQ ID NO: 5167810 - DNA, 25 bp, Homo sapien
ggattctgtgaattctgtgtcccat

SEQ ID NO: 5167811 - DNA, 25 bp, Homo sapien
gggcttccagggtgcggcagcaaca

SEQ ID NO: 5167812 - DNA, 25 bp, Homo sapien
tcagactcccggctcacgggagagg

SEQ ID NO: 5167813 - DNA, 25 bp, Homo sapien
tgacacaaagccagggtgatggcga

SEQ ID NO: 5167814 - DNA, 25 bp, Homo sapien
ctgcgccacgcaggttgtgacacaa

SEQ ID NO: 5167815 - DNA, 25 bp, Homo sapien
ctccgatgggcgtgataatggcagg

SEQ ID NO: 5167816 - DNA, 25 bp, Homo sapien
tgggcgtgataatggcaggaggatt

SEQ ID NO: 5167817 - DNA, 25 bp, Homo sapien
cgtgataatggcaggaggatttatt

SEQ ID NO: 5167818 - DNA, 25 bp, Homo sapien
ccgatgggcgtgataatggcaggag

SEQ ID NO: 5167819 - DNA, 25 bp, Homo sapien
tgctgctgaccatgcgggatcgtcc

SEQ ID NO: 5167820 - DNA, 25 bp, Homo sapien
ccagtacgaggaagtgggacctgct

SEQ ID NO: 5167821 - DNA, 25 bp, Homo sapien
ctgcattcactcattattgctttaa

SEQ ID NO: 5167822 - DNA, 25 bp, Homo sapien
ctttaatgataagtggcaccagtac

SEQ ID NO: 5167823 - DNA, 25 bp, Homo sapien
ctgggtgtgggataggcctgagtca

SEQ ID NO: 5167824 - DNA, 25 bp, Homo sapien
tcctgggtgtgggataggcctgagt

SEQ ID NO: 5167825 - DNA, 25 bp, Homo sapien
tgggataggcctgagtcatggatgt

SEQ ID NO: 5167826 - DNA, 25 bp, Homo sapien
gcctgagtcatggatgtgcaggccc

SEQ ID NO: 5167827 - DNA, 25 bp, Homo sapien
tgggggagatggagtagaagctagg

SEQ ID NO: 5167828 - DNA, 25 bp, Homo sapien
tagggagcacagatgaagatggggg

SEQ ID NO: 5167829 - DNA, 25 bp, Homo sapien
gagcacagatgaagatgggggagat

SEQ ID NO: 5167830 - DNA, 25 bp, Homo sapien
gagatggagtagaagctagggtggg

SEQ ID NO: 5167831 - DNA, 25 bp, Homo sapien
ctgctggggacacattgactggaag

SEQ ID NO: 5167832 - DNA, 25 bp, Homo sapien
gctggggacacattgactggaaggg

SEQ ID NO: 5167833 - DNA, 25 bp, Homo sapien
gctgctggggacacattgactggaa

SEQ ID NO: 5167834 - DNA, 25 bp, Homo sapien
tgctggggacacattgactggaagg

SEQ ID NO: 5167835 - DNA, 25 bp, Homo sapien
cgcaggaccgtggccaggctccacc

SEQ ID NO: 5167836 - DNA, 25 bp, Homo sapien
ccgcaggaccgtggccaggctccac

SEQ ID NO: 5167837 - DNA, 25 bp, Homo sapien
taatctctgccgacgatccctgcgt

SEQ ID NO: 5167838 - DNA, 25 bp, Homo sapien
ggaccacccacgtgttgctgtctga

SEQ ID NO: 5167839 - DNA, 25 bp, Homo sapien
caaagatgtaaagtccaggaccacc

SEQ ID NO: 5167840 - DNA, 25 bp, Homo sapien
cctgtaatctctgccgacgatccct

SEQ ID NO: 5167841 - DNA, 25 bp, Homo sapien
agaagctccggaggaagtgcacgac

SEQ ID NO: 5167842 - DNA, 25 bp, Homo sapien
gaagaagctccggaggaagtgcacg

SEQ ID NO: 5167843 - DNA, 25 bp, Homo sapien
aagaagctccggaggaagtgcacga

SEQ ID NO: 5167844 - DNA, 25 bp, Homo sapien
gaagctccggaggaagtgcacgacg

SEQ ID NO: 5167845 - DNA, 25 bp, Homo sapien
ctgctgcgccctcgcgtactctcag

SEQ ID NO: 5167846 - DNA, 25 bp, Homo sapien
ggcttggcaacctgtggccggccac

SEQ ID NO: 5167847 - DNA, 25 bp, Homo sapien
gggcaccccgagcaggagcccaaca

SEQ ID NO: 5167848 - DNA, 25 bp, Homo sapien
gaggcgtcccaactgagtgggtccc

SEQ ID NO: 5167849 - DNA, 25 bp, Homo sapien
gacactagagggtgttgtcagcaga

SEQ ID NO: 5167850 - DNA, 25 bp, Homo sapien
cgcctacaagagacactagagggtg

SEQ ID NO: 5167851 - DNA, 25 bp, Homo sapien
caagagacactagagggtgttgtca

SEQ ID NO: 5167852 - DNA, 25 bp, Homo sapien
actagagggtgttgtcagcagagca

SEQ ID NO: 5167853 - DNA, 25 bp, Homo sapien
tgttgggcaattcggaattggaagt

SEQ ID NO: 5167854 - DNA, 25 bp, Homo sapien
ggaggtgttgggcaattcggaattg

SEQ ID NO: 5167855 - DNA, 25 bp, Homo sapien
caattcggaattggaagtctgagca

SEQ ID NO: 5167856 - DNA, 25 bp, Homo sapien
tctgagcagcagccgtttggatgct

SEQ ID NO: 5167857 - DNA, 25 bp, Homo sapien
gaaagctggcggactcatgtcctgc

SEQ ID NO: 5167858 - DNA, 25 bp, Homo sapien
tcaggacgccggtgttcacagcaca

SEQ ID NO: 5167859 - DNA, 25 bp, Homo sapien
aaagtgcaggcacttctccgctcca

SEQ ID NO: 5167860 - DNA, 25 bp, Homo sapien
gctccacagcggtcaggacgccggt

SEQ ID NO: 5167861 - DNA, 25 bp, Homo sapien
caacagatgcatccagattagtgtc

SEQ ID NO: 5167862 - DNA, 25 bp, Homo sapien
cagttggcgccaccaacagatgcat

SEQ ID NO: 5167863 - DNA, 25 bp, Homo sapien
cctgacagttggcgccaccaacaga

SEQ ID NO: 5167864 - DNA, 25 bp, Homo sapien
gatgcatccagattagtgtcctctc

SEQ ID NO: 5167865 - DNA, 25 bp, Homo sapien
accctctcggatagagaccatgtgc

SEQ ID NO: 5167866 - DNA, 25 bp, Homo sapien
ccctctcggatagagaccatgtgca

SEQ ID NO: 5167867 - DNA, 25 bp, Homo sapien
tcttcttcatgtgacccacatagtg

SEQ ID NO: 5167868 - DNA, 25 bp, Homo sapien
acatagtgtcgagctctgccctgct

SEQ ID NO: 5167869 - DNA, 25 bp, Homo sapien
gctcacagtctggcccgatggctcc

SEQ ID NO: 5167870 - DNA, 25 bp, Homo sapien
tccccacagtcagtctcatcaaggc

SEQ ID NO: 5167871 - DNA, 25 bp, Homo sapien
cactccccacagtcagtctcatcaa

SEQ ID NO: 5167872 - DNA, 25 bp, Homo sapien
aaggcatcgcttcatctgtgcagcc

SEQ ID NO: 5167873 - DNA, 25 bp, Homo sapien
ctggagaggggcagaccgcaccata

SEQ ID NO: 5167874 - DNA, 25 bp, Homo sapien
actggagaggggcagaccgcaccat

SEQ ID NO: 5167875 - DNA, 25 bp, Homo sapien
cattcctgggatgacggcagggctt

SEQ ID NO: 5167876 - DNA, 25 bp, Homo sapien
gacggcagggcttgtgtggttttcc

SEQ ID NO: 5167877 - DNA, 25 bp, Homo sapien
tgtgccccgcctaactcactcttgt

SEQ ID NO: 5167878 - DNA, 25 bp, Homo sapien
tgttgagcagtattccaccctatgg

SEQ ID NO: 5167879 - DNA, 25 bp, Homo sapien
tcttgttgttgagcagtattccacc

SEQ ID NO: 5167880 - DNA, 25 bp, Homo sapien
caccctatggatatgccagaatttg

SEQ ID NO: 5167881 - DNA, 25 bp, Homo sapien
cttatcggctttgcatacaacaaaa

SEQ ID NO: 5167882 - DNA, 25 bp, Homo sapien
ggctttgcatacaacaaaaacgttc

SEQ ID NO: 5167883 - DNA, 25 bp, Homo sapien
tgcgtctccatcaaaggaaaggtgc

SEQ ID NO: 5167884 - DNA, 25 bp, Homo sapien
ccagaacacacagccatgtgcgtct

SEQ ID NO: 5167885 - DNA, 25 bp, Homo sapien
tccttgcttacgtagcaagtccctc

SEQ ID NO: 5167886 - DNA, 25 bp, Homo sapien
ttacgtagcaagtccctcctctgag

SEQ ID NO: 5167887 - DNA, 25 bp, Homo sapien
gtagcaagtccctcctctgaggaca

SEQ ID NO: 5167888 - DNA, 25 bp, Homo sapien
atcaaatccttgcttacgtagcaag

SEQ ID NO: 5167889 - DNA, 25 bp, Homo sapien
tgggtttcccaagacagcctcaatt

SEQ ID NO: 5167890 - DNA, 25 bp, Homo sapien
ctttgcaacagggatcaggataggg

SEQ ID NO: 5167891 - DNA, 25 bp, Homo sapien
aaacgttcatctgccgtcagtcgca

SEQ ID NO: 5167892 - DNA, 25 bp, Homo sapien
atagggtcacgcctgatgctgggcc

SEQ ID NO: 5167893 - DNA, 25 bp, Homo sapien
gaaaggcagcttggtattctaaaaa

SEQ ID NO: 5167894 - DNA, 25 bp, Homo sapien
ctagccccaggatcactcgatctgg

SEQ ID NO: 5167895 - DNA, 25 bp, Homo sapien
aggatcactcgatctggcttctgaa

SEQ ID NO: 5167896 - DNA, 25 bp, Homo sapien
ttctaaaaagaagccgctagccact

SEQ ID NO: 5167897 - DNA, 25 bp, Homo sapien
aagaggataaactgttggtacagcc

SEQ ID NO: 5167898 - DNA, 25 bp, Homo sapien
gtacagccgccttgtagtttgtcta

SEQ ID NO: 5167899 - DNA, 25 bp, Homo sapien
ttcccaacacatgaggaagaaacaa

SEQ ID NO: 5167900 - DNA, 25 bp, Homo sapien
aactgttggtacagccgccttgtag

SEQ ID NO: 5167901 - DNA, 25 bp, Homo sapien
tctgatcgatcaaaacagaggctca

SEQ ID NO: 5167902 - DNA, 25 bp, Homo sapien
gcagtgacaagagcctccttaggcc

SEQ ID NO: 5167903 - DNA, 25 bp, Homo sapien
ctgctaagtttggagagggcccctg

SEQ ID NO: 5167904 - DNA, 25 bp, Homo sapien
ggcccctgggcatatgcagtgacaa

SEQ ID NO: 5167905 - DNA, 25 bp, Homo sapien
gctgcacaaggttggctgcaaccat

SEQ ID NO: 5167906 - DNA, 25 bp, Homo sapien
gccagctgcacaaggttggctgcaa

SEQ ID NO: 5167907 - DNA, 25 bp, Homo sapien
tgtcagccagctgcacaaggttggc

SEQ ID NO: 5167908 - DNA, 25 bp, Homo sapien
cagctgcacaaggttggctgcaacc

SEQ ID NO: 5167909 - DNA, 25 bp, Homo sapien
gtgaacgcagcggtgcccggcacat

SEQ ID NO: 5167910 - DNA, 25 bp, Homo sapien
tgtgaacgcagcggtgcccggcaca

SEQ ID NO: 5167911 - DNA, 25 bp, Homo sapien
ctgtgaacgcagcggtgcccggcac

SEQ ID NO: 5167912 - DNA, 25 bp, Homo sapien
cctgatactccctgtggaaggctcc

SEQ ID NO: 5167913 - DNA, 25 bp, Homo sapien
ctgatactccctgtggaaggctccc

SEQ ID NO: 5167914 - DNA, 25 bp, Homo sapien
agtccacaggtcaagagtattgaac

SEQ ID NO: 5167915 - DNA, 25 bp, Homo sapien
ctgaagtccacaggtcaagagtatt

SEQ ID NO: 5167916 - DNA, 25 bp, Homo sapien
gaagtccacaggtcaagagtattga

SEQ ID NO: 5167917 - DNA, 25 bp, Homo sapien
tccacaggtcaagagtattgaacca

SEQ ID NO: 5167918 - DNA, 25 bp, Homo sapien
cggctctcccgtctgccttccagtg

SEQ ID NO: 5167919 - DNA, 25 bp, Homo sapien
agtctttggcggctctcccgtctgc

SEQ ID NO: 5167920 - DNA, 25 bp, Homo sapien
gagtctttggcggctctcccgtctg

SEQ ID NO: 5167921 - DNA, 25 bp, Homo sapien
tttggcggctctcccgtctgccttc

SEQ ID NO: 5167922 - DNA, 25 bp, Homo sapien
atggacatgagcacgcccggacaag

SEQ ID NO: 5167923 - DNA, 25 bp, Homo sapien
gagaggaccagtgagacatggacat

SEQ ID NO: 5167924 - DNA, 25 bp, Homo sapien
cgcccggacaagcacagagaactgt

SEQ ID NO: 5167925 - DNA, 25 bp, Homo sapien
ctgcaagtggttgctgtcattaacc

SEQ ID NO: 5167926 - DNA, 25 bp, Homo sapien
aaccctgctatggaatgggccctga

SEQ ID NO: 5167927 - DNA, 25 bp, Homo sapien
gatgcccagatagctctcagacctg

SEQ ID NO: 5167928 - DNA, 25 bp, Homo sapien
ggagccccactctgaaaagcaggaa

SEQ ID NO: 5167929 - DNA, 25 bp, Homo sapien
caaggtgcttctatatctacgggag

SEQ ID NO: 5167930 - DNA, 25 bp, Homo sapien
tagaaccatggcttcttcggctgcc

SEQ ID NO: 5167931 - DNA, 25 bp, Homo sapien
cacagctacaatgatgagggcgccc

SEQ ID NO: 5167932 - DNA, 25 bp, Homo sapien
tcggctaccaagatcccctgaggtc

SEQ ID NO: 5167933 - DNA, 25 bp, Homo sapien
tgagaggccctttgcaagcgaaacc

SEQ ID NO: 5167934 - DNA, 25 bp, Homo sapien
caaggccaaccttgccctgagtttt

SEQ ID NO: 5167935 - DNA, 25 bp, Homo sapien
gaaaaggtcttatgagccaaggcca

SEQ ID NO: 5167936 - DNA, 25 bp, Homo sapien
ttgcttttcagaaacgcccgccagg

SEQ ID NO: 5167937 - DNA, 25 bp, Homo sapien
gggcttccggcatctttgcttttca

SEQ ID NO: 5167938 - DNA, 25 bp, Homo sapien
gaacttcgggtcctagaggcagact

SEQ ID NO: 5167939 - DNA, 25 bp, Homo sapien
tgttctggagaaactaaactggagg

SEQ ID NO: 5167940 - DNA, 25 bp, Homo sapien
gggtgcccagtgatcgctaaaaaca

SEQ ID NO: 5167941 - DNA, 25 bp, Homo sapien
gtcctccgcccgttcctcacagtgg

SEQ ID NO: 5167942 - DNA, 25 bp, Homo sapien
ttcctgggtggctgtgcacttgatg

SEQ ID NO: 5167943 - DNA, 25 bp, Homo sapien
gcacttgatggtcggttcacttttc

SEQ ID NO: 5167944 - DNA, 25 bp, Homo sapien
cttcctgggtggctgtgcacttgat

SEQ ID NO: 5167945 - DNA, 25 bp, Homo sapien
ctgtgcacttgatggtcggttcact

SEQ ID NO: 5167946 - DNA, 25 bp, Homo sapien
gaactgctgtccacgtagctgtagc

SEQ ID NO: 5167947 - DNA, 25 bp, Homo sapien
tagctgtagcttccaagagaaacca

SEQ ID NO: 5167948 - DNA, 25 bp, Homo sapien
gaaagcaggaaactggtctggccct

SEQ ID NO: 5167949 - DNA, 25 bp, Homo sapien
cgctgagcactaggcctgggactca

SEQ ID NO: 5167950 - DNA, 25 bp, Homo sapien
cagggcactgtgcccaagccgcgcg

SEQ ID NO: 5167951 - DNA, 25 bp, Homo sapien
agccgcgcggaccctggcctccttc

SEQ ID NO: 5167952 - DNA, 25 bp, Homo sapien
agggcactgtgcccaagccgcgcgg

SEQ ID NO: 5167953 - DNA, 25 bp, Homo sapien
ttcctgtctctttatacgaagtaag

SEQ ID NO: 5167954 - DNA, 25 bp, Homo sapien
tatacgaagtaagtccagctggatc

SEQ ID NO: 5167955 - DNA, 25 bp, Homo sapien
cgaagtaagtccagctggatcaaat

SEQ ID NO: 5167956 - DNA, 25 bp, Homo sapien
gtctctttatacgaagtaagtccag

SEQ ID NO: 5167957 - DNA, 25 bp, Homo sapien
ggctccatgtggaacgccttctgac

SEQ ID NO: 5167958 - DNA, 25 bp, Homo sapien
catgtggaacgccttctgactgtga

SEQ ID NO: 5167959 - DNA, 25 bp, Homo sapien
tggaacgccttctgactgtgagagc

SEQ ID NO: 5167960 - DNA, 25 bp, Homo sapien
tgtgagagcaactgggcttctcacc

SEQ ID NO: 5167961 - DNA, 25 bp, Homo sapien
gatgcccctaggctgtgaaggagcc

SEQ ID NO: 5167962 - DNA, 25 bp, Homo sapien
tgtgcagcctcctttcgacgtgggc

SEQ ID NO: 5167963 - DNA, 25 bp, Homo sapien
ttgactccatctttgtgcactgccc

SEQ ID NO: 5167964 - DNA, 25 bp, Homo sapien
acaggtcatccacactgacgggcga

SEQ ID NO: 5167965 - DNA, 25 bp, Homo sapien
tggttcagtcccgttggagcactct

SEQ ID NO: 5167966 - DNA, 25 bp, Homo sapien
tcagtcccgttggagcactctggga

SEQ ID NO: 5167967 - DNA, 25 bp, Homo sapien
ttcagtcccgttggagcactctggg

SEQ ID NO: 5167968 - DNA, 25 bp, Homo sapien
ctggagaggtaatgatcgtctttct

SEQ ID NO: 5167969 - DNA, 25 bp, Homo sapien
tctaccaggcaagtggatacagctg

SEQ ID NO: 5167970 - DNA, 25 bp, Homo sapien
tagcaaaagagagaggcgcgtaact

SEQ ID NO: 5167971 - DNA, 25 bp, Homo sapien
gaggacaattgtttatctctctcac

SEQ ID NO: 5167972 - DNA, 25 bp, Homo sapien
tgggtagtaggcactcctccctaac

SEQ ID NO: 5167973 - DNA, 25 bp, Homo sapien
tgtttgaaggatgttaacaggaacc

SEQ ID NO: 5167974 - DNA, 25 bp, Homo sapien
ctctgaaagaacgtcacttccagtg

SEQ ID NO: 5167975 - DNA, 25 bp, Homo sapien
ggaacccataacaatctctgaaaga

SEQ ID NO: 5167976 - DNA, 25 bp, Homo sapien
agctgtgtttgaaggatgttaacag

SEQ ID NO: 5167977 - DNA, 25 bp, Homo sapien
acagcttgtgaaataaccatactac

SEQ ID NO: 5167978 - DNA, 25 bp, Homo sapien
taaccatactaccaggtagtcctgg

SEQ ID NO: 5167979 - DNA, 25 bp, Homo sapien
ataaccatactaccaggtagtcctg

SEQ ID NO: 5167980 - DNA, 25 bp, Homo sapien
cagcttgtgaaataaccatactacc

SEQ ID NO: 5167981 - DNA, 25 bp, Homo sapien
tgctgctggctttataacattgata

SEQ ID NO: 5167982 - DNA, 25 bp, Homo sapien
tacatgaaacgctaaagctaccatt

SEQ ID NO: 5167983 - DNA, 25 bp, Homo sapien
tagagctataaaggagtaatagttc

SEQ ID NO: 5167984 - DNA, 25 bp, Homo sapien
tatgcataacaatcataccacacaa

SEQ ID NO: 5167985 - DNA, 25 bp, Homo sapien
agggtgccatgccagtgcctaaaga

SEQ ID NO: 5167986 - DNA, 25 bp, Homo sapien
agagggaggattctcgctgtctggg

SEQ ID NO: 5167987 - DNA, 25 bp, Homo sapien
gattctcgctgtctggggtcaggac

SEQ ID NO: 5167988 - DNA, 25 bp, Homo sapien
gccagtgcctaaagatggctgtggc

SEQ ID NO: 5167989 - DNA, 25 bp, Homo sapien
agggagtacagcgcacctgctgcag

SEQ ID NO: 5167990 - DNA, 25 bp, Homo sapien
cagggagtacagcgcacctgctgca

SEQ ID NO: 5167991 - DNA, 25 bp, Homo sapien
aagcagcccgtggaggaatgagggg

SEQ ID NO: 5167992 - DNA, 25 bp, Homo sapien
ggcaagcagcccgtggaggaatgag

SEQ ID NO: 5167993 - DNA, 25 bp, Homo sapien
caggtgtgccatgagggcaaagggg

SEQ ID NO: 5167994 - DNA, 25 bp, Homo sapien
ggtgtgccatgagggcaaaggggca

SEQ ID NO: 5167995 - DNA, 25 bp, Homo sapien
tgtgccatgagggcaaaggggcatt

SEQ ID NO: 5167996 - DNA, 25 bp, Homo sapien
tgccatgagggcaaaggggcattac

SEQ ID NO: 5167997 - DNA, 25 bp, Homo sapien
tgccaaacgattttagaaagcgtgt

SEQ ID NO: 5167998 - DNA, 25 bp, Homo sapien
tttacagtgcaagagttcacacacg

SEQ ID NO: 5167999 - DNA, 25 bp, Homo sapien
agagttcagtgaccgggttttacag

SEQ ID NO: 5168000 - DNA, 25 bp, Homo sapien
ggccgaggaaagtccatgccaaacg

SEQ ID NO: 5168001 - DNA, 25 bp, Homo sapien
ccatccagggcgaggacgcaagcag

SEQ ID NO: 5168002 - DNA, 25 bp, Homo sapien
gagcgcgctcagacgggacacgacc

SEQ ID NO: 5168003 - DNA, 25 bp, Homo sapien
tttttcaccgcaaggattccagctc

SEQ ID NO: 5168004 - DNA, 25 bp, Homo sapien
cagctcagacggttggcggcgcctc

SEQ ID NO: 5168005 - DNA, 25 bp, Homo sapien
cacgcgtgtgttaggacagggccat

SEQ ID NO: 5168006 - DNA, 25 bp, Homo sapien
ttaggacagggccatccttaggagg

SEQ ID NO: 5168007 - DNA, 25 bp, Homo sapien
gtgtccgcacgcgtgtgttaggaca

SEQ ID NO: 5168008 - DNA, 25 bp, Homo sapien
cttaggaggcgacgcccaggctcgt

SEQ ID NO: 5168009 - DNA, 25 bp, Homo sapien
ctgcgcccgcacgcaggcgggcccg

SEQ ID NO: 5168010 - DNA, 25 bp, Homo sapien
gcgcccgcacgcaggcgggcccgag

SEQ ID NO: 5168011 - DNA, 25 bp, Homo sapien
tgcgcccgcacgcaggcgggcccga

SEQ ID NO: 5168012 - DNA, 25 bp, Homo sapien
ctagtgccgagatcgccactcgtct

SEQ ID NO: 5168013 - DNA, 25 bp, Homo sapien
gatcgccactcgtctgcccgcttga

SEQ ID NO: 5168014 - DNA, 25 bp, Homo sapien
tagtgccgagatcgccactcgtctg

SEQ ID NO: 5168015 - DNA, 25 bp, Homo sapien
tcgtctgcccgcttgactcgctggg

SEQ ID NO: 5168016 - DNA, 25 bp, Homo sapien
gtccgagtcggagcccggggacagc

SEQ ID NO: 5168017 - DNA, 25 bp, Homo sapien
gctgtccgagtcggagcccggggac

SEQ ID NO: 5168018 - DNA, 25 bp, Homo sapien
tgtccgagtcggagcccggggacag

SEQ ID NO: 5168019 - DNA, 25 bp, Homo sapien
ctgtccgagtcggagcccggggaca

SEQ ID NO: 5168020 - DNA, 25 bp, Homo sapien
gcgcatgcccccgttgcctccgcgg

SEQ ID NO: 5168021 - DNA, 25 bp, Homo sapien
gggacacggcgccgcgcatgccccc

SEQ ID NO: 5168022 - DNA, 25 bp, Homo sapien
ggcgccgcgcatgcccccgttgcct

SEQ ID NO: 5168023 - DNA, 25 bp, Homo sapien
acacggcgccgcgcatgcccccgtt

SEQ ID NO: 5168024 - DNA, 25 bp, Homo sapien
tttacacatcgagcattggtcactg

SEQ ID NO: 5168025 - DNA, 25 bp, Homo sapien
gagcattggtcactgctgatgcagg

SEQ ID NO: 5168026 - DNA, 25 bp, Homo sapien
tcaactggctctaaggcatacacgg

SEQ ID NO: 5168027 - DNA, 25 bp, Homo sapien
catacacgggagtgtctttttacac

SEQ ID NO: 5168028 - DNA, 25 bp, Homo sapien
aggacatggctgagcttcttcttca

SEQ ID NO: 5168029 - DNA, 25 bp, Homo sapien
tcatcaccttgcacaacctctccat

SEQ ID NO: 5168030 - DNA, 25 bp, Homo sapien
cctgggatgttccaggacatggctg

SEQ ID NO: 5168031 - DNA, 25 bp, Homo sapien
tcttcacactcatcaccttgcacaa

SEQ ID NO: 5168032 - DNA, 25 bp, Homo sapien
catgcccatccagacttacaacgtt

SEQ ID NO: 5168033 - DNA, 25 bp, Homo sapien
gacatatgtgatgagtaacctaact

SEQ ID NO: 5168034 - DNA, 25 bp, Homo sapien
aagtttcctctctatcaaagcgtaa

SEQ ID NO: 5168035 - DNA, 25 bp, Homo sapien
cacacagggtggatggcatgatctt

SEQ ID NO: 5168036 - DNA, 25 bp, Homo sapien
cacgggtccctgtggtccacggcgc

SEQ ID NO: 5168037 - DNA, 25 bp, Homo sapien
cttccagaccttttgccgggaagct

SEQ ID NO: 5168038 - DNA, 25 bp, Homo sapien
cgggtccctgtggtccacggcgcat

SEQ ID NO: 5168039 - DNA, 25 bp, Homo sapien
tccagaccttttgccgggaagctgc

SEQ ID NO: 5168040 - DNA, 25 bp, Homo sapien
aacatagtaggtccataaattaatg

SEQ ID NO: 5168041 - DNA, 25 bp, Homo sapien
catagtaggtccataaattaatgtc

SEQ ID NO: 5168042 - DNA, 25 bp, Homo sapien
tagtaggtccataaattaatgtcac

SEQ ID NO: 5168043 - DNA, 25 bp, Homo sapien
atagtaggtccataaattaatgtca

SEQ ID NO: 5168044 - DNA, 25 bp, Homo sapien
agagtgaagacatcttccacataga

SEQ ID NO: 5168045 - DNA, 25 bp, Homo sapien
atctagagtgaagacatcttccaca

SEQ ID NO: 5168046 - DNA, 25 bp, Homo sapien
gtgaagacatcttccacatagagga

SEQ ID NO: 5168047 - DNA, 25 bp, Homo sapien
catctagagtgaagacatcttccac

SEQ ID NO: 5168048 - DNA, 25 bp, Homo sapien
tgcacaataccctgagcggtccttg

SEQ ID NO: 5168049 - DNA, 25 bp, Homo sapien
cacacttcacggagtgacacaagaa

SEQ ID NO: 5168050 - DNA, 25 bp, Homo sapien
aaactccttaccacagcatccaaag

SEQ ID NO: 5168051 - DNA, 25 bp, Homo sapien
ggtaaactacaataaatcacatcat

SEQ ID NO: 5168052 - DNA, 25 bp, Homo sapien
aggagagacagcagctgggcaaagg

SEQ ID NO: 5168053 - DNA, 25 bp, Homo sapien
gcagctgggcaaagggggctgggct

SEQ ID NO: 5168054 - DNA, 25 bp, Homo sapien
ctggaaggagagacagcagctgggc

SEQ ID NO: 5168055 - DNA, 25 bp, Homo sapien
gagacagcagctgggcaaagggggc

SEQ ID NO: 5168056 - DNA, 25 bp, Homo sapien
ctgtgcaggtcatcatacaggtcct

SEQ ID NO: 5168057 - DNA, 25 bp, Homo sapien
agctgtgcaggtcatcatacaggtc

SEQ ID NO: 5168058 - DNA, 25 bp, Homo sapien
tcgctccccacttcgtcagcgcaga

SEQ ID NO: 5168059 - DNA, 25 bp, Homo sapien
cttcgtcagcgcagacagctgtgtc

SEQ ID NO: 5168060 - DNA, 25 bp, Homo sapien
ctggatgaggattctcatggatttc

SEQ ID NO: 5168061 - DNA, 25 bp, Homo sapien
ttcagtaggaatagcaaaaacacag

SEQ ID NO: 5168062 - DNA, 25 bp, Homo sapien
gatgggaaccagttttgcctggatg

SEQ ID NO: 5168063 - DNA, 25 bp, Homo sapien
cacagcaacttgcacgcagttgtca

SEQ ID NO: 5168064 - DNA, 25 bp, Homo sapien
gaggagcctgatgcctatcagtgcg

SEQ ID NO: 5168065 - DNA, 25 bp, Homo sapien
tgatgcctatcagtgcgccagacac

SEQ ID NO: 5168066 - DNA, 25 bp, Homo sapien
agtgcgccagacacctcgtgctcat

SEQ ID NO: 5168067 - DNA, 25 bp, Homo sapien
cacagaggagcctgatgcctatcag

SEQ ID NO: 5168068 - DNA, 25 bp, Homo sapien
gcctcccgctccgtgcggccccgag

SEQ ID NO: 5168069 - DNA, 25 bp, Homo sapien
agatcccgccgcacagggccgagcc

SEQ ID NO: 5168070 - DNA, 25 bp, Homo sapien
tcccgccgcacagggccgagccggt

SEQ ID NO: 5168071 - DNA, 25 bp, Homo sapien
ctcccgctccgtgcggccccgagat

SEQ ID NO: 5168072 - DNA, 25 bp, Homo sapien
gggcaggttgcagcgcagcagggcg

SEQ ID NO: 5168073 - DNA, 25 bp, Homo sapien
ggggggcaggttgcagcgcagcagg

SEQ ID NO: 5168074 - DNA, 25 bp, Homo sapien
gcgcgcagggcgttcccgggcgccg

SEQ ID NO: 5168075 - DNA, 25 bp, Homo sapien
cgccggggggcaggttgcagcgcag

SEQ ID NO: 5168076 - DNA, 25 bp, Homo sapien
ggagcgccagcacggcggagaccac

SEQ ID NO: 5168077 - DNA, 25 bp, Homo sapien
aaccaggagcgccagcacggcggag

SEQ ID NO: 5168078 - DNA, 25 bp, Homo sapien
caggagcgccagcacggcggagacc

SEQ ID NO: 5168079 - DNA, 25 bp, Homo sapien
ccagcacggcggagaccaccacgcg

SEQ ID NO: 5168080 - DNA, 25 bp, Homo sapien
ggaaggccagcaggaagatcagtac

SEQ ID NO: 5168081 - DNA, 25 bp, Homo sapien
gcggaaggccagcaggaagatcagt

SEQ ID NO: 5168082 - DNA, 25 bp, Homo sapien
tcagcggaaggccagcaggaagatc

SEQ ID NO: 5168083 - DNA, 25 bp, Homo sapien
cagcggaaggccagcaggaagatca

SEQ ID NO: 5168084 - DNA, 25 bp, Homo sapien
ccggcgcggcgccctgcgcggccgc

SEQ ID NO: 5168085 - DNA, 25 bp, Homo sapien
cccggcgcggcgccctgcgcggccg

SEQ ID NO: 5168086 - DNA, 25 bp, Homo sapien
ctcggttactcgcagagacgcgcca

SEQ ID NO: 5168087 - DNA, 25 bp, Homo sapien
ggttactcgcagagacgcgccattt

SEQ ID NO: 5168088 - DNA, 25 bp, Homo sapien
tactcgcagagacgcgccattttgg

SEQ ID NO: 5168089 - DNA, 25 bp, Homo sapien
tcggttactcgcagagacgcgccat

SEQ ID NO: 5168090 - DNA, 25 bp, Homo sapien
ggtcacatgcactccgtttccagac

SEQ ID NO: 5168091 - DNA, 25 bp, Homo sapien
agcggtcacatgcactccgtttcca

SEQ ID NO: 5168092 - DNA, 25 bp, Homo sapien
tgcactccgtttccagacaagcagc

SEQ ID NO: 5168093 - DNA, 25 bp, Homo sapien
cacatgcactccgtttccagacaag

SEQ ID NO: 5168094 - DNA, 25 bp, Homo sapien
ctgactcaacctacacagatgcaag

SEQ ID NO: 5168095 - DNA, 25 bp, Homo sapien
ctcaacctacacagatgcaagcgcg

SEQ ID NO: 5168096 - DNA, 25 bp, Homo sapien
acacagatgcaagcgcgggtcgctc

SEQ ID NO: 5168097 - DNA, 25 bp, Homo sapien
acctacacagatgcaagcgcgggtc

SEQ ID NO: 5168098 - DNA, 25 bp, Homo sapien
agactgacaccacgtattttaaggc

SEQ ID NO: 5168099 - DNA, 25 bp, Homo sapien
aagactgacaccacgtattttaagg

SEQ ID NO: 5168100 - DNA, 25 bp, Homo sapien
gaagactgacaccacgtattttaag

SEQ ID NO: 5168101 - DNA, 25 bp, Homo sapien
tgtgaacacccgcagtttgtgcagc

SEQ ID NO: 5168102 - DNA, 25 bp, Homo sapien
tcagagggcccacgtgcaagggggg

SEQ ID NO: 5168103 - DNA, 25 bp, Homo sapien
cttcagagggcccacgtgcaagggg

SEQ ID NO: 5168104 - DNA, 25 bp, Homo sapien
gcagctgtgaacacccgcagtttgt

SEQ ID NO: 5168105 - DNA, 25 bp, Homo sapien
ctccgatgctattgcgctgggtgcg

SEQ ID NO: 5168106 - DNA, 25 bp, Homo sapien
tgctattgcgctgggtgcgtttctg

SEQ ID NO: 5168107 - DNA, 25 bp, Homo sapien
cagaggccctttttggtgctcgtag

SEQ ID NO: 5168108 - DNA, 25 bp, Homo sapien
ttggtgctcgtaggcacagctgcac

SEQ ID NO: 5168109 - DNA, 25 bp, Homo sapien
ccctgaagaatgaggctccagggaa

SEQ ID NO: 5168110 - DNA, 25 bp, Homo sapien
cgctgaggccctgaagaatgaggct

SEQ ID NO: 5168111 - DNA, 25 bp, Homo sapien
cccgctgaggccctgaagaatgagg

SEQ ID NO: 5168112 - DNA, 25 bp, Homo sapien
tgaagaatgaggctccagggaaaga

SEQ ID NO: 5168113 - DNA, 25 bp, Homo sapien
gagggaggggctgggcactgcaagg

SEQ ID NO: 5168114 - DNA, 25 bp, Homo sapien
ggagggaggggctgggcactgcaag

SEQ ID NO: 5168115 - DNA, 25 bp, Homo sapien
caggagggaggggctgggcactgca

SEQ ID NO: 5168116 - DNA, 25 bp, Homo sapien
aggagggaggggctgggcactgcaa

SEQ ID NO: 5168117 - DNA, 25 bp, Homo sapien
ctgtcactgggactgccaactgctc

SEQ ID NO: 5168118 - DNA, 25 bp, Homo sapien
gttagcattcccaatccagaattcc

SEQ ID NO: 5168119 - DNA, 25 bp, Homo sapien
aactgctccctgttagcattcccaa

SEQ ID NO: 5168120 - DNA, 25 bp, Homo sapien
atctgatcctgtcactgggactgcc

SEQ ID NO: 5168121 - DNA, 25 bp, Homo sapien
caccactctctgttggtggcatcca

SEQ ID NO: 5168122 - DNA, 25 bp, Homo sapien
acttcgatgacgtccccagctttga

SEQ ID NO: 5168123 - DNA, 25 bp, Homo sapien
tgacatggtcccagagtgcttcagc

SEQ ID NO: 5168124 - DNA, 25 bp, Homo sapien
cagctcctggtcgtccatggtgaca

SEQ ID NO: 5168125 - DNA, 25 bp, Homo sapien
tatctccagggctaataacttgacc

SEQ ID NO: 5168126 - DNA, 25 bp, Homo sapien
tcctggaccgaggaatgacgactcc

SEQ ID NO: 5168127 - DNA, 25 bp, Homo sapien
cagccgccgtcagtgtgatccgaat

SEQ ID NO: 5168128 - DNA, 25 bp, Homo sapien
gcccgctggctaacatgcaacttgg

SEQ ID NO: 5168129 - DNA, 25 bp, Homo sapien
ttcccggccagaggggcgtcgtcat

SEQ ID NO: 5168130 - DNA, 25 bp, Homo sapien
gtcatccgcgggctcgtcctgattc

SEQ ID NO: 5168131 - DNA, 25 bp, Homo sapien
gatgtagtcccgctcagtgctgagg

SEQ ID NO: 5168132 - DNA, 25 bp, Homo sapien
cagatgtcgcgcaggtgcttgatgt

SEQ ID NO: 5168133 - DNA, 25 bp, Homo sapien
gctcctcgctgaacatgtctgcgcg

SEQ ID NO: 5168134 - DNA, 25 bp, Homo sapien
tgggcgctcgcggttgaacctctgc

SEQ ID NO: 5168135 - DNA, 25 bp, Homo sapien
tagatgtcctcgatgttcccgaaga

SEQ ID NO: 5168136 - DNA, 25 bp, Homo sapien
ttcccgaagatggtacgcagctgct

SEQ ID NO: 5168137 - DNA, 25 bp, Homo sapien
taacaaggacgggataacaatgcca

SEQ ID NO: 5168138 - DNA, 25 bp, Homo sapien
caaggcccttctctaccaggtgagg

SEQ ID NO: 5168139 - DNA, 25 bp, Homo sapien
ggctgtgtgtacctatttccctggg

SEQ ID NO: 5168140 - DNA, 25 bp, Homo sapien
gctcgactgcccaagagggccaaaa

SEQ ID NO: 5168141 - DNA, 25 bp, Homo sapien
cagtactccgagtagatctggaagt

SEQ ID NO: 5168142 - DNA, 25 bp, Homo sapien
agtacacgtacttgctgagcttggt

SEQ ID NO: 5168143 - DNA, 25 bp, Homo sapien
cagatcttctgcaccggagtcagca

SEQ ID NO: 5168144 - DNA, 25 bp, Homo sapien
gtgcgtgtatttgagcagctcggcc

SEQ ID NO: 5168145 - DNA, 25 bp, Homo sapien
gagcagagcttaatatcctgttggc

SEQ ID NO: 5168146 - DNA, 25 bp, Homo sapien
gaaagggtgaggatcccctgcagcc

SEQ ID NO: 5168147 - DNA, 25 bp, Homo sapien
ttttctgtgtgttgccccagggctg

SEQ ID NO: 5168148 - DNA, 25 bp, Homo sapien
taatgctcaaactggctgactggag

SEQ ID NO: 5168149 - DNA, 25 bp, Homo sapien
ctcgttgatgagctgggccacgttc

SEQ ID NO: 5168150 - DNA, 25 bp, Homo sapien
tctatggagctctgccactgagcaa

SEQ ID NO: 5168151 - DNA, 25 bp, Homo sapien
ggccacgttcttcatggcatgcaag

SEQ ID NO: 5168152 - DNA, 25 bp, Homo sapien
gatgttctcaagtctccgcttccgc

SEQ ID NO: 5168153 - DNA, 25 bp, Homo sapien
aagagaaagaacattcgctgctggc

SEQ ID NO: 5168154 - DNA, 25 bp, Homo sapien
cccgagtagatgagttctgagctcc

SEQ ID NO: 5168155 - DNA, 25 bp, Homo sapien
ggcttgaggctgtgtaactcgagtc

SEQ ID NO: 5168156 - DNA, 25 bp, Homo sapien
gctgtgtaactcgagtcagctcccc

SEQ ID NO: 5168157 - DNA, 25 bp, Homo sapien
cttgctcaacttggggcagcagggc

SEQ ID NO: 5168158 - DNA, 25 bp, Homo sapien
cctccacttgctcaacttggggcag

SEQ ID NO: 5168159 - DNA, 25 bp, Homo sapien
cacttgctcaacttggggcagcagg

SEQ ID NO: 5168160 - DNA, 25 bp, Homo sapien
tccacttgctcaacttggggcagca

SEQ ID NO: 5168161 - DNA, 25 bp, Homo sapien
acccgtggacaaggagggcttcatg

SEQ ID NO: 5168162 - DNA, 25 bp, Homo sapien
cacccgtggacaaggagggcttcat

SEQ ID NO: 5168163 - DNA, 25 bp, Homo sapien
cacacgtaggaaagatcacccgtgg

SEQ ID NO: 5168164 - DNA, 25 bp, Homo sapien
cgtaggaaagatcacccgtggacaa

SEQ ID NO: 5168165 - DNA, 25 bp, Homo sapien
gctcccctgaccatttcctggctgc

SEQ ID NO: 5168166 - DNA, 25 bp, Homo sapien
cagccctggctgctgaaccgctccc

SEQ ID NO: 5168167 - DNA, 25 bp, Homo sapien
tgctgaaccgctcccctgaccattt

SEQ ID NO: 5168168 - DNA, 25 bp, Homo sapien
ctggctgctgaaccgctcccctgac

SEQ ID NO: 5168169 - DNA, 25 bp, Homo sapien
agtacaacacgtcgcggcggagcag

SEQ ID NO: 5168170 - DNA, 25 bp, Homo sapien
gtagtacaacacgtcgcggcggagc

SEQ ID NO: 5168171 - DNA, 25 bp, Homo sapien
ttgtagtacaacacgtcgcggcgga

SEQ ID NO: 5168172 - DNA, 25 bp, Homo sapien
cttgtagtacaacacgtcgcggcgg

SEQ ID NO: 5168173 - DNA, 25 bp, Homo sapien
acggtgcagccggaaggcgttcttg

SEQ ID NO: 5168174 - DNA, 25 bp, Homo sapien
tgtcccctgtggcgccacggtgcag

SEQ ID NO: 5168175 - DNA, 25 bp, Homo sapien
aaggcgttcttgatgctcacatgga

SEQ ID NO: 5168176 - DNA, 25 bp, Homo sapien
caaaggccttgagccagcgctgctt

SEQ ID NO: 5168177 - DNA, 25 bp, Homo sapien
ctgtgacctgctgcttgctggcatt

SEQ ID NO: 5168178 - DNA, 25 bp, Homo sapien
ttgctggcattcagcatggcctgct

SEQ ID NO: 5168179 - DNA, 25 bp, Homo sapien
ttccctgtgacctgctgcttgctgg

SEQ ID NO: 5168180 - DNA, 25 bp, Homo sapien
ctggcattcagcatggcctgcttcc

SEQ ID NO: 5168181 - DNA, 25 bp, Homo sapien
gcagggtaaggaccgggcagccgag

SEQ ID NO: 5168182 - DNA, 25 bp, Homo sapien
tgtcagcagggtaaggaccgggcag

SEQ ID NO: 5168183 - DNA, 25 bp, Homo sapien
tcagcagggtaaggaccgggcagcc

SEQ ID NO: 5168184 - DNA, 25 bp, Homo sapien
atgtcagcagggtaaggaccgggca

SEQ ID NO: 5168185 - DNA, 25 bp, Homo sapien
ctctgcttcagagccgccgtaggag

SEQ ID NO: 5168186 - DNA, 25 bp, Homo sapien
gaatgtcaaccatatactgacccag

SEQ ID NO: 5168187 - DNA, 25 bp, Homo sapien
aaccccagatgcctgtcaggaagga

SEQ ID NO: 5168188 - DNA, 25 bp, Homo sapien
ggagagctgaccacatccaagagct

SEQ ID NO: 5168189 - DNA, 25 bp, Homo sapien
tgccagaaggtagatggcttgcgcc

SEQ ID NO: 5168190 - DNA, 25 bp, Homo sapien
ccagaaggtagatggcttgcgcctg

SEQ ID NO: 5168191 - DNA, 25 bp, Homo sapien
ctgggtgcttctggcgcgtcaggta

SEQ ID NO: 5168192 - DNA, 25 bp, Homo sapien
ttctggcgcgtcaggtagcagggcc

SEQ ID NO: 5168193 - DNA, 25 bp, Homo sapien
tggcacgtcttggtggcacaagcaa

SEQ ID NO: 5168194 - DNA, 25 bp, Homo sapien
caacaggagtacagacctggcacgt

SEQ ID NO: 5168195 - DNA, 25 bp, Homo sapien
ggcattgcaggccacagaaggccag

SEQ ID NO: 5168196 - DNA, 25 bp, Homo sapien
agcagtgaggccctacacaggtcca

SEQ ID NO: 5168197 - DNA, 25 bp, Homo sapien
gggtgtccagcagccagcggtgtct

SEQ ID NO: 5168198 - DNA, 25 bp, Homo sapien
gtgtccagcagccagcggtgtcttg

SEQ ID NO: 5168199 - DNA, 25 bp, Homo sapien
gtccagcagccagcggtgtcttgag

SEQ ID NO: 5168200 - DNA, 25 bp, Homo sapien
cagcagccagcggtgtcttgagggg

SEQ ID NO: 5168201 - DNA, 25 bp, Homo sapien
gactgggagtatgcagccgactgca

SEQ ID NO: 5168202 - DNA, 25 bp, Homo sapien
aggtggttctggagctaccgcacag

SEQ ID NO: 5168203 - DNA, 25 bp, Homo sapien
gactgcaccgtcttgtccttttccg

SEQ ID NO: 5168204 - DNA, 25 bp, Homo sapien
gagcgtaaggcaatcttctgtgtca

SEQ ID NO: 5168205 - DNA, 25 bp, Homo sapien
gccccttggcaggacagggcgccat

SEQ ID NO: 5168206 - DNA, 25 bp, Homo sapien
cagaattcggtctctctcttatggc

SEQ ID NO: 5168207 - DNA, 25 bp, Homo sapien
cttggcaggacagggcgccatctcc

SEQ ID NO: 5168208 - DNA, 25 bp, Homo sapien
tgagccacagaattcggtctctctc

SEQ ID NO: 5168209 - DNA, 25 bp, Homo sapien
aaggaatagtgcaagagtgactgtc

SEQ ID NO: 5168210 - DNA, 25 bp, Homo sapien
ttctggcttggagaaggaatagtgc

SEQ ID NO: 5168211 - DNA, 25 bp, Homo sapien
gtttctggcttggagaaggaatagt

SEQ ID NO: 5168212 - DNA, 25 bp, Homo sapien
agtgcaagagtgactgtccatgctg

SEQ ID NO: 5168213 - DNA, 25 bp, Homo sapien
cacagaaaacgggctagcagccagg

SEQ ID NO: 5168214 - DNA, 25 bp, Homo sapien
aatgcacgcacacccacagaaaacg

SEQ ID NO: 5168215 - DNA, 25 bp, Homo sapien
tgctggccacaggaaaatgcacgca

SEQ ID NO: 5168216 - DNA, 25 bp, Homo sapien
ggccacaggaaaatgcacgcacacc

SEQ ID NO: 5168217 - DNA, 25 bp, Homo sapien
gaacttacgtatccatgccaaggaa

SEQ ID NO: 5168218 - DNA, 25 bp, Homo sapien
catgagtccctgtgcagaccagtgg

SEQ ID NO: 5168219 - DNA, 25 bp, Homo sapien
ggccagccgtttgtgctcctagcag

SEQ ID NO: 5168220 - DNA, 25 bp, Homo sapien
gaatggaatttccatcctgagccag

SEQ ID NO: 5168221 - DNA, 25 bp, Homo sapien
ctatttgggtcggaaactgcatgtt

SEQ ID NO: 5168222 - DNA, 25 bp, Homo sapien
tatcttggtccacaggactgaagtg

SEQ ID NO: 5168223 - DNA, 25 bp, Homo sapien
ttgggtcggaaactgcatgtttcag

SEQ ID NO: 5168224 - DNA, 25 bp, Homo sapien
agagcctgtggggatagccttatct

SEQ ID NO: 5168225 - DNA, 25 bp, Homo sapien
gacatgctttatcagtaggtcctga

SEQ ID NO: 5168226 - DNA, 25 bp, Homo sapien
taacacagaagttggggtatgtggc

SEQ ID NO: 5168227 - DNA, 25 bp, Homo sapien
ttatcagtaggtcctgagggctcca

SEQ ID NO: 5168228 - DNA, 25 bp, Homo sapien
tccaggggctcaactgaccaagtaa

SEQ ID NO: 5168229 - DNA, 25 bp, Homo sapien
ctctgcatttgtgagtgttccctct

SEQ ID NO: 5168230 - DNA, 25 bp, Homo sapien
cctctggctttctgaagggcagcag

SEQ ID NO: 5168231 - DNA, 25 bp, Homo sapien
ccctctggctttctgaagggcagca

SEQ ID NO: 5168232 - DNA, 25 bp, Homo sapien
catttgtgagtgttccctctggctt

SEQ ID NO: 5168233 - DNA, 25 bp, Homo sapien
ggaaggcagagcacgtatttctccc

SEQ ID NO: 5168234 - DNA, 25 bp, Homo sapien
gaaggcagagcacgtatttctcccc

SEQ ID NO: 5168235 - DNA, 25 bp, Homo sapien
gggaaggcagagcacgtatttctcc

SEQ ID NO: 5168236 - DNA, 25 bp, Homo sapien
aggcagagcacgtatttctcccctc

SEQ ID NO: 5168237 - DNA, 25 bp, Homo sapien
gctgttgcccggacaggacaggacc

SEQ ID NO: 5168238 - DNA, 25 bp, Homo sapien
tctgagagggtctctaaagcagagt

SEQ ID NO: 5168239 - DNA, 25 bp, Homo sapien
agctgactgttggatgtgtccattg

SEQ ID NO: 5168240 - DNA, 25 bp, Homo sapien
tgtgtccattgtcgccagtttggct

SEQ ID NO: 5168241 - DNA, 25 bp, Homo sapien
acatttgagaacagtgttactctga

SEQ ID NO: 5168242 - DNA, 25 bp, Homo sapien
catttgagaacagtgttactctgag

SEQ ID NO: 5168243 - DNA, 25 bp, Homo sapien
ggaaaccttcttgagtgctatgcaa

SEQ ID NO: 5168244 - DNA, 25 bp, Homo sapien
taggcctacctgtcgctattctggg

SEQ ID NO: 5168245 - DNA, 25 bp, Homo sapien
taatgggcctgaaggcacttccaga

SEQ ID NO: 5168246 - DNA, 25 bp, Homo sapien
gaaccttttatgtctctcgtgagcc

SEQ ID NO: 5168247 - DNA, 25 bp, Homo sapien
ctgtgctggcggctgagcatttagt

SEQ ID NO: 5168248 - DNA, 25 bp, Homo sapien
tggcggctgagcatttagtgtgagc

SEQ ID NO: 5168249 - DNA, 25 bp, Homo sapien
cggctgagcatttagtgtgagccag

SEQ ID NO: 5168250 - DNA, 25 bp, Homo sapien
tgctggcggctgagcatttagtgtg

SEQ ID NO: 5168251 - DNA, 25 bp, Homo sapien
tgagacagcaggtaagcaaaggacc

SEQ ID NO: 5168252 - DNA, 25 bp, Homo sapien
tcttttagaagttgagacagcaggt

SEQ ID NO: 5168253 - DNA, 25 bp, Homo sapien
gcaaaggacctagttcatgtaaaca

SEQ ID NO: 5168254 - DNA, 25 bp, Homo sapien
ctaatttgggagtccttcagctgaa

SEQ ID NO: 5168255 - DNA, 25 bp, Homo sapien
tagtcacaaaactgtcataggttgt

SEQ ID NO: 5168256 - DNA, 25 bp, Homo sapien
tagatatcaggtaagaatctggact

SEQ ID NO: 5168257 - DNA, 25 bp, Homo sapien
tgcacatccgtgcagaaatctttct

SEQ ID NO: 5168258 - DNA, 25 bp, Homo sapien
cagctgtcagatacgaaaggtagat

SEQ ID NO: 5168259 - DNA, 25 bp, Homo sapien
caggcttgcttggtacttggcacac

SEQ ID NO: 5168260 - DNA, 25 bp, Homo sapien
cttggcacacacaggatggtgtttt

SEQ ID NO: 5168261 - DNA, 25 bp, Homo sapien
tggtgttttaaagagtgggctgcac

SEQ ID NO: 5168262 - DNA, 25 bp, Homo sapien
ggttagaagttacaggcatctcttc

SEQ ID NO: 5168263 - DNA, 25 bp, Homo sapien
gacatttaccgcaggcacacagttt

SEQ ID NO: 5168264 - DNA, 25 bp, Homo sapien
tgaggatgcccactagcattctgcc

SEQ ID NO: 5168265 - DNA, 25 bp, Homo sapien
cagctgaccaagtagcagagaagtc

SEQ ID NO: 5168266 - DNA, 25 bp, Homo sapien
gcatggatcattgtaaacagcagat

SEQ ID NO: 5168267 - DNA, 25 bp, Homo sapien
tgcaaagtcttacagttataagtgt

SEQ ID NO: 5168268 - DNA, 25 bp, Homo sapien
ttcagcgacctgtttctttggcact

SEQ ID NO: 5168269 - DNA, 25 bp, Homo sapien
aatgcactgttgtaatgtatgcaaa

SEQ ID NO: 5168270 - DNA, 25 bp, Homo sapien
ttagatgattcttcaaccttttggg

SEQ ID NO: 5168271 - DNA, 25 bp, Homo sapien
ggaaatagggctccagttgcaattg

SEQ ID NO: 5168272 - DNA, 25 bp, Homo sapien
caggaaatagggctccagttgcaat

SEQ ID NO: 5168273 - DNA, 25 bp, Homo sapien
ctacaggaaatagggctccagttgc

SEQ ID NO: 5168274 - DNA, 25 bp, Homo sapien
ttgcaattgggggtctctaggaagg

SEQ ID NO: 5168275 - DNA, 25 bp, Homo sapien
gtgcctgattgagtgtaaccttggt

SEQ ID NO: 5168276 - DNA, 25 bp, Homo sapien
cacgcacacttcgttgatggttgtc

SEQ ID NO: 5168277 - DNA, 25 bp, Homo sapien
cagtaaccacctgggagagtatgga

SEQ ID NO: 5168278 - DNA, 25 bp, Homo sapien
ccccagaatattcgggtgtttgctc

SEQ ID NO: 5168279 - DNA, 25 bp, Homo sapien
taacatgtatcctggagcgaatcct

SEQ ID NO: 5168280 - DNA, 25 bp, Homo sapien
gattgtcgctacttcagttgatgac

SEQ ID NO: 5168281 - DNA, 25 bp, Homo sapien
aatgctttgtacgtacagctgggag

SEQ ID NO: 5168282 - DNA, 25 bp, Homo sapien
ctttgcaggagctctagtgattgtc

SEQ ID NO: 5168283 - DNA, 25 bp, Homo sapien
taataccctggataagattcagagg

SEQ ID NO: 5168284 - DNA, 25 bp, Homo sapien
tagagtcctggttgtggctgtgcaa

SEQ ID NO: 5168285 - DNA, 25 bp, Homo sapien
cttactagagagctgaatgggaatc

SEQ ID NO: 5168286 - DNA, 25 bp, Homo sapien
ggtgctgggctgtaaccagttagtc

SEQ ID NO: 5168287 - DNA, 25 bp, Homo sapien
gcagcgcaggaagccgttccagcat

SEQ ID NO: 5168288 - DNA, 25 bp, Homo sapien
agcaggggcaagcaatgcagagtgc

SEQ ID NO: 5168289 - DNA, 25 bp, Homo sapien
gggagaagagcaggggcaagcaatg

SEQ ID NO: 5168290 - DNA, 25 bp, Homo sapien
gtgcagcgcaggaagccgttccagc

SEQ ID NO: 5168291 - DNA, 25 bp, Homo sapien
ccaggtccatcccaaacagacacac

SEQ ID NO: 5168292 - DNA, 25 bp, Homo sapien
acccaggtccatcccaaacagacac

SEQ ID NO: 5168293 - DNA, 25 bp, Homo sapien
caacacccaggtccatcccaaacag

SEQ ID NO: 5168294 - DNA, 25 bp, Homo sapien
acacccaggtccatcccaaacagac

SEQ ID NO: 5168295 - DNA, 25 bp, Homo sapien
ataccgctctctaaaaatagggcca

SEQ ID NO: 5168296 - DNA, 25 bp, Homo sapien
gggatctacccagagagcttccggg

SEQ ID NO: 5168297 - DNA, 25 bp, Homo sapien
cttgaggtgctcaaaaaactgaagg

SEQ ID NO: 5168298 - DNA, 25 bp, Homo sapien
gagaaatgggcgactctaggacccg

SEQ ID NO: 5168299 - DNA, 25 bp, Homo sapien
aaccagcgtggagaacaccaagacg

SEQ ID NO: 5168300 - DNA, 25 bp, Homo sapien
gccacggcgattcctcgcctgctcg

SEQ ID NO: 5168301 - DNA, 25 bp, Homo sapien
agaacaccaagacgccacggcgatt

SEQ ID NO: 5168302 - DNA, 25 bp, Homo sapien
ctgcgaaccagcgtggagaacacca

SEQ ID NO: 5168303 - DNA, 25 bp, Homo sapien
caattaaaggaggtatgtccaaaca

SEQ ID NO: 5168304 - DNA, 25 bp, Homo sapien
caggcacaaccaattacgtcatggg

SEQ ID NO: 5168305 - DNA, 25 bp, Homo sapien
tctacaactcctcatgatatcccag

SEQ ID NO: 5168306 - DNA, 25 bp, Homo sapien
caaacagccctgtagtagatggtcc

SEQ ID NO: 5168307 - DNA, 25 bp, Homo sapien
aatgttgtgcctatgttttctctgg

SEQ ID NO: 5168308 - DNA, 25 bp, Homo sapien
gaactcttgagtcgactaaacctct

SEQ ID NO: 5168309 - DNA, 25 bp, Homo sapien
tcaagggatggcaacaaggagaaac

SEQ ID NO: 5168310 - DNA, 25 bp, Homo sapien
ttgggaaacaactcgggccacttga

SEQ ID NO: 5168311 - DNA, 25 bp, Homo sapien
aaatcaatagttattatctggaagc

SEQ ID NO: 5168312 - DNA, 25 bp, Homo sapien
gaaatcaatagttattatctggaag

SEQ ID NO: 5168313 - DNA, 25 bp, Homo sapien
aatcaatagttattatctggaagct

SEQ ID NO: 5168314 - DNA, 25 bp, Homo sapien
gatttagctctgtcaaggacatggg

SEQ ID NO: 5168315 - DNA, 25 bp, Homo sapien
tgtccggcccgagtctctatcctta

SEQ ID NO: 5168316 - DNA, 25 bp, Homo sapien
cagaaagagaatagcctgtccggcc

SEQ ID NO: 5168317 - DNA, 25 bp, Homo sapien
ggcccaaggccattttagctcagtg

SEQ ID NO: 5168318 - DNA, 25 bp, Homo sapien
tacagaacaaaaacaggcaggttca

SEQ ID NO: 5168319 - DNA, 25 bp, Homo sapien
cagaacaaaaacaggcaggttcaaa

SEQ ID NO: 5168320 - DNA, 25 bp, Homo sapien
acaaaaacaggcaggttcaaaatca

SEQ ID NO: 5168321 - DNA, 25 bp, Homo sapien
aaaacaggcaggttcaaaatcatac

SEQ ID NO: 5168322 - DNA, 25 bp, Homo sapien
accagccactcttcacaaacgccat

SEQ ID NO: 5168323 - DNA, 25 bp, Homo sapien
aaccagccactcttcacaaacgcca

SEQ ID NO: 5168324 - DNA, 25 bp, Homo sapien
tctgtcgcagcaaccagccactctt

SEQ ID NO: 5168325 - DNA, 25 bp, Homo sapien
gtcgcagcaaccagccactcttcac

SEQ ID NO: 5168326 - DNA, 25 bp, Homo sapien
caaccccgtgaatataatgtatctc

SEQ ID NO: 5168327 - DNA, 25 bp, Homo sapien
tctgctgctctacaaccccgtgaat

SEQ ID NO: 5168328 - DNA, 25 bp, Homo sapien
cacctcgttttactggcattgatac

SEQ ID NO: 5168329 - DNA, 25 bp, Homo sapien
gtatctcacctcgttttactggcat

SEQ ID NO: 5168330 - DNA, 25 bp, Homo sapien
gttgagatcatgccattgcactcca

SEQ ID NO: 5168331 - DNA, 25 bp, Homo sapien
tgaagcaggaaaattgcttgaagcc

SEQ ID NO: 5168332 - DNA, 25 bp, Homo sapien
tgagatcatgccattgcactccagc

SEQ ID NO: 5168333 - DNA, 25 bp, Homo sapien
ggaggcagaggttgcagtaagttga

SEQ ID NO: 5168334 - DNA, 25 bp, Homo sapien
taatagatcaggtgaccatccgacc

SEQ ID NO: 5168335 - DNA, 25 bp, Homo sapien
cattggcatgtggaccttatcctcg

SEQ ID NO: 5168336 - DNA, 25 bp, Homo sapien
tatcctcgatattctgccgagtctg

SEQ ID NO: 5168337 - DNA, 25 bp, Homo sapien
cattcctgccccgtgcggatgttga

SEQ ID NO: 5168338 - DNA, 25 bp, Homo sapien
gcagtcttttgactttccatccggg

SEQ ID NO: 5168339 - DNA, 25 bp, Homo sapien
gactaattgttttcccatctcgaca

SEQ ID NO: 5168340 - DNA, 25 bp, Homo sapien
caaacaatctggagcatgcagtctt

SEQ ID NO: 5168341 - DNA, 25 bp, Homo sapien
tttcccatctcgacaaacaatctgg

SEQ ID NO: 5168342 - DNA, 25 bp, Homo sapien
gcaacagaccttctaagttacagac

SEQ ID NO: 5168343 - DNA, 25 bp, Homo sapien
gccctcacacagcatatattctaat

SEQ ID NO: 5168344 - DNA, 25 bp, Homo sapien
tcctgtcactgagagtatctccagt

SEQ ID NO: 5168345 - DNA, 25 bp, Homo sapien
aatggcaccctcttgacagcaacag

SEQ ID NO: 5168346 - DNA, 25 bp, Homo sapien
atcttggagtgtaaatttccaggcc

SEQ ID NO: 5168347 - DNA, 25 bp, Homo sapien
tgtgtttgtcctagaatcttggagt

SEQ ID NO: 5168348 - DNA, 25 bp, Homo sapien
agaatcttggagtgtaaatttccag

SEQ ID NO: 5168349 - DNA, 25 bp, Homo sapien
gtgtttgtcctagaatcttggagtg

SEQ ID NO: 5168350 - DNA, 25 bp, Homo sapien
gccgtgtatggtggaggtgaggaaa

SEQ ID NO: 5168351 - DNA, 25 bp, Homo sapien
gccggtgcagcataggccgtgtatg

SEQ ID NO: 5168352 - DNA, 25 bp, Homo sapien
tcatcggtcatgactgcagagccca

SEQ ID NO: 5168353 - DNA, 25 bp, Homo sapien
gaaaccacggatgtctcatcggtca

SEQ ID NO: 5168354 - DNA, 25 bp, Homo sapien
ttccaggcacaatatggaagatgag

SEQ ID NO: 5168355 - DNA, 25 bp, Homo sapien
tccaggcacaatatggaagatgagg

SEQ ID NO: 5168356 - DNA, 25 bp, Homo sapien
caggcacaatatggaagatgagggt

SEQ ID NO: 5168357 - DNA, 25 bp, Homo sapien
aattccaggcacaatatggaagatg

SEQ ID NO: 5168358 - DNA, 25 bp, Homo sapien
catatgggtactggtagggcacggc

SEQ ID NO: 5168359 - DNA, 25 bp, Homo sapien
cattcgcagcgtagacaacttgagt

SEQ ID NO: 5168360 - DNA, 25 bp, Homo sapien
caccgtatggcccatagccataagc

SEQ ID NO: 5168361 - DNA, 25 bp, Homo sapien
caacttgagttcctggcgggtacgc

SEQ ID NO: 5168362 - DNA, 25 bp, Homo sapien
tgcaatgacgtgtcatgaggatggt

SEQ ID NO: 5168363 - DNA, 25 bp, Homo sapien
tgcagtgcaatgacgtgtcatgagg

SEQ ID NO: 5168364 - DNA, 25 bp, Homo sapien
caatgacgtgtcatgaggatggtct

SEQ ID NO: 5168365 - DNA, 25 bp, Homo sapien
cagtgcaatgacgtgtcatgaggat

SEQ ID NO: 5168366 - DNA, 25 bp, Homo sapien
gaaaccatcgtaaatctaagggctg

SEQ ID NO: 5168367 - DNA, 25 bp, Homo sapien
gcagttaaggacagtaagggcacac

SEQ ID NO: 5168368 - DNA, 25 bp, Homo sapien
tctgatgcccctgcaagtcatgctg

SEQ ID NO: 5168369 - DNA, 25 bp, Homo sapien
agtccttgccagagtcagctgtgga

SEQ ID NO: 5168370 - DNA, 25 bp, Homo sapien
gtagctttcaaactgctcaggtatt

SEQ ID NO: 5168371 - DNA, 25 bp, Homo sapien
tcctccttgatcctctattccttta

SEQ ID NO: 5168372 - DNA, 25 bp, Homo sapien
tcaggtattaatagcgttaactttc

SEQ ID NO: 5168373 - DNA, 25 bp, Homo sapien
tataatgcctagtagctaagtagct

SEQ ID NO: 5168374 - DNA, 25 bp, Homo sapien
taacatcacgcaaagtaccagttct

SEQ ID NO: 5168375 - DNA, 25 bp, Homo sapien
accatgcttattgggtggcagacaa

SEQ ID NO: 5168376 - DNA, 25 bp, Homo sapien
gatcctcagctcactaagggccaaa

SEQ ID NO: 5168377 - DNA, 25 bp, Homo sapien
catcatgtggccgacatccctgaaa

SEQ ID NO: 5168378 - DNA, 25 bp, Homo sapien
ccagtgccaggtcgctgtcgttgtc

SEQ ID NO: 5168379 - DNA, 25 bp, Homo sapien
cgatagcgctctcgaatgatgactt

SEQ ID NO: 5168380 - DNA, 25 bp, Homo sapien
aatagagaccctaaggccatgcccg

SEQ ID NO: 5168381 - DNA, 25 bp, Homo sapien
ctagaagacccaaaatagagaccct

SEQ ID NO: 5168382 - DNA, 25 bp, Homo sapien
taaagtaacatgcaaccagttctgg

SEQ ID NO: 5168383 - DNA, 25 bp, Homo sapien
aagttaaacgcaaagaagctgtagc

SEQ ID NO: 5168384 - DNA, 25 bp, Homo sapien
ttgcacacagggttatcagaagcta

SEQ ID NO: 5168385 - DNA, 25 bp, Homo sapien
tctgagagttgcacaagaacagtct

SEQ ID NO: 5168386 - DNA, 25 bp, Homo sapien
gatgagagagcatctcccgcacagt

SEQ ID NO: 5168387 - DNA, 25 bp, Homo sapien
cagcagctagggtcaggcagatttc

SEQ ID NO: 5168388 - DNA, 25 bp, Homo sapien
catgtgtgtaaccagccaggcaaaa

SEQ ID NO: 5168389 - DNA, 25 bp, Homo sapien
taacaagtctgtgctacctggagtg

SEQ ID NO: 5168390 - DNA, 25 bp, Homo sapien
aactgaggctatcaaaacattggca

SEQ ID NO: 5168391 - DNA, 25 bp, Homo sapien
taagtcctggatagcctaaaatggg

SEQ ID NO: 5168392 - DNA, 25 bp, Homo sapien
tactactagagacgggaaagcaatc

SEQ ID NO: 5168393 - DNA, 25 bp, Homo sapien
catctatgggagttgtggccaagga

SEQ ID NO: 5168394 - DNA, 25 bp, Homo sapien
ttatgaacccacaatggactgcgac

SEQ ID NO: 5168395 - DNA, 25 bp, Homo sapien
tccaccgagaattggcgatacttga

SEQ ID NO: 5168396 - DNA, 25 bp, Homo sapien
ttatcagcagctgaggcgagggcca

SEQ ID NO: 5168397 - DNA, 25 bp, Homo sapien
catgattagccctcaccactggaag

SEQ ID NO: 5168398 - DNA, 25 bp, Homo sapien
ggggcaataacgcagtcatcctcag

SEQ ID NO: 5168399 - DNA, 25 bp, Homo sapien
accaggggcaataacgcagtcatcc

SEQ ID NO: 5168400 - DNA, 25 bp, Homo sapien
gggggagcaggacaaccaggggcaa

SEQ ID NO: 5168401 - DNA, 25 bp, Homo sapien
caaccaggggcaataacgcagtcat

SEQ ID NO: 5168402 - DNA, 25 bp, Homo sapien
cccctgccttccgtgacatggagcc

SEQ ID NO: 5168403 - DNA, 25 bp, Homo sapien
tactgtacggcaaacaatgctcccc

SEQ ID NO: 5168404 - DNA, 25 bp, Homo sapien
ggtcagctttactgtacggcaaaca

SEQ ID NO: 5168405 - DNA, 25 bp, Homo sapien
tcatcctggtcagctttactgtacg

SEQ ID NO: 5168406 - DNA, 25 bp, Homo sapien
tacgagcacccccgcacaaggccca

SEQ ID NO: 5168407 - DNA, 25 bp, Homo sapien
ccccacccgatagccgccctgcagc

SEQ ID NO: 5168408 - DNA, 25 bp, Homo sapien
acccccgcacaaggcccaggagctc

SEQ ID NO: 5168409 - DNA, 25 bp, Homo sapien
tccccccacccgatagccgccctgc

SEQ ID NO: 5168410 - DNA, 25 bp, Homo sapien
tcggatgttcagcagaaatctcgcc

SEQ ID NO: 5168411 - DNA, 25 bp, Homo sapien
gatgttcagcagaaatctcgccctt

SEQ ID NO: 5168412 - DNA, 25 bp, Homo sapien
ctccggacattcccactcggatgtt

SEQ ID NO: 5168413 - DNA, 25 bp, Homo sapien
cccactcggatgttcagcagaaatc

SEQ ID NO: 5168414 - DNA, 25 bp, Homo sapien
tgtaaacgtggtcctcagagcagcc

SEQ ID NO: 5168415 - DNA, 25 bp, Homo sapien
ctgtaaacgtggtcctcagagcagc

SEQ ID NO: 5168416 - DNA, 25 bp, Homo sapien
aatcaactccacaactgctgagcgt

SEQ ID NO: 5168417 - DNA, 25 bp, Homo sapien
ctgagcgtagcgtccaagctggcac

SEQ ID NO: 5168418 - DNA, 25 bp, Homo sapien
tgtactggcatctcccgctctgagt

SEQ ID NO: 5168419 - DNA, 25 bp, Homo sapien
aaggtccgttgggacctgcctctgg

SEQ ID NO: 5168420 - DNA, 25 bp, Homo sapien
gagaagccagtagtagccaacagat

SEQ ID NO: 5168421 - DNA, 25 bp, Homo sapien
ggagaagccagtagtagccaacaga

SEQ ID NO: 5168422 - DNA, 25 bp, Homo sapien
gccaggagaagccagtagtagccaa

SEQ ID NO: 5168423 - DNA, 25 bp, Homo sapien
agaggcagccggcatggaatcaacc

SEQ ID NO: 5168424 - DNA, 25 bp, Homo sapien
gcatggaatcaacctcaaccaccat

SEQ ID NO: 5168425 - DNA, 25 bp, Homo sapien
aagaggcagccggcatggaatcaac

SEQ ID NO: 5168426 - DNA, 25 bp, Homo sapien
gaagaggcagccggcatggaatcaa

SEQ ID NO: 5168427 - DNA, 25 bp, Homo sapien
gaggtttccacatccagggtggtgt

SEQ ID NO: 5168428 - DNA, 25 bp, Homo sapien
ctctctgaggtttccacatccaggg

SEQ ID NO: 5168429 - DNA, 25 bp, Homo sapien
ggtttccacatccagggtggtgtga

SEQ ID NO: 5168430 - DNA, 25 bp, Homo sapien
ctgaggtttccacatccagggtggt

SEQ ID NO: 5168431 - DNA, 25 bp, Homo sapien
ttgacatcgtctgtccagcaggagt

SEQ ID NO: 5168432 - DNA, 25 bp, Homo sapien
tgacatcgtctgtccagcaggagtt

SEQ ID NO: 5168433 - DNA, 25 bp, Homo sapien
gctgatatagttggctactgcatac

SEQ ID NO: 5168434 - DNA, 25 bp, Homo sapien
tgctgatatagttggctactgcata

SEQ ID NO: 5168435 - DNA, 25 bp, Homo sapien
catgctgatatagttggctactgca

SEQ ID NO: 5168436 - DNA, 25 bp, Homo sapien
ctcatgctgatatagttggctactg

SEQ ID NO: 5168437 - DNA, 25 bp, Homo sapien
attatagatagcgtagtgcagagtg

SEQ ID NO: 5168438 - DNA, 25 bp, Homo sapien
tatagatagcgtagtgcagagtggt

SEQ ID NO: 5168439 - DNA, 25 bp, Homo sapien
tagatagcgtagtgcagagtggtat

SEQ ID NO: 5168440 - DNA, 25 bp, Homo sapien
tagcgtagtgcagagtggtatttcc

SEQ ID NO: 5168441 - DNA, 25 bp, Homo sapien
caagtaacagtggtgtgaggccatg

SEQ ID NO: 5168442 - DNA, 25 bp, Homo sapien
caccaagtaacagtggtgtgaggcc

SEQ ID NO: 5168443 - DNA, 25 bp, Homo sapien
ctgtttttgctcatgtacaccaagt

SEQ ID NO: 5168444 - DNA, 25 bp, Homo sapien
tgtacaccaagtaacagtggtgtga

SEQ ID NO: 5168445 - DNA, 25 bp, Homo sapien
tctctggccgtctgtccagatagat

SEQ ID NO: 5168446 - DNA, 25 bp, Homo sapien
tactctctggccgtctgtccagata

SEQ ID NO: 5168447 - DNA, 25 bp, Homo sapien
ctggccgtctgtccagatagatctt

SEQ ID NO: 5168448 - DNA, 25 bp, Homo sapien
tctggccgtctgtccagatagatct

SEQ ID NO: 5168449 - DNA, 25 bp, Homo sapien
tgaatatgtggggaagggtcaattt

SEQ ID NO: 5168450 - DNA, 25 bp, Homo sapien
atatgtggggaagggtcaatttggt

SEQ ID NO: 5168451 - DNA, 25 bp, Homo sapien
gttctgaatatgtggggaagggtca

SEQ ID NO: 5168452 - DNA, 25 bp, Homo sapien
tgtggggaagggtcaatttggtcac

SEQ ID NO: 5168453 - DNA, 25 bp, Homo sapien
tgctgcctccttatgcagaagccat

SEQ ID NO: 5168454 - DNA, 25 bp, Homo sapien
cagaagccatgctaactttccccgt

SEQ ID NO: 5168455 - DNA, 25 bp, Homo sapien
gaagccatgctaactttccccgtat

SEQ ID NO: 5168456 - DNA, 25 bp, Homo sapien
agccatgctaactttccccgtattg

SEQ ID NO: 5168457 - DNA, 25 bp, Homo sapien
ttttgttcataggttctaatataca

SEQ ID NO: 5168458 - DNA, 25 bp, Homo sapien
acccaatgcatattttgttcatagg

SEQ ID NO: 5168459 - DNA, 25 bp, Homo sapien
aacccaatgcatattttgttcatag

SEQ ID NO: 5168460 - DNA, 25 bp, Homo sapien
tcataggttctaatatacaaatgtt

SEQ ID NO: 5168461 - DNA, 25 bp, Homo sapien
tttgtagtcagaaagtaactggcaa

SEQ ID NO: 5168462 - DNA, 25 bp, Homo sapien
gtagtcagaaagtaactggcaaatt

SEQ ID NO: 5168463 - DNA, 25 bp, Homo sapien
tttctttgtagtcagaaagtaactg

SEQ ID NO: 5168464 - DNA, 25 bp, Homo sapien
tctttgtagtcagaaagtaactggc

SEQ ID NO: 5168465 - DNA, 25 bp, Homo sapien
ttgacgataccgctcttctgcctct

SEQ ID NO: 5168466 - DNA, 25 bp, Homo sapien
taaatcatattgacgataccgctct

SEQ ID NO: 5168467 - DNA, 25 bp, Homo sapien
cactaaatcatattgacgataccgc

SEQ ID NO: 5168468 - DNA, 25 bp, Homo sapien
tcatattgacgataccgctcttctg

SEQ ID NO: 5168469 - DNA, 25 bp, Homo sapien
ctacaataggaggatgagtgagtag

SEQ ID NO: 5168470 - DNA, 25 bp, Homo sapien
ggatgagtgagtagggcattgccag

SEQ ID NO: 5168471 - DNA, 25 bp, Homo sapien
tgccagcagctcagtaatgccagag

SEQ ID NO: 5168472 - DNA, 25 bp, Homo sapien
gctcagtaatgccagagaaagggca

SEQ ID NO: 5168473 - DNA, 25 bp, Homo sapien
caatgctatgagaacgtcttccttg

SEQ ID NO: 5168474 - DNA, 25 bp, Homo sapien
tggctattttcactgcctttgaacc

SEQ ID NO: 5168475 - DNA, 25 bp, Homo sapien
tattttcactgcctttgaacctttg

SEQ ID NO: 5168476 - DNA, 25 bp, Homo sapien
actgcctttgaacctttgtgactct

SEQ ID NO: 5168477 - DNA, 25 bp, Homo sapien
ttcactgcctttgaacctttgtgac

SEQ ID NO: 5168478 - DNA, 25 bp, Homo sapien
ttatttctagttcttgagacatttt

SEQ ID NO: 5168479 - DNA, 25 bp, Homo sapien
ttatttatttctagttcttgagaca

SEQ ID NO: 5168480 - DNA, 25 bp, Homo sapien
tatttatttctagttcttgagacat

SEQ ID NO: 5168481 - DNA, 25 bp, Homo sapien
tttatttctagttcttgagacattt

SEQ ID NO: 5168482 - DNA, 25 bp, Homo sapien
tcactttcgttgtcaggaaattgct

SEQ ID NO: 5168483 - DNA, 25 bp, Homo sapien
cttcactttcgttgtcaggaaattg

SEQ ID NO: 5168484 - DNA, 25 bp, Homo sapien
ttcactttcgttgtcaggaaattgc

SEQ ID NO: 5168485 - DNA, 25 bp, Homo sapien
tgttttcagaagagtattttggcat

SEQ ID NO: 5168486 - DNA, 25 bp, Homo sapien
ttttcagaagagtattttggcatct

SEQ ID NO: 5168487 - DNA, 25 bp, Homo sapien
gttttcagaagagtattttggcatc

SEQ ID NO: 5168488 - DNA, 25 bp, Homo sapien
tttcagaagagtattttggcatctg

SEQ ID NO: 5168489 - DNA, 25 bp, Homo sapien
agaaggatgagtgagtagggcactg

SEQ ID NO: 5168490 - DNA, 25 bp, Homo sapien
tagggcactgccagcagttcagtaa

SEQ ID NO: 5168491 - DNA, 25 bp, Homo sapien
tgccagcagttcagtaatgccagag

SEQ ID NO: 5168492 - DNA, 25 bp, Homo sapien
taatgccagagacagggcacacagg

SEQ ID NO: 5168493 - DNA, 25 bp, Homo sapien
gctggccattttcactgcctttaag

SEQ ID NO: 5168494 - DNA, 25 bp, Homo sapien
ctctggctggccattttcactgcct

SEQ ID NO: 5168495 - DNA, 25 bp, Homo sapien
tctggctggccattttcactgcctt

SEQ ID NO: 5168496 - DNA, 25 bp, Homo sapien
tggctggccattttcactgccttta

SEQ ID NO: 5168497 - DNA, 25 bp, Homo sapien
gtcccattctgcaagatatggttct

SEQ ID NO: 5168498 - DNA, 25 bp, Homo sapien
ttgcttttatgacctggttccctcc

SEQ ID NO: 5168499 - DNA, 25 bp, Homo sapien
tgggttgcttttatgacctggttcc

SEQ ID NO: 5168500 - DNA, 25 bp, Homo sapien
gttcttgtaataggcagttgggttg

SEQ ID NO: 5168501 - DNA, 25 bp, Homo sapien
tcttttggagtgcatgtttttaaaa

SEQ ID NO: 5168502 - DNA, 25 bp, Homo sapien
ctcttttggagtgcatgtttttaaa

SEQ ID NO: 5168503 - DNA, 25 bp, Homo sapien
cttttggagtgcatgtttttaaaat

SEQ ID NO: 5168504 - DNA, 25 bp, Homo sapien
gaaggttaatttgcttgctgtattt

SEQ ID NO: 5168505 - DNA, 25 bp, Homo sapien
ctgcagatgtaaaaacagaaggtta

SEQ ID NO: 5168506 - DNA, 25 bp, Homo sapien
cagatgtaaaaacagaaggttaatt

SEQ ID NO: 5168507 - DNA, 25 bp, Homo sapien
cagaaggttaatttgcttgctgtat

SEQ ID NO: 5168508 - DNA, 25 bp, Homo sapien
ctctctatcaccatccttatttatt

SEQ ID NO: 5168509 - DNA, 25 bp, Homo sapien
tctatcaccatccttatttatttct

SEQ ID NO: 5168510 - DNA, 25 bp, Homo sapien
tctctatcaccatccttatttattt

SEQ ID NO: 5168511 - DNA, 25 bp, Homo sapien
ctatcaccatccttatttatttctg

SEQ ID NO: 5168512 - DNA, 25 bp, Homo sapien
gaaattgctggctttcaggtgttct

SEQ ID NO: 5168513 - DNA, 25 bp, Homo sapien
ggaaattgctggctttcaggtgttc

SEQ ID NO: 5168514 - DNA, 25 bp, Homo sapien
ggtggtgggaaagttgggatggcca

SEQ ID NO: 5168515 - DNA, 25 bp, Homo sapien
tgggaaagttgggatggccagaaaa

SEQ ID NO: 5168516 - DNA, 25 bp, Homo sapien
ggtgggaaagttgggatggccagaa

SEQ ID NO: 5168517 - DNA, 25 bp, Homo sapien
gaaagttgggatggccagaaaaatc

SEQ ID NO: 5168518 - DNA, 25 bp, Homo sapien
cagtatagtcttactatcggaagca

SEQ ID NO: 5168519 - DNA, 25 bp, Homo sapien
ttatttcaaataccgaaggtccata

SEQ ID NO: 5168520 - DNA, 25 bp, Homo sapien
tactatcggaagcaaaaaattccaa

SEQ ID NO: 5168521 - DNA, 25 bp, Homo sapien
ttcaaataccgaaggtccataatcc

SEQ ID NO: 5168522 - DNA, 25 bp, Homo sapien
ttttcatgaaatactggagctgtcc

SEQ ID NO: 5168523 - DNA, 25 bp, Homo sapien
taattttcatgaaatactggagctg

SEQ ID NO: 5168524 - DNA, 25 bp, Homo sapien
attttaattttcatgaaatactgga

SEQ ID NO: 5168525 - DNA, 25 bp, Homo sapien
tttaattttcatgaaatactggagc

SEQ ID NO: 5168526 - DNA, 25 bp, Homo sapien
cattttttcaaccacttctatctgc

SEQ ID NO: 5168527 - DNA, 25 bp, Homo sapien
ttgcttctgagtatcattttgttcg

SEQ ID NO: 5168528 - DNA, 25 bp, Homo sapien
tgttcttcacaaaattgcttctgag

SEQ ID NO: 5168529 - DNA, 25 bp, Homo sapien
tgaatcagaatctcatcgtgtaata

SEQ ID NO: 5168530 - DNA, 25 bp, Homo sapien
tcttagctggctctgatgtttcatt

SEQ ID NO: 5168531 - DNA, 25 bp, Homo sapien
gccgttgtcaatgacgagcacggcg

SEQ ID NO: 5168532 - DNA, 25 bp, Homo sapien
cgttgtcaatgacgagcacggcggt

SEQ ID NO: 5168533 - DNA, 25 bp, Homo sapien
agagccgttgtcaatgacgagcacg

SEQ ID NO: 5168534 - DNA, 25 bp, Homo sapien
ttgtcaatgacgagcacggcggtat

SEQ ID NO: 5168535 - DNA, 25 bp, Homo sapien
cttgcccacataggactctttctga

SEQ ID NO: 5168536 - DNA, 25 bp, Homo sapien
gaggtgtacagggacggcacggcct

SEQ ID NO: 5168537 - DNA, 25 bp, Homo sapien
ggtgtacagggacggcacggcctgg

SEQ ID NO: 5168538 - DNA, 25 bp, Homo sapien
tctttctgatgcatgccccccatca

SEQ ID NO: 5168539 - DNA, 25 bp, Homo sapien
ggcacagtgtgggtgaccccgtcac

SEQ ID NO: 5168540 - DNA, 25 bp, Homo sapien
ctaggcgcagggtggcatgggggag

SEQ ID NO: 5168541 - DNA, 25 bp, Homo sapien
catgggggagggcattcccctcata

SEQ ID NO: 5168542 - DNA, 25 bp, Homo sapien
cccctcatagatgggcacagtgtgg

SEQ ID NO: 5168543 - DNA, 25 bp, Homo sapien
catgaggtagtcaggcagttcccgc

SEQ ID NO: 5168544 - DNA, 25 bp, Homo sapien
catggtggtgaacctatagccacgc

SEQ ID NO: 5168545 - DNA, 25 bp, Homo sapien
ccgctcggccatggtggtgaaccta

SEQ ID NO: 5168546 - DNA, 25 bp, Homo sapien
ggtagtcaggcagttcccgcccagc

SEQ ID NO: 5168547 - DNA, 25 bp, Homo sapien
tggaagagcgcctcggggcagcgga

SEQ ID NO: 5168548 - DNA, 25 bp, Homo sapien
aggaagcaaggctggaagagcgcct

SEQ ID NO: 5168549 - DNA, 25 bp, Homo sapien
gcaaggctggaagagcgcctcgggg

SEQ ID NO: 5168550 - DNA, 25 bp, Homo sapien
gaagcaaggctggaagagcgcctcg

SEQ ID NO: 5168551 - DNA, 25 bp, Homo sapien
ctttgcggatgtccacatcagactt

SEQ ID NO: 5168552 - DNA, 25 bp, Homo sapien
gtgttggtgtacaggtctttgcgga

SEQ ID NO: 5168553 - DNA, 25 bp, Homo sapien
tgcggatgtccacatcagacttcat

SEQ ID NO: 5168554 - DNA, 25 bp, Homo sapien
tgttggtgtacaggtctttgcggat

SEQ ID NO: 5168555 - DNA, 25 bp, Homo sapien
cattctgtgggccatgccagggtac

SEQ ID NO: 5168556 - DNA, 25 bp, Homo sapien
cctgatcttcatcatgctaggcgcc

SEQ ID NO: 5168557 - DNA, 25 bp, Homo sapien
atgctaggcgccagggcagcgatct

SEQ ID NO: 5168558 - DNA, 25 bp, Homo sapien
cttctgcattctgtgggccatgcca

SEQ ID NO: 5168559 - DNA, 25 bp, Homo sapien
tggagccaccgacccacacggagta

SEQ ID NO: 5168560 - DNA, 25 bp, Homo sapien
aggatggagccaccgacccacacgg

SEQ ID NO: 5168561 - DNA, 25 bp, Homo sapien
caggatggagccaccgacccacacg

SEQ ID NO: 5168562 - DNA, 25 bp, Homo sapien
gatggagccaccgacccacacggag

SEQ ID NO: 5168563 - DNA, 25 bp, Homo sapien
ccaatctcatgttgttttctgagaa

SEQ ID NO: 5168564 - DNA, 25 bp, Homo sapien
aagggtgtaacgcaactaagtcaga

SEQ ID NO: 5168565 - DNA, 25 bp, Homo sapien
agccatgccaatctcatgttgtttt

SEQ ID NO: 5168566 - DNA, 25 bp, Homo sapien
tctgagaagtttggttttgtcaaga

SEQ ID NO: 5168567 - DNA, 25 bp, Homo sapien
ggtcagggactgacgtaaacaagag

SEQ ID NO: 5168568 - DNA, 25 bp, Homo sapien
tgcccatcaagtagagagcccggcc

SEQ ID NO: 5168569 - DNA, 25 bp, Homo sapien
tggtcagggactgacgtaaacaaga

SEQ ID NO: 5168570 - DNA, 25 bp, Homo sapien
gcccggccacttttctgtagggctg

SEQ ID NO: 5168571 - DNA, 25 bp, Homo sapien
gtaaggaggaattaaaagcagctga

SEQ ID NO: 5168572 - DNA, 25 bp, Homo sapien
gaacattcctttggatttgaccaag

SEQ ID NO: 5168573 - DNA, 25 bp, Homo sapien
tttgcagccacaggagttttagcca

SEQ ID NO: 5168574 - DNA, 25 bp, Homo sapien
tgccttgctccccacaatttggaac

SEQ ID NO: 5168575 - DNA, 25 bp, Homo sapien
tggtccaggtgcacccttgtagagg

SEQ ID NO: 5168576 - DNA, 25 bp, Homo sapien
ccaggtgcacccttgtagaggtggc

SEQ ID NO: 5168577 - DNA, 25 bp, Homo sapien
tccaactggtccaggtgcacccttg

SEQ ID NO: 5168578 - DNA, 25 bp, Homo sapien
gctggtccaactggtccaggtgcac

SEQ ID NO: 5168579 - DNA, 25 bp, Homo sapien
gcggccggacatggtacatcagttc

SEQ ID NO: 5168580 - DNA, 25 bp, Homo sapien
tagcggccggacatggtacatcagt

SEQ ID NO: 5168581 - DNA, 25 bp, Homo sapien
ccactagcggccggacatggtacat

SEQ ID NO: 5168582 - DNA, 25 bp, Homo sapien
ctagcggccggacatggtacatcag

SEQ ID NO: 5168583 - DNA, 25 bp, Homo sapien
tccaactggtccaggtgcacccttg

SEQ ID NO: 5168584 - DNA, 25 bp, Homo sapien
tggtccaggtgcacccttgtagagg

SEQ ID NO: 5168585 - DNA, 25 bp, Homo sapien
ccaggtgcacccttgtagaggtggc

SEQ ID NO: 5168586 - DNA, 25 bp, Homo sapien
gctggtccaactggtccaggtgcac

SEQ ID NO: 5168587 - DNA, 25 bp, Homo sapien
ccactagcggccggacatggtacat

SEQ ID NO: 5168588 - DNA, 25 bp, Homo sapien
gcggccggacatggtacatcagttc

SEQ ID NO: 5168589 - DNA, 25 bp, Homo sapien
tagcggccggacatggtacatcagt

SEQ ID NO: 5168590 - DNA, 25 bp, Homo sapien
ctagcggccggacatggtacatcag

SEQ ID NO: 5168591 - DNA, 25 bp, Homo sapien
gccttattgaattttcgccctgaaa

SEQ ID NO: 5168592 - DNA, 25 bp, Homo sapien
ttttcgccctgaaaatcagcttttc

SEQ ID NO: 5168593 - DNA, 25 bp, Homo sapien
actctaagccttattgaattttcgc

SEQ ID NO: 5168594 - DNA, 25 bp, Homo sapien
ttgaccacttgactaggctgcaaat

SEQ ID NO: 5168595 - DNA, 25 bp, Homo sapien
ggaatgttgtcaggtcccagacacc

SEQ ID NO: 5168596 - DNA, 25 bp, Homo sapien
tctaagccagtcgaggcagagctga

SEQ ID NO: 5168597 - DNA, 25 bp, Homo sapien
cagtgtactgggcacgtctgaggcc

SEQ ID NO: 5168598 - DNA, 25 bp, Homo sapien
aggctcactggaccctggacgtgtg

SEQ ID NO: 5168599 - DNA, 25 bp, Homo sapien
aaccacctcaaggataaagtcttgg

SEQ ID NO: 5168600 - DNA, 25 bp, Homo sapien
tcttgggatcgggtttgccaggaac

SEQ ID NO: 5168601 - DNA, 25 bp, Homo sapien
cctgagccacaaccgcagttctggg

SEQ ID NO: 5168602 - DNA, 25 bp, Homo sapien
ccacaaccgcagttctgggtttggg

SEQ ID NO: 5168603 - DNA, 25 bp, Homo sapien
caaagactgaatgagtgtccagcat

SEQ ID NO: 5168604 - DNA, 25 bp, Homo sapien
taggtctacctagtaccaggcctcc

SEQ ID NO: 5168605 - DNA, 25 bp, Homo sapien
gaatgagtgtccagcatcaggaact

SEQ ID NO: 5168606 - DNA, 25 bp, Homo sapien
ttaggtctacctagtaccaggcctc

SEQ ID NO: 5168607 - DNA, 25 bp, Homo sapien
gtctagcaccacacctgaaagggga

SEQ ID NO: 5168608 - DNA, 25 bp, Homo sapien
aaggggactcccttgtacagcagcc

SEQ ID NO: 5168609 - DNA, 25 bp, Homo sapien
gggactcccttgtacagcagcccag

SEQ ID NO: 5168610 - DNA, 25 bp, Homo sapien
ctagcaccacacctgaaaggggact

SEQ ID NO: 5168611 - DNA, 25 bp, Homo sapien
tggtttctaccacctagacatccag

SEQ ID NO: 5168612 - DNA, 25 bp, Homo sapien
gtttctaccacctagacatccagca

SEQ ID NO: 5168613 - DNA, 25 bp, Homo sapien
ggtttctaccacctagacatccagc

SEQ ID NO: 5168614 - DNA, 25 bp, Homo sapien
tttctaccacctagacatccagcag

SEQ ID NO: 5168615 - DNA, 25 bp, Homo sapien
ctgtggtgtctacattaccatctgt

SEQ ID NO: 5168616 - DNA, 25 bp, Homo sapien
gaggaaaggaggtttcattccacac

SEQ ID NO: 5168617 - DNA, 25 bp, Homo sapien
gggctcactgccacaaatggcaacc

SEQ ID NO: 5168618 - DNA, 25 bp, Homo sapien
tcagaacaaacaagggctcactgcc

SEQ ID NO: 5168619 - DNA, 25 bp, Homo sapien
cttgtttggtttctttctgaatccg

SEQ ID NO: 5168620 - DNA, 25 bp, Homo sapien
gccaagaggagaaaccagcccaacc

SEQ ID NO: 5168621 - DNA, 25 bp, Homo sapien
ggcagggccaagaggagaaaccagc

SEQ ID NO: 5168622 - DNA, 25 bp, Homo sapien
tagggcagggccaagaggagaaacc

SEQ ID NO: 5168623 - DNA, 25 bp, Homo sapien
gggccaagaggagaaaccagcccaa

SEQ ID NO: 5168624 - DNA, 25 bp, Homo sapien
tgctggggacgtcttgctgttctcc

SEQ ID NO: 5168625 - DNA, 25 bp, Homo sapien
ttgctggggacgtcttgctgttctc

SEQ ID NO: 5168626 - DNA, 25 bp, Homo sapien
aaggtgacttatttccaaggccatc

SEQ ID NO: 5168627 - DNA, 25 bp, Homo sapien
ttccaaggccatctgtggatgtttg

SEQ ID NO: 5168628 - DNA, 25 bp, Homo sapien
tcccagaacatgacatgtttctcac

SEQ ID NO: 5168629 - DNA, 25 bp, Homo sapien
ttatccctcccagaacatgacatgt

SEQ ID NO: 5168630 - DNA, 25 bp, Homo sapien
gccttatccctcccagaacatgaca

SEQ ID NO: 5168631 - DNA, 25 bp, Homo sapien
ttgatgccttatccctcccagaaca

SEQ ID NO: 5168632 - DNA, 25 bp, Homo sapien
cgccgttacactatgagggtactga

SEQ ID NO: 5168633 - DNA, 25 bp, Homo sapien
gacgccgttacactatgagggtact

SEQ ID NO: 5168634 - DNA, 25 bp, Homo sapien
tgacgccgttacactatgagggtac

SEQ ID NO: 5168635 - DNA, 25 bp, Homo sapien
ctgacgccgttacactatgagggta

SEQ ID NO: 5168636 - DNA, 25 bp, Homo sapien
tgaagttgtgcaccaagtcacaggc

SEQ ID NO: 5168637 - DNA, 25 bp, Homo sapien
gaagttgtgcaccaagtcacaggcc

SEQ ID NO: 5168638 - DNA, 25 bp, Homo sapien
ctgaagttgtgcaccaagtcacagg

SEQ ID NO: 5168639 - DNA, 25 bp, Homo sapien
aagcgcatcaatgaagtccgaagcc

SEQ ID NO: 5168640 - DNA, 25 bp, Homo sapien
caagcgcatcaatgaagtccgaagc

SEQ ID NO: 5168641 - DNA, 25 bp, Homo sapien
cgcatcaatgaagtccgaagccttg

SEQ ID NO: 5168642 - DNA, 25 bp, Homo sapien
gcgcatcaatgaagtccgaagcctt

SEQ ID NO: 5168643 - DNA, 25 bp, Homo sapien
ttgatctcaagctccattctacctc

SEQ ID NO: 5168644 - DNA, 25 bp, Homo sapien
acttgatctcaagctccattctacc

SEQ ID NO: 5168645 - DNA, 25 bp, Homo sapien
cagacacttgatctcaagctccatt

SEQ ID NO: 5168646 - DNA, 25 bp, Homo sapien
cttgatcagacacttgatctcaagc

SEQ ID NO: 5168647 - DNA, 25 bp, Homo sapien
tctcgaaaacatagctgactgtcac

SEQ ID NO: 5168648 - DNA, 25 bp, Homo sapien
agtcatctcgaaaacatagctgact

SEQ ID NO: 5168649 - DNA, 25 bp, Homo sapien
tcatctcgaaaacatagctgactgt

SEQ ID NO: 5168650 - DNA, 25 bp, Homo sapien
gaaaacatagctgactgtcactcct

SEQ ID NO: 5168651 - DNA, 25 bp, Homo sapien
ttcaggattaggactcttgcatcac

SEQ ID NO: 5168652 - DNA, 25 bp, Homo sapien
agaggatgaacagcgcccatacact

SEQ ID NO: 5168653 - DNA, 25 bp, Homo sapien
agcactcccgatgtctgggtgtttt

SEQ ID NO: 5168654 - DNA, 25 bp, Homo sapien
gcagcactcccgatgtctgggtgtt

SEQ ID NO: 5168655 - DNA, 25 bp, Homo sapien
ttggtaaaaacagcacaacgacagg

SEQ ID NO: 5168656 - DNA, 25 bp, Homo sapien
ttttggtaaaaacagcacaacgaca

SEQ ID NO: 5168657 - DNA, 25 bp, Homo sapien
tggtaaaaacagcacaacgacaggt

SEQ ID NO: 5168658 - DNA, 25 bp, Homo sapien
tttggtaaaaacagcacaacgacag

SEQ ID NO: 5168659 - DNA, 25 bp, Homo sapien
agacagcccacggtcaaagttgaac

SEQ ID NO: 5168660 - DNA, 25 bp, Homo sapien
gccagacagcccacggtcaaagttg

SEQ ID NO: 5168661 - DNA, 25 bp, Homo sapien
gggccagacagcccacggtcaaagt

SEQ ID NO: 5168662 - DNA, 25 bp, Homo sapien
gacagcccacggtcaaagttgaact

SEQ ID NO: 5168663 - DNA, 25 bp, Homo sapien
caatgtgttctatagcaggaagtca

SEQ ID NO: 5168664 - DNA, 25 bp, Homo sapien
caggtccggcacaatggcttatgcc

SEQ ID NO: 5168665 - DNA, 25 bp, Homo sapien
tagagtcagctttcaccattcccct

SEQ ID NO: 5168666 - DNA, 25 bp, Homo sapien
gaagtcaagactactgtccaaggtc

SEQ ID NO: 5168667 - DNA, 25 bp, Homo sapien
tctccaatccgcttgggagtgatct

SEQ ID NO: 5168668 - DNA, 25 bp, Homo sapien
attgggacaatctccaatccgcttg

SEQ ID NO: 5168669 - DNA, 25 bp, Homo sapien
gggacaatctccaatccgcttggga

SEQ ID NO: 5168670 - DNA, 25 bp, Homo sapien
aatccgcttgggagtgatctcgtca

SEQ ID NO: 5168671 - DNA, 25 bp, Homo sapien
aatgggttaatatttgattggctgc

SEQ ID NO: 5168672 - DNA, 25 bp, Homo sapien
atgggttaatatttgattggctgca

SEQ ID NO: 5168673 - DNA, 25 bp, Homo sapien
tgggttaatatttgattggctgcac

SEQ ID NO: 5168674 - DNA, 25 bp, Homo sapien
taattcagtatgattaagatcccaa

SEQ ID NO: 5168675 - DNA, 25 bp, Homo sapien
gatcccaaagatcaatggcaaagcg

SEQ ID NO: 5168676 - DNA, 25 bp, Homo sapien
tctttggaacatctgccgtctaatc

SEQ ID NO: 5168677 - DNA, 25 bp, Homo sapien
aaacaagggcactgagactccagcc

SEQ ID NO: 5168678 - DNA, 25 bp, Homo sapien
ataatgagtcggctacatccattta

SEQ ID NO: 5168679 - DNA, 25 bp, Homo sapien
gcaataatgagtcggctacatccat

SEQ ID NO: 5168680 - DNA, 25 bp, Homo sapien
atgagtcggctacatccatttagat

SEQ ID NO: 5168681 - DNA, 25 bp, Homo sapien
cgcaataatgagtcggctacatcca

SEQ ID NO: 5168682 - DNA, 25 bp, Homo sapien
tacattacagttacttcttcatccc

SEQ ID NO: 5168683 - DNA, 25 bp, Homo sapien
ttactattcctccactacattacag

SEQ ID NO: 5168684 - DNA, 25 bp, Homo sapien
gctaagccagcactaagaattttct

SEQ ID NO: 5168685 - DNA, 25 bp, Homo sapien
ccatattataaccagaataattgaa

SEQ ID NO: 5168686 - DNA, 25 bp, Homo sapien
tctacctcgacgacgaagacggtgc

SEQ ID NO: 5168687 - DNA, 25 bp, Homo sapien
tctttagtctcttaggcggtggccg

SEQ ID NO: 5168688 - DNA, 25 bp, Homo sapien
tggaagcgtgctcactcagacaagc

SEQ ID NO: 5168689 - DNA, 25 bp, Homo sapien
tacggccagacctacagcaagaatt

SEQ ID NO: 5168690 - DNA, 25 bp, Homo sapien
ctgcagcttcatgcatgcgaggtcc

SEQ ID NO: 5168691 - DNA, 25 bp, Homo sapien
gcagcttcatgcatgcgaggtcccg

SEQ ID NO: 5168692 - DNA, 25 bp, Homo sapien
tctcaaacactagggcgccccgggc

SEQ ID NO: 5168693 - DNA, 25 bp, Homo sapien
cctctcaaacactagggcgccccgg

SEQ ID NO: 5168694 - DNA, 25 bp, Homo sapien
cctgctcaaccgctttcaactggtg

SEQ ID NO: 5168695 - DNA, 25 bp, Homo sapien
gctcaaccgctttcaactggtgctg

SEQ ID NO: 5168696 - DNA, 25 bp, Homo sapien
accgctttcaactggtgctgcccag

SEQ ID NO: 5168697 - DNA, 25 bp, Homo sapien
aagcccagcaccctgaagcagatgg

SEQ ID NO: 5168698 - DNA, 25 bp, Homo sapien
acattattgaaaaggcgttgccggc

SEQ ID NO: 5168699 - DNA, 25 bp, Homo sapien
gctctgccggatcaatgtggacttc

SEQ ID NO: 5168700 - DNA, 25 bp, Homo sapien
taatgaaaaccgctttgggatcacg

SEQ ID NO: 5168701 - DNA, 25 bp, Homo sapien
gcctcagtgtgagctgtgaacccca

SEQ ID NO: 5168702 - DNA, 25 bp, Homo sapien
ctcgtgttcctcacgttcctttagg

SEQ ID NO: 5168703 - DNA, 25 bp, Homo sapien
actcgtgttcctcacgttcctttag

SEQ ID NO: 5168704 - DNA, 25 bp, Homo sapien
tttcttgaactactcgtgttcctca

SEQ ID NO: 5168705 - DNA, 25 bp, Homo sapien
ccatcctacagctagtgggagactg

SEQ ID NO: 5168706 - DNA, 25 bp, Homo sapien
ggagactgacggctgtatcacctgg

SEQ ID NO: 5168707 - DNA, 25 bp, Homo sapien
catcctacagctagtgggagactga

SEQ ID NO: 5168708 - DNA, 25 bp, Homo sapien
tgggagactgacggctgtatcacct

SEQ ID NO: 5168709 - DNA, 25 bp, Homo sapien
tccccacacatagtgattgaacact

SEQ ID NO: 5168710 - DNA, 25 bp, Homo sapien
cccacacatagtgattgaacacttt

SEQ ID NO: 5168711 - DNA, 25 bp, Homo sapien
ttccccacacatagtgattgaacac

SEQ ID NO: 5168712 - DNA, 25 bp, Homo sapien
cttccccacacatagtgattgaaca

SEQ ID NO: 5168713 - DNA, 25 bp, Homo sapien
gtagtagactaacattgacttaggt

SEQ ID NO: 5168714 - DNA, 25 bp, Homo sapien
gattgaggttaccagatgtacagta

SEQ ID NO: 5168715 - DNA, 25 bp, Homo sapien
ctcggttgcagggattgaggttacc

SEQ ID NO: 5168716 - DNA, 25 bp, Homo sapien
ggttaccagatgtacagtagtagac

SEQ ID NO: 5168717 - DNA, 25 bp, Homo sapien
ttggaatatgaagagctagtggtac

SEQ ID NO: 5168718 - DNA, 25 bp, Homo sapien
cattggaatatgaagagctagtggt

SEQ ID NO: 5168719 - DNA, 25 bp, Homo sapien
attggaatatgaagagctagtggta

SEQ ID NO: 5168720 - DNA, 25 bp, Homo sapien
gatggcattccagtactgggttgtg

SEQ ID NO: 5168721 - DNA, 25 bp, Homo sapien
tggctgatggcattccagtactggg

SEQ ID NO: 5168722 - DNA, 25 bp, Homo sapien
tggcattccagtactgggttgtgaa

SEQ ID NO: 5168723 - DNA, 25 bp, Homo sapien
gctgatggcattccagtactgggtt

SEQ ID NO: 5168724 - DNA, 25 bp, Homo sapien
cgtgtctttatttaatagtcccata

SEQ ID NO: 5168725 - DNA, 25 bp, Homo sapien
ctggcacgcacaagttccagcacag

SEQ ID NO: 5168726 - DNA, 25 bp, Homo sapien
gcacgcacaagttccagcacagcaa

SEQ ID NO: 5168727 - DNA, 25 bp, Homo sapien
gtctttatttaatagtcccatacaa

SEQ ID NO: 5168728 - DNA, 25 bp, Homo sapien
agaggtggctgattgctctttcacc

SEQ ID NO: 5168729 - DNA, 25 bp, Homo sapien
gcaggaggtggcaggttgcagaggt

SEQ ID NO: 5168730 - DNA, 25 bp, Homo sapien
aggaggtggcaggttgcagaggtgg

SEQ ID NO: 5168731 - DNA, 25 bp, Homo sapien
gctctttcacccagcttggccttgt

SEQ ID NO: 5168732 - DNA, 25 bp, Homo sapien
gtgagtagacttatgccctggtgcc

SEQ ID NO: 5168733 - DNA, 25 bp, Homo sapien
caaacagatataagtgagtagactt

SEQ ID NO: 5168734 - DNA, 25 bp, Homo sapien
gatataagtgagtagacttatgccc

SEQ ID NO: 5168735 - DNA, 25 bp, Homo sapien
taagtgagtagacttatgccctggt

SEQ ID NO: 5168736 - DNA, 25 bp, Homo sapien
tttcaagtgaaagctttagatcttt

SEQ ID NO: 5168737 - DNA, 25 bp, Homo sapien
tcaagtgaaagctttagatctttga

SEQ ID NO: 5168738 - DNA, 25 bp, Homo sapien
caagtgaaagctttagatctttgaa

SEQ ID NO: 5168739 - DNA, 25 bp, Homo sapien
aagtgaaagctttagatctttgaaa

SEQ ID NO: 5168740 - DNA, 25 bp, Homo sapien
tggcagtgatgttaagttgcacagc

SEQ ID NO: 5168741 - DNA, 25 bp, Homo sapien
gcagtgatgttaagttgcacagcat

SEQ ID NO: 5168742 - DNA, 25 bp, Homo sapien
agtgatgttaagttgcacagcatgt

SEQ ID NO: 5168743 - DNA, 25 bp, Homo sapien
ggtggcagtgatgttaagttgcaca

SEQ ID NO: 5168744 - DNA, 25 bp, Homo sapien
aacttcatcgatgtgcttcaggtta

SEQ ID NO: 5168745 - DNA, 25 bp, Homo sapien
acttcatcgatgtgcttcaggttac

SEQ ID NO: 5168746 - DNA, 25 bp, Homo sapien
tactcacacctggatccctttattt

SEQ ID NO: 5168747 - DNA, 25 bp, Homo sapien
tcacacctggatccctttatttgac

SEQ ID NO: 5168748 - DNA, 25 bp, Homo sapien
acacctggatccctttatttgacga

SEQ ID NO: 5168749 - DNA, 25 bp, Homo sapien
cacctggatccctttatttgacgaa

SEQ ID NO: 5168750 - DNA, 25 bp, Homo sapien
catgattatagtggagcagctgccc

SEQ ID NO: 5168751 - DNA, 25 bp, Homo sapien
aagcctttcatgattatagtggagc

SEQ ID NO: 5168752 - DNA, 25 bp, Homo sapien
cctttcatgattatagtggagcagc

SEQ ID NO: 5168753 - DNA, 25 bp, Homo sapien
tcaagtgaagcaaaagcctttcatg

SEQ ID NO: 5168754 - DNA, 25 bp, Homo sapien
cagaccttcttatcggagattcgct

SEQ ID NO: 5168755 - DNA, 25 bp, Homo sapien
acagaccttcttatcggagattcgc

SEQ ID NO: 5168756 - DNA, 25 bp, Homo sapien
tgctaggagagcgccagccagcgag

SEQ ID NO: 5168757 - DNA, 25 bp, Homo sapien
cagagggccgcgcaagcggaaccgg

SEQ ID NO: 5168758 - DNA, 25 bp, Homo sapien
gacacatgaggccagcgccggcggc

SEQ ID NO: 5168759 - DNA, 25 bp, Homo sapien
gcgcaagcggaaccgggcgagcacg

SEQ ID NO: 5168760 - DNA, 25 bp, Homo sapien
caaatatccatcagccatagactgg

SEQ ID NO: 5168761 - DNA, 25 bp, Homo sapien
tcaaagcatgcatgagctctttgct

SEQ ID NO: 5168762 - DNA, 25 bp, Homo sapien
ctgttcaaagcatgcatgagctctt

SEQ ID NO: 5168763 - DNA, 25 bp, Homo sapien
ttcaaagcatgcatgagctctttgc

SEQ ID NO: 5168764 - DNA, 25 bp, Homo sapien
tgttcaaagcatgcatgagctcttt

SEQ ID NO: 5168765 - DNA, 25 bp, Homo sapien
aaagggtcgtgccacgtcgctccca

SEQ ID NO: 5168766 - DNA, 25 bp, Homo sapien
tgggaaagggtcgtgccacgtcgct

SEQ ID NO: 5168767 - DNA, 25 bp, Homo sapien
gtcgtgccacgtcgctcccacagtg

SEQ ID NO: 5168768 - DNA, 25 bp, Homo sapien
ggtcgtgccacgtcgctcccacagt

SEQ ID NO: 5168769 - DNA, 25 bp, Homo sapien
cacccttaaacataccccaataatg

SEQ ID NO: 5168770 - DNA, 25 bp, Homo sapien
cccttaaacataccccaataatgag

SEQ ID NO: 5168771 - DNA, 25 bp, Homo sapien
tgatgatgtcagaacagaaggagga

SEQ ID NO: 5168772 - DNA, 25 bp, Homo sapien
atcttgctgacaagaggcaagtgtc

SEQ ID NO: 5168773 - DNA, 25 bp, Homo sapien
ccaaagggctgaatgttacgtttat

SEQ ID NO: 5168774 - DNA, 25 bp, Homo sapien
gatgttatcatcacgctagtaggaa

SEQ ID NO: 5168775 - DNA, 25 bp, Homo sapien
ggccaggacagtgctaagggtgact

SEQ ID NO: 5168776 - DNA, 25 bp, Homo sapien
ggacagtgctaagggtgactgtggc

SEQ ID NO: 5168777 - DNA, 25 bp, Homo sapien
agggccaggacagtgctaagggtga

SEQ ID NO: 5168778 - DNA, 25 bp, Homo sapien
ccaggacagtgctaagggtgactgt

SEQ ID NO: 5168779 - DNA, 25 bp, Homo sapien
gactaatgataagaaaaaccattgt

SEQ ID NO: 5168780 - DNA, 25 bp, Homo sapien
ccacacggattataaccatgactaa

SEQ ID NO: 5168781 - DNA, 25 bp, Homo sapien
ttcccacacggattataaccatgac

SEQ ID NO: 5168782 - DNA, 25 bp, Homo sapien
tattcccacacggattataaccatg

SEQ ID NO: 5168783 - DNA, 25 bp, Homo sapien
aatcccataacctctatgaccttct

SEQ ID NO: 5168784 - DNA, 25 bp, Homo sapien
agggaatcgaaccccccagagactg

SEQ ID NO: 5168785 - DNA, 25 bp, Homo sapien
ccataacctctatgaccttctcaat

SEQ ID NO: 5168786 - DNA, 25 bp, Homo sapien
tcccataacctctatgaccttctca

SEQ ID NO: 5168787 - DNA, 25 bp, Homo sapien
tgttttcagattacagtctaatgct

SEQ ID NO: 5168788 - DNA, 25 bp, Homo sapien
ttgacctctgttttcagattacagt

SEQ ID NO: 5168789 - DNA, 25 bp, Homo sapien
cctctgttttcagattacagtctaa

SEQ ID NO: 5168790 - DNA, 25 bp, Homo sapien
tgacctctgttttcagattacagtc

SEQ ID NO: 5168791 - DNA, 25 bp, Homo sapien
ccctagcaagattgaagctgcttgt

SEQ ID NO: 5168792 - DNA, 25 bp, Homo sapien
gccctagcaagattgaagctgcttg

SEQ ID NO: 5168793 - DNA, 25 bp, Homo sapien
ccctaatcaactggcttcaatctac

SEQ ID NO: 5168794 - DNA, 25 bp, Homo sapien
caccctaatcaactggcttcaatct

SEQ ID NO: 5168795 - DNA, 25 bp, Homo sapien
taattaacagctaaacaccctaatc

SEQ ID NO: 5168796 - DNA, 25 bp, Homo sapien
aacaccctaatcaactggcttcaat

SEQ ID NO: 5168797 - DNA, 25 bp, Homo sapien
ctgcaaaattctactctgtatcaat

SEQ ID NO: 5168798 - DNA, 25 bp, Homo sapien
ggactgcaaaattctactctgtatc

SEQ ID NO: 5168799 - DNA, 25 bp, Homo sapien
caaaattctactctgtatcaattga

SEQ ID NO: 5168800 - DNA, 25 bp, Homo sapien
taaggactgcaaaattctactctgt

SEQ ID NO: 5168801 - DNA, 25 bp, Homo sapien
caaaattctccgtgctacctatcac

SEQ ID NO: 5168802 - DNA, 25 bp, Homo sapien
agaactacaggaattgaacccatcc

SEQ ID NO: 5168803 - DNA, 25 bp, Homo sapien
ctagaactacaggaattgaacccat

SEQ ID NO: 5168804 - DNA, 25 bp, Homo sapien
ccgtgctacctatcacaccacgtcc

SEQ ID NO: 5168805 - DNA, 25 bp, Homo sapien
gcaaaaagcttcataggaccgaaaa

SEQ ID NO: 5168806 - DNA, 25 bp, Homo sapien
tctattctatggaagagtgtgtaca

SEQ ID NO: 5168807 - DNA, 25 bp, Homo sapien
caaaactggcctaggaaacagcaca

SEQ ID NO: 5168808 - DNA, 25 bp, Homo sapien
tatgatgaaggcagtattgttgtgt

SEQ ID NO: 5168809 - DNA, 25 bp, Homo sapien
cgatttgtgacggacagtggattct

SEQ ID NO: 5168810 - DNA, 25 bp, Homo sapien
ctgcagcggagcaccacgtctctga

SEQ ID NO: 5168811 - DNA, 25 bp, Homo sapien
gcaccacgtctctgaaactgagctg

SEQ ID NO: 5168812 - DNA, 25 bp, Homo sapien
actgagctggcggaccgtcgatttg

SEQ ID NO: 5168813 - DNA, 25 bp, Homo sapien
ccctgccagggtgcacacaggaatg

SEQ ID NO: 5168814 - DNA, 25 bp, Homo sapien
cccaagagtgagtaactgaatttcc

SEQ ID NO: 5168815 - DNA, 25 bp, Homo sapien
ggaatggtctggaatccttctgctc

SEQ ID NO: 5168816 - DNA, 25 bp, Homo sapien
gggtgcacacaggaatggtctggaa

SEQ ID NO: 5168817 - DNA, 25 bp, Homo sapien
tgtggcaacgctatctcaggaagag

SEQ ID NO: 5168818 - DNA, 25 bp, Homo sapien
tcttcaggcggtgagtgcaccaacc

SEQ ID NO: 5168819 - DNA, 25 bp, Homo sapien
aaaggagaccatcaggagagccctg

SEQ ID NO: 5168820 - DNA, 25 bp, Homo sapien
aagtaggcagtgttcacccaggcag

SEQ ID NO: 5168821 - DNA, 25 bp, Homo sapien
cctgaaatctaggaaacgtagagtc

SEQ ID NO: 5168822 - DNA, 25 bp, Homo sapien
tgaaatctaggaaacgtagagtcac

SEQ ID NO: 5168823 - DNA, 25 bp, Homo sapien
ccctgaaatctaggaaacgtagagt

SEQ ID NO: 5168824 - DNA, 25 bp, Homo sapien
aaatctaggaaacgtagagtcactg

SEQ ID NO: 5168825 - DNA, 25 bp, Homo sapien
taagtaccgcttgccagaatcgctg

SEQ ID NO: 5168826 - DNA, 25 bp, Homo sapien
aataacgctcaaggcaatggctccc

SEQ ID NO: 5168827 - DNA, 25 bp, Homo sapien
tttccttagcaaacgggtgatctca

SEQ ID NO: 5168828 - DNA, 25 bp, Homo sapien
ggtgacattagaaaaccatctggga

SEQ ID NO: 5168829 - DNA, 25 bp, Homo sapien
tatcagagcacaatggatgtccacc

SEQ ID NO: 5168830 - DNA, 25 bp, Homo sapien
tcacctgggtcctcggagaagcaaa

SEQ ID NO: 5168831 - DNA, 25 bp, Homo sapien
cagagtgcagggatataacagaacc

SEQ ID NO: 5168832 - DNA, 25 bp, Homo sapien
caagacatgccagggtaagacaggt

SEQ ID NO: 5168833 - DNA, 25 bp, Homo sapien
tcccagaatatgatggaccccagag

SEQ ID NO: 5168834 - DNA, 25 bp, Homo sapien
cagacaatgagaaccgaatggagga

SEQ ID NO: 5168835 - DNA, 25 bp, Homo sapien
gaagatgttcgtggacctgaaccca

SEQ ID NO: 5168836 - DNA, 25 bp, Homo sapien
aattatcacgtatccctggttccag

SEQ ID NO: 5168837 - DNA, 25 bp, Homo sapien
gtgcttagagttcgagtccccacca

SEQ ID NO: 5168838 - DNA, 25 bp, Homo sapien
accacagggatcgtcgaatacccct

SEQ ID NO: 5168839 - DNA, 25 bp, Homo sapien
tacccctttgacttacaaagtgtca

SEQ ID NO: 5168840 - DNA, 25 bp, Homo sapien
atgtgcttagagttcgagtccccac

SEQ ID NO: 5168841 - DNA, 25 bp, Homo sapien
acgacgagatcgagcggcagctccg

SEQ ID NO: 5168842 - DNA, 25 bp, Homo sapien
catcatggcgtgctgcctgagcgag

SEQ ID NO: 5168843 - DNA, 25 bp, Homo sapien
aagcccggcggatcaacgacgagat

SEQ ID NO: 5168844 - DNA, 25 bp, Homo sapien
ggcagctccgcagggacaagcggga

SEQ ID NO: 5168845 - DNA, 25 bp, Homo sapien
acaccccggtggatgagttctcgct

SEQ ID NO: 5168846 - DNA, 25 bp, Homo sapien
ccggtggatgagttctcgctgccag

SEQ ID NO: 5168847 - DNA, 25 bp, Homo sapien
agcgggcgcggggagccttcagcgg

SEQ ID NO: 5168848 - DNA, 25 bp, Homo sapien
accccggtggatgagttctcgctgc

SEQ ID NO: 5168849 - DNA, 25 bp, Homo sapien
gcccgccggcctccgggcatggtcc

SEQ ID NO: 5168850 - DNA, 25 bp, Homo sapien
ccgaccggccccatccagcggctcc

SEQ ID NO: 5168851 - DNA, 25 bp, Homo sapien
cgtcgccgccgctctgcgccgcagg

SEQ ID NO: 5168852 - DNA, 25 bp, Homo sapien
aggcccgtgagccatgctgctgccc

SEQ ID NO: 5168853 - DNA, 25 bp, Homo sapien
ttcgttggcatagctcatgagtggg

SEQ ID NO: 5168854 - DNA, 25 bp, Homo sapien
gcttcgttggcatagctcatgagtg

SEQ ID NO: 5168855 - DNA, 25 bp, Homo sapien
aggcttcgttggcatagctcatgag

SEQ ID NO: 5168856 - DNA, 25 bp, Homo sapien
tccgggaaggcttcgttggcatagc

SEQ ID NO: 5168857 - DNA, 25 bp, Homo sapien
tgacgctgactacgtagtggtcgaa

SEQ ID NO: 5168858 - DNA, 25 bp, Homo sapien
gtggtcgaagacggtgggcaggtac

SEQ ID NO: 5168859 - DNA, 25 bp, Homo sapien
tagtggtcgaagacggtgggcaggt

SEQ ID NO: 5168860 - DNA, 25 bp, Homo sapien
ggtgacgctgactacgtagtggtcg

SEQ ID NO: 5168861 - DNA, 25 bp, Homo sapien
gcagaaatgtgtatggtcaaagcca

SEQ ID NO: 5168862 - DNA, 25 bp, Homo sapien
tgtgtatggtcaaagccaagcagtt

SEQ ID NO: 5168863 - DNA, 25 bp, Homo sapien
caagcagttccatttacagctctgt

SEQ ID NO: 5168864 - DNA, 25 bp, Homo sapien
ctgagagattgtaccttctagttga

SEQ ID NO: 5168865 - DNA, 25 bp, Homo sapien
ttaggttacacttgtgctcaagtaa

SEQ ID NO: 5168866 - DNA, 25 bp, Homo sapien
ttctctcctcaggtatggcccatct

SEQ ID NO: 5168867 - DNA, 25 bp, Homo sapien
ttttttgatctcatacattctctcc

SEQ ID NO: 5168868 - DNA, 25 bp, Homo sapien
atttaggttacacttgtgctcaagt

SEQ ID NO: 5168869 - DNA, 25 bp, Homo sapien
catgatactttaatgtgaaccacca

SEQ ID NO: 5168870 - DNA, 25 bp, Homo sapien
gattccatttgagcatacataaggc

SEQ ID NO: 5168871 - DNA, 25 bp, Homo sapien
cacatacaacaagacagtacatcct

SEQ ID NO: 5168872 - DNA, 25 bp, Homo sapien
gagaaagttcctggccagtcatcca

SEQ ID NO: 5168873 - DNA, 25 bp, Homo sapien
ccagctcatcaccaggatgcagcat

SEQ ID NO: 5168874 - DNA, 25 bp, Homo sapien
cccagctcatcaccaggatgcagca

SEQ ID NO: 5168875 - DNA, 25 bp, Homo sapien
ccccagctcatcaccaggatgcagc

SEQ ID NO: 5168876 - DNA, 25 bp, Homo sapien
tctctgattggatgtaggattggcg

SEQ ID NO: 5168877 - DNA, 25 bp, Homo sapien
gggttggaacagctactgcgctgcc

SEQ ID NO: 5168878 - DNA, 25 bp, Homo sapien
ggccgccattggctcggagttcctg

SEQ ID NO: 5168879 - DNA, 25 bp, Homo sapien
ggtcatcaaaggctgcgcggttgct

SEQ ID NO: 5168880 - DNA, 25 bp, Homo sapien
gcttcagcccaacgctactgccaga

SEQ ID NO: 5168881 - DNA, 25 bp, Homo sapien
ctgcttcagcccaacgctactgcca

SEQ ID NO: 5168882 - DNA, 25 bp, Homo sapien
cgctgcttcagcccaacgctactgc

SEQ ID NO: 5168883 - DNA, 25 bp, Homo sapien
ggcgaactccgctgcttcagcccaa

SEQ ID NO: 5168884 - DNA, 25 bp, Homo sapien
gaggccaacttcgtctgcctgggca

SEQ ID NO: 5168885 - DNA, 25 bp, Homo sapien
aggcccgcaacaacgtccctctgtc

SEQ ID NO: 5168886 - DNA, 25 bp, Homo sapien
ggaaacgatcccgtgtcctcctgtc

SEQ ID NO: 5168887 - DNA, 25 bp, Homo sapien
gcactagaccctgcgtccttctctg

SEQ ID NO: 5168888 - DNA, 25 bp, Homo sapien
tggcatttggccatcgggctgaatt

SEQ ID NO: 5168889 - DNA, 25 bp, Homo sapien
cgtgttgaaggagtcgtccccgcca

SEQ ID NO: 5168890 - DNA, 25 bp, Homo sapien
catgttcaaggcagtacagttccca

SEQ ID NO: 5168891 - DNA, 25 bp, Homo sapien
ccacgtggatagagatacactcgcg

SEQ ID NO: 5168892 - DNA, 25 bp, Homo sapien
tatgcctaagatgcaggtcaagact

SEQ ID NO: 5168893 - DNA, 25 bp, Homo sapien
cttctatgcctaagatgcaggtcaa

SEQ ID NO: 5168894 - DNA, 25 bp, Homo sapien
gcctaagatgcaggtcaagactcta

SEQ ID NO: 5168895 - DNA, 25 bp, Homo sapien
ttctatgcctaagatgcaggtcaag

SEQ ID NO: 5168896 - DNA, 25 bp, Homo sapien
cctgtaggtccctgtgcgcacttca

SEQ ID NO: 5168897 - DNA, 25 bp, Homo sapien
ctgcctgtaggtccctgtgcgcact

SEQ ID NO: 5168898 - DNA, 25 bp, Homo sapien
gcctgtaggtccctgtgcgcacttc

SEQ ID NO: 5168899 - DNA, 25 bp, Homo sapien
ctgtaggtccctgtgcgcacttcat

SEQ ID NO: 5168900 - DNA, 25 bp, Homo sapien
tccaggactaggtcaacaatctcct

SEQ ID NO: 5168901 - DNA, 25 bp, Homo sapien
ggtccaggactaggtcaacaatctc

SEQ ID NO: 5168902 - DNA, 25 bp, Homo sapien
gatccggtccaggactaggtcaaca

SEQ ID NO: 5168903 - DNA, 25 bp, Homo sapien
tccggtccaggactaggtcaacaat

SEQ ID NO: 5168904 - DNA, 25 bp, Homo sapien
tgtccaggttgcgccgacatatgtc

SEQ ID NO: 5168905 - DNA, 25 bp, Homo sapien
gttgcgccgacatatgtcatagatg

SEQ ID NO: 5168906 - DNA, 25 bp, Homo sapien
ctggaattccgtcaagtccacattc

SEQ ID NO: 5168907 - DNA, 25 bp, Homo sapien
ttggtctggaattccgtcaagtcca

SEQ ID NO: 5168908 - DNA, 25 bp, Homo sapien
ctgctcgtggtaggccttctcagct

SEQ ID NO: 5168909 - DNA, 25 bp, Homo sapien
catttgattggctggctcgaagcag

SEQ ID NO: 5168910 - DNA, 25 bp, Homo sapien
gaagcaggcattggtgatctcggcc

SEQ ID NO: 5168911 - DNA, 25 bp, Homo sapien
catgtacttgccgtggcgagggtca

SEQ ID NO: 5168912 - DNA, 25 bp, Homo sapien
gtggcgatggccgcgttgacgtctt

SEQ ID NO: 5168913 - DNA, 25 bp, Homo sapien
gatggtggcgatggccgcgttgacg

SEQ ID NO: 5168914 - DNA, 25 bp, Homo sapien
ggtcttgatggtggcgatggccgcg

SEQ ID NO: 5168915 - DNA, 25 bp, Homo sapien
cttaaatccagtcgggcaccaatcc

SEQ ID NO: 5168916 - DNA, 25 bp, Homo sapien
tgtggggggctggtagttaatgccc

SEQ ID NO: 5168917 - DNA, 25 bp, Homo sapien
ggcccgctgcaccttggccaggtct

SEQ ID NO: 5168918 - DNA, 25 bp, Homo sapien
gaccactgtggggggctggtagtta

SEQ ID NO: 5168919 - DNA, 25 bp, Homo sapien
caggtctcccccggggaccactgtg

SEQ ID NO: 5168920 - DNA, 25 bp, Homo sapien
ccgtggtgttgctcagcatgcacac

SEQ ID NO: 5168921 - DNA, 25 bp, Homo sapien
ctccgcaatggccgtggtgttgctc

SEQ ID NO: 5168922 - DNA, 25 bp, Homo sapien
tggccgtggtgttgctcagcatgca

SEQ ID NO: 5168923 - DNA, 25 bp, Homo sapien
atggccgtggtgttgctcagcatgc

SEQ ID NO: 5168924 - DNA, 25 bp, Homo sapien
aggtcctcgcgggcctcagagaact

SEQ ID NO: 5168925 - DNA, 25 bp, Homo sapien
caggtcctcgcgggcctcagagaac

SEQ ID NO: 5168926 - DNA, 25 bp, Homo sapien
tatacagaacctttaattgcaaaca

SEQ ID NO: 5168927 - DNA, 25 bp, Homo sapien
ggtggcaggggagaacccaccacac

SEQ ID NO: 5168928 - DNA, 25 bp, Homo sapien
caacttggaagcagccatcccgggg

SEQ ID NO: 5168929 - DNA, 25 bp, Homo sapien
gttttatacagaacctttaattgca

SEQ ID NO: 5168930 - DNA, 25 bp, Homo sapien
ctacgcagggcagcacctaggatgg

SEQ ID NO: 5168931 - DNA, 25 bp, Homo sapien
ccagcaaaggctacatgttacctcc

SEQ ID NO: 5168932 - DNA, 25 bp, Homo sapien
aaaggctacatgttacctccttcag

SEQ ID NO: 5168933 - DNA, 25 bp, Homo sapien
cagcacctaggatggggcagagact

SEQ ID NO: 5168934 - DNA, 25 bp, Homo sapien
cgcgtctgtccccgccaggatcctg

SEQ ID NO: 5168935 - DNA, 25 bp, Homo sapien
tgctgaagctgaacgtggcccccct

SEQ ID NO: 5168936 - DNA, 25 bp, Homo sapien
cctgctgaagctgaacgtggccccc

SEQ ID NO: 5168937 - DNA, 25 bp, Homo sapien
ccccgcgtctgtccccgccaggatc

SEQ ID NO: 5168938 - DNA, 25 bp, Homo sapien
gcggcccggcagaagctggcgctgc

SEQ ID NO: 5168939 - DNA, 25 bp, Homo sapien
cggcgcagggcgtagggcctgggcc

SEQ ID NO: 5168940 - DNA, 25 bp, Homo sapien
ggcgctgcggcgcaagaaggtgctg

SEQ ID NO: 5168941 - DNA, 25 bp, Homo sapien
agaaggtgctgagcaccgaggagat

SEQ ID NO: 5168942 - DNA, 25 bp, Homo sapien
aagtctatcagggacgccctgaccg

SEQ ID NO: 5168943 - DNA, 25 bp, Homo sapien
atgcaagtctatcagggacgccctg

SEQ ID NO: 5168944 - DNA, 25 bp, Homo sapien
ttcttgaaacaggtattgactgagc

SEQ ID NO: 5168945 - DNA, 25 bp, Homo sapien
ggtattgactgagcgcccaatgtat

SEQ ID NO: 5168946 - DNA, 25 bp, Homo sapien
gcgccaaaacgtcgtcatcaagctg

SEQ ID NO: 5168947 - DNA, 25 bp, Homo sapien
agcgtcgcccgcttcagaggtggaa

SEQ ID NO: 5168948 - DNA, 25 bp, Homo sapien
accgcgccaaaacgtcgtcatcaag

SEQ ID NO: 5168949 - DNA, 25 bp, Homo sapien
tgtgggacccatagcgtcgcccgct

SEQ ID NO: 5168950 - DNA, 25 bp, Homo sapien
ggaaggtggcacaaaggcatggccc

SEQ ID NO: 5168951 - DNA, 25 bp, Homo sapien
cgggaaggtggcacaaaggcatggc

SEQ ID NO: 5168952 - DNA, 25 bp, Homo sapien
aaggtggcacaaaggcatggcccag

SEQ ID NO: 5168953 - DNA, 25 bp, Homo sapien
gcgcgggaaggtggcacaaaggcat

SEQ ID NO: 5168954 - DNA, 25 bp, Homo sapien
cacaggggaagggtcgagctgggac

SEQ ID NO: 5168955 - DNA, 25 bp, Homo sapien
ccacaccgcctgttgagcccaaggc

SEQ ID NO: 5168956 - DNA, 25 bp, Homo sapien
gaagggtcgagctgggacccacacc

SEQ ID NO: 5168957 - DNA, 25 bp, Homo sapien
cccttaacagcacgcgcccacttgt

SEQ ID NO: 5168958 - DNA, 25 bp, Homo sapien
tcattccaagcaaattctgtcatgc

SEQ ID NO: 5168959 - DNA, 25 bp, Homo sapien
attccaagcaaattctgtcatgcca

SEQ ID NO: 5168960 - DNA, 25 bp, Homo sapien
ggcaacgctaatcattccaagcaaa

SEQ ID NO: 5168961 - DNA, 25 bp, Homo sapien
acagcccttgggcaacgctaatcat

SEQ ID NO: 5168962 - DNA, 25 bp, Homo sapien
tgaaaatggccttcttagcaaacca

SEQ ID NO: 5168963 - DNA, 25 bp, Homo sapien
gcagcctccaatggagagttgaaaa

SEQ ID NO: 5168964 - DNA, 25 bp, Homo sapien
agcagcctccaatggagagttgaaa

SEQ ID NO: 5168965 - DNA, 25 bp, Homo sapien
gagttgaaaatggccttcttagcaa

SEQ ID NO: 5168966 - DNA, 25 bp, Homo sapien
cagtagaaagctgggctgctgcagg

SEQ ID NO: 5168967 - DNA, 25 bp, Homo sapien
ctgggctgctgcaggtgagggaacg

SEQ ID NO: 5168968 - DNA, 25 bp, Homo sapien
gctgctgcaggtgagggaacgccat

SEQ ID NO: 5168969 - DNA, 25 bp, Homo sapien
ggctgctgcaggtgagggaacgcca

SEQ ID NO: 5168970 - DNA, 25 bp, Homo sapien
ttccagcctgatggaccaccgtgat

SEQ ID NO: 5168971 - DNA, 25 bp, Homo sapien
gatcatcagtaagaacgcccaacaa

SEQ ID NO: 5168972 - DNA, 25 bp, Homo sapien
gattacaccgttgtgatcatcagta

SEQ ID NO: 5168973 - DNA, 25 bp, Homo sapien
tgtacgcatcaactggaaatttcca

SEQ ID NO: 5168974 - DNA, 25 bp, Homo sapien
caaagggcttatttatagagtcagc

SEQ ID NO: 5168975 - DNA, 25 bp, Homo sapien
tatttatagagtcagctttcaggct

SEQ ID NO: 5168976 - DNA, 25 bp, Homo sapien
ttatttatagagtcagctttcaggc

SEQ ID NO: 5168977 - DNA, 25 bp, Homo sapien
tgtgcaaagggcttatttatagagt

SEQ ID NO: 5168978 - DNA, 25 bp, Homo sapien
taagcagcggaggttccagccaacg

SEQ ID NO: 5168979 - DNA, 25 bp, Homo sapien
aagcagcggaggttccagccaacga

SEQ ID NO: 5168980 - DNA, 25 bp, Homo sapien
agcagcggaggttccagccaacgag

SEQ ID NO: 5168981 - DNA, 25 bp, Homo sapien
tgtactccacaggattcacacgccc

SEQ ID NO: 5168982 - DNA, 25 bp, Homo sapien
tcacgatgctgtactccacaggatt

SEQ ID NO: 5168983 - DNA, 25 bp, Homo sapien
gaaattccatcacgatgctgtactc

SEQ ID NO: 5168984 - DNA, 25 bp, Homo sapien
ccagtgtcgagaaattccatcacga

SEQ ID NO: 5168985 - DNA, 25 bp, Homo sapien
tcttcagcttgaagcttataaacca

SEQ ID NO: 5168986 - DNA, 25 bp, Homo sapien
tcagcttgaagcttataaaccaact

SEQ ID NO: 5168987 - DNA, 25 bp, Homo sapien
aacttatagtcttcagcttgaagct

SEQ ID NO: 5168988 - DNA, 25 bp, Homo sapien
tagtcttcagcttgaagcttataaa

SEQ ID NO: 5168989 - DNA, 25 bp, Homo sapien
gaggatgcactcctggatggacgcc

SEQ ID NO: 5168990 - DNA, 25 bp, Homo sapien
gactgtcagggaggatgcactcctg

SEQ ID NO: 5168991 - DNA, 25 bp, Homo sapien
ttgttgtggtacagaggactgtcag

SEQ ID NO: 5168992 - DNA, 25 bp, Homo sapien
cttgttgtggtacagaggactgtca

SEQ ID NO: 5168993 - DNA, 25 bp, Homo sapien
caaggcccccagtaggggtgaactg

SEQ ID NO: 5168994 - DNA, 25 bp, Homo sapien
cttctgagtgatgaggctcaaggca

SEQ ID NO: 5168995 - DNA, 25 bp, Homo sapien
ttctgagtgatgaggctcaaggcaa

SEQ ID NO: 5168996 - DNA, 25 bp, Homo sapien
ggctcaaggcaaagaagaatatgta

SEQ ID NO: 5168997 - DNA, 25 bp, Homo sapien
gaagaatatgtaatactcgaatgga

SEQ ID NO: 5168998 - DNA, 25 bp, Homo sapien
ctggaaaaccaagctagttgttagc

SEQ ID NO: 5168999 - DNA, 25 bp, Homo sapien
aagtacggacgtggagggacacagg

SEQ ID NO: 5169000 - DNA, 25 bp, Homo sapien
ctgaagtacggacgtggagggacac

SEQ ID NO: 5169001 - DNA, 25 bp, Homo sapien
gtacggacgtggagggacacaggga

SEQ ID NO: 5169002 - DNA, 25 bp, Homo sapien
tgaagtacggacgtggagggacaca

SEQ ID NO: 5169003 - DNA, 25 bp, Homo sapien
gtccaccaggatgaaataggcacag

SEQ ID NO: 5169004 - DNA, 25 bp, Homo sapien
tgtccaccaggatgaaataggcaca

SEQ ID NO: 5169005 - DNA, 25 bp, Homo sapien
tccaccaggatgaaataggcacagt

SEQ ID NO: 5169006 - DNA, 25 bp, Homo sapien
ctgtccaccaggatgaaataggcac

SEQ ID NO: 5169007 - DNA, 25 bp, Homo sapien
ggtgggcaggaaccatgacaggtac

SEQ ID NO: 5169008 - DNA, 25 bp, Homo sapien
ctgccttcggtgggcaggaaccatg

SEQ ID NO: 5169009 - DNA, 25 bp, Homo sapien
actgccttcggtgggcaggaaccat

SEQ ID NO: 5169010 - DNA, 25 bp, Homo sapien
ttcggtgggcaggaaccatgacagg

SEQ ID NO: 5169011 - DNA, 25 bp, Homo sapien
tgggaggcggtgaggggctggtccc

SEQ ID NO: 5169012 - DNA, 25 bp, Homo sapien
ctgggaggcggtgaggggctggtcc

SEQ ID NO: 5169013 - DNA, 25 bp, Homo sapien
ttcagggtcactgatcactgccgcc

SEQ ID NO: 5169014 - DNA, 25 bp, Homo sapien
tggcctgccttacacatgacagcag

SEQ ID NO: 5169015 - DNA, 25 bp, Homo sapien
caagtcctccacaggatcagcaaca

SEQ ID NO: 5169016 - DNA, 25 bp, Homo sapien
tctgtccacacgtgaattgtacgta

SEQ ID NO: 5169017 - DNA, 25 bp, Homo sapien
cacaatggaccagtacggtggttca

SEQ ID NO: 5169018 - DNA, 25 bp, Homo sapien
acttgaagcagagacagcgccactg

SEQ ID NO: 5169019 - DNA, 25 bp, Homo sapien
tacataatggctaggccaggagcgg

SEQ ID NO: 5169020 - DNA, 25 bp, Homo sapien
ggcttgagtgatgattgtgccacca

SEQ ID NO: 5169021 - DNA, 25 bp, Homo sapien
actcacagctcacagctcattgctc

SEQ ID NO: 5169022 - DNA, 25 bp, Homo sapien
ggaccatagttgcacatcatcacac

SEQ ID NO: 5169023 - DNA, 25 bp, Homo sapien
cagctcattgctcctgggcacaagt

SEQ ID NO: 5169024 - DNA, 25 bp, Homo sapien
tgggaccatagttgcacatcatcac

SEQ ID NO: 5169025 - DNA, 25 bp, Homo sapien
tgtagcttactcctattggcttaga

SEQ ID NO: 5169026 - DNA, 25 bp, Homo sapien
gaggtcaaggggtgtcatatcctgt

SEQ ID NO: 5169027 - DNA, 25 bp, Homo sapien
cactgaaatattaagaggtcaaggg

SEQ ID NO: 5169028 - DNA, 25 bp, Homo sapien
aatagaggtggaaaacaacagatgc

SEQ ID NO: 5169029 - DNA, 25 bp, Homo sapien
gaccaggtgtcccactacggtgctc

SEQ ID NO: 5169030 - DNA, 25 bp, Homo sapien
cacatgctctggaggggtcaaggtc

SEQ ID NO: 5169031 - DNA, 25 bp, Homo sapien
caagggaccgttcctgactgaaggg

SEQ ID NO: 5169032 - DNA, 25 bp, Homo sapien
actatttaatctgggcacaaagtaa

SEQ ID NO: 5169033 - DNA, 25 bp, Homo sapien
gggtctgcattcacagacgtctgat

SEQ ID NO: 5169034 - DNA, 25 bp, Homo sapien
agatgtgtcgcttcaggaggctagt

SEQ ID NO: 5169035 - DNA, 25 bp, Homo sapien
tctgatgagagatgtgtcgcttcag

SEQ ID NO: 5169036 - DNA, 25 bp, Homo sapien
caggaggctagtgtggtggaggcca

SEQ ID NO: 5169037 - DNA, 25 bp, Homo sapien
tttgatacatctccaacgaatagtg

SEQ ID NO: 5169038 - DNA, 25 bp, Homo sapien
catctccaacgaatagtgatgaagc

SEQ ID NO: 5169039 - DNA, 25 bp, Homo sapien
ccaacgaatagtgatgaagccacat

SEQ ID NO: 5169040 - DNA, 25 bp, Homo sapien
attttttgatacatctccaacgaat

SEQ ID NO: 5169041 - DNA, 25 bp, Homo sapien
acctccatgcatctgaaggcagcag

SEQ ID NO: 5169042 - DNA, 25 bp, Homo sapien
ctccaggaacggcaacagcagtaac

SEQ ID NO: 5169043 - DNA, 25 bp, Homo sapien
caacagcagtaacaacccagggcct

SEQ ID NO: 5169044 - DNA, 25 bp, Homo sapien
gaacggcaacagcagtaacaaccca

SEQ ID NO: 5169045 - DNA, 25 bp, Homo sapien
gggcgctggagacactgagtcggta

SEQ ID NO: 5169046 - DNA, 25 bp, Homo sapien
ctggagacactgagtcggtagtgca

SEQ ID NO: 5169047 - DNA, 25 bp, Homo sapien
gagacactgagtcggtagtgcagaa

SEQ ID NO: 5169048 - DNA, 25 bp, Homo sapien
cactgagtcggtagtgcagaacctc

SEQ ID NO: 5169049 - DNA, 25 bp, Homo sapien
cccttgctttgccaggcatggacat

SEQ ID NO: 5169050 - DNA, 25 bp, Homo sapien
tgagtcttgagtggacacgctcgcc

SEQ ID NO: 5169051 - DNA, 25 bp, Homo sapien
accctgagtcttgagtggacacgct

SEQ ID NO: 5169052 - DNA, 25 bp, Homo sapien
gtcttgagtggacacgctcgcctct

SEQ ID NO: 5169053 - DNA, 25 bp, Homo sapien
tggggtttgaccacgtgggcctgac

SEQ ID NO: 5169054 - DNA, 25 bp, Homo sapien
cagatgagaactcggcccagtagaa

SEQ ID NO: 5169055 - DNA, 25 bp, Homo sapien
cagtagaagccccgggtgtcacttc

SEQ ID NO: 5169056 - DNA, 25 bp, Homo sapien
ctcggcccagtagaagccccgggtg

SEQ ID NO: 5169057 - DNA, 25 bp, Homo sapien
acacagccagatgagaactcggccc

SEQ ID NO: 5169058 - DNA, 25 bp, Homo sapien
tcactttcctccccaattccttcca

SEQ ID NO: 5169059 - DNA, 25 bp, Homo sapien
gagggtgaggcctgctctggcttca

SEQ ID NO: 5169060 - DNA, 25 bp, Homo sapien
tgggcggagggtgaggcctgctctg

SEQ ID NO: 5169061 - DNA, 25 bp, Homo sapien
agcagcaggcgcaccaccaacacat

SEQ ID NO: 5169062 - DNA, 25 bp, Homo sapien
catgctcctcagtaggcgtgaacga

SEQ ID NO: 5169063 - DNA, 25 bp, Homo sapien
ttctgctggatgaacctcgggacag

SEQ ID NO: 5169064 - DNA, 25 bp, Homo sapien
agtttctgctggatgaacctcggga

SEQ ID NO: 5169065 - DNA, 25 bp, Homo sapien
gctctgaacgatgcgtccaggggcc

SEQ ID NO: 5169066 - DNA, 25 bp, Homo sapien
gcaatgctccaagaagaggtagagt

SEQ ID NO: 5169067 - DNA, 25 bp, Homo sapien
acacaggcacacgtgtgacggggcc

SEQ ID NO: 5169068 - DNA, 25 bp, Homo sapien
aggacacaggcacacgtgtgacggg

SEQ ID NO: 5169069 - DNA, 25 bp, Homo sapien
caggcacacgtgtgacggggccaac

SEQ ID NO: 5169070 - DNA, 25 bp, Homo sapien
gcacacgtgtgacggggccaacact

SEQ ID NO: 5169071 - DNA, 25 bp, Homo sapien
tgtcaggcgcgtaccgccacggctg

SEQ ID NO: 5169072 - DNA, 25 bp, Homo sapien
ggcgcgtaccgccacggctgcaggt

SEQ ID NO: 5169073 - DNA, 25 bp, Homo sapien
ttgtcaggcgcgtaccgccacggct

SEQ ID NO: 5169074 - DNA, 25 bp, Homo sapien
gcttgtcaggcgcgtaccgccacgg

SEQ ID NO: 5169075 - DNA, 25 bp, Homo sapien
acttggtgtacatcagcaggttctc

SEQ ID NO: 5169076 - DNA, 25 bp, Homo sapien
aacttggtgtacatcagcaggttct

SEQ ID NO: 5169077 - DNA, 25 bp, Homo sapien
tctgaatcatctcagccaggttggg

SEQ ID NO: 5169078 - DNA, 25 bp, Homo sapien
ctttctgaatcatctcagccaggtt

SEQ ID NO: 5169079 - DNA, 25 bp, Homo sapien
tttctgaatcatctcagccaggttg

SEQ ID NO: 5169080 - DNA, 25 bp, Homo sapien
ttctgaatcatctcagccaggttgg

SEQ ID NO: 5169081 - DNA, 25 bp, Homo sapien
tggctgggttgacgtctacccggct

SEQ ID NO: 5169082 - DNA, 25 bp, Homo sapien
tgggttgacgtctacccggctggcc

SEQ ID NO: 5169083 - DNA, 25 bp, Homo sapien
tggtctggctgggttgacgtctacc

SEQ ID NO: 5169084 - DNA, 25 bp, Homo sapien
cctggtctggctgggttgacgtcta

SEQ ID NO: 5169085 - DNA, 25 bp, Homo sapien
cagtttcagacttcaccgcacagat

SEQ ID NO: 5169086 - DNA, 25 bp, Homo sapien
gacttcaccgcacagatgtgtccca

SEQ ID NO: 5169087 - DNA, 25 bp, Homo sapien
agacttcaccgcacagatgtgtccc

SEQ ID NO: 5169088 - DNA, 25 bp, Homo sapien
tttcagacttcaccgcacagatgtg

SEQ ID NO: 5169089 - DNA, 25 bp, Homo sapien
gcgatcccccacccagtgcctggtg

SEQ ID NO: 5169090 - DNA, 25 bp, Homo sapien
cgatcccccacccagtgcctggtgg

SEQ ID NO: 5169091 - DNA, 25 bp, Homo sapien
tgcgatcccccacccagtgcctggt

SEQ ID NO: 5169092 - DNA, 25 bp, Homo sapien
ctgcgatcccccacccagtgcctgg

SEQ ID NO: 5169093 - DNA, 25 bp, Homo sapien
cacgagttgccagggttaaacggcg

SEQ ID NO: 5169094 - DNA, 25 bp, Homo sapien
gcggccaccacgagttgccagggtt

SEQ ID NO: 5169095 - DNA, 25 bp, Homo sapien
gccaccacgagttgccagggttaaa

SEQ ID NO: 5169096 - DNA, 25 bp, Homo sapien
caccacgagttgccagggttaaacg

SEQ ID NO: 5169097 - DNA, 25 bp, Homo sapien
ggctgtagacgtggctcttcacctt

SEQ ID NO: 5169098 - DNA, 25 bp, Homo sapien
tgtgggggccgtgaagagtcggtgc

SEQ ID NO: 5169099 - DNA, 25 bp, Homo sapien
aggcatcagtgaccgctggtggcca

SEQ ID NO: 5169100 - DNA, 25 bp, Homo sapien
cctggccctccaggctgtagacgtg

SEQ ID NO: 5169101 - DNA, 25 bp, Homo sapien
acagccagactgctgagcgtcagga

SEQ ID NO: 5169102 - DNA, 25 bp, Homo sapien
ggtcaccagcaggataggcctgtgc

SEQ ID NO: 5169103 - DNA, 25 bp, Homo sapien
caaacactgccttcgttatcaggaa

SEQ ID NO: 5169104 - DNA, 25 bp, Homo sapien
gatatggcgtcaaatctacacccag

SEQ ID NO: 5169105 - DNA, 25 bp, Homo sapien
ccaggtattcatctgtcttccggac

SEQ ID NO: 5169106 - DNA, 25 bp, Homo sapien
tctgtcttccggacactgtcttgcc

SEQ ID NO: 5169107 - DNA, 25 bp, Homo sapien
acactggtcggagatggacttggct

SEQ ID NO: 5169108 - DNA, 25 bp, Homo sapien
cgggctctccgcacactggtcggag

SEQ ID NO: 5169109 - DNA, 25 bp, Homo sapien
aactgcctaagctgcgcttcgctga

SEQ ID NO: 5169110 - DNA, 25 bp, Homo sapien
gcgtaaggatgagtccgttctcacc

SEQ ID NO: 5169111 - DNA, 25 bp, Homo sapien
tcacccacgacgcagtcggggagct

SEQ ID NO: 5169112 - DNA, 25 bp, Homo sapien
gatgcccaaggcgagtgtgaactgc

SEQ ID NO: 5169113 - DNA, 25 bp, Homo sapien
cagacgacagcctgaagagcgtgtg

SEQ ID NO: 5169114 - DNA, 25 bp, Homo sapien
acgacagcctgaagagcgtgtggac

SEQ ID NO: 5169115 - DNA, 25 bp, Homo sapien
gcagacgacagcctgaagagcgtgt

SEQ ID NO: 5169116 - DNA, 25 bp, Homo sapien
acagcctgaagagcgtgtggaccaa

SEQ ID NO: 5169117 - DNA, 25 bp, Homo sapien
cccaagcaggagcatctagaaccct

SEQ ID NO: 5169118 - DNA, 25 bp, Homo sapien
gcatctagaaccctctctgaagagg

SEQ ID NO: 5169119 - DNA, 25 bp, Homo sapien
ggagcatctagaaccctctctgaag

SEQ ID NO: 5169120 - DNA, 25 bp, Homo sapien
caagcaggagcatctagaaccctct

SEQ ID NO: 5169121 - DNA, 25 bp, Homo sapien
cctcaggacagcagtaccccgccct

SEQ ID NO: 5169122 - DNA, 25 bp, Homo sapien
tcaggacagcagtaccccgccctca

SEQ ID NO: 5169123 - DNA, 25 bp, Homo sapien
cagtaccccgccctcacaggccacc

SEQ ID NO: 5169124 - DNA, 25 bp, Homo sapien
aggacagcagtaccccgccctcaca

SEQ ID NO: 5169125 - DNA, 25 bp, Homo sapien
aagctgccgaggaagtcatcccggg

SEQ ID NO: 5169126 - DNA, 25 bp, Homo sapien
ccgggaacacagagccgccatctgt

SEQ ID NO: 5169127 - DNA, 25 bp, Homo sapien
agctgccgaggaagtcatcccggga

SEQ ID NO: 5169128 - DNA, 25 bp, Homo sapien
cgggaacacagagccgccatctgtc

SEQ ID NO: 5169129 - DNA, 25 bp, Homo sapien
ccgcgggtgtggccggccacctgcc

SEQ ID NO: 5169130 - DNA, 25 bp, Homo sapien
cagcagcgagaccagcgtccggtaa

SEQ ID NO: 5169131 - DNA, 25 bp, Homo sapien
accagcgtccggtaactgcccagga

SEQ ID NO: 5169132 - DNA, 25 bp, Homo sapien
cagcttcccccgctcggtcagcagt

SEQ ID NO: 5169133 - DNA, 25 bp, Homo sapien
agcgagaccagcgtccggtaactgc

SEQ ID NO: 5169134 - DNA, 25 bp, Homo sapien
cgctgagctctgcgctgtcacagag

SEQ ID NO: 5169135 - DNA, 25 bp, Homo sapien
ctcccaagcttggtgcagcagagta

SEQ ID NO: 5169136 - DNA, 25 bp, Homo sapien
tgagctctgcgctgtcacagagcgt

SEQ ID NO: 5169137 - DNA, 25 bp, Homo sapien
caggctggctcccaagcttggtgca

SEQ ID NO: 5169138 - DNA, 25 bp, Homo sapien
gaacatgaagaacgcaccccagagt

SEQ ID NO: 5169139 - DNA, 25 bp, Homo sapien
aagaacgcaccccagagtgaagaat

SEQ ID NO: 5169140 - DNA, 25 bp, Homo sapien
gaacgcaccccagagtgaagaatca

SEQ ID NO: 5169141 - DNA, 25 bp, Homo sapien
atgaagaacgcaccccagagtgaag

SEQ ID NO: 5169142 - DNA, 25 bp, Homo sapien
ggtccgcgatgttggccactgcttt

SEQ ID NO: 5169143 - DNA, 25 bp, Homo sapien
taagtaccactgaacggttgccatg

SEQ ID NO: 5169144 - DNA, 25 bp, Homo sapien
caaaggcttggtttggaaatcacca

SEQ ID NO: 5169145 - DNA, 25 bp, Homo sapien
gaccccgtgctggtttctgtcagag

SEQ ID NO: 5169146 - DNA, 25 bp, Homo sapien
caaagcccaacatttacaatttcaa

SEQ ID NO: 5169147 - DNA, 25 bp, Homo sapien
cagatccatggtcgttacaagcttc

SEQ ID NO: 5169148 - DNA, 25 bp, Homo sapien
ggtcacaggccctaaaatgccatta

SEQ ID NO: 5169149 - DNA, 25 bp, Homo sapien
tgtttattcagatccatggtcgtta

SEQ ID NO: 5169150 - DNA, 25 bp, Homo sapien
atcgccatcgccaggtactctcccg

SEQ ID NO: 5169151 - DNA, 25 bp, Homo sapien
cgccatcgccaggtactctcccgct

SEQ ID NO: 5169152 - DNA, 25 bp, Homo sapien
atcgccaggtactctcccgctgcca

SEQ ID NO: 5169153 - DNA, 25 bp, Homo sapien
ccatcgccaggtactctcccgctgc

SEQ ID NO: 5169154 - DNA, 25 bp, Homo sapien
cgccgagagcccggggtcggcgagc

SEQ ID NO: 5169155 - DNA, 25 bp, Homo sapien
cgagagcccggggtcggcgagctgg

SEQ ID NO: 5169156 - DNA, 25 bp, Homo sapien
gagagcccggggtcggcgagctggg

SEQ ID NO: 5169157 - DNA, 25 bp, Homo sapien
ccgagagcccggggtcggcgagctg

SEQ ID NO: 5169158 - DNA, 25 bp, Homo sapien
cttgttttcccgcttcagatgctcg

SEQ ID NO: 5169159 - DNA, 25 bp, Homo sapien
ccaggttccgtttctgcgggtcgct

SEQ ID NO: 5169160 - DNA, 25 bp, Homo sapien
cagatgctcgatctcctcatggagc

SEQ ID NO: 5169161 - DNA, 25 bp, Homo sapien
caggttccgtttctgcgggtcgctc

SEQ ID NO: 5169162 - DNA, 25 bp, Homo sapien
ctggggaggcagggccggcctaggg

SEQ ID NO: 5169163 - DNA, 25 bp, Homo sapien
cggcctagggccccgcgccggctca

SEQ ID NO: 5169164 - DNA, 25 bp, Homo sapien
gcagggccggcctagggccccgcgc

SEQ ID NO: 5169165 - DNA, 25 bp, Homo sapien
ggcctagggccccgcgccggctcac

SEQ ID NO: 5169166 - DNA, 25 bp, Homo sapien
ccaggcgtgtgctggagttgatggc

SEQ ID NO: 5169167 - DNA, 25 bp, Homo sapien
gcgggagcggcagtgttgagtgtgc

SEQ ID NO: 5169168 - DNA, 25 bp, Homo sapien
tgagcccaggcgtgtgctggagttg

SEQ ID NO: 5169169 - DNA, 25 bp, Homo sapien
gcccaggcgtgtgctggagttgatg

SEQ ID NO: 5169170 - DNA, 25 bp, Homo sapien
gctgccctacgagacaggcagacag

SEQ ID NO: 5169171 - DNA, 25 bp, Homo sapien
aatgctgctgccctacgagacaggc

SEQ ID NO: 5169172 - DNA, 25 bp, Homo sapien
tgaaatgctgctgccctacgagaca

SEQ ID NO: 5169173 - DNA, 25 bp, Homo sapien
gagaggattggcggagtcagcatct

SEQ ID NO: 5169174 - DNA, 25 bp, Homo sapien
ctctataaagtttttaacagaggtg

SEQ ID NO: 5169175 - DNA, 25 bp, Homo sapien
gtttttaacagaggtgtgtctgacc

SEQ ID NO: 5169176 - DNA, 25 bp, Homo sapien
aaagtttttaacagaggtgtgtctg

SEQ ID NO: 5169177 - DNA, 25 bp, Homo sapien
ctataaagtttttaacagaggtgtg

SEQ ID NO: 5169178 - DNA, 25 bp, Homo sapien
gaactgggcgtcctgaggctcaaga

SEQ ID NO: 5169179 - DNA, 25 bp, Homo sapien
tggctatggcagtgtcatgatcccg

SEQ ID NO: 5169180 - DNA, 25 bp, Homo sapien
caagaagacattaggaactgggcgt

SEQ ID NO: 5169181 - DNA, 25 bp, Homo sapien
gtgaactccggaacccctggctatg

SEQ ID NO: 5169182 - DNA, 25 bp, Homo sapien
cctcatccatctgagatgactggag

SEQ ID NO: 5169183 - DNA, 25 bp, Homo sapien
catccatctgagatgactggagggc

SEQ ID NO: 5169184 - DNA, 25 bp, Homo sapien
tcatccatctgagatgactggaggg

SEQ ID NO: 5169185 - DNA, 25 bp, Homo sapien
gcctcatccatctgagatgactgga

SEQ ID NO: 5169186 - DNA, 25 bp, Homo sapien
actggctgattgggccctgccccat

SEQ ID NO: 5169187 - DNA, 25 bp, Homo sapien
tgaaagcaagcacacgctctcctca

SEQ ID NO: 5169188 - DNA, 25 bp, Homo sapien
ctgccccatggatcccgctctccac

SEQ ID NO: 5169189 - DNA, 25 bp, Homo sapien
tcctcagcacttgtgaaaccacagc

SEQ ID NO: 5169190 - DNA, 25 bp, Homo sapien
gtgatgtctgattcattatgagctt

SEQ ID NO: 5169191 - DNA, 25 bp, Homo sapien
agagcatcccatcagtcactgaagg

SEQ ID NO: 5169192 - DNA, 25 bp, Homo sapien
agcatcccatcagtcactgaagggc

SEQ ID NO: 5169193 - DNA, 25 bp, Homo sapien
gagcatcccatcagtcactgaaggg

SEQ ID NO: 5169194 - DNA, 25 bp, Homo sapien
tagaggtagcggcatctgtccaggt

SEQ ID NO: 5169195 - DNA, 25 bp, Homo sapien
cggctagaggtagcggcatctgtcc

SEQ ID NO: 5169196 - DNA, 25 bp, Homo sapien
gccacggctagaggtagcggcatct

SEQ ID NO: 5169197 - DNA, 25 bp, Homo sapien
tccagccacggctagaggtagcggc

SEQ ID NO: 5169198 - DNA, 25 bp, Homo sapien
ggtctggggagcaccctgtgcccac

SEQ ID NO: 5169199 - DNA, 25 bp, Homo sapien
ggaggtctggggagcaccctgtgcc

SEQ ID NO: 5169200 - DNA, 25 bp, Homo sapien
gagggaggtctggggagcaccctgt

SEQ ID NO: 5169201 - DNA, 25 bp, Homo sapien
ctacttggaggagggaggtctgggg

SEQ ID NO: 5169202 - DNA, 25 bp, Homo sapien
tggatggagtgtgtccagagcccct

SEQ ID NO: 5169203 - DNA, 25 bp, Homo sapien
tcagatgtcctcctgatgtcagccc

SEQ ID NO: 5169204 - DNA, 25 bp, Homo sapien
tctgaggcaaagatctagcagggca

SEQ ID NO: 5169205 - DNA, 25 bp, Homo sapien
cagaacagctcactggagttgccac

SEQ ID NO: 5169206 - DNA, 25 bp, Homo sapien
ttgatgcagacccagcgagcgccca

SEQ ID NO: 5169207 - DNA, 25 bp, Homo sapien
tctacccacactccgttgatgcaga

SEQ ID NO: 5169208 - DNA, 25 bp, Homo sapien
tgcaggagagcgcacagtgtcggcg

SEQ ID NO: 5169209 - DNA, 25 bp, Homo sapien
agtgtcggcgctaccgcccgcaaga

SEQ ID NO: 5169210 - DNA, 25 bp, Homo sapien
ggacttgacagactggaagcttgac

SEQ ID NO: 5169211 - DNA, 25 bp, Homo sapien
gatggacttgacagactggaagctt

SEQ ID NO: 5169212 - DNA, 25 bp, Homo sapien
agagatggacttgacagactggaag

SEQ ID NO: 5169213 - DNA, 25 bp, Homo sapien
gagatggacttgacagactggaagc

SEQ ID NO: 5169214 - DNA, 25 bp, Homo sapien
aaaatgcccggcctcacagagtggg

SEQ ID NO: 5169215 - DNA, 25 bp, Homo sapien
cagcctgcatgggtttcctcggcaa

SEQ ID NO: 5169216 - DNA, 25 bp, Homo sapien
gctgtgaggccttactgccctgtga

SEQ ID NO: 5169217 - DNA, 25 bp, Homo sapien
ctgtgagcacatggacgccagcctg

SEQ ID NO: 5169218 - DNA, 25 bp, Homo sapien
aagtcagaccctacaaggccggtca

SEQ ID NO: 5169219 - DNA, 25 bp, Homo sapien
ttttgaatcttgcttgttgaaggag

SEQ ID NO: 5169220 - DNA, 25 bp, Homo sapien
tttgaatcttgcttgttgaaggagc

SEQ ID NO: 5169221 - DNA, 25 bp, Homo sapien
cttttgaatcttgcttgttgaagga

SEQ ID NO: 5169222 - DNA, 25 bp, Homo sapien
gactgcagggcgtgagcctagtaaa

SEQ ID NO: 5169223 - DNA, 25 bp, Homo sapien
ccttagggtgcaggcaagacttacc

SEQ ID NO: 5169224 - DNA, 25 bp, Homo sapien
tggcctagtgccctccaaaggcagg

SEQ ID NO: 5169225 - DNA, 25 bp, Homo sapien
ttcagtgggtgaccagctagctgcc

SEQ ID NO: 5169226 - DNA, 25 bp, Homo sapien
gctggctgttccccatacaggcagc

SEQ ID NO: 5169227 - DNA, 25 bp, Homo sapien
ctggctgttccccatacaggcagct

SEQ ID NO: 5169228 - DNA, 25 bp, Homo sapien
tggctgttccccatacaggcagctc

SEQ ID NO: 5169229 - DNA, 25 bp, Homo sapien
tgctggctgttccccatacaggcag

SEQ ID NO: 5169230 - DNA, 25 bp, Homo sapien
tttcgcaggggaaggggcaggatca

SEQ ID NO: 5169231 - DNA, 25 bp, Homo sapien
ctttcgcaggggaaggggcaggatc

SEQ ID NO: 5169232 - DNA, 25 bp, Homo sapien
ttcgcaggggaaggggcaggatcat

SEQ ID NO: 5169233 - DNA, 25 bp, Homo sapien
tggtattccacagctcgcggatgag

SEQ ID NO: 5169234 - DNA, 25 bp, Homo sapien
ggtggggcctgtggcggtgccagac

SEQ ID NO: 5169235 - DNA, 25 bp, Homo sapien
gcctgtggcggtgccagactgccca

SEQ ID NO: 5169236 - DNA, 25 bp, Homo sapien
tgtggcggtgccagactgcccaggg

SEQ ID NO: 5169237 - DNA, 25 bp, Homo sapien
gcggtgccagactgcccagggccac

SEQ ID NO: 5169238 - DNA, 25 bp, Homo sapien
gggcctctggctcccttccaggagg

SEQ ID NO: 5169239 - DNA, 25 bp, Homo sapien
tccaggagggacttgaggtgccgca

SEQ ID NO: 5169240 - DNA, 25 bp, Homo sapien
ctgggaaagctagcttcctccgggg

SEQ ID NO: 5169241 - DNA, 25 bp, Homo sapien
tgggaaagctagcttcctccggggc

SEQ ID NO: 5169242 - DNA, 25 bp, Homo sapien
tggggcaggggtgcaccaggcactc

SEQ ID NO: 5169243 - DNA, 25 bp, Homo sapien
ctgtggataggaccccagggatggg

SEQ ID NO: 5169244 - DNA, 25 bp, Homo sapien
gggatggggcaggggtgcaccaggc

SEQ ID NO: 5169245 - DNA, 25 bp, Homo sapien
gatggggcaggggtgcaccaggcac

SEQ ID NO: 5169246 - DNA, 25 bp, Homo sapien
ctgggtgaaggaagagtcagcagtg

SEQ ID NO: 5169247 - DNA, 25 bp, Homo sapien
gggtgaaggaagagtcagcagtgag

SEQ ID NO: 5169248 - DNA, 25 bp, Homo sapien
tgggtgaaggaagagtcagcagtga

SEQ ID NO: 5169249 - DNA, 25 bp, Homo sapien
gaccttggggaaatgcgtggcttct

SEQ ID NO: 5169250 - DNA, 25 bp, Homo sapien
accttggggaaatgcgtggcttctt

SEQ ID NO: 5169251 - DNA, 25 bp, Homo sapien
ccttggggaaatgcgtggcttcttg

SEQ ID NO: 5169252 - DNA, 25 bp, Homo sapien
cgggtagagggactgtcaccgtgag

SEQ ID NO: 5169253 - DNA, 25 bp, Homo sapien
ctgcatggccctcacgggggcacag

SEQ ID NO: 5169254 - DNA, 25 bp, Homo sapien
tgtgtggggagtgcggcctgcatgg

SEQ ID NO: 5169255 - DNA, 25 bp, Homo sapien
agagggactgtcaccgtgagcatcc

SEQ ID NO: 5169256 - DNA, 25 bp, Homo sapien
tgcaggcgccgtttctgcattgcct

SEQ ID NO: 5169257 - DNA, 25 bp, Homo sapien
gagcgatgcaggcgccgtttctgca

SEQ ID NO: 5169258 - DNA, 25 bp, Homo sapien
ggcgccgtttctgcattgcctgcag

SEQ ID NO: 5169259 - DNA, 25 bp, Homo sapien
tctgcctctcggcaaagttgttctt

SEQ ID NO: 5169260 - DNA, 25 bp, Homo sapien
ggtaaggcgatacctgcttcatcgt

SEQ ID NO: 5169261 - DNA, 25 bp, Homo sapien
catcgtgtgcttttatgtaaatgcc

SEQ ID NO: 5169262 - DNA, 25 bp, Homo sapien
gatcaagtactttatctatcttgag

SEQ ID NO: 5169263 - DNA, 25 bp, Homo sapien
tattttcagtttcaacaggtaaggc

SEQ ID NO: 5169264 - DNA, 25 bp, Homo sapien
gtcctgttaggatgctgtaagcccc

SEQ ID NO: 5169265 - DNA, 25 bp, Homo sapien
cccactccatgaaactgggcctgct

SEQ ID NO: 5169266 - DNA, 25 bp, Homo sapien
ggcctgctgtcctgttaggatgctg

SEQ ID NO: 5169267 - DNA, 25 bp, Homo sapien
tgctgtcctgttaggatgctgtaag

SEQ ID NO: 5169268 - DNA, 25 bp, Homo sapien
actgcagcaacaatggcaccgtccg

SEQ ID NO: 5169269 - DNA, 25 bp, Homo sapien
caagtgcatgataaacctggaccct

SEQ ID NO: 5169270 - DNA, 25 bp, Homo sapien
tatgcacccggaagcacaggcttga

SEQ ID NO: 5169271 - DNA, 25 bp, Homo sapien
tgaggacgatgagcagcagagcatc

SEQ ID NO: 5169272 - DNA, 25 bp, Homo sapien
agagcctaaaatgacctgacaccgc

SEQ ID NO: 5169273 - DNA, 25 bp, Homo sapien
tgacaccgcctcagcatgctttacg

SEQ ID NO: 5169274 - DNA, 25 bp, Homo sapien
taccaaacgcgaaactgaagagcct

SEQ ID NO: 5169275 - DNA, 25 bp, Homo sapien
gctttacgtactgaggtcgcgcaca

SEQ ID NO: 5169276 - DNA, 25 bp, Homo sapien
gatatatgcacaacggtatactctt

SEQ ID NO: 5169277 - DNA, 25 bp, Homo sapien
cctacttgtctttctacagattaaa

SEQ ID NO: 5169278 - DNA, 25 bp, Homo sapien
tactctggacaataactaagatggg

SEQ ID NO: 5169279 - DNA, 25 bp, Homo sapien
taagatggggaatcaacctacttgt

SEQ ID NO: 5169280 - DNA, 25 bp, Homo sapien
ggctgtgaccattacctaatatgtc

SEQ ID NO: 5169281 - DNA, 25 bp, Homo sapien
catacttaggactgggaaaacaaca

SEQ ID NO: 5169282 - DNA, 25 bp, Homo sapien
tagtacacagcatagtattcacgtg

SEQ ID NO: 5169283 - DNA, 25 bp, Homo sapien
ttttaaatggaacccagagattagc

SEQ ID NO: 5169284 - DNA, 25 bp, Homo sapien
tatattccttcacactggtctaggt

SEQ ID NO: 5169285 - DNA, 25 bp, Homo sapien
tgtgaatagtcagtttttctctaca

SEQ ID NO: 5169286 - DNA, 25 bp, Homo sapien
tgtggttccactcagattttaggac

SEQ ID NO: 5169287 - DNA, 25 bp, Homo sapien
ccattgctaattgatgttggtataa

SEQ ID NO: 5169288 - DNA, 25 bp, Homo sapien
gtaatatcttcgtggttttgacttc

SEQ ID NO: 5169289 - DNA, 25 bp, Homo sapien
ctatgaggtaatatcttcgtggttt

SEQ ID NO: 5169290 - DNA, 25 bp, Homo sapien
taacatctatgaggtaatatcttcg

SEQ ID NO: 5169291 - DNA, 25 bp, Homo sapien
catctatgaggtaatatcttcgtgg

SEQ ID NO: 5169292 - DNA, 25 bp, Homo sapien
tgagtcagcaccacctgcctcgggg

SEQ ID NO: 5169293 - DNA, 25 bp, Homo sapien
ccacagtgtggccacctgagtcagc

SEQ ID NO: 5169294 - DNA, 25 bp, Homo sapien
cctctgggccaccaacacccaggtc

SEQ ID NO: 5169295 - DNA, 25 bp, Homo sapien
agcaccacctgcctcggggaccaga

SEQ ID NO: 5169296 - DNA, 25 bp, Homo sapien
tgtgttcccggcaaactttgtggga

SEQ ID NO: 5169297 - DNA, 25 bp, Homo sapien
cctgtgttcccggcaaactttgtgg

SEQ ID NO: 5169298 - DNA, 25 bp, Homo sapien
ctgtgttcccggcaaactttgtggg

SEQ ID NO: 5169299 - DNA, 25 bp, Homo sapien
gtgcttaagtcttggcgccaggaat

SEQ ID NO: 5169300 - DNA, 25 bp, Homo sapien
aagtcttggcgccaggaatgtcact

SEQ ID NO: 5169301 - DNA, 25 bp, Homo sapien
tcttggcgccaggaatgtcactgac

SEQ ID NO: 5169302 - DNA, 25 bp, Homo sapien
tgcttaagtcttggcgccaggaatg

SEQ ID NO: 5169303 - DNA, 25 bp, Homo sapien
ggcgtcagtgtacgtggcacagaca

SEQ ID NO: 5169304 - DNA, 25 bp, Homo sapien
gctgccgcgcgtgcgacgtgcgcgt

SEQ ID NO: 5169305 - DNA, 25 bp, Homo sapien
cagacactggccgatgcgtgcaacc

SEQ ID NO: 5169306 - DNA, 25 bp, Homo sapien
cgtgcgcgtgcggtgtgcacatctc

SEQ ID NO: 5169307 - DNA, 25 bp, Homo sapien
ggaaagcagtggcagcaccacttgc

SEQ ID NO: 5169308 - DNA, 25 bp, Homo sapien
gaaagcagtggcagcaccacttgcc

SEQ ID NO: 5169309 - DNA, 25 bp, Homo sapien
agggaaagcagtggcagcaccactt

SEQ ID NO: 5169310 - DNA, 25 bp, Homo sapien
gcagggaaagcagtggcagcaccac

SEQ ID NO: 5169311 - DNA, 25 bp, Homo sapien
ccaagcgtcttcacagaggagtcgt

SEQ ID NO: 5169312 - DNA, 25 bp, Homo sapien
tcttgctcccaagcgtcttcacaga

SEQ ID NO: 5169313 - DNA, 25 bp, Homo sapien
cgtcttcacagaggagtcgttgcgg

SEQ ID NO: 5169314 - DNA, 25 bp, Homo sapien
agaggagtcgttgcggtctccagaa

SEQ ID NO: 5169315 - DNA, 25 bp, Homo sapien
gggaagcagtggcagcaccacttgc

SEQ ID NO: 5169316 - DNA, 25 bp, Homo sapien
gcaggggaagcagtggcagcaccac

SEQ ID NO: 5169317 - DNA, 25 bp, Homo sapien
gaagcagtggcagcaccacttgcac

SEQ ID NO: 5169318 - DNA, 25 bp, Homo sapien
aggggaagcagtggcagcaccactt

SEQ ID NO: 5169319 - DNA, 25 bp, Homo sapien
tgaaggcgctgtcatcgtagtctcc

SEQ ID NO: 5169320 - DNA, 25 bp, Homo sapien
gctgtcatcgtagtctccccaagcg

SEQ ID NO: 5169321 - DNA, 25 bp, Homo sapien
gtagtctccccaagcgcccacgttg

SEQ ID NO: 5169322 - DNA, 25 bp, Homo sapien
gggatccatgaaggcgctgtcatcg

SEQ ID NO: 5169323 - DNA, 25 bp, Homo sapien
gtccctcttgttcacatcagtgtcc

SEQ ID NO: 5169324 - DNA, 25 bp, Homo sapien
cttgtccctcttgttcacatcagtg

SEQ ID NO: 5169325 - DNA, 25 bp, Homo sapien
tttgcttgtccctcttgttcacatc

SEQ ID NO: 5169326 - DNA, 25 bp, Homo sapien
cagatcttctccatggacgtggtac

SEQ ID NO: 5169327 - DNA, 25 bp, Homo sapien
ctgaggtttccacatccagggtggt

SEQ ID NO: 5169328 - DNA, 25 bp, Homo sapien
gaggtttccacatccagggtggtgt

SEQ ID NO: 5169329 - DNA, 25 bp, Homo sapien
ctctctgaggtttccacatccaggg

SEQ ID NO: 5169330 - DNA, 25 bp, Homo sapien
ggtttccacatccagggtggtgtga

SEQ ID NO: 5169331 - DNA, 25 bp, Homo sapien
taagttgacatcgtctgtccagcac

SEQ ID NO: 5169332 - DNA, 25 bp, Homo sapien
ttgacatcgtctgtccagcacgagt

SEQ ID NO: 5169333 - DNA, 25 bp, Homo sapien
tgaattcccattggcagacgccaga

SEQ ID NO: 5169334 - DNA, 25 bp, Homo sapien
cacgagttttactacttctgaattc

SEQ ID NO: 5169335 - DNA, 25 bp, Homo sapien
cacgctgatagagttggctactgca

SEQ ID NO: 5169336 - DNA, 25 bp, Homo sapien
cgctgatagagttggctactgcata

SEQ ID NO: 5169337 - DNA, 25 bp, Homo sapien
gctgatagagttggctactgcatac

SEQ ID NO: 5169338 - DNA, 25 bp, Homo sapien
ctcacgctgatagagttggctactg

SEQ ID NO: 5169339 - DNA, 25 bp, Homo sapien
gtagagtggtatttccatactcatc

SEQ ID NO: 5169340 - DNA, 25 bp, Homo sapien
gattcgatatcagcaccgtataaga

SEQ ID NO: 5169341 - DNA, 25 bp, Homo sapien
tggaatatttggatcagtgccatgt

SEQ ID NO: 5169342 - DNA, 25 bp, Homo sapien
tgtagacagcatagtgtagagtggt

SEQ ID NO: 5169343 - DNA, 25 bp, Homo sapien
ctgtttttgctcatgtataccaagt

SEQ ID NO: 5169344 - DNA, 25 bp, Homo sapien
ttgctgtttttgctcatgtatacca

SEQ ID NO: 5169345 - DNA, 25 bp, Homo sapien
acttgctgtttttgctcatgtatac

SEQ ID NO: 5169346 - DNA, 25 bp, Homo sapien
tataccaagtagcagtggtgtgagg

SEQ ID NO: 5169347 - DNA, 25 bp, Homo sapien
agcatactctctggccgtctgtcca

SEQ ID NO: 5169348 - DNA, 25 bp, Homo sapien
cagcatactctctggccgtctgtcc

SEQ ID NO: 5169349 - DNA, 25 bp, Homo sapien
acagcatactctctggccgtctgtc

SEQ ID NO: 5169350 - DNA, 25 bp, Homo sapien
ttgtgtgcggataaagtcaggatgc

SEQ ID NO: 5169351 - DNA, 25 bp, Homo sapien
tgtgtgcggataaagtcaggatgcc

SEQ ID NO: 5169352 - DNA, 25 bp, Homo sapien
tttgtgtgcggataaagtcaggatg

SEQ ID NO: 5169353 - DNA, 25 bp, Homo sapien
gtgtgcggataaagtcaggatgccc

SEQ ID NO: 5169354 - DNA, 25 bp, Homo sapien
agccacgctaactttccccgtattg

SEQ ID NO: 5169355 - DNA, 25 bp, Homo sapien
tgcagaagccacgctaactttcccc

SEQ ID NO: 5169356 - DNA, 25 bp, Homo sapien
tgcctccttatgcagaagccacgct

SEQ ID NO: 5169357 - DNA, 25 bp, Homo sapien
tgctgcctccttatgcagaagccac

SEQ ID NO: 5169358 - DNA, 25 bp, Homo sapien
gtagtcagaaagtaactggcaaatt

SEQ ID NO: 5169359 - DNA, 25 bp, Homo sapien
tttctttgtagtcagaaagtaactg

SEQ ID NO: 5169360 - DNA, 25 bp, Homo sapien
tttgtagtcagaaagtaactggcaa

SEQ ID NO: 5169361 - DNA, 25 bp, Homo sapien
tctttgtagtcagaaagtaactggc

SEQ ID NO: 5169362 - DNA, 25 bp, Homo sapien
agcagctcagtaatgccagagaaag

SEQ ID NO: 5169363 - DNA, 25 bp, Homo sapien
aaggatgagtgagtagggcattacc

SEQ ID NO: 5169364 - DNA, 25 bp, Homo sapien
gctcagtaatgccagagaaagggca

SEQ ID NO: 5169365 - DNA, 25 bp, Homo sapien
gagtagggcattaccagcagctcag

SEQ ID NO: 5169366 - DNA, 25 bp, Homo sapien
tggctgttttcacttcctttaagct

SEQ ID NO: 5169367 - DNA, 25 bp, Homo sapien
acttcctttaagcttttgtgactct

SEQ ID NO: 5169368 - DNA, 25 bp, Homo sapien
ctggctgttttcacttcctttaagc

SEQ ID NO: 5169369 - DNA, 25 bp, Homo sapien
tttcacttcctttaagcttttgtga

SEQ ID NO: 5169370 - DNA, 25 bp, Homo sapien
tagtgagcccctacagtgcactgaa

SEQ ID NO: 5169371 - DNA, 25 bp, Homo sapien
ccctaactggattgtaggcaccctt

SEQ ID NO: 5169372 - DNA, 25 bp, Homo sapien
aataattcaccttagacaacgggag

SEQ ID NO: 5169373 - DNA, 25 bp, Homo sapien
tgcaaagagtttacctcacgaaacc

SEQ ID NO: 5169374 - DNA, 25 bp, Homo sapien
tttatttctggttcttgagacattt

SEQ ID NO: 5169375 - DNA, 25 bp, Homo sapien
caccatccttatttatttctggttc

SEQ ID NO: 5169376 - DNA, 25 bp, Homo sapien
ttatttatttctggttcttgagaca

SEQ ID NO: 5169377 - DNA, 25 bp, Homo sapien
acctctctatcaccatccttattta

SEQ ID NO: 5169378 - DNA, 25 bp, Homo sapien
ggaaattgctggctttcaggtgttc

SEQ ID NO: 5169379 - DNA, 25 bp, Homo sapien
gaaattgctggctttcaggtgttct

SEQ ID NO: 5169380 - DNA, 25 bp, Homo sapien
ggccttgctcaccaaccaatatcaa

SEQ ID NO: 5169381 - DNA, 25 bp, Homo sapien
ctggccttgctcaccaaccaatatc

SEQ ID NO: 5169382 - DNA, 25 bp, Homo sapien
tggccttgctcaccaaccaatatca

SEQ ID NO: 5169383 - DNA, 25 bp, Homo sapien
ccttgctcaccaaccaatatcaatg

SEQ ID NO: 5169384 - DNA, 25 bp, Homo sapien
gagagaagtgaagcgcaaagagccc

SEQ ID NO: 5169385 - DNA, 25 bp, Homo sapien
cagaagcagcgtggtactcgtataa

SEQ ID NO: 5169386 - DNA, 25 bp, Homo sapien
tacaaccaagtgatctctgagcaag

SEQ ID NO: 5169387 - DNA, 25 bp, Homo sapien
tcatgtaggaccacaaaagagcctg

SEQ ID NO: 5169388 - DNA, 25 bp, Homo sapien
tcttcatgaacagaatctcatcttg

SEQ ID NO: 5169389 - DNA, 25 bp, Homo sapien
cttctatctgcttttcttcatgaac

SEQ ID NO: 5169390 - DNA, 25 bp, Homo sapien
ttgcttctgagtatcattttgttca

SEQ ID NO: 5169391 - DNA, 25 bp, Homo sapien
tttcttttcagccacttctatctgc

SEQ ID NO: 5169392 - DNA, 25 bp, Homo sapien
ctgcaacgtactattttcatgcaag

SEQ ID NO: 5169393 - DNA, 25 bp, Homo sapien
caacgtactattttcatgcaagaag

SEQ ID NO: 5169394 - DNA, 25 bp, Homo sapien
caacttcttcctgcaacgtactatt

SEQ ID NO: 5169395 - DNA, 25 bp, Homo sapien
tactattttcatgcaagaagtcttt

SEQ ID NO: 5169396 - DNA, 25 bp, Homo sapien
tctcttagctggctctgatgtttca

SEQ ID NO: 5169397 - DNA, 25 bp, Homo sapien
ctcttagctggctctgatgtttcat

SEQ ID NO: 5169398 - DNA, 25 bp, Homo sapien
gagctcattcaattgtagagccttt

SEQ ID NO: 5169399 - DNA, 25 bp, Homo sapien
ggtgagctcattcaattgtagagcc

SEQ ID NO: 5169400 - DNA, 25 bp, Homo sapien
cgagcacagcggtatcatcatccat

SEQ ID NO: 5169401 - DNA, 25 bp, Homo sapien
ttgtcaatgacgagcacagcggtat

SEQ ID NO: 5169402 - DNA, 25 bp, Homo sapien
cctggggggcatcgtcgcccgcaaa

SEQ ID NO: 5169403 - DNA, 25 bp, Homo sapien
ccgttgtcaatgacgagcacagcgg

SEQ ID NO: 5169404 - DNA, 25 bp, Homo sapien
atgccctggtgcctggggcgcccca

SEQ ID NO: 5169405 - DNA, 25 bp, Homo sapien
catgccctggtgcctggggcgcccc

SEQ ID NO: 5169406 - DNA, 25 bp, Homo sapien
tgccctggtgcctggggcgccccac

SEQ ID NO: 5169407 - DNA, 25 bp, Homo sapien
cccacataggactccttctgatgca

SEQ ID NO: 5169408 - DNA, 25 bp, Homo sapien
gccagtagtacggccagaggtgtat

SEQ ID NO: 5169409 - DNA, 25 bp, Homo sapien
cagtagtacggccagaggtgtatag

SEQ ID NO: 5169410 - DNA, 25 bp, Homo sapien
taggactccttctgatgcatgccct

SEQ ID NO: 5169411 - DNA, 25 bp, Homo sapien
tgggcacagtgtgggtgaacccatc

SEQ ID NO: 5169412 - DNA, 25 bp, Homo sapien
ctaggcgcagggtggcatgggggag

SEQ ID NO: 5169413 - DNA, 25 bp, Homo sapien
ggcacagtgtgggtgaacccatcac

SEQ ID NO: 5169414 - DNA, 25 bp, Homo sapien
catgggggagggcattcccctcata

SEQ ID NO: 5169415 - DNA, 25 bp, Homo sapien
ctctttgatgtcacgcacaatttcc

SEQ ID NO: 5169416 - DNA, 25 bp, Homo sapien
atgacctgaccatcgggcagctcgt

SEQ ID NO: 5169417 - DNA, 25 bp, Homo sapien
acaatttcctgctcggccgtggtgg

SEQ ID NO: 5169418 - DNA, 25 bp, Homo sapien
ctcgtagctcttctctacggaggag

SEQ ID NO: 5169419 - DNA, 25 bp, Homo sapien
tggaagagcgcctcggggcagcgga

SEQ ID NO: 5169420 - DNA, 25 bp, Homo sapien
gaagcaaggctggaagagcgcctcg

SEQ ID NO: 5169421 - DNA, 25 bp, Homo sapien
gcaaggctggaagagcgcctcgggg

SEQ ID NO: 5169422 - DNA, 25 bp, Homo sapien
aggaagcaaggctggaagagcgcct

SEQ ID NO: 5169423 - DNA, 25 bp, Homo sapien
cagacttcactatggagttgaaggt

SEQ ID NO: 5169424 - DNA, 25 bp, Homo sapien
ccacatcagacttcactatggagtt

SEQ ID NO: 5169425 - DNA, 25 bp, Homo sapien
acatcagacttcactatggagttga

SEQ ID NO: 5169426 - DNA, 25 bp, Homo sapien
tgcggatgtccacatcagacttcac

SEQ ID NO: 5169427 - DNA, 25 bp, Homo sapien
tgatcttcataatgctaggcgccag

SEQ ID NO: 5169428 - DNA, 25 bp, Homo sapien
ttcataatgctaggcgccagggcag

SEQ ID NO: 5169429 - DNA, 25 bp, Homo sapien
tcttcataatgctaggcgccagggc

SEQ ID NO: 5169430 - DNA, 25 bp, Homo sapien
tcttgatcttcataatgctaggcgc

SEQ ID NO: 5169431 - DNA, 25 bp, Homo sapien
tggagccaccgacccacacggagta

SEQ ID NO: 5169432 - DNA, 25 bp, Homo sapien
aggatggagccaccgacccacacgg

SEQ ID NO: 5169433 - DNA, 25 bp, Homo sapien
caggatggagccaccgacccacacg

SEQ ID NO: 5169434 - DNA, 25 bp, Homo sapien
gatggagccaccgacccacacggag

SEQ ID NO: 5169435 - DNA, 25 bp, Homo sapien
ctactatcaccttcgccgttccggt

SEQ ID NO: 5169436 - DNA, 25 bp, Homo sapien
gactactatcaccttcgccgttccg

SEQ ID NO: 5169437 - DNA, 25 bp, Homo sapien
tccaaccgactactatcaccttcgc

SEQ ID NO: 5169438 - DNA, 25 bp, Homo sapien
aaccgactactatcaccttcgccgt

SEQ ID NO: 5169439 - DNA, 25 bp, Homo sapien
ttggtttgggcaatacaaatagccc

SEQ ID NO: 5169440 - DNA, 25 bp, Homo sapien
tggtttgggcaatacaaatagccca

SEQ ID NO: 5169441 - DNA, 25 bp, Homo sapien
tctgcctcgatgacaaagaccgtat

SEQ ID NO: 5169442 - DNA, 25 bp, Homo sapien
tactctacgctaggcatggtgcatc

SEQ ID NO: 5169443 - DNA, 25 bp, Homo sapien
tcagggctgtggtgaattatgatca

SEQ ID NO: 5169444 - DNA, 25 bp, Homo sapien
gagtaaagacccaatggtgtcctgt

SEQ ID NO: 5169445 - DNA, 25 bp, Homo sapien
aatcccccttgagagtttctcatgc

SEQ ID NO: 5169446 - DNA, 25 bp, Homo sapien
aattaaatcacacttgtcaactttc

SEQ ID NO: 5169447 - DNA, 25 bp, Homo sapien
tcaatcccccttgagagtttctcat

SEQ ID NO: 5169448 - DNA, 25 bp, Homo sapien
cccccttgagagtttctcatgctgt

SEQ ID NO: 5169449 - DNA, 25 bp, Homo sapien
cttgttgatttgtctaagtctctta

SEQ ID NO: 5169450 - DNA, 25 bp, Homo sapien
cagaagtcattctaactcgtgtgag

SEQ ID NO: 5169451 - DNA, 25 bp, Homo sapien
gatttgtctaagtctcttatagatt

SEQ ID NO: 5169452 - DNA, 25 bp, Homo sapien
aacagaagtcattctaactcgtgtg

SEQ ID NO: 5169453 - DNA, 25 bp, Homo sapien
tattagagttgcaagcggcgtaagt

SEQ ID NO: 5169454 - DNA, 25 bp, Homo sapien
cggcgtaagtggaaaataatgatca

SEQ ID NO: 5169455 - DNA, 25 bp, Homo sapien
cattttgagccagtgacatattgtg

SEQ ID NO: 5169456 - DNA, 25 bp, Homo sapien
gatttagtgctgaactgtcaaaggg

SEQ ID NO: 5169457 - DNA, 25 bp, Homo sapien
aagaactctgaccaagccgactggg

SEQ ID NO: 5169458 - DNA, 25 bp, Homo sapien
aactctgaccaagccgactgggcac

SEQ ID NO: 5169459 - DNA, 25 bp, Homo sapien
tctgaccaagccgactgggcactct

SEQ ID NO: 5169460 - DNA, 25 bp, Homo sapien
gaccaagccgactgggcactcttgt

SEQ ID NO: 5169461 - DNA, 25 bp, Homo sapien
aaatcaacgtagcacagcaagccag

SEQ ID NO: 5169462 - DNA, 25 bp, Homo sapien
tgacactccatgttgcctgtaagcc

SEQ ID NO: 5169463 - DNA, 25 bp, Homo sapien
ttcagcccgaggagaacacggtgga

SEQ ID NO: 5169464 - DNA, 25 bp, Homo sapien
tgtggcttcccaagtcagacactga

SEQ ID NO: 5169465 - DNA, 25 bp, Homo sapien
taaaaactcacagatagtgactgga

SEQ ID NO: 5169466 - DNA, 25 bp, Homo sapien
ataaaaactcacagatagtgactgg

SEQ ID NO: 5169467 - DNA, 25 bp, Homo sapien
aaaactcacagatagtgactggaag

SEQ ID NO: 5169468 - DNA, 25 bp, Homo sapien
aaataaaaactcacagatagtgact

SEQ ID NO: 5169469 - DNA, 25 bp, Homo sapien
attgtaaaagtgtcaatgctaccca

SEQ ID NO: 5169470 - DNA, 25 bp, Homo sapien
gtaaataaatccgtgtgtctgtggt

SEQ ID NO: 5169471 - DNA, 25 bp, Homo sapien
aatccgtgtgtctgtggtcaattga

SEQ ID NO: 5169472 - DNA, 25 bp, Homo sapien
aaagacctggaccaaccaaagcaat

SEQ ID NO: 5169473 - DNA, 25 bp, Homo sapien
ccagaaacccaaagatgttggcaca

SEQ ID NO: 5169474 - DNA, 25 bp, Homo sapien
aacatttagctcttaatctgaccca

SEQ ID NO: 5169475 - DNA, 25 bp, Homo sapien
aggaggcctgaagaaaacaagtgac

SEQ ID NO: 5169476 - DNA, 25 bp, Homo sapien
aaaaatggaactgcatgcagctgct

SEQ ID NO: 5169477 - DNA, 25 bp, Homo sapien
tccttgccggcctggaagctctgag

SEQ ID NO: 5169478 - DNA, 25 bp, Homo sapien
ctactaatgtttgcacttcctcctt

SEQ ID NO: 5169479 - DNA, 25 bp, Homo sapien
aatgtttgcacttcctccttgccgg

SEQ ID NO: 5169480 - DNA, 25 bp, Homo sapien
cagcaggagcagtgtgtgtgcacgc

SEQ ID NO: 5169481 - DNA, 25 bp, Homo sapien
gatgtgcttccctaatgcctactaa

SEQ ID NO: 5169482 - DNA, 25 bp, Homo sapien
cacctaggttggtattgatcttctg

SEQ ID NO: 5169483 - DNA, 25 bp, Homo sapien
acaggtgtgaagcagcatgccacgc

SEQ ID NO: 5169484 - DNA, 25 bp, Homo sapien
gcaacaggcaccttattaaattaga

SEQ ID NO: 5169485 - DNA, 25 bp, Homo sapien
atgtacaagatcacacaatcacaac

SEQ ID NO: 5169486 - DNA, 25 bp, Homo sapien
caggtcatccactttctggggaggc

SEQ ID NO: 5169487 - DNA, 25 bp, Homo sapien
tggacaactactagagatgtttatg

SEQ ID NO: 5169488 - DNA, 25 bp, Homo sapien
ccagaagcaccagttggacaactac

SEQ ID NO: 5169489 - DNA, 25 bp, Homo sapien
cctcatgagtaactgtttgtaagga

SEQ ID NO: 5169490 - DNA, 25 bp, Homo sapien
ctcatgagtaactgtttgtaaggaa

SEQ ID NO: 5169491 - DNA, 25 bp, Homo sapien
tgtctttgctcactgtgttaaaggc

SEQ ID NO: 5169492 - DNA, 25 bp, Homo sapien
ctttgctcactgtgttaaaggcttt

SEQ ID NO: 5169493 - DNA, 25 bp, Homo sapien
ctgtgtctttgctcactgtgttaaa

SEQ ID NO: 5169494 - DNA, 25 bp, Homo sapien
tctttgctcactgtgttaaaggctt

SEQ ID NO: 5169495 - DNA, 25 bp, Homo sapien
gtggactggacccaggcccgcccat

SEQ ID NO: 5169496 - DNA, 25 bp, Homo sapien
tggactggacccaggcccgcccatt

SEQ ID NO: 5169497 - DNA, 25 bp, Homo sapien
ggctgcctgggtcaccgggctctcc

SEQ ID NO: 5169498 - DNA, 25 bp, Homo sapien
tgcctgggtcaccgggctctccagg

SEQ ID NO: 5169499 - DNA, 25 bp, Homo sapien
ccctggggtccagcgctgcccccat

SEQ ID NO: 5169500 - DNA, 25 bp, Homo sapien
agggctgcctgggtcaccgggctct

SEQ ID NO: 5169501 - DNA, 25 bp, Homo sapien
ccggcctcactgtccgcatctgtcc

SEQ ID NO: 5169502 - DNA, 25 bp, Homo sapien
agctcgcgggcctcgctatggccca

SEQ ID NO: 5169503 - DNA, 25 bp, Homo sapien
gggagctcgcgggcctcgctatggc

SEQ ID NO: 5169504 - DNA, 25 bp, Homo sapien
cctcactgtccgcatctgtcctgtg

SEQ ID NO: 5169505 - DNA, 25 bp, Homo sapien
tgggggtccctcaagcttggcgtct

SEQ ID NO: 5169506 - DNA, 25 bp, Homo sapien
aaaggaagcagcctcgctagagctc

SEQ ID NO: 5169507 - DNA, 25 bp, Homo sapien
ctagaagtcgcaggagcgctccctg

SEQ ID NO: 5169508 - DNA, 25 bp, Homo sapien
tccctttgcctagggagcgcccagg

SEQ ID NO: 5169509 - DNA, 25 bp, Homo sapien
gacgaaaggcccctggtctctcatc

SEQ ID NO: 5169510 - DNA, 25 bp, Homo sapien
gacgacgaaaggcccctggtctctc

SEQ ID NO: 5169511 - DNA, 25 bp, Homo sapien
ctgcccagcccaggggacgacgaaa

SEQ ID NO: 5169512 - DNA, 25 bp, Homo sapien
gtctctcatcctccccagctttcgg

SEQ ID NO: 5169513 - DNA, 25 bp, Homo sapien
gctcggacttgccagaagccgctta

SEQ ID NO: 5169514 - DNA, 25 bp, Homo sapien
agctccgtagggacacgcacgctag

SEQ ID NO: 5169515 - DNA, 25 bp, Homo sapien
agaagccgcttagggttgcggcaca

SEQ ID NO: 5169516 - DNA, 25 bp, Homo sapien
acgctagcagcatccctagtgccag

SEQ ID NO: 5169517 - DNA, 25 bp, Homo sapien
catggaacccaccaccgctcagaag

SEQ ID NO: 5169518 - DNA, 25 bp, Homo sapien
accaccgctcagaagctcgctctga

SEQ ID NO: 5169519 - DNA, 25 bp, Homo sapien
acccaccaccgctcagaagctcgct

SEQ ID NO: 5169520 - DNA, 25 bp, Homo sapien
tggaacccaccaccgctcagaagct

SEQ ID NO: 5169521 - DNA, 25 bp, Homo sapien
gcccacgaagaagtgcgggcacgaa

SEQ ID NO: 5169522 - DNA, 25 bp, Homo sapien
cacaaccgcccccaagcggaggact

SEQ ID NO: 5169523 - DNA, 25 bp, Homo sapien
gcgggcacgaaaacagggagaggca

SEQ ID NO: 5169524 - DNA, 25 bp, Homo sapien
gcagtagccaggaccgcacaaccgc

SEQ ID NO: 5169525 - DNA, 25 bp, Homo sapien
gcgggtcggacattggcatagcctt

SEQ ID NO: 5169526 - DNA, 25 bp, Homo sapien
ggacgcgggtcggacattggcatag

SEQ ID NO: 5169527 - DNA, 25 bp, Homo sapien
ctatacgctggacgcgggtcggaca

SEQ ID NO: 5169528 - DNA, 25 bp, Homo sapien
gtcggacattggcatagccttcccg

SEQ ID NO: 5169529 - DNA, 25 bp, Homo sapien
aatagctggagactcctcaaagaac

SEQ ID NO: 5169530 - DNA, 25 bp, Homo sapien
aggtcccgcgttttaccgccagctg

SEQ ID NO: 5169531 - DNA, 25 bp, Homo sapien
ggaaaacagctaaatagctggagac

SEQ ID NO: 5169532 - DNA, 25 bp, Homo sapien
gctgaggcatcaaaaataatcctag

SEQ ID NO: 5169533 - DNA, 25 bp, Homo sapien
taatgaaacagtcccatttagagca

SEQ ID NO: 5169534 - DNA, 25 bp, Homo sapien
tgaaacagtcccatttagagcaacg

SEQ ID NO: 5169535 - DNA, 25 bp, Homo sapien
aaaataatgaaacagtcccatttag

SEQ ID NO: 5169536 - DNA, 25 bp, Homo sapien
aataatgaaacagtcccatttagag

SEQ ID NO: 5169537 - DNA, 25 bp, Homo sapien
tgtgggaccacgtcaagctgaagca

SEQ ID NO: 5169538 - DNA, 25 bp, Homo sapien
tgaccgaatgtctacaaaaacgtgg

SEQ ID NO: 5169539 - DNA, 25 bp, Homo sapien
gctcctataaagacaacctcgggtg

SEQ ID NO: 5169540 - DNA, 25 bp, Homo sapien
ttctgagaaatacaaaccatacggg

SEQ ID NO: 5169541 - DNA, 25 bp, Homo sapien
tgatcaattctggccttctattcca

SEQ ID NO: 5169542 - DNA, 25 bp, Homo sapien
tcaattctggccttctattccacag

SEQ ID NO: 5169543 - DNA, 25 bp, Homo sapien
atcaattctggccttctattccaca

SEQ ID NO: 5169544 - DNA, 25 bp, Homo sapien
gatcaattctggccttctattccac

SEQ ID NO: 5169545 - DNA, 25 bp, Homo sapien
tgaggaaactgctgtacagatacac

SEQ ID NO: 5169546 - DNA, 25 bp, Homo sapien
agtaactgtggtggacatacacaaa

SEQ ID NO: 5169547 - DNA, 25 bp, Homo sapien
atcatttggagccatactgttgaac

SEQ ID NO: 5169548 - DNA, 25 bp, Homo sapien
taaagtaactgtggtggacatacac

SEQ ID NO: 5169549 - DNA, 25 bp, Homo sapien
aaagtaactgtggtggacatacaca

SEQ ID NO: 5169550 - DNA, 25 bp, Homo sapien
tctgagcatcatgtgctcgaagctc

SEQ ID NO: 5169551 - DNA, 25 bp, Homo sapien
tgtgctcgaagctccatcttactgt

SEQ ID NO: 5169552 - DNA, 25 bp, Homo sapien
gctccatcttactgtaagcagcatg

SEQ ID NO: 5169553 - DNA, 25 bp, Homo sapien
catcttgctgatatctccaatcact

SEQ ID NO: 5169554 - DNA, 25 bp, Homo sapien
aacaaactccatcttgctctgagca

SEQ ID NO: 5169555 - DNA, 25 bp, Homo sapien
acaacaaactccatcttgctctgag

SEQ ID NO: 5169556 - DNA, 25 bp, Homo sapien
acaaactccatcttgctctgagcac

SEQ ID NO: 5169557 - DNA, 25 bp, Homo sapien
ttacaacaaactccatcttgctctg

SEQ ID NO: 5169558 - DNA, 25 bp, Homo sapien
tcaccgagctcaatcttactctgag

SEQ ID NO: 5169559 - DNA, 25 bp, Homo sapien
ccatcttacactgagaagcacctgc

SEQ ID NO: 5169560 - DNA, 25 bp, Homo sapien
gctcagagcaatgtttggagtgcca

SEQ ID NO: 5169561 - DNA, 25 bp, Homo sapien
tgtttggagtgccaatcaccgagct

SEQ ID NO: 5169562 - DNA, 25 bp, Homo sapien
ttttcccatagactcacagacagcg

SEQ ID NO: 5169563 - DNA, 25 bp, Homo sapien
gcagccaagaacagcatgtcaccca

SEQ ID NO: 5169564 - DNA, 25 bp, Homo sapien
caagttcctctaaacgtggcagtaa

SEQ ID NO: 5169565 - DNA, 25 bp, Homo sapien
tggcagtaaacttagtgcctttcag

SEQ ID NO: 5169566 - DNA, 25 bp, Homo sapien
cagaactatcccttggacagtttgg

SEQ ID NO: 5169567 - DNA, 25 bp, Homo sapien
tgagagcttctaggactcaacatct

SEQ ID NO: 5169568 - DNA, 25 bp, Homo sapien
tatcccttggacagtttggagtttc

SEQ ID NO: 5169569 - DNA, 25 bp, Homo sapien
catctagaagcccatcatccaagac

SEQ ID NO: 5169570 - DNA, 25 bp, Homo sapien
tccagcaaggagttagcagcagcct

SEQ ID NO: 5169571 - DNA, 25 bp, Homo sapien
cctctggtggctaaaatgctttgaa

SEQ ID NO: 5169572 - DNA, 25 bp, Homo sapien
gctttgaagatcatttgtgcagcag

SEQ ID NO: 5169573 - DNA, 25 bp, Homo sapien
cagcatgattcaagatactgatgga

SEQ ID NO: 5169574 - DNA, 25 bp, Homo sapien
aatcttataaccctgcagtactgtg

SEQ ID NO: 5169575 - DNA, 25 bp, Homo sapien
gaatgacagtgagtagacgtctgct

SEQ ID NO: 5169576 - DNA, 25 bp, Homo sapien
tgaagcacatccacagcagtagtgt

SEQ ID NO: 5169577 - DNA, 25 bp, Homo sapien
gacgtctgcttctattggctatcag

SEQ ID NO: 5169578 - DNA, 25 bp, Homo sapien
tgttgcagccctcagtacctgaatg

SEQ ID NO: 5169579 - DNA, 25 bp, Homo sapien
gtgcatcttctcatcggcctgtgaa

SEQ ID NO: 5169580 - DNA, 25 bp, Homo sapien
taatacctaacgagacaagtgaatg

SEQ ID NO: 5169581 - DNA, 25 bp, Homo sapien
cagggagctgttattaggatgagac

SEQ ID NO: 5169582 - DNA, 25 bp, Homo sapien
actcaaggatgccacttggtgtagc

SEQ ID NO: 5169583 - DNA, 25 bp, Homo sapien
tgagggcatcttgcaaaactcaagg

SEQ ID NO: 5169584 - DNA, 25 bp, Homo sapien
tcttgcaaaactcaaggatgccact

SEQ ID NO: 5169585 - DNA, 25 bp, Homo sapien
aggactcatgccttggcactgaggg

SEQ ID NO: 5169586 - DNA, 25 bp, Homo sapien
aacatgctccctatttctgcttgac

SEQ ID NO: 5169587 - DNA, 25 bp, Homo sapien
tacatcacagtgctctaaaagctct

SEQ ID NO: 5169588 - DNA, 25 bp, Homo sapien
tcatctccagttcaaattctctgcc

SEQ ID NO: 5169589 - DNA, 25 bp, Homo sapien
cgaacactttttcatagaatggctg

SEQ ID NO: 5169590 - DNA, 25 bp, Homo sapien
agcaatacttgttcaattagtccag

SEQ ID NO: 5169591 - DNA, 25 bp, Homo sapien
ttgttcaattagtccagcttctgtg

SEQ ID NO: 5169592 - DNA, 25 bp, Homo sapien
tacttgttcaattagtccagcttct

SEQ ID NO: 5169593 - DNA, 25 bp, Homo sapien
caatacttgttcaattagtccagct

SEQ ID NO: 5169594 - DNA, 25 bp, Homo sapien
taaatcaaagcagtgtcaacaaatc

SEQ ID NO: 5169595 - DNA, 25 bp, Homo sapien
tatactttcctgacagacaacccca

SEQ ID NO: 5169596 - DNA, 25 bp, Homo sapien
gcagtgtcaacaaatctacattacc

SEQ ID NO: 5169597 - DNA, 25 bp, Homo sapien
tatagaatataaagagaagtatgtg

SEQ ID NO: 5169598 - DNA, 25 bp, Homo sapien
catagcactccgtggtactgagatt

SEQ ID NO: 5169599 - DNA, 25 bp, Homo sapien
atagcactccgtggtactgagattt

SEQ ID NO: 5169600 - DNA, 25 bp, Homo sapien
ttcatagcactccgtggtactgaga

SEQ ID NO: 5169601 - DNA, 25 bp, Homo sapien
tcatagcactccgtggtactgagat

SEQ ID NO: 5169602 - DNA, 25 bp, Homo sapien
gtgggttcaggaatcctcgtagccc

SEQ ID NO: 5169603 - DNA, 25 bp, Homo sapien
gaatgctggtctaccaccagcagcc

SEQ ID NO: 5169604 - DNA, 25 bp, Homo sapien
tcgtgggttcaggaatcctcgtagc

SEQ ID NO: 5169605 - DNA, 25 bp, Homo sapien
atgctggtctaccaccagcagcctg

SEQ ID NO: 5169606 - DNA, 25 bp, Homo sapien
tggcaggtggacggggagtatcggg

SEQ ID NO: 5169607 - DNA, 25 bp, Homo sapien
caggtggacggggagtatcggggct

SEQ ID NO: 5169608 - DNA, 25 bp, Homo sapien
gtggacggggagtatcggggctctg

SEQ ID NO: 5169609 - DNA, 25 bp, Homo sapien
tggacggggagtatcggggctctga

SEQ ID NO: 5169610 - DNA, 25 bp, Homo sapien
ggggacaaagcagctgagtcccaca

SEQ ID NO: 5169611 - DNA, 25 bp, Homo sapien
gggacaaagcagctgagtcccacag

SEQ ID NO: 5169612 - DNA, 25 bp, Homo sapien
cattcagatggagggtgtcaagctc

SEQ ID NO: 5169613 - DNA, 25 bp, Homo sapien
tggggacaaagcagctgagtcccac

SEQ ID NO: 5169614 - DNA, 25 bp, Homo sapien
ctgggcgccggcaccagtacgagtc

SEQ ID NO: 5169615 - DNA, 25 bp, Homo sapien
gaattttatgttctagcccataata

SEQ ID NO: 5169616 - DNA, 25 bp, Homo sapien
taagagtattctctggtatctgaac

SEQ ID NO: 5169617 - DNA, 25 bp, Homo sapien
cagaagatacttaagctgaagattc

SEQ ID NO: 5169618 - DNA, 25 bp, Homo sapien
caggatcagatataatactgtggag

SEQ ID NO: 5169619 - DNA, 25 bp, Homo sapien
tgacagagctagagaaagttaatgg

SEQ ID NO: 5169620 - DNA, 25 bp, Homo sapien
taacaacattgaaaccaagaaaggc

SEQ ID NO: 5169621 - DNA, 25 bp, Homo sapien
tactggcatactaaaattaccgagg

SEQ ID NO: 5169622 - DNA, 25 bp, Homo sapien
tatgctgtactgtgcattactggca

SEQ ID NO: 5169623 - DNA, 25 bp, Homo sapien
tctacaggagcattccccttagctg

SEQ ID NO: 5169624 - DNA, 25 bp, Homo sapien
gataaataatgcagttgatcaagca

SEQ ID NO: 5169625 - DNA, 25 bp, Homo sapien
cattaaatcctatgggataggcact

SEQ ID NO: 5169626 - DNA, 25 bp, Homo sapien
tgatcaagcaaagcagtacattttt

SEQ ID NO: 5169627 - DNA, 25 bp, Homo sapien
acaactgagaatagtataatatcct

SEQ ID NO: 5169628 - DNA, 25 bp, Homo sapien
actgagaatagtataatatcctctg

SEQ ID NO: 5169629 - DNA, 25 bp, Homo sapien
caactgagaatagtataatatcctc

SEQ ID NO: 5169630 - DNA, 25 bp, Homo sapien
tgagaatagtataatatcctctgat

SEQ ID NO: 5169631 - DNA, 25 bp, Homo sapien
gcagagtaaccaactcctttgctag

SEQ ID NO: 5169632 - DNA, 25 bp, Homo sapien
aacaaaatgagcagagtaaccaact

SEQ ID NO: 5169633 - DNA, 25 bp, Homo sapien
caaaatgagcagagtaaccaactcc

SEQ ID NO: 5169634 - DNA, 25 bp, Homo sapien
tgagcagagtaaccaactcctttgc

SEQ ID NO: 5169635 - DNA, 25 bp, Homo sapien
taaacgtgtgtgacgggaactccta

SEQ ID NO: 5169636 - DNA, 25 bp, Homo sapien
caaagatggagtccggtacacaggc

SEQ ID NO: 5169637 - DNA, 25 bp, Homo sapien
gaagccagcattactaaagcatcag

SEQ ID NO: 5169638 - DNA, 25 bp, Homo sapien
taccaggattaggtgaatctcccac

SEQ ID NO: 5169639 - DNA, 25 bp, Homo sapien
ggcaatgtgattggtattaaagtaa

SEQ ID NO: 5169640 - DNA, 25 bp, Homo sapien
atctgtacttctaatcaattccact

SEQ ID NO: 5169641 - DNA, 25 bp, Homo sapien
aattataataccaacaatctgtact

SEQ ID NO: 5169642 - DNA, 25 bp, Homo sapien
aattgtttgcatgtatattctttaa

SEQ ID NO: 5169643 - DNA, 25 bp, Homo sapien
ggtgcagctgggaaagcaaaagttt

SEQ ID NO: 5169644 - DNA, 25 bp, Homo sapien
gcctaacttttgacctgatatacat

SEQ ID NO: 5169645 - DNA, 25 bp, Homo sapien
cttggaaactacctgtgcatagtga

SEQ ID NO: 5169646 - DNA, 25 bp, Homo sapien
ggataacaacaacttagctagggca

SEQ ID NO: 5169647 - DNA, 25 bp, Homo sapien
gtcccaaccttggatcatggatata

SEQ ID NO: 5169648 - DNA, 25 bp, Homo sapien
gcgaagaccagattgtaaacagacc

SEQ ID NO: 5169649 - DNA, 25 bp, Homo sapien
tttatgccaagtaccctgtcccaac

SEQ ID NO: 5169650 - DNA, 25 bp, Homo sapien
cagacctttaggaaactggcctttg

SEQ ID NO: 5169651 - DNA, 25 bp, Homo sapien
tgcagatacccaaggctaaccagtt

SEQ ID NO: 5169652 - DNA, 25 bp, Homo sapien
gagaagacaagaactacagcccctt

SEQ ID NO: 5169653 - DNA, 25 bp, Homo sapien
tatgctgacaggactattaatgatc

SEQ ID NO: 5169654 - DNA, 25 bp, Homo sapien
gatcatctaataccacttcctcaag

SEQ ID NO: 5169655 - DNA, 25 bp, Homo sapien
ctccatcgattgtaaatgtggacaa

SEQ ID NO: 5169656 - DNA, 25 bp, Homo sapien
catgccaagccatatcaccataaga

SEQ ID NO: 5169657 - DNA, 25 bp, Homo sapien
tcatttgtgttaacatgccaagcca

SEQ ID NO: 5169658 - DNA, 25 bp, Homo sapien
cataagataccagttgtccattaac

SEQ ID NO: 5169659 - DNA, 25 bp, Homo sapien
gatagatcatactctcaaacaaatt

SEQ ID NO: 5169660 - DNA, 25 bp, Homo sapien
ttttgtaatgatagatcatactctc

SEQ ID NO: 5169661 - DNA, 25 bp, Homo sapien
agatcatactctcaaacaaattaaa

SEQ ID NO: 5169662 - DNA, 25 bp, Homo sapien
taatgatagatcatactctcaaaca

SEQ ID NO: 5169663 - DNA, 25 bp, Homo sapien
cagcttacacgaaaccagaaacagg

SEQ ID NO: 5169664 - DNA, 25 bp, Homo sapien
ttcatagggtgtagtctgccaagcc

SEQ ID NO: 5169665 - DNA, 25 bp, Homo sapien
tattgagcttgcaggtactttcagc

SEQ ID NO: 5169666 - DNA, 25 bp, Homo sapien
ttaaactttgcttgccacacctggt

SEQ ID NO: 5169667 - DNA, 25 bp, Homo sapien
agaataccctatttgcatcagcagt

SEQ ID NO: 5169668 - DNA, 25 bp, Homo sapien
acatacacggcaccaagttgaccac

SEQ ID NO: 5169669 - DNA, 25 bp, Homo sapien
gatccaagaaagcacttgtcatagc

SEQ ID NO: 5169670 - DNA, 25 bp, Homo sapien
tgctgggttgagtgcttcactgaac

SEQ ID NO: 5169671 - DNA, 25 bp, Homo sapien
ttcagctctgagaggcatcctcaca

SEQ ID NO: 5169672 - DNA, 25 bp, Homo sapien
tcctagggacagctctcaggcagtg

SEQ ID NO: 5169673 - DNA, 25 bp, Homo sapien
gctgcaacctacattgtggactctt

SEQ ID NO: 5169674 - DNA, 25 bp, Homo sapien
tactatctgatgtaatgcccaaact

SEQ ID NO: 5169675 - DNA, 25 bp, Homo sapien
tctgtagatccaagccatgtgaagg

SEQ ID NO: 5169676 - DNA, 25 bp, Homo sapien
tttgttagggattatgctggccacc

SEQ ID NO: 5169677 - DNA, 25 bp, Homo sapien
ccatgtgaaggtgaaccaatgcaaa

SEQ ID NO: 5169678 - DNA, 25 bp, Homo sapien
aagtttatcaggtagcctctgtaga

SEQ ID NO: 5169679 - DNA, 25 bp, Homo sapien
gtttatgatgttctgccaaatgaat

SEQ ID NO: 5169680 - DNA, 25 bp, Homo sapien
tgtttatgatgttctgccaaatgaa

SEQ ID NO: 5169681 - DNA, 25 bp, Homo sapien
ttgcactatgaattgaatgtgttac

SEQ ID NO: 5169682 - DNA, 25 bp, Homo sapien
ctgccgattatccaattggggaaac

SEQ ID NO: 5169683 - DNA, 25 bp, Homo sapien
gagctgccgattatccaattgggga

SEQ ID NO: 5169684 - DNA, 25 bp, Homo sapien
gggaaacagtggaaaaagcacttga

SEQ ID NO: 5169685 - DNA, 25 bp, Homo sapien
gattatccaattggggaaacagtgg

SEQ ID NO: 5169686 - DNA, 25 bp, Homo sapien
cagacagttgtttccacttgactgt

SEQ ID NO: 5169687 - DNA, 25 bp, Homo sapien
agacagttgtttccacttgactgtc

SEQ ID NO: 5169688 - DNA, 25 bp, Homo sapien
acagttgtttccacttgactgtcat

SEQ ID NO: 5169689 - DNA, 25 bp, Homo sapien
gacagttgtttccacttgactgtca

SEQ ID NO: 5169690 - DNA, 25 bp, Homo sapien
agtgtgtataaaataccagcaattg

SEQ ID NO: 5169691 - DNA, 25 bp, Homo sapien
taccagcaattgcacatgtaaagaa

SEQ ID NO: 5169692 - DNA, 25 bp, Homo sapien
catagtctaagtgtgtataaaatac

SEQ ID NO: 5169693 - DNA, 25 bp, Homo sapien
gtacatcatgcatagtctaagtgtg

SEQ ID NO: 5169694 - DNA, 25 bp, Homo sapien
cccatagacgggaggtaatgttata

SEQ ID NO: 5169695 - DNA, 25 bp, Homo sapien
tcatacctccattcactagatttgc

SEQ ID NO: 5169696 - DNA, 25 bp, Homo sapien
tgaaaggcatcaagacccatagacg

SEQ ID NO: 5169697 - DNA, 25 bp, Homo sapien
gaagcactactatgttacttttgga

SEQ ID NO: 5169698 - DNA, 25 bp, Homo sapien
ttttaaattactgatcataatgtgt

SEQ ID NO: 5169699 - DNA, 25 bp, Homo sapien
tttaaattactgatcataatgtgtc

SEQ ID NO: 5169700 - DNA, 25 bp, Homo sapien
tttctagtggcaacttcatctccca

SEQ ID NO: 5169701 - DNA, 25 bp, Homo sapien
tatacatggatttttctagtggcaa

SEQ ID NO: 5169702 - DNA, 25 bp, Homo sapien
tttctagtaagatttgattatatgt

SEQ ID NO: 5169703 - DNA, 25 bp, Homo sapien
ggatttttctagtaagatttgatta

SEQ ID NO: 5169704 - DNA, 25 bp, Homo sapien
gcacaccctgggttcgaaactggga

SEQ ID NO: 5169705 - DNA, 25 bp, Homo sapien
acgcacaccctgggttcgaaactgg

SEQ ID NO: 5169706 - DNA, 25 bp, Homo sapien
cgcacaccctgggttcgaaactggg

SEQ ID NO: 5169707 - DNA, 25 bp, Homo sapien
gacgcacaccctgggttcgaaactg

SEQ ID NO: 5169708 - DNA, 25 bp, Homo sapien
ggacatccatgccacaggtagacac

SEQ ID NO: 5169709 - DNA, 25 bp, Homo sapien
agtggacatccatgccacaggtaga

SEQ ID NO: 5169710 - DNA, 25 bp, Homo sapien
atccatgccacaggtagacacccag

SEQ ID NO: 5169711 - DNA, 25 bp, Homo sapien
gacatccatgccacaggtagacacc

SEQ ID NO: 5169712 - DNA, 25 bp, Homo sapien
gacatctggtgacaggtggacatca

SEQ ID NO: 5169713 - DNA, 25 bp, Homo sapien
catcaagcctggtgtggataccttg

SEQ ID NO: 5169714 - DNA, 25 bp, Homo sapien
gtggacatcaagcctggtgtggata

SEQ ID NO: 5169715 - DNA, 25 bp, Homo sapien
tggataccttgtcccccggtggtca

SEQ ID NO: 5169716 - DNA, 25 bp, Homo sapien
ttgacacaatgaaccatgtagaagt

SEQ ID NO: 5169717 - DNA, 25 bp, Homo sapien
tccaagtggccacctaggccacagg

SEQ ID NO: 5169718 - DNA, 25 bp, Homo sapien
taaagctccaagtggccacctaggc

SEQ ID NO: 5169719 - DNA, 25 bp, Homo sapien
acctaggccacaggttgatacacag

SEQ ID NO: 5169720 - DNA, 25 bp, Homo sapien
gctccaagtggccacctaggccaca

SEQ ID NO: 5169721 - DNA, 25 bp, Homo sapien
tgtacatctgggaccttggtgtcta

SEQ ID NO: 5169722 - DNA, 25 bp, Homo sapien
catctgggaccttggtgtctatctg

SEQ ID NO: 5169723 - DNA, 25 bp, Homo sapien
gctgtacatctgggaccttggtgtc

SEQ ID NO: 5169724 - DNA, 25 bp, Homo sapien
tacatctgggaccttggtgtctatc

SEQ ID NO: 5169725 - DNA, 25 bp, Homo sapien
catgtgcctgtgtctcaatgagctc

SEQ ID NO: 5169726 - DNA, 25 bp, Homo sapien
gatgtggccctggtgggatcactgg

SEQ ID NO: 5169727 - DNA, 25 bp, Homo sapien
gtgcctgtgtctcaatgagctccag

SEQ ID NO: 5169728 - DNA, 25 bp, Homo sapien
gaggtcaccaataccactcactttc

SEQ ID NO: 5169729 - DNA, 25 bp, Homo sapien
gagaggtcaccaataccactcactt

SEQ ID NO: 5169730 - DNA, 25 bp, Homo sapien
gagagaggtcaccaataccactcac

SEQ ID NO: 5169731 - DNA, 25 bp, Homo sapien
ggtcaccaataccactcactttcca

SEQ ID NO: 5169732 - DNA, 25 bp, Homo sapien
ggcactggaaatcgctgtatttctg

SEQ ID NO: 5169733 - DNA, 25 bp, Homo sapien
ctggaggggaatctgcccctggtgc

SEQ ID NO: 5169734 - DNA, 25 bp, Homo sapien
actggaaatcgctgtatttctgcac

SEQ ID NO: 5169735 - DNA, 25 bp, Homo sapien
cagctggcactggaaatcgctgtat

SEQ ID NO: 5169736 - DNA, 25 bp, Homo sapien
ctccatagcttccactgtgcccagg

SEQ ID NO: 5169737 - DNA, 25 bp, Homo sapien
cagcagtagcagcaggcccttcagc

SEQ ID NO: 5169738 - DNA, 25 bp, Homo sapien
gcagtagcagcaggcccttcagcag

SEQ ID NO: 5169739 - DNA, 25 bp, Homo sapien
tgcaggcaggcaaacagccccagca

SEQ ID NO: 5169740 - DNA, 25 bp, Homo sapien
gcacctcctgcaggcaggcaaacag

SEQ ID NO: 5169741 - DNA, 25 bp, Homo sapien
ggacctgctggaacccctgctcaca

SEQ ID NO: 5169742 - DNA, 25 bp, Homo sapien
caccccctgtccgcctgtcaagagg

SEQ ID NO: 5169743 - DNA, 25 bp, Homo sapien
tcaccccctgtccgcctgtcaagag

SEQ ID NO: 5169744 - DNA, 25 bp, Homo sapien
ccccctgtccgcctgtcaagaggag

SEQ ID NO: 5169745 - DNA, 25 bp, Homo sapien
accccctgtccgcctgtcaagagga

SEQ ID NO: 5169746 - DNA, 25 bp, Homo sapien
ggaggatggcagttaggcagctcat

SEQ ID NO: 5169747 - DNA, 25 bp, Homo sapien
gaggaggatggcagttaggcagctc

SEQ ID NO: 5169748 - DNA, 25 bp, Homo sapien
aggaggatggcagttaggcagctca

SEQ ID NO: 5169749 - DNA, 25 bp, Homo sapien
agaaaaatggtgtgtatttctcttt

SEQ ID NO: 5169750 - DNA, 25 bp, Homo sapien
ggtgtctttagtgtgtccaaaacat

SEQ ID NO: 5169751 - DNA, 25 bp, Homo sapien
tgagaaagttcactggcaccagtaa

SEQ ID NO: 5169752 - DNA, 25 bp, Homo sapien
gatacaagtattacaatttgacaca

SEQ ID NO: 5169753 - DNA, 25 bp, Homo sapien
cagggtaacattaggcccctgtagg

SEQ ID NO: 5169754 - DNA, 25 bp, Homo sapien
caagtggattcctaggtctctggtg

SEQ ID NO: 5169755 - DNA, 25 bp, Homo sapien
tctggtgaacatcaggtgcaggtgt

SEQ ID NO: 5169756 - DNA, 25 bp, Homo sapien
ccaatctgcagggtaacattaggcc

SEQ ID NO: 5169757 - DNA, 25 bp, Homo sapien
tctggatcaagatcccttttacaat

SEQ ID NO: 5169758 - DNA, 25 bp, Homo sapien
ggtagtctggatcaagatccctttt

SEQ ID NO: 5169759 - DNA, 25 bp, Homo sapien
tagtctggatcaagatcccttttac

SEQ ID NO: 5169760 - DNA, 25 bp, Homo sapien
tcttgctgcagctgcgttttctctc

SEQ ID NO: 5169761 - DNA, 25 bp, Homo sapien
tggacagaaacaagccgtgaagcag

SEQ ID NO: 5169762 - DNA, 25 bp, Homo sapien
tccaagaatccttcggcataggcag

SEQ ID NO: 5169763 - DNA, 25 bp, Homo sapien
tttgtcacttacatccaggttacag

SEQ ID NO: 5169764 - DNA, 25 bp, Homo sapien
caggcctagaatggtatccaagaat

SEQ ID NO: 5169765 - DNA, 25 bp, Homo sapien
ctgtgcaaaggagggttaacccaat

SEQ ID NO: 5169766 - DNA, 25 bp, Homo sapien
tcatggaagcttaagcactgggctt

SEQ ID NO: 5169767 - DNA, 25 bp, Homo sapien
cactgggcttctcagagtcatgaaa

SEQ ID NO: 5169768 - DNA, 25 bp, Homo sapien
ttaatggttaaatgaccgtcaggtc

SEQ ID NO: 5169769 - DNA, 25 bp, Homo sapien
gagaaattcgaagtattccaacgtc

SEQ ID NO: 5169770 - DNA, 25 bp, Homo sapien
gatgaggagaaattcgaagtattcc

SEQ ID NO: 5169771 - DNA, 25 bp, Homo sapien
aaattcgaagtattccaacgtctgc

SEQ ID NO: 5169772 - DNA, 25 bp, Homo sapien
aggagaaattcgaagtattccaacg

SEQ ID NO: 5169773 - DNA, 25 bp, Homo sapien
ctttcagtcccagtatgttgttgat

SEQ ID NO: 5169774 - DNA, 25 bp, Homo sapien
agtacattatcatcctgttactttc

SEQ ID NO: 5169775 - DNA, 25 bp, Homo sapien
gttgttgataaaatctatcagctac

SEQ ID NO: 5169776 - DNA, 25 bp, Homo sapien
aaatctatcagctacttattgtcaa

SEQ ID NO: 5169777 - DNA, 25 bp, Homo sapien
cacttcgtgggttcgagagactctc

SEQ ID NO: 5169778 - DNA, 25 bp, Homo sapien
catgcactgccctatgtattatttc

SEQ ID NO: 5169779 - DNA, 25 bp, Homo sapien
tccacttcgtgggttcgagagactc

SEQ ID NO: 5169780 - DNA, 25 bp, Homo sapien
tgcactgccctatgtattatttcta

SEQ ID NO: 5169781 - DNA, 25 bp, Homo sapien
tttcgtcaccgctgcggcagctttt

SEQ ID NO: 5169782 - DNA, 25 bp, Homo sapien
gcggcattttgccccgtcaccgcgg

SEQ ID NO: 5169783 - DNA, 25 bp, Homo sapien
gtggcttttcgtcaccgctgcggca

SEQ ID NO: 5169784 - DNA, 25 bp, Homo sapien
ggcttttcgtcaccgctgcggcagc

SEQ ID NO: 5169785 - DNA, 25 bp, Homo sapien
tttgcggctctttgacccgccgtcg

SEQ ID NO: 5169786 - DNA, 25 bp, Homo sapien
ccgacgctggggctttttgcggctc

SEQ ID NO: 5169787 - DNA, 25 bp, Homo sapien
ctttttgcggctctttgacccgccg

SEQ ID NO: 5169788 - DNA, 25 bp, Homo sapien
tgcggctctttgacccgccgtcggg

SEQ ID NO: 5169789 - DNA, 25 bp, Homo sapien
ccttccacatcacagtccaggaatg

SEQ ID NO: 5169790 - DNA, 25 bp, Homo sapien
ccacatcacagtccaggaatgccaa

SEQ ID NO: 5169791 - DNA, 25 bp, Homo sapien
ttgtcttgcgctgcacttttccttc

SEQ ID NO: 5169792 - DNA, 25 bp, Homo sapien
cagtccaggaatgccaagctgtgct

SEQ ID NO: 5169793 - DNA, 25 bp, Homo sapien
tgctaggctctttgttgagcatatt

SEQ ID NO: 5169794 - DNA, 25 bp, Homo sapien
tcagtgtgctgcaagatgatttgat

SEQ ID NO: 5169795 - DNA, 25 bp, Homo sapien
aaatctaacctttttctcagtgtgc

SEQ ID NO: 5169796 - DNA, 25 bp, Homo sapien
ggttgctaggctctttgttgagcat

SEQ ID NO: 5169797 - DNA, 25 bp, Homo sapien
tggaagaggccaaaacgtttgttca

SEQ ID NO: 5169798 - DNA, 25 bp, Homo sapien
ttccaggtaattggttttttgtgca

SEQ ID NO: 5169799 - DNA, 25 bp, Homo sapien
ttttgtgcattttctgtatttttct

SEQ ID NO: 5169800 - DNA, 25 bp, Homo sapien
tgtgcattttctgtatttttctcca

SEQ ID NO: 5169801 - DNA, 25 bp, Homo sapien
tccaggtaattggttttttgtgcat

SEQ ID NO: 5169802 - DNA, 25 bp, Homo sapien
tgggcaggatttgtggggcgggtgc

SEQ ID NO: 5169803 - DNA, 25 bp, Homo sapien
ggcaggatttgtggggcgggtgcat

SEQ ID NO: 5169804 - DNA, 25 bp, Homo sapien
gggcaggatttgtggggcgggtgca

SEQ ID NO: 5169805 - DNA, 25 bp, Homo sapien
cttgggcaggatttgtggggcgggt

SEQ ID NO: 5169806 - DNA, 25 bp, Homo sapien
tgcccccgcagccgtgctttttgca

SEQ ID NO: 5169807 - DNA, 25 bp, Homo sapien
cccgcagccgtgctttttgcagctt

SEQ ID NO: 5169808 - DNA, 25 bp, Homo sapien
cccccgcagccgtgctttttgcagc

SEQ ID NO: 5169809 - DNA, 25 bp, Homo sapien
ccccgcagccgtgctttttgcagct

SEQ ID NO: 5169810 - DNA, 25 bp, Homo sapien
agcagcatccaggtattgacactcc

SEQ ID NO: 5169811 - DNA, 25 bp, Homo sapien
tgagcagcatccaggtattgacact

SEQ ID NO: 5169812 - DNA, 25 bp, Homo sapien
cagcatccaggtattgacactcctc

SEQ ID NO: 5169813 - DNA, 25 bp, Homo sapien
tattgacactcctccagacagaatt

SEQ ID NO: 5169814 - DNA, 25 bp, Homo sapien
ggtgcttcatactccatggcttttt

SEQ ID NO: 5169815 - DNA, 25 bp, Homo sapien
tgcttcatactccatggctttttcc

SEQ ID NO: 5169816 - DNA, 25 bp, Homo sapien
ctgggtgcttcatactccatggctt

SEQ ID NO: 5169817 - DNA, 25 bp, Homo sapien
tgggtgcttcatactccatggcttt

SEQ ID NO: 5169818 - DNA, 25 bp, Homo sapien
atgtcttctcctaagtctatttgaa

SEQ ID NO: 5169819 - DNA, 25 bp, Homo sapien
catagtaagacctgaagactgctta

SEQ ID NO: 5169820 - DNA, 25 bp, Homo sapien
gaattctctcatgcatagtaagacc

SEQ ID NO: 5169821 - DNA, 25 bp, Homo sapien
gcaggttgtatctccagtataaaat

SEQ ID NO: 5169822 - DNA, 25 bp, Homo sapien
tatgtttattcagtcttgaagattg

SEQ ID NO: 5169823 - DNA, 25 bp, Homo sapien
ctgaggaagagtaaaaagctttgcc

SEQ ID NO: 5169824 - DNA, 25 bp, Homo sapien
ggaagagtaaaaagctttgccacat

SEQ ID NO: 5169825 - DNA, 25 bp, Homo sapien
gaagagtaaaaagctttgccacatt

SEQ ID NO: 5169826 - DNA, 25 bp, Homo sapien
gaggaagagtaaaaagctttgccac

SEQ ID NO: 5169827 - DNA, 25 bp, Homo sapien
tgaactatgttatgttgagtaaggc

SEQ ID NO: 5169828 - DNA, 25 bp, Homo sapien
caaagactgcttacaagctttgcca

SEQ ID NO: 5169829 - DNA, 25 bp, Homo sapien
taaaagctttgatgcattcttgaca

SEQ ID NO: 5169830 - DNA, 25 bp, Homo sapien
agctttgatgcattcttgacatttg

SEQ ID NO: 5169831 - DNA, 25 bp, Homo sapien
cagtatgaactatcatgtttagtaa

SEQ ID NO: 5169832 - DNA, 25 bp, Homo sapien
atgtttagtaaagcttaaggacaag

SEQ ID NO: 5169833 - DNA, 25 bp, Homo sapien
ttattttgaataagctttgaggaac

SEQ ID NO: 5169834 - DNA, 25 bp, Homo sapien
tattttgaataagctttgaggaaca

SEQ ID NO: 5169835 - DNA, 25 bp, Homo sapien
tgttattttgaataagctttgagga

SEQ ID NO: 5169836 - DNA, 25 bp, Homo sapien
tatgttattttgaataagctttgag

SEQ ID NO: 5169837 - DNA, 25 bp, Homo sapien
tgatgtatagtaagctcagaggacc

SEQ ID NO: 5169838 - DNA, 25 bp, Homo sapien
tgaactatcatatgcttagtaaggc

SEQ ID NO: 5169839 - DNA, 25 bp, Homo sapien
tatgtacattaaggtctaaagactt

SEQ ID NO: 5169840 - DNA, 25 bp, Homo sapien
gaggaatagtaaaagcctttgccac

SEQ ID NO: 5169841 - DNA, 25 bp, Homo sapien
ttttgcgcagccattttctcccggg

SEQ ID NO: 5169842 - DNA, 25 bp, Homo sapien
aagcttggcccgactgagatttcta

SEQ ID NO: 5169843 - DNA, 25 bp, Homo sapien
tctagtcttgtcagggcggatgcag

SEQ ID NO: 5169844 - DNA, 25 bp, Homo sapien
gctctgtcaagcaggccatgtggca

SEQ ID NO: 5169845 - DNA, 25 bp, Homo sapien
tcagtttactgtacccacgaactcc

SEQ ID NO: 5169846 - DNA, 25 bp, Homo sapien
gatcctgccacaatcaatctcccaa

SEQ ID NO: 5169847 - DNA, 25 bp, Homo sapien
gcaacaggacctctcattccttgtt

SEQ ID NO: 5169848 - DNA, 25 bp, Homo sapien
taaagtttccctgtgttgtctaagc

SEQ ID NO: 5169849 - DNA, 25 bp, Homo sapien
acatatcagtagaactttttcacaa

SEQ ID NO: 5169850 - DNA, 25 bp, Homo sapien
cacatatcagtagaactttttcaca

SEQ ID NO: 5169851 - DNA, 25 bp, Homo sapien
tcacatatcagtagaactttttcac

SEQ ID NO: 5169852 - DNA, 25 bp, Homo sapien
catatcagtagaactttttcacaaa

SEQ ID NO: 5169853 - DNA, 25 bp, Homo sapien
aaaccttgtcatccttgatgacaaa

SEQ ID NO: 5169854 - DNA, 25 bp, Homo sapien
gaaaccttgtcatccttgatgacaa

SEQ ID NO: 5169855 - DNA, 25 bp, Homo sapien
aaccttgtcatccttgatgacaaac

SEQ ID NO: 5169856 - DNA, 25 bp, Homo sapien
tgccatgctcaggtataatcttccc

SEQ ID NO: 5169857 - DNA, 25 bp, Homo sapien
tcaggtataatcttcccaaatccag

SEQ ID NO: 5169858 - DNA, 25 bp, Homo sapien
tgcacccagctgctagctattattt

SEQ ID NO: 5169859 - DNA, 25 bp, Homo sapien
ctaatcctttgccatgctcaggtat

SEQ ID NO: 5169860 - DNA, 25 bp, Homo sapien
tccaatattttcctgtaggtttcaa

SEQ ID NO: 5169861 - DNA, 25 bp, Homo sapien
ctccaatattttcctgtaggtttca

SEQ ID NO: 5169862 - DNA, 25 bp, Homo sapien
tatgatacgcttagaaaattctgca

SEQ ID NO: 5169863 - DNA, 25 bp, Homo sapien
gcaccaatgtttccctgattgacaa

SEQ ID NO: 5169864 - DNA, 25 bp, Homo sapien
ccagtaaatgatccagggaagcaaa

SEQ ID NO: 5169865 - DNA, 25 bp, Homo sapien
gcgagttgtattcatatgtgtataa

SEQ ID NO: 5169866 - DNA, 25 bp, Homo sapien
caaaatgttcacttgcagagtctaa

SEQ ID NO: 5169867 - DNA, 25 bp, Homo sapien
tgcttccgcctagttgttaagtgaa

SEQ ID NO: 5169868 - DNA, 25 bp, Homo sapien
ttttccaccgtaggacagaaagagc

SEQ ID NO: 5169869 - DNA, 25 bp, Homo sapien
gcacaccaaatgtcccttgcgggtt

SEQ ID NO: 5169870 - DNA, 25 bp, Homo sapien
ctagtgcttatgtgaagatgtttcc

SEQ ID NO: 5169871 - DNA, 25 bp, Homo sapien
gtctagtgcttatgtgaagatgttt

SEQ ID NO: 5169872 - DNA, 25 bp, Homo sapien
ctgtctagtgcttatgtgaagatgt

SEQ ID NO: 5169873 - DNA, 25 bp, Homo sapien
agtgcttatgtgaagatgtttcctt

SEQ ID NO: 5169874 - DNA, 25 bp, Homo sapien
cttatgtgaagatatttccttttcc

SEQ ID NO: 5169875 - DNA, 25 bp, Homo sapien
tagctcttatgtgaagatatttcct

SEQ ID NO: 5169876 - DNA, 25 bp, Homo sapien
tcttatgtgaagatatttccttttc

SEQ ID NO: 5169877 - DNA, 25 bp, Homo sapien
gctcttatgtgaagatatttccttt

SEQ ID NO: 5169878 - DNA, 25 bp, Homo sapien
cttcagctcgtgcacggtgcgtgca

SEQ ID NO: 5169879 - DNA, 25 bp, Homo sapien
gaacctggcacctcagatggaaagg

SEQ ID NO: 5169880 - DNA, 25 bp, Homo sapien
ctgcttcagctcgtgcacggtgcgt

SEQ ID NO: 5169881 - DNA, 25 bp, Homo sapien
tgaacctggcacctcagatggaaag

SEQ ID NO: 5169882 - DNA, 25 bp, Homo sapien
catccggagcttccatgtcggggca

SEQ ID NO: 5169883 - DNA, 25 bp, Homo sapien
atccggagcttccatgtcggggcag

SEQ ID NO: 5169884 - DNA, 25 bp, Homo sapien
gccccatccggagcttccatgtcgg

SEQ ID NO: 5169885 - DNA, 25 bp, Homo sapien
cccatccggagcttccatgtcgggg

SEQ ID NO: 5169886 - DNA, 25 bp, Homo sapien
tggaagcctgccacacggcccatct

SEQ ID NO: 5169887 - DNA, 25 bp, Homo sapien
ctggatgctgtggtgtcgtccacca

SEQ ID NO: 5169888 - DNA, 25 bp, Homo sapien
cccgtggttcgcttgcccctggtgg

SEQ ID NO: 5169889 - DNA, 25 bp, Homo sapien
cgcccggcacgtcacggtgtgtctg

SEQ ID NO: 5169890 - DNA, 25 bp, Homo sapien
tccccaacactcctctgaggcaccg

SEQ ID NO: 5169891 - DNA, 25 bp, Homo sapien
agttcgccgtccacccctggaggcg

SEQ ID NO: 5169892 - DNA, 25 bp, Homo sapien
agcacgtcacagtcgccgcagttcg

SEQ ID NO: 5169893 - DNA, 25 bp, Homo sapien
aggcggcccagcgactggctgacca

SEQ ID NO: 5169894 - DNA, 25 bp, Homo sapien
ttaacagagaagagcgaagccacgg

SEQ ID NO: 5169895 - DNA, 25 bp, Homo sapien
gaagccacggagacgccgccatgtc

SEQ ID NO: 5169896 - DNA, 25 bp, Homo sapien
gtgttcccctgtggcgcatgcatgg

SEQ ID NO: 5169897 - DNA, 25 bp, Homo sapien
catgcatgggcggagtcgtgccctt

SEQ ID NO: 5169898 - DNA, 25 bp, Homo sapien
tgcccttaaatgtccagggctgcac

SEQ ID NO: 5169899 - DNA, 25 bp, Homo sapien
gcccttaaatgtccagggctgcacg

SEQ ID NO: 5169900 - DNA, 25 bp, Homo sapien
agcctggacacggacaggattgaca

SEQ ID NO: 5169901 - DNA, 25 bp, Homo sapien
cccagcctggacacggacaggattg

SEQ ID NO: 5169902 - DNA, 25 bp, Homo sapien
ccagcctggacacggacaggattga

SEQ ID NO: 5169903 - DNA, 25 bp, Homo sapien
acccagcctggacacggacaggatt

SEQ ID NO: 5169904 - DNA, 25 bp, Homo sapien
aacgatgccaactggcgatgtggcg

SEQ ID NO: 5169905 - DNA, 25 bp, Homo sapien
ccaactggcgatgtggcggtgttat

SEQ ID NO: 5169906 - DNA, 25 bp, Homo sapien
aactggcgatgtggcggtgttattc

SEQ ID NO: 5169907 - DNA, 25 bp, Homo sapien
tgccaactggcgatgtggcggtgtt

SEQ ID NO: 5169908 - DNA, 25 bp, Homo sapien
tcaagaacgaaagtcggaggttcga

SEQ ID NO: 5169909 - DNA, 25 bp, Homo sapien
cgaaagtcggaggttcgaagacgat

SEQ ID NO: 5169910 - DNA, 25 bp, Homo sapien
agtcggaggttcgaagacgatcaga

SEQ ID NO: 5169911 - DNA, 25 bp, Homo sapien
cggaggttcgaagacgatcagatac

SEQ ID NO: 5169912 - DNA, 25 bp, Homo sapien
ggcagtttagaccagagcgaaagca

SEQ ID NO: 5169913 - DNA, 25 bp, Homo sapien
tggcagtttagaccagagcgaaagc

SEQ ID NO: 5169914 - DNA, 25 bp, Homo sapien
gactggcagtttagaccagagcgaa

SEQ ID NO: 5169915 - DNA, 25 bp, Homo sapien
actggcagtttagaccagagcgaaa

SEQ ID NO: 5169916 - DNA, 25 bp, Homo sapien
taatggaataggaccacagttctat

SEQ ID NO: 5169917 - DNA, 25 bp, Homo sapien
aagccgcctggatactgcagcttgg

SEQ ID NO: 5169918 - DNA, 25 bp, Homo sapien
tggttttcggaactgaggccatgat

SEQ ID NO: 5169919 - DNA, 25 bp, Homo sapien
gtgttcaaagcaggcccaagccgcc

SEQ ID NO: 5169920 - DNA, 25 bp, Homo sapien
gagctattacatgctgaagggcact

SEQ ID NO: 5169921 - DNA, 25 bp, Homo sapien
ggtgcttctggataacctcgggcca

SEQ ID NO: 5169922 - DNA, 25 bp, Homo sapien
tacgcagggctggtacagtaaaact

SEQ ID NO: 5169923 - DNA, 25 bp, Homo sapien
tcgggtgccgccagctttggtgctt

SEQ ID NO: 5169924 - DNA, 25 bp, Homo sapien
cctcctcgcacatgggcacgaaggg

SEQ ID NO: 5169925 - DNA, 25 bp, Homo sapien
ggctgccgcacacgggtcgggcggt

SEQ ID NO: 5169926 - DNA, 25 bp, Homo sapien
ttcatgccccgaggccactggcggt

SEQ ID NO: 5169927 - DNA, 25 bp, Homo sapien
tagccactggttggcccgttgtccg

SEQ ID NO: 5169928 - DNA, 25 bp, Homo sapien
tcggtggtgccgagggccgtccggc

SEQ ID NO: 5169929 - DNA, 25 bp, Homo sapien
cctggggctcatgaggcgggtctcg

SEQ ID NO: 5169930 - DNA, 25 bp, Homo sapien
cggtggtgccgagggccgtccggca

SEQ ID NO: 5169931 - DNA, 25 bp, Homo sapien
ctcggggtcctgatggcgggacctg

SEQ ID NO: 5169932 - DNA, 25 bp, Homo sapien
attatattcttctctgggtaggaag

SEQ ID NO: 5169933 - DNA, 25 bp, Homo sapien
ggcgggtctcgaactggccacctca

SEQ ID NO: 5169934 - DNA, 25 bp, Homo sapien
cagcctagacgggttcctgcaacac

SEQ ID NO: 5169935 - DNA, 25 bp, Homo sapien
cctagacgggttcctgcaacaccgt

SEQ ID NO: 5169936 - DNA, 25 bp, Homo sapien
agcctagacgggttcctgcaacacc

SEQ ID NO: 5169937 - DNA, 25 bp, Homo sapien
gcagcctagacgggttcctgcaaca

SEQ ID NO: 5169938 - DNA, 25 bp, Homo sapien
tacctgaggtgttgaacttatttat

SEQ ID NO: 5169939 - DNA, 25 bp, Homo sapien
gtcctgtggtgtttccgtgagaaca

SEQ ID NO: 5169940 - DNA, 25 bp, Homo sapien
tgaacttatttatggaccagaactt

SEQ ID NO: 5169941 - DNA, 25 bp, Homo sapien
gagtcgtgaacttcaatgcagcaca

SEQ ID NO: 5169942 - DNA, 25 bp, Homo sapien
ttccaggctatcatttatgttaggt

SEQ ID NO: 5169943 - DNA, 25 bp, Homo sapien
tatgttaggttgagttattcctcct

SEQ ID NO: 5169944 - DNA, 25 bp, Homo sapien
caggctatcatttatgttaggttga

SEQ ID NO: 5169945 - DNA, 25 bp, Homo sapien
catttatgttaggttgagttattcc

SEQ ID NO: 5169946 - DNA, 25 bp, Homo sapien
accagcagggcaccgccgctttatc

SEQ ID NO: 5169947 - DNA, 25 bp, Homo sapien
ccacgtcccggacaccagcagggca

SEQ ID NO: 5169948 - DNA, 25 bp, Homo sapien
acgtcccggacaccagcagggcacc

SEQ ID NO: 5169949 - DNA, 25 bp, Homo sapien
tcccacgtcccggacaccagcaggg

SEQ ID NO: 5169950 - DNA, 25 bp, Homo sapien
tcactgtgaccatcaccgtcagcat

SEQ ID NO: 5169951 - DNA, 25 bp, Homo sapien
cactgtgaccatcaccgtcagcatc

SEQ ID NO: 5169952 - DNA, 25 bp, Homo sapien
agcgggcgggtctgcagttgtgggt

SEQ ID NO: 5169953 - DNA, 25 bp, Homo sapien
aagcgggcgggtctgcagttgtggg

SEQ ID NO: 5169954 - DNA, 25 bp, Homo sapien
cgggcgggtctgcagttgtgggttt

SEQ ID NO: 5169955 - DNA, 25 bp, Homo sapien
caagcgggcgggtctgcagttgtgg

SEQ ID NO: 5169956 - DNA, 25 bp, Homo sapien
agtggtcaccgtttttgaagatggg

SEQ ID NO: 5169957 - DNA, 25 bp, Homo sapien
tcagtggtcaccgtttttgaagatg

SEQ ID NO: 5169958 - DNA, 25 bp, Homo sapien
tcactcagtggtcaccgtttttgaa

SEQ ID NO: 5169959 - DNA, 25 bp, Homo sapien
ggtggcacggtcccacttccccaga

SEQ ID NO: 5169960 - DNA, 25 bp, Homo sapien
ctttaccttcatttagtgagtcagt

SEQ ID NO: 5169961 - DNA, 25 bp, Homo sapien
caccctgcttggaaaccttccggag

SEQ ID NO: 5169962 - DNA, 25 bp, Homo sapien
accccggtgtgcctccgtcttctct

SEQ ID NO: 5169963 - DNA, 25 bp, Homo sapien
cccttgccggcgatctcattcttgc

SEQ ID NO: 5169964 - DNA, 25 bp, Homo sapien
ctgtcttctgtcttactctctttct

SEQ ID NO: 5169965 - DNA, 25 bp, Homo sapien
gcctgtctctctcactgtatctgtc

SEQ ID NO: 5169966 - DNA, 25 bp, Homo sapien
tctctctcactgtatctgtcttctg

SEQ ID NO: 5169967 - DNA, 25 bp, Homo sapien
tgtctctctcactgtatctgtcttc

SEQ ID NO: 5169968 - DNA, 25 bp, Homo sapien
tgtctcactgtgtctgtcttctgtc

SEQ ID NO: 5169969 - DNA, 25 bp, Homo sapien
ctgtcttctgtcttactctctttct

SEQ ID NO: 5169970 - DNA, 25 bp, Homo sapien
ctgtctcactgtgtctgtcttctgt

SEQ ID NO: 5169971 - DNA, 25 bp, Homo sapien
gtgtctgtcttctgtcttactctct

SEQ ID NO: 5169972 - DNA, 25 bp, Homo sapien
cactgtatcgctactgggctaggac

SEQ ID NO: 5169973 - DNA, 25 bp, Homo sapien
tgtatcgctactgggctaggacctt

SEQ ID NO: 5169974 - DNA, 25 bp, Homo sapien
aaagaaaaggcactgtatcgctact

SEQ ID NO: 5169975 - DNA, 25 bp, Homo sapien
aaggcactgtatcgctactgggcta

SEQ ID NO: 5169976 - DNA, 25 bp, Homo sapien
aggcctgaaccaccgggatttcagc

SEQ ID NO: 5169977 - DNA, 25 bp, Homo sapien
gttggccacactggtatcataccct

SEQ ID NO: 5169978 - DNA, 25 bp, Homo sapien
ggcccttacactcagaatgacgtgt

SEQ ID NO: 5169979 - DNA, 25 bp, Homo sapien
ggaaagttcagcgacaatgcaatat

SEQ ID NO: 5169980 - DNA, 25 bp, Homo sapien
gaaaactgtcggacacagcgctgag

SEQ ID NO: 5169981 - DNA, 25 bp, Homo sapien
cagcgctgagtatccgcgtgatgaa

SEQ ID NO: 5169982 - DNA, 25 bp, Homo sapien
gccactaccgaagatgaaagcaaca

SEQ ID NO: 5169983 - DNA, 25 bp, Homo sapien
tagtgtcatgcctctttcaccgcca

SEQ ID NO: 5169984 - DNA, 25 bp, Homo sapien
attttgttgcaaccctcctgacccg

SEQ ID NO: 5169985 - DNA, 25 bp, Homo sapien
atcattttgttgcaaccctcctgac

SEQ ID NO: 5169986 - DNA, 25 bp, Homo sapien
tgttgcaaccctcctgacccggcgt

SEQ ID NO: 5169987 - DNA, 25 bp, Homo sapien
ttgttgcaaccctcctgacccggcg

SEQ ID NO: 5169988 - DNA, 25 bp, Homo sapien
ctgccttactgccgttctgcttttc

SEQ ID NO: 5169989 - DNA, 25 bp, Homo sapien
tgccttactgccgttctgcttttct

SEQ ID NO: 5169990 - DNA, 25 bp, Homo sapien
ttgtggtcccacaggtcgaggcttc

SEQ ID NO: 5169991 - DNA, 25 bp, Homo sapien
gtggtcccacaggtcgaggcttcag

SEQ ID NO: 5169992 - DNA, 25 bp, Homo sapien
cacttgtggtcccacaggtcgaggc

SEQ ID NO: 5169993 - DNA, 25 bp, Homo sapien
agatcacttgtggtcccacaggtcg

SEQ ID NO: 5169994 - DNA, 25 bp, Homo sapien
gaagcgcgttgacgctgctttcgaa

SEQ ID NO: 5169995 - DNA, 25 bp, Homo sapien
gctggcctttgccaggcaacggcag

SEQ ID NO: 5169996 - DNA, 25 bp, Homo sapien
gctttcgaatcctccggcaaagact

SEQ ID NO: 5169997 - DNA, 25 bp, Homo sapien
cgtcccgctaccctcccacagctgg

SEQ ID NO: 5169998 - DNA, 25 bp, Homo sapien
tgctgcctgagggtgtgaaacagct

SEQ ID NO: 5169999 - DNA, 25 bp, Homo sapien
gggtcagaatttggccacacatggc

SEQ ID NO: 5170000 - DNA, 25 bp, Homo sapien
tgctaaaccatttgtagacgacctg

SEQ ID NO: 5170001 - DNA, 25 bp, Homo sapien
gcagctagccatgtcccaggtcgac

SEQ ID NO: 5170002 - DNA, 25 bp, Homo sapien
tgcgaatacagactgaaagctgggc

SEQ ID NO: 5170003 - DNA, 25 bp, Homo sapien
gaatacagactgaaagctgggcttt

SEQ ID NO: 5170004 - DNA, 25 bp, Homo sapien
tcagtgcgaatacagactgaaagct

SEQ ID NO: 5170005 - DNA, 25 bp, Homo sapien
gtgattttcagtgcgaatacagact

SEQ ID NO: 5170006 - DNA, 25 bp, Homo sapien
ttaaacaaagcatcgcgaaggccct

SEQ ID NO: 5170007 - DNA, 25 bp, Homo sapien
tacctacttactatccagtgaaacc

SEQ ID NO: 5170008 - DNA, 25 bp, Homo sapien
ggtaaatggcggaagtaactatggc

SEQ ID NO: 5170009 - DNA, 25 bp, Homo sapien
taactagtgacgtgcgtgaatggat

SEQ ID NO: 5170010 - DNA, 25 bp, Homo sapien
ggaagtcctcaagccggatccataa

SEQ ID NO: 5170011 - DNA, 25 bp, Homo sapien
tgagcagactctggcatgttggaac

SEQ ID NO: 5170012 - DNA, 25 bp, Homo sapien
taacttcgggataagtattggctgt

SEQ ID NO: 5170013 - DNA, 25 bp, Homo sapien
cagcaggtctccgagatgagcagac

SEQ ID NO: 5170014 - DNA, 25 bp, Homo sapien
tgaaaatccagggtagacggtgtaa

SEQ ID NO: 5170015 - DNA, 25 bp, Homo sapien
cttggaaagcatcgtggttctggtg

SEQ ID NO: 5170016 - DNA, 25 bp, Homo sapien
ggtgtaagtctcacgcagggccata

SEQ ID NO: 5170017 - DNA, 25 bp, Homo sapien
aaagcatcgtggttctggtggcatc

SEQ ID NO: 5170018 - DNA, 25 bp, Homo sapien
cgccctggaatgggttcgccccgag

SEQ ID NO: 5170019 - DNA, 25 bp, Homo sapien
cctggaatgggttcgccccgagaga

SEQ ID NO: 5170020 - DNA, 25 bp, Homo sapien
gccctggaatgggttcgccccgaga

SEQ ID NO: 5170021 - DNA, 25 bp, Homo sapien
ccctggaatgggttcgccccgagag

SEQ ID NO: 5170022 - DNA, 25 bp, Homo sapien
ccagaatggcggagatgggcaccat

SEQ ID NO: 5170023 - DNA, 25 bp, Homo sapien
tcagatccccgaatccagaatggcg

SEQ ID NO: 5170024 - DNA, 25 bp, Homo sapien
gtccagtgcggtaatgtgactgacc

SEQ ID NO: 5170025 - DNA, 25 bp, Homo sapien
atgggcaccatgaggcgtccagtgc

SEQ ID NO: 5170026 - DNA, 25 bp, Homo sapien
tctgttgccctcagctgattgaaag

SEQ ID NO: 5170027 - DNA, 25 bp, Homo sapien
cctcagctgattgaaagggagttgg

SEQ ID NO: 5170028 - DNA, 25 bp, Homo sapien
cattccgaagggatgggtgatgtcc

SEQ ID NO: 5170029 - DNA, 25 bp, Homo sapien
gggtgagtgccattccgaagggatg

SEQ ID NO: 5170030 - DNA, 25 bp, Homo sapien
tcaaatgagaactttgaaggccgaa

SEQ ID NO: 5170031 - DNA, 25 bp, Homo sapien
aaatgagaactttgaaggccgaagt

SEQ ID NO: 5170032 - DNA, 25 bp, Homo sapien
tttcaaatgagaactttgaaggccg

SEQ ID NO: 5170033 - DNA, 25 bp, Homo sapien
atgtgaacagcagttgaacatgggt

SEQ ID NO: 5170034 - DNA, 25 bp, Homo sapien
cactgtgggatgaaccaaatgccgg

SEQ ID NO: 5170035 - DNA, 25 bp, Homo sapien
caaatgccgggttaagatgcccgat

SEQ ID NO: 5170036 - DNA, 25 bp, Homo sapien
gaatgcgagtgcttcgtaggctact

SEQ ID NO: 5170037 - DNA, 25 bp, Homo sapien
gccatggaagttggaatccgctaag

SEQ ID NO: 5170038 - DNA, 25 bp, Homo sapien
gggattctttagagtcaccacgttc

SEQ ID NO: 5170039 - DNA, 25 bp, Homo sapien
tttagagtcaccacgttcatcaata

SEQ ID NO: 5170040 - DNA, 25 bp, Homo sapien
gattctttagagtcaccacgttcat

SEQ ID NO: 5170041 - DNA, 25 bp, Homo sapien
cgtgtcctcctctggggattcttta

SEQ ID NO: 5170042 - DNA, 25 bp, Homo sapien
caagctgtaggggtcgtgaggcagt

SEQ ID NO: 5170043 - DNA, 25 bp, Homo sapien
ttccatgcaccctcaagctgtaggg

SEQ ID NO: 5170044 - DNA, 25 bp, Homo sapien
tctggctggcattccgttttccatg

SEQ ID NO: 5170045 - DNA, 25 bp, Homo sapien
tggtagaggctctgtttggaatatc

SEQ ID NO: 5170046 - DNA, 25 bp, Homo sapien
aaactgagcccaagcgcttcccatt

SEQ ID NO: 5170047 - DNA, 25 bp, Homo sapien
gatgcacgttttgtcaaacccaggg

SEQ ID NO: 5170048 - DNA, 25 bp, Homo sapien
caaggtggcacagcgcaagtcgctg

SEQ ID NO: 5170049 - DNA, 25 bp, Homo sapien
tgtcacgaaacgtgaagatgcacgt

SEQ ID NO: 5170050 - DNA, 25 bp, Homo sapien
ctggaacttaatcataccgtcttcc

SEQ ID NO: 5170051 - DNA, 25 bp, Homo sapien
tggaacttaatcataccgtcttcct

SEQ ID NO: 5170052 - DNA, 25 bp, Homo sapien
cttggtgaagataacagctatgtcc

SEQ ID NO: 5170053 - DNA, 25 bp, Homo sapien
tggtgaagataacagctatgtcctt

SEQ ID NO: 5170054 - DNA, 25 bp, Homo sapien
ttggtgaagataacagctatgtcct

SEQ ID NO: 5170055 - DNA, 25 bp, Homo sapien
gagggatacatcttctaaatgtggg

SEQ ID NO: 5170056 - DNA, 25 bp, Homo sapien
gttgtttttaatcccatctcccatg

SEQ ID NO: 5170057 - DNA, 25 bp, Homo sapien
gcctgcccactcttcacagagggat

SEQ ID NO: 5170058 - DNA, 25 bp, Homo sapien
cctgactcacacttaaatcccggat

SEQ ID NO: 5170059 - DNA, 25 bp, Homo sapien
aacatggaccgcatgatgttgttca

SEQ ID NO: 5170060 - DNA, 25 bp, Homo sapien
gtggtaaaacatggaccgcatgatg

SEQ ID NO: 5170061 - DNA, 25 bp, Homo sapien
atcacgtgaggtccaattgaggctc

SEQ ID NO: 5170062 - DNA, 25 bp, Homo sapien
cgtgaggtccaattgaggctctcat

SEQ ID NO: 5170063 - DNA, 25 bp, Homo sapien
cacatacgtggcatttgtagggcat

SEQ ID NO: 5170064 - DNA, 25 bp, Homo sapien
tcctgagtgggttttacaatgaaca

SEQ ID NO: 5170065 - DNA, 25 bp, Homo sapien
ttgtgaagggaggagttgcacctga

SEQ ID NO: 5170066 - DNA, 25 bp, Homo sapien
gagtctctcctgagtgggttttaca

SEQ ID NO: 5170067 - DNA, 25 bp, Homo sapien
tgcattgtattgtttctcccctgtg

SEQ ID NO: 5170068 - DNA, 25 bp, Homo sapien
aatgttcttcatacagagagtattt

SEQ ID NO: 5170069 - DNA, 25 bp, Homo sapien
gaatgttcttcatacagagagtatt

SEQ ID NO: 5170070 - DNA, 25 bp, Homo sapien
tgaatgttcttcatacagagagtat

SEQ ID NO: 5170071 - DNA, 25 bp, Homo sapien
tgttcttcatacagagagtattttt

SEQ ID NO: 5170072 - DNA, 25 bp, Homo sapien
atgccacttctgtagagcttctcgc

SEQ ID NO: 5170073 - DNA, 25 bp, Homo sapien
tcaaatgccacttctgtagagcttc

SEQ ID NO: 5170074 - DNA, 25 bp, Homo sapien
caaatgccacttctgtagagcttct

SEQ ID NO: 5170075 - DNA, 25 bp, Homo sapien
aatgccacttctgtagagcttctcg

SEQ ID NO: 5170076 - DNA, 25 bp, Homo sapien
ttagctgaaagtggtggtatatgcc

SEQ ID NO: 5170077 - DNA, 25 bp, Homo sapien
tcttgtcttaatcccaccgcatgaa

SEQ ID NO: 5170078 - DNA, 25 bp, Homo sapien
cctagattggtcttctggacgatga

SEQ ID NO: 5170079 - DNA, 25 bp, Homo sapien
tccactaaggctgagggccgattct

SEQ ID NO: 5170080 - DNA, 25 bp, Homo sapien
tctactgagtcgagggaaacgcaaa

SEQ ID NO: 5170081 - DNA, 25 bp, Homo sapien
catgatggccgcaactttccctgga

SEQ ID NO: 5170082 - DNA, 25 bp, Homo sapien
gaaggtcacttctctagcgcgatga

SEQ ID NO: 5170083 - DNA, 25 bp, Homo sapien
ttaagcggaacgacgacaaggactc

SEQ ID NO: 5170084 - DNA, 25 bp, Homo sapien
gctaaacgaaacattgctgtctcag

SEQ ID NO: 5170085 - DNA, 25 bp, Homo sapien
gagggccaccgccaggctaaacgaa

SEQ ID NO: 5170086 - DNA, 25 bp, Homo sapien
caaggagggccaccgccaggctaaa

SEQ ID NO: 5170087 - DNA, 25 bp, Homo sapien
ccgccaggctaaacgaaacattgct

SEQ ID NO: 5170088 - DNA, 25 bp, Homo sapien
tcttccactgctagccacggatgct

SEQ ID NO: 5170089 - DNA, 25 bp, Homo sapien
tccactgctagccacggatgctctt

SEQ ID NO: 5170090 - DNA, 25 bp, Homo sapien
gggcccaaccccatcttccactgct

SEQ ID NO: 5170091 - DNA, 25 bp, Homo sapien
ccatcttccactgctagccacggat

SEQ ID NO: 5170092 - DNA, 25 bp, Homo sapien
catactcagttaagattctgctgct

SEQ ID NO: 5170093 - DNA, 25 bp, Homo sapien
cacagatgtgctagcagaatgtgct

SEQ ID NO: 5170094 - DNA, 25 bp, Homo sapien
ctgtgaccatctgcgagaaaccaga

SEQ ID NO: 5170095 - DNA, 25 bp, Homo sapien
gaagaaggatgctaagtcatactca

SEQ ID NO: 5170096 - DNA, 25 bp, Homo sapien
tcctggtcaatgcagtaagatcgcg

SEQ ID NO: 5170097 - DNA, 25 bp, Homo sapien
catcctggtcaatgcagtaagatcg

SEQ ID NO: 5170098 - DNA, 25 bp, Homo sapien
tggtcaatgcagtaagatcgcgtct

SEQ ID NO: 5170099 - DNA, 25 bp, Homo sapien
cctggtcaatgcagtaagatcgcgt

SEQ ID NO: 5170100 - DNA, 25 bp, Homo sapien
ctcagcctcctagagcggaagttac

SEQ ID NO: 5170101 - DNA, 25 bp, Homo sapien
tctggaatgcgtgcgcgccaggctt

SEQ ID NO: 5170102 - DNA, 25 bp, Homo sapien
tgcgtgcgcgccaggcttgagggcc

SEQ ID NO: 5170103 - DNA, 25 bp, Homo sapien
tgtcgtctggaatgcgtgcgcgcca

SEQ ID NO: 5170104 - DNA, 25 bp, Homo sapien
ggtctgggtgtcgtctggaatgcgt

SEQ ID NO: 5170105 - DNA, 25 bp, Homo sapien
gagggcgactgcagcttgggcgccc

SEQ ID NO: 5170106 - DNA, 25 bp, Homo sapien
gcacacagagggcgactgcagcttg

SEQ ID NO: 5170107 - DNA, 25 bp, Homo sapien
cttgggcgcccaggcggcggagcat

SEQ ID NO: 5170108 - DNA, 25 bp, Homo sapien
cagagggcgactgcagcttgggcgc

SEQ ID NO: 5170109 - DNA, 25 bp, Homo sapien
cgcgagcgggctcgggggttgccag

SEQ ID NO: 5170110 - DNA, 25 bp, Homo sapien
ggctcgggggttgccaggcagctgc

SEQ ID NO: 5170111 - DNA, 25 bp, Homo sapien
ctgggagcgcgagcgggctcggggg

SEQ ID NO: 5170112 - DNA, 25 bp, Homo sapien
agcgggctcgggggttgccaggcag

SEQ ID NO: 5170113 - DNA, 25 bp, Homo sapien
tggcttgatcgcagccactgggata

SEQ ID NO: 5170114 - DNA, 25 bp, Homo sapien
cgggcagaatgactggcttgatcgc

SEQ ID NO: 5170115 - DNA, 25 bp, Homo sapien
ctgagggagatctgggccgctggca

SEQ ID NO: 5170116 - DNA, 25 bp, Homo sapien
atctgggccgctggcacgggcactc

SEQ ID NO: 5170117 - DNA, 25 bp, Homo sapien
aggccgtgcctctcgcccactcctc

SEQ ID NO: 5170118 - DNA, 25 bp, Homo sapien
caggccgtgcctctcgcccactcct

SEQ ID NO: 5170119 - DNA, 25 bp, Homo sapien
cccaggccgtgcctctcgcccactc

SEQ ID NO: 5170120 - DNA, 25 bp, Homo sapien
ggccgtgcctctcgcccactcctcc

SEQ ID NO: 5170121 - DNA, 25 bp, Homo sapien
tatcccacaactcaacagaatttct

SEQ ID NO: 5170122 - DNA, 25 bp, Homo sapien
gaaaagacaacccatagtatgtgag

SEQ ID NO: 5170123 - DNA, 25 bp, Homo sapien
tacacaaatgtctaagaaggacaag

SEQ ID NO: 5170124 - DNA, 25 bp, Homo sapien
aagatgctaaacaccgttattcatt

SEQ ID NO: 5170125 - DNA, 25 bp, Homo sapien
ctaagcttggacagaagaacaccaa

SEQ ID NO: 5170126 - DNA, 25 bp, Homo sapien
tccaatgggtctccggaggtagttg

SEQ ID NO: 5170127 - DNA, 25 bp, Homo sapien
taggtgccaccaacacgtatcagca

SEQ ID NO: 5170128 - DNA, 25 bp, Homo sapien
cccatgcattggagttgagagataa

SEQ ID NO: 5170129 - DNA, 25 bp, Homo sapien
ccttcaagattctggtggattcctt

SEQ ID NO: 5170130 - DNA, 25 bp, Homo sapien
gagttgacatttatgcactattgtg

SEQ ID NO: 5170131 - DNA, 25 bp, Homo sapien
tgtgctatgtccatgtggctgaagc

SEQ ID NO: 5170132 - DNA, 25 bp, Homo sapien
ccggaatctggtgtgtccttcaaga

SEQ ID NO: 5170133 - DNA, 25 bp, Homo sapien
gactaggatagcagcccatgccttt

SEQ ID NO: 5170134 - DNA, 25 bp, Homo sapien
ccatttgggcaagagtgtcctgttt

SEQ ID NO: 5170135 - DNA, 25 bp, Homo sapien
cagaactgtgttcaagtcccgaata

SEQ ID NO: 5170136 - DNA, 25 bp, Homo sapien
ggcctagtgatgacgaaatccctca

SEQ ID NO: 5170137 - DNA, 25 bp, Homo sapien
catagcagcaatagatttctcctac

SEQ ID NO: 5170138 - DNA, 25 bp, Homo sapien
tcatctgaccctgggatccctgagc

SEQ ID NO: 5170139 - DNA, 25 bp, Homo sapien
caggagccttgttgcgatgctgaga

SEQ ID NO: 5170140 - DNA, 25 bp, Homo sapien
cacaggagccttgttgcgatgctga

SEQ ID NO: 5170141 - DNA, 25 bp, Homo sapien
aggagccttgttgcgatgctgagat

SEQ ID NO: 5170142 - DNA, 25 bp, Homo sapien
ccacaggagccttgttgcgatgctg

SEQ ID NO: 5170143 - DNA, 25 bp, Homo sapien
tgccagcacaatagatgccgatgcc

SEQ ID NO: 5170144 - DNA, 25 bp, Homo sapien
tccacccttgccagcacaatagatg

SEQ ID NO: 5170145 - DNA, 25 bp, Homo sapien
ccagcacaatagatgccgatgccca

SEQ ID NO: 5170146 - DNA, 25 bp, Homo sapien
ccttgccagcacaatagatgccgat

SEQ ID NO: 5170147 - DNA, 25 bp, Homo sapien
tttagggggaaggaagatccactgc

SEQ ID NO: 5170148 - DNA, 25 bp, Homo sapien
tcagctgcatcattggtttgcaagg

SEQ ID NO: 5170149 - DNA, 25 bp, Homo sapien
agctccaccctctcatttaaatgga

SEQ ID NO: 5170150 - DNA, 25 bp, Homo sapien
gctgcatcattggtttgcaaggaca

SEQ ID NO: 5170151 - DNA, 25 bp, Homo sapien
gtgcatccatccattgccaactccc

SEQ ID NO: 5170152 - DNA, 25 bp, Homo sapien
tgtgcatccatccattgccaactcc

SEQ ID NO: 5170153 - DNA, 25 bp, Homo sapien
gcatccatccattgccaactccctg

SEQ ID NO: 5170154 - DNA, 25 bp, Homo sapien
tgtgacgtgttcagcaagaatcaac

SEQ ID NO: 5170155 - DNA, 25 bp, Homo sapien
cccttggcagatggaatcagcatta

SEQ ID NO: 5170156 - DNA, 25 bp, Homo sapien
tcaacacggtggatttggcctcttc

SEQ ID NO: 5170157 - DNA, 25 bp, Homo sapien
gtctggatccagcatcccttggcag

SEQ ID NO: 5170158 - DNA, 25 bp, Homo sapien
ctcgtctacccaagaggtggtccat

SEQ ID NO: 5170159 - DNA, 25 bp, Homo sapien
cccaagaggtggtccatggccagca

SEQ ID NO: 5170160 - DNA, 25 bp, Homo sapien
catgtgtctcttctcgtctacccaa

SEQ ID NO: 5170161 - DNA, 25 bp, Homo sapien
tctacccaagaggtggtccatggcc

SEQ ID NO: 5170162 - DNA, 25 bp, Homo sapien
taatgggggtaagcatggactcctg

SEQ ID NO: 5170163 - DNA, 25 bp, Homo sapien
cagagcctggttgtttgctatccca

SEQ ID NO: 5170164 - DNA, 25 bp, Homo sapien
tgaggactctgaatcgacttctcta

SEQ ID NO: 5170165 - DNA, 25 bp, Homo sapien
tcgacttctctacggcagagcctgg

SEQ ID NO: 5170166 - DNA, 25 bp, Homo sapien
gagaaactcctaactcgtttcctca

SEQ ID NO: 5170167 - DNA, 25 bp, Homo sapien
ctgcttgttggcactggtggagaaa

SEQ ID NO: 5170168 - DNA, 25 bp, Homo sapien
cttgttggcactggtggagaaactc

SEQ ID NO: 5170169 - DNA, 25 bp, Homo sapien
gttggcactggtggagaaactccta

SEQ ID NO: 5170170 - DNA, 25 bp, Homo sapien
cagagcctgccggtgttctgcgcag

SEQ ID NO: 5170171 - DNA, 25 bp, Homo sapien
tcagtttcgctccaaggtgcagccg

SEQ ID NO: 5170172 - DNA, 25 bp, Homo sapien
caggcttgcaggattcactatagaa

SEQ ID NO: 5170173 - DNA, 25 bp, Homo sapien
ccggcagcgggacgtcttttaattg

SEQ ID NO: 5170174 - DNA, 25 bp, Homo sapien
aggagccagcaagccctcgcctcct

SEQ ID NO: 5170175 - DNA, 25 bp, Homo sapien
cgaaggcgaggtcacggcccgtttg

SEQ ID NO: 5170176 - DNA, 25 bp, Homo sapien
gtggtggcttgaccggggcgtccca

SEQ ID NO: 5170177 - DNA, 25 bp, Homo sapien
ccacgtccaccgctgccctgggggc

SEQ ID NO: 5170178 - DNA, 25 bp, Homo sapien
aagctggcgaccctcccgagctggg

SEQ ID NO: 5170179 - DNA, 25 bp, Homo sapien
tcacccaggcggcagccgcagaggc

SEQ ID NO: 5170180 - DNA, 25 bp, Homo sapien
acaagcgtcccaaggaggtgcagcc

SEQ ID NO: 5170181 - DNA, 25 bp, Homo sapien
tgcggcgctccaacccgacaagcgt

SEQ ID NO: 5170182 - DNA, 25 bp, Homo sapien
ctccgcctcgcagcactcctcttcc

SEQ ID NO: 5170183 - DNA, 25 bp, Homo sapien
ttgagagccccggtccacattccca

SEQ ID NO: 5170184 - DNA, 25 bp, Homo sapien
tccagctgccggcacttgagagccc

SEQ ID NO: 5170185 - DNA, 25 bp, Homo sapien
cctctgcccctcttcgccgagggcg

SEQ ID NO: 5170186 - DNA, 25 bp, Homo sapien
ggagtgtatgtggctggggcgaggc

SEQ ID NO: 5170187 - DNA, 25 bp, Homo sapien
gaggcgcctgggtgttgaggtttgg

SEQ ID NO: 5170188 - DNA, 25 bp, Homo sapien
cccaggaggcgcctgggtgttgagg

SEQ ID NO: 5170189 - DNA, 25 bp, Homo sapien
caggaggcgcctgggtgttgaggtt

SEQ ID NO: 5170190 - DNA, 25 bp, Homo sapien
tctcctcgcgaaggtaacttagtat

SEQ ID NO: 5170191 - DNA, 25 bp, Homo sapien
tcactcgagttctcctcgcgaaggt

SEQ ID NO: 5170192 - DNA, 25 bp, Homo sapien
ggcgcacgattttatctcactcgag

SEQ ID NO: 5170193 - DNA, 25 bp, Homo sapien
gctttcatggaaacttgctggagca

SEQ ID NO: 5170194 - DNA, 25 bp, Homo sapien
ggctaccaggtccaaagactttctc

SEQ ID NO: 5170195 - DNA, 25 bp, Homo sapien
aggctaccaggtccaaagactttct

SEQ ID NO: 5170196 - DNA, 25 bp, Homo sapien
caggctaccaggtccaaagactttc

SEQ ID NO: 5170197 - DNA, 25 bp, Homo sapien
ctgtgatcaatgatttgggagcagt

SEQ ID NO: 5170198 - DNA, 25 bp, Homo sapien
tgtgatcaatgatttgggagcagtc

SEQ ID NO: 5170199 - DNA, 25 bp, Homo sapien
gtgatcaatgatttgggagcagtca

SEQ ID NO: 5170200 - DNA, 25 bp, Homo sapien
acgaaggcgccgaagatgctggact

SEQ ID NO: 5170201 - DNA, 25 bp, Homo sapien
gctgtagaactccatgggcatgccg

SEQ ID NO: 5170202 - DNA, 25 bp, Homo sapien
tgttccagcacatgaaggctacgga

SEQ ID NO: 5170203 - DNA, 25 bp, Homo sapien
catattggaggtctcgggctgctcg

SEQ ID NO: 5170204 - DNA, 25 bp, Homo sapien
gagacttaaggcatcagttggtaaa

SEQ ID NO: 5170205 - DNA, 25 bp, Homo sapien
tttatgggaccacatagtactgtcg

SEQ ID NO: 5170206 - DNA, 25 bp, Homo sapien
atgatgcagaactaaggaagacctt

SEQ ID NO: 5170207 - DNA, 25 bp, Homo sapien
tgtatactttgagacttaaggcatc

SEQ ID NO: 5170208 - DNA, 25 bp, Homo sapien
tgggcttgacaccattgtgattttc

SEQ ID NO: 5170209 - DNA, 25 bp, Homo sapien
taaacaatgggcttgacaccattgt

SEQ ID NO: 5170210 - DNA, 25 bp, Homo sapien
gattttccgagtttaactgctgctt

SEQ ID NO: 5170211 - DNA, 25 bp, Homo sapien
caccattgtgattttccgagtttaa

SEQ ID NO: 5170212 - DNA, 25 bp, Homo sapien
gaataaaatctcatagccggtgtgg

SEQ ID NO: 5170213 - DNA, 25 bp, Homo sapien
tcagctttttcaaaccttgaagggc

SEQ ID NO: 5170214 - DNA, 25 bp, Homo sapien
caattacctggccattagcatcaag

SEQ ID NO: 5170215 - DNA, 25 bp, Homo sapien
catttgtggctgatagatctggaca

SEQ ID NO: 5170216 - DNA, 25 bp, Homo sapien
tagaagacaaaacgtgtaagagaac

SEQ ID NO: 5170217 - DNA, 25 bp, Homo sapien
gaaacattggcttacagccaccagg

SEQ ID NO: 5170218 - DNA, 25 bp, Homo sapien
taattttctggtattgccccatgcc

SEQ ID NO: 5170219 - DNA, 25 bp, Homo sapien
ggcctgctaggacctcttggtttaa

SEQ ID NO: 5170220 - DNA, 25 bp, Homo sapien
aaatatgttggttgggtcaagttca

SEQ ID NO: 5170221 - DNA, 25 bp, Homo sapien
gaaactgttcactgttgcatctgca

SEQ ID NO: 5170222 - DNA, 25 bp, Homo sapien
gcttctctcacattctatctgcagt

SEQ ID NO: 5170223 - DNA, 25 bp, Homo sapien
tcatgggacctgcacaaatattagc

SEQ ID NO: 5170224 - DNA, 25 bp, Homo sapien
tgagctcaggctacaaaatatgtca

SEQ ID NO: 5170225 - DNA, 25 bp, Homo sapien
tagacacaatgcttagactacagat

SEQ ID NO: 5170226 - DNA, 25 bp, Homo sapien
gaaattgtcacaactaccctaactg

SEQ ID NO: 5170227 - DNA, 25 bp, Homo sapien
tcttggatacaagtgagttcctcca

SEQ ID NO: 5170228 - DNA, 25 bp, Homo sapien
tctgagtctcctagtccaacaggta

SEQ ID NO: 5170229 - DNA, 25 bp, Homo sapien
gtctgtgaaatggtgaaccaggaac

SEQ ID NO: 5170230 - DNA, 25 bp, Homo sapien
caacaggtatggactggtggacaac

SEQ ID NO: 5170231 - DNA, 25 bp, Homo sapien
gaacataaggttggagcagacattt

SEQ ID NO: 5170232 - DNA, 25 bp, Homo sapien
ggtgcttcaggaccatgagcagatg

SEQ ID NO: 5170233 - DNA, 25 bp, Homo sapien
gtgcttcaggaccatgagcagatgc

SEQ ID NO: 5170234 - DNA, 25 bp, Homo sapien
taaggttctgtcatgttggcccatc

SEQ ID NO: 5170235 - DNA, 25 bp, Homo sapien
ccagcttggctttacctaggaggta

SEQ ID NO: 5170236 - DNA, 25 bp, Homo sapien
taggtgctgcactaggtatcccaat

SEQ ID NO: 5170237 - DNA, 25 bp, Homo sapien
gaagagcgttccagctgtaagcagg

SEQ ID NO: 5170238 - DNA, 25 bp, Homo sapien
ctctttgagagatgcttccaaatat

SEQ ID NO: 5170239 - DNA, 25 bp, Homo sapien
atggagccgaggattttcattctgg

SEQ ID NO: 5170240 - DNA, 25 bp, Homo sapien
agagatgcttccaaatatccctctg

SEQ ID NO: 5170241 - DNA, 25 bp, Homo sapien
gggatggagccgaggattttcattc

SEQ ID NO: 5170242 - DNA, 25 bp, Homo sapien
tgagcactccacacacgcctcattt

SEQ ID NO: 5170243 - DNA, 25 bp, Homo sapien
cgcctcatttaatcttgagagcttg

SEQ ID NO: 5170244 - DNA, 25 bp, Homo sapien
caaagaccatttctcctctgttggg

SEQ ID NO: 5170245 - DNA, 25 bp, Homo sapien
tccacacacgcctcatttaatcttg

SEQ ID NO: 5170246 - DNA, 25 bp, Homo sapien
gactatgatctctactttgctgatg

SEQ ID NO: 5170247 - DNA, 25 bp, Homo sapien
aggaagacatgactatgatctctac

SEQ ID NO: 5170248 - DNA, 25 bp, Homo sapien
aagcccaggatgcataaggcttgtc

SEQ ID NO: 5170249 - DNA, 25 bp, Homo sapien
aggcttgtccaactgcctctgtatc

SEQ ID NO: 5170250 - DNA, 25 bp, Homo sapien
taggaatactgggtagacaagcccc

SEQ ID NO: 5170251 - DNA, 25 bp, Homo sapien
cggaactgtcaaggaatccccaggg

SEQ ID NO: 5170252 - DNA, 25 bp, Homo sapien
gctaggctggactacaacttacggt

SEQ ID NO: 5170253 - DNA, 25 bp, Homo sapien
tataggcagactcctagaatgtggc

SEQ ID NO: 5170254 - DNA, 25 bp, Homo sapien
gaacaaaggaggagcccatcaagct

SEQ ID NO: 5170255 - DNA, 25 bp, Homo sapien
taacaagaacaccagacggaagaag

SEQ ID NO: 5170256 - DNA, 25 bp, Homo sapien
caaggtaagtagcatccacagggat

SEQ ID NO: 5170257 - DNA, 25 bp, Homo sapien
gaagatattagaaggtcacctgccc

SEQ ID NO: 5170258 - DNA, 25 bp, Homo sapien
gacatacagcccatggccattggga

SEQ ID NO: 5170259 - DNA, 25 bp, Homo sapien
cagcccatggccattgggagcaagg

SEQ ID NO: 5170260 - DNA, 25 bp, Homo sapien
ggccattgggagcaagggccaccat

SEQ ID NO: 5170261 - DNA, 25 bp, Homo sapien
gcaatgatgggacatacagcccatg

SEQ ID NO: 5170262 - DNA, 25 bp, Homo sapien
ccccacgccagtgcctacaacacgc

SEQ ID NO: 5170263 - DNA, 25 bp, Homo sapien
tccccacgccagtgcctacaacacg

SEQ ID NO: 5170264 - DNA, 25 bp, Homo sapien
ccacgccagtgcctacaacacgcat

SEQ ID NO: 5170265 - DNA, 25 bp, Homo sapien
ctccccacgccagtgcctacaacac

SEQ ID NO: 5170266 - DNA, 25 bp, Homo sapien
agctgcgtgatcacgccccgaaatg

SEQ ID NO: 5170267 - DNA, 25 bp, Homo sapien
caccagaatgccaagaggcagctgc

SEQ ID NO: 5170268 - DNA, 25 bp, Homo sapien
cacgccccgaaatgcgtttccaaat

SEQ ID NO: 5170269 - DNA, 25 bp, Homo sapien
tgccaagaggcagctgcgtgatcac

SEQ ID NO: 5170270 - DNA, 25 bp, Homo sapien
cacgcagacaacagatggtacagca

SEQ ID NO: 5170271 - DNA, 25 bp, Homo sapien
agggacaccagcaaacacgcagaca

SEQ ID NO: 5170272 - DNA, 25 bp, Homo sapien
caacagatggtacagcaaattcctc

SEQ ID NO: 5170273 - DNA, 25 bp, Homo sapien
caaacacgcagacaacagatggtac

SEQ ID NO: 5170274 - DNA, 25 bp, Homo sapien
ttccgcatgcaatcggccactagca

SEQ ID NO: 5170275 - DNA, 25 bp, Homo sapien
tcggccactagcaccctgaagatgt

SEQ ID NO: 5170276 - DNA, 25 bp, Homo sapien
tctttccttccgcatgcaatcggcc

SEQ ID NO: 5170277 - DNA, 25 bp, Homo sapien
atgcaatcggccactagcaccctga

SEQ ID NO: 5170278 - DNA, 25 bp, Homo sapien
tgacacgccatgatggtcttgcact

SEQ ID NO: 5170279 - DNA, 25 bp, Homo sapien
tggtctgctgacacgccatgatggt

SEQ ID NO: 5170280 - DNA, 25 bp, Homo sapien
tgaatggtctgctgacacgccatga

SEQ ID NO: 5170281 - DNA, 25 bp, Homo sapien
agcttgaatggtctgctgacacgcc

SEQ ID NO: 5170282 - DNA, 25 bp, Homo sapien
tttttgtctgcagtacccagcatgg

SEQ ID NO: 5170283 - DNA, 25 bp, Homo sapien
gaggttgtattctctccccaggtct

SEQ ID NO: 5170284 - DNA, 25 bp, Homo sapien
cagatagcagacctctcaagagaca

SEQ ID NO: 5170285 - DNA, 25 bp, Homo sapien
gagatatatgccttaagcagagcag

SEQ ID NO: 5170286 - DNA, 25 bp, Homo sapien
tgaggctttgcattctcaggcgggg

SEQ ID NO: 5170287 - DNA, 25 bp, Homo sapien
ctttgcattctcaggcggggaggcc

SEQ ID NO: 5170288 - DNA, 25 bp, Homo sapien
tttgcattctcaggcggggaggcca

SEQ ID NO: 5170289 - DNA, 25 bp, Homo sapien
ggctttgcattctcaggcggggagg

SEQ ID NO: 5170290 - DNA, 25 bp, Homo sapien
catcatattagaatcatgattttgc

SEQ ID NO: 5170291 - DNA, 25 bp, Homo sapien
tgatctgtgggactagaacacttct

SEQ ID NO: 5170292 - DNA, 25 bp, Homo sapien
ttctgcatcatattagaatcatgat

SEQ ID NO: 5170293 - DNA, 25 bp, Homo sapien
ctttgatctgtgggactagaacact

SEQ ID NO: 5170294 - DNA, 25 bp, Homo sapien
ggttccaagaagcagcggcatctgt

SEQ ID NO: 5170295 - DNA, 25 bp, Homo sapien
tttctagagccgagtcaaaaaggaa

SEQ ID NO: 5170296 - DNA, 25 bp, Homo sapien
gagagatcccgacagcaaggagctg

SEQ ID NO: 5170297 - DNA, 25 bp, Homo sapien
agcatgacatcttgccagcctgtga

SEQ ID NO: 5170298 - DNA, 25 bp, Homo sapien
ctgagaactgaatcaatgtgggtct

SEQ ID NO: 5170299 - DNA, 25 bp, Homo sapien
aatcaatgtgggtctgtggttgttc

SEQ ID NO: 5170300 - DNA, 25 bp, Homo sapien
gaactgaatcaatgtgggtctgtgg

SEQ ID NO: 5170301 - DNA, 25 bp, Homo sapien
ggccctagggtgactgaaatggctg

SEQ ID NO: 5170302 - DNA, 25 bp, Homo sapien
gaagtctgtgggcagttcccgttta

SEQ ID NO: 5170303 - DNA, 25 bp, Homo sapien
tgctgggttggcctcgggtggagaa

SEQ ID NO: 5170304 - DNA, 25 bp, Homo sapien
tagcagccagagttatggagcagag

SEQ ID NO: 5170305 - DNA, 25 bp, Homo sapien
tgcagaccctgcatcaggaacccag

SEQ ID NO: 5170306 - DNA, 25 bp, Homo sapien
catgcttgccggatctttcactgga

SEQ ID NO: 5170307 - DNA, 25 bp, Homo sapien
ctggatttctcagccacccagtcca

SEQ ID NO: 5170308 - DNA, 25 bp, Homo sapien
gctttctgctaaggatgtgcatagc

SEQ ID NO: 5170309 - DNA, 25 bp, Homo sapien
tagcctgattccacagcaaatttgg

SEQ ID NO: 5170310 - DNA, 25 bp, Homo sapien
agccaattccagatatgaggcagga

SEQ ID NO: 5170311 - DNA, 25 bp, Homo sapien
tgaggcaggaacttggaaatcttcc

SEQ ID NO: 5170312 - DNA, 25 bp, Homo sapien
gagttcagggacccgttttcagcac

SEQ ID NO: 5170313 - DNA, 25 bp, Homo sapien
cgttttcagcacagccaattccaga

SEQ ID NO: 5170314 - DNA, 25 bp, Homo sapien
ccagaaatctggaactccaggacat

SEQ ID NO: 5170315 - DNA, 25 bp, Homo sapien
tggaactcttctaggagtaatgctt

SEQ ID NO: 5170316 - DNA, 25 bp, Homo sapien
ttctaggagtaatgcttcccagagc

SEQ ID NO: 5170317 - DNA, 25 bp, Homo sapien
aactccaggacattaggctccagaa

SEQ ID NO: 5170318 - DNA, 25 bp, Homo sapien
ccaaataactcctccaagcaaacca

SEQ ID NO: 5170319 - DNA, 25 bp, Homo sapien
caaataactcctccaagcaaaccag

SEQ ID NO: 5170320 - DNA, 25 bp, Homo sapien
aaataactcctccaagcaaaccagt

SEQ ID NO: 5170321 - DNA, 25 bp, Homo sapien
aataactcctccaagcaaaccagtg

SEQ ID NO: 5170322 - DNA, 25 bp, Homo sapien
gccttatcaccagtctccatctgag

SEQ ID NO: 5170323 - DNA, 25 bp, Homo sapien
tgtcttccaagccttatcaccagtc

SEQ ID NO: 5170324 - DNA, 25 bp, Homo sapien
gcatcacatctaagccttttgtaac

SEQ ID NO: 5170325 - DNA, 25 bp, Homo sapien
tcatagcatcacatctaagcctttt

SEQ ID NO: 5170326 - DNA, 25 bp, Homo sapien
aatggtaccaatttttcagtgttgg

SEQ ID NO: 5170327 - DNA, 25 bp, Homo sapien
cttactggccaggaaatggtaccaa

SEQ ID NO: 5170328 - DNA, 25 bp, Homo sapien
tgtgcttactggccaggaaatggta

SEQ ID NO: 5170329 - DNA, 25 bp, Homo sapien
tgcttactggccaggaaatggtacc

SEQ ID NO: 5170330 - DNA, 25 bp, Homo sapien
ccagtcgtgcttgggtttggccgca

SEQ ID NO: 5170331 - DNA, 25 bp, Homo sapien
tacggccaatgtcacaacaatcagc

SEQ ID NO: 5170332 - DNA, 25 bp, Homo sapien
gaggatcatgtacgcccggaagtag

SEQ ID NO: 5170333 - DNA, 25 bp, Homo sapien
tcctccgaatctggttgggcatcca

SEQ ID NO: 5170334 - DNA, 25 bp, Homo sapien
agcagaattggctggtttcgcgcct

SEQ ID NO: 5170335 - DNA, 25 bp, Homo sapien
cggcctcgctctgaaaagtgcttaa

SEQ ID NO: 5170336 - DNA, 25 bp, Homo sapien
gagactcaatgactgggacttagac

SEQ ID NO: 5170337 - DNA, 25 bp, Homo sapien
tacgcgcaggcgcttctcgtggttg

SEQ ID NO: 5170338 - DNA, 25 bp, Homo sapien
agagtgacgttttcttagggctgga

SEQ ID NO: 5170339 - DNA, 25 bp, Homo sapien
gagtgaaagttcacccccatgtctg

SEQ ID NO: 5170340 - DNA, 25 bp, Homo sapien
gtgtaaccggagtcaaggccaggct

SEQ ID NO: 5170341 - DNA, 25 bp, Homo sapien
gggcatctgccttttgtaaagcctc

SEQ ID NO: 5170342 - DNA, 25 bp, Homo sapien
cctgttcctcaaattagccctcttc

SEQ ID NO: 5170343 - DNA, 25 bp, Homo sapien
ctcaaattagccctcttctcggcac

SEQ ID NO: 5170344 - DNA, 25 bp, Homo sapien
aattagccctcttctcggcacactg

SEQ ID NO: 5170345 - DNA, 25 bp, Homo sapien
ctgttcctcaaattagccctcttct

SEQ ID NO: 5170346 - DNA, 25 bp, Homo sapien
tgtgcatcatcagcggcctgtctca

SEQ ID NO: 5170347 - DNA, 25 bp, Homo sapien
gggaagttctgcctcggccctcagg

SEQ ID NO: 5170348 - DNA, 25 bp, Homo sapien
tctgccgggtaccagtccttctgct

SEQ ID NO: 5170349 - DNA, 25 bp, Homo sapien
gttacagggatcatgtaccgcaagt

SEQ ID NO: 5170350 - DNA, 25 bp, Homo sapien
tatcaatgagacaatccgaagcact

SEQ ID NO: 5170351 - DNA, 25 bp, Homo sapien
ggtattcacaggtattggcatctca

SEQ ID NO: 5170352 - DNA, 25 bp, Homo sapien
gacctcacctagtctctgggctgtg

SEQ ID NO: 5170353 - DNA, 25 bp, Homo sapien
gacagctattcttttgccggtgcac

SEQ ID NO: 5170354 - DNA, 25 bp, Homo sapien
tagaatgatttcctaaaaagggcca

SEQ ID NO: 5170355 - DNA, 25 bp, Homo sapien
gatggcaaatgtagagactatgggc

SEQ ID NO: 5170356 - DNA, 25 bp, Homo sapien
tgggcaattccctgaagtgtattcc

SEQ ID NO: 5170357 - DNA, 25 bp, Homo sapien
cactgtagtggaagtggcaaataaa

SEQ ID NO: 5170358 - DNA, 25 bp, Homo sapien
tcctttcatccggttggaaacatct

SEQ ID NO: 5170359 - DNA, 25 bp, Homo sapien
cctttcatccggttggaaacatctt

SEQ ID NO: 5170360 - DNA, 25 bp, Homo sapien
catccggttggaaacatctttaatc

SEQ ID NO: 5170361 - DNA, 25 bp, Homo sapien
tttcatccggttggaaacatcttta

SEQ ID NO: 5170362 - DNA, 25 bp, Homo sapien
tctgccactgcccagtttagaacta

SEQ ID NO: 5170363 - DNA, 25 bp, Homo sapien
ttagaactagcacactttttcttct

SEQ ID NO: 5170364 - DNA, 25 bp, Homo sapien
aatgtctccaaagctagctcctcca

SEQ ID NO: 5170365 - DNA, 25 bp, Homo sapien
tgtctccaaagctagctcctccata

SEQ ID NO: 5170366 - DNA, 25 bp, Homo sapien
gggcagctctcagcattccccaaaa

SEQ ID NO: 5170367 - DNA, 25 bp, Homo sapien
cgttcccatcgccagcctgcctgct

SEQ ID NO: 5170368 - DNA, 25 bp, Homo sapien
tgctgaagtgcctacaatgaacctg

SEQ ID NO: 5170369 - DNA, 25 bp, Homo sapien
accattcccgtttgtccctgcacct

SEQ ID NO: 5170370 - DNA, 25 bp, Homo sapien
cattcgtgcctaaacctcagggcca

SEQ ID NO: 5170371 - DNA, 25 bp, Homo sapien
accagtgcaggcagccattcgtgcc

SEQ ID NO: 5170372 - DNA, 25 bp, Homo sapien
tggtgccttcgactctctcctgtgg

SEQ ID NO: 5170373 - DNA, 25 bp, Homo sapien
ccagtgtgagtctttattctacacc

SEQ ID NO: 5170374 - DNA, 25 bp, Homo sapien
ctccctcaggcccagacctgagctt

SEQ ID NO: 5170375 - DNA, 25 bp, Homo sapien
cctcaggcccagacctgagcttatg

SEQ ID NO: 5170376 - DNA, 25 bp, Homo sapien
tccctcaggcccagacctgagctta

SEQ ID NO: 5170377 - DNA, 25 bp, Homo sapien
tcaggcccagacctgagcttatggg

SEQ ID NO: 5170378 - DNA, 25 bp, Homo sapien
gcacgtcgtttgtaatagaattgta

SEQ ID NO: 5170379 - DNA, 25 bp, Homo sapien
aaaagcatacttgtagcacgtcgtt

SEQ ID NO: 5170380 - DNA, 25 bp, Homo sapien
tagcttcaaactctctgagattgcc

SEQ ID NO: 5170381 - DNA, 25 bp, Homo sapien
gagattgccgaaagttgtatgtaca

SEQ ID NO: 5170382 - DNA, 25 bp, Homo sapien
tcagccagcaaatgaaagaactatg

SEQ ID NO: 5170383 - DNA, 25 bp, Homo sapien
gaatcagccagcaaatgaaagaact

SEQ ID NO: 5170384 - DNA, 25 bp, Homo sapien
tggaatgaatcagccagcaaatgaa

SEQ ID NO: 5170385 - DNA, 25 bp, Homo sapien
ctggaatgaatcagccagcaaatga

SEQ ID NO: 5170386 - DNA, 25 bp, Homo sapien
gaacttcttcagagtccacaaggcc

SEQ ID NO: 5170387 - DNA, 25 bp, Homo sapien
tgccgtggacacgttaagaacttct

SEQ ID NO: 5170388 - DNA, 25 bp, Homo sapien
tctaagatgaataccacacactcca

SEQ ID NO: 5170389 - DNA, 25 bp, Homo sapien
gcagctttcttgagacagtagttta

SEQ ID NO: 5170390 - DNA, 25 bp, Homo sapien
tatcaccgtacatattttccacctc

SEQ ID NO: 5170391 - DNA, 25 bp, Homo sapien
gagtttttctgtatcaccgtacata

SEQ ID NO: 5170392 - DNA, 25 bp, Homo sapien
tgtatcaccgtacatattttccacc

SEQ ID NO: 5170393 - DNA, 25 bp, Homo sapien
ttctgtatcaccgtacatattttcc

SEQ ID NO: 5170394 - DNA, 25 bp, Homo sapien
cattggaaatgatgacgctaacatc

SEQ ID NO: 5170395 - DNA, 25 bp, Homo sapien
catcgatcacagtaaaggacagcag

SEQ ID NO: 5170396 - DNA, 25 bp, Homo sapien
tatcttcctactaagggacatcccc

SEQ ID NO: 5170397 - DNA, 25 bp, Homo sapien
ctgtgccataagcaaatttgcggtt

SEQ ID NO: 5170398 - DNA, 25 bp, Homo sapien
ccaaaacatgaattgcagtaggaaa

SEQ ID NO: 5170399 - DNA, 25 bp, Homo sapien
caaaacatgaattgcagtaggaaat

SEQ ID NO: 5170400 - DNA, 25 bp, Homo sapien
cccaaaacatgaattgcagtaggaa

SEQ ID NO: 5170401 - DNA, 25 bp, Homo sapien
aaacatgaattgcagtaggaaatga

SEQ ID NO: 5170402 - DNA, 25 bp, Homo sapien
gattaacttaatcaggttgtggaag

SEQ ID NO: 5170403 - DNA, 25 bp, Homo sapien
tttttagaatcacgtagtcatgttg

SEQ ID NO: 5170404 - DNA, 25 bp, Homo sapien
tccttgagataaaccctatatagct

SEQ ID NO: 5170405 - DNA, 25 bp, Homo sapien
taatgatccgtttagtcagctaatg

SEQ ID NO: 5170406 - DNA, 25 bp, Homo sapien
gcaaagagatatggctgccggcagt

SEQ ID NO: 5170407 - DNA, 25 bp, Homo sapien
tggctgccggcagttggacatgctc

SEQ ID NO: 5170408 - DNA, 25 bp, Homo sapien
ctcaagtagtaaagccccgtggaag

SEQ ID NO: 5170409 - DNA, 25 bp, Homo sapien
agttggacatgctcaagtagtaaag

SEQ ID NO: 5170410 - DNA, 25 bp, Homo sapien
tccgcttagttcactagtaactgca

SEQ ID NO: 5170411 - DNA, 25 bp, Homo sapien
tagaagcttatatccccatttctgc

SEQ ID NO: 5170412 - DNA, 25 bp, Homo sapien
gtgtaatttagacaagggccatgtt

SEQ ID NO: 5170413 - DNA, 25 bp, Homo sapien
catgtgtagcaaacctccgcttagt

SEQ ID NO: 5170414 - DNA, 25 bp, Homo sapien
ccaactcgtatcaaggaaagccaca

SEQ ID NO: 5170415 - DNA, 25 bp, Homo sapien
cccaagtggctttgctagtcctaca

SEQ ID NO: 5170416 - DNA, 25 bp, Homo sapien
tccaagcagttccaaaccagagctg

SEQ ID NO: 5170417 - DNA, 25 bp, Homo sapien
tagattcccacgttgatgcggacga

SEQ ID NO: 5170418 - DNA, 25 bp, Homo sapien
gaaagaaaccgaagtctgacacagt

SEQ ID NO: 5170419 - DNA, 25 bp, Homo sapien
gacacagtcacgaactgatgctgag

SEQ ID NO: 5170420 - DNA, 25 bp, Homo sapien
tgctgaggtgcacgtgagtttccca

SEQ ID NO: 5170421 - DNA, 25 bp, Homo sapien
tcaaatatgatgtcacaagcgaacc

SEQ ID NO: 5170422 - DNA, 25 bp, Homo sapien
gagcagccagggcagctgttggcat

SEQ ID NO: 5170423 - DNA, 25 bp, Homo sapien
gggagcagccagggcagctgttggc

SEQ ID NO: 5170424 - DNA, 25 bp, Homo sapien
cggggagcagccagggcagctgttg

SEQ ID NO: 5170425 - DNA, 25 bp, Homo sapien
caagacggggagcagccagggcagc

SEQ ID NO: 5170426 - DNA, 25 bp, Homo sapien
cctttctgtgcataggtaagagtaa

SEQ ID NO: 5170427 - DNA, 25 bp, Homo sapien
ctttcctttctgtgcataggtaaga

SEQ ID NO: 5170428 - DNA, 25 bp, Homo sapien
aagagtaatggaggcccacagccaa

SEQ ID NO: 5170429 - DNA, 25 bp, Homo sapien
tgcataggtaagagtaatggaggcc

SEQ ID NO: 5170430 - DNA, 25 bp, Homo sapien
tacaaatgtttgcaatgtcatagcc

SEQ ID NO: 5170431 - DNA, 25 bp, Homo sapien
gggaaatcgacgagcagctttgagt

SEQ ID NO: 5170432 - DNA, 25 bp, Homo sapien
tctcggattctgtttccagaagctt

SEQ ID NO: 5170433 - DNA, 25 bp, Homo sapien
gtctcatctttagtcaactcagaag

SEQ ID NO: 5170434 - DNA, 25 bp, Homo sapien
gttctacctcagctgaacactctgc

SEQ ID NO: 5170435 - DNA, 25 bp, Homo sapien
tagcttgctgccgaaagggtgattc

SEQ ID NO: 5170436 - DNA, 25 bp, Homo sapien
cagtggaggtgattctctgggcccc

SEQ ID NO: 5170437 - DNA, 25 bp, Homo sapien
tgggccccacaaattgtgccccaga

SEQ ID NO: 5170438 - DNA, 25 bp, Homo sapien
ccagttagcttccagatcaggaaaa

SEQ ID NO: 5170439 - DNA, 25 bp, Homo sapien
agtaacaggacaagtgtcatccagt

SEQ ID NO: 5170440 - DNA, 25 bp, Homo sapien
caggacaagtgtcatccagttagct

SEQ ID NO: 5170441 - DNA, 25 bp, Homo sapien
aagtgtcatccagttagcttccaga

SEQ ID NO: 5170442 - DNA, 25 bp, Homo sapien
tccatagctccgtgtcatattaggg

SEQ ID NO: 5170443 - DNA, 25 bp, Homo sapien
tagctccgtgtcatattagggacca

SEQ ID NO: 5170444 - DNA, 25 bp, Homo sapien
agctggtccatagctccgtgtcata

SEQ ID NO: 5170445 - DNA, 25 bp, Homo sapien
gattgtctgctcaggggttttgcta

SEQ ID NO: 5170446 - DNA, 25 bp, Homo sapien
tgaccgtgtattgatctctagtatc

SEQ ID NO: 5170447 - DNA, 25 bp, Homo sapien
tgctttatgaccgtgtattgatctc

SEQ ID NO: 5170448 - DNA, 25 bp, Homo sapien
atcctcatccgtgctccctagaagg

SEQ ID NO: 5170449 - DNA, 25 bp, Homo sapien
acagctctttgctttatgaccgtgt

SEQ ID NO: 5170450 - DNA, 25 bp, Homo sapien
gaacatgctatgtttcattagccac

SEQ ID NO: 5170451 - DNA, 25 bp, Homo sapien
tcattagccactcacctatgtagag

SEQ ID NO: 5170452 - DNA, 25 bp, Homo sapien
caccggagagggagattatttgtcg

SEQ ID NO: 5170453 - DNA, 25 bp, Homo sapien
tcacctatgtagagacaccggagag

SEQ ID NO: 5170454 - DNA, 25 bp, Homo sapien
agatgggacccagaataagtttgtg

SEQ ID NO: 5170455 - DNA, 25 bp, Homo sapien
aagaggagcagaaagcttgtgtttt

SEQ ID NO: 5170456 - DNA, 25 bp, Homo sapien
aaatgttcctctgcttcggttggta

SEQ ID NO: 5170457 - DNA, 25 bp, Homo sapien
cagttgtgtttcagactgtggcagg

SEQ ID NO: 5170458 - DNA, 25 bp, Homo sapien
aggaaggatgtctttgaagtcctga

SEQ ID NO: 5170459 - DNA, 25 bp, Homo sapien
aaggaaggatgtctttgaagtcctg

SEQ ID NO: 5170460 - DNA, 25 bp, Homo sapien
gaaggaaggatgtctttgaagtcct

SEQ ID NO: 5170461 - DNA, 25 bp, Homo sapien
ctggtctaagagctgccctgaaaca

SEQ ID NO: 5170462 - DNA, 25 bp, Homo sapien
gatttgcaatctgacgcagctcttc

SEQ ID NO: 5170463 - DNA, 25 bp, Homo sapien
ggccagtgatttgcaatctgacgca

SEQ ID NO: 5170464 - DNA, 25 bp, Homo sapien
ctaagagctgccctgaaacacttgg

SEQ ID NO: 5170465 - DNA, 25 bp, Homo sapien
tgtcactgtgaccttcaacaacact

SEQ ID NO: 5170466 - DNA, 25 bp, Homo sapien
tgtaggaaaacaataacctccagga

SEQ ID NO: 5170467 - DNA, 25 bp, Homo sapien
cctgattcggccttgtttggccttc

SEQ ID NO: 5170468 - DNA, 25 bp, Homo sapien
aacaataacctccaggagtgtcatg

SEQ ID NO: 5170469 - DNA, 25 bp, Homo sapien
cagacgtgcagaaagtggccccttt

SEQ ID NO: 5170470 - DNA, 25 bp, Homo sapien
taagcactggaaaggatattaacct

SEQ ID NO: 5170471 - DNA, 25 bp, Homo sapien
cctttgagaggtaagggacactttg

SEQ ID NO: 5170472 - DNA, 25 bp, Homo sapien
cagagcaaggctttcgatgatgaga

SEQ ID NO: 5170473 - DNA, 25 bp, Homo sapien
ataagttcaccttatgagtttctgg

SEQ ID NO: 5170474 - DNA, 25 bp, Homo sapien
atggaggcgcctccagtcctgccct

SEQ ID NO: 5170475 - DNA, 25 bp, Homo sapien
cccttggctgtttgtgtggaccagc

SEQ ID NO: 5170476 - DNA, 25 bp, Homo sapien
gctgtttgtgtggaccagccatgga

SEQ ID NO: 5170477 - DNA, 25 bp, Homo sapien
ttagaaggctgcattagttattatt

SEQ ID NO: 5170478 - DNA, 25 bp, Homo sapien
taaacggaagcctcaatagaagaag

SEQ ID NO: 5170479 - DNA, 25 bp, Homo sapien
aaatcagcatcaaaggaaccatagg

SEQ ID NO: 5170480 - DNA, 25 bp, Homo sapien
gaaacagtgagggagtcgccttaat

SEQ ID NO: 5170481 - DNA, 25 bp, Homo sapien
tcggctatcgtgttcctgctgaaag

SEQ ID NO: 5170482 - DNA, 25 bp, Homo sapien
tctctgtgactgctactcggggcac

SEQ ID NO: 5170483 - DNA, 25 bp, Homo sapien
cagcttagcgaaggcccctctctgt

SEQ ID NO: 5170484 - DNA, 25 bp, Homo sapien
tctgtgactgctactcggggcaccc

SEQ ID NO: 5170485 - DNA, 25 bp, Homo sapien
aaagcagcttagcgaaggcccctct

SEQ ID NO: 5170486 - DNA, 25 bp, Homo sapien
aatgcacatttcaaccagcaacagc

SEQ ID NO: 5170487 - DNA, 25 bp, Homo sapien
caggcagtagccaaggaaccatgaa

SEQ ID NO: 5170488 - DNA, 25 bp, Homo sapien
ggaaccatgaacttgctacttggat

SEQ ID NO: 5170489 - DNA, 25 bp, Homo sapien
tcagctgggcaatgtaggtatgcag

SEQ ID NO: 5170490 - DNA, 25 bp, Homo sapien
ggattagtttacctctgtagcacca

SEQ ID NO: 5170491 - DNA, 25 bp, Homo sapien
tagattactttgctgaaagcccatg

SEQ ID NO: 5170492 - DNA, 25 bp, Homo sapien
catgtgtctgtataaccaaagtgga

SEQ ID NO: 5170493 - DNA, 25 bp, Homo sapien
ccaaagtggagttcattctcaagtg

SEQ ID NO: 5170494 - DNA, 25 bp, Homo sapien
tgctttaacaacagccagtcagtgg

SEQ ID NO: 5170495 - DNA, 25 bp, Homo sapien
tccacaaggcatgctctcagacaag

SEQ ID NO: 5170496 - DNA, 25 bp, Homo sapien
tatttcagctatgtgtgcctcagag

SEQ ID NO: 5170497 - DNA, 25 bp, Homo sapien
tggaatgatgcctacccacactggg

SEQ ID NO: 5170498 - DNA, 25 bp, Homo sapien
gatattgaactacgcctgtttacct

SEQ ID NO: 5170499 - DNA, 25 bp, Homo sapien
tgatattgaactacgcctgtttacc

SEQ ID NO: 5170500 - DNA, 25 bp, Homo sapien
ttcccttgcagtatctcatcagggt

SEQ ID NO: 5170501 - DNA, 25 bp, Homo sapien
tgttgatattgaactacgcctgttt

SEQ ID NO: 5170502 - DNA, 25 bp, Homo sapien
aagggtccttgtgagcactggccca

SEQ ID NO: 5170503 - DNA, 25 bp, Homo sapien
cattggcatggcctttgaactcatc

SEQ ID NO: 5170504 - DNA, 25 bp, Homo sapien
tcttcactgccaaggtgtgagcaag

SEQ ID NO: 5170505 - DNA, 25 bp, Homo sapien
ggcccagatgatggtaacaaccacc

SEQ ID NO: 5170506 - DNA, 25 bp, Homo sapien
aatttcaggtagctcctttactagg

SEQ ID NO: 5170507 - DNA, 25 bp, Homo sapien
tgggatcccccagtatttgttgatg

SEQ ID NO: 5170508 - DNA, 25 bp, Homo sapien
tgttgatgtaagtgggactatggaa

SEQ ID NO: 5170509 - DNA, 25 bp, Homo sapien
cttagcaggtgggatcccccagtat

SEQ ID NO: 5170510 - DNA, 25 bp, Homo sapien
aactagatgatttcgttgctgccac

SEQ ID NO: 5170511 - DNA, 25 bp, Homo sapien
taactagatgatttcgttgctgcca

SEQ ID NO: 5170512 - DNA, 25 bp, Homo sapien
ctagatgatttcgttgctgccactg

SEQ ID NO: 5170513 - DNA, 25 bp, Homo sapien
ctaactagatgatttcgttgctgcc

SEQ ID NO: 5170514 - DNA, 25 bp, Homo sapien
tgataaatatcacacgaatatgaat

SEQ ID NO: 5170515 - DNA, 25 bp, Homo sapien
atgcaaatctcttgtgataaatatc

SEQ ID NO: 5170516 - DNA, 25 bp, Homo sapien
tgcaaatctcttgtgataaatatca

SEQ ID NO: 5170517 - DNA, 25 bp, Homo sapien
gtgataaatatcacacgaatatgaa

SEQ ID NO: 5170518 - DNA, 25 bp, Homo sapien
taaatgggagtatcctttggtctgt

SEQ ID NO: 5170519 - DNA, 25 bp, Homo sapien
gagtggccagcctatgcattctgca

SEQ ID NO: 5170520 - DNA, 25 bp, Homo sapien
aaatcattgtactgcaaggcttggc

SEQ ID NO: 5170521 - DNA, 25 bp, Homo sapien
gcataggagacatgcaaagcttctg

SEQ ID NO: 5170522 - DNA, 25 bp, Homo sapien
cctaaagctttagcattggagaaaa

SEQ ID NO: 5170523 - DNA, 25 bp, Homo sapien
gatgcctttcgtaagcctaaagctt

SEQ ID NO: 5170524 - DNA, 25 bp, Homo sapien
tgccacggatgcctttcgtaagcct

SEQ ID NO: 5170525 - DNA, 25 bp, Homo sapien
ttactgtacttctatggccagtgcc

SEQ ID NO: 5170526 - DNA, 25 bp, Homo sapien
tgcatgctattgtgtcgacacactt

SEQ ID NO: 5170527 - DNA, 25 bp, Homo sapien
catgctattgtgtcgacacacttgt

SEQ ID NO: 5170528 - DNA, 25 bp, Homo sapien
tgctattgtgtcgacacacttgttc

SEQ ID NO: 5170529 - DNA, 25 bp, Homo sapien
ctattgtgtcgacacacttgttcat

SEQ ID NO: 5170530 - DNA, 25 bp, Homo sapien
cattgatctggccaccggacagtag

SEQ ID NO: 5170531 - DNA, 25 bp, Homo sapien
gacagtagctcggattttatttggt

SEQ ID NO: 5170532 - DNA, 25 bp, Homo sapien
tcattggcattgatctggccaccgg

SEQ ID NO: 5170533 - DNA, 25 bp, Homo sapien
atctggccaccggacagtagctcgg

SEQ ID NO: 5170534 - DNA, 25 bp, Homo sapien
cagaccttgacgcttgtcatgtttt

SEQ ID NO: 5170535 - DNA, 25 bp, Homo sapien
ctgtctgcgttagaaccatcagacc

SEQ ID NO: 5170536 - DNA, 25 bp, Homo sapien
ggaagtaggtacagggagacgccat

SEQ ID NO: 5170537 - DNA, 25 bp, Homo sapien
tgtcatagtcatattaatggttacc

SEQ ID NO: 5170538 - DNA, 25 bp, Homo sapien
tttccaatcagaggtgaagctttca

SEQ ID NO: 5170539 - DNA, 25 bp, Homo sapien
tgtttttccaatcagaggtgaagct

SEQ ID NO: 5170540 - DNA, 25 bp, Homo sapien
cttgagtcacttgtttttccaatca

SEQ ID NO: 5170541 - DNA, 25 bp, Homo sapien
ttttccaatcagaggtgaagctttc

SEQ ID NO: 5170542 - DNA, 25 bp, Homo sapien
ttgagtgacaatcgcatgctggagc

SEQ ID NO: 5170543 - DNA, 25 bp, Homo sapien
cacgtcttggtgacggagatgagca

SEQ ID NO: 5170544 - DNA, 25 bp, Homo sapien
ggaatctcttggctgggttacactg

SEQ ID NO: 5170545 - DNA, 25 bp, Homo sapien
catgctggagcactggagtcacaag

SEQ ID NO: 5170546 - DNA, 25 bp, Homo sapien
cagcaggtagcagttctggttgatt

SEQ ID NO: 5170547 - DNA, 25 bp, Homo sapien
gaggacatagtccaggatgtacaat

SEQ ID NO: 5170548 - DNA, 25 bp, Homo sapien
ttcactgatggaggacatagtccag

SEQ ID NO: 5170549 - DNA, 25 bp, Homo sapien
tctgtgtccaacttggggtgctgct

SEQ ID NO: 5170550 - DNA, 25 bp, Homo sapien
tggccggagcgactgttttgacaag

SEQ ID NO: 5170551 - DNA, 25 bp, Homo sapien
aacagtcagctatgagacagtctgc

SEQ ID NO: 5170552 - DNA, 25 bp, Homo sapien
tgtaaggccagcagaagattccatg

SEQ ID NO: 5170553 - DNA, 25 bp, Homo sapien
gaacacaaagtttcatcccatggag

SEQ ID NO: 5170554 - DNA, 25 bp, Homo sapien
taaaatccggagaggcgaaggacta

SEQ ID NO: 5170555 - DNA, 25 bp, Homo sapien
tcactatgagattctgcagacccag

SEQ ID NO: 5170556 - DNA, 25 bp, Homo sapien
tgaagcccagcggtcacctttgatg

SEQ ID NO: 5170557 - DNA, 25 bp, Homo sapien
gtagttaccgtctcagtgcacccaa

SEQ ID NO: 5170558 - DNA, 25 bp, Homo sapien
tgcatgttgccggaactcagttcct

SEQ ID NO: 5170559 - DNA, 25 bp, Homo sapien
aatgcatgttgccggaactcagttc

SEQ ID NO: 5170560 - DNA, 25 bp, Homo sapien
atgcatgttgccggaactcagttcc

SEQ ID NO: 5170561 - DNA, 25 bp, Homo sapien
gcatgttgccggaactcagttcctt

SEQ ID NO: 5170562 - DNA, 25 bp, Homo sapien
tgagtattgaagcatgtgcaggtga

SEQ ID NO: 5170563 - DNA, 25 bp, Homo sapien
cctgttgccaaggatcgtagggtaa

SEQ ID NO: 5170564 - DNA, 25 bp, Homo sapien
cagacctgatggtatgggtactcac

SEQ ID NO: 5170565 - DNA, 25 bp, Homo sapien
ctaagcaaggtgtggagacacagaa

SEQ ID NO: 5170566 - DNA, 25 bp, Homo sapien
cactgtggatggtatttggccaacc

SEQ ID NO: 5170567 - DNA, 25 bp, Homo sapien
ggccaacctggtccatcatattgag

SEQ ID NO: 5170568 - DNA, 25 bp, Homo sapien
atttaatgtagctaagatggcccaa

SEQ ID NO: 5170569 - DNA, 25 bp, Homo sapien
catttatgacatggactgtgtagcc

SEQ ID NO: 5170570 - DNA, 25 bp, Homo sapien
tgttcccatgtctgactgttcgtca

SEQ ID NO: 5170571 - DNA, 25 bp, Homo sapien
catgtctgactgttcgtcaactttg

SEQ ID NO: 5170572 - DNA, 25 bp, Homo sapien
cacttgttcccatgtctgactgttc

SEQ ID NO: 5170573 - DNA, 25 bp, Homo sapien
tctcctgagtgccttgctcctcctg

SEQ ID NO: 5170574 - DNA, 25 bp, Homo sapien
taacaagatgagaaaagctgtcaat

SEQ ID NO: 5170575 - DNA, 25 bp, Homo sapien
aaggaggaaaatgtaacaagatgag

SEQ ID NO: 5170576 - DNA, 25 bp, Homo sapien
tgtaacaagatgagaaaagctgtca

SEQ ID NO: 5170577 - DNA, 25 bp, Homo sapien
ttagaaggaggaaaatgtaacaaga

SEQ ID NO: 5170578 - DNA, 25 bp, Homo sapien
taacctgtaaagtagaagactctcc

SEQ ID NO: 5170579 - DNA, 25 bp, Homo sapien
taaattgtgcacctaaaagggccag

SEQ ID NO: 5170580 - DNA, 25 bp, Homo sapien
tgggactaatcctcagaactgggta

SEQ ID NO: 5170581 - DNA, 25 bp, Homo sapien
cctgtcacagaggatatcagttcag

SEQ ID NO: 5170582 - DNA, 25 bp, Homo sapien
actctgtagggcctgagtcattgta

SEQ ID NO: 5170583 - DNA, 25 bp, Homo sapien
tgtagggcctgagtcattgtaagcc

SEQ ID NO: 5170584 - DNA, 25 bp, Homo sapien
gggaatgtgattaaatctctcatct

SEQ ID NO: 5170585 - DNA, 25 bp, Homo sapien
tggtccagggccttcagtataggga

SEQ ID NO: 5170586 - DNA, 25 bp, Homo sapien
gcttggacagtacattactggatcc

SEQ ID NO: 5170587 - DNA, 25 bp, Homo sapien
gcagtaatccatgtttgcattctga

SEQ ID NO: 5170588 - DNA, 25 bp, Homo sapien
aagctgtgcggggttgcacatgaat

SEQ ID NO: 5170589 - DNA, 25 bp, Homo sapien
tatttaacatggctggcagtaatcc

SEQ ID NO: 5170590 - DNA, 25 bp, Homo sapien
tcgtgcacaagtaagtgaggcggct

SEQ ID NO: 5170591 - DNA, 25 bp, Homo sapien
gagatgaacctttggctcatagcac

SEQ ID NO: 5170592 - DNA, 25 bp, Homo sapien
cctgagtgtcttgattttgtgccca

SEQ ID NO: 5170593 - DNA, 25 bp, Homo sapien
gctacactgcagagttcgtgcacaa

SEQ ID NO: 5170594 - DNA, 25 bp, Homo sapien
tactcagggactgccgtcgctggtc

SEQ ID NO: 5170595 - DNA, 25 bp, Homo sapien
tcagggactgccgtcgctggtctcc

SEQ ID NO: 5170596 - DNA, 25 bp, Homo sapien
cccatctgcccacacgacaggtgca

SEQ ID NO: 5170597 - DNA, 25 bp, Homo sapien
cattactcagggactgccgtcgctg

SEQ ID NO: 5170598 - DNA, 25 bp, Homo sapien
tgaaataccataccgcattcaataa

SEQ ID NO: 5170599 - DNA, 25 bp, Homo sapien
gctcttgcttctcctagagtttggt

SEQ ID NO: 5170600 - DNA, 25 bp, Homo sapien
cctttcttattgtacctgaagtttg

SEQ ID NO: 5170601 - DNA, 25 bp, Homo sapien
cattcaataaatacctcccctttct

SEQ ID NO: 5170602 - DNA, 25 bp, Homo sapien
ggttctttgcgtggcccaggtgcac

SEQ ID NO: 5170603 - DNA, 25 bp, Homo sapien
gcgtggcccaggtgcacttctgctg

SEQ ID NO: 5170604 - DNA, 25 bp, Homo sapien
ttgggaatctggttctttgcgtggc

SEQ ID NO: 5170605 - DNA, 25 bp, Homo sapien
aatctggttctttgcgtggcccagg

SEQ ID NO: 5170606 - DNA, 25 bp, Homo sapien
tgtccccgcagactgtatgcttccg

SEQ ID NO: 5170607 - DNA, 25 bp, Homo sapien
ttaccatagcccgacggcaggggga

SEQ ID NO: 5170608 - DNA, 25 bp, Homo sapien
ctggctcccactaccccgttcagtc

SEQ ID NO: 5170609 - DNA, 25 bp, Homo sapien
tcccctttaccatagcccgacggca

SEQ ID NO: 5170610 - DNA, 25 bp, Homo sapien
gggtcagctccatgataagattaag

SEQ ID NO: 5170611 - DNA, 25 bp, Homo sapien
ggatatctgtgccagtctctgggtc

SEQ ID NO: 5170612 - DNA, 25 bp, Homo sapien
attagcagacattcgttccacccag

SEQ ID NO: 5170613 - DNA, 25 bp, Homo sapien
aagattaagagacctgtttgtttag

SEQ ID NO: 5170614 - DNA, 25 bp, Homo sapien
gtaacacttgagctccactttgcct

SEQ ID NO: 5170615 - DNA, 25 bp, Homo sapien
ggaaagtaacacttgagctccactt

SEQ ID NO: 5170616 - DNA, 25 bp, Homo sapien
aagtaacacttgagctccactttgc

SEQ ID NO: 5170617 - DNA, 25 bp, Homo sapien
tgggaaagtaacacttgagctccac

SEQ ID NO: 5170618 - DNA, 25 bp, Homo sapien
cagaagcctagtagttgacactcgg

SEQ ID NO: 5170619 - DNA, 25 bp, Homo sapien
caatttcttgtgcaggatggtgcca

SEQ ID NO: 5170620 - DNA, 25 bp, Homo sapien
tgacactcggctcaactcttctctt

SEQ ID NO: 5170621 - DNA, 25 bp, Homo sapien
gacaacagcaatttcctggacaatg

SEQ ID NO: 5170622 - DNA, 25 bp, Homo sapien
gcttgctagacattggagtacatta

SEQ ID NO: 5170623 - DNA, 25 bp, Homo sapien
caaaaagcagattcacttgtcagca

SEQ ID NO: 5170624 - DNA, 25 bp, Homo sapien
acattaattagctggaccactgtca

SEQ ID NO: 5170625 - DNA, 25 bp, Homo sapien
tatatatgatagagggtttctgaca

SEQ ID NO: 5170626 - DNA, 25 bp, Homo sapien
tcttcgagttgctctcgtatcgtga

SEQ ID NO: 5170627 - DNA, 25 bp, Homo sapien
cgtggtatacgttaagattcttcga

SEQ ID NO: 5170628 - DNA, 25 bp, Homo sapien
cctgctgtagactgagttgggtgcc

SEQ ID NO: 5170629 - DNA, 25 bp, Homo sapien
tgccgtaggtgtttaccgtggtata

SEQ ID NO: 5170630 - DNA, 25 bp, Homo sapien
gagttacaaacaaccttatcagtag

SEQ ID NO: 5170631 - DNA, 25 bp, Homo sapien
ttatcagtagaagcaatgaaaggat

SEQ ID NO: 5170632 - DNA, 25 bp, Homo sapien
taatcagggcttaacctacaaggct

SEQ ID NO: 5170633 - DNA, 25 bp, Homo sapien
ttgaaataacacaatgaagaggcaa

SEQ ID NO: 5170634 - DNA, 25 bp, Homo sapien
ttattctagacgttcaccaggtgta

SEQ ID NO: 5170635 - DNA, 25 bp, Homo sapien
attctagacgttcaccaggtgtaaa

SEQ ID NO: 5170636 - DNA, 25 bp, Homo sapien
tctagacgttcaccaggtgtaaaag

SEQ ID NO: 5170637 - DNA, 25 bp, Homo sapien
ctagacgttcaccaggtgtaaaagc

SEQ ID NO: 5170638 - DNA, 25 bp, Homo sapien
tacctggcttacttggtgtccgggc

SEQ ID NO: 5170639 - DNA, 25 bp, Homo sapien
tttggctggtttcacggcccaggga

SEQ ID NO: 5170640 - DNA, 25 bp, Homo sapien
tgtgttctaagctatctcagggcgg

SEQ ID NO: 5170641 - DNA, 25 bp, Homo sapien
caaagagctaaggatggcaaggttc

SEQ ID NO: 5170642 - DNA, 25 bp, Homo sapien
gatgggtcctgctttgcacctatac

SEQ ID NO: 5170643 - DNA, 25 bp, Homo sapien
atgaggattgccagccagatgggtc

SEQ ID NO: 5170644 - DNA, 25 bp, Homo sapien
tggtcagatgtaaagatctgaaatg

SEQ ID NO: 5170645 - DNA, 25 bp, Homo sapien
agcttggccttttcatggtcagatg

SEQ ID NO: 5170646 - DNA, 25 bp, Homo sapien
tcccaaatagtgcatagtccactga

SEQ ID NO: 5170647 - DNA, 25 bp, Homo sapien
caaatagtgcatagtccactgattg

SEQ ID NO: 5170648 - DNA, 25 bp, Homo sapien
aatcccaaatagtgcatagtccact

SEQ ID NO: 5170649 - DNA, 25 bp, Homo sapien
cccaaatagtgcatagtccactgat

SEQ ID NO: 5170650 - DNA, 25 bp, Homo sapien
tggtatctttgaggctccgatctgg

SEQ ID NO: 5170651 - DNA, 25 bp, Homo sapien
ggctgtgatgcaaactggtatcttt

SEQ ID NO: 5170652 - DNA, 25 bp, Homo sapien
gtggctgtgatgcaaactggtatct

SEQ ID NO: 5170653 - DNA, 25 bp, Homo sapien
tgcaaactggtatctttgaggctcc

SEQ ID NO: 5170654 - DNA, 25 bp, Homo sapien
ctgtagcattccagtttgtactgtt

SEQ ID NO: 5170655 - DNA, 25 bp, Homo sapien
tctgtagcattccagtttgtactgt

SEQ ID NO: 5170656 - DNA, 25 bp, Homo sapien
ccttcagaaatagggagagcttaac

SEQ ID NO: 5170657 - DNA, 25 bp, Homo sapien
cactgagggcatagtcactgaaatc

SEQ ID NO: 5170658 - DNA, 25 bp, Homo sapien
ggttctcaaatgacgcactgagggc

SEQ ID NO: 5170659 - DNA, 25 bp, Homo sapien
taacctaaaatgacccaaacagagc

SEQ ID NO: 5170660 - DNA, 25 bp, Homo sapien
gagcatctcactgagcccctctctc

SEQ ID NO: 5170661 - DNA, 25 bp, Homo sapien
cagatagtcgactgaattggagtcc

SEQ ID NO: 5170662 - DNA, 25 bp, Homo sapien
acttgctatctctgttcctgttaga

SEQ ID NO: 5170663 - DNA, 25 bp, Homo sapien
tggagtcctttgtcacgcaaacact

SEQ ID NO: 5170664 - DNA, 25 bp, Homo sapien
tgtaactttcaggtcaataagcatt

SEQ ID NO: 5170665 - DNA, 25 bp, Homo sapien
ccatttgcttaggagggatattatg

SEQ ID NO: 5170666 - DNA, 25 bp, Homo sapien
tttgaagacctgcaacactcccttt

SEQ ID NO: 5170667 - DNA, 25 bp, Homo sapien
tatcccataacttctaagtagggcc

SEQ ID NO: 5170668 - DNA, 25 bp, Homo sapien
gagtatttcggagcgcagaaaagac

SEQ ID NO: 5170669 - DNA, 25 bp, Homo sapien
ttcggagcgcagaaaagacagttaa

SEQ ID NO: 5170670 - DNA, 25 bp, Homo sapien
ctgagtatttcggagcgcagaaaag

SEQ ID NO: 5170671 - DNA, 25 bp, Homo sapien
tatttcggagcgcagaaaagacagt

SEQ ID NO: 5170672 - DNA, 25 bp, Homo sapien
gactgactgagtttgtgaacttgga

SEQ ID NO: 5170673 - DNA, 25 bp, Homo sapien
ccattgtaagaaaagcgcagggaca

SEQ ID NO: 5170674 - DNA, 25 bp, Homo sapien
taaggaggtgttccgttaccagata

SEQ ID NO: 5170675 - DNA, 25 bp, Homo sapien
ggctttgggttctatactcagtgga

SEQ ID NO: 5170676 - DNA, 25 bp, Homo sapien
ttcaaggaaatcttcagcactggcc

SEQ ID NO: 5170677 - DNA, 25 bp, Homo sapien
caaggaaatcttcagcactggccat

SEQ ID NO: 5170678 - DNA, 25 bp, Homo sapien
taagccttggatactttgttttcaa

SEQ ID NO: 5170679 - DNA, 25 bp, Homo sapien
acccaaataagccttggatactttg

SEQ ID NO: 5170680 - DNA, 25 bp, Homo sapien
aatgctggcagattcactacccacc

SEQ ID NO: 5170681 - DNA, 25 bp, Homo sapien
tctcttgtgagtagcgtgcaatgct

SEQ ID NO: 5170682 - DNA, 25 bp, Homo sapien
cagagcctgcttgactacagttttc

SEQ ID NO: 5170683 - DNA, 25 bp, Homo sapien
agcctgcttgactacagttttctcc

SEQ ID NO: 5170684 - DNA, 25 bp, Homo sapien
gttttccatggctttgctcctccat

SEQ ID NO: 5170685 - DNA, 25 bp, Homo sapien
acactgttgtcaattccctgaggat

SEQ ID NO: 5170686 - DNA, 25 bp, Homo sapien
tgagtttgagttgatcttctagatg

SEQ ID NO: 5170687 - DNA, 25 bp, Homo sapien
actgttgtcaattccctgaggatca

SEQ ID NO: 5170688 - DNA, 25 bp, Homo sapien
tcttctagatgattcagctgtgata

SEQ ID NO: 5170689 - DNA, 25 bp, Homo sapien
gcttgattcccccgcttttccacaa

SEQ ID NO: 5170690 - DNA, 25 bp, Homo sapien
gccatagtcctccatagcttgattc

SEQ ID NO: 5170691 - DNA, 25 bp, Homo sapien
catagcttgattcccccgcttttcc

SEQ ID NO: 5170692 - DNA, 25 bp, Homo sapien
ctgccatagtcctccatagcttgat

SEQ ID NO: 5170693 - DNA, 25 bp, Homo sapien
cagatttcaaaccagccagcttggg

SEQ ID NO: 5170694 - DNA, 25 bp, Homo sapien
ggagacacagatttcaaaccagcca

SEQ ID NO: 5170695 - DNA, 25 bp, Homo sapien
cacagatttcaaaccagccagcttg

SEQ ID NO: 5170696 - DNA, 25 bp, Homo sapien
gacacagatttcaaaccagccagct

SEQ ID NO: 5170697 - DNA, 25 bp, Homo sapien
ctgtgttcagtgacagtcccatggc

SEQ ID NO: 5170698 - DNA, 25 bp, Homo sapien
tgtgttcagtgacagtcccatggca

SEQ ID NO: 5170699 - DNA, 25 bp, Homo sapien
ttcagtgacagtcccatggcaaacc

SEQ ID NO: 5170700 - DNA, 25 bp, Homo sapien
tgttcagtgacagtcccatggcaaa

SEQ ID NO: 5170701 - DNA, 25 bp, Homo sapien
ccactactgttcaggggcacgaggt

SEQ ID NO: 5170702 - DNA, 25 bp, Homo sapien
cacgaggttctcaaggtggaggcag

SEQ ID NO: 5170703 - DNA, 25 bp, Homo sapien
tggcagccccactactgttcagggg

SEQ ID NO: 5170704 - DNA, 25 bp, Homo sapien
gtggctggcacaccattacttctgc

SEQ ID NO: 5170705 - DNA, 25 bp, Homo sapien
gacagcgtagttaaatattgacaga

SEQ ID NO: 5170706 - DNA, 25 bp, Homo sapien
cctctagctatcactgggtgggatt

SEQ ID NO: 5170707 - DNA, 25 bp, Homo sapien
ctatcactgggtgggatttagtgca

SEQ ID NO: 5170708 - DNA, 25 bp, Homo sapien
tttagtgcaggtgatgtaatgtgac

SEQ ID NO: 5170709 - DNA, 25 bp, Homo sapien
ccagattaattcctttgaccagaga

SEQ ID NO: 5170710 - DNA, 25 bp, Homo sapien
ggccaagcctgtttgtaccagatta

SEQ ID NO: 5170711 - DNA, 25 bp, Homo sapien
cactgggtttatctgctctctcggc

SEQ ID NO: 5170712 - DNA, 25 bp, Homo sapien
tctctcggctcttggaagaatcccc

SEQ ID NO: 5170713 - DNA, 25 bp, Homo sapien
gggccctggcatccaacaaggctcc

SEQ ID NO: 5170714 - DNA, 25 bp, Homo sapien
gggaattcccgcagactgactgctc

SEQ ID NO: 5170715 - DNA, 25 bp, Homo sapien
ttggtgactaactgtgcatagaggg

SEQ ID NO: 5170716 - DNA, 25 bp, Homo sapien
ttggaacagaggttggtgactaact

SEQ ID NO: 5170717 - DNA, 25 bp, Homo sapien
tggacccaatggagaatgatcatct

SEQ ID NO: 5170718 - DNA, 25 bp, Homo sapien
gcctagaagggaggaaagccataat

SEQ ID NO: 5170719 - DNA, 25 bp, Homo sapien
gccacttggctacaataaggcctag

SEQ ID NO: 5170720 - DNA, 25 bp, Homo sapien
tccactgggtagagcatgctgaaca

SEQ ID NO: 5170721 - DNA, 25 bp, Homo sapien
tgcaagtcttgagggagccccaaaa

SEQ ID NO: 5170722 - DNA, 25 bp, Homo sapien
aaagccactttagcagacagctcag

SEQ ID NO: 5170723 - DNA, 25 bp, Homo sapien
tcttggagggccattggagatctgc

SEQ ID NO: 5170724 - DNA, 25 bp, Homo sapien
gaagtagactaggtccaagcagtgg

SEQ ID NO: 5170725 - DNA, 25 bp, Homo sapien
gcagatctccgggtcccatggatgg

SEQ ID NO: 5170726 - DNA, 25 bp, Homo sapien
agatctccgggtcccatggatggag

SEQ ID NO: 5170727 - DNA, 25 bp, Homo sapien
aacagtgcagatctccgggtcccat

SEQ ID NO: 5170728 - DNA, 25 bp, Homo sapien
ctccaacagtgcagatctccgggtc

SEQ ID NO: 5170729 - DNA, 25 bp, Homo sapien
ccctgtgtcatgcttaggagagctt

SEQ ID NO: 5170730 - DNA, 25 bp, Homo sapien
tcctagaggcagactgtgttacatc

SEQ ID NO: 5170731 - DNA, 25 bp, Homo sapien
gagaacttgtttggcaccacctgag

SEQ ID NO: 5170732 - DNA, 25 bp, Homo sapien
ctggcatagaagaacgctgtgaaaa

SEQ ID NO: 5170733 - DNA, 25 bp, Homo sapien
aaaccctaaattgagcttgcattct

SEQ ID NO: 5170734 - DNA, 25 bp, Homo sapien
gctgaaaaccctaaattgagcttgc

SEQ ID NO: 5170735 - DNA, 25 bp, Homo sapien
tctagctgaaaaccctaaattgagc

SEQ ID NO: 5170736 - DNA, 25 bp, Homo sapien
cagtctagctgaaaaccctaaattg

SEQ ID NO: 5170737 - DNA, 25 bp, Homo sapien
tttcaggttctcctctccgtagatc

SEQ ID NO: 5170738 - DNA, 25 bp, Homo sapien
aggttctcctctccgtagatctgac

SEQ ID NO: 5170739 - DNA, 25 bp, Homo sapien
tatttcaggttctcctctccgtaga

SEQ ID NO: 5170740 - DNA, 25 bp, Homo sapien
tcaggttctcctctccgtagatctg

SEQ ID NO: 5170741 - DNA, 25 bp, Homo sapien
cttcattcttagttcatacattgaa

SEQ ID NO: 5170742 - DNA, 25 bp, Homo sapien
cattcttagttcatacattgaagat

SEQ ID NO: 5170743 - DNA, 25 bp, Homo sapien
cctggtctaagcccatgcaattctg

SEQ ID NO: 5170744 - DNA, 25 bp, Homo sapien
tggtctaagcccatgcaattctgtt

SEQ ID NO: 5170745 - DNA, 25 bp, Homo sapien
aagcattgccacgtgctgcaacatg

SEQ ID NO: 5170746 - DNA, 25 bp, Homo sapien
ggaatgaagcattgccacgtgctgc

SEQ ID NO: 5170747 - DNA, 25 bp, Homo sapien
tggaagaagttagtcacaaagatta

SEQ ID NO: 5170748 - DNA, 25 bp, Homo sapien
tgattcctgaaaacatgatgcgaag

SEQ ID NO: 5170749 - DNA, 25 bp, Homo sapien
ccacttataagtggctatagttaaa

SEQ ID NO: 5170750 - DNA, 25 bp, Homo sapien
agcaacaactgttgaaaagatgtgg

SEQ ID NO: 5170751 - DNA, 25 bp, Homo sapien
gaagtagaggaccaaacgcgtcagc

SEQ ID NO: 5170752 - DNA, 25 bp, Homo sapien
cgctagctaggtgcaccttgtgaat

SEQ ID NO: 5170753 - DNA, 25 bp, Homo sapien
tgaatttggtcacccaacttggctg

SEQ ID NO: 5170754 - DNA, 25 bp, Homo sapien
tgcgcaaactattggcagagggaag

SEQ ID NO: 5170755 - DNA, 25 bp, Homo sapien
gtaaaaagagtgttcgttcatctgc

SEQ ID NO: 5170756 - DNA, 25 bp, Homo sapien
tagcaacagtgttcagaaaactaaa

SEQ ID NO: 5170757 - DNA, 25 bp, Homo sapien
gatggttgaactgataagaaaggga

SEQ ID NO: 5170758 - DNA, 25 bp, Homo sapien
ggacaatttgagcatatagcaacag

SEQ ID NO: 5170759 - DNA, 25 bp, Homo sapien
gcgatttactgcctgtgcttaagga

SEQ ID NO: 5170760 - DNA, 25 bp, Homo sapien
cccaagtttgggctgacgacattaa

SEQ ID NO: 5170761 - DNA, 25 bp, Homo sapien
gcatagagcgcccagtgcgatttac

SEQ ID NO: 5170762 - DNA, 25 bp, Homo sapien
cacttctggacagctaggtttggca

SEQ ID NO: 5170763 - DNA, 25 bp, Homo sapien
gatggaaactaagatccaggtcccc

SEQ ID NO: 5170764 - DNA, 25 bp, Homo sapien
ttttaagatggaaactaagatccag

SEQ ID NO: 5170765 - DNA, 25 bp, Homo sapien
gatccaggtccccattgtacgattc

SEQ ID NO: 5170766 - DNA, 25 bp, Homo sapien
gaaactaagatccaggtccccattg

SEQ ID NO: 5170767 - DNA, 25 bp, Homo sapien
ctatgtaaattcaatctccactttc

SEQ ID NO: 5170768 - DNA, 25 bp, Homo sapien
taaattcaatctccactttcatctg

SEQ ID NO: 5170769 - DNA, 25 bp, Homo sapien
attcaatctccactttcatctgcac

SEQ ID NO: 5170770 - DNA, 25 bp, Homo sapien
atgtaaattcaatctccactttcat

SEQ ID NO: 5170771 - DNA, 25 bp, Homo sapien
ctgtcataaatcaaggcaaaggtca

SEQ ID NO: 5170772 - DNA, 25 bp, Homo sapien
cataaatcaaggcaaaggtcactcc

SEQ ID NO: 5170773 - DNA, 25 bp, Homo sapien
taaatcaaggcaaaggtcactcctc

SEQ ID NO: 5170774 - DNA, 25 bp, Homo sapien
aatcaaggcaaaggtcactcctcaa

SEQ ID NO: 5170775 - DNA, 25 bp, Homo sapien
gcttaatagtagtctccatctctcc

SEQ ID NO: 5170776 - DNA, 25 bp, Homo sapien
cagatcttttagagggatctgctta

SEQ ID NO: 5170777 - DNA, 25 bp, Homo sapien
tagagggatctgcttaatagtagtc

SEQ ID NO: 5170778 - DNA, 25 bp, Homo sapien
gggatctgcttaatagtagtctcca

SEQ ID NO: 5170779 - DNA, 25 bp, Homo sapien
caaatgccctaggactttattataa

SEQ ID NO: 5170780 - DNA, 25 bp, Homo sapien
cattacaggccaaacgaaagggaga

SEQ ID NO: 5170781 - DNA, 25 bp, Homo sapien
aaggacataggatcaagtgttccca

SEQ ID NO: 5170782 - DNA, 25 bp, Homo sapien
gccatgagccagctaaaggacatag

SEQ ID NO: 5170783 - DNA, 25 bp, Homo sapien
cactctatcctcctgggtacaactt

SEQ ID NO: 5170784 - DNA, 25 bp, Homo sapien
cttgtgatgtactcttgtagctcca

SEQ ID NO: 5170785 - DNA, 25 bp, Homo sapien
tcctgggtacaacttcttctcagcc

SEQ ID NO: 5170786 - DNA, 25 bp, Homo sapien
ctttacttgtgatgtactcttgtag

SEQ ID NO: 5170787 - DNA, 25 bp, Homo sapien
tcagacttcttcttatggccacagc

SEQ ID NO: 5170788 - DNA, 25 bp, Homo sapien
tgaggtgattcccaactctgatact

SEQ ID NO: 5170789 - DNA, 25 bp, Homo sapien
tctcagacttcttcttatggccaca

SEQ ID NO: 5170790 - DNA, 25 bp, Homo sapien
acttcttcttatggccacagcttgc

SEQ ID NO: 5170791 - DNA, 25 bp, Homo sapien
cttttaggcctactgtgactttcat

SEQ ID NO: 5170792 - DNA, 25 bp, Homo sapien
ttggaataaacctgtttacacagct

SEQ ID NO: 5170793 - DNA, 25 bp, Homo sapien
taggcctactgtgactttcatctcc

SEQ ID NO: 5170794 - DNA, 25 bp, Homo sapien
gttggaataaacctgtttacacagc

SEQ ID NO: 5170795 - DNA, 25 bp, Homo sapien
cactattaagtgatgctgattgcct

SEQ ID NO: 5170796 - DNA, 25 bp, Homo sapien
ttttctgtgaacaccccatgtattt

SEQ ID NO: 5170797 - DNA, 25 bp, Homo sapien
ttttcaccactattaagtgatgctg

SEQ ID NO: 5170798 - DNA, 25 bp, Homo sapien
gtgaacaccccatgtatttttcacc

SEQ ID NO: 5170799 - DNA, 25 bp, Homo sapien
ggggcatgtctgtgataactgaagg

SEQ ID NO: 5170800 - DNA, 25 bp, Homo sapien
aggggcatgtctgtgataactgaag

SEQ ID NO: 5170801 - DNA, 25 bp, Homo sapien
gggcatgtctgtgataactgaaggt

SEQ ID NO: 5170802 - DNA, 25 bp, Homo sapien
caggggcatgtctgtgataactgaa

SEQ ID NO: 5170803 - DNA, 25 bp, Homo sapien
aacgaaaagtgaactttcagctcca

SEQ ID NO: 5170804 - DNA, 25 bp, Homo sapien
ggaggagaacccattggtagcactg

SEQ ID NO: 5170805 - DNA, 25 bp, Homo sapien
tgagcgatgacctgttacctctttt

SEQ ID NO: 5170806 - DNA, 25 bp, Homo sapien
gaacccattggtagcactgtccttg

SEQ ID NO: 5170807 - DNA, 25 bp, Homo sapien
gcactgtccttgagcgatgacctgt

SEQ ID NO: 5170808 - DNA, 25 bp, Homo sapien
ttcccagtgatgtaagaatccaggc

SEQ ID NO: 5170809 - DNA, 25 bp, Homo sapien
tggagacttcaatgagcagcttgct

SEQ ID NO: 5170810 - DNA, 25 bp, Homo sapien
gtatcctaataactggttcccagtg

SEQ ID NO: 5170811 - DNA, 25 bp, Homo sapien
gcagcttgctcttcatgatatcaaa

SEQ ID NO: 5170812 - DNA, 25 bp, Homo sapien
tggttctcctctatcggagatggtt

SEQ ID NO: 5170813 - DNA, 25 bp, Homo sapien
gttctcctctatcggagatggttgt

SEQ ID NO: 5170814 - DNA, 25 bp, Homo sapien
ggagatggttgtcctctctgaccaa

SEQ ID NO: 5170815 - DNA, 25 bp, Homo sapien
gttgtcctctctgaccaagcacaca

SEQ ID NO: 5170816 - DNA, 25 bp, Homo sapien
tagactgcacagtaggcaaacctgg

SEQ ID NO: 5170817 - DNA, 25 bp, Homo sapien
gttcccaggcggacacatgtgcagg

SEQ ID NO: 5170818 - DNA, 25 bp, Homo sapien
tctgagcacatcctcgaatggagtc

SEQ ID NO: 5170819 - DNA, 25 bp, Homo sapien
gaaattccgcgacacagatgagctg

SEQ ID NO: 5170820 - DNA, 25 bp, Homo sapien
gataaacatcggtgatcctcccctt

SEQ ID NO: 5170821 - DNA, 25 bp, Homo sapien
taactttttggctatccgataaaca

SEQ ID NO: 5170822 - DNA, 25 bp, Homo sapien
tttggctatccgataaacatcggtg

SEQ ID NO: 5170823 - DNA, 25 bp, Homo sapien
tatccgataaacatcggtgatcctc

SEQ ID NO: 5170824 - DNA, 25 bp, Homo sapien
taatgtagagtcactccacaaagcc

SEQ ID NO: 5170825 - DNA, 25 bp, Homo sapien
aatgtagagtcactccacaaagccc

SEQ ID NO: 5170826 - DNA, 25 bp, Homo sapien
tccaacattgggaagagcgccattc

SEQ ID NO: 5170827 - DNA, 25 bp, Homo sapien
gggaagagcgccattcccattttgg

SEQ ID NO: 5170828 - DNA, 25 bp, Homo sapien
tgggaagagcgccattcccattttg

SEQ ID NO: 5170829 - DNA, 25 bp, Homo sapien
acattgggaagagcgccattcccat

SEQ ID NO: 5170830 - DNA, 25 bp, Homo sapien
catcagaagggacatatcatcagga

SEQ ID NO: 5170831 - DNA, 25 bp, Homo sapien
gatgaagtagtctattagtgtcccc

SEQ ID NO: 5170832 - DNA, 25 bp, Homo sapien
tgcccctgtattccctgtaacttgg

SEQ ID NO: 5170833 - DNA, 25 bp, Homo sapien
agaagcttcatcagactcagattca

SEQ ID NO: 5170834 - DNA, 25 bp, Homo sapien
ttgcaattgtgtcataatatcttta

SEQ ID NO: 5170835 - DNA, 25 bp, Homo sapien
tttgcaattgtgtcataatatcttt

SEQ ID NO: 5170836 - DNA, 25 bp, Homo sapien
atctttatactttgaatgagaattc

SEQ ID NO: 5170837 - DNA, 25 bp, Homo sapien
agtgttctttgctggctgtctttcc

SEQ ID NO: 5170838 - DNA, 25 bp, Homo sapien
cagtgttctttgctggctgtctttc

SEQ ID NO: 5170839 - DNA, 25 bp, Homo sapien
actgtttttgcatgaccagtcattg

SEQ ID NO: 5170840 - DNA, 25 bp, Homo sapien
ttttgcatgaccagtcattgtcagt

SEQ ID NO: 5170841 - DNA, 25 bp, Homo sapien
tctccctggtatcagaaggaagggc

SEQ ID NO: 5170842 - DNA, 25 bp, Homo sapien
tccctggtatcagaaggaagggcaa

SEQ ID NO: 5170843 - DNA, 25 bp, Homo sapien
cagatttctccctggtatcagaagg

SEQ ID NO: 5170844 - DNA, 25 bp, Homo sapien
gatttctccctggtatcagaaggaa

SEQ ID NO: 5170845 - DNA, 25 bp, Homo sapien
gagcctttgcatccgtaggtcccga

SEQ ID NO: 5170846 - DNA, 25 bp, Homo sapien
gagaatcctgctgtcggcactgtga

SEQ ID NO: 5170847 - DNA, 25 bp, Homo sapien
cagggattatctctggacaaaggca

SEQ ID NO: 5170848 - DNA, 25 bp, Homo sapien
caaaggcagtaagaccaggacatca

SEQ ID NO: 5170849 - DNA, 25 bp, Homo sapien
cacaagacaaaagtagggaaagcat

SEQ ID NO: 5170850 - DNA, 25 bp, Homo sapien
ccttagtatgctcctcccagtgctt

SEQ ID NO: 5170851 - DNA, 25 bp, Homo sapien
ctaagggaggacattgcacaagaca

SEQ ID NO: 5170852 - DNA, 25 bp, Homo sapien
atttgtcacccacacccttagtatg

SEQ ID NO: 5170853 - DNA, 25 bp, Homo sapien
gagagatcccccttcctaaatcatc

SEQ ID NO: 5170854 - DNA, 25 bp, Homo sapien
ggctggagagatcccccttcctaaa

SEQ ID NO: 5170855 - DNA, 25 bp, Homo sapien
tctggtgttggctggagagatcccc

SEQ ID NO: 5170856 - DNA, 25 bp, Homo sapien
ttggctggagagatcccccttccta

SEQ ID NO: 5170857 - DNA, 25 bp, Homo sapien
gactgttttctcgatgatttggcca

SEQ ID NO: 5170858 - DNA, 25 bp, Homo sapien
tttgtcacataagcctgtgtgctct

SEQ ID NO: 5170859 - DNA, 25 bp, Homo sapien
tctcttctggtttgccggaagctgg

SEQ ID NO: 5170860 - DNA, 25 bp, Homo sapien
gaccctccgcttagctgaccgagat

SEQ ID NO: 5170861 - DNA, 25 bp, Homo sapien
tccaagtcctggctccatttgtgtg

SEQ ID NO: 5170862 - DNA, 25 bp, Homo sapien
tcctggctccatttgtgtgtaccga

SEQ ID NO: 5170863 - DNA, 25 bp, Homo sapien
ccatttgtgtgtaccgataatctgg

SEQ ID NO: 5170864 - DNA, 25 bp, Homo sapien
ttgtgtgtaccgataatctggcagg

SEQ ID NO: 5170865 - DNA, 25 bp, Homo sapien
gctgaagccatccatcacattgctt

SEQ ID NO: 5170866 - DNA, 25 bp, Homo sapien
tcacggcgcttcattgtccccagct

SEQ ID NO: 5170867 - DNA, 25 bp, Homo sapien
gtccccagctgaagccatccatcac

SEQ ID NO: 5170868 - DNA, 25 bp, Homo sapien
tcatccttcacggcgcttcattgtc

SEQ ID NO: 5170869 - DNA, 25 bp, Homo sapien
ggcagtggccctttgcacaagtgat

SEQ ID NO: 5170870 - DNA, 25 bp, Homo sapien
cacaagtgattgtgttgggcattaa

SEQ ID NO: 5170871 - DNA, 25 bp, Homo sapien
ttgggcattaagttgcagagggcca

SEQ ID NO: 5170872 - DNA, 25 bp, Homo sapien
taggatttcaccttcaaccctgtca

SEQ ID NO: 5170873 - DNA, 25 bp, Homo sapien
gatgtgctggagtctgttcctgtct

SEQ ID NO: 5170874 - DNA, 25 bp, Homo sapien
tgtctctagcctgtgaaatcttgga

SEQ ID NO: 5170875 - DNA, 25 bp, Homo sapien
tattacattgatgtgctggagtctg

SEQ ID NO: 5170876 - DNA, 25 bp, Homo sapien
catagctctgatcacactgtattac

SEQ ID NO: 5170877 - DNA, 25 bp, Homo sapien
tcttggggaccataccgctcaacac

SEQ ID NO: 5170878 - DNA, 25 bp, Homo sapien
ttggggaccataccgctcaacacat

SEQ ID NO: 5170879 - DNA, 25 bp, Homo sapien
tgatcttggggaccataccgctcaa

SEQ ID NO: 5170880 - DNA, 25 bp, Homo sapien
gggaccataccgctcaacacattca

SEQ ID NO: 5170881 - DNA, 25 bp, Homo sapien
tccagaccacttctaagtttgggtg

SEQ ID NO: 5170882 - DNA, 25 bp, Homo sapien
gcagtgttgaattccatggacttcc

SEQ ID NO: 5170883 - DNA, 25 bp, Homo sapien
gttctatctcgaggacaggccagct

SEQ ID NO: 5170884 - DNA, 25 bp, Homo sapien
cacacgtgtgaagttttaggtagga

SEQ ID NO: 5170885 - DNA, 25 bp, Homo sapien
ctctgacacgtttctgagacataga

SEQ ID NO: 5170886 - DNA, 25 bp, Homo sapien
tcccttgcctctgacacgtttctga

SEQ ID NO: 5170887 - DNA, 25 bp, Homo sapien
gatatttgcttaatgctgaggctct

SEQ ID NO: 5170888 - DNA, 25 bp, Homo sapien
tgtttcaagggcatccagtgtaggg

SEQ ID NO: 5170889 - DNA, 25 bp, Homo sapien
gggttgtccagtagcagtggccttg

SEQ ID NO: 5170890 - DNA, 25 bp, Homo sapien
gccttgagttcagactgaggttcaa

SEQ ID NO: 5170891 - DNA, 25 bp, Homo sapien
tcaaattcacaagccccaatcagct

SEQ ID NO: 5170892 - DNA, 25 bp, Homo sapien
gaggttcaaattcacaagccccaat

SEQ ID NO: 5170893 - DNA, 25 bp, Homo sapien
gaaccacggagaataaggcacatgt

SEQ ID NO: 5170894 - DNA, 25 bp, Homo sapien
cgctttattgcttcaggaaccacgg

SEQ ID NO: 5170895 - DNA, 25 bp, Homo sapien
gactgtgcgctatgctcttgcagct

SEQ ID NO: 5170896 - DNA, 25 bp, Homo sapien
taccagattccaaggtttgcagcca

SEQ ID NO: 5170897 - DNA, 25 bp, Homo sapien
aaattccaaggtgctttagagcaga

SEQ ID NO: 5170898 - DNA, 25 bp, Homo sapien
gatttgcctgcatcgcaaatcagtg

SEQ ID NO: 5170899 - DNA, 25 bp, Homo sapien
ccttggaggacagcaaaaagccttc

SEQ ID NO: 5170900 - DNA, 25 bp, Homo sapien
aaggatgttaatctggagcaccagt

SEQ ID NO: 5170901 - DNA, 25 bp, Homo sapien
gggatgagaaattatagaccgtcca

SEQ ID NO: 5170902 - DNA, 25 bp, Homo sapien
gatatgtaggactttctctggctga

SEQ ID NO: 5170903 - DNA, 25 bp, Homo sapien
cgtccagcctaacctcagaggtagg

SEQ ID NO: 5170904 - DNA, 25 bp, Homo sapien
agtcagggacccatatagagtggca

SEQ ID NO: 5170905 - DNA, 25 bp, Homo sapien
gaatgtcggaattggtgattctaga

SEQ ID NO: 5170906 - DNA, 25 bp, Homo sapien
ttttgggaatgtcggaattggtgat

SEQ ID NO: 5170907 - DNA, 25 bp, Homo sapien
gtcggaattggtgattctagaaaag

SEQ ID NO: 5170908 - DNA, 25 bp, Homo sapien
tggtgattctagaaaagccgctgga

SEQ ID NO: 5170909 - DNA, 25 bp, Homo sapien
cttgcccttggcacatcaagactga

SEQ ID NO: 5170910 - DNA, 25 bp, Homo sapien
gactgacttcggcttccccactttg

SEQ ID NO: 5170911 - DNA, 25 bp, Homo sapien
tctccatgaacacggggcttggccc

SEQ ID NO: 5170912 - DNA, 25 bp, Homo sapien
tatgggaacagcagcatgaggtctc

SEQ ID NO: 5170913 - DNA, 25 bp, Homo sapien
caggtacaaactggggagataagaa

SEQ ID NO: 5170914 - DNA, 25 bp, Homo sapien
gatacaatgaacaattgaagtttta

SEQ ID NO: 5170915 - DNA, 25 bp, Homo sapien
agtctggggcaggtacaaactgggg

SEQ ID NO: 5170916 - DNA, 25 bp, Homo sapien
gagataagaagtttctgatacaatg

SEQ ID NO: 5170917 - DNA, 25 bp, Homo sapien
agtttgcattggaaacaccctgcag

SEQ ID NO: 5170918 - DNA, 25 bp, Homo sapien
cccttaagtgaaagtcaagtttgca

SEQ ID NO: 5170919 - DNA, 25 bp, Homo sapien
tacagacatgttccctgcaggtctg

SEQ ID NO: 5170920 - DNA, 25 bp, Homo sapien
ctggtgtggaccaattaggtgagaa

SEQ ID NO: 5170921 - DNA, 25 bp, Homo sapien
cagctgtggcccctcttgggctgcc

SEQ ID NO: 5170922 - DNA, 25 bp, Homo sapien
ctcagaaacagcttgctgcctgctg

SEQ ID NO: 5170923 - DNA, 25 bp, Homo sapien
ctgcccagccatgcctttgctgctg

SEQ ID NO: 5170924 - DNA, 25 bp, Homo sapien
ctcctgctaccaccacccatctggc

SEQ ID NO: 5170925 - DNA, 25 bp, Homo sapien
ctttgtgggtgattcctgagaatcc

SEQ ID NO: 5170926 - DNA, 25 bp, Homo sapien
tgggtgattcctgagaatccttccc

SEQ ID NO: 5170927 - DNA, 25 bp, Homo sapien
tgtgggtgattcctgagaatccttc

SEQ ID NO: 5170928 - DNA, 25 bp, Homo sapien
gggtgattcctgagaatccttccca

SEQ ID NO: 5170929 - DNA, 25 bp, Homo sapien
tgccttaagggcagctactttcctt

SEQ ID NO: 5170930 - DNA, 25 bp, Homo sapien
ccggtatgctctctcctcaattttc

SEQ ID NO: 5170931 - DNA, 25 bp, Homo sapien
caaaactgatgaataccggtatgct

SEQ ID NO: 5170932 - DNA, 25 bp, Homo sapien
ccttttattgccacaccaaagacca

SEQ ID NO: 5170933 - DNA, 25 bp, Homo sapien
tgcaaggtgaccagctaagtaattt

SEQ ID NO: 5170934 - DNA, 25 bp, Homo sapien
tgaggaagtcaatccaatgcaacga

SEQ ID NO: 5170935 - DNA, 25 bp, Homo sapien
gatattccaacccatggcaatgcag

SEQ ID NO: 5170936 - DNA, 25 bp, Homo sapien
caatgcagcggttccaacaattgga

SEQ ID NO: 5170937 - DNA, 25 bp, Homo sapien
ctgtatgttgcaggcaggtccaccc

SEQ ID NO: 5170938 - DNA, 25 bp, Homo sapien
gatatccaaatcagagggttcctgt

SEQ ID NO: 5170939 - DNA, 25 bp, Homo sapien
gccacgagaccgagatgtgcacaga

SEQ ID NO: 5170940 - DNA, 25 bp, Homo sapien
tcagcaagttggtcagcacagccac

SEQ ID NO: 5170941 - DNA, 25 bp, Homo sapien
tcaatagagggcgtcagtcccccat

SEQ ID NO: 5170942 - DNA, 25 bp, Homo sapien
gtcccccatggtgagtggggccctc

SEQ ID NO: 5170943 - DNA, 25 bp, Homo sapien
agcagcccatgaaggcccattggcc

SEQ ID NO: 5170944 - DNA, 25 bp, Homo sapien
tgtgcactcatcttgtgctgcagca

SEQ ID NO: 5170945 - DNA, 25 bp, Homo sapien
cactggggagttccctagtggccca

SEQ ID NO: 5170946 - DNA, 25 bp, Homo sapien
tgaatgctccttcccttaggtgttt

SEQ ID NO: 5170947 - DNA, 25 bp, Homo sapien
aagtgaatgctccttcccttaggtg

SEQ ID NO: 5170948 - DNA, 25 bp, Homo sapien
gtcactggggagttccctagtggcc

SEQ ID NO: 5170949 - DNA, 25 bp, Homo sapien
ctctgctctactccagtaaggggct

SEQ ID NO: 5170950 - DNA, 25 bp, Homo sapien
ctgctctactccagtaaggggctct

SEQ ID NO: 5170951 - DNA, 25 bp, Homo sapien
tctgctctactccagtaaggggctc

SEQ ID NO: 5170952 - DNA, 25 bp, Homo sapien
tcctgaaggcgtggcacatctgtgg

SEQ ID NO: 5170953 - DNA, 25 bp, Homo sapien
tgaatgactagtcccagtaggtcct

SEQ ID NO: 5170954 - DNA, 25 bp, Homo sapien
tggcccagtctggtcccggagaagt

SEQ ID NO: 5170955 - DNA, 25 bp, Homo sapien
ggcaggcccacaccaaggttgaatg

SEQ ID NO: 5170956 - DNA, 25 bp, Homo sapien
ctctcctaaacagcctgttactctg

SEQ ID NO: 5170957 - DNA, 25 bp, Homo sapien
ctcctaaacagcctgttactctgtg

SEQ ID NO: 5170958 - DNA, 25 bp, Homo sapien
ctctctcctaaacagcctgttactc

SEQ ID NO: 5170959 - DNA, 25 bp, Homo sapien
tcctaaacagcctgttactctgtgt

SEQ ID NO: 5170960 - DNA, 25 bp, Homo sapien
cacccagtggccaattaggttgatt

SEQ ID NO: 5170961 - DNA, 25 bp, Homo sapien
cgccctgccgtgctggcttctgtgt

SEQ ID NO: 5170962 - DNA, 25 bp, Homo sapien
atttcgggtcctggaattgtgactc

SEQ ID NO: 5170963 - DNA, 25 bp, Homo sapien
aaacacactttttggtgccacccag

SEQ ID NO: 5170964 - DNA, 25 bp, Homo sapien
cttggcttgattccttctgggtggt

SEQ ID NO: 5170965 - DNA, 25 bp, Homo sapien
ttggcttgattccttctgggtggtt

SEQ ID NO: 5170966 - DNA, 25 bp, Homo sapien
atcagacacccgagggaacatgttc

SEQ ID NO: 5170967 - DNA, 25 bp, Homo sapien
gcatcagacacccgagggaacatgt

SEQ ID NO: 5170968 - DNA, 25 bp, Homo sapien
tcagcatcagacacccgagggaaca

SEQ ID NO: 5170969 - DNA, 25 bp, Homo sapien
catgttctctaatccgtttctttga

SEQ ID NO: 5170970 - DNA, 25 bp, Homo sapien
ctggtgtccagccacgagtaagcaa

SEQ ID NO: 5170971 - DNA, 25 bp, Homo sapien
caagaagatctggtgttggatgcca

SEQ ID NO: 5170972 - DNA, 25 bp, Homo sapien
ttgtaacattagcagaatcctgcct

SEQ ID NO: 5170973 - DNA, 25 bp, Homo sapien
gttggatgccagttgtaacattagc

SEQ ID NO: 5170974 - DNA, 25 bp, Homo sapien
gcctctgggctcctttgaccagctc

SEQ ID NO: 5170975 - DNA, 25 bp, Homo sapien
agcctctgggctcctttgaccagct

SEQ ID NO: 5170976 - DNA, 25 bp, Homo sapien
tttttccctcgtgaattcgagcctc

SEQ ID NO: 5170977 - DNA, 25 bp, Homo sapien
gcctcggagacaaggtccttcctgt

SEQ ID NO: 5170978 - DNA, 25 bp, Homo sapien
ttggcccgccttggcaggcctcgga

SEQ ID NO: 5170979 - DNA, 25 bp, Homo sapien
cctccacttggtttgttcggctgtt

SEQ ID NO: 5170980 - DNA, 25 bp, Homo sapien
tctttgatgaggagatgtctactta

SEQ ID NO: 5170981 - DNA, 25 bp, Homo sapien
tgccttctcaaactgggtggccaga

SEQ ID NO: 5170982 - DNA, 25 bp, Homo sapien
cagaaggccctctttgatgaggaga

SEQ ID NO: 5170983 - DNA, 25 bp, Homo sapien
tacttaataatgcatcagcactagg

SEQ ID NO: 5170984 - DNA, 25 bp, Homo sapien
ggctctcatcgttcacccccagtgc

SEQ ID NO: 5170985 - DNA, 25 bp, Homo sapien
tctttttcagtactccagagggctc

SEQ ID NO: 5170986 - DNA, 25 bp, Homo sapien
tgggctctcatcgttcacccccagt

SEQ ID NO: 5170987 - DNA, 25 bp, Homo sapien
ctctgggctctcatcgttcaccccc

SEQ ID NO: 5170988 - DNA, 25 bp, Homo sapien
ggtgggtagcggagattcccaattc

SEQ ID NO: 5170989 - DNA, 25 bp, Homo sapien
gaggtgggtagcggagattcccaat

SEQ ID NO: 5170990 - DNA, 25 bp, Homo sapien
aggtgggtagcggagattcccaatt

SEQ ID NO: 5170991 - DNA, 25 bp, Homo sapien
gcaagattcttcactcgagtcagct

SEQ ID NO: 5170992 - DNA, 25 bp, Homo sapien
gtctgctcacatgttgctcccaaag

SEQ ID NO: 5170993 - DNA, 25 bp, Homo sapien
taacctgtaatcctagggtctggcc

SEQ ID NO: 5170994 - DNA, 25 bp, Homo sapien
ctagggtctggcctagggctcagat

SEQ ID NO: 5170995 - DNA, 25 bp, Homo sapien
tcagaaccaagaatggtaagctgga

SEQ ID NO: 5170996 - DNA, 25 bp, Homo sapien
ctgtcttcgaaagcctggactctaa

SEQ ID NO: 5170997 - DNA, 25 bp, Homo sapien
gtaaagctttggatttataggcagc

SEQ ID NO: 5170998 - DNA, 25 bp, Homo sapien
ggtaagctggactgtcttcgaaagc

SEQ ID NO: 5170999 - DNA, 25 bp, Homo sapien
aaagatcactgcagggtgggtcagg

SEQ ID NO: 5171000 - DNA, 25 bp, Homo sapien
gaaagatcactgcagggtgggtcag

SEQ ID NO: 5171001 - DNA, 25 bp, Homo sapien
atcttcgtatgtgttctttgacccc

SEQ ID NO: 5171002 - DNA, 25 bp, Homo sapien
tcttcgtatgtgttctttgacccca

SEQ ID NO: 5171003 - DNA, 25 bp, Homo sapien
cttcgtatgtgttctttgaccccat

SEQ ID NO: 5171004 - DNA, 25 bp, Homo sapien
ggagattctagagccatcagtggcc

SEQ ID NO: 5171005 - DNA, 25 bp, Homo sapien
ctggagattctagagccatcagtgg

SEQ ID NO: 5171006 - DNA, 25 bp, Homo sapien
ccactggagattctagagccatcag

SEQ ID NO: 5171007 - DNA, 25 bp, Homo sapien
agattctagagccatcagtggccat

SEQ ID NO: 5171008 - DNA, 25 bp, Homo sapien
cctgtgaaccccgtaaagagtgcat

SEQ ID NO: 5171009 - DNA, 25 bp, Homo sapien
tgtgggcttcacctgcttgttattc

SEQ ID NO: 5171010 - DNA, 25 bp, Homo sapien
cgtaaagagtgcatcgaggccccgt

SEQ ID NO: 5171011 - DNA, 25 bp, Homo sapien
gtttgcccaggacccggatgtcctg

SEQ ID NO: 5171012 - DNA, 25 bp, Homo sapien
agtgaacctgtgacctgaactgggc

SEQ ID NO: 5171013 - DNA, 25 bp, Homo sapien
catactggaaatttggcgtcggagc

SEQ ID NO: 5171014 - DNA, 25 bp, Homo sapien
acagctgattgactggagtgaacct

SEQ ID NO: 5171015 - DNA, 25 bp, Homo sapien
ggtgcaatgcaaccctcctcgatgg

SEQ ID NO: 5171016 - DNA, 25 bp, Homo sapien
gaccttaggctcaacagggcgcctg

SEQ ID NO: 5171017 - DNA, 25 bp, Homo sapien
ccagttccacagtcggatgaggcaa

SEQ ID NO: 5171018 - DNA, 25 bp, Homo sapien
gaggctttcccacttgatgtcagag

SEQ ID NO: 5171019 - DNA, 25 bp, Homo sapien
caggtcgccctttgtgaatgcaacg

SEQ ID NO: 5171020 - DNA, 25 bp, Homo sapien
agagttttcaccacgaagaaacagt

SEQ ID NO: 5171021 - DNA, 25 bp, Homo sapien
ttttcaccacgaagaaacagtggga

SEQ ID NO: 5171022 - DNA, 25 bp, Homo sapien
ttgacgtacagtaaagacccaagag

SEQ ID NO: 5171023 - DNA, 25 bp, Homo sapien
tgatctggatgctttgacgtacagt

SEQ ID NO: 5171024 - DNA, 25 bp, Homo sapien
gagcagcttgtgctccctgaacctg

SEQ ID NO: 5171025 - DNA, 25 bp, Homo sapien
cctgaacctgaagcctgatcaatga

SEQ ID NO: 5171026 - DNA, 25 bp, Homo sapien
ggtttttatcaagaccccctgagca

SEQ ID NO: 5171027 - DNA, 25 bp, Homo sapien
catgggctgggcctaagaagatcag

SEQ ID NO: 5171028 - DNA, 25 bp, Homo sapien
gatgtgatgaatcgaatctctgctg

SEQ ID NO: 5171029 - DNA, 25 bp, Homo sapien
tgtgatgaatcgaatctctgctgat

SEQ ID NO: 5171030 - DNA, 25 bp, Homo sapien
gggatgtgatgaatcgaatctctgc

SEQ ID NO: 5171031 - DNA, 25 bp, Homo sapien
atggggatgtgatgaatcgaatctc

SEQ ID NO: 5171032 - DNA, 25 bp, Homo sapien
tgtgccacccaacgatgacttggac

SEQ ID NO: 5171033 - DNA, 25 bp, Homo sapien
catagcaatgacgtcaagggtgggc

SEQ ID NO: 5171034 - DNA, 25 bp, Homo sapien
tggttggagggcattgaaaacacct

SEQ ID NO: 5171035 - DNA, 25 bp, Homo sapien
aaagcagcaatcgatggtggcacca

SEQ ID NO: 5171036 - DNA, 25 bp, Homo sapien
aaaaagattcctctattgagttgaa

SEQ ID NO: 5171037 - DNA, 25 bp, Homo sapien
aagtcattctagattagagtggagt

SEQ ID NO: 5171038 - DNA, 25 bp, Homo sapien
tagagtggagtctaaatccaaagac

SEQ ID NO: 5171039 - DNA, 25 bp, Homo sapien
attgagttgaatagtatctctccaa

SEQ ID NO: 5171040 - DNA, 25 bp, Homo sapien
ccaggctgcgcaatttcttatgttc

SEQ ID NO: 5171041 - DNA, 25 bp, Homo sapien
tagaggtaggcgcttctggaaattc

SEQ ID NO: 5171042 - DNA, 25 bp, Homo sapien
gtttacagcacaaacgaccggaatg

SEQ ID NO: 5171043 - DNA, 25 bp, Homo sapien
ccattggtgttgattctgtctctga

SEQ ID NO: 5171044 - DNA, 25 bp, Homo sapien
cagctttcaggcctatctcgggtaa

SEQ ID NO: 5171045 - DNA, 25 bp, Homo sapien
tttcaggcctatctcgggtaaaatc

SEQ ID NO: 5171046 - DNA, 25 bp, Homo sapien
gctttcaggcctatctcgggtaaaa

SEQ ID NO: 5171047 - DNA, 25 bp, Homo sapien
tgtcaccagttcccagctttcaggc

SEQ ID NO: 5171048 - DNA, 25 bp, Homo sapien
ggtcccgtgagctcttgggacacag

SEQ ID NO: 5171049 - DNA, 25 bp, Homo sapien
aaagccgctgatgtattgactggtc

SEQ ID NO: 5171050 - DNA, 25 bp, Homo sapien
tccaatctcttaagcaaagccgctg

SEQ ID NO: 5171051 - DNA, 25 bp, Homo sapien
ctcagtggtcccgtgagctcttggg

SEQ ID NO: 5171052 - DNA, 25 bp, Homo sapien
ctacagcaaaaggttcagggactgg

SEQ ID NO: 5171053 - DNA, 25 bp, Homo sapien
tctacagcaaaaggttcagggactg

SEQ ID NO: 5171054 - DNA, 25 bp, Homo sapien
cattgtaaaacatctacagcaaaag

SEQ ID NO: 5171055 - DNA, 25 bp, Homo sapien
gccgtcaagccccagagtgaagctc

SEQ ID NO: 5171056 - DNA, 25 bp, Homo sapien
gcagcagcatttgtgtaatgaaggc

SEQ ID NO: 5171057 - DNA, 25 bp, Homo sapien
cagcatttgtgtaatgaaggcaaaa

SEQ ID NO: 5171058 - DNA, 25 bp, Homo sapien
gagtgaagctcctttcagagcagca

SEQ ID NO: 5171059 - DNA, 25 bp, Homo sapien
aaagggagtccacgccacctttgca

SEQ ID NO: 5171060 - DNA, 25 bp, Homo sapien
acacaaagggagtccacgccacctt

SEQ ID NO: 5171061 - DNA, 25 bp, Homo sapien
cccacccacacaaagggagtccacg

SEQ ID NO: 5171062 - DNA, 25 bp, Homo sapien
gagtccacgccacctttgcattgga

SEQ ID NO: 5171063 - DNA, 25 bp, Homo sapien
tatcaatttggtgtagtctgcagga

SEQ ID NO: 5171064 - DNA, 25 bp, Homo sapien
tttacccgaacacctgaacagctgg

SEQ ID NO: 5171065 - DNA, 25 bp, Homo sapien
gggcacacagtgaagcctcctgcca

SEQ ID NO: 5171066 - DNA, 25 bp, Homo sapien
tagtgaatgacggagtttacccgaa

SEQ ID NO: 5171067 - DNA, 25 bp, Homo sapien
tgaccagcgtcacaccggtgtggct

SEQ ID NO: 5171068 - DNA, 25 bp, Homo sapien
cgtcacaccggtgtggctttccagc

SEQ ID NO: 5171069 - DNA, 25 bp, Homo sapien
agcaccttcccttggtagcacttca

SEQ ID NO: 5171070 - DNA, 25 bp, Homo sapien
ctgcagtgaccagcgtcacaccggt

SEQ ID NO: 5171071 - DNA, 25 bp, Homo sapien
tttgtggtggtgagttggtaacaac

SEQ ID NO: 5171072 - DNA, 25 bp, Homo sapien
tgcatcagtgaagtgaccgaaaggt

SEQ ID NO: 5171073 - DNA, 25 bp, Homo sapien
tggtggtgagttggtaacaacttct

SEQ ID NO: 5171074 - DNA, 25 bp, Homo sapien
acttctggcacccaatgcatcagtg

SEQ ID NO: 5171075 - DNA, 25 bp, Homo sapien
tgctgacagctaccaggagctggaa

SEQ ID NO: 5171076 - DNA, 25 bp, Homo sapien
acacagagaagagaagctgatgtga

SEQ ID NO: 5171077 - DNA, 25 bp, Homo sapien
gagatagaagaggagaagacaagac

SEQ ID NO: 5171078 - DNA, 25 bp, Homo sapien
gagagatgcagacagaagccaagga

SEQ ID NO: 5171079 - DNA, 25 bp, Homo sapien
acctgtgagtgaaggacgtaaagga

SEQ ID NO: 5171080 - DNA, 25 bp, Homo sapien
ccagaatggaaagacctgtgagtga

SEQ ID NO: 5171081 - DNA, 25 bp, Homo sapien
tgctccatggttggtctctgtactg

SEQ ID NO: 5171082 - DNA, 25 bp, Homo sapien
gtctctgtactgtcagtatcacgga

SEQ ID NO: 5171083 - DNA, 25 bp, Homo sapien
tatcacggatgcaatggcggttgga

SEQ ID NO: 5171084 - DNA, 25 bp, Homo sapien
cacgtgctccatggttggtctctgt

SEQ ID NO: 5171085 - DNA, 25 bp, Homo sapien
cattgatggtgtggtaaaaattgga

SEQ ID NO: 5171086 - DNA, 25 bp, Homo sapien
tgagactcttgtccattgatggtgt

SEQ ID NO: 5171087 - DNA, 25 bp, Homo sapien
gaggacctgatggtgagtctgcctc

SEQ ID NO: 5171088 - DNA, 25 bp, Homo sapien
gttctcgggtttgctcccctgacca

SEQ ID NO: 5171089 - DNA, 25 bp, Homo sapien
gatgtaagctgtgatgcctggcaga

SEQ ID NO: 5171090 - DNA, 25 bp, Homo sapien
gcagatagtgatccaggtgacagca

SEQ ID NO: 5171091 - DNA, 25 bp, Homo sapien
cagcattgctagtggtagtgcccag

SEQ ID NO: 5171092 - DNA, 25 bp, Homo sapien
caccttgccagattttaggagttct

SEQ ID NO: 5171093 - DNA, 25 bp, Homo sapien
ctgtgggagctcagtcgaccagggc

SEQ ID NO: 5171094 - DNA, 25 bp, Homo sapien
ccgcggcagggacggtctgcaaact

SEQ ID NO: 5171095 - DNA, 25 bp, Homo sapien
tctgcaaactaccagccctggcggg

SEQ ID NO: 5171096 - DNA, 25 bp, Homo sapien
gagtccgtcctcaatttctggcaac

SEQ ID NO: 5171097 - DNA, 25 bp, Homo sapien
tccgcggtccgagcgcccatctgcc

SEQ ID NO: 5171098 - DNA, 25 bp, Homo sapien
ctcctccgcggtccgagcgcccatc

SEQ ID NO: 5171099 - DNA, 25 bp, Homo sapien
cgcggtccgagcgcccatctgccat

SEQ ID NO: 5171100 - DNA, 25 bp, Homo sapien
cctccgcggtccgagcgcccatctg

SEQ ID NO: 5171101 - DNA, 25 bp, Homo sapien
tgctggctagtacagggcatactca

SEQ ID NO: 5171102 - DNA, 25 bp, Homo sapien
tgcaataatgccaatcggagaaggt

SEQ ID NO: 5171103 - DNA, 25 bp, Homo sapien
ggcaggcacccgttatcaactgtta

SEQ ID NO: 5171104 - DNA, 25 bp, Homo sapien
gccctctcggcttaggttggaaaga

SEQ ID NO: 5171105 - DNA, 25 bp, Homo sapien
tgaaatgtaaaatccagcccagact

SEQ ID NO: 5171106 - DNA, 25 bp, Homo sapien
catgtcaaacttaaaaggtgacatg

SEQ ID NO: 5171107 - DNA, 25 bp, Homo sapien
cagactggattcttatcatgtcaaa

SEQ ID NO: 5171108 - DNA, 25 bp, Homo sapien
tatacgtcacttagattctcccagc

SEQ ID NO: 5171109 - DNA, 25 bp, Homo sapien
ggtgctcactgctatgtccaatggg

SEQ ID NO: 5171110 - DNA, 25 bp, Homo sapien
tgggaagattccacaaagtatggcg

SEQ ID NO: 5171111 - DNA, 25 bp, Homo sapien
tttggcagaagcattccgaatcagg

SEQ ID NO: 5171112 - DNA, 25 bp, Homo sapien
gaatggtcctgatacctcttccagg

SEQ ID NO: 5171113 - DNA, 25 bp, Homo sapien
gacagccagctaagtgcagaagcct

SEQ ID NO: 5171114 - DNA, 25 bp, Homo sapien
gagcttccagcctgtacccatgaga

SEQ ID NO: 5171115 - DNA, 25 bp, Homo sapien
tcagaatcactaaccacagaatcgg

SEQ ID NO: 5171116 - DNA, 25 bp, Homo sapien
acagaatcggcccacatgaagacag

SEQ ID NO: 5171117 - DNA, 25 bp, Homo sapien
acactcacattcagagtcccaattt

SEQ ID NO: 5171118 - DNA, 25 bp, Homo sapien
tcagagtcccaatttgttgacctgc

SEQ ID NO: 5171119 - DNA, 25 bp, Homo sapien
tcacattcagagtcccaatttgttg

SEQ ID NO: 5171120 - DNA, 25 bp, Homo sapien
cattcagagtcccaatttgttgacc

SEQ ID NO: 5171121 - DNA, 25 bp, Homo sapien
tgggccagaccactctaaaagacat

SEQ ID NO: 5171122 - DNA, 25 bp, Homo sapien
caaatgctcagataacctacctaaa

SEQ ID NO: 5171123 - DNA, 25 bp, Homo sapien
catttcccctagtgcaatgttctaa

SEQ ID NO: 5171124 - DNA, 25 bp, Homo sapien
caatatgcaattagctgggccagac

SEQ ID NO: 5171125 - DNA, 25 bp, Homo sapien
tactgtgatatggtctataaaatgg

SEQ ID NO: 5171126 - DNA, 25 bp, Homo sapien
taatgggatctatccgtgtccagca

SEQ ID NO: 5171127 - DNA, 25 bp, Homo sapien
tcaagttgaagacaggacctatatt

SEQ ID NO: 5171128 - DNA, 25 bp, Homo sapien
gctgcacaattaattctgtcatcca

SEQ ID NO: 5171129 - DNA, 25 bp, Homo sapien
tgaccattcataaagacagccagag

SEQ ID NO: 5171130 - DNA, 25 bp, Homo sapien
tgacaagtggtaatctagcagggct

SEQ ID NO: 5171131 - DNA, 25 bp, Homo sapien
gattcatgcttttacaggtgttcca

SEQ ID NO: 5171132 - DNA, 25 bp, Homo sapien
gccagtggttctcctatttccaggg

SEQ ID NO: 5171133 - DNA, 25 bp, Homo sapien
cctctaggctctgggaatgctgact

SEQ ID NO: 5171134 - DNA, 25 bp, Homo sapien
ggcttttcctgacctcgccccatcc

SEQ ID NO: 5171135 - DNA, 25 bp, Homo sapien
ttttcctgacctcgccccatcccca

SEQ ID NO: 5171136 - DNA, 25 bp, Homo sapien
gctctcaggagcaagtccaaatgca

SEQ ID NO: 5171137 - DNA, 25 bp, Homo sapien
ggtttcagctcacagtgaatcctac

SEQ ID NO: 5171138 - DNA, 25 bp, Homo sapien
ttcattcattccaacgcttcccagg

SEQ ID NO: 5171139 - DNA, 25 bp, Homo sapien
gccgagcgcggtttcagctcacagt

SEQ ID NO: 5171140 - DNA, 25 bp, Homo sapien
ccaggatgcgccgagcgcggtttca

SEQ ID NO: 5171141 - DNA, 25 bp, Homo sapien
ctaacacagtaactaggatttttct

SEQ ID NO: 5171142 - DNA, 25 bp, Homo sapien
cacagtaactaggatttttcttgtc

SEQ ID NO: 5171143 - DNA, 25 bp, Homo sapien
cttccacaggtcttctaacacagta

SEQ ID NO: 5171144 - DNA, 25 bp, Homo sapien
aacacagtaactaggatttttcttg

SEQ ID NO: 5171145 - DNA, 25 bp, Homo sapien
tcaggcggttcaatagtaccagaaa

SEQ ID NO: 5171146 - DNA, 25 bp, Homo sapien
aacattgttaccaggttactgcaca

SEQ ID NO: 5171147 - DNA, 25 bp, Homo sapien
ttacgtggtaacagaaaactgtgcc

SEQ ID NO: 5171148 - DNA, 25 bp, Homo sapien
cctccctgaacttgttacaatgtct

SEQ ID NO: 5171149 - DNA, 25 bp, Homo sapien
tggaaatgtacaagagtgagcgtga

SEQ ID NO: 5171150 - DNA, 25 bp, Homo sapien
tgcccagaggcacacagctataaag

SEQ ID NO: 5171151 - DNA, 25 bp, Homo sapien
tttttcccacaacctcaccagatag

SEQ ID NO: 5171152 - DNA, 25 bp, Homo sapien
tggcatttagtaagtcctagcaagt

SEQ ID NO: 5171153 - DNA, 25 bp, Homo sapien
cgcacctggcctactcaaacgtttt

SEQ ID NO: 5171154 - DNA, 25 bp, Homo sapien
ccaagtaactagcactataggctca

SEQ ID NO: 5171155 - DNA, 25 bp, Homo sapien
ggtaggaggtatacaatggcattat

SEQ ID NO: 5171156 - DNA, 25 bp, Homo sapien
gccaaacaccacacttaactaagaa

SEQ ID NO: 5171157 - DNA, 25 bp, Homo sapien
tgcctgcatagaccgtgaacatgtt

SEQ ID NO: 5171158 - DNA, 25 bp, Homo sapien
gtacatttcctgataactacactgt

SEQ ID NO: 5171159 - DNA, 25 bp, Homo sapien
gttatctgcctcaagacatccatca

SEQ ID NO: 5171160 - DNA, 25 bp, Homo sapien
tttcatatagagctacactgcctgc

SEQ ID NO: 5171161 - DNA, 25 bp, Homo sapien
ggcatgccccaaccttgaatctttc

SEQ ID NO: 5171162 - DNA, 25 bp, Homo sapien
aggcatgccccaaccttgaatcttt

SEQ ID NO: 5171163 - DNA, 25 bp, Homo sapien
gcatgccccaaccttgaatctttcc

SEQ ID NO: 5171164 - DNA, 25 bp, Homo sapien
cccatagggcgtgaggtcccatggt

SEQ ID NO: 5171165 - DNA, 25 bp, Homo sapien
ggtcccatagggtgtgagtgaatga

SEQ ID NO: 5171166 - DNA, 25 bp, Homo sapien
gtcccatggtggtaagcaggtccca

SEQ ID NO: 5171167 - DNA, 25 bp, Homo sapien
tcccatagggcgtgagtgataagcg

SEQ ID NO: 5171168 - DNA, 25 bp, Homo sapien
ggtctcctgattaagcctcagcact

SEQ ID NO: 5171169 - DNA, 25 bp, Homo sapien
cagggattaaaacagttagtcagga

SEQ ID NO: 5171170 - DNA, 25 bp, Homo sapien
gcttaaggggatcaatattcccatg

SEQ ID NO: 5171171 - DNA, 25 bp, Homo sapien
accaagggtctcctgattaagcctc

SEQ ID NO: 5171172 - DNA, 25 bp, Homo sapien
ccatcgagttcaatgaagggtttta

SEQ ID NO: 5171173 - DNA, 25 bp, Homo sapien
ttcagggagaccatcgagttcaatg

SEQ ID NO: 5171174 - DNA, 25 bp, Homo sapien
tttaaacaagacagcatctcccacc

SEQ ID NO: 5171175 - DNA, 25 bp, Homo sapien
ttttaaacaagacagcatctcccac

SEQ ID NO: 5171176 - DNA, 25 bp, Homo sapien
cagaaaactcctccgagacagcaag

SEQ ID NO: 5171177 - DNA, 25 bp, Homo sapien
gcaagcctgtaaaggcaaagcatta

SEQ ID NO: 5171178 - DNA, 25 bp, Homo sapien
ggattaataacaacatgggctggaa

SEQ ID NO: 5171179 - DNA, 25 bp, Homo sapien
caacatgggctggaaacaaacagac

SEQ ID NO: 5171180 - DNA, 25 bp, Homo sapien
tggacgggcggaaccactgagtttc

SEQ ID NO: 5171181 - DNA, 25 bp, Homo sapien
tcaaaaccactgacagctccgtgca

SEQ ID NO: 5171182 - DNA, 25 bp, Homo sapien
tcttgtctcccgtgacaggtctaat

SEQ ID NO: 5171183 - DNA, 25 bp, Homo sapien
tacacagcctgagaatcaaaaccac

SEQ ID NO: 5171184 - DNA, 25 bp, Homo sapien
ctatggcttggtaaaacggtatgga

SEQ ID NO: 5171185 - DNA, 25 bp, Homo sapien
aaacggtatggatcttggagaggcc

SEQ ID NO: 5171186 - DNA, 25 bp, Homo sapien
tcttggagaggccatttccttggat

SEQ ID NO: 5171187 - DNA, 25 bp, Homo sapien
ttccttggatgagatttagagtctc

SEQ ID NO: 5171188 - DNA, 25 bp, Homo sapien
tcgtggctctcgtcaggtaaaaggg

SEQ ID NO: 5171189 - DNA, 25 bp, Homo sapien
ggcacagggagccaactcaagagtg

SEQ ID NO: 5171190 - DNA, 25 bp, Homo sapien
gagctctctcgtggctctcgtcagg

SEQ ID NO: 5171191 - DNA, 25 bp, Homo sapien
ctactggtaaacctgagagctctct

SEQ ID NO: 5171192 - DNA, 25 bp, Homo sapien
gaaacccatgaggaatgtcgtgaag

SEQ ID NO: 5171193 - DNA, 25 bp, Homo sapien
tgaaacccatgaggaatgtcgtgaa

SEQ ID NO: 5171194 - DNA, 25 bp, Homo sapien
ctgaaacccatgaggaatgtcgtga

SEQ ID NO: 5171195 - DNA, 25 bp, Homo sapien
aaacccatgaggaatgtcgtgaagg

SEQ ID NO: 5171196 - DNA, 25 bp, Homo sapien
caccgtctccctccataacacaaga

SEQ ID NO: 5171197 - DNA, 25 bp, Homo sapien
aaacctggatgtgtccgagtccaac

SEQ ID NO: 5171198 - DNA, 25 bp, Homo sapien
gagttgctcagggcccatgcaaagc

SEQ ID NO: 5171199 - DNA, 25 bp, Homo sapien
gtccaacgtcccagttgcactctgg

SEQ ID NO: 5171200 - DNA, 25 bp, Homo sapien
tggaggctctgcttaatccctacac

SEQ ID NO: 5171201 - DNA, 25 bp, Homo sapien
gagaaaccctgacaagaagcgagct

SEQ ID NO: 5171202 - DNA, 25 bp, Homo sapien
gagtccccgtatgctctttggccag

SEQ ID NO: 5171203 - DNA, 25 bp, Homo sapien
taaacccaatatgatggaggatgct

SEQ ID NO: 5171204 - DNA, 25 bp, Homo sapien
catgtgaaagtacaaataccctgta

SEQ ID NO: 5171205 - DNA, 25 bp, Homo sapien
tagatcatgtgaaagtacaaatacc

SEQ ID NO: 5171206 - DNA, 25 bp, Homo sapien
cttatgaagatagtaaaattagatc

SEQ ID NO: 5171207 - DNA, 25 bp, Homo sapien
gcccagcctcatactacttatgaag

SEQ ID NO: 5171208 - DNA, 25 bp, Homo sapien
ttgacttgtctggtgtaaacccatc

SEQ ID NO: 5171209 - DNA, 25 bp, Homo sapien
gacttgtctggtgtaaacccatccc

SEQ ID NO: 5171210 - DNA, 25 bp, Homo sapien
tgacttgtctggtgtaaacccatcc

SEQ ID NO: 5171211 - DNA, 25 bp, Homo sapien
tcctgaggctcctactcccctcttc

SEQ ID NO: 5171212 - DNA, 25 bp, Homo sapien
tcctagcggcccaggcttctgcctc

SEQ ID NO: 5171213 - DNA, 25 bp, Homo sapien
ctcttcctagcggcccaggcttctg

SEQ ID NO: 5171214 - DNA, 25 bp, Homo sapien
aatcctgaggctcctactcccctct

SEQ ID NO: 5171215 - DNA, 25 bp, Homo sapien
ctgacaacccgccagtcttcagcaa

SEQ ID NO: 5171216 - DNA, 25 bp, Homo sapien
ttcagctgacaacccgccagtcttc

SEQ ID NO: 5171217 - DNA, 25 bp, Homo sapien
taaggagagcaggtgtattttgttt

SEQ ID NO: 5171218 - DNA, 25 bp, Homo sapien
agcaaaaggtcctaacaccatgagt

SEQ ID NO: 5171219 - DNA, 25 bp, Homo sapien
ctttggactccttgcttgcctcact

SEQ ID NO: 5171220 - DNA, 25 bp, Homo sapien
cttctggtcatattctttaagggaa

SEQ ID NO: 5171221 - DNA, 25 bp, Homo sapien
catctccttctggtcatattcttta

SEQ ID NO: 5171222 - DNA, 25 bp, Homo sapien
tggtcatattctttaagggaagtcc

SEQ ID NO: 5171223 - DNA, 25 bp, Homo sapien
cttcctgggtgtagtaactctccta

SEQ ID NO: 5171224 - DNA, 25 bp, Homo sapien
agggcacgtcttacacttcttggtg

SEQ ID NO: 5171225 - DNA, 25 bp, Homo sapien
gtaactctcctaagcagactgtcaa

SEQ ID NO: 5171226 - DNA, 25 bp, Homo sapien
tcagcaacaccgacactccacaaat

SEQ ID NO: 5171227 - DNA, 25 bp, Homo sapien
caccagctttctaacctggtgggcc

SEQ ID NO: 5171228 - DNA, 25 bp, Homo sapien
tcctactcagtagcttacaccagct

SEQ ID NO: 5171229 - DNA, 25 bp, Homo sapien
tgctaactctgacaagcgtccctgt

SEQ ID NO: 5171230 - DNA, 25 bp, Homo sapien
gaaccacagccagtcgaattgctaa

SEQ ID NO: 5171231 - DNA, 25 bp, Homo sapien
cagccactaaaactgaattccgcac

SEQ ID NO: 5171232 - DNA, 25 bp, Homo sapien
ccactaaaactgaattccgcaccca

SEQ ID NO: 5171233 - DNA, 25 bp, Homo sapien
gaattccgcacccaggacaagccag

SEQ ID NO: 5171234 - DNA, 25 bp, Homo sapien
agccactaaaactgaattccgcacc

SEQ ID NO: 5171235 - DNA, 25 bp, Homo sapien
tgcattcaggaataaccaccctgtg

SEQ ID NO: 5171236 - DNA, 25 bp, Homo sapien
taatcaaggccctctccacatgaga

SEQ ID NO: 5171237 - DNA, 25 bp, Homo sapien
taagtagactgacctcataggacag

SEQ ID NO: 5171238 - DNA, 25 bp, Homo sapien
ctaagagaaaatcatagtaagccct

SEQ ID NO: 5171239 - DNA, 25 bp, Homo sapien
caatggcacaggacaaaggtgggca

SEQ ID NO: 5171240 - DNA, 25 bp, Homo sapien
tcttattccctatggacgacgtctc

SEQ ID NO: 5171241 - DNA, 25 bp, Homo sapien
taaaggtaagccatgacaagccaat

SEQ ID NO: 5171242 - DNA, 25 bp, Homo sapien
tctctcccagtagaagaatctcaga

SEQ ID NO: 5171243 - DNA, 25 bp, Homo sapien
gtccactttagaataggaatcactt

SEQ ID NO: 5171244 - DNA, 25 bp, Homo sapien
cctccaatgtccactttagaatagg

SEQ ID NO: 5171245 - DNA, 25 bp, Homo sapien
caatgtccactttagaataggaatc

SEQ ID NO: 5171246 - DNA, 25 bp, Homo sapien
tccaatgtccactttagaataggaa

SEQ ID NO: 5171247 - DNA, 25 bp, Homo sapien
gatactggcgtgagaatcgcagcac

SEQ ID NO: 5171248 - DNA, 25 bp, Homo sapien
tgtcaaacccacatggtgcagagct

SEQ ID NO: 5171249 - DNA, 25 bp, Homo sapien
gcagaaagacacagccgaggagtcc

SEQ ID NO: 5171250 - DNA, 25 bp, Homo sapien
gattgttcagttgtccagtccctaa

SEQ ID NO: 5171251 - DNA, 25 bp, Homo sapien
caaaggcagctaggtatatgacatg

SEQ ID NO: 5171252 - DNA, 25 bp, Homo sapien
ctccaaaggcagctaggtatatgac

SEQ ID NO: 5171253 - DNA, 25 bp, Homo sapien
aggcctctccaaaggcagctaggta

SEQ ID NO: 5171254 - DNA, 25 bp, Homo sapien
tgagagcgccaagaggcctctccaa

SEQ ID NO: 5171255 - DNA, 25 bp, Homo sapien
gacagctgctctttcggtagttatt

SEQ ID NO: 5171256 - DNA, 25 bp, Homo sapien
tccaacaacaggttgacaacagccc

SEQ ID NO: 5171257 - DNA, 25 bp, Homo sapien
ttgacaacagcccaagccgacggct

SEQ ID NO: 5171258 - DNA, 25 bp, Homo sapien
ggaactcctccaacaacaggttgac

SEQ ID NO: 5171259 - DNA, 25 bp, Homo sapien
tggctgcacagtaatcacgtaaaaa

SEQ ID NO: 5171260 - DNA, 25 bp, Homo sapien
gcaaagtaatcagctcaacgtcaag

SEQ ID NO: 5171261 - DNA, 25 bp, Homo sapien
tcgatgaccacagggctgcaggatg

SEQ ID NO: 5171262 - DNA, 25 bp, Homo sapien
gatatgcaacatacagggcccttgt

SEQ ID NO: 5171263 - DNA, 25 bp, Homo sapien
gatcctggctaaaacatgctctgaa

SEQ ID NO: 5171264 - DNA, 25 bp, Homo sapien
taaaacgaaacactttagactgcgc

SEQ ID NO: 5171265 - DNA, 25 bp, Homo sapien
cacttctgaatgctaaaccctgggc

SEQ ID NO: 5171266 - DNA, 25 bp, Homo sapien
taagggcctactgtctgcttcatag

SEQ ID NO: 5171267 - DNA, 25 bp, Homo sapien
ttccatgacatcttgtttctgctcc

SEQ ID NO: 5171268 - DNA, 25 bp, Homo sapien
ccatgacatcttgtttctgctccat

SEQ ID NO: 5171269 - DNA, 25 bp, Homo sapien
cttccatgacatcttgtttctgctc

SEQ ID NO: 5171270 - DNA, 25 bp, Homo sapien
tccatgacatcttgtttctgctcca

SEQ ID NO: 5171271 - DNA, 25 bp, Homo sapien
agtatgtatccccagcttagcaggc

SEQ ID NO: 5171272 - DNA, 25 bp, Homo sapien
gagagccgctgctttctgacagacg

SEQ ID NO: 5171273 - DNA, 25 bp, Homo sapien
taaggctacatccacgtttcaggag

SEQ ID NO: 5171274 - DNA, 25 bp, Homo sapien
tcaaacatgaaagtctggctggctc

SEQ ID NO: 5171275 - DNA, 25 bp, Homo sapien
tcttcttgctttctcgctcagccat

SEQ ID NO: 5171276 - DNA, 25 bp, Homo sapien
tgccacatgtgctctcttcttgctt

SEQ ID NO: 5171277 - DNA, 25 bp, Homo sapien
tgcacctgccacatgtgctctcttc

SEQ ID NO: 5171278 - DNA, 25 bp, Homo sapien
ctctgcacctgccacatgtgctctc

SEQ ID NO: 5171279 - DNA, 25 bp, Homo sapien
attggacacattcaaggtagtgtgg

SEQ ID NO: 5171280 - DNA, 25 bp, Homo sapien
agcttccaatatcagaacagattgg

SEQ ID NO: 5171281 - DNA, 25 bp, Homo sapien
caatatcagaacagattggacacat

SEQ ID NO: 5171282 - DNA, 25 bp, Homo sapien
ggacacattcaaggtagtgtggctg

SEQ ID NO: 5171283 - DNA, 25 bp, Homo sapien
ctgctggacacactctctgttcctg

SEQ ID NO: 5171284 - DNA, 25 bp, Homo sapien
ctgctcccacgggttatatgggcag

SEQ ID NO: 5171285 - DNA, 25 bp, Homo sapien
tcccacgggttatatgggcagagcc

SEQ ID NO: 5171286 - DNA, 25 bp, Homo sapien
cacgggttatatgggcagagcccac

SEQ ID NO: 5171287 - DNA, 25 bp, Homo sapien
gaagaaaccatagtggggaattatg

SEQ ID NO: 5171288 - DNA, 25 bp, Homo sapien
agaaaccatagtggggaattatgtc

SEQ ID NO: 5171289 - DNA, 25 bp, Homo sapien
gaaaccatagtggggaattatgtct

SEQ ID NO: 5171290 - DNA, 25 bp, Homo sapien
aaccatagtggggaattatgtctgc

SEQ ID NO: 5171291 - DNA, 25 bp, Homo sapien
gagaatctcattcctaggctagctg

SEQ ID NO: 5171292 - DNA, 25 bp, Homo sapien
caaaaaacgctaggattgtcacctg

SEQ ID NO: 5171293 - DNA, 25 bp, Homo sapien
catgtcaatttgtcaggtaggtctc

SEQ ID NO: 5171294 - DNA, 25 bp, Homo sapien
ggtccataaatcaatgagcacaggg

SEQ ID NO: 5171295 - DNA, 25 bp, Homo sapien
actggaagatgctcagacaggttct

SEQ ID NO: 5171296 - DNA, 25 bp, Homo sapien
ccactggaagatgctcagacaggtt

SEQ ID NO: 5171297 - DNA, 25 bp, Homo sapien
cactggaagatgctcagacaggttc

SEQ ID NO: 5171298 - DNA, 25 bp, Homo sapien
gacagtcctgtacccagagttttaa

SEQ ID NO: 5171299 - DNA, 25 bp, Homo sapien
cccctcttacatttgaagtgatcaa

SEQ ID NO: 5171300 - DNA, 25 bp, Homo sapien
ttacactacacttgcatttttcctg

SEQ ID NO: 5171301 - DNA, 25 bp, Homo sapien
aagtgatcaaagcaagacagtcctg

SEQ ID NO: 5171302 - DNA, 25 bp, Homo sapien
ttgaatatctgggttttaaacagcc

SEQ ID NO: 5171303 - DNA, 25 bp, Homo sapien
gaatatctgggttttaaacagccca

SEQ ID NO: 5171304 - DNA, 25 bp, Homo sapien
ctttgctatcttgggaatactcttt

SEQ ID NO: 5171305 - DNA, 25 bp, Homo sapien
tctttgaatatctgggttttaaaca

SEQ ID NO: 5171306 - DNA, 25 bp, Homo sapien
taactagctgaaatacacctgctaa

SEQ ID NO: 5171307 - DNA, 25 bp, Homo sapien
ttaactagctgaaatacacctgcta

SEQ ID NO: 5171308 - DNA, 25 bp, Homo sapien
atgaaaacagtctgttccctttgga

SEQ ID NO: 5171309 - DNA, 25 bp, Homo sapien
aactagctgaaatacacctgctaaa

SEQ ID NO: 5171310 - DNA, 25 bp, Homo sapien
gcctgactcccatattttaagtgac

SEQ ID NO: 5171311 - DNA, 25 bp, Homo sapien
cacatatcttgaagttccaaggctg

SEQ ID NO: 5171312 - DNA, 25 bp, Homo sapien
ggctgcttgcctgactcccatattt

SEQ ID NO: 5171313 - DNA, 25 bp, Homo sapien
taccctaattaaatgccagatgaga

SEQ ID NO: 5171314 - DNA, 25 bp, Homo sapien
aagacaagaaatgccggcaatggcc

SEQ ID NO: 5171315 - DNA, 25 bp, Homo sapien
gacaagaaatgccggcaatggccat

SEQ ID NO: 5171316 - DNA, 25 bp, Homo sapien
aaagacaagaaatgccggcaatggc

SEQ ID NO: 5171317 - DNA, 25 bp, Homo sapien
caagaaatgccggcaatggccatgc

SEQ ID NO: 5171318 - DNA, 25 bp, Homo sapien
gctccctagactgaggaaagctccc

SEQ ID NO: 5171319 - DNA, 25 bp, Homo sapien
gaaagctccccttccatagagtact

SEQ ID NO: 5171320 - DNA, 25 bp, Homo sapien
tagagtactcgtaactcatagcagt

SEQ ID NO: 5171321 - DNA, 25 bp, Homo sapien
aatcccgtttcatctcgcctatggg

SEQ ID NO: 5171322 - DNA, 25 bp, Homo sapien
ggcagaaatgcccatcccttcagaa

SEQ ID NO: 5171323 - DNA, 25 bp, Homo sapien
ttccaatggagtgagaacgagacca

SEQ ID NO: 5171324 - DNA, 25 bp, Homo sapien
tcaacccacctgagaacactgagca

SEQ ID NO: 5171325 - DNA, 25 bp, Homo sapien
aacgagaccaatgaagcagttcctc

SEQ ID NO: 5171326 - DNA, 25 bp, Homo sapien
tgaagtgaaaatccctagctatgcg

SEQ ID NO: 5171327 - DNA, 25 bp, Homo sapien
gaattttcctagagcaagccaatga

SEQ ID NO: 5171328 - DNA, 25 bp, Homo sapien
tatcagaggcgcaaagagatggcca

SEQ ID NO: 5171329 - DNA, 25 bp, Homo sapien
taaagagcccgaatcactggtagga

SEQ ID NO: 5171330 - DNA, 25 bp, Homo sapien
ccagctatgtggcagaggactgatc

SEQ ID NO: 5171331 - DNA, 25 bp, Homo sapien
gactgatcatctaggcatggcccag

SEQ ID NO: 5171332 - DNA, 25 bp, Homo sapien
ggattcttctttgcaagcggcccaa

SEQ ID NO: 5171333 - DNA, 25 bp, Homo sapien
taacagatactctttgtagcccaga

SEQ ID NO: 5171334 - DNA, 25 bp, Homo sapien
ggactagaacatgcaactggtgagg

SEQ ID NO: 5171335 - DNA, 25 bp, Homo sapien
ggcttcccaacaagtaggacctgag

SEQ ID NO: 5171336 - DNA, 25 bp, Homo sapien
gactaacccaggctgtacttcagag

SEQ ID NO: 5171337 - DNA, 25 bp, Homo sapien
taccagtcagcttacgaatagcgcc

SEQ ID NO: 5171338 - DNA, 25 bp, Homo sapien
tcagctggttgcctttcctcacttc

SEQ ID NO: 5171339 - DNA, 25 bp, Homo sapien
tcactctggctcctgtgtcagctgg

SEQ ID NO: 5171340 - DNA, 25 bp, Homo sapien
actctggctcctgtgtcagctggtt

SEQ ID NO: 5171341 - DNA, 25 bp, Homo sapien
ctggttgcctttcctcacttccatt

SEQ ID NO: 5171342 - DNA, 25 bp, Homo sapien
gatagacacaaattcatggtgtagg

SEQ ID NO: 5171343 - DNA, 25 bp, Homo sapien
cacaaattcatggtgtaggttgagt

SEQ ID NO: 5171344 - DNA, 25 bp, Homo sapien
ctgtccttggctcttaacgcgtaga

SEQ ID NO: 5171345 - DNA, 25 bp, Homo sapien
taacgcgtagaagatagacacaaat

SEQ ID NO: 5171346 - DNA, 25 bp, Homo sapien
tgtcatgactccagcgtatggccca

SEQ ID NO: 5171347 - DNA, 25 bp, Homo sapien
caacttccacggagtgaagagagcc

SEQ ID NO: 5171348 - DNA, 25 bp, Homo sapien
gatctgctcgcgcagcatggagctg

SEQ ID NO: 5171349 - DNA, 25 bp, Homo sapien
taaagtgcagaagcatcatacccca

SEQ ID NO: 5171350 - DNA, 25 bp, Homo sapien
aagaccatatctgggagcttctagg

SEQ ID NO: 5171351 - DNA, 25 bp, Homo sapien
caagaccatatctgggagcttctag

SEQ ID NO: 5171352 - DNA, 25 bp, Homo sapien
acaagaccatatctgggagcttcta

SEQ ID NO: 5171353 - DNA, 25 bp, Homo sapien
gaccatatctgggagcttctagggc

SEQ ID NO: 5171354 - DNA, 25 bp, Homo sapien
cacatgagatcacatggttcctgaa

SEQ ID NO: 5171355 - DNA, 25 bp, Homo sapien
ccagcatgcaagtgccagtgtcata

SEQ ID NO: 5171356 - DNA, 25 bp, Homo sapien
gaaggagctagctgcaaacacaacc

SEQ ID NO: 5171357 - DNA, 25 bp, Homo sapien
ggaaagtgtgtctgcatacaccagc

SEQ ID NO: 5171358 - DNA, 25 bp, Homo sapien
acatgtgcgtgcaatccctcctcaa

SEQ ID NO: 5171359 - DNA, 25 bp, Homo sapien
tcaatccagacttgaagtagtggtg

SEQ ID NO: 5171360 - DNA, 25 bp, Homo sapien
ctcaatccagacttgaagtagtggt

SEQ ID NO: 5171361 - DNA, 25 bp, Homo sapien
tgtgcgtgcaatccctcctcaatcc

SEQ ID NO: 5171362 - DNA, 25 bp, Homo sapien
acttggagcctcttagatgcagagc

SEQ ID NO: 5171363 - DNA, 25 bp, Homo sapien
gtgattttcaaatgagtcccagctg

SEQ ID NO: 5171364 - DNA, 25 bp, Homo sapien
gatgcagagcccatagggaatttct

SEQ ID NO: 5171365 - DNA, 25 bp, Homo sapien
tcatgcataagagctacttggagcc

SEQ ID NO: 5171366 - DNA, 25 bp, Homo sapien
ggttagatccaaaggtgaacttggc

SEQ ID NO: 5171367 - DNA, 25 bp, Homo sapien
tggttagatccaaaggtgaacttgg

SEQ ID NO: 5171368 - DNA, 25 bp, Homo sapien
gttagatccaaaggtgaacttggcc

SEQ ID NO: 5171369 - DNA, 25 bp, Homo sapien
ttgctgtaccatgccagaaacacca

SEQ ID NO: 5171370 - DNA, 25 bp, Homo sapien
agggtggcctcgcacactactgctt

SEQ ID NO: 5171371 - DNA, 25 bp, Homo sapien
ttcttggaaagggtggcctcgcaca

SEQ ID NO: 5171372 - DNA, 25 bp, Homo sapien
ctgcttgctgtaccatgccagaaac

SEQ ID NO: 5171373 - DNA, 25 bp, Homo sapien
taaatccggatctgcagagtccgtc

SEQ ID NO: 5171374 - DNA, 25 bp, Homo sapien
actgtgaaggtacggccgccatgat

SEQ ID NO: 5171375 - DNA, 25 bp, Homo sapien
caaggattagggcacagccaaggtt

SEQ ID NO: 5171376 - DNA, 25 bp, Homo sapien
ccaaggttgagatctactgtgaagg

SEQ ID NO: 5171377 - DNA, 25 bp, Homo sapien
gtgggtagcaggactgagaaaagcc

SEQ ID NO: 5171378 - DNA, 25 bp, Homo sapien
tttctgaattgggagtgggccaggg

SEQ ID NO: 5171379 - DNA, 25 bp, Homo sapien
tgactgcataaccatccacagaaat

SEQ ID NO: 5171380 - DNA, 25 bp, Homo sapien
aaaagcagatgggtgactgcataac

SEQ ID NO: 5171381 - DNA, 25 bp, Homo sapien
tccggtgccattgacaacaagattg

SEQ ID NO: 5171382 - DNA, 25 bp, Homo sapien
tctcaagtgcaaccaagctgggaac

SEQ ID NO: 5171383 - DNA, 25 bp, Homo sapien
caatgcgctgcaaaatgttatctaa

SEQ ID NO: 5171384 - DNA, 25 bp, Homo sapien
tcgactccaacttgccaatgcgctg

SEQ ID NO: 5171385 - DNA, 25 bp, Homo sapien
ccaaagcagggtgtgactccatatc

SEQ ID NO: 5171386 - DNA, 25 bp, Homo sapien
gactccatatcagggcagagaattg

SEQ ID NO: 5171387 - DNA, 25 bp, Homo sapien
tctcttcttggtccaaagcagggtg

SEQ ID NO: 5171388 - DNA, 25 bp, Homo sapien
tcttggtccaaagcagggtgtgact

SEQ ID NO: 5171389 - DNA, 25 bp, Homo sapien
ctaatcctcaggctcttcactttgt

SEQ ID NO: 5171390 - DNA, 25 bp, Homo sapien
taatcctcaggctcttcactttgtc

SEQ ID NO: 5171391 - DNA, 25 bp, Homo sapien
gcttgttaagcggtacactagctca

SEQ ID NO: 5171392 - DNA, 25 bp, Homo sapien
catttaaaggagtcccgctcagagc

SEQ ID NO: 5171393 - DNA, 25 bp, Homo sapien
tccttcttagaggtgtacccacgac

SEQ ID NO: 5171394 - DNA, 25 bp, Homo sapien
tcgtttgaaagtagtcaccaagtcc

SEQ ID NO: 5171395 - DNA, 25 bp, Homo sapien
aatttgtgaagataagccatactgg

SEQ ID NO: 5171396 - DNA, 25 bp, Homo sapien
aagccatactggataaaagctacac

SEQ ID NO: 5171397 - DNA, 25 bp, Homo sapien
gccatactggataaaagctacacag

SEQ ID NO: 5171398 - DNA, 25 bp, Homo sapien
tcacattaaaaaaccctcggtgata

SEQ ID NO: 5171399 - DNA, 25 bp, Homo sapien
tcaagggtaaaagaagtacagaaga

SEQ ID NO: 5171400 - DNA, 25 bp, Homo sapien
atgttcaagggtaaaagaagtacag

SEQ ID NO: 5171401 - DNA, 25 bp, Homo sapien
ctgaatgttcaagggtaaaagaagt

SEQ ID NO: 5171402 - DNA, 25 bp, Homo sapien
tgttcaagggtaaaagaagtacaga

SEQ ID NO: 5171403 - DNA, 25 bp, Homo sapien
gggtgactctgtccacgccatgggc

SEQ ID NO: 5171404 - DNA, 25 bp, Homo sapien
tctgcttgacataagcagatttggg

SEQ ID NO: 5171405 - DNA, 25 bp, Homo sapien
tcaatcccagacatgtcgtcctcgg

SEQ ID NO: 5171406 - DNA, 25 bp, Homo sapien
tttgtgatcccacacgtgagacttg

SEQ ID NO: 5171407 - DNA, 25 bp, Homo sapien
tttccgatgcctgacacagacctgg

SEQ ID NO: 5171408 - DNA, 25 bp, Homo sapien
gaaacaaatcgatctctgggtggta

SEQ ID NO: 5171409 - DNA, 25 bp, Homo sapien
tgctaaattaatccccaggtgcctg

SEQ ID NO: 5171410 - DNA, 25 bp, Homo sapien
tcctccggtagatggtgaactcaac

SEQ ID NO: 5171411 - DNA, 25 bp, Homo sapien
tgggccttatggtctcctgtacaac

SEQ ID NO: 5171412 - DNA, 25 bp, Homo sapien
ccagcagtggcagattaaatgggca

SEQ ID NO: 5171413 - DNA, 25 bp, Homo sapien
taaaatgcgattgtcccagcagtgg

SEQ ID NO: 5171414 - DNA, 25 bp, Homo sapien
cattagagatgcaccagccaggatc

SEQ ID NO: 5171415 - DNA, 25 bp, Homo sapien
gccatggaggatgcatgtccaacac

SEQ ID NO: 5171416 - DNA, 25 bp, Homo sapien
tgactaaagacaggaagccatacct

SEQ ID NO: 5171417 - DNA, 25 bp, Homo sapien
gatgcacatgagaacacacgagtag

SEQ ID NO: 5171418 - DNA, 25 bp, Homo sapien
tcttgctaggcaacatcaacggagt

SEQ ID NO: 5171419 - DNA, 25 bp, Homo sapien
cttgtcatcctcgaagagaatctgg

SEQ ID NO: 5171420 - DNA, 25 bp, Homo sapien
ttcctcggtgcaataaagaaatagc

SEQ ID NO: 5171421 - DNA, 25 bp, Homo sapien
taagttgacgcgtccaccttactgc

SEQ ID NO: 5171422 - DNA, 25 bp, Homo sapien
cacacagttgattgggcctactaag

SEQ ID NO: 5171423 - DNA, 25 bp, Homo sapien
cttctgagtcaagattatttccaca

SEQ ID NO: 5171424 - DNA, 25 bp, Homo sapien
ttccatatgcaaagcactctgcatg

SEQ ID NO: 5171425 - DNA, 25 bp, Homo sapien
catgggaaatttcaagagtgaacac

SEQ ID NO: 5171426 - DNA, 25 bp, Homo sapien
gcatgttcaacgaggcatttgcctt

SEQ ID NO: 5171427 - DNA, 25 bp, Homo sapien
tgcagccaaatgagcgtgccactgg

SEQ ID NO: 5171428 - DNA, 25 bp, Homo sapien
catgcttatcagatggcccctgcaa

SEQ ID NO: 5171429 - DNA, 25 bp, Homo sapien
gaaccgactcaatctccacaatggg

SEQ ID NO: 5171430 - DNA, 25 bp, Homo sapien
gagtggatggcaataaatcagactg

SEQ ID NO: 5171431 - DNA, 25 bp, Homo sapien
ctgatagattaagggcatctaaatc

SEQ ID NO: 5171432 - DNA, 25 bp, Homo sapien
tctgatagattaagggcatctaaat

SEQ ID NO: 5171433 - DNA, 25 bp, Homo sapien
ttttatctagttctggacaggcatc

SEQ ID NO: 5171434 - DNA, 25 bp, Homo sapien
taactttttatctagttctggacag

SEQ ID NO: 5171435 - DNA, 25 bp, Homo sapien
catttgttaactgtcccactgcttg

SEQ ID NO: 5171436 - DNA, 25 bp, Homo sapien
taaatcagatgctaggtgccttggg

SEQ ID NO: 5171437 - DNA, 25 bp, Homo sapien
ctgcttgtataaatcagatgctagg

SEQ ID NO: 5171438 - DNA, 25 bp, Homo sapien
tgttaactgtcccactgcttgtata

SEQ ID NO: 5171439 - DNA, 25 bp, Homo sapien
tgacccaaggagtccgagttctgga

SEQ ID NO: 5171440 - DNA, 25 bp, Homo sapien
gagtcactgacccaaggagtccgag

SEQ ID NO: 5171441 - DNA, 25 bp, Homo sapien
ggagtccgagttctggactgcacat

SEQ ID NO: 5171442 - DNA, 25 bp, Homo sapien
caaggagtccgagttctggactgca

SEQ ID NO: 5171443 - DNA, 25 bp, Homo sapien
ttttcttgagctccgttaatgatat

SEQ ID NO: 5171444 - DNA, 25 bp, Homo sapien
cataggaggcaatacacatttttct

SEQ ID NO: 5171445 - DNA, 25 bp, Homo sapien
tttttcttgagctccgttaatgata

SEQ ID NO: 5171446 - DNA, 25 bp, Homo sapien
gtgagggtagccgtccataggaggc

SEQ ID NO: 5171447 - DNA, 25 bp, Homo sapien
aaatacagtgcgtgaaggagggcac

SEQ ID NO: 5171448 - DNA, 25 bp, Homo sapien
tgacggacggcccacatggatacca

SEQ ID NO: 5171449 - DNA, 25 bp, Homo sapien
taactacatccctgaatggacactg

SEQ ID NO: 5171450 - DNA, 25 bp, Homo sapien
ggttggtcccactgtcctaactaca

SEQ ID NO: 5171451 - DNA, 25 bp, Homo sapien
gagcaggtggatccatccactccat

SEQ ID NO: 5171452 - DNA, 25 bp, Homo sapien
aaagagcaggtggatccatccactc

SEQ ID NO: 5171453 - DNA, 25 bp, Homo sapien
ggatctgaacgccacatgtctttca

SEQ ID NO: 5171454 - DNA, 25 bp, Homo sapien
cactccatagtctgcgtagcaggga

SEQ ID NO: 5171455 - DNA, 25 bp, Homo sapien
caaaaaatcatggagcccggttgga

SEQ ID NO: 5171456 - DNA, 25 bp, Homo sapien
tgcacccaggcaaaagaagtaatag

SEQ ID NO: 5171457 - DNA, 25 bp, Homo sapien
aaagtgtaacttgaatgcacccagg

SEQ ID NO: 5171458 - DNA, 25 bp, Homo sapien
tgatggcaatggaacaaccttgtcc

SEQ ID NO: 5171459 - DNA, 25 bp, Homo sapien
catagggccttataacacgggtact

SEQ ID NO: 5171460 - DNA, 25 bp, Homo sapien
tataacttctctagtgagtggcagg

SEQ ID NO: 5171461 - DNA, 25 bp, Homo sapien
tacctttaggccaagcttagtgagg

SEQ ID NO: 5171462 - DNA, 25 bp, Homo sapien
tctgggatcagtcaaaatggactct

SEQ ID NO: 5171463 - DNA, 25 bp, Homo sapien
cttagaatatgttgggcttcgtaac

SEQ ID NO: 5171464 - DNA, 25 bp, Homo sapien
tttaaaggagttacataagcatacc

SEQ ID NO: 5171465 - DNA, 25 bp, Homo sapien
taccatcatgtatgaaggcttagaa

SEQ ID NO: 5171466 - DNA, 25 bp, Homo sapien
aggcttagaatatgttgggcttcgt

SEQ ID NO: 5171467 - DNA, 25 bp, Homo sapien
tgaattatgatcagcttcttcgtag

SEQ ID NO: 5171468 - DNA, 25 bp, Homo sapien
ttcttcgtagggattttttgctctc

SEQ ID NO: 5171469 - DNA, 25 bp, Homo sapien
cagcttcttcgtagggattttttgc

SEQ ID NO: 5171470 - DNA, 25 bp, Homo sapien
tatgatcagcttcttcgtagggatt

SEQ ID NO: 5171471 - DNA, 25 bp, Homo sapien
tattaaaatctgtacgaatttccgc

SEQ ID NO: 5171472 - DNA, 25 bp, Homo sapien
gcttggatccatgcgtcagccattc

SEQ ID NO: 5171473 - DNA, 25 bp, Homo sapien
ttctgccagggacttgattgcttgg

SEQ ID NO: 5171474 - DNA, 25 bp, Homo sapien
cgtagtctcatccaccggaattctt

SEQ ID NO: 5171475 - DNA, 25 bp, Homo sapien
gccattcgccggatccgtagtctca

SEQ ID NO: 5171476 - DNA, 25 bp, Homo sapien
aattcaccaagagggccaccactga

SEQ ID NO: 5171477 - DNA, 25 bp, Homo sapien
tgaaatcctaatgtcatggcccagt

SEQ ID NO: 5171478 - DNA, 25 bp, Homo sapien
tcaggagtcccaggtgaacgaggac

SEQ ID NO: 5171479 - DNA, 25 bp, Homo sapien
tgaaagctgtctctgcaatcttaaa

SEQ ID NO: 5171480 - DNA, 25 bp, Homo sapien
aattgaaaaaggatcagctcagggc

SEQ ID NO: 5171481 - DNA, 25 bp, Homo sapien
tctggagccttcagcgacaatgaaa

SEQ ID NO: 5171482 - DNA, 25 bp, Homo sapien
taacagactcagctgaaagttggct

SEQ ID NO: 5171483 - DNA, 25 bp, Homo sapien
tgggaagtctccatgggcagtaatc

SEQ ID NO: 5171484 - DNA, 25 bp, Homo sapien
tgagcaagtcctacaatatcaatgt

SEQ ID NO: 5171485 - DNA, 25 bp, Homo sapien
taatgaacccaggatggtccaagag

SEQ ID NO: 5171486 - DNA, 25 bp, Homo sapien
gggcagccagatcggtttcctacaa

SEQ ID NO: 5171487 - DNA, 25 bp, Homo sapien
taaatgagctcaacaattctgtctc

SEQ ID NO: 5171488 - DNA, 25 bp, Homo sapien
catggtataaaactgctgagggttc

SEQ ID NO: 5171489 - DNA, 25 bp, Homo sapien
ggtcttgtggcctttcgattgggca

SEQ ID NO: 5171490 - DNA, 25 bp, Homo sapien
catgattaaattcgggttcagtacc

SEQ ID NO: 5171491 - DNA, 25 bp, Homo sapien
cgattgggcataatttgcatgatta

SEQ ID NO: 5171492 - DNA, 25 bp, Homo sapien
cattctggaaagcatacatgaaaca

SEQ ID NO: 5171493 - DNA, 25 bp, Homo sapien
tatctttggtggcattctggaaagc

SEQ ID NO: 5171494 - DNA, 25 bp, Homo sapien
ttcccatctatctttggtggcattc

SEQ ID NO: 5171495 - DNA, 25 bp, Homo sapien
catctatctttggtggcattctgga

SEQ ID NO: 5171496 - DNA, 25 bp, Homo sapien
tagtgctgcactaaatgcccttgag

SEQ ID NO: 5171497 - DNA, 25 bp, Homo sapien
cagaggcggttttgctagatcctga

SEQ ID NO: 5171498 - DNA, 25 bp, Homo sapien
catgctgcattctaaccactagggt

SEQ ID NO: 5171499 - DNA, 25 bp, Homo sapien
gaagagggctggttttgctcactgc

SEQ ID NO: 5171500 - DNA, 25 bp, Homo sapien
gggaccagcaggctgtttggtgaga

SEQ ID NO: 5171501 - DNA, 25 bp, Homo sapien
accagcaggctgtttggtgagaccg

SEQ ID NO: 5171502 - DNA, 25 bp, Homo sapien
cagcaggctgtttggtgagaccggg

SEQ ID NO: 5171503 - DNA, 25 bp, Homo sapien
cagggaccagcaggctgtttggtga

SEQ ID NO: 5171504 - DNA, 25 bp, Homo sapien
caaaatgttgcaggtacttaacaca

SEQ ID NO: 5171505 - DNA, 25 bp, Homo sapien
gactatacagaatgtgagcacccag

SEQ ID NO: 5171506 - DNA, 25 bp, Homo sapien
gaaaagtgaggctgttaagcagaac

SEQ ID NO: 5171507 - DNA, 25 bp, Homo sapien
acaaacatagtttgctcaggcaatg

SEQ ID NO: 5171508 - DNA, 25 bp, Homo sapien
aagttgagctgagaagatgagcgcc

SEQ ID NO: 5171509 - DNA, 25 bp, Homo sapien
taatcctcagtggtctgcacagaac

SEQ ID NO: 5171510 - DNA, 25 bp, Homo sapien
ttgttgacaaaaggcacctcagggt

SEQ ID NO: 5171511 - DNA, 25 bp, Homo sapien
gaaccacgaggctgatcctaatcct

SEQ ID NO: 5171512 - DNA, 25 bp, Homo sapien
tcataaacgggatgcaggaaatcct

SEQ ID NO: 5171513 - DNA, 25 bp, Homo sapien
taactacccaagtctacatgctagg

SEQ ID NO: 5171514 - DNA, 25 bp, Homo sapien
ttagtaatccctccatcccagaaga

SEQ ID NO: 5171515 - DNA, 25 bp, Homo sapien
tgccaagttctgtgctaagcgcatt

SEQ ID NO: 5171516 - DNA, 25 bp, Homo sapien
gaggtgagggattgtcatctctccc

SEQ ID NO: 5171517 - DNA, 25 bp, Homo sapien
cacacattcccagtaaaaccgtcat

SEQ ID NO: 5171518 - DNA, 25 bp, Homo sapien
gagggattgtcatctctcccacaca

SEQ ID NO: 5171519 - DNA, 25 bp, Homo sapien
gggattgtcatctctcccacacatt

SEQ ID NO: 5171520 - DNA, 25 bp, Homo sapien
aatgtggtggatatcactggagttc

SEQ ID NO: 5171521 - DNA, 25 bp, Homo sapien
tatcactggagttcaggtgctgctc

SEQ ID NO: 5171522 - DNA, 25 bp, Homo sapien
gctatccactttgccatacacaagg

SEQ ID NO: 5171523 - DNA, 25 bp, Homo sapien
tgctcaaccacaaaccccagaaagc

SEQ ID NO: 5171524 - DNA, 25 bp, Homo sapien
gattagaagtagcaaggtctgcaaa

SEQ ID NO: 5171525 - DNA, 25 bp, Homo sapien
agtggcagagattagaagtagcaag

SEQ ID NO: 5171526 - DNA, 25 bp, Homo sapien
gcagagattagaagtagcaaggtct

SEQ ID NO: 5171527 - DNA, 25 bp, Homo sapien
agaagtagcaaggtctgcaaatatc

SEQ ID NO: 5171528 - DNA, 25 bp, Homo sapien
gctggcttgcagagagcctcgctaa

SEQ ID NO: 5171529 - DNA, 25 bp, Homo sapien
tctgagcaaaggagtagcacgattc

SEQ ID NO: 5171530 - DNA, 25 bp, Homo sapien
tgtacacttagctcacccagagaga

SEQ ID NO: 5171531 - DNA, 25 bp, Homo sapien
caaggctgtcgctgacttggcgatc

SEQ ID NO: 5171532 - DNA, 25 bp, Homo sapien
gatgcagcagtcacctagtctgaga

SEQ ID NO: 5171533 - DNA, 25 bp, Homo sapien
tatgccacagatatattagaactgc

SEQ ID NO: 5171534 - DNA, 25 bp, Homo sapien
gaactgctctgttgagacagggccc

SEQ ID NO: 5171535 - DNA, 25 bp, Homo sapien
ctataatagcagaccctagggctct

SEQ ID NO: 5171536 - DNA, 25 bp, Homo sapien
cagttaattcctactatgaaataaa

SEQ ID NO: 5171537 - DNA, 25 bp, Homo sapien
tgagctaagagcagttaattcctac

SEQ ID NO: 5171538 - DNA, 25 bp, Homo sapien
tgggctgggctgtcaactgtaaagt

SEQ ID NO: 5171539 - DNA, 25 bp, Homo sapien
tgattcgatagaagccacagcggcc

SEQ ID NO: 5171540 - DNA, 25 bp, Homo sapien
tatctactgaagctgtatgctgaca

SEQ ID NO: 5171541 - DNA, 25 bp, Homo sapien
acttggcctggaacgtggaactcgt

SEQ ID NO: 5171542 - DNA, 25 bp, Homo sapien
cacagactattccatcatcaaagag

SEQ ID NO: 5171543 - DNA, 25 bp, Homo sapien
acagactattccatcatcaaagagc

SEQ ID NO: 5171544 - DNA, 25 bp, Homo sapien
gtccacagactattccatcatcaaa

SEQ ID NO: 5171545 - DNA, 25 bp, Homo sapien
aatgggaagaagtccacagactatt

SEQ ID NO: 5171546 - DNA, 25 bp, Homo sapien
gaactgtaagctatgagaagctcta

SEQ ID NO: 5171547 - DNA, 25 bp, Homo sapien
ggaactgtaagctatgagaagctct

SEQ ID NO: 5171548 - DNA, 25 bp, Homo sapien
tggaactgtaagctatgagaagctc

SEQ ID NO: 5171549 - DNA, 25 bp, Homo sapien
tacctagtgtagcatttcccaagcc

SEQ ID NO: 5171550 - DNA, 25 bp, Homo sapien
ggagcactggatgcaaccgaggtaa

SEQ ID NO: 5171551 - DNA, 25 bp, Homo sapien
gatcagctgtactgggaagcaaagg

SEQ ID NO: 5171552 - DNA, 25 bp, Homo sapien
aagcctgcctgtttggagcacctgt

SEQ ID NO: 5171553 - DNA, 25 bp, Homo sapien
gggcctcttttcatggacagcagtc

SEQ ID NO: 5171554 - DNA, 25 bp, Homo sapien
cctggcgttcgcaggagaccctctg

SEQ ID NO: 5171555 - DNA, 25 bp, Homo sapien
caagccagccctggcgttcgcagga

SEQ ID NO: 5171556 - DNA, 25 bp, Homo sapien
gcctcttttcatggacagcagtctt

SEQ ID NO: 5171557 - DNA, 25 bp, Homo sapien
cctccttgtccatggagaacagctt

SEQ ID NO: 5171558 - DNA, 25 bp, Homo sapien
tgagggaaacaatcttgcaatgctt

SEQ ID NO: 5171559 - DNA, 25 bp, Homo sapien
aggcccctgggtcactatgtgagac

SEQ ID NO: 5171560 - DNA, 25 bp, Homo sapien
tatgtgagacgctgcctcctccttg

SEQ ID NO: 5171561 - DNA, 25 bp, Homo sapien
tcaagaacgcgctgtcaaccctttc

SEQ ID NO: 5171562 - DNA, 25 bp, Homo sapien
ttcagttctttcactcaaaagtggg

SEQ ID NO: 5171563 - DNA, 25 bp, Homo sapien
gaacctttacctctatctgcttcag

SEQ ID NO: 5171564 - DNA, 25 bp, Homo sapien
cagtgtgttggctacaatacatgat

SEQ ID NO: 5171565 - DNA, 25 bp, Homo sapien
gatgtaattcaaatcctgaccacct

SEQ ID NO: 5171566 - DNA, 25 bp, Homo sapien
gatacgcaagtaagttcctaataat

SEQ ID NO: 5171567 - DNA, 25 bp, Homo sapien
accaagtcggtatttctgctctcca

SEQ ID NO: 5171568 - DNA, 25 bp, Homo sapien
tatcttttgaagtcctgatacgcaa

SEQ ID NO: 5171569 - DNA, 25 bp, Homo sapien
gctctctaaaggcagacatatcttt

SEQ ID NO: 5171570 - DNA, 25 bp, Homo sapien
tatctgttgggagcagtctggccgc

SEQ ID NO: 5171571 - DNA, 25 bp, Homo sapien
gcttttgacgagttccacccatgat

SEQ ID NO: 5171572 - DNA, 25 bp, Homo sapien
gaatactcgtgttcctaaggcccta

SEQ ID NO: 5171573 - DNA, 25 bp, Homo sapien
tagtgttcaatcctggaacgcccaa

SEQ ID NO: 5171574 - DNA, 25 bp, Homo sapien
tgctgtcttgacataaatgctgacc

SEQ ID NO: 5171575 - DNA, 25 bp, Homo sapien
ctgagggcttctgaagtcaggagcc

SEQ ID NO: 5171576 - DNA, 25 bp, Homo sapien
tccacttgtgattgaacaccccagg

SEQ ID NO: 5171577 - DNA, 25 bp, Homo sapien
cagtacttggagagatagactcaga

SEQ ID NO: 5171578 - DNA, 25 bp, Homo sapien
aacttctagcggaaaatggctcagc

SEQ ID NO: 5171579 - DNA, 25 bp, Homo sapien
gagctttagggaccttccatgttag

SEQ ID NO: 5171580 - DNA, 25 bp, Homo sapien
gaattacatgtggaaagtaccctga

SEQ ID NO: 5171581 - DNA, 25 bp, Homo sapien
ggactttggagctcttgggtacaca

SEQ ID NO: 5171582 - DNA, 25 bp, Homo sapien
taatgatgttccttcatctactctg

SEQ ID NO: 5171583 - DNA, 25 bp, Homo sapien
atgttccttcatctactctgattgg

SEQ ID NO: 5171584 - DNA, 25 bp, Homo sapien
atgatgttccttcatctactctgat

SEQ ID NO: 5171585 - DNA, 25 bp, Homo sapien
ggataatgatgttccttcatctact

SEQ ID NO: 5171586 - DNA, 25 bp, Homo sapien
gatggctggaactgtgaacttctcc

SEQ ID NO: 5171587 - DNA, 25 bp, Homo sapien
cagggcagaaccagtaggcttggca

SEQ ID NO: 5171588 - DNA, 25 bp, Homo sapien
tgtcactggatgttcccagatggct

SEQ ID NO: 5171589 - DNA, 25 bp, Homo sapien
aaccatcttcctgcttgggctgcac

SEQ ID NO: 5171590 - DNA, 25 bp, Homo sapien
ttcataaacgtgaaaatcccaacag

SEQ ID NO: 5171591 - DNA, 25 bp, Homo sapien
caatttcataaacgtgaaaatccca

SEQ ID NO: 5171592 - DNA, 25 bp, Homo sapien
tttcataaacgtgaaaatcccaaca

SEQ ID NO: 5171593 - DNA, 25 bp, Homo sapien
taccaatttcataaacgtgaaaatc

SEQ ID NO: 5171594 - DNA, 25 bp, Homo sapien
ggcaaggggagccaaccagatgctc

SEQ ID NO: 5171595 - DNA, 25 bp, Homo sapien
ccagcagcccaggaatgatgtagca

SEQ ID NO: 5171596 - DNA, 25 bp, Homo sapien
ccaggaatgatgtagcagactcagg

SEQ ID NO: 5171597 - DNA, 25 bp, Homo sapien
cctgtatacagggagattactgcca

SEQ ID NO: 5171598 - DNA, 25 bp, Homo sapien
ctggcatatgttagtttgaagggtt

SEQ ID NO: 5171599 - DNA, 25 bp, Homo sapien
taggatatggttcttgtgctagatg

SEQ ID NO: 5171600 - DNA, 25 bp, Homo sapien
cacagctcctgttaagtaggcaggg

SEQ ID NO: 5171601 - DNA, 25 bp, Homo sapien
tagatgtatctggtaactcctgccc

SEQ ID NO: 5171602 - DNA, 25 bp, Homo sapien
gacttaagaccacaagggacacagg

SEQ ID NO: 5171603 - DNA, 25 bp, Homo sapien
cactgccctggtgatattacaaagg

SEQ ID NO: 5171604 - DNA, 25 bp, Homo sapien
gtcttcatgactgggaaaactgcac

SEQ ID NO: 5171605 - DNA, 25 bp, Homo sapien
ggcaggctctaaatgaagcgattca

SEQ ID NO: 5171606 - DNA, 25 bp, Homo sapien
cttggtttctcgaagaaggaactgc

SEQ ID NO: 5171607 - DNA, 25 bp, Homo sapien
gcatgcacttccatgtatgtgtgaa

SEQ ID NO: 5171608 - DNA, 25 bp, Homo sapien
tgcaggtcccgtccactgaggatac

SEQ ID NO: 5171609 - DNA, 25 bp, Homo sapien
tgtgctggagccataaacagttgca

SEQ ID NO: 5171610 - DNA, 25 bp, Homo sapien
tgaacaaggaggtatgaggaaaagc

SEQ ID NO: 5171611 - DNA, 25 bp, Homo sapien
ccaatgcgtacttggtgaacaagga

SEQ ID NO: 5171612 - DNA, 25 bp, Homo sapien
tttgccctcatctgaacttcttcac

SEQ ID NO: 5171613 - DNA, 25 bp, Homo sapien
ggcccacatgccaggtgtgtctaca

SEQ ID NO: 5171614 - DNA, 25 bp, Homo sapien
caaaatttgcgaagctgagagagac

SEQ ID NO: 5171615 - DNA, 25 bp, Homo sapien
tcaaggatgaacatacacccctcgt

SEQ ID NO: 5171616 - DNA, 25 bp, Homo sapien
gacatcagcgatctccgttttggcc

SEQ ID NO: 5171617 - DNA, 25 bp, Homo sapien
gacatcctctacacgggtcccagtt

SEQ ID NO: 5171618 - DNA, 25 bp, Homo sapien
gccttagacaggttttgtgagcaca

SEQ ID NO: 5171619 - DNA, 25 bp, Homo sapien
tcaactgtagaaaggacggtactgg

SEQ ID NO: 5171620 - DNA, 25 bp, Homo sapien
tacagcgacagtatgtgcagaagcc

SEQ ID NO: 5171621 - DNA, 25 bp, Homo sapien
ggtactggtccagctcacaaagcac

SEQ ID NO: 5171622 - DNA, 25 bp, Homo sapien
ggtctgggcttgacgaagctgtgtc

SEQ ID NO: 5171623 - DNA, 25 bp, Homo sapien
gaaatgcctcggcacgtaccatcac

SEQ ID NO: 5171624 - DNA, 25 bp, Homo sapien
aagcctgttctgtttcagcccccag

SEQ ID NO: 5171625 - DNA, 25 bp, Homo sapien
tctctacccacataaaagcctgttc

SEQ ID NO: 5171626 - DNA, 25 bp, Homo sapien
cacgatgacaaaggggacaagctgc

SEQ ID NO: 5171627 - DNA, 25 bp, Homo sapien
cagcaacaacttgctctcagtcctc

SEQ ID NO: 5171628 - DNA, 25 bp, Homo sapien
tggcagcaacaacttgctctcagtc

SEQ ID NO: 5171629 - DNA, 25 bp, Homo sapien
acgatgacaaaggggacaagctgca

SEQ ID NO: 5171630 - DNA, 25 bp, Homo sapien
catccatttgcgatagcttccaggg

SEQ ID NO: 5171631 - DNA, 25 bp, Homo sapien
gggattcagaaaagcacatccattt

SEQ ID NO: 5171632 - DNA, 25 bp, Homo sapien
ctctctcagagttggcttgccaatg

SEQ ID NO: 5171633 - DNA, 25 bp, Homo sapien
ttgggtgggttgaacttgggattca

SEQ ID NO: 5171634 - DNA, 25 bp, Homo sapien
cgcccgatgaaaacttcagcgtaag

SEQ ID NO: 5171635 - DNA, 25 bp, Homo sapien
agtccacacatgtggccgcccgatg

SEQ ID NO: 5171636 - DNA, 25 bp, Homo sapien
tacttcctcctgattgttgaggtca

SEQ ID NO: 5171637 - DNA, 25 bp, Homo sapien
tcagcgtaaggatgctgggatgtca

SEQ ID NO: 5171638 - DNA, 25 bp, Homo sapien
ggcagcctagaggaaccacattcca

SEQ ID NO: 5171639 - DNA, 25 bp, Homo sapien
ttcttttatcagctcggtctcctga

SEQ ID NO: 5171640 - DNA, 25 bp, Homo sapien
tagaggaaccacattccatttggca

SEQ ID NO: 5171641 - DNA, 25 bp, Homo sapien
tatcagctcggtctcctgaggttgg

SEQ ID NO: 5171642 - DNA, 25 bp, Homo sapien
tgtagcatcccctcgcacgtaaatt

SEQ ID NO: 5171643 - DNA, 25 bp, Homo sapien
aattcatatggcatgtatggctcaa

SEQ ID NO: 5171644 - DNA, 25 bp, Homo sapien
tcgcacgtaaattcatatggcatgt

SEQ ID NO: 5171645 - DNA, 25 bp, Homo sapien
caatgaaagcattgattctctgtag

SEQ ID NO: 5171646 - DNA, 25 bp, Homo sapien
tcctaccattcaagggatgggaagg

SEQ ID NO: 5171647 - DNA, 25 bp, Homo sapien
ggctgcagtgctcctaccattcaag

SEQ ID NO: 5171648 - DNA, 25 bp, Homo sapien
cctcgctgccctttgaagatattcg

SEQ ID NO: 5171649 - DNA, 25 bp, Homo sapien
gatattggcctaattagggctgcag

SEQ ID NO: 5171650 - DNA, 25 bp, Homo sapien
gctgtctgttggctccgtctggctc

SEQ ID NO: 5171651 - DNA, 25 bp, Homo sapien
ctcccactgccttggctgagcatga

SEQ ID NO: 5171652 - DNA, 25 bp, Homo sapien
agcatgacggacaaccctgaaaggt

SEQ ID NO: 5171653 - DNA, 25 bp, Homo sapien
tttcctgctggcgactgctcaactg

SEQ ID NO: 5171654 - DNA, 25 bp, Homo sapien
ccaggagtctttctcattgggtgcc

SEQ ID NO: 5171655 - DNA, 25 bp, Homo sapien
gactggcttgttcacgccctcttgg

SEQ ID NO: 5171656 - DNA, 25 bp, Homo sapien
cacttgttcagagcaaagcggagga

SEQ ID NO: 5171657 - DNA, 25 bp, Homo sapien
tcagctatttgagggataaggcaca

SEQ ID NO: 5171658 - DNA, 25 bp, Homo sapien
taataagcccatgagagttcggtgc

SEQ ID NO: 5171659 - DNA, 25 bp, Homo sapien
tggacaccttgcacctcaggtccag

SEQ ID NO: 5171660 - DNA, 25 bp, Homo sapien
gatggcaccgcaaggcccaaaccat

SEQ ID NO: 5171661 - DNA, 25 bp, Homo sapien
gaatggacaccttgcacctcaggtc

SEQ ID NO: 5171662 - DNA, 25 bp, Homo sapien
ggcaggatggcaccgcaaggcccaa

SEQ ID NO: 5171663 - DNA, 25 bp, Homo sapien
ggaagagctgcctgtgccccgtaga

SEQ ID NO: 5171664 - DNA, 25 bp, Homo sapien
gccccgtagagcttccaaggtactg

SEQ ID NO: 5171665 - DNA, 25 bp, Homo sapien
tagagcttccaaggtactgcattgg

SEQ ID NO: 5171666 - DNA, 25 bp, Homo sapien
aggtactgcattggagacatctgca

SEQ ID NO: 5171667 - DNA, 25 bp, Homo sapien
aagagtgaggctaacagatagtaag

SEQ ID NO: 5171668 - DNA, 25 bp, Homo sapien
taacagatagtaagacatggagctg

SEQ ID NO: 5171669 - DNA, 25 bp, Homo sapien
tgatgagtgatatggcgatggaatg

SEQ ID NO: 5171670 - DNA, 25 bp, Homo sapien
ctgtggtgctttgggtgtgttaccc

SEQ ID NO: 5171671 - DNA, 25 bp, Homo sapien
gtgatcaatggagttactgatgatc

SEQ ID NO: 5171672 - DNA, 25 bp, Homo sapien
gaatgaaagcacacagtgatcaatg

SEQ ID NO: 5171673 - DNA, 25 bp, Homo sapien
tgaaagcacacagtgatcaatggag

SEQ ID NO: 5171674 - DNA, 25 bp, Homo sapien
tcaatggagttactgatgatcagag

SEQ ID NO: 5171675 - DNA, 25 bp, Homo sapien
gccgttgctttcttaggtgacagga

SEQ ID NO: 5171676 - DNA, 25 bp, Homo sapien
ggctggcctttgacactctgcccat

SEQ ID NO: 5171677 - DNA, 25 bp, Homo sapien
cacagtgatcactggtggccgttgc

SEQ ID NO: 5171678 - DNA, 25 bp, Homo sapien
tgacaggaaacctgctggctggcct

SEQ ID NO: 5171679 - DNA, 25 bp, Homo sapien
gaatgctgctactaaggcagacagc

SEQ ID NO: 5171680 - DNA, 25 bp, Homo sapien
ttaagccatgggtcgcaacgtaact

SEQ ID NO: 5171681 - DNA, 25 bp, Homo sapien
gggtcgcaacgtaacttgagtctga

SEQ ID NO: 5171682 - DNA, 25 bp, Homo sapien
ctgaatgctgctactaaggcagaca

SEQ ID NO: 5171683 - DNA, 25 bp, Homo sapien
agtgccccaggacccatacagccct

SEQ ID NO: 5171684 - DNA, 25 bp, Homo sapien
cagacaactagacagaagaccctca

SEQ ID NO: 5171685 - DNA, 25 bp, Homo sapien
gacagacaactagacagaagaccct

SEQ ID NO: 5171686 - DNA, 25 bp, Homo sapien
gaccctcaaatgactccttatattc

SEQ ID NO: 5171687 - DNA, 25 bp, Homo sapien
ggtctaataattcagagatgaaaag

SEQ ID NO: 5171688 - DNA, 25 bp, Homo sapien
atttgactactccagcccgaatgag

SEQ ID NO: 5171689 - DNA, 25 bp, Homo sapien
ctatcagctgcaaatagaattccag

SEQ ID NO: 5171690 - DNA, 25 bp, Homo sapien
gattattgagggatattaggatgca

SEQ ID NO: 5171691 - DNA, 25 bp, Homo sapien
gcaaaacccaccgaaggctctgtgg

SEQ ID NO: 5171692 - DNA, 25 bp, Homo sapien
tacctaacagtctgaagccttagtt

SEQ ID NO: 5171693 - DNA, 25 bp, Homo sapien
gagccaaaagacagtaagaaggagc

SEQ ID NO: 5171694 - DNA, 25 bp, Homo sapien
tatgtgagcctttgggcaaaatacc

SEQ ID NO: 5171695 - DNA, 25 bp, Homo sapien
ctgcttgcaggactgcccgggctca

SEQ ID NO: 5171696 - DNA, 25 bp, Homo sapien
gggtggccacatcacttgcccatgg

SEQ ID NO: 5171697 - DNA, 25 bp, Homo sapien
ggactgcccgggctcagcaagcttg

SEQ ID NO: 5171698 - DNA, 25 bp, Homo sapien
aaggctcgcagatgagctggctctc

SEQ ID NO: 5171699 - DNA, 25 bp, Homo sapien
tcattaccaagagaccccgcagact

SEQ ID NO: 5171700 - DNA, 25 bp, Homo sapien
tgccacactcgcctcattaccaaga

SEQ ID NO: 5171701 - DNA, 25 bp, Homo sapien
cctgagatgcaccatgtgtcagtga

SEQ ID NO: 5171702 - DNA, 25 bp, Homo sapien
gagaccccgcagactcaggtctgct

SEQ ID NO: 5171703 - DNA, 25 bp, Homo sapien
gtcctgcatgaatgcgaggtgggaa

SEQ ID NO: 5171704 - DNA, 25 bp, Homo sapien
tcctgcatgaatgcgaggtgggaac

SEQ ID NO: 5171705 - DNA, 25 bp, Homo sapien
ctgcatgaatgcgaggtgggaaccc

SEQ ID NO: 5171706 - DNA, 25 bp, Homo sapien
gcatgaatgcgaggtgggaacccat

SEQ ID NO: 5171707 - DNA, 25 bp, Homo sapien
tgaagggacagagcctttcctcgtc

SEQ ID NO: 5171708 - DNA, 25 bp, Homo sapien
gggacagagcctttcctcgtcactg

SEQ ID NO: 5171709 - DNA, 25 bp, Homo sapien
aagggacagagcctttcctcgtcac

SEQ ID NO: 5171710 - DNA, 25 bp, Homo sapien
gacagagcctttcctcgtcactggc

SEQ ID NO: 5171711 - DNA, 25 bp, Homo sapien
agggtcaaaggagggcaccaggatg

SEQ ID NO: 5171712 - DNA, 25 bp, Homo sapien
gtcaccttgaaacacacagtgctta

SEQ ID NO: 5171713 - DNA, 25 bp, Homo sapien
atgaagtcccggcaggggcagaccc

SEQ ID NO: 5171714 - DNA, 25 bp, Homo sapien
cacagtgcttattcttagggtcaaa

SEQ ID NO: 5171715 - DNA, 25 bp, Homo sapien
ctataggcagtctttgcagagagcc

SEQ ID NO: 5171716 - DNA, 25 bp, Homo sapien
tataggcagtctttgcagagagcca

SEQ ID NO: 5171717 - DNA, 25 bp, Homo sapien
ataggcagtctttgcagagagccac

SEQ ID NO: 5171718 - DNA, 25 bp, Homo sapien
tgccagagtccctgcatgacttctg

SEQ ID NO: 5171719 - DNA, 25 bp, Homo sapien
ttctacgaaaaagttcaggctcttg

SEQ ID NO: 5171720 - DNA, 25 bp, Homo sapien
gggcaatgccaattcagaaccttct

SEQ ID NO: 5171721 - DNA, 25 bp, Homo sapien
tgaagactccactgggttgctcgga

SEQ ID NO: 5171722 - DNA, 25 bp, Homo sapien
ccccacggcacacggtctctctcct

SEQ ID NO: 5171723 - DNA, 25 bp, Homo sapien
aggtccccatggctgtccctgagca

SEQ ID NO: 5171724 - DNA, 25 bp, Homo sapien
ccaccagccccacggcacacggtct

SEQ ID NO: 5171725 - DNA, 25 bp, Homo sapien
aagtttcttttgttctgctgccatc

SEQ ID NO: 5171726 - DNA, 25 bp, Homo sapien
aggcacgtccccctgactgaggcag

SEQ ID NO: 5171727 - DNA, 25 bp, Homo sapien
tatgtgtctgggcatggggacatgg

SEQ ID NO: 5171728 - DNA, 25 bp, Homo sapien
aaagaaattacggccaaggtatgtg

SEQ ID NO: 5171729 - DNA, 25 bp, Homo sapien
aaattacggccaaggtatgtgtctg

SEQ ID NO: 5171730 - DNA, 25 bp, Homo sapien
tccggtcgcgccacaaattcttaag

SEQ ID NO: 5171731 - DNA, 25 bp, Homo sapien
acatcattgagcgactgaggcgccc

SEQ ID NO: 5171732 - DNA, 25 bp, Homo sapien
caaccgctcacattaggcagaaggg

SEQ ID NO: 5171733 - DNA, 25 bp, Homo sapien
gatacaattgagacgcactgagcag

SEQ ID NO: 5171734 - DNA, 25 bp, Homo sapien
gagcccaggagagggcggcactggc

SEQ ID NO: 5171735 - DNA, 25 bp, Homo sapien
cccagggattgcaggtcagggaact

SEQ ID NO: 5171736 - DNA, 25 bp, Homo sapien
ctagcaaattcccacaccctagggt

SEQ ID NO: 5171737 - DNA, 25 bp, Homo sapien
agggattgcaggtcagggaactcta

SEQ ID NO: 5171738 - DNA, 25 bp, Homo sapien
tgcatacacgctatggcctggcggg

SEQ ID NO: 5171739 - DNA, 25 bp, Homo sapien
gccttgaacttagggacagccagca

SEQ ID NO: 5171740 - DNA, 25 bp, Homo sapien
taagatcccaaccagcagggtaggc

SEQ ID NO: 5171741 - DNA, 25 bp, Homo sapien
gataatgccctaaacaactggagtg

SEQ ID NO: 5171742 - DNA, 25 bp, Homo sapien
agttcataaattcttgcagccttgt

SEQ ID NO: 5171743 - DNA, 25 bp, Homo sapien
cataaattcttgcagccttgtttcc

SEQ ID NO: 5171744 - DNA, 25 bp, Homo sapien
ttccttgggggctgaagtctggcat

SEQ ID NO: 5171745 - DNA, 25 bp, Homo sapien
ttcataaattcttgcagccttgttt

SEQ ID NO: 5171746 - DNA, 25 bp, Homo sapien
gaaaacattcagtcatgagcagcct

SEQ ID NO: 5171747 - DNA, 25 bp, Homo sapien
tctcccttaacgcagaaaagcctct

SEQ ID NO: 5171748 - DNA, 25 bp, Homo sapien
tctaggagctgttctgagaggccaa

SEQ ID NO: 5171749 - DNA, 25 bp, Homo sapien
gtaaggtccagtatgtggctagcca

SEQ ID NO: 5171750 - DNA, 25 bp, Homo sapien
tcctgacacgctgtcctgagaggcg

SEQ ID NO: 5171751 - DNA, 25 bp, Homo sapien
acagtacatttggacggcgacacct

SEQ ID NO: 5171752 - DNA, 25 bp, Homo sapien
caactacagtggaagggacgtcacc

SEQ ID NO: 5171753 - DNA, 25 bp, Homo sapien
aaagcagtgctctctatgccaggac

SEQ ID NO: 5171754 - DNA, 25 bp, Homo sapien
agcctgcgctgcataggactgagca

SEQ ID NO: 5171755 - DNA, 25 bp, Homo sapien
tctgtgagagatggatcgctccctc

SEQ ID NO: 5171756 - DNA, 25 bp, Homo sapien
cccgggcagtagtggctgaccaata

SEQ ID NO: 5171757 - DNA, 25 bp, Homo sapien
caagacgttctcagctgatgtcacg

SEQ ID NO: 5171758 - DNA, 25 bp, Homo sapien
agcatcctggccgtgttgaagttca

SEQ ID NO: 5171759 - DNA, 25 bp, Homo sapien
gaggtgaactgttgaaatctggaac

SEQ ID NO: 5171760 - DNA, 25 bp, Homo sapien
ttaagtgggattctttgcagcatcc

SEQ ID NO: 5171761 - DNA, 25 bp, Homo sapien
tacttggaacaaggctgatctgtaa

SEQ ID NO: 5171762 - DNA, 25 bp, Homo sapien
ccaaagccatgggtggcgtttcttg

SEQ ID NO: 5171763 - DNA, 25 bp, Homo sapien
atgggtggcgtttcttgagctgcat

SEQ ID NO: 5171764 - DNA, 25 bp, Homo sapien
ccatgggtggcgtttcttgagctgc

SEQ ID NO: 5171765 - DNA, 25 bp, Homo sapien
aaagccatgggtggcgtttcttgag

SEQ ID NO: 5171766 - DNA, 25 bp, Homo sapien
tgccgcttacagagatccaagtgtt

SEQ ID NO: 5171767 - DNA, 25 bp, Homo sapien
tggcacacgactgccactgggtcgg

SEQ ID NO: 5171768 - DNA, 25 bp, Homo sapien
aacaactcgtaccttttactgccag

SEQ ID NO: 5171769 - DNA, 25 bp, Homo sapien
acgtttgtgtgtggatcatgtgttt

SEQ ID NO: 5171770 - DNA, 25 bp, Homo sapien
tcctgtgtctctcttacgagaatgc

SEQ ID NO: 5171771 - DNA, 25 bp, Homo sapien
ttcaccatgcatacttatttctcgg

SEQ ID NO: 5171772 - DNA, 25 bp, Homo sapien
ttctcggtgacaagcttcctgtgtc

SEQ ID NO: 5171773 - DNA, 25 bp, Homo sapien
tctctcttacgagaatgctgaccag

SEQ ID NO: 5171774 - DNA, 25 bp, Homo sapien
ggtacaggaaacttcccgcacagcc

SEQ ID NO: 5171775 - DNA, 25 bp, Homo sapien
aggtacaggaaacttcccgcacagc

SEQ ID NO: 5171776 - DNA, 25 bp, Homo sapien
atcgagagctcccccgagatgaagc

SEQ ID NO: 5171777 - DNA, 25 bp, Homo sapien
ggggccctccggtccatcgagagct

SEQ ID NO: 5171778 - DNA, 25 bp, Homo sapien
cttccatcaatcagtgaagattcaa

SEQ ID NO: 5171779 - DNA, 25 bp, Homo sapien
atcttccatcaatcagtgaagattc

SEQ ID NO: 5171780 - DNA, 25 bp, Homo sapien
tcataatcttccatcaatcagtgaa

SEQ ID NO: 5171781 - DNA, 25 bp, Homo sapien
ataatcttccatcaatcagtgaaga

SEQ ID NO: 5171782 - DNA, 25 bp, Homo sapien
gctggggaactttctggctgctcac

SEQ ID NO: 5171783 - DNA, 25 bp, Homo sapien
cggccagaaaatgccggggaccaag

SEQ ID NO: 5171784 - DNA, 25 bp, Homo sapien
gggaccaaggcaccccagtctgctg

SEQ ID NO: 5171785 - DNA, 25 bp, Homo sapien
ccaccgacgaacctgatgtctcttg

SEQ ID NO: 5171786 - DNA, 25 bp, Homo sapien
aactgacggtgcttccttgaccaga

SEQ ID NO: 5171787 - DNA, 25 bp, Homo sapien
tggtcctttaaatgcccgacggcca

SEQ ID NO: 5171788 - DNA, 25 bp, Homo sapien
ttggagggcttgtccccgagactct

SEQ ID NO: 5171789 - DNA, 25 bp, Homo sapien
tcaggaatggcggtgcctctgtgtt

SEQ ID NO: 5171790 - DNA, 25 bp, Homo sapien
tgtgagcttctgtaggatggtgatc

SEQ ID NO: 5171791 - DNA, 25 bp, Homo sapien
tccctgtggttgactttggtgatca

SEQ ID NO: 5171792 - DNA, 25 bp, Homo sapien
ggtgacttagtgtcaatccatggac

SEQ ID NO: 5171793 - DNA, 25 bp, Homo sapien
tggccttgaagacccttccatgaca

SEQ ID NO: 5171794 - DNA, 25 bp, Homo sapien
gaatggttactccaggtccctggca

SEQ ID NO: 5171795 - DNA, 25 bp, Homo sapien
tgctcatagggaggaatggttactc

SEQ ID NO: 5171796 - DNA, 25 bp, Homo sapien
cctggcacagctggtccagaactgt

SEQ ID NO: 5171797 - DNA, 25 bp, Homo sapien
cctgtaatgggacctctcatgcaca

SEQ ID NO: 5171798 - DNA, 25 bp, Homo sapien
ggagcttacgatcagtcagggatga

SEQ ID NO: 5171799 - DNA, 25 bp, Homo sapien
tgggctattccacgggcatttggct

SEQ ID NO: 5171800 - DNA, 25 bp, Homo sapien
gatgttcgatccactctactgcatg

SEQ ID NO: 5171801 - DNA, 25 bp, Homo sapien
tactgcatgaggagtacctgctaca

SEQ ID NO: 5171802 - DNA, 25 bp, Homo sapien
atgcttgtgtggaaagttgtggtct

SEQ ID NO: 5171803 - DNA, 25 bp, Homo sapien
tgtggaaagttgtggtctgagtgac

SEQ ID NO: 5171804 - DNA, 25 bp, Homo sapien
aatctcacccgctccacaaacacag

SEQ ID NO: 5171805 - DNA, 25 bp, Homo sapien
catggagagggtagggaatgcttgt

SEQ ID NO: 5171806 - DNA, 25 bp, Homo sapien
tggaagccccaggaaaatggccctg

SEQ ID NO: 5171807 - DNA, 25 bp, Homo sapien
agccccaggaaaatggccctgggag

SEQ ID NO: 5171808 - DNA, 25 bp, Homo sapien
ctggaagccccaggaaaatggccct

SEQ ID NO: 5171809 - DNA, 25 bp, Homo sapien
gccccaggaaaatggccctgggagc

SEQ ID NO: 5171810 - DNA, 25 bp, Homo sapien
tgtacattggaagcagagatcttgg

SEQ ID NO: 5171811 - DNA, 25 bp, Homo sapien
ttggcaacctttagacgggctgttc

SEQ ID NO: 5171812 - DNA, 25 bp, Homo sapien
taattggaagaccttgggccacgag

SEQ ID NO: 5171813 - DNA, 25 bp, Homo sapien
gagtctccgcatgcattccctgtgc

SEQ ID NO: 5171814 - DNA, 25 bp, Homo sapien
acagccctgatggtagccttccacg

SEQ ID NO: 5171815 - DNA, 25 bp, Homo sapien
tctgcttggttactcgaaactttcc

SEQ ID NO: 5171816 - DNA, 25 bp, Homo sapien
cagcataagaatcctcccgactgca

SEQ ID NO: 5171817 - DNA, 25 bp, Homo sapien
attcctaccacagccctgatggtag

SEQ ID NO: 5171818 - DNA, 25 bp, Homo sapien
gaggtaggtactggcatgaaaaaat

SEQ ID NO: 5171819 - DNA, 25 bp, Homo sapien
ccacacaccacctcgccttcgtcgg

SEQ ID NO: 5171820 - DNA, 25 bp, Homo sapien
acctcgccttcgtcggcctctgtcc

SEQ ID NO: 5171821 - DNA, 25 bp, Homo sapien
ccattgctagcaagggaggtaggta

SEQ ID NO: 5171822 - DNA, 25 bp, Homo sapien
ccggggtgtctcacagatttccagc

SEQ ID NO: 5171823 - DNA, 25 bp, Homo sapien
cagaaggggtttttgggcagagtct

SEQ ID NO: 5171824 - DNA, 25 bp, Homo sapien
gtctcctttcgttttccctgcagcc

SEQ ID NO: 5171825 - DNA, 25 bp, Homo sapien
actgccaccggggtgtctcacagat

SEQ ID NO: 5171826 - DNA, 25 bp, Homo sapien
gaaattgcatcgaatggaattctgg

SEQ ID NO: 5171827 - DNA, 25 bp, Homo sapien
ctcccttatgaaggaccccaccaca

SEQ ID NO: 5171828 - DNA, 25 bp, Homo sapien
ccaccacagtgcatgtcgccttcct

SEQ ID NO: 5171829 - DNA, 25 bp, Homo sapien
tcctcgggtgtccatgaaattgcat

SEQ ID NO: 5171830 - DNA, 25 bp, Homo sapien
ccttggacacttgcacctggaagtc

SEQ ID NO: 5171831 - DNA, 25 bp, Homo sapien
cctggaagtcatggtgtttggcatc

SEQ ID NO: 5171832 - DNA, 25 bp, Homo sapien
agtcatggtgtttggcatccttcca

SEQ ID NO: 5171833 - DNA, 25 bp, Homo sapien
acttgcacctggaagtcatggtgtt

SEQ ID NO: 5171834 - DNA, 25 bp, Homo sapien
gcctagcgctatggatggggcccct

SEQ ID NO: 5171835 - DNA, 25 bp, Homo sapien
gagtgccagggcctagcgctatgga

SEQ ID NO: 5171836 - DNA, 25 bp, Homo sapien
agtgccagggcctagcgctatggat

SEQ ID NO: 5171837 - DNA, 25 bp, Homo sapien
tagcgctatggatggggcccctgtt

SEQ ID NO: 5171838 - DNA, 25 bp, Homo sapien
atggcagccatgacaagtaactggg

SEQ ID NO: 5171839 - DNA, 25 bp, Homo sapien
atgacaagtaactgggccgcagccc

SEQ ID NO: 5171840 - DNA, 25 bp, Homo sapien
caaggagtcgtaactggcctttgtc

SEQ ID NO: 5171841 - DNA, 25 bp, Homo sapien
tgcagctgtagcccgtcctctggca

SEQ ID NO: 5171842 - DNA, 25 bp, Homo sapien
tccctgctttggaacgggggtcatg

SEQ ID NO: 5171843 - DNA, 25 bp, Homo sapien
caggaatgccgatccctgctttgga

SEQ ID NO: 5171844 - DNA, 25 bp, Homo sapien
catgtcccaggaatgccgatccctg

SEQ ID NO: 5171845 - DNA, 25 bp, Homo sapien
tgtcccaggaatgccgatccctgct

SEQ ID NO: 5171846 - DNA, 25 bp, Homo sapien
aatgctcataaaagttggttaactg

SEQ ID NO: 5171847 - DNA, 25 bp, Homo sapien
aagttggttaactgtgccttcaggg

SEQ ID NO: 5171848 - DNA, 25 bp, Homo sapien
cggagacggcccataaatgctcata

SEQ ID NO: 5171849 - DNA, 25 bp, Homo sapien
ggctgtatacgccatcggagacggc

SEQ ID NO: 5171850 - DNA, 25 bp, Homo sapien
gcaaagacttggatctgttcctcct

SEQ ID NO: 5171851 - DNA, 25 bp, Homo sapien
ttgcaaagacttggatctgttcctc

SEQ ID NO: 5171852 - DNA, 25 bp, Homo sapien
tgcaaagacttggatctgttcctcc

SEQ ID NO: 5171853 - DNA, 25 bp, Homo sapien
ttgattccccattaacatcatccac

SEQ ID NO: 5171854 - DNA, 25 bp, Homo sapien
ggtaaatctttgacataactctcgc

SEQ ID NO: 5171855 - DNA, 25 bp, Homo sapien
gaaccgtctctgagtactgaaacag

SEQ ID NO: 5171856 - DNA, 25 bp, Homo sapien
tattagaggttcgatctgggccagg

SEQ ID NO: 5171857 - DNA, 25 bp, Homo sapien
gaattccagtcctaactacaaggat

SEQ ID NO: 5171858 - DNA, 25 bp, Homo sapien
aagtgggtgaagaatatgaactgac

SEQ ID NO: 5171859 - DNA, 25 bp, Homo sapien
catcaacaagtgggtgaagaatatg

SEQ ID NO: 5171860 - DNA, 25 bp, Homo sapien
aacaagtgggtgaagaatatgaact

SEQ ID NO: 5171861 - DNA, 25 bp, Homo sapien
atcaacaagtgggtgaagaatatga

SEQ ID NO: 5171862 - DNA, 25 bp, Homo sapien
tttacacagcaaagcctagtggcta

SEQ ID NO: 5171863 - DNA, 25 bp, Homo sapien
gccactagctggcttaaagcagagc

SEQ ID NO: 5171864 - DNA, 25 bp, Homo sapien
ctgcctaggttcttatctgagctct

SEQ ID NO: 5171865 - DNA, 25 bp, Homo sapien
tagtggctaaaagcacgagccacgg

SEQ ID NO: 5171866 - DNA, 25 bp, Homo sapien
tatttgagagggagggaaggctggt

SEQ ID NO: 5171867 - DNA, 25 bp, Homo sapien
agagggagggaaggctggtgttatt

SEQ ID NO: 5171868 - DNA, 25 bp, Homo sapien
tgagagggagggaaggctggtgtta

SEQ ID NO: 5171869 - DNA, 25 bp, Homo sapien
cttgtgtatttgagagggagggaag

SEQ ID NO: 5171870 - DNA, 25 bp, Homo sapien
ccagatggatcgctggcgatgtcgt

SEQ ID NO: 5171871 - DNA, 25 bp, Homo sapien
ggatcgctggcgatgtcgttccgat

SEQ ID NO: 5171872 - DNA, 25 bp, Homo sapien
ggcgatgtcgttccgatcccacgat

SEQ ID NO: 5171873 - DNA, 25 bp, Homo sapien
tgtcgttccgatcccacgatcgttt

SEQ ID NO: 5171874 - DNA, 25 bp, Homo sapien
taggactggctgttgggttggtttc

SEQ ID NO: 5171875 - DNA, 25 bp, Homo sapien
agttaggactggctgttgggttggt

SEQ ID NO: 5171876 - DNA, 25 bp, Homo sapien
ttagttaggactggctgttgggttg

SEQ ID NO: 5171877 - DNA, 25 bp, Homo sapien
gactggctgttgggttggtttccac

SEQ ID NO: 5171878 - DNA, 25 bp, Homo sapien
tcaccggacatttcagactcagctt

SEQ ID NO: 5171879 - DNA, 25 bp, Homo sapien
aagtagagattgctttcagctgcag

SEQ ID NO: 5171880 - DNA, 25 bp, Homo sapien
tgttcaaatgagaccttaaccacgt

SEQ ID NO: 5171881 - DNA, 25 bp, Homo sapien
gcacctctaatttctcaccggacat

SEQ ID NO: 5171882 - DNA, 25 bp, Homo sapien
cctggccaaggattgtgttcttaaa

SEQ ID NO: 5171883 - DNA, 25 bp, Homo sapien
ttaccatgtatattgaccaatgatt

SEQ ID NO: 5171884 - DNA, 25 bp, Homo sapien
tagatatgataataggtattcctgt

SEQ ID NO: 5171885 - DNA, 25 bp, Homo sapien
ccaaactgataggtgaaacatttag

SEQ ID NO: 5171886 - DNA, 25 bp, Homo sapien
ccttgtcagaagaggtgtctggatc

SEQ ID NO: 5171887 - DNA, 25 bp, Homo sapien
ctcaacccttgtcagaagaggtgtc

SEQ ID NO: 5171888 - DNA, 25 bp, Homo sapien
aacccttgtcagaagaggtgtctgg

SEQ ID NO: 5171889 - DNA, 25 bp, Homo sapien
tcaacccttgtcagaagaggtgtct

SEQ ID NO: 5171890 - DNA, 25 bp, Homo sapien
atgagggtccatccggtcaccagtg

SEQ ID NO: 5171891 - DNA, 25 bp, Homo sapien
gggatgagggtccatccggtcacca

SEQ ID NO: 5171892 - DNA, 25 bp, Homo sapien
agggtccatccggtcaccagtgttt

SEQ ID NO: 5171893 - DNA, 25 bp, Homo sapien
ggtccatccggtcaccagtgtttac

SEQ ID NO: 5171894 - DNA, 25 bp, Homo sapien
gagccctccataggttctgtcccct

SEQ ID NO: 5171895 - DNA, 25 bp, Homo sapien
tgactcaaacgtgctaccaggctga

SEQ ID NO: 5171896 - DNA, 25 bp, Homo sapien
tcacttgggaatccaccgggactgt

SEQ ID NO: 5171897 - DNA, 25 bp, Homo sapien
tatgacctgtagaataccctctggg

SEQ ID NO: 5171898 - DNA, 25 bp, Homo sapien
ggctgagactcgaatcccgtgtgca

SEQ ID NO: 5171899 - DNA, 25 bp, Homo sapien
ctctggccgtcgttgagagggctgc

SEQ ID NO: 5171900 - DNA, 25 bp, Homo sapien
taccaggtctcctccggattacaag

SEQ ID NO: 5171901 - DNA, 25 bp, Homo sapien
ctctggacagccgtggtataaatgg

SEQ ID NO: 5171902 - DNA, 25 bp, Homo sapien
atggaaagcaaagagtccactgtac

SEQ ID NO: 5171903 - DNA, 25 bp, Homo sapien
tcctgcaagtgactgtcgtttttgc

SEQ ID NO: 5171904 - DNA, 25 bp, Homo sapien
tgcaagtgactgtcgtttttgcctg

SEQ ID NO: 5171905 - DNA, 25 bp, Homo sapien
caagtgactgtcgtttttgcctgtt

SEQ ID NO: 5171906 - DNA, 25 bp, Homo sapien
agtgactgtcgtttttgcctgtttc

SEQ ID NO: 5171907 - DNA, 25 bp, Homo sapien
tctgtggaaggtcctgttggttttc

SEQ ID NO: 5171908 - DNA, 25 bp, Homo sapien
ctctgtggaaggtcctgttggtttt

SEQ ID NO: 5171909 - DNA, 25 bp, Homo sapien
agtactctttatctcttgctgtgca

SEQ ID NO: 5171910 - DNA, 25 bp, Homo sapien
gtcttgtgtactttggcccagtctc

SEQ ID NO: 5171911 - DNA, 25 bp, Homo sapien
tactgatgcaaatgggttcccttta

SEQ ID NO: 5171912 - DNA, 25 bp, Homo sapien
cttagtctatccctaaagaactggg

SEQ ID NO: 5171913 - DNA, 25 bp, Homo sapien
aagccagtgttgatgagaaaatgat

SEQ ID NO: 5171914 - DNA, 25 bp, Homo sapien
aaaatccccacatatatacaaagcc

SEQ ID NO: 5171915 - DNA, 25 bp, Homo sapien
cctctattttcaccaccatcagaaa

SEQ ID NO: 5171916 - DNA, 25 bp, Homo sapien
tctgaggtctgcattgttatgcaag

SEQ ID NO: 5171917 - DNA, 25 bp, Homo sapien
cttgtcttatctcccctggtaaaga

SEQ ID NO: 5171918 - DNA, 25 bp, Homo sapien
tccttgtcttatctcccctggtaaa

SEQ ID NO: 5171919 - DNA, 25 bp, Homo sapien
tgtcttatctcccctggtaaagact

SEQ ID NO: 5171920 - DNA, 25 bp, Homo sapien
tttccttgtcttatctcccctggta

SEQ ID NO: 5171921 - DNA, 25 bp, Homo sapien
ttccacttggaacactcttttccaa

SEQ ID NO: 5171922 - DNA, 25 bp, Homo sapien
gctgattcgagtatgtgtccacacc

SEQ ID NO: 5171923 - DNA, 25 bp, Homo sapien
cacccacacggtcttttccacttgg

SEQ ID NO: 5171924 - DNA, 25 bp, Homo sapien
aatccccacttttgccgatcttgcc

SEQ ID NO: 5171925 - DNA, 25 bp, Homo sapien
tcactcccgtgttgattctgctcag

SEQ ID NO: 5171926 - DNA, 25 bp, Homo sapien
gaatgcagctctagtcttacttcct

SEQ ID NO: 5171927 - DNA, 25 bp, Homo sapien
tctgctcagtgtcagctcggtggaa

SEQ ID NO: 5171928 - DNA, 25 bp, Homo sapien
tccactctgattttactgctctcct

SEQ ID NO: 5171929 - DNA, 25 bp, Homo sapien
cttttcgtgtgtggattgcataagc

SEQ ID NO: 5171930 - DNA, 25 bp, Homo sapien
tgacacttcagagacgcctttaaaa

SEQ ID NO: 5171931 - DNA, 25 bp, Homo sapien
tctggcaagatcagttgctgacact

SEQ ID NO: 5171932 - DNA, 25 bp, Homo sapien
tcttataaggagtgggatttggttc

SEQ ID NO: 5171933 - DNA, 25 bp, Homo sapien
tatgcgtttacggttcctccgtgtc

SEQ ID NO: 5171934 - DNA, 25 bp, Homo sapien
tacacttgatgaacctacacagaca

SEQ ID NO: 5171935 - DNA, 25 bp, Homo sapien
cgttatcaatagatcccaccagagt

SEQ ID NO: 5171936 - DNA, 25 bp, Homo sapien
cattccattgcctggatgtagcaaa

SEQ ID NO: 5171937 - DNA, 25 bp, Homo sapien
gagtgtaatcatacccaagaatcta

SEQ ID NO: 5171938 - DNA, 25 bp, Homo sapien
caggacagacaggtatatggctggc

SEQ ID NO: 5171939 - DNA, 25 bp, Homo sapien
caagaatctatgaggtggtcatttc

SEQ ID NO: 5171940 - DNA, 25 bp, Homo sapien
ccctaagtaggtaatggagagtgta

SEQ ID NO: 5171941 - DNA, 25 bp, Homo sapien
gataaacccggaggctgcttctgag

SEQ ID NO: 5171942 - DNA, 25 bp, Homo sapien
tgttttcctgcctagcgtccggctg

SEQ ID NO: 5171943 - DNA, 25 bp, Homo sapien
aacaggcagaccagcggtttgggaa

SEQ ID NO: 5171944 - DNA, 25 bp, Homo sapien
ggaactattgtggagaatctgcagg

SEQ ID NO: 5171945 - DNA, 25 bp, Homo sapien
taaacacatgtcaccaggaatgttg

SEQ ID NO: 5171946 - DNA, 25 bp, Homo sapien
gtaaacacatgtcaccaggaatgtt

SEQ ID NO: 5171947 - DNA, 25 bp, Homo sapien
tgttcattgctacaagcttccctct

SEQ ID NO: 5171948 - DNA, 25 bp, Homo sapien
tgcctcattagatcgttcagtcttt

SEQ ID NO: 5171949 - DNA, 25 bp, Homo sapien
tgtttcaagaaatcgtcaaatttcc

SEQ ID NO: 5171950 - DNA, 25 bp, Homo sapien
catttttgatataggtgttcattgc

SEQ ID NO: 5171951 - DNA, 25 bp, Homo sapien
gttttccaatttgttagcatgtagt

SEQ ID NO: 5171952 - DNA, 25 bp, Homo sapien
tgaggttttctcgttctccatggtt

SEQ ID NO: 5171953 - DNA, 25 bp, Homo sapien
tctcgttctccatggttcatcttgg

SEQ ID NO: 5171954 - DNA, 25 bp, Homo sapien
ttcacaatagtctctaattattctt

SEQ ID NO: 5171955 - DNA, 25 bp, Homo sapien
gatgctaccccaaccactctatcct

SEQ ID NO: 5171956 - DNA, 25 bp, Homo sapien
tgatctgggcactgcgtggagcttc

SEQ ID NO: 5171957 - DNA, 25 bp, Homo sapien
tcagtattaagttcaatattctctg

SEQ ID NO: 5171958 - DNA, 25 bp, Homo sapien
attaagttcaatattctctgtgatc

SEQ ID NO: 5171959 - DNA, 25 bp, Homo sapien
tgttgtctgctacatcgggccatat

SEQ ID NO: 5171960 - DNA, 25 bp, Homo sapien
gctacatcgggccatattttttgac

SEQ ID NO: 5171961 - DNA, 25 bp, Homo sapien
ctacatcgggccatattttttgaca

SEQ ID NO: 5171962 - DNA, 25 bp, Homo sapien
tgtctgctacatcgggccatatttt

SEQ ID NO: 5171963 - DNA, 25 bp, Homo sapien
tggtgaaccgtagcccagaactaag

SEQ ID NO: 5171964 - DNA, 25 bp, Homo sapien
ctggccagagatggtgaaccgtagc

SEQ ID NO: 5171965 - DNA, 25 bp, Homo sapien
gagagggaccaagaaggtggaaaga

SEQ ID NO: 5171966 - DNA, 25 bp, Homo sapien
ccagaactaagtgtatcattcagag

SEQ ID NO: 5171967 - DNA, 25 bp, Homo sapien
tccagccactagtctttgccagggc

SEQ ID NO: 5171968 - DNA, 25 bp, Homo sapien
ccagccactagtctttgccagggca

SEQ ID NO: 5171969 - DNA, 25 bp, Homo sapien
ttccagccactagtctttgccaggg

SEQ ID NO: 5171970 - DNA, 25 bp, Homo sapien
ccaagctgactaaagcctctgggcc

SEQ ID NO: 5171971 - DNA, 25 bp, Homo sapien
gatttacttagtccctttacagcaa

SEQ ID NO: 5171972 - DNA, 25 bp, Homo sapien
gagacctttgtgaaaactgtggagt

SEQ ID NO: 5171973 - DNA, 25 bp, Homo sapien
ttttgatatcaagagacctttgtga

SEQ ID NO: 5171974 - DNA, 25 bp, Homo sapien
ttacagcaaccttcaggcagcagtc

SEQ ID NO: 5171975 - DNA, 25 bp, Homo sapien
atatgactatggatgtcaattttca

SEQ ID NO: 5171976 - DNA, 25 bp, Homo sapien
tcttttggtagaatatgactatgga

SEQ ID NO: 5171977 - DNA, 25 bp, Homo sapien
ggtagaatatgactatggatgtcaa

SEQ ID NO: 5171978 - DNA, 25 bp, Homo sapien
ggccattcttttggtagaatatgac

SEQ ID NO: 5171979 - DNA, 25 bp, Homo sapien
tgtagttggcatgtatcttcccagc

SEQ ID NO: 5171980 - DNA, 25 bp, Homo sapien
caggcagtgtcctaaaatagactaa

SEQ ID NO: 5171981 - DNA, 25 bp, Homo sapien
gagatgtcactgtgcaaaagcttca

SEQ ID NO: 5171982 - DNA, 25 bp, Homo sapien
tagaagtccttgaaaccgatcacat

SEQ ID NO: 5171983 - DNA, 25 bp, Homo sapien
cttcctctttttatattcattcaaa

SEQ ID NO: 5171984 - DNA, 25 bp, Homo sapien
ttcctctttttatattcattcaaaa

SEQ ID NO: 5171985 - DNA, 25 bp, Homo sapien
tcctctttttatattcattcaaaag

SEQ ID NO: 5171986 - DNA, 25 bp, Homo sapien
cctctttttatattcattcaaaagt

SEQ ID NO: 5171987 - DNA, 25 bp, Homo sapien
tattaagcctgaacaaacctctagc

SEQ ID NO: 5171988 - DNA, 25 bp, Homo sapien
tggtgtgaaagtactggcagaatgc

SEQ ID NO: 5171989 - DNA, 25 bp, Homo sapien
aaaagttgaaacattatcggtggtg

SEQ ID NO: 5171990 - DNA, 25 bp, Homo sapien
ggtaaaacctgatattaagcctgaa

SEQ ID NO: 5171991 - DNA, 25 bp, Homo sapien
cttcctcactctactggtgtttcct

SEQ ID NO: 5171992 - DNA, 25 bp, Homo sapien
ttcctcactctactggtgtttcctg

SEQ ID NO: 5171993 - DNA, 25 bp, Homo sapien
aaagcaaactacttgcatctgaatc

SEQ ID NO: 5171994 - DNA, 25 bp, Homo sapien
ctccaaagcaaactacttgcatctg

SEQ ID NO: 5171995 - DNA, 25 bp, Homo sapien
tgctgtggtgttggagctgcaccca

SEQ ID NO: 5171996 - DNA, 25 bp, Homo sapien
tgcacccagcctccgtagccaaacc

SEQ ID NO: 5171997 - DNA, 25 bp, Homo sapien
cttgctgtggtgttggagctgcacc

SEQ ID NO: 5171998 - DNA, 25 bp, Homo sapien
gtggtgttggagctgcacccagcct

SEQ ID NO: 5171999 - DNA, 25 bp, Homo sapien
ttctggatcccagcaattctctcgc

SEQ ID NO: 5172000 - DNA, 25 bp, Homo sapien
agcaattctctcgcaccactctgaa

SEQ ID NO: 5172001 - DNA, 25 bp, Homo sapien
tatgatgcaccgagacaaactacag

SEQ ID NO: 5172002 - DNA, 25 bp, Homo sapien
tttccaaccctgatgtgtcagtggg

SEQ ID NO: 5172003 - DNA, 25 bp, Homo sapien
ggtcagaagttaccatcacataaag

SEQ ID NO: 5172004 - DNA, 25 bp, Homo sapien
cagctttgaaacgaacacttcctaa

SEQ ID NO: 5172005 - DNA, 25 bp, Homo sapien
acaggaactgtggaaagggcttgca

SEQ ID NO: 5172006 - DNA, 25 bp, Homo sapien
ccagtagctaaacatgacaggaact

SEQ ID NO: 5172007 - DNA, 25 bp, Homo sapien
tagctaaacatgacaggaactgtgg

SEQ ID NO: 5172008 - DNA, 25 bp, Homo sapien
gaactgtggaaagggcttgcactgt

SEQ ID NO: 5172009 - DNA, 25 bp, Homo sapien
caacaccaaggagatggcttgaggt

SEQ ID NO: 5172010 - DNA, 25 bp, Homo sapien
ttcaacaccaaggagatggcttgag

SEQ ID NO: 5172011 - DNA, 25 bp, Homo sapien
tcaacaccaaggagatggcttgagg

SEQ ID NO: 5172012 - DNA, 25 bp, Homo sapien
aacaccaaggagatggcttgaggtt

SEQ ID NO: 5172013 - DNA, 25 bp, Homo sapien
gaaagagctcctgcgcgttcaggtc

SEQ ID NO: 5172014 - DNA, 25 bp, Homo sapien
tcacaacggtgctggcaaggtcgtt

SEQ ID NO: 5172015 - DNA, 25 bp, Homo sapien
cgttcaggtcccactcgttgacgtg

SEQ ID NO: 5172016 - DNA, 25 bp, Homo sapien
caaggtcgttgtttaaaagctggca

SEQ ID NO: 5172017 - DNA, 25 bp, Homo sapien
gttggctgagcagccccgctactca

SEQ ID NO: 5172018 - DNA, 25 bp, Homo sapien
tggcgttggctgagcagccccgcta

SEQ ID NO: 5172019 - DNA, 25 bp, Homo sapien
gcgttggctgagcagccccgctact

SEQ ID NO: 5172020 - DNA, 25 bp, Homo sapien
ctggcgttggctgagcagccccgct

SEQ ID NO: 5172021 - DNA, 25 bp, Homo sapien
gagcatgtatgattgggtttactca

SEQ ID NO: 5172022 - DNA, 25 bp, Homo sapien
gcatgtatgattgggtttactcact

SEQ ID NO: 5172023 - DNA, 25 bp, Homo sapien
ctgagcatgtatgattgggtttact

SEQ ID NO: 5172024 - DNA, 25 bp, Homo sapien
gtatgattgggtttactcactaaaa

SEQ ID NO: 5172025 - DNA, 25 bp, Homo sapien
tgagtgagcagataccaggtactgt

SEQ ID NO: 5172026 - DNA, 25 bp, Homo sapien
agcagataccaggtactgttttggg

SEQ ID NO: 5172027 - DNA, 25 bp, Homo sapien
ctttgatgagtgagcagataccagg

SEQ ID NO: 5172028 - DNA, 25 bp, Homo sapien
agagggttactttgatgagtgagca

SEQ ID NO: 5172029 - DNA, 25 bp, Homo sapien
cccagggatgcacgaacagggaaca

SEQ ID NO: 5172030 - DNA, 25 bp, Homo sapien
agggatgcacgaacagggaacactt

SEQ ID NO: 5172031 - DNA, 25 bp, Homo sapien
gtcccagggatgcacgaacagggaa

SEQ ID NO: 5172032 - DNA, 25 bp, Homo sapien
cagggatgcacgaacagggaacact

SEQ ID NO: 5172033 - DNA, 25 bp, Homo sapien
caagccaagggagccagtatttggc

SEQ ID NO: 5172034 - DNA, 25 bp, Homo sapien
caagggagccagtatttggccattc

SEQ ID NO: 5172035 - DNA, 25 bp, Homo sapien
gagccagtatttggccattcgtcca

SEQ ID NO: 5172036 - DNA, 25 bp, Homo sapien
tacaagccaagggagccagtatttg

SEQ ID NO: 5172037 - DNA, 25 bp, Homo sapien
agagttggtcctctgttccagaccc

SEQ ID NO: 5172038 - DNA, 25 bp, Homo sapien
gcattaatccaagtaagagctcagt

SEQ ID NO: 5172039 - DNA, 25 bp, Homo sapien
ccctatttgacataataggtttcca

SEQ ID NO: 5172040 - DNA, 25 bp, Homo sapien
gctgctattactcataatcctgtta

SEQ ID NO: 5172041 - DNA, 25 bp, Homo sapien
gagattggatagagcaaatggagct

SEQ ID NO: 5172042 - DNA, 25 bp, Homo sapien
tgatgagagattggatagagcaaat

SEQ ID NO: 5172043 - DNA, 25 bp, Homo sapien
tgagagattggatagagcaaatgga

SEQ ID NO: 5172044 - DNA, 25 bp, Homo sapien
attggatagagcaaatggagctttc

SEQ ID NO: 5172045 - DNA, 25 bp, Homo sapien
caaatggctatggtggtctctgctg

SEQ ID NO: 5172046 - DNA, 25 bp, Homo sapien
caccatgtgcgaaacacactttcag

SEQ ID NO: 5172047 - DNA, 25 bp, Homo sapien
tgtgcgaaacacactttcagtttgg

SEQ ID NO: 5172048 - DNA, 25 bp, Homo sapien
cacccatgatcatggagcaaatggc

SEQ ID NO: 5172049 - DNA, 25 bp, Homo sapien
ctgaatccatgggagattcttccca

SEQ ID NO: 5172050 - DNA, 25 bp, Homo sapien
gctgaatccatgggagattcttccc

SEQ ID NO: 5172051 - DNA, 25 bp, Homo sapien
ccaaggtatttcttcgggttcatgg

SEQ ID NO: 5172052 - DNA, 25 bp, Homo sapien
caaggtatttcttcgggttcatggg

SEQ ID NO: 5172053 - DNA, 25 bp, Homo sapien
accaaggtatttcttcgggttcatg

SEQ ID NO: 5172054 - DNA, 25 bp, Homo sapien
agaggatcatgaaccaaagcatctg

SEQ ID NO: 5172055 - DNA, 25 bp, Homo sapien
caacagagagattggcgaggagact

SEQ ID NO: 5172056 - DNA, 25 bp, Homo sapien
tctcagggcatgatacacaagaccc

SEQ ID NO: 5172057 - DNA, 25 bp, Homo sapien
gagaccctggagagaatcccctgtg

SEQ ID NO: 5172058 - DNA, 25 bp, Homo sapien
tacttaaagggtgggtgtgccacca

SEQ ID NO: 5172059 - DNA, 25 bp, Homo sapien
gaaggtgctgatagtatcccttaga

SEQ ID NO: 5172060 - DNA, 25 bp, Homo sapien
cctgtcccctggccaatgtgtattg

SEQ ID NO: 5172061 - DNA, 25 bp, Homo sapien
taacatgaagcatttgccatatttt

SEQ ID NO: 5172062 - DNA, 25 bp, Homo sapien
tgctgatagtatcccttagaaaatg

SEQ ID NO: 5172063 - DNA, 25 bp, Homo sapien
tctattgaggattccagtacacagg

SEQ ID NO: 5172064 - DNA, 25 bp, Homo sapien
tgttaactcgtcacaccaactctgc

SEQ ID NO: 5172065 - DNA, 25 bp, Homo sapien
gacttgaactctctcgcttaccaca

SEQ ID NO: 5172066 - DNA, 25 bp, Homo sapien
taactagtagtagagccaggacttg

SEQ ID NO: 5172067 - DNA, 25 bp, Homo sapien
tagggagttctgcaaacacaaagat

SEQ ID NO: 5172068 - DNA, 25 bp, Homo sapien
gaattctaccttctggacaggtgct

SEQ ID NO: 5172069 - DNA, 25 bp, Homo sapien
cctgctgggatgcatgaactttttc

SEQ ID NO: 5172070 - DNA, 25 bp, Homo sapien
ggtatccgtcataatcatgcaccag

SEQ ID NO: 5172071 - DNA, 25 bp, Homo sapien
gggtgataggataggagtatattct

SEQ ID NO: 5172072 - DNA, 25 bp, Homo sapien
tggaataaagctgccaagaactttt

SEQ ID NO: 5172073 - DNA, 25 bp, Homo sapien
cctaggagtaaaactgttgggtgat

SEQ ID NO: 5172074 - DNA, 25 bp, Homo sapien
aggataggagtatattctactaaca

SEQ ID NO: 5172075 - DNA, 25 bp, Homo sapien
ggatcagttcctataaacaattcct

SEQ ID NO: 5172076 - DNA, 25 bp, Homo sapien
cagcaggtgtcactattaggtctct

SEQ ID NO: 5172077 - DNA, 25 bp, Homo sapien
gaaaatcccctatctctggatcagt

SEQ ID NO: 5172078 - DNA, 25 bp, Homo sapien
agaatgatacattgcaattgattcc

SEQ ID NO: 5172079 - DNA, 25 bp, Homo sapien
tggactctattagtttcccaggttc

SEQ ID NO: 5172080 - DNA, 25 bp, Homo sapien
ccaggttccagctcacctagtggaa

SEQ ID NO: 5172081 - DNA, 25 bp, Homo sapien
tcttccatggactctattagtttcc

SEQ ID NO: 5172082 - DNA, 25 bp, Homo sapien
ggttccagctcacctagtggaaagg

SEQ ID NO: 5172083 - DNA, 25 bp, Homo sapien
aatgccagggcattgccggctttga

SEQ ID NO: 5172084 - DNA, 25 bp, Homo sapien
tcaagacccaaaaatgccagggcat

SEQ ID NO: 5172085 - DNA, 25 bp, Homo sapien
gggcattgccggctttgagtttatt

SEQ ID NO: 5172086 - DNA, 25 bp, Homo sapien
gttttctctcaagacccaaaaatgc

SEQ ID NO: 5172087 - DNA, 25 bp, Homo sapien
taatttaggatatttgggacattca

SEQ ID NO: 5172088 - DNA, 25 bp, Homo sapien
attttgttgatacctgttgatacat

SEQ ID NO: 5172089 - DNA, 25 bp, Homo sapien
catgaaataatgtactgcttttcag

SEQ ID NO: 5172090 - DNA, 25 bp, Homo sapien
tgcacatgaaataatgtactgcttt

SEQ ID NO: 5172091 - DNA, 25 bp, Homo sapien
aaatcattttttatttgcacatgaa

SEQ ID NO: 5172092 - DNA, 25 bp, Homo sapien
aaataatgtactgcttttcagaatg

SEQ ID NO: 5172093 - DNA, 25 bp, Homo sapien
taaaatggatgtctcattcagtctg

SEQ ID NO: 5172094 - DNA, 25 bp, Homo sapien
acattctgctcggtattttaaaatc

SEQ ID NO: 5172095 - DNA, 25 bp, Homo sapien
ctaccctggtattgccctattaact

SEQ ID NO: 5172096 - DNA, 25 bp, Homo sapien
caaaagagcttctggtaggagtaaa

SEQ ID NO: 5172097 - DNA, 25 bp, Homo sapien
cagatgaaccatagatttcatcacc

SEQ ID NO: 5172098 - DNA, 25 bp, Homo sapien
aataatgaatgaatccatgcttgat

SEQ ID NO: 5172099 - DNA, 25 bp, Homo sapien
ccagaggcagatgaaccatagattt

SEQ ID NO: 5172100 - DNA, 25 bp, Homo sapien
gaggcagatgaaccatagatttcat

SEQ ID NO: 5172101 - DNA, 25 bp, Homo sapien
aaaataaccttcactgtcgcagcct

SEQ ID NO: 5172102 - DNA, 25 bp, Homo sapien
tgctccgcgccgcttgtcattggga

SEQ ID NO: 5172103 - DNA, 25 bp, Homo sapien
agtctcgtaggcgtgcgactccggc

SEQ ID NO: 5172104 - DNA, 25 bp, Homo sapien
tcctttagacgggaggtctagcggc

SEQ ID NO: 5172105 - DNA, 25 bp, Homo sapien
ttcctcctccgcccgctccttcatt

SEQ ID NO: 5172106 - DNA, 25 bp, Homo sapien
cctcctccgcccgctccttcattca

SEQ ID NO: 5172107 - DNA, 25 bp, Homo sapien
caccccccgcccctcctggctcgcg

SEQ ID NO: 5172108 - DNA, 25 bp, Homo sapien
tcctccgcccgctccttcattcacc

SEQ ID NO: 5172109 - DNA, 25 bp, Homo sapien
attgagacgctgtcccatctcctgg

SEQ ID NO: 5172110 - DNA, 25 bp, Homo sapien
tgttcccgagtaaagaaccagcgag

SEQ ID NO: 5172111 - DNA, 25 bp, Homo sapien
gcggctcggcgtgttctccagctgt

SEQ ID NO: 5172112 - DNA, 25 bp, Homo sapien
tgctggcggcacgagagctctttat

SEQ ID NO: 5172113 - DNA, 25 bp, Homo sapien
gcgactgcccgagccggaacattac

SEQ ID NO: 5172114 - DNA, 25 bp, Homo sapien
attacttccctgaccgcggcgccga

SEQ ID NO: 5172115 - DNA, 25 bp, Homo sapien
agcggcggcgaacagaaaaggatac

SEQ ID NO: 5172116 - DNA, 25 bp, Homo sapien
cagattacacaacgcaggctcctgg

SEQ ID NO: 5172117 - DNA, 25 bp, Homo sapien
ggtgaaagaatggtgcatataaaac

SEQ ID NO: 5172118 - DNA, 25 bp, Homo sapien
aacaatcgcagtgtttattgtaagc

SEQ ID NO: 5172119 - DNA, 25 bp, Homo sapien
gaatggtgcatataaaacctgtgca

SEQ ID NO: 5172120 - DNA, 25 bp, Homo sapien
aaaacctgtgcatataaacaatcgc

SEQ ID NO: 5172121 - DNA, 25 bp, Homo sapien
gcagagcttaacagtgccttgcagt

SEQ ID NO: 5172122 - DNA, 25 bp, Homo sapien
tttttagcttaaaaggcctggcaga

SEQ ID NO: 5172123 - DNA, 25 bp, Homo sapien
gatgtatcacagaacgaccaggctt

SEQ ID NO: 5172124 - DNA, 25 bp, Homo sapien
gatttaccctcaaatttgcggacag

SEQ ID NO: 5172125 - DNA, 25 bp, Homo sapien
attcaatttcagaccaccccctttg

SEQ ID NO: 5172126 - DNA, 25 bp, Homo sapien
tcaatttcagaccaccccctttgcc

SEQ ID NO: 5172127 - DNA, 25 bp, Homo sapien
ttcaatttcagaccaccccctttgc

SEQ ID NO: 5172128 - DNA, 25 bp, Homo sapien
gaattactatagtgtgaatggccaa

SEQ ID NO: 5172129 - DNA, 25 bp, Homo sapien
aattctatttgctggtggatacaaa

SEQ ID NO: 5172130 - DNA, 25 bp, Homo sapien
tacaaatgactatagcccacaccgt

SEQ ID NO: 5172131 - DNA, 25 bp, Homo sapien
attagtgtgaaagtgcacatttgcc

SEQ ID NO: 5172132 - DNA, 25 bp, Homo sapien
aacagttactcacactaggcattca

SEQ ID NO: 5172133 - DNA, 25 bp, Homo sapien
ccccaatcatggagctatagcaaca

SEQ ID NO: 5172134 - DNA, 25 bp, Homo sapien
ccgaaagcctaatcataacgtaaca

SEQ ID NO: 5172135 - DNA, 25 bp, Homo sapien
gtatcctctctgaatccttgcatca

SEQ ID NO: 5172136 - DNA, 25 bp, Homo sapien
gactattacagctcagaaattggaa

SEQ ID NO: 5172137 - DNA, 25 bp, Homo sapien
aatattcagcaagctctagtcagac

SEQ ID NO: 5172138 - DNA, 25 bp, Homo sapien
tgccaagtgtgagcctatcaaacca

SEQ ID NO: 5172139 - DNA, 25 bp, Homo sapien
aattttgctgcactagaaacaccag

SEQ ID NO: 5172140 - DNA, 25 bp, Homo sapien
ctttcacaggtaaacttaattcttg

SEQ ID NO: 5172141 - DNA, 25 bp, Homo sapien
aacttaattcttggagggtcctgct

SEQ ID NO: 5172142 - DNA, 25 bp, Homo sapien
cacaggtaaacttaattcttggagg

SEQ ID NO: 5172143 - DNA, 25 bp, Homo sapien
aattcttggagggtcctgctgcagt

SEQ ID NO: 5172144 - DNA, 25 bp, Homo sapien
cactatcttgttgaaggaacagaaa

SEQ ID NO: 5172145 - DNA, 25 bp, Homo sapien
ttcactatcttgttgaaggaacaga

SEQ ID NO: 5172146 - DNA, 25 bp, Homo sapien
tcactatcttgttgaaggaacagaa

SEQ ID NO: 5172147 - DNA, 25 bp, Homo sapien
cttcactatcttgttgaaggaacag

SEQ ID NO: 5172148 - DNA, 25 bp, Homo sapien
gcagaaaagataaaactctggtcat

SEQ ID NO: 5172149 - DNA, 25 bp, Homo sapien
ctgcagaaaagataaaactctggtc

SEQ ID NO: 5172150 - DNA, 25 bp, Homo sapien
tgcagaaaagataaaactctggtca

SEQ ID NO: 5172151 - DNA, 25 bp, Homo sapien
gcatgtgctactttgataacatgtt

SEQ ID NO: 5172152 - DNA, 25 bp, Homo sapien
ttttgcagccaaaaataatgcagta

SEQ ID NO: 5172153 - DNA, 25 bp, Homo sapien
aggatgaagacaagcatgtgctact

SEQ ID NO: 5172154 - DNA, 25 bp, Homo sapien
aagttttcgagcctgttcttccact

SEQ ID NO: 5172155 - DNA, 25 bp, Homo sapien
tagcattatggtttcaagtataacc

SEQ ID NO: 5172156 - DNA, 25 bp, Homo sapien
caagtataaccagttcttgagtctg

SEQ ID NO: 5172157 - DNA, 25 bp, Homo sapien
ctagagtttgtagcattatggtttc

SEQ ID NO: 5172158 - DNA, 25 bp, Homo sapien
gttcttgagtctgttgaaggtaagc

SEQ ID NO: 5172159 - DNA, 25 bp, Homo sapien
taacgaagagtctgtcacaatggga

SEQ ID NO: 5172160 - DNA, 25 bp, Homo sapien
acatcctagtaggttcttccagaac

SEQ ID NO: 5172161 - DNA, 25 bp, Homo sapien
tctacagaatggaggtacaacaggt

SEQ ID NO: 5172162 - DNA, 25 bp, Homo sapien
cagaggcctacagattttaacttgg

SEQ ID NO: 5172163 - DNA, 25 bp, Homo sapien
tcaacgtgcaatcaacccttaggtg

SEQ ID NO: 5172164 - DNA, 25 bp, Homo sapien
ggccacagtggtagaaacgagcttt

SEQ ID NO: 5172165 - DNA, 25 bp, Homo sapien
cggcactctagatcaaagggtttca

SEQ ID NO: 5172166 - DNA, 25 bp, Homo sapien
gctggtcccacaatttaaggacgga

SEQ ID NO: 5172167 - DNA, 25 bp, Homo sapien
ttttttccaatctcttaccactaca

SEQ ID NO: 5172168 - DNA, 25 bp, Homo sapien
caatctcttaccactacagtacttg

SEQ ID NO: 5172169 - DNA, 25 bp, Homo sapien
tttccaatctcttaccactacagta

SEQ ID NO: 5172170 - DNA, 25 bp, Homo sapien
aatctcttaccactacagtacttgc

SEQ ID NO: 5172171 - DNA, 25 bp, Homo sapien
taactgggtacatttcaccacatct

SEQ ID NO: 5172172 - DNA, 25 bp, Homo sapien
ttaaaggaagctaacataccaggta

SEQ ID NO: 5172173 - DNA, 25 bp, Homo sapien
ctaatacttggaagccctccggagt

SEQ ID NO: 5172174 - DNA, 25 bp, Homo sapien
taccaggtagaatcacaaatagaag

SEQ ID NO: 5172175 - DNA, 25 bp, Homo sapien
caaatagaagtagatgtagaacact

SEQ ID NO: 5172176 - DNA, 25 bp, Homo sapien
tttagtaatgtcaaagaccctcgaa

SEQ ID NO: 5172177 - DNA, 25 bp, Homo sapien
aaatgaatatgggcaaaacactccc

SEQ ID NO: 5172178 - DNA, 25 bp, Homo sapien
taatgtcaaagaccctcgaaaaata

SEQ ID NO: 5172179 - DNA, 25 bp, Homo sapien
tcaaagaccctcgaaaaatacatta

SEQ ID NO: 5172180 - DNA, 25 bp, Homo sapien
tcctaatgacactatcagacagttt

SEQ ID NO: 5172181 - DNA, 25 bp, Homo sapien
aaaacacgctgatataaccatgaag

SEQ ID NO: 5172182 - DNA, 25 bp, Homo sapien
gcttacaaatgataacgtgtgctac

SEQ ID NO: 5172183 - DNA, 25 bp, Homo sapien
caaattatatggctacaatgcttac

SEQ ID NO: 5172184 - DNA, 25 bp, Homo sapien
gacattagccaattctgcagcaaag

SEQ ID NO: 5172185 - DNA, 25 bp, Homo sapien
aagtgaaggtccctgtaaaatgaca

SEQ ID NO: 5172186 - DNA, 25 bp, Homo sapien
gcagcaaagtagcataataccaact

SEQ ID NO: 5172187 - DNA, 25 bp, Homo sapien
cagttttcacctaggcatgtatcta

SEQ ID NO: 5172188 - DNA, 25 bp, Homo sapien
aaagcatcagatgtcttggaggcag

SEQ ID NO: 5172189 - DNA, 25 bp, Homo sapien
cagatgtcttggaggcagtgtgact

SEQ ID NO: 5172190 - DNA, 25 bp, Homo sapien
gctgccccatgtggatcatcaacat

SEQ ID NO: 5172191 - DNA, 25 bp, Homo sapien
ctaaggaagagtgtcaaagcatcag

SEQ ID NO: 5172192 - DNA, 25 bp, Homo sapien
ccctctgctcacctaggatcagttt

SEQ ID NO: 5172193 - DNA, 25 bp, Homo sapien
tctgctcacctaggatcagtttatc

SEQ ID NO: 5172194 - DNA, 25 bp, Homo sapien
ggatcagtttatctcaactccaccc

SEQ ID NO: 5172195 - DNA, 25 bp, Homo sapien
tcacctaggatcagtttatctcaac

SEQ ID NO: 5172196 - DNA, 25 bp, Homo sapien
gcctcttagtcttcccaacagggat

SEQ ID NO: 5172197 - DNA, 25 bp, Homo sapien
gggaggatcagaatgcttcaacact

SEQ ID NO: 5172198 - DNA, 25 bp, Homo sapien
gatacaggtattctagggaggatca

SEQ ID NO: 5172199 - DNA, 25 bp, Homo sapien
tcaacactgatacccaacagaaagg

SEQ ID NO: 5172200 - DNA, 25 bp, Homo sapien
tgctattaagcatcaacagagaata

SEQ ID NO: 5172201 - DNA, 25 bp, Homo sapien
tggcttaaatacttccatcaaaaac

SEQ ID NO: 5172202 - DNA, 25 bp, Homo sapien
aaatacaaagagttgcctgccagac

SEQ ID NO: 5172203 - DNA, 25 bp, Homo sapien
aatcctcagtcatatttaagttggc

SEQ ID NO: 5172204 - DNA, 25 bp, Homo sapien
tagccagttacaagggctaaacttg

SEQ ID NO: 5172205 - DNA, 25 bp, Homo sapien
gccgatttgcttttagctagccagt

SEQ ID NO: 5172206 - DNA, 25 bp, Homo sapien
gctaaaagttgcaataaagcattct

SEQ ID NO: 5172207 - DNA, 25 bp, Homo sapien
tactaagttaagcatctagtcagct

SEQ ID NO: 5172208 - DNA, 25 bp, Homo sapien
tctatactactgaaaatcttcaaca

SEQ ID NO: 5172209 - DNA, 25 bp, Homo sapien
gagcgccatcattttctatactact

SEQ ID NO: 5172210 - DNA, 25 bp, Homo sapien
atgtttcttgctatcccccaaagat

SEQ ID NO: 5172211 - DNA, 25 bp, Homo sapien
aaatatcacaagagcgccatcattt

SEQ ID NO: 5172212 - DNA, 25 bp, Homo sapien
agccatgaaataggatgtctgtgcc

SEQ ID NO: 5172213 - DNA, 25 bp, Homo sapien
gccatgaaataggatgtctgtgcca

SEQ ID NO: 5172214 - DNA, 25 bp, Homo sapien
tacaatacaccgcaaagcaaacagg

SEQ ID NO: 5172215 - DNA, 25 bp, Homo sapien
tagatggtccagtctcctgtcgcaa

SEQ ID NO: 5172216 - DNA, 25 bp, Homo sapien
tcgcaacaagggtaagagacacatt

SEQ ID NO: 5172217 - DNA, 25 bp, Homo sapien
caacaaagagggtcaggataacaac

SEQ ID NO: 5172218 - DNA, 25 bp, Homo sapien
gtattttaaagttaagactggatca

SEQ ID NO: 5172219 - DNA, 25 bp, Homo sapien
gttaagactggatcaacgtgaaatt

SEQ ID NO: 5172220 - DNA, 25 bp, Homo sapien
agactggatcaacgtgaaattttaa

SEQ ID NO: 5172221 - DNA, 25 bp, Homo sapien
ttaaagttaagactggatcaacgtg

SEQ ID NO: 5172222 - DNA, 25 bp, Homo sapien
ctgaagtggcttaataggcatttgc

SEQ ID NO: 5172223 - DNA, 25 bp, Homo sapien
gggcatgaaatatgtgtcacagcta

SEQ ID NO: 5172224 - DNA, 25 bp, Homo sapien
caagaaattagggaccatacaaagc

SEQ ID NO: 5172225 - DNA, 25 bp, Homo sapien
aatttcaatctcacaataatcaggg

SEQ ID NO: 5172226 - DNA, 25 bp, Homo sapien
taccagtaagattagagcaaaattt

SEQ ID NO: 5172227 - DNA, 25 bp, Homo sapien
caggtttgaaaatggagagccataa

SEQ ID NO: 5172228 - DNA, 25 bp, Homo sapien
aatggagagccataaaaattcaagt

SEQ ID NO: 5172229 - DNA, 25 bp, Homo sapien
tatctttaagtctagagtataaaac

SEQ ID NO: 5172230 - DNA, 25 bp, Homo sapien
tgaagacagaaggttgtaagatgca

SEQ ID NO: 5172231 - DNA, 25 bp, Homo sapien
gaagacagaaggttgtaagatgcag

SEQ ID NO: 5172232 - DNA, 25 bp, Homo sapien
aagacagaaggttgtaagatgcaga

SEQ ID NO: 5172233 - DNA, 25 bp, Homo sapien
gcatacacatgctatcactgttggt

SEQ ID NO: 5172234 - DNA, 25 bp, Homo sapien
catcagttgatacagggatctccca

SEQ ID NO: 5172235 - DNA, 25 bp, Homo sapien
taattctagagtaactgtaggatcc

SEQ ID NO: 5172236 - DNA, 25 bp, Homo sapien
cccaccaatgctttccatcagttga

SEQ ID NO: 5172237 - DNA, 25 bp, Homo sapien
agtgtactgacactttctattgtca

SEQ ID NO: 5172238 - DNA, 25 bp, Homo sapien
aattcagacaactgccaacttagat

SEQ ID NO: 5172239 - DNA, 25 bp, Homo sapien
gccaacttagataattccaaactta

SEQ ID NO: 5172240 - DNA, 25 bp, Homo sapien
tctattgtcaattcagacaactgcc

SEQ ID NO: 5172241 - DNA, 25 bp, Homo sapien
tattacgattatgcctactggctgg

SEQ ID NO: 5172242 - DNA, 25 bp, Homo sapien
gataattggccaaatatggctggcc

SEQ ID NO: 5172243 - DNA, 25 bp, Homo sapien
gctatagaacagataagccctcact

SEQ ID NO: 5172244 - DNA, 25 bp, Homo sapien
cctttcctctggataaactctgaaa

SEQ ID NO: 5172245 - DNA, 25 bp, Homo sapien
taagaatagtagtatcacttcactc

SEQ ID NO: 5172246 - DNA, 25 bp, Homo sapien
tcaaagctactgtctaagccaatgt

SEQ ID NO: 5172247 - DNA, 25 bp, Homo sapien
acaaccttgacgtctcaggctcagg

SEQ ID NO: 5172248 - DNA, 25 bp, Homo sapien
atcacagtatgtgcctaaaatagag

SEQ ID NO: 5172249 - DNA, 25 bp, Homo sapien
ccaaatatacttcctagctatcaac

SEQ ID NO: 5172250 - DNA, 25 bp, Homo sapien
tgtcattaatagttactagccactc

SEQ ID NO: 5172251 - DNA, 25 bp, Homo sapien
tctgattacaatcaaatgacccact

SEQ ID NO: 5172252 - DNA, 25 bp, Homo sapien
gcaaactatcttcattgtaaatttc

SEQ ID NO: 5172253 - DNA, 25 bp, Homo sapien
ttcaacctattaggcgttttctcca

SEQ ID NO: 5172254 - DNA, 25 bp, Homo sapien
tcttcaacctattaggcgttttctc

SEQ ID NO: 5172255 - DNA, 25 bp, Homo sapien
atcttcttcaacctattaggcgttt

SEQ ID NO: 5172256 - DNA, 25 bp, Homo sapien
gccttagaggcataaaaggctataa

SEQ ID NO: 5172257 - DNA, 25 bp, Homo sapien
gatacaagttaaatcctagcccagc

SEQ ID NO: 5172258 - DNA, 25 bp, Homo sapien
cgttgaattattcaggaatactgca

SEQ ID NO: 5172259 - DNA, 25 bp, Homo sapien
tcaaactggttagctatgtaaatgt

SEQ ID NO: 5172260 - DNA, 25 bp, Homo sapien
tacttttggtttcctagctgcctga

SEQ ID NO: 5172261 - DNA, 25 bp, Homo sapien
ttggtttcctagctgcctgattagc

SEQ ID NO: 5172262 - DNA, 25 bp, Homo sapien
tttggtttcctagctgcctgattag

SEQ ID NO: 5172263 - DNA, 25 bp, Homo sapien
cttttggtttcctagctgcctgatt

SEQ ID NO: 5172264 - DNA, 25 bp, Homo sapien
ggtactggcgcagggaatgctgatg

SEQ ID NO: 5172265 - DNA, 25 bp, Homo sapien
ctgaatttagaggtactggcgcagg

SEQ ID NO: 5172266 - DNA, 25 bp, Homo sapien
caccagtgacactatctactaaaat

SEQ ID NO: 5172267 - DNA, 25 bp, Homo sapien
acttgggtttgtaggcacaccagtg

SEQ ID NO: 5172268 - DNA, 25 bp, Homo sapien
cctgttgctagcattgacaaattat

SEQ ID NO: 5172269 - DNA, 25 bp, Homo sapien
ctgttgctagcattgacaaattatc

SEQ ID NO: 5172270 - DNA, 25 bp, Homo sapien
tcctgttgctagcattgacaaatta

SEQ ID NO: 5172271 - DNA, 25 bp, Homo sapien
gatgataaaccgtatgaagtacttg

SEQ ID NO: 5172272 - DNA, 25 bp, Homo sapien
gataaaccgtatgaagtacttggca

SEQ ID NO: 5172273 - DNA, 25 bp, Homo sapien
ctggtgtgatgataaaccgtatgaa

SEQ ID NO: 5172274 - DNA, 25 bp, Homo sapien
tgtgatgataaaccgtatgaagtac

SEQ ID NO: 5172275 - DNA, 25 bp, Homo sapien
tcagtgggtggtattggaatccgta

SEQ ID NO: 5172276 - DNA, 25 bp, Homo sapien
cctgtgactgcccttgtttgtgctg

SEQ ID NO: 5172277 - DNA, 25 bp, Homo sapien
gaatccgtaatttcagtgacccact

SEQ ID NO: 5172278 - DNA, 25 bp, Homo sapien
gaagttgatgttgtactggctacca

SEQ ID NO: 5172279 - DNA, 25 bp, Homo sapien
tggcggcttgaaggatgctccttgt

SEQ ID NO: 5172280 - DNA, 25 bp, Homo sapien
tgctgctgccactatgcgagtggga

SEQ ID NO: 5172281 - DNA, 25 bp, Homo sapien
tatggtctctgctaatatgtgggct

SEQ ID NO: 5172282 - DNA, 25 bp, Homo sapien
ttgtgcttctccttatggtctctgc

SEQ ID NO: 5172283 - DNA, 25 bp, Homo sapien
gaaatgccatcactgctcaggccaa

SEQ ID NO: 5172284 - DNA, 25 bp, Homo sapien
tccgtcggcactgtgtttactgcca

SEQ ID NO: 5172285 - DNA, 25 bp, Homo sapien
aacagtgggtggtattccgtcggca

SEQ ID NO: 5172286 - DNA, 25 bp, Homo sapien
caacaggactcctcagaacagtggg

SEQ ID NO: 5172287 - DNA, 25 bp, Homo sapien
tgtgagaggatatatactgcttaac

SEQ ID NO: 5172288 - DNA, 25 bp, Homo sapien
gtgagaggatatatactgcttaaca

SEQ ID NO: 5172289 - DNA, 25 bp, Homo sapien
gttgtgagaggatatatactgctta

SEQ ID NO: 5172290 - DNA, 25 bp, Homo sapien
agagttgtgagaggatatatactgc

SEQ ID NO: 5172291 - DNA, 25 bp, Homo sapien
tgtccagtttcacgagggtgctgag

SEQ ID NO: 5172292 - DNA, 25 bp, Homo sapien
agggtgctgagatgtccgtagccca

SEQ ID NO: 5172293 - DNA, 25 bp, Homo sapien
gggtgctgagatgtccgtagcccac

SEQ ID NO: 5172294 - DNA, 25 bp, Homo sapien
tcttgtccagtttcacgagggtgct

SEQ ID NO: 5172295 - DNA, 25 bp, Homo sapien
catgtcgaatgtgtctttgtagtcc

SEQ ID NO: 5172296 - DNA, 25 bp, Homo sapien
gcttgtactgtactcgtgattggca

SEQ ID NO: 5172297 - DNA, 25 bp, Homo sapien
acttaacagtgagtccagcatgtcg

SEQ ID NO: 5172298 - DNA, 25 bp, Homo sapien
tctttgtagtccatatgctggctgc

SEQ ID NO: 5172299 - DNA, 25 bp, Homo sapien
tgttgcactgcacacatctggtagt

SEQ ID NO: 5172300 - DNA, 25 bp, Homo sapien
gggttaccactgctagatcagaagg

SEQ ID NO: 5172301 - DNA, 25 bp, Homo sapien
ggtagtgaagtgtcccctatcagtg

SEQ ID NO: 5172302 - DNA, 25 bp, Homo sapien
cagtggcttccagtaaggcctagag

SEQ ID NO: 5172303 - DNA, 25 bp, Homo sapien
gaggctcctaagtaccccaagttca

SEQ ID NO: 5172304 - DNA, 25 bp, Homo sapien
ttcagttcaacaagaggtcgaatcc

SEQ ID NO: 5172305 - DNA, 25 bp, Homo sapien
ttaggacatgctacctaggcacagt

SEQ ID NO: 5172306 - DNA, 25 bp, Homo sapien
tacaattgtgcacgtatcagtggct

SEQ ID NO: 5172307 - DNA, 25 bp, Homo sapien
agtgaatacatagcatttcaaattc

SEQ ID NO: 5172308 - DNA, 25 bp, Homo sapien
tcaattttggaagtactaataagta

SEQ ID NO: 5172309 - DNA, 25 bp, Homo sapien
taaagaattacatttacagagtgaa

SEQ ID NO: 5172310 - DNA, 25 bp, Homo sapien
ctgacccataacaatatacactagc

SEQ ID NO: 5172311 - DNA, 25 bp, Homo sapien
gatttccatatttatccccatcatt

SEQ ID NO: 5172312 - DNA, 25 bp, Homo sapien
tttatccccatcattattttggaag

SEQ ID NO: 5172313 - DNA, 25 bp, Homo sapien
tggaagcttaataccctgttcaggg

SEQ ID NO: 5172314 - DNA, 25 bp, Homo sapien
agtttgaatagctcacacaatcctg

SEQ ID NO: 5172315 - DNA, 25 bp, Homo sapien
ggctacttacaagagtcacagtaat

SEQ ID NO: 5172316 - DNA, 25 bp, Homo sapien
gcacatgtggaatttcatacctaaa

SEQ ID NO: 5172317 - DNA, 25 bp, Homo sapien
cctaatgggaccagacagatgaact

SEQ ID NO: 5172318 - DNA, 25 bp, Homo sapien
aatgagatggataaagcaaattcat

SEQ ID NO: 5172319 - DNA, 25 bp, Homo sapien
tgaacacacggaggaagaccaaggt

SEQ ID NO: 5172320 - DNA, 25 bp, Homo sapien
taaacctagggctgacaacaggact

SEQ ID NO: 5172321 - DNA, 25 bp, Homo sapien
tacaaagcaatatacgcagccactc

SEQ ID NO: 5172322 - DNA, 25 bp, Homo sapien
tactgccgcccgttaagtaggcctc

SEQ ID NO: 5172323 - DNA, 25 bp, Homo sapien
caaaaatagatgctccagggaaact

SEQ ID NO: 5172324 - DNA, 25 bp, Homo sapien
tgtcagcttacagcaattaggttgc

SEQ ID NO: 5172325 - DNA, 25 bp, Homo sapien
tagtatcatagcttggtacccaagg

SEQ ID NO: 5172326 - DNA, 25 bp, Homo sapien
tcttagggcacatgagattagcacc

SEQ ID NO: 5172327 - DNA, 25 bp, Homo sapien
taatgtatgatattaggtctaaaac

SEQ ID NO: 5172328 - DNA, 25 bp, Homo sapien
tgtatgatattaggtctaaaacatt

SEQ ID NO: 5172329 - DNA, 25 bp, Homo sapien
atgatattaggtctaaaacattttg

SEQ ID NO: 5172330 - DNA, 25 bp, Homo sapien
aatgtatgatattaggtctaaaaca

SEQ ID NO: 5172331 - DNA, 25 bp, Homo sapien
agtagacagccctcaaactttgaga

SEQ ID NO: 5172332 - DNA, 25 bp, Homo sapien
tgctcgggattttgagtttccgccc

SEQ ID NO: 5172333 - DNA, 25 bp, Homo sapien
taagttgcctatacgagaacagaat

SEQ ID NO: 5172334 - DNA, 25 bp, Homo sapien
cagtaaattataaagaaggtgccac

SEQ ID NO: 5172335 - DNA, 25 bp, Homo sapien
gcagtggtgaagtccgtgatctcaa

SEQ ID NO: 5172336 - DNA, 25 bp, Homo sapien
tgatctcaaatacctcggattcggg

SEQ ID NO: 5172337 - DNA, 25 bp, Homo sapien
gaagtccgtgatctcaaatacctcg

SEQ ID NO: 5172338 - DNA, 25 bp, Homo sapien
ccattccgaggcagtggtgaagtcc

SEQ ID NO: 5172339 - DNA, 25 bp, Homo sapien
tactagctaagagacttggacttta

SEQ ID NO: 5172340 - DNA, 25 bp, Homo sapien
taatgaattctatcagtactagcta

SEQ ID NO: 5172341 - DNA, 25 bp, Homo sapien
cttggactttatcctacaagtattg

SEQ ID NO: 5172342 - DNA, 25 bp, Homo sapien
tatcagtactagctaagagacttgg

SEQ ID NO: 5172343 - DNA, 25 bp, Homo sapien
agcaacattgctctctaaacacctg

SEQ ID NO: 5172344 - DNA, 25 bp, Homo sapien
taagctaagtatgatgcaatctaac

SEQ ID NO: 5172345 - DNA, 25 bp, Homo sapien
ctgctagagtactagagttaattct

SEQ ID NO: 5172346 - DNA, 25 bp, Homo sapien
taaacacctggaagtactgctagag

SEQ ID NO: 5172347 - DNA, 25 bp, Homo sapien
gtctcagtcaaagacattttcagaa

SEQ ID NO: 5172348 - DNA, 25 bp, Homo sapien
tcagtcaaagacattttcagaagaa

SEQ ID NO: 5172349 - DNA, 25 bp, Homo sapien
gtcaaagacattttcagaagaatta

SEQ ID NO: 5172350 - DNA, 25 bp, Homo sapien
tctcagtcaaagacattttcagaag

SEQ ID NO: 5172351 - DNA, 25 bp, Homo sapien
ccaatcagtttccagtcattcaaga

SEQ ID NO: 5172352 - DNA, 25 bp, Homo sapien
cagtttccagtcattcaagacttct

SEQ ID NO: 5172353 - DNA, 25 bp, Homo sapien
aatcagtttccagtcattcaagact

SEQ ID NO: 5172354 - DNA, 25 bp, Homo sapien
tcagtttccagtcattcaagacttc

SEQ ID NO: 5172355 - DNA, 25 bp, Homo sapien
tcatttagagacaccagcaaataga

SEQ ID NO: 5172356 - DNA, 25 bp, Homo sapien
aagtaaatagtcatttagagacacc

SEQ ID NO: 5172357 - DNA, 25 bp, Homo sapien
aattcttccaaatgctatttgatgt

SEQ ID NO: 5172358 - DNA, 25 bp, Homo sapien
taaatagtcatttagagacaccagc

SEQ ID NO: 5172359 - DNA, 25 bp, Homo sapien
gaatccaggtttgttctcagagtac

SEQ ID NO: 5172360 - DNA, 25 bp, Homo sapien
gacccgtgtttgaaagcgtcacatt

SEQ ID NO: 5172361 - DNA, 25 bp, Homo sapien
caagtggagtagaatgacccgtgtt

SEQ ID NO: 5172362 - DNA, 25 bp, Homo sapien
tatcagagctcataagtacccggtt

SEQ ID NO: 5172363 - DNA, 25 bp, Homo sapien
gatgtcaaggacatttatggtcacc

SEQ ID NO: 5172364 - DNA, 25 bp, Homo sapien
cttgacaggagtgtaagttataccc

SEQ ID NO: 5172365 - DNA, 25 bp, Homo sapien
tgactggagggcatgggaattaact

SEQ ID NO: 5172366 - DNA, 25 bp, Homo sapien
tagaaagggtcactaaggatcttcc

SEQ ID NO: 5172367 - DNA, 25 bp, Homo sapien
tggtaaaccctctagaaaaatgcat

SEQ ID NO: 5172368 - DNA, 25 bp, Homo sapien
taggttctagaacaacaggatatcc

SEQ ID NO: 5172369 - DNA, 25 bp, Homo sapien
acttccctccatatagtagctcaaa

SEQ ID NO: 5172370 - DNA, 25 bp, Homo sapien
taaaggtgacaaagcaactcaatgg

SEQ ID NO: 5172371 - DNA, 25 bp, Homo sapien
tacagtctcagcataatcatactcc

SEQ ID NO: 5172372 - DNA, 25 bp, Homo sapien
tgcatcatacaacataaaatcctta

SEQ ID NO: 5172373 - DNA, 25 bp, Homo sapien
atccattcaatggttctcagctggg

SEQ ID NO: 5172374 - DNA, 25 bp, Homo sapien
gccatgttcatgactagaactttca

SEQ ID NO: 5172375 - DNA, 25 bp, Homo sapien
gcagcagttctactcaacatgtcac

SEQ ID NO: 5172376 - DNA, 25 bp, Homo sapien
aatttactcagtcttatggacacct

SEQ ID NO: 5172377 - DNA, 25 bp, Homo sapien
caaggatgtctacttgcagcagttc

SEQ ID NO: 5172378 - DNA, 25 bp, Homo sapien
ggtctgggatagtacaataacagtc

SEQ ID NO: 5172379 - DNA, 25 bp, Homo sapien
gacatgtgctataaccctggatgaa

SEQ ID NO: 5172380 - DNA, 25 bp, Homo sapien
gaacctcagagacccacctgtgggt

SEQ ID NO: 5172381 - DNA, 25 bp, Homo sapien
ctgtgggtcaggatcaacaagtcaa

SEQ ID NO: 5172382 - DNA, 25 bp, Homo sapien
caggtaggcttaacagcaagttgga

SEQ ID NO: 5172383 - DNA, 25 bp, Homo sapien
aaaacaccatttttcaatgctctgg

SEQ ID NO: 5172384 - DNA, 25 bp, Homo sapien
ctcaaactttctggactcagacacc

SEQ ID NO: 5172385 - DNA, 25 bp, Homo sapien
gctgggaagagtttacccattgaga

SEQ ID NO: 5172386 - DNA, 25 bp, Homo sapien
tctggtaatggcaaagcagctttgt

SEQ ID NO: 5172387 - DNA, 25 bp, Homo sapien
caaacaaggttgtgagtagctcaat

SEQ ID NO: 5172388 - DNA, 25 bp, Homo sapien
gaagctatagacactatggttacga

SEQ ID NO: 5172389 - DNA, 25 bp, Homo sapien
gtgactgatcctcaaccttctttag

SEQ ID NO: 5172390 - DNA, 25 bp, Homo sapien
tctgagataatgcaaataaaggaat

SEQ ID NO: 5172391 - DNA, 25 bp, Homo sapien
cgcactctagcgtgggtaacagcaa

SEQ ID NO: 5172392 - DNA, 25 bp, Homo sapien
tattgtgctgtaactaaatggcaag

SEQ ID NO: 5172393 - DNA, 25 bp, Homo sapien
tgataggtgctctaagaaacaatcg

SEQ ID NO: 5172394 - DNA, 25 bp, Homo sapien
ctagtaaatacttgtaagagaggcc

SEQ ID NO: 5172395 - DNA, 25 bp, Homo sapien
atatcttaaacacatctgttctatg

SEQ ID NO: 5172396 - DNA, 25 bp, Homo sapien
tacaagaccatccagaagactttcc

SEQ ID NO: 5172397 - DNA, 25 bp, Homo sapien
gtaaatgtggtctgtttacactgca

SEQ ID NO: 5172398 - DNA, 25 bp, Homo sapien
taaaaatgccaccatcaccatattt

SEQ ID NO: 5172399 - DNA, 25 bp, Homo sapien
aacacaaaattggacgggcgtgatg

SEQ ID NO: 5172400 - DNA, 25 bp, Homo sapien
tctgacaaaagctatggaccacctc

SEQ ID NO: 5172401 - DNA, 25 bp, Homo sapien
catgggctcctttgagtatctgaca

SEQ ID NO: 5172402 - DNA, 25 bp, Homo sapien
cccaagactctggattaagaattcc

SEQ ID NO: 5172403 - DNA, 25 bp, Homo sapien
aaaggaattcaaagataggagccta

SEQ ID NO: 5172404 - DNA, 25 bp, Homo sapien
taggagcctaaaagaagtttctgtg

SEQ ID NO: 5172405 - DNA, 25 bp, Homo sapien
ccagtcgtacccacaacagaaagga

SEQ ID NO: 5172406 - DNA, 25 bp, Homo sapien
taagggccagtaaaatgaggctctg

SEQ ID NO: 5172407 - DNA, 25 bp, Homo sapien
cccatatgaaggaaatagtgacccc

SEQ ID NO: 5172408 - DNA, 25 bp, Homo sapien
tcgtcagatatttgaggaaaacccc

SEQ ID NO: 5172409 - DNA, 25 bp, Homo sapien
gatcctatgactcccacgaatttta

SEQ ID NO: 5172410 - DNA, 25 bp, Homo sapien
gtagaacaatgcttaccaccacagt

SEQ ID NO: 5172411 - DNA, 25 bp, Homo sapien
ggcaaaatttccagctcagtatatg

SEQ ID NO: 5172412 - DNA, 25 bp, Homo sapien
tatcgaggctcagtccaaaagctct

SEQ ID NO: 5172413 - DNA, 25 bp, Homo sapien
ggccttcagcctggatcaagatcat

SEQ ID NO: 5172414 - DNA, 25 bp, Homo sapien
gatacattccactctatacaggtgg

SEQ ID NO: 5172415 - DNA, 25 bp, Homo sapien
tatctgctatgcgaaccgaaatgac

SEQ ID NO: 5172416 - DNA, 25 bp, Homo sapien
gatacagagatactgtctgtcccta

SEQ ID NO: 5172417 - DNA, 25 bp, Homo sapien
ccaagttccagtaaggcatgtatct

SEQ ID NO: 5172418 - DNA, 25 bp, Homo sapien
tctggattccggtactattgtcaac

SEQ ID NO: 5172419 - DNA, 25 bp, Homo sapien
ggactcttgtacaagataatgatga

SEQ ID NO: 5172420 - DNA, 25 bp, Homo sapien
ctttatcagtggactcttgtacaag

SEQ ID NO: 5172421 - DNA, 25 bp, Homo sapien
gagtgactgagaacttgaagtcagc

SEQ ID NO: 5172422 - DNA, 25 bp, Homo sapien
tgatgagtgactgagaacttgaagt

SEQ ID NO: 5172423 - DNA, 25 bp, Homo sapien
ctgtccttgcctctacttttcttca

SEQ ID NO: 5172424 - DNA, 25 bp, Homo sapien
tacccagcaaatcttgcatagattg

SEQ ID NO: 5172425 - DNA, 25 bp, Homo sapien
gcaaatcttgcatagattgtggaac

SEQ ID NO: 5172426 - DNA, 25 bp, Homo sapien
tcttgcatagattgtggaacaacat

SEQ ID NO: 5172427 - DNA, 25 bp, Homo sapien
tattcatacccagcaaatcttgcat

SEQ ID NO: 5172428 - DNA, 25 bp, Homo sapien
ggcaatgtgctcttggaggaaagtc

SEQ ID NO: 5172429 - DNA, 25 bp, Homo sapien
aggcaatgtgctcttggaggaaagt

SEQ ID NO: 5172430 - DNA, 25 bp, Homo sapien
caggcaatgtgctcttggaggaaag

SEQ ID NO: 5172431 - DNA, 25 bp, Homo sapien
gcttgatatgaaaactgaaacgaga

SEQ ID NO: 5172432 - DNA, 25 bp, Homo sapien
tatgaaatcctcttaagatgtctgg

SEQ ID NO: 5172433 - DNA, 25 bp, Homo sapien
taaacaggcttggagctaatctgag

SEQ ID NO: 5172434 - DNA, 25 bp, Homo sapien
tgacagggtcaacctatactaattg

SEQ ID NO: 5172435 - DNA, 25 bp, Homo sapien
cctgggagtcccattacatgcatgc

SEQ ID NO: 5172436 - DNA, 25 bp, Homo sapien
ggaacacttgacactgacccacaga

SEQ ID NO: 5172437 - DNA, 25 bp, Homo sapien
gtgccgtggcagtatctcaacttac

SEQ ID NO: 5172438 - DNA, 25 bp, Homo sapien
aacttgcctggacttacactgagga

SEQ ID NO: 5172439 - DNA, 25 bp, Homo sapien
cagcaacaatctgatttctctatcg

SEQ ID NO: 5172440 - DNA, 25 bp, Homo sapien
aatctgatttctctatcgtttcccc

SEQ ID NO: 5172441 - DNA, 25 bp, Homo sapien
caatctgatttctctatcgtttccc

SEQ ID NO: 5172442 - DNA, 25 bp, Homo sapien
caacaatctgatttctctatcgttt

SEQ ID NO: 5172443 - DNA, 25 bp, Homo sapien
ctccccccatccattctactgccat

SEQ ID NO: 5172444 - DNA, 25 bp, Homo sapien
tattgataaaatgtctccccccatc

SEQ ID NO: 5172445 - DNA, 25 bp, Homo sapien
tgtctccccccatccattctactgc

SEQ ID NO: 5172446 - DNA, 25 bp, Homo sapien
atctattgataaaatgtctcccccc

SEQ ID NO: 5172447 - DNA, 25 bp, Homo sapien
actgtcaacagtttcttggttattc

SEQ ID NO: 5172448 - DNA, 25 bp, Homo sapien
cttggttattcttccagaaatgttc

SEQ ID NO: 5172449 - DNA, 25 bp, Homo sapien
cagtttcttggttattcttccagaa

SEQ ID NO: 5172450 - DNA, 25 bp, Homo sapien
ttgtataaaatcactgtcaacagtt

SEQ ID NO: 5172451 - DNA, 25 bp, Homo sapien
taaaaattgagctctaaagatcttt

SEQ ID NO: 5172452 - DNA, 25 bp, Homo sapien
aaattgagctctaaagatctttgaa

SEQ ID NO: 5172453 - DNA, 25 bp, Homo sapien
tgagctctaaagatctttgaaaaat

SEQ ID NO: 5172454 - DNA, 25 bp, Homo sapien
attagttatgcagaggcagcataaa

SEQ ID NO: 5172455 - DNA, 25 bp, Homo sapien
gggcaatcaccacgaactcacgtag

SEQ ID NO: 5172456 - DNA, 25 bp, Homo sapien
agaacagcgtcactgtgtgcagcag

SEQ ID NO: 5172457 - DNA, 25 bp, Homo sapien
gaaacagaactcagaagaaggttgc

SEQ ID NO: 5172458 - DNA, 25 bp, Homo sapien
tgcacttagattcgctgagaacagc

SEQ ID NO: 5172459 - DNA, 25 bp, Homo sapien
taagtgagtgtactgatttggcact

SEQ ID NO: 5172460 - DNA, 25 bp, Homo sapien
taagatgaaccatttcgaaatcagt

SEQ ID NO: 5172461 - DNA, 25 bp, Homo sapien
gaaatcagttcgtacaccaggacct

SEQ ID NO: 5172462 - DNA, 25 bp, Homo sapien
gaagatatccagcagacctgataag

SEQ ID NO: 5172463 - DNA, 25 bp, Homo sapien
tggaggcaatggagttaaaggacat

SEQ ID NO: 5172464 - DNA, 25 bp, Homo sapien
gaggcaatggagttaaaggacatcc

SEQ ID NO: 5172465 - DNA, 25 bp, Homo sapien
ggaggcaatggagttaaaggacatc

SEQ ID NO: 5172466 - DNA, 25 bp, Homo sapien
ctggaggcaatggagttaaaggaca

SEQ ID NO: 5172467 - DNA, 25 bp, Homo sapien
ctggaggttgctgaggccaaaaata

SEQ ID NO: 5172468 - DNA, 25 bp, Homo sapien
tgaggccaaaaatactgctgccaat

SEQ ID NO: 5172469 - DNA, 25 bp, Homo sapien
cataggtaaatcgaatagcaatact

SEQ ID NO: 5172470 - DNA, 25 bp, Homo sapien
ctgccaatcttgaagtacataggta

SEQ ID NO: 5172471 - DNA, 25 bp, Homo sapien
caggcaccaaatggtaacttgccaa

SEQ ID NO: 5172472 - DNA, 25 bp, Homo sapien
tctcctcctacaagggcatctatgt

SEQ ID NO: 5172473 - DNA, 25 bp, Homo sapien
aacttctcctcctacaagggcatct

SEQ ID NO: 5172474 - DNA, 25 bp, Homo sapien
taataggatcttcgcaggcaccaaa

SEQ ID NO: 5172475 - DNA, 25 bp, Homo sapien
ccatgtagtagctaaatggagttca

SEQ ID NO: 5172476 - DNA, 25 bp, Homo sapien
cagatgaggccatgtagtagctaaa

SEQ ID NO: 5172477 - DNA, 25 bp, Homo sapien
tatccacaatgatcccttcggtcag

SEQ ID NO: 5172478 - DNA, 25 bp, Homo sapien
cccttcggtcagatgaggccatgta

SEQ ID NO: 5172479 - DNA, 25 bp, Homo sapien
tcagcttttcgaactctaacagacc

SEQ ID NO: 5172480 - DNA, 25 bp, Homo sapien
ggattctcagcttttcgaactctaa

SEQ ID NO: 5172481 - DNA, 25 bp, Homo sapien
ttcgaactctaacagaccaatgtgg

SEQ ID NO: 5172482 - DNA, 25 bp, Homo sapien
ctaacagaccaatgtggagcttgaa

SEQ ID NO: 5172483 - DNA, 25 bp, Homo sapien
cctcaaatgcagatcgtccaagaat

SEQ ID NO: 5172484 - DNA, 25 bp, Homo sapien
tcatcagttgactcctttcgacggc

SEQ ID NO: 5172485 - DNA, 25 bp, Homo sapien
tgactcctttcgacggcaaatttta

SEQ ID NO: 5172486 - DNA, 25 bp, Homo sapien
gatcgtccaagaatctcatcagttg

SEQ ID NO: 5172487 - DNA, 25 bp, Homo sapien
tttatgaattggaactgatgccggc

SEQ ID NO: 5172488 - DNA, 25 bp, Homo sapien
tgatgccggctctgtcaattttgac

SEQ ID NO: 5172489 - DNA, 25 bp, Homo sapien
ctttgcagtgtgtaccatatttgaa

SEQ ID NO: 5172490 - DNA, 25 bp, Homo sapien
gaacatcattatttagcggtgactc

SEQ ID NO: 5172491 - DNA, 25 bp, Homo sapien
gtagttccatctaatggtttctcag

SEQ ID NO: 5172492 - DNA, 25 bp, Homo sapien
gaagtagttccatctaatggtttct

SEQ ID NO: 5172493 - DNA, 25 bp, Homo sapien
cactctctgatggaggattattatt

SEQ ID NO: 5172494 - DNA, 25 bp, Homo sapien
actctctgatggaggattattatta

SEQ ID NO: 5172495 - DNA, 25 bp, Homo sapien
agttgttttcccatcggaaacgcat

SEQ ID NO: 5172496 - DNA, 25 bp, Homo sapien
cagaggtgtgccactcctttcaacc

SEQ ID NO: 5172497 - DNA, 25 bp, Homo sapien
caaccctccatggtaaaaattgatc

SEQ ID NO: 5172498 - DNA, 25 bp, Homo sapien
tgttaaactgtcagatggtgcagac

SEQ ID NO: 5172499 - DNA, 25 bp, Homo sapien
agttttagtaaaattgcttcagata

SEQ ID NO: 5172500 - DNA, 25 bp, Homo sapien
tagtaaaattgcttcagatatgatt

SEQ ID NO: 5172501 - DNA, 25 bp, Homo sapien
tttagtaaaattgcttcagatatga

SEQ ID NO: 5172502 - DNA, 25 bp, Homo sapien
ttagttttagtaaaattgcttcaga

SEQ ID NO: 5172503 - DNA, 25 bp, Homo sapien
tagtttctgatgcagtaaacaacac

SEQ ID NO: 5172504 - DNA, 25 bp, Homo sapien
cagatctgggggtccacttgctaat

SEQ ID NO: 5172505 - DNA, 25 bp, Homo sapien
tgatgcagtaaacaacacctcagat

SEQ ID NO: 5172506 - DNA, 25 bp, Homo sapien
cagtaaacaacacctcagatctggg

SEQ ID NO: 5172507 - DNA, 25 bp, Homo sapien
caggaccttgtgaattgcagtgact

SEQ ID NO: 5172508 - DNA, 25 bp, Homo sapien
tataggcaacctacagcagcaccat

SEQ ID NO: 5172509 - DNA, 25 bp, Homo sapien
gcagtgactactgactataggcaac

SEQ ID NO: 5172510 - DNA, 25 bp, Homo sapien
aataaaaatctacctactgcttgaa

SEQ ID NO: 5172511 - DNA, 25 bp, Homo sapien
catcccctggatatatattagtgac

SEQ ID NO: 5172512 - DNA, 25 bp, Homo sapien
aagtttcccatgctgatagagccgt

SEQ ID NO: 5172513 - DNA, 25 bp, Homo sapien
aaatttgccatctccttaggtcctc

SEQ ID NO: 5172514 - DNA, 25 bp, Homo sapien
cattatgcagcagtgtaagtttccc

SEQ ID NO: 5172515 - DNA, 25 bp, Homo sapien
gcacctatccataagtctttgtcca

SEQ ID NO: 5172516 - DNA, 25 bp, Homo sapien
acctatccataagtctttgtccaca

SEQ ID NO: 5172517 - DNA, 25 bp, Homo sapien
tttttgcacctatccataagtcttt

SEQ ID NO: 5172518 - DNA, 25 bp, Homo sapien
tattttttgcacctatccataagtc

SEQ ID NO: 5172519 - DNA, 25 bp, Homo sapien
tacaattttcacaatagaatgtttt

SEQ ID NO: 5172520 - DNA, 25 bp, Homo sapien
cagccaagatctgtacactttattg

SEQ ID NO: 5172521 - DNA, 25 bp, Homo sapien
ccagccaagatctgtacactttatt

SEQ ID NO: 5172522 - DNA, 25 bp, Homo sapien
gcccagccaagatctgtacacttta

SEQ ID NO: 5172523 - DNA, 25 bp, Homo sapien
aggcactctgcatgcgtgctcgaag

SEQ ID NO: 5172524 - DNA, 25 bp, Homo sapien
agactccatatctgagagcagacag

SEQ ID NO: 5172525 - DNA, 25 bp, Homo sapien
cccctctgccgatgtacctaattta

SEQ ID NO: 5172526 - DNA, 25 bp, Homo sapien
tgcatgcgtgctcgaaggtgagccc

SEQ ID NO: 5172527 - DNA, 25 bp, Homo sapien
gatatacccctaagggcatatcccc

SEQ ID NO: 5172528 - DNA, 25 bp, Homo sapien
gctcaagggctaccagcatgaccat

SEQ ID NO: 5172529 - DNA, 25 bp, Homo sapien
catccctaccatcttaggatatacc

SEQ ID NO: 5172530 - DNA, 25 bp, Homo sapien
ctaagggcatatcccctagaagatc

SEQ ID NO: 5172531 - DNA, 25 bp, Homo sapien
ttccagggagcaacctggattagct

SEQ ID NO: 5172532 - DNA, 25 bp, Homo sapien
gtttcccaggcttctacccacatat

SEQ ID NO: 5172533 - DNA, 25 bp, Homo sapien
gcttggaatcttcatccgggcactc

SEQ ID NO: 5172534 - DNA, 25 bp, Homo sapien
gcttcccgtgtatcatcaaagagtc

SEQ ID NO: 5172535 - DNA, 25 bp, Homo sapien
cctctttgttaagccatagggactg

SEQ ID NO: 5172536 - DNA, 25 bp, Homo sapien
gcctaatgaggagcttctcaaaacg

SEQ ID NO: 5172537 - DNA, 25 bp, Homo sapien
taattttctagcctgagtggtaggc

SEQ ID NO: 5172538 - DNA, 25 bp, Homo sapien
catctgggtctatgtgagtacactc

SEQ ID NO: 5172539 - DNA, 25 bp, Homo sapien
taatgtatctcaacttgctttcagg

SEQ ID NO: 5172540 - DNA, 25 bp, Homo sapien
cccgtcggtgtggttatgttactca

SEQ ID NO: 5172541 - DNA, 25 bp, Homo sapien
taagtaaagcataggctagcacagt

SEQ ID NO: 5172542 - DNA, 25 bp, Homo sapien
tagctactagggaaactgggccagg

SEQ ID NO: 5172543 - DNA, 25 bp, Homo sapien
tgctcactgctatgagggtgtcagt

SEQ ID NO: 5172544 - DNA, 25 bp, Homo sapien
tgtcgagcaatccaggatgttccag

SEQ ID NO: 5172545 - DNA, 25 bp, Homo sapien
gagtttcacaattgctgtacccgta

SEQ ID NO: 5172546 - DNA, 25 bp, Homo sapien
aaatcaagctatgtgtgctcactgc

SEQ ID NO: 5172547 - DNA, 25 bp, Homo sapien
ctctgggaggaacacactatgtgca

SEQ ID NO: 5172548 - DNA, 25 bp, Homo sapien
cacttacagagtgggaattagcttc

SEQ ID NO: 5172549 - DNA, 25 bp, Homo sapien
taccgccagtatggcttagcctgtg

SEQ ID NO: 5172550 - DNA, 25 bp, Homo sapien
cacatcatgtcaggagtacataccg

SEQ ID NO: 5172551 - DNA, 25 bp, Homo sapien
gtcttggtaaggatcatccattgcc

SEQ ID NO: 5172552 - DNA, 25 bp, Homo sapien
cctcaaccactacaagtcttggtaa

SEQ ID NO: 5172553 - DNA, 25 bp, Homo sapien
gctctttaatctcaactaatctgca

SEQ ID NO: 5172554 - DNA, 25 bp, Homo sapien
gcccggccgcaaaatgtgtctttta

SEQ ID NO: 5172555 - DNA, 25 bp, Homo sapien
gcagaatacacgtactaagggcact

SEQ ID NO: 5172556 - DNA, 25 bp, Homo sapien
ttacagaagtgcaaatcctcagcca

SEQ ID NO: 5172557 - DNA, 25 bp, Homo sapien
ggtgcagcgcacacaaatgatcagc

SEQ ID NO: 5172558 - DNA, 25 bp, Homo sapien
aatgatcagcgcaggtgtcaaagga

SEQ ID NO: 5172559 - DNA, 25 bp, Homo sapien
ggtctgcaggtttctggattgccag

SEQ ID NO: 5172560 - DNA, 25 bp, Homo sapien
aacaggtgccgagcaaggtctgcag

SEQ ID NO: 5172561 - DNA, 25 bp, Homo sapien
aaggtaacaggtgccgagcaaggtc

SEQ ID NO: 5172562 - DNA, 25 bp, Homo sapien
agctgcatgaatcacacaaggtaac

SEQ ID NO: 5172563 - DNA, 25 bp, Homo sapien
gtcttctggattggggaagtgcaaa

SEQ ID NO: 5172564 - DNA, 25 bp, Homo sapien
cttgtcttctggattggggaagtgc

SEQ ID NO: 5172565 - DNA, 25 bp, Homo sapien
tgtcttctggattggggaagtgcaa

SEQ ID NO: 5172566 - DNA, 25 bp, Homo sapien
tcttgtcttctggattggggaagtg

SEQ ID NO: 5172567 - DNA, 25 bp, Homo sapien
aggaagaggcatacattgcgagatg

SEQ ID NO: 5172568 - DNA, 25 bp, Homo sapien
ggcaagattctgacactacatcaaa

SEQ ID NO: 5172569 - DNA, 25 bp, Homo sapien
tacattgcgagatggcaaaaaagca

SEQ ID NO: 5172570 - DNA, 25 bp, Homo sapien
agaacacttggcaagattctgacac

SEQ ID NO: 5172571 - DNA, 25 bp, Homo sapien
caaacttggcttttagtgaccgagc

SEQ ID NO: 5172572 - DNA, 25 bp, Homo sapien
tcagttccaaacttggcttttagtg

SEQ ID NO: 5172573 - DNA, 25 bp, Homo sapien
tttagtgaccgagctctggcaatga

SEQ ID NO: 5172574 - DNA, 25 bp, Homo sapien
gagcttccacattagtaatctggtg

SEQ ID NO: 5172575 - DNA, 25 bp, Homo sapien
aatacttgtgttgggcaaagtcgca

SEQ ID NO: 5172576 - DNA, 25 bp, Homo sapien
caaagtcgcaattgtaaactgtgcc

SEQ ID NO: 5172577 - DNA, 25 bp, Homo sapien
tgatactggctaaacccaacaaggt

SEQ ID NO: 5172578 - DNA, 25 bp, Homo sapien
cagataacgtatggtggaactaaca

SEQ ID NO: 5172579 - DNA, 25 bp, Homo sapien
caccggtgactaacacttcaggctg

SEQ ID NO: 5172580 - DNA, 25 bp, Homo sapien
tgtcctcttcctgcaccggtgacta

SEQ ID NO: 5172581 - DNA, 25 bp, Homo sapien
caaacagcttgtgaatgatcctgcc

SEQ ID NO: 5172582 - DNA, 25 bp, Homo sapien
ggctgctccagcaggcaactcacaa

SEQ ID NO: 5172583 - DNA, 25 bp, Homo sapien
agaatcaaatgctaaagtcaaaagc

SEQ ID NO: 5172584 - DNA, 25 bp, Homo sapien
aaagaatcaaatgctaaagtcaaaa

SEQ ID NO: 5172585 - DNA, 25 bp, Homo sapien
ggtcaaatgctaaactcagatgctt

SEQ ID NO: 5172586 - DNA, 25 bp, Homo sapien
aagaatcaaatgctaaagtcaaaag

SEQ ID NO: 5172587 - DNA, 25 bp, Homo sapien
tgagaacactgtacatccgctgagg

SEQ ID NO: 5172588 - DNA, 25 bp, Homo sapien
tccgctgaggcagagctttggagta

SEQ ID NO: 5172589 - DNA, 25 bp, Homo sapien
ggaagtctgacacggagttctgcct

SEQ ID NO: 5172590 - DNA, 25 bp, Homo sapien
cagtggtgcgcaaaatgaattcccg

SEQ ID NO: 5172591 - DNA, 25 bp, Homo sapien
aaggaagtatctgatgaaaaggcac

SEQ ID NO: 5172592 - DNA, 25 bp, Homo sapien
tcagaagaaggaagtatctgatgaa

SEQ ID NO: 5172593 - DNA, 25 bp, Homo sapien
gaagaaggaagtatctgatgaaaag

SEQ ID NO: 5172594 - DNA, 25 bp, Homo sapien
agaaggaagtatctgatgaaaaggc

SEQ ID NO: 5172595 - DNA, 25 bp, Homo sapien
gattcctgatcacccaactggacag

SEQ ID NO: 5172596 - DNA, 25 bp, Homo sapien
gaagagaatgcgatgaacaccgtcc

SEQ ID NO: 5172597 - DNA, 25 bp, Homo sapien
tatacaaaggccatctctagggcag

SEQ ID NO: 5172598 - DNA, 25 bp, Homo sapien
cacgaagtgtttgcacagaccacga

SEQ ID NO: 5172599 - DNA, 25 bp, Homo sapien
tgcatgacagtctctaggtaccaag

SEQ ID NO: 5172600 - DNA, 25 bp, Homo sapien
gattttcagggccataacttccatg

SEQ ID NO: 5172601 - DNA, 25 bp, Homo sapien
ttaaatacagtacccagccagcaac

SEQ ID NO: 5172602 - DNA, 25 bp, Homo sapien
aaaagagaacgcatgctgtacagca

SEQ ID NO: 5172603 - DNA, 25 bp, Homo sapien
gtccagcagcatagagaaaagcatc

SEQ ID NO: 5172604 - DNA, 25 bp, Homo sapien
tcttctacttggtacagcactggcc

SEQ ID NO: 5172605 - DNA, 25 bp, Homo sapien
cacagagacgtgtgcatatgtcaca

SEQ ID NO: 5172606 - DNA, 25 bp, Homo sapien
tctgcgtggaccagtaagaatgaag

SEQ ID NO: 5172607 - DNA, 25 bp, Homo sapien
tgtaggataaatgcaggccctccga

SEQ ID NO: 5172608 - DNA, 25 bp, Homo sapien
gaccactgccttgttaggctcagca

SEQ ID NO: 5172609 - DNA, 25 bp, Homo sapien
gcaaacattagagctgagacagcac

SEQ ID NO: 5172610 - DNA, 25 bp, Homo sapien
aattagactgaaatgcctcagcggg

SEQ ID NO: 5172611 - DNA, 25 bp, Homo sapien
ctggttctctgcaagccatttccca

SEQ ID NO: 5172612 - DNA, 25 bp, Homo sapien
ggattttgcccattccgttcctctg

SEQ ID NO: 5172613 - DNA, 25 bp, Homo sapien
tgaccaaagaaagacatggccgaga

SEQ ID NO: 5172614 - DNA, 25 bp, Homo sapien
tgcaaggacttgtcaagtctctgtc

SEQ ID NO: 5172615 - DNA, 25 bp, Homo sapien
gttggactgaggcaaattggcagct

SEQ ID NO: 5172616 - DNA, 25 bp, Homo sapien
tagacgggccacctgttggactgag

SEQ ID NO: 5172617 - DNA, 25 bp, Homo sapien
ggccaggacagtagacgggccacct

SEQ ID NO: 5172618 - DNA, 25 bp, Homo sapien
cagtagacgggccacctgttggact

SEQ ID NO: 5172619 - DNA, 25 bp, Homo sapien
gtcgccaccctctccggatggggtc

SEQ ID NO: 5172620 - DNA, 25 bp, Homo sapien
gggctgggccatgtcgccaccctct

SEQ ID NO: 5172621 - DNA, 25 bp, Homo sapien
tccttggctgctaagctaaggccaa

SEQ ID NO: 5172622 - DNA, 25 bp, Homo sapien
atccttggctgctaagctaaggcca

SEQ ID NO: 5172623 - DNA, 25 bp, Homo sapien
gggagcagttgtctaccaggacaca

SEQ ID NO: 5172624 - DNA, 25 bp, Homo sapien
cacacacctggagtgggttggcttt

SEQ ID NO: 5172625 - DNA, 25 bp, Homo sapien
tggatccttgctgggttcctgccag

SEQ ID NO: 5172626 - DNA, 25 bp, Homo sapien
tcccggctcgctcaaggattgttgg

SEQ ID NO: 5172627 - DNA, 25 bp, Homo sapien
ttcatctgccaatggacactctggt

SEQ ID NO: 5172628 - DNA, 25 bp, Homo sapien
ctgcgccgggccatgcaccacattt

SEQ ID NO: 5172629 - DNA, 25 bp, Homo sapien
tttaatccattcatctgccaatgga

SEQ ID NO: 5172630 - DNA, 25 bp, Homo sapien
tgccaatggacactctggttgattc

SEQ ID NO: 5172631 - DNA, 25 bp, Homo sapien
ggctcaggaaatctacctgcttcgg

SEQ ID NO: 5172632 - DNA, 25 bp, Homo sapien
atgatcacgtctcactgagcctcaa

SEQ ID NO: 5172633 - DNA, 25 bp, Homo sapien
gcatgatcacgtctcactgagcctc

SEQ ID NO: 5172634 - DNA, 25 bp, Homo sapien
tcaacctcccgggctgagcctccca

SEQ ID NO: 5172635 - DNA, 25 bp, Homo sapien
gaccacttgataatgcaatcctgca

SEQ ID NO: 5172636 - DNA, 25 bp, Homo sapien
ccggccgtaagatccagaattgtcc

SEQ ID NO: 5172637 - DNA, 25 bp, Homo sapien
ggctgcagcctttgcattgaccact

SEQ ID NO: 5172638 - DNA, 25 bp, Homo sapien
ccatcactatgcaagctgctgccag

SEQ ID NO: 5172639 - DNA, 25 bp, Homo sapien
agcagcagccccaggtggcatcttc

SEQ ID NO: 5172640 - DNA, 25 bp, Homo sapien
aacagtagcatccatgtacctggag

SEQ ID NO: 5172641 - DNA, 25 bp, Homo sapien
ctgtgactcccagaaacagtagcat

SEQ ID NO: 5172642 - DNA, 25 bp, Homo sapien
tgactcccagaaacagtagcatcca

SEQ ID NO: 5172643 - DNA, 25 bp, Homo sapien
caaaaggagggcacccttcctgagc

SEQ ID NO: 5172644 - DNA, 25 bp, Homo sapien
cccatactctatgcagctgtggctg

SEQ ID NO: 5172645 - DNA, 25 bp, Homo sapien
tttccactactgcaggccaataggc

SEQ ID NO: 5172646 - DNA, 25 bp, Homo sapien
cctgagctccagaagacttgcagct

SEQ ID NO: 5172647 - DNA, 25 bp, Homo sapien
ctggtgggagctaaaagccgcagca

SEQ ID NO: 5172648 - DNA, 25 bp, Homo sapien
cattcttttcctgtcaaacgtgagc

SEQ ID NO: 5172649 - DNA, 25 bp, Homo sapien
aagggtctatccctctgagggtcgg

SEQ ID NO: 5172650 - DNA, 25 bp, Homo sapien
ggctgcagcgttcggtcccttttgc

SEQ ID NO: 5172651 - DNA, 25 bp, Homo sapien
ctgaagagcacatggatcttcaaaa

SEQ ID NO: 5172652 - DNA, 25 bp, Homo sapien
taacattttgataggtgtattgctg

SEQ ID NO: 5172653 - DNA, 25 bp, Homo sapien
ctcccacaaacgctcttgattctga

SEQ ID NO: 5172654 - DNA, 25 bp, Homo sapien
tcccacaaacgctcttgattctgag

SEQ ID NO: 5172655 - DNA, 25 bp, Homo sapien
ttttgataggtgtattgctggaagg

SEQ ID NO: 5172656 - DNA, 25 bp, Homo sapien
caaggcgaaatactatctctacaaa

SEQ ID NO: 5172657 - DNA, 25 bp, Homo sapien
gaagctaaactggatagcaggtcag

SEQ ID NO: 5172658 - DNA, 25 bp, Homo sapien
tcctatgtggtgaaactacgaagag

SEQ ID NO: 5172659 - DNA, 25 bp, Homo sapien
gaggatgactcgagcctggcagatc

SEQ ID NO: 5172660 - DNA, 25 bp, Homo sapien
ggatatagactaaaacgaaccctca

SEQ ID NO: 5172661 - DNA, 25 bp, Homo sapien
cgaaccctcatccagaactagttgg

SEQ ID NO: 5172662 - DNA, 25 bp, Homo sapien
tgggaaacaactggacattatcaaa

SEQ ID NO: 5172663 - DNA, 25 bp, Homo sapien
caaatgaagtcaaaggtgcagatcc

SEQ ID NO: 5172664 - DNA, 25 bp, Homo sapien
gaacatccatgcagtagaattcctg

SEQ ID NO: 5172665 - DNA, 25 bp, Homo sapien
tttgtggggattcgtgctgtgaaca

SEQ ID NO: 5172666 - DNA, 25 bp, Homo sapien
tggggattcgtgctgtgaacatcca

SEQ ID NO: 5172667 - DNA, 25 bp, Homo sapien
ctgtgaacatccatgcagtagaatt

SEQ ID NO: 5172668 - DNA, 25 bp, Homo sapien
aagcagcaacgctttcattctcagt

SEQ ID NO: 5172669 - DNA, 25 bp, Homo sapien
gggcctgccacttgtgataagagca

SEQ ID NO: 5172670 - DNA, 25 bp, Homo sapien
tgccacttgtgataagagcagtgct

SEQ ID NO: 5172671 - DNA, 25 bp, Homo sapien
tcagtccagcatagggcctgccact

SEQ ID NO: 5172672 - DNA, 25 bp, Homo sapien
tgtgggtgagtggttatgtcttcta

SEQ ID NO: 5172673 - DNA, 25 bp, Homo sapien
taggccgtaagtttccagcagggat

SEQ ID NO: 5172674 - DNA, 25 bp, Homo sapien
gagtggttatgtcttctaggccgta

SEQ ID NO: 5172675 - DNA, 25 bp, Homo sapien
cagccatgttgtgctcgtcttctgt

SEQ ID NO: 5172676 - DNA, 25 bp, Homo sapien
cacataaaagcagtctgttctgtag

SEQ ID NO: 5172677 - DNA, 25 bp, Homo sapien
cataaaagcagtctgttctgtagac

SEQ ID NO: 5172678 - DNA, 25 bp, Homo sapien
aaaagcagtctgttctgtagacagg

SEQ ID NO: 5172679 - DNA, 25 bp, Homo sapien
taaaagcagtctgttctgtagacag

SEQ ID NO: 5172680 - DNA, 25 bp, Homo sapien
tagagatattcctgtcatgccaaaa

SEQ ID NO: 5172681 - DNA, 25 bp, Homo sapien
caatagcatgtagccttgtgtctgg

SEQ ID NO: 5172682 - DNA, 25 bp, Homo sapien
catcctccaatgtatgggaacaaaa

SEQ ID NO: 5172683 - DNA, 25 bp, Homo sapien
tatagttggataaacatcagtacca

SEQ ID NO: 5172684 - DNA, 25 bp, Homo sapien
tcattctccaaaacctcaagactag

SEQ ID NO: 5172685 - DNA, 25 bp, Homo sapien
gatttccacaagtaagtcatggtga

SEQ ID NO: 5172686 - DNA, 25 bp, Homo sapien
tacaccattggtactttggtcctca

SEQ ID NO: 5172687 - DNA, 25 bp, Homo sapien
aaaatcttagcagttatggtacacc

SEQ ID NO: 5172688 - DNA, 25 bp, Homo sapien
gggaacagcacatctgaagctctaa

SEQ ID NO: 5172689 - DNA, 25 bp, Homo sapien
tgaagctctaacactcccacgtagc

SEQ ID NO: 5172690 - DNA, 25 bp, Homo sapien
agcacatctgaagctctaacactcc

SEQ ID NO: 5172691 - DNA, 25 bp, Homo sapien
atctgaagctctaacactcccacgt

SEQ ID NO: 5172692 - DNA, 25 bp, Homo sapien
ctttgctcacgtttttgaagggtca

SEQ ID NO: 5172693 - DNA, 25 bp, Homo sapien
cactttgctcacgtttttgaagggt

SEQ ID NO: 5172694 - DNA, 25 bp, Homo sapien
ttcagacgttcctgtttgggccagc

SEQ ID NO: 5172695 - DNA, 25 bp, Homo sapien
taagactgtcctacatttcagacgt

SEQ ID NO: 5172696 - DNA, 25 bp, Homo sapien
tgtcctacatttcagacgttcctgt

SEQ ID NO: 5172697 - DNA, 25 bp, Homo sapien
tacatttcagacgttcctgtttggg

SEQ ID NO: 5172698 - DNA, 25 bp, Homo sapien
ccagtgaaagaagactgaagttgtc

SEQ ID NO: 5172699 - DNA, 25 bp, Homo sapien
aagaagactgaagttgtctcttcat

SEQ ID NO: 5172700 - DNA, 25 bp, Homo sapien
gaaagaagactgaagttgtctcttc

SEQ ID NO: 5172701 - DNA, 25 bp, Homo sapien
ccttccagtgaaagaagactgaagt

SEQ ID NO: 5172702 - DNA, 25 bp, Homo sapien
tgctttcttcctttgggagccttca

SEQ ID NO: 5172703 - DNA, 25 bp, Homo sapien
tgcattccttcctttctattttgct

SEQ ID NO: 5172704 - DNA, 25 bp, Homo sapien
gctttcttcctttgggagccttcat

SEQ ID NO: 5172705 - DNA, 25 bp, Homo sapien
atttatttgctgtttcactttgcat

SEQ ID NO: 5172706 - DNA, 25 bp, Homo sapien
ttgatcaaactccattagaagctgg

SEQ ID NO: 5172707 - DNA, 25 bp, Homo sapien
tagaagctggttgtcaagggagtat

SEQ ID NO: 5172708 - DNA, 25 bp, Homo sapien
cctgttgtataacctccattgatca

SEQ ID NO: 5172709 - DNA, 25 bp, Homo sapien
tcttcctgttgtataacctccattg

SEQ ID NO: 5172710 - DNA, 25 bp, Homo sapien
aatagagaactattaatagcctacc

SEQ ID NO: 5172711 - DNA, 25 bp, Homo sapien
gaattggatgtaatgcactcctcag

SEQ ID NO: 5172712 - DNA, 25 bp, Homo sapien
gatgaacatcgatacgaaaatactc

SEQ ID NO: 5172713 - DNA, 25 bp, Homo sapien
taaacataaccaataacaacacatg

SEQ ID NO: 5172714 - DNA, 25 bp, Homo sapien
gcagccgcggctggcagaatcccgc

SEQ ID NO: 5172715 - DNA, 25 bp, Homo sapien
gcaagtaagagtcttacgaaaggga

SEQ ID NO: 5172716 - DNA, 25 bp, Homo sapien
ccgcggctggcagaatcccgcccct

SEQ ID NO: 5172717 - DNA, 25 bp, Homo sapien
atcaccagcccggacaccggctcca

SEQ ID NO: 5172718 - DNA, 25 bp, Homo sapien
ccaaccggtcgaagctgaaaattct

SEQ ID NO: 5172719 - DNA, 25 bp, Homo sapien
ggcgccagccacacgagagagcagt

SEQ ID NO: 5172720 - DNA, 25 bp, Homo sapien
gctgcaagagcagccgcggaggcag

SEQ ID NO: 5172721 - DNA, 25 bp, Homo sapien
cacgagagagcagtaccacgctctt

SEQ ID NO: 5172722 - DNA, 25 bp, Homo sapien
cccacaaagatttgttggcagccta

SEQ ID NO: 5172723 - DNA, 25 bp, Homo sapien
aaggctcaggaatcaaaacgtgtgt

SEQ ID NO: 5172724 - DNA, 25 bp, Homo sapien
aaacgtgtgtaaatctgatcccggg

SEQ ID NO: 5172725 - DNA, 25 bp, Homo sapien
caccctttgcacctagtcacagcaa

SEQ ID NO: 5172726 - DNA, 25 bp, Homo sapien
actcagatgtttcctcagaacccaa

SEQ ID NO: 5172727 - DNA, 25 bp, Homo sapien
agaagatcattaagccaccatagtc

SEQ ID NO: 5172728 - DNA, 25 bp, Homo sapien
tcaattctgtaactaggtgtactag

SEQ ID NO: 5172729 - DNA, 25 bp, Homo sapien
ggtgactactacatgactggcaatt

SEQ ID NO: 5172730 - DNA, 25 bp, Homo sapien
tctgtggtttggtgctgcaatagca

SEQ ID NO: 5172731 - DNA, 25 bp, Homo sapien
tattttacaaacctatcaagccttg

SEQ ID NO: 5172732 - DNA, 25 bp, Homo sapien
caaaactgctaccaattttcactac

SEQ ID NO: 5172733 - DNA, 25 bp, Homo sapien
ggcaatgcacatcttctgcataata

SEQ ID NO: 5172734 - DNA, 25 bp, Homo sapien
tacaccttgcctaaagaagtgagct

SEQ ID NO: 5172735 - DNA, 25 bp, Homo sapien
gggaagctcccttgagcctcagagt

SEQ ID NO: 5172736 - DNA, 25 bp, Homo sapien
cagtcatgttgatgctaacgtctca

SEQ ID NO: 5172737 - DNA, 25 bp, Homo sapien
tacttgggagcataagatgggaagc

SEQ ID NO: 5172738 - DNA, 25 bp, Homo sapien
tgatgttcaccggtccactgcacac

SEQ ID NO: 5172739 - DNA, 25 bp, Homo sapien
tgaggaggatggttatgggatgaaa

SEQ ID NO: 5172740 - DNA, 25 bp, Homo sapien
taagctacctcatactgtaaggtga

SEQ ID NO: 5172741 - DNA, 25 bp, Homo sapien
ctgtaaggtgatattttactctagt

SEQ ID NO: 5172742 - DNA, 25 bp, Homo sapien
taaatgctgtaggtgttctgattgc

SEQ ID NO: 5172743 - DNA, 25 bp, Homo sapien
tttgtggcaactcttgagtcaagca

SEQ ID NO: 5172744 - DNA, 25 bp, Homo sapien
agcatatcgatcagtaccattttcc

SEQ ID NO: 5172745 - DNA, 25 bp, Homo sapien
ttattatgtctggtgatggtgatct

SEQ ID NO: 5172746 - DNA, 25 bp, Homo sapien
tttgtctcactcactagaaaataaa

SEQ ID NO: 5172747 - DNA, 25 bp, Homo sapien
gctttatataggcagtacacggcac

SEQ ID NO: 5172748 - DNA, 25 bp, Homo sapien
tgggtgggcaacaatcctatcactt

SEQ ID NO: 5172749 - DNA, 25 bp, Homo sapien
gaatccataacgtcctgggtgggca

SEQ ID NO: 5172750 - DNA, 25 bp, Homo sapien
caccccaacatagagctttttattg

SEQ ID NO: 5172751 - DNA, 25 bp, Homo sapien
tcctttgactccaccggactcatcg

SEQ ID NO: 5172752 - DNA, 25 bp, Homo sapien
tgtacaaggcagtgatttagtttct

SEQ ID NO: 5172753 - DNA, 25 bp, Homo sapien
caataaatagcgtaggctccccggt

SEQ ID NO: 5172754 - DNA, 25 bp, Homo sapien
cccgttatcatataatctgcagaga

SEQ ID NO: 5172755 - DNA, 25 bp, Homo sapien
tataatgttgaacagcagtgaagat

SEQ ID NO: 5172756 - DNA, 25 bp, Homo sapien
tatgccttaaatcgatgtatctaac

SEQ ID NO: 5172757 - DNA, 25 bp, Homo sapien
tttactttgtgcatcgtgtgactgc

SEQ ID NO: 5172758 - DNA, 25 bp, Homo sapien
attccaacaagaaactactgtacct

SEQ ID NO: 5172759 - DNA, 25 bp, Homo sapien
ttattccaacaagaaactactgtac

SEQ ID NO: 5172760 - DNA, 25 bp, Homo sapien
tattccaacaagaaactactgtacc

SEQ ID NO: 5172761 - DNA, 25 bp, Homo sapien
ggctggtctcgaggttgagaaacct

SEQ ID NO: 5172762 - DNA, 25 bp, Homo sapien
tacaggcgtgagcttatttctctgt

SEQ ID NO: 5172763 - DNA, 25 bp, Homo sapien
ttatgtgcttaaggcccaattttca

SEQ ID NO: 5172764 - DNA, 25 bp, Homo sapien
cgaggttgagaaacctcaggtgatc

SEQ ID NO: 5172765 - DNA, 25 bp, Homo sapien
tgcattacattttgggctcctttct

SEQ ID NO: 5172766 - DNA, 25 bp, Homo sapien
aaaattaccagggttctgagagtca

SEQ ID NO: 5172767 - DNA, 25 bp, Homo sapien
gttcatctgttagtgcttgcattac

SEQ ID NO: 5172768 - DNA, 25 bp, Homo sapien
taaaaaactatagtcagagaagtgc

SEQ ID NO: 5172769 - DNA, 25 bp, Homo sapien
cagggacacaaaacgaccaaggcat

SEQ ID NO: 5172770 - DNA, 25 bp, Homo sapien
atctccccaagtggtattctgtagc

SEQ ID NO: 5172771 - DNA, 25 bp, Homo sapien
tattctgtagcagagtcacactgcc

SEQ ID NO: 5172772 - DNA, 25 bp, Homo sapien
caccctgtactgagtaagctgatct

SEQ ID NO: 5172773 - DNA, 25 bp, Homo sapien
caatgctcatacgttacctgcacga

SEQ ID NO: 5172774 - DNA, 25 bp, Homo sapien
cctgcacgatgtgaagaaagatctg

SEQ ID NO: 5172775 - DNA, 25 bp, Homo sapien
taaggatccatcagacaatgctcat

SEQ ID NO: 5172776 - DNA, 25 bp, Homo sapien
tgggcaacacactaaaccagatgag

SEQ ID NO: 5172777 - DNA, 25 bp, Homo sapien
tgattagtctggcattgggagtgcc

SEQ ID NO: 5172778 - DNA, 25 bp, Homo sapien
ccagctgattagtctggcattggga

SEQ ID NO: 5172779 - DNA, 25 bp, Homo sapien
tagtctggcattgggagtgcctgct

SEQ ID NO: 5172780 - DNA, 25 bp, Homo sapien
cagctgattagtctggcattgggag

SEQ ID NO: 5172781 - DNA, 25 bp, Homo sapien
ccatagtacctgtaaactgatgctc

SEQ ID NO: 5172782 - DNA, 25 bp, Homo sapien
ttccatagtacctgtaaactgatgc

SEQ ID NO: 5172783 - DNA, 25 bp, Homo sapien
tctgcattgctcctctatagagctc

SEQ ID NO: 5172784 - DNA, 25 bp, Homo sapien
atgctctgcattgctcctctataga

SEQ ID NO: 5172785 - DNA, 25 bp, Homo sapien
tcagctgtgcaagtatggcaagatt

SEQ ID NO: 5172786 - DNA, 25 bp, Homo sapien
gttggtcagctgtgcaagtatggca

SEQ ID NO: 5172787 - DNA, 25 bp, Homo sapien
tggtcagctgtgcaagtatggcaag

SEQ ID NO: 5172788 - DNA, 25 bp, Homo sapien
ggtcagctgtgcaagtatggcaaga

SEQ ID NO: 5172789 - DNA, 25 bp, Homo sapien
ccaatggttctttgatggcttaaaa

SEQ ID NO: 5172790 - DNA, 25 bp, Homo sapien
aacttcacattctctagcagttgaa

SEQ ID NO: 5172791 - DNA, 25 bp, Homo sapien
acttcacattctctagcagttgaat

SEQ ID NO: 5172792 - DNA, 25 bp, Homo sapien
ccgggatggctgtagggcttgtgga

SEQ ID NO: 5172793 - DNA, 25 bp, Homo sapien
gagaatggtgactgagtcactaagg

SEQ ID NO: 5172794 - DNA, 25 bp, Homo sapien
gaacattcaggactgttttggcaca

SEQ ID NO: 5172795 - DNA, 25 bp, Homo sapien
cattaaggccaacacgaacattcag

SEQ ID NO: 5172796 - DNA, 25 bp, Homo sapien
tgggatcctagaacctaaaatgctt

SEQ ID NO: 5172797 - DNA, 25 bp, Homo sapien
cagactggatactatgtacagagca

SEQ ID NO: 5172798 - DNA, 25 bp, Homo sapien
agtattacatagtttgcagctgagg

SEQ ID NO: 5172799 - DNA, 25 bp, Homo sapien
atacatgagtgaaccaagcagatgg

SEQ ID NO: 5172800 - DNA, 25 bp, Homo sapien
agaagcttagtattaggctgggcgc

SEQ ID NO: 5172801 - DNA, 25 bp, Homo sapien
ttaagattagaagcttagtattagg

SEQ ID NO: 5172802 - DNA, 25 bp, Homo sapien
ttagaagcttagtattaggctgggc

SEQ ID NO: 5172803 - DNA, 25 bp, Homo sapien
gattagaagcttagtattaggctgg

SEQ ID NO: 5172804 - DNA, 25 bp, Homo sapien
ggatttgggattgtggtgtcccaca

SEQ ID NO: 5172805 - DNA, 25 bp, Homo sapien
tgtcaactgtagtgaaccatctgta

SEQ ID NO: 5172806 - DNA, 25 bp, Homo sapien
tgtagattcccggactggaatggac

SEQ ID NO: 5172807 - DNA, 25 bp, Homo sapien
ggcaggaggagtcccatgtccttgt

SEQ ID NO: 5172808 - DNA, 25 bp, Homo sapien
ttttcgaattctacagggagcttga

SEQ ID NO: 5172809 - DNA, 25 bp, Homo sapien
tattttcgaattctacagggagctt

SEQ ID NO: 5172810 - DNA, 25 bp, Homo sapien
gttattttcgaattctacagggagc

SEQ ID NO: 5172811 - DNA, 25 bp, Homo sapien
tcgaattctacagggagcttgaagc

SEQ ID NO: 5172812 - DNA, 25 bp, Homo sapien
ttttacagtaacagtatcagacatc

SEQ ID NO: 5172813 - DNA, 25 bp, Homo sapien
tcttttacagtaacagtatcagaca

SEQ ID NO: 5172814 - DNA, 25 bp, Homo sapien
atcttttacagtaacagtatcagac

SEQ ID NO: 5172815 - DNA, 25 bp, Homo sapien
cttttacagtaacagtatcagacat

SEQ ID NO: 5172816 - DNA, 25 bp, Homo sapien
gttctcaatacaatgttcattcttc

SEQ ID NO: 5172817 - DNA, 25 bp, Homo sapien
ctgcaaatctatattgttctcaata

SEQ ID NO: 5172818 - DNA, 25 bp, Homo sapien
tcattcttctctaccaaaatcttcc

SEQ ID NO: 5172819 - DNA, 25 bp, Homo sapien
tcaactctggttgtatctttcactt

SEQ ID NO: 5172820 - DNA, 25 bp, Homo sapien
gaattttgagaagtgagttttgtat

SEQ ID NO: 5172821 - DNA, 25 bp, Homo sapien
attttgagaagtgagttttgtatga

SEQ ID NO: 5172822 - DNA, 25 bp, Homo sapien
aattttgagaagtgagttttgtatg

SEQ ID NO: 5172823 - DNA, 25 bp, Homo sapien
ggacctctttggataccctgtagaa

SEQ ID NO: 5172824 - DNA, 25 bp, Homo sapien
ccagacaggtgcgagaagcaatccg

SEQ ID NO: 5172825 - DNA, 25 bp, Homo sapien
aagccttgcttcgtttcctgactga

SEQ ID NO: 5172826 - DNA, 25 bp, Homo sapien
aagtccaccggcctgttaaatgcca

SEQ ID NO: 5172827 - DNA, 25 bp, Homo sapien
tgactactttggacccaccttgttg

SEQ ID NO: 5172828 - DNA, 25 bp, Homo sapien
tctgggcctatgtcaaaagaaacct

SEQ ID NO: 5172829 - DNA, 25 bp, Homo sapien
gatagctgaagtaacgttctggaac

SEQ ID NO: 5172830 - DNA, 25 bp, Homo sapien
ggctttcttggaacattctctctgg

SEQ ID NO: 5172831 - DNA, 25 bp, Homo sapien
ccttccaaatcgttacagtcgctat

SEQ ID NO: 5172832 - DNA, 25 bp, Homo sapien
ctccttccaaatcgttacagtcgct

SEQ ID NO: 5172833 - DNA, 25 bp, Homo sapien
tccctccttccaaatcgttacagtc

SEQ ID NO: 5172834 - DNA, 25 bp, Homo sapien
cttccaaatcgttacagtcgctatg

SEQ ID NO: 5172835 - DNA, 25 bp, Homo sapien
ttatgtactgccttcattgtcgaag

SEQ ID NO: 5172836 - DNA, 25 bp, Homo sapien
tcattgtcgaagaagcgtggcattg

SEQ ID NO: 5172837 - DNA, 25 bp, Homo sapien
tactgccttcattgtcgaagaagcg

SEQ ID NO: 5172838 - DNA, 25 bp, Homo sapien
ccttcattgtcgaagaagcgtggca

SEQ ID NO: 5172839 - DNA, 25 bp, Homo sapien
tgacaaacaggaaatagctaagatt

SEQ ID NO: 5172840 - DNA, 25 bp, Homo sapien
ccacgctttgccacatacatgcttt

SEQ ID NO: 5172841 - DNA, 25 bp, Homo sapien
caaagtcttcgtgtgttgtccaggc

SEQ ID NO: 5172842 - DNA, 25 bp, Homo sapien
tacaggtatgtaccgtgacgcatga

SEQ ID NO: 5172843 - DNA, 25 bp, Homo sapien
gtctgtccaaatgactgcaatggcc

SEQ ID NO: 5172844 - DNA, 25 bp, Homo sapien
tctgtccaaatgactgcaatggccg

SEQ ID NO: 5172845 - DNA, 25 bp, Homo sapien
cgaactagctttaactttgagcttg

SEQ ID NO: 5172846 - DNA, 25 bp, Homo sapien
tggttctcctgtgatatctctggtg

SEQ ID NO: 5172847 - DNA, 25 bp, Homo sapien
ttcacacactgcaaggctccgaact

SEQ ID NO: 5172848 - DNA, 25 bp, Homo sapien
tctcctgtgatatctctggtgcagg

SEQ ID NO: 5172849 - DNA, 25 bp, Homo sapien
ttttactaggatgacaaacacttgc

SEQ ID NO: 5172850 - DNA, 25 bp, Homo sapien
tcttcttaattcatcataccagtta

SEQ ID NO: 5172851 - DNA, 25 bp, Homo sapien
gacactggcaacttccttacactca

SEQ ID NO: 5172852 - DNA, 25 bp, Homo sapien
tgcactctctgtcttgtttaccaaa

SEQ ID NO: 5172853 - DNA, 25 bp, Homo sapien
ttttctgggcaacttatcactggcc

SEQ ID NO: 5172854 - DNA, 25 bp, Homo sapien
tgattgtgttaactggatctgaatt

SEQ ID NO: 5172855 - DNA, 25 bp, Homo sapien
tgggcaacttatcactggccttttc

SEQ ID NO: 5172856 - DNA, 25 bp, Homo sapien
tctgggcaacttatcactggccttt

SEQ ID NO: 5172857 - DNA, 25 bp, Homo sapien
tactaaaaattcatgtagatctatg

SEQ ID NO: 5172858 - DNA, 25 bp, Homo sapien
gaatcagtgtattcttgactggaat

SEQ ID NO: 5172859 - DNA, 25 bp, Homo sapien
gatctatgccagttgaatcagtgta

SEQ ID NO: 5172860 - DNA, 25 bp, Homo sapien
catgtagatctatgccagttgaatc

SEQ ID NO: 5172861 - DNA, 25 bp, Homo sapien
aaacagattagggttgggatcatcc

SEQ ID NO: 5172862 - DNA, 25 bp, Homo sapien
taaaagccagtcatgaacgaccata

SEQ ID NO: 5172863 - DNA, 25 bp, Homo sapien
tctataactgtggtgatagtgctcc

SEQ ID NO: 5172864 - DNA, 25 bp, Homo sapien
ttaaaaacgtttgcatctatagagg

SEQ ID NO: 5172865 - DNA, 25 bp, Homo sapien
ctggcttgactactacagcaggagt

SEQ ID NO: 5172866 - DNA, 25 bp, Homo sapien
tcctgacctgaactcacaaaactgt

SEQ ID NO: 5172867 - DNA, 25 bp, Homo sapien
tatttttctactgccacaaccctgg

SEQ ID NO: 5172868 - DNA, 25 bp, Homo sapien
actccctttgttaaatctgtcatgg

SEQ ID NO: 5172869 - DNA, 25 bp, Homo sapien
gatcaagaaaacgaggccaagaggt

SEQ ID NO: 5172870 - DNA, 25 bp, Homo sapien
acagacatctttagttaggctcagg

SEQ ID NO: 5172871 - DNA, 25 bp, Homo sapien
ggtcacctgaaagtctacacatcag

SEQ ID NO: 5172872 - DNA, 25 bp, Homo sapien
gagtacctgtatgtgctcctttaga

SEQ ID NO: 5172873 - DNA, 25 bp, Homo sapien
caatgaaatctaaaatttcttgttc

SEQ ID NO: 5172874 - DNA, 25 bp, Homo sapien
aatttcttgttccaatttcagcagc

SEQ ID NO: 5172875 - DNA, 25 bp, Homo sapien
tttcttgttccaatttcagcagcat

SEQ ID NO: 5172876 - DNA, 25 bp, Homo sapien
tattaccaatgaaatctaaaatttc

SEQ ID NO: 5172877 - DNA, 25 bp, Homo sapien
atcaacattgtggtctaatccaaag

SEQ ID NO: 5172878 - DNA, 25 bp, Homo sapien
caaagtaagcggctactctgtgtaa

SEQ ID NO: 5172879 - DNA, 25 bp, Homo sapien
taatagcatcctatggtaagatgtc

SEQ ID NO: 5172880 - DNA, 25 bp, Homo sapien
tactctgtgtaatagcatcctatgg

SEQ ID NO: 5172881 - DNA, 25 bp, Homo sapien
tttgtttactatgacagacttccca

SEQ ID NO: 5172882 - DNA, 25 bp, Homo sapien
ttgctagttttgtttactatgacag

SEQ ID NO: 5172883 - DNA, 25 bp, Homo sapien
gctagttttgtttactatgacagac

SEQ ID NO: 5172884 - DNA, 25 bp, Homo sapien
agttttgtttactatgacagacttc

SEQ ID NO: 5172885 - DNA, 25 bp, Homo sapien
ttatagatgcctgaatttactgccc

SEQ ID NO: 5172886 - DNA, 25 bp, Homo sapien
taacaccactgattcaaggctggag

SEQ ID NO: 5172887 - DNA, 25 bp, Homo sapien
gacactgggttgttgacatccataa

SEQ ID NO: 5172888 - DNA, 25 bp, Homo sapien
cgctccattgagacaccccagtgga

SEQ ID NO: 5172889 - DNA, 25 bp, Homo sapien
caaaccgaggttcaaatggcttaag

SEQ ID NO: 5172890 - DNA, 25 bp, Homo sapien
tacagtagggcacaggtttgctaac

SEQ ID NO: 5172891 - DNA, 25 bp, Homo sapien
gacaaggaaagtgcagtgccgtatc

SEQ ID NO: 5172892 - DNA, 25 bp, Homo sapien
tgatctagaggacaaacacaaggtt

SEQ ID NO: 5172893 - DNA, 25 bp, Homo sapien
gaaagtcttcacctttatcatcctt

SEQ ID NO: 5172894 - DNA, 25 bp, Homo sapien
gatataacgtttctgaaagtcttca

SEQ ID NO: 5172895 - DNA, 25 bp, Homo sapien
tctctcttgaggatataacgtttct

SEQ ID NO: 5172896 - DNA, 25 bp, Homo sapien
gagttatctctcttgaggatataac

SEQ ID NO: 5172897 - DNA, 25 bp, Homo sapien
ttttaggcaaatgaactactggtat

SEQ ID NO: 5172898 - DNA, 25 bp, Homo sapien
gaactactggtatagtatgtcttgc

SEQ ID NO: 5172899 - DNA, 25 bp, Homo sapien
tatacaaatcctacaattgttctag

SEQ ID NO: 5172900 - DNA, 25 bp, Homo sapien
gtatgtcttgcacctatacaaatcc

SEQ ID NO: 5172901 - DNA, 25 bp, Homo sapien
ttctatagatttgcttcttctgtca

SEQ ID NO: 5172902 - DNA, 25 bp, Homo sapien
tcttgggaaaatattcggtctctgg

SEQ ID NO: 5172903 - DNA, 25 bp, Homo sapien
tctgtcatctttcaaacgtattctc

SEQ ID NO: 5172904 - DNA, 25 bp, Homo sapien
tattcggtctctggctctctggtac

SEQ ID NO: 5172905 - DNA, 25 bp, Homo sapien
gatgaccttatgtgcaacaaatgtg

SEQ ID NO: 5172906 - DNA, 25 bp, Homo sapien
gggagactgagaccctacaacgtaa

SEQ ID NO: 5172907 - DNA, 25 bp, Homo sapien
taacacatattacaggacagatgct

SEQ ID NO: 5172908 - DNA, 25 bp, Homo sapien
atctcaagtctgtcacaagtctggg

SEQ ID NO: 5172909 - DNA, 25 bp, Homo sapien
aataatgtaattctcttgggaacac

SEQ ID NO: 5172910 - DNA, 25 bp, Homo sapien
aatgtaattctcttgggaacacagg

SEQ ID NO: 5172911 - DNA, 25 bp, Homo sapien
tcaataatgtaattctcttgggaac

SEQ ID NO: 5172912 - DNA, 25 bp, Homo sapien
ttgtcaataatgtaattctcttggg

SEQ ID NO: 5172913 - DNA, 25 bp, Homo sapien
ctaaatatctggcgcctctgctggg

SEQ ID NO: 5172914 - DNA, 25 bp, Homo sapien
tatctggcgcctctgctgggtacta

SEQ ID NO: 5172915 - DNA, 25 bp, Homo sapien
tggcgcctctgctgggtactactgg

SEQ ID NO: 5172916 - DNA, 25 bp, Homo sapien
cgcctctgctgggtactactggcat

SEQ ID NO: 5172917 - DNA, 25 bp, Homo sapien
ggttacagcaggtttcaggtttcga

SEQ ID NO: 5172918 - DNA, 25 bp, Homo sapien
caggtttcgaagagagctgtctgaa

SEQ ID NO: 5172919 - DNA, 25 bp, Homo sapien
cagggtcgtggttccgagtacttca

SEQ ID NO: 5172920 - DNA, 25 bp, Homo sapien
ctcttgtcaggactgagattccact

SEQ ID NO: 5172921 - DNA, 25 bp, Homo sapien
ttttgaaagcctgcctatgcttttg

SEQ ID NO: 5172922 - DNA, 25 bp, Homo sapien
tttgaaagcctgcctatgcttttgc

SEQ ID NO: 5172923 - DNA, 25 bp, Homo sapien
catattaccccttaagtgctccgga

SEQ ID NO: 5172924 - DNA, 25 bp, Homo sapien
taaataatcctaggtgagaaaccat

SEQ ID NO: 5172925 - DNA, 25 bp, Homo sapien
cctatgggcattcaatcaagagata

SEQ ID NO: 5172926 - DNA, 25 bp, Homo sapien
aattgatggttgtaaatctgtgtcc

SEQ ID NO: 5172927 - DNA, 25 bp, Homo sapien
ctacagacacgtgctattacgccca

SEQ ID NO: 5172928 - DNA, 25 bp, Homo sapien
cacgtgctattacgcccagctgatt

SEQ ID NO: 5172929 - DNA, 25 bp, Homo sapien
cagacacgtgctattacgcccagct

SEQ ID NO: 5172930 - DNA, 25 bp, Homo sapien
gacacgtgctattacgcccagctga

SEQ ID NO: 5172931 - DNA, 25 bp, Homo sapien
tagtgctaggagatgcgacttgccc

SEQ ID NO: 5172932 - DNA, 25 bp, Homo sapien
gaaagagagcctgtagatgacccta

SEQ ID NO: 5172933 - DNA, 25 bp, Homo sapien
gtatgcctgccgcttccaagggaag

SEQ ID NO: 5172934 - DNA, 25 bp, Homo sapien
cagttggatagacgacaggtgcgcc

SEQ ID NO: 5172935 - DNA, 25 bp, Homo sapien
tactagtctatagctatcaagcaga

SEQ ID NO: 5172936 - DNA, 25 bp, Homo sapien
gcggtcaaatgtaatttaagggtca

SEQ ID NO: 5172937 - DNA, 25 bp, Homo sapien
tactgttgtcaaaaaccagagatca

SEQ ID NO: 5172938 - DNA, 25 bp, Homo sapien
tatttgggagagaagactatactag

SEQ ID NO: 5172939 - DNA, 25 bp, Homo sapien
tggaggtccaggcacttgggatcta

SEQ ID NO: 5172940 - DNA, 25 bp, Homo sapien
tctaactggttgttgagtcatagga

SEQ ID NO: 5172941 - DNA, 25 bp, Homo sapien
gagtcataggaggattatacacaac

SEQ ID NO: 5172942 - DNA, 25 bp, Homo sapien
ggattatacacaactggactcccat

SEQ ID NO: 5172943 - DNA, 25 bp, Homo sapien
gaaaatgtgattagctgctggttgt

SEQ ID NO: 5172944 - DNA, 25 bp, Homo sapien
aaaatgtgattagctgctggttgtt

SEQ ID NO: 5172945 - DNA, 25 bp, Homo sapien
tgagaaaatgtgattagctgctggt

SEQ ID NO: 5172946 - DNA, 25 bp, Homo sapien
ctgtgagaaaatgtgattagctgct

SEQ ID NO: 5172947 - DNA, 25 bp, Homo sapien
gggataaaatactcaccagacaggc

SEQ ID NO: 5172948 - DNA, 25 bp, Homo sapien
caactcactttgctcattgggccaa

SEQ ID NO: 5172949 - DNA, 25 bp, Homo sapien
gaagagtaccttgcagaacctgagc

SEQ ID NO: 5172950 - DNA, 25 bp, Homo sapien
cccaaatatgtaaaggcaagtcaac

SEQ ID NO: 5172951 - DNA, 25 bp, Homo sapien
ttcaagtttatcatcatacttcttc

SEQ ID NO: 5172952 - DNA, 25 bp, Homo sapien
cagttcaagtttatcatcatacttc

SEQ ID NO: 5172953 - DNA, 25 bp, Homo sapien
agttcaagtttatcatcatacttct

SEQ ID NO: 5172954 - DNA, 25 bp, Homo sapien
gttcaagtttatcatcatacttctt

SEQ ID NO: 5172955 - DNA, 25 bp, Homo sapien
aattaagtgacttgtagacagccac

SEQ ID NO: 5172956 - DNA, 25 bp, Homo sapien
gacagccacataagcaagtagatga

SEQ ID NO: 5172957 - DNA, 25 bp, Homo sapien
gaacccagggaatctcacttgatga

SEQ ID NO: 5172958 - DNA, 25 bp, Homo sapien
gatttgagttgcacttttaccacaa

SEQ ID NO: 5172959 - DNA, 25 bp, Homo sapien
ggtgggtgagactggcaggaacggg

SEQ ID NO: 5172960 - DNA, 25 bp, Homo sapien
aacaggctgtgaagaggactgcaga

SEQ ID NO: 5172961 - DNA, 25 bp, Homo sapien
ggtaaggggctgtagagtactgaac

SEQ ID NO: 5172962 - DNA, 25 bp, Homo sapien
gctgtagagtactgaacaggctgtg

SEQ ID NO: 5172963 - DNA, 25 bp, Homo sapien
gctggcgagcaagactcatgtggct

SEQ ID NO: 5172964 - DNA, 25 bp, Homo sapien
aagaaccacagtggactggaacatg

SEQ ID NO: 5172965 - DNA, 25 bp, Homo sapien
catgagggtcagaaccatcagcaga

SEQ ID NO: 5172966 - DNA, 25 bp, Homo sapien
ggctaaactgagaccctaggttatc

SEQ ID NO: 5172967 - DNA, 25 bp, Homo sapien
ctgcccaggtggtaggggaggagga

SEQ ID NO: 5172968 - DNA, 25 bp, Homo sapien
gtggtggcggtggaggaggatgtgg

SEQ ID NO: 5172969 - DNA, 25 bp, Homo sapien
ggaggggctgctgtcatgatataac

SEQ ID NO: 5172970 - DNA, 25 bp, Homo sapien
ctggctgcccaggtggtaggggagg

SEQ ID NO: 5172971 - DNA, 25 bp, Homo sapien
gatgaccagaggcaggatatccagc

SEQ ID NO: 5172972 - DNA, 25 bp, Homo sapien
gaccagaggcaggatatccagcagt

SEQ ID NO: 5172973 - DNA, 25 bp, Homo sapien
cagaggcaggatatccagcagtagg

SEQ ID NO: 5172974 - DNA, 25 bp, Homo sapien
tgaccagaggcaggatatccagcag

SEQ ID NO: 5172975 - DNA, 25 bp, Homo sapien
gacacggaaattcgtaaagcattca

SEQ ID NO: 5172976 - DNA, 25 bp, Homo sapien
aaaaatagcaatgtggcatacctga

SEQ ID NO: 5172977 - DNA, 25 bp, Homo sapien
caatcactgtataaagaggcagaac

SEQ ID NO: 5172978 - DNA, 25 bp, Homo sapien
gaggcagaacccaactaataaccat

SEQ ID NO: 5172979 - DNA, 25 bp, Homo sapien
tgagcctgggcgagtattttaaaaa

SEQ ID NO: 5172980 - DNA, 25 bp, Homo sapien
aaatatggcttatattaccttaagg

SEQ ID NO: 5172981 - DNA, 25 bp, Homo sapien
tatggcttatattaccttaaggcta

SEQ ID NO: 5172982 - DNA, 25 bp, Homo sapien
catgatgccaaaagcatcatgtcat

SEQ ID NO: 5172983 - DNA, 25 bp, Homo sapien
ctggagcgcaataacaggctggcat

SEQ ID NO: 5172984 - DNA, 25 bp, Homo sapien
tggttggtttagatgtgaattgtaa

SEQ ID NO: 5172985 - DNA, 25 bp, Homo sapien
tgggcgatactgaggttggctggag

SEQ ID NO: 5172986 - DNA, 25 bp, Homo sapien
aattgtaatgaacagaagggactgg

SEQ ID NO: 5172987 - DNA, 25 bp, Homo sapien
tgaggttggctggagtgatagtggc

SEQ ID NO: 5172988 - DNA, 25 bp, Homo sapien
gaacatattcgagatcctgagagac

SEQ ID NO: 5172989 - DNA, 25 bp, Homo sapien
ccagaggatgctaagatttgctcac

SEQ ID NO: 5172990 - DNA, 25 bp, Homo sapien
ccataggtgatttatcaggctgcaa

SEQ ID NO: 5172991 - DNA, 25 bp, Homo sapien
ttagcatgtagacgtgacactgtgg

SEQ ID NO: 5172992 - DNA, 25 bp, Homo sapien
gttttatacactgagatcaaaattg

SEQ ID NO: 5172993 - DNA, 25 bp, Homo sapien
ttatacactgagatcaaaattgttt

SEQ ID NO: 5172994 - DNA, 25 bp, Homo sapien
agaagcatacagagaaatgagttca

SEQ ID NO: 5172995 - DNA, 25 bp, Homo sapien
aaatcaataagatagttttatacac

SEQ ID NO: 5172996 - DNA, 25 bp, Homo sapien
aactcctagagttataaaaggctga

SEQ ID NO: 5172997 - DNA, 25 bp, Homo sapien
atgtatatggtgaagctacaaactt

SEQ ID NO: 5172998 - DNA, 25 bp, Homo sapien
aaatgtatatggtgaagctacaaac

SEQ ID NO: 5172999 - DNA, 25 bp, Homo sapien
taaatgtatatggtgaagctacaaa

SEQ ID NO: 5173000 - DNA, 25 bp, Homo sapien
gaacaaggccaattattgcaaaata

SEQ ID NO: 5173001 - DNA, 25 bp, Homo sapien
tctcagacagtgctacggccccgaa

SEQ ID NO: 5173002 - DNA, 25 bp, Homo sapien
actgtgagaaatgtaaacctctcag

SEQ ID NO: 5173003 - DNA, 25 bp, Homo sapien
cactgtgagaaatgtaaacctctca

SEQ ID NO: 5173004 - DNA, 25 bp, Homo sapien
tgctacggccccgaatccaacagct

SEQ ID NO: 5173005 - DNA, 25 bp, Homo sapien
tatatcgttggtaagaaccgagacc

SEQ ID NO: 5173006 - DNA, 25 bp, Homo sapien
tctgggttatctggaaagctaagac

SEQ ID NO: 5173007 - DNA, 25 bp, Homo sapien
ggtatgcaacaacatcatcgtttgg

SEQ ID NO: 5173008 - DNA, 25 bp, Homo sapien
tattaggtccgtttgatgtcatgct

SEQ ID NO: 5173009 - DNA, 25 bp, Homo sapien
ctattttagtaggtgggcaagttca

SEQ ID NO: 5173010 - DNA, 25 bp, Homo sapien
tccagatttcagtggcggcaggtta

SEQ ID NO: 5173011 - DNA, 25 bp, Homo sapien
gcaagttcaactaaagccagcccca

SEQ ID NO: 5173012 - DNA, 25 bp, Homo sapien
tatacaactcaaggaaatctgtggg

SEQ ID NO: 5173013 - DNA, 25 bp, Homo sapien
cgcaagatgcgtggtttactactga

SEQ ID NO: 5173014 - DNA, 25 bp, Homo sapien
gagagctgctacgttttatgggcga

SEQ ID NO: 5173015 - DNA, 25 bp, Homo sapien
tggtttgtccactacccgcaagatg

SEQ ID NO: 5173016 - DNA, 25 bp, Homo sapien
taaacaattaggaagggccactgca

SEQ ID NO: 5173017 - DNA, 25 bp, Homo sapien
tgaaagctgcatgagtaaatttcca

SEQ ID NO: 5173018 - DNA, 25 bp, Homo sapien
ttcagatgcagtctctatcgctcag

SEQ ID NO: 5173019 - DNA, 25 bp, Homo sapien
cagatgcagtctctatcgctcaggc

SEQ ID NO: 5173020 - DNA, 25 bp, Homo sapien
atcatgaaagctgcatgagtaaatt

SEQ ID NO: 5173021 - DNA, 25 bp, Homo sapien
aatggtacaatgagttaaatcctgc

SEQ ID NO: 5173022 - DNA, 25 bp, Homo sapien
gagttaaatcctgctctgaattcat

SEQ ID NO: 5173023 - DNA, 25 bp, Homo sapien
ctgtaatggtacaatgagttaaatc

SEQ ID NO: 5173024 - DNA, 25 bp, Homo sapien
atgagttaaatcctgctctgaattc

SEQ ID NO: 5173025 - DNA, 25 bp, Homo sapien
gctgaactccaactattccttggta

SEQ ID NO: 5173026 - DNA, 25 bp, Homo sapien
gggatgaccactccttgaatctgat

SEQ ID NO: 5173027 - DNA, 25 bp, Homo sapien
tgctgttgggttggccactgactag

SEQ ID NO: 5173028 - DNA, 25 bp, Homo sapien
ccactgactaggctctgactctggg

SEQ ID NO: 5173029 - DNA, 25 bp, Homo sapien
ccttgattagactgattagggaaca

SEQ ID NO: 5173030 - DNA, 25 bp, Homo sapien
ttgttgaccaggtggaatgacacta

SEQ ID NO: 5173031 - DNA, 25 bp, Homo sapien
cctgttgtgggcatagatccttgat

SEQ ID NO: 5173032 - DNA, 25 bp, Homo sapien
aacaggctgttgataagtctgatgg

SEQ ID NO: 5173033 - DNA, 25 bp, Homo sapien
caagctgcgggtaattccaaagact

SEQ ID NO: 5173034 - DNA, 25 bp, Homo sapien
tccaaaatgtaccaagatgagtctg

SEQ ID NO: 5173035 - DNA, 25 bp, Homo sapien
ggtactctatacttggaacagatca

SEQ ID NO: 5173036 - DNA, 25 bp, Homo sapien
caatgctagtttgtcacatggtgac

SEQ ID NO: 5173037 - DNA, 25 bp, Homo sapien
caagagaggtatcacaagtaggaca

SEQ ID NO: 5173038 - DNA, 25 bp, Homo sapien
taagactgtatggatcaagaccctg

SEQ ID NO: 5173039 - DNA, 25 bp, Homo sapien
caagttcctgtctgtatgctacccc

SEQ ID NO: 5173040 - DNA, 25 bp, Homo sapien
tgaaggctgctggtatcaaactaat

SEQ ID NO: 5173041 - DNA, 25 bp, Homo sapien
aaatctccttgtatgttggcttcca

SEQ ID NO: 5173042 - DNA, 25 bp, Homo sapien
tgtattgcctccaagctaagaatgg

SEQ ID NO: 5173043 - DNA, 25 bp, Homo sapien
gtaaaatgttatctgccacccaaaa

SEQ ID NO: 5173044 - DNA, 25 bp, Homo sapien
gctggctatcaaccatctagtacag

SEQ ID NO: 5173045 - DNA, 25 bp, Homo sapien
tttttacaggtatagaatgcaagtt

SEQ ID NO: 5173046 - DNA, 25 bp, Homo sapien
tgcgaggtggctggcaattaattca

SEQ ID NO: 5173047 - DNA, 25 bp, Homo sapien
aaacttcctttaacagttctcacag

SEQ ID NO: 5173048 - DNA, 25 bp, Homo sapien
cttgtattgcttctaagtcggctga

SEQ ID NO: 5173049 - DNA, 25 bp, Homo sapien
ccataaagcctcaccaaagttgcct

SEQ ID NO: 5173050 - DNA, 25 bp, Homo sapien
tgagtaacacatggtcacttaggag

SEQ ID NO: 5173051 - DNA, 25 bp, Homo sapien
tctgtgagactcaaccaattggata

SEQ ID NO: 5173052 - DNA, 25 bp, Homo sapien
ggtcaggctggtgcaacataggtat

SEQ ID NO: 5173053 - DNA, 25 bp, Homo sapien
acaggcgtgacccactttgtccaac

SEQ ID NO: 5173054 - DNA, 25 bp, Homo sapien
tgtcaatggcagttaagcaagcttc

SEQ ID NO: 5173055 - DNA, 25 bp, Homo sapien
tagtatcttagaagcatccctgcct

SEQ ID NO: 5173056 - DNA, 25 bp, Homo sapien
tcacccacaaaaggtcgagacttag

SEQ ID NO: 5173057 - DNA, 25 bp, Homo sapien
tgcactgttatctaaggctaacccg

SEQ ID NO: 5173058 - DNA, 25 bp, Homo sapien
cacaaagatgtctctgatgctcctg

SEQ ID NO: 5173059 - DNA, 25 bp, Homo sapien
caggtcagatgctcaactaggcttg

SEQ ID NO: 5173060 - DNA, 25 bp, Homo sapien
tttttgtggtgagggtatatatacc

SEQ ID NO: 5173061 - DNA, 25 bp, Homo sapien
aataaccaattcatttgcaggtcag

SEQ ID NO: 5173062 - DNA, 25 bp, Homo sapien
ctcaaagtcatagtaatttccattt

SEQ ID NO: 5173063 - DNA, 25 bp, Homo sapien
catggtgaagtggttcgaggaaatt

SEQ ID NO: 5173064 - DNA, 25 bp, Homo sapien
agtggttcgaggaaattgtacttgt

SEQ ID NO: 5173065 - DNA, 25 bp, Homo sapien
gatgttgcaggtaacctactgaaga

SEQ ID NO: 5173066 - DNA, 25 bp, Homo sapien
acattggtggccttgaagctgctgg

SEQ ID NO: 5173067 - DNA, 25 bp, Homo sapien
tttggtacactgagctgcatcatca

SEQ ID NO: 5173068 - DNA, 25 bp, Homo sapien
agtgggcacaagattgtggattgtt

SEQ ID NO: 5173069 - DNA, 25 bp, Homo sapien
gattgtggattgtttggtacactga

SEQ ID NO: 5173070 - DNA, 25 bp, Homo sapien
ctctggtgatcacagtaatatttgt

SEQ ID NO: 5173071 - DNA, 25 bp, Homo sapien
taatgtataacagaccaagctccta

SEQ ID NO: 5173072 - DNA, 25 bp, Homo sapien
tgcacactgccatggccgaataatt

SEQ ID NO: 5173073 - DNA, 25 bp, Homo sapien
tctattcaagtaacagggccaattt

SEQ ID NO: 5173074 - DNA, 25 bp, Homo sapien
aatgtcccactggtatcaggtatca

SEQ ID NO: 5173075 - DNA, 25 bp, Homo sapien
gtcagagggtaaccttttctcaaca

SEQ ID NO: 5173076 - DNA, 25 bp, Homo sapien
tgtcagagggtaaccttttctcaac

SEQ ID NO: 5173077 - DNA, 25 bp, Homo sapien
tcagagggtaaccttttctcaacaa

SEQ ID NO: 5173078 - DNA, 25 bp, Homo sapien
gtgtcagagggtaaccttttctcaa

SEQ ID NO: 5173079 - DNA, 25 bp, Homo sapien
gatggaatctcattatgttgtctag

SEQ ID NO: 5173080 - DNA, 25 bp, Homo sapien
tggaatctcattatgttgtctaggc

SEQ ID NO: 5173081 - DNA, 25 bp, Homo sapien
agcgctacaggtgtataccaccaca

SEQ ID NO: 5173082 - DNA, 25 bp, Homo sapien
gagatggaatctcattatgttgtct

SEQ ID NO: 5173083 - DNA, 25 bp, Homo sapien
actttctggcatagccaagatggcc

SEQ ID NO: 5173084 - DNA, 25 bp, Homo sapien
gatcctgtattcttcaagacgtccc

SEQ ID NO: 5173085 - DNA, 25 bp, Homo sapien
caagatggcctacacccatctggta

SEQ ID NO: 5173086 - DNA, 25 bp, Homo sapien
ttttgtagcctctagtggtgactct

SEQ ID NO: 5173087 - DNA, 25 bp, Homo sapien
taatggggctactgagttgagggct

SEQ ID NO: 5173088 - DNA, 25 bp, Homo sapien
gtctagaaaattggggcatgatgga

SEQ ID NO: 5173089 - DNA, 25 bp, Homo sapien
cagagggacgtacagttttcagggt

SEQ ID NO: 5173090 - DNA, 25 bp, Homo sapien
ggtccagagggacgtacagttttca

SEQ ID NO: 5173091 - DNA, 25 bp, Homo sapien
caactgtaaaagtccgtgtaaccat

SEQ ID NO: 5173092 - DNA, 25 bp, Homo sapien
tcttctacatgtgtgggctgactca

SEQ ID NO: 5173093 - DNA, 25 bp, Homo sapien
gttaacgtcgtgacccggagagtca

SEQ ID NO: 5173094 - DNA, 25 bp, Homo sapien
acagattagtttgtctgcagctgga

SEQ ID NO: 5173095 - DNA, 25 bp, Homo sapien
tgggctaggtgttcctcctgcggca

SEQ ID NO: 5173096 - DNA, 25 bp, Homo sapien
gagataagattatagtcagcagtac

SEQ ID NO: 5173097 - DNA, 25 bp, Homo sapien
caaagacccctcctaataggctggg

SEQ ID NO: 5173098 - DNA, 25 bp, Homo sapien
tcctgcggcattcataccagactgt

SEQ ID NO: 5173099 - DNA, 25 bp, Homo sapien
aatgtgtccgtgcagaacagcagga

SEQ ID NO: 5173100 - DNA, 25 bp, Homo sapien
ccaagtaatggatacctggaatctc

SEQ ID NO: 5173101 - DNA, 25 bp, Homo sapien
cagtggctggccaagtaatggatac

SEQ ID NO: 5173102 - DNA, 25 bp, Homo sapien
aacagcaggaggattgtactgcagt

SEQ ID NO: 5173103 - DNA, 25 bp, Homo sapien
gagggagctatgatgttctgcaaca

SEQ ID NO: 5173104 - DNA, 25 bp, Homo sapien
caaagcctaggaggttagttgtctt

SEQ ID NO: 5173105 - DNA, 25 bp, Homo sapien
tgttctgcaacaaagcctaggaggt

SEQ ID NO: 5173106 - DNA, 25 bp, Homo sapien
actctgagggagctatgatgttctg

SEQ ID NO: 5173107 - DNA, 25 bp, Homo sapien
tagtttgggttttgcactctggcag

SEQ ID NO: 5173108 - DNA, 25 bp, Homo sapien
gccttctggattctgcctgtggcag

SEQ ID NO: 5173109 - DNA, 25 bp, Homo sapien
gcagaagaaaatcagtcccaggcct

SEQ ID NO: 5173110 - DNA, 25 bp, Homo sapien
gtggcagtggcattcctgtccttca

SEQ ID NO: 5173111 - DNA, 25 bp, Homo sapien
ctgaaaacccacaaatagttgagaa

SEQ ID NO: 5173112 - DNA, 25 bp, Homo sapien
cacaaatagttgagaaacaacgtta

SEQ ID NO: 5173113 - DNA, 25 bp, Homo sapien
tgaaaacccacaaatagttgagaaa

SEQ ID NO: 5173114 - DNA, 25 bp, Homo sapien
tagttgagaaacaacgttaataatg

SEQ ID NO: 5173115 - DNA, 25 bp, Homo sapien
gatgcagcttttttagcttgtctcc

SEQ ID NO: 5173116 - DNA, 25 bp, Homo sapien
gcagcttttttagcttgtctccttc

SEQ ID NO: 5173117 - DNA, 25 bp, Homo sapien
tgcagcttttttagcttgtctcctt

SEQ ID NO: 5173118 - DNA, 25 bp, Homo sapien
tggatgcagcttttttagcttgtct

SEQ ID NO: 5173119 - DNA, 25 bp, Homo sapien
caagtcactgggtttagagcgttca

SEQ ID NO: 5173120 - DNA, 25 bp, Homo sapien
tagttcagtaatttccaagaccttc

SEQ ID NO: 5173121 - DNA, 25 bp, Homo sapien
gagccaccggatcttggcgccaatt

SEQ ID NO: 5173122 - DNA, 25 bp, Homo sapien
tcagggttggcagtgttgtccccac

SEQ ID NO: 5173123 - DNA, 25 bp, Homo sapien
ggcttgcatcagcacacattgtaca

SEQ ID NO: 5173124 - DNA, 25 bp, Homo sapien
gatgtccagtgatccgctgcaaaca

SEQ ID NO: 5173125 - DNA, 25 bp, Homo sapien
gccatgaacacacatcctaggagtc

SEQ ID NO: 5173126 - DNA, 25 bp, Homo sapien
tctgttcccctttgaatgtaagtgg

SEQ ID NO: 5173127 - DNA, 25 bp, Homo sapien
gtaaacatttattctcttgaactga

SEQ ID NO: 5173128 - DNA, 25 bp, Homo sapien
cacatcagcttgaccccaatgtgca

SEQ ID NO: 5173129 - DNA, 25 bp, Homo sapien
ggagcatgtaactgtgggttctgag

SEQ ID NO: 5173130 - DNA, 25 bp, Homo sapien
tgtagtccacttaggcttattcgcc

SEQ ID NO: 5173131 - DNA, 25 bp, Homo sapien
gggaattgtagtccacttaggctta

SEQ ID NO: 5173132 - DNA, 25 bp, Homo sapien
attgtagtccacttaggcttattcg

SEQ ID NO: 5173133 - DNA, 25 bp, Homo sapien
gtccacttaggcttattcgcctcca

SEQ ID NO: 5173134 - DNA, 25 bp, Homo sapien
gtcacagtcgcaacccgtcggtgtc

SEQ ID NO: 5173135 - DNA, 25 bp, Homo sapien
gaaagcggtaagagggatgactaac

SEQ ID NO: 5173136 - DNA, 25 bp, Homo sapien
tctctcgttggcgagtcgatggtgc

SEQ ID NO: 5173137 - DNA, 25 bp, Homo sapien
taggcctccggtcgcgcagtccagg

SEQ ID NO: 5173138 - DNA, 25 bp, Homo sapien
gtagtctccgcagtcccgaagccgg

SEQ ID NO: 5173139 - DNA, 25 bp, Homo sapien
cctccgtcttcgtccggctctgcgg

SEQ ID NO: 5173140 - DNA, 25 bp, Homo sapien
ccgtcagcggcacccggagacgcgc

SEQ ID NO: 5173141 - DNA, 25 bp, Homo sapien
ctccggctccgcacaagcgcgcacg

SEQ ID NO: 5173142 - DNA, 25 bp, Homo sapien
tgccacgaacaccacgaagaccgcg

SEQ ID NO: 5173143 - DNA, 25 bp, Homo sapien
tccttttggccgtcgcgatggcggc

SEQ ID NO: 5173144 - DNA, 25 bp, Homo sapien
aagaccgcgccgctccttttggccg

SEQ ID NO: 5173145 - DNA, 25 bp, Homo sapien
gaatggcgccctggaaccacagcat

SEQ ID NO: 5173146 - DNA, 25 bp, Homo sapien
ctaaacagcagtaacgaaacgggcg

SEQ ID NO: 5173147 - DNA, 25 bp, Homo sapien
ccagtaaccgtgaacatcaggtggt

SEQ ID NO: 5173148 - DNA, 25 bp, Homo sapien
gtaattcgttcttcactgcagtgca

SEQ ID NO: 5173149 - DNA, 25 bp, Homo sapien
cgggcgttcaagcagcacaaagagg

SEQ ID NO: 5173150 - DNA, 25 bp, Homo sapien
tttgtggccctagtgcaagtcactt

SEQ ID NO: 5173151 - DNA, 25 bp, Homo sapien
gactgttaagacatgtaaatccttt

SEQ ID NO: 5173152 - DNA, 25 bp, Homo sapien
tgactaccataatccaaatttctga

SEQ ID NO: 5173153 - DNA, 25 bp, Homo sapien
ttaactgatttacctcaagagtgcc

SEQ ID NO: 5173154 - DNA, 25 bp, Homo sapien
tcccctaactagaatgaaggttcca

SEQ ID NO: 5173155 - DNA, 25 bp, Homo sapien
tgctcaaatatcagctcaataaagc

SEQ ID NO: 5173156 - DNA, 25 bp, Homo sapien
taaagctgatacttaatcacccact

SEQ ID NO: 5173157 - DNA, 25 bp, Homo sapien
ttacactcttgagacattcccaaag

SEQ ID NO: 5173158 - DNA, 25 bp, Homo sapien
ttcgtttatggtaactccatccttc

SEQ ID NO: 5173159 - DNA, 25 bp, Homo sapien
tgttggccaggacaatttaatccac

SEQ ID NO: 5173160 - DNA, 25 bp, Homo sapien
ggccaggacaatttaatccactttg

SEQ ID NO: 5173161 - DNA, 25 bp, Homo sapien
cattgcagttattcgtttatggtaa

SEQ ID NO: 5173162 - DNA, 25 bp, Homo sapien
catctgtgtagactgttcatcatca

SEQ ID NO: 5173163 - DNA, 25 bp, Homo sapien
gccatctgtgtagactgttcatcat

SEQ ID NO: 5173164 - DNA, 25 bp, Homo sapien
cttttggtatcgattttaatagcaa

SEQ ID NO: 5173165 - DNA, 25 bp, Homo sapien
gcagccatctgtgtagactgttcat

SEQ ID NO: 5173166 - DNA, 25 bp, Homo sapien
ttgtgaaaactgtaggcaggcttca

SEQ ID NO: 5173167 - DNA, 25 bp, Homo sapien
tttgtgaaaactgtaggcaggcttc

SEQ ID NO: 5173168 - DNA, 25 bp, Homo sapien
gatttgtgaaaactgtaggcaggct

SEQ ID NO: 5173169 - DNA, 25 bp, Homo sapien
agatttgtgaaaactgtaggcaggc

SEQ ID NO: 5173170 - DNA, 25 bp, Homo sapien
gcctcttgcaagctacttgtaacat

SEQ ID NO: 5173171 - DNA, 25 bp, Homo sapien
caattcatgtgaaacgaaaggatag

SEQ ID NO: 5173172 - DNA, 25 bp, Homo sapien
ggtgcactacaccattgagttactt

SEQ ID NO: 5173173 - DNA, 25 bp, Homo sapien
caagtactgcatcattatacctgta

SEQ ID NO: 5173174 - DNA, 25 bp, Homo sapien
ctggatggaacacacactacaggat

SEQ ID NO: 5173175 - DNA, 25 bp, Homo sapien
caagggaattccactgtctccaata

SEQ ID NO: 5173176 - DNA, 25 bp, Homo sapien
ttccaagggaattccactgtctcca

SEQ ID NO: 5173177 - DNA, 25 bp, Homo sapien
aagggaattccactgtctccaataa

SEQ ID NO: 5173178 - DNA, 25 bp, Homo sapien
tccaagggaattccactgtctccaa

SEQ ID NO: 5173179 - DNA, 25 bp, Homo sapien
cttgtgaattcttgtaacaagttca

SEQ ID NO: 5173180 - DNA, 25 bp, Homo sapien
tgtgaattcttgtaacaagttcatc

SEQ ID NO: 5173181 - DNA, 25 bp, Homo sapien
accttgtgaattcttgtaacaagtt

SEQ ID NO: 5173182 - DNA, 25 bp, Homo sapien
gaattcttgtaacaagttcatctgc

SEQ ID NO: 5173183 - DNA, 25 bp, Homo sapien
atgtttcactttttagcaaatgcat

SEQ ID NO: 5173184 - DNA, 25 bp, Homo sapien
gatgtttcactttttagcaaatgca

SEQ ID NO: 5173185 - DNA, 25 bp, Homo sapien
ctgatgtttcactttttagcaaatg

SEQ ID NO: 5173186 - DNA, 25 bp, Homo sapien
tgatgtttcactttttagcaaatgc

SEQ ID NO: 5173187 - DNA, 25 bp, Homo sapien
tgttgttaggttcaaatgacgcaga

SEQ ID NO: 5173188 - DNA, 25 bp, Homo sapien
gacactgaactttctgactgactgc

SEQ ID NO: 5173189 - DNA, 25 bp, Homo sapien
gtgggtggtatctcacaaagctctg

SEQ ID NO: 5173190 - DNA, 25 bp, Homo sapien
gcatttctggactgagagttttcac

SEQ ID NO: 5173191 - DNA, 25 bp, Homo sapien
aaaacatgaataacaatctggcagg

SEQ ID NO: 5173192 - DNA, 25 bp, Homo sapien
tcaccaaggtaaaggtcagatgtaa

SEQ ID NO: 5173193 - DNA, 25 bp, Homo sapien
tttagacgtggataaaattgttcac

SEQ ID NO: 5173194 - DNA, 25 bp, Homo sapien
gcagttaccgagttaaaatcaccaa

SEQ ID NO: 5173195 - DNA, 25 bp, Homo sapien
tccactaggctcctgagaggaagtg

SEQ ID NO: 5173196 - DNA, 25 bp, Homo sapien
ctttccactcggatgttgaggtcct

SEQ ID NO: 5173197 - DNA, 25 bp, Homo sapien
ctctgatctgagcatccactaggct

SEQ ID NO: 5173198 - DNA, 25 bp, Homo sapien
ttccactcggatgttgaggtcctct

SEQ ID NO: 5173199 - DNA, 25 bp, Homo sapien
ctcttttcttttctcttctctcctt

SEQ ID NO: 5173200 - DNA, 25 bp, Homo sapien
tttctcttctctcctttcttcaagt

SEQ ID NO: 5173201 - DNA, 25 bp, Homo sapien
ctgttcttcctcttttcttttctct

SEQ ID NO: 5173202 - DNA, 25 bp, Homo sapien
ctcttctctcctttcttcaagtttt

SEQ ID NO: 5173203 - DNA, 25 bp, Homo sapien
tataatccaacatttcttttccagt

SEQ ID NO: 5173204 - DNA, 25 bp, Homo sapien
tccagtttttctcctctcaatttcc

SEQ ID NO: 5173205 - DNA, 25 bp, Homo sapien
tcttgttttcttttataatccaaca

SEQ ID NO: 5173206 - DNA, 25 bp, Homo sapien
ttttctcctctcaatttccttctta

SEQ ID NO: 5173207 - DNA, 25 bp, Homo sapien
caatgcaatctgctgttttatacgt

SEQ ID NO: 5173208 - DNA, 25 bp, Homo sapien
tatacgttctcgagctgccctatct

SEQ ID NO: 5173209 - DNA, 25 bp, Homo sapien
gctgttttatacgttctcgagctgc

SEQ ID NO: 5173210 - DNA, 25 bp, Homo sapien
tctcgagctgccctatcttctgctt

SEQ ID NO: 5173211 - DNA, 25 bp, Homo sapien
gtctttgcaaaacgagcagctctct

SEQ ID NO: 5173212 - DNA, 25 bp, Homo sapien
cctttgtctttgcaaaacgagcagc

SEQ ID NO: 5173213 - DNA, 25 bp, Homo sapien
ttcctttgtctttgcaaaacgagca

SEQ ID NO: 5173214 - DNA, 25 bp, Homo sapien
ctgttttgctagcaaggcagcagct

SEQ ID NO: 5173215 - DNA, 25 bp, Homo sapien
tgtcaaattaatatgtccctctgga

SEQ ID NO: 5173216 - DNA, 25 bp, Homo sapien
tagtgtacactcacacgaaatgaga

SEQ ID NO: 5173217 - DNA, 25 bp, Homo sapien
tcagcccctatgtgcacagagatgt

SEQ ID NO: 5173218 - DNA, 25 bp, Homo sapien
gagagataccattgggagctgtcaa

SEQ ID NO: 5173219 - DNA, 25 bp, Homo sapien
tcctaatacgtatgagataaacatt

SEQ ID NO: 5173220 - DNA, 25 bp, Homo sapien
tcctatcggataggggattctgaaa

SEQ ID NO: 5173221 - DNA, 25 bp, Homo sapien
ttcatttggttacaaatcatttctg

SEQ ID NO: 5173222 - DNA, 25 bp, Homo sapien
aataaagaatcctaatacgtatgag

SEQ ID NO: 5173223 - DNA, 25 bp, Homo sapien
cattggctactcctagatcacaaaa

SEQ ID NO: 5173224 - DNA, 25 bp, Homo sapien
tagtgccatgtctaacaatccattg

SEQ ID NO: 5173225 - DNA, 25 bp, Homo sapien
gatgatatccttcaaagcacgaaag

SEQ ID NO: 5173226 - DNA, 25 bp, Homo sapien
tcagtttagggaggattatcatctt

SEQ ID NO: 5173227 - DNA, 25 bp, Homo sapien
tccgcctgcctcagtcttccaaagt

SEQ ID NO: 5173228 - DNA, 25 bp, Homo sapien
gttttttgccacgttggcgaggctg

SEQ ID NO: 5173229 - DNA, 25 bp, Homo sapien
ccatgcctagttaatttttgtattt

SEQ ID NO: 5173230 - DNA, 25 bp, Homo sapien
gttttgaactcctggccgtaagtga

SEQ ID NO: 5173231 - DNA, 25 bp, Homo sapien
gctgctgtagaactcctgggtccta

SEQ ID NO: 5173232 - DNA, 25 bp, Homo sapien
ccagtaacacagaaaggttccaaat

SEQ ID NO: 5173233 - DNA, 25 bp, Homo sapien
tacatttaggcatacttagtgggtg

SEQ ID NO: 5173234 - DNA, 25 bp, Homo sapien
tttccacatatttgaactgggtgtc

SEQ ID NO: 5173235 - DNA, 25 bp, Homo sapien
agtcacaatcttcacctctatatat

SEQ ID NO: 5173236 - DNA, 25 bp, Homo sapien
ctaccatatcagatctttttgtttg

SEQ ID NO: 5173237 - DNA, 25 bp, Homo sapien
caatatcattaagttagagaaaatg

SEQ ID NO: 5173238 - DNA, 25 bp, Homo sapien
gcaatgacaatagttttttctacca

SEQ ID NO: 5173239 - DNA, 25 bp, Homo sapien
ttgcctcttctagaggagcatcaga

SEQ ID NO: 5173240 - DNA, 25 bp, Homo sapien
ggaagaaccatcaggaagacggaat

SEQ ID NO: 5173241 - DNA, 25 bp, Homo sapien
tgtgcagcaaactgccttgcctctt

SEQ ID NO: 5173242 - DNA, 25 bp, Homo sapien
acggaattgaattcttgcaacagtg

SEQ ID NO: 5173243 - DNA, 25 bp, Homo sapien
cctgggaaacatggttgctaacgaa

SEQ ID NO: 5173244 - DNA, 25 bp, Homo sapien
aattaccgtaagtgttgccaacagt

SEQ ID NO: 5173245 - DNA, 25 bp, Homo sapien
tggcaacagtaccaccgaagcgctt

SEQ ID NO: 5173246 - DNA, 25 bp, Homo sapien
accgaagcgcttggggcaagttcca

SEQ ID NO: 5173247 - DNA, 25 bp, Homo sapien
aggcggattactaaacaagaaattg

SEQ ID NO: 5173248 - DNA, 25 bp, Homo sapien
aacaaggtccaaatgtctccgctgg

SEQ ID NO: 5173249 - DNA, 25 bp, Homo sapien
aagagtgtacaatggatgcagttgg

SEQ ID NO: 5173250 - DNA, 25 bp, Homo sapien
tgtgggaggcggattactaaacaag

SEQ ID NO: 5173251 - DNA, 25 bp, Homo sapien
ctgacgatgttactctcactgaagt

SEQ ID NO: 5173252 - DNA, 25 bp, Homo sapien
ttttctgatttgctagatgatgcag

SEQ ID NO: 5173253 - DNA, 25 bp, Homo sapien
gatttgctagatgatgcagggtttg

SEQ ID NO: 5173254 - DNA, 25 bp, Homo sapien
tttgggggttctgacgatgttactc

SEQ ID NO: 5173255 - DNA, 25 bp, Homo sapien
tcagtgttgtattactatgctaacc

SEQ ID NO: 5173256 - DNA, 25 bp, Homo sapien
taggagttaaaattgtcagtgttgt

SEQ ID NO: 5173257 - DNA, 25 bp, Homo sapien
catgctatctgctataaaagttgtt

SEQ ID NO: 5173258 - DNA, 25 bp, Homo sapien
caaagataggagttaaaattgtcag

SEQ ID NO: 5173259 - DNA, 25 bp, Homo sapien
taacagcggtgtccatttcagtaag

SEQ ID NO: 5173260 - DNA, 25 bp, Homo sapien
tcatagagtgcttaacagcggtgtc

SEQ ID NO: 5173261 - DNA, 25 bp, Homo sapien
agatttgttataatgcctataaaag

SEQ ID NO: 5173262 - DNA, 25 bp, Homo sapien
ctataaaaggcctcatagagtgctt

SEQ ID NO: 5173263 - DNA, 25 bp, Homo sapien
cacccattgctcagtaagagtttta

SEQ ID NO: 5173264 - DNA, 25 bp, Homo sapien
acagcctcaaaactctggagctcac

SEQ ID NO: 5173265 - DNA, 25 bp, Homo sapien
acttagtaggtaactggtcttcctg

SEQ ID NO: 5173266 - DNA, 25 bp, Homo sapien
taattcagtattaaatgctcccacc

SEQ ID NO: 5173267 - DNA, 25 bp, Homo sapien
tttccagcactctttttctcactgg

SEQ ID NO: 5173268 - DNA, 25 bp, Homo sapien
aagtcgtctccacgtttttccagca

SEQ ID NO: 5173269 - DNA, 25 bp, Homo sapien
catcatcttgagtccttaatctata

SEQ ID NO: 5173270 - DNA, 25 bp, Homo sapien
ctacatctgttgagtggaatttcca

SEQ ID NO: 5173271 - DNA, 25 bp, Homo sapien
cagtggttgccatataagcaaggac

SEQ ID NO: 5173272 - DNA, 25 bp, Homo sapien
gctagttaaaatgctctgacaccga

SEQ ID NO: 5173273 - DNA, 25 bp, Homo sapien
aaacgtgtcatctgaagcatagggc

SEQ ID NO: 5173274 - DNA, 25 bp, Homo sapien
caaggacctagcagagagttatttc

SEQ ID NO: 5173275 - DNA, 25 bp, Homo sapien
tagagccctgtgcaacaaaaagatg

SEQ ID NO: 5173276 - DNA, 25 bp, Homo sapien
gctactttccagagacagctccagg

SEQ ID NO: 5173277 - DNA, 25 bp, Homo sapien
gatagttaaggtaacctcgccagct

SEQ ID NO: 5173278 - DNA, 25 bp, Homo sapien
gacataggacctcaatagagccctg

SEQ ID NO: 5173279 - DNA, 25 bp, Homo sapien
cactaacaaagacatacggataaag

SEQ ID NO: 5173280 - DNA, 25 bp, Homo sapien
tttccgtatgtccactctagagtgc

SEQ ID NO: 5173281 - DNA, 25 bp, Homo sapien
acatcattagtttagcggtctccac

SEQ ID NO: 5173282 - DNA, 25 bp, Homo sapien
agctactggatcaaacggtatgaaa

SEQ ID NO: 5173283 - DNA, 25 bp, Homo sapien
tctttacatatctattaatacctag

SEQ ID NO: 5173284 - DNA, 25 bp, Homo sapien
taatacctagtactatctatgtaga

SEQ ID NO: 5173285 - DNA, 25 bp, Homo sapien
cacactgtacctatagctctggatc

SEQ ID NO: 5173286 - DNA, 25 bp, Homo sapien
tcacataaaccaatcttaccattat

SEQ ID NO: 5173287 - DNA, 25 bp, Homo sapien
gattacctctggagaatagtactgg

SEQ ID NO: 5173288 - DNA, 25 bp, Homo sapien
attgaggagggaacctcctactcca

SEQ ID NO: 5173289 - DNA, 25 bp, Homo sapien
gtagggtcacacctatttgacagct

SEQ ID NO: 5173290 - DNA, 25 bp, Homo sapien
gcaaactgacttgaggtactcgatg

SEQ ID NO: 5173291 - DNA, 25 bp, Homo sapien
acagcactggcgtccattggaagcc

SEQ ID NO: 5173292 - DNA, 25 bp, Homo sapien
ttcatagctggtgtaaggagccatc

SEQ ID NO: 5173293 - DNA, 25 bp, Homo sapien
tgcaggcagctagaaccagcgaaag

SEQ ID NO: 5173294 - DNA, 25 bp, Homo sapien
agcagggcccctacaaatattcgtg

SEQ ID NO: 5173295 - DNA, 25 bp, Homo sapien
gacaggtaagtccaccaacagggag

SEQ ID NO: 5173296 - DNA, 25 bp, Homo sapien
aaaggcagaaaggtgcccttggctg

SEQ ID NO: 5173297 - DNA, 25 bp, Homo sapien
cccggagccatctctggaaaaggca

SEQ ID NO: 5173298 - DNA, 25 bp, Homo sapien
ggatcaacggcacctatgacttttt

SEQ ID NO: 5173299 - DNA, 25 bp, Homo sapien
cggccccaggcttcgctttttgaga

SEQ ID NO: 5173300 - DNA, 25 bp, Homo sapien
gccagcctggtataggtgccatcgg

SEQ ID NO: 5173301 - DNA, 25 bp, Homo sapien
gagatgctcttgtactccacgtcct

SEQ ID NO: 5173302 - DNA, 25 bp, Homo sapien
ctcaaggccgacctctgctggctgt

SEQ ID NO: 5173303 - DNA, 25 bp, Homo sapien
agttcagatcaacagacccgcagca

SEQ ID NO: 5173304 - DNA, 25 bp, Homo sapien
gagattctctcagcgcttggtggtg

SEQ ID NO: 5173305 - DNA, 25 bp, Homo sapien
gcttacattaaacggacagccaggg

SEQ ID NO: 5173306 - DNA, 25 bp, Homo sapien
gattacaagtgacaccagctcggag

SEQ ID NO: 5173307 - DNA, 25 bp, Homo sapien
gggtcattcagtgccaacacctctt

SEQ ID NO: 5173308 - DNA, 25 bp, Homo sapien
gtcattcagtgccaacacctctttg

SEQ ID NO: 5173309 - DNA, 25 bp, Homo sapien
cagggtcattcagtgccaacacctc

SEQ ID NO: 5173310 - DNA, 25 bp, Homo sapien
ttcagtgccaacacctctttgtacc

SEQ ID NO: 5173311 - DNA, 25 bp, Homo sapien
aactgtgcgcaactagcatgatggc

SEQ ID NO: 5173312 - DNA, 25 bp, Homo sapien
tgagccctacttgagacctactgca

SEQ ID NO: 5173313 - DNA, 25 bp, Homo sapien
gagactgcactaatccctgaaggcg

SEQ ID NO: 5173314 - DNA, 25 bp, Homo sapien
taaagaccaagtgctcaccattggg

SEQ ID NO: 5173315 - DNA, 25 bp, Homo sapien
gcatggtcctgtgtagactctgtga

SEQ ID NO: 5173316 - DNA, 25 bp, Homo sapien
acaggtacggccagccaggctcgtg

SEQ ID NO: 5173317 - DNA, 25 bp, Homo sapien
ggaagtccccagtgcgtactccaca

SEQ ID NO: 5173318 - DNA, 25 bp, Homo sapien
catgagggttgtctctgctaaagag

SEQ ID NO: 5173319 - DNA, 25 bp, Homo sapien
tggtcctatgtgtcacattcatcac

SEQ ID NO: 5173320 - DNA, 25 bp, Homo sapien
cacaggtttcataccaacacaggct

SEQ ID NO: 5173321 - DNA, 25 bp, Homo sapien
tcagaaacaagaattgagttgatgg

SEQ ID NO: 5173322 - DNA, 25 bp, Homo sapien
cctaactacttgctcgaagattgag

SEQ ID NO: 5173323 - DNA, 25 bp, Homo sapien
atgatgaagtaaaacggggtgtcct

SEQ ID NO: 5173324 - DNA, 25 bp, Homo sapien
ccaaatgactgtgaaagaatgggag

SEQ ID NO: 5173325 - DNA, 25 bp, Homo sapien
gagtcaagataaaaatctataccac

SEQ ID NO: 5173326 - DNA, 25 bp, Homo sapien
taccacaatctttgtaccagcctgt

SEQ ID NO: 5173327 - DNA, 25 bp, Homo sapien
cagctgagagcattaagaaccaaat

SEQ ID NO: 5173328 - DNA, 25 bp, Homo sapien
ttataggctggtctttcttgcctgc

SEQ ID NO: 5173329 - DNA, 25 bp, Homo sapien
ctgtgttgcgccaaccaacccaagg

SEQ ID NO: 5173330 - DNA, 25 bp, Homo sapien
tgttagggacctttcttataggctg

SEQ ID NO: 5173331 - DNA, 25 bp, Homo sapien
agaaggcattcgaggactccgggcc

SEQ ID NO: 5173332 - DNA, 25 bp, Homo sapien
ctgttactacagtaaacgttaagag

SEQ ID NO: 5173333 - DNA, 25 bp, Homo sapien
agggccccagtgttaatgtcttaga

SEQ ID NO: 5173334 - DNA, 25 bp, Homo sapien
tcttcttttctatattacaagggcc

SEQ ID NO: 5173335 - DNA, 25 bp, Homo sapien
tcatattctgttactacagtaaacg

SEQ ID NO: 5173336 - DNA, 25 bp, Homo sapien
tgtactttaggtacttaaaatatgc

SEQ ID NO: 5173337 - DNA, 25 bp, Homo sapien
tatgcactagaataaatttgcaagg

SEQ ID NO: 5173338 - DNA, 25 bp, Homo sapien
tttggagtaattcagtataggttcg

SEQ ID NO: 5173339 - DNA, 25 bp, Homo sapien
ttttcagtaacctgctagtgcacag

SEQ ID NO: 5173340 - DNA, 25 bp, Homo sapien
catctgctcactaaggatttccggt

SEQ ID NO: 5173341 - DNA, 25 bp, Homo sapien
tcattgtattccagcatgccttttt

SEQ ID NO: 5173342 - DNA, 25 bp, Homo sapien
tacttagaacattagtatgctgcac

SEQ ID NO: 5173343 - DNA, 25 bp, Homo sapien
tgctatgtctcactttatgggttgg

SEQ ID NO: 5173344 - DNA, 25 bp, Homo sapien
gaaattctgcgtaaatctggccagg

SEQ ID NO: 5173345 - DNA, 25 bp, Homo sapien
aaaaagaaattctgcgtaaatctgg

SEQ ID NO: 5173346 - DNA, 25 bp, Homo sapien
ttctgcgtaaatctggccaggcatg

SEQ ID NO: 5173347 - DNA, 25 bp, Homo sapien
aagaaattctgcgtaaatctggcca

SEQ ID NO: 5173348 - DNA, 25 bp, Homo sapien
acattttaaggatgctcagcactgc

SEQ ID NO: 5173349 - DNA, 25 bp, Homo sapien
tcagcactgctatgtatcacagggt

SEQ ID NO: 5173350 - DNA, 25 bp, Homo sapien
tgatcaccacagctataggagttct

SEQ ID NO: 5173351 - DNA, 25 bp, Homo sapien
tgttgacctcaagaccaatgcatca

SEQ ID NO: 5173352 - DNA, 25 bp, Homo sapien
aactgactgtaatccttctttacag

SEQ ID NO: 5173353 - DNA, 25 bp, Homo sapien
cttttcatgtctgtgcgtataggtt

SEQ ID NO: 5173354 - DNA, 25 bp, Homo sapien
tactcaagcattatagaattaaatc

SEQ ID NO: 5173355 - DNA, 25 bp, Homo sapien
tgagggtcaatgtgagtgtatatgt

SEQ ID NO: 5173356 - DNA, 25 bp, Homo sapien
gatatgtactcagccctcgtgttcc

SEQ ID NO: 5173357 - DNA, 25 bp, Homo sapien
tctgggttaggcacgtcctgcacgt

SEQ ID NO: 5173358 - DNA, 25 bp, Homo sapien
gcacgtaatgcacaatccctgggaa

SEQ ID NO: 5173359 - DNA, 25 bp, Homo sapien
ttggcctactagaagcgtgtccccg

SEQ ID NO: 5173360 - DNA, 25 bp, Homo sapien
agtccgagcgcgtgtgctgagaccc

SEQ ID NO: 5173361 - DNA, 25 bp, Homo sapien
acctccacgcggagtccgagcgcgt

SEQ ID NO: 5173362 - DNA, 25 bp, Homo sapien
tcgcgatctttctggagccgcacct

SEQ ID NO: 5173363 - DNA, 25 bp, Homo sapien
ccgagcgcgtgtgctgagaccccag

SEQ ID NO: 5173364 - DNA, 25 bp, Homo sapien
ttggcaagccaactgcactcctctg

SEQ ID NO: 5173365 - DNA, 25 bp, Homo sapien
caatggattgcgaagaggcctcctc

SEQ ID NO: 5173366 - DNA, 25 bp, Homo sapien
tatttacacctcacttacacaggga

SEQ ID NO: 5173367 - DNA, 25 bp, Homo sapien
tagtgacgagtctgcggttacagcc

SEQ ID NO: 5173368 - DNA, 25 bp, Homo sapien
cacagtcaccttctgagatattggg

SEQ ID NO: 5173369 - DNA, 25 bp, Homo sapien
tagaggtgggactacaccttcagcc

SEQ ID NO: 5173370 - DNA, 25 bp, Homo sapien
tgctgatgttgacatgctggtccag

SEQ ID NO: 5173371 - DNA, 25 bp, Homo sapien
gtgtgtgtctgcgtcctatttccct

SEQ ID NO: 5173372 - DNA, 25 bp, Homo sapien
tcttggcttgtaaatggccctcttc

SEQ ID NO: 5173373 - DNA, 25 bp, Homo sapien
gttccggaggctaaaagtctgagat

SEQ ID NO: 5173374 - DNA, 25 bp, Homo sapien
aagatgttggcagggttgatttttt

SEQ ID NO: 5173375 - DNA, 25 bp, Homo sapien
cagttccggaggctaaaagtctgag

SEQ ID NO: 5173376 - DNA, 25 bp, Homo sapien
tggagaaaagagaccagtccttggc

SEQ ID NO: 5173377 - DNA, 25 bp, Homo sapien
gagccagcctcaccactctgttagg

SEQ ID NO: 5173378 - DNA, 25 bp, Homo sapien
aagcagcatccactttaagtcaggg

SEQ ID NO: 5173379 - DNA, 25 bp, Homo sapien
accagtccttggctaagaaagacag

SEQ ID NO: 5173380 - DNA, 25 bp, Homo sapien
ctcttacggccaacagcccttaggg

SEQ ID NO: 5173381 - DNA, 25 bp, Homo sapien
tgagaattatgtttccggtaccaaa

SEQ ID NO: 5173382 - DNA, 25 bp, Homo sapien
aggtaatacctcttcgtccacgtgg

SEQ ID NO: 5173383 - DNA, 25 bp, Homo sapien
taatttagagattcaccatcctgag

SEQ ID NO: 5173384 - DNA, 25 bp, Homo sapien
ttataagccatatggctatttcttt

SEQ ID NO: 5173385 - DNA, 25 bp, Homo sapien
cttataagccatatggctatttctt

SEQ ID NO: 5173386 - DNA, 25 bp, Homo sapien
caagtggacagcttgggcttcatac

SEQ ID NO: 5173387 - DNA, 25 bp, Homo sapien
cagtgtggttgcatcagatggtagc

SEQ ID NO: 5173388 - DNA, 25 bp, Homo sapien
gagaggataatactaggctcctgca

SEQ ID NO: 5173389 - DNA, 25 bp, Homo sapien
gaggataatactaggctcctgcagg

SEQ ID NO: 5173390 - DNA, 25 bp, Homo sapien
acaatttattattccctgccatggt

SEQ ID NO: 5173391 - DNA, 25 bp, Homo sapien
caacaatttattattccctgccatg

SEQ ID NO: 5173392 - DNA, 25 bp, Homo sapien
attattccctgccatggttctgtga

SEQ ID NO: 5173393 - DNA, 25 bp, Homo sapien
ttattattccctgccatggttctgt

SEQ ID NO: 5173394 - DNA, 25 bp, Homo sapien
aggattaaatttatggttgctcctc

SEQ ID NO: 5173395 - DNA, 25 bp, Homo sapien
gctacaacttaacaaagaataagtc

SEQ ID NO: 5173396 - DNA, 25 bp, Homo sapien
aatttatggttgctcctcatttttg

SEQ ID NO: 5173397 - DNA, 25 bp, Homo sapien
ctttactgcaagctacaacttaaca

SEQ ID NO: 5173398 - DNA, 25 bp, Homo sapien
gctcttcatgggattctgatacagg

SEQ ID NO: 5173399 - DNA, 25 bp, Homo sapien
gaagttgcttgtccttcaacgttga

SEQ ID NO: 5173400 - DNA, 25 bp, Homo sapien
gacaggaactcctaaatgagcattt

SEQ ID NO: 5173401 - DNA, 25 bp, Homo sapien
tcaacgttgactctatgcaaagaac

SEQ ID NO: 5173402 - DNA, 25 bp, Homo sapien
ccatagttttccttggtattatcct

SEQ ID NO: 5173403 - DNA, 25 bp, Homo sapien
ggattataggcatgctggccattca

SEQ ID NO: 5173404 - DNA, 25 bp, Homo sapien
tggccattcactgcccccacccata

SEQ ID NO: 5173405 - DNA, 25 bp, Homo sapien
ttccttggtattatccttttagcac

SEQ ID NO: 5173406 - DNA, 25 bp, Homo sapien
aagagcaccgctctgtggatacagt

SEQ ID NO: 5173407 - DNA, 25 bp, Homo sapien
ttcctttcaaggcaagagcaccgct

SEQ ID NO: 5173408 - DNA, 25 bp, Homo sapien
tcaaggcaagagcaccgctctgtgg

SEQ ID NO: 5173409 - DNA, 25 bp, Homo sapien
gcaagagcaccgctctgtggataca

SEQ ID NO: 5173410 - DNA, 25 bp, Homo sapien
tgtaaccctggtatgcttgatgggc

SEQ ID NO: 5173411 - DNA, 25 bp, Homo sapien
ttgatgggccctgttgagcctgcag

SEQ ID NO: 5173412 - DNA, 25 bp, Homo sapien
cataacacaattgtaaccctggtat

SEQ ID NO: 5173413 - DNA, 25 bp, Homo sapien
tggtatgcttgatgggccctgttga

SEQ ID NO: 5173414 - DNA, 25 bp, Homo sapien
caaggagtaagtggtgtcagattcc

SEQ ID NO: 5173415 - DNA, 25 bp, Homo sapien
ggcaatcacatagttcagacttggg

SEQ ID NO: 5173416 - DNA, 25 bp, Homo sapien
tcaggcaatcacatagttcagactt

SEQ ID NO: 5173417 - DNA, 25 bp, Homo sapien
ttctacccaaggagtaagtggtgtc

SEQ ID NO: 5173418 - DNA, 25 bp, Homo sapien
aaaggctacaactccagtgtggtca

SEQ ID NO: 5173419 - DNA, 25 bp, Homo sapien
cattgttgtcgctaatacaaaaggc

SEQ ID NO: 5173420 - DNA, 25 bp, Homo sapien
tgcattgaattacacgccaggccat

SEQ ID NO: 5173421 - DNA, 25 bp, Homo sapien
agccagtctgcaccgcgagcctgtg

SEQ ID NO: 5173422 - DNA, 25 bp, Homo sapien
cgatcgggcggcgtccagttgccgg

SEQ ID NO: 5173423 - DNA, 25 bp, Homo sapien
gggcaacggcctgacaggcagctca

SEQ ID NO: 5173424 - DNA, 25 bp, Homo sapien
ccagttgccgggcaacggcctgaca

SEQ ID NO: 5173425 - DNA, 25 bp, Homo sapien
gcggcgtccagttgccgggcaacgg

SEQ ID NO: 5173426 - DNA, 25 bp, Homo sapien
ggaccggcctgtgaaccacgcggct

SEQ ID NO: 5173427 - DNA, 25 bp, Homo sapien
tatgcctttcaacccggctgcggcg

SEQ ID NO: 5173428 - DNA, 25 bp, Homo sapien
tgaaccacgcggctatgcctttcaa

SEQ ID NO: 5173429 - DNA, 25 bp, Homo sapien
gcggctatgcctttcaacccggctg

SEQ ID NO: 5173430 - DNA, 25 bp, Homo sapien
gtatttacccactggcactcagcag

SEQ ID NO: 5173431 - DNA, 25 bp, Homo sapien
tagagaaggtatttacccactggca

SEQ ID NO: 5173432 - DNA, 25 bp, Homo sapien
aagtcatatggatgcagcgggagag

SEQ ID NO: 5173433 - DNA, 25 bp, Homo sapien
tcatatggatgcagcgggagaggaa

SEQ ID NO: 5173434 - DNA, 25 bp, Homo sapien
tgaatagtcgctacaaagtgtgctg

SEQ ID NO: 5173435 - DNA, 25 bp, Homo sapien
gaatagtcgctacaaagtgtgctgg

SEQ ID NO: 5173436 - DNA, 25 bp, Homo sapien
tgtgaatagtcgctacaaagtgtgc

SEQ ID NO: 5173437 - DNA, 25 bp, Homo sapien
ctgtgaatagtcgctacaaagtgtg

SEQ ID NO: 5173438 - DNA, 25 bp, Homo sapien
actgctgtccctagtgttgacactc

SEQ ID NO: 5173439 - DNA, 25 bp, Homo sapien
tgatcaaggccacccttgaaatttc

SEQ ID NO: 5173440 - DNA, 25 bp, Homo sapien
tctgctgtgacactggggcgcagat

SEQ ID NO: 5173441 - DNA, 25 bp, Homo sapien
catttttactagattttgtgtctgc

SEQ ID NO: 5173442 - DNA, 25 bp, Homo sapien
tctttgactgtccaatagctgagtc

SEQ ID NO: 5173443 - DNA, 25 bp, Homo sapien
ttaggtcaggagtggaaatacatat

SEQ ID NO: 5173444 - DNA, 25 bp, Homo sapien
acatatagtagaccttcatgatttc

SEQ ID NO: 5173445 - DNA, 25 bp, Homo sapien
tgactgtccaatagctgagtctcct

SEQ ID NO: 5173446 - DNA, 25 bp, Homo sapien
ggtgtgagaccataccacagtccag

SEQ ID NO: 5173447 - DNA, 25 bp, Homo sapien
cacagtccagcaatgcagaggtgat

SEQ ID NO: 5173448 - DNA, 25 bp, Homo sapien
cacacattgggttggttctgcaagc

SEQ ID NO: 5173449 - DNA, 25 bp, Homo sapien
tcttcaagtccacaccagagtgagg

SEQ ID NO: 5173450 - DNA, 25 bp, Homo sapien
tcatccctgtgttcagcgtgttgct

SEQ ID NO: 5173451 - DNA, 25 bp, Homo sapien
gtgttcagcgtgttgctgagtgacc

SEQ ID NO: 5173452 - DNA, 25 bp, Homo sapien
agaacttgctggcaggtccccgtca

SEQ ID NO: 5173453 - DNA, 25 bp, Homo sapien
tccctgtgttcagcgtgttgctgag

SEQ ID NO: 5173454 - DNA, 25 bp, Homo sapien
cacaccatcttgtctcctcatattt

SEQ ID NO: 5173455 - DNA, 25 bp, Homo sapien
acaccatcttgtctcctcatatttt

SEQ ID NO: 5173456 - DNA, 25 bp, Homo sapien
accatcttgtctcctcatattttac

SEQ ID NO: 5173457 - DNA, 25 bp, Homo sapien
caccatcttgtctcctcatatttta

SEQ ID NO: 5173458 - DNA, 25 bp, Homo sapien
agaaagccctaacggaaatctctga

SEQ ID NO: 5173459 - DNA, 25 bp, Homo sapien
agccctaacggaaatctctgaaagg

SEQ ID NO: 5173460 - DNA, 25 bp, Homo sapien
ctagaaagccctaacggaaatctct

SEQ ID NO: 5173461 - DNA, 25 bp, Homo sapien
attcacacatgacggcaatagtgtg

SEQ ID NO: 5173462 - DNA, 25 bp, Homo sapien
tagataatctctccattcccgtgga

SEQ ID NO: 5173463 - DNA, 25 bp, Homo sapien
gacctgtggccaagttcttagttgc

SEQ ID NO: 5173464 - DNA, 25 bp, Homo sapien
gaagatggcacttataaccaaagcc

SEQ ID NO: 5173465 - DNA, 25 bp, Homo sapien
gaactgaacattccagagcgtgtag

SEQ ID NO: 5173466 - DNA, 25 bp, Homo sapien
tcttccactgttgtctgaaccccat

SEQ ID NO: 5173467 - DNA, 25 bp, Homo sapien
aagtggatttccatcaccgaggccc

SEQ ID NO: 5173468 - DNA, 25 bp, Homo sapien
tactacattgggatcagcatcgact

SEQ ID NO: 5173469 - DNA, 25 bp, Homo sapien
tcatcctcctggaaatcatcaagca

SEQ ID NO: 5173470 - DNA, 25 bp, Homo sapien
tctatgttggcgtctggatccctgc

SEQ ID NO: 5173471 - DNA, 25 bp, Homo sapien
cagcacatcatggttggccttatcc

SEQ ID NO: 5173472 - DNA, 25 bp, Homo sapien
tgaccgcttctaccccaatgacttg

SEQ ID NO: 5173473 - DNA, 25 bp, Homo sapien
tgccaacgtcagtgaggcagatgac

SEQ ID NO: 5173474 - DNA, 25 bp, Homo sapien
aggagcgcccgcttgggggaggagg

SEQ ID NO: 5173475 - DNA, 25 bp, Homo sapien
tgataaacacgaggatggcaagaga

SEQ ID NO: 5173476 - DNA, 25 bp, Homo sapien
tcccaaacgcgccaagtgataaaca

SEQ ID NO: 5173477 - DNA, 25 bp, Homo sapien
ccaagtgataaacacgaggatggca

SEQ ID NO: 5173478 - DNA, 25 bp, Homo sapien
ctaacgtcccaaacgcgccaagtga

SEQ ID NO: 5173479 - DNA, 25 bp, Homo sapien
ggcgcgcaattcaaagacgctcgcg

SEQ ID NO: 5173480 - DNA, 25 bp, Homo sapien
tgcagcggcgcgcaattcaaagacg

SEQ ID NO: 5173481 - DNA, 25 bp, Homo sapien
ggagccgcccagtcgctccccagca

SEQ ID NO: 5173482 - DNA, 25 bp, Homo sapien
gcgcaattcaaagacgctcgcggcg

SEQ ID NO: 5173483 - DNA, 25 bp, Homo sapien
cagttgtgatgtttaaccgtcggtg

SEQ ID NO: 5173484 - DNA, 25 bp, Homo sapien
gaaaccgtttggctctctccgagtc

SEQ ID NO: 5173485 - DNA, 25 bp, Homo sapien
gctctctccgagtccagttgtgatg

SEQ ID NO: 5173486 - DNA, 25 bp, Homo sapien
ccgccgcgaagactggcaggtgcaa

SEQ ID NO: 5173487 - DNA, 25 bp, Homo sapien
agaggtcagcggagtggtttgacct

SEQ ID NO: 5173488 - DNA, 25 bp, Homo sapien
gcagttcgagagtttggggtcgtgc

SEQ ID NO: 5173489 - DNA, 25 bp, Homo sapien
tttggggtcgtgcagaggtcagcgg

SEQ ID NO: 5173490 - DNA, 25 bp, Homo sapien
ctgcagttcgagagtttggggtcgt

SEQ ID NO: 5173491 - DNA, 25 bp, Homo sapien
cgcgccgatcctctgaggggatcga

SEQ ID NO: 5173492 - DNA, 25 bp, Homo sapien
tccgcccgcgcgctttgggtttgag

SEQ ID NO: 5173493 - DNA, 25 bp, Homo sapien
ttcccgccgtccgaagcgcgcctct

SEQ ID NO: 5173494 - DNA, 25 bp, Homo sapien
agcagctaggagttgatccgcccgc

SEQ ID NO: 5173495 - DNA, 25 bp, Homo sapien
cggccgacggagctgtgccagtctc

SEQ ID NO: 5173496 - DNA, 25 bp, Homo sapien
gcggccgacggagctgtgccagtct

SEQ ID NO: 5173497 - DNA, 25 bp, Homo sapien
ctgtgcggccgacggagctgtgcca

SEQ ID NO: 5173498 - DNA, 25 bp, Homo sapien
gtgcggccgacggagctgtgccagt

SEQ ID NO: 5173499 - DNA, 25 bp, Homo sapien
tcttgaccatgcctatatagtgcgg

SEQ ID NO: 5173500 - DNA, 25 bp, Homo sapien
tgactgttcttgacactgggtgcgt

SEQ ID NO: 5173501 - DNA, 25 bp, Homo sapien
caggaggagattgcgcccgctttaa

SEQ ID NO: 5173502 - DNA, 25 bp, Homo sapien
tggaaagagcgttccagtggctgca

SEQ ID NO: 5173503 - DNA, 25 bp, Homo sapien
gtcagtatcttgtacacactgaacc

SEQ ID NO: 5173504 - DNA, 25 bp, Homo sapien
agtatcttgtacacactgaacctgc

SEQ ID NO: 5173505 - DNA, 25 bp, Homo sapien
tatagtcagtatcttgtacacactg

SEQ ID NO: 5173506 - DNA, 25 bp, Homo sapien
tgatatagtcagtatcttgtacaca

SEQ ID NO: 5173507 - DNA, 25 bp, Homo sapien
gtgacttgctataagggcatatctc

SEQ ID NO: 5173508 - DNA, 25 bp, Homo sapien
tgacttgctataagggcatatctca

SEQ ID NO: 5173509 - DNA, 25 bp, Homo sapien
gacttgctataagggcatatctcac

SEQ ID NO: 5173510 - DNA, 25 bp, Homo sapien
tagtacaatgggactcttgcttcat

SEQ ID NO: 5173511 - DNA, 25 bp, Homo sapien
gcttatagtacaatgggactcttgc

SEQ ID NO: 5173512 - DNA, 25 bp, Homo sapien
ttatagtacaatgggactcttgctt

SEQ ID NO: 5173513 - DNA, 25 bp, Homo sapien
atagtacaatgggactcttgcttca

SEQ ID NO: 5173514 - DNA, 25 bp, Homo sapien
ttctcgtctgctgatttcttggctc

SEQ ID NO: 5173515 - DNA, 25 bp, Homo sapien
tgctgatttcttggctcaaggaacc

SEQ ID NO: 5173516 - DNA, 25 bp, Homo sapien
ctctctctgatgatcagagtcaact

SEQ ID NO: 5173517 - DNA, 25 bp, Homo sapien
tctctctgatgatcagagtcaacta

SEQ ID NO: 5173518 - DNA, 25 bp, Homo sapien
ctctctgatgatcagagtcaactac

SEQ ID NO: 5173519 - DNA, 25 bp, Homo sapien
gtagctggacttgtccatctactgt

SEQ ID NO: 5173520 - DNA, 25 bp, Homo sapien
gaccctcatagcagtctgagtccct

SEQ ID NO: 5173521 - DNA, 25 bp, Homo sapien
agaccctcatagcagtctgagtccc

SEQ ID NO: 5173522 - DNA, 25 bp, Homo sapien
accctcatagcagtctgagtccctg

SEQ ID NO: 5173523 - DNA, 25 bp, Homo sapien
cagtaaagcacacccttacatttgt

SEQ ID NO: 5173524 - DNA, 25 bp, Homo sapien
cagtcttgttttccatgagggtggt

SEQ ID NO: 5173525 - DNA, 25 bp, Homo sapien
tttcacccagtaaagcacaccctta

SEQ ID NO: 5173526 - DNA, 25 bp, Homo sapien
cttgttttccatgagggtggttgat

SEQ ID NO: 5173527 - DNA, 25 bp, Homo sapien
cttggcctgctcttaacttttcctc

SEQ ID NO: 5173528 - DNA, 25 bp, Homo sapien
ttctttttcttggcctgctcttaac

SEQ ID NO: 5173529 - DNA, 25 bp, Homo sapien
tttcttggcctgctcttaacttttc

SEQ ID NO: 5173530 - DNA, 25 bp, Homo sapien
tctttttcttggcctgctcttaact

SEQ ID NO: 5173531 - DNA, 25 bp, Homo sapien
gatgaaaagtgtgagtactgggcta

SEQ ID NO: 5173532 - DNA, 25 bp, Homo sapien
tgatgaaaagtgtgagtactgggct

SEQ ID NO: 5173533 - DNA, 25 bp, Homo sapien
ccagaagtacgttgatgaaaagtgt

SEQ ID NO: 5173534 - DNA, 25 bp, Homo sapien
tttgttcccagaagtacgttgatga

SEQ ID NO: 5173535 - DNA, 25 bp, Homo sapien
tcagggaagtcgtttctcccaagtc

SEQ ID NO: 5173536 - DNA, 25 bp, Homo sapien
tctgaggagagtggattctttccag

SEQ ID NO: 5173537 - DNA, 25 bp, Homo sapien
caagtcccctagttcacaggaccat

SEQ ID NO: 5173538 - DNA, 25 bp, Homo sapien
caggaccatatccatttaggaatta

SEQ ID NO: 5173539 - DNA, 25 bp, Homo sapien
ctctcctgggtcagaacaggatttt

SEQ ID NO: 5173540 - DNA, 25 bp, Homo sapien
tcaaggttatgggtagagaaaaatc

SEQ ID NO: 5173541 - DNA, 25 bp, Homo sapien
ttttctctcctgggtcagaacagga

SEQ ID NO: 5173542 - DNA, 25 bp, Homo sapien
ttctctcctgggtcagaacaggatt

SEQ ID NO: 5173543 - DNA, 25 bp, Homo sapien
ccagcccagacctcacctttagctt

SEQ ID NO: 5173544 - DNA, 25 bp, Homo sapien
gagcccactccagagctcagtgacc

SEQ ID NO: 5173545 - DNA, 25 bp, Homo sapien
ccctcccttccaagtgcattccaga

SEQ ID NO: 5173546 - DNA, 25 bp, Homo sapien
acctttagcttcacagggccctcaa

SEQ ID NO: 5173547 - DNA, 25 bp, Homo sapien
gagccacttcatccctagggctttt

SEQ ID NO: 5173548 - DNA, 25 bp, Homo sapien
caccaggaagctggctccacagttt

SEQ ID NO: 5173549 - DNA, 25 bp, Homo sapien
gatgtcagagccacttcatccctag

SEQ ID NO: 5173550 - DNA, 25 bp, Homo sapien
tggctccacagtttggatgtcagag

SEQ ID NO: 5173551 - DNA, 25 bp, Homo sapien
tataaatgtcttagggctttgtccc

SEQ ID NO: 5173552 - DNA, 25 bp, Homo sapien
gctgccattgcctttaggtaggaca

SEQ ID NO: 5173553 - DNA, 25 bp, Homo sapien
gatggctgagcctgttatgcccaaa

SEQ ID NO: 5173554 - DNA, 25 bp, Homo sapien
ccaggaagctgtgtaagtgatatca

SEQ ID NO: 5173555 - DNA, 25 bp, Homo sapien
tagaggttcatctcgaaggtcttct

SEQ ID NO: 5173556 - DNA, 25 bp, Homo sapien
ctcctactcctctgcgttggaccat

SEQ ID NO: 5173557 - DNA, 25 bp, Homo sapien
tctcctggttggtccaggtgctctg

SEQ ID NO: 5173558 - DNA, 25 bp, Homo sapien
gagagaggcaagttcatgggctgag

SEQ ID NO: 5173559 - DNA, 25 bp, Homo sapien
aagatttcctggaggcccttctggt

SEQ ID NO: 5173560 - DNA, 25 bp, Homo sapien
gatttcctggaggcccttctggtaa

SEQ ID NO: 5173561 - DNA, 25 bp, Homo sapien
tatttgtcaagatttcctggaggcc

SEQ ID NO: 5173562 - DNA, 25 bp, Homo sapien
tcaagatttcctggaggcccttctg

SEQ ID NO: 5173563 - DNA, 25 bp, Homo sapien
agcatcccacggcagttttccagat

SEQ ID NO: 5173564 - DNA, 25 bp, Homo sapien
cccaagatcgatgagacccctcagc

SEQ ID NO: 5173565 - DNA, 25 bp, Homo sapien
tccagatggatgagctgcgtcgaaa

SEQ ID NO: 5173566 - DNA, 25 bp, Homo sapien
ccggcaaggctttgcgggccttaat

SEQ ID NO: 5173567 - DNA, 25 bp, Homo sapien
acaggagaaggtggcgtgtggtgtc

SEQ ID NO: 5173568 - DNA, 25 bp, Homo sapien
gagaaggtggcgtgtggtgtcacct

SEQ ID NO: 5173569 - DNA, 25 bp, Homo sapien
ggtggcgtgtggtgtcaccttcaaa

SEQ ID NO: 5173570 - DNA, 25 bp, Homo sapien
gtcaccttcaaagccgccactcctc

SEQ ID NO: 5173571 - DNA, 25 bp, Homo sapien
ggctttggcaattgggagatgtata

SEQ ID NO: 5173572 - DNA, 25 bp, Homo sapien
agccaatgttcataagatgactggg

SEQ ID NO: 5173573 - DNA, 25 bp, Homo sapien
ctccgaagaagaccccgaaggtcag

SEQ ID NO: 5173574 - DNA, 25 bp, Homo sapien
cctgagagccaatgttcataagatg

SEQ ID NO: 5173575 - DNA, 25 bp, Homo sapien
accagcttggtgtcaccaaaagcaa

SEQ ID NO: 5173576 - DNA, 25 bp, Homo sapien
ccagcttggtgtcaccaaaagcaag

SEQ ID NO: 5173577 - DNA, 25 bp, Homo sapien
cagcttggtgtcaccaaaagcaagt

SEQ ID NO: 5173578 - DNA, 25 bp, Homo sapien
agcttggtgtcaccaaaagcaagtg

SEQ ID NO: 5173579 - DNA, 25 bp, Homo sapien
tgatgtctctgatcatttccaggcg

SEQ ID NO: 5173580 - DNA, 25 bp, Homo sapien
ccagtggtgtggatttgatgtctct

SEQ ID NO: 5173581 - DNA, 25 bp, Homo sapien
cccagtggtgtggatttgatgtctc

SEQ ID NO: 5173582 - DNA, 25 bp, Homo sapien
ctctgatcatttccaggcggtttaa

SEQ ID NO: 5173583 - DNA, 25 bp, Homo sapien
cttcaattgagctaactagtgccag

SEQ ID NO: 5173584 - DNA, 25 bp, Homo sapien
ccagctcaaagcgttgtggtttttc

SEQ ID NO: 5173585 - DNA, 25 bp, Homo sapien
tcaattgagctaactagtgccagct

SEQ ID NO: 5173586 - DNA, 25 bp, Homo sapien
agtgccagctcaaagcgttgtggtt

SEQ ID NO: 5173587 - DNA, 25 bp, Homo sapien
ctgtctctgaatcttctatgcaaaa

SEQ ID NO: 5173588 - DNA, 25 bp, Homo sapien
tcctgtctctgaatcttctatgcaa

SEQ ID NO: 5173589 - DNA, 25 bp, Homo sapien
cttgatggcttttacgccaataaat

SEQ ID NO: 5173590 - DNA, 25 bp, Homo sapien
tcttgatggcttttacgccaataaa

SEQ ID NO: 5173591 - DNA, 25 bp, Homo sapien
tgacacagcacatcttggtgtgaag

SEQ ID NO: 5173592 - DNA, 25 bp, Homo sapien
gacacagcacatcttggtgtgaaga

SEQ ID NO: 5173593 - DNA, 25 bp, Homo sapien
atgacacagcacatcttggtgtgaa

SEQ ID NO: 5173594 - DNA, 25 bp, Homo sapien
gatgacacagcacatcttggtgtga

SEQ ID NO: 5173595 - DNA, 25 bp, Homo sapien
tcacagtacagactcatccatcaga

SEQ ID NO: 5173596 - DNA, 25 bp, Homo sapien
cagtacagactcatccatcagacca

SEQ ID NO: 5173597 - DNA, 25 bp, Homo sapien
acagactcatccatcagaccagcag

SEQ ID NO: 5173598 - DNA, 25 bp, Homo sapien
tacagactcatccatcagaccagca

SEQ ID NO: 5173599 - DNA, 25 bp, Homo sapien
agttgcttccttttcgaagaacaca

SEQ ID NO: 5173600 - DNA, 25 bp, Homo sapien
catgttcacgaagcgtccaagagac

SEQ ID NO: 5173601 - DNA, 25 bp, Homo sapien
tccaagagacaagtaaaagacccag

SEQ ID NO: 5173602 - DNA, 25 bp, Homo sapien
cacatgacaaggatggagagtaacc

SEQ ID NO: 5173603 - DNA, 25 bp, Homo sapien
ggaaggttaattggctcacatgaca

SEQ ID NO: 5173604 - DNA, 25 bp, Homo sapien
tgactgcactcattctgactataac

SEQ ID NO: 5173605 - DNA, 25 bp, Homo sapien
tgcactcattctgactataacatcc

SEQ ID NO: 5173606 - DNA, 25 bp, Homo sapien
ctgcactcattctgactataacatc

SEQ ID NO: 5173607 - DNA, 25 bp, Homo sapien
gactgcactcattctgactataaca

SEQ ID NO: 5173608 - DNA, 25 bp, Homo sapien
tggtgagcaagcagatgcccactgt

SEQ ID NO: 5173609 - DNA, 25 bp, Homo sapien
agcagatgcccactgtcaaggtctc

SEQ ID NO: 5173610 - DNA, 25 bp, Homo sapien
caagcagatgcccactgtcaaggtc

SEQ ID NO: 5173611 - DNA, 25 bp, Homo sapien
gagcaagcagatgcccactgtcaag

SEQ ID NO: 5173612 - DNA, 25 bp, Homo sapien
tcatcttttggccgtgtacactgtt

SEQ ID NO: 5173613 - DNA, 25 bp, Homo sapien
caggaaagctgtcccgttgaaaaat

SEQ ID NO: 5173614 - DNA, 25 bp, Homo sapien
cttttggccgtgtacactgtttcca

SEQ ID NO: 5173615 - DNA, 25 bp, Homo sapien
catcttttggccgtgtacactgttt

SEQ ID NO: 5173616 - DNA, 25 bp, Homo sapien
ttctgctggtactgaacttattcca

SEQ ID NO: 5173617 - DNA, 25 bp, Homo sapien
tcacgaaaacatggctaaacctccg

SEQ ID NO: 5173618 - DNA, 25 bp, Homo sapien
tctttctggcaacagcacatgtctg

SEQ ID NO: 5173619 - DNA, 25 bp, Homo sapien
tgccatacagcaaacttgtcacgaa

SEQ ID NO: 5173620 - DNA, 25 bp, Homo sapien
gacaattagaccaatagaactgaat

SEQ ID NO: 5173621 - DNA, 25 bp, Homo sapien
caccaaattttatactctaatggag

SEQ ID NO: 5173622 - DNA, 25 bp, Homo sapien
aaagacctacgtatacaaagacctg

SEQ ID NO: 5173623 - DNA, 25 bp, Homo sapien
aaatccacgtggtattgttgtagga

SEQ ID NO: 5173624 - DNA, 25 bp, Homo sapien
gagcccctccagggtaaagaccaca

SEQ ID NO: 5173625 - DNA, 25 bp, Homo sapien
ccctccagggtaaagaccacaagat

SEQ ID NO: 5173626 - DNA, 25 bp, Homo sapien
cctccagggtaaagaccacaagatt

SEQ ID NO: 5173627 - DNA, 25 bp, Homo sapien
cccatggaagtgcagcgagcttttg

SEQ ID NO: 5173628 - DNA, 25 bp, Homo sapien
agaacatctgttcacacccatggaa

SEQ ID NO: 5173629 - DNA, 25 bp, Homo sapien
ctcagggaggagttaatcacgtctc

SEQ ID NO: 5173630 - DNA, 25 bp, Homo sapien
ttaatcacgtctcggagggcactgg

SEQ ID NO: 5173631 - DNA, 25 bp, Homo sapien
tgtcgcagccaccactttcttcttt

SEQ ID NO: 5173632 - DNA, 25 bp, Homo sapien
ttgtcgcagccaccactttcttctt

SEQ ID NO: 5173633 - DNA, 25 bp, Homo sapien
cttgtcgcagccaccactttcttct

SEQ ID NO: 5173634 - DNA, 25 bp, Homo sapien
ggctaggttggatgtcgctctagag

SEQ ID NO: 5173635 - DNA, 25 bp, Homo sapien
tctctcctattctcagggctaggtt

SEQ ID NO: 5173636 - DNA, 25 bp, Homo sapien
agggctaggttggatgtcgctctag

SEQ ID NO: 5173637 - DNA, 25 bp, Homo sapien
tctcctattctcagggctaggttgg

SEQ ID NO: 5173638 - DNA, 25 bp, Homo sapien
gatcacaaccctttttcacacagag

SEQ ID NO: 5173639 - DNA, 25 bp, Homo sapien
gtgctaacagccactgcaacatctg

SEQ ID NO: 5173640 - DNA, 25 bp, Homo sapien
tattggtcagtagcaaaggcatccc

SEQ ID NO: 5173641 - DNA, 25 bp, Homo sapien
tcacacagagacttgtgctaacagc

SEQ ID NO: 5173642 - DNA, 25 bp, Homo sapien
gatgttcttttagcaggtcctgcat

SEQ ID NO: 5173643 - DNA, 25 bp, Homo sapien
tgtcgctgccacctattgttttcaa

SEQ ID NO: 5173644 - DNA, 25 bp, Homo sapien
tcctgcatgtagagagtttggtgcc

SEQ ID NO: 5173645 - DNA, 25 bp, Homo sapien
cctctgtttagaatgtgaggatatc

SEQ ID NO: 5173646 - DNA, 25 bp, Homo sapien
caaagttaaactcatgcagtgtgga

SEQ ID NO: 5173647 - DNA, 25 bp, Homo sapien
gttgacctggtgacctagaccccaa

SEQ ID NO: 5173648 - DNA, 25 bp, Homo sapien
gagccaatgcttttagaagttctcc

SEQ ID NO: 5173649 - DNA, 25 bp, Homo sapien
agaagttctcctacaatctgctttg

SEQ ID NO: 5173650 - DNA, 25 bp, Homo sapien
cctgtatgcgttgtttccaggaatg

SEQ ID NO: 5173651 - DNA, 25 bp, Homo sapien
aggaatggatgctctatgaaggctt

SEQ ID NO: 5173652 - DNA, 25 bp, Homo sapien
cttcctgtatgcgttgtttccagga

SEQ ID NO: 5173653 - DNA, 25 bp, Homo sapien
gatgctctatgaaggcttgagccat

SEQ ID NO: 5173654 - DNA, 25 bp, Homo sapien
tcagccaccctgagacaatagtcac

SEQ ID NO: 5173655 - DNA, 25 bp, Homo sapien
tttgctaagtcttcagccaccctga

SEQ ID NO: 5173656 - DNA, 25 bp, Homo sapien
cagcatttgctaagtcttcagccac

SEQ ID NO: 5173657 - DNA, 25 bp, Homo sapien
accctgagacaatagtcactttgag

SEQ ID NO: 5173658 - DNA, 25 bp, Homo sapien
gcaggcacgattctggtcacacaga

SEQ ID NO: 5173659 - DNA, 25 bp, Homo sapien
gctgcaggcacgattctggtcacac

SEQ ID NO: 5173660 - DNA, 25 bp, Homo sapien
tgggccacttgggccactggtccct

SEQ ID NO: 5173661 - DNA, 25 bp, Homo sapien
ctgctgcaggcacgattctggtcac

SEQ ID NO: 5173662 - DNA, 25 bp, Homo sapien
cagtttgcagcactatcctccttag

SEQ ID NO: 5173663 - DNA, 25 bp, Homo sapien
caacacgaggctatgcagacagctg

SEQ ID NO: 5173664 - DNA, 25 bp, Homo sapien
ccataagtataagaagccatcacac

SEQ ID NO: 5173665 - DNA, 25 bp, Homo sapien
tccataaggcacttcccgtgacgtt

SEQ ID NO: 5173666 - DNA, 25 bp, Homo sapien
tggcacagagtagccccacataatg

SEQ ID NO: 5173667 - DNA, 25 bp, Homo sapien
cagacttgccgactgacttccagag

SEQ ID NO: 5173668 - DNA, 25 bp, Homo sapien
caagtggtccaacgattatgcctct

SEQ ID NO: 5173669 - DNA, 25 bp, Homo sapien
caaaggctaaaacagcaagtggtcc

SEQ ID NO: 5173670 - DNA, 25 bp, Homo sapien
aagctggccttctgccgggcttctg

SEQ ID NO: 5173671 - DNA, 25 bp, Homo sapien
catcaaaggtggcaaacgacaggtc

SEQ ID NO: 5173672 - DNA, 25 bp, Homo sapien
tgaatagggtgtcacctgacctgtg

SEQ ID NO: 5173673 - DNA, 25 bp, Homo sapien
ggagctctgacgctccactagcaag

SEQ ID NO: 5173674 - DNA, 25 bp, Homo sapien
tcctgtgggcatgatgacgccaaat

SEQ ID NO: 5173675 - DNA, 25 bp, Homo sapien
tgtgggcatgatgacgccaaatccc

SEQ ID NO: 5173676 - DNA, 25 bp, Homo sapien
ttcctgtgggcatgatgacgccaaa

SEQ ID NO: 5173677 - DNA, 25 bp, Homo sapien
cctgtgggcatgatgacgccaaatc

SEQ ID NO: 5173678 - DNA, 25 bp, Homo sapien
aagatacaagaacagcttcaccagg

SEQ ID NO: 5173679 - DNA, 25 bp, Homo sapien
agcttcagtgaacaggtgacttcca

SEQ ID NO: 5173680 - DNA, 25 bp, Homo sapien
ccttgctgggcaaggattcaatcca

SEQ ID NO: 5173681 - DNA, 25 bp, Homo sapien
tgggcaaggattcaatccaaagcca

SEQ ID NO: 5173682 - DNA, 25 bp, Homo sapien
cagaccccggattcatcaatttttt

SEQ ID NO: 5173683 - DNA, 25 bp, Homo sapien
aaaaccagaccccggattcatcaat

SEQ ID NO: 5173684 - DNA, 25 bp, Homo sapien
ccagaccccggattcatcaattttt

SEQ ID NO: 5173685 - DNA, 25 bp, Homo sapien
aaaccagaccccggattcatcaatt

SEQ ID NO: 5173686 - DNA, 25 bp, Homo sapien
tccaggcacccagattgaagtcatt

SEQ ID NO: 5173687 - DNA, 25 bp, Homo sapien
tgccaagaggagagtaaagcctagt

SEQ ID NO: 5173688 - DNA, 25 bp, Homo sapien
tgtctagaacgtgggtttccaagtc

SEQ ID NO: 5173689 - DNA, 25 bp, Homo sapien
tagtgttgaggactccctgactccc

SEQ ID NO: 5173690 - DNA, 25 bp, Homo sapien
ctttaaaatcaacggctgcatcaac

SEQ ID NO: 5173691 - DNA, 25 bp, Homo sapien
gctgcatcaaccttgtccctgaagt

SEQ ID NO: 5173692 - DNA, 25 bp, Homo sapien
tatgaactgagtatttctgtttgtt

SEQ ID NO: 5173693 - DNA, 25 bp, Homo sapien
aatcaacggctgcatcaaccttgtc

SEQ ID NO: 5173694 - DNA, 25 bp, Homo sapien
ccctttctgctccagtgactggcat

SEQ ID NO: 5173695 - DNA, 25 bp, Homo sapien
ccaaagtcgcttctcctgtttgttc

SEQ ID NO: 5173696 - DNA, 25 bp, Homo sapien
cacactgtctcccaaagtcgcttct

SEQ ID NO: 5173697 - DNA, 25 bp, Homo sapien
attttccaacaatcaaagccctttg

SEQ ID NO: 5173698 - DNA, 25 bp, Homo sapien
aagccaaaaatcctcttatatcagg

SEQ ID NO: 5173699 - DNA, 25 bp, Homo sapien
gacaatctaacagggttttctctaa

SEQ ID NO: 5173700 - DNA, 25 bp, Homo sapien
catatttgggctggagaggttcttg

SEQ ID NO: 5173701 - DNA, 25 bp, Homo sapien
tgctgtttatggtccatgtagcagg

SEQ ID NO: 5173702 - DNA, 25 bp, Homo sapien
tagcaggtgctctcctcaaaatggt

SEQ ID NO: 5173703 - DNA, 25 bp, Homo sapien
gagagccagcgaattgagtccatag

SEQ ID NO: 5173704 - DNA, 25 bp, Homo sapien
agagagccagcgaattgagtccata

SEQ ID NO: 5173705 - DNA, 25 bp, Homo sapien
agccagcgaattgagtccatagaaa

SEQ ID NO: 5173706 - DNA, 25 bp, Homo sapien
gagccagcgaattgagtccatagaa

SEQ ID NO: 5173707 - DNA, 25 bp, Homo sapien
tccagcagctgagagctgttggcag

SEQ ID NO: 5173708 - DNA, 25 bp, Homo sapien
tttctccagcagctgagagctgttg

SEQ ID NO: 5173709 - DNA, 25 bp, Homo sapien
tctccagcagctgagagctgttggc

SEQ ID NO: 5173710 - DNA, 25 bp, Homo sapien
tcagactgctttctccagcagctga

SEQ ID NO: 5173711 - DNA, 25 bp, Homo sapien
gggataaatgcctgttccaacacat

SEQ ID NO: 5173712 - DNA, 25 bp, Homo sapien
ggataaatgcctgttccaacacatg

SEQ ID NO: 5173713 - DNA, 25 bp, Homo sapien
gataaatgcctgttccaacacatgg

SEQ ID NO: 5173714 - DNA, 25 bp, Homo sapien
taaggaagcaatgatccaatgtctc

SEQ ID NO: 5173715 - DNA, 25 bp, Homo sapien
gtaagtagatgaacctctctgcatg

SEQ ID NO: 5173716 - DNA, 25 bp, Homo sapien
ccaatgtctcaaaggtgcttcggta

SEQ ID NO: 5173717 - DNA, 25 bp, Homo sapien
agaggaaggtttcctaacccagatg

SEQ ID NO: 5173718 - DNA, 25 bp, Homo sapien
ttactgtgcttagcaactcctgtca

SEQ ID NO: 5173719 - DNA, 25 bp, Homo sapien
gcttagcaactcctgtcataagaga

SEQ ID NO: 5173720 - DNA, 25 bp, Homo sapien
gttcactgaggggattgtttctttc

SEQ ID NO: 5173721 - DNA, 25 bp, Homo sapien
gcaactcctgtcataagagacaact

SEQ ID NO: 5173722 - DNA, 25 bp, Homo sapien
catgttgtggaatcttagagttcat

SEQ ID NO: 5173723 - DNA, 25 bp, Homo sapien
aatcaaagaatcttccttcccatgg

SEQ ID NO: 5173724 - DNA, 25 bp, Homo sapien
tccatgacagtcagaagaaatcaaa

SEQ ID NO: 5173725 - DNA, 25 bp, Homo sapien
tggccacagccaggacactctagac

SEQ ID NO: 5173726 - DNA, 25 bp, Homo sapien
caggacactctagacttggccccat

SEQ ID NO: 5173727 - DNA, 25 bp, Homo sapien
ggtctcttgcccccttcaattagca

SEQ ID NO: 5173728 - DNA, 25 bp, Homo sapien
tcaattagcacacctccacttttct

SEQ ID NO: 5173729 - DNA, 25 bp, Homo sapien
aggtaagatatcattagaagaaaaa

SEQ ID NO: 5173730 - DNA, 25 bp, Homo sapien
ttctgccttgccaggtaagatatca

SEQ ID NO: 5173731 - DNA, 25 bp, Homo sapien
catctgtgcaatgttgggttcggga

SEQ ID NO: 5173732 - DNA, 25 bp, Homo sapien
ttcgggacacagattggagccaggg

SEQ ID NO: 5173733 - DNA, 25 bp, Homo sapien
ccataagaattcattgcaggaacca

SEQ ID NO: 5173734 - DNA, 25 bp, Homo sapien
cattgcaggaaccagttctatttgg

SEQ ID NO: 5173735 - DNA, 25 bp, Homo sapien
gttcaaaactctctggcccatgctt

SEQ ID NO: 5173736 - DNA, 25 bp, Homo sapien
cagactgttcaaaactctctggccc

SEQ ID NO: 5173737 - DNA, 25 bp, Homo sapien
agcatgtgccagatcacaccctctg

SEQ ID NO: 5173738 - DNA, 25 bp, Homo sapien
actgttcaaaactctctggcccatg

SEQ ID NO: 5173739 - DNA, 25 bp, Homo sapien
cagagccgcatctgagggtaggctc

SEQ ID NO: 5173740 - DNA, 25 bp, Homo sapien
gtcaaggcttatgggtggaagaacc

SEQ ID NO: 5173741 - DNA, 25 bp, Homo sapien
cagctcaggagagtcaaggcttatg

SEQ ID NO: 5173742 - DNA, 25 bp, Homo sapien
agccgcatctgagggtaggctccag

SEQ ID NO: 5173743 - DNA, 25 bp, Homo sapien
ttaatatagaagttggaaattgcca

SEQ ID NO: 5173744 - DNA, 25 bp, Homo sapien
ttttgattatgagtaaagttcccca

SEQ ID NO: 5173745 - DNA, 25 bp, Homo sapien
tgtatgtaatattgtccacattttg

SEQ ID NO: 5173746 - DNA, 25 bp, Homo sapien
ccatggccagatgtatgtatgtaat

SEQ ID NO: 5173747 - DNA, 25 bp, Homo sapien
tcttggtatgacagtactgaggagt

SEQ ID NO: 5173748 - DNA, 25 bp, Homo sapien
caaacactttttcaggtaatatctt

SEQ ID NO: 5173749 - DNA, 25 bp, Homo sapien
ttcaggtaatatcttggtatgacag

SEQ ID NO: 5173750 - DNA, 25 bp, Homo sapien
cagtactgaggagtaggattaaaac

SEQ ID NO: 5173751 - DNA, 25 bp, Homo sapien
ctgcttcacaggacattgccttttc

SEQ ID NO: 5173752 - DNA, 25 bp, Homo sapien
ttcacaggacattgccttttcaaca

SEQ ID NO: 5173753 - DNA, 25 bp, Homo sapien
tgcttcacaggacattgccttttca

SEQ ID NO: 5173754 - DNA, 25 bp, Homo sapien
gcttcacaggacattgccttttcaa

SEQ ID NO: 5173755 - DNA, 25 bp, Homo sapien
gaaggaacggcgcagtcagacgcca

SEQ ID NO: 5173756 - DNA, 25 bp, Homo sapien
gctgtacacctctgcgcagccattg

SEQ ID NO: 5173757 - DNA, 25 bp, Homo sapien
agacgccatctgctgtacacctctg

SEQ ID NO: 5173758 - DNA, 25 bp, Homo sapien
ttggctgcctggtgcgtccgagagc

SEQ ID NO: 5173759 - DNA, 25 bp, Homo sapien
tggtgtgtgtcggaagaccacccat

SEQ ID NO: 5173760 - DNA, 25 bp, Homo sapien
tcccgagcgcaagaaagatggtggt

SEQ ID NO: 5173761 - DNA, 25 bp, Homo sapien
cttcccgagcgcaagaaagatggtg

SEQ ID NO: 5173762 - DNA, 25 bp, Homo sapien
attccagcgtctggcaacccggcgg

SEQ ID NO: 5173763 - DNA, 25 bp, Homo sapien
agagccgccgccgtaacctctggga

SEQ ID NO: 5173764 - DNA, 25 bp, Homo sapien
agccgccgccgtaacctctgggagc

SEQ ID NO: 5173765 - DNA, 25 bp, Homo sapien
gccagagccgccgccgtaacctctg

SEQ ID NO: 5173766 - DNA, 25 bp, Homo sapien
cagagccgccgccgtaacctctggg

SEQ ID NO: 5173767 - DNA, 25 bp, Homo sapien
taacagagcactcacaggtgtaccg

SEQ ID NO: 5173768 - DNA, 25 bp, Homo sapien
ggtatcttccgtagaatatgccacg

SEQ ID NO: 5173769 - DNA, 25 bp, Homo sapien
gagcgccaaggaaccctggtatctt

SEQ ID NO: 5173770 - DNA, 25 bp, Homo sapien
gaatcgcaatacctcttatgggaag

SEQ ID NO: 5173771 - DNA, 25 bp, Homo sapien
ctttcaagcaagttgggtactgtgc

SEQ ID NO: 5173772 - DNA, 25 bp, Homo sapien
gccaatgccaggtccacaagaagca

SEQ ID NO: 5173773 - DNA, 25 bp, Homo sapien
tttcaagcaagttgggtactgtgcc

SEQ ID NO: 5173774 - DNA, 25 bp, Homo sapien
aaatgcacaagcatggttccagcct

SEQ ID NO: 5173775 - DNA, 25 bp, Homo sapien
ggagaatacctctttacacagtgca

SEQ ID NO: 5173776 - DNA, 25 bp, Homo sapien
catacagaaggactgcgctgggctt

SEQ ID NO: 5173777 - DNA, 25 bp, Homo sapien
tttgccaagaccaaggagtatatcc

SEQ ID NO: 5173778 - DNA, 25 bp, Homo sapien
gcatgttcttcccacacgcaatgat

SEQ ID NO: 5173779 - DNA, 25 bp, Homo sapien
ccacacgcaatgatctcctttctaa

SEQ ID NO: 5173780 - DNA, 25 bp, Homo sapien
tgttcttcccacacgcaatgatctc

SEQ ID NO: 5173781 - DNA, 25 bp, Homo sapien
tgatctcctttctaataatgcagtc

SEQ ID NO: 5173782 - DNA, 25 bp, Homo sapien
actttggccaaggtatctatatccc

SEQ ID NO: 5173783 - DNA, 25 bp, Homo sapien
tatttttaagcacactacggagtca

SEQ ID NO: 5173784 - DNA, 25 bp, Homo sapien
gtttgaaattcttacctcatagggc

SEQ ID NO: 5173785 - DNA, 25 bp, Homo sapien
tatccccttggagttccagttactg

SEQ ID NO: 5173786 - DNA, 25 bp, Homo sapien
cagcaagtgactgttaggttgctct

SEQ ID NO: 5173787 - DNA, 25 bp, Homo sapien
gatgaactgattatcctttttgcct

SEQ ID NO: 5173788 - DNA, 25 bp, Homo sapien
tcatgctcctccatacccagcaagt

SEQ ID NO: 5173789 - DNA, 25 bp, Homo sapien
ttccagatgaactgattatcctttt

SEQ ID NO: 5173790 - DNA, 25 bp, Homo sapien
tccaggttcttaccaatccccagag

SEQ ID NO: 5173791 - DNA, 25 bp, Homo sapien
tggccataattgtcccaactgtccc

SEQ ID NO: 5173792 - DNA, 25 bp, Homo sapien
gacagacttcgtcagcagtcctcat

SEQ ID NO: 5173793 - DNA, 25 bp, Homo sapien
aatccccagagtatgacagacttcg

SEQ ID NO: 5173794 - DNA, 25 bp, Homo sapien
ccatggtagacgagtcagtgtgaag

SEQ ID NO: 5173795 - DNA, 25 bp, Homo sapien
aggtgacagccatggtagacgagtc

SEQ ID NO: 5173796 - DNA, 25 bp, Homo sapien
cagccatggtagacgagtcagtgtg

SEQ ID NO: 5173797 - DNA, 25 bp, Homo sapien
tgacagccatggtagacgagtcagt

SEQ ID NO: 5173798 - DNA, 25 bp, Homo sapien
gagaaccaagggcaaacaaattcta

SEQ ID NO: 5173799 - DNA, 25 bp, Homo sapien
agagaaccaagggcaaacaaattct

SEQ ID NO: 5173800 - DNA, 25 bp, Homo sapien
gcctgtgtggtagggtcccaagctt

SEQ ID NO: 5173801 - DNA, 25 bp, Homo sapien
ctttgcccttggtagcatgaggaac

SEQ ID NO: 5173802 - DNA, 25 bp, Homo sapien
ggaaccctttgtgtcttagccatgt

SEQ ID NO: 5173803 - DNA, 25 bp, Homo sapien
gactggcttaagctgagctccctga

SEQ ID NO: 5173804 - DNA, 25 bp, Homo sapien
tcagtgtctccagctggtctaatcc

SEQ ID NO: 5173805 - DNA, 25 bp, Homo sapien
ggtctaatcctgtcccgagctcctt

SEQ ID NO: 5173806 - DNA, 25 bp, Homo sapien
tctgctacggtgtgactactgaatt

SEQ ID NO: 5173807 - DNA, 25 bp, Homo sapien
gctccttgctcagttgtctgctacg

SEQ ID NO: 5173808 - DNA, 25 bp, Homo sapien
agatgggaaagaaaatagggtcctg

SEQ ID NO: 5173809 - DNA, 25 bp, Homo sapien
cttcttgctggaatatggactcagt

SEQ ID NO: 5173810 - DNA, 25 bp, Homo sapien
tcttgctggaatatggactcagtca

SEQ ID NO: 5173811 - DNA, 25 bp, Homo sapien
tggaatatggactcagtcagagaga

SEQ ID NO: 5173812 - DNA, 25 bp, Homo sapien
tcatatgcggaaggcaaaagtcata

SEQ ID NO: 5173813 - DNA, 25 bp, Homo sapien
catatgcggaaggcaaaagtcatac

SEQ ID NO: 5173814 - DNA, 25 bp, Homo sapien
ggccgtttcactgatggcaatgcag

SEQ ID NO: 5173815 - DNA, 25 bp, Homo sapien
tcacaaggtgccagtcaaacaaagt

SEQ ID NO: 5173816 - DNA, 25 bp, Homo sapien
aagtaaaggatgggccgtttcactg

SEQ ID NO: 5173817 - DNA, 25 bp, Homo sapien
caaggtgccagtcaaacaaagtaaa

SEQ ID NO: 5173818 - DNA, 25 bp, Homo sapien
caacagtgagcaagacatacagccg

SEQ ID NO: 5173819 - DNA, 25 bp, Homo sapien
ccagcagtccatcagagtaattcag

SEQ ID NO: 5173820 - DNA, 25 bp, Homo sapien
gctgagaccagaggtatgacactga

SEQ ID NO: 5173821 - DNA, 25 bp, Homo sapien
gcatttagaatgagacacgtgtcct

SEQ ID NO: 5173822 - DNA, 25 bp, Homo sapien
aattccatgcatgactctggagcag

SEQ ID NO: 5173823 - DNA, 25 bp, Homo sapien
cagaagcctgaaagtacctagccac

SEQ ID NO: 5173824 - DNA, 25 bp, Homo sapien
ggaagacagcaattacctttacgga

SEQ ID NO: 5173825 - DNA, 25 bp, Homo sapien
agcaataacccctgaggacacgtga

SEQ ID NO: 5173826 - DNA, 25 bp, Homo sapien
aagaaagtggacaagacagatcttc

SEQ ID NO: 5173827 - DNA, 25 bp, Homo sapien
tggaagaaagtggacaagacagatc

SEQ ID NO: 5173828 - DNA, 25 bp, Homo sapien
aagtggacaagacagatcttctgag

SEQ ID NO: 5173829 - DNA, 25 bp, Homo sapien
gccatggaagaaagtggacaagaca

SEQ ID NO: 5173830 - DNA, 25 bp, Homo sapien
ggataaacttagtctcatactccat

SEQ ID NO: 5173831 - DNA, 25 bp, Homo sapien
ttcttactaatatgtctgactatat

SEQ ID NO: 5173832 - DNA, 25 bp, Homo sapien
gataaacttagtctcatactccata

SEQ ID NO: 5173833 - DNA, 25 bp, Homo sapien
aatatgtctgactatattctggata

SEQ ID NO: 5173834 - DNA, 25 bp, Homo sapien
ttgggctagtttcctctagcttcca

SEQ ID NO: 5173835 - DNA, 25 bp, Homo sapien
ctcttgggctagtttcctctagctt

SEQ ID NO: 5173836 - DNA, 25 bp, Homo sapien
tcttgggctagtttcctctagcttc

SEQ ID NO: 5173837 - DNA, 25 bp, Homo sapien
tgggctagtttcctctagcttccac

SEQ ID NO: 5173838 - DNA, 25 bp, Homo sapien
gcttccccagagaacgaatggctgc

SEQ ID NO: 5173839 - DNA, 25 bp, Homo sapien
cttgcttccccagagaacgaatggc

SEQ ID NO: 5173840 - DNA, 25 bp, Homo sapien
tgcttccccagagaacgaatggctg

SEQ ID NO: 5173841 - DNA, 25 bp, Homo sapien
ttgcttccccagagaacgaatggct

SEQ ID NO: 5173842 - DNA, 25 bp, Homo sapien
ggtatggggagatgacatgaataat

SEQ ID NO: 5173843 - DNA, 25 bp, Homo sapien
tattatcctgacattgctttatttt

SEQ ID NO: 5173844 - DNA, 25 bp, Homo sapien
cttttattatcctgacattgcttta

SEQ ID NO: 5173845 - DNA, 25 bp, Homo sapien
gagatgacatgaataatgatgcaga

SEQ ID NO: 5173846 - DNA, 25 bp, Homo sapien
ggtgtggtgttcaataaaatgcctg

SEQ ID NO: 5173847 - DNA, 25 bp, Homo sapien
catttaagaaagcatgctggatgcc

SEQ ID NO: 5173848 - DNA, 25 bp, Homo sapien
acaaacgaaaaaggaggctccagag

SEQ ID NO: 5173849 - DNA, 25 bp, Homo sapien
gcacagtactggtcactatttgaag

SEQ ID NO: 5173850 - DNA, 25 bp, Homo sapien
ggtgacttgtccacccgtcaacatg

SEQ ID NO: 5173851 - DNA, 25 bp, Homo sapien
gggaccacagtctcctgtacacctt

SEQ ID NO: 5173852 - DNA, 25 bp, Homo sapien
accacactgcccgactctggactcc

SEQ ID NO: 5173853 - DNA, 25 bp, Homo sapien
actctggactcctccgggaccacag

SEQ ID NO: 5173854 - DNA, 25 bp, Homo sapien
tatgaccgcgcgagttctatgctgc

SEQ ID NO: 5173855 - DNA, 25 bp, Homo sapien
accgcgagcgtaaggaacaagcaca

SEQ ID NO: 5173856 - DNA, 25 bp, Homo sapien
cacagtggtgccagtcagaaacctc

SEQ ID NO: 5173857 - DNA, 25 bp, Homo sapien
cttcttgtacacgaaacctgccggg

SEQ ID NO: 5173858 - DNA, 25 bp, Homo sapien
caaactatagtaccacaaaatggaa

SEQ ID NO: 5173859 - DNA, 25 bp, Homo sapien
ggaaggatgagtaaatagagtagaa

SEQ ID NO: 5173860 - DNA, 25 bp, Homo sapien
caaacagacatggaacaaacttaaa

SEQ ID NO: 5173861 - DNA, 25 bp, Homo sapien
actttggggacagtcagtaaaatgg

SEQ ID NO: 5173862 - DNA, 25 bp, Homo sapien
tgttctatgcaattctagttttatt

SEQ ID NO: 5173863 - DNA, 25 bp, Homo sapien
tctagttttatttctgtctcctcag

SEQ ID NO: 5173864 - DNA, 25 bp, Homo sapien
tagttttatttctgtctcctcagac

SEQ ID NO: 5173865 - DNA, 25 bp, Homo sapien
gttttatttctgtctcctcagacat

SEQ ID NO: 5173866 - DNA, 25 bp, Homo sapien
agtctccaacagtaagagcatgtgc

SEQ ID NO: 5173867 - DNA, 25 bp, Homo sapien
tttctttccaagaaatagcatatgt

SEQ ID NO: 5173868 - DNA, 25 bp, Homo sapien
ttaattgaggcttttatattttcga

SEQ ID NO: 5173869 - DNA, 25 bp, Homo sapien
catgtgcagggagttataggaatta

SEQ ID NO: 5173870 - DNA, 25 bp, Homo sapien
gatgcaggactgaacagtcaatggg

SEQ ID NO: 5173871 - DNA, 25 bp, Homo sapien
tgcaggactgaacagtcaatgggaa

SEQ ID NO: 5173872 - DNA, 25 bp, Homo sapien
tcaatgggaaggaatcttgaaggca

SEQ ID NO: 5173873 - DNA, 25 bp, Homo sapien
ggactgaacagtcaatgggaaggaa

SEQ ID NO: 5173874 - DNA, 25 bp, Homo sapien
tctttctcaagaagttcaggacact

SEQ ID NO: 5173875 - DNA, 25 bp, Homo sapien
atgtgcttcacgttccggctcctgc

SEQ ID NO: 5173876 - DNA, 25 bp, Homo sapien
gcaagagactccctgaacggcatgt

SEQ ID NO: 5173877 - DNA, 25 bp, Homo sapien
tgctcctaaatcctggcaagagact

SEQ ID NO: 5173878 - DNA, 25 bp, Homo sapien
cacactaaagaaggcataaaggcgt

SEQ ID NO: 5173879 - DNA, 25 bp, Homo sapien
tcacactaaagaaggcataaaggcg

SEQ ID NO: 5173880 - DNA, 25 bp, Homo sapien
cactaaagaaggcataaaggcgtaa

SEQ ID NO: 5173881 - DNA, 25 bp, Homo sapien
taaagaaggcataaaggcgtaatac

SEQ ID NO: 5173882 - DNA, 25 bp, Homo sapien
tccattcagaagttctccaggaata

SEQ ID NO: 5173883 - DNA, 25 bp, Homo sapien
tttccattcagaagttctccaggaa

SEQ ID NO: 5173884 - DNA, 25 bp, Homo sapien
tctttccattcagaagttctccagg

SEQ ID NO: 5173885 - DNA, 25 bp, Homo sapien
ccattcagaagttctccaggaatac

SEQ ID NO: 5173886 - DNA, 25 bp, Homo sapien
acgggtcccgtcacatgccagtggg

SEQ ID NO: 5173887 - DNA, 25 bp, Homo sapien
tgctgctcgaggaggagagagactt

SEQ ID NO: 5173888 - DNA, 25 bp, Homo sapien
gctggtacgctctgggcacagtaca

SEQ ID NO: 5173889 - DNA, 25 bp, Homo sapien
cttggccctcagtgcggcagctgct

SEQ ID NO: 5173890 - DNA, 25 bp, Homo sapien
atctgtcccggaactggctgcctac

SEQ ID NO: 5173891 - DNA, 25 bp, Homo sapien
agcagtgcaccatctgtcccggaac

SEQ ID NO: 5173892 - DNA, 25 bp, Homo sapien
catctgtcccggaactggctgccta

SEQ ID NO: 5173893 - DNA, 25 bp, Homo sapien
tgcaccatctgtcccggaactggct

SEQ ID NO: 5173894 - DNA, 25 bp, Homo sapien
tctgtttctacaaattcagaggagt

SEQ ID NO: 5173895 - DNA, 25 bp, Homo sapien
ttcagaggagtaactatagtcatgt

SEQ ID NO: 5173896 - DNA, 25 bp, Homo sapien
aattcagaggagtaactatagtcat

SEQ ID NO: 5173897 - DNA, 25 bp, Homo sapien
ttctgtttctacaaattcagaggag

SEQ ID NO: 5173898 - DNA, 25 bp, Homo sapien
ttgggccatcccactgtaagcttgt

SEQ ID NO: 5173899 - DNA, 25 bp, Homo sapien
gtgccagcgcatggcctgaaccact

SEQ ID NO: 5173900 - DNA, 25 bp, Homo sapien
ccatgtgactatggaaggccagacc

SEQ ID NO: 5173901 - DNA, 25 bp, Homo sapien
catgtaagcccttgccccatgtgac

SEQ ID NO: 5173902 - DNA, 25 bp, Homo sapien
gtatctgaacggaaatctgtaataa

SEQ ID NO: 5173903 - DNA, 25 bp, Homo sapien
tcagaaggtaggtaccctgacctaa

SEQ ID NO: 5173904 - DNA, 25 bp, Homo sapien
ctgtgttccttcagaaggtaggtac

SEQ ID NO: 5173905 - DNA, 25 bp, Homo sapien
cctgacctaaaagtatctgaacgga

SEQ ID NO: 5173906 - DNA, 25 bp, Homo sapien
cagcttcagaccacttagcaagtca

SEQ ID NO: 5173907 - DNA, 25 bp, Homo sapien
agcttcagaccacttagcaagtcat

SEQ ID NO: 5173908 - DNA, 25 bp, Homo sapien
gcttcagaccacttagcaagtcata

SEQ ID NO: 5173909 - DNA, 25 bp, Homo sapien
cttcagaccacttagcaagtcatat

SEQ ID NO: 5173910 - DNA, 25 bp, Homo sapien
gcagaacttcgaacaccaaaatagc

SEQ ID NO: 5173911 - DNA, 25 bp, Homo sapien
gaacttcgaacaccaaaatagcagc

SEQ ID NO: 5173912 - DNA, 25 bp, Homo sapien
agaacttcgaacaccaaaatagcag

SEQ ID NO: 5173913 - DNA, 25 bp, Homo sapien
cagcagaacttcgaacaccaaaata

SEQ ID NO: 5173914 - DNA, 25 bp, Homo sapien
aacggggcgggtcccacacataatg

SEQ ID NO: 5173915 - DNA, 25 bp, Homo sapien
gcaacggggcgggtcccacacataa

SEQ ID NO: 5173916 - DNA, 25 bp, Homo sapien
gcgggtcccacacataatgcctttt

SEQ ID NO: 5173917 - DNA, 25 bp, Homo sapien
ggggcgggtcccacacataatgcct

SEQ ID NO: 5173918 - DNA, 25 bp, Homo sapien
tccgtagagcaagggatattgcaga

SEQ ID NO: 5173919 - DNA, 25 bp, Homo sapien
gaagatactatgcagtccgtagagc

SEQ ID NO: 5173920 - DNA, 25 bp, Homo sapien
ggctgaccaggaagatactatgcag

SEQ ID NO: 5173921 - DNA, 25 bp, Homo sapien
cagttttcatggatgcacaggcccc

SEQ ID NO: 5173922 - DNA, 25 bp, Homo sapien
tcatgcagcaaagtgatgtcacagc

SEQ ID NO: 5173923 - DNA, 25 bp, Homo sapien
cttggtccaacctcacatgattttc

SEQ ID NO: 5173924 - DNA, 25 bp, Homo sapien
actggaggagccttggtccaacctc

SEQ ID NO: 5173925 - DNA, 25 bp, Homo sapien
ttcatgcagcaaagtgatgtcacag

SEQ ID NO: 5173926 - DNA, 25 bp, Homo sapien
tctgcctgtcatgacgcgatggaag

SEQ ID NO: 5173927 - DNA, 25 bp, Homo sapien
ctgccgatcatggttcccttgtctg

SEQ ID NO: 5173928 - DNA, 25 bp, Homo sapien
ggctgattttctaatgtactctgaa

SEQ ID NO: 5173929 - DNA, 25 bp, Homo sapien
tcatggttcccttgtctgcctgtca

SEQ ID NO: 5173930 - DNA, 25 bp, Homo sapien
cctctgaaaggcatcctagctttac

SEQ ID NO: 5173931 - DNA, 25 bp, Homo sapien
gaacaacttcagtgggcaattctgc

SEQ ID NO: 5173932 - DNA, 25 bp, Homo sapien
ggcaattctgcctttctagtatatg

SEQ ID NO: 5173933 - DNA, 25 bp, Homo sapien
tgacactctatagggagcctccagc

SEQ ID NO: 5173934 - DNA, 25 bp, Homo sapien
agcagctggctgttgtgacactcta

SEQ ID NO: 5173935 - DNA, 25 bp, Homo sapien
gattccatgaggacatggcgctgcc

SEQ ID NO: 5173936 - DNA, 25 bp, Homo sapien
aggccacattttccatgatcaggga

SEQ ID NO: 5173937 - DNA, 25 bp, Homo sapien
gatgccagccatcggtagcacattg

SEQ ID NO: 5173938 - DNA, 25 bp, Homo sapien
ttcagaatacgatgtcccaggccac

SEQ ID NO: 5173939 - DNA, 25 bp, Homo sapien
ctgatcaattacaccctttcttcga

SEQ ID NO: 5173940 - DNA, 25 bp, Homo sapien
cctttcttcgaaatcccacaaagat

SEQ ID NO: 5173941 - DNA, 25 bp, Homo sapien
tcaattacaccctttcttcgaaatc

SEQ ID NO: 5173942 - DNA, 25 bp, Homo sapien
ttcgaaatcccacaaagatatacat

SEQ ID NO: 5173943 - DNA, 25 bp, Homo sapien
aggcaggtgcatatgcaaatgccat

SEQ ID NO: 5173944 - DNA, 25 bp, Homo sapien
aataggcaggtgcatatgcaaatgc

SEQ ID NO: 5173945 - DNA, 25 bp, Homo sapien
gataataggcaggtgcatatgcaaa

SEQ ID NO: 5173946 - DNA, 25 bp, Homo sapien
taggcaggtgcatatgcaaatgcca

SEQ ID NO: 5173947 - DNA, 25 bp, Homo sapien
ctcaagcctgtcaaaactaatttct

SEQ ID NO: 5173948 - DNA, 25 bp, Homo sapien
tggaagaagagcgtgtgtgataaat

SEQ ID NO: 5173949 - DNA, 25 bp, Homo sapien
agaagagcgtgtgtgataaatttgc

SEQ ID NO: 5173950 - DNA, 25 bp, Homo sapien
cttccaaatgtagatgaagagatgg

SEQ ID NO: 5173951 - DNA, 25 bp, Homo sapien
tcataccatgtttactgccaggcag

SEQ ID NO: 5173952 - DNA, 25 bp, Homo sapien
ggatctttgccgagcatgccaaatc

SEQ ID NO: 5173953 - DNA, 25 bp, Homo sapien
gatccctataatttcagcaacatgg

SEQ ID NO: 5173954 - DNA, 25 bp, Homo sapien
catggaaaagggactctgttccatt

SEQ ID NO: 5173955 - DNA, 25 bp, Homo sapien
tccagggggagtgttgagaaacaat

SEQ ID NO: 5173956 - DNA, 25 bp, Homo sapien
tccagtactgttatttagcttttgc

SEQ ID NO: 5173957 - DNA, 25 bp, Homo sapien
ttagcttttgcttgaggtaatatcc

SEQ ID NO: 5173958 - DNA, 25 bp, Homo sapien
tcctccagggggagtgttgagaaac

SEQ ID NO: 5173959 - DNA, 25 bp, Homo sapien
cacctgacttcaagccagttctagt

SEQ ID NO: 5173960 - DNA, 25 bp, Homo sapien
tgcagccactgcgaatttctagggt

SEQ ID NO: 5173961 - DNA, 25 bp, Homo sapien
gttttcctatcttctggtccacata

SEQ ID NO: 5173962 - DNA, 25 bp, Homo sapien
gggtccatgacacagttttcctatc

SEQ ID NO: 5173963 - DNA, 25 bp, Homo sapien
caggctccctgggatcaataagagc

SEQ ID NO: 5173964 - DNA, 25 bp, Homo sapien
gggatcaataagagcaaactccctg

SEQ ID NO: 5173965 - DNA, 25 bp, Homo sapien
tgttctctccttgtggaatagactt

SEQ ID NO: 5173966 - DNA, 25 bp, Homo sapien
tctccttgtggaatagacttattta

SEQ ID NO: 5173967 - DNA, 25 bp, Homo sapien
cacacagtccattcggcagggaatt

SEQ ID NO: 5173968 - DNA, 25 bp, Homo sapien
tgggaacaggatgaccactccgtcc

SEQ ID NO: 5173969 - DNA, 25 bp, Homo sapien
agttcttgacctggtctgtttccca

SEQ ID NO: 5173970 - DNA, 25 bp, Homo sapien
tccgtccactcgctcagcacacagt

SEQ ID NO: 5173971 - DNA, 25 bp, Homo sapien
aatgtgtcctcagaacaagggcccc

SEQ ID NO: 5173972 - DNA, 25 bp, Homo sapien
caaggcgatgtctcccagtgaagct

SEQ ID NO: 5173973 - DNA, 25 bp, Homo sapien
gagtctgaatgcctacaccacacgt

SEQ ID NO: 5173974 - DNA, 25 bp, Homo sapien
tacacaaacgatgctcttggagagc

SEQ ID NO: 5173975 - DNA, 25 bp, Homo sapien
gaactctccatgatatggccctttc

SEQ ID NO: 5173976 - DNA, 25 bp, Homo sapien
cttgaactctccatgatatggccct

SEQ ID NO: 5173977 - DNA, 25 bp, Homo sapien
aatacttgaactctccatgatatgg

SEQ ID NO: 5173978 - DNA, 25 bp, Homo sapien
tgggtaatacttgaactctccatga

SEQ ID NO: 5173979 - DNA, 25 bp, Homo sapien
ttcaggtcgagtagaatctggacat

SEQ ID NO: 5173980 - DNA, 25 bp, Homo sapien
aacaggggcgcacagtttcaggtcg

SEQ ID NO: 5173981 - DNA, 25 bp, Homo sapien
gggcagggtgtccactcactgaaag

SEQ ID NO: 5173982 - DNA, 25 bp, Homo sapien
ccttgggcagggtgtccactcactg

SEQ ID NO: 5173983 - DNA, 25 bp, Homo sapien
tggagatgtaaatcatgactttggc

SEQ ID NO: 5173984 - DNA, 25 bp, Homo sapien
gagatgtaaatcatgactttggcaa

SEQ ID NO: 5173985 - DNA, 25 bp, Homo sapien
cctgtggagatgtaaatcatgactt

SEQ ID NO: 5173986 - DNA, 25 bp, Homo sapien
tgtggagatgtaaatcatgactttg

SEQ ID NO: 5173987 - DNA, 25 bp, Homo sapien
ttgcaatctacccaactggcaaaag

SEQ ID NO: 5173988 - DNA, 25 bp, Homo sapien
tagcatcagattgaacaggcaacat

SEQ ID NO: 5173989 - DNA, 25 bp, Homo sapien
accaaccccatcactgggtatatac

SEQ ID NO: 5173990 - DNA, 25 bp, Homo sapien
ggatataaacagacccttgtcaaaa

SEQ ID NO: 5173991 - DNA, 25 bp, Homo sapien
gatgacccctatacttcctttgaga

SEQ ID NO: 5173992 - DNA, 25 bp, Homo sapien
gaaactgcatgtctagagaacctct

SEQ ID NO: 5173993 - DNA, 25 bp, Homo sapien
tgcttaaagcctagtaagggccagg

SEQ ID NO: 5173994 - DNA, 25 bp, Homo sapien
caagtagttagttcagggtttggca

SEQ ID NO: 5173995 - DNA, 25 bp, Homo sapien
tcatataaggtatctgggcattcct

SEQ ID NO: 5173996 - DNA, 25 bp, Homo sapien
cgagactgttttactgtggcatttc

SEQ ID NO: 5173997 - DNA, 25 bp, Homo sapien
ctctcctcatataaggtatctgggc

SEQ ID NO: 5173998 - DNA, 25 bp, Homo sapien
tgatgattctgtatcgagactgttt

SEQ ID NO: 5173999 - DNA, 25 bp, Homo sapien
tatacaggacacaaggaaacatctt

SEQ ID NO: 5174000 - DNA, 25 bp, Homo sapien
cgatatacaggacacaaggaaacat

SEQ ID NO: 5174001 - DNA, 25 bp, Homo sapien
tacaggacacaaggaaacatcttca

SEQ ID NO: 5174002 - DNA, 25 bp, Homo sapien
gatatacaggacacaaggaaacatc

SEQ ID NO: 5174003 - DNA, 25 bp, Homo sapien
tgcccgttattccctgccagacaga

SEQ ID NO: 5174004 - DNA, 25 bp, Homo sapien
cagactctggcactaagatgcaagg

SEQ ID NO: 5174005 - DNA, 25 bp, Homo sapien
ctggcactaagatgcaagggctcca

SEQ ID NO: 5174006 - DNA, 25 bp, Homo sapien
caggcttcactgctgcccgttattc

SEQ ID NO: 5174007 - DNA, 25 bp, Homo sapien
tcctcagtcactacacgagttcttt

SEQ ID NO: 5174008 - DNA, 25 bp, Homo sapien
cactacacgagttctttccatcttt

SEQ ID NO: 5174009 - DNA, 25 bp, Homo sapien
tactctcctcagtcactacacgagt

SEQ ID NO: 5174010 - DNA, 25 bp, Homo sapien
tcagtcactacacgagttctttcca

SEQ ID NO: 5174011 - DNA, 25 bp, Homo sapien
tactgcaagccgatgaggtccacag

SEQ ID NO: 5174012 - DNA, 25 bp, Homo sapien
aaagcaaatactgcaagccgatgag

SEQ ID NO: 5174013 - DNA, 25 bp, Homo sapien
caatcatgccagaaagagccaaaag

SEQ ID NO: 5174014 - DNA, 25 bp, Homo sapien
gatggaataatgaaacaatcatgcc

SEQ ID NO: 5174015 - DNA, 25 bp, Homo sapien
tttgagttgacttgggaagtaaaga

SEQ ID NO: 5174016 - DNA, 25 bp, Homo sapien
cgagacatgttcctagagagtttgg

SEQ ID NO: 5174017 - DNA, 25 bp, Homo sapien
gaaattcgtattgattcacagcctc

SEQ ID NO: 5174018 - DNA, 25 bp, Homo sapien
ggctgcgagttaccctgactgatgg

SEQ ID NO: 5174019 - DNA, 25 bp, Homo sapien
tttattcctgggttgtcgagacatg

SEQ ID NO: 5174020 - DNA, 25 bp, Homo sapien
gccatctccatcatcgctaggactg

SEQ ID NO: 5174021 - DNA, 25 bp, Homo sapien
catcgctaggactgaagtatgagtt

SEQ ID NO: 5174022 - DNA, 25 bp, Homo sapien
ttctgcttggacctcaaatagggca

SEQ ID NO: 5174023 - DNA, 25 bp, Homo sapien
cttggacctcaaatagggcagagcc

SEQ ID NO: 5174024 - DNA, 25 bp, Homo sapien
ttcaagagtcaactggaagctgaac

SEQ ID NO: 5174025 - DNA, 25 bp, Homo sapien
aaaggtgtattcagttcaagagtca

SEQ ID NO: 5174026 - DNA, 25 bp, Homo sapien
cagggaagaggatgaattgctttca

SEQ ID NO: 5174027 - DNA, 25 bp, Homo sapien
ctgtgcatctattatttgggccgca

SEQ ID NO: 5174028 - DNA, 25 bp, Homo sapien
atcttctcaccaggtagagagctgg

SEQ ID NO: 5174029 - DNA, 25 bp, Homo sapien
catctattatttgggccgcagggaa

SEQ ID NO: 5174030 - DNA, 25 bp, Homo sapien
ccctgggtctttgctatcctctgaa

SEQ ID NO: 5174031 - DNA, 25 bp, Homo sapien
gtgatatccactgctgaagtctcag

SEQ ID NO: 5174032 - DNA, 25 bp, Homo sapien
tgactgcttgccctggtgatatcca

SEQ ID NO: 5174033 - DNA, 25 bp, Homo sapien
gatccatttctctcagcctggtcag

SEQ ID NO: 5174034 - DNA, 25 bp, Homo sapien
catgcctcatttgtttcttggtcat

SEQ ID NO: 5174035 - DNA, 25 bp, Homo sapien
tgaccggttgtcatcagagatgcat

SEQ ID NO: 5174036 - DNA, 25 bp, Homo sapien
ttctgctgaccggttgtcatcagag

SEQ ID NO: 5174037 - DNA, 25 bp, Homo sapien
gctgaccggttgtcatcagagatgc

SEQ ID NO: 5174038 - DNA, 25 bp, Homo sapien
tgctgaccggttgtcatcagagatg

SEQ ID NO: 5174039 - DNA, 25 bp, Homo sapien
ggagcagggcgtaaacttggaccaa

SEQ ID NO: 5174040 - DNA, 25 bp, Homo sapien
aaggtgcagtcttctcgacatggga

SEQ ID NO: 5174041 - DNA, 25 bp, Homo sapien
tcttgcacaaggagaggcatgccgt

SEQ ID NO: 5174042 - DNA, 25 bp, Homo sapien
cgacatgggactgtgcattcttgca

SEQ ID NO: 5174043 - DNA, 25 bp, Homo sapien
ttatcagaacaggctactgctcgaa

SEQ ID NO: 5174044 - DNA, 25 bp, Homo sapien
gaccagtttccataaggttgggata

SEQ ID NO: 5174045 - DNA, 25 bp, Homo sapien
tgtacccgcagtcctcggtgaggct

SEQ ID NO: 5174046 - DNA, 25 bp, Homo sapien
tgccttctggaagaatgcaatctga

SEQ ID NO: 5174047 - DNA, 25 bp, Homo sapien
caaacctcccgagctgtgtgtgagt

SEQ ID NO: 5174048 - DNA, 25 bp, Homo sapien
ccatattttatgagagacaatgtgt

SEQ ID NO: 5174049 - DNA, 25 bp, Homo sapien
taaaacaattattatagagcagagc

SEQ ID NO: 5174050 - DNA, 25 bp, Homo sapien
gagcagagctattaattctagacct

SEQ ID NO: 5174051 - DNA, 25 bp, Homo sapien
tgaggagctgctacataaagagacc

SEQ ID NO: 5174052 - DNA, 25 bp, Homo sapien
tcatggaagtcctcgagggtccagc

SEQ ID NO: 5174053 - DNA, 25 bp, Homo sapien
caggaaagactgcaagcaggcccat

SEQ ID NO: 5174054 - DNA, 25 bp, Homo sapien
gagaccaggaaagactgcaagcagg

SEQ ID NO: 5174055 - DNA, 25 bp, Homo sapien
ggatatttacccgtgttaatgtcat

SEQ ID NO: 5174056 - DNA, 25 bp, Homo sapien
tacccgtgttaatgtcatcaaccat

SEQ ID NO: 5174057 - DNA, 25 bp, Homo sapien
cagctggatatttacccgtgttaat

SEQ ID NO: 5174058 - DNA, 25 bp, Homo sapien
tatttacccgtgttaatgtcatcaa

SEQ ID NO: 5174059 - DNA, 25 bp, Homo sapien
ggaactatcactgtagcctgaagta

SEQ ID NO: 5174060 - DNA, 25 bp, Homo sapien
tcataaggagaaaataaccgtagaa

SEQ ID NO: 5174061 - DNA, 25 bp, Homo sapien
aaattgaggaactatcactgtagcc

SEQ ID NO: 5174062 - DNA, 25 bp, Homo sapien
taaccgtagaaattgaggaactatc

SEQ ID NO: 5174063 - DNA, 25 bp, Homo sapien
caattccacaagatgaactgcaaga

SEQ ID NO: 5174064 - DNA, 25 bp, Homo sapien
ccaactagaccaatcgcttaacttg

SEQ ID NO: 5174065 - DNA, 25 bp, Homo sapien
ttaacttgcaatcaaatgggcaggg

SEQ ID NO: 5174066 - DNA, 25 bp, Homo sapien
tccacaagatgaactgcaagacccc

SEQ ID NO: 5174067 - DNA, 25 bp, Homo sapien
gattcttgagatccagtttgggaca

SEQ ID NO: 5174068 - DNA, 25 bp, Homo sapien
ctgattcttgagatccagtttggga

SEQ ID NO: 5174069 - DNA, 25 bp, Homo sapien
attcttgagatccagtttgggacat

SEQ ID NO: 5174070 - DNA, 25 bp, Homo sapien
tgattcttgagatccagtttgggac

SEQ ID NO: 5174071 - DNA, 25 bp, Homo sapien
ttaaatctgaagcatagccatatat

SEQ ID NO: 5174072 - DNA, 25 bp, Homo sapien
taaatctgaagcatagccatatatt

SEQ ID NO: 5174073 - DNA, 25 bp, Homo sapien
aaatctgaagcatagccatatattt

SEQ ID NO: 5174074 - DNA, 25 bp, Homo sapien
attaaatctgaagcatagccatata

SEQ ID NO: 5174075 - DNA, 25 bp, Homo sapien
ggatcagagagtcgggctggttgaa

SEQ ID NO: 5174076 - DNA, 25 bp, Homo sapien
agtcgggctggttgaaaagatgcaa

SEQ ID NO: 5174077 - DNA, 25 bp, Homo sapien
cagagagtcgggctggttgaaaaga

SEQ ID NO: 5174078 - DNA, 25 bp, Homo sapien
ctaggtcaggatcagagagtcgggc

SEQ ID NO: 5174079 - DNA, 25 bp, Homo sapien
tcatggatcggtttgggctgccttc

SEQ ID NO: 5174080 - DNA, 25 bp, Homo sapien
caaagttctacgtccaaagtgagca

SEQ ID NO: 5174081 - DNA, 25 bp, Homo sapien
cctgaatgtgctcaatcatggatcg

SEQ ID NO: 5174082 - DNA, 25 bp, Homo sapien
cagcagtctgccaggaatgatcagg

SEQ ID NO: 5174083 - DNA, 25 bp, Homo sapien
tttcgttgctctggcacaaggtgag

SEQ ID NO: 5174084 - DNA, 25 bp, Homo sapien
ggtgagaagctggaacacaatcagg

SEQ ID NO: 5174085 - DNA, 25 bp, Homo sapien
tagaaacggtggttctgatgagtac

SEQ ID NO: 5174086 - DNA, 25 bp, Homo sapien
tctgtccttttcgttgctctggcac

SEQ ID NO: 5174087 - DNA, 25 bp, Homo sapien
catttcccttgctttgaagtactgt

SEQ ID NO: 5174088 - DNA, 25 bp, Homo sapien
tttcccttgctttgaagtactgtaa

SEQ ID NO: 5174089 - DNA, 25 bp, Homo sapien
ttcccttgctttgaagtactgtaac

SEQ ID NO: 5174090 - DNA, 25 bp, Homo sapien
tcatttcccttgctttgaagtactg

SEQ ID NO: 5174091 - DNA, 25 bp, Homo sapien
ctaacctttaccaccaggcattctt

SEQ ID NO: 5174092 - DNA, 25 bp, Homo sapien
gagctaacctttaccaccaggcatt

SEQ ID NO: 5174093 - DNA, 25 bp, Homo sapien
agctaacctttaccaccaggcattc

SEQ ID NO: 5174094 - DNA, 25 bp, Homo sapien
gctaacctttaccaccaggcattct

SEQ ID NO: 5174095 - DNA, 25 bp, Homo sapien
tgaagatttcaactgaggtattaac

SEQ ID NO: 5174096 - DNA, 25 bp, Homo sapien
catatccagggctaggtacgtttcc

SEQ ID NO: 5174097 - DNA, 25 bp, Homo sapien
tttcaactgaggtattaacagcatc

SEQ ID NO: 5174098 - DNA, 25 bp, Homo sapien
gcatcactttccaaacgacacaaag

SEQ ID NO: 5174099 - DNA, 25 bp, Homo sapien
catggcaagggagcaacctgcctct

SEQ ID NO: 5174100 - DNA, 25 bp, Homo sapien
ccatggcaagggagcaacctgcctc

SEQ ID NO: 5174101 - DNA, 25 bp, Homo sapien
tccatggcaagggagcaacctgcct

SEQ ID NO: 5174102 - DNA, 25 bp, Homo sapien
atccatggcaagggagcaacctgcc

SEQ ID NO: 5174103 - DNA, 25 bp, Homo sapien
cccctgctagtagtcctggtgacaa

SEQ ID NO: 5174104 - DNA, 25 bp, Homo sapien
gctctccatcaccattacgtaaggg

SEQ ID NO: 5174105 - DNA, 25 bp, Homo sapien
tacgtaagggagatcctgtacctcc

SEQ ID NO: 5174106 - DNA, 25 bp, Homo sapien
ggagactcagtattgcccctgctag

SEQ ID NO: 5174107 - DNA, 25 bp, Homo sapien
tgttcacgaagccaattgaaggagc

SEQ ID NO: 5174108 - DNA, 25 bp, Homo sapien
gtcatgtctcatatccattggtgag

SEQ ID NO: 5174109 - DNA, 25 bp, Homo sapien
cattggtgagaacttaagcaattcg

SEQ ID NO: 5174110 - DNA, 25 bp, Homo sapien
gaaggagcttcagtattgtcatgtc

SEQ ID NO: 5174111 - DNA, 25 bp, Homo sapien
ggcatagtagttagtatacctccct

SEQ ID NO: 5174112 - DNA, 25 bp, Homo sapien
ggtataggtatatgtggcatagtag

SEQ ID NO: 5174113 - DNA, 25 bp, Homo sapien
catgacggtctaatttctaatagcc

SEQ ID NO: 5174114 - DNA, 25 bp, Homo sapien
tagtggcagaattctcttcagaaac

SEQ ID NO: 5174115 - DNA, 25 bp, Homo sapien
ggcaccgggtataaagtcttaagca

SEQ ID NO: 5174116 - DNA, 25 bp, Homo sapien
caccgggtataaagtcttaagcaca

SEQ ID NO: 5174117 - DNA, 25 bp, Homo sapien
gcaccgggtataaagtcttaagcac

SEQ ID NO: 5174118 - DNA, 25 bp, Homo sapien
ccaggctatcctccggtttgcaggc

SEQ ID NO: 5174119 - DNA, 25 bp, Homo sapien
ggcccaggctatcctccggtttgca

SEQ ID NO: 5174120 - DNA, 25 bp, Homo sapien
cccaggctatcctccggtttgcagg

SEQ ID NO: 5174121 - DNA, 25 bp, Homo sapien
aggctatcctccggtttgcaggcat

SEQ ID NO: 5174122 - DNA, 25 bp, Homo sapien
tagccattctataggtgtccaggct

SEQ ID NO: 5174123 - DNA, 25 bp, Homo sapien
ctagccattctataggtgtccaggc

SEQ ID NO: 5174124 - DNA, 25 bp, Homo sapien
tcctagccattctataggtgtccag

SEQ ID NO: 5174125 - DNA, 25 bp, Homo sapien
ccattctataggtgtccaggctttc

SEQ ID NO: 5174126 - DNA, 25 bp, Homo sapien
catttgaccacctgattgtatattg

SEQ ID NO: 5174127 - DNA, 25 bp, Homo sapien
ttctttatgctccagttgtctgcac

SEQ ID NO: 5174128 - DNA, 25 bp, Homo sapien
tttggtataaacatttgaccacctg

SEQ ID NO: 5174129 - DNA, 25 bp, Homo sapien
ggtttcttgcttatattctttatgc

SEQ ID NO: 5174130 - DNA, 25 bp, Homo sapien
cccaaaaaagcaagatagatttggc

SEQ ID NO: 5174131 - DNA, 25 bp, Homo sapien
ccaaaaaagcaagatagatttggct

SEQ ID NO: 5174132 - DNA, 25 bp, Homo sapien
caaaaaagcaagatagatttggctt

SEQ ID NO: 5174133 - DNA, 25 bp, Homo sapien
aaaaaagcaagatagatttggcttc

SEQ ID NO: 5174134 - DNA, 25 bp, Homo sapien
gcagggacctcagctcattgttgat

SEQ ID NO: 5174135 - DNA, 25 bp, Homo sapien
gaagaccagtgttctacaacccagg

SEQ ID NO: 5174136 - DNA, 25 bp, Homo sapien
tgattttcctagattgtgttcctcc

SEQ ID NO: 5174137 - DNA, 25 bp, Homo sapien
caacccaggaatactgattgcactc

SEQ ID NO: 5174138 - DNA, 25 bp, Homo sapien
tgtgggcatttgctccaaagtcccc

SEQ ID NO: 5174139 - DNA, 25 bp, Homo sapien
ttcaccatccgcagtattcacacat

SEQ ID NO: 5174140 - DNA, 25 bp, Homo sapien
tgacacactcattgggacacataag

SEQ ID NO: 5174141 - DNA, 25 bp, Homo sapien
gttgcacaggttgctatccactgct

SEQ ID NO: 5174142 - DNA, 25 bp, Homo sapien
cagaaaaccggcatgcatttctctt

SEQ ID NO: 5174143 - DNA, 25 bp, Homo sapien
tcagaaaaccggcatgcatttctct

SEQ ID NO: 5174144 - DNA, 25 bp, Homo sapien
agaaaaccggcatgcatttctcttt

SEQ ID NO: 5174145 - DNA, 25 bp, Homo sapien
attcctttagggcatgttggatcat

SEQ ID NO: 5174146 - DNA, 25 bp, Homo sapien
atcaccctgcctcttactttcttta

SEQ ID NO: 5174147 - DNA, 25 bp, Homo sapien
tctttgcatcgccattctgtttctt

SEQ ID NO: 5174148 - DNA, 25 bp, Homo sapien
tttgcatcgccattctgtttcttca

SEQ ID NO: 5174149 - DNA, 25 bp, Homo sapien
gcaggtggcgagttcttctctgcat

SEQ ID NO: 5174150 - DNA, 25 bp, Homo sapien
acctgtgagtcttcagcacaagtcc

SEQ ID NO: 5174151 - DNA, 25 bp, Homo sapien
tagattgtactggaactggaagcaa

SEQ ID NO: 5174152 - DNA, 25 bp, Homo sapien
cagtgatggtcttagcaggtggcga

SEQ ID NO: 5174153 - DNA, 25 bp, Homo sapien
ctacaggcataggatcacccacact

SEQ ID NO: 5174154 - DNA, 25 bp, Homo sapien
tcacccacactgagtttcaaaatta

SEQ ID NO: 5174155 - DNA, 25 bp, Homo sapien
ggcataggatcacccacactgagtt

SEQ ID NO: 5174156 - DNA, 25 bp, Homo sapien
cataggatcacccacactgagtttc

SEQ ID NO: 5174157 - DNA, 25 bp, Homo sapien
acacacagcttagcaggcgggtcct

SEQ ID NO: 5174158 - DNA, 25 bp, Homo sapien
ggtcctgacgccttgaccacagggt

SEQ ID NO: 5174159 - DNA, 25 bp, Homo sapien
gccttgaccacagggtgcgttttca

SEQ ID NO: 5174160 - DNA, 25 bp, Homo sapien
accacagggtgcgttttcactcagc

SEQ ID NO: 5174161 - DNA, 25 bp, Homo sapien
aagccgtccaccctgagagctgaca

SEQ ID NO: 5174162 - DNA, 25 bp, Homo sapien
agttgaccacgcattccaccaagca

SEQ ID NO: 5174163 - DNA, 25 bp, Homo sapien
caggtctgtgaacactctgtccaag

SEQ ID NO: 5174164 - DNA, 25 bp, Homo sapien
ccaccaagcagggaatgctcattct

SEQ ID NO: 5174165 - DNA, 25 bp, Homo sapien
gaatgttgccttatacatgtaagtc

SEQ ID NO: 5174166 - DNA, 25 bp, Homo sapien
cacagagacacaggctatctaggtt

SEQ ID NO: 5174167 - DNA, 25 bp, Homo sapien
ctaaaatgataagggaggtgtcagc

SEQ ID NO: 5174168 - DNA, 25 bp, Homo sapien
gaactctgtcctatctcacttttag

SEQ ID NO: 5174169 - DNA, 25 bp, Homo sapien
tccaatttacatgcagaccagttgc

SEQ ID NO: 5174170 - DNA, 25 bp, Homo sapien
ccttctccttgggttggcataatga

SEQ ID NO: 5174171 - DNA, 25 bp, Homo sapien
tctgtggggcatggccgtccttctc

SEQ ID NO: 5174172 - DNA, 25 bp, Homo sapien
gcataatgataaatcgagtccggct

SEQ ID NO: 5174173 - DNA, 25 bp, Homo sapien
atcctcgacacgtccagctgcatga

SEQ ID NO: 5174174 - DNA, 25 bp, Homo sapien
caggatgctgtcctgaaagggcatt

SEQ ID NO: 5174175 - DNA, 25 bp, Homo sapien
gaaccactgtggaccatgcaggaaa

SEQ ID NO: 5174176 - DNA, 25 bp, Homo sapien
ggaaaggctgcggatctgaactcct

SEQ ID NO: 5174177 - DNA, 25 bp, Homo sapien
tgtacaagggcgtgtttctagaacc

SEQ ID NO: 5174178 - DNA, 25 bp, Homo sapien
ggttaattcacatgtgctccactct

SEQ ID NO: 5174179 - DNA, 25 bp, Homo sapien
gtccttgatctagactggcggccca

SEQ ID NO: 5174180 - DNA, 25 bp, Homo sapien
cttccatcaatgcaggttaattcac

SEQ ID NO: 5174181 - DNA, 25 bp, Homo sapien
cagttcgttcgttattgttccaaag

SEQ ID NO: 5174182 - DNA, 25 bp, Homo sapien
ctgtgacattaacgccatctgaacg

SEQ ID NO: 5174183 - DNA, 25 bp, Homo sapien
gctggcaccatacagttcgttcgtt

SEQ ID NO: 5174184 - DNA, 25 bp, Homo sapien
catctgaacgctggcaccatacagt

SEQ ID NO: 5174185 - DNA, 25 bp, Homo sapien
aatgcactgccgaatggcagcagga

SEQ ID NO: 5174186 - DNA, 25 bp, Homo sapien
tggaatgcactgccgaatggcagca

SEQ ID NO: 5174187 - DNA, 25 bp, Homo sapien
gaatgcactgccgaatggcagcagg

SEQ ID NO: 5174188 - DNA, 25 bp, Homo sapien
tgcactgccgaatggcagcaggacg

SEQ ID NO: 5174189 - DNA, 25 bp, Homo sapien
ggtactttcatgcagtaatccagga

SEQ ID NO: 5174190 - DNA, 25 bp, Homo sapien
cagcttttttatcctctgagcctgg

SEQ ID NO: 5174191 - DNA, 25 bp, Homo sapien
tatctctgtatagcccttctcacaa

SEQ ID NO: 5174192 - DNA, 25 bp, Homo sapien
gatcaagtggttgaagagaccatcc

SEQ ID NO: 5174193 - DNA, 25 bp, Homo sapien
catcccaaaggaattgcatttattt

SEQ ID NO: 5174194 - DNA, 25 bp, Homo sapien
gcatcccaaaggaattgcatttatt

SEQ ID NO: 5174195 - DNA, 25 bp, Homo sapien
cagcatcccaaaggaattgcattta

SEQ ID NO: 5174196 - DNA, 25 bp, Homo sapien
tcagcatcccaaaggaattgcattt

SEQ ID NO: 5174197 - DNA, 25 bp, Homo sapien
cacctgaaacgccataaacccaaat

SEQ ID NO: 5174198 - DNA, 25 bp, Homo sapien
gagaaaagcgccacctgaaacgcca

SEQ ID NO: 5174199 - DNA, 25 bp, Homo sapien
gatcaagtttactcaagtctgtggg

SEQ ID NO: 5174200 - DNA, 25 bp, Homo sapien
gcggttaaggcagttgatgtctaca

SEQ ID NO: 5174201 - DNA, 25 bp, Homo sapien
taagtctccatcgtaggctaaggtc

SEQ ID NO: 5174202 - DNA, 25 bp, Homo sapien
tctgagagctacaaaagagaaagcg

SEQ ID NO: 5174203 - DNA, 25 bp, Homo sapien
ttttcagtagctgcaacccatgaag

SEQ ID NO: 5174204 - DNA, 25 bp, Homo sapien
gctttcatctagtccagcaattaca

SEQ ID NO: 5174205 - DNA, 25 bp, Homo sapien
ctagctttcatctagtccagcaatt

SEQ ID NO: 5174206 - DNA, 25 bp, Homo sapien
agctgcaacccatgaagcgccatca

SEQ ID NO: 5174207 - DNA, 25 bp, Homo sapien
caagactttgtacaaacaggatcgg

SEQ ID NO: 5174208 - DNA, 25 bp, Homo sapien
gtggttaatgctatatctacatgga

SEQ ID NO: 5174209 - DNA, 25 bp, Homo sapien
tacaagtcaataccacaagatggca

SEQ ID NO: 5174210 - DNA, 25 bp, Homo sapien
caggatcggtgtttgatgtatatta

SEQ ID NO: 5174211 - DNA, 25 bp, Homo sapien
tggtctgtggttctgggaaaagccc

SEQ ID NO: 5174212 - DNA, 25 bp, Homo sapien
catactcagtatctaccaaaggtga

SEQ ID NO: 5174213 - DNA, 25 bp, Homo sapien
tggagcagcctgagtaagtacttca

SEQ ID NO: 5174214 - DNA, 25 bp, Homo sapien
tgagaatggaaacccctgttgtgca

SEQ ID NO: 5174215 - DNA, 25 bp, Homo sapien
tgtccttgactaaccagccagtata

SEQ ID NO: 5174216 - DNA, 25 bp, Homo sapien
gtctcagtctttgttgttaccagtt

SEQ ID NO: 5174217 - DNA, 25 bp, Homo sapien
gccagtatatagcactggctgtaag

SEQ ID NO: 5174218 - DNA, 25 bp, Homo sapien
tgatgtcggtctttaccattggcca

SEQ ID NO: 5174219 - DNA, 25 bp, Homo sapien
gaagagaggaaagaatagagcaagg

SEQ ID NO: 5174220 - DNA, 25 bp, Homo sapien
tcgtgctcatgttttcccagctttt

SEQ ID NO: 5174221 - DNA, 25 bp, Homo sapien
tatgtgtttgctctgtggtagcttc

SEQ ID NO: 5174222 - DNA, 25 bp, Homo sapien
tttgaacaaatgctattctgtagtc

SEQ ID NO: 5174223 - DNA, 25 bp, Homo sapien
gcccaacataacttgtcggctgcta

SEQ ID NO: 5174224 - DNA, 25 bp, Homo sapien
aactttgcttaatgggcttgaccac

SEQ ID NO: 5174225 - DNA, 25 bp, Homo sapien
taactttgcttaatgggcttgacca

SEQ ID NO: 5174226 - DNA, 25 bp, Homo sapien
tttctttcccacctaatagatgcat

SEQ ID NO: 5174227 - DNA, 25 bp, Homo sapien
ccagactagctcttctaaatttctt

SEQ ID NO: 5174228 - DNA, 25 bp, Homo sapien
atttcttagcactgctaatggtact

SEQ ID NO: 5174229 - DNA, 25 bp, Homo sapien
tcttagcactgctaatggtactggc

SEQ ID NO: 5174230 - DNA, 25 bp, Homo sapien
gcactgctaatggtactggcacatt

SEQ ID NO: 5174231 - DNA, 25 bp, Homo sapien
gaaaattggtgtcaatgcatctccc

SEQ ID NO: 5174232 - DNA, 25 bp, Homo sapien
aatgagtacagtgaagaccggaaaa

SEQ ID NO: 5174233 - DNA, 25 bp, Homo sapien
agtacagtgaagaccggaaaattgg

SEQ ID NO: 5174234 - DNA, 25 bp, Homo sapien
gaagaccggaaaattggtgtcaatg

SEQ ID NO: 5174235 - DNA, 25 bp, Homo sapien
cagtccaaggtaagggcttccaaat

SEQ ID NO: 5174236 - DNA, 25 bp, Homo sapien
gccaatcccaggtaagatgaccagt

SEQ ID NO: 5174237 - DNA, 25 bp, Homo sapien
ttcaatttaactggccaatcccagg

SEQ ID NO: 5174238 - DNA, 25 bp, Homo sapien
gatccagggtaattggccagtccaa

SEQ ID NO: 5174239 - DNA, 25 bp, Homo sapien
tctagcagaccagcttgccttgctg

SEQ ID NO: 5174240 - DNA, 25 bp, Homo sapien
ggcgtttgacccagaggttcctcat

SEQ ID NO: 5174241 - DNA, 25 bp, Homo sapien
ccttgctgcaagacaacttgtctgg

SEQ ID NO: 5174242 - DNA, 25 bp, Homo sapien
tgtagggttgtagggcactggctct

SEQ ID NO: 5174243 - DNA, 25 bp, Homo sapien
tcagagcccataaatgtccattcat

SEQ ID NO: 5174244 - DNA, 25 bp, Homo sapien
gcagtcagagcccataaatgtccat

SEQ ID NO: 5174245 - DNA, 25 bp, Homo sapien
gctcctaatggcttgactggatgca

SEQ ID NO: 5174246 - DNA, 25 bp, Homo sapien
cgagctcctaatggcttgactggat

SEQ ID NO: 5174247 - DNA, 25 bp, Homo sapien
ggtttgtctgtatgagctaaatcca

SEQ ID NO: 5174248 - DNA, 25 bp, Homo sapien
taaggaattaattggttcaactcca

SEQ ID NO: 5174249 - DNA, 25 bp, Homo sapien
aatccataactggtttgggctgtag

SEQ ID NO: 5174250 - DNA, 25 bp, Homo sapien
catgtatttagtcagaatgaggccc

SEQ ID NO: 5174251 - DNA, 25 bp, Homo sapien
gtgacaggtgttggactaaaaccag

SEQ ID NO: 5174252 - DNA, 25 bp, Homo sapien
gcggtgacaggtgttggactaaaac

SEQ ID NO: 5174253 - DNA, 25 bp, Homo sapien
gagcggtgacaggtgttggactaaa

SEQ ID NO: 5174254 - DNA, 25 bp, Homo sapien
agcactcaaaggcagtgggtggaca

SEQ ID NO: 5174255 - DNA, 25 bp, Homo sapien
caatatcaggtatttctgaagatat

SEQ ID NO: 5174256 - DNA, 25 bp, Homo sapien
gacttctaaaacagtctttactctg

SEQ ID NO: 5174257 - DNA, 25 bp, Homo sapien
tcagctgatggatgatatctgggcc

SEQ ID NO: 5174258 - DNA, 25 bp, Homo sapien
gaagatgtgaatgttgcccatggcc

SEQ ID NO: 5174259 - DNA, 25 bp, Homo sapien
ggaacaactggctggtccctggaac

SEQ ID NO: 5174260 - DNA, 25 bp, Homo sapien
cctggaactccctgtgtgactggtg

SEQ ID NO: 5174261 - DNA, 25 bp, Homo sapien
ccctgtgtgactggtgattgcccac

SEQ ID NO: 5174262 - DNA, 25 bp, Homo sapien
actccctgtgtgactggtgattgcc

SEQ ID NO: 5174263 - DNA, 25 bp, Homo sapien
gaacctctgaatcaaatgtcagcct

SEQ ID NO: 5174264 - DNA, 25 bp, Homo sapien
tgtagctggatatactgaaggaatg

SEQ ID NO: 5174265 - DNA, 25 bp, Homo sapien
aaatgtcagcctgttttcattgttc

SEQ ID NO: 5174266 - DNA, 25 bp, Homo sapien
tgattagctgtagctggatatactg

SEQ ID NO: 5174267 - DNA, 25 bp, Homo sapien
tgcccttagctcctaataaagacag

SEQ ID NO: 5174268 - DNA, 25 bp, Homo sapien
gacaagaacactaacactccgctga

SEQ ID NO: 5174269 - DNA, 25 bp, Homo sapien
ctggctgtcctaagggtgggagttg

SEQ ID NO: 5174270 - DNA, 25 bp, Homo sapien
gccagagtgtcatagagttatccca

SEQ ID NO: 5174271 - DNA, 25 bp, Homo sapien
ttggttgatggctactagaacaaac

SEQ ID NO: 5174272 - DNA, 25 bp, Homo sapien
tattttggttgatggctactagaac

SEQ ID NO: 5174273 - DNA, 25 bp, Homo sapien
ctttttggcatcaaacactgtgtct

SEQ ID NO: 5174274 - DNA, 25 bp, Homo sapien
ttttggcatcaaacactgtgtcttt

SEQ ID NO: 5174275 - DNA, 25 bp, Homo sapien
gtaggagcaggtgttaccaaagttc

SEQ ID NO: 5174276 - DNA, 25 bp, Homo sapien
cctgtaggagcaggtgttaccaaag

SEQ ID NO: 5174277 - DNA, 25 bp, Homo sapien
ctgtaggagcaggtgttaccaaagt

SEQ ID NO: 5174278 - DNA, 25 bp, Homo sapien
taggagcaggtgttaccaaagttct

SEQ ID NO: 5174279 - DNA, 25 bp, Homo sapien
ctgtgctttctacgggattgttttg

SEQ ID NO: 5174280 - DNA, 25 bp, Homo sapien
ctctgtgctttctacgggattgttt

SEQ ID NO: 5174281 - DNA, 25 bp, Homo sapien
tgctttctacgggattgttttgggc

SEQ ID NO: 5174282 - DNA, 25 bp, Homo sapien
gcctctgtgctttctacgggattgt

SEQ ID NO: 5174283 - DNA, 25 bp, Homo sapien
aagtgggaaagtgactgttcgaagt

SEQ ID NO: 5174284 - DNA, 25 bp, Homo sapien
cacaagtaagttccaagtgggaaag

SEQ ID NO: 5174285 - DNA, 25 bp, Homo sapien
gtgactgttcgaagtggcaaacacc

SEQ ID NO: 5174286 - DNA, 25 bp, Homo sapien
aagccacaagtaagttccaagtggg

SEQ ID NO: 5174287 - DNA, 25 bp, Homo sapien
ttgtagagctcattactgagtcaat

SEQ ID NO: 5174288 - DNA, 25 bp, Homo sapien
tgaacgggactttgcactgatactt

SEQ ID NO: 5174289 - DNA, 25 bp, Homo sapien
cactgatactttaacccctatacgg

SEQ ID NO: 5174290 - DNA, 25 bp, Homo sapien
aaaaaatgctaagcttgttttgaat

SEQ ID NO: 5174291 - DNA, 25 bp, Homo sapien
catatttcccgtggtcagaaaacaa

SEQ ID NO: 5174292 - DNA, 25 bp, Homo sapien
agattcaacatatttcccgtggtca

SEQ ID NO: 5174293 - DNA, 25 bp, Homo sapien
tgttccgtggaatggttgagaaacc

SEQ ID NO: 5174294 - DNA, 25 bp, Homo sapien
gagaaacctccggaaagattcaaca

SEQ ID NO: 5174295 - DNA, 25 bp, Homo sapien
tcaaagcaaacgtggaaccaaagca

SEQ ID NO: 5174296 - DNA, 25 bp, Homo sapien
cccacttcagcgtctggagtagcat

SEQ ID NO: 5174297 - DNA, 25 bp, Homo sapien
tgaaccaacacatctggccagtatt

SEQ ID NO: 5174298 - DNA, 25 bp, Homo sapien
gaagcctcgatctctcggacttaag

SEQ ID NO: 5174299 - DNA, 25 bp, Homo sapien
tgcatgccgccttgttcagctaact

SEQ ID NO: 5174300 - DNA, 25 bp, Homo sapien
tgagaattttgagtagcatttgatt

SEQ ID NO: 5174301 - DNA, 25 bp, Homo sapien
agaattttgagtagcatttgattta

SEQ ID NO: 5174302 - DNA, 25 bp, Homo sapien
gagaattttgagtagcatttgattt

SEQ ID NO: 5174303 - DNA, 25 bp, Homo sapien
ctgaaggatctgaatctcaattgaa

SEQ ID NO: 5174304 - DNA, 25 bp, Homo sapien
aaaaggaaccatttcacagctcagt

SEQ ID NO: 5174305 - DNA, 25 bp, Homo sapien
tagcccagggagtacccataaaatg

SEQ ID NO: 5174306 - DNA, 25 bp, Homo sapien
tcagaatactagacgtaagaagatt

SEQ ID NO: 5174307 - DNA, 25 bp, Homo sapien
cgcctatgcttagaatcttaatttc

SEQ ID NO: 5174308 - DNA, 25 bp, Homo sapien
ctgcacctccgcctatgcttagaat

SEQ ID NO: 5174309 - DNA, 25 bp, Homo sapien
cacctccgcctatgcttagaatctt

SEQ ID NO: 5174310 - DNA, 25 bp, Homo sapien
cctccgcctatgcttagaatcttaa

SEQ ID NO: 5174311 - DNA, 25 bp, Homo sapien
cagatgctactgcaacctaggtctc

SEQ ID NO: 5174312 - DNA, 25 bp, Homo sapien
gttacacttgagaactgggtcacac

SEQ ID NO: 5174313 - DNA, 25 bp, Homo sapien
ggtgcaatgacagaaggccactatt

SEQ ID NO: 5174314 - DNA, 25 bp, Homo sapien
tggactaaagtcaagagatctgggt

SEQ ID NO: 5174315 - DNA, 25 bp, Homo sapien
gcttgtctttctgacgggtgctaca

SEQ ID NO: 5174316 - DNA, 25 bp, Homo sapien
tggcaactcagaagagcgctcatca

SEQ ID NO: 5174317 - DNA, 25 bp, Homo sapien
gaattccgcttgagaaccctggagc

SEQ ID NO: 5174318 - DNA, 25 bp, Homo sapien
tttctaaacgggcagctccaaatgg

SEQ ID NO: 5174319 - DNA, 25 bp, Homo sapien
tagtaattactcaagaaagtgaagt

SEQ ID NO: 5174320 - DNA, 25 bp, Homo sapien
gctgcggtgtgaagactttgcaatt

SEQ ID NO: 5174321 - DNA, 25 bp, Homo sapien
ccattggagacgtagcagtgaataa

SEQ ID NO: 5174322 - DNA, 25 bp, Homo sapien
tacggatggtgggaagtcccacgga

SEQ ID NO: 5174323 - DNA, 25 bp, Homo sapien
aagggcatgtaattgagatctctga

SEQ ID NO: 5174324 - DNA, 25 bp, Homo sapien
taataagatagcagaggaatgttgc

SEQ ID NO: 5174325 - DNA, 25 bp, Homo sapien
gcatcacacttacattcaatgaagg

SEQ ID NO: 5174326 - DNA, 25 bp, Homo sapien
cctgctttcacacaagctgtatgtt

SEQ ID NO: 5174327 - DNA, 25 bp, Homo sapien
acaaaaagatgtatataatcctctt

SEQ ID NO: 5174328 - DNA, 25 bp, Homo sapien
caaaaagatgtatataatcctcttg

SEQ ID NO: 5174329 - DNA, 25 bp, Homo sapien
aaaaagatgtatataatcctcttgc

SEQ ID NO: 5174330 - DNA, 25 bp, Homo sapien
ccacgtccggccaacaaaaagatgt

SEQ ID NO: 5174331 - DNA, 25 bp, Homo sapien
cagcatataaactgataagtaaaag

SEQ ID NO: 5174332 - DNA, 25 bp, Homo sapien
actatctgaacggagccaatatgaa

SEQ ID NO: 5174333 - DNA, 25 bp, Homo sapien
catgctgtgtgatttcaactagatg

SEQ ID NO: 5174334 - DNA, 25 bp, Homo sapien
aacaaagaatctgtggtacatgcag

SEQ ID NO: 5174335 - DNA, 25 bp, Homo sapien
tcttctttctctccgtgggtcacac

SEQ ID NO: 5174336 - DNA, 25 bp, Homo sapien
ggttgctggtgaagtattcacaagc

SEQ ID NO: 5174337 - DNA, 25 bp, Homo sapien
ggtcacaccaacctcctagtcagtt

SEQ ID NO: 5174338 - DNA, 25 bp, Homo sapien
ggcctccaaacgctgctgtttctag

SEQ ID NO: 5174339 - DNA, 25 bp, Homo sapien
aacagaacctgtttaacacagtgcc

SEQ ID NO: 5174340 - DNA, 25 bp, Homo sapien
tatttatctgattcgctgctgtgcc

SEQ ID NO: 5174341 - DNA, 25 bp, Homo sapien
ttctgaccttgaggggcaccagcct

SEQ ID NO: 5174342 - DNA, 25 bp, Homo sapien
cagtgcctcacttgcggggaaccca

SEQ ID NO: 5174343 - DNA, 25 bp, Homo sapien
tcttccacttggttgattcatcagt

SEQ ID NO: 5174344 - DNA, 25 bp, Homo sapien
gtttttcagctccaacatgttgttt

SEQ ID NO: 5174345 - DNA, 25 bp, Homo sapien
acatgttgtttatgctcctctctaa

SEQ ID NO: 5174346 - DNA, 25 bp, Homo sapien
cccgacggagaaaggttgaaatcat

SEQ ID NO: 5174347 - DNA, 25 bp, Homo sapien
gttggcagtcttgctagattgagga

SEQ ID NO: 5174348 - DNA, 25 bp, Homo sapien
ctttggctgcccttaacaattttct

SEQ ID NO: 5174349 - DNA, 25 bp, Homo sapien
tgtggagtatcttaatgatgttctc

SEQ ID NO: 5174350 - DNA, 25 bp, Homo sapien
ctcagtttgcatgttggcagtcttg

SEQ ID NO: 5174351 - DNA, 25 bp, Homo sapien
tatttctggtaggactcagctgtga

SEQ ID NO: 5174352 - DNA, 25 bp, Homo sapien
atttctggtaggactcagctgtgaa

SEQ ID NO: 5174353 - DNA, 25 bp, Homo sapien
ttgtatttctggtaggactcagctg

SEQ ID NO: 5174354 - DNA, 25 bp, Homo sapien
gtatttctggtaggactcagctgtg

SEQ ID NO: 5174355 - DNA, 25 bp, Homo sapien
gcctgaactttggagagaatttgaa

SEQ ID NO: 5174356 - DNA, 25 bp, Homo sapien
ttggcaatttgttcagcacttggct

SEQ ID NO: 5174357 - DNA, 25 bp, Homo sapien
cctgggtattgagcctgaactttgg

SEQ ID NO: 5174358 - DNA, 25 bp, Homo sapien
cattgttgatacaaactcctgggta

SEQ ID NO: 5174359 - DNA, 25 bp, Homo sapien
tattcagatgatgtctccttatgcc

SEQ ID NO: 5174360 - DNA, 25 bp, Homo sapien
gccaagcaaactttacgttctcgag

SEQ ID NO: 5174361 - DNA, 25 bp, Homo sapien
tgaatcatatgaataaagtcccact

SEQ ID NO: 5174362 - DNA, 25 bp, Homo sapien
caacattctactttggtattcagat

SEQ ID NO: 5174363 - DNA, 25 bp, Homo sapien
cgcgggtgtcgagggacaacctccg

SEQ ID NO: 5174364 - DNA, 25 bp, Homo sapien
cggaggttgtccctcgacacccgcg

SEQ ID NO: 5174365 - DNA, 25 bp, Homo sapien
cacaacaataatgagcatcttagca

SEQ ID NO: 5174366 - DNA, 25 bp, Homo sapien
acaataatgagcatcttagcattgg

SEQ ID NO: 5174367 - DNA, 25 bp, Homo sapien
cctaagagactatggaagaatttca

SEQ ID NO: 5174368 - DNA, 25 bp, Homo sapien
agcattggtacctaagagactatgg

SEQ ID NO: 5174369 - DNA, 25 bp, Homo sapien
ttttaactagggtggtcgcagagtc

SEQ ID NO: 5174370 - DNA, 25 bp, Homo sapien
ccaggaagccagtgaaattggagct

SEQ ID NO: 5174371 - DNA, 25 bp, Homo sapien
tgagcagagacctgacagcaagaca

SEQ ID NO: 5174372 - DNA, 25 bp, Homo sapien
tgaatacaggatgatacttggccca

SEQ ID NO: 5174373 - DNA, 25 bp, Homo sapien
tgatccgtactttttccacagcttg

SEQ ID NO: 5174374 - DNA, 25 bp, Homo sapien
cattaaagttgcaggtttcagtcaa

SEQ ID NO: 5174375 - DNA, 25 bp, Homo sapien
tacttaagccctaggttgtccagca

SEQ ID NO: 5174376 - DNA, 25 bp, Homo sapien
tccatggtggacaaaaggtcatagc

SEQ ID NO: 5174377 - DNA, 25 bp, Homo sapien
aatgagtgattcgagttgttcaaaa

SEQ ID NO: 5174378 - DNA, 25 bp, Homo sapien
tatgttatgttgagcctgcttgtgg

SEQ ID NO: 5174379 - DNA, 25 bp, Homo sapien
gggacaggataagaccagcagtatc

SEQ ID NO: 5174380 - DNA, 25 bp, Homo sapien
tccaaatggaagtccaataatgtat

SEQ ID NO: 5174381 - DNA, 25 bp, Homo sapien
tttcttcacaaaacggccaaatcag

SEQ ID NO: 5174382 - DNA, 25 bp, Homo sapien
gccaaatcagtaacacaggctttgt

SEQ ID NO: 5174383 - DNA, 25 bp, Homo sapien
ttaatattctaaaggtgcttactct

SEQ ID NO: 5174384 - DNA, 25 bp, Homo sapien
gcacaatagaagaacgtacaaagat

SEQ ID NO: 5174385 - DNA, 25 bp, Homo sapien
ggctcatgagctgtttagtaaaacc

SEQ ID NO: 5174386 - DNA, 25 bp, Homo sapien
ggttgaaggcttcctcactggcaga

SEQ ID NO: 5174387 - DNA, 25 bp, Homo sapien
tatacggcaacattacatggaagcc

SEQ ID NO: 5174388 - DNA, 25 bp, Homo sapien
gaagccctattgcatgaaagagtga

SEQ ID NO: 5174389 - DNA, 25 bp, Homo sapien
aaaagttagtatgtgactgtcccaa

SEQ ID NO: 5174390 - DNA, 25 bp, Homo sapien
gctgactagtaggttttcatgggaa

SEQ ID NO: 5174391 - DNA, 25 bp, Homo sapien
ccatgttaaacactgagagatccac

SEQ ID NO: 5174392 - DNA, 25 bp, Homo sapien
tgcacgtgtgctttatacaaaagac

SEQ ID NO: 5174393 - DNA, 25 bp, Homo sapien
agtattatgtgccagctattctcat

SEQ ID NO: 5174394 - DNA, 25 bp, Homo sapien
ccactgtgggacttcgcaagaagcc

SEQ ID NO: 5174395 - DNA, 25 bp, Homo sapien
gaagtaacattctgatgaggtgaca

SEQ ID NO: 5174396 - DNA, 25 bp, Homo sapien
gttccacagacttaagatctagtat

SEQ ID NO: 5174397 - DNA, 25 bp, Homo sapien
tcaaagagagcttccctgatcactc

SEQ ID NO: 5174398 - DNA, 25 bp, Homo sapien
taaagcttatttccacatcagggcc

SEQ ID NO: 5174399 - DNA, 25 bp, Homo sapien
gcccacagtggcaactctagacttg

SEQ ID NO: 5174400 - DNA, 25 bp, Homo sapien
ttcagctcagctactatagaaagcc

SEQ ID NO: 5174401 - DNA, 25 bp, Homo sapien
cctgtctaagagttaaacacctgga

SEQ ID NO: 5174402 - DNA, 25 bp, Homo sapien
atgaaagaccttcctgtctaagagt

SEQ ID NO: 5174403 - DNA, 25 bp, Homo sapien
gaccttcctgtctaagagttaaaca

SEQ ID NO: 5174404 - DNA, 25 bp, Homo sapien
gaataacctttgagccatgattttt

SEQ ID NO: 5174405 - DNA, 25 bp, Homo sapien
tgttaagcaaagaaggatgcgagtc

SEQ ID NO: 5174406 - DNA, 25 bp, Homo sapien
gactcgtcggtctcttgaattgttt

SEQ ID NO: 5174407 - DNA, 25 bp, Homo sapien
gaaggatgcgagtctgactcagcaa

SEQ ID NO: 5174408 - DNA, 25 bp, Homo sapien
gactcagcaatagttaacttgcaac

SEQ ID NO: 5174409 - DNA, 25 bp, Homo sapien
cactgcaaatcctgatcttagatga

SEQ ID NO: 5174410 - DNA, 25 bp, Homo sapien
gcaaatcctgatcttagatgatatt

SEQ ID NO: 5174411 - DNA, 25 bp, Homo sapien
ctgcaaatcctgatcttagatgata

SEQ ID NO: 5174412 - DNA, 25 bp, Homo sapien
aaatcctgatcttagatgatatttc

SEQ ID NO: 5174413 - DNA, 25 bp, Homo sapien
cgcctgacgctgtacataagcctga

SEQ ID NO: 5174414 - DNA, 25 bp, Homo sapien
ttcatcctctgctgagcgcctgacg

SEQ ID NO: 5174415 - DNA, 25 bp, Homo sapien
gaaaggcgccccaggaattatcact

SEQ ID NO: 5174416 - DNA, 25 bp, Homo sapien
taagcctgaactttcccatcagcat

SEQ ID NO: 5174417 - DNA, 25 bp, Homo sapien
ttgccccttagccttctgaagtcct

SEQ ID NO: 5174418 - DNA, 25 bp, Homo sapien
cctcttttgccccttagccttctga

SEQ ID NO: 5174419 - DNA, 25 bp, Homo sapien
tagccttctgaagtcctctccttac

SEQ ID NO: 5174420 - DNA, 25 bp, Homo sapien
ttagccttctgaagtcctctcctta

SEQ ID NO: 5174421 - DNA, 25 bp, Homo sapien
tatttatagtgacaaccccaagcaa

SEQ ID NO: 5174422 - DNA, 25 bp, Homo sapien
gggctgcacctcgataaaacagggt

SEQ ID NO: 5174423 - DNA, 25 bp, Homo sapien
tgatcacaaaccaacacttaggagt

SEQ ID NO: 5174424 - DNA, 25 bp, Homo sapien
gagagtacacacatgaaaagcccta

SEQ ID NO: 5174425 - DNA, 25 bp, Homo sapien
cactatgtagcactgtgattggcac

SEQ ID NO: 5174426 - DNA, 25 bp, Homo sapien
aaatcatcccgtaattggtgcttgc

SEQ ID NO: 5174427 - DNA, 25 bp, Homo sapien
tgcttgtccttatcagaacaggtca

SEQ ID NO: 5174428 - DNA, 25 bp, Homo sapien
gaatcctagcaaccaatgacatcat

SEQ ID NO: 5174429 - DNA, 25 bp, Homo sapien
gtagtcagttgtcaagtcctgccag

SEQ ID NO: 5174430 - DNA, 25 bp, Homo sapien
tagtcagttgtcaagtcctgccagt

SEQ ID NO: 5174431 - DNA, 25 bp, Homo sapien
agtcctgccagttctctctgctatg

SEQ ID NO: 5174432 - DNA, 25 bp, Homo sapien
cctgccagttctctctgctatgcat

SEQ ID NO: 5174433 - DNA, 25 bp, Homo sapien
cttcaccaatttgcccaagtcagtt

SEQ ID NO: 5174434 - DNA, 25 bp, Homo sapien
ttatgtcaccactaaatcctcctca

SEQ ID NO: 5174435 - DNA, 25 bp, Homo sapien
tatgtcaccactaaatcctcctcac

SEQ ID NO: 5174436 - DNA, 25 bp, Homo sapien
gcttgtaggtgtcctgcctcaatgc

SEQ ID NO: 5174437 - DNA, 25 bp, Homo sapien
ttattcctgtatggatccagatggt

SEQ ID NO: 5174438 - DNA, 25 bp, Homo sapien
gtgccaccagtgttctagatgattt

SEQ ID NO: 5174439 - DNA, 25 bp, Homo sapien
gaagatgcaccaccataggtgccac

SEQ ID NO: 5174440 - DNA, 25 bp, Homo sapien
cataggtgccaccagtgttctagat

SEQ ID NO: 5174441 - DNA, 25 bp, Homo sapien
tgcaccaccataggtgccaccagtg

SEQ ID NO: 5174442 - DNA, 25 bp, Homo sapien
ttcctgctgtttagcaggggtaatt

SEQ ID NO: 5174443 - DNA, 25 bp, Homo sapien
cctgctgtttagcaggggtaattaa

SEQ ID NO: 5174444 - DNA, 25 bp, Homo sapien
tcctgctgtttagcaggggtaatta

SEQ ID NO: 5174445 - DNA, 25 bp, Homo sapien
agatactgcactgcagtcagttcag

SEQ ID NO: 5174446 - DNA, 25 bp, Homo sapien
ggcgtgctttcttcagatactgcac

SEQ ID NO: 5174447 - DNA, 25 bp, Homo sapien
ataatgatggctggcgtgctttctt

SEQ ID NO: 5174448 - DNA, 25 bp, Homo sapien
atactgcactgcagtcagttcagcc

SEQ ID NO: 5174449 - DNA, 25 bp, Homo sapien
cattgcagctagatacaggctcttc

SEQ ID NO: 5174450 - DNA, 25 bp, Homo sapien
gcattgcagctagatacaggctctt

SEQ ID NO: 5174451 - DNA, 25 bp, Homo sapien
ggcattgcagctagatacaggctct

SEQ ID NO: 5174452 - DNA, 25 bp, Homo sapien
ctggcattgcagctagatacaggct

SEQ ID NO: 5174453 - DNA, 25 bp, Homo sapien
ggcctggaggattggcccagagcct

SEQ ID NO: 5174454 - DNA, 25 bp, Homo sapien
gtacagagtcggagattccagttgc

SEQ ID NO: 5174455 - DNA, 25 bp, Homo sapien
aagtacagagtcggagattccagtt

SEQ ID NO: 5174456 - DNA, 25 bp, Homo sapien
tacagagtcggagattccagttgct

SEQ ID NO: 5174457 - DNA, 25 bp, Homo sapien
ttaatctgtaattatgatctaaaac

SEQ ID NO: 5174458 - DNA, 25 bp, Homo sapien
tttaatctgtaattatgatctaaaa

SEQ ID NO: 5174459 - DNA, 25 bp, Homo sapien
atttaatctgtaattatgatctaaa

SEQ ID NO: 5174460 - DNA, 25 bp, Homo sapien
tcaccatgagctgttgagtaatagt

SEQ ID NO: 5174461 - DNA, 25 bp, Homo sapien
ggcactcaataacaggccacaaagg

SEQ ID NO: 5174462 - DNA, 25 bp, Homo sapien
ccacaaaggttacacaggataaggg

SEQ ID NO: 5174463 - DNA, 25 bp, Homo sapien
gactgaaaagaactgtctaaaggga

SEQ ID NO: 5174464 - DNA, 25 bp, Homo sapien
tgtgtaaccacatgtgcattgctaa

SEQ ID NO: 5174465 - DNA, 25 bp, Homo sapien
gtgtgtaaccacatgtgcattgcta

SEQ ID NO: 5174466 - DNA, 25 bp, Homo sapien
tgtgcattgctaactgtgtcttgac

SEQ ID NO: 5174467 - DNA, 25 bp, Homo sapien
gcattgctaactgtgtcttgacaca

SEQ ID NO: 5174468 - DNA, 25 bp, Homo sapien
tgtggtctgcctgcttgactgatga

SEQ ID NO: 5174469 - DNA, 25 bp, Homo sapien
tcatcagtctacctctcagcctttg

SEQ ID NO: 5174470 - DNA, 25 bp, Homo sapien
tgtcctctgattgaggaaggtgagc

SEQ ID NO: 5174471 - DNA, 25 bp, Homo sapien
agtctacctctcagcctttgtctga

SEQ ID NO: 5174472 - DNA, 25 bp, Homo sapien
agagaagcacagtcaagtccatgca

SEQ ID NO: 5174473 - DNA, 25 bp, Homo sapien
gagaagcacagtcaagtccatgcat

SEQ ID NO: 5174474 - DNA, 25 bp, Homo sapien
cagagaagcacagtcaagtccatgc

SEQ ID NO: 5174475 - DNA, 25 bp, Homo sapien
cctgagtagttccagtctctaacca

SEQ ID NO: 5174476 - DNA, 25 bp, Homo sapien
caggagccttcagtcgctaatctta

SEQ ID NO: 5174477 - DNA, 25 bp, Homo sapien
taaccacatactcattccaggagcc

SEQ ID NO: 5174478 - DNA, 25 bp, Homo sapien
catcatccattgcttgtgctatttg

SEQ ID NO: 5174479 - DNA, 25 bp, Homo sapien
ggtataatgaaagcgcctacaggat

SEQ ID NO: 5174480 - DNA, 25 bp, Homo sapien
tcaaatgccgctgtgagaaagggcc

SEQ ID NO: 5174481 - DNA, 25 bp, Homo sapien
tacctttgccgacttcctcagcttg

SEQ ID NO: 5174482 - DNA, 25 bp, Homo sapien
taacaggcaattatctggccatcca

SEQ ID NO: 5174483 - DNA, 25 bp, Homo sapien
aaacaaacaagacgagagccatttt

SEQ ID NO: 5174484 - DNA, 25 bp, Homo sapien
gggccaatgggactccaattagtga

SEQ ID NO: 5174485 - DNA, 25 bp, Homo sapien
ttttatccaagagggtcacatgggg

SEQ ID NO: 5174486 - DNA, 25 bp, Homo sapien
tgagtcgtaggggagcagatcacct

SEQ ID NO: 5174487 - DNA, 25 bp, Homo sapien
ttttgggtgagacaaaccacaccca

SEQ ID NO: 5174488 - DNA, 25 bp, Homo sapien
tctcaaagcatgtctagttgtgtta

SEQ ID NO: 5174489 - DNA, 25 bp, Homo sapien
ccttgaacttaatcaacaaatgctg

SEQ ID NO: 5174490 - DNA, 25 bp, Homo sapien
acattacataaagcaagtctgttag

SEQ ID NO: 5174491 - DNA, 25 bp, Homo sapien
ctccacagctcctggatgtacttgt

SEQ ID NO: 5174492 - DNA, 25 bp, Homo sapien
ctttctccacagctcctggatgtac

SEQ ID NO: 5174493 - DNA, 25 bp, Homo sapien
atcagactgcttctttctccacagc

SEQ ID NO: 5174494 - DNA, 25 bp, Homo sapien
gacatcagactgcttctttctccac

SEQ ID NO: 5174495 - DNA, 25 bp, Homo sapien
ctgtggagagcagggtactgccagc

SEQ ID NO: 5174496 - DNA, 25 bp, Homo sapien
tggagagcagggtactgccagcagc

SEQ ID NO: 5174497 - DNA, 25 bp, Homo sapien
gtggagagcagggtactgccagcag

SEQ ID NO: 5174498 - DNA, 25 bp, Homo sapien
tgtggagagcagggtactgccagca

SEQ ID NO: 5174499 - DNA, 25 bp, Homo sapien
tcggcatgctttatcgggctgggtg

SEQ ID NO: 5174500 - DNA, 25 bp, Homo sapien
cccagtcggcatgctttatcgggct

SEQ ID NO: 5174501 - DNA, 25 bp, Homo sapien
cagtcggcatgctttatcgggctgg

SEQ ID NO: 5174502 - DNA, 25 bp, Homo sapien
ggcatgctttatcgggctgggtgga

SEQ ID NO: 5174503 - DNA, 25 bp, Homo sapien
tgggcatttccagccaccacggcga

SEQ ID NO: 5174504 - DNA, 25 bp, Homo sapien
aagttacagccttaggaactgggca

SEQ ID NO: 5174505 - DNA, 25 bp, Homo sapien
agccttaggaactgggcatttccag

SEQ ID NO: 5174506 - DNA, 25 bp, Homo sapien
ggaactgggcatttccagccaccac

SEQ ID NO: 5174507 - DNA, 25 bp, Homo sapien
aactagttaactccatgatggacag

SEQ ID NO: 5174508 - DNA, 25 bp, Homo sapien
actagttaactccatgatggacagg

SEQ ID NO: 5174509 - DNA, 25 bp, Homo sapien
taactagttaactccatgatggaca

SEQ ID NO: 5174510 - DNA, 25 bp, Homo sapien
agtacgaattcaggactcttagagc

SEQ ID NO: 5174511 - DNA, 25 bp, Homo sapien
aacccagtacgaattcaggactctt

SEQ ID NO: 5174512 - DNA, 25 bp, Homo sapien
ccacagtggtgtccagcttgctcct

SEQ ID NO: 5174513 - DNA, 25 bp, Homo sapien
cccagtacgaattcaggactcttag

SEQ ID NO: 5174514 - DNA, 25 bp, Homo sapien
tgagccagctcaatgcaggaacaga

SEQ ID NO: 5174515 - DNA, 25 bp, Homo sapien
gcaaggtctttttctgttggaacac

SEQ ID NO: 5174516 - DNA, 25 bp, Homo sapien
caacgtgtagagtattgcagggagc

SEQ ID NO: 5174517 - DNA, 25 bp, Homo sapien
tgatagaatggttcgttgccctttg

SEQ ID NO: 5174518 - DNA, 25 bp, Homo sapien
caaactggggagtacacatctgggt

SEQ ID NO: 5174519 - DNA, 25 bp, Homo sapien
tctctgtggaggcagtttgcatagc

SEQ ID NO: 5174520 - DNA, 25 bp, Homo sapien
caggttagcttcatagcaaactggg

SEQ ID NO: 5174521 - DNA, 25 bp, Homo sapien
ctgtggaggcagtttgcatagctga

SEQ ID NO: 5174522 - DNA, 25 bp, Homo sapien
tccaagggaattcctagctcagctt

SEQ ID NO: 5174523 - DNA, 25 bp, Homo sapien
aagggaattcctagctcagctttca

SEQ ID NO: 5174524 - DNA, 25 bp, Homo sapien
ttccaagggaattcctagctcagct

SEQ ID NO: 5174525 - DNA, 25 bp, Homo sapien
caagggaattcctagctcagctttc

SEQ ID NO: 5174526 - DNA, 25 bp, Homo sapien
aacaatagcttttaatctcactggg

SEQ ID NO: 5174527 - DNA, 25 bp, Homo sapien
cactgggatctggattcaaagttac

SEQ ID NO: 5174528 - DNA, 25 bp, Homo sapien
aaatgtaatcaatttcatgttcacc

SEQ ID NO: 5174529 - DNA, 25 bp, Homo sapien
caaagttacattcttcctcacaaac

SEQ ID NO: 5174530 - DNA, 25 bp, Homo sapien
aggctctacgttcagaatttcccaa

SEQ ID NO: 5174531 - DNA, 25 bp, Homo sapien
actgacagccacacgtgcattattg

SEQ ID NO: 5174532 - DNA, 25 bp, Homo sapien
aatgcctgaagaatagctgcccacc

SEQ ID NO: 5174533 - DNA, 25 bp, Homo sapien
cacacgtgcattattggtctacagt

SEQ ID NO: 5174534 - DNA, 25 bp, Homo sapien
gttctcttcggtaacctcttctgta

SEQ ID NO: 5174535 - DNA, 25 bp, Homo sapien
gagggaaaagcagcatcttgtctac

SEQ ID NO: 5174536 - DNA, 25 bp, Homo sapien
ctgtatgtggctccctagaatttta

SEQ ID NO: 5174537 - DNA, 25 bp, Homo sapien
tccgactctgatgcttcatcccttt

SEQ ID NO: 5174538 - DNA, 25 bp, Homo sapien
gcttgtagaactataggcagcttcg

SEQ ID NO: 5174539 - DNA, 25 bp, Homo sapien
cctggttcacttatattaggtggcc

SEQ ID NO: 5174540 - DNA, 25 bp, Homo sapien
tcgtttttatcaagatgcttctgcc

SEQ ID NO: 5174541 - DNA, 25 bp, Homo sapien
tctttgtgtgtattggagaccagcc

SEQ ID NO: 5174542 - DNA, 25 bp, Homo sapien
gggagcagaaattgatgtccctctt

SEQ ID NO: 5174543 - DNA, 25 bp, Homo sapien
gatgtccctcttgaaggtgaacaca

SEQ ID NO: 5174544 - DNA, 25 bp, Homo sapien
tccctcttgaaggtgaacacattca

SEQ ID NO: 5174545 - DNA, 25 bp, Homo sapien
ttgctttcatgctgcttccccctgg

SEQ ID NO: 5174546 - DNA, 25 bp, Homo sapien
cacttagcagccttcggaagtaatt

SEQ ID NO: 5174547 - DNA, 25 bp, Homo sapien
ttagcagccttcggaagtaatttac

SEQ ID NO: 5174548 - DNA, 25 bp, Homo sapien
cttagcagccttcggaagtaattta

SEQ ID NO: 5174549 - DNA, 25 bp, Homo sapien
tcacttagcagccttcggaagtaat

SEQ ID NO: 5174550 - DNA, 25 bp, Homo sapien
agcttcggagctggtgtgtcttcat

SEQ ID NO: 5174551 - DNA, 25 bp, Homo sapien
gcttcggagctggtgtgtcttcatg

SEQ ID NO: 5174552 - DNA, 25 bp, Homo sapien
cagcttcggagctggtgtgtcttca

SEQ ID NO: 5174553 - DNA, 25 bp, Homo sapien
ccagcttcggagctggtgtgtcttc

SEQ ID NO: 5174554 - DNA, 25 bp, Homo sapien
aaagtctgtagtttgcatgtggtat

SEQ ID NO: 5174555 - DNA, 25 bp, Homo sapien
cagtagttcttcacttccaaagtct

SEQ ID NO: 5174556 - DNA, 25 bp, Homo sapien
tggcaccaaggcaaagatactttct

SEQ ID NO: 5174557 - DNA, 25 bp, Homo sapien
aaggctccatggcaccaaggcaaag

SEQ ID NO: 5174558 - DNA, 25 bp, Homo sapien
gcagtccacaggctcaagtttctgt

SEQ ID NO: 5174559 - DNA, 25 bp, Homo sapien
tactgcagtccacaggctcaagttt

SEQ ID NO: 5174560 - DNA, 25 bp, Homo sapien
ctgtgcttagactcagaattaaatt

SEQ ID NO: 5174561 - DNA, 25 bp, Homo sapien
caagtttctgtgcttagactcagaa

SEQ ID NO: 5174562 - DNA, 25 bp, Homo sapien
aggtccaatgcctcaactgcccaaa

SEQ ID NO: 5174563 - DNA, 25 bp, Homo sapien
ggagggcaggtatgtatactgcaaa

SEQ ID NO: 5174564 - DNA, 25 bp, Homo sapien
ccagatcagagatggtcaggtccaa

SEQ ID NO: 5174565 - DNA, 25 bp, Homo sapien
gcttgtctgaaggacgactttgaac

SEQ ID NO: 5174566 - DNA, 25 bp, Homo sapien
caaatgcatccaatagcaaccaaag

SEQ ID NO: 5174567 - DNA, 25 bp, Homo sapien
tccaatagcaaccaaagaatggtcc

SEQ ID NO: 5174568 - DNA, 25 bp, Homo sapien
cattatgtctcccaacctctccact

SEQ ID NO: 5174569 - DNA, 25 bp, Homo sapien
caaagaatggtcctaacattatgtc

SEQ ID NO: 5174570 - DNA, 25 bp, Homo sapien
ttttcagtccattgtattctatgac

SEQ ID NO: 5174571 - DNA, 25 bp, Homo sapien
agtagattttcagtccattgtattc

SEQ ID NO: 5174572 - DNA, 25 bp, Homo sapien
gttcatgtaagtagattttcagtcc

SEQ ID NO: 5174573 - DNA, 25 bp, Homo sapien
ctagtctctgttcatgtaagtagat

SEQ ID NO: 5174574 - DNA, 25 bp, Homo sapien
ggaactaaggagataggaagaagtc

SEQ ID NO: 5174575 - DNA, 25 bp, Homo sapien
taaggagataggaagaagtcacaga

SEQ ID NO: 5174576 - DNA, 25 bp, Homo sapien
tttctgtcctaagtccagccagtca

SEQ ID NO: 5174577 - DNA, 25 bp, Homo sapien
ttgtcagttattgggctgttggttg

SEQ ID NO: 5174578 - DNA, 25 bp, Homo sapien
atcatataagtctcagttcctcttc

SEQ ID NO: 5174579 - DNA, 25 bp, Homo sapien
tcagttcctcttccaaggttggaga

SEQ ID NO: 5174580 - DNA, 25 bp, Homo sapien
agtctcagttcctcttccaaggttg

SEQ ID NO: 5174581 - DNA, 25 bp, Homo sapien
tctcagttcctcttccaaggttgga

SEQ ID NO: 5174582 - DNA, 25 bp, Homo sapien
tgctgagcacacttcggcagttatt

SEQ ID NO: 5174583 - DNA, 25 bp, Homo sapien
ctgagcacacttcggcagttattac

SEQ ID NO: 5174584 - DNA, 25 bp, Homo sapien
agcacacttcggcagttattacttt

SEQ ID NO: 5174585 - DNA, 25 bp, Homo sapien
cacacttcggcagttattactttgc

SEQ ID NO: 5174586 - DNA, 25 bp, Homo sapien
gatctggtgctagtttattcttcat

SEQ ID NO: 5174587 - DNA, 25 bp, Homo sapien
tttggatctggtgctagtttattct

SEQ ID NO: 5174588 - DNA, 25 bp, Homo sapien
cttttggatctggtgctagtttatt

SEQ ID NO: 5174589 - DNA, 25 bp, Homo sapien
tggatctggtgctagtttattcttc

SEQ ID NO: 5174590 - DNA, 25 bp, Homo sapien
agaacttcactgggcttccttccat

SEQ ID NO: 5174591 - DNA, 25 bp, Homo sapien
ccgtcttcaaacagccaggctgtgc

SEQ ID NO: 5174592 - DNA, 25 bp, Homo sapien
aaccgtcttcaaacagccaggctgt

SEQ ID NO: 5174593 - DNA, 25 bp, Homo sapien
cagaacttcactgggcttccttcca

SEQ ID NO: 5174594 - DNA, 25 bp, Homo sapien
aatgtgtgctttatttgatcagcgc

SEQ ID NO: 5174595 - DNA, 25 bp, Homo sapien
aggatccctgtacagacgctgccga

SEQ ID NO: 5174596 - DNA, 25 bp, Homo sapien
cgctgccgagtcaaatttagtgcca

SEQ ID NO: 5174597 - DNA, 25 bp, Homo sapien
tttagtgccaaagggaatgtgtgct

SEQ ID NO: 5174598 - DNA, 25 bp, Homo sapien
caatccccagtgattctaaaggctg

SEQ ID NO: 5174599 - DNA, 25 bp, Homo sapien
cacgtggatggcattcagaaataac

SEQ ID NO: 5174600 - DNA, 25 bp, Homo sapien
ctgggtgaaacatagagcacacatt

SEQ ID NO: 5174601 - DNA, 25 bp, Homo sapien
gttgtgcttccacacagcggtgagc

SEQ ID NO: 5174602 - DNA, 25 bp, Homo sapien
ccaaaagtagatttgtatttcgatg

SEQ ID NO: 5174603 - DNA, 25 bp, Homo sapien
gcaatagtgctttctttgtagaacc

SEQ ID NO: 5174604 - DNA, 25 bp, Homo sapien
tttcgatgataatggcaatagtgct

SEQ ID NO: 5174605 - DNA, 25 bp, Homo sapien
ctttgtagaacctatctgtgtgatc

SEQ ID NO: 5174606 - DNA, 25 bp, Homo sapien
tgtcaacaaacaagtagagtcactg

SEQ ID NO: 5174607 - DNA, 25 bp, Homo sapien
gggagaccccacgtctaaaatcata

SEQ ID NO: 5174608 - DNA, 25 bp, Homo sapien
tattcactgtcaattagcagctggg

SEQ ID NO: 5174609 - DNA, 25 bp, Homo sapien
cacaatcttgtgtagaaacccacta

SEQ ID NO: 5174610 - DNA, 25 bp, Homo sapien
gattggcaggtcttatgttcttcaa

SEQ ID NO: 5174611 - DNA, 25 bp, Homo sapien
ccccagaagctagctgttcaagatt

SEQ ID NO: 5174612 - DNA, 25 bp, Homo sapien
acaaattgcgaaggtaccaggatgc

SEQ ID NO: 5174613 - DNA, 25 bp, Homo sapien
gggcattggaattcctggctagtcc

SEQ ID NO: 5174614 - DNA, 25 bp, Homo sapien
tgacaagggttccttggacacagca

SEQ ID NO: 5174615 - DNA, 25 bp, Homo sapien
ggactcccataaccctattcattaa

SEQ ID NO: 5174616 - DNA, 25 bp, Homo sapien
ccttggacacagcatatataatagc

SEQ ID NO: 5174617 - DNA, 25 bp, Homo sapien
ttagaaatgtatagcataggactcc

SEQ ID NO: 5174618 - DNA, 25 bp, Homo sapien
agtgctgattgataccctgccattc

SEQ ID NO: 5174619 - DNA, 25 bp, Homo sapien
agaatgacagcccattcagacttgg

SEQ ID NO: 5174620 - DNA, 25 bp, Homo sapien
tgataccctgccattcaacatccta

SEQ ID NO: 5174621 - DNA, 25 bp, Homo sapien
gccacttcattaaagatgtatctgt

SEQ ID NO: 5174622 - DNA, 25 bp, Homo sapien
gaaagtatatcagagggacagatga

SEQ ID NO: 5174623 - DNA, 25 bp, Homo sapien
tcaggacagcctttataaggggtga

SEQ ID NO: 5174624 - DNA, 25 bp, Homo sapien
acagcctttataaggggtgacttca

SEQ ID NO: 5174625 - DNA, 25 bp, Homo sapien
ttttcccttgaaagtatatcagagg

SEQ ID NO: 5174626 - DNA, 25 bp, Homo sapien
ccgcgggcccgtctgggctccggct

SEQ ID NO: 5174627 - DNA, 25 bp, Homo sapien
gcaagtccctgtggcggccgcctcc

SEQ ID NO: 5174628 - DNA, 25 bp, Homo sapien
gagactcctctcccgctgaggcggt

SEQ ID NO: 5174629 - DNA, 25 bp, Homo sapien
ccctatctcccgctcctaaacttct

SEQ ID NO: 5174630 - DNA, 25 bp, Homo sapien
gccaaagctctatctcgagtagtga

SEQ ID NO: 5174631 - DNA, 25 bp, Homo sapien
tcagatgagtatgaagaataccacc

SEQ ID NO: 5174632 - DNA, 25 bp, Homo sapien
caaatacggcaaaaactgtcagcat

SEQ ID NO: 5174633 - DNA, 25 bp, Homo sapien
tgtaaacaccaagccaagaagacat

SEQ ID NO: 5174634 - DNA, 25 bp, Homo sapien
gacttcattttgggaggtgagttgt

SEQ ID NO: 5174635 - DNA, 25 bp, Homo sapien
tgggaggtgagttgtcttgagaatc

SEQ ID NO: 5174636 - DNA, 25 bp, Homo sapien
tttgggaggtgagttgtcttgagaa

SEQ ID NO: 5174637 - DNA, 25 bp, Homo sapien
tcattttgggaggtgagttgtcttg

SEQ ID NO: 5174638 - DNA, 25 bp, Homo sapien
aggtgaccagaatcatctgataggt

SEQ ID NO: 5174639 - DNA, 25 bp, Homo sapien
aaaatatacaggtgtctgttccacg

SEQ ID NO: 5174640 - DNA, 25 bp, Homo sapien
gaatcatctgataggttttatgaaa

SEQ ID NO: 5174641 - DNA, 25 bp, Homo sapien
cgttcccctggtgttcacaaaggag

SEQ ID NO: 5174642 - DNA, 25 bp, Homo sapien
gggctcacctcttctactggtagtt

SEQ ID NO: 5174643 - DNA, 25 bp, Homo sapien
tcagtacttgtctccctccacagtt

SEQ ID NO: 5174644 - DNA, 25 bp, Homo sapien
gtgagtcaaatgctataccctcttc

SEQ ID NO: 5174645 - DNA, 25 bp, Homo sapien
ttgtttccagaccacttttccagcc

SEQ ID NO: 5174646 - DNA, 25 bp, Homo sapien
tctacatatagggaaactgaaacac

SEQ ID NO: 5174647 - DNA, 25 bp, Homo sapien
tgcaaccactgcctagtatagaatg

SEQ ID NO: 5174648 - DNA, 25 bp, Homo sapien
tgatcctctagacaaacctgttaag

SEQ ID NO: 5174649 - DNA, 25 bp, Homo sapien
gcaaagatatgctgactggataaga

SEQ ID NO: 5174650 - DNA, 25 bp, Homo sapien
catgtgaaacacttgtaccaccctg

SEQ ID NO: 5174651 - DNA, 25 bp, Homo sapien
aaagcagtatataacacagtatgtc

SEQ ID NO: 5174652 - DNA, 25 bp, Homo sapien
gactgccagtcagctcatgtgaaac

SEQ ID NO: 5174653 - DNA, 25 bp, Homo sapien
caatcatcctggctcacaaagtgct

SEQ ID NO: 5174654 - DNA, 25 bp, Homo sapien
ggtatgtctcttgtgagagcgccaa

SEQ ID NO: 5174655 - DNA, 25 bp, Homo sapien
aagcccaacaattgccctctaaagg

SEQ ID NO: 5174656 - DNA, 25 bp, Homo sapien
tgtagcttttaccatcacgccaaag

SEQ ID NO: 5174657 - DNA, 25 bp, Homo sapien
agagggacacctgtctgggtatgtc

SEQ ID NO: 5174658 - DNA, 25 bp, Homo sapien
cctggtgaggtgctctttaagactt

SEQ ID NO: 5174659 - DNA, 25 bp, Homo sapien
tgactttgcatgcagcaggaagcca

SEQ ID NO: 5174660 - DNA, 25 bp, Homo sapien
ctgactttgcatgcagcaggaagcc

SEQ ID NO: 5174661 - DNA, 25 bp, Homo sapien
tggtgaggtgctctttaagacttct

SEQ ID NO: 5174662 - DNA, 25 bp, Homo sapien
ttgtaacttactaaaagaggcacaa

SEQ ID NO: 5174663 - DNA, 25 bp, Homo sapien
ggcacaatcagaataagctacataa

SEQ ID NO: 5174664 - DNA, 25 bp, Homo sapien
taacctaaccaggatattagtgacc

SEQ ID NO: 5174665 - DNA, 25 bp, Homo sapien
accaggatattagtgaccagatgct

SEQ ID NO: 5174666 - DNA, 25 bp, Homo sapien
caccactttattgtagtctttcagg

SEQ ID NO: 5174667 - DNA, 25 bp, Homo sapien
taccccacacagttgagtaccttac

SEQ ID NO: 5174668 - DNA, 25 bp, Homo sapien
tgtagtaccccacacagttgagtac

SEQ ID NO: 5174669 - DNA, 25 bp, Homo sapien
accactttattgtagtctttcagga

SEQ ID NO: 5174670 - DNA, 25 bp, Homo sapien
ccagtagacatatctccaggtagag

SEQ ID NO: 5174671 - DNA, 25 bp, Homo sapien
cagtagacatatctccaggtagagg

SEQ ID NO: 5174672 - DNA, 25 bp, Homo sapien
gctttctgctatgggaccagtagac

SEQ ID NO: 5174673 - DNA, 25 bp, Homo sapien
taacaccagctttctgctatgggac

SEQ ID NO: 5174674 - DNA, 25 bp, Homo sapien
atgttcaacatcctacgatccagtc

SEQ ID NO: 5174675 - DNA, 25 bp, Homo sapien
tctaataactatggcaaagtgtttc

SEQ ID NO: 5174676 - DNA, 25 bp, Homo sapien
tccagtcttctaacacttctaataa

SEQ ID NO: 5174677 - DNA, 25 bp, Homo sapien
aagtgtttcacaatactattctcaa

SEQ ID NO: 5174678 - DNA, 25 bp, Homo sapien
aaactgaagttattaatggtccaca

SEQ ID NO: 5174679 - DNA, 25 bp, Homo sapien
gaagttattaatggtccacatatag

SEQ ID NO: 5174680 - DNA, 25 bp, Homo sapien
taatggtccacatataggaaaattt

SEQ ID NO: 5174681 - DNA, 25 bp, Homo sapien
tattaatggtccacatataggaaaa

SEQ ID NO: 5174682 - DNA, 25 bp, Homo sapien
tttgtcacttgggccagatgaaaat

SEQ ID NO: 5174683 - DNA, 25 bp, Homo sapien
cacttgggccagatgaaaatgttga

SEQ ID NO: 5174684 - DNA, 25 bp, Homo sapien
tgtcacttgggccagatgaaaatgt

SEQ ID NO: 5174685 - DNA, 25 bp, Homo sapien
cttgggccagatgaaaatgttgaac

SEQ ID NO: 5174686 - DNA, 25 bp, Homo sapien
ttcatcatctaatccctttgggttt

SEQ ID NO: 5174687 - DNA, 25 bp, Homo sapien
tcatcatctaatccctttgggttta

SEQ ID NO: 5174688 - DNA, 25 bp, Homo sapien
tttcatcatctaatccctttgggtt

SEQ ID NO: 5174689 - DNA, 25 bp, Homo sapien
catcatctaatccctttgggtttac

SEQ ID NO: 5174690 - DNA, 25 bp, Homo sapien
aagcaaatataaggacaagtagtct

SEQ ID NO: 5174691 - DNA, 25 bp, Homo sapien
aaagcaaatataaggacaagtagtc

SEQ ID NO: 5174692 - DNA, 25 bp, Homo sapien
gcaaatataaggacaagtagtcttt

SEQ ID NO: 5174693 - DNA, 25 bp, Homo sapien
taaaagcaaatataaggacaagtag

SEQ ID NO: 5174694 - DNA, 25 bp, Homo sapien
aattttgctcgaacttcacttttgg

SEQ ID NO: 5174695 - DNA, 25 bp, Homo sapien
tttgctcgaacttcacttttggggc

SEQ ID NO: 5174696 - DNA, 25 bp, Homo sapien
gaattttgctcgaacttcacttttg

SEQ ID NO: 5174697 - DNA, 25 bp, Homo sapien
attttgctcgaacttcacttttggg

SEQ ID NO: 5174698 - DNA, 25 bp, Homo sapien
agaaacatacatcttatttcctgct

SEQ ID NO: 5174699 - DNA, 25 bp, Homo sapien
gaaacatacatcttatttcctgctt

SEQ ID NO: 5174700 - DNA, 25 bp, Homo sapien
agcaaaaagtcccttctaatgaatt

SEQ ID NO: 5174701 - DNA, 25 bp, Homo sapien
ccttcccttgcacaaatcgatatgc

SEQ ID NO: 5174702 - DNA, 25 bp, Homo sapien
acaaatcgatatgctctttggcttt

SEQ ID NO: 5174703 - DNA, 25 bp, Homo sapien
tctggtaaaagaccattagcttcat

SEQ ID NO: 5174704 - DNA, 25 bp, Homo sapien
agttctttaggaagggtagtgcaat

SEQ ID NO: 5174705 - DNA, 25 bp, Homo sapien
ggtagtgcaatgcttcctcctcttc

SEQ ID NO: 5174706 - DNA, 25 bp, Homo sapien
ttaggaagggtagtgcaatgcttcc

SEQ ID NO: 5174707 - DNA, 25 bp, Homo sapien
gaagggtagtgcaatgcttcctcct

SEQ ID NO: 5174708 - DNA, 25 bp, Homo sapien
acttttaacagtcgaatttcacatg

SEQ ID NO: 5174709 - DNA, 25 bp, Homo sapien
gaatagcgagttttagactttttga

SEQ ID NO: 5174710 - DNA, 25 bp, Homo sapien
tatcttccagaatagcgagttttag

SEQ ID NO: 5174711 - DNA, 25 bp, Homo sapien
aacagtcgaatttcacatgaatatc

SEQ ID NO: 5174712 - DNA, 25 bp, Homo sapien
caagagacttcttatagaacataaa

SEQ ID NO: 5174713 - DNA, 25 bp, Homo sapien
cagcagagttacaaaatgtgatgat

SEQ ID NO: 5174714 - DNA, 25 bp, Homo sapien
ctatctacacagtattatcacagca

SEQ ID NO: 5174715 - DNA, 25 bp, Homo sapien
tactccaaagagtattcaagagact

SEQ ID NO: 5174716 - DNA, 25 bp, Homo sapien
gagctttaaattcttgtcctctcac

SEQ ID NO: 5174717 - DNA, 25 bp, Homo sapien
aatcttctgctagacgacactcagg

SEQ ID NO: 5174718 - DNA, 25 bp, Homo sapien
ctctcacgaaaaaactgcagtctgt

SEQ ID NO: 5174719 - DNA, 25 bp, Homo sapien
gacactcaggcaccttcaaagtatt

SEQ ID NO: 5174720 - DNA, 25 bp, Homo sapien
agattatgtatcattattttatgca

SEQ ID NO: 5174721 - DNA, 25 bp, Homo sapien
tatattaccccataactagaaagta

SEQ ID NO: 5174722 - DNA, 25 bp, Homo sapien
ctgtaacaagattatgtatcattat

SEQ ID NO: 5174723 - DNA, 25 bp, Homo sapien
aaatgtactatattaccccataact

SEQ ID NO: 5174724 - DNA, 25 bp, Homo sapien
caaacatggcgttaaaaactggaga

SEQ ID NO: 5174725 - DNA, 25 bp, Homo sapien
catggcgttaaaaactggagatcga

SEQ ID NO: 5174726 - DNA, 25 bp, Homo sapien
ttcaaacatggcgttaaaaactgga

SEQ ID NO: 5174727 - DNA, 25 bp, Homo sapien
atgttcaaacatggcgttaaaaact

SEQ ID NO: 5174728 - DNA, 25 bp, Homo sapien
caactatccaatttacctaccagaa

SEQ ID NO: 5174729 - DNA, 25 bp, Homo sapien
tttccctgcttatcacagtatgaca

SEQ ID NO: 5174730 - DNA, 25 bp, Homo sapien
gctatggaccagaatagtcctttgg

SEQ ID NO: 5174731 - DNA, 25 bp, Homo sapien
tgactgcacatccacactgagctac

SEQ ID NO: 5174732 - DNA, 25 bp, Homo sapien
tcggcaaagtgaagtggacaagtcc

SEQ ID NO: 5174733 - DNA, 25 bp, Homo sapien
cactatcggagaggtgggaaccatg

SEQ ID NO: 5174734 - DNA, 25 bp, Homo sapien
ggaaaagcatacactatcggagagg

SEQ ID NO: 5174735 - DNA, 25 bp, Homo sapien
ttcggcaaagtgaagtggacaagtc

SEQ ID NO: 5174736 - DNA, 25 bp, Homo sapien
ctctccctgtgtaaatgaatctcat

SEQ ID NO: 5174737 - DNA, 25 bp, Homo sapien
tgtgtaaatgaatctcatcatttct

SEQ ID NO: 5174738 - DNA, 25 bp, Homo sapien
tctccctgtgtaaatgaatctcatc

SEQ ID NO: 5174739 - DNA, 25 bp, Homo sapien
ctccctgtgtaaatgaatctcatca

SEQ ID NO: 5174740 - DNA, 25 bp, Homo sapien
tattattgggtactatcatcattac

SEQ ID NO: 5174741 - DNA, 25 bp, Homo sapien
ctttgtaattttcaatgtgtaggtt

SEQ ID NO: 5174742 - DNA, 25 bp, Homo sapien
tgtatttaatactgatgatgctgct

SEQ ID NO: 5174743 - DNA, 25 bp, Homo sapien
tgtgtaatgccacggacataaagat

SEQ ID NO: 5174744 - DNA, 25 bp, Homo sapien
cgaggcctgccttactttgtataca

SEQ ID NO: 5174745 - DNA, 25 bp, Homo sapien
tactttgtatacatggtttgaggtg

SEQ ID NO: 5174746 - DNA, 25 bp, Homo sapien
accatgcgaggcctgccttactttg

SEQ ID NO: 5174747 - DNA, 25 bp, Homo sapien
actttgtatacatggtttgaggtgc

SEQ ID NO: 5174748 - DNA, 25 bp, Homo sapien
tacatttgcaacttggaaaataagg

SEQ ID NO: 5174749 - DNA, 25 bp, Homo sapien
gcataagcgtatttttgaagtagga

SEQ ID NO: 5174750 - DNA, 25 bp, Homo sapien
tgaagtaggatttattctaaaaagc

SEQ ID NO: 5174751 - DNA, 25 bp, Homo sapien
ccaactaagttcctgaatacatgat

SEQ ID NO: 5174752 - DNA, 25 bp, Homo sapien
aagcttcttcgcacatgaccttcag

SEQ ID NO: 5174753 - DNA, 25 bp, Homo sapien
ctgcaacattctctactgagaggtt

SEQ ID NO: 5174754 - DNA, 25 bp, Homo sapien
tctctactgagaggttactacacaa

SEQ ID NO: 5174755 - DNA, 25 bp, Homo sapien
tgaccttcagccgttccagtgcata

SEQ ID NO: 5174756 - DNA, 25 bp, Homo sapien
tacacccaagttgtcgaagtacact

SEQ ID NO: 5174757 - DNA, 25 bp, Homo sapien
cccaagttgtcgaagtacactgcac

SEQ ID NO: 5174758 - DNA, 25 bp, Homo sapien
tcccatctttacacccaagttgtcg

SEQ ID NO: 5174759 - DNA, 25 bp, Homo sapien
tctttacacccaagttgtcgaagta

SEQ ID NO: 5174760 - DNA, 25 bp, Homo sapien
ccatccgaggttgcattagaagctg

SEQ ID NO: 5174761 - DNA, 25 bp, Homo sapien
cagcaaatctggagggtaacattcc

SEQ ID NO: 5174762 - DNA, 25 bp, Homo sapien
aagatattacagcatccatccgagg

SEQ ID NO: 5174763 - DNA, 25 bp, Homo sapien
gctgacctacaagggagcatagcct

SEQ ID NO: 5174764 - DNA, 25 bp, Homo sapien
taaggcccacatcatctcacgtttg

SEQ ID NO: 5174765 - DNA, 25 bp, Homo sapien
ggttccacacaaggttcattcgcag

SEQ ID NO: 5174766 - DNA, 25 bp, Homo sapien
gacatgggtcttcatagttcaactc

SEQ ID NO: 5174767 - DNA, 25 bp, Homo sapien
tcacttggatgtgcctcaagaccca

SEQ ID NO: 5174768 - DNA, 25 bp, Homo sapien
cttctgtggcaactgaaactattaa

SEQ ID NO: 5174769 - DNA, 25 bp, Homo sapien
ttttagccgtttgcgtggaatgcca

SEQ ID NO: 5174770 - DNA, 25 bp, Homo sapien
tgctagtgctcgaaaggcttctgct

SEQ ID NO: 5174771 - DNA, 25 bp, Homo sapien
gccaaactgtggacactgtgcagat

SEQ ID NO: 5174772 - DNA, 25 bp, Homo sapien
gcttctgctactaaatgagggtgag

SEQ ID NO: 5174773 - DNA, 25 bp, Homo sapien
gtcaattccatttttcaactgttca

SEQ ID NO: 5174774 - DNA, 25 bp, Homo sapien
agaatccttctggacctggaggagt

SEQ ID NO: 5174775 - DNA, 25 bp, Homo sapien
cctggaggagtgaaagtcaattcca

SEQ ID NO: 5174776 - DNA, 25 bp, Homo sapien
gaatccttctggacctggaggagtg

SEQ ID NO: 5174777 - DNA, 25 bp, Homo sapien
gcatctcccaaaggcaagtatcagt

SEQ ID NO: 5174778 - DNA, 25 bp, Homo sapien
cagtaagtcagatgtggtaccccaa

SEQ ID NO: 5174779 - DNA, 25 bp, Homo sapien
ttaagaagcacactggtcaccacca

SEQ ID NO: 5174780 - DNA, 25 bp, Homo sapien
cattatggagctagtgcaatcctgc

SEQ ID NO: 5174781 - DNA, 25 bp, Homo sapien
cacaatgtgccggtgtggtgcgcat

SEQ ID NO: 5174782 - DNA, 25 bp, Homo sapien
caggctaatagctcaaaaggcggga

SEQ ID NO: 5174783 - DNA, 25 bp, Homo sapien
aaaggcgggacagagtatctatacc

SEQ ID NO: 5174784 - DNA, 25 bp, Homo sapien
tcaaggaggtaacattggcaagcca

SEQ ID NO: 5174785 - DNA, 25 bp, Homo sapien
tctgagaacactaaaacgaacccac

SEQ ID NO: 5174786 - DNA, 25 bp, Homo sapien
tagtcttgcatatgataggcactca

SEQ ID NO: 5174787 - DNA, 25 bp, Homo sapien
taaaatacactttgtgtgcggaaag

SEQ ID NO: 5174788 - DNA, 25 bp, Homo sapien
aaagttcacatactgcaaacagaag

SEQ ID NO: 5174789 - DNA, 25 bp, Homo sapien
cagacggagacatcacatcccagtg

SEQ ID NO: 5174790 - DNA, 25 bp, Homo sapien
gactggcacaagactacacctgcat

SEQ ID NO: 5174791 - DNA, 25 bp, Homo sapien
caggtgttatgtcacagactggcac

SEQ ID NO: 5174792 - DNA, 25 bp, Homo sapien
gcacaacaggacaacgggaatgaca

SEQ ID NO: 5174793 - DNA, 25 bp, Homo sapien
tcagtcctcccaggttaagtcaggt

SEQ ID NO: 5174794 - DNA, 25 bp, Homo sapien
cagtcctcccaggttaagtcaggtt

SEQ ID NO: 5174795 - DNA, 25 bp, Homo sapien
ttcagtcctcccaggttaagtcagg

SEQ ID NO: 5174796 - DNA, 25 bp, Homo sapien
ccaagtcctaatcatccgacttaga

SEQ ID NO: 5174797 - DNA, 25 bp, Homo sapien
tgagtgtcccttcaatatctatgca

SEQ ID NO: 5174798 - DNA, 25 bp, Homo sapien
tagtcactactatcagatttaccaa

SEQ ID NO: 5174799 - DNA, 25 bp, Homo sapien
gatctctctagtcactactatcaga

SEQ ID NO: 5174800 - DNA, 25 bp, Homo sapien
ccagcgtcggatcccaatggtctct

SEQ ID NO: 5174801 - DNA, 25 bp, Homo sapien
ttggttgcaacccagcgtcggatcc

SEQ ID NO: 5174802 - DNA, 25 bp, Homo sapien
ggatcccaatggtctctaggcagaa

SEQ ID NO: 5174803 - DNA, 25 bp, Homo sapien
caatggtctctaggcagaatctgtc

SEQ ID NO: 5174804 - DNA, 25 bp, Homo sapien
ctgaattactggttactcgggagac

SEQ ID NO: 5174805 - DNA, 25 bp, Homo sapien
tgtttaaaaggttcagactgagctg

SEQ ID NO: 5174806 - DNA, 25 bp, Homo sapien
ttaaacttgggacttccattgtcca

SEQ ID NO: 5174807 - DNA, 25 bp, Homo sapien
cacaataactctgacaatcctggca

SEQ ID NO: 5174808 - DNA, 25 bp, Homo sapien
gaaaacaccttgaatacttgccttc

SEQ ID NO: 5174809 - DNA, 25 bp, Homo sapien
acttgctgctgccacgagcttgcac

SEQ ID NO: 5174810 - DNA, 25 bp, Homo sapien
gacatattaggaggacttgctgctg

SEQ ID NO: 5174811 - DNA, 25 bp, Homo sapien
cagggacatattaggaggacttgct

SEQ ID NO: 5174812 - DNA, 25 bp, Homo sapien
cgagcttgcacatgactcttctcaa

SEQ ID NO: 5174813 - DNA, 25 bp, Homo sapien
caagctgagcatctggtggagccat

SEQ ID NO: 5174814 - DNA, 25 bp, Homo sapien
acagatgaatgggtgttaagacagc

SEQ ID NO: 5174815 - DNA, 25 bp, Homo sapien
caaaaggctgctctctacagatgaa

SEQ ID NO: 5174816 - DNA, 25 bp, Homo sapien
ccatccgctgatccaaaaggctgct

SEQ ID NO: 5174817 - DNA, 25 bp, Homo sapien
tagtatttgaatgacaagctctccc

SEQ ID NO: 5174818 - DNA, 25 bp, Homo sapien
tacttgtctgtagtcgtctcttgcc

SEQ ID NO: 5174819 - DNA, 25 bp, Homo sapien
tccctgtgacgtatctagaaagttc

SEQ ID NO: 5174820 - DNA, 25 bp, Homo sapien
cattctggagtatgatgatctgtcc

SEQ ID NO: 5174821 - DNA, 25 bp, Homo sapien
tagggccacacttagctcaagggag

SEQ ID NO: 5174822 - DNA, 25 bp, Homo sapien
cactcagttggcttcgtcaatggaa

SEQ ID NO: 5174823 - DNA, 25 bp, Homo sapien
gctctagattgctggtccaagggaa

SEQ ID NO: 5174824 - DNA, 25 bp, Homo sapien
ccaagggaatcaggccactcagttg

SEQ ID NO: 5174825 - DNA, 25 bp, Homo sapien
gaacatactcctaacagatttgcac

SEQ ID NO: 5174826 - DNA, 25 bp, Homo sapien
tggatcaacagcctttgtcttcatc

SEQ ID NO: 5174827 - DNA, 25 bp, Homo sapien
ggagagcaaaaattgccccagaaca

SEQ ID NO: 5174828 - DNA, 25 bp, Homo sapien
ggtgggttcagtggatcaacagcct

SEQ ID NO: 5174829 - DNA, 25 bp, Homo sapien
taagtgttttaaagcgcacccaggc

SEQ ID NO: 5174830 - DNA, 25 bp, Homo sapien
gccaattcactaccataatagaagt

SEQ ID NO: 5174831 - DNA, 25 bp, Homo sapien
tacactggtagctatgtcaccctag

SEQ ID NO: 5174832 - DNA, 25 bp, Homo sapien
cacatccctgatggttaccgctcag

SEQ ID NO: 5174833 - DNA, 25 bp, Homo sapien
aaaaggtggaaatctatattatgta

SEQ ID NO: 5174834 - DNA, 25 bp, Homo sapien
gaaaaggtggaaatctatattatgt

SEQ ID NO: 5174835 - DNA, 25 bp, Homo sapien
agaaaaggtggaaatctatattatg

SEQ ID NO: 5174836 - DNA, 25 bp, Homo sapien
aagaaaaggtggaaatctatattat

SEQ ID NO: 5174837 - DNA, 25 bp, Homo sapien
cactaagggtatcaaggaaagaaca

SEQ ID NO: 5174838 - DNA, 25 bp, Homo sapien
aaaacgtgaggaagcaactgggatg

SEQ ID NO: 5174839 - DNA, 25 bp, Homo sapien
tgtttgaggaacaccactgcctttc

SEQ ID NO: 5174840 - DNA, 25 bp, Homo sapien
tgcctttcccacattagtcactaag

SEQ ID NO: 5174841 - DNA, 25 bp, Homo sapien
acttgatctccatccagccttgact

SEQ ID NO: 5174842 - DNA, 25 bp, Homo sapien
ccttgacttccccagagagtgagtc

SEQ ID NO: 5174843 - DNA, 25 bp, Homo sapien
tgacttccccagagagtgagtccat

SEQ ID NO: 5174844 - DNA, 25 bp, Homo sapien
agcaaacttgatctccatccagcct

SEQ ID NO: 5174845 - DNA, 25 bp, Homo sapien
tagggttaaccatgtaaccaggcca

SEQ ID NO: 5174846 - DNA, 25 bp, Homo sapien
gaactttcagatagtgctaaggagg

SEQ ID NO: 5174847 - DNA, 25 bp, Homo sapien
gaggttttctgtgccctcagtcaga

SEQ ID NO: 5174848 - DNA, 25 bp, Homo sapien
cacagagcgtcatggaatacttttc

SEQ ID NO: 5174849 - DNA, 25 bp, Homo sapien
taagaggtgtcaattcagaacatcc

SEQ ID NO: 5174850 - DNA, 25 bp, Homo sapien
ttttgccaagatgtagcccatatgt

SEQ ID NO: 5174851 - DNA, 25 bp, Homo sapien
atgtacgtaggacattcaagaaacc

SEQ ID NO: 5174852 - DNA, 25 bp, Homo sapien
gaacatccttagaatttacttcagg

SEQ ID NO: 5174853 - DNA, 25 bp, Homo sapien
aagccccagtgggaggcaaagccac

SEQ ID NO: 5174854 - DNA, 25 bp, Homo sapien
caaacaagagccaaaaagccccagt

SEQ ID NO: 5174855 - DNA, 25 bp, Homo sapien
ctggggccaaacaagagccaaaaag

SEQ ID NO: 5174856 - DNA, 25 bp, Homo sapien
gtgggaggcaaagccaccaggacat

SEQ ID NO: 5174857 - DNA, 25 bp, Homo sapien
tcagcaagacacttcggcgagggct

SEQ ID NO: 5174858 - DNA, 25 bp, Homo sapien
tatctgaatagtccaagcatctccc

SEQ ID NO: 5174859 - DNA, 25 bp, Homo sapien
ggcgagggctgagcaccatcatgtt

SEQ ID NO: 5174860 - DNA, 25 bp, Homo sapien
gtttgtgttgactgccctgtacttc

SEQ ID NO: 5174861 - DNA, 25 bp, Homo sapien
gactcaggttggtcctcactctagg

SEQ ID NO: 5174862 - DNA, 25 bp, Homo sapien
tgctggatctcaagggacgctcgtc

SEQ ID NO: 5174863 - DNA, 25 bp, Homo sapien
gccagtaggcaggaaggaatcgtca

SEQ ID NO: 5174864 - DNA, 25 bp, Homo sapien
ttagagaatacagttccacggaggc

SEQ ID NO: 5174865 - DNA, 25 bp, Homo sapien
tcattagcatgaatctgggttactc

SEQ ID NO: 5174866 - DNA, 25 bp, Homo sapien
catcgagccacctttgatgacggct

SEQ ID NO: 5174867 - DNA, 25 bp, Homo sapien
gaaagcgaacaatcccatcgagcca

SEQ ID NO: 5174868 - DNA, 25 bp, Homo sapien
gggtctgacagattggaaagcgaac

SEQ ID NO: 5174869 - DNA, 25 bp, Homo sapien
aggcataaagaattgacacatactc

SEQ ID NO: 5174870 - DNA, 25 bp, Homo sapien
tgtacttagtgtcagagctagacag

SEQ ID NO: 5174871 - DNA, 25 bp, Homo sapien
aaataagtaggaaggcataaagaat

SEQ ID NO: 5174872 - DNA, 25 bp, Homo sapien
tctacatctggaagactagtcctgt

SEQ ID NO: 5174873 - DNA, 25 bp, Homo sapien
tacagcgaaacagcagcggtcgtca

SEQ ID NO: 5174874 - DNA, 25 bp, Homo sapien
tgtacagcgaaacagcagcggtcgt

SEQ ID NO: 5174875 - DNA, 25 bp, Homo sapien
cagcgaaacagcagcggtcgtcagt

SEQ ID NO: 5174876 - DNA, 25 bp, Homo sapien
cttgtacagcgaaacagcagcggtc

SEQ ID NO: 5174877 - DNA, 25 bp, Homo sapien
agattttcctccgggagcagtcctg

SEQ ID NO: 5174878 - DNA, 25 bp, Homo sapien
attttcctccgggagcagtcctgca

SEQ ID NO: 5174879 - DNA, 25 bp, Homo sapien
ttttcctccgggagcagtcctgcat

SEQ ID NO: 5174880 - DNA, 25 bp, Homo sapien
tttcctccgggagcagtcctgcatt

SEQ ID NO: 5174881 - DNA, 25 bp, Homo sapien
gattaattattttccctggagctga

SEQ ID NO: 5174882 - DNA, 25 bp, Homo sapien
tattttccctggagctgagtctccc

SEQ ID NO: 5174883 - DNA, 25 bp, Homo sapien
attttccctggagctgagtctcccc

SEQ ID NO: 5174884 - DNA, 25 bp, Homo sapien
ttaattattttccctggagctgagt

SEQ ID NO: 5174885 - DNA, 25 bp, Homo sapien
gcggggtctgttattcccagattcc

SEQ ID NO: 5174886 - DNA, 25 bp, Homo sapien
agaagcggggtctgttattcccaga

SEQ ID NO: 5174887 - DNA, 25 bp, Homo sapien
ggagaagcggggtctgttattccca

SEQ ID NO: 5174888 - DNA, 25 bp, Homo sapien
gaagcggggtctgttattcccagat

SEQ ID NO: 5174889 - DNA, 25 bp, Homo sapien
tctccaccttcagtcccttcggcca

SEQ ID NO: 5174890 - DNA, 25 bp, Homo sapien
tggttgtctttgagtccctggtaat

SEQ ID NO: 5174891 - DNA, 25 bp, Homo sapien
cagtcccttcggccaccttggttgt

SEQ ID NO: 5174892 - DNA, 25 bp, Homo sapien
gagtccctggtaatcatcaaattcc

SEQ ID NO: 5174893 - DNA, 25 bp, Homo sapien
agatgttggacataatgttttccaa

SEQ ID NO: 5174894 - DNA, 25 bp, Homo sapien
gagatgttggacataatgttttcca

SEQ ID NO: 5174895 - DNA, 25 bp, Homo sapien
gttcatcttggaacattacacttac

SEQ ID NO: 5174896 - DNA, 25 bp, Homo sapien
cagttcatcttggaacattacactt

SEQ ID NO: 5174897 - DNA, 25 bp, Homo sapien
agttcatcttggaacattacactta

SEQ ID NO: 5174898 - DNA, 25 bp, Homo sapien
tgccctgtctgtagcactgggaacg

SEQ ID NO: 5174899 - DNA, 25 bp, Homo sapien
gtggccttgcccattgtgccctgtc

SEQ ID NO: 5174900 - DNA, 25 bp, Homo sapien
tactttgtacagtgtggccttgccc

SEQ ID NO: 5174901 - DNA, 25 bp, Homo sapien
tgtagcactgggaacgagcatctca

SEQ ID NO: 5174902 - DNA, 25 bp, Homo sapien
ctgcctgagcaaagccattcgtcat

SEQ ID NO: 5174903 - DNA, 25 bp, Homo sapien
aatctgagaataagtttgttgaacg

SEQ ID NO: 5174904 - DNA, 25 bp, Homo sapien
cccctgagtttgaatactgatgtaa

SEQ ID NO: 5174905 - DNA, 25 bp, Homo sapien
cattcgatagtgtgattctttacac

SEQ ID NO: 5174906 - DNA, 25 bp, Homo sapien
ttgtatgcatcctatagcttagagc

SEQ ID NO: 5174907 - DNA, 25 bp, Homo sapien
tttgttaaacagtctccggtgccca

SEQ ID NO: 5174908 - DNA, 25 bp, Homo sapien
tgctccagggacgttggtcggcaac

SEQ ID NO: 5174909 - DNA, 25 bp, Homo sapien
acggagattcaggagccattggcaa

SEQ ID NO: 5174910 - DNA, 25 bp, Homo sapien
aacgtggtgcactcaaggatcatca

SEQ ID NO: 5174911 - DNA, 25 bp, Homo sapien
tagacctggtgtagaaaagggtgcc

SEQ ID NO: 5174912 - DNA, 25 bp, Homo sapien
taataggcccagtaatttccgtcca

SEQ ID NO: 5174913 - DNA, 25 bp, Homo sapien
gatggaaacatcatatcaggctgct

SEQ ID NO: 5174914 - DNA, 25 bp, Homo sapien
gaagagccatcagtcatcgaatgcc

SEQ ID NO: 5174915 - DNA, 25 bp, Homo sapien
ctatttaccagatttataattcttc

SEQ ID NO: 5174916 - DNA, 25 bp, Homo sapien
gcctgcctttgtcgcttttcttaaa

SEQ ID NO: 5174917 - DNA, 25 bp, Homo sapien
taaaacgccgttctctacatctctt

SEQ ID NO: 5174918 - DNA, 25 bp, Homo sapien
accacgtcttgctcaagactccagg

SEQ ID NO: 5174919 - DNA, 25 bp, Homo sapien
tgactgctgaggttcagtgcttgaa

SEQ ID NO: 5174920 - DNA, 25 bp, Homo sapien
cttcagaccgtttgggtcaacaaca

SEQ ID NO: 5174921 - DNA, 25 bp, Homo sapien
cttgaatcaagggaggtcagaccca

SEQ ID NO: 5174922 - DNA, 25 bp, Homo sapien
gaaaattcagcatgctgtcctgtga

SEQ ID NO: 5174923 - DNA, 25 bp, Homo sapien
tgtagggaagcgaacacagtctgcc

SEQ ID NO: 5174924 - DNA, 25 bp, Homo sapien
ttatcagaccagtaatagaagtgtg

SEQ ID NO: 5174925 - DNA, 25 bp, Homo sapien
tcaggcactggactttttgctcttg

SEQ ID NO: 5174926 - DNA, 25 bp, Homo sapien
gaaattaacaccattatcccagaag

SEQ ID NO: 5174927 - DNA, 25 bp, Homo sapien
tcttcaccgaagtttgtttgttcag

SEQ ID NO: 5174928 - DNA, 25 bp, Homo sapien
gcagccgaagaaatgcctgctcttc

SEQ ID NO: 5174929 - DNA, 25 bp, Homo sapien
gctgtctgtaaatactcatgtttcg

SEQ ID NO: 5174930 - DNA, 25 bp, Homo sapien
tttgttcagtttataatgaccctgg

SEQ ID NO: 5174931 - DNA, 25 bp, Homo sapien
tgatactccacctgcaatggtactg

SEQ ID NO: 5174932 - DNA, 25 bp, Homo sapien
caattccattgagtaccagggtcct

SEQ ID NO: 5174933 - DNA, 25 bp, Homo sapien
ggaggcgaggcccaataaatgtcag

SEQ ID NO: 5174934 - DNA, 25 bp, Homo sapien
ctctgagaagcggaaataatgatac

SEQ ID NO: 5174935 - DNA, 25 bp, Homo sapien
caatttctgccacttgtgctgcttt

SEQ ID NO: 5174936 - DNA, 25 bp, Homo sapien
tttctgccacttgtgctgctttaat

SEQ ID NO: 5174937 - DNA, 25 bp, Homo sapien
acatcaatttctgccacttgtgctg

SEQ ID NO: 5174938 - DNA, 25 bp, Homo sapien
ttcacatcaatttctgccacttgtg

SEQ ID NO: 5174939 - DNA, 25 bp, Homo sapien
tattccaggattcctcagtatttga

SEQ ID NO: 5174940 - DNA, 25 bp, Homo sapien
tttgaacccatgtagattccagaag

SEQ ID NO: 5174941 - DNA, 25 bp, Homo sapien
attccagaagaaacccatactcctt

SEQ ID NO: 5174942 - DNA, 25 bp, Homo sapien
gaagaaacccatactcctttgcagc

SEQ ID NO: 5174943 - DNA, 25 bp, Homo sapien
gactccacagtcataccagggtttt

SEQ ID NO: 5174944 - DNA, 25 bp, Homo sapien
cacagtcataccagggtttttgaaa

SEQ ID NO: 5174945 - DNA, 25 bp, Homo sapien
gctgttaccggacactcttctctga

SEQ ID NO: 5174946 - DNA, 25 bp, Homo sapien
tacatcatgggatctactgctgtta

SEQ ID NO: 5174947 - DNA, 25 bp, Homo sapien
caggtccgtaaagtaagagaggctc

SEQ ID NO: 5174948 - DNA, 25 bp, Homo sapien
gagttctattcatcacacagtggga

SEQ ID NO: 5174949 - DNA, 25 bp, Homo sapien
cttaaggaccagtgcccgagagaga

SEQ ID NO: 5174950 - DNA, 25 bp, Homo sapien
gagagtgactgggaagcatgttcaa

SEQ ID NO: 5174951 - DNA, 25 bp, Homo sapien
aatcaggtcgtgttttcatcattgc

SEQ ID NO: 5174952 - DNA, 25 bp, Homo sapien
gatgggaaaaagtcctctggaagca

SEQ ID NO: 5174953 - DNA, 25 bp, Homo sapien
cagctgggctcacatttctgtactt

SEQ ID NO: 5174954 - DNA, 25 bp, Homo sapien
tacttgcacctaaagcctgcgtggc

SEQ ID NO: 5174955 - DNA, 25 bp, Homo sapien
taatggtactaacctcgagatcacc

SEQ ID NO: 5174956 - DNA, 25 bp, Homo sapien
gcctggtgtgtagtgaatgctcaac

SEQ ID NO: 5174957 - DNA, 25 bp, Homo sapien
tgtggccccaatctaacttataaga

SEQ ID NO: 5174958 - DNA, 25 bp, Homo sapien
tgaagcaaacgaaaagaaggcctcg

SEQ ID NO: 5174959 - DNA, 25 bp, Homo sapien
ttaatctctgatccccatttgcttt

SEQ ID NO: 5174960 - DNA, 25 bp, Homo sapien
agaacttaatctctgatccccattt

SEQ ID NO: 5174961 - DNA, 25 bp, Homo sapien
atctctgatccccatttgctttctg

SEQ ID NO: 5174962 - DNA, 25 bp, Homo sapien
tctgatccccatttgctttctgttc

SEQ ID NO: 5174963 - DNA, 25 bp, Homo sapien
tcttagcacccatgtctgggaatgc

SEQ ID NO: 5174964 - DNA, 25 bp, Homo sapien
caaagttagactcttagcacccatg

SEQ ID NO: 5174965 - DNA, 25 bp, Homo sapien
tcagagatccaaagttagactctta

SEQ ID NO: 5174966 - DNA, 25 bp, Homo sapien
atgtctgggaatgcaatggcaatct

SEQ ID NO: 5174967 - DNA, 25 bp, Homo sapien
aggagtggccccaacagcacagtgt

SEQ ID NO: 5174968 - DNA, 25 bp, Homo sapien
caggagtggccccaacagcacagtg

SEQ ID NO: 5174969 - DNA, 25 bp, Homo sapien
gccaggagtggccccaacagcacag

SEQ ID NO: 5174970 - DNA, 25 bp, Homo sapien
ccaggagtggccccaacagcacagt

SEQ ID NO: 5174971 - DNA, 25 bp, Homo sapien
cagtcttgaatactgggcctcggta

SEQ ID NO: 5174972 - DNA, 25 bp, Homo sapien
cggtaaatactagcaatggagccat

SEQ ID NO: 5174973 - DNA, 25 bp, Homo sapien
caacagggatcttagcagtcttgaa

SEQ ID NO: 5174974 - DNA, 25 bp, Homo sapien
taataacatactgggtggttaccag

SEQ ID NO: 5174975 - DNA, 25 bp, Homo sapien
aatggagaggagtccctaaagtgga

SEQ ID NO: 5174976 - DNA, 25 bp, Homo sapien
ctgcacgacatggtctaggaatgga

SEQ ID NO: 5174977 - DNA, 25 bp, Homo sapien
agaggagtccctaaagtggaagagt

SEQ ID NO: 5174978 - DNA, 25 bp, Homo sapien
cacgacatggtctaggaatggagag

SEQ ID NO: 5174979 - DNA, 25 bp, Homo sapien
tcagggctggcaccacatcaccttt

SEQ ID NO: 5174980 - DNA, 25 bp, Homo sapien
agggctggcaccacatcacctttct

SEQ ID NO: 5174981 - DNA, 25 bp, Homo sapien
atcacctttcttaggggccaaccag

SEQ ID NO: 5174982 - DNA, 25 bp, Homo sapien
cacatcacctttcttaggggccaac

SEQ ID NO: 5174983 - DNA, 25 bp, Homo sapien
cctatgcctatggccacccctgcca

SEQ ID NO: 5174984 - DNA, 25 bp, Homo sapien
ctatgcctatggccacccctgccac

SEQ ID NO: 5174985 - DNA, 25 bp, Homo sapien
tatgcctatggccacccctgccacc

SEQ ID NO: 5174986 - DNA, 25 bp, Homo sapien
atgcctatggccacccctgccaccg

SEQ ID NO: 5174987 - DNA, 25 bp, Homo sapien
ggtcgtcgtgaggaatggctgcagc

SEQ ID NO: 5174988 - DNA, 25 bp, Homo sapien
cagatcctggccaggtggtgtgggt

SEQ ID NO: 5174989 - DNA, 25 bp, Homo sapien
aacctgggtgaggtcgtcgtgagga

SEQ ID NO: 5174990 - DNA, 25 bp, Homo sapien
gcagatcctggccaggtggtgtggg

SEQ ID NO: 5174991 - DNA, 25 bp, Homo sapien
tcctggcatgcctgcaccaggatca

SEQ ID NO: 5174992 - DNA, 25 bp, Homo sapien
ctggttccccatccaagtcgtcgct

SEQ ID NO: 5174993 - DNA, 25 bp, Homo sapien
tccaagtcgtcgctacccaccacct

SEQ ID NO: 5174994 - DNA, 25 bp, Homo sapien
ccatccaagtcgtcgctacccacca

SEQ ID NO: 5174995 - DNA, 25 bp, Homo sapien
tcctgatctgcactcgcttctgccc

SEQ ID NO: 5174996 - DNA, 25 bp, Homo sapien
tggtggtcgccgctggccagctctg

SEQ ID NO: 5174997 - DNA, 25 bp, Homo sapien
ttcctgatctgcactcgcttctgcc

SEQ ID NO: 5174998 - DNA, 25 bp, Homo sapien
cgccgctggccagctctggcaccag

SEQ ID NO: 5174999 - DNA, 25 bp, Homo sapien
ttctcatgtcagttatccttgaaca

SEQ ID NO: 5175000 - DNA, 25 bp, Homo sapien
tctgcagttttttgggatctgagct

SEQ ID NO: 5175001 - DNA, 25 bp, Homo sapien
ttgttcatggaacatcatcttttaa

SEQ ID NO: 5175002 - DNA, 25 bp, Homo sapien
gactccgtgacagtgagtgtgcaga

SEQ ID NO: 5175003 - DNA, 25 bp, Homo sapien
tcccacggtcttcaaacgtgaactg

SEQ ID NO: 5175004 - DNA, 25 bp, Homo sapien
ttcaaacgtgaactgaaacagcttc

SEQ ID NO: 5175005 - DNA, 25 bp, Homo sapien
caaacgtgaactgaaacagcttctc

SEQ ID NO: 5175006 - DNA, 25 bp, Homo sapien
gtcttcaaacgtgaactgaaacagc

SEQ ID NO: 5175007 - DNA, 25 bp, Homo sapien
caaatacccatcaagtcatgaatgg

SEQ ID NO: 5175008 - DNA, 25 bp, Homo sapien
tacgagttgtcctgttgggaacaca

SEQ ID NO: 5175009 - DNA, 25 bp, Homo sapien
tacatggaatgtgcacaacaggttt

SEQ ID NO: 5175010 - DNA, 25 bp, Homo sapien
caaaacttgatacaagggtacatac

SEQ ID NO: 5175011 - DNA, 25 bp, Homo sapien
ctcagacatgtgagtaggatgctca

SEQ ID NO: 5175012 - DNA, 25 bp, Homo sapien
cctcggacagagtcttggcattcac

SEQ ID NO: 5175013 - DNA, 25 bp, Homo sapien
tggcattcactagatggtctccctc

SEQ ID NO: 5175014 - DNA, 25 bp, Homo sapien
ctaggtaaagccctcggacagagtc

SEQ ID NO: 5175015 - DNA, 25 bp, Homo sapien
tcccactggtaaaggtcagtgcctt

SEQ ID NO: 5175016 - DNA, 25 bp, Homo sapien
ctgtcttctggggatacaacctgtt

SEQ ID NO: 5175017 - DNA, 25 bp, Homo sapien
ttgtcccactggtaaaggtcagtgc

SEQ ID NO: 5175018 - DNA, 25 bp, Homo sapien
tcttctggggatacaacctgtttgt

SEQ ID NO: 5175019 - DNA, 25 bp, Homo sapien
ctccctctcccaagtgtctgtgtgg

SEQ ID NO: 5175020 - DNA, 25 bp, Homo sapien
tctcccaagtgtctgtgtggctgaa

SEQ ID NO: 5175021 - DNA, 25 bp, Homo sapien
agataataaactgcaaagcaaaaca

SEQ ID NO: 5175022 - DNA, 25 bp, Homo sapien
tctgtgtggctgaaggcacagataa

SEQ ID NO: 5175023 - DNA, 25 bp, Homo sapien
aacatccaccaaaattcttcctatg

SEQ ID NO: 5175024 - DNA, 25 bp, Homo sapien
cttcctatggctttggcatcaagtc

SEQ ID NO: 5175025 - DNA, 25 bp, Homo sapien
tggctttggcatcaagtcccttgga

SEQ ID NO: 5175026 - DNA, 25 bp, Homo sapien
agcactgagtaatgacccaacatcc

SEQ ID NO: 5175027 - DNA, 25 bp, Homo sapien
agatgaggagggcctgagtcagcat

SEQ ID NO: 5175028 - DNA, 25 bp, Homo sapien
tacgtggaataattactgccctggg

SEQ ID NO: 5175029 - DNA, 25 bp, Homo sapien
aatcagatacgctgggtttcttcag

SEQ ID NO: 5175030 - DNA, 25 bp, Homo sapien
gataacaacactctgggtgcctcag

SEQ ID NO: 5175031 - DNA, 25 bp, Homo sapien
ggtgcctcagtgctgttacgtggaa

SEQ ID NO: 5175032 - DNA, 25 bp, Homo sapien
ccaaaggggaattatcagctaaagc

SEQ ID NO: 5175033 - DNA, 25 bp, Homo sapien
ctttgataggatctgcttacttgct

SEQ ID NO: 5175034 - DNA, 25 bp, Homo sapien
gatctgcttacttgctctagttccc

SEQ ID NO: 5175035 - DNA, 25 bp, Homo sapien
gataggatctgcttacttgctctag

SEQ ID NO: 5175036 - DNA, 25 bp, Homo sapien
ctgcatcctttaaatcaataatttt

SEQ ID NO: 5175037 - DNA, 25 bp, Homo sapien
atctgcatcctttaaatcaataatt

SEQ ID NO: 5175038 - DNA, 25 bp, Homo sapien
tctgcatcctttaaatcaataattt

SEQ ID NO: 5175039 - DNA, 25 bp, Homo sapien
tgaagtagaattgattgacacaggc

SEQ ID NO: 5175040 - DNA, 25 bp, Homo sapien
caggccctgggtataagtgacaaag

SEQ ID NO: 5175041 - DNA, 25 bp, Homo sapien
ctgaagtagaattgattgacacagg

SEQ ID NO: 5175042 - DNA, 25 bp, Homo sapien
aatgttatattcctctccaatctct

SEQ ID NO: 5175043 - DNA, 25 bp, Homo sapien
tgaaaaccagctaagtgtccaacaa

SEQ ID NO: 5175044 - DNA, 25 bp, Homo sapien
tataagctatgaggcaatggagagg

SEQ ID NO: 5175045 - DNA, 25 bp, Homo sapien
tgaagcaaaagccatgctcacatgg

SEQ ID NO: 5175046 - DNA, 25 bp, Homo sapien
tgtgtttcagacttcagggcaatta

SEQ ID NO: 5175047 - DNA, 25 bp, Homo sapien
tgctcgacaatgagaagcaacagcc

SEQ ID NO: 5175048 - DNA, 25 bp, Homo sapien
attacaaattagagcactgacagcc

SEQ ID NO: 5175049 - DNA, 25 bp, Homo sapien
ccactctctcattacaaattagagc

SEQ ID NO: 5175050 - DNA, 25 bp, Homo sapien
ggcggacacagtctgcctgcagacc

SEQ ID NO: 5175051 - DNA, 25 bp, Homo sapien
tcagtcaatcttagatggctgagtc

SEQ ID NO: 5175052 - DNA, 25 bp, Homo sapien
attaggacccaaagtctactgttct

SEQ ID NO: 5175053 - DNA, 25 bp, Homo sapien
tgtcactcaggtaatcgtcataata

SEQ ID NO: 5175054 - DNA, 25 bp, Homo sapien
tggtattctacggtgcatatgtaca

SEQ ID NO: 5175055 - DNA, 25 bp, Homo sapien
caactgttaattgtaggttcaaggg

SEQ ID NO: 5175056 - DNA, 25 bp, Homo sapien
gagacctatcattaaaagtcacctg

SEQ ID NO: 5175057 - DNA, 25 bp, Homo sapien
cacagtcttaaaacaacgccgggcg

SEQ ID NO: 5175058 - DNA, 25 bp, Homo sapien
tgtttgtcactatttcccactggtg

SEQ ID NO: 5175059 - DNA, 25 bp, Homo sapien
ccactggtgctagcaggctattttc

SEQ ID NO: 5175060 - DNA, 25 bp, Homo sapien
tgcattgggctcaggaagtcgttta

SEQ ID NO: 5175061 - DNA, 25 bp, Homo sapien
cacagtatgcttcagttagttttct

SEQ ID NO: 5175062 - DNA, 25 bp, Homo sapien
tgtgggcttgcattgggctcaggaa

SEQ ID NO: 5175063 - DNA, 25 bp, Homo sapien
tgggctcaggaagtcgtttattagg

SEQ ID NO: 5175064 - DNA, 25 bp, Homo sapien
ttcttagtgcacttccagtccttaa

SEQ ID NO: 5175065 - DNA, 25 bp, Homo sapien
tccttaaaagcaagtgccttctgtg

SEQ ID NO: 5175066 - DNA, 25 bp, Homo sapien
tttcttagtgcacttccagtcctta

SEQ ID NO: 5175067 - DNA, 25 bp, Homo sapien
gctgttgtcttaattgagaggctag

SEQ ID NO: 5175068 - DNA, 25 bp, Homo sapien
tttccatgcaatctcaaacaaagtt

SEQ ID NO: 5175069 - DNA, 25 bp, Homo sapien
taattgagaggctagatttccatgc

SEQ ID NO: 5175070 - DNA, 25 bp, Homo sapien
gatgtcctatctattctcttgtaca

SEQ ID NO: 5175071 - DNA, 25 bp, Homo sapien
gcaaatcctgagcatgcatttcaat

SEQ ID NO: 5175072 - DNA, 25 bp, Homo sapien
tatgcctcttgccttttggaattac

SEQ ID NO: 5175073 - DNA, 25 bp, Homo sapien
tatgaaagtcttgtggtcttggcat

SEQ ID NO: 5175074 - DNA, 25 bp, Homo sapien
cagctatgcctcttgccttttggaa

SEQ ID NO: 5175075 - DNA, 25 bp, Homo sapien
tgcgatgctttctgctaatttaaat

SEQ ID NO: 5175076 - DNA, 25 bp, Homo sapien
gctaatttaaatatcaaattgggca

SEQ ID NO: 5175077 - DNA, 25 bp, Homo sapien
gctttctgctaatttaaatatcaaa

SEQ ID NO: 5175078 - DNA, 25 bp, Homo sapien
agtttcattactgcgatgctttctg

SEQ ID NO: 5175079 - DNA, 25 bp, Homo sapien
ccaatatctgtgagaatgataacta

SEQ ID NO: 5175080 - DNA, 25 bp, Homo sapien
tgataactaagactaaaggactaga

SEQ ID NO: 5175081 - DNA, 25 bp, Homo sapien
aatatttttcaagccaatatctgtg

SEQ ID NO: 5175082 - DNA, 25 bp, Homo sapien
gactaaaggactagaaagatcaagg

SEQ ID NO: 5175083 - DNA, 25 bp, Homo sapien
tgtcagctatggtgcctgcagacca

SEQ ID NO: 5175084 - DNA, 25 bp, Homo sapien
cagctatggtgcctgcagaccatga

SEQ ID NO: 5175085 - DNA, 25 bp, Homo sapien
gagtgtcagctatggtgcctgcaga

SEQ ID NO: 5175086 - DNA, 25 bp, Homo sapien
tatctgagtgtcagctatggtgcct

SEQ ID NO: 5175087 - DNA, 25 bp, Homo sapien
tgtcaactgtttgccgatgctgtcc

SEQ ID NO: 5175088 - DNA, 25 bp, Homo sapien
catcttctggctctcgtttggtgga

SEQ ID NO: 5175089 - DNA, 25 bp, Homo sapien
catacaaattagacctgggctgctg

SEQ ID NO: 5175090 - DNA, 25 bp, Homo sapien
gatgctgtccctttttgattactga

SEQ ID NO: 5175091 - DNA, 25 bp, Homo sapien
acatatttaccaacagagaactgcc

SEQ ID NO: 5175092 - DNA, 25 bp, Homo sapien
catatttaccaacagagaactgcca

SEQ ID NO: 5175093 - DNA, 25 bp, Homo sapien
atatttaccaacagagaactgccaa

SEQ ID NO: 5175094 - DNA, 25 bp, Homo sapien
ttaccaacagagaactgccaaaatg

SEQ ID NO: 5175095 - DNA, 25 bp, Homo sapien
taaccgtggtgattagcactgacaa

SEQ ID NO: 5175096 - DNA, 25 bp, Homo sapien
tgacgattttgtgagtcaactgaat

SEQ ID NO: 5175097 - DNA, 25 bp, Homo sapien
aaggatgcattaggcttgacgattt

SEQ ID NO: 5175098 - DNA, 25 bp, Homo sapien
tgaattccagctaccacagatgtat

SEQ ID NO: 5175099 - DNA, 25 bp, Homo sapien
tggaccactccccgactaatattag

SEQ ID NO: 5175100 - DNA, 25 bp, Homo sapien
ccactccccgactaatattagcttt

SEQ ID NO: 5175101 - DNA, 25 bp, Homo sapien
gaccactccccgactaatattagct

SEQ ID NO: 5175102 - DNA, 25 bp, Homo sapien
ggaccactccccgactaatattagc

SEQ ID NO: 5175103 - DNA, 25 bp, Homo sapien
taatggcagagacaagcaggtgttg

SEQ ID NO: 5175104 - DNA, 25 bp, Homo sapien
tgaagattctgattgtgactaacca

SEQ ID NO: 5175105 - DNA, 25 bp, Homo sapien
cctggacagtcaaaaagagaagcaa

SEQ ID NO: 5175106 - DNA, 25 bp, Homo sapien
cagagcaagatatgggtgggaacct

SEQ ID NO: 5175107 - DNA, 25 bp, Homo sapien
tctaagtccttgtacctatcatgga

SEQ ID NO: 5175108 - DNA, 25 bp, Homo sapien
tagcatggaattagggagctccacc

SEQ ID NO: 5175109 - DNA, 25 bp, Homo sapien
tatagtgccgcatactcacaatgaa

SEQ ID NO: 5175110 - DNA, 25 bp, Homo sapien
ccttataacaggatagtggctaaca

SEQ ID NO: 5175111 - DNA, 25 bp, Homo sapien
acaacctgctcttgtggaaactaat

SEQ ID NO: 5175112 - DNA, 25 bp, Homo sapien
gaaagtttaagattgggcaggtgca

SEQ ID NO: 5175113 - DNA, 25 bp, Homo sapien
tcccttgaaagaaagaactcactcc

SEQ ID NO: 5175114 - DNA, 25 bp, Homo sapien
gattccactcatggaagataatgga

SEQ ID NO: 5175115 - DNA, 25 bp, Homo sapien
cagtaagtatattgactcattgcat

SEQ ID NO: 5175116 - DNA, 25 bp, Homo sapien
agcgcagtgttcagtctcttctgca

SEQ ID NO: 5175117 - DNA, 25 bp, Homo sapien
tctcttcagagcctagcgcagtgtt

SEQ ID NO: 5175118 - DNA, 25 bp, Homo sapien
caatctcagtaagtatattgactca

SEQ ID NO: 5175119 - DNA, 25 bp, Homo sapien
tctgtgaagtataagttggtgcttc

SEQ ID NO: 5175120 - DNA, 25 bp, Homo sapien
gctctgtgaagtataagttggtgct

SEQ ID NO: 5175121 - DNA, 25 bp, Homo sapien
cttagctctgtgaagtataagttgg

SEQ ID NO: 5175122 - DNA, 25 bp, Homo sapien
tagctctgtgaagtataagttggtg

SEQ ID NO: 5175123 - DNA, 25 bp, Homo sapien
ctgctgacaagaattaactcgctta

SEQ ID NO: 5175124 - DNA, 25 bp, Homo sapien
gacaagaattaactcgcttaaacac

SEQ ID NO: 5175125 - DNA, 25 bp, Homo sapien
ggcatcctgctgacaagaattaact

SEQ ID NO: 5175126 - DNA, 25 bp, Homo sapien
gggcatcctgctgacaagaattaac

SEQ ID NO: 5175127 - DNA, 25 bp, Homo sapien
ttattgataattgccaagacatgga

SEQ ID NO: 5175128 - DNA, 25 bp, Homo sapien
taaagccttttattagtacagccat

SEQ ID NO: 5175129 - DNA, 25 bp, Homo sapien
tgaggagacatctgcagtcctgtgt

SEQ ID NO: 5175130 - DNA, 25 bp, Homo sapien
caggagaaataccttcaagaaacct

SEQ ID NO: 5175131 - DNA, 25 bp, Homo sapien
actcagtagtcttaataattcttca

SEQ ID NO: 5175132 - DNA, 25 bp, Homo sapien
gatccttgtagggatctttcctgaa

SEQ ID NO: 5175133 - DNA, 25 bp, Homo sapien
taattttaaatgcaacgtggatcct

SEQ ID NO: 5175134 - DNA, 25 bp, Homo sapien
cattatttctcattagaggagttct

SEQ ID NO: 5175135 - DNA, 25 bp, Homo sapien
ggcatgcccgtgattgctttcctcg

SEQ ID NO: 5175136 - DNA, 25 bp, Homo sapien
gaaagcactctttaggcggcaaaaa

SEQ ID NO: 5175137 - DNA, 25 bp, Homo sapien
gaaagagctctaaaatgtcctggcc

SEQ ID NO: 5175138 - DNA, 25 bp, Homo sapien
ggaaactcattcctgcgagtctcag

SEQ ID NO: 5175139 - DNA, 25 bp, Homo sapien
aaaatgatactcaagaacaatggag

SEQ ID NO: 5175140 - DNA, 25 bp, Homo sapien
gatactcaagaacaatggagaagct

SEQ ID NO: 5175141 - DNA, 25 bp, Homo sapien
atgatactcaagaacaatggagaag

SEQ ID NO: 5175142 - DNA, 25 bp, Homo sapien
catctcagtagatcctgggatcaca

SEQ ID NO: 5175143 - DNA, 25 bp, Homo sapien
ctctgatatgtttggaaatccaggt

SEQ ID NO: 5175144 - DNA, 25 bp, Homo sapien
gatatgtttggaaatccaggtttca

SEQ ID NO: 5175145 - DNA, 25 bp, Homo sapien
tgatatgtttggaaatccaggtttc

SEQ ID NO: 5175146 - DNA, 25 bp, Homo sapien
tctgatatgtttggaaatccaggtt

SEQ ID NO: 5175147 - DNA, 25 bp, Homo sapien
gacttatattcccatgttgttccct

SEQ ID NO: 5175148 - DNA, 25 bp, Homo sapien
ccctttgtccattcagaagagtctg

SEQ ID NO: 5175149 - DNA, 25 bp, Homo sapien
aagagggtgccgttgctagtctgac

SEQ ID NO: 5175150 - DNA, 25 bp, Homo sapien
tctggtttgtcctatagggcagtga

SEQ ID NO: 5175151 - DNA, 25 bp, Homo sapien
tgtgtaatttagctttgagcttact

SEQ ID NO: 5175152 - DNA, 25 bp, Homo sapien
aagaatgttctgtgcagtcttttct

SEQ ID NO: 5175153 - DNA, 25 bp, Homo sapien
tagctttgagcttactttttacttg

SEQ ID NO: 5175154 - DNA, 25 bp, Homo sapien
tttttacttgagaaagaatgttctg

SEQ ID NO: 5175155 - DNA, 25 bp, Homo sapien
ggctctcacataatcagaacacaga

SEQ ID NO: 5175156 - DNA, 25 bp, Homo sapien
tataagaccagagctagggaatggg

SEQ ID NO: 5175157 - DNA, 25 bp, Homo sapien
cctgtcctggctctcacataatcag

SEQ ID NO: 5175158 - DNA, 25 bp, Homo sapien
tacatctgggtacacatgcatggtc

SEQ ID NO: 5175159 - DNA, 25 bp, Homo sapien
cagcacgatcaaggtgtggggcaca

SEQ ID NO: 5175160 - DNA, 25 bp, Homo sapien
caaggtgtggggcacaagtccacta

SEQ ID NO: 5175161 - DNA, 25 bp, Homo sapien
agtccactagttacagttatgcatc

SEQ ID NO: 5175162 - DNA, 25 bp, Homo sapien
gcagaaccttgccctgaactgacat

SEQ ID NO: 5175163 - DNA, 25 bp, Homo sapien
cacctctctagacacttgctggtgt

SEQ ID NO: 5175164 - DNA, 25 bp, Homo sapien
tgtgtagatggatggcgttaatttc

SEQ ID NO: 5175165 - DNA, 25 bp, Homo sapien
gagatctcgtaatgctgtcctgaac

SEQ ID NO: 5175166 - DNA, 25 bp, Homo sapien
ggcgttaatttcagattgggagatc

SEQ ID NO: 5175167 - DNA, 25 bp, Homo sapien
cgtcttccacgacactgctatcggg

SEQ ID NO: 5175168 - DNA, 25 bp, Homo sapien
gtaatgctaacttccctggccagag

SEQ ID NO: 5175169 - DNA, 25 bp, Homo sapien
ggcttcagacccaaatcgtcttcca

SEQ ID NO: 5175170 - DNA, 25 bp, Homo sapien
gagttgctaccctttggcttcagac

SEQ ID NO: 5175171 - DNA, 25 bp, Homo sapien
aaacataagctgtagctttggaagc

SEQ ID NO: 5175172 - DNA, 25 bp, Homo sapien
gtgatgcctgcacagtgccagacca

SEQ ID NO: 5175173 - DNA, 25 bp, Homo sapien
tattcgttgagttcacttaaattgt

SEQ ID NO: 5175174 - DNA, 25 bp, Homo sapien
ctgcacagtgccagaccaacaggtc

SEQ ID NO: 5175175 - DNA, 25 bp, Homo sapien
tgcctgcacagtgccagaccaacag

SEQ ID NO: 5175176 - DNA, 25 bp, Homo sapien
ttatttatcacacccaccagtgcta

SEQ ID NO: 5175177 - DNA, 25 bp, Homo sapien
tatcacacccaccagtgctaaagac

SEQ ID NO: 5175178 - DNA, 25 bp, Homo sapien
cagtgctaaagactctgacttctcc

SEQ ID NO: 5175179 - DNA, 25 bp, Homo sapien
cacccaccagtgctaaagactctga

SEQ ID NO: 5175180 - DNA, 25 bp, Homo sapien
ctaacaaagcgaagagacaacctac

SEQ ID NO: 5175181 - DNA, 25 bp, Homo sapien
gaatccatacctctgcagtcaattg

SEQ ID NO: 5175182 - DNA, 25 bp, Homo sapien
cattggaaaaactacatgacactgg

SEQ ID NO: 5175183 - DNA, 25 bp, Homo sapien
actatcctaaaacgtatgtgaacca

SEQ ID NO: 5175184 - DNA, 25 bp, Homo sapien
atacacccatgttttagaattaatc

SEQ ID NO: 5175185 - DNA, 25 bp, Homo sapien
caatacacccatgttttagaattaa

SEQ ID NO: 5175186 - DNA, 25 bp, Homo sapien
ccaatacacccatgttttagaatta

SEQ ID NO: 5175187 - DNA, 25 bp, Homo sapien
acacccatgttttagaattaatcat

SEQ ID NO: 5175188 - DNA, 25 bp, Homo sapien
gactggtccacatctactgcagaaa

SEQ ID NO: 5175189 - DNA, 25 bp, Homo sapien
ctggtccacatctactgcagaaagt

SEQ ID NO: 5175190 - DNA, 25 bp, Homo sapien
aaagactggtccacatctactgcag

SEQ ID NO: 5175191 - DNA, 25 bp, Homo sapien
tccaaaagactggtccacatctact

SEQ ID NO: 5175192 - DNA, 25 bp, Homo sapien
tctgatttgccagtttgaaccagtg

SEQ ID NO: 5175193 - DNA, 25 bp, Homo sapien
cctcttggtagacaatatcctgtaa

SEQ ID NO: 5175194 - DNA, 25 bp, Homo sapien
cttttggctttgcatgagcctcttg

SEQ ID NO: 5175195 - DNA, 25 bp, Homo sapien
tgaaccagtgtgctagctaactcat

SEQ ID NO: 5175196 - DNA, 25 bp, Homo sapien
taagtggccgctcattgtgagaaac

SEQ ID NO: 5175197 - DNA, 25 bp, Homo sapien
catttcgagtacgtttgaaagacag

SEQ ID NO: 5175198 - DNA, 25 bp, Homo sapien
gacagaacatctaaacgtgcggtgg

SEQ ID NO: 5175199 - DNA, 25 bp, Homo sapien
cagatagcctaggaagttttaagtg

SEQ ID NO: 5175200 - DNA, 25 bp, Homo sapien
gagcgtggaagataatacccgtgtg

SEQ ID NO: 5175201 - DNA, 25 bp, Homo sapien
taatacccgtgtgggcactgacaaa

SEQ ID NO: 5175202 - DNA, 25 bp, Homo sapien
aagataatacccgtgtgggcactga

SEQ ID NO: 5175203 - DNA, 25 bp, Homo sapien
cctgtgtatggagcgtggaagataa

SEQ ID NO: 5175204 - DNA, 25 bp, Homo sapien
tcaacttgggagatgtggtaactga

SEQ ID NO: 5175205 - DNA, 25 bp, Homo sapien
tagagataatcctgatagagctggc

SEQ ID NO: 5175206 - DNA, 25 bp, Homo sapien
gagaggcactaaaatcaaggtcccg

SEQ ID NO: 5175207 - DNA, 25 bp, Homo sapien
tggcagagaagtactcatagctcca

SEQ ID NO: 5175208 - DNA, 25 bp, Homo sapien
tggccagggtactggcagccctcct

SEQ ID NO: 5175209 - DNA, 25 bp, Homo sapien
ctctgtgagtggttatggcctccca

SEQ ID NO: 5175210 - DNA, 25 bp, Homo sapien
tgataaactggccataccttggctc

SEQ ID NO: 5175211 - DNA, 25 bp, Homo sapien
tgtggctgggcaacagtctgtcctt

SEQ ID NO: 5175212 - DNA, 25 bp, Homo sapien
tggatataagacaactgcttaaaac

SEQ ID NO: 5175213 - DNA, 25 bp, Homo sapien
ggcagggggatttgtacatagtatc

SEQ ID NO: 5175214 - DNA, 25 bp, Homo sapien
tagtatctgtgaattagagttgtca

SEQ ID NO: 5175215 - DNA, 25 bp, Homo sapien
gagttgtcactataaattggatata

SEQ ID NO: 5175216 - DNA, 25 bp, Homo sapien
tttcgctctgggcaaagctggctta

SEQ ID NO: 5175217 - DNA, 25 bp, Homo sapien
gggcaaagctggcttattgtcaaat

SEQ ID NO: 5175218 - DNA, 25 bp, Homo sapien
gctggcttattgtcaaatccaacca

SEQ ID NO: 5175219 - DNA, 25 bp, Homo sapien
gcaaagctggcttattgtcaaatcc

SEQ ID NO: 5175220 - DNA, 25 bp, Homo sapien
gccgacatctcatgtggacacccat

SEQ ID NO: 5175221 - DNA, 25 bp, Homo sapien
cagaaagaatgccaagatatcattt

SEQ ID NO: 5175222 - DNA, 25 bp, Homo sapien
tgtccattgaagagatcagtaagaa

SEQ ID NO: 5175223 - DNA, 25 bp, Homo sapien
catggccgatgggaattgtccattg

SEQ ID NO: 5175224 - DNA, 25 bp, Homo sapien
catttactaggccactacctttggc

SEQ ID NO: 5175225 - DNA, 25 bp, Homo sapien
tatgttcaatcaacagtctctggac

SEQ ID NO: 5175226 - DNA, 25 bp, Homo sapien
tggctttatcatatacagtagtatg

SEQ ID NO: 5175227 - DNA, 25 bp, Homo sapien
ttacatgtccacatttactaggcca

SEQ ID NO: 5175228 - DNA, 25 bp, Homo sapien
gactccctggctgccaatctttcat

SEQ ID NO: 5175229 - DNA, 25 bp, Homo sapien
gaagcttgggccacttctacccata

SEQ ID NO: 5175230 - DNA, 25 bp, Homo sapien
tctcatagataacagtgaacccttg

SEQ ID NO: 5175231 - DNA, 25 bp, Homo sapien
gatttgaaagctggcatacggctgt

SEQ ID NO: 5175232 - DNA, 25 bp, Homo sapien
gaagccttatgtgagtaattgtcat

SEQ ID NO: 5175233 - DNA, 25 bp, Homo sapien
gcaccatgaagccttatgtgagtaa

SEQ ID NO: 5175234 - DNA, 25 bp, Homo sapien
catgaagccttatgtgagtaattgt

SEQ ID NO: 5175235 - DNA, 25 bp, Homo sapien
ccatgaagccttatgtgagtaattg

SEQ ID NO: 5175236 - DNA, 25 bp, Homo sapien
cgtggtaagctattttcagaattcc

SEQ ID NO: 5175237 - DNA, 25 bp, Homo sapien
agctattttcagaattccaggtcat

SEQ ID NO: 5175238 - DNA, 25 bp, Homo sapien
taagctattttcagaattccaggtc

SEQ ID NO: 5175239 - DNA, 25 bp, Homo sapien
ggtaagctattttcagaattccagg

SEQ ID NO: 5175240 - DNA, 25 bp, Homo sapien
ttttactacttcaataatatagccc

SEQ ID NO: 5175241 - DNA, 25 bp, Homo sapien
cttcttttactacttcaataatata

SEQ ID NO: 5175242 - DNA, 25 bp, Homo sapien
tcttttactacttcaataatatagc

SEQ ID NO: 5175243 - DNA, 25 bp, Homo sapien
taatcttcttttactacttcaataa

SEQ ID NO: 5175244 - DNA, 25 bp, Homo sapien
gtacttcagagggataaatacaatg

SEQ ID NO: 5175245 - DNA, 25 bp, Homo sapien
tacttcagagggataaatacaatga

SEQ ID NO: 5175246 - DNA, 25 bp, Homo sapien
ggattggtcatattaggcccactct

SEQ ID NO: 5175247 - DNA, 25 bp, Homo sapien
tgtcaatattcaaagttatctcctg

SEQ ID NO: 5175248 - DNA, 25 bp, Homo sapien
taattacctcaatggccctattgca

SEQ ID NO: 5175249 - DNA, 25 bp, Homo sapien
gcctaagatactgtactcagggcct

SEQ ID NO: 5175250 - DNA, 25 bp, Homo sapien
gctaatgaactgttaaagacgagaa

SEQ ID NO: 5175251 - DNA, 25 bp, Homo sapien
aactgttaaagacgagaattagcat

SEQ ID NO: 5175252 - DNA, 25 bp, Homo sapien
tgaactgttaaagacgagaattagc

SEQ ID NO: 5175253 - DNA, 25 bp, Homo sapien
taatgaactgttaaagacgagaatt

SEQ ID NO: 5175254 - DNA, 25 bp, Homo sapien
taagtctctatcaccacaatcttgc

SEQ ID NO: 5175255 - DNA, 25 bp, Homo sapien
caacccacaggttccttgaggtcta

SEQ ID NO: 5175256 - DNA, 25 bp, Homo sapien
tgaggtctactttggcgtcaatggg

SEQ ID NO: 5175257 - DNA, 25 bp, Homo sapien
ttgctaagggttcccagatccttca

SEQ ID NO: 5175258 - DNA, 25 bp, Homo sapien
ctagtgtgattcttttgatacttgc

SEQ ID NO: 5175259 - DNA, 25 bp, Homo sapien
agtgtgattcttttgatacttgcat

SEQ ID NO: 5175260 - DNA, 25 bp, Homo sapien
catataaaagtctcccaacgtgttt

SEQ ID NO: 5175261 - DNA, 25 bp, Homo sapien
tgcatataaaagtctcccaacgtgt

SEQ ID NO: 5175262 - DNA, 25 bp, Homo sapien
ttcacttagttctgtgtatgaggac

SEQ ID NO: 5175263 - DNA, 25 bp, Homo sapien
tagattcattaccttgaagacgagc

SEQ ID NO: 5175264 - DNA, 25 bp, Homo sapien
ctgaacaaaaccacgtgcactagat

SEQ ID NO: 5175265 - DNA, 25 bp, Homo sapien
taccttgaagacgagcaaaatccat

SEQ ID NO: 5175266 - DNA, 25 bp, Homo sapien
aaccacgtgcactagattcattacc

SEQ ID NO: 5175267 - DNA, 25 bp, Homo sapien
gcagcttgggcttcaatgtcttgta

SEQ ID NO: 5175268 - DNA, 25 bp, Homo sapien
tgcaccggttaccattttagcccat

SEQ ID NO: 5175269 - DNA, 25 bp, Homo sapien
cactgtgcaccggttaccattttag

SEQ ID NO: 5175270 - DNA, 25 bp, Homo sapien
aatacttattaattctatgctgaat

SEQ ID NO: 5175271 - DNA, 25 bp, Homo sapien
ttaggtgtatcctacttgtagctca

SEQ ID NO: 5175272 - DNA, 25 bp, Homo sapien
cccagttaacctaactgcttttgag

SEQ ID NO: 5175273 - DNA, 25 bp, Homo sapien
cttacaatgtgtcttgatgtgggtc

SEQ ID NO: 5175274 - DNA, 25 bp, Homo sapien
gtacttcttagattggatttgtaaa

SEQ ID NO: 5175275 - DNA, 25 bp, Homo sapien
cccatttcctctatttttaaatgtg

SEQ ID NO: 5175276 - DNA, 25 bp, Homo sapien
cgcacccggcccatttcctctattt

SEQ ID NO: 5175277 - DNA, 25 bp, Homo sapien
ccgcacccggcccatttcctctatt

SEQ ID NO: 5175278 - DNA, 25 bp, Homo sapien
catttcctctatttttaaatgtgtt

SEQ ID NO: 5175279 - DNA, 25 bp, Homo sapien
agattcattaaactaactgctgcca

SEQ ID NO: 5175280 - DNA, 25 bp, Homo sapien
gctgtgtagtgtccaagattcatta

SEQ ID NO: 5175281 - DNA, 25 bp, Homo sapien
ctgctgtgtagtgtccaagattcat

SEQ ID NO: 5175282 - DNA, 25 bp, Homo sapien
ttaaactaactgctgccaagttctt

SEQ ID NO: 5175283 - DNA, 25 bp, Homo sapien
ctagtaccactctaactgtgcatta

SEQ ID NO: 5175284 - DNA, 25 bp, Homo sapien
taccactctaactgtgcattataag

SEQ ID NO: 5175285 - DNA, 25 bp, Homo sapien
tgcattataagcaaagcacgcatag

SEQ ID NO: 5175286 - DNA, 25 bp, Homo sapien
cacgcatagtcttttcctcttagcc

SEQ ID NO: 5175287 - DNA, 25 bp, Homo sapien
tgtgggccaaaacctatagtagtac

SEQ ID NO: 5175288 - DNA, 25 bp, Homo sapien
tacaatttatgggtttgtgggccaa

SEQ ID NO: 5175289 - DNA, 25 bp, Homo sapien
cacgaagtgtctctgtgtgagaagc

SEQ ID NO: 5175290 - DNA, 25 bp, Homo sapien
tagtagtactacaagcacgaagtgt

SEQ ID NO: 5175291 - DNA, 25 bp, Homo sapien
tcccgcctcttagcctccctgagag

SEQ ID NO: 5175292 - DNA, 25 bp, Homo sapien
tcaagctatcctcccgcctcttagc

SEQ ID NO: 5175293 - DNA, 25 bp, Homo sapien
cctttttctggagaatggggtctcg

SEQ ID NO: 5175294 - DNA, 25 bp, Homo sapien
tcctttttctggagaatggggtctc

SEQ ID NO: 5175295 - DNA, 25 bp, Homo sapien
tccagccgtaaatgggagacctcag

SEQ ID NO: 5175296 - DNA, 25 bp, Homo sapien
catagttccctagcgtactcattaa

SEQ ID NO: 5175297 - DNA, 25 bp, Homo sapien
cattaaaactagcagatgaacacag

SEQ ID NO: 5175298 - DNA, 25 bp, Homo sapien
caacaggctcatattgattgatgca

SEQ ID NO: 5175299 - DNA, 25 bp, Homo sapien
tttgaatagtgcactgtagcagaat

SEQ ID NO: 5175300 - DNA, 25 bp, Homo sapien
ctcaatttgaatagtgcactgtagc

SEQ ID NO: 5175301 - DNA, 25 bp, Homo sapien
atagtgcactgtagcagaattcctg

SEQ ID NO: 5175302 - DNA, 25 bp, Homo sapien
gacactcaatttgaatagtgcactg

SEQ ID NO: 5175303 - DNA, 25 bp, Homo sapien
aattcagacctgctccagcaattac

SEQ ID NO: 5175304 - DNA, 25 bp, Homo sapien
ggggggaccaatcccattgcaattc

SEQ ID NO: 5175305 - DNA, 25 bp, Homo sapien
gcaattactattccatagaatgcca

SEQ ID NO: 5175306 - DNA, 25 bp, Homo sapien
tgaacactgggtggggggaccaatc

SEQ ID NO: 5175307 - DNA, 25 bp, Homo sapien
ccatagatcaacacttttcctggag

SEQ ID NO: 5175308 - DNA, 25 bp, Homo sapien
tcaatggaacgcagacagatgcttt

SEQ ID NO: 5175309 - DNA, 25 bp, Homo sapien
cactaagggtggtctttgtcaatgg

SEQ ID NO: 5175310 - DNA, 25 bp, Homo sapien
gaaaacgtgctgtccacactaaggg

SEQ ID NO: 5175311 - DNA, 25 bp, Homo sapien
cttacaaagtatgttaaacctacag

SEQ ID NO: 5175312 - DNA, 25 bp, Homo sapien
gcttacaaagtatgttaaacctaca

SEQ ID NO: 5175313 - DNA, 25 bp, Homo sapien
tgcttacaaagtatgttaaacctac

SEQ ID NO: 5175314 - DNA, 25 bp, Homo sapien
gtgcttacaaagtatgttaaaccta

SEQ ID NO: 5175315 - DNA, 25 bp, Homo sapien
ttcataaagcattgtcctagaccat

SEQ ID NO: 5175316 - DNA, 25 bp, Homo sapien
tcaccctcttgaatactccataggg

SEQ ID NO: 5175317 - DNA, 25 bp, Homo sapien
aattcatatgagtagcctgaagccc

SEQ ID NO: 5175318 - DNA, 25 bp, Homo sapien
gcctgaagccctgcatacttggtcc

SEQ ID NO: 5175319 - DNA, 25 bp, Homo sapien
atcattagattgagcaagaggagac

SEQ ID NO: 5175320 - DNA, 25 bp, Homo sapien
atttagagttgaacatcgtcgcatg

SEQ ID NO: 5175321 - DNA, 25 bp, Homo sapien
gaacatcgtcgcatgagtgagagag

SEQ ID NO: 5175322 - DNA, 25 bp, Homo sapien
cagtcaagtccgttggtactctcca

SEQ ID NO: 5175323 - DNA, 25 bp, Homo sapien
gagctcacctccagtggagattcag

SEQ ID NO: 5175324 - DNA, 25 bp, Homo sapien
cacatccagaattagaaggccaata

SEQ ID NO: 5175325 - DNA, 25 bp, Homo sapien
tcgcctaaaatagatgagctcacct

SEQ ID NO: 5175326 - DNA, 25 bp, Homo sapien
ctggactgtccaagtcgcctaaaat

SEQ ID NO: 5175327 - DNA, 25 bp, Homo sapien
attacctctggaaactggaggcgtg

SEQ ID NO: 5175328 - DNA, 25 bp, Homo sapien
tcagaaggctttgatgtagacaatt

SEQ ID NO: 5175329 - DNA, 25 bp, Homo sapien
tacctctggaaactggaggcgtgca

SEQ ID NO: 5175330 - DNA, 25 bp, Homo sapien
tgatgtagacaattacctctggaaa

SEQ ID NO: 5175331 - DNA, 25 bp, Homo sapien
tggagtatggggcattttccagaga

SEQ ID NO: 5175332 - DNA, 25 bp, Homo sapien
ttatcctctaatggcggcttggagt

SEQ ID NO: 5175333 - DNA, 25 bp, Homo sapien
cggcttggagtatggggcattttcc

SEQ ID NO: 5175334 - DNA, 25 bp, Homo sapien
ctctaatggcggcttggagtatggg

SEQ ID NO: 5175335 - DNA, 25 bp, Homo sapien
tcatcagctcttctgcttctttcat

SEQ ID NO: 5175336 - DNA, 25 bp, Homo sapien
ctcatcagctcttctgcttctttca

SEQ ID NO: 5175337 - DNA, 25 bp, Homo sapien
gcatgatgatatcatggttattttc

SEQ ID NO: 5175338 - DNA, 25 bp, Homo sapien
gatatcatggttattttctcacagc

SEQ ID NO: 5175339 - DNA, 25 bp, Homo sapien
tgatatcatggttattttctcacag

SEQ ID NO: 5175340 - DNA, 25 bp, Homo sapien
tgatgatatcatggttattttctca

SEQ ID NO: 5175341 - DNA, 25 bp, Homo sapien
tcatgccacatgaaggtacaaattg

SEQ ID NO: 5175342 - DNA, 25 bp, Homo sapien
ggatgagaaggacttccacgaagtt

SEQ ID NO: 5175343 - DNA, 25 bp, Homo sapien
aaggtatcagagcttgatcaaagag

SEQ ID NO: 5175344 - DNA, 25 bp, Homo sapien
taaaacaaggtatcagagcttgatc

SEQ ID NO: 5175345 - DNA, 25 bp, Homo sapien
cgtaactagttgaaattagcatagc

SEQ ID NO: 5175346 - DNA, 25 bp, Homo sapien
gagaacaggctgtaatctctcagac

SEQ ID NO: 5175347 - DNA, 25 bp, Homo sapien
tctcccactaccgtaactagttgaa

SEQ ID NO: 5175348 - DNA, 25 bp, Homo sapien
ggttacacgttgatggagaacaggc

SEQ ID NO: 5175349 - DNA, 25 bp, Homo sapien
cctgccagtggcaactctgaaagat

SEQ ID NO: 5175350 - DNA, 25 bp, Homo sapien
tctctttactctgcaatggaccctc

SEQ ID NO: 5175351 - DNA, 25 bp, Homo sapien
aacataataacatccttgacttttg

SEQ ID NO: 5175352 - DNA, 25 bp, Homo sapien
ttagaagaacataataacatccttg

SEQ ID NO: 5175353 - DNA, 25 bp, Homo sapien
gccttttgtaattctgctgcccatg

SEQ ID NO: 5175354 - DNA, 25 bp, Homo sapien
tgatgcacttctgagcacccactat

SEQ ID NO: 5175355 - DNA, 25 bp, Homo sapien
catgttattaaacgtccttgaggga

SEQ ID NO: 5175356 - DNA, 25 bp, Homo sapien
tgagggattttgatgcacttctgag

SEQ ID NO: 5175357 - DNA, 25 bp, Homo sapien
gacacatactatcgggaaatactgc

SEQ ID NO: 5175358 - DNA, 25 bp, Homo sapien
tcacagttgtattctgccaagagca

SEQ ID NO: 5175359 - DNA, 25 bp, Homo sapien
gattaatgcaactcatcagactctg

SEQ ID NO: 5175360 - DNA, 25 bp, Homo sapien
gaaatactgccaatgtctcactctc

SEQ ID NO: 5175361 - DNA, 25 bp, Homo sapien
caaaagccatatttctgccacacat

SEQ ID NO: 5175362 - DNA, 25 bp, Homo sapien
attcaaaagccatatttctgccaca

SEQ ID NO: 5175363 - DNA, 25 bp, Homo sapien
aagccatatttctgccacacatttg

SEQ ID NO: 5175364 - DNA, 25 bp, Homo sapien
agccatatttctgccacacatttga

SEQ ID NO: 5175365 - DNA, 25 bp, Homo sapien
tctcttggttctttaatccagatgt

SEQ ID NO: 5175366 - DNA, 25 bp, Homo sapien
gctttccctttcacgatggattcta

SEQ ID NO: 5175367 - DNA, 25 bp, Homo sapien
gatgtttgatacttttgccggtctt

SEQ ID NO: 5175368 - DNA, 25 bp, Homo sapien
tcctctccgtcttttcctgagcttt

SEQ ID NO: 5175369 - DNA, 25 bp, Homo sapien
gcaagtcagtttcactgcgtggaga

SEQ ID NO: 5175370 - DNA, 25 bp, Homo sapien
tgcaagtcagtttcactgcgtggag

SEQ ID NO: 5175371 - DNA, 25 bp, Homo sapien
caagtcagtttcactgcgtggagag

SEQ ID NO: 5175372 - DNA, 25 bp, Homo sapien
cagacagaagtaccttggggactct

SEQ ID NO: 5175373 - DNA, 25 bp, Homo sapien
gacagaagtaccttggggactctga

SEQ ID NO: 5175374 - DNA, 25 bp, Homo sapien
actctgaggtgagccgttggcattc

SEQ ID NO: 5175375 - DNA, 25 bp, Homo sapien
gactctgaggtgagccgttggcatt

SEQ ID NO: 5175376 - DNA, 25 bp, Homo sapien
aaaacaatccacagtagccacagga

SEQ ID NO: 5175377 - DNA, 25 bp, Homo sapien
gagaattgagcagtaaaaacaatcc

SEQ ID NO: 5175378 - DNA, 25 bp, Homo sapien
gccacaggatgtctcagcagcaatc

SEQ ID NO: 5175379 - DNA, 25 bp, Homo sapien
tgagcaggaatccaatgtggagcca

SEQ ID NO: 5175380 - DNA, 25 bp, Homo sapien
agaggccttggcctctgtatttaga

SEQ ID NO: 5175381 - DNA, 25 bp, Homo sapien
ccttggcctctgtatttagatttac

SEQ ID NO: 5175382 - DNA, 25 bp, Homo sapien
gtaaaaagaggccttggcctctgta

SEQ ID NO: 5175383 - DNA, 25 bp, Homo sapien
taatgtttactcagtcattttaccc

SEQ ID NO: 5175384 - DNA, 25 bp, Homo sapien
ttgcaattcgatatgaaaaatcacc

SEQ ID NO: 5175385 - DNA, 25 bp, Homo sapien
tgaatttgcaattcgatatgaaaaa

SEQ ID NO: 5175386 - DNA, 25 bp, Homo sapien
atttgcaattcgatatgaaaaatca

SEQ ID NO: 5175387 - DNA, 25 bp, Homo sapien
gcaattcgatatgaaaaatcacctc

SEQ ID NO: 5175388 - DNA, 25 bp, Homo sapien
acagctaaacatcctaatcaactgg

SEQ ID NO: 5175389 - DNA, 25 bp, Homo sapien
gctaaacatcctaatcaactggctt

SEQ ID NO: 5175390 - DNA, 25 bp, Homo sapien
gttaacagctaaacatcctaatcaa

SEQ ID NO: 5175391 - DNA, 25 bp, Homo sapien
aatttagttaacagctaaacatcct

SEQ ID NO: 5175392 - DNA, 25 bp, Homo sapien
tgcatcaattgaacacaaatcagcc

SEQ ID NO: 5175393 - DNA, 25 bp, Homo sapien
catcaattgaacacaaatcagccac

SEQ ID NO: 5175394 - DNA, 25 bp, Homo sapien
tcaattgaacacaaatcagccactt

SEQ ID NO: 5175395 - DNA, 25 bp, Homo sapien
caattgaacacaaatcagccacttt

SEQ ID NO: 5175396 - DNA, 25 bp, Homo sapien
tctccatgtgacctaccacaccacg

SEQ ID NO: 5175397 - DNA, 25 bp, Homo sapien
tgtgacctaccacaccacgttctaa

SEQ ID NO: 5175398 - DNA, 25 bp, Homo sapien
aaattctccatgtgacctaccacac

SEQ ID NO: 5175399 - DNA, 25 bp, Homo sapien
ccaaaattctccatgtgacctacca

SEQ ID NO: 5175400 - DNA, 25 bp, Homo sapien
ttcctcatcagctttcagtaaaatt

SEQ ID NO: 5175401 - DNA, 25 bp, Homo sapien
tctctggactatctagatgataaac

SEQ ID NO: 5175402 - DNA, 25 bp, Homo sapien
aattttctctggactatctagatga

SEQ ID NO: 5175403 - DNA, 25 bp, Homo sapien
tgtatcttcctcatcagctttcagt

SEQ ID NO: 5175404 - DNA, 25 bp, Homo sapien
tttagctctagaattgtaaccagtg

SEQ ID NO: 5175405 - DNA, 25 bp, Homo sapien
gtctaatgtaatggcctacttttat

SEQ ID NO: 5175406 - DNA, 25 bp, Homo sapien
ttgtaaccagtgtgtctaatgtaat

SEQ ID NO: 5175407 - DNA, 25 bp, Homo sapien
gctctagaattgtaaccagtgtgtc

SEQ ID NO: 5175408 - DNA, 25 bp, Homo sapien
tggcactaagcattgagatttcccc

SEQ ID NO: 5175409 - DNA, 25 bp, Homo sapien
cttgggagctttccactagtattgc

SEQ ID NO: 5175410 - DNA, 25 bp, Homo sapien
tttccactagtattgcagcacacat

SEQ ID NO: 5175411 - DNA, 25 bp, Homo sapien
tatctgtatggcactaagcattgag

SEQ ID NO: 5175412 - DNA, 25 bp, Homo sapien
ccaggtccgcttacagtgactttca

SEQ ID NO: 5175413 - DNA, 25 bp, Homo sapien
tctccaatccaggtccgcttacagt

SEQ ID NO: 5175414 - DNA, 25 bp, Homo sapien
taccctctccaatccaggtccgctt

SEQ ID NO: 5175415 - DNA, 25 bp, Homo sapien
tccgcttacagtgactttcattcat

SEQ ID NO: 5175416 - DNA, 25 bp, Homo sapien
tacaagtattgtttagagtcaagtt

SEQ ID NO: 5175417 - DNA, 25 bp, Homo sapien
tgtaatcccatgtttccacaacctc

SEQ ID NO: 5175418 - DNA, 25 bp, Homo sapien
tatgtaatcctcttctgtgtaatcc

SEQ ID NO: 5175419 - DNA, 25 bp, Homo sapien
tgtgtccaaaactaaactctatgaa

SEQ ID NO: 5175420 - DNA, 25 bp, Homo sapien
aaataatctctttcaaaatctatag

SEQ ID NO: 5175421 - DNA, 25 bp, Homo sapien
tatgtgcagctgctactttaattcc

SEQ ID NO: 5175422 - DNA, 25 bp, Homo sapien
gcctctcgaggaaaatcagtgtctc

SEQ ID NO: 5175423 - DNA, 25 bp, Homo sapien
tggaccaagaccaactatcatcatt

SEQ ID NO: 5175424 - DNA, 25 bp, Homo sapien
ccttgatgcaaatgtattgcacagg

SEQ ID NO: 5175425 - DNA, 25 bp, Homo sapien
cagtgtaagactacgaagcattgca

SEQ ID NO: 5175426 - DNA, 25 bp, Homo sapien
gatccagactgtgcagatgcatcag

SEQ ID NO: 5175427 - DNA, 25 bp, Homo sapien
gagtcatcatctgcgacaaccacag

SEQ ID NO: 5175428 - DNA, 25 bp, Homo sapien
gctactttacaagaagcctggagtg

SEQ ID NO: 5175429 - DNA, 25 bp, Homo sapien
attttaaaatggtggatggtatttg

SEQ ID NO: 5175430 - DNA, 25 bp, Homo sapien
taaaatggtggatggtatttgtttc

SEQ ID NO: 5175431 - DNA, 25 bp, Homo sapien
ggtggatggtatttgtttctggtga

SEQ ID NO: 5175432 - DNA, 25 bp, Homo sapien
aaatggtggatggtatttgtttctg

SEQ ID NO: 5175433 - DNA, 25 bp, Homo sapien
aataattccaatatttgatgactta

SEQ ID NO: 5175434 - DNA, 25 bp, Homo sapien
gatgacttattagttttgcatatat

SEQ ID NO: 5175435 - DNA, 25 bp, Homo sapien
aagaattaatagtgccaaactactc

SEQ ID NO: 5175436 - DNA, 25 bp, Homo sapien
aaagaattaatagtgccaaactact

SEQ ID NO: 5175437 - DNA, 25 bp, Homo sapien
aagacacattttaccctctgtaact

SEQ ID NO: 5175438 - DNA, 25 bp, Homo sapien
taccctctgtaacttgatattttag

SEQ ID NO: 5175439 - DNA, 25 bp, Homo sapien
tcagtattcatatccattattgcca

SEQ ID NO: 5175440 - DNA, 25 bp, Homo sapien
tcatatccattattgccaatatgga

SEQ ID NO: 5175441 - DNA, 25 bp, Homo sapien
ggaattattacatagcagacagaac

SEQ ID NO: 5175442 - DNA, 25 bp, Homo sapien
gattggagtctatctaaactctaaa

SEQ ID NO: 5175443 - DNA, 25 bp, Homo sapien
tgaatgtcctgaaaatggtaaggaa

SEQ ID NO: 5175444 - DNA, 25 bp, Homo sapien
gaatattggcaaggcccggtgcgat

SEQ ID NO: 5175445 - DNA, 25 bp, Homo sapien
tatgcaagacgttctgaaatcagag

SEQ ID NO: 5175446 - DNA, 25 bp, Homo sapien
ttcatcacggcatttacagtccctg

SEQ ID NO: 5175447 - DNA, 25 bp, Homo sapien
tagacttcgatgcatctgaggaacg

SEQ ID NO: 5175448 - DNA, 25 bp, Homo sapien
tgaggaacgtttatactggacagat

SEQ ID NO: 5175449 - DNA, 25 bp, Homo sapien
aactctgtcttacctactcgcctag

SEQ ID NO: 5175450 - DNA, 25 bp, Homo sapien
gactccttctcacacataccaatta

SEQ ID NO: 5175451 - DNA, 25 bp, Homo sapien
tacattcatagttaacaccataagg

SEQ ID NO: 5175452 - DNA, 25 bp, Homo sapien
cataaggactcagcatttaaagctt

SEQ ID NO: 5175453 - DNA, 25 bp, Homo sapien
gaatgattctcatggagtctgtcct

SEQ ID NO: 5175454 - DNA, 25 bp, Homo sapien
gaaggttgacttgtgcagtactccc

SEQ ID NO: 5175455 - DNA, 25 bp, Homo sapien
tattggatctaagtgggccagggcc

SEQ ID NO: 5175456 - DNA, 25 bp, Homo sapien
tctcaggaaccacacaatttcatga

SEQ ID NO: 5175457 - DNA, 25 bp, Homo sapien
tttgtaactaagtgtgaagagtcag

SEQ ID NO: 5175458 - DNA, 25 bp, Homo sapien
taactaagtgtgaagagtcagttga

SEQ ID NO: 5175459 - DNA, 25 bp, Homo sapien
gtgtgaagagtcagttgagttaact

SEQ ID NO: 5175460 - DNA, 25 bp, Homo sapien
ctaagtgtgaagagtcagttgagtt

SEQ ID NO: 5175461 - DNA, 25 bp, Homo sapien
ttggtgttcaagcaactttctattc

SEQ ID NO: 5175462 - DNA, 25 bp, Homo sapien
tcaagcaactttctattctggacag

SEQ ID NO: 5175463 - DNA, 25 bp, Homo sapien
gcaactttctattctggacaggaag

SEQ ID NO: 5175464 - DNA, 25 bp, Homo sapien
tggcagagtttggccccctgtggat

SEQ ID NO: 5175465 - DNA, 25 bp, Homo sapien
tgacgttcaataagcgacacggttg

SEQ ID NO: 5175466 - DNA, 25 bp, Homo sapien
tcaaattttgggataacacaattca

SEQ ID NO: 5175467 - DNA, 25 bp, Homo sapien
tcagactagggcttcaatattcaaa

SEQ ID NO: 5175468 - DNA, 25 bp, Homo sapien
aaacgttcccttgtgctctatgtag

SEQ ID NO: 5175469 - DNA, 25 bp, Homo sapien
tatgattaatccctgtcttgactat

SEQ ID NO: 5175470 - DNA, 25 bp, Homo sapien
tcataggcagataccataattttct

SEQ ID NO: 5175471 - DNA, 25 bp, Homo sapien
gatgagaacaggttcattgaagcct

SEQ ID NO: 5175472 - DNA, 25 bp, Homo sapien
gagaagcaggaatgttatgagcaca

SEQ ID NO: 5175473 - DNA, 25 bp, Homo sapien
ctctattactacattgccaagggtt

SEQ ID NO: 5175474 - DNA, 25 bp, Homo sapien
gaataactaaataccgccaactcag

SEQ ID NO: 5175475 - DNA, 25 bp, Homo sapien
tcagaccacatggttggtccacagc

SEQ ID NO: 5175476 - DNA, 25 bp, Homo sapien
tgttaaagccccttaatgcactggt

SEQ ID NO: 5175477 - DNA, 25 bp, Homo sapien
gggacagcatgagggcctccactgg

SEQ ID NO: 5175478 - DNA, 25 bp, Homo sapien
cagttctagcgcagaatcctcaggg

SEQ ID NO: 5175479 - DNA, 25 bp, Homo sapien
tgcatgcagggtacagttctagcgc

SEQ ID NO: 5175480 - DNA, 25 bp, Homo sapien
cgcagaatcctcagggacagcatga

SEQ ID NO: 5175481 - DNA, 25 bp, Homo sapien
tgttcaggacgttcagtagaaagaa

SEQ ID NO: 5175482 - DNA, 25 bp, Homo sapien
aatgttcaggacgttcagtagaaag

SEQ ID NO: 5175483 - DNA, 25 bp, Homo sapien
gttcaggacgttcagtagaaagaac

SEQ ID NO: 5175484 - DNA, 25 bp, Homo sapien
aaaaatgttcaggacgttcagtaga

SEQ ID NO: 5175485 - DNA, 25 bp, Homo sapien
cagagctataccaggtagcctctga

SEQ ID NO: 5175486 - DNA, 25 bp, Homo sapien
gacagagctataccaggtagcctct

SEQ ID NO: 5175487 - DNA, 25 bp, Homo sapien
gaagacagagctataccaggtagcc

SEQ ID NO: 5175488 - DNA, 25 bp, Homo sapien
gagctataccaggtagcctctgaca

SEQ ID NO: 5175489 - DNA, 25 bp, Homo sapien
atgaatctgatctcttgttcaaatt

SEQ ID NO: 5175490 - DNA, 25 bp, Homo sapien
ccatgaatctgatctcttgttcaaa

SEQ ID NO: 5175491 - DNA, 25 bp, Homo sapien
gccatgaatctgatctcttgttcaa

SEQ ID NO: 5175492 - DNA, 25 bp, Homo sapien
tgccatgaatctgatctcttgttca

SEQ ID NO: 5175493 - DNA, 25 bp, Homo sapien
agcctgatctaaggaagtgtgatga

SEQ ID NO: 5175494 - DNA, 25 bp, Homo sapien
cagcctgatctaaggaagtgtgatg

SEQ ID NO: 5175495 - DNA, 25 bp, Homo sapien
aggaagtgtgatgagtcagattagc

SEQ ID NO: 5175496 - DNA, 25 bp, Homo sapien
gtgtcttttccccatcatattgtga

SEQ ID NO: 5175497 - DNA, 25 bp, Homo sapien
catgtaacagtattgttccatcttc

SEQ ID NO: 5175498 - DNA, 25 bp, Homo sapien
tatcatcttgtactgtgcttttgcc

SEQ ID NO: 5175499 - DNA, 25 bp, Homo sapien
tgtagtaggaactggctttaactcg

SEQ ID NO: 5175500 - DNA, 25 bp, Homo sapien
catatttgtcactaaatttcccttt

SEQ ID NO: 5175501 - DNA, 25 bp, Homo sapien
ctctcttcacctaactggcggtttg

SEQ ID NO: 5175502 - DNA, 25 bp, Homo sapien
cccacacaacgggaaaagctgattc

SEQ ID NO: 5175503 - DNA, 25 bp, Homo sapien
caacgggaaaagctgattcagacat

SEQ ID NO: 5175504 - DNA, 25 bp, Homo sapien
gctggctacttgcagatgccctcct

SEQ ID NO: 5175505 - DNA, 25 bp, Homo sapien
ttcttctgcgctgtccatctgctga

SEQ ID NO: 5175506 - DNA, 25 bp, Homo sapien
gccccatgcacctgttaagaccgtt

SEQ ID NO: 5175507 - DNA, 25 bp, Homo sapien
cacacggagtttcctttcttctgcg

SEQ ID NO: 5175508 - DNA, 25 bp, Homo sapien
aggcatgttacattactttttgcaa

SEQ ID NO: 5175509 - DNA, 25 bp, Homo sapien
taaggcatgttacattactttttgc

SEQ ID NO: 5175510 - DNA, 25 bp, Homo sapien
gcatgttacattactttttgcaaat

SEQ ID NO: 5175511 - DNA, 25 bp, Homo sapien
ctaaggcatgttacattactttttg

SEQ ID NO: 5175512 - DNA, 25 bp, Homo sapien
caggtataccttcagagtaatgcat

SEQ ID NO: 5175513 - DNA, 25 bp, Homo sapien
ggatcctcatcgtgtcaaagaaatt

SEQ ID NO: 5175514 - DNA, 25 bp, Homo sapien
caggcttctgaaatacttgtgcttc

SEQ ID NO: 5175515 - DNA, 25 bp, Homo sapien
caaacgttatcgctttgggatctgg

SEQ ID NO: 5175516 - DNA, 25 bp, Homo sapien
gagtgccatagaggtcacctggatc

SEQ ID NO: 5175517 - DNA, 25 bp, Homo sapien
ggctttagtcttgtcagcttccaaa

SEQ ID NO: 5175518 - DNA, 25 bp, Homo sapien
aatggctttagtcttgtcagcttcc

SEQ ID NO: 5175519 - DNA, 25 bp, Homo sapien
tttagtcttgtcagcttccaaaata

SEQ ID NO: 5175520 - DNA, 25 bp, Homo sapien
aaaataatggctttagtcttgtcag

SEQ ID NO: 5175521 - DNA, 25 bp, Homo sapien
tggtacactgacaatgtgttggcat

SEQ ID NO: 5175522 - DNA, 25 bp, Homo sapien
ctgccttggtacactgacaatgtgt

SEQ ID NO: 5175523 - DNA, 25 bp, Homo sapien
gccttggtacactgacaatgtgttg

SEQ ID NO: 5175524 - DNA, 25 bp, Homo sapien
cttggtacactgacaatgtgttggc

SEQ ID NO: 5175525 - DNA, 25 bp, Homo sapien
ttttagacaggtcatgcccagccct

SEQ ID NO: 5175526 - DNA, 25 bp, Homo sapien
tgcccggataccctggttgctgctg

SEQ ID NO: 5175527 - DNA, 25 bp, Homo sapien
aatggctcctctgcggtccgcaggg

SEQ ID NO: 5175528 - DNA, 25 bp, Homo sapien
tcagagcgttaacccctttgcagtc

SEQ ID NO: 5175529 - DNA, 25 bp, Homo sapien
cctttagggattgacatggctttca

SEQ ID NO: 5175530 - DNA, 25 bp, Homo sapien
cccgttgaccattttcctgctcatt

SEQ ID NO: 5175531 - DNA, 25 bp, Homo sapien
ttaccatgggtatgagtggtcagaa

SEQ ID NO: 5175532 - DNA, 25 bp, Homo sapien
taccatgggtatgagtggtcagaaa

SEQ ID NO: 5175533 - DNA, 25 bp, Homo sapien
ttcttgtttcagatcccgttgacca

SEQ ID NO: 5175534 - DNA, 25 bp, Homo sapien
cataagaatctgtgacaggtcagca

SEQ ID NO: 5175535 - DNA, 25 bp, Homo sapien
tttaggagctcgatttcaatgaacg

SEQ ID NO: 5175536 - DNA, 25 bp, Homo sapien
taagcgacatcgtgtttaattcgtg

SEQ ID NO: 5175537 - DNA, 25 bp, Homo sapien
caggtcagcatttccaggatgtgcc

SEQ ID NO: 5175538 - DNA, 25 bp, Homo sapien
tcttcataacccatgacatttttct

SEQ ID NO: 5175539 - DNA, 25 bp, Homo sapien
ttttatatctggttcttcttttcta

SEQ ID NO: 5175540 - DNA, 25 bp, Homo sapien
ttcttcttcataacccatgacattt

SEQ ID NO: 5175541 - DNA, 25 bp, Homo sapien
ttttcttcttcataacccatgacat

SEQ ID NO: 5175542 - DNA, 25 bp, Homo sapien
cacaagttctgactcatagctactg

SEQ ID NO: 5175543 - DNA, 25 bp, Homo sapien
aatgtgcagtaaattgagaagtgac

SEQ ID NO: 5175544 - DNA, 25 bp, Homo sapien
ggctgctgatccttgatgtatgata

SEQ ID NO: 5175545 - DNA, 25 bp, Homo sapien
tctgactcatagctactgaggctgc

SEQ ID NO: 5175546 - DNA, 25 bp, Homo sapien
tatatagccgtccaaaagtgcaatt

SEQ ID NO: 5175547 - DNA, 25 bp, Homo sapien
caaagagcccgaaagagtagactac

SEQ ID NO: 5175548 - DNA, 25 bp, Homo sapien
taaaaattgtctggctagattgaag

SEQ ID NO: 5175549 - DNA, 25 bp, Homo sapien
aagtgcaatttgtatagtgtataac

SEQ ID NO: 5175550 - DNA, 25 bp, Homo sapien
gaaaaggaaggaggaattgatctca

SEQ ID NO: 5175551 - DNA, 25 bp, Homo sapien
aaaggaaggaggaattgatctcaag

SEQ ID NO: 5175552 - DNA, 25 bp, Homo sapien
aaggaaggaggaattgatctcaagg

SEQ ID NO: 5175553 - DNA, 25 bp, Homo sapien
aaaaggaaggaggaattgatctcaa

SEQ ID NO: 5175554 - DNA, 25 bp, Homo sapien
gttacagttttcagcttcagaccca

SEQ ID NO: 5175555 - DNA, 25 bp, Homo sapien
ggttacagttttcagcttcagaccc

SEQ ID NO: 5175556 - DNA, 25 bp, Homo sapien
ttacagttttcagcttcagacccat

SEQ ID NO: 5175557 - DNA, 25 bp, Homo sapien
ttcctctgtctaccgagctctctgc

SEQ ID NO: 5175558 - DNA, 25 bp, Homo sapien
ctgtctaccgagctctctgctcttt

SEQ ID NO: 5175559 - DNA, 25 bp, Homo sapien
tccttcctctgtctaccgagctctc

SEQ ID NO: 5175560 - DNA, 25 bp, Homo sapien
cctctgtctaccgagctctctgctc

SEQ ID NO: 5175561 - DNA, 25 bp, Homo sapien
aatccctgagcttccacctactgaa

SEQ ID NO: 5175562 - DNA, 25 bp, Homo sapien
gtggaaatccctgagcttccaccta

SEQ ID NO: 5175563 - DNA, 25 bp, Homo sapien
gaacattagcacaaactcccacaca

SEQ ID NO: 5175564 - DNA, 25 bp, Homo sapien
actgaacattagcacaaactcccac

SEQ ID NO: 5175565 - DNA, 25 bp, Homo sapien
cccaaaatggcagctgtatggttca

SEQ ID NO: 5175566 - DNA, 25 bp, Homo sapien
actggcctcgttgttgcagcccaaa

SEQ ID NO: 5175567 - DNA, 25 bp, Homo sapien
tgtctgactccaaatgcaccagttt

SEQ ID NO: 5175568 - DNA, 25 bp, Homo sapien
tatggttcaagtgggtatcctctct

SEQ ID NO: 5175569 - DNA, 25 bp, Homo sapien
gtttggcagtttataagctctatca

SEQ ID NO: 5175570 - DNA, 25 bp, Homo sapien
cagccctcttgaaggtgtgttattg

SEQ ID NO: 5175571 - DNA, 25 bp, Homo sapien
tgttattgtaaggagttacagatac

SEQ ID NO: 5175572 - DNA, 25 bp, Homo sapien
tataagctctatcaacaaggagagc

SEQ ID NO: 5175573 - DNA, 25 bp, Homo sapien
ataaaaacaccagtttgcctctcca

SEQ ID NO: 5175574 - DNA, 25 bp, Homo sapien
gataaaaacaccagtttgcctctcc

SEQ ID NO: 5175575 - DNA, 25 bp, Homo sapien
tcagagataaaaacaccagtttgcc

SEQ ID NO: 5175576 - DNA, 25 bp, Homo sapien
gatcactgttctagttgcagttaca

SEQ ID NO: 5175577 - DNA, 25 bp, Homo sapien
caatctgggctatgctactacttta

SEQ ID NO: 5175578 - DNA, 25 bp, Homo sapien
tcactgaactttcaatagtcaccaa

SEQ ID NO: 5175579 - DNA, 25 bp, Homo sapien
caattaggtgttcaaggaaacactt

SEQ ID NO: 5175580 - DNA, 25 bp, Homo sapien
gaaacttcagtgactttagtataaa

SEQ ID NO: 5175581 - DNA, 25 bp, Homo sapien
aagttttgtgctttgtgcagtctgt

SEQ ID NO: 5175582 - DNA, 25 bp, Homo sapien
actcgaaggtgtttgccgtgaagtt

SEQ ID NO: 5175583 - DNA, 25 bp, Homo sapien
cccatttggataagcatcattgaga

SEQ ID NO: 5175584 - DNA, 25 bp, Homo sapien
tagactaagacaggaatatagcctt

SEQ ID NO: 5175585 - DNA, 25 bp, Homo sapien
actatcaatgccctgtttggtcagt

SEQ ID NO: 5175586 - DNA, 25 bp, Homo sapien
cactgaggcgtggaacatgaaatag

SEQ ID NO: 5175587 - DNA, 25 bp, Homo sapien
cctattatgacaactcctgagataa

SEQ ID NO: 5175588 - DNA, 25 bp, Homo sapien
ggtggagactgatcactaagaaaat

SEQ ID NO: 5175589 - DNA, 25 bp, Homo sapien
tggagactgatcactaagaaaatag

SEQ ID NO: 5175590 - DNA, 25 bp, Homo sapien
gactgatcactaagaaaataggaat

SEQ ID NO: 5175591 - DNA, 25 bp, Homo sapien
agggtggagactgatcactaagaaa

SEQ ID NO: 5175592 - DNA, 25 bp, Homo sapien
gaagagtaagtctgattgcccaagc

SEQ ID NO: 5175593 - DNA, 25 bp, Homo sapien
tgaagagtaagtctgattgcccaag

SEQ ID NO: 5175594 - DNA, 25 bp, Homo sapien
aagagtaagtctgattgcccaagca

SEQ ID NO: 5175595 - DNA, 25 bp, Homo sapien
ggtgggaacagaggatttaatcaaa

SEQ ID NO: 5175596 - DNA, 25 bp, Homo sapien
tctgctagggtcataagaagaatat

SEQ ID NO: 5175597 - DNA, 25 bp, Homo sapien
agttggctgggtatctattctctgc

SEQ ID NO: 5175598 - DNA, 25 bp, Homo sapien
tctcagcttgttagtgacttcactc

SEQ ID NO: 5175599 - DNA, 25 bp, Homo sapien
gttctgtgcccaatacctgtagttt

SEQ ID NO: 5175600 - DNA, 25 bp, Homo sapien
tatagtaggcactctctgttctgtg

SEQ ID NO: 5175601 - DNA, 25 bp, Homo sapien
tacttaatccgatagctggtgtggc

SEQ ID NO: 5175602 - DNA, 25 bp, Homo sapien
tcctgtgtgtgatggtttgagattc

SEQ ID NO: 5175603 - DNA, 25 bp, Homo sapien
gccctatagttaatctccgtagaat

SEQ ID NO: 5175604 - DNA, 25 bp, Homo sapien
gtatagtgattttagccaaagccct

SEQ ID NO: 5175605 - DNA, 25 bp, Homo sapien
gattttagccaaagccctatagtta

SEQ ID NO: 5175606 - DNA, 25 bp, Homo sapien
tccgtagaatcaagatcaaagggct

SEQ ID NO: 5175607 - DNA, 25 bp, Homo sapien
caccataacatcttccaagtgagag

SEQ ID NO: 5175608 - DNA, 25 bp, Homo sapien
caagtgagagacaacataagaagtc

SEQ ID NO: 5175609 - DNA, 25 bp, Homo sapien
gaagtctcacaggatactctgccag

SEQ ID NO: 5175610 - DNA, 25 bp, Homo sapien
gaatcacatgattcgtctcaccata

SEQ ID NO: 5175611 - DNA, 25 bp, Homo sapien
tgacagcaatagacatccgtgtagt

SEQ ID NO: 5175612 - DNA, 25 bp, Homo sapien
tctccattgtaaagtccggcatgga

SEQ ID NO: 5175613 - DNA, 25 bp, Homo sapien
ggtgcctacctcttaaacaatgttc

SEQ ID NO: 5175614 - DNA, 25 bp, Homo sapien
caatgttcagactaatgatgacagc

SEQ ID NO: 5175615 - DNA, 25 bp, Homo sapien
gatgatcttgcaacatgcctgctaa

SEQ ID NO: 5175616 - DNA, 25 bp, Homo sapien
tgctgctgtgatgtgaacttccagt

SEQ ID NO: 5175617 - DNA, 25 bp, Homo sapien
gaaaaatggcatagctctgaaaaat

SEQ ID NO: 5175618 - DNA, 25 bp, Homo sapien
tgcctgctaatgaatcctctaaact

SEQ ID NO: 5175619 - DNA, 25 bp, Homo sapien
tcctcaaatgaagtgccttgttgtc

SEQ ID NO: 5175620 - DNA, 25 bp, Homo sapien
gaggagcgcaactcttcctcaaatg

SEQ ID NO: 5175621 - DNA, 25 bp, Homo sapien
gcaactcttcctcaaatgaagtgcc

SEQ ID NO: 5175622 - DNA, 25 bp, Homo sapien
aatgaagtgccttgttgtctctttc

SEQ ID NO: 5175623 - DNA, 25 bp, Homo sapien
gatataggcgactgtttttagggta

SEQ ID NO: 5175624 - DNA, 25 bp, Homo sapien
gagtacaagtctgtaaaaccagggc

SEQ ID NO: 5175625 - DNA, 25 bp, Homo sapien
taatgatacccataggagacttctg

SEQ ID NO: 5175626 - DNA, 25 bp, Homo sapien
gagtggcacagtaggactgtcctca

SEQ ID NO: 5175627 - DNA, 25 bp, Homo sapien
gtgggtgtaaacttcaaatcattaa

SEQ ID NO: 5175628 - DNA, 25 bp, Homo sapien
tctaagaatgtagccatttttggga

SEQ ID NO: 5175629 - DNA, 25 bp, Homo sapien
taactttatcttttgatagaagctc

SEQ ID NO: 5175630 - DNA, 25 bp, Homo sapien
tttgaagaagcaagaccacctctaa

SEQ ID NO: 5175631 - DNA, 25 bp, Homo sapien
tggtggaaacatcatctttaacgta

SEQ ID NO: 5175632 - DNA, 25 bp, Homo sapien
ggtggaaacatcatctttaacgtac

SEQ ID NO: 5175633 - DNA, 25 bp, Homo sapien
tatggtggaaacatcatctttaacg

SEQ ID NO: 5175634 - DNA, 25 bp, Homo sapien
ttatatggtggaaacatcatcttta

SEQ ID NO: 5175635 - DNA, 25 bp, Homo sapien
gagagagaaaactaccccatgacag

SEQ ID NO: 5175636 - DNA, 25 bp, Homo sapien
taattgcacagaccaactcctttgc

SEQ ID NO: 5175637 - DNA, 25 bp, Homo sapien
caacattttagccatggccacagtg

SEQ ID NO: 5175638 - DNA, 25 bp, Homo sapien
cagctgtgtgcaaagagtctttctc

SEQ ID NO: 5175639 - DNA, 25 bp, Homo sapien
gctttaatgcaaatacggcttagat

SEQ ID NO: 5175640 - DNA, 25 bp, Homo sapien
ggcttagatcacaatacccaagtgc

SEQ ID NO: 5175641 - DNA, 25 bp, Homo sapien
tctacgagtcaacaacaactacagt

SEQ ID NO: 5175642 - DNA, 25 bp, Homo sapien
taaggcactagagtccaatcccgga

SEQ ID NO: 5175643 - DNA, 25 bp, Homo sapien
tcatcttcatcttctcccgtggcat

SEQ ID NO: 5175644 - DNA, 25 bp, Homo sapien
tttcttcttttccctcatcttcatc

SEQ ID NO: 5175645 - DNA, 25 bp, Homo sapien
tcttcatcttctcccgtggcatcat

SEQ ID NO: 5175646 - DNA, 25 bp, Homo sapien
tcttcttttccctcatcttcatctt

SEQ ID NO: 5175647 - DNA, 25 bp, Homo sapien
ctatgaagtacttgacttcaaggct

SEQ ID NO: 5175648 - DNA, 25 bp, Homo sapien
ggcagacaaagccaactgtttgagc

SEQ ID NO: 5175649 - DNA, 25 bp, Homo sapien
gagcatactcatgattagccatgga

SEQ ID NO: 5175650 - DNA, 25 bp, Homo sapien
tttcagtggatgcaaaatggtaacc

SEQ ID NO: 5175651 - DNA, 25 bp, Homo sapien
gctcctgcagcatttggcattgcaa

SEQ ID NO: 5175652 - DNA, 25 bp, Homo sapien
ggcattgcaattggctaccttttga

SEQ ID NO: 5175653 - DNA, 25 bp, Homo sapien
ttcttgcaggaaaccgtacttgacc

SEQ ID NO: 5175654 - DNA, 25 bp, Homo sapien
cctctgatcctttgctactttgtag

SEQ ID NO: 5175655 - DNA, 25 bp, Homo sapien
aagacctgagcattggaatttgagt

SEQ ID NO: 5175656 - DNA, 25 bp, Homo sapien
agacctgagcattggaatttgagtt

SEQ ID NO: 5175657 - DNA, 25 bp, Homo sapien
gaagacctgagcattggaatttgag

SEQ ID NO: 5175658 - DNA, 25 bp, Homo sapien
gatgactctgtttcatgatattgcc

SEQ ID NO: 5175659 - DNA, 25 bp, Homo sapien
gtttcatgatattgccatctctgca

SEQ ID NO: 5175660 - DNA, 25 bp, Homo sapien
gacaaccttctccatctgatgactc

SEQ ID NO: 5175661 - DNA, 25 bp, Homo sapien
ctgcatatggtttccaaggtcatca

SEQ ID NO: 5175662 - DNA, 25 bp, Homo sapien
gaaggtatgaatgttgaatttctgc

SEQ ID NO: 5175663 - DNA, 25 bp, Homo sapien
gaatttctgcactccgattggaacc

SEQ ID NO: 5175664 - DNA, 25 bp, Homo sapien
tgcactccgattggaaccatgtaat

SEQ ID NO: 5175665 - DNA, 25 bp, Homo sapien
tggaaccatgtaattgggttggcat

SEQ ID NO: 5175666 - DNA, 25 bp, Homo sapien
cctgtgagtagaaaggttctcatgc

SEQ ID NO: 5175667 - DNA, 25 bp, Homo sapien
gatcacgtgacttgtgtctcccaga

SEQ ID NO: 5175668 - DNA, 25 bp, Homo sapien
cagttgtgtgatcctggtgaatttc

SEQ ID NO: 5175669 - DNA, 25 bp, Homo sapien
agacgagtctttagatacctgtgag

SEQ ID NO: 5175670 - DNA, 25 bp, Homo sapien
acaacacagtgtcacaggaaaagcc

SEQ ID NO: 5175671 - DNA, 25 bp, Homo sapien
ttatgcactgagagcagtaaagggt

SEQ ID NO: 5175672 - DNA, 25 bp, Homo sapien
agggtgaagacaacacagtgtcaca

SEQ ID NO: 5175673 - DNA, 25 bp, Homo sapien
ctgagagcagtaaagggtgaagaca

SEQ ID NO: 5175674 - DNA, 25 bp, Homo sapien
ccagtttcaaaaccaactgttgtct

SEQ ID NO: 5175675 - DNA, 25 bp, Homo sapien
gaaagtttcttctgctaagatgagg

SEQ ID NO: 5175676 - DNA, 25 bp, Homo sapien
aaaccaactgttgtctgttctctgt

SEQ ID NO: 5175677 - DNA, 25 bp, Homo sapien
tctgctaagatgaggtaggaagaaa

SEQ ID NO: 5175678 - DNA, 25 bp, Homo sapien
gccatcagataccaatatgtttgac

SEQ ID NO: 5175679 - DNA, 25 bp, Homo sapien
cagaatgtctgccttcagatgtaca

SEQ ID NO: 5175680 - DNA, 25 bp, Homo sapien
agctctgagtgatatggttctgcca

SEQ ID NO: 5175681 - DNA, 25 bp, Homo sapien
tgcttccaacatgccaagttctgag

SEQ ID NO: 5175682 - DNA, 25 bp, Homo sapien
tagtataagcaggtaaatggtgttt

SEQ ID NO: 5175683 - DNA, 25 bp, Homo sapien
tgtttattagagataagtggacgct

SEQ ID NO: 5175684 - DNA, 25 bp, Homo sapien
catatagctttagtataagcaggta

SEQ ID NO: 5175685 - DNA, 25 bp, Homo sapien
taagtggacgctgtacatcatcatt

SEQ ID NO: 5175686 - DNA, 25 bp, Homo sapien
ggtctgtgacgcatactgtatttga

SEQ ID NO: 5175687 - DNA, 25 bp, Homo sapien
tattcacagcagaaaaccttaaatc

SEQ ID NO: 5175688 - DNA, 25 bp, Homo sapien
aaactcgaaaggttgtaggtctgtg

SEQ ID NO: 5175689 - DNA, 25 bp, Homo sapien
cagaacccgtactgtttaactggtg

SEQ ID NO: 5175690 - DNA, 25 bp, Homo sapien
taatttcccacaccgggcagaatgc

SEQ ID NO: 5175691 - DNA, 25 bp, Homo sapien
agtcatttcatagtgtgtcctggag

SEQ ID NO: 5175692 - DNA, 25 bp, Homo sapien
catagctaaaatatcatgccagaat

SEQ ID NO: 5175693 - DNA, 25 bp, Homo sapien
taatagcttcaacccaactaggaca

SEQ ID NO: 5175694 - DNA, 25 bp, Homo sapien
tttgcaatcagtccattgagtagca

SEQ ID NO: 5175695 - DNA, 25 bp, Homo sapien
gtttttgcaatcagtccattgagta

SEQ ID NO: 5175696 - DNA, 25 bp, Homo sapien
ttgcaatcagtccattgagtagcat

SEQ ID NO: 5175697 - DNA, 25 bp, Homo sapien
ttttgcaatcagtccattgagtagc

SEQ ID NO: 5175698 - DNA, 25 bp, Homo sapien
caatggtcattttacacctcaggtc

SEQ ID NO: 5175699 - DNA, 25 bp, Homo sapien
acaatggtcattttacacctcaggt

SEQ ID NO: 5175700 - DNA, 25 bp, Homo sapien
aatggtcattttacacctcaggtca

SEQ ID NO: 5175701 - DNA, 25 bp, Homo sapien
cttcctgcatgttgatggcagttgg

SEQ ID NO: 5175702 - DNA, 25 bp, Homo sapien
caaacctttcagctttttgccaact

SEQ ID NO: 5175703 - DNA, 25 bp, Homo sapien
ccaacttcctgcatgttgatggcag

SEQ ID NO: 5175704 - DNA, 25 bp, Homo sapien
ttttgccaacttcctgcatgttgat

SEQ ID NO: 5175705 - DNA, 25 bp, Homo sapien
agttttgcttatacagttttaagag

SEQ ID NO: 5175706 - DNA, 25 bp, Homo sapien
gtctttccagtcttattccagtcct

SEQ ID NO: 5175707 - DNA, 25 bp, Homo sapien
tttaagagcctccacattacaccct

SEQ ID NO: 5175708 - DNA, 25 bp, Homo sapien
acattacttcctttaagagcctcca

SEQ ID NO: 5175709 - DNA, 25 bp, Homo sapien
tggcacatgcaaattcccatacttg

SEQ ID NO: 5175710 - DNA, 25 bp, Homo sapien
taaattctcatcaacaaatgtattg

SEQ ID NO: 5175711 - DNA, 25 bp, Homo sapien
cccatacttgtgtgtaagccagaga

SEQ ID NO: 5175712 - DNA, 25 bp, Homo sapien
tgtattgatagagtcagcttttggc

SEQ ID NO: 5175713 - DNA, 25 bp, Homo sapien
gagatacactctgctgatttcatgg

SEQ ID NO: 5175714 - DNA, 25 bp, Homo sapien
tgatctctgatcgtttaggcacagg

SEQ ID NO: 5175715 - DNA, 25 bp, Homo sapien
tctgatcgtttaggcacaggtactg

SEQ ID NO: 5175716 - DNA, 25 bp, Homo sapien
gccctgatctctgatcgtttaggca

SEQ ID NO: 5175717 - DNA, 25 bp, Homo sapien
cacttagttcataaggacccaaatg

SEQ ID NO: 5175718 - DNA, 25 bp, Homo sapien
catgctgccgaaaagcaacattaat

SEQ ID NO: 5175719 - DNA, 25 bp, Homo sapien
tttgcttcaaatttagttgtcaaaa

SEQ ID NO: 5175720 - DNA, 25 bp, Homo sapien
tgtgtcatccctgataaatcatgct

SEQ ID NO: 5175721 - DNA, 25 bp, Homo sapien
ttggaagtagtgagatgaagagaga

SEQ ID NO: 5175722 - DNA, 25 bp, Homo sapien
gccacaatgatcatagggttggaag

SEQ ID NO: 5175723 - DNA, 25 bp, Homo sapien
tggactagtgccacaatgatcatag

SEQ ID NO: 5175724 - DNA, 25 bp, Homo sapien
gaaagctggatatgaggaagggcca

SEQ ID NO: 5175725 - DNA, 25 bp, Homo sapien
ttttcgattatgagggtctgtgaca

SEQ ID NO: 5175726 - DNA, 25 bp, Homo sapien
ccagtctggcgctttgcttttcctt

SEQ ID NO: 5175727 - DNA, 25 bp, Homo sapien
tctgaggggctaacccacccctgga

SEQ ID NO: 5175728 - DNA, 25 bp, Homo sapien
tgaaattgacttttcgattatgagg

SEQ ID NO: 5175729 - DNA, 25 bp, Homo sapien
ctttcgtttctatagccccttcctg

SEQ ID NO: 5175730 - DNA, 25 bp, Homo sapien
agcgccgattcaggcccctttcgtt

SEQ ID NO: 5175731 - DNA, 25 bp, Homo sapien
ccgtggagcggcgaaagcgccgatt

SEQ ID NO: 5175732 - DNA, 25 bp, Homo sapien
ctgctgcattcgaggtccgtggagc

SEQ ID NO: 5175733 - DNA, 25 bp, Homo sapien
gagccgaccgaggtaaggagaacac

SEQ ID NO: 5175734 - DNA, 25 bp, Homo sapien
gatttctgaaccaagtgcctgagtc

SEQ ID NO: 5175735 - DNA, 25 bp, Homo sapien
cttctgtccgcgaattctaagcgct

SEQ ID NO: 5175736 - DNA, 25 bp, Homo sapien
tctaagcgctgcagatgttggaatg

SEQ ID NO: 5175737 - DNA, 25 bp, Homo sapien
ttattgccgattgccagggtgctga

SEQ ID NO: 5175738 - DNA, 25 bp, Homo sapien
tattgccgattgccagggtgctgac

SEQ ID NO: 5175739 - DNA, 25 bp, Homo sapien
cagaagcagccctgtgctcggctga

SEQ ID NO: 5175740 - DNA, 25 bp, Homo sapien
tgctgctcagcataaaagttaaaag

SEQ ID NO: 5175741 - DNA, 25 bp, Homo sapien
tcccttcttacgcaacggttaatga

SEQ ID NO: 5175742 - DNA, 25 bp, Homo sapien
tactgggattctgtgtagagccgag

SEQ ID NO: 5175743 - DNA, 25 bp, Homo sapien
agaataactttatcttcacgctcat

SEQ ID NO: 5175744 - DNA, 25 bp, Homo sapien
tgagaataactttatcttcacgctc

SEQ ID NO: 5175745 - DNA, 25 bp, Homo sapien
gagaataactttatcttcacgctca

SEQ ID NO: 5175746 - DNA, 25 bp, Homo sapien
ctgagaataactttatcttcacgct

SEQ ID NO: 5175747 - DNA, 25 bp, Homo sapien
attagcttgttcaccactatcacag

SEQ ID NO: 5175748 - DNA, 25 bp, Homo sapien
tgtcggtacgatcgaatcctacagc

SEQ ID NO: 5175749 - DNA, 25 bp, Homo sapien
gaataatgaaatcacttccagagcc

SEQ ID NO: 5175750 - DNA, 25 bp, Homo sapien
tcaaatggatacttgggacatctgc

SEQ ID NO: 5175751 - DNA, 25 bp, Homo sapien
cagtctatgtaggtaaacagtatat

SEQ ID NO: 5175752 - DNA, 25 bp, Homo sapien
caaaactattcgctggtgattgctc

SEQ ID NO: 5175753 - DNA, 25 bp, Homo sapien
aacagtatattctagcagtttaggc

SEQ ID NO: 5175754 - DNA, 25 bp, Homo sapien
gggagaattttggtatcaagaaaca

SEQ ID NO: 5175755 - DNA, 25 bp, Homo sapien
ccttctgtagcctacatacacaggg

SEQ ID NO: 5175756 - DNA, 25 bp, Homo sapien
tacacagggctaggcttgagctcca

SEQ ID NO: 5175757 - DNA, 25 bp, Homo sapien
catccttttggccaccttctgtagc

SEQ ID NO: 5175758 - DNA, 25 bp, Homo sapien
ttctgtagcctacatacacagggct

SEQ ID NO: 5175759 - DNA, 25 bp, Homo sapien
gagtgtaagcatgccaaccctctct

SEQ ID NO: 5175760 - DNA, 25 bp, Homo sapien
gactcgaaagtttgcatacaactgt

SEQ ID NO: 5175761 - DNA, 25 bp, Homo sapien
ctagagctgatgtcttgcattggca

SEQ ID NO: 5175762 - DNA, 25 bp, Homo sapien
ttctgtctgacattgctttgctgca

SEQ ID NO: 5175763 - DNA, 25 bp, Homo sapien
catttggtttttcgtgatccttcac

SEQ ID NO: 5175764 - DNA, 25 bp, Homo sapien
tggtttttcgtgatccttcacattc

SEQ ID NO: 5175765 - DNA, 25 bp, Homo sapien
tttggtttttcgtgatccttcacat

SEQ ID NO: 5175766 - DNA, 25 bp, Homo sapien
gatcatttggtttttcgtgatcctt

SEQ ID NO: 5175767 - DNA, 25 bp, Homo sapien
gcaggggtatccctgtttttactgc

SEQ ID NO: 5175768 - DNA, 25 bp, Homo sapien
agatcctttggtagggtcttgaact

SEQ ID NO: 5175769 - DNA, 25 bp, Homo sapien
tcagctgtaagatcctttggtaggg

SEQ ID NO: 5175770 - DNA, 25 bp, Homo sapien
tggtagggtcttgaactcggggcag

SEQ ID NO: 5175771 - DNA, 25 bp, Homo sapien
caaaatgtctgctgtctgtcatatg

SEQ ID NO: 5175772 - DNA, 25 bp, Homo sapien
aaaatgtctgctgtctgtcatatgc

SEQ ID NO: 5175773 - DNA, 25 bp, Homo sapien
tcaaaatgtctgctgtctgtcatat

SEQ ID NO: 5175774 - DNA, 25 bp, Homo sapien
atgttagcagggacacatggcagag

SEQ ID NO: 5175775 - DNA, 25 bp, Homo sapien
atctcatgtagatggctgtgtgcag

SEQ ID NO: 5175776 - DNA, 25 bp, Homo sapien
gcacagatctcatgtagatggctgt

SEQ ID NO: 5175777 - DNA, 25 bp, Homo sapien
cttgatgataaaaagcagtccagga

SEQ ID NO: 5175778 - DNA, 25 bp, Homo sapien
agctgactttctctaggaggattca

SEQ ID NO: 5175779 - DNA, 25 bp, Homo sapien
gatatgtcagcaaagccaaaatttc

SEQ ID NO: 5175780 - DNA, 25 bp, Homo sapien
tcttctaccaatgcaggaagctgac

SEQ ID NO: 5175781 - DNA, 25 bp, Homo sapien
ggaggattcaatggctggctagcta

SEQ ID NO: 5175782 - DNA, 25 bp, Homo sapien
tagtgattgcaagcttaccaggagc

SEQ ID NO: 5175783 - DNA, 25 bp, Homo sapien
tcagtactggtctcatcagagtctg

SEQ ID NO: 5175784 - DNA, 25 bp, Homo sapien
taaagtcaaggtaccaaagaggcag

SEQ ID NO: 5175785 - DNA, 25 bp, Homo sapien
gaggcagagggtaattcatggtcac

SEQ ID NO: 5175786 - DNA, 25 bp, Homo sapien
tggatttcggtcatcaataacgtga

SEQ ID NO: 5175787 - DNA, 25 bp, Homo sapien
ctgctgctggaaataaagtttgaaa

SEQ ID NO: 5175788 - DNA, 25 bp, Homo sapien
taaagtttgaaagcttctgcgtaca

SEQ ID NO: 5175789 - DNA, 25 bp, Homo sapien
taaggagtacaaatggatttcggtc

SEQ ID NO: 5175790 - DNA, 25 bp, Homo sapien
aagggatcaactgaatattacagaa

SEQ ID NO: 5175791 - DNA, 25 bp, Homo sapien
ggaaaagccaaattacccgagcatg

SEQ ID NO: 5175792 - DNA, 25 bp, Homo sapien
cacaatagaggaaatgaaagggatc

SEQ ID NO: 5175793 - DNA, 25 bp, Homo sapien
gccatcttggtaaggcacaatagag

SEQ ID NO: 5175794 - DNA, 25 bp, Homo sapien
ttctggttctgcgttagtcagctcg

SEQ ID NO: 5175795 - DNA, 25 bp, Homo sapien
agctcggccaacagaacaaatccca

SEQ ID NO: 5175796 - DNA, 25 bp, Homo sapien
cttccagaattgtgatgtgtaaccc

SEQ ID NO: 5175797 - DNA, 25 bp, Homo sapien
tccagaattgtgatgtgtaacccca

SEQ ID NO: 5175798 - DNA, 25 bp, Homo sapien
cagggtcgctgactatctgggactc

SEQ ID NO: 5175799 - DNA, 25 bp, Homo sapien
ttgatcattgctgcagggtcgctga

SEQ ID NO: 5175800 - DNA, 25 bp, Homo sapien
ctgggactctgctatagaaactaac

SEQ ID NO: 5175801 - DNA, 25 bp, Homo sapien
gaatgttcacaccagctgttggagc

SEQ ID NO: 5175802 - DNA, 25 bp, Homo sapien
aatatttggcagatcccatagctct

SEQ ID NO: 5175803 - DNA, 25 bp, Homo sapien
ttccctcctctggatgtaatatttg

SEQ ID NO: 5175804 - DNA, 25 bp, Homo sapien
cctcctctggatgtaatatttggca

SEQ ID NO: 5175805 - DNA, 25 bp, Homo sapien
atatttggcagatcccatagctctt

SEQ ID NO: 5175806 - DNA, 25 bp, Homo sapien
tctgttctgaatggcattaactttc

SEQ ID NO: 5175807 - DNA, 25 bp, Homo sapien
ttatcttcgtaaatgtctggccagc

SEQ ID NO: 5175808 - DNA, 25 bp, Homo sapien
gccagccagaactaaaggtaggtgg

SEQ ID NO: 5175809 - DNA, 25 bp, Homo sapien
tttcagaggcaatttatcttcgtaa

SEQ ID NO: 5175810 - DNA, 25 bp, Homo sapien
aggacagtctatccaatcctgctgt

SEQ ID NO: 5175811 - DNA, 25 bp, Homo sapien
gtttgccaaatagaataatgtccat

SEQ ID NO: 5175812 - DNA, 25 bp, Homo sapien
cagaggacagtctatccaatcctgc

SEQ ID NO: 5175813 - DNA, 25 bp, Homo sapien
gaggacagtctatccaatcctgctg

SEQ ID NO: 5175814 - DNA, 25 bp, Homo sapien
aaacataagccttatcagcaactga

SEQ ID NO: 5175815 - DNA, 25 bp, Homo sapien
accatctgtttgaggagctgtttct

SEQ ID NO: 5175816 - DNA, 25 bp, Homo sapien
aatcttgcagtcaaccatctgtttg

SEQ ID NO: 5175817 - DNA, 25 bp, Homo sapien
gcttcttcctcatagacagaattaa

SEQ ID NO: 5175818 - DNA, 25 bp, Homo sapien
ggactactggttggactgacctctg

SEQ ID NO: 5175819 - DNA, 25 bp, Homo sapien
gggactactggttggactgacctct

SEQ ID NO: 5175820 - DNA, 25 bp, Homo sapien
tcaaggttgagggcgttttatcaag

SEQ ID NO: 5175821 - DNA, 25 bp, Homo sapien
ttgaatagaatgacacaacaggagc

SEQ ID NO: 5175822 - DNA, 25 bp, Homo sapien
aaatattgctgaagcatgcgttcat

SEQ ID NO: 5175823 - DNA, 25 bp, Homo sapien
gaaatattgctgaagcatgcgttca

SEQ ID NO: 5175824 - DNA, 25 bp, Homo sapien
tgaaatattgctgaagcatgcgttc

SEQ ID NO: 5175825 - DNA, 25 bp, Homo sapien
cttgaaatattgctgaagcatgcgt

SEQ ID NO: 5175826 - DNA, 25 bp, Homo sapien
cgacaatgtgttctcccatgtggag

SEQ ID NO: 5175827 - DNA, 25 bp, Homo sapien
gggtctgatacctcccgacaatgtg

SEQ ID NO: 5175828 - DNA, 25 bp, Homo sapien
cccatgtggagatacgctcttctta

SEQ ID NO: 5175829 - DNA, 25 bp, Homo sapien
gctcttcttactaaggttatcactt

SEQ ID NO: 5175830 - DNA, 25 bp, Homo sapien
tgacataatcttttattgtagtata

SEQ ID NO: 5175831 - DNA, 25 bp, Homo sapien
ttgtagtataaaggtgcatgtcaga

SEQ ID NO: 5175832 - DNA, 25 bp, Homo sapien
ctagtttggtgagttaccacatcct

SEQ ID NO: 5175833 - DNA, 25 bp, Homo sapien
gttaccacatcctttgacataatct

SEQ ID NO: 5175834 - DNA, 25 bp, Homo sapien
aaggacaaagtcagggcatggatac

SEQ ID NO: 5175835 - DNA, 25 bp, Homo sapien
gaattaaggccatcgtgaggtacgc

SEQ ID NO: 5175836 - DNA, 25 bp, Homo sapien
tcagggcatggatacccatcatggg

SEQ ID NO: 5175837 - DNA, 25 bp, Homo sapien
ggtacgcctgcttagcccagtgctt

SEQ ID NO: 5175838 - DNA, 25 bp, Homo sapien
agttattgtcaagtggtgatgaata

SEQ ID NO: 5175839 - DNA, 25 bp, Homo sapien
gttattgtcaagtggtgatgaatac

SEQ ID NO: 5175840 - DNA, 25 bp, Homo sapien
cagttattgtcaagtggtgatgaat

SEQ ID NO: 5175841 - DNA, 25 bp, Homo sapien
tcagttattgtcaagtggtgatgaa

SEQ ID NO: 5175842 - DNA, 25 bp, Homo sapien
ggtggcaatgtcattttattgacag

SEQ ID NO: 5175843 - DNA, 25 bp, Homo sapien
aaaacttccagcaattgcaaagcct

SEQ ID NO: 5175844 - DNA, 25 bp, Homo sapien
ttattgacagttttaggacagcctt

SEQ ID NO: 5175845 - DNA, 25 bp, Homo sapien
tgacagttttaggacagccttcaaa

SEQ ID NO: 5175846 - DNA, 25 bp, Homo sapien
ctgagtaaccctggttgattgttct

SEQ ID NO: 5175847 - DNA, 25 bp, Homo sapien
tgagtaaccctggttgattgttctt

SEQ ID NO: 5175848 - DNA, 25 bp, Homo sapien
cagctttgacggactgtaaactcct

SEQ ID NO: 5175849 - DNA, 25 bp, Homo sapien
gactgtaaactccttacttgcctct

SEQ ID NO: 5175850 - DNA, 25 bp, Homo sapien
cttctatcagctttgacggactgta

SEQ ID NO: 5175851 - DNA, 25 bp, Homo sapien
tatcagctttgacggactgtaaact

SEQ ID NO: 5175852 - DNA, 25 bp, Homo sapien
ctcggtggccctcctcaagtttctc

SEQ ID NO: 5175853 - DNA, 25 bp, Homo sapien
actcggtggccctcctcaagtttct

SEQ ID NO: 5175854 - DNA, 25 bp, Homo sapien
tcggtggccctcctcaagtttctca

SEQ ID NO: 5175855 - DNA, 25 bp, Homo sapien
cggtggccctcctcaagtttctcac

SEQ ID NO: 5175856 - DNA, 25 bp, Homo sapien
tgtcagcctggtcttacttgaaacc

SEQ ID NO: 5175857 - DNA, 25 bp, Homo sapien
aaatctgggcgatgggcttgaatca

SEQ ID NO: 5175858 - DNA, 25 bp, Homo sapien
tgtcatagcgatgtatgtcagcctg

SEQ ID NO: 5175859 - DNA, 25 bp, Homo sapien
tcaaagagtgatggtaaacagtgtc

SEQ ID NO: 5175860 - DNA, 25 bp, Homo sapien
gtcttgtccaaaaccacacgagaga

SEQ ID NO: 5175861 - DNA, 25 bp, Homo sapien
tcaatgttcgtcttgtccaaaacca

SEQ ID NO: 5175862 - DNA, 25 bp, Homo sapien
aaaccacacgagagactcaatgata

SEQ ID NO: 5175863 - DNA, 25 bp, Homo sapien
tcatataaaccggacaatcaatgtt

SEQ ID NO: 5175864 - DNA, 25 bp, Homo sapien
gcatttgcctcacattagtcagcat

SEQ ID NO: 5175865 - DNA, 25 bp, Homo sapien
tgctcgtccataatctgttggcagc

SEQ ID NO: 5175866 - DNA, 25 bp, Homo sapien
agcatttgcctcacattagtcagca

SEQ ID NO: 5175867 - DNA, 25 bp, Homo sapien
taagattttgctcgtccataatctg

SEQ ID NO: 5175868 - DNA, 25 bp, Homo sapien
cagtctttggttttgcttccctaat

SEQ ID NO: 5175869 - DNA, 25 bp, Homo sapien
gcttctgaattgaagagctcagcca

SEQ ID NO: 5175870 - DNA, 25 bp, Homo sapien
ttctgaattgaagagctcagccact

SEQ ID NO: 5175871 - DNA, 25 bp, Homo sapien
tctgaattgaagagctcagccactc

SEQ ID NO: 5175872 - DNA, 25 bp, Homo sapien
tgcttctgaattgaagagctcagcc

SEQ ID NO: 5175873 - DNA, 25 bp, Homo sapien
gaaaattctccgattatgtccggct

SEQ ID NO: 5175874 - DNA, 25 bp, Homo sapien
tacctttttatgataatgtgcacac

SEQ ID NO: 5175875 - DNA, 25 bp, Homo sapien
tcctaatttctacgtcatttcttcc

SEQ ID NO: 5175876 - DNA, 25 bp, Homo sapien
ctttagcatagtcatcatgtgttga

SEQ ID NO: 5175877 - DNA, 25 bp, Homo sapien
tgcaggaaccctgtatacctcaagt

SEQ ID NO: 5175878 - DNA, 25 bp, Homo sapien
taatgatgaattcgttactttcccg

SEQ ID NO: 5175879 - DNA, 25 bp, Homo sapien
accacattttgaactactggacatc

SEQ ID NO: 5175880 - DNA, 25 bp, Homo sapien
tcactttctggacatctctatttgc

SEQ ID NO: 5175881 - DNA, 25 bp, Homo sapien
caggttggaagcatagggggctggg

SEQ ID NO: 5175882 - DNA, 25 bp, Homo sapien
gtggtaagggccggacaggcttcat

SEQ ID NO: 5175883 - DNA, 25 bp, Homo sapien
gatgtggtaagggccggacaggctt

SEQ ID NO: 5175884 - DNA, 25 bp, Homo sapien
ggttggaagcatagggggctgggta

SEQ ID NO: 5175885 - DNA, 25 bp, Homo sapien
cagacaccaacgttggaccaacaac

SEQ ID NO: 5175886 - DNA, 25 bp, Homo sapien
cgttatatgagtgccacctttggtg

SEQ ID NO: 5175887 - DNA, 25 bp, Homo sapien
tgggaaatggctggcccaaagccat

SEQ ID NO: 5175888 - DNA, 25 bp, Homo sapien
ttattcaaattaccgttcagacacc

SEQ ID NO: 5175889 - DNA, 25 bp, Homo sapien
ccaaaggcgccaattgtgatgggaa

SEQ ID NO: 5175890 - DNA, 25 bp, Homo sapien
cctttgagtgaacccctgtggagcg

SEQ ID NO: 5175891 - DNA, 25 bp, Homo sapien
gaaattccccagctgaatgccaaac

SEQ ID NO: 5175892 - DNA, 25 bp, Homo sapien
ttcagtccttggttcctcaacacag

SEQ ID NO: 5175893 - DNA, 25 bp, Homo sapien
ccatgtggactctggaggaaaactc

SEQ ID NO: 5175894 - DNA, 25 bp, Homo sapien
tttgaatttggcaccatggatcctg

SEQ ID NO: 5175895 - DNA, 25 bp, Homo sapien
ccatgtcgtgccatgtggactctgg

SEQ ID NO: 5175896 - DNA, 25 bp, Homo sapien
ttgaatttggcaccatggatcctga

SEQ ID NO: 5175897 - DNA, 25 bp, Homo sapien
taatagatggccacatgaatgcttg

SEQ ID NO: 5175898 - DNA, 25 bp, Homo sapien
ccagtgttggttgcaccgaggtcct

SEQ ID NO: 5175899 - DNA, 25 bp, Homo sapien
ctatgagaaaagagtgcgtctggtc

SEQ ID NO: 5175900 - DNA, 25 bp, Homo sapien
tgagctcccaaagaagacggctttc

SEQ ID NO: 5175901 - DNA, 25 bp, Homo sapien
ctgaggctagacgtgttcaacatgg

SEQ ID NO: 5175902 - DNA, 25 bp, Homo sapien
tgaggctagacgtgttcaacatggc

SEQ ID NO: 5175903 - DNA, 25 bp, Homo sapien
aattttagctgacagtgttattcag

SEQ ID NO: 5175904 - DNA, 25 bp, Homo sapien
taattttagctgacagtgttattca

SEQ ID NO: 5175905 - DNA, 25 bp, Homo sapien
ttttagctgacagtgttattcagga

SEQ ID NO: 5175906 - DNA, 25 bp, Homo sapien
attttagctgacagtgttattcagg

SEQ ID NO: 5175907 - DNA, 25 bp, Homo sapien
tctcaaataacttagatagaactat

SEQ ID NO: 5175908 - DNA, 25 bp, Homo sapien
gaaggtatctcaaataacttagata

SEQ ID NO: 5175909 - DNA, 25 bp, Homo sapien
tgaaggtatctcaaataacttagat

SEQ ID NO: 5175910 - DNA, 25 bp, Homo sapien
ggtatctcaaataacttagatagaa

SEQ ID NO: 5175911 - DNA, 25 bp, Homo sapien
catgtattttacatagcagacatac

SEQ ID NO: 5175912 - DNA, 25 bp, Homo sapien
ccatctgaccgagccatttggagtc

SEQ ID NO: 5175913 - DNA, 25 bp, Homo sapien
tttacatagcagacatacttcaagt

SEQ ID NO: 5175914 - DNA, 25 bp, Homo sapien
agggtgcaccatctgaccgagccat

SEQ ID NO: 5175915 - DNA, 25 bp, Homo sapien
tctgagagtcgcaattttaagccac

SEQ ID NO: 5175916 - DNA, 25 bp, Homo sapien
gagtcgcaattttaagccacagagg

SEQ ID NO: 5175917 - DNA, 25 bp, Homo sapien
tgcttctgagagtcgcaattttaag

SEQ ID NO: 5175918 - DNA, 25 bp, Homo sapien
aatgcttctgagagtcgcaatttta

SEQ ID NO: 5175919 - DNA, 25 bp, Homo sapien
caggtttacgcttaaaagttgcttg

SEQ ID NO: 5175920 - DNA, 25 bp, Homo sapien
tttctggccgttgttcctctcaatg

SEQ ID NO: 5175921 - DNA, 25 bp, Homo sapien
gctgatatttattcgtgacagcagc

SEQ ID NO: 5175922 - DNA, 25 bp, Homo sapien
tctcaatgatagtgtagcagactag

SEQ ID NO: 5175923 - DNA, 25 bp, Homo sapien
tccaatgggttggtgcacgttcaca

SEQ ID NO: 5175924 - DNA, 25 bp, Homo sapien
ctcctgaagctcttcgacacttatg

SEQ ID NO: 5175925 - DNA, 25 bp, Homo sapien
gaagctcttcgacacttatgtcttc

SEQ ID NO: 5175926 - DNA, 25 bp, Homo sapien
ttaaactcctgaagctcttcgacac

SEQ ID NO: 5175927 - DNA, 25 bp, Homo sapien
cctgaagctcttcgacacttatgtc

SEQ ID NO: 5175928 - DNA, 25 bp, Homo sapien
tcgtttacttactgcagacattgcg

SEQ ID NO: 5175929 - DNA, 25 bp, Homo sapien
gtctttcatttcctcggcagaatac

SEQ ID NO: 5175930 - DNA, 25 bp, Homo sapien
gaataaagctcgcacttcactcttt

SEQ ID NO: 5175931 - DNA, 25 bp, Homo sapien
tttcctcggcagaatactcctggca

SEQ ID NO: 5175932 - DNA, 25 bp, Homo sapien
tcagagatccctagtttccaggttt

SEQ ID NO: 5175933 - DNA, 25 bp, Homo sapien
gaaagctgaaggatctctccctgca

SEQ ID NO: 5175934 - DNA, 25 bp, Homo sapien
cagtggcttcagagatccctagttt

SEQ ID NO: 5175935 - DNA, 25 bp, Homo sapien
tctctaggctacttggcctcatgga

SEQ ID NO: 5175936 - DNA, 25 bp, Homo sapien
caggctctaatatatggggagcgaa

SEQ ID NO: 5175937 - DNA, 25 bp, Homo sapien
gctctaatatatggggagcgaacca

SEQ ID NO: 5175938 - DNA, 25 bp, Homo sapien
taatatatggggagcgaaccagagg

SEQ ID NO: 5175939 - DNA, 25 bp, Homo sapien
gggagcgaaccagagggcggatctg

SEQ ID NO: 5175940 - DNA, 25 bp, Homo sapien
taaccaatcggtaatctccagccac

SEQ ID NO: 5175941 - DNA, 25 bp, Homo sapien
cccaatggagtgtttggctcccaga

SEQ ID NO: 5175942 - DNA, 25 bp, Homo sapien
aatgtacaggccagatcttagggtg

SEQ ID NO: 5175943 - DNA, 25 bp, Homo sapien
aactgctcagactccacccagtgga

SEQ ID NO: 5175944 - DNA, 25 bp, Homo sapien
cactgtgtctctaccgcttggcatt

SEQ ID NO: 5175945 - DNA, 25 bp, Homo sapien
tgttaggatgtctcaggcaaaagta

SEQ ID NO: 5175946 - DNA, 25 bp, Homo sapien
caacattgatggatggtgctttcaa

SEQ ID NO: 5175947 - DNA, 25 bp, Homo sapien
aaagtagcccgtcttcctctgaaca

SEQ ID NO: 5175948 - DNA, 25 bp, Homo sapien
tttctcaactgtcgatggtctccac

SEQ ID NO: 5175949 - DNA, 25 bp, Homo sapien
cttttctcaactgtcgatggtctcc

SEQ ID NO: 5175950 - DNA, 25 bp, Homo sapien
ttctcaactgtcgatggtctccact

SEQ ID NO: 5175951 - DNA, 25 bp, Homo sapien
ttttctcaactgtcgatggtctcca

SEQ ID NO: 5175952 - DNA, 25 bp, Homo sapien
tctggacaacgtagcaagatgtcat

SEQ ID NO: 5175953 - DNA, 25 bp, Homo sapien
gtctggacaacgtagcaagatgtca

SEQ ID NO: 5175954 - DNA, 25 bp, Homo sapien
gaacacttttacactgttggtggga

SEQ ID NO: 5175955 - DNA, 25 bp, Homo sapien
tgctggagaggatgtggagaaacag

SEQ ID NO: 5175956 - DNA, 25 bp, Homo sapien
ctcatgtcggttagaatggcgatca

SEQ ID NO: 5175957 - DNA, 25 bp, Homo sapien
cattaaaaagtcaggaaacaacagg

SEQ ID NO: 5175958 - DNA, 25 bp, Homo sapien
gagagccaccctctcatccgttggg

SEQ ID NO: 5175959 - DNA, 25 bp, Homo sapien
catttgagttcagccgcaatgcgct

SEQ ID NO: 5175960 - DNA, 25 bp, Homo sapien
tgtgtcagccggcagctcaagagat

SEQ ID NO: 5175961 - DNA, 25 bp, Homo sapien
atataaaagcactccctgaagtgcc

SEQ ID NO: 5175962 - DNA, 25 bp, Homo sapien
cagaattctataggttgttgggtac

SEQ ID NO: 5175963 - DNA, 25 bp, Homo sapien
gaattctataggttgttgggtacat

SEQ ID NO: 5175964 - DNA, 25 bp, Homo sapien
ttcttccagaattctataggttgtt

SEQ ID NO: 5175965 - DNA, 25 bp, Homo sapien
ttccagaattctataggttgttggg

SEQ ID NO: 5175966 - DNA, 25 bp, Homo sapien
gggcttgctccagttagtccttaag

SEQ ID NO: 5175967 - DNA, 25 bp, Homo sapien
caacatattgaattagggcccactc

SEQ ID NO: 5175968 - DNA, 25 bp, Homo sapien
catgcttgacttaagttcaggaaac

SEQ ID NO: 5175969 - DNA, 25 bp, Homo sapien
cactgtggaccttatgagcttactc

SEQ ID NO: 5175970 - DNA, 25 bp, Homo sapien
tcaacctgatcccttttatagatat

SEQ ID NO: 5175971 - DNA, 25 bp, Homo sapien
catctatttcaacctgatccctttt

SEQ ID NO: 5175972 - DNA, 25 bp, Homo sapien
tatttcaacctgatcccttttatag

SEQ ID NO: 5175973 - DNA, 25 bp, Homo sapien
cctgatcccttttatagatattgtt

SEQ ID NO: 5175974 - DNA, 25 bp, Homo sapien
tggttgaaggccaagagaatttccc

SEQ ID NO: 5175975 - DNA, 25 bp, Homo sapien
gttgaaggccaagagaatttcccaa

SEQ ID NO: 5175976 - DNA, 25 bp, Homo sapien
gaaggccaagagaatttcccaagaa

SEQ ID NO: 5175977 - DNA, 25 bp, Homo sapien
tcccaagaaatagatggcattttca

SEQ ID NO: 5175978 - DNA, 25 bp, Homo sapien
tttggcccacttatctagttcttct

SEQ ID NO: 5175979 - DNA, 25 bp, Homo sapien
attttggcccacttatctagttctt

SEQ ID NO: 5175980 - DNA, 25 bp, Homo sapien
ggcccacttatctagttcttcttca

SEQ ID NO: 5175981 - DNA, 25 bp, Homo sapien
cccacttatctagttcttcttcaag

SEQ ID NO: 5175982 - DNA, 25 bp, Homo sapien
taaaactaccttcatcagcatgtgg

SEQ ID NO: 5175983 - DNA, 25 bp, Homo sapien
ggaccttaaaggattcccatgagaa

SEQ ID NO: 5175984 - DNA, 25 bp, Homo sapien
tctttgagaataaacataggctgct

SEQ ID NO: 5175985 - DNA, 25 bp, Homo sapien
tgaaagagacggttacatagtaccc

SEQ ID NO: 5175986 - DNA, 25 bp, Homo sapien
ctgtgtcagtaaactggtgctggtg

SEQ ID NO: 5175987 - DNA, 25 bp, Homo sapien
aatctgtgtcagtaaactggtgctg

SEQ ID NO: 5175988 - DNA, 25 bp, Homo sapien
tctgtgtcagtaaactggtgctggt

SEQ ID NO: 5175989 - DNA, 25 bp, Homo sapien
tgaatctgtgtcagtaaactggtgc

SEQ ID NO: 5175990 - DNA, 25 bp, Homo sapien
catccatgtctccagaaagaccttt

SEQ ID NO: 5175991 - DNA, 25 bp, Homo sapien
catctcctgtaatccaaggacgctt

SEQ ID NO: 5175992 - DNA, 25 bp, Homo sapien
tgtaatccaaggacgcttccccact

SEQ ID NO: 5175993 - DNA, 25 bp, Homo sapien
taaggcctacaatactctcatctcc

SEQ ID NO: 5175994 - DNA, 25 bp, Homo sapien
ttccccacttcatgaccataggctg

SEQ ID NO: 5175995 - DNA, 25 bp, Homo sapien
gattttaatgatttgccagttgcca

SEQ ID NO: 5175996 - DNA, 25 bp, Homo sapien
catttcccttccagccacgttgatt

SEQ ID NO: 5175997 - DNA, 25 bp, Homo sapien
ctctctaattactggtcaagattca

SEQ ID NO: 5175998 - DNA, 25 bp, Homo sapien
tagcaccactccaattaccaaaata

SEQ ID NO: 5175999 - DNA, 25 bp, Homo sapien
tagttattgagaaagaggcccctta

SEQ ID NO: 5176000 - DNA, 25 bp, Homo sapien
gaatgtacgattctccctgaggcct

SEQ ID NO: 5176001 - DNA, 25 bp, Homo sapien
cagatgatgctcctactacaaggac

SEQ ID NO: 5176002 - DNA, 25 bp, Homo sapien
gcacagacgcgtttccagacaatac

SEQ ID NO: 5176003 - DNA, 25 bp, Homo sapien
gctcaacagggaagcctcctagcaa

SEQ ID NO: 5176004 - DNA, 25 bp, Homo sapien
caccaggcccgcagggctgcagctc

SEQ ID NO: 5176005 - DNA, 25 bp, Homo sapien
agggaagcctcctagcaatccacct

SEQ ID NO: 5176006 - DNA, 25 bp, Homo sapien
cagggctgcagctcaacagggaagc

SEQ ID NO: 5176007 - DNA, 25 bp, Homo sapien
atccagcgttggtccaagaaggctc

SEQ ID NO: 5176008 - DNA, 25 bp, Homo sapien
gtgtgccaggcagttgctgatcatc

SEQ ID NO: 5176009 - DNA, 25 bp, Homo sapien
tctccggtccaaaaatccagcgttg

SEQ ID NO: 5176010 - DNA, 25 bp, Homo sapien
ttcttaggggacacctctaagccaa

SEQ ID NO: 5176011 - DNA, 25 bp, Homo sapien
cactattatgctattttccggtggg

SEQ ID NO: 5176012 - DNA, 25 bp, Homo sapien
aatggaggcataagcagactgtaac

SEQ ID NO: 5176013 - DNA, 25 bp, Homo sapien
tcaccacattttggccaatcaaagg

SEQ ID NO: 5176014 - DNA, 25 bp, Homo sapien
catgaactgttacctaaatggaggc

SEQ ID NO: 5176015 - DNA, 25 bp, Homo sapien
tctgaaagaccgaaacagatgctcc

SEQ ID NO: 5176016 - DNA, 25 bp, Homo sapien
tgatttacaacccagaccactgaaa

SEQ ID NO: 5176017 - DNA, 25 bp, Homo sapien
taaactccctaaccataggagctat

SEQ ID NO: 5176018 - DNA, 25 bp, Homo sapien
cctttatcgataaagatggatccaa

SEQ ID NO: 5176019 - DNA, 25 bp, Homo sapien
ccaaagagggtttcagataaattgt

SEQ ID NO: 5176020 - DNA, 25 bp, Homo sapien
aagagggtttcagataaattgtaat

SEQ ID NO: 5176021 - DNA, 25 bp, Homo sapien
caaagagggtttcagataaattgta

SEQ ID NO: 5176022 - DNA, 25 bp, Homo sapien
agggtttcagataaattgtaataca

SEQ ID NO: 5176023 - DNA, 25 bp, Homo sapien
caaggtttcagtttagagaactcca

SEQ ID NO: 5176024 - DNA, 25 bp, Homo sapien
tcagaggtgtctgcgttagcaagat

SEQ ID NO: 5176025 - DNA, 25 bp, Homo sapien
ggaatgcttctatgacacaggtgtg

SEQ ID NO: 5176026 - DNA, 25 bp, Homo sapien
cagtaagcttgaagaggaaatccca

SEQ ID NO: 5176027 - DNA, 25 bp, Homo sapien
tagatgtttgtactatgtctaaaga

SEQ ID NO: 5176028 - DNA, 25 bp, Homo sapien
taatttagatgtttgtactatgtct

SEQ ID NO: 5176029 - DNA, 25 bp, Homo sapien
ctgtaaaataaacatatcgtaattt

SEQ ID NO: 5176030 - DNA, 25 bp, Homo sapien
catatcgtaatttagatgtttgtac

SEQ ID NO: 5176031 - DNA, 25 bp, Homo sapien
tcaaagcattcattagggctatttc

SEQ ID NO: 5176032 - DNA, 25 bp, Homo sapien
caaagcattcattagggctatttct

SEQ ID NO: 5176033 - DNA, 25 bp, Homo sapien
ttagaagatgtaaatttacagtcaa

SEQ ID NO: 5176034 - DNA, 25 bp, Homo sapien
cattagaagatgtaaatttacagtc

SEQ ID NO: 5176035 - DNA, 25 bp, Homo sapien
ctttggcttctagaagaattttata

SEQ ID NO: 5176036 - DNA, 25 bp, Homo sapien
ttggcgtaggcttaaaaaatgataa

SEQ ID NO: 5176037 - DNA, 25 bp, Homo sapien
agaattttatatcgttttggcgtag

SEQ ID NO: 5176038 - DNA, 25 bp, Homo sapien
ttatatcgttttggcgtaggcttaa

SEQ ID NO: 5176039 - DNA, 25 bp, Homo sapien
ctctcttggctttatcatccgcata

SEQ ID NO: 5176040 - DNA, 25 bp, Homo sapien
tttcttcaatgttaagtccgtgaag

SEQ ID NO: 5176041 - DNA, 25 bp, Homo sapien
tggctttatcatccgcatactttct

SEQ ID NO: 5176042 - DNA, 25 bp, Homo sapien
ccgtgaagttgtagttgtgactcaa

SEQ ID NO: 5176043 - DNA, 25 bp, Homo sapien
aaaaatagtttgcttgccatatggc

SEQ ID NO: 5176044 - DNA, 25 bp, Homo sapien
gcagaatccagtggtattaacagaa

SEQ ID NO: 5176045 - DNA, 25 bp, Homo sapien
taagcaaaatgatctaatagtaaca

SEQ ID NO: 5176046 - DNA, 25 bp, Homo sapien
gccatatggctagcccttgaaaaat

SEQ ID NO: 5176047 - DNA, 25 bp, Homo sapien
tgcatttatcaatctgatatcctgt

SEQ ID NO: 5176048 - DNA, 25 bp, Homo sapien
tccttattcctgactaataaaacac

SEQ ID NO: 5176049 - DNA, 25 bp, Homo sapien
caccacaaagtgcaagaagtccatg

SEQ ID NO: 5176050 - DNA, 25 bp, Homo sapien
gaaagtcttcaaaagccgaattgct

SEQ ID NO: 5176051 - DNA, 25 bp, Homo sapien
ggcaggaatattaaagtgctgtcca

SEQ ID NO: 5176052 - DNA, 25 bp, Homo sapien
gatcactgcaattgagtctccttcc

SEQ ID NO: 5176053 - DNA, 25 bp, Homo sapien
tgcaccccactgaacaggatcactg

SEQ ID NO: 5176054 - DNA, 25 bp, Homo sapien
caaggatatcctctattcttaaggt

SEQ ID NO: 5176055 - DNA, 25 bp, Homo sapien
gcaattagaacactcttaagtagag

SEQ ID NO: 5176056 - DNA, 25 bp, Homo sapien
gtagagtgatgtttggagtaaggtg

SEQ ID NO: 5176057 - DNA, 25 bp, Homo sapien
tagaacactcttaagtagagtgatg

SEQ ID NO: 5176058 - DNA, 25 bp, Homo sapien
tcatgcaattagaacactcttaagt

SEQ ID NO: 5176059 - DNA, 25 bp, Homo sapien
gaccagctgagtaccaatggcatca

SEQ ID NO: 5176060 - DNA, 25 bp, Homo sapien
cctggcctgctgactagaggcaaat

SEQ ID NO: 5176061 - DNA, 25 bp, Homo sapien
tagcatgtacttcctatcttaagta

SEQ ID NO: 5176062 - DNA, 25 bp, Homo sapien
atcacctacagcttgcctggcctgc

SEQ ID NO: 5176063 - DNA, 25 bp, Homo sapien
tgatgaccacttgaaatcttgtatt

SEQ ID NO: 5176064 - DNA, 25 bp, Homo sapien
ttcttctttgatgaccacttgaaat

SEQ ID NO: 5176065 - DNA, 25 bp, Homo sapien
tagttttcttctttgatgaccactt

SEQ ID NO: 5176066 - DNA, 25 bp, Homo sapien
tttgatgaccacttgaaatcttgta

SEQ ID NO: 5176067 - DNA, 25 bp, Homo sapien
ttattttcaccttgtcaattttcca

SEQ ID NO: 5176068 - DNA, 25 bp, Homo sapien
gatttaggcatacagtcttgattcc

SEQ ID NO: 5176069 - DNA, 25 bp, Homo sapien
tcaccttgtcaattttccatgaatt

SEQ ID NO: 5176070 - DNA, 25 bp, Homo sapien
attttcaccttgtcaattttccatg

SEQ ID NO: 5176071 - DNA, 25 bp, Homo sapien
tgtgagacgtttgcacccaaacaaa

SEQ ID NO: 5176072 - DNA, 25 bp, Homo sapien
tatggcacacaaagaagtagaagct

SEQ ID NO: 5176073 - DNA, 25 bp, Homo sapien
taaaacaatgttggagtttgcagaa

SEQ ID NO: 5176074 - DNA, 25 bp, Homo sapien
taaacagcttatgattgagtctaag

SEQ ID NO: 5176075 - DNA, 25 bp, Homo sapien
gatatattcaccagcgatgacttgg

SEQ ID NO: 5176076 - DNA, 25 bp, Homo sapien
caatggtgggctcagtgggtaaaca

SEQ ID NO: 5176077 - DNA, 25 bp, Homo sapien
tgttgtgtcgaagagcttaagcccc

SEQ ID NO: 5176078 - DNA, 25 bp, Homo sapien
gacagagctgctacccagtgttgcc

SEQ ID NO: 5176079 - DNA, 25 bp, Homo sapien
acaatcacactcatactgacacagc

SEQ ID NO: 5176080 - DNA, 25 bp, Homo sapien
actcatgttgatacaatcacactca

SEQ ID NO: 5176081 - DNA, 25 bp, Homo sapien
cactcatattgacacaaccagcaca

SEQ ID NO: 5176082 - DNA, 25 bp, Homo sapien
ctgacacagctcacactcatattga

SEQ ID NO: 5176083 - DNA, 25 bp, Homo sapien
actgcatgtgctagatcaaagccaa

SEQ ID NO: 5176084 - DNA, 25 bp, Homo sapien
ggcaaaatcaactccccagtcatgt

SEQ ID NO: 5176085 - DNA, 25 bp, Homo sapien
cagcaggcaaaatcaactccccagt

SEQ ID NO: 5176086 - DNA, 25 bp, Homo sapien
tgtaagtagagttcaacatttccaa

SEQ ID NO: 5176087 - DNA, 25 bp, Homo sapien
gcaggtttaatcgtatgggcatgct

SEQ ID NO: 5176088 - DNA, 25 bp, Homo sapien
caggtttaatcgtatgggcatgctt

SEQ ID NO: 5176089 - DNA, 25 bp, Homo sapien
gtttaatcgtatgggcatgcttttc

SEQ ID NO: 5176090 - DNA, 25 bp, Homo sapien
aatcgtatgggcatgcttttcatga

SEQ ID NO: 5176091 - DNA, 25 bp, Homo sapien
caaccaattgaattctttggaaagc

SEQ ID NO: 5176092 - DNA, 25 bp, Homo sapien
agaattagctgaagatggtactcac

SEQ ID NO: 5176093 - DNA, 25 bp, Homo sapien
taatccaatcctaattcctattgga

SEQ ID NO: 5176094 - DNA, 25 bp, Homo sapien
tattggatagcatcttaaggaactc

SEQ ID NO: 5176095 - DNA, 25 bp, Homo sapien
tgtctggttgactaaatatctgtcc

SEQ ID NO: 5176096 - DNA, 25 bp, Homo sapien
tctattaggagtctagacagtctcc

SEQ ID NO: 5176097 - DNA, 25 bp, Homo sapien
gattttaccactcagtcagtggctg

SEQ ID NO: 5176098 - DNA, 25 bp, Homo sapien
catggagggaaatctaatgtactga

SEQ ID NO: 5176099 - DNA, 25 bp, Homo sapien
gaggtcaaagcttaactccgaacac

SEQ ID NO: 5176100 - DNA, 25 bp, Homo sapien
tctcaagtacaagacctgtgtgtgc

SEQ ID NO: 5176101 - DNA, 25 bp, Homo sapien
tgtccatgctgagagaaatctcaag

SEQ ID NO: 5176102 - DNA, 25 bp, Homo sapien
tatgtgagcacaatacaatcccttt

SEQ ID NO: 5176103 - DNA, 25 bp, Homo sapien
gacagacccctgaaagaccaagctg

SEQ ID NO: 5176104 - DNA, 25 bp, Homo sapien
tcacaataactgcttatgagtaggg

SEQ ID NO: 5176105 - DNA, 25 bp, Homo sapien
tgttcaagtgatacacttagtgttt

SEQ ID NO: 5176106 - DNA, 25 bp, Homo sapien
tactgaacaatcatagaagattctc

SEQ ID NO: 5176107 - DNA, 25 bp, Homo sapien
caatacttgggctagggtgttacag

SEQ ID NO: 5176108 - DNA, 25 bp, Homo sapien
ccactgggcaaagtctacatgttac

SEQ ID NO: 5176109 - DNA, 25 bp, Homo sapien
tcagtgagtcaacgaagtacttagg

SEQ ID NO: 5176110 - DNA, 25 bp, Homo sapien
tacagtcagctcatcaaaggtctgc

SEQ ID NO: 5176111 - DNA, 25 bp, Homo sapien
caatataagatacttggtacagaat

SEQ ID NO: 5176112 - DNA, 25 bp, Homo sapien
taaaagcaaggttctcatacacaca

SEQ ID NO: 5176113 - DNA, 25 bp, Homo sapien
cgtggccttcatgagtcaagcctaa

SEQ ID NO: 5176114 - DNA, 25 bp, Homo sapien
cttaaaaagaagcttaggagtgtga

SEQ ID NO: 5176115 - DNA, 25 bp, Homo sapien
acttgtccaaatctgttgcattcca

SEQ ID NO: 5176116 - DNA, 25 bp, Homo sapien
gacttgtccaaatctgttgcattcc

SEQ ID NO: 5176117 - DNA, 25 bp, Homo sapien
cttgtccaaatctgttgcattccat

SEQ ID NO: 5176118 - DNA, 25 bp, Homo sapien
tcctatcagggacaatgaagtgatg

SEQ ID NO: 5176119 - DNA, 25 bp, Homo sapien
gctaatcgtggaatgctaacaactg

SEQ ID NO: 5176120 - DNA, 25 bp, Homo sapien
taaattggatttgaccgtggaacta

SEQ ID NO: 5176121 - DNA, 25 bp, Homo sapien
ggaacattgtcgtaacatctgaaca

SEQ ID NO: 5176122 - DNA, 25 bp, Homo sapien
tgaaataacatgtttagccactaga

SEQ ID NO: 5176123 - DNA, 25 bp, Homo sapien
tatggttctcggctacatactggac

SEQ ID NO: 5176124 - DNA, 25 bp, Homo sapien
caaagactacttcacaaagtgtgac

SEQ ID NO: 5176125 - DNA, 25 bp, Homo sapien
gttccactgtatttgatgttctcca

SEQ ID NO: 5176126 - DNA, 25 bp, Homo sapien
gtgaaatctcttggtacagatgcaa

SEQ ID NO: 5176127 - DNA, 25 bp, Homo sapien
tgggtcacccatgcttataattcct

SEQ ID NO: 5176128 - DNA, 25 bp, Homo sapien
tcctttcttagaccagccttcatga

SEQ ID NO: 5176129 - DNA, 25 bp, Homo sapien
ggatacactctctacaccaggtggg

SEQ ID NO: 5176130 - DNA, 25 bp, Homo sapien
ccagcgtgaagagtgaggaacagca

SEQ ID NO: 5176131 - DNA, 25 bp, Homo sapien
ttatcaaaattgtcagtcggcccca

SEQ ID NO: 5176132 - DNA, 25 bp, Homo sapien
gctcagaagaaaagtatcccaaggg

SEQ ID NO: 5176133 - DNA, 25 bp, Homo sapien
catgtggaggtttgctacaccagcg

SEQ ID NO: 5176134 - DNA, 25 bp, Homo sapien
taaactgtacattcaccccttgatg

SEQ ID NO: 5176135 - DNA, 25 bp, Homo sapien
gtccccaagcatgcccattagaagg

SEQ ID NO: 5176136 - DNA, 25 bp, Homo sapien
ttgatgccagcaactggtccccaag

SEQ ID NO: 5176137 - DNA, 25 bp, Homo sapien
ggcatgccatgccattaaacaggta

SEQ ID NO: 5176138 - DNA, 25 bp, Homo sapien
gcacatctagctgctaaggaaaaat

SEQ ID NO: 5176139 - DNA, 25 bp, Homo sapien
ctagctgctaaggaaaaatggatgg

SEQ ID NO: 5176140 - DNA, 25 bp, Homo sapien
gaatagtttagcaaagcttctgcac

SEQ ID NO: 5176141 - DNA, 25 bp, Homo sapien
aatagtttagcaaagcttctgcaca

SEQ ID NO: 5176142 - DNA, 25 bp, Homo sapien
tggaagctataaaatcccatagaac

SEQ ID NO: 5176143 - DNA, 25 bp, Homo sapien
gaatcaaattattggctcctgtgcc

SEQ ID NO: 5176144 - DNA, 25 bp, Homo sapien
ttaagaatggcctggcgaatcaaat

SEQ ID NO: 5176145 - DNA, 25 bp, Homo sapien
ctattacccctgtatggaagctata

SEQ ID NO: 5176146 - DNA, 25 bp, Homo sapien
tatatcatctacctttgcaatgtca

SEQ ID NO: 5176147 - DNA, 25 bp, Homo sapien
tgtatatcatctacctttgcaatgt

SEQ ID NO: 5176148 - DNA, 25 bp, Homo sapien
tatcatctacctttgcaatgtcatt

SEQ ID NO: 5176149 - DNA, 25 bp, Homo sapien
ctgtatatcatctacctttgcaatg

SEQ ID NO: 5176150 - DNA, 25 bp, Homo sapien
tatccatcttaaatctggtgctgag

SEQ ID NO: 5176151 - DNA, 25 bp, Homo sapien
gagttcatggccaaaccatcccact

SEQ ID NO: 5176152 - DNA, 25 bp, Homo sapien
ggtgctgagttcatggccaaaccat

SEQ ID NO: 5176153 - DNA, 25 bp, Homo sapien
taaatctggtgctgagttcatggcc

SEQ ID NO: 5176154 - DNA, 25 bp, Homo sapien
aggatttgaaattcggaatccacag

SEQ ID NO: 5176155 - DNA, 25 bp, Homo sapien
aggaacagaccaacaaaatgggagg

SEQ ID NO: 5176156 - DNA, 25 bp, Homo sapien
ggaggatttgaaattcggaatccac

SEQ ID NO: 5176157 - DNA, 25 bp, Homo sapien
atgggaggatttgaaattcggaatc

SEQ ID NO: 5176158 - DNA, 25 bp, Homo sapien
gtacagtccctagtaatcacatcag

SEQ ID NO: 5176159 - DNA, 25 bp, Homo sapien
tacttggtcagttcattcacctaca

SEQ ID NO: 5176160 - DNA, 25 bp, Homo sapien
cttatttggtataaagagaggccaa

SEQ ID NO: 5176161 - DNA, 25 bp, Homo sapien
tgtcccttgttcatgcacagtgcac

SEQ ID NO: 5176162 - DNA, 25 bp, Homo sapien
aagccatgatcgtactattgcattc

SEQ ID NO: 5176163 - DNA, 25 bp, Homo sapien
gagttccagattaacgtggacaaca

SEQ ID NO: 5176164 - DNA, 25 bp, Homo sapien
taatagaagcatagttaattcactg

SEQ ID NO: 5176165 - DNA, 25 bp, Homo sapien
catgatcgtactattgcattccagt

SEQ ID NO: 5176166 - DNA, 25 bp, Homo sapien
ccattacaaccacaataagggcaac

SEQ ID NO: 5176167 - DNA, 25 bp, Homo sapien
cacaataagggcaactgcattctga

SEQ ID NO: 5176168 - DNA, 25 bp, Homo sapien
ttacaaccacaataagggcaactgc

SEQ ID NO: 5176169 - DNA, 25 bp, Homo sapien
caaccacaataagggcaactgcatt

SEQ ID NO: 5176170 - DNA, 25 bp, Homo sapien
aatgaagactcaagggaacactgcc

SEQ ID NO: 5176171 - DNA, 25 bp, Homo sapien
tacagagacagctcaagtagaggct

SEQ ID NO: 5176172 - DNA, 25 bp, Homo sapien
tagtgctccaagattcagatgaccc

SEQ ID NO: 5176173 - DNA, 25 bp, Homo sapien
tacacagaacttggtaggaggcatc

SEQ ID NO: 5176174 - DNA, 25 bp, Homo sapien
tattgaaggtctaaaggaactcctc

SEQ ID NO: 5176175 - DNA, 25 bp, Homo sapien
gcacacttacacctgtaaaactttg

SEQ ID NO: 5176176 - DNA, 25 bp, Homo sapien
tcagtactgaccgagtggttacatt

SEQ ID NO: 5176177 - DNA, 25 bp, Homo sapien
tttttgtgtaaaatcatgccctcct

SEQ ID NO: 5176178 - DNA, 25 bp, Homo sapien
aaatgttattgttagctggcacccc

SEQ ID NO: 5176179 - DNA, 25 bp, Homo sapien
cgctcctctacatgagacggagtaa

SEQ ID NO: 5176180 - DNA, 25 bp, Homo sapien
agttatgcttgatcaggtattccag

SEQ ID NO: 5176181 - DNA, 25 bp, Homo sapien
ggtattccagatagccagttagcaa

SEQ ID NO: 5176182 - DNA, 25 bp, Homo sapien
tattcacacgttgaaaatctacatt

SEQ ID NO: 5176183 - DNA, 25 bp, Homo sapien
ctttcataatgatttccctaaaaat

SEQ ID NO: 5176184 - DNA, 25 bp, Homo sapien
ttagcattattcacacgttgaaaat

SEQ ID NO: 5176185 - DNA, 25 bp, Homo sapien
tctacattccagataaacttatgta

SEQ ID NO: 5176186 - DNA, 25 bp, Homo sapien
tagaagtgagcagattggtaaattt

SEQ ID NO: 5176187 - DNA, 25 bp, Homo sapien
tctgcagagtcaagtatagaagtga

SEQ ID NO: 5176188 - DNA, 25 bp, Homo sapien
tgccatttggattccgcttgtcaca

SEQ ID NO: 5176189 - DNA, 25 bp, Homo sapien
taaacatcatggaaagaattataga

SEQ ID NO: 5176190 - DNA, 25 bp, Homo sapien
tgttagttacatgtggtcaatggtg

SEQ ID NO: 5176191 - DNA, 25 bp, Homo sapien
catgtggtcaatggtgacatacttt

SEQ ID NO: 5176192 - DNA, 25 bp, Homo sapien
aatcgaataatactgaaataaccac

SEQ ID NO: 5176193 - DNA, 25 bp, Homo sapien
tatttattgttagttacatgtggtc

SEQ ID NO: 5176194 - DNA, 25 bp, Homo sapien
catacattatgaagttgtcagttaa

SEQ ID NO: 5176195 - DNA, 25 bp, Homo sapien
gaccatgaaatgtgacagcttatag

SEQ ID NO: 5176196 - DNA, 25 bp, Homo sapien
cttatagagactgtatagataatac

SEQ ID NO: 5176197 - DNA, 25 bp, Homo sapien
tagataatacttgaaccaacacagt

SEQ ID NO: 5176198 - DNA, 25 bp, Homo sapien
gctaaaagcgttggtggcagccacc

SEQ ID NO: 5176199 - DNA, 25 bp, Homo sapien
tgaaggagtgctcatcagggaaacc

SEQ ID NO: 5176200 - DNA, 25 bp, Homo sapien
cgtgacaccgtgcttgagattggga

SEQ ID NO: 5176201 - DNA, 25 bp, Homo sapien
gacttagatcaggttcccgtgacac

SEQ ID NO: 5176202 - DNA, 25 bp, Homo sapien
gagacaaagcttaaagatggacctt

SEQ ID NO: 5176203 - DNA, 25 bp, Homo sapien
tgagatttgactgcggacaaagtca

SEQ ID NO: 5176204 - DNA, 25 bp, Homo sapien
ttaagccaaggattgtgggaagcct

SEQ ID NO: 5176205 - DNA, 25 bp, Homo sapien
gggtacctctccaaacacatagaaa

SEQ ID NO: 5176206 - DNA, 25 bp, Homo sapien
aaaaagtatacccacttcaccatca

SEQ ID NO: 5176207 - DNA, 25 bp, Homo sapien
aaagtatacccacttcaccatcaac

SEQ ID NO: 5176208 - DNA, 25 bp, Homo sapien
ctgaaattctgattaaactattcct

SEQ ID NO: 5176209 - DNA, 25 bp, Homo sapien
aaattctgattaaactattccttgc

SEQ ID NO: 5176210 - DNA, 25 bp, Homo sapien
ttgacaaagccacgcttacacaact

SEQ ID NO: 5176211 - DNA, 25 bp, Homo sapien
gttgacaaagccacgcttacacaac

SEQ ID NO: 5176212 - DNA, 25 bp, Homo sapien
tgacaaagccacgcttacacaactt

SEQ ID NO: 5176213 - DNA, 25 bp, Homo sapien
gacaaagccacgcttacacaacttt

SEQ ID NO: 5176214 - DNA, 25 bp, Homo sapien
tcctacacggactataatcataact

SEQ ID NO: 5176215 - DNA, 25 bp, Homo sapien
cggactataatcataactaatggta

SEQ ID NO: 5176216 - DNA, 25 bp, Homo sapien
cacggactataatcataactaatgg

SEQ ID NO: 5176217 - DNA, 25 bp, Homo sapien
tacacggactataatcataactaat

SEQ ID NO: 5176218 - DNA, 25 bp, Homo sapien
aggagaactcttcctcgctatggct

SEQ ID NO: 5176219 - DNA, 25 bp, Homo sapien
agaactcttcctcgctatggcttca

SEQ ID NO: 5176220 - DNA, 25 bp, Homo sapien
ggagaactcttcctcgctatggctt

SEQ ID NO: 5176221 - DNA, 25 bp, Homo sapien
aactcttcctcgctatggcttcatt

SEQ ID NO: 5176222 - DNA, 25 bp, Homo sapien
ctgccatcaactcctaactgttaat

SEQ ID NO: 5176223 - DNA, 25 bp, Homo sapien
ctcggcaatgacctgttattgaaac

SEQ ID NO: 5176224 - DNA, 25 bp, Homo sapien
tcacatgtcgtaagagtaggcctgt

SEQ ID NO: 5176225 - DNA, 25 bp, Homo sapien
taggcctgtgttggatgctgcttaa

SEQ ID NO: 5176226 - DNA, 25 bp, Homo sapien
ctatagatgcagaggttcagaacca

SEQ ID NO: 5176227 - DNA, 25 bp, Homo sapien
aagacattggaatttgacagctgca

SEQ ID NO: 5176228 - DNA, 25 bp, Homo sapien
caccaaaatgtaggaaactctgccg

SEQ ID NO: 5176229 - DNA, 25 bp, Homo sapien
cagaaccacgatattgaagacagat

SEQ ID NO: 5176230 - DNA, 25 bp, Homo sapien
tttgccaccaagattagaatgactg

SEQ ID NO: 5176231 - DNA, 25 bp, Homo sapien
gcatacctctccacatctaaagctg

SEQ ID NO: 5176232 - DNA, 25 bp, Homo sapien
tccagcatgttcaagtttgccacca

SEQ ID NO: 5176233 - DNA, 25 bp, Homo sapien
tctaaagctgccaaatgtatgcacc

SEQ ID NO: 5176234 - DNA, 25 bp, Homo sapien
tccttatatagaaatggtgttgccc

SEQ ID NO: 5176235 - DNA, 25 bp, Homo sapien
ggtgttgcccaccaactgtcttgag

SEQ ID NO: 5176236 - DNA, 25 bp, Homo sapien
tgggacctttacatgtggatagcac

SEQ ID NO: 5176237 - DNA, 25 bp, Homo sapien
tggatagcactatacataacagagg

SEQ ID NO: 5176238 - DNA, 25 bp, Homo sapien
tactttggctgagcctgtcatggtg

SEQ ID NO: 5176239 - DNA, 25 bp, Homo sapien
tgccttggcgggtagaattcagtgt

SEQ ID NO: 5176240 - DNA, 25 bp, Homo sapien
cccgacatcggtgaggatcatggat

SEQ ID NO: 5176241 - DNA, 25 bp, Homo sapien
aggttcagtgaccttcccgacatcg

SEQ ID NO: 5176242 - DNA, 25 bp, Homo sapien
tgtctacaacacctgaggaaagaat

SEQ ID NO: 5176243 - DNA, 25 bp, Homo sapien
cttcctcatgctaaatttgtctaca

SEQ ID NO: 5176244 - DNA, 25 bp, Homo sapien
gcttcctcatgctaaatttgtctac

SEQ ID NO: 5176245 - DNA, 25 bp, Homo sapien
tcctcatgctaaatttgtctacaac

SEQ ID NO: 5176246 - DNA, 25 bp, Homo sapien
tcagcgctcactggatgcctctgtc

SEQ ID NO: 5176247 - DNA, 25 bp, Homo sapien
ccgtgtgacttctgtcagatctttt

SEQ ID NO: 5176248 - DNA, 25 bp, Homo sapien
aaactatattctcactttcagcaac

SEQ ID NO: 5176249 - DNA, 25 bp, Homo sapien
cctgcatcaaacaccgtgtgacttc

SEQ ID NO: 5176250 - DNA, 25 bp, Homo sapien
gatggcaataccactaaatcagttc

SEQ ID NO: 5176251 - DNA, 25 bp, Homo sapien
tttcttgactatgcagcactgtcca

SEQ ID NO: 5176252 - DNA, 25 bp, Homo sapien
cttgaggccacataagaatctactt

SEQ ID NO: 5176253 - DNA, 25 bp, Homo sapien
ggataaaggaattagtcctgcctta

SEQ ID NO: 5176254 - DNA, 25 bp, Homo sapien
aaacagaaactcccattaatattgt

SEQ ID NO: 5176255 - DNA, 25 bp, Homo sapien
caggatcaacattctattaagtctc

SEQ ID NO: 5176256 - DNA, 25 bp, Homo sapien
ttagtaaccagatgtgcttaaatac

SEQ ID NO: 5176257 - DNA, 25 bp, Homo sapien
tcctgaagaagcataatagacagat

SEQ ID NO: 5176258 - DNA, 25 bp, Homo sapien
tcaagatatgctgtgaatgattcct

SEQ ID NO: 5176259 - DNA, 25 bp, Homo sapien
caagatatgctgtgaatgattcctt

SEQ ID NO: 5176260 - DNA, 25 bp, Homo sapien
ctttcaagatatgctgtgaatgatt

SEQ ID NO: 5176261 - DNA, 25 bp, Homo sapien
ttcaagatatgctgtgaatgattcc

SEQ ID NO: 5176262 - DNA, 25 bp, Homo sapien
gcagaggaacatatgagatatccaa

SEQ ID NO: 5176263 - DNA, 25 bp, Homo sapien
gagagattagggaagacctatttaa

SEQ ID NO: 5176264 - DNA, 25 bp, Homo sapien
acacctggccactatgggttttgtt

SEQ ID NO: 5176265 - DNA, 25 bp, Homo sapien
ggtgatattagagcagagatgtaaa

SEQ ID NO: 5176266 - DNA, 25 bp, Homo sapien
tgcagataaccttctttttcaacca

SEQ ID NO: 5176267 - DNA, 25 bp, Homo sapien
aacagtccaggcaaagatttaaggc

SEQ ID NO: 5176268 - DNA, 25 bp, Homo sapien
tctcctgaactcttcaagggaaggt

SEQ ID NO: 5176269 - DNA, 25 bp, Homo sapien
caggcaaagatttaaggccttgttc

SEQ ID NO: 5176270 - DNA, 25 bp, Homo sapien
gggccactccagaaaaacagtccag

SEQ ID NO: 5176271 - DNA, 25 bp, Homo sapien
catcttggggagaggcatcattgta

SEQ ID NO: 5176272 - DNA, 25 bp, Homo sapien
gaggcatcattgtaccctccacact

SEQ ID NO: 5176273 - DNA, 25 bp, Homo sapien
ttggggagaggcatcattgtaccct

SEQ ID NO: 5176274 - DNA, 25 bp, Homo sapien
ggagaggcatcattgtaccctccac

SEQ ID NO: 5176275 - DNA, 25 bp, Homo sapien
gagggcttcccacgctgagcttgca

SEQ ID NO: 5176276 - DNA, 25 bp, Homo sapien
tctgctctgttccaggtatgccacc

SEQ ID NO: 5176277 - DNA, 25 bp, Homo sapien
tctgttccaggtatgccacctggca

SEQ ID NO: 5176278 - DNA, 25 bp, Homo sapien
ctgagctttctccagagggcttccc

SEQ ID NO: 5176279 - DNA, 25 bp, Homo sapien
ccttgacttaaggatttgatatttt

SEQ ID NO: 5176280 - DNA, 25 bp, Homo sapien
cagctctggagtgtgcaaaggatca

SEQ ID NO: 5176281 - DNA, 25 bp, Homo sapien
aacatagtgactctctcgtaaggca

SEQ ID NO: 5176282 - DNA, 25 bp, Homo sapien
tcacttggcaaggttttaccttgac

SEQ ID NO: 5176283 - DNA, 25 bp, Homo sapien
agcctcatgtgtcattgcttaattc

SEQ ID NO: 5176284 - DNA, 25 bp, Homo sapien
cctcatgtgtcattgcttaattcaa

SEQ ID NO: 5176285 - DNA, 25 bp, Homo sapien
ctcatgtgtcattgcttaattcaaa

SEQ ID NO: 5176286 - DNA, 25 bp, Homo sapien
gcctcatgtgtcattgcttaattca

SEQ ID NO: 5176287 - DNA, 25 bp, Homo sapien
acagagcctgttgcttggattcttt

SEQ ID NO: 5176288 - DNA, 25 bp, Homo sapien
aaaattcaattcttcgactagaaag

SEQ ID NO: 5176289 - DNA, 25 bp, Homo sapien
tcaattcttcgactagaaagaacaa

SEQ ID NO: 5176290 - DNA, 25 bp, Homo sapien
gacagagcctgttgcttggattctt

SEQ ID NO: 5176291 - DNA, 25 bp, Homo sapien
tgtaggtatatgtgaggccctcctc

SEQ ID NO: 5176292 - DNA, 25 bp, Homo sapien
tgagcttgaattgccccagtaactg

SEQ ID NO: 5176293 - DNA, 25 bp, Homo sapien
cagtaactggctccgaattgctctt

SEQ ID NO: 5176294 - DNA, 25 bp, Homo sapien
tcaggaggctgtcagatatgttgcc

SEQ ID NO: 5176295 - DNA, 25 bp, Homo sapien
ctcctcactggaggaccagccagtc

SEQ ID NO: 5176296 - DNA, 25 bp, Homo sapien
tctagggacacgagtggttttcctc

SEQ ID NO: 5176297 - DNA, 25 bp, Homo sapien
tctggatctagggacacgagtggtt

SEQ ID NO: 5176298 - DNA, 25 bp, Homo sapien
aggaaatctggatctagggacacga

SEQ ID NO: 5176299 - DNA, 25 bp, Homo sapien
ctttcaccatccataatcaaaaggc

SEQ ID NO: 5176300 - DNA, 25 bp, Homo sapien
aaaaggcacaaagtctcgaattctg

SEQ ID NO: 5176301 - DNA, 25 bp, Homo sapien
cacaaagtctcgaattctggaatta

SEQ ID NO: 5176302 - DNA, 25 bp, Homo sapien
agtctcgaattctggaattagttcc

SEQ ID NO: 5176303 - DNA, 25 bp, Homo sapien
ctggcacgggtttatcacaatccaa

SEQ ID NO: 5176304 - DNA, 25 bp, Homo sapien
ggcacgggtttatcacaatccaaac

SEQ ID NO: 5176305 - DNA, 25 bp, Homo sapien
ttatcacaatccaaaccctgtctgt

SEQ ID NO: 5176306 - DNA, 25 bp, Homo sapien
ggtttatcacaatccaaaccctgtc

SEQ ID NO: 5176307 - DNA, 25 bp, Homo sapien
cacctcacgtacaagaatgcaccag

SEQ ID NO: 5176308 - DNA, 25 bp, Homo sapien
aacacctcacgtacaagaatgcacc

SEQ ID NO: 5176309 - DNA, 25 bp, Homo sapien
acctcacgtacaagaatgcaccagc

SEQ ID NO: 5176310 - DNA, 25 bp, Homo sapien
aaacacctcacgtacaagaatgcac

SEQ ID NO: 5176311 - DNA, 25 bp, Homo sapien
cactttctggtttgtgcccagtttt

SEQ ID NO: 5176312 - DNA, 25 bp, Homo sapien
acactttctggtttgtgcccagttt

SEQ ID NO: 5176313 - DNA, 25 bp, Homo sapien
acattctttctgctcgatttttcct

SEQ ID NO: 5176314 - DNA, 25 bp, Homo sapien
tatccctgatgaagacctagtgttg

SEQ ID NO: 5176315 - DNA, 25 bp, Homo sapien
gctaaaggtttctcgaactacatca

SEQ ID NO: 5176316 - DNA, 25 bp, Homo sapien
ctaagaaaacgcgtacccagctcgt

SEQ ID NO: 5176317 - DNA, 25 bp, Homo sapien
ccagctcgttatagctgagttgcta

SEQ ID NO: 5176318 - DNA, 25 bp, Homo sapien
tacatcagttgtctatttgatagcc

SEQ ID NO: 5176319 - DNA, 25 bp, Homo sapien
gctaaaaagtgttcagtcttctggc

SEQ ID NO: 5176320 - DNA, 25 bp, Homo sapien
tgagactctcacatatttaataagg

SEQ ID NO: 5176321 - DNA, 25 bp, Homo sapien
ttattaaaggaatgcaactgtaccc

SEQ ID NO: 5176322 - DNA, 25 bp, Homo sapien
tgtcatgcaacatatggcataagga

SEQ ID NO: 5176323 - DNA, 25 bp, Homo sapien
aataaaatattagcccacactgacg

SEQ ID NO: 5176324 - DNA, 25 bp, Homo sapien
aaccatttagtacagatattctcca

SEQ ID NO: 5176325 - DNA, 25 bp, Homo sapien
tatttcatccaactagtaagtggcc

SEQ ID NO: 5176326 - DNA, 25 bp, Homo sapien
tatcagaggactaccgggtccaggg

SEQ ID NO: 5176327 - DNA, 25 bp, Homo sapien
gagcaggaagcttgccttaaggaaa

SEQ ID NO: 5176328 - DNA, 25 bp, Homo sapien
cattatcataggttaatagccctgg

SEQ ID NO: 5176329 - DNA, 25 bp, Homo sapien
gaactcacttgatcatccctctggg

SEQ ID NO: 5176330 - DNA, 25 bp, Homo sapien
gatgaatgaagctggtaacactagg

SEQ ID NO: 5176331 - DNA, 25 bp, Homo sapien
cacaagaaggcaccatagacagata

SEQ ID NO: 5176332 - DNA, 25 bp, Homo sapien
tctctcatgctaggcccgtgttcac

SEQ ID NO: 5176333 - DNA, 25 bp, Homo sapien
aaaagccatgttgtcaccatacggg

SEQ ID NO: 5176334 - DNA, 25 bp, Homo sapien
tgacagcagtgcaaagcccatctgg

SEQ ID NO: 5176335 - DNA, 25 bp, Homo sapien
tagtgtgtacattgaggaaagcggt

SEQ ID NO: 5176336 - DNA, 25 bp, Homo sapien
gacagcatcagacacaataggcaga

SEQ ID NO: 5176337 - DNA, 25 bp, Homo sapien
tgtgaagtttcacgggtcctggcaa

SEQ ID NO: 5176338 - DNA, 25 bp, Homo sapien
aagagtgatgaaatctactgaaaca

SEQ ID NO: 5176339 - DNA, 25 bp, Homo sapien
ggctcacacttattgacgtttttta

SEQ ID NO: 5176340 - DNA, 25 bp, Homo sapien
gagaaagagtgatgaaatctactga

SEQ ID NO: 5176341 - DNA, 25 bp, Homo sapien
attggctcacacttattgacgtttt

SEQ ID NO: 5176342 - DNA, 25 bp, Homo sapien
aaataaatgactggtgcttagatga

SEQ ID NO: 5176343 - DNA, 25 bp, Homo sapien
tgaaagcccaataggtgaacatggg

SEQ ID NO: 5176344 - DNA, 25 bp, Homo sapien
aatcattcaagtaaaggcatagctg

SEQ ID NO: 5176345 - DNA, 25 bp, Homo sapien
tcacagttacaattcaggcagacaa

SEQ ID NO: 5176346 - DNA, 25 bp, Homo sapien
caaattggcagctcttggaataaac

SEQ ID NO: 5176347 - DNA, 25 bp, Homo sapien
aattgcatctggcaaaagtaggcct

SEQ ID NO: 5176348 - DNA, 25 bp, Homo sapien
caagtccatacagctgagcctggct

SEQ ID NO: 5176349 - DNA, 25 bp, Homo sapien
cattaggtggcgctgagtaaaacag

SEQ ID NO: 5176350 - DNA, 25 bp, Homo sapien
aatgaatgcgtgcagatcaatggca

SEQ ID NO: 5176351 - DNA, 25 bp, Homo sapien
taaaaatcccaagtgtgaaggcagt

SEQ ID NO: 5176352 - DNA, 25 bp, Homo sapien
cacaaaaggccatagtgcaggttaa

SEQ ID NO: 5176353 - DNA, 25 bp, Homo sapien
cctgaccgaggtaaagatattggaa

SEQ ID NO: 5176354 - DNA, 25 bp, Homo sapien
agctttgttccaatttggtttgtca

SEQ ID NO: 5176355 - DNA, 25 bp, Homo sapien
ctggtatagttggtccccagggaag

SEQ ID NO: 5176356 - DNA, 25 bp, Homo sapien
ctttgttccaatttggtttgtcata

SEQ ID NO: 5176357 - DNA, 25 bp, Homo sapien
atagttggtccccagggaagctttg

SEQ ID NO: 5176358 - DNA, 25 bp, Homo sapien
tccaggggctcatcccttgatttga

SEQ ID NO: 5176359 - DNA, 25 bp, Homo sapien
cctccaggggctcatcccttgattt

SEQ ID NO: 5176360 - DNA, 25 bp, Homo sapien
gtcctccaggggctcatcccttgat

SEQ ID NO: 5176361 - DNA, 25 bp, Homo sapien
ccaggggctcatcccttgatttgag

SEQ ID NO: 5176362 - DNA, 25 bp, Homo sapien
tcacaaaagcagaagtgccctttca

SEQ ID NO: 5176363 - DNA, 25 bp, Homo sapien
caggtgtcagatgcatcacaaaagc

SEQ ID NO: 5176364 - DNA, 25 bp, Homo sapien
atactgcaaacagccatgatgtcac

SEQ ID NO: 5176365 - DNA, 25 bp, Homo sapien
ctagcaatatgcttatgaaagctgt

SEQ ID NO: 5176366 - DNA, 25 bp, Homo sapien
tgcttgtgagtaagactggcaatag

SEQ ID NO: 5176367 - DNA, 25 bp, Homo sapien
agtgcttgtgagtaagactggcaat

SEQ ID NO: 5176368 - DNA, 25 bp, Homo sapien
cttgtgagtaagactggcaatagct

SEQ ID NO: 5176369 - DNA, 25 bp, Homo sapien
gtgagtaagactggcaatagctttc

SEQ ID NO: 5176370 - DNA, 25 bp, Homo sapien
tcttttcttaggctatgggaaagtg

SEQ ID NO: 5176371 - DNA, 25 bp, Homo sapien
gtatttaagtagaatcagcttctgt

SEQ ID NO: 5176372 - DNA, 25 bp, Homo sapien
gcacaaatactagcccttatgttta

SEQ ID NO: 5176373 - DNA, 25 bp, Homo sapien
gcagcacaaatactagcccttatgt

SEQ ID NO: 5176374 - DNA, 25 bp, Homo sapien
caaacaggtgtctgtagcctgtcaa

SEQ ID NO: 5176375 - DNA, 25 bp, Homo sapien
tgtggaatattaccccaaacaggtg

SEQ ID NO: 5176376 - DNA, 25 bp, Homo sapien
taactacaatggcaatttcacacag

SEQ ID NO: 5176377 - DNA, 25 bp, Homo sapien
taaaagaactgtgaattagcgaagc

SEQ ID NO: 5176378 - DNA, 25 bp, Homo sapien
aaattctatactcttttcctgccat

SEQ ID NO: 5176379 - DNA, 25 bp, Homo sapien
attactgctactgggaagaacattc

SEQ ID NO: 5176380 - DNA, 25 bp, Homo sapien
caaccatggtgtaaagtgtgacaga

SEQ ID NO: 5176381 - DNA, 25 bp, Homo sapien
cagaattcaaacactaagagggcag

SEQ ID NO: 5176382 - DNA, 25 bp, Homo sapien
ctgttaggccccgggcaaaagcctg

SEQ ID NO: 5176383 - DNA, 25 bp, Homo sapien
aggccccgggcaaaagcctggtgct

SEQ ID NO: 5176384 - DNA, 25 bp, Homo sapien
ggtgctggctgcaaggtggtgttac

SEQ ID NO: 5176385 - DNA, 25 bp, Homo sapien
caaggtggtgttacagctaggaaca

SEQ ID NO: 5176386 - DNA, 25 bp, Homo sapien
ccaggaaaatggtagtgggccctga

SEQ ID NO: 5176387 - DNA, 25 bp, Homo sapien
agggtaggcatccaggcatccaggg

SEQ ID NO: 5176388 - DNA, 25 bp, Homo sapien
gggtacccatgactatccaagggcc

SEQ ID NO: 5176389 - DNA, 25 bp, Homo sapien
cacattcacacgatcttcattctga

SEQ ID NO: 5176390 - DNA, 25 bp, Homo sapien
ttaaaccttcaccttagccattctc

SEQ ID NO: 5176391 - DNA, 25 bp, Homo sapien
aatccagtaccacatcgaagcatca

SEQ ID NO: 5176392 - DNA, 25 bp, Homo sapien
gccattctcccagttatcaggacaa

SEQ ID NO: 5176393 - DNA, 25 bp, Homo sapien
caggacaaacatttcactcatgaat

SEQ ID NO: 5176394 - DNA, 25 bp, Homo sapien
ttgactatttttccagtccacatag

SEQ ID NO: 5176395 - DNA, 25 bp, Homo sapien
atttttccagtccacatagaatatg

SEQ ID NO: 5176396 - DNA, 25 bp, Homo sapien
gactatttttccagtccacatagaa

SEQ ID NO: 5176397 - DNA, 25 bp, Homo sapien
ctatttttccagtccacatagaata

SEQ ID NO: 5176398 - DNA, 25 bp, Homo sapien
tccagccatgacttgtgacctattg

SEQ ID NO: 5176399 - DNA, 25 bp, Homo sapien
aacaaaagctgttcacgggccacag

SEQ ID NO: 5176400 - DNA, 25 bp, Homo sapien
tcatatttacacaacggaccagcat

SEQ ID NO: 5176401 - DNA, 25 bp, Homo sapien
caaaatggtgtatgtttagctggct

SEQ ID NO: 5176402 - DNA, 25 bp, Homo sapien
agtttgcctcttcactctgacgata

SEQ ID NO: 5176403 - DNA, 25 bp, Homo sapien
tgtctcccattctgtagtttgcctc

SEQ ID NO: 5176404 - DNA, 25 bp, Homo sapien
ctctttaattagatcacatttgtga

SEQ ID NO: 5176405 - DNA, 25 bp, Homo sapien
tctttaattagatcacatttgtgaa

SEQ ID NO: 5176406 - DNA, 25 bp, Homo sapien
tcacagacataagaccagggaacag

SEQ ID NO: 5176407 - DNA, 25 bp, Homo sapien
aattcagctgctttgggaccttaac

SEQ ID NO: 5176408 - DNA, 25 bp, Homo sapien
tgaggcccactcaggatcatctcct

SEQ ID NO: 5176409 - DNA, 25 bp, Homo sapien
gatgctactgctgaactacggaggg

SEQ ID NO: 5176410 - DNA, 25 bp, Homo sapien
tcggcgtaacctctaagcaccaaag

SEQ ID NO: 5176411 - DNA, 25 bp, Homo sapien
cattgcctgaagtttgggtagagag

SEQ ID NO: 5176412 - DNA, 25 bp, Homo sapien
ggtagagagttccagcaagtttctg

SEQ ID NO: 5176413 - DNA, 25 bp, Homo sapien
tgaagtgttatgtatctgcatccca

SEQ ID NO: 5176414 - DNA, 25 bp, Homo sapien
ttcctctgcctgaataatcccttca

SEQ ID NO: 5176415 - DNA, 25 bp, Homo sapien
cttcatgaaccacctcaaatgtgaa

SEQ ID NO: 5176416 - DNA, 25 bp, Homo sapien
ctctgcctgaataatcccttcaagt

SEQ ID NO: 5176417 - DNA, 25 bp, Homo sapien
tcatgaaccacctcaaatgtgaaca

SEQ ID NO: 5176418 - DNA, 25 bp, Homo sapien
ctgtgcctgtcttcttggagtgcat

SEQ ID NO: 5176419 - DNA, 25 bp, Homo sapien
acacctgtgcctgtcttcttggagt

SEQ ID NO: 5176420 - DNA, 25 bp, Homo sapien
acctgtgcctgtcttcttggagtgc

SEQ ID NO: 5176421 - DNA, 25 bp, Homo sapien
catgattttctccacacctgtgcct

SEQ ID NO: 5176422 - DNA, 25 bp, Homo sapien
agtcattgctgaatttagttgacct

SEQ ID NO: 5176423 - DNA, 25 bp, Homo sapien
cagtcattgctgaatttagttgacc

SEQ ID NO: 5176424 - DNA, 25 bp, Homo sapien
tgatggcctgaatactggaaacaca

SEQ ID NO: 5176425 - DNA, 25 bp, Homo sapien
ttagcgacgaatcacgttgatggcc

SEQ ID NO: 5176426 - DNA, 25 bp, Homo sapien
tgtggtaccagctgcggcagctttt

SEQ ID NO: 5176427 - DNA, 25 bp, Homo sapien
cacgttgatggcctgaatactggaa

SEQ ID NO: 5176428 - DNA, 25 bp, Homo sapien
gattagcatcctctaggcagtttcc

SEQ ID NO: 5176429 - DNA, 25 bp, Homo sapien
gaaactagttatggtccattctgaa

SEQ ID NO: 5176430 - DNA, 25 bp, Homo sapien
tccattctgaagatactagccttac

SEQ ID NO: 5176431 - DNA, 25 bp, Homo sapien
tacatgaactctcctaactattaca

SEQ ID NO: 5176432 - DNA, 25 bp, Homo sapien
cagtggtgacaggacaaatgagcgt

SEQ ID NO: 5176433 - DNA, 25 bp, Homo sapien
taaatggcattgttggagacccatc

SEQ ID NO: 5176434 - DNA, 25 bp, Homo sapien
gagacccatcatgcttgtaaaatgt

SEQ ID NO: 5176435 - DNA, 25 bp, Homo sapien
gagtcatatagcctgtcagtggtga

SEQ ID NO: 5176436 - DNA, 25 bp, Homo sapien
cttccgagcaacactatctcttcgg

SEQ ID NO: 5176437 - DNA, 25 bp, Homo sapien
ccgagcaacactatctcttcggatg

SEQ ID NO: 5176438 - DNA, 25 bp, Homo sapien
gcaacactatctcttcggatgaaaa

SEQ ID NO: 5176439 - DNA, 25 bp, Homo sapien
tatctcttcggatgaaaataattac

SEQ ID NO: 5176440 - DNA, 25 bp, Homo sapien
gttgttagctacttcagtttgaagt

SEQ ID NO: 5176441 - DNA, 25 bp, Homo sapien
gagtgtttcgcactatttttaatac

SEQ ID NO: 5176442 - DNA, 25 bp, Homo sapien
aagacttctggagtgtttcgcacta

SEQ ID NO: 5176443 - DNA, 25 bp, Homo sapien
agaattcatcaaccaacttaaaggg

SEQ ID NO: 5176444 - DNA, 25 bp, Homo sapien
aagaccagggcactgttctgcagcc

SEQ ID NO: 5176445 - DNA, 25 bp, Homo sapien
ttccaacctggctcaaggcacacat

SEQ ID NO: 5176446 - DNA, 25 bp, Homo sapien
atgggccaacctgcatcgcctgcag

SEQ ID NO: 5176447 - DNA, 25 bp, Homo sapien
tcacattcagtcagatgattaggtc

SEQ ID NO: 5176448 - DNA, 25 bp, Homo sapien
cctgccttggctccgtgtccagtga

SEQ ID NO: 5176449 - DNA, 25 bp, Homo sapien
tccagattgtaacctcctttctgcc

SEQ ID NO: 5176450 - DNA, 25 bp, Homo sapien
tcagttctggcagtcactacccaag

SEQ ID NO: 5176451 - DNA, 25 bp, Homo sapien
taagtgtgactacaagcattggctc

SEQ ID NO: 5176452 - DNA, 25 bp, Homo sapien
taattcctgacagatggcaacacag

SEQ ID NO: 5176453 - DNA, 25 bp, Homo sapien
tgaagaggaggacgcagaattccca

SEQ ID NO: 5176454 - DNA, 25 bp, Homo sapien
tacatgagaattggcacgtgcctct

SEQ ID NO: 5176455 - DNA, 25 bp, Homo sapien
gaagaaacattccttgactggctga

SEQ ID NO: 5176456 - DNA, 25 bp, Homo sapien
tatggtgaccaactggaagcttact

SEQ ID NO: 5176457 - DNA, 25 bp, Homo sapien
gaccatgattgcttaatggagacag

SEQ ID NO: 5176458 - DNA, 25 bp, Homo sapien
tctggcaactcttgaaaaaggtagg

SEQ ID NO: 5176459 - DNA, 25 bp, Homo sapien
tgttcaggtggctttaacacagggc

SEQ ID NO: 5176460 - DNA, 25 bp, Homo sapien
atagcccttaaggaaagccttggca

SEQ ID NO: 5176461 - DNA, 25 bp, Homo sapien
ccggtacctcttaagacaacatcaa

SEQ ID NO: 5176462 - DNA, 25 bp, Homo sapien
caagagtaaggtgaatctgtgccta

SEQ ID NO: 5176463 - DNA, 25 bp, Homo sapien
ttgtgacagcaaatgactaagtggc

SEQ ID NO: 5176464 - DNA, 25 bp, Homo sapien
gattcttggaacacattacctggct

SEQ ID NO: 5176465 - DNA, 25 bp, Homo sapien
atgtgacggttaagcacatggattc

SEQ ID NO: 5176466 - DNA, 25 bp, Homo sapien
ttcttggaacacattacctggcttt

SEQ ID NO: 5176467 - DNA, 25 bp, Homo sapien
gagatagcaaatgtgacggttaagc

SEQ ID NO: 5176468 - DNA, 25 bp, Homo sapien
attaccaataatacaaaacacagta

SEQ ID NO: 5176469 - DNA, 25 bp, Homo sapien
atacaaaacacagtatatgtgcaat

SEQ ID NO: 5176470 - DNA, 25 bp, Homo sapien
cattaccaataatacaaaacacagt

SEQ ID NO: 5176471 - DNA, 25 bp, Homo sapien
ataatacaaaacacagtatatgtgc

SEQ ID NO: 5176472 - DNA, 25 bp, Homo sapien
tattagcctgtcattgaaaacccta

SEQ ID NO: 5176473 - DNA, 25 bp, Homo sapien
aaatactgaaaatgtgctagcaatt

SEQ ID NO: 5176474 - DNA, 25 bp, Homo sapien
gggaaagcagtccatatatgccatt

SEQ ID NO: 5176475 - DNA, 25 bp, Homo sapien
aaaattctcttgtacagtatataac

SEQ ID NO: 5176476 - DNA, 25 bp, Homo sapien
tgtctgtgatgcagcacagattgtg

SEQ ID NO: 5176477 - DNA, 25 bp, Homo sapien
taaatctggtgctattgttaatgcc

SEQ ID NO: 5176478 - DNA, 25 bp, Homo sapien
ggcatatggatttctgggatacaac

SEQ ID NO: 5176479 - DNA, 25 bp, Homo sapien
cacagattgtgatcgtgacagtaaa

SEQ ID NO: 5176480 - DNA, 25 bp, Homo sapien
ttttgcgaactcagaagaagctaaa

SEQ ID NO: 5176481 - DNA, 25 bp, Homo sapien
tccttttgcgaactcagaagaagct

SEQ ID NO: 5176482 - DNA, 25 bp, Homo sapien
tttccttttgcgaactcagaagaag

SEQ ID NO: 5176483 - DNA, 25 bp, Homo sapien
agccatttccttttgcgaactcaga

SEQ ID NO: 5176484 - DNA, 25 bp, Homo sapien
tttgtgaggtgttggtgtacccatc

SEQ ID NO: 5176485 - DNA, 25 bp, Homo sapien
atttgtgaggtgttggtgtacccat

SEQ ID NO: 5176486 - DNA, 25 bp, Homo sapien
tcttttatgccttagccccttccca

SEQ ID NO: 5176487 - DNA, 25 bp, Homo sapien
ttgtgaggtgttggtgtacccatca

SEQ ID NO: 5176488 - DNA, 25 bp, Homo sapien
caactttggcagtgggagcagcttg

SEQ ID NO: 5176489 - DNA, 25 bp, Homo sapien
tggcagtgggagcagcttgatacca

SEQ ID NO: 5176490 - DNA, 25 bp, Homo sapien
ctttggcagtgggagcagcttgata

SEQ ID NO: 5176491 - DNA, 25 bp, Homo sapien
ttggcagtgggagcagcttgatacc

SEQ ID NO: 5176492 - DNA, 25 bp, Homo sapien
gcactaagggaagaacgtattccaa

SEQ ID NO: 5176493 - DNA, 25 bp, Homo sapien
tggaggaggcactaagggaagaacg

SEQ ID NO: 5176494 - DNA, 25 bp, Homo sapien
ccactgtcctggaggtataatctgg

SEQ ID NO: 5176495 - DNA, 25 bp, Homo sapien
agccactgtcctggaggtataatct

SEQ ID NO: 5176496 - DNA, 25 bp, Homo sapien
ctttcaatgttagatgctccacctt

SEQ ID NO: 5176497 - DNA, 25 bp, Homo sapien
tttacacaactcaacagatgcttct

SEQ ID NO: 5176498 - DNA, 25 bp, Homo sapien
tagatgctccaccttgagatgcttg

SEQ ID NO: 5176499 - DNA, 25 bp, Homo sapien
ttgagatgcttggtatttgaataaa

SEQ ID NO: 5176500 - DNA, 25 bp, Homo sapien
tgacagatggtatagttacaatcca

SEQ ID NO: 5176501 - DNA, 25 bp, Homo sapien
ggagatctttgtaagtctgattctc

SEQ ID NO: 5176502 - DNA, 25 bp, Homo sapien
acaatccattctttacatccactca

SEQ ID NO: 5176503 - DNA, 25 bp, Homo sapien
gtaaactcctaagttgactgacatc

SEQ ID NO: 5176504 - DNA, 25 bp, Homo sapien
tagaacgattaagtcagagtagggc

SEQ ID NO: 5176505 - DNA, 25 bp, Homo sapien
tgggagcattttgaaccgctctcta

SEQ ID NO: 5176506 - DNA, 25 bp, Homo sapien
tagggctagagctgaattactccaa

SEQ ID NO: 5176507 - DNA, 25 bp, Homo sapien
gaaatagacaggtaaagaaactatg

SEQ ID NO: 5176508 - DNA, 25 bp, Homo sapien
gaactcatttcctgatactgttgtg

SEQ ID NO: 5176509 - DNA, 25 bp, Homo sapien
gcgtggaaccaatccaatatgatga

SEQ ID NO: 5176510 - DNA, 25 bp, Homo sapien
caatatctgactgtagaaggaactc

SEQ ID NO: 5176511 - DNA, 25 bp, Homo sapien
gtcaattgcatttttgatagcgtgg

SEQ ID NO: 5176512 - DNA, 25 bp, Homo sapien
tgaataattccaggtttcttgatgg

SEQ ID NO: 5176513 - DNA, 25 bp, Homo sapien
atatcactgtcgtagtgacttagca

SEQ ID NO: 5176514 - DNA, 25 bp, Homo sapien
gacttagcaattcagtgctagagga

SEQ ID NO: 5176515 - DNA, 25 bp, Homo sapien
tgctagaggatctttggattttgaa

SEQ ID NO: 5176516 - DNA, 25 bp, Homo sapien
tttagacaaacttaaaatgagcaag

SEQ ID NO: 5176517 - DNA, 25 bp, Homo sapien
catttagacaaacttaaaatgagca

SEQ ID NO: 5176518 - DNA, 25 bp, Homo sapien
gcatttagacaaacttaaaatgagc

SEQ ID NO: 5176519 - DNA, 25 bp, Homo sapien
ttagacaaacttaaaatgagcaagt

SEQ ID NO: 5176520 - DNA, 25 bp, Homo sapien
cagactgccctccagtgcacaaatc

SEQ ID NO: 5176521 - DNA, 25 bp, Homo sapien
tcaaaaggcattaccaacaatgatg

SEQ ID NO: 5176522 - DNA, 25 bp, Homo sapien
caaatccctggccaggaaatggcta

SEQ ID NO: 5176523 - DNA, 25 bp, Homo sapien
ggctacgaatcttccatgagtatga

SEQ ID NO: 5176524 - DNA, 25 bp, Homo sapien
tttgctgtaagcagagaccatgacc

SEQ ID NO: 5176525 - DNA, 25 bp, Homo sapien
tgacttaagttagaccacactggtg

SEQ ID NO: 5176526 - DNA, 25 bp, Homo sapien
taaaatagtcaggataccagggttg

SEQ ID NO: 5176527 - DNA, 25 bp, Homo sapien
ggtgtgaccttggagaacatctaat

SEQ ID NO: 5176528 - DNA, 25 bp, Homo sapien
gaaacaacattgtaagtgactgcag

SEQ ID NO: 5176529 - DNA, 25 bp, Homo sapien
tgggaagtcttagctctcagggcca

SEQ ID NO: 5176530 - DNA, 25 bp, Homo sapien
ccggaaactagatcgaaagcaatgc

SEQ ID NO: 5176531 - DNA, 25 bp, Homo sapien
taatcgctttggtggagacggtaca

SEQ ID NO: 5176532 - DNA, 25 bp, Homo sapien
actgagagggttaggtggactttca

SEQ ID NO: 5176533 - DNA, 25 bp, Homo sapien
ttgagcactgagagggttaggtgga

SEQ ID NO: 5176534 - DNA, 25 bp, Homo sapien
ggttaggtggactttcagagtagct

SEQ ID NO: 5176535 - DNA, 25 bp, Homo sapien
gcactgagagggttaggtggacttt

SEQ ID NO: 5176536 - DNA, 25 bp, Homo sapien
tgcaaacagcagacgattctctgtg

SEQ ID NO: 5176537 - DNA, 25 bp, Homo sapien
gggcttcacatccaatgtaaattga

SEQ ID NO: 5176538 - DNA, 25 bp, Homo sapien
catgcacctataatttgagttctca

SEQ ID NO: 5176539 - DNA, 25 bp, Homo sapien
gaggattgtgtctggattaattgca

SEQ ID NO: 5176540 - DNA, 25 bp, Homo sapien
tatcaaagtgttcgattaatagtgt

SEQ ID NO: 5176541 - DNA, 25 bp, Homo sapien
ctatatcaaagtgttcgattaatag

SEQ ID NO: 5176542 - DNA, 25 bp, Homo sapien
caaagtgttcgattaatagtgtctc

SEQ ID NO: 5176543 - DNA, 25 bp, Homo sapien
aagtgttcgattaatagtgtctcta

SEQ ID NO: 5176544 - DNA, 25 bp, Homo sapien
ggctctaccacccagattcgtcatt

SEQ ID NO: 5176545 - DNA, 25 bp, Homo sapien
agttatttagccctcactgccagtc

SEQ ID NO: 5176546 - DNA, 25 bp, Homo sapien
ttcgtcattattacagtgcagctgg

SEQ ID NO: 5176547 - DNA, 25 bp, Homo sapien
ccaaatgtaggttctggcagcgtca

SEQ ID NO: 5176548 - DNA, 25 bp, Homo sapien
aggacacgaagaactttcagatttt

SEQ ID NO: 5176549 - DNA, 25 bp, Homo sapien
caaggacacgaagaactttcagatt

SEQ ID NO: 5176550 - DNA, 25 bp, Homo sapien
aaggacacgaagaactttcagattt

SEQ ID NO: 5176551 - DNA, 25 bp, Homo sapien
tcaaggacacgaagaactttcagat

SEQ ID NO: 5176552 - DNA, 25 bp, Homo sapien
gcacgtttattctaagtatgcttca

SEQ ID NO: 5176553 - DNA, 25 bp, Homo sapien
tataccatcatagggatacaccatg

SEQ ID NO: 5176554 - DNA, 25 bp, Homo sapien
gaactgaaatcgtttgaggagtaca

SEQ ID NO: 5176555 - DNA, 25 bp, Homo sapien
taaacaaaggcccactgttggacag

SEQ ID NO: 5176556 - DNA, 25 bp, Homo sapien
taaagaggcaaaacggcttgattac

SEQ ID NO: 5176557 - DNA, 25 bp, Homo sapien
tacagcctataatagaaatctctgg

SEQ ID NO: 5176558 - DNA, 25 bp, Homo sapien
gattgtgaaaaacgacgtaattgcc

SEQ ID NO: 5176559 - DNA, 25 bp, Homo sapien
tttcagtctcaacacttaaagagtg

SEQ ID NO: 5176560 - DNA, 25 bp, Homo sapien
tttgcagctggcagggagcttatgc

SEQ ID NO: 5176561 - DNA, 25 bp, Homo sapien
ggagcccggtgaatacttggctcta

SEQ ID NO: 5176562 - DNA, 25 bp, Homo sapien
aagatctagctggagcccggtgaat

SEQ ID NO: 5176563 - DNA, 25 bp, Homo sapien
gagcttatgctcactaaacaaagat

SEQ ID NO: 5176564 - DNA, 25 bp, Homo sapien
cactgtgtcttgaggaacagttggt

SEQ ID NO: 5176565 - DNA, 25 bp, Homo sapien
gggacagaaccctctattaaaagca

SEQ ID NO: 5176566 - DNA, 25 bp, Homo sapien
gcctttttcaggacatcgaatatcc

SEQ ID NO: 5176567 - DNA, 25 bp, Homo sapien
tggttgtcagagtggtagcctccct

SEQ ID NO: 5176568 - DNA, 25 bp, Homo sapien
cacattccccagctgtaagacaggt

SEQ ID NO: 5176569 - DNA, 25 bp, Homo sapien
cccagctgtaagacaggttcctggc

SEQ ID NO: 5176570 - DNA, 25 bp, Homo sapien
tccccagctgtaagacaggttcctg

SEQ ID NO: 5176571 - DNA, 25 bp, Homo sapien
cattccccagctgtaagacaggttc

SEQ ID NO: 5176572 - DNA, 25 bp, Homo sapien
gaagcactgtgatgcagtctgaaca

SEQ ID NO: 5176573 - DNA, 25 bp, Homo sapien
tgtcgcttgtatcggaagcactgtg

SEQ ID NO: 5176574 - DNA, 25 bp, Homo sapien
tctgcttttaactcgatttttgtcg

SEQ ID NO: 5176575 - DNA, 25 bp, Homo sapien
taactcgatttttgtcgcttgtatc

SEQ ID NO: 5176576 - DNA, 25 bp, Homo sapien
tctataaagtttagcctttcagctt

SEQ ID NO: 5176577 - DNA, 25 bp, Homo sapien
ctataaagtttagcctttcagcttt

SEQ ID NO: 5176578 - DNA, 25 bp, Homo sapien
ttctataaagtttagcctttcagct

SEQ ID NO: 5176579 - DNA, 25 bp, Homo sapien
tttctataaagtttagcctttcagc

SEQ ID NO: 5176580 - DNA, 25 bp, Homo sapien
tatcagtgtatgtttcttgaagtaa

SEQ ID NO: 5176581 - DNA, 25 bp, Homo sapien
tttctcgagctttaagcaaatactt

SEQ ID NO: 5176582 - DNA, 25 bp, Homo sapien
gaaatataagccaagcccaagttat

SEQ ID NO: 5176583 - DNA, 25 bp, Homo sapien
ccaagttatcagtgtatgtttcttg

SEQ ID NO: 5176584 - DNA, 25 bp, Homo sapien
tatgtataaagagcatcatgattaa

SEQ ID NO: 5176585 - DNA, 25 bp, Homo sapien
ttatgtataaagagcatcatgatta

SEQ ID NO: 5176586 - DNA, 25 bp, Homo sapien
gtataaagagcatcatgattaaaat

SEQ ID NO: 5176587 - DNA, 25 bp, Homo sapien
taaagagcatcatgattaaaattac

SEQ ID NO: 5176588 - DNA, 25 bp, Homo sapien
ctttaaaatgctcacgacatgagcc

SEQ ID NO: 5176589 - DNA, 25 bp, Homo sapien
gacatgagccccatgtcatgtaact

SEQ ID NO: 5176590 - DNA, 25 bp, Homo sapien
gagccccatgtcatgtaactttccc

SEQ ID NO: 5176591 - DNA, 25 bp, Homo sapien
tgctcacgacatgagccccatgtca

SEQ ID NO: 5176592 - DNA, 25 bp, Homo sapien
ctcactacacctctgactccctggt

SEQ ID NO: 5176593 - DNA, 25 bp, Homo sapien
ctcggctcactacacctctgactcc

SEQ ID NO: 5176594 - DNA, 25 bp, Homo sapien
atgcgccagcacacccagctaattt

SEQ ID NO: 5176595 - DNA, 25 bp, Homo sapien
tgcgccagcacacccagctaatttt

SEQ ID NO: 5176596 - DNA, 25 bp, Homo sapien
gtccaggcaagtgcatccagtccct

SEQ ID NO: 5176597 - DNA, 25 bp, Homo sapien
ccaggcaagtgcatccagtccctca

SEQ ID NO: 5176598 - DNA, 25 bp, Homo sapien
tggtgtcttggtgagtaaagagcct

SEQ ID NO: 5176599 - DNA, 25 bp, Homo sapien
gtgtcttggtgagtaaagagcctag

SEQ ID NO: 5176600 - DNA, 25 bp, Homo sapien
caccaggtaaaagtgactgccaagt

SEQ ID NO: 5176601 - DNA, 25 bp, Homo sapien
gagctgatccaccaggtaaaagtga

SEQ ID NO: 5176602 - DNA, 25 bp, Homo sapien
aggagtgattcagtcgggtttggca

SEQ ID NO: 5176603 - DNA, 25 bp, Homo sapien
tcagtcgggtttggcaagtgggtgt

SEQ ID NO: 5176604 - DNA, 25 bp, Homo sapien
cagcttcaatgcattgctttacaaa

SEQ ID NO: 5176605 - DNA, 25 bp, Homo sapien
ttttcacgttcacacactttgtgca

SEQ ID NO: 5176606 - DNA, 25 bp, Homo sapien
gctttacaaaccacggaactgtgga

SEQ ID NO: 5176607 - DNA, 25 bp, Homo sapien
aattttcacgttcacacactttgtg

SEQ ID NO: 5176608 - DNA, 25 bp, Homo sapien
aatcaggtggcactgctaacttgag

SEQ ID NO: 5176609 - DNA, 25 bp, Homo sapien
aacttgagtattggttgtgtagagg

SEQ ID NO: 5176610 - DNA, 25 bp, Homo sapien
ggcttctcagacaaatcaggtggca

SEQ ID NO: 5176611 - DNA, 25 bp, Homo sapien
cagtaatggggggaactgctgcaca

SEQ ID NO: 5176612 - DNA, 25 bp, Homo sapien
ttgagcataagtaagtttctctgga

SEQ ID NO: 5176613 - DNA, 25 bp, Homo sapien
cttgagcataagtaagtttctctgg

SEQ ID NO: 5176614 - DNA, 25 bp, Homo sapien
gaacagcaaagcaggtatcaggtac

SEQ ID NO: 5176615 - DNA, 25 bp, Homo sapien
tatgtggcgttgtctgtgtatacat

SEQ ID NO: 5176616 - DNA, 25 bp, Homo sapien
actgtatgtggcgttgtctgtgtat

SEQ ID NO: 5176617 - DNA, 25 bp, Homo sapien
tttactgtatgtggcgttgtctgtg

SEQ ID NO: 5176618 - DNA, 25 bp, Homo sapien
gcagttttactgtatgtggcgttgt

SEQ ID NO: 5176619 - DNA, 25 bp, Homo sapien
gagttcgtaaaagcaaattccaggc

SEQ ID NO: 5176620 - DNA, 25 bp, Homo sapien
tattgctgcctttcgaaacttctga

SEQ ID NO: 5176621 - DNA, 25 bp, Homo sapien
gaggtgcctccaattcagacccttt

SEQ ID NO: 5176622 - DNA, 25 bp, Homo sapien
tgaaatactctcaggcctaactctg

SEQ ID NO: 5176623 - DNA, 25 bp, Homo sapien
tttgggatgaagtcataagagttat

SEQ ID NO: 5176624 - DNA, 25 bp, Homo sapien
ggatgaagtcataagagttatataa

SEQ ID NO: 5176625 - DNA, 25 bp, Homo sapien
gaagtcataagagttatataaagtg

SEQ ID NO: 5176626 - DNA, 25 bp, Homo sapien
taaagtgtagcctttgatcccatca

SEQ ID NO: 5176627 - DNA, 25 bp, Homo sapien
gtggttgtagacctgagtcacagca

SEQ ID NO: 5176628 - DNA, 25 bp, Homo sapien
tcacagcagagaaactgctctgtgg

SEQ ID NO: 5176629 - DNA, 25 bp, Homo sapien
taccgctgtggttgtagacctgagt

SEQ ID NO: 5176630 - DNA, 25 bp, Homo sapien
ctgtgctaccgctgtggttgtagac

SEQ ID NO: 5176631 - DNA, 25 bp, Homo sapien
gattgccactaactcgatatattcc

SEQ ID NO: 5176632 - DNA, 25 bp, Homo sapien
cgatatattccatcaacatctagac

SEQ ID NO: 5176633 - DNA, 25 bp, Homo sapien
ctgtattgttgccagattgccacta

SEQ ID NO: 5176634 - DNA, 25 bp, Homo sapien
tgttgccagattgccactaactcga

SEQ ID NO: 5176635 - DNA, 25 bp, Homo sapien
catacagcacagtgtatgaaatatt

SEQ ID NO: 5176636 - DNA, 25 bp, Homo sapien
acatacagcacagtgtatgaaatat

SEQ ID NO: 5176637 - DNA, 25 bp, Homo sapien
tattgttccatatgaaactgtttga

SEQ ID NO: 5176638 - DNA, 25 bp, Homo sapien
tatgaaatattgttccatatgaaac

SEQ ID NO: 5176639 - DNA, 25 bp, Homo sapien
tcactgaaagctgtcaccaaattca

SEQ ID NO: 5176640 - DNA, 25 bp, Homo sapien
agggcagagcgctgctcacaaacgc

SEQ ID NO: 5176641 - DNA, 25 bp, Homo sapien
ccaaattcaacaaacagggcagagc

SEQ ID NO: 5176642 - DNA, 25 bp, Homo sapien
agagcgctgctcacaaacgcaccaa

SEQ ID NO: 5176643 - DNA, 25 bp, Homo sapien
cacagatcattctgaagaatcaacg

SEQ ID NO: 5176644 - DNA, 25 bp, Homo sapien
gacatctaaggtcatggaccagttt

SEQ ID NO: 5176645 - DNA, 25 bp, Homo sapien
catctaaggtcatggaccagttttc

SEQ ID NO: 5176646 - DNA, 25 bp, Homo sapien
caatgtcgcaggctgatgacaggtt

SEQ ID NO: 5176647 - DNA, 25 bp, Homo sapien
caagtgagtctgaactgaatttgta

SEQ ID NO: 5176648 - DNA, 25 bp, Homo sapien
tttccaaaaagaatgccaatctctc

SEQ ID NO: 5176649 - DNA, 25 bp, Homo sapien
tctaaataataccaagtgagtctga

SEQ ID NO: 5176650 - DNA, 25 bp, Homo sapien
tcaaagggtgaaagaggatgtctaa

SEQ ID NO: 5176651 - DNA, 25 bp, Homo sapien
catccagttctgatagaagggctgg

SEQ ID NO: 5176652 - DNA, 25 bp, Homo sapien
ctccatccagttctgatagaagggc

SEQ ID NO: 5176653 - DNA, 25 bp, Homo sapien
ctgatagaagggctggtattccaga

SEQ ID NO: 5176654 - DNA, 25 bp, Homo sapien
tgtccacaggtctccatccagttct

SEQ ID NO: 5176655 - DNA, 25 bp, Homo sapien
caaattattggcttgctctggaggt

SEQ ID NO: 5176656 - DNA, 25 bp, Homo sapien
atgaccactgtgaaaaatctgcagc

SEQ ID NO: 5176657 - DNA, 25 bp, Homo sapien
aatgaccactgtgaaaaatctgcag

SEQ ID NO: 5176658 - DNA, 25 bp, Homo sapien
ttgctctggaggtcaaatgaccact

SEQ ID NO: 5176659 - DNA, 25 bp, Homo sapien
tgtgacttcataatttgctgtttat

SEQ ID NO: 5176660 - DNA, 25 bp, Homo sapien
tatttttaaacatcacacatttctg

SEQ ID NO: 5176661 - DNA, 25 bp, Homo sapien
cttgtgacttcataatttgctgttt

SEQ ID NO: 5176662 - DNA, 25 bp, Homo sapien
ctgtttatttttaaacatcacacat

SEQ ID NO: 5176663 - DNA, 25 bp, Homo sapien
agccaccttacagcggatggtgacc

SEQ ID NO: 5176664 - DNA, 25 bp, Homo sapien
tttagccaccttacagcggatggtg

SEQ ID NO: 5176665 - DNA, 25 bp, Homo sapien
ttccctttagccaccttacagcgga

SEQ ID NO: 5176666 - DNA, 25 bp, Homo sapien
cctttagccaccttacagcggatgg

SEQ ID NO: 5176667 - DNA, 25 bp, Homo sapien
gcaacaacactattaaagctctcat

SEQ ID NO: 5176668 - DNA, 25 bp, Homo sapien
tctcatctatggacagcaacaacac

SEQ ID NO: 5176669 - DNA, 25 bp, Homo sapien
gtaggaaaactgcttaggctctcat

SEQ ID NO: 5176670 - DNA, 25 bp, Homo sapien
aactgcttaggctctcatctatgga

SEQ ID NO: 5176671 - DNA, 25 bp, Homo sapien
gagaaaggtgatggtctccaatcca

SEQ ID NO: 5176672 - DNA, 25 bp, Homo sapien
gaaaggtgatggtctccaatccact

SEQ ID NO: 5176673 - DNA, 25 bp, Homo sapien
agaaaggtgatggtctccaatccac

SEQ ID NO: 5176674 - DNA, 25 bp, Homo sapien
aaaggtgatggtctccaatccactt

SEQ ID NO: 5176675 - DNA, 25 bp, Homo sapien
gcaggtgagatcacaggtcctttgg

SEQ ID NO: 5176676 - DNA, 25 bp, Homo sapien
ccttcactatgtttggttgggatca

SEQ ID NO: 5176677 - DNA, 25 bp, Homo sapien
gcttctcatacatgtggtcagagcc

SEQ ID NO: 5176678 - DNA, 25 bp, Homo sapien
ggtcagagcctgtagtggtccaatt

SEQ ID NO: 5176679 - DNA, 25 bp, Homo sapien
gaagcaaatcttaacggccgaagtc

SEQ ID NO: 5176680 - DNA, 25 bp, Homo sapien
caaggtgcctctatgtcagcatgat

SEQ ID NO: 5176681 - DNA, 25 bp, Homo sapien
tggccaaattcggacctctgaagct

SEQ ID NO: 5176682 - DNA, 25 bp, Homo sapien
tgcttacagagcacgagtctcccag

SEQ ID NO: 5176683 - DNA, 25 bp, Homo sapien
gacgaccagtagttcaattagttag

SEQ ID NO: 5176684 - DNA, 25 bp, Homo sapien
gctttctgacacaatagacgaccag

SEQ ID NO: 5176685 - DNA, 25 bp, Homo sapien
gggcctgtgcccttttgagaatgtt

SEQ ID NO: 5176686 - DNA, 25 bp, Homo sapien
taatttccgtgtgactacttgacag

SEQ ID NO: 5176687 - DNA, 25 bp, Homo sapien
cttaaacgatgagcagtcaggtgag

SEQ ID NO: 5176688 - DNA, 25 bp, Homo sapien
gaaggctttccagatgaggtgtcac

SEQ ID NO: 5176689 - DNA, 25 bp, Homo sapien
taatgatcttaaacgatgagcagtc

SEQ ID NO: 5176690 - DNA, 25 bp, Homo sapien
gatgaggtgtcacataataatgatc

SEQ ID NO: 5176691 - DNA, 25 bp, Homo sapien
cgtgcaacatggaaaaggttttgga

SEQ ID NO: 5176692 - DNA, 25 bp, Homo sapien
tgctgtcgagccagacgatttgtct

SEQ ID NO: 5176693 - DNA, 25 bp, Homo sapien
taaaaggaagcgaggtacaaaggca

SEQ ID NO: 5176694 - DNA, 25 bp, Homo sapien
tgtctttctaaacgtgcaacatgga

SEQ ID NO: 5176695 - DNA, 25 bp, Homo sapien
gatgcattcacgtctgaaagggaca

SEQ ID NO: 5176696 - DNA, 25 bp, Homo sapien
aagaagtggatgcattcacgtctga

SEQ ID NO: 5176697 - DNA, 25 bp, Homo sapien
gaagtggatgcattcacgtctgaaa

SEQ ID NO: 5176698 - DNA, 25 bp, Homo sapien
tggatgcattcacgtctgaaaggga

SEQ ID NO: 5176699 - DNA, 25 bp, Homo sapien
cctcaatatgaatgtctggaattag

SEQ ID NO: 5176700 - DNA, 25 bp, Homo sapien
tcaatatgaatgtctggaattagtc

SEQ ID NO: 5176701 - DNA, 25 bp, Homo sapien
aatatgaatgtctggaattagtctc

SEQ ID NO: 5176702 - DNA, 25 bp, Homo sapien
tatgaatgtctggaattagtctcac

SEQ ID NO: 5176703 - DNA, 25 bp, Homo sapien
ctgggaaaacacgaggagaaatgga

SEQ ID NO: 5176704 - DNA, 25 bp, Homo sapien
ggaaaacacgaggagaaatggaaca

SEQ ID NO: 5176705 - DNA, 25 bp, Homo sapien
tgggaaaacacgaggagaaatggaa

SEQ ID NO: 5176706 - DNA, 25 bp, Homo sapien
gaaaacacgaggagaaatggaacaa

SEQ ID NO: 5176707 - DNA, 25 bp, Homo sapien
cactggctgtcgtccaaattcagct

SEQ ID NO: 5176708 - DNA, 25 bp, Homo sapien
gaaaaacatcttcagtgctccggtg

SEQ ID NO: 5176709 - DNA, 25 bp, Homo sapien
tgctccggtgacaacgtggatgtcc

SEQ ID NO: 5176710 - DNA, 25 bp, Homo sapien
gaaactgtaagggaagagcggctca

SEQ ID NO: 5176711 - DNA, 25 bp, Homo sapien
tcttccttaaatcagctggcttgcc

SEQ ID NO: 5176712 - DNA, 25 bp, Homo sapien
ttttcttccttaaatcagctggctt

SEQ ID NO: 5176713 - DNA, 25 bp, Homo sapien
cagctggcttgccaggaaacttttt

SEQ ID NO: 5176714 - DNA, 25 bp, Homo sapien
ctttttcttccttaaatcagctggc

SEQ ID NO: 5176715 - DNA, 25 bp, Homo sapien
aatgaagttaggaaagcatgctgaa

SEQ ID NO: 5176716 - DNA, 25 bp, Homo sapien
tgaagttaggaaagcatgctgaact

SEQ ID NO: 5176717 - DNA, 25 bp, Homo sapien
atgaagttaggaaagcatgctgaac

SEQ ID NO: 5176718 - DNA, 25 bp, Homo sapien
ccgaaaactcgcgagtggatctgtt

SEQ ID NO: 5176719 - DNA, 25 bp, Homo sapien
ctttccatataaagccgaaaactcg

SEQ ID NO: 5176720 - DNA, 25 bp, Homo sapien
ccatataaagccgaaaactcgcgag

SEQ ID NO: 5176721 - DNA, 25 bp, Homo sapien
taaagccgaaaactcgcgagtggat

SEQ ID NO: 5176722 - DNA, 25 bp, Homo sapien
caattcatcctgtcctgtgaattta

SEQ ID NO: 5176723 - DNA, 25 bp, Homo sapien
tcaattcatcctgtcctgtgaattt

SEQ ID NO: 5176724 - DNA, 25 bp, Homo sapien
atcctgtcctgtgaatttactttac

SEQ ID NO: 5176725 - DNA, 25 bp, Homo sapien
ttcatcctgtcctgtgaatttactt

SEQ ID NO: 5176726 - DNA, 25 bp, Homo sapien
gggattgtaataaggacatagtgcc

SEQ ID NO: 5176727 - DNA, 25 bp, Homo sapien
acagaataggtgctcttagctaaca

SEQ ID NO: 5176728 - DNA, 25 bp, Homo sapien
agtgatgcattttgcacagaatagg

SEQ ID NO: 5176729 - DNA, 25 bp, Homo sapien
tacctttaagcatttggaatatggg

SEQ ID NO: 5176730 - DNA, 25 bp, Homo sapien
gagtcagtataacatgataggcaca

SEQ ID NO: 5176731 - DNA, 25 bp, Homo sapien
ggtgatatcctaattaaccatgctc

SEQ ID NO: 5176732 - DNA, 25 bp, Homo sapien
caatatcatactctaggtcttctgg

SEQ ID NO: 5176733 - DNA, 25 bp, Homo sapien
taagagctctcatctagtcaagtgg

SEQ ID NO: 5176734 - DNA, 25 bp, Homo sapien
tatatcgacttaacgtggtaggcag

SEQ ID NO: 5176735 - DNA, 25 bp, Homo sapien
tctcaaggaaacgtatggtaagccc

SEQ ID NO: 5176736 - DNA, 25 bp, Homo sapien
gaaaatgctatcttcgtggcaaagg

SEQ ID NO: 5176737 - DNA, 25 bp, Homo sapien
tgatggccctatcctaatctctgga

SEQ ID NO: 5176738 - DNA, 25 bp, Homo sapien
gggtttcaaagtgtaaatagaggca

SEQ ID NO: 5176739 - DNA, 25 bp, Homo sapien
gtactacatattatgtatctttgag

SEQ ID NO: 5176740 - DNA, 25 bp, Homo sapien
aaatagaggcaaagatattcttcct

SEQ ID NO: 5176741 - DNA, 25 bp, Homo sapien
tgcatgcaggtactacatattatgt

SEQ ID NO: 5176742 - DNA, 25 bp, Homo sapien
gaaaattccgatcaaacctgtgatg

SEQ ID NO: 5176743 - DNA, 25 bp, Homo sapien
cagaaaattccgatcaaacctgtga

SEQ ID NO: 5176744 - DNA, 25 bp, Homo sapien
acagaaaattccgatcaaacctgtg

SEQ ID NO: 5176745 - DNA, 25 bp, Homo sapien
aattccgatcaaacctgtgatgaag

SEQ ID NO: 5176746 - DNA, 25 bp, Homo sapien
cttgcaggtaaattggtcctgttgc

SEQ ID NO: 5176747 - DNA, 25 bp, Homo sapien
ttgcaggtaaattggtcctgttgcc

SEQ ID NO: 5176748 - DNA, 25 bp, Homo sapien
tcttgcaggtaaattggtcctgttg

SEQ ID NO: 5176749 - DNA, 25 bp, Homo sapien
caggtaaattggtcctgttgcctta

SEQ ID NO: 5176750 - DNA, 25 bp, Homo sapien
cttctttaattaataatgcatacat

SEQ ID NO: 5176751 - DNA, 25 bp, Homo sapien
actccgggaatgtattcagttgcac

SEQ ID NO: 5176752 - DNA, 25 bp, Homo sapien
tacagtgccatcaataactccggga

SEQ ID NO: 5176753 - DNA, 25 bp, Homo sapien
caccagactggcagattgtggattc

SEQ ID NO: 5176754 - DNA, 25 bp, Homo sapien
gctcttgtgctattacaccagactg

SEQ ID NO: 5176755 - DNA, 25 bp, Homo sapien
gaagactttctgcaagatcagctag

SEQ ID NO: 5176756 - DNA, 25 bp, Homo sapien
taacgattctgtccaatacatgctg

SEQ ID NO: 5176757 - DNA, 25 bp, Homo sapien
caaatcaaatgagtgaaggatgtcc

SEQ ID NO: 5176758 - DNA, 25 bp, Homo sapien
taaaagactagactgaacccagatg

SEQ ID NO: 5176759 - DNA, 25 bp, Homo sapien
cacctcttgaaacttgtcactaaat

SEQ ID NO: 5176760 - DNA, 25 bp, Homo sapien
tgatgcaaatcatgacttttggttt

SEQ ID NO: 5176761 - DNA, 25 bp, Homo sapien
gagctgatgcaaatcatgacttttg

SEQ ID NO: 5176762 - DNA, 25 bp, Homo sapien
gctgatgcaaatcatgacttttggt

SEQ ID NO: 5176763 - DNA, 25 bp, Homo sapien
caactgtaaagaagtagccataggc

SEQ ID NO: 5176764 - DNA, 25 bp, Homo sapien
ggaagaatttgattgcaaactttca

SEQ ID NO: 5176765 - DNA, 25 bp, Homo sapien
caaaggcccttgtaaatggcaggac

SEQ ID NO: 5176766 - DNA, 25 bp, Homo sapien
atttccaggtaaagacgcaacagca

SEQ ID NO: 5176767 - DNA, 25 bp, Homo sapien
ttcatggtgtcacgatttggcggag

SEQ ID NO: 5176768 - DNA, 25 bp, Homo sapien
gtacaagagattttacagcttcaat

SEQ ID NO: 5176769 - DNA, 25 bp, Homo sapien
actttcatggtgtcacgatttggcg

SEQ ID NO: 5176770 - DNA, 25 bp, Homo sapien
tggcggagggagtttttgtacaaga

SEQ ID NO: 5176771 - DNA, 25 bp, Homo sapien
gaaagacctagttcagctacaaggg

SEQ ID NO: 5176772 - DNA, 25 bp, Homo sapien
caagggaaaatacgagatgtacgca

SEQ ID NO: 5176773 - DNA, 25 bp, Homo sapien
gtccaggcgatggttctgacaagca

SEQ ID NO: 5176774 - DNA, 25 bp, Homo sapien
tatttgtggccccagcacgtggtac

SEQ ID NO: 5176775 - DNA, 25 bp, Homo sapien
tcataacttgcgttgcactctgcct

SEQ ID NO: 5176776 - DNA, 25 bp, Homo sapien
tatctcctgcctgtactactgtggt

SEQ ID NO: 5176777 - DNA, 25 bp, Homo sapien
tactgtggttgtctgccattaggtc

SEQ ID NO: 5176778 - DNA, 25 bp, Homo sapien
caatctatttgaacctctgtcaggc

SEQ ID NO: 5176779 - DNA, 25 bp, Homo sapien
gcatgtgtttaggaacaggtcagga

SEQ ID NO: 5176780 - DNA, 25 bp, Homo sapien
aacttgaaaccgctttcatggtgtg

SEQ ID NO: 5176781 - DNA, 25 bp, Homo sapien
ttgaaaccgctttcatggtgtgtct

SEQ ID NO: 5176782 - DNA, 25 bp, Homo sapien
tgtaacttgaaaccgctttcatggt

SEQ ID NO: 5176783 - DNA, 25 bp, Homo sapien
ttgtaacttgaaaccgctttcatgg

SEQ ID NO: 5176784 - DNA, 25 bp, Homo sapien
tctagtccaactgtgccgcattaag

SEQ ID NO: 5176785 - DNA, 25 bp, Homo sapien
atttttggcacttcattacattccc

SEQ ID NO: 5176786 - DNA, 25 bp, Homo sapien
tgtagagtacgtaggtcaagtggaa

SEQ ID NO: 5176787 - DNA, 25 bp, Homo sapien
tctgcaaaaatggagtgcttttctg

SEQ ID NO: 5176788 - DNA, 25 bp, Homo sapien
tatggctgactggatatgggagaca

SEQ ID NO: 5176789 - DNA, 25 bp, Homo sapien
tccgatatgttagctgtccatccca

SEQ ID NO: 5176790 - DNA, 25 bp, Homo sapien
tatagaggccttgattaatacacac

SEQ ID NO: 5176791 - DNA, 25 bp, Homo sapien
gtccatcccaaccagcagcatatag

SEQ ID NO: 5176792 - DNA, 25 bp, Homo sapien
ccatgtctgcaagtctttggatatc

SEQ ID NO: 5176793 - DNA, 25 bp, Homo sapien
tatcaggtattgtggttgggtgaaa

SEQ ID NO: 5176794 - DNA, 25 bp, Homo sapien
tgggtgaaagaccaaagtgtacaga

SEQ ID NO: 5176795 - DNA, 25 bp, Homo sapien
cataacgtgctcaaaagcacagcag

SEQ ID NO: 5176796 - DNA, 25 bp, Homo sapien
cattcacagatgctcccaatttggt

SEQ ID NO: 5176797 - DNA, 25 bp, Homo sapien
agagctggccctgttctagccgtca

SEQ ID NO: 5176798 - DNA, 25 bp, Homo sapien
acttgaacatgtgccgtccagagct

SEQ ID NO: 5176799 - DNA, 25 bp, Homo sapien
aagtgggtctcagaagtacgttaca

SEQ ID NO: 5176800 - DNA, 25 bp, Homo sapien
gtacacaggaactgcttccttccag

SEQ ID NO: 5176801 - DNA, 25 bp, Homo sapien
tacacaggaactgcttccttccagt

SEQ ID NO: 5176802 - DNA, 25 bp, Homo sapien
tgtacacaggaactgcttccttcca

SEQ ID NO: 5176803 - DNA, 25 bp, Homo sapien
tttgtgtcagcacgggaaacaccct

SEQ ID NO: 5176804 - DNA, 25 bp, Homo sapien
ccttttgtgagtcactctccagcaa

SEQ ID NO: 5176805 - DNA, 25 bp, Homo sapien
cagcacgggaaacacccttttgtga

SEQ ID NO: 5176806 - DNA, 25 bp, Homo sapien
ttgcatacttttgtgtcagcacggg

SEQ ID NO: 5176807 - DNA, 25 bp, Homo sapien
agtatggaaaagtctctgcagttag

SEQ ID NO: 5176808 - DNA, 25 bp, Homo sapien
aagagcaggatattgagccaggtcc

SEQ ID NO: 5176809 - DNA, 25 bp, Homo sapien
cagagagcgcacagaggaacctgaa

SEQ ID NO: 5176810 - DNA, 25 bp, Homo sapien
gttaggaccagatctctgaatagca

SEQ ID NO: 5176811 - DNA, 25 bp, Homo sapien
actggggtagatcagtggctcccag

SEQ ID NO: 5176812 - DNA, 25 bp, Homo sapien
gactggggtagatcagtggctccca

SEQ ID NO: 5176813 - DNA, 25 bp, Homo sapien
ctggggtagatcagtggctcccagc

SEQ ID NO: 5176814 - DNA, 25 bp, Homo sapien
gacctaagtttgttcccatgaactg

SEQ ID NO: 5176815 - DNA, 25 bp, Homo sapien
tgcctcaacattactgctcctttac

SEQ ID NO: 5176816 - DNA, 25 bp, Homo sapien
tcctgaccatggctcatccattgac

SEQ ID NO: 5176817 - DNA, 25 bp, Homo sapien
tcctttaccaccactggagaaatcc

SEQ ID NO: 5176818 - DNA, 25 bp, Homo sapien
ctgagtagctgaggttatagcatgc

SEQ ID NO: 5176819 - DNA, 25 bp, Homo sapien
agctgaggttatagcatgcaccacc

SEQ ID NO: 5176820 - DNA, 25 bp, Homo sapien
agtagctgaggttatagcatgcacc

SEQ ID NO: 5176821 - DNA, 25 bp, Homo sapien
ctgaggttatagcatgcaccaccat

SEQ ID NO: 5176822 - DNA, 25 bp, Homo sapien
gaccagaatctagctttgaacccca

SEQ ID NO: 5176823 - DNA, 25 bp, Homo sapien
tccaagtatacttcacctgcgatca

SEQ ID NO: 5176824 - DNA, 25 bp, Homo sapien
tttcatttcccatgaggaccagaat

SEQ ID NO: 5176825 - DNA, 25 bp, Homo sapien
tgaaccccagcaggattgctaggga

SEQ ID NO: 5176826 - DNA, 25 bp, Homo sapien
actgacaagcctccgggccaggttc

SEQ ID NO: 5176827 - DNA, 25 bp, Homo sapien
ttgctgcatggacagatgttttcaa

SEQ ID NO: 5176828 - DNA, 25 bp, Homo sapien
agggagctgcatgggcttcccacac

SEQ ID NO: 5176829 - DNA, 25 bp, Homo sapien
gctgcatggacagatgttttcaatt

SEQ ID NO: 5176830 - DNA, 25 bp, Homo sapien
agggaagacagaccaggtacaacct

SEQ ID NO: 5176831 - DNA, 25 bp, Homo sapien
cattggcacacgaggagcaagggaa

SEQ ID NO: 5176832 - DNA, 25 bp, Homo sapien
tttataccaagctgaaagatctggc

SEQ ID NO: 5176833 - DNA, 25 bp, Homo sapien
ggtacaacctagtgctgtccccgaa

SEQ ID NO: 5176834 - DNA, 25 bp, Homo sapien
gagcaccaaggtgaatgtgcccaga

SEQ ID NO: 5176835 - DNA, 25 bp, Homo sapien
gaatatttagggaagtcatgactca

SEQ ID NO: 5176836 - DNA, 25 bp, Homo sapien
ggccagttttagacactttctgcag

SEQ ID NO: 5176837 - DNA, 25 bp, Homo sapien
tgactcaatgcaaaaagccatgatg

SEQ ID NO: 5176838 - DNA, 25 bp, Homo sapien
gaggccatgccgtccatctcttgaa

SEQ ID NO: 5176839 - DNA, 25 bp, Homo sapien
gcctaagccatgtgtgtactgcctg

SEQ ID NO: 5176840 - DNA, 25 bp, Homo sapien
acttttgtgaccaagaggccatgcc

SEQ ID NO: 5176841 - DNA, 25 bp, Homo sapien
gtactgcctggtacttgcccaccac

SEQ ID NO: 5176842 - DNA, 25 bp, Homo sapien
tccttattaagttgagaccttccac

SEQ ID NO: 5176843 - DNA, 25 bp, Homo sapien
cactgaatggaagcacgttatggct

SEQ ID NO: 5176844 - DNA, 25 bp, Homo sapien
tatttttcctacttgacaatttcac

SEQ ID NO: 5176845 - DNA, 25 bp, Homo sapien
atcccgccgccagtggatgcctgag

SEQ ID NO: 5176846 - DNA, 25 bp, Homo sapien
tcagctatctggttctggtagacca

SEQ ID NO: 5176847 - DNA, 25 bp, Homo sapien
gtaggtccaaatacaatccccaagc

SEQ ID NO: 5176848 - DNA, 25 bp, Homo sapien
tagaccatgtggatcgccatgtttc

SEQ ID NO: 5176849 - DNA, 25 bp, Homo sapien
tcagctcgcagaagggtaggtccaa

SEQ ID NO: 5176850 - DNA, 25 bp, Homo sapien
tcttcctctgagccgaagatcttac

SEQ ID NO: 5176851 - DNA, 25 bp, Homo sapien
tcagtcttcctctgagccgaagatc

SEQ ID NO: 5176852 - DNA, 25 bp, Homo sapien
cagtcttcctctgagccgaagatct

SEQ ID NO: 5176853 - DNA, 25 bp, Homo sapien
gtcttcctctgagccgaagatctta

SEQ ID NO: 5176854 - DNA, 25 bp, Homo sapien
gacagatgtgaacgtattcagtagc

SEQ ID NO: 5176855 - DNA, 25 bp, Homo sapien
aaatgaggcatctgtcgcttgaaag

SEQ ID NO: 5176856 - DNA, 25 bp, Homo sapien
tcagaaatatgtttacagaaatgta

SEQ ID NO: 5176857 - DNA, 25 bp, Homo sapien
tcaaatgtttggaacttaaacacaa

SEQ ID NO: 5176858 - DNA, 25 bp, Homo sapien
tatccgtgtccaagtaacagtatgg

SEQ ID NO: 5176859 - DNA, 25 bp, Homo sapien
tttgaatatgtgctagtctttgcat

SEQ ID NO: 5176860 - DNA, 25 bp, Homo sapien
ttaatagcatgaggcatgcatgatg

SEQ ID NO: 5176861 - DNA, 25 bp, Homo sapien
tgcatgatgtgctcctagaagtgct

SEQ ID NO: 5176862 - DNA, 25 bp, Homo sapien
cactgtatagcattgaaaatagctg

SEQ ID NO: 5176863 - DNA, 25 bp, Homo sapien
gagcagtcatgcaattcctgtgtaa

SEQ ID NO: 5176864 - DNA, 25 bp, Homo sapien
tataaagatcaaaattgcagggcac

SEQ ID NO: 5176865 - DNA, 25 bp, Homo sapien
tgcagggcactaattttgcttctaa

SEQ ID NO: 5176866 - DNA, 25 bp, Homo sapien
aaaagctgtcaaacgtaagtctaca

SEQ ID NO: 5176867 - DNA, 25 bp, Homo sapien
tatattctagacagttacccttttg

SEQ ID NO: 5176868 - DNA, 25 bp, Homo sapien
tatccatgacaactgaaactatcaa

SEQ ID NO: 5176869 - DNA, 25 bp, Homo sapien
gtctagtcaagtaatccttagggca

SEQ ID NO: 5176870 - DNA, 25 bp, Homo sapien
caaaagggacaagggagtcctctgc

SEQ ID NO: 5176871 - DNA, 25 bp, Homo sapien
tcaaaagggacaagggagtcctctg

SEQ ID NO: 5176872 - DNA, 25 bp, Homo sapien
gattggaaatcaagaagctggtgct

SEQ ID NO: 5176873 - DNA, 25 bp, Homo sapien
gggtttgaatcaggctaaatcccat

SEQ ID NO: 5176874 - DNA, 25 bp, Homo sapien
tgaatcaggctaaatcccatcagat

SEQ ID NO: 5176875 - DNA, 25 bp, Homo sapien
aaacacattctctgattaaatgccc

SEQ ID NO: 5176876 - DNA, 25 bp, Homo sapien
tccatcgcaacccagtgagtaagtc

SEQ ID NO: 5176877 - DNA, 25 bp, Homo sapien
tgagtaagtcagaaacgggcctggt

SEQ ID NO: 5176878 - DNA, 25 bp, Homo sapien
cattgacttgggcatgacttggcca

SEQ ID NO: 5176879 - DNA, 25 bp, Homo sapien
ggtagcatgcacactcattgacttg

SEQ ID NO: 5176880 - DNA, 25 bp, Homo sapien
cattaaaagccagcgcctacgtgga

SEQ ID NO: 5176881 - DNA, 25 bp, Homo sapien
ggagagcttttacgcagcacctgaa

SEQ ID NO: 5176882 - DNA, 25 bp, Homo sapien
catttcagagtaggactgccagggt

SEQ ID NO: 5176883 - DNA, 25 bp, Homo sapien
cagagattttacagaggccaggatc

SEQ ID NO: 5176884 - DNA, 25 bp, Homo sapien
ctgggagagtggatttatttgtaga

SEQ ID NO: 5176885 - DNA, 25 bp, Homo sapien
ggagagtggatttatttgtagaagt

SEQ ID NO: 5176886 - DNA, 25 bp, Homo sapien
tgggagagtggatttatttgtagaa

SEQ ID NO: 5176887 - DNA, 25 bp, Homo sapien
agagtggatttatttgtagaagttt

SEQ ID NO: 5176888 - DNA, 25 bp, Homo sapien
atagagggcagttatactagtcact

SEQ ID NO: 5176889 - DNA, 25 bp, Homo sapien
tataatgccacaagcttctttgcag

SEQ ID NO: 5176890 - DNA, 25 bp, Homo sapien
cagttatactagtcactttgtgctc

SEQ ID NO: 5176891 - DNA, 25 bp, Homo sapien
tctgaagaatttaaacgctaacaaa

SEQ ID NO: 5176892 - DNA, 25 bp, Homo sapien
aaagaaatagccatattgggggaga

SEQ ID NO: 5176893 - DNA, 25 bp, Homo sapien
tatcacttgctcttggattctccag

SEQ ID NO: 5176894 - DNA, 25 bp, Homo sapien
aacttcctcccagcaaataggtttg

SEQ ID NO: 5176895 - DNA, 25 bp, Homo sapien
cacttaattctgaagagtgccagct

SEQ ID NO: 5176896 - DNA, 25 bp, Homo sapien
cacgccaatgttctgttgctctagt

SEQ ID NO: 5176897 - DNA, 25 bp, Homo sapien
tggctgcaggaacacttgacccgag

SEQ ID NO: 5176898 - DNA, 25 bp, Homo sapien
gacccgaggtaactacttccacata

SEQ ID NO: 5176899 - DNA, 25 bp, Homo sapien
tgaagtgagtacttgcagcctggct

SEQ ID NO: 5176900 - DNA, 25 bp, Homo sapien
tcccaagacatctgtagaccagagg

SEQ ID NO: 5176901 - DNA, 25 bp, Homo sapien
tcacacgtagatgcaagaggaactg

SEQ ID NO: 5176902 - DNA, 25 bp, Homo sapien
cagtggccagcacgtgtccagtagt

SEQ ID NO: 5176903 - DNA, 25 bp, Homo sapien
gaaaatagagtctccctgagtaccc

SEQ ID NO: 5176904 - DNA, 25 bp, Homo sapien
gaactcagtcatgtggtcacacgta

SEQ ID NO: 5176905 - DNA, 25 bp, Homo sapien
taagaaccatccctccatcgctgtt

SEQ ID NO: 5176906 - DNA, 25 bp, Homo sapien
cactggctggttgggttctatccga

SEQ ID NO: 5176907 - DNA, 25 bp, Homo sapien
tcatcaggttcccaacttccataag

SEQ ID NO: 5176908 - DNA, 25 bp, Homo sapien
tctccacttccatgatcagcactgg

SEQ ID NO: 5176909 - DNA, 25 bp, Homo sapien
cagcttaatcatggtagattcttga

SEQ ID NO: 5176910 - DNA, 25 bp, Homo sapien
gaacgcataagtattcgggcagcca

SEQ ID NO: 5176911 - DNA, 25 bp, Homo sapien
tgacttcaggcagtttcaaagccaa

SEQ ID NO: 5176912 - DNA, 25 bp, Homo sapien
ggcgtgttttggtttatctcactca

SEQ ID NO: 5176913 - DNA, 25 bp, Homo sapien
aaagggtgaatgcatattctcccac

SEQ ID NO: 5176914 - DNA, 25 bp, Homo sapien
gctgaacttgtgtttgtcagcaagt

SEQ ID NO: 5176915 - DNA, 25 bp, Homo sapien
ggagtgtcgctgacactgaagacac

SEQ ID NO: 5176916 - DNA, 25 bp, Homo sapien
actggcgctgcgagctgctgaactt

SEQ ID NO: 5176917 - DNA, 25 bp, Homo sapien
aattttgagaaatcggtgccagcac

SEQ ID NO: 5176918 - DNA, 25 bp, Homo sapien
tttgagaaatcggtgccagcactct

SEQ ID NO: 5176919 - DNA, 25 bp, Homo sapien
ttgagaaatcggtgccagcactctg

SEQ ID NO: 5176920 - DNA, 25 bp, Homo sapien
gtgccagcactctgatattgtcttc

SEQ ID NO: 5176921 - DNA, 25 bp, Homo sapien
gctgcacccagttggtaaattgtgc

SEQ ID NO: 5176922 - DNA, 25 bp, Homo sapien
tctgctgcacccagttggtaaattg

SEQ ID NO: 5176923 - DNA, 25 bp, Homo sapien
tgctgcacccagttggtaaattgtg

SEQ ID NO: 5176924 - DNA, 25 bp, Homo sapien
tgtctgctgcacccagttggtaaat

SEQ ID NO: 5176925 - DNA, 25 bp, Homo sapien
gctgtcaaaatggaatgcaccccta

SEQ ID NO: 5176926 - DNA, 25 bp, Homo sapien
tgtcaaaatggaatgcacccctaaa

SEQ ID NO: 5176927 - DNA, 25 bp, Homo sapien
aaatggaatgcacccctaaaacttg

SEQ ID NO: 5176928 - DNA, 25 bp, Homo sapien
tcaaaatggaatgcacccctaaaac

SEQ ID NO: 5176929 - DNA, 25 bp, Homo sapien
tatgatttgaacttgccgataagca

SEQ ID NO: 5176930 - DNA, 25 bp, Homo sapien
tgttttatgatttgaacttgccgat

SEQ ID NO: 5176931 - DNA, 25 bp, Homo sapien
catttcaggacatcgcaaacctgat

SEQ ID NO: 5176932 - DNA, 25 bp, Homo sapien
aacttgccgataagcatttcaggac

SEQ ID NO: 5176933 - DNA, 25 bp, Homo sapien
ctggaattgcttatgtcgtacttga

SEQ ID NO: 5176934 - DNA, 25 bp, Homo sapien
gaattgcttatgtcgtacttgagtc

SEQ ID NO: 5176935 - DNA, 25 bp, Homo sapien
tcaaactggaattgcttatgtcgta

SEQ ID NO: 5176936 - DNA, 25 bp, Homo sapien
cttatgtcgtacttgagtcttgtcc

SEQ ID NO: 5176937 - DNA, 25 bp, Homo sapien
ctgtttttgtaaaccaatgccctgg

SEQ ID NO: 5176938 - DNA, 25 bp, Homo sapien
ttttgtaaaccaatgccctgggatc

SEQ ID NO: 5176939 - DNA, 25 bp, Homo sapien
cagaggagacttggtcatgagctgc

SEQ ID NO: 5176940 - DNA, 25 bp, Homo sapien
ctgacgcagtcagaggagacttggt

SEQ ID NO: 5176941 - DNA, 25 bp, Homo sapien
cagtcagaggagacttggtcatgag

SEQ ID NO: 5176942 - DNA, 25 bp, Homo sapien
gacgcagtcagaggagacttggtca

SEQ ID NO: 5176943 - DNA, 25 bp, Homo sapien
tgactttccacatcgtaacccaaag

SEQ ID NO: 5176944 - DNA, 25 bp, Homo sapien
tatgtaaccggcagaaccaactgtt

SEQ ID NO: 5176945 - DNA, 25 bp, Homo sapien
tgaagccggcaaacagtctcacaga

SEQ ID NO: 5176946 - DNA, 25 bp, Homo sapien
cccaaagggaatgccacaggagatc

SEQ ID NO: 5176947 - DNA, 25 bp, Homo sapien
agaagtttccaagtacaatgttgtc

SEQ ID NO: 5176948 - DNA, 25 bp, Homo sapien
ggatgcctgcctcggttttgattgg

SEQ ID NO: 5176949 - DNA, 25 bp, Homo sapien
gtctgagagtgacccggaccagtca

SEQ ID NO: 5176950 - DNA, 25 bp, Homo sapien
tgtaagtgcgttgcaagaagtttcc

SEQ ID NO: 5176951 - DNA, 25 bp, Homo sapien
caatagagcaccctcctctggccac

SEQ ID NO: 5176952 - DNA, 25 bp, Homo sapien
ctacagtcgtggtattacaatgaga

SEQ ID NO: 5176953 - DNA, 25 bp, Homo sapien
tacagtcgtggtattacaatgagaa

SEQ ID NO: 5176954 - DNA, 25 bp, Homo sapien
tggcagtggagaccaacgacagttt

SEQ ID NO: 5176955 - DNA, 25 bp, Homo sapien
cagtacggtgctcaggttggtgcct

SEQ ID NO: 5176956 - DNA, 25 bp, Homo sapien
tgtacctttcactgtggcaatggag

SEQ ID NO: 5176957 - DNA, 25 bp, Homo sapien
taataagcggacaagcaagtgcagc

SEQ ID NO: 5176958 - DNA, 25 bp, Homo sapien
tagctccctgtggaagggtgccagc

SEQ ID NO: 5176959 - DNA, 25 bp, Homo sapien
tttaaaggacaacgaggacctgctg

SEQ ID NO: 5176960 - DNA, 25 bp, Homo sapien
tgaacggcagctacaagacatctgc

SEQ ID NO: 5176961 - DNA, 25 bp, Homo sapien
caggccttcgcttctgcagatgagc

SEQ ID NO: 5176962 - DNA, 25 bp, Homo sapien
aatatgttgtacaggtggcttggta

SEQ ID NO: 5176963 - DNA, 25 bp, Homo sapien
aaatatgttgtacaggtggcttggt

SEQ ID NO: 5176964 - DNA, 25 bp, Homo sapien
atatgttgtacaggtggcttggtag

SEQ ID NO: 5176965 - DNA, 25 bp, Homo sapien
gtcattttgaaatacgtactctctg

SEQ ID NO: 5176966 - DNA, 25 bp, Homo sapien
tttacttagggaacatctagatgag

SEQ ID NO: 5176967 - DNA, 25 bp, Homo sapien
tggaatatccaccacctcaggtact

SEQ ID NO: 5176968 - DNA, 25 bp, Homo sapien
aaatacacatttcaccaccgctact

SEQ ID NO: 5176969 - DNA, 25 bp, Homo sapien
gtaaatactactacactcaaaccag

SEQ ID NO: 5176970 - DNA, 25 bp, Homo sapien
ttgtaaatactactacactcaaacc

SEQ ID NO: 5176971 - DNA, 25 bp, Homo sapien
taaatactactacactcaaaccaga

SEQ ID NO: 5176972 - DNA, 25 bp, Homo sapien
tgtaaatactactacactcaaacca

SEQ ID NO: 5176973 - DNA, 25 bp, Homo sapien
gggttcttgcctcgttctcttggac

SEQ ID NO: 5176974 - DNA, 25 bp, Homo sapien
tgctctttgatggaattcttgcctc

SEQ ID NO: 5176975 - DNA, 25 bp, Homo sapien
tctcttggaccttctactgatggaa

SEQ ID NO: 5176976 - DNA, 25 bp, Homo sapien
cactctattatacttgggtagctct

SEQ ID NO: 5176977 - DNA, 25 bp, Homo sapien
cgaccagctagtgccttgcgtcggg

SEQ ID NO: 5176978 - DNA, 25 bp, Homo sapien
ttctgcacctttcaggcgcgggaac

SEQ ID NO: 5176979 - DNA, 25 bp, Homo sapien
tagctcagtctcgtccagagcggtg

SEQ ID NO: 5176980 - DNA, 25 bp, Homo sapien
gacgttgaggtcacgaagtcatcac

SEQ ID NO: 5176981 - DNA, 25 bp, Homo sapien
gctgtggttgagcagtagtcaagac

SEQ ID NO: 5176982 - DNA, 25 bp, Homo sapien
tacaggcagatctagaactcagatt

SEQ ID NO: 5176983 - DNA, 25 bp, Homo sapien
cttgggtcccacagtggtacaggca

SEQ ID NO: 5176984 - DNA, 25 bp, Homo sapien
tgagcagtagtcaagaccacctctt

SEQ ID NO: 5176985 - DNA, 25 bp, Homo sapien
gtgaagccaactatcccataaaatg

SEQ ID NO: 5176986 - DNA, 25 bp, Homo sapien
caagataaacagctgtaattcggac

SEQ ID NO: 5176987 - DNA, 25 bp, Homo sapien
ggcaggtattcccatgattcacaga

SEQ ID NO: 5176988 - DNA, 25 bp, Homo sapien
ttgggcagccatcgcagaattgttt

SEQ ID NO: 5176989 - DNA, 25 bp, Homo sapien
tatgcaactgttgtacgggtacata

SEQ ID NO: 5176990 - DNA, 25 bp, Homo sapien
aaaatcagggactgaaagtcacacc

SEQ ID NO: 5176991 - DNA, 25 bp, Homo sapien
tttataagcaggtcagtgttgctgc

SEQ ID NO: 5176992 - DNA, 25 bp, Homo sapien
cccaaaggagatgtctaaacagcac

SEQ ID NO: 5176993 - DNA, 25 bp, Homo sapien
gaacacatagttactttcccgagaa

SEQ ID NO: 5176994 - DNA, 25 bp, Homo sapien
catttgaagtcgattctcagtagac

SEQ ID NO: 5176995 - DNA, 25 bp, Homo sapien
tttatgggcaaaccttatagcagtc

SEQ ID NO: 5176996 - DNA, 25 bp, Homo sapien
gaggaaatgacgcatattagctcca

SEQ ID NO: 5176997 - DNA, 25 bp, Homo sapien
ggattccacagtgaacagcactcag

SEQ ID NO: 5176998 - DNA, 25 bp, Homo sapien
tctaactgggatgctgtgaaataca

SEQ ID NO: 5176999 - DNA, 25 bp, Homo sapien
aaatgtgaattgagtcttcacggcc

SEQ ID NO: 5177000 - DNA, 25 bp, Homo sapien
cacgtgcttctgttactcctagtag

SEQ ID NO: 5177001 - DNA, 25 bp, Homo sapien
taaacaccaagaagactgctccttt

SEQ ID NO: 5177002 - DNA, 25 bp, Homo sapien
aacaccaagaagactgctccttttt

SEQ ID NO: 5177003 - DNA, 25 bp, Homo sapien
ctgtaaacaccaagaagactgctcc

SEQ ID NO: 5177004 - DNA, 25 bp, Homo sapien
tgtaaacaccaagaagactgctcct

SEQ ID NO: 5177005 - DNA, 25 bp, Homo sapien
tactgtctgcctagtagtgacatag

SEQ ID NO: 5177006 - DNA, 25 bp, Homo sapien
gtctgcctagtagtgacatagactc

SEQ ID NO: 5177007 - DNA, 25 bp, Homo sapien
ccagtactgtctgcctagtagtgac

SEQ ID NO: 5177008 - DNA, 25 bp, Homo sapien
tttccagtactgtctgcctagtagt

SEQ ID NO: 5177009 - DNA, 25 bp, Homo sapien
gtttttgatatcttagtgttctgaa

SEQ ID NO: 5177010 - DNA, 25 bp, Homo sapien
cttagtgttctgaaagatgatgttt

SEQ ID NO: 5177011 - DNA, 25 bp, Homo sapien
gatatcttagtgttctgaaagatga

SEQ ID NO: 5177012 - DNA, 25 bp, Homo sapien
ctgaaagatgatgtttgtacttcta

SEQ ID NO: 5177013 - DNA, 25 bp, Homo sapien
ttccccagctcagtgcgtttattca

SEQ ID NO: 5177014 - DNA, 25 bp, Homo sapien
gttctgctccttacctgcaatgccg

SEQ ID NO: 5177015 - DNA, 25 bp, Homo sapien
cagtgcgtttattcacgttctgctc

SEQ ID NO: 5177016 - DNA, 25 bp, Homo sapien
cacgttctgctccttacctgcaatg

SEQ ID NO: 5177017 - DNA, 25 bp, Homo sapien
gaagtctgttgcattttcaccttgg

SEQ ID NO: 5177018 - DNA, 25 bp, Homo sapien
tcttgtcagtattttgagctgcttt

SEQ ID NO: 5177019 - DNA, 25 bp, Homo sapien
tgctttaactccctgcttgaaaagg

SEQ ID NO: 5177020 - DNA, 25 bp, Homo sapien
ggccatgtatctttaccagagagaa

SEQ ID NO: 5177021 - DNA, 25 bp, Homo sapien
tgttcagacatgtgcctatttgcat

SEQ ID NO: 5177022 - DNA, 25 bp, Homo sapien
agaaaggaagtgttcagacatgtgc

SEQ ID NO: 5177023 - DNA, 25 bp, Homo sapien
gaaaggaagtgttcagacatgtgcc

SEQ ID NO: 5177024 - DNA, 25 bp, Homo sapien
ggaagtgttcagacatgtgcctatt

SEQ ID NO: 5177025 - DNA, 25 bp, Homo sapien
attagcacctccaccagagttggaa

SEQ ID NO: 5177026 - DNA, 25 bp, Homo sapien
cgggaccttttctcttctcattagc

SEQ ID NO: 5177027 - DNA, 25 bp, Homo sapien
tcttctcattagcacctccaccaga

SEQ ID NO: 5177028 - DNA, 25 bp, Homo sapien
ctcgggaccttttctcttctcatta

SEQ ID NO: 5177029 - DNA, 25 bp, Homo sapien
taaacattgcccaacatagtactgg

SEQ ID NO: 5177030 - DNA, 25 bp, Homo sapien
ctacaggtcgatcttaggtttgtgt

SEQ ID NO: 5177031 - DNA, 25 bp, Homo sapien
tggaaccatactggcggacagaggt

SEQ ID NO: 5177032 - DNA, 25 bp, Homo sapien
tagatctagaaagtgcttgttccag

SEQ ID NO: 5177033 - DNA, 25 bp, Homo sapien
gaatgtgagacacgctgaacttcat

SEQ ID NO: 5177034 - DNA, 25 bp, Homo sapien
acaccagcctgagggatacaacgct

SEQ ID NO: 5177035 - DNA, 25 bp, Homo sapien
gatacaacgctgtggctctactact

SEQ ID NO: 5177036 - DNA, 25 bp, Homo sapien
cccaaacccgagctagaatgtgaga

SEQ ID NO: 5177037 - DNA, 25 bp, Homo sapien
atgctctgaactggccctcaacaca

SEQ ID NO: 5177038 - DNA, 25 bp, Homo sapien
tacaagcttgcagcatgctctgaac

SEQ ID NO: 5177039 - DNA, 25 bp, Homo sapien
gcttgcagcatgctctgaactggcc

SEQ ID NO: 5177040 - DNA, 25 bp, Homo sapien
tcctctcctacaagcttgcagcatg

SEQ ID NO: 5177041 - DNA, 25 bp, Homo sapien
aagggctatgcagaacttcttgggc

SEQ ID NO: 5177042 - DNA, 25 bp, Homo sapien
tctgtaaacccagaaagggctatgc

SEQ ID NO: 5177043 - DNA, 25 bp, Homo sapien
atgtctttctgtaaacccagaaagg

SEQ ID NO: 5177044 - DNA, 25 bp, Homo sapien
ctttttgaaaacgatcgtggatcca

SEQ ID NO: 5177045 - DNA, 25 bp, Homo sapien
tctctcttagccatggttctatgca

SEQ ID NO: 5177046 - DNA, 25 bp, Homo sapien
aaacacagtttatagagtcctatca

SEQ ID NO: 5177047 - DNA, 25 bp, Homo sapien
aacacagtttatagagtcctatcac

SEQ ID NO: 5177048 - DNA, 25 bp, Homo sapien
ttagccatggttctatgcaattggg

SEQ ID NO: 5177049 - DNA, 25 bp, Homo sapien
ttaatagaccgagtctcaccttgct

SEQ ID NO: 5177050 - DNA, 25 bp, Homo sapien
tttaatagaccgagtctcaccttgc

SEQ ID NO: 5177051 - DNA, 25 bp, Homo sapien
ctaccttgatagcacagtataaaac

SEQ ID NO: 5177052 - DNA, 25 bp, Homo sapien
ttcctaccttgatagcacagtataa

SEQ ID NO: 5177053 - DNA, 25 bp, Homo sapien
cttatcttaaccctcaggacaacct

SEQ ID NO: 5177054 - DNA, 25 bp, Homo sapien
aaatcctgtggcaccaagcctgaaa

SEQ ID NO: 5177055 - DNA, 25 bp, Homo sapien
gaaaccctctcccaagtagagaaga

SEQ ID NO: 5177056 - DNA, 25 bp, Homo sapien
ggatgtgagaagccacaaagggcaa

SEQ ID NO: 5177057 - DNA, 25 bp, Homo sapien
gaagaacattaacactttaggggca

SEQ ID NO: 5177058 - DNA, 25 bp, Homo sapien
gactcaatgttgtctacgaatttat

SEQ ID NO: 5177059 - DNA, 25 bp, Homo sapien
aatgatatgctttccttaagtttgg

SEQ ID NO: 5177060 - DNA, 25 bp, Homo sapien
aaagaaagccttcctactatgttat

SEQ ID NO: 5177061 - DNA, 25 bp, Homo sapien
tgttcttactatatttgactcaatg

SEQ ID NO: 5177062 - DNA, 25 bp, Homo sapien
gtttgtccattcaacatgactccaa

SEQ ID NO: 5177063 - DNA, 25 bp, Homo sapien
attgatcggctttttggcaagtttg

SEQ ID NO: 5177064 - DNA, 25 bp, Homo sapien
tttttggcagattttagtagcttta

SEQ ID NO: 5177065 - DNA, 25 bp, Homo sapien
cattatcaccatttttgttatctat

SEQ ID NO: 5177066 - DNA, 25 bp, Homo sapien
ttaaaatctccctgattacagcttt

SEQ ID NO: 5177067 - DNA, 25 bp, Homo sapien
ttttaaaatctccctgattacagct

SEQ ID NO: 5177068 - DNA, 25 bp, Homo sapien
catatggatacttcatggtggcaga

SEQ ID NO: 5177069 - DNA, 25 bp, Homo sapien
ggcacattatagaagcaggtagcat

SEQ ID NO: 5177070 - DNA, 25 bp, Homo sapien
gaatattcttgggagaatctcgcct

SEQ ID NO: 5177071 - DNA, 25 bp, Homo sapien
cagagttgccagatgctcaggtttt

SEQ ID NO: 5177072 - DNA, 25 bp, Homo sapien
tgtactgtttgagcttcaatgagct

SEQ ID NO: 5177073 - DNA, 25 bp, Homo sapien
ctgtactgtttgagcttcaatgagc

SEQ ID NO: 5177074 - DNA, 25 bp, Homo sapien
tcacgccactgtacgtagccatcat

SEQ ID NO: 5177075 - DNA, 25 bp, Homo sapien
gagccgtgcgtattgccgctcaatc

SEQ ID NO: 5177076 - DNA, 25 bp, Homo sapien
gtattgccgctcaatcacgccactg

SEQ ID NO: 5177077 - DNA, 25 bp, Homo sapien
catgagggtggtttgcatgatttgc

SEQ ID NO: 5177078 - DNA, 25 bp, Homo sapien
ttcaagaaggtggaagacttctgga

SEQ ID NO: 5177079 - DNA, 25 bp, Homo sapien
agaaggtggaagacttctggagaaa

SEQ ID NO: 5177080 - DNA, 25 bp, Homo sapien
tggaagacttctggagaaaagccat

SEQ ID NO: 5177081 - DNA, 25 bp, Homo sapien
ggtggaagacttctggagaaaagcc

SEQ ID NO: 5177082 - DNA, 25 bp, Homo sapien
ttcgtatccgaatgggtcagggagc

SEQ ID NO: 5177083 - DNA, 25 bp, Homo sapien
tctctgcttgggcattcgtatccga

SEQ ID NO: 5177084 - DNA, 25 bp, Homo sapien
gcttgggcattcgtatccgaatggg

SEQ ID NO: 5177085 - DNA, 25 bp, Homo sapien
tgggcattcgtatccgaatgggtca

SEQ ID NO: 5177086 - DNA, 25 bp, Homo sapien
cctgggagatcaaatattgcaaata

SEQ ID NO: 5177087 - DNA, 25 bp, Homo sapien
ataccattttggtggtctgtggaac

SEQ ID NO: 5177088 - DNA, 25 bp, Homo sapien
tggtctgtggaacatgctcccactt

SEQ ID NO: 5177089 - DNA, 25 bp, Homo sapien
tgctgcacctgggagatcaaatatt

SEQ ID NO: 5177090 - DNA, 25 bp, Homo sapien
cctaaagtgctgtgcatgggcacta

SEQ ID NO: 5177091 - DNA, 25 bp, Homo sapien
agtgctgtgcatgggcactaatttg

SEQ ID NO: 5177092 - DNA, 25 bp, Homo sapien
tgaataataagagaagcgtgtatat

SEQ ID NO: 5177093 - DNA, 25 bp, Homo sapien
cacagcttttgtcatcctaaagtgc

SEQ ID NO: 5177094 - DNA, 25 bp, Homo sapien
ctactttggcactacatgaatgcct

SEQ ID NO: 5177095 - DNA, 25 bp, Homo sapien
tgccttgcctgcaactatcagtgtc

SEQ ID NO: 5177096 - DNA, 25 bp, Homo sapien
cagtgtcccatgcagtaataccatc

SEQ ID NO: 5177097 - DNA, 25 bp, Homo sapien
gcactacatgaatgccttgcctgca

SEQ ID NO: 5177098 - DNA, 25 bp, Homo sapien
gacagcacaagttgatcggatttat

SEQ ID NO: 5177099 - DNA, 25 bp, Homo sapien
ttctcccctttctttgacagcacaa

SEQ ID NO: 5177100 - DNA, 25 bp, Homo sapien
gccttcatcaatctctagggtggat

SEQ ID NO: 5177101 - DNA, 25 bp, Homo sapien
cctcagtgtatcctgaatgccttca

SEQ ID NO: 5177102 - DNA, 25 bp, Homo sapien
aagccagtatttagcaatagtagac

SEQ ID NO: 5177103 - DNA, 25 bp, Homo sapien
tctacttgtttgtgtggactgtttg

SEQ ID NO: 5177104 - DNA, 25 bp, Homo sapien
gaagatgtgagtaagaatggacatt

SEQ ID NO: 5177105 - DNA, 25 bp, Homo sapien
agatgtgagtaagaatggacatttg

SEQ ID NO: 5177106 - DNA, 25 bp, Homo sapien
atgtgagtaagaatggacatttgag

SEQ ID NO: 5177107 - DNA, 25 bp, Homo sapien
gatgtgagtaagaatggacatttga

SEQ ID NO: 5177108 - DNA, 25 bp, Homo sapien
gagcagtaggcagagttgggaatgg

SEQ ID NO: 5177109 - DNA, 25 bp, Homo sapien
agcagtaggcagagttgggaatggt

SEQ ID NO: 5177110 - DNA, 25 bp, Homo sapien
ttaaatagctatggctccaggaatg

SEQ ID NO: 5177111 - DNA, 25 bp, Homo sapien
caatccattagtctcagtgctgaag

SEQ ID NO: 5177112 - DNA, 25 bp, Homo sapien
taaaggtgtgaagtgcctagcagac

SEQ ID NO: 5177113 - DNA, 25 bp, Homo sapien
tatcctaagaagcacttggcagagc

SEQ ID NO: 5177114 - DNA, 25 bp, Homo sapien
tgcagagccaagatcctgtgatact

SEQ ID NO: 5177115 - DNA, 25 bp, Homo sapien
gggctgggacctattcttatccata

SEQ ID NO: 5177116 - DNA, 25 bp, Homo sapien
tttagatactgagatctaggctcca

SEQ ID NO: 5177117 - DNA, 25 bp, Homo sapien
tcaccagattgaccctttagatact

SEQ ID NO: 5177118 - DNA, 25 bp, Homo sapien
tggagtagtcagaaccgaaaggacg

SEQ ID NO: 5177119 - DNA, 25 bp, Homo sapien
cagaaggagggatattaagaggcat

SEQ ID NO: 5177120 - DNA, 25 bp, Homo sapien
gccttgccaggagggaatcgaggag

SEQ ID NO: 5177121 - DNA, 25 bp, Homo sapien
cagagcaggtagaggtgtcggcaag

SEQ ID NO: 5177122 - DNA, 25 bp, Homo sapien
ttgctcttctacttgacttggagaa

SEQ ID NO: 5177123 - DNA, 25 bp, Homo sapien
gctccgtaggtgtcatagtgttcca

SEQ ID NO: 5177124 - DNA, 25 bp, Homo sapien
tcttctctgtattggcttagatctg

SEQ ID NO: 5177125 - DNA, 25 bp, Homo sapien
gcttagatctgttgaggctccgtag

SEQ ID NO: 5177126 - DNA, 25 bp, Homo sapien
cctttaccggagtgtaatcttctct

SEQ ID NO: 5177127 - DNA, 25 bp, Homo sapien
tgtacaggattgagtgtgcactgaa

SEQ ID NO: 5177128 - DNA, 25 bp, Homo sapien
ctcttgcaaaattggtaagatggac

SEQ ID NO: 5177129 - DNA, 25 bp, Homo sapien
taagatggactggtactctcgtgat

SEQ ID NO: 5177130 - DNA, 25 bp, Homo sapien
gactggtactctcgtgattttgctt

SEQ ID NO: 5177131 - DNA, 25 bp, Homo sapien
ggtaaatttgggtctgacatgagta

SEQ ID NO: 5177132 - DNA, 25 bp, Homo sapien
ccagaggtaaatttgggtctgacat

SEQ ID NO: 5177133 - DNA, 25 bp, Homo sapien
gctgatgtcagtaatttacggtaac

SEQ ID NO: 5177134 - DNA, 25 bp, Homo sapien
caaagctttgctgatgtcagtaatt

SEQ ID NO: 5177135 - DNA, 25 bp, Homo sapien
ggaagacaccacgagcgtgccgact

SEQ ID NO: 5177136 - DNA, 25 bp, Homo sapien
aagacaacgtgttcctgaaaggaag

SEQ ID NO: 5177137 - DNA, 25 bp, Homo sapien
acgtgttcctgaaaggaagacacca

SEQ ID NO: 5177138 - DNA, 25 bp, Homo sapien
agcgtgccgactccagtgcccagct

SEQ ID NO: 5177139 - DNA, 25 bp, Homo sapien
cccgcagttgccagtttgctccaaa

SEQ ID NO: 5177140 - DNA, 25 bp, Homo sapien
caaacagctgtgctagaatcaggca

SEQ ID NO: 5177141 - DNA, 25 bp, Homo sapien
atgtcccagcactatccccgcagtt

SEQ ID NO: 5177142 - DNA, 25 bp, Homo sapien
gcactatccccgcagttgccagttt

SEQ ID NO: 5177143 - DNA, 25 bp, Homo sapien
tctgcatcattgtttagtgttcttt

SEQ ID NO: 5177144 - DNA, 25 bp, Homo sapien
atcattgtttagtgttctttccaac

SEQ ID NO: 5177145 - DNA, 25 bp, Homo sapien
gcatcattgtttagtgttctttcca

SEQ ID NO: 5177146 - DNA, 25 bp, Homo sapien
tgcatcattgtttagtgttctttcc

SEQ ID NO: 5177147 - DNA, 25 bp, Homo sapien
acatgcttagaaagtgtgagctcat

SEQ ID NO: 5177148 - DNA, 25 bp, Homo sapien
gctcataggtttccggttgaaggta

SEQ ID NO: 5177149 - DNA, 25 bp, Homo sapien
aaacattctgtggaggtctaccact

SEQ ID NO: 5177150 - DNA, 25 bp, Homo sapien
aagtgtgagctcataggtttccggt

SEQ ID NO: 5177151 - DNA, 25 bp, Homo sapien
tgaggaaacactggaacaactgaac

SEQ ID NO: 5177152 - DNA, 25 bp, Homo sapien
tccaaggtcgcaaacaagaaattcc

SEQ ID NO: 5177153 - DNA, 25 bp, Homo sapien
taagcttaggcctgaaataactggg

SEQ ID NO: 5177154 - DNA, 25 bp, Homo sapien
gaagagagatgcgtatcagaatttc

SEQ ID NO: 5177155 - DNA, 25 bp, Homo sapien
ttgaaaatgaccatgctcgaataaa

SEQ ID NO: 5177156 - DNA, 25 bp, Homo sapien
ccatgctcgaataaaaatgtagcca

SEQ ID NO: 5177157 - DNA, 25 bp, Homo sapien
aatgagttctgtacttttagagagt

SEQ ID NO: 5177158 - DNA, 25 bp, Homo sapien
tgtagccaaactaagaatgtagtta

SEQ ID NO: 5177159 - DNA, 25 bp, Homo sapien
aaacactgtattttcgactgaaaat

SEQ ID NO: 5177160 - DNA, 25 bp, Homo sapien
tcgactgaaaattccactttcttca

SEQ ID NO: 5177161 - DNA, 25 bp, Homo sapien
ttgatacgatcttgtgaaaacactg

SEQ ID NO: 5177162 - DNA, 25 bp, Homo sapien
ttgggaacttttgatacgatcttgt

SEQ ID NO: 5177163 - DNA, 25 bp, Homo sapien
gcagcagttccttagtttacatatg

SEQ ID NO: 5177164 - DNA, 25 bp, Homo sapien
ttttgtcagtattacaccaaactgt

SEQ ID NO: 5177165 - DNA, 25 bp, Homo sapien
tagaagaataggcagcagttcctta

SEQ ID NO: 5177166 - DNA, 25 bp, Homo sapien
tgtcagtattacaccaaactgtttt

SEQ ID NO: 5177167 - DNA, 25 bp, Homo sapien
gatcactccatggacgatagttcgg

SEQ ID NO: 5177168 - DNA, 25 bp, Homo sapien
tgttaagctgttcatgcacgtgcct

SEQ ID NO: 5177169 - DNA, 25 bp, Homo sapien
tcagccaagacagatgtagacggag

SEQ ID NO: 5177170 - DNA, 25 bp, Homo sapien
tacggatcccgaaacgatacgagat

SEQ ID NO: 5177171 - DNA, 25 bp, Homo sapien
ggaccacatgtctgtactcaaagca

SEQ ID NO: 5177172 - DNA, 25 bp, Homo sapien
tggaaagaagctccaagccgttagc

SEQ ID NO: 5177173 - DNA, 25 bp, Homo sapien
gcccaactccgatgaactgctgaaa

SEQ ID NO: 5177174 - DNA, 25 bp, Homo sapien
gaaaggaatgacaagccccatcaac

SEQ ID NO: 5177175 - DNA, 25 bp, Homo sapien
ccattgtataccaatggcgctccat

SEQ ID NO: 5177176 - DNA, 25 bp, Homo sapien
aagtgccatccattgtataccaatg

SEQ ID NO: 5177177 - DNA, 25 bp, Homo sapien
aggacgttcttcagtccgataataa

SEQ ID NO: 5177178 - DNA, 25 bp, Homo sapien
tcagtccgataataagtgccatcca

SEQ ID NO: 5177179 - DNA, 25 bp, Homo sapien
tgctttatcgccatggatcctggaa

SEQ ID NO: 5177180 - DNA, 25 bp, Homo sapien
tgtctccctccaatgagcctgtggg

SEQ ID NO: 5177181 - DNA, 25 bp, Homo sapien
tctctagccattccacactagaatg

SEQ ID NO: 5177182 - DNA, 25 bp, Homo sapien
gggtttgggctgctttatcgccatg

SEQ ID NO: 5177183 - DNA, 25 bp, Homo sapien
tgtgcaaacgggaaatgtcttggtc

SEQ ID NO: 5177184 - DNA, 25 bp, Homo sapien
gagagttatcattgtttaccccacc

SEQ ID NO: 5177185 - DNA, 25 bp, Homo sapien
taaaacttccgacaacactgtgcaa

SEQ ID NO: 5177186 - DNA, 25 bp, Homo sapien
aaattcacttatgacggagaatcgc

SEQ ID NO: 5177187 - DNA, 25 bp, Homo sapien
caaatccactgactagacgtgaggg

SEQ ID NO: 5177188 - DNA, 25 bp, Homo sapien
tgcatatcctagttaacacagcgct

SEQ ID NO: 5177189 - DNA, 25 bp, Homo sapien
tcaggaagtgcaaagtccatctcag

SEQ ID NO: 5177190 - DNA, 25 bp, Homo sapien
cacagcgctagaaaagatggcatac

SEQ ID NO: 5177191 - DNA, 25 bp, Homo sapien
tcatcatggccttcctacttgagga

SEQ ID NO: 5177192 - DNA, 25 bp, Homo sapien
tgtctgtgtcacgtctaagctgaag

SEQ ID NO: 5177193 - DNA, 25 bp, Homo sapien
aatttctaagtgaagggccaacaca

SEQ ID NO: 5177194 - DNA, 25 bp, Homo sapien
tggcatgcaacaccatacctgactg

SEQ ID NO: 5177195 - DNA, 25 bp, Homo sapien
cagcctgttgtttaggcctgagcaa

SEQ ID NO: 5177196 - DNA, 25 bp, Homo sapien
tacttgacgcgtgtcgaggctgaga

SEQ ID NO: 5177197 - DNA, 25 bp, Homo sapien
ccatgcatttgttgagagagggaac

SEQ ID NO: 5177198 - DNA, 25 bp, Homo sapien
aggtggtacctcagaacagttgagc

SEQ ID NO: 5177199 - DNA, 25 bp, Homo sapien
ttaggccgccaagcggccagggtca

SEQ ID NO: 5177200 - DNA, 25 bp, Homo sapien
agcggccagggtcagcaaattccac

SEQ ID NO: 5177201 - DNA, 25 bp, Homo sapien
ggccagggtcagcaaattccactac

SEQ ID NO: 5177202 - DNA, 25 bp, Homo sapien
caagcggccagggtcagcaaattcc

SEQ ID NO: 5177203 - DNA, 25 bp, Homo sapien
cttcataaaggattttcagcgtctt

SEQ ID NO: 5177204 - DNA, 25 bp, Homo sapien
tcttcataaaggattttcagcgtct

SEQ ID NO: 5177205 - DNA, 25 bp, Homo sapien
ataaaggattttcagcgtctttgtt

SEQ ID NO: 5177206 - DNA, 25 bp, Homo sapien
tcataaaggattttcagcgtctttg

SEQ ID NO: 5177207 - DNA, 25 bp, Homo sapien
tggcattgccactgcctgcgagtgg

SEQ ID NO: 5177208 - DNA, 25 bp, Homo sapien
gattttacatggtggaacgctgtag

SEQ ID NO: 5177209 - DNA, 25 bp, Homo sapien
gaacgctgtaggactgtgtggagct

SEQ ID NO: 5177210 - DNA, 25 bp, Homo sapien
caaaatgaaggcctgattttacatg

SEQ ID NO: 5177211 - DNA, 25 bp, Homo sapien
tctgacggggtcttactcagccact

SEQ ID NO: 5177212 - DNA, 25 bp, Homo sapien
tgacggggtcttactcagccacttt

SEQ ID NO: 5177213 - DNA, 25 bp, Homo sapien
ctgacggggtcttactcagccactt

SEQ ID NO: 5177214 - DNA, 25 bp, Homo sapien
gacggggtcttactcagccactttc

SEQ ID NO: 5177215 - DNA, 25 bp, Homo sapien
gtccactaaaccagatgaacaagat

SEQ ID NO: 5177216 - DNA, 25 bp, Homo sapien
ctcccaatttcagtgtagttgctct

SEQ ID NO: 5177217 - DNA, 25 bp, Homo sapien
tgcccaggcacagttatgtccacta

SEQ ID NO: 5177218 - DNA, 25 bp, Homo sapien
tcagtgtagttgctcttgaccttgc

SEQ ID NO: 5177219 - DNA, 25 bp, Homo sapien
gggacccagtatgttgcatgcctat

SEQ ID NO: 5177220 - DNA, 25 bp, Homo sapien
tttcggagtgttaaaatctacgagc

SEQ ID NO: 5177221 - DNA, 25 bp, Homo sapien
tgcctatgatgcacagggccaaaag

SEQ ID NO: 5177222 - DNA, 25 bp, Homo sapien
gagtgttaaaatctacgagcctgtt

SEQ ID NO: 5177223 - DNA, 25 bp, Homo sapien
gtttgttagaacatgcgcttaatgc

SEQ ID NO: 5177224 - DNA, 25 bp, Homo sapien
tgtccactcccgctatgaaaatggc

SEQ ID NO: 5177225 - DNA, 25 bp, Homo sapien
cctttccgtactttgcaatcgctca

SEQ ID NO: 5177226 - DNA, 25 bp, Homo sapien
taatgcttttatactccgggagctc

SEQ ID NO: 5177227 - DNA, 25 bp, Homo sapien
tgggcctggcatgtagacaactctg

SEQ ID NO: 5177228 - DNA, 25 bp, Homo sapien
ctgacaatgatgcaatgggcctggc

SEQ ID NO: 5177229 - DNA, 25 bp, Homo sapien
ccattgtgtgatcgtccagggcctg

SEQ ID NO: 5177230 - DNA, 25 bp, Homo sapien
tgtatagaagctagggctgcagcct

SEQ ID NO: 5177231 - DNA, 25 bp, Homo sapien
aaacacatttatcgcctcattaagg

SEQ ID NO: 5177232 - DNA, 25 bp, Homo sapien
aaggtaaacacatttatcgcctcat

SEQ ID NO: 5177233 - DNA, 25 bp, Homo sapien
ggtaaacacatttatcgcctcatta

SEQ ID NO: 5177234 - DNA, 25 bp, Homo sapien
acatttatcgcctcattaaggcttg

SEQ ID NO: 5177235 - DNA, 25 bp, Homo sapien
agctttcagtgcctgtcggtgccag

SEQ ID NO: 5177236 - DNA, 25 bp, Homo sapien
ggttctagcacaaccagtcacagtg

SEQ ID NO: 5177237 - DNA, 25 bp, Homo sapien
catttcggactcatgtaatgtggct

SEQ ID NO: 5177238 - DNA, 25 bp, Homo sapien
tgcattgctgcaacactggtttcat

SEQ ID NO: 5177239 - DNA, 25 bp, Homo sapien
catgagtgagccgaacatgtgtcgc

SEQ ID NO: 5177240 - DNA, 25 bp, Homo sapien
tatgcacccgatgagcttttaaagt

SEQ ID NO: 5177241 - DNA, 25 bp, Homo sapien
catgtgtcgcaatctgtctcaggtg

SEQ ID NO: 5177242 - DNA, 25 bp, Homo sapien
tttgtacaagtaaagtatgcacccg

SEQ ID NO: 5177243 - DNA, 25 bp, Homo sapien
cattgattggtatgctgtggacaca

SEQ ID NO: 5177244 - DNA, 25 bp, Homo sapien
taataagcctaaggtgcctagggtc

SEQ ID NO: 5177245 - DNA, 25 bp, Homo sapien
gcctagggtcttattgagtgttcag

SEQ ID NO: 5177246 - DNA, 25 bp, Homo sapien
gatatatgaagctgggtgggcctct

SEQ ID NO: 5177247 - DNA, 25 bp, Homo sapien
taggctcaactgatggcgcccacat

SEQ ID NO: 5177248 - DNA, 25 bp, Homo sapien
gagtcctcaacgcacggatcactga

SEQ ID NO: 5177249 - DNA, 25 bp, Homo sapien
tctatcgtgtcaatgcgtactcggg

SEQ ID NO: 5177250 - DNA, 25 bp, Homo sapien
tcactgacacggcactacataacgg

SEQ ID NO: 5177251 - DNA, 25 bp, Homo sapien
tcaaggtgtgactaatcaggatgcc

SEQ ID NO: 5177252 - DNA, 25 bp, Homo sapien
aagaggaaacaataaccgtagcctg

SEQ ID NO: 5177253 - DNA, 25 bp, Homo sapien
ccgtagcctgagatattcgttcctt

SEQ ID NO: 5177254 - DNA, 25 bp, Homo sapien
ggaaccctacgatggaggcacttca

SEQ ID NO: 5177255 - DNA, 25 bp, Homo sapien
tgttgaactaaagtggtgtgacggc

SEQ ID NO: 5177256 - DNA, 25 bp, Homo sapien
tatgacaggcattggctgatctgct

SEQ ID NO: 5177257 - DNA, 25 bp, Homo sapien
gtgtgacggcacagttttgttaagc

SEQ ID NO: 5177258 - DNA, 25 bp, Homo sapien
gatgcccattcgacaggcactgttg

SEQ ID NO: 5177259 - DNA, 25 bp, Homo sapien
ggtttgctctcacttaatctgattg

SEQ ID NO: 5177260 - DNA, 25 bp, Homo sapien
gtttgctctcacttaatctgattgg

SEQ ID NO: 5177261 - DNA, 25 bp, Homo sapien
tttgctctcacttaatctgattgga

SEQ ID NO: 5177262 - DNA, 25 bp, Homo sapien
cttttcccgatggtgcaaaatcgac

SEQ ID NO: 5177263 - DNA, 25 bp, Homo sapien
tttccctggaggtatttgcatcaaa

SEQ ID NO: 5177264 - DNA, 25 bp, Homo sapien
tgcatcaaatcagcccagtcaagct

SEQ ID NO: 5177265 - DNA, 25 bp, Homo sapien
ttggcaggccagaaactcacagggt

SEQ ID NO: 5177266 - DNA, 25 bp, Homo sapien
gatggtaaacagtgaacgagatgtg

SEQ ID NO: 5177267 - DNA, 25 bp, Homo sapien
tacacgtgaaaagcccttgtctctt

SEQ ID NO: 5177268 - DNA, 25 bp, Homo sapien
taaacagtgaacgagatgtgcagca

SEQ ID NO: 5177269 - DNA, 25 bp, Homo sapien
gtgcagcagaggtattacacgtgaa

SEQ ID NO: 5177270 - DNA, 25 bp, Homo sapien
ctttcgctcacatcaatgctgacct

SEQ ID NO: 5177271 - DNA, 25 bp, Homo sapien
tgaatgccttaggtatgatttcact

SEQ ID NO: 5177272 - DNA, 25 bp, Homo sapien
tgaatgcctttcatatctgatccgc

SEQ ID NO: 5177273 - DNA, 25 bp, Homo sapien
ttagctgaacccctgacacggcggt

SEQ ID NO: 5177274 - DNA, 25 bp, Homo sapien
taatcagtaggctccatggaagcct

SEQ ID NO: 5177275 - DNA, 25 bp, Homo sapien
tgtgccaaatacttttatcttgtgt

SEQ ID NO: 5177276 - DNA, 25 bp, Homo sapien
aaacgataataatcagtaggctcca

SEQ ID NO: 5177277 - DNA, 25 bp, Homo sapien
cctttgccttaatagctatgtgcca

SEQ ID NO: 5177278 - DNA, 25 bp, Homo sapien
tcagaaatgagcactcggagcggga

SEQ ID NO: 5177279 - DNA, 25 bp, Homo sapien
caagttaacccatagcgggcagtca

SEQ ID NO: 5177280 - DNA, 25 bp, Homo sapien
caaaaagcgagttgcccgcagacaa

SEQ ID NO: 5177281 - DNA, 25 bp, Homo sapien
caggtaccagttctgagggcgctcc

SEQ ID NO: 5177282 - DNA, 25 bp, Homo sapien
tctcggtgcgccaagtaacggtccg

SEQ ID NO: 5177283 - DNA, 25 bp, Homo sapien
cgccaagtaacggtccgcgggcagc

SEQ ID NO: 5177284 - DNA, 25 bp, Homo sapien
gccgcttctcggtgcgccaagtaac

SEQ ID NO: 5177285 - DNA, 25 bp, Homo sapien
gcgcctcagcgaggcttaaagtttc

SEQ ID NO: 5177286 - DNA, 25 bp, Homo sapien
cacaggagacaataggtgtggggcg

SEQ ID NO: 5177287 - DNA, 25 bp, Homo sapien
tacatcttttatagccccctgttta

SEQ ID NO: 5177288 - DNA, 25 bp, Homo sapien
acagtttgcatctgttacatctttt

SEQ ID NO: 5177289 - DNA, 25 bp, Homo sapien
gcgtggggactgagtgtgcccggca

SEQ ID NO: 5177290 - DNA, 25 bp, Homo sapien
tcattcaggtaaccaaaggtgtcct

SEQ ID NO: 5177291 - DNA, 25 bp, Homo sapien
cattcaggtaaccaaaggtgtcctt

SEQ ID NO: 5177292 - DNA, 25 bp, Homo sapien
ctacaaacaagacttcgcaggtagg

SEQ ID NO: 5177293 - DNA, 25 bp, Homo sapien
tggtgtgctcgtcctccatcctcct

SEQ ID NO: 5177294 - DNA, 25 bp, Homo sapien
caaacaagacttcgcaggtaggttt

SEQ ID NO: 5177295 - DNA, 25 bp, Homo sapien
tttatccctttttggtgtgctcgtc

SEQ ID NO: 5177296 - DNA, 25 bp, Homo sapien
agctgtttcttcgcttccacctttt

SEQ ID NO: 5177297 - DNA, 25 bp, Homo sapien
tgtacagtttgctccgggagctgtt

SEQ ID NO: 5177298 - DNA, 25 bp, Homo sapien
cttggcgaggtttttgtacagtttg

SEQ ID NO: 5177299 - DNA, 25 bp, Homo sapien
tcccccacacttcgcggcttcttca

SEQ ID NO: 5177300 - DNA, 25 bp, Homo sapien
aataacggtcctgcctcccgacact

SEQ ID NO: 5177301 - DNA, 25 bp, Homo sapien
ctgctctgcaggaataacggtcctg

SEQ ID NO: 5177302 - DNA, 25 bp, Homo sapien
tgctctgcaggaataacggtcctgc

SEQ ID NO: 5177303 - DNA, 25 bp, Homo sapien
tggagtggccgaaagagatcagttc

SEQ ID NO: 5177304 - DNA, 25 bp, Homo sapien
tgtttcctggagtggccgaaagaga

SEQ ID NO: 5177305 - DNA, 25 bp, Homo sapien
acgtcagtccgtccccaggtttgtg

SEQ ID NO: 5177306 - DNA, 25 bp, Homo sapien
attagaagaggcgtaacacgtcagt

SEQ ID NO: 5177307 - DNA, 25 bp, Homo sapien
acaaagataggtggcgcgtgtttca

SEQ ID NO: 5177308 - DNA, 25 bp, Homo sapien
cccacaaagataggtggcgcgtgtt

SEQ ID NO: 5177309 - DNA, 25 bp, Homo sapien
gctcagggcgcttcaattatccctc

SEQ ID NO: 5177310 - DNA, 25 bp, Homo sapien
taggtggcgcgtgtttcagggtctc

SEQ ID NO: 5177311 - DNA, 25 bp, Homo sapien
gacttcaaggtataatctatcccag

SEQ ID NO: 5177312 - DNA, 25 bp, Homo sapien
cactaaagcgtttgcggagacttca

SEQ ID NO: 5177313 - DNA, 25 bp, Homo sapien
ccagagagaaacttggcgatcacgt

SEQ ID NO: 5177314 - DNA, 25 bp, Homo sapien
acttggcgatcacgttttcacatga

SEQ ID NO: 5177315 - DNA, 25 bp, Homo sapien
gttttccgccctgtactctgtagga

SEQ ID NO: 5177316 - DNA, 25 bp, Homo sapien
taatgatgccaaaggcttgacgggc

SEQ ID NO: 5177317 - DNA, 25 bp, Homo sapien
tgaatggtgtgcaccgttttccgcc

SEQ ID NO: 5177318 - DNA, 25 bp, Homo sapien
gactatctggattgaggacccggga

SEQ ID NO: 5177319 - DNA, 25 bp, Homo sapien
tttttaatattgggatccagtccag

SEQ ID NO: 5177320 - DNA, 25 bp, Homo sapien
tttaatattgggatccagtccagaa

SEQ ID NO: 5177321 - DNA, 25 bp, Homo sapien
tgcagctcccatgcagcattttttt

SEQ ID NO: 5177322 - DNA, 25 bp, Homo sapien
gatgcagctcccatgcagcattttt

SEQ ID NO: 5177323 - DNA, 25 bp, Homo sapien
gaccccatgccgtttaatatcatgc

SEQ ID NO: 5177324 - DNA, 25 bp, Homo sapien
tactttgtagtgaggtctccccgag

SEQ ID NO: 5177325 - DNA, 25 bp, Homo sapien
tccccgaggtgtagagagattcaga

SEQ ID NO: 5177326 - DNA, 25 bp, Homo sapien
taagtttctctatggcctttctcgt

SEQ ID NO: 5177327 - DNA, 25 bp, Homo sapien
ctctgccacgttgggaactctctcg

SEQ ID NO: 5177328 - DNA, 25 bp, Homo sapien
gactgagggagtgttcggaacaaat

SEQ ID NO: 5177329 - DNA, 25 bp, Homo sapien
ttgctgtgtgaggagccgaaagcca

SEQ ID NO: 5177330 - DNA, 25 bp, Homo sapien
ccgaactggccctcggactgaggga

SEQ ID NO: 5177331 - DNA, 25 bp, Homo sapien
ccttagtgagattgacagtcgcgtg

SEQ ID NO: 5177332 - DNA, 25 bp, Homo sapien
gccaggtgacgtgcgagattccaca

SEQ ID NO: 5177333 - DNA, 25 bp, Homo sapien
atcaaatgcagggaccgaagctggc

SEQ ID NO: 5177334 - DNA, 25 bp, Homo sapien
ttagggacggtctgagcttctctgg

SEQ ID NO: 5177335 - DNA, 25 bp, Homo sapien
ccttccaagttgaggcgaaagccac

SEQ ID NO: 5177336 - DNA, 25 bp, Homo sapien
cctggtgaacttgtcgtctctgaga

SEQ ID NO: 5177337 - DNA, 25 bp, Homo sapien
taaagaatgcccctatgccaagcat

SEQ ID NO: 5177338 - DNA, 25 bp, Homo sapien
cacaaaaagaatcacagcgagggag

SEQ ID NO: 5177339 - DNA, 25 bp, Homo sapien
ggctgctccccggataatctgtcta

SEQ ID NO: 5177340 - DNA, 25 bp, Homo sapien
caatatgagcccttgggtactgagg

SEQ ID NO: 5177341 - DNA, 25 bp, Homo sapien
aatatgcctttaccccagcctagaa

SEQ ID NO: 5177342 - DNA, 25 bp, Homo sapien
cagcctagaagggttataacacatc

SEQ ID NO: 5177343 - DNA, 25 bp, Homo sapien
tattaatagcgcttgttgccaacag

SEQ ID NO: 5177344 - DNA, 25 bp, Homo sapien
cgacatactcattgtatctgctgtg

SEQ ID NO: 5177345 - DNA, 25 bp, Homo sapien
agatgtcagggaccctaaagcccct

SEQ ID NO: 5177346 - DNA, 25 bp, Homo sapien
ttgggcataacagaaccaggatacg

SEQ ID NO: 5177347 - DNA, 25 bp, Homo sapien
cataggcatgtatgctatttagttc

SEQ ID NO: 5177348 - DNA, 25 bp, Homo sapien
ggtaaacaatgatcttatgtctatt

SEQ ID NO: 5177349 - DNA, 25 bp, Homo sapien
tccatttcgaaacacccccaatcca

SEQ ID NO: 5177350 - DNA, 25 bp, Homo sapien
acccccaatccattacacagtaaga

SEQ ID NO: 5177351 - DNA, 25 bp, Homo sapien
caacgaaagagtctgttgtctccat

SEQ ID NO: 5177352 - DNA, 25 bp, Homo sapien
cagctgtgttattaaaatttggccg

SEQ ID NO: 5177353 - DNA, 25 bp, Homo sapien
atttggccgtaaatttgagtcaacg

SEQ ID NO: 5177354 - DNA, 25 bp, Homo sapien
ggacagctgtgttattaaaatttgg

SEQ ID NO: 5177355 - DNA, 25 bp, Homo sapien
tacatatagtgtttcaaagtaataa

SEQ ID NO: 5177356 - DNA, 25 bp, Homo sapien
agacagccaagacttcaatcatatt

SEQ ID NO: 5177357 - DNA, 25 bp, Homo sapien
ttaacatattcctggggtttacata

SEQ ID NO: 5177358 - DNA, 25 bp, Homo sapien
taaagacagccaagacttcaatcat

SEQ ID NO: 5177359 - DNA, 25 bp, Homo sapien
gattggttaacaagcactacatatt

SEQ ID NO: 5177360 - DNA, 25 bp, Homo sapien
tctagattggttaacaagcactaca

SEQ ID NO: 5177361 - DNA, 25 bp, Homo sapien
ggttaacaagcactacatatttaag

SEQ ID NO: 5177362 - DNA, 25 bp, Homo sapien
tagattggttaacaagcactacata

SEQ ID NO: 5177363 - DNA, 25 bp, Homo sapien
ctacatatagcaacatccacaaagg

SEQ ID NO: 5177364 - DNA, 25 bp, Homo sapien
catggtcattgactgccagcagcag

SEQ ID NO: 5177365 - DNA, 25 bp, Homo sapien
tcacgggcaccagtgcataactcac

SEQ ID NO: 5177366 - DNA, 25 bp, Homo sapien
gtgtggtcatcaggcaacgagctta

SEQ ID NO: 5177367 - DNA, 25 bp, Homo sapien
attctctggtttgattgaagagctt

SEQ ID NO: 5177368 - DNA, 25 bp, Homo sapien
tctattacagattgaggaatgatcc

SEQ ID NO: 5177369 - DNA, 25 bp, Homo sapien
ggaatgatccatttcacatctgaag

SEQ ID NO: 5177370 - DNA, 25 bp, Homo sapien
agctccaaagagctacttgtgagga

SEQ ID NO: 5177371 - DNA, 25 bp, Homo sapien
tcaattgtagccaacagtctcttca

SEQ ID NO: 5177372 - DNA, 25 bp, Homo sapien
aaactcgtcttgagacctatgctgc

SEQ ID NO: 5177373 - DNA, 25 bp, Homo sapien
cactcttatcgataaagacaaactc

SEQ ID NO: 5177374 - DNA, 25 bp, Homo sapien
cacaaatactcttcactcttatcga

SEQ ID NO: 5177375 - DNA, 25 bp, Homo sapien
gggaacagcgatgaccagatacctc

SEQ ID NO: 5177376 - DNA, 25 bp, Homo sapien
taagtaacaaatgccgaatttaatc

SEQ ID NO: 5177377 - DNA, 25 bp, Homo sapien
aacaaatgccgaatttaatcttgaa

SEQ ID NO: 5177378 - DNA, 25 bp, Homo sapien
ctgtcaagagttttgcatgccttct

SEQ ID NO: 5177379 - DNA, 25 bp, Homo sapien
ataccactcttaggtgttggaaact

SEQ ID NO: 5177380 - DNA, 25 bp, Homo sapien
ttgggagggtttccatccgtgcaca

SEQ ID NO: 5177381 - DNA, 25 bp, Homo sapien
tgggagggtttccatccgtgcacag

SEQ ID NO: 5177382 - DNA, 25 bp, Homo sapien
gcacagatgcacttgaaaatcaaat

SEQ ID NO: 5177383 - DNA, 25 bp, Homo sapien
ccatccgtgcacagatgcacttgaa

SEQ ID NO: 5177384 - DNA, 25 bp, Homo sapien
tttgcaacctcgaaacaagcttcta

SEQ ID NO: 5177385 - DNA, 25 bp, Homo sapien
catgaaagcttgattcaaagacaga

SEQ ID NO: 5177386 - DNA, 25 bp, Homo sapien
gaggccaggctctcatgaaagcttg

SEQ ID NO: 5177387 - DNA, 25 bp, Homo sapien
tgggttctgcaattgtgtagcagca

SEQ ID NO: 5177388 - DNA, 25 bp, Homo sapien
tttgatgagaaaagctagtgacact

SEQ ID NO: 5177389 - DNA, 25 bp, Homo sapien
ctggtttgatgagaaaagctagtga

SEQ ID NO: 5177390 - DNA, 25 bp, Homo sapien
gatgagaaaagctagtgacacttgc

SEQ ID NO: 5177391 - DNA, 25 bp, Homo sapien
tgagaaaagctagtgacacttgctg

SEQ ID NO: 5177392 - DNA, 25 bp, Homo sapien
attagtttcacctagctgcctcttt

SEQ ID NO: 5177393 - DNA, 25 bp, Homo sapien
gcattagtttcacctagctgcctct

SEQ ID NO: 5177394 - DNA, 25 bp, Homo sapien
tggcattagtttcacctagctgcct

SEQ ID NO: 5177395 - DNA, 25 bp, Homo sapien
cattagtttcacctagctgcctctt

SEQ ID NO: 5177396 - DNA, 25 bp, Homo sapien
tcccattaggcttaaagtacaccag

SEQ ID NO: 5177397 - DNA, 25 bp, Homo sapien
ccagcttatgctcattctctaggag

SEQ ID NO: 5177398 - DNA, 25 bp, Homo sapien
gagccttacatctggttctgaataa

SEQ ID NO: 5177399 - DNA, 25 bp, Homo sapien
ggctgcctctcatttgcaaggtaca

SEQ ID NO: 5177400 - DNA, 25 bp, Homo sapien
cattcaacgttgtgctgagttcatc

SEQ ID NO: 5177401 - DNA, 25 bp, Homo sapien
tgccaaaaagctcccattcaacgtt

SEQ ID NO: 5177402 - DNA, 25 bp, Homo sapien
catcaatgctccacgtgtcaggatc

SEQ ID NO: 5177403 - DNA, 25 bp, Homo sapien
tgagttcatcaatgctccacgtgtc

SEQ ID NO: 5177404 - DNA, 25 bp, Homo sapien
agagtagctctttgctggcagtttc

SEQ ID NO: 5177405 - DNA, 25 bp, Homo sapien
catctcggaaacctgctaaactcag

SEQ ID NO: 5177406 - DNA, 25 bp, Homo sapien
gctttgacagcccatgtttagggca

SEQ ID NO: 5177407 - DNA, 25 bp, Homo sapien
tctgcatcgcttttgtgaatacagg

SEQ ID NO: 5177408 - DNA, 25 bp, Homo sapien
ctggtatgaagtggttcttcacttg

SEQ ID NO: 5177409 - DNA, 25 bp, Homo sapien
cagcatcaccgctggtatgaagtgg

SEQ ID NO: 5177410 - DNA, 25 bp, Homo sapien
tatgaagtggttcttcacttgtgtt

SEQ ID NO: 5177411 - DNA, 25 bp, Homo sapien
ttcaggaccacagcatcaccgctgg

SEQ ID NO: 5177412 - DNA, 25 bp, Homo sapien
gataccacgagccttacaatccttg

SEQ ID NO: 5177413 - DNA, 25 bp, Homo sapien
agtgctctttgcaaggctcgccagc

SEQ ID NO: 5177414 - DNA, 25 bp, Homo sapien
gttctcccaggattaagtgctcttt

SEQ ID NO: 5177415 - DNA, 25 bp, Homo sapien
tcctttccattgcagtgtgaaagag

SEQ ID NO: 5177416 - DNA, 25 bp, Homo sapien
ggaaagaggctaccactgcatgagt

SEQ ID NO: 5177417 - DNA, 25 bp, Homo sapien
tgtagtacactaagatcattcctgt

SEQ ID NO: 5177418 - DNA, 25 bp, Homo sapien
gaataaagtaacctgtccgctgcca

SEQ ID NO: 5177419 - DNA, 25 bp, Homo sapien
tatgtgcaaggaaatcaaggttcag

SEQ ID NO: 5177420 - DNA, 25 bp, Homo sapien
aaaaatggtgcatcaccctggggag

SEQ ID NO: 5177421 - DNA, 25 bp, Homo sapien
aatggtgcatcaccctggggagaat

SEQ ID NO: 5177422 - DNA, 25 bp, Homo sapien
gggactgtaagtgggctctccccta

SEQ ID NO: 5177423 - DNA, 25 bp, Homo sapien
taagtgggctctcccctaggttctg

SEQ ID NO: 5177424 - DNA, 25 bp, Homo sapien
ggttctgctacacgaattcctgtag

SEQ ID NO: 5177425 - DNA, 25 bp, Homo sapien
cctgtagctatgctggcctggagct

SEQ ID NO: 5177426 - DNA, 25 bp, Homo sapien
gatgttctggccctgaaatatgaag

SEQ ID NO: 5177427 - DNA, 25 bp, Homo sapien
tgttctggccctgaaatatgaagct

SEQ ID NO: 5177428 - DNA, 25 bp, Homo sapien
caagatgcaggataaatggcttgag

SEQ ID NO: 5177429 - DNA, 25 bp, Homo sapien
gggatgacaagatgcaggataaatg

SEQ ID NO: 5177430 - DNA, 25 bp, Homo sapien
ttcagttttggtcctagaaatatgt

SEQ ID NO: 5177431 - DNA, 25 bp, Homo sapien
gctttcagttttggtcctagaaata

SEQ ID NO: 5177432 - DNA, 25 bp, Homo sapien
agttttggtcctagaaatatgtctg

SEQ ID NO: 5177433 - DNA, 25 bp, Homo sapien
ctgctttcagttttggtcctagaaa

SEQ ID NO: 5177434 - DNA, 25 bp, Homo sapien
aatgacaaagcagataccaccactg

SEQ ID NO: 5177435 - DNA, 25 bp, Homo sapien
gaagattgacaaaatagacagactg

SEQ ID NO: 5177436 - DNA, 25 bp, Homo sapien
tgacaaagcagataccaccactgat

SEQ ID NO: 5177437 - DNA, 25 bp, Homo sapien
tgaagattgacaaaatagacagact

SEQ ID NO: 5177438 - DNA, 25 bp, Homo sapien
tgtgatgtagcgtgtagctggtact

SEQ ID NO: 5177439 - DNA, 25 bp, Homo sapien
tgcacacacgcatcttgcgtgggaa

SEQ ID NO: 5177440 - DNA, 25 bp, Homo sapien
cacgcatcttgcgtgggaaaggcca

SEQ ID NO: 5177441 - DNA, 25 bp, Homo sapien
gtgtagctggtactccctctgtcaa

SEQ ID NO: 5177442 - DNA, 25 bp, Homo sapien
taaagaatgccagcattggcagctc

SEQ ID NO: 5177443 - DNA, 25 bp, Homo sapien
ccagcattggcagctctgtgcccac

SEQ ID NO: 5177444 - DNA, 25 bp, Homo sapien
ctaaagaatgccagcattggcagct

SEQ ID NO: 5177445 - DNA, 25 bp, Homo sapien
atgccagcattggcagctctgtgcc

SEQ ID NO: 5177446 - DNA, 25 bp, Homo sapien
gtctcaggttgccacgttactagca

SEQ ID NO: 5177447 - DNA, 25 bp, Homo sapien
agcagtgccgtgtaagaaccaggac

SEQ ID NO: 5177448 - DNA, 25 bp, Homo sapien
gccacgttactagcagtgccgtgta

SEQ ID NO: 5177449 - DNA, 25 bp, Homo sapien
actagcagtgccgtgtaagaaccag

SEQ ID NO: 5177450 - DNA, 25 bp, Homo sapien
caacaatcgatacagcttttcttcc

SEQ ID NO: 5177451 - DNA, 25 bp, Homo sapien
gatgaaatttaaacaagtcgccaga

SEQ ID NO: 5177452 - DNA, 25 bp, Homo sapien
ctgagagttcatagaagtgaggctg

SEQ ID NO: 5177453 - DNA, 25 bp, Homo sapien
gaaatgggccacaggtgaatggcat

SEQ ID NO: 5177454 - DNA, 25 bp, Homo sapien
acctgctcactctgtagaatgtcag

SEQ ID NO: 5177455 - DNA, 25 bp, Homo sapien
ttgccggttggccatggtccctgtg

SEQ ID NO: 5177456 - DNA, 25 bp, Homo sapien
ctaaaattgccggttggccatggtc

SEQ ID NO: 5177457 - DNA, 25 bp, Homo sapien
gaggagcaacaagggccatggtagc

SEQ ID NO: 5177458 - DNA, 25 bp, Homo sapien
ccctgtgagcagatggaggagcaac

SEQ ID NO: 5177459 - DNA, 25 bp, Homo sapien
tggagaatagggcatgacaagcaac

SEQ ID NO: 5177460 - DNA, 25 bp, Homo sapien
tatgactggtaggtcaagtgtcccc

SEQ ID NO: 5177461 - DNA, 25 bp, Homo sapien
gtaatccagcaatcggactccttgg

SEQ ID NO: 5177462 - DNA, 25 bp, Homo sapien
agtgtccccaaaaagagtgcctggg

SEQ ID NO: 5177463 - DNA, 25 bp, Homo sapien
ggtttctcagagaggtaccaattag

SEQ ID NO: 5177464 - DNA, 25 bp, Homo sapien
cttccctgcagtaaaatccttaaga

SEQ ID NO: 5177465 - DNA, 25 bp, Homo sapien
tgcagtaaaatccttaagaggtttc

SEQ ID NO: 5177466 - DNA, 25 bp, Homo sapien
tctcagagaggtaccaattaggctt

SEQ ID NO: 5177467 - DNA, 25 bp, Homo sapien
acatatgcattgtagctgcttcctt

SEQ ID NO: 5177468 - DNA, 25 bp, Homo sapien
tcaatgaacgaggtacgtaagtcta

SEQ ID NO: 5177469 - DNA, 25 bp, Homo sapien
tccttatttacgacaatcttctgat

SEQ ID NO: 5177470 - DNA, 25 bp, Homo sapien
tctattacatgcacgagacatatgc

SEQ ID NO: 5177471 - DNA, 25 bp, Homo sapien
ctgctctttgtaagtcacccaacga

SEQ ID NO: 5177472 - DNA, 25 bp, Homo sapien
tctttgtaagtcacccaacgatttg

SEQ ID NO: 5177473 - DNA, 25 bp, Homo sapien
taagtcacccaacgatttgcaaaaa

SEQ ID NO: 5177474 - DNA, 25 bp, Homo sapien
ttgtaagtcacccaacgatttgcaa

SEQ ID NO: 5177475 - DNA, 25 bp, Homo sapien
gtctcaactcgatgtgactctgttg

SEQ ID NO: 5177476 - DNA, 25 bp, Homo sapien
ccttggagaagtctcaactcgatgt

SEQ ID NO: 5177477 - DNA, 25 bp, Homo sapien
atgtcaaccccatggcccttggaga

SEQ ID NO: 5177478 - DNA, 25 bp, Homo sapien
aatacagatgtcaaccccatggccc

SEQ ID NO: 5177479 - DNA, 25 bp, Homo sapien
tttttacacagctcaggaggagcag

SEQ ID NO: 5177480 - DNA, 25 bp, Homo sapien
ggaggagcagcaagttcagtttccc

SEQ ID NO: 5177481 - DNA, 25 bp, Homo sapien
taactgctcaagcagctgtggtttt

SEQ ID NO: 5177482 - DNA, 25 bp, Homo sapien
ttttctgcttttttacacagctcag

SEQ ID NO: 5177483 - DNA, 25 bp, Homo sapien
tgatctaactctgcactctccaagc

SEQ ID NO: 5177484 - DNA, 25 bp, Homo sapien
caggctgtaccagtctgccaggatc

SEQ ID NO: 5177485 - DNA, 25 bp, Homo sapien
cacagagacatgagccatgcttctc

SEQ ID NO: 5177486 - DNA, 25 bp, Homo sapien
tctccaagcatgcaaaaatatagcc

SEQ ID NO: 5177487 - DNA, 25 bp, Homo sapien
gaaatctgccaggtgtctcgacata

SEQ ID NO: 5177488 - DNA, 25 bp, Homo sapien
tccactggagtagttacaagtgtct

SEQ ID NO: 5177489 - DNA, 25 bp, Homo sapien
tggttaagtcagcacatctctatct

SEQ ID NO: 5177490 - DNA, 25 bp, Homo sapien
tttaccaagcagaaaccgtagcgta

SEQ ID NO: 5177491 - DNA, 25 bp, Homo sapien
tctggcatccttcctatgtctcctg

SEQ ID NO: 5177492 - DNA, 25 bp, Homo sapien
gcccactcagaatgttaaagacata

SEQ ID NO: 5177493 - DNA, 25 bp, Homo sapien
gacataagcttgttcctggatgagg

SEQ ID NO: 5177494 - DNA, 25 bp, Homo sapien
acagtggtaggagttggtaatcagc

SEQ ID NO: 5177495 - DNA, 25 bp, Homo sapien
gactctctacaaagatgtgggcagg

SEQ ID NO: 5177496 - DNA, 25 bp, Homo sapien
gatgtaccaggtgggtcacggtcct

SEQ ID NO: 5177497 - DNA, 25 bp, Homo sapien
cctgaaatgaatgccctgaggcgat

SEQ ID NO: 5177498 - DNA, 25 bp, Homo sapien
gatggaacgtcccaaggcaaaggag

SEQ ID NO: 5177499 - DNA, 25 bp, Homo sapien
taccagaaatgaagtacggtattta

SEQ ID NO: 5177500 - DNA, 25 bp, Homo sapien
gaagtacggtatttagtcaactgta

SEQ ID NO: 5177501 - DNA, 25 bp, Homo sapien
aaatcacagcactctatagcactct

SEQ ID NO: 5177502 - DNA, 25 bp, Homo sapien
agcactctcagttgggtaaagtttg

SEQ ID NO: 5177503 - DNA, 25 bp, Homo sapien
gccatgtgcttctgatatgtgctca

SEQ ID NO: 5177504 - DNA, 25 bp, Homo sapien
tttgatcagatctaccaccaccaca

SEQ ID NO: 5177505 - DNA, 25 bp, Homo sapien
aaacctttgatcagatctaccacca

SEQ ID NO: 5177506 - DNA, 25 bp, Homo sapien
cacacttcttcatcgccatgtgctt

SEQ ID NO: 5177507 - DNA, 25 bp, Homo sapien
gatgatcaataatctttctttcacc

SEQ ID NO: 5177508 - DNA, 25 bp, Homo sapien
tccctgtttgtgactgatagagcca

SEQ ID NO: 5177509 - DNA, 25 bp, Homo sapien
tataattagcaacagaatcagctgg

SEQ ID NO: 5177510 - DNA, 25 bp, Homo sapien
tactgtatagctaaggcttcttgcc

SEQ ID NO: 5177511 - DNA, 25 bp, Homo sapien
gtgttctgagtggtaaagattgctg

SEQ ID NO: 5177512 - DNA, 25 bp, Homo sapien
ctgtgttctgagtggtaaagattgc

SEQ ID NO: 5177513 - DNA, 25 bp, Homo sapien
tgttctgagtggtaaagattgctgg

SEQ ID NO: 5177514 - DNA, 25 bp, Homo sapien
tgtgttctgagtggtaaagattgct

SEQ ID NO: 5177515 - DNA, 25 bp, Homo sapien
tccatgagggaatcttccatcacag

SEQ ID NO: 5177516 - DNA, 25 bp, Homo sapien
taaattacgctcatcaagtccagag

SEQ ID NO: 5177517 - DNA, 25 bp, Homo sapien
tccatcacagagtcccagtagtgct

SEQ ID NO: 5177518 - DNA, 25 bp, Homo sapien
cagtagtgctactgagagttgaaca

SEQ ID NO: 5177519 - DNA, 25 bp, Homo sapien
ctgaggtaacaaagatactgttata

SEQ ID NO: 5177520 - DNA, 25 bp, Homo sapien
cctgaggtaacaaagatactgttat

SEQ ID NO: 5177521 - DNA, 25 bp, Homo sapien
tcctgaggtaacaaagatactgtta

SEQ ID NO: 5177522 - DNA, 25 bp, Homo sapien
tcataatcctgaggtaacaaagata

SEQ ID NO: 5177523 - DNA, 25 bp, Homo sapien
ggatcaccatttggcagggtgccat

SEQ ID NO: 5177524 - DNA, 25 bp, Homo sapien
gcagggtgccattccgtaaactgct

SEQ ID NO: 5177525 - DNA, 25 bp, Homo sapien
gccattccgtaaactgctcagtaga

SEQ ID NO: 5177526 - DNA, 25 bp, Homo sapien
aatggatcaccatttggcagggtgc

SEQ ID NO: 5177527 - DNA, 25 bp, Homo sapien
ctttatttgaaaagtcactcatttc

SEQ ID NO: 5177528 - DNA, 25 bp, Homo sapien
ccttctgtttatggcaacaccaact

SEQ ID NO: 5177529 - DNA, 25 bp, Homo sapien
tggcaacaccaactactttatttga

SEQ ID NO: 5177530 - DNA, 25 bp, Homo sapien
gtttatggcaacaccaactacttta

SEQ ID NO: 5177531 - DNA, 25 bp, Homo sapien
gcaaactcagagctagcatcccctt

SEQ ID NO: 5177532 - DNA, 25 bp, Homo sapien
catttagctcctgcacaaatgcagc

SEQ ID NO: 5177533 - DNA, 25 bp, Homo sapien
catttcaaggacttctcaggaagcc

SEQ ID NO: 5177534 - DNA, 25 bp, Homo sapien
gctgcacagtactgtgcaaactcag

SEQ ID NO: 5177535 - DNA, 25 bp, Homo sapien
gatagcaatacatctgtctggttac

SEQ ID NO: 5177536 - DNA, 25 bp, Homo sapien
ggctagtttcaatggatagcaatac

SEQ ID NO: 5177537 - DNA, 25 bp, Homo sapien
aatggatagcaatacatctgtctgg

SEQ ID NO: 5177538 - DNA, 25 bp, Homo sapien
gtttcaatggatagcaatacatctg

SEQ ID NO: 5177539 - DNA, 25 bp, Homo sapien
catcccatctgtggatatgcttgat

SEQ ID NO: 5177540 - DNA, 25 bp, Homo sapien
ccttgccaatgaggtagggattttg

SEQ ID NO: 5177541 - DNA, 25 bp, Homo sapien
gctaaaattgtcttaggcgcagcca

SEQ ID NO: 5177542 - DNA, 25 bp, Homo sapien
tatcgtctgtatattgggcactaac

SEQ ID NO: 5177543 - DNA, 25 bp, Homo sapien
catagcttttgtgatttgtcaggaa

SEQ ID NO: 5177544 - DNA, 25 bp, Homo sapien
ttgtataacttacccaccaagctag

SEQ ID NO: 5177545 - DNA, 25 bp, Homo sapien
aactttgtagtgaatgcccggagcc

SEQ ID NO: 5177546 - DNA, 25 bp, Homo sapien
gagcccctgaagtgctaccacagga

SEQ ID NO: 5177547 - DNA, 25 bp, Homo sapien
ggtaattggtatatgacctcaaaca

SEQ ID NO: 5177548 - DNA, 25 bp, Homo sapien
catatgaatgggaacatgcaatgtt

SEQ ID NO: 5177549 - DNA, 25 bp, Homo sapien
tagttgccctattatgccactaaac

SEQ ID NO: 5177550 - DNA, 25 bp, Homo sapien
tgttgatgaacacatatcgattcca

SEQ ID NO: 5177551 - DNA, 25 bp, Homo sapien
tgcacgggagcctcctaatatgctc

SEQ ID NO: 5177552 - DNA, 25 bp, Homo sapien
gcacgggagcctcctaatatgctct

SEQ ID NO: 5177553 - DNA, 25 bp, Homo sapien
cacgggagcctcctaatatgctctt

SEQ ID NO: 5177554 - DNA, 25 bp, Homo sapien
gcctcagaactcataataataagtg

SEQ ID NO: 5177555 - DNA, 25 bp, Homo sapien
caaaatagtgcaatagaggaaacag

SEQ ID NO: 5177556 - DNA, 25 bp, Homo sapien
gggcctttagatttaatgcctcaga

SEQ ID NO: 5177557 - DNA, 25 bp, Homo sapien
tctgggccagcaaaatgattacagt

SEQ ID NO: 5177558 - DNA, 25 bp, Homo sapien
tgagtggagcgattaccattacccg

SEQ ID NO: 5177559 - DNA, 25 bp, Homo sapien
tctaagtgagtggagcgattaccat

SEQ ID NO: 5177560 - DNA, 25 bp, Homo sapien
ccattacccgtggaagccagagttc

SEQ ID NO: 5177561 - DNA, 25 bp, Homo sapien
cgattaccattacccgtggaagcca

SEQ ID NO: 5177562 - DNA, 25 bp, Homo sapien
cagatatccttctattaatctcttc

SEQ ID NO: 5177563 - DNA, 25 bp, Homo sapien
ggatcctcacatctattcagatatc

SEQ ID NO: 5177564 - DNA, 25 bp, Homo sapien
tcctcacatctattcagatatcctt

SEQ ID NO: 5177565 - DNA, 25 bp, Homo sapien
tcagatatccttctattaatctctt

SEQ ID NO: 5177566 - DNA, 25 bp, Homo sapien
gcactgtccctgctgacgttttagt

SEQ ID NO: 5177567 - DNA, 25 bp, Homo sapien
cactgtccctgctgacgttttagtc

SEQ ID NO: 5177568 - DNA, 25 bp, Homo sapien
ttagcactgtccctgctgacgtttt

SEQ ID NO: 5177569 - DNA, 25 bp, Homo sapien
agcactgtccctgctgacgttttag

SEQ ID NO: 5177570 - DNA, 25 bp, Homo sapien
ctttggtccacttggcagaggtttg

SEQ ID NO: 5177571 - DNA, 25 bp, Homo sapien
atattgactaattgaaaactgatgg

SEQ ID NO: 5177572 - DNA, 25 bp, Homo sapien
ggtccacttggcagaggtttgcata

SEQ ID NO: 5177573 - DNA, 25 bp, Homo sapien
cagaggtttgcatattgactaattg

SEQ ID NO: 5177574 - DNA, 25 bp, Homo sapien
tgtttttatgagtcacacggtgtgc

SEQ ID NO: 5177575 - DNA, 25 bp, Homo sapien
gctataagataggagttcaggctgg

SEQ ID NO: 5177576 - DNA, 25 bp, Homo sapien
tagccagaccatgcacttaaggatc

SEQ ID NO: 5177577 - DNA, 25 bp, Homo sapien
taacggagctaagaaagacgcatca

SEQ ID NO: 5177578 - DNA, 25 bp, Homo sapien
tggatgatgtgaatgttccaacttg

SEQ ID NO: 5177579 - DNA, 25 bp, Homo sapien
gatgatgtgaatgttccaacttgtt

SEQ ID NO: 5177580 - DNA, 25 bp, Homo sapien
ggatgatgtgaatgttccaacttgt

SEQ ID NO: 5177581 - DNA, 25 bp, Homo sapien
cattatttaggcccagaagagctat

SEQ ID NO: 5177582 - DNA, 25 bp, Homo sapien
tatttaggcccagaagagctatgga

SEQ ID NO: 5177583 - DNA, 25 bp, Homo sapien
ttatttaggcccagaagagctatgg

SEQ ID NO: 5177584 - DNA, 25 bp, Homo sapien
gacattatttaggcccagaagagct

SEQ ID NO: 5177585 - DNA, 25 bp, Homo sapien
taggtggaggtcacatccttctctc

SEQ ID NO: 5177586 - DNA, 25 bp, Homo sapien
cttgtgtctcggagaatataggtgg

SEQ ID NO: 5177587 - DNA, 25 bp, Homo sapien
gagaatataggtggaggtcacatcc

SEQ ID NO: 5177588 - DNA, 25 bp, Homo sapien
aatataggtggaggtcacatccttc

SEQ ID NO: 5177589 - DNA, 25 bp, Homo sapien
gctgatgcttctttagggtcaacca

SEQ ID NO: 5177590 - DNA, 25 bp, Homo sapien
cattttgaagtgtgaccattctgcc

SEQ ID NO: 5177591 - DNA, 25 bp, Homo sapien
ttctttggtgcaaagccaagctgat

SEQ ID NO: 5177592 - DNA, 25 bp, Homo sapien
gagcacatagtaagtctcctgaaac

SEQ ID NO: 5177593 - DNA, 25 bp, Homo sapien
aaataggtcatagaaccttcacagg

SEQ ID NO: 5177594 - DNA, 25 bp, Homo sapien
tcatagaaccttcacaggaacatca

SEQ ID NO: 5177595 - DNA, 25 bp, Homo sapien
tatcaaaataggtcatagaaccttc

SEQ ID NO: 5177596 - DNA, 25 bp, Homo sapien
cactgtctacatatcaaaataggtc

SEQ ID NO: 5177597 - DNA, 25 bp, Homo sapien
ccattgcccaggcttgcttaggtaa

SEQ ID NO: 5177598 - DNA, 25 bp, Homo sapien
ggcgcccgccattgcccaggcttgc

SEQ ID NO: 5177599 - DNA, 25 bp, Homo sapien
ccgccattgcccaggcttgcttagg

SEQ ID NO: 5177600 - DNA, 25 bp, Homo sapien
cgcccacggagtctcactaattgct

SEQ ID NO: 5177601 - DNA, 25 bp, Homo sapien
ccttgcaggccattacaaaaatgtt

SEQ ID NO: 5177602 - DNA, 25 bp, Homo sapien
gctgagttgcaggaggtagatctcg

SEQ ID NO: 5177603 - DNA, 25 bp, Homo sapien
caggaggtagatctcggaaggcctt

SEQ ID NO: 5177604 - DNA, 25 bp, Homo sapien
gtgttgctgaggcagagtgagtcca

SEQ ID NO: 5177605 - DNA, 25 bp, Homo sapien
gagaaagaatgtccttgggaacaat

SEQ ID NO: 5177606 - DNA, 25 bp, Homo sapien
tggagaaagaatgtccttgggaaca

SEQ ID NO: 5177607 - DNA, 25 bp, Homo sapien
gcttggagaaagaatgtccttggga

SEQ ID NO: 5177608 - DNA, 25 bp, Homo sapien
aagaatgtccttgggaacaataata

SEQ ID NO: 5177609 - DNA, 25 bp, Homo sapien
tgaaccacgatgtcttccaccacgt

SEQ ID NO: 5177610 - DNA, 25 bp, Homo sapien
cagaagtttagctggcaccaaaaag

SEQ ID NO: 5177611 - DNA, 25 bp, Homo sapien
gggaattttcattgcacagccagac

SEQ ID NO: 5177612 - DNA, 25 bp, Homo sapien
cagcagaataccacaagcttgcaga

SEQ ID NO: 5177613 - DNA, 25 bp, Homo sapien
aatgcctgtaggcagatagtcacca

SEQ ID NO: 5177614 - DNA, 25 bp, Homo sapien
caaagatgactctgacgaacagctt

SEQ ID NO: 5177615 - DNA, 25 bp, Homo sapien
ggcagatagtcaccaaagatgactc

SEQ ID NO: 5177616 - DNA, 25 bp, Homo sapien
agcactgagggctacacccagagtg

SEQ ID NO: 5177617 - DNA, 25 bp, Homo sapien
ttgtttgacacaatgtcaaactcag

SEQ ID NO: 5177618 - DNA, 25 bp, Homo sapien
gagaatccgagaggaagttctcctc

SEQ ID NO: 5177619 - DNA, 25 bp, Homo sapien
gaaaacagagagaatccgagaggaa

SEQ ID NO: 5177620 - DNA, 25 bp, Homo sapien
ggaatgtcattttcacgaaagaaaa

SEQ ID NO: 5177621 - DNA, 25 bp, Homo sapien
ggttacaatcttgaaatcagcctga

SEQ ID NO: 5177622 - DNA, 25 bp, Homo sapien
gcaagactccgggtacaggaagata

SEQ ID NO: 5177623 - DNA, 25 bp, Homo sapien
tggtaatttaacagtcagtgtggtt

SEQ ID NO: 5177624 - DNA, 25 bp, Homo sapien
cctctgcaatgttgtaagcaagact

SEQ ID NO: 5177625 - DNA, 25 bp, Homo sapien
catgtgtgcatatcatgttatgctc

SEQ ID NO: 5177626 - DNA, 25 bp, Homo sapien
tacttgaagtaaagggccactcaca

SEQ ID NO: 5177627 - DNA, 25 bp, Homo sapien
cgtaattattacatgcagggaagct

SEQ ID NO: 5177628 - DNA, 25 bp, Homo sapien
gcaatactaaagtgacctgttttaa

SEQ ID NO: 5177629 - DNA, 25 bp, Homo sapien
gctgccaatacaaaaattgagcttt

SEQ ID NO: 5177630 - DNA, 25 bp, Homo sapien
ctgccaatacaaaaattgagctttc

SEQ ID NO: 5177631 - DNA, 25 bp, Homo sapien
gacggcatcctgagggttatcctgc

SEQ ID NO: 5177632 - DNA, 25 bp, Homo sapien
catcctgagggttatcctgcctctc

SEQ ID NO: 5177633 - DNA, 25 bp, Homo sapien
tcaatctaaagacggcatcctgagg

SEQ ID NO: 5177634 - DNA, 25 bp, Homo sapien
tctaaagacggcatcctgagggtta

SEQ ID NO: 5177635 - DNA, 25 bp, Homo sapien
gaggatggtcagcttcatcagcagt

SEQ ID NO: 5177636 - DNA, 25 bp, Homo sapien
ggatggtcagcttcatcagcagtcc

SEQ ID NO: 5177637 - DNA, 25 bp, Homo sapien
cttgaggatggtcagcttcatcagc

SEQ ID NO: 5177638 - DNA, 25 bp, Homo sapien
gatggtcagcttcatcagcagtcct

SEQ ID NO: 5177639 - DNA, 25 bp, Homo sapien
agaaccaaccagatgtcagcttcca

SEQ ID NO: 5177640 - DNA, 25 bp, Homo sapien
tgagaaccaaccagatgtcagcttc

SEQ ID NO: 5177641 - DNA, 25 bp, Homo sapien
gagaaccaaccagatgtcagcttcc

SEQ ID NO: 5177642 - DNA, 25 bp, Homo sapien
cacctgagagcatttgaatacactt

SEQ ID NO: 5177643 - DNA, 25 bp, Homo sapien
tcacctgagagcatttgaatacact

SEQ ID NO: 5177644 - DNA, 25 bp, Homo sapien
cagtgccattcatgtcaggcccatg

SEQ ID NO: 5177645 - DNA, 25 bp, Homo sapien
tgaaggtcagctcagtgccattcat

SEQ ID NO: 5177646 - DNA, 25 bp, Homo sapien
agtgccattcatgtcaggcccatgt

SEQ ID NO: 5177647 - DNA, 25 bp, Homo sapien
tttggttccatccacgaaaatagtc

SEQ ID NO: 5177648 - DNA, 25 bp, Homo sapien
tccatccacgaaaatagtctattag

SEQ ID NO: 5177649 - DNA, 25 bp, Homo sapien
ccacgaaaatagtctattagatcac

SEQ ID NO: 5177650 - DNA, 25 bp, Homo sapien
caattttggttccatccacgaaaat

SEQ ID NO: 5177651 - DNA, 25 bp, Homo sapien
ttttcactagcctacttccatgcga

SEQ ID NO: 5177652 - DNA, 25 bp, Homo sapien
gctatataagagtcacagaaggaaa

SEQ ID NO: 5177653 - DNA, 25 bp, Homo sapien
cagctggcctgacatatatagaaag

SEQ ID NO: 5177654 - DNA, 25 bp, Homo sapien
tccatgcgatactactacagcagct

SEQ ID NO: 5177655 - DNA, 25 bp, Homo sapien
catctttgcagacctcaacttctac

SEQ ID NO: 5177656 - DNA, 25 bp, Homo sapien
ctttgcagacctcaacttctacact

SEQ ID NO: 5177657 - DNA, 25 bp, Homo sapien
tcatctttgcagacctcaacttcta

SEQ ID NO: 5177658 - DNA, 25 bp, Homo sapien
tctttgcagacctcaacttctacac

SEQ ID NO: 5177659 - DNA, 25 bp, Homo sapien
cacagcctgagtatcctggagtgct

SEQ ID NO: 5177660 - DNA, 25 bp, Homo sapien
tgaagaccccgaaacagcttaagag

SEQ ID NO: 5177661 - DNA, 25 bp, Homo sapien
gctgctaggactgaagtcagggtca

SEQ ID NO: 5177662 - DNA, 25 bp, Homo sapien
tgcaggctcggagcaaaagaatgaa

SEQ ID NO: 5177663 - DNA, 25 bp, Homo sapien
ctgtacgactgttgttctagctcaa

SEQ ID NO: 5177664 - DNA, 25 bp, Homo sapien
tgtacgactgttgttctagctcaaa

SEQ ID NO: 5177665 - DNA, 25 bp, Homo sapien
gatgttgaaagaaacctgttgtggt

SEQ ID NO: 5177666 - DNA, 25 bp, Homo sapien
ttgtggtttaaatgactcggtcagt

SEQ ID NO: 5177667 - DNA, 25 bp, Homo sapien
ctcggtcagttcttctgggattttc

SEQ ID NO: 5177668 - DNA, 25 bp, Homo sapien
ccatggttttgatgttgaaagaaac

SEQ ID NO: 5177669 - DNA, 25 bp, Homo sapien
gaggcaaagccacagctttgcacgg

SEQ ID NO: 5177670 - DNA, 25 bp, Homo sapien
ggaggaagtcggatctgctgctcac

SEQ ID NO: 5177671 - DNA, 25 bp, Homo sapien
tgctgctcacaaggcgcccatagga

SEQ ID NO: 5177672 - DNA, 25 bp, Homo sapien
tttgcacggtcagaaccaggctgtc

SEQ ID NO: 5177673 - DNA, 25 bp, Homo sapien
atgaaatgtccgtttccatttggat

SEQ ID NO: 5177674 - DNA, 25 bp, Homo sapien
gaaatgtccgtttccatttggatcc

SEQ ID NO: 5177675 - DNA, 25 bp, Homo sapien
tgtccgtttccatttggatccctgt

SEQ ID NO: 5177676 - DNA, 25 bp, Homo sapien
ccgtttccatttggatccctgtggc

SEQ ID NO: 5177677 - DNA, 25 bp, Homo sapien
tgagaatggtaatttaccactaaat

SEQ ID NO: 5177678 - DNA, 25 bp, Homo sapien
gaacactctctttgcgagcaggaag

SEQ ID NO: 5177679 - DNA, 25 bp, Homo sapien
caccatgacatgttgagttcagagg

SEQ ID NO: 5177680 - DNA, 25 bp, Homo sapien
agttcagaggcatgaaaccaggcac

SEQ ID NO: 5177681 - DNA, 25 bp, Homo sapien
tgaggaggatgacaccatgacatgt

SEQ ID NO: 5177682 - DNA, 25 bp, Homo sapien
gtcctctccaattgacatttcagct

SEQ ID NO: 5177683 - DNA, 25 bp, Homo sapien
aagtcctctccaattgacatttcag

SEQ ID NO: 5177684 - DNA, 25 bp, Homo sapien
ctctccaattgacatttcagctcct

SEQ ID NO: 5177685 - DNA, 25 bp, Homo sapien
gaaagtcctctccaattgacatttc

SEQ ID NO: 5177686 - DNA, 25 bp, Homo sapien
ttggtcattcacttcccctctggct

SEQ ID NO: 5177687 - DNA, 25 bp, Homo sapien
gataaaaataccagatactgcagat

SEQ ID NO: 5177688 - DNA, 25 bp, Homo sapien
aaccagccacatgccagtttcttgc

SEQ ID NO: 5177689 - DNA, 25 bp, Homo sapien
caagatttacataactgtgagggca

SEQ ID NO: 5177690 - DNA, 25 bp, Homo sapien
gaaagctgagtgttcaaaggaatgt

SEQ ID NO: 5177691 - DNA, 25 bp, Homo sapien
gagtgttcaaaggaatgttacttct

SEQ ID NO: 5177692 - DNA, 25 bp, Homo sapien
caaaggaatgttacttctgcaaaca

SEQ ID NO: 5177693 - DNA, 25 bp, Homo sapien
gctgagtgttcaaaggaatgttact

SEQ ID NO: 5177694 - DNA, 25 bp, Homo sapien
aatccatcatacaggaaagtaagtc

SEQ ID NO: 5177695 - DNA, 25 bp, Homo sapien
catcatatttgccatcatgatattt

SEQ ID NO: 5177696 - DNA, 25 bp, Homo sapien
tgaatccatcatacaggaaagtaag

SEQ ID NO: 5177697 - DNA, 25 bp, Homo sapien
tcatatttgccatcatgatatttgc

SEQ ID NO: 5177698 - DNA, 25 bp, Homo sapien
tagcgtgcacgatgggctctgtcct

SEQ ID NO: 5177699 - DNA, 25 bp, Homo sapien
aactcagtggcaaagccgttattgt

SEQ ID NO: 5177700 - DNA, 25 bp, Homo sapien
gctctgtcctgactgaaactcagtg

SEQ ID NO: 5177701 - DNA, 25 bp, Homo sapien
tttggtaatgtaatagcgtgcacga

SEQ ID NO: 5177702 - DNA, 25 bp, Homo sapien
ttggtatggagttttggtgggtgac

SEQ ID NO: 5177703 - DNA, 25 bp, Homo sapien
ccattggtatggagttttggtgggt

SEQ ID NO: 5177704 - DNA, 25 bp, Homo sapien
gaatgctccattggtatggagtttt

SEQ ID NO: 5177705 - DNA, 25 bp, Homo sapien
atgctccattggtatggagttttgg

SEQ ID NO: 5177706 - DNA, 25 bp, Homo sapien
gcagaccatgagactggcagaattt

SEQ ID NO: 5177707 - DNA, 25 bp, Homo sapien
accccagcagaccatgagactggca

SEQ ID NO: 5177708 - DNA, 25 bp, Homo sapien
atgacagtagcataatgcccatgtg

SEQ ID NO: 5177709 - DNA, 25 bp, Homo sapien
tgtgcttaagcgtagccaaaaatat

SEQ ID NO: 5177710 - DNA, 25 bp, Homo sapien
caacattggacaaggttcccctcca

SEQ ID NO: 5177711 - DNA, 25 bp, Homo sapien
tggcaacattggacaaggttcccct

SEQ ID NO: 5177712 - DNA, 25 bp, Homo sapien
gatggcaacattggacaaggttccc

SEQ ID NO: 5177713 - DNA, 25 bp, Homo sapien
ggcaacattggacaaggttcccctc

SEQ ID NO: 5177714 - DNA, 25 bp, Homo sapien
tttcaatccactagcagcattggac

SEQ ID NO: 5177715 - DNA, 25 bp, Homo sapien
tcaagatttcaatccactagcagca

SEQ ID NO: 5177716 - DNA, 25 bp, Homo sapien
gatttcaatccactagcagcattgg

SEQ ID NO: 5177717 - DNA, 25 bp, Homo sapien
caatccactagcagcattggacata

SEQ ID NO: 5177718 - DNA, 25 bp, Homo sapien
caaacatggctctaagccaaaatgg

SEQ ID NO: 5177719 - DNA, 25 bp, Homo sapien
caaagaagagtcctctcacccttac

SEQ ID NO: 5177720 - DNA, 25 bp, Homo sapien
aagcttcttatgtatcagtgctgga

SEQ ID NO: 5177721 - DNA, 25 bp, Homo sapien
gcttttgcttttaagtgttcaacga

SEQ ID NO: 5177722 - DNA, 25 bp, Homo sapien
taagccacggtcatgctgctgcaca

SEQ ID NO: 5177723 - DNA, 25 bp, Homo sapien
agtaagccacggtcatgctgctgca

SEQ ID NO: 5177724 - DNA, 25 bp, Homo sapien
gcagtaagccacggtcatgctgctg

SEQ ID NO: 5177725 - DNA, 25 bp, Homo sapien
cagtaagccacggtcatgctgctgc

SEQ ID NO: 5177726 - DNA, 25 bp, Homo sapien
taattcaggcccgagcagtttggcc

SEQ ID NO: 5177727 - DNA, 25 bp, Homo sapien
tggattggtaagtggccctacagcc

SEQ ID NO: 5177728 - DNA, 25 bp, Homo sapien
gaggctactcccaactgcacggttt

SEQ ID NO: 5177729 - DNA, 25 bp, Homo sapien
tgcacggtttatgtgtgggacacca

SEQ ID NO: 5177730 - DNA, 25 bp, Homo sapien
tttcaaacgtctgtccccagtgacc

SEQ ID NO: 5177731 - DNA, 25 bp, Homo sapien
agatccctttgagagccacccaaca

SEQ ID NO: 5177732 - DNA, 25 bp, Homo sapien
tgtgaaagctgacaagttttcccga

SEQ ID NO: 5177733 - DNA, 25 bp, Homo sapien
catagttcccataaacacttggacc

SEQ ID NO: 5177734 - DNA, 25 bp, Homo sapien
cacaaagggtcaaagaggcttctga

SEQ ID NO: 5177735 - DNA, 25 bp, Homo sapien
tcacataactgacaacacaaagggt

SEQ ID NO: 5177736 - DNA, 25 bp, Homo sapien
tctgaaatccaataatgggcagctg

SEQ ID NO: 5177737 - DNA, 25 bp, Homo sapien
gctcatttgttgcaactgtgaccaa

SEQ ID NO: 5177738 - DNA, 25 bp, Homo sapien
tattgagtgctttgaacaaggaacc

SEQ ID NO: 5177739 - DNA, 25 bp, Homo sapien
aagtcagctgggagaccacatccta

SEQ ID NO: 5177740 - DNA, 25 bp, Homo sapien
tgatgattcagttatgaagtcagct

SEQ ID NO: 5177741 - DNA, 25 bp, Homo sapien
caaggaaccattataaggtactgct

SEQ ID NO: 5177742 - DNA, 25 bp, Homo sapien
gatcccaacagatacaggtcctcct

SEQ ID NO: 5177743 - DNA, 25 bp, Homo sapien
gatctcattctaagtgatacagccc

SEQ ID NO: 5177744 - DNA, 25 bp, Homo sapien
tgcagaatgacagagtaggactaag

SEQ ID NO: 5177745 - DNA, 25 bp, Homo sapien
tggcaacctcaaggatggaactatg

SEQ ID NO: 5177746 - DNA, 25 bp, Homo sapien
catggaatgctcaacctcagaaaga

SEQ ID NO: 5177747 - DNA, 25 bp, Homo sapien
tctaggaactagcttatgggtgcca

SEQ ID NO: 5177748 - DNA, 25 bp, Homo sapien
tattactagggcctctaccaggatc

SEQ ID NO: 5177749 - DNA, 25 bp, Homo sapien
ctctggctatgggtgtactggaaca

SEQ ID NO: 5177750 - DNA, 25 bp, Homo sapien
ggatcagataacgaaatcctctttc

SEQ ID NO: 5177751 - DNA, 25 bp, Homo sapien
ggaacataaaagttaggacaacatg

SEQ ID NO: 5177752 - DNA, 25 bp, Homo sapien
gacccataacttgtgattatccaaa

SEQ ID NO: 5177753 - DNA, 25 bp, Homo sapien
caatcttgctctgaccataaatgga

SEQ ID NO: 5177754 - DNA, 25 bp, Homo sapien
caattagacatataagtatagtaag

SEQ ID NO: 5177755 - DNA, 25 bp, Homo sapien
tatgtgtaataagaaagaggagcta

SEQ ID NO: 5177756 - DNA, 25 bp, Homo sapien
tgagtcttttcaattagacatataa

SEQ ID NO: 5177757 - DNA, 25 bp, Homo sapien
cacacaatcccagttcttcttatca

SEQ ID NO: 5177758 - DNA, 25 bp, Homo sapien
gttagcctaaaagtaccagagcatg

SEQ ID NO: 5177759 - DNA, 25 bp, Homo sapien
gaggccaggagtagccacattccat

SEQ ID NO: 5177760 - DNA, 25 bp, Homo sapien
tagagtgcctatccagaattgaaga

SEQ ID NO: 5177761 - DNA, 25 bp, Homo sapien
gataagaattttggcagcacaagga

SEQ ID NO: 5177762 - DNA, 25 bp, Homo sapien
aatgtaagtggcgagagtgatgtcc

SEQ ID NO: 5177763 - DNA, 25 bp, Homo sapien
gataaagttcccttcaatcctcaat

SEQ ID NO: 5177764 - DNA, 25 bp, Homo sapien
taattactcttgctagaaccaccag

SEQ ID NO: 5177765 - DNA, 25 bp, Homo sapien
tcaccattacatatgaggttagctg

SEQ ID NO: 5177766 - DNA, 25 bp, Homo sapien
tgaactgtaacggtacaccggatag

SEQ ID NO: 5177767 - DNA, 25 bp, Homo sapien
gtacaccggataggggcaaaggtca

SEQ ID NO: 5177768 - DNA, 25 bp, Homo sapien
taattattgaaatgaactgtaacgg

SEQ ID NO: 5177769 - DNA, 25 bp, Homo sapien
tgaaatgaactgtaacggtacaccg

SEQ ID NO: 5177770 - DNA, 25 bp, Homo sapien
cattgccaatctttccagcaaacat

SEQ ID NO: 5177771 - DNA, 25 bp, Homo sapien
gataaccgctctaacccattgccaa

SEQ ID NO: 5177772 - DNA, 25 bp, Homo sapien
ctttgaaatgccctgccttgataac

SEQ ID NO: 5177773 - DNA, 25 bp, Homo sapien
tgccctgccttgataaccgctctaa

SEQ ID NO: 5177774 - DNA, 25 bp, Homo sapien
gaaaatgtgagacgtgaatatttca

SEQ ID NO: 5177775 - DNA, 25 bp, Homo sapien
aaaatgtgagacgtgaatatttcat

SEQ ID NO: 5177776 - DNA, 25 bp, Homo sapien
ggaaaatgtgagacgtgaatatttc

SEQ ID NO: 5177777 - DNA, 25 bp, Homo sapien
ctgagaagtcgccaacatcactggg

SEQ ID NO: 5177778 - DNA, 25 bp, Homo sapien
tctgagaagtcgccaacatcactgg

SEQ ID NO: 5177779 - DNA, 25 bp, Homo sapien
aactctgagaagtcgccaacatcac

SEQ ID NO: 5177780 - DNA, 25 bp, Homo sapien
actctgagaagtcgccaacatcact

SEQ ID NO: 5177781 - DNA, 25 bp, Homo sapien
gatcaaggaagtgtactatatattc

SEQ ID NO: 5177782 - DNA, 25 bp, Homo sapien
agcttattataaccaactgctggac

SEQ ID NO: 5177783 - DNA, 25 bp, Homo sapien
accacagatcaaggaagtgtactat

SEQ ID NO: 5177784 - DNA, 25 bp, Homo sapien
ccaactgctggacttaaacttcaga

SEQ ID NO: 5177785 - DNA, 25 bp, Homo sapien
gacagtgctttttactaatctaagg

SEQ ID NO: 5177786 - DNA, 25 bp, Homo sapien
taatctaaggcattggtccaccaac

SEQ ID NO: 5177787 - DNA, 25 bp, Homo sapien
ttcaatgaatatctgtggatttggc

SEQ ID NO: 5177788 - DNA, 25 bp, Homo sapien
tggcagtgcttactctatgacagtg

SEQ ID NO: 5177789 - DNA, 25 bp, Homo sapien
gtaagcagacatcgcaccattggac

SEQ ID NO: 5177790 - DNA, 25 bp, Homo sapien
agtaagcagacatcgcaccattgga

SEQ ID NO: 5177791 - DNA, 25 bp, Homo sapien
atcccattgagatgtagcattgcat

SEQ ID NO: 5177792 - DNA, 25 bp, Homo sapien
gtatccacaattatgttatttgaaa

SEQ ID NO: 5177793 - DNA, 25 bp, Homo sapien
tcccattgagatgtagcattgcatt

SEQ ID NO: 5177794 - DNA, 25 bp, Homo sapien
aatcccattgagatgtagcattgca

SEQ ID NO: 5177795 - DNA, 25 bp, Homo sapien
caggataggaattctagcaccatat

SEQ ID NO: 5177796 - DNA, 25 bp, Homo sapien
taagtcctgtatacattgtttgatg

SEQ ID NO: 5177797 - DNA, 25 bp, Homo sapien
tgaccatgtattcattgttagcctg

SEQ ID NO: 5177798 - DNA, 25 bp, Homo sapien
gttatagtagcttttggttgaatcc

SEQ ID NO: 5177799 - DNA, 25 bp, Homo sapien
tattacagccaccagattttctcta

SEQ ID NO: 5177800 - DNA, 25 bp, Homo sapien
aaacataaacccttgggcaccatgc

SEQ ID NO: 5177801 - DNA, 25 bp, Homo sapien
taatgagttcaacacttctccagtg

SEQ ID NO: 5177802 - DNA, 25 bp, Homo sapien
ttctccagtgggtcttagaaattct

SEQ ID NO: 5177803 - DNA, 25 bp, Homo sapien
agtctgttaagtacacattgcattt

SEQ ID NO: 5177804 - DNA, 25 bp, Homo sapien
cagaagtctgttaagtacacattgc

SEQ ID NO: 5177805 - DNA, 25 bp, Homo sapien
acagaagtctgttaagtacacattg

SEQ ID NO: 5177806 - DNA, 25 bp, Homo sapien
gaagtctgttaagtacacattgcat

SEQ ID NO: 5177807 - DNA, 25 bp, Homo sapien
agcattgtcatcacttacctaggaa

SEQ ID NO: 5177808 - DNA, 25 bp, Homo sapien
tgttcatggacaacctcaaatagta

SEQ ID NO: 5177809 - DNA, 25 bp, Homo sapien
gaaatgtgacatctcagacccatcc

SEQ ID NO: 5177810 - DNA, 25 bp, Homo sapien
aaatggactttggagttagagctgc

SEQ ID NO: 5177811 - DNA, 25 bp, Homo sapien
gcatccgcaattatctatcccacag

SEQ ID NO: 5177812 - DNA, 25 bp, Homo sapien
gctaataggagatatgacagtaaac

SEQ ID NO: 5177813 - DNA, 25 bp, Homo sapien
taaacgtggaagcatactgtagact

SEQ ID NO: 5177814 - DNA, 25 bp, Homo sapien
ttaactcacaaaaagtgcatccgca

SEQ ID NO: 5177815 - DNA, 25 bp, Homo sapien
ggttccccgtgcctatcacaattga

SEQ ID NO: 5177816 - DNA, 25 bp, Homo sapien
cacaattgatggtaaagaactgctc

SEQ ID NO: 5177817 - DNA, 25 bp, Homo sapien
agggtctcgagccaaagtaaggtga

SEQ ID NO: 5177818 - DNA, 25 bp, Homo sapien
tgatgaacatagaggaggaaatcct

SEQ ID NO: 5177819 - DNA, 25 bp, Homo sapien
atagcttactacagtgtcagtctcc

SEQ ID NO: 5177820 - DNA, 25 bp, Homo sapien
gtcagcactaaacccaagatttcat

SEQ ID NO: 5177821 - DNA, 25 bp, Homo sapien
gcactaaacccaagatttcatctat

SEQ ID NO: 5177822 - DNA, 25 bp, Homo sapien
catagcttactacagtgtcagtctc

SEQ ID NO: 5177823 - DNA, 25 bp, Homo sapien
tgaattaaacacagcgggccaaatt

SEQ ID NO: 5177824 - DNA, 25 bp, Homo sapien
ttgtgtgtatccaagggcagaatcc

SEQ ID NO: 5177825 - DNA, 25 bp, Homo sapien
aaagcaccagagatgacttcgtaca

SEQ ID NO: 5177826 - DNA, 25 bp, Homo sapien
gcccctggatatgcatgcacaattt

SEQ ID NO: 5177827 - DNA, 25 bp, Homo sapien
gtagtcgattacaccggcagcagac

SEQ ID NO: 5177828 - DNA, 25 bp, Homo sapien
cctgatgatcgtagaagctttttcc

SEQ ID NO: 5177829 - DNA, 25 bp, Homo sapien
gctgggcatcaccaattgtcatata

SEQ ID NO: 5177830 - DNA, 25 bp, Homo sapien
ggatcagctttgatgaccgctctta

SEQ ID NO: 5177831 - DNA, 25 bp, Homo sapien
tacacagcaaggattgcacaataac

SEQ ID NO: 5177832 - DNA, 25 bp, Homo sapien
accgcagatagctggactgaaatcc

SEQ ID NO: 5177833 - DNA, 25 bp, Homo sapien
aaataaacatttgcaaccgcagata

SEQ ID NO: 5177834 - DNA, 25 bp, Homo sapien
gcaaggattgcacaataacccatta

SEQ ID NO: 5177835 - DNA, 25 bp, Homo sapien
cagcaaatgccataaagtgccctac

SEQ ID NO: 5177836 - DNA, 25 bp, Homo sapien
agtgccctacccttaatctgcagag

SEQ ID NO: 5177837 - DNA, 25 bp, Homo sapien
tattccccagacaattcacttgaga

SEQ ID NO: 5177838 - DNA, 25 bp, Homo sapien
tggttctgtgatctgactggtgtcc

SEQ ID NO: 5177839 - DNA, 25 bp, Homo sapien
cagcagaaggcttgtcatcaagaca

SEQ ID NO: 5177840 - DNA, 25 bp, Homo sapien
tcaagacatatacttagcaaaaggc

SEQ ID NO: 5177841 - DNA, 25 bp, Homo sapien
cccaagtgagggacacgttaattga

SEQ ID NO: 5177842 - DNA, 25 bp, Homo sapien
tgatcggtccagaaacacagctcat

SEQ ID NO: 5177843 - DNA, 25 bp, Homo sapien
gctaaacagattcagcacacaagtg

SEQ ID NO: 5177844 - DNA, 25 bp, Homo sapien
ccatgagtggaaaggtaacttggct

SEQ ID NO: 5177845 - DNA, 25 bp, Homo sapien
cacacaagtgtagaatgggaaaggg

SEQ ID NO: 5177846 - DNA, 25 bp, Homo sapien
gagtaatctttagaaccatgagtgg

SEQ ID NO: 5177847 - DNA, 25 bp, Homo sapien
ggtctattggtgcataaccccatcg

SEQ ID NO: 5177848 - DNA, 25 bp, Homo sapien
aggatctacatccaggccgtttggc

SEQ ID NO: 5177849 - DNA, 25 bp, Homo sapien
tgtacatgctcccactatttgagtg

SEQ ID NO: 5177850 - DNA, 25 bp, Homo sapien
tgttttcagatcaccagaccctctt

SEQ ID NO: 5177851 - DNA, 25 bp, Homo sapien
gatgtattggctctattaacagaag

SEQ ID NO: 5177852 - DNA, 25 bp, Homo sapien
ctttgactgcctttgggacaagcat

SEQ ID NO: 5177853 - DNA, 25 bp, Homo sapien
tcaacaagcactacagtaggaaaat

SEQ ID NO: 5177854 - DNA, 25 bp, Homo sapien
aagacttagcttaggcattgcatcc

SEQ ID NO: 5177855 - DNA, 25 bp, Homo sapien
caattctatatagttttgagacaat

SEQ ID NO: 5177856 - DNA, 25 bp, Homo sapien
tgagacaatcatgaggaccttgcat

SEQ ID NO: 5177857 - DNA, 25 bp, Homo sapien
tctatatagttttgagacaatcatg

SEQ ID NO: 5177858 - DNA, 25 bp, Homo sapien
tagttttgagacaatcatgaggacc

SEQ ID NO: 5177859 - DNA, 25 bp, Homo sapien
gaaagcacttcctacctacattggg

SEQ ID NO: 5177860 - DNA, 25 bp, Homo sapien
ggctctatcagaccttgctgtgtgg

SEQ ID NO: 5177861 - DNA, 25 bp, Homo sapien
gggagactcacatggaggtctagct

SEQ ID NO: 5177862 - DNA, 25 bp, Homo sapien
gatttcataaagtctctcctggctc

SEQ ID NO: 5177863 - DNA, 25 bp, Homo sapien
tgtccagcaacagatctagcattgt

SEQ ID NO: 5177864 - DNA, 25 bp, Homo sapien
tgatctcataagtcaatccttgtga

SEQ ID NO: 5177865 - DNA, 25 bp, Homo sapien
tcactattagagctttggcttacca

SEQ ID NO: 5177866 - DNA, 25 bp, Homo sapien
tattattagcaagtagaactgggtc

SEQ ID NO: 5177867 - DNA, 25 bp, Homo sapien
ctcttgacggatggaccggatgcat

SEQ ID NO: 5177868 - DNA, 25 bp, Homo sapien
ggactcttgacggatggaccggatg

SEQ ID NO: 5177869 - DNA, 25 bp, Homo sapien
actcttgacggatggaccggatgca

SEQ ID NO: 5177870 - DNA, 25 bp, Homo sapien
catggactcttgacggatggaccgg

SEQ ID NO: 5177871 - DNA, 25 bp, Homo sapien
gcagattgtgtgctcaatgaccgta

SEQ ID NO: 5177872 - DNA, 25 bp, Homo sapien
aaatgaaacgggctgcgagggaaca

SEQ ID NO: 5177873 - DNA, 25 bp, Homo sapien
tctactggcgtaaactcagggacca

SEQ ID NO: 5177874 - DNA, 25 bp, Homo sapien
tttaccagactagcaagagatgttc

SEQ ID NO: 5177875 - DNA, 25 bp, Homo sapien
taagcattcacgagaagctacttcc

SEQ ID NO: 5177876 - DNA, 25 bp, Homo sapien
tacttgaggtataagatatcatccc

SEQ ID NO: 5177877 - DNA, 25 bp, Homo sapien
cactttaccctttagatacagagta

SEQ ID NO: 5177878 - DNA, 25 bp, Homo sapien
taagagagaactaacagtttgtgcc

SEQ ID NO: 5177879 - DNA, 25 bp, Homo sapien
ctagcattgcctgctggctagtgac

SEQ ID NO: 5177880 - DNA, 25 bp, Homo sapien
tgcatatcccaggtggtctgacatt

SEQ ID NO: 5177881 - DNA, 25 bp, Homo sapien
tgcctgctggctagtgacagcgtct

SEQ ID NO: 5177882 - DNA, 25 bp, Homo sapien
tatcccaggtggtctgacatttgag

SEQ ID NO: 5177883 - DNA, 25 bp, Homo sapien
cattcggggtttcagcagcatgact

SEQ ID NO: 5177884 - DNA, 25 bp, Homo sapien
cagttgaaggtgcaatctcacttag

SEQ ID NO: 5177885 - DNA, 25 bp, Homo sapien
tcctgtaaggtggagtgatgccagt

SEQ ID NO: 5177886 - DNA, 25 bp, Homo sapien
tctcacttaggctttcactgcaaag

SEQ ID NO: 5177887 - DNA, 25 bp, Homo sapien
tacatctccagcaatcaaatggcat

SEQ ID NO: 5177888 - DNA, 25 bp, Homo sapien
gctggctgcaaaggaacaatcgtca

SEQ ID NO: 5177889 - DNA, 25 bp, Homo sapien
gcccatgcagtacttcttttaaaga

SEQ ID NO: 5177890 - DNA, 25 bp, Homo sapien
caaaaattgccataaacaagctggc

SEQ ID NO: 5177891 - DNA, 25 bp, Homo sapien
atgcttggatttggcgaagacttgt

SEQ ID NO: 5177892 - DNA, 25 bp, Homo sapien
gatttggcgaagacttgtaaagacc

SEQ ID NO: 5177893 - DNA, 25 bp, Homo sapien
ttaatgaggccaatgcttggatttg

SEQ ID NO: 5177894 - DNA, 25 bp, Homo sapien
ggcattgattctctgagttaatgag

SEQ ID NO: 5177895 - DNA, 25 bp, Homo sapien
tttgaacagtcacagcaggtattac

SEQ ID NO: 5177896 - DNA, 25 bp, Homo sapien
caggaagttactagaaggtgagcaa

SEQ ID NO: 5177897 - DNA, 25 bp, Homo sapien
ggtagcttaccactcccatagatta

SEQ ID NO: 5177898 - DNA, 25 bp, Homo sapien
tgtcgatacatagggatacacctca

SEQ ID NO: 5177899 - DNA, 25 bp, Homo sapien
tcagtaaaggcaaattgatgggcat

SEQ ID NO: 5177900 - DNA, 25 bp, Homo sapien
tgtgaatacaacacaacttcagtaa

SEQ ID NO: 5177901 - DNA, 25 bp, Homo sapien
tcttaatgccgatatatactggtac

SEQ ID NO: 5177902 - DNA, 25 bp, Homo sapien
ccagccagagggtcttaatgccgat

SEQ ID NO: 5177903 - DNA, 25 bp, Homo sapien
tacaaggaagtccatactgccctgc

SEQ ID NO: 5177904 - DNA, 25 bp, Homo sapien
tactttccacatgtcgtatggagaa

SEQ ID NO: 5177905 - DNA, 25 bp, Homo sapien
tataagcacgagctaccatgtcagg

SEQ ID NO: 5177906 - DNA, 25 bp, Homo sapien
cgagtggtccacacagggttatcaa

SEQ ID NO: 5177907 - DNA, 25 bp, Homo sapien
tgtacattagtaccacctgaggtgc

SEQ ID NO: 5177908 - DNA, 25 bp, Homo sapien
tacatgtgcacgctattatgcctgg

SEQ ID NO: 5177909 - DNA, 25 bp, Homo sapien
tctccatctcctctaactgtccctg

SEQ ID NO: 5177910 - DNA, 25 bp, Homo sapien
tctaactgtccctgtgctctgagca

SEQ ID NO: 5177911 - DNA, 25 bp, Homo sapien
actgtccctgtgctctgagcagtgg

SEQ ID NO: 5177912 - DNA, 25 bp, Homo sapien
ctccatctcctctaactgtccctgt

SEQ ID NO: 5177913 - DNA, 25 bp, Homo sapien
tccagttagtgatagaagtaaagcc

SEQ ID NO: 5177914 - DNA, 25 bp, Homo sapien
gctcctccaattgcttgacagaagt

SEQ ID NO: 5177915 - DNA, 25 bp, Homo sapien
tgacagaagttcgacttgaaaaggt

SEQ ID NO: 5177916 - DNA, 25 bp, Homo sapien
tgtgtgagctctgcattcaagatat

SEQ ID NO: 5177917 - DNA, 25 bp, Homo sapien
attccatatagcgaatccacatgac

SEQ ID NO: 5177918 - DNA, 25 bp, Homo sapien
atattccatatagcgaatccacatg

SEQ ID NO: 5177919 - DNA, 25 bp, Homo sapien
tcaatcatattccatatagcgaatc

SEQ ID NO: 5177920 - DNA, 25 bp, Homo sapien
tcatattccatatagcgaatccaca

SEQ ID NO: 5177921 - DNA, 25 bp, Homo sapien
ttggtaaaggcaattctctggaact

SEQ ID NO: 5177922 - DNA, 25 bp, Homo sapien
ttccctgtagtagactgcattccca

SEQ ID NO: 5177923 - DNA, 25 bp, Homo sapien
gttgaggtaattagcccaaagcctc

SEQ ID NO: 5177924 - DNA, 25 bp, Homo sapien
taattggcaggattcagtctctggt

SEQ ID NO: 5177925 - DNA, 25 bp, Homo sapien
tgatagcatagcagattcctgggtg

SEQ ID NO: 5177926 - DNA, 25 bp, Homo sapien
ccattctgttgccagtgatagcata

SEQ ID NO: 5177927 - DNA, 25 bp, Homo sapien
cctgggtgttacttgccaaatccac

SEQ ID NO: 5177928 - DNA, 25 bp, Homo sapien
caaatccacaactctttgagaatta

SEQ ID NO: 5177929 - DNA, 25 bp, Homo sapien
atagaaattctataactaggagggt

SEQ ID NO: 5177930 - DNA, 25 bp, Homo sapien
taggagggtagcttaaatcactcaa

SEQ ID NO: 5177931 - DNA, 25 bp, Homo sapien
taactaggagggtagcttaaatcac

SEQ ID NO: 5177932 - DNA, 25 bp, Homo sapien
tctataactaggagggtagcttaaa

SEQ ID NO: 5177933 - DNA, 25 bp, Homo sapien
ctttggaaagatttatgattactgg

SEQ ID NO: 5177934 - DNA, 25 bp, Homo sapien
gaaagatttatgattactggattca

SEQ ID NO: 5177935 - DNA, 25 bp, Homo sapien
aaagatttatgattactggattcat

SEQ ID NO: 5177936 - DNA, 25 bp, Homo sapien
tggaaagatttatgattactggatt

SEQ ID NO: 5177937 - DNA, 25 bp, Homo sapien
gagctggcgttgcatggatctgaca

SEQ ID NO: 5177938 - DNA, 25 bp, Homo sapien
tcagttgcaataagacattgacgaa

SEQ ID NO: 5177939 - DNA, 25 bp, Homo sapien
gacacgctgtagttttctgtggttc

SEQ ID NO: 5177940 - DNA, 25 bp, Homo sapien
tctgtggttctgacacgagcagcca

SEQ ID NO: 5177941 - DNA, 25 bp, Homo sapien
tggccacagttttacaacaacagaa

SEQ ID NO: 5177942 - DNA, 25 bp, Homo sapien
tctcgtggccacagttttacaacaa

SEQ ID NO: 5177943 - DNA, 25 bp, Homo sapien
cgtggccacagttttacaacaacag

SEQ ID NO: 5177944 - DNA, 25 bp, Homo sapien
tcgtggccacagttttacaacaaca

SEQ ID NO: 5177945 - DNA, 25 bp, Homo sapien
caagtgatttacactcaatatctgg

SEQ ID NO: 5177946 - DNA, 25 bp, Homo sapien
tgtcactagaattggccatagcaag

SEQ ID NO: 5177947 - DNA, 25 bp, Homo sapien
catagcaagtgatttacactcaata

SEQ ID NO: 5177948 - DNA, 25 bp, Homo sapien
ataaatgatgattccgatttgtcac

SEQ ID NO: 5177949 - DNA, 25 bp, Homo sapien
ttgtgaaagtggcaagaaccgtctc

SEQ ID NO: 5177950 - DNA, 25 bp, Homo sapien
taggataataagtaggcatacggcc

SEQ ID NO: 5177951 - DNA, 25 bp, Homo sapien
cacagggcactcctcggattaggaa

SEQ ID NO: 5177952 - DNA, 25 bp, Homo sapien
catacggccaagcttacacactggg

SEQ ID NO: 5177953 - DNA, 25 bp, Homo sapien
aggggacctggaagtgacacaatct

SEQ ID NO: 5177954 - DNA, 25 bp, Homo sapien
gttgcctcaggaaagctatcctttg

SEQ ID NO: 5177955 - DNA, 25 bp, Homo sapien
gaggggacctggaagtgacacaatc

SEQ ID NO: 5177956 - DNA, 25 bp, Homo sapien
tctccactcgcgagaaagaacatgg

SEQ ID NO: 5177957 - DNA, 25 bp, Homo sapien
tcaagtaggcatcggtgagaaacat

SEQ ID NO: 5177958 - DNA, 25 bp, Homo sapien
tggaacacggacagccatggagctg

SEQ ID NO: 5177959 - DNA, 25 bp, Homo sapien
catgctctgatggatcgtgcgctgc

SEQ ID NO: 5177960 - DNA, 25 bp, Homo sapien
taacagaaaagacttcagagtcaac

SEQ ID NO: 5177961 - DNA, 25 bp, Homo sapien
aataacagaaaagacttcagagtca

SEQ ID NO: 5177962 - DNA, 25 bp, Homo sapien
acagaaaagacttcagagtcaacat

SEQ ID NO: 5177963 - DNA, 25 bp, Homo sapien
aaataacagaaaagacttcagagtc

SEQ ID NO: 5177964 - DNA, 25 bp, Homo sapien
caatgttcagctcaaacctagtgat

SEQ ID NO: 5177965 - DNA, 25 bp, Homo sapien
ataaaggagggtcctttgagcttag

SEQ ID NO: 5177966 - DNA, 25 bp, Homo sapien
aaaggagggtcctttgagcttagtg

SEQ ID NO: 5177967 - DNA, 25 bp, Homo sapien
gctcaaacctagtgataaaggaggg

SEQ ID NO: 5177968 - DNA, 25 bp, Homo sapien
ttctatatttttctctcctccagat

SEQ ID NO: 5177969 - DNA, 25 bp, Homo sapien
tctatatttttctctcctccagatt

SEQ ID NO: 5177970 - DNA, 25 bp, Homo sapien
tatatttttctctcctccagattcc

SEQ ID NO: 5177971 - DNA, 25 bp, Homo sapien
tatttttctctcctccagattccag

SEQ ID NO: 5177972 - DNA, 25 bp, Homo sapien
cgaccagagtcagggccaatgtgaa

SEQ ID NO: 5177973 - DNA, 25 bp, Homo sapien
cgtgcatctagcatagcacttgcca

SEQ ID NO: 5177974 - DNA, 25 bp, Homo sapien
tcaagtcttgggaaatgctgtcccc

SEQ ID NO: 5177975 - DNA, 25 bp, Homo sapien
cccatagacccaggtcgtgcatcta

SEQ ID NO: 5177976 - DNA, 25 bp, Homo sapien
tagcatccctcctcacattcaatcc

SEQ ID NO: 5177977 - DNA, 25 bp, Homo sapien
tctgatagccattcctagcatccct

SEQ ID NO: 5177978 - DNA, 25 bp, Homo sapien
ttcaatccactgctcacacttccat

SEQ ID NO: 5177979 - DNA, 25 bp, Homo sapien
cctgaagtatgacactagctttctg

SEQ ID NO: 5177980 - DNA, 25 bp, Homo sapien
ccttgtaagcatatagacttttatc

SEQ ID NO: 5177981 - DNA, 25 bp, Homo sapien
tatggattgtcagtgcatacactgg

SEQ ID NO: 5177982 - DNA, 25 bp, Homo sapien
tacactggtaataaagaacaattct

SEQ ID NO: 5177983 - DNA, 25 bp, Homo sapien
ttttgtaaaggccctgatgaacctc

SEQ ID NO: 5177984 - DNA, 25 bp, Homo sapien
cagctggatatctgtgtctgaatta

SEQ ID NO: 5177985 - DNA, 25 bp, Homo sapien
tgaactcctggacaacgcagctgga

SEQ ID NO: 5177986 - DNA, 25 bp, Homo sapien
caggacgatccttgggtagatatcc

SEQ ID NO: 5177987 - DNA, 25 bp, Homo sapien
gaattatattccaggacgatccttg

SEQ ID NO: 5177988 - DNA, 25 bp, Homo sapien
cttcaccccaatgcgttcctctcca

SEQ ID NO: 5177989 - DNA, 25 bp, Homo sapien
tgtatcgcatggtgtagcctttctt

SEQ ID NO: 5177990 - DNA, 25 bp, Homo sapien
gaacctgtatcgcatggtgtagcct

SEQ ID NO: 5177991 - DNA, 25 bp, Homo sapien
agaaatgtgaacctgtatcgcatgg

SEQ ID NO: 5177992 - DNA, 25 bp, Homo sapien
tattgtgtacaaagtattcaaccgt

SEQ ID NO: 5177993 - DNA, 25 bp, Homo sapien
tattcaaccgtggaccacctgattt

SEQ ID NO: 5177994 - DNA, 25 bp, Homo sapien
tgtacaaagtattcaaccgtggacc

SEQ ID NO: 5177995 - DNA, 25 bp, Homo sapien
tcacatactgctgtaccttctcctt

SEQ ID NO: 5177996 - DNA, 25 bp, Homo sapien
accaactggcccaaagtcagagcca

SEQ ID NO: 5177997 - DNA, 25 bp, Homo sapien
tcaggttttagggtcaccaactggc

SEQ ID NO: 5177998 - DNA, 25 bp, Homo sapien
ctggcccaaagtcagagccaagtgc

SEQ ID NO: 5177999 - DNA, 25 bp, Homo sapien
aactggcccaaagtcagagccaagt

SEQ ID NO: 5178000 - DNA, 25 bp, Homo sapien
tcactgcgtgcatagacttgtgcaa

SEQ ID NO: 5178001 - DNA, 25 bp, Homo sapien
tgatcgcgaagggtaagtctggcct

SEQ ID NO: 5178002 - DNA, 25 bp, Homo sapien
tcagtcggttttcactgtggaccca

SEQ ID NO: 5178003 - DNA, 25 bp, Homo sapien
tgtggacccacagtgaactgcagat

SEQ ID NO: 5178004 - DNA, 25 bp, Homo sapien
cattctccaagttcataggggaaag

SEQ ID NO: 5178005 - DNA, 25 bp, Homo sapien
tccactgtactcttcgggcaggaat

SEQ ID NO: 5178006 - DNA, 25 bp, Homo sapien
cactgtactcttcgggcaggaatgc

SEQ ID NO: 5178007 - DNA, 25 bp, Homo sapien
ctgtactcttcgggcaggaatgcac

SEQ ID NO: 5178008 - DNA, 25 bp, Homo sapien
atgagataatcagggtgtcacagtg

SEQ ID NO: 5178009 - DNA, 25 bp, Homo sapien
tgccatgagagcctctgtttctaca

SEQ ID NO: 5178010 - DNA, 25 bp, Homo sapien
tctgtttctacaacatcccgtttac

SEQ ID NO: 5178011 - DNA, 25 bp, Homo sapien
aatgagataatcagggtgtcacagt

SEQ ID NO: 5178012 - DNA, 25 bp, Homo sapien
gaggctccaaggcctcaaagacctc

SEQ ID NO: 5178013 - DNA, 25 bp, Homo sapien
tcaaagacctcagtaagaggcaaca

SEQ ID NO: 5178014 - DNA, 25 bp, Homo sapien
caaagacctcagtaagaggcaacat

SEQ ID NO: 5178015 - DNA, 25 bp, Homo sapien
aagacctcagtaagaggcaacatgc

SEQ ID NO: 5178016 - DNA, 25 bp, Homo sapien
tttattaagataaccctgtcagcag

SEQ ID NO: 5178017 - DNA, 25 bp, Homo sapien
gcattcaaactggagcaacgagggt

SEQ ID NO: 5178018 - DNA, 25 bp, Homo sapien
gctggctcccacataggatggtgaa

SEQ ID NO: 5178019 - DNA, 25 bp, Homo sapien
catccctggcctcgtgcaggaggaa

SEQ ID NO: 5178020 - DNA, 25 bp, Homo sapien
cagtggtcttttgtgcaggctttgg

SEQ ID NO: 5178021 - DNA, 25 bp, Homo sapien
tcagcagtggtcttttgtgcaggct

SEQ ID NO: 5178022 - DNA, 25 bp, Homo sapien
tttttgctttgtgttcagcagtggt

SEQ ID NO: 5178023 - DNA, 25 bp, Homo sapien
aggctttggggctgcaatccaacat

SEQ ID NO: 5178024 - DNA, 25 bp, Homo sapien
tatcaggtctggttgattggtggct

SEQ ID NO: 5178025 - DNA, 25 bp, Homo sapien
gggtgtttgttttctctcgaagcca

SEQ ID NO: 5178026 - DNA, 25 bp, Homo sapien
ttttctctcgaagccatgcagtttc

SEQ ID NO: 5178027 - DNA, 25 bp, Homo sapien
cattattgtcaattctagatatcag

SEQ ID NO: 5178028 - DNA, 25 bp, Homo sapien
agaagtaggagaatcccaccctgac

SEQ ID NO: 5178029 - DNA, 25 bp, Homo sapien
aataagctggacttgcctcatctga

SEQ ID NO: 5178030 - DNA, 25 bp, Homo sapien
agatgaataagctggacttgcctca

SEQ ID NO: 5178031 - DNA, 25 bp, Homo sapien
caaattggtggatgtagaagtagga

SEQ ID NO: 5178032 - DNA, 25 bp, Homo sapien
gtcatcaggtgctgttccaacctca

SEQ ID NO: 5178033 - DNA, 25 bp, Homo sapien
cagggaccagaggatctgagtcatc

SEQ ID NO: 5178034 - DNA, 25 bp, Homo sapien
ggatctgagtcatcaggtgctgttc

SEQ ID NO: 5178035 - DNA, 25 bp, Homo sapien
tcagggaccagaggatctgagtcat

SEQ ID NO: 5178036 - DNA, 25 bp, Homo sapien
ttgaatcctggctgatgcatgacta

SEQ ID NO: 5178037 - DNA, 25 bp, Homo sapien
gcatgactatcagcatctgccctct

SEQ ID NO: 5178038 - DNA, 25 bp, Homo sapien
gtgagagatggtctgctcttttttc

SEQ ID NO: 5178039 - DNA, 25 bp, Homo sapien
ccacattatagcatcagtcttctga

SEQ ID NO: 5178040 - DNA, 25 bp, Homo sapien
tggggcccacgtcagagagatcaag

SEQ ID NO: 5178041 - DNA, 25 bp, Homo sapien
caagacacaataagagttttgctgc

SEQ ID NO: 5178042 - DNA, 25 bp, Homo sapien
caataagagttttgctgcgatgtct

SEQ ID NO: 5178043 - DNA, 25 bp, Homo sapien
gagttttgctgcgatgtctgagtga

SEQ ID NO: 5178044 - DNA, 25 bp, Homo sapien
aactccaccgaagaagctctgtgtg

SEQ ID NO: 5178045 - DNA, 25 bp, Homo sapien
ctccaacaaaactccaccgaagaag

SEQ ID NO: 5178046 - DNA, 25 bp, Homo sapien
caaaactccaccgaagaagctctgt

SEQ ID NO: 5178047 - DNA, 25 bp, Homo sapien
aacaaaactccaccgaagaagctct

SEQ ID NO: 5178048 - DNA, 25 bp, Homo sapien
ataaatgaatagagtctgcctaagg

SEQ ID NO: 5178049 - DNA, 25 bp, Homo sapien
taaatgaatagagtctgcctaaggc

SEQ ID NO: 5178050 - DNA, 25 bp, Homo sapien
gtctgcctaaggcagtcgtgtccat

SEQ ID NO: 5178051 - DNA, 25 bp, Homo sapien
tatccaaatccatgaaataagggaa

SEQ ID NO: 5178052 - DNA, 25 bp, Homo sapien
cagggccaaacccacttatccaaat

SEQ ID NO: 5178053 - DNA, 25 bp, Homo sapien
gaagaagataatgaacatcttaatt

SEQ ID NO: 5178054 - DNA, 25 bp, Homo sapien
tctcaatttctcagggccaaaccca

SEQ ID NO: 5178055 - DNA, 25 bp, Homo sapien
agaatgcgatattcatgggcaaaga

SEQ ID NO: 5178056 - DNA, 25 bp, Homo sapien
ttcaagttcatagttcttaataatg

SEQ ID NO: 5178057 - DNA, 25 bp, Homo sapien
cttaataatgataactggggagctg

SEQ ID NO: 5178058 - DNA, 25 bp, Homo sapien
tctgggcagtaacaatggggttaaa

SEQ ID NO: 5178059 - DNA, 25 bp, Homo sapien
gaagtgttttgtgcatccgatctac

SEQ ID NO: 5178060 - DNA, 25 bp, Homo sapien
ttagtcttcccgaagtgttttgtgc

SEQ ID NO: 5178061 - DNA, 25 bp, Homo sapien
cttcataagtttgtccacagtaact

SEQ ID NO: 5178062 - DNA, 25 bp, Homo sapien
tgtgcatccgatctacttcataagt

SEQ ID NO: 5178063 - DNA, 25 bp, Homo sapien
ttttcaagcagtagtacttcaggga

SEQ ID NO: 5178064 - DNA, 25 bp, Homo sapien
ttcagggacattggatctgtccatc

SEQ ID NO: 5178065 - DNA, 25 bp, Homo sapien
aagatggcgtccaatgccaccatga

SEQ ID NO: 5178066 - DNA, 25 bp, Homo sapien
tcttcaaaagatggcgtccaatgcc

SEQ ID NO: 5178067 - DNA, 25 bp, Homo sapien
tcctactatcattgcccaaaatatt

SEQ ID NO: 5178068 - DNA, 25 bp, Homo sapien
tcaagttcacctcatcagatttgct

SEQ ID NO: 5178069 - DNA, 25 bp, Homo sapien
actaattgtgtcatcttttttcgca

SEQ ID NO: 5178070 - DNA, 25 bp, Homo sapien
ctggcttccaacgttcaatatattc

SEQ ID NO: 5178071 - DNA, 25 bp, Homo sapien
gataaaatgcaaggagctttgcttc

SEQ ID NO: 5178072 - DNA, 25 bp, Homo sapien
tgctctgttttggataaaatgcaag

SEQ ID NO: 5178073 - DNA, 25 bp, Homo sapien
tttggataaaatgcaaggagctttg

SEQ ID NO: 5178074 - DNA, 25 bp, Homo sapien
tatttgctgctctgttttggataaa

SEQ ID NO: 5178075 - DNA, 25 bp, Homo sapien
tttaggcttatcaacagcagaggtg

SEQ ID NO: 5178076 - DNA, 25 bp, Homo sapien
cccaaatccgaggagattgtgagag

SEQ ID NO: 5178077 - DNA, 25 bp, Homo sapien
tgttgagagactgatttaggcttat

SEQ ID NO: 5178078 - DNA, 25 bp, Homo sapien
tgtgagagaatacttttgctgggaa

SEQ ID NO: 5178079 - DNA, 25 bp, Homo sapien
aaattcagtcctgtattggaaagaa

SEQ ID NO: 5178080 - DNA, 25 bp, Homo sapien
attcagtcctgtattggaaagaaca

SEQ ID NO: 5178081 - DNA, 25 bp, Homo sapien
tcagtcctgtattggaaagaacaag

SEQ ID NO: 5178082 - DNA, 25 bp, Homo sapien
aattcagtcctgtattggaaagaac

SEQ ID NO: 5178083 - DNA, 25 bp, Homo sapien
gaccagtgtgagagcattatatatt

SEQ ID NO: 5178084 - DNA, 25 bp, Homo sapien
tgaccagtgtgagagcattatatat

SEQ ID NO: 5178085 - DNA, 25 bp, Homo sapien
taatgttctgtattctagcgggcac

SEQ ID NO: 5178086 - DNA, 25 bp, Homo sapien
tctagcgggcacacactggatgctc

SEQ ID NO: 5178087 - DNA, 25 bp, Homo sapien
gttgttcaagggttctaggccagtg

SEQ ID NO: 5178088 - DNA, 25 bp, Homo sapien
tgctctccacatgatgctgagtcat

SEQ ID NO: 5178089 - DNA, 25 bp, Homo sapien
tttcagcttaaaggtggtcaaaatg

SEQ ID NO: 5178090 - DNA, 25 bp, Homo sapien
ttcatttttcagcttaaaggtggtc

SEQ ID NO: 5178091 - DNA, 25 bp, Homo sapien
tcagcttaaaggtggtcaaaatgga

SEQ ID NO: 5178092 - DNA, 25 bp, Homo sapien
catttttcagcttaaaggtggtcaa

SEQ ID NO: 5178093 - DNA, 25 bp, Homo sapien
ctgagggacaattaacttcagggag

SEQ ID NO: 5178094 - DNA, 25 bp, Homo sapien
tctgtagactggaacttaagttcat

SEQ ID NO: 5178095 - DNA, 25 bp, Homo sapien
tgtagactggaacttaagttcataa

SEQ ID NO: 5178096 - DNA, 25 bp, Homo sapien
tagactggaacttaagttcataatt

SEQ ID NO: 5178097 - DNA, 25 bp, Homo sapien
ctggaacttaagttcataattatct

SEQ ID NO: 5178098 - DNA, 25 bp, Homo sapien
ttattgatattaacccttgtaacca

SEQ ID NO: 5178099 - DNA, 25 bp, Homo sapien
tgtaaccaaatgctctatgatgagt

SEQ ID NO: 5178100 - DNA, 25 bp, Homo sapien
tattgatattaacccttgtaaccaa

SEQ ID NO: 5178101 - DNA, 25 bp, Homo sapien
cccttgtaaccaaatgctctatgat

SEQ ID NO: 5178102 - DNA, 25 bp, Homo sapien
ggtgcattaaatcgtacaaggataa

SEQ ID NO: 5178103 - DNA, 25 bp, Homo sapien
tatgctggcgtttaagaaaacctga

SEQ ID NO: 5178104 - DNA, 25 bp, Homo sapien
atttgctgccatggatatgccttgt

SEQ ID NO: 5178105 - DNA, 25 bp, Homo sapien
ttaaggcagttggtgcattaaatcg

SEQ ID NO: 5178106 - DNA, 25 bp, Homo sapien
tcattgattcttgtaaataagggcc

SEQ ID NO: 5178107 - DNA, 25 bp, Homo sapien
tcttgtaaataagggcctgaggcct

SEQ ID NO: 5178108 - DNA, 25 bp, Homo sapien
tctgaggtgacatagaccaaaatgt

SEQ ID NO: 5178109 - DNA, 25 bp, Homo sapien
tgaggcctgctccgaaaaggctgca

SEQ ID NO: 5178110 - DNA, 25 bp, Homo sapien
caaagggcctcttcattgaaacaaa

SEQ ID NO: 5178111 - DNA, 25 bp, Homo sapien
aacaaatactacatagatgtttgcc

SEQ ID NO: 5178112 - DNA, 25 bp, Homo sapien
gaaacaaatactacatagatgtttg

SEQ ID NO: 5178113 - DNA, 25 bp, Homo sapien
gggcctcttcattgaaacaaatact

SEQ ID NO: 5178114 - DNA, 25 bp, Homo sapien
caagcttggtttgagtctgccttct

SEQ ID NO: 5178115 - DNA, 25 bp, Homo sapien
gccttctcttttgtcgcatttgctg

SEQ ID NO: 5178116 - DNA, 25 bp, Homo sapien
tgctcttcctcaactagggtctgga

SEQ ID NO: 5178117 - DNA, 25 bp, Homo sapien
tcacaccacaatgcagtagtctagc

SEQ ID NO: 5178118 - DNA, 25 bp, Homo sapien
cctcaatttcaaaattactaggtat

SEQ ID NO: 5178119 - DNA, 25 bp, Homo sapien
tcaaaattactaggtatcatatgat

SEQ ID NO: 5178120 - DNA, 25 bp, Homo sapien
ttgattttcataattccgacttctg

SEQ ID NO: 5178121 - DNA, 25 bp, Homo sapien
tcataattccgacttctgaagtgct

SEQ ID NO: 5178122 - DNA, 25 bp, Homo sapien
tatctgtgtagtttgcatataaatg

SEQ ID NO: 5178123 - DNA, 25 bp, Homo sapien
caaatgccgggcatatgttgaagtc

SEQ ID NO: 5178124 - DNA, 25 bp, Homo sapien
aatttatggatagtgacaatgtgac

SEQ ID NO: 5178125 - DNA, 25 bp, Homo sapien
gaaattgggtccttacagatgtaac

SEQ ID NO: 5178126 - DNA, 25 bp, Homo sapien
tcttttttgcgtaatctgtttccat

SEQ ID NO: 5178127 - DNA, 25 bp, Homo sapien
ttcttttttgcgtaatctgtttcca

SEQ ID NO: 5178128 - DNA, 25 bp, Homo sapien
taccggcttagactcaatgtttttg

SEQ ID NO: 5178129 - DNA, 25 bp, Homo sapien
ttacaagagtatacatcatcagcca

SEQ ID NO: 5178130 - DNA, 25 bp, Homo sapien
tctgttcctggtaccggcttagact

SEQ ID NO: 5178131 - DNA, 25 bp, Homo sapien
caagagtatacatcatcagccaaat

SEQ ID NO: 5178132 - DNA, 25 bp, Homo sapien
gatatggtattttccattcgctgaa

SEQ ID NO: 5178133 - DNA, 25 bp, Homo sapien
tattacaacatacttaagccctttc

SEQ ID NO: 5178134 - DNA, 25 bp, Homo sapien
ctgtgttccctcgtctgatatggta

SEQ ID NO: 5178135 - DNA, 25 bp, Homo sapien
cgctgaagtgtttggtgtattacaa

SEQ ID NO: 5178136 - DNA, 25 bp, Homo sapien
ggccctgcagtaaaccatgaggctc

SEQ ID NO: 5178137 - DNA, 25 bp, Homo sapien
tgcagtaaaccatgaggctcttggc

SEQ ID NO: 5178138 - DNA, 25 bp, Homo sapien
ctggccctgcagtaaaccatgaggc

SEQ ID NO: 5178139 - DNA, 25 bp, Homo sapien
cctgcagtaaaccatgaggctcttg

SEQ ID NO: 5178140 - DNA, 25 bp, Homo sapien
taaaaatccaaaagtgacttgtctg

SEQ ID NO: 5178141 - DNA, 25 bp, Homo sapien
cactgggcaccattgagagaaattg

SEQ ID NO: 5178142 - DNA, 25 bp, Homo sapien
gcttgtcattgcacagcccactggg

SEQ ID NO: 5178143 - DNA, 25 bp, Homo sapien
caaaggccattgtatcctgtggtga

SEQ ID NO: 5178144 - DNA, 25 bp, Homo sapien
gctggcaaagctgttatcacctgat

SEQ ID NO: 5178145 - DNA, 25 bp, Homo sapien
tctttactcttacgggttatcacat

SEQ ID NO: 5178146 - DNA, 25 bp, Homo sapien
tttgtattttaggccttgcctttca

SEQ ID NO: 5178147 - DNA, 25 bp, Homo sapien
ttctctttactcttacgggttatca

SEQ ID NO: 5178148 - DNA, 25 bp, Homo sapien
tcttacgggttatcacatttttgta

SEQ ID NO: 5178149 - DNA, 25 bp, Homo sapien
cacgacatagctgaaatttaacaca

SEQ ID NO: 5178150 - DNA, 25 bp, Homo sapien
ttcctagttccccataaccgtctga

SEQ ID NO: 5178151 - DNA, 25 bp, Homo sapien
aagcactaagctgtgagtacacgac

SEQ ID NO: 5178152 - DNA, 25 bp, Homo sapien
tccccataaccgtctgaagcactaa

SEQ ID NO: 5178153 - DNA, 25 bp, Homo sapien
catcctccatgactcattgagcgat

SEQ ID NO: 5178154 - DNA, 25 bp, Homo sapien
gactcattgagcgatagaaaaggac

SEQ ID NO: 5178155 - DNA, 25 bp, Homo sapien
cattgagcgatagaaaaggacatcc

SEQ ID NO: 5178156 - DNA, 25 bp, Homo sapien
gcgatagaaaaggacatcctgtcct

SEQ ID NO: 5178157 - DNA, 25 bp, Homo sapien
ggctcatagctttatggatatcagg

SEQ ID NO: 5178158 - DNA, 25 bp, Homo sapien
tcatagctttatggatatcagggac

SEQ ID NO: 5178159 - DNA, 25 bp, Homo sapien
tttcttggctcatagctttatggat

SEQ ID NO: 5178160 - DNA, 25 bp, Homo sapien
cttggctcatagctttatggatatc

SEQ ID NO: 5178161 - DNA, 25 bp, Homo sapien
tctggaaagtacacacctcaacata

SEQ ID NO: 5178162 - DNA, 25 bp, Homo sapien
gttggccacaccttagattataata

SEQ ID NO: 5178163 - DNA, 25 bp, Homo sapien
gaacacttattgtcatgtataagct

SEQ ID NO: 5178164 - DNA, 25 bp, Homo sapien
aagagtaaggtgacttaacactgtc

SEQ ID NO: 5178165 - DNA, 25 bp, Homo sapien
atcaggagagtttctatgctctcag

SEQ ID NO: 5178166 - DNA, 25 bp, Homo sapien
tagtagctctccttatgaaacatgc

SEQ ID NO: 5178167 - DNA, 25 bp, Homo sapien
cacggtctgggagcaacatcaggag

SEQ ID NO: 5178168 - DNA, 25 bp, Homo sapien
ggaatagaagctttgccagcacggg

SEQ ID NO: 5178169 - DNA, 25 bp, Homo sapien
tcagtgttagtttataacacatgag

SEQ ID NO: 5178170 - DNA, 25 bp, Homo sapien
ctcagctttgcaaacgggatgattt

SEQ ID NO: 5178171 - DNA, 25 bp, Homo sapien
acatttatgactaactaactgtgac

SEQ ID NO: 5178172 - DNA, 25 bp, Homo sapien
ctttgcaaacgggatgattttcagt

SEQ ID NO: 5178173 - DNA, 25 bp, Homo sapien
gctggatggttaattccactggtta

SEQ ID NO: 5178174 - DNA, 25 bp, Homo sapien
aaagttgagagcttgagtaaccagg

SEQ ID NO: 5178175 - DNA, 25 bp, Homo sapien
ttctggcaaactgaaagttgtagaa

SEQ ID NO: 5178176 - DNA, 25 bp, Homo sapien
ccactggttaattctggcaaactga

SEQ ID NO: 5178177 - DNA, 25 bp, Homo sapien
ctgtcctcagccatgacgtggagcc

SEQ ID NO: 5178178 - DNA, 25 bp, Homo sapien
taactcagcattgataactccattc

SEQ ID NO: 5178179 - DNA, 25 bp, Homo sapien
tgactgccaaaaagagcgatgattc

SEQ ID NO: 5178180 - DNA, 25 bp, Homo sapien
ggagccacactacccatctggcaga

SEQ ID NO: 5178181 - DNA, 25 bp, Homo sapien
tgtatactcccataagctaacgcca

SEQ ID NO: 5178182 - DNA, 25 bp, Homo sapien
ttggtttccatattagagttgatga

SEQ ID NO: 5178183 - DNA, 25 bp, Homo sapien
gagttgatgatataggaatgatttc

SEQ ID NO: 5178184 - DNA, 25 bp, Homo sapien
cgtcttccgttacagtcttaatata

SEQ ID NO: 5178185 - DNA, 25 bp, Homo sapien
tttactttccttaagctcgtattgc

SEQ ID NO: 5178186 - DNA, 25 bp, Homo sapien
ctaaagaaaagtcatacttggagaa

SEQ ID NO: 5178187 - DNA, 25 bp, Homo sapien
tcgtattgcttatgcattgcaagcc

SEQ ID NO: 5178188 - DNA, 25 bp, Homo sapien
gaagacaggcacttctaaagaaaag

SEQ ID NO: 5178189 - DNA, 25 bp, Homo sapien
ctcttcctttcttgggaccgagtag

SEQ ID NO: 5178190 - DNA, 25 bp, Homo sapien
gggagagcagtatgtcctcccttaa

SEQ ID NO: 5178191 - DNA, 25 bp, Homo sapien
cctttcttgggaccgagtagcaaag

SEQ ID NO: 5178192 - DNA, 25 bp, Homo sapien
ggagagcagtatgtcctcccttaaa

SEQ ID NO: 5178193 - DNA, 25 bp, Homo sapien
ttcaagcactattggacacagggtc

SEQ ID NO: 5178194 - DNA, 25 bp, Homo sapien
tagaggcatacaacgttcaggcaat

SEQ ID NO: 5178195 - DNA, 25 bp, Homo sapien
gacaataatacatagggacccaaag

SEQ ID NO: 5178196 - DNA, 25 bp, Homo sapien
gaagagattgccacctaatcccaag

SEQ ID NO: 5178197 - DNA, 25 bp, Homo sapien
tactgttagtaagggatgatgactt

SEQ ID NO: 5178198 - DNA, 25 bp, Homo sapien
tgatgacttagtaagtccggtccat

SEQ ID NO: 5178199 - DNA, 25 bp, Homo sapien
gcttttgagaactctatactgttag

SEQ ID NO: 5178200 - DNA, 25 bp, Homo sapien
cattgattctgtgatagtcttggca

SEQ ID NO: 5178201 - DNA, 25 bp, Homo sapien
tgagtaaagactggccctgaaccca

SEQ ID NO: 5178202 - DNA, 25 bp, Homo sapien
tacttatattgaggatgtacaacca

SEQ ID NO: 5178203 - DNA, 25 bp, Homo sapien
ggatgtacaaccagccccacaagga

SEQ ID NO: 5178204 - DNA, 25 bp, Homo sapien
cacaaggacattcctaggggtgtct

SEQ ID NO: 5178205 - DNA, 25 bp, Homo sapien
ctaacttgcagtgatggtatcattt

SEQ ID NO: 5178206 - DNA, 25 bp, Homo sapien
aacttgcagtgatggtatcattttt

SEQ ID NO: 5178207 - DNA, 25 bp, Homo sapien
taacttgcagtgatggtatcatttt

SEQ ID NO: 5178208 - DNA, 25 bp, Homo sapien
tctaacttgcagtgatggtatcatt

SEQ ID NO: 5178209 - DNA, 25 bp, Homo sapien
cagtgccatccaattctgagtttcc

SEQ ID NO: 5178210 - DNA, 25 bp, Homo sapien
agtgccatccaattctgagtttcca

SEQ ID NO: 5178211 - DNA, 25 bp, Homo sapien
gtgccatccaattctgagtttccat

SEQ ID NO: 5178212 - DNA, 25 bp, Homo sapien
tgagcagacccaactcagcagattt

SEQ ID NO: 5178213 - DNA, 25 bp, Homo sapien
ccatggttgagcagacccaactcag

SEQ ID NO: 5178214 - DNA, 25 bp, Homo sapien
caactcagcagattttggtagtgga

SEQ ID NO: 5178215 - DNA, 25 bp, Homo sapien
cttttttgaagcgatggtgccatgg

SEQ ID NO: 5178216 - DNA, 25 bp, Homo sapien
agtacatgtgctcttcactgaggca

SEQ ID NO: 5178217 - DNA, 25 bp, Homo sapien
taaaagtctggtaatagctgaaaag

SEQ ID NO: 5178218 - DNA, 25 bp, Homo sapien
aagagctctaatcgtaaagtttccg

SEQ ID NO: 5178219 - DNA, 25 bp, Homo sapien
gaacagggtcacctacactgaaatt

SEQ ID NO: 5178220 - DNA, 25 bp, Homo sapien
gagccacagctcagactgcaactgg

SEQ ID NO: 5178221 - DNA, 25 bp, Homo sapien
ctgagccacagctcagactgcaact

SEQ ID NO: 5178222 - DNA, 25 bp, Homo sapien
gccaacattctatgatgaggagagg

SEQ ID NO: 5178223 - DNA, 25 bp, Homo sapien
caggttaggggaggattacccagag

SEQ ID NO: 5178224 - DNA, 25 bp, Homo sapien
caccacccaaaataagattcagtca

SEQ ID NO: 5178225 - DNA, 25 bp, Homo sapien
cacttggaaatcatagaggcattac

SEQ ID NO: 5178226 - DNA, 25 bp, Homo sapien
tgtgtccgtcgaattgtccaggtca

SEQ ID NO: 5178227 - DNA, 25 bp, Homo sapien
gcagtgttttcagcctttgtgtccg

SEQ ID NO: 5178228 - DNA, 25 bp, Homo sapien
ttatcccctgggttgtgtgagtact

SEQ ID NO: 5178229 - DNA, 25 bp, Homo sapien
tatcccctgggttgtgtgagtactt

SEQ ID NO: 5178230 - DNA, 25 bp, Homo sapien
cataggaagattgggcataatgcaa

SEQ ID NO: 5178231 - DNA, 25 bp, Homo sapien
ttctctcggataaactcataggaag

SEQ ID NO: 5178232 - DNA, 25 bp, Homo sapien
agaagagagggaagtttctctcgga

SEQ ID NO: 5178233 - DNA, 25 bp, Homo sapien
aactcataggaagattgggcataat

SEQ ID NO: 5178234 - DNA, 25 bp, Homo sapien
ggagatttgggatatgcctcaagct

SEQ ID NO: 5178235 - DNA, 25 bp, Homo sapien
gtactgtgaacagaagttgtgaagg

SEQ ID NO: 5178236 - DNA, 25 bp, Homo sapien
catcttttgatcgagagaagagctg

SEQ ID NO: 5178237 - DNA, 25 bp, Homo sapien
gacagttgttgtactgtactgtgaa

SEQ ID NO: 5178238 - DNA, 25 bp, Homo sapien
aaatttgagaaccaggtattgttgt

SEQ ID NO: 5178239 - DNA, 25 bp, Homo sapien
taaatttgagaaccaggtattgttg

SEQ ID NO: 5178240 - DNA, 25 bp, Homo sapien
caacagatgctatcgaggatataca

SEQ ID NO: 5178241 - DNA, 25 bp, Homo sapien
aacactgttggtcagaatgcaaatt

SEQ ID NO: 5178242 - DNA, 25 bp, Homo sapien
aatgaaatgccatcttataccagac

SEQ ID NO: 5178243 - DNA, 25 bp, Homo sapien
ttacttgagtcactgtagaaagcag

SEQ ID NO: 5178244 - DNA, 25 bp, Homo sapien
taaacaaattctaaaagagctgtaa

SEQ ID NO: 5178245 - DNA, 25 bp, Homo sapien
cagtaaaaaccagaaagcctgctaa

SEQ ID NO: 5178246 - DNA, 25 bp, Homo sapien
aaccagaaagcctgctaaacaaatt

SEQ ID NO: 5178247 - DNA, 25 bp, Homo sapien
ttccagtaaaaaccagaaagcctgc

SEQ ID NO: 5178248 - DNA, 25 bp, Homo sapien
ggtgacgagcagaaactacttgaat

SEQ ID NO: 5178249 - DNA, 25 bp, Homo sapien
gcagaaactacttgaattctctcca

SEQ ID NO: 5178250 - DNA, 25 bp, Homo sapien
taaatatggaagttgggtgacgagc

SEQ ID NO: 5178251 - DNA, 25 bp, Homo sapien
tgattagtaaatatggaagttgggt

SEQ ID NO: 5178252 - DNA, 25 bp, Homo sapien
gaatagtggaatcaactagaacatg

SEQ ID NO: 5178253 - DNA, 25 bp, Homo sapien
agtggaatcaactagaacatggctg

SEQ ID NO: 5178254 - DNA, 25 bp, Homo sapien
ttattgctcatggtaaacagctgag

SEQ ID NO: 5178255 - DNA, 25 bp, Homo sapien
agtgatgtgaatagtggaatcaact

SEQ ID NO: 5178256 - DNA, 25 bp, Homo sapien
aaagactgatattggtgtacataaa

SEQ ID NO: 5178257 - DNA, 25 bp, Homo sapien
gagaatgtccattatataacttaag

SEQ ID NO: 5178258 - DNA, 25 bp, Homo sapien
aataaaattatagaggcgccaagca

SEQ ID NO: 5178259 - DNA, 25 bp, Homo sapien
taaaacaatacatgtgcaagcctgc

SEQ ID NO: 5178260 - DNA, 25 bp, Homo sapien
aatgaatacgatttgaatctcttga

SEQ ID NO: 5178261 - DNA, 25 bp, Homo sapien
tttctgtgtcaatcgaatagtgaac

SEQ ID NO: 5178262 - DNA, 25 bp, Homo sapien
gggttttctgtgtcaatcgaatagt

SEQ ID NO: 5178263 - DNA, 25 bp, Homo sapien
tctgtgtcaatcgaatagtgaacca

SEQ ID NO: 5178264 - DNA, 25 bp, Homo sapien
cttgtaaagccttaagttcagcatg

SEQ ID NO: 5178265 - DNA, 25 bp, Homo sapien
tcgatgaccatctgcttgtaaagcc

SEQ ID NO: 5178266 - DNA, 25 bp, Homo sapien
gaccatctgcttgtaaagccttaag

SEQ ID NO: 5178267 - DNA, 25 bp, Homo sapien
tatgctcgatgaccatctgcttgta

SEQ ID NO: 5178268 - DNA, 25 bp, Homo sapien
taaaggcatatcttgggtgcttcat

SEQ ID NO: 5178269 - DNA, 25 bp, Homo sapien
ctaaaggcatatcttgggtgcttca

SEQ ID NO: 5178270 - DNA, 25 bp, Homo sapien
tctctgatccaatcatcaagatcca

SEQ ID NO: 5178271 - DNA, 25 bp, Homo sapien
gaagcatctctgatccaatcatcaa

SEQ ID NO: 5178272 - DNA, 25 bp, Homo sapien
aatccaacaacccttggcccaagct

SEQ ID NO: 5178273 - DNA, 25 bp, Homo sapien
tggtctacagaagcatctctgatcc

SEQ ID NO: 5178274 - DNA, 25 bp, Homo sapien
ttcttcttgatccatgtgactgaat

SEQ ID NO: 5178275 - DNA, 25 bp, Homo sapien
gttcttcttgatccatgtgactgaa

SEQ ID NO: 5178276 - DNA, 25 bp, Homo sapien
cagtcatgttgttctccgtgcatcc

SEQ ID NO: 5178277 - DNA, 25 bp, Homo sapien
tcatgttgttctccgtgcatccccc

SEQ ID NO: 5178278 - DNA, 25 bp, Homo sapien
tcagtcatgttgttctccgtgcatc

SEQ ID NO: 5178279 - DNA, 25 bp, Homo sapien
agtcatgttgttctccgtgcatccc

SEQ ID NO: 5178280 - DNA, 25 bp, Homo sapien
gggacagatatgttgaatccgatta

SEQ ID NO: 5178281 - DNA, 25 bp, Homo sapien
tttcacagactaaggcatgcaagat

SEQ ID NO: 5178282 - DNA, 25 bp, Homo sapien
tctgctccaacacaagtaggtattg

SEQ ID NO: 5178283 - DNA, 25 bp, Homo sapien
gccttttctaaaccatgttggataa

SEQ ID NO: 5178284 - DNA, 25 bp, Homo sapien
tctttcaggatttaaatatcgattg

SEQ ID NO: 5178285 - DNA, 25 bp, Homo sapien
tttcaggatttaaatatcgattggg

SEQ ID NO: 5178286 - DNA, 25 bp, Homo sapien
gatctttcaggatttaaatatcgat

SEQ ID NO: 5178287 - DNA, 25 bp, Homo sapien
tcaggatttaaatatcgattgggca

SEQ ID NO: 5178288 - DNA, 25 bp, Homo sapien
ggtaatgactgccacccatattcat

SEQ ID NO: 5178289 - DNA, 25 bp, Homo sapien
acaaagtgaaagatgctcctttccc

SEQ ID NO: 5178290 - DNA, 25 bp, Homo sapien
ttcctgacacaaagtgaaagatgct

SEQ ID NO: 5178291 - DNA, 25 bp, Homo sapien
cacaggaaggagtgtggtaatgact

SEQ ID NO: 5178292 - DNA, 25 bp, Homo sapien
tctgctaaattatacgttaattggt

SEQ ID NO: 5178293 - DNA, 25 bp, Homo sapien
ttaaatggttattaatgcttgaata

SEQ ID NO: 5178294 - DNA, 25 bp, Homo sapien
ttgttctgctaaattatacgttaat

SEQ ID NO: 5178295 - DNA, 25 bp, Homo sapien
gggcactggttgaaatgggataata

SEQ ID NO: 5178296 - DNA, 25 bp, Homo sapien
gttctctgatcccaagagtaaatag

SEQ ID NO: 5178297 - DNA, 25 bp, Homo sapien
tagccaaggcactttgatcaagtgt

SEQ ID NO: 5178298 - DNA, 25 bp, Homo sapien
cccaagagtaaatagccaaggcact

SEQ ID NO: 5178299 - DNA, 25 bp, Homo sapien
ctggataagagtttggaaggttgta

SEQ ID NO: 5178300 - DNA, 25 bp, Homo sapien
tctgtcaaagtgagtacttggctgc

SEQ ID NO: 5178301 - DNA, 25 bp, Homo sapien
tctctgtcaaagtgagtacttggct

SEQ ID NO: 5178302 - DNA, 25 bp, Homo sapien
ctctgtcaaagtgagtacttggctg

SEQ ID NO: 5178303 - DNA, 25 bp, Homo sapien
agcggaagccctttccaggattcat

SEQ ID NO: 5178304 - DNA, 25 bp, Homo sapien
cttccagcggaagccctttccagga

SEQ ID NO: 5178305 - DNA, 25 bp, Homo sapien
ttccagcggaagccctttccaggat

SEQ ID NO: 5178306 - DNA, 25 bp, Homo sapien
ccagcggaagccctttccaggattc

SEQ ID NO: 5178307 - DNA, 25 bp, Homo sapien
gcttattccattggtagatgcagaa

SEQ ID NO: 5178308 - DNA, 25 bp, Homo sapien
ctgcttattccattggtagatgcag

SEQ ID NO: 5178309 - DNA, 25 bp, Homo sapien
tattccattggtagatgcagaagta

SEQ ID NO: 5178310 - DNA, 25 bp, Homo sapien
tggtaaattcaaatgattgaattca

SEQ ID NO: 5178311 - DNA, 25 bp, Homo sapien
ggagtgaccaagtgctccagccgcc

SEQ ID NO: 5178312 - DNA, 25 bp, Homo sapien
agagaggtcaagtgcacaggctcct

SEQ ID NO: 5178313 - DNA, 25 bp, Homo sapien
tggagtgaccaagtgctccagccgc

SEQ ID NO: 5178314 - DNA, 25 bp, Homo sapien
agtgaccaagtgctccagccgccat

SEQ ID NO: 5178315 - DNA, 25 bp, Homo sapien
caaacttctgtatttacagaggctc

SEQ ID NO: 5178316 - DNA, 25 bp, Homo sapien
ctcttccttcgatatggtgtttcca

SEQ ID NO: 5178317 - DNA, 25 bp, Homo sapien
agaggctcttccttcgatatggtgt

SEQ ID NO: 5178318 - DNA, 25 bp, Homo sapien
tggtgtttccagatttcagtctctt

SEQ ID NO: 5178319 - DNA, 25 bp, Homo sapien
catttccacatggaatcaatgtctg

SEQ ID NO: 5178320 - DNA, 25 bp, Homo sapien
catggaatcaatgtctggtttggtt

SEQ ID NO: 5178321 - DNA, 25 bp, Homo sapien
tctttctcccaagcatttccacatg

SEQ ID NO: 5178322 - DNA, 25 bp, Homo sapien
ggtttggtttatagctgctgaccat

SEQ ID NO: 5178323 - DNA, 25 bp, Homo sapien
tatcagcactcctcgactactggca

SEQ ID NO: 5178324 - DNA, 25 bp, Homo sapien
ttttctatcagcactcctcgactac

SEQ ID NO: 5178325 - DNA, 25 bp, Homo sapien
ctactggcatgtggggccaatttgt

SEQ ID NO: 5178326 - DNA, 25 bp, Homo sapien
agcactcctcgactactggcatgtg

SEQ ID NO: 5178327 - DNA, 25 bp, Homo sapien
ggccagtttccacactttgtaagac

SEQ ID NO: 5178328 - DNA, 25 bp, Homo sapien
tccacaggccagtttccacactttg

SEQ ID NO: 5178329 - DNA, 25 bp, Homo sapien
cactttgtaagacttgtggagattt

SEQ ID NO: 5178330 - DNA, 25 bp, Homo sapien
acactttgtaagacttgtggagatt

SEQ ID NO: 5178331 - DNA, 25 bp, Homo sapien
ttatattgcaaatatcgtatttccg

SEQ ID NO: 5178332 - DNA, 25 bp, Homo sapien
tataggcaaggaagttggaaattac

SEQ ID NO: 5178333 - DNA, 25 bp, Homo sapien
tatcgtatttccgtaggtccagaag

SEQ ID NO: 5178334 - DNA, 25 bp, Homo sapien
tcatatgatataggcaaggaagttg

SEQ ID NO: 5178335 - DNA, 25 bp, Homo sapien
ttcagctgttagatgaatgagagac

SEQ ID NO: 5178336 - DNA, 25 bp, Homo sapien
cttcagctgttagatgaatgagaga

SEQ ID NO: 5178337 - DNA, 25 bp, Homo sapien
tcagctgttagatgaatgagagaca

SEQ ID NO: 5178338 - DNA, 25 bp, Homo sapien
cagctgttagatgaatgagagacat

SEQ ID NO: 5178339 - DNA, 25 bp, Homo sapien
aaggagcttcactgcttgttataag

SEQ ID NO: 5178340 - DNA, 25 bp, Homo sapien
agaaagtccattcagtagcatcaaa

SEQ ID NO: 5178341 - DNA, 25 bp, Homo sapien
gctttggatgtgaggaaaattccac

SEQ ID NO: 5178342 - DNA, 25 bp, Homo sapien
tctccctccgaagaaagaaagtcca

SEQ ID NO: 5178343 - DNA, 25 bp, Homo sapien
cctgatgtttatgagaaccttcttc

SEQ ID NO: 5178344 - DNA, 25 bp, Homo sapien
ctgatgtttatgagaaccttcttcc

SEQ ID NO: 5178345 - DNA, 25 bp, Homo sapien
tcctgatgtttatgagaaccttctt

SEQ ID NO: 5178346 - DNA, 25 bp, Homo sapien
tcaaaaggcaaggttgaggttgaag

SEQ ID NO: 5178347 - DNA, 25 bp, Homo sapien
aaggcaaggttgaggttgaagggca

SEQ ID NO: 5178348 - DNA, 25 bp, Homo sapien
caaaaggcaaggttgaggttgaagg

SEQ ID NO: 5178349 - DNA, 25 bp, Homo sapien
gggctctctgcaaagtaatgaggct

SEQ ID NO: 5178350 - DNA, 25 bp, Homo sapien
tagcattatgattcaagtgcaggaa

SEQ ID NO: 5178351 - DNA, 25 bp, Homo sapien
gaaaggtagtacttgaagttcaggc

SEQ ID NO: 5178352 - DNA, 25 bp, Homo sapien
gttcctgatagacaagaaaagtaag

SEQ ID NO: 5178353 - DNA, 25 bp, Homo sapien
aatgtagatatccttgaattctaaa

SEQ ID NO: 5178354 - DNA, 25 bp, Homo sapien
tgttatagtcaagctgaatcctcca

SEQ ID NO: 5178355 - DNA, 25 bp, Homo sapien
tgtagatatccttgaattctaaaat

SEQ ID NO: 5178356 - DNA, 25 bp, Homo sapien
taaaattatgttatagtcaagctga

SEQ ID NO: 5178357 - DNA, 25 bp, Homo sapien
tcctgatagaattataatttcctgc

SEQ ID NO: 5178358 - DNA, 25 bp, Homo sapien
taagtagacacatgtaatgacatcc

SEQ ID NO: 5178359 - DNA, 25 bp, Homo sapien
cagtaaaattcacactaggttcacc

SEQ ID NO: 5178360 - DNA, 25 bp, Homo sapien
ggttcaccttgcattgctaatttca

SEQ ID NO: 5178361 - DNA, 25 bp, Homo sapien
ttgacattgagctcttaagtgggta

SEQ ID NO: 5178362 - DNA, 25 bp, Homo sapien
gagaggtgatgctcacttgaccact

SEQ ID NO: 5178363 - DNA, 25 bp, Homo sapien
cagatattgctattgtgactccatt

SEQ ID NO: 5178364 - DNA, 25 bp, Homo sapien
cacttgaccacttggtgtttcgttt

SEQ ID NO: 5178365 - DNA, 25 bp, Homo sapien
ttagtctacattccgtgattggtat

SEQ ID NO: 5178366 - DNA, 25 bp, Homo sapien
tttccttcataatgctccttgtcat

SEQ ID NO: 5178367 - DNA, 25 bp, Homo sapien
ttccgtgattggtatttttccttca

SEQ ID NO: 5178368 - DNA, 25 bp, Homo sapien
tcttccttagcttttcgttgtctca

SEQ ID NO: 5178369 - DNA, 25 bp, Homo sapien
gacagacgctcaagccacctgtctt

SEQ ID NO: 5178370 - DNA, 25 bp, Homo sapien
gagtcattttcatagggtgtgtacg

SEQ ID NO: 5178371 - DNA, 25 bp, Homo sapien
tcatagggtgtgtacgacagacgct

SEQ ID NO: 5178372 - DNA, 25 bp, Homo sapien
tgtgtacgacagacgctcaagccac

SEQ ID NO: 5178373 - DNA, 25 bp, Homo sapien
aaattgaattagaatgctggctttc

SEQ ID NO: 5178374 - DNA, 25 bp, Homo sapien
gattttgtttatccgaaaatggcaa

SEQ ID NO: 5178375 - DNA, 25 bp, Homo sapien
tctcttttgaagaggctcccctgct

SEQ ID NO: 5178376 - DNA, 25 bp, Homo sapien
gatcaaataaaacaaaggtcgatgg

SEQ ID NO: 5178377 - DNA, 25 bp, Homo sapien
tcatggcccagttttctactgtcac

SEQ ID NO: 5178378 - DNA, 25 bp, Homo sapien
cgtctgtggaattgataatgcttga

SEQ ID NO: 5178379 - DNA, 25 bp, Homo sapien
tactgtcactcccttatagcaagga

SEQ ID NO: 5178380 - DNA, 25 bp, Homo sapien
aatctgttgatggttgtgacctgag

SEQ ID NO: 5178381 - DNA, 25 bp, Homo sapien
tagttccctgttccccagttagcat

SEQ ID NO: 5178382 - DNA, 25 bp, Homo sapien
atagttccctgttccccagttagca

SEQ ID NO: 5178383 - DNA, 25 bp, Homo sapien
agatgcaggcttttgattaagatga

SEQ ID NO: 5178384 - DNA, 25 bp, Homo sapien
ggagtaatggtcagatgcaggcttt

SEQ ID NO: 5178385 - DNA, 25 bp, Homo sapien
ttagttgtatgtgagtgaacgtggt

SEQ ID NO: 5178386 - DNA, 25 bp, Homo sapien
gagtgaacgtggtgctttcctgtgc

SEQ ID NO: 5178387 - DNA, 25 bp, Homo sapien
cacattgcttgcagtttcaaaacct

SEQ ID NO: 5178388 - DNA, 25 bp, Homo sapien
cagtagcagtttgaatgttggcaaa

SEQ ID NO: 5178389 - DNA, 25 bp, Homo sapien
ttttcactgtaatagcagagagctg

SEQ ID NO: 5178390 - DNA, 25 bp, Homo sapien
tagacttgtgaactctgacacgcat

SEQ ID NO: 5178391 - DNA, 25 bp, Homo sapien
gaaatggccacgatgatacagcttg

SEQ ID NO: 5178392 - DNA, 25 bp, Homo sapien
cagtttgtcacagtaattacagggt

SEQ ID NO: 5178393 - DNA, 25 bp, Homo sapien
tatcattagttgaaatggccacgat

SEQ ID NO: 5178394 - DNA, 25 bp, Homo sapien
tgaagtctattgctaggcattctaa

SEQ ID NO: 5178395 - DNA, 25 bp, Homo sapien
tgggctcttttactcaggctgctcc

SEQ ID NO: 5178396 - DNA, 25 bp, Homo sapien
caatgggctcttttactcaggctgc

SEQ ID NO: 5178397 - DNA, 25 bp, Homo sapien
tccaatgggctcttttactcaggct

SEQ ID NO: 5178398 - DNA, 25 bp, Homo sapien
tgttccaatgggctcttttactcag

SEQ ID NO: 5178399 - DNA, 25 bp, Homo sapien
ggcaaatccgatcatctacttcctc

SEQ ID NO: 5178400 - DNA, 25 bp, Homo sapien
agccagacctggcaaatccgatcat

SEQ ID NO: 5178401 - DNA, 25 bp, Homo sapien
gccagacctggcaaatccgatcatc

SEQ ID NO: 5178402 - DNA, 25 bp, Homo sapien
gacctggcaaatccgatcatctact

SEQ ID NO: 5178403 - DNA, 25 bp, Homo sapien
ggaatccatggactatctatactat

SEQ ID NO: 5178404 - DNA, 25 bp, Homo sapien
cagctggctctgttggtcatctgag

SEQ ID NO: 5178405 - DNA, 25 bp, Homo sapien
ctgagggagcatcctggacataatc

SEQ ID NO: 5178406 - DNA, 25 bp, Homo sapien
tctttatcggatttttgaggagagt

SEQ ID NO: 5178407 - DNA, 25 bp, Homo sapien
gtgctgtacctaatggctttaggtc

SEQ ID NO: 5178408 - DNA, 25 bp, Homo sapien
tgtgctgtacctaatggctttaggt

SEQ ID NO: 5178409 - DNA, 25 bp, Homo sapien
ttctgctccctgtccaccttacccc

SEQ ID NO: 5178410 - DNA, 25 bp, Homo sapien
gcctccatcccttaacccataagtc

SEQ ID NO: 5178411 - DNA, 25 bp, Homo sapien
tgctccctgtccaccttaccccagg

SEQ ID NO: 5178412 - DNA, 25 bp, Homo sapien
ctccatcccttaacccataagtcat

SEQ ID NO: 5178413 - DNA, 25 bp, Homo sapien
cattagaaaccgaaaggacaatggg

SEQ ID NO: 5178414 - DNA, 25 bp, Homo sapien
ccaagcatgggctgcaatcgaaaat

SEQ ID NO: 5178415 - DNA, 25 bp, Homo sapien
gacaatggggtctcctggcaagttc

SEQ ID NO: 5178416 - DNA, 25 bp, Homo sapien
caatcgaaaatccttttgctcccca

SEQ ID NO: 5178417 - DNA, 25 bp, Homo sapien
gaatctttgccaaacaagtgcagat

SEQ ID NO: 5178418 - DNA, 25 bp, Homo sapien
agtacagggccgctgctattgaatc

SEQ ID NO: 5178419 - DNA, 25 bp, Homo sapien
taatttctgcaagagtgttgtctgg

SEQ ID NO: 5178420 - DNA, 25 bp, Homo sapien
ttctgcaagagtgttgtctggaagc

SEQ ID NO: 5178421 - DNA, 25 bp, Homo sapien
gctaacattttgccaggcaacgcca

SEQ ID NO: 5178422 - DNA, 25 bp, Homo sapien
ctaacattttgccaggcaacgccat

SEQ ID NO: 5178423 - DNA, 25 bp, Homo sapien
tccattggacagctggtcatgtttc

SEQ ID NO: 5178424 - DNA, 25 bp, Homo sapien
cagctggtcatgtttcttaatccca

SEQ ID NO: 5178425 - DNA, 25 bp, Homo sapien
ggacagctggtcatgtttcttaatc

SEQ ID NO: 5178426 - DNA, 25 bp, Homo sapien
ctgactccattggacagctggtcat

SEQ ID NO: 5178427 - DNA, 25 bp, Homo sapien
ctgcagggccgcgggtggggtcggt

SEQ ID NO: 5178428 - DNA, 25 bp, Homo sapien
cgggtggggtcggttttggctgctg

SEQ ID NO: 5178429 - DNA, 25 bp, Homo sapien
gctgctgacagggttatttaataaa

SEQ ID NO: 5178430 - DNA, 25 bp, Homo sapien
ttggctgctgacagggttatttaat

SEQ ID NO: 5178431 - DNA, 25 bp, Homo sapien
gaggtcgcttgtccgccgctgtctg

SEQ ID NO: 5178432 - DNA, 25 bp, Homo sapien
tggctgccggtgtccggttcgggcg

SEQ ID NO: 5178433 - DNA, 25 bp, Homo sapien
gtctcgtggttcctccttacggctg

SEQ ID NO: 5178434 - DNA, 25 bp, Homo sapien
gaaggcctgggtctcgtggttcctc

SEQ ID NO: 5178435 - DNA, 25 bp, Homo sapien
cgcggcacggctgcccacagggcta

SEQ ID NO: 5178436 - DNA, 25 bp, Homo sapien
aggccgcgaccctttcgtgacagga

SEQ ID NO: 5178437 - DNA, 25 bp, Homo sapien
gcgaccctttcgtgacaggaggaga

SEQ ID NO: 5178438 - DNA, 25 bp, Homo sapien
gctacaggccgcgaccctttcgtga

SEQ ID NO: 5178439 - DNA, 25 bp, Homo sapien
cgaggccatgtggtagctgggggcg

SEQ ID NO: 5178440 - DNA, 25 bp, Homo sapien
agcgaggccatgtggtagctggggg

SEQ ID NO: 5178441 - DNA, 25 bp, Homo sapien
aggccatgtggtagctgggggcgct

SEQ ID NO: 5178442 - DNA, 25 bp, Homo sapien
gccatgtggtagctgggggcgctgg

SEQ ID NO: 5178443 - DNA, 25 bp, Homo sapien
gtcggggtgcaggtcccccacatac

SEQ ID NO: 5178444 - DNA, 25 bp, Homo sapien
ctaaagacccggatggtgagggtgg

SEQ ID NO: 5178445 - DNA, 25 bp, Homo sapien
cccggatggtgagggtggacctgtc

SEQ ID NO: 5178446 - DNA, 25 bp, Homo sapien
tgagggtggacctgtcgagctaaac

SEQ ID NO: 5178447 - DNA, 25 bp, Homo sapien
gacctgtcgagctaaacttctcttg

SEQ ID NO: 5178448 - DNA, 25 bp, Homo sapien
cgcgtctgccggctgcaggaagttc

SEQ ID NO: 5178449 - DNA, 25 bp, Homo sapien
acacgtagcccacgaagaggtgggt

SEQ ID NO: 5178450 - DNA, 25 bp, Homo sapien
ttcacggacacgtagcccacgaaga

SEQ ID NO: 5178451 - DNA, 25 bp, Homo sapien
gcaggaagttcacggacacgtagcc

SEQ ID NO: 5178452 - DNA, 25 bp, Homo sapien
cactccacttttgcgcagcgataga

SEQ ID NO: 5178453 - DNA, 25 bp, Homo sapien
tccacttttgcgcagcgatagatcg

SEQ ID NO: 5178454 - DNA, 25 bp, Homo sapien
actccacttttgcgcagcgatagat

SEQ ID NO: 5178455 - DNA, 25 bp, Homo sapien
cacttttgcgcagcgatagatcgcg

SEQ ID NO: 5178456 - DNA, 25 bp, Homo sapien
cacacagtgctttctcaacggattt

SEQ ID NO: 5178457 - DNA, 25 bp, Homo sapien
acacagtgctttctcaacggatttg

SEQ ID NO: 5178458 - DNA, 25 bp, Homo sapien
cacagtgctttctcaacggatttgt

SEQ ID NO: 5178459 - DNA, 25 bp, Homo sapien
ttagaaccattttcatcacaaacta

SEQ ID NO: 5178460 - DNA, 25 bp, Homo sapien
cttagaaccattttcatcacaaact

SEQ ID NO: 5178461 - DNA, 25 bp, Homo sapien
tagaaccattttcatcacaaactac

SEQ ID NO: 5178462 - DNA, 25 bp, Homo sapien
cctgtgtctcaaagtgtacagatcc

SEQ ID NO: 5178463 - DNA, 25 bp, Homo sapien
tgtctcaaagtgtacagatccacag

SEQ ID NO: 5178464 - DNA, 25 bp, Homo sapien
ctgcttcctgtgtctcaaagtgtac

SEQ ID NO: 5178465 - DNA, 25 bp, Homo sapien
tctcaaagtgtacagatccacagcc

SEQ ID NO: 5178466 - DNA, 25 bp, Homo sapien
ttttacacttgaggcaggtccaact

SEQ ID NO: 5178467 - DNA, 25 bp, Homo sapien
tattacttttacacttgaggcaggt

SEQ ID NO: 5178468 - DNA, 25 bp, Homo sapien
cagttattacttttacacttgaggc

SEQ ID NO: 5178469 - DNA, 25 bp, Homo sapien
catcagttattacttttacacttga

SEQ ID NO: 5178470 - DNA, 25 bp, Homo sapien
atccatagctgtctgtggatcttca

SEQ ID NO: 5178471 - DNA, 25 bp, Homo sapien
caaatgtaagtttgatttccactga

SEQ ID NO: 5178472 - DNA, 25 bp, Homo sapien
tccatagctgtctgtggatcttcat

SEQ ID NO: 5178473 - DNA, 25 bp, Homo sapien
ccacttttttcggagctagacaaat

SEQ ID NO: 5178474 - DNA, 25 bp, Homo sapien
aactgctttagctacttcttctggg

SEQ ID NO: 5178475 - DNA, 25 bp, Homo sapien
gatttttcacacaaacgttagcacc

SEQ ID NO: 5178476 - DNA, 25 bp, Homo sapien
attgctgtaactgctttagctactt

SEQ ID NO: 5178477 - DNA, 25 bp, Homo sapien
taacatttgcactattgattatacc

SEQ ID NO: 5178478 - DNA, 25 bp, Homo sapien
ctacatgcaatggcttgctggccac

SEQ ID NO: 5178479 - DNA, 25 bp, Homo sapien
caatggcttgctggccacaatttta

SEQ ID NO: 5178480 - DNA, 25 bp, Homo sapien
tgcaatggcttgctggccacaattt

SEQ ID NO: 5178481 - DNA, 25 bp, Homo sapien
acatgcaatggcttgctggccacaa

SEQ ID NO: 5178482 - DNA, 25 bp, Homo sapien
ctgcatgtattggttagtgaagtga

SEQ ID NO: 5178483 - DNA, 25 bp, Homo sapien
caggcgctgttctttgcactgagct

SEQ ID NO: 5178484 - DNA, 25 bp, Homo sapien
aggcgctgttctttgcactgagcta

SEQ ID NO: 5178485 - DNA, 25 bp, Homo sapien
gtctgtgggatagctgctacgaagt

SEQ ID NO: 5178486 - DNA, 25 bp, Homo sapien
ccaggaggatagtatgcagcacggt

SEQ ID NO: 5178487 - DNA, 25 bp, Homo sapien
cagcacggttctgggtctgtgggat

SEQ ID NO: 5178488 - DNA, 25 bp, Homo sapien
ctgaacagcccagggaggacttggt

SEQ ID NO: 5178489 - DNA, 25 bp, Homo sapien
atatttggaatggataaggtctgac

SEQ ID NO: 5178490 - DNA, 25 bp, Homo sapien
tggtctcagagtggtggttacgagc

SEQ ID NO: 5178491 - DNA, 25 bp, Homo sapien
gtctcagagtggtggttacgagcag

SEQ ID NO: 5178492 - DNA, 25 bp, Homo sapien
gctggtctcagagtggtggttacga

SEQ ID NO: 5178493 - DNA, 25 bp, Homo sapien
aagctggtctcagagtggtggttac

SEQ ID NO: 5178494 - DNA, 25 bp, Homo sapien
aagctgcttcctggtaacctgtgga

SEQ ID NO: 5178495 - DNA, 25 bp, Homo sapien
gagactccggagacacaagcatatg

SEQ ID NO: 5178496 - DNA, 25 bp, Homo sapien
gcagctacaggacatggactaattg

SEQ ID NO: 5178497 - DNA, 25 bp, Homo sapien
gcaacatactgtgtggacatgactg

SEQ ID NO: 5178498 - DNA, 25 bp, Homo sapien
tgtcagagtaaacagtctaccaggc

SEQ ID NO: 5178499 - DNA, 25 bp, Homo sapien
taagcagttggtacaacagtagcac

SEQ ID NO: 5178500 - DNA, 25 bp, Homo sapien
cacttgctagataaaggtgtagaga

SEQ ID NO: 5178501 - DNA, 25 bp, Homo sapien
tctggagcctctttcacatggtagg

SEQ ID NO: 5178502 - DNA, 25 bp, Homo sapien
taaaacctgcggctcattatgagag

SEQ ID NO: 5178503 - DNA, 25 bp, Homo sapien
cagggtctgacactcttaaatgaag

SEQ ID NO: 5178504 - DNA, 25 bp, Homo sapien
aatgaagcgcttttttgaccaggaa

SEQ ID NO: 5178505 - DNA, 25 bp, Homo sapien
taaagctgtctttttggtgccatga

SEQ ID NO: 5178506 - DNA, 25 bp, Homo sapien
tcctttattagcattctccctttgt

SEQ ID NO: 5178507 - DNA, 25 bp, Homo sapien
atccttctcaataaactgcgtcatc

SEQ ID NO: 5178508 - DNA, 25 bp, Homo sapien
ttctcaataaactgcgtcatcttgt

SEQ ID NO: 5178509 - DNA, 25 bp, Homo sapien
cctttattagcattctccctttgta

SEQ ID NO: 5178510 - DNA, 25 bp, Homo sapien
gaggcatgatgaaaagccaaatctt

SEQ ID NO: 5178511 - DNA, 25 bp, Homo sapien
gcatgatgaaaagccaaatcttcca

SEQ ID NO: 5178512 - DNA, 25 bp, Homo sapien
ggtagaggcatgatgaaaagccaaa

SEQ ID NO: 5178513 - DNA, 25 bp, Homo sapien
taatggtagaggcatgatgaaaagc

SEQ ID NO: 5178514 - DNA, 25 bp, Homo sapien
cttctaataaggttgttctctgcat

SEQ ID NO: 5178515 - DNA, 25 bp, Homo sapien
ttctcaaacatgtcagtgtttctcc

SEQ ID NO: 5178516 - DNA, 25 bp, Homo sapien
gtgtttctcctcatacatacaattt

SEQ ID NO: 5178517 - DNA, 25 bp, Homo sapien
tttggtgcccaaaataaggcagtgt

SEQ ID NO: 5178518 - DNA, 25 bp, Homo sapien
taaatgatagccatcatcaaatttc

SEQ ID NO: 5178519 - DNA, 25 bp, Homo sapien
cagcattatccatatctggtcatga

SEQ ID NO: 5178520 - DNA, 25 bp, Homo sapien
tcttttcatactggcatacacgtga

SEQ ID NO: 5178521 - DNA, 25 bp, Homo sapien
gtgaattcatctatctctggtcgca

SEQ ID NO: 5178522 - DNA, 25 bp, Homo sapien
tctaagggtcttaaggtgacagcca

SEQ ID NO: 5178523 - DNA, 25 bp, Homo sapien
ttttctggattagtgagccaagcat

SEQ ID NO: 5178524 - DNA, 25 bp, Homo sapien
tctggattagtgagccaagcattac

SEQ ID NO: 5178525 - DNA, 25 bp, Homo sapien
cttttctggattagtgagccaagca

SEQ ID NO: 5178526 - DNA, 25 bp, Homo sapien
tttctggattagtgagccaagcatt

SEQ ID NO: 5178527 - DNA, 25 bp, Homo sapien
tgtgagagctatgttgagcaacgta

SEQ ID NO: 5178528 - DNA, 25 bp, Homo sapien
ttcctcaacgactttgctttaaata

SEQ ID NO: 5178529 - DNA, 25 bp, Homo sapien
gcaacgtaagaattgtcattgctat

SEQ ID NO: 5178530 - DNA, 25 bp, Homo sapien
tatgttgagcaacgtaagaattgtc

SEQ ID NO: 5178531 - DNA, 25 bp, Homo sapien
ttccacaatgcgcaaaggcaaacca

SEQ ID NO: 5178532 - DNA, 25 bp, Homo sapien
aagttccacaatgcgcaaaggcaaa

SEQ ID NO: 5178533 - DNA, 25 bp, Homo sapien
tccacaatgcgcaaaggcaaaccag

SEQ ID NO: 5178534 - DNA, 25 bp, Homo sapien
gttccacaatgcgcaaaggcaaacc

SEQ ID NO: 5178535 - DNA, 25 bp, Homo sapien
tccaaattcagtgagagtatccgat

SEQ ID NO: 5178536 - DNA, 25 bp, Homo sapien
tatccgattagatgaaagagtcaca

SEQ ID NO: 5178537 - DNA, 25 bp, Homo sapien
gctttggttgcctcatagggtctgc

SEQ ID NO: 5178538 - DNA, 25 bp, Homo sapien
tacttatggcttatgtaggctttgg

SEQ ID NO: 5178539 - DNA, 25 bp, Homo sapien
tcctaaaatcctcaggtgtagcttc

SEQ ID NO: 5178540 - DNA, 25 bp, Homo sapien
caggtgtagcttcatagattgactc

SEQ ID NO: 5178541 - DNA, 25 bp, Homo sapien
gactcttttgaatgaaacagagcca

SEQ ID NO: 5178542 - DNA, 25 bp, Homo sapien
gtacatcagcaaccaacacaatcct

SEQ ID NO: 5178543 - DNA, 25 bp, Homo sapien
tatgtctgaagtccgcaaggctctg

SEQ ID NO: 5178544 - DNA, 25 bp, Homo sapien
tgagaagtagggagatagcaaagca

SEQ ID NO: 5178545 - DNA, 25 bp, Homo sapien
aaccaaacaggagaactcatcaaag

SEQ ID NO: 5178546 - DNA, 25 bp, Homo sapien
gtagggagatagcaaagcattaacc

SEQ ID NO: 5178547 - DNA, 25 bp, Homo sapien
tcaccgagagtgtagtcccaacatc

SEQ ID NO: 5178548 - DNA, 25 bp, Homo sapien
cttccaaactgtgcatacccagggt

SEQ ID NO: 5178549 - DNA, 25 bp, Homo sapien
tacccagggttgtactctacagaac

SEQ ID NO: 5178550 - DNA, 25 bp, Homo sapien
tccttttcggtagttagctggcttc

SEQ ID NO: 5178551 - DNA, 25 bp, Homo sapien
tagctcgctgccaacatatttttat

SEQ ID NO: 5178552 - DNA, 25 bp, Homo sapien
ttggtaaccaaactattagctcgct

SEQ ID NO: 5178553 - DNA, 25 bp, Homo sapien
taaccaaactattagctcgctgcca

SEQ ID NO: 5178554 - DNA, 25 bp, Homo sapien
caaactattagctcgctgccaacat

SEQ ID NO: 5178555 - DNA, 25 bp, Homo sapien
tgccagtctgtatcttctgattggg

SEQ ID NO: 5178556 - DNA, 25 bp, Homo sapien
gattggggcatttagctcttttaca

SEQ ID NO: 5178557 - DNA, 25 bp, Homo sapien
tctgtatcttctgattggggcattt

SEQ ID NO: 5178558 - DNA, 25 bp, Homo sapien
aatttgccagtctgtatcttctgat

SEQ ID NO: 5178559 - DNA, 25 bp, Homo sapien
cgtaggatatatgaggtgttcttaa

SEQ ID NO: 5178560 - DNA, 25 bp, Homo sapien
tttcgtaggatatatgaggtgttct

SEQ ID NO: 5178561 - DNA, 25 bp, Homo sapien
tcgtaggatatatgaggtgttctta

SEQ ID NO: 5178562 - DNA, 25 bp, Homo sapien
catttcgtaggatatatgaggtgtt

SEQ ID NO: 5178563 - DNA, 25 bp, Homo sapien
tgtgttcaacactggtagtggttgc

SEQ ID NO: 5178564 - DNA, 25 bp, Homo sapien
gttcaacactggtagtggttgctat

SEQ ID NO: 5178565 - DNA, 25 bp, Homo sapien
tccgagacaatgtggtctcatttgc

SEQ ID NO: 5178566 - DNA, 25 bp, Homo sapien
agcagatgtccgagacaatgtggtc

SEQ ID NO: 5178567 - DNA, 25 bp, Homo sapien
ctttgggtataaacactttattcat

SEQ ID NO: 5178568 - DNA, 25 bp, Homo sapien
cagaatatttataatccctttgggt

SEQ ID NO: 5178569 - DNA, 25 bp, Homo sapien
aattctttctcaattgactcacaca

SEQ ID NO: 5178570 - DNA, 25 bp, Homo sapien
gcatgctcagaggctattgtggttt

SEQ ID NO: 5178571 - DNA, 25 bp, Homo sapien
gactcacacatggtattgttaaaaa

SEQ ID NO: 5178572 - DNA, 25 bp, Homo sapien
aacctctattaggaattctttctca

SEQ ID NO: 5178573 - DNA, 25 bp, Homo sapien
aatccagacctgtagacttgcttgt

SEQ ID NO: 5178574 - DNA, 25 bp, Homo sapien
ctttgtacagctctaactggttgaa

SEQ ID NO: 5178575 - DNA, 25 bp, Homo sapien
cttctgatcttcacccaccttataa

SEQ ID NO: 5178576 - DNA, 25 bp, Homo sapien
tgaatccagacctgtagacttgctt

SEQ ID NO: 5178577 - DNA, 25 bp, Homo sapien
cacaattttcacctttctgcccatg

SEQ ID NO: 5178578 - DNA, 25 bp, Homo sapien
gcctctggccacaattttcaccttt

SEQ ID NO: 5178579 - DNA, 25 bp, Homo sapien
acaattttcacctttctgcccatgt

SEQ ID NO: 5178580 - DNA, 25 bp, Homo sapien
caatctgcctctggccacaattttc

SEQ ID NO: 5178581 - DNA, 25 bp, Homo sapien
cctattctagaatggcctcagctgt

SEQ ID NO: 5178582 - DNA, 25 bp, Homo sapien
gctgttatggctcatcagtgttcca

SEQ ID NO: 5178583 - DNA, 25 bp, Homo sapien
cctggttggctaaagctgcctattc

SEQ ID NO: 5178584 - DNA, 25 bp, Homo sapien
tcatctggatgcaggcctgtatctg

SEQ ID NO: 5178585 - DNA, 25 bp, Homo sapien
tgcatgtatacaatctgagaagaag

SEQ ID NO: 5178586 - DNA, 25 bp, Homo sapien
ttatcctgcatgtatacaatctgag

SEQ ID NO: 5178587 - DNA, 25 bp, Homo sapien
ggtttagcagtgtgattcttttcaa

SEQ ID NO: 5178588 - DNA, 25 bp, Homo sapien
gaagataaaagctgctactggttta

SEQ ID NO: 5178589 - DNA, 25 bp, Homo sapien
ttatgctggaatatagaagtctatg

SEQ ID NO: 5178590 - DNA, 25 bp, Homo sapien
tgaaacaggcttcgatgtaaaagta

SEQ ID NO: 5178591 - DNA, 25 bp, Homo sapien
tataaatgcgcctaatacatcttta

SEQ ID NO: 5178592 - DNA, 25 bp, Homo sapien
ctgggctccgttcatgttgaaacag

SEQ ID NO: 5178593 - DNA, 25 bp, Homo sapien
tggccatggcaatagggcagtagct

SEQ ID NO: 5178594 - DNA, 25 bp, Homo sapien
tgagaaacccttttatagacaatgt

SEQ ID NO: 5178595 - DNA, 25 bp, Homo sapien
gaaagtcatcgatcatgagaaaccc

SEQ ID NO: 5178596 - DNA, 25 bp, Homo sapien
aattgaacagggaaatacactccaa

SEQ ID NO: 5178597 - DNA, 25 bp, Homo sapien
tagagaagtagaagtcctattcttc

SEQ ID NO: 5178598 - DNA, 25 bp, Homo sapien
cagggtataacgaggattaagtcac

SEQ ID NO: 5178599 - DNA, 25 bp, Homo sapien
aagcatagacctagcactgttccag

SEQ ID NO: 5178600 - DNA, 25 bp, Homo sapien
ggcggtgacctgaaccaatcaattt

SEQ ID NO: 5178601 - DNA, 25 bp, Homo sapien
cggcaattttctgtcctgaggctca

SEQ ID NO: 5178602 - DNA, 25 bp, Homo sapien
ggcaattttctgtcctgaggctcat

SEQ ID NO: 5178603 - DNA, 25 bp, Homo sapien
tttccatctctaaatcgtgttcatt

SEQ ID NO: 5178604 - DNA, 25 bp, Homo sapien
tggaacatgggaggcttcaaaggcc

SEQ ID NO: 5178605 - DNA, 25 bp, Homo sapien
ggcttcaaaggcccatatgtcacca

SEQ ID NO: 5178606 - DNA, 25 bp, Homo sapien
catctctaaatcgtgttcatttctt

SEQ ID NO: 5178607 - DNA, 25 bp, Homo sapien
cagtttctattaggtattgaggtta

SEQ ID NO: 5178608 - DNA, 25 bp, Homo sapien
catgtgccagtttctattaggtatt

SEQ ID NO: 5178609 - DNA, 25 bp, Homo sapien
tgccagtttctattaggtattgagg

SEQ ID NO: 5178610 - DNA, 25 bp, Homo sapien
tctattaggtattgaggttataaaa

SEQ ID NO: 5178611 - DNA, 25 bp, Homo sapien
atctaatttaggtgctgactcttgc

SEQ ID NO: 5178612 - DNA, 25 bp, Homo sapien
gttgatctaatttaggtgctgactc

SEQ ID NO: 5178613 - DNA, 25 bp, Homo sapien
tgtagtgttgatctaatttaggtgc

SEQ ID NO: 5178614 - DNA, 25 bp, Homo sapien
tttgatgttgtagtgttgatctaat

SEQ ID NO: 5178615 - DNA, 25 bp, Homo sapien
gatttgtccaccgagtcttcctcac

SEQ ID NO: 5178616 - DNA, 25 bp, Homo sapien
catctgcaacgcctacttgttttcc

SEQ ID NO: 5178617 - DNA, 25 bp, Homo sapien
tttccagtcagatttgtccaccgag

SEQ ID NO: 5178618 - DNA, 25 bp, Homo sapien
caacgcctacttgttttccagtcag

SEQ ID NO: 5178619 - DNA, 25 bp, Homo sapien
gaggaagcacatttgagtcaggagg

SEQ ID NO: 5178620 - DNA, 25 bp, Homo sapien
gttggcgaaacaacccaaagcacac

SEQ ID NO: 5178621 - DNA, 25 bp, Homo sapien
cagctcatgcccgtggttggcgaaa

SEQ ID NO: 5178622 - DNA, 25 bp, Homo sapien
cagaggacagccgacctgttctgtg

SEQ ID NO: 5178623 - DNA, 25 bp, Homo sapien
cagtcttatcgtaaaggtacatatg

SEQ ID NO: 5178624 - DNA, 25 bp, Homo sapien
tgttgcttagcacatgatcttccct

SEQ ID NO: 5178625 - DNA, 25 bp, Homo sapien
gaaataaggtagcagtccaattatc

SEQ ID NO: 5178626 - DNA, 25 bp, Homo sapien
tagaattagagtcaagatgaggtgc

SEQ ID NO: 5178627 - DNA, 25 bp, Homo sapien
cagcatttagaagagaaatcttatt

SEQ ID NO: 5178628 - DNA, 25 bp, Homo sapien
caaattcagcatttagaagagaaat

SEQ ID NO: 5178629 - DNA, 25 bp, Homo sapien
gcatttagaagagaaatcttatttc

SEQ ID NO: 5178630 - DNA, 25 bp, Homo sapien
attcagcatttagaagagaaatctt

SEQ ID NO: 5178631 - DNA, 25 bp, Homo sapien
gatgatcttttgtgacctcgtcaga

SEQ ID NO: 5178632 - DNA, 25 bp, Homo sapien
gataggtccactactcccagctgta

SEQ ID NO: 5178633 - DNA, 25 bp, Homo sapien
tatttataattgctaggtcctcctg

SEQ ID NO: 5178634 - DNA, 25 bp, Homo sapien
tcttattcaggagagctcatggcct

SEQ ID NO: 5178635 - DNA, 25 bp, Homo sapien
ggttaaacaaagcttgctatgcccc

SEQ ID NO: 5178636 - DNA, 25 bp, Homo sapien
aatgcaaatgttatcggtgagagct

SEQ ID NO: 5178637 - DNA, 25 bp, Homo sapien
gctatgccccaccttcggagtttct

SEQ ID NO: 5178638 - DNA, 25 bp, Homo sapien
tatgataatctttggtccctgcact

SEQ ID NO: 5178639 - DNA, 25 bp, Homo sapien
aaaagacagctcctatgaaccagga

SEQ ID NO: 5178640 - DNA, 25 bp, Homo sapien
taacccaagtgatggtaataggttg

SEQ ID NO: 5178641 - DNA, 25 bp, Homo sapien
gacacagaacctaccagtgccttga

SEQ ID NO: 5178642 - DNA, 25 bp, Homo sapien
cctttcaccgtttgaggacacagca

SEQ ID NO: 5178643 - DNA, 25 bp, Homo sapien
gaagtgtagcaatattggcaaggca

SEQ ID NO: 5178644 - DNA, 25 bp, Homo sapien
cacaacttatcttgtttatgagaca

SEQ ID NO: 5178645 - DNA, 25 bp, Homo sapien
attggcaaggcacaacttatcttgt

SEQ ID NO: 5178646 - DNA, 25 bp, Homo sapien
tcatatttatgaagtgtagcaatat

SEQ ID NO: 5178647 - DNA, 25 bp, Homo sapien
gcttcccaaagttatccagatctga

SEQ ID NO: 5178648 - DNA, 25 bp, Homo sapien
taatgactcttcatttggcttccca

SEQ ID NO: 5178649 - DNA, 25 bp, Homo sapien
tgactcttcatttggcttcccaaag

SEQ ID NO: 5178650 - DNA, 25 bp, Homo sapien
ctttaatgactcttcatttggcttc

SEQ ID NO: 5178651 - DNA, 25 bp, Homo sapien
ccattgtagggaatctgctgggctc

SEQ ID NO: 5178652 - DNA, 25 bp, Homo sapien
tgagagcgccccatctttcagagat

SEQ ID NO: 5178653 - DNA, 25 bp, Homo sapien
cccttgttgggctgtagtctgagaa

SEQ ID NO: 5178654 - DNA, 25 bp, Homo sapien
gaggaacacatcacaggatcccaga

SEQ ID NO: 5178655 - DNA, 25 bp, Homo sapien
gaatcaaagacataattcatgtgtt

SEQ ID NO: 5178656 - DNA, 25 bp, Homo sapien
tcaaagacataattcatgtgttgaa

SEQ ID NO: 5178657 - DNA, 25 bp, Homo sapien
tttagttgcagaagagttgccagaa

SEQ ID NO: 5178658 - DNA, 25 bp, Homo sapien
ttttagttgcagaagagttgccaga

SEQ ID NO: 5178659 - DNA, 25 bp, Homo sapien
tctttcctaggtggttggagcttct

SEQ ID NO: 5178660 - DNA, 25 bp, Homo sapien
tcatcttctttcctaggtggttgga

SEQ ID NO: 5178661 - DNA, 25 bp, Homo sapien
gttgggaagatttccactgacctct

SEQ ID NO: 5178662 - DNA, 25 bp, Homo sapien
agcttctttcgagtgtggtgagttg

SEQ ID NO: 5178663 - DNA, 25 bp, Homo sapien
tttctttaaggctcttggcatcatc

SEQ ID NO: 5178664 - DNA, 25 bp, Homo sapien
tctgatttctttaaggctcttggca

SEQ ID NO: 5178665 - DNA, 25 bp, Homo sapien
ctttaaggctcttggcatcatcttg

SEQ ID NO: 5178666 - DNA, 25 bp, Homo sapien
ttgccaggattgattcttgaattcc

SEQ ID NO: 5178667 - DNA, 25 bp, Homo sapien
aaccatgagtcttgacatccaggcg

SEQ ID NO: 5178668 - DNA, 25 bp, Homo sapien
gaaactcagacctggtgtatttaat

SEQ ID NO: 5178669 - DNA, 25 bp, Homo sapien
atgtgtaaaaccatgagtcttgaca

SEQ ID NO: 5178670 - DNA, 25 bp, Homo sapien
catccaggcggttgtatttccaaac

SEQ ID NO: 5178671 - DNA, 25 bp, Homo sapien
aaataggtgccatgacatttggaaa

SEQ ID NO: 5178672 - DNA, 25 bp, Homo sapien
tgatgtttattggaaataggtgcca

SEQ ID NO: 5178673 - DNA, 25 bp, Homo sapien
tattggaaataggtgccatgacatt

SEQ ID NO: 5178674 - DNA, 25 bp, Homo sapien
cagatgatgtttattggaaataggt

SEQ ID NO: 5178675 - DNA, 25 bp, Homo sapien
tatttttgccttcaacacaggggag

SEQ ID NO: 5178676 - DNA, 25 bp, Homo sapien
gtgtttcattaagaggccatagcta

SEQ ID NO: 5178677 - DNA, 25 bp, Homo sapien
aagttcctgacggtttcttgagtcg

SEQ ID NO: 5178678 - DNA, 25 bp, Homo sapien
gggaggagctgatctataaagttcc

SEQ ID NO: 5178679 - DNA, 25 bp, Homo sapien
atccaagctccggtcccctgacttc

SEQ ID NO: 5178680 - DNA, 25 bp, Homo sapien
tccaagctccggtcccctgacttca

SEQ ID NO: 5178681 - DNA, 25 bp, Homo sapien
ctatccaagctccggtcccctgact

SEQ ID NO: 5178682 - DNA, 25 bp, Homo sapien
ccaagctccggtcccctgacttcac

SEQ ID NO: 5178683 - DNA, 25 bp, Homo sapien
tctgagtactggactttgacttcct

SEQ ID NO: 5178684 - DNA, 25 bp, Homo sapien
cagtgggcaatattcccttgatgat

SEQ ID NO: 5178685 - DNA, 25 bp, Homo sapien
ctggactttgacttcctcagtgggc

SEQ ID NO: 5178686 - DNA, 25 bp, Homo sapien
tcctcagtgggcaatattcccttga

SEQ ID NO: 5178687 - DNA, 25 bp, Homo sapien
ttcacttatgtttctatatgaggaa

SEQ ID NO: 5178688 - DNA, 25 bp, Homo sapien
ccagaggtgtttcacttatgtttct

SEQ ID NO: 5178689 - DNA, 25 bp, Homo sapien
tcccagaggtgtttcacttatgttt

SEQ ID NO: 5178690 - DNA, 25 bp, Homo sapien
tcacttatgtttctatatgaggaaa

SEQ ID NO: 5178691 - DNA, 25 bp, Homo sapien
cctcacttccacagcagattttgca

SEQ ID NO: 5178692 - DNA, 25 bp, Homo sapien
aaaatctcaaatgtgctagtactag

SEQ ID NO: 5178693 - DNA, 25 bp, Homo sapien
gatatatttctcctcacttccacag

SEQ ID NO: 5178694 - DNA, 25 bp, Homo sapien
tgcaaaatggtgaatgaaaaatctc

SEQ ID NO: 5178695 - DNA, 25 bp, Homo sapien
tatcttctgatgcttctattgaaac

SEQ ID NO: 5178696 - DNA, 25 bp, Homo sapien
atcttctgatgcttctattgaaacc

SEQ ID NO: 5178697 - DNA, 25 bp, Homo sapien
ggtttgctcgtatctacagtcacat

SEQ ID NO: 5178698 - DNA, 25 bp, Homo sapien
tgtgcctgtgataggacttctagta

SEQ ID NO: 5178699 - DNA, 25 bp, Homo sapien
ttaacaaaccagataccctcagagg

SEQ ID NO: 5178700 - DNA, 25 bp, Homo sapien
tggagctgtcgttgcttaacaaacc

SEQ ID NO: 5178701 - DNA, 25 bp, Homo sapien
ctattgccagtaccaagactcttac

SEQ ID NO: 5178702 - DNA, 25 bp, Homo sapien
ctttgttactattgccagtaccaag

SEQ ID NO: 5178703 - DNA, 25 bp, Homo sapien
tgttactattgccagtaccaagact

SEQ ID NO: 5178704 - DNA, 25 bp, Homo sapien
tactattgccagtaccaagactctt

SEQ ID NO: 5178705 - DNA, 25 bp, Homo sapien
ggattactcctgtcaatgcatttgt

SEQ ID NO: 5178706 - DNA, 25 bp, Homo sapien
tcctctgtagctaagaccccattgc

SEQ ID NO: 5178707 - DNA, 25 bp, Homo sapien
gatacggcctttgtagccaactgga

SEQ ID NO: 5178708 - DNA, 25 bp, Homo sapien
ccacctggactaacagatttaagac

SEQ ID NO: 5178709 - DNA, 25 bp, Homo sapien
cataataccattgagagtcccttct

SEQ ID NO: 5178710 - DNA, 25 bp, Homo sapien
gtttcccagtacgttcataatacca

SEQ ID NO: 5178711 - DNA, 25 bp, Homo sapien
cagtacgttcataataccattgaga

SEQ ID NO: 5178712 - DNA, 25 bp, Homo sapien
gatagaattgtttcccagtacgttc

SEQ ID NO: 5178713 - DNA, 25 bp, Homo sapien
cagaatgacaaaggcgtcactgcac

SEQ ID NO: 5178714 - DNA, 25 bp, Homo sapien
aatgacaaaggcgtcactgcacact

SEQ ID NO: 5178715 - DNA, 25 bp, Homo sapien
tgacaaaggcgtcactgcacactac

SEQ ID NO: 5178716 - DNA, 25 bp, Homo sapien
acagaatgacaaaggcgtcactgca

SEQ ID NO: 5178717 - DNA, 25 bp, Homo sapien
tactaggagtcttgtttgaggaact

SEQ ID NO: 5178718 - DNA, 25 bp, Homo sapien
ctttggagaagaatgactgaaggta

SEQ ID NO: 5178719 - DNA, 25 bp, Homo sapien
tgactgaaggtactaggagtcttgt

SEQ ID NO: 5178720 - DNA, 25 bp, Homo sapien
tcttgtttgaggaactatggaggtg

SEQ ID NO: 5178721 - DNA, 25 bp, Homo sapien
gatacctttgacaattctgatgcaa

SEQ ID NO: 5178722 - DNA, 25 bp, Homo sapien
ccaccatttgttgggtgttaactgg

SEQ ID NO: 5178723 - DNA, 25 bp, Homo sapien
gaatgggtactttgggctatcaaac

SEQ ID NO: 5178724 - DNA, 25 bp, Homo sapien
ccagggtagttctctatcccactta

SEQ ID NO: 5178725 - DNA, 25 bp, Homo sapien
gatgctgtgggcgtacgaccctctg

SEQ ID NO: 5178726 - DNA, 25 bp, Homo sapien
ctgcttcggcttgcgtcctgtgcgc

SEQ ID NO: 5178727 - DNA, 25 bp, Homo sapien
tgctgtgggcgtacgaccctctgag

SEQ ID NO: 5178728 - DNA, 25 bp, Homo sapien
ttcggcttgcgtcctgtgcgctgca

SEQ ID NO: 5178729 - DNA, 25 bp, Homo sapien
tgtcttgttagatcttgttgatagc

SEQ ID NO: 5178730 - DNA, 25 bp, Homo sapien
tgttagatcttgttgatagcataga

SEQ ID NO: 5178731 - DNA, 25 bp, Homo sapien
tagcatagaccaatctctgatacaa

SEQ ID NO: 5178732 - DNA, 25 bp, Homo sapien
tcttgttgatagcatagaccaatct

SEQ ID NO: 5178733 - DNA, 25 bp, Homo sapien
tacccaggtttctatagtgcttttg

SEQ ID NO: 5178734 - DNA, 25 bp, Homo sapien
ggcttggtccccagtgaatattaga

SEQ ID NO: 5178735 - DNA, 25 bp, Homo sapien
tatagtgcttttgattgataggaac

SEQ ID NO: 5178736 - DNA, 25 bp, Homo sapien
aggaactttcggagaaacactgagc

SEQ ID NO: 5178737 - DNA, 25 bp, Homo sapien
gcaacttctagcgagcccacataag

SEQ ID NO: 5178738 - DNA, 25 bp, Homo sapien
ggttttcctgtgagattatcagcaa

SEQ ID NO: 5178739 - DNA, 25 bp, Homo sapien
tactctggaggttgaatgtactgat

SEQ ID NO: 5178740 - DNA, 25 bp, Homo sapien
tagcgagcccacataaggaactaga

SEQ ID NO: 5178741 - DNA, 25 bp, Homo sapien
tgccctctttttgaggtttactcat

SEQ ID NO: 5178742 - DNA, 25 bp, Homo sapien
ttctttcgactctgaaatctttctg

SEQ ID NO: 5178743 - DNA, 25 bp, Homo sapien
atgccctctttttgaggtttactca

SEQ ID NO: 5178744 - DNA, 25 bp, Homo sapien
gactctgaaatctttctgacaattc

SEQ ID NO: 5178745 - DNA, 25 bp, Homo sapien
cttcaattcccttaagtgcctttcg

SEQ ID NO: 5178746 - DNA, 25 bp, Homo sapien
ggcactttcaagtagcaggccccga

SEQ ID NO: 5178747 - DNA, 25 bp, Homo sapien
gacaagctgactacaagaggggcac

SEQ ID NO: 5178748 - DNA, 25 bp, Homo sapien
ctttggcagcacaagcatatcagac

SEQ ID NO: 5178749 - DNA, 25 bp, Homo sapien
cacataaattagaggacctggtgct

SEQ ID NO: 5178750 - DNA, 25 bp, Homo sapien
cctggtgctgcactggcggttataa

SEQ ID NO: 5178751 - DNA, 25 bp, Homo sapien
cccatggtttgataaagtcgaaagc

SEQ ID NO: 5178752 - DNA, 25 bp, Homo sapien
ctatttccacaaggcaacttgccgg

SEQ ID NO: 5178753 - DNA, 25 bp, Homo sapien
aaaatgcttcaccgcactctgagct

SEQ ID NO: 5178754 - DNA, 25 bp, Homo sapien
aatgcttcaccgcactctgagctat

SEQ ID NO: 5178755 - DNA, 25 bp, Homo sapien
ctggtctcttgtgttgctctcagag

SEQ ID NO: 5178756 - DNA, 25 bp, Homo sapien
tctcttgtgttgctctcagagcaga

SEQ ID NO: 5178757 - DNA, 25 bp, Homo sapien
tgctctcccagtgggttgcaaattg

SEQ ID NO: 5178758 - DNA, 25 bp, Homo sapien
cctgctctcccagtgggttgcaaat

SEQ ID NO: 5178759 - DNA, 25 bp, Homo sapien
ctagctctcaaaagctaggggctgg

SEQ ID NO: 5178760 - DNA, 25 bp, Homo sapien
ctcctgctctcccagtgggttgcaa

SEQ ID NO: 5178761 - DNA, 25 bp, Homo sapien
gctatttgttttcactctcgagtag

SEQ ID NO: 5178762 - DNA, 25 bp, Homo sapien
tggctgctatttgttttcactctcg

SEQ ID NO: 5178763 - DNA, 25 bp, Homo sapien
gttttcactctcgagtagtcagcag

SEQ ID NO: 5178764 - DNA, 25 bp, Homo sapien
ctctcgagtagtcagcagacacact

SEQ ID NO: 5178765 - DNA, 25 bp, Homo sapien
tcctgtgcaaagcttgatgctgtcc

SEQ ID NO: 5178766 - DNA, 25 bp, Homo sapien
tgctgtccatgaacttgctctctgt

SEQ ID NO: 5178767 - DNA, 25 bp, Homo sapien
cttggaagtggcatcgagctggtat

SEQ ID NO: 5178768 - DNA, 25 bp, Homo sapien
tgctctctgttctaactgttccaag

SEQ ID NO: 5178769 - DNA, 25 bp, Homo sapien
tattgtttctagtaggatgactcat

SEQ ID NO: 5178770 - DNA, 25 bp, Homo sapien
ccatcctctttgatattgtttctag

SEQ ID NO: 5178771 - DNA, 25 bp, Homo sapien
ctctttgatattgtttctagtagga

SEQ ID NO: 5178772 - DNA, 25 bp, Homo sapien
ttgatattgtttctagtaggatgac

SEQ ID NO: 5178773 - DNA, 25 bp, Homo sapien
cattagtgccctgattcatgtcaaa

SEQ ID NO: 5178774 - DNA, 25 bp, Homo sapien
tccatcacttttggtgtatatgtaa

SEQ ID NO: 5178775 - DNA, 25 bp, Homo sapien
ttgtgctgctctaaagatgtttcaa

SEQ ID NO: 5178776 - DNA, 25 bp, Homo sapien
tagtgccctgattcatgtcaaattg

SEQ ID NO: 5178777 - DNA, 25 bp, Homo sapien
aatctggatgcaggctggcaatcca

SEQ ID NO: 5178778 - DNA, 25 bp, Homo sapien
actggagttagtagtatcttgccaa

SEQ ID NO: 5178779 - DNA, 25 bp, Homo sapien
gtcctgaaactggagttagtagtat

SEQ ID NO: 5178780 - DNA, 25 bp, Homo sapien
tctggatgcaggctggcaatccaag

SEQ ID NO: 5178781 - DNA, 25 bp, Homo sapien
gatagcccccgattctgactggatc

SEQ ID NO: 5178782 - DNA, 25 bp, Homo sapien
tgagaaaatattggatagcccccga

SEQ ID NO: 5178783 - DNA, 25 bp, Homo sapien
aaatattggatagcccccgattctg

SEQ ID NO: 5178784 - DNA, 25 bp, Homo sapien
ctccctatgacccaccagaaacctc

SEQ ID NO: 5178785 - DNA, 25 bp, Homo sapien
aaaatcttactttgattagatgcac

SEQ ID NO: 5178786 - DNA, 25 bp, Homo sapien
aaatcttactttgattagatgcaca

SEQ ID NO: 5178787 - DNA, 25 bp, Homo sapien
aatcttactttgattagatgcacac

SEQ ID NO: 5178788 - DNA, 25 bp, Homo sapien
ggaaaatcttactttgattagatgc

SEQ ID NO: 5178789 - DNA, 25 bp, Homo sapien
tcctcatcagtggttttagaactga

SEQ ID NO: 5178790 - DNA, 25 bp, Homo sapien
aatcctcatcagtggttttagaact

SEQ ID NO: 5178791 - DNA, 25 bp, Homo sapien
ctaatcctcatcagtggttttagaa

SEQ ID NO: 5178792 - DNA, 25 bp, Homo sapien
cctcatcagtggttttagaactgaa

SEQ ID NO: 5178793 - DNA, 25 bp, Homo sapien
gcagtaaggtcttcaaaaaatccag

SEQ ID NO: 5178794 - DNA, 25 bp, Homo sapien
tatggagctgtctcgctgtgaaaca

SEQ ID NO: 5178795 - DNA, 25 bp, Homo sapien
taaaaggcattgaatatggtctact

SEQ ID NO: 5178796 - DNA, 25 bp, Homo sapien
tgtgaaacataaggcacacatgcct

SEQ ID NO: 5178797 - DNA, 25 bp, Homo sapien
tggtctctcaaacctctgccagttc

SEQ ID NO: 5178798 - DNA, 25 bp, Homo sapien
gagccaagaagtaaacttagcaaaa

SEQ ID NO: 5178799 - DNA, 25 bp, Homo sapien
tcttttactctcctaatctctttca

SEQ ID NO: 5178800 - DNA, 25 bp, Homo sapien
cttccaatcatgagccaagaagtaa

SEQ ID NO: 5178801 - DNA, 25 bp, Homo sapien
tctgggctgtttcaattgcttgatt

SEQ ID NO: 5178802 - DNA, 25 bp, Homo sapien
gctgtttcaattgcttgattgtcct

SEQ ID NO: 5178803 - DNA, 25 bp, Homo sapien
gggctgtttcaattgcttgattgtc

SEQ ID NO: 5178804 - DNA, 25 bp, Homo sapien
cttctgggctgtttcaattgcttga

SEQ ID NO: 5178805 - DNA, 25 bp, Homo sapien
cacacattcttgtgaaaacccaatc

SEQ ID NO: 5178806 - DNA, 25 bp, Homo sapien
tgccaagatcataaaaaggttcaga

SEQ ID NO: 5178807 - DNA, 25 bp, Homo sapien
tgtgccaagatcataaaaaggttca

SEQ ID NO: 5178808 - DNA, 25 bp, Homo sapien
aatgtgccaagatcataaaaaggtt

SEQ ID NO: 5178809 - DNA, 25 bp, Homo sapien
cagagagtgaatggcctgcctgtgg

SEQ ID NO: 5178810 - DNA, 25 bp, Homo sapien
agagtgaatggcctgcctgtggaca

SEQ ID NO: 5178811 - DNA, 25 bp, Homo sapien
agtgaatggcctgcctgtggacagc

SEQ ID NO: 5178812 - DNA, 25 bp, Homo sapien
caggaaatgtcctgaagaacttcct

SEQ ID NO: 5178813 - DNA, 25 bp, Homo sapien
ctagagtatccctgctcttgcactt

SEQ ID NO: 5178814 - DNA, 25 bp, Homo sapien
tctaagactgggcagctagagtatc

SEQ ID NO: 5178815 - DNA, 25 bp, Homo sapien
taagactgggcagctagagtatccc

SEQ ID NO: 5178816 - DNA, 25 bp, Homo sapien
agactgggcagctagagtatccctg

SEQ ID NO: 5178817 - DNA, 25 bp, Homo sapien
aatgaccacagcatgcaaacctgaa

SEQ ID NO: 5178818 - DNA, 25 bp, Homo sapien
atgtctaatgaccacagcatgcaaa

SEQ ID NO: 5178819 - DNA, 25 bp, Homo sapien
taatgaccacagcatgcaaacctga

SEQ ID NO: 5178820 - DNA, 25 bp, Homo sapien
tctaatgaccacagcatgcaaacct

SEQ ID NO: 5178821 - DNA, 25 bp, Homo sapien
ggcaacaggtgcctagcttcccagg

SEQ ID NO: 5178822 - DNA, 25 bp, Homo sapien
tgggcaacaggtgcctagcttccca

SEQ ID NO: 5178823 - DNA, 25 bp, Homo sapien
acaggtgcctagcttcccaggccca

SEQ ID NO: 5178824 - DNA, 25 bp, Homo sapien
gcaacaggtgcctagcttcccaggc

SEQ ID NO: 5178825 - DNA, 25 bp, Homo sapien
gctcatctctcttgagtccctcgga

SEQ ID NO: 5178826 - DNA, 25 bp, Homo sapien
aatccagaattgtgctgggacagca

SEQ ID NO: 5178827 - DNA, 25 bp, Homo sapien
gacaatggacactggtatgctctga

SEQ ID NO: 5178828 - DNA, 25 bp, Homo sapien
tcaaagcgggagtaaaaacatcttg

SEQ ID NO: 5178829 - DNA, 25 bp, Homo sapien
gtgctgccacggttgcaaatgatga

SEQ ID NO: 5178830 - DNA, 25 bp, Homo sapien
aagtgcgatgaatacatccccaaag

SEQ ID NO: 5178831 - DNA, 25 bp, Homo sapien
ttaagtgcgatgaatacatccccaa

SEQ ID NO: 5178832 - DNA, 25 bp, Homo sapien
caggaacattcccatgatgcccagc

SEQ ID NO: 5178833 - DNA, 25 bp, Homo sapien
cccaaagcaggaacattcccatgat

SEQ ID NO: 5178834 - DNA, 25 bp, Homo sapien
gtttcacaaatttgtatatcaacct

SEQ ID NO: 5178835 - DNA, 25 bp, Homo sapien
ttgtatatcaaccttgcacagggga

SEQ ID NO: 5178836 - DNA, 25 bp, Homo sapien
aaatttgtatatcaaccttgcacag

SEQ ID NO: 5178837 - DNA, 25 bp, Homo sapien
tatatatgctgtcaaaacgagcaca

SEQ ID NO: 5178838 - DNA, 25 bp, Homo sapien
ctgtttctggtgtaggggcaattcc

SEQ ID NO: 5178839 - DNA, 25 bp, Homo sapien
aagggagtgcttctaccatttgacc

SEQ ID NO: 5178840 - DNA, 25 bp, Homo sapien
tgcttttgatggttcttgcgactag

SEQ ID NO: 5178841 - DNA, 25 bp, Homo sapien
cgactagggagcactaaaggagaag

SEQ ID NO: 5178842 - DNA, 25 bp, Homo sapien
tcaggggttcttattggagaggttc

SEQ ID NO: 5178843 - DNA, 25 bp, Homo sapien
gctgagtcatcaggggttcttattg

SEQ ID NO: 5178844 - DNA, 25 bp, Homo sapien
tttttccatagttaaggatttcatc

SEQ ID NO: 5178845 - DNA, 25 bp, Homo sapien
aggatttcatcctgggctgagtcat

SEQ ID NO: 5178846 - DNA, 25 bp, Homo sapien
tctgtgggatcttctgcccctttcc

SEQ ID NO: 5178847 - DNA, 25 bp, Homo sapien
actcagctgcctgggtatgtagatg

SEQ ID NO: 5178848 - DNA, 25 bp, Homo sapien
caaaccggcagaaccctttgcattt

SEQ ID NO: 5178849 - DNA, 25 bp, Homo sapien
cctgggtatgtagatggcctgaagt

SEQ ID NO: 5178850 - DNA, 25 bp, Homo sapien
gtcccattggctaccctttcctgcc

SEQ ID NO: 5178851 - DNA, 25 bp, Homo sapien
tgtcccattggctaccctttcctgc

SEQ ID NO: 5178852 - DNA, 25 bp, Homo sapien
cctgtcccattggctaccctttcct

SEQ ID NO: 5178853 - DNA, 25 bp, Homo sapien
tgctctgccatgcacactttcctgt

SEQ ID NO: 5178854 - DNA, 25 bp, Homo sapien
tccttgcgtgtctgttggacccaca

SEQ ID NO: 5178855 - DNA, 25 bp, Homo sapien
gtccttgcgtgtctgttggacccac

SEQ ID NO: 5178856 - DNA, 25 bp, Homo sapien
agtccttgcgtgtctgttggaccca

SEQ ID NO: 5178857 - DNA, 25 bp, Homo sapien
ccttgcgtgtctgttggacccacat

SEQ ID NO: 5178858 - DNA, 25 bp, Homo sapien
aggaatgcaggctgcagagtggccc

SEQ ID NO: 5178859 - DNA, 25 bp, Homo sapien
caggaatgcaggctgcagagtggcc

SEQ ID NO: 5178860 - DNA, 25 bp, Homo sapien
ggcaggaatgcaggctgcagagtgg

SEQ ID NO: 5178861 - DNA, 25 bp, Homo sapien
ctggcaggaatgcaggctgcagagt

SEQ ID NO: 5178862 - DNA, 25 bp, Homo sapien
ctcaaataaaccagctttgcctgac

SEQ ID NO: 5178863 - DNA, 25 bp, Homo sapien
aataaaccagctttgcctgacagga

SEQ ID NO: 5178864 - DNA, 25 bp, Homo sapien
cttggcaagggtaacggaataggca

SEQ ID NO: 5178865 - DNA, 25 bp, Homo sapien
taaaccagctttgcctgacaggaca

SEQ ID NO: 5178866 - DNA, 25 bp, Homo sapien
gatattggcttttatctttataaca

SEQ ID NO: 5178867 - DNA, 25 bp, Homo sapien
ttggcttttatctttataacagtca

SEQ ID NO: 5178868 - DNA, 25 bp, Homo sapien
tggcttttatctttataacagtcat

SEQ ID NO: 5178869 - DNA, 25 bp, Homo sapien
tattggcttttatctttataacagt

SEQ ID NO: 5178870 - DNA, 25 bp, Homo sapien
tccgagtatctataagggctttcct

SEQ ID NO: 5178871 - DNA, 25 bp, Homo sapien
tctataagggctttcctggtgtttc

SEQ ID NO: 5178872 - DNA, 25 bp, Homo sapien
ctgttccgagtatctataagggctt

SEQ ID NO: 5178873 - DNA, 25 bp, Homo sapien
cgagtatctataagggctttcctgg

SEQ ID NO: 5178874 - DNA, 25 bp, Homo sapien
ccttaggaaccatgtagggagtgac

SEQ ID NO: 5178875 - DNA, 25 bp, Homo sapien
taggaaccatgtagggagtgacgaa

SEQ ID NO: 5178876 - DNA, 25 bp, Homo sapien
agagatcagaagatatgggcaccac

SEQ ID NO: 5178877 - DNA, 25 bp, Homo sapien
ctggtatgtggatagcccttaggaa

SEQ ID NO: 5178878 - DNA, 25 bp, Homo sapien
ttcacatttaggagattaaacaatg

SEQ ID NO: 5178879 - DNA, 25 bp, Homo sapien
acatttaggagattaaacaatgggt

SEQ ID NO: 5178880 - DNA, 25 bp, Homo sapien
cacatttaggagattaaacaatggg

SEQ ID NO: 5178881 - DNA, 25 bp, Homo sapien
tcacatttaggagattaaacaatgg

SEQ ID NO: 5178882 - DNA, 25 bp, Homo sapien
ggtgcatatattgggcacacagcac

SEQ ID NO: 5178883 - DNA, 25 bp, Homo sapien
tcttatgtgtgaattagggatgatg

SEQ ID NO: 5178884 - DNA, 25 bp, Homo sapien
tgaattagggatgatggcatacaac

SEQ ID NO: 5178885 - DNA, 25 bp, Homo sapien
tttgcttctgtcaaggggctggtgc

SEQ ID NO: 5178886 - DNA, 25 bp, Homo sapien
tgtagtgctggatgcgtgcactgta

SEQ ID NO: 5178887 - DNA, 25 bp, Homo sapien
gctggatgcgtgcactgtagacatt

SEQ ID NO: 5178888 - DNA, 25 bp, Homo sapien
agtgctggatgcgtgcactgtagac

SEQ ID NO: 5178889 - DNA, 25 bp, Homo sapien
gatgcgtgcactgtagacattctga

SEQ ID NO: 5178890 - DNA, 25 bp, Homo sapien
tgtcaggcagccaatctatcaagag

SEQ ID NO: 5178891 - DNA, 25 bp, Homo sapien
tctatcaagagtaatgagattgtct

SEQ ID NO: 5178892 - DNA, 25 bp, Homo sapien
tctttggagtcagtgattttgtttc

SEQ ID NO: 5178893 - DNA, 25 bp, Homo sapien
cctctggcagttccaaaatattgtc

SEQ ID NO: 5178894 - DNA, 25 bp, Homo sapien
tgcaatgcatcagttttctataatc

SEQ ID NO: 5178895 - DNA, 25 bp, Homo sapien
ttttggctctaatctgcaatgcatc

SEQ ID NO: 5178896 - DNA, 25 bp, Homo sapien
ctcctgttgagtggttattatattg

SEQ ID NO: 5178897 - DNA, 25 bp, Homo sapien
taaacatcagtttggatgttcccat

SEQ ID NO: 5178898 - DNA, 25 bp, Homo sapien
cagctgactcgagttgttgttttct

SEQ ID NO: 5178899 - DNA, 25 bp, Homo sapien
agctgactcgagttgttgttttctc

SEQ ID NO: 5178900 - DNA, 25 bp, Homo sapien
ggcaaaacaatcctagtttcaatgt

SEQ ID NO: 5178901 - DNA, 25 bp, Homo sapien
caggcaaaacaatcctagtttcaat

SEQ ID NO: 5178902 - DNA, 25 bp, Homo sapien
ttcaggcaaaacaatcctagtttca

SEQ ID NO: 5178903 - DNA, 25 bp, Homo sapien
aaacaatcctagtttcaatgtcata

SEQ ID NO: 5178904 - DNA, 25 bp, Homo sapien
tgaatgctcattgtattcttggtca

SEQ ID NO: 5178905 - DNA, 25 bp, Homo sapien
ttgaatgctcattgtattcttggtc

SEQ ID NO: 5178906 - DNA, 25 bp, Homo sapien
cttgaatgctcattgtattcttggt

SEQ ID NO: 5178907 - DNA, 25 bp, Homo sapien
gtccaacatggctggcctttttact

SEQ ID NO: 5178908 - DNA, 25 bp, Homo sapien
tccaactgtagatgtatcttggcaa

SEQ ID NO: 5178909 - DNA, 25 bp, Homo sapien
catggctggcctttttactttacta

SEQ ID NO: 5178910 - DNA, 25 bp, Homo sapien
caactgtagatgtatcttggcaatg

SEQ ID NO: 5178911 - DNA, 25 bp, Homo sapien
aatgcagcatctgagagagtcagcg

SEQ ID NO: 5178912 - DNA, 25 bp, Homo sapien
gagagtcagcgtttcttggtcctgc

SEQ ID NO: 5178913 - DNA, 25 bp, Homo sapien
ttggtcctgctcaagtctccatggg

SEQ ID NO: 5178914 - DNA, 25 bp, Homo sapien
cagcatctgagagagtcagcgtttc

SEQ ID NO: 5178915 - DNA, 25 bp, Homo sapien
gcggctgtgttcacgttgtcttcgc

SEQ ID NO: 5178916 - DNA, 25 bp, Homo sapien
gtgctctaatctggaggagtgactt

SEQ ID NO: 5178917 - DNA, 25 bp, Homo sapien
ctttggtgctctaatctggaggagt

SEQ ID NO: 5178918 - DNA, 25 bp, Homo sapien
ggaggagtgacttgcatagacactc

SEQ ID NO: 5178919 - DNA, 25 bp, Homo sapien
catagacactcccagtccaggactg

SEQ ID NO: 5178920 - DNA, 25 bp, Homo sapien
gggcaatccgtatgttttatattct

SEQ ID NO: 5178921 - DNA, 25 bp, Homo sapien
gctgagcttccagcattctcatccc

SEQ ID NO: 5178922 - DNA, 25 bp, Homo sapien
tcagtaactctgggcaatccgtatg

SEQ ID NO: 5178923 - DNA, 25 bp, Homo sapien
aactctgggcaatccgtatgtttta

SEQ ID NO: 5178924 - DNA, 25 bp, Homo sapien
tgccttgtatggttctccactgagc

SEQ ID NO: 5178925 - DNA, 25 bp, Homo sapien
ccttgtatggttctccactgagctg

SEQ ID NO: 5178926 - DNA, 25 bp, Homo sapien
ctgccttgtatggttctccactgag

SEQ ID NO: 5178927 - DNA, 25 bp, Homo sapien
cttgtatggttctccactgagctgc

SEQ ID NO: 5178928 - DNA, 25 bp, Homo sapien
tgttcctctaagtgctagaatattc

SEQ ID NO: 5178929 - DNA, 25 bp, Homo sapien
tggcacttcatcagtgaagcaccac

SEQ ID NO: 5178930 - DNA, 25 bp, Homo sapien
tctggttacatgtgacctgttgccc

SEQ ID NO: 5178931 - DNA, 25 bp, Homo sapien
cttcatcagtgaagcaccacttgac

SEQ ID NO: 5178932 - DNA, 25 bp, Homo sapien
cagtgaagcaccacttgactatggg

SEQ ID NO: 5178933 - DNA, 25 bp, Homo sapien
tctgacactgagcagtccagaaagg

SEQ ID NO: 5178934 - DNA, 25 bp, Homo sapien
tcagaacttctacctaatccactcg

SEQ ID NO: 5178935 - DNA, 25 bp, Homo sapien
tccagaaagggcagtgatttgaatg

SEQ ID NO: 5178936 - DNA, 25 bp, Homo sapien
tattgaagacctggctaagagaatc

SEQ ID NO: 5178937 - DNA, 25 bp, Homo sapien
tgtttattcttagtgtgcaagaaat

SEQ ID NO: 5178938 - DNA, 25 bp, Homo sapien
ttagtgtgcaagaaatcctttccac

SEQ ID NO: 5178939 - DNA, 25 bp, Homo sapien
agctgtcgccatcattttagacttg

SEQ ID NO: 5178940 - DNA, 25 bp, Homo sapien
gggagctgtcgccatcattttagac

SEQ ID NO: 5178941 - DNA, 25 bp, Homo sapien
ttccatgcttgctgcttgagactcc

SEQ ID NO: 5178942 - DNA, 25 bp, Homo sapien
ccttcttcttaacccaattgtctca

SEQ ID NO: 5178943 - DNA, 25 bp, Homo sapien
tcattttccatgcttgctgcttgag

SEQ ID NO: 5178944 - DNA, 25 bp, Homo sapien
tcttaacccaattgtctcatcatca

SEQ ID NO: 5178945 - DNA, 25 bp, Homo sapien
cttctggcttggtgctttttatgta

SEQ ID NO: 5178946 - DNA, 25 bp, Homo sapien
gcttggtgctttttatgtatctgcc

SEQ ID NO: 5178947 - DNA, 25 bp, Homo sapien
gctttttatgtatctgcctctctct

SEQ ID NO: 5178948 - DNA, 25 bp, Homo sapien
ggtgctttttatgtatctgcctctc

SEQ ID NO: 5178949 - DNA, 25 bp, Homo sapien
ctggataaatgtccccttcatgaat

SEQ ID NO: 5178950 - DNA, 25 bp, Homo sapien
cttatcagtgactggataaatgtcc

SEQ ID NO: 5178951 - DNA, 25 bp, Homo sapien
tatcagtgactggataaatgtcccc

SEQ ID NO: 5178952 - DNA, 25 bp, Homo sapien
agtgactggataaatgtccccttca

SEQ ID NO: 5178953 - DNA, 25 bp, Homo sapien
tgaacttggttggtggcccttgcgt

SEQ ID NO: 5178954 - DNA, 25 bp, Homo sapien
caatttacatgcttcttgtaagggc

SEQ ID NO: 5178955 - DNA, 25 bp, Homo sapien
cccttgcgtgtaatagggcaatgtt

SEQ ID NO: 5178956 - DNA, 25 bp, Homo sapien
ttgtaagggcaaacttagagtggct

SEQ ID NO: 5178957 - DNA, 25 bp, Homo sapien
catatgcaacttgaggaccggtgga

SEQ ID NO: 5178958 - DNA, 25 bp, Homo sapien
tgccccatatgcaacttgaggaccg

SEQ ID NO: 5178959 - DNA, 25 bp, Homo sapien
tgcaacttgaggaccggtggatttc

SEQ ID NO: 5178960 - DNA, 25 bp, Homo sapien
ctcctgccccatatgcaacttgagg

SEQ ID NO: 5178961 - DNA, 25 bp, Homo sapien
tagatagtctctcatgtcagtggaa

SEQ ID NO: 5178962 - DNA, 25 bp, Homo sapien
aaaccccataagatttcaaactcag

SEQ ID NO: 5178963 - DNA, 25 bp, Homo sapien
gggactgtcttatatgttaatttac

SEQ ID NO: 5178964 - DNA, 25 bp, Homo sapien
aacttgactgtctatccgattttgc

SEQ ID NO: 5178965 - DNA, 25 bp, Homo sapien
ccgtagtgtttgctgtgttaggaga

SEQ ID NO: 5178966 - DNA, 25 bp, Homo sapien
ggaaagccgactcttcgtggatcat

SEQ ID NO: 5178967 - DNA, 25 bp, Homo sapien
gattccactatacaaagacctttgg

SEQ ID NO: 5178968 - DNA, 25 bp, Homo sapien
acagtgtcaccagtgaggcagtgca

SEQ ID NO: 5178969 - DNA, 25 bp, Homo sapien
ttgtgctctcttgtccctccaggct

SEQ ID NO: 5178970 - DNA, 25 bp, Homo sapien
gaggaagtgaaagctgtaaccctca

SEQ ID NO: 5178971 - DNA, 25 bp, Homo sapien
agctgtaaccctcaggaaatgccag

SEQ ID NO: 5178972 - DNA, 25 bp, Homo sapien
aaatgccagcattgaaggagagggt

SEQ ID NO: 5178973 - DNA, 25 bp, Homo sapien
ggggggcatttaaatgtgtaactga

SEQ ID NO: 5178974 - DNA, 25 bp, Homo sapien
gcatttaaatgtgtaactgagaatc

SEQ ID NO: 5178975 - DNA, 25 bp, Homo sapien
ggggcatttaaatgtgtaactgaga

SEQ ID NO: 5178976 - DNA, 25 bp, Homo sapien
gggcatttaaatgtgtaactgagaa

SEQ ID NO: 5178977 - DNA, 25 bp, Homo sapien
gcagagtatggagaacatcctcttg

SEQ ID NO: 5178978 - DNA, 25 bp, Homo sapien
ggtaaaacctgagagtgtctgccct

SEQ ID NO: 5178979 - DNA, 25 bp, Homo sapien
tgtctgccctttgggagcagagtat

SEQ ID NO: 5178980 - DNA, 25 bp, Homo sapien
gagcagagtatggagaacatcctct

SEQ ID NO: 5178981 - DNA, 25 bp, Homo sapien
cctgcccacctaatcatcctcttat

SEQ ID NO: 5178982 - DNA, 25 bp, Homo sapien
gccacagcctcaattttcccgaagc

SEQ ID NO: 5178983 - DNA, 25 bp, Homo sapien
gacaacaagtacaaatgccggcagc

SEQ ID NO: 5178984 - DNA, 25 bp, Homo sapien
acaagtacaaatgccggcagccaca

SEQ ID NO: 5178985 - DNA, 25 bp, Homo sapien
tcttgtccgtgattggtcttcctgc

SEQ ID NO: 5178986 - DNA, 25 bp, Homo sapien
tttctgtacttgtcgtcttgctcca

SEQ ID NO: 5178987 - DNA, 25 bp, Homo sapien
cattgggtgtaggtcactctcatca

SEQ ID NO: 5178988 - DNA, 25 bp, Homo sapien
tcttgctccattgggtgtaggtcac

SEQ ID NO: 5178989 - DNA, 25 bp, Homo sapien
tggaaaggccacttgagatttgccg

SEQ ID NO: 5178990 - DNA, 25 bp, Homo sapien
gatttgccgttgcaggctgctagca

SEQ ID NO: 5178991 - DNA, 25 bp, Homo sapien
ccctggccttcaaaaatctgggctt

SEQ ID NO: 5178992 - DNA, 25 bp, Homo sapien
ggacaaagtgtgaaacgctggctct

SEQ ID NO: 5178993 - DNA, 25 bp, Homo sapien
ttctggtctgtacatcacaccattt

SEQ ID NO: 5178994 - DNA, 25 bp, Homo sapien
cctcaaggccgatgtttccagggca

SEQ ID NO: 5178995 - DNA, 25 bp, Homo sapien
atattctggtctgtacatcacacca

SEQ ID NO: 5178996 - DNA, 25 bp, Homo sapien
ctgggcctgtcccataaacctcaag

SEQ ID NO: 5178997 - DNA, 25 bp, Homo sapien
aaagtgcctcttaagatgactatca

SEQ ID NO: 5178998 - DNA, 25 bp, Homo sapien
agagtcagtttgatttgatctggca

SEQ ID NO: 5178999 - DNA, 25 bp, Homo sapien
catctgagccttccaccaactgaga

SEQ ID NO: 5179000 - DNA, 25 bp, Homo sapien
tgactatcagctggtagcaggttga

SEQ ID NO: 5179001 - DNA, 25 bp, Homo sapien
ctttcttgtcatgctggaaagcctt

SEQ ID NO: 5179002 - DNA, 25 bp, Homo sapien
gaagcacccttagctcgaagctggg

SEQ ID NO: 5179003 - DNA, 25 bp, Homo sapien
tcttgtcatgctggaaagccttgtt

SEQ ID NO: 5179004 - DNA, 25 bp, Homo sapien
tctctttcctaatgaagcaccctta

SEQ ID NO: 5179005 - DNA, 25 bp, Homo sapien
ttccattctcatggactggggctgt

SEQ ID NO: 5179006 - DNA, 25 bp, Homo sapien
gtcagagccttttcattccctgtct

SEQ ID NO: 5179007 - DNA, 25 bp, Homo sapien
agagccttttcattccctgtctttt

SEQ ID NO: 5179008 - DNA, 25 bp, Homo sapien
ctgtcagagccttttcattccctgt

SEQ ID NO: 5179009 - DNA, 25 bp, Homo sapien
aactgtcagagccttttcattccct

SEQ ID NO: 5179010 - DNA, 25 bp, Homo sapien
tgaatttcgaaatacggtcgctgtg

SEQ ID NO: 5179011 - DNA, 25 bp, Homo sapien
ttcgaaatacggtcgctgtgcgcct

SEQ ID NO: 5179012 - DNA, 25 bp, Homo sapien
gacttgaatttcgaaatacggtcgc

SEQ ID NO: 5179013 - DNA, 25 bp, Homo sapien
tacggtcgctgtgcgcctcttcaga

SEQ ID NO: 5179014 - DNA, 25 bp, Homo sapien
ttgtacctgaatactgaaaccttgg

SEQ ID NO: 5179015 - DNA, 25 bp, Homo sapien
ggcttgtacctgaatactgaaacct

SEQ ID NO: 5179016 - DNA, 25 bp, Homo sapien
tgtacctgaatactgaaaccttggg

SEQ ID NO: 5179017 - DNA, 25 bp, Homo sapien
gcttgtacctgaatactgaaacctt

SEQ ID NO: 5179018 - DNA, 25 bp, Homo sapien
cagaatctggctgaatgattaagga

SEQ ID NO: 5179019 - DNA, 25 bp, Homo sapien
tctctataatttgtagccggaatct

SEQ ID NO: 5179020 - DNA, 25 bp, Homo sapien
ccaggatgtgaacggccaaagggct

SEQ ID NO: 5179021 - DNA, 25 bp, Homo sapien
gccggaatctatccttaattagaac

SEQ ID NO: 5179022 - DNA, 25 bp, Homo sapien
taattgtacattcagactggctggc

SEQ ID NO: 5179023 - DNA, 25 bp, Homo sapien
ctggcttctgtcatgctcatgtaat

SEQ ID NO: 5179024 - DNA, 25 bp, Homo sapien
catgctcatgtaattgtacattcag

SEQ ID NO: 5179025 - DNA, 25 bp, Homo sapien
tctgtcatgctcatgtaattgtaca

SEQ ID NO: 5179026 - DNA, 25 bp, Homo sapien
gaggcgattgaaatatgtgacaacc

SEQ ID NO: 5179027 - DNA, 25 bp, Homo sapien
cagaaacaaggtcttatagaggcga

SEQ ID NO: 5179028 - DNA, 25 bp, Homo sapien
tagtgatgagctacttgtatagatt

SEQ ID NO: 5179029 - DNA, 25 bp, Homo sapien
atatgtgacaaccattagcatttca

SEQ ID NO: 5179030 - DNA, 25 bp, Homo sapien
attttgatggcaaactttgggcttc

SEQ ID NO: 5179031 - DNA, 25 bp, Homo sapien
cagttgcaaaatcgtcttttgttcc

SEQ ID NO: 5179032 - DNA, 25 bp, Homo sapien
ccagatcatgtaggaatgagtcttc

SEQ ID NO: 5179033 - DNA, 25 bp, Homo sapien
acggtgctcctgtgtagccactgaa

SEQ ID NO: 5179034 - DNA, 25 bp, Homo sapien
cttgaatggcactagaaaatcacta

SEQ ID NO: 5179035 - DNA, 25 bp, Homo sapien
cttgtgcttcacagggtcttgaaaa

SEQ ID NO: 5179036 - DNA, 25 bp, Homo sapien
aggccagctgcccagactctcatga

SEQ ID NO: 5179037 - DNA, 25 bp, Homo sapien
aaatggtctattgaaagactagctc

SEQ ID NO: 5179038 - DNA, 25 bp, Homo sapien
taaagggtgtgctaatagtgaccac

SEQ ID NO: 5179039 - DNA, 25 bp, Homo sapien
ttttaccgtagccatcagcatccca

SEQ ID NO: 5179040 - DNA, 25 bp, Homo sapien
ccagacccaggccattcatttggct

SEQ ID NO: 5179041 - DNA, 25 bp, Homo sapien
cccttgtgagttggttagtgataga

SEQ ID NO: 5179042 - DNA, 25 bp, Homo sapien
cagtgttctcatttccgagtgctga

SEQ ID NO: 5179043 - DNA, 25 bp, Homo sapien
ttcctcaatttctttgtgaatactc

SEQ ID NO: 5179044 - DNA, 25 bp, Homo sapien
ccagggtgtagaggattatttttct

SEQ ID NO: 5179045 - DNA, 25 bp, Homo sapien
tcttcttgtcaataatagaagtcat

SEQ ID NO: 5179046 - DNA, 25 bp, Homo sapien
gagcaatctccatggattatagctg

SEQ ID NO: 5179047 - DNA, 25 bp, Homo sapien
atttttctgggcctgagcaatctcc

SEQ ID NO: 5179048 - DNA, 25 bp, Homo sapien
ttttctgggcctgagcaatctccat

SEQ ID NO: 5179049 - DNA, 25 bp, Homo sapien
aatctccatggattatagctgccac

SEQ ID NO: 5179050 - DNA, 25 bp, Homo sapien
tgctggcttgggtcgaattctaata

SEQ ID NO: 5179051 - DNA, 25 bp, Homo sapien
tgaagcctgcatcacattatgtcct

SEQ ID NO: 5179052 - DNA, 25 bp, Homo sapien
caactaagtgtaccagcttagccag

SEQ ID NO: 5179053 - DNA, 25 bp, Homo sapien
tgtagcatactgcaccaactaagtg

SEQ ID NO: 5179054 - DNA, 25 bp, Homo sapien
tgcctcacaagatctcagttttcct

SEQ ID NO: 5179055 - DNA, 25 bp, Homo sapien
tgtattctacctgtatagggcccct

SEQ ID NO: 5179056 - DNA, 25 bp, Homo sapien
gctttgtttcaaggaacattgtggg

SEQ ID NO: 5179057 - DNA, 25 bp, Homo sapien
tcaaatcacaaccaatttcctgggt

SEQ ID NO: 5179058 - DNA, 25 bp, Homo sapien
tgacaggtgagtctgccacagaagc

SEQ ID NO: 5179059 - DNA, 25 bp, Homo sapien
gacaggtgagtctgccacagaagca

SEQ ID NO: 5179060 - DNA, 25 bp, Homo sapien
gatctctcttgatgggggagtgaac

SEQ ID NO: 5179061 - DNA, 25 bp, Homo sapien
tggatctctcttgatgggggagtga

SEQ ID NO: 5179062 - DNA, 25 bp, Homo sapien
cttggatctctcttgatgggggagt

SEQ ID NO: 5179063 - DNA, 25 bp, Homo sapien
ttggatctctcttgatgggggagtg

SEQ ID NO: 5179064 - DNA, 25 bp, Homo sapien
agcagaatccaaagtacatcgtatc

SEQ ID NO: 5179065 - DNA, 25 bp, Homo sapien
gcacattctgtcaactttatataaa

SEQ ID NO: 5179066 - DNA, 25 bp, Homo sapien
tagctgcttgccagactgctctgtt

SEQ ID NO: 5179067 - DNA, 25 bp, Homo sapien
tcgtatcccagataaagctagctgc

SEQ ID NO: 5179068 - DNA, 25 bp, Homo sapien
ggggctttttctggtgccatcgcca

SEQ ID NO: 5179069 - DNA, 25 bp, Homo sapien
tgccatcgccaatgttgccttcata

SEQ ID NO: 5179070 - DNA, 25 bp, Homo sapien
ttccacatcaatgctcttttcctcc

SEQ ID NO: 5179071 - DNA, 25 bp, Homo sapien
ccactcctggaaccatagatgggtc

SEQ ID NO: 5179072 - DNA, 25 bp, Homo sapien
gttctgcagatgtcttgagtctgtc

SEQ ID NO: 5179073 - DNA, 25 bp, Homo sapien
tttagagatatatttagttctgcag

SEQ ID NO: 5179074 - DNA, 25 bp, Homo sapien
tgtttttcaagctgtgctgtattta

SEQ ID NO: 5179075 - DNA, 25 bp, Homo sapien
tgtcattggaattggactttcccat

SEQ ID NO: 5179076 - DNA, 25 bp, Homo sapien
caagcctgtctgatcatggtatctc

SEQ ID NO: 5179077 - DNA, 25 bp, Homo sapien
tttggtggaaacgtcagtctcagtg

SEQ ID NO: 5179078 - DNA, 25 bp, Homo sapien
cctacagtgtttgatgcaagtggtg

SEQ ID NO: 5179079 - DNA, 25 bp, Homo sapien
tggctgtagcaatgggcagaagacc

SEQ ID NO: 5179080 - DNA, 25 bp, Homo sapien
tgttctttaaggagttgctcttccc

SEQ ID NO: 5179081 - DNA, 25 bp, Homo sapien
accctcatgttctttaaggagttgc

SEQ ID NO: 5179082 - DNA, 25 bp, Homo sapien
ctttaaggagttgctcttccctcat

SEQ ID NO: 5179083 - DNA, 25 bp, Homo sapien
catgttctttaaggagttgctcttc

SEQ ID NO: 5179084 - DNA, 25 bp, Homo sapien
aggccagtgtgctaaagtacagcag

SEQ ID NO: 5179085 - DNA, 25 bp, Homo sapien
tagaggccagtgtgctaaagtacag

SEQ ID NO: 5179086 - DNA, 25 bp, Homo sapien
tggcccttctaatagaggccagtgt

SEQ ID NO: 5179087 - DNA, 25 bp, Homo sapien
cttgaatcccatggcccttctaata

SEQ ID NO: 5179088 - DNA, 25 bp, Homo sapien
atttatttgagccattgttgttttc

SEQ ID NO: 5179089 - DNA, 25 bp, Homo sapien
tatttatttgagccattgttgtttt

SEQ ID NO: 5179090 - DNA, 25 bp, Homo sapien
ctatttatttgagccattgttgttt

SEQ ID NO: 5179091 - DNA, 25 bp, Homo sapien
tttatttgagccattgttgttttca

SEQ ID NO: 5179092 - DNA, 25 bp, Homo sapien
ccttttggatgaacacggattgaac

SEQ ID NO: 5179093 - DNA, 25 bp, Homo sapien
cggattgaacgtttcttttctgtct

SEQ ID NO: 5179094 - DNA, 25 bp, Homo sapien
tctgtcttagttctttggaaagtgg

SEQ ID NO: 5179095 - DNA, 25 bp, Homo sapien
ccagttcttggtctgctcacatatc

SEQ ID NO: 5179096 - DNA, 25 bp, Homo sapien
gctcggccgcgttttcggtctcctg

SEQ ID NO: 5179097 - DNA, 25 bp, Homo sapien
tccgaggaccactggcggccgagct

SEQ ID NO: 5179098 - DNA, 25 bp, Homo sapien
tcggccgcgttttcggtctcctggc

SEQ ID NO: 5179099 - DNA, 25 bp, Homo sapien
tcaacccagacacctaaagtccgag

SEQ ID NO: 5179100 - DNA, 25 bp, Homo sapien
tctctcggaacaaaacgccaggctg

SEQ ID NO: 5179101 - DNA, 25 bp, Homo sapien
gaactgactgggtccgatgtccgga

SEQ ID NO: 5179102 - DNA, 25 bp, Homo sapien
ctgccgcccggacagtctgggaact

SEQ ID NO: 5179103 - DNA, 25 bp, Homo sapien
caaaagcgggtttaaatcactgtca

SEQ ID NO: 5179104 - DNA, 25 bp, Homo sapien
cataaaacatattcggaagcccaga

SEQ ID NO: 5179105 - DNA, 25 bp, Homo sapien
acatattcggaagcccagaccaaaa

SEQ ID NO: 5179106 - DNA, 25 bp, Homo sapien
tcaaccgtcataaaacatattcgga

SEQ ID NO: 5179107 - DNA, 25 bp, Homo sapien
ccgtcataaaacatattcggaagcc

SEQ ID NO: 5179108 - DNA, 25 bp, Homo sapien
ggaggaagttctcgctagatatcca

SEQ ID NO: 5179109 - DNA, 25 bp, Homo sapien
tctcgctagatatccagttccctgg

SEQ ID NO: 5179110 - DNA, 25 bp, Homo sapien
gggaatccggaggaagttctcgcta

SEQ ID NO: 5179111 - DNA, 25 bp, Homo sapien
ctgggtcttcctcggagacaaacct

SEQ ID NO: 5179112 - DNA, 25 bp, Homo sapien
gaacaggagataagaaagacggcaa

SEQ ID NO: 5179113 - DNA, 25 bp, Homo sapien
ggagataagaaagacggcaaacgcc

SEQ ID NO: 5179114 - DNA, 25 bp, Homo sapien
caggagataagaaagacggcaaacg

SEQ ID NO: 5179115 - DNA, 25 bp, Homo sapien
agataagaaagacggcaaacgccaa

SEQ ID NO: 5179116 - DNA, 25 bp, Homo sapien
gcgcagggagtgggcaacctcccca

SEQ ID NO: 5179117 - DNA, 25 bp, Homo sapien
tctccgactcaacaccagccgcggc

SEQ ID NO: 5179118 - DNA, 25 bp, Homo sapien
gctccactggactctccgactcaac

SEQ ID NO: 5179119 - DNA, 25 bp, Homo sapien
agggagtgggcaacctccccaggct

SEQ ID NO: 5179120 - DNA, 25 bp, Homo sapien
tttccagatcacaatcagacctggg

SEQ ID NO: 5179121 - DNA, 25 bp, Homo sapien
gaggtttccagatcacaatcagacc

SEQ ID NO: 5179122 - DNA, 25 bp, Homo sapien
ggaggtttccagatcacaatcagac

SEQ ID NO: 5179123 - DNA, 25 bp, Homo sapien
ggtttccagatcacaatcagacctg

SEQ ID NO: 5179124 - DNA, 25 bp, Homo sapien
aattgtcacttgtggtatttgcggc

SEQ ID NO: 5179125 - DNA, 25 bp, Homo sapien
cagcgctgtcatccagtgttatggc

SEQ ID NO: 5179126 - DNA, 25 bp, Homo sapien
gctgtcatccagtgttatggccaca

SEQ ID NO: 5179127 - DNA, 25 bp, Homo sapien
ttaattgcaacccaaccagcgctgt

SEQ ID NO: 5179128 - DNA, 25 bp, Homo sapien
aacgatgacaaaaagcaacccttgt

SEQ ID NO: 5179129 - DNA, 25 bp, Homo sapien
gcaacccttgttttggaggagccca

SEQ ID NO: 5179130 - DNA, 25 bp, Homo sapien
ttcccacagccaaaattaagcagca

SEQ ID NO: 5179131 - DNA, 25 bp, Homo sapien
gataggatgtattgtttcccacagc

SEQ ID NO: 5179132 - DNA, 25 bp, Homo sapien
tatgtcgtgatattcaccggtgaag

SEQ ID NO: 5179133 - DNA, 25 bp, Homo sapien
tttttaacactgctggacgctgaag

SEQ ID NO: 5179134 - DNA, 25 bp, Homo sapien
ggttgaacgccagcacattaccaat

SEQ ID NO: 5179135 - DNA, 25 bp, Homo sapien
ttcctgtggcaaacgagataaagac

SEQ ID NO: 5179136 - DNA, 25 bp, Homo sapien
cccgtaattctatgccacaagcttg

SEQ ID NO: 5179137 - DNA, 25 bp, Homo sapien
tggttgcaaccatagaacgtcctca

SEQ ID NO: 5179138 - DNA, 25 bp, Homo sapien
gtaagatctgtagcgacagcctgct

SEQ ID NO: 5179139 - DNA, 25 bp, Homo sapien
catcaattagtgtgactcaggtggg

SEQ ID NO: 5179140 - DNA, 25 bp, Homo sapien
caaaccgtgcacaaaaagaactgtc

SEQ ID NO: 5179141 - DNA, 25 bp, Homo sapien
tgagactgctcaagaataacctcct

SEQ ID NO: 5179142 - DNA, 25 bp, Homo sapien
gtactcaaattgttcatgtataaat

SEQ ID NO: 5179143 - DNA, 25 bp, Homo sapien
aattgttcatgtataaatatggatt

SEQ ID NO: 5179144 - DNA, 25 bp, Homo sapien
gattaaggtctttatgattatttca

SEQ ID NO: 5179145 - DNA, 25 bp, Homo sapien
taaatatggattaaggtctttatga

SEQ ID NO: 5179146 - DNA, 25 bp, Homo sapien
aaggctgtaccatgtattttaggac

SEQ ID NO: 5179147 - DNA, 25 bp, Homo sapien
tacactactgacatattgagccagc

SEQ ID NO: 5179148 - DNA, 25 bp, Homo sapien
tacatgggtaaactcgtataatggg

SEQ ID NO: 5179149 - DNA, 25 bp, Homo sapien
tccatccttgagtagaccccagtgt

SEQ ID NO: 5179150 - DNA, 25 bp, Homo sapien
cctctatacactattcctggaattt

SEQ ID NO: 5179151 - DNA, 25 bp, Homo sapien
cttcctctatacactattcctggaa

SEQ ID NO: 5179152 - DNA, 25 bp, Homo sapien
tcctccttcctctatacactattcc

SEQ ID NO: 5179153 - DNA, 25 bp, Homo sapien
tccttcctctatacactattcctgg

SEQ ID NO: 5179154 - DNA, 25 bp, Homo sapien
tagtcttcgagttgcttttcagtcc

SEQ ID NO: 5179155 - DNA, 25 bp, Homo sapien
cagtgtgactacagccaaccaaaga

SEQ ID NO: 5179156 - DNA, 25 bp, Homo sapien
gaataaagtaattcccagtgtgact

SEQ ID NO: 5179157 - DNA, 25 bp, Homo sapien
aactagtccaaaagaatggtcactg

SEQ ID NO: 5179158 - DNA, 25 bp, Homo sapien
ctgacaaataacgtttcaatggttc

SEQ ID NO: 5179159 - DNA, 25 bp, Homo sapien
caaacggctacatatgtaccaacaa

SEQ ID NO: 5179160 - DNA, 25 bp, Homo sapien
tatttctattaaccagccctaactg

SEQ ID NO: 5179161 - DNA, 25 bp, Homo sapien
caaataacgtttcaatggttctatt

SEQ ID NO: 5179162 - DNA, 25 bp, Homo sapien
gtggccaactggaataatttttgtc

SEQ ID NO: 5179163 - DNA, 25 bp, Homo sapien
tggccaactggaataatttttgtcc

SEQ ID NO: 5179164 - DNA, 25 bp, Homo sapien
gccctgtcctatcactaaagccaat

SEQ ID NO: 5179165 - DNA, 25 bp, Homo sapien
ttcagtggccctgtcctatcactaa

SEQ ID NO: 5179166 - DNA, 25 bp, Homo sapien
tctaactgtcctcgggccttggaaa

SEQ ID NO: 5179167 - DNA, 25 bp, Homo sapien
tctctaactgtcctcgggccttgga

SEQ ID NO: 5179168 - DNA, 25 bp, Homo sapien
accaccagggagcaactcaccaggc

SEQ ID NO: 5179169 - DNA, 25 bp, Homo sapien
aaacttgtccatactgagctgtctc

SEQ ID NO: 5179170 - DNA, 25 bp, Homo sapien
ctttgaatgagtagtcatgtatttc

SEQ ID NO: 5179171 - DNA, 25 bp, Homo sapien
tgttttctcagtcacttctaaccct

SEQ ID NO: 5179172 - DNA, 25 bp, Homo sapien
catgtatttcgtttgttattaactc

SEQ ID NO: 5179173 - DNA, 25 bp, Homo sapien
ggctttaatgcttgataccattttg

SEQ ID NO: 5179174 - DNA, 25 bp, Homo sapien
ttctccatgttaaaagctacttttg

SEQ ID NO: 5179175 - DNA, 25 bp, Homo sapien
aaaaactaaataaggccacagctgg

SEQ ID NO: 5179176 - DNA, 25 bp, Homo sapien
ccacagctggccaacttttacgttc

SEQ ID NO: 5179177 - DNA, 25 bp, Homo sapien
tggccaacttttacgttcaggtcca

SEQ ID NO: 5179178 - DNA, 25 bp, Homo sapien
taatgttttctctattattccgata

SEQ ID NO: 5179179 - DNA, 25 bp, Homo sapien
atgttttctctattattccgatatt

SEQ ID NO: 5179180 - DNA, 25 bp, Homo sapien
tgttttctctattattccgatatta

SEQ ID NO: 5179181 - DNA, 25 bp, Homo sapien
aatgttttctctattattccgatat

SEQ ID NO: 5179182 - DNA, 25 bp, Homo sapien
gcccataggttgtgcggtctgccac

SEQ ID NO: 5179183 - DNA, 25 bp, Homo sapien
gaatcccactcaggcataggaacac

SEQ ID NO: 5179184 - DNA, 25 bp, Homo sapien
tgcctagggcactataccaagaaag

SEQ ID NO: 5179185 - DNA, 25 bp, Homo sapien
ggagtcaattccaatcagcgttagt

SEQ ID NO: 5179186 - DNA, 25 bp, Homo sapien
gtgcaaactatgttctggtaactcc

SEQ ID NO: 5179187 - DNA, 25 bp, Homo sapien
gcaaactatgttctggtaactccat

SEQ ID NO: 5179188 - DNA, 25 bp, Homo sapien
tgcaaactatgttctggtaactcca

SEQ ID NO: 5179189 - DNA, 25 bp, Homo sapien
tttatctttgtcaccataacacggt

SEQ ID NO: 5179190 - DNA, 25 bp, Homo sapien
accataacacggttcaacaccagtt

SEQ ID NO: 5179191 - DNA, 25 bp, Homo sapien
agcagttgatatcatccagccaaca

SEQ ID NO: 5179192 - DNA, 25 bp, Homo sapien
tccaggtagcaaaacaatgccgccg

SEQ ID NO: 5179193 - DNA, 25 bp, Homo sapien
gaaaattactcaatactaccataaa

SEQ ID NO: 5179194 - DNA, 25 bp, Homo sapien
agaggggaagtgtgaaaattactca

SEQ ID NO: 5179195 - DNA, 25 bp, Homo sapien
gggaagtgtgaaaattactcaatac

SEQ ID NO: 5179196 - DNA, 25 bp, Homo sapien
gtgtgaaaattactcaatactacca

SEQ ID NO: 5179197 - DNA, 25 bp, Homo sapien
gcgaaaggcctactttgcaagaaaa

SEQ ID NO: 5179198 - DNA, 25 bp, Homo sapien
tctcttcgggtaaagagcgaaaggc

SEQ ID NO: 5179199 - DNA, 25 bp, Homo sapien
tcagagttctcactactgggtagat

SEQ ID NO: 5179200 - DNA, 25 bp, Homo sapien
agtttataatcgtaacaatattggg

SEQ ID NO: 5179201 - DNA, 25 bp, Homo sapien
ttcgtaacagcacatatcacttgac

SEQ ID NO: 5179202 - DNA, 25 bp, Homo sapien
ctttcgtaacagcacatatcacttg

SEQ ID NO: 5179203 - DNA, 25 bp, Homo sapien
taacagcacatatcacttgaccact

SEQ ID NO: 5179204 - DNA, 25 bp, Homo sapien
cgtaacagcacatatcacttgacca

SEQ ID NO: 5179205 - DNA, 25 bp, Homo sapien
ccgagtctcacatagctggagtatt

SEQ ID NO: 5179206 - DNA, 25 bp, Homo sapien
aatggctcactactctttttggcac

SEQ ID NO: 5179207 - DNA, 25 bp, Homo sapien
tagcatttaacctccagacacaaag

SEQ ID NO: 5179208 - DNA, 25 bp, Homo sapien
tatttgcaatgaataacacacttgc

SEQ ID NO: 5179209 - DNA, 25 bp, Homo sapien
tccacactttgacaattcttgaatc

SEQ ID NO: 5179210 - DNA, 25 bp, Homo sapien
aagacctggatttagcctctagaac

SEQ ID NO: 5179211 - DNA, 25 bp, Homo sapien
gaccttaagtcatgaaaagacctgg

SEQ ID NO: 5179212 - DNA, 25 bp, Homo sapien
catagcacctactaactcaaacgga

SEQ ID NO: 5179213 - DNA, 25 bp, Homo sapien
taaaagctcgtatctcatgggtgaa

SEQ ID NO: 5179214 - DNA, 25 bp, Homo sapien
aaatatacttcagggctgtcttttt

SEQ ID NO: 5179215 - DNA, 25 bp, Homo sapien
ttgccctcacagcaacaaaaatata

SEQ ID NO: 5179216 - DNA, 25 bp, Homo sapien
acaaaaatatacttcagggctgtct

SEQ ID NO: 5179217 - DNA, 25 bp, Homo sapien
attgccctcacagcaacaaaaatat

SEQ ID NO: 5179218 - DNA, 25 bp, Homo sapien
aataagaaaacttttcattacacat

SEQ ID NO: 5179219 - DNA, 25 bp, Homo sapien
aacaagtacaggagggtaggccatc

SEQ ID NO: 5179220 - DNA, 25 bp, Homo sapien
gcaattaacataagtggcaccaagg

SEQ ID NO: 5179221 - DNA, 25 bp, Homo sapien
ggcaccaaggaatagagcaggatgt

SEQ ID NO: 5179222 - DNA, 25 bp, Homo sapien
ggccatcttgtgatgcctgtacacc

SEQ ID NO: 5179223 - DNA, 25 bp, Homo sapien
gtgttcataaactccaatcagtagt

SEQ ID NO: 5179224 - DNA, 25 bp, Homo sapien
gctaaagaaaggtgccaagggatac

SEQ ID NO: 5179225 - DNA, 25 bp, Homo sapien
tctaaattaacttggctgaaaactg

SEQ ID NO: 5179226 - DNA, 25 bp, Homo sapien
tacagtttgtcttgataccacaagc

SEQ ID NO: 5179227 - DNA, 25 bp, Homo sapien
caaacctagtaatggagaaggtggg

SEQ ID NO: 5179228 - DNA, 25 bp, Homo sapien
cacatattcgttaagcaactgggct

SEQ ID NO: 5179229 - DNA, 25 bp, Homo sapien
ggctttccagacacaaccaaatctt

SEQ ID NO: 5179230 - DNA, 25 bp, Homo sapien
actgcagtggtttcaaacctagtaa

SEQ ID NO: 5179231 - DNA, 25 bp, Homo sapien
cgtttttctgcaccaatgaactgta

SEQ ID NO: 5179232 - DNA, 25 bp, Homo sapien
tgtgatcagccaaagatccacatca

SEQ ID NO: 5179233 - DNA, 25 bp, Homo sapien
cattccaggcaaactgtagacttcg

SEQ ID NO: 5179234 - DNA, 25 bp, Homo sapien
gtagacttcgtattcattttgccat

SEQ ID NO: 5179235 - DNA, 25 bp, Homo sapien
ttttaggccaggtatatcctcatgt

SEQ ID NO: 5179236 - DNA, 25 bp, Homo sapien
tccaagagaccacattagccttaag

SEQ ID NO: 5179237 - DNA, 25 bp, Homo sapien
aaatatgccaatcctctagccatgg

SEQ ID NO: 5179238 - DNA, 25 bp, Homo sapien
gccatggtttctgcaatatgacaca

SEQ ID NO: 5179239 - DNA, 25 bp, Homo sapien
aatgcaagctgtcaggttgtttttc

SEQ ID NO: 5179240 - DNA, 25 bp, Homo sapien
ctgtccatgggtatcgcctgcagac

SEQ ID NO: 5179241 - DNA, 25 bp, Homo sapien
atgggtatcgcctgcagacttgcca

SEQ ID NO: 5179242 - DNA, 25 bp, Homo sapien
gtcaggttgtttttcaacagcacat

SEQ ID NO: 5179243 - DNA, 25 bp, Homo sapien
taggttgaactggtttccctgatta

SEQ ID NO: 5179244 - DNA, 25 bp, Homo sapien
taaaaggtgatcttgcaggaatgaa

SEQ ID NO: 5179245 - DNA, 25 bp, Homo sapien
gaagaaatgataatgtcgaaggcct

SEQ ID NO: 5179246 - DNA, 25 bp, Homo sapien
ccctgattaaaaggtgatcttggct

SEQ ID NO: 5179247 - DNA, 25 bp, Homo sapien
tctggagccatgtacctccgggtac

SEQ ID NO: 5179248 - DNA, 25 bp, Homo sapien
tgcagcagtacagcgagaagccagt

SEQ ID NO: 5179249 - DNA, 25 bp, Homo sapien
gaagccagttcccataggactaatc

SEQ ID NO: 5179250 - DNA, 25 bp, Homo sapien
cctttggaagtttatagcaccctct

SEQ ID NO: 5179251 - DNA, 25 bp, Homo sapien
tcaacacacgtgaaagcacctactt

SEQ ID NO: 5179252 - DNA, 25 bp, Homo sapien
gggaatgggccagacaactcacact

SEQ ID NO: 5179253 - DNA, 25 bp, Homo sapien
aagccaatccctcaatcctggaaga

SEQ ID NO: 5179254 - DNA, 25 bp, Homo sapien
caattgggttctgacttaagagtca

SEQ ID NO: 5179255 - DNA, 25 bp, Homo sapien
tgtttacatgctatgaggacagaag

SEQ ID NO: 5179256 - DNA, 25 bp, Homo sapien
cagaggacataaggaacaatcagta

SEQ ID NO: 5179257 - DNA, 25 bp, Homo sapien
aaaggatgcctatttccatctgcac

SEQ ID NO: 5179258 - DNA, 25 bp, Homo sapien
cagtgtgaccaaactaatgtatggg

SEQ ID NO: 5179259 - DNA, 25 bp, Homo sapien
ttatgcacaacaacttcctgcatgt

SEQ ID NO: 5179260 - DNA, 25 bp, Homo sapien
tcctcctcaaatggcaacatgtatt

SEQ ID NO: 5179261 - DNA, 25 bp, Homo sapien
caagagatggatgctggccaatttc

SEQ ID NO: 5179262 - DNA, 25 bp, Homo sapien
gcacaacaacttcctgcatgtcttc

SEQ ID NO: 5179263 - DNA, 25 bp, Homo sapien
gaccactgttacaatgtcctctgtg

SEQ ID NO: 5179264 - DNA, 25 bp, Homo sapien
catagactagattctttgggaggaa

SEQ ID NO: 5179265 - DNA, 25 bp, Homo sapien
taattctttcacctacacatccagc

SEQ ID NO: 5179266 - DNA, 25 bp, Homo sapien
tgataacctggcttctgcgtcgtga

SEQ ID NO: 5179267 - DNA, 25 bp, Homo sapien
gttttcaaacactccattagccagg

SEQ ID NO: 5179268 - DNA, 25 bp, Homo sapien
tagcagctccagttcagagtcccat

SEQ ID NO: 5179269 - DNA, 25 bp, Homo sapien
tagcaaccgtggaactgaggtatac

SEQ ID NO: 5179270 - DNA, 25 bp, Homo sapien
tcttagtgtgcacagatggcgcaac

SEQ ID NO: 5179271 - DNA, 25 bp, Homo sapien
tgaatggtctgcagcacacagacgc

SEQ ID NO: 5179272 - DNA, 25 bp, Homo sapien
aaaacactgctttacgaatggccac

SEQ ID NO: 5179273 - DNA, 25 bp, Homo sapien
gggacacacgtgacagttctgaatg

SEQ ID NO: 5179274 - DNA, 25 bp, Homo sapien
tctgggtaacgacacttcctgaggt

SEQ ID NO: 5179275 - DNA, 25 bp, Homo sapien
caagactaggtataaggacaggtag

SEQ ID NO: 5179276 - DNA, 25 bp, Homo sapien
tctgcactgactgtaaaccaaacac

SEQ ID NO: 5179277 - DNA, 25 bp, Homo sapien
tgttaacttgcccactctgcactga

SEQ ID NO: 5179278 - DNA, 25 bp, Homo sapien
gctacagttaaatacaatacccagg

SEQ ID NO: 5179279 - DNA, 25 bp, Homo sapien
ttaacaatcacttatccaaggtggg

SEQ ID NO: 5179280 - DNA, 25 bp, Homo sapien
catgggactaacaatcgtgaagcac

SEQ ID NO: 5179281 - DNA, 25 bp, Homo sapien
caaatgggatatgggttgagactgc

SEQ ID NO: 5179282 - DNA, 25 bp, Homo sapien
cagtagtacaataacctgtgcccaa

SEQ ID NO: 5179283 - DNA, 25 bp, Homo sapien
gccagtgctattaagacctgaagtt

SEQ ID NO: 5179284 - DNA, 25 bp, Homo sapien
agttcaacagtggattccttaccaa

SEQ ID NO: 5179285 - DNA, 25 bp, Homo sapien
taagacctgaagttcaacagtggat

SEQ ID NO: 5179286 - DNA, 25 bp, Homo sapien
ttttaaagtatgctctaaggaacaa

SEQ ID NO: 5179287 - DNA, 25 bp, Homo sapien
tgcacagttctattcagctcttaac

SEQ ID NO: 5179288 - DNA, 25 bp, Homo sapien
tctcatgttcagatatgaaggtatc

SEQ ID NO: 5179289 - DNA, 25 bp, Homo sapien
tgaaggtatctgagctgtttctcta

SEQ ID NO: 5179290 - DNA, 25 bp, Homo sapien
catagagaatatgttccagtgatgt

SEQ ID NO: 5179291 - DNA, 25 bp, Homo sapien
ctctttgacctgtgcttggacaact

SEQ ID NO: 5179292 - DNA, 25 bp, Homo sapien
ctttgaaactaaataaatcggacat

SEQ ID NO: 5179293 - DNA, 25 bp, Homo sapien
tgacctgtgcttggacaactttgaa

SEQ ID NO: 5179294 - DNA, 25 bp, Homo sapien
gcttggacaactttgaaactaaata

SEQ ID NO: 5179295 - DNA, 25 bp, Homo sapien
tgagtggagcttccctccatgtctt

SEQ ID NO: 5179296 - DNA, 25 bp, Homo sapien
cctttgctttttctcggagagggat

SEQ ID NO: 5179297 - DNA, 25 bp, Homo sapien
tccatgtcttgcgttgttgctacaa

SEQ ID NO: 5179298 - DNA, 25 bp, Homo sapien
ccctggtattctggagtggctttgg

SEQ ID NO: 5179299 - DNA, 25 bp, Homo sapien
taaacttgctgcaaacgaaggccag

SEQ ID NO: 5179300 - DNA, 25 bp, Homo sapien
ttcctgcaggcgttggttcccctct

SEQ ID NO: 5179301 - DNA, 25 bp, Homo sapien
ccaggcgattcggtgaagcgattcc

SEQ ID NO: 5179302 - DNA, 25 bp, Homo sapien
taaatgcaggcttttatgcgagagg

SEQ ID NO: 5179303 - DNA, 25 bp, Homo sapien
ctgtggaggatgacacaaagggtaa

SEQ ID NO: 5179304 - DNA, 25 bp, Homo sapien
tagaattagtgtcctgtccctttaa

SEQ ID NO: 5179305 - DNA, 25 bp, Homo sapien
tagtgagatgtctccagccagggcc

SEQ ID NO: 5179306 - DNA, 25 bp, Homo sapien
cccctgaattcaaggttgaagtggg

SEQ ID NO: 5179307 - DNA, 25 bp, Homo sapien
tgccccccacttttgagtgccttcc

SEQ ID NO: 5179308 - DNA, 25 bp, Homo sapien
ctgccccccacttttgagtgccttc

SEQ ID NO: 5179309 - DNA, 25 bp, Homo sapien
cccccacttttgagtgccttccctg

SEQ ID NO: 5179310 - DNA, 25 bp, Homo sapien
ccagcaaactattgatggagaggtt

SEQ ID NO: 5179311 - DNA, 25 bp, Homo sapien
catacagtgggcaatttggttcaga

SEQ ID NO: 5179312 - DNA, 25 bp, Homo sapien
tgttattccataaacttaaatctgg

SEQ ID NO: 5179313 - DNA, 25 bp, Homo sapien
gaaagtggtaccaatccagcaaact

SEQ ID NO: 5179314 - DNA, 25 bp, Homo sapien
tattgccagtctgatcacaaaattg

SEQ ID NO: 5179315 - DNA, 25 bp, Homo sapien
aaattgctgttttcatattgccagt

SEQ ID NO: 5179316 - DNA, 25 bp, Homo sapien
gatcagagataccaatgcagttaca

SEQ ID NO: 5179317 - DNA, 25 bp, Homo sapien
tatgcaatgcttcactgtcactaaa

SEQ ID NO: 5179318 - DNA, 25 bp, Homo sapien
tatccaacttagataaagtctgcaa

SEQ ID NO: 5179319 - DNA, 25 bp, Homo sapien
gactaaatttttactcagctgccta

SEQ ID NO: 5179320 - DNA, 25 bp, Homo sapien
tcttctaaccataaaggatcatggg

SEQ ID NO: 5179321 - DNA, 25 bp, Homo sapien
tgggcaactaccaccccaattatct

SEQ ID NO: 5179322 - DNA, 25 bp, Homo sapien
attcaaatatgcctaactctaaaac

SEQ ID NO: 5179323 - DNA, 25 bp, Homo sapien
ctaacatggattatgacaagctacc

SEQ ID NO: 5179324 - DNA, 25 bp, Homo sapien
taccagtaggaactactgtgtacca

SEQ ID NO: 5179325 - DNA, 25 bp, Homo sapien
gaaaattgtggcaagggaggacaag

SEQ ID NO: 5179326 - DNA, 25 bp, Homo sapien
tgaaatttaagtgcatcctgaacaa

SEQ ID NO: 5179327 - DNA, 25 bp, Homo sapien
agtagcacttgttttatagagctgg

SEQ ID NO: 5179328 - DNA, 25 bp, Homo sapien
taaaagcggcctaatcattccaaca

SEQ ID NO: 5179329 - DNA, 25 bp, Homo sapien
tcattccaacaacctattgcaccgg

SEQ ID NO: 5179330 - DNA, 25 bp, Homo sapien
cactgatgactaggagtaaatcttc

SEQ ID NO: 5179331 - DNA, 25 bp, Homo sapien
atcttcatatccatagaaaactgga

SEQ ID NO: 5179332 - DNA, 25 bp, Homo sapien
tggctgacttcatgggggtcccact

SEQ ID NO: 5179333 - DNA, 25 bp, Homo sapien
gacaagtttgcaaaggtacataagt

SEQ ID NO: 5179334 - DNA, 25 bp, Homo sapien
gaatcgctaagtacaatctgttttg

SEQ ID NO: 5179335 - DNA, 25 bp, Homo sapien
aaagatgtttaatgaatcgctaagt

SEQ ID NO: 5179336 - DNA, 25 bp, Homo sapien
aagtacaatctgttttgcacataca

SEQ ID NO: 5179337 - DNA, 25 bp, Homo sapien
taatgaatcgctaagtacaatctgt

SEQ ID NO: 5179338 - DNA, 25 bp, Homo sapien
tagctcttcacattaaactgcaggg

SEQ ID NO: 5179339 - DNA, 25 bp, Homo sapien
aagatacgaccaatacacttgtgga

SEQ ID NO: 5179340 - DNA, 25 bp, Homo sapien
ctgcagggaccatctttgtttttca

SEQ ID NO: 5179341 - DNA, 25 bp, Homo sapien
aaggcaaccacataggctattttca

SEQ ID NO: 5179342 - DNA, 25 bp, Homo sapien
catgaaagccatgacaggaactgag

SEQ ID NO: 5179343 - DNA, 25 bp, Homo sapien
gttgagtcaccatgagcagttccca

SEQ ID NO: 5179344 - DNA, 25 bp, Homo sapien
tgataaaaactctactgtgactgtg

SEQ ID NO: 5179345 - DNA, 25 bp, Homo sapien
tctgtgaagctatcagggccataat

SEQ ID NO: 5179346 - DNA, 25 bp, Homo sapien
tggctctggcctgcattctaatacc

SEQ ID NO: 5179347 - DNA, 25 bp, Homo sapien
agtgatatttgtagctagtaagagc

SEQ ID NO: 5179348 - DNA, 25 bp, Homo sapien
catagtaaactgaacactgtagctt

SEQ ID NO: 5179349 - DNA, 25 bp, Homo sapien
aaacagttagatgtctggctctggc

SEQ ID NO: 5179350 - DNA, 25 bp, Homo sapien
tccgggagatcaagacctatgtcta

SEQ ID NO: 5179351 - DNA, 25 bp, Homo sapien
aagacactggcaaaccctttgtgaa

SEQ ID NO: 5179352 - DNA, 25 bp, Homo sapien
aaaaattcctcttgatcgcactgag

SEQ ID NO: 5179353 - DNA, 25 bp, Homo sapien
tacgtacctctctacagcaactgaa

SEQ ID NO: 5179354 - DNA, 25 bp, Homo sapien
tagaagaaacgtatcaatccctgaa

SEQ ID NO: 5179355 - DNA, 25 bp, Homo sapien
tttcaggtgcgaggataatcatacc

SEQ ID NO: 5179356 - DNA, 25 bp, Homo sapien
tagaggaccttggaatacgcttcgc

SEQ ID NO: 5179357 - DNA, 25 bp, Homo sapien
gacttttagcacaatgagtggcgca

SEQ ID NO: 5179358 - DNA, 25 bp, Homo sapien
caaacccaggaatgtctctgaaagc

SEQ ID NO: 5179359 - DNA, 25 bp, Homo sapien
tattcagtctatggagccaatgctc

SEQ ID NO: 5179360 - DNA, 25 bp, Homo sapien
gccgctaaggatgcaacaaaagaaa

SEQ ID NO: 5179361 - DNA, 25 bp, Homo sapien
tgaaagctctacaggttgtcgccta

SEQ ID NO: 5179362 - DNA, 25 bp, Homo sapien
tacccttgtggttaactgatactca

SEQ ID NO: 5179363 - DNA, 25 bp, Homo sapien
taactgactggccagtacccttgtg

SEQ ID NO: 5179364 - DNA, 25 bp, Homo sapien
aaataagaagcaggaatatgtgccc

SEQ ID NO: 5179365 - DNA, 25 bp, Homo sapien
gcccagggtaggaagtgactttaca

SEQ ID NO: 5179366 - DNA, 25 bp, Homo sapien
ccagtagggtacttttgcagggatt

SEQ ID NO: 5179367 - DNA, 25 bp, Homo sapien
gggcctggtcctacatgattttaat

SEQ ID NO: 5179368 - DNA, 25 bp, Homo sapien
tgtccatatagtatacacactcaga

SEQ ID NO: 5179369 - DNA, 25 bp, Homo sapien
gaatagttattccagacctaggaga

SEQ ID NO: 5179370 - DNA, 25 bp, Homo sapien
cagtaattgaagctgaggatccaga

SEQ ID NO: 5179371 - DNA, 25 bp, Homo sapien
taattctcgatactggctggacttc

SEQ ID NO: 5179372 - DNA, 25 bp, Homo sapien
gattctgtagtgtcgtcagccctcc

SEQ ID NO: 5179373 - DNA, 25 bp, Homo sapien
caactcccgctgaactggtgtttaa

SEQ ID NO: 5179374 - DNA, 25 bp, Homo sapien
tcaggtgattccgatacaggtggtc

SEQ ID NO: 5179375 - DNA, 25 bp, Homo sapien
ttttagagtaacgtactgaggctcg

SEQ ID NO: 5179376 - DNA, 25 bp, Homo sapien
tgactagctaccagatcgatccctt

SEQ ID NO: 5179377 - DNA, 25 bp, Homo sapien
gggtggagtccaatagtctgcaatt

SEQ ID NO: 5179378 - DNA, 25 bp, Homo sapien
aatcataggtactgacagacccagg

SEQ ID NO: 5179379 - DNA, 25 bp, Homo sapien
agagaaccatcaggcaatccttgtt

SEQ ID NO: 5179380 - DNA, 25 bp, Homo sapien
gcagaactggtgtaatccataaagc

SEQ ID NO: 5179381 - DNA, 25 bp, Homo sapien
ggtaggcaacatatggtgagtcaag

SEQ ID NO: 5179382 - DNA, 25 bp, Homo sapien
tacatcgcataatccttgtctagga

SEQ ID NO: 5179383 - DNA, 25 bp, Homo sapien
gataatggcatgtccctactagact

SEQ ID NO: 5179384 - DNA, 25 bp, Homo sapien
tactagacttgtaacctggttctca

SEQ ID NO: 5179385 - DNA, 25 bp, Homo sapien
tactaaatagttcagccccatgggc

SEQ ID NO: 5179386 - DNA, 25 bp, Homo sapien
aaagaaggcttgaacaatcctagaa

SEQ ID NO: 5179387 - DNA, 25 bp, Homo sapien
tgcaggagaaatagacagttcaaca

SEQ ID NO: 5179388 - DNA, 25 bp, Homo sapien
taacagttatcaacatatgtgcacc

SEQ ID NO: 5179389 - DNA, 25 bp, Homo sapien
tatgtgcacctaacaatacagcccc

SEQ ID NO: 5179390 - DNA, 25 bp, Homo sapien
taacaaggtcttcatacagtccaca

SEQ ID NO: 5179391 - DNA, 25 bp, Homo sapien
tgtggacatgctcttcatgcagctg

SEQ ID NO: 5179392 - DNA, 25 bp, Homo sapien
gaaacctaagtaatgagagtactgc

SEQ ID NO: 5179393 - DNA, 25 bp, Homo sapien
caaaccctaaagcatattgttgtgg

SEQ ID NO: 5179394 - DNA, 25 bp, Homo sapien
gattcactatctggaaaagatggac

SEQ ID NO: 5179395 - DNA, 25 bp, Homo sapien
acctattagggcatgttaagccacc

SEQ ID NO: 5179396 - DNA, 25 bp, Homo sapien
tgtagggtttctgtgagtatccaag

SEQ ID NO: 5179397 - DNA, 25 bp, Homo sapien
taagccacccatggtctaaacttcc

SEQ ID NO: 5179398 - DNA, 25 bp, Homo sapien
catttttaaggggtggctccatgca

SEQ ID NO: 5179399 - DNA, 25 bp, Homo sapien
gaagtatatatactcaagccatcca

SEQ ID NO: 5179400 - DNA, 25 bp, Homo sapien
acagaatctcaccagtcaccaataa

SEQ ID NO: 5179401 - DNA, 25 bp, Homo sapien
atgttgcccacggtgctcgcgaagt

SEQ ID NO: 5179402 - DNA, 25 bp, Homo sapien
ggagtgcaatgggtgtgttcaaagc

SEQ ID NO: 5179403 - DNA, 25 bp, Homo sapien
gtgtgttcaaagctcatcgcagcct

SEQ ID NO: 5179404 - DNA, 25 bp, Homo sapien
ggtgtgttcaaagctcatcgcagcc

SEQ ID NO: 5179405 - DNA, 25 bp, Homo sapien
gattctagggattactgtcaaactt

SEQ ID NO: 5179406 - DNA, 25 bp, Homo sapien
tttagtatgttgcagctttcctctg

SEQ ID NO: 5179407 - DNA, 25 bp, Homo sapien
taaaagcaggttatgcaacttcatt

SEQ ID NO: 5179408 - DNA, 25 bp, Homo sapien
catgtatgtatatccatatggttac

SEQ ID NO: 5179409 - DNA, 25 bp, Homo sapien
catgggtttgctctcttaactgaac

SEQ ID NO: 5179410 - DNA, 25 bp, Homo sapien
cagagcatgctcacaagctaggaga

SEQ ID NO: 5179411 - DNA, 25 bp, Homo sapien
ggtttccgccacacaacagagcatg

SEQ ID NO: 5179412 - DNA, 25 bp, Homo sapien
tcacacaggtctactggtccagcct

SEQ ID NO: 5179413 - DNA, 25 bp, Homo sapien
taagttagaatgagacaaacgcagg

SEQ ID NO: 5179414 - DNA, 25 bp, Homo sapien
taaccagaatggacatagctaacct

SEQ ID NO: 5179415 - DNA, 25 bp, Homo sapien
tctttctgacaggatgtctaggcca

SEQ ID NO: 5179416 - DNA, 25 bp, Homo sapien
ctgtggtaggtactgggaacatcac

SEQ ID NO: 5179417 - DNA, 25 bp, Homo sapien
tgacatgtagacccctcttccacag

SEQ ID NO: 5179418 - DNA, 25 bp, Homo sapien
ggccacactctgacatgtagacccc

SEQ ID NO: 5179419 - DNA, 25 bp, Homo sapien
acactctgacatgtagacccctctt

SEQ ID NO: 5179420 - DNA, 25 bp, Homo sapien
gacatgtagacccctcttccacagt

SEQ ID NO: 5179421 - DNA, 25 bp, Homo sapien
tttgcctctgattatcaaaaaacaa

SEQ ID NO: 5179422 - DNA, 25 bp, Homo sapien
tgactgaatatttaagtctcagttt

SEQ ID NO: 5179423 - DNA, 25 bp, Homo sapien
ctttgcctctgattatcaaaaaaca

SEQ ID NO: 5179424 - DNA, 25 bp, Homo sapien
tacttgaaagaagcttgacagagaa

SEQ ID NO: 5179425 - DNA, 25 bp, Homo sapien
gacctgaagagttcagagaacctgt

SEQ ID NO: 5179426 - DNA, 25 bp, Homo sapien
gaatatgctaatgccaatcagagaa

SEQ ID NO: 5179427 - DNA, 25 bp, Homo sapien
tagtactgggcaaatggcatagacc

SEQ ID NO: 5179428 - DNA, 25 bp, Homo sapien
attgcgatcctctatttcttattct

SEQ ID NO: 5179429 - DNA, 25 bp, Homo sapien
actggaagtaattgctctggtgccc

SEQ ID NO: 5179430 - DNA, 25 bp, Homo sapien
gttgagctctgtacttccaccaaga

SEQ ID NO: 5179431 - DNA, 25 bp, Homo sapien
aacagtatcatggaagttgagctct

SEQ ID NO: 5179432 - DNA, 25 bp, Homo sapien
caccaagagtttagttcaagtcagg

SEQ ID NO: 5179433 - DNA, 25 bp, Homo sapien
taaagacagatggaagtctagtccc

SEQ ID NO: 5179434 - DNA, 25 bp, Homo sapien
ggaaaggatttagacagggcacttc

SEQ ID NO: 5179435 - DNA, 25 bp, Homo sapien
tagcagtagtctgagcctgttccaa

SEQ ID NO: 5179436 - DNA, 25 bp, Homo sapien
gaactacgggtagcataaagaggaa

SEQ ID NO: 5179437 - DNA, 25 bp, Homo sapien
ggataacctgatgaccgtgtgcttg

SEQ ID NO: 5179438 - DNA, 25 bp, Homo sapien
tggaggctcctatgttaggtgcacg

SEQ ID NO: 5179439 - DNA, 25 bp, Homo sapien
taatataaggacagctattcctgct

SEQ ID NO: 5179440 - DNA, 25 bp, Homo sapien
tacctgatgctttagactcacagtt

SEQ ID NO: 5179441 - DNA, 25 bp, Homo sapien
tacctgataataagtgatgctgagc

SEQ ID NO: 5179442 - DNA, 25 bp, Homo sapien
taattatggccacttttgctggagt

SEQ ID NO: 5179443 - DNA, 25 bp, Homo sapien
ggtctacgtgcctatttggatatca

SEQ ID NO: 5179444 - DNA, 25 bp, Homo sapien
ttagaataacggtccccactccatc

SEQ ID NO: 5179445 - DNA, 25 bp, Homo sapien
agctggccgtggtggcatgtaatcc

SEQ ID NO: 5179446 - DNA, 25 bp, Homo sapien
gccgtggtggcatgtaatcccacct

SEQ ID NO: 5179447 - DNA, 25 bp, Homo sapien
ggcatgtaatcccacctacgcgaga

SEQ ID NO: 5179448 - DNA, 25 bp, Homo sapien
tggtggcatgtaatcccacctacgc

SEQ ID NO: 5179449 - DNA, 25 bp, Homo sapien
ggctatacatagaatcaccacggga

SEQ ID NO: 5179450 - DNA, 25 bp, Homo sapien
caccacgggacttctgaaacagtag

SEQ ID NO: 5179451 - DNA, 25 bp, Homo sapien
tagaataccttagcacacacctgag

SEQ ID NO: 5179452 - DNA, 25 bp, Homo sapien
tatttatgaaaagctcaccaggtga

SEQ ID NO: 5179453 - DNA, 25 bp, Homo sapien
tatttccaatatgtctcttggtggg

SEQ ID NO: 5179454 - DNA, 25 bp, Homo sapien
ttctgagcaatgaataccagtagtg

SEQ ID NO: 5179455 - DNA, 25 bp, Homo sapien
cggtgataacctataaagaactcta

SEQ ID NO: 5179456 - DNA, 25 bp, Homo sapien
aagaactctatatttccaatatgtc

SEQ ID NO: 5179457 - DNA, 25 bp, Homo sapien
ttcagcttctcttatgggtaattgc

SEQ ID NO: 5179458 - DNA, 25 bp, Homo sapien
ttactaccagaaggctataaactca

SEQ ID NO: 5179459 - DNA, 25 bp, Homo sapien
ggaatgactgatctaccttaatgta

SEQ ID NO: 5179460 - DNA, 25 bp, Homo sapien
gcaatcagacttacctatgtgctgc

SEQ ID NO: 5179461 - DNA, 25 bp, Homo sapien
acttacagcaataagctaatatggc

SEQ ID NO: 5179462 - DNA, 25 bp, Homo sapien
taataacataattgacttacagcaa

SEQ ID NO: 5179463 - DNA, 25 bp, Homo sapien
ctgtgccaggctaatagttattctt

SEQ ID NO: 5179464 - DNA, 25 bp, Homo sapien
gctaatatggcaaattaattcatat

SEQ ID NO: 5179465 - DNA, 25 bp, Homo sapien
gcgtatatacattggagcactatcc

SEQ ID NO: 5179466 - DNA, 25 bp, Homo sapien
cgatgcaggcgtagaaaggaagatc

SEQ ID NO: 5179467 - DNA, 25 bp, Homo sapien
gcatatcctgcgcaagtaccccaga

SEQ ID NO: 5179468 - DNA, 25 bp, Homo sapien
cacgtggacacatagtgggaagaat

SEQ ID NO: 5179469 - DNA, 25 bp, Homo sapien
gccttcaatgtctacttcccacatg

SEQ ID NO: 5179470 - DNA, 25 bp, Homo sapien
ttcaatgtctacttcccacatgtag

SEQ ID NO: 5179471 - DNA, 25 bp, Homo sapien
taaagccttcaatgtctacttccca

SEQ ID NO: 5179472 - DNA, 25 bp, Homo sapien
caatgtctacttcccacatgtagaa

SEQ ID NO: 5179473 - DNA, 25 bp, Homo sapien
attcttaactggtttgcacttgtgt

SEQ ID NO: 5179474 - DNA, 25 bp, Homo sapien
tttaatcaaccgcttattacaaatg

SEQ ID NO: 5179475 - DNA, 25 bp, Homo sapien
ctttctgtcaagatgatattatgga

SEQ ID NO: 5179476 - DNA, 25 bp, Homo sapien
taactggtttgcacttgtgtattac

SEQ ID NO: 5179477 - DNA, 25 bp, Homo sapien
ggctgccatatactgtggattacca

SEQ ID NO: 5179478 - DNA, 25 bp, Homo sapien
caatttggatggcaaacactgagga

SEQ ID NO: 5179479 - DNA, 25 bp, Homo sapien
cttgcaaagttccacgataggacat

SEQ ID NO: 5179480 - DNA, 25 bp, Homo sapien
gattaccatgtagcagtaagcagca

SEQ ID NO: 5179481 - DNA, 25 bp, Homo sapien
catggctcagttgaatgtgggcact

SEQ ID NO: 5179482 - DNA, 25 bp, Homo sapien
caggcagatcagagaccagtggtca

SEQ ID NO: 5179483 - DNA, 25 bp, Homo sapien
caaaagcaggatactgtcgtagtgc

SEQ ID NO: 5179484 - DNA, 25 bp, Homo sapien
caatgtgggctcagtatttcctgac

SEQ ID NO: 5179485 - DNA, 25 bp, Homo sapien
ggtgggatcagggagaagcggagag

SEQ ID NO: 5179486 - DNA, 25 bp, Homo sapien
agaagcggagagatggtgaagcaga

SEQ ID NO: 5179487 - DNA, 25 bp, Homo sapien
gtgggatcagggagaagcggagaga

SEQ ID NO: 5179488 - DNA, 25 bp, Homo sapien
tcttcatcttttgataccgatctca

SEQ ID NO: 5179489 - DNA, 25 bp, Homo sapien
ttgttatgcctcatagtatcaggac

SEQ ID NO: 5179490 - DNA, 25 bp, Homo sapien
ttgataccgatctcattccattatc

SEQ ID NO: 5179491 - DNA, 25 bp, Homo sapien
gcctcatagtatcaggacacttagg

SEQ ID NO: 5179492 - DNA, 25 bp, Homo sapien
ctttggtgattgctctagggtttaa

SEQ ID NO: 5179493 - DNA, 25 bp, Homo sapien
caatatctgaaatgtctgggactag

SEQ ID NO: 5179494 - DNA, 25 bp, Homo sapien
tgtgttaaacagattgagaatccct

SEQ ID NO: 5179495 - DNA, 25 bp, Homo sapien
aagtgtttacttacaggcattggcc

SEQ ID NO: 5179496 - DNA, 25 bp, Homo sapien
tcataagttagtgtagccagtcatt

SEQ ID NO: 5179497 - DNA, 25 bp, Homo sapien
tggatctacagacacatacgaaggc

SEQ ID NO: 5179498 - DNA, 25 bp, Homo sapien
tcttgggaccattagaactcaggta

SEQ ID NO: 5179499 - DNA, 25 bp, Homo sapien
taatagctatcaagactctggagaa

SEQ ID NO: 5179500 - DNA, 25 bp, Homo sapien
cactagggtaacttgggaccacagg

SEQ ID NO: 5179501 - DNA, 25 bp, Homo sapien
ggtataagccacaatgccaagctat

SEQ ID NO: 5179502 - DNA, 25 bp, Homo sapien
gacttagtattgaagtgctgaaatg

SEQ ID NO: 5179503 - DNA, 25 bp, Homo sapien
tcagccactagggtaacttgggacc

SEQ ID NO: 5179504 - DNA, 25 bp, Homo sapien
ccataccagcagactagatttcttg

SEQ ID NO: 5179505 - DNA, 25 bp, Homo sapien
tctcaaatcacatcaatcccaagtg

SEQ ID NO: 5179506 - DNA, 25 bp, Homo sapien
gctgcctaggtcactcttctagaca

SEQ ID NO: 5179507 - DNA, 25 bp, Homo sapien
tgttgagcctcaagtacaattgttt

SEQ ID NO: 5179508 - DNA, 25 bp, Homo sapien
tattcacaatgagactgtgttcacc

SEQ ID NO: 5179509 - DNA, 25 bp, Homo sapien
tggctgattccccttagtaaaatgt

SEQ ID NO: 5179510 - DNA, 25 bp, Homo sapien
gagtgctctatgatttggtcagaaa

SEQ ID NO: 5179511 - DNA, 25 bp, Homo sapien
gacagtgggcatctaacagaaagaa

SEQ ID NO: 5179512 - DNA, 25 bp, Homo sapien
gttaaataatagtcacgccagtggg

SEQ ID NO: 5179513 - DNA, 25 bp, Homo sapien
caccctcgaatgatctgttatggac

SEQ ID NO: 5179514 - DNA, 25 bp, Homo sapien
gaatcttgagacaatccaggtacct

SEQ ID NO: 5179515 - DNA, 25 bp, Homo sapien
ccaagtctagtggtgttgtaaccga

SEQ ID NO: 5179516 - DNA, 25 bp, Homo sapien
cagaacactggccatgcagtaatgc

SEQ ID NO: 5179517 - DNA, 25 bp, Homo sapien
actgcagtaatatcttctggcgacc

SEQ ID NO: 5179518 - DNA, 25 bp, Homo sapien
tctggcgacctaacagtgggctggc

SEQ ID NO: 5179519 - DNA, 25 bp, Homo sapien
tatagaaatgaacctctggcaggca

SEQ ID NO: 5179520 - DNA, 25 bp, Homo sapien
aactatatgcttctttgaggccggg

SEQ ID NO: 5179521 - DNA, 25 bp, Homo sapien
gattcatcttcttgggtccccgaaa

SEQ ID NO: 5179522 - DNA, 25 bp, Homo sapien
gaggccgggtgataacagattcatc

SEQ ID NO: 5179523 - DNA, 25 bp, Homo sapien
ccgaaaaaggtctagcctggagcgt

SEQ ID NO: 5179524 - DNA, 25 bp, Homo sapien
cgtgcccagctagtagcaaacaatt

SEQ ID NO: 5179525 - DNA, 25 bp, Homo sapien
gggcactcagtactatttaacatgt

SEQ ID NO: 5179526 - DNA, 25 bp, Homo sapien
ctgtagatgaattccaagggttggg

SEQ ID NO: 5179527 - DNA, 25 bp, Homo sapien
aagcagttatctgtagatgaattcc

SEQ ID NO: 5179528 - DNA, 25 bp, Homo sapien
gatatttggacgtccgtactgacgg

SEQ ID NO: 5179529 - DNA, 25 bp, Homo sapien
gctgattttactaggtacccttcca

SEQ ID NO: 5179530 - DNA, 25 bp, Homo sapien
gtagcaaacccacaataccagcttg

SEQ ID NO: 5179531 - DNA, 25 bp, Homo sapien
ccttgcagtgtcatgggaagtgata

SEQ ID NO: 5179532 - DNA, 25 bp, Homo sapien
tgagaaatctctggcattgggaagc

SEQ ID NO: 5179533 - DNA, 25 bp, Homo sapien
tctatgtattgaacaaagcctggaa

SEQ ID NO: 5179534 - DNA, 25 bp, Homo sapien
tctcaaaaagtctgggatagtccct

SEQ ID NO: 5179535 - DNA, 25 bp, Homo sapien
tccatggaacagaatagtatgtcct

SEQ ID NO: 5179536 - DNA, 25 bp, Homo sapien
aaaaaagtgatttccaggctgtgat

SEQ ID NO: 5179537 - DNA, 25 bp, Homo sapien
actttatatgtcaactcagctaggc

SEQ ID NO: 5179538 - DNA, 25 bp, Homo sapien
tcagctaggctatggtgcacagttc

SEQ ID NO: 5179539 - DNA, 25 bp, Homo sapien
ccatgcttggccaacgttaaaaaat

SEQ ID NO: 5179540 - DNA, 25 bp, Homo sapien
agttgatgagttatttgagatgaga

SEQ ID NO: 5179541 - DNA, 25 bp, Homo sapien
ccatagttgatgagttatttgagat

SEQ ID NO: 5179542 - DNA, 25 bp, Homo sapien
taaaaatgccatagttgatgagtta

SEQ ID NO: 5179543 - DNA, 25 bp, Homo sapien
aatgccatagttgatgagttatttg

SEQ ID NO: 5179544 - DNA, 25 bp, Homo sapien
gttgcaaatgattggatcccttttt

SEQ ID NO: 5179545 - DNA, 25 bp, Homo sapien
tcctttgagatataaaccattacat

SEQ ID NO: 5179546 - DNA, 25 bp, Homo sapien
gatgaacacttagcttgctcccgaa

SEQ ID NO: 5179547 - DNA, 25 bp, Homo sapien
tgctatcacaatacaatagtagatt

SEQ ID NO: 5179548 - DNA, 25 bp, Homo sapien
taaagtgtactctacaggtcctcag

SEQ ID NO: 5179549 - DNA, 25 bp, Homo sapien
gaaggcttaagcaatagatccagaa

SEQ ID NO: 5179550 - DNA, 25 bp, Homo sapien
caataggtatgtactgggtccctga

SEQ ID NO: 5179551 - DNA, 25 bp, Homo sapien
ccagtataaatggagctcagggaga

SEQ ID NO: 5179552 - DNA, 25 bp, Homo sapien
cagctgagagattgatgagggcatt

SEQ ID NO: 5179553 - DNA, 25 bp, Homo sapien
gactcttgtgccagaacgcctggga

SEQ ID NO: 5179554 - DNA, 25 bp, Homo sapien
gagatttcagactcctaggaatcgg

SEQ ID NO: 5179555 - DNA, 25 bp, Homo sapien
tataagttggctcagttcatcagcg

SEQ ID NO: 5179556 - DNA, 25 bp, Homo sapien
ctacggaatccagcccattggcaag

SEQ ID NO: 5179557 - DNA, 25 bp, Homo sapien
tgcctgctcaaaagtcctcactggg

SEQ ID NO: 5179558 - DNA, 25 bp, Homo sapien
cattggcaaggtttggtcagcccaa

SEQ ID NO: 5179559 - DNA, 25 bp, Homo sapien
tcatacaattcagtttgccacaggt

SEQ ID NO: 5179560 - DNA, 25 bp, Homo sapien
tagagatacgtatcaaaggaaaagt

SEQ ID NO: 5179561 - DNA, 25 bp, Homo sapien
ggtgagtgagtatataatgcttcct

SEQ ID NO: 5179562 - DNA, 25 bp, Homo sapien
tgaaaaaatagagatacgtatcaaa

SEQ ID NO: 5179563 - DNA, 25 bp, Homo sapien
gcgtgttgttaatatatgatgtcta

SEQ ID NO: 5179564 - DNA, 25 bp, Homo sapien
ctcatctgatgagggcaatcacaaa

SEQ ID NO: 5179565 - DNA, 25 bp, Homo sapien
aagaagtatctatagcgaatgggac

SEQ ID NO: 5179566 - DNA, 25 bp, Homo sapien
tgaaagacctgataatgaaatcagg

SEQ ID NO: 5179567 - DNA, 25 bp, Homo sapien
ggagaaggtgggtgtactaatatcc

SEQ ID NO: 5179568 - DNA, 25 bp, Homo sapien
gatatccattggtttctccactgtc

SEQ ID NO: 5179569 - DNA, 25 bp, Homo sapien
tattacagaggcgatgctgtgtcct

SEQ ID NO: 5179570 - DNA, 25 bp, Homo sapien
cacttttgaagaatgtaggccggtc

SEQ ID NO: 5179571 - DNA, 25 bp, Homo sapien
tcataattcaattgaggtcacgcat

SEQ ID NO: 5179572 - DNA, 25 bp, Homo sapien
tctgtattcacactttttcttatat

SEQ ID NO: 5179573 - DNA, 25 bp, Homo sapien
tcttatatttggcaatctccctctt

SEQ ID NO: 5179574 - DNA, 25 bp, Homo sapien
aattcaccactactatctttctcaa

SEQ ID NO: 5179575 - DNA, 25 bp, Homo sapien
atatttggcaatctccctctttgtc

SEQ ID NO: 5179576 - DNA, 25 bp, Homo sapien
attctctttgctaacctttctcaag

SEQ ID NO: 5179577 - DNA, 25 bp, Homo sapien
actcgcattctctttgctaaccttt

SEQ ID NO: 5179578 - DNA, 25 bp, Homo sapien
tttgctaacctttctcaagctcttg

SEQ ID NO: 5179579 - DNA, 25 bp, Homo sapien
tctttgctaacctttctcaagctct

SEQ ID NO: 5179580 - DNA, 25 bp, Homo sapien
gcacgtctgcctgagcgatcatctt

SEQ ID NO: 5179581 - DNA, 25 bp, Homo sapien
gaggaggtactttgtcttttgcacc

SEQ ID NO: 5179582 - DNA, 25 bp, Homo sapien
tcagggtgaaggagcatatgggtca

SEQ ID NO: 5179583 - DNA, 25 bp, Homo sapien
ttctgtaatatcccagaatcctgag

SEQ ID NO: 5179584 - DNA, 25 bp, Homo sapien
ttgaaattggaagcaaacgaactgg

SEQ ID NO: 5179585 - DNA, 25 bp, Homo sapien
tgtgctcgcacaacattactgatta

SEQ ID NO: 5179586 - DNA, 25 bp, Homo sapien
tgattagacaactccaaagccagct

SEQ ID NO: 5179587 - DNA, 25 bp, Homo sapien
tgcatgcagtggatcaagctcctgg

SEQ ID NO: 5179588 - DNA, 25 bp, Homo sapien
caattgatttaagacataagaagac

SEQ ID NO: 5179589 - DNA, 25 bp, Homo sapien
tccaaactggtcaatggaaagccaa

SEQ ID NO: 5179590 - DNA, 25 bp, Homo sapien
tctcaaacacagctgatgagctatt

SEQ ID NO: 5179591 - DNA, 25 bp, Homo sapien
gacaaagctagccaaatgaatattt

SEQ ID NO: 5179592 - DNA, 25 bp, Homo sapien
ggtattaattattgcctcaatctca

SEQ ID NO: 5179593 - DNA, 25 bp, Homo sapien
ttggtctatttggagattcagcttc

SEQ ID NO: 5179594 - DNA, 25 bp, Homo sapien
attggtctatttggagattcagctt

SEQ ID NO: 5179595 - DNA, 25 bp, Homo sapien
gtattaattattgcctcaatctcag

SEQ ID NO: 5179596 - DNA, 25 bp, Homo sapien
tattaagaatgggtccgattttatg

SEQ ID NO: 5179597 - DNA, 25 bp, Homo sapien
aaggcaagcacaggccagtaacagg

SEQ ID NO: 5179598 - DNA, 25 bp, Homo sapien
tatgaatgctctctataccccaggc

SEQ ID NO: 5179599 - DNA, 25 bp, Homo sapien
taccccaggcctgatgaaggcaagc

SEQ ID NO: 5179600 - DNA, 25 bp, Homo sapien
ctgttccacatcctgagctccaaca

SEQ ID NO: 5179601 - DNA, 25 bp, Homo sapien
aatgggttttctgttccacatcctg

SEQ ID NO: 5179602 - DNA, 25 bp, Homo sapien
cttttctcttagcatgaatgggttt

SEQ ID NO: 5179603 - DNA, 25 bp, Homo sapien
ttttctcttagcatgaatgggtttt

SEQ ID NO: 5179604 - DNA, 25 bp, Homo sapien
gaattttgcttgtagccgccgctgt

SEQ ID NO: 5179605 - DNA, 25 bp, Homo sapien
gctctggctctagctcactaagctc

SEQ ID NO: 5179606 - DNA, 25 bp, Homo sapien
cattgctctctaacaccagctctgg

SEQ ID NO: 5179607 - DNA, 25 bp, Homo sapien
gaacatttgtggaagaaagctgcca

SEQ ID NO: 5179608 - DNA, 25 bp, Homo sapien
tacacatgtttagaaaggaaggcag

SEQ ID NO: 5179609 - DNA, 25 bp, Homo sapien
taatgagcagatagttttacacatg

SEQ ID NO: 5179610 - DNA, 25 bp, Homo sapien
gcaagcttggcttcatcaagaacaa

SEQ ID NO: 5179611 - DNA, 25 bp, Homo sapien
gccaggctttaaaccgtgctgctga

SEQ ID NO: 5179612 - DNA, 25 bp, Homo sapien
tgaatactgatgagtctgactaacc

SEQ ID NO: 5179613 - DNA, 25 bp, Homo sapien
catggctaagcagtattaccagcta

SEQ ID NO: 5179614 - DNA, 25 bp, Homo sapien
ggcatctattaaacacagtgggcaa

SEQ ID NO: 5179615 - DNA, 25 bp, Homo sapien
cacggttttacatcaggcattgcca

SEQ ID NO: 5179616 - DNA, 25 bp, Homo sapien
caagcaacggggagaggattcccca

SEQ ID NO: 5179617 - DNA, 25 bp, Homo sapien
caagacaaacaagcaacggggagag

SEQ ID NO: 5179618 - DNA, 25 bp, Homo sapien
acaaacaagcaacggggagaggatt

SEQ ID NO: 5179619 - DNA, 25 bp, Homo sapien
gacaaacaagcaacggggagaggat

SEQ ID NO: 5179620 - DNA, 25 bp, Homo sapien
gaattattgcaacttctctgtcatt

SEQ ID NO: 5179621 - DNA, 25 bp, Homo sapien
ctgctgaattagtgttgaactctga

SEQ ID NO: 5179622 - DNA, 25 bp, Homo sapien
tattgcaacttctctgtcattgtta

SEQ ID NO: 5179623 - DNA, 25 bp, Homo sapien
tgaactctgaattattgcaacttct

SEQ ID NO: 5179624 - DNA, 25 bp, Homo sapien
tgttttctgggataatatagtttgg

SEQ ID NO: 5179625 - DNA, 25 bp, Homo sapien
tggctggtatcggttcttcatttct

SEQ ID NO: 5179626 - DNA, 25 bp, Homo sapien
aagaatgctttatattggcctccac

SEQ ID NO: 5179627 - DNA, 25 bp, Homo sapien
aagaattcatgtgctttaaaaacat

SEQ ID NO: 5179628 - DNA, 25 bp, Homo sapien
ttattaagaataggcgccaggtgcg

SEQ ID NO: 5179629 - DNA, 25 bp, Homo sapien
tgagcaagacacatttaaactgatc

SEQ ID NO: 5179630 - DNA, 25 bp, Homo sapien
caaattattttatcagtagtctcca

SEQ ID NO: 5179631 - DNA, 25 bp, Homo sapien
cagatgtattacaggaacacagaga

SEQ ID NO: 5179632 - DNA, 25 bp, Homo sapien
taatcagtaggcatataccaagccc

SEQ ID NO: 5179633 - DNA, 25 bp, Homo sapien
tgggctcactagctccttgaaggtt

SEQ ID NO: 5179634 - DNA, 25 bp, Homo sapien
tacaggccttgcacatactggaacc

SEQ ID NO: 5179635 - DNA, 25 bp, Homo sapien
gagctagtcgccataagataaggaa

SEQ ID NO: 5179636 - DNA, 25 bp, Homo sapien
aaacgcattgggaagcttcagctca

SEQ ID NO: 5179637 - DNA, 25 bp, Homo sapien
ttcccagactgtacaaaacgcattg

SEQ ID NO: 5179638 - DNA, 25 bp, Homo sapien
ccttatattacagagcatgatggcc

SEQ ID NO: 5179639 - DNA, 25 bp, Homo sapien
cctaaggatggtctacatgggtaaa

SEQ ID NO: 5179640 - DNA, 25 bp, Homo sapien
ttgtcccctccgtcacactctttgc

SEQ ID NO: 5179641 - DNA, 25 bp, Homo sapien
tccattttgatccacacgacgctgc

SEQ ID NO: 5179642 - DNA, 25 bp, Homo sapien
acacgacgctgccaacccacaggaa

SEQ ID NO: 5179643 - DNA, 25 bp, Homo sapien
cataaagcactccattttgatccac

SEQ ID NO: 5179644 - DNA, 25 bp, Homo sapien
tataaacaagtaatgcaaaaaattc

SEQ ID NO: 5179645 - DNA, 25 bp, Homo sapien
tttatatgaggtgccatcagtcacc

SEQ ID NO: 5179646 - DNA, 25 bp, Homo sapien
cttggttctctccttagtctttgga

SEQ ID NO: 5179647 - DNA, 25 bp, Homo sapien
catatgtttctagcacaaaggtcac

SEQ ID NO: 5179648 - DNA, 25 bp, Homo sapien
ccacacttgcatgttccatcagtaa

SEQ ID NO: 5179649 - DNA, 25 bp, Homo sapien
aagccacacttgcatgttccatcag

SEQ ID NO: 5179650 - DNA, 25 bp, Homo sapien
ctccaagcaagataacaaagaccca

SEQ ID NO: 5179651 - DNA, 25 bp, Homo sapien
tccaagccacacttgcatgttccat

SEQ ID NO: 5179652 - DNA, 25 bp, Homo sapien
aagcacagcctttgtttagaatatg

SEQ ID NO: 5179653 - DNA, 25 bp, Homo sapien
agcacagcctttgtttagaatatgt

SEQ ID NO: 5179654 - DNA, 25 bp, Homo sapien
aaagcacagcctttgtttagaatat

SEQ ID NO: 5179655 - DNA, 25 bp, Homo sapien
ccttaacatcttctgcggttctctg

SEQ ID NO: 5179656 - DNA, 25 bp, Homo sapien
tcatctgccttaacatcttctgcgg

SEQ ID NO: 5179657 - DNA, 25 bp, Homo sapien
ttccatgcttttatgaagtgtggcc

SEQ ID NO: 5179658 - DNA, 25 bp, Homo sapien
tctgccttaacatcttctgcggttc

SEQ ID NO: 5179659 - DNA, 25 bp, Homo sapien
tctgaatacagattgcatgttagat

SEQ ID NO: 5179660 - DNA, 25 bp, Homo sapien
gagacactgttaggacaattggaga

SEQ ID NO: 5179661 - DNA, 25 bp, Homo sapien
tttctgtgaaactataagagacact

SEQ ID NO: 5179662 - DNA, 25 bp, Homo sapien
gctgtattgtctaagctcgtctcaa

SEQ ID NO: 5179663 - DNA, 25 bp, Homo sapien
tttaaaggcattcccagcaaaccag

SEQ ID NO: 5179664 - DNA, 25 bp, Homo sapien
tagggtcaagaatgccaagtggatc

SEQ ID NO: 5179665 - DNA, 25 bp, Homo sapien
tccggcagatgcagtaggaaaagct

SEQ ID NO: 5179666 - DNA, 25 bp, Homo sapien
tccatcggacttggtagaagggctt

SEQ ID NO: 5179667 - DNA, 25 bp, Homo sapien
tgatgggaaatgaaccctgaccctg

SEQ ID NO: 5179668 - DNA, 25 bp, Homo sapien
caaagcagtatttgaggccccacaa

SEQ ID NO: 5179669 - DNA, 25 bp, Homo sapien
agtgcacggcttcccctcttaaagg

SEQ ID NO: 5179670 - DNA, 25 bp, Homo sapien
aaagccatgcccgactgactgagca

SEQ ID NO: 5179671 - DNA, 25 bp, Homo sapien
ccaggaaaccctgcctcgtatggct

SEQ ID NO: 5179672 - DNA, 25 bp, Homo sapien
taagaaaacacattagaagacagcc

SEQ ID NO: 5179673 - DNA, 25 bp, Homo sapien
aaggacatgtctcacaaaccaggaa

SEQ ID NO: 5179674 - DNA, 25 bp, Homo sapien
tacaaacaaaagctagggagatggc

SEQ ID NO: 5179675 - DNA, 25 bp, Homo sapien
ggttagaatgcttctccagcatgac

SEQ ID NO: 5179676 - DNA, 25 bp, Homo sapien
tactatcagcaacaaagacatgtgg

SEQ ID NO: 5179677 - DNA, 25 bp, Homo sapien
ccttaatggtggctgaagagataca

SEQ ID NO: 5179678 - DNA, 25 bp, Homo sapien
gaggactctattgcacaaaatacag

SEQ ID NO: 5179679 - DNA, 25 bp, Homo sapien
tgaaaatcgtgaaaaactgcagggc

SEQ ID NO: 5179680 - DNA, 25 bp, Homo sapien
gggtcattgtgtggatactaacagg

SEQ ID NO: 5179681 - DNA, 25 bp, Homo sapien
tcatattggaagaaggtagggttgc

SEQ ID NO: 5179682 - DNA, 25 bp, Homo sapien
ttctggcacaaacccataccgtgtc

SEQ ID NO: 5179683 - DNA, 25 bp, Homo sapien
tacaaactttgtgcatctgattggg

SEQ ID NO: 5179684 - DNA, 25 bp, Homo sapien
gaaaccctgatattaggagaccttc

SEQ ID NO: 5179685 - DNA, 25 bp, Homo sapien
tagcttcatctagaaaaaacaggga

SEQ ID NO: 5179686 - DNA, 25 bp, Homo sapien
tcttacagcaaagaataaatggctc

SEQ ID NO: 5179687 - DNA, 25 bp, Homo sapien
agttctgcacaaaaaccctatggtc

SEQ ID NO: 5179688 - DNA, 25 bp, Homo sapien
cagtgtattagtccaatgccaggag

SEQ ID NO: 5179689 - DNA, 25 bp, Homo sapien
tgaataggcactctctggtgaacgt

SEQ ID NO: 5179690 - DNA, 25 bp, Homo sapien
ggacagtcgctgagatttttaagaa

SEQ ID NO: 5179691 - DNA, 25 bp, Homo sapien
ctcccaatgggtagctgactctgca

SEQ ID NO: 5179692 - DNA, 25 bp, Homo sapien
gtggtgactatgacgccatcttgaa

SEQ ID NO: 5179693 - DNA, 25 bp, Homo sapien
aaaatgaagtgcgtgctcctggcca

SEQ ID NO: 5179694 - DNA, 25 bp, Homo sapien
tcactggcaaagagataggtagaga

SEQ ID NO: 5179695 - DNA, 25 bp, Homo sapien
aagggtggaggttgatctcagactt

SEQ ID NO: 5179696 - DNA, 25 bp, Homo sapien
gggtggaggttgatctcagacttgc

SEQ ID NO: 5179697 - DNA, 25 bp, Homo sapien
ctaaagggtggaggttgatctcaga

SEQ ID NO: 5179698 - DNA, 25 bp, Homo sapien
taaagggtggaggttgatctcagac

SEQ ID NO: 5179699 - DNA, 25 bp, Homo sapien
caaggtcattaatcctgaggcccca

SEQ ID NO: 5179700 - DNA, 25 bp, Homo sapien
actgctgtcccaccaagtgttgaga

SEQ ID NO: 5179701 - DNA, 25 bp, Homo sapien
ggttaaaagggtctcagctcggctg

SEQ ID NO: 5179702 - DNA, 25 bp, Homo sapien
tagagggttaagtagctgtggcacc

SEQ ID NO: 5179703 - DNA, 25 bp, Homo sapien
tctagactttatggacaccatcccc

SEQ ID NO: 5179704 - DNA, 25 bp, Homo sapien
tcatactaaccctgtgatgccacac

SEQ ID NO: 5179705 - DNA, 25 bp, Homo sapien
taggttaggtttaggtggcatcaga

SEQ ID NO: 5179706 - DNA, 25 bp, Homo sapien
gactgaggaaatctagtagcagcta

SEQ ID NO: 5179707 - DNA, 25 bp, Homo sapien
ccttatatattgagctgcagtgtca

SEQ ID NO: 5179708 - DNA, 25 bp, Homo sapien
gaaactaagtgctatgcttacttgg

SEQ ID NO: 5179709 - DNA, 25 bp, Homo sapien
taaaataagtgagcctgatcaggcc

SEQ ID NO: 5179710 - DNA, 25 bp, Homo sapien
ttttgcagtagaaggttggtcacct

SEQ ID NO: 5179711 - DNA, 25 bp, Homo sapien
cggagattcgatgcctctctttgta

SEQ ID NO: 5179712 - DNA, 25 bp, Homo sapien
taaatgtgattcttcggagattcga

SEQ ID NO: 5179713 - DNA, 25 bp, Homo sapien
gattcttcggagattcgatgcctct

SEQ ID NO: 5179714 - DNA, 25 bp, Homo sapien
gatgcctctctttgtacccgagaat

SEQ ID NO: 5179715 - DNA, 25 bp, Homo sapien
ctcaaagtattgtttattgatgaca

SEQ ID NO: 5179716 - DNA, 25 bp, Homo sapien
tgctgttgctgatttggaggaaaca

SEQ ID NO: 5179717 - DNA, 25 bp, Homo sapien
ctgctgttgctgatttggaggaaac

SEQ ID NO: 5179718 - DNA, 25 bp, Homo sapien
ttctgaaacagacaagccatggggt

SEQ ID NO: 5179719 - DNA, 25 bp, Homo sapien
ccatggggttattgttagctgggca

SEQ ID NO: 5179720 - DNA, 25 bp, Homo sapien
tggactgtccttggaacgcctggag

SEQ ID NO: 5179721 - DNA, 25 bp, Homo sapien
ttagctgggcaaggaattgtggact

SEQ ID NO: 5179722 - DNA, 25 bp, Homo sapien
tgaccaagagatgggtcaatcctcg

SEQ ID NO: 5179723 - DNA, 25 bp, Homo sapien
tcctcggttgcaactcacaaggtgt

SEQ ID NO: 5179724 - DNA, 25 bp, Homo sapien
tatcttgaaaaggtggaagtgtagt

SEQ ID NO: 5179725 - DNA, 25 bp, Homo sapien
ggaagtgtagtgtttggattctcag

SEQ ID NO: 5179726 - DNA, 25 bp, Homo sapien
tggcatctacggaagcatcacctgg

SEQ ID NO: 5179727 - DNA, 25 bp, Homo sapien
gtctagattcttgggcagccgagcc

SEQ ID NO: 5179728 - DNA, 25 bp, Homo sapien
aagtcagtcctttgatttggcccca

SEQ ID NO: 5179729 - DNA, 25 bp, Homo sapien
gacaaggactactgtggatatggcc

SEQ ID NO: 5179730 - DNA, 25 bp, Homo sapien
tatttgacaatggataaagattggt

SEQ ID NO: 5179731 - DNA, 25 bp, Homo sapien
ttgacaatggataaagattggtata

SEQ ID NO: 5179732 - DNA, 25 bp, Homo sapien
ttagtatttgacaatggataaagat

SEQ ID NO: 5179733 - DNA, 25 bp, Homo sapien
gtatttgacaatggataaagattgg

SEQ ID NO: 5179734 - DNA, 25 bp, Homo sapien
attagtgtgtaaggctttatccaac

SEQ ID NO: 5179735 - DNA, 25 bp, Homo sapien
tagtgtgtaaggctttatccaacat

SEQ ID NO: 5179736 - DNA, 25 bp, Homo sapien
tattagtgtgtaaggctttatccaa

SEQ ID NO: 5179737 - DNA, 25 bp, Homo sapien
ttattagtgtgtaaggctttatcca

SEQ ID NO: 5179738 - DNA, 25 bp, Homo sapien
ccatgcctggcatgctcactgcagc

SEQ ID NO: 5179739 - DNA, 25 bp, Homo sapien
caccatgcctggcatgctcactgca

SEQ ID NO: 5179740 - DNA, 25 bp, Homo sapien
gctagaattataggggtgcaccacc

SEQ ID NO: 5179741 - DNA, 25 bp, Homo sapien
gtaaccttgaattccagaactcaag

SEQ ID NO: 5179742 - DNA, 25 bp, Homo sapien
tatatatcactgtgcatttctgcta

SEQ ID NO: 5179743 - DNA, 25 bp, Homo sapien
tcactgtgcatttctgctataacaa

SEQ ID NO: 5179744 - DNA, 25 bp, Homo sapien
actgtgcatttctgctataacaaga

SEQ ID NO: 5179745 - DNA, 25 bp, Homo sapien
tatcactgtgcatttctgctataac

SEQ ID NO: 5179746 - DNA, 25 bp, Homo sapien
cgtgaccagaactgaaactcaggtc

SEQ ID NO: 5179747 - DNA, 25 bp, Homo sapien
tgggactcggtgcatttaaataacg

SEQ ID NO: 5179748 - DNA, 25 bp, Homo sapien
ttaatatgatactactgcaaactag

SEQ ID NO: 5179749 - DNA, 25 bp, Homo sapien
ccataccaactccaatatacattga

SEQ ID NO: 5179750 - DNA, 25 bp, Homo sapien
tgtggagggtgcaacctttgctgca

SEQ ID NO: 5179751 - DNA, 25 bp, Homo sapien
ctagtacacatttggctctgcagag

SEQ ID NO: 5179752 - DNA, 25 bp, Homo sapien
tcagctatgtcaacagaggtcagcc

SEQ ID NO: 5179753 - DNA, 25 bp, Homo sapien
tgcagaggccataaaacgtgagaag

SEQ ID NO: 5179754 - DNA, 25 bp, Homo sapien
agtgaaggtatgaagaccaaaccac

SEQ ID NO: 5179755 - DNA, 25 bp, Homo sapien
tgaaggtatgaagaccaaaccacat

SEQ ID NO: 5179756 - DNA, 25 bp, Homo sapien
gtgaaggtatgaagaccaaaccaca

SEQ ID NO: 5179757 - DNA, 25 bp, Homo sapien
taggcttccaaaccttctgttagtg

SEQ ID NO: 5179758 - DNA, 25 bp, Homo sapien
tctgttccttttccggacacggctg

SEQ ID NO: 5179759 - DNA, 25 bp, Homo sapien
tccggacacggctgtaggcttccaa

SEQ ID NO: 5179760 - DNA, 25 bp, Homo sapien
ggctgtaggcttccaaaccttctgt

SEQ ID NO: 5179761 - DNA, 25 bp, Homo sapien
gagtccgggacatagagacatagga

SEQ ID NO: 5179762 - DNA, 25 bp, Homo sapien
ctaagctctgcatagcaagtgtgct

SEQ ID NO: 5179763 - DNA, 25 bp, Homo sapien
caggtctagagggatgttatccggc

SEQ ID NO: 5179764 - DNA, 25 bp, Homo sapien
gacataggagtttgccccttgcagc

SEQ ID NO: 5179765 - DNA, 25 bp, Homo sapien
tcctcgttctcccttgtattctgcc

SEQ ID NO: 5179766 - DNA, 25 bp, Homo sapien
gtcctcgttctcccttgtattctgc

SEQ ID NO: 5179767 - DNA, 25 bp, Homo sapien
ggtcctcgttctcccttgtattctg

SEQ ID NO: 5179768 - DNA, 25 bp, Homo sapien
tgacaaaacatcactctgggattct

SEQ ID NO: 5179769 - DNA, 25 bp, Homo sapien
gccaatttatactcgcgtttggaaa

SEQ ID NO: 5179770 - DNA, 25 bp, Homo sapien
aacaaaagtaccaattccacgagag

SEQ ID NO: 5179771 - DNA, 25 bp, Homo sapien
tccacgagagaaagccaatttatac

SEQ ID NO: 5179772 - DNA, 25 bp, Homo sapien
cactcatggcctcatgaatagcagc

SEQ ID NO: 5179773 - DNA, 25 bp, Homo sapien
agttcactcatggcctcatgaatag

SEQ ID NO: 5179774 - DNA, 25 bp, Homo sapien
actcatggcctcatgaatagcagct

SEQ ID NO: 5179775 - DNA, 25 bp, Homo sapien
ttcactcatggcctcatgaatagca

SEQ ID NO: 5179776 - DNA, 25 bp, Homo sapien
tcaaagaaacgtagtataatggaaa

SEQ ID NO: 5179777 - DNA, 25 bp, Homo sapien
ttcaaagaaacgtagtataatggaa

SEQ ID NO: 5179778 - DNA, 25 bp, Homo sapien
ctattggtggaaaggagcaaggtcc

SEQ ID NO: 5179779 - DNA, 25 bp, Homo sapien
ttggtggaaaggagcaaggtccaag

SEQ ID NO: 5179780 - DNA, 25 bp, Homo sapien
tattggtggaaaggagcaaggtcca

SEQ ID NO: 5179781 - DNA, 25 bp, Homo sapien
ggtggaaaggagcaaggtccaagac

SEQ ID NO: 5179782 - DNA, 25 bp, Homo sapien
tttggggggtctcatttgtctgtca

SEQ ID NO: 5179783 - DNA, 25 bp, Homo sapien
gtttggggggtctcatttgtctgtc

SEQ ID NO: 5179784 - DNA, 25 bp, Homo sapien
ttggggggtctcatttgtctgtcac

SEQ ID NO: 5179785 - DNA, 25 bp, Homo sapien
gagtttctcagtaatctcttgacca

SEQ ID NO: 5179786 - DNA, 25 bp, Homo sapien
ctgtttcttttagcaccctgtggtg

SEQ ID NO: 5179787 - DNA, 25 bp, Homo sapien
ctgcgcattagtggagtagtctctg

SEQ ID NO: 5179788 - DNA, 25 bp, Homo sapien
ccctgtggtggtggtagctatctgc

SEQ ID NO: 5179789 - DNA, 25 bp, Homo sapien
gataaagtgtgcattaggtacgctt

SEQ ID NO: 5179790 - DNA, 25 bp, Homo sapien
tatcactttacactggtagtctctg

SEQ ID NO: 5179791 - DNA, 25 bp, Homo sapien
tagtctctggtaggtgtactccata

SEQ ID NO: 5179792 - DNA, 25 bp, Homo sapien
ggtacgcttgtacatgacaatactg

SEQ ID NO: 5179793 - DNA, 25 bp, Homo sapien
taagctatctgcttcaacaggtggc

SEQ ID NO: 5179794 - DNA, 25 bp, Homo sapien
tgcctccatgtacggaaatagaaag

SEQ ID NO: 5179795 - DNA, 25 bp, Homo sapien
tcaattctgagcaccagcggtggtg

SEQ ID NO: 5179796 - DNA, 25 bp, Homo sapien
cggtggtgcagtcagtataagctat

SEQ ID NO: 5179797 - DNA, 25 bp, Homo sapien
gcccagggtagccagttgcattcca

SEQ ID NO: 5179798 - DNA, 25 bp, Homo sapien
gttactggaactctgctacatgaca

SEQ ID NO: 5179799 - DNA, 25 bp, Homo sapien
aaagtgagcccaggtggcatgctct

SEQ ID NO: 5179800 - DNA, 25 bp, Homo sapien
ctactttgaggtcatgaagcccagg

SEQ ID NO: 5179801 - DNA, 25 bp, Homo sapien
aatgggcaaagtaaataagatatcc

SEQ ID NO: 5179802 - DNA, 25 bp, Homo sapien
tgagtcttgcattacaccattcggg

SEQ ID NO: 5179803 - DNA, 25 bp, Homo sapien
tatccaattttcagcaaggtctagt

SEQ ID NO: 5179804 - DNA, 25 bp, Homo sapien
ggatttcccatgctcgagttgttta

SEQ ID NO: 5179805 - DNA, 25 bp, Homo sapien
tgtatattatgaagccatctggcat

SEQ ID NO: 5179806 - DNA, 25 bp, Homo sapien
tataaaaggtcactgaggtacacac

SEQ ID NO: 5179807 - DNA, 25 bp, Homo sapien
aatccataaaggcatgatgttacaa

SEQ ID NO: 5179808 - DNA, 25 bp, Homo sapien
cacacagtgtgtataaatgcagata

SEQ ID NO: 5179809 - DNA, 25 bp, Homo sapien
cgctctgcttggcgggccttgcttc

SEQ ID NO: 5179810 - DNA, 25 bp, Homo sapien
gctctgcttggcgggccttgcttcc

SEQ ID NO: 5179811 - DNA, 25 bp, Homo sapien
tgcgctctgcttggcgggccttgct

SEQ ID NO: 5179812 - DNA, 25 bp, Homo sapien
ctctgcttggcgggccttgcttcct

SEQ ID NO: 5179813 - DNA, 25 bp, Homo sapien
ctctggcatcctgagttttccactg

SEQ ID NO: 5179814 - DNA, 25 bp, Homo sapien
ttgctttcataatcctcagggctca

SEQ ID NO: 5179815 - DNA, 25 bp, Homo sapien
ctgtgtggcagagatcccggtagcc

SEQ ID NO: 5179816 - DNA, 25 bp, Homo sapien
gatcccggtagccagatggccctgt

SEQ ID NO: 5179817 - DNA, 25 bp, Homo sapien
tggccctgttttgggcgctgaccac

SEQ ID NO: 5179818 - DNA, 25 bp, Homo sapien
atattgagtgtaggaggtgactaag

SEQ ID NO: 5179819 - DNA, 25 bp, Homo sapien
taggaggtgactaagggcggctggg

SEQ ID NO: 5179820 - DNA, 25 bp, Homo sapien
agtgtaggaggtgactaagggcggc

SEQ ID NO: 5179821 - DNA, 25 bp, Homo sapien
ttatattgagtgtaggaggtgacta

SEQ ID NO: 5179822 - DNA, 25 bp, Homo sapien
ggaattcatctaggcaacactctca

SEQ ID NO: 5179823 - DNA, 25 bp, Homo sapien
tgtggcatcatggacggtggaattc

SEQ ID NO: 5179824 - DNA, 25 bp, Homo sapien
tctcagtagtagatccagaaacctt

SEQ ID NO: 5179825 - DNA, 25 bp, Homo sapien
aaaaggtggccacaatgctgttccc

SEQ ID NO: 5179826 - DNA, 25 bp, Homo sapien
ttctcagtgactggttccgaggtgc

SEQ ID NO: 5179827 - DNA, 25 bp, Homo sapien
gttctcagtgactggttccgaggtg

SEQ ID NO: 5179828 - DNA, 25 bp, Homo sapien
agccctgtacgtgctcccttctttg

SEQ ID NO: 5179829 - DNA, 25 bp, Homo sapien
ccctgctgagccctgtacgtgctcc

SEQ ID NO: 5179830 - DNA, 25 bp, Homo sapien
tggacccaggcttgctcgcccctgc

SEQ ID NO: 5179831 - DNA, 25 bp, Homo sapien
acccaggcttgctcgcccctgctga

SEQ ID NO: 5179832 - DNA, 25 bp, Homo sapien
cagtgagtttagtgtgcttggtttc

SEQ ID NO: 5179833 - DNA, 25 bp, Homo sapien
cttggtttcaatggaggggcactgc

SEQ ID NO: 5179834 - DNA, 25 bp, Homo sapien
gaaggctggcagtgagtttagtgtg

SEQ ID NO: 5179835 - DNA, 25 bp, Homo sapien
gcctgggggatgtctcaacttctcc

SEQ ID NO: 5179836 - DNA, 25 bp, Homo sapien
agttgaggttctggtgcggcagagg

SEQ ID NO: 5179837 - DNA, 25 bp, Homo sapien
gggagatgagcgctaatggacccac

SEQ ID NO: 5179838 - DNA, 25 bp, Homo sapien
agagggaatgggagatgagcgctaa

SEQ ID NO: 5179839 - DNA, 25 bp, Homo sapien
ctggagttgaggttctggtgcggca

SEQ ID NO: 5179840 - DNA, 25 bp, Homo sapien
caacgtgcgtgggtggtgtatcctc

SEQ ID NO: 5179841 - DNA, 25 bp, Homo sapien
tcctgctggaccttcacaacgtgcg

SEQ ID NO: 5179842 - DNA, 25 bp, Homo sapien
gaccttcacaacgtgcgtgggtggt

SEQ ID NO: 5179843 - DNA, 25 bp, Homo sapien
tgctggaccttcacaacgtgcgtgg

SEQ ID NO: 5179844 - DNA, 25 bp, Homo sapien
tggcgaaccagccacttgctcacgg

SEQ ID NO: 5179845 - DNA, 25 bp, Homo sapien
gccattgttctggttatcgtattta

SEQ ID NO: 5179846 - DNA, 25 bp, Homo sapien
ttgctcacgggccttcacagtatag

SEQ ID NO: 5179847 - DNA, 25 bp, Homo sapien
gacgttgttgatgatgaccattggc

SEQ ID NO: 5179848 - DNA, 25 bp, Homo sapien
caggtgcttctggctggggaacagt

SEQ ID NO: 5179849 - DNA, 25 bp, Homo sapien
aatacaggacggcacactggagaga

SEQ ID NO: 5179850 - DNA, 25 bp, Homo sapien
tgccaggccttgagtgacacttatc

SEQ ID NO: 5179851 - DNA, 25 bp, Homo sapien
tagctgtacagctcttgcaagttgt

SEQ ID NO: 5179852 - DNA, 25 bp, Homo sapien
agtccaccacgggaagaggcttatg

SEQ ID NO: 5179853 - DNA, 25 bp, Homo sapien
gcatcagaacttctcgaacttttct

SEQ ID NO: 5179854 - DNA, 25 bp, Homo sapien
cccagagcctgcatcagaacttctc

SEQ ID NO: 5179855 - DNA, 25 bp, Homo sapien
cttctcgaacttttctgctgaagtg

SEQ ID NO: 5179856 - DNA, 25 bp, Homo sapien
tgccctcatagtggcttctgggaca

SEQ ID NO: 5179857 - DNA, 25 bp, Homo sapien
ggagagaatcgtctgtggatttctg

SEQ ID NO: 5179858 - DNA, 25 bp, Homo sapien
agagaatcgtctgtggatttctgag

SEQ ID NO: 5179859 - DNA, 25 bp, Homo sapien
gagagaatcgtctgtggatttctga

SEQ ID NO: 5179860 - DNA, 25 bp, Homo sapien
ctggagagaatcgtctgtggatttc

SEQ ID NO: 5179861 - DNA, 25 bp, Homo sapien
gagttgctttatcctgcagttccgt

SEQ ID NO: 5179862 - DNA, 25 bp, Homo sapien
gctttatcctgcagttccgtgtgga

SEQ ID NO: 5179863 - DNA, 25 bp, Homo sapien
ctgcagttccgtgtggaagagctga

SEQ ID NO: 5179864 - DNA, 25 bp, Homo sapien
aatcagagttgctttatcctgcagt

SEQ ID NO: 5179865 - DNA, 25 bp, Homo sapien
gacggctgtcggcctccttctcagg

SEQ ID NO: 5179866 - DNA, 25 bp, Homo sapien
ggacggctgtcggcctccttctcag

SEQ ID NO: 5179867 - DNA, 25 bp, Homo sapien
atttccactccctttcttcagagtc

SEQ ID NO: 5179868 - DNA, 25 bp, Homo sapien
cagggtaaggggagcttcatttcca

SEQ ID NO: 5179869 - DNA, 25 bp, Homo sapien
tgtggccgtgggggaaggcagcttc

SEQ ID NO: 5179870 - DNA, 25 bp, Homo sapien
atgtggccgtgggggaaggcagctt

SEQ ID NO: 5179871 - DNA, 25 bp, Homo sapien
tcgggctgcggcacttgattgcaag

SEQ ID NO: 5179872 - DNA, 25 bp, Homo sapien
caggcctttgtgtcactccttcaag

SEQ ID NO: 5179873 - DNA, 25 bp, Homo sapien
gcacccgtgggtcatcttcagtggc

SEQ ID NO: 5179874 - DNA, 25 bp, Homo sapien
caagcttgatgattcgggctgcggc

SEQ ID NO: 5179875 - DNA, 25 bp, Homo sapien
ccctggtggctctggacactcaaca

SEQ ID NO: 5179876 - DNA, 25 bp, Homo sapien
tctggacactcaacacaactgccct

SEQ ID NO: 5179877 - DNA, 25 bp, Homo sapien
tcatcttggtgccaccctggtggct

SEQ ID NO: 5179878 - DNA, 25 bp, Homo sapien
tggctcctgggggaccatcatcttg

SEQ ID NO: 5179879 - DNA, 25 bp, Homo sapien
gcatggacggatgggaaggaaccac

SEQ ID NO: 5179880 - DNA, 25 bp, Homo sapien
cagcatggacggatgggaaggaacc

SEQ ID NO: 5179881 - DNA, 25 bp, Homo sapien
tcacagcatggacggatgggaagga

SEQ ID NO: 5179882 - DNA, 25 bp, Homo sapien
atggacggatgggaaggaaccacgt

SEQ ID NO: 5179883 - DNA, 25 bp, Homo sapien
cctggttgtgccaagttgagagcga

SEQ ID NO: 5179884 - DNA, 25 bp, Homo sapien
gccggagtgctggatggcaaccacc

SEQ ID NO: 5179885 - DNA, 25 bp, Homo sapien
tcgggtctggaaccatcagatgcat

SEQ ID NO: 5179886 - DNA, 25 bp, Homo sapien
gctagggtcgaccttggagacgcca

SEQ ID NO: 5179887 - DNA, 25 bp, Homo sapien
tgtctacggatgagtcttggccata

SEQ ID NO: 5179888 - DNA, 25 bp, Homo sapien
atgccctccacagtactgacgtctt

SEQ ID NO: 5179889 - DNA, 25 bp, Homo sapien
tttctgccttagagttgctaatgtg

SEQ ID NO: 5179890 - DNA, 25 bp, Homo sapien
agagttgctaatgtgtgtctacgga

SEQ ID NO: 5179891 - DNA, 25 bp, Homo sapien
accagccctgattttgctaggagcc

SEQ ID NO: 5179892 - DNA, 25 bp, Homo sapien
gggcccgctttctcttgacctcctg

SEQ ID NO: 5179893 - DNA, 25 bp, Homo sapien
cctcctgagaggtctggtgaggttt

SEQ ID NO: 5179894 - DNA, 25 bp, Homo sapien
ctgagacctcttgaccagccctgat

SEQ ID NO: 5179895 - DNA, 25 bp, Homo sapien
tgacagccaagtgggcattgcagga

SEQ ID NO: 5179896 - DNA, 25 bp, Homo sapien
caggagtggctacttcagctgttcc

SEQ ID NO: 5179897 - DNA, 25 bp, Homo sapien
tgggcattgcaggagtggctacttc

SEQ ID NO: 5179898 - DNA, 25 bp, Homo sapien
gaacgtggggcatcgtgacagccaa

SEQ ID NO: 5179899 - DNA, 25 bp, Homo sapien
cccaagatctttctgtgacaagcca

SEQ ID NO: 5179900 - DNA, 25 bp, Homo sapien
ctctgcagtattctggctgactcct

SEQ ID NO: 5179901 - DNA, 25 bp, Homo sapien
tgacccaagatctttctgtgacaag

SEQ ID NO: 5179902 - DNA, 25 bp, Homo sapien
caagatctttctgtgacaagccatt

SEQ ID NO: 5179903 - DNA, 25 bp, Homo sapien
ccctaaattacagcaagatgaagac

SEQ ID NO: 5179904 - DNA, 25 bp, Homo sapien
gtctccctaaattacagcaagatga

SEQ ID NO: 5179905 - DNA, 25 bp, Homo sapien
tgccttcctaacaaagtgtttggtc

SEQ ID NO: 5179906 - DNA, 25 bp, Homo sapien
cctggatgccttcctaacaaagtgt

SEQ ID NO: 5179907 - DNA, 25 bp, Homo sapien
gaaaaagcagtaggaatgcaagagg

SEQ ID NO: 5179908 - DNA, 25 bp, Homo sapien
tgcagtagaaaaagcagtaggaatg

SEQ ID NO: 5179909 - DNA, 25 bp, Homo sapien
aagcagtaggaatgcaagaggctta

SEQ ID NO: 5179910 - DNA, 25 bp, Homo sapien
gcagtagaaaaagcagtaggaatgc

SEQ ID NO: 5179911 - DNA, 25 bp, Homo sapien
agactgtgatggtaatcccaaccaa

SEQ ID NO: 5179912 - DNA, 25 bp, Homo sapien
tactgctgtgtaggggctgtacttg

SEQ ID NO: 5179913 - DNA, 25 bp, Homo sapien
tcccaaccaacagcatcattatgaa

SEQ ID NO: 5179914 - DNA, 25 bp, Homo sapien
gatggtaatcccaaccaacagcatc

SEQ ID NO: 5179915 - DNA, 25 bp, Homo sapien
ttattgttcctgaattggtcctttc

SEQ ID NO: 5179916 - DNA, 25 bp, Homo sapien
cctgcaaattcccacgatgcatggc

SEQ ID NO: 5179917 - DNA, 25 bp, Homo sapien
gctgggactgtgcatattgggcttc

SEQ ID NO: 5179918 - DNA, 25 bp, Homo sapien
tcctgtgtggcacccaatctttggt

SEQ ID NO: 5179919 - DNA, 25 bp, Homo sapien
cactttttggtgagacaagagcaac

SEQ ID NO: 5179920 - DNA, 25 bp, Homo sapien
tattgggcttcctgtgtggcaccca

SEQ ID NO: 5179921 - DNA, 25 bp, Homo sapien
gaacagacacgacaagaatgagaac

SEQ ID NO: 5179922 - DNA, 25 bp, Homo sapien
cagaccatgcccgtttgaacagaca

SEQ ID NO: 5179923 - DNA, 25 bp, Homo sapien
agatcagaccatgcccgtttgaaca

SEQ ID NO: 5179924 - DNA, 25 bp, Homo sapien
accatgcccgtttgaacagacacga

SEQ ID NO: 5179925 - DNA, 25 bp, Homo sapien
ctgccttccctgatatcttggcaaa

SEQ ID NO: 5179926 - DNA, 25 bp, Homo sapien
ttccctgatatcttggcaaaggctt

SEQ ID NO: 5179927 - DNA, 25 bp, Homo sapien
gccttccctgatatcttggcaaagg

SEQ ID NO: 5179928 - DNA, 25 bp, Homo sapien
ggcaaaggctttggtcctgccccat

SEQ ID NO: 5179929 - DNA, 25 bp, Homo sapien
gtggtgccatcgcagggtcctagcc

SEQ ID NO: 5179930 - DNA, 25 bp, Homo sapien
tagccccactttatggacatgttct

SEQ ID NO: 5179931 - DNA, 25 bp, Homo sapien
gctgtggtgccatcgcagggtccta

SEQ ID NO: 5179932 - DNA, 25 bp, Homo sapien
aattcttcaatgttacaagcaggga

SEQ ID NO: 5179933 - DNA, 25 bp, Homo sapien
aggcatttgaatgtgtagctggcca

SEQ ID NO: 5179934 - DNA, 25 bp, Homo sapien
tgtagctggccatatgcccctgtcc

SEQ ID NO: 5179935 - DNA, 25 bp, Homo sapien
acaacccatcaactgttcaccacag

SEQ ID NO: 5179936 - DNA, 25 bp, Homo sapien
tgttcgtccgttcctctatctttct

SEQ ID NO: 5179937 - DNA, 25 bp, Homo sapien
agtggagcaccgacagctactgcct

SEQ ID NO: 5179938 - DNA, 25 bp, Homo sapien
ggagtgcatgtatgggtacacattc

SEQ ID NO: 5179939 - DNA, 25 bp, Homo sapien
gcaacacagataagaagtggagcac

SEQ ID NO: 5179940 - DNA, 25 bp, Homo sapien
gttggagtgcatgtatgggtacaca

SEQ ID NO: 5179941 - DNA, 25 bp, Homo sapien
ggcacttcctagagagataatgttt

SEQ ID NO: 5179942 - DNA, 25 bp, Homo sapien
ttttaagaggcacttcctagagaga

SEQ ID NO: 5179943 - DNA, 25 bp, Homo sapien
gaggcacttcctagagagataatgt

SEQ ID NO: 5179944 - DNA, 25 bp, Homo sapien
cacttcctagagagataatgtttaa

SEQ ID NO: 5179945 - DNA, 25 bp, Homo sapien
tgatcacttacccagtaggcaccgt

SEQ ID NO: 5179946 - DNA, 25 bp, Homo sapien
cagggtggccatgcaattacacaca

SEQ ID NO: 5179947 - DNA, 25 bp, Homo sapien
tattatacctaactccacgtgtgca

SEQ ID NO: 5179948 - DNA, 25 bp, Homo sapien
caatagtacagctaacggcccagag

SEQ ID NO: 5179949 - DNA, 25 bp, Homo sapien
gcggacattaccacagcggcggcga

SEQ ID NO: 5179950 - DNA, 25 bp, Homo sapien
acatggcggacattaccacagcggc

SEQ ID NO: 5179951 - DNA, 25 bp, Homo sapien
atggcggacattaccacagcggcgg

SEQ ID NO: 5179952 - DNA, 25 bp, Homo sapien
tcgcccgcccgatccgctccctgcg

SEQ ID NO: 5179953 - DNA, 25 bp, Homo sapien
cccgcgcccgcggccgcctccacac

SEQ ID NO: 5179954 - DNA, 25 bp, Homo sapien
ccccgcgcccgcggccgcctccaca

SEQ ID NO: 5179955 - DNA, 25 bp, Homo sapien
cagccccccgcgcccgcggccgcct

SEQ ID NO: 5179956 - DNA, 25 bp, Homo sapien
ccgcgcccgcggccgcctccacaca

SEQ ID NO: 5179957 - DNA, 25 bp, Homo sapien
ccttcctcagtgcagcgcggccggc

SEQ ID NO: 5179958 - DNA, 25 bp, Homo sapien
gagagtttactcattgtctccccgc

SEQ ID NO: 5179959 - DNA, 25 bp, Homo sapien
cagtcgttgagatcaggcatgtcct

SEQ ID NO: 5179960 - DNA, 25 bp, Homo sapien
cgcccgcgctcggaaggagagttta

SEQ ID NO: 5179961 - DNA, 25 bp, Homo sapien
tccttgccgcggtagataggcagcg

SEQ ID NO: 5179962 - DNA, 25 bp, Homo sapien
ttagagcggcagcggcgccctccag

SEQ ID NO: 5179963 - DNA, 25 bp, Homo sapien
gcagcggcgccctccagcgagcgta

SEQ ID NO: 5179964 - DNA, 25 bp, Homo sapien
cgccctccagcgagcgtaaagcgct

SEQ ID NO: 5179965 - DNA, 25 bp, Homo sapien
gcggcgccctccagcgagcgtaaag

SEQ ID NO: 5179966 - DNA, 25 bp, Homo sapien
ctccgccggcgtagagtcccgtgcg

SEQ ID NO: 5179967 - DNA, 25 bp, Homo sapien
actccgccggcgtagagtcccgtgc

SEQ ID NO: 5179968 - DNA, 25 bp, Homo sapien
tactccgccggcgtagagtcccgtg

SEQ ID NO: 5179969 - DNA, 25 bp, Homo sapien
gctactccgccggcgtagagtcccg

SEQ ID NO: 5179970 - DNA, 25 bp, Homo sapien
gcagcgctgcgagctaatcacaaca

SEQ ID NO: 5179971 - DNA, 25 bp, Homo sapien
caaggcccccttacggcagcgtaag

SEQ ID NO: 5179972 - DNA, 25 bp, Homo sapien
ccttacggcagcgtaagcagcgctg

SEQ ID NO: 5179973 - DNA, 25 bp, Homo sapien
acactgggacgcaacaacatggcgg

SEQ ID NO: 5179974 - DNA, 25 bp, Homo sapien
taaacagagaccgtacgccaagagc

SEQ ID NO: 5179975 - DNA, 25 bp, Homo sapien
cgtacgccaagagcggccagcgcat

SEQ ID NO: 5179976 - DNA, 25 bp, Homo sapien
attagccccgcgcctgagagaggga

SEQ ID NO: 5179977 - DNA, 25 bp, Homo sapien
aataccacgccattaattagccccg

SEQ ID NO: 5179978 - DNA, 25 bp, Homo sapien
acttctaaggaccacctcgcaatga

SEQ ID NO: 5179979 - DNA, 25 bp, Homo sapien
caactgccaatttagatgcactagg

SEQ ID NO: 5179980 - DNA, 25 bp, Homo sapien
tagatgcactaggtcctcaacttct

SEQ ID NO: 5179981 - DNA, 25 bp, Homo sapien
gacaattctcgaggacaacgcaacg

SEQ ID NO: 5179982 - DNA, 25 bp, Homo sapien
caatcgaaggcataaaagcatttcc

SEQ ID NO: 5179983 - DNA, 25 bp, Homo sapien
gaaacctcgagcttccttttgacag

SEQ ID NO: 5179984 - DNA, 25 bp, Homo sapien
caataaggcgggactgtaggttcat

SEQ ID NO: 5179985 - DNA, 25 bp, Homo sapien
cacacccgaggttgacaataaggcg

SEQ ID NO: 5179986 - DNA, 25 bp, Homo sapien
gaagggactaattctgtcttcctga

SEQ ID NO: 5179987 - DNA, 25 bp, Homo sapien
gcactgacttaaccaacatactttg

SEQ ID NO: 5179988 - DNA, 25 bp, Homo sapien
gacttgaagcactgacttaaccaac

SEQ ID NO: 5179989 - DNA, 25 bp, Homo sapien
ctggtggaatgtagaagggactaat

SEQ ID NO: 5179990 - DNA, 25 bp, Homo sapien
agaattgggctcagcaactttgtgt

SEQ ID NO: 5179991 - DNA, 25 bp, Homo sapien
tgggctcagcaactttgtgtagcac

SEQ ID NO: 5179992 - DNA, 25 bp, Homo sapien
gagtggaaaatgcatccaatattct

SEQ ID NO: 5179993 - DNA, 25 bp, Homo sapien
gaagagtggaaaatgcatccaatat

SEQ ID NO: 5179994 - DNA, 25 bp, Homo sapien
gccatcaatttctctgtcaacttca

SEQ ID NO: 5179995 - DNA, 25 bp, Homo sapien
ctcaatgccatcaatttctctgtca

SEQ ID NO: 5179996 - DNA, 25 bp, Homo sapien
atgccatcaatttctctgtcaactt

SEQ ID NO: 5179997 - DNA, 25 bp, Homo sapien
catcaatttctctgtcaacttcatt

SEQ ID NO: 5179998 - DNA, 25 bp, Homo sapien
caggaatgaccatactctctttttt

SEQ ID NO: 5179999 - DNA, 25 bp, Homo sapien
aacaggaatgaccatactctctttt

SEQ ID NO: 5180000 - DNA, 25 bp, Homo sapien
tctcctttgtacaagcgattgtaat

SEQ ID NO: 5180001 - DNA, 25 bp, Homo sapien
gtaatagttgacgttgctctctgcc

SEQ ID NO: 5180002 - DNA, 25 bp, Homo sapien
gatacaggacagtaaatataacagg

SEQ ID NO: 5180003 - DNA, 25 bp, Homo sapien
tattaaggaggcagaactacacaga

SEQ ID NO: 5180004 - DNA, 25 bp, Homo sapien
ttagaagagtatagggacaggagat

SEQ ID NO: 5180005 - DNA, 25 bp, Homo sapien
taaaagtcttcacgctagaggtggt

SEQ ID NO: 5180006 - DNA, 25 bp, Homo sapien
gaacaacagcaatttaagatgcaat

SEQ ID NO: 5180007 - DNA, 25 bp, Homo sapien
gaacaagacttcaatcctgaacaac

SEQ ID NO: 5180008 - DNA, 25 bp, Homo sapien
cctgaacaacagcaatttaagatgc

SEQ ID NO: 5180009 - DNA, 25 bp, Homo sapien
tgaaaattctctttagaagaacaag

SEQ ID NO: 5180010 - DNA, 25 bp, Homo sapien
tgacccacatgagttacacccgatt

SEQ ID NO: 5180011 - DNA, 25 bp, Homo sapien
gatacattaccaaagggctatgccc

SEQ ID NO: 5180012 - DNA, 25 bp, Homo sapien
cgtagtccctatggtacacagagtg

SEQ ID NO: 5180013 - DNA, 25 bp, Homo sapien
ttattgtattcgatgggcctgaccc

SEQ ID NO: 5180014 - DNA, 25 bp, Homo sapien
caataatagaataaaatgaaatgaa

SEQ ID NO: 5180015 - DNA, 25 bp, Homo sapien
tacaataatagaataaaatgaaatg

SEQ ID NO: 5180016 - DNA, 25 bp, Homo sapien
acaataatagaataaaatgaaatga

SEQ ID NO: 5180017 - DNA, 25 bp, Homo sapien
taatagaataaaatgaaatgaaaaa

SEQ ID NO: 5180018 - DNA, 25 bp, Homo sapien
ccagccaaaacaggagattcttaag

SEQ ID NO: 5180019 - DNA, 25 bp, Homo sapien
gcccagccaaaacaggagattctta

SEQ ID NO: 5180020 - DNA, 25 bp, Homo sapien
ggagattcttaagccagtaatgaga

SEQ ID NO: 5180021 - DNA, 25 bp, Homo sapien
caaaacaggagattcttaagccagt

SEQ ID NO: 5180022 - DNA, 25 bp, Homo sapien
tataggaatatattaccacacctgg

SEQ ID NO: 5180023 - DNA, 25 bp, Homo sapien
gttaggactataggaatatattacc

SEQ ID NO: 5180024 - DNA, 25 bp, Homo sapien
cctgcctcggcctactgggtagtta

SEQ ID NO: 5180025 - DNA, 25 bp, Homo sapien
ggcctactgggtagttaggactata

SEQ ID NO: 5180026 - DNA, 25 bp, Homo sapien
agagaggacagagcctaatgacagc

SEQ ID NO: 5180027 - DNA, 25 bp, Homo sapien
agaggacagagcctaatgacagcat

SEQ ID NO: 5180028 - DNA, 25 bp, Homo sapien
gagaggacagagcctaatgacagca

SEQ ID NO: 5180029 - DNA, 25 bp, Homo sapien
actggatactgcacatctttcaggg

SEQ ID NO: 5180030 - DNA, 25 bp, Homo sapien
gaatggcaactggatactgcacatc

SEQ ID NO: 5180031 - DNA, 25 bp, Homo sapien
caactggatactgcacatctttcag

SEQ ID NO: 5180032 - DNA, 25 bp, Homo sapien
tggcaactggatactgcacatcttt

SEQ ID NO: 5180033 - DNA, 25 bp, Homo sapien
tcatataagcaaaaacatgtccatc

SEQ ID NO: 5180034 - DNA, 25 bp, Homo sapien
tataggcccacaacctacctagaaa

SEQ ID NO: 5180035 - DNA, 25 bp, Homo sapien
gaaaagctctcataaatgtggacaa

SEQ ID NO: 5180036 - DNA, 25 bp, Homo sapien
taatctcaatggaattaggctgagt

SEQ ID NO: 5180037 - DNA, 25 bp, Homo sapien
atgagccatcgtgtgcggccctgaa

SEQ ID NO: 5180038 - DNA, 25 bp, Homo sapien
gcatatttcataggtcaggcctact

SEQ ID NO: 5180039 - DNA, 25 bp, Homo sapien
taatcaatcttagagacatggccaa

SEQ ID NO: 5180040 - DNA, 25 bp, Homo sapien
cagtagtaatgaacacccctaggac

SEQ ID NO: 5180041 - DNA, 25 bp, Homo sapien
ctatccggtcaacagcttctgggta

SEQ ID NO: 5180042 - DNA, 25 bp, Homo sapien
tatccggtcaacagcttctgggtac

SEQ ID NO: 5180043 - DNA, 25 bp, Homo sapien
tccggtcaacagcttctgggtacat

SEQ ID NO: 5180044 - DNA, 25 bp, Homo sapien
atccggtcaacagcttctgggtaca

SEQ ID NO: 5180045 - DNA, 25 bp, Homo sapien
aaggatgttgtatttgtaaatgcac

SEQ ID NO: 5180046 - DNA, 25 bp, Homo sapien
tcttcctttcacaaaggatgttgta

SEQ ID NO: 5180047 - DNA, 25 bp, Homo sapien
cctttcacaaaggatgttgtatttg

SEQ ID NO: 5180048 - DNA, 25 bp, Homo sapien
aaaggatgttgtatttgtaaatgca

SEQ ID NO: 5180049 - DNA, 25 bp, Homo sapien
tacaataataagacaataggtttca

SEQ ID NO: 5180050 - DNA, 25 bp, Homo sapien
aaaagtgtaacttcagtgatagatt

SEQ ID NO: 5180051 - DNA, 25 bp, Homo sapien
caataataagacaataggtttcact

SEQ ID NO: 5180052 - DNA, 25 bp, Homo sapien
cagtgatagattgataaatatacaa

SEQ ID NO: 5180053 - DNA, 25 bp, Homo sapien
ctgttaagtctatttaataaagtct

SEQ ID NO: 5180054 - DNA, 25 bp, Homo sapien
tccatatcataatctggttgctcgt

SEQ ID NO: 5180055 - DNA, 25 bp, Homo sapien
ctgattagaactggctttttcaagt

SEQ ID NO: 5180056 - DNA, 25 bp, Homo sapien
ggttgctcgttgtctagattaaaag

SEQ ID NO: 5180057 - DNA, 25 bp, Homo sapien
ataagagacatctttacatggtaca

SEQ ID NO: 5180058 - DNA, 25 bp, Homo sapien
gagacatctttacatggtacagtac

SEQ ID NO: 5180059 - DNA, 25 bp, Homo sapien
aagagacatctttacatggtacagt

SEQ ID NO: 5180060 - DNA, 25 bp, Homo sapien
gaagataagagacatctttacatgg

SEQ ID NO: 5180061 - DNA, 25 bp, Homo sapien
tcaacctgtgtaacattgtggaaca

SEQ ID NO: 5180062 - DNA, 25 bp, Homo sapien
tatttgacagatcacaatcaaaatg

SEQ ID NO: 5180063 - DNA, 25 bp, Homo sapien
gcagctctaatctataaatctgaaa

SEQ ID NO: 5180064 - DNA, 25 bp, Homo sapien
aattccacacctgacgttatttgac

SEQ ID NO: 5180065 - DNA, 25 bp, Homo sapien
cataagggtcattgttggtagagcc

SEQ ID NO: 5180066 - DNA, 25 bp, Homo sapien
tctcacccagtagtcatatacagct

SEQ ID NO: 5180067 - DNA, 25 bp, Homo sapien
tctctgttcttctccgaaaggcaac

SEQ ID NO: 5180068 - DNA, 25 bp, Homo sapien
tgcagtttttacgttttctcaccca

SEQ ID NO: 5180069 - DNA, 25 bp, Homo sapien
taaggttaagtgcaataattctcgt

SEQ ID NO: 5180070 - DNA, 25 bp, Homo sapien
tccaaaattgttatggctctactaa

SEQ ID NO: 5180071 - DNA, 25 bp, Homo sapien
acatcttttcataagaggcttcatc

SEQ ID NO: 5180072 - DNA, 25 bp, Homo sapien
taaattctcgtctcagtttcaacat

SEQ ID NO: 5180073 - DNA, 25 bp, Homo sapien
taatctataaaaactagtaaccaca

SEQ ID NO: 5180074 - DNA, 25 bp, Homo sapien
taagtataggatctacagtatacac

SEQ ID NO: 5180075 - DNA, 25 bp, Homo sapien
tgtcataaagcttaacctgttcccc

SEQ ID NO: 5180076 - DNA, 25 bp, Homo sapien
actgttgtaacaggagcaatgttac

SEQ ID NO: 5180077 - DNA, 25 bp, Homo sapien
agttttacattcttgaactttgtga

SEQ ID NO: 5180078 - DNA, 25 bp, Homo sapien
tctgatctactgatttttacttcat

SEQ ID NO: 5180079 - DNA, 25 bp, Homo sapien
cattcttgaactttgtgatgatttc

SEQ ID NO: 5180080 - DNA, 25 bp, Homo sapien
gctggagtggcatataactcttttt

SEQ ID NO: 5180081 - DNA, 25 bp, Homo sapien
catgcttcttcccagacaatattca

SEQ ID NO: 5180082 - DNA, 25 bp, Homo sapien
atgcttcttcccagacaatattcac

SEQ ID NO: 5180083 - DNA, 25 bp, Homo sapien
catccatacatgcttcttcccagac

SEQ ID NO: 5180084 - DNA, 25 bp, Homo sapien
atacatgcttcttcccagacaatat

SEQ ID NO: 5180085 - DNA, 25 bp, Homo sapien
ctttcaaagacaaatgatgagggtg

SEQ ID NO: 5180086 - DNA, 25 bp, Homo sapien
gttgctgagatgttatcaaagcctc

SEQ ID NO: 5180087 - DNA, 25 bp, Homo sapien
tgtcactcttattgatcacaggcaa

SEQ ID NO: 5180088 - DNA, 25 bp, Homo sapien
tttgacgaaccacatcagaagcctc

SEQ ID NO: 5180089 - DNA, 25 bp, Homo sapien
catctgagctgtgaaaatcatattg

SEQ ID NO: 5180090 - DNA, 25 bp, Homo sapien
tctgggtattactgcaggcatcaag

SEQ ID NO: 5180091 - DNA, 25 bp, Homo sapien
caatgcgaaactgctaggagttccc

SEQ ID NO: 5180092 - DNA, 25 bp, Homo sapien
cagtctacagcatcattcttaaagg

SEQ ID NO: 5180093 - DNA, 25 bp, Homo sapien
gagttccctctaatatgctgtgcct

SEQ ID NO: 5180094 - DNA, 25 bp, Homo sapien
aatactggcatcctgcccgccttct

SEQ ID NO: 5180095 - DNA, 25 bp, Homo sapien
ccggttctgatactggggacaatac

SEQ ID NO: 5180096 - DNA, 25 bp, Homo sapien
ttcttccggttctgatactggggac

SEQ ID NO: 5180097 - DNA, 25 bp, Homo sapien
cttccggttctgatactggggacaa

SEQ ID NO: 5180098 - DNA, 25 bp, Homo sapien
aaaagctgtcagtgtatgcttacca

SEQ ID NO: 5180099 - DNA, 25 bp, Homo sapien
gttacggtgaactgtatgattgcac

SEQ ID NO: 5180100 - DNA, 25 bp, Homo sapien
tgcgacttcatagcataaagcaact

SEQ ID NO: 5180101 - DNA, 25 bp, Homo sapien
tctcattgagaaccttggagagtga

SEQ ID NO: 5180102 - DNA, 25 bp, Homo sapien
ttcacatgaatggttagcttggtcc

SEQ ID NO: 5180103 - DNA, 25 bp, Homo sapien
cacatgaatggttagcttggtccaa

SEQ ID NO: 5180104 - DNA, 25 bp, Homo sapien
aatggttagcttggtccaaacgagg

SEQ ID NO: 5180105 - DNA, 25 bp, Homo sapien
catgaatggttagcttggtccaaac

SEQ ID NO: 5180106 - DNA, 25 bp, Homo sapien
cttgggactgtaagtgttgtaaggc

SEQ ID NO: 5180107 - DNA, 25 bp, Homo sapien
tctgccaattcgcctccttgcaaat

SEQ ID NO: 5180108 - DNA, 25 bp, Homo sapien
cctatacatcttcttgggactgtaa

SEQ ID NO: 5180109 - DNA, 25 bp, Homo sapien
tgtaagtgttgtaaggcaatgccta

SEQ ID NO: 5180110 - DNA, 25 bp, Homo sapien
gcattggtccgagagaaattagaag

SEQ ID NO: 5180111 - DNA, 25 bp, Homo sapien
ggtctatctgtttcaggactgggtc

SEQ ID NO: 5180112 - DNA, 25 bp, Homo sapien
tcttgctggtgttcaataaagctac

SEQ ID NO: 5180113 - DNA, 25 bp, Homo sapien
gaaacactgtagtcgacatgatctg

SEQ ID NO: 5180114 - DNA, 25 bp, Homo sapien
gagaaaactatttgccactagccct

SEQ ID NO: 5180115 - DNA, 25 bp, Homo sapien
tctctgctagggaaaagtataatcc

SEQ ID NO: 5180116 - DNA, 25 bp, Homo sapien
tcaagacgcatggattagaaaaacc

SEQ ID NO: 5180117 - DNA, 25 bp, Homo sapien
tgtgctctcatgaccaagcccacta

SEQ ID NO: 5180118 - DNA, 25 bp, Homo sapien
cgaggaatgctgagattgctgtttc

SEQ ID NO: 5180119 - DNA, 25 bp, Homo sapien
cttttggatgtgtctgttgcgagga

SEQ ID NO: 5180120 - DNA, 25 bp, Homo sapien
cctttgcatctgaactaactgctgc

SEQ ID NO: 5180121 - DNA, 25 bp, Homo sapien
gctgggcaagttgctgcctttgcat

SEQ ID NO: 5180122 - DNA, 25 bp, Homo sapien
tcatggagcacatccacatgcactt

SEQ ID NO: 5180123 - DNA, 25 bp, Homo sapien
gcacaattcaactgaattactgccc

SEQ ID NO: 5180124 - DNA, 25 bp, Homo sapien
catgcacttaaacacatagtttagg

SEQ ID NO: 5180125 - DNA, 25 bp, Homo sapien
gttatgctgttgatgtattgcacaa

SEQ ID NO: 5180126 - DNA, 25 bp, Homo sapien
tgagcaagtcccagatccacctgga

SEQ ID NO: 5180127 - DNA, 25 bp, Homo sapien
tggcatatgaagcagggaaacgaac

SEQ ID NO: 5180128 - DNA, 25 bp, Homo sapien
tagttactaagtcctacagccctag

SEQ ID NO: 5180129 - DNA, 25 bp, Homo sapien
gaggctgttgcctttctaaccttga

SEQ ID NO: 5180130 - DNA, 25 bp, Homo sapien
ggctacctcactgcgacttggaaca

SEQ ID NO: 5180131 - DNA, 25 bp, Homo sapien
ttggaacaggtgcactgaccactgc

SEQ ID NO: 5180132 - DNA, 25 bp, Homo sapien
acatacagtcagaggtgcttgagcc

SEQ ID NO: 5180133 - DNA, 25 bp, Homo sapien
acaccgtttatgttgttgtggccag

SEQ ID NO: 5180134 - DNA, 25 bp, Homo sapien
aagctgtacagctgaaatccctggg

SEQ ID NO: 5180135 - DNA, 25 bp, Homo sapien
tccatactggcagcaactgtggcaa

SEQ ID NO: 5180136 - DNA, 25 bp, Homo sapien
actgacattattgaggtgcactgca

SEQ ID NO: 5180137 - DNA, 25 bp, Homo sapien
gatatgcacattgactggagaaaca

SEQ ID NO: 5180138 - DNA, 25 bp, Homo sapien
tgtgaaacctaaactctggcatgga

SEQ ID NO: 5180139 - DNA, 25 bp, Homo sapien
tctcgagagatgaagcatatgacac

SEQ ID NO: 5180140 - DNA, 25 bp, Homo sapien
tactatggatgtccgtagtaatcca

SEQ ID NO: 5180141 - DNA, 25 bp, Homo sapien
actttccctttgtgtatgacgctaa

SEQ ID NO: 5180142 - DNA, 25 bp, Homo sapien
caatctttctggttcgtggttctct

SEQ ID NO: 5180143 - DNA, 25 bp, Homo sapien
ccaatctttctggttcgtggttctc

SEQ ID NO: 5180144 - DNA, 25 bp, Homo sapien
ctgctattccatttaagcccaatct

SEQ ID NO: 5180145 - DNA, 25 bp, Homo sapien
tattccatttaagcccaatctttct

SEQ ID NO: 5180146 - DNA, 25 bp, Homo sapien
tatgaatgactgcacaccatcagca

SEQ ID NO: 5180147 - DNA, 25 bp, Homo sapien
gttaaaacaagtgatgcaggatccc

SEQ ID NO: 5180148 - DNA, 25 bp, Homo sapien
acaggtcagagccacgtgttttagg

SEQ ID NO: 5180149 - DNA, 25 bp, Homo sapien
gatccacagagtgttgccttttgca

SEQ ID NO: 5180150 - DNA, 25 bp, Homo sapien
ccagttaaaatatgcagccttcaga

SEQ ID NO: 5180151 - DNA, 25 bp, Homo sapien
aaatttgcatgtatcgatccatccc

SEQ ID NO: 5180152 - DNA, 25 bp, Homo sapien
ctttcccctgcacagtaatagaaaa

SEQ ID NO: 5180153 - DNA, 25 bp, Homo sapien
aaagtccatctagtcaaattgtgaa

SEQ ID NO: 5180154 - DNA, 25 bp, Homo sapien
cagggaaagttgtctgaactagtgc

SEQ ID NO: 5180155 - DNA, 25 bp, Homo sapien
gaaggtgtccaacgcttacagtcag

SEQ ID NO: 5180156 - DNA, 25 bp, Homo sapien
caacccgttacttgccttgtagcca

SEQ ID NO: 5180157 - DNA, 25 bp, Homo sapien
cacctgggatggctcgatatctaga

SEQ ID NO: 5180158 - DNA, 25 bp, Homo sapien
aaaagtgctgttaagtgctatcatc

SEQ ID NO: 5180159 - DNA, 25 bp, Homo sapien
gattatctgaaacccaatagagccc

SEQ ID NO: 5180160 - DNA, 25 bp, Homo sapien
aaattttcacttatactgtgtgcac

SEQ ID NO: 5180161 - DNA, 25 bp, Homo sapien
acatttcaatgactgcgatactgca

SEQ ID NO: 5180162 - DNA, 25 bp, Homo sapien
tggatcctatcaggtcacaaccaag

SEQ ID NO: 5180163 - DNA, 25 bp, Homo sapien
tggcagaaacgagcatggatcctat

SEQ ID NO: 5180164 - DNA, 25 bp, Homo sapien
tataagttctggatttgccaccacc

SEQ ID NO: 5180165 - DNA, 25 bp, Homo sapien
gagtaactccagaggtagtatggca

SEQ ID NO: 5180166 - DNA, 25 bp, Homo sapien
tctgtaatgttggtcctccttgttc

SEQ ID NO: 5180167 - DNA, 25 bp, Homo sapien
cagcagtacatactagggaagtttc

SEQ ID NO: 5180168 - DNA, 25 bp, Homo sapien
taagaatatcctaccacgtgagagt

SEQ ID NO: 5180169 - DNA, 25 bp, Homo sapien
gaagggcgtgtactctctttatgaa

SEQ ID NO: 5180170 - DNA, 25 bp, Homo sapien
tatgtttgaaataagcagtttcccc

SEQ ID NO: 5180171 - DNA, 25 bp, Homo sapien
aaacgtagtagtaggagggtgcata

SEQ ID NO: 5180172 - DNA, 25 bp, Homo sapien
tgcatagggtctgatttgttactga

SEQ ID NO: 5180173 - DNA, 25 bp, Homo sapien
gatacttttgaatggtgctgttaaa

SEQ ID NO: 5180174 - DNA, 25 bp, Homo sapien
tgttactgatgccagtcttatctct

SEQ ID NO: 5180175 - DNA, 25 bp, Homo sapien
aaagcctttggtgttactgatgcca

SEQ ID NO: 5180176 - DNA, 25 bp, Homo sapien
cttatctctggtcttgacgacctga

SEQ ID NO: 5180177 - DNA, 25 bp, Homo sapien
tctggtcttgacgacctgacctcct

SEQ ID NO: 5180178 - DNA, 25 bp, Homo sapien
caatgggaaccagtctctaagctgc

SEQ ID NO: 5180179 - DNA, 25 bp, Homo sapien
taagctgccagcaaaagaggccatg

SEQ ID NO: 5180180 - DNA, 25 bp, Homo sapien
ggccagcgtctcttgcctacagcag

SEQ ID NO: 5180181 - DNA, 25 bp, Homo sapien
gagctttcttggcaacccgacatgg

SEQ ID NO: 5180182 - DNA, 25 bp, Homo sapien
gcaaaagtgcgagagggtgatccct

SEQ ID NO: 5180183 - DNA, 25 bp, Homo sapien
tacaggcaggcaagaggtgcatacg

SEQ ID NO: 5180184 - DNA, 25 bp, Homo sapien
tgtaagcccctatagaacccaaagc

SEQ ID NO: 5180185 - DNA, 25 bp, Homo sapien
catctagtgcaggaacaaagacggg

SEQ ID NO: 5180186 - DNA, 25 bp, Homo sapien
ttttttattctcaccaatccatggg

SEQ ID NO: 5180187 - DNA, 25 bp, Homo sapien
gctggcccgtcagcttgttctaaga

SEQ ID NO: 5180188 - DNA, 25 bp, Homo sapien
catcactcaatgaggctggctgaga

SEQ ID NO: 5180189 - DNA, 25 bp, Homo sapien
ggctgggctcactcacattttaggg

SEQ ID NO: 5180190 - DNA, 25 bp, Homo sapien
tataatgattgctcgaagaatgcag

SEQ ID NO: 5180191 - DNA, 25 bp, Homo sapien
aataagcactaagaggattacgtcc

SEQ ID NO: 5180192 - DNA, 25 bp, Homo sapien
gatataaagaagctgaagtccggaa

SEQ ID NO: 5180193 - DNA, 25 bp, Homo sapien
ggaactatacacaatgatgacggat

SEQ ID NO: 5180194 - DNA, 25 bp, Homo sapien
tcctgcgcgctcagccatcctgcat

SEQ ID NO: 5180195 - DNA, 25 bp, Homo sapien
gtgggcagcttctccgctccggccc

SEQ ID NO: 5180196 - DNA, 25 bp, Homo sapien
ggcggaggaggcgatgcgcagggag

SEQ ID NO: 5180197 - DNA, 25 bp, Homo sapien
gcttctcagcaggtcatcgcgagcc

SEQ ID NO: 5180198 - DNA, 25 bp, Homo sapien
tgaggggccggaaccggcacatcac

SEQ ID NO: 5180199 - DNA, 25 bp, Homo sapien
ggatgaatttgtccccgcggaggat

SEQ ID NO: 5180200 - DNA, 25 bp, Homo sapien
cgcggaggatctccgcttcgttgag

SEQ ID NO: 5180201 - DNA, 25 bp, Homo sapien
cggtctcatcgcctttaaatttggg

SEQ ID NO: 5180202 - DNA, 25 bp, Homo sapien
acactgccgcgggagctccgagacg

SEQ ID NO: 5180203 - DNA, 25 bp, Homo sapien
cgcgcggagccaggtgtaacaccgc

SEQ ID NO: 5180204 - DNA, 25 bp, Homo sapien
gggagccgcgtctacactgccgcgg

SEQ ID NO: 5180205 - DNA, 25 bp, Homo sapien
cgagacgcgactagaaattttcctg

SEQ ID NO: 5180206 - DNA, 25 bp, Homo sapien
cacagggggctactgcgctctgagc

SEQ ID NO: 5180207 - DNA, 25 bp, Homo sapien
cacccagcgtgaggcgcatcagagg

SEQ ID NO: 5180208 - DNA, 25 bp, Homo sapien
cccctcgccccacagatgtggacac

SEQ ID NO: 5180209 - DNA, 25 bp, Homo sapien
tctccacccagcgtgaggcgcatca

SEQ ID NO: 5180210 - DNA, 25 bp, Homo sapien
gaggctcccattaactcggtccctc

SEQ ID NO: 5180211 - DNA, 25 bp, Homo sapien
tccccacgcggctcgcatacaaagg

SEQ ID NO: 5180212 - DNA, 25 bp, Homo sapien
caggaacgtgtcagcggggaccggg

SEQ ID NO: 5180213 - DNA, 25 bp, Homo sapien
atacaaagggggcaccatcagccac

SEQ ID NO: 5180214 - DNA, 25 bp, Homo sapien
tcacttgacctaaatacaccagcca

SEQ ID NO: 5180215 - DNA, 25 bp, Homo sapien
aatcacttgacctaaatacaccagc

SEQ ID NO: 5180216 - DNA, 25 bp, Homo sapien
ctgtcaatcacttgacctaaataca

SEQ ID NO: 5180217 - DNA, 25 bp, Homo sapien
tcaatcacttgacctaaatacacca

SEQ ID NO: 5180218 - DNA, 25 bp, Homo sapien
ggtacaggttaaagccctgaggcca

SEQ ID NO: 5180219 - DNA, 25 bp, Homo sapien
gccttacggtacagctggcacctgc

SEQ ID NO: 5180220 - DNA, 25 bp, Homo sapien
aagccaggtacaggttaaagccctg

SEQ ID NO: 5180221 - DNA, 25 bp, Homo sapien
ctagcgtggagagctcccgccttac

SEQ ID NO: 5180222 - DNA, 25 bp, Homo sapien
tcagcggggacccgcggggtcgcag

SEQ ID NO: 5180223 - DNA, 25 bp, Homo sapien
tctccctctggtctgtaagcccaag

SEQ ID NO: 5180224 - DNA, 25 bp, Homo sapien
tttccaacactgaaccataatcact

SEQ ID NO: 5180225 - DNA, 25 bp, Homo sapien
cttgctttccaacactgaaccataa

SEQ ID NO: 5180226 - DNA, 25 bp, Homo sapien
ttctccctctggtctgtaagcccaa

SEQ ID NO: 5180227 - DNA, 25 bp, Homo sapien
gggtgtctccaatgtctgccacatg

SEQ ID NO: 5180228 - DNA, 25 bp, Homo sapien
aaatacttccaggttctcatcaggg

SEQ ID NO: 5180229 - DNA, 25 bp, Homo sapien
tgcatgacgggccttggaaatactt

SEQ ID NO: 5180230 - DNA, 25 bp, Homo sapien
cagcagtaagggtgtgttcgcatcc

SEQ ID NO: 5180231 - DNA, 25 bp, Homo sapien
caaatgaatggcctgatctggtttc

SEQ ID NO: 5180232 - DNA, 25 bp, Homo sapien
gcaaatgaatggcctgatctggttt

SEQ ID NO: 5180233 - DNA, 25 bp, Homo sapien
agcaaatgaatggcctgatctggtt

SEQ ID NO: 5180234 - DNA, 25 bp, Homo sapien
ccttcctgccaattccaaatttaag

SEQ ID NO: 5180235 - DNA, 25 bp, Homo sapien
cctgccaattccaaatttaagaatg

SEQ ID NO: 5180236 - DNA, 25 bp, Homo sapien
atactctctcacatggaaaggcaca

SEQ ID NO: 5180237 - DNA, 25 bp, Homo sapien
ttctcttctcttttgcaccttccgt

SEQ ID NO: 5180238 - DNA, 25 bp, Homo sapien
acaagaatgaatcttgtaagccttc

SEQ ID NO: 5180239 - DNA, 25 bp, Homo sapien
caacacacaagaatgaatcttgtaa

SEQ ID NO: 5180240 - DNA, 25 bp, Homo sapien
tgagaaggaacaaaggcaacacaca

SEQ ID NO: 5180241 - DNA, 25 bp, Homo sapien
ggaacaaaggcaacacacaagaatg

SEQ ID NO: 5180242 - DNA, 25 bp, Homo sapien
cacagccggactcactcaggaggcc

SEQ ID NO: 5180243 - DNA, 25 bp, Homo sapien
ttccacagccggactcactcaggag

SEQ ID NO: 5180244 - DNA, 25 bp, Homo sapien
tccacagccggactcactcaggagg

SEQ ID NO: 5180245 - DNA, 25 bp, Homo sapien
cttccacagccggactcactcagga

SEQ ID NO: 5180246 - DNA, 25 bp, Homo sapien
cattagtagctaggccataggcact

SEQ ID NO: 5180247 - DNA, 25 bp, Homo sapien
taaaaaatcgcaaacattagtagct

SEQ ID NO: 5180248 - DNA, 25 bp, Homo sapien
ctaggccataggcactaagtcacca

SEQ ID NO: 5180249 - DNA, 25 bp, Homo sapien
taggaataaaaaatcgcaaacatta

SEQ ID NO: 5180250 - DNA, 25 bp, Homo sapien
tttgacaatttgcttcgcacatgca

SEQ ID NO: 5180251 - DNA, 25 bp, Homo sapien
gcattgtaaacctgctcttgggtcg

SEQ ID NO: 5180252 - DNA, 25 bp, Homo sapien
tgtcgaagacatatggcttcccttg

SEQ ID NO: 5180253 - DNA, 25 bp, Homo sapien
tcgtgttgggaggtagcactctgtc

SEQ ID NO: 5180254 - DNA, 25 bp, Homo sapien
caattactctgaatggcccaggagg

SEQ ID NO: 5180255 - DNA, 25 bp, Homo sapien
taaggaatgctgaatggcaagacca

SEQ ID NO: 5180256 - DNA, 25 bp, Homo sapien
caaatcagggctagaaccgaggcta

SEQ ID NO: 5180257 - DNA, 25 bp, Homo sapien
tcagtgtttccaattagcaggcctc

SEQ ID NO: 5180258 - DNA, 25 bp, Homo sapien
aatgcaagcttcaacctgcccctga

SEQ ID NO: 5180259 - DNA, 25 bp, Homo sapien
agctctgtccagatggcaagcctgc

SEQ ID NO: 5180260 - DNA, 25 bp, Homo sapien
tttgaaagcacaattgccacagcat

SEQ ID NO: 5180261 - DNA, 25 bp, Homo sapien
tgtaaatgtaggcttgaggctacct

SEQ ID NO: 5180262 - DNA, 25 bp, Homo sapien
gaatgtgaataaccatccacctcag

SEQ ID NO: 5180263 - DNA, 25 bp, Homo sapien
caaggaacattacatgctgacatgc

SEQ ID NO: 5180264 - DNA, 25 bp, Homo sapien
tcaaatacttaggttagtcagcttc

SEQ ID NO: 5180265 - DNA, 25 bp, Homo sapien
tccagggtcagaattaaacgaacag

SEQ ID NO: 5180266 - DNA, 25 bp, Homo sapien
taggcgtccaaaggagccttcccat

SEQ ID NO: 5180267 - DNA, 25 bp, Homo sapien
ctaggcgtccaaaggagccttccca

SEQ ID NO: 5180268 - DNA, 25 bp, Homo sapien
atccatggagtagatatggtcaaag

SEQ ID NO: 5180269 - DNA, 25 bp, Homo sapien
gatatcatgggcaattcgtgggatg

SEQ ID NO: 5180270 - DNA, 25 bp, Homo sapien
tggtcaaagatatcatgggcaattc

SEQ ID NO: 5180271 - DNA, 25 bp, Homo sapien
tcgtgggatgatccccatgagctgg

SEQ ID NO: 5180272 - DNA, 25 bp, Homo sapien
caagaatgtcatttaaattagtagg

SEQ ID NO: 5180273 - DNA, 25 bp, Homo sapien
aagaaacgttatctggggcccagtg

SEQ ID NO: 5180274 - DNA, 25 bp, Homo sapien
tataagaaacgttatctggggccca

SEQ ID NO: 5180275 - DNA, 25 bp, Homo sapien
cacaagaatgtcatttaaattagta

SEQ ID NO: 5180276 - DNA, 25 bp, Homo sapien
ttattttgtccaagtagatctcaaa

SEQ ID NO: 5180277 - DNA, 25 bp, Homo sapien
cccttattttgtccaagtagatctc

SEQ ID NO: 5180278 - DNA, 25 bp, Homo sapien
attttgtccaagtagatctcaaaat

SEQ ID NO: 5180279 - DNA, 25 bp, Homo sapien
ccttattttgtccaagtagatctca

SEQ ID NO: 5180280 - DNA, 25 bp, Homo sapien
acatacgggactctgtttttatctt

SEQ ID NO: 5180281 - DNA, 25 bp, Homo sapien
tacatacgggactctgtttttatct

SEQ ID NO: 5180282 - DNA, 25 bp, Homo sapien
ttacatacgggactctgtttttatc

SEQ ID NO: 5180283 - DNA, 25 bp, Homo sapien
tctattacatccatgacttcctcag

SEQ ID NO: 5180284 - DNA, 25 bp, Homo sapien
ttgtcacagccacgtgtcggtttgc

SEQ ID NO: 5180285 - DNA, 25 bp, Homo sapien
ggctcgacacaaaccgctcagtgca

SEQ ID NO: 5180286 - DNA, 25 bp, Homo sapien
cacgtgtcggtttgctttgccttca

SEQ ID NO: 5180287 - DNA, 25 bp, Homo sapien
ggaggaaacacccccaccatgctta

SEQ ID NO: 5180288 - DNA, 25 bp, Homo sapien
gaggaaacacccccaccatgcttac

SEQ ID NO: 5180289 - DNA, 25 bp, Homo sapien
tccgagcactgctctttaatcacct

SEQ ID NO: 5180290 - DNA, 25 bp, Homo sapien
cctggcgtctgtgtccgagcactgc

SEQ ID NO: 5180291 - DNA, 25 bp, Homo sapien
cacccccctcggttggtgggcagat

SEQ ID NO: 5180292 - DNA, 25 bp, Homo sapien
ggttggtgggcagatatctgtctcc

SEQ ID NO: 5180293 - DNA, 25 bp, Homo sapien
ctgaaaaggaaaatagtttactgct

SEQ ID NO: 5180294 - DNA, 25 bp, Homo sapien
caaccaaataaagtttcccactgag

SEQ ID NO: 5180295 - DNA, 25 bp, Homo sapien
gatactgtgacttctagagctgtgt

SEQ ID NO: 5180296 - DNA, 25 bp, Homo sapien
agatactgtgacttctagagctgtg

SEQ ID NO: 5180297 - DNA, 25 bp, Homo sapien
atcaaccaaataaagtttcccactg

SEQ ID NO: 5180298 - DNA, 25 bp, Homo sapien
cctggcctattagagtcgggtacaa

SEQ ID NO: 5180299 - DNA, 25 bp, Homo sapien
gcctattagagtcgggtacaacatg

SEQ ID NO: 5180300 - DNA, 25 bp, Homo sapien
attccaatggcaaagctcgttcctg

SEQ ID NO: 5180301 - DNA, 25 bp, Homo sapien
gcaaagctcgttcctggcctattag

SEQ ID NO: 5180302 - DNA, 25 bp, Homo sapien
ggatcaatcatacagttagggagac

SEQ ID NO: 5180303 - DNA, 25 bp, Homo sapien
gagactgaccaagcttcaaggctgg

SEQ ID NO: 5180304 - DNA, 25 bp, Homo sapien
cgggaactcagtgatgtagtgcaat

SEQ ID NO: 5180305 - DNA, 25 bp, Homo sapien
gatgtaagtggccataacttggcat

SEQ ID NO: 5180306 - DNA, 25 bp, Homo sapien
cccaactagaaatacccggatgact

SEQ ID NO: 5180307 - DNA, 25 bp, Homo sapien
tttctgctcaggttttacaaatgca

SEQ ID NO: 5180308 - DNA, 25 bp, Homo sapien
tacaaatgcatactagaggacaatc

SEQ ID NO: 5180309 - DNA, 25 bp, Homo sapien
tgcacccggccccatactagtaaaa

SEQ ID NO: 5180310 - DNA, 25 bp, Homo sapien
agctccctcggcaccagttttgctg

SEQ ID NO: 5180311 - DNA, 25 bp, Homo sapien
gctccctcggcaccagttttgctga

SEQ ID NO: 5180312 - DNA, 25 bp, Homo sapien
tgatatttttagcttcgtcaagaac

SEQ ID NO: 5180313 - DNA, 25 bp, Homo sapien
ttagcttcgtcaagaacagctccct

SEQ ID NO: 5180314 - DNA, 25 bp, Homo sapien
cctcattgaagacagaaggagaaca

SEQ ID NO: 5180315 - DNA, 25 bp, Homo sapien
ggttctgcagttcccacccaaagag

SEQ ID NO: 5180316 - DNA, 25 bp, Homo sapien
tggacttggtctcagcctcattgaa

SEQ ID NO: 5180317 - DNA, 25 bp, Homo sapien
caaagagtcctgaagaatccgagtc

SEQ ID NO: 5180318 - DNA, 25 bp, Homo sapien
gatgggtcctgagagaccacacgta

SEQ ID NO: 5180319 - DNA, 25 bp, Homo sapien
atgggtcctgagagaccacacgtac

SEQ ID NO: 5180320 - DNA, 25 bp, Homo sapien
ggatgggtcctgagagaccacacgt

SEQ ID NO: 5180321 - DNA, 25 bp, Homo sapien
aggatgggtcctgagagaccacacg

SEQ ID NO: 5180322 - DNA, 25 bp, Homo sapien
gcacgagggctgaaggatagaacct

SEQ ID NO: 5180323 - DNA, 25 bp, Homo sapien
gaagatgttcagatcgcccaatcca

SEQ ID NO: 5180324 - DNA, 25 bp, Homo sapien
gaacctaaacactggaactgaggaa

SEQ ID NO: 5180325 - DNA, 25 bp, Homo sapien
tcagagctcgctgagcactgaagat

SEQ ID NO: 5180326 - DNA, 25 bp, Homo sapien
gctttgcacctaagccttgatttca

SEQ ID NO: 5180327 - DNA, 25 bp, Homo sapien
tgcacctaagccttgatttcatacc

SEQ ID NO: 5180328 - DNA, 25 bp, Homo sapien
atccaatggctttgcacctaagcct

SEQ ID NO: 5180329 - DNA, 25 bp, Homo sapien
aatggctttgcacctaagccttgat

SEQ ID NO: 5180330 - DNA, 25 bp, Homo sapien
gtctaatccgatgttcagtcttgtg

SEQ ID NO: 5180331 - DNA, 25 bp, Homo sapien
taacaatacagcaggtattggcccc

SEQ ID NO: 5180332 - DNA, 25 bp, Homo sapien
gccccatagaatagctcagcatcct

SEQ ID NO: 5180333 - DNA, 25 bp, Homo sapien
ttgtgtctgctgtataattgggttc

SEQ ID NO: 5180334 - DNA, 25 bp, Homo sapien
tggcgtttcttctgtttactttggc

SEQ ID NO: 5180335 - DNA, 25 bp, Homo sapien
tgaaggagcctaatgatcactagct

SEQ ID NO: 5180336 - DNA, 25 bp, Homo sapien
tcttgttgtggtttggatctagggc

SEQ ID NO: 5180337 - DNA, 25 bp, Homo sapien
catcaatgcggttacacagtgttct

SEQ ID NO: 5180338 - DNA, 25 bp, Homo sapien
tatctagctagttgccatcaatgcg

SEQ ID NO: 5180339 - DNA, 25 bp, Homo sapien
ctgtcagttctaggttcacagagac

SEQ ID NO: 5180340 - DNA, 25 bp, Homo sapien
cattcctccacctgtttagctccat

SEQ ID NO: 5180341 - DNA, 25 bp, Homo sapien
tccagatgctggataacattcttca

SEQ ID NO: 5180342 - DNA, 25 bp, Homo sapien
gactgtattcttgatggtcttagct

SEQ ID NO: 5180343 - DNA, 25 bp, Homo sapien
catccagttgtctgtagagactgga

SEQ ID NO: 5180344 - DNA, 25 bp, Homo sapien
gatgggggtgttatcacaaggctcc

SEQ ID NO: 5180345 - DNA, 25 bp, Homo sapien
tggagatctcctcatcgtacttctc

SEQ ID NO: 5180346 - DNA, 25 bp, Homo sapien
cagcaacaacaggagcaatattgtc

SEQ ID NO: 5180347 - DNA, 25 bp, Homo sapien
gccggttctaaagatcttgtccatg

SEQ ID NO: 5180348 - DNA, 25 bp, Homo sapien
tcttagaacatgcataagcacgctc

SEQ ID NO: 5180349 - DNA, 25 bp, Homo sapien
taaggtgtgcttatatctacacatt

SEQ ID NO: 5180350 - DNA, 25 bp, Homo sapien
aaacctccagaataataaggtgtgc

SEQ ID NO: 5180351 - DNA, 25 bp, Homo sapien
gatatcccagtctcccagtgacagg

SEQ ID NO: 5180352 - DNA, 25 bp, Homo sapien
ctgaaacgaaacatcatgtttgttt

SEQ ID NO: 5180353 - DNA, 25 bp, Homo sapien
ttagttatgtcatttttgatatccc

SEQ ID NO: 5180354 - DNA, 25 bp, Homo sapien
gttagttatgtcatttttgatatcc

SEQ ID NO: 5180355 - DNA, 25 bp, Homo sapien
gctggctctgctggttaatttcatc

SEQ ID NO: 5180356 - DNA, 25 bp, Homo sapien
ctggctctgctggttaatttcatca

SEQ ID NO: 5180357 - DNA, 25 bp, Homo sapien
ggctctgctggttaatttcatcatc

SEQ ID NO: 5180358 - DNA, 25 bp, Homo sapien
catctgttgcttcagcttttcagcc

SEQ ID NO: 5180359 - DNA, 25 bp, Homo sapien
tttaagtgttatcaggatttcacat

SEQ ID NO: 5180360 - DNA, 25 bp, Homo sapien
gtaaactggttgacttcacaatcaa

SEQ ID NO: 5180361 - DNA, 25 bp, Homo sapien
cattgtaaactggttgacttcacaa

SEQ ID NO: 5180362 - DNA, 25 bp, Homo sapien
ttcacattgtaaactggttgacttc

SEQ ID NO: 5180363 - DNA, 25 bp, Homo sapien
tcattggcccgggtcttatcctcca

SEQ ID NO: 5180364 - DNA, 25 bp, Homo sapien
acgtgtcagctcctcctgtatcttc

SEQ ID NO: 5180365 - DNA, 25 bp, Homo sapien
tctgggccagctcgtctgtcagctg

SEQ ID NO: 5180366 - DNA, 25 bp, Homo sapien
agtctcttcttgtggaagctaaaag

SEQ ID NO: 5180367 - DNA, 25 bp, Homo sapien
caatgaatatcaatatgagtacagg

SEQ ID NO: 5180368 - DNA, 25 bp, Homo sapien
caatatgagtacaggaacggcagcc

SEQ ID NO: 5180369 - DNA, 25 bp, Homo sapien
aggaacggcagccaaggaagtccca

SEQ ID NO: 5180370 - DNA, 25 bp, Homo sapien
tacaggaacggcagccaaggaagtc

SEQ ID NO: 5180371 - DNA, 25 bp, Homo sapien
cacatcattggtgccaataattcca

SEQ ID NO: 5180372 - DNA, 25 bp, Homo sapien
tcccccagatctttcaacagcaaat

SEQ ID NO: 5180373 - DNA, 25 bp, Homo sapien
ggtgccaataattccacctatctcc

SEQ ID NO: 5180374 - DNA, 25 bp, Homo sapien
gctaagctcttgtagctggctcagc

SEQ ID NO: 5180375 - DNA, 25 bp, Homo sapien
ctaacttgacaggagcaggtagaga

SEQ ID NO: 5180376 - DNA, 25 bp, Homo sapien
gaggataaaagaagggctggcttac

SEQ ID NO: 5180377 - DNA, 25 bp, Homo sapien
acaggagcaggtagagaggataaaa

SEQ ID NO: 5180378 - DNA, 25 bp, Homo sapien
gagaggataaaagaagggctggctt

SEQ ID NO: 5180379 - DNA, 25 bp, Homo sapien
tcgttatcagcagcaagcatcaact

SEQ ID NO: 5180380 - DNA, 25 bp, Homo sapien
gcatcaacttcccatatatcaactc

SEQ ID NO: 5180381 - DNA, 25 bp, Homo sapien
gcagcaagcatcaacttcccatata

SEQ ID NO: 5180382 - DNA, 25 bp, Homo sapien
tatcagcagcaagcatcaacttccc

SEQ ID NO: 5180383 - DNA, 25 bp, Homo sapien
gcccacaatttccataggttcacgg

SEQ ID NO: 5180384 - DNA, 25 bp, Homo sapien
acacactcaaatgttgcccacaatt

SEQ ID NO: 5180385 - DNA, 25 bp, Homo sapien
cctggatccccaaggtgtccatgga

SEQ ID NO: 5180386 - DNA, 25 bp, Homo sapien
cataggttcacggactccctggaaa

SEQ ID NO: 5180387 - DNA, 25 bp, Homo sapien
cgctctcgagctgtttgctgcggtt

SEQ ID NO: 5180388 - DNA, 25 bp, Homo sapien
atcttgctgatgtacaggcgggcca

SEQ ID NO: 5180389 - DNA, 25 bp, Homo sapien
ggtaaactcctcctcaatgactcca

SEQ ID NO: 5180390 - DNA, 25 bp, Homo sapien
ggttcaccagggacttgacctctga

SEQ ID NO: 5180391 - DNA, 25 bp, Homo sapien
taaaccaatctatggactatttccc

SEQ ID NO: 5180392 - DNA, 25 bp, Homo sapien
tgtcttcaataccttgcataaaagc

SEQ ID NO: 5180393 - DNA, 25 bp, Homo sapien
tcttagctgcaggaatgcaaagcac

SEQ ID NO: 5180394 - DNA, 25 bp, Homo sapien
ccattagactttcccaatggctagg

SEQ ID NO: 5180395 - DNA, 25 bp, Homo sapien
tgagcgagtcctgggactcttctag

SEQ ID NO: 5180396 - DNA, 25 bp, Homo sapien
gttccatgttctgcatgtagtctgt

SEQ ID NO: 5180397 - DNA, 25 bp, Homo sapien
gggctcggagctttgccagctcttc

SEQ ID NO: 5180398 - DNA, 25 bp, Homo sapien
tcggagctttgccagctcttcgctg

SEQ ID NO: 5180399 - DNA, 25 bp, Homo sapien
taaacatcatgattccagccaacca

SEQ ID NO: 5180400 - DNA, 25 bp, Homo sapien
taactgaacgaaactaaacatcatg

SEQ ID NO: 5180401 - DNA, 25 bp, Homo sapien
gccaaccagaggctgtctgactcag

SEQ ID NO: 5180402 - DNA, 25 bp, Homo sapien
gaaatgctttaactgaacgaaacta

SEQ ID NO: 5180403 - DNA, 25 bp, Homo sapien
ggaccggctctggtgaccaactaga

SEQ ID NO: 5180404 - DNA, 25 bp, Homo sapien
tggtgaccaactagagtcaggaggt

SEQ ID NO: 5180405 - DNA, 25 bp, Homo sapien
gcaggtgaaatggaccggctctggt

SEQ ID NO: 5180406 - DNA, 25 bp, Homo sapien
gcaggggattctgatttgggtaact

SEQ ID NO: 5180407 - DNA, 25 bp, Homo sapien
catgggtagatggatgtagccacag

SEQ ID NO: 5180408 - DNA, 25 bp, Homo sapien
tgggtagatggatgtagccacagtc

SEQ ID NO: 5180409 - DNA, 25 bp, Homo sapien
gcatgggtagatggatgtagccaca

SEQ ID NO: 5180410 - DNA, 25 bp, Homo sapien
gggtagatggatgtagccacagtcc

SEQ ID NO: 5180411 - DNA, 25 bp, Homo sapien
tatgaagtgcttcctatgtgcgagg

SEQ ID NO: 5180412 - DNA, 25 bp, Homo sapien
cctaagctcaggagatcacaaggct

SEQ ID NO: 5180413 - DNA, 25 bp, Homo sapien
tgtgcgaggcacttccctaagctca

SEQ ID NO: 5180414 - DNA, 25 bp, Homo sapien
ggaagccacggcagttcaaacttta

SEQ ID NO: 5180415 - DNA, 25 bp, Homo sapien
tcagatgttccttctccttatcctg

SEQ ID NO: 5180416 - DNA, 25 bp, Homo sapien
agatgttccttctccttatcctgga

SEQ ID NO: 5180417 - DNA, 25 bp, Homo sapien
ttcagcatcctgcaaccgcgtcaga

SEQ ID NO: 5180418 - DNA, 25 bp, Homo sapien
cctgcaaccgcgtcagatgttcctt

SEQ ID NO: 5180419 - DNA, 25 bp, Homo sapien
gcaacttaaccattctctacagaca

SEQ ID NO: 5180420 - DNA, 25 bp, Homo sapien
tagaagttaactccgacaaaagagc

SEQ ID NO: 5180421 - DNA, 25 bp, Homo sapien
caaatttggtgtgttctgcgtaaag

SEQ ID NO: 5180422 - DNA, 25 bp, Homo sapien
caaaagagcccatgcagtgattggg

SEQ ID NO: 5180423 - DNA, 25 bp, Homo sapien
tgggggcatttctggctgttttgcc

SEQ ID NO: 5180424 - DNA, 25 bp, Homo sapien
aaacatgtcatctactcgttggcac

SEQ ID NO: 5180425 - DNA, 25 bp, Homo sapien
gtcatctactcgttggcactcagcc

SEQ ID NO: 5180426 - DNA, 25 bp, Homo sapien
ccctgtgtccctcagatgtcagatc

SEQ ID NO: 5180427 - DNA, 25 bp, Homo sapien
cgtctcggagtctggacagctgctt

SEQ ID NO: 5180428 - DNA, 25 bp, Homo sapien
tcctcaatttcgtctcggagtctgg

SEQ ID NO: 5180429 - DNA, 25 bp, Homo sapien
ccgaatctcatcaatgattttctgc

SEQ ID NO: 5180430 - DNA, 25 bp, Homo sapien
tctgcttctcctcaatttcgtctcg

SEQ ID NO: 5180431 - DNA, 25 bp, Homo sapien
gatcggagaacagaccttggaagca

SEQ ID NO: 5180432 - DNA, 25 bp, Homo sapien
gaatcacctatgtgaccctggccct

SEQ ID NO: 5180433 - DNA, 25 bp, Homo sapien
tgcgtccatccagcggaatcaccta

SEQ ID NO: 5180434 - DNA, 25 bp, Homo sapien
gactaagagccacatccttccaggc

SEQ ID NO: 5180435 - DNA, 25 bp, Homo sapien
tcttggtcctctattttcagcttgt

SEQ ID NO: 5180436 - DNA, 25 bp, Homo sapien
gcttgttcccttttatcgttgagca

SEQ ID NO: 5180437 - DNA, 25 bp, Homo sapien
ttgttcccttttatcgttgagcaat

SEQ ID NO: 5180438 - DNA, 25 bp, Homo sapien
tggcttgttcccttttatcgttgag

SEQ ID NO: 5180439 - DNA, 25 bp, Homo sapien
ggcttgttcccttttatcgttgagc

SEQ ID NO: 5180440 - DNA, 25 bp, Homo sapien
aaggtgtgcatggataaaattttga

SEQ ID NO: 5180441 - DNA, 25 bp, Homo sapien
gaaataatccgacaaatcacaaatg

SEQ ID NO: 5180442 - DNA, 25 bp, Homo sapien
taaatcgggaaatatcttgacatac

SEQ ID NO: 5180443 - DNA, 25 bp, Homo sapien
tcacaaatgaatccggtcttggaga

SEQ ID NO: 5180444 - DNA, 25 bp, Homo sapien
gaggactaaattctacaaatcctac

SEQ ID NO: 5180445 - DNA, 25 bp, Homo sapien
tctgtgaaaagttgaggactaaatt

SEQ ID NO: 5180446 - DNA, 25 bp, Homo sapien
gattctgtgaaaagttgaggactaa

SEQ ID NO: 5180447 - DNA, 25 bp, Homo sapien
tgattctgtgaaaagttgaggacta

SEQ ID NO: 5180448 - DNA, 25 bp, Homo sapien
ggctgagtgaaaacatccgagtcta

SEQ ID NO: 5180449 - DNA, 25 bp, Homo sapien
agagaatgtgggtgccacgaagcca

SEQ ID NO: 5180450 - DNA, 25 bp, Homo sapien
taaaacggcatacactgcagggctc

SEQ ID NO: 5180451 - DNA, 25 bp, Homo sapien
ttctgaagaacatttacggctcggg

SEQ ID NO: 5180452 - DNA, 25 bp, Homo sapien
tttccgaaggttgtgcagtgtctgc

SEQ ID NO: 5180453 - DNA, 25 bp, Homo sapien
ttttaactcgggtggtcagatcctg

SEQ ID NO: 5180454 - DNA, 25 bp, Homo sapien
aagagtttccgaaggttgtgcagtg

SEQ ID NO: 5180455 - DNA, 25 bp, Homo sapien
cagatcctggacaaagagtttccga

SEQ ID NO: 5180456 - DNA, 25 bp, Homo sapien
tccatcatcgttgtccaactccaca

SEQ ID NO: 5180457 - DNA, 25 bp, Homo sapien
tgtgaactttggtgagctgctccag

SEQ ID NO: 5180458 - DNA, 25 bp, Homo sapien
tgctccaggttattctccaagaagg

SEQ ID NO: 5180459 - DNA, 25 bp, Homo sapien
ctgcttgtgaactttggtgagctgc

SEQ ID NO: 5180460 - DNA, 25 bp, Homo sapien
agaggggagcgggcagaactctcct

SEQ ID NO: 5180461 - DNA, 25 bp, Homo sapien
ggaatcagaggggagcgggcagaac

SEQ ID NO: 5180462 - DNA, 25 bp, Homo sapien
aatcagaggggagcgggcagaactc

SEQ ID NO: 5180463 - DNA, 25 bp, Homo sapien
aggggagcgggcagaactctcctac

SEQ ID NO: 5180464 - DNA, 25 bp, Homo sapien
tctcagtgccttctccgcacactgt

SEQ ID NO: 5180465 - DNA, 25 bp, Homo sapien
ctcagtgccttctccgcacactgtg

SEQ ID NO: 5180466 - DNA, 25 bp, Homo sapien
tacggtcccgcatggcgttctcctt

SEQ ID NO: 5180467 - DNA, 25 bp, Homo sapien
ctggtagcgcttacggtcccgcatg

SEQ ID NO: 5180468 - DNA, 25 bp, Homo sapien
agagccttgacgcgctccgccgtgg

SEQ ID NO: 5180469 - DNA, 25 bp, Homo sapien
gcaggtctgcgttgtcccggaccag

SEQ ID NO: 5180470 - DNA, 25 bp, Homo sapien
cgttggagatgaggccgggtagtgt

SEQ ID NO: 5180471 - DNA, 25 bp, Homo sapien
tctggtagtgagtggaatttgaaga

SEQ ID NO: 5180472 - DNA, 25 bp, Homo sapien
tatttctggtagtgagtggaatttg

SEQ ID NO: 5180473 - DNA, 25 bp, Homo sapien
cccctcgaatggcatggacggccgt

SEQ ID NO: 5180474 - DNA, 25 bp, Homo sapien
tgttcctgagacttaaagcaacccc

SEQ ID NO: 5180475 - DNA, 25 bp, Homo sapien
gacaaacaggtaatgccctttggga

SEQ ID NO: 5180476 - DNA, 25 bp, Homo sapien
ccagggctctggactaagtgaggac

SEQ ID NO: 5180477 - DNA, 25 bp, Homo sapien
ggcaaaacaaagctcggctgaatca

SEQ ID NO: 5180478 - DNA, 25 bp, Homo sapien
atctgtctgcccgcccaactagtaa

SEQ ID NO: 5180479 - DNA, 25 bp, Homo sapien
ttggaaagaatatcactcgttcctt

SEQ ID NO: 5180480 - DNA, 25 bp, Homo sapien
atcaggatgacagttttcgctctct

SEQ ID NO: 5180481 - DNA, 25 bp, Homo sapien
ctgcccgcccaactagtaacctctt

SEQ ID NO: 5180482 - DNA, 25 bp, Homo sapien
agaaaaaagaccattctgccttccg

SEQ ID NO: 5180483 - DNA, 25 bp, Homo sapien
taagatctgtaagtagggaatgtat

SEQ ID NO: 5180484 - DNA, 25 bp, Homo sapien
taagtagggaatgtatactgtttac

SEQ ID NO: 5180485 - DNA, 25 bp, Homo sapien
actctatttactactcaagtttgag

SEQ ID NO: 5180486 - DNA, 25 bp, Homo sapien
ttgtttaattctagatgtttagacc

SEQ ID NO: 5180487 - DNA, 25 bp, Homo sapien
tataacacaagccacatattttttg

SEQ ID NO: 5180488 - DNA, 25 bp, Homo sapien
cacagtagaaatttactcctcaaaa

SEQ ID NO: 5180489 - DNA, 25 bp, Homo sapien
attctagatgtttagaccagagctg

SEQ ID NO: 5180490 - DNA, 25 bp, Homo sapien
tagtccttgacatgctacgtggagt

SEQ ID NO: 5180491 - DNA, 25 bp, Homo sapien
ttcaaaagcaagcagctcggaggtg

SEQ ID NO: 5180492 - DNA, 25 bp, Homo sapien
gagaaaagtccgagcacacatctgt

SEQ ID NO: 5180493 - DNA, 25 bp, Homo sapien
gaaaactttgaaccctatagcagca

SEQ ID NO: 5180494 - DNA, 25 bp, Homo sapien
caagcttcagaacgatcagagagga

SEQ ID NO: 5180495 - DNA, 25 bp, Homo sapien
caaggacccttttatcagaccgcaa

SEQ ID NO: 5180496 - DNA, 25 bp, Homo sapien
cacacagtcatgagaaaagcccaaa

SEQ ID NO: 5180497 - DNA, 25 bp, Homo sapien
tgaaagaacgatgttcaaaccgggc

SEQ ID NO: 5180498 - DNA, 25 bp, Homo sapien
gcagtctgccagagtacccatacat

SEQ ID NO: 5180499 - DNA, 25 bp, Homo sapien
catggactatagtacagcatcgtta

SEQ ID NO: 5180500 - DNA, 25 bp, Homo sapien
tgtacagatacataaagcccagaga

SEQ ID NO: 5180501 - DNA, 25 bp, Homo sapien
ggagcggcgcttacttcggcagtta

SEQ ID NO: 5180502 - DNA, 25 bp, Homo sapien
caaaatcgggcttctcttaggagga

SEQ ID NO: 5180503 - DNA, 25 bp, Homo sapien
tcatttcacgggtcaggaaacaggc

SEQ ID NO: 5180504 - DNA, 25 bp, Homo sapien
tgccttccagacatagccgggacag

SEQ ID NO: 5180505 - DNA, 25 bp, Homo sapien
cacttggatgcctgctcatgacaga

SEQ ID NO: 5180506 - DNA, 25 bp, Homo sapien
acaggtgagcctcgcccgcgaggga

SEQ ID NO: 5180507 - DNA, 25 bp, Homo sapien
tccaccacgaggttgaaaggaggcc

SEQ ID NO: 5180508 - DNA, 25 bp, Homo sapien
ggccggcgttggctgctaccgcgcg

SEQ ID NO: 5180509 - DNA, 25 bp, Homo sapien
gcagtgtggtagtggccagcgctgg

SEQ ID NO: 5180510 - DNA, 25 bp, Homo sapien
tgtgtccccaaacaagccataagct

SEQ ID NO: 5180511 - DNA, 25 bp, Homo sapien
ccaaacaagccataagctctgaaat

SEQ ID NO: 5180512 - DNA, 25 bp, Homo sapien
ttgcatgtcatgtgtccccaaacaa

SEQ ID NO: 5180513 - DNA, 25 bp, Homo sapien
gtcatgtgtccccaaacaagccata

SEQ ID NO: 5180514 - DNA, 25 bp, Homo sapien
aatgctgagtagtcttcgcaggtga

SEQ ID NO: 5180515 - DNA, 25 bp, Homo sapien
tccttgtcagttcctggtcataagc

SEQ ID NO: 5180516 - DNA, 25 bp, Homo sapien
taagcatctatggacaatgctgagt

SEQ ID NO: 5180517 - DNA, 25 bp, Homo sapien
tcctggtcataagcatctatggaca

SEQ ID NO: 5180518 - DNA, 25 bp, Homo sapien
agcactgaattaaaggactgcctgc

SEQ ID NO: 5180519 - DNA, 25 bp, Homo sapien
gaattaaaggactgcctgcaatgct

SEQ ID NO: 5180520 - DNA, 25 bp, Homo sapien
ggttcgcccctacacagtatttgtg

SEQ ID NO: 5180521 - DNA, 25 bp, Homo sapien
tccatttgctgggttcgcccctaca

SEQ ID NO: 5180522 - DNA, 25 bp, Homo sapien
gatccaaatccacactagcatattt

SEQ ID NO: 5180523 - DNA, 25 bp, Homo sapien
aatccacactagcatattttccctt

SEQ ID NO: 5180524 - DNA, 25 bp, Homo sapien
tcattccacagagtctagatccaaa

SEQ ID NO: 5180525 - DNA, 25 bp, Homo sapien
gagtctagatccaaatccacactag

SEQ ID NO: 5180526 - DNA, 25 bp, Homo sapien
tgcaagccatttgcctcccaatctt

SEQ ID NO: 5180527 - DNA, 25 bp, Homo sapien
caaccaatgccattatgcccttttt

SEQ ID NO: 5180528 - DNA, 25 bp, Homo sapien
gaagttttccttcgtggctctttga

SEQ ID NO: 5180529 - DNA, 25 bp, Homo sapien
ttaaaatctggactgagagaccttg

SEQ ID NO: 5180530 - DNA, 25 bp, Homo sapien
gaagtgcaggcacccatgcccactt

SEQ ID NO: 5180531 - DNA, 25 bp, Homo sapien
taagcaaaagcaccgagtggaagaa

SEQ ID NO: 5180532 - DNA, 25 bp, Homo sapien
gggtccccaagtctgtcatccaagg

SEQ ID NO: 5180533 - DNA, 25 bp, Homo sapien
tcagcagcacaacggatcttcctaa

SEQ ID NO: 5180534 - DNA, 25 bp, Homo sapien
tctgcttgtaactcagaggatcagc

SEQ ID NO: 5180535 - DNA, 25 bp, Homo sapien
gagcttctgcttgtaactcagagga

SEQ ID NO: 5180536 - DNA, 25 bp, Homo sapien
attgagcttctgcttgtaactcaga

SEQ ID NO: 5180537 - DNA, 25 bp, Homo sapien
cttgtaactcagaggatcagcaaca

SEQ ID NO: 5180538 - DNA, 25 bp, Homo sapien
agatcctctgaaagcactcgttgca

SEQ ID NO: 5180539 - DNA, 25 bp, Homo sapien
ccttagatgcttgtatgggctctga

SEQ ID NO: 5180540 - DNA, 25 bp, Homo sapien
tttacgtaacttggccatgtcttgg

SEQ ID NO: 5180541 - DNA, 25 bp, Homo sapien
cataagccaatggagcacggtctgt

SEQ ID NO: 5180542 - DNA, 25 bp, Homo sapien
gaaaacaaacactctgaagtcctgc

SEQ ID NO: 5180543 - DNA, 25 bp, Homo sapien
atcactttaaaagcaggctgaaaac

SEQ ID NO: 5180544 - DNA, 25 bp, Homo sapien
aaagcaggctgaaaacaaacactct

SEQ ID NO: 5180545 - DNA, 25 bp, Homo sapien
tcaaagccactctcttcaaatcact

SEQ ID NO: 5180546 - DNA, 25 bp, Homo sapien
aagtgaaattagacacagcccctgc

SEQ ID NO: 5180547 - DNA, 25 bp, Homo sapien
gaggttacaaacgtcctatgcaagg

SEQ ID NO: 5180548 - DNA, 25 bp, Homo sapien
caggcattagcaacaattactaggg

SEQ ID NO: 5180549 - DNA, 25 bp, Homo sapien
tctttataaacaggatcccagtcag

SEQ ID NO: 5180550 - DNA, 25 bp, Homo sapien
cctggagacgtggatttttgcgttg

SEQ ID NO: 5180551 - DNA, 25 bp, Homo sapien
ggatttttgcgttggcttcattatc

SEQ ID NO: 5180552 - DNA, 25 bp, Homo sapien
gacgtggatttttgcgttggcttca

SEQ ID NO: 5180553 - DNA, 25 bp, Homo sapien
ttagcctggagacgtggatttttgc

SEQ ID NO: 5180554 - DNA, 25 bp, Homo sapien
tgtcctcaggcgatgcatctcaagt

SEQ ID NO: 5180555 - DNA, 25 bp, Homo sapien
tctacagcggaaagatccactagtc

SEQ ID NO: 5180556 - DNA, 25 bp, Homo sapien
catggtatgcatgaagcgctttcct

SEQ ID NO: 5180557 - DNA, 25 bp, Homo sapien
gcacccggcctaaagtgtacttcta

SEQ ID NO: 5180558 - DNA, 25 bp, Homo sapien
gttttgatagcaactgttggagttg

SEQ ID NO: 5180559 - DNA, 25 bp, Homo sapien
tgccataagcttgtaaaatcaaaat

SEQ ID NO: 5180560 - DNA, 25 bp, Homo sapien
tatttcatacatgcctcatcctcct

SEQ ID NO: 5180561 - DNA, 25 bp, Homo sapien
attccatgacaagccagaataatga

SEQ ID NO: 5180562 - DNA, 25 bp, Homo sapien
ttaagtgctagttctattttcagtt

SEQ ID NO: 5180563 - DNA, 25 bp, Homo sapien
cttaagtgctagttctattttcagt

SEQ ID NO: 5180564 - DNA, 25 bp, Homo sapien
tgacccagtttagaccatcatgtac

SEQ ID NO: 5180565 - DNA, 25 bp, Homo sapien
ccaaaagtgtcaaaccggcatcagt

SEQ ID NO: 5180566 - DNA, 25 bp, Homo sapien
gaggagtgactgctttgaacactga

SEQ ID NO: 5180567 - DNA, 25 bp, Homo sapien
tcatgagccaatgccaagtgatgag

SEQ ID NO: 5180568 - DNA, 25 bp, Homo sapien
atggtacccagcctcggtagtggtg

SEQ ID NO: 5180569 - DNA, 25 bp, Homo sapien
agcctcggtagtggtggtccccaga

SEQ ID NO: 5180570 - DNA, 25 bp, Homo sapien
tacccagcctcggtagtggtggtcc

SEQ ID NO: 5180571 - DNA, 25 bp, Homo sapien
ctcggtagtggtggtccccagagac

SEQ ID NO: 5180572 - DNA, 25 bp, Homo sapien
aagattaatgggcaggtgttccgcg

SEQ ID NO: 5180573 - DNA, 25 bp, Homo sapien
cagttattgttttaacagggtcaag

SEQ ID NO: 5180574 - DNA, 25 bp, Homo sapien
taatgggcaggtgttccgcgataat

SEQ ID NO: 5180575 - DNA, 25 bp, Homo sapien
gcagttattgttttaacagggtcaa

SEQ ID NO: 5180576 - DNA, 25 bp, Homo sapien
taatgtgttcacgtcacaaaggtac

SEQ ID NO: 5180577 - DNA, 25 bp, Homo sapien
gaccgtcaactgagttcatcgttaa

SEQ ID NO: 5180578 - DNA, 25 bp, Homo sapien
tgagttcatcgttaatgtgttcacg

SEQ ID NO: 5180579 - DNA, 25 bp, Homo sapien
cctcaagaccgtcaactgagttcat

SEQ ID NO: 5180580 - DNA, 25 bp, Homo sapien
ggtaggatgaacatcgccatttggg

SEQ ID NO: 5180581 - DNA, 25 bp, Homo sapien
tcagagattgcacactttcactagg

SEQ ID NO: 5180582 - DNA, 25 bp, Homo sapien
cactttcactaggaagcggtaggat

SEQ ID NO: 5180583 - DNA, 25 bp, Homo sapien
atgctcctccttaaagagatcctat

SEQ ID NO: 5180584 - DNA, 25 bp, Homo sapien
tgtgatgcccacttaacatcacggg

SEQ ID NO: 5180585 - DNA, 25 bp, Homo sapien
tgtatcgtgtgatgcccacttaaca

SEQ ID NO: 5180586 - DNA, 25 bp, Homo sapien
ctgttcgttgtatcgtgtgatgccc

SEQ ID NO: 5180587 - DNA, 25 bp, Homo sapien
cacttaacatcacgggtttcagaac

SEQ ID NO: 5180588 - DNA, 25 bp, Homo sapien
taggaaaatgacctacagaagcttc

SEQ ID NO: 5180589 - DNA, 25 bp, Homo sapien
ggatgagcaacactgcaattggaac

SEQ ID NO: 5180590 - DNA, 25 bp, Homo sapien
cctaacttgtagaattcgggctcct

SEQ ID NO: 5180591 - DNA, 25 bp, Homo sapien
cattccctgataacttggacagtgg

SEQ ID NO: 5180592 - DNA, 25 bp, Homo sapien
acatcgatccacaccaacttgcttc

SEQ ID NO: 5180593 - DNA, 25 bp, Homo sapien
taaatcacagaaagatcatccttca

SEQ ID NO: 5180594 - DNA, 25 bp, Homo sapien
cacatcgatccacaccaacttgctt

SEQ ID NO: 5180595 - DNA, 25 bp, Homo sapien
atcacagaaagatcatccttcaaag

SEQ ID NO: 5180596 - DNA, 25 bp, Homo sapien
ctggtattccttatgcatctgagca

SEQ ID NO: 5180597 - DNA, 25 bp, Homo sapien
gataaccagcagaggacctttttct

SEQ ID NO: 5180598 - DNA, 25 bp, Homo sapien
gggcagatggcctacataattctca

SEQ ID NO: 5180599 - DNA, 25 bp, Homo sapien
tatttcaagcaatcacgggttactc

SEQ ID NO: 5180600 - DNA, 25 bp, Homo sapien
agggttgccaacagcaggcagaagt

SEQ ID NO: 5180601 - DNA, 25 bp, Homo sapien
tgtgattaacaagagcagcctagtc

SEQ ID NO: 5180602 - DNA, 25 bp, Homo sapien
tccaggagggttgccaacagcaggc

SEQ ID NO: 5180603 - DNA, 25 bp, Homo sapien
ctagtccaggagggttgccaacagc

SEQ ID NO: 5180604 - DNA, 25 bp, Homo sapien
cagtgaacagaaccacaagattagg

SEQ ID NO: 5180605 - DNA, 25 bp, Homo sapien
catctgaagcactttcatgctggca

SEQ ID NO: 5180606 - DNA, 25 bp, Homo sapien
tatttttgcgaagcatgagtagctc

SEQ ID NO: 5180607 - DNA, 25 bp, Homo sapien
catgctggcaaccttaaggaaccta

SEQ ID NO: 5180608 - DNA, 25 bp, Homo sapien
gccaatgagttcatttcacttccat

SEQ ID NO: 5180609 - DNA, 25 bp, Homo sapien
gtagctgccaatgagttcatttcac

SEQ ID NO: 5180610 - DNA, 25 bp, Homo sapien
cttctcggtgtgtagctgccaatga

SEQ ID NO: 5180611 - DNA, 25 bp, Homo sapien
aagcctttctccttctcggtgtgta

SEQ ID NO: 5180612 - DNA, 25 bp, Homo sapien
cttgagaaggagaatgtggttgtca

SEQ ID NO: 5180613 - DNA, 25 bp, Homo sapien
aaggtttgcactcagagtaatcagc

SEQ ID NO: 5180614 - DNA, 25 bp, Homo sapien
gagaatgtggttgtcaggctcctct

SEQ ID NO: 5180615 - DNA, 25 bp, Homo sapien
cctctctggaacagtgaaaaggttt

SEQ ID NO: 5180616 - DNA, 25 bp, Homo sapien
aatattcagctgaaaatatctcttc

SEQ ID NO: 5180617 - DNA, 25 bp, Homo sapien
atattcagctgaaaatatctcttct

SEQ ID NO: 5180618 - DNA, 25 bp, Homo sapien
agatcctgctcgcagggaatcttac

SEQ ID NO: 5180619 - DNA, 25 bp, Homo sapien
tttacggggcacctacaatgtgtca

SEQ ID NO: 5180620 - DNA, 25 bp, Homo sapien
gcttcatgttgttcattgacgttgc

SEQ ID NO: 5180621 - DNA, 25 bp, Homo sapien
tacgtttattcagttactcaaccaa

SEQ ID NO: 5180622 - DNA, 25 bp, Homo sapien
agacagaaagttgacggggtcttca

SEQ ID NO: 5180623 - DNA, 25 bp, Homo sapien
cagggaaaagacagaaagttgacgg

SEQ ID NO: 5180624 - DNA, 25 bp, Homo sapien
cttccagggaaaagacagaaagttg

SEQ ID NO: 5180625 - DNA, 25 bp, Homo sapien
acagaaagttgacggggtcttcagg

SEQ ID NO: 5180626 - DNA, 25 bp, Homo sapien
caagtctgagctcggataatcatct

SEQ ID NO: 5180627 - DNA, 25 bp, Homo sapien
ctcatccaacgtgtggcattttaca

SEQ ID NO: 5180628 - DNA, 25 bp, Homo sapien
tcccaagtctgagctcggataatca

SEQ ID NO: 5180629 - DNA, 25 bp, Homo sapien
tcggataatcatctcatccaacgtg

SEQ ID NO: 5180630 - DNA, 25 bp, Homo sapien
tctgtttggaaagctccattatcca

SEQ ID NO: 5180631 - DNA, 25 bp, Homo sapien
ccatctacctgttgtgtagggccag

SEQ ID NO: 5180632 - DNA, 25 bp, Homo sapien
tggaaagctccattatccaaatata

SEQ ID NO: 5180633 - DNA, 25 bp, Homo sapien
ccaaatatatccaaccatctacctg

SEQ ID NO: 5180634 - DNA, 25 bp, Homo sapien
cttgtgtgctgggcggtccgaactc

SEQ ID NO: 5180635 - DNA, 25 bp, Homo sapien
gtgctgggcggtccgaactcttata

SEQ ID NO: 5180636 - DNA, 25 bp, Homo sapien
tgtgctgggcggtccgaactcttat

SEQ ID NO: 5180637 - DNA, 25 bp, Homo sapien
tgtgtgctgggcggtccgaactctt

SEQ ID NO: 5180638 - DNA, 25 bp, Homo sapien
ctatagcgagagcgtgacagaggag

SEQ ID NO: 5180639 - DNA, 25 bp, Homo sapien
agcgagagcgtgacagaggagcagc

SEQ ID NO: 5180640 - DNA, 25 bp, Homo sapien
atagcgagagcgtgacagaggagca

SEQ ID NO: 5180641 - DNA, 25 bp, Homo sapien
tatagcgagagcgtgacagaggagc

SEQ ID NO: 5180642 - DNA, 25 bp, Homo sapien
gatgttcttggcaaatgcccagctt

SEQ ID NO: 5180643 - DNA, 25 bp, Homo sapien
tgatgttcttggcaaatgcccagct

SEQ ID NO: 5180644 - DNA, 25 bp, Homo sapien
cgagaggaggcctcacattatagaa

SEQ ID NO: 5180645 - DNA, 25 bp, Homo sapien
gagaagataacgatctggacaacag

SEQ ID NO: 5180646 - DNA, 25 bp, Homo sapien
ccatagaagtaatggagactttctg

SEQ ID NO: 5180647 - DNA, 25 bp, Homo sapien
agaatcactctctaataaagtatat

SEQ ID NO: 5180648 - DNA, 25 bp, Homo sapien
tcttccaggcgtgggaactacaggt

SEQ ID NO: 5180649 - DNA, 25 bp, Homo sapien
atctctggagaagtgattagggata

SEQ ID NO: 5180650 - DNA, 25 bp, Homo sapien
tgattagggatatgcagttaaaaat

SEQ ID NO: 5180651 - DNA, 25 bp, Homo sapien
tgtgtagaccaggtataggaccctg

SEQ ID NO: 5180652 - DNA, 25 bp, Homo sapien
gtaacacagtaaccatcttagtaat

SEQ ID NO: 5180653 - DNA, 25 bp, Homo sapien
caaaagctaaagtttggaggacaag

SEQ ID NO: 5180654 - DNA, 25 bp, Homo sapien
aaagcagtgggcatttcagataaag

SEQ ID NO: 5180655 - DNA, 25 bp, Homo sapien
tgtcttctgcccatcgattgcagtt

SEQ ID NO: 5180656 - DNA, 25 bp, Homo sapien
taattatcccctgcgttttcacaag

SEQ ID NO: 5180657 - DNA, 25 bp, Homo sapien
caagtaaagcacttgaagctatttg

SEQ ID NO: 5180658 - DNA, 25 bp, Homo sapien
tttgtggacaccatttgtcttctgc

SEQ ID NO: 5180659 - DNA, 25 bp, Homo sapien
ccaagaaacaaggtaatttcaatat

SEQ ID NO: 5180660 - DNA, 25 bp, Homo sapien
caagaaacaaggtaatttcaatatc

SEQ ID NO: 5180661 - DNA, 25 bp, Homo sapien
ggtggcaaccgacaaaatgacattc

SEQ ID NO: 5180662 - DNA, 25 bp, Homo sapien
tgatggatgtgcttcttccgtggct

SEQ ID NO: 5180663 - DNA, 25 bp, Homo sapien
tggctggtgaagtgatgaactgtca

SEQ ID NO: 5180664 - DNA, 25 bp, Homo sapien
cgtatgttcagaatctcggctgtgg

SEQ ID NO: 5180665 - DNA, 25 bp, Homo sapien
ggtgggtaattctacattgcagatc

SEQ ID NO: 5180666 - DNA, 25 bp, Homo sapien
ctctgagcgtgcattacggcaaaca

SEQ ID NO: 5180667 - DNA, 25 bp, Homo sapien
tgattggtgggtaattctacattgc

SEQ ID NO: 5180668 - DNA, 25 bp, Homo sapien
aacactgcattagtgtgattggtgg

SEQ ID NO: 5180669 - DNA, 25 bp, Homo sapien
tggaagcacaaagacccaggcaagc

SEQ ID NO: 5180670 - DNA, 25 bp, Homo sapien
gaagcacaaagacccaggcaagcac

SEQ ID NO: 5180671 - DNA, 25 bp, Homo sapien
tcacagcaatggaagcacaaagacc

SEQ ID NO: 5180672 - DNA, 25 bp, Homo sapien
acagcaatggaagcacaaagaccca

SEQ ID NO: 5180673 - DNA, 25 bp, Homo sapien
caggtgggactagttgccaggatcc

SEQ ID NO: 5180674 - DNA, 25 bp, Homo sapien
caaaccactggctttcgccttgagg

SEQ ID NO: 5180675 - DNA, 25 bp, Homo sapien
tcctgtggcctcatgcgggaacatt

SEQ ID NO: 5180676 - DNA, 25 bp, Homo sapien
tcagctaaaggcctagtcaggtggg

SEQ ID NO: 5180677 - DNA, 25 bp, Homo sapien
acagctttctggcttgtgatttgct

SEQ ID NO: 5180678 - DNA, 25 bp, Homo sapien
ggtaggcagtatggccctgctatag

SEQ ID NO: 5180679 - DNA, 25 bp, Homo sapien
tccctggacactgggtaggcagtat

SEQ ID NO: 5180680 - DNA, 25 bp, Homo sapien
ggacactgagcttcctttggctgaa

SEQ ID NO: 5180681 - DNA, 25 bp, Homo sapien
tgcagtatgtgtcatgcagagattg

SEQ ID NO: 5180682 - DNA, 25 bp, Homo sapien
aataagcatcgttgcaaaggttaca

SEQ ID NO: 5180683 - DNA, 25 bp, Homo sapien
aacttggtgaaatcaatttccattt

SEQ ID NO: 5180684 - DNA, 25 bp, Homo sapien
cagcctttcaaataagcatcgttgc

SEQ ID NO: 5180685 - DNA, 25 bp, Homo sapien
ttccagaatcagttggctctagatc

SEQ ID NO: 5180686 - DNA, 25 bp, Homo sapien
tcagttggctctagatctgattctt

SEQ ID NO: 5180687 - DNA, 25 bp, Homo sapien
ccagaatcagttggctctagatctg

SEQ ID NO: 5180688 - DNA, 25 bp, Homo sapien
agaatcagttggctctagatctgat

SEQ ID NO: 5180689 - DNA, 25 bp, Homo sapien
aagaactcaatattacagcagctgc

SEQ ID NO: 5180690 - DNA, 25 bp, Homo sapien
cagctgctacaactataccacttca

SEQ ID NO: 5180691 - DNA, 25 bp, Homo sapien
tacagcagctgctacaactatacca

SEQ ID NO: 5180692 - DNA, 25 bp, Homo sapien
gggctaagaccatctaagaactcaa

SEQ ID NO: 5180693 - DNA, 25 bp, Homo sapien
cgttttcgggctaccacagccttct

SEQ ID NO: 5180694 - DNA, 25 bp, Homo sapien
gttttcgggctaccacagccttctc

SEQ ID NO: 5180695 - DNA, 25 bp, Homo sapien
ctaaagatcaaagacaccaggtagc

SEQ ID NO: 5180696 - DNA, 25 bp, Homo sapien
tcctgccaggaaactgagtgtcagt

SEQ ID NO: 5180697 - DNA, 25 bp, Homo sapien
tgtcctgccaggaaactgagtgtca

SEQ ID NO: 5180698 - DNA, 25 bp, Homo sapien
cctgccaggaaactgagtgtcagta

SEQ ID NO: 5180699 - DNA, 25 bp, Homo sapien
cggttctatgcctttaagaaagcaa

SEQ ID NO: 5180700 - DNA, 25 bp, Homo sapien
aagcttccttcagtgttgtcgatga

SEQ ID NO: 5180701 - DNA, 25 bp, Homo sapien
agtgttgtcgatgaactgatggtca

SEQ ID NO: 5180702 - DNA, 25 bp, Homo sapien
tcagtagttgcgagttcttgccaca

SEQ ID NO: 5180703 - DNA, 25 bp, Homo sapien
aattattcccaaatagcctctccgt

SEQ ID NO: 5180704 - DNA, 25 bp, Homo sapien
ccaaatagcctctccgtagttgtgg

SEQ ID NO: 5180705 - DNA, 25 bp, Homo sapien
gcctctccgtagttgtggtcccctg

SEQ ID NO: 5180706 - DNA, 25 bp, Homo sapien
ggtcccctgttttcatcaggctcca

SEQ ID NO: 5180707 - DNA, 25 bp, Homo sapien
cagaatgggagctggtagcccccat

SEQ ID NO: 5180708 - DNA, 25 bp, Homo sapien
taggcttctggctaggctagcttca

SEQ ID NO: 5180709 - DNA, 25 bp, Homo sapien
aatgaggcaactttggataggcttc

SEQ ID NO: 5180710 - DNA, 25 bp, Homo sapien
gtgctaggagtattagaaacatctt

SEQ ID NO: 5180711 - DNA, 25 bp, Homo sapien
tttgcctgccggttgcccggtctca

SEQ ID NO: 5180712 - DNA, 25 bp, Homo sapien
cggttgcccggtctcactctggctt

SEQ ID NO: 5180713 - DNA, 25 bp, Homo sapien
ttgcccggtctcactctggcttcgg

SEQ ID NO: 5180714 - DNA, 25 bp, Homo sapien
cccggtctcactctggcttcgggaa

SEQ ID NO: 5180715 - DNA, 25 bp, Homo sapien
aggctgttcgattatgttgaagaaa

SEQ ID NO: 5180716 - DNA, 25 bp, Homo sapien
cataggctgttcgattatgttgaag

SEQ ID NO: 5180717 - DNA, 25 bp, Homo sapien
cagcaagtcttccgttgatgtgtcc

SEQ ID NO: 5180718 - DNA, 25 bp, Homo sapien
agcaagtcttccgttgatgtgtcct

SEQ ID NO: 5180719 - DNA, 25 bp, Homo sapien
gcaaggctaccttcgtaagggcggc

SEQ ID NO: 5180720 - DNA, 25 bp, Homo sapien
tgcaaggctaccttcgtaagggcgg

SEQ ID NO: 5180721 - DNA, 25 bp, Homo sapien
gaccgcagagctcaagagcaagtga

SEQ ID NO: 5180722 - DNA, 25 bp, Homo sapien
gagcaagtgaagctccgaacccagg

SEQ ID NO: 5180723 - DNA, 25 bp, Homo sapien
tgtgaaatgaccctggccaaatctc

SEQ ID NO: 5180724 - DNA, 25 bp, Homo sapien
gcggagaccacttgacgtttgcagt

SEQ ID NO: 5180725 - DNA, 25 bp, Homo sapien
tcagggaaggagcgagggagcgcag

SEQ ID NO: 5180726 - DNA, 25 bp, Homo sapien
ctcagggaaggagcgagggagcgca

SEQ ID NO: 5180727 - DNA, 25 bp, Homo sapien
cagggaaggagcgagggagcgcagc

SEQ ID NO: 5180728 - DNA, 25 bp, Homo sapien
agagtgtgcaatgcggcgccccgcc

SEQ ID NO: 5180729 - DNA, 25 bp, Homo sapien
tgcgcgcggattccggccgccagct

SEQ ID NO: 5180730 - DNA, 25 bp, Homo sapien
ccccagagtgtgcaatgcggcgccc

SEQ ID NO: 5180731 - DNA, 25 bp, Homo sapien
gctgccccatcccacgaacactgcg

SEQ ID NO: 5180732 - DNA, 25 bp, Homo sapien
ggaatatcctcagcacttgccactt

SEQ ID NO: 5180733 - DNA, 25 bp, Homo sapien
tctgctgattaggtctggaatatcc

SEQ ID NO: 5180734 - DNA, 25 bp, Homo sapien
tatacttaggtgaaggccatctagt

SEQ ID NO: 5180735 - DNA, 25 bp, Homo sapien
tcatccacagggacacgggtctggt

SEQ ID NO: 5180736 - DNA, 25 bp, Homo sapien
cagtacactgcttctccggaagaga

SEQ ID NO: 5180737 - DNA, 25 bp, Homo sapien
tcagtacactgcttctccggaagag

SEQ ID NO: 5180738 - DNA, 25 bp, Homo sapien
gttcgatcttattcagtacactgct

SEQ ID NO: 5180739 - DNA, 25 bp, Homo sapien
tccatgttcgatcttattcagtaca

SEQ ID NO: 5180740 - DNA, 25 bp, Homo sapien
gcatttcaaaaagtcctgtataccg

SEQ ID NO: 5180741 - DNA, 25 bp, Homo sapien
tgttagctttggctgggcagtcact

SEQ ID NO: 5180742 - DNA, 25 bp, Homo sapien
taaaattcgttcctcaactgtacta

SEQ ID NO: 5180743 - DNA, 25 bp, Homo sapien
cactaactacatgtggctacttgca

SEQ ID NO: 5180744 - DNA, 25 bp, Homo sapien
cagcagcagtaagactgtggccaac

SEQ ID NO: 5180745 - DNA, 25 bp, Homo sapien
tgctcccggagtgtgattttaacca

SEQ ID NO: 5180746 - DNA, 25 bp, Homo sapien
taaaaactgaccaccgagagacaaa

SEQ ID NO: 5180747 - DNA, 25 bp, Homo sapien
gacagcttctgatactggcgcaggg

SEQ ID NO: 5180748 - DNA, 25 bp, Homo sapien
gccagtaggcaaggtctctttgtga

SEQ ID NO: 5180749 - DNA, 25 bp, Homo sapien
tacaagtgagagtggcagaatgtcc

SEQ ID NO: 5180750 - DNA, 25 bp, Homo sapien
tttgaagacaactatcggatatggc

SEQ ID NO: 5180751 - DNA, 25 bp, Homo sapien
ctttgtgaacacctccgatgaaggg

SEQ ID NO: 5180752 - DNA, 25 bp, Homo sapien
gttgcccagaaaatgacaccgacca

SEQ ID NO: 5180753 - DNA, 25 bp, Homo sapien
tcaaagcactttggcatcggcagat

SEQ ID NO: 5180754 - DNA, 25 bp, Homo sapien
tgtgaaaattctagagttgcccaga

SEQ ID NO: 5180755 - DNA, 25 bp, Homo sapien
caccgaccatctgtaagtaaaaaca

SEQ ID NO: 5180756 - DNA, 25 bp, Homo sapien
ccattgttttgctggagctcggaag

SEQ ID NO: 5180757 - DNA, 25 bp, Homo sapien
cccattgttttgctggagctcggaa

SEQ ID NO: 5180758 - DNA, 25 bp, Homo sapien
tcccattgttttgctggagctcgga

SEQ ID NO: 5180759 - DNA, 25 bp, Homo sapien
gcttgagattgctcaaggaggttgt

SEQ ID NO: 5180760 - DNA, 25 bp, Homo sapien
gcaacttaggattaggtttacagcc

SEQ ID NO: 5180761 - DNA, 25 bp, Homo sapien
gcttttgcataactttttctcaggc

SEQ ID NO: 5180762 - DNA, 25 bp, Homo sapien
gatattcggtaattgtgcacttcca

SEQ ID NO: 5180763 - DNA, 25 bp, Homo sapien
tctcttccataagactgtaagttcc

SEQ ID NO: 5180764 - DNA, 25 bp, Homo sapien
tgggtccgcatactctcccctggtg

SEQ ID NO: 5180765 - DNA, 25 bp, Homo sapien
tctcctctgggtccgcatactctcc

SEQ ID NO: 5180766 - DNA, 25 bp, Homo sapien
gtccgcatactctcccctggtggtc

SEQ ID NO: 5180767 - DNA, 25 bp, Homo sapien
tctgggtccgcatactctcccctgg

SEQ ID NO: 5180768 - DNA, 25 bp, Homo sapien
agttctagacggtgggaattccaag

SEQ ID NO: 5180769 - DNA, 25 bp, Homo sapien
ccaaaatagtgccttgttgctcacc

SEQ ID NO: 5180770 - DNA, 25 bp, Homo sapien
tcagggcaccagcagattccgtgtc

SEQ ID NO: 5180771 - DNA, 25 bp, Homo sapien
gttctctgcttccaaaatagtgcct

SEQ ID NO: 5180772 - DNA, 25 bp, Homo sapien
tccatgctatgaaatccaagtgagg

SEQ ID NO: 5180773 - DNA, 25 bp, Homo sapien
aagccaatcttgctgagatgaccaa

SEQ ID NO: 5180774 - DNA, 25 bp, Homo sapien
caaggatacttagcctcaggatcag

SEQ ID NO: 5180775 - DNA, 25 bp, Homo sapien
tggccatttagcctccaaggatact

SEQ ID NO: 5180776 - DNA, 25 bp, Homo sapien
acttcaacctgggacttgcttggca

SEQ ID NO: 5180777 - DNA, 25 bp, Homo sapien
ttccagtgattaagccaagcaggca

SEQ ID NO: 5180778 - DNA, 25 bp, Homo sapien
taagtctgataaagcagctcctgtg

SEQ ID NO: 5180779 - DNA, 25 bp, Homo sapien
caaggttagagcctacatctgggag

SEQ ID NO: 5180780 - DNA, 25 bp, Homo sapien
tgtgatctatattccggtcaaggac

SEQ ID NO: 5180781 - DNA, 25 bp, Homo sapien
catttgacaaccagtactttttgtg

SEQ ID NO: 5180782 - DNA, 25 bp, Homo sapien
gtactttttgtgatctatattccgg

SEQ ID NO: 5180783 - DNA, 25 bp, Homo sapien
ctatattccggtcaaggaccttggc

SEQ ID NO: 5180784 - DNA, 25 bp, Homo sapien
tcaggcttccaaaggtttagcagtt

SEQ ID NO: 5180785 - DNA, 25 bp, Homo sapien
tagcagttatgtccataaagacctg

SEQ ID NO: 5180786 - DNA, 25 bp, Homo sapien
acagatcctagtggtttctgagcca

SEQ ID NO: 5180787 - DNA, 25 bp, Homo sapien
ggcaggtgttgatgcacagatccta

SEQ ID NO: 5180788 - DNA, 25 bp, Homo sapien
cataaagcagtatcctctcaagtga

SEQ ID NO: 5180789 - DNA, 25 bp, Homo sapien
taaagcagtatcctctcaagtgaca

SEQ ID NO: 5180790 - DNA, 25 bp, Homo sapien
aaagcagtatcctctcaagtgacag

SEQ ID NO: 5180791 - DNA, 25 bp, Homo sapien
agcagtatcctctcaagtgacagaa

SEQ ID NO: 5180792 - DNA, 25 bp, Homo sapien
tctgctcaatcaggtgagtatatca

SEQ ID NO: 5180793 - DNA, 25 bp, Homo sapien
tcaggtgagtatatcaaaagaacac

SEQ ID NO: 5180794 - DNA, 25 bp, Homo sapien
acaagaccatacacttcaccatgca

SEQ ID NO: 5180795 - DNA, 25 bp, Homo sapien
tgcacctgggccaaagtacaaagat

SEQ ID NO: 5180796 - DNA, 25 bp, Homo sapien
gcaatttcttgggtatcttttccat

SEQ ID NO: 5180797 - DNA, 25 bp, Homo sapien
tctctggaggtaatctcttagcaat

SEQ ID NO: 5180798 - DNA, 25 bp, Homo sapien
ctcttagcaatttcttgggtatctt

SEQ ID NO: 5180799 - DNA, 25 bp, Homo sapien
tcctctctggaggtaatctcttagc

SEQ ID NO: 5180800 - DNA, 25 bp, Homo sapien
accaggccattgtgctgagacttcc

SEQ ID NO: 5180801 - DNA, 25 bp, Homo sapien
caaagctttgccaatgctgtgtttt

SEQ ID NO: 5180802 - DNA, 25 bp, Homo sapien
gccattgtgctgagacttcccactg

SEQ ID NO: 5180803 - DNA, 25 bp, Homo sapien
tttgtggaccagcaaaagtgtggtc

SEQ ID NO: 5180804 - DNA, 25 bp, Homo sapien
ttttctcacatacagtcaccagtct

SEQ ID NO: 5180805 - DNA, 25 bp, Homo sapien
catgctccggaaagacactgaactg

SEQ ID NO: 5180806 - DNA, 25 bp, Homo sapien
tccgtttgctaggtaaacagccatg

SEQ ID NO: 5180807 - DNA, 25 bp, Homo sapien
tgaactgtaaacacaccaatgcggc

SEQ ID NO: 5180808 - DNA, 25 bp, Homo sapien
ctgaagtgtcactcatacagagggc

SEQ ID NO: 5180809 - DNA, 25 bp, Homo sapien
tgtcactcatacagagggcctggga

SEQ ID NO: 5180810 - DNA, 25 bp, Homo sapien
tcactcatacagagggcctgggagt

SEQ ID NO: 5180811 - DNA, 25 bp, Homo sapien
tcagggcaacaggagagaacttgca

SEQ ID NO: 5180812 - DNA, 25 bp, Homo sapien
ggaggtagataatgtctttcactgt

SEQ ID NO: 5180813 - DNA, 25 bp, Homo sapien
ttcactgtgaagtctcgggactgag

SEQ ID NO: 5180814 - DNA, 25 bp, Homo sapien
agctttcagacaatccgccagcagg

SEQ ID NO: 5180815 - DNA, 25 bp, Homo sapien
gaaggatggaggtagataatgtctt

SEQ ID NO: 5180816 - DNA, 25 bp, Homo sapien
gctcatgtatggctctttaagtaag

SEQ ID NO: 5180817 - DNA, 25 bp, Homo sapien
taagggtcacctcgatgtgacaggg

SEQ ID NO: 5180818 - DNA, 25 bp, Homo sapien
ccgtgcatcttggattacttgttca

SEQ ID NO: 5180819 - DNA, 25 bp, Homo sapien
attcttttcagtaagggtcacctcg

SEQ ID NO: 5180820 - DNA, 25 bp, Homo sapien
cttttagaatctacagctccatatc

SEQ ID NO: 5180821 - DNA, 25 bp, Homo sapien
ccatatctgtgcacattctcaatgg

SEQ ID NO: 5180822 - DNA, 25 bp, Homo sapien
ctctgagtttatcagcacgtatcgt

SEQ ID NO: 5180823 - DNA, 25 bp, Homo sapien
tcagcacgtatcgttgacaaccaaa

SEQ ID NO: 5180824 - DNA, 25 bp, Homo sapien
tatttgaaagctgcaaacactcaaa

SEQ ID NO: 5180825 - DNA, 25 bp, Homo sapien
ctctctcgcagatggctgagcctgc

SEQ ID NO: 5180826 - DNA, 25 bp, Homo sapien
tgttctctctcgcagatggctgagc

SEQ ID NO: 5180827 - DNA, 25 bp, Homo sapien
ctggcctatttgaaagctgcaaaca

SEQ ID NO: 5180828 - DNA, 25 bp, Homo sapien
gaaacatttaaatccaccaggatat

SEQ ID NO: 5180829 - DNA, 25 bp, Homo sapien
ttttcacaggtgaaacatttaaatc

SEQ ID NO: 5180830 - DNA, 25 bp, Homo sapien
gtgaaacatttaaatccaccaggat

SEQ ID NO: 5180831 - DNA, 25 bp, Homo sapien
cttttcacaggtgaaacatttaaat

SEQ ID NO: 5180832 - DNA, 25 bp, Homo sapien
ctcgagggcagtagatgtctggagc

SEQ ID NO: 5180833 - DNA, 25 bp, Homo sapien
ctatggtataatatcacaactgtga

SEQ ID NO: 5180834 - DNA, 25 bp, Homo sapien
tattgacattaacccaatcaagata

SEQ ID NO: 5180835 - DNA, 25 bp, Homo sapien
ggaatattaataataggagatcctc

SEQ ID NO: 5180836 - DNA, 25 bp, Homo sapien
taggagatcctctacaccttttacc

SEQ ID NO: 5180837 - DNA, 25 bp, Homo sapien
tcccaaccaggtcaatgctaatctt

SEQ ID NO: 5180838 - DNA, 25 bp, Homo sapien
ttcttcaaggctcaatccaaatgtg

SEQ ID NO: 5180839 - DNA, 25 bp, Homo sapien
ccacaacttttgaccatgcacgatg

SEQ ID NO: 5180840 - DNA, 25 bp, Homo sapien
tcctggacacctgatattcttcaag

SEQ ID NO: 5180841 - DNA, 25 bp, Homo sapien
tgatggaggctccaaactgtctcct

SEQ ID NO: 5180842 - DNA, 25 bp, Homo sapien
gatggaggctccaaactgtctcctc

SEQ ID NO: 5180843 - DNA, 25 bp, Homo sapien
atggaggctccaaactgtctcctca

SEQ ID NO: 5180844 - DNA, 25 bp, Homo sapien
tgggacacagcgtttggtgactgag

SEQ ID NO: 5180845 - DNA, 25 bp, Homo sapien
tgtgacttccattgtgtgctgagtg

SEQ ID NO: 5180846 - DNA, 25 bp, Homo sapien
tgacttccattgtgtgctgagtgta

SEQ ID NO: 5180847 - DNA, 25 bp, Homo sapien
ccagtgggacacagcgtttggtgac

SEQ ID NO: 5180848 - DNA, 25 bp, Homo sapien
ggccttcatgctcggagtctctgca

SEQ ID NO: 5180849 - DNA, 25 bp, Homo sapien
tgtggccttcatgctcggagtctct

SEQ ID NO: 5180850 - DNA, 25 bp, Homo sapien
cttgtggccttcatgctcggagtct

SEQ ID NO: 5180851 - DNA, 25 bp, Homo sapien
cttcatgctcggagtctctgcagcc

SEQ ID NO: 5180852 - DNA, 25 bp, Homo sapien
gagaaggcagctggctatgtagtac

SEQ ID NO: 5180853 - DNA, 25 bp, Homo sapien
tgagtactggcagatgtctgaagag

SEQ ID NO: 5180854 - DNA, 25 bp, Homo sapien
tatatcagttgtcctatgctctggt

SEQ ID NO: 5180855 - DNA, 25 bp, Homo sapien
tattacaataacactgaacaccctc

SEQ ID NO: 5180856 - DNA, 25 bp, Homo sapien
catttcggggcagtggcaagttaca

SEQ ID NO: 5180857 - DNA, 25 bp, Homo sapien
cgtgggtgcccatttgtctgattta

SEQ ID NO: 5180858 - DNA, 25 bp, Homo sapien
tctgatttataggtgacgtcgtggc

SEQ ID NO: 5180859 - DNA, 25 bp, Homo sapien
tacagatatttccttcacaacaaga

SEQ ID NO: 5180860 - DNA, 25 bp, Homo sapien
catgagccctaaccacaaccacaag

SEQ ID NO: 5180861 - DNA, 25 bp, Homo sapien
ccacaagcaggacactatcactgac

SEQ ID NO: 5180862 - DNA, 25 bp, Homo sapien
caaccacaagcaggacactatcact

SEQ ID NO: 5180863 - DNA, 25 bp, Homo sapien
accacaaccacaagcaggacactat

SEQ ID NO: 5180864 - DNA, 25 bp, Homo sapien
cacatgtgtaattactgtcaggcca

SEQ ID NO: 5180865 - DNA, 25 bp, Homo sapien
tattaacacatggagccactgagcc

SEQ ID NO: 5180866 - DNA, 25 bp, Homo sapien
aatgactcatgcaggtctgtggacc

SEQ ID NO: 5180867 - DNA, 25 bp, Homo sapien
tgtggaccatcgagatccccatgga

SEQ ID NO: 5180868 - DNA, 25 bp, Homo sapien
ggctgaatagaaccccatatctggg

SEQ ID NO: 5180869 - DNA, 25 bp, Homo sapien
caacagcagggtgagataaactcca

SEQ ID NO: 5180870 - DNA, 25 bp, Homo sapien
gaaccccagatctcgataaatgcag

SEQ ID NO: 5180871 - DNA, 25 bp, Homo sapien
gagtctgcaagcactccctgggtgg

SEQ ID NO: 5180872 - DNA, 25 bp, Homo sapien
cctgtggtgctaagcccagtgcctt

SEQ ID NO: 5180873 - DNA, 25 bp, Homo sapien
ccttattgaaaagtctggtagcctt

SEQ ID NO: 5180874 - DNA, 25 bp, Homo sapien
caaagacatgctcttgggaagctgt

SEQ ID NO: 5180875 - DNA, 25 bp, Homo sapien
cataacctgggtgcattaatcattg

SEQ ID NO: 5180876 - DNA, 25 bp, Homo sapien
caatgtctatcactttactaagaaa

SEQ ID NO: 5180877 - DNA, 25 bp, Homo sapien
aatgtctatcactttactaagaaaa

SEQ ID NO: 5180878 - DNA, 25 bp, Homo sapien
tgatgccttgagattgccccttact

SEQ ID NO: 5180879 - DNA, 25 bp, Homo sapien
gagatgctagttttacggctttgac

SEQ ID NO: 5180880 - DNA, 25 bp, Homo sapien
tatgttgcaaccagcaagagatgct

SEQ ID NO: 5180881 - DNA, 25 bp, Homo sapien
tatgaagatgtgtcagaagtaggcc

SEQ ID NO: 5180882 - DNA, 25 bp, Homo sapien
tcctgtggacaggaatgatacttgt

SEQ ID NO: 5180883 - DNA, 25 bp, Homo sapien
tggtcaggtgtggtcagatctcctg

SEQ ID NO: 5180884 - DNA, 25 bp, Homo sapien
aggaatgatacttgtcttccaccag

SEQ ID NO: 5180885 - DNA, 25 bp, Homo sapien
tgtggtcagatctcctgtggacagg

SEQ ID NO: 5180886 - DNA, 25 bp, Homo sapien
tgaagtagtcacctttggagtcccg

SEQ ID NO: 5180887 - DNA, 25 bp, Homo sapien
ctttggagtcccgtgtctgcaggag

SEQ ID NO: 5180888 - DNA, 25 bp, Homo sapien
cagggaactgaagtagtcacctttg

SEQ ID NO: 5180889 - DNA, 25 bp, Homo sapien
agtagtcacctttggagtcccgtgt

SEQ ID NO: 5180890 - DNA, 25 bp, Homo sapien
attcttgaccagtgagtcagaaact

SEQ ID NO: 5180891 - DNA, 25 bp, Homo sapien
ctaaataattcttgaccagtgagtc

SEQ ID NO: 5180892 - DNA, 25 bp, Homo sapien
aataattcttgaccagtgagtcaga

SEQ ID NO: 5180893 - DNA, 25 bp, Homo sapien
ttcttgaccagtgagtcagaaactt

SEQ ID NO: 5180894 - DNA, 25 bp, Homo sapien
atttgctcaaagaacagcccaaaca

SEQ ID NO: 5180895 - DNA, 25 bp, Homo sapien
tttgctcaaagaacagcccaaacac

SEQ ID NO: 5180896 - DNA, 25 bp, Homo sapien
ttctaatccttgcttattcatttgc

SEQ ID NO: 5180897 - DNA, 25 bp, Homo sapien
aatccttgcttattcatttgctcaa

SEQ ID NO: 5180898 - DNA, 25 bp, Homo sapien
cctgagctggaatgttcgtttcttg

SEQ ID NO: 5180899 - DNA, 25 bp, Homo sapien
gattggcctgagctggaatgttcgt

SEQ ID NO: 5180900 - DNA, 25 bp, Homo sapien
cccactaggattggcctgagctgga

SEQ ID NO: 5180901 - DNA, 25 bp, Homo sapien
tgttttggtcccactaggattggcc

SEQ ID NO: 5180902 - DNA, 25 bp, Homo sapien
tagaccaggtattgagttcctgatt

SEQ ID NO: 5180903 - DNA, 25 bp, Homo sapien
atggtctttagaccaggtattgagt

SEQ ID NO: 5180904 - DNA, 25 bp, Homo sapien
agtgagggggcatggtctttagacc

SEQ ID NO: 5180905 - DNA, 25 bp, Homo sapien
cttatcgaaacacctgagcagtgag

SEQ ID NO: 5180906 - DNA, 25 bp, Homo sapien
tggaaaacgtagaaaccacatcaaa

SEQ ID NO: 5180907 - DNA, 25 bp, Homo sapien
tcagccgtatggaaaacatcctaat

SEQ ID NO: 5180908 - DNA, 25 bp, Homo sapien
tttggaaaacgtagaaaccacatca

SEQ ID NO: 5180909 - DNA, 25 bp, Homo sapien
tggaaaacatcctaatagacatttt

SEQ ID NO: 5180910 - DNA, 25 bp, Homo sapien
aaataaggtctgaaccagccagaga

SEQ ID NO: 5180911 - DNA, 25 bp, Homo sapien
cagcaaataaggtctgaaccagcca

SEQ ID NO: 5180912 - DNA, 25 bp, Homo sapien
tgctggttgtcacgggcccagcaaa

SEQ ID NO: 5180913 - DNA, 25 bp, Homo sapien
tgtcacgggcccagcaaataaggtc

SEQ ID NO: 5180914 - DNA, 25 bp, Homo sapien
tgttgttccccttgaatgagctgcc

SEQ ID NO: 5180915 - DNA, 25 bp, Homo sapien
cagcaagcatgtcatggagcaagca

SEQ ID NO: 5180916 - DNA, 25 bp, Homo sapien
agccctgaaagatgctacgtctctg

SEQ ID NO: 5180917 - DNA, 25 bp, Homo sapien
gagaagctcctttgacagatcccac

SEQ ID NO: 5180918 - DNA, 25 bp, Homo sapien
tacttggttttggtggactggctgc

SEQ ID NO: 5180919 - DNA, 25 bp, Homo sapien
tcatatcatccctcacgttcctgag

SEQ ID NO: 5180920 - DNA, 25 bp, Homo sapien
tcttttaaggttcttataagataga

SEQ ID NO: 5180921 - DNA, 25 bp, Homo sapien
tagcttttgctcctagaatcatttt

SEQ ID NO: 5180922 - DNA, 25 bp, Homo sapien
cactgatatatattttggcgtccaa

SEQ ID NO: 5180923 - DNA, 25 bp, Homo sapien
tggcgtccaacagaatggaagtctt

SEQ ID NO: 5180924 - DNA, 25 bp, Homo sapien
ggtgacaagtcacaagaactgccaa

SEQ ID NO: 5180925 - DNA, 25 bp, Homo sapien
tgtgttcataatggaaaggaatgcc

SEQ ID NO: 5180926 - DNA, 25 bp, Homo sapien
tagggagtatcttcactaatgcaac

SEQ ID NO: 5180927 - DNA, 25 bp, Homo sapien
gaatacacgttgaacacatccacat

SEQ ID NO: 5180928 - DNA, 25 bp, Homo sapien
gggttgatctataaacactgtcaga

SEQ ID NO: 5180929 - DNA, 25 bp, Homo sapien
cttgtaaccagggtatgatctgcta

SEQ ID NO: 5180930 - DNA, 25 bp, Homo sapien
ccctcccggatctggtccgagttgt

SEQ ID NO: 5180931 - DNA, 25 bp, Homo sapien
agcagccgcttcgatcctctggact

SEQ ID NO: 5180932 - DNA, 25 bp, Homo sapien
tccgagttgtttttccgcggctgta

SEQ ID NO: 5180933 - DNA, 25 bp, Homo sapien
ggactgaattttggccacccagccc

SEQ ID NO: 5180934 - DNA, 25 bp, Homo sapien
gactggtacggatggtttccgccca

SEQ ID NO: 5180935 - DNA, 25 bp, Homo sapien
tgcgcgtgcgcatcatcgtttcgac

SEQ ID NO: 5180936 - DNA, 25 bp, Homo sapien
tttcgacgcgctcggaagcaacttc

SEQ ID NO: 5180937 - DNA, 25 bp, Homo sapien
cacgtaggcctactttgcgcgtgcg

SEQ ID NO: 5180938 - DNA, 25 bp, Homo sapien
caggtcggaagccctcctatccatc

SEQ ID NO: 5180939 - DNA, 25 bp, Homo sapien
aacccaattgaaggacatttgacca

SEQ ID NO: 5180940 - DNA, 25 bp, Homo sapien
aaaacccataacctcagttaatgca

SEQ ID NO: 5180941 - DNA, 25 bp, Homo sapien
tttgaccaaatgaccaataagtcgc

SEQ ID NO: 5180942 - DNA, 25 bp, Homo sapien
tcgcttcaaaactattaaggttatc

SEQ ID NO: 5180943 - DNA, 25 bp, Homo sapien
ctagaagcaacaacatcccaaatgt

SEQ ID NO: 5180944 - DNA, 25 bp, Homo sapien
cttgatttctaatatcattttccat

SEQ ID NO: 5180945 - DNA, 25 bp, Homo sapien
cccttggctttttggggaagcagct

SEQ ID NO: 5180946 - DNA, 25 bp, Homo sapien
catcccaaatgtccaaatcttgatt

SEQ ID NO: 5180947 - DNA, 25 bp, Homo sapien
caggttagcatatccacaaatattt

SEQ ID NO: 5180948 - DNA, 25 bp, Homo sapien
tatttagtcaggttagcatatccac

SEQ ID NO: 5180949 - DNA, 25 bp, Homo sapien
atatgcgtatttagtcaggttagca

SEQ ID NO: 5180950 - DNA, 25 bp, Homo sapien
tagtcaggttagcatatccacaaat

SEQ ID NO: 5180951 - DNA, 25 bp, Homo sapien
taaacaacttgacacccacagactt

SEQ ID NO: 5180952 - DNA, 25 bp, Homo sapien
gctctcttcatcactaaacaacttg

SEQ ID NO: 5180953 - DNA, 25 bp, Homo sapien
ctttggcacttttctgctctcttca

SEQ ID NO: 5180954 - DNA, 25 bp, Homo sapien
atcaccagcttctttggcacttttc

SEQ ID NO: 5180955 - DNA, 25 bp, Homo sapien
ctccttagttttgctgtagtgggaa

SEQ ID NO: 5180956 - DNA, 25 bp, Homo sapien
gcttcaggtagtttacttagcctct

SEQ ID NO: 5180957 - DNA, 25 bp, Homo sapien
gagtctcagtctgtttatgaaacac

SEQ ID NO: 5180958 - DNA, 25 bp, Homo sapien
agtttgaatctcacatccgtcattg

SEQ ID NO: 5180959 - DNA, 25 bp, Homo sapien
gaaaacatgtagataagggaaaaca

SEQ ID NO: 5180960 - DNA, 25 bp, Homo sapien
aacagaataaccactgagagacagc

SEQ ID NO: 5180961 - DNA, 25 bp, Homo sapien
taaccactgagagacagctattcac

SEQ ID NO: 5180962 - DNA, 25 bp, Homo sapien
gaataaccactgagagacagctatt

SEQ ID NO: 5180963 - DNA, 25 bp, Homo sapien
acctttatagctctctgaaggctcc

SEQ ID NO: 5180964 - DNA, 25 bp, Homo sapien
tttatagctctctgaaggctcctct

SEQ ID NO: 5180965 - DNA, 25 bp, Homo sapien
ttgatcaacctttatagctctctga

SEQ ID NO: 5180966 - DNA, 25 bp, Homo sapien
tgatcaacctttatagctctctgaa

SEQ ID NO: 5180967 - DNA, 25 bp, Homo sapien
tgtctctttcggttttataatacta

SEQ ID NO: 5180968 - DNA, 25 bp, Homo sapien
catttagtgataactatatatgcct

SEQ ID NO: 5180969 - DNA, 25 bp, Homo sapien
tattctttccaggttgagcatttag

SEQ ID NO: 5180970 - DNA, 25 bp, Homo sapien
tagatatgcttagttgagtgggaaa

SEQ ID NO: 5180971 - DNA, 25 bp, Homo sapien
ggccaatcctattcaagagtctggg

SEQ ID NO: 5180972 - DNA, 25 bp, Homo sapien
catatctaacaagctctgggttgct

SEQ ID NO: 5180973 - DNA, 25 bp, Homo sapien
gggatagggccagagatcttgcata

SEQ ID NO: 5180974 - DNA, 25 bp, Homo sapien
tcttagaaagagtcattgacctgcc

SEQ ID NO: 5180975 - DNA, 25 bp, Homo sapien
agtctcagttgagaccacttccaca

SEQ ID NO: 5180976 - DNA, 25 bp, Homo sapien
gattctgagatcagttgatcctgca

SEQ ID NO: 5180977 - DNA, 25 bp, Homo sapien
tcgttcccagggtgataagcccagg

SEQ ID NO: 5180978 - DNA, 25 bp, Homo sapien
tcctgcaacagatagcagatctctg

SEQ ID NO: 5180979 - DNA, 25 bp, Homo sapien
tactaattgccagaaaatagagagc

SEQ ID NO: 5180980 - DNA, 25 bp, Homo sapien
tcaacccaatgtgttaaagagacaa

SEQ ID NO: 5180981 - DNA, 25 bp, Homo sapien
taatagaaaaagattggcctccaac

SEQ ID NO: 5180982 - DNA, 25 bp, Homo sapien
aaactgcaagcacccacatttgaga

SEQ ID NO: 5180983 - DNA, 25 bp, Homo sapien
gagtccaaaggacctacaatcccaa

SEQ ID NO: 5180984 - DNA, 25 bp, Homo sapien
caaaggacctacaatcccaagatga

SEQ ID NO: 5180985 - DNA, 25 bp, Homo sapien
gacctacaatcccaagatgatccca

SEQ ID NO: 5180986 - DNA, 25 bp, Homo sapien
aagatgatcccatttgggcaaagga

SEQ ID NO: 5180987 - DNA, 25 bp, Homo sapien
tccatctccccaagagcctaaaaga

SEQ ID NO: 5180988 - DNA, 25 bp, Homo sapien
ccatctccccaagagcctaaaagaa

SEQ ID NO: 5180989 - DNA, 25 bp, Homo sapien
aaatgcttgtgtggtcaaactggtt

SEQ ID NO: 5180990 - DNA, 25 bp, Homo sapien
atgcttgtgtggtcaaactggttcc

SEQ ID NO: 5180991 - DNA, 25 bp, Homo sapien
gaaaggtacctaataagaggccaca

SEQ ID NO: 5180992 - DNA, 25 bp, Homo sapien
cattggagtccacctagacataagt

SEQ ID NO: 5180993 - DNA, 25 bp, Homo sapien
gtatcagtaaacagacacattggag

SEQ ID NO: 5180994 - DNA, 25 bp, Homo sapien
taaatacatgtccaccaaatcagtc

SEQ ID NO: 5180995 - DNA, 25 bp, Homo sapien
agagctcatacttggaaccaggatc

SEQ ID NO: 5180996 - DNA, 25 bp, Homo sapien
gctcatacttggaaccaggatcctt

SEQ ID NO: 5180997 - DNA, 25 bp, Homo sapien
gagctcatacttggaaccaggatcc

SEQ ID NO: 5180998 - DNA, 25 bp, Homo sapien
ctcatacttggaaccaggatccttg

SEQ ID NO: 5180999 - DNA, 25 bp, Homo sapien
tgcactccagttttgtcatccccaa

SEQ ID NO: 5181000 - DNA, 25 bp, Homo sapien
catctggaattgcactccagttttg

SEQ ID NO: 5181001 - DNA, 25 bp, Homo sapien
ggcaccattctgacacatctcatta

SEQ ID NO: 5181002 - DNA, 25 bp, Homo sapien
tacagggtcttgacctgtaagaata

SEQ ID NO: 5181003 - DNA, 25 bp, Homo sapien
aaatcatacctggaagttgtttcac

SEQ ID NO: 5181004 - DNA, 25 bp, Homo sapien
ttggaaagtattgccccatcatgtc

SEQ ID NO: 5181005 - DNA, 25 bp, Homo sapien
taataaggttctggagttggcagct

SEQ ID NO: 5181006 - DNA, 25 bp, Homo sapien
tctactttgtgaggccagtgtgagc

SEQ ID NO: 5181007 - DNA, 25 bp, Homo sapien
tgatcatagtgtactacaaccctga

SEQ ID NO: 5181008 - DNA, 25 bp, Homo sapien
tcatagtgtactacaaccctgaact

SEQ ID NO: 5181009 - DNA, 25 bp, Homo sapien
tatgatcatagtgtactacaaccct

SEQ ID NO: 5181010 - DNA, 25 bp, Homo sapien
caggtatgatcatagtgtactacaa

SEQ ID NO: 5181011 - DNA, 25 bp, Homo sapien
gtgaatctccttgtagggtgtgaaa

SEQ ID NO: 5181012 - DNA, 25 bp, Homo sapien
tttggcgtggaagcatatggtaaca

SEQ ID NO: 5181013 - DNA, 25 bp, Homo sapien
ttcagattccatagaaaggctagtc

SEQ ID NO: 5181014 - DNA, 25 bp, Homo sapien
gaaattgatgagatggtcattcagg

SEQ ID NO: 5181015 - DNA, 25 bp, Homo sapien
tcttgaaaacttactgctcctggcc

SEQ ID NO: 5181016 - DNA, 25 bp, Homo sapien
tggccttgctccaaggcaagcaatc

SEQ ID NO: 5181017 - DNA, 25 bp, Homo sapien
gggatcagttttaagcagcaatggc

SEQ ID NO: 5181018 - DNA, 25 bp, Homo sapien
tccaaggcaagcaatccaatgattc

SEQ ID NO: 5181019 - DNA, 25 bp, Homo sapien
tatggagtcaattaatctacttgtg

SEQ ID NO: 5181020 - DNA, 25 bp, Homo sapien
caattaatctacttgtgttagcagg

SEQ ID NO: 5181021 - DNA, 25 bp, Homo sapien
taatatatggagtcaattaatctac

SEQ ID NO: 5181022 - DNA, 25 bp, Homo sapien
gagtcaattaatctacttgtgttag

SEQ ID NO: 5181023 - DNA, 25 bp, Homo sapien
cagtatcccgaacccacaaatgcca

SEQ ID NO: 5181024 - DNA, 25 bp, Homo sapien
tttagcttgtctcccagatgaggaa

SEQ ID NO: 5181025 - DNA, 25 bp, Homo sapien
cccacaaatgccactttgctttctg

SEQ ID NO: 5181026 - DNA, 25 bp, Homo sapien
gctccacagtatcccgaacccacaa

SEQ ID NO: 5181027 - DNA, 25 bp, Homo sapien
tgagtgatgtttgataagatttccc

SEQ ID NO: 5181028 - DNA, 25 bp, Homo sapien
cttcttctgagtgatgtttgataag

SEQ ID NO: 5181029 - DNA, 25 bp, Homo sapien
gatgtttgataagatttcccccatt

SEQ ID NO: 5181030 - DNA, 25 bp, Homo sapien
cattttctttgcattggggctccat

SEQ ID NO: 5181031 - DNA, 25 bp, Homo sapien
tgtaagaaacatgacgcaacccact

SEQ ID NO: 5181032 - DNA, 25 bp, Homo sapien
ttgagggccgtgtgactacacccag

SEQ ID NO: 5181033 - DNA, 25 bp, Homo sapien
cacatgttctaaatgccagaggtat

SEQ ID NO: 5181034 - DNA, 25 bp, Homo sapien
gcctctgaggcatgcttgttgacta

SEQ ID NO: 5181035 - DNA, 25 bp, Homo sapien
catgcgaatattaaatcgtttttgg

SEQ ID NO: 5181036 - DNA, 25 bp, Homo sapien
tccaaatgatcaatagccatgtgca

SEQ ID NO: 5181037 - DNA, 25 bp, Homo sapien
tgtgcaacccattagacatgcgaat

SEQ ID NO: 5181038 - DNA, 25 bp, Homo sapien
aatagccatgtgcaacccattagac

SEQ ID NO: 5181039 - DNA, 25 bp, Homo sapien
gtagtctccttcctcaaagtggaca

SEQ ID NO: 5181040 - DNA, 25 bp, Homo sapien
tccttcctcaaagtggacatcaata

SEQ ID NO: 5181041 - DNA, 25 bp, Homo sapien
tggacatcaatactcccactcttca

SEQ ID NO: 5181042 - DNA, 25 bp, Homo sapien
tcaaagtggacatcaatactcccac

SEQ ID NO: 5181043 - DNA, 25 bp, Homo sapien
attgagttggtagggtcctttggct

SEQ ID NO: 5181044 - DNA, 25 bp, Homo sapien
cacattgagttggtagggtcctttg

SEQ ID NO: 5181045 - DNA, 25 bp, Homo sapien
aagcacattgagttggtagggtcct

SEQ ID NO: 5181046 - DNA, 25 bp, Homo sapien
aaaagcacattgagttggtagggtc

SEQ ID NO: 5181047 - DNA, 25 bp, Homo sapien
cagtgttctaggaaagaaaaatggt

SEQ ID NO: 5181048 - DNA, 25 bp, Homo sapien
agcactgagtaccatgatataagaa

SEQ ID NO: 5181049 - DNA, 25 bp, Homo sapien
aatggtctcgctggaaaaagcactg

SEQ ID NO: 5181050 - DNA, 25 bp, Homo sapien
taaaatggtggcctcggatcagtgt

SEQ ID NO: 5181051 - DNA, 25 bp, Homo sapien
aatatgcagcttacactaggttctc

SEQ ID NO: 5181052 - DNA, 25 bp, Homo sapien
tgaatgtgcaatgtaaaacccacct

SEQ ID NO: 5181053 - DNA, 25 bp, Homo sapien
tacaacccaacccaataatatgcag

SEQ ID NO: 5181054 - DNA, 25 bp, Homo sapien
tcaaattccacctgcccattaaggc

SEQ ID NO: 5181055 - DNA, 25 bp, Homo sapien
gagagaggctagagccagcaaggct

SEQ ID NO: 5181056 - DNA, 25 bp, Homo sapien
gaagggacctcttgcctccagggta

SEQ ID NO: 5181057 - DNA, 25 bp, Homo sapien
gcaaggctgggtgcatcagaaagga

SEQ ID NO: 5181058 - DNA, 25 bp, Homo sapien
aaggagcacttgaggagaagggacc

SEQ ID NO: 5181059 - DNA, 25 bp, Homo sapien
gattgacaaagcactggattagcag

SEQ ID NO: 5181060 - DNA, 25 bp, Homo sapien
gcagttagaggcataagtatcagac

SEQ ID NO: 5181061 - DNA, 25 bp, Homo sapien
taaagacctagagatgcccttggcc

SEQ ID NO: 5181062 - DNA, 25 bp, Homo sapien
taagatgtgcctgacacaggacaca

SEQ ID NO: 5181063 - DNA, 25 bp, Homo sapien
atctccaatcagtgaccatgctgct

SEQ ID NO: 5181064 - DNA, 25 bp, Homo sapien
tctttttgcagttgtacttaagcac

SEQ ID NO: 5181065 - DNA, 25 bp, Homo sapien
tattgttgacttctttttgcagttg

SEQ ID NO: 5181066 - DNA, 25 bp, Homo sapien
ttttgcagttgtacttaagcactga

SEQ ID NO: 5181067 - DNA, 25 bp, Homo sapien
gcagttgtacttaagcactgaaaat

SEQ ID NO: 5181068 - DNA, 25 bp, Homo sapien
ctggtgatactcattgactccatga

SEQ ID NO: 5181069 - DNA, 25 bp, Homo sapien
ttcttccctggtgatactcattgac

SEQ ID NO: 5181070 - DNA, 25 bp, Homo sapien
agccttcttccctggtgatactcat

SEQ ID NO: 5181071 - DNA, 25 bp, Homo sapien
ctccatgattggcatgctgggtagt

SEQ ID NO: 5181072 - DNA, 25 bp, Homo sapien
ttcaatactccctctcacagcagtt

SEQ ID NO: 5181073 - DNA, 25 bp, Homo sapien
tttcaatactccctctcacagcagt

SEQ ID NO: 5181074 - DNA, 25 bp, Homo sapien
tgaggcttctctgttgtaactcagt

SEQ ID NO: 5181075 - DNA, 25 bp, Homo sapien
ctgaggcttctctgttgtaactcag

SEQ ID NO: 5181076 - DNA, 25 bp, Homo sapien
aaatgtttgtctctgttatagctgc

SEQ ID NO: 5181077 - DNA, 25 bp, Homo sapien
gaaacaccaggggatcagtgagtaa

SEQ ID NO: 5181078 - DNA, 25 bp, Homo sapien
gagtaagaacttgtcaagggaacaa

SEQ ID NO: 5181079 - DNA, 25 bp, Homo sapien
cttcagtgctgaggctaatggcaaa

SEQ ID NO: 5181080 - DNA, 25 bp, Homo sapien
tgggctggggacagaagtttcccat

SEQ ID NO: 5181081 - DNA, 25 bp, Homo sapien
ccagtgggctggggacagaagtttc

SEQ ID NO: 5181082 - DNA, 25 bp, Homo sapien
tgagcaccagaacccccagtgggct

SEQ ID NO: 5181083 - DNA, 25 bp, Homo sapien
ctgagcaccagaacccccagtgggc

SEQ ID NO: 5181084 - DNA, 25 bp, Homo sapien
ggacaccctgggatgttgtagcact

SEQ ID NO: 5181085 - DNA, 25 bp, Homo sapien
tgcggacaccctgggatgttgtagc

SEQ ID NO: 5181086 - DNA, 25 bp, Homo sapien
tgttgtagcacttggatgattctca

SEQ ID NO: 5181087 - DNA, 25 bp, Homo sapien
ttgtagcacttggatgattctcatt

SEQ ID NO: 5181088 - DNA, 25 bp, Homo sapien
cagtgaattttcaaaacctgtgcct

SEQ ID NO: 5181089 - DNA, 25 bp, Homo sapien
tcaggatgaacacccaactggatgc

SEQ ID NO: 5181090 - DNA, 25 bp, Homo sapien
ttctgcaaacactttagggccagtg

SEQ ID NO: 5181091 - DNA, 25 bp, Homo sapien
ggttgagggaatgttcaatgactga

SEQ ID NO: 5181092 - DNA, 25 bp, Homo sapien
cacttggtctacagatccagtatca

SEQ ID NO: 5181093 - DNA, 25 bp, Homo sapien
ggtctacagatccagtatcaactag

SEQ ID NO: 5181094 - DNA, 25 bp, Homo sapien
cagtatcaactagaagatagagcat

SEQ ID NO: 5181095 - DNA, 25 bp, Homo sapien
tgccacagtcacttggtctacagat

SEQ ID NO: 5181096 - DNA, 25 bp, Homo sapien
catttgcatgctgtccatctttcgt

SEQ ID NO: 5181097 - DNA, 25 bp, Homo sapien
atccaagcatttgcatgctgtccat

SEQ ID NO: 5181098 - DNA, 25 bp, Homo sapien
agcatttgcatgctgtccatctttc

SEQ ID NO: 5181099 - DNA, 25 bp, Homo sapien
caagcatttgcatgctgtccatctt

SEQ ID NO: 5181100 - DNA, 25 bp, Homo sapien
caactgtcctttgtagtatgtctca

SEQ ID NO: 5181101 - DNA, 25 bp, Homo sapien
ctttgtagtatgtctcagtctggtc

SEQ ID NO: 5181102 - DNA, 25 bp, Homo sapien
tgggtgttgtttctggcaactgtcc

SEQ ID NO: 5181103 - DNA, 25 bp, Homo sapien
tgtttctggcaactgtcctttgtag

SEQ ID NO: 5181104 - DNA, 25 bp, Homo sapien
acacttcacactattgtcacatcca

SEQ ID NO: 5181105 - DNA, 25 bp, Homo sapien
cacacacttcacactattgtcacat

SEQ ID NO: 5181106 - DNA, 25 bp, Homo sapien
catactgaattgtcctcttgctgtt

SEQ ID NO: 5181107 - DNA, 25 bp, Homo sapien
tccttggcagcgtggacatactgaa

SEQ ID NO: 5181108 - DNA, 25 bp, Homo sapien
gaacttcatagcttgctatggtggc

SEQ ID NO: 5181109 - DNA, 25 bp, Homo sapien
tggcagggagatcatgcggagtgtt

SEQ ID NO: 5181110 - DNA, 25 bp, Homo sapien
tgcatgtgtaatgaacttcatagct

SEQ ID NO: 5181111 - DNA, 25 bp, Homo sapien
gatcatgcggagtgttcagcttcac

SEQ ID NO: 5181112 - DNA, 25 bp, Homo sapien
tacgtactagaggaactatacattg

SEQ ID NO: 5181113 - DNA, 25 bp, Homo sapien
taatggcagtctaccgtaggtgctc

SEQ ID NO: 5181114 - DNA, 25 bp, Homo sapien
tgtaggcttggaaacaggctggcac

SEQ ID NO: 5181115 - DNA, 25 bp, Homo sapien
ggctggcacactgaataatggcagt

SEQ ID NO: 5181116 - DNA, 25 bp, Homo sapien
cacggaaacccatgaataatagaat

SEQ ID NO: 5181117 - DNA, 25 bp, Homo sapien
ctgagaaaaactttctgcccatcac

SEQ ID NO: 5181118 - DNA, 25 bp, Homo sapien
tgagaaaaactttctgcccatcacc

SEQ ID NO: 5181119 - DNA, 25 bp, Homo sapien
ctgtgaccacggaaacccatgaata

SEQ ID NO: 5181120 - DNA, 25 bp, Homo sapien
tagccttgccctcagctgtgttaac

SEQ ID NO: 5181121 - DNA, 25 bp, Homo sapien
ccctcagctgtgttaacatgaactt

SEQ ID NO: 5181122 - DNA, 25 bp, Homo sapien
gctgtgttaacatgaactttttcct

SEQ ID NO: 5181123 - DNA, 25 bp, Homo sapien
tccatttccaactggccctgactcc

SEQ ID NO: 5181124 - DNA, 25 bp, Homo sapien
tttagtaagcatgccacgcagagag

SEQ ID NO: 5181125 - DNA, 25 bp, Homo sapien
gagccactggtgcacattttagtaa

SEQ ID NO: 5181126 - DNA, 25 bp, Homo sapien
tgggaatcagataatcacagagcct

SEQ ID NO: 5181127 - DNA, 25 bp, Homo sapien
caggccctgcaacacattgtggaga

SEQ ID NO: 5181128 - DNA, 25 bp, Homo sapien
tgagatgtgttccagcaatatcttg

SEQ ID NO: 5181129 - DNA, 25 bp, Homo sapien
gcatgcagggctgttaaactttgtc

SEQ ID NO: 5181130 - DNA, 25 bp, Homo sapien
aacctaaccatatcatatgacatgg

SEQ ID NO: 5181131 - DNA, 25 bp, Homo sapien
tataaagacactacccgagtctggg

SEQ ID NO: 5181132 - DNA, 25 bp, Homo sapien
tgaatccaagggagcttttgaaatg

SEQ ID NO: 5181133 - DNA, 25 bp, Homo sapien
aatccaagggagcttttgaaatgca

SEQ ID NO: 5181134 - DNA, 25 bp, Homo sapien
ccaagggagcttttgaaatgcaagt

SEQ ID NO: 5181135 - DNA, 25 bp, Homo sapien
gctttgaatccaagggagcttttga

SEQ ID NO: 5181136 - DNA, 25 bp, Homo sapien
catgctggactttcccgacagggag

SEQ ID NO: 5181137 - DNA, 25 bp, Homo sapien
tttctgtgcgtagcagccctgagtc

SEQ ID NO: 5181138 - DNA, 25 bp, Homo sapien
tatttgtggatctacctacctgccc

SEQ ID NO: 5181139 - DNA, 25 bp, Homo sapien
tatacagggcctcaccacatggtgg

SEQ ID NO: 5181140 - DNA, 25 bp, Homo sapien
ccaatctagtggatgtaaactggta

SEQ ID NO: 5181141 - DNA, 25 bp, Homo sapien
ccctgtcagcacttggtaatatgaa

SEQ ID NO: 5181142 - DNA, 25 bp, Homo sapien
ctatgaacacttgcatacaggtctt

SEQ ID NO: 5181143 - DNA, 25 bp, Homo sapien
caacctcaccagcaaagtataaaag

SEQ ID NO: 5181144 - DNA, 25 bp, Homo sapien
tgtcacatttcacattgcttccata

SEQ ID NO: 5181145 - DNA, 25 bp, Homo sapien
cagtgcctaaatgccagatggtgta

SEQ ID NO: 5181146 - DNA, 25 bp, Homo sapien
tctgatagcgccagacaccaagaga

SEQ ID NO: 5181147 - DNA, 25 bp, Homo sapien
cagaggcgccagaaagagggcttta

SEQ ID NO: 5181148 - DNA, 25 bp, Homo sapien
gatggtagtacatagtctgagagcc

SEQ ID NO: 5181149 - DNA, 25 bp, Homo sapien
taaatagaccgtaaatacatgaagc

SEQ ID NO: 5181150 - DNA, 25 bp, Homo sapien
tacatgaagcatactgaaagagcat

SEQ ID NO: 5181151 - DNA, 25 bp, Homo sapien
caaagacatataccctggagattaa

SEQ ID NO: 5181152 - DNA, 25 bp, Homo sapien
tatacttgcaatatagcatattaag

SEQ ID NO: 5181153 - DNA, 25 bp, Homo sapien
cttcacacagagaagtaggagtgtc

SEQ ID NO: 5181154 - DNA, 25 bp, Homo sapien
gagaagtaggagtgtcatcagaacc

SEQ ID NO: 5181155 - DNA, 25 bp, Homo sapien
gaagtaggagtgtcatcagaaccca

SEQ ID NO: 5181156 - DNA, 25 bp, Homo sapien
cagagaagtaggagtgtcatcagaa

SEQ ID NO: 5181157 - DNA, 25 bp, Homo sapien
cataggataggacttagaagactta

SEQ ID NO: 5181158 - DNA, 25 bp, Homo sapien
ggatctttagggagatagaagactg

SEQ ID NO: 5181159 - DNA, 25 bp, Homo sapien
gatctttagggagatagaagactgg

SEQ ID NO: 5181160 - DNA, 25 bp, Homo sapien
cttagaagacttaaagaaggatctt

SEQ ID NO: 5181161 - DNA, 25 bp, Homo sapien
caaccagggtgcaaactacttgttg

SEQ ID NO: 5181162 - DNA, 25 bp, Homo sapien
aaccagggtgcaaactacttgttgc

SEQ ID NO: 5181163 - DNA, 25 bp, Homo sapien
tcaaccagggtgcaaactacttgtt

SEQ ID NO: 5181164 - DNA, 25 bp, Homo sapien
accagggtgcaaactacttgttgcc

SEQ ID NO: 5181165 - DNA, 25 bp, Homo sapien
taagtggtgtttagtccccaataca

SEQ ID NO: 5181166 - DNA, 25 bp, Homo sapien
gggttaggtaaattggaatctgcca

SEQ ID NO: 5181167 - DNA, 25 bp, Homo sapien
gaatagatattctgcagggagatac

SEQ ID NO: 5181168 - DNA, 25 bp, Homo sapien
ttgagagtatgcaaaccctctgttc

SEQ ID NO: 5181169 - DNA, 25 bp, Homo sapien
tattatacctgggaacctccgattc

SEQ ID NO: 5181170 - DNA, 25 bp, Homo sapien
tatgtccaaaaagcagtccgttctg

SEQ ID NO: 5181171 - DNA, 25 bp, Homo sapien
tgatgagtggctcgcaaattccaca

SEQ ID NO: 5181172 - DNA, 25 bp, Homo sapien
gacatggctctcctatctctgttag

SEQ ID NO: 5181173 - DNA, 25 bp, Homo sapien
gctgactgctggagatcacagtcac

SEQ ID NO: 5181174 - DNA, 25 bp, Homo sapien
ccttacttaactcggactctcctag

SEQ ID NO: 5181175 - DNA, 25 bp, Homo sapien
gagatccagatgcttcatagtcagc

SEQ ID NO: 5181176 - DNA, 25 bp, Homo sapien
atacttctcagggtacagcagtccc

SEQ ID NO: 5181177 - DNA, 25 bp, Homo sapien
gagcaatgactccagggacctggta

SEQ ID NO: 5181178 - DNA, 25 bp, Homo sapien
tgcaggtctcctacacacggtctgc

SEQ ID NO: 5181179 - DNA, 25 bp, Homo sapien
gataaaaggatggaggtactcctcc

SEQ ID NO: 5181180 - DNA, 25 bp, Homo sapien
cacggtctgcattagcgatccaggg

SEQ ID NO: 5181181 - DNA, 25 bp, Homo sapien
tttccagggtgctccttggcctgca

SEQ ID NO: 5181182 - DNA, 25 bp, Homo sapien
ggttgtgtaattcaggatgcagtgc

SEQ ID NO: 5181183 - DNA, 25 bp, Homo sapien
tcagcatatgcttgccctcagtggg

SEQ ID NO: 5181184 - DNA, 25 bp, Homo sapien
tgcagtgcaatagatggcccttaat

SEQ ID NO: 5181185 - DNA, 25 bp, Homo sapien
agtgtcaaggctctgtacaggttcc

SEQ ID NO: 5181186 - DNA, 25 bp, Homo sapien
gagcctctggtgacgtacgatgact

SEQ ID NO: 5181187 - DNA, 25 bp, Homo sapien
aggagcctctggtgacgtacgatga

SEQ ID NO: 5181188 - DNA, 25 bp, Homo sapien
tgacgtacgatgactctcagagagt

SEQ ID NO: 5181189 - DNA, 25 bp, Homo sapien
tctggtgacgtacgatgactctcag

SEQ ID NO: 5181190 - DNA, 25 bp, Homo sapien
tcatctgtggttttctaattgcaat

SEQ ID NO: 5181191 - DNA, 25 bp, Homo sapien
aaacagagatcccaagcaacgggaa

SEQ ID NO: 5181192 - DNA, 25 bp, Homo sapien
tagagcttctcatgtccttattcat

SEQ ID NO: 5181193 - DNA, 25 bp, Homo sapien
caattgttggcattaattgatgctg

SEQ ID NO: 5181194 - DNA, 25 bp, Homo sapien
cttgaccaaacagcctctgctcaat

SEQ ID NO: 5181195 - DNA, 25 bp, Homo sapien
caattcagagcagatggaactggaa

SEQ ID NO: 5181196 - DNA, 25 bp, Homo sapien
ggaactggaattgcacccatcaggg

SEQ ID NO: 5181197 - DNA, 25 bp, Homo sapien
ggccaatgggatcctggaccaggat

SEQ ID NO: 5181198 - DNA, 25 bp, Homo sapien
gggatctattctttctatgagcaac

SEQ ID NO: 5181199 - DNA, 25 bp, Homo sapien
cccagaagcaggcatggatgaagtc

SEQ ID NO: 5181200 - DNA, 25 bp, Homo sapien
tccagtcactactgctaaggtgctg

SEQ ID NO: 5181201 - DNA, 25 bp, Homo sapien
catggatgaagtccgcagtgaccct

SEQ ID NO: 5181202 - DNA, 25 bp, Homo sapien
catggtcacgtgtaggatatttcta

SEQ ID NO: 5181203 - DNA, 25 bp, Homo sapien
ctttcctgtcaggtcttagtttctc

SEQ ID NO: 5181204 - DNA, 25 bp, Homo sapien
ttccctttgtttaacttgatctgtc

SEQ ID NO: 5181205 - DNA, 25 bp, Homo sapien
tgttgttttttcaatgcctgcctct

SEQ ID NO: 5181206 - DNA, 25 bp, Homo sapien
ctctggctgtggggtagtaagtgta

SEQ ID NO: 5181207 - DNA, 25 bp, Homo sapien
gctgtggggtagtaagtgtacttgg

SEQ ID NO: 5181208 - DNA, 25 bp, Homo sapien
ggctgtggggtagtaagtgtacttg

SEQ ID NO: 5181209 - DNA, 25 bp, Homo sapien
ctggctgtggggtagtaagtgtact

SEQ ID NO: 5181210 - DNA, 25 bp, Homo sapien
tagaagctataaaacgaggaagccc

SEQ ID NO: 5181211 - DNA, 25 bp, Homo sapien
cccttggttccaaaaagctgaggca

SEQ ID NO: 5181212 - DNA, 25 bp, Homo sapien
taacttgtcagcacatctctgcatg

SEQ ID NO: 5181213 - DNA, 25 bp, Homo sapien
cagattgggacatacttcagttgcg

SEQ ID NO: 5181214 - DNA, 25 bp, Homo sapien
ggctcttgcatataataagccacct

SEQ ID NO: 5181215 - DNA, 25 bp, Homo sapien
gggtgaattacccactggagataat

SEQ ID NO: 5181216 - DNA, 25 bp, Homo sapien
caggctcttgcatataataagccac

SEQ ID NO: 5181217 - DNA, 25 bp, Homo sapien
tacccactggagataatacacagta

SEQ ID NO: 5181218 - DNA, 25 bp, Homo sapien
tacacgggtgcaggataggctttga

SEQ ID NO: 5181219 - DNA, 25 bp, Homo sapien
tgcaggagccccgtctttgtagact

SEQ ID NO: 5181220 - DNA, 25 bp, Homo sapien
tctggcagtacaaggataagtaaca

SEQ ID NO: 5181221 - DNA, 25 bp, Homo sapien
gaaagactctctatgagcagtgtga

SEQ ID NO: 5181222 - DNA, 25 bp, Homo sapien
ccttataattacgagaatgtgctgt

SEQ ID NO: 5181223 - DNA, 25 bp, Homo sapien
tcagcgataaaatcattaatggcca

SEQ ID NO: 5181224 - DNA, 25 bp, Homo sapien
taaagcaatgtgttcaaagtagacc

SEQ ID NO: 5181225 - DNA, 25 bp, Homo sapien
ctgtaaccaccaatttcagcgataa

SEQ ID NO: 5181226 - DNA, 25 bp, Homo sapien
ttttattaatactgggtgaacaaga

SEQ ID NO: 5181227 - DNA, 25 bp, Homo sapien
gaatatgcttccctgctgtgcaaac

SEQ ID NO: 5181228 - DNA, 25 bp, Homo sapien
gcttccctgctgtgcaaacatcctt

SEQ ID NO: 5181229 - DNA, 25 bp, Homo sapien
atactgggtgaacaagaatgtaagc

SEQ ID NO: 5181230 - DNA, 25 bp, Homo sapien
caattcattgaggagatcataaaaa

SEQ ID NO: 5181231 - DNA, 25 bp, Homo sapien
tctgcaattcattgaggagatcata

SEQ ID NO: 5181232 - DNA, 25 bp, Homo sapien
gtactaataccaggaatggtttcaa

SEQ ID NO: 5181233 - DNA, 25 bp, Homo sapien
agtcaaagtactaataccaggaatg

SEQ ID NO: 5181234 - DNA, 25 bp, Homo sapien
ttctgtaccttcatgggcttcaggc

SEQ ID NO: 5181235 - DNA, 25 bp, Homo sapien
tctcagaacacgtgctttgagaacc

SEQ ID NO: 5181236 - DNA, 25 bp, Homo sapien
tctttcttctcagaacacgtgcttt

SEQ ID NO: 5181237 - DNA, 25 bp, Homo sapien
gaacacgtgctttgagaaccattgc

SEQ ID NO: 5181238 - DNA, 25 bp, Homo sapien
tttcttctcagaacacgtgctttga

SEQ ID NO: 5181239 - DNA, 25 bp, Homo sapien
gggttctaagaggtgcaccaatgct

SEQ ID NO: 5181240 - DNA, 25 bp, Homo sapien
caccaatgctgctgtaagccaaata

SEQ ID NO: 5181241 - DNA, 25 bp, Homo sapien
aatagttgtcggtcatagttatagc

SEQ ID NO: 5181242 - DNA, 25 bp, Homo sapien
aaagctactgtgctacaattgactg

SEQ ID NO: 5181243 - DNA, 25 bp, Homo sapien
ctcggcgcccattctggcggcgcct

SEQ ID NO: 5181244 - DNA, 25 bp, Homo sapien
gcgcccattctggcggcgcctgagg

SEQ ID NO: 5181245 - DNA, 25 bp, Homo sapien
ggcgcccattctggcggcgcctgag

SEQ ID NO: 5181246 - DNA, 25 bp, Homo sapien
tcggcgcccattctggcggcgcctg

SEQ ID NO: 5181247 - DNA, 25 bp, Homo sapien
aaaagaactaccatcagagtgaaca

SEQ ID NO: 5181248 - DNA, 25 bp, Homo sapien
acaggcaacctacaaaatgggagaa

SEQ ID NO: 5181249 - DNA, 25 bp, Homo sapien
tgcacagcaaaagaactaccatcag

SEQ ID NO: 5181250 - DNA, 25 bp, Homo sapien
caggcaacctacaaaatgggagaaa

SEQ ID NO: 5181251 - DNA, 25 bp, Homo sapien
tcattaactgttatggagcccttca

SEQ ID NO: 5181252 - DNA, 25 bp, Homo sapien
tcctgaaatattatatattgggcag

SEQ ID NO: 5181253 - DNA, 25 bp, Homo sapien
atattgggcagtggcagtacagcag

SEQ ID NO: 5181254 - DNA, 25 bp, Homo sapien
tgttatggagcccttcataaagcaa

SEQ ID NO: 5181255 - DNA, 25 bp, Homo sapien
taatctctgttacaaggctctaaaa

SEQ ID NO: 5181256 - DNA, 25 bp, Homo sapien
tcctctgtcaagagcaactttctca

SEQ ID NO: 5181257 - DNA, 25 bp, Homo sapien
tgtggtgacacctaagaggccccgt

SEQ ID NO: 5181258 - DNA, 25 bp, Homo sapien
taccaatagttctaagacaaacacc

SEQ ID NO: 5181259 - DNA, 25 bp, Homo sapien
cttggaaaacagttccagcttgaac

SEQ ID NO: 5181260 - DNA, 25 bp, Homo sapien
tgcctccaaagcagatgcaaaatat

SEQ ID NO: 5181261 - DNA, 25 bp, Homo sapien
gattggtatggaaagaatccctaag

SEQ ID NO: 5181262 - DNA, 25 bp, Homo sapien
tgggtcattcatccaagggcttgga

SEQ ID NO: 5181263 - DNA, 25 bp, Homo sapien
gggcttacagttccctgtgcttcag

SEQ ID NO: 5181264 - DNA, 25 bp, Homo sapien
cgagtggtggcatcttgcttctgca

SEQ ID NO: 5181265 - DNA, 25 bp, Homo sapien
cacaggccctggctatatgagtctg

SEQ ID NO: 5181266 - DNA, 25 bp, Homo sapien
cctatttgcaaactaccatgtctgt

SEQ ID NO: 5181267 - DNA, 25 bp, Homo sapien
ggatctttggctgaagcttcagctg

SEQ ID NO: 5181268 - DNA, 25 bp, Homo sapien
ctggatctttggctgaagcttcagc

SEQ ID NO: 5181269 - DNA, 25 bp, Homo sapien
tctttggctgaagcttcagctgcat

SEQ ID NO: 5181270 - DNA, 25 bp, Homo sapien
cagctggatctttggctgaagcttc

SEQ ID NO: 5181271 - DNA, 25 bp, Homo sapien
tgaggttatagaggtagactgtcca

SEQ ID NO: 5181272 - DNA, 25 bp, Homo sapien
gtgtgggattaagcctcttgctcaa

SEQ ID NO: 5181273 - DNA, 25 bp, Homo sapien
ctagagatgtacaggatgaggttat

SEQ ID NO: 5181274 - DNA, 25 bp, Homo sapien
gaaggtccactgaggattccgtaga

SEQ ID NO: 5181275 - DNA, 25 bp, Homo sapien
tacatcatgactggaactgcataac

SEQ ID NO: 5181276 - DNA, 25 bp, Homo sapien
catgactggaactgcataacttcac

SEQ ID NO: 5181277 - DNA, 25 bp, Homo sapien
tctggctacatcatgactggaactg

SEQ ID NO: 5181278 - DNA, 25 bp, Homo sapien
ttttgcactcatccaataattggca

SEQ ID NO: 5181279 - DNA, 25 bp, Homo sapien
ctgtggataaatcagctacacgtgt

SEQ ID NO: 5181280 - DNA, 25 bp, Homo sapien
cagctacacgtgtctccactgagtc

SEQ ID NO: 5181281 - DNA, 25 bp, Homo sapien
aagcacacaggaaagaagtaattct

SEQ ID NO: 5181282 - DNA, 25 bp, Homo sapien
gcacacaggaaagaagtaattctgt

SEQ ID NO: 5181283 - DNA, 25 bp, Homo sapien
gaccaaatgttcctcctctgggcat

SEQ ID NO: 5181284 - DNA, 25 bp, Homo sapien
gataacccatgtttggcctgaccaa

SEQ ID NO: 5181285 - DNA, 25 bp, Homo sapien
tggcctgaccaaatgttcctcctct

SEQ ID NO: 5181286 - DNA, 25 bp, Homo sapien
cacccaccattgagataacccatgt

SEQ ID NO: 5181287 - DNA, 25 bp, Homo sapien
ctaaattctctactggcaagttgcc

SEQ ID NO: 5181288 - DNA, 25 bp, Homo sapien
tgtgctggtgcaaaagtcggtatta

SEQ ID NO: 5181289 - DNA, 25 bp, Homo sapien
gaaataggcaccaatgtgtgctggt

SEQ ID NO: 5181290 - DNA, 25 bp, Homo sapien
tctaaattctctactggcaagttgc

SEQ ID NO: 5181291 - DNA, 25 bp, Homo sapien
atgtgtgggcgtggagtggatcagg

SEQ ID NO: 5181292 - DNA, 25 bp, Homo sapien
gatcaggaagaggaatgaagtttcc

SEQ ID NO: 5181293 - DNA, 25 bp, Homo sapien
ggatcaggaagaggaatgaagtttc

SEQ ID NO: 5181294 - DNA, 25 bp, Homo sapien
agatgtgtgggcgtggagtggatca

SEQ ID NO: 5181295 - DNA, 25 bp, Homo sapien
catgtggtaaattccatttgcgtac

SEQ ID NO: 5181296 - DNA, 25 bp, Homo sapien
gtagttgtgggctacagcttccatt

SEQ ID NO: 5181297 - DNA, 25 bp, Homo sapien
aactcaacatgtggtaaattccatt

SEQ ID NO: 5181298 - DNA, 25 bp, Homo sapien
cttggaaaaacctaacttgctgtag

SEQ ID NO: 5181299 - DNA, 25 bp, Homo sapien
aactcccacatgcaggtgtcaggaa

SEQ ID NO: 5181300 - DNA, 25 bp, Homo sapien
tcacaactcccacatgcaggtgtca

SEQ ID NO: 5181301 - DNA, 25 bp, Homo sapien
ctcccacatgcaggtgtcaggaaga

SEQ ID NO: 5181302 - DNA, 25 bp, Homo sapien
caactcccacatgcaggtgtcagga

SEQ ID NO: 5181303 - DNA, 25 bp, Homo sapien
ccactatatccccagaagaagcagc

SEQ ID NO: 5181304 - DNA, 25 bp, Homo sapien
gaagaagcagctgctaaataacatt

SEQ ID NO: 5181305 - DNA, 25 bp, Homo sapien
aagaagcagctgctaaataacattc

SEQ ID NO: 5181306 - DNA, 25 bp, Homo sapien
gacacaggatgctcacaataatctc

SEQ ID NO: 5181307 - DNA, 25 bp, Homo sapien
caagacacaggatgctcacaataat

SEQ ID NO: 5181308 - DNA, 25 bp, Homo sapien
tggtgaaatattgaaagagttcccc

SEQ ID NO: 5181309 - DNA, 25 bp, Homo sapien
ggatgctcacaataatctcttcagt

SEQ ID NO: 5181310 - DNA, 25 bp, Homo sapien
tctgtttgatcccaagccctttcct

SEQ ID NO: 5181311 - DNA, 25 bp, Homo sapien
gctgggtcaatccaaagtcttcttg

SEQ ID NO: 5181312 - DNA, 25 bp, Homo sapien
tggtatcaaaatccagccaagggca

SEQ ID NO: 5181313 - DNA, 25 bp, Homo sapien
acttgccagtgaccaaagtttgcag

SEQ ID NO: 5181314 - DNA, 25 bp, Homo sapien
tcatgttgcccctggtaaagaaaat

SEQ ID NO: 5181315 - DNA, 25 bp, Homo sapien
tgtggatgtacaaacctcacctcaa

SEQ ID NO: 5181316 - DNA, 25 bp, Homo sapien
ggttttcatagagccatctcgccgc

SEQ ID NO: 5181317 - DNA, 25 bp, Homo sapien
gctccaggtgctaactcagatgtat

SEQ ID NO: 5181318 - DNA, 25 bp, Homo sapien
taactgtcacactttcatcgaagag

SEQ ID NO: 5181319 - DNA, 25 bp, Homo sapien
tcagaattgtagggcaaagaatcac

SEQ ID NO: 5181320 - DNA, 25 bp, Homo sapien
cttcagaattgtagggcaaagaatc

SEQ ID NO: 5181321 - DNA, 25 bp, Homo sapien
ttcagaattgtagggcaaagaatca

SEQ ID NO: 5181322 - DNA, 25 bp, Homo sapien
acacatttgtattctgtgaagccct

SEQ ID NO: 5181323 - DNA, 25 bp, Homo sapien
aacacatttgtattctgtgaagccc

SEQ ID NO: 5181324 - DNA, 25 bp, Homo sapien
cacattctctccctggtaaatcgga

SEQ ID NO: 5181325 - DNA, 25 bp, Homo sapien
ccatttcttccaggccacattctct

SEQ ID NO: 5181326 - DNA, 25 bp, Homo sapien
cattctctccctggtaaatcggaca

SEQ ID NO: 5181327 - DNA, 25 bp, Homo sapien
tgagcccatttcttccaggccacat

SEQ ID NO: 5181328 - DNA, 25 bp, Homo sapien
aagacaaagccattgctcttccgca

SEQ ID NO: 5181329 - DNA, 25 bp, Homo sapien
gacaaagccattgctcttccgcaga

SEQ ID NO: 5181330 - DNA, 25 bp, Homo sapien
gccattgctcttccgcagagcgtac

SEQ ID NO: 5181331 - DNA, 25 bp, Homo sapien
aaagccattgctcttccgcagagcg

SEQ ID NO: 5181332 - DNA, 25 bp, Homo sapien
tcaccgtgatcatactgtccaactc

SEQ ID NO: 5181333 - DNA, 25 bp, Homo sapien
cagggtcaccgtgatcatactgtcc

SEQ ID NO: 5181334 - DNA, 25 bp, Homo sapien
ggtcaccgtgatcatactgtccaac

SEQ ID NO: 5181335 - DNA, 25 bp, Homo sapien
gggtcaccgtgatcatactgtccaa

SEQ ID NO: 5181336 - DNA, 25 bp, Homo sapien
ggtcccaagctcaggaagattcctg

SEQ ID NO: 5181337 - DNA, 25 bp, Homo sapien
cctgatcactacatggagatgctac

SEQ ID NO: 5181338 - DNA, 25 bp, Homo sapien
caggcaagttcaaagcatgcagcaa

SEQ ID NO: 5181339 - DNA, 25 bp, Homo sapien
cacatgggtgcaagtagaggttcct

SEQ ID NO: 5181340 - DNA, 25 bp, Homo sapien
tgcggcggtgagagtgttgaatcct

SEQ ID NO: 5181341 - DNA, 25 bp, Homo sapien
gagcaagattacctacaaccagctg

SEQ ID NO: 5181342 - DNA, 25 bp, Homo sapien
aagagcaagattacctacaaccagc

SEQ ID NO: 5181343 - DNA, 25 bp, Homo sapien
taattcccaagagcaagattaccta

SEQ ID NO: 5181344 - DNA, 25 bp, Homo sapien
tcccaagagcaagattacctacaac

SEQ ID NO: 5181345 - DNA, 25 bp, Homo sapien
ttgcatagagattttctaactggga

SEQ ID NO: 5181346 - DNA, 25 bp, Homo sapien
tttgcatagagattttctaactggg

SEQ ID NO: 5181347 - DNA, 25 bp, Homo sapien
ctgacacatagcaatcataaatggg

SEQ ID NO: 5181348 - DNA, 25 bp, Homo sapien
taagccagtagagtttttaagccaa

SEQ ID NO: 5181349 - DNA, 25 bp, Homo sapien
agtttttaagccaatcagagacaag

SEQ ID NO: 5181350 - DNA, 25 bp, Homo sapien
tggcatctggcggaactgacacata

SEQ ID NO: 5181351 - DNA, 25 bp, Homo sapien
cagcccattgtcatgtgacttatcc

SEQ ID NO: 5181352 - DNA, 25 bp, Homo sapien
gcccattgtcatgtgacttatccat

SEQ ID NO: 5181353 - DNA, 25 bp, Homo sapien
agcccattgtcatgtgacttatcca

SEQ ID NO: 5181354 - DNA, 25 bp, Homo sapien
gcagtctgttctcctgggtgaagca

SEQ ID NO: 5181355 - DNA, 25 bp, Homo sapien
gaagcaaggcttgactagacaagca

SEQ ID NO: 5181356 - DNA, 25 bp, Homo sapien
gctgaatgctggtataaagctgggc

SEQ ID NO: 5181357 - DNA, 25 bp, Homo sapien
tccgtgatgcatgaaaaggctgtca

SEQ ID NO: 5181358 - DNA, 25 bp, Homo sapien
gtggaattagtcaggagaggggttc

SEQ ID NO: 5181359 - DNA, 25 bp, Homo sapien
cttggaatgcaggtggaattagtca

SEQ ID NO: 5181360 - DNA, 25 bp, Homo sapien
aatgcaggtggaattagtcaggaga

SEQ ID NO: 5181361 - DNA, 25 bp, Homo sapien
aattagtcaggagaggggttcctgc

SEQ ID NO: 5181362 - DNA, 25 bp, Homo sapien
gaagacagccaaccttcttgtcccg

SEQ ID NO: 5181363 - DNA, 25 bp, Homo sapien
tcatccgccagctgcctatcctggg

SEQ ID NO: 5181364 - DNA, 25 bp, Homo sapien
ccagctgcctatcctggggaagaca

SEQ ID NO: 5181365 - DNA, 25 bp, Homo sapien
aaccttcttgtcccgtggcagcact

SEQ ID NO: 5181366 - DNA, 25 bp, Homo sapien
tctaaatggcagcacagcgttcatg

SEQ ID NO: 5181367 - DNA, 25 bp, Homo sapien
tttctcccaatgtgtcctggtagga

SEQ ID NO: 5181368 - DNA, 25 bp, Homo sapien
agctggcagaacgacgcggcactga

SEQ ID NO: 5181369 - DNA, 25 bp, Homo sapien
ttccgacaaacaagccgaacaacca

SEQ ID NO: 5181370 - DNA, 25 bp, Homo sapien
ctattgggagggctcttgcatgaac

SEQ ID NO: 5181371 - DNA, 25 bp, Homo sapien
ccagccaaatccctattgggagggc

SEQ ID NO: 5181372 - DNA, 25 bp, Homo sapien
aatccctattgggagggctcttgca

SEQ ID NO: 5181373 - DNA, 25 bp, Homo sapien
gccaaatccctattgggagggctct

SEQ ID NO: 5181374 - DNA, 25 bp, Homo sapien
tgtacctggaaagctgcaacctttg

SEQ ID NO: 5181375 - DNA, 25 bp, Homo sapien
gaattgtccctctcaagtgtacctg

SEQ ID NO: 5181376 - DNA, 25 bp, Homo sapien
tacaatttgatctcttcagggccag

SEQ ID NO: 5181377 - DNA, 25 bp, Homo sapien
aactctaggccagaaggctcatctg

SEQ ID NO: 5181378 - DNA, 25 bp, Homo sapien
tcctattaaaatttcctctgcgaag

SEQ ID NO: 5181379 - DNA, 25 bp, Homo sapien
cctattaaaatttcctctgcgaagt

SEQ ID NO: 5181380 - DNA, 25 bp, Homo sapien
ttcctctgcgaagttttccccagtc

SEQ ID NO: 5181381 - DNA, 25 bp, Homo sapien
ctctgcgaagttttccccagtcgtt

SEQ ID NO: 5181382 - DNA, 25 bp, Homo sapien
tagtgaagaactggacacccttgct

SEQ ID NO: 5181383 - DNA, 25 bp, Homo sapien
gcaaagaacatgctacccagggaat

SEQ ID NO: 5181384 - DNA, 25 bp, Homo sapien
cctggtcactttcccatggtggatc

SEQ ID NO: 5181385 - DNA, 25 bp, Homo sapien
caacatctttctgcatacaggcaaa

SEQ ID NO: 5181386 - DNA, 25 bp, Homo sapien
acctgtaggatagtttttgcatgcc

SEQ ID NO: 5181387 - DNA, 25 bp, Homo sapien
tcatccatcacatcctgtcagagaa

SEQ ID NO: 5181388 - DNA, 25 bp, Homo sapien
tgtttcctgtataggtaacctctgg

SEQ ID NO: 5181389 - DNA, 25 bp, Homo sapien
tcctgtcagagaagttagtcgtttt

SEQ ID NO: 5181390 - DNA, 25 bp, Homo sapien
tcccaaagcaaggtcccttgcagct

SEQ ID NO: 5181391 - DNA, 25 bp, Homo sapien
ccaaagcaaggtcccttgcagctct

SEQ ID NO: 5181392 - DNA, 25 bp, Homo sapien
gcaaggtcccttgcagctcttggtt

SEQ ID NO: 5181393 - DNA, 25 bp, Homo sapien
aaagcaaggtcccttgcagctcttg

SEQ ID NO: 5181394 - DNA, 25 bp, Homo sapien
gtaaatattccctctaatatctgcc

SEQ ID NO: 5181395 - DNA, 25 bp, Homo sapien
gccttttatgagaacattcatagta

SEQ ID NO: 5181396 - DNA, 25 bp, Homo sapien
ttccctctaatatctgcctcctgag

SEQ ID NO: 5181397 - DNA, 25 bp, Homo sapien
tggccttttatgagaacattcatag

SEQ ID NO: 5181398 - DNA, 25 bp, Homo sapien
tgtgctccccttaaatcgtggcagg

SEQ ID NO: 5181399 - DNA, 25 bp, Homo sapien
tgttggcgcttgttgaaaacgagct

SEQ ID NO: 5181400 - DNA, 25 bp, Homo sapien
tattacaaaatagctggcgagtgct

SEQ ID NO: 5181401 - DNA, 25 bp, Homo sapien
tcagtcctgacataacactagggca

SEQ ID NO: 5181402 - DNA, 25 bp, Homo sapien
tgaccttaggttcggcatgtagacc

SEQ ID NO: 5181403 - DNA, 25 bp, Homo sapien
tcggcagttgctacggacttacgaa

SEQ ID NO: 5181404 - DNA, 25 bp, Homo sapien
tcacagagagccacaaagcggattt

SEQ ID NO: 5181405 - DNA, 25 bp, Homo sapien
gaatgctcagctttacagtcggaaa

SEQ ID NO: 5181406 - DNA, 25 bp, Homo sapien
cgtggcgcttggggcgggtttccag

SEQ ID NO: 5181407 - DNA, 25 bp, Homo sapien
gcgggtttccagtcgctgggggatg

SEQ ID NO: 5181408 - DNA, 25 bp, Homo sapien
gcgtggcgcttggggcgggtttcca

SEQ ID NO: 5181409 - DNA, 25 bp, Homo sapien
gagagaaagagcaactcagacttct

SEQ ID NO: 5181410 - DNA, 25 bp, Homo sapien
ttttgtgcttccactttgctgactg

SEQ ID NO: 5181411 - DNA, 25 bp, Homo sapien
gcattcatccattctgaaatccaag

SEQ ID NO: 5181412 - DNA, 25 bp, Homo sapien
cacctagggcattcatccattctga

SEQ ID NO: 5181413 - DNA, 25 bp, Homo sapien
tgcaggcacattggaaagacagggt

SEQ ID NO: 5181414 - DNA, 25 bp, Homo sapien
ccaaaaattcgctccttatgcaggg

SEQ ID NO: 5181415 - DNA, 25 bp, Homo sapien
taaaatatgcagataggatagtggc

SEQ ID NO: 5181416 - DNA, 25 bp, Homo sapien
tgcaccagggttttgcctaaacatg

SEQ ID NO: 5181417 - DNA, 25 bp, Homo sapien
gattgtggaggcttgatgagtccaa

SEQ ID NO: 5181418 - DNA, 25 bp, Homo sapien
gtggaggcttgatgagtccaaaatc

SEQ ID NO: 5181419 - DNA, 25 bp, Homo sapien
tgctgctaattgacttggttgaaga

SEQ ID NO: 5181420 - DNA, 25 bp, Homo sapien
tgtccattcttgaggtagtttatgg

SEQ ID NO: 5181421 - DNA, 25 bp, Homo sapien
agttgctgctaattgacttggttga

SEQ ID NO: 5181422 - DNA, 25 bp, Homo sapien
tccattcttgaggtagtttatggcc

SEQ ID NO: 5181423 - DNA, 25 bp, Homo sapien
ttgggtcaaggaggctacagacagc

SEQ ID NO: 5181424 - DNA, 25 bp, Homo sapien
tgcaatgactcagcctgtgtctaaa

SEQ ID NO: 5181425 - DNA, 25 bp, Homo sapien
aatagcgagaggtcgggctgcacac

SEQ ID NO: 5181426 - DNA, 25 bp, Homo sapien
gaagcctttaacaggaatagcgaga

SEQ ID NO: 5181427 - DNA, 25 bp, Homo sapien
tgaatctacgatgctgaacagcccc

SEQ ID NO: 5181428 - DNA, 25 bp, Homo sapien
acgatgctgaacagccccgtgggca

SEQ ID NO: 5181429 - DNA, 25 bp, Homo sapien
tccttgttcaacaagccagttacgg

SEQ ID NO: 5181430 - DNA, 25 bp, Homo sapien
ccagttacgggcagtgaatgaatct

SEQ ID NO: 5181431 - DNA, 25 bp, Homo sapien
tgttcagttcacacagtctatcttt

SEQ ID NO: 5181432 - DNA, 25 bp, Homo sapien
ctctgtgataccagcaagtgtggga

SEQ ID NO: 5181433 - DNA, 25 bp, Homo sapien
gaaaggctgtgaagaagcctgttca

SEQ ID NO: 5181434 - DNA, 25 bp, Homo sapien
tttgtgttctgagcaacagctactg

SEQ ID NO: 5181435 - DNA, 25 bp, Homo sapien
tcatgggttgagagttgcccctggt

SEQ ID NO: 5181436 - DNA, 25 bp, Homo sapien
tttctgagctgactaggctgccctg

SEQ ID NO: 5181437 - DNA, 25 bp, Homo sapien
tgagagttgcccctggtagcttagc

SEQ ID NO: 5181438 - DNA, 25 bp, Homo sapien
agagttgcccctggtagcttagctt

SEQ ID NO: 5181439 - DNA, 25 bp, Homo sapien
ctgtataatgtgcatttctccactg

SEQ ID NO: 5181440 - DNA, 25 bp, Homo sapien
ttaaatatccttcctttatagagaa

SEQ ID NO: 5181441 - DNA, 25 bp, Homo sapien
tatccttcctttatagagaaaagca

SEQ ID NO: 5181442 - DNA, 25 bp, Homo sapien
ttctccactgtctcaatttaaatat

SEQ ID NO: 5181443 - DNA, 25 bp, Homo sapien
gctaaatctgtataccctccttgaa

SEQ ID NO: 5181444 - DNA, 25 bp, Homo sapien
tcgctgaaaggaagatttgatgttg

SEQ ID NO: 5181445 - DNA, 25 bp, Homo sapien
ttgatgttgttttgtccaatccacc

SEQ ID NO: 5181446 - DNA, 25 bp, Homo sapien
tttaggctcataggactcttcgctg

SEQ ID NO: 5181447 - DNA, 25 bp, Homo sapien
ccaaatcctggttctaccatataag

SEQ ID NO: 5181448 - DNA, 25 bp, Homo sapien
tctaccatataagagctctcagggc

SEQ ID NO: 5181449 - DNA, 25 bp, Homo sapien
agtacatggactccagaccagacaa

SEQ ID NO: 5181450 - DNA, 25 bp, Homo sapien
tagtgcagaatagaaagtacatgga

SEQ ID NO: 5181451 - DNA, 25 bp, Homo sapien
attctctttgtttataggaaagcat

SEQ ID NO: 5181452 - DNA, 25 bp, Homo sapien
tggttcttcagtgtttgcttttcta

SEQ ID NO: 5181453 - DNA, 25 bp, Homo sapien
gttggttcttcagtgtttgcttttc

SEQ ID NO: 5181454 - DNA, 25 bp, Homo sapien
tcatgttggttcttcagtgtttgct

SEQ ID NO: 5181455 - DNA, 25 bp, Homo sapien
gttcttcagtgtttgcttttctaat

SEQ ID NO: 5181456 - DNA, 25 bp, Homo sapien
caagaattgtagagtctagaagttt

SEQ ID NO: 5181457 - DNA, 25 bp, Homo sapien
ctagaagtttccaagattagttaat

SEQ ID NO: 5181458 - DNA, 25 bp, Homo sapien
gtctagaagtttccaagattagtta

SEQ ID NO: 5181459 - DNA, 25 bp, Homo sapien
gcttaataatatgaagggccctggt

SEQ ID NO: 5181460 - DNA, 25 bp, Homo sapien
atttctttgttagctccgttaagca

SEQ ID NO: 5181461 - DNA, 25 bp, Homo sapien
aggaatggccaagtatgaaaccaga

SEQ ID NO: 5181462 - DNA, 25 bp, Homo sapien
ccgttaagcaggaatggccaagtat

SEQ ID NO: 5181463 - DNA, 25 bp, Homo sapien
ttagctccgttaagcaggaatggcc

SEQ ID NO: 5181464 - DNA, 25 bp, Homo sapien
aagtccagagaataattgtcaatcc

SEQ ID NO: 5181465 - DNA, 25 bp, Homo sapien
aaaaagtccagagaataattgtcaa

SEQ ID NO: 5181466 - DNA, 25 bp, Homo sapien
gtccagagaataattgtcaatccac

SEQ ID NO: 5181467 - DNA, 25 bp, Homo sapien
aaagtccagagaataattgtcaatc

SEQ ID NO: 5181468 - DNA, 25 bp, Homo sapien
cctgcagattctggtggtcatgcca

SEQ ID NO: 5181469 - DNA, 25 bp, Homo sapien
ccctgcagattctggtggtcatgcc

SEQ ID NO: 5181470 - DNA, 25 bp, Homo sapien
gtggtcatgccagggttagttgcta

SEQ ID NO: 5181471 - DNA, 25 bp, Homo sapien
catgccagggttagttgctagaagt

SEQ ID NO: 5181472 - DNA, 25 bp, Homo sapien
tatctccagatatcaacacagcact

SEQ ID NO: 5181473 - DNA, 25 bp, Homo sapien
gcttcgatcttgtctatatctccag

SEQ ID NO: 5181474 - DNA, 25 bp, Homo sapien
gactgcatctgcttcgatcttgtct

SEQ ID NO: 5181475 - DNA, 25 bp, Homo sapien
gaatgtgataggagttccacagcat

SEQ ID NO: 5181476 - DNA, 25 bp, Homo sapien
tactttgctaatttggggaacatac

SEQ ID NO: 5181477 - DNA, 25 bp, Homo sapien
aaattctgataatgactgcttctag

SEQ ID NO: 5181478 - DNA, 25 bp, Homo sapien
gataatttaactttcagcattagga

SEQ ID NO: 5181479 - DNA, 25 bp, Homo sapien
tactaaatacctgcccattacttta

SEQ ID NO: 5181480 - DNA, 25 bp, Homo sapien
tggatatgaatccacacaatatgaa

SEQ ID NO: 5181481 - DNA, 25 bp, Homo sapien
atactgagtggcagagtatggatat

SEQ ID NO: 5181482 - DNA, 25 bp, Homo sapien
atcaaaatcccagagatactgagtg

SEQ ID NO: 5181483 - DNA, 25 bp, Homo sapien
catcaaaatcccagagatactgagt

SEQ ID NO: 5181484 - DNA, 25 bp, Homo sapien
ttactgtattattgaagccattcca

SEQ ID NO: 5181485 - DNA, 25 bp, Homo sapien
actgtattattgaagccattccatt

SEQ ID NO: 5181486 - DNA, 25 bp, Homo sapien
tgtattattgaagccattccattaa

SEQ ID NO: 5181487 - DNA, 25 bp, Homo sapien
ttttactgtattattgaagccattc

SEQ ID NO: 5181488 - DNA, 25 bp, Homo sapien
tgaggccaatacccatcacctgcat

SEQ ID NO: 5181489 - DNA, 25 bp, Homo sapien
atttaacctctggtctctaaagctg

SEQ ID NO: 5181490 - DNA, 25 bp, Homo sapien
ttcagaacaattgcaagcccttgga

SEQ ID NO: 5181491 - DNA, 25 bp, Homo sapien
tgcctctcacatggtaacgaaaagc

SEQ ID NO: 5181492 - DNA, 25 bp, Homo sapien
ccgagtcctgatatggcccattgga

SEQ ID NO: 5181493 - DNA, 25 bp, Homo sapien
tgactaaaagccagagttgacttca

SEQ ID NO: 5181494 - DNA, 25 bp, Homo sapien
tctgtgtgtctgtaggcatgtgcac

SEQ ID NO: 5181495 - DNA, 25 bp, Homo sapien
ccattatttggctttctaggcagta

SEQ ID NO: 5181496 - DNA, 25 bp, Homo sapien
tgtaatctcccagacagctgccaat

SEQ ID NO: 5181497 - DNA, 25 bp, Homo sapien
tgtcactttagaggtgataccatta

SEQ ID NO: 5181498 - DNA, 25 bp, Homo sapien
gcagaactggtacaaccttagaact

SEQ ID NO: 5181499 - DNA, 25 bp, Homo sapien
cagcagaactggtacaaccttagaa

SEQ ID NO: 5181500 - DNA, 25 bp, Homo sapien
tccagcagaactggtacaaccttag

SEQ ID NO: 5181501 - DNA, 25 bp, Homo sapien
cagaactggtacaaccttagaactc

SEQ ID NO: 5181502 - DNA, 25 bp, Homo sapien
cctcctttaccagaattggtggcca

SEQ ID NO: 5181503 - DNA, 25 bp, Homo sapien
ctcctttaccagaattggtggccat

SEQ ID NO: 5181504 - DNA, 25 bp, Homo sapien
ctgactctctgtggaaccgtgagga

SEQ ID NO: 5181505 - DNA, 25 bp, Homo sapien
actgggtattacttctaacccatgg

SEQ ID NO: 5181506 - DNA, 25 bp, Homo sapien
taacccatggtaatacccgatcttg

SEQ ID NO: 5181507 - DNA, 25 bp, Homo sapien
aatacccgatcttgtcattaagtcc

SEQ ID NO: 5181508 - DNA, 25 bp, Homo sapien
ggctcatcctgactcttattgcaca

SEQ ID NO: 5181509 - DNA, 25 bp, Homo sapien
tctgatggcttcctagagctgtctt

SEQ ID NO: 5181510 - DNA, 25 bp, Homo sapien
tcttgtcaaggctcatcctgactct

SEQ ID NO: 5181511 - DNA, 25 bp, Homo sapien
ctgactcttattgcacacttccagt

SEQ ID NO: 5181512 - DNA, 25 bp, Homo sapien
cagcatagatcaacaggtccactac

SEQ ID NO: 5181513 - DNA, 25 bp, Homo sapien
ccttggcctatggaaattttattat

SEQ ID NO: 5181514 - DNA, 25 bp, Homo sapien
tttttataggctcagcatagatcaa

SEQ ID NO: 5181515 - DNA, 25 bp, Homo sapien
tcaaactccgctaaattccatgagg

SEQ ID NO: 5181516 - DNA, 25 bp, Homo sapien
tcttaccatagagatagaaaacaaa

SEQ ID NO: 5181517 - DNA, 25 bp, Homo sapien
cttctcctggttcttaccatagaga

SEQ ID NO: 5181518 - DNA, 25 bp, Homo sapien
cctggttcttaccatagagatagaa

SEQ ID NO: 5181519 - DNA, 25 bp, Homo sapien
ggttcttaccatagagatagaaaac

SEQ ID NO: 5181520 - DNA, 25 bp, Homo sapien
ctgagactgtcccagtcctgtttgt

SEQ ID NO: 5181521 - DNA, 25 bp, Homo sapien
ccttgctgagactgtcccagtcctg

SEQ ID NO: 5181522 - DNA, 25 bp, Homo sapien
tgtcccagtcctgtttgtgtgccat

SEQ ID NO: 5181523 - DNA, 25 bp, Homo sapien
tcttccttgctgagactgtcccagt

SEQ ID NO: 5181524 - DNA, 25 bp, Homo sapien
atgatggatgtcaggcacagcaatg

SEQ ID NO: 5181525 - DNA, 25 bp, Homo sapien
ctatgatggatgtcaggcacagcaa

SEQ ID NO: 5181526 - DNA, 25 bp, Homo sapien
tatgatggatgtcaggcacagcaat

SEQ ID NO: 5181527 - DNA, 25 bp, Homo sapien
tgatggatgtcaggcacagcaatgt

SEQ ID NO: 5181528 - DNA, 25 bp, Homo sapien
ggcatcgtcacgatcagccacgtca

SEQ ID NO: 5181529 - DNA, 25 bp, Homo sapien
ttgggaccattgagagaatagtctc

SEQ ID NO: 5181530 - DNA, 25 bp, Homo sapien
caaggactgacaagtttgggaccat

SEQ ID NO: 5181531 - DNA, 25 bp, Homo sapien
gccagtgcactctaagtacctcaag

SEQ ID NO: 5181532 - DNA, 25 bp, Homo sapien
aaagctctctttttctgggacaatc

SEQ ID NO: 5181533 - DNA, 25 bp, Homo sapien
taaagctctctttttctgggacaat

SEQ ID NO: 5181534 - DNA, 25 bp, Homo sapien
tataaagctctctttttctgggaca

SEQ ID NO: 5181535 - DNA, 25 bp, Homo sapien
ctataaagctctctttttctgggac

SEQ ID NO: 5181536 - DNA, 25 bp, Homo sapien
ctgccaggggcatggatactctcct

SEQ ID NO: 5181537 - DNA, 25 bp, Homo sapien
gagaacacagatccactccagtggg

SEQ ID NO: 5181538 - DNA, 25 bp, Homo sapien
tttggaaggcaacagtgggcaatgc

SEQ ID NO: 5181539 - DNA, 25 bp, Homo sapien
gccttgggcactggaatcctgacag

SEQ ID NO: 5181540 - DNA, 25 bp, Homo sapien
gaaaaagggtcaaaatgtcctctgc

SEQ ID NO: 5181541 - DNA, 25 bp, Homo sapien
gaatgagtccaatgacagcttggtg

SEQ ID NO: 5181542 - DNA, 25 bp, Homo sapien
ctggatggtccttggttcaattacc

SEQ ID NO: 5181543 - DNA, 25 bp, Homo sapien
cgaaggttgtataggaatgagtcca

SEQ ID NO: 5181544 - DNA, 25 bp, Homo sapien
taggtccaagcagttcatcactggg

SEQ ID NO: 5181545 - DNA, 25 bp, Homo sapien
catcactgggatgtctctggaccca

SEQ ID NO: 5181546 - DNA, 25 bp, Homo sapien
aatatgataactttcttgctcttcc

SEQ ID NO: 5181547 - DNA, 25 bp, Homo sapien
tctggacccatcttcaagaatcttc

SEQ ID NO: 5181548 - DNA, 25 bp, Homo sapien
tgtggcaccaatgacacattgaagg

SEQ ID NO: 5181549 - DNA, 25 bp, Homo sapien
ctgatgagcatggagtaatgtggca

SEQ ID NO: 5181550 - DNA, 25 bp, Homo sapien
gagcatggagtaatgtggcaccaat

SEQ ID NO: 5181551 - DNA, 25 bp, Homo sapien
caatgacacattgaaggaactgagg

SEQ ID NO: 5181552 - DNA, 25 bp, Homo sapien
gagcagcagcatattatgcgaagag

SEQ ID NO: 5181553 - DNA, 25 bp, Homo sapien
tggaattgttgtccatcactgaacc

SEQ ID NO: 5181554 - DNA, 25 bp, Homo sapien
caaggtaggaaacaggatattgtcc

SEQ ID NO: 5181555 - DNA, 25 bp, Homo sapien
tgcgaagaggttgcatagaacaagg

SEQ ID NO: 5181556 - DNA, 25 bp, Homo sapien
tctctgagcttcttgtatatgtggg

SEQ ID NO: 5181557 - DNA, 25 bp, Homo sapien
tagtgcaggtctgctagtgacaaac

SEQ ID NO: 5181558 - DNA, 25 bp, Homo sapien
gtgaatacgtttacaaatggtactg

SEQ ID NO: 5181559 - DNA, 25 bp, Homo sapien
cttccatgtggaataatttctgttc

SEQ ID NO: 5181560 - DNA, 25 bp, Homo sapien
gcttgggcagagaattgggctatcc

SEQ ID NO: 5181561 - DNA, 25 bp, Homo sapien
ttgggcagagaattgggctatccat

SEQ ID NO: 5181562 - DNA, 25 bp, Homo sapien
gtgtccctaaaatctgactggcttg

SEQ ID NO: 5181563 - DNA, 25 bp, Homo sapien
gcttttgtgtccctaaaatctgact

SEQ ID NO: 5181564 - DNA, 25 bp, Homo sapien
ctccataactgtcatctttgaacat

SEQ ID NO: 5181565 - DNA, 25 bp, Homo sapien
aaatcttggctgaggatttccaatc

SEQ ID NO: 5181566 - DNA, 25 bp, Homo sapien
ttgggataaatataaccgattgtct

SEQ ID NO: 5181567 - DNA, 25 bp, Homo sapien
taaccgattgtctatatccataaat

SEQ ID NO: 5181568 - DNA, 25 bp, Homo sapien
gaattcataggagttaagtaaggag

SEQ ID NO: 5181569 - DNA, 25 bp, Homo sapien
aagattgtggccaacttgtggattc

SEQ ID NO: 5181570 - DNA, 25 bp, Homo sapien
tactcagtaggtcagggactcttcc

SEQ ID NO: 5181571 - DNA, 25 bp, Homo sapien
catgtgcctgggttgtgcttcagga

SEQ ID NO: 5181572 - DNA, 25 bp, Homo sapien
ccgttagtgcacttgacctttccca

SEQ ID NO: 5181573 - DNA, 25 bp, Homo sapien
caatagtcctgttgcctatccaggc

SEQ ID NO: 5181574 - DNA, 25 bp, Homo sapien
tattttacaagaccgccaatagtcc

SEQ ID NO: 5181575 - DNA, 25 bp, Homo sapien
gaggtgtccattctactggcctgca

SEQ ID NO: 5181576 - DNA, 25 bp, Homo sapien
gcatcttatatggtgtcttagcaaa

SEQ ID NO: 5181577 - DNA, 25 bp, Homo sapien
ttgtaccacatagcagagtttcttt

SEQ ID NO: 5181578 - DNA, 25 bp, Homo sapien
ctttccgcttttctataggtctctc

SEQ ID NO: 5181579 - DNA, 25 bp, Homo sapien
cacatagcagagtttctttccgctt

SEQ ID NO: 5181580 - DNA, 25 bp, Homo sapien
tccgcttttctataggtctctccca

SEQ ID NO: 5181581 - DNA, 25 bp, Homo sapien
gacctggtgggatccacatagttca

SEQ ID NO: 5181582 - DNA, 25 bp, Homo sapien
ttctttataaacaagagctctgatt

SEQ ID NO: 5181583 - DNA, 25 bp, Homo sapien
acagtcaggacctggtgggatccac

SEQ ID NO: 5181584 - DNA, 25 bp, Homo sapien
cttctttataaacaagagctctgat

SEQ ID NO: 5181585 - DNA, 25 bp, Homo sapien
aacaattgtgttcagggaattttca

SEQ ID NO: 5181586 - DNA, 25 bp, Homo sapien
tagatgtaacttatcttaggcagcc

SEQ ID NO: 5181587 - DNA, 25 bp, Homo sapien
caacagctgggtttagaggcagaga

SEQ ID NO: 5181588 - DNA, 25 bp, Homo sapien
gcagccaccaaaggcctagtttaaa

SEQ ID NO: 5181589 - DNA, 25 bp, Homo sapien
aattaattccttctttatcaacagt

SEQ ID NO: 5181590 - DNA, 25 bp, Homo sapien
tctaaattaattccttctttatcaa

SEQ ID NO: 5181591 - DNA, 25 bp, Homo sapien
taaattaattccttctttatcaaca

SEQ ID NO: 5181592 - DNA, 25 bp, Homo sapien
tgtctaaattaattccttctttatc

SEQ ID NO: 5181593 - DNA, 25 bp, Homo sapien
ctggagttcaatatagggagtgaag

SEQ ID NO: 5181594 - DNA, 25 bp, Homo sapien
tgttcctgcaggagagttgctatgt

SEQ ID NO: 5181595 - DNA, 25 bp, Homo sapien
tgtcagggtagcaaatcagcaggtt

SEQ ID NO: 5181596 - DNA, 25 bp, Homo sapien
tgatagggatgagagtatacagcag

SEQ ID NO: 5181597 - DNA, 25 bp, Homo sapien
aaaaacacaggaaacctgatggcca

SEQ ID NO: 5181598 - DNA, 25 bp, Homo sapien
aacacaggaaacctgatggccaatt

SEQ ID NO: 5181599 - DNA, 25 bp, Homo sapien
atattgccgaatttggaaaaacaca

SEQ ID NO: 5181600 - DNA, 25 bp, Homo sapien
taatattgccgaatttggaaaaaca

SEQ ID NO: 5181601 - DNA, 25 bp, Homo sapien
cagggcagcctgagttgccggctgg

SEQ ID NO: 5181602 - DNA, 25 bp, Homo sapien
agttgccggctggtttcacaaccat

SEQ ID NO: 5181603 - DNA, 25 bp, Homo sapien
ctgagttgccggctggtttcacaac

SEQ ID NO: 5181604 - DNA, 25 bp, Homo sapien
gcagcctgagttgccggctggtttc

SEQ ID NO: 5181605 - DNA, 25 bp, Homo sapien
acatggctcttgttcagaacaactg

SEQ ID NO: 5181606 - DNA, 25 bp, Homo sapien
gttcagaacaactgcttggccaact

SEQ ID NO: 5181607 - DNA, 25 bp, Homo sapien
gggcacatggctcttgttcagaaca

SEQ ID NO: 5181608 - DNA, 25 bp, Homo sapien
cttggccaactgtgaacatcacagc

SEQ ID NO: 5181609 - DNA, 25 bp, Homo sapien
gttcccgctgcgatttcgtctttct

SEQ ID NO: 5181610 - DNA, 25 bp, Homo sapien
tttagttcccgctgcgatttcgtct

SEQ ID NO: 5181611 - DNA, 25 bp, Homo sapien
tgttgaagagtttagttcccgctgc

SEQ ID NO: 5181612 - DNA, 25 bp, Homo sapien
gaagagtttagttcccgctgcgatt

SEQ ID NO: 5181613 - DNA, 25 bp, Homo sapien
taattgccatggaagtccacttgga

SEQ ID NO: 5181614 - DNA, 25 bp, Homo sapien
acttggacactttgttccatccaag

SEQ ID NO: 5181615 - DNA, 25 bp, Homo sapien
ccaacagagccatggggtctaagct

SEQ ID NO: 5181616 - DNA, 25 bp, Homo sapien
tttgttccatccaagcccaacagag

SEQ ID NO: 5181617 - DNA, 25 bp, Homo sapien
tccacctgtctagctgtgggaagtt

SEQ ID NO: 5181618 - DNA, 25 bp, Homo sapien
tagtcttttgcagagaaccctcctc

SEQ ID NO: 5181619 - DNA, 25 bp, Homo sapien
tattgcctggtgagtataaatgcac

SEQ ID NO: 5181620 - DNA, 25 bp, Homo sapien
cataggtggtaacacaagtccaaaa

SEQ ID NO: 5181621 - DNA, 25 bp, Homo sapien
aatacattcttgcccctttgttgat

SEQ ID NO: 5181622 - DNA, 25 bp, Homo sapien
tctgaatacattcttgcccctttgt

SEQ ID NO: 5181623 - DNA, 25 bp, Homo sapien
tgaatacattcttgcccctttgttg

SEQ ID NO: 5181624 - DNA, 25 bp, Homo sapien
ttctgaatacattcttgcccctttg

SEQ ID NO: 5181625 - DNA, 25 bp, Homo sapien
tggtgtcggggctgaatcgcttcat

SEQ ID NO: 5181626 - DNA, 25 bp, Homo sapien
ttggtgtcggggctgaatcgcttca

SEQ ID NO: 5181627 - DNA, 25 bp, Homo sapien
cttgacttgagttggtgtcggggct

SEQ ID NO: 5181628 - DNA, 25 bp, Homo sapien
cttgagttggtgtcggggctgaatc

SEQ ID NO: 5181629 - DNA, 25 bp, Homo sapien
agtagggagagcacaagcgccacca

SEQ ID NO: 5181630 - DNA, 25 bp, Homo sapien
catgtaaggagatgacaggaagtag

SEQ ID NO: 5181631 - DNA, 25 bp, Homo sapien
agggagagcacaagcgccaccagtg

SEQ ID NO: 5181632 - DNA, 25 bp, Homo sapien
ttttttcccatgtaaggagatgaca

SEQ ID NO: 5181633 - DNA, 25 bp, Homo sapien
tttgcacattgatctcacaggattt

SEQ ID NO: 5181634 - DNA, 25 bp, Homo sapien
tgcacattgatctcacaggatttca

SEQ ID NO: 5181635 - DNA, 25 bp, Homo sapien
ttgcacattgatctcacaggatttc

SEQ ID NO: 5181636 - DNA, 25 bp, Homo sapien
ctgcagcatgagagaatcccagggg

SEQ ID NO: 5181637 - DNA, 25 bp, Homo sapien
ctcaagtgagatgctgtcagatgac

SEQ ID NO: 5181638 - DNA, 25 bp, Homo sapien
gagatgctgtcagatgacatcagca

SEQ ID NO: 5181639 - DNA, 25 bp, Homo sapien
ggcagcctcaagtgagatgctgtca

SEQ ID NO: 5181640 - DNA, 25 bp, Homo sapien
catttattcactggttcgggtctcc

SEQ ID NO: 5181641 - DNA, 25 bp, Homo sapien
tcatgaaatgagcatcggagccatc

SEQ ID NO: 5181642 - DNA, 25 bp, Homo sapien
ggatcgcctgaggaacttcatgaaa

SEQ ID NO: 5181643 - DNA, 25 bp, Homo sapien
tcgggtctccaattagtcaagggta

SEQ ID NO: 5181644 - DNA, 25 bp, Homo sapien
ttacaaagtgcgaacaataagccct

SEQ ID NO: 5181645 - DNA, 25 bp, Homo sapien
gccctgccaggatatcgaagatgta

SEQ ID NO: 5181646 - DNA, 25 bp, Homo sapien
tagaaccagggaccattcgtctttg

SEQ ID NO: 5181647 - DNA, 25 bp, Homo sapien
ggctccaaggagataggtttagcaa

SEQ ID NO: 5181648 - DNA, 25 bp, Homo sapien
taatgtctagtggtgtttaatacct

SEQ ID NO: 5181649 - DNA, 25 bp, Homo sapien
tttaataatagccagcctaatgctg

SEQ ID NO: 5181650 - DNA, 25 bp, Homo sapien
cctaatgctggtaaagtggtatctt

SEQ ID NO: 5181651 - DNA, 25 bp, Homo sapien
gcatttttctaatgtctagtggtgt

SEQ ID NO: 5181652 - DNA, 25 bp, Homo sapien
tttgatgtccagactcaaatgagtc

SEQ ID NO: 5181653 - DNA, 25 bp, Homo sapien
gactcaaatgagtctgctgtggaag

SEQ ID NO: 5181654 - DNA, 25 bp, Homo sapien
agcactgtatccactcatttgatgt

SEQ ID NO: 5181655 - DNA, 25 bp, Homo sapien
tgtccagcatacctggaaagcactg

SEQ ID NO: 5181656 - DNA, 25 bp, Homo sapien
tattctgcaatagccaggttgttac

SEQ ID NO: 5181657 - DNA, 25 bp, Homo sapien
caatagccaggttgttactagagac

SEQ ID NO: 5181658 - DNA, 25 bp, Homo sapien
agtagttacggccattgagcttctc

SEQ ID NO: 5181659 - DNA, 25 bp, Homo sapien
ttacggccattgagcttctctgtct

SEQ ID NO: 5181660 - DNA, 25 bp, Homo sapien
ccctggtggatgttcctcaggtgac

SEQ ID NO: 5181661 - DNA, 25 bp, Homo sapien
tccctggtggatgttcctcaggtga

SEQ ID NO: 5181662 - DNA, 25 bp, Homo sapien
cctggtggatgttcctcaggtgacc

SEQ ID NO: 5181663 - DNA, 25 bp, Homo sapien
cataggcccctatagttggtttcta

SEQ ID NO: 5181664 - DNA, 25 bp, Homo sapien
catcagtaggacagcggacatggag

SEQ ID NO: 5181665 - DNA, 25 bp, Homo sapien
cctcagaggccttaatgctggaaga

SEQ ID NO: 5181666 - DNA, 25 bp, Homo sapien
tgaaagttacagtgacataggcccc

SEQ ID NO: 5181667 - DNA, 25 bp, Homo sapien
ctggtatgttattctcaggctgaag

SEQ ID NO: 5181668 - DNA, 25 bp, Homo sapien
ggtatgttattctcaggctgaagtg

SEQ ID NO: 5181669 - DNA, 25 bp, Homo sapien
tctttgaggaccagagagtgtgcca

SEQ ID NO: 5181670 - DNA, 25 bp, Homo sapien
ctcaggctgaagtggctgcaatgtg

SEQ ID NO: 5181671 - DNA, 25 bp, Homo sapien
ttcagcaagagaggataccttgcag

SEQ ID NO: 5181672 - DNA, 25 bp, Homo sapien
agcaagagaggataccttgcaggaa

SEQ ID NO: 5181673 - DNA, 25 bp, Homo sapien
aattggttcaaagatgatgggcaag

SEQ ID NO: 5181674 - DNA, 25 bp, Homo sapien
acaaaattggttcaaagatgatggg

SEQ ID NO: 5181675 - DNA, 25 bp, Homo sapien
tcacatagttataactgatagcagc

SEQ ID NO: 5181676 - DNA, 25 bp, Homo sapien
catctaccagtcacatagttataac

SEQ ID NO: 5181677 - DNA, 25 bp, Homo sapien
actgatagcagcttgccaaaactga

SEQ ID NO: 5181678 - DNA, 25 bp, Homo sapien
gccaaaactgacacttaacatgggt

SEQ ID NO: 5181679 - DNA, 25 bp, Homo sapien
cttcagtgaaatatggacatccata

SEQ ID NO: 5181680 - DNA, 25 bp, Homo sapien
tggacatccataagaatggagtgaa

SEQ ID NO: 5181681 - DNA, 25 bp, Homo sapien
tctgaatccctgttaaatcatgtaa

SEQ ID NO: 5181682 - DNA, 25 bp, Homo sapien
taatggtaatttttgctgtcagaag

SEQ ID NO: 5181683 - DNA, 25 bp, Homo sapien
ttataaacccgatcttgaacatcct

SEQ ID NO: 5181684 - DNA, 25 bp, Homo sapien
aattataaacccgatcttgaacatc

SEQ ID NO: 5181685 - DNA, 25 bp, Homo sapien
gaggaattataaacccgatcttgaa

SEQ ID NO: 5181686 - DNA, 25 bp, Homo sapien
tccagaggaattataaacccgatct

SEQ ID NO: 5181687 - DNA, 25 bp, Homo sapien
acagcatattcttccttatccttga

SEQ ID NO: 5181688 - DNA, 25 bp, Homo sapien
tgatacagcatattcttccttatcc

SEQ ID NO: 5181689 - DNA, 25 bp, Homo sapien
gcatttctgatacagcatattcttc

SEQ ID NO: 5181690 - DNA, 25 bp, Homo sapien
ttctgatacagcatattcttcctta

SEQ ID NO: 5181691 - DNA, 25 bp, Homo sapien
ttagtcagagtacgctgtttacctg

SEQ ID NO: 5181692 - DNA, 25 bp, Homo sapien
gctttctgcgtctttagtcagagta

SEQ ID NO: 5181693 - DNA, 25 bp, Homo sapien
tgtgaaatctctgttgctggttaag

SEQ ID NO: 5181694 - DNA, 25 bp, Homo sapien
gctggttaagttgccctggacgtga

SEQ ID NO: 5181695 - DNA, 25 bp, Homo sapien
tatctttgaaggttaggcaactcac

SEQ ID NO: 5181696 - DNA, 25 bp, Homo sapien
tgcctttaggttgatggaaatgctc

SEQ ID NO: 5181697 - DNA, 25 bp, Homo sapien
tgtgggcccacggaatttgaagttg

SEQ ID NO: 5181698 - DNA, 25 bp, Homo sapien
ctacaatttctgtgggcccacggaa

SEQ ID NO: 5181699 - DNA, 25 bp, Homo sapien
tcagctgtgtaccagcccttagttc

SEQ ID NO: 5181700 - DNA, 25 bp, Homo sapien
tttctttggcttgctcagatatctg

SEQ ID NO: 5181701 - DNA, 25 bp, Homo sapien
tatctggtctacactgtgggtgagg

SEQ ID NO: 5181702 - DNA, 25 bp, Homo sapien
tgtctggtccacatctggtctctgg

SEQ ID NO: 5181703 - DNA, 25 bp, Homo sapien
tctgctaataaaggtcctctggtgg

SEQ ID NO: 5181704 - DNA, 25 bp, Homo sapien
cattcagctttacagacagtcgcat

SEQ ID NO: 5181705 - DNA, 25 bp, Homo sapien
cctctggtggcagtaattcttttca

SEQ ID NO: 5181706 - DNA, 25 bp, Homo sapien
aacatgaagtgcgatctgtccttgc

SEQ ID NO: 5181707 - DNA, 25 bp, Homo sapien
aatgcatgctctatgtaggctttca

SEQ ID NO: 5181708 - DNA, 25 bp, Homo sapien
caggcctacagatgagctggatata

SEQ ID NO: 5181709 - DNA, 25 bp, Homo sapien
aatgagttcataatccctggaatgc

SEQ ID NO: 5181710 - DNA, 25 bp, Homo sapien
ggccttgacccttttgcatccaggg

SEQ ID NO: 5181711 - DNA, 25 bp, Homo sapien
atctgtgctccttgatgcttttgga

SEQ ID NO: 5181712 - DNA, 25 bp, Homo sapien
tgaatgagctaaggttatcataatt

SEQ ID NO: 5181713 - DNA, 25 bp, Homo sapien
cataattcatcatctgtgctccttg

SEQ ID NO: 5181714 - DNA, 25 bp, Homo sapien
gatgcttttggattgcatttccata

SEQ ID NO: 5181715 - DNA, 25 bp, Homo sapien
aaacactttgttcatggaatgttca

SEQ ID NO: 5181716 - DNA, 25 bp, Homo sapien
tcatggaatgttcactaaaatcttc

SEQ ID NO: 5181717 - DNA, 25 bp, Homo sapien
cactttgttcatggaatgttcacta

SEQ ID NO: 5181718 - DNA, 25 bp, Homo sapien
tgttcatggaatgttcactaaaatc

SEQ ID NO: 5181719 - DNA, 25 bp, Homo sapien
aacgcttgcccaccaaatgctgtct

SEQ ID NO: 5181720 - DNA, 25 bp, Homo sapien
tactctaaaacgtactctcctctca

SEQ ID NO: 5181721 - DNA, 25 bp, Homo sapien
caattagggtctactccacttccca

SEQ ID NO: 5181722 - DNA, 25 bp, Homo sapien
tgaaggccaattagggtctactcca

SEQ ID NO: 5181723 - DNA, 25 bp, Homo sapien
tgctcccaactggtttacactgcat

SEQ ID NO: 5181724 - DNA, 25 bp, Homo sapien
tcgtcaatggcaccacccacagatt

SEQ ID NO: 5181725 - DNA, 25 bp, Homo sapien
cagacacaggtgctcccaactggtt

SEQ ID NO: 5181726 - DNA, 25 bp, Homo sapien
ccacagattcgtctctgctgtctgc

SEQ ID NO: 5181727 - DNA, 25 bp, Homo sapien
gaattagaaatgtcatgagccttcc

SEQ ID NO: 5181728 - DNA, 25 bp, Homo sapien
aatgacttccaaggcatcatgctgg

SEQ ID NO: 5181729 - DNA, 25 bp, Homo sapien
cctctctggcccaaagaatgacttc

SEQ ID NO: 5181730 - DNA, 25 bp, Homo sapien
tccaggacgagtgtgaatcaaaaac

SEQ ID NO: 5181731 - DNA, 25 bp, Homo sapien
tgtaaactgtcagagggatagggtg

SEQ ID NO: 5181732 - DNA, 25 bp, Homo sapien
gtaaactgtcagagggatagggtgg

SEQ ID NO: 5181733 - DNA, 25 bp, Homo sapien
taaactgtcagagggatagggtggt

SEQ ID NO: 5181734 - DNA, 25 bp, Homo sapien
aactgtcagagggatagggtggtcc

SEQ ID NO: 5181735 - DNA, 25 bp, Homo sapien
gctccaagtccttgtggctgactca

SEQ ID NO: 5181736 - DNA, 25 bp, Homo sapien
ccagaaagcctttatggacatacag

SEQ ID NO: 5181737 - DNA, 25 bp, Homo sapien
cagtggcagcacgttgactttggtg

SEQ ID NO: 5181738 - DNA, 25 bp, Homo sapien
tttggtggaagtctctacagccctc

SEQ ID NO: 5181739 - DNA, 25 bp, Homo sapien
aacttgggccctctttgcaaggcgg

SEQ ID NO: 5181740 - DNA, 25 bp, Homo sapien
ttcccaagggtccatgcacttcatg

SEQ ID NO: 5181741 - DNA, 25 bp, Homo sapien
caaggcgggcacacaagtctgtgac

SEQ ID NO: 5181742 - DNA, 25 bp, Homo sapien
gtgggctcccagcacatcagaagat

SEQ ID NO: 5181743 - DNA, 25 bp, Homo sapien
ctccagtgtgtcatcccgcttctta

SEQ ID NO: 5181744 - DNA, 25 bp, Homo sapien
gcttcttactctgatcattctcacg

SEQ ID NO: 5181745 - DNA, 25 bp, Homo sapien
tgatcattctcacgttcatctctaa

SEQ ID NO: 5181746 - DNA, 25 bp, Homo sapien
cataagaggaacaagctccagtgtg

SEQ ID NO: 5181747 - DNA, 25 bp, Homo sapien
tactctgctggcgagttgtctggga

SEQ ID NO: 5181748 - DNA, 25 bp, Homo sapien
gagtacttccatataaagctcgcag

SEQ ID NO: 5181749 - DNA, 25 bp, Homo sapien
cagaaagtggagaagatctttatta

SEQ ID NO: 5181750 - DNA, 25 bp, Homo sapien
gtgtggctaagcagaaccttcctct

SEQ ID NO: 5181751 - DNA, 25 bp, Homo sapien
tatggtgatttctctgctgcgagca

SEQ ID NO: 5181752 - DNA, 25 bp, Homo sapien
taaaacactggattgaaacggacac

SEQ ID NO: 5181753 - DNA, 25 bp, Homo sapien
tacttagggaaaccagatgctcttc

SEQ ID NO: 5181754 - DNA, 25 bp, Homo sapien
tcagtattccgagaactcctttggg

SEQ ID NO: 5181755 - DNA, 25 bp, Homo sapien
cttaaccattttgaaataccagctt

SEQ ID NO: 5181756 - DNA, 25 bp, Homo sapien
ctggtgtgcggagcgtgcggaacca

SEQ ID NO: 5181757 - DNA, 25 bp, Homo sapien
agcgggatcggcgtgagcagcgtac

SEQ ID NO: 5181758 - DNA, 25 bp, Homo sapien
ggaaccagcggagcgggatcggcgt

SEQ ID NO: 5181759 - DNA, 25 bp, Homo sapien
cgtgagcagcgtactggtttgtgtt

SEQ ID NO: 5181760 - DNA, 25 bp, Homo sapien
ccattgcgcccatattgcgcaaaga

SEQ ID NO: 5181761 - DNA, 25 bp, Homo sapien
ccatattgcgcaaagatattcccac

SEQ ID NO: 5181762 - DNA, 25 bp, Homo sapien
gacacaatccaccactgattgcatc

SEQ ID NO: 5181763 - DNA, 25 bp, Homo sapien
ctgctgaacggtggccccatggtgc

SEQ ID NO: 5181764 - DNA, 25 bp, Homo sapien
gatgctggcacatcgcctgggccat

SEQ ID NO: 5181765 - DNA, 25 bp, Homo sapien
tgatgctggcacatcgcctgggcca

SEQ ID NO: 5181766 - DNA, 25 bp, Homo sapien
tgaagtccaggcatcccctgcccag

SEQ ID NO: 5181767 - DNA, 25 bp, Homo sapien
tccaggcatcccctgcccagcgtag

SEQ ID NO: 5181768 - DNA, 25 bp, Homo sapien
gcatcccctgcccagcgtagtcctg

SEQ ID NO: 5181769 - DNA, 25 bp, Homo sapien
cccctgcccagcgtagtcctggctg

SEQ ID NO: 5181770 - DNA, 25 bp, Homo sapien
caggtggtagctgtgagatggcccc

SEQ ID NO: 5181771 - DNA, 25 bp, Homo sapien
aggctttgagaccaaataattcagg

SEQ ID NO: 5181772 - DNA, 25 bp, Homo sapien
tggaggatgtgcgtgtttctcgatt

SEQ ID NO: 5181773 - DNA, 25 bp, Homo sapien
gcgtgtttctcgattcaggtctttg

SEQ ID NO: 5181774 - DNA, 25 bp, Homo sapien
ttaaggctttgagaccaaataattc

SEQ ID NO: 5181775 - DNA, 25 bp, Homo sapien
tgtgtttcaacgagaggtttcctgt

SEQ ID NO: 5181776 - DNA, 25 bp, Homo sapien
ttgtgtttcaacgagaggtttcctg

SEQ ID NO: 5181777 - DNA, 25 bp, Homo sapien
tgtttcaacgagaggtttcctgtct

SEQ ID NO: 5181778 - DNA, 25 bp, Homo sapien
tttcaacgagaggtttcctgtcttg

SEQ ID NO: 5181779 - DNA, 25 bp, Homo sapien
tgtccatgccatatcaggcatcctg

SEQ ID NO: 5181780 - DNA, 25 bp, Homo sapien
catgccatatcaggcatcctgctgg

SEQ ID NO: 5181781 - DNA, 25 bp, Homo sapien
atttgtccatgccatatcaggcatc

SEQ ID NO: 5181782 - DNA, 25 bp, Homo sapien
tggggaaattctctcaggcacccat

SEQ ID NO: 5181783 - DNA, 25 bp, Homo sapien
atttccctcctccttctctctgctg

SEQ ID NO: 5181784 - DNA, 25 bp, Homo sapien
taatttccctcctccttctctctgc

SEQ ID NO: 5181785 - DNA, 25 bp, Homo sapien
ttccctcctccttctctctgctgac

SEQ ID NO: 5181786 - DNA, 25 bp, Homo sapien
ctaatttccctcctccttctctctg

SEQ ID NO: 5181787 - DNA, 25 bp, Homo sapien
tgggaggaggcgttaaactctgctt

SEQ ID NO: 5181788 - DNA, 25 bp, Homo sapien
ggaggcgttaaactctgcttgtcct

SEQ ID NO: 5181789 - DNA, 25 bp, Homo sapien
gaggaggcgttaaactctgcttgtc

SEQ ID NO: 5181790 - DNA, 25 bp, Homo sapien
ggaggaggcgttaaactctgcttgt

SEQ ID NO: 5181791 - DNA, 25 bp, Homo sapien
tctctgtggctagaagtacaccttt

SEQ ID NO: 5181792 - DNA, 25 bp, Homo sapien
caccctgcttggaatgttgagaaga

SEQ ID NO: 5181793 - DNA, 25 bp, Homo sapien
tctgtggctagaagtacaccttttc

SEQ ID NO: 5181794 - DNA, 25 bp, Homo sapien
tcctctctgtggctagaagtacacc

SEQ ID NO: 5181795 - DNA, 25 bp, Homo sapien
taagtaagactaaaatcagctgcct

SEQ ID NO: 5181796 - DNA, 25 bp, Homo sapien
gacaaatatttgacccatgctgctg

SEQ ID NO: 5181797 - DNA, 25 bp, Homo sapien
tgctgcattgcatctcctaggtttt

SEQ ID NO: 5181798 - DNA, 25 bp, Homo sapien
tgcctggacattcccgataagtaag

SEQ ID NO: 5181799 - DNA, 25 bp, Homo sapien
taaacttgcccagtttgccacggga

SEQ ID NO: 5181800 - DNA, 25 bp, Homo sapien
ttgtcatcatgctgaccaagtcctg

SEQ ID NO: 5181801 - DNA, 25 bp, Homo sapien
tgtctccagttgtctgtcattttag

SEQ ID NO: 5181802 - DNA, 25 bp, Homo sapien
tcctgtttaacaaattgtctccagt

SEQ ID NO: 5181803 - DNA, 25 bp, Homo sapien
tgtaacttaatcatgcccataaaaa

SEQ ID NO: 5181804 - DNA, 25 bp, Homo sapien
ttttttacccacttatagcatgtat

SEQ ID NO: 5181805 - DNA, 25 bp, Homo sapien
tgtctgtttttagatgtgaataact

SEQ ID NO: 5181806 - DNA, 25 bp, Homo sapien
tttacccacttatagcatgtatttt

SEQ ID NO: 5181807 - DNA, 25 bp, Homo sapien
tagtgcactggtgagtgactcaaac

SEQ ID NO: 5181808 - DNA, 25 bp, Homo sapien
aagcttaaagcttatccttagccca

SEQ ID NO: 5181809 - DNA, 25 bp, Homo sapien
tttggtcctactcacataattcagc

SEQ ID NO: 5181810 - DNA, 25 bp, Homo sapien
tcaatgacaaagaattgagtccaag

SEQ ID NO: 5181811 - DNA, 25 bp, Homo sapien
cctcagctgcgaggtttggaccttg

SEQ ID NO: 5181812 - DNA, 25 bp, Homo sapien
gacattaaatcagagcacccacgaa

SEQ ID NO: 5181813 - DNA, 25 bp, Homo sapien
gactcacctcatggagaatcattgg

SEQ ID NO: 5181814 - DNA, 25 bp, Homo sapien
tatggcatgaggtacccatgttggg

SEQ ID NO: 5181815 - DNA, 25 bp, Homo sapien
ccagagtgcttccacaagttgcaaa

SEQ ID NO: 5181816 - DNA, 25 bp, Homo sapien
gttgcaaaactacggagggcgtctg

SEQ ID NO: 5181817 - DNA, 25 bp, Homo sapien
ggcgctggcaacagcactcctgagt

SEQ ID NO: 5181818 - DNA, 25 bp, Homo sapien
gtgcaggtccgtgcctgtaccgtcg

SEQ ID NO: 5181819 - DNA, 25 bp, Homo sapien
gttttcaactacaataagtgcactg

SEQ ID NO: 5181820 - DNA, 25 bp, Homo sapien
ctttcaacgggcaaagaatggaggt

SEQ ID NO: 5181821 - DNA, 25 bp, Homo sapien
tggtcaagtgttctctaggtcaacc

SEQ ID NO: 5181822 - DNA, 25 bp, Homo sapien
gacagtgcttctgacaggaatggaa

SEQ ID NO: 5181823 - DNA, 25 bp, Homo sapien
aatgagacatttcggccgggcccgg

SEQ ID NO: 5181824 - DNA, 25 bp, Homo sapien
aaatgagacatttcggccgggcccg

SEQ ID NO: 5181825 - DNA, 25 bp, Homo sapien
ttccactctttagtgtcattttgac

SEQ ID NO: 5181826 - DNA, 25 bp, Homo sapien
ctttcaagttcccatatacacttgc

SEQ ID NO: 5181827 - DNA, 25 bp, Homo sapien
agttcccatatacacttgccctgtt

SEQ ID NO: 5181828 - DNA, 25 bp, Homo sapien
cccatatacacttgccctgttcttt

SEQ ID NO: 5181829 - DNA, 25 bp, Homo sapien
ttccggtggcttggttttgaggcca

SEQ ID NO: 5181830 - DNA, 25 bp, Homo sapien
tccggtggcttggttttgaggccat

SEQ ID NO: 5181831 - DNA, 25 bp, Homo sapien
tacggtttggttagctctgctacct

SEQ ID NO: 5181832 - DNA, 25 bp, Homo sapien
catgaaagcatacctacggtttggt

SEQ ID NO: 5181833 - DNA, 25 bp, Homo sapien
gcatacctacggtttggttagctct

SEQ ID NO: 5181834 - DNA, 25 bp, Homo sapien
catatttgtcatgaaagcataccta

SEQ ID NO: 5181835 - DNA, 25 bp, Homo sapien
ctcggatcccaaatacccatatgaa

SEQ ID NO: 5181836 - DNA, 25 bp, Homo sapien
tggtgcagactctattgaacaaagc

SEQ ID NO: 5181837 - DNA, 25 bp, Homo sapien
tcttcacagtaactggtgcagactc

SEQ ID NO: 5181838 - DNA, 25 bp, Homo sapien
gagctattgtcacatcccaagaggg

SEQ ID NO: 5181839 - DNA, 25 bp, Homo sapien
tcatgtcagccctgatatcctttcc

SEQ ID NO: 5181840 - DNA, 25 bp, Homo sapien
cctcaaaggagtcagcacccttcat

SEQ ID NO: 5181841 - DNA, 25 bp, Homo sapien
gtcagccctgatatcctttccagag

SEQ ID NO: 5181842 - DNA, 25 bp, Homo sapien
tgaacctcaaaggagtcagcaccct

SEQ ID NO: 5181843 - DNA, 25 bp, Homo sapien
aatggggttttcatatggaaaagat

SEQ ID NO: 5181844 - DNA, 25 bp, Homo sapien
tctgattttgaggggcattcaataa

SEQ ID NO: 5181845 - DNA, 25 bp, Homo sapien
tccatatcatcaaggaaatagagaa

SEQ ID NO: 5181846 - DNA, 25 bp, Homo sapien
gggttttcatatggaaaagatgcag

SEQ ID NO: 5181847 - DNA, 25 bp, Homo sapien
cgtcagttgtagtgaagtaacagcc

SEQ ID NO: 5181848 - DNA, 25 bp, Homo sapien
ctgtgaggtcagcaagtactctcca

SEQ ID NO: 5181849 - DNA, 25 bp, Homo sapien
gtaacagcctgttaggggctgctca

SEQ ID NO: 5181850 - DNA, 25 bp, Homo sapien
ttttcaactgtgaggtcagcaagta

SEQ ID NO: 5181851 - DNA, 25 bp, Homo sapien
atccttgagtgtcttcccatagcaa

SEQ ID NO: 5181852 - DNA, 25 bp, Homo sapien
catccttgaatccccatccttgagt

SEQ ID NO: 5181853 - DNA, 25 bp, Homo sapien
aaaattccatccttgaatccccatc

SEQ ID NO: 5181854 - DNA, 25 bp, Homo sapien
tccttgagtgtcttcccatagcaag

SEQ ID NO: 5181855 - DNA, 25 bp, Homo sapien
cggaacaggggaaattctgtggcct

SEQ ID NO: 5181856 - DNA, 25 bp, Homo sapien
aacaggggaaattctgtggcctcag

SEQ ID NO: 5181857 - DNA, 25 bp, Homo sapien
tacggaacaggggaaattctgtggc

SEQ ID NO: 5181858 - DNA, 25 bp, Homo sapien
cttacggaacaggggaaattctgtg

SEQ ID NO: 5181859 - DNA, 25 bp, Homo sapien
tgagcttgtatttgccagaccgtgc

SEQ ID NO: 5181860 - DNA, 25 bp, Homo sapien
agaccgtgcttctctgtggtacaca

SEQ ID NO: 5181861 - DNA, 25 bp, Homo sapien
cttgtaagttgcgagatggccgcct

SEQ ID NO: 5181862 - DNA, 25 bp, Homo sapien
cgccttagcttctgcgtaggtgagc

SEQ ID NO: 5181863 - DNA, 25 bp, Homo sapien
ttccaaatccacagttgggccctgg

SEQ ID NO: 5181864 - DNA, 25 bp, Homo sapien
cactcctattgagacggattccata

SEQ ID NO: 5181865 - DNA, 25 bp, Homo sapien
cgtgtgggttgtagcaataggcatc

SEQ ID NO: 5181866 - DNA, 25 bp, Homo sapien
tagcaataggcatcccatctttcac

SEQ ID NO: 5181867 - DNA, 25 bp, Homo sapien
ggtataacaatagctccttgaagaa

SEQ ID NO: 5181868 - DNA, 25 bp, Homo sapien
gaacacaactcaatgtcgggtatag

SEQ ID NO: 5181869 - DNA, 25 bp, Homo sapien
tagagtgtagacgaaggaacacaac

SEQ ID NO: 5181870 - DNA, 25 bp, Homo sapien
taacaacctcttagcagcatggaac

SEQ ID NO: 5181871 - DNA, 25 bp, Homo sapien
ggtgaatacgctgaccatacttgag

SEQ ID NO: 5181872 - DNA, 25 bp, Homo sapien
tactcatttgggaagcctggagatt

SEQ ID NO: 5181873 - DNA, 25 bp, Homo sapien
ggatctgtaaagacgccaccacact

SEQ ID NO: 5181874 - DNA, 25 bp, Homo sapien
acttgagtctaatgtgccagtagca

SEQ ID NO: 5181875 - DNA, 25 bp, Homo sapien
cttcccaattctcagcacgggagtt

SEQ ID NO: 5181876 - DNA, 25 bp, Homo sapien
ccttcccaattctcagcacgggagt

SEQ ID NO: 5181877 - DNA, 25 bp, Homo sapien
accccaccagcatagcgcactgtag

SEQ ID NO: 5181878 - DNA, 25 bp, Homo sapien
accagcatagcgcactgtagcccag

SEQ ID NO: 5181879 - DNA, 25 bp, Homo sapien
ctgtactgatgatgtcatctggaag

SEQ ID NO: 5181880 - DNA, 25 bp, Homo sapien
gtcatctggaagctcatctccacag

SEQ ID NO: 5181881 - DNA, 25 bp, Homo sapien
gatgtcatctggaagctcatctcca

SEQ ID NO: 5181882 - DNA, 25 bp, Homo sapien
ctgatgatgtcatctggaagctcat

SEQ ID NO: 5181883 - DNA, 25 bp, Homo sapien
caaatcatagttttggtcctcaatt

SEQ ID NO: 5181884 - DNA, 25 bp, Homo sapien
catctggtgttggttctttcaactt

SEQ ID NO: 5181885 - DNA, 25 bp, Homo sapien
gggacactgtaaagaaacaaatcat

SEQ ID NO: 5181886 - DNA, 25 bp, Homo sapien
tttactttcagggacactgtaaaga

SEQ ID NO: 5181887 - DNA, 25 bp, Homo sapien
agctgtcactgaagcatcacttaga

SEQ ID NO: 5181888 - DNA, 25 bp, Homo sapien
gatttggaaacctccagctgtcact

SEQ ID NO: 5181889 - DNA, 25 bp, Homo sapien
tacaggatccattgcaacatatttg

SEQ ID NO: 5181890 - DNA, 25 bp, Homo sapien
ccttgactggatttggatacaggat

SEQ ID NO: 5181891 - DNA, 25 bp, Homo sapien
aaactgtacatagagcaggattcca

SEQ ID NO: 5181892 - DNA, 25 bp, Homo sapien
ccaacaatagagacaggcttaaata

SEQ ID NO: 5181893 - DNA, 25 bp, Homo sapien
tcaaatgcaaatacatataggtaca

SEQ ID NO: 5181894 - DNA, 25 bp, Homo sapien
tctatgcagtgggattatgagaggt

SEQ ID NO: 5181895 - DNA, 25 bp, Homo sapien
aagtgtcatactttagggtatcgtc

SEQ ID NO: 5181896 - DNA, 25 bp, Homo sapien
gtctgagtcccaacatccctcatta

SEQ ID NO: 5181897 - DNA, 25 bp, Homo sapien
tttagctcaaagtactcagtatccc

SEQ ID NO: 5181898 - DNA, 25 bp, Homo sapien
actgcgcccggtgaattctggtttt

SEQ ID NO: 5181899 - DNA, 25 bp, Homo sapien
atgtgattggacaaatcatgtgatc

SEQ ID NO: 5181900 - DNA, 25 bp, Homo sapien
agaccaagtggggaggcccagtaag

SEQ ID NO: 5181901 - DNA, 25 bp, Homo sapien
ggaggcccagtaaggcctgtctgtc

SEQ ID NO: 5181902 - DNA, 25 bp, Homo sapien
tgatctcatggcaatagaccaagtg

SEQ ID NO: 5181903 - DNA, 25 bp, Homo sapien
ttggggtaggtgctgtcttctacat

SEQ ID NO: 5181904 - DNA, 25 bp, Homo sapien
tggggtaggtgctgtcttctacatc

SEQ ID NO: 5181905 - DNA, 25 bp, Homo sapien
aagatcaggacagggttctctccgc

SEQ ID NO: 5181906 - DNA, 25 bp, Homo sapien
tcgactttcccagctccggctgttt

SEQ ID NO: 5181907 - DNA, 25 bp, Homo sapien
acgctgccagagctcgactttccca

SEQ ID NO: 5181908 - DNA, 25 bp, Homo sapien
gctgtttactcacgcgtgcggcgcg

SEQ ID NO: 5181909 - DNA, 25 bp, Homo sapien
ctgaggcccgaaccggaagaggaga

SEQ ID NO: 5181910 - DNA, 25 bp, Homo sapien
ctaccactgtcaccccgatatttat

SEQ ID NO: 5181911 - DNA, 25 bp, Homo sapien
cactttcccgggcagctttcaacag

SEQ ID NO: 5181912 - DNA, 25 bp, Homo sapien
tccagtgaccgatggaaacagcccc

SEQ ID NO: 5181913 - DNA, 25 bp, Homo sapien
aaagtctccaacagcggcgcgaggg

SEQ ID NO: 5181914 - DNA, 25 bp, Homo sapien
cagagtcaggtaagcgtcagtctgc

SEQ ID NO: 5181915 - DNA, 25 bp, Homo sapien
ggaggcagaagggtcttccaaagtc

SEQ ID NO: 5181916 - DNA, 25 bp, Homo sapien
taagcgtcagtctgccctccatggg

SEQ ID NO: 5181917 - DNA, 25 bp, Homo sapien
tgtacagccgaggaagttttttctc

SEQ ID NO: 5181918 - DNA, 25 bp, Homo sapien
aggtaattttgggattatataagca

SEQ ID NO: 5181919 - DNA, 25 bp, Homo sapien
tcagctccgagttttgactggaaat

SEQ ID NO: 5181920 - DNA, 25 bp, Homo sapien
tgggattatataagcaaaaccccag

SEQ ID NO: 5181921 - DNA, 25 bp, Homo sapien
accccagggcttgtagagcagcact

SEQ ID NO: 5181922 - DNA, 25 bp, Homo sapien
agcaaaccttaaactacaggttctg

SEQ ID NO: 5181923 - DNA, 25 bp, Homo sapien
tgtgtaggtaatgataatctaaaca

SEQ ID NO: 5181924 - DNA, 25 bp, Homo sapien
gaaactaatccagacataacagtac

SEQ ID NO: 5181925 - DNA, 25 bp, Homo sapien
aattttgtagtatcgaagttagagc

SEQ ID NO: 5181926 - DNA, 25 bp, Homo sapien
caattttgaaagcaattctagagca

SEQ ID NO: 5181927 - DNA, 25 bp, Homo sapien
cacccaaagtgctctagtacgtaca

SEQ ID NO: 5181928 - DNA, 25 bp, Homo sapien
tttgccaaccacttcagagggaaat

SEQ ID NO: 5181929 - DNA, 25 bp, Homo sapien
gtctgaattcttaatggtatcattc

SEQ ID NO: 5181930 - DNA, 25 bp, Homo sapien
gaatgcgtctctcctttgttaaaca

SEQ ID NO: 5181931 - DNA, 25 bp, Homo sapien
aacaacagcagaatgcgtctctcct

SEQ ID NO: 5181932 - DNA, 25 bp, Homo sapien
gcgtctctcctttgttaaacagtat

SEQ ID NO: 5181933 - DNA, 25 bp, Homo sapien
ctaatgaatcaattatactggatac

SEQ ID NO: 5181934 - DNA, 25 bp, Homo sapien
ttgaattggggcttgttcaattagc

SEQ ID NO: 5181935 - DNA, 25 bp, Homo sapien
tcataagctgctccgtaatagatgc

SEQ ID NO: 5181936 - DNA, 25 bp, Homo sapien
tgctgaatgaaccactaaaggtatg

SEQ ID NO: 5181937 - DNA, 25 bp, Homo sapien
taatggcattcccatctccagagca

SEQ ID NO: 5181938 - DNA, 25 bp, Homo sapien
agttgctccccgcaaatgtaccttt

SEQ ID NO: 5181939 - DNA, 25 bp, Homo sapien
gaaccttccgatgcagtatccagaa

SEQ ID NO: 5181940 - DNA, 25 bp, Homo sapien
tgaattttaagcttagtgcagaacc

SEQ ID NO: 5181941 - DNA, 25 bp, Homo sapien
aattcttacataaaagaacactcac

SEQ ID NO: 5181942 - DNA, 25 bp, Homo sapien
ttagtgcagaaccttccgatgcagt

SEQ ID NO: 5181943 - DNA, 25 bp, Homo sapien
tagtctcccaagcatctgagactac

SEQ ID NO: 5181944 - DNA, 25 bp, Homo sapien
tcaaatttctggtcaagcaaccctc

SEQ ID NO: 5181945 - DNA, 25 bp, Homo sapien
caaatttctggtcaagcaaccctcc

SEQ ID NO: 5181946 - DNA, 25 bp, Homo sapien
ccttagtctcccaagcatctgagac

SEQ ID NO: 5181947 - DNA, 25 bp, Homo sapien
actgaacattaccacgaagtcttct

SEQ ID NO: 5181948 - DNA, 25 bp, Homo sapien
gaacattaccacgaagtcttctgca

SEQ ID NO: 5181949 - DNA, 25 bp, Homo sapien
acgaagtcttctgcattttaagcaa

SEQ ID NO: 5181950 - DNA, 25 bp, Homo sapien
ccacgaagtcttctgcattttaagc

SEQ ID NO: 5181951 - DNA, 25 bp, Homo sapien
aagtagtttgacaaacaaaggccat

SEQ ID NO: 5181952 - DNA, 25 bp, Homo sapien
taaatagcttctgaagttctgagat

SEQ ID NO: 5181953 - DNA, 25 bp, Homo sapien
caagtagtttgacaaacaaaggcca

SEQ ID NO: 5181954 - DNA, 25 bp, Homo sapien
gcttctgaagttctgagattaattt

SEQ ID NO: 5181955 - DNA, 25 bp, Homo sapien
ccattgggtatatcacagccttcct

SEQ ID NO: 5181956 - DNA, 25 bp, Homo sapien
gaaacatgcacgttgtgtgactcca

SEQ ID NO: 5181957 - DNA, 25 bp, Homo sapien
caaaaaggcagagcgtaaccttgct

SEQ ID NO: 5181958 - DNA, 25 bp, Homo sapien
tacagggttaggttctctggacaca

SEQ ID NO: 5181959 - DNA, 25 bp, Homo sapien
attgatgaaactcccacttcgatgc

SEQ ID NO: 5181960 - DNA, 25 bp, Homo sapien
gcaagagagaattgatgaaactccc

SEQ ID NO: 5181961 - DNA, 25 bp, Homo sapien
gagaattgatgaaactcccacttcg

SEQ ID NO: 5181962 - DNA, 25 bp, Homo sapien
ccactacgaaatccaagttcttcta

SEQ ID NO: 5181963 - DNA, 25 bp, Homo sapien
aaataccaccagacttctagttttg

SEQ ID NO: 5181964 - DNA, 25 bp, Homo sapien
tggatggaactcaaaggctgcatta

SEQ ID NO: 5181965 - DNA, 25 bp, Homo sapien
tgaggtccaagtctcatcagtaaat

SEQ ID NO: 5181966 - DNA, 25 bp, Homo sapien
ctagttttgttaatgctagagtttc

SEQ ID NO: 5181967 - DNA, 25 bp, Homo sapien
catgcacaaacaggctaaaaagtgg

SEQ ID NO: 5181968 - DNA, 25 bp, Homo sapien
gcctattggacccttataatggtag

SEQ ID NO: 5181969 - DNA, 25 bp, Homo sapien
taacatcatcctagtaccagtcaca

SEQ ID NO: 5181970 - DNA, 25 bp, Homo sapien
tggaaaacatgaactcagacaaagc

SEQ ID NO: 5181971 - DNA, 25 bp, Homo sapien
tgccctgaggtgaggcattagaatc

SEQ ID NO: 5181972 - DNA, 25 bp, Homo sapien
tgtactttgaatcagaggcacacaa

SEQ ID NO: 5181973 - DNA, 25 bp, Homo sapien
tacaggagtcataggatttaaacct

SEQ ID NO: 5181974 - DNA, 25 bp, Homo sapien
cctggagatgtagctacatgacacg

SEQ ID NO: 5181975 - DNA, 25 bp, Homo sapien
gtactgaaaaaacatccgtctcttc

SEQ ID NO: 5181976 - DNA, 25 bp, Homo sapien
tctcttctaaccacaacaatgcgct

SEQ ID NO: 5181977 - DNA, 25 bp, Homo sapien
caaggcacctcacataatgtactga

SEQ ID NO: 5181978 - DNA, 25 bp, Homo sapien
tatgcttctaggtcaacaaagcctg

SEQ ID NO: 5181979 - DNA, 25 bp, Homo sapien
attcgaactcaggttcattcgggga

SEQ ID NO: 5181980 - DNA, 25 bp, Homo sapien
ctaaattcgaactcaggttcattcg

SEQ ID NO: 5181981 - DNA, 25 bp, Homo sapien
tcgaactcaggttcattcggggagt

SEQ ID NO: 5181982 - DNA, 25 bp, Homo sapien
aaattcgaactcaggttcattcggg

SEQ ID NO: 5181983 - DNA, 25 bp, Homo sapien
tttgcttagcaaaactcaaggcttc

SEQ ID NO: 5181984 - DNA, 25 bp, Homo sapien
ttgcttagcaaaactcaaggcttct

SEQ ID NO: 5181985 - DNA, 25 bp, Homo sapien
ttttgcttagcaaaactcaaggctt

SEQ ID NO: 5181986 - DNA, 25 bp, Homo sapien
caaagctatcatgaacagcagtgat

SEQ ID NO: 5181987 - DNA, 25 bp, Homo sapien
cagcagtgataagtgtatttgcatg

SEQ ID NO: 5181988 - DNA, 25 bp, Homo sapien
ctgattaacggatgttccaatggct

SEQ ID NO: 5181989 - DNA, 25 bp, Homo sapien
aaaaggaagggctgctgattaacgg

SEQ ID NO: 5181990 - DNA, 25 bp, Homo sapien
cttccagatagcactgacaaccaca

SEQ ID NO: 5181991 - DNA, 25 bp, Homo sapien
ttccagatagcactgacaaccacat

SEQ ID NO: 5181992 - DNA, 25 bp, Homo sapien
tgattcagtaactgacttcaccaag

SEQ ID NO: 5181993 - DNA, 25 bp, Homo sapien
ctgacttcaccaagctaattagctc

SEQ ID NO: 5181994 - DNA, 25 bp, Homo sapien
taactgacttcaccaagctaattag

SEQ ID NO: 5181995 - DNA, 25 bp, Homo sapien
ctgattcagtaactgacttcaccaa

SEQ ID NO: 5181996 - DNA, 25 bp, Homo sapien
cagactttactatgctttccaaaga

SEQ ID NO: 5181997 - DNA, 25 bp, Homo sapien
ctttaataagagagtcaaaacttca

SEQ ID NO: 5181998 - DNA, 25 bp, Homo sapien
ggaaatacttcagactttactatgc

SEQ ID NO: 5181999 - DNA, 25 bp, Homo sapien
caaaacttcagaacctggtttctct

SEQ ID NO: 5182000 - DNA, 25 bp, Homo sapien
atcatatccaattcacttttcttcc

SEQ ID NO: 5182001 - DNA, 25 bp, Homo sapien
aatcagaatttaagggtattgtttg

SEQ ID NO: 5182002 - DNA, 25 bp, Homo sapien
taataccaaagtcattatcttggtt

SEQ ID NO: 5182003 - DNA, 25 bp, Homo sapien
gagcttattttgagatgcccatatc

SEQ ID NO: 5182004 - DNA, 25 bp, Homo sapien
catgcccagtggtaatatactggta

SEQ ID NO: 5182005 - DNA, 25 bp, Homo sapien
cactgtcacctgaaacagattagta

SEQ ID NO: 5182006 - DNA, 25 bp, Homo sapien
gaaaatacattttcacacactgtca

SEQ ID NO: 5182007 - DNA, 25 bp, Homo sapien
tatactggtatgaacatgcactaca

SEQ ID NO: 5182008 - DNA, 25 bp, Homo sapien
tccatattagcaacctgatatgctg

SEQ ID NO: 5182009 - DNA, 25 bp, Homo sapien
aagaatatccatattagcaacctga

SEQ ID NO: 5182010 - DNA, 25 bp, Homo sapien
caacctgatatgctggtgaacctaa

SEQ ID NO: 5182011 - DNA, 25 bp, Homo sapien
aacctgatatgctggtgaacctaat

SEQ ID NO: 5182012 - DNA, 25 bp, Homo sapien
ttttggccaatcttcatcatattac

SEQ ID NO: 5182013 - DNA, 25 bp, Homo sapien
tagggtatgacaaccatgttagtaa

SEQ ID NO: 5182014 - DNA, 25 bp, Homo sapien
aaatgaagtcaatcttctcagttac

SEQ ID NO: 5182015 - DNA, 25 bp, Homo sapien
aacttttggcattacttagggtatg

SEQ ID NO: 5182016 - DNA, 25 bp, Homo sapien
tctcagttacaaagaatagaacatt

SEQ ID NO: 5182017 - DNA, 25 bp, Homo sapien
atctgatacaccacattccaagaaa

SEQ ID NO: 5182018 - DNA, 25 bp, Homo sapien
catctgatacaccacattccaagaa

SEQ ID NO: 5182019 - DNA, 25 bp, Homo sapien
ctttcatctgatacaccacattcca

SEQ ID NO: 5182020 - DNA, 25 bp, Homo sapien
ttcattacataacctttccaagaca

SEQ ID NO: 5182021 - DNA, 25 bp, Homo sapien
attcattacataacctttccaagac

SEQ ID NO: 5182022 - DNA, 25 bp, Homo sapien
ctacaagtgattccaaactgagaaa

SEQ ID NO: 5182023 - DNA, 25 bp, Homo sapien
gctttgcattttgattaataacatt

SEQ ID NO: 5182024 - DNA, 25 bp, Homo sapien
gggtgactataacactccacatttt

SEQ ID NO: 5182025 - DNA, 25 bp, Homo sapien
agtcactgaaagctagtggtgaagt

SEQ ID NO: 5182026 - DNA, 25 bp, Homo sapien
gctagtggtgaagttggaccagaaa

SEQ ID NO: 5182027 - DNA, 25 bp, Homo sapien
aatacgtagcagatttatttcatac

SEQ ID NO: 5182028 - DNA, 25 bp, Homo sapien
gagttacagcactattagcccagag

SEQ ID NO: 5182029 - DNA, 25 bp, Homo sapien
tatagcctagtcaagataaccgctg

SEQ ID NO: 5182030 - DNA, 25 bp, Homo sapien
caacgtggcttaactatgggaatat

SEQ ID NO: 5182031 - DNA, 25 bp, Homo sapien
gctttgaggtaatcaccaacgtggc

SEQ ID NO: 5182032 - DNA, 25 bp, Homo sapien
tatgttctaaggcatcaccttgatt

SEQ ID NO: 5182033 - DNA, 25 bp, Homo sapien
tgtggtttactggtaaagtcaatgc

SEQ ID NO: 5182034 - DNA, 25 bp, Homo sapien
taaagtcaatgcaccatagatggca

SEQ ID NO: 5182035 - DNA, 25 bp, Homo sapien
gatggcactaaaattatgttctaag

SEQ ID NO: 5182036 - DNA, 25 bp, Homo sapien
gctctatataattctgaccaagttc

SEQ ID NO: 5182037 - DNA, 25 bp, Homo sapien
tcatcttccaaactggacattatct

SEQ ID NO: 5182038 - DNA, 25 bp, Homo sapien
caaagcagcacaacgagcaaatgct

SEQ ID NO: 5182039 - DNA, 25 bp, Homo sapien
tggaagaaagttcctcacagcacaa

SEQ ID NO: 5182040 - DNA, 25 bp, Homo sapien
taattctatccacgaacaacaaatt

SEQ ID NO: 5182041 - DNA, 25 bp, Homo sapien
tttaatattatatggtgagaagtca

SEQ ID NO: 5182042 - DNA, 25 bp, Homo sapien
tttaactttgggctgatatttaata

SEQ ID NO: 5182043 - DNA, 25 bp, Homo sapien
gtgagaagtcaatgcaatcaaccat

SEQ ID NO: 5182044 - DNA, 25 bp, Homo sapien
gacagccattatgtcaggagactgg

SEQ ID NO: 5182045 - DNA, 25 bp, Homo sapien
tgttgctactaaaaggaagttgatc

SEQ ID NO: 5182046 - DNA, 25 bp, Homo sapien
cctctgtaaacatctacctagaaga

SEQ ID NO: 5182047 - DNA, 25 bp, Homo sapien
tcaaatttaacagaaaacgaatgct

SEQ ID NO: 5182048 - DNA, 25 bp, Homo sapien
tagtgaagagggtatcagaatgtgc

SEQ ID NO: 5182049 - DNA, 25 bp, Homo sapien
ccagaggtcttgttaaagttgcaaa

SEQ ID NO: 5182050 - DNA, 25 bp, Homo sapien
aataatgccggtgattgagttgcca

SEQ ID NO: 5182051 - DNA, 25 bp, Homo sapien
cagaatgtgcttccttgaagctcag

SEQ ID NO: 5182052 - DNA, 25 bp, Homo sapien
catggtggcggctaattccaggacc

SEQ ID NO: 5182053 - DNA, 25 bp, Homo sapien
tgcttgcttcgattcaaataaaggg

SEQ ID NO: 5182054 - DNA, 25 bp, Homo sapien
caattgttatgagggagaacactag

SEQ ID NO: 5182055 - DNA, 25 bp, Homo sapien
aaacatgtatgtccaccaatcagaa

SEQ ID NO: 5182056 - DNA, 25 bp, Homo sapien
gacaactatatactttaggaacttc

SEQ ID NO: 5182057 - DNA, 25 bp, Homo sapien
ggataaaccaacatcatcactttgg

SEQ ID NO: 5182058 - DNA, 25 bp, Homo sapien
taagttccggtgtagctgaattgca

SEQ ID NO: 5182059 - DNA, 25 bp, Homo sapien
gacaagcaataatttctcccagtag

SEQ ID NO: 5182060 - DNA, 25 bp, Homo sapien
actgagcactctgttttcgaatctg

SEQ ID NO: 5182061 - DNA, 25 bp, Homo sapien
gaatatggtccactggattcctcca

SEQ ID NO: 5182062 - DNA, 25 bp, Homo sapien
tcagaatatggtccactggattcct

SEQ ID NO: 5182063 - DNA, 25 bp, Homo sapien
agtttccaaaccaggcaacaggagc

SEQ ID NO: 5182064 - DNA, 25 bp, Homo sapien
cagtttccaaaccaggcaacaggag

SEQ ID NO: 5182065 - DNA, 25 bp, Homo sapien
caatttcattaaatagaacggtaat

SEQ ID NO: 5182066 - DNA, 25 bp, Homo sapien
atttcattaaatagaacggtaatat

SEQ ID NO: 5182067 - DNA, 25 bp, Homo sapien
acttatcttcacatttagttgtgaa

SEQ ID NO: 5182068 - DNA, 25 bp, Homo sapien
ccacttatcttcacatttagttgtg

SEQ ID NO: 5182069 - DNA, 25 bp, Homo sapien
gccacttatcttcacatttagttgt

SEQ ID NO: 5182070 - DNA, 25 bp, Homo sapien
ttatcttcacatttagttgtgaatt

SEQ ID NO: 5182071 - DNA, 25 bp, Homo sapien
tttggctgctggtttcatattttct

SEQ ID NO: 5182072 - DNA, 25 bp, Homo sapien
ttggctgctggtttcatattttctt

SEQ ID NO: 5182073 - DNA, 25 bp, Homo sapien
tgctggtttcatattttctttttta

SEQ ID NO: 5182074 - DNA, 25 bp, Homo sapien
tttgagaacttctttttgatgatca

SEQ ID NO: 5182075 - DNA, 25 bp, Homo sapien
acacaaagtcagtagacttttcctc

SEQ ID NO: 5182076 - DNA, 25 bp, Homo sapien
ttaaagacgaagattcaagtttcag

SEQ ID NO: 5182077 - DNA, 25 bp, Homo sapien
tttccttctggaggtataaacacaa

SEQ ID NO: 5182078 - DNA, 25 bp, Homo sapien
ccagattattatacatggcaggaat

SEQ ID NO: 5182079 - DNA, 25 bp, Homo sapien
gattattatacatggcaggaatatc

SEQ ID NO: 5182080 - DNA, 25 bp, Homo sapien
ctgactatactgagtaaataaggta

SEQ ID NO: 5182081 - DNA, 25 bp, Homo sapien
tatactgagtaaataaggtatcttg

SEQ ID NO: 5182082 - DNA, 25 bp, Homo sapien
cgtaatcatcatcttagaatcctcc

SEQ ID NO: 5182083 - DNA, 25 bp, Homo sapien
gaacgtcgccttgaagaccgtctaa

SEQ ID NO: 5182084 - DNA, 25 bp, Homo sapien
gaaactgaactactgctgacaacga

SEQ ID NO: 5182085 - DNA, 25 bp, Homo sapien
tccggctcagatctcattaagggct

SEQ ID NO: 5182086 - DNA, 25 bp, Homo sapien
cactcattattcgaaagggaggact

SEQ ID NO: 5182087 - DNA, 25 bp, Homo sapien
gcaaaccctgagatgctcttctagt

SEQ ID NO: 5182088 - DNA, 25 bp, Homo sapien
tatctacaatgtcctgggtaccatc

SEQ ID NO: 5182089 - DNA, 25 bp, Homo sapien
ccttatcttggctttcagtggtaga

SEQ ID NO: 5182090 - DNA, 25 bp, Homo sapien
ttctagtttgataccgtgttcggcc

SEQ ID NO: 5182091 - DNA, 25 bp, Homo sapien
tttcgagtctcctaaacacgggcca

SEQ ID NO: 5182092 - DNA, 25 bp, Homo sapien
gatgggcttacaggtgcttgcacat

SEQ ID NO: 5182093 - DNA, 25 bp, Homo sapien
tattagctcagagatagctgttcca

SEQ ID NO: 5182094 - DNA, 25 bp, Homo sapien
tggtaaatcatcaggaacttgcaac

SEQ ID NO: 5182095 - DNA, 25 bp, Homo sapien
ctctttaaaatgctcgtagacggag

SEQ ID NO: 5182096 - DNA, 25 bp, Homo sapien
agccaaaggagaccagacacagcgt

SEQ ID NO: 5182097 - DNA, 25 bp, Homo sapien
gagaccagacacagcgtgtctgcat

SEQ ID NO: 5182098 - DNA, 25 bp, Homo sapien
taaaatgctcgtagacggagaagcc

SEQ ID NO: 5182099 - DNA, 25 bp, Homo sapien
tgtcatctgccaatcctgcttggta

SEQ ID NO: 5182100 - DNA, 25 bp, Homo sapien
gaagaatgggacctaacaatagagc

SEQ ID NO: 5182101 - DNA, 25 bp, Homo sapien
gatctgcaaaggagacacggcgaac

SEQ ID NO: 5182102 - DNA, 25 bp, Homo sapien
gagcaccgtctatcaatgtcatctg

SEQ ID NO: 5182103 - DNA, 25 bp, Homo sapien
gctcttaaatttagggctacgtgat

SEQ ID NO: 5182104 - DNA, 25 bp, Homo sapien
gagctcttaaatttagggctacgtg

SEQ ID NO: 5182105 - DNA, 25 bp, Homo sapien
ctcttaaatttagggctacgtgatc

SEQ ID NO: 5182106 - DNA, 25 bp, Homo sapien
tcttaaatttagggctacgtgatcc

SEQ ID NO: 5182107 - DNA, 25 bp, Homo sapien
tcagaagctgttacacagaggtcaa

SEQ ID NO: 5182108 - DNA, 25 bp, Homo sapien
tttcagaagctgttacacagaggtc

SEQ ID NO: 5182109 - DNA, 25 bp, Homo sapien
ttcagaagctgttacacagaggtca

SEQ ID NO: 5182110 - DNA, 25 bp, Homo sapien
ggcatggtatggattctttggccat

SEQ ID NO: 5182111 - DNA, 25 bp, Homo sapien
tctgttgggcatggtatggattctt

SEQ ID NO: 5182112 - DNA, 25 bp, Homo sapien
aaaatgatgtcaactggtgccacac

SEQ ID NO: 5182113 - DNA, 25 bp, Homo sapien
cacagttcaccaatggtgggtaaac

SEQ ID NO: 5182114 - DNA, 25 bp, Homo sapien
tagctctaatgagttgtcccaggcc

SEQ ID NO: 5182115 - DNA, 25 bp, Homo sapien
cacttttggagaacggataggaaga

SEQ ID NO: 5182116 - DNA, 25 bp, Homo sapien
tcagatgctgtaagagtactcaaat

SEQ ID NO: 5182117 - DNA, 25 bp, Homo sapien
tgagagccttttttacattggacac

SEQ ID NO: 5182118 - DNA, 25 bp, Homo sapien
gaatctcttctagtccacgagtctt

SEQ ID NO: 5182119 - DNA, 25 bp, Homo sapien
aatctcttctagtccacgagtcttc

SEQ ID NO: 5182120 - DNA, 25 bp, Homo sapien
atctcttctagtccacgagtcttca

SEQ ID NO: 5182121 - DNA, 25 bp, Homo sapien
tctcttctagtccacgagtcttcac

SEQ ID NO: 5182122 - DNA, 25 bp, Homo sapien
gctgaagagcaagagcactaatctg

SEQ ID NO: 5182123 - DNA, 25 bp, Homo sapien
tttctaaagcaacaggatcaattat

SEQ ID NO: 5182124 - DNA, 25 bp, Homo sapien
aacttagtttctcgtgcatttcaaa

SEQ ID NO: 5182125 - DNA, 25 bp, Homo sapien
ttttggataatggaatttctaaagc

SEQ ID NO: 5182126 - DNA, 25 bp, Homo sapien
ttcatgggatggtgatctccaacgt

SEQ ID NO: 5182127 - DNA, 25 bp, Homo sapien
caacgtgactgtagattttttatta

SEQ ID NO: 5182128 - DNA, 25 bp, Homo sapien
taaatagaattttcatgggatggtg

SEQ ID NO: 5182129 - DNA, 25 bp, Homo sapien
tggtgatctccaacgtgactgtaga

SEQ ID NO: 5182130 - DNA, 25 bp, Homo sapien
gtctcttctttgaaattgtgctatt

SEQ ID NO: 5182131 - DNA, 25 bp, Homo sapien
gttatcaactttgcaaagagtctct

SEQ ID NO: 5182132 - DNA, 25 bp, Homo sapien
cagaacttgtttcctcaatcaagaa

SEQ ID NO: 5182133 - DNA, 25 bp, Homo sapien
ttgaaatgttatcaactttgcaaag

SEQ ID NO: 5182134 - DNA, 25 bp, Homo sapien
tgaaaaaccacgcatagcagccaag

SEQ ID NO: 5182135 - DNA, 25 bp, Homo sapien
caaggtattcacaataagctgcaga

SEQ ID NO: 5182136 - DNA, 25 bp, Homo sapien
tcaccagaatatgcacgggtttaag

SEQ ID NO: 5182137 - DNA, 25 bp, Homo sapien
tctattgaacagaaccaaggtattc

SEQ ID NO: 5182138 - DNA, 25 bp, Homo sapien
cacaaacgttaaggcacagagtcat

SEQ ID NO: 5182139 - DNA, 25 bp, Homo sapien
gctattactgttcggcttcccaaga

SEQ ID NO: 5182140 - DNA, 25 bp, Homo sapien
tagagatccctgaatatacgagagc

SEQ ID NO: 5182141 - DNA, 25 bp, Homo sapien
tacaaatatgtgcagcaagcccatg

SEQ ID NO: 5182142 - DNA, 25 bp, Homo sapien
tactacatgacaatcctgtatgcca

SEQ ID NO: 5182143 - DNA, 25 bp, Homo sapien
catgacaatcctgtatgccactagt

SEQ ID NO: 5182144 - DNA, 25 bp, Homo sapien
aatatgcataagacaattaagacac

SEQ ID NO: 5182145 - DNA, 25 bp, Homo sapien
aaaaagatactacatgacaatcctg

SEQ ID NO: 5182146 - DNA, 25 bp, Homo sapien
tccatgggcaatgttagaattaaac

SEQ ID NO: 5182147 - DNA, 25 bp, Homo sapien
aactgctgttttatagcctcctagg

SEQ ID NO: 5182148 - DNA, 25 bp, Homo sapien
gcctcctaggctgaatgacaaatta

SEQ ID NO: 5182149 - DNA, 25 bp, Homo sapien
gaatatgagatgaaacctaggcctt

SEQ ID NO: 5182150 - DNA, 25 bp, Homo sapien
tacaaggtctttctaatggcttagg

SEQ ID NO: 5182151 - DNA, 25 bp, Homo sapien
taatgacagggcatatctgctagac

SEQ ID NO: 5182152 - DNA, 25 bp, Homo sapien
cagaggtccgcagtataatgacagg

SEQ ID NO: 5182153 - DNA, 25 bp, Homo sapien
taccagcgcagttcacaggcatctg

SEQ ID NO: 5182154 - DNA, 25 bp, Homo sapien
ttagtgctttcagggtagttcttac

SEQ ID NO: 5182155 - DNA, 25 bp, Homo sapien
tattaactggacatcagaaagcacg

SEQ ID NO: 5182156 - DNA, 25 bp, Homo sapien
tttaacggctacttgcaaagagcaa

SEQ ID NO: 5182157 - DNA, 25 bp, Homo sapien
gattaggaccacatcggaaaattta

SEQ ID NO: 5182158 - DNA, 25 bp, Homo sapien
cggtatttacagcttaccataacac

SEQ ID NO: 5182159 - DNA, 25 bp, Homo sapien
cagcttaccataacacatttggttt

SEQ ID NO: 5182160 - DNA, 25 bp, Homo sapien
tattccaacggtatttacagcttac

SEQ ID NO: 5182161 - DNA, 25 bp, Homo sapien
agatgaacggttatcttttattcca

SEQ ID NO: 5182162 - DNA, 25 bp, Homo sapien
acaagtagagtacaaaagttagagt

SEQ ID NO: 5182163 - DNA, 25 bp, Homo sapien
caagtagagtacaaaagttagagtt

SEQ ID NO: 5182164 - DNA, 25 bp, Homo sapien
attctcttcaactcatcacttctca

SEQ ID NO: 5182165 - DNA, 25 bp, Homo sapien
aagcttgctgcccagtaaattcagc

SEQ ID NO: 5182166 - DNA, 25 bp, Homo sapien
caattataaattggcacactgtggc

SEQ ID NO: 5182167 - DNA, 25 bp, Homo sapien
caacttctatcagcatataagcttg

SEQ ID NO: 5182168 - DNA, 25 bp, Homo sapien
cagtcaggtctatctacaggaggta

SEQ ID NO: 5182169 - DNA, 25 bp, Homo sapien
tcaaggtcccttaacatcatggcaa

SEQ ID NO: 5182170 - DNA, 25 bp, Homo sapien
aacaggtggcatgctagtttaccaa

SEQ ID NO: 5182171 - DNA, 25 bp, Homo sapien
cacgtaagtaaaatcaggagaagcc

SEQ ID NO: 5182172 - DNA, 25 bp, Homo sapien
catctgcttgtgcttgttggtccaa

SEQ ID NO: 5182173 - DNA, 25 bp, Homo sapien
tatctccactaccacgtaggctgca

SEQ ID NO: 5182174 - DNA, 25 bp, Homo sapien
ccaacgatactagggaagtcctttg

SEQ ID NO: 5182175 - DNA, 25 bp, Homo sapien
ggcaatcaatatccaatgttctaat

SEQ ID NO: 5182176 - DNA, 25 bp, Homo sapien
caatgtttcggtttagactctccac

SEQ ID NO: 5182177 - DNA, 25 bp, Homo sapien
aggactggcaggaccggaatgctcc

SEQ ID NO: 5182178 - DNA, 25 bp, Homo sapien
tgatgaaggctggatgtatggcact

SEQ ID NO: 5182179 - DNA, 25 bp, Homo sapien
ctgttacctaagttctcaagctgcc

SEQ ID NO: 5182180 - DNA, 25 bp, Homo sapien
caccagtggtttatgaaggacccaa

SEQ ID NO: 5182181 - DNA, 25 bp, Homo sapien
ggtgcatggcgtcctttacttttga

SEQ ID NO: 5182182 - DNA, 25 bp, Homo sapien
tgagtaatgctgctacggacatgga

SEQ ID NO: 5182183 - DNA, 25 bp, Homo sapien
ctgggccatagggtaatgctgtatt

SEQ ID NO: 5182184 - DNA, 25 bp, Homo sapien
aaatctagaagtataaaagtctggc

SEQ ID NO: 5182185 - DNA, 25 bp, Homo sapien
tacaggtgtatatgccattctaggc

SEQ ID NO: 5182186 - DNA, 25 bp, Homo sapien
tagaagtataaaagtctggccaatt

SEQ ID NO: 5182187 - DNA, 25 bp, Homo sapien
gactacaggtgtatatgccattcta

SEQ ID NO: 5182188 - DNA, 25 bp, Homo sapien
tgcagtcctcaagggtttcagggca

SEQ ID NO: 5182189 - DNA, 25 bp, Homo sapien
tgaggaacaccacaggtctctcttg

SEQ ID NO: 5182190 - DNA, 25 bp, Homo sapien
tctcagtgtgattgaagctcatgcc

SEQ ID NO: 5182191 - DNA, 25 bp, Homo sapien
cttgacattgagagactagcggtaa

SEQ ID NO: 5182192 - DNA, 25 bp, Homo sapien
tttgctttgtctgagggcctacagt

SEQ ID NO: 5182193 - DNA, 25 bp, Homo sapien
caagaggcagagcatagaggatagc

SEQ ID NO: 5182194 - DNA, 25 bp, Homo sapien
tcgccatgatagtgatataagagcc

SEQ ID NO: 5182195 - DNA, 25 bp, Homo sapien
taccgaggttgaggatttatcatga

SEQ ID NO: 5182196 - DNA, 25 bp, Homo sapien
tcctaaatctcccacgtttccaaga

SEQ ID NO: 5182197 - DNA, 25 bp, Homo sapien
ctgtccaaggaccccacgttgagaa

SEQ ID NO: 5182198 - DNA, 25 bp, Homo sapien
tccaaggaccccacgttgagaatca

SEQ ID NO: 5182199 - DNA, 25 bp, Homo sapien
aatctcccacgtttccaagaatgac

SEQ ID NO: 5182200 - DNA, 25 bp, Homo sapien
ggatgctttctcatcgcacaggtgt

SEQ ID NO: 5182201 - DNA, 25 bp, Homo sapien
ttagctgtcactcccgagatggagc

SEQ ID NO: 5182202 - DNA, 25 bp, Homo sapien
cgcacaggtgttatacaaagaaaac

SEQ ID NO: 5182203 - DNA, 25 bp, Homo sapien
catgggcaagggaactcctttagct

SEQ ID NO: 5182204 - DNA, 25 bp, Homo sapien
gcatataacttctggctccttggac

SEQ ID NO: 5182205 - DNA, 25 bp, Homo sapien
catataacttctggctccttggacg

SEQ ID NO: 5182206 - DNA, 25 bp, Homo sapien
atataacttctggctccttggacga

SEQ ID NO: 5182207 - DNA, 25 bp, Homo sapien
tataacttctggctccttggacgac

SEQ ID NO: 5182208 - DNA, 25 bp, Homo sapien
tcagtttgtgtggataacaccactg

SEQ ID NO: 5182209 - DNA, 25 bp, Homo sapien
accactgagttctaactgtctcaaa

SEQ ID NO: 5182210 - DNA, 25 bp, Homo sapien
tttcagtttgtgtggataacaccac

SEQ ID NO: 5182211 - DNA, 25 bp, Homo sapien
ccactgagttctaactgtctcaaat

SEQ ID NO: 5182212 - DNA, 25 bp, Homo sapien
caacaccgagttctaacagtctcaa

SEQ ID NO: 5182213 - DNA, 25 bp, Homo sapien
tccatttgtgtggataacaacaccg

SEQ ID NO: 5182214 - DNA, 25 bp, Homo sapien
gcatataacttctggctccttggat

SEQ ID NO: 5182215 - DNA, 25 bp, Homo sapien
aaggatatactttcccatttctata

SEQ ID NO: 5182216 - DNA, 25 bp, Homo sapien
tcatcatacaggtgctatacaaaga

SEQ ID NO: 5182217 - DNA, 25 bp, Homo sapien
tctttaggctcaaacaaacaggttg

SEQ ID NO: 5182218 - DNA, 25 bp, Homo sapien
ttgaagatgtctttaggctcaaaca

SEQ ID NO: 5182219 - DNA, 25 bp, Homo sapien
caggttgagtctaaaagcttctggt

SEQ ID NO: 5182220 - DNA, 25 bp, Homo sapien
caaatatccctatgtgattaacagc

SEQ ID NO: 5182221 - DNA, 25 bp, Homo sapien
gccttaaacatcgttgttctcaatg

SEQ ID NO: 5182222 - DNA, 25 bp, Homo sapien
tgtgtctccatatacacaatgtttg

SEQ ID NO: 5182223 - DNA, 25 bp, Homo sapien
aaggtgggaaaagactaattgctct

SEQ ID NO: 5182224 - DNA, 25 bp, Homo sapien
caactcatcccaataaaaaatttga

SEQ ID NO: 5182225 - DNA, 25 bp, Homo sapien
atcaactcatcccaataaaaaattt

SEQ ID NO: 5182226 - DNA, 25 bp, Homo sapien
tcaactcatcccaataaaaaatttg

SEQ ID NO: 5182227 - DNA, 25 bp, Homo sapien
aatcaactcatcccaataaaaaatt

SEQ ID NO: 5182228 - DNA, 25 bp, Homo sapien
tcttgtgtcatacaggtgttgtata

SEQ ID NO: 5182229 - DNA, 25 bp, Homo sapien
agaggttgacttgttgaatctgtct

SEQ ID NO: 5182230 - DNA, 25 bp, Homo sapien
tctgacgtctgtagttttataccag

SEQ ID NO: 5182231 - DNA, 25 bp, Homo sapien
ttccccacaaggtagatgaaagggc

SEQ ID NO: 5182232 - DNA, 25 bp, Homo sapien
gaacctctatacttgaccatctcta

SEQ ID NO: 5182233 - DNA, 25 bp, Homo sapien
taaatatttgttagaccgtaagaca

SEQ ID NO: 5182234 - DNA, 25 bp, Homo sapien
gacaaggaccaaattgccatattgc

SEQ ID NO: 5182235 - DNA, 25 bp, Homo sapien
ggaaaatagacaatgccacatattg

SEQ ID NO: 5182236 - DNA, 25 bp, Homo sapien
taaatgtcctctgggtactttcttg

SEQ ID NO: 5182237 - DNA, 25 bp, Homo sapien
atgtcctctgggtactttcttgtat

SEQ ID NO: 5182238 - DNA, 25 bp, Homo sapien
ctgcctcctcacatataaccccttc

SEQ ID NO: 5182239 - DNA, 25 bp, Homo sapien
tgcctcctcacatataaccccttcc

SEQ ID NO: 5182240 - DNA, 25 bp, Homo sapien
acaagattcctcagcgttatataac

SEQ ID NO: 5182241 - DNA, 25 bp, Homo sapien
tttccgattatacttgaacattttc

SEQ ID NO: 5182242 - DNA, 25 bp, Homo sapien
tccagaattagcattgtagagttca

SEQ ID NO: 5182243 - DNA, 25 bp, Homo sapien
ttttcagtgacttgactagatttga

SEQ ID NO: 5182244 - DNA, 25 bp, Homo sapien
ctgggaacatcgtctagtgtcttgt

SEQ ID NO: 5182245 - DNA, 25 bp, Homo sapien
ttttatataaagaggatgtctcacc

SEQ ID NO: 5182246 - DNA, 25 bp, Homo sapien
ccaggaacggctatcggaaagacac

SEQ ID NO: 5182247 - DNA, 25 bp, Homo sapien
tgtgttaacactgtcctgattctga

SEQ ID NO: 5182248 - DNA, 25 bp, Homo sapien
tggtataccacaatcttagaagaaa

SEQ ID NO: 5182249 - DNA, 25 bp, Homo sapien
tggaaagatccatgttgtataactg

SEQ ID NO: 5182250 - DNA, 25 bp, Homo sapien
cttctcatcctgtgttagtatggta

SEQ ID NO: 5182251 - DNA, 25 bp, Homo sapien
gcagtaacatgtgttgtcttgctcc

SEQ ID NO: 5182252 - DNA, 25 bp, Homo sapien
cagaagaatttcagctcggtatatt

SEQ ID NO: 5182253 - DNA, 25 bp, Homo sapien
tctccagagaccatttgaaataact

SEQ ID NO: 5182254 - DNA, 25 bp, Homo sapien
cgccagaaatactgcgtgtaaaaga

SEQ ID NO: 5182255 - DNA, 25 bp, Homo sapien
tacagttgttcaagacacgccagaa

SEQ ID NO: 5182256 - DNA, 25 bp, Homo sapien
ttattaaatgtaaggcacagcccac

SEQ ID NO: 5182257 - DNA, 25 bp, Homo sapien
gaaatgtgtgcccaattcatctctg

SEQ ID NO: 5182258 - DNA, 25 bp, Homo sapien
gactcatctgttacttcgttggtgg

SEQ ID NO: 5182259 - DNA, 25 bp, Homo sapien
cacccatggcaaggttcatggcgaa

SEQ ID NO: 5182260 - DNA, 25 bp, Homo sapien
cacacaggttaaatacaaggctgac

SEQ ID NO: 5182261 - DNA, 25 bp, Homo sapien
tgaaggagtctctgatcatgaatca

SEQ ID NO: 5182262 - DNA, 25 bp, Homo sapien
cacaaacccgtgactgacatgaagg

SEQ ID NO: 5182263 - DNA, 25 bp, Homo sapien
cagttctgtaagctcagtcatttgc

SEQ ID NO: 5182264 - DNA, 25 bp, Homo sapien
aatacaatccaaaagacagccagct

SEQ ID NO: 5182265 - DNA, 25 bp, Homo sapien
aaaatacaatccaaaagacagccag

SEQ ID NO: 5182266 - DNA, 25 bp, Homo sapien
aagggcaagacaccaaaatacaatc

SEQ ID NO: 5182267 - DNA, 25 bp, Homo sapien
gaaaagggcaagacaccaaaataca

SEQ ID NO: 5182268 - DNA, 25 bp, Homo sapien
tatcacacaatcgagggcaaggctg

SEQ ID NO: 5182269 - DNA, 25 bp, Homo sapien
taatatcttacagcggtggccacac

SEQ ID NO: 5182270 - DNA, 25 bp, Homo sapien
gacatgttgggacttaaactgagcc

SEQ ID NO: 5182271 - DNA, 25 bp, Homo sapien
aaggtaattgcagtaagcccgaggc

SEQ ID NO: 5182272 - DNA, 25 bp, Homo sapien
gatccattgccgctatgtgggagac

SEQ ID NO: 5182273 - DNA, 25 bp, Homo sapien
caaatcagacttcttcaagatgcag

SEQ ID NO: 5182274 - DNA, 25 bp, Homo sapien
caccagtgatgtaagcatctcgtag

SEQ ID NO: 5182275 - DNA, 25 bp, Homo sapien
tagtcttaccaagacgcaggcttgc

SEQ ID NO: 5182276 - DNA, 25 bp, Homo sapien
gaaatctttgccctaacatgaaagg

SEQ ID NO: 5182277 - DNA, 25 bp, Homo sapien
tacagagaggtttgggacaaggata

SEQ ID NO: 5182278 - DNA, 25 bp, Homo sapien
ttaaaagttgcatagtgggactagc

SEQ ID NO: 5182279 - DNA, 25 bp, Homo sapien
ttaatctcgctagagcaaatgctct

SEQ ID NO: 5182280 - DNA, 25 bp, Homo sapien
tgagaaaactcccacgtctgttctg

SEQ ID NO: 5182281 - DNA, 25 bp, Homo sapien
agcttctgacatacagaaccctgtg

SEQ ID NO: 5182282 - DNA, 25 bp, Homo sapien
gaaaactcccacgtctgttctgtag

SEQ ID NO: 5182283 - DNA, 25 bp, Homo sapien
tgttctgtagcttctgacatacaga

SEQ ID NO: 5182284 - DNA, 25 bp, Homo sapien
tcagtacaaggctgactatgctgac

SEQ ID NO: 5182285 - DNA, 25 bp, Homo sapien
tcatgaagggcattggatggctccc

SEQ ID NO: 5182286 - DNA, 25 bp, Homo sapien
cacacttaggattcttgggaagttc

SEQ ID NO: 5182287 - DNA, 25 bp, Homo sapien
tcctcttttgcagaatcagtacaag

SEQ ID NO: 5182288 - DNA, 25 bp, Homo sapien
tgctgccagtgttcccccgaggcat

SEQ ID NO: 5182289 - DNA, 25 bp, Homo sapien
caggccttaagcctgtttgttcttg

SEQ ID NO: 5182290 - DNA, 25 bp, Homo sapien
tcagtgctgccagtgttcccccgag

SEQ ID NO: 5182291 - DNA, 25 bp, Homo sapien
gccttaagcctgtttgttcttgtcc

SEQ ID NO: 5182292 - DNA, 25 bp, Homo sapien
aaagcaggacatcaattttaactcc

SEQ ID NO: 5182293 - DNA, 25 bp, Homo sapien
ctgaaagcaggacatcaattttaac

SEQ ID NO: 5182294 - DNA, 25 bp, Homo sapien
ttgaagacgttttgacagtttcctc

SEQ ID NO: 5182295 - DNA, 25 bp, Homo sapien
tgtttctgaaagcaggacatcaatt

SEQ ID NO: 5182296 - DNA, 25 bp, Homo sapien
taatccgtggttgcttccagaaaca

SEQ ID NO: 5182297 - DNA, 25 bp, Homo sapien
caataaatagtatgcctcggtagtc

SEQ ID NO: 5182298 - DNA, 25 bp, Homo sapien
tagtggacgccaaacaactgtcgca

SEQ ID NO: 5182299 - DNA, 25 bp, Homo sapien
caatgatctttcagtgcgagctggc

SEQ ID NO: 5182300 - DNA, 25 bp, Homo sapien
tttggtatccaaagcaatagctgcc

SEQ ID NO: 5182301 - DNA, 25 bp, Homo sapien
tctgccgtgcagatctgagagccca

SEQ ID NO: 5182302 - DNA, 25 bp, Homo sapien
aagtgacttagatgtgtgcccctca

SEQ ID NO: 5182303 - DNA, 25 bp, Homo sapien
tctttgcacttagggagcagtctgg

SEQ ID NO: 5182304 - DNA, 25 bp, Homo sapien
caaaccatgatgtaatgaagcacga

SEQ ID NO: 5182305 - DNA, 25 bp, Homo sapien
caaataggtccctggcattagttca

SEQ ID NO: 5182306 - DNA, 25 bp, Homo sapien
tagttcatgccgagactagaaaact

SEQ ID NO: 5182307 - DNA, 25 bp, Homo sapien
tttgttgcttgcataagagtagcct

SEQ ID NO: 5182308 - DNA, 25 bp, Homo sapien
tcagcacagatattcgaatgtttcc

SEQ ID NO: 5182309 - DNA, 25 bp, Homo sapien
ctcaggacattgtgtagcctatggt

SEQ ID NO: 5182310 - DNA, 25 bp, Homo sapien
tatccttcgttataaccacaatgag

SEQ ID NO: 5182311 - DNA, 25 bp, Homo sapien
tggcattgatttatgttccagacaa

SEQ ID NO: 5182312 - DNA, 25 bp, Homo sapien
acacgcttttctctattaacatttt

SEQ ID NO: 5182313 - DNA, 25 bp, Homo sapien
ttcttatcactgtctccgacacgct

SEQ ID NO: 5182314 - DNA, 25 bp, Homo sapien
atcactgtctccgacacgcttttct

SEQ ID NO: 5182315 - DNA, 25 bp, Homo sapien
ttatcactgtctccgacacgctttt

SEQ ID NO: 5182316 - DNA, 25 bp, Homo sapien
ggcatattgggattctatgaagtct

SEQ ID NO: 5182317 - DNA, 25 bp, Homo sapien
tggaatggctgaaagttttattgca

SEQ ID NO: 5182318 - DNA, 25 bp, Homo sapien
tccacaataacattcttgtagtagg

SEQ ID NO: 5182319 - DNA, 25 bp, Homo sapien
gtaaacttctgatgattcttgtgca

SEQ ID NO: 5182320 - DNA, 25 bp, Homo sapien
tacttatagtagataagatctattc

SEQ ID NO: 5182321 - DNA, 25 bp, Homo sapien
tattaaaacgtacattgctgtaaga

SEQ ID NO: 5182322 - DNA, 25 bp, Homo sapien
tgtggagcttccaaatcttgtaaac

SEQ ID NO: 5182323 - DNA, 25 bp, Homo sapien
cattgctgtaagactgatggtactt

SEQ ID NO: 5182324 - DNA, 25 bp, Homo sapien
tttccgtaatagacccattgctccg

SEQ ID NO: 5182325 - DNA, 25 bp, Homo sapien
tcgcagccctttgtcttaggagacc

SEQ ID NO: 5182326 - DNA, 25 bp, Homo sapien
atcaccagggtgaggagctcggtcc

SEQ ID NO: 5182327 - DNA, 25 bp, Homo sapien
aatacttcggaatgtgggcggctcg

SEQ ID NO: 5182328 - DNA, 25 bp, Homo sapien
gggacgcaacagcaagcagtcggaa

SEQ ID NO: 5182329 - DNA, 25 bp, Homo sapien
aagcagtcggaagccatctgcccca

SEQ ID NO: 5182330 - DNA, 25 bp, Homo sapien
gggtactcaattatatgtttacatt

SEQ ID NO: 5182331 - DNA, 25 bp, Homo sapien
tatggcgcagtggagaaaattcgag

SEQ ID NO: 5182332 - DNA, 25 bp, Homo sapien
ttaaagagtcatgacgtggaacttt

SEQ ID NO: 5182333 - DNA, 25 bp, Homo sapien
tcttaaagagtcatgacgtggaact

SEQ ID NO: 5182334 - DNA, 25 bp, Homo sapien
tgtcttaaagagtcatgacgtggaa

SEQ ID NO: 5182335 - DNA, 25 bp, Homo sapien
aatgtcttaaagagtcatgacgtgg

SEQ ID NO: 5182336 - DNA, 25 bp, Homo sapien
taagacccaggatgtccgttaagaa

SEQ ID NO: 5182337 - DNA, 25 bp, Homo sapien
cacagtttatcatgaggcaaggtta

SEQ ID NO: 5182338 - DNA, 25 bp, Homo sapien
aattctcaagggtataatgtcactc

SEQ ID NO: 5182339 - DNA, 25 bp, Homo sapien
ttatttttgccaagcacaccaagca

SEQ ID NO: 5182340 - DNA, 25 bp, Homo sapien
catgactcccgacataggctttgag

SEQ ID NO: 5182341 - DNA, 25 bp, Homo sapien
tcagcatagccgagatcattaccct

SEQ ID NO: 5182342 - DNA, 25 bp, Homo sapien
gctcggaagagtaggaaccgcttgt

SEQ ID NO: 5182343 - DNA, 25 bp, Homo sapien
tttagagtcagcgaatgaggcacag

SEQ ID NO: 5182344 - DNA, 25 bp, Homo sapien
tacaatgcgatcttctgacttaatg

SEQ ID NO: 5182345 - DNA, 25 bp, Homo sapien
tggtgcctggctacatgctcttcta

SEQ ID NO: 5182346 - DNA, 25 bp, Homo sapien
attttattagttggaggtctgtgcc

SEQ ID NO: 5182347 - DNA, 25 bp, Homo sapien
tgtcttagactccagagtagcagag

SEQ ID NO: 5182348 - DNA, 25 bp, Homo sapien
actccaaaaaatcaccgaatccagg

SEQ ID NO: 5182349 - DNA, 25 bp, Homo sapien
tcagagaagagttgacggagataga

SEQ ID NO: 5182350 - DNA, 25 bp, Homo sapien
gacggagatagaggcacaaaaacac

SEQ ID NO: 5182351 - DNA, 25 bp, Homo sapien
taaagcagcgttaagacagaaatgt

SEQ ID NO: 5182352 - DNA, 25 bp, Homo sapien
aatactttcatgtgctctccatttc

SEQ ID NO: 5182353 - DNA, 25 bp, Homo sapien
tgaaatactttcatgtgctctccat

SEQ ID NO: 5182354 - DNA, 25 bp, Homo sapien
tttcatgtgctctccatttcaccat

SEQ ID NO: 5182355 - DNA, 25 bp, Homo sapien
tactttcatgtgctctccatttcac

SEQ ID NO: 5182356 - DNA, 25 bp, Homo sapien
gtgataggcaaatgaccaaggaatt

SEQ ID NO: 5182357 - DNA, 25 bp, Homo sapien
tttgtagacctgctccctgcaaggc

SEQ ID NO: 5182358 - DNA, 25 bp, Homo sapien
gaattaaataccacaggacatccga

SEQ ID NO: 5182359 - DNA, 25 bp, Homo sapien
ggacatccgaggcacagaacacgtt

SEQ ID NO: 5182360 - DNA, 25 bp, Homo sapien
gagtggtacttatttgttgctgaaa

SEQ ID NO: 5182361 - DNA, 25 bp, Homo sapien
tgagaaaacaatgaatatggagtgg

SEQ ID NO: 5182362 - DNA, 25 bp, Homo sapien
gctgaaactgggttgaaatgtaatt

SEQ ID NO: 5182363 - DNA, 25 bp, Homo sapien
aaggcctgctcggataggaattcat

SEQ ID NO: 5182364 - DNA, 25 bp, Homo sapien
tacattggtggccatttagcagcca

SEQ ID NO: 5182365 - DNA, 25 bp, Homo sapien
tctgcaagtcaccacttatccactg

SEQ ID NO: 5182366 - DNA, 25 bp, Homo sapien
aaatatggcaccatgacatgagatt

SEQ ID NO: 5182367 - DNA, 25 bp, Homo sapien
cattccccagattgtagatgtagat

SEQ ID NO: 5182368 - DNA, 25 bp, Homo sapien
gtagtcactttggtgggctcattcc

SEQ ID NO: 5182369 - DNA, 25 bp, Homo sapien
gcccgtaactatgggtgcaagttcc

SEQ ID NO: 5182370 - DNA, 25 bp, Homo sapien
ccagcatgcagtgcccgtaactatg

SEQ ID NO: 5182371 - DNA, 25 bp, Homo sapien
ttgggtcatgggtagtcactttggt

SEQ ID NO: 5182372 - DNA, 25 bp, Homo sapien
tccttggggaattggactgaaatca

SEQ ID NO: 5182373 - DNA, 25 bp, Homo sapien
cattgaccatacacagaatgttttt

SEQ ID NO: 5182374 - DNA, 25 bp, Homo sapien
tttttcacattgaccatacacagaa

SEQ ID NO: 5182375 - DNA, 25 bp, Homo sapien
tctctccttggggaattggactgaa

SEQ ID NO: 5182376 - DNA, 25 bp, Homo sapien
atgaacagttcaggcaggatgcagt

SEQ ID NO: 5182377 - DNA, 25 bp, Homo sapien
aatgaacagttcaggcaggatgcag

SEQ ID NO: 5182378 - DNA, 25 bp, Homo sapien
taaaatgaacagttcaggcaggatg

SEQ ID NO: 5182379 - DNA, 25 bp, Homo sapien
aaatgaacagttcaggcaggatgca

SEQ ID NO: 5182380 - DNA, 25 bp, Homo sapien
ccttgactggtggaccagttggcca

SEQ ID NO: 5182381 - DNA, 25 bp, Homo sapien
tctctggaacagaaggtgctctcat

SEQ ID NO: 5182382 - DNA, 25 bp, Homo sapien
caaggattgggacatgtaacccatc

SEQ ID NO: 5182383 - DNA, 25 bp, Homo sapien
atggtaagagcatgcccctccagtc

SEQ ID NO: 5182384 - DNA, 25 bp, Homo sapien
tcttccctctcccacttgtccttta

SEQ ID NO: 5182385 - DNA, 25 bp, Homo sapien
cccacttgtcctttaaaataatcat

SEQ ID NO: 5182386 - DNA, 25 bp, Homo sapien
tcccacttgtcctttaaaataatca

SEQ ID NO: 5182387 - DNA, 25 bp, Homo sapien
ttctcttccctctcccacttgtcct

SEQ ID NO: 5182388 - DNA, 25 bp, Homo sapien
aacaaggccacttaaggaggacaag

SEQ ID NO: 5182389 - DNA, 25 bp, Homo sapien
ggaggacaagaggatataactggac

SEQ ID NO: 5182390 - DNA, 25 bp, Homo sapien
aactggactggttatcatcgttcat

SEQ ID NO: 5182391 - DNA, 25 bp, Homo sapien
gaggatataactggactggttatca

SEQ ID NO: 5182392 - DNA, 25 bp, Homo sapien
tggataggcgtggaaaggcttttct

SEQ ID NO: 5182393 - DNA, 25 bp, Homo sapien
gtgccaatgcatttatggctgtaag

SEQ ID NO: 5182394 - DNA, 25 bp, Homo sapien
tcagcagtctttctcagtgccaatg

SEQ ID NO: 5182395 - DNA, 25 bp, Homo sapien
gctctcggaacaggtctggtggata

SEQ ID NO: 5182396 - DNA, 25 bp, Homo sapien
ctggtgaagtgacacataaagccac

SEQ ID NO: 5182397 - DNA, 25 bp, Homo sapien
ggtgaagtgacacataaagccacac

SEQ ID NO: 5182398 - DNA, 25 bp, Homo sapien
tggtgaagtgacacataaagccaca

SEQ ID NO: 5182399 - DNA, 25 bp, Homo sapien
tactgcagtgctgtactcctggtga

SEQ ID NO: 5182400 - DNA, 25 bp, Homo sapien
aggtactgcagtgctgtactcctgg

SEQ ID NO: 5182401 - DNA, 25 bp, Homo sapien
gcaggctgagatcctccgggctgtg

SEQ ID NO: 5182402 - DNA, 25 bp, Homo sapien
gtgctgtactcctggtgactcagtg

SEQ ID NO: 5182403 - DNA, 25 bp, Homo sapien
tggcagtagttgatggcgggtagtg

SEQ ID NO: 5182404 - DNA, 25 bp, Homo sapien
gactcggtggcagtagttgatggcg

SEQ ID NO: 5182405 - DNA, 25 bp, Homo sapien
ttgactcggtggcagtagttgatgg

SEQ ID NO: 5182406 - DNA, 25 bp, Homo sapien
tcggtggcagtagttgatggcgggt

SEQ ID NO: 5182407 - DNA, 25 bp, Homo sapien
ggcaggcgcagttctcccaaacagg

SEQ ID NO: 5182408 - DNA, 25 bp, Homo sapien
cacaggaattgataaggcaggcgca

SEQ ID NO: 5182409 - DNA, 25 bp, Homo sapien
ggtgctctggattatcacacctcca

SEQ ID NO: 5182410 - DNA, 25 bp, Homo sapien
ttttgccttgaaagaggtgctctgg

SEQ ID NO: 5182411 - DNA, 25 bp, Homo sapien
tggactgcctctggggataacctca

SEQ ID NO: 5182412 - DNA, 25 bp, Homo sapien
agataaaatgccaggtctggactgc

SEQ ID NO: 5182413 - DNA, 25 bp, Homo sapien
ctgtattgggaaggcagataaaatg

SEQ ID NO: 5182414 - DNA, 25 bp, Homo sapien
aaaatgccaggtctggactgcctct

SEQ ID NO: 5182415 - DNA, 25 bp, Homo sapien
agaggccgctttcctagctcagtca

SEQ ID NO: 5182416 - DNA, 25 bp, Homo sapien
acaatacaggcgaaacaggaagcag

SEQ ID NO: 5182417 - DNA, 25 bp, Homo sapien
ctctttgctgggtaggatgctccga

SEQ ID NO: 5182418 - DNA, 25 bp, Homo sapien
gagggaacgctcttcagctgactga

SEQ ID NO: 5182419 - DNA, 25 bp, Homo sapien
aaggctttggacttagtgctccaac

SEQ ID NO: 5182420 - DNA, 25 bp, Homo sapien
gctccaactaattttccatccaata

SEQ ID NO: 5182421 - DNA, 25 bp, Homo sapien
tgagaattggcatttagatcaagta

SEQ ID NO: 5182422 - DNA, 25 bp, Homo sapien
ttggacttagtgctccaactaattt

SEQ ID NO: 5182423 - DNA, 25 bp, Homo sapien
ctcttcttgagttggaaggagccat

SEQ ID NO: 5182424 - DNA, 25 bp, Homo sapien
aatacagacagaggctcttcttgag

SEQ ID NO: 5182425 - DNA, 25 bp, Homo sapien
taaaatacagacagaggctcttctt

SEQ ID NO: 5182426 - DNA, 25 bp, Homo sapien
gctcttcttgagttggaaggagcca

SEQ ID NO: 5182427 - DNA, 25 bp, Homo sapien
tggtaggagatgaccactttgagca

SEQ ID NO: 5182428 - DNA, 25 bp, Homo sapien
caacagcgcactggttgtcagcact

SEQ ID NO: 5182429 - DNA, 25 bp, Homo sapien
tctttgcatttgacccaacagcgca

SEQ ID NO: 5182430 - DNA, 25 bp, Homo sapien
cactaatggatttgttgaggaattc

SEQ ID NO: 5182431 - DNA, 25 bp, Homo sapien
tattatgctcaggaatgtccaggct

SEQ ID NO: 5182432 - DNA, 25 bp, Homo sapien
tctgtcctgaggcttttttgaggat

SEQ ID NO: 5182433 - DNA, 25 bp, Homo sapien
tcatcccgatttattatgctcagga

SEQ ID NO: 5182434 - DNA, 25 bp, Homo sapien
cctgaggcttttttgaggatgatgt

SEQ ID NO: 5182435 - DNA, 25 bp, Homo sapien
cttctcgtccagttccactttcatt

SEQ ID NO: 5182436 - DNA, 25 bp, Homo sapien
tctcgtccagttccactttcattgg

SEQ ID NO: 5182437 - DNA, 25 bp, Homo sapien
cgtccagttccactttcattggcta

SEQ ID NO: 5182438 - DNA, 25 bp, Homo sapien
tcgtccagttccactttcattggct

SEQ ID NO: 5182439 - DNA, 25 bp, Homo sapien
ggcctatgaattctcactgctgtgt

SEQ ID NO: 5182440 - DNA, 25 bp, Homo sapien
ggcccctcttgtaatttgtgtgcct

SEQ ID NO: 5182441 - DNA, 25 bp, Homo sapien
tgtgtgcctcatctggcctatgaat

SEQ ID NO: 5182442 - DNA, 25 bp, Homo sapien
ctggcccctcttgtaatttgtgtgc

SEQ ID NO: 5182443 - DNA, 25 bp, Homo sapien
tggaccgtctttcctcagagctaca

SEQ ID NO: 5182444 - DNA, 25 bp, Homo sapien
tgtggaccgtctttcctcagagcta

SEQ ID NO: 5182445 - DNA, 25 bp, Homo sapien
gaccgtctttcctcagagctacaaa

SEQ ID NO: 5182446 - DNA, 25 bp, Homo sapien
agctgtggaccgtctttcctcagag

SEQ ID NO: 5182447 - DNA, 25 bp, Homo sapien
gaaagcagaggcctgtccccgcaga

SEQ ID NO: 5182448 - DNA, 25 bp, Homo sapien
ttgacgcctttttagcaggtggctc

SEQ ID NO: 5182449 - DNA, 25 bp, Homo sapien
tagcaggtggctccctcctctaggg

SEQ ID NO: 5182450 - DNA, 25 bp, Homo sapien
tttcttgacgcctttttagcaggtg

SEQ ID NO: 5182451 - DNA, 25 bp, Homo sapien
tacacataggctgcagggtgaaaat

SEQ ID NO: 5182452 - DNA, 25 bp, Homo sapien
gaccaggatctctaggttccagaga

SEQ ID NO: 5182453 - DNA, 25 bp, Homo sapien
aggactggaccaggatctctaggtt

SEQ ID NO: 5182454 - DNA, 25 bp, Homo sapien
ccagagacattgatttgggaatgta

SEQ ID NO: 5182455 - DNA, 25 bp, Homo sapien
tctgaagtagacagtttgagagaaa

SEQ ID NO: 5182456 - DNA, 25 bp, Homo sapien
tctggaataaggttgtctgaagtag

SEQ ID NO: 5182457 - DNA, 25 bp, Homo sapien
gagctagcagcgagtccagtttgtg

SEQ ID NO: 5182458 - DNA, 25 bp, Homo sapien
tgagagaaaatgtcgttgtctttct

SEQ ID NO: 5182459 - DNA, 25 bp, Homo sapien
cagtttctggaaggtcctcctacca

SEQ ID NO: 5182460 - DNA, 25 bp, Homo sapien
gtcctcctaccagcctgaactacat

SEQ ID NO: 5182461 - DNA, 25 bp, Homo sapien
agtttctggaaggtcctcctaccag

SEQ ID NO: 5182462 - DNA, 25 bp, Homo sapien
gaaggtcctcctaccagcctgaact

SEQ ID NO: 5182463 - DNA, 25 bp, Homo sapien
ttcgttcaagcaagccacgggctgt

SEQ ID NO: 5182464 - DNA, 25 bp, Homo sapien
ctcgaatcatcaaggctctgttgct

SEQ ID NO: 5182465 - DNA, 25 bp, Homo sapien
cactatagaaggatccagacactcg

SEQ ID NO: 5182466 - DNA, 25 bp, Homo sapien
cacgggctgtgaggctttcaccctt

SEQ ID NO: 5182467 - DNA, 25 bp, Homo sapien
gcagcaactctgtatcggatgccat

SEQ ID NO: 5182468 - DNA, 25 bp, Homo sapien
aactctgtatcggatgccatcccct

SEQ ID NO: 5182469 - DNA, 25 bp, Homo sapien
tatcggatgccatcccctggtgttt

SEQ ID NO: 5182470 - DNA, 25 bp, Homo sapien
gaaagcagcaactctgtatcggatg

SEQ ID NO: 5182471 - DNA, 25 bp, Homo sapien
attctggctctgcatttagggtgag

SEQ ID NO: 5182472 - DNA, 25 bp, Homo sapien
gctctgcatttagggtgaggtttgg

SEQ ID NO: 5182473 - DNA, 25 bp, Homo sapien
ccattctggctctgcatttagggtg

SEQ ID NO: 5182474 - DNA, 25 bp, Homo sapien
tggctctgcatttagggtgaggttt

SEQ ID NO: 5182475 - DNA, 25 bp, Homo sapien
ctggggagatagagtattgtttccc

SEQ ID NO: 5182476 - DNA, 25 bp, Homo sapien
actggggagatagagtattgtttcc

SEQ ID NO: 5182477 - DNA, 25 bp, Homo sapien
cactggggagatagagtattgtttc

SEQ ID NO: 5182478 - DNA, 25 bp, Homo sapien
gcactggggagatagagtattgttt

SEQ ID NO: 5182479 - DNA, 25 bp, Homo sapien
taagcaggagcctgaagaagtagag

SEQ ID NO: 5182480 - DNA, 25 bp, Homo sapien
cctggcaagctacgacatataagaa

SEQ ID NO: 5182481 - DNA, 25 bp, Homo sapien
aagctacgacatataagaaccagac

SEQ ID NO: 5182482 - DNA, 25 bp, Homo sapien
aaccccctggcaagctacgacatat

SEQ ID NO: 5182483 - DNA, 25 bp, Homo sapien
atcctcagaggcccgaaaggtccag

SEQ ID NO: 5182484 - DNA, 25 bp, Homo sapien
cctcagaggcccgaaaggtccagac

SEQ ID NO: 5182485 - DNA, 25 bp, Homo sapien
tcagaggcccgaaaggtccagacct

SEQ ID NO: 5182486 - DNA, 25 bp, Homo sapien
gatcctcagaggcccgaaaggtcca

SEQ ID NO: 5182487 - DNA, 25 bp, Homo sapien
gcttctcctctgcttagggcgacat

SEQ ID NO: 5182488 - DNA, 25 bp, Homo sapien
ctgcttctcctctgcttagggcgac

SEQ ID NO: 5182489 - DNA, 25 bp, Homo sapien
tgcttctcctctgcttagggcgaca

SEQ ID NO: 5182490 - DNA, 25 bp, Homo sapien
gcttcccgtctgtcattggcaaagg

SEQ ID NO: 5182491 - DNA, 25 bp, Homo sapien
gaaagagagccgttccacgttcagt

SEQ ID NO: 5182492 - DNA, 25 bp, Homo sapien
gcttagccacagagatcttgcccat

SEQ ID NO: 5182493 - DNA, 25 bp, Homo sapien
taatttggcattacacaggtctgtg

SEQ ID NO: 5182494 - DNA, 25 bp, Homo sapien
gagtgccaagcatccggcacctctt

SEQ ID NO: 5182495 - DNA, 25 bp, Homo sapien
tgtgggcctgattattgccagtggc

SEQ ID NO: 5182496 - DNA, 25 bp, Homo sapien
ctagttgcacatgcgtgagtgccaa

SEQ ID NO: 5182497 - DNA, 25 bp, Homo sapien
gctggtcaaagcctatgtgggcctg

SEQ ID NO: 5182498 - DNA, 25 bp, Homo sapien
tgagctataaaagacccagtgtgga

SEQ ID NO: 5182499 - DNA, 25 bp, Homo sapien
tgtggagggtatgtgtgaaggaaga

SEQ ID NO: 5182500 - DNA, 25 bp, Homo sapien
tataaaagacccagtgtggagggta

SEQ ID NO: 5182501 - DNA, 25 bp, Homo sapien
tgatcaggctgagctataaaagacc

SEQ ID NO: 5182502 - DNA, 25 bp, Homo sapien
ctcccagattcttttgtaaagccag

SEQ ID NO: 5182503 - DNA, 25 bp, Homo sapien
cctcgagtgactcttcttgtgccca

SEQ ID NO: 5182504 - DNA, 25 bp, Homo sapien
ccagtgtctcccagattcttttgta

SEQ ID NO: 5182505 - DNA, 25 bp, Homo sapien
gtgtctcccagattcttttgtaaag

SEQ ID NO: 5182506 - DNA, 25 bp, Homo sapien
aacctgtgttccagactttcgcaac

SEQ ID NO: 5182507 - DNA, 25 bp, Homo sapien
tggacaacctgtgttccagactttc

SEQ ID NO: 5182508 - DNA, 25 bp, Homo sapien
tccctggacaacctgtgttccagac

SEQ ID NO: 5182509 - DNA, 25 bp, Homo sapien
tgttccagactttcgcaactctggg

SEQ ID NO: 5182510 - DNA, 25 bp, Homo sapien
gaggcaccacaacccggaggagcag

SEQ ID NO: 5182511 - DNA, 25 bp, Homo sapien
agcaggttgaaaagatccgatggca

SEQ ID NO: 5182512 - DNA, 25 bp, Homo sapien
atggcagcaccacttcgaccagctt

SEQ ID NO: 5182513 - DNA, 25 bp, Homo sapien
tggcccccgtgtgtcgagtccaggt

SEQ ID NO: 5182514 - DNA, 25 bp, Homo sapien
cggcggctctgaacgatgtcctcct

SEQ ID NO: 5182515 - DNA, 25 bp, Homo sapien
catgcggcggctctgaacgatgtcc

SEQ ID NO: 5182516 - DNA, 25 bp, Homo sapien
gccatgcggcggctctgaacgatgt

SEQ ID NO: 5182517 - DNA, 25 bp, Homo sapien
acacgggctggccatgcggcggctc

SEQ ID NO: 5182518 - DNA, 25 bp, Homo sapien
taagcaagttatccttcgggtggaa

SEQ ID NO: 5182519 - DNA, 25 bp, Homo sapien
ttatgacaaccacccaaaatggcag

SEQ ID NO: 5182520 - DNA, 25 bp, Homo sapien
gtctatgtcatacattggccaaagg

SEQ ID NO: 5182521 - DNA, 25 bp, Homo sapien
tatttgcccatgcacttgacttctg

SEQ ID NO: 5182522 - DNA, 25 bp, Homo sapien
cccgcccttatctgtggtggataca

SEQ ID NO: 5182523 - DNA, 25 bp, Homo sapien
tgtgacttaacagtagccacccctc

SEQ ID NO: 5182524 - DNA, 25 bp, Homo sapien
acacctggaatgtcacaatgtgact

SEQ ID NO: 5182525 - DNA, 25 bp, Homo sapien
caaaagaggcattatgttgcttgtg

SEQ ID NO: 5182526 - DNA, 25 bp, Homo sapien
gacttcatagaaggcgacagattga

SEQ ID NO: 5182527 - DNA, 25 bp, Homo sapien
cagtagcatgatcgacagagtgagt

SEQ ID NO: 5182528 - DNA, 25 bp, Homo sapien
tcaagtaccgttgctaagctgtcaa

SEQ ID NO: 5182529 - DNA, 25 bp, Homo sapien
gaagtcaatcttttcatcagaggca

SEQ ID NO: 5182530 - DNA, 25 bp, Homo sapien
cacatggtggaaactatatgggtca

SEQ ID NO: 5182531 - DNA, 25 bp, Homo sapien
tgggtcagagcattcaccaagtaac

SEQ ID NO: 5182532 - DNA, 25 bp, Homo sapien
tatagcctaggacccgatcaaattg

SEQ ID NO: 5182533 - DNA, 25 bp, Homo sapien
caaattggtccactgagatctctgc

SEQ ID NO: 5182534 - DNA, 25 bp, Homo sapien
tagtaaaagctatcattgtggtttc

SEQ ID NO: 5182535 - DNA, 25 bp, Homo sapien
tgttttagagacaagtgtttcaccc

SEQ ID NO: 5182536 - DNA, 25 bp, Homo sapien
gtttcctgcaatgtatgcaaattaa

SEQ ID NO: 5182537 - DNA, 25 bp, Homo sapien
tgtatgcaaattaattctactcatt

SEQ ID NO: 5182538 - DNA, 25 bp, Homo sapien
cccttcgagcaagacgtgggtgagt

SEQ ID NO: 5182539 - DNA, 25 bp, Homo sapien
gtgcccggtcctggactgctgtgtg

SEQ ID NO: 5182540 - DNA, 25 bp, Homo sapien
tggccctggactgctgtttgtccgg

SEQ ID NO: 5182541 - DNA, 25 bp, Homo sapien
ctagaaagtgggcggtagcgactcc

SEQ ID NO: 5182542 - DNA, 25 bp, Homo sapien
ttccaggcgggactacttccggctc

SEQ ID NO: 5182543 - DNA, 25 bp, Homo sapien
gaaggtccccggcttcgtggctagc

SEQ ID NO: 5182544 - DNA, 25 bp, Homo sapien
tcctagcgctggaaaggtggccgta

SEQ ID NO: 5182545 - DNA, 25 bp, Homo sapien
taaattcgtgacaagaacttggccc

SEQ ID NO: 5182546 - DNA, 25 bp, Homo sapien
aaacaggactgtaacgcgtacgcgt

SEQ ID NO: 5182547 - DNA, 25 bp, Homo sapien
gcgccggcagctccgtttctaggga

SEQ ID NO: 5182548 - DNA, 25 bp, Homo sapien
taacgcgtacgcgtcgtgggtcctc

SEQ ID NO: 5182549 - DNA, 25 bp, Homo sapien
ttctctagctacgagtcctgccgct

SEQ ID NO: 5182550 - DNA, 25 bp, Homo sapien
gagcagtcaggtctttcgcagaatc

SEQ ID NO: 5182551 - DNA, 25 bp, Homo sapien
taggcgtagttacttcgaccaccgc

SEQ ID NO: 5182552 - DNA, 25 bp, Homo sapien
tctcaacaagtctaaggcagggagt

SEQ ID NO: 5182553 - DNA, 25 bp, Homo sapien
ggagtgtgcctccttcgcctttgga

SEQ ID NO: 5182554 - DNA, 25 bp, Homo sapien
caaaggttagctgcaatgaggaatc

SEQ ID NO: 5182555 - DNA, 25 bp, Homo sapien
gattttgatcttacagactccctga

SEQ ID NO: 5182556 - DNA, 25 bp, Homo sapien
gaatctgtaaccgtatcaatggtct

SEQ ID NO: 5182557 - DNA, 25 bp, Homo sapien
cagataagtagttggaacagggaga

SEQ ID NO: 5182558 - DNA, 25 bp, Homo sapien
aacagccagatgtcttatcaataga

SEQ ID NO: 5182559 - DNA, 25 bp, Homo sapien
tatggatccatctacatgaaatatc

SEQ ID NO: 5182560 - DNA, 25 bp, Homo sapien
gagattagacaacagtgtagtggtc

SEQ ID NO: 5182561 - DNA, 25 bp, Homo sapien
tcttgattgaatccagctcaggaag

SEQ ID NO: 5182562 - DNA, 25 bp, Homo sapien
gatcaaagtcttataggattgcccc

SEQ ID NO: 5182563 - DNA, 25 bp, Homo sapien
gacttatgttcacagttgctcccaa

SEQ ID NO: 5182564 - DNA, 25 bp, Homo sapien
tgtcttttttgttaccatcggcagg

SEQ ID NO: 5182565 - DNA, 25 bp, Homo sapien
tcatcaccacaagaacaagcaaggg

SEQ ID NO: 5182566 - DNA, 25 bp, Homo sapien
aataaactccagttccatcggcaat

SEQ ID NO: 5182567 - DNA, 25 bp, Homo sapien
aaaataaactccagttccatcggca

SEQ ID NO: 5182568 - DNA, 25 bp, Homo sapien
taaactccagttccatcggcaatat

SEQ ID NO: 5182569 - DNA, 25 bp, Homo sapien
ctccagttccatcggcaatataaac

SEQ ID NO: 5182570 - DNA, 25 bp, Homo sapien
agacggttgtttacaatctctttca

SEQ ID NO: 5182571 - DNA, 25 bp, Homo sapien
aagccagacggttgtttacaatctc

SEQ ID NO: 5182572 - DNA, 25 bp, Homo sapien
aaagccagacggttgtttacaatct

SEQ ID NO: 5182573 - DNA, 25 bp, Homo sapien
gccagacggttgtttacaatctctt

SEQ ID NO: 5182574 - DNA, 25 bp, Homo sapien
gctgggcttgggtcacctcttctgg

SEQ ID NO: 5182575 - DNA, 25 bp, Homo sapien
gaaatgacttgtctgactgggtgaa

SEQ ID NO: 5182576 - DNA, 25 bp, Homo sapien
gtttgttctccaagaggtgataacc

SEQ ID NO: 5182577 - DNA, 25 bp, Homo sapien
gcctggacacacgactctgtcattc

SEQ ID NO: 5182578 - DNA, 25 bp, Homo sapien
catgcattcctgtcggtccaaaacc

SEQ ID NO: 5182579 - DNA, 25 bp, Homo sapien
ctgaatccagaccatgcattcctgt

SEQ ID NO: 5182580 - DNA, 25 bp, Homo sapien
ttcctgtcggtccaaaacctgagca

SEQ ID NO: 5182581 - DNA, 25 bp, Homo sapien
caaaaatgccccagggaaattgctc

SEQ ID NO: 5182582 - DNA, 25 bp, Homo sapien
tcggggggcatcctgttcacagaca

SEQ ID NO: 5182583 - DNA, 25 bp, Homo sapien
acagacaacactgacaacatgtcgc

SEQ ID NO: 5182584 - DNA, 25 bp, Homo sapien
catgtcgcagctcaagtgtattgag

SEQ ID NO: 5182585 - DNA, 25 bp, Homo sapien
cactgacaacatgtcgcagctcaag

SEQ ID NO: 5182586 - DNA, 25 bp, Homo sapien
catggaggtcacttacaccaggtac

SEQ ID NO: 5182587 - DNA, 25 bp, Homo sapien
caagaggagccatgtgagtagcgtc

SEQ ID NO: 5182588 - DNA, 25 bp, Homo sapien
cattcgattgtagaccgcaacaggc

SEQ ID NO: 5182589 - DNA, 25 bp, Homo sapien
tgtaaaggcggttgcaccataggca

SEQ ID NO: 5182590 - DNA, 25 bp, Homo sapien
tacccatttgctagagctttggctg

SEQ ID NO: 5182591 - DNA, 25 bp, Homo sapien
ggagcttgtagatcttgattctacc

SEQ ID NO: 5182592 - DNA, 25 bp, Homo sapien
tatacggattataaggattgctatg

SEQ ID NO: 5182593 - DNA, 25 bp, Homo sapien
cattgcgttatgtggtgggtgtaat

SEQ ID NO: 5182594 - DNA, 25 bp, Homo sapien
ttaggacattaccacactcaggcca

SEQ ID NO: 5182595 - DNA, 25 bp, Homo sapien
cggactgcttctatctcaataggaa

SEQ ID NO: 5182596 - DNA, 25 bp, Homo sapien
caagtgtgggcatgctccctggttc

SEQ ID NO: 5182597 - DNA, 25 bp, Homo sapien
gaattaccaccagaatcaggatctc

SEQ ID NO: 5182598 - DNA, 25 bp, Homo sapien
gaggggtagttggggcgctgggcgc

SEQ ID NO: 5182599 - DNA, 25 bp, Homo sapien
tgccgcccgcaggcgcgacctgccc

SEQ ID NO: 5182600 - DNA, 25 bp, Homo sapien
ctgccgcccgcaggcgcgacctgcc

SEQ ID NO: 5182601 - DNA, 25 bp, Homo sapien
tagcgtgcgcgtcggaaatcagaac

SEQ ID NO: 5182602 - DNA, 25 bp, Homo sapien
cctagcgtgcgcgtcggaaatcaga

SEQ ID NO: 5182603 - DNA, 25 bp, Homo sapien
cgtgcgcgtcggaaatcagaacagc

SEQ ID NO: 5182604 - DNA, 25 bp, Homo sapien
ggcccctagcgtgcgcgtcggaaat

SEQ ID NO: 5182605 - DNA, 25 bp, Homo sapien
tgaaatcggtctgctgcgaatccat

SEQ ID NO: 5182606 - DNA, 25 bp, Homo sapien
tgtgcgccctgaaatcggtctgctg

SEQ ID NO: 5182607 - DNA, 25 bp, Homo sapien
gttgtgcgccctgaaatcggtctgc

SEQ ID NO: 5182608 - DNA, 25 bp, Homo sapien
gccctgaaatcggtctgctgcgaat

SEQ ID NO: 5182609 - DNA, 25 bp, Homo sapien
gcacgatggcaaatcgctcctccag

SEQ ID NO: 5182610 - DNA, 25 bp, Homo sapien
acgatggcaaatcgctcctccagtt

SEQ ID NO: 5182611 - DNA, 25 bp, Homo sapien
cacgatggcaaatcgctcctccagt

SEQ ID NO: 5182612 - DNA, 25 bp, Homo sapien
cagcacgatggcaaatcgctcctcc

SEQ ID NO: 5182613 - DNA, 25 bp, Homo sapien
cccttgctgcctagtcttgtggagt

SEQ ID NO: 5182614 - DNA, 25 bp, Homo sapien
ggatcacgagtttcccttgctgcct

SEQ ID NO: 5182615 - DNA, 25 bp, Homo sapien
acaatcgttggctgcccggatcacg

SEQ ID NO: 5182616 - DNA, 25 bp, Homo sapien
agaaaacccgcaggcaggcacaatc

SEQ ID NO: 5182617 - DNA, 25 bp, Homo sapien
tgagcacacctcagaaaaccgattt

SEQ ID NO: 5182618 - DNA, 25 bp, Homo sapien
caatttgaacgtcctgtagctgagc

SEQ ID NO: 5182619 - DNA, 25 bp, Homo sapien
tgatctagaactcgagtcctctgcc

SEQ ID NO: 5182620 - DNA, 25 bp, Homo sapien
ttcctttttcaaggcctgaaggcag

SEQ ID NO: 5182621 - DNA, 25 bp, Homo sapien
ctactcaataaaaggtcagcctggt

SEQ ID NO: 5182622 - DNA, 25 bp, Homo sapien
tcaatggtccaaatgcgtccctagg

SEQ ID NO: 5182623 - DNA, 25 bp, Homo sapien
gaagagggttcccaagctgacctgg

SEQ ID NO: 5182624 - DNA, 25 bp, Homo sapien
ctgggacaaggaacgcatcaatggt

SEQ ID NO: 5182625 - DNA, 25 bp, Homo sapien
tggagtatatgcgttgcactgacag

SEQ ID NO: 5182626 - DNA, 25 bp, Homo sapien
tccttttcacaggtttcgcatttgg

SEQ ID NO: 5182627 - DNA, 25 bp, Homo sapien
cacaggtttcgcatttggagtatat

SEQ ID NO: 5182628 - DNA, 25 bp, Homo sapien
cgcatttggagtatatgcgttgcac

SEQ ID NO: 5182629 - DNA, 25 bp, Homo sapien
gaggcagctctccaacctaacagct

SEQ ID NO: 5182630 - DNA, 25 bp, Homo sapien
gccttggttgagatcacagttcaag

SEQ ID NO: 5182631 - DNA, 25 bp, Homo sapien
ccttggcatttatgttgaaagacag

SEQ ID NO: 5182632 - DNA, 25 bp, Homo sapien
gttggaaactgcatagtccttggca

SEQ ID NO: 5182633 - DNA, 25 bp, Homo sapien
ttttaactcataggcaaattggctt

SEQ ID NO: 5182634 - DNA, 25 bp, Homo sapien
taactcataggcaaattggcttggt

SEQ ID NO: 5182635 - DNA, 25 bp, Homo sapien
ctggttttaactcataggcaaattg

SEQ ID NO: 5182636 - DNA, 25 bp, Homo sapien
ctcaattttgcctaatctatccaaa

SEQ ID NO: 5182637 - DNA, 25 bp, Homo sapien
tgtaaatggtaaaaccagagatcaa

SEQ ID NO: 5182638 - DNA, 25 bp, Homo sapien
ggaagccaagctcatcaagtctttg

SEQ ID NO: 5182639 - DNA, 25 bp, Homo sapien
tacaggaagccaagctcatcaagtc

SEQ ID NO: 5182640 - DNA, 25 bp, Homo sapien
aagctcatcaagtctttgtaaatgg

SEQ ID NO: 5182641 - DNA, 25 bp, Homo sapien
aaacatcagaggaaatcaatcgtgg

SEQ ID NO: 5182642 - DNA, 25 bp, Homo sapien
cagaggaaatcaatcgtggaacttt

SEQ ID NO: 5182643 - DNA, 25 bp, Homo sapien
agatagggtatcttactttgtcacc

SEQ ID NO: 5182644 - DNA, 25 bp, Homo sapien
aaagaggatcaggtaatatcattct

SEQ ID NO: 5182645 - DNA, 25 bp, Homo sapien
cttcaagctgtaacaacacagccat

SEQ ID NO: 5182646 - DNA, 25 bp, Homo sapien
cagccttcaagctgtaacaacacag

SEQ ID NO: 5182647 - DNA, 25 bp, Homo sapien
acagccttcaagctgtaacaacaca

SEQ ID NO: 5182648 - DNA, 25 bp, Homo sapien
gccttcaagctgtaacaacacagcc

SEQ ID NO: 5182649 - DNA, 25 bp, Homo sapien
tgtccttctatagcacattataaac

SEQ ID NO: 5182650 - DNA, 25 bp, Homo sapien
tacctccagtatctcatctactagg

SEQ ID NO: 5182651 - DNA, 25 bp, Homo sapien
actaggcagttaactactcaaaggc

SEQ ID NO: 5182652 - DNA, 25 bp, Homo sapien
tgtgtcccagcatctcaagaggcct

SEQ ID NO: 5182653 - DNA, 25 bp, Homo sapien
ttacctgactgccacaacttgactg

SEQ ID NO: 5182654 - DNA, 25 bp, Homo sapien
gactttgcagaaaagactgtgggct

SEQ ID NO: 5182655 - DNA, 25 bp, Homo sapien
caggtttagtccaaagtccaagatc

SEQ ID NO: 5182656 - DNA, 25 bp, Homo sapien
tcatgacggatgtggctaccaaggc

SEQ ID NO: 5182657 - DNA, 25 bp, Homo sapien
aatggaatagcccaatgccctgaaa

SEQ ID NO: 5182658 - DNA, 25 bp, Homo sapien
gctgctcagtggtcacagcaccata

SEQ ID NO: 5182659 - DNA, 25 bp, Homo sapien
cagcaccatatgtagcatggcagtt

SEQ ID NO: 5182660 - DNA, 25 bp, Homo sapien
tgaaaacactagcacttccattagg

SEQ ID NO: 5182661 - DNA, 25 bp, Homo sapien
acagaaaaccatctatatacaagtt

SEQ ID NO: 5182662 - DNA, 25 bp, Homo sapien
ccatctatatacaagttacacaatt

SEQ ID NO: 5182663 - DNA, 25 bp, Homo sapien
ttcttcaaggctcaaatggtcacaa

SEQ ID NO: 5182664 - DNA, 25 bp, Homo sapien
cttcaaggctcaaatggtcacaact

SEQ ID NO: 5182665 - DNA, 25 bp, Homo sapien
cagatcaagggctctaaacctggga

SEQ ID NO: 5182666 - DNA, 25 bp, Homo sapien
cctgggatccatgacttctgaaagc

SEQ ID NO: 5182667 - DNA, 25 bp, Homo sapien
tcttgcctgctatgacccaactggc

SEQ ID NO: 5182668 - DNA, 25 bp, Homo sapien
caactggcccaatctgtcggctgca

SEQ ID NO: 5182669 - DNA, 25 bp, Homo sapien
gctataaatgccttccccatgttaa

SEQ ID NO: 5182670 - DNA, 25 bp, Homo sapien
ggtatgaagccataactacatgttc

SEQ ID NO: 5182671 - DNA, 25 bp, Homo sapien
cagagcccaaccatactgggtggca

SEQ ID NO: 5182672 - DNA, 25 bp, Homo sapien
gcagcagtaagaacaaccctgaggt

SEQ ID NO: 5182673 - DNA, 25 bp, Homo sapien
caactcttctctgcaaagaatgcat

SEQ ID NO: 5182674 - DNA, 25 bp, Homo sapien
tcaactcttctctgcaaagaatgca

SEQ ID NO: 5182675 - DNA, 25 bp, Homo sapien
gatcaactcttctctgcaaagaatg

SEQ ID NO: 5182676 - DNA, 25 bp, Homo sapien
cttgatcaactcttctctgcaaaga

SEQ ID NO: 5182677 - DNA, 25 bp, Homo sapien
tcctacttacctgcttcaaggcaca

SEQ ID NO: 5182678 - DNA, 25 bp, Homo sapien
tgtaacaatgagctgtctacacagc

SEQ ID NO: 5182679 - DNA, 25 bp, Homo sapien
tttttgcagctggtctattcagtcc

SEQ ID NO: 5182680 - DNA, 25 bp, Homo sapien
ccctctcaatatctggagtaggttc

SEQ ID NO: 5182681 - DNA, 25 bp, Homo sapien
tgagcattatatgaccatctggtcg

SEQ ID NO: 5182682 - DNA, 25 bp, Homo sapien
catctggtcgacaacatattacaca

SEQ ID NO: 5182683 - DNA, 25 bp, Homo sapien
caacatattacacattcatagggca

SEQ ID NO: 5182684 - DNA, 25 bp, Homo sapien
caggacagtgagcattatatgacca

SEQ ID NO: 5182685 - DNA, 25 bp, Homo sapien
tctcagccaagatttccccagctcc

SEQ ID NO: 5182686 - DNA, 25 bp, Homo sapien
tttctcagccaagatttccccagct

SEQ ID NO: 5182687 - DNA, 25 bp, Homo sapien
cttttctcagccaagatttccccag

SEQ ID NO: 5182688 - DNA, 25 bp, Homo sapien
ttttctcagccaagatttccccagc

SEQ ID NO: 5182689 - DNA, 25 bp, Homo sapien
tgaggtctgcgctctagtcctgtgc

SEQ ID NO: 5182690 - DNA, 25 bp, Homo sapien
cctgaggtctgcgctctagtcctgt

SEQ ID NO: 5182691 - DNA, 25 bp, Homo sapien
tctctccactacttcgggtcacgcc

SEQ ID NO: 5182692 - DNA, 25 bp, Homo sapien
tctccactacttcgggtcacgccgg

SEQ ID NO: 5182693 - DNA, 25 bp, Homo sapien
tggccagcaacatgccatcgaaccg

SEQ ID NO: 5182694 - DNA, 25 bp, Homo sapien
ccatggccagcaacatgccatcgaa

SEQ ID NO: 5182695 - DNA, 25 bp, Homo sapien
gccgccctcgtgctgctgagccatg

SEQ ID NO: 5182696 - DNA, 25 bp, Homo sapien
ctcgtgctgctgagccatggccagc

SEQ ID NO: 5182697 - DNA, 25 bp, Homo sapien
ttttgcgtcgaaggaagctgaagaa

SEQ ID NO: 5182698 - DNA, 25 bp, Homo sapien
aaagtctgttttgcgtcgaaggaag

SEQ ID NO: 5182699 - DNA, 25 bp, Homo sapien
ctgttttgcgtcgaaggaagctgaa

SEQ ID NO: 5182700 - DNA, 25 bp, Homo sapien
agtctgttttgcgtcgaaggaagct

SEQ ID NO: 5182701 - DNA, 25 bp, Homo sapien
ttctcttctcccaccgggccttctg

SEQ ID NO: 5182702 - DNA, 25 bp, Homo sapien
tgaaagtctgtatgataagcttctt

SEQ ID NO: 5182703 - DNA, 25 bp, Homo sapien
gataagcttctttgccatcccctct

SEQ ID NO: 5182704 - DNA, 25 bp, Homo sapien
taagcttctttgccatcccctcttc

SEQ ID NO: 5182705 - DNA, 25 bp, Homo sapien
ggccccgaggtctctgacttggctt

SEQ ID NO: 5182706 - DNA, 25 bp, Homo sapien
ctctctgcctgtctgcctttatctg

SEQ ID NO: 5182707 - DNA, 25 bp, Homo sapien
ccgaggtctctgacttggcttcctt

SEQ ID NO: 5182708 - DNA, 25 bp, Homo sapien
tgcctttatctggggccccgaggtc

SEQ ID NO: 5182709 - DNA, 25 bp, Homo sapien
tccagcagtaattgggcaggtctgc

SEQ ID NO: 5182710 - DNA, 25 bp, Homo sapien
caggtctgccccgttgcctaggttg

SEQ ID NO: 5182711 - DNA, 25 bp, Homo sapien
ctgggtccagcagtaattgggcagg

SEQ ID NO: 5182712 - DNA, 25 bp, Homo sapien
caaggctgccgttcttgagctgggc

SEQ ID NO: 5182713 - DNA, 25 bp, Homo sapien
cacggaaagggaccaccaggtccag

SEQ ID NO: 5182714 - DNA, 25 bp, Homo sapien
tattgatcttctcaagatgcacagt

SEQ ID NO: 5182715 - DNA, 25 bp, Homo sapien
cctaccttcacttcgttgtagagct

SEQ ID NO: 5182716 - DNA, 25 bp, Homo sapien
tgtagagctccccatcgatgattgc

SEQ ID NO: 5182717 - DNA, 25 bp, Homo sapien
cttggaattctcagggttaatcatc

SEQ ID NO: 5182718 - DNA, 25 bp, Homo sapien
tcatcttggtattgatcttagggtc

SEQ ID NO: 5182719 - DNA, 25 bp, Homo sapien
ctcagggttaatcatcttggtattg

SEQ ID NO: 5182720 - DNA, 25 bp, Homo sapien
catcttggtattgatcttagggtca

SEQ ID NO: 5182721 - DNA, 25 bp, Homo sapien
cagatgctgatccatgaacttcttc

SEQ ID NO: 5182722 - DNA, 25 bp, Homo sapien
tctgagattggcagccccatggact

SEQ ID NO: 5182723 - DNA, 25 bp, Homo sapien
gtctctggtcatacatcatcttttc

SEQ ID NO: 5182724 - DNA, 25 bp, Homo sapien
gctgcgagtctcattgtccaggtct

SEQ ID NO: 5182725 - DNA, 25 bp, Homo sapien
tactctaaatggcaagtggaaagtc

SEQ ID NO: 5182726 - DNA, 25 bp, Homo sapien
gcaaagcaggatttggtgaacccta

SEQ ID NO: 5182727 - DNA, 25 bp, Homo sapien
gacaacatcttctggatgagccaca

SEQ ID NO: 5182728 - DNA, 25 bp, Homo sapien
aattacccaggtgaaccatctgtgc

SEQ ID NO: 5182729 - DNA, 25 bp, Homo sapien
tctgaaaagtgcatgaaaaattcca

SEQ ID NO: 5182730 - DNA, 25 bp, Homo sapien
gacgttttttattctgaaaagtgca

SEQ ID NO: 5182731 - DNA, 25 bp, Homo sapien
tgaaaagtgcatgaaaaattccagc

SEQ ID NO: 5182732 - DNA, 25 bp, Homo sapien
attctgaaaagtgcatgaaaaattc

SEQ ID NO: 5182733 - DNA, 25 bp, Homo sapien
taaaccagtgacaacgctggctcac

SEQ ID NO: 5182734 - DNA, 25 bp, Homo sapien
tggctcacagagaagaatgacatac

SEQ ID NO: 5182735 - DNA, 25 bp, Homo sapien
ttcgcaggccagaggacaacatgct

SEQ ID NO: 5182736 - DNA, 25 bp, Homo sapien
taatacttcagcaagttcgcaggcc

SEQ ID NO: 5182737 - DNA, 25 bp, Homo sapien
caataaactggagataatggtgcat

SEQ ID NO: 5182738 - DNA, 25 bp, Homo sapien
cattcatgttttacctccctcagga

SEQ ID NO: 5182739 - DNA, 25 bp, Homo sapien
aaacagtgcctgtgcatgcaaatgc

SEQ ID NO: 5182740 - DNA, 25 bp, Homo sapien
tatgcctcagcgaactgtaccactt

SEQ ID NO: 5182741 - DNA, 25 bp, Homo sapien
cacaacacactcaattccttctatg

SEQ ID NO: 5182742 - DNA, 25 bp, Homo sapien
ggcagcacccaagtgttcctgtctc

SEQ ID NO: 5182743 - DNA, 25 bp, Homo sapien
gctgtgatcaacctcaaactcaact

SEQ ID NO: 5182744 - DNA, 25 bp, Homo sapien
tccaatctctatccaagatgtctaa

SEQ ID NO: 5182745 - DNA, 25 bp, Homo sapien
aacccactttctatctgttgccatc

SEQ ID NO: 5182746 - DNA, 25 bp, Homo sapien
taattttatgattgatcacttgctg

SEQ ID NO: 5182747 - DNA, 25 bp, Homo sapien
ttcagtgaccagagatccaattggc

SEQ ID NO: 5182748 - DNA, 25 bp, Homo sapien
gagagcagatgaatgaacctggcca

SEQ ID NO: 5182749 - DNA, 25 bp, Homo sapien
tacctccgccaagtgataaggatca

SEQ ID NO: 5182750 - DNA, 25 bp, Homo sapien
aaagatacttcatgcaggttcccct

SEQ ID NO: 5182751 - DNA, 25 bp, Homo sapien
ttagggctacgataaagatacaagg

SEQ ID NO: 5182752 - DNA, 25 bp, Homo sapien
acataatacgacaaagacacagaag

SEQ ID NO: 5182753 - DNA, 25 bp, Homo sapien
ttgtcctaagaaacataatacgaca

SEQ ID NO: 5182754 - DNA, 25 bp, Homo sapien
gaacattagggctacgataaagata

SEQ ID NO: 5182755 - DNA, 25 bp, Homo sapien
tgttcacaacctgtgctccatatcg

SEQ ID NO: 5182756 - DNA, 25 bp, Homo sapien
cactgatgaaagactattggctgtt

SEQ ID NO: 5182757 - DNA, 25 bp, Homo sapien
ctgtacatgtgaccaaagcatggca

SEQ ID NO: 5182758 - DNA, 25 bp, Homo sapien
gcaagcacttggattgacagctgtt

SEQ ID NO: 5182759 - DNA, 25 bp, Homo sapien
aggtactggtctgctgctagagtca

SEQ ID NO: 5182760 - DNA, 25 bp, Homo sapien
tcactggctaaatgagaagacaatg

SEQ ID NO: 5182761 - DNA, 25 bp, Homo sapien
tgagctccactgggagtaggtactg

SEQ ID NO: 5182762 - DNA, 25 bp, Homo sapien
gagtaggtactggtctgctgctaga

SEQ ID NO: 5182763 - DNA, 25 bp, Homo sapien
tgaatgcacatgaaagagggcaacc

SEQ ID NO: 5182764 - DNA, 25 bp, Homo sapien
tggcagttgctagacacccaaggtc

SEQ ID NO: 5182765 - DNA, 25 bp, Homo sapien
tgacccaagtattagtgacccacag

SEQ ID NO: 5182766 - DNA, 25 bp, Homo sapien
gagtattacaggcagcaaccagtga

SEQ ID NO: 5182767 - DNA, 25 bp, Homo sapien
ctctagaagtagttttgcaatcctg

SEQ ID NO: 5182768 - DNA, 25 bp, Homo sapien
cttggcagatgctccaataagtggg

SEQ ID NO: 5182769 - DNA, 25 bp, Homo sapien
ttttgcaatcctgaaaagccctcct

SEQ ID NO: 5182770 - DNA, 25 bp, Homo sapien
tgaggccaacactgaacatccattt

SEQ ID NO: 5182771 - DNA, 25 bp, Homo sapien
aaatcagcagattcagctgacagaa

SEQ ID NO: 5182772 - DNA, 25 bp, Homo sapien
caatgaagacttctgcttaaaccag

SEQ ID NO: 5182773 - DNA, 25 bp, Homo sapien
gacttcaagcacaagttcaacacca

SEQ ID NO: 5182774 - DNA, 25 bp, Homo sapien
ccagaaccgtgaagttttgtatccg

SEQ ID NO: 5182775 - DNA, 25 bp, Homo sapien
gaaacttgcctgttacaatcggagt

SEQ ID NO: 5182776 - DNA, 25 bp, Homo sapien
ttgcctgttacaatcggagtctctc

SEQ ID NO: 5182777 - DNA, 25 bp, Homo sapien
cagaaacttgcctgttacaatcgga

SEQ ID NO: 5182778 - DNA, 25 bp, Homo sapien
ctgttacaatcggagtctctcccat

SEQ ID NO: 5182779 - DNA, 25 bp, Homo sapien
ggccattgtcttatatctctaccgg

SEQ ID NO: 5182780 - DNA, 25 bp, Homo sapien
taatgaagtcgaaccactgtgtctg

SEQ ID NO: 5182781 - DNA, 25 bp, Homo sapien
gagaccactgcctaatgcaaacagg

SEQ ID NO: 5182782 - DNA, 25 bp, Homo sapien
catactaagggctatggcaaccaca

SEQ ID NO: 5182783 - DNA, 25 bp, Homo sapien
tcgctagaggcaggaagttatttcc

SEQ ID NO: 5182784 - DNA, 25 bp, Homo sapien
cctctatcgctgaaatggtgctgaa

SEQ ID NO: 5182785 - DNA, 25 bp, Homo sapien
tagtgtaacgttcatggctcccagg

SEQ ID NO: 5182786 - DNA, 25 bp, Homo sapien
taagtaaacgacgtatgccatggtg

SEQ ID NO: 5182787 - DNA, 25 bp, Homo sapien
gagccttttggattaaccatgtaca

SEQ ID NO: 5182788 - DNA, 25 bp, Homo sapien
cagcagctagaatgaaatgtgtttc

SEQ ID NO: 5182789 - DNA, 25 bp, Homo sapien
ctttaaaacagacacgcggcacatt

SEQ ID NO: 5182790 - DNA, 25 bp, Homo sapien
caaaacagatgcaaggcaatcttgg

SEQ ID NO: 5182791 - DNA, 25 bp, Homo sapien
tttctccaggctaaaggtcacacaa

SEQ ID NO: 5182792 - DNA, 25 bp, Homo sapien
taacaactgacagaaggtctacttg

SEQ ID NO: 5182793 - DNA, 25 bp, Homo sapien
tctacttgcaatggcagggaagtct

SEQ ID NO: 5182794 - DNA, 25 bp, Homo sapien
aaatttagagctttggacggccatc

SEQ ID NO: 5182795 - DNA, 25 bp, Homo sapien
agagagaaatatgcaacccacctgc

SEQ ID NO: 5182796 - DNA, 25 bp, Homo sapien
ttaggtcagagtcacaataggccac

SEQ ID NO: 5182797 - DNA, 25 bp, Homo sapien
ttctcactaccagaaacactggagg

SEQ ID NO: 5182798 - DNA, 25 bp, Homo sapien
caaagccccagggaatagtaaggca

SEQ ID NO: 5182799 - DNA, 25 bp, Homo sapien
gtgatacagtactgagtgaatggct

SEQ ID NO: 5182800 - DNA, 25 bp, Homo sapien
tttcaagcgcacatttcataaaggc

SEQ ID NO: 5182801 - DNA, 25 bp, Homo sapien
taaaacagcttccaaagtttccatg

SEQ ID NO: 5182802 - DNA, 25 bp, Homo sapien
tggaataagacaagaccttaagggc

SEQ ID NO: 5182803 - DNA, 25 bp, Homo sapien
gtcattgttcctacattaaaggtca

SEQ ID NO: 5182804 - DNA, 25 bp, Homo sapien
tgaagggtgaataaagtctaaacac

SEQ ID NO: 5182805 - DNA, 25 bp, Homo sapien
gacaataactcaagctttgggtggg

SEQ ID NO: 5182806 - DNA, 25 bp, Homo sapien
tagaaacaaccatcctaaaatgaag

SEQ ID NO: 5182807 - DNA, 25 bp, Homo sapien
aaactgatggttcccaaagtggtag

SEQ ID NO: 5182808 - DNA, 25 bp, Homo sapien
gagtgctccctatttcagtgaatgg

SEQ ID NO: 5182809 - DNA, 25 bp, Homo sapien
gctagtgcaccgacagacttgcagg

SEQ ID NO: 5182810 - DNA, 25 bp, Homo sapien
tgatcttcagactgcacctgggaac

SEQ ID NO: 5182811 - DNA, 25 bp, Homo sapien
catctggcccagattaacttctttt

SEQ ID NO: 5182812 - DNA, 25 bp, Homo sapien
taataggaactctgaaatagctcgt

SEQ ID NO: 5182813 - DNA, 25 bp, Homo sapien
tattttatgctataagatcccaaaa

SEQ ID NO: 5182814 - DNA, 25 bp, Homo sapien
tgtcttccctttcaacgtctataaa

SEQ ID NO: 5182815 - DNA, 25 bp, Homo sapien
gctctcgggctcctttgaacctcct

SEQ ID NO: 5182816 - DNA, 25 bp, Homo sapien
tttccaaatctggcttggtcagcct

SEQ ID NO: 5182817 - DNA, 25 bp, Homo sapien
cttcctgctctcgggctcctttgaa

SEQ ID NO: 5182818 - DNA, 25 bp, Homo sapien
ttccaaatctggcttggtcagcctt

SEQ ID NO: 5182819 - DNA, 25 bp, Homo sapien
catgcatatgctgtgtacatactga

SEQ ID NO: 5182820 - DNA, 25 bp, Homo sapien
tggcaaaacctattgtgtgcacaca

SEQ ID NO: 5182821 - DNA, 25 bp, Homo sapien
gctgtgtacatactgataaagtcca

SEQ ID NO: 5182822 - DNA, 25 bp, Homo sapien
gcatatgctgtgtacatactgataa

SEQ ID NO: 5182823 - DNA, 25 bp, Homo sapien
tgatccaaaattaagcctacaagtg

SEQ ID NO: 5182824 - DNA, 25 bp, Homo sapien
tatgagaaggctatattgtcaatct

SEQ ID NO: 5182825 - DNA, 25 bp, Homo sapien
cctacaagtggatctagaagtggca

SEQ ID NO: 5182826 - DNA, 25 bp, Homo sapien
taagcgtattttttctcatagggta

SEQ ID NO: 5182827 - DNA, 25 bp, Homo sapien
ccaaagacacctttactggaaccat

SEQ ID NO: 5182828 - DNA, 25 bp, Homo sapien
gaacgggtgggtcaaacttcaatca

SEQ ID NO: 5182829 - DNA, 25 bp, Homo sapien
tgaacactggagaggacctatcacg

SEQ ID NO: 5182830 - DNA, 25 bp, Homo sapien
taaatggaggcgtcactagacatgt

SEQ ID NO: 5182831 - DNA, 25 bp, Homo sapien
taaataacgctgcaaacatgacacc

SEQ ID NO: 5182832 - DNA, 25 bp, Homo sapien
actgatcgtaaacttccatggaagc

SEQ ID NO: 5182833 - DNA, 25 bp, Homo sapien
atcgcagccagtcttaagaaactga

SEQ ID NO: 5182834 - DNA, 25 bp, Homo sapien
caaaacccatcgcagccagtcttaa

SEQ ID NO: 5182835 - DNA, 25 bp, Homo sapien
tcttaagaaactgatcgtaaacttc

SEQ ID NO: 5182836 - DNA, 25 bp, Homo sapien
gacagtatcaggcagttacaccagt

SEQ ID NO: 5182837 - DNA, 25 bp, Homo sapien
ccagtaattagaagggtaggtagca

SEQ ID NO: 5182838 - DNA, 25 bp, Homo sapien
tgtaatcacagagagataagcctct

SEQ ID NO: 5182839 - DNA, 25 bp, Homo sapien
gtgacacagacatgaacttggaaat

SEQ ID NO: 5182840 - DNA, 25 bp, Homo sapien
tctggttatggaaatagttggttct

SEQ ID NO: 5182841 - DNA, 25 bp, Homo sapien
tggttatggaaatagttggttctaa

SEQ ID NO: 5182842 - DNA, 25 bp, Homo sapien
attctggttatggaaatagttggtt

SEQ ID NO: 5182843 - DNA, 25 bp, Homo sapien
ttctggttatggaaatagttggttc

SEQ ID NO: 5182844 - DNA, 25 bp, Homo sapien
gctgtgaccacaaagtcccttaggg

SEQ ID NO: 5182845 - DNA, 25 bp, Homo sapien
gactctgcccgagaatgatgctgta

SEQ ID NO: 5182846 - DNA, 25 bp, Homo sapien
ggaaataattcatctagccaggcgt

SEQ ID NO: 5182847 - DNA, 25 bp, Homo sapien
cagaggccaaagatttccaggaacg

SEQ ID NO: 5182848 - DNA, 25 bp, Homo sapien
tgatcacaaatcagttcccattttt

SEQ ID NO: 5182849 - DNA, 25 bp, Homo sapien
tctcattatcatactgccgcagtaa

SEQ ID NO: 5182850 - DNA, 25 bp, Homo sapien
cagtaacctggctttgtcaggaggt

SEQ ID NO: 5182851 - DNA, 25 bp, Homo sapien
tcatactgccgcagtaacctggctt

SEQ ID NO: 5182852 - DNA, 25 bp, Homo sapien
ggatggcacctctaacagcttctgg

SEQ ID NO: 5182853 - DNA, 25 bp, Homo sapien
ttgggataaatggtctctaacagcc

SEQ ID NO: 5182854 - DNA, 25 bp, Homo sapien
tataacccagcatagggatggcacc

SEQ ID NO: 5182855 - DNA, 25 bp, Homo sapien
gcagccacacacaaaacttcggtaa

SEQ ID NO: 5182856 - DNA, 25 bp, Homo sapien
gagtaatgaggcttcttagtgccac

SEQ ID NO: 5182857 - DNA, 25 bp, Homo sapien
agtctgacctccctgaaacgcttcg

SEQ ID NO: 5182858 - DNA, 25 bp, Homo sapien
tagatcaggacccatgccaagcctg

SEQ ID NO: 5182859 - DNA, 25 bp, Homo sapien
taagtggctacaatttcctgctacc

SEQ ID NO: 5182860 - DNA, 25 bp, Homo sapien
ctgactccaatctctgtagggtagg

SEQ ID NO: 5182861 - DNA, 25 bp, Homo sapien
catttcaaacgagactaagcccttg

SEQ ID NO: 5182862 - DNA, 25 bp, Homo sapien
tctctcccatgtgaaagctataggc

SEQ ID NO: 5182863 - DNA, 25 bp, Homo sapien
gatgtctagctctggcaacgaatac

SEQ ID NO: 5182864 - DNA, 25 bp, Homo sapien
tagactggacttgaaaatcagcacg

SEQ ID NO: 5182865 - DNA, 25 bp, Homo sapien
taaagttggccatttctgcgctaga

SEQ ID NO: 5182866 - DNA, 25 bp, Homo sapien
tcattccacagccatagtttcttgg

SEQ ID NO: 5182867 - DNA, 25 bp, Homo sapien
aatcagcacgacagattcattccac

SEQ ID NO: 5182868 - DNA, 25 bp, Homo sapien
aaaagaaggttctgaagttcactct

SEQ ID NO: 5182869 - DNA, 25 bp, Homo sapien
ctgaagttcactcttgattccaccc

SEQ ID NO: 5182870 - DNA, 25 bp, Homo sapien
aagacagaaaaagaaggttctgaag

SEQ ID NO: 5182871 - DNA, 25 bp, Homo sapien
gaaggttctgaagttcactcttgat

SEQ ID NO: 5182872 - DNA, 25 bp, Homo sapien
actgctgccatggaacccgtgaaaa

SEQ ID NO: 5182873 - DNA, 25 bp, Homo sapien
tgctgccatggaacccgtgaaaaag

SEQ ID NO: 5182874 - DNA, 25 bp, Homo sapien
tccactgctgccatggaacccgtga

SEQ ID NO: 5182875 - DNA, 25 bp, Homo sapien
cactgctgccatggaacccgtgaaa

SEQ ID NO: 5182876 - DNA, 25 bp, Homo sapien
tttgaatgtatgtatggggaggatt

SEQ ID NO: 5182877 - DNA, 25 bp, Homo sapien
cagctggatccagatagcctttgag

SEQ ID NO: 5182878 - DNA, 25 bp, Homo sapien
gctggatccagatagcctttgagct

SEQ ID NO: 5182879 - DNA, 25 bp, Homo sapien
tggatccagatagcctttgagcttt

SEQ ID NO: 5182880 - DNA, 25 bp, Homo sapien
tctggcagaggctctaatgcagagg

SEQ ID NO: 5182881 - DNA, 25 bp, Homo sapien
gcagaggaaggaaggtctcttccaa

SEQ ID NO: 5182882 - DNA, 25 bp, Homo sapien
aggctctggcagaggctctaatgca

SEQ ID NO: 5182883 - DNA, 25 bp, Homo sapien
tctaatgcagaggaaggaaggtctc

SEQ ID NO: 5182884 - DNA, 25 bp, Homo sapien
gcctgaatacctctggaatgcactc

SEQ ID NO: 5182885 - DNA, 25 bp, Homo sapien
cctgaatacctctggaatgcactca

SEQ ID NO: 5182886 - DNA, 25 bp, Homo sapien
ctgaatacctctggaatgcactcac

SEQ ID NO: 5182887 - DNA, 25 bp, Homo sapien
tgcacagctgggatgacaaaggccc

SEQ ID NO: 5182888 - DNA, 25 bp, Homo sapien
taggggggagctgctaaaagcatca

SEQ ID NO: 5182889 - DNA, 25 bp, Homo sapien
cacagctgggatgacaaaggcccag

SEQ ID NO: 5182890 - DNA, 25 bp, Homo sapien
cagctgggatgacaaaggcccagtg

SEQ ID NO: 5182891 - DNA, 25 bp, Homo sapien
tgaaaatggctaactaggtaaagta

SEQ ID NO: 5182892 - DNA, 25 bp, Homo sapien
tgaaacaacagagagaatcagcctg

SEQ ID NO: 5182893 - DNA, 25 bp, Homo sapien
gctatctggtaaagcaccccttcac

SEQ ID NO: 5182894 - DNA, 25 bp, Homo sapien
cgcaggagccttaaaagcaggagtt

SEQ ID NO: 5182895 - DNA, 25 bp, Homo sapien
cagaaatgtcgggaatgaaggccca

SEQ ID NO: 5182896 - DNA, 25 bp, Homo sapien
tgaaggcccaaacagacatcttatg

SEQ ID NO: 5182897 - DNA, 25 bp, Homo sapien
cattcaggtgaacgcacatgggcca

SEQ ID NO: 5182898 - DNA, 25 bp, Homo sapien
gatgaagcacagaccaaacatggcc

SEQ ID NO: 5182899 - DNA, 25 bp, Homo sapien
gcacccagcgtagcactgaggacat

SEQ ID NO: 5182900 - DNA, 25 bp, Homo sapien
gagggtccactgaaggactaagagc

SEQ ID NO: 5182901 - DNA, 25 bp, Homo sapien
gtatgccatcaggcacaagggcacc

SEQ ID NO: 5182902 - DNA, 25 bp, Homo sapien
taagagctatgtatcgaaaccaggt

SEQ ID NO: 5182903 - DNA, 25 bp, Homo sapien
tattcctcacttagagggtccttcc

SEQ ID NO: 5182904 - DNA, 25 bp, Homo sapien
aagaaaacttgatgtcagcgcctcc

SEQ ID NO: 5182905 - DNA, 25 bp, Homo sapien
catttccaagatatcaatgggctac

SEQ ID NO: 5182906 - DNA, 25 bp, Homo sapien
gaatccacctctgatagtaaatgtg

SEQ ID NO: 5182907 - DNA, 25 bp, Homo sapien
tgtgtagattcttgaacacgccgtc

SEQ ID NO: 5182908 - DNA, 25 bp, Homo sapien
tagattcttgaacacgccgtctgaa

SEQ ID NO: 5182909 - DNA, 25 bp, Homo sapien
ttagcacttgtgtagattcttgaac

SEQ ID NO: 5182910 - DNA, 25 bp, Homo sapien
gttctcttagcacttgtgtagattc

SEQ ID NO: 5182911 - DNA, 25 bp, Homo sapien
aatgagagatattccactagaacat

SEQ ID NO: 5182912 - DNA, 25 bp, Homo sapien
gagatattccactagaacatcaaga

SEQ ID NO: 5182913 - DNA, 25 bp, Homo sapien
gatattccactagaacatcaagacc

SEQ ID NO: 5182914 - DNA, 25 bp, Homo sapien
ttccactagaacatcaagacctttg

SEQ ID NO: 5182915 - DNA, 25 bp, Homo sapien
ctttgatttgtccaccgagctctcc

SEQ ID NO: 5182916 - DNA, 25 bp, Homo sapien
tgtgcaggtcctcgatggacctact

SEQ ID NO: 5182917 - DNA, 25 bp, Homo sapien
ttccagagcgggagacactgttgcc

SEQ ID NO: 5182918 - DNA, 25 bp, Homo sapien
gcaggttgctccctctgtgcaggtc

SEQ ID NO: 5182919 - DNA, 25 bp, Homo sapien
ccaaatccaaaggtctgaaagccac

SEQ ID NO: 5182920 - DNA, 25 bp, Homo sapien
caatctgacatatggattctacaac

SEQ ID NO: 5182921 - DNA, 25 bp, Homo sapien
aacaatgactgaatacccggagtga

SEQ ID NO: 5182922 - DNA, 25 bp, Homo sapien
cccggagtgatcgtaaacacttaga

SEQ ID NO: 5182923 - DNA, 25 bp, Homo sapien
tccaaccagcaagcgaaacctgagt

SEQ ID NO: 5182924 - DNA, 25 bp, Homo sapien
aaggagctaagaccacgggtggcac

SEQ ID NO: 5182925 - DNA, 25 bp, Homo sapien
tgaatctatcaaggagcacaaatgg

SEQ ID NO: 5182926 - DNA, 25 bp, Homo sapien
cagcaggcgctatagggaaagaagc

SEQ ID NO: 5182927 - DNA, 25 bp, Homo sapien
gatggcacgtaaacacatgatacag

SEQ ID NO: 5182928 - DNA, 25 bp, Homo sapien
gataattcatgatggcacgtaaaca

SEQ ID NO: 5182929 - DNA, 25 bp, Homo sapien
tctttcttactcactaatcttgaat

SEQ ID NO: 5182930 - DNA, 25 bp, Homo sapien
cacatgatacagacatgcacatcat

SEQ ID NO: 5182931 - DNA, 25 bp, Homo sapien
gtacccttcgcccaagcggtgtaca

SEQ ID NO: 5182932 - DNA, 25 bp, Homo sapien
taaattgtaggatgatgaagtctgg

SEQ ID NO: 5182933 - DNA, 25 bp, Homo sapien
tacaagcagcttttggtaacacaga

SEQ ID NO: 5182934 - DNA, 25 bp, Homo sapien
tttctgagtctgattaattcaggtt

SEQ ID NO: 5182935 - DNA, 25 bp, Homo sapien
cccgaagtatctacctaatgaaact

SEQ ID NO: 5182936 - DNA, 25 bp, Homo sapien
gacaagttagggaactgtcagtatt

SEQ ID NO: 5182937 - DNA, 25 bp, Homo sapien
tatgtctctagtatatcactgtcag

SEQ ID NO: 5182938 - DNA, 25 bp, Homo sapien
tgccagatgcaatgatttgtgcctc

SEQ ID NO: 5182939 - DNA, 25 bp, Homo sapien
aatctcattgacagcgtgtggatga

SEQ ID NO: 5182940 - DNA, 25 bp, Homo sapien
gagacatgaccatgttgaaaccata

SEQ ID NO: 5182941 - DNA, 25 bp, Homo sapien
gatgagacatgaccatgttgaaacc

SEQ ID NO: 5182942 - DNA, 25 bp, Homo sapien
cagcgtgtggatgagacatgaccat

SEQ ID NO: 5182943 - DNA, 25 bp, Homo sapien
ggtgactcagtacaatacagatgaa

SEQ ID NO: 5182944 - DNA, 25 bp, Homo sapien
taatgaaaactagttctgagaagaa

SEQ ID NO: 5182945 - DNA, 25 bp, Homo sapien
aatctcttagacctatcatcaggtg

SEQ ID NO: 5182946 - DNA, 25 bp, Homo sapien
tctgagaagaataatctcttagacc

SEQ ID NO: 5182947 - DNA, 25 bp, Homo sapien
gctgccaacagttctaagacaaggg

SEQ ID NO: 5182948 - DNA, 25 bp, Homo sapien
gcctctgacaagacaaacggctgcc

SEQ ID NO: 5182949 - DNA, 25 bp, Homo sapien
tttcatgcccgcctctgacaagaca

SEQ ID NO: 5182950 - DNA, 25 bp, Homo sapien
tgccaacagttctaagacaagggct

SEQ ID NO: 5182951 - DNA, 25 bp, Homo sapien
gactagcagtaaggaggcaatgcaa

SEQ ID NO: 5182952 - DNA, 25 bp, Homo sapien
ggaagttcaggatcaggagcaccaa

SEQ ID NO: 5182953 - DNA, 25 bp, Homo sapien
gaaatagctccgaagtcctgtctca

SEQ ID NO: 5182954 - DNA, 25 bp, Homo sapien
caagggattcacaaacaataaggcc

SEQ ID NO: 5182955 - DNA, 25 bp, Homo sapien
cagattgctagctatggtccatgtc

SEQ ID NO: 5182956 - DNA, 25 bp, Homo sapien
tctggtggcgcagcttcaaaggcag

SEQ ID NO: 5182957 - DNA, 25 bp, Homo sapien
gagccagagtatagccacattttag

SEQ ID NO: 5182958 - DNA, 25 bp, Homo sapien
agagttttatgagccagcagattgc

SEQ ID NO: 5182959 - DNA, 25 bp, Homo sapien
actgggccctgtacaaacagtatgg

SEQ ID NO: 5182960 - DNA, 25 bp, Homo sapien
ttaatcacaggtttccagtctctcc

SEQ ID NO: 5182961 - DNA, 25 bp, Homo sapien
tgttctgtaacatggaccctggtca

SEQ ID NO: 5182962 - DNA, 25 bp, Homo sapien
gacttatgctgcctttgagacagat

SEQ ID NO: 5182963 - DNA, 25 bp, Homo sapien
aactgaaccacctgtcttccagact

SEQ ID NO: 5182964 - DNA, 25 bp, Homo sapien
cacaatactcctaaagttttatcca

SEQ ID NO: 5182965 - DNA, 25 bp, Homo sapien
tgagtcatttgacaactgaaccacc

SEQ ID NO: 5182966 - DNA, 25 bp, Homo sapien
ctgcagagctacacaatactcctaa

SEQ ID NO: 5182967 - DNA, 25 bp, Homo sapien
tctagcccattctaaccttgtctct

SEQ ID NO: 5182968 - DNA, 25 bp, Homo sapien
cattctaaccttgtctcttcactct

SEQ ID NO: 5182969 - DNA, 25 bp, Homo sapien
tctaaccttgtctcttcactctttt

SEQ ID NO: 5182970 - DNA, 25 bp, Homo sapien
agcccattctaaccttgtctcttca

SEQ ID NO: 5182971 - DNA, 25 bp, Homo sapien
cctctcatcctcttgaccaccttcc

SEQ ID NO: 5182972 - DNA, 25 bp, Homo sapien
cttcccctttgtactgtgctggtct

SEQ ID NO: 5182973 - DNA, 25 bp, Homo sapien
atcacaatataccagacccaccagg

SEQ ID NO: 5182974 - DNA, 25 bp, Homo sapien
tgaccaccttcccctttgtactgtg

SEQ ID NO: 5182975 - DNA, 25 bp, Homo sapien
cccccacgcactgggtgaaacagga

SEQ ID NO: 5182976 - DNA, 25 bp, Homo sapien
tcgttcatactgctcacatctggag

SEQ ID NO: 5182977 - DNA, 25 bp, Homo sapien
gttggtaaaagttgtgtcccacatc

SEQ ID NO: 5182978 - DNA, 25 bp, Homo sapien
acaagtgtacactacaatcccacag

SEQ ID NO: 5182979 - DNA, 25 bp, Homo sapien
tttgctgccaatctcaactaatgaa

SEQ ID NO: 5182980 - DNA, 25 bp, Homo sapien
gtgtttcctgacacattccacaggc

SEQ ID NO: 5182981 - DNA, 25 bp, Homo sapien
aactcagggttgtgtttcctgacac

SEQ ID NO: 5182982 - DNA, 25 bp, Homo sapien
caatctcaactaatgaactcagggt

SEQ ID NO: 5182983 - DNA, 25 bp, Homo sapien
taggaatgccgcaggaatggaccca

SEQ ID NO: 5182984 - DNA, 25 bp, Homo sapien
tcctagggaggcaaagctcttcgaa

SEQ ID NO: 5182985 - DNA, 25 bp, Homo sapien
gaataagaatctccccagatgggcc

SEQ ID NO: 5182986 - DNA, 25 bp, Homo sapien
taaggcattccagcagtatctgaga

SEQ ID NO: 5182987 - DNA, 25 bp, Homo sapien
catcaacttctcaaagcgctgtttt

SEQ ID NO: 5182988 - DNA, 25 bp, Homo sapien
ataaaatctatgttattgtcttcat

SEQ ID NO: 5182989 - DNA, 25 bp, Homo sapien
atcaacttctcaaagcgctgttttt

SEQ ID NO: 5182990 - DNA, 25 bp, Homo sapien
cataaaatctatgttattgtcttca

SEQ ID NO: 5182991 - DNA, 25 bp, Homo sapien
gtctttactataccgtgtatgtaag

SEQ ID NO: 5182992 - DNA, 25 bp, Homo sapien
gagggacattctagattggatctat

SEQ ID NO: 5182993 - DNA, 25 bp, Homo sapien
cattctagattggatctatagcata

SEQ ID NO: 5182994 - DNA, 25 bp, Homo sapien
tactataccgtgtatgtaaggaata

SEQ ID NO: 5182995 - DNA, 25 bp, Homo sapien
ttgggtcaacgcctacagatctggg

SEQ ID NO: 5182996 - DNA, 25 bp, Homo sapien
tacagcccggttaggatctcctggg

SEQ ID NO: 5182997 - DNA, 25 bp, Homo sapien
tcttacccgagaatgacaggactgc

SEQ ID NO: 5182998 - DNA, 25 bp, Homo sapien
cagatctgggtgcactcaagcgtaa

SEQ ID NO: 5182999 - DNA, 25 bp, Homo sapien
gtccaagtattcgtccaggcctaat

SEQ ID NO: 5183000 - DNA, 25 bp, Homo sapien
aattcatactgcaggtgaactctga

SEQ ID NO: 5183001 - DNA, 25 bp, Homo sapien
tggactacaatattaataaactgca

SEQ ID NO: 5183002 - DNA, 25 bp, Homo sapien
catatcttctactgaatggactaca

SEQ ID NO: 5183003 - DNA, 25 bp, Homo sapien
tccagtagagctcctacatcaaaaa

SEQ ID NO: 5183004 - DNA, 25 bp, Homo sapien
ccaaggcagcattcttagtttcagc

SEQ ID NO: 5183005 - DNA, 25 bp, Homo sapien
gcttgtcactctcagtgtgtttcag

SEQ ID NO: 5183006 - DNA, 25 bp, Homo sapien
cctggatctggacttgaagcttgtc

SEQ ID NO: 5183007 - DNA, 25 bp, Homo sapien
atgagaaatgttttcttccagttct

SEQ ID NO: 5183008 - DNA, 25 bp, Homo sapien
gaaatgttttcttccagttcttcca

SEQ ID NO: 5183009 - DNA, 25 bp, Homo sapien
tgagaaatgttttcttccagttctt

SEQ ID NO: 5183010 - DNA, 25 bp, Homo sapien
gagaaatgttttcttccagttcttc

SEQ ID NO: 5183011 - DNA, 25 bp, Homo sapien
gctttgcaaccagctgaaatgtaag

SEQ ID NO: 5183012 - DNA, 25 bp, Homo sapien
tttgcaaccagctgaaatgtaagca

SEQ ID NO: 5183013 - DNA, 25 bp, Homo sapien
tgcaaccagctgaaatgtaagcaat

SEQ ID NO: 5183014 - DNA, 25 bp, Homo sapien
attaattctgctttgcaaccagctg

SEQ ID NO: 5183015 - DNA, 25 bp, Homo sapien
cataacacatctgctttttggaaaa

SEQ ID NO: 5183016 - DNA, 25 bp, Homo sapien
gcttgagcctgtaagcaagactgcc

SEQ ID NO: 5183017 - DNA, 25 bp, Homo sapien
tctcttgcagggtatggcctattcc

SEQ ID NO: 5183018 - DNA, 25 bp, Homo sapien
tgagctaaagcaaagcaacagattc

SEQ ID NO: 5183019 - DNA, 25 bp, Homo sapien
gaaagctgtcacaatacaggatcat

SEQ ID NO: 5183020 - DNA, 25 bp, Homo sapien
tccagttccacaatcttggacatgg

SEQ ID NO: 5183021 - DNA, 25 bp, Homo sapien
gcttttccagttccacaatcttgga

SEQ ID NO: 5183022 - DNA, 25 bp, Homo sapien
caatcttggacatggcttcattctc

SEQ ID NO: 5183023 - DNA, 25 bp, Homo sapien
tccacaatcttggacatggcttcat

SEQ ID NO: 5183024 - DNA, 25 bp, Homo sapien
cgtgcccatctgggcagttgtcatc

SEQ ID NO: 5183025 - DNA, 25 bp, Homo sapien
gggcagttgtcatcattacacttac

SEQ ID NO: 5183026 - DNA, 25 bp, Homo sapien
tgggcagttgtcatcattacactta

SEQ ID NO: 5183027 - DNA, 25 bp, Homo sapien
gcccatctgggcagttgtcatcatt

SEQ ID NO: 5183028 - DNA, 25 bp, Homo sapien
tgaccccatggacaatgtgccagaa

SEQ ID NO: 5183029 - DNA, 25 bp, Homo sapien
ccatttttcttaatgtgtgaacttg

SEQ ID NO: 5183030 - DNA, 25 bp, Homo sapien
tcttctgaattttaatggtcccttg

SEQ ID NO: 5183031 - DNA, 25 bp, Homo sapien
cacaactggcagtatggcgatatcc

SEQ ID NO: 5183032 - DNA, 25 bp, Homo sapien
agggtcctgaggaagcggcccccat

SEQ ID NO: 5183033 - DNA, 25 bp, Homo sapien
tgaggaagcggcccccattgtgggt

SEQ ID NO: 5183034 - DNA, 25 bp, Homo sapien
cctgaggaagcggcccccattgtgg

SEQ ID NO: 5183035 - DNA, 25 bp, Homo sapien
ggtcctgaggaagcggcccccattg

SEQ ID NO: 5183036 - DNA, 25 bp, Homo sapien
cacacttaaaaggacaaaggactgt

SEQ ID NO: 5183037 - DNA, 25 bp, Homo sapien
gacagaagtggacagttggcaaaag

SEQ ID NO: 5183038 - DNA, 25 bp, Homo sapien
gaacatgccaacaaaaacggacaaa

SEQ ID NO: 5183039 - DNA, 25 bp, Homo sapien
tggactttgaaaatacgggaatggc

SEQ ID NO: 5183040 - DNA, 25 bp, Homo sapien
tggcataggtggtgttactggacca

SEQ ID NO: 5183041 - DNA, 25 bp, Homo sapien
aggtggtgttactggaccattttgc

SEQ ID NO: 5183042 - DNA, 25 bp, Homo sapien
gcggcggtggcataggtggtgttac

SEQ ID NO: 5183043 - DNA, 25 bp, Homo sapien
cataggtggtgttactggaccattt

SEQ ID NO: 5183044 - DNA, 25 bp, Homo sapien
aggtgctaagggaggagctggtaca

SEQ ID NO: 5183045 - DNA, 25 bp, Homo sapien
gagctggtacagtctcagctgcagg

SEQ ID NO: 5183046 - DNA, 25 bp, Homo sapien
ccaggcagcggaggtgcagagggaa

SEQ ID NO: 5183047 - DNA, 25 bp, Homo sapien
tgggtgaagatgttccaggcagcgg

SEQ ID NO: 5183048 - DNA, 25 bp, Homo sapien
gacagtggctgactagactaccaga

SEQ ID NO: 5183049 - DNA, 25 bp, Homo sapien
agcagactaagggatatgaatggcc

SEQ ID NO: 5183050 - DNA, 25 bp, Homo sapien
taccagaagtacaacgtcatgaagg

SEQ ID NO: 5183051 - DNA, 25 bp, Homo sapien
tcatgaaggctgacttcctgtgggt

SEQ ID NO: 5183052 - DNA, 25 bp, Homo sapien
taaacactggcattctgaacttcgt

SEQ ID NO: 5183053 - DNA, 25 bp, Homo sapien
cagaattcgctcatcatcaatttca

SEQ ID NO: 5183054 - DNA, 25 bp, Homo sapien
gaacttcgtcttgattggcttctta

SEQ ID NO: 5183055 - DNA, 25 bp, Homo sapien
gccattgatctgattgggcttcaga

SEQ ID NO: 5183056 - DNA, 25 bp, Homo sapien
tacatatttcatcagcagtctttcc

SEQ ID NO: 5183057 - DNA, 25 bp, Homo sapien
ggccctgtttgcttctagtaatgtc

SEQ ID NO: 5183058 - DNA, 25 bp, Homo sapien
aaagatcaatggcaggtccttgggc

SEQ ID NO: 5183059 - DNA, 25 bp, Homo sapien
ccagctttccttaaagttatggcaa

SEQ ID NO: 5183060 - DNA, 25 bp, Homo sapien
gaaccgcatcaagcattccacaaag

SEQ ID NO: 5183061 - DNA, 25 bp, Homo sapien
catgaaccgatcttcatctgacaag

SEQ ID NO: 5183062 - DNA, 25 bp, Homo sapien
tcgtagagccgaagcactttcactt

SEQ ID NO: 5183063 - DNA, 25 bp, Homo sapien
ttcattctcagttggtaggaaccgc

SEQ ID NO: 5183064 - DNA, 25 bp, Homo sapien
ttttgggacgactttatagagacag

SEQ ID NO: 5183065 - DNA, 25 bp, Homo sapien
tgagtttttgggacgactttataga

SEQ ID NO: 5183066 - DNA, 25 bp, Homo sapien
cagatgctgctataatcgcatgtag

SEQ ID NO: 5183067 - DNA, 25 bp, Homo sapien
gatgctgctataatcgcatgtagtt

SEQ ID NO: 5183068 - DNA, 25 bp, Homo sapien
ttaaatccataaactgctcctcttt

SEQ ID NO: 5183069 - DNA, 25 bp, Homo sapien
cttttactgctattcatgtagtttc

SEQ ID NO: 5183070 - DNA, 25 bp, Homo sapien
cctcttttactgctattcatgtagt

SEQ ID NO: 5183071 - DNA, 25 bp, Homo sapien
tttactgctattcatgtagtttcca

SEQ ID NO: 5183072 - DNA, 25 bp, Homo sapien
gctttttccacataatgaagctcat

SEQ ID NO: 5183073 - DNA, 25 bp, Homo sapien
ccacattggatatatagtgcaacag

SEQ ID NO: 5183074 - DNA, 25 bp, Homo sapien
ttctttcaccacattggatatatag

SEQ ID NO: 5183075 - DNA, 25 bp, Homo sapien
cattggatatatagtgcaacagtgt

SEQ ID NO: 5183076 - DNA, 25 bp, Homo sapien
ttgtaaagcagtgaagacaactcgc

SEQ ID NO: 5183077 - DNA, 25 bp, Homo sapien
gcaatgcatttggtggttcaggaag

SEQ ID NO: 5183078 - DNA, 25 bp, Homo sapien
aatgacgtattaacttgctgtttgt

SEQ ID NO: 5183079 - DNA, 25 bp, Homo sapien
actctgcacgtggacaaattattgg

SEQ ID NO: 5183080 - DNA, 25 bp, Homo sapien
tccagcaaaacattctcaagggaga

SEQ ID NO: 5183081 - DNA, 25 bp, Homo sapien
tggagctccttgacatccagcaaaa

SEQ ID NO: 5183082 - DNA, 25 bp, Homo sapien
catccagcaaaacattctcaaggga

SEQ ID NO: 5183083 - DNA, 25 bp, Homo sapien
gagctccttgacatccagcaaaaca

SEQ ID NO: 5183084 - DNA, 25 bp, Homo sapien
tgttgaggatgaactccttcagcag

SEQ ID NO: 5183085 - DNA, 25 bp, Homo sapien
cttcagcagcgtgttatggtcatgc

SEQ ID NO: 5183086 - DNA, 25 bp, Homo sapien
tcatgcatggtgtactctctcttgg

SEQ ID NO: 5183087 - DNA, 25 bp, Homo sapien
ttcagcttcccctcattgttgagga

SEQ ID NO: 5183088 - DNA, 25 bp, Homo sapien
cacaggcagctttaatggatgcagc

SEQ ID NO: 5183089 - DNA, 25 bp, Homo sapien
gaaatggaacatttctccccaaata

SEQ ID NO: 5183090 - DNA, 25 bp, Homo sapien
tccacaaacagagggaaatggaaca

SEQ ID NO: 5183091 - DNA, 25 bp, Homo sapien
cctccacaaacagagggaaatggaa

SEQ ID NO: 5183092 - DNA, 25 bp, Homo sapien
cagagggaaatggaacatttctccc

SEQ ID NO: 5183093 - DNA, 25 bp, Homo sapien
agtttcattagttaggcatttgaac

SEQ ID NO: 5183094 - DNA, 25 bp, Homo sapien
tgagtttcattagttaggcatttga

SEQ ID NO: 5183095 - DNA, 25 bp, Homo sapien
tttcattagttaggcatttgaactg

SEQ ID NO: 5183096 - DNA, 25 bp, Homo sapien
cttgagtttcattagttaggcattt

SEQ ID NO: 5183097 - DNA, 25 bp, Homo sapien
agacagagggtggtgttgtcttggg

SEQ ID NO: 5183098 - DNA, 25 bp, Homo sapien
ctttcacaaaccggacaaagacagg

SEQ ID NO: 5183099 - DNA, 25 bp, Homo sapien
ttcacaaaccggacaaagacaggaa

SEQ ID NO: 5183100 - DNA, 25 bp, Homo sapien
cagagggtggtgttgtcttggggtt

SEQ ID NO: 5183101 - DNA, 25 bp, Homo sapien
gcaatgtctttgagcatctcccttg

SEQ ID NO: 5183102 - DNA, 25 bp, Homo sapien
aagtacttcaccttgcctgcctagg

SEQ ID NO: 5183103 - DNA, 25 bp, Homo sapien
cctgcctaggtgaacagtcaatggg

SEQ ID NO: 5183104 - DNA, 25 bp, Homo sapien
cattaaagaattccacaagaggcct

SEQ ID NO: 5183105 - DNA, 25 bp, Homo sapien
gatgcctcaggctttgagacaaacc

SEQ ID NO: 5183106 - DNA, 25 bp, Homo sapien
gagggatgatgtcctaaaaccccaa

SEQ ID NO: 5183107 - DNA, 25 bp, Homo sapien
gctaggaggctattcatcacgtata

SEQ ID NO: 5183108 - DNA, 25 bp, Homo sapien
gaagagacctctagttgtcaagctg

SEQ ID NO: 5183109 - DNA, 25 bp, Homo sapien
gaaggcagtgtgactagtctgatga

SEQ ID NO: 5183110 - DNA, 25 bp, Homo sapien
aggcagtgtgactagtctgatgaat

SEQ ID NO: 5183111 - DNA, 25 bp, Homo sapien
gtgacactcttggactctcccatgc

SEQ ID NO: 5183112 - DNA, 25 bp, Homo sapien
agagtgacactcttggactctccca

SEQ ID NO: 5183113 - DNA, 25 bp, Homo sapien
cctgatgatcgctccctgtttgaac

SEQ ID NO: 5183114 - DNA, 25 bp, Homo sapien
tctgggcttcgctacctgtcacatc

SEQ ID NO: 5183115 - DNA, 25 bp, Homo sapien
tacctagagttcctctgatagcagg

SEQ ID NO: 5183116 - DNA, 25 bp, Homo sapien
cagagacagtctgcctacctagagt

SEQ ID NO: 5183117 - DNA, 25 bp, Homo sapien
agagcttcttgctctaggagttttt

SEQ ID NO: 5183118 - DNA, 25 bp, Homo sapien
ttttccatgagagcttgttcctgct

SEQ ID NO: 5183119 - DNA, 25 bp, Homo sapien
tcttgctctaggagtttttccatga

SEQ ID NO: 5183120 - DNA, 25 bp, Homo sapien
agcttcttgctctaggagtttttcc

SEQ ID NO: 5183121 - DNA, 25 bp, Homo sapien
gataatatcttcaatggcaccatct

SEQ ID NO: 5183122 - DNA, 25 bp, Homo sapien
tcgtcttcttaattctgcaattaac

SEQ ID NO: 5183123 - DNA, 25 bp, Homo sapien
tgtgataatatcttcaatggcacca

SEQ ID NO: 5183124 - DNA, 25 bp, Homo sapien
tatctttaacttgtcgtcttcttaa

SEQ ID NO: 5183125 - DNA, 25 bp, Homo sapien
taaatggacttcaaagcctctctgc

SEQ ID NO: 5183126 - DNA, 25 bp, Homo sapien
catcccagtctaggtgaggccagtg

SEQ ID NO: 5183127 - DNA, 25 bp, Homo sapien
tgaacttgacaaccctggacaaaag

SEQ ID NO: 5183128 - DNA, 25 bp, Homo sapien
gccagtgggatctccatgggccaca

SEQ ID NO: 5183129 - DNA, 25 bp, Homo sapien
caggctgggttaacacaattcttgg

SEQ ID NO: 5183130 - DNA, 25 bp, Homo sapien
gctggaagcctgttggctcacccaa

SEQ ID NO: 5183131 - DNA, 25 bp, Homo sapien
aaatggatgagggatacatgggacc

SEQ ID NO: 5183132 - DNA, 25 bp, Homo sapien
tcaatcagacaggaaccaggctggg

SEQ ID NO: 5183133 - DNA, 25 bp, Homo sapien
gctttggggtggatcagaaaatgaa

SEQ ID NO: 5183134 - DNA, 25 bp, Homo sapien
gggggaaggcaatatatactcaagt

SEQ ID NO: 5183135 - DNA, 25 bp, Homo sapien
cattagtacatggttagtgcattgt

SEQ ID NO: 5183136 - DNA, 25 bp, Homo sapien
aaaaagccaagatctattgcattag

SEQ ID NO: 5183137 - DNA, 25 bp, Homo sapien
gcagtaaagggcacagtcttcagca

SEQ ID NO: 5183138 - DNA, 25 bp, Homo sapien
cacgcttggcggtgcgagcagtaaa

SEQ ID NO: 5183139 - DNA, 25 bp, Homo sapien
tagtaatggtattcctcagtgagaa

SEQ ID NO: 5183140 - DNA, 25 bp, Homo sapien
gaacaggttcgcagaaaaaccgaga

SEQ ID NO: 5183141 - DNA, 25 bp, Homo sapien
aagagcatcaggtgagaaagagtaa

SEQ ID NO: 5183142 - DNA, 25 bp, Homo sapien
cttttaagagcatcaggtgagaaag

SEQ ID NO: 5183143 - DNA, 25 bp, Homo sapien
gagcatcaggtgagaaagagtaata

SEQ ID NO: 5183144 - DNA, 25 bp, Homo sapien
gcatcaggtgagaaagagtaatagt

SEQ ID NO: 5183145 - DNA, 25 bp, Homo sapien
catacatgtattgaaagtggccagt

SEQ ID NO: 5183146 - DNA, 25 bp, Homo sapien
catgctagcatgttggtgggccctg

SEQ ID NO: 5183147 - DNA, 25 bp, Homo sapien
gaaatgcaaaaccatgcagcatgag

SEQ ID NO: 5183148 - DNA, 25 bp, Homo sapien
tggagatggcaattccatgctagca

SEQ ID NO: 5183149 - DNA, 25 bp, Homo sapien
catgttaggtatagcagttattgtt

SEQ ID NO: 5183150 - DNA, 25 bp, Homo sapien
cactgcatccaacctgaacacagta

SEQ ID NO: 5183151 - DNA, 25 bp, Homo sapien
tcttaatacatgttaggtatagcag

SEQ ID NO: 5183152 - DNA, 25 bp, Homo sapien
ctgcatccaacctgaacacagtaag

SEQ ID NO: 5183153 - DNA, 25 bp, Homo sapien
cacaggagtcaatggctacgtccaa

SEQ ID NO: 5183154 - DNA, 25 bp, Homo sapien
gtttgacatggaacagagctaccgg

SEQ ID NO: 5183155 - DNA, 25 bp, Homo sapien
ggtgccatcatcctgaccaaagaag

SEQ ID NO: 5183156 - DNA, 25 bp, Homo sapien
gagctaccggtgaagatgcgtgaat

SEQ ID NO: 5183157 - DNA, 25 bp, Homo sapien
tgggtaagtacactgcagagcaggc

SEQ ID NO: 5183158 - DNA, 25 bp, Homo sapien
gatatagtccaacagcaaaactgac

SEQ ID NO: 5183159 - DNA, 25 bp, Homo sapien
gacagcaaacatcagccaagcagat

SEQ ID NO: 5183160 - DNA, 25 bp, Homo sapien
gaaggatgagtgcatcttcccaccc

SEQ ID NO: 5183161 - DNA, 25 bp, Homo sapien
tggaaatttagtgatattattcttc

SEQ ID NO: 5183162 - DNA, 25 bp, Homo sapien
cctcgagtgaacatttggaaattta

SEQ ID NO: 5183163 - DNA, 25 bp, Homo sapien
ttagtgatattattcttctttaagg

SEQ ID NO: 5183164 - DNA, 25 bp, Homo sapien
gaaatttagtgatattattcttctt

SEQ ID NO: 5183165 - DNA, 25 bp, Homo sapien
cctccaccaccggtgtgctagaaga

SEQ ID NO: 5183166 - DNA, 25 bp, Homo sapien
caccaccggtgtgctagaagaaatc

SEQ ID NO: 5183167 - DNA, 25 bp, Homo sapien
ccaccggtgtgctagaagaaatcct

SEQ ID NO: 5183168 - DNA, 25 bp, Homo sapien
gtgtatcctccaccaccggtgtgct

SEQ ID NO: 5183169 - DNA, 25 bp, Homo sapien
ccctcagccatagattgaaaaccat

SEQ ID NO: 5183170 - DNA, 25 bp, Homo sapien
cctcagccatagattgaaaaccatt

SEQ ID NO: 5183171 - DNA, 25 bp, Homo sapien
cagccatagattgaaaaccattgat

SEQ ID NO: 5183172 - DNA, 25 bp, Homo sapien
ctcagccatagattgaaaaccattg

SEQ ID NO: 5183173 - DNA, 25 bp, Homo sapien
gctgtaatgttacctggccaggacc

SEQ ID NO: 5183174 - DNA, 25 bp, Homo sapien
cagtcgcttcagatcaaaatgggtt

SEQ ID NO: 5183175 - DNA, 25 bp, Homo sapien
cccacactggtaatgaaaggccaga

SEQ ID NO: 5183176 - DNA, 25 bp, Homo sapien
taaaagcaggccgagaaagagtcca

SEQ ID NO: 5183177 - DNA, 25 bp, Homo sapien
ttaatagcatgtgtctaagcaggac

SEQ ID NO: 5183178 - DNA, 25 bp, Homo sapien
ccagctggcagccaatcaaagcagc

SEQ ID NO: 5183179 - DNA, 25 bp, Homo sapien
aagtcagctaatgggcccttcaaac

SEQ ID NO: 5183180 - DNA, 25 bp, Homo sapien
tgtaatactggtaggattctaggac

SEQ ID NO: 5183181 - DNA, 25 bp, Homo sapien
ctgatcatcaaagcgccgcctgacg

SEQ ID NO: 5183182 - DNA, 25 bp, Homo sapien
gctcgtctgtatggttggtttctaa

SEQ ID NO: 5183183 - DNA, 25 bp, Homo sapien
tcggcaccattaacagaacgcaagt

SEQ ID NO: 5183184 - DNA, 25 bp, Homo sapien
tcaccgcatcggctcgtctgtatgg

SEQ ID NO: 5183185 - DNA, 25 bp, Homo sapien
ctgtattcatgcaggccagtctcag

SEQ ID NO: 5183186 - DNA, 25 bp, Homo sapien
tgattaatctgaacaggtacttcca

SEQ ID NO: 5183187 - DNA, 25 bp, Homo sapien
caaggctgcagttaaatcgtagcac

SEQ ID NO: 5183188 - DNA, 25 bp, Homo sapien
catgtgggcagtttcattcacgcac

SEQ ID NO: 5183189 - DNA, 25 bp, Homo sapien
cgattgtcagaggagagtaaggcca

SEQ ID NO: 5183190 - DNA, 25 bp, Homo sapien
tcgaagacatctcagcaaaggaccc

SEQ ID NO: 5183191 - DNA, 25 bp, Homo sapien
catttatgggaatgtgcccgcaggt

SEQ ID NO: 5183192 - DNA, 25 bp, Homo sapien
gccagggcctggttatagacaaaag

SEQ ID NO: 5183193 - DNA, 25 bp, Homo sapien
cagtcataattgaagtgcacccaaa

SEQ ID NO: 5183194 - DNA, 25 bp, Homo sapien
taactggtggtcatgtaagttcctc

SEQ ID NO: 5183195 - DNA, 25 bp, Homo sapien
tccttgtggaataggacagtgcctg

SEQ ID NO: 5183196 - DNA, 25 bp, Homo sapien
taagttcctcggtggcagggattta

SEQ ID NO: 5183197 - DNA, 25 bp, Homo sapien
tcattagccagagtagcttcagcat

SEQ ID NO: 5183198 - DNA, 25 bp, Homo sapien
caaaagtgcattttatgcctcccag

SEQ ID NO: 5183199 - DNA, 25 bp, Homo sapien
taagggaatcagttaatggtaggat

SEQ ID NO: 5183200 - DNA, 25 bp, Homo sapien
tatgggcctcacttcgtacaactat

SEQ ID NO: 5183201 - DNA, 25 bp, Homo sapien
gtctgattcagaccagggactctat

SEQ ID NO: 5183202 - DNA, 25 bp, Homo sapien
tgctggaaacttggtagacccttaa

SEQ ID NO: 5183203 - DNA, 25 bp, Homo sapien
cacagggcactgtaggatggattaa

SEQ ID NO: 5183204 - DNA, 25 bp, Homo sapien
gctacccaactggttaaagccaatg

SEQ ID NO: 5183205 - DNA, 25 bp, Homo sapien
tccaccctacccctggcggcctcag

SEQ ID NO: 5183206 - DNA, 25 bp, Homo sapien
gcgtacggagatcgaaccctctcct

SEQ ID NO: 5183207 - DNA, 25 bp, Homo sapien
caccgctaacactacaggctgctta

SEQ ID NO: 5183208 - DNA, 25 bp, Homo sapien
ctggtgcgtacggagatcgaaccct

SEQ ID NO: 5183209 - DNA, 25 bp, Homo sapien
gcgcgcgcgcattcggtcccagcca

SEQ ID NO: 5183210 - DNA, 25 bp, Homo sapien
gaaggctgtcgagtatccactccct

SEQ ID NO: 5183211 - DNA, 25 bp, Homo sapien
gctctcgcggttccttaactgctca

SEQ ID NO: 5183212 - DNA, 25 bp, Homo sapien
aaagcctcatcttttcgacgccggg

SEQ ID NO: 5183213 - DNA, 25 bp, Homo sapien
ggaatgcgcttcgaccagagctcga

SEQ ID NO: 5183214 - DNA, 25 bp, Homo sapien
tgagtaaaggaggaatacgatggcc

SEQ ID NO: 5183215 - DNA, 25 bp, Homo sapien
aatacgatggccgagccacagggcc

SEQ ID NO: 5183216 - DNA, 25 bp, Homo sapien
taaaggaggaatacgatggccgagc

SEQ ID NO: 5183217 - DNA, 25 bp, Homo sapien
gccacccgctctcagcaaacgacat

SEQ ID NO: 5183218 - DNA, 25 bp, Homo sapien
cttatcgggcagaacgggcgacccg

SEQ ID NO: 5183219 - DNA, 25 bp, Homo sapien
cagcgagcagagaatagagaggacc

SEQ ID NO: 5183220 - DNA, 25 bp, Homo sapien
gcggccgcgggaaagataccattgc

SEQ ID NO: 5183221 - DNA, 25 bp, Homo sapien
tttaacgatcaagtaggcgatggcg

SEQ ID NO: 5183222 - DNA, 25 bp, Homo sapien
actttcaaggcgtcggcttcaatac

SEQ ID NO: 5183223 - DNA, 25 bp, Homo sapien
acagactttcaaggcgtcggcttca

SEQ ID NO: 5183224 - DNA, 25 bp, Homo sapien
tggacagactttcaaggcgtcggct

SEQ ID NO: 5183225 - DNA, 25 bp, Homo sapien
tctggacagactttcaaggcgtcgg

SEQ ID NO: 5183226 - DNA, 25 bp, Homo sapien
catccccagtgttcaaggacttgaa

SEQ ID NO: 5183227 - DNA, 25 bp, Homo sapien
caaagtaagatgcaaatgaggactc

SEQ ID NO: 5183228 - DNA, 25 bp, Homo sapien
tgatcatggatcaggacgctccact

SEQ ID NO: 5183229 - DNA, 25 bp, Homo sapien
ttaaaaatacgtctcctgatcatgg

SEQ ID NO: 5183230 - DNA, 25 bp, Homo sapien
acagaactccgtgcactacacctgg

SEQ ID NO: 5183231 - DNA, 25 bp, Homo sapien
caaaattattagaggacgagtggac

SEQ ID NO: 5183232 - DNA, 25 bp, Homo sapien
acttggcaaaggtcacaaactagtg

SEQ ID NO: 5183233 - DNA, 25 bp, Homo sapien
taaattatacaaccgtatgccttgc

SEQ ID NO: 5183234 - DNA, 25 bp, Homo sapien
gccatgccatctgtagcccactaaa

SEQ ID NO: 5183235 - DNA, 25 bp, Homo sapien
gaaaatcaagcattgtaaggtttta

SEQ ID NO: 5183236 - DNA, 25 bp, Homo sapien
ggttttagatgccatgccatctgta

SEQ ID NO: 5183237 - DNA, 25 bp, Homo sapien
gatgccatgccatctgtagcccact

SEQ ID NO: 5183238 - DNA, 25 bp, Homo sapien
tgaaaagtaactcaagggctgtgaa

SEQ ID NO: 5183239 - DNA, 25 bp, Homo sapien
caatgtcttctgcaatggaattcca

SEQ ID NO: 5183240 - DNA, 25 bp, Homo sapien
ctaaagggcatactaggtggagttc

SEQ ID NO: 5183241 - DNA, 25 bp, Homo sapien
taatgtgttgaccactaagggagcc

SEQ ID NO: 5183242 - DNA, 25 bp, Homo sapien
aatagtccagtgtctacatcatctt

SEQ ID NO: 5183243 - DNA, 25 bp, Homo sapien
catttttcaaattctcagcatgcaa

SEQ ID NO: 5183244 - DNA, 25 bp, Homo sapien
ctaatagtccagtgtctacatcatc

SEQ ID NO: 5183245 - DNA, 25 bp, Homo sapien
tttttcaaattctcagcatgcaact

SEQ ID NO: 5183246 - DNA, 25 bp, Homo sapien
gaaacacaaacgtgagctcaaaacc

SEQ ID NO: 5183247 - DNA, 25 bp, Homo sapien
tcaaacatgatctagaaacacaaac

SEQ ID NO: 5183248 - DNA, 25 bp, Homo sapien
aagcaagcggcaattaagtccatac

SEQ ID NO: 5183249 - DNA, 25 bp, Homo sapien
aaaccaaagcaagcggcaattaagt

SEQ ID NO: 5183250 - DNA, 25 bp, Homo sapien
caaattataaagtccacacactggc

SEQ ID NO: 5183251 - DNA, 25 bp, Homo sapien
cccaagtgattgttacccataccaa

SEQ ID NO: 5183252 - DNA, 25 bp, Homo sapien
gatgaaatattagagctaccccacc

SEQ ID NO: 5183253 - DNA, 25 bp, Homo sapien
cccagccacagatagcactgtaaca

SEQ ID NO: 5183254 - DNA, 25 bp, Homo sapien
caccaaagttggactacagagtacc

SEQ ID NO: 5183255 - DNA, 25 bp, Homo sapien
tattctgcaccatgtgaagagcagc

SEQ ID NO: 5183256 - DNA, 25 bp, Homo sapien
gagccctgattgtacagtgtacact

SEQ ID NO: 5183257 - DNA, 25 bp, Homo sapien
tagggtctaagattccgtaaaagca

SEQ ID NO: 5183258 - DNA, 25 bp, Homo sapien
tcacaagagcgtacttacaaaaacc

SEQ ID NO: 5183259 - DNA, 25 bp, Homo sapien
gttactataccaaatactgcacgcg

SEQ ID NO: 5183260 - DNA, 25 bp, Homo sapien
tacaatgaatggagcttacaggaca

SEQ ID NO: 5183261 - DNA, 25 bp, Homo sapien
ttccaatgctacagacctgtgcggc

SEQ ID NO: 5183262 - DNA, 25 bp, Homo sapien
tatagacacctatctaagggtatat

SEQ ID NO: 5183263 - DNA, 25 bp, Homo sapien
ggatttcagtcagacgccaccacgt

SEQ ID NO: 5183264 - DNA, 25 bp, Homo sapien
cctttgctggaatattatagacacc

SEQ ID NO: 5183265 - DNA, 25 bp, Homo sapien
cttaagactgttttcatccaaagca

SEQ ID NO: 5183266 - DNA, 25 bp, Homo sapien
tgaacagatgctcaattcaatacca

SEQ ID NO: 5183267 - DNA, 25 bp, Homo sapien
catggctgttttggagagtaaattg

SEQ ID NO: 5183268 - DNA, 25 bp, Homo sapien
cttcatgcatggctgttttggagag

SEQ ID NO: 5183269 - DNA, 25 bp, Homo sapien
gaacagatgctcaattcaataccat

SEQ ID NO: 5183270 - DNA, 25 bp, Homo sapien
aaaatttcctgctaatacagataat

SEQ ID NO: 5183271 - DNA, 25 bp, Homo sapien
ggaaaatttcctgctaatacagata

SEQ ID NO: 5183272 - DNA, 25 bp, Homo sapien
aatttcctgctaatacagataattc

SEQ ID NO: 5183273 - DNA, 25 bp, Homo sapien
gggaaaatttcctgctaatacagat

SEQ ID NO: 5183274 - DNA, 25 bp, Homo sapien
tgacttcttcttgtggttataggaa

SEQ ID NO: 5183275 - DNA, 25 bp, Homo sapien
catgaagtaattctagtgggatagg

SEQ ID NO: 5183276 - DNA, 25 bp, Homo sapien
tgatatttaagtggtcaactccctt

SEQ ID NO: 5183277 - DNA, 25 bp, Homo sapien
caactccctttagtaagaagtacag

SEQ ID NO: 5183278 - DNA, 25 bp, Homo sapien
cattccacgccatgcacttttgaaa

SEQ ID NO: 5183279 - DNA, 25 bp, Homo sapien
agactcttaagatgtcttgaggcca

SEQ ID NO: 5183280 - DNA, 25 bp, Homo sapien
tatttagtactaagtgattcctttc

SEQ ID NO: 5183281 - DNA, 25 bp, Homo sapien
taaccttgctcagtatatgaacaaa

SEQ ID NO: 5183282 - DNA, 25 bp, Homo sapien
caggagaatccagcagttagggata

SEQ ID NO: 5183283 - DNA, 25 bp, Homo sapien
ccagcagttagggatattataagta

SEQ ID NO: 5183284 - DNA, 25 bp, Homo sapien
gaatccagcagttagggatattata

SEQ ID NO: 5183285 - DNA, 25 bp, Homo sapien
ctgcaacaggagaatccagcagtta

SEQ ID NO: 5183286 - DNA, 25 bp, Homo sapien
gagtaggaggaaacattcctggttc

SEQ ID NO: 5183287 - DNA, 25 bp, Homo sapien
aaagtaagtcactgtccaagaaaag

SEQ ID NO: 5183288 - DNA, 25 bp, Homo sapien
attcctggttcaaaagaatcaaagt

SEQ ID NO: 5183289 - DNA, 25 bp, Homo sapien
aacctggcaggtgaaagaggagtag

SEQ ID NO: 5183290 - DNA, 25 bp, Homo sapien
gaatatacttaatctgacatttctg

SEQ ID NO: 5183291 - DNA, 25 bp, Homo sapien
gactcactctactggtgacatagag

SEQ ID NO: 5183292 - DNA, 25 bp, Homo sapien
tattttccataaacactagagggca

SEQ ID NO: 5183293 - DNA, 25 bp, Homo sapien
taaaatacataacctgtcacaaaga

SEQ ID NO: 5183294 - DNA, 25 bp, Homo sapien
aaacccaggtacttaagtctgcaga

SEQ ID NO: 5183295 - DNA, 25 bp, Homo sapien
aaaacccaggtacttaagtctgcag

SEQ ID NO: 5183296 - DNA, 25 bp, Homo sapien
cttaagtctgcagagatagcaaaag

SEQ ID NO: 5183297 - DNA, 25 bp, Homo sapien
gtacttaagtctgcagagatagcaa

SEQ ID NO: 5183298 - DNA, 25 bp, Homo sapien
tatggtcttctcaaatggttttccc

SEQ ID NO: 5183299 - DNA, 25 bp, Homo sapien
gaaacacaattgatagtcacagtaa

SEQ ID NO: 5183300 - DNA, 25 bp, Homo sapien
tggtcttctcaaatggttttcccac

SEQ ID NO: 5183301 - DNA, 25 bp, Homo sapien
tagtcacagtaaatatggtcttctc

SEQ ID NO: 5183302 - DNA, 25 bp, Homo sapien
gacccaaactgatgatttcattaaa

SEQ ID NO: 5183303 - DNA, 25 bp, Homo sapien
tgacccaaactgatgatttcattaa

SEQ ID NO: 5183304 - DNA, 25 bp, Homo sapien
attattgacccaaactgatgatttc

SEQ ID NO: 5183305 - DNA, 25 bp, Homo sapien
tgaattattgacccaaactgatgat

SEQ ID NO: 5183306 - DNA, 25 bp, Homo sapien
cagtggctaggaatacaggctcatt

SEQ ID NO: 5183307 - DNA, 25 bp, Homo sapien
taggaatacaggctcatttcaccac

SEQ ID NO: 5183308 - DNA, 25 bp, Homo sapien
tgcagtatttttccacgggtaggta

SEQ ID NO: 5183309 - DNA, 25 bp, Homo sapien
cccagcccacgattatctttagagt

SEQ ID NO: 5183310 - DNA, 25 bp, Homo sapien
taaggagacctatctatgatgaaaa

SEQ ID NO: 5183311 - DNA, 25 bp, Homo sapien
taaaactagaacaatgatgcagagg

SEQ ID NO: 5183312 - DNA, 25 bp, Homo sapien
tgtaagtatcccaggtagcaagaaa

SEQ ID NO: 5183313 - DNA, 25 bp, Homo sapien
ggttattggtcaacattacctgtac

SEQ ID NO: 5183314 - DNA, 25 bp, Homo sapien
gaggaaatggtgcagtgattgctaa

SEQ ID NO: 5183315 - DNA, 25 bp, Homo sapien
atagagacgaaaagtagactatggg

SEQ ID NO: 5183316 - DNA, 25 bp, Homo sapien
cagacattaaaaaggacctggaccg

SEQ ID NO: 5183317 - DNA, 25 bp, Homo sapien
cagtgatggttgctgaatattgtta

SEQ ID NO: 5183318 - DNA, 25 bp, Homo sapien
gagagacaggcttatgtcattattt

SEQ ID NO: 5183319 - DNA, 25 bp, Homo sapien
tccaaagatatacacatgtagggtc

SEQ ID NO: 5183320 - DNA, 25 bp, Homo sapien
ctcatctccaatgatatgtaaggtt

SEQ ID NO: 5183321 - DNA, 25 bp, Homo sapien
tctccccatttgtggagatgagaga

SEQ ID NO: 5183322 - DNA, 25 bp, Homo sapien
taggacactgaacacaaaagaatga

SEQ ID NO: 5183323 - DNA, 25 bp, Homo sapien
tcttaataagatcttttgatgaaca

SEQ ID NO: 5183324 - DNA, 25 bp, Homo sapien
ttcattaaatctttgactactccaa

SEQ ID NO: 5183325 - DNA, 25 bp, Homo sapien
gacctaaatacaagaactaagacta

SEQ ID NO: 5183326 - DNA, 25 bp, Homo sapien
ttttactactgatgggtgtttccag

SEQ ID NO: 5183327 - DNA, 25 bp, Homo sapien
catacaggtactatgaacacgtctt

SEQ ID NO: 5183328 - DNA, 25 bp, Homo sapien
agtttggggctcctatacatacagg

SEQ ID NO: 5183329 - DNA, 25 bp, Homo sapien
tatgaacacgtcttcggtgggtggt

SEQ ID NO: 5183330 - DNA, 25 bp, Homo sapien
tatagcccatgtggaaagaatgtcc

SEQ ID NO: 5183331 - DNA, 25 bp, Homo sapien
gagcagctacgatgccattcaaaat

SEQ ID NO: 5183332 - DNA, 25 bp, Homo sapien
catgctacagtaagagcagctacga

SEQ ID NO: 5183333 - DNA, 25 bp, Homo sapien
tcaaaatcgccatgctatagcccat

SEQ ID NO: 5183334 - DNA, 25 bp, Homo sapien
tcttctgagtagacagtgatgctcc

SEQ ID NO: 5183335 - DNA, 25 bp, Homo sapien
ccaacaatatcgctccagtgtgggt

SEQ ID NO: 5183336 - DNA, 25 bp, Homo sapien
caggtactaggtttgcactagctaa

SEQ ID NO: 5183337 - DNA, 25 bp, Homo sapien
gaactacataatgaacagcaggttt

SEQ ID NO: 5183338 - DNA, 25 bp, Homo sapien
tgaatagtaaaagaaatgcgagact

SEQ ID NO: 5183339 - DNA, 25 bp, Homo sapien
tttagtcggtaacaacattcagtag

SEQ ID NO: 5183340 - DNA, 25 bp, Homo sapien
gataattaagggaacacactgcaca

SEQ ID NO: 5183341 - DNA, 25 bp, Homo sapien
ttcctatggccagggaaaacagctt

SEQ ID NO: 5183342 - DNA, 25 bp, Homo sapien
tttggaccctgtgtcagactggaga

SEQ ID NO: 5183343 - DNA, 25 bp, Homo sapien
caggattgccactgggcttcaggga

SEQ ID NO: 5183344 - DNA, 25 bp, Homo sapien
ggaccagggtaacgccattagcaat

SEQ ID NO: 5183345 - DNA, 25 bp, Homo sapien
gactcacgtatcaagaatggcagga

SEQ ID NO: 5183346 - DNA, 25 bp, Homo sapien
tttcccattggtagatggattatta

SEQ ID NO: 5183347 - DNA, 25 bp, Homo sapien
tcccattggtagatggattattaat

SEQ ID NO: 5183348 - DNA, 25 bp, Homo sapien
ggatttcccattggtagatggatta

SEQ ID NO: 5183349 - DNA, 25 bp, Homo sapien
tgtattgcagtaactggatttccca

SEQ ID NO: 5183350 - DNA, 25 bp, Homo sapien
cagtgagtccagaatgggcccaact

SEQ ID NO: 5183351 - DNA, 25 bp, Homo sapien
tgagtccagaatgggcccaactcca

SEQ ID NO: 5183352 - DNA, 25 bp, Homo sapien
gaatgggcccaactccacagttaat

SEQ ID NO: 5183353 - DNA, 25 bp, Homo sapien
ccagaatgggcccaactccacagtt

SEQ ID NO: 5183354 - DNA, 25 bp, Homo sapien
tccattctggagctgacccaaagcc

SEQ ID NO: 5183355 - DNA, 25 bp, Homo sapien
gaatatccagatccattctggagct

SEQ ID NO: 5183356 - DNA, 25 bp, Homo sapien
ttacactgaactgaatatccagatc

SEQ ID NO: 5183357 - DNA, 25 bp, Homo sapien
ccattctggagctgacccaaagcca

SEQ ID NO: 5183358 - DNA, 25 bp, Homo sapien
ctccaccacaatgcagagaggaatc

SEQ ID NO: 5183359 - DNA, 25 bp, Homo sapien
cctccaccacaatgcagagaggaat

SEQ ID NO: 5183360 - DNA, 25 bp, Homo sapien
tcatagttggcagctatgagattaa

SEQ ID NO: 5183361 - DNA, 25 bp, Homo sapien
cagctatgagattaatagaagactc

SEQ ID NO: 5183362 - DNA, 25 bp, Homo sapien
gaagactcagttctatacttcacag

SEQ ID NO: 5183363 - DNA, 25 bp, Homo sapien
aagactcagttctatacttcacaga

SEQ ID NO: 5183364 - DNA, 25 bp, Homo sapien
caatttcaacgtgtcaatcgatagc

SEQ ID NO: 5183365 - DNA, 25 bp, Homo sapien
taagcatgcccaagtttgagaagat

SEQ ID NO: 5183366 - DNA, 25 bp, Homo sapien
ggtcgcagtcctcaaatttggccta

SEQ ID NO: 5183367 - DNA, 25 bp, Homo sapien
tgaaagctatcccaagttgcacagt

SEQ ID NO: 5183368 - DNA, 25 bp, Homo sapien
gaggacaaacatcaagcatcccttc

SEQ ID NO: 5183369 - DNA, 25 bp, Homo sapien
atagaggacaaacatcaagcatccc

SEQ ID NO: 5183370 - DNA, 25 bp, Homo sapien
gacaaacatcaagcatcccttcttc

SEQ ID NO: 5183371 - DNA, 25 bp, Homo sapien
tagaggacaaacatcaagcatccct

SEQ ID NO: 5183372 - DNA, 25 bp, Homo sapien
cctcctttgctacgtctgttttcca

SEQ ID NO: 5183373 - DNA, 25 bp, Homo sapien
taaccatttgtgtgagtaggaatga

SEQ ID NO: 5183374 - DNA, 25 bp, Homo sapien
catgcttgtaggcagtaggtagttc

SEQ ID NO: 5183375 - DNA, 25 bp, Homo sapien
tctgtccaaggagcatgcttgtagg

SEQ ID NO: 5183376 - DNA, 25 bp, Homo sapien
tcttaatacagaagagccgtcctca

SEQ ID NO: 5183377 - DNA, 25 bp, Homo sapien
atacagaagagccgtcctcatctac

SEQ ID NO: 5183378 - DNA, 25 bp, Homo sapien
ttaatacagaagagccgtcctcatc

SEQ ID NO: 5183379 - DNA, 25 bp, Homo sapien
taatacagaagagccgtcctcatct

SEQ ID NO: 5183380 - DNA, 25 bp, Homo sapien
tccaaaaaggctgtaacaacacaca

SEQ ID NO: 5183381 - DNA, 25 bp, Homo sapien
cacgtccttacacactgaagcttga

SEQ ID NO: 5183382 - DNA, 25 bp, Homo sapien
gaaacagtgcatgacagtgcccttt

SEQ ID NO: 5183383 - DNA, 25 bp, Homo sapien
ggttacataccattccatcctacga

SEQ ID NO: 5183384 - DNA, 25 bp, Homo sapien
caacgaagcaaccatttctgagaac

SEQ ID NO: 5183385 - DNA, 25 bp, Homo sapien
cctgatggccgtagagagaagccac

SEQ ID NO: 5183386 - DNA, 25 bp, Homo sapien
tgggaacatcaagcagatactgggc

SEQ ID NO: 5183387 - DNA, 25 bp, Homo sapien
gatgatgaactgatagactctgaag

SEQ ID NO: 5183388 - DNA, 25 bp, Homo sapien
acatagaaaataggccatcgcgtca

SEQ ID NO: 5183389 - DNA, 25 bp, Homo sapien
acttttaagtccctctccacataga

SEQ ID NO: 5183390 - DNA, 25 bp, Homo sapien
tctccacatagaaaataggccatcg

SEQ ID NO: 5183391 - DNA, 25 bp, Homo sapien
ttttaagtccctctccacatagaaa

SEQ ID NO: 5183392 - DNA, 25 bp, Homo sapien
accagcatccaaagtggtacagcca

SEQ ID NO: 5183393 - DNA, 25 bp, Homo sapien
tctgagacttctgggtgaacagata

SEQ ID NO: 5183394 - DNA, 25 bp, Homo sapien
tgtccttgatcccatgctggttcag

SEQ ID NO: 5183395 - DNA, 25 bp, Homo sapien
caggatggtgggtagtcacggtgga

SEQ ID NO: 5183396 - DNA, 25 bp, Homo sapien
tcaggccagggataaacatcatgtc

SEQ ID NO: 5183397 - DNA, 25 bp, Homo sapien
tctcaagtttggacatcggctgcct

SEQ ID NO: 5183398 - DNA, 25 bp, Homo sapien
gaaggctctctaagatctgcaacag

SEQ ID NO: 5183399 - DNA, 25 bp, Homo sapien
caaagttggtagagcccaagtccat

SEQ ID NO: 5183400 - DNA, 25 bp, Homo sapien
agtatagtagctcatcttggggttc

SEQ ID NO: 5183401 - DNA, 25 bp, Homo sapien
ctgcctcgtgaacttgagttgggga

SEQ ID NO: 5183402 - DNA, 25 bp, Homo sapien
cctcgtgaacttgagttggggagta

SEQ ID NO: 5183403 - DNA, 25 bp, Homo sapien
gggagtatagtagctcatcttgggg

SEQ ID NO: 5183404 - DNA, 25 bp, Homo sapien
ctaagcatcaaagttagggttttgg

SEQ ID NO: 5183405 - DNA, 25 bp, Homo sapien
gggtaagcatctgcatcatgctatc

SEQ ID NO: 5183406 - DNA, 25 bp, Homo sapien
tctgcatcatgctatccatgcaggg

SEQ ID NO: 5183407 - DNA, 25 bp, Homo sapien
gttttgggtaagcatctgcatcatg

SEQ ID NO: 5183408 - DNA, 25 bp, Homo sapien
caaaagctgggtcatctacttcatg

SEQ ID NO: 5183409 - DNA, 25 bp, Homo sapien
gagctcatgttgttgagctgctcca

SEQ ID NO: 5183410 - DNA, 25 bp, Homo sapien
gctgaaatttcacttctagtgtctg

SEQ ID NO: 5183411 - DNA, 25 bp, Homo sapien
gggtcatctacttcatgaactactg

SEQ ID NO: 5183412 - DNA, 25 bp, Homo sapien
tcctctttgccctgggagtcctaac

SEQ ID NO: 5183413 - DNA, 25 bp, Homo sapien
cctgggagtcctaacagagcccatg

SEQ ID NO: 5183414 - DNA, 25 bp, Homo sapien
cagagagctgtgtcttatctcctcc

SEQ ID NO: 5183415 - DNA, 25 bp, Homo sapien
agggaaacaggtatcttcctctttg

SEQ ID NO: 5183416 - DNA, 25 bp, Homo sapien
gcaaagccagctgaagcaaaccaga

SEQ ID NO: 5183417 - DNA, 25 bp, Homo sapien
cagctgaagcaaaccagaaacagct

SEQ ID NO: 5183418 - DNA, 25 bp, Homo sapien
ttcttttctatccaagcaaagccag

SEQ ID NO: 5183419 - DNA, 25 bp, Homo sapien
tcttttctatccaagcaaagccagc

SEQ ID NO: 5183420 - DNA, 25 bp, Homo sapien
ttgatcataagaaatgccagattgc

SEQ ID NO: 5183421 - DNA, 25 bp, Homo sapien
gattgatcataagaaatgccagatt

SEQ ID NO: 5183422 - DNA, 25 bp, Homo sapien
tgatcataagaaatgccagattgca

SEQ ID NO: 5183423 - DNA, 25 bp, Homo sapien
tgattgatcataagaaatgccagat

SEQ ID NO: 5183424 - DNA, 25 bp, Homo sapien
ttcccagacacatgaaccgcagctt

SEQ ID NO: 5183425 - DNA, 25 bp, Homo sapien
tgaaccgcagcttggacctagccag

SEQ ID NO: 5183426 - DNA, 25 bp, Homo sapien
acattcccagacacatgaaccgcag

SEQ ID NO: 5183427 - DNA, 25 bp, Homo sapien
aaacattcccagacacatgaaccgc

SEQ ID NO: 5183428 - DNA, 25 bp, Homo sapien
cgaagtcgctgagtggcctgtgctt

SEQ ID NO: 5183429 - DNA, 25 bp, Homo sapien
ttctgttttcatggcgaagtcgctg

SEQ ID NO: 5183430 - DNA, 25 bp, Homo sapien
cttcttttgcacaccatgacttcta

SEQ ID NO: 5183431 - DNA, 25 bp, Homo sapien
ccatgacttctacccgcagcatctc

SEQ ID NO: 5183432 - DNA, 25 bp, Homo sapien
gaagaacatgttgataacttgaaag

SEQ ID NO: 5183433 - DNA, 25 bp, Homo sapien
aaagaagaacatgttgataacttga

SEQ ID NO: 5183434 - DNA, 25 bp, Homo sapien
ataacttgaaagatgcttttagcac

SEQ ID NO: 5183435 - DNA, 25 bp, Homo sapien
actaaaagaagaacatgttgataac

SEQ ID NO: 5183436 - DNA, 25 bp, Homo sapien
gattatgctcatatctcccatccta

SEQ ID NO: 5183437 - DNA, 25 bp, Homo sapien
tttcattggccgcagtatctgtgtg

SEQ ID NO: 5183438 - DNA, 25 bp, Homo sapien
tatctgtgtgcctatgattatgctc

SEQ ID NO: 5183439 - DNA, 25 bp, Homo sapien
gccgcagtatctgtgtgcctatgat

SEQ ID NO: 5183440 - DNA, 25 bp, Homo sapien
tcccctccaatcacatcagcacttg

SEQ ID NO: 5183441 - DNA, 25 bp, Homo sapien
ccttcctgatcacaatctggccatt

SEQ ID NO: 5183442 - DNA, 25 bp, Homo sapien
tctccttcctgatcacaatctggcc

SEQ ID NO: 5183443 - DNA, 25 bp, Homo sapien
tcttctcccctccaatcacatcagc

SEQ ID NO: 5183444 - DNA, 25 bp, Homo sapien
tgtgggttcccatgtggttccccac

SEQ ID NO: 5183445 - DNA, 25 bp, Homo sapien
cacttcctgtcccctactaaataat

SEQ ID NO: 5183446 - DNA, 25 bp, Homo sapien
tctgctgtgggttcccatgtggttc

SEQ ID NO: 5183447 - DNA, 25 bp, Homo sapien
gctgtgggttcccatgtggttcccc

SEQ ID NO: 5183448 - DNA, 25 bp, Homo sapien
gcagccattgtttccttcggtaact

SEQ ID NO: 5183449 - DNA, 25 bp, Homo sapien
accttccagcaaacagcattcagaa

SEQ ID NO: 5183450 - DNA, 25 bp, Homo sapien
taactgctaccttccagcaaacagc

SEQ ID NO: 5183451 - DNA, 25 bp, Homo sapien
tccttcggtaactgctaccttccag

SEQ ID NO: 5183452 - DNA, 25 bp, Homo sapien
ttatggaaatgacaagggctacaaa

SEQ ID NO: 5183453 - DNA, 25 bp, Homo sapien
atgacaagggctacaaagacaggac

SEQ ID NO: 5183454 - DNA, 25 bp, Homo sapien
tggaaatgacaagggctacaaagac

SEQ ID NO: 5183455 - DNA, 25 bp, Homo sapien
caagggctacaaagacaggaccagc

SEQ ID NO: 5183456 - DNA, 25 bp, Homo sapien
ccacaggtaactcttgacgtcatgg

SEQ ID NO: 5183457 - DNA, 25 bp, Homo sapien
ttttgatatagggacaaattactgt

SEQ ID NO: 5183458 - DNA, 25 bp, Homo sapien
tctttttgatatagggacaaattac

SEQ ID NO: 5183459 - DNA, 25 bp, Homo sapien
gacgtcatgggcacccaaattcagt

SEQ ID NO: 5183460 - DNA, 25 bp, Homo sapien
gagtaaagaaagagagatactctga

SEQ ID NO: 5183461 - DNA, 25 bp, Homo sapien
ttgagtaaagaaagagagatactct

SEQ ID NO: 5183462 - DNA, 25 bp, Homo sapien
cttgagtaaagaaagagagatactc

SEQ ID NO: 5183463 - DNA, 25 bp, Homo sapien
tgagtaaagaaagagagatactctg

SEQ ID NO: 5183464 - DNA, 25 bp, Homo sapien
tttaggggaatctggtgttcaggaa

SEQ ID NO: 5183465 - DNA, 25 bp, Homo sapien
gaatctggtgttcaggaagaaaagc

SEQ ID NO: 5183466 - DNA, 25 bp, Homo sapien
cctttaggggaatctggtgttcagg

SEQ ID NO: 5183467 - DNA, 25 bp, Homo sapien
tgcctttaggggaatctggtgttca

SEQ ID NO: 5183468 - DNA, 25 bp, Homo sapien
tatagatgaacatccttaagatgca

SEQ ID NO: 5183469 - DNA, 25 bp, Homo sapien
catcttaagttccaataaccaacag

SEQ ID NO: 5183470 - DNA, 25 bp, Homo sapien
cagccattggtaaaagacatctgcc

SEQ ID NO: 5183471 - DNA, 25 bp, Homo sapien
tccttgagaggaccaattagcagaa

SEQ ID NO: 5183472 - DNA, 25 bp, Homo sapien
cacaatctctgactcgttataactg

SEQ ID NO: 5183473 - DNA, 25 bp, Homo sapien
actgttcctgtttccgatgacttca

SEQ ID NO: 5183474 - DNA, 25 bp, Homo sapien
ccatgacaccataacagggccttca

SEQ ID NO: 5183475 - DNA, 25 bp, Homo sapien
ctgtttccgatgacttcatttttgg

SEQ ID NO: 5183476 - DNA, 25 bp, Homo sapien
ccagatgattttctgtgtccaaagg

SEQ ID NO: 5183477 - DNA, 25 bp, Homo sapien
tggccttgttgagctttccccagag

SEQ ID NO: 5183478 - DNA, 25 bp, Homo sapien
tacatggggtatgcagaagacactc

SEQ ID NO: 5183479 - DNA, 25 bp, Homo sapien
acataaatacaagagcaggcggtga

SEQ ID NO: 5183480 - DNA, 25 bp, Homo sapien
gacagcaggaagacagccacaggca

SEQ ID NO: 5183481 - DNA, 25 bp, Homo sapien
cgggacagcaggaagacagccacag

SEQ ID NO: 5183482 - DNA, 25 bp, Homo sapien
gatgacagtggttaccgggacagca

SEQ ID NO: 5183483 - DNA, 25 bp, Homo sapien
tcagatgacagtggttaccgggaca

SEQ ID NO: 5183484 - DNA, 25 bp, Homo sapien
aacttgagtagccacacgggtctgc

SEQ ID NO: 5183485 - DNA, 25 bp, Homo sapien
ggctagtgggaagactaacctggaa

SEQ ID NO: 5183486 - DNA, 25 bp, Homo sapien
aaaagcttgtgttggtaacatatac

SEQ ID NO: 5183487 - DNA, 25 bp, Homo sapien
tggcccgagtcagcaacaactatgc

SEQ ID NO: 5183488 - DNA, 25 bp, Homo sapien
tcaaaacacactgcaagcaacagca

SEQ ID NO: 5183489 - DNA, 25 bp, Homo sapien
tctcttcaaaatgttgtgagaggtg

SEQ ID NO: 5183490 - DNA, 25 bp, Homo sapien
gaaataaactcttgcgtagacggcc

SEQ ID NO: 5183491 - DNA, 25 bp, Homo sapien
ttttcaacaaggacgccaaagctgc

SEQ ID NO: 5183492 - DNA, 25 bp, Homo sapien
taaaggaaggagtagatccaagcat

SEQ ID NO: 5183493 - DNA, 25 bp, Homo sapien
tgatgaagtctctgtatcattgact

SEQ ID NO: 5183494 - DNA, 25 bp, Homo sapien
agtctctgtatcattgactaaggct

SEQ ID NO: 5183495 - DNA, 25 bp, Homo sapien
tgaagtctctgtatcattgactaag

SEQ ID NO: 5183496 - DNA, 25 bp, Homo sapien
gaagtctctgtatcattgactaagg

SEQ ID NO: 5183497 - DNA, 25 bp, Homo sapien
agtgcactaccactaccacggccat

SEQ ID NO: 5183498 - DNA, 25 bp, Homo sapien
gccatatccaagtgcactaccacta

SEQ ID NO: 5183499 - DNA, 25 bp, Homo sapien
atatccaagtgcactaccactacca

SEQ ID NO: 5183500 - DNA, 25 bp, Homo sapien
ctggccatatccaagtgcactacca

SEQ ID NO: 5183501 - DNA, 25 bp, Homo sapien
cccccgggacaacatgctcagtgag

SEQ ID NO: 5183502 - DNA, 25 bp, Homo sapien
ggcccaggccaaagaatctgttaga

SEQ ID NO: 5183503 - DNA, 25 bp, Homo sapien
ccaaagaatctgttagaagcccaag

SEQ ID NO: 5183504 - DNA, 25 bp, Homo sapien
agcagaagaaagtgcccccgggaca

SEQ ID NO: 5183505 - DNA, 25 bp, Homo sapien
gtaagtccagttccaaacacataag

SEQ ID NO: 5183506 - DNA, 25 bp, Homo sapien
acacataaggtcctgttataccagt

SEQ ID NO: 5183507 - DNA, 25 bp, Homo sapien
taagtaactctactactggtatggt

SEQ ID NO: 5183508 - DNA, 25 bp, Homo sapien
ctttggaaagagcatacaacgtaag

SEQ ID NO: 5183509 - DNA, 25 bp, Homo sapien
agagcctgcagtcattctctgacag

SEQ ID NO: 5183510 - DNA, 25 bp, Homo sapien
tctctgacagtaatctctcattttc

SEQ ID NO: 5183511 - DNA, 25 bp, Homo sapien
cttgcatagacatcgtcactggctt

SEQ ID NO: 5183512 - DNA, 25 bp, Homo sapien
tcactggcttaaagagcctgcagtc

SEQ ID NO: 5183513 - DNA, 25 bp, Homo sapien
ttagttgtagtggaagtgtgactct

SEQ ID NO: 5183514 - DNA, 25 bp, Homo sapien
catttagttgtagtggaagtgtgac

SEQ ID NO: 5183515 - DNA, 25 bp, Homo sapien
actcttcccaggggggctgacttct

SEQ ID NO: 5183516 - DNA, 25 bp, Homo sapien
tcatttagttgtagtggaagtgtga

SEQ ID NO: 5183517 - DNA, 25 bp, Homo sapien
ttgcaccagattgtttctggaagac

SEQ ID NO: 5183518 - DNA, 25 bp, Homo sapien
gactatccgattgcaccagattgtt

SEQ ID NO: 5183519 - DNA, 25 bp, Homo sapien
aactccagactatccgattgcacca

SEQ ID NO: 5183520 - DNA, 25 bp, Homo sapien
cattcaactccagactatccgattg

SEQ ID NO: 5183521 - DNA, 25 bp, Homo sapien
cagtactataaagctcaacaggatc

SEQ ID NO: 5183522 - DNA, 25 bp, Homo sapien
agtactataaagctcaacaggatca

SEQ ID NO: 5183523 - DNA, 25 bp, Homo sapien
tgtttcattatccctgatctgtcaa

SEQ ID NO: 5183524 - DNA, 25 bp, Homo sapien
cttgtttcattatccctgatctgtc

SEQ ID NO: 5183525 - DNA, 25 bp, Homo sapien
catctctgttcccaaaatggtacta

SEQ ID NO: 5183526 - DNA, 25 bp, Homo sapien
tggtactaatcttccgcacagagga

SEQ ID NO: 5183527 - DNA, 25 bp, Homo sapien
ggaataaatgagcaggccagacaat

SEQ ID NO: 5183528 - DNA, 25 bp, Homo sapien
caatttattgcttagggtagcccct

SEQ ID NO: 5183529 - DNA, 25 bp, Homo sapien
ttcacagttccaagatatagagaag

SEQ ID NO: 5183530 - DNA, 25 bp, Homo sapien
gttccaagatatagagaagtcagca

SEQ ID NO: 5183531 - DNA, 25 bp, Homo sapien
tccaagatatagagaagtcagcata

SEQ ID NO: 5183532 - DNA, 25 bp, Homo sapien
atatagagaagtcagcatatacagc

SEQ ID NO: 5183533 - DNA, 25 bp, Homo sapien
caatcatttgaaacatggatagaag

SEQ ID NO: 5183534 - DNA, 25 bp, Homo sapien
acaatcatttgaaacatggatagaa

SEQ ID NO: 5183535 - DNA, 25 bp, Homo sapien
ggcccaccgtgatgtgcttcagaaa

SEQ ID NO: 5183536 - DNA, 25 bp, Homo sapien
aagaacatagatggcgcttttgccc

SEQ ID NO: 5183537 - DNA, 25 bp, Homo sapien
tgagactgtatctccggaagggcat

SEQ ID NO: 5183538 - DNA, 25 bp, Homo sapien
taatggttcacatcctttggcccac

SEQ ID NO: 5183539 - DNA, 25 bp, Homo sapien
cactgaacttcttgataatccttga

SEQ ID NO: 5183540 - DNA, 25 bp, Homo sapien
acactgaacttcttgataatccttg

SEQ ID NO: 5183541 - DNA, 25 bp, Homo sapien
tgcaacctcagctctttgctggctt

SEQ ID NO: 5183542 - DNA, 25 bp, Homo sapien
cagctctttgctggcttttctcaca

SEQ ID NO: 5183543 - DNA, 25 bp, Homo sapien
aactgctcctgcaacctcagctctt

SEQ ID NO: 5183544 - DNA, 25 bp, Homo sapien
gctggcttttctcacactctgtgcc

SEQ ID NO: 5183545 - DNA, 25 bp, Homo sapien
ttgttatgaactgcccaagccctgg

SEQ ID NO: 5183546 - DNA, 25 bp, Homo sapien
tggatccggaaagcaaccctataaa

SEQ ID NO: 5183547 - DNA, 25 bp, Homo sapien
tattctccctaccactggatccgga

SEQ ID NO: 5183548 - DNA, 25 bp, Homo sapien
gaggtccttactcaggtctgcaaag

SEQ ID NO: 5183549 - DNA, 25 bp, Homo sapien
tccaaaacgggtttgactgagctaa

SEQ ID NO: 5183550 - DNA, 25 bp, Homo sapien
gtttcaacacggatatccatactgg

SEQ ID NO: 5183551 - DNA, 25 bp, Homo sapien
tcttcaaggtagtagtatagcatct

SEQ ID NO: 5183552 - DNA, 25 bp, Homo sapien
ccatactggtttcctattgctacaa

SEQ ID NO: 5183553 - DNA, 25 bp, Homo sapien
caccagactgatttccagaatttta

SEQ ID NO: 5183554 - DNA, 25 bp, Homo sapien
tgcctgcacccaaactccaaatatc

SEQ ID NO: 5183555 - DNA, 25 bp, Homo sapien
caaactccaaatatctcctccacca

SEQ ID NO: 5183556 - DNA, 25 bp, Homo sapien
tcctccaccagactgatttccagaa

SEQ ID NO: 5183557 - DNA, 25 bp, Homo sapien
aaatgtaagttatctggcaaccctc

SEQ ID NO: 5183558 - DNA, 25 bp, Homo sapien
tcatttgatattgagactctgtcac

SEQ ID NO: 5183559 - DNA, 25 bp, Homo sapien
ccctctgtaatcatcctagagtcat

SEQ ID NO: 5183560 - DNA, 25 bp, Homo sapien
caaatgtaagttatctggcaaccct

SEQ ID NO: 5183561 - DNA, 25 bp, Homo sapien
tgttaattttgcaaggtaggtgcca

SEQ ID NO: 5183562 - DNA, 25 bp, Homo sapien
tcggtatcttaagctcaacaggtag

SEQ ID NO: 5183563 - DNA, 25 bp, Homo sapien
cacttagcttttaacaggtgacctg

SEQ ID NO: 5183564 - DNA, 25 bp, Homo sapien
tctgcgtcagtcaggaatatatcct

SEQ ID NO: 5183565 - DNA, 25 bp, Homo sapien
tttcttgttcatatctgtaaatctg

SEQ ID NO: 5183566 - DNA, 25 bp, Homo sapien
atctgcttatgtgcagcaccatctt

SEQ ID NO: 5183567 - DNA, 25 bp, Homo sapien
tcatatctgtaaatctgcttatgtg

SEQ ID NO: 5183568 - DNA, 25 bp, Homo sapien
cagcaccatcttgcatgaaatatgc

SEQ ID NO: 5183569 - DNA, 25 bp, Homo sapien
caatccctctgcaggacaaatccat

SEQ ID NO: 5183570 - DNA, 25 bp, Homo sapien
tagcccagtctacattcttctcaga

SEQ ID NO: 5183571 - DNA, 25 bp, Homo sapien
tcttgggccaaggtcaggtctttca

SEQ ID NO: 5183572 - DNA, 25 bp, Homo sapien
gactgtcccgtagaaagtcaggatc

SEQ ID NO: 5183573 - DNA, 25 bp, Homo sapien
tctttctgctcagtcctgaggaggt

SEQ ID NO: 5183574 - DNA, 25 bp, Homo sapien
agctctttctgctcagtcctgagga

SEQ ID NO: 5183575 - DNA, 25 bp, Homo sapien
tgaggaggtgtgggtcacaatggac

SEQ ID NO: 5183576 - DNA, 25 bp, Homo sapien
gaggaggtgtgggtcacaatggaca

SEQ ID NO: 5183577 - DNA, 25 bp, Homo sapien
ggcacttcaggaatgatagtcaaac

SEQ ID NO: 5183578 - DNA, 25 bp, Homo sapien
cttcaggaatgatagtcaaactgtt

SEQ ID NO: 5183579 - DNA, 25 bp, Homo sapien
aaactctggcacttcaggaatgata

SEQ ID NO: 5183580 - DNA, 25 bp, Homo sapien
tctggcacttcaggaatgatagtca

SEQ ID NO: 5183581 - DNA, 25 bp, Homo sapien
tttggcacgttgtgcactctctcat

SEQ ID NO: 5183582 - DNA, 25 bp, Homo sapien
tacatttggcacgttgtgcactctc

SEQ ID NO: 5183583 - DNA, 25 bp, Homo sapien
tgttagtacatttggcacgttgtgc

SEQ ID NO: 5183584 - DNA, 25 bp, Homo sapien
ggcacgttgtgcactctctcatttc

SEQ ID NO: 5183585 - DNA, 25 bp, Homo sapien
tgaggtatagtgctgaagtctgaat

SEQ ID NO: 5183586 - DNA, 25 bp, Homo sapien
gctgaggtatagtgctgaagtctga

SEQ ID NO: 5183587 - DNA, 25 bp, Homo sapien
tacttgctgaggtatagtgctgaag

SEQ ID NO: 5183588 - DNA, 25 bp, Homo sapien
cttgctgaggtatagtgctgaagtc

SEQ ID NO: 5183589 - DNA, 25 bp, Homo sapien
tgttggcactggtcatgtcaatgtc

SEQ ID NO: 5183590 - DNA, 25 bp, Homo sapien
tgtcaatgtcatagaacttttccac

SEQ ID NO: 5183591 - DNA, 25 bp, Homo sapien
aggtgttggcactggtcatgtcaat

SEQ ID NO: 5183592 - DNA, 25 bp, Homo sapien
cactggtcatgtcaatgtcatagaa

SEQ ID NO: 5183593 - DNA, 25 bp, Homo sapien
ccacgtttcacaaacttcaaatgga

SEQ ID NO: 5183594 - DNA, 25 bp, Homo sapien
caaggtgtgtaggactctttgttgc

SEQ ID NO: 5183595 - DNA, 25 bp, Homo sapien
tctttgttgcacatccacgtttcac

SEQ ID NO: 5183596 - DNA, 25 bp, Homo sapien
aaacttcaaatggacctccgggcat

SEQ ID NO: 5183597 - DNA, 25 bp, Homo sapien
tcagctaattctaacacccactggg

SEQ ID NO: 5183598 - DNA, 25 bp, Homo sapien
tgctctctcagctaattctaacacc

SEQ ID NO: 5183599 - DNA, 25 bp, Homo sapien
cctctgcttctgtaacattgtcacc

SEQ ID NO: 5183600 - DNA, 25 bp, Homo sapien
gtaacctatattctatagttgctct

SEQ ID NO: 5183601 - DNA, 25 bp, Homo sapien
tatataactgaaacctacatcagtc

SEQ ID NO: 5183602 - DNA, 25 bp, Homo sapien
gatattttgaatactagggatctga

SEQ ID NO: 5183603 - DNA, 25 bp, Homo sapien
gatctattttacatggactcaatag

SEQ ID NO: 5183604 - DNA, 25 bp, Homo sapien
tggactcaatagaacaacggcagtt

SEQ ID NO: 5183605 - DNA, 25 bp, Homo sapien
tgcagggcccatgtcaacatacaag

SEQ ID NO: 5183606 - DNA, 25 bp, Homo sapien
ggctctcctatgtgaccgtggttca

SEQ ID NO: 5183607 - DNA, 25 bp, Homo sapien
cagtagtccatgagtaaccttcaga

SEQ ID NO: 5183608 - DNA, 25 bp, Homo sapien
tatcagaggttgtgaactagtcagc

SEQ ID NO: 5183609 - DNA, 25 bp, Homo sapien
ggtgtttcactagcctcaaagttgg

SEQ ID NO: 5183610 - DNA, 25 bp, Homo sapien
gacttgagttatgccaactgttcct

SEQ ID NO: 5183611 - DNA, 25 bp, Homo sapien
gcctgggccacaagtctgacttgag

SEQ ID NO: 5183612 - DNA, 25 bp, Homo sapien
ccaacataaagagagctgcgtgcat

SEQ ID NO: 5183613 - DNA, 25 bp, Homo sapien
ctttggtcacatatgccctgtcatc

SEQ ID NO: 5183614 - DNA, 25 bp, Homo sapien
tttggtcacatatgccctgtcatct

SEQ ID NO: 5183615 - DNA, 25 bp, Homo sapien
ggaccaaattcgcaagctggttcac

SEQ ID NO: 5183616 - DNA, 25 bp, Homo sapien
aaattcgcaagctggttcaccagtg

SEQ ID NO: 5183617 - DNA, 25 bp, Homo sapien
ttcaccagtgcacaggtcttcaggg

SEQ ID NO: 5183618 - DNA, 25 bp, Homo sapien
ggttcaccagtgcacaggtcttcag

SEQ ID NO: 5183619 - DNA, 25 bp, Homo sapien
gattctacgcctcttcagtgagcag

SEQ ID NO: 5183620 - DNA, 25 bp, Homo sapien
ggagctctactacctggaacaaagc

SEQ ID NO: 5183621 - DNA, 25 bp, Homo sapien
cgaggctgatgtctggattggcaat

SEQ ID NO: 5183622 - DNA, 25 bp, Homo sapien
atcacagacaaggaagacgctgccc

SEQ ID NO: 5183623 - DNA, 25 bp, Homo sapien
gagacccagtatcttctgacttttg

SEQ ID NO: 5183624 - DNA, 25 bp, Homo sapien
taacatgtcagggatggtaacagag

SEQ ID NO: 5183625 - DNA, 25 bp, Homo sapien
taacagagacccagtatcttctgac

SEQ ID NO: 5183626 - DNA, 25 bp, Homo sapien
atgtcagggatggtaacagagaccc

SEQ ID NO: 5183627 - DNA, 25 bp, Homo sapien
cagttttaggattatacgtgtattt

SEQ ID NO: 5183628 - DNA, 25 bp, Homo sapien
ctttcagttttaggattatacgtgt

SEQ ID NO: 5183629 - DNA, 25 bp, Homo sapien
tttcagttttaggattatacgtgta

SEQ ID NO: 5183630 - DNA, 25 bp, Homo sapien
atttttccccttctttgtagtgcat

SEQ ID NO: 5183631 - DNA, 25 bp, Homo sapien
taaaccctgaacgatgaagccttgt

SEQ ID NO: 5183632 - DNA, 25 bp, Homo sapien
tgaagccttgttaagtaaaatgcct

SEQ ID NO: 5183633 - DNA, 25 bp, Homo sapien
taagtaaaatgcctctgtagcagtc

SEQ ID NO: 5183634 - DNA, 25 bp, Homo sapien
tcattctaaaccctgaacgatgaag

SEQ ID NO: 5183635 - DNA, 25 bp, Homo sapien
tacaacgcaaacaaagacttcacgg

SEQ ID NO: 5183636 - DNA, 25 bp, Homo sapien
gatgaaccttggcaatttaatgttg

SEQ ID NO: 5183637 - DNA, 25 bp, Homo sapien
gacttcacggactattgagataaag

SEQ ID NO: 5183638 - DNA, 25 bp, Homo sapien
taaagagccattcaaaggatgaacc

SEQ ID NO: 5183639 - DNA, 25 bp, Homo sapien
ggagagctgcgattcaacttgtgga

SEQ ID NO: 5183640 - DNA, 25 bp, Homo sapien
gactgcacggtttacgccacaaaag

SEQ ID NO: 5183641 - DNA, 25 bp, Homo sapien
tagaactcgtagctcgtgactgcac

SEQ ID NO: 5183642 - DNA, 25 bp, Homo sapien
tgctcttgacatccgtgacaccgtt

SEQ ID NO: 5183643 - DNA, 25 bp, Homo sapien
gaagctcaagttactggtttccagc

SEQ ID NO: 5183644 - DNA, 25 bp, Homo sapien
ttactgccaacggacaaaatgctgg

SEQ ID NO: 5183645 - DNA, 25 bp, Homo sapien
tagaatttcgttggaacctagagca

SEQ ID NO: 5183646 - DNA, 25 bp, Homo sapien
caaaatcacaatggctgaagcgtca

SEQ ID NO: 5183647 - DNA, 25 bp, Homo sapien
catgcaacttcaaacaaggtaccac

SEQ ID NO: 5183648 - DNA, 25 bp, Homo sapien
caaagcaggatatacagtcctataa

SEQ ID NO: 5183649 - DNA, 25 bp, Homo sapien
aaaatcataactcttggtgctcaag

SEQ ID NO: 5183650 - DNA, 25 bp, Homo sapien
aaatctcagtagatagacccaggaa

SEQ ID NO: 5183651 - DNA, 25 bp, Homo sapien
tgccaaggagtgaaatgaattagtc

SEQ ID NO: 5183652 - DNA, 25 bp, Homo sapien
aacaaaagtgtcatggtcccatttg

SEQ ID NO: 5183653 - DNA, 25 bp, Homo sapien
tctgggctcctgtgatgtaagctac

SEQ ID NO: 5183654 - DNA, 25 bp, Homo sapien
tccctcaatggaaggtcattactcc

SEQ ID NO: 5183655 - DNA, 25 bp, Homo sapien
tctgcataacttaacccatgagagg

SEQ ID NO: 5183656 - DNA, 25 bp, Homo sapien
tttaagaaggcacgggctaccttgc

SEQ ID NO: 5183657 - DNA, 25 bp, Homo sapien
gtaaactgcactgggtaccaccact

SEQ ID NO: 5183658 - DNA, 25 bp, Homo sapien
tataactgcatgtcaatcgccaagc

SEQ ID NO: 5183659 - DNA, 25 bp, Homo sapien
tatagctagagctagtttaaatgct

SEQ ID NO: 5183660 - DNA, 25 bp, Homo sapien
cccatggtgatcaggcttgtaggaa

SEQ ID NO: 5183661 - DNA, 25 bp, Homo sapien
ggattggcaattcccctatagctag

SEQ ID NO: 5183662 - DNA, 25 bp, Homo sapien
ccttccatgagtataagtcagccaa

SEQ ID NO: 5183663 - DNA, 25 bp, Homo sapien
gaaatatgcaatccttcagacagag

SEQ ID NO: 5183664 - DNA, 25 bp, Homo sapien
actaaaataataagccagcagggcc

SEQ ID NO: 5183665 - DNA, 25 bp, Homo sapien
cattaaggagcaactactagcatca

SEQ ID NO: 5183666 - DNA, 25 bp, Homo sapien
tcaaatacacataggaggttaaggc

SEQ ID NO: 5183667 - DNA, 25 bp, Homo sapien
tgacacctgggaccggttttgtaga

SEQ ID NO: 5183668 - DNA, 25 bp, Homo sapien
tccggagccatgttttgcgtaacta

SEQ ID NO: 5183669 - DNA, 25 bp, Homo sapien
caagctaagcaaactctcatggaaa

SEQ ID NO: 5183670 - DNA, 25 bp, Homo sapien
tggtgaatttttacctccggagcca

SEQ ID NO: 5183671 - DNA, 25 bp, Homo sapien
tgcccaacaccgctataagactcag

SEQ ID NO: 5183672 - DNA, 25 bp, Homo sapien
ctatgcccaacaccgctataagact

SEQ ID NO: 5183673 - DNA, 25 bp, Homo sapien
tgctatgcccaacaccgctataaga

SEQ ID NO: 5183674 - DNA, 25 bp, Homo sapien
caacaccgctataagactcagtcat

SEQ ID NO: 5183675 - DNA, 25 bp, Homo sapien
taatgatagtagatgagatggccat

SEQ ID NO: 5183676 - DNA, 25 bp, Homo sapien
cataatgatagtagatgagatggcc

SEQ ID NO: 5183677 - DNA, 25 bp, Homo sapien
tcataatgatagtagatgagatggc

SEQ ID NO: 5183678 - DNA, 25 bp, Homo sapien
tttcataatgatagtagatgagatg

SEQ ID NO: 5183679 - DNA, 25 bp, Homo sapien
ctggtatcatctaatgccctcagca

SEQ ID NO: 5183680 - DNA, 25 bp, Homo sapien
cgtgatataggaaaggtttgaggaa

SEQ ID NO: 5183681 - DNA, 25 bp, Homo sapien
tcagtacaacactggtatcatctaa

SEQ ID NO: 5183682 - DNA, 25 bp, Homo sapien
tttgtgcatggagatgtgatgtttc

SEQ ID NO: 5183683 - DNA, 25 bp, Homo sapien
ctttgatggaagcaaacagggagca

SEQ ID NO: 5183684 - DNA, 25 bp, Homo sapien
tgtgtgtcagttccaaggtccggta

SEQ ID NO: 5183685 - DNA, 25 bp, Homo sapien
ggttttctccactgacaatgtccct

SEQ ID NO: 5183686 - DNA, 25 bp, Homo sapien
ggtaattcagctcggttttctccac

SEQ ID NO: 5183687 - DNA, 25 bp, Homo sapien
cagcaggttaaatgttcgagggatg

SEQ ID NO: 5183688 - DNA, 25 bp, Homo sapien
cagcagcaggttaaatgttcgaggg

SEQ ID NO: 5183689 - DNA, 25 bp, Homo sapien
caggttaaatgttcgagggatgaaa

SEQ ID NO: 5183690 - DNA, 25 bp, Homo sapien
tccagcagcaggttaaatgttcgag

SEQ ID NO: 5183691 - DNA, 25 bp, Homo sapien
tcgagtatgtaagtgaagttgatct

SEQ ID NO: 5183692 - DNA, 25 bp, Homo sapien
gcaacaaatgtttgggaagggagaa

SEQ ID NO: 5183693 - DNA, 25 bp, Homo sapien
caagcaagagaagatgggatcgagt

SEQ ID NO: 5183694 - DNA, 25 bp, Homo sapien
gcaaaatataaaggcgtagtacata

SEQ ID NO: 5183695 - DNA, 25 bp, Homo sapien
ccgccgccgcctggtcacttctccc

SEQ ID NO: 5183696 - DNA, 25 bp, Homo sapien
cgccgcctggtcacttctccccggc

SEQ ID NO: 5183697 - DNA, 25 bp, Homo sapien
gccgccgcctggtcacttctccccg

SEQ ID NO: 5183698 - DNA, 25 bp, Homo sapien
gccgcctggtcacttctccccggcc

SEQ ID NO: 5183699 - DNA, 25 bp, Homo sapien
tatcctggccaacgatcccgcgaag

SEQ ID NO: 5183700 - DNA, 25 bp, Homo sapien
aagagggaacggcggtccacacacg

SEQ ID NO: 5183701 - DNA, 25 bp, Homo sapien
caacgatcccgcgaagagggaacgg

SEQ ID NO: 5183702 - DNA, 25 bp, Homo sapien
gaagagggaacggcggtccacacac

SEQ ID NO: 5183703 - DNA, 25 bp, Homo sapien
aatattctcgaaccagcaggtttct

SEQ ID NO: 5183704 - DNA, 25 bp, Homo sapien
tcaatattctcgaaccagcaggttt

SEQ ID NO: 5183705 - DNA, 25 bp, Homo sapien
ttttcaatattctcgaaccagcagg

SEQ ID NO: 5183706 - DNA, 25 bp, Homo sapien
tattctcgaaccagcaggtttcttt

SEQ ID NO: 5183707 - DNA, 25 bp, Homo sapien
atttgcaaacattcatcctcaaaat

SEQ ID NO: 5183708 - DNA, 25 bp, Homo sapien
tgatttgcaaacattcatcctcaaa

SEQ ID NO: 5183709 - DNA, 25 bp, Homo sapien
gtatgtggcacttggcaatttcaaa

SEQ ID NO: 5183710 - DNA, 25 bp, Homo sapien
tgtatgtggcacttggcaatttcaa

SEQ ID NO: 5183711 - DNA, 25 bp, Homo sapien
ggtgaactccaagatgaaagcagga

SEQ ID NO: 5183712 - DNA, 25 bp, Homo sapien
ctactgtgataaatccaagccacac

SEQ ID NO: 5183713 - DNA, 25 bp, Homo sapien
gctactgtgataaatccaagccaca

SEQ ID NO: 5183714 - DNA, 25 bp, Homo sapien
tgctactgtgataaatccaagccac

SEQ ID NO: 5183715 - DNA, 25 bp, Homo sapien
cacatcagcgaagtggctagaacca

SEQ ID NO: 5183716 - DNA, 25 bp, Homo sapien
tgcaggcagcagagatctctccttc

SEQ ID NO: 5183717 - DNA, 25 bp, Homo sapien
tgaagtacagcagtaagaagacatc

SEQ ID NO: 5183718 - DNA, 25 bp, Homo sapien
gaaccaccttgcagtagacaaatct

SEQ ID NO: 5183719 - DNA, 25 bp, Homo sapien
ttcctgatcctaatatcaattatgt

SEQ ID NO: 5183720 - DNA, 25 bp, Homo sapien
tatctaatactctagatccagtgtc

SEQ ID NO: 5183721 - DNA, 25 bp, Homo sapien
gaaattttatctaatactctagatc

SEQ ID NO: 5183722 - DNA, 25 bp, Homo sapien
tcttcctgatcctaatatcaattat

SEQ ID NO: 5183723 - DNA, 25 bp, Homo sapien
atttcccccaattcagagcagcatt

SEQ ID NO: 5183724 - DNA, 25 bp, Homo sapien
gatttcccccaattcagagcagcat

SEQ ID NO: 5183725 - DNA, 25 bp, Homo sapien
tttgtacgcatctgggaattagtca

SEQ ID NO: 5183726 - DNA, 25 bp, Homo sapien
aagggataataaactcgctgtgtgc

SEQ ID NO: 5183727 - DNA, 25 bp, Homo sapien
cgctgtgtgcttggataagcctctg

SEQ ID NO: 5183728 - DNA, 25 bp, Homo sapien
gaaaagagcaaagggcccaagcttg

SEQ ID NO: 5183729 - DNA, 25 bp, Homo sapien
gaaagcttgggtagttaagctccta

SEQ ID NO: 5183730 - DNA, 25 bp, Homo sapien
taagctcctacttggtatactctga

SEQ ID NO: 5183731 - DNA, 25 bp, Homo sapien
tagcctggtaattttcacgtgcaaa

SEQ ID NO: 5183732 - DNA, 25 bp, Homo sapien
tgaagactgctaaaacttcttccgg

SEQ ID NO: 5183733 - DNA, 25 bp, Homo sapien
tgctcgattgggtgtacctatccat

SEQ ID NO: 5183734 - DNA, 25 bp, Homo sapien
tttccattccttctccggatgctcg

SEQ ID NO: 5183735 - DNA, 25 bp, Homo sapien
cctgagaacaacataaatgcttcag

SEQ ID NO: 5183736 - DNA, 25 bp, Homo sapien
tccttctccggatgctcgattgggt

SEQ ID NO: 5183737 - DNA, 25 bp, Homo sapien
ggcggtaacttctatggcagaattt

SEQ ID NO: 5183738 - DNA, 25 bp, Homo sapien
tcacttggcggtaacttctatggca

SEQ ID NO: 5183739 - DNA, 25 bp, Homo sapien
cttggcggtaacttctatggcagaa

SEQ ID NO: 5183740 - DNA, 25 bp, Homo sapien
acttctatggcagaatttatgttcc

SEQ ID NO: 5183741 - DNA, 25 bp, Homo sapien
gaaggatttagcatagcatctttaa

SEQ ID NO: 5183742 - DNA, 25 bp, Homo sapien
catgtgggccatgtagcactagtcc

SEQ ID NO: 5183743 - DNA, 25 bp, Homo sapien
cctgaataacatgagcataaatttc

SEQ ID NO: 5183744 - DNA, 25 bp, Homo sapien
tcatgttcatgctatcactctttga

SEQ ID NO: 5183745 - DNA, 25 bp, Homo sapien
gcttctattaaaactcataggtgta

SEQ ID NO: 5183746 - DNA, 25 bp, Homo sapien
gaaggaggactaccatgcctcagta

SEQ ID NO: 5183747 - DNA, 25 bp, Homo sapien
tgcctcagtaggaacataaatatag

SEQ ID NO: 5183748 - DNA, 25 bp, Homo sapien
tatttcgatttcatgggcaggcaag

SEQ ID NO: 5183749 - DNA, 25 bp, Homo sapien
gaagtgagctattgtatctgaccta

SEQ ID NO: 5183750 - DNA, 25 bp, Homo sapien
tgtgtagtctgcatagaaactctgt

SEQ ID NO: 5183751 - DNA, 25 bp, Homo sapien
aatcggtcagtgaggaatgaactct

SEQ ID NO: 5183752 - DNA, 25 bp, Homo sapien
cccaagactctggagttccaaagtt

SEQ ID NO: 5183753 - DNA, 25 bp, Homo sapien
aactctcagggtacaataaaatatc

SEQ ID NO: 5183754 - DNA, 25 bp, Homo sapien
tctagtgtttagaactaacaaaggc

SEQ ID NO: 5183755 - DNA, 25 bp, Homo sapien
tgtagtaacacggttgccagatggg

SEQ ID NO: 5183756 - DNA, 25 bp, Homo sapien
tccgattagtttaaagcagttctgt

SEQ ID NO: 5183757 - DNA, 25 bp, Homo sapien
cctgcaccccacaatattccctgta

SEQ ID NO: 5183758 - DNA, 25 bp, Homo sapien
tgcctgcaccccacaatattccctg

SEQ ID NO: 5183759 - DNA, 25 bp, Homo sapien
gcctgcaccccacaatattccctgt

SEQ ID NO: 5183760 - DNA, 25 bp, Homo sapien
agtctccacagataggaaatatgca

SEQ ID NO: 5183761 - DNA, 25 bp, Homo sapien
tctccacagataggaaatatgcacc

SEQ ID NO: 5183762 - DNA, 25 bp, Homo sapien
gtctccacagataggaaatatgcac

SEQ ID NO: 5183763 - DNA, 25 bp, Homo sapien
ggtcatctttaggaatcaacacagc

SEQ ID NO: 5183764 - DNA, 25 bp, Homo sapien
ggccataaggttaaactgattgatt

SEQ ID NO: 5183765 - DNA, 25 bp, Homo sapien
catctggcagacttctattaagggc

SEQ ID NO: 5183766 - DNA, 25 bp, Homo sapien
tattaagggcaatcaaatcactggc

SEQ ID NO: 5183767 - DNA, 25 bp, Homo sapien
tcattggtacacaattaggtcccga

SEQ ID NO: 5183768 - DNA, 25 bp, Homo sapien
cattggtacacaattaggtcccgat

SEQ ID NO: 5183769 - DNA, 25 bp, Homo sapien
gtacacaattaggtcccgataaatg

SEQ ID NO: 5183770 - DNA, 25 bp, Homo sapien
tggtacacaattaggtcccgataaa

SEQ ID NO: 5183771 - DNA, 25 bp, Homo sapien
tccttatcgcatgcatatttcagtg

SEQ ID NO: 5183772 - DNA, 25 bp, Homo sapien
tcctgactttgaggcttgtatactg

SEQ ID NO: 5183773 - DNA, 25 bp, Homo sapien
tcagtgtcttttaccctctcaagaa

SEQ ID NO: 5183774 - DNA, 25 bp, Homo sapien
taatcttagtatcctgaccatttcc

SEQ ID NO: 5183775 - DNA, 25 bp, Homo sapien
tggactccagatccgaagggcaaac

SEQ ID NO: 5183776 - DNA, 25 bp, Homo sapien
ggactctatcctcaacctgcttggg

SEQ ID NO: 5183777 - DNA, 25 bp, Homo sapien
ggtgaaagtacccttcccatgtgaa

SEQ ID NO: 5183778 - DNA, 25 bp, Homo sapien
aaaatactctttactctggtcaggc

SEQ ID NO: 5183779 - DNA, 25 bp, Homo sapien
aattcagttgagccttggtctgcct

SEQ ID NO: 5183780 - DNA, 25 bp, Homo sapien
tcaactaagctggtaataagaaaat

SEQ ID NO: 5183781 - DNA, 25 bp, Homo sapien
gaatttgagctttggtctgcctgaa

SEQ ID NO: 5183782 - DNA, 25 bp, Homo sapien
tgcttctgctccctagaactctgga

SEQ ID NO: 5183783 - DNA, 25 bp, Homo sapien
aattggaatgttatctgagatgatc

SEQ ID NO: 5183784 - DNA, 25 bp, Homo sapien
aatgttatctgagatgatccagggc

SEQ ID NO: 5183785 - DNA, 25 bp, Homo sapien
tataattggaatgttatctgagatg

SEQ ID NO: 5183786 - DNA, 25 bp, Homo sapien
tggaatgttatctgagatgatccag

SEQ ID NO: 5183787 - DNA, 25 bp, Homo sapien
gaacgatttatcacactgtaaacag

SEQ ID NO: 5183788 - DNA, 25 bp, Homo sapien
tgacctctgagagtagatagtgtgg

SEQ ID NO: 5183789 - DNA, 25 bp, Homo sapien
ttatgaaacacaatgactacacttg

SEQ ID NO: 5183790 - DNA, 25 bp, Homo sapien
gatagtgtggggaacgatttatcac

SEQ ID NO: 5183791 - DNA, 25 bp, Homo sapien
aaatttttcacgtaattctctaatg

SEQ ID NO: 5183792 - DNA, 25 bp, Homo sapien
ggcacgtattaacccagagcgttct

SEQ ID NO: 5183793 - DNA, 25 bp, Homo sapien
tgctcctcgaagacgggcacgtatt

SEQ ID NO: 5183794 - DNA, 25 bp, Homo sapien
catcctaataatttttactggcact

SEQ ID NO: 5183795 - DNA, 25 bp, Homo sapien
tcaatgatagggcagacaaccgttt

SEQ ID NO: 5183796 - DNA, 25 bp, Homo sapien
cataagtcatgtctgacccagccat

SEQ ID NO: 5183797 - DNA, 25 bp, Homo sapien
ctgacaggtaatgttctgtctcctt

SEQ ID NO: 5183798 - DNA, 25 bp, Homo sapien
aggataccagcggaaattcagtttc

SEQ ID NO: 5183799 - DNA, 25 bp, Homo sapien
cattttatagttgagaagactaggt

SEQ ID NO: 5183800 - DNA, 25 bp, Homo sapien
tagatcctccaaggctagtttcaat

SEQ ID NO: 5183801 - DNA, 25 bp, Homo sapien
gcttgaaataaaactagatcctcca

SEQ ID NO: 5183802 - DNA, 25 bp, Homo sapien
caattggaggagcttgaaataaaac

SEQ ID NO: 5183803 - DNA, 25 bp, Homo sapien
gaaaataggccaccagccatagtag

SEQ ID NO: 5183804 - DNA, 25 bp, Homo sapien
aataggccaccagccatagtagggg

SEQ ID NO: 5183805 - DNA, 25 bp, Homo sapien
aaataggccaccagccatagtaggg

SEQ ID NO: 5183806 - DNA, 25 bp, Homo sapien
taggccaccagccatagtaggggtc

SEQ ID NO: 5183807 - DNA, 25 bp, Homo sapien
agatatccattcctgcatcgtaagt

SEQ ID NO: 5183808 - DNA, 25 bp, Homo sapien
cattcctgcatcgtaagttcctatc

SEQ ID NO: 5183809 - DNA, 25 bp, Homo sapien
tatccattcctgcatcgtaagttcc

SEQ ID NO: 5183810 - DNA, 25 bp, Homo sapien
tcctgcatcgtaagttcctatctct

SEQ ID NO: 5183811 - DNA, 25 bp, Homo sapien
taaaagacatttcaagattctctcc

SEQ ID NO: 5183812 - DNA, 25 bp, Homo sapien
aaaagacatttcaagattctctcca

SEQ ID NO: 5183813 - DNA, 25 bp, Homo sapien
cctaaaagacatttcaagattctct

SEQ ID NO: 5183814 - DNA, 25 bp, Homo sapien
aaagacatttcaagattctctccac

SEQ ID NO: 5183815 - DNA, 25 bp, Homo sapien
catgctacagcattgtatgttcagc

SEQ ID NO: 5183816 - DNA, 25 bp, Homo sapien
cagtaaattactgggactggtatgt

SEQ ID NO: 5183817 - DNA, 25 bp, Homo sapien
tgcatcactcagcaaaaatgatttg

SEQ ID NO: 5183818 - DNA, 25 bp, Homo sapien
gcaataggactctgtcaaatcaaaa

SEQ ID NO: 5183819 - DNA, 25 bp, Homo sapien
ggaagctaaggtcattgattttacc

SEQ ID NO: 5183820 - DNA, 25 bp, Homo sapien
gatactttggcataaaaactcttct

SEQ ID NO: 5183821 - DNA, 25 bp, Homo sapien
ttcttagatactttggcataaaaac

SEQ ID NO: 5183822 - DNA, 25 bp, Homo sapien
cattccaaatagtggtaattttact

SEQ ID NO: 5183823 - DNA, 25 bp, Homo sapien
ctagaacaacagtaaaacgattggt

SEQ ID NO: 5183824 - DNA, 25 bp, Homo sapien
ggtagtcatgtaatgaagatagaca

SEQ ID NO: 5183825 - DNA, 25 bp, Homo sapien
gaagatagacatcactaagtgtgac

SEQ ID NO: 5183826 - DNA, 25 bp, Homo sapien
taagtgtgacaatataatcatagct

SEQ ID NO: 5183827 - DNA, 25 bp, Homo sapien
taagctaaagacatcatatatgaaa

SEQ ID NO: 5183828 - DNA, 25 bp, Homo sapien
taataatgagctatcttaaaaagaa

SEQ ID NO: 5183829 - DNA, 25 bp, Homo sapien
ctgataaacaaatttgtaggtcaca

SEQ ID NO: 5183830 - DNA, 25 bp, Homo sapien
cacttgtatttctacacattaataa

SEQ ID NO: 5183831 - DNA, 25 bp, Homo sapien
gatacaaagtatgatgttgacattc

SEQ ID NO: 5183832 - DNA, 25 bp, Homo sapien
aagaggatacaaagtatgatgttga

SEQ ID NO: 5183833 - DNA, 25 bp, Homo sapien
gaggatacaaagtatgatgttgaca

SEQ ID NO: 5183834 - DNA, 25 bp, Homo sapien
ggatacaaagtatgatgttgacatt

SEQ ID NO: 5183835 - DNA, 25 bp, Homo sapien
agagtcattgtagtcctctccgatg

SEQ ID NO: 5183836 - DNA, 25 bp, Homo sapien
gtgggtggatgagcccaaagatgac

SEQ ID NO: 5183837 - DNA, 25 bp, Homo sapien
ggtgggtggatgagcccaaagatga

SEQ ID NO: 5183838 - DNA, 25 bp, Homo sapien
cttgcccaaaggtgggtggatgagc

SEQ ID NO: 5183839 - DNA, 25 bp, Homo sapien
aaaggtgggtggatgagcccaaaga

SEQ ID NO: 5183840 - DNA, 25 bp, Homo sapien
tgtccccgccatggccagtgagttg

SEQ ID NO: 5183841 - DNA, 25 bp, Homo sapien
tcaaggacatgccatccaaaggtgg

SEQ ID NO: 5183842 - DNA, 25 bp, Homo sapien
tgtgtcaaggacatgccatccaaag

SEQ ID NO: 5183843 - DNA, 25 bp, Homo sapien
agttgccgtcggcaaagatgatggc

SEQ ID NO: 5183844 - DNA, 25 bp, Homo sapien
aaggaagcattgttaagaatcactg

SEQ ID NO: 5183845 - DNA, 25 bp, Homo sapien
ttcaacagccaagtagaacaagcag

SEQ ID NO: 5183846 - DNA, 25 bp, Homo sapien
tggaaatcatccaatctggggtggg

SEQ ID NO: 5183847 - DNA, 25 bp, Homo sapien
gaactagaaaacaggtcatttggaa

SEQ ID NO: 5183848 - DNA, 25 bp, Homo sapien
accatatgaagccaacaacggcaag

SEQ ID NO: 5183849 - DNA, 25 bp, Homo sapien
ctgggtaaggccaccaatagcaagt

SEQ ID NO: 5183850 - DNA, 25 bp, Homo sapien
tgggtaaggccaccaatagcaagtg

SEQ ID NO: 5183851 - DNA, 25 bp, Homo sapien
tatgaagccaacaacggcaagccat

SEQ ID NO: 5183852 - DNA, 25 bp, Homo sapien
cacaatctgtaacttgtttatttgt

SEQ ID NO: 5183853 - DNA, 25 bp, Homo sapien
ctgtaacttgtttatttgtattcct

SEQ ID NO: 5183854 - DNA, 25 bp, Homo sapien
caatctgtaacttgtttatttgtat

SEQ ID NO: 5183855 - DNA, 25 bp, Homo sapien
aacttgtttatttgtattcctctct

SEQ ID NO: 5183856 - DNA, 25 bp, Homo sapien
ttgtagtgagaaatcaaagtggtct

SEQ ID NO: 5183857 - DNA, 25 bp, Homo sapien
tttagcagggcctctaagaccatac

SEQ ID NO: 5183858 - DNA, 25 bp, Homo sapien
catatgtgaggcagtaattgaaggc

SEQ ID NO: 5183859 - DNA, 25 bp, Homo sapien
atccttgtcctaatcaccagcatct

SEQ ID NO: 5183860 - DNA, 25 bp, Homo sapien
ttcttgttgatgacatgaccagtgc

SEQ ID NO: 5183861 - DNA, 25 bp, Homo sapien
cagtgccaccaggaaaagtgtatgg

SEQ ID NO: 5183862 - DNA, 25 bp, Homo sapien
tatggagttgccttccgaaaaacat

SEQ ID NO: 5183863 - DNA, 25 bp, Homo sapien
ccaacatgggagcaagtaacaatct

SEQ ID NO: 5183864 - DNA, 25 bp, Homo sapien
cagtatgtttcaattttattttctc

SEQ ID NO: 5183865 - DNA, 25 bp, Homo sapien
tcagtatgtttcaattttattttct

SEQ ID NO: 5183866 - DNA, 25 bp, Homo sapien
ttaagtaatgtagctattgcagaaa

SEQ ID NO: 5183867 - DNA, 25 bp, Homo sapien
taagtaatgtagctattgcagaaat

SEQ ID NO: 5183868 - DNA, 25 bp, Homo sapien
gatccattgtctagcattcttccct

SEQ ID NO: 5183869 - DNA, 25 bp, Homo sapien
tattagggtcctgagataatctgtc

SEQ ID NO: 5183870 - DNA, 25 bp, Homo sapien
tatcctgaggaagaacggctaccaa

SEQ ID NO: 5183871 - DNA, 25 bp, Homo sapien
gcagttatgcaccagcctttaggca

SEQ ID NO: 5183872 - DNA, 25 bp, Homo sapien
gcaaatttgactggtctcagttccc

SEQ ID NO: 5183873 - DNA, 25 bp, Homo sapien
ctgcaaatttgactggtctcagttc

SEQ ID NO: 5183874 - DNA, 25 bp, Homo sapien
caaatttgactggtctcagttccca

SEQ ID NO: 5183875 - DNA, 25 bp, Homo sapien
aatttgactggtctcagttcccaaa

SEQ ID NO: 5183876 - DNA, 25 bp, Homo sapien
aggaacatgagaacacttatatttg

SEQ ID NO: 5183877 - DNA, 25 bp, Homo sapien
ggaacatgagaacacttatatttgt

SEQ ID NO: 5183878 - DNA, 25 bp, Homo sapien
gtaaaggaacatgagaacacttata

SEQ ID NO: 5183879 - DNA, 25 bp, Homo sapien
aaaggaacatgagaacacttatatt

SEQ ID NO: 5183880 - DNA, 25 bp, Homo sapien
gctgatttaaatggtgctcactcat

SEQ ID NO: 5183881 - DNA, 25 bp, Homo sapien
catgagcatatgagggctactgtac

SEQ ID NO: 5183882 - DNA, 25 bp, Homo sapien
tattgactgacacagtcacacggtg

SEQ ID NO: 5183883 - DNA, 25 bp, Homo sapien
caagctgtggatcaactaagccagt

SEQ ID NO: 5183884 - DNA, 25 bp, Homo sapien
cagactcaggctcttacatggcaca

SEQ ID NO: 5183885 - DNA, 25 bp, Homo sapien
ttaaagctttgactgaatcacagcc

SEQ ID NO: 5183886 - DNA, 25 bp, Homo sapien
gctgcaaatcctgtgtccccaacta

SEQ ID NO: 5183887 - DNA, 25 bp, Homo sapien
gccaaagcgcaaagtcattctttgt

SEQ ID NO: 5183888 - DNA, 25 bp, Homo sapien
tgatgctctattttcaagactacct

SEQ ID NO: 5183889 - DNA, 25 bp, Homo sapien
ccttgaataggatacccggtctagt

SEQ ID NO: 5183890 - DNA, 25 bp, Homo sapien
gatgccactagattcctgctttaac

SEQ ID NO: 5183891 - DNA, 25 bp, Homo sapien
ggtctagtttcaacctcatttagac

SEQ ID NO: 5183892 - DNA, 25 bp, Homo sapien
aaaggcattcacattttctagattc

SEQ ID NO: 5183893 - DNA, 25 bp, Homo sapien
aaggcattcacattttctagattca

SEQ ID NO: 5183894 - DNA, 25 bp, Homo sapien
caaaggcattcacattttctagatt

SEQ ID NO: 5183895 - DNA, 25 bp, Homo sapien
aggcattcacattttctagattcat

SEQ ID NO: 5183896 - DNA, 25 bp, Homo sapien
cttgtctcttcagaacttttgtttt

SEQ ID NO: 5183897 - DNA, 25 bp, Homo sapien
cttcttgtctcttcagaacttttgt

SEQ ID NO: 5183898 - DNA, 25 bp, Homo sapien
tcttgtctcttcagaacttttgttt

SEQ ID NO: 5183899 - DNA, 25 bp, Homo sapien
tctcttcagaacttttgttttttca

SEQ ID NO: 5183900 - DNA, 25 bp, Homo sapien
caagtgagtaataacgtcttgggat

SEQ ID NO: 5183901 - DNA, 25 bp, Homo sapien
gacacatctccataatccactttga

SEQ ID NO: 5183902 - DNA, 25 bp, Homo sapien
ctgggagtccggatagatgttttct

SEQ ID NO: 5183903 - DNA, 25 bp, Homo sapien
ccaagaaaagggcttacacttcaga

SEQ ID NO: 5183904 - DNA, 25 bp, Homo sapien
tagaaaagggaatcgatgtttacta

SEQ ID NO: 5183905 - DNA, 25 bp, Homo sapien
gaatcgatgtttactaatgatttgg

SEQ ID NO: 5183906 - DNA, 25 bp, Homo sapien
aaagggaatcgatgtttactaatga

SEQ ID NO: 5183907 - DNA, 25 bp, Homo sapien
gatgtttactaatgatttgggtcca

SEQ ID NO: 5183908 - DNA, 25 bp, Homo sapien
tcatttctgtcctgttatagccctt

SEQ ID NO: 5183909 - DNA, 25 bp, Homo sapien
tctgtcctgttatagcccttggtca

SEQ ID NO: 5183910 - DNA, 25 bp, Homo sapien
atttctgtcctgttatagcccttgg

SEQ ID NO: 5183911 - DNA, 25 bp, Homo sapien
cccagaggatttccaaaagtcctct

SEQ ID NO: 5183912 - DNA, 25 bp, Homo sapien
tctattagaaaattgggtgttatcc

SEQ ID NO: 5183913 - DNA, 25 bp, Homo sapien
aaaattgggtgttatcctgacctca

SEQ ID NO: 5183914 - DNA, 25 bp, Homo sapien
tattatccaattggcctgaaacaat

SEQ ID NO: 5183915 - DNA, 25 bp, Homo sapien
gaaacaatttctcatgagtatctat

SEQ ID NO: 5183916 - DNA, 25 bp, Homo sapien
ttcattttccttgcggcccatgttg

SEQ ID NO: 5183917 - DNA, 25 bp, Homo sapien
gacagttgaatatacccactttttc

SEQ ID NO: 5183918 - DNA, 25 bp, Homo sapien
tgatttcctcccataccatgacagt

SEQ ID NO: 5183919 - DNA, 25 bp, Homo sapien
tctaaacactgattggtttcaacat

SEQ ID NO: 5183920 - DNA, 25 bp, Homo sapien
ggtctccactgatagttttaacaat

SEQ ID NO: 5183921 - DNA, 25 bp, Homo sapien
tatagttattaacatgtgagccatg

SEQ ID NO: 5183922 - DNA, 25 bp, Homo sapien
taacatgtgagccatggtctccact

SEQ ID NO: 5183923 - DNA, 25 bp, Homo sapien
cagtttatagttattaacatgtgag

SEQ ID NO: 5183924 - DNA, 25 bp, Homo sapien
gcacgctgagtgctttgtggagtct

SEQ ID NO: 5183925 - DNA, 25 bp, Homo sapien
tctgtgcacgctgagtgctttgtgg

SEQ ID NO: 5183926 - DNA, 25 bp, Homo sapien
tctattgtaatcttagctcttctac

SEQ ID NO: 5183927 - DNA, 25 bp, Homo sapien
gagtcttttagacccattcctgtcc

SEQ ID NO: 5183928 - DNA, 25 bp, Homo sapien
gtttcagagggagtatggcacttct

SEQ ID NO: 5183929 - DNA, 25 bp, Homo sapien
tgttggcaaacaccggaagctagaa

SEQ ID NO: 5183930 - DNA, 25 bp, Homo sapien
gcatctacaagccatgggacaccaa

SEQ ID NO: 5183931 - DNA, 25 bp, Homo sapien
cagtaatttgatacaacagctccag

SEQ ID NO: 5183932 - DNA, 25 bp, Homo sapien
caggctaaccttaggcagtgcagtc

SEQ ID NO: 5183933 - DNA, 25 bp, Homo sapien
cagttgtcacaagccagccttatca

SEQ ID NO: 5183934 - DNA, 25 bp, Homo sapien
tattcttccagagtggcaaagctgt

SEQ ID NO: 5183935 - DNA, 25 bp, Homo sapien
tatcatgtgtgagtcaggccacagc

SEQ ID NO: 5183936 - DNA, 25 bp, Homo sapien
gaaatctgaggaagtcagctttaca

SEQ ID NO: 5183937 - DNA, 25 bp, Homo sapien
gctgaacgagttagtcttggaagag

SEQ ID NO: 5183938 - DNA, 25 bp, Homo sapien
aataacataaactctggagctccgt

SEQ ID NO: 5183939 - DNA, 25 bp, Homo sapien
ggagctccgtaagctgaacgagtta

SEQ ID NO: 5183940 - DNA, 25 bp, Homo sapien
tgattacaggtccattgagtctaga

SEQ ID NO: 5183941 - DNA, 25 bp, Homo sapien
tgagtctagaaacatccaagcacaa

SEQ ID NO: 5183942 - DNA, 25 bp, Homo sapien
ggttcggatttctttgtcagcagtg

SEQ ID NO: 5183943 - DNA, 25 bp, Homo sapien
ccaagcacaagtcatcggttcggat

SEQ ID NO: 5183944 - DNA, 25 bp, Homo sapien
gcattgctactagctgacagaaaat

SEQ ID NO: 5183945 - DNA, 25 bp, Homo sapien
tattctaaaattccacactgcttgc

SEQ ID NO: 5183946 - DNA, 25 bp, Homo sapien
gacattgttcactcaagagttatgg

SEQ ID NO: 5183947 - DNA, 25 bp, Homo sapien
tagcataagctcagtagagccccag

SEQ ID NO: 5183948 - DNA, 25 bp, Homo sapien
tggatagattccatcttttgaggct

SEQ ID NO: 5183949 - DNA, 25 bp, Homo sapien
atagattccatcttttgaggcttca

SEQ ID NO: 5183950 - DNA, 25 bp, Homo sapien
gctggatagattccatcttttgagg

SEQ ID NO: 5183951 - DNA, 25 bp, Homo sapien
tagctggatagattccatcttttga

SEQ ID NO: 5183952 - DNA, 25 bp, Homo sapien
gaaattataatcccatttacctgct

SEQ ID NO: 5183953 - DNA, 25 bp, Homo sapien
gatctgcttccactacagtcctgca

SEQ ID NO: 5183954 - DNA, 25 bp, Homo sapien
caaggtcatgttccttagcagccac

SEQ ID NO: 5183955 - DNA, 25 bp, Homo sapien
tactgttaacatgtcgcaacgtgag

SEQ ID NO: 5183956 - DNA, 25 bp, Homo sapien
tcagaaggttcatcgagacattggt

SEQ ID NO: 5183957 - DNA, 25 bp, Homo sapien
ttcacggattcacagagagctcatg

SEQ ID NO: 5183958 - DNA, 25 bp, Homo sapien
gatgcttctgtaaaggctccatgaa

SEQ ID NO: 5183959 - DNA, 25 bp, Homo sapien
tctcacagtgatcgaagtgctgcgg

SEQ ID NO: 5183960 - DNA, 25 bp, Homo sapien
taatatgtggccctgttgtagacac

SEQ ID NO: 5183961 - DNA, 25 bp, Homo sapien
acctagtggatatggtggcaagtca

SEQ ID NO: 5183962 - DNA, 25 bp, Homo sapien
cactatggctgttgtactgagaaaa

SEQ ID NO: 5183963 - DNA, 25 bp, Homo sapien
tactataatggcacgtgttcaagcc

SEQ ID NO: 5183964 - DNA, 25 bp, Homo sapien
taccttctagggcatgtgatgggca

SEQ ID NO: 5183965 - DNA, 25 bp, Homo sapien
taagacagtgatatctctcctctga

SEQ ID NO: 5183966 - DNA, 25 bp, Homo sapien
gaagcaacttatgtaatatagcagc

SEQ ID NO: 5183967 - DNA, 25 bp, Homo sapien
tcttataccttcaagtggccattgg

SEQ ID NO: 5183968 - DNA, 25 bp, Homo sapien
tccattgactgcacttagaagataa

SEQ ID NO: 5183969 - DNA, 25 bp, Homo sapien
taccagagtttacagagctccactg

SEQ ID NO: 5183970 - DNA, 25 bp, Homo sapien
gtttttgctgcccaactgaactgga

SEQ ID NO: 5183971 - DNA, 25 bp, Homo sapien
gatttgcagcagatatcagccatgc

SEQ ID NO: 5183972 - DNA, 25 bp, Homo sapien
aaaatgggcagtggcggaatcctga

SEQ ID NO: 5183973 - DNA, 25 bp, Homo sapien
gagtgatttgttctccctagctaaa

SEQ ID NO: 5183974 - DNA, 25 bp, Homo sapien
tatagccttaatcatctaattttcc

SEQ ID NO: 5183975 - DNA, 25 bp, Homo sapien
cgcagaagtggtctttatcttaaag

SEQ ID NO: 5183976 - DNA, 25 bp, Homo sapien
atataacataacacaagtatcgcag

SEQ ID NO: 5183977 - DNA, 25 bp, Homo sapien
ctgtcattatgcacaatctactttt

SEQ ID NO: 5183978 - DNA, 25 bp, Homo sapien
tttcagcacaactggaaccaagcag

SEQ ID NO: 5183979 - DNA, 25 bp, Homo sapien
catgtgccaagcatatatctaaaac

SEQ ID NO: 5183980 - DNA, 25 bp, Homo sapien
tataaatgttaaagaaccatgtgcc

SEQ ID NO: 5183981 - DNA, 25 bp, Homo sapien
agcataaaatagtgacgttgtttat

SEQ ID NO: 5183982 - DNA, 25 bp, Homo sapien
aagcataaaatagtgacgttgttta

SEQ ID NO: 5183983 - DNA, 25 bp, Homo sapien
ctgaggaggaagacgaaagcacagt

SEQ ID NO: 5183984 - DNA, 25 bp, Homo sapien
gaaagcacagttctgagcatgagag

SEQ ID NO: 5183985 - DNA, 25 bp, Homo sapien
aggaagacgaaagcacagttctgag

SEQ ID NO: 5183986 - DNA, 25 bp, Homo sapien
cacagttctgagcatgagagctcac

SEQ ID NO: 5183987 - DNA, 25 bp, Homo sapien
gagctaacaccacctaagattttga

SEQ ID NO: 5183988 - DNA, 25 bp, Homo sapien
cacctcttgccaattgtggtaggat

SEQ ID NO: 5183989 - DNA, 25 bp, Homo sapien
caaatgtggctcttctcctacttga

SEQ ID NO: 5183990 - DNA, 25 bp, Homo sapien
gagtctggtcctgcaatgcagttaa

SEQ ID NO: 5183991 - DNA, 25 bp, Homo sapien
gctgcagggtgctgtagtttaagtc

SEQ ID NO: 5183992 - DNA, 25 bp, Homo sapien
tcagaaaagctgatttcaagagctt

SEQ ID NO: 5183993 - DNA, 25 bp, Homo sapien
gtgctgtagtttaagtcctcctcca

SEQ ID NO: 5183994 - DNA, 25 bp, Homo sapien
gagcttcttacataaatagctgaag

SEQ ID NO: 5183995 - DNA, 25 bp, Homo sapien
gtagctactgaagaatggttaaaac

SEQ ID NO: 5183996 - DNA, 25 bp, Homo sapien
gctttaaggatcaacatagcttatc

SEQ ID NO: 5183997 - DNA, 25 bp, Homo sapien
cagagttttggatgtcagtatggta

SEQ ID NO: 5183998 - DNA, 25 bp, Homo sapien
taaagcacagctttaaggatcaaca

SEQ ID NO: 5183999 - DNA, 25 bp, Homo sapien
tatgactctttataggaagttctga

SEQ ID NO: 5184000 - DNA, 25 bp, Homo sapien
aataatatcatctccctcttatgac

SEQ ID NO: 5184001 - DNA, 25 bp, Homo sapien
ggaagttctgattgcaggtcattag

SEQ ID NO: 5184002 - DNA, 25 bp, Homo sapien
gaagttgaaactgcataggtgagag

SEQ ID NO: 5184003 - DNA, 25 bp, Homo sapien
ctgatcagttcactaagggccttga

SEQ ID NO: 5184004 - DNA, 25 bp, Homo sapien
tagaggcctaacctgatcagttcac

SEQ ID NO: 5184005 - DNA, 25 bp, Homo sapien
tgcactttgatagggtacttctgaa

SEQ ID NO: 5184006 - DNA, 25 bp, Homo sapien
cttccgttgcccctatagaggccta

SEQ ID NO: 5184007 - DNA, 25 bp, Homo sapien
aagtctgttgggtttagagtctcag

SEQ ID NO: 5184008 - DNA, 25 bp, Homo sapien
tacagcactagtctggctcatacac

SEQ ID NO: 5184009 - DNA, 25 bp, Homo sapien
tcagcctgatactcaatgcatacag

SEQ ID NO: 5184010 - DNA, 25 bp, Homo sapien
tcttttatattaaatgcacgttttc

SEQ ID NO: 5184011 - DNA, 25 bp, Homo sapien
ctgagtaaaaacaattccattgaca

SEQ ID NO: 5184012 - DNA, 25 bp, Homo sapien
gtaaaaacaattccattgacagaaa

SEQ ID NO: 5184013 - DNA, 25 bp, Homo sapien
gagtaaaaacaattccattgacaga

SEQ ID NO: 5184014 - DNA, 25 bp, Homo sapien
aaaaacaattccattgacagaaaat

SEQ ID NO: 5184015 - DNA, 25 bp, Homo sapien
ggaggtttgccgtctgatggaaatc

SEQ ID NO: 5184016 - DNA, 25 bp, Homo sapien
atggatctccggcaattagaggata

SEQ ID NO: 5184017 - DNA, 25 bp, Homo sapien
gaaatcgaggtctccatcatggatc

SEQ ID NO: 5184018 - DNA, 25 bp, Homo sapien
gataaaaatgatgtactcctcaggg

SEQ ID NO: 5184019 - DNA, 25 bp, Homo sapien
cacggtcctgtccaaaccatctttt

SEQ ID NO: 5184020 - DNA, 25 bp, Homo sapien
cttccacttccaactgtggtggtaa

SEQ ID NO: 5184021 - DNA, 25 bp, Homo sapien
ttccaactgtggtggtaagaaacag

SEQ ID NO: 5184022 - DNA, 25 bp, Homo sapien
tccacttccaactgtggtggtaaga

SEQ ID NO: 5184023 - DNA, 25 bp, Homo sapien
cacttccaactgtggtggtaagaaa

SEQ ID NO: 5184024 - DNA, 25 bp, Homo sapien
gctccttgtccttttaagagatccc

SEQ ID NO: 5184025 - DNA, 25 bp, Homo sapien
acccttccctttcctaatgctgctc

SEQ ID NO: 5184026 - DNA, 25 bp, Homo sapien
ttccttctgtgctggtgtctaggat

SEQ ID NO: 5184027 - DNA, 25 bp, Homo sapien
tgtgctggtgtctaggatgaaaatc

SEQ ID NO: 5184028 - DNA, 25 bp, Homo sapien
ttaattcccactgtttatactgtac

SEQ ID NO: 5184029 - DNA, 25 bp, Homo sapien
taattcccactgtttatactgtact

SEQ ID NO: 5184030 - DNA, 25 bp, Homo sapien
tttaaattcgccagtcagaattctg

SEQ ID NO: 5184031 - DNA, 25 bp, Homo sapien
ctgttgggaaatggacaattcttta

SEQ ID NO: 5184032 - DNA, 25 bp, Homo sapien
ccttataatttctggctgttgggaa

SEQ ID NO: 5184033 - DNA, 25 bp, Homo sapien
aaattcgccagtcagaattctgggc

SEQ ID NO: 5184034 - DNA, 25 bp, Homo sapien
gatactgcaggagcctgaagtccac

SEQ ID NO: 5184035 - DNA, 25 bp, Homo sapien
catgatactgcaggagcctgaagtc

SEQ ID NO: 5184036 - DNA, 25 bp, Homo sapien
tactgcaggagcctgaagtccactc

SEQ ID NO: 5184037 - DNA, 25 bp, Homo sapien
tgcaggagcctgaagtccactctcc

SEQ ID NO: 5184038 - DNA, 25 bp, Homo sapien
gagagtaattctcaaggccttaaca

SEQ ID NO: 5184039 - DNA, 25 bp, Homo sapien
tgtggctgcctgatcttggattttc

SEQ ID NO: 5184040 - DNA, 25 bp, Homo sapien
catctgttttatataactccctaag

SEQ ID NO: 5184041 - DNA, 25 bp, Homo sapien
aagacatctcctaaaactaacagct

SEQ ID NO: 5184042 - DNA, 25 bp, Homo sapien
tccacactcatccctgaccttcttt

SEQ ID NO: 5184043 - DNA, 25 bp, Homo sapien
tctccacactcatccctgaccttct

SEQ ID NO: 5184044 - DNA, 25 bp, Homo sapien
ctccacactcatccctgaccttctt

SEQ ID NO: 5184045 - DNA, 25 bp, Homo sapien
gcatagatgttctaacataatacac

SEQ ID NO: 5184046 - DNA, 25 bp, Homo sapien
ttcataatcatacataacataacgg

SEQ ID NO: 5184047 - DNA, 25 bp, Homo sapien
gaaggcctgagtgcttacctaccta

SEQ ID NO: 5184048 - DNA, 25 bp, Homo sapien
tacacaaaaagatctatacctcatg

SEQ ID NO: 5184049 - DNA, 25 bp, Homo sapien
ttaggaaacaaggttttcagtgcaa

SEQ ID NO: 5184050 - DNA, 25 bp, Homo sapien
caaggttttcagtgcaataaaaaat

SEQ ID NO: 5184051 - DNA, 25 bp, Homo sapien
gaaacaaggttttcagtgcaataaa

SEQ ID NO: 5184052 - DNA, 25 bp, Homo sapien
gttttcagtgcaataaaaaataatg

SEQ ID NO: 5184053 - DNA, 25 bp, Homo sapien
aagggcataatgacttctaagcttg

SEQ ID NO: 5184054 - DNA, 25 bp, Homo sapien
cagagcaagccaatctcagctgtga

SEQ ID NO: 5184055 - DNA, 25 bp, Homo sapien
ctgtgaccatagtcccctgacaggt

SEQ ID NO: 5184056 - DNA, 25 bp, Homo sapien
gactctattcacctgtctttccaga

SEQ ID NO: 5184057 - DNA, 25 bp, Homo sapien
caatgtggctacttcaccaagtgcc

SEQ ID NO: 5184058 - DNA, 25 bp, Homo sapien
gagatgattgccactgacaagacag

SEQ ID NO: 5184059 - DNA, 25 bp, Homo sapien
tgaggtacagtaaggccaacatatc

SEQ ID NO: 5184060 - DNA, 25 bp, Homo sapien
ttctgcagcagtggataaggccctg

SEQ ID NO: 5184061 - DNA, 25 bp, Homo sapien
aaggctactcgtggacttagggatc

SEQ ID NO: 5184062 - DNA, 25 bp, Homo sapien
cacacatgcaccaaaaatctcaatt

SEQ ID NO: 5184063 - DNA, 25 bp, Homo sapien
gctgtttaaggatatgcatccattc

SEQ ID NO: 5184064 - DNA, 25 bp, Homo sapien
tctttgcgagaaccaatgtttcacc

SEQ ID NO: 5184065 - DNA, 25 bp, Homo sapien
tatttggaaacggttcccatgagga

SEQ ID NO: 5184066 - DNA, 25 bp, Homo sapien
agccccaactatggttagcttccaa

SEQ ID NO: 5184067 - DNA, 25 bp, Homo sapien
ccccaactatggttagcttccaagg

SEQ ID NO: 5184068 - DNA, 25 bp, Homo sapien
cagccccaactatggttagcttcca

SEQ ID NO: 5184069 - DNA, 25 bp, Homo sapien
tcttgagtttctccctttgagcaac

SEQ ID NO: 5184070 - DNA, 25 bp, Homo sapien
tagctgctggctatgcaattaggca

SEQ ID NO: 5184071 - DNA, 25 bp, Homo sapien
tcctagagatgcaccaaaacagatc

SEQ ID NO: 5184072 - DNA, 25 bp, Homo sapien
gggacaacttgctggcatggccaat

SEQ ID NO: 5184073 - DNA, 25 bp, Homo sapien
tatttagtacaggtagtgaagctgc

SEQ ID NO: 5184074 - DNA, 25 bp, Homo sapien
tggcatctgtagacatatttagtac

SEQ ID NO: 5184075 - DNA, 25 bp, Homo sapien
aactttgctgagagcctttggtttc

SEQ ID NO: 5184076 - DNA, 25 bp, Homo sapien
ggaagaaagttgacctcagcaagtt

SEQ ID NO: 5184077 - DNA, 25 bp, Homo sapien
gaaatcacagctgttccataacact

SEQ ID NO: 5184078 - DNA, 25 bp, Homo sapien
gagagtcacggtcagaaatcacagc

SEQ ID NO: 5184079 - DNA, 25 bp, Homo sapien
ccgagagtcacggtcagaaatcaca

SEQ ID NO: 5184080 - DNA, 25 bp, Homo sapien
gctgttccataacactctgagggca

SEQ ID NO: 5184081 - DNA, 25 bp, Homo sapien
cagttgggtgggaattgttgaaaag

SEQ ID NO: 5184082 - DNA, 25 bp, Homo sapien
tgtgctgacaacaagactctgctgc

SEQ ID NO: 5184083 - DNA, 25 bp, Homo sapien
gacgatttgaccatgacagttgggt

SEQ ID NO: 5184084 - DNA, 25 bp, Homo sapien
ttgaacagccttttgacgatttgac

SEQ ID NO: 5184085 - DNA, 25 bp, Homo sapien
ctcaaaaagtgcatagctatctcct

SEQ ID NO: 5184086 - DNA, 25 bp, Homo sapien
aaaaagtgcatagctatctcctaga

SEQ ID NO: 5184087 - DNA, 25 bp, Homo sapien
caaaaagtgcatagctatctcctag

SEQ ID NO: 5184088 - DNA, 25 bp, Homo sapien
aaaagtgcatagctatctcctagat

SEQ ID NO: 5184089 - DNA, 25 bp, Homo sapien
tcactctgtaacacttggcaatcct

SEQ ID NO: 5184090 - DNA, 25 bp, Homo sapien
actctgtaacacttggcaatcctac

SEQ ID NO: 5184091 - DNA, 25 bp, Homo sapien
cactctgtaacacttggcaatccta

SEQ ID NO: 5184092 - DNA, 25 bp, Homo sapien
tcatgagcaataactgggaaacagg

SEQ ID NO: 5184093 - DNA, 25 bp, Homo sapien
tctgctgcagagatgtgtgggacca

SEQ ID NO: 5184094 - DNA, 25 bp, Homo sapien
caatggcttgtgtcggcactctgct

SEQ ID NO: 5184095 - DNA, 25 bp, Homo sapien
gataaatgcattccacccgaagcag

SEQ ID NO: 5184096 - DNA, 25 bp, Homo sapien
ccacaaagatacagagccaggccgg

SEQ ID NO: 5184097 - DNA, 25 bp, Homo sapien
ccattaagctagaggaagaccacac

SEQ ID NO: 5184098 - DNA, 25 bp, Homo sapien
ttctcacaaaggttaccattaagct

SEQ ID NO: 5184099 - DNA, 25 bp, Homo sapien
ggttaccattaagctagaggaagac

SEQ ID NO: 5184100 - DNA, 25 bp, Homo sapien
caaaggttaccattaagctagagga

SEQ ID NO: 5184101 - DNA, 25 bp, Homo sapien
tgcgctcacggctgttttcctcgtt

SEQ ID NO: 5184102 - DNA, 25 bp, Homo sapien
gccagaaagatccttggcgcacaga

SEQ ID NO: 5184103 - DNA, 25 bp, Homo sapien
cacagaatgactcgagcgggggctc

SEQ ID NO: 5184104 - DNA, 25 bp, Homo sapien
gtgtaccacgatgggcgccaatgca

SEQ ID NO: 5184105 - DNA, 25 bp, Homo sapien
ctcaagggcccgcaggccgcccccg

SEQ ID NO: 5184106 - DNA, 25 bp, Homo sapien
agggcccgcaggccgcccccgcgct

SEQ ID NO: 5184107 - DNA, 25 bp, Homo sapien
tcaagggcccgcaggccgcccccgc

SEQ ID NO: 5184108 - DNA, 25 bp, Homo sapien
gcccgcaggccgcccccgcgctcag

SEQ ID NO: 5184109 - DNA, 25 bp, Homo sapien
ctccagagacctgtccgcctggcgt

SEQ ID NO: 5184110 - DNA, 25 bp, Homo sapien
agagacctgtccgcctggcgtcccc

SEQ ID NO: 5184111 - DNA, 25 bp, Homo sapien
gaccgccgagtttccgcgggcgcca

SEQ ID NO: 5184112 - DNA, 25 bp, Homo sapien
gctcagattcccgggttccggactc

SEQ ID NO: 5184113 - DNA, 25 bp, Homo sapien
cggcaggtagctgcggtctctgccc

SEQ ID NO: 5184114 - DNA, 25 bp, Homo sapien
gggcgcacccggcaggtagctgcgg

SEQ ID NO: 5184115 - DNA, 25 bp, Homo sapien
cgcacccggcaggtagctgcggtct

SEQ ID NO: 5184116 - DNA, 25 bp, Homo sapien
acccggcaggtagctgcggtctctg

SEQ ID NO: 5184117 - DNA, 25 bp, Homo sapien
ttcaaacgcgaagcgaaggcgcagg

SEQ ID NO: 5184118 - DNA, 25 bp, Homo sapien
gccagattcaaacgcgaagcgaagg

SEQ ID NO: 5184119 - DNA, 25 bp, Homo sapien
gggcgagccagattcaaacgcgaag

SEQ ID NO: 5184120 - DNA, 25 bp, Homo sapien
gaaggggcgagccagattcaaacgc

SEQ ID NO: 5184121 - DNA, 25 bp, Homo sapien
aagatgaagaggttccagcgccact

SEQ ID NO: 5184122 - DNA, 25 bp, Homo sapien
tgcccacccggaacataagcgtgag

SEQ ID NO: 5184123 - DNA, 25 bp, Homo sapien
gaagttatagacattggccacgcaa

SEQ ID NO: 5184124 - DNA, 25 bp, Homo sapien
aatctgcgcggagaccatgtggctg

SEQ ID NO: 5184125 - DNA, 25 bp, Homo sapien
gtgaaatctgtaattgacaaaggct

SEQ ID NO: 5184126 - DNA, 25 bp, Homo sapien
ttctttaatggatgctgaaagcttc

SEQ ID NO: 5184127 - DNA, 25 bp, Homo sapien
ttttagcatttacaccgttgatggt

SEQ ID NO: 5184128 - DNA, 25 bp, Homo sapien
tttacaccgttgatggtaggaagca

SEQ ID NO: 5184129 - DNA, 25 bp, Homo sapien
ccttgctggaaaagggcccacaggg

SEQ ID NO: 5184130 - DNA, 25 bp, Homo sapien
caagtccttgctggaaaagggccca

SEQ ID NO: 5184131 - DNA, 25 bp, Homo sapien
tctatcatattctaaagtttgatcc

SEQ ID NO: 5184132 - DNA, 25 bp, Homo sapien
tttgatccatgcctaaccacctttc

SEQ ID NO: 5184133 - DNA, 25 bp, Homo sapien
ctacatccagttcaagttggtcaag

SEQ ID NO: 5184134 - DNA, 25 bp, Homo sapien
ggaactcaccctcaggtgtctgccg

SEQ ID NO: 5184135 - DNA, 25 bp, Homo sapien
actcaccctcaggtgtctgccgaga

SEQ ID NO: 5184136 - DNA, 25 bp, Homo sapien
gaactcaccctcaggtgtctgccga

SEQ ID NO: 5184137 - DNA, 25 bp, Homo sapien
aaagttgatctgcccctgtactaaa

SEQ ID NO: 5184138 - DNA, 25 bp, Homo sapien
ggcttttggcatcgatcacgtggca

SEQ ID NO: 5184139 - DNA, 25 bp, Homo sapien
tcgatcacgtggcaaattgtgaggg

SEQ ID NO: 5184140 - DNA, 25 bp, Homo sapien
taaaaggggcttttggcatcgatca

SEQ ID NO: 5184141 - DNA, 25 bp, Homo sapien
caatctcgaactgttcagtttgcat

SEQ ID NO: 5184142 - DNA, 25 bp, Homo sapien
gacaatctcgaactgttcagtttgc

SEQ ID NO: 5184143 - DNA, 25 bp, Homo sapien
gatgacgacaatctcgaactgttca

SEQ ID NO: 5184144 - DNA, 25 bp, Homo sapien
gacgacaatctcgaactgttcagtt

SEQ ID NO: 5184145 - DNA, 25 bp, Homo sapien
ctgtgaatggagaaattgggtaggg

SEQ ID NO: 5184146 - DNA, 25 bp, Homo sapien
tgtgaatggagaaattgggtagggg

SEQ ID NO: 5184147 - DNA, 25 bp, Homo sapien
tgaatggagaaattgggtaggggtg

SEQ ID NO: 5184148 - DNA, 25 bp, Homo sapien
tgttcttggttatggtaatgaatag

SEQ ID NO: 5184149 - DNA, 25 bp, Homo sapien
ttcttggttatggtaatgaatagtc

SEQ ID NO: 5184150 - DNA, 25 bp, Homo sapien
tggttatggtaatgaatagtcatgc

SEQ ID NO: 5184151 - DNA, 25 bp, Homo sapien
tcttgttcttggttatggtaatgaa

SEQ ID NO: 5184152 - DNA, 25 bp, Homo sapien
ctatgaatccagcaggtcaaataat

SEQ ID NO: 5184153 - DNA, 25 bp, Homo sapien
aataatcttagttctttttcagaca

SEQ ID NO: 5184154 - DNA, 25 bp, Homo sapien
tgaatccagcaggtcaaataatctt

SEQ ID NO: 5184155 - DNA, 25 bp, Homo sapien
gaatccagcaggtcaaataatctta

SEQ ID NO: 5184156 - DNA, 25 bp, Homo sapien
acacacggccattcatgctcttttc

SEQ ID NO: 5184157 - DNA, 25 bp, Homo sapien
ggcaaatctgtgtagattacaagta

SEQ ID NO: 5184158 - DNA, 25 bp, Homo sapien
cactggcaaatctgtgtagattaca

SEQ ID NO: 5184159 - DNA, 25 bp, Homo sapien
cacacacggccattcatgctctttt

SEQ ID NO: 5184160 - DNA, 25 bp, Homo sapien
caatgacggctgagtgggaatctga

SEQ ID NO: 5184161 - DNA, 25 bp, Homo sapien
gatcaagtttcaattaatgtccagg

SEQ ID NO: 5184162 - DNA, 25 bp, Homo sapien
tcaagtagtatgaaaggaagccagc

SEQ ID NO: 5184163 - DNA, 25 bp, Homo sapien
tctgaacttctatctacaactggca

SEQ ID NO: 5184164 - DNA, 25 bp, Homo sapien
atccattgtcattaccaatttgttt

SEQ ID NO: 5184165 - DNA, 25 bp, Homo sapien
tccattgtcattaccaatttgtttt

SEQ ID NO: 5184166 - DNA, 25 bp, Homo sapien
cttttggaatacacaacctctctag

SEQ ID NO: 5184167 - DNA, 25 bp, Homo sapien
gagtctgccctattctgcacactca

SEQ ID NO: 5184168 - DNA, 25 bp, Homo sapien
ggaatacacaacctctctagtcccg

SEQ ID NO: 5184169 - DNA, 25 bp, Homo sapien
tctagtcccgtggttgagtctgccc

SEQ ID NO: 5184170 - DNA, 25 bp, Homo sapien
gtattgtcctgccatctctcaacga

SEQ ID NO: 5184171 - DNA, 25 bp, Homo sapien
gttagaggagtacaacccatgaccc

SEQ ID NO: 5184172 - DNA, 25 bp, Homo sapien
gctgatatcaattcctcccttgagg

SEQ ID NO: 5184173 - DNA, 25 bp, Homo sapien
caacgatattgtctagttcccagag

SEQ ID NO: 5184174 - DNA, 25 bp, Homo sapien
actggtgaacgacctggaaacacag

SEQ ID NO: 5184175 - DNA, 25 bp, Homo sapien
tctttgcccaacaattgaaaactgg

SEQ ID NO: 5184176 - DNA, 25 bp, Homo sapien
cacaggaggctttaagtatctttta

SEQ ID NO: 5184177 - DNA, 25 bp, Homo sapien
ggtagaaacggatgctgaacaggac

SEQ ID NO: 5184178 - DNA, 25 bp, Homo sapien
gcctggcaatccctgatggcctgca

SEQ ID NO: 5184179 - DNA, 25 bp, Homo sapien
gcagcatagtagtgaggttaaaacc

SEQ ID NO: 5184180 - DNA, 25 bp, Homo sapien
ggattatagacacactctggccttg

SEQ ID NO: 5184181 - DNA, 25 bp, Homo sapien
gaaacttccatgcatgtaatcacag

SEQ ID NO: 5184182 - DNA, 25 bp, Homo sapien
aatagtgttgtatccgggagtggtg

SEQ ID NO: 5184183 - DNA, 25 bp, Homo sapien
taatagtgttgtatccgggagtggt

SEQ ID NO: 5184184 - DNA, 25 bp, Homo sapien
cagtattacatgttaaacttaaact

SEQ ID NO: 5184185 - DNA, 25 bp, Homo sapien
ggttatggaatcacaagaactctca

SEQ ID NO: 5184186 - DNA, 25 bp, Homo sapien
taggagacagactgtggtacagcca

SEQ ID NO: 5184187 - DNA, 25 bp, Homo sapien
cattacatggctatcaaaatggcta

SEQ ID NO: 5184188 - DNA, 25 bp, Homo sapien
catggagatgccttcagtaggagac

SEQ ID NO: 5184189 - DNA, 25 bp, Homo sapien
tgaaaatcaacacgagctcatctct

SEQ ID NO: 5184190 - DNA, 25 bp, Homo sapien
caaatgtggtgaaaatcaacacgag

SEQ ID NO: 5184191 - DNA, 25 bp, Homo sapien
tgctgctactggaaatagctgggac

SEQ ID NO: 5184192 - DNA, 25 bp, Homo sapien
tcttagccagcaacacaactgtttg

SEQ ID NO: 5184193 - DNA, 25 bp, Homo sapien
ttgaagtttcatgggcaagtctccc

SEQ ID NO: 5184194 - DNA, 25 bp, Homo sapien
tggctcatgggatcagataacatct

SEQ ID NO: 5184195 - DNA, 25 bp, Homo sapien
tatgatgttcgagcttgacaagtca

SEQ ID NO: 5184196 - DNA, 25 bp, Homo sapien
gacttcaaatgttgcatggaactgg

SEQ ID NO: 5184197 - DNA, 25 bp, Homo sapien
tgttcatggtgagcaatggccttct

SEQ ID NO: 5184198 - DNA, 25 bp, Homo sapien
tgatgtcctccctccgtaactgttg

SEQ ID NO: 5184199 - DNA, 25 bp, Homo sapien
taaatataccatgccctgtggaccc

SEQ ID NO: 5184200 - DNA, 25 bp, Homo sapien
tgcacattcgcaatacttgggaaag

SEQ ID NO: 5184201 - DNA, 25 bp, Homo sapien
gagtgaaagggagtgctaccaataa

SEQ ID NO: 5184202 - DNA, 25 bp, Homo sapien
tccaaaccaagacattgtaagagtg

SEQ ID NO: 5184203 - DNA, 25 bp, Homo sapien
tattatccccgtcctaagccagtca

SEQ ID NO: 5184204 - DNA, 25 bp, Homo sapien
taaactgggacctatgatcaaccta

SEQ ID NO: 5184205 - DNA, 25 bp, Homo sapien
ggtaggataaccatgaagcttcctc

SEQ ID NO: 5184206 - DNA, 25 bp, Homo sapien
tccaagaaacgcaggtcctgagtat

SEQ ID NO: 5184207 - DNA, 25 bp, Homo sapien
caataagcagccaaaataaaaggaa

SEQ ID NO: 5184208 - DNA, 25 bp, Homo sapien
tgacgtttggtattgctgaagcatc

SEQ ID NO: 5184209 - DNA, 25 bp, Homo sapien
tgcagtgtcgtagatcataactcat

SEQ ID NO: 5184210 - DNA, 25 bp, Homo sapien
agtgtcgtagatcataactcattac

SEQ ID NO: 5184211 - DNA, 25 bp, Homo sapien
cagcctgttttagatttctatgaca

SEQ ID NO: 5184212 - DNA, 25 bp, Homo sapien
gcctgttttagatttctatgacact

SEQ ID NO: 5184213 - DNA, 25 bp, Homo sapien
agccagatattgattagggtagtca

SEQ ID NO: 5184214 - DNA, 25 bp, Homo sapien
attttagggacaccaacataaatgc

SEQ ID NO: 5184215 - DNA, 25 bp, Homo sapien
tgattagggtagtcaatttctgttg

SEQ ID NO: 5184216 - DNA, 25 bp, Homo sapien
ttagggtagtcaatttctgttgtta

SEQ ID NO: 5184217 - DNA, 25 bp, Homo sapien
tctttgttgttcttcttgtcagttg

SEQ ID NO: 5184218 - DNA, 25 bp, Homo sapien
tttgttgttcttcttgtcagttgca

SEQ ID NO: 5184219 - DNA, 25 bp, Homo sapien
ccttctttgttgttcttcttgtcag

SEQ ID NO: 5184220 - DNA, 25 bp, Homo sapien
ttgttgttcttcttgtcagttgcat

SEQ ID NO: 5184221 - DNA, 25 bp, Homo sapien
ccctgctttgacatagagcttctgg

SEQ ID NO: 5184222 - DNA, 25 bp, Homo sapien
ctgctttgacatagagcttctggtt

SEQ ID NO: 5184223 - DNA, 25 bp, Homo sapien
acatagagcttctggttgtttactg

SEQ ID NO: 5184224 - DNA, 25 bp, Homo sapien
tttgacatagagcttctggttgttt

SEQ ID NO: 5184225 - DNA, 25 bp, Homo sapien
gcacatagttatacagtcttcccag

SEQ ID NO: 5184226 - DNA, 25 bp, Homo sapien
tgtcctgggatgttctttcaatatg

SEQ ID NO: 5184227 - DNA, 25 bp, Homo sapien
gtagtttcatagcttcggtcttgga

SEQ ID NO: 5184228 - DNA, 25 bp, Homo sapien
gatctaatttcatccttctgcacat

SEQ ID NO: 5184229 - DNA, 25 bp, Homo sapien
gagaaacgtcatgtgcgaatcagag

SEQ ID NO: 5184230 - DNA, 25 bp, Homo sapien
tttatactttacagaatgctgctgc

SEQ ID NO: 5184231 - DNA, 25 bp, Homo sapien
tcctgggaatagacttagaaatgag

SEQ ID NO: 5184232 - DNA, 25 bp, Homo sapien
tatttacaacccaaaacattgagtc

SEQ ID NO: 5184233 - DNA, 25 bp, Homo sapien
ggtgacctcctaaatttgaatggct

SEQ ID NO: 5184234 - DNA, 25 bp, Homo sapien
atggtgacctcctaaatttgaatgg

SEQ ID NO: 5184235 - DNA, 25 bp, Homo sapien
tgacctcctaaatttgaatggctga

SEQ ID NO: 5184236 - DNA, 25 bp, Homo sapien
tggtgacctcctaaatttgaatggc

SEQ ID NO: 5184237 - DNA, 25 bp, Homo sapien
aagaccaatgaaaagttgatctgcc

SEQ ID NO: 5184238 - DNA, 25 bp, Homo sapien
gcccttaagttacagtcactgaaag

SEQ ID NO: 5184239 - DNA, 25 bp, Homo sapien
tggaaagtttcaagttcccgtagca

SEQ ID NO: 5184240 - DNA, 25 bp, Homo sapien
aagattcactaaagcctctagagga

SEQ ID NO: 5184241 - DNA, 25 bp, Homo sapien
cacggccacatgtgagtagtcctgc

SEQ ID NO: 5184242 - DNA, 25 bp, Homo sapien
tatacaatgccagtaagcagaggct

SEQ ID NO: 5184243 - DNA, 25 bp, Homo sapien
cagaggcttcaggaatactgaggta

SEQ ID NO: 5184244 - DNA, 25 bp, Homo sapien
gaggtagtcgtatttgtttctgaaa

SEQ ID NO: 5184245 - DNA, 25 bp, Homo sapien
tatgtcagtgatacctcaagaaaac

SEQ ID NO: 5184246 - DNA, 25 bp, Homo sapien
ctcatggaggaactttgctcagcta

SEQ ID NO: 5184247 - DNA, 25 bp, Homo sapien
gactgacccacccactgtcaaggaa

SEQ ID NO: 5184248 - DNA, 25 bp, Homo sapien
ttcagatgctctggcgtaaaagaag

SEQ ID NO: 5184249 - DNA, 25 bp, Homo sapien
gatatttgaacagaattgctgtcca

SEQ ID NO: 5184250 - DNA, 25 bp, Homo sapien
cctgatttggccaaggatatttgaa

SEQ ID NO: 5184251 - DNA, 25 bp, Homo sapien
gcaacactggggtcatgttcctgat

SEQ ID NO: 5184252 - DNA, 25 bp, Homo sapien
acagaattgctgtccatcggttcat

SEQ ID NO: 5184253 - DNA, 25 bp, Homo sapien
ggctacagttaatgaggagggctcc

SEQ ID NO: 5184254 - DNA, 25 bp, Homo sapien
ggagggctcccattgataaggaaat

SEQ ID NO: 5184255 - DNA, 25 bp, Homo sapien
tcctggtgctctggactataccctc

SEQ ID NO: 5184256 - DNA, 25 bp, Homo sapien
cacagagtatattaggtaggagagc

SEQ ID NO: 5184257 - DNA, 25 bp, Homo sapien
tcacggcccacgcattcgtcataat

SEQ ID NO: 5184258 - DNA, 25 bp, Homo sapien
aatgttatcgtcacggcccacgcat

SEQ ID NO: 5184259 - DNA, 25 bp, Homo sapien
ggcccacgcattcgtcataatattt

SEQ ID NO: 5184260 - DNA, 25 bp, Homo sapien
ctataatgttatcgtcacggcccac

SEQ ID NO: 5184261 - DNA, 25 bp, Homo sapien
ttagatttacagtctaatgccttac

SEQ ID NO: 5184262 - DNA, 25 bp, Homo sapien
aagaggtttagcctctgtctttaga

SEQ ID NO: 5184263 - DNA, 25 bp, Homo sapien
ttacagtctaatgccttactcagcc

SEQ ID NO: 5184264 - DNA, 25 bp, Homo sapien
aaagaggtttagcctctgtctttag

SEQ ID NO: 5184265 - DNA, 25 bp, Homo sapien
gcccccgcaggattgaagttgctcc

SEQ ID NO: 5184266 - DNA, 25 bp, Homo sapien
gcaattcaacatgataatcacctca

SEQ ID NO: 5184267 - DNA, 25 bp, Homo sapien
aagcccccgcaggattgaagttgct

SEQ ID NO: 5184268 - DNA, 25 bp, Homo sapien
ttcaacatgataatcacctcagggc

SEQ ID NO: 5184269 - DNA, 25 bp, Homo sapien
cagctaaataccctaatcaagtggc

SEQ ID NO: 5184270 - DNA, 25 bp, Homo sapien
taacagctaaataccctaatcaagt

SEQ ID NO: 5184271 - DNA, 25 bp, Homo sapien
ataccctaatcaagtggcttcaatc

SEQ ID NO: 5184272 - DNA, 25 bp, Homo sapien
gctaaataccctaatcaagtggctt

SEQ ID NO: 5184273 - DNA, 25 bp, Homo sapien
aaaaccctactctgcatcaactgaa

SEQ ID NO: 5184274 - DNA, 25 bp, Homo sapien
tcaactgaacgcaaatcagccactt

SEQ ID NO: 5184275 - DNA, 25 bp, Homo sapien
taaggactgcaaaaccctactctgc

SEQ ID NO: 5184276 - DNA, 25 bp, Homo sapien
actgcaaaaccctactctgcatcaa

SEQ ID NO: 5184277 - DNA, 25 bp, Homo sapien
aagatacctccttacacccacatag

SEQ ID NO: 5184278 - DNA, 25 bp, Homo sapien
catgtgacttctgtacataacgaat

SEQ ID NO: 5184279 - DNA, 25 bp, Homo sapien
gacttctgtacataacgaatatgag

SEQ ID NO: 5184280 - DNA, 25 bp, Homo sapien
gatacctccttacacccacatagat

SEQ ID NO: 5184281 - DNA, 25 bp, Homo sapien
actaatgttgggcttggtttcattg

SEQ ID NO: 5184282 - DNA, 25 bp, Homo sapien
aatgttgggcttggtttcattgatc

SEQ ID NO: 5184283 - DNA, 25 bp, Homo sapien
tactaatgttgggcttggtttcatt

SEQ ID NO: 5184284 - DNA, 25 bp, Homo sapien
ctaatgttgggcttggtttcattga

SEQ ID NO: 5184285 - DNA, 25 bp, Homo sapien
tatctcagcaggcatataggcagga

SEQ ID NO: 5184286 - DNA, 25 bp, Homo sapien
gccattagccctacttcggtgaaaa

SEQ ID NO: 5184287 - DNA, 25 bp, Homo sapien
gactctcaagatattgcctattcca

SEQ ID NO: 5184288 - DNA, 25 bp, Homo sapien
cctgccactatagagaatgtctcaa

SEQ ID NO: 5184289 - DNA, 25 bp, Homo sapien
ttagattcacatctaatgttttggt

SEQ ID NO: 5184290 - DNA, 25 bp, Homo sapien
gcttctattattagattcacatcta

SEQ ID NO: 5184291 - DNA, 25 bp, Homo sapien
tattattagattcacatctaatgtt

SEQ ID NO: 5184292 - DNA, 25 bp, Homo sapien
agttgcatgcttctattattagatt

SEQ ID NO: 5184293 - DNA, 25 bp, Homo sapien
atgttgttaggcattggtgcatgac

SEQ ID NO: 5184294 - DNA, 25 bp, Homo sapien
gttgttaggcattggtgcatgactt

SEQ ID NO: 5184295 - DNA, 25 bp, Homo sapien
ttgttaggcattggtgcatgactta

SEQ ID NO: 5184296 - DNA, 25 bp, Homo sapien
aggatgactctaatccttcaaaagt

SEQ ID NO: 5184297 - DNA, 25 bp, Homo sapien
cctaagaccaaaggatgactctaat

SEQ ID NO: 5184298 - DNA, 25 bp, Homo sapien
ctaagaccaaaggatgactctaatc

SEQ ID NO: 5184299 - DNA, 25 bp, Homo sapien
caaaggatgactctaatccttcaaa

SEQ ID NO: 5184300 - DNA, 25 bp, Homo sapien
aatctactcagtgtcgttccaatta

SEQ ID NO: 5184301 - DNA, 25 bp, Homo sapien
actcagtgtcgttccaattatagta

SEQ ID NO: 5184302 - DNA, 25 bp, Homo sapien
tctactcagtgtcgttccaattata

SEQ ID NO: 5184303 - DNA, 25 bp, Homo sapien
tactcagtgtcgttccaattatagt

SEQ ID NO: 5184304 - DNA, 25 bp, Homo sapien
gcaggacttgccattgtgtcacaaa

SEQ ID NO: 5184305 - DNA, 25 bp, Homo sapien
tacccttgtcattgagcaggacttg

SEQ ID NO: 5184306 - DNA, 25 bp, Homo sapien
aattccttagtaaagtcagaaggca

SEQ ID NO: 5184307 - DNA, 25 bp, Homo sapien
cagaacaaccggaaagaaacctgag

SEQ ID NO: 5184308 - DNA, 25 bp, Homo sapien
taggactcaaagttgataactgagc

SEQ ID NO: 5184309 - DNA, 25 bp, Homo sapien
aagttgataactgagctgccactgt

SEQ ID NO: 5184310 - DNA, 25 bp, Homo sapien
gactcaaagttgataactgagctgc

SEQ ID NO: 5184311 - DNA, 25 bp, Homo sapien
tcaaagttgataactgagctgccac

SEQ ID NO: 5184312 - DNA, 25 bp, Homo sapien
caatcattgctgacactttcaccat

SEQ ID NO: 5184313 - DNA, 25 bp, Homo sapien
aattcaatcattgctgacactttca

SEQ ID NO: 5184314 - DNA, 25 bp, Homo sapien
ttcaatcattgctgacactttcacc

SEQ ID NO: 5184315 - DNA, 25 bp, Homo sapien
caattcaatcattgctgacactttc

SEQ ID NO: 5184316 - DNA, 25 bp, Homo sapien
tacttccagtataggcagctaatct

SEQ ID NO: 5184317 - DNA, 25 bp, Homo sapien
tgtactgccccaaatctaactgcca

SEQ ID NO: 5184318 - DNA, 25 bp, Homo sapien
caccagtgctctaatcaaaatgacc

SEQ ID NO: 5184319 - DNA, 25 bp, Homo sapien
taactgccaataagaatgcctctgt

SEQ ID NO: 5184320 - DNA, 25 bp, Homo sapien
ctattctttgatttggtagcgtact

SEQ ID NO: 5184321 - DNA, 25 bp, Homo sapien
tctttgatttggtagcgtacttcat

SEQ ID NO: 5184322 - DNA, 25 bp, Homo sapien
attctttgatttggtagcgtacttc

SEQ ID NO: 5184323 - DNA, 25 bp, Homo sapien
ttctttgatttggtagcgtacttca

SEQ ID NO: 5184324 - DNA, 25 bp, Homo sapien
tacacatcattatagcctattttta

SEQ ID NO: 5184325 - DNA, 25 bp, Homo sapien
ttacacatcattatagcctattttt

SEQ ID NO: 5184326 - DNA, 25 bp, Homo sapien
caaatcgggtaagaacataagggag

SEQ ID NO: 5184327 - DNA, 25 bp, Homo sapien
gagggaatggtctgtaaaatcggca

SEQ ID NO: 5184328 - DNA, 25 bp, Homo sapien
tcagaggcaaatcgggtaagaacat

SEQ ID NO: 5184329 - DNA, 25 bp, Homo sapien
ctgtaaaatcggcatcaagccacat

SEQ ID NO: 5184330 - DNA, 25 bp, Homo sapien
atcaggcccaaaaattagggaagtg

SEQ ID NO: 5184331 - DNA, 25 bp, Homo sapien
gagatatgtactggatatattcacc

SEQ ID NO: 5184332 - DNA, 25 bp, Homo sapien
tatattcacccacaagatcaggccc

SEQ ID NO: 5184333 - DNA, 25 bp, Homo sapien
tttcctgcatcatgagatatgtact

SEQ ID NO: 5184334 - DNA, 25 bp, Homo sapien
gaccaaacaaatagtattttgcttg

SEQ ID NO: 5184335 - DNA, 25 bp, Homo sapien
tacatctaataccttcaagtggtaa

SEQ ID NO: 5184336 - DNA, 25 bp, Homo sapien
catctaataccttcaagtggtaatt

SEQ ID NO: 5184337 - DNA, 25 bp, Homo sapien
taataccttcaagtggtaatttgaa

SEQ ID NO: 5184338 - DNA, 25 bp, Homo sapien
gccctgtaagccttcttggtcctac

SEQ ID NO: 5184339 - DNA, 25 bp, Homo sapien
aatgtttctaatggtgacttatcac

SEQ ID NO: 5184340 - DNA, 25 bp, Homo sapien
ttgagccttatgcttcacttgccct

SEQ ID NO: 5184341 - DNA, 25 bp, Homo sapien
tatacgagtgtgtgttgcagcctct

SEQ ID NO: 5184342 - DNA, 25 bp, Homo sapien
gaacctgagtcgcagtgactgagaa

SEQ ID NO: 5184343 - DNA, 25 bp, Homo sapien
caaatgctgtagtgcaaaaggaacc

SEQ ID NO: 5184344 - DNA, 25 bp, Homo sapien
aatttctttcatgtgcattggcagc

SEQ ID NO: 5184345 - DNA, 25 bp, Homo sapien
taggctgctcacaacacttaattaa

SEQ ID NO: 5184346 - DNA, 25 bp, Homo sapien
ccttcagagtgtgaaattgccccat

SEQ ID NO: 5184347 - DNA, 25 bp, Homo sapien
aatatgtgtgcctaattctaatgaa

SEQ ID NO: 5184348 - DNA, 25 bp, Homo sapien
agttatctctcctccattaatctgg

SEQ ID NO: 5184349 - DNA, 25 bp, Homo sapien
gattaatggaggagagataaatatg

SEQ ID NO: 5184350 - DNA, 25 bp, Homo sapien
ggacttgcttgttgctgtccatatg

SEQ ID NO: 5184351 - DNA, 25 bp, Homo sapien
attacatgcttgctacaatgagctt

SEQ ID NO: 5184352 - DNA, 25 bp, Homo sapien
cttgctacaatgagctttgggcctt

SEQ ID NO: 5184353 - DNA, 25 bp, Homo sapien
taacccaacacagttaacgtggcat

SEQ ID NO: 5184354 - DNA, 25 bp, Homo sapien
cagttaacgtggcatacattgtaaa

SEQ ID NO: 5184355 - DNA, 25 bp, Homo sapien
tcgagaagagcttgagagcccagct

SEQ ID NO: 5184356 - DNA, 25 bp, Homo sapien
tgtcgagaagagcttgagagcccag

SEQ ID NO: 5184357 - DNA, 25 bp, Homo sapien
gttgtcgagaagagcttgagagccc

SEQ ID NO: 5184358 - DNA, 25 bp, Homo sapien
gaagagcttgagagcccagctcagt

SEQ ID NO: 5184359 - DNA, 25 bp, Homo sapien
gtagtacaattgtcatcgcttctta

SEQ ID NO: 5184360 - DNA, 25 bp, Homo sapien
tagtacaattgtcatcgcttcttac

SEQ ID NO: 5184361 - DNA, 25 bp, Homo sapien
aagtagtacaattgtcatcgcttct

SEQ ID NO: 5184362 - DNA, 25 bp, Homo sapien
agtagtacaattgtcatcgcttctt

SEQ ID NO: 5184363 - DNA, 25 bp, Homo sapien
ttataacagagtggaggcaccatgc

SEQ ID NO: 5184364 - DNA, 25 bp, Homo sapien
gaaattggtttatatagatgactgg

SEQ ID NO: 5184365 - DNA, 25 bp, Homo sapien
cagctttgagtggatatcattgtgt

SEQ ID NO: 5184366 - DNA, 25 bp, Homo sapien
ggcaccatgcaattttgctcctgaa

SEQ ID NO: 5184367 - DNA, 25 bp, Homo sapien
ttgatggctctatggtcacattgaa

SEQ ID NO: 5184368 - DNA, 25 bp, Homo sapien
tattatgattgatggctctatggtc

SEQ ID NO: 5184369 - DNA, 25 bp, Homo sapien
ttctcatcaatgtctattatgattg

SEQ ID NO: 5184370 - DNA, 25 bp, Homo sapien
gttctccttgcagataggaagtgac

SEQ ID NO: 5184371 - DNA, 25 bp, Homo sapien
tggtaagggcttcacaaatggtggc

SEQ ID NO: 5184372 - DNA, 25 bp, Homo sapien
ctggtaagggcttcacaaatggtgg

SEQ ID NO: 5184373 - DNA, 25 bp, Homo sapien
tggtggccatcaacaccatcgtcat

SEQ ID NO: 5184374 - DNA, 25 bp, Homo sapien
ggtaagggcttcacaaatggtggcc

SEQ ID NO: 5184375 - DNA, 25 bp, Homo sapien
tgctgctctagctgcgactgttggt

SEQ ID NO: 5184376 - DNA, 25 bp, Homo sapien
tactgttgctgtttccgaagcttgg

SEQ ID NO: 5184377 - DNA, 25 bp, Homo sapien
gaattcttgaactaactgcgcagga

SEQ ID NO: 5184378 - DNA, 25 bp, Homo sapien
ttttctatagaatcccagcccctag

SEQ ID NO: 5184379 - DNA, 25 bp, Homo sapien
ccctaatttagatgaggtgtggaca

SEQ ID NO: 5184380 - DNA, 25 bp, Homo sapien
tgaagccaatttgcgtaacacactt

SEQ ID NO: 5184381 - DNA, 25 bp, Homo sapien
tacatagcatgcatttcaagactca

SEQ ID NO: 5184382 - DNA, 25 bp, Homo sapien
gataccaagatttgtcagcaattcc

SEQ ID NO: 5184383 - DNA, 25 bp, Homo sapien
tctcaccataattgcaagttagttg

SEQ ID NO: 5184384 - DNA, 25 bp, Homo sapien
catgcaaatgcccaggcatgtacac

SEQ ID NO: 5184385 - DNA, 25 bp, Homo sapien
tagttgaatgttctcaaaagtccat

SEQ ID NO: 5184386 - DNA, 25 bp, Homo sapien
cagaagctgagcactttctttcaca

SEQ ID NO: 5184387 - DNA, 25 bp, Homo sapien
tactcatagtgtattagcctaacat

SEQ ID NO: 5184388 - DNA, 25 bp, Homo sapien
agtaagcacaaatgggctcagatac

SEQ ID NO: 5184389 - DNA, 25 bp, Homo sapien
cattagctgagtaggaataagcaga

SEQ ID NO: 5184390 - DNA, 25 bp, Homo sapien
tatgcgtatacatacactgatgtgt

SEQ ID NO: 5184391 - DNA, 25 bp, Homo sapien
cacagtaggataagggagcgaaaac

SEQ ID NO: 5184392 - DNA, 25 bp, Homo sapien
tgtgagacttcctcagcaggagcaa

SEQ ID NO: 5184393 - DNA, 25 bp, Homo sapien
gaaaacctgtgtgagacttcctcag

SEQ ID NO: 5184394 - DNA, 25 bp, Homo sapien
taggataagggagcgaaaacctgtg

SEQ ID NO: 5184395 - DNA, 25 bp, Homo sapien
cttgtgtgaggtggacctccaaaat

SEQ ID NO: 5184396 - DNA, 25 bp, Homo sapien
tggacctccaaaatttggtcagcat

SEQ ID NO: 5184397 - DNA, 25 bp, Homo sapien
tgtgaggtggacctccaaaatttgg

SEQ ID NO: 5184398 - DNA, 25 bp, Homo sapien
tgaggtggacctccaaaatttggtc

SEQ ID NO: 5184399 - DNA, 25 bp, Homo sapien
tcataatatttaggaggacggctca

SEQ ID NO: 5184400 - DNA, 25 bp, Homo sapien
tctttattgggtcttcctggactct

SEQ ID NO: 5184401 - DNA, 25 bp, Homo sapien
tgttgataggttaaagtacgacgtg

SEQ ID NO: 5184402 - DNA, 25 bp, Homo sapien
ggtctactccaagttgcaacgtgca

SEQ ID NO: 5184403 - DNA, 25 bp, Homo sapien
actcttccatatcgaaaattctctg

SEQ ID NO: 5184404 - DNA, 25 bp, Homo sapien
tgaaaactcttccatatcgaaaatt

SEQ ID NO: 5184405 - DNA, 25 bp, Homo sapien
catatcgaaaattctctgagtcttt

SEQ ID NO: 5184406 - DNA, 25 bp, Homo sapien
cctgaatatggtctttgaaaactct

SEQ ID NO: 5184407 - DNA, 25 bp, Homo sapien
tctgcccagatatgtagtatgaaca

SEQ ID NO: 5184408 - DNA, 25 bp, Homo sapien
gactgcttttcaactgattatgaca

SEQ ID NO: 5184409 - DNA, 25 bp, Homo sapien
gatcttgtatagaacctcagcatgt

SEQ ID NO: 5184410 - DNA, 25 bp, Homo sapien
caaaacaaccttagcattcagatga

SEQ ID NO: 5184411 - DNA, 25 bp, Homo sapien
cgcaccaaaggtgctaaactccaag

SEQ ID NO: 5184412 - DNA, 25 bp, Homo sapien
caccaaaggtgctaaactccaaggg

SEQ ID NO: 5184413 - DNA, 25 bp, Homo sapien
tatacatttgtttcgcaccaaaggt

SEQ ID NO: 5184414 - DNA, 25 bp, Homo sapien
ttatacatttgtttcgcaccaaagg

SEQ ID NO: 5184415 - DNA, 25 bp, Homo sapien
gaacgtaataggagctgggtagaat

SEQ ID NO: 5184416 - DNA, 25 bp, Homo sapien
tgaagttaaagaggattagtccttg

SEQ ID NO: 5184417 - DNA, 25 bp, Homo sapien
atggactcaggaggaacgtaatagg

SEQ ID NO: 5184418 - DNA, 25 bp, Homo sapien
aatgaagttaaagaggattagtcct

SEQ ID NO: 5184419 - DNA, 25 bp, Homo sapien
aaaaattaaccattgctagagtgag

SEQ ID NO: 5184420 - DNA, 25 bp, Homo sapien
tccatgctagtatagtctatactga

SEQ ID NO: 5184421 - DNA, 25 bp, Homo sapien
cttccatgctagtatagtctatact

SEQ ID NO: 5184422 - DNA, 25 bp, Homo sapien
attaaccattgctagagtgagtgtc

SEQ ID NO: 5184423 - DNA, 25 bp, Homo sapien
gcagttcaattgcagagcacgatga

SEQ ID NO: 5184424 - DNA, 25 bp, Homo sapien
ttttattgtggcacggagtcctgtg

SEQ ID NO: 5184425 - DNA, 25 bp, Homo sapien
aaattggatcggcagagacagggac

SEQ ID NO: 5184426 - DNA, 25 bp, Homo sapien
gaaagcagacctatttgtccagggt

SEQ ID NO: 5184427 - DNA, 25 bp, Homo sapien
tacttgcacaggcttttgcttaggt

SEQ ID NO: 5184428 - DNA, 25 bp, Homo sapien
acttgcaaactgtggcttcgtatta

SEQ ID NO: 5184429 - DNA, 25 bp, Homo sapien
tgctttgcaagagacgtgaccagaa

SEQ ID NO: 5184430 - DNA, 25 bp, Homo sapien
gaggctgtagccatcagaagtgtgc

SEQ ID NO: 5184431 - DNA, 25 bp, Homo sapien
acagtactttctgacattcgacccc

SEQ ID NO: 5184432 - DNA, 25 bp, Homo sapien
catgagtgtgtctccgtaatgcaaa

SEQ ID NO: 5184433 - DNA, 25 bp, Homo sapien
tactttctgacattcgaccccctga

SEQ ID NO: 5184434 - DNA, 25 bp, Homo sapien
gaccccctgacctcacacataataa

SEQ ID NO: 5184435 - DNA, 25 bp, Homo sapien
cagaatcgcttttggatggccgaca

SEQ ID NO: 5184436 - DNA, 25 bp, Homo sapien
ctgtctccctaagctgatgtcagaa

SEQ ID NO: 5184437 - DNA, 25 bp, Homo sapien
ttcttgagatccagaccatacacgg

SEQ ID NO: 5184438 - DNA, 25 bp, Homo sapien
tgtcaaacaggcagcttgcacaggc

SEQ ID NO: 5184439 - DNA, 25 bp, Homo sapien
ccactaaacacaaagagctgtcttt

SEQ ID NO: 5184440 - DNA, 25 bp, Homo sapien
cccactaaacacaaagagctgtctt

SEQ ID NO: 5184441 - DNA, 25 bp, Homo sapien
taaacacaaagagctgtctttccat

SEQ ID NO: 5184442 - DNA, 25 bp, Homo sapien
actaaacacaaagagctgtctttcc

SEQ ID NO: 5184443 - DNA, 25 bp, Homo sapien
gaagttagggttattggcagctgcc

SEQ ID NO: 5184444 - DNA, 25 bp, Homo sapien
acagccaaccagcatgcactaattg

SEQ ID NO: 5184445 - DNA, 25 bp, Homo sapien
gcactaattgcagtggccttttcat

SEQ ID NO: 5184446 - DNA, 25 bp, Homo sapien
ggcagctgccattgtaccatccatg

SEQ ID NO: 5184447 - DNA, 25 bp, Homo sapien
caggcaaacagggaccacttccaag

SEQ ID NO: 5184448 - DNA, 25 bp, Homo sapien
cagggaccacttccaagataaagaa

SEQ ID NO: 5184449 - DNA, 25 bp, Homo sapien
tttgtattttagacactcttgcaag

SEQ ID NO: 5184450 - DNA, 25 bp, Homo sapien
tagacactcttgcaagcattatttt

SEQ ID NO: 5184451 - DNA, 25 bp, Homo sapien
tggtggtatatccaattactgaaaa

SEQ ID NO: 5184452 - DNA, 25 bp, Homo sapien
ggtggtatatccaattactgaaaac

SEQ ID NO: 5184453 - DNA, 25 bp, Homo sapien
ctttgaagggtgtttcatcttttgt

SEQ ID NO: 5184454 - DNA, 25 bp, Homo sapien
cttcctttgaagggtgtttcatctt

SEQ ID NO: 5184455 - DNA, 25 bp, Homo sapien
gatgatacgctgctaaaagccacat

SEQ ID NO: 5184456 - DNA, 25 bp, Homo sapien
ccgtatggactagctctcagagcca

SEQ ID NO: 5184457 - DNA, 25 bp, Homo sapien
aatagttcttgatatgatgatacgc

SEQ ID NO: 5184458 - DNA, 25 bp, Homo sapien
tctttgccactgatgccacatacaa

SEQ ID NO: 5184459 - DNA, 25 bp, Homo sapien
aggggaccaatatgtgcttaaatct

SEQ ID NO: 5184460 - DNA, 25 bp, Homo sapien
acatggaagttgtaagtctttctgc

SEQ ID NO: 5184461 - DNA, 25 bp, Homo sapien
caaatacatggaagttgtaagtctt

SEQ ID NO: 5184462 - DNA, 25 bp, Homo sapien
ggaaggggaccaatatgtgcttaaa

SEQ ID NO: 5184463 - DNA, 25 bp, Homo sapien
tcttgatggtgcttccatcagacct

SEQ ID NO: 5184464 - DNA, 25 bp, Homo sapien
tgatggtgcttccatcagacctcat

SEQ ID NO: 5184465 - DNA, 25 bp, Homo sapien
gattcttgatggtgcttccatcaga

SEQ ID NO: 5184466 - DNA, 25 bp, Homo sapien
cttgattcttgatggtgcttccatc

SEQ ID NO: 5184467 - DNA, 25 bp, Homo sapien
tcgccaatagtggtgaaggccttcc

SEQ ID NO: 5184468 - DNA, 25 bp, Homo sapien
tccttaaatcttttcgccaatagtg

SEQ ID NO: 5184469 - DNA, 25 bp, Homo sapien
ttttcgccaatagtggtgaaggcct

SEQ ID NO: 5184470 - DNA, 25 bp, Homo sapien
aatcttttcgccaatagtggtgaag

SEQ ID NO: 5184471 - DNA, 25 bp, Homo sapien
gggaagactgccaattgaccatttt

SEQ ID NO: 5184472 - DNA, 25 bp, Homo sapien
tttgctagagggtgcacagcctgct

SEQ ID NO: 5184473 - DNA, 25 bp, Homo sapien
tgtaaggtaatacaagcttagctgt

SEQ ID NO: 5184474 - DNA, 25 bp, Homo sapien
cagcctgctggccagcttgcttttt

SEQ ID NO: 5184475 - DNA, 25 bp, Homo sapien
atcatcagtctgttgactatacctc

SEQ ID NO: 5184476 - DNA, 25 bp, Homo sapien
catcagtctgttgactatacctcat

SEQ ID NO: 5184477 - DNA, 25 bp, Homo sapien
tcatcagtctgttgactatacctca

SEQ ID NO: 5184478 - DNA, 25 bp, Homo sapien
gaaattccgaactttctctgttcca

SEQ ID NO: 5184479 - DNA, 25 bp, Homo sapien
attgaaattccgaactttctctgtt

SEQ ID NO: 5184480 - DNA, 25 bp, Homo sapien
tctgttccaaaactgttgatgtcaa

SEQ ID NO: 5184481 - DNA, 25 bp, Homo sapien
gttccaaaactgttgatgtcaaatg

SEQ ID NO: 5184482 - DNA, 25 bp, Homo sapien
gctcaggtttacagtcactttctgt

SEQ ID NO: 5184483 - DNA, 25 bp, Homo sapien
acacattatgagcttctgaaaacca

SEQ ID NO: 5184484 - DNA, 25 bp, Homo sapien
aagagctcaggtttacagtcacttt

SEQ ID NO: 5184485 - DNA, 25 bp, Homo sapien
gagcttctgaaaaccattcaaagag

SEQ ID NO: 5184486 - DNA, 25 bp, Homo sapien
tatcaggtatgcgagtgccctctct

SEQ ID NO: 5184487 - DNA, 25 bp, Homo sapien
tatttatcaggtatgcgagtgccct

SEQ ID NO: 5184488 - DNA, 25 bp, Homo sapien
tctctctcctgggcggtgatgctta

SEQ ID NO: 5184489 - DNA, 25 bp, Homo sapien
caggtatgcgagtgccctctctctc

SEQ ID NO: 5184490 - DNA, 25 bp, Homo sapien
cttgtcacccaaagctgtaatgcct

SEQ ID NO: 5184491 - DNA, 25 bp, Homo sapien
tatcaccatatgattggtgtgagaa

SEQ ID NO: 5184492 - DNA, 25 bp, Homo sapien
gtaaaaccttctaatatcaccatat

SEQ ID NO: 5184493 - DNA, 25 bp, Homo sapien
ccttctaatatcaccatatgattgg

SEQ ID NO: 5184494 - DNA, 25 bp, Homo sapien
gatcttggggtggaaatcagtgaaa

SEQ ID NO: 5184495 - DNA, 25 bp, Homo sapien
cattcagatgccttgtttgccactg

SEQ ID NO: 5184496 - DNA, 25 bp, Homo sapien
tgtaaaagctgttggcacagagagc

SEQ ID NO: 5184497 - DNA, 25 bp, Homo sapien
tcccaagtctctagagatagcacca

SEQ ID NO: 5184498 - DNA, 25 bp, Homo sapien
caccacagtggttcaatttaatatc

SEQ ID NO: 5184499 - DNA, 25 bp, Homo sapien
ggtgtctcttcctgatacgtgctaa

SEQ ID NO: 5184500 - DNA, 25 bp, Homo sapien
tagggccgagtggtctgatttcaaa

SEQ ID NO: 5184501 - DNA, 25 bp, Homo sapien
ttgtcatctcaaatagggccgagtg

SEQ ID NO: 5184502 - DNA, 25 bp, Homo sapien
aggaaaactgcctgtcatttatcag

SEQ ID NO: 5184503 - DNA, 25 bp, Homo sapien
acttgatatcagattccgtggaaga

SEQ ID NO: 5184504 - DNA, 25 bp, Homo sapien
ttcaggaggtcaaacatccacttga

SEQ ID NO: 5184505 - DNA, 25 bp, Homo sapien
gttcaggaggtcaaacatccacttg

SEQ ID NO: 5184506 - DNA, 25 bp, Homo sapien
acatccacttgatatcagattccgt

SEQ ID NO: 5184507 - DNA, 25 bp, Homo sapien
ttctgagaatttggaggttaaggga

SEQ ID NO: 5184508 - DNA, 25 bp, Homo sapien
gggagtctctaggaacattcggtca

SEQ ID NO: 5184509 - DNA, 25 bp, Homo sapien
cacagtgatagataacagcctcaac

SEQ ID NO: 5184510 - DNA, 25 bp, Homo sapien
cattcggtcacaggtagctagggca

SEQ ID NO: 5184511 - DNA, 25 bp, Homo sapien
gggctctgggtttctatgcctctgg

SEQ ID NO: 5184512 - DNA, 25 bp, Homo sapien
ggtggctctgcacgtggtcactcat

SEQ ID NO: 5184513 - DNA, 25 bp, Homo sapien
ctgggtttctatgcctctggaggtg

SEQ ID NO: 5184514 - DNA, 25 bp, Homo sapien
gaggtggctctgcacgtggtcactc

SEQ ID NO: 5184515 - DNA, 25 bp, Homo sapien
gggggaaccagccagcagtacagcc

SEQ ID NO: 5184516 - DNA, 25 bp, Homo sapien
ctgggggaaccagccagcagtacag

SEQ ID NO: 5184517 - DNA, 25 bp, Homo sapien
ggggaaccagccagcagtacagcca

SEQ ID NO: 5184518 - DNA, 25 bp, Homo sapien
gggaaccagccagcagtacagccat

SEQ ID NO: 5184519 - DNA, 25 bp, Homo sapien
gaatgaggacggagtttgtgtcaat

SEQ ID NO: 5184520 - DNA, 25 bp, Homo sapien
cccctgaatgaggacggagtttgtg

SEQ ID NO: 5184521 - DNA, 25 bp, Homo sapien
gatttccccctgaatgaggacggag

SEQ ID NO: 5184522 - DNA, 25 bp, Homo sapien
tggatttccccctgaatgaggacgg

SEQ ID NO: 5184523 - DNA, 25 bp, Homo sapien
cagctatagcgatgttgtgaattct

SEQ ID NO: 5184524 - DNA, 25 bp, Homo sapien
gtgaattcttaacagcatatatttg

SEQ ID NO: 5184525 - DNA, 25 bp, Homo sapien
gctcagtaaactatcagttttcagg

SEQ ID NO: 5184526 - DNA, 25 bp, Homo sapien
catcgtcaaatggtaaacttctgtt

SEQ ID NO: 5184527 - DNA, 25 bp, Homo sapien
cagcttggtctcatataccagcaac

SEQ ID NO: 5184528 - DNA, 25 bp, Homo sapien
agcttggtctcatataccagcaaca

SEQ ID NO: 5184529 - DNA, 25 bp, Homo sapien
gcttggtctcatataccagcaacat

SEQ ID NO: 5184530 - DNA, 25 bp, Homo sapien
cccaacaggtgggtcactaagatta

SEQ ID NO: 5184531 - DNA, 25 bp, Homo sapien
ggtgggtcactaagattagactgga

SEQ ID NO: 5184532 - DNA, 25 bp, Homo sapien
aacaggtgggtcactaagattagac

SEQ ID NO: 5184533 - DNA, 25 bp, Homo sapien
caggtgggtcactaagattagactg

SEQ ID NO: 5184534 - DNA, 25 bp, Homo sapien
ttctggtaaagttgccaattgtgag

SEQ ID NO: 5184535 - DNA, 25 bp, Homo sapien
tctggtaaagttgccaattgtgagg

SEQ ID NO: 5184536 - DNA, 25 bp, Homo sapien
ctggtaaagttgccaattgtgaggc

SEQ ID NO: 5184537 - DNA, 25 bp, Homo sapien
ttttctggtaaagttgccaattgtg

SEQ ID NO: 5184538 - DNA, 25 bp, Homo sapien
tacaagtttctaaggttgagcagcc

SEQ ID NO: 5184539 - DNA, 25 bp, Homo sapien
ccagagctgtaggatagcttttaga

SEQ ID NO: 5184540 - DNA, 25 bp, Homo sapien
gttctctctgtgaggcccatggaat

SEQ ID NO: 5184541 - DNA, 25 bp, Homo sapien
cttggtagttcctcgaccgtggaca

SEQ ID NO: 5184542 - DNA, 25 bp, Homo sapien
ttaggcagcccttcacattcagtgg

SEQ ID NO: 5184543 - DNA, 25 bp, Homo sapien
cttataaagacggtgttgctctgac

SEQ ID NO: 5184544 - DNA, 25 bp, Homo sapien
tgtgattaggaacccggcagtcaga

SEQ ID NO: 5184545 - DNA, 25 bp, Homo sapien
aacacccgagtcatttagctttgtg

SEQ ID NO: 5184546 - DNA, 25 bp, Homo sapien
caattttggtgacattcctggtcac

SEQ ID NO: 5184547 - DNA, 25 bp, Homo sapien
tatggagggtaatacaccgtctgac

SEQ ID NO: 5184548 - DNA, 25 bp, Homo sapien
caatcaggcgacagagaatgaaggc

SEQ ID NO: 5184549 - DNA, 25 bp, Homo sapien
taatgatatccctctcaagagtcac

SEQ ID NO: 5184550 - DNA, 25 bp, Homo sapien
gaggattagaggactctgagcaaca

SEQ ID NO: 5184551 - DNA, 25 bp, Homo sapien
aggaggattagaggactctgagcaa

SEQ ID NO: 5184552 - DNA, 25 bp, Homo sapien
taagggtggtagaggtaggctccag

SEQ ID NO: 5184553 - DNA, 25 bp, Homo sapien
ccaggcttagttcttgtgttctctg

SEQ ID NO: 5184554 - DNA, 25 bp, Homo sapien
tgcctttgaactcttgtcttacggt

SEQ ID NO: 5184555 - DNA, 25 bp, Homo sapien
ctgcctttgaactcttgtcttacgg

SEQ ID NO: 5184556 - DNA, 25 bp, Homo sapien
tcaaattgaagtgacaacagagcct

SEQ ID NO: 5184557 - DNA, 25 bp, Homo sapien
ctagcgagagctagcttttgaaaat

SEQ ID NO: 5184558 - DNA, 25 bp, Homo sapien
caaattgaagtgacaacagagcctc

SEQ ID NO: 5184559 - DNA, 25 bp, Homo sapien
aacagagcctctagcgagagctagc

SEQ ID NO: 5184560 - DNA, 25 bp, Homo sapien
gcctccaattcccagacagccattc

SEQ ID NO: 5184561 - DNA, 25 bp, Homo sapien
cctccaattcccagacagccattct

SEQ ID NO: 5184562 - DNA, 25 bp, Homo sapien
ctccaattcccagacagccattctg

SEQ ID NO: 5184563 - DNA, 25 bp, Homo sapien
taggctgcacttgggatttctgatc

SEQ ID NO: 5184564 - DNA, 25 bp, Homo sapien
tttactacttgaggcctggcaggac

SEQ ID NO: 5184565 - DNA, 25 bp, Homo sapien
tgagatacacatccaagatcaggtg

SEQ ID NO: 5184566 - DNA, 25 bp, Homo sapien
tcttgctacagaccatcagtgccga

SEQ ID NO: 5184567 - DNA, 25 bp, Homo sapien
gagacaataaatgatgagtaagctt

SEQ ID NO: 5184568 - DNA, 25 bp, Homo sapien
gcttgtaagccaaactcaatgtatt

SEQ ID NO: 5184569 - DNA, 25 bp, Homo sapien
tttagtatccaaagtgaatcttttc

SEQ ID NO: 5184570 - DNA, 25 bp, Homo sapien
ccaaagtgaatcttttcttagtagc

SEQ ID NO: 5184571 - DNA, 25 bp, Homo sapien
tatggcatgtcgttatagcactatg

SEQ ID NO: 5184572 - DNA, 25 bp, Homo sapien
tcacttttggttaggcttgcaagag

SEQ ID NO: 5184573 - DNA, 25 bp, Homo sapien
ttaatccaagatcatgttagctgct

SEQ ID NO: 5184574 - DNA, 25 bp, Homo sapien
aatgcatttttgtcctggtgaagct

SEQ ID NO: 5184575 - DNA, 25 bp, Homo sapien
tgtgtgtctctcttccttactataa

SEQ ID NO: 5184576 - DNA, 25 bp, Homo sapien
tctaatattaatggcatagcttcat

SEQ ID NO: 5184577 - DNA, 25 bp, Homo sapien
ggattatgtcgccttaccaccagta

SEQ ID NO: 5184578 - DNA, 25 bp, Homo sapien
ccaagttacaatgggtgaaatttca

SEQ ID NO: 5184579 - DNA, 25 bp, Homo sapien
gggaacgatgggcaactgctggaag

SEQ ID NO: 5184580 - DNA, 25 bp, Homo sapien
tgggcaactgctggaagaaataact

SEQ ID NO: 5184581 - DNA, 25 bp, Homo sapien
gaacgatgggcaactgctggaagaa

SEQ ID NO: 5184582 - DNA, 25 bp, Homo sapien
cgatgggcaactgctggaagaaata

SEQ ID NO: 5184583 - DNA, 25 bp, Homo sapien
ttgctgagttaaacagaagccaggc

SEQ ID NO: 5184584 - DNA, 25 bp, Homo sapien
agcaagctttctgggataaatcaca

SEQ ID NO: 5184585 - DNA, 25 bp, Homo sapien
tgcagaaggaagatgttaattgctg

SEQ ID NO: 5184586 - DNA, 25 bp, Homo sapien
aagaggggtcctgaacagccaggag

SEQ ID NO: 5184587 - DNA, 25 bp, Homo sapien
gcagccaaaaggtcctctggtccta

SEQ ID NO: 5184588 - DNA, 25 bp, Homo sapien
catagtctcttgaaacaagcactgt

SEQ ID NO: 5184589 - DNA, 25 bp, Homo sapien
tccaagcagtttagtctggaccaac

SEQ ID NO: 5184590 - DNA, 25 bp, Homo sapien
cagtgctgtagtcgagtggcagcca

SEQ ID NO: 5184591 - DNA, 25 bp, Homo sapien
tgaagctgtccatagcgataactgg

SEQ ID NO: 5184592 - DNA, 25 bp, Homo sapien
cttgaattgaagtgggtgctctaac

SEQ ID NO: 5184593 - DNA, 25 bp, Homo sapien
gctaagaatacaaggccagccatag

SEQ ID NO: 5184594 - DNA, 25 bp, Homo sapien
gacaaaaagtgcaaagcgcttgata

SEQ ID NO: 5184595 - DNA, 25 bp, Homo sapien
cacatgagagattaatgcgcaggag

SEQ ID NO: 5184596 - DNA, 25 bp, Homo sapien
aaaaatgatcacatacacatgagag

SEQ ID NO: 5184597 - DNA, 25 bp, Homo sapien
aaggaattgcaggtgtcaactcaca

SEQ ID NO: 5184598 - DNA, 25 bp, Homo sapien
tgcgcaggagatcaatagaaatttc

SEQ ID NO: 5184599 - DNA, 25 bp, Homo sapien
gaagaaccagcggacgcaagtgaat

SEQ ID NO: 5184600 - DNA, 25 bp, Homo sapien
aaccagcggacgcaagtgaatcatt

SEQ ID NO: 5184601 - DNA, 25 bp, Homo sapien
ccagcggacgcaagtgaatcatttc

SEQ ID NO: 5184602 - DNA, 25 bp, Homo sapien
gcggacgcaagtgaatcatttcctt

SEQ ID NO: 5184603 - DNA, 25 bp, Homo sapien
ttggctgggctagagtggtatcggg

SEQ ID NO: 5184604 - DNA, 25 bp, Homo sapien
ggttttgccgatcagtgttgttcct

SEQ ID NO: 5184605 - DNA, 25 bp, Homo sapien
tgatggaattatgaagcaacttggc

SEQ ID NO: 5184606 - DNA, 25 bp, Homo sapien
ttttatggtgatggaattatgaagc

SEQ ID NO: 5184607 - DNA, 25 bp, Homo sapien
ttaagggctgtccaactgtgctttc

SEQ ID NO: 5184608 - DNA, 25 bp, Homo sapien
cacactgactatcccaagtagcact

SEQ ID NO: 5184609 - DNA, 25 bp, Homo sapien
tcacacactgactatcccaagtagc

SEQ ID NO: 5184610 - DNA, 25 bp, Homo sapien
aggctcacacactgactatcccaag

SEQ ID NO: 5184611 - DNA, 25 bp, Homo sapien
cactgactatcccaagtagcactaa

SEQ ID NO: 5184612 - DNA, 25 bp, Homo sapien
gaacctgtctccgttttgtatgaca

SEQ ID NO: 5184613 - DNA, 25 bp, Homo sapien
ccttcccagatctcgcatgaagcaa

SEQ ID NO: 5184614 - DNA, 25 bp, Homo sapien
gcaacgaagggatctgtattaattt

SEQ ID NO: 5184615 - DNA, 25 bp, Homo sapien
ggtgaacctgtctccgttttgtatg

SEQ ID NO: 5184616 - DNA, 25 bp, Homo sapien
tttgaaagttcaagcagaaaaccaa

SEQ ID NO: 5184617 - DNA, 25 bp, Homo sapien
agcccggagccctgctgttcaataa

SEQ ID NO: 5184618 - DNA, 25 bp, Homo sapien
tgagaaaatagagcccatagccata

SEQ ID NO: 5184619 - DNA, 25 bp, Homo sapien
tctatttgctgttgaattgccaggc

SEQ ID NO: 5184620 - DNA, 25 bp, Homo sapien
tgctggtatttctttactgttgtct

SEQ ID NO: 5184621 - DNA, 25 bp, Homo sapien
ggccaacacttggaactctcgatat

SEQ ID NO: 5184622 - DNA, 25 bp, Homo sapien
tcagaacttaactgcaggccaacac

SEQ ID NO: 5184623 - DNA, 25 bp, Homo sapien
gcaacaggagtaggattcagggaca

SEQ ID NO: 5184624 - DNA, 25 bp, Homo sapien
gtggccagatttgatccaatttgct

SEQ ID NO: 5184625 - DNA, 25 bp, Homo sapien
ggcacaggtatggtttgtgcctctg

SEQ ID NO: 5184626 - DNA, 25 bp, Homo sapien
tcatgtggcacaggtatggtttgtg

SEQ ID NO: 5184627 - DNA, 25 bp, Homo sapien
aagtggccagatttgatccaatttg

SEQ ID NO: 5184628 - DNA, 25 bp, Homo sapien
taatggtgtggatactagaattgga

SEQ ID NO: 5184629 - DNA, 25 bp, Homo sapien
tcaattacagggtgtcaggacagaa

SEQ ID NO: 5184630 - DNA, 25 bp, Homo sapien
cagaagacaccaggagcgtaatggt

SEQ ID NO: 5184631 - DNA, 25 bp, Homo sapien
tggtgtggatactagaattggaatc

SEQ ID NO: 5184632 - DNA, 25 bp, Homo sapien
ctgttctttgtattccacagcaaga

SEQ ID NO: 5184633 - DNA, 25 bp, Homo sapien
tgttctttgtattccacagcaagaa

SEQ ID NO: 5184634 - DNA, 25 bp, Homo sapien
ctttgtattccacagcaagaaccat

SEQ ID NO: 5184635 - DNA, 25 bp, Homo sapien
ttctttgtattccacagcaagaacc

SEQ ID NO: 5184636 - DNA, 25 bp, Homo sapien
gccttctatgtcatatgtagcgcaa

SEQ ID NO: 5184637 - DNA, 25 bp, Homo sapien
ccatccttcgttattgtgccttcta

SEQ ID NO: 5184638 - DNA, 25 bp, Homo sapien
aaatgttccccatccttcgttattg

SEQ ID NO: 5184639 - DNA, 25 bp, Homo sapien
catatgtagcgcaatttagtgcatc

SEQ ID NO: 5184640 - DNA, 25 bp, Homo sapien
cgcatttatcgtggtggcatttact

SEQ ID NO: 5184641 - DNA, 25 bp, Homo sapien
ctgaaattgtctgggcatcatagca

SEQ ID NO: 5184642 - DNA, 25 bp, Homo sapien
gatgcatatccaagagggtgtattg

SEQ ID NO: 5184643 - DNA, 25 bp, Homo sapien
catgatgttgctcgaaatgatacgc

SEQ ID NO: 5184644 - DNA, 25 bp, Homo sapien
gtcaggactctcctcccgtttcagg

SEQ ID NO: 5184645 - DNA, 25 bp, Homo sapien
ctgacctccaggttgatagtccctg

SEQ ID NO: 5184646 - DNA, 25 bp, Homo sapien
gtttcaggctgctcctaaacactcc

SEQ ID NO: 5184647 - DNA, 25 bp, Homo sapien
gatagtccctgtttgtttctgtcag

SEQ ID NO: 5184648 - DNA, 25 bp, Homo sapien
ctttatcttcttctttgatggacat

SEQ ID NO: 5184649 - DNA, 25 bp, Homo sapien
tctttatcttcttctttgatggaca

SEQ ID NO: 5184650 - DNA, 25 bp, Homo sapien
cctctttatcttcttctttgatgga

SEQ ID NO: 5184651 - DNA, 25 bp, Homo sapien
ctctttatcttcttctttgatggac

SEQ ID NO: 5184652 - DNA, 25 bp, Homo sapien
ttttgctttgcatcaacagttttca

SEQ ID NO: 5184653 - DNA, 25 bp, Homo sapien
ttccacttgactgtgtgtttgaaaa

SEQ ID NO: 5184654 - DNA, 25 bp, Homo sapien
ttgtctgcagttatccggaaataat

SEQ ID NO: 5184655 - DNA, 25 bp, Homo sapien
cataatcagtgatttagggacaagg

SEQ ID NO: 5184656 - DNA, 25 bp, Homo sapien
cagtgatttagggacaaggaagcct

SEQ ID NO: 5184657 - DNA, 25 bp, Homo sapien
tatccggaaataattcataatcagt

SEQ ID NO: 5184658 - DNA, 25 bp, Homo sapien
ctgctgagagttgaggatgttgctt

SEQ ID NO: 5184659 - DNA, 25 bp, Homo sapien
gttgcttcaggcatgttcagacttc

SEQ ID NO: 5184660 - DNA, 25 bp, Homo sapien
gctgagagttgaggatgttgcttca

SEQ ID NO: 5184661 - DNA, 25 bp, Homo sapien
cttcaggcatgttcagacttctgga

SEQ ID NO: 5184662 - DNA, 25 bp, Homo sapien
tccagagggattgagtctaccacaa

SEQ ID NO: 5184663 - DNA, 25 bp, Homo sapien
tgctagagacgtccctggtacagta

SEQ ID NO: 5184664 - DNA, 25 bp, Homo sapien
gaagtctttcatcgggtactagagg

SEQ ID NO: 5184665 - DNA, 25 bp, Homo sapien
gatacaatgcccaagtttctgctag

SEQ ID NO: 5184666 - DNA, 25 bp, Homo sapien
ctaggatttccaggacatgtgtcac

SEQ ID NO: 5184667 - DNA, 25 bp, Homo sapien
gtgtttagataaactaggatttcca

SEQ ID NO: 5184668 - DNA, 25 bp, Homo sapien
ctgtgtttagataaactaggatttc

SEQ ID NO: 5184669 - DNA, 25 bp, Homo sapien
ttagataaactaggatttccaggac

SEQ ID NO: 5184670 - DNA, 25 bp, Homo sapien
tgtaatgagccctaggcctgcgagc

SEQ ID NO: 5184671 - DNA, 25 bp, Homo sapien
tgctttcaggtctcctcgcaacgca

SEQ ID NO: 5184672 - DNA, 25 bp, Homo sapien
tagattgtgcgttcccgccctgctt

SEQ ID NO: 5184673 - DNA, 25 bp, Homo sapien
tgaagatagattgtgcgttcccgcc

SEQ ID NO: 5184674 - DNA, 25 bp, Homo sapien
tcgtggaggtctaggagaggggccc

SEQ ID NO: 5184675 - DNA, 25 bp, Homo sapien
gccacaaccatgctccacacgtgtg

SEQ ID NO: 5184676 - DNA, 25 bp, Homo sapien
gacgcccatgccacaaccatgctcc

SEQ ID NO: 5184677 - DNA, 25 bp, Homo sapien
acacgtgtgctcacgacccaaagct

SEQ ID NO: 5184678 - DNA, 25 bp, Homo sapien
gacctcccacgcgacactggggaaa

SEQ ID NO: 5184679 - DNA, 25 bp, Homo sapien
agtctctggtctcttggaacgctga

SEQ ID NO: 5184680 - DNA, 25 bp, Homo sapien
tctcttggaacgctgagctggactg

SEQ ID NO: 5184681 - DNA, 25 bp, Homo sapien
tggactggggcgacctcccacgcga

SEQ ID NO: 5184682 - DNA, 25 bp, Homo sapien
ccttggagcaattaggacgcattca

SEQ ID NO: 5184683 - DNA, 25 bp, Homo sapien
catagtcttatttcgaggcttcgga

SEQ ID NO: 5184684 - DNA, 25 bp, Homo sapien
gccctgcggcgaaaatggagacaca

SEQ ID NO: 5184685 - DNA, 25 bp, Homo sapien
cagtcgtagactttgcggagagagc

SEQ ID NO: 5184686 - DNA, 25 bp, Homo sapien
ttattgtgtatcgttccagcaatgg

SEQ ID NO: 5184687 - DNA, 25 bp, Homo sapien
attgtgtatcgttccagcaatggaa

SEQ ID NO: 5184688 - DNA, 25 bp, Homo sapien
cagttattgtgtatcgttccagcaa

SEQ ID NO: 5184689 - DNA, 25 bp, Homo sapien
tttcagttattgtgtatcgttccag

SEQ ID NO: 5184690 - DNA, 25 bp, Homo sapien
acagcagacacgctgcattgccaaa

SEQ ID NO: 5184691 - DNA, 25 bp, Homo sapien
ccagacgttgcattaccttcttcag

SEQ ID NO: 5184692 - DNA, 25 bp, Homo sapien
tcttcagaaagagattaaactttgt

SEQ ID NO: 5184693 - DNA, 25 bp, Homo sapien
ctaggagtaaagtgaggaaaaacag

SEQ ID NO: 5184694 - DNA, 25 bp, Homo sapien
gtcgcatgcattgcccctgcatctt

SEQ ID NO: 5184695 - DNA, 25 bp, Homo sapien
tgaggacttttcttgtcctaatgtt

SEQ ID NO: 5184696 - DNA, 25 bp, Homo sapien
ctcgggtgaagagcgtcgcatgcat

SEQ ID NO: 5184697 - DNA, 25 bp, Homo sapien
ccgcgcaccgagttgctcgggtgaa

SEQ ID NO: 5184698 - DNA, 25 bp, Homo sapien
tatggcacatgatatgagtcactgc

SEQ ID NO: 5184699 - DNA, 25 bp, Homo sapien
ttttctatggtgtatgacagttaga

SEQ ID NO: 5184700 - DNA, 25 bp, Homo sapien
ctttgtatatttctagtatggcaca

SEQ ID NO: 5184701 - DNA, 25 bp, Homo sapien
tatgacagttagagatgctgatttt

SEQ ID NO: 5184702 - DNA, 25 bp, Homo sapien
gcagcagcttttgactgtttccaga

SEQ ID NO: 5184703 - DNA, 25 bp, Homo sapien
taaaactaaatgttgcgtgggtggc

SEQ ID NO: 5184704 - DNA, 25 bp, Homo sapien
taggtgggcacaagtattacacatc

SEQ ID NO: 5184705 - DNA, 25 bp, Homo sapien
cctggaaataactgagcactttgaa

SEQ ID NO: 5184706 - DNA, 25 bp, Homo sapien
aagtcacatgggcagagatagccgt

SEQ ID NO: 5184707 - DNA, 25 bp, Homo sapien
gttgctatttcctaacctgcaggca

SEQ ID NO: 5184708 - DNA, 25 bp, Homo sapien
gatagccgtgtgagcagtctcagct

SEQ ID NO: 5184709 - DNA, 25 bp, Homo sapien
catggactacacacaatacagtggt

SEQ ID NO: 5184710 - DNA, 25 bp, Homo sapien
cctgaaattggaagacttggtgcca

SEQ ID NO: 5184711 - DNA, 25 bp, Homo sapien
gggctacagcgcattttctacctga

SEQ ID NO: 5184712 - DNA, 25 bp, Homo sapien
agaccacgtgactttcaacaatggg

SEQ ID NO: 5184713 - DNA, 25 bp, Homo sapien
gaacttcgtaccctttgcacacagg

SEQ ID NO: 5184714 - DNA, 25 bp, Homo sapien
gtttgtccttcgattagcatacagg

SEQ ID NO: 5184715 - DNA, 25 bp, Homo sapien
aaaagacgagaagaagcgagcccag

SEQ ID NO: 5184716 - DNA, 25 bp, Homo sapien
caaatgagtggagatgacacccagc

SEQ ID NO: 5184717 - DNA, 25 bp, Homo sapien
ggcgaaccctgactatcaaatgagt

SEQ ID NO: 5184718 - DNA, 25 bp, Homo sapien
ttgggagctgaggactagcccgcgg

SEQ ID NO: 5184719 - DNA, 25 bp, Homo sapien
gactagcccgcggaaatgtgcgcaa

SEQ ID NO: 5184720 - DNA, 25 bp, Homo sapien
tgcgcaaagtttgctgttagtgagg

SEQ ID NO: 5184721 - DNA, 25 bp, Homo sapien
cccgcggaaatgtgcgcaaagtttg

SEQ ID NO: 5184722 - DNA, 25 bp, Homo sapien
cactagtggggagttggctctcgac

SEQ ID NO: 5184723 - DNA, 25 bp, Homo sapien
ggcatttgttcgaactccggctttg

SEQ ID NO: 5184724 - DNA, 25 bp, Homo sapien
gaactccggctttggcactagtggg

SEQ ID NO: 5184725 - DNA, 25 bp, Homo sapien
ggagttggctctcgacagaggtttc

SEQ ID NO: 5184726 - DNA, 25 bp, Homo sapien
tctagtgagagtgggaccgaaggat

SEQ ID NO: 5184727 - DNA, 25 bp, Homo sapien
ttccacttgtgtgggacaggttctc

SEQ ID NO: 5184728 - DNA, 25 bp, Homo sapien
ttccttcttttgcacgtctcttctt

SEQ ID NO: 5184729 - DNA, 25 bp, Homo sapien
gagccagaggcttctagtgagagtg

SEQ ID NO: 5184730 - DNA, 25 bp, Homo sapien
aacaaaggcacattggcggccaggg

SEQ ID NO: 5184731 - DNA, 25 bp, Homo sapien
aaaggcacattggcggccagggcca

SEQ ID NO: 5184732 - DNA, 25 bp, Homo sapien
caaaggcacattggcggccagggcc

SEQ ID NO: 5184733 - DNA, 25 bp, Homo sapien
acaaaggcacattggcggccagggc

SEQ ID NO: 5184734 - DNA, 25 bp, Homo sapien
ctgacgcgcggagactttaggtgca

SEQ ID NO: 5184735 - DNA, 25 bp, Homo sapien
ttaaaatcggccctgctcgtgacgt

SEQ ID NO: 5184736 - DNA, 25 bp, Homo sapien
gaaatataccaaagcgagcgcgggc

SEQ ID NO: 5184737 - DNA, 25 bp, Homo sapien
tgctcgtgacgtcaggtcggaaata

SEQ ID NO: 5184738 - DNA, 25 bp, Homo sapien
aaacgagccacaccgagaaaggagg

SEQ ID NO: 5184739 - DNA, 25 bp, Homo sapien
ccacaccgagaaaggaggggcggct

SEQ ID NO: 5184740 - DNA, 25 bp, Homo sapien
cacaccgagaaaggaggggcggctg

SEQ ID NO: 5184741 - DNA, 25 bp, Homo sapien
ctggaaacgagccacaccgagaaag

SEQ ID NO: 5184742 - DNA, 25 bp, Homo sapien
cgaatagttccacggagccatcggc

SEQ ID NO: 5184743 - DNA, 25 bp, Homo sapien
gcaagttgcaaaagggtcccggctg

SEQ ID NO: 5184744 - DNA, 25 bp, Homo sapien
cagccgcagggcatctgatggcaac

SEQ ID NO: 5184745 - DNA, 25 bp, Homo sapien
catcggccggtactgagaacacgag

SEQ ID NO: 5184746 - DNA, 25 bp, Homo sapien
gcatggaatcgcttctgcccacggg

SEQ ID NO: 5184747 - DNA, 25 bp, Homo sapien
tttcgttcgcatggaatcgcttctg

SEQ ID NO: 5184748 - DNA, 25 bp, Homo sapien
gttcgcatggaatcgcttctgccca

SEQ ID NO: 5184749 - DNA, 25 bp, Homo sapien
tttccctttcgttcgcatggaatcg

SEQ ID NO: 5184750 - DNA, 25 bp, Homo sapien
tctccccagctctccaaactctcac

SEQ ID NO: 5184751 - DNA, 25 bp, Homo sapien
ttccttctccccagctctccaaact

SEQ ID NO: 5184752 - DNA, 25 bp, Homo sapien
ttctccccagctctccaaactctca

SEQ ID NO: 5184753 - DNA, 25 bp, Homo sapien
ccttctccccagctctccaaactct

SEQ ID NO: 5184754 - DNA, 25 bp, Homo sapien
gccctgctccctcgcggaaggggaa

SEQ ID NO: 5184755 - DNA, 25 bp, Homo sapien
tggccggtgcgtcaatgcctgcgcc

SEQ ID NO: 5184756 - DNA, 25 bp, Homo sapien
cagcctggccggtgcgtcaatgcct

SEQ ID NO: 5184757 - DNA, 25 bp, Homo sapien
ggcccagcctggccggtgcgtcaat

SEQ ID NO: 5184758 - DNA, 25 bp, Homo sapien
ggaagccgcactcgacaggttgtta

SEQ ID NO: 5184759 - DNA, 25 bp, Homo sapien
caaaggctgttatcaggaagccgca

SEQ ID NO: 5184760 - DNA, 25 bp, Homo sapien
taataagctgctgtgaaaacgaccc

SEQ ID NO: 5184761 - DNA, 25 bp, Homo sapien
ttaacagtcttacatccggcgtgtc

SEQ ID NO: 5184762 - DNA, 25 bp, Homo sapien
gatattgcagtcttgtcaggcccag

SEQ ID NO: 5184763 - DNA, 25 bp, Homo sapien
tgtagcaccagcactcgatgtgtct

SEQ ID NO: 5184764 - DNA, 25 bp, Homo sapien
tcttcaaaagccaggccgaaagtcc

SEQ ID NO: 5184765 - DNA, 25 bp, Homo sapien
aatcccaagccgcacgatttgctgt

SEQ ID NO: 5184766 - DNA, 25 bp, Homo sapien
gcaccttctaggaaattgcaatcga

SEQ ID NO: 5184767 - DNA, 25 bp, Homo sapien
gcactttcgctaattgggagttcaa

SEQ ID NO: 5184768 - DNA, 25 bp, Homo sapien
aaattgcaatcgatttgtaatgcac

SEQ ID NO: 5184769 - DNA, 25 bp, Homo sapien
gctgtggagcgtctcgcacgtggca

SEQ ID NO: 5184770 - DNA, 25 bp, Homo sapien
cagccaggggcgaccactttgtgag

SEQ ID NO: 5184771 - DNA, 25 bp, Homo sapien
ttgtcccagcctccgctttcacttc

SEQ ID NO: 5184772 - DNA, 25 bp, Homo sapien
ggagcgggacccgtaccaggcgcgc

SEQ ID NO: 5184773 - DNA, 25 bp, Homo sapien
aacgtatcctggacctagagtcggg

SEQ ID NO: 5184774 - DNA, 25 bp, Homo sapien
ggagctcgacgcgaagggccgcggg

SEQ ID NO: 5184775 - DNA, 25 bp, Homo sapien
gaaaaaggagctcgacgcgaagggc

SEQ ID NO: 5184776 - DNA, 25 bp, Homo sapien
gccccggcagcactcggggacgcca

SEQ ID NO: 5184777 - DNA, 25 bp, Homo sapien
agcactcggggacgccagcacgccg

SEQ ID NO: 5184778 - DNA, 25 bp, Homo sapien
ttgtcgccaagttccctcctcgcca

SEQ ID NO: 5184779 - DNA, 25 bp, Homo sapien
acttgtcgccaagttccctcctcgc

SEQ ID NO: 5184780 - DNA, 25 bp, Homo sapien
aacttgtcgccaagttccctcctcg

SEQ ID NO: 5184781 - DNA, 25 bp, Homo sapien
tgtcgccaagttccctcctcgccat

SEQ ID NO: 5184782 - DNA, 25 bp, Homo sapien
agaaaggaacacagcgatcccctca

SEQ ID NO: 5184783 - DNA, 25 bp, Homo sapien
gaaaggaacacagcgatcccctcac

SEQ ID NO: 5184784 - DNA, 25 bp, Homo sapien
ctagaaaggaacacagcgatcccct

SEQ ID NO: 5184785 - DNA, 25 bp, Homo sapien
tagaaaggaacacagcgatcccctc

SEQ ID NO: 5184786 - DNA, 25 bp, Homo sapien
tccgacctgtactagaataggtgtg

SEQ ID NO: 5184787 - DNA, 25 bp, Homo sapien
cctgtactagaataggtgtgtgagg

SEQ ID NO: 5184788 - DNA, 25 bp, Homo sapien
cacatccgacctgtactagaatagg

SEQ ID NO: 5184789 - DNA, 25 bp, Homo sapien
ccaaaaacacatccgacctgtacta

SEQ ID NO: 5184790 - DNA, 25 bp, Homo sapien
aaatgtcagaacaccaaattaatct

SEQ ID NO: 5184791 - DNA, 25 bp, Homo sapien
gtctcccatgagacactgggtgctt

SEQ ID NO: 5184792 - DNA, 25 bp, Homo sapien
tgttacctgtctcccatgagacact

SEQ ID NO: 5184793 - DNA, 25 bp, Homo sapien
aaaatgtcagaacaccaaattaatc

SEQ ID NO: 5184794 - DNA, 25 bp, Homo sapien
gccacttttatgttttctgattcac

SEQ ID NO: 5184795 - DNA, 25 bp, Homo sapien
cttttatgttttctgattcaccaac

SEQ ID NO: 5184796 - DNA, 25 bp, Homo sapien
tattttgccacttttatgttttctg

SEQ ID NO: 5184797 - DNA, 25 bp, Homo sapien
cacttttatgttttctgattcacca

SEQ ID NO: 5184798 - DNA, 25 bp, Homo sapien
tctgaaatcagaacttagctgccaa

SEQ ID NO: 5184799 - DNA, 25 bp, Homo sapien
gaaatcgagtacagctggctcttct

SEQ ID NO: 5184800 - DNA, 25 bp, Homo sapien
tcctgtgctagctctgcagtactga

SEQ ID NO: 5184801 - DNA, 25 bp, Homo sapien
tgtatctgaaaatcaagcacagctt

SEQ ID NO: 5184802 - DNA, 25 bp, Homo sapien
ccactctttcaagtggaggccccat

SEQ ID NO: 5184803 - DNA, 25 bp, Homo sapien
tctatccactctttcaagtggaggc

SEQ ID NO: 5184804 - DNA, 25 bp, Homo sapien
tcctctatccactctttcaagtgga

SEQ ID NO: 5184805 - DNA, 25 bp, Homo sapien
tatccactctttcaagtggaggccc

SEQ ID NO: 5184806 - DNA, 25 bp, Homo sapien
tgttagcccgctgtggcaggctcta

SEQ ID NO: 5184807 - DNA, 25 bp, Homo sapien
tgtggcaggctctattccttgccat

SEQ ID NO: 5184808 - DNA, 25 bp, Homo sapien
gttgttagcccgctgtggcaggctc

SEQ ID NO: 5184809 - DNA, 25 bp, Homo sapien
gagtgtggttgttagcccgctgtgg

SEQ ID NO: 5184810 - DNA, 25 bp, Homo sapien
ctgtcggcttctgttgaattcaaca

SEQ ID NO: 5184811 - DNA, 25 bp, Homo sapien
cataagcaagatctcctccatgaaa

SEQ ID NO: 5184812 - DNA, 25 bp, Homo sapien
tcaacataagcaagatctcctccat

SEQ ID NO: 5184813 - DNA, 25 bp, Homo sapien
attcaacataagcaagatctcctcc

SEQ ID NO: 5184814 - DNA, 25 bp, Homo sapien
gcccagctgtaacgaattatttgcc

SEQ ID NO: 5184815 - DNA, 25 bp, Homo sapien
ctttatggcacgaggtctgctgacc

SEQ ID NO: 5184816 - DNA, 25 bp, Homo sapien
tgtatggcgggaaagcccagacaga

SEQ ID NO: 5184817 - DNA, 25 bp, Homo sapien
cccaaaggtatgagaacttgactcc

SEQ ID NO: 5184818 - DNA, 25 bp, Homo sapien
ttttagtgggcgaagtgtagctgaa

SEQ ID NO: 5184819 - DNA, 25 bp, Homo sapien
tcaacaatgattagggtagcaggac

SEQ ID NO: 5184820 - DNA, 25 bp, Homo sapien
ggtttcttggcctgatcaacaatga

SEQ ID NO: 5184821 - DNA, 25 bp, Homo sapien
tagtttcactgcaagcattcagcct

SEQ ID NO: 5184822 - DNA, 25 bp, Homo sapien
gggaaaagcatcctctctcactctg

SEQ ID NO: 5184823 - DNA, 25 bp, Homo sapien
gaatgagtcccggtgtgttaaatcg

SEQ ID NO: 5184824 - DNA, 25 bp, Homo sapien
gatccagggctgagccaatcagtgc

SEQ ID NO: 5184825 - DNA, 25 bp, Homo sapien
ccttagcaccttgattggttgagaa

SEQ ID NO: 5184826 - DNA, 25 bp, Homo sapien
caaactcattggtcgggagtggtcc

SEQ ID NO: 5184827 - DNA, 25 bp, Homo sapien
taagtctaggaagggaattgcggca

SEQ ID NO: 5184828 - DNA, 25 bp, Homo sapien
tcctaacatgtagggactgcaggtg

SEQ ID NO: 5184829 - DNA, 25 bp, Homo sapien
gtacttctatgcattaagtgctggc

SEQ ID NO: 5184830 - DNA, 25 bp, Homo sapien
taacccagactactttatgacaggc

SEQ ID NO: 5184831 - DNA, 25 bp, Homo sapien
ttagaaaaacaacagtcactcgact

SEQ ID NO: 5184832 - DNA, 25 bp, Homo sapien
tttagaaaaacaacagtcactcgac

SEQ ID NO: 5184833 - DNA, 25 bp, Homo sapien
catttagaaaaacaacagtcactcg

SEQ ID NO: 5184834 - DNA, 25 bp, Homo sapien
agaaaaacaacagtcactcgactca

SEQ ID NO: 5184835 - DNA, 25 bp, Homo sapien
tcctcgtctactggaactaatagcc

SEQ ID NO: 5184836 - DNA, 25 bp, Homo sapien
gctcctcgtctactggaactaatag

SEQ ID NO: 5184837 - DNA, 25 bp, Homo sapien
ctcctcgtctactggaactaatagc

SEQ ID NO: 5184838 - DNA, 25 bp, Homo sapien
cctcgtctactggaactaatagcca

SEQ ID NO: 5184839 - DNA, 25 bp, Homo sapien
ggaggactgtggagaaccaccagcc

SEQ ID NO: 5184840 - DNA, 25 bp, Homo sapien
ctctaaagactgtaagggtttccag

SEQ ID NO: 5184841 - DNA, 25 bp, Homo sapien
tgtaagggtttccaggcagcactga

SEQ ID NO: 5184842 - DNA, 25 bp, Homo sapien
agcactgagactccatgaggctcga

SEQ ID NO: 5184843 - DNA, 25 bp, Homo sapien
tgggaccaatgaagcctcactccag

SEQ ID NO: 5184844 - DNA, 25 bp, Homo sapien
ctccccaggcttattgcgcaggcag

SEQ ID NO: 5184845 - DNA, 25 bp, Homo sapien
cctctggctttgctgccgggtagaa

SEQ ID NO: 5184846 - DNA, 25 bp, Homo sapien
agagcacttctgctggacgtcggga

SEQ ID NO: 5184847 - DNA, 25 bp, Homo sapien
cctcacacatgcgaagcgcgcgctc

SEQ ID NO: 5184848 - DNA, 25 bp, Homo sapien
gacctcacacatgcgaagcgcgcgc

SEQ ID NO: 5184849 - DNA, 25 bp, Homo sapien
tcacacatgcgaagcgcgcgctcta

SEQ ID NO: 5184850 - DNA, 25 bp, Homo sapien
cacacatgcgaagcgcgcgctctac

SEQ ID NO: 5184851 - DNA, 25 bp, Homo sapien
tgttatggtgtcacacactgctagc

SEQ ID NO: 5184852 - DNA, 25 bp, Homo sapien
ctttgttatggtgtcacacactgct

SEQ ID NO: 5184853 - DNA, 25 bp, Homo sapien
cccgcatgtgtgagacgtgctgccc

SEQ ID NO: 5184854 - DNA, 25 bp, Homo sapien
gacgtgctgcccttaaactttgtta

SEQ ID NO: 5184855 - DNA, 25 bp, Homo sapien
gagaggggcatcacatacaagagca

SEQ ID NO: 5184856 - DNA, 25 bp, Homo sapien
atcacatacaagagcataaaaaccc

SEQ ID NO: 5184857 - DNA, 25 bp, Homo sapien
caagatttgaggagaggggcatcac

SEQ ID NO: 5184858 - DNA, 25 bp, Homo sapien
gggcatcacatacaagagcataaaa

SEQ ID NO: 5184859 - DNA, 25 bp, Homo sapien
taccctttcgattagccacctggcg

SEQ ID NO: 5184860 - DNA, 25 bp, Homo sapien
gagtttttacacttactggctactg

SEQ ID NO: 5184861 - DNA, 25 bp, Homo sapien
ggcgtggcttttggtaactaagcat

SEQ ID NO: 5184862 - DNA, 25 bp, Homo sapien
ggagataggaaagcgctttgttttg

SEQ ID NO: 5184863 - DNA, 25 bp, Homo sapien
tgtgcctaagaaaactcaaggacag

SEQ ID NO: 5184864 - DNA, 25 bp, Homo sapien
gaagcctaagttggtccaccattca

SEQ ID NO: 5184865 - DNA, 25 bp, Homo sapien
tgtcagacgaatttaggttgtcacc

SEQ ID NO: 5184866 - DNA, 25 bp, Homo sapien
caaggacagtcatgggttttcatcc

SEQ ID NO: 5184867 - DNA, 25 bp, Homo sapien
gaatgactccttaaccatagtttct

SEQ ID NO: 5184868 - DNA, 25 bp, Homo sapien
gagcattcgtggagcggatttttta

SEQ ID NO: 5184869 - DNA, 25 bp, Homo sapien
aatcagactccggagcattcgtgga

SEQ ID NO: 5184870 - DNA, 25 bp, Homo sapien
agtttagggagcgtcagaatgactc

SEQ ID NO: 5184871 - DNA, 25 bp, Homo sapien
tccccgcctgaatgtcagcgcaggg

SEQ ID NO: 5184872 - DNA, 25 bp, Homo sapien
gggatctggcttctcctactctgta

SEQ ID NO: 5184873 - DNA, 25 bp, Homo sapien
tgacgacttctcgttgtccgccctg

SEQ ID NO: 5184874 - DNA, 25 bp, Homo sapien
gcttccctaggcctacagacgtgtc

SEQ ID NO: 5184875 - DNA, 25 bp, Homo sapien
cgggctgggcgggtgtaactcgagc

SEQ ID NO: 5184876 - DNA, 25 bp, Homo sapien
ggcaggagcacccagttcctccagc

SEQ ID NO: 5184877 - DNA, 25 bp, Homo sapien
tgagatagatcctcacgcgcgaggg

SEQ ID NO: 5184878 - DNA, 25 bp, Homo sapien
cctcggcccgggtgctcccagcgag

SEQ ID NO: 5184879 - DNA, 25 bp, Homo sapien
ggacaagaatgaagagttaccattt

SEQ ID NO: 5184880 - DNA, 25 bp, Homo sapien
cacagacatagtgacaagtattgat

SEQ ID NO: 5184881 - DNA, 25 bp, Homo sapien
ttcacgccaatcctgagctttaaac

SEQ ID NO: 5184882 - DNA, 25 bp, Homo sapien
caagtgtgttaaaggtggacaagaa

SEQ ID NO: 5184883 - DNA, 25 bp, Homo sapien
tctagggttctaccaagagtcacct

SEQ ID NO: 5184884 - DNA, 25 bp, Homo sapien
ccactggtgactgactggatttcca

SEQ ID NO: 5184885 - DNA, 25 bp, Homo sapien
ttatgaaggctccatgatgtgggca

SEQ ID NO: 5184886 - DNA, 25 bp, Homo sapien
gaactaattgaaccgaagcttgacc

SEQ ID NO: 5184887 - DNA, 25 bp, Homo sapien
accaccagacgcagcttatttttta

SEQ ID NO: 5184888 - DNA, 25 bp, Homo sapien
acgcaccaccagacgcagcttattt

SEQ ID NO: 5184889 - DNA, 25 bp, Homo sapien
agcctcctaagtaggagacacgcac

SEQ ID NO: 5184890 - DNA, 25 bp, Homo sapien
tcctaagtaggagacacgcaccacc

SEQ ID NO: 5184891 - DNA, 25 bp, Homo sapien
gaaggacctacccaagtgaagaaga

SEQ ID NO: 5184892 - DNA, 25 bp, Homo sapien
tcaggaaagtatccgtgaaggacct

SEQ ID NO: 5184893 - DNA, 25 bp, Homo sapien
gattgactgaatacctggcagatcc

SEQ ID NO: 5184894 - DNA, 25 bp, Homo sapien
catctgctgcttctaaaaaactcga

SEQ ID NO: 5184895 - DNA, 25 bp, Homo sapien
cttaaacaacgcacatgcctgactc

SEQ ID NO: 5184896 - DNA, 25 bp, Homo sapien
caacgcacatgcctgactcatagca

SEQ ID NO: 5184897 - DNA, 25 bp, Homo sapien
gtgtggtggtccctaggatatgagt

SEQ ID NO: 5184898 - DNA, 25 bp, Homo sapien
tggtggtccctaggatatgagtgtt

SEQ ID NO: 5184899 - DNA, 25 bp, Homo sapien
gcctgtctggacaacacacgttaca

SEQ ID NO: 5184900 - DNA, 25 bp, Homo sapien
agattcttcccaggattagagccca

SEQ ID NO: 5184901 - DNA, 25 bp, Homo sapien
tgggtgcctatcacacaacaatgta

SEQ ID NO: 5184902 - DNA, 25 bp, Homo sapien
gcaggtacccatttgtcatagctca

SEQ ID NO: 5184903 - DNA, 25 bp, Homo sapien
gagaaagtcctaaaacagttgcaag

SEQ ID NO: 5184904 - DNA, 25 bp, Homo sapien
gaaagtcctaaaacagttgcaagag

SEQ ID NO: 5184905 - DNA, 25 bp, Homo sapien
tgagaaagtcctaaaacagttgcaa

SEQ ID NO: 5184906 - DNA, 25 bp, Homo sapien
agtcctaaaacagttgcaagagcac

SEQ ID NO: 5184907 - DNA, 25 bp, Homo sapien
tcttattatgcctgacaaggctagg

SEQ ID NO: 5184908 - DNA, 25 bp, Homo sapien
tcatcaatataagcaaaagtgtgcc

SEQ ID NO: 5184909 - DNA, 25 bp, Homo sapien
gatactgaagacctgctatgtgcca

SEQ ID NO: 5184910 - DNA, 25 bp, Homo sapien
aaagtgtgccaaccaaaagttcagc

SEQ ID NO: 5184911 - DNA, 25 bp, Homo sapien
tccagaagttaaagagggctcactc

SEQ ID NO: 5184912 - DNA, 25 bp, Homo sapien
gatccagaagttaaagagggctcac

SEQ ID NO: 5184913 - DNA, 25 bp, Homo sapien
tagatccagaagttaaagagggctc

SEQ ID NO: 5184914 - DNA, 25 bp, Homo sapien
agtagatccagaagttaaagagggc

SEQ ID NO: 5184915 - DNA, 25 bp, Homo sapien
taaacatattcggtgagggattcat

SEQ ID NO: 5184916 - DNA, 25 bp, Homo sapien
tgtaaacatattcggtgagggattc

SEQ ID NO: 5184917 - DNA, 25 bp, Homo sapien
ttctcagtgtaaacatattcggtga

SEQ ID NO: 5184918 - DNA, 25 bp, Homo sapien
cagtgtaaacatattcggtgaggga

SEQ ID NO: 5184919 - DNA, 25 bp, Homo sapien
gctgctttaacataggccaggttca

SEQ ID NO: 5184920 - DNA, 25 bp, Homo sapien
ctgctttaacataggccaggttcat

SEQ ID NO: 5184921 - DNA, 25 bp, Homo sapien
ctgctgctttaacataggccaggtt

SEQ ID NO: 5184922 - DNA, 25 bp, Homo sapien
tgctgctttaacataggccaggttc

SEQ ID NO: 5184923 - DNA, 25 bp, Homo sapien
gatctattcaataaagcccaaaggc

SEQ ID NO: 5184924 - DNA, 25 bp, Homo sapien
aaaggctttcccctagcataccaga

SEQ ID NO: 5184925 - DNA, 25 bp, Homo sapien
ccttcagtatcgtgtatccattccc

SEQ ID NO: 5184926 - DNA, 25 bp, Homo sapien
tgctccaaattacaacacatgctgt

SEQ ID NO: 5184927 - DNA, 25 bp, Homo sapien
ttacagtttcttaagtcgattccgc

SEQ ID NO: 5184928 - DNA, 25 bp, Homo sapien
tagtaaatctcacaggcgtagttct

SEQ ID NO: 5184929 - DNA, 25 bp, Homo sapien
tacagtttcttaagtcgattccgct

SEQ ID NO: 5184930 - DNA, 25 bp, Homo sapien
caggcgtagttctcttcttaaagtt

SEQ ID NO: 5184931 - DNA, 25 bp, Homo sapien
gagtggataccccaacatcatttat

SEQ ID NO: 5184932 - DNA, 25 bp, Homo sapien
aaaaacctgagataaaccctgtctg

SEQ ID NO: 5184933 - DNA, 25 bp, Homo sapien
aagttacatccttgattcacatgga

SEQ ID NO: 5184934 - DNA, 25 bp, Homo sapien
actaatttatagactccatgactga

SEQ ID NO: 5184935 - DNA, 25 bp, Homo sapien
gagtcacaaaactgtactaggctgt

SEQ ID NO: 5184936 - DNA, 25 bp, Homo sapien
tgtaaagctgcaaagtaatcctgac

SEQ ID NO: 5184937 - DNA, 25 bp, Homo sapien
cacgatcacgatacaatgctttggc

SEQ ID NO: 5184938 - DNA, 25 bp, Homo sapien
agggactaacccgaaggctgaacat

SEQ ID NO: 5184939 - DNA, 25 bp, Homo sapien
taaaccaattcatggatcaaaacag

SEQ ID NO: 5184940 - DNA, 25 bp, Homo sapien
tcttaggcagaataacaagattagt

SEQ ID NO: 5184941 - DNA, 25 bp, Homo sapien
catctgttagcaaactgaaattgta

SEQ ID NO: 5184942 - DNA, 25 bp, Homo sapien
caagagttatgaactaacacagctc

SEQ ID NO: 5184943 - DNA, 25 bp, Homo sapien
catgtacttatgtgagaaaccctag

SEQ ID NO: 5184944 - DNA, 25 bp, Homo sapien
taaaatgggcctctctgtcaaacca

SEQ ID NO: 5184945 - DNA, 25 bp, Homo sapien
gaattagcaagccatctcaggagga

SEQ ID NO: 5184946 - DNA, 25 bp, Homo sapien
tctggaaagaaacgatactgctcct

SEQ ID NO: 5184947 - DNA, 25 bp, Homo sapien
gatggagtcatcaggaaagaaaagt

SEQ ID NO: 5184948 - DNA, 25 bp, Homo sapien
ctggggatggagtcatcaggaaaga

SEQ ID NO: 5184949 - DNA, 25 bp, Homo sapien
gggatggagtcatcaggaaagaaaa

SEQ ID NO: 5184950 - DNA, 25 bp, Homo sapien
tggggatggagtcatcaggaaagaa

SEQ ID NO: 5184951 - DNA, 25 bp, Homo sapien
agatatctcacaccaccatggatca

SEQ ID NO: 5184952 - DNA, 25 bp, Homo sapien
gatatctcacaccaccatggatcaa

SEQ ID NO: 5184953 - DNA, 25 bp, Homo sapien
gaagggcttcttttaccatcctata

SEQ ID NO: 5184954 - DNA, 25 bp, Homo sapien
ggagcaatttctagcaggttggcac

SEQ ID NO: 5184955 - DNA, 25 bp, Homo sapien
cattataggcaatggagctgataaa

SEQ ID NO: 5184956 - DNA, 25 bp, Homo sapien
tgtaaactggaagcattataggcaa

SEQ ID NO: 5184957 - DNA, 25 bp, Homo sapien
ccagtagtaaggtaactgccaccac

SEQ ID NO: 5184958 - DNA, 25 bp, Homo sapien
cagcttgattcctacccagtagtaa

SEQ ID NO: 5184959 - DNA, 25 bp, Homo sapien
gatttgctgaggacataactgcttt

SEQ ID NO: 5184960 - DNA, 25 bp, Homo sapien
tcctgcaaccaaatcatacagcttg

SEQ ID NO: 5184961 - DNA, 25 bp, Homo sapien
agaatgccttcatactcctcctgga

SEQ ID NO: 5184962 - DNA, 25 bp, Homo sapien
ttacagaatgccttcatactcctcc

SEQ ID NO: 5184963 - DNA, 25 bp, Homo sapien
ttcatactcctcctggaccaaaaac

SEQ ID NO: 5184964 - DNA, 25 bp, Homo sapien
aacctctttactataatcacccaat

SEQ ID NO: 5184965 - DNA, 25 bp, Homo sapien
ccaaacaggtatctgggcaaagact

SEQ ID NO: 5184966 - DNA, 25 bp, Homo sapien
gatacgtgaggcattatattgtcca

SEQ ID NO: 5184967 - DNA, 25 bp, Homo sapien
tagggactatgccaacagatacgtg

SEQ ID NO: 5184968 - DNA, 25 bp, Homo sapien
ggttagatgcttaataccaggctgg

SEQ ID NO: 5184969 - DNA, 25 bp, Homo sapien
ctatctttggactgcctccccagcc

SEQ ID NO: 5184970 - DNA, 25 bp, Homo sapien
tattaaaggaccaagtgggctccag

SEQ ID NO: 5184971 - DNA, 25 bp, Homo sapien
tgagaagtgacaagatgggatatta

SEQ ID NO: 5184972 - DNA, 25 bp, Homo sapien
tgacaagatgggatattaaaggacc

SEQ ID NO: 5184973 - DNA, 25 bp, Homo sapien
cagatcccacgtactgatgaggagt

SEQ ID NO: 5184974 - DNA, 25 bp, Homo sapien
gggatgacctagtgtcctccataga

SEQ ID NO: 5184975 - DNA, 25 bp, Homo sapien
gcttagacctgtgctcagatcccac

SEQ ID NO: 5184976 - DNA, 25 bp, Homo sapien
ggagtgggatggctattaagattgc

SEQ ID NO: 5184977 - DNA, 25 bp, Homo sapien
catcataattctacaggcctttctc

SEQ ID NO: 5184978 - DNA, 25 bp, Homo sapien
cataattctacaggcctttctcttc

SEQ ID NO: 5184979 - DNA, 25 bp, Homo sapien
tgcatcataattctacaggcctttc

SEQ ID NO: 5184980 - DNA, 25 bp, Homo sapien
ctgcatcataattctacaggccttt

SEQ ID NO: 5184981 - DNA, 25 bp, Homo sapien
gagccgggtacatctgaaattatac

SEQ ID NO: 5184982 - DNA, 25 bp, Homo sapien
gagactgggcatcagtaaagctgaa

SEQ ID NO: 5184983 - DNA, 25 bp, Homo sapien
gaaatcagaaatcgtacgcttccgt

SEQ ID NO: 5184984 - DNA, 25 bp, Homo sapien
gaatgtgggtgatacactgtgctgc

SEQ ID NO: 5184985 - DNA, 25 bp, Homo sapien
tgccgcttcagcaagtgcatttcgt

SEQ ID NO: 5184986 - DNA, 25 bp, Homo sapien
caagtgcatttcgtgtaccataaaa

SEQ ID NO: 5184987 - DNA, 25 bp, Homo sapien
cagcaagtgcatttcgtgtaccata

SEQ ID NO: 5184988 - DNA, 25 bp, Homo sapien
tttcgtgtaccataaaaatagtgaa

SEQ ID NO: 5184989 - DNA, 25 bp, Homo sapien
gccgctcacacgcactttccctgtc

SEQ ID NO: 5184990 - DNA, 25 bp, Homo sapien
ggacatccttgcaccgtgcgccgct

SEQ ID NO: 5184991 - DNA, 25 bp, Homo sapien
cctccatgtaattggctgtggcagc

SEQ ID NO: 5184992 - DNA, 25 bp, Homo sapien
cagagcaatggcaaggttcatccgt

SEQ ID NO: 5184993 - DNA, 25 bp, Homo sapien
tttggctctcacgtcaaattcctgc

SEQ ID NO: 5184994 - DNA, 25 bp, Homo sapien
tttatcatccattttgcgcacagag

SEQ ID NO: 5184995 - DNA, 25 bp, Homo sapien
ccgtggcattgataacacatttggc

SEQ ID NO: 5184996 - DNA, 25 bp, Homo sapien
cacagagtccgtgaaaggtcccgtg

SEQ ID NO: 5184997 - DNA, 25 bp, Homo sapien
ctggtcgctgggtcaagaagtccca

SEQ ID NO: 5184998 - DNA, 25 bp, Homo sapien
catcactggtcgctgggtcaagaag

SEQ ID NO: 5184999 - DNA, 25 bp, Homo sapien
tcactggtcgctgggtcaagaagtc

SEQ ID NO: 5185000 - DNA, 25 bp, Homo sapien
cccatcactggtcgctgggtcaaga

SEQ ID NO: 5185001 - DNA, 25 bp, Homo sapien
catcacaactcaggtaattacgcac

SEQ ID NO: 5185002 - DNA, 25 bp, Homo sapien
gaggacggattccactccatgctgc

SEQ ID NO: 5185003 - DNA, 25 bp, Homo sapien
ctgtaacaagaggacggattccact

SEQ ID NO: 5185004 - DNA, 25 bp, Homo sapien
gtaacaagaggacggattccactcc

SEQ ID NO: 5185005 - DNA, 25 bp, Homo sapien
caagaggacggattccactccatgc

SEQ ID NO: 5185006 - DNA, 25 bp, Homo sapien
taaggccactctcactgatatcaac

SEQ ID NO: 5185007 - DNA, 25 bp, Homo sapien
ctgctatagtaataaggccactctc

SEQ ID NO: 5185008 - DNA, 25 bp, Homo sapien
tagtaataaggccactctcactgat

SEQ ID NO: 5185009 - DNA, 25 bp, Homo sapien
tctcactgatatcaacaacatgatt

SEQ ID NO: 5185010 - DNA, 25 bp, Homo sapien
tcctgcacaagcctaatgtagagtg

SEQ ID NO: 5185011 - DNA, 25 bp, Homo sapien
gcacaagcctaatgtagagtgtggg

SEQ ID NO: 5185012 - DNA, 25 bp, Homo sapien
gcagcatttatggtatcttctgcca

SEQ ID NO: 5185013 - DNA, 25 bp, Homo sapien
tgccatagaccgataagttgtccac

SEQ ID NO: 5185014 - DNA, 25 bp, Homo sapien
tatcaatagcttctaggcacaaagc

SEQ ID NO: 5185015 - DNA, 25 bp, Homo sapien
aggaaaccacttgggcttcgaatgc

SEQ ID NO: 5185016 - DNA, 25 bp, Homo sapien
gacagaatttgggatgccctataca

SEQ ID NO: 5185017 - DNA, 25 bp, Homo sapien
gcctgtaactaatagctctcggaga

SEQ ID NO: 5185018 - DNA, 25 bp, Homo sapien
aaattctgacacaagacgtactcca

SEQ ID NO: 5185019 - DNA, 25 bp, Homo sapien
tactccaacaataggccaccttttg

SEQ ID NO: 5185020 - DNA, 25 bp, Homo sapien
caagacgtactccaacaataggcca

SEQ ID NO: 5185021 - DNA, 25 bp, Homo sapien
gacacaagacgtactccaacaatag

SEQ ID NO: 5185022 - DNA, 25 bp, Homo sapien
gccaggcgagtacgacgtgaaatca

SEQ ID NO: 5185023 - DNA, 25 bp, Homo sapien
ggacatttagaaaggccaggcgagt

SEQ ID NO: 5185024 - DNA, 25 bp, Homo sapien
ttcaacaatcctgggtagggcttcc

SEQ ID NO: 5185025 - DNA, 25 bp, Homo sapien
catatccacagcagtgcaggcatac

SEQ ID NO: 5185026 - DNA, 25 bp, Homo sapien
agttgatttttctgacatgattcct

SEQ ID NO: 5185027 - DNA, 25 bp, Homo sapien
actgcagcttctaccatgcaggctc

SEQ ID NO: 5185028 - DNA, 25 bp, Homo sapien
ctaaaacagagatacacacaaagtt

SEQ ID NO: 5185029 - DNA, 25 bp, Homo sapien
acacaaagttcaaagacacatggaa

SEQ ID NO: 5185030 - DNA, 25 bp, Homo sapien
cacaaagttcaaagacacatggaaa

SEQ ID NO: 5185031 - DNA, 25 bp, Homo sapien
cagagatacacacaaagttcaaaga

SEQ ID NO: 5185032 - DNA, 25 bp, Homo sapien
taactgttctgatcgagatttatag

SEQ ID NO: 5185033 - DNA, 25 bp, Homo sapien
gatctgttaactgttctgatcgaga

SEQ ID NO: 5185034 - DNA, 25 bp, Homo sapien
gttctgatcgagatttatagcccat

SEQ ID NO: 5185035 - DNA, 25 bp, Homo sapien
tttcagagcgatctgttaactgttc

SEQ ID NO: 5185036 - DNA, 25 bp, Homo sapien
aaagagagatagatagacacttatt

SEQ ID NO: 5185037 - DNA, 25 bp, Homo sapien
gatagatagacacttattataagta

SEQ ID NO: 5185038 - DNA, 25 bp, Homo sapien
gagagatagatagacacttattata

SEQ ID NO: 5185039 - DNA, 25 bp, Homo sapien
ctggaacacaagattaaataatgga

SEQ ID NO: 5185040 - DNA, 25 bp, Homo sapien
ctctaatacacgctgaacatcaaca

SEQ ID NO: 5185041 - DNA, 25 bp, Homo sapien
tctggtctgcatcaaacttatgaaa

SEQ ID NO: 5185042 - DNA, 25 bp, Homo sapien
ttctggtctgcatcaaacttatgaa

SEQ ID NO: 5185043 - DNA, 25 bp, Homo sapien
tattacttgtagaaaaccctagatg

SEQ ID NO: 5185044 - DNA, 25 bp, Homo sapien
tatattcttctagtatcagaggctg

SEQ ID NO: 5185045 - DNA, 25 bp, Homo sapien
ccctagatgagaaaaacatctaata

SEQ ID NO: 5185046 - DNA, 25 bp, Homo sapien
tttatattcttctagtatcagaggc

SEQ ID NO: 5185047 - DNA, 25 bp, Homo sapien
aatttcatggagtgtattttcatcc

SEQ ID NO: 5185048 - DNA, 25 bp, Homo sapien
gaatttcatggagtgtattttcatc

SEQ ID NO: 5185049 - DNA, 25 bp, Homo sapien
tagaatttcatggagtgtattttca

SEQ ID NO: 5185050 - DNA, 25 bp, Homo sapien
atttagaatttcatggagtgtattt

SEQ ID NO: 5185051 - DNA, 25 bp, Homo sapien
aatatactttacatctgaggaatga

SEQ ID NO: 5185052 - DNA, 25 bp, Homo sapien
gctaacacaactgacaaagctagag

SEQ ID NO: 5185053 - DNA, 25 bp, Homo sapien
gccatagacagtatatgatgtgcca

SEQ ID NO: 5185054 - DNA, 25 bp, Homo sapien
tgctgacatctaaagacggaacaat

SEQ ID NO: 5185055 - DNA, 25 bp, Homo sapien
tgtacttgacaacttcgagtcccct

SEQ ID NO: 5185056 - DNA, 25 bp, Homo sapien
ttgaaattacatgcaggcagcgggc

SEQ ID NO: 5185057 - DNA, 25 bp, Homo sapien
gaattaaaagcactctacagcccag

SEQ ID NO: 5185058 - DNA, 25 bp, Homo sapien
tggacccagagatctaccttaagaa

SEQ ID NO: 5185059 - DNA, 25 bp, Homo sapien
aacagattcagaacgcaggccaact

SEQ ID NO: 5185060 - DNA, 25 bp, Homo sapien
aaatatgcaacagattcagaacgca

SEQ ID NO: 5185061 - DNA, 25 bp, Homo sapien
gattcagaacgcaggccaacttact

SEQ ID NO: 5185062 - DNA, 25 bp, Homo sapien
aacgcaggccaacttactctcttct

SEQ ID NO: 5185063 - DNA, 25 bp, Homo sapien
tcattagtatagcaagccggcttcc

SEQ ID NO: 5185064 - DNA, 25 bp, Homo sapien
aatcctccacaactacggtccactg

SEQ ID NO: 5185065 - DNA, 25 bp, Homo sapien
agcaagccggcttccagataccctt

SEQ ID NO: 5185066 - DNA, 25 bp, Homo sapien
gttttcattagtatagcaagccggc

SEQ ID NO: 5185067 - DNA, 25 bp, Homo sapien
gctatctgtatgcatgtcacaaaat

SEQ ID NO: 5185068 - DNA, 25 bp, Homo sapien
aaaaggcagctatccacattcatta

SEQ ID NO: 5185069 - DNA, 25 bp, Homo sapien
tcacatctaacaggtcacaaaacag

SEQ ID NO: 5185070 - DNA, 25 bp, Homo sapien
tggcaaatacaccaacaccttaaag

SEQ ID NO: 5185071 - DNA, 25 bp, Homo sapien
tgtctataagcttaatttctccaga

SEQ ID NO: 5185072 - DNA, 25 bp, Homo sapien
catgctgtctataagcttaatttct

SEQ ID NO: 5185073 - DNA, 25 bp, Homo sapien
aatttctccagaaacatgatcattt

SEQ ID NO: 5185074 - DNA, 25 bp, Homo sapien
aacacatgctgtctataagcttaat

SEQ ID NO: 5185075 - DNA, 25 bp, Homo sapien
gaagtggcaagcgtctaaaacctca

SEQ ID NO: 5185076 - DNA, 25 bp, Homo sapien
catgatggatatgaggcagacaacc

SEQ ID NO: 5185077 - DNA, 25 bp, Homo sapien
tacattgtgacatacaggctcagaa

SEQ ID NO: 5185078 - DNA, 25 bp, Homo sapien
tgcccgggccctactgtaacagaat

SEQ ID NO: 5185079 - DNA, 25 bp, Homo sapien
aaacatcgcaagttatagcatcatt

SEQ ID NO: 5185080 - DNA, 25 bp, Homo sapien
aaaggttgacatgatgcaaacatcg

SEQ ID NO: 5185081 - DNA, 25 bp, Homo sapien
agcatcattgactttaatattacat

SEQ ID NO: 5185082 - DNA, 25 bp, Homo sapien
cactccttcaaaaaggttgacatga

SEQ ID NO: 5185083 - DNA, 25 bp, Homo sapien
aaacatgcggtgtgtatatccactc

SEQ ID NO: 5185084 - DNA, 25 bp, Homo sapien
gcactgagcttacacttgctattta

SEQ ID NO: 5185085 - DNA, 25 bp, Homo sapien
gcatgcagctcattctgtgtatcaa

SEQ ID NO: 5185086 - DNA, 25 bp, Homo sapien
acaataacccaacatgatacataaa

SEQ ID NO: 5185087 - DNA, 25 bp, Homo sapien
cagtgtgcctgggaacgcttaggct

SEQ ID NO: 5185088 - DNA, 25 bp, Homo sapien
aagtcatgccctaaaggctacagca

SEQ ID NO: 5185089 - DNA, 25 bp, Homo sapien
ggcaaccctgcactaacttgacatg

SEQ ID NO: 5185090 - DNA, 25 bp, Homo sapien
tcagagcatttatcaacacttggca

SEQ ID NO: 5185091 - DNA, 25 bp, Homo sapien
ggtcattacgtttagatcacttaga

SEQ ID NO: 5185092 - DNA, 25 bp, Homo sapien
gggaagacgtgactatttactttga

SEQ ID NO: 5185093 - DNA, 25 bp, Homo sapien
tgtttaagagggcattaaggtcagg

SEQ ID NO: 5185094 - DNA, 25 bp, Homo sapien
gatttacagcttctcaacttggata

SEQ ID NO: 5185095 - DNA, 25 bp, Homo sapien
aacatggtacaccataattttgcca

SEQ ID NO: 5185096 - DNA, 25 bp, Homo sapien
gggttctgactcttatagtctttcc

SEQ ID NO: 5185097 - DNA, 25 bp, Homo sapien
atttgtctgcaataaggatggcaaa

SEQ ID NO: 5185098 - DNA, 25 bp, Homo sapien
gcaaatgattcatgggataaaatga

SEQ ID NO: 5185099 - DNA, 25 bp, Homo sapien
ttatttaaagaatttggcactcttc

SEQ ID NO: 5185100 - DNA, 25 bp, Homo sapien
taaattcttcacagtaccagaggaa

SEQ ID NO: 5185101 - DNA, 25 bp, Homo sapien
tttgattagcctgctgtaaaatcag

SEQ ID NO: 5185102 - DNA, 25 bp, Homo sapien
cagaatgtactttaatatcaagcta

SEQ ID NO: 5185103 - DNA, 25 bp, Homo sapien
ggaatgcaactttggccagggtgac

SEQ ID NO: 5185104 - DNA, 25 bp, Homo sapien
aatttggtatccattagagggcagc

SEQ ID NO: 5185105 - DNA, 25 bp, Homo sapien
ggtgactccgcacaattagtacgag

SEQ ID NO: 5185106 - DNA, 25 bp, Homo sapien
cagtaatgggatgatgcaggagccc

SEQ ID NO: 5185107 - DNA, 25 bp, Homo sapien
aacatacagcatatcgtcttaatac

SEQ ID NO: 5185108 - DNA, 25 bp, Homo sapien
tgccagtggctgataaaacatacag

SEQ ID NO: 5185109 - DNA, 25 bp, Homo sapien
tatcgtcttaatacagcacttacac

SEQ ID NO: 5185110 - DNA, 25 bp, Homo sapien
tgtcttttgaactaggtgccagtgg

SEQ ID NO: 5185111 - DNA, 25 bp, Homo sapien
ttcattttctgcaacagtcaggagt

SEQ ID NO: 5185112 - DNA, 25 bp, Homo sapien
ctggatagctaggaagttaaggtgc

SEQ ID NO: 5185113 - DNA, 25 bp, Homo sapien
ttgtactctcagtccaatagtgggt

SEQ ID NO: 5185114 - DNA, 25 bp, Homo sapien
tccaagatgtgttgctctcccaagc

SEQ ID NO: 5185115 - DNA, 25 bp, Homo sapien
aagtccaacttgcaaaactgtgtag

SEQ ID NO: 5185116 - DNA, 25 bp, Homo sapien
aacagcaagtccaacttgcaaaact

SEQ ID NO: 5185117 - DNA, 25 bp, Homo sapien
aactgtgtagcattccgacgtaaga

SEQ ID NO: 5185118 - DNA, 25 bp, Homo sapien
cgacgtaagacatctctaagcagca

SEQ ID NO: 5185119 - DNA, 25 bp, Homo sapien
acagaaacactatacagatcctttg

SEQ ID NO: 5185120 - DNA, 25 bp, Homo sapien
tcctttggaacctcctgtgtgcaaa

SEQ ID NO: 5185121 - DNA, 25 bp, Homo sapien
agatcctttggaacctcctgtgtgc

SEQ ID NO: 5185122 - DNA, 25 bp, Homo sapien
aaacagaaacactatacagatcctt

SEQ ID NO: 5185123 - DNA, 25 bp, Homo sapien
acaacttcaggcttatgcttcaaaa

SEQ ID NO: 5185124 - DNA, 25 bp, Homo sapien
caggcttatgcttcaaaatggtgga

SEQ ID NO: 5185125 - DNA, 25 bp, Homo sapien
ctttcaataatgaggacagaatatt

SEQ ID NO: 5185126 - DNA, 25 bp, Homo sapien
gcttcaaaatggtggactcattgta

SEQ ID NO: 5185127 - DNA, 25 bp, Homo sapien
attaaaatgttacagagctcaaata

SEQ ID NO: 5185128 - DNA, 25 bp, Homo sapien
ttagaaactcaacataatcttagag

SEQ ID NO: 5185129 - DNA, 25 bp, Homo sapien
tttagaaactcaacataatcttaga

SEQ ID NO: 5185130 - DNA, 25 bp, Homo sapien
tagaaactcaacataatcttagaga

SEQ ID NO: 5185131 - DNA, 25 bp, Homo sapien
gcatacgctaatgaaaatcctcttg

SEQ ID NO: 5185132 - DNA, 25 bp, Homo sapien
tacaggaactcaatctcagtcaatg

SEQ ID NO: 5185133 - DNA, 25 bp, Homo sapien
gctttcatcaatttgcccgggcaac

SEQ ID NO: 5185134 - DNA, 25 bp, Homo sapien
cttatttcgtaaaccacatgcctgg

SEQ ID NO: 5185135 - DNA, 25 bp, Homo sapien
gattgaacatgctccccaagaaaca

SEQ ID NO: 5185136 - DNA, 25 bp, Homo sapien
tcacgactccatgtatctacttgaa

SEQ ID NO: 5185137 - DNA, 25 bp, Homo sapien
tcttcaactaggtaatgatgaccag

SEQ ID NO: 5185138 - DNA, 25 bp, Homo sapien
gaccagaatgcggtgtgatcagaat

SEQ ID NO: 5185139 - DNA, 25 bp, Homo sapien
tatctgcaaggtctgtgcagagccc

SEQ ID NO: 5185140 - DNA, 25 bp, Homo sapien
gcgtgcacagatgaggtatctgcaa

SEQ ID NO: 5185141 - DNA, 25 bp, Homo sapien
gcagagcccttgtgtattggcattg

SEQ ID NO: 5185142 - DNA, 25 bp, Homo sapien
tctttgctgaactaactgggatgaa

SEQ ID NO: 5185143 - DNA, 25 bp, Homo sapien
agtttcttcagccagtcgtaaagaa

SEQ ID NO: 5185144 - DNA, 25 bp, Homo sapien
gaatacggctaagtaatttactcgc

SEQ ID NO: 5185145 - DNA, 25 bp, Homo sapien
ccagtcgtaaagaagaatacggcta

SEQ ID NO: 5185146 - DNA, 25 bp, Homo sapien
tactcgcaaatgatggttgtaagcc

SEQ ID NO: 5185147 - DNA, 25 bp, Homo sapien
ttatggctgctcagtgccatcagag

SEQ ID NO: 5185148 - DNA, 25 bp, Homo sapien
ggctgctcagtgccatcagagcacc

SEQ ID NO: 5185149 - DNA, 25 bp, Homo sapien
cagtgccatcagagcacctcctagg

SEQ ID NO: 5185150 - DNA, 25 bp, Homo sapien
gctcagtgccatcagagcacctcct

SEQ ID NO: 5185151 - DNA, 25 bp, Homo sapien
ttctcttatcttcctgtaaaaacat

SEQ ID NO: 5185152 - DNA, 25 bp, Homo sapien
cttctcttatcttcctgtaaaaaca

SEQ ID NO: 5185153 - DNA, 25 bp, Homo sapien
ccataagtcatctcttactagcttc

SEQ ID NO: 5185154 - DNA, 25 bp, Homo sapien
aaaacattcttgagttcaaggacat

SEQ ID NO: 5185155 - DNA, 25 bp, Homo sapien
gcaagcagggcccataagtcatctc

SEQ ID NO: 5185156 - DNA, 25 bp, Homo sapien
aaggacatttttagcaagcagggcc

SEQ ID NO: 5185157 - DNA, 25 bp, Homo sapien
ctttatcagcttttggcttttccat

SEQ ID NO: 5185158 - DNA, 25 bp, Homo sapien
catggcacccgttttagttatttct

SEQ ID NO: 5185159 - DNA, 25 bp, Homo sapien
ttgtcgttgttgttaagaggtctct

SEQ ID NO: 5185160 - DNA, 25 bp, Homo sapien
tctgagagtcagaagcacaattaaa

SEQ ID NO: 5185161 - DNA, 25 bp, Homo sapien
aagggagagacaatcatggcacccg

SEQ ID NO: 5185162 - DNA, 25 bp, Homo sapien
gagtatttttcaaagccaagtgctg

SEQ ID NO: 5185163 - DNA, 25 bp, Homo sapien
ttgagtatttttcaaagccaagtgc

SEQ ID NO: 5185164 - DNA, 25 bp, Homo sapien
agtatttttcaaagccaagtgctgg

SEQ ID NO: 5185165 - DNA, 25 bp, Homo sapien
tgagtatttttcaaagccaagtgct

SEQ ID NO: 5185166 - DNA, 25 bp, Homo sapien
caaagagtcgttccgtcaccctgca

SEQ ID NO: 5185167 - DNA, 25 bp, Homo sapien
tgctaatgagatcctccatttaatt

SEQ ID NO: 5185168 - DNA, 25 bp, Homo sapien
gagtcgttccgtcaccctgcagcct

SEQ ID NO: 5185169 - DNA, 25 bp, Homo sapien
gctaatgagatcctccatttaatta

SEQ ID NO: 5185170 - DNA, 25 bp, Homo sapien
tcttttaagatcagagtccctatgc

SEQ ID NO: 5185171 - DNA, 25 bp, Homo sapien
aaagcggtcttttctcattagtcac

SEQ ID NO: 5185172 - DNA, 25 bp, Homo sapien
tgattcttatttgcagaccagggct

SEQ ID NO: 5185173 - DNA, 25 bp, Homo sapien
tggtgagcatagaatcataaagcgg

SEQ ID NO: 5185174 - DNA, 25 bp, Homo sapien
ttgatggcagcggatctcctgggtc

SEQ ID NO: 5185175 - DNA, 25 bp, Homo sapien
attgatggcagcggatctcctgggt

SEQ ID NO: 5185176 - DNA, 25 bp, Homo sapien
tggcattcaaaggttgagtagtccc

SEQ ID NO: 5185177 - DNA, 25 bp, Homo sapien
caaaggttgagtagtcccatggagg

SEQ ID NO: 5185178 - DNA, 25 bp, Homo sapien
agtgatggcattcaaaggttgagta

SEQ ID NO: 5185179 - DNA, 25 bp, Homo sapien
agtagtcccatggagggccctggca

SEQ ID NO: 5185180 - DNA, 25 bp, Homo sapien
tgtagtttcacgacaaagaaagatg

SEQ ID NO: 5185181 - DNA, 25 bp, Homo sapien
tctcttttaggccacagagatttaa

SEQ ID NO: 5185182 - DNA, 25 bp, Homo sapien
cacagagatttaagggcaattgtaa

SEQ ID NO: 5185183 - DNA, 25 bp, Homo sapien
tcctccgccagctgtagtttcacga

SEQ ID NO: 5185184 - DNA, 25 bp, Homo sapien
ataagcaaggctttacaacgggatt

SEQ ID NO: 5185185 - DNA, 25 bp, Homo sapien
taagcaaggctttacaacgggattc

SEQ ID NO: 5185186 - DNA, 25 bp, Homo sapien
cataagcaaggctttacaacgggat

SEQ ID NO: 5185187 - DNA, 25 bp, Homo sapien
tcataagcaaggctttacaacggga

SEQ ID NO: 5185188 - DNA, 25 bp, Homo sapien
gatggataaaccacccaagcatggt

SEQ ID NO: 5185189 - DNA, 25 bp, Homo sapien
gagcagtacatgagttgttgatgga

SEQ ID NO: 5185190 - DNA, 25 bp, Homo sapien
aaacagatatcaatttttatggagc

SEQ ID NO: 5185191 - DNA, 25 bp, Homo sapien
catggttaaagagagcctaatctcc

SEQ ID NO: 5185192 - DNA, 25 bp, Homo sapien
ccatcctcaggaacctgtttggggt

SEQ ID NO: 5185193 - DNA, 25 bp, Homo sapien
catcctcaggaacctgtttggggtt

SEQ ID NO: 5185194 - DNA, 25 bp, Homo sapien
caccatcctcaggaacctgtttggg

SEQ ID NO: 5185195 - DNA, 25 bp, Homo sapien
accatcctcaggaacctgtttgggg

SEQ ID NO: 5185196 - DNA, 25 bp, Homo sapien
gatctgagctgcgaaatgacaacac

SEQ ID NO: 5185197 - DNA, 25 bp, Homo sapien
gaacaaatctgttatgactgaccac

SEQ ID NO: 5185198 - DNA, 25 bp, Homo sapien
ccatcttgcaaaacagtgtggctta

SEQ ID NO: 5185199 - DNA, 25 bp, Homo sapien
tgtcctcagatcaatgccgcatgtg

SEQ ID NO: 5185200 - DNA, 25 bp, Homo sapien
aacatgacacattttaacggataaa

SEQ ID NO: 5185201 - DNA, 25 bp, Homo sapien
cacattttaacggataaacaatcac

SEQ ID NO: 5185202 - DNA, 25 bp, Homo sapien
tacttctttcctacaatatacatct

SEQ ID NO: 5185203 - DNA, 25 bp, Homo sapien
ccaagtagccattgtttaacatgac

SEQ ID NO: 5185204 - DNA, 25 bp, Homo sapien
tttggtcccatgtagttgcatcatt

SEQ ID NO: 5185205 - DNA, 25 bp, Homo sapien
cattggaggatctcagctcatacac

SEQ ID NO: 5185206 - DNA, 25 bp, Homo sapien
ttggaggatctcagctcatacacag

SEQ ID NO: 5185207 - DNA, 25 bp, Homo sapien
catgtagttgcatcattggaggatc

SEQ ID NO: 5185208 - DNA, 25 bp, Homo sapien
tgttaagtccccaacttcattaaca

SEQ ID NO: 5185209 - DNA, 25 bp, Homo sapien
agtccccaacttcattaacattctg

SEQ ID NO: 5185210 - DNA, 25 bp, Homo sapien
caagatgttaagtccccaacttcat

SEQ ID NO: 5185211 - DNA, 25 bp, Homo sapien
tccccaacttcattaacattctgca

SEQ ID NO: 5185212 - DNA, 25 bp, Homo sapien
gatctgctcatcctgacagtgcgca

SEQ ID NO: 5185213 - DNA, 25 bp, Homo sapien
cagtgcgcactgtggttacatattg

SEQ ID NO: 5185214 - DNA, 25 bp, Homo sapien
catattgttctagcctgagggaacc

SEQ ID NO: 5185215 - DNA, 25 bp, Homo sapien
cagatttattgtacctatcatacca

SEQ ID NO: 5185216 - DNA, 25 bp, Homo sapien
agtggttagacttgtggtcgccctt

SEQ ID NO: 5185217 - DNA, 25 bp, Homo sapien
cgcccttgtccaaactgttgtctag

SEQ ID NO: 5185218 - DNA, 25 bp, Homo sapien
tgtggtcgcccttgtccaaactgtt

SEQ ID NO: 5185219 - DNA, 25 bp, Homo sapien
tagacttgtggtcgcccttgtccaa

SEQ ID NO: 5185220 - DNA, 25 bp, Homo sapien
ctatcccttcaaaagctttctcttt

SEQ ID NO: 5185221 - DNA, 25 bp, Homo sapien
tatcccttcaaaagctttctcttta

SEQ ID NO: 5185222 - DNA, 25 bp, Homo sapien
agtggtagagactactgtttcttaa

SEQ ID NO: 5185223 - DNA, 25 bp, Homo sapien
tatgtaagaagctacacaggattaa

SEQ ID NO: 5185224 - DNA, 25 bp, Homo sapien
gaagtattagcaatagttgtctttg

SEQ ID NO: 5185225 - DNA, 25 bp, Homo sapien
tgtctttggcaagtggtagagacta

SEQ ID NO: 5185226 - DNA, 25 bp, Homo sapien
aatatttcaaggtatgtgctctgtg

SEQ ID NO: 5185227 - DNA, 25 bp, Homo sapien
atatttcaaggtatgtgctctgtgt

SEQ ID NO: 5185228 - DNA, 25 bp, Homo sapien
aaatatttcaaggtatgtgctctgt

SEQ ID NO: 5185229 - DNA, 25 bp, Homo sapien
gaaggtctccttatatgcattctta

SEQ ID NO: 5185230 - DNA, 25 bp, Homo sapien
ccattgaaggtctccttatatgcat

SEQ ID NO: 5185231 - DNA, 25 bp, Homo sapien
gcattcttatactcaagccaaacca

SEQ ID NO: 5185232 - DNA, 25 bp, Homo sapien
atgcattcttatactcaagccaaac

SEQ ID NO: 5185233 - DNA, 25 bp, Homo sapien
gtgatggatactgggttttgcaaag

SEQ ID NO: 5185234 - DNA, 25 bp, Homo sapien
tggatactgggttttgcaaagccat

SEQ ID NO: 5185235 - DNA, 25 bp, Homo sapien
ctccttggtatgtgatggatactgg

SEQ ID NO: 5185236 - DNA, 25 bp, Homo sapien
cttggtatgtgatggatactgggtt

SEQ ID NO: 5185237 - DNA, 25 bp, Homo sapien
catgtctaaccgaagaaacaggttc

SEQ ID NO: 5185238 - DNA, 25 bp, Homo sapien
tcagctccaaaaggtccaagcaaaa

SEQ ID NO: 5185239 - DNA, 25 bp, Homo sapien
aaaagcatgtctaaccgaagaaaca

SEQ ID NO: 5185240 - DNA, 25 bp, Homo sapien
caggttctttgtgtgactatggtca

SEQ ID NO: 5185241 - DNA, 25 bp, Homo sapien
caagttctgcatgctatttggaggc

SEQ ID NO: 5185242 - DNA, 25 bp, Homo sapien
gcttcgaagcatactgatactgtag

SEQ ID NO: 5185243 - DNA, 25 bp, Homo sapien
gagacatccatttgatagtgacaga

SEQ ID NO: 5185244 - DNA, 25 bp, Homo sapien
tacaacttagagaggtgccactgga

SEQ ID NO: 5185245 - DNA, 25 bp, Homo sapien
tgtgtgcccctcgaatcctgccatt

SEQ ID NO: 5185246 - DNA, 25 bp, Homo sapien
gaattgcttttgccacctgtgtgcc

SEQ ID NO: 5185247 - DNA, 25 bp, Homo sapien
cctgccattggaagattagcttcct

SEQ ID NO: 5185248 - DNA, 25 bp, Homo sapien
tggtggcagacctatagaattgctt

SEQ ID NO: 5185249 - DNA, 25 bp, Homo sapien
ttgtgaagttcatggagatcagact

SEQ ID NO: 5185250 - DNA, 25 bp, Homo sapien
gtgaagttcatggagatcagacttg

SEQ ID NO: 5185251 - DNA, 25 bp, Homo sapien
cattgtgaagttcatggagatcaga

SEQ ID NO: 5185252 - DNA, 25 bp, Homo sapien
gaagttcatggagatcagacttgtt

SEQ ID NO: 5185253 - DNA, 25 bp, Homo sapien
ttgtttatatctagtggaatataac

SEQ ID NO: 5185254 - DNA, 25 bp, Homo sapien
gttcagtctaactaatgcatcagga

SEQ ID NO: 5185255 - DNA, 25 bp, Homo sapien
cataacatgataaagtgggtccatt

SEQ ID NO: 5185256 - DNA, 25 bp, Homo sapien
tgcatcaggactatctattccactg

SEQ ID NO: 5185257 - DNA, 25 bp, Homo sapien
cacaattttagggattctttccatg

SEQ ID NO: 5185258 - DNA, 25 bp, Homo sapien
atgatcactcttgttttgataactc

SEQ ID NO: 5185259 - DNA, 25 bp, Homo sapien
aatttttgtaaccaagcactatcag

SEQ ID NO: 5185260 - DNA, 25 bp, Homo sapien
tgtaaccaagcactatcagattatc

SEQ ID NO: 5185261 - DNA, 25 bp, Homo sapien
tatcagattatcattgaacaaatag

SEQ ID NO: 5185262 - DNA, 25 bp, Homo sapien
ccaagcactatcagattatcattga

SEQ ID NO: 5185263 - DNA, 25 bp, Homo sapien
tgtatttctggaaattccgtggcag

SEQ ID NO: 5185264 - DNA, 25 bp, Homo sapien
tccgtggcagaaacttgggatcttt

SEQ ID NO: 5185265 - DNA, 25 bp, Homo sapien
tttcgggttcttcagtcaaagagta

SEQ ID NO: 5185266 - DNA, 25 bp, Homo sapien
ggttcttcagtcaaagagtaacata

SEQ ID NO: 5185267 - DNA, 25 bp, Homo sapien
tgctacaattggttcagaggcttga

SEQ ID NO: 5185268 - DNA, 25 bp, Homo sapien
tgagctagcactggtcagggcacag

SEQ ID NO: 5185269 - DNA, 25 bp, Homo sapien
tatcacctcatgaacgcagatccct

SEQ ID NO: 5185270 - DNA, 25 bp, Homo sapien
cataaatgaatggtgttcggccttg

SEQ ID NO: 5185271 - DNA, 25 bp, Homo sapien
tctaagcctttattcttggtgagtt

SEQ ID NO: 5185272 - DNA, 25 bp, Homo sapien
ttttctaagcctttattcttggtga

SEQ ID NO: 5185273 - DNA, 25 bp, Homo sapien
tttctaagcctttattcttggtgag

SEQ ID NO: 5185274 - DNA, 25 bp, Homo sapien
ttctaagcctttattcttggtgagt

SEQ ID NO: 5185275 - DNA, 25 bp, Homo sapien
tgctgcagtagaagcatagaatctg

SEQ ID NO: 5185276 - DNA, 25 bp, Homo sapien
tttggatgcctggaggccactgaga

SEQ ID NO: 5185277 - DNA, 25 bp, Homo sapien
cgctgacagggagctggcatagttt

SEQ ID NO: 5185278 - DNA, 25 bp, Homo sapien
ccagagggattgaaggatcacgaac

SEQ ID NO: 5185279 - DNA, 25 bp, Homo sapien
tttggattctgttgtagcaagctgg

SEQ ID NO: 5185280 - DNA, 25 bp, Homo sapien
tccatttggattctgttgtagcaag

SEQ ID NO: 5185281 - DNA, 25 bp, Homo sapien
aattccatttggattctgttgtagc

SEQ ID NO: 5185282 - DNA, 25 bp, Homo sapien
tggattctgttgtagcaagctgggc

SEQ ID NO: 5185283 - DNA, 25 bp, Homo sapien
cctctttggataccgctctggctct

SEQ ID NO: 5185284 - DNA, 25 bp, Homo sapien
ttggataccgctctggctcttccat

SEQ ID NO: 5185285 - DNA, 25 bp, Homo sapien
tctttggataccgctctggctcttc

SEQ ID NO: 5185286 - DNA, 25 bp, Homo sapien
gcctctttggataccgctctggctc

SEQ ID NO: 5185287 - DNA, 25 bp, Homo sapien
taaatgcttctaatatccagcataa

SEQ ID NO: 5185288 - DNA, 25 bp, Homo sapien
ctttatgtcagcaaacagattaaat

SEQ ID NO: 5185289 - DNA, 25 bp, Homo sapien
cagcaaacagattaaatgcttctaa

SEQ ID NO: 5185290 - DNA, 25 bp, Homo sapien
gcttctaatatccagcataatgaca

SEQ ID NO: 5185291 - DNA, 25 bp, Homo sapien
tggaggctctcaggaataaaagaga

SEQ ID NO: 5185292 - DNA, 25 bp, Homo sapien
gttctttaatatagcaaatgcaagc

SEQ ID NO: 5185293 - DNA, 25 bp, Homo sapien
gaatcaccttgtgtgcaacagagag

SEQ ID NO: 5185294 - DNA, 25 bp, Homo sapien
tcttttgtacatgagtaccatgaaa

SEQ ID NO: 5185295 - DNA, 25 bp, Homo sapien
gatcattaacagtggattcctacag

SEQ ID NO: 5185296 - DNA, 25 bp, Homo sapien
ccatcattggtcttgtggcagcaat

SEQ ID NO: 5185297 - DNA, 25 bp, Homo sapien
tttaggacaggtgtcaatgtctccc

SEQ ID NO: 5185298 - DNA, 25 bp, Homo sapien
tcacagcctagagtagtcccttgca

SEQ ID NO: 5185299 - DNA, 25 bp, Homo sapien
agcaagtatacaactgagtccaggg

SEQ ID NO: 5185300 - DNA, 25 bp, Homo sapien
tggttagacagacttcccaaggtaa

SEQ ID NO: 5185301 - DNA, 25 bp, Homo sapien
acctgttggacatatcaccctctga

SEQ ID NO: 5185302 - DNA, 25 bp, Homo sapien
tctgcagagttaacccacaatagga

SEQ ID NO: 5185303 - DNA, 25 bp, Homo sapien
ccacacatgcacaatgagtatgaat

SEQ ID NO: 5185304 - DNA, 25 bp, Homo sapien
tgcacaatgagtatgaatctcccac

SEQ ID NO: 5185305 - DNA, 25 bp, Homo sapien
cacatgcacaatgagtatgaatctc

SEQ ID NO: 5185306 - DNA, 25 bp, Homo sapien
cacaatgagtatgaatctcccacat

SEQ ID NO: 5185307 - DNA, 25 bp, Homo sapien
atctgctcaatgctaatatctgcac

SEQ ID NO: 5185308 - DNA, 25 bp, Homo sapien
ccttcttggaatcctagcttttcat

SEQ ID NO: 5185309 - DNA, 25 bp, Homo sapien
tggaatcctagcttttcatgacaaa

SEQ ID NO: 5185310 - DNA, 25 bp, Homo sapien
tcatgacaaattgaagagttcttgc

SEQ ID NO: 5185311 - DNA, 25 bp, Homo sapien
ccgtaggtgctccaaaagtagagat

SEQ ID NO: 5185312 - DNA, 25 bp, Homo sapien
cagtcccatgttcatctgctcgcag

SEQ ID NO: 5185313 - DNA, 25 bp, Homo sapien
tgctcgcaggacacgcacaattttc

SEQ ID NO: 5185314 - DNA, 25 bp, Homo sapien
tgtagaaagttagagccgtaggtgc

SEQ ID NO: 5185315 - DNA, 25 bp, Homo sapien
agattcattaatctgctgtgtagac

SEQ ID NO: 5185316 - DNA, 25 bp, Homo sapien
tctatacccaggatatccagtttta

SEQ ID NO: 5185317 - DNA, 25 bp, Homo sapien
gacttattacgatgtagtgaatgta

SEQ ID NO: 5185318 - DNA, 25 bp, Homo sapien
acatttccctacagactcaattaga

SEQ ID NO: 5185319 - DNA, 25 bp, Homo sapien
caaaaagcagtagtgctcccccccg

SEQ ID NO: 5185320 - DNA, 25 bp, Homo sapien
aagcagtagtgctcccccccggcca

SEQ ID NO: 5185321 - DNA, 25 bp, Homo sapien
gcagtagtgctcccccccggccaca

SEQ ID NO: 5185322 - DNA, 25 bp, Homo sapien
gcaaaaagcagtagtgctccccccc

SEQ ID NO: 5185323 - DNA, 25 bp, Homo sapien
caaaggccctgaagttagatgtgta

SEQ ID NO: 5185324 - DNA, 25 bp, Homo sapien
cagccaaggcccatgacgaaagttc

SEQ ID NO: 5185325 - DNA, 25 bp, Homo sapien
ctggcttgaagtcttgatcggctcc

SEQ ID NO: 5185326 - DNA, 25 bp, Homo sapien
tcttgatcggctccattgactgtgg

SEQ ID NO: 5185327 - DNA, 25 bp, Homo sapien
catgatctaaattaggctgtaattg

SEQ ID NO: 5185328 - DNA, 25 bp, Homo sapien
ctaaattaggctgtaattgttgatt

SEQ ID NO: 5185329 - DNA, 25 bp, Homo sapien
tgtagtctccatgatctaaattagg

SEQ ID NO: 5185330 - DNA, 25 bp, Homo sapien
ctagttgtagtctccatgatctaaa

SEQ ID NO: 5185331 - DNA, 25 bp, Homo sapien
tcatgtccaaagactgtgccaatgc

SEQ ID NO: 5185332 - DNA, 25 bp, Homo sapien
ttttcatgtccaaagactgtgccaa

SEQ ID NO: 5185333 - DNA, 25 bp, Homo sapien
catgattttcatgtccaaagactgt

SEQ ID NO: 5185334 - DNA, 25 bp, Homo sapien
tccttctccatgattttcatgtcca

SEQ ID NO: 5185335 - DNA, 25 bp, Homo sapien
caatctgggcacaagaatgtcacaa

SEQ ID NO: 5185336 - DNA, 25 bp, Homo sapien
tcttgggctcaataagtgtgtaagc

SEQ ID NO: 5185337 - DNA, 25 bp, Homo sapien
aaatttacagaggtactcaatgcag

SEQ ID NO: 5185338 - DNA, 25 bp, Homo sapien
tagctatgcacacctaatactcgtg

SEQ ID NO: 5185339 - DNA, 25 bp, Homo sapien
caatgcatatgtccactctgctggc

SEQ ID NO: 5185340 - DNA, 25 bp, Homo sapien
ctgtgtctgacaatcccagggtgaa

SEQ ID NO: 5185341 - DNA, 25 bp, Homo sapien
tgctggctctttttccgcaaagcca

SEQ ID NO: 5185342 - DNA, 25 bp, Homo sapien
tgcacagcgtgtgctatgctgcctt

SEQ ID NO: 5185343 - DNA, 25 bp, Homo sapien
ctcttcttgctgagtataagattct

SEQ ID NO: 5185344 - DNA, 25 bp, Homo sapien
tcttcttgctgagtataagattctt

SEQ ID NO: 5185345 - DNA, 25 bp, Homo sapien
ttcttgctgagtataagattcttct

SEQ ID NO: 5185346 - DNA, 25 bp, Homo sapien
cttcttgctgagtataagattcttc

SEQ ID NO: 5185347 - DNA, 25 bp, Homo sapien
tctgtaagctggttatcaggatctg

SEQ ID NO: 5185348 - DNA, 25 bp, Homo sapien
ttacaataggccttttgatggagtc

SEQ ID NO: 5185349 - DNA, 25 bp, Homo sapien
tagctgttgaaagatacccatatcc

SEQ ID NO: 5185350 - DNA, 25 bp, Homo sapien
tgagaggtcctaggagaatgcattg

SEQ ID NO: 5185351 - DNA, 25 bp, Homo sapien
gctgttgagatatgcatgctgtctg

SEQ ID NO: 5185352 - DNA, 25 bp, Homo sapien
acagccaagccagctactgagctct

SEQ ID NO: 5185353 - DNA, 25 bp, Homo sapien
gcatctgctgttgagatatgcatgc

SEQ ID NO: 5185354 - DNA, 25 bp, Homo sapien
ttgagatatgcatgctgtctgtgga

SEQ ID NO: 5185355 - DNA, 25 bp, Homo sapien
ctggaaacctactgctttacttcct

SEQ ID NO: 5185356 - DNA, 25 bp, Homo sapien
tacacatgtgtatacccatgaagcc

SEQ ID NO: 5185357 - DNA, 25 bp, Homo sapien
tcaagaaataaacgcatccactgca

SEQ ID NO: 5185358 - DNA, 25 bp, Homo sapien
gatatgcactaaattgcaaatttta

SEQ ID NO: 5185359 - DNA, 25 bp, Homo sapien
ctgtggctagaaattgtgtcccaaa

SEQ ID NO: 5185360 - DNA, 25 bp, Homo sapien
tatcatcatacctgttcagaatggg

SEQ ID NO: 5185361 - DNA, 25 bp, Homo sapien
ttcagaatggggtgagaactgccac

SEQ ID NO: 5185362 - DNA, 25 bp, Homo sapien
aatatcatcatacctgttcagaatg

SEQ ID NO: 5185363 - DNA, 25 bp, Homo sapien
cagaatggggtgagaactgccacca

SEQ ID NO: 5185364 - DNA, 25 bp, Homo sapien
tagacatcttatcaatagcttggtg

SEQ ID NO: 5185365 - DNA, 25 bp, Homo sapien
tttagacatcttatcaatagcttgg

SEQ ID NO: 5185366 - DNA, 25 bp, Homo sapien
ggtgatagtagcagaaacagagaaa

SEQ ID NO: 5185367 - DNA, 25 bp, Homo sapien
caatagcttggtgatagtagcagaa

SEQ ID NO: 5185368 - DNA, 25 bp, Homo sapien
cttctggcatatcatcaaccctttc

SEQ ID NO: 5185369 - DNA, 25 bp, Homo sapien
tctatgaaatacttctggcatatca

SEQ ID NO: 5185370 - DNA, 25 bp, Homo sapien
ttagttcataacgtgtagtcttctc

SEQ ID NO: 5185371 - DNA, 25 bp, Homo sapien
cataacgtgtagtcttctcttgtct

SEQ ID NO: 5185372 - DNA, 25 bp, Homo sapien
caacctattgtaggagcacctgttg

SEQ ID NO: 5185373 - DNA, 25 bp, Homo sapien
tcaacctattgtaggagcacctgtt

SEQ ID NO: 5185374 - DNA, 25 bp, Homo sapien
acctattgtaggagcacctgttgga

SEQ ID NO: 5185375 - DNA, 25 bp, Homo sapien
aacctattgtaggagcacctgttgg

SEQ ID NO: 5185376 - DNA, 25 bp, Homo sapien
tccagccgtagataacaatgccata

SEQ ID NO: 5185377 - DNA, 25 bp, Homo sapien
ctcctggttttccagccgtagataa

SEQ ID NO: 5185378 - DNA, 25 bp, Homo sapien
caatgccatacgtttgtttttatag

SEQ ID NO: 5185379 - DNA, 25 bp, Homo sapien
ggtgatattaggacttcgtggttgt

SEQ ID NO: 5185380 - DNA, 25 bp, Homo sapien
tgaccctgcaggtcttcttgttccc

SEQ ID NO: 5185381 - DNA, 25 bp, Homo sapien
ccctgcaggtcttcttgttcccagt

SEQ ID NO: 5185382 - DNA, 25 bp, Homo sapien
catgtcagttgaccctgcaggtctt

SEQ ID NO: 5185383 - DNA, 25 bp, Homo sapien
tcatgtcagttgaccctgcaggtct

SEQ ID NO: 5185384 - DNA, 25 bp, Homo sapien
ggctttatcgatgatgataaactga

SEQ ID NO: 5185385 - DNA, 25 bp, Homo sapien
cgatgatgataaactgagaaggaat

SEQ ID NO: 5185386 - DNA, 25 bp, Homo sapien
gatgataaactgagaaggaatgaca

SEQ ID NO: 5185387 - DNA, 25 bp, Homo sapien
atcgatgatgataaactgagaagga

SEQ ID NO: 5185388 - DNA, 25 bp, Homo sapien
ccattttaaaacgtggaggagaatg

SEQ ID NO: 5185389 - DNA, 25 bp, Homo sapien
cattttaaaacgtggaggagaatgc

SEQ ID NO: 5185390 - DNA, 25 bp, Homo sapien
tgtccattttaaaacgtggaggaga

SEQ ID NO: 5185391 - DNA, 25 bp, Homo sapien
attttaaaacgtggaggagaatgca

SEQ ID NO: 5185392 - DNA, 25 bp, Homo sapien
taaggattaagttaccttggtatga

SEQ ID NO: 5185393 - DNA, 25 bp, Homo sapien
ctaaggattaagttaccttggtatg

SEQ ID NO: 5185394 - DNA, 25 bp, Homo sapien
aaggattaagttaccttggtatgat

SEQ ID NO: 5185395 - DNA, 25 bp, Homo sapien
gtagtaccatggaatccttgataat

SEQ ID NO: 5185396 - DNA, 25 bp, Homo sapien
gtttctgtgtagtaccatggaatcc

SEQ ID NO: 5185397 - DNA, 25 bp, Homo sapien
atgtggtttctgtgtagtaccatgg

SEQ ID NO: 5185398 - DNA, 25 bp, Homo sapien
tctgtgtagtaccatggaatccttg

SEQ ID NO: 5185399 - DNA, 25 bp, Homo sapien
gctccctgtcgaaagcaactactta

SEQ ID NO: 5185400 - DNA, 25 bp, Homo sapien
tcccaagggtggaaagttgagtcag

SEQ ID NO: 5185401 - DNA, 25 bp, Homo sapien
gctttcaggaaactagctaccgtta

SEQ ID NO: 5185402 - DNA, 25 bp, Homo sapien
caaggtgacaccttcacaacggact

SEQ ID NO: 5185403 - DNA, 25 bp, Homo sapien
actggcagattttggcctggccaaa

SEQ ID NO: 5185404 - DNA, 25 bp, Homo sapien
catcaacattggatcctacataggg

SEQ ID NO: 5185405 - DNA, 25 bp, Homo sapien
tgacaccgtcacacatcaaagcctg

SEQ ID NO: 5185406 - DNA, 25 bp, Homo sapien
ctgcatgttgatgactcttcaagga

SEQ ID NO: 5185407 - DNA, 25 bp, Homo sapien
gttcttgcatgattgggttccccat

SEQ ID NO: 5185408 - DNA, 25 bp, Homo sapien
ctgttcttgcatgattgggttcccc

SEQ ID NO: 5185409 - DNA, 25 bp, Homo sapien
tgttcttgcatgattgggttcccca

SEQ ID NO: 5185410 - DNA, 25 bp, Homo sapien
gactgttcttgcatgattgggttcc

SEQ ID NO: 5185411 - DNA, 25 bp, Homo sapien
gagcccacacgttgtgaccacactg

SEQ ID NO: 5185412 - DNA, 25 bp, Homo sapien
cacacgttgtgaccacactgattgt

SEQ ID NO: 5185413 - DNA, 25 bp, Homo sapien
agggagcccacacgttgtgaccaca

SEQ ID NO: 5185414 - DNA, 25 bp, Homo sapien
cccaagggagcccacacgttgtgac

SEQ ID NO: 5185415 - DNA, 25 bp, Homo sapien
tatcacttgtcttgtctccgggagc

SEQ ID NO: 5185416 - DNA, 25 bp, Homo sapien
agcagagttgccagaaagtgacccc

SEQ ID NO: 5185417 - DNA, 25 bp, Homo sapien
gcgtggcatttcatagcagagcatc

SEQ ID NO: 5185418 - DNA, 25 bp, Homo sapien
gctggccctggctaagttctgataa

SEQ ID NO: 5185419 - DNA, 25 bp, Homo sapien
tcttccttgatgacccgagtgttga

SEQ ID NO: 5185420 - DNA, 25 bp, Homo sapien
ctcactgaatgagaggcggagagct

SEQ ID NO: 5185421 - DNA, 25 bp, Homo sapien
gatgacccgagtgttgatctcactg

SEQ ID NO: 5185422 - DNA, 25 bp, Homo sapien
gataaatgccaagactcgcccactt

SEQ ID NO: 5185423 - DNA, 25 bp, Homo sapien
gacagtggcactctatgtggagcaa

SEQ ID NO: 5185424 - DNA, 25 bp, Homo sapien
tctagccctccagttaaagcatggt

SEQ ID NO: 5185425 - DNA, 25 bp, Homo sapien
gggtgtgccctctcgtttgctactg

SEQ ID NO: 5185426 - DNA, 25 bp, Homo sapien
ggtgcgttccactgtcttcaggtaa

SEQ ID NO: 5185427 - DNA, 25 bp, Homo sapien
tccatgggggacaactacaggacgc

SEQ ID NO: 5185428 - DNA, 25 bp, Homo sapien
tggctctatccactgggatcaaatc

SEQ ID NO: 5185429 - DNA, 25 bp, Homo sapien
gggtcccttggagaaagtgtcacat

SEQ ID NO: 5185430 - DNA, 25 bp, Homo sapien
cgctaaggtagacattgaagtttcc

SEQ ID NO: 5185431 - DNA, 25 bp, Homo sapien
gatggctaagagatggaaaacgacc

SEQ ID NO: 5185432 - DNA, 25 bp, Homo sapien
acatacggctgttgagtaccttcac

SEQ ID NO: 5185433 - DNA, 25 bp, Homo sapien
gactttagattagagctgggccaac

SEQ ID NO: 5185434 - DNA, 25 bp, Homo sapien
taccttcacttatcagtgggccaag

SEQ ID NO: 5185435 - DNA, 25 bp, Homo sapien
gatccctggtggtagacccctgagt

SEQ ID NO: 5185436 - DNA, 25 bp, Homo sapien
tccaggatccctggtggtagacccc

SEQ ID NO: 5185437 - DNA, 25 bp, Homo sapien
aaagaagaggactacaaaaggactg

SEQ ID NO: 5185438 - DNA, 25 bp, Homo sapien
tatttatagtcaaggtgtttgggta

SEQ ID NO: 5185439 - DNA, 25 bp, Homo sapien
aaaggttgcagtaggatgctactcc

SEQ ID NO: 5185440 - DNA, 25 bp, Homo sapien
tattgcatgcattcctgtaagcagc

SEQ ID NO: 5185441 - DNA, 25 bp, Homo sapien
caatgagcagttgtgatatgacagt

SEQ ID NO: 5185442 - DNA, 25 bp, Homo sapien
tgctgacttcgaaaacttattatct

SEQ ID NO: 5185443 - DNA, 25 bp, Homo sapien
ctgggccagaatataagcagagcac

SEQ ID NO: 5185444 - DNA, 25 bp, Homo sapien
gccagaatataagcagagcacaaga

SEQ ID NO: 5185445 - DNA, 25 bp, Homo sapien
gaatataagcagagcacaagagatg

SEQ ID NO: 5185446 - DNA, 25 bp, Homo sapien
atataagcagagcacaagagatgtg

SEQ ID NO: 5185447 - DNA, 25 bp, Homo sapien
ggttattgtgaactagctgctctgc

SEQ ID NO: 5185448 - DNA, 25 bp, Homo sapien
ggaggttattgtgaactagctgctc

SEQ ID NO: 5185449 - DNA, 25 bp, Homo sapien
tattgtgaactagctgctctgcaca

SEQ ID NO: 5185450 - DNA, 25 bp, Homo sapien
ttgggaggttattgtgaactagctg

SEQ ID NO: 5185451 - DNA, 25 bp, Homo sapien
tctaccagcagaatctccttgatga

SEQ ID NO: 5185452 - DNA, 25 bp, Homo sapien
cactgtgaacagatctcaggagagt

SEQ ID NO: 5185453 - DNA, 25 bp, Homo sapien
aggagagcgattgatgacactgtga

SEQ ID NO: 5185454 - DNA, 25 bp, Homo sapien
tggaccacacttcatccacaaagca

SEQ ID NO: 5185455 - DNA, 25 bp, Homo sapien
cagcctggcccttattaagccatgt

SEQ ID NO: 5185456 - DNA, 25 bp, Homo sapien
ccgaacttttggaaactgggacatg

SEQ ID NO: 5185457 - DNA, 25 bp, Homo sapien
tgtctctctttgaggcgaagaatcc

SEQ ID NO: 5185458 - DNA, 25 bp, Homo sapien
ggaaactgggacatgtatttatcca

SEQ ID NO: 5185459 - DNA, 25 bp, Homo sapien
ccttgggcaaggatacatcgagaca

SEQ ID NO: 5185460 - DNA, 25 bp, Homo sapien
tgccagtctctgaattacattctct

SEQ ID NO: 5185461 - DNA, 25 bp, Homo sapien
catctctgctcaatgccagtctctg

SEQ ID NO: 5185462 - DNA, 25 bp, Homo sapien
actaatgctgctccaagtgtaggcc

SEQ ID NO: 5185463 - DNA, 25 bp, Homo sapien
caaccaaccaacgttacattccaca

SEQ ID NO: 5185464 - DNA, 25 bp, Homo sapien
ttccagaagaggttccaaccaacca

SEQ ID NO: 5185465 - DNA, 25 bp, Homo sapien
tatcattgatgacttcgattactgg

SEQ ID NO: 5185466 - DNA, 25 bp, Homo sapien
gatgacttcgattactggacaggcc

SEQ ID NO: 5185467 - DNA, 25 bp, Homo sapien
catctggaggaattgttctccaacc

SEQ ID NO: 5185468 - DNA, 25 bp, Homo sapien
tggaggaattgttctccaaccaaag

SEQ ID NO: 5185469 - DNA, 25 bp, Homo sapien
ttgttctccaaccaaagttcatggg

SEQ ID NO: 5185470 - DNA, 25 bp, Homo sapien
ggaattgttctccaaccaaagttca

SEQ ID NO: 5185471 - DNA, 25 bp, Homo sapien
cttcacttctttgcttggtggaata

SEQ ID NO: 5185472 - DNA, 25 bp, Homo sapien
tggaataattctgaaggcatcacac

SEQ ID NO: 5185473 - DNA, 25 bp, Homo sapien
ggtggaataattctgaaggcatcac

SEQ ID NO: 5185474 - DNA, 25 bp, Homo sapien
ttctttgcttggtggaataattctg

SEQ ID NO: 5185475 - DNA, 25 bp, Homo sapien
ctgtacatctgtacgggaggtagga

SEQ ID NO: 5185476 - DNA, 25 bp, Homo sapien
ttgcatctcatgaaagctcgacttt

SEQ ID NO: 5185477 - DNA, 25 bp, Homo sapien
tagctacctgatgcagggaagccct

SEQ ID NO: 5185478 - DNA, 25 bp, Homo sapien
ggcttaagtgatgcgatccctggat

SEQ ID NO: 5185479 - DNA, 25 bp, Homo sapien
aaggccagggtcgtatgttccaagt

SEQ ID NO: 5185480 - DNA, 25 bp, Homo sapien
cttgaatgagagctccatattttcc

SEQ ID NO: 5185481 - DNA, 25 bp, Homo sapien
cagggtcgtatgttccaagttcaaa

SEQ ID NO: 5185482 - DNA, 25 bp, Homo sapien
gaatgagagctccatattttcccca

SEQ ID NO: 5185483 - DNA, 25 bp, Homo sapien
ctcattatcgtaaagaaaagttggg

SEQ ID NO: 5185484 - DNA, 25 bp, Homo sapien
actcattatcgtaaagaaaagttgg

SEQ ID NO: 5185485 - DNA, 25 bp, Homo sapien
tcattatcgtaaagaaaagttggga

SEQ ID NO: 5185486 - DNA, 25 bp, Homo sapien
aactcattatcgtaaagaaaagttg

SEQ ID NO: 5185487 - DNA, 25 bp, Homo sapien
atttctgaatatatggcccactcgg

SEQ ID NO: 5185488 - DNA, 25 bp, Homo sapien
atatggcccactcgggagcagggaa

SEQ ID NO: 5185489 - DNA, 25 bp, Homo sapien
gaatatggattgtcatttctgaata

SEQ ID NO: 5185490 - DNA, 25 bp, Homo sapien
ggaaggaatatggattgtcatttct

SEQ ID NO: 5185491 - DNA, 25 bp, Homo sapien
ccctttgctgggtgaggttgccaac

SEQ ID NO: 5185492 - DNA, 25 bp, Homo sapien
cccttggtcgatgaggtggtctccg

SEQ ID NO: 5185493 - DNA, 25 bp, Homo sapien
tctccgtggccatagaacagctcct

SEQ ID NO: 5185494 - DNA, 25 bp, Homo sapien
caatgggagcccttaagtcaggaaa

SEQ ID NO: 5185495 - DNA, 25 bp, Homo sapien
caacattcgtcttctttccagtgct

SEQ ID NO: 5185496 - DNA, 25 bp, Homo sapien
accctgacaacattcgtcttctttc

SEQ ID NO: 5185497 - DNA, 25 bp, Homo sapien
cctgtcttagggctttacgtgacct

SEQ ID NO: 5185498 - DNA, 25 bp, Homo sapien
gtgcttggatggagaacactcacct

SEQ ID NO: 5185499 - DNA, 25 bp, Homo sapien
gactaatcatatctaaacccacgtg

SEQ ID NO: 5185500 - DNA, 25 bp, Homo sapien
taagcatgactgtctaagaacccca

SEQ ID NO: 5185501 - DNA, 25 bp, Homo sapien
cacgtgtcttaccatcctcttcaaa

SEQ ID NO: 5185502 - DNA, 25 bp, Homo sapien
tggcttagcttcttccctttggata

SEQ ID NO: 5185503 - DNA, 25 bp, Homo sapien
gtagctgccattctatttggaccca

SEQ ID NO: 5185504 - DNA, 25 bp, Homo sapien
catggtataatccactctcaagaag

SEQ ID NO: 5185505 - DNA, 25 bp, Homo sapien
ccaaaatgtctgataagttaccagg

SEQ ID NO: 5185506 - DNA, 25 bp, Homo sapien
ccaggttgagccacttaaagtagct

SEQ ID NO: 5185507 - DNA, 25 bp, Homo sapien
gactgtttgccagcagtttaatcca

SEQ ID NO: 5185508 - DNA, 25 bp, Homo sapien
ggctatttgccagcggtttaatcca

SEQ ID NO: 5185509 - DNA, 25 bp, Homo sapien
aaagggaaacggagctatagactgt

SEQ ID NO: 5185510 - DNA, 25 bp, Homo sapien
caatttaggaagtagacattccgca

SEQ ID NO: 5185511 - DNA, 25 bp, Homo sapien
taacaaagagctctaactcagggtg

SEQ ID NO: 5185512 - DNA, 25 bp, Homo sapien
gatttctcgaacagctgtgcagagc

SEQ ID NO: 5185513 - DNA, 25 bp, Homo sapien
taggacatgtcctgggaaagcctcc

SEQ ID NO: 5185514 - DNA, 25 bp, Homo sapien
tatgagctatgttccctgactgacc

SEQ ID NO: 5185515 - DNA, 25 bp, Homo sapien
tttcaatggaaatgcatttacccaa

SEQ ID NO: 5185516 - DNA, 25 bp, Homo sapien
ttgctcccatcgcagtcttccagaa

SEQ ID NO: 5185517 - DNA, 25 bp, Homo sapien
gaaatgcatttacccaaagccacat

SEQ ID NO: 5185518 - DNA, 25 bp, Homo sapien
tgctcccatcgcagtcttccagaat

SEQ ID NO: 5185519 - DNA, 25 bp, Homo sapien
catggatcatggatttggttatttc

SEQ ID NO: 5185520 - DNA, 25 bp, Homo sapien
ctaaccattgcgctctgagtttggg

SEQ ID NO: 5185521 - DNA, 25 bp, Homo sapien
tggcccgactccctctactaaccat

SEQ ID NO: 5185522 - DNA, 25 bp, Homo sapien
cagcactgtggaaggagtctctatt

SEQ ID NO: 5185523 - DNA, 25 bp, Homo sapien
tatgcagccattttagccctttgtt

SEQ ID NO: 5185524 - DNA, 25 bp, Homo sapien
gtttctgttatcacaagggtgcagc

SEQ ID NO: 5185525 - DNA, 25 bp, Homo sapien
ttacggctcctttatcagggatggg

SEQ ID NO: 5185526 - DNA, 25 bp, Homo sapien
ggatgggggctatacaccattctcc

SEQ ID NO: 5185527 - DNA, 25 bp, Homo sapien
cacttttgatatggcttcactgggt

SEQ ID NO: 5185528 - DNA, 25 bp, Homo sapien
tttgatatggcttcactgggtcaca

SEQ ID NO: 5185529 - DNA, 25 bp, Homo sapien
cttttgatatggcttcactgggtca

SEQ ID NO: 5185530 - DNA, 25 bp, Homo sapien
ccacttttgatatggcttcactggg

SEQ ID NO: 5185531 - DNA, 25 bp, Homo sapien
tttactatataaaaacatcagttac

SEQ ID NO: 5185532 - DNA, 25 bp, Homo sapien
atgggtttactatataaaaacatca

SEQ ID NO: 5185533 - DNA, 25 bp, Homo sapien
cacagtatttaatgggtttactata

SEQ ID NO: 5185534 - DNA, 25 bp, Homo sapien
actatataaaaacatcagttacact

SEQ ID NO: 5185535 - DNA, 25 bp, Homo sapien
tgatcattcctacttgtgggccaga

SEQ ID NO: 5185536 - DNA, 25 bp, Homo sapien
tgattctttgactaacttgcctggg

SEQ ID NO: 5185537 - DNA, 25 bp, Homo sapien
agcagatttgttcgggccagtgacc

SEQ ID NO: 5185538 - DNA, 25 bp, Homo sapien
tctagcatagggtggaaagcaggca

SEQ ID NO: 5185539 - DNA, 25 bp, Homo sapien
gcacctagcatgttcagtttgtcag

SEQ ID NO: 5185540 - DNA, 25 bp, Homo sapien
tacactcaagtttaggcccatatag

SEQ ID NO: 5185541 - DNA, 25 bp, Homo sapien
gcaatgacctaagctaatccaggga

SEQ ID NO: 5185542 - DNA, 25 bp, Homo sapien
cagaagaccgagtagcatgtatacc

SEQ ID NO: 5185543 - DNA, 25 bp, Homo sapien
aagaaagatggtactctctggcatg

SEQ ID NO: 5185544 - DNA, 25 bp, Homo sapien
tacaacatccaaaagaggccaaagg

SEQ ID NO: 5185545 - DNA, 25 bp, Homo sapien
caactgtgtcagcttacaagagagt

SEQ ID NO: 5185546 - DNA, 25 bp, Homo sapien
tcttacttgtgggatgaccttgggc

SEQ ID NO: 5185547 - DNA, 25 bp, Homo sapien
tccattaggttgaaaacagaggcat

SEQ ID NO: 5185548 - DNA, 25 bp, Homo sapien
tgttcaagatgagcaatctgctagc

SEQ ID NO: 5185549 - DNA, 25 bp, Homo sapien
tcacataaacttgcaaagcgactct

SEQ ID NO: 5185550 - DNA, 25 bp, Homo sapien
tcttgtagcaactattgagtaaccc

SEQ ID NO: 5185551 - DNA, 25 bp, Homo sapien
tatgttgtgaatagaaactcttgat

SEQ ID NO: 5185552 - DNA, 25 bp, Homo sapien
tatgtttttgagtggtcacttaaaa

SEQ ID NO: 5185553 - DNA, 25 bp, Homo sapien
tattatatagatgcttatgaccaat

SEQ ID NO: 5185554 - DNA, 25 bp, Homo sapien
taaaaatctattcatgctatgaaaa

SEQ ID NO: 5185555 - DNA, 25 bp, Homo sapien
caatgacatgggtagtagtaagcag

SEQ ID NO: 5185556 - DNA, 25 bp, Homo sapien
gatgcatcttaacacgaacaacttg

SEQ ID NO: 5185557 - DNA, 25 bp, Homo sapien
gaacatgagataactgagccaggca

SEQ ID NO: 5185558 - DNA, 25 bp, Homo sapien
tagtagctaactgccagcacaggag

SEQ ID NO: 5185559 - DNA, 25 bp, Homo sapien
catcttacacgaaagccacagagtt

SEQ ID NO: 5185560 - DNA, 25 bp, Homo sapien
attctttggcattggtgtccatggc

SEQ ID NO: 5185561 - DNA, 25 bp, Homo sapien
tgatggttggccatttgagtctttg

SEQ ID NO: 5185562 - DNA, 25 bp, Homo sapien
ctcaggtaacataatggtgatggtt

SEQ ID NO: 5185563 - DNA, 25 bp, Homo sapien
ggattcaaccgcacatcatgacaga

SEQ ID NO: 5185564 - DNA, 25 bp, Homo sapien
gcaagagcaggtatcttatcaagga

SEQ ID NO: 5185565 - DNA, 25 bp, Homo sapien
gatgttccggctacatttacccagg

SEQ ID NO: 5185566 - DNA, 25 bp, Homo sapien
tgctcatggctcctggcagatctga

SEQ ID NO: 5185567 - DNA, 25 bp, Homo sapien
cgtaggaagctcgatccttagactc

SEQ ID NO: 5185568 - DNA, 25 bp, Homo sapien
ctatgccgtaggaagctcgatcctt

SEQ ID NO: 5185569 - DNA, 25 bp, Homo sapien
tgccgtaggaagctcgatccttaga

SEQ ID NO: 5185570 - DNA, 25 bp, Homo sapien
aggaagctcgatccttagactctga

SEQ ID NO: 5185571 - DNA, 25 bp, Homo sapien
gtagggggcgtctgctaaatcgaca

SEQ ID NO: 5185572 - DNA, 25 bp, Homo sapien
catcaactctgccagtagggggcgt

SEQ ID NO: 5185573 - DNA, 25 bp, Homo sapien
gctgtccgtaaacagccaggagggt

SEQ ID NO: 5185574 - DNA, 25 bp, Homo sapien
agatccacctccacacgaataatat

SEQ ID NO: 5185575 - DNA, 25 bp, Homo sapien
tgtcgtctttgagcaagccaaaagg

SEQ ID NO: 5185576 - DNA, 25 bp, Homo sapien
ttttcctctagatggaatcttgtcg

SEQ ID NO: 5185577 - DNA, 25 bp, Homo sapien
tgcaggcagccaattattccaaact

SEQ ID NO: 5185578 - DNA, 25 bp, Homo sapien
caaaaggatcataggatatttctcc

SEQ ID NO: 5185579 - DNA, 25 bp, Homo sapien
aacatagaccccactggtcagatcc

SEQ ID NO: 5185580 - DNA, 25 bp, Homo sapien
cccactggtcagatccttgaataag

SEQ ID NO: 5185581 - DNA, 25 bp, Homo sapien
cattcatgatttttggcgccatcac

SEQ ID NO: 5185582 - DNA, 25 bp, Homo sapien
ctacaacccttagaaaaggctctga

SEQ ID NO: 5185583 - DNA, 25 bp, Homo sapien
tggaaatggcggtattgtatttcgg

SEQ ID NO: 5185584 - DNA, 25 bp, Homo sapien
tattgtatttcggtttctccgggca

SEQ ID NO: 5185585 - DNA, 25 bp, Homo sapien
ctccgggcacttaacgtcaggaaat

SEQ ID NO: 5185586 - DNA, 25 bp, Homo sapien
tttctccgggcacttaacgtcagga

SEQ ID NO: 5185587 - DNA, 25 bp, Homo sapien
tcataaatgtagtacgttgcttttg

SEQ ID NO: 5185588 - DNA, 25 bp, Homo sapien
ataaatgtagtacgttgcttttgga

SEQ ID NO: 5185589 - DNA, 25 bp, Homo sapien
aatgtagtacgttgcttttggaaag

SEQ ID NO: 5185590 - DNA, 25 bp, Homo sapien
tgtagtacgttgcttttggaaagca

SEQ ID NO: 5185591 - DNA, 25 bp, Homo sapien
gctgggccagcgtatagctcttact

SEQ ID NO: 5185592 - DNA, 25 bp, Homo sapien
aatttggcggacttctgcgctgggc

SEQ ID NO: 5185593 - DNA, 25 bp, Homo sapien
cgatggacgataatagaaggattca

SEQ ID NO: 5185594 - DNA, 25 bp, Homo sapien
cactcaccggcagccttacgatgga

SEQ ID NO: 5185595 - DNA, 25 bp, Homo sapien
tatgaatgggaacacaatataaagc

SEQ ID NO: 5185596 - DNA, 25 bp, Homo sapien
aattatgtggtatgaatgggaacac

SEQ ID NO: 5185597 - DNA, 25 bp, Homo sapien
ttacaactacaatggttgatgtcag

SEQ ID NO: 5185598 - DNA, 25 bp, Homo sapien
acaatggttgatgtcagggctgaaa

SEQ ID NO: 5185599 - DNA, 25 bp, Homo sapien
gacctccctagtcggtaatatttga

SEQ ID NO: 5185600 - DNA, 25 bp, Homo sapien
gttctccctagagctcgtccatcca

SEQ ID NO: 5185601 - DNA, 25 bp, Homo sapien
tgacttatcacctttattcaatggg

SEQ ID NO: 5185602 - DNA, 25 bp, Homo sapien
cagctccagaaggtaagcagagtgg

SEQ ID NO: 5185603 - DNA, 25 bp, Homo sapien
gagcttgttgtaccattagcaggaa

SEQ ID NO: 5185604 - DNA, 25 bp, Homo sapien
ggcataagttgcttccctcagtcct

SEQ ID NO: 5185605 - DNA, 25 bp, Homo sapien
ggtgagggcgtcgttttctgatact

SEQ ID NO: 5185606 - DNA, 25 bp, Homo sapien
tatttccacattgcgcaggttctac

SEQ ID NO: 5185607 - DNA, 25 bp, Homo sapien
tttaaagctagggatgaaacactca

SEQ ID NO: 5185608 - DNA, 25 bp, Homo sapien
gatcttccagtaaaaggtagtgtgg

SEQ ID NO: 5185609 - DNA, 25 bp, Homo sapien
tatgcagagtgtattgagttagcct

SEQ ID NO: 5185610 - DNA, 25 bp, Homo sapien
aagttatctgttgccttatgccatg

SEQ ID NO: 5185611 - DNA, 25 bp, Homo sapien
gtctttggctgtcaggggtccggct

SEQ ID NO: 5185612 - DNA, 25 bp, Homo sapien
tctttggctgtcaggggtccggctg

SEQ ID NO: 5185613 - DNA, 25 bp, Homo sapien
ggtctttggctgtcaggggtccggc

SEQ ID NO: 5185614 - DNA, 25 bp, Homo sapien
ctttggctgtcaggggtccggctgc

SEQ ID NO: 5185615 - DNA, 25 bp, Homo sapien
ccttttcccttttgaaatcttgctg

SEQ ID NO: 5185616 - DNA, 25 bp, Homo sapien
tacactgagcttggccactgccctt

SEQ ID NO: 5185617 - DNA, 25 bp, Homo sapien
ttcccttttgaaatcttgctgccac

SEQ ID NO: 5185618 - DNA, 25 bp, Homo sapien
actgagcttggccactgcccttttc

SEQ ID NO: 5185619 - DNA, 25 bp, Homo sapien
gaaggagcatgttgggcatcagtca

SEQ ID NO: 5185620 - DNA, 25 bp, Homo sapien
ctgccaaacagaaggagcatgttgg

SEQ ID NO: 5185621 - DNA, 25 bp, Homo sapien
aaggagcatgttgggcatcagtcat

SEQ ID NO: 5185622 - DNA, 25 bp, Homo sapien
aaacagaaggagcatgttgggcatc

SEQ ID NO: 5185623 - DNA, 25 bp, Homo sapien
tcagatttgctagtgctagttttcc

SEQ ID NO: 5185624 - DNA, 25 bp, Homo sapien
ccttcagatttgctagtgctagttt

SEQ ID NO: 5185625 - DNA, 25 bp, Homo sapien
tccttcagatttgctagtgctagtt

SEQ ID NO: 5185626 - DNA, 25 bp, Homo sapien
agatttgctagtgctagttttcctg

SEQ ID NO: 5185627 - DNA, 25 bp, Homo sapien
tagatctttgcccgatttcctttga

SEQ ID NO: 5185628 - DNA, 25 bp, Homo sapien
agatctttgcccgatttcctttgac

SEQ ID NO: 5185629 - DNA, 25 bp, Homo sapien
ctagatctttgcccgatttcctttg

SEQ ID NO: 5185630 - DNA, 25 bp, Homo sapien
aagtccaggcaaggggagctccccg

SEQ ID NO: 5185631 - DNA, 25 bp, Homo sapien
gagcgcgctggggaccgggaatgga

SEQ ID NO: 5185632 - DNA, 25 bp, Homo sapien
ctggggaccgggaatggagttccat

SEQ ID NO: 5185633 - DNA, 25 bp, Homo sapien
gcaagtccaggcaaggggagctccc

SEQ ID NO: 5185634 - DNA, 25 bp, Homo sapien
cttcgcaaattcatcaggcgaaggg

SEQ ID NO: 5185635 - DNA, 25 bp, Homo sapien
gaccgcagggtgtcccttcgcaaat

SEQ ID NO: 5185636 - DNA, 25 bp, Homo sapien
gggccgaattcactgcgccaaggtc

SEQ ID NO: 5185637 - DNA, 25 bp, Homo sapien
gaagccgtcggagaacgtctcctgg

SEQ ID NO: 5185638 - DNA, 25 bp, Homo sapien
tctgtagcgagctgttctgatccaa

SEQ ID NO: 5185639 - DNA, 25 bp, Homo sapien
ccttctgtagcgagctgttctgatc

SEQ ID NO: 5185640 - DNA, 25 bp, Homo sapien
tagcgagctgttctgatccaaataa

SEQ ID NO: 5185641 - DNA, 25 bp, Homo sapien
ctcctccttctgtagcgagctgttc

SEQ ID NO: 5185642 - DNA, 25 bp, Homo sapien
gcctggtaggtaatagactccttaa

SEQ ID NO: 5185643 - DNA, 25 bp, Homo sapien
cgtagtctggactgggtatcccctc

SEQ ID NO: 5185644 - DNA, 25 bp, Homo sapien
tttaattccgtcacagaacttgcca

SEQ ID NO: 5185645 - DNA, 25 bp, Homo sapien
tcttgttcacagctgcacctcagtg

SEQ ID NO: 5185646 - DNA, 25 bp, Homo sapien
cccgctcttcaatgccaaccaaaag

SEQ ID NO: 5185647 - DNA, 25 bp, Homo sapien
ccgctcttcaatgccaaccaaaagc

SEQ ID NO: 5185648 - DNA, 25 bp, Homo sapien
catctacccgaggtaagaacggtga

SEQ ID NO: 5185649 - DNA, 25 bp, Homo sapien
gatcatctacccgaggtaagaacgg

SEQ ID NO: 5185650 - DNA, 25 bp, Homo sapien
catgtgtggtgtaaaatagggttct

SEQ ID NO: 5185651 - DNA, 25 bp, Homo sapien
gaacatgtgtggtgtaaaatagggt

SEQ ID NO: 5185652 - DNA, 25 bp, Homo sapien
tgagtcagtctgatgtcaatagagg

SEQ ID NO: 5185653 - DNA, 25 bp, Homo sapien
actgcgccagctgagtcagtctgat

SEQ ID NO: 5185654 - DNA, 25 bp, Homo sapien
aatagaggatatgaccacaaacagc

SEQ ID NO: 5185655 - DNA, 25 bp, Homo sapien
gattccagatcccactgcgccagct

SEQ ID NO: 5185656 - DNA, 25 bp, Homo sapien
ctagtcatggtcataagtaactttt

SEQ ID NO: 5185657 - DNA, 25 bp, Homo sapien
tagtcatggtcataagtaacttttc

SEQ ID NO: 5185658 - DNA, 25 bp, Homo sapien
ttcatatgcagaacgtatttagcca

SEQ ID NO: 5185659 - DNA, 25 bp, Homo sapien
tatttagccattacccacgtgacac

SEQ ID NO: 5185660 - DNA, 25 bp, Homo sapien
ttcttcagaattatccattacgtgc

SEQ ID NO: 5185661 - DNA, 25 bp, Homo sapien
tacgtgcatttaaactctgccagaa

SEQ ID NO: 5185662 - DNA, 25 bp, Homo sapien
taatatggaaatgggtaaggcctct

SEQ ID NO: 5185663 - DNA, 25 bp, Homo sapien
tctaatctgattagcgtggccacag

SEQ ID NO: 5185664 - DNA, 25 bp, Homo sapien
tgaacccagggagtgaatcagtgaa

SEQ ID NO: 5185665 - DNA, 25 bp, Homo sapien
taatgtcatggagaggtctgaaccc

SEQ ID NO: 5185666 - DNA, 25 bp, Homo sapien
gctgagcaagctttagacgactgcg

SEQ ID NO: 5185667 - DNA, 25 bp, Homo sapien
cagtgtagcttgtctactgctgagc

SEQ ID NO: 5185668 - DNA, 25 bp, Homo sapien
gtttgtagaacagataggcatccta

SEQ ID NO: 5185669 - DNA, 25 bp, Homo sapien
gaagctagatcacattcttgggaca

SEQ ID NO: 5185670 - DNA, 25 bp, Homo sapien
cagatgatatcatgggtggacctgt

SEQ ID NO: 5185671 - DNA, 25 bp, Homo sapien
atgctaataaccatgccgttggttg

SEQ ID NO: 5185672 - DNA, 25 bp, Homo sapien
tgtaggcaaggtatgaaaaaagaga

SEQ ID NO: 5185673 - DNA, 25 bp, Homo sapien
gaaaaagggcagttatggagcaatg

SEQ ID NO: 5185674 - DNA, 25 bp, Homo sapien
caggccctaggagtctaattcttag

SEQ ID NO: 5185675 - DNA, 25 bp, Homo sapien
caaaaagttgctcagggatggtcct

SEQ ID NO: 5185676 - DNA, 25 bp, Homo sapien
gtctggtaagggctcgttcctcata

SEQ ID NO: 5185677 - DNA, 25 bp, Homo sapien
ttagttgtgtggcaccacccaggca

SEQ ID NO: 5185678 - DNA, 25 bp, Homo sapien
cctggccattcttgcgttttttcaa

SEQ ID NO: 5185679 - DNA, 25 bp, Homo sapien
actcttccagaccctttgtgtcctg

SEQ ID NO: 5185680 - DNA, 25 bp, Homo sapien
ggtattcgccgactctttgtgactc

SEQ ID NO: 5185681 - DNA, 25 bp, Homo sapien
aggtttgccctaagtcctcaggaca

SEQ ID NO: 5185682 - DNA, 25 bp, Homo sapien
tggatgctaacccattcaacttgtg

SEQ ID NO: 5185683 - DNA, 25 bp, Homo sapien
tgctttagctgcttgactggcaaaa

SEQ ID NO: 5185684 - DNA, 25 bp, Homo sapien
gaccctggtacatggctcgttttct

SEQ ID NO: 5185685 - DNA, 25 bp, Homo sapien
tggcaaaagcatatttcaagctaaa

SEQ ID NO: 5185686 - DNA, 25 bp, Homo sapien
tctctccacccggtatccatccaga

SEQ ID NO: 5185687 - DNA, 25 bp, Homo sapien
agtctctctccacccggtatccatc

SEQ ID NO: 5185688 - DNA, 25 bp, Homo sapien
ttatatccgttctccagtctctctc

SEQ ID NO: 5185689 - DNA, 25 bp, Homo sapien
tctccacccggtatccatccagaac

SEQ ID NO: 5185690 - DNA, 25 bp, Homo sapien
acgtgtagtctggtacttaattaca

SEQ ID NO: 5185691 - DNA, 25 bp, Homo sapien
acggagtgtaggcagattatcttca

SEQ ID NO: 5185692 - DNA, 25 bp, Homo sapien
tgaatctttggctggacagatgaaa

SEQ ID NO: 5185693 - DNA, 25 bp, Homo sapien
gatgaaagggattttgatggaccac

SEQ ID NO: 5185694 - DNA, 25 bp, Homo sapien
gaaatggaggactttgtgtgcagat

SEQ ID NO: 5185695 - DNA, 25 bp, Homo sapien
gaaaccccatgtagattgtgagctg

SEQ ID NO: 5185696 - DNA, 25 bp, Homo sapien
taaagatggcaaagtaaggtcacgg

SEQ ID NO: 5185697 - DNA, 25 bp, Homo sapien
ctcagctgggagtgacgcttgtcct

SEQ ID NO: 5185698 - DNA, 25 bp, Homo sapien
ccagactggcaacgcttcgtgccaa

SEQ ID NO: 5185699 - DNA, 25 bp, Homo sapien
aagccggtcccagactggcaacgct

SEQ ID NO: 5185700 - DNA, 25 bp, Homo sapien
cggtcccagactggcaacgcttcgt

SEQ ID NO: 5185701 - DNA, 25 bp, Homo sapien
gtcccagactggcaacgcttcgtgc

SEQ ID NO: 5185702 - DNA, 25 bp, Homo sapien
gaattcgtttgttgttcagtgcgac

SEQ ID NO: 5185703 - DNA, 25 bp, Homo sapien
tcagtgcgactggaactgtactttc

SEQ ID NO: 5185704 - DNA, 25 bp, Homo sapien
ttgggcggctcaaggttagttctcc

SEQ ID NO: 5185705 - DNA, 25 bp, Homo sapien
tagcgtttcagagatattgggcggc

SEQ ID NO: 5185706 - DNA, 25 bp, Homo sapien
gctgaaaggaccaggattggagacc

SEQ ID NO: 5185707 - DNA, 25 bp, Homo sapien
ggttgtgcgttctccccagatgtac

SEQ ID NO: 5185708 - DNA, 25 bp, Homo sapien
tagaaatggggttgtgcgttctccc

SEQ ID NO: 5185709 - DNA, 25 bp, Homo sapien
ggagaccttatgaggcaggtttaaa

SEQ ID NO: 5185710 - DNA, 25 bp, Homo sapien
cattgcttagcatgcagcaatttgg

SEQ ID NO: 5185711 - DNA, 25 bp, Homo sapien
tgcttagcatgcagcaatttggctg

SEQ ID NO: 5185712 - DNA, 25 bp, Homo sapien
gcatgcagcaatttggctgtcagaa

SEQ ID NO: 5185713 - DNA, 25 bp, Homo sapien
cttagcatgcagcaatttggctgtc

SEQ ID NO: 5185714 - DNA, 25 bp, Homo sapien
catggttctgaatatgcctcctgcc

SEQ ID NO: 5185715 - DNA, 25 bp, Homo sapien
tgatggaccactcgctaaccagagt

SEQ ID NO: 5185716 - DNA, 25 bp, Homo sapien
ccagtgttcttgaagcggaccctgc

SEQ ID NO: 5185717 - DNA, 25 bp, Homo sapien
taatgataaagtggacggctgcagg

SEQ ID NO: 5185718 - DNA, 25 bp, Homo sapien
tattgtccctgagaagcagctaggt

SEQ ID NO: 5185719 - DNA, 25 bp, Homo sapien
caggcaagatcatggtacactatag

SEQ ID NO: 5185720 - DNA, 25 bp, Homo sapien
cagctaggtaaatgcggtcgttaaa

SEQ ID NO: 5185721 - DNA, 25 bp, Homo sapien
cctaatagctggctctacaagtgtg

SEQ ID NO: 5185722 - DNA, 25 bp, Homo sapien
tcttgtgagcacttgaacttgatct

SEQ ID NO: 5185723 - DNA, 25 bp, Homo sapien
tccataaggagatgatggtttcaca

SEQ ID NO: 5185724 - DNA, 25 bp, Homo sapien
gccttgctttccataaggagatgat

SEQ ID NO: 5185725 - DNA, 25 bp, Homo sapien
ccccagccttgctttccataaggag

SEQ ID NO: 5185726 - DNA, 25 bp, Homo sapien
tggagtaactaaccacttttgattc

SEQ ID NO: 5185727 - DNA, 25 bp, Homo sapien
ctgtacttttggtgtggagtaacta

SEQ ID NO: 5185728 - DNA, 25 bp, Homo sapien
tggaaccttaagtgagtaggcagca

SEQ ID NO: 5185729 - DNA, 25 bp, Homo sapien
tttgattccctggaaccttaagtga

SEQ ID NO: 5185730 - DNA, 25 bp, Homo sapien
agcagagcttatatggctgatcacc

SEQ ID NO: 5185731 - DNA, 25 bp, Homo sapien
ggcatttagtgaccaggaaactcat

SEQ ID NO: 5185732 - DNA, 25 bp, Homo sapien
tatttatgacttcggaacagaccat

SEQ ID NO: 5185733 - DNA, 25 bp, Homo sapien
aaagcagtagggctatgatagacag

SEQ ID NO: 5185734 - DNA, 25 bp, Homo sapien
ttggctattggatttgtactggtga

SEQ ID NO: 5185735 - DNA, 25 bp, Homo sapien
gctattggatttgtactggtgattg

SEQ ID NO: 5185736 - DNA, 25 bp, Homo sapien
tgtattggctattggatttgtactg

SEQ ID NO: 5185737 - DNA, 25 bp, Homo sapien
ggatgagaatgtcctgggggagagc

SEQ ID NO: 5185738 - DNA, 25 bp, Homo sapien
ccaaatggaagatttacctcctcat

SEQ ID NO: 5185739 - DNA, 25 bp, Homo sapien
aattggaatccgcagaatctcctgt

SEQ ID NO: 5185740 - DNA, 25 bp, Homo sapien
cagttggccatagaatgctcttgct

SEQ ID NO: 5185741 - DNA, 25 bp, Homo sapien
ctgtggccaattccagctctcagaa

SEQ ID NO: 5185742 - DNA, 25 bp, Homo sapien
agccaggaatgtgggattcatcttc

SEQ ID NO: 5185743 - DNA, 25 bp, Homo sapien
tgcacggtactttgccaagtttaaa

SEQ ID NO: 5185744 - DNA, 25 bp, Homo sapien
ttccgatccccagaaggcaaatgtg

SEQ ID NO: 5185745 - DNA, 25 bp, Homo sapien
tgtggttacagatgttgcacggtac

SEQ ID NO: 5185746 - DNA, 25 bp, Homo sapien
cactcattggccgagcgctccgcag

SEQ ID NO: 5185747 - DNA, 25 bp, Homo sapien
agctccagacactcattggccgagc

SEQ ID NO: 5185748 - DNA, 25 bp, Homo sapien
tccagacactcattggccgagcgct

SEQ ID NO: 5185749 - DNA, 25 bp, Homo sapien
agacactcattggccgagcgctccg

SEQ ID NO: 5185750 - DNA, 25 bp, Homo sapien
gggccaagcgaccggccagacagcg

SEQ ID NO: 5185751 - DNA, 25 bp, Homo sapien
gccaagcgaccggccagacagcgcc

SEQ ID NO: 5185752 - DNA, 25 bp, Homo sapien
cccgggccaagcgaccggccagaca

SEQ ID NO: 5185753 - DNA, 25 bp, Homo sapien
cgggccaagcgaccggccagacagc

SEQ ID NO: 5185754 - DNA, 25 bp, Homo sapien
ctccgaggagccccgctggcggcgc

SEQ ID NO: 5185755 - DNA, 25 bp, Homo sapien
tccgaggagccccgctggcggcgcg

SEQ ID NO: 5185756 - DNA, 25 bp, Homo sapien
gaatccagcccaagtctgacatgca

SEQ ID NO: 5185757 - DNA, 25 bp, Homo sapien
tgtcataaccctagaccttgcaagg

SEQ ID NO: 5185758 - DNA, 25 bp, Homo sapien
ggttatcagactctctgcagcggag

SEQ ID NO: 5185759 - DNA, 25 bp, Homo sapien
caaaggcgaacatggcaagctctgt

SEQ ID NO: 5185760 - DNA, 25 bp, Homo sapien
aataaatgccctctgcatgaatgaa

SEQ ID NO: 5185761 - DNA, 25 bp, Homo sapien
tgcaaccttttgcagtactgcagtc

SEQ ID NO: 5185762 - DNA, 25 bp, Homo sapien
cctttgcaaccttttgcagtactgc

SEQ ID NO: 5185763 - DNA, 25 bp, Homo sapien
tgcagtcacccaataaatgccctct

SEQ ID NO: 5185764 - DNA, 25 bp, Homo sapien
taagaccactattgaaggaactgct

SEQ ID NO: 5185765 - DNA, 25 bp, Homo sapien
gctaagaaagcctaacttcccgaga

SEQ ID NO: 5185766 - DNA, 25 bp, Homo sapien
gatgaatacaatcagacctggtccc

SEQ ID NO: 5185767 - DNA, 25 bp, Homo sapien
tgaacccttctgctaaacattgtga

SEQ ID NO: 5185768 - DNA, 25 bp, Homo sapien
catgtaagtattgcacgtcctggaa

SEQ ID NO: 5185769 - DNA, 25 bp, Homo sapien
taaaagtcagtcgtagttcatgtaa

SEQ ID NO: 5185770 - DNA, 25 bp, Homo sapien
gtcccatgattgtcagaccctttaa

SEQ ID NO: 5185771 - DNA, 25 bp, Homo sapien
tcaccggttaggtcttgtcccatga

SEQ ID NO: 5185772 - DNA, 25 bp, Homo sapien
caaccctccctccatcagctcactg

SEQ ID NO: 5185773 - DNA, 25 bp, Homo sapien
cctccctccatcagctcactgtcag

SEQ ID NO: 5185774 - DNA, 25 bp, Homo sapien
tccctccatcagctcactgtcaggc

SEQ ID NO: 5185775 - DNA, 25 bp, Homo sapien
tgccaaccctccctccatcagctca

SEQ ID NO: 5185776 - DNA, 25 bp, Homo sapien
ggtctctgataccatttccctgttc

SEQ ID NO: 5185777 - DNA, 25 bp, Homo sapien
aactttgaaaggaagctacgaggat

SEQ ID NO: 5185778 - DNA, 25 bp, Homo sapien
tgggattctatcagcaagccagtcc

SEQ ID NO: 5185779 - DNA, 25 bp, Homo sapien
ccatgaagtctttccgaggggtctc

SEQ ID NO: 5185780 - DNA, 25 bp, Homo sapien
tgtggccctccaaagccctttccaa

SEQ ID NO: 5185781 - DNA, 25 bp, Homo sapien
catacgcagctcgttgtgtggaagg

SEQ ID NO: 5185782 - DNA, 25 bp, Homo sapien
ccgggctggttccatacgcagctcg

SEQ ID NO: 5185783 - DNA, 25 bp, Homo sapien
tggtgtgtgacacattgagtagtca

SEQ ID NO: 5185784 - DNA, 25 bp, Homo sapien
gccaggctagcctttggatttattt

SEQ ID NO: 5185785 - DNA, 25 bp, Homo sapien
acacaagtaaagcgaatgttctcta

SEQ ID NO: 5185786 - DNA, 25 bp, Homo sapien
gcgctcccttcctgcagtaagcccg

SEQ ID NO: 5185787 - DNA, 25 bp, Homo sapien
tgctgctacgctctttattcatatt

SEQ ID NO: 5185788 - DNA, 25 bp, Homo sapien
aaagctcttagttttaacagaatag

SEQ ID NO: 5185789 - DNA, 25 bp, Homo sapien
aagctcttagttttaacagaatagt

SEQ ID NO: 5185790 - DNA, 25 bp, Homo sapien
caaagctcttagttttaacagaata

SEQ ID NO: 5185791 - DNA, 25 bp, Homo sapien
tcaaagctcttagttttaacagaat

SEQ ID NO: 5185792 - DNA, 25 bp, Homo sapien
cactccttggtgcaactggggcagt

SEQ ID NO: 5185793 - DNA, 25 bp, Homo sapien
tggcaaattgtaggatgcaactgag

SEQ ID NO: 5185794 - DNA, 25 bp, Homo sapien
cagtggatactgaatttctactaca

SEQ ID NO: 5185795 - DNA, 25 bp, Homo sapien
tgcaactgagttcccaaatgtacag

SEQ ID NO: 5185796 - DNA, 25 bp, Homo sapien
caaaggaatgagctgtatacgctca

SEQ ID NO: 5185797 - DNA, 25 bp, Homo sapien
aaggaatgagctgtatacgctcatg

SEQ ID NO: 5185798 - DNA, 25 bp, Homo sapien
ctgcaaaggaatgagctgtatacgc

SEQ ID NO: 5185799 - DNA, 25 bp, Homo sapien
tgcaaaggaatgagctgtatacgct

SEQ ID NO: 5185800 - DNA, 25 bp, Homo sapien
gttggtgataacacttccagaacag

SEQ ID NO: 5185801 - DNA, 25 bp, Homo sapien
gaacaggcaagggtgaccataaact

SEQ ID NO: 5185802 - DNA, 25 bp, Homo sapien
gaggtggcaaacaattcgtgtctgg

SEQ ID NO: 5185803 - DNA, 25 bp, Homo sapien
tcgtgtctggttggaatcaagcact

SEQ ID NO: 5185804 - DNA, 25 bp, Homo sapien
tctgtggccccgaatgttactgagg

SEQ ID NO: 5185805 - DNA, 25 bp, Homo sapien
ccagatgatagaagcaagtggccaa

SEQ ID NO: 5185806 - DNA, 25 bp, Homo sapien
gattcagcccacatctaaatgccag

SEQ ID NO: 5185807 - DNA, 25 bp, Homo sapien
cactgtctggaacatgtgtttggag

SEQ ID NO: 5185808 - DNA, 25 bp, Homo sapien
gctcagcagtatattaggagccact

SEQ ID NO: 5185809 - DNA, 25 bp, Homo sapien
taaatagattgcagggtctttgccc

SEQ ID NO: 5185810 - DNA, 25 bp, Homo sapien
ggtgttccctatgcaagactgtgtg

SEQ ID NO: 5185811 - DNA, 25 bp, Homo sapien
gatagtcaggactggtggtgttccc

SEQ ID NO: 5185812 - DNA, 25 bp, Homo sapien
gggccatgctaatcttcttagtata

SEQ ID NO: 5185813 - DNA, 25 bp, Homo sapien
atgaaacccttcatgaatttgcatg

SEQ ID NO: 5185814 - DNA, 25 bp, Homo sapien
tcatctttgcacaggggccatgcta

SEQ ID NO: 5185815 - DNA, 25 bp, Homo sapien
caggggccatgctaatcttcttagt

SEQ ID NO: 5185816 - DNA, 25 bp, Homo sapien
gaaatagaatttaactgtgtgccca

SEQ ID NO: 5185817 - DNA, 25 bp, Homo sapien
tgctcaggcaaagtccaacgtggat

SEQ ID NO: 5185818 - DNA, 25 bp, Homo sapien
cgtggatgttcatgatcaggaagcc

SEQ ID NO: 5185819 - DNA, 25 bp, Homo sapien
gatatatttacgagtcaggccctaa

SEQ ID NO: 5185820 - DNA, 25 bp, Homo sapien
acatctgggaggcatatgagttacc

SEQ ID NO: 5185821 - DNA, 25 bp, Homo sapien
aattatgcagcgtaattgaagctgg

SEQ ID NO: 5185822 - DNA, 25 bp, Homo sapien
ttgaagctggtcatatgccaaaaac

SEQ ID NO: 5185823 - DNA, 25 bp, Homo sapien
caaatgaaatgcatctctcagagtc

SEQ ID NO: 5185824 - DNA, 25 bp, Homo sapien
ttcatgatttacaaggtctgagaca

SEQ ID NO: 5185825 - DNA, 25 bp, Homo sapien
tacaaggtctgagacataaacagta

SEQ ID NO: 5185826 - DNA, 25 bp, Homo sapien
ccttttctgaaatatgtgcaagatc

SEQ ID NO: 5185827 - DNA, 25 bp, Homo sapien
tacaatctgaaattgcatttcatga

SEQ ID NO: 5185828 - DNA, 25 bp, Homo sapien
cacttcttggtctgggtccaactca

SEQ ID NO: 5185829 - DNA, 25 bp, Homo sapien
cagcatggcagcactggtgaagtcc

SEQ ID NO: 5185830 - DNA, 25 bp, Homo sapien
ctggggccagcatggcagcactggt

SEQ ID NO: 5185831 - DNA, 25 bp, Homo sapien
tgggtccaactcacagcctggggcc

SEQ ID NO: 5185832 - DNA, 25 bp, Homo sapien
gatcgttagagtggtcaactacctt

SEQ ID NO: 5185833 - DNA, 25 bp, Homo sapien
accagtgtagggctgttcacatagc

SEQ ID NO: 5185834 - DNA, 25 bp, Homo sapien
tgagacttggaatatgaccagacac

SEQ ID NO: 5185835 - DNA, 25 bp, Homo sapien
agtgggcctagctctaaaaaagttg

SEQ ID NO: 5185836 - DNA, 25 bp, Homo sapien
cacagtgtgtatggtagagtggcaa

SEQ ID NO: 5185837 - DNA, 25 bp, Homo sapien
ggcaatgttgcctctacaatcatgt

SEQ ID NO: 5185838 - DNA, 25 bp, Homo sapien
tgttccccttagtccaaagtatgca

SEQ ID NO: 5185839 - DNA, 25 bp, Homo sapien
agtatgcaccttggttgataagcag

SEQ ID NO: 5185840 - DNA, 25 bp, Homo sapien
ttactaccaggcaacaagtttccaa

SEQ ID NO: 5185841 - DNA, 25 bp, Homo sapien
agacctttacagatgttcaatggta

SEQ ID NO: 5185842 - DNA, 25 bp, Homo sapien
aagacctttacagatgttcaatggt

SEQ ID NO: 5185843 - DNA, 25 bp, Homo sapien
tattactaccaggcaacaagtttcc

SEQ ID NO: 5185844 - DNA, 25 bp, Homo sapien
ggctgacctattgggctgtataaac

SEQ ID NO: 5185845 - DNA, 25 bp, Homo sapien
aatgtccaggtatttgcaagcagtg

SEQ ID NO: 5185846 - DNA, 25 bp, Homo sapien
tgttaccaggttgcaaatgtccagg

SEQ ID NO: 5185847 - DNA, 25 bp, Homo sapien
aataagaccaagatctagggcgtgc

SEQ ID NO: 5185848 - DNA, 25 bp, Homo sapien
gcaggcctgccagatagctgccttt

SEQ ID NO: 5185849 - DNA, 25 bp, Homo sapien
caggcctgccagatagctgcctttt

SEQ ID NO: 5185850 - DNA, 25 bp, Homo sapien
ctcttaccttggctaagtggcttcc

SEQ ID NO: 5185851 - DNA, 25 bp, Homo sapien
gctaagtggcttccaaggtgtttcg

SEQ ID NO: 5185852 - DNA, 25 bp, Homo sapien
gaaggctggctccaattgtcttcaa

SEQ ID NO: 5185853 - DNA, 25 bp, Homo sapien
ggctggctccaattgtcttcaattt

SEQ ID NO: 5185854 - DNA, 25 bp, Homo sapien
agctggctctctttctatatgtata

SEQ ID NO: 5185855 - DNA, 25 bp, Homo sapien
aaggctggctccaattgtcttcaat

SEQ ID NO: 5185856 - DNA, 25 bp, Homo sapien
cacagtccagtctgcgttgcgctaa

SEQ ID NO: 5185857 - DNA, 25 bp, Homo sapien
ttccttctagggcacagtccagtct

SEQ ID NO: 5185858 - DNA, 25 bp, Homo sapien
ttgcgctaactcaaaactgggagcc

SEQ ID NO: 5185859 - DNA, 25 bp, Homo sapien
caggtagatgcaggggaagccacaa

SEQ ID NO: 5185860 - DNA, 25 bp, Homo sapien
gaattgcagcgctctgtatgagctc

SEQ ID NO: 5185861 - DNA, 25 bp, Homo sapien
cgcattcttctgaagctatttccta

SEQ ID NO: 5185862 - DNA, 25 bp, Homo sapien
tgttccccagcacaagggtttggaa

SEQ ID NO: 5185863 - DNA, 25 bp, Homo sapien
tgccgtgtgaaaccaaagggtgttc

SEQ ID NO: 5185864 - DNA, 25 bp, Homo sapien
gaacaggcttgtaaagcagatgcgt

SEQ ID NO: 5185865 - DNA, 25 bp, Homo sapien
ccagtttggagttaggccttggagc

SEQ ID NO: 5185866 - DNA, 25 bp, Homo sapien
tagtagactagttgctaaccctgcc

SEQ ID NO: 5185867 - DNA, 25 bp, Homo sapien
gatgagctcccctgcttaactttcc

SEQ ID NO: 5185868 - DNA, 25 bp, Homo sapien
gcaatttgctaaccacagtcctgaa

SEQ ID NO: 5185869 - DNA, 25 bp, Homo sapien
ttccagcttaatactgcagcagggc

SEQ ID NO: 5185870 - DNA, 25 bp, Homo sapien
gagggaaggtccagattaactgtac

SEQ ID NO: 5185871 - DNA, 25 bp, Homo sapien
gcagggccagttctacagacccact

SEQ ID NO: 5185872 - DNA, 25 bp, Homo sapien
ggctgggaggcctcaggacacttac

SEQ ID NO: 5185873 - DNA, 25 bp, Homo sapien
catggtggaagttgaaggggaagca

SEQ ID NO: 5185874 - DNA, 25 bp, Homo sapien
acaatcatggtggaagttgaagggg

SEQ ID NO: 5185875 - DNA, 25 bp, Homo sapien
tggtggaagttgaaggggaagcagg

SEQ ID NO: 5185876 - DNA, 25 bp, Homo sapien
aggactgtcttgaaagtgagtgcat

SEQ ID NO: 5185877 - DNA, 25 bp, Homo sapien
caatgatgtcttgtttaaggcaaaa

SEQ ID NO: 5185878 - DNA, 25 bp, Homo sapien
aaggactgtcttgaaagtgagtgca

SEQ ID NO: 5185879 - DNA, 25 bp, Homo sapien
tgaaccattcagacttacaatgatg

SEQ ID NO: 5185880 - DNA, 25 bp, Homo sapien
tgacacctgctggacggtttccttc

SEQ ID NO: 5185881 - DNA, 25 bp, Homo sapien
ccctatgtgtgaggtcgaaggagcc

SEQ ID NO: 5185882 - DNA, 25 bp, Homo sapien
gacacctgctggacggtttccttct

SEQ ID NO: 5185883 - DNA, 25 bp, Homo sapien
gaagcctttgccctatgtgtgaggt

SEQ ID NO: 5185884 - DNA, 25 bp, Homo sapien
cttcaaaatggtcctggacctggcc

SEQ ID NO: 5185885 - DNA, 25 bp, Homo sapien
tgcctgcttcaaaatggtcctggac

SEQ ID NO: 5185886 - DNA, 25 bp, Homo sapien
cctgcttcaaaatggtcctggacct

SEQ ID NO: 5185887 - DNA, 25 bp, Homo sapien
ctgtgcctgcttcaaaatggtcctg

SEQ ID NO: 5185888 - DNA, 25 bp, Homo sapien
ccagcatcctcgccggcctctccag

SEQ ID NO: 5185889 - DNA, 25 bp, Homo sapien
cagcatcctcgccggcctctccagt

SEQ ID NO: 5185890 - DNA, 25 bp, Homo sapien
caacagtgtggcgcctcccttcctc

SEQ ID NO: 5185891 - DNA, 25 bp, Homo sapien
acagtgtggcgcctcccttcctctc

SEQ ID NO: 5185892 - DNA, 25 bp, Homo sapien
tcattcgtttcctccaaaggcctcc

SEQ ID NO: 5185893 - DNA, 25 bp, Homo sapien
cattcgtttcctccaaaggcctcct

SEQ ID NO: 5185894 - DNA, 25 bp, Homo sapien
ttgtaagttggatttgcctcagtgc

SEQ ID NO: 5185895 - DNA, 25 bp, Homo sapien
cagttctcgggttctgcccatttaa

SEQ ID NO: 5185896 - DNA, 25 bp, Homo sapien
tcccactatggtcaacttgcctgta

SEQ ID NO: 5185897 - DNA, 25 bp, Homo sapien
ccactatggtcaacttgcctgtact

SEQ ID NO: 5185898 - DNA, 25 bp, Homo sapien
tgaagtttggccttgagatggtgtt

SEQ ID NO: 5185899 - DNA, 25 bp, Homo sapien
gataagaggaagttagtctttccat

SEQ ID NO: 5185900 - DNA, 25 bp, Homo sapien
tgcccactgcccttgaagtttggcc

SEQ ID NO: 5185901 - DNA, 25 bp, Homo sapien
ggatgttcctaaagctgcccactgc

SEQ ID NO: 5185902 - DNA, 25 bp, Homo sapien
gagttctcctctatgtctaaacacc

SEQ ID NO: 5185903 - DNA, 25 bp, Homo sapien
gtctaaacacccctctagccctcat

SEQ ID NO: 5185904 - DNA, 25 bp, Homo sapien
agaaattgggccagagttctcctct

SEQ ID NO: 5185905 - DNA, 25 bp, Homo sapien
gggccagagttctcctctatgtcta

SEQ ID NO: 5185906 - DNA, 25 bp, Homo sapien
aaaggtgctccagcttatctaccgg

SEQ ID NO: 5185907 - DNA, 25 bp, Homo sapien
ttggtgtgggggcttctacacacct

SEQ ID NO: 5185908 - DNA, 25 bp, Homo sapien
tccagcttatctaccggttccaggg

SEQ ID NO: 5185909 - DNA, 25 bp, Homo sapien
acctcctgctagaaaggtgctccag

SEQ ID NO: 5185910 - DNA, 25 bp, Homo sapien
aagtcaagtcattaagacctctttt

SEQ ID NO: 5185911 - DNA, 25 bp, Homo sapien
cagcaaggtgcttaagtttggtcat

SEQ ID NO: 5185912 - DNA, 25 bp, Homo sapien
tatgaccaaagtcaagtcattaaga

SEQ ID NO: 5185913 - DNA, 25 bp, Homo sapien
ccttttgcccaatatgaccaaagtc

SEQ ID NO: 5185914 - DNA, 25 bp, Homo sapien
tatgggtccaggtgcaactgagaca

SEQ ID NO: 5185915 - DNA, 25 bp, Homo sapien
tctgtgcacgcaaaggcgatatggg

SEQ ID NO: 5185916 - DNA, 25 bp, Homo sapien
caactgagacacataggccaagggc

SEQ ID NO: 5185917 - DNA, 25 bp, Homo sapien
caaaggcgatatgggtccaggtgca

SEQ ID NO: 5185918 - DNA, 25 bp, Homo sapien
tcatccattggatagtcctctgacg

SEQ ID NO: 5185919 - DNA, 25 bp, Homo sapien
caagtgttatctcagaagaagatac

SEQ ID NO: 5185920 - DNA, 25 bp, Homo sapien
gatagtcctctgacgggaaaataac

SEQ ID NO: 5185921 - DNA, 25 bp, Homo sapien
ttatctcagaagaagatacagcatc

SEQ ID NO: 5185922 - DNA, 25 bp, Homo sapien
gcctatcgagaacatgggtaccttc

SEQ ID NO: 5185923 - DNA, 25 bp, Homo sapien
tatcgagaacatgggtaccttcttt

SEQ ID NO: 5185924 - DNA, 25 bp, Homo sapien
tcaaaaggcctatcgagaacatggg

SEQ ID NO: 5185925 - DNA, 25 bp, Homo sapien
aaggcctatcgagaacatgggtacc

SEQ ID NO: 5185926 - DNA, 25 bp, Homo sapien
ttttcttgcgaattgtactgcatca

SEQ ID NO: 5185927 - DNA, 25 bp, Homo sapien
cttttttcttgcgaattgtactgca

SEQ ID NO: 5185928 - DNA, 25 bp, Homo sapien
ttgcgaattgtactgcatcatcatc

SEQ ID NO: 5185929 - DNA, 25 bp, Homo sapien
tcttgcgaattgtactgcatcatca

SEQ ID NO: 5185930 - DNA, 25 bp, Homo sapien
agttgtatctatgaccactggagtc

SEQ ID NO: 5185931 - DNA, 25 bp, Homo sapien
gcaacagttgtatctatgaccactg

SEQ ID NO: 5185932 - DNA, 25 bp, Homo sapien
gcagccacatctttaaggatgatac

SEQ ID NO: 5185933 - DNA, 25 bp, Homo sapien
tatctatgaccactggagtctttga

SEQ ID NO: 5185934 - DNA, 25 bp, Homo sapien
taaaatgtgcagtcattatgattat

SEQ ID NO: 5185935 - DNA, 25 bp, Homo sapien
cattatgattatattcaccctgttg

SEQ ID NO: 5185936 - DNA, 25 bp, Homo sapien
gaaccacaccatatcagggtacatg

SEQ ID NO: 5185937 - DNA, 25 bp, Homo sapien
tgcaacatgcaataaccacatcagg

SEQ ID NO: 5185938 - DNA, 25 bp, Homo sapien
cctcctgccacatcagattccctgg

SEQ ID NO: 5185939 - DNA, 25 bp, Homo sapien
tgccacatcagattccctggctctt

SEQ ID NO: 5185940 - DNA, 25 bp, Homo sapien
ctgccacatcagattccctggctct

SEQ ID NO: 5185941 - DNA, 25 bp, Homo sapien
cctgccacatcagattccctggctc

SEQ ID NO: 5185942 - DNA, 25 bp, Homo sapien
tgggagtaggggtgtcaacgcacag

SEQ ID NO: 5185943 - DNA, 25 bp, Homo sapien
taggggtgtcaacgcacagcaaagt

SEQ ID NO: 5185944 - DNA, 25 bp, Homo sapien
gggtgtcaacgcacagcaaagtcct

SEQ ID NO: 5185945 - DNA, 25 bp, Homo sapien
gagtaggggtgtcaacgcacagcaa

SEQ ID NO: 5185946 - DNA, 25 bp, Homo sapien
ttgattgactgtattgcaaaaggcc

SEQ ID NO: 5185947 - DNA, 25 bp, Homo sapien
gtttctcagcaatgctttttgattg

SEQ ID NO: 5185948 - DNA, 25 bp, Homo sapien
tcttatggtaggttgtttctcagca

SEQ ID NO: 5185949 - DNA, 25 bp, Homo sapien
tcaatcttctcaagactcgatcctg

SEQ ID NO: 5185950 - DNA, 25 bp, Homo sapien
ccttgatcccaacacaggtttgatg

SEQ ID NO: 5185951 - DNA, 25 bp, Homo sapien
gaaggtgtggcatcctagctctttg

SEQ ID NO: 5185952 - DNA, 25 bp, Homo sapien
gctctcagagcagcacttcctcaag

SEQ ID NO: 5185953 - DNA, 25 bp, Homo sapien
tcagttcccagtcagaatgataacc

SEQ ID NO: 5185954 - DNA, 25 bp, Homo sapien
tggacctattggaggcaggtataac

SEQ ID NO: 5185955 - DNA, 25 bp, Homo sapien
tattggaggcaggtataactgaagc

SEQ ID NO: 5185956 - DNA, 25 bp, Homo sapien
ccaacatatgtattcctgtcagatc

SEQ ID NO: 5185957 - DNA, 25 bp, Homo sapien
tgtcagatctcatggacctattgga

SEQ ID NO: 5185958 - DNA, 25 bp, Homo sapien
tgtttttgttcccaaatccaagtga

SEQ ID NO: 5185959 - DNA, 25 bp, Homo sapien
tgttggggctcccaccgacacagac

SEQ ID NO: 5185960 - DNA, 25 bp, Homo sapien
ttggggctcccaccgacacagacaa

SEQ ID NO: 5185961 - DNA, 25 bp, Homo sapien
tggggctcccaccgacacagacaaa

SEQ ID NO: 5185962 - DNA, 25 bp, Homo sapien
tctgttggggctcccaccgacacag

SEQ ID NO: 5185963 - DNA, 25 bp, Homo sapien
cgagcacaggcccggttttgtacat

SEQ ID NO: 5185964 - DNA, 25 bp, Homo sapien
agcttcctcaaacccgagctccttg

SEQ ID NO: 5185965 - DNA, 25 bp, Homo sapien
cttgtgcataaacagtgcaaatgct

SEQ ID NO: 5185966 - DNA, 25 bp, Homo sapien
gcacaggcccggttttgtacataca

SEQ ID NO: 5185967 - DNA, 25 bp, Homo sapien
aatgaactcatacctggacaccttg

SEQ ID NO: 5185968 - DNA, 25 bp, Homo sapien
aacaaaaatgatgctgcatgctgtg

SEQ ID NO: 5185969 - DNA, 25 bp, Homo sapien
gacaccttgtttgattgtgtaagaa

SEQ ID NO: 5185970 - DNA, 25 bp, Homo sapien
aaaaatgatgctgcatgctgtgttc

SEQ ID NO: 5185971 - DNA, 25 bp, Homo sapien
cagccctcatcagcaagagcagaag

SEQ ID NO: 5185972 - DNA, 25 bp, Homo sapien
gagctttttgcacgattgacttgat

SEQ ID NO: 5185973 - DNA, 25 bp, Homo sapien
tgtgtcagggcggtgccatttccca

SEQ ID NO: 5185974 - DNA, 25 bp, Homo sapien
aattttggttgccaaatcatcagtc

SEQ ID NO: 5185975 - DNA, 25 bp, Homo sapien
caccgtgcatggtggagtaatttga

SEQ ID NO: 5185976 - DNA, 25 bp, Homo sapien
catgaagcataatagaaatggaggg

SEQ ID NO: 5185977 - DNA, 25 bp, Homo sapien
taataatggtgacatcgcagcaccg

SEQ ID NO: 5185978 - DNA, 25 bp, Homo sapien
ccctgatgtaccgattctaataatg

SEQ ID NO: 5185979 - DNA, 25 bp, Homo sapien
ctttgctacagttgaacagttcttc

SEQ ID NO: 5185980 - DNA, 25 bp, Homo sapien
tatccgttattacaacagtccctgg

SEQ ID NO: 5185981 - DNA, 25 bp, Homo sapien
cacattgtatgtccaacgagggttg

SEQ ID NO: 5185982 - DNA, 25 bp, Homo sapien
gtccagttcagtacttcgggtgaca

SEQ ID NO: 5185983 - DNA, 25 bp, Homo sapien
ttcctgacaccagctttaaatgctc

SEQ ID NO: 5185984 - DNA, 25 bp, Homo sapien
aaatgctctcttcaagtagtctaac

SEQ ID NO: 5185985 - DNA, 25 bp, Homo sapien
ggagcacagtgctccatctagtcgg

SEQ ID NO: 5185986 - DNA, 25 bp, Homo sapien
agtgctccatctagtcggccttggc

SEQ ID NO: 5185987 - DNA, 25 bp, Homo sapien
catgaaggcaacatgttgataactc

SEQ ID NO: 5185988 - DNA, 25 bp, Homo sapien
ggttttcatgaaggcaacatgttga

SEQ ID NO: 5185989 - DNA, 25 bp, Homo sapien
catgttgataactcggcattttatg

SEQ ID NO: 5185990 - DNA, 25 bp, Homo sapien
tcacccggttttcatgaaggcaaca

SEQ ID NO: 5185991 - DNA, 25 bp, Homo sapien
taacttcacttaggtttctgcaaca

SEQ ID NO: 5185992 - DNA, 25 bp, Homo sapien
gttacaaagatttgcagcaaggaca

SEQ ID NO: 5185993 - DNA, 25 bp, Homo sapien
aggttacaaagatttgcagcaagga

SEQ ID NO: 5185994 - DNA, 25 bp, Homo sapien
acttcacttaggtttctgcaacatc

SEQ ID NO: 5185995 - DNA, 25 bp, Homo sapien
ggagagctatttgcaggcggaaatc

SEQ ID NO: 5185996 - DNA, 25 bp, Homo sapien
tatttgcaggcggaaatcagctacc

SEQ ID NO: 5185997 - DNA, 25 bp, Homo sapien
aggggtctactccatgaaaggctgc

SEQ ID NO: 5185998 - DNA, 25 bp, Homo sapien
tagaaggggtctactccatgaaagg

SEQ ID NO: 5185999 - DNA, 25 bp, Homo sapien
aaatcaaaaggtgccagatgccagc

SEQ ID NO: 5186000 - DNA, 25 bp, Homo sapien
tccaagcttcagtgttacgggaaca

SEQ ID NO: 5186001 - DNA, 25 bp, Homo sapien
taaagagccgctggcaccatgaaga

SEQ ID NO: 5186002 - DNA, 25 bp, Homo sapien
tctggctcacacaaagtgcgttata

SEQ ID NO: 5186003 - DNA, 25 bp, Homo sapien
cagtacaagaggattatcatctttc

SEQ ID NO: 5186004 - DNA, 25 bp, Homo sapien
cacagtacaagaggattatcatctt

SEQ ID NO: 5186005 - DNA, 25 bp, Homo sapien
ttcacagtacaagaggattatcatc

SEQ ID NO: 5186006 - DNA, 25 bp, Homo sapien
gtacaagaggattatcatctttcat

SEQ ID NO: 5186007 - DNA, 25 bp, Homo sapien
gtctccttgtaccctggcctaaaga

SEQ ID NO: 5186008 - DNA, 25 bp, Homo sapien
tctccttgtaccctggcctaaagat

SEQ ID NO: 5186009 - DNA, 25 bp, Homo sapien
ttggtctccttgtaccctggcctaa

SEQ ID NO: 5186010 - DNA, 25 bp, Homo sapien
tggtctccttgtaccctggcctaaa

SEQ ID NO: 5186011 - DNA, 25 bp, Homo sapien
ggctcaccaggggaatccagatagc

SEQ ID NO: 5186012 - DNA, 25 bp, Homo sapien
gtgagaggctcaccaggggaatcca

SEQ ID NO: 5186013 - DNA, 25 bp, Homo sapien
tcaccaggggaatccagatagcctc

SEQ ID NO: 5186014 - DNA, 25 bp, Homo sapien
gggtgagaggctcaccaggggaatc

SEQ ID NO: 5186015 - DNA, 25 bp, Homo sapien
cagatgtaatctcgaggacttgagc

SEQ ID NO: 5186016 - DNA, 25 bp, Homo sapien
tgccagatgtgggaccgttaaccag

SEQ ID NO: 5186017 - DNA, 25 bp, Homo sapien
gcctcacatgatttggttcgttcaa

SEQ ID NO: 5186018 - DNA, 25 bp, Homo sapien
atttggttcgttcaaaaacctgctg

SEQ ID NO: 5186019 - DNA, 25 bp, Homo sapien
tcagtgttagccactttgaattgct

SEQ ID NO: 5186020 - DNA, 25 bp, Homo sapien
attgctaacggtgtaataatctcca

SEQ ID NO: 5186021 - DNA, 25 bp, Homo sapien
gatttcaaggaatgtggttacccac

SEQ ID NO: 5186022 - DNA, 25 bp, Homo sapien
tgggcatgagggtagtgtttatttc

SEQ ID NO: 5186023 - DNA, 25 bp, Homo sapien
tagaagagcaattagcacaactgat

SEQ ID NO: 5186024 - DNA, 25 bp, Homo sapien
ctagaagagcaattagcacaactga

SEQ ID NO: 5186025 - DNA, 25 bp, Homo sapien
agctgaggccgttgctggtactcca

SEQ ID NO: 5186026 - DNA, 25 bp, Homo sapien
cgagtctgtcgagaagtgtcacaca

SEQ ID NO: 5186027 - DNA, 25 bp, Homo sapien
ggtactccaccaggacatcatgagg

SEQ ID NO: 5186028 - DNA, 25 bp, Homo sapien
caagccgccgtctgatgaagttgga

SEQ ID NO: 5186029 - DNA, 25 bp, Homo sapien
gaatcaaacgggtagggcaataggc

SEQ ID NO: 5186030 - DNA, 25 bp, Homo sapien
caacttgagctacaaacttgcaggg

SEQ ID NO: 5186031 - DNA, 25 bp, Homo sapien
gactggtaactatgtgcaaatggct

SEQ ID NO: 5186032 - DNA, 25 bp, Homo sapien
taggccggtctggacaagtcataca

SEQ ID NO: 5186033 - DNA, 25 bp, Homo sapien
cttgtttattgtcattgcttgaaag

SEQ ID NO: 5186034 - DNA, 25 bp, Homo sapien
caaccggcctaggacctatttcctg

SEQ ID NO: 5186035 - DNA, 25 bp, Homo sapien
cccaagcctccattcggtcatgtgt

SEQ ID NO: 5186036 - DNA, 25 bp, Homo sapien
gccaattcagactcaaccggcctag

SEQ ID NO: 5186037 - DNA, 25 bp, Homo sapien
gacttagtgattgactggctgtgga

SEQ ID NO: 5186038 - DNA, 25 bp, Homo sapien
cacagagggctttggtcttcattct

SEQ ID NO: 5186039 - DNA, 25 bp, Homo sapien
tgggcccagtcaggaatgcctaagc

SEQ ID NO: 5186040 - DNA, 25 bp, Homo sapien
cctggactaggatgggtgccaaaaa

SEQ ID NO: 5186041 - DNA, 25 bp, Homo sapien
tccagaaccttatagtgtagacagt

SEQ ID NO: 5186042 - DNA, 25 bp, Homo sapien
ataaaatatgtgcagtctttgttct

SEQ ID NO: 5186043 - DNA, 25 bp, Homo sapien
actgttttaggtgcttgaagcgata

SEQ ID NO: 5186044 - DNA, 25 bp, Homo sapien
tagtgagagtttacaagggaaatgc

SEQ ID NO: 5186045 - DNA, 25 bp, Homo sapien
tatgcacctgtgttgagaacctcag

SEQ ID NO: 5186046 - DNA, 25 bp, Homo sapien
tattccagcggagacaaggcctaaa

SEQ ID NO: 5186047 - DNA, 25 bp, Homo sapien
tgttgctagcatcgaggagtgagtc

SEQ ID NO: 5186048 - DNA, 25 bp, Homo sapien
gagcacatgccagagtcacagactg

SEQ ID NO: 5186049 - DNA, 25 bp, Homo sapien
tctatcatacatgtgatgcccagca

SEQ ID NO: 5186050 - DNA, 25 bp, Homo sapien
catgtttctcaagctgcaggccctg

SEQ ID NO: 5186051 - DNA, 25 bp, Homo sapien
tggagagttcacgagaatctctaaa

SEQ ID NO: 5186052 - DNA, 25 bp, Homo sapien
gttcacgagaatctctaaataaaag

SEQ ID NO: 5186053 - DNA, 25 bp, Homo sapien
gtaacacactcttcatactcccaca

SEQ ID NO: 5186054 - DNA, 25 bp, Homo sapien
gtgtaacacactcttcatactccca

SEQ ID NO: 5186055 - DNA, 25 bp, Homo sapien
taacacactcttcatactcccacat

SEQ ID NO: 5186056 - DNA, 25 bp, Homo sapien
tgtaacacactcttcatactcccac

SEQ ID NO: 5186057 - DNA, 25 bp, Homo sapien
tggttacatcctatcctgtccatgg

SEQ ID NO: 5186058 - DNA, 25 bp, Homo sapien
ggtactctaggactcagaggttgtc

SEQ ID NO: 5186059 - DNA, 25 bp, Homo sapien
agggcctggttggttacatcctatc

SEQ ID NO: 5186060 - DNA, 25 bp, Homo sapien
tgtcttctgtgatcaagatctccag

SEQ ID NO: 5186061 - DNA, 25 bp, Homo sapien
tgcctacgcctgtgacttgttgagt

SEQ ID NO: 5186062 - DNA, 25 bp, Homo sapien
gcagatgtttcacccctgcaggctg

SEQ ID NO: 5186063 - DNA, 25 bp, Homo sapien
gatgatggactcttccaatagggaa

SEQ ID NO: 5186064 - DNA, 25 bp, Homo sapien
tgggatccctttggttcagacctag

SEQ ID NO: 5186065 - DNA, 25 bp, Homo sapien
atttcctctgatgcaccaaccacag

SEQ ID NO: 5186066 - DNA, 25 bp, Homo sapien
tcatgccctctgtagataatccctc

SEQ ID NO: 5186067 - DNA, 25 bp, Homo sapien
gcaactgtcccaactaccatttcca

SEQ ID NO: 5186068 - DNA, 25 bp, Homo sapien
taatccctccatctctgcaactgtc

SEQ ID NO: 5186069 - DNA, 25 bp, Homo sapien
cagttgatgctggttgttggctggc

SEQ ID NO: 5186070 - DNA, 25 bp, Homo sapien
tgctggttgttggctggcagctcat

SEQ ID NO: 5186071 - DNA, 25 bp, Homo sapien
atgctggttgttggctggcagctca

SEQ ID NO: 5186072 - DNA, 25 bp, Homo sapien
ttgatgctggttgttggctggcagc

SEQ ID NO: 5186073 - DNA, 25 bp, Homo sapien
tattcagatagcctaatagacttgg

SEQ ID NO: 5186074 - DNA, 25 bp, Homo sapien
catgtttctatgagtcgactgggct

SEQ ID NO: 5186075 - DNA, 25 bp, Homo sapien
gacttggtaacttccttgctattcc

SEQ ID NO: 5186076 - DNA, 25 bp, Homo sapien
cagtttggcttatgaattctattca

SEQ ID NO: 5186077 - DNA, 25 bp, Homo sapien
tttgatcctgttagaatgatgtcag

SEQ ID NO: 5186078 - DNA, 25 bp, Homo sapien
tgatcctgttagaatgatgtcagat

SEQ ID NO: 5186079 - DNA, 25 bp, Homo sapien
ttgatcctgttagaatgatgtcaga

SEQ ID NO: 5186080 - DNA, 25 bp, Homo sapien
atcctgttagaatgatgtcagatac

SEQ ID NO: 5186081 - DNA, 25 bp, Homo sapien
gctttctcatttttaggttgctgtt

SEQ ID NO: 5186082 - DNA, 25 bp, Homo sapien
ctttctcatttttaggttgctgttg

SEQ ID NO: 5186083 - DNA, 25 bp, Homo sapien
tttctcatttttaggttgctgttgt

SEQ ID NO: 5186084 - DNA, 25 bp, Homo sapien
ttccaagtagccatgctttctcatt

SEQ ID NO: 5186085 - DNA, 25 bp, Homo sapien
cggcactggaaacaggtcatttact

SEQ ID NO: 5186086 - DNA, 25 bp, Homo sapien
acctccgtaagctttatttcttcat

SEQ ID NO: 5186087 - DNA, 25 bp, Homo sapien
cactggaaacaggtcatttacttaa

SEQ ID NO: 5186088 - DNA, 25 bp, Homo sapien
ggcactggaaacaggtcatttactt

SEQ ID NO: 5186089 - DNA, 25 bp, Homo sapien
tgcttcatggtatgacagaccccaa

SEQ ID NO: 5186090 - DNA, 25 bp, Homo sapien
gttgtcctccgatggaagcattaga

SEQ ID NO: 5186091 - DNA, 25 bp, Homo sapien
ggtaaacatttgcatcagatcttaa

SEQ ID NO: 5186092 - DNA, 25 bp, Homo sapien
taagtcaatgtaaccattgttgtcc

SEQ ID NO: 5186093 - DNA, 25 bp, Homo sapien
actgtatgagcccttgcggttgccc

SEQ ID NO: 5186094 - DNA, 25 bp, Homo sapien
tactttagtgctggatatcttctcc

SEQ ID NO: 5186095 - DNA, 25 bp, Homo sapien
cagccgaagtggaacatgggagatc

SEQ ID NO: 5186096 - DNA, 25 bp, Homo sapien
gtagcacagttttcacacatggctt

SEQ ID NO: 5186097 - DNA, 25 bp, Homo sapien
gccagcacatagcagagaggtccct

SEQ ID NO: 5186098 - DNA, 25 bp, Homo sapien
gtccctgtgagatggtacctgctga

SEQ ID NO: 5186099 - DNA, 25 bp, Homo sapien
ccattgaggcctttaattgttgcag

SEQ ID NO: 5186100 - DNA, 25 bp, Homo sapien
tcatctccatcgaatgctctgctgt

SEQ ID NO: 5186101 - DNA, 25 bp, Homo sapien
agaatgacaggccatactgtgaacc

SEQ ID NO: 5186102 - DNA, 25 bp, Homo sapien
atgacaggccatactgtgaaccctc

SEQ ID NO: 5186103 - DNA, 25 bp, Homo sapien
cccacatttgccaatcagaatgaca

SEQ ID NO: 5186104 - DNA, 25 bp, Homo sapien
aatcagaatgacaggccatactgtg

SEQ ID NO: 5186105 - DNA, 25 bp, Homo sapien
agaggatggagggacatcactagtt

SEQ ID NO: 5186106 - DNA, 25 bp, Homo sapien
gagaggatggagggacatcactagt

SEQ ID NO: 5186107 - DNA, 25 bp, Homo sapien
gagatggcagatcttcccctgaggt

SEQ ID NO: 5186108 - DNA, 25 bp, Homo sapien
cctctagggtgtggcatctttgtga

SEQ ID NO: 5186109 - DNA, 25 bp, Homo sapien
gaatgcagggtcagctagcacctct

SEQ ID NO: 5186110 - DNA, 25 bp, Homo sapien
ctgtggcacagaaatactagaggga

SEQ ID NO: 5186111 - DNA, 25 bp, Homo sapien
taagtttttgtgtgctcgtttgccc

SEQ ID NO: 5186112 - DNA, 25 bp, Homo sapien
tctggtaccacaaagaatcccttaa

SEQ ID NO: 5186113 - DNA, 25 bp, Homo sapien
tgacacacttttccagaggcgcttt

SEQ ID NO: 5186114 - DNA, 25 bp, Homo sapien
cctgcagataagacaccctggtgaa

SEQ ID NO: 5186115 - DNA, 25 bp, Homo sapien
atattgaagcatgggaattaccaat

SEQ ID NO: 5186116 - DNA, 25 bp, Homo sapien
ctggaaaggcaattaaggcttctac

SEQ ID NO: 5186117 - DNA, 25 bp, Homo sapien
tgggaattaccaatataatctttct

SEQ ID NO: 5186118 - DNA, 25 bp, Homo sapien
ctgtttctggaaaggcaattaaggc

SEQ ID NO: 5186119 - DNA, 25 bp, Homo sapien
ccacagtgaaggagttgtcagcaga

SEQ ID NO: 5186120 - DNA, 25 bp, Homo sapien
tgctgtatttgttcatgtcctccac

SEQ ID NO: 5186121 - DNA, 25 bp, Homo sapien
ttgcttgcattcatcttgggtccct

SEQ ID NO: 5186122 - DNA, 25 bp, Homo sapien
atcttgggtccctctgtgaattctg

SEQ ID NO: 5186123 - DNA, 25 bp, Homo sapien
tgtatccatgggaatttcaatattt

SEQ ID NO: 5186124 - DNA, 25 bp, Homo sapien
tttccaaaggctccaatatattctt

SEQ ID NO: 5186125 - DNA, 25 bp, Homo sapien
aatttcgttactggctcttcatcta

SEQ ID NO: 5186126 - DNA, 25 bp, Homo sapien
tgtttttcagaagtttctgggctca

SEQ ID NO: 5186127 - DNA, 25 bp, Homo sapien
tgcatacacctgtgcatagtcatgg

SEQ ID NO: 5186128 - DNA, 25 bp, Homo sapien
tattgtaattcccatatccgcgatc

SEQ ID NO: 5186129 - DNA, 25 bp, Homo sapien
ctcttggccactatagtctgcatac

SEQ ID NO: 5186130 - DNA, 25 bp, Homo sapien
cctatagttatacccagcatgatca

SEQ ID NO: 5186131 - DNA, 25 bp, Homo sapien
ttctgcaaatgatcttgcctcgtac

SEQ ID NO: 5186132 - DNA, 25 bp, Homo sapien
ttgcctcgtactctactgaaggatc

SEQ ID NO: 5186133 - DNA, 25 bp, Homo sapien
tctgcaaatgatcttgcctcgtact

SEQ ID NO: 5186134 - DNA, 25 bp, Homo sapien
atgatcttgcctcgtactctactga

SEQ ID NO: 5186135 - DNA, 25 bp, Homo sapien
tgtctgctctcctgaagcccccact

SEQ ID NO: 5186136 - DNA, 25 bp, Homo sapien
tccaatgtctgctctcctgaagccc

SEQ ID NO: 5186137 - DNA, 25 bp, Homo sapien
tgctctcctgaagcccccactttac

SEQ ID NO: 5186138 - DNA, 25 bp, Homo sapien
ctgtccaatgtctgctctcctgaag

SEQ ID NO: 5186139 - DNA, 25 bp, Homo sapien
gcggccggcgtcgacgcggactcag

SEQ ID NO: 5186140 - DNA, 25 bp, Homo sapien
cctctaccccttgcccatggtgccg

SEQ ID NO: 5186141 - DNA, 25 bp, Homo sapien
attaaaaaagtgccgcggcggcgcg

SEQ ID NO: 5186142 - DNA, 25 bp, Homo sapien
ggcggtggccaacttgcccctctac

SEQ ID NO: 5186143 - DNA, 25 bp, Homo sapien
cgtcgtcgctccagggatcagggac

SEQ ID NO: 5186144 - DNA, 25 bp, Homo sapien
ggatcagggacatcggcgccgaggg

SEQ ID NO: 5186145 - DNA, 25 bp, Homo sapien
agggatcagggacatcggcgccgag

SEQ ID NO: 5186146 - DNA, 25 bp, Homo sapien
agcggccgtcgtcgctccagggatc

SEQ ID NO: 5186147 - DNA, 25 bp, Homo sapien
gagaggaatcgccgggaaaagcaaa

SEQ ID NO: 5186148 - DNA, 25 bp, Homo sapien
aaaagcaaatggagggtgaaacttg

SEQ ID NO: 5186149 - DNA, 25 bp, Homo sapien
caaatggagggtgaaacttgtgcgc

SEQ ID NO: 5186150 - DNA, 25 bp, Homo sapien
aatcgccgggaaaagcaaatggagg

SEQ ID NO: 5186151 - DNA, 25 bp, Homo sapien
ctagaaggacagacagccggccccg

SEQ ID NO: 5186152 - DNA, 25 bp, Homo sapien
gcccagtggtgtcgagggcgacttg

SEQ ID NO: 5186153 - DNA, 25 bp, Homo sapien
tccgaacagcccagcgtgggcagag

SEQ ID NO: 5186154 - DNA, 25 bp, Homo sapien
ccgagtgctgaggagggcgggcgcc

SEQ ID NO: 5186155 - DNA, 25 bp, Homo sapien
caggacttcggggacaaacgcaaga

SEQ ID NO: 5186156 - DNA, 25 bp, Homo sapien
acaaacgcaagaccgcgcgggcagc

SEQ ID NO: 5186157 - DNA, 25 bp, Homo sapien
gaccggcaaggagtacaggacttcg

SEQ ID NO: 5186158 - DNA, 25 bp, Homo sapien
caggaccggcaaggagtacaggact

SEQ ID NO: 5186159 - DNA, 25 bp, Homo sapien
ggagcgtgaggatccgcggccggta

SEQ ID NO: 5186160 - DNA, 25 bp, Homo sapien
tggagcgtgaggatccgcggccggt

SEQ ID NO: 5186161 - DNA, 25 bp, Homo sapien
gagcgtgaggatccgcggccggtag

SEQ ID NO: 5186162 - DNA, 25 bp, Homo sapien
gcgtgaggatccgcggccggtagag

SEQ ID NO: 5186163 - DNA, 25 bp, Homo sapien
ggcgcaggagggcagcggcgaggct

SEQ ID NO: 5186164 - DNA, 25 bp, Homo sapien
aggaagcggcggcgcaggagggcag

SEQ ID NO: 5186165 - DNA, 25 bp, Homo sapien
cgcaggagggcagcggcgaggctcg

SEQ ID NO: 5186166 - DNA, 25 bp, Homo sapien
cggcggcgcaggagggcagcggcga

SEQ ID NO: 5186167 - DNA, 25 bp, Homo sapien
ctccgggtagcggtccaggggagag

SEQ ID NO: 5186168 - DNA, 25 bp, Homo sapien
agggaggtgccgcagctccgcttca

SEQ ID NO: 5186169 - DNA, 25 bp, Homo sapien
cagcgggcggggataccagatccgc

SEQ ID NO: 5186170 - DNA, 25 bp, Homo sapien
gcagcctcggcagcgggcggggata

SEQ ID NO: 5186171 - DNA, 25 bp, Homo sapien
cgcgctcgcggtgtgtcgcactcag

SEQ ID NO: 5186172 - DNA, 25 bp, Homo sapien
ctcgcggtgtgtcgcactcagccaa

SEQ ID NO: 5186173 - DNA, 25 bp, Homo sapien
tgtgtcgcactcagccaacacgcag

SEQ ID NO: 5186174 - DNA, 25 bp, Homo sapien
agccaacacgcagccaaatcccggc

SEQ ID NO: 5186175 - DNA, 25 bp, Homo sapien
ggagggaaggcgctagggcagccgc

SEQ ID NO: 5186176 - DNA, 25 bp, Homo sapien
ggactctgcccctggtgcattcctc

SEQ ID NO: 5186177 - DNA, 25 bp, Homo sapien
ttcctcgcattcctgcacaatctgt

SEQ ID NO: 5186178 - DNA, 25 bp, Homo sapien
agccgcggcgggctgtgtggactct

SEQ ID NO: 5186179 - DNA, 25 bp, Homo sapien
gctccgaagatgctccggtgacctc

SEQ ID NO: 5186180 - DNA, 25 bp, Homo sapien
tccgaagatgctccggtgacctctg

SEQ ID NO: 5186181 - DNA, 25 bp, Homo sapien
ccgaagatgctccggtgacctctgg

SEQ ID NO: 5186182 - DNA, 25 bp, Homo sapien
cagctccgaagatgctccggtgacc

SEQ ID NO: 5186183 - DNA, 25 bp, Homo sapien
aatgcagcaaaaacccagacgaaag

SEQ ID NO: 5186184 - DNA, 25 bp, Homo sapien
aacccagacgaaaggctagctggag

SEQ ID NO: 5186185 - DNA, 25 bp, Homo sapien
aaagaattaccgcgcttcccctctg

SEQ ID NO: 5186186 - DNA, 25 bp, Homo sapien
ctgaagaccaatgcagcaaaaaccc

SEQ ID NO: 5186187 - DNA, 25 bp, Homo sapien
aatgatcaataaccttggctacaca

SEQ ID NO: 5186188 - DNA, 25 bp, Homo sapien
gcaatgatcaataaccttggctaca

SEQ ID NO: 5186189 - DNA, 25 bp, Homo sapien
ccttggctacacagtcatcggcccc

SEQ ID NO: 5186190 - DNA, 25 bp, Homo sapien
ttggctacacagtcatcggccccaa

SEQ ID NO: 5186191 - DNA, 25 bp, Homo sapien
ctagtgaaaaccaggcactatccaa

SEQ ID NO: 5186192 - DNA, 25 bp, Homo sapien
agtgaaaaccaggcactatccaaac

SEQ ID NO: 5186193 - DNA, 25 bp, Homo sapien
tagtgaaaaccaggcactatccaaa

SEQ ID NO: 5186194 - DNA, 25 bp, Homo sapien
tactttcaatggtaactgacacgtc

SEQ ID NO: 5186195 - DNA, 25 bp, Homo sapien
catgattgtggtgtccccgtgttac

SEQ ID NO: 5186196 - DNA, 25 bp, Homo sapien
taccagacagttctatctgtcccat

SEQ ID NO: 5186197 - DNA, 25 bp, Homo sapien
tcccgaatttaactgtaccagacag

SEQ ID NO: 5186198 - DNA, 25 bp, Homo sapien
gcaatatactgcattcaagaagaga

SEQ ID NO: 5186199 - DNA, 25 bp, Homo sapien
gaatctaagctcaattctagcgaac

SEQ ID NO: 5186200 - DNA, 25 bp, Homo sapien
tttgaccaaaaatgcatactagcca

SEQ ID NO: 5186201 - DNA, 25 bp, Homo sapien
ttgctctcccgtattaaggaaaaca

SEQ ID NO: 5186202 - DNA, 25 bp, Homo sapien
cattagttgttctcgttttcatgtt

SEQ ID NO: 5186203 - DNA, 25 bp, Homo sapien
cagacattagttgttctcgttttca

SEQ ID NO: 5186204 - DNA, 25 bp, Homo sapien
tcagacattagttgttctcgttttc

SEQ ID NO: 5186205 - DNA, 25 bp, Homo sapien
tagttgttctcgttttcatgttgcc

SEQ ID NO: 5186206 - DNA, 25 bp, Homo sapien
tgcaacctgcaaagcaaattgtgtc

SEQ ID NO: 5186207 - DNA, 25 bp, Homo sapien
ccaggtgcaaagaggtttatcataa

SEQ ID NO: 5186208 - DNA, 25 bp, Homo sapien
tgttgagtccttaactaaaggctcc

SEQ ID NO: 5186209 - DNA, 25 bp, Homo sapien
gaatctgacataaaataaccaggtg

SEQ ID NO: 5186210 - DNA, 25 bp, Homo sapien
cctattagtagtatgataaagagca

SEQ ID NO: 5186211 - DNA, 25 bp, Homo sapien
tatagtaccaataacccttagcatt

SEQ ID NO: 5186212 - DNA, 25 bp, Homo sapien
ttagtcttggtgcttgattggtgcc

SEQ ID NO: 5186213 - DNA, 25 bp, Homo sapien
ccaactaggtcaaaacaagctatga

SEQ ID NO: 5186214 - DNA, 25 bp, Homo sapien
acaggtgtaggccactagcattctt

SEQ ID NO: 5186215 - DNA, 25 bp, Homo sapien
ggtgtaggccactagcattcttaaa

SEQ ID NO: 5186216 - DNA, 25 bp, Homo sapien
gtgtaggccactagcattcttaaaa

SEQ ID NO: 5186217 - DNA, 25 bp, Homo sapien
gacaaaactatagttgtaatgaaaa

SEQ ID NO: 5186218 - DNA, 25 bp, Homo sapien
tggcagaggtatgtacaacagtcac

SEQ ID NO: 5186219 - DNA, 25 bp, Homo sapien
taacgggccttatatggtaggtcgc

SEQ ID NO: 5186220 - DNA, 25 bp, Homo sapien
cgaagacttcatttagccagatgca

SEQ ID NO: 5186221 - DNA, 25 bp, Homo sapien
ccagcagggtaaacaatggagagcc

SEQ ID NO: 5186222 - DNA, 25 bp, Homo sapien
gctgtgcttgcaccccacttatgag

SEQ ID NO: 5186223 - DNA, 25 bp, Homo sapien
tctgattgtcacctgcaaagctttt

SEQ ID NO: 5186224 - DNA, 25 bp, Homo sapien
tggaagtactcccttctaacaagtc

SEQ ID NO: 5186225 - DNA, 25 bp, Homo sapien
tatactaggttggatggcttacagt

SEQ ID NO: 5186226 - DNA, 25 bp, Homo sapien
tcatagcgtgacaaactccattctc

SEQ ID NO: 5186227 - DNA, 25 bp, Homo sapien
tatggaatatatcacagggctggga

SEQ ID NO: 5186228 - DNA, 25 bp, Homo sapien
cactcccacgggctgaatcatagcg

SEQ ID NO: 5186229 - DNA, 25 bp, Homo sapien
cagtttgccatgtggcaggtcctaa

SEQ ID NO: 5186230 - DNA, 25 bp, Homo sapien
caactccactggaggaacaaaagac

SEQ ID NO: 5186231 - DNA, 25 bp, Homo sapien
ccactggaggaacaaaagacaagca

SEQ ID NO: 5186232 - DNA, 25 bp, Homo sapien
aactccactggaggaacaaaagaca

SEQ ID NO: 5186233 - DNA, 25 bp, Homo sapien
ctccactggaggaacaaaagacaag

SEQ ID NO: 5186234 - DNA, 25 bp, Homo sapien
cgaagaataccttgagaactagggc

SEQ ID NO: 5186235 - DNA, 25 bp, Homo sapien
gccctgccaagatagcgagacatca

SEQ ID NO: 5186236 - DNA, 25 bp, Homo sapien
tagagagtatcagcaccgcacagct

SEQ ID NO: 5186237 - DNA, 25 bp, Homo sapien
gatcacgcacccctttttacgatgg

SEQ ID NO: 5186238 - DNA, 25 bp, Homo sapien
gttatccagctaaaacccagtggtg

SEQ ID NO: 5186239 - DNA, 25 bp, Homo sapien
attttggaccactgaaggcacccct

SEQ ID NO: 5186240 - DNA, 25 bp, Homo sapien
tctatagctggaaacacaactgggt

SEQ ID NO: 5186241 - DNA, 25 bp, Homo sapien
taccgcaggctctctcattggaggg

SEQ ID NO: 5186242 - DNA, 25 bp, Homo sapien
aacctggcatgtagcaattagaaat

SEQ ID NO: 5186243 - DNA, 25 bp, Homo sapien
cagacacatataaaccaacctggca

SEQ ID NO: 5186244 - DNA, 25 bp, Homo sapien
gacacatataaaccaacctggcatg

SEQ ID NO: 5186245 - DNA, 25 bp, Homo sapien
acctggcatgtagcaattagaaata

SEQ ID NO: 5186246 - DNA, 25 bp, Homo sapien
gaggcaaagtcctggagcacagcca

SEQ ID NO: 5186247 - DNA, 25 bp, Homo sapien
ggggaggcaaagtcctggagcacag

SEQ ID NO: 5186248 - DNA, 25 bp, Homo sapien
ggaggcaaagtcctggagcacagcc

SEQ ID NO: 5186249 - DNA, 25 bp, Homo sapien
aggggaggcaaagtcctggagcaca

SEQ ID NO: 5186250 - DNA, 25 bp, Homo sapien
tcacagatctgtgaaatttggtgtg

SEQ ID NO: 5186251 - DNA, 25 bp, Homo sapien
cagatctgtgaaatttggtgtgccc

SEQ ID NO: 5186252 - DNA, 25 bp, Homo sapien
gatctgtgaaatttggtgtgccctc

SEQ ID NO: 5186253 - DNA, 25 bp, Homo sapien
tctgtgaaatttggtgtgccctcac

SEQ ID NO: 5186254 - DNA, 25 bp, Homo sapien
caaaataggcacacaatagagactg

SEQ ID NO: 5186255 - DNA, 25 bp, Homo sapien
taggcacacaatagagactgaaata

SEQ ID NO: 5186256 - DNA, 25 bp, Homo sapien
gtataagagtgaatcaaaataggca

SEQ ID NO: 5186257 - DNA, 25 bp, Homo sapien
gacagaagacagtataagagtgaat

SEQ ID NO: 5186258 - DNA, 25 bp, Homo sapien
aagagttagctagaacagtctcagg

SEQ ID NO: 5186259 - DNA, 25 bp, Homo sapien
cattagcggcataaactcatcttca

SEQ ID NO: 5186260 - DNA, 25 bp, Homo sapien
taccttcgactaacagctgccatgg

SEQ ID NO: 5186261 - DNA, 25 bp, Homo sapien
tcaggttgccatgaccgagtcctgg

SEQ ID NO: 5186262 - DNA, 25 bp, Homo sapien
caattatggaaagctcaccacggag

SEQ ID NO: 5186263 - DNA, 25 bp, Homo sapien
ccacggagagcaacagggtcacatt

SEQ ID NO: 5186264 - DNA, 25 bp, Homo sapien
caaggaaattctgtggacccggaga

SEQ ID NO: 5186265 - DNA, 25 bp, Homo sapien
taaaggaagtccactcctggcaatg

SEQ ID NO: 5186266 - DNA, 25 bp, Homo sapien
cagatgcagtggtagagatcaatca

SEQ ID NO: 5186267 - DNA, 25 bp, Homo sapien
aatctcgggcaaaatctaggtgtaa

SEQ ID NO: 5186268 - DNA, 25 bp, Homo sapien
gatcaatcactaaagaaatctcggg

SEQ ID NO: 5186269 - DNA, 25 bp, Homo sapien
cctgacgtgagtttcggcagagctc

SEQ ID NO: 5186270 - DNA, 25 bp, Homo sapien
tccaagtgggctacttaaggacact

SEQ ID NO: 5186271 - DNA, 25 bp, Homo sapien
taaggacactaggaagatgtactcg

SEQ ID NO: 5186272 - DNA, 25 bp, Homo sapien
gatgtactcgggtattgccatcctg

SEQ ID NO: 5186273 - DNA, 25 bp, Homo sapien
cagtatcctcacaggcagatgcatc

SEQ ID NO: 5186274 - DNA, 25 bp, Homo sapien
ctttggttgcacagataaattcccc

SEQ ID NO: 5186275 - DNA, 25 bp, Homo sapien
gcttatttcatgaacactcacatgg

SEQ ID NO: 5186276 - DNA, 25 bp, Homo sapien
ccttggtatactgtacactctggta

SEQ ID NO: 5186277 - DNA, 25 bp, Homo sapien
catgtccagtttaggacagacgtta

SEQ ID NO: 5186278 - DNA, 25 bp, Homo sapien
tcatcacctagctgatgcagcaaca

SEQ ID NO: 5186279 - DNA, 25 bp, Homo sapien
tctcccagggacattgaccattagg

SEQ ID NO: 5186280 - DNA, 25 bp, Homo sapien
gcagagtacggcaagatgtaaatgc

SEQ ID NO: 5186281 - DNA, 25 bp, Homo sapien
caacataggatcaaggcagagtacg

SEQ ID NO: 5186282 - DNA, 25 bp, Homo sapien
ggtctcgggttccatgcctgggcca

SEQ ID NO: 5186283 - DNA, 25 bp, Homo sapien
caccaatgaggcctgctcaggagct

SEQ ID NO: 5186284 - DNA, 25 bp, Homo sapien
ctagaatagtggtggctgtggtctc

SEQ ID NO: 5186285 - DNA, 25 bp, Homo sapien
tcctggcgggtctgtggttgcccct

SEQ ID NO: 5186286 - DNA, 25 bp, Homo sapien
atctagttattacaactaagagagt

SEQ ID NO: 5186287 - DNA, 25 bp, Homo sapien
catgcccagcgctgtatttatctag

SEQ ID NO: 5186288 - DNA, 25 bp, Homo sapien
ccatgcccagcgctgtatttatcta

SEQ ID NO: 5186289 - DNA, 25 bp, Homo sapien
tttatctagttattacaactaagag

SEQ ID NO: 5186290 - DNA, 25 bp, Homo sapien
gataactcacgatgaacacttcact

SEQ ID NO: 5186291 - DNA, 25 bp, Homo sapien
cctattagggtagatgataactcac

SEQ ID NO: 5186292 - DNA, 25 bp, Homo sapien
cactgatgccgcgttgctttatagg

SEQ ID NO: 5186293 - DNA, 25 bp, Homo sapien
cttcagttgggcataaagggcttac

SEQ ID NO: 5186294 - DNA, 25 bp, Homo sapien
gcttctctgcaacaacaggggccag

SEQ ID NO: 5186295 - DNA, 25 bp, Homo sapien
ttctctgcaacaacaggggccaggg

SEQ ID NO: 5186296 - DNA, 25 bp, Homo sapien
tgcttctctgcaacaacaggggcca

SEQ ID NO: 5186297 - DNA, 25 bp, Homo sapien
tctgcaacaacaggggccagggcca

SEQ ID NO: 5186298 - DNA, 25 bp, Homo sapien
tatccaatgccaaaattctcaggtc

SEQ ID NO: 5186299 - DNA, 25 bp, Homo sapien
ttttctcaaacaggggatccatcac

SEQ ID NO: 5186300 - DNA, 25 bp, Homo sapien
aatgccaaaattctcaggtcttttc

SEQ ID NO: 5186301 - DNA, 25 bp, Homo sapien
gtcttttctcaaacaggggatccat

SEQ ID NO: 5186302 - DNA, 25 bp, Homo sapien
ctccaaaggtggtgacaatgttaac

SEQ ID NO: 5186303 - DNA, 25 bp, Homo sapien
cagctaaccgaagctcctttgtctt

SEQ ID NO: 5186304 - DNA, 25 bp, Homo sapien
acagacatcccaggcttgccttccc

SEQ ID NO: 5186305 - DNA, 25 bp, Homo sapien
ttccaccagctaaccgaagctcctt

SEQ ID NO: 5186306 - DNA, 25 bp, Homo sapien
tcctttagcgtttgccctttccagc

SEQ ID NO: 5186307 - DNA, 25 bp, Homo sapien
cctttagcgtttgccctttccagct

SEQ ID NO: 5186308 - DNA, 25 bp, Homo sapien
aatttttgttatttttatgtgcaga

SEQ ID NO: 5186309 - DNA, 25 bp, Homo sapien
ttttgttatttttatgtgcagaaaa

SEQ ID NO: 5186310 - DNA, 25 bp, Homo sapien
tatgtgcagaaaactcaaccgtgta

SEQ ID NO: 5186311 - DNA, 25 bp, Homo sapien
gaatttttgttatttttatgtgcag

SEQ ID NO: 5186312 - DNA, 25 bp, Homo sapien
aggtggccatgagctgaatcttcag

SEQ ID NO: 5186313 - DNA, 25 bp, Homo sapien
gactgccctaccagagcctggatgg

SEQ ID NO: 5186314 - DNA, 25 bp, Homo sapien
gccagaaggctactgaatgtcagga

SEQ ID NO: 5186315 - DNA, 25 bp, Homo sapien
tcttcagcgaatgacagtgagtgcc

SEQ ID NO: 5186316 - DNA, 25 bp, Homo sapien
acctctaattattagcataaagtag

SEQ ID NO: 5186317 - DNA, 25 bp, Homo sapien
aattattagcataaagtagttcata

SEQ ID NO: 5186318 - DNA, 25 bp, Homo sapien
tccttactacctctaattattagca

SEQ ID NO: 5186319 - DNA, 25 bp, Homo sapien
ccttactacctctaattattagcat

SEQ ID NO: 5186320 - DNA, 25 bp, Homo sapien
ctcattaagtcctcactgatggcca

SEQ ID NO: 5186321 - DNA, 25 bp, Homo sapien
cctcattaagtcctcactgatggcc

SEQ ID NO: 5186322 - DNA, 25 bp, Homo sapien
tcattaagtcctcactgatggccat

SEQ ID NO: 5186323 - DNA, 25 bp, Homo sapien
gctgtagtcagggagaatttctcag

SEQ ID NO: 5186324 - DNA, 25 bp, Homo sapien
tcctgcatggtcattgggtgtgaaa

SEQ ID NO: 5186325 - DNA, 25 bp, Homo sapien
taccgaatctacagtatagcgcttt

SEQ ID NO: 5186326 - DNA, 25 bp, Homo sapien
gaaagactggttagaataccgaatc

SEQ ID NO: 5186327 - DNA, 25 bp, Homo sapien
taatttgaaccctcaccttaggctg

SEQ ID NO: 5186328 - DNA, 25 bp, Homo sapien
taggctgtcctcaaatgcctgtggc

SEQ ID NO: 5186329 - DNA, 25 bp, Homo sapien
tccagagcaaagagacctagaagtg

SEQ ID NO: 5186330 - DNA, 25 bp, Homo sapien
tgcttggtcgaaaggtacacacatc

SEQ ID NO: 5186331 - DNA, 25 bp, Homo sapien
gattgagggctggagtactgtcctc

SEQ ID NO: 5186332 - DNA, 25 bp, Homo sapien
caataccttcgtcctctgagttcag

SEQ ID NO: 5186333 - DNA, 25 bp, Homo sapien
caggaaaagactactcaggaatccc

SEQ ID NO: 5186334 - DNA, 25 bp, Homo sapien
tggttgtatcaagctgggccaggaa

SEQ ID NO: 5186335 - DNA, 25 bp, Homo sapien
aataaaaggcatataaggcgccaag

SEQ ID NO: 5186336 - DNA, 25 bp, Homo sapien
aaaaggcatataaggcgccaaggta

SEQ ID NO: 5186337 - DNA, 25 bp, Homo sapien
aaggcatataaggcgccaaggtatg

SEQ ID NO: 5186338 - DNA, 25 bp, Homo sapien
taaaaggcatataaggcgccaaggt

SEQ ID NO: 5186339 - DNA, 25 bp, Homo sapien
tccagttctcgggtgagtcgctgaa

SEQ ID NO: 5186340 - DNA, 25 bp, Homo sapien
tggcgatgcttggtgattctgctcc

SEQ ID NO: 5186341 - DNA, 25 bp, Homo sapien
tgactggcaacaatctgcctttcca

SEQ ID NO: 5186342 - DNA, 25 bp, Homo sapien
agcctacatctttctagctgactgg

SEQ ID NO: 5186343 - DNA, 25 bp, Homo sapien
tgcccatgagtaacacaagatactg

SEQ ID NO: 5186344 - DNA, 25 bp, Homo sapien
tcatattactacaacttaccagccc

SEQ ID NO: 5186345 - DNA, 25 bp, Homo sapien
cattgggtattgcaaagtctgagtt

SEQ ID NO: 5186346 - DNA, 25 bp, Homo sapien
agagaaaagttattgcaggcatgtc

SEQ ID NO: 5186347 - DNA, 25 bp, Homo sapien
ccatattattgagtttgtgagttgt

SEQ ID NO: 5186348 - DNA, 25 bp, Homo sapien
gaaatacatgacgaacaaagcacag

SEQ ID NO: 5186349 - DNA, 25 bp, Homo sapien
tacattcaggtgctgtaatctctcg

SEQ ID NO: 5186350 - DNA, 25 bp, Homo sapien
cctttaaaggacatggcttagtgca

SEQ ID NO: 5186351 - DNA, 25 bp, Homo sapien
tgggcactgacaagtcctattctgt

SEQ ID NO: 5186352 - DNA, 25 bp, Homo sapien
acagtcacttgccaggcacaaatgc

SEQ ID NO: 5186353 - DNA, 25 bp, Homo sapien
ttcattcacccgacattcactggtg

SEQ ID NO: 5186354 - DNA, 25 bp, Homo sapien
ttcactggtggtgccacagtcactt

SEQ ID NO: 5186355 - DNA, 25 bp, Homo sapien
agtcacttgccaggcacaaatgcca

SEQ ID NO: 5186356 - DNA, 25 bp, Homo sapien
ggttcattatccattcaatgatcat

SEQ ID NO: 5186357 - DNA, 25 bp, Homo sapien
cgaagcatcctggacttaaggttca

SEQ ID NO: 5186358 - DNA, 25 bp, Homo sapien
gaatgagccttactacctgttgagc

SEQ ID NO: 5186359 - DNA, 25 bp, Homo sapien
tgggtgcccacttgctgagcgccag

SEQ ID NO: 5186360 - DNA, 25 bp, Homo sapien
gcttcagtgtccttggagtggaggc

SEQ ID NO: 5186361 - DNA, 25 bp, Homo sapien
taaaaggaatgccatttaactccac

SEQ ID NO: 5186362 - DNA, 25 bp, Homo sapien
tacggagtaagaatacggtcttatc

SEQ ID NO: 5186363 - DNA, 25 bp, Homo sapien
tatctacaccattgcctgcttcagt

SEQ ID NO: 5186364 - DNA, 25 bp, Homo sapien
gcacttgggaattccgctggcacgt

SEQ ID NO: 5186365 - DNA, 25 bp, Homo sapien
ccctggtcctgggaaacggaatgcg

SEQ ID NO: 5186366 - DNA, 25 bp, Homo sapien
aatttggtgtacgtgcttggctgag

SEQ ID NO: 5186367 - DNA, 25 bp, Homo sapien
tcagttggcctcgaatcactgggtc

SEQ ID NO: 5186368 - DNA, 25 bp, Homo sapien
ggaaccaatttatgatgtacaaaga

SEQ ID NO: 5186369 - DNA, 25 bp, Homo sapien
ttgttttagtcaggagacaaactac

SEQ ID NO: 5186370 - DNA, 25 bp, Homo sapien
tgaacaatgtgaagggaccaaatgc

SEQ ID NO: 5186371 - DNA, 25 bp, Homo sapien
tagcagggctttaaactaactgaaa

SEQ ID NO: 5186372 - DNA, 25 bp, Homo sapien
tctcattgcatcgtatcaggtgact

SEQ ID NO: 5186373 - DNA, 25 bp, Homo sapien
catgggtgacgttacatacttctca

SEQ ID NO: 5186374 - DNA, 25 bp, Homo sapien
taagtgggttcatgtcctgtcagcc

SEQ ID NO: 5186375 - DNA, 25 bp, Homo sapien
ttttagggcaagaacatgtcatggg

SEQ ID NO: 5186376 - DNA, 25 bp, Homo sapien
tgatcaggagatacaacatacttta

SEQ ID NO: 5186377 - DNA, 25 bp, Homo sapien
tagctaggttaaatgcattctttgc

SEQ ID NO: 5186378 - DNA, 25 bp, Homo sapien
ccagaatcctcttagttatgtgaac

SEQ ID NO: 5186379 - DNA, 25 bp, Homo sapien
aactgggctccatagttccctgtca

SEQ ID NO: 5186380 - DNA, 25 bp, Homo sapien
gatgtaattaatacatgaatcaggt

SEQ ID NO: 5186381 - DNA, 25 bp, Homo sapien
cattttgagctctgatcctaagttc

SEQ ID NO: 5186382 - DNA, 25 bp, Homo sapien
tctaaattattcttaagtgttcttc

SEQ ID NO: 5186383 - DNA, 25 bp, Homo sapien
ctgtgcctggtacacaatattctct

SEQ ID NO: 5186384 - DNA, 25 bp, Homo sapien
ctttgggactcagggattggacaac

SEQ ID NO: 5186385 - DNA, 25 bp, Homo sapien
cacaggcagcttcatgttagaaaca

SEQ ID NO: 5186386 - DNA, 25 bp, Homo sapien
cagcttgcgttctaggagcttccac

SEQ ID NO: 5186387 - DNA, 25 bp, Homo sapien
aatgtgtctgtaggcactgtgccca

SEQ ID NO: 5186388 - DNA, 25 bp, Homo sapien
ttgatctccaaggaaatgacttctc

SEQ ID NO: 5186389 - DNA, 25 bp, Homo sapien
gaagctactagatattctacatgtg

SEQ ID NO: 5186390 - DNA, 25 bp, Homo sapien
tcaagcgacttttctctgagtatga

SEQ ID NO: 5186391 - DNA, 25 bp, Homo sapien
gatagagagactacatggaaagcta

SEQ ID NO: 5186392 - DNA, 25 bp, Homo sapien
tacccaacttgtataattagcagct

SEQ ID NO: 5186393 - DNA, 25 bp, Homo sapien
taactagtggaaatgttaaatggta

SEQ ID NO: 5186394 - DNA, 25 bp, Homo sapien
atacaaatggtcataaaagcattat

SEQ ID NO: 5186395 - DNA, 25 bp, Homo sapien
cataacagacaaaagtagtaagacc

SEQ ID NO: 5186396 - DNA, 25 bp, Homo sapien
acaccattctcctgtagaaccgtta

SEQ ID NO: 5186397 - DNA, 25 bp, Homo sapien
cttgcagcaaaattcacttcatgga

SEQ ID NO: 5186398 - DNA, 25 bp, Homo sapien
tatacgttcttacaagttacctcaa

SEQ ID NO: 5186399 - DNA, 25 bp, Homo sapien
gtatagcattttcgctcatgaagaa

SEQ ID NO: 5186400 - DNA, 25 bp, Homo sapien
tatttcgagatgtgaagcagtgaac

SEQ ID NO: 5186401 - DNA, 25 bp, Homo sapien
tatcacctacgtaacatccatcaat

SEQ ID NO: 5186402 - DNA, 25 bp, Homo sapien
aacatccatcaatttctcgaacact

SEQ ID NO: 5186403 - DNA, 25 bp, Homo sapien
catcaatttctcgaacactttcttt

SEQ ID NO: 5186404 - DNA, 25 bp, Homo sapien
caattctttatcacctacgtaacat

SEQ ID NO: 5186405 - DNA, 25 bp, Homo sapien
cagttggtaaaaaggcagtcaagac

SEQ ID NO: 5186406 - DNA, 25 bp, Homo sapien
tcaggaagctatagcactgcagttg

SEQ ID NO: 5186407 - DNA, 25 bp, Homo sapien
gagagaaacttgtactctacagctg

SEQ ID NO: 5186408 - DNA, 25 bp, Homo sapien
gactgtgtggctaaatgggcctgta

SEQ ID NO: 5186409 - DNA, 25 bp, Homo sapien
tctcctaatgcgatggttctcagcc

SEQ ID NO: 5186410 - DNA, 25 bp, Homo sapien
tagctaaaagctttcaggtcaagcc

SEQ ID NO: 5186411 - DNA, 25 bp, Homo sapien
ggtcaagcctttgtgggtagcatac

SEQ ID NO: 5186412 - DNA, 25 bp, Homo sapien
tgtactcgtcaagctgaaataaggt

SEQ ID NO: 5186413 - DNA, 25 bp, Homo sapien
tgtaaattgaggatcgaaggctctg

SEQ ID NO: 5186414 - DNA, 25 bp, Homo sapien
catatcatttatgtcagggctgacc

SEQ ID NO: 5186415 - DNA, 25 bp, Homo sapien
tattcttatttggtggtggcccacg

SEQ ID NO: 5186416 - DNA, 25 bp, Homo sapien
cactggctgggaaactcatgcatcc

SEQ ID NO: 5186417 - DNA, 25 bp, Homo sapien
tgtgctcggccattcagttattttt

SEQ ID NO: 5186418 - DNA, 25 bp, Homo sapien
gaatagctgcagagatcaaagtatc

SEQ ID NO: 5186419 - DNA, 25 bp, Homo sapien
tctgtttccttagtagagcccaatg

SEQ ID NO: 5186420 - DNA, 25 bp, Homo sapien
tcctgaaatctattctgatttatga

SEQ ID NO: 5186421 - DNA, 25 bp, Homo sapien
tatctgctttaatttaacagtacca

SEQ ID NO: 5186422 - DNA, 25 bp, Homo sapien
tttcttccagccaaactcatctctt

SEQ ID NO: 5186423 - DNA, 25 bp, Homo sapien
tcatctcttccattatctgctttaa

SEQ ID NO: 5186424 - DNA, 25 bp, Homo sapien
ttaatttaacagtaccatttgccat

SEQ ID NO: 5186425 - DNA, 25 bp, Homo sapien
agttgttgggctggacagcgtcaga

SEQ ID NO: 5186426 - DNA, 25 bp, Homo sapien
gttgttgggctggacagcgtcagaa

SEQ ID NO: 5186427 - DNA, 25 bp, Homo sapien
tagttgttgggctggacagcgtcag

SEQ ID NO: 5186428 - DNA, 25 bp, Homo sapien
atagttgttgggctggacagcgtca

SEQ ID NO: 5186429 - DNA, 25 bp, Homo sapien
tctggtgaatagagggttccttgtt

SEQ ID NO: 5186430 - DNA, 25 bp, Homo sapien
tgaatagagggttccttgttctggc

SEQ ID NO: 5186431 - DNA, 25 bp, Homo sapien
tgtctgttctggtgaatagagggtt

SEQ ID NO: 5186432 - DNA, 25 bp, Homo sapien
tttcatggagagatgtctgttctgg

SEQ ID NO: 5186433 - DNA, 25 bp, Homo sapien
tctgacactcgctttcaagaataaa

SEQ ID NO: 5186434 - DNA, 25 bp, Homo sapien
gacactcgctttcaagaataaaatc

SEQ ID NO: 5186435 - DNA, 25 bp, Homo sapien
ttctgacactcgctttcaagaataa

SEQ ID NO: 5186436 - DNA, 25 bp, Homo sapien
ctgacactcgctttcaagaataaaa

SEQ ID NO: 5186437 - DNA, 25 bp, Homo sapien
caagaaatatctttattatacacac

SEQ ID NO: 5186438 - DNA, 25 bp, Homo sapien
taagaatgaaaccaagaaatatctt

SEQ ID NO: 5186439 - DNA, 25 bp, Homo sapien
ccaagaaatatctttattatacaca

SEQ ID NO: 5186440 - DNA, 25 bp, Homo sapien
ctgtaagaatgaaaccaagaaatat

SEQ ID NO: 5186441 - DNA, 25 bp, Homo sapien
tgctcacgttctggctgttgtggaa

SEQ ID NO: 5186442 - DNA, 25 bp, Homo sapien
tgcttcctggtatccactgtcggaa

SEQ ID NO: 5186443 - DNA, 25 bp, Homo sapien
tgttgtggaaactccctgcttcctg

SEQ ID NO: 5186444 - DNA, 25 bp, Homo sapien
gatcctatgaatgaatgctgctgtc

SEQ ID NO: 5186445 - DNA, 25 bp, Homo sapien
gccggaaggtatttctttgcagaga

SEQ ID NO: 5186446 - DNA, 25 bp, Homo sapien
ccggccggaaggtatttctttgcag

SEQ ID NO: 5186447 - DNA, 25 bp, Homo sapien
ttctttgcagagatcttgatgcgtt

SEQ ID NO: 5186448 - DNA, 25 bp, Homo sapien
tgcagagatcttgatgcgtttggct

SEQ ID NO: 5186449 - DNA, 25 bp, Homo sapien
taggaactcataacccctcagggac

SEQ ID NO: 5186450 - DNA, 25 bp, Homo sapien
gaattcatcaatgggagctaactca

SEQ ID NO: 5186451 - DNA, 25 bp, Homo sapien
tcagggaccaaaacattccattcaa

SEQ ID NO: 5186452 - DNA, 25 bp, Homo sapien
gggtatagcaccctgccctctagag

SEQ ID NO: 5186453 - DNA, 25 bp, Homo sapien
cattagggatccaggttagaagact

SEQ ID NO: 5186454 - DNA, 25 bp, Homo sapien
tgggttcttggcctagacagctgga

SEQ ID NO: 5186455 - DNA, 25 bp, Homo sapien
tgcctccaggtgtcgcatgcaactg

SEQ ID NO: 5186456 - DNA, 25 bp, Homo sapien
tccttagtggctgctagagtctagt

SEQ ID NO: 5186457 - DNA, 25 bp, Homo sapien
acatgtaattcatgagcgtgaaggg

SEQ ID NO: 5186458 - DNA, 25 bp, Homo sapien
cattccctatgaagcaaagtttggc

SEQ ID NO: 5186459 - DNA, 25 bp, Homo sapien
aattaacctgtaaaaagagatctga

SEQ ID NO: 5186460 - DNA, 25 bp, Homo sapien
ctattgcctatgcatttttcacagc

SEQ ID NO: 5186461 - DNA, 25 bp, Homo sapien
ctgaactaactcttctcatggcccg

SEQ ID NO: 5186462 - DNA, 25 bp, Homo sapien
tcatggcccgattggctactgatgg

SEQ ID NO: 5186463 - DNA, 25 bp, Homo sapien
taactcttctcatggcccgattggc

SEQ ID NO: 5186464 - DNA, 25 bp, Homo sapien
ttctcatggcccgattggctactga

SEQ ID NO: 5186465 - DNA, 25 bp, Homo sapien
ctgataacataagaaggagactgtg

SEQ ID NO: 5186466 - DNA, 25 bp, Homo sapien
tgataacataagaaggagactgtgc

SEQ ID NO: 5186467 - DNA, 25 bp, Homo sapien
gataacataagaaggagactgtgct

SEQ ID NO: 5186468 - DNA, 25 bp, Homo sapien
gagtctgtgcatccgtcagggtcag

SEQ ID NO: 5186469 - DNA, 25 bp, Homo sapien
tcccagatgctgtggtacggcggtc

SEQ ID NO: 5186470 - DNA, 25 bp, Homo sapien
gagccaaatccactacccagagaag

SEQ ID NO: 5186471 - DNA, 25 bp, Homo sapien
taaatgtcatactgctgctgtccga

SEQ ID NO: 5186472 - DNA, 25 bp, Homo sapien
cactgggctgtaataggtcctcccc

SEQ ID NO: 5186473 - DNA, 25 bp, Homo sapien
taatgtgcaagtcgggagacacggc

SEQ ID NO: 5186474 - DNA, 25 bp, Homo sapien
cacagttccatggtttgggctgcgg

SEQ ID NO: 5186475 - DNA, 25 bp, Homo sapien
gaacctgtgcgatacaacgccgtct

SEQ ID NO: 5186476 - DNA, 25 bp, Homo sapien
agggtacttcgttggctggatgtcc

SEQ ID NO: 5186477 - DNA, 25 bp, Homo sapien
gatgtcctttgtagatttccaatac

SEQ ID NO: 5186478 - DNA, 25 bp, Homo sapien
tggtatgtaagggtacttcgttggc

SEQ ID NO: 5186479 - DNA, 25 bp, Homo sapien
ataattatttctttggtatgtaagg

SEQ ID NO: 5186480 - DNA, 25 bp, Homo sapien
tgttataattgcactcttgcactcg

SEQ ID NO: 5186481 - DNA, 25 bp, Homo sapien
tataggcctgtagggctccgcgtag

SEQ ID NO: 5186482 - DNA, 25 bp, Homo sapien
gcactcttgcactcggtattgtata

SEQ ID NO: 5186483 - DNA, 25 bp, Homo sapien
gcactcggtattgtataggcctgta

SEQ ID NO: 5186484 - DNA, 25 bp, Homo sapien
taacctcaatgacctatatagctgg

SEQ ID NO: 5186485 - DNA, 25 bp, Homo sapien
caagaggctattccaggttgttgtc

SEQ ID NO: 5186486 - DNA, 25 bp, Homo sapien
gctgttatcgaagaagtcggtcagg

SEQ ID NO: 5186487 - DNA, 25 bp, Homo sapien
taataaaaatgctgtctacagggcc

SEQ ID NO: 5186488 - DNA, 25 bp, Homo sapien
tcttcagggacacatattaaactca

SEQ ID NO: 5186489 - DNA, 25 bp, Homo sapien
cagccaagggatggtctaaattacc

SEQ ID NO: 5186490 - DNA, 25 bp, Homo sapien
gcaaaccaggagtagcagaaccaaa

SEQ ID NO: 5186491 - DNA, 25 bp, Homo sapien
cagtgaagcaactatttgtgggcga

SEQ ID NO: 5186492 - DNA, 25 bp, Homo sapien
ccaagaatctcagtgaaccctaagc

SEQ ID NO: 5186493 - DNA, 25 bp, Homo sapien
aacaacggagatctgaagacaatga

SEQ ID NO: 5186494 - DNA, 25 bp, Homo sapien
aaaacatcaacctacattccaagaa

SEQ ID NO: 5186495 - DNA, 25 bp, Homo sapien
tgatgtctgccttatcaacagaaac

SEQ ID NO: 5186496 - DNA, 25 bp, Homo sapien
ctaagcccagacttctgtttccagc

SEQ ID NO: 5186497 - DNA, 25 bp, Homo sapien
aagcccagacttctgtttccagcca

SEQ ID NO: 5186498 - DNA, 25 bp, Homo sapien
acttctgtttccagccatgatagag

SEQ ID NO: 5186499 - DNA, 25 bp, Homo sapien
cccagacttctgtttccagccatga

SEQ ID NO: 5186500 - DNA, 25 bp, Homo sapien
ctgctatcaatttgtaggctggctg

SEQ ID NO: 5186501 - DNA, 25 bp, Homo sapien
caatttgtaggctggctggatggca

SEQ ID NO: 5186502 - DNA, 25 bp, Homo sapien
gctatcaatttgtaggctggctgga

SEQ ID NO: 5186503 - DNA, 25 bp, Homo sapien
tatcaatttgtaggctggctggatg

SEQ ID NO: 5186504 - DNA, 25 bp, Homo sapien
tccaacctcgatgaaaattcagtag

SEQ ID NO: 5186505 - DNA, 25 bp, Homo sapien
gaaaatctgtctaaagcctattatg

SEQ ID NO: 5186506 - DNA, 25 bp, Homo sapien
tgtaattaacagagtgcaaggagtg

SEQ ID NO: 5186507 - DNA, 25 bp, Homo sapien
taaatgggacactgagggtcaagat

SEQ ID NO: 5186508 - DNA, 25 bp, Homo sapien
aacccaggtggtctatatgtgtgcc

SEQ ID NO: 5186509 - DNA, 25 bp, Homo sapien
tatacagacgataactctagtggcc

SEQ ID NO: 5186510 - DNA, 25 bp, Homo sapien
tactgtgctatggtgctggagatac

SEQ ID NO: 5186511 - DNA, 25 bp, Homo sapien
taatgaccgagtgataattctcctg

SEQ ID NO: 5186512 - DNA, 25 bp, Homo sapien
aagtgagatgtcatgcctgaaggga

SEQ ID NO: 5186513 - DNA, 25 bp, Homo sapien
ggtgcaaggctcaggtaaacacgtg

SEQ ID NO: 5186514 - DNA, 25 bp, Homo sapien
ggtaaacacgtgcactgtagcgaag

SEQ ID NO: 5186515 - DNA, 25 bp, Homo sapien
gcactgtagcgaagtgagatgtcat

SEQ ID NO: 5186516 - DNA, 25 bp, Homo sapien
atgtgaatgacctcaggcaactcag

SEQ ID NO: 5186517 - DNA, 25 bp, Homo sapien
gcaactcaggatcacgccaggcaaa

SEQ ID NO: 5186518 - DNA, 25 bp, Homo sapien
tgacctcaggcaactcaggatcacg

SEQ ID NO: 5186519 - DNA, 25 bp, Homo sapien
ctcaggcaactcaggatcacgccag

SEQ ID NO: 5186520 - DNA, 25 bp, Homo sapien
catttgcctgaacagatgggaactg

SEQ ID NO: 5186521 - DNA, 25 bp, Homo sapien
gcaggtaggccgctgcatttgcctg

SEQ ID NO: 5186522 - DNA, 25 bp, Homo sapien
gtcaccaaagcacaggtgctgcagg

SEQ ID NO: 5186523 - DNA, 25 bp, Homo sapien
ccatcttcactttgttgtcaccaaa

SEQ ID NO: 5186524 - DNA, 25 bp, Homo sapien
aactctgtggtccagaaggtcaacc

SEQ ID NO: 5186525 - DNA, 25 bp, Homo sapien
acgaggtttcgaagggcaccacaag

SEQ ID NO: 5186526 - DNA, 25 bp, Homo sapien
catctgtagacttgccaaaaacgag

SEQ ID NO: 5186527 - DNA, 25 bp, Homo sapien
aacagtcgcaacaaggcaggtatcc

SEQ ID NO: 5186528 - DNA, 25 bp, Homo sapien
aacctctgttgagtgagacttgcca

SEQ ID NO: 5186529 - DNA, 25 bp, Homo sapien
gctgagctaacgtaaaagactgcca

SEQ ID NO: 5186530 - DNA, 25 bp, Homo sapien
agggtgacttaagcgcaggcactga

SEQ ID NO: 5186531 - DNA, 25 bp, Homo sapien
ggtagctccagaactatatcccatg

SEQ ID NO: 5186532 - DNA, 25 bp, Homo sapien
gtagcgcacacgatggactgcagcc

SEQ ID NO: 5186533 - DNA, 25 bp, Homo sapien
gcacggtgttactatgggaagacaa

SEQ ID NO: 5186534 - DNA, 25 bp, Homo sapien
ggagtagcgcacacgatggactgca

SEQ ID NO: 5186535 - DNA, 25 bp, Homo sapien
cctcctggctgcacggtgttactat

SEQ ID NO: 5186536 - DNA, 25 bp, Homo sapien
ggaccgtacctacaaaggccaagca

SEQ ID NO: 5186537 - DNA, 25 bp, Homo sapien
cacttaggaatgtgtggaccgtacc

SEQ ID NO: 5186538 - DNA, 25 bp, Homo sapien
aagcaccgtgcaaggctagccatgg

SEQ ID NO: 5186539 - DNA, 25 bp, Homo sapien
tatttgtgaatgatactagcagaac

SEQ ID NO: 5186540 - DNA, 25 bp, Homo sapien
tggagacttgcctgctcaaccttcc

SEQ ID NO: 5186541 - DNA, 25 bp, Homo sapien
aacatttgtaccctccagatttagc

SEQ ID NO: 5186542 - DNA, 25 bp, Homo sapien
cctggacttcggtttctaatctgta

SEQ ID NO: 5186543 - DNA, 25 bp, Homo sapien
ttagctcctgttcagcccttctcag

SEQ ID NO: 5186544 - DNA, 25 bp, Homo sapien
gagggcaagatgcttcctaggaggg

SEQ ID NO: 5186545 - DNA, 25 bp, Homo sapien
tgtgctcggaacaccaccatctcag

SEQ ID NO: 5186546 - DNA, 25 bp, Homo sapien
atctcagctttcagcgcagtgggaa

SEQ ID NO: 5186547 - DNA, 25 bp, Homo sapien
aggtccagctgtgctcggaacacca

SEQ ID NO: 5186548 - DNA, 25 bp, Homo sapien
caagttgctcgagtctgtacagtgc

SEQ ID NO: 5186549 - DNA, 25 bp, Homo sapien
catgtccatgggagcgtgtcaggct

SEQ ID NO: 5186550 - DNA, 25 bp, Homo sapien
caaaaacgtttgtggccttgcagag

SEQ ID NO: 5186551 - DNA, 25 bp, Homo sapien
cttggcaagttgctcgagtctgtac

SEQ ID NO: 5186552 - DNA, 25 bp, Homo sapien
gcttcatccaccttacttagataag

SEQ ID NO: 5186553 - DNA, 25 bp, Homo sapien
gctttagaaacacacgttactgtca

SEQ ID NO: 5186554 - DNA, 25 bp, Homo sapien
aaagcacttgccgtaactttcctgg

SEQ ID NO: 5186555 - DNA, 25 bp, Homo sapien
gctcaagcttcaataaagcacttgc

SEQ ID NO: 5186556 - DNA, 25 bp, Homo sapien
catcacatgaggataaattccaaag

SEQ ID NO: 5186557 - DNA, 25 bp, Homo sapien
catgaggataaattccaaagaactc

SEQ ID NO: 5186558 - DNA, 25 bp, Homo sapien
ttttacagcatcacatgaggataaa

SEQ ID NO: 5186559 - DNA, 25 bp, Homo sapien
acagcatcacatgaggataaattcc

SEQ ID NO: 5186560 - DNA, 25 bp, Homo sapien
cctgtcgtgttacgcagaactagtg

SEQ ID NO: 5186561 - DNA, 25 bp, Homo sapien
cttaggcaacctgtcgtgttacgca

SEQ ID NO: 5186562 - DNA, 25 bp, Homo sapien
gcaacctgtcgtgttacgcagaact

SEQ ID NO: 5186563 - DNA, 25 bp, Homo sapien
taggcaacctgtcgtgttacgcaga

SEQ ID NO: 5186564 - DNA, 25 bp, Homo sapien
acatacaacagtgagtctaccagcc

SEQ ID NO: 5186565 - DNA, 25 bp, Homo sapien
ttcacacacgtgtggatcacataca

SEQ ID NO: 5186566 - DNA, 25 bp, Homo sapien
tgttcacacacgtgtggatcacata

SEQ ID NO: 5186567 - DNA, 25 bp, Homo sapien
gtgagtctaccagcccctcgcagga

SEQ ID NO: 5186568 - DNA, 25 bp, Homo sapien
ccacgccctcctgcaaccaggccgg

SEQ ID NO: 5186569 - DNA, 25 bp, Homo sapien
ctcctgcaaccaggccggcactgac

SEQ ID NO: 5186570 - DNA, 25 bp, Homo sapien
gccctcctgcaaccaggccggcact

SEQ ID NO: 5186571 - DNA, 25 bp, Homo sapien
acgccctcctgcaaccaggccggca

SEQ ID NO: 5186572 - DNA, 25 bp, Homo sapien
tgcccctgtaactttggagacttgc

SEQ ID NO: 5186573 - DNA, 25 bp, Homo sapien
ttgccctttgatctggagagtggcc

SEQ ID NO: 5186574 - DNA, 25 bp, Homo sapien
cactctgttctcacggttctcagga

SEQ ID NO: 5186575 - DNA, 25 bp, Homo sapien
ttcttaagttgccacgtccttgccc

SEQ ID NO: 5186576 - DNA, 25 bp, Homo sapien
gagaggtgcaacaacagttagtgct

SEQ ID NO: 5186577 - DNA, 25 bp, Homo sapien
aggtgcaacaacagttagtgctggg

SEQ ID NO: 5186578 - DNA, 25 bp, Homo sapien
tagagaggtgcaacaacagttagtg

SEQ ID NO: 5186579 - DNA, 25 bp, Homo sapien
ggtgtagagaggtgcaacaacagtt

SEQ ID NO: 5186580 - DNA, 25 bp, Homo sapien
ggagggagagggtaaggggctcatg

SEQ ID NO: 5186581 - DNA, 25 bp, Homo sapien
gcacaggagggagagggtaaggggc

SEQ ID NO: 5186582 - DNA, 25 bp, Homo sapien
caggagggagagggtaaggggctca

SEQ ID NO: 5186583 - DNA, 25 bp, Homo sapien
tgtactcgggcacaggagggagagg

SEQ ID NO: 5186584 - DNA, 25 bp, Homo sapien
taactggcccgctttggaagtcctg

SEQ ID NO: 5186585 - DNA, 25 bp, Homo sapien
ttcaataaggctcaaaaactggctg

SEQ ID NO: 5186586 - DNA, 25 bp, Homo sapien
ttccaatggcctctcctagtccagt

SEQ ID NO: 5186587 - DNA, 25 bp, Homo sapien
ggatcctggatggtcgtcacagctg

SEQ ID NO: 5186588 - DNA, 25 bp, Homo sapien
tcatgccgaccgaaatgcttgaggc

SEQ ID NO: 5186589 - DNA, 25 bp, Homo sapien
gatccttggcgtgacaacagatgcc

SEQ ID NO: 5186590 - DNA, 25 bp, Homo sapien
cacacctctgattgggaggccaact

SEQ ID NO: 5186591 - DNA, 25 bp, Homo sapien
aatacccagatgacaggatgcagag

SEQ ID NO: 5186592 - DNA, 25 bp, Homo sapien
tataattaaaaacaactcggcacat

SEQ ID NO: 5186593 - DNA, 25 bp, Homo sapien
cccagcatggcgtataattaaaaac

SEQ ID NO: 5186594 - DNA, 25 bp, Homo sapien
ctgaaacccagcatggcgtataatt

SEQ ID NO: 5186595 - DNA, 25 bp, Homo sapien
tcggcacattagagcaaaacacttc

SEQ ID NO: 5186596 - DNA, 25 bp, Homo sapien
ctcagggtgcacacgcagttctcca

SEQ ID NO: 5186597 - DNA, 25 bp, Homo sapien
gggtgcacacgcagttctccaccgt

SEQ ID NO: 5186598 - DNA, 25 bp, Homo sapien
ttcctcagggtgcacacgcagttct

SEQ ID NO: 5186599 - DNA, 25 bp, Homo sapien
aggttcctcagggtgcacacgcagt

SEQ ID NO: 5186600 - DNA, 25 bp, Homo sapien
tttgctgggagactcttttcctagt

SEQ ID NO: 5186601 - DNA, 25 bp, Homo sapien
ttcttcccccagcaacttggctcag

SEQ ID NO: 5186602 - DNA, 25 bp, Homo sapien
gatcttcttgcggagtcctcttttt

SEQ ID NO: 5186603 - DNA, 25 bp, Homo sapien
ttcccccagcaacttggctcagagt

SEQ ID NO: 5186604 - DNA, 25 bp, Homo sapien
accctgcagagccttccaaggtggc

SEQ ID NO: 5186605 - DNA, 25 bp, Homo sapien
gaagagtcagatatggttttaccac

SEQ ID NO: 5186606 - DNA, 25 bp, Homo sapien
ttttaccaccgatgggtgccacagc

SEQ ID NO: 5186607 - DNA, 25 bp, Homo sapien
acttcgacagtcctgggataggacc

SEQ ID NO: 5186608 - DNA, 25 bp, Homo sapien
aaagaagtgtagataagtggaagtc

SEQ ID NO: 5186609 - DNA, 25 bp, Homo sapien
aagtgtagataagtggaagtcatcc

SEQ ID NO: 5186610 - DNA, 25 bp, Homo sapien
aagatggaaagaagtgtagataagt

SEQ ID NO: 5186611 - DNA, 25 bp, Homo sapien
tgtagataagtggaagtcatcctac

SEQ ID NO: 5186612 - DNA, 25 bp, Homo sapien
tggaaaaatcccttgcctcagaaga

SEQ ID NO: 5186613 - DNA, 25 bp, Homo sapien
tcagaaacctgtcaaagagattagt

SEQ ID NO: 5186614 - DNA, 25 bp, Homo sapien
tgttactgtcacctaaaaaagatgt

SEQ ID NO: 5186615 - DNA, 25 bp, Homo sapien
gcacacatgaaaggagaacctgtct

SEQ ID NO: 5186616 - DNA, 25 bp, Homo sapien
gctgttgccacggaagaaacaactc

SEQ ID NO: 5186617 - DNA, 25 bp, Homo sapien
gcgaacatctagtgccatattcctc

SEQ ID NO: 5186618 - DNA, 25 bp, Homo sapien
tatcgttatccattctcagaagctc

SEQ ID NO: 5186619 - DNA, 25 bp, Homo sapien
gaaacaactctatcgttatccattc

SEQ ID NO: 5186620 - DNA, 25 bp, Homo sapien
agctcatcttgtcaccagaacatac

SEQ ID NO: 5186621 - DNA, 25 bp, Homo sapien
tctcacatttacagctcatcttgtc

SEQ ID NO: 5186622 - DNA, 25 bp, Homo sapien
cagctcatcttgtcaccagaacata

SEQ ID NO: 5186623 - DNA, 25 bp, Homo sapien
gctctcacatttacagctcatcttg

SEQ ID NO: 5186624 - DNA, 25 bp, Homo sapien
tacaaacctgagagtaaaggcctcc

SEQ ID NO: 5186625 - DNA, 25 bp, Homo sapien
cacatcctgggaacgaagctcaggt

SEQ ID NO: 5186626 - DNA, 25 bp, Homo sapien
gatagaattacggagcctgaacggg

SEQ ID NO: 5186627 - DNA, 25 bp, Homo sapien
tgcggagcgtacagaggtcctcact

SEQ ID NO: 5186628 - DNA, 25 bp, Homo sapien
taagagcaggttaatctgggcaaca

SEQ ID NO: 5186629 - DNA, 25 bp, Homo sapien
tgcgttgtgaaatatgacaggccac

SEQ ID NO: 5186630 - DNA, 25 bp, Homo sapien
tatggcacatctacaagaatcaggc

SEQ ID NO: 5186631 - DNA, 25 bp, Homo sapien
gcacttcacagtaccagctcaagga

SEQ ID NO: 5186632 - DNA, 25 bp, Homo sapien
tctgcctatgaatgagtgagcctgg

SEQ ID NO: 5186633 - DNA, 25 bp, Homo sapien
tgctgacactgtaaggccacaagat

SEQ ID NO: 5186634 - DNA, 25 bp, Homo sapien
tactcatgaatgaccaaaaggccca

SEQ ID NO: 5186635 - DNA, 25 bp, Homo sapien
tacagcacgtcagagggaaggctct

SEQ ID NO: 5186636 - DNA, 25 bp, Homo sapien
ctggaccaagtcaggctgccaaaca

SEQ ID NO: 5186637 - DNA, 25 bp, Homo sapien
gaggtgtacagcaactcatctgaca

SEQ ID NO: 5186638 - DNA, 25 bp, Homo sapien
tctgacaacggtggcaacatgttag

SEQ ID NO: 5186639 - DNA, 25 bp, Homo sapien
tgccaacggcaaaagagtaaattct

SEQ ID NO: 5186640 - DNA, 25 bp, Homo sapien
gctgccatggtctcatcagacaaga

SEQ ID NO: 5186641 - DNA, 25 bp, Homo sapien
ctgagtcggccagggcttttgcgtt

SEQ ID NO: 5186642 - DNA, 25 bp, Homo sapien
ccggttgaccaggtctcgcatggcg

SEQ ID NO: 5186643 - DNA, 25 bp, Homo sapien
cagcttctctatgcctcctgagtcg

SEQ ID NO: 5186644 - DNA, 25 bp, Homo sapien
gtcgcccctgcctttggttatgttc

SEQ ID NO: 5186645 - DNA, 25 bp, Homo sapien
tcgcccctgcctttggttatgttca

SEQ ID NO: 5186646 - DNA, 25 bp, Homo sapien
cgcccctgcctttggttatgttcac

SEQ ID NO: 5186647 - DNA, 25 bp, Homo sapien
cagtgaggtgtcatgcagaagcaaa

SEQ ID NO: 5186648 - DNA, 25 bp, Homo sapien
gctacagctccatgacaagcagcct

SEQ ID NO: 5186649 - DNA, 25 bp, Homo sapien
tatgtggcagaaaactcaattccag

SEQ ID NO: 5186650 - DNA, 25 bp, Homo sapien
agggaaatgcgccatccaagcctgg

SEQ ID NO: 5186651 - DNA, 25 bp, Homo sapien
tggccaaggccgtcagatcaccacg

SEQ ID NO: 5186652 - DNA, 25 bp, Homo sapien
agatcaccacgctggggtgggcctc

SEQ ID NO: 5186653 - DNA, 25 bp, Homo sapien
aaggccgtcagatcaccacgctggg

SEQ ID NO: 5186654 - DNA, 25 bp, Homo sapien
cttggccaaggccgtcagatcacca

SEQ ID NO: 5186655 - DNA, 25 bp, Homo sapien
taagtcagtagcttcacggataagt

SEQ ID NO: 5186656 - DNA, 25 bp, Homo sapien
tcagtagcttcacggataagtgcag

SEQ ID NO: 5186657 - DNA, 25 bp, Homo sapien
tagcttcacggataagtgcagaggg

SEQ ID NO: 5186658 - DNA, 25 bp, Homo sapien
gctgctctaagtcagtagcttcacg

SEQ ID NO: 5186659 - DNA, 25 bp, Homo sapien
tacatttgggtggtactcatggacc

SEQ ID NO: 5186660 - DNA, 25 bp, Homo sapien
taagcatagccaactggattccgag

SEQ ID NO: 5186661 - DNA, 25 bp, Homo sapien
gaccagtgcttgcagagttagccct

SEQ ID NO: 5186662 - DNA, 25 bp, Homo sapien
cactggattcaccttgggagctgct

SEQ ID NO: 5186663 - DNA, 25 bp, Homo sapien
ttgccataatgtattcaagacctgg

SEQ ID NO: 5186664 - DNA, 25 bp, Homo sapien
gccataatgtattcaagacctgggc

SEQ ID NO: 5186665 - DNA, 25 bp, Homo sapien
gaggtcccgatattgccataatgta

SEQ ID NO: 5186666 - DNA, 25 bp, Homo sapien
ccataatgtattcaagacctgggct

SEQ ID NO: 5186667 - DNA, 25 bp, Homo sapien
aatcggtctcgctccaatgtcgaca

SEQ ID NO: 5186668 - DNA, 25 bp, Homo sapien
tgtgatttgaatcggtctcgctcca

SEQ ID NO: 5186669 - DNA, 25 bp, Homo sapien
ctgactgaatgatgggtgacatctg

SEQ ID NO: 5186670 - DNA, 25 bp, Homo sapien
tgacatctgttggttggtggtagac

SEQ ID NO: 5186671 - DNA, 25 bp, Homo sapien
ttctgtcacacaaaggttctcgcca

SEQ ID NO: 5186672 - DNA, 25 bp, Homo sapien
caaggagtggcattttcccactgac

SEQ ID NO: 5186673 - DNA, 25 bp, Homo sapien
accagcttatgtttgatcttctctg

SEQ ID NO: 5186674 - DNA, 25 bp, Homo sapien
aggcttaaccagcttatgtttgatc

SEQ ID NO: 5186675 - DNA, 25 bp, Homo sapien
ccatacacaacaagcacagacaatt

SEQ ID NO: 5186676 - DNA, 25 bp, Homo sapien
catacacaacaagcacagacaatta

SEQ ID NO: 5186677 - DNA, 25 bp, Homo sapien
ataccatacacaacaagcacagaca

SEQ ID NO: 5186678 - DNA, 25 bp, Homo sapien
taccatacacaacaagcacagacaa

SEQ ID NO: 5186679 - DNA, 25 bp, Homo sapien
tatgtgccttttgttatagagccac

SEQ ID NO: 5186680 - DNA, 25 bp, Homo sapien
caagaccctaaaaggttctgagcat

SEQ ID NO: 5186681 - DNA, 25 bp, Homo sapien
attatcctttgcttgtctatgtgcc

SEQ ID NO: 5186682 - DNA, 25 bp, Homo sapien
gagccacacatcttaatttccctgg

SEQ ID NO: 5186683 - DNA, 25 bp, Homo sapien
ggagtattccctaccactgactaga

SEQ ID NO: 5186684 - DNA, 25 bp, Homo sapien
ggaagagcagctagacccaagtact

SEQ ID NO: 5186685 - DNA, 25 bp, Homo sapien
ctctcaagctggagggcaagctgcc

SEQ ID NO: 5186686 - DNA, 25 bp, Homo sapien
ggaagcagatcccacactagtgtga

SEQ ID NO: 5186687 - DNA, 25 bp, Homo sapien
cagggtacaggcctttatgtgtggc

SEQ ID NO: 5186688 - DNA, 25 bp, Homo sapien
taatactgcataggtggctgggtcc

SEQ ID NO: 5186689 - DNA, 25 bp, Homo sapien
ggtctctgattcctaacagtgctgg

SEQ ID NO: 5186690 - DNA, 25 bp, Homo sapien
tcctatcgtattcagagcgagggtc

SEQ ID NO: 5186691 - DNA, 25 bp, Homo sapien
acactgggctgacggttctgatgca

SEQ ID NO: 5186692 - DNA, 25 bp, Homo sapien
gggactgtctcaatacaagcacagg

SEQ ID NO: 5186693 - DNA, 25 bp, Homo sapien
cagtctagaagatgtggcccctgca

SEQ ID NO: 5186694 - DNA, 25 bp, Homo sapien
tggccaagcgcctggaaatgcggct

SEQ ID NO: 5186695 - DNA, 25 bp, Homo sapien
cagacggttgagaatgggaacagta

SEQ ID NO: 5186696 - DNA, 25 bp, Homo sapien
catctaaagtagttataatcgccag

SEQ ID NO: 5186697 - DNA, 25 bp, Homo sapien
tataatcgccagacggttgagaatg

SEQ ID NO: 5186698 - DNA, 25 bp, Homo sapien
gaacagtatgaaatcttagtaaccc

SEQ ID NO: 5186699 - DNA, 25 bp, Homo sapien
gtaaatagtcctgtgaaatcacaat

SEQ ID NO: 5186700 - DNA, 25 bp, Homo sapien
gagtaaagctgccaccagcttttat

SEQ ID NO: 5186701 - DNA, 25 bp, Homo sapien
tcaaagacaacagtacaatggagac

SEQ ID NO: 5186702 - DNA, 25 bp, Homo sapien
tgccatagtaacaacagtcgattag

SEQ ID NO: 5186703 - DNA, 25 bp, Homo sapien
gcaaattagtttattgaagcaagcg

SEQ ID NO: 5186704 - DNA, 25 bp, Homo sapien
cacttcagttggtatgtgcatttcc

SEQ ID NO: 5186705 - DNA, 25 bp, Homo sapien
gcaaatcggaagcaaccatgcactt

SEQ ID NO: 5186706 - DNA, 25 bp, Homo sapien
gaagatacagaagggcatgcatgct

SEQ ID NO: 5186707 - DNA, 25 bp, Homo sapien
tctcaggtcaaggaaggagcaacaa

SEQ ID NO: 5186708 - DNA, 25 bp, Homo sapien
tccattattattaaggctagcaaag

SEQ ID NO: 5186709 - DNA, 25 bp, Homo sapien
cacaatattcgaacaagccccatgc

SEQ ID NO: 5186710 - DNA, 25 bp, Homo sapien
ggcacagtcttgtacctggcatatt

SEQ ID NO: 5186711 - DNA, 25 bp, Homo sapien
caaaactatggcagaaacaggctgt

SEQ ID NO: 5186712 - DNA, 25 bp, Homo sapien
caagctctgctcacatgtgggaggg

SEQ ID NO: 5186713 - DNA, 25 bp, Homo sapien
agtgcagagcccatgcgcaaaggtt

SEQ ID NO: 5186714 - DNA, 25 bp, Homo sapien
tccccaaaaagcaatgccagtgcag

SEQ ID NO: 5186715 - DNA, 25 bp, Homo sapien
gtcttccccagtgccaatgcgggct

SEQ ID NO: 5186716 - DNA, 25 bp, Homo sapien
cctgtcttccccagtgccaatgcgg

SEQ ID NO: 5186717 - DNA, 25 bp, Homo sapien
cttccccagtgccaatgcgggctgg

SEQ ID NO: 5186718 - DNA, 25 bp, Homo sapien
tgtcttccccagtgccaatgcgggc

SEQ ID NO: 5186719 - DNA, 25 bp, Homo sapien
aaaactagtgcttattactctggtc

SEQ ID NO: 5186720 - DNA, 25 bp, Homo sapien
ttaaaactagtgcttattactctgg

SEQ ID NO: 5186721 - DNA, 25 bp, Homo sapien
aactagtgcttattactctggtcca

SEQ ID NO: 5186722 - DNA, 25 bp, Homo sapien
aaactagtgcttattactctggtcc

SEQ ID NO: 5186723 - DNA, 25 bp, Homo sapien
gaggaataggaactgatgtaaattg

SEQ ID NO: 5186724 - DNA, 25 bp, Homo sapien
ataggaactgatgtaaattggtgaa

SEQ ID NO: 5186725 - DNA, 25 bp, Homo sapien
gaataggaactgatgtaaattggtg

SEQ ID NO: 5186726 - DNA, 25 bp, Homo sapien
ggaataggaactgatgtaaattggt

SEQ ID NO: 5186727 - DNA, 25 bp, Homo sapien
tccatctgtaagtgggcaagaccag

SEQ ID NO: 5186728 - DNA, 25 bp, Homo sapien
cagatggtccaagttcgccatggca

SEQ ID NO: 5186729 - DNA, 25 bp, Homo sapien
tggtaaggacctgagactgactgca

SEQ ID NO: 5186730 - DNA, 25 bp, Homo sapien
taaaattaggagacacacgtgagca

SEQ ID NO: 5186731 - DNA, 25 bp, Homo sapien
aaatacatgtgttaggaaaattaat

SEQ ID NO: 5186732 - DNA, 25 bp, Homo sapien
aatacatgtgttaggaaaattaatg

SEQ ID NO: 5186733 - DNA, 25 bp, Homo sapien
tccatactgtgttgagtaatcagta

SEQ ID NO: 5186734 - DNA, 25 bp, Homo sapien
tatgcatcaaagttctttctgttgg

SEQ ID NO: 5186735 - DNA, 25 bp, Homo sapien
ctgtgttgagtaatcagtagaagct

SEQ ID NO: 5186736 - DNA, 25 bp, Homo sapien
aatctgtatgcatcaaagttctttc

SEQ ID NO: 5186737 - DNA, 25 bp, Homo sapien
tcaatctgaacaaggttagaaagaa

SEQ ID NO: 5186738 - DNA, 25 bp, Homo sapien
tcacctcaatctgaacaaggttaga

SEQ ID NO: 5186739 - DNA, 25 bp, Homo sapien
cctcaatctgaacaaggttagaaag

SEQ ID NO: 5186740 - DNA, 25 bp, Homo sapien
cacctcaatctgaacaaggttagaa

SEQ ID NO: 5186741 - DNA, 25 bp, Homo sapien
tcaaacctctcatcacgtcacccac

SEQ ID NO: 5186742 - DNA, 25 bp, Homo sapien
aatagagcttagaaagtcctctccc

SEQ ID NO: 5186743 - DNA, 25 bp, Homo sapien
tctaacacctaaatagagcttagaa

SEQ ID NO: 5186744 - DNA, 25 bp, Homo sapien
aattagatctaacacctaaatagag

SEQ ID NO: 5186745 - DNA, 25 bp, Homo sapien
aatgatggcacttaaccaatgtggc

SEQ ID NO: 5186746 - DNA, 25 bp, Homo sapien
tttccatatttacaccaacaaaaga

SEQ ID NO: 5186747 - DNA, 25 bp, Homo sapien
aatcttgacatttagtaatagcaat

SEQ ID NO: 5186748 - DNA, 25 bp, Homo sapien
gcacttaaccaatgtggcatttcca

SEQ ID NO: 5186749 - DNA, 25 bp, Homo sapien
caaagtacactatgtgtggtggaga

SEQ ID NO: 5186750 - DNA, 25 bp, Homo sapien
ttccaaagtacactatgtgtggtgg

SEQ ID NO: 5186751 - DNA, 25 bp, Homo sapien
acgttgtgcttccaaagtacactat

SEQ ID NO: 5186752 - DNA, 25 bp, Homo sapien
tgtgcttccaaagtacactatgtgt

SEQ ID NO: 5186753 - DNA, 25 bp, Homo sapien
agtgtcctatgaatgaggcgaggaa

SEQ ID NO: 5186754 - DNA, 25 bp, Homo sapien
gcgaggaatgggcatggcgctgcgg

SEQ ID NO: 5186755 - DNA, 25 bp, Homo sapien
tgtcctatgaatgaggcgaggaatg

SEQ ID NO: 5186756 - DNA, 25 bp, Homo sapien
gggcatggcgctgcggtaccagcct

SEQ ID NO: 5186757 - DNA, 25 bp, Homo sapien
aattctttggtgtggtccatctcac

SEQ ID NO: 5186758 - DNA, 25 bp, Homo sapien
aaaatacctagattgtcagagaagg

SEQ ID NO: 5186759 - DNA, 25 bp, Homo sapien
tcaatttagttatggccgggctgcc

SEQ ID NO: 5186760 - DNA, 25 bp, Homo sapien
ccactgttcttatgaagttactgag

SEQ ID NO: 5186761 - DNA, 25 bp, Homo sapien
tgaagtggttacgtcccagaagtcc

SEQ ID NO: 5186762 - DNA, 25 bp, Homo sapien
tccattcggcaagaaaacgcagttt

SEQ ID NO: 5186763 - DNA, 25 bp, Homo sapien
ttaggaactttcatgctcgcactgg

SEQ ID NO: 5186764 - DNA, 25 bp, Homo sapien
tctcaagggaggagtcttaaacggc

SEQ ID NO: 5186765 - DNA, 25 bp, Homo sapien
gttgagacaggtgcctgagtgttgc

SEQ ID NO: 5186766 - DNA, 25 bp, Homo sapien
tgagacaggtgcctgagtgttgctt

SEQ ID NO: 5186767 - DNA, 25 bp, Homo sapien
ttgagacaggtgcctgagtgttgct

SEQ ID NO: 5186768 - DNA, 25 bp, Homo sapien
cacactccgtcctgtggcttgggaa

SEQ ID NO: 5186769 - DNA, 25 bp, Homo sapien
gacatctttctggtgctttgatgaa

SEQ ID NO: 5186770 - DNA, 25 bp, Homo sapien
tactgagatgggtgaggtgcttatt

SEQ ID NO: 5186771 - DNA, 25 bp, Homo sapien
gatgaaggggcttcgctcccacact

SEQ ID NO: 5186772 - DNA, 25 bp, Homo sapien
tggcggaactgatgagtcccagctg

SEQ ID NO: 5186773 - DNA, 25 bp, Homo sapien
gactttggttcctccacagcaacga

SEQ ID NO: 5186774 - DNA, 25 bp, Homo sapien
gagttaagtcaagccattacgctgg

SEQ ID NO: 5186775 - DNA, 25 bp, Homo sapien
taaggctggagaccaaagacaagac

SEQ ID NO: 5186776 - DNA, 25 bp, Homo sapien
caaagctgctgacatgaaaacaggg

SEQ ID NO: 5186777 - DNA, 25 bp, Homo sapien
aggcaatagcgataggcacaaacag

SEQ ID NO: 5186778 - DNA, 25 bp, Homo sapien
aatagcgataggcacaaacagccac

SEQ ID NO: 5186779 - DNA, 25 bp, Homo sapien
cagcaaagctgctgacatgaaaaca

SEQ ID NO: 5186780 - DNA, 25 bp, Homo sapien
tgaaggaagattgccacagacatac

SEQ ID NO: 5186781 - DNA, 25 bp, Homo sapien
cttgacagctcaacccagacttggt

SEQ ID NO: 5186782 - DNA, 25 bp, Homo sapien
cagacatacagtgagtcgcagcgac

SEQ ID NO: 5186783 - DNA, 25 bp, Homo sapien
gctaactgctccgatggactcagga

SEQ ID NO: 5186784 - DNA, 25 bp, Homo sapien
gtgaggtcatttgccagaggatctt

SEQ ID NO: 5186785 - DNA, 25 bp, Homo sapien
atcttgctcagtgcttgaggtggaa

SEQ ID NO: 5186786 - DNA, 25 bp, Homo sapien
cttgctcagtgcttgaggtggaagc

SEQ ID NO: 5186787 - DNA, 25 bp, Homo sapien
gtcatttgccagaggatcttgctca

SEQ ID NO: 5186788 - DNA, 25 bp, Homo sapien
tgcttgctccagtgcgagaacaggg

SEQ ID NO: 5186789 - DNA, 25 bp, Homo sapien
gacctgagagctgctcaatgactac

SEQ ID NO: 5186790 - DNA, 25 bp, Homo sapien
gctcaatgactacaagcccaactgc

SEQ ID NO: 5186791 - DNA, 25 bp, Homo sapien
gcttgctccagtgcgagaacaggga

SEQ ID NO: 5186792 - DNA, 25 bp, Homo sapien
tccagaagcgtacgccaaggggcca

SEQ ID NO: 5186793 - DNA, 25 bp, Homo sapien
attattccagaagcgtacgccaagg

SEQ ID NO: 5186794 - DNA, 25 bp, Homo sapien
agaagcgtacgccaaggggccaata

SEQ ID NO: 5186795 - DNA, 25 bp, Homo sapien
agcgtacgccaaggggccaataaga

SEQ ID NO: 5186796 - DNA, 25 bp, Homo sapien
ttgaaggccataaacattgtggaac

SEQ ID NO: 5186797 - DNA, 25 bp, Homo sapien
cataaacattgtggaaccctccaaa

SEQ ID NO: 5186798 - DNA, 25 bp, Homo sapien
caaattgggcacatttatcctctgt

SEQ ID NO: 5186799 - DNA, 25 bp, Homo sapien
ggccataaacattgtggaaccctcc

SEQ ID NO: 5186800 - DNA, 25 bp, Homo sapien
tcagaggtctaccaccagggttggc

SEQ ID NO: 5186801 - DNA, 25 bp, Homo sapien
gaaccatgtgggactcttacagcca

SEQ ID NO: 5186802 - DNA, 25 bp, Homo sapien
agtggcctcaggatggttggactcc

SEQ ID NO: 5186803 - DNA, 25 bp, Homo sapien
cgtgtggtctctccaccgtagtggc

SEQ ID NO: 5186804 - DNA, 25 bp, Homo sapien
tccttggggagcttggatcttgtca

SEQ ID NO: 5186805 - DNA, 25 bp, Homo sapien
agtgataggattcagagctggaacc

SEQ ID NO: 5186806 - DNA, 25 bp, Homo sapien
ggagagaagcggaagccagtgatag

SEQ ID NO: 5186807 - DNA, 25 bp, Homo sapien
ttggggagcttggatcttgtcacac

SEQ ID NO: 5186808 - DNA, 25 bp, Homo sapien
tagcttcacgacgaactgcaggtcc

SEQ ID NO: 5186809 - DNA, 25 bp, Homo sapien
caaggctgatccgtgaaagagagtc

SEQ ID NO: 5186810 - DNA, 25 bp, Homo sapien
ggaagtcatccccttatcactgggc

SEQ ID NO: 5186811 - DNA, 25 bp, Homo sapien
ttaggaaacgggagcaagaatggcc

SEQ ID NO: 5186812 - DNA, 25 bp, Homo sapien
cactcttcctccaggacaggcctcc

SEQ ID NO: 5186813 - DNA, 25 bp, Homo sapien
tccactcttcctccaggacaggcct

SEQ ID NO: 5186814 - DNA, 25 bp, Homo sapien
cctccactcttcctccaggacaggc

SEQ ID NO: 5186815 - DNA, 25 bp, Homo sapien
ctcttcctccaggacaggcctccat

SEQ ID NO: 5186816 - DNA, 25 bp, Homo sapien
cagtgccagtgctggtgctctggag

SEQ ID NO: 5186817 - DNA, 25 bp, Homo sapien
tgccagtgctggtgctctggaggct

SEQ ID NO: 5186818 - DNA, 25 bp, Homo sapien
agcgtgtgccagtgccagtgccagt

SEQ ID NO: 5186819 - DNA, 25 bp, Homo sapien
ccagtgctggtgctctggaggctga

SEQ ID NO: 5186820 - DNA, 25 bp, Homo sapien
tgcaggaggatgtccccctttccga

SEQ ID NO: 5186821 - DNA, 25 bp, Homo sapien
cctttccgaggggagagcaggtctt

SEQ ID NO: 5186822 - DNA, 25 bp, Homo sapien
gcaggtcttgcacttcatttgccat

SEQ ID NO: 5186823 - DNA, 25 bp, Homo sapien
gggagagcaggtcttgcacttcatt

SEQ ID NO: 5186824 - DNA, 25 bp, Homo sapien
actactgcagtagtgtctaatgccg

SEQ ID NO: 5186825 - DNA, 25 bp, Homo sapien
gggctaacattcaggtgccagatac

SEQ ID NO: 5186826 - DNA, 25 bp, Homo sapien
tgatgtgttctaccgggcctgcatt

SEQ ID NO: 5186827 - DNA, 25 bp, Homo sapien
tctaatgccgctccagcatcaggat

SEQ ID NO: 5186828 - DNA, 25 bp, Homo sapien
tctcgaatcctgtttttttggtatg

SEQ ID NO: 5186829 - DNA, 25 bp, Homo sapien
ccagcccacagctctctgctgagtt

SEQ ID NO: 5186830 - DNA, 25 bp, Homo sapien
gatccagcccacagctctctgctga

SEQ ID NO: 5186831 - DNA, 25 bp, Homo sapien
ctgatccagcccacagctctctgct

SEQ ID NO: 5186832 - DNA, 25 bp, Homo sapien
tccagcccacagctctctgctgagt

SEQ ID NO: 5186833 - DNA, 25 bp, Homo sapien
tattttggcaacatttgcaatggca

SEQ ID NO: 5186834 - DNA, 25 bp, Homo sapien
tgtattttggcaacatttgcaatgg

SEQ ID NO: 5186835 - DNA, 25 bp, Homo sapien
gtattttggcaacatttgcaatggc

SEQ ID NO: 5186836 - DNA, 25 bp, Homo sapien
ggcatctgattttggctgcaacagc

SEQ ID NO: 5186837 - DNA, 25 bp, Homo sapien
agcaagtcttccttctacagaggac

SEQ ID NO: 5186838 - DNA, 25 bp, Homo sapien
gctggtggtcctcaggcatctgatt

SEQ ID NO: 5186839 - DNA, 25 bp, Homo sapien
tctacagaggacactttgtccaacg

SEQ ID NO: 5186840 - DNA, 25 bp, Homo sapien
gatgcgccatgtgcactgttgctgg

SEQ ID NO: 5186841 - DNA, 25 bp, Homo sapien
tttcagtggaacaaccttttccaga

SEQ ID NO: 5186842 - DNA, 25 bp, Homo sapien
tgggtttttgatgcgccatgtgcac

SEQ ID NO: 5186843 - DNA, 25 bp, Homo sapien
caggtgtgggtttttgatgcgccat

SEQ ID NO: 5186844 - DNA, 25 bp, Homo sapien
tacaagtttggatgctttattacct

SEQ ID NO: 5186845 - DNA, 25 bp, Homo sapien
taatttaccaagcaagtgcagcacg

SEQ ID NO: 5186846 - DNA, 25 bp, Homo sapien
tcagatattcgaggcagctggccag

SEQ ID NO: 5186847 - DNA, 25 bp, Homo sapien
gtgcagcacgcctatggaaagcttt

SEQ ID NO: 5186848 - DNA, 25 bp, Homo sapien
ttccctccttggacttgaaggccag

SEQ ID NO: 5186849 - DNA, 25 bp, Homo sapien
tccctccttggacttgaaggccagc

SEQ ID NO: 5186850 - DNA, 25 bp, Homo sapien
ttgagggtgaggagactattctggg

SEQ ID NO: 5186851 - DNA, 25 bp, Homo sapien
tggggtaaagtgacatggttttcca

SEQ ID NO: 5186852 - DNA, 25 bp, Homo sapien
gaagtagctgaattgcgaatttgaa

SEQ ID NO: 5186853 - DNA, 25 bp, Homo sapien
tattctggggtaaagtgacatggtt

SEQ ID NO: 5186854 - DNA, 25 bp, Homo sapien
tgtgtcaaatccacttgtttccttc

SEQ ID NO: 5186855 - DNA, 25 bp, Homo sapien
gctgcaaccatggtgaaaaggctgg

SEQ ID NO: 5186856 - DNA, 25 bp, Homo sapien
cttgtgtcaaatccacttgtttcct

SEQ ID NO: 5186857 - DNA, 25 bp, Homo sapien
ccagctgcaaccatggtgaaaaggc

SEQ ID NO: 5186858 - DNA, 25 bp, Homo sapien
taaatctactgtcttctagggctat

SEQ ID NO: 5186859 - DNA, 25 bp, Homo sapien
tactaacagcttactgggaatctct

SEQ ID NO: 5186860 - DNA, 25 bp, Homo sapien
ctagggctatttagtgttgcatgca

SEQ ID NO: 5186861 - DNA, 25 bp, Homo sapien
aaaccacagttgagttacggaacat

SEQ ID NO: 5186862 - DNA, 25 bp, Homo sapien
ttgaggccaaaagtacagaatcttc

SEQ ID NO: 5186863 - DNA, 25 bp, Homo sapien
tatatctgtacagatcttgcctcac

SEQ ID NO: 5186864 - DNA, 25 bp, Homo sapien
tcactctcagaggatgggatagtcc

SEQ ID NO: 5186865 - DNA, 25 bp, Homo sapien
gaatcttctatctgctgtccaacct

SEQ ID NO: 5186866 - DNA, 25 bp, Homo sapien
gaggactcactccattctatcaagg

SEQ ID NO: 5186867 - DNA, 25 bp, Homo sapien
gattagatccaatgcagtctctgat

SEQ ID NO: 5186868 - DNA, 25 bp, Homo sapien
gctacatagataattgaggactcac

SEQ ID NO: 5186869 - DNA, 25 bp, Homo sapien
tgcttgctttcaagggcttccctca

SEQ ID NO: 5186870 - DNA, 25 bp, Homo sapien
ttccgtggctccgtgtgtcttggac

SEQ ID NO: 5186871 - DNA, 25 bp, Homo sapien
tgtgagattccgtggctccgtgtgt

SEQ ID NO: 5186872 - DNA, 25 bp, Homo sapien
gattccgtggctccgtgtgtcttgg

SEQ ID NO: 5186873 - DNA, 25 bp, Homo sapien
gagattccgtggctccgtgtgtctt

SEQ ID NO: 5186874 - DNA, 25 bp, Homo sapien
aaggaccaagaaagacatctgtgcc

SEQ ID NO: 5186875 - DNA, 25 bp, Homo sapien
agacatctgtgccaggcagcccgca

SEQ ID NO: 5186876 - DNA, 25 bp, Homo sapien
ctgtgccaggcagcccgcatgagag

SEQ ID NO: 5186877 - DNA, 25 bp, Homo sapien
ggaccaagaaagacatctgtgccag

SEQ ID NO: 5186878 - DNA, 25 bp, Homo sapien
agaagttgagaggggtcacagagaa

SEQ ID NO: 5186879 - DNA, 25 bp, Homo sapien
agaggggtcacagagaaaattagag

SEQ ID NO: 5186880 - DNA, 25 bp, Homo sapien
tcaaaatatatgaatatgctattgg

SEQ ID NO: 5186881 - DNA, 25 bp, Homo sapien
aaaatatatgaatatgctattggtg

SEQ ID NO: 5186882 - DNA, 25 bp, Homo sapien
gcgcagcctccgcagggcactttgt

SEQ ID NO: 5186883 - DNA, 25 bp, Homo sapien
gcgtacatcactgacgccgccacac

SEQ ID NO: 5186884 - DNA, 25 bp, Homo sapien
ccacagcgtacatcactgacgccgc

SEQ ID NO: 5186885 - DNA, 25 bp, Homo sapien
cgcagcctccgcagggcactttgta

SEQ ID NO: 5186886 - DNA, 25 bp, Homo sapien
tacagacacgcagtctcatccattt

SEQ ID NO: 5186887 - DNA, 25 bp, Homo sapien
cagacacgcagtctcatccattttg

SEQ ID NO: 5186888 - DNA, 25 bp, Homo sapien
atacagacacgcagtctcatccatt

SEQ ID NO: 5186889 - DNA, 25 bp, Homo sapien
acagacacgcagtctcatccatttt

SEQ ID NO: 5186890 - DNA, 25 bp, Homo sapien
tccgttgtatgaatgaactgcactg

SEQ ID NO: 5186891 - DNA, 25 bp, Homo sapien
cggaggctggtcgtgtttatccttt

SEQ ID NO: 5186892 - DNA, 25 bp, Homo sapien
ctgtgtcagaagtgcctgcctggct

SEQ ID NO: 5186893 - DNA, 25 bp, Homo sapien
tatttgtttcactggcgataatgtc

SEQ ID NO: 5186894 - DNA, 25 bp, Homo sapien
ctctgctgggccatgaccacggaga

SEQ ID NO: 5186895 - DNA, 25 bp, Homo sapien
tctgctgggccatgaccacggagaa

SEQ ID NO: 5186896 - DNA, 25 bp, Homo sapien
tgctgggccatgaccacggagaaca

SEQ ID NO: 5186897 - DNA, 25 bp, Homo sapien
tgggccatgaccacggagaacaggt

SEQ ID NO: 5186898 - DNA, 25 bp, Homo sapien
tgagaaatcggaaacaagtaaactg

SEQ ID NO: 5186899 - DNA, 25 bp, Homo sapien
gaaacaagtaaactgacccccagca

SEQ ID NO: 5186900 - DNA, 25 bp, Homo sapien
gagaaatcggaaacaagtaaactga

SEQ ID NO: 5186901 - DNA, 25 bp, Homo sapien
gtctgtagagattggacaacttttg

SEQ ID NO: 5186902 - DNA, 25 bp, Homo sapien
tctgtagagattggacaacttttgc

SEQ ID NO: 5186903 - DNA, 25 bp, Homo sapien
gattctgtgggtctgtagagattgg

SEQ ID NO: 5186904 - DNA, 25 bp, Homo sapien
ctgtgggtctgtagagattggacaa

SEQ ID NO: 5186905 - DNA, 25 bp, Homo sapien
tggacaggaacagccgttctggatc

SEQ ID NO: 5186906 - DNA, 25 bp, Homo sapien
cacatggacaggaacagccgttctg

SEQ ID NO: 5186907 - DNA, 25 bp, Homo sapien
gcacatggacaggaacagccgttct

SEQ ID NO: 5186908 - DNA, 25 bp, Homo sapien
catggacaggaacagccgttctgga

SEQ ID NO: 5186909 - DNA, 25 bp, Homo sapien
caacatgcaagacggggaattgaga

SEQ ID NO: 5186910 - DNA, 25 bp, Homo sapien
cacaacatgcaagacggggaattga

SEQ ID NO: 5186911 - DNA, 25 bp, Homo sapien
catgcaagacggggaattgagaagg

SEQ ID NO: 5186912 - DNA, 25 bp, Homo sapien
aacatgcaagacggggaattgagaa

SEQ ID NO: 5186913 - DNA, 25 bp, Homo sapien
atattgagatgagaccgtgctgccg

SEQ ID NO: 5186914 - DNA, 25 bp, Homo sapien
gatattgagatgagaccgtgctgcc

SEQ ID NO: 5186915 - DNA, 25 bp, Homo sapien
aagatattgagatgagaccgtgctg

SEQ ID NO: 5186916 - DNA, 25 bp, Homo sapien
agaagatattgagatgagaccgtgc

SEQ ID NO: 5186917 - DNA, 25 bp, Homo sapien
gtgagtctggcattcgttagccaac

SEQ ID NO: 5186918 - DNA, 25 bp, Homo sapien
gagtctggcattcgttagccaacga

SEQ ID NO: 5186919 - DNA, 25 bp, Homo sapien
caaaatttggtacttggtgagtctg

SEQ ID NO: 5186920 - DNA, 25 bp, Homo sapien
aaatttggtacttggtgagtctggc

SEQ ID NO: 5186921 - DNA, 25 bp, Homo sapien
cacccagagtaggtatgtgcaagaa

SEQ ID NO: 5186922 - DNA, 25 bp, Homo sapien
tgagccaatccataaggccagtcaa

SEQ ID NO: 5186923 - DNA, 25 bp, Homo sapien
taggtatgtgcaagaactagtaaat

SEQ ID NO: 5186924 - DNA, 25 bp, Homo sapien
tcaaaatctcggaatcagatctcga

SEQ ID NO: 5186925 - DNA, 25 bp, Homo sapien
tagcaggtgctttgaggccccttgc

SEQ ID NO: 5186926 - DNA, 25 bp, Homo sapien
tttattatcatccttaggttttctg

SEQ ID NO: 5186927 - DNA, 25 bp, Homo sapien
attatcatccttaggttttctgaca

SEQ ID NO: 5186928 - DNA, 25 bp, Homo sapien
catccttaggttttctgacatcatt

SEQ ID NO: 5186929 - DNA, 25 bp, Homo sapien
tatttattatcatccttaggttttc

SEQ ID NO: 5186930 - DNA, 25 bp, Homo sapien
agggacagcaaagcgaggaccggct

SEQ ID NO: 5186931 - DNA, 25 bp, Homo sapien
gaaccatgggcgaggtgaaaccgat

SEQ ID NO: 5186932 - DNA, 25 bp, Homo sapien
ccagatacatggacatggacaggga

SEQ ID NO: 5186933 - DNA, 25 bp, Homo sapien
tgtccatgatcatcttgggaaccat

SEQ ID NO: 5186934 - DNA, 25 bp, Homo sapien
tgggaatccaacaggctaaggaaaa

SEQ ID NO: 5186935 - DNA, 25 bp, Homo sapien
gcagctgggaatccaacaggctaag

SEQ ID NO: 5186936 - DNA, 25 bp, Homo sapien
gctgggaatccaacaggctaaggaa

SEQ ID NO: 5186937 - DNA, 25 bp, Homo sapien
tccaacaggctaaggaaaaaggaca

SEQ ID NO: 5186938 - DNA, 25 bp, Homo sapien
ctgttctgctactcagcctctgcag

SEQ ID NO: 5186939 - DNA, 25 bp, Homo sapien
cactgttctgctactcagcctctgc

SEQ ID NO: 5186940 - DNA, 25 bp, Homo sapien
actgttctgctactcagcctctgca

SEQ ID NO: 5186941 - DNA, 25 bp, Homo sapien
tgttctgctactcagcctctgcagg

SEQ ID NO: 5186942 - DNA, 25 bp, Homo sapien
tgcccagccctacttcagctccatc

SEQ ID NO: 5186943 - DNA, 25 bp, Homo sapien
acttcagctccatcacaagagaatt

SEQ ID NO: 5186944 - DNA, 25 bp, Homo sapien
gcccagccctacttcagctccatca

SEQ ID NO: 5186945 - DNA, 25 bp, Homo sapien
cctacttcagctccatcacaagaga

SEQ ID NO: 5186946 - DNA, 25 bp, Homo sapien
gctgtaaacctgatcttgcatcttt

SEQ ID NO: 5186947 - DNA, 25 bp, Homo sapien
gcagctgtaaacctgatcttgcatc

SEQ ID NO: 5186948 - DNA, 25 bp, Homo sapien
cagcagctgtaaacctgatcttgca

SEQ ID NO: 5186949 - DNA, 25 bp, Homo sapien
tgtaaacctgatcttgcatctttcc

SEQ ID NO: 5186950 - DNA, 25 bp, Homo sapien
gcactttttacaactctggcattaa

SEQ ID NO: 5186951 - DNA, 25 bp, Homo sapien
cactttttacaactctggcattaat

SEQ ID NO: 5186952 - DNA, 25 bp, Homo sapien
ctttttacaactctggcattaatca

SEQ ID NO: 5186953 - DNA, 25 bp, Homo sapien
ttttacaactctggcattaatcact

SEQ ID NO: 5186954 - DNA, 25 bp, Homo sapien
caaggttttcagtgcctttgaaaag

SEQ ID NO: 5186955 - DNA, 25 bp, Homo sapien
gttttcagtgcctttgaaaagacca

SEQ ID NO: 5186956 - DNA, 25 bp, Homo sapien
tcaaggttttcagtgcctttgaaaa

SEQ ID NO: 5186957 - DNA, 25 bp, Homo sapien
tcttcaaggttttcagtgcctttga

SEQ ID NO: 5186958 - DNA, 25 bp, Homo sapien
gcgtgtgtaacgatccatggccata

SEQ ID NO: 5186959 - DNA, 25 bp, Homo sapien
ggccatacacggatgccaacaccat

SEQ ID NO: 5186960 - DNA, 25 bp, Homo sapien
ctacaccacagtcccagcgtgtgta

SEQ ID NO: 5186961 - DNA, 25 bp, Homo sapien
gatccatggccatacacggatgcca

SEQ ID NO: 5186962 - DNA, 25 bp, Homo sapien
caatgtagcttttctcagcagagtg

SEQ ID NO: 5186963 - DNA, 25 bp, Homo sapien
taaattttctgtcagtttgccagca

SEQ ID NO: 5186964 - DNA, 25 bp, Homo sapien
ttactatacaatttactgcccaggg

SEQ ID NO: 5186965 - DNA, 25 bp, Homo sapien
tacaaaatactggattccattttta

SEQ ID NO: 5186966 - DNA, 25 bp, Homo sapien
ccgtgctgtctgcgctacattcaca

SEQ ID NO: 5186967 - DNA, 25 bp, Homo sapien
tctggagcctcctgcgaccgctccg

SEQ ID NO: 5186968 - DNA, 25 bp, Homo sapien
gcccgtgctgtctgcgctacattca

SEQ ID NO: 5186969 - DNA, 25 bp, Homo sapien
ctggagcctcctgcgaccgctccgg

SEQ ID NO: 5186970 - DNA, 25 bp, Homo sapien
aggcaccttcctctcgcgcgcccgc

SEQ ID NO: 5186971 - DNA, 25 bp, Homo sapien
cttgcgcgtgttcccgaaggcacct

SEQ ID NO: 5186972 - DNA, 25 bp, Homo sapien
gggcctcattggcagcgcgaatccc

SEQ ID NO: 5186973 - DNA, 25 bp, Homo sapien
cgaatccccgcccttgcgcgtgttc

SEQ ID NO: 5186974 - DNA, 25 bp, Homo sapien
agtttccagctcctcagcgcggttc

SEQ ID NO: 5186975 - DNA, 25 bp, Homo sapien
ctgccgggaaagtttccagctcctc

SEQ ID NO: 5186976 - DNA, 25 bp, Homo sapien
gccagctcggcgctccgcggctgcc

SEQ ID NO: 5186977 - DNA, 25 bp, Homo sapien
ctcctcagcgcggttccccacaccc

SEQ ID NO: 5186978 - DNA, 25 bp, Homo sapien
gggctcacaatcttgacaattaccg

SEQ ID NO: 5186979 - DNA, 25 bp, Homo sapien
gtgccctgatatcgtcccccgaaaa

SEQ ID NO: 5186980 - DNA, 25 bp, Homo sapien
gaaaatgaccactctgcatccaaga

SEQ ID NO: 5186981 - DNA, 25 bp, Homo sapien
ttcccagccaggcgttccggaaagc

SEQ ID NO: 5186982 - DNA, 25 bp, Homo sapien
ccggagctttacacaataagtccag

SEQ ID NO: 5186983 - DNA, 25 bp, Homo sapien
gagctttacacaataagtccagtaa

SEQ ID NO: 5186984 - DNA, 25 bp, Homo sapien
tcccggagctttacacaataagtcc

SEQ ID NO: 5186985 - DNA, 25 bp, Homo sapien
tcctcccggagctttacacaataag

SEQ ID NO: 5186986 - DNA, 25 bp, Homo sapien
aacactggaggcacgcggatctgga

SEQ ID NO: 5186987 - DNA, 25 bp, Homo sapien
actgagaacggtcccaacactggag

SEQ ID NO: 5186988 - DNA, 25 bp, Homo sapien
aggccgttgccgagcctggcgtcct

SEQ ID NO: 5186989 - DNA, 25 bp, Homo sapien
cagcagggaacaacgccactgagaa

SEQ ID NO: 5186990 - DNA, 25 bp, Homo sapien
tgagaccacaggcatggtaccacca

SEQ ID NO: 5186991 - DNA, 25 bp, Homo sapien
ataaggacttgctctgtcgccaagg

SEQ ID NO: 5186992 - DNA, 25 bp, Homo sapien
gctagaatgcagtgctgtaatcaca

SEQ ID NO: 5186993 - DNA, 25 bp, Homo sapien
tttgtagagacagagacttcctatg

SEQ ID NO: 5186994 - DNA, 25 bp, Homo sapien
cgcgtgcatctttaataggcacaaa

SEQ ID NO: 5186995 - DNA, 25 bp, Homo sapien
cgtgcatctttaataggcacaaagg

SEQ ID NO: 5186996 - DNA, 25 bp, Homo sapien
cttcgcgtgcatctttaataggcac

SEQ ID NO: 5186997 - DNA, 25 bp, Homo sapien
tgcatctttaataggcacaaaggca

SEQ ID NO: 5186998 - DNA, 25 bp, Homo sapien
tgcccaccacagcctcccaaagtgc

SEQ ID NO: 5186999 - DNA, 25 bp, Homo sapien
gttcaagcaagtctctcggcctcag

SEQ ID NO: 5187000 - DNA, 25 bp, Homo sapien
gcccaccacagcctcccaaagtgct

SEQ ID NO: 5187001 - DNA, 25 bp, Homo sapien
aagcaagtctctcggcctcagcctc

SEQ ID NO: 5187002 - DNA, 25 bp, Homo sapien
gacctggaggtaggtacagagcctc

SEQ ID NO: 5187003 - DNA, 25 bp, Homo sapien
cctggaggtaggtacagagcctcac

SEQ ID NO: 5187004 - DNA, 25 bp, Homo sapien
acctggaggtaggtacagagcctca

SEQ ID NO: 5187005 - DNA, 25 bp, Homo sapien
gagacctggaggtaggtacagagcc

SEQ ID NO: 5187006 - DNA, 25 bp, Homo sapien
tattaggaagccgatagtgagagtg

SEQ ID NO: 5187007 - DNA, 25 bp, Homo sapien
gaccaggacccctaaaggatctaca

SEQ ID NO: 5187008 - DNA, 25 bp, Homo sapien
tttagtcagatacagtcgccccagg

SEQ ID NO: 5187009 - DNA, 25 bp, Homo sapien
tcgccccaggaaatgcctattagga

SEQ ID NO: 5187010 - DNA, 25 bp, Homo sapien
gacaaggcataggtatcttacaccc

SEQ ID NO: 5187011 - DNA, 25 bp, Homo sapien
taatgggatctggttagcctctagc

SEQ ID NO: 5187012 - DNA, 25 bp, Homo sapien
ggacaaccttatgcaaacacaggga

SEQ ID NO: 5187013 - DNA, 25 bp, Homo sapien
tatatcaccctaggcaggtgcggtg

SEQ ID NO: 5187014 - DNA, 25 bp, Homo sapien
tgacaatgcaagatgccccagacct

SEQ ID NO: 5187015 - DNA, 25 bp, Homo sapien
gggagatcttaagcaatgacagcca

SEQ ID NO: 5187016 - DNA, 25 bp, Homo sapien
cacacatggagaggtatgaacagct

SEQ ID NO: 5187017 - DNA, 25 bp, Homo sapien
cattttccaaagctacccaggtcca

SEQ ID NO: 5187018 - DNA, 25 bp, Homo sapien
tttttgataacttcacatgcaccag

SEQ ID NO: 5187019 - DNA, 25 bp, Homo sapien
tctcctgagagacgttcctgcccag

SEQ ID NO: 5187020 - DNA, 25 bp, Homo sapien
ctcctgagagacgttcctgcccagc

SEQ ID NO: 5187021 - DNA, 25 bp, Homo sapien
atgagaagaggcacccaggctgaac

SEQ ID NO: 5187022 - DNA, 25 bp, Homo sapien
tcccagtctgggaagaatcctctgc

SEQ ID NO: 5187023 - DNA, 25 bp, Homo sapien
ctgacttcaggctcaatgggcagcc

SEQ ID NO: 5187024 - DNA, 25 bp, Homo sapien
cagcccctttctgagaacaagttgg

SEQ ID NO: 5187025 - DNA, 25 bp, Homo sapien
caacaccagcacgcggcaagagcaa

SEQ ID NO: 5187026 - DNA, 25 bp, Homo sapien
agcaagatggctgcctcagccgaga

SEQ ID NO: 5187027 - DNA, 25 bp, Homo sapien
agcacgcggcaagagcaagatggct

SEQ ID NO: 5187028 - DNA, 25 bp, Homo sapien
ctccaacaccagcacgcggcaagag

SEQ ID NO: 5187029 - DNA, 25 bp, Homo sapien
cttctttctgcgagctgtatccttg

SEQ ID NO: 5187030 - DNA, 25 bp, Homo sapien
ccctatctggacctgagcctgaagt

SEQ ID NO: 5187031 - DNA, 25 bp, Homo sapien
catgctgttggtaaatctgaagcag

SEQ ID NO: 5187032 - DNA, 25 bp, Homo sapien
gagctgtatccttgccccctatctg

SEQ ID NO: 5187033 - DNA, 25 bp, Homo sapien
attgttgaaatgaataactgtccca

SEQ ID NO: 5187034 - DNA, 25 bp, Homo sapien
ggactttgggattgttgaaatgaat

SEQ ID NO: 5187035 - DNA, 25 bp, Homo sapien
tgttgaaatgaataactgtcccatc

SEQ ID NO: 5187036 - DNA, 25 bp, Homo sapien
cttggactttgggattgttgaaatg

SEQ ID NO: 5187037 - DNA, 25 bp, Homo sapien
agcaccaagctgacttaatattcca

SEQ ID NO: 5187038 - DNA, 25 bp, Homo sapien
ctgtgattggtttggcttctgcatg

SEQ ID NO: 5187039 - DNA, 25 bp, Homo sapien
tgtcagcaccaagctgacttaatat

SEQ ID NO: 5187040 - DNA, 25 bp, Homo sapien
catttctgtgattggtttggcttct

SEQ ID NO: 5187041 - DNA, 25 bp, Homo sapien
ttagttagcttcattctttgatgcc

SEQ ID NO: 5187042 - DNA, 25 bp, Homo sapien
tttctacaagatctggaacatcatc

SEQ ID NO: 5187043 - DNA, 25 bp, Homo sapien
tagcttcattctttgatgcctcatc

SEQ ID NO: 5187044 - DNA, 25 bp, Homo sapien
ttctggttttggtgctttactgtcc

SEQ ID NO: 5187045 - DNA, 25 bp, Homo sapien
gggaggaagtgcaaaatgcaaaatc

SEQ ID NO: 5187046 - DNA, 25 bp, Homo sapien
tcctgggaggaagtgcaaaatgcaa

SEQ ID NO: 5187047 - DNA, 25 bp, Homo sapien
ctgggaggaagtgcaaaatgcaaaa

SEQ ID NO: 5187048 - DNA, 25 bp, Homo sapien
atcctgggaggaagtgcaaaatgca

SEQ ID NO: 5187049 - DNA, 25 bp, Homo sapien
ctgcaggaatatgacgtaactgtcc

SEQ ID NO: 5187050 - DNA, 25 bp, Homo sapien
taactgtcctggttagtgcaccaaa

SEQ ID NO: 5187051 - DNA, 25 bp, Homo sapien
acaatatgccttcaatatgtcagcc

SEQ ID NO: 5187052 - DNA, 25 bp, Homo sapien
tcgagacacaatttgactgcaggaa

SEQ ID NO: 5187053 - DNA, 25 bp, Homo sapien
tcatgtcaaagtctaatatggtttg

SEQ ID NO: 5187054 - DNA, 25 bp, Homo sapien
ccagatctttgctgttagggttgaa

SEQ ID NO: 5187055 - DNA, 25 bp, Homo sapien
ggtactgaattaggagacagaaaga

SEQ ID NO: 5187056 - DNA, 25 bp, Homo sapien
tttgaccaagctgcatataaactaa

SEQ ID NO: 5187057 - DNA, 25 bp, Homo sapien
tctaaaaagacacaactggacccga

SEQ ID NO: 5187058 - DNA, 25 bp, Homo sapien
tagcaaaccacttcgaataccctgg

SEQ ID NO: 5187059 - DNA, 25 bp, Homo sapien
taaaagtagaagcaccacggtatct

SEQ ID NO: 5187060 - DNA, 25 bp, Homo sapien
tgagagaaggatacaaaccctgccc

SEQ ID NO: 5187061 - DNA, 25 bp, Homo sapien
tggaggtcactctgactccatatgg

SEQ ID NO: 5187062 - DNA, 25 bp, Homo sapien
gccttgctcttggcaatcttccagg

SEQ ID NO: 5187063 - DNA, 25 bp, Homo sapien
gaggtcactctgactccatatggcc

SEQ ID NO: 5187064 - DNA, 25 bp, Homo sapien
gggactggaggtcactctgactcca

SEQ ID NO: 5187065 - DNA, 25 bp, Homo sapien
ttcaggcttggtaaagagtactttc

SEQ ID NO: 5187066 - DNA, 25 bp, Homo sapien
gcaggctgaaatgacctaccaggac

SEQ ID NO: 5187067 - DNA, 25 bp, Homo sapien
gaatatgtaccttacaccctaagac

SEQ ID NO: 5187068 - DNA, 25 bp, Homo sapien
tctatttaggtctaggctgtcagga

SEQ ID NO: 5187069 - DNA, 25 bp, Homo sapien
gataactactaagagccacagtgcc

SEQ ID NO: 5187070 - DNA, 25 bp, Homo sapien
ccagctggcgcacatgcaggttgaa

SEQ ID NO: 5187071 - DNA, 25 bp, Homo sapien
tgacagaggctggataagaaagaac

SEQ ID NO: 5187072 - DNA, 25 bp, Homo sapien
gggaacaccggctccatctgaggtg

SEQ ID NO: 5187073 - DNA, 25 bp, Homo sapien
gttggagtgaataacgatttgtagg

SEQ ID NO: 5187074 - DNA, 25 bp, Homo sapien
gaggagggacagattaggccattca

SEQ ID NO: 5187075 - DNA, 25 bp, Homo sapien
cgatttgtaggtgatgatcgctgga

SEQ ID NO: 5187076 - DNA, 25 bp, Homo sapien
ggcatctgcattgagtccggctgct

SEQ ID NO: 5187077 - DNA, 25 bp, Homo sapien
gttcatggaccaaagcatgtctcca

SEQ ID NO: 5187078 - DNA, 25 bp, Homo sapien
tccatgtgacggtccaaatcctcca

SEQ ID NO: 5187079 - DNA, 25 bp, Homo sapien
gctttgactacaatgtgaggcccag

SEQ ID NO: 5187080 - DNA, 25 bp, Homo sapien
tcctccagctgtaaagggttctgca

SEQ ID NO: 5187081 - DNA, 25 bp, Homo sapien
gcaccatcctttttagttcacgaga

SEQ ID NO: 5187082 - DNA, 25 bp, Homo sapien
gggaggtcctcactatctcttgggt

SEQ ID NO: 5187083 - DNA, 25 bp, Homo sapien
catgtctggtaaacagccaaacagg

SEQ ID NO: 5187084 - DNA, 25 bp, Homo sapien
tatctcttgggtggacttcaggctg

SEQ ID NO: 5187085 - DNA, 25 bp, Homo sapien
taaaaccatgccttggcaccctaag

SEQ ID NO: 5187086 - DNA, 25 bp, Homo sapien
tagtaactctgcagtgaaacctttg

SEQ ID NO: 5187087 - DNA, 25 bp, Homo sapien
taagtgtgtggtccaaatgtctccc

SEQ ID NO: 5187088 - DNA, 25 bp, Homo sapien
tattgtgacgcagcacagaaaacac

SEQ ID NO: 5187089 - DNA, 25 bp, Homo sapien
gacgtcctggatcaaaagtgcatgt

SEQ ID NO: 5187090 - DNA, 25 bp, Homo sapien
aagtgcatgtttgagcccaagtgcc

SEQ ID NO: 5187091 - DNA, 25 bp, Homo sapien
tctatgacgtcctggatcaaaagtg

SEQ ID NO: 5187092 - DNA, 25 bp, Homo sapien
gattttcccatctatgacgtcctgg

SEQ ID NO: 5187093 - DNA, 25 bp, Homo sapien
tgctcctgtagttcacggatatgtc

SEQ ID NO: 5187094 - DNA, 25 bp, Homo sapien
catttgcctgctcctgtagttcacg

SEQ ID NO: 5187095 - DNA, 25 bp, Homo sapien
ggaatatttgcgggctggcacacac

SEQ ID NO: 5187096 - DNA, 25 bp, Homo sapien
catctatggttctgggttagtggaa

SEQ ID NO: 5187097 - DNA, 25 bp, Homo sapien
ccaatggctactgtgcaaggcagag

SEQ ID NO: 5187098 - DNA, 25 bp, Homo sapien
ggtatttcaaataggcacacagaag

SEQ ID NO: 5187099 - DNA, 25 bp, Homo sapien
gcaaaacacggctaactagaagaca

SEQ ID NO: 5187100 - DNA, 25 bp, Homo sapien
aaggcagagctcagtcttgcagaga

SEQ ID NO: 5187101 - DNA, 25 bp, Homo sapien
gtatacatgaagaagtgcacattta

SEQ ID NO: 5187102 - DNA, 25 bp, Homo sapien
ctgtgtaggcagccagcaggctctc

SEQ ID NO: 5187103 - DNA, 25 bp, Homo sapien
gcagccagcaggctctcctcttctg

SEQ ID NO: 5187104 - DNA, 25 bp, Homo sapien
gtgtaggcagccagcaggctctcct

SEQ ID NO: 5187105 - DNA, 25 bp, Homo sapien
agccagcaggctctcctcttctgca

SEQ ID NO: 5187106 - DNA, 25 bp, Homo sapien
cctttcctccctctcggctcttctt

SEQ ID NO: 5187107 - DNA, 25 bp, Homo sapien
tcctccctctcggctcttcttcagc

SEQ ID NO: 5187108 - DNA, 25 bp, Homo sapien
cctccctctcggctcttcttcagca

SEQ ID NO: 5187109 - DNA, 25 bp, Homo sapien
tttcctccctctcggctcttcttca

SEQ ID NO: 5187110 - DNA, 25 bp, Homo sapien
gcttgctgcccgctgtccatggctg

SEQ ID NO: 5187111 - DNA, 25 bp, Homo sapien
tgctgcccgctgtccatggctgagc

SEQ ID NO: 5187112 - DNA, 25 bp, Homo sapien
cagcttgctgcccgctgtccatggc

SEQ ID NO: 5187113 - DNA, 25 bp, Homo sapien
ttgctgcccgctgtccatggctgag

SEQ ID NO: 5187114 - DNA, 25 bp, Homo sapien
ttctaacccaggtaaccctctctga

SEQ ID NO: 5187115 - DNA, 25 bp, Homo sapien
tctaacccaggtaaccctctctgac

SEQ ID NO: 5187116 - DNA, 25 bp, Homo sapien
gctcgttttacctttacccactgca

SEQ ID NO: 5187117 - DNA, 25 bp, Homo sapien
caccagaacataggacaagaacaat

SEQ ID NO: 5187118 - DNA, 25 bp, Homo sapien
actgtggtcaccagaacataggaca

SEQ ID NO: 5187119 - DNA, 25 bp, Homo sapien
tgctcgttttacctttacccactgc

SEQ ID NO: 5187120 - DNA, 25 bp, Homo sapien
tgggtagaggaggaactttgacatc

SEQ ID NO: 5187121 - DNA, 25 bp, Homo sapien
ggtagaggaggaactttgacatctt

SEQ ID NO: 5187122 - DNA, 25 bp, Homo sapien
ctgggtagaggaggaactttgacat

SEQ ID NO: 5187123 - DNA, 25 bp, Homo sapien
tagaggaggaactttgacatctttg

SEQ ID NO: 5187124 - DNA, 25 bp, Homo sapien
gcccagaaatgcagtctcactccct

SEQ ID NO: 5187125 - DNA, 25 bp, Homo sapien
atcctttacttctaagcccagaaat

SEQ ID NO: 5187126 - DNA, 25 bp, Homo sapien
ctttacttctaagcccagaaatgca

SEQ ID NO: 5187127 - DNA, 25 bp, Homo sapien
cttctgatcgtacggggcagaagcc

SEQ ID NO: 5187128 - DNA, 25 bp, Homo sapien
gcaaagctgtctgccaaaaggcctc

SEQ ID NO: 5187129 - DNA, 25 bp, Homo sapien
aaatccaaactctggcagtcccgtc

SEQ ID NO: 5187130 - DNA, 25 bp, Homo sapien
aaactctggcagtcccgtcagcaaa

SEQ ID NO: 5187131 - DNA, 25 bp, Homo sapien
tggcagtcccgtcagcaaagctgtc

SEQ ID NO: 5187132 - DNA, 25 bp, Homo sapien
cagaggccacttatcctcgaacttc

SEQ ID NO: 5187133 - DNA, 25 bp, Homo sapien
ggccacttatcctcgaacttcacat

SEQ ID NO: 5187134 - DNA, 25 bp, Homo sapien
tcctcgaacttcacatactgtttca

SEQ ID NO: 5187135 - DNA, 25 bp, Homo sapien
actgccagaggccacttatcctcga

SEQ ID NO: 5187136 - DNA, 25 bp, Homo sapien
aagatctagtgcctcaccctaggtg

SEQ ID NO: 5187137 - DNA, 25 bp, Homo sapien
tgtccatgtagctccaactgaccat

SEQ ID NO: 5187138 - DNA, 25 bp, Homo sapien
tcaaagcacttaaaaggagcctcac

SEQ ID NO: 5187139 - DNA, 25 bp, Homo sapien
cagatctctctaatgtcagatggtc

SEQ ID NO: 5187140 - DNA, 25 bp, Homo sapien
cacttgcagatgcctgctcacatgg

SEQ ID NO: 5187141 - DNA, 25 bp, Homo sapien
ctacagtggacacgggcataacagg

SEQ ID NO: 5187142 - DNA, 25 bp, Homo sapien
cttgtttgcagctgactacagtgga

SEQ ID NO: 5187143 - DNA, 25 bp, Homo sapien
gacatgtgtgtaggcactgctcgga

SEQ ID NO: 5187144 - DNA, 25 bp, Homo sapien
taacaggaagaagagtgccagtgcc

SEQ ID NO: 5187145 - DNA, 25 bp, Homo sapien
ccaatgaagggtgaagtcacgagct

SEQ ID NO: 5187146 - DNA, 25 bp, Homo sapien
gattttactgtgcagccaggaccga

SEQ ID NO: 5187147 - DNA, 25 bp, Homo sapien
ggattcaccgtcaatctgcatggaa

SEQ ID NO: 5187148 - DNA, 25 bp, Homo sapien
cacttcccaagacaaagaggtcggg

SEQ ID NO: 5187149 - DNA, 25 bp, Homo sapien
atttattaactcttgcagcatttgg

SEQ ID NO: 5187150 - DNA, 25 bp, Homo sapien
ttagtcatcaagcaccctagtttcc

SEQ ID NO: 5187151 - DNA, 25 bp, Homo sapien
tcctctccgtgggtactggacattt

SEQ ID NO: 5187152 - DNA, 25 bp, Homo sapien
ctctcctctccgtgggtactggaca

SEQ ID NO: 5187153 - DNA, 25 bp, Homo sapien
ttctctcagtcacacctcatgctgt

SEQ ID NO: 5187154 - DNA, 25 bp, Homo sapien
tgctgtcaccatacaagcgaagtgg

SEQ ID NO: 5187155 - DNA, 25 bp, Homo sapien
gggaggtacccaggcccagtgatca

SEQ ID NO: 5187156 - DNA, 25 bp, Homo sapien
caagcgaagtggatccaggataggt

SEQ ID NO: 5187157 - DNA, 25 bp, Homo sapien
tgtgccttatcctgaaacagatgag

SEQ ID NO: 5187158 - DNA, 25 bp, Homo sapien
caagaaagcagctaacccctagggt

SEQ ID NO: 5187159 - DNA, 25 bp, Homo sapien
tgtcttcaaaaatccacccagtggg

SEQ ID NO: 5187160 - DNA, 25 bp, Homo sapien
tagaaccaaacgtacaaatgtgcct

SEQ ID NO: 5187161 - DNA, 25 bp, Homo sapien
caggactggagaagtctctggacca

SEQ ID NO: 5187162 - DNA, 25 bp, Homo sapien
aggactggagaagtctctggaccaa

SEQ ID NO: 5187163 - DNA, 25 bp, Homo sapien
gagaagtctctggaccaaagtcact

SEQ ID NO: 5187164 - DNA, 25 bp, Homo sapien
ctggagaagtctctggaccaaagtc

SEQ ID NO: 5187165 - DNA, 25 bp, Homo sapien
gaagactgctcacaggagagtcagc

SEQ ID NO: 5187166 - DNA, 25 bp, Homo sapien
gggaagactgctcacaggagagtca

SEQ ID NO: 5187167 - DNA, 25 bp, Homo sapien
cctataggtgtcctctgctgtggga

SEQ ID NO: 5187168 - DNA, 25 bp, Homo sapien
tgtcctctgctgtgggaagactgct

SEQ ID NO: 5187169 - DNA, 25 bp, Homo sapien
tcttgattgcaccaagtgagactgt

SEQ ID NO: 5187170 - DNA, 25 bp, Homo sapien
gaaggcagagacatcgagacacctt

SEQ ID NO: 5187171 - DNA, 25 bp, Homo sapien
tcgagacacctttggccaagctcac

SEQ ID NO: 5187172 - DNA, 25 bp, Homo sapien
caagtgagactgtcgaggcagcaaa

SEQ ID NO: 5187173 - DNA, 25 bp, Homo sapien
cattcagagcctttaagggtgccct

SEQ ID NO: 5187174 - DNA, 25 bp, Homo sapien
tcaggataacccagtatgacaggca

SEQ ID NO: 5187175 - DNA, 25 bp, Homo sapien
gataaacaggtcaaattccttggca

SEQ ID NO: 5187176 - DNA, 25 bp, Homo sapien
tagcaccgtttctaacattcagagc

SEQ ID NO: 5187177 - DNA, 25 bp, Homo sapien
tcttaacacatatagggaccaatgc

SEQ ID NO: 5187178 - DNA, 25 bp, Homo sapien
tgagctcaactccaaataccgcatg

SEQ ID NO: 5187179 - DNA, 25 bp, Homo sapien
cagttagggaaagagttgattgagc

SEQ ID NO: 5187180 - DNA, 25 bp, Homo sapien
gggtaggtatcggtgcatgaaaaat

SEQ ID NO: 5187181 - DNA, 25 bp, Homo sapien
tggctccatacctctgggtgctgca

SEQ ID NO: 5187182 - DNA, 25 bp, Homo sapien
ggtagtttcggagcacatgtctgaa

SEQ ID NO: 5187183 - DNA, 25 bp, Homo sapien
gactctatcattagcagcaacagtg

SEQ ID NO: 5187184 - DNA, 25 bp, Homo sapien
tgtctgaatgatggcacgaccctgg

SEQ ID NO: 5187185 - DNA, 25 bp, Homo sapien
taccccaaggagatatcagagatgt

SEQ ID NO: 5187186 - DNA, 25 bp, Homo sapien
gtcagtagtccacagttaggccgca

SEQ ID NO: 5187187 - DNA, 25 bp, Homo sapien
tagttcaataattccactgctggga

SEQ ID NO: 5187188 - DNA, 25 bp, Homo sapien
taaagaaggcagctacagaatgacg

SEQ ID NO: 5187189 - DNA, 25 bp, Homo sapien
gggcaaatgtgttactgttggttac

SEQ ID NO: 5187190 - DNA, 25 bp, Homo sapien
gggaatgggcaaatgtgttactgtt

SEQ ID NO: 5187191 - DNA, 25 bp, Homo sapien
caaatgtgttactgttggttacgta

SEQ ID NO: 5187192 - DNA, 25 bp, Homo sapien
gaatgggcaaatgtgttactgttgg

SEQ ID NO: 5187193 - DNA, 25 bp, Homo sapien
gacgcgaaataaagggttatgcaga

SEQ ID NO: 5187194 - DNA, 25 bp, Homo sapien
gacaagacagcagtccttacagaga

SEQ ID NO: 5187195 - DNA, 25 bp, Homo sapien
gacacagtgctacagatgctcggag

SEQ ID NO: 5187196 - DNA, 25 bp, Homo sapien
gaatgtcagggcagagacgcgaaat

SEQ ID NO: 5187197 - DNA, 25 bp, Homo sapien
atgggctcctgtgacttctgtttct

SEQ ID NO: 5187198 - DNA, 25 bp, Homo sapien
catgggctcctgtgacttctgtttc

SEQ ID NO: 5187199 - DNA, 25 bp, Homo sapien
tgcatgggctcctgtgacttctgtt

SEQ ID NO: 5187200 - DNA, 25 bp, Homo sapien
ctgcatgggctcctgtgacttctgt

SEQ ID NO: 5187201 - DNA, 25 bp, Homo sapien
tacagagccgggacatgaatccagc

SEQ ID NO: 5187202 - DNA, 25 bp, Homo sapien
catgaatccagctgcgtccacctgc

SEQ ID NO: 5187203 - DNA, 25 bp, Homo sapien
tgctcaagcctacagagccgggaca

SEQ ID NO: 5187204 - DNA, 25 bp, Homo sapien
aagaaacacctatggcctgctcaag

SEQ ID NO: 5187205 - DNA, 25 bp, Homo sapien
caggctacagttaagatgtttcccc

SEQ ID NO: 5187206 - DNA, 25 bp, Homo sapien
tattttaaagcccaaagggcacaca

SEQ ID NO: 5187207 - DNA, 25 bp, Homo sapien
tcctcagaaactaatggatagctcc

SEQ ID NO: 5187208 - DNA, 25 bp, Homo sapien
gggtatcacacactactctactagc

SEQ ID NO: 5187209 - DNA, 25 bp, Homo sapien
gcatttgactcaaggagtcccagtc

SEQ ID NO: 5187210 - DNA, 25 bp, Homo sapien
gaggcctgtgtgaaacagttaccgt

SEQ ID NO: 5187211 - DNA, 25 bp, Homo sapien
cagagttaagccactatactgcatt

SEQ ID NO: 5187212 - DNA, 25 bp, Homo sapien
agtctcaaccccaaggaggcctgtg

SEQ ID NO: 5187213 - DNA, 25 bp, Homo sapien
tctggggctttccacatacttgggc

SEQ ID NO: 5187214 - DNA, 25 bp, Homo sapien
ctggggctttccacatacttgggct

SEQ ID NO: 5187215 - DNA, 25 bp, Homo sapien
gggctttccacatacttgggcttcc

SEQ ID NO: 5187216 - DNA, 25 bp, Homo sapien
tggggctttccacatacttgggctt

SEQ ID NO: 5187217 - DNA, 25 bp, Homo sapien
gctctgttggcttggctacttctct

SEQ ID NO: 5187218 - DNA, 25 bp, Homo sapien
ctgttggcttggctacttctctgaa

SEQ ID NO: 5187219 - DNA, 25 bp, Homo sapien
atgctcatcaggctctgttggcttg

SEQ ID NO: 5187220 - DNA, 25 bp, Homo sapien
gcttggctacttctctgaatggcat

SEQ ID NO: 5187221 - DNA, 25 bp, Homo sapien
tgccaagacacctgcaatagcacct

SEQ ID NO: 5187222 - DNA, 25 bp, Homo sapien
tctcatgccaagacacctgcaatag

SEQ ID NO: 5187223 - DNA, 25 bp, Homo sapien
atttctcatgccaagacacctgcaa

SEQ ID NO: 5187224 - DNA, 25 bp, Homo sapien
agacacctgcaatagcacctcttgc

SEQ ID NO: 5187225 - DNA, 25 bp, Homo sapien
ggtgtgcacaaatcctcagctcaaa

SEQ ID NO: 5187226 - DNA, 25 bp, Homo sapien
tcttccctcaaccacacaatgagtg

SEQ ID NO: 5187227 - DNA, 25 bp, Homo sapien
tatcctaaccagacaccacagtgga

SEQ ID NO: 5187228 - DNA, 25 bp, Homo sapien
acagtggaatctccaccttcaccag

SEQ ID NO: 5187229 - DNA, 25 bp, Homo sapien
aacagactgcctgcccacgtgaacg

SEQ ID NO: 5187230 - DNA, 25 bp, Homo sapien
gaacgcacaatcaagagaggcctca

SEQ ID NO: 5187231 - DNA, 25 bp, Homo sapien
tgcccacgtgaacgcacaatcaaga

SEQ ID NO: 5187232 - DNA, 25 bp, Homo sapien
gagagaacagactgcctgcccacgt

SEQ ID NO: 5187233 - DNA, 25 bp, Homo sapien
tgagcaagggagaaaagttaacaat

SEQ ID NO: 5187234 - DNA, 25 bp, Homo sapien
gttacataatggagcctaggccagc

SEQ ID NO: 5187235 - DNA, 25 bp, Homo sapien
tccctgtacagaaccttaacgatac

SEQ ID NO: 5187236 - DNA, 25 bp, Homo sapien
ttgaccagggctacaaaggctttgg

SEQ ID NO: 5187237 - DNA, 25 bp, Homo sapien
cccatgaagactaaagatgccgaat

SEQ ID NO: 5187238 - DNA, 25 bp, Homo sapien
aaccgaaatgtctggtcctgtattt

SEQ ID NO: 5187239 - DNA, 25 bp, Homo sapien
ttgtagcccatagatctcataactt

SEQ ID NO: 5187240 - DNA, 25 bp, Homo sapien
taatttcaggcgaaaccgaaatgtc

SEQ ID NO: 5187241 - DNA, 25 bp, Homo sapien
caactggtggctggacacttgcgaa

SEQ ID NO: 5187242 - DNA, 25 bp, Homo sapien
cactgaacctgaactaatttgagac

SEQ ID NO: 5187243 - DNA, 25 bp, Homo sapien
cagtgtcccttaatgtggtctcaaa

SEQ ID NO: 5187244 - DNA, 25 bp, Homo sapien
tgtctatgaaccagcaagtaggcct

SEQ ID NO: 5187245 - DNA, 25 bp, Homo sapien
ggcagtgaagaacaccaggactacc

SEQ ID NO: 5187246 - DNA, 25 bp, Homo sapien
gaaaaccatcagacttccgagcatg

SEQ ID NO: 5187247 - DNA, 25 bp, Homo sapien
gactagaagtccacagcctacactg

SEQ ID NO: 5187248 - DNA, 25 bp, Homo sapien
cctacttcagaataaccatgggttg

SEQ ID NO: 5187249 - DNA, 25 bp, Homo sapien
aaggtaagttccactgttgactcaa

SEQ ID NO: 5187250 - DNA, 25 bp, Homo sapien
ccccaagtgctggaaacagcaattt

SEQ ID NO: 5187251 - DNA, 25 bp, Homo sapien
tctgcatcgatgaattttttgtact

SEQ ID NO: 5187252 - DNA, 25 bp, Homo sapien
tttgtactgttacagtaagatccaa

SEQ ID NO: 5187253 - DNA, 25 bp, Homo sapien
cccaatttggcctgcaccttactgc

SEQ ID NO: 5187254 - DNA, 25 bp, Homo sapien
ccaatttggcctgcaccttactgct

SEQ ID NO: 5187255 - DNA, 25 bp, Homo sapien
caatttggcctgcaccttactgctt

SEQ ID NO: 5187256 - DNA, 25 bp, Homo sapien
aatgtctagcttctggttcaacctg

SEQ ID NO: 5187257 - DNA, 25 bp, Homo sapien
cacactgctcccgattgtgattatg

SEQ ID NO: 5187258 - DNA, 25 bp, Homo sapien
gtgattatgccccagaatgtctagc

SEQ ID NO: 5187259 - DNA, 25 bp, Homo sapien
tggttcaacctgaaacactctgtgt

SEQ ID NO: 5187260 - DNA, 25 bp, Homo sapien
gcagtggccccaagccaacacaggg

SEQ ID NO: 5187261 - DNA, 25 bp, Homo sapien
tgggttaaaagagccctgatgcttc

SEQ ID NO: 5187262 - DNA, 25 bp, Homo sapien
agggcgggtcgacctcatgccaaag

SEQ ID NO: 5187263 - DNA, 25 bp, Homo sapien
gaaaccaaggcttgactattctggg

SEQ ID NO: 5187264 - DNA, 25 bp, Homo sapien
tggtaaaagctcctaatgtttggag

SEQ ID NO: 5187265 - DNA, 25 bp, Homo sapien
gtaaaagctcctaatgtttggagta

SEQ ID NO: 5187266 - DNA, 25 bp, Homo sapien
cacagtgatgttgccgttgagctac

SEQ ID NO: 5187267 - DNA, 25 bp, Homo sapien
caagggaaactacgctggcagcatc

SEQ ID NO: 5187268 - DNA, 25 bp, Homo sapien
catgttaccctcacagagtgccggg

SEQ ID NO: 5187269 - DNA, 25 bp, Homo sapien
catcagcttgggtaagaaaagggcc

SEQ ID NO: 5187270 - DNA, 25 bp, Homo sapien
gtgtgtggcacttgggatcccttct

SEQ ID NO: 5187271 - DNA, 25 bp, Homo sapien
caacagttcttgagctgccggcgaa

SEQ ID NO: 5187272 - DNA, 25 bp, Homo sapien
gctcggttcattatcggcctttgct

SEQ ID NO: 5187273 - DNA, 25 bp, Homo sapien
aaaaatcccagccttgtcaacagtt

SEQ ID NO: 5187274 - DNA, 25 bp, Homo sapien
tgcagagaccttcaccagggtagaa

SEQ ID NO: 5187275 - DNA, 25 bp, Homo sapien
ttgacctctgtacggaagacctggg

SEQ ID NO: 5187276 - DNA, 25 bp, Homo sapien
agttagcacggcttacacaggatgc

SEQ ID NO: 5187277 - DNA, 25 bp, Homo sapien
tatgcaatgtagtgtcttcctcggg

SEQ ID NO: 5187278 - DNA, 25 bp, Homo sapien
tccagggtggaactagggctgctaa

SEQ ID NO: 5187279 - DNA, 25 bp, Homo sapien
ggctgccgtcttgctgacacagcta

SEQ ID NO: 5187280 - DNA, 25 bp, Homo sapien
tcacagggacttttgttggctgccg

SEQ ID NO: 5187281 - DNA, 25 bp, Homo sapien
gcaaggactgatgccttgactcaga

SEQ ID NO: 5187282 - DNA, 25 bp, Homo sapien
tacacatggagtcagtgctgcctgc

SEQ ID NO: 5187283 - DNA, 25 bp, Homo sapien
aagtgcctggtgaatgctctggttg

SEQ ID NO: 5187284 - DNA, 25 bp, Homo sapien
gccattatgttaccgagcagtgtgc

SEQ ID NO: 5187285 - DNA, 25 bp, Homo sapien
agaccatgctaaaaccctctgagga

SEQ ID NO: 5187286 - DNA, 25 bp, Homo sapien
ctagcaccgtttctccaaaggaggc

SEQ ID NO: 5187287 - DNA, 25 bp, Homo sapien
gagagtgactgacttaacggcccct

SEQ ID NO: 5187288 - DNA, 25 bp, Homo sapien
tctagcaggatactaaccaggtgtc

SEQ ID NO: 5187289 - DNA, 25 bp, Homo sapien
caaaggaggccgattcaggacacta

SEQ ID NO: 5187290 - DNA, 25 bp, Homo sapien
gcgcaaggcatgctctgctatgaca

SEQ ID NO: 5187291 - DNA, 25 bp, Homo sapien
tctgctatgacatgcagcaaggcca

SEQ ID NO: 5187292 - DNA, 25 bp, Homo sapien
ggcccgagccgcacattcccagcca

SEQ ID NO: 5187293 - DNA, 25 bp, Homo sapien
gttgcgcaaggcatgctctgctatg

SEQ ID NO: 5187294 - DNA, 25 bp, Homo sapien
tgactacagcattagcccagaattg

SEQ ID NO: 5187295 - DNA, 25 bp, Homo sapien
gaattgttcaggaactaaggaccag

SEQ ID NO: 5187296 - DNA, 25 bp, Homo sapien
ggaccagagataccaaacatatgcc

SEQ ID NO: 5187297 - DNA, 25 bp, Homo sapien
taaggaccagagataccaaacatat

SEQ ID NO: 5187298 - DNA, 25 bp, Homo sapien
cactgcaatcaggacctcagggacc

SEQ ID NO: 5187299 - DNA, 25 bp, Homo sapien
tacaagtgacagcactgcaatcagg

SEQ ID NO: 5187300 - DNA, 25 bp, Homo sapien
tgttacaagtgacagcactgcaatc

SEQ ID NO: 5187301 - DNA, 25 bp, Homo sapien
gacagcactgcaatcaggacctcag

SEQ ID NO: 5187302 - DNA, 25 bp, Homo sapien
tgaacataggcatagcaagtatgac

SEQ ID NO: 5187303 - DNA, 25 bp, Homo sapien
catttatatgaacataggcatagca

SEQ ID NO: 5187304 - DNA, 25 bp, Homo sapien
cataggcatagcaagtatgactctt

SEQ ID NO: 5187305 - DNA, 25 bp, Homo sapien
tatatgaacataggcatagcaagta

SEQ ID NO: 5187306 - DNA, 25 bp, Homo sapien
tcaggatctgattttgggtgcccat

SEQ ID NO: 5187307 - DNA, 25 bp, Homo sapien
cctctttggaatcaatcacagcctt

SEQ ID NO: 5187308 - DNA, 25 bp, Homo sapien
gtgttccatcagcagtattaaacca

SEQ ID NO: 5187309 - DNA, 25 bp, Homo sapien
ggtgcccatcgttatgattcccagc

SEQ ID NO: 5187310 - DNA, 25 bp, Homo sapien
gggccatgtccaccgatgcctcttt

SEQ ID NO: 5187311 - DNA, 25 bp, Homo sapien
ctgcgtccttgagaacaggggccat

SEQ ID NO: 5187312 - DNA, 25 bp, Homo sapien
ttccagtcacctaggccctcaactc

SEQ ID NO: 5187313 - DNA, 25 bp, Homo sapien
gctggctgcgtccttgagaacaggg

SEQ ID NO: 5187314 - DNA, 25 bp, Homo sapien
ggagccactccggtcatcattttcg

SEQ ID NO: 5187315 - DNA, 25 bp, Homo sapien
ttttcggatgaacttgtaattgtgg

SEQ ID NO: 5187316 - DNA, 25 bp, Homo sapien
tccggtcatcattttcggatgaact

SEQ ID NO: 5187317 - DNA, 25 bp, Homo sapien
caaactggagccactccggtcatca

SEQ ID NO: 5187318 - DNA, 25 bp, Homo sapien
tctgctttgggcagcgtgctctctg

SEQ ID NO: 5187319 - DNA, 25 bp, Homo sapien
tggcattattagtgagctggagccc

SEQ ID NO: 5187320 - DNA, 25 bp, Homo sapien
tgcaactgagttgggccgtggcatt

SEQ ID NO: 5187321 - DNA, 25 bp, Homo sapien
gagaataagggactggaccatctcc

SEQ ID NO: 5187322 - DNA, 25 bp, Homo sapien
ccagctgctgcatatctcggtaaag

SEQ ID NO: 5187323 - DNA, 25 bp, Homo sapien
cagtctgactactgacagttgccag

SEQ ID NO: 5187324 - DNA, 25 bp, Homo sapien
agcatgtctatctcgaatattttca

SEQ ID NO: 5187325 - DNA, 25 bp, Homo sapien
acagttgccagcctttgtggtttct

SEQ ID NO: 5187326 - DNA, 25 bp, Homo sapien
ttctctgacgtaggagcggagaatc

SEQ ID NO: 5187327 - DNA, 25 bp, Homo sapien
ctctgacgtaggagcggagaatctg

SEQ ID NO: 5187328 - DNA, 25 bp, Homo sapien
agagaaattctctgacgtaggagcg

SEQ ID NO: 5187329 - DNA, 25 bp, Homo sapien
gaaattctctgacgtaggagcggag

SEQ ID NO: 5187330 - DNA, 25 bp, Homo sapien
taaactgaagtttagtatcttcaaa

SEQ ID NO: 5187331 - DNA, 25 bp, Homo sapien
tcttcaaaggtgactttaaatttca

SEQ ID NO: 5187332 - DNA, 25 bp, Homo sapien
attaaactgaagtttagtatcttca

SEQ ID NO: 5187333 - DNA, 25 bp, Homo sapien
actgaagtttagtatcttcaaaggt

SEQ ID NO: 5187334 - DNA, 25 bp, Homo sapien
tgacgtccgtagaggagcatttctc

SEQ ID NO: 5187335 - DNA, 25 bp, Homo sapien
tgcccgtctaaataactcagatctt

SEQ ID NO: 5187336 - DNA, 25 bp, Homo sapien
gccatggtaatctaattgacgtccg

SEQ ID NO: 5187337 - DNA, 25 bp, Homo sapien
ctccggccgtattgtgccatggtaa

SEQ ID NO: 5187338 - DNA, 25 bp, Homo sapien
aatctgcctcatgcggcttccgtgg

SEQ ID NO: 5187339 - DNA, 25 bp, Homo sapien
cccgggctgttggaagcaatctgcc

SEQ ID NO: 5187340 - DNA, 25 bp, Homo sapien
cagctcagggccaccaacttggaaa

SEQ ID NO: 5187341 - DNA, 25 bp, Homo sapien
cagagtctgttgttatgcttggtac

SEQ ID NO: 5187342 - DNA, 25 bp, Homo sapien
ctagacaagtaattaaacatgcacg

SEQ ID NO: 5187343 - DNA, 25 bp, Homo sapien
aactagacaagtaattaaacatgca

SEQ ID NO: 5187344 - DNA, 25 bp, Homo sapien
ttatgttaataaactagacaagtaa

SEQ ID NO: 5187345 - DNA, 25 bp, Homo sapien
agacaagtaattaaacatgcacgta

SEQ ID NO: 5187346 - DNA, 25 bp, Homo sapien
agctgtgctggaagcacttgtggaa

SEQ ID NO: 5187347 - DNA, 25 bp, Homo sapien
cttagaagcaagatatttcactgca

SEQ ID NO: 5187348 - DNA, 25 bp, Homo sapien
tcagcactgatagacccaagaggtg

SEQ ID NO: 5187349 - DNA, 25 bp, Homo sapien
tcggtgaaagcaacggagtgaaatg

SEQ ID NO: 5187350 - DNA, 25 bp, Homo sapien
gaaacttaagtagctcactaggagc

SEQ ID NO: 5187351 - DNA, 25 bp, Homo sapien
tcactaggagcaagggatgtaactg

SEQ ID NO: 5187352 - DNA, 25 bp, Homo sapien
taagtagctcactaggagcaaggga

SEQ ID NO: 5187353 - DNA, 25 bp, Homo sapien
ctgcccagggaaacttaagtagctc

SEQ ID NO: 5187354 - DNA, 25 bp, Homo sapien
ccagctccaccgactcacaccactg

SEQ ID NO: 5187355 - DNA, 25 bp, Homo sapien
agggcctcctcacaaggtgtcccca

SEQ ID NO: 5187356 - DNA, 25 bp, Homo sapien
tccagctccaccgactcacaccact

SEQ ID NO: 5187357 - DNA, 25 bp, Homo sapien
tctccagctccaccgactcacacca

SEQ ID NO: 5187358 - DNA, 25 bp, Homo sapien
tcagaaggtctctgtaggcggccag

SEQ ID NO: 5187359 - DNA, 25 bp, Homo sapien
caagtgtacgtgttgtcagcctggc

SEQ ID NO: 5187360 - DNA, 25 bp, Homo sapien
caaagctgcgatgctgtgcacaaac

SEQ ID NO: 5187361 - DNA, 25 bp, Homo sapien
aaactcgggcaccaggcaagtgtac

SEQ ID NO: 5187362 - DNA, 25 bp, Homo sapien
ataaatgaagaaagcgtatctccat

SEQ ID NO: 5187363 - DNA, 25 bp, Homo sapien
aagcgtatctccataatcaggttta

SEQ ID NO: 5187364 - DNA, 25 bp, Homo sapien
gtcacaatcaacttcaaccaggcag

SEQ ID NO: 5187365 - DNA, 25 bp, Homo sapien
tttaagccatctatcaaaataatgt

SEQ ID NO: 5187366 - DNA, 25 bp, Homo sapien
ctaaggaaagcttgacaaatggcag

SEQ ID NO: 5187367 - DNA, 25 bp, Homo sapien
gacaaatggcagcgcacttatgatt

SEQ ID NO: 5187368 - DNA, 25 bp, Homo sapien
tgacaaatggcagcgcacttatgat

SEQ ID NO: 5187369 - DNA, 25 bp, Homo sapien
caaatggcagcgcacttatgatttc

SEQ ID NO: 5187370 - DNA, 25 bp, Homo sapien
tcaaaggcggactgggtcatgaact

SEQ ID NO: 5187371 - DNA, 25 bp, Homo sapien
gatgtggccagcattaatagcctga

SEQ ID NO: 5187372 - DNA, 25 bp, Homo sapien
cacgttgagaatcggaagtgccctc

SEQ ID NO: 5187373 - DNA, 25 bp, Homo sapien
gaaagatctgctcgtctgtcatggg

SEQ ID NO: 5187374 - DNA, 25 bp, Homo sapien
tcctgacgcgagaacatgaatgcca

SEQ ID NO: 5187375 - DNA, 25 bp, Homo sapien
gctggcggttcaacttgccctcctg

SEQ ID NO: 5187376 - DNA, 25 bp, Homo sapien
ttgccctcctgacgcgagaacatga

SEQ ID NO: 5187377 - DNA, 25 bp, Homo sapien
aagctccatggtctgctggcggttc

SEQ ID NO: 5187378 - DNA, 25 bp, Homo sapien
gaaattcccgtcttcttactgaggc

SEQ ID NO: 5187379 - DNA, 25 bp, Homo sapien
cttcacgttgggagtatagagattc

SEQ ID NO: 5187380 - DNA, 25 bp, Homo sapien
gacagcccctcggtgctgtagccga

SEQ ID NO: 5187381 - DNA, 25 bp, Homo sapien
ggtgctgtagccgatccacagggct

SEQ ID NO: 5187382 - DNA, 25 bp, Homo sapien
cacgttggcccctcccaaaatcagg

SEQ ID NO: 5187383 - DNA, 25 bp, Homo sapien
tctgtcctgtagttcacgttggccc

SEQ ID NO: 5187384 - DNA, 25 bp, Homo sapien
ccctcccaaaatcaggagacggctc

SEQ ID NO: 5187385 - DNA, 25 bp, Homo sapien
ggcattatttaacacttctgtcctg

SEQ ID NO: 5187386 - DNA, 25 bp, Homo sapien
taacagagggcagtcatgccgttct

SEQ ID NO: 5187387 - DNA, 25 bp, Homo sapien
gacaacttcctcgtggccaaggtga

SEQ ID NO: 5187388 - DNA, 25 bp, Homo sapien
tgacgttccgtccaggcaggcacca

SEQ ID NO: 5187389 - DNA, 25 bp, Homo sapien
agcagctgctgcgtaacagagggca

SEQ ID NO: 5187390 - DNA, 25 bp, Homo sapien
tcactcccttcttggtcagcagaca

SEQ ID NO: 5187391 - DNA, 25 bp, Homo sapien
tctcactcccttcttggtcagcaga

SEQ ID NO: 5187392 - DNA, 25 bp, Homo sapien
ctcccttcttggtcagcagacacac

SEQ ID NO: 5187393 - DNA, 25 bp, Homo sapien
actcccttcttggtcagcagacaca

SEQ ID NO: 5187394 - DNA, 25 bp, Homo sapien
gcactgtggacaagcgcacactggc

SEQ ID NO: 5187395 - DNA, 25 bp, Homo sapien
cggcgaccactcacaagtcagcagg

SEQ ID NO: 5187396 - DNA, 25 bp, Homo sapien
gtactggagaatgtcaccgtggccc

SEQ ID NO: 5187397 - DNA, 25 bp, Homo sapien
agaatgtcaccgtggccccgtaggg

SEQ ID NO: 5187398 - DNA, 25 bp, Homo sapien
tgtttctccccacaatgtgtcggtg

SEQ ID NO: 5187399 - DNA, 25 bp, Homo sapien
tttctccccacaatgtgtcggtgcc

SEQ ID NO: 5187400 - DNA, 25 bp, Homo sapien
cacaatgtgtcggtgccattgactt

SEQ ID NO: 5187401 - DNA, 25 bp, Homo sapien
tccccacaatgtgtcggtgccattg

SEQ ID NO: 5187402 - DNA, 25 bp, Homo sapien
gacagaagttcatgcctggctcgcc

SEQ ID NO: 5187403 - DNA, 25 bp, Homo sapien
tgagtaaaccccacgaggctgagtt

SEQ ID NO: 5187404 - DNA, 25 bp, Homo sapien
gtaaccagctcaaatcttcaccagg

SEQ ID NO: 5187405 - DNA, 25 bp, Homo sapien
gagccgcctttgattcgtgtgacga

SEQ ID NO: 5187406 - DNA, 25 bp, Homo sapien
caccatttggcttattaggaaataa

SEQ ID NO: 5187407 - DNA, 25 bp, Homo sapien
tactttctctgcgcctgggagcaca

SEQ ID NO: 5187408 - DNA, 25 bp, Homo sapien
cagaaggtgaagctctgtggctttc

SEQ ID NO: 5187409 - DNA, 25 bp, Homo sapien
cacaaaggggatggaacaaacagct

SEQ ID NO: 5187410 - DNA, 25 bp, Homo sapien
ccaactccgctggaattctgtactt

SEQ ID NO: 5187411 - DNA, 25 bp, Homo sapien
ccatcaactgattggcagattctca

SEQ ID NO: 5187412 - DNA, 25 bp, Homo sapien
gccatcaactgattggcagattctc

SEQ ID NO: 5187413 - DNA, 25 bp, Homo sapien
agccatcaactgattggcagattct

SEQ ID NO: 5187414 - DNA, 25 bp, Homo sapien
tgtggctaagcctgaaaaacagcac

SEQ ID NO: 5187415 - DNA, 25 bp, Homo sapien
agccactgtggctaagcctgaaaaa

SEQ ID NO: 5187416 - DNA, 25 bp, Homo sapien
ggcacaagagaaaggtaccagacag

SEQ ID NO: 5187417 - DNA, 25 bp, Homo sapien
ggcagtagacgatagtggttgtctt

SEQ ID NO: 5187418 - DNA, 25 bp, Homo sapien
caaaacacgggatgtcacattccag

SEQ ID NO: 5187419 - DNA, 25 bp, Homo sapien
cacgggatgtcacattccagagcat

SEQ ID NO: 5187420 - DNA, 25 bp, Homo sapien
tctcagctgaaaccccctgcaagat

SEQ ID NO: 5187421 - DNA, 25 bp, Homo sapien
ctgaaaccccctgcaagatttcagg

SEQ ID NO: 5187422 - DNA, 25 bp, Homo sapien
ttcattcccacatttagggtcggta

SEQ ID NO: 5187423 - DNA, 25 bp, Homo sapien
tcattcccacatttagggtcggtaa

SEQ ID NO: 5187424 - DNA, 25 bp, Homo sapien
tcccacatttagggtcggtaacaga

SEQ ID NO: 5187425 - DNA, 25 bp, Homo sapien
tgggtccctatagcaacgagcaaca

SEQ ID NO: 5187426 - DNA, 25 bp, Homo sapien
tgaggaccaaacgagaacaggatgc

SEQ ID NO: 5187427 - DNA, 25 bp, Homo sapien
gccttggtgagaaccaggactgtga

SEQ ID NO: 5187428 - DNA, 25 bp, Homo sapien
aaggccttcagttctctgtacgatg

SEQ ID NO: 5187429 - DNA, 25 bp, Homo sapien
aagagatgggcaggtagctgtcctc

SEQ ID NO: 5187430 - DNA, 25 bp, Homo sapien
ggcaggtagctgtcctcctaacggg

SEQ ID NO: 5187431 - DNA, 25 bp, Homo sapien
caggtagctgtcctcctaacggggg

SEQ ID NO: 5187432 - DNA, 25 bp, Homo sapien
atgggcaggtagctgtcctcctaac

SEQ ID NO: 5187433 - DNA, 25 bp, Homo sapien
ctggaggaagaatttgtgcgtgaat

SEQ ID NO: 5187434 - DNA, 25 bp, Homo sapien
tgaatttaagctcctgcgccactgg

SEQ ID NO: 5187435 - DNA, 25 bp, Homo sapien
tgcgtgaatttaagctcctgcgcca

SEQ ID NO: 5187436 - DNA, 25 bp, Homo sapien
gaatttgtgcgtgaatttaagctcc

SEQ ID NO: 5187437 - DNA, 25 bp, Homo sapien
ccaccacactgacggcctgagtgag

SEQ ID NO: 5187438 - DNA, 25 bp, Homo sapien
ttctgccatgtggaatagattcact

SEQ ID NO: 5187439 - DNA, 25 bp, Homo sapien
tgcttccaatcagcaacaggcacga

SEQ ID NO: 5187440 - DNA, 25 bp, Homo sapien
tggtggccgtcattcttaaccaaga

SEQ ID NO: 5187441 - DNA, 25 bp, Homo sapien
acaggtgccccaccgaggacttggc

SEQ ID NO: 5187442 - DNA, 25 bp, Homo sapien
gacttggcgagaggatctgagccat

SEQ ID NO: 5187443 - DNA, 25 bp, Homo sapien
catgcttggctattagctgtgttcc

SEQ ID NO: 5187444 - DNA, 25 bp, Homo sapien
tgttcccaaagatccaaaccagcag

SEQ ID NO: 5187445 - DNA, 25 bp, Homo sapien
gacacagatggggctatgcccacac

SEQ ID NO: 5187446 - DNA, 25 bp, Homo sapien
agagagggagatgttatggacacag

SEQ ID NO: 5187447 - DNA, 25 bp, Homo sapien
agagggagatgttatggacacagat

SEQ ID NO: 5187448 - DNA, 25 bp, Homo sapien
atggacacagatggggctatgccca

SEQ ID NO: 5187449 - DNA, 25 bp, Homo sapien
ttttaaccaactccgatagggcatc

SEQ ID NO: 5187450 - DNA, 25 bp, Homo sapien
cgccagcgtcctgtgcatgaagcat

SEQ ID NO: 5187451 - DNA, 25 bp, Homo sapien
ggtgtgctggcgaccttctttcaaa

SEQ ID NO: 5187452 - DNA, 25 bp, Homo sapien
ccagaaattagggaagcgtagccct

SEQ ID NO: 5187453 - DNA, 25 bp, Homo sapien
tcaatgcgctacacaaagggaggcc

SEQ ID NO: 5187454 - DNA, 25 bp, Homo sapien
ctcaagatccagagggagcaggttc

SEQ ID NO: 5187455 - DNA, 25 bp, Homo sapien
tacggtgagcacacatgccaagtgg

SEQ ID NO: 5187456 - DNA, 25 bp, Homo sapien
gggaggcctacgacgcagctaaata

SEQ ID NO: 5187457 - DNA, 25 bp, Homo sapien
cagtctgagttcttagctcctacaa

SEQ ID NO: 5187458 - DNA, 25 bp, Homo sapien
tctgagttcttagctcctacaatgc

SEQ ID NO: 5187459 - DNA, 25 bp, Homo sapien
ctggccagtctgagttcttagctcc

SEQ ID NO: 5187460 - DNA, 25 bp, Homo sapien
agttcttagctcctacaatgctgcc

SEQ ID NO: 5187461 - DNA, 25 bp, Homo sapien
caaaacaaagacgcatgggctccac

SEQ ID NO: 5187462 - DNA, 25 bp, Homo sapien
atcaaaacaaagacgcatgggctcc

SEQ ID NO: 5187463 - DNA, 25 bp, Homo sapien
tgaatcaaaacaaagacgcatgggc

SEQ ID NO: 5187464 - DNA, 25 bp, Homo sapien
gaatcaaaacaaagacgcatgggct

SEQ ID NO: 5187465 - DNA, 25 bp, Homo sapien
cagcgcattaccatgggtgcccaga

SEQ ID NO: 5187466 - DNA, 25 bp, Homo sapien
tgcccggccgctgttactaaattct

SEQ ID NO: 5187467 - DNA, 25 bp, Homo sapien
gaataacttatcactgggcagtctc

SEQ ID NO: 5187468 - DNA, 25 bp, Homo sapien
ttcttagaactacaggaagagccgt

SEQ ID NO: 5187469 - DNA, 25 bp, Homo sapien
taagggttaggtccaggatgaccat

SEQ ID NO: 5187470 - DNA, 25 bp, Homo sapien
agaatgtaagggttaggtccaggat

SEQ ID NO: 5187471 - DNA, 25 bp, Homo sapien
aatgtaagggttaggtccaggatga

SEQ ID NO: 5187472 - DNA, 25 bp, Homo sapien
tgtaagggttaggtccaggatgacc

SEQ ID NO: 5187473 - DNA, 25 bp, Homo sapien
tgtcacagagaggtagccacatctc

SEQ ID NO: 5187474 - DNA, 25 bp, Homo sapien
tgagctctgcgttctatctggggcc

SEQ ID NO: 5187475 - DNA, 25 bp, Homo sapien
atctggggcctcgtcaccggaaagt

SEQ ID NO: 5187476 - DNA, 25 bp, Homo sapien
acatctctcccgtggatcacctgag

SEQ ID NO: 5187477 - DNA, 25 bp, Homo sapien
ggagccacataaacaaaaggcggca

SEQ ID NO: 5187478 - DNA, 25 bp, Homo sapien
tcagtgatgctggtgtctgcacaca

SEQ ID NO: 5187479 - DNA, 25 bp, Homo sapien
tggtgcctacaataatgcccaggga

SEQ ID NO: 5187480 - DNA, 25 bp, Homo sapien
tcagcatggccatggtttaacctcc

SEQ ID NO: 5187481 - DNA, 25 bp, Homo sapien
aatgcccctggcgtgctgcacaaaa

SEQ ID NO: 5187482 - DNA, 25 bp, Homo sapien
gcgtgctgcacaaaacaaaggtgga

SEQ ID NO: 5187483 - DNA, 25 bp, Homo sapien
gtttgtccgcgacacagcagctcca

SEQ ID NO: 5187484 - DNA, 25 bp, Homo sapien
tctcctgtttgtccgcgacacagca

SEQ ID NO: 5187485 - DNA, 25 bp, Homo sapien
cagagagaaatggtaatttggggga

SEQ ID NO: 5187486 - DNA, 25 bp, Homo sapien
ggggaggagggatgccaatcactat

SEQ ID NO: 5187487 - DNA, 25 bp, Homo sapien
tttgggggaggagggatgccaatca

SEQ ID NO: 5187488 - DNA, 25 bp, Homo sapien
tgggggaggagggatgccaatcact

SEQ ID NO: 5187489 - DNA, 25 bp, Homo sapien
ggttcacatcacagccgcgttccaa

SEQ ID NO: 5187490 - DNA, 25 bp, Homo sapien
cgcgttccaacagcagtctaacaat

SEQ ID NO: 5187491 - DNA, 25 bp, Homo sapien
cttgtcacttaggttcacatcacag

SEQ ID NO: 5187492 - DNA, 25 bp, Homo sapien
atcacagccgcgttccaacagcagt

SEQ ID NO: 5187493 - DNA, 25 bp, Homo sapien
ccttcacaagcagccaccatgaggg

SEQ ID NO: 5187494 - DNA, 25 bp, Homo sapien
cacggtgctcaagtgcccttcacaa

SEQ ID NO: 5187495 - DNA, 25 bp, Homo sapien
tgctcaagtgcccttcacaagcagc

SEQ ID NO: 5187496 - DNA, 25 bp, Homo sapien
aaaggaggaattccacggtgctcaa

SEQ ID NO: 5187497 - DNA, 25 bp, Homo sapien
tctctgtgtccgtccaaaagaaacc

SEQ ID NO: 5187498 - DNA, 25 bp, Homo sapien
cactgaatgggtctgctgaagttct

SEQ ID NO: 5187499 - DNA, 25 bp, Homo sapien
gaatggtcatcgctgctgaagagga

SEQ ID NO: 5187500 - DNA, 25 bp, Homo sapien
tgaagaggaataccaggcatgtggc

SEQ ID NO: 5187501 - DNA, 25 bp, Homo sapien
gaaaggaaagcccattcacagaaca

SEQ ID NO: 5187502 - DNA, 25 bp, Homo sapien
agaacatgaacattatgagatgaca

SEQ ID NO: 5187503 - DNA, 25 bp, Homo sapien
atgaacattatgagatgacaaagcc

SEQ ID NO: 5187504 - DNA, 25 bp, Homo sapien
tcacagaacatgaacattatgagat

SEQ ID NO: 5187505 - DNA, 25 bp, Homo sapien
ctttgtctagagaagaaagggctgc

SEQ ID NO: 5187506 - DNA, 25 bp, Homo sapien
ttgtctagagaagaaagggctgcac

SEQ ID NO: 5187507 - DNA, 25 bp, Homo sapien
tttgtctagagaagaaagggctgca

SEQ ID NO: 5187508 - DNA, 25 bp, Homo sapien
tctcggcatcgccatagaaggcagc

SEQ ID NO: 5187509 - DNA, 25 bp, Homo sapien
tgtctgtctggtctattgcagctcc

SEQ ID NO: 5187510 - DNA, 25 bp, Homo sapien
gcccagcttaatgctgacagaccct

SEQ ID NO: 5187511 - DNA, 25 bp, Homo sapien
ggtgtgcggccattcttgtctgtct

SEQ ID NO: 5187512 - DNA, 25 bp, Homo sapien
tgccaggtctgcaagcacctgtctg

SEQ ID NO: 5187513 - DNA, 25 bp, Homo sapien
aaagcacctcagacatgcagggcca

SEQ ID NO: 5187514 - DNA, 25 bp, Homo sapien
tgtccagctagtccttccacaagta

SEQ ID NO: 5187515 - DNA, 25 bp, Homo sapien
ggaacaattctggagcccttatgca

SEQ ID NO: 5187516 - DNA, 25 bp, Homo sapien
caatgaagtaggcagcagacttctt

SEQ ID NO: 5187517 - DNA, 25 bp, Homo sapien
cagagacgggacatagtcacctttg

SEQ ID NO: 5187518 - DNA, 25 bp, Homo sapien
cacctttgcatctccaatgaagtag

SEQ ID NO: 5187519 - DNA, 25 bp, Homo sapien
gacgggacatagtcacctttgcatc

SEQ ID NO: 5187520 - DNA, 25 bp, Homo sapien
cagagacagcagaagcctaagcagc

SEQ ID NO: 5187521 - DNA, 25 bp, Homo sapien
gcagagacagcagaagcctaagcag

SEQ ID NO: 5187522 - DNA, 25 bp, Homo sapien
gagacagcagaagcctaagcagcag

SEQ ID NO: 5187523 - DNA, 25 bp, Homo sapien
agagacagcagaagcctaagcagca

SEQ ID NO: 5187524 - DNA, 25 bp, Homo sapien
acatgctcgatcacggctcccttct

SEQ ID NO: 5187525 - DNA, 25 bp, Homo sapien
tgagtagcgccaccactacagatgt

SEQ ID NO: 5187526 - DNA, 25 bp, Homo sapien
gttccggcagccgatggctctgtcc

SEQ ID NO: 5187527 - DNA, 25 bp, Homo sapien
ggctctgtccaagggccgcatcccg

SEQ ID NO: 5187528 - DNA, 25 bp, Homo sapien
ctcaatggaggcagtgctcactgac

SEQ ID NO: 5187529 - DNA, 25 bp, Homo sapien
gctcaatggaggcagtgctcactga

SEQ ID NO: 5187530 - DNA, 25 bp, Homo sapien
acagctgactggtggctctagaaca

SEQ ID NO: 5187531 - DNA, 25 bp, Homo sapien
gctgtctaggcttctacaatcggga

SEQ ID NO: 5187532 - DNA, 25 bp, Homo sapien
taatgagaaacgaaggcatccgagc

SEQ ID NO: 5187533 - DNA, 25 bp, Homo sapien
gaagccatttagctgctcggtgcct

SEQ ID NO: 5187534 - DNA, 25 bp, Homo sapien
gcaaggaccacagcacgatgaggga

SEQ ID NO: 5187535 - DNA, 25 bp, Homo sapien
acgccggcgaggctgttgctaatcc

SEQ ID NO: 5187536 - DNA, 25 bp, Homo sapien
ttgctaatcctttcccactgacctg

SEQ ID NO: 5187537 - DNA, 25 bp, Homo sapien
tgacctgggcactcaaatctgtcct

SEQ ID NO: 5187538 - DNA, 25 bp, Homo sapien
cgcattcagaggcacttcagaggcc

SEQ ID NO: 5187539 - DNA, 25 bp, Homo sapien
agaggccctgcggaaaggatcccaa

SEQ ID NO: 5187540 - DNA, 25 bp, Homo sapien
gaaaggatcccaattcctccgtggc

SEQ ID NO: 5187541 - DNA, 25 bp, Homo sapien
tgcaaaacaaacacgcattcagagg

SEQ ID NO: 5187542 - DNA, 25 bp, Homo sapien
aggtttggaagtggccatcgcccaa

SEQ ID NO: 5187543 - DNA, 25 bp, Homo sapien
agtataatcaagatatcaggtttgg

SEQ ID NO: 5187544 - DNA, 25 bp, Homo sapien
agtggccatcgcccaagcagcattt

SEQ ID NO: 5187545 - DNA, 25 bp, Homo sapien
caagatatcaggtttggaagtggcc

SEQ ID NO: 5187546 - DNA, 25 bp, Homo sapien
tatagcttggatactaagtctggcc

SEQ ID NO: 5187547 - DNA, 25 bp, Homo sapien
tagataaacctagagagcttgctgc

SEQ ID NO: 5187548 - DNA, 25 bp, Homo sapien
ttaagccaacaacgggcatgaggcc

SEQ ID NO: 5187549 - DNA, 25 bp, Homo sapien
cactaactgggctggcacatgaggg

SEQ ID NO: 5187550 - DNA, 25 bp, Homo sapien
tagagggaaacccttaattcattga

SEQ ID NO: 5187551 - DNA, 25 bp, Homo sapien
tcgaggaaactttcttaaggcatac

SEQ ID NO: 5187552 - DNA, 25 bp, Homo sapien
gcatcgcgacaaattgagatagagg

SEQ ID NO: 5187553 - DNA, 25 bp, Homo sapien
taaggcatactggtacctctgggct

SEQ ID NO: 5187554 - DNA, 25 bp, Homo sapien
acatcatgcgaggagcgtagcagcc

SEQ ID NO: 5187555 - DNA, 25 bp, Homo sapien
caaacgatagtcacggataggagct

SEQ ID NO: 5187556 - DNA, 25 bp, Homo sapien
gataggagctgtttcccacatgcca

SEQ ID NO: 5187557 - DNA, 25 bp, Homo sapien
caagcaaattggacaggagggccca

SEQ ID NO: 5187558 - DNA, 25 bp, Homo sapien
tgggttggactctcctgaatccggg

SEQ ID NO: 5187559 - DNA, 25 bp, Homo sapien
gcttgggttggactctcctgaatcc

SEQ ID NO: 5187560 - DNA, 25 bp, Homo sapien
taggcttgggttggactctcctgaa

SEQ ID NO: 5187561 - DNA, 25 bp, Homo sapien
cacaataggcttgggttggactctc

SEQ ID NO: 5187562 - DNA, 25 bp, Homo sapien
tacaaattagttactggcagaccct

SEQ ID NO: 5187563 - DNA, 25 bp, Homo sapien
tggtagtaacagtgccccaagaagg

SEQ ID NO: 5187564 - DNA, 25 bp, Homo sapien
tgttctaaagggtagcagcgctctg

SEQ ID NO: 5187565 - DNA, 25 bp, Homo sapien
gacacacgattgtgggaagcccgtc

SEQ ID NO: 5187566 - DNA, 25 bp, Homo sapien
acaagaaatacaggagtcagaagca

SEQ ID NO: 5187567 - DNA, 25 bp, Homo sapien
caagaaatacaggagtcagaagcag

SEQ ID NO: 5187568 - DNA, 25 bp, Homo sapien
cataaaaggcttcataggacttggg

SEQ ID NO: 5187569 - DNA, 25 bp, Homo sapien
aggacttgggcttcaattcgagagc

SEQ ID NO: 5187570 - DNA, 25 bp, Homo sapien
ctcttgctctggcataaaaggcttc

SEQ ID NO: 5187571 - DNA, 25 bp, Homo sapien
cttcaattcgagagccttggaagca

SEQ ID NO: 5187572 - DNA, 25 bp, Homo sapien
caggctctctcagggacttgccgat

SEQ ID NO: 5187573 - DNA, 25 bp, Homo sapien
gcgataccggccttcctttggactg

SEQ ID NO: 5187574 - DNA, 25 bp, Homo sapien
gttttcacgatctgggcctgcttgg

SEQ ID NO: 5187575 - DNA, 25 bp, Homo sapien
cactgcaggcggacattctggctgg

SEQ ID NO: 5187576 - DNA, 25 bp, Homo sapien
tgctgctcgaagtcaaactactggt

SEQ ID NO: 5187577 - DNA, 25 bp, Homo sapien
cattgtggacacttgcactcagggt

SEQ ID NO: 5187578 - DNA, 25 bp, Homo sapien
tccatgatgcccatgaacggcgtgt

SEQ ID NO: 5187579 - DNA, 25 bp, Homo sapien
cagctgtaccgctctgaacgtgggt

SEQ ID NO: 5187580 - DNA, 25 bp, Homo sapien
cacacgtttccaaattccacaaatg

SEQ ID NO: 5187581 - DNA, 25 bp, Homo sapien
caaattccacaaatggggatttctt

SEQ ID NO: 5187582 - DNA, 25 bp, Homo sapien
cacgtttccaaattccacaaatggg

SEQ ID NO: 5187583 - DNA, 25 bp, Homo sapien
tccaaattccacaaatggggatttc

SEQ ID NO: 5187584 - DNA, 25 bp, Homo sapien
gattctaccatatagcaaaggcaag

SEQ ID NO: 5187585 - DNA, 25 bp, Homo sapien
tacagagaacatgcaaatcgtgact

SEQ ID NO: 5187586 - DNA, 25 bp, Homo sapien
gaaggattgttccaggagcactacc

SEQ ID NO: 5187587 - DNA, 25 bp, Homo sapien
cattcagtgcaataaccagcatgga

SEQ ID NO: 5187588 - DNA, 25 bp, Homo sapien
tagtagttacagcaaaactcatgga

SEQ ID NO: 5187589 - DNA, 25 bp, Homo sapien
caaagtacaattgtacacacaggaa

SEQ ID NO: 5187590 - DNA, 25 bp, Homo sapien
aactcatggaaagcctataaaaatg

SEQ ID NO: 5187591 - DNA, 25 bp, Homo sapien
aaaagtacagtagttgtgcagaaac

SEQ ID NO: 5187592 - DNA, 25 bp, Homo sapien
gcagctgtcacccttattctgaaat

SEQ ID NO: 5187593 - DNA, 25 bp, Homo sapien
catcaggctgttctctacttatcca

SEQ ID NO: 5187594 - DNA, 25 bp, Homo sapien
cattgactcatttagtgcaaaacac

SEQ ID NO: 5187595 - DNA, 25 bp, Homo sapien
gcttttcactattccctctagggta

SEQ ID NO: 5187596 - DNA, 25 bp, Homo sapien
ttagttcagggcaatgtggagcagc

SEQ ID NO: 5187597 - DNA, 25 bp, Homo sapien
cagtagtaaagatgtcccgttgcca

SEQ ID NO: 5187598 - DNA, 25 bp, Homo sapien
taaggatgtatcacctcttcctggc

SEQ ID NO: 5187599 - DNA, 25 bp, Homo sapien
tagcaagagcagtgaccaaataacc

SEQ ID NO: 5187600 - DNA, 25 bp, Homo sapien
ggtacttacaccaaataggactctg

SEQ ID NO: 5187601 - DNA, 25 bp, Homo sapien
tataacgtgacaaactctagcctcc

SEQ ID NO: 5187602 - DNA, 25 bp, Homo sapien
aaagaaacgtacaagtcccatgaca

SEQ ID NO: 5187603 - DNA, 25 bp, Homo sapien
ccatcaatagatggctggagacaca

SEQ ID NO: 5187604 - DNA, 25 bp, Homo sapien
tcttagcgtaatccctgtagactta

SEQ ID NO: 5187605 - DNA, 25 bp, Homo sapien
ccaaattataactggacccatgatc

SEQ ID NO: 5187606 - DNA, 25 bp, Homo sapien
tataggtgttcctatgggaaacata

SEQ ID NO: 5187607 - DNA, 25 bp, Homo sapien
tatctattggactaattgcctcaga

SEQ ID NO: 5187608 - DNA, 25 bp, Homo sapien
tagacattgttaccttcacctgcac

SEQ ID NO: 5187609 - DNA, 25 bp, Homo sapien
ttgaatcagtggatgcagacccctt

SEQ ID NO: 5187610 - DNA, 25 bp, Homo sapien
tcatctctagcttacttatgcccaa

SEQ ID NO: 5187611 - DNA, 25 bp, Homo sapien
cagaccccttagatatgtagggctg

SEQ ID NO: 5187612 - DNA, 25 bp, Homo sapien
catgaacatggtatcactttgcatt

SEQ ID NO: 5187613 - DNA, 25 bp, Homo sapien
tccttgcccggattttcactgggat

SEQ ID NO: 5187614 - DNA, 25 bp, Homo sapien
gagttgaactgctctaatccatgaa

SEQ ID NO: 5187615 - DNA, 25 bp, Homo sapien
cacatagatcttagaaacactttct

SEQ ID NO: 5187616 - DNA, 25 bp, Homo sapien
agttcatgcggtaaaacagtatgtc

SEQ ID NO: 5187617 - DNA, 25 bp, Homo sapien
gataaaatctctatttgtggctggc

SEQ ID NO: 5187618 - DNA, 25 bp, Homo sapien
tacaagaatcagcaaatatatccag

SEQ ID NO: 5187619 - DNA, 25 bp, Homo sapien
tagagtatattagtgtctggcaacc

SEQ ID NO: 5187620 - DNA, 25 bp, Homo sapien
acaaaactgtaggaatggagtatca

SEQ ID NO: 5187621 - DNA, 25 bp, Homo sapien
taaccagggacaccaaacagttgga

SEQ ID NO: 5187622 - DNA, 25 bp, Homo sapien
gctgaggttttagagcaccacaaaa

SEQ ID NO: 5187623 - DNA, 25 bp, Homo sapien
tcttgtattcttgagtgagcagagc

SEQ ID NO: 5187624 - DNA, 25 bp, Homo sapien
cagaatgcggttataggtcagaata

SEQ ID NO: 5187625 - DNA, 25 bp, Homo sapien
tgcaaagcctagctataggagacta

SEQ ID NO: 5187626 - DNA, 25 bp, Homo sapien
aaacccctgagaacctaggatggtg

SEQ ID NO: 5187627 - DNA, 25 bp, Homo sapien
tttaggagaacttctgaaacttcta

SEQ ID NO: 5187628 - DNA, 25 bp, Homo sapien
catgggaacagctcatgacacaagt

SEQ ID NO: 5187629 - DNA, 25 bp, Homo sapien
caaaattgttgaaaccatccagcaa

SEQ ID NO: 5187630 - DNA, 25 bp, Homo sapien
tgttatctctgagtgggtgatctct

SEQ ID NO: 5187631 - DNA, 25 bp, Homo sapien
ttaatccagcattatctacactaag

SEQ ID NO: 5187632 - DNA, 25 bp, Homo sapien
tcaattcatggcacactctttacat

SEQ ID NO: 5187633 - DNA, 25 bp, Homo sapien
tggcctcattacaactctacaaaaa

SEQ ID NO: 5187634 - DNA, 25 bp, Homo sapien
gaatcttatctgctgggaatcttgc

SEQ ID NO: 5187635 - DNA, 25 bp, Homo sapien
gatctcttagacttgctttggcctc

SEQ ID NO: 5187636 - DNA, 25 bp, Homo sapien
tatgattaaaccacatccagaatct

SEQ ID NO: 5187637 - DNA, 25 bp, Homo sapien
gtttacactgatgtgctataaaagc

SEQ ID NO: 5187638 - DNA, 25 bp, Homo sapien
caacaccagagctctaatgtgggaa

SEQ ID NO: 5187639 - DNA, 25 bp, Homo sapien
gctgcatcacttgtgtagttaaatt

SEQ ID NO: 5187640 - DNA, 25 bp, Homo sapien
acttgaaactggaggtgcaggttgc

SEQ ID NO: 5187641 - DNA, 25 bp, Homo sapien
atcacttgaaactggaggtgcaggt

SEQ ID NO: 5187642 - DNA, 25 bp, Homo sapien
gcaggttgcagtgagttacctcgcc

SEQ ID NO: 5187643 - DNA, 25 bp, Homo sapien
caggttgcagtgagttacctcgcca

SEQ ID NO: 5187644 - DNA, 25 bp, Homo sapien
tataatgatcagcatccctcacata

SEQ ID NO: 5187645 - DNA, 25 bp, Homo sapien
caaacactgttacctagatatggac

SEQ ID NO: 5187646 - DNA, 25 bp, Homo sapien
gatgaaataacagccgtccaaaggt

SEQ ID NO: 5187647 - DNA, 25 bp, Homo sapien
gatttactagattgaccaaatgaca

SEQ ID NO: 5187648 - DNA, 25 bp, Homo sapien
ggttgacatgaacagtagatccttt

SEQ ID NO: 5187649 - DNA, 25 bp, Homo sapien
cagtagatcctttagtctgtcttct

SEQ ID NO: 5187650 - DNA, 25 bp, Homo sapien
tgtggttgacatgaacagtagatcc

SEQ ID NO: 5187651 - DNA, 25 bp, Homo sapien
acagtagatcctttagtctgtcttc

SEQ ID NO: 5187652 - DNA, 25 bp, Homo sapien
tgactaagctttgaggcacgtagcc

SEQ ID NO: 5187653 - DNA, 25 bp, Homo sapien
cgtaatcgtaagtgtggacatgacc

SEQ ID NO: 5187654 - DNA, 25 bp, Homo sapien
aagctcgcagtgctgcacaggtagc

SEQ ID NO: 5187655 - DNA, 25 bp, Homo sapien
gaagggcattatcagaagctcgcag

SEQ ID NO: 5187656 - DNA, 25 bp, Homo sapien
gttgaatacctggattcattctgta

SEQ ID NO: 5187657 - DNA, 25 bp, Homo sapien
tgcctctaatgacaggatatttcgt

SEQ ID NO: 5187658 - DNA, 25 bp, Homo sapien
tgccgcagtaaacatcgggatgcag

SEQ ID NO: 5187659 - DNA, 25 bp, Homo sapien
acccggccagatgtcttttcaatac

SEQ ID NO: 5187660 - DNA, 25 bp, Homo sapien
ttccaaagtacatgccgtgatgccc

SEQ ID NO: 5187661 - DNA, 25 bp, Homo sapien
ctggctagaatctgctaaggtacta

SEQ ID NO: 5187662 - DNA, 25 bp, Homo sapien
gaaaccttaatctccatgtaatttg

SEQ ID NO: 5187663 - DNA, 25 bp, Homo sapien
tctgctaaggtactaaaggtttaga

SEQ ID NO: 5187664 - DNA, 25 bp, Homo sapien
ggtgcacgttgtcttatcagaacag

SEQ ID NO: 5187665 - DNA, 25 bp, Homo sapien
gacacttcacttactcatgccgata

SEQ ID NO: 5187666 - DNA, 25 bp, Homo sapien
caacagcaacgcaaagcaatgtgga

SEQ ID NO: 5187667 - DNA, 25 bp, Homo sapien
tgggcagcgttcagtcaacagcaac

SEQ ID NO: 5187668 - DNA, 25 bp, Homo sapien
cagctaatttggaggctgagttggg

SEQ ID NO: 5187669 - DNA, 25 bp, Homo sapien
gaatcacttgagcttggtaggtcga

SEQ ID NO: 5187670 - DNA, 25 bp, Homo sapien
ggagaatcacttgagcttggtaggt

SEQ ID NO: 5187671 - DNA, 25 bp, Homo sapien
cacttgagcttggtaggtcgaggtt

SEQ ID NO: 5187672 - DNA, 25 bp, Homo sapien
tcatacaagaaggtaatctagtccc

SEQ ID NO: 5187673 - DNA, 25 bp, Homo sapien
aaaggactggttggataaattatga

SEQ ID NO: 5187674 - DNA, 25 bp, Homo sapien
gatatgagggctatgtcaaacatta

SEQ ID NO: 5187675 - DNA, 25 bp, Homo sapien
taacaaaattgtgcagctgatcaca

SEQ ID NO: 5187676 - DNA, 25 bp, Homo sapien
gtacaagacttgcttgtgaggctcc

SEQ ID NO: 5187677 - DNA, 25 bp, Homo sapien
agcatgggtgaagtacaagacttgc

SEQ ID NO: 5187678 - DNA, 25 bp, Homo sapien
tgagtgttcttcaagagggattgct

SEQ ID NO: 5187679 - DNA, 25 bp, Homo sapien
taaatataggggacagcatgggtga

SEQ ID NO: 5187680 - DNA, 25 bp, Homo sapien
catggtggtgcagttcttacgaaac

SEQ ID NO: 5187681 - DNA, 25 bp, Homo sapien
ccccagagaatttagcatcccaaag

SEQ ID NO: 5187682 - DNA, 25 bp, Homo sapien
caaaggaagctactggtacaataca

SEQ ID NO: 5187683 - DNA, 25 bp, Homo sapien
tcagcctttgccagagttgcctcgt

SEQ ID NO: 5187684 - DNA, 25 bp, Homo sapien
tgttgttgcttcatcgtcattaatc

SEQ ID NO: 5187685 - DNA, 25 bp, Homo sapien
gtgtacatgcccgtcttggctttgt

SEQ ID NO: 5187686 - DNA, 25 bp, Homo sapien
ttaatcatccaagcagtaacttcaa

SEQ ID NO: 5187687 - DNA, 25 bp, Homo sapien
caaaggggctatgctgtcttctcca

SEQ ID NO: 5187688 - DNA, 25 bp, Homo sapien
cagaaacctggtatagctctccctc

SEQ ID NO: 5187689 - DNA, 25 bp, Homo sapien
aacgttatctttaggcatactaggc

SEQ ID NO: 5187690 - DNA, 25 bp, Homo sapien
tcatatttgcccactagggcctggg

SEQ ID NO: 5187691 - DNA, 25 bp, Homo sapien
gagtgagtccgctacagttcttcca

SEQ ID NO: 5187692 - DNA, 25 bp, Homo sapien
gtgctgttgcatgactttgagacct

SEQ ID NO: 5187693 - DNA, 25 bp, Homo sapien
cattatttgcaagttgtagtggtgc

SEQ ID NO: 5187694 - DNA, 25 bp, Homo sapien
ctgacattatttgcaagttgtagtg

SEQ ID NO: 5187695 - DNA, 25 bp, Homo sapien
gtagtggtgctgttgcatgactttg

SEQ ID NO: 5187696 - DNA, 25 bp, Homo sapien
gaagtatattgctcgaatgttcaaa

SEQ ID NO: 5187697 - DNA, 25 bp, Homo sapien
aatatcctggtagactttgtataag

SEQ ID NO: 5187698 - DNA, 25 bp, Homo sapien
taaattaatgtatcagtcaatgaag

SEQ ID NO: 5187699 - DNA, 25 bp, Homo sapien
taatgctttcaggattacttaaaag

SEQ ID NO: 5187700 - DNA, 25 bp, Homo sapien
gcacttgaacacgtttgctttcatc

SEQ ID NO: 5187701 - DNA, 25 bp, Homo sapien
agcacctaaagaggctgtactacag

SEQ ID NO: 5187702 - DNA, 25 bp, Homo sapien
catttattgcatcgcagaactgtaa

SEQ ID NO: 5187703 - DNA, 25 bp, Homo sapien
caagcacttctgatactgcagtggt

SEQ ID NO: 5187704 - DNA, 25 bp, Homo sapien
catgcacccgcaggagaatttaatg

SEQ ID NO: 5187705 - DNA, 25 bp, Homo sapien
taatgacagtctcctcagggaaagg

SEQ ID NO: 5187706 - DNA, 25 bp, Homo sapien
gctaaaaactatcgatgggcaacag

SEQ ID NO: 5187707 - DNA, 25 bp, Homo sapien
tgtgaaagaccattattccaacggc

SEQ ID NO: 5187708 - DNA, 25 bp, Homo sapien
ttgtgctttagaggggatgatagta

SEQ ID NO: 5187709 - DNA, 25 bp, Homo sapien
ttaactatcaagttgatggccagga

SEQ ID NO: 5187710 - DNA, 25 bp, Homo sapien
caagttgatggccaggatttcttgt

SEQ ID NO: 5187711 - DNA, 25 bp, Homo sapien
cttttaactatcaagttgatggcca

SEQ ID NO: 5187712 - DNA, 25 bp, Homo sapien
ttcttgacggtatatggcaacacta

SEQ ID NO: 5187713 - DNA, 25 bp, Homo sapien
cttgcttttcttgacggtatatggc

SEQ ID NO: 5187714 - DNA, 25 bp, Homo sapien
gacggtatatggcaacactaaagta

SEQ ID NO: 5187715 - DNA, 25 bp, Homo sapien
ggtatatggcaacactaaagtatca

SEQ ID NO: 5187716 - DNA, 25 bp, Homo sapien
gctaagggtttgggatatctgactt

SEQ ID NO: 5187717 - DNA, 25 bp, Homo sapien
gtcaggggtgtcattcatggtgtca

SEQ ID NO: 5187718 - DNA, 25 bp, Homo sapien
taatttatgggtatccttgtcaggg

SEQ ID NO: 5187719 - DNA, 25 bp, Homo sapien
tctccaaattgtcagcagtcaacag

SEQ ID NO: 5187720 - DNA, 25 bp, Homo sapien
gacaaggatttcctcaacatcagga

SEQ ID NO: 5187721 - DNA, 25 bp, Homo sapien
caggaagtcctatctgctgaattag

SEQ ID NO: 5187722 - DNA, 25 bp, Homo sapien
aagaggaagcctgagtcaagcacag

SEQ ID NO: 5187723 - DNA, 25 bp, Homo sapien
cataatgagtcatggaccttcctac

SEQ ID NO: 5187724 - DNA, 25 bp, Homo sapien
ttatagtaaacttgccagccagccc

SEQ ID NO: 5187725 - DNA, 25 bp, Homo sapien
cacctttccatatgcctactctagt

SEQ ID NO: 5187726 - DNA, 25 bp, Homo sapien
ccagcccttgtaagagatttttggg

SEQ ID NO: 5187727 - DNA, 25 bp, Homo sapien
gtcacatgtccttgtagaaattttt

SEQ ID NO: 5187728 - DNA, 25 bp, Homo sapien
gcaaagctaggacacaatagtaggt

SEQ ID NO: 5187729 - DNA, 25 bp, Homo sapien
gataaaagacatatgctgacccttg

SEQ ID NO: 5187730 - DNA, 25 bp, Homo sapien
gacagccatgttttgtgagtaactg

SEQ ID NO: 5187731 - DNA, 25 bp, Homo sapien
tatttgaccctctccgacagtatct

SEQ ID NO: 5187732 - DNA, 25 bp, Homo sapien
tagcactggctaaagattcagacag

SEQ ID NO: 5187733 - DNA, 25 bp, Homo sapien
cctggtagctgcagaccattttcta

SEQ ID NO: 5187734 - DNA, 25 bp, Homo sapien
gacaattgcagaagtgacctggtag

SEQ ID NO: 5187735 - DNA, 25 bp, Homo sapien
gccacacagatatgtttagcactgg

SEQ ID NO: 5187736 - DNA, 25 bp, Homo sapien
tatgtgtggttcaacacaatccctc

SEQ ID NO: 5187737 - DNA, 25 bp, Homo sapien
atgattcattctgtctagcacaggg

SEQ ID NO: 5187738 - DNA, 25 bp, Homo sapien
aataggcatatagacttgaaagaac

SEQ ID NO: 5187739 - DNA, 25 bp, Homo sapien
gagacacgtggtctagactttgaag

SEQ ID NO: 5187740 - DNA, 25 bp, Homo sapien
tccttaaaggaatgggtgcacatcc

SEQ ID NO: 5187741 - DNA, 25 bp, Homo sapien
tgtgtgcaactttcaggatgtatcc

SEQ ID NO: 5187742 - DNA, 25 bp, Homo sapien
gattgatagttgtccctaatactgg

SEQ ID NO: 5187743 - DNA, 25 bp, Homo sapien
tgtcaggtacctaccacagagaaga

SEQ ID NO: 5187744 - DNA, 25 bp, Homo sapien
tcttggcccactgccaggttcacct

SEQ ID NO: 5187745 - DNA, 25 bp, Homo sapien
ttggttactgtagccatgctgtttt

SEQ ID NO: 5187746 - DNA, 25 bp, Homo sapien
ggttactgtagccatgctgttttgg

SEQ ID NO: 5187747 - DNA, 25 bp, Homo sapien
ggtctctatgtctgttttggttact

SEQ ID NO: 5187748 - DNA, 25 bp, Homo sapien
ttggtctctatgtctgttttggtta

SEQ ID NO: 5187749 - DNA, 25 bp, Homo sapien
gaagtatgtccagatgtaaaaagtg

SEQ ID NO: 5187750 - DNA, 25 bp, Homo sapien
gacaggcaggcttaaagttcaggta

SEQ ID NO: 5187751 - DNA, 25 bp, Homo sapien
caattaagaaagttgcgtcgagcgt

SEQ ID NO: 5187752 - DNA, 25 bp, Homo sapien
tgcaggaagtgctagcaaataacat

SEQ ID NO: 5187753 - DNA, 25 bp, Homo sapien
aatgaatgagataactcttcacctg

SEQ ID NO: 5187754 - DNA, 25 bp, Homo sapien
cagaagtagactggggaactggcaa

SEQ ID NO: 5187755 - DNA, 25 bp, Homo sapien
gaaacccagcaactgaaatgaatga

SEQ ID NO: 5187756 - DNA, 25 bp, Homo sapien
gataactcttcacctgtagttacca

SEQ ID NO: 5187757 - DNA, 25 bp, Homo sapien
caactctaatgaaaggttgagaaaa

SEQ ID NO: 5187758 - DNA, 25 bp, Homo sapien
aaagtagctcgattattttctgctc

SEQ ID NO: 5187759 - DNA, 25 bp, Homo sapien
caaaaaagtagctcgattattttct

SEQ ID NO: 5187760 - DNA, 25 bp, Homo sapien
gaggccaaaaaagtagctcgattat

SEQ ID NO: 5187761 - DNA, 25 bp, Homo sapien
taggtggtattggtaagttaggcca

SEQ ID NO: 5187762 - DNA, 25 bp, Homo sapien
ggtaagttaggccagctataatagt

SEQ ID NO: 5187763 - DNA, 25 bp, Homo sapien
tggtattggtaagttaggccagcta

SEQ ID NO: 5187764 - DNA, 25 bp, Homo sapien
gttaggccagctataatagtttcct

SEQ ID NO: 5187765 - DNA, 25 bp, Homo sapien
gtgttgctttttcttatgggagtgc

SEQ ID NO: 5187766 - DNA, 25 bp, Homo sapien
tgccaaacatcctgatgtgttgctt

SEQ ID NO: 5187767 - DNA, 25 bp, Homo sapien
caacttgacagctggttgatttcat

SEQ ID NO: 5187768 - DNA, 25 bp, Homo sapien
gagtgcataactgttccttctgatg

SEQ ID NO: 5187769 - DNA, 25 bp, Homo sapien
tacagtaaggtctgtgccttggtct

SEQ ID NO: 5187770 - DNA, 25 bp, Homo sapien
tgggaaggtctatgtcagcacgcag

SEQ ID NO: 5187771 - DNA, 25 bp, Homo sapien
cagcacgcagaaggtttgaggagca

SEQ ID NO: 5187772 - DNA, 25 bp, Homo sapien
gaggagcattgcttctcatacagta

SEQ ID NO: 5187773 - DNA, 25 bp, Homo sapien
acctctgtcagcgttgcgatggccg

SEQ ID NO: 5187774 - DNA, 25 bp, Homo sapien
taaaaaacaacctctgtcagcgttg

SEQ ID NO: 5187775 - DNA, 25 bp, Homo sapien
ttgcgatggccgttcctaccccgga

SEQ ID NO: 5187776 - DNA, 25 bp, Homo sapien
tcctaccccggaatatccgctgctc

SEQ ID NO: 5187777 - DNA, 25 bp, Homo sapien
gccgccgcgagtccgccgcctttgt

SEQ ID NO: 5187778 - DNA, 25 bp, Homo sapien
gagtagggccgtgggttgtgctccc

SEQ ID NO: 5187779 - DNA, 25 bp, Homo sapien
tcaggtcgccgccaacagttttgct

SEQ ID NO: 5187780 - DNA, 25 bp, Homo sapien
ttattcctagaagccggtgcgggac

SEQ ID NO: 5187781 - DNA, 25 bp, Homo sapien
ttatcctcgccggtcggtgcggctc

SEQ ID NO: 5187782 - DNA, 25 bp, Homo sapien
cctcgccggtcggtgcggctctttg

SEQ ID NO: 5187783 - DNA, 25 bp, Homo sapien
gtcggtgcggctctttgttgtggtg

SEQ ID NO: 5187784 - DNA, 25 bp, Homo sapien
tcgccggtcggtgcggctctttgtt

SEQ ID NO: 5187785 - DNA, 25 bp, Homo sapien
gagtcgaaggctttcccgatcacaa

SEQ ID NO: 5187786 - DNA, 25 bp, Homo sapien
cagcggagaaactgcgctcgggcaa

SEQ ID NO: 5187787 - DNA, 25 bp, Homo sapien
ttacaaagccggtggaaacagcagc

SEQ ID NO: 5187788 - DNA, 25 bp, Homo sapien
catctaccgcaactctcagttcgag

SEQ ID NO: 5187789 - DNA, 25 bp, Homo sapien
tgaagccttcgcctagaagtgaagc

SEQ ID NO: 5187790 - DNA, 25 bp, Homo sapien
gagagaagccttgttggttgacgtc

SEQ ID NO: 5187791 - DNA, 25 bp, Homo sapien
gctgaacaaaccttgagaagaatca

SEQ ID NO: 5187792 - DNA, 25 bp, Homo sapien
tggttgacgtcacttggttcatgaa

SEQ ID NO: 5187793 - DNA, 25 bp, Homo sapien
cccgggaccgtcttgcatactgctt

SEQ ID NO: 5187794 - DNA, 25 bp, Homo sapien
gagatggttgacctatgctccctac

SEQ ID NO: 5187795 - DNA, 25 bp, Homo sapien
gaacggtgcaaactcaaagctacag

SEQ ID NO: 5187796 - DNA, 25 bp, Homo sapien
taacttgtccgtggaaaggcagtag

SEQ ID NO: 5187797 - DNA, 25 bp, Homo sapien
aataaagtgttatcaagattaaggc

SEQ ID NO: 5187798 - DNA, 25 bp, Homo sapien
taatttttacttactcttcatcctg

SEQ ID NO: 5187799 - DNA, 25 bp, Homo sapien
tattctccgatagcttaatttttac

SEQ ID NO: 5187800 - DNA, 25 bp, Homo sapien
gggaatggggcctattgtatcttta

SEQ ID NO: 5187801 - DNA, 25 bp, Homo sapien
gcagctttgtgaaatctccccatgt

SEQ ID NO: 5187802 - DNA, 25 bp, Homo sapien
gcaaaaagaccgagtctgccaagct

SEQ ID NO: 5187803 - DNA, 25 bp, Homo sapien
tactaatgaagatcctccagcacaa

SEQ ID NO: 5187804 - DNA, 25 bp, Homo sapien
tgaccgaggtaaggctgacattctc

SEQ ID NO: 5187805 - DNA, 25 bp, Homo sapien
tccctattagacaggcagtatttct

SEQ ID NO: 5187806 - DNA, 25 bp, Homo sapien
tttactctgtaatgagcagccttct

SEQ ID NO: 5187807 - DNA, 25 bp, Homo sapien
ccccagtgctcctgcattgcaatca

SEQ ID NO: 5187808 - DNA, 25 bp, Homo sapien
gacatcatcttcactaatttttagc

SEQ ID NO: 5187809 - DNA, 25 bp, Homo sapien
tactgagtgtggtgtagtgaaatga

SEQ ID NO: 5187810 - DNA, 25 bp, Homo sapien
aaaatctgtattccgggaatgtggc

SEQ ID NO: 5187811 - DNA, 25 bp, Homo sapien
aaaaatcaataagtgctagcacagc

SEQ ID NO: 5187812 - DNA, 25 bp, Homo sapien
tgctagcacagctttgctgctcaat

SEQ ID NO: 5187813 - DNA, 25 bp, Homo sapien
gggaaaccagtgtggcatctgcaat

SEQ ID NO: 5187814 - DNA, 25 bp, Homo sapien
caagcgaggtatattttgggagaat

SEQ ID NO: 5187815 - DNA, 25 bp, Homo sapien
tgctaatgattaggtaaagtgtcag

SEQ ID NO: 5187816 - DNA, 25 bp, Homo sapien
aattattcgagttacagtgtgccac

SEQ ID NO: 5187817 - DNA, 25 bp, Homo sapien
aagccctcagctttcgtctgtctgg

SEQ ID NO: 5187818 - DNA, 25 bp, Homo sapien
aattacagtgttacactatcctggg

SEQ ID NO: 5187819 - DNA, 25 bp, Homo sapien
tatgtgcttaccattaccagtgttt

SEQ ID NO: 5187820 - DNA, 25 bp, Homo sapien
tcagattgaggaaatccctttaaga

SEQ ID NO: 5187821 - DNA, 25 bp, Homo sapien
tgcagtgcatgttatactaccaaca

SEQ ID NO: 5187822 - DNA, 25 bp, Homo sapien
catgcctgggaatgatgttaactta

SEQ ID NO: 5187823 - DNA, 25 bp, Homo sapien
ggaaatggtaactctgtgtcctcca

SEQ ID NO: 5187824 - DNA, 25 bp, Homo sapien
tccagaatcacccaatatacctaac

SEQ ID NO: 5187825 - DNA, 25 bp, Homo sapien
tccttggagttctaggcccgtgact

SEQ ID NO: 5187826 - DNA, 25 bp, Homo sapien
agaaccagccaccaccgttaagtgc

SEQ ID NO: 5187827 - DNA, 25 bp, Homo sapien
agtcggcagcgaagcacaatggcgc

SEQ ID NO: 5187828 - DNA, 25 bp, Homo sapien
gcccgtgactgaggaaatgcagtcg

SEQ ID NO: 5187829 - DNA, 25 bp, Homo sapien
ctcctgagccggcaccgaccagtgc

SEQ ID NO: 5187830 - DNA, 25 bp, Homo sapien
tgagccggcaccgaccagtgcgcgt

SEQ ID NO: 5187831 - DNA, 25 bp, Homo sapien
gcgtcccactcgcagcaacacgcac

SEQ ID NO: 5187832 - DNA, 25 bp, Homo sapien
accagtgcgcgtcccactcgcagca

SEQ ID NO: 5187833 - DNA, 25 bp, Homo sapien
gaaagtcttttatgtcgggctctaa

SEQ ID NO: 5187834 - DNA, 25 bp, Homo sapien
gcagtctctgcaactcgtgagctca

SEQ ID NO: 5187835 - DNA, 25 bp, Homo sapien
tagctagtagtagcagtgcgcacca

SEQ ID NO: 5187836 - DNA, 25 bp, Homo sapien
gctcaaaatgatcgttctgcctcag

SEQ ID NO: 5187837 - DNA, 25 bp, Homo sapien
tgatgttaagtctacactacaccac

SEQ ID NO: 5187838 - DNA, 25 bp, Homo sapien
agaaaaaagcttaacatcccatgag

SEQ ID NO: 5187839 - DNA, 25 bp, Homo sapien
taaacatggagacatggaagctaag

SEQ ID NO: 5187840 - DNA, 25 bp, Homo sapien
tgaaagtatacaacattttgggcct

SEQ ID NO: 5187841 - DNA, 25 bp, Homo sapien
ctggtttacagccttagtagctact

SEQ ID NO: 5187842 - DNA, 25 bp, Homo sapien
tgtattacagaagtcctaaggagaa

SEQ ID NO: 5187843 - DNA, 25 bp, Homo sapien
caggatattcacttcagggtaaaga

SEQ ID NO: 5187844 - DNA, 25 bp, Homo sapien
tattattttgctgttatctcgggtg

SEQ ID NO: 5187845 - DNA, 25 bp, Homo sapien
tagttatgcatcactcaagaacagg

SEQ ID NO: 5187846 - DNA, 25 bp, Homo sapien
tattgtaccatatgccagaatttcc

SEQ ID NO: 5187847 - DNA, 25 bp, Homo sapien
caaggatttacaaggcctctgactg

SEQ ID NO: 5187848 - DNA, 25 bp, Homo sapien
tattctaagaaatgcgtctttaggt

SEQ ID NO: 5187849 - DNA, 25 bp, Homo sapien
gaatccttgaaggtttagactccat

SEQ ID NO: 5187850 - DNA, 25 bp, Homo sapien
ggaatccttgaaggtttagactcca

SEQ ID NO: 5187851 - DNA, 25 bp, Homo sapien
ttggaatccttgaaggtttagactc

SEQ ID NO: 5187852 - DNA, 25 bp, Homo sapien
ttcttggaatccttgaaggtttaga

SEQ ID NO: 5187853 - DNA, 25 bp, Homo sapien
ccaatctaaatgaagagtctcttga

SEQ ID NO: 5187854 - DNA, 25 bp, Homo sapien
ttcagaatccaatctaaatgaagag

SEQ ID NO: 5187855 - DNA, 25 bp, Homo sapien
gagtctcttgagtgataggtatcat

SEQ ID NO: 5187856 - DNA, 25 bp, Homo sapien
gaatccaatctaaatgaagagtctc

SEQ ID NO: 5187857 - DNA, 25 bp, Homo sapien
cgttcccagcgcaaaagtatgattt

SEQ ID NO: 5187858 - DNA, 25 bp, Homo sapien
tacaatctgttatccataattctga

SEQ ID NO: 5187859 - DNA, 25 bp, Homo sapien
tatgattttatatgaggttacaatc

SEQ ID NO: 5187860 - DNA, 25 bp, Homo sapien
ccaccgttcccagcgcaaaagtatg

SEQ ID NO: 5187861 - DNA, 25 bp, Homo sapien
cttactactgtgtacgaacattttt

SEQ ID NO: 5187862 - DNA, 25 bp, Homo sapien
aggattcttttagattacctcaaca

SEQ ID NO: 5187863 - DNA, 25 bp, Homo sapien
ctgtgtacgaacatttttatgagac

SEQ ID NO: 5187864 - DNA, 25 bp, Homo sapien
tatgagactttgtcatatatcagat

SEQ ID NO: 5187865 - DNA, 25 bp, Homo sapien
tggttgacttatggctgaaactgct

SEQ ID NO: 5187866 - DNA, 25 bp, Homo sapien
cccagaaagttgtggctgcgccgag

SEQ ID NO: 5187867 - DNA, 25 bp, Homo sapien
gcaaagcagcctaaaaatggttgac

SEQ ID NO: 5187868 - DNA, 25 bp, Homo sapien
tgctcaactacactacaagctgggt

SEQ ID NO: 5187869 - DNA, 25 bp, Homo sapien
taccaagtgcctgagataacagaag

SEQ ID NO: 5187870 - DNA, 25 bp, Homo sapien
taacagcaagattagtagcaggtga

SEQ ID NO: 5187871 - DNA, 25 bp, Homo sapien
gaagcgcagcttacaaatggctgag

SEQ ID NO: 5187872 - DNA, 25 bp, Homo sapien
gactgcttgatctcctaagttcgag

SEQ ID NO: 5187873 - DNA, 25 bp, Homo sapien
gatgatcatagttgccaatcattca

SEQ ID NO: 5187874 - DNA, 25 bp, Homo sapien
cataagatgatcatagttgccaatc

SEQ ID NO: 5187875 - DNA, 25 bp, Homo sapien
aagacataagatgatcatagttgcc

SEQ ID NO: 5187876 - DNA, 25 bp, Homo sapien
tgttactaaagacataagatgatca

SEQ ID NO: 5187877 - DNA, 25 bp, Homo sapien
gcaaaatatgcaatggtactgatct

SEQ ID NO: 5187878 - DNA, 25 bp, Homo sapien
gaccactggttctacactatgcaaa

SEQ ID NO: 5187879 - DNA, 25 bp, Homo sapien
aatgctgcagggtttatgcaatgcc

SEQ ID NO: 5187880 - DNA, 25 bp, Homo sapien
tgaaaactacacttgcataaggtag

SEQ ID NO: 5187881 - DNA, 25 bp, Homo sapien
gacttccagaacaacattaccttag

SEQ ID NO: 5187882 - DNA, 25 bp, Homo sapien
taccttagccatgagcaacaactta

SEQ ID NO: 5187883 - DNA, 25 bp, Homo sapien
tattcatgtgatggagagtacccat

SEQ ID NO: 5187884 - DNA, 25 bp, Homo sapien
tctccacaccaatgcagaagaaact

SEQ ID NO: 5187885 - DNA, 25 bp, Homo sapien
ggagcagtgcagtgataaccataat

SEQ ID NO: 5187886 - DNA, 25 bp, Homo sapien
caaagaagctactaacaaaagacta

SEQ ID NO: 5187887 - DNA, 25 bp, Homo sapien
agatgaacactgaaaatatgctaag

SEQ ID NO: 5187888 - DNA, 25 bp, Homo sapien
gggcaaactatatggtatgtgaaat

SEQ ID NO: 5187889 - DNA, 25 bp, Homo sapien
aatgtacagtaaacggccaattagc

SEQ ID NO: 5187890 - DNA, 25 bp, Homo sapien
ccaacaagaggtttactggaagtat

SEQ ID NO: 5187891 - DNA, 25 bp, Homo sapien
caactgagtaacaagacaagtgtac

SEQ ID NO: 5187892 - DNA, 25 bp, Homo sapien
tggcagttccccaaacgattgaaca

SEQ ID NO: 5187893 - DNA, 25 bp, Homo sapien
ccagatttggcctcccaactcaggc

SEQ ID NO: 5187894 - DNA, 25 bp, Homo sapien
gatttggcctcccaactcaggcctg

SEQ ID NO: 5187895 - DNA, 25 bp, Homo sapien
ttggctatgctagtgggtgttaagt

SEQ ID NO: 5187896 - DNA, 25 bp, Homo sapien
ggctatgctagtgggtgttaagtat

SEQ ID NO: 5187897 - DNA, 25 bp, Homo sapien
gaaagacttttagaggcatgtggaa

SEQ ID NO: 5187898 - DNA, 25 bp, Homo sapien
tgactcacgacacaacatgtagatt

SEQ ID NO: 5187899 - DNA, 25 bp, Homo sapien
gaaataagtccctatgaagtaatgg

SEQ ID NO: 5187900 - DNA, 25 bp, Homo sapien
tgctgtccagaactataggccaaat

SEQ ID NO: 5187901 - DNA, 25 bp, Homo sapien
ccagctgaggtagtacagtttgtac

SEQ ID NO: 5187902 - DNA, 25 bp, Homo sapien
cagattgaaatggtgacgcagatgc

SEQ ID NO: 5187903 - DNA, 25 bp, Homo sapien
catgatcccgttgctggttctgcga

SEQ ID NO: 5187904 - DNA, 25 bp, Homo sapien
ggttctgcgatcttgagcgtgctcc

SEQ ID NO: 5187905 - DNA, 25 bp, Homo sapien
ctgccttagcctccgtattttctga

SEQ ID NO: 5187906 - DNA, 25 bp, Homo sapien
atattatgtactacaatgtttatca

SEQ ID NO: 5187907 - DNA, 25 bp, Homo sapien
ttagcctccgtattttctgaaaata

SEQ ID NO: 5187908 - DNA, 25 bp, Homo sapien
attatgtactacaatgtttatcatt

SEQ ID NO: 5187909 - DNA, 25 bp, Homo sapien
cacttcggtgactataatccataag

SEQ ID NO: 5187910 - DNA, 25 bp, Homo sapien
taggaacttgactatgcctccaaga

SEQ ID NO: 5187911 - DNA, 25 bp, Homo sapien
gttccaaatgatccaagtaccattg

SEQ ID NO: 5187912 - DNA, 25 bp, Homo sapien
gattactaatagaggaatctgttct

SEQ ID NO: 5187913 - DNA, 25 bp, Homo sapien
atatgaaggaactctgtcttgaaca

SEQ ID NO: 5187914 - DNA, 25 bp, Homo sapien
tgaatatgaaggaactctgtcttga

SEQ ID NO: 5187915 - DNA, 25 bp, Homo sapien
gaatatgaaggaactctgtcttgaa

SEQ ID NO: 5187916 - DNA, 25 bp, Homo sapien
tgtgaatatgaaggaactctgtctt

SEQ ID NO: 5187917 - DNA, 25 bp, Homo sapien
tctgatgttcagaaggcaattggtg

SEQ ID NO: 5187918 - DNA, 25 bp, Homo sapien
tctggagtccctagaacttagtatg

SEQ ID NO: 5187919 - DNA, 25 bp, Homo sapien
caggctgcgtattgcttcgggaaga

SEQ ID NO: 5187920 - DNA, 25 bp, Homo sapien
tggtctttgagatgaaacaaccctt

SEQ ID NO: 5187921 - DNA, 25 bp, Homo sapien
gctatgcgtgacagcaatctcctcg

SEQ ID NO: 5187922 - DNA, 25 bp, Homo sapien
gactgcaaaccggaataaggaacca

SEQ ID NO: 5187923 - DNA, 25 bp, Homo sapien
gcttcagatgccctattatcgggaa

SEQ ID NO: 5187924 - DNA, 25 bp, Homo sapien
cattactacgggactgtgaagctgt

SEQ ID NO: 5187925 - DNA, 25 bp, Homo sapien
cctgtgcacttgcatggctctatca

SEQ ID NO: 5187926 - DNA, 25 bp, Homo sapien
tgatgatgcagctgccatttgacaa

SEQ ID NO: 5187927 - DNA, 25 bp, Homo sapien
catacagtcttggtggacatactgc

SEQ ID NO: 5187928 - DNA, 25 bp, Homo sapien
caaattctacataagtcaccttctt

SEQ ID NO: 5187929 - DNA, 25 bp, Homo sapien
caggtggttacagcttctaatgaag

SEQ ID NO: 5187930 - DNA, 25 bp, Homo sapien
caaaatcctccaggttaagctccaa

SEQ ID NO: 5187931 - DNA, 25 bp, Homo sapien
tttgcatgagctctatgtagttcat

SEQ ID NO: 5187932 - DNA, 25 bp, Homo sapien
acatagttcacaggtggttacagct

SEQ ID NO: 5187933 - DNA, 25 bp, Homo sapien
gcctggtgtggaggcgggtggcaat

SEQ ID NO: 5187934 - DNA, 25 bp, Homo sapien
tggtgtggaggcgggtggcaatccc

SEQ ID NO: 5187935 - DNA, 25 bp, Homo sapien
tgtggaggcgggtggcaatcccacc

SEQ ID NO: 5187936 - DNA, 25 bp, Homo sapien
tggaggcgggtggcaatcccaccta

SEQ ID NO: 5187937 - DNA, 25 bp, Homo sapien
cacacagaaatttgtagttggtaaa

SEQ ID NO: 5187938 - DNA, 25 bp, Homo sapien
tcacacagaaatttgtagttggtaa

SEQ ID NO: 5187939 - DNA, 25 bp, Homo sapien
ttcaaaactgttctgttgtgttaac

SEQ ID NO: 5187940 - DNA, 25 bp, Homo sapien
tggtaaaaacagttcttcaattcaa

SEQ ID NO: 5187941 - DNA, 25 bp, Homo sapien
ggtagagaccagagctgataaactc

SEQ ID NO: 5187942 - DNA, 25 bp, Homo sapien
cggacacgtgtgcttggttcatttg

SEQ ID NO: 5187943 - DNA, 25 bp, Homo sapien
gaaaagctttgttcgcacaagtgca

SEQ ID NO: 5187944 - DNA, 25 bp, Homo sapien
cacaagtgcaataacaccactaggt

SEQ ID NO: 5187945 - DNA, 25 bp, Homo sapien
caaaatggcccagacagcaaagcat

SEQ ID NO: 5187946 - DNA, 25 bp, Homo sapien
gatacatagagaccctagcccttgc

SEQ ID NO: 5187947 - DNA, 25 bp, Homo sapien
aatacctaacatacagctggccaaa

SEQ ID NO: 5187948 - DNA, 25 bp, Homo sapien
taactttatgagaaaatcaggctgc

SEQ ID NO: 5187949 - DNA, 25 bp, Homo sapien
tgaaggatatacttatgaacacatt

SEQ ID NO: 5187950 - DNA, 25 bp, Homo sapien
atttcaagacatgaagtgttcagaa

SEQ ID NO: 5187951 - DNA, 25 bp, Homo sapien
aggatatacttatgaacacatttca

SEQ ID NO: 5187952 - DNA, 25 bp, Homo sapien
tttcaagacatgaagtgttcagaat

SEQ ID NO: 5187953 - DNA, 25 bp, Homo sapien
caatggtaattatctgttaaccagc

SEQ ID NO: 5187954 - DNA, 25 bp, Homo sapien
caaattctgaatgctcttgatagat

SEQ ID NO: 5187955 - DNA, 25 bp, Homo sapien
tacttagaagtcaagagatctttgc

SEQ ID NO: 5187956 - DNA, 25 bp, Homo sapien
tcatcctgaagacttaaggtacctt

SEQ ID NO: 5187957 - DNA, 25 bp, Homo sapien
gtcaaacatcagtttaagcctttaa

SEQ ID NO: 5187958 - DNA, 25 bp, Homo sapien
caaaaatcacaagcttaatggcatt

SEQ ID NO: 5187959 - DNA, 25 bp, Homo sapien
ttcagtttcagtgggcgcgcgcaca

SEQ ID NO: 5187960 - DNA, 25 bp, Homo sapien
cacttcaaaaaattacgaaatggag

SEQ ID NO: 5187961 - DNA, 25 bp, Homo sapien
ctagaaacaatgcagaaagaaatac

SEQ ID NO: 5187962 - DNA, 25 bp, Homo sapien
gaaatacagtagtttaaatgttgca

SEQ ID NO: 5187963 - DNA, 25 bp, Homo sapien
agtagtttaaatgttgcaaatggat

SEQ ID NO: 5187964 - DNA, 25 bp, Homo sapien
agaaagaaatacagtagtttaaatg

SEQ ID NO: 5187965 - DNA, 25 bp, Homo sapien
tgcctgaagagttcttgcaaggtta

SEQ ID NO: 5187966 - DNA, 25 bp, Homo sapien
cctgaagagttcttgcaaggttaat

SEQ ID NO: 5187967 - DNA, 25 bp, Homo sapien
gagatcttccatatgtgcctgaaga

SEQ ID NO: 5187968 - DNA, 25 bp, Homo sapien
tttcgagatcttccatatgtgcctg

SEQ ID NO: 5187969 - DNA, 25 bp, Homo sapien
caactaatgtcagtttcccaaccca

SEQ ID NO: 5187970 - DNA, 25 bp, Homo sapien
tgatctaacaaacctgagtaacagg

SEQ ID NO: 5187971 - DNA, 25 bp, Homo sapien
ttcctggaatcataggtaagcccag

SEQ ID NO: 5187972 - DNA, 25 bp, Homo sapien
taaatgagctctaatttggcagaac

SEQ ID NO: 5187973 - DNA, 25 bp, Homo sapien
taaaatctggcttattaccgctgca

SEQ ID NO: 5187974 - DNA, 25 bp, Homo sapien
gaagagacctttgtattaggccaac

SEQ ID NO: 5187975 - DNA, 25 bp, Homo sapien
tcttcccacatgttaggagcagaca

SEQ ID NO: 5187976 - DNA, 25 bp, Homo sapien
caagagtcactagtggctcaagagt

SEQ ID NO: 5187977 - DNA, 25 bp, Homo sapien
tcttcttcggaatcatcctctgaag

SEQ ID NO: 5187978 - DNA, 25 bp, Homo sapien
atgtcctgttatggtctccgtcttc

SEQ ID NO: 5187979 - DNA, 25 bp, Homo sapien
ccgtcttcttcggaatcatcctctg

SEQ ID NO: 5187980 - DNA, 25 bp, Homo sapien
tggtctccgtcttcttcggaatcat

SEQ ID NO: 5187981 - DNA, 25 bp, Homo sapien
tgtatcctaagggtactgacagaag

SEQ ID NO: 5187982 - DNA, 25 bp, Homo sapien
aggaccaggatccaaacaggttatt

SEQ ID NO: 5187983 - DNA, 25 bp, Homo sapien
caaactaagtgtgggcaaactgttc

SEQ ID NO: 5187984 - DNA, 25 bp, Homo sapien
ccaaatagcatttgactggcaagtc

SEQ ID NO: 5187985 - DNA, 25 bp, Homo sapien
ctggcaagaggtgagcaaatgtttt

SEQ ID NO: 5187986 - DNA, 25 bp, Homo sapien
aaaggtaactggcaagaggtgagca

SEQ ID NO: 5187987 - DNA, 25 bp, Homo sapien
aattcaaagcatcccttaggaccca

SEQ ID NO: 5187988 - DNA, 25 bp, Homo sapien
tcaaattcaaagcatcccttaggac

SEQ ID NO: 5187989 - DNA, 25 bp, Homo sapien
tactaagtggtactagggaactaca

SEQ ID NO: 5187990 - DNA, 25 bp, Homo sapien
caatctccgccttgcaggttttcaa

SEQ ID NO: 5187991 - DNA, 25 bp, Homo sapien
caagaggcctctggtaatgaagtgc

SEQ ID NO: 5187992 - DNA, 25 bp, Homo sapien
tcttgtagtgagcagtgtatggtct

SEQ ID NO: 5187993 - DNA, 25 bp, Homo sapien
tatactgtctagaagtctgaggctc

SEQ ID NO: 5187994 - DNA, 25 bp, Homo sapien
tagtcacgtatcacttatcaatggg

SEQ ID NO: 5187995 - DNA, 25 bp, Homo sapien
aactattaacagtgcggctacatgg

SEQ ID NO: 5187996 - DNA, 25 bp, Homo sapien
gatggtagagcctattttgtcccaa

SEQ ID NO: 5187997 - DNA, 25 bp, Homo sapien
gaatcatgttactactggcagtgcg

SEQ ID NO: 5187998 - DNA, 25 bp, Homo sapien
taaatttggatatgggccgggctaa

SEQ ID NO: 5187999 - DNA, 25 bp, Homo sapien
gcttttacccatttgcggagtgcag

SEQ ID NO: 5188000 - DNA, 25 bp, Homo sapien
tatttttagccattcagatcaggtg

SEQ ID NO: 5188001 - DNA, 25 bp, Homo sapien
tagcaattttgctggtcttagaata

SEQ ID NO: 5188002 - DNA, 25 bp, Homo sapien
aaaacaagacgaaatttccaacatg

SEQ ID NO: 5188003 - DNA, 25 bp, Homo sapien
tactagggataccttaatcaaaatc

SEQ ID NO: 5188004 - DNA, 25 bp, Homo sapien
taatcttattaaagcgccacatagt

SEQ ID NO: 5188005 - DNA, 25 bp, Homo sapien
taagaatcgtatttgctggcatcag

SEQ ID NO: 5188006 - DNA, 25 bp, Homo sapien
tatcatggagtaggagactaacact

SEQ ID NO: 5188007 - DNA, 25 bp, Homo sapien
taaggcagtttgctgaggtgagccc

SEQ ID NO: 5188008 - DNA, 25 bp, Homo sapien
gagtcttagctcaccaaagaggagg

SEQ ID NO: 5188009 - DNA, 25 bp, Homo sapien
gcagacgcaacacccggccggccat

SEQ ID NO: 5188010 - DNA, 25 bp, Homo sapien
gtccctcgccgggaccgtgcgcgac

SEQ ID NO: 5188011 - DNA, 25 bp, Homo sapien
cttcccaacgcacgctcttcgtccc

SEQ ID NO: 5188012 - DNA, 25 bp, Homo sapien
tcgtccccgcgcacccgagggcggc

SEQ ID NO: 5188013 - DNA, 25 bp, Homo sapien
ctctggtctggagtttggtatataa

SEQ ID NO: 5188014 - DNA, 25 bp, Homo sapien
gatgtgtcaatattccaatatagag

SEQ ID NO: 5188015 - DNA, 25 bp, Homo sapien
tcaagatgtgtcaatattccaatat

SEQ ID NO: 5188016 - DNA, 25 bp, Homo sapien
ggagtttggtatataataaactcag

SEQ ID NO: 5188017 - DNA, 25 bp, Homo sapien
tagtcttagtaatagcatccactgg

SEQ ID NO: 5188018 - DNA, 25 bp, Homo sapien
cagtggaactctaaaccttgtgatg

SEQ ID NO: 5188019 - DNA, 25 bp, Homo sapien
gaactaagccaacttgatgtgaaaa

SEQ ID NO: 5188020 - DNA, 25 bp, Homo sapien
cagagaaagggtccatgaaggaaag

SEQ ID NO: 5188021 - DNA, 25 bp, Homo sapien
aatatacaagtagtgatgttcccaa

SEQ ID NO: 5188022 - DNA, 25 bp, Homo sapien
tgtgagaataatcatagcgcattaa

SEQ ID NO: 5188023 - DNA, 25 bp, Homo sapien
tcaaagtaggataatatacaagtag

SEQ ID NO: 5188024 - DNA, 25 bp, Homo sapien
aatgtgagaataatcatagcgcatt

SEQ ID NO: 5188025 - DNA, 25 bp, Homo sapien
tacggtgcgcatcaggaaggaagtc

SEQ ID NO: 5188026 - DNA, 25 bp, Homo sapien
tcatgcaacaaggatggaggccacc

SEQ ID NO: 5188027 - DNA, 25 bp, Homo sapien
gactgaattcttaggcttggccgca

SEQ ID NO: 5188028 - DNA, 25 bp, Homo sapien
tatggaactgaaaggccagaccctg

SEQ ID NO: 5188029 - DNA, 25 bp, Homo sapien
taatgaatacggcaagaccactgcc

SEQ ID NO: 5188030 - DNA, 25 bp, Homo sapien
taagatgttgccttccctcaacatt

SEQ ID NO: 5188031 - DNA, 25 bp, Homo sapien
cttagaataaattcaaggcccttca

SEQ ID NO: 5188032 - DNA, 25 bp, Homo sapien
ctgagtgtgcctgtattagggttct

SEQ ID NO: 5188033 - DNA, 25 bp, Homo sapien
ctaacacaccatccgctgtaggatt

SEQ ID NO: 5188034 - DNA, 25 bp, Homo sapien
tgtaggattaggagccagacacgtc

SEQ ID NO: 5188035 - DNA, 25 bp, Homo sapien
gagccagacacgtcttgctgcaggc

SEQ ID NO: 5188036 - DNA, 25 bp, Homo sapien
ccatccgctgtaggattaggagcca

SEQ ID NO: 5188037 - DNA, 25 bp, Homo sapien
ttccctatccgaacactgcagttct

SEQ ID NO: 5188038 - DNA, 25 bp, Homo sapien
ctgtccctggtgctgtcttatctct

SEQ ID NO: 5188039 - DNA, 25 bp, Homo sapien
cctggtgctgtcttatctcttgaga

SEQ ID NO: 5188040 - DNA, 25 bp, Homo sapien
tcctgttgaattccctatccgaaca

SEQ ID NO: 5188041 - DNA, 25 bp, Homo sapien
cagcggttattactgtcctcctgca

SEQ ID NO: 5188042 - DNA, 25 bp, Homo sapien
gctttgaccaagcttccagcggtta

SEQ ID NO: 5188043 - DNA, 25 bp, Homo sapien
caaaattgacacagtccttcgaagc

SEQ ID NO: 5188044 - DNA, 25 bp, Homo sapien
aatgagattgtgtccttaatttccc

SEQ ID NO: 5188045 - DNA, 25 bp, Homo sapien
gattaaggccaagaatggccgagta

SEQ ID NO: 5188046 - DNA, 25 bp, Homo sapien
cattggcagccccagttgagtcatg

SEQ ID NO: 5188047 - DNA, 25 bp, Homo sapien
agtttttgttgattcctgattaagg

SEQ ID NO: 5188048 - DNA, 25 bp, Homo sapien
aagaatggccgagtattgcaatacc

SEQ ID NO: 5188049 - DNA, 25 bp, Homo sapien
cagcagcagccggtgtgtttcatca

SEQ ID NO: 5188050 - DNA, 25 bp, Homo sapien
catacttagaccaaagaaatgagac

SEQ ID NO: 5188051 - DNA, 25 bp, Homo sapien
cagcacactccatacttagaccaaa

SEQ ID NO: 5188052 - DNA, 25 bp, Homo sapien
gactgaatttccaccatgtgcccag

SEQ ID NO: 5188053 - DNA, 25 bp, Homo sapien
gcactgtacttggcaggtctgaaac

SEQ ID NO: 5188054 - DNA, 25 bp, Homo sapien
acagcactgtacttggcaggtctga

SEQ ID NO: 5188055 - DNA, 25 bp, Homo sapien
agcactgtacttggcaggtctgaaa

SEQ ID NO: 5188056 - DNA, 25 bp, Homo sapien
cagcactgtacttggcaggtctgaa

SEQ ID NO: 5188057 - DNA, 25 bp, Homo sapien
gcgtttgtaggggttcgtgtgtcag

SEQ ID NO: 5188058 - DNA, 25 bp, Homo sapien
tgtaggggttcgtgtgtcagcagtc

SEQ ID NO: 5188059 - DNA, 25 bp, Homo sapien
tttgtaggggttcgtgtgtcagcag

SEQ ID NO: 5188060 - DNA, 25 bp, Homo sapien
cgtttgtaggggttcgtgtgtcagc

SEQ ID NO: 5188061 - DNA, 25 bp, Homo sapien
cagggtcggggactggatcggtacg

SEQ ID NO: 5188062 - DNA, 25 bp, Homo sapien
gtctcccagggtcggggactggatc

SEQ ID NO: 5188063 - DNA, 25 bp, Homo sapien
gtgagtctcccagggtcggggactg

SEQ ID NO: 5188064 - DNA, 25 bp, Homo sapien
ccccgagcggctcctggagtggcag

SEQ ID NO: 5188065 - DNA, 25 bp, Homo sapien
cagcggtggcggagtgggtctccag

SEQ ID NO: 5188066 - DNA, 25 bp, Homo sapien
acagcggtggcggagtgggtctcca

SEQ ID NO: 5188067 - DNA, 25 bp, Homo sapien
acctccgcgactttcccgcatccca

SEQ ID NO: 5188068 - DNA, 25 bp, Homo sapien
ctccgcgactttcccgcatcccagc

SEQ ID NO: 5188069 - DNA, 25 bp, Homo sapien
tccccaagccgcagtgggtggggcg

SEQ ID NO: 5188070 - DNA, 25 bp, Homo sapien
gcgactttcccgcatcccagcccag

SEQ ID NO: 5188071 - DNA, 25 bp, Homo sapien
caaacccggatgtcaggctccttgt

SEQ ID NO: 5188072 - DNA, 25 bp, Homo sapien
gtcccggagattctcaaatcgctca

SEQ ID NO: 5188073 - DNA, 25 bp, Homo sapien
tccaggtggtttgcaaacccggatg

SEQ ID NO: 5188074 - DNA, 25 bp, Homo sapien
gagattctcaaatcgctcacccaca

SEQ ID NO: 5188075 - DNA, 25 bp, Homo sapien
gcatgtgttgcctgtcttttagata

SEQ ID NO: 5188076 - DNA, 25 bp, Homo sapien
agcatgtgttgcctgtcttttagat

SEQ ID NO: 5188077 - DNA, 25 bp, Homo sapien
cttgccagcatgtgttgcctgtctt

SEQ ID NO: 5188078 - DNA, 25 bp, Homo sapien
ccagcatgtgttgcctgtcttttag

SEQ ID NO: 5188079 - DNA, 25 bp, Homo sapien
cactgaagagttatgttacatgaag

SEQ ID NO: 5188080 - DNA, 25 bp, Homo sapien
aatagaagttacctttgtgtgtgtt

SEQ ID NO: 5188081 - DNA, 25 bp, Homo sapien
agaaaatagaagttacctttgtgtg

SEQ ID NO: 5188082 - DNA, 25 bp, Homo sapien
tgtgtgtgttttagggaaggtagag

SEQ ID NO: 5188083 - DNA, 25 bp, Homo sapien
gcttagtttattcaaagagcgatcc

SEQ ID NO: 5188084 - DNA, 25 bp, Homo sapien
aaaccctgtaattgtcataccaaag

SEQ ID NO: 5188085 - DNA, 25 bp, Homo sapien
tggctctaaatcaagcacatcaaga

SEQ ID NO: 5188086 - DNA, 25 bp, Homo sapien
tcagttgatggaagagatggactct

SEQ ID NO: 5188087 - DNA, 25 bp, Homo sapien
gacatctgcagataagtcatcctct

SEQ ID NO: 5188088 - DNA, 25 bp, Homo sapien
aaaaggtagacctttccacagattg

SEQ ID NO: 5188089 - DNA, 25 bp, Homo sapien
acctgagttttttgtctcggcaaag

SEQ ID NO: 5188090 - DNA, 25 bp, Homo sapien
tcctctacatgaaggtgacagactg

SEQ ID NO: 5188091 - DNA, 25 bp, Homo sapien
aggccttaccctgtctccccggctg

SEQ ID NO: 5188092 - DNA, 25 bp, Homo sapien
tgagacaaggccttaccctgtctcc

SEQ ID NO: 5188093 - DNA, 25 bp, Homo sapien
gagacaaggccttaccctgtctccc

SEQ ID NO: 5188094 - DNA, 25 bp, Homo sapien
tgtgactgggcaaggtacttacctg

SEQ ID NO: 5188095 - DNA, 25 bp, Homo sapien
tctaatgcccagtaccacagaatgt

SEQ ID NO: 5188096 - DNA, 25 bp, Homo sapien
gaagagtgaaccgtggctatacagt

SEQ ID NO: 5188097 - DNA, 25 bp, Homo sapien
tggcatttgcactagtttctctggc

SEQ ID NO: 5188098 - DNA, 25 bp, Homo sapien
tactcccaggtgagattgccttctg

SEQ ID NO: 5188099 - DNA, 25 bp, Homo sapien
aatgccactcactactaaggacggt

SEQ ID NO: 5188100 - DNA, 25 bp, Homo sapien
tgttctacgcagagcccatgtgggt

SEQ ID NO: 5188101 - DNA, 25 bp, Homo sapien
catgtgggttcacctgatatgggca

SEQ ID NO: 5188102 - DNA, 25 bp, Homo sapien
gatgaagcaggtagcacagcaaggc

SEQ ID NO: 5188103 - DNA, 25 bp, Homo sapien
tcccaggagtgttgtgaggtgcccc

SEQ ID NO: 5188104 - DNA, 25 bp, Homo sapien
tgaagtcagagcaccgctgaggaca

SEQ ID NO: 5188105 - DNA, 25 bp, Homo sapien
ccagccaggttgactcaggatttcc

SEQ ID NO: 5188106 - DNA, 25 bp, Homo sapien
gagaaagatggtacaatccaggacc

SEQ ID NO: 5188107 - DNA, 25 bp, Homo sapien
tttggcagccaatgatctacaggat

SEQ ID NO: 5188108 - DNA, 25 bp, Homo sapien
tagacacagagctagagctggaacc

SEQ ID NO: 5188109 - DNA, 25 bp, Homo sapien
tatctaccaggaggcggtttgcagg

SEQ ID NO: 5188110 - DNA, 25 bp, Homo sapien
tctttcccatggagtctgataatcg

SEQ ID NO: 5188111 - DNA, 25 bp, Homo sapien
ctctctttcccatggagtctgataa

SEQ ID NO: 5188112 - DNA, 25 bp, Homo sapien
tcccatggagtctgataatcgacaa

SEQ ID NO: 5188113 - DNA, 25 bp, Homo sapien
gagtctgataatcgacaattctcac

SEQ ID NO: 5188114 - DNA, 25 bp, Homo sapien
tatgatgcctttttgtgtagtttgg

SEQ ID NO: 5188115 - DNA, 25 bp, Homo sapien
gcacattgcagcttcgagaaagatt

SEQ ID NO: 5188116 - DNA, 25 bp, Homo sapien
tgggcccctttctcggagggcagca

SEQ ID NO: 5188117 - DNA, 25 bp, Homo sapien
gattcaactcggtgttaggtgggcc

SEQ ID NO: 5188118 - DNA, 25 bp, Homo sapien
tgcaaagtccgtcacagtctcattc

SEQ ID NO: 5188119 - DNA, 25 bp, Homo sapien
tagccctgagcagatcctattgcaa

SEQ ID NO: 5188120 - DNA, 25 bp, Homo sapien
cattatagctttacattcgtggtag

SEQ ID NO: 5188121 - DNA, 25 bp, Homo sapien
cctattgcaaagtccgtcacagtct

SEQ ID NO: 5188122 - DNA, 25 bp, Homo sapien
gcttccacaagagtcagcggcaggc

SEQ ID NO: 5188123 - DNA, 25 bp, Homo sapien
tctgtaccaatgagactctctactg

SEQ ID NO: 5188124 - DNA, 25 bp, Homo sapien
taccaatgagactctctactgtcct

SEQ ID NO: 5188125 - DNA, 25 bp, Homo sapien
tttttctgtaccaatgagactctct

SEQ ID NO: 5188126 - DNA, 25 bp, Homo sapien
cagttgtaaatcagcaggaatgtcc

SEQ ID NO: 5188127 - DNA, 25 bp, Homo sapien
ttccattccttttagcaagattgca

SEQ ID NO: 5188128 - DNA, 25 bp, Homo sapien
ctggagactgctccaggtgggttgt

SEQ ID NO: 5188129 - DNA, 25 bp, Homo sapien
tagcaagattgcagttgtaaatcag

SEQ ID NO: 5188130 - DNA, 25 bp, Homo sapien
gatttgggaaacataacctctgtac

SEQ ID NO: 5188131 - DNA, 25 bp, Homo sapien
tattattggttctatgctccctgga

SEQ ID NO: 5188132 - DNA, 25 bp, Homo sapien
gactgaacgcagcaccctctgtgta

SEQ ID NO: 5188133 - DNA, 25 bp, Homo sapien
gaactaagtgccatactcgtctggg

SEQ ID NO: 5188134 - DNA, 25 bp, Homo sapien
tcaccaaagaccgaagagccagtaa

SEQ ID NO: 5188135 - DNA, 25 bp, Homo sapien
tctggcaaaccgaaaaatgttgcta

SEQ ID NO: 5188136 - DNA, 25 bp, Homo sapien
gaagcaaaacgattggctactagct

SEQ ID NO: 5188137 - DNA, 25 bp, Homo sapien
cagtttgcggttaggagaatgtgcc

SEQ ID NO: 5188138 - DNA, 25 bp, Homo sapien
taattcagtgttgccgtcagtgtct

SEQ ID NO: 5188139 - DNA, 25 bp, Homo sapien
aatagtccgacttcacccatggtgt

SEQ ID NO: 5188140 - DNA, 25 bp, Homo sapien
agacttatccaagtgcatgaccgga

SEQ ID NO: 5188141 - DNA, 25 bp, Homo sapien
ttccagctgtatgaaatgggctttc

SEQ ID NO: 5188142 - DNA, 25 bp, Homo sapien
gagccctggagtttgcaactacagt

SEQ ID NO: 5188143 - DNA, 25 bp, Homo sapien
tgcagtcccagtactaaagatcgta

SEQ ID NO: 5188144 - DNA, 25 bp, Homo sapien
tatagtgcctttcatacccctcgga

SEQ ID NO: 5188145 - DNA, 25 bp, Homo sapien
caaattagggtaacaacatccaggc

SEQ ID NO: 5188146 - DNA, 25 bp, Homo sapien
tataactagtaccactgtccctgtg

SEQ ID NO: 5188147 - DNA, 25 bp, Homo sapien
cagtgtcatgaagcgaaagacgaag

SEQ ID NO: 5188148 - DNA, 25 bp, Homo sapien
tcctttacgagaatatagcacccac

SEQ ID NO: 5188149 - DNA, 25 bp, Homo sapien
agtttgggagtattgaatcatggtc

SEQ ID NO: 5188150 - DNA, 25 bp, Homo sapien
tcttaactgtctgaacttggaaacc

SEQ ID NO: 5188151 - DNA, 25 bp, Homo sapien
gatacgctaaaactgaggattggca

SEQ ID NO: 5188152 - DNA, 25 bp, Homo sapien
gactgtataaagagcccagccaagg

SEQ ID NO: 5188153 - DNA, 25 bp, Homo sapien
ttctgctgggcgtagtattgactaa

SEQ ID NO: 5188154 - DNA, 25 bp, Homo sapien
taggcagtcacacgagcaggaatat

SEQ ID NO: 5188155 - DNA, 25 bp, Homo sapien
tgagcagtttgcagtcacatgccag

SEQ ID NO: 5188156 - DNA, 25 bp, Homo sapien
gatgactgagtgctttacgctgtgc

SEQ ID NO: 5188157 - DNA, 25 bp, Homo sapien
cactctgacggccaatgtgagatct

SEQ ID NO: 5188158 - DNA, 25 bp, Homo sapien
tgcttactgaagaccattggactgt

SEQ ID NO: 5188159 - DNA, 25 bp, Homo sapien
ccttgggacagtgaatagagcgtgc

SEQ ID NO: 5188160 - DNA, 25 bp, Homo sapien
gcagtaatagaaaccttccagggct

SEQ ID NO: 5188161 - DNA, 25 bp, Homo sapien
gaattccagatttgacgccagtaga

SEQ ID NO: 5188162 - DNA, 25 bp, Homo sapien
tcttacagctgtaaccattgtcaca

SEQ ID NO: 5188163 - DNA, 25 bp, Homo sapien
ttttccatcagatccgctcttacag

SEQ ID NO: 5188164 - DNA, 25 bp, Homo sapien
gggtagtttgcagacaaaccagtaa

SEQ ID NO: 5188165 - DNA, 25 bp, Homo sapien
tctgcagtatctaaggacagggtag

SEQ ID NO: 5188166 - DNA, 25 bp, Homo sapien
caccttcttctggatgtggtttgga

SEQ ID NO: 5188167 - DNA, 25 bp, Homo sapien
ccttcttctggatgtggtttggaac

SEQ ID NO: 5188168 - DNA, 25 bp, Homo sapien
tcttctggatgtggtttggaacagg

SEQ ID NO: 5188169 - DNA, 25 bp, Homo sapien
tatcaccttcttctggatgtggttt

SEQ ID NO: 5188170 - DNA, 25 bp, Homo sapien
aagagcttggagttaggtctaggaa

SEQ ID NO: 5188171 - DNA, 25 bp, Homo sapien
agcttcagcttcaagccattccctg

SEQ ID NO: 5188172 - DNA, 25 bp, Homo sapien
cctggagcaattactgagcccagtg

SEQ ID NO: 5188173 - DNA, 25 bp, Homo sapien
cactttccccgttcctgtcttattg

SEQ ID NO: 5188174 - DNA, 25 bp, Homo sapien
acctagaatgctgttcctgtctgcc

SEQ ID NO: 5188175 - DNA, 25 bp, Homo sapien
aggtcctggcgtagctgcaggccac

SEQ ID NO: 5188176 - DNA, 25 bp, Homo sapien
ttcgctttgaggtcctggcgtagct

SEQ ID NO: 5188177 - DNA, 25 bp, Homo sapien
caggggtccaccatagtgtttctcc

SEQ ID NO: 5188178 - DNA, 25 bp, Homo sapien
ccattcgtagcaaaggtcagtttct

SEQ ID NO: 5188179 - DNA, 25 bp, Homo sapien
tgttttgcaaccagtttcttgagcc

SEQ ID NO: 5188180 - DNA, 25 bp, Homo sapien
tctaaaagcctcatagagtagttct

SEQ ID NO: 5188181 - DNA, 25 bp, Homo sapien
ggaagatgtttagtaaccatgacat

SEQ ID NO: 5188182 - DNA, 25 bp, Homo sapien
cagttgcccttggatcagattccca

SEQ ID NO: 5188183 - DNA, 25 bp, Homo sapien
aggtcataggtcactggcctgtcag

SEQ ID NO: 5188184 - DNA, 25 bp, Homo sapien
tgctggccccttagtaactggttca

SEQ ID NO: 5188185 - DNA, 25 bp, Homo sapien
ttcagaatcaaatccccaagggtga

SEQ ID NO: 5188186 - DNA, 25 bp, Homo sapien
tgccaaagaagtaacagtccagtat

SEQ ID NO: 5188187 - DNA, 25 bp, Homo sapien
ccgtgtgccggaacagtactgatga

SEQ ID NO: 5188188 - DNA, 25 bp, Homo sapien
gaaagactaagaactggcactccag

SEQ ID NO: 5188189 - DNA, 25 bp, Homo sapien
gggtggaaatttgtgaggctcatca

SEQ ID NO: 5188190 - DNA, 25 bp, Homo sapien
cctcctaggtgggtctatggagacc

SEQ ID NO: 5188191 - DNA, 25 bp, Homo sapien
gattgcaagcacagtaatagagacc

SEQ ID NO: 5188192 - DNA, 25 bp, Homo sapien
ttcaaggcacaaaatcaagagcagg

SEQ ID NO: 5188193 - DNA, 25 bp, Homo sapien
tgaaacccgatctcaacagaacctg

SEQ ID NO: 5188194 - DNA, 25 bp, Homo sapien
attacatccggtgttttcagctggc

SEQ ID NO: 5188195 - DNA, 25 bp, Homo sapien
ttataactaagtctgtgtctcttgt

SEQ ID NO: 5188196 - DNA, 25 bp, Homo sapien
agttcgacatttataactaagtctg

SEQ ID NO: 5188197 - DNA, 25 bp, Homo sapien
ctgctgaggccaccccacgtttttt

SEQ ID NO: 5188198 - DNA, 25 bp, Homo sapien
ctcttgctgggaccgtcatgtccat

SEQ ID NO: 5188199 - DNA, 25 bp, Homo sapien
gctgggaccgtcatgtccatatcag

SEQ ID NO: 5188200 - DNA, 25 bp, Homo sapien
catgtccatatcagtcatatacaat

SEQ ID NO: 5188201 - DNA, 25 bp, Homo sapien
tctttctcttgctgggaccgtcatg

SEQ ID NO: 5188202 - DNA, 25 bp, Homo sapien
tgtctccctcaaaggctctttcttt

SEQ ID NO: 5188203 - DNA, 25 bp, Homo sapien
tttctgtctccctcaaaggctcttt

SEQ ID NO: 5188204 - DNA, 25 bp, Homo sapien
tctgtctccctcaaaggctctttct

SEQ ID NO: 5188205 - DNA, 25 bp, Homo sapien
ctccctcaaaggctctttctttcat

SEQ ID NO: 5188206 - DNA, 25 bp, Homo sapien
gagcattgtagacttctctagctat

SEQ ID NO: 5188207 - DNA, 25 bp, Homo sapien
ttggagagtattccctttgagcatt

SEQ ID NO: 5188208 - DNA, 25 bp, Homo sapien
tatgctccccaggttcgtctggtta

SEQ ID NO: 5188209 - DNA, 25 bp, Homo sapien
acttctctagctatgctccccaggt

SEQ ID NO: 5188210 - DNA, 25 bp, Homo sapien
ttacttctgaatgctttcagtgcta

SEQ ID NO: 5188211 - DNA, 25 bp, Homo sapien
gtcaaacgatggatgaaagatcagt

SEQ ID NO: 5188212 - DNA, 25 bp, Homo sapien
cgatggatgaaagatcagttggtaa

SEQ ID NO: 5188213 - DNA, 25 bp, Homo sapien
ttcagcttgggagtcaaacgatgga

SEQ ID NO: 5188214 - DNA, 25 bp, Homo sapien
gatcagttggtaagtgtatgctgaa

SEQ ID NO: 5188215 - DNA, 25 bp, Homo sapien
ccctttctagcaggcggttgttcct

SEQ ID NO: 5188216 - DNA, 25 bp, Homo sapien
tagcaggcggttgttccttcctgcc

SEQ ID NO: 5188217 - DNA, 25 bp, Homo sapien
tcattttaatttggcaggcagggtt

SEQ ID NO: 5188218 - DNA, 25 bp, Homo sapien
cttagtgccctttctagcaggcggt

SEQ ID NO: 5188219 - DNA, 25 bp, Homo sapien
ttaggtagcctgaaagcctgagggc

SEQ ID NO: 5188220 - DNA, 25 bp, Homo sapien
ctgagtaagatctagagtacttctc

SEQ ID NO: 5188221 - DNA, 25 bp, Homo sapien
tctctgagagtaagagatacttagg

SEQ ID NO: 5188222 - DNA, 25 bp, Homo sapien
tagagtacttctctgagagtaagag

SEQ ID NO: 5188223 - DNA, 25 bp, Homo sapien
gatcagacccaagcataggcttaga

SEQ ID NO: 5188224 - DNA, 25 bp, Homo sapien
ttggtaactgttgagaacactcagg

SEQ ID NO: 5188225 - DNA, 25 bp, Homo sapien
gatgatctgaatcagtttcgtaatc

SEQ ID NO: 5188226 - DNA, 25 bp, Homo sapien
tgctctgagctttggtaactgttga

SEQ ID NO: 5188227 - DNA, 25 bp, Homo sapien
ggtggaaatctgcgttgctgagaaa

SEQ ID NO: 5188228 - DNA, 25 bp, Homo sapien
caattatgtgcagctattgctttga

SEQ ID NO: 5188229 - DNA, 25 bp, Homo sapien
gcagactgttctggtattttatacc

SEQ ID NO: 5188230 - DNA, 25 bp, Homo sapien
gcgttgctgagaaaaagagttttca

SEQ ID NO: 5188231 - DNA, 25 bp, Homo sapien
ctctctgttgaagccaaccctttcg

SEQ ID NO: 5188232 - DNA, 25 bp, Homo sapien
ctttcgttcaccacgctgatgggaa

SEQ ID NO: 5188233 - DNA, 25 bp, Homo sapien
catcatacaattaggcttcaggagc

SEQ ID NO: 5188234 - DNA, 25 bp, Homo sapien
gatcggctggatggactctacttca

SEQ ID NO: 5188235 - DNA, 25 bp, Homo sapien
ttgtagatgagctgggtagcccaga

SEQ ID NO: 5188236 - DNA, 25 bp, Homo sapien
gttgtagatgagctgggtagcccag

SEQ ID NO: 5188237 - DNA, 25 bp, Homo sapien
gtagatgagctgggtagcccagagc

SEQ ID NO: 5188238 - DNA, 25 bp, Homo sapien
tgttgtagatgagctgggtagccca

SEQ ID NO: 5188239 - DNA, 25 bp, Homo sapien
gccggccagacttttgtgctttcta

SEQ ID NO: 5188240 - DNA, 25 bp, Homo sapien
ctgcttctcatggtttggcagaaca

SEQ ID NO: 5188241 - DNA, 25 bp, Homo sapien
gtcagggccggccagacttttgtgc

SEQ ID NO: 5188242 - DNA, 25 bp, Homo sapien
ttgtgctttctacagctagcatagc

SEQ ID NO: 5188243 - DNA, 25 bp, Homo sapien
atcacaggttggatgggatgcgaat

SEQ ID NO: 5188244 - DNA, 25 bp, Homo sapien
ctccaggaaactgatcacaggttgg

SEQ ID NO: 5188245 - DNA, 25 bp, Homo sapien
gaatcagtaatggtcactctgtctg

SEQ ID NO: 5188246 - DNA, 25 bp, Homo sapien
gaagagagaccacacaggagcttca

SEQ ID NO: 5188247 - DNA, 25 bp, Homo sapien
agggaccaagtgggtctgacaaaat

SEQ ID NO: 5188248 - DNA, 25 bp, Homo sapien
ctgacaaaatttggctaaaaaatct

SEQ ID NO: 5188249 - DNA, 25 bp, Homo sapien
tatgattaagtatttgctaacaatt

SEQ ID NO: 5188250 - DNA, 25 bp, Homo sapien
aaatctttactacctcttaatgctg

SEQ ID NO: 5188251 - DNA, 25 bp, Homo sapien
caagggtctgaacagtttcaaagtg

SEQ ID NO: 5188252 - DNA, 25 bp, Homo sapien
taagccactctggactgacttctgt

SEQ ID NO: 5188253 - DNA, 25 bp, Homo sapien
gatagtggtagatgcaccagtgtga

SEQ ID NO: 5188254 - DNA, 25 bp, Homo sapien
ccagtgtgaccatcgtataagctac

SEQ ID NO: 5188255 - DNA, 25 bp, Homo sapien
gctgcacaaaagccagtgtcctgca

SEQ ID NO: 5188256 - DNA, 25 bp, Homo sapien
gtgtcctgcagagtgggcttgggtg

SEQ ID NO: 5188257 - DNA, 25 bp, Homo sapien
gtcctgcagagtgggcttgggtggc

SEQ ID NO: 5188258 - DNA, 25 bp, Homo sapien
tgtcctgcagagtgggcttgggtgg

SEQ ID NO: 5188259 - DNA, 25 bp, Homo sapien
gctctagtaattagggtcggatccc

SEQ ID NO: 5188260 - DNA, 25 bp, Homo sapien
gtcggatcccagaaagctttacggc

SEQ ID NO: 5188261 - DNA, 25 bp, Homo sapien
ttaatgtagctaatgcaatgccatt

SEQ ID NO: 5188262 - DNA, 25 bp, Homo sapien
aagagagagacaaacggcaagagcc

SEQ ID NO: 5188263 - DNA, 25 bp, Homo sapien
cagcgggtcccgggctcggcggcgc

SEQ ID NO: 5188264 - DNA, 25 bp, Homo sapien
ccagcgggtcccgggctcggcggcg

SEQ ID NO: 5188265 - DNA, 25 bp, Homo sapien
gtcccgggctcggcggcgcccaggc

SEQ ID NO: 5188266 - DNA, 25 bp, Homo sapien
cgggctcggcggcgcccaggccccg

SEQ ID NO: 5188267 - DNA, 25 bp, Homo sapien
aatataaaagtcttctgcaggcagc

SEQ ID NO: 5188268 - DNA, 25 bp, Homo sapien
gatgtgccggaaccctaatttgagg

SEQ ID NO: 5188269 - DNA, 25 bp, Homo sapien
tgtagtgaactgaaccactgctggt

SEQ ID NO: 5188270 - DNA, 25 bp, Homo sapien
gaaggatccgtctatatgttgtgag

SEQ ID NO: 5188271 - DNA, 25 bp, Homo sapien
ctcaaacctagaacttctgcgattg

SEQ ID NO: 5188272 - DNA, 25 bp, Homo sapien
tctgcgattgttctcgatttacttc

SEQ ID NO: 5188273 - DNA, 25 bp, Homo sapien
cctagaacttctgcgattgttctcg

SEQ ID NO: 5188274 - DNA, 25 bp, Homo sapien
attgttctcgatttacttctcttcc

SEQ ID NO: 5188275 - DNA, 25 bp, Homo sapien
agtgacaaagaggaattgggaaaat

SEQ ID NO: 5188276 - DNA, 25 bp, Homo sapien
tatcagtgacaaagaggaattggga

SEQ ID NO: 5188277 - DNA, 25 bp, Homo sapien
tcagtgacaaagaggaattgggaaa

SEQ ID NO: 5188278 - DNA, 25 bp, Homo sapien
ctatcagtgacaaagaggaattggg

SEQ ID NO: 5188279 - DNA, 25 bp, Homo sapien
aaagtctcatgcaatcctaggagca

SEQ ID NO: 5188280 - DNA, 25 bp, Homo sapien
ggtccccagtgttgttcagtatccc

SEQ ID NO: 5188281 - DNA, 25 bp, Homo sapien
tccagtgtccattaaagtgcgaagg

SEQ ID NO: 5188282 - DNA, 25 bp, Homo sapien
agtaatatccccaaaagtgcaggcg

SEQ ID NO: 5188283 - DNA, 25 bp, Homo sapien
gtaacatgaccataaatatctttgg

SEQ ID NO: 5188284 - DNA, 25 bp, Homo sapien
tttcagcatcataattcatctcatg

SEQ ID NO: 5188285 - DNA, 25 bp, Homo sapien
ttgggtaacatgaccataaatatct

SEQ ID NO: 5188286 - DNA, 25 bp, Homo sapien
ctttggttttcagcatcataattca

SEQ ID NO: 5188287 - DNA, 25 bp, Homo sapien
cttgcttgcacaatccttaactttt

SEQ ID NO: 5188288 - DNA, 25 bp, Homo sapien
tcttgcttgcacaatccttaacttt

SEQ ID NO: 5188289 - DNA, 25 bp, Homo sapien
ttgcttgcacaatccttaacttttc

SEQ ID NO: 5188290 - DNA, 25 bp, Homo sapien
gttttttaaccagcactgaaatata

SEQ ID NO: 5188291 - DNA, 25 bp, Homo sapien
cagccctacgtttctgtcccaggca

SEQ ID NO: 5188292 - DNA, 25 bp, Homo sapien
aaaggcagctcattggaattgtccc

SEQ ID NO: 5188293 - DNA, 25 bp, Homo sapien
gaaatatagataagctctccctccc

SEQ ID NO: 5188294 - DNA, 25 bp, Homo sapien
ctgtgggcctcctccaaatacaact

SEQ ID NO: 5188295 - DNA, 25 bp, Homo sapien
tgggcctcctccaaatacaacttca

SEQ ID NO: 5188296 - DNA, 25 bp, Homo sapien
tccaaatacaacttcacctaacacg

SEQ ID NO: 5188297 - DNA, 25 bp, Homo sapien
tgcttagctcttcctgtgggcctcc

SEQ ID NO: 5188298 - DNA, 25 bp, Homo sapien
tttaacgtagacactggcaagttta

SEQ ID NO: 5188299 - DNA, 25 bp, Homo sapien
cttttaacgtagacactggcaagtt

SEQ ID NO: 5188300 - DNA, 25 bp, Homo sapien
taacgtagacactggcaagtttaat

SEQ ID NO: 5188301 - DNA, 25 bp, Homo sapien
aacttttaacgtagacactggcaag

SEQ ID NO: 5188302 - DNA, 25 bp, Homo sapien
catggaaaccattccatgcattctt

SEQ ID NO: 5188303 - DNA, 25 bp, Homo sapien
tggaaaccattccatgcattcttgg

SEQ ID NO: 5188304 - DNA, 25 bp, Homo sapien
ggaaaccattccatgcattcttggc

SEQ ID NO: 5188305 - DNA, 25 bp, Homo sapien
gaaaccattccatgcattcttggca

SEQ ID NO: 5188306 - DNA, 25 bp, Homo sapien
gattaagtagctacattctatagcc

SEQ ID NO: 5188307 - DNA, 25 bp, Homo sapien
tagcctagcccagttgacaaaactg

SEQ ID NO: 5188308 - DNA, 25 bp, Homo sapien
ccatccactttaggataatctttac

SEQ ID NO: 5188309 - DNA, 25 bp, Homo sapien
taaattgacattacttaaaatcagt

SEQ ID NO: 5188310 - DNA, 25 bp, Homo sapien
ttcataaggatttcttttacgttgc

SEQ ID NO: 5188311 - DNA, 25 bp, Homo sapien
tgatactttctaatacactccctga

SEQ ID NO: 5188312 - DNA, 25 bp, Homo sapien
gtgctattgctcttccctgtgaggt

SEQ ID NO: 5188313 - DNA, 25 bp, Homo sapien
tgcagtaccacatgtgccctgcttg

SEQ ID NO: 5188314 - DNA, 25 bp, Homo sapien
tgaatgcttgctgatcacttggccc

SEQ ID NO: 5188315 - DNA, 25 bp, Homo sapien
aatgcaccatgagttcctttaaggg

SEQ ID NO: 5188316 - DNA, 25 bp, Homo sapien
tggacatccctgatagctgatagat

SEQ ID NO: 5188317 - DNA, 25 bp, Homo sapien
cctttaagggaatccctctctctca

SEQ ID NO: 5188318 - DNA, 25 bp, Homo sapien
tggctttttgcatagtgagattggc

SEQ ID NO: 5188319 - DNA, 25 bp, Homo sapien
gacccaaggctagcctgtccatcag

SEQ ID NO: 5188320 - DNA, 25 bp, Homo sapien
caaaacccctgcaaggggcagcctg

SEQ ID NO: 5188321 - DNA, 25 bp, Homo sapien
aacagctgacccaaggctagcctgt

SEQ ID NO: 5188322 - DNA, 25 bp, Homo sapien
tgcccctatcaaaacccctgcaagg

SEQ ID NO: 5188323 - DNA, 25 bp, Homo sapien
taaagcttgcaatatcctgtaagca

SEQ ID NO: 5188324 - DNA, 25 bp, Homo sapien
tctggcagtagatgtaccaaaacct

SEQ ID NO: 5188325 - DNA, 25 bp, Homo sapien
gaactgaatttgctaggcatgacac

SEQ ID NO: 5188326 - DNA, 25 bp, Homo sapien
ccctcctatggagcaagttgcatga

SEQ ID NO: 5188327 - DNA, 25 bp, Homo sapien
tcagtgaactcttccctatgtgcat

SEQ ID NO: 5188328 - DNA, 25 bp, Homo sapien
gtttgaaatgatcagtgaactcttc

SEQ ID NO: 5188329 - DNA, 25 bp, Homo sapien
gaaatgatcagtgaactcttcccta

SEQ ID NO: 5188330 - DNA, 25 bp, Homo sapien
cctctcttcacagctgtttgaaatg

SEQ ID NO: 5188331 - DNA, 25 bp, Homo sapien
tcagggctggcagagcgaattcgtc

SEQ ID NO: 5188332 - DNA, 25 bp, Homo sapien
cagcttccatcagatagagccaatt

SEQ ID NO: 5188333 - DNA, 25 bp, Homo sapien
caggaatttggcacagggaggaagc

SEQ ID NO: 5188334 - DNA, 25 bp, Homo sapien
gcagagcgaattcgtccagcttcca

SEQ ID NO: 5188335 - DNA, 25 bp, Homo sapien
gccattggaatccatcaagcctata

SEQ ID NO: 5188336 - DNA, 25 bp, Homo sapien
tcagttagcttttgactccggtccc

SEQ ID NO: 5188337 - DNA, 25 bp, Homo sapien
tttgactccggtcccacaattgcct

SEQ ID NO: 5188338 - DNA, 25 bp, Homo sapien
cccaaagccattggaatccatcaag

SEQ ID NO: 5188339 - DNA, 25 bp, Homo sapien
tctaaatgtaccagacacatgcggt

SEQ ID NO: 5188340 - DNA, 25 bp, Homo sapien
gaaagactgttctatgtctcctgaa

SEQ ID NO: 5188341 - DNA, 25 bp, Homo sapien
taccagatcaactgtctgttctaaa

SEQ ID NO: 5188342 - DNA, 25 bp, Homo sapien
aagcaattcacccagtcttgtctga

SEQ ID NO: 5188343 - DNA, 25 bp, Homo sapien
gaagtgataagcttcagctggttag

SEQ ID NO: 5188344 - DNA, 25 bp, Homo sapien
gctgggctctgcattaagtccctta

SEQ ID NO: 5188345 - DNA, 25 bp, Homo sapien
caggtctaaagaccgcaacttctgg

SEQ ID NO: 5188346 - DNA, 25 bp, Homo sapien
tagcttggttaacattcctctcctt

SEQ ID NO: 5188347 - DNA, 25 bp, Homo sapien
tctctccaaccgtctgtgtttgcac

SEQ ID NO: 5188348 - DNA, 25 bp, Homo sapien
tcagaagtgctttctagaggcattt

SEQ ID NO: 5188349 - DNA, 25 bp, Homo sapien
tgtgtttgcacctgaatcacatcag

SEQ ID NO: 5188350 - DNA, 25 bp, Homo sapien
aggcattttccagtagaggcacttt

SEQ ID NO: 5188351 - DNA, 25 bp, Homo sapien
ggacatgtctccctgaagctggaaa

SEQ ID NO: 5188352 - DNA, 25 bp, Homo sapien
ctggagctggaatttggacatgtct

SEQ ID NO: 5188353 - DNA, 25 bp, Homo sapien
tacaccagagaacgtcttagagcag

SEQ ID NO: 5188354 - DNA, 25 bp, Homo sapien
cattactcccaattcctggagctgg

SEQ ID NO: 5188355 - DNA, 25 bp, Homo sapien
aaaccacaatcagtcctctaagagg

SEQ ID NO: 5188356 - DNA, 25 bp, Homo sapien
accacaatcagtcctctaagagggc

SEQ ID NO: 5188357 - DNA, 25 bp, Homo sapien
tcaaaccacaatcagtcctctaaga

SEQ ID NO: 5188358 - DNA, 25 bp, Homo sapien
aaccacaatcagtcctctaagaggg

SEQ ID NO: 5188359 - DNA, 25 bp, Homo sapien
ataccagttggtgtcctctttctgc

SEQ ID NO: 5188360 - DNA, 25 bp, Homo sapien
ctcatgttcataccagttggtgtcc

SEQ ID NO: 5188361 - DNA, 25 bp, Homo sapien
tctgcaggggccttatatctgttct

SEQ ID NO: 5188362 - DNA, 25 bp, Homo sapien
cttaaaagaccgtgttcagaactgt

SEQ ID NO: 5188363 - DNA, 25 bp, Homo sapien
gatgtaagaacagcagcaccctctc

SEQ ID NO: 5188364 - DNA, 25 bp, Homo sapien
aatttgggcattgtgtaagttctca

SEQ ID NO: 5188365 - DNA, 25 bp, Homo sapien
tgtgggtcctactgactgatgtaag

SEQ ID NO: 5188366 - DNA, 25 bp, Homo sapien
tttcaacagcattttgtgggtccta

SEQ ID NO: 5188367 - DNA, 25 bp, Homo sapien
aagatcatcaggtggccatgtgcgg

SEQ ID NO: 5188368 - DNA, 25 bp, Homo sapien
tcgtaggtggttctaagtcatgtcc

SEQ ID NO: 5188369 - DNA, 25 bp, Homo sapien
tgctgtgtgcggctgtttgatccaa

SEQ ID NO: 5188370 - DNA, 25 bp, Homo sapien
tttatccagcatatcataggccacc

SEQ ID NO: 5188371 - DNA, 25 bp, Homo sapien
ctcccctaggcttctctttccatca

SEQ ID NO: 5188372 - DNA, 25 bp, Homo sapien
tttccatcattctggtacacagctc

SEQ ID NO: 5188373 - DNA, 25 bp, Homo sapien
gctctgtgccactcatctcctctct

SEQ ID NO: 5188374 - DNA, 25 bp, Homo sapien
catcattctggtacacagctctgtg

SEQ ID NO: 5188375 - DNA, 25 bp, Homo sapien
taacataattcttctccttagtcct

SEQ ID NO: 5188376 - DNA, 25 bp, Homo sapien
tgtttaacataattcttctccttag

SEQ ID NO: 5188377 - DNA, 25 bp, Homo sapien
taattcttctccttagtccttgtac

SEQ ID NO: 5188378 - DNA, 25 bp, Homo sapien
cttgtttaacataattcttctcctt

SEQ ID NO: 5188379 - DNA, 25 bp, Homo sapien
gtaactgccttacattggaatagcc

SEQ ID NO: 5188380 - DNA, 25 bp, Homo sapien
cctgcatagagctcttggctcagtt

SEQ ID NO: 5188381 - DNA, 25 bp, Homo sapien
tggctgtgctgtccaaataatgggc

SEQ ID NO: 5188382 - DNA, 25 bp, Homo sapien
tcttggctcagttttgatctgtaac

SEQ ID NO: 5188383 - DNA, 25 bp, Homo sapien
gctttccgatgcttagttccaacct

SEQ ID NO: 5188384 - DNA, 25 bp, Homo sapien
acccatctcctacatatccttgtag

SEQ ID NO: 5188385 - DNA, 25 bp, Homo sapien
gtagtgaatgcctgtttagtgcctt

SEQ ID NO: 5188386 - DNA, 25 bp, Homo sapien
gccttttttacagctttccgatgct

SEQ ID NO: 5188387 - DNA, 25 bp, Homo sapien
taacttcctaacattgcagagctcg

SEQ ID NO: 5188388 - DNA, 25 bp, Homo sapien
tgcagcgcaccatacgtgagccaaa

SEQ ID NO: 5188389 - DNA, 25 bp, Homo sapien
cagcaatatgttgaccttgggacaa

SEQ ID NO: 5188390 - DNA, 25 bp, Homo sapien
tgaaagcatgttgccctaagccaga

SEQ ID NO: 5188391 - DNA, 25 bp, Homo sapien
gaaatcatagtaggccaaggaaatc

SEQ ID NO: 5188392 - DNA, 25 bp, Homo sapien
cactgttctggagataagtctgagt

SEQ ID NO: 5188393 - DNA, 25 bp, Homo sapien
attgtctgttgtagctgcagttgaa

SEQ ID NO: 5188394 - DNA, 25 bp, Homo sapien
tgagttttcagggaattgtctgttg

SEQ ID NO: 5188395 - DNA, 25 bp, Homo sapien
ccagtggcagtagctagagtgagca

SEQ ID NO: 5188396 - DNA, 25 bp, Homo sapien
caaacctgggaatatcaacttgcta

SEQ ID NO: 5188397 - DNA, 25 bp, Homo sapien
tctcaaggaatagtgtcatgtcagg

SEQ ID NO: 5188398 - DNA, 25 bp, Homo sapien
caagttggacattctccagtggcag

SEQ ID NO: 5188399 - DNA, 25 bp, Homo sapien
cttcagcaggtagccctccccagct

SEQ ID NO: 5188400 - DNA, 25 bp, Homo sapien
taatacagtgggttccatgaaacag

SEQ ID NO: 5188401 - DNA, 25 bp, Homo sapien
catgaaacagaggattctgacattc

SEQ ID NO: 5188402 - DNA, 25 bp, Homo sapien
ggtggacagcacattctaatacagt

SEQ ID NO: 5188403 - DNA, 25 bp, Homo sapien
caggtgttggttgtctttatgttca

SEQ ID NO: 5188404 - DNA, 25 bp, Homo sapien
accaggtgttggttgtctttatgtt

SEQ ID NO: 5188405 - DNA, 25 bp, Homo sapien
gatgggaaaatgttgagccttttca

SEQ ID NO: 5188406 - DNA, 25 bp, Homo sapien
ctggctcctttgatgggaaaatgtt

SEQ ID NO: 5188407 - DNA, 25 bp, Homo sapien
ctagaggaaagtttaaatcttgaat

SEQ ID NO: 5188408 - DNA, 25 bp, Homo sapien
tcgggaagctgccagtgtccagagc

SEQ ID NO: 5188409 - DNA, 25 bp, Homo sapien
ttgacataacgtgcctcagctgctg

SEQ ID NO: 5188410 - DNA, 25 bp, Homo sapien
ccgaagcagggctcgaaatatctga

SEQ ID NO: 5188411 - DNA, 25 bp, Homo sapien
cattggtgtatctttggcagtgctc

SEQ ID NO: 5188412 - DNA, 25 bp, Homo sapien
tcatcagcatgcaggctttgacctg

SEQ ID NO: 5188413 - DNA, 25 bp, Homo sapien
tagactcccgattggcatagcgtac

SEQ ID NO: 5188414 - DNA, 25 bp, Homo sapien
ttgagagatcacagtattgatgctg

SEQ ID NO: 5188415 - DNA, 25 bp, Homo sapien
tcccctgctcttgagagatcacagt

SEQ ID NO: 5188416 - DNA, 25 bp, Homo sapien
tcacctctccatctcccttccccat

SEQ ID NO: 5188417 - DNA, 25 bp, Homo sapien
cttcacctctccatctcccttcccc

SEQ ID NO: 5188418 - DNA, 25 bp, Homo sapien
ttcacctctccatctcccttcccca

SEQ ID NO: 5188419 - DNA, 25 bp, Homo sapien
gggccttgtgtttagactgcattac

SEQ ID NO: 5188420 - DNA, 25 bp, Homo sapien
ccctgacatctcgttcaagtcccgg

SEQ ID NO: 5188421 - DNA, 25 bp, Homo sapien
cggggggccttgtgtttagactgca

SEQ ID NO: 5188422 - DNA, 25 bp, Homo sapien
ctcccctgacatctcgttcaagtcc

SEQ ID NO: 5188423 - DNA, 25 bp, Homo sapien
caataaaattgtacacagtgggcca

SEQ ID NO: 5188424 - DNA, 25 bp, Homo sapien
tagtgcaccaatcctaaagcaggag

SEQ ID NO: 5188425 - DNA, 25 bp, Homo sapien
ttgccttcttaagcagagcaaagaa

SEQ ID NO: 5188426 - DNA, 25 bp, Homo sapien
gatccagggttatctaatagtgcac

SEQ ID NO: 5188427 - DNA, 25 bp, Homo sapien
ccatttgtcagataaggaagtggcc

SEQ ID NO: 5188428 - DNA, 25 bp, Homo sapien
cttgtacaccgtcttatgccctaga

SEQ ID NO: 5188429 - DNA, 25 bp, Homo sapien
ccccatttgtcagataaggaagtgg

SEQ ID NO: 5188430 - DNA, 25 bp, Homo sapien
gccctttcttgtacaccgtcttatg

SEQ ID NO: 5188431 - DNA, 25 bp, Homo sapien
tccaaaagactctcgggctgacagc

SEQ ID NO: 5188432 - DNA, 25 bp, Homo sapien
cattatgctcgtccttggcagagga

SEQ ID NO: 5188433 - DNA, 25 bp, Homo sapien
cacagagcccatttggagtgcaccg

SEQ ID NO: 5188434 - DNA, 25 bp, Homo sapien
cagtttgataaacggacaggcttcc

SEQ ID NO: 5188435 - DNA, 25 bp, Homo sapien
aaggagcccgcatcgccaagtcaat

SEQ ID NO: 5188436 - DNA, 25 bp, Homo sapien
gaaccaaaaaggagcccgcatcgcc

SEQ ID NO: 5188437 - DNA, 25 bp, Homo sapien
ggaaccaaaaaggagcccgcatcgc

SEQ ID NO: 5188438 - DNA, 25 bp, Homo sapien
caaaaaggagcccgcatcgccaagt

SEQ ID NO: 5188439 - DNA, 25 bp, Homo sapien
ttctgggtttacgtagagtcatagg

SEQ ID NO: 5188440 - DNA, 25 bp, Homo sapien
tacgtagagtcatagggcctaagag

SEQ ID NO: 5188441 - DNA, 25 bp, Homo sapien
cgtagagtcatagggcctaagagat

SEQ ID NO: 5188442 - DNA, 25 bp, Homo sapien
ggtttacgtagagtcatagggccta

SEQ ID NO: 5188443 - DNA, 25 bp, Homo sapien
gaaatcatcaggctttggtaggaaa

SEQ ID NO: 5188444 - DNA, 25 bp, Homo sapien
ggaaagatttgcgacttaattgaac

SEQ ID NO: 5188445 - DNA, 25 bp, Homo sapien
aagatgctctacatccactgttgta

SEQ ID NO: 5188446 - DNA, 25 bp, Homo sapien
gaacagtgactatgaaggagttaag

SEQ ID NO: 5188447 - DNA, 25 bp, Homo sapien
ctgtgtccttaggtgcccactgatg

SEQ ID NO: 5188448 - DNA, 25 bp, Homo sapien
tgtgtccttaggtgcccactgatga

SEQ ID NO: 5188449 - DNA, 25 bp, Homo sapien
cactgatgatatcctgaacctgagt

SEQ ID NO: 5188450 - DNA, 25 bp, Homo sapien
gtgcccactgatgatatcctgaacc

SEQ ID NO: 5188451 - DNA, 25 bp, Homo sapien
ggatcaggctgtgatgtactgagaa

SEQ ID NO: 5188452 - DNA, 25 bp, Homo sapien
gaactggaggactcaggataattgg

SEQ ID NO: 5188453 - DNA, 25 bp, Homo sapien
gatgtactgagaatcatttgtggtt

SEQ ID NO: 5188454 - DNA, 25 bp, Homo sapien
tatgacagttaaggacgtgggaact

SEQ ID NO: 5188455 - DNA, 25 bp, Homo sapien
tgcagcagggagatgaagtaccctg

SEQ ID NO: 5188456 - DNA, 25 bp, Homo sapien
gatgaagtaccctgatcactcatgt

SEQ ID NO: 5188457 - DNA, 25 bp, Homo sapien
ggagatgaagtaccctgatcactca

SEQ ID NO: 5188458 - DNA, 25 bp, Homo sapien
cagggagatgaagtaccctgatcac

SEQ ID NO: 5188459 - DNA, 25 bp, Homo sapien
gcatcccatggaacagactgacagt

SEQ ID NO: 5188460 - DNA, 25 bp, Homo sapien
tataacattacgatttggcaagagc

SEQ ID NO: 5188461 - DNA, 25 bp, Homo sapien
ggcaagagccatcctggtcttatta

SEQ ID NO: 5188462 - DNA, 25 bp, Homo sapien
gaagaggtgaaatgcctgcacagtg

SEQ ID NO: 5188463 - DNA, 25 bp, Homo sapien
taacagtggatgtgaagaataagaa

SEQ ID NO: 5188464 - DNA, 25 bp, Homo sapien
cagctgccaagacacttcagttctg

SEQ ID NO: 5188465 - DNA, 25 bp, Homo sapien
gtttgttcagttgagtttcatctct

SEQ ID NO: 5188466 - DNA, 25 bp, Homo sapien
tgccaagacacttcagttctgccag

SEQ ID NO: 5188467 - DNA, 25 bp, Homo sapien
gctgccaagacacttcagttctgcc

SEQ ID NO: 5188468 - DNA, 25 bp, Homo sapien
ttttcttagaggagcatatggcatc

SEQ ID NO: 5188469 - DNA, 25 bp, Homo sapien
tcctcacttgtaaacaaaccctgca

SEQ ID NO: 5188470 - DNA, 25 bp, Homo sapien
ggtaattagcatattttttcttaga

SEQ ID NO: 5188471 - DNA, 25 bp, Homo sapien
tagaggagcatatggcatcctcact

SEQ ID NO: 5188472 - DNA, 25 bp, Homo sapien
ttgcacagaaagtatcttgcttgtt

SEQ ID NO: 5188473 - DNA, 25 bp, Homo sapien
gcttgtttacttagtaggtctgcag

SEQ ID NO: 5188474 - DNA, 25 bp, Homo sapien
gtatcttgcttgtttacttagtagg

SEQ ID NO: 5188475 - DNA, 25 bp, Homo sapien
tttacttagtaggtctgcagcaatt

SEQ ID NO: 5188476 - DNA, 25 bp, Homo sapien
tgtgttgttgggtgaaaaagctgta

SEQ ID NO: 5188477 - DNA, 25 bp, Homo sapien
ctctttccttaaagctttatctata

SEQ ID NO: 5188478 - DNA, 25 bp, Homo sapien
tggcaatgtgttgttgggtgaaaaa

SEQ ID NO: 5188479 - DNA, 25 bp, Homo sapien
ttgttgggtgaaaaagctgtatagt

SEQ ID NO: 5188480 - DNA, 25 bp, Homo sapien
gccggagaccccgtatgctcatgtt

SEQ ID NO: 5188481 - DNA, 25 bp, Homo sapien
gtgccggagaccccgtatgctcatg

SEQ ID NO: 5188482 - DNA, 25 bp, Homo sapien
ttagtgccggagaccccgtatgctc

SEQ ID NO: 5188483 - DNA, 25 bp, Homo sapien
tagtgccggagaccccgtatgctca

SEQ ID NO: 5188484 - DNA, 25 bp, Homo sapien
tctcacgaaggtgtacaccagtcat

SEQ ID NO: 5188485 - DNA, 25 bp, Homo sapien
cgggctgtttctcacgaaggtgtac

SEQ ID NO: 5188486 - DNA, 25 bp, Homo sapien
gaagagtcaattcgggctgtttctc

SEQ ID NO: 5188487 - DNA, 25 bp, Homo sapien
cagtgagaagagtcaattcgggctg

SEQ ID NO: 5188488 - DNA, 25 bp, Homo sapien
gagcatccaaggaatagttttgaag

SEQ ID NO: 5188489 - DNA, 25 bp, Homo sapien
gttccaatctattcttcccacaata

SEQ ID NO: 5188490 - DNA, 25 bp, Homo sapien
catccaaggaatagttttgaagcct

SEQ ID NO: 5188491 - DNA, 25 bp, Homo sapien
gcctgttccaatctattcttcccac

SEQ ID NO: 5188492 - DNA, 25 bp, Homo sapien
tgttctcagaatcgagccagcaggg

SEQ ID NO: 5188493 - DNA, 25 bp, Homo sapien
gaatgaaacatatggcaggcagtga

SEQ ID NO: 5188494 - DNA, 25 bp, Homo sapien
tgagcactaagacttgcctgaggaa

SEQ ID NO: 5188495 - DNA, 25 bp, Homo sapien
gctgcaacacccgaataggtagctt

SEQ ID NO: 5188496 - DNA, 25 bp, Homo sapien
ccaactagtgaggagagtgacattg

SEQ ID NO: 5188497 - DNA, 25 bp, Homo sapien
gccagatatctggtgatcctaatca

SEQ ID NO: 5188498 - DNA, 25 bp, Homo sapien
gttatgggcatgcatcaggttaaac

SEQ ID NO: 5188499 - DNA, 25 bp, Homo sapien
gcattcaatctgtcatgaaacgttg

SEQ ID NO: 5188500 - DNA, 25 bp, Homo sapien
aaaataatggtgtcattctgaggat

SEQ ID NO: 5188501 - DNA, 25 bp, Homo sapien
cccaaccccagctgatttataacag

SEQ ID NO: 5188502 - DNA, 25 bp, Homo sapien
tgggagttgattataggaccccaac

SEQ ID NO: 5188503 - DNA, 25 bp, Homo sapien
ccagctgatttataacagtttccaa

SEQ ID NO: 5188504 - DNA, 25 bp, Homo sapien
tgtagatgaagttgccaccagattg

SEQ ID NO: 5188505 - DNA, 25 bp, Homo sapien
cagattgggtgactggcagccagca

SEQ ID NO: 5188506 - DNA, 25 bp, Homo sapien
aacaaatattcttacgcttccagtc

SEQ ID NO: 5188507 - DNA, 25 bp, Homo sapien
caaatattcttacgcttccagtctg

SEQ ID NO: 5188508 - DNA, 25 bp, Homo sapien
gaggtaggtagctaaatactgttca

SEQ ID NO: 5188509 - DNA, 25 bp, Homo sapien
gataatagccctctttggcagaggt

SEQ ID NO: 5188510 - DNA, 25 bp, Homo sapien
tgcgtcagagagctgaataatcatc

SEQ ID NO: 5188511 - DNA, 25 bp, Homo sapien
gagtgtgttttgacttgcgtcagag

SEQ ID NO: 5188512 - DNA, 25 bp, Homo sapien
tcattctgtgactgctgtttccagc

SEQ ID NO: 5188513 - DNA, 25 bp, Homo sapien
taatgttggttcacaaccacaagct

SEQ ID NO: 5188514 - DNA, 25 bp, Homo sapien
tgtagagtcagaaggtagcctcaac

SEQ ID NO: 5188515 - DNA, 25 bp, Homo sapien
tagcctcaactcttcggtcgcttgg

SEQ ID NO: 5188516 - DNA, 25 bp, Homo sapien
ggctctaacaatgctgctcaaactg

SEQ ID NO: 5188517 - DNA, 25 bp, Homo sapien
ttgtagactattcctctgtaaagat

SEQ ID NO: 5188518 - DNA, 25 bp, Homo sapien
aagtgttttccacaggctctaacaa

SEQ ID NO: 5188519 - DNA, 25 bp, Homo sapien
tcttcctttgtagactattcctctg

SEQ ID NO: 5188520 - DNA, 25 bp, Homo sapien
aaatcttaatcctggaataaggcat

SEQ ID NO: 5188521 - DNA, 25 bp, Homo sapien
caaaatcttaatcctggaataaggc

SEQ ID NO: 5188522 - DNA, 25 bp, Homo sapien
aaaatcttaatcctggaataaggca

SEQ ID NO: 5188523 - DNA, 25 bp, Homo sapien
gactccaaccggaagttgcattttg

SEQ ID NO: 5188524 - DNA, 25 bp, Homo sapien
gcctggccgagtgactccaaccgga

SEQ ID NO: 5188525 - DNA, 25 bp, Homo sapien
ttccagttcagagggcagtgcctgc

SEQ ID NO: 5188526 - DNA, 25 bp, Homo sapien
tgcgcgcggagccattaactcttca

SEQ ID NO: 5188527 - DNA, 25 bp, Homo sapien
aattggttgtctccgctgctcctcg

SEQ ID NO: 5188528 - DNA, 25 bp, Homo sapien
tacaaattctccgacgtcgtgcttg

SEQ ID NO: 5188529 - DNA, 25 bp, Homo sapien
agaggccgacgatgctatgctgaca

SEQ ID NO: 5188530 - DNA, 25 bp, Homo sapien
tgcttgacggattcggacacaccaa

SEQ ID NO: 5188531 - DNA, 25 bp, Homo sapien
tttcgaaagagtaaccacgatacta

SEQ ID NO: 5188532 - DNA, 25 bp, Homo sapien
ggcagtctctctcccgaagggaagt

SEQ ID NO: 5188533 - DNA, 25 bp, Homo sapien
cttgattctaggaggcagtctctct

SEQ ID NO: 5188534 - DNA, 25 bp, Homo sapien
ccacgatactacttgattctaggag

SEQ ID NO: 5188535 - DNA, 25 bp, Homo sapien
cgcctgggttcccactgtgggcggg

SEQ ID NO: 5188536 - DNA, 25 bp, Homo sapien
cttctcattgaccaggctatgatga

SEQ ID NO: 5188537 - DNA, 25 bp, Homo sapien
ttgaccaggctatgatgacacccca

SEQ ID NO: 5188538 - DNA, 25 bp, Homo sapien
actccctccgtgaccctctgggaag

SEQ ID NO: 5188539 - DNA, 25 bp, Homo sapien
tttccttcaatttcacgtcgcttct

SEQ ID NO: 5188540 - DNA, 25 bp, Homo sapien
caaccgcggtaagaaggcaggtcat

SEQ ID NO: 5188541 - DNA, 25 bp, Homo sapien
tctctcccttattataacttgtcaa

SEQ ID NO: 5188542 - DNA, 25 bp, Homo sapien
ctctcgtttgggtgtgtattccaac

SEQ ID NO: 5188543 - DNA, 25 bp, Homo sapien
gaaacagattatcgaacagtatgca

SEQ ID NO: 5188544 - DNA, 25 bp, Homo sapien
agttgtattatttgaggatccctcc

SEQ ID NO: 5188545 - DNA, 25 bp, Homo sapien
tcctgctttgcacatagttgtatta

SEQ ID NO: 5188546 - DNA, 25 bp, Homo sapien
gaggactgagaaggatttcacttcc

SEQ ID NO: 5188547 - DNA, 25 bp, Homo sapien
cagatgagtctaaagaaaagatgca

SEQ ID NO: 5188548 - DNA, 25 bp, Homo sapien
tcttacctgagataaaaagcctggg

SEQ ID NO: 5188549 - DNA, 25 bp, Homo sapien
gggacttgtcctatgaattactaga

SEQ ID NO: 5188550 - DNA, 25 bp, Homo sapien
aaatggctgcctagtcataaaaaca

SEQ ID NO: 5188551 - DNA, 25 bp, Homo sapien
gatacataaacactcatctacatac

SEQ ID NO: 5188552 - DNA, 25 bp, Homo sapien
tatttaccactattctggggaagcc

SEQ ID NO: 5188553 - DNA, 25 bp, Homo sapien
ctcatctacataccagtcacaaaat

SEQ ID NO: 5188554 - DNA, 25 bp, Homo sapien
gggaagccagcaattcactaaagca

SEQ ID NO: 5188555 - DNA, 25 bp, Homo sapien
ttctgttagatgacagcactgcccc

SEQ ID NO: 5188556 - DNA, 25 bp, Homo sapien
tgcccatgtagaagcaatacccttg

SEQ ID NO: 5188557 - DNA, 25 bp, Homo sapien
gtaggtatcctccacagttcataga

SEQ ID NO: 5188558 - DNA, 25 bp, Homo sapien
tatttaaactacatcagagcggagg

SEQ ID NO: 5188559 - DNA, 25 bp, Homo sapien
cagtcaacaacacgacatatacaca

SEQ ID NO: 5188560 - DNA, 25 bp, Homo sapien
ccccaagggtagagtgcagcaagtg

SEQ ID NO: 5188561 - DNA, 25 bp, Homo sapien
tatcttagttacatgcttgccttct

SEQ ID NO: 5188562 - DNA, 25 bp, Homo sapien
cccacaaaacacatcaggagtaaaa

SEQ ID NO: 5188563 - DNA, 25 bp, Homo sapien
tatcatagcaataggtgtttggtgg

SEQ ID NO: 5188564 - DNA, 25 bp, Homo sapien
catacttggccatggactatatcat

SEQ ID NO: 5188565 - DNA, 25 bp, Homo sapien
tctgggacttctactatctgggttt

SEQ ID NO: 5188566 - DNA, 25 bp, Homo sapien
tggactatatcatagcaataggtgt

SEQ ID NO: 5188567 - DNA, 25 bp, Homo sapien
caaaactgagggcagtcggttcttg

SEQ ID NO: 5188568 - DNA, 25 bp, Homo sapien
ggcagtcggttcttgtcccacctct

SEQ ID NO: 5188569 - DNA, 25 bp, Homo sapien
cctctccagcccagtgattgcccat

SEQ ID NO: 5188570 - DNA, 25 bp, Homo sapien
gaccagtggttcagacaagcaaaac

SEQ ID NO: 5188571 - DNA, 25 bp, Homo sapien
ccttgaaaacactctcctagttagg

SEQ ID NO: 5188572 - DNA, 25 bp, Homo sapien
gtacatcttccacaatatttgccag

SEQ ID NO: 5188573 - DNA, 25 bp, Homo sapien
aacccaagaggctgatgctatagca

SEQ ID NO: 5188574 - DNA, 25 bp, Homo sapien
tatttgccagactccaggaaaatgc

SEQ ID NO: 5188575 - DNA, 25 bp, Homo sapien
tactgctacctctgatagatgaaaa

SEQ ID NO: 5188576 - DNA, 25 bp, Homo sapien
ccacttaggaagttagtttctactg

SEQ ID NO: 5188577 - DNA, 25 bp, Homo sapien
aattaatgttgctaggatcttggcc

SEQ ID NO: 5188578 - DNA, 25 bp, Homo sapien
aaagttgaaatcctgttacgataat

SEQ ID NO: 5188579 - DNA, 25 bp, Homo sapien
tgggtgtgaaaggataccctatcaa

SEQ ID NO: 5188580 - DNA, 25 bp, Homo sapien
taatgacgagcatctttccatgagc

SEQ ID NO: 5188581 - DNA, 25 bp, Homo sapien
gatgtagcatgtaacagtacttgac

SEQ ID NO: 5188582 - DNA, 25 bp, Homo sapien
catttccactagcattgtataaggg

SEQ ID NO: 5188583 - DNA, 25 bp, Homo sapien
tcccacttatgaggtgaattcttgc

SEQ ID NO: 5188584 - DNA, 25 bp, Homo sapien
tgtacaataggatcagcaatgtggg

SEQ ID NO: 5188585 - DNA, 25 bp, Homo sapien
tagcacaaaatctagggagagccac

SEQ ID NO: 5188586 - DNA, 25 bp, Homo sapien
gatggagttcgcactgttgttacca

SEQ ID NO: 5188587 - DNA, 25 bp, Homo sapien
agatagttctataaggtttaccaca

SEQ ID NO: 5188588 - DNA, 25 bp, Homo sapien
taatgagatcaatttagataattac

SEQ ID NO: 5188589 - DNA, 25 bp, Homo sapien
gtttaccacaaacattataccacca

SEQ ID NO: 5188590 - DNA, 25 bp, Homo sapien
gagatcaatttagataattactaag

SEQ ID NO: 5188591 - DNA, 25 bp, Homo sapien
ctataaaggatggagtaaatgacag

SEQ ID NO: 5188592 - DNA, 25 bp, Homo sapien
ataaaggatggagtaaatgacaggt

SEQ ID NO: 5188593 - DNA, 25 bp, Homo sapien
tataaaggatggagtaaatgacagg

SEQ ID NO: 5188594 - DNA, 25 bp, Homo sapien
tctctatccatgcatgcctgccgga

SEQ ID NO: 5188595 - DNA, 25 bp, Homo sapien
ttttactgcagaatctctatccatg

SEQ ID NO: 5188596 - DNA, 25 bp, Homo sapien
gccggaaggcttcatacgctttatt

SEQ ID NO: 5188597 - DNA, 25 bp, Homo sapien
agttgctcgccaatgtttttatcca

SEQ ID NO: 5188598 - DNA, 25 bp, Homo sapien
tcttcagggcaatttctaacaatat

SEQ ID NO: 5188599 - DNA, 25 bp, Homo sapien
cagggcaatttctaacaatataaca

SEQ ID NO: 5188600 - DNA, 25 bp, Homo sapien
aaggagcccatcaaatcaactcttc

SEQ ID NO: 5188601 - DNA, 25 bp, Homo sapien
ctaaaattccatgtaccaagataaa

SEQ ID NO: 5188602 - DNA, 25 bp, Homo sapien
gaacgtgtaggtgaaattggagact

SEQ ID NO: 5188603 - DNA, 25 bp, Homo sapien
ctttgatcgtatggaaacatggaac

SEQ ID NO: 5188604 - DNA, 25 bp, Homo sapien
tcatgaaccagtaacagacatgtgc

SEQ ID NO: 5188605 - DNA, 25 bp, Homo sapien
ggagacttctgaaacactactatgt

SEQ ID NO: 5188606 - DNA, 25 bp, Homo sapien
ttcgttcttattacccaggctggtg

SEQ ID NO: 5188607 - DNA, 25 bp, Homo sapien
tgcaatggtgcaatctcagctcact

SEQ ID NO: 5188608 - DNA, 25 bp, Homo sapien
gcaacttccgcctcctaggttcaag

SEQ ID NO: 5188609 - DNA, 25 bp, Homo sapien
tgattctcttgccttagcttcccaa

SEQ ID NO: 5188610 - DNA, 25 bp, Homo sapien
tggctagtgatgtggtttgcctctg

SEQ ID NO: 5188611 - DNA, 25 bp, Homo sapien
ccttggctagtgatgtggtttgcct

SEQ ID NO: 5188612 - DNA, 25 bp, Homo sapien
gcctgaggctgttatcttcagaaag

SEQ ID NO: 5188613 - DNA, 25 bp, Homo sapien
agttttcccttggctagtgatgtgg

SEQ ID NO: 5188614 - DNA, 25 bp, Homo sapien
gctctgccttagtaggccatgggaa

SEQ ID NO: 5188615 - DNA, 25 bp, Homo sapien
ggtaagggccagattaggctctgcc

SEQ ID NO: 5188616 - DNA, 25 bp, Homo sapien
tgtgcctttgagatcttacccaaaa

SEQ ID NO: 5188617 - DNA, 25 bp, Homo sapien
ccaaccaaatgggatagtaaatgca

SEQ ID NO: 5188618 - DNA, 25 bp, Homo sapien
taaggctaaatactactatgttgtg

SEQ ID NO: 5188619 - DNA, 25 bp, Homo sapien
gactattcttagtgtctcacataaa

SEQ ID NO: 5188620 - DNA, 25 bp, Homo sapien
gtatccattacgcagtaattcctca

SEQ ID NO: 5188621 - DNA, 25 bp, Homo sapien
ggttctactctgtagcacgtgtaca

SEQ ID NO: 5188622 - DNA, 25 bp, Homo sapien
ctggatgaattgtactttgagtctc

SEQ ID NO: 5188623 - DNA, 25 bp, Homo sapien
gaatatctatcctgtttgtcccact

SEQ ID NO: 5188624 - DNA, 25 bp, Homo sapien
taaaagactacacccaagcttcagg

SEQ ID NO: 5188625 - DNA, 25 bp, Homo sapien
tcacagctgaagaggaatttgtctc

SEQ ID NO: 5188626 - DNA, 25 bp, Homo sapien
taaaggatttgcgtggctaccacaa

SEQ ID NO: 5188627 - DNA, 25 bp, Homo sapien
gctttcctccaatgatttattaagg

SEQ ID NO: 5188628 - DNA, 25 bp, Homo sapien
ggaagctctacagttcatgaaggaa

SEQ ID NO: 5188629 - DNA, 25 bp, Homo sapien
taagtgcccttaagttatctataat

SEQ ID NO: 5188630 - DNA, 25 bp, Homo sapien
tatttgacactccttccaatttcaa

SEQ ID NO: 5188631 - DNA, 25 bp, Homo sapien
ccatctgtatcaaacaccatctggc

SEQ ID NO: 5188632 - DNA, 25 bp, Homo sapien
tccaatttcaaagactagcaaaaca

SEQ ID NO: 5188633 - DNA, 25 bp, Homo sapien
tagcaaaacaagtggtctaccagca

SEQ ID NO: 5188634 - DNA, 25 bp, Homo sapien
ctaggagatctgcatgacaactaac

SEQ ID NO: 5188635 - DNA, 25 bp, Homo sapien
cagatggcagcaacaagttaccaac

SEQ ID NO: 5188636 - DNA, 25 bp, Homo sapien
agtcagatggcagcaacaagttacc

SEQ ID NO: 5188637 - DNA, 25 bp, Homo sapien
tgagtcagatggcagcaacaagtta

SEQ ID NO: 5188638 - DNA, 25 bp, Homo sapien
cttctgtacagagcacagacatgac

SEQ ID NO: 5188639 - DNA, 25 bp, Homo sapien
tctgtacagagcacagacatgacag

SEQ ID NO: 5188640 - DNA, 25 bp, Homo sapien
caacagcaatgtcttgtcaacactt

SEQ ID NO: 5188641 - DNA, 25 bp, Homo sapien
ttgaaaatgtacaacagcaatgtct

SEQ ID NO: 5188642 - DNA, 25 bp, Homo sapien
gcttttgttcacagaacatatctgc

SEQ ID NO: 5188643 - DNA, 25 bp, Homo sapien
cactatcaaagaccccacgaaacag

SEQ ID NO: 5188644 - DNA, 25 bp, Homo sapien
catatctgcctaaacttaaaaccag

SEQ ID NO: 5188645 - DNA, 25 bp, Homo sapien
cagaaaagtccttttacaaggtcag

SEQ ID NO: 5188646 - DNA, 25 bp, Homo sapien
gcgtatcaccaaacaatagcagaga

SEQ ID NO: 5188647 - DNA, 25 bp, Homo sapien
gacacaagtttgtactgaggaatac

SEQ ID NO: 5188648 - DNA, 25 bp, Homo sapien
gacatttcagtcaaggattcaatct

SEQ ID NO: 5188649 - DNA, 25 bp, Homo sapien
tagagtacacaaacactaaggaagt

SEQ ID NO: 5188650 - DNA, 25 bp, Homo sapien
cataaaaaccagttagcctgatatt

SEQ ID NO: 5188651 - DNA, 25 bp, Homo sapien
aaaaaccagttagcctgatattcac

SEQ ID NO: 5188652 - DNA, 25 bp, Homo sapien
gacataaaaaccagttagcctgata

SEQ ID NO: 5188653 - DNA, 25 bp, Homo sapien
ctgacataaaaaccagttagcctga

SEQ ID NO: 5188654 - DNA, 25 bp, Homo sapien
taatagtctgttgaagtgacagctg

SEQ ID NO: 5188655 - DNA, 25 bp, Homo sapien
gaagtaactgagattttagcttgtc

SEQ ID NO: 5188656 - DNA, 25 bp, Homo sapien
ctgttgttcacgtattctctgctca

SEQ ID NO: 5188657 - DNA, 25 bp, Homo sapien
gattttagcttgtcaataatagtct

SEQ ID NO: 5188658 - DNA, 25 bp, Homo sapien
tgatcaagagtcaaattattctttc

SEQ ID NO: 5188659 - DNA, 25 bp, Homo sapien
aatgctgctttctgcagaagcaatg

SEQ ID NO: 5188660 - DNA, 25 bp, Homo sapien
gctgctttctgcagaagcaatgtct

SEQ ID NO: 5188661 - DNA, 25 bp, Homo sapien
tgctttctgcagaagcaatgtctac

SEQ ID NO: 5188662 - DNA, 25 bp, Homo sapien
ttaaatgctgctttctgcagaagca

SEQ ID NO: 5188663 - DNA, 25 bp, Homo sapien
aggaagctatgtcacgcatcagcat

SEQ ID NO: 5188664 - DNA, 25 bp, Homo sapien
gaggaagctatgtcacgcatcagca

SEQ ID NO: 5188665 - DNA, 25 bp, Homo sapien
aaacaatcctcctactgagtaactg

SEQ ID NO: 5188666 - DNA, 25 bp, Homo sapien
gcttgtgatgtagaaaaacggtcag

SEQ ID NO: 5188667 - DNA, 25 bp, Homo sapien
caggcgtgtgccattctgcgtggct

SEQ ID NO: 5188668 - DNA, 25 bp, Homo sapien
tatagagatagggatccccctatgt

SEQ ID NO: 5188669 - DNA, 25 bp, Homo sapien
atattattcactctttgcacacagg

SEQ ID NO: 5188670 - DNA, 25 bp, Homo sapien
gatgtaatattattcactctttgca

SEQ ID NO: 5188671 - DNA, 25 bp, Homo sapien
ctcttaccgtctgcccaaaaatata

SEQ ID NO: 5188672 - DNA, 25 bp, Homo sapien
ggagcttttcctcttaccgtctgcc

SEQ ID NO: 5188673 - DNA, 25 bp, Homo sapien
ccaaccagactatatccttaaaggg

SEQ ID NO: 5188674 - DNA, 25 bp, Homo sapien
ggatagatgttgtctattacaatac

SEQ ID NO: 5188675 - DNA, 25 bp, Homo sapien
tgttaatgactagcaaggcttggca

SEQ ID NO: 5188676 - DNA, 25 bp, Homo sapien
taatgcttgctaattgctgtaggtc

SEQ ID NO: 5188677 - DNA, 25 bp, Homo sapien
cagaggagtaatacagaagcattat

SEQ ID NO: 5188678 - DNA, 25 bp, Homo sapien
ggagtacctgaggtactacacacaa

SEQ ID NO: 5188679 - DNA, 25 bp, Homo sapien
taaaaaaggctagtctccagaggag

SEQ ID NO: 5188680 - DNA, 25 bp, Homo sapien
ccaggagaagcggtacatttgcttt

SEQ ID NO: 5188681 - DNA, 25 bp, Homo sapien
taagagtttgtgtatcagccaggca

SEQ ID NO: 5188682 - DNA, 25 bp, Homo sapien
aagagtttgtgtatcagccaggcac

SEQ ID NO: 5188683 - DNA, 25 bp, Homo sapien
gagacaaagtctcacgcttgcccag

SEQ ID NO: 5188684 - DNA, 25 bp, Homo sapien
tcttggctcatgcaacctccatctc

SEQ ID NO: 5188685 - DNA, 25 bp, Homo sapien
attacaagcacccaccatcatgcct

SEQ ID NO: 5188686 - DNA, 25 bp, Homo sapien
tggagtgcagtggtgtgatcttggc

SEQ ID NO: 5188687 - DNA, 25 bp, Homo sapien
ggacagaagtgaggagtctcaggct

SEQ ID NO: 5188688 - DNA, 25 bp, Homo sapien
tttggccgtctagcagacatacggt

SEQ ID NO: 5188689 - DNA, 25 bp, Homo sapien
cgtctagcagacatacggtccagat

SEQ ID NO: 5188690 - DNA, 25 bp, Homo sapien
ggccatttggccgtctagcagacat

SEQ ID NO: 5188691 - DNA, 25 bp, Homo sapien
tgttatagtgaagtcaagcactgga

SEQ ID NO: 5188692 - DNA, 25 bp, Homo sapien
cagtctacatatactgagacaaaag

SEQ ID NO: 5188693 - DNA, 25 bp, Homo sapien
gatgttatagtgaagtcaagcactg

SEQ ID NO: 5188694 - DNA, 25 bp, Homo sapien
aaaagatgttatagtgaagtcaagc

SEQ ID NO: 5188695 - DNA, 25 bp, Homo sapien
aatggaatgacctccttatagtgag

SEQ ID NO: 5188696 - DNA, 25 bp, Homo sapien
taaactaggaatgactgcttctgag

SEQ ID NO: 5188697 - DNA, 25 bp, Homo sapien
gacaaacctttgtctcgcttggtaa

SEQ ID NO: 5188698 - DNA, 25 bp, Homo sapien
ggtaaagatagtgctccaaattcca

SEQ ID NO: 5188699 - DNA, 25 bp, Homo sapien
aaaggactgccaagactccttgctg

SEQ ID NO: 5188700 - DNA, 25 bp, Homo sapien
tagtagagctttacagaattcaagt

SEQ ID NO: 5188701 - DNA, 25 bp, Homo sapien
ggtaaggttcacattaggagccatc

SEQ ID NO: 5188702 - DNA, 25 bp, Homo sapien
gggttggtcacttccacttattcta

SEQ ID NO: 5188703 - DNA, 25 bp, Homo sapien
ttcaagttttagattcagctctgct

SEQ ID NO: 5188704 - DNA, 25 bp, Homo sapien
atatagtatagtctagcatatctac

SEQ ID NO: 5188705 - DNA, 25 bp, Homo sapien
tagtctagcatatctacttattcat

SEQ ID NO: 5188706 - DNA, 25 bp, Homo sapien
tagtatagtctagcatatctactta

SEQ ID NO: 5188707 - DNA, 25 bp, Homo sapien
taaatatagtatagtctagcatatc

SEQ ID NO: 5188708 - DNA, 25 bp, Homo sapien
ttcctaaacaatgtccccaaaatca

SEQ ID NO: 5188709 - DNA, 25 bp, Homo sapien
cctaaacaatgtccccaaaatcagc

SEQ ID NO: 5188710 - DNA, 25 bp, Homo sapien
tgtagtaccattttatgtgccacaa

SEQ ID NO: 5188711 - DNA, 25 bp, Homo sapien
taaataatcaaacttatgtagtacc

SEQ ID NO: 5188712 - DNA, 25 bp, Homo sapien
tctttcagatcccagaaagtcttct

SEQ ID NO: 5188713 - DNA, 25 bp, Homo sapien
ttcagatcccagaaagtcttctcta

SEQ ID NO: 5188714 - DNA, 25 bp, Homo sapien
tttcagatcccagaaagtcttctct

SEQ ID NO: 5188715 - DNA, 25 bp, Homo sapien
tcttctttcagatcccagaaagtct

SEQ ID NO: 5188716 - DNA, 25 bp, Homo sapien
taagtttgcttaagtggtctttctg

SEQ ID NO: 5188717 - DNA, 25 bp, Homo sapien
cagttgcagtgtctggtatattaag

SEQ ID NO: 5188718 - DNA, 25 bp, Homo sapien
ctggtatattaagtttgcttaagtg

SEQ ID NO: 5188719 - DNA, 25 bp, Homo sapien
ggtctttctgtgcttttgctagcat

SEQ ID NO: 5188720 - DNA, 25 bp, Homo sapien
taccactgtcagagtataatattta

SEQ ID NO: 5188721 - DNA, 25 bp, Homo sapien
caaaacttcactagagtctgtagca

SEQ ID NO: 5188722 - DNA, 25 bp, Homo sapien
tacttggaaaccctgaataggcatc

SEQ ID NO: 5188723 - DNA, 25 bp, Homo sapien
tccttttgatataccactgtcagag

SEQ ID NO: 5188724 - DNA, 25 bp, Homo sapien
ctgccatatgtagatgagtagaaaa

SEQ ID NO: 5188725 - DNA, 25 bp, Homo sapien
gccatatgtagatgagtagaaaaaa

SEQ ID NO: 5188726 - DNA, 25 bp, Homo sapien
gtctactgccatatgtagatgagta

SEQ ID NO: 5188727 - DNA, 25 bp, Homo sapien
tactgccatatgtagatgagtagaa

SEQ ID NO: 5188728 - DNA, 25 bp, Homo sapien
tatagagcacttaccgtgaatggaa

SEQ ID NO: 5188729 - DNA, 25 bp, Homo sapien
gcctgtatagagcacttaccgtgaa

SEQ ID NO: 5188730 - DNA, 25 bp, Homo sapien
agcacttaccgtgaatggaatttgc

SEQ ID NO: 5188731 - DNA, 25 bp, Homo sapien
aaatgggtatgcctgtatagagcac

SEQ ID NO: 5188732 - DNA, 25 bp, Homo sapien
gagaaacagccgcattcaaatcatt

SEQ ID NO: 5188733 - DNA, 25 bp, Homo sapien
tatagcaaatgaagacaactgggat

SEQ ID NO: 5188734 - DNA, 25 bp, Homo sapien
gaatattagcagtctccagcgggtg

SEQ ID NO: 5188735 - DNA, 25 bp, Homo sapien
cattttgtcagtaacggaagctata

SEQ ID NO: 5188736 - DNA, 25 bp, Homo sapien
ccaggtggcaaacacgcagctctat

SEQ ID NO: 5188737 - DNA, 25 bp, Homo sapien
tagcctgaggcttaaacagcgcttc

SEQ ID NO: 5188738 - DNA, 25 bp, Homo sapien
gcaggactaaggatgccgggtctct

SEQ ID NO: 5188739 - DNA, 25 bp, Homo sapien
tatccgtacactgtataggcacaga

SEQ ID NO: 5188740 - DNA, 25 bp, Homo sapien
gctccacaggaattctacttgcaat

SEQ ID NO: 5188741 - DNA, 25 bp, Homo sapien
tagaactgatgcacttcacagctcc

SEQ ID NO: 5188742 - DNA, 25 bp, Homo sapien
cacgacagatatggataaggcttaa

SEQ ID NO: 5188743 - DNA, 25 bp, Homo sapien
aaaacttattgtcagccatgcctag

SEQ ID NO: 5188744 - DNA, 25 bp, Homo sapien
tttcccttgctgtagtatagaaagc

SEQ ID NO: 5188745 - DNA, 25 bp, Homo sapien
ttcccttgctgtagtatagaaagca

SEQ ID NO: 5188746 - DNA, 25 bp, Homo sapien
cccttgctgtagtatagaaagcaaa

SEQ ID NO: 5188747 - DNA, 25 bp, Homo sapien
tgtttcccttgctgtagtatagaaa

SEQ ID NO: 5188748 - DNA, 25 bp, Homo sapien
tttccatcaagttgtaatcacatac

SEQ ID NO: 5188749 - DNA, 25 bp, Homo sapien
caattatctaaccttatgccccatg

SEQ ID NO: 5188750 - DNA, 25 bp, Homo sapien
ccccatgtcttgtgacaactcaaca

SEQ ID NO: 5188751 - DNA, 25 bp, Homo sapien
ctttccatcctaaactgtaacatgg

SEQ ID NO: 5188752 - DNA, 25 bp, Homo sapien
ccaactcaggaattttgtacttata

SEQ ID NO: 5188753 - DNA, 25 bp, Homo sapien
ttgctactatctacaaacaactcag

SEQ ID NO: 5188754 - DNA, 25 bp, Homo sapien
ctttagtcttggttatgatagctga

SEQ ID NO: 5188755 - DNA, 25 bp, Homo sapien
tagttgggatcccactcactgactc

SEQ ID NO: 5188756 - DNA, 25 bp, Homo sapien
ctcttcatagaatttagttgggatc

SEQ ID NO: 5188757 - DNA, 25 bp, Homo sapien
gagtctgtgccacttagtaccaccg

SEQ ID NO: 5188758 - DNA, 25 bp, Homo sapien
cacatactcgaggtatatgcagttc

SEQ ID NO: 5188759 - DNA, 25 bp, Homo sapien
ctgtcttgattaggaaagggcttcc

SEQ ID NO: 5188760 - DNA, 25 bp, Homo sapien
gaagtgtgaattaagatgccgaagg

SEQ ID NO: 5188761 - DNA, 25 bp, Homo sapien
catcatgtagctatacacacagtaa

SEQ ID NO: 5188762 - DNA, 25 bp, Homo sapien
ccctagaaacatttgacatcaccaa

SEQ ID NO: 5188763 - DNA, 25 bp, Homo sapien
caaagagaatatcacctatagcata

SEQ ID NO: 5188764 - DNA, 25 bp, Homo sapien
tcaacagctctcactagaaatccaa

SEQ ID NO: 5188765 - DNA, 25 bp, Homo sapien
tactcaggaacaaaggacatacaaa

SEQ ID NO: 5188766 - DNA, 25 bp, Homo sapien
caggaacaaaggacatacaaatgat

SEQ ID NO: 5188767 - DNA, 25 bp, Homo sapien
tttttactcaggaacaaaggacata

SEQ ID NO: 5188768 - DNA, 25 bp, Homo sapien
aaggacatacaaatgatcacaacat

SEQ ID NO: 5188769 - DNA, 25 bp, Homo sapien
tctcttttcttcccgacttctgctt

SEQ ID NO: 5188770 - DNA, 25 bp, Homo sapien
ctgcttttctcttttcttcccgact

SEQ ID NO: 5188771 - DNA, 25 bp, Homo sapien
ctcgtaatcagcctgctgcttttct

SEQ ID NO: 5188772 - DNA, 25 bp, Homo sapien
tcgtaatcagcctgctgcttttctc

SEQ ID NO: 5188773 - DNA, 25 bp, Homo sapien
tcttctcacccctgattgctatcac

SEQ ID NO: 5188774 - DNA, 25 bp, Homo sapien
gccgcactcttctcacccctgattg

SEQ ID NO: 5188775 - DNA, 25 bp, Homo sapien
tcacccctgattgctatcaccttct

SEQ ID NO: 5188776 - DNA, 25 bp, Homo sapien
gcactcttctcacccctgattgcta

SEQ ID NO: 5188777 - DNA, 25 bp, Homo sapien
aagttggcaatctaggaactggtcc

SEQ ID NO: 5188778 - DNA, 25 bp, Homo sapien
gctcccacaatctttcgctaaacag

SEQ ID NO: 5188779 - DNA, 25 bp, Homo sapien
gccttcttgaactgtaagctcccac

SEQ ID NO: 5188780 - DNA, 25 bp, Homo sapien
aataggcacatgttttagcacggtt

SEQ ID NO: 5188781 - DNA, 25 bp, Homo sapien
aacgtcaaagggttgcataatcagg

SEQ ID NO: 5188782 - DNA, 25 bp, Homo sapien
catgggagatgggttaaacgtcaaa

SEQ ID NO: 5188783 - DNA, 25 bp, Homo sapien
taaccctctatagtcaggacaaggg

SEQ ID NO: 5188784 - DNA, 25 bp, Homo sapien
tggtatagccctaaacaacaaagga

SEQ ID NO: 5188785 - DNA, 25 bp, Homo sapien
cctagcatgtctgcaagtggaatgt

SEQ ID NO: 5188786 - DNA, 25 bp, Homo sapien
tctgcaagtggaatgtcagttacag

SEQ ID NO: 5188787 - DNA, 25 bp, Homo sapien
tgcaagtggaatgtcagttacagtg

SEQ ID NO: 5188788 - DNA, 25 bp, Homo sapien
catgtctgcaagtggaatgtcagtt

SEQ ID NO: 5188789 - DNA, 25 bp, Homo sapien
caatgcccgcatctcagtttcgctt

SEQ ID NO: 5188790 - DNA, 25 bp, Homo sapien
gagggaggaattctcaggtgtcacc

SEQ ID NO: 5188791 - DNA, 25 bp, Homo sapien
cagtttcgctttccggcagggtcag

SEQ ID NO: 5188792 - DNA, 25 bp, Homo sapien
gtgtcacctcctcacccgcctggag

SEQ ID NO: 5188793 - DNA, 25 bp, Homo sapien
tggaacacattaatcctgacgtagt

SEQ ID NO: 5188794 - DNA, 25 bp, Homo sapien
acacattaatcctgacgtagttaac

SEQ ID NO: 5188795 - DNA, 25 bp, Homo sapien
aagtggaacacattaatcctgacgt

SEQ ID NO: 5188796 - DNA, 25 bp, Homo sapien
gaacacattaatcctgacgtagtta

SEQ ID NO: 5188797 - DNA, 25 bp, Homo sapien
atgcatttgaggagttaagtttagc

SEQ ID NO: 5188798 - DNA, 25 bp, Homo sapien
gcatttgaggagttaagtttagcat

SEQ ID NO: 5188799 - DNA, 25 bp, Homo sapien
aatgcatttgaggagttaagtttag

SEQ ID NO: 5188800 - DNA, 25 bp, Homo sapien
tgcatttgaggagttaagtttagca

SEQ ID NO: 5188801 - DNA, 25 bp, Homo sapien
gctgttttggctctgaactcaatcc

SEQ ID NO: 5188802 - DNA, 25 bp, Homo sapien
actcaatccgataagcttgctggag

SEQ ID NO: 5188803 - DNA, 25 bp, Homo sapien
gaggtatcgcagagcacttggcagc

SEQ ID NO: 5188804 - DNA, 25 bp, Homo sapien
gctgatcgtctatcagcgatagacc

SEQ ID NO: 5188805 - DNA, 25 bp, Homo sapien
ccccaggatgtgaagcttgttccaa

SEQ ID NO: 5188806 - DNA, 25 bp, Homo sapien
tctttttcacgaggatgctgaagct

SEQ ID NO: 5188807 - DNA, 25 bp, Homo sapien
tccatggaaaggacttaatttctcc

SEQ ID NO: 5188808 - DNA, 25 bp, Homo sapien
tgttccaattgcaagctgtagtgga

SEQ ID NO: 5188809 - DNA, 25 bp, Homo sapien
tgcgtggaggatacaaacgacattc

SEQ ID NO: 5188810 - DNA, 25 bp, Homo sapien
tgctgggcaacataaaccataaacc

SEQ ID NO: 5188811 - DNA, 25 bp, Homo sapien
taaaccataaaccttgctggatttc

SEQ ID NO: 5188812 - DNA, 25 bp, Homo sapien
gcaaactgctgcgtggaggatacaa

SEQ ID NO: 5188813 - DNA, 25 bp, Homo sapien
taggttacagccaagactggataca

SEQ ID NO: 5188814 - DNA, 25 bp, Homo sapien
tctgatttcaccatagaggtaggca

SEQ ID NO: 5188815 - DNA, 25 bp, Homo sapien
gaagacttcaaactatgccaaatgg

SEQ ID NO: 5188816 - DNA, 25 bp, Homo sapien
taatcctagccagaactatcgcagg

SEQ ID NO: 5188817 - DNA, 25 bp, Homo sapien
ccgtgtagctaactgcttcaaattg

SEQ ID NO: 5188818 - DNA, 25 bp, Homo sapien
catacaaaactgtccgtgtagctaa

SEQ ID NO: 5188819 - DNA, 25 bp, Homo sapien
caaatttgcaacctagtttaactgg

SEQ ID NO: 5188820 - DNA, 25 bp, Homo sapien
tacgctaaattagggccaaatttgc

SEQ ID NO: 5188821 - DNA, 25 bp, Homo sapien
ttttagcaggtggtcatgcgtgcct

SEQ ID NO: 5188822 - DNA, 25 bp, Homo sapien
ctgaaggacttgcaatactagatat

SEQ ID NO: 5188823 - DNA, 25 bp, Homo sapien
tcaataaacttgcagggacaagctg

SEQ ID NO: 5188824 - DNA, 25 bp, Homo sapien
aatcagtggagtggaaattaatctc

SEQ ID NO: 5188825 - DNA, 25 bp, Homo sapien
acaaagcatagtgcttgcatcagcc

SEQ ID NO: 5188826 - DNA, 25 bp, Homo sapien
tcattaccttgaggacaacaccagg

SEQ ID NO: 5188827 - DNA, 25 bp, Homo sapien
agatcttgtgtgaacccatagagca

SEQ ID NO: 5188828 - DNA, 25 bp, Homo sapien
tgaacccatagagcaacaactcatt

SEQ ID NO: 5188829 - DNA, 25 bp, Homo sapien
ccggatcgtgatcctattcagtgca

SEQ ID NO: 5188830 - DNA, 25 bp, Homo sapien
acagagcgagtgctcgtgtacacgc

SEQ ID NO: 5188831 - DNA, 25 bp, Homo sapien
cataataccagcttgtgtttacatt

SEQ ID NO: 5188832 - DNA, 25 bp, Homo sapien
tacattttcagctctccggatcgtg

SEQ ID NO: 5188833 - DNA, 25 bp, Homo sapien
taggcaaaaacacatggttcctggg

SEQ ID NO: 5188834 - DNA, 25 bp, Homo sapien
ctggggaccccgtcaagcggataag

SEQ ID NO: 5188835 - DNA, 25 bp, Homo sapien
ttgcattgaagcttagccaactagg

SEQ ID NO: 5188836 - DNA, 25 bp, Homo sapien
tagccaactaggcaaaaacacatgg

SEQ ID NO: 5188837 - DNA, 25 bp, Homo sapien
gtctgccattgttaatggtgtacag

SEQ ID NO: 5188838 - DNA, 25 bp, Homo sapien
cagtctgccattgttaatggtgtac

SEQ ID NO: 5188839 - DNA, 25 bp, Homo sapien
tcagtctgccattgttaatggtgta

SEQ ID NO: 5188840 - DNA, 25 bp, Homo sapien
atcagtctgccattgttaatggtgt

SEQ ID NO: 5188841 - DNA, 25 bp, Homo sapien
gggacgccgacatgctggagtgtag

SEQ ID NO: 5188842 - DNA, 25 bp, Homo sapien
aggagggtcatgctagccatgtcac

SEQ ID NO: 5188843 - DNA, 25 bp, Homo sapien
atcagcagtgtcactgccaggaagg

SEQ ID NO: 5188844 - DNA, 25 bp, Homo sapien
tgtcactgccaggaaggagggtcat

SEQ ID NO: 5188845 - DNA, 25 bp, Homo sapien
gaaggagggtcatgctagccatgtc

SEQ ID NO: 5188846 - DNA, 25 bp, Homo sapien
ctttcgttttggtgttcactactat

SEQ ID NO: 5188847 - DNA, 25 bp, Homo sapien
ggctaggaaatagaactgttagtat

SEQ ID NO: 5188848 - DNA, 25 bp, Homo sapien
ctgttagtattttgaagcccagatc

SEQ ID NO: 5188849 - DNA, 25 bp, Homo sapien
tattattgccctcctcaaaaactaa

SEQ ID NO: 5188850 - DNA, 25 bp, Homo sapien
tcaagcggatgtccaggaggagctc

SEQ ID NO: 5188851 - DNA, 25 bp, Homo sapien
ggcgtctcctgtctctggcaggact

SEQ ID NO: 5188852 - DNA, 25 bp, Homo sapien
tgaggcggcacttagcgccctggtc

SEQ ID NO: 5188853 - DNA, 25 bp, Homo sapien
ttccccgacggccaattggagacga

SEQ ID NO: 5188854 - DNA, 25 bp, Homo sapien
tccgccgcgaagcacttccgggttc

SEQ ID NO: 5188855 - DNA, 25 bp, Homo sapien
caaaccggcgatgaatcagcccgat

SEQ ID NO: 5188856 - DNA, 25 bp, Homo sapien
tcagcccgattccattcaaaagagt

SEQ ID NO: 5188857 - DNA, 25 bp, Homo sapien
cattcaaaagagttgcccgggcctc

SEQ ID NO: 5188858 - DNA, 25 bp, Homo sapien
gatgccgcgatatggacccttgtct

SEQ ID NO: 5188859 - DNA, 25 bp, Homo sapien
gcctctgtggtgacgcgaagacaga

SEQ ID NO: 5188860 - DNA, 25 bp, Homo sapien
cttgcctctgtggtgacgcgaagac

SEQ ID NO: 5188861 - DNA, 25 bp, Homo sapien
cgggagccggatgccgcgatatgga

SEQ ID NO: 5188862 - DNA, 25 bp, Homo sapien
tgagagcaggcgaagagaatgaagg

SEQ ID NO: 5188863 - DNA, 25 bp, Homo sapien
tcagctgggcaacgtgactcaggaa

SEQ ID NO: 5188864 - DNA, 25 bp, Homo sapien
tggcggcggcctagcacggctgcct

SEQ ID NO: 5188865 - DNA, 25 bp, Homo sapien
tcctgtggcaactcagctgggcaac

SEQ ID NO: 5188866 - DNA, 25 bp, Homo sapien
aacaggccataaacaaggattctct

SEQ ID NO: 5188867 - DNA, 25 bp, Homo sapien
tcccatgatgtgaattcggccaaac

SEQ ID NO: 5188868 - DNA, 25 bp, Homo sapien
caactatggatagagcacagacaaa

SEQ ID NO: 5188869 - DNA, 25 bp, Homo sapien
aaagcagaccggttaacaactatgg

SEQ ID NO: 5188870 - DNA, 25 bp, Homo sapien
gcagtgtatctgcaggacttttgtt

SEQ ID NO: 5188871 - DNA, 25 bp, Homo sapien
tttaagatattcaaggtccaaaagc

SEQ ID NO: 5188872 - DNA, 25 bp, Homo sapien
tgtttttaagatattcaaggtccaa

SEQ ID NO: 5188873 - DNA, 25 bp, Homo sapien
taaagaaagctcttgctaattctgg

SEQ ID NO: 5188874 - DNA, 25 bp, Homo sapien
ggcaggtacaacttccccaagtata

SEQ ID NO: 5188875 - DNA, 25 bp, Homo sapien
tcttgctaattctggcaggtacaac

SEQ ID NO: 5188876 - DNA, 25 bp, Homo sapien
aggtgttaaccttcaatttgttgag

SEQ ID NO: 5188877 - DNA, 25 bp, Homo sapien
atacctcctccaagtctaagaagtc

SEQ ID NO: 5188878 - DNA, 25 bp, Homo sapien
caggcatacctcctccaagtctaag

SEQ ID NO: 5188879 - DNA, 25 bp, Homo sapien
ggcatacctcctccaagtctaagaa

SEQ ID NO: 5188880 - DNA, 25 bp, Homo sapien
gcatacctcctccaagtctaagaag

SEQ ID NO: 5188881 - DNA, 25 bp, Homo sapien
ccatagagttatctgttaggtgatt

SEQ ID NO: 5188882 - DNA, 25 bp, Homo sapien
tctctttggctaactacaaaaaggc

SEQ ID NO: 5188883 - DNA, 25 bp, Homo sapien
caaaaaggcttgtagtttacacaca

SEQ ID NO: 5188884 - DNA, 25 bp, Homo sapien
gattcttaccatagagttatctgtt

SEQ ID NO: 5188885 - DNA, 25 bp, Homo sapien
cttactggctaccactgcttcagca

SEQ ID NO: 5188886 - DNA, 25 bp, Homo sapien
catcatctaatgaacaggcctctcc

SEQ ID NO: 5188887 - DNA, 25 bp, Homo sapien
aatatgtttcgaaatctggtagagc

SEQ ID NO: 5188888 - DNA, 25 bp, Homo sapien
tggcatgtggtgatatagagtcctc

SEQ ID NO: 5188889 - DNA, 25 bp, Homo sapien
ttaggcacattaacactgtcgcaca

SEQ ID NO: 5188890 - DNA, 25 bp, Homo sapien
aattatgaatcttttgagttgtgct

SEQ ID NO: 5188891 - DNA, 25 bp, Homo sapien
catctggttggtattatcaacctta

SEQ ID NO: 5188892 - DNA, 25 bp, Homo sapien
ggaagggtatctgctatgcacctga

SEQ ID NO: 5188893 - DNA, 25 bp, Homo sapien
ggacataaagaaactggtaacagag

SEQ ID NO: 5188894 - DNA, 25 bp, Homo sapien
gaggttgtctctaaagaagggaaca

SEQ ID NO: 5188895 - DNA, 25 bp, Homo sapien
acagagacaacagggaaacttagta

SEQ ID NO: 5188896 - DNA, 25 bp, Homo sapien
agggaacagagacaacagggaaact

SEQ ID NO: 5188897 - DNA, 25 bp, Homo sapien
agtttccgaccctggcttataggca

SEQ ID NO: 5188898 - DNA, 25 bp, Homo sapien
gaatgtccagcatcaacccctatgg

SEQ ID NO: 5188899 - DNA, 25 bp, Homo sapien
agcaatagtcatgcccttgtccagg

SEQ ID NO: 5188900 - DNA, 25 bp, Homo sapien
cattgccttcaacacagagccacgt

SEQ ID NO: 5188901 - DNA, 25 bp, Homo sapien
gcccctgcgcccccgagccggcggc

SEQ ID NO: 5188902 - DNA, 25 bp, Homo sapien
gcccgcggggccggaggagcctgga

SEQ ID NO: 5188903 - DNA, 25 bp, Homo sapien
cccgagccggcggcctcgcccgcgg

SEQ ID NO: 5188904 - DNA, 25 bp, Homo sapien
ccgcccctgcgcccccgagccggcg

SEQ ID NO: 5188905 - DNA, 25 bp, Homo sapien
ctctggtcttcaaaaaagtgttaag

SEQ ID NO: 5188906 - DNA, 25 bp, Homo sapien
gataaaaagacaagcccatgtactg

SEQ ID NO: 5188907 - DNA, 25 bp, Homo sapien
ggagaaaatatctgcgaattatata

SEQ ID NO: 5188908 - DNA, 25 bp, Homo sapien
tatatttgataaagaacttctattc

SEQ ID NO: 5188909 - DNA, 25 bp, Homo sapien
gcatgatctcagaggtttccagatg

SEQ ID NO: 5188910 - DNA, 25 bp, Homo sapien
tctgataaggtgcataatcacagca

SEQ ID NO: 5188911 - DNA, 25 bp, Homo sapien
tattctgataaggtgcataatcaca

SEQ ID NO: 5188912 - DNA, 25 bp, Homo sapien
catgatctcagaggtttccagatgg

SEQ ID NO: 5188913 - DNA, 25 bp, Homo sapien
agagatatagacttgttctgctgtg

SEQ ID NO: 5188914 - DNA, 25 bp, Homo sapien
ctgcaggagcatctgtaggtggccc

SEQ ID NO: 5188915 - DNA, 25 bp, Homo sapien
actgcaggagcatctgtaggtggcc

SEQ ID NO: 5188916 - DNA, 25 bp, Homo sapien
gatatagacttgttctgctgtgtcc

SEQ ID NO: 5188917 - DNA, 25 bp, Homo sapien
gcatcaaacccataacttccattgg

SEQ ID NO: 5188918 - DNA, 25 bp, Homo sapien
attggaactccagcacggccatgtt

SEQ ID NO: 5188919 - DNA, 25 bp, Homo sapien
tcactctgacggtataatcatcaac

SEQ ID NO: 5188920 - DNA, 25 bp, Homo sapien
tcctgactgtggcatagcaaacaca

SEQ ID NO: 5188921 - DNA, 25 bp, Homo sapien
tagagtgaatatagggatcaaaatc

SEQ ID NO: 5188922 - DNA, 25 bp, Homo sapien
ggtatctacataagtacccataaca

SEQ ID NO: 5188923 - DNA, 25 bp, Homo sapien
aaacctttggttaacatgtagagtg

SEQ ID NO: 5188924 - DNA, 25 bp, Homo sapien
cagtagatccaaattagtttacctc

SEQ ID NO: 5188925 - DNA, 25 bp, Homo sapien
tccaacattttagcttggaacactg

SEQ ID NO: 5188926 - DNA, 25 bp, Homo sapien
ttttagcttggaacactggatcaac

SEQ ID NO: 5188927 - DNA, 25 bp, Homo sapien
cttcaacatatccaacattttagct

SEQ ID NO: 5188928 - DNA, 25 bp, Homo sapien
caacatatccaacattttagcttgg

SEQ ID NO: 5188929 - DNA, 25 bp, Homo sapien
agctctctccgacaaggcttcaaag

SEQ ID NO: 5188930 - DNA, 25 bp, Homo sapien
tctgaatgggatccacaaccactgc

SEQ ID NO: 5188931 - DNA, 25 bp, Homo sapien
tgttgatatccacaccagaaagcca

SEQ ID NO: 5188932 - DNA, 25 bp, Homo sapien
cagggtgactgtgataccaaccaac

SEQ ID NO: 5188933 - DNA, 25 bp, Homo sapien
tgtcatgaggcaggaaataggaaaa

SEQ ID NO: 5188934 - DNA, 25 bp, Homo sapien
gcaggaaataggaaaatggcatatg

SEQ ID NO: 5188935 - DNA, 25 bp, Homo sapien
ctgtcatgaggcaggaaataggaaa

SEQ ID NO: 5188936 - DNA, 25 bp, Homo sapien
ggaaataggaaaatggcatatgggg

SEQ ID NO: 5188937 - DNA, 25 bp, Homo sapien
aatccactctccctgtggttgagca

SEQ ID NO: 5188938 - DNA, 25 bp, Homo sapien
cagctctgtgaaggtgataatagag

SEQ ID NO: 5188939 - DNA, 25 bp, Homo sapien
ttaaagcagtaaccacctagccaat

SEQ ID NO: 5188940 - DNA, 25 bp, Homo sapien
gagcaaaatcgaattgcctctcaca

SEQ ID NO: 5188941 - DNA, 25 bp, Homo sapien
catgtaatggtaacagggcctatct

SEQ ID NO: 5188942 - DNA, 25 bp, Homo sapien
tgttctgctgctaactcatggtctg

SEQ ID NO: 5188943 - DNA, 25 bp, Homo sapien
cacagtaacttaaggaatggcctca

SEQ ID NO: 5188944 - DNA, 25 bp, Homo sapien
tattcacaatacctggctcacagca

SEQ ID NO: 5188945 - DNA, 25 bp, Homo sapien
tgaactaaatgctgcaagcggacct

SEQ ID NO: 5188946 - DNA, 25 bp, Homo sapien
gataatacaacattcagcaggaggt

SEQ ID NO: 5188947 - DNA, 25 bp, Homo sapien
tgcctcaagaaagaagtatagtcac

SEQ ID NO: 5188948 - DNA, 25 bp, Homo sapien
tgagcattttactaacaggaaccca

SEQ ID NO: 5188949 - DNA, 25 bp, Homo sapien
catgcccaagggtcaaggatctatc

SEQ ID NO: 5188950 - DNA, 25 bp, Homo sapien
tcaactgctaggtcactgaaagact

SEQ ID NO: 5188951 - DNA, 25 bp, Homo sapien
gatataacagccaagtagaagacac

SEQ ID NO: 5188952 - DNA, 25 bp, Homo sapien
tggtctatgcgcaactcacagatca

SEQ ID NO: 5188953 - DNA, 25 bp, Homo sapien
tgaatctgcagcatatgatagttta

SEQ ID NO: 5188954 - DNA, 25 bp, Homo sapien
ttgttaaattcatgttaaaggtctg

SEQ ID NO: 5188955 - DNA, 25 bp, Homo sapien
tctgcagcatatgatagtttataat

SEQ ID NO: 5188956 - DNA, 25 bp, Homo sapien
gtttataatttctcaggcttgttaa

SEQ ID NO: 5188957 - DNA, 25 bp, Homo sapien
ttggctagcttagggaaacctctta

SEQ ID NO: 5188958 - DNA, 25 bp, Homo sapien
caggaatatgatgctagactttgaa

SEQ ID NO: 5188959 - DNA, 25 bp, Homo sapien
ttttttctggtacaagtgccttgag

SEQ ID NO: 5188960 - DNA, 25 bp, Homo sapien
tgctgaaggcctacacaatacattg

SEQ ID NO: 5188961 - DNA, 25 bp, Homo sapien
gaattgccaccctaactgttaacag

SEQ ID NO: 5188962 - DNA, 25 bp, Homo sapien
tgttcaacaacctgcagaccaaaat

SEQ ID NO: 5188963 - DNA, 25 bp, Homo sapien
ctaagattaaaggaatttgctgcca

SEQ ID NO: 5188964 - DNA, 25 bp, Homo sapien
caatgatggcctatagaaaatgact

SEQ ID NO: 5188965 - DNA, 25 bp, Homo sapien
tattctcttctagtcagataccttt

SEQ ID NO: 5188966 - DNA, 25 bp, Homo sapien
ggccttaaatgtccaagccactgtc

SEQ ID NO: 5188967 - DNA, 25 bp, Homo sapien
gccactgtcaagtataaaaggcaca

SEQ ID NO: 5188968 - DNA, 25 bp, Homo sapien
tgtctgatggccttaaatgtccaag

SEQ ID NO: 5188969 - DNA, 25 bp, Homo sapien
cattgatcaatctgaaggcatcaat

SEQ ID NO: 5188970 - DNA, 25 bp, Homo sapien
gtttgtcttggttcatgtcctaaga

SEQ ID NO: 5188971 - DNA, 25 bp, Homo sapien
gcttgtttaagtgacccagattcga

SEQ ID NO: 5188972 - DNA, 25 bp, Homo sapien
cccagattcgaagttgtttgtcttg

SEQ ID NO: 5188973 - DNA, 25 bp, Homo sapien
gctcttatccagtgacatgcaatct

SEQ ID NO: 5188974 - DNA, 25 bp, Homo sapien
gccttgctcagtcagagataaggtt

SEQ ID NO: 5188975 - DNA, 25 bp, Homo sapien
tagaggaacgggttacacattcttc

SEQ ID NO: 5188976 - DNA, 25 bp, Homo sapien
tatggaggagcacaaattaagcagt

SEQ ID NO: 5188977 - DNA, 25 bp, Homo sapien
catttttccgatagttaatagtaat

SEQ ID NO: 5188978 - DNA, 25 bp, Homo sapien
ggagtaataatgtctgtttagtcca

SEQ ID NO: 5188979 - DNA, 25 bp, Homo sapien
tccagttcatttttccgatagttaa

SEQ ID NO: 5188980 - DNA, 25 bp, Homo sapien
taatagtaatggagtaataatgtct

SEQ ID NO: 5188981 - DNA, 25 bp, Homo sapien
ccaaggacactaattctcccatttt

SEQ ID NO: 5188982 - DNA, 25 bp, Homo sapien
caaggacactaattctcccattttc

SEQ ID NO: 5188983 - DNA, 25 bp, Homo sapien
tggctccaaggacactaattctccc

SEQ ID NO: 5188984 - DNA, 25 bp, Homo sapien
cactgtagtcctgaagtgtcaaacc

SEQ ID NO: 5188985 - DNA, 25 bp, Homo sapien
ttccatccaactcttcttatgcaaa

SEQ ID NO: 5188986 - DNA, 25 bp, Homo sapien
tgtgtttacaatgttcactgtagtc

SEQ ID NO: 5188987 - DNA, 25 bp, Homo sapien
tctcttttaccactgattcattgtg

SEQ ID NO: 5188988 - DNA, 25 bp, Homo sapien
actgttcaccctcacgttctatgca

SEQ ID NO: 5188989 - DNA, 25 bp, Homo sapien
catgctagccaagcatattgtttct

SEQ ID NO: 5188990 - DNA, 25 bp, Homo sapien
ccaagtgctattactagacttcaga

SEQ ID NO: 5188991 - DNA, 25 bp, Homo sapien
tcttatcctgacatcccaagtgcta

SEQ ID NO: 5188992 - DNA, 25 bp, Homo sapien
catgcctctgatcaaaaataactct

SEQ ID NO: 5188993 - DNA, 25 bp, Homo sapien
aagtcaggttctaagcatatcatgc

SEQ ID NO: 5188994 - DNA, 25 bp, Homo sapien
ttttgtttgggtagtagcaagctcc

SEQ ID NO: 5188995 - DNA, 25 bp, Homo sapien
tctcttacagtgttccttctatact

SEQ ID NO: 5188996 - DNA, 25 bp, Homo sapien
gcatctccgcatgaataaattagga

SEQ ID NO: 5188997 - DNA, 25 bp, Homo sapien
tactttaggacctaactggcatcca

SEQ ID NO: 5188998 - DNA, 25 bp, Homo sapien
aacagaactgtgggtgttgtggttc

SEQ ID NO: 5188999 - DNA, 25 bp, Homo sapien
gcagaatttgtgtggaattcagact

SEQ ID NO: 5189000 - DNA, 25 bp, Homo sapien
taacagcaggttgtagatatttctg

SEQ ID NO: 5189001 - DNA, 25 bp, Homo sapien
gacatatatgcaagatagagatact

SEQ ID NO: 5189002 - DNA, 25 bp, Homo sapien
tgcacttaaaactgaaagacggcct

SEQ ID NO: 5189003 - DNA, 25 bp, Homo sapien
ttaattttgtacatctaacagcagg

SEQ ID NO: 5189004 - DNA, 25 bp, Homo sapien
taaatggacaaactatctagagaat

SEQ ID NO: 5189005 - DNA, 25 bp, Homo sapien
tttataaatggacaaactatctaga

SEQ ID NO: 5189006 - DNA, 25 bp, Homo sapien
agagaattttccccagtagaacctg

SEQ ID NO: 5189007 - DNA, 25 bp, Homo sapien
ggacaaactatctagagaattttcc

SEQ ID NO: 5189008 - DNA, 25 bp, Homo sapien
cccataaactgggaagtttggctgc

SEQ ID NO: 5189009 - DNA, 25 bp, Homo sapien
tgaacatgtaggaaatgtaatcatc

SEQ ID NO: 5189010 - DNA, 25 bp, Homo sapien
atcatcagacattccccataaactg

SEQ ID NO: 5189011 - DNA, 25 bp, Homo sapien
catgtaggaaatgtaatcatcagac

SEQ ID NO: 5189012 - DNA, 25 bp, Homo sapien
gatttggatactctgaactttataa

SEQ ID NO: 5189013 - DNA, 25 bp, Homo sapien
gaactttataatctcacagctgcca

SEQ ID NO: 5189014 - DNA, 25 bp, Homo sapien
aaatcccagtgagggttagatttgg

SEQ ID NO: 5189015 - DNA, 25 bp, Homo sapien
aagagttacaaaaggaggtgagatg

SEQ ID NO: 5189016 - DNA, 25 bp, Homo sapien
tatggcctgaagacaagactctgta

SEQ ID NO: 5189017 - DNA, 25 bp, Homo sapien
tggcacttaggatcaaaggagctac

SEQ ID NO: 5189018 - DNA, 25 bp, Homo sapien
tacctgaggtggcacttacggcact

SEQ ID NO: 5189019 - DNA, 25 bp, Homo sapien
gagctaccgacttttgatccactaa

SEQ ID NO: 5189020 - DNA, 25 bp, Homo sapien
acattctttattgccagctgttcag

SEQ ID NO: 5189021 - DNA, 25 bp, Homo sapien
gccagctgttcaggtgtcatcttat

SEQ ID NO: 5189022 - DNA, 25 bp, Homo sapien
gccaacattctttattgccagctgt

SEQ ID NO: 5189023 - DNA, 25 bp, Homo sapien
tgccagctgttcaggtgtcatctta

SEQ ID NO: 5189024 - DNA, 25 bp, Homo sapien
aaagctgccgtttgtagttgaagaa

SEQ ID NO: 5189025 - DNA, 25 bp, Homo sapien
aatattcttggatcaaaagctgccg

SEQ ID NO: 5189026 - DNA, 25 bp, Homo sapien
taacaaggaattctatacagctcac

SEQ ID NO: 5189027 - DNA, 25 bp, Homo sapien
aattcaaagcggacataccaaaggg

SEQ ID NO: 5189028 - DNA, 25 bp, Homo sapien
gacagtatccaacatagctgctaaa

SEQ ID NO: 5189029 - DNA, 25 bp, Homo sapien
taaacactggacaatatttgaggtc

SEQ ID NO: 5189030 - DNA, 25 bp, Homo sapien
atatttgaggtcataagtacatcca

SEQ ID NO: 5189031 - DNA, 25 bp, Homo sapien
catagctgctaaacactggacaata

SEQ ID NO: 5189032 - DNA, 25 bp, Homo sapien
gactgaaggtgttacagtgctgcaa

SEQ ID NO: 5189033 - DNA, 25 bp, Homo sapien
cagaggtcccttgattttgagcatt

SEQ ID NO: 5189034 - DNA, 25 bp, Homo sapien
taattgcacaactgagactgaaggt

SEQ ID NO: 5189035 - DNA, 25 bp, Homo sapien
tttagccaagtacaccttcagaggt

SEQ ID NO: 5189036 - DNA, 25 bp, Homo sapien
ctcccggagtgagagcagcgcctgg

SEQ ID NO: 5189037 - DNA, 25 bp, Homo sapien
tcccggagtgagagcagcgcctggg

SEQ ID NO: 5189038 - DNA, 25 bp, Homo sapien
gctttcctcccggacgccgagccgc

SEQ ID NO: 5189039 - DNA, 25 bp, Homo sapien
tgagctgcgtctggcgcagacccca

SEQ ID NO: 5189040 - DNA, 25 bp, Homo sapien
cctcagccgggggagcctctggctt

SEQ ID NO: 5189041 - DNA, 25 bp, Homo sapien
agccgcgcgggaatgagcaggagga

SEQ ID NO: 5189042 - DNA, 25 bp, Homo sapien
caaatgggctcgtcagaagcgctga

SEQ ID NO: 5189043 - DNA, 25 bp, Homo sapien
ggccgagtccccgtgcaaatgggct

SEQ ID NO: 5189044 - DNA, 25 bp, Homo sapien
cttggcgacaggttcaaaagcctcg

SEQ ID NO: 5189045 - DNA, 25 bp, Homo sapien
ggcaggcgccatgcatccttctcgt

SEQ ID NO: 5189046 - DNA, 25 bp, Homo sapien
gcagtgatgtttaccggctctttat

SEQ ID NO: 5189047 - DNA, 25 bp, Homo sapien
ggctgaaatgccttaatgtatttgc

SEQ ID NO: 5189048 - DNA, 25 bp, Homo sapien
ttgaaataatcataagctgtcgggc

SEQ ID NO: 5189049 - DNA, 25 bp, Homo sapien
atttgcagtgatgtttaccggctct

SEQ ID NO: 5189050 - DNA, 25 bp, Homo sapien
tcggtttcttggttgagtacagaaa

SEQ ID NO: 5189051 - DNA, 25 bp, Homo sapien
ggtttcttggttgagtacagaaaca

SEQ ID NO: 5189052 - DNA, 25 bp, Homo sapien
gtttcttggttgagtacagaaacag

SEQ ID NO: 5189053 - DNA, 25 bp, Homo sapien
gttcggtttcttggttgagtacaga

SEQ ID NO: 5189054 - DNA, 25 bp, Homo sapien
gacttttcggatctgaatgagccaa

SEQ ID NO: 5189055 - DNA, 25 bp, Homo sapien
gaattcgacgatgctaggagacttt

SEQ ID NO: 5189056 - DNA, 25 bp, Homo sapien
tcctggtagcgacgatcatggcaaa

SEQ ID NO: 5189057 - DNA, 25 bp, Homo sapien
gagcagatcctacatgtcctcggcg

SEQ ID NO: 5189058 - DNA, 25 bp, Homo sapien
gcttgtgcagccgatgaaacggctc

SEQ ID NO: 5189059 - DNA, 25 bp, Homo sapien
gagattggccaattgacactatgca

SEQ ID NO: 5189060 - DNA, 25 bp, Homo sapien
gaaacggctcctgccattggttagc

SEQ ID NO: 5189061 - DNA, 25 bp, Homo sapien
ccctcactagacagaaagcacttca

SEQ ID NO: 5189062 - DNA, 25 bp, Homo sapien
ctagaacctgaacactcgccctccc

SEQ ID NO: 5189063 - DNA, 25 bp, Homo sapien
cctgaacactcgccctcccgtccct

SEQ ID NO: 5189064 - DNA, 25 bp, Homo sapien
ctgaacactcgccctcccgtccctg

SEQ ID NO: 5189065 - DNA, 25 bp, Homo sapien
gaacctgaacactcgccctcccgtc

SEQ ID NO: 5189066 - DNA, 25 bp, Homo sapien
ggagaaaggcagtgctccagctgca

SEQ ID NO: 5189067 - DNA, 25 bp, Homo sapien
gatagaaggagaaaggcagtgctcc

SEQ ID NO: 5189068 - DNA, 25 bp, Homo sapien
gaaggagaaaggcagtgctccagct

SEQ ID NO: 5189069 - DNA, 25 bp, Homo sapien
tagaaggagaaaggcagtgctccag

SEQ ID NO: 5189070 - DNA, 25 bp, Homo sapien
tgatgatcatctccgtttggtgccg

SEQ ID NO: 5189071 - DNA, 25 bp, Homo sapien
tcggatccgcctgaatgtgggtagc

SEQ ID NO: 5189072 - DNA, 25 bp, Homo sapien
gatgatcgtgcaagacaagctcgga

SEQ ID NO: 5189073 - DNA, 25 bp, Homo sapien
gaactggtagaacggagctccttgg

SEQ ID NO: 5189074 - DNA, 25 bp, Homo sapien
ttgcctccttgaaacctccagtgat

SEQ ID NO: 5189075 - DNA, 25 bp, Homo sapien
cgctttgccgcaaggaacccatttg

SEQ ID NO: 5189076 - DNA, 25 bp, Homo sapien
tgagccgtgggatcgagaccagaaa

SEQ ID NO: 5189077 - DNA, 25 bp, Homo sapien
ttgggatccgccaaaatcacatcca

SEQ ID NO: 5189078 - DNA, 25 bp, Homo sapien
agaaaatgtgttaattggaaggact

SEQ ID NO: 5189079 - DNA, 25 bp, Homo sapien
taaataagtgtcaagaaaatgtgtt

SEQ ID NO: 5189080 - DNA, 25 bp, Homo sapien
ctaaataagtgtcaagaaaatgtgt

SEQ ID NO: 5189081 - DNA, 25 bp, Homo sapien
ttcttggcgcatccagtgagcccca

SEQ ID NO: 5189082 - DNA, 25 bp, Homo sapien
aagagatttcttggcgcatccagtg

SEQ ID NO: 5189083 - DNA, 25 bp, Homo sapien
gggaatccggatgcatatagacccg

SEQ ID NO: 5189084 - DNA, 25 bp, Homo sapien
tgcccattgttatttgaagctcctt

SEQ ID NO: 5189085 - DNA, 25 bp, Homo sapien
tggctagtgtcctccgtgccgtcct

SEQ ID NO: 5189086 - DNA, 25 bp, Homo sapien
tgacggcgatgaactgagtctcagg

SEQ ID NO: 5189087 - DNA, 25 bp, Homo sapien
tcagggaaagtgaacgtctgcacgc

SEQ ID NO: 5189088 - DNA, 25 bp, Homo sapien
tgtgcaaggactgtaaaaccaccat

SEQ ID NO: 5189089 - DNA, 25 bp, Homo sapien
gtgtcataattatcccgaaatcctt

SEQ ID NO: 5189090 - DNA, 25 bp, Homo sapien
cataattatcccgaaatccttttgc

SEQ ID NO: 5189091 - DNA, 25 bp, Homo sapien
tgtcataattatcccgaaatccttt

SEQ ID NO: 5189092 - DNA, 25 bp, Homo sapien
taattatcccgaaatccttttgcaa

SEQ ID NO: 5189093 - DNA, 25 bp, Homo sapien
tgagccatgtccaagtaaccaacgt

SEQ ID NO: 5189094 - DNA, 25 bp, Homo sapien
aagcaagctcctagtaccccatgaa

SEQ ID NO: 5189095 - DNA, 25 bp, Homo sapien
gaagggaacataactagcaaggtgc

SEQ ID NO: 5189096 - DNA, 25 bp, Homo sapien
agtttagatgcctatccaggtccca

SEQ ID NO: 5189097 - DNA, 25 bp, Homo sapien
gccggccatggcgtagcgggccccg

SEQ ID NO: 5189098 - DNA, 25 bp, Homo sapien
agcgcggcgagtcgttgggcgaggg

SEQ ID NO: 5189099 - DNA, 25 bp, Homo sapien
ccgggcacgatctgcgagcgcggcg

SEQ ID NO: 5189100 - DNA, 25 bp, Homo sapien
gggtcaggcggtccatgtcacagcc

SEQ ID NO: 5189101 - DNA, 25 bp, Homo sapien
gaagcgggccttggcgtagttgctc

SEQ ID NO: 5189102 - DNA, 25 bp, Homo sapien
agcgggccttggcgtagttgctcac

SEQ ID NO: 5189103 - DNA, 25 bp, Homo sapien
aagcgggccttggcgtagttgctca

SEQ ID NO: 5189104 - DNA, 25 bp, Homo sapien
ggcgacagcagcccgttggtgtgcg

SEQ ID NO: 5189105 - DNA, 25 bp, Homo sapien
cgacagcagcccgttggtgtgcggc

SEQ ID NO: 5189106 - DNA, 25 bp, Homo sapien
acagcagcccgttggtgtgcggcac

SEQ ID NO: 5189107 - DNA, 25 bp, Homo sapien
gcggcgacagcagcccgttggtgtg

SEQ ID NO: 5189108 - DNA, 25 bp, Homo sapien
taaatccccgagtcgctggagtcga

SEQ ID NO: 5189109 - DNA, 25 bp, Homo sapien
agcccgacttggtgccgcagtactg

SEQ ID NO: 5189110 - DNA, 25 bp, Homo sapien
agggcgtctcgatccagctggaatc

SEQ ID NO: 5189111 - DNA, 25 bp, Homo sapien
tgtgcgagtagaagccatagtagcc

SEQ ID NO: 5189112 - DNA, 25 bp, Homo sapien
tcggtgagctaattgcagagactgc

SEQ ID NO: 5189113 - DNA, 25 bp, Homo sapien
gttaaaatcacgctcggagacctgc

SEQ ID NO: 5189114 - DNA, 25 bp, Homo sapien
tgcccaggtctcctaaaggtgaaga

SEQ ID NO: 5189115 - DNA, 25 bp, Homo sapien
tgcagacggccatcgagggtcaaat

SEQ ID NO: 5189116 - DNA, 25 bp, Homo sapien
tccaaggcctcgtatgtacaaccag

SEQ ID NO: 5189117 - DNA, 25 bp, Homo sapien
cctcgtatgtacaaccagaatttac

SEQ ID NO: 5189118 - DNA, 25 bp, Homo sapien
gaatttactaaatctgcggtcaaca

SEQ ID NO: 5189119 - DNA, 25 bp, Homo sapien
cagaatttactaaatctgcggtcaa

SEQ ID NO: 5189120 - DNA, 25 bp, Homo sapien
taataagccacgatcatatgactgc

SEQ ID NO: 5189121 - DNA, 25 bp, Homo sapien
aaaagcccctgcagatcatcatgga

SEQ ID NO: 5189122 - DNA, 25 bp, Homo sapien
tgccagttctaaaaggtgaccatgc

SEQ ID NO: 5189123 - DNA, 25 bp, Homo sapien
tacacacagggtcctacttgagggt

SEQ ID NO: 5189124 - DNA, 25 bp, Homo sapien
gcagcttcatgcttccaagactaaa

SEQ ID NO: 5189125 - DNA, 25 bp, Homo sapien
cagggattctaggaggtcagcccca

SEQ ID NO: 5189126 - DNA, 25 bp, Homo sapien
taaaatcagcttgtataatcccagc

SEQ ID NO: 5189127 - DNA, 25 bp, Homo sapien
tgacaaactaaaccctgtgcattgg

SEQ ID NO: 5189128 - DNA, 25 bp, Homo sapien
caatgaagccaacagtgtccagtgg

SEQ ID NO: 5189129 - DNA, 25 bp, Homo sapien
gaaaatatcctcctgctagtctgca

SEQ ID NO: 5189130 - DNA, 25 bp, Homo sapien
ccagtcgtcgacagaagtttgagcg

SEQ ID NO: 5189131 - DNA, 25 bp, Homo sapien
tgtccagtggtagcgatgttatcct

SEQ ID NO: 5189132 - DNA, 25 bp, Homo sapien
gatgagaaaagatagtccatgcaaa

SEQ ID NO: 5189133 - DNA, 25 bp, Homo sapien
tggctatgccaatacctgacaaaat

SEQ ID NO: 5189134 - DNA, 25 bp, Homo sapien
tatggaaatagagaatttgagcacc

SEQ ID NO: 5189135 - DNA, 25 bp, Homo sapien
ctaaaggcacaaacagacaaagtgg

SEQ ID NO: 5189136 - DNA, 25 bp, Homo sapien
gacatgacatggtgcttgctggaaa

SEQ ID NO: 5189137 - DNA, 25 bp, Homo sapien
tacaaataaataggaacacatggct

SEQ ID NO: 5189138 - DNA, 25 bp, Homo sapien
gtcctgtttgcaaggcatacaaata

SEQ ID NO: 5189139 - DNA, 25 bp, Homo sapien
caatgggaatgatacaatctgaggg

SEQ ID NO: 5189140 - DNA, 25 bp, Homo sapien
cttatcattagggtcttagcaggaa

SEQ ID NO: 5189141 - DNA, 25 bp, Homo sapien
taataagccccaagcaggtgcagag

SEQ ID NO: 5189142 - DNA, 25 bp, Homo sapien
tctgaaagttgaatgtgacccctca

SEQ ID NO: 5189143 - DNA, 25 bp, Homo sapien
gaacatagaattggagcctgagtcc

SEQ ID NO: 5189144 - DNA, 25 bp, Homo sapien
taaatgccaaaactgaattgccact

SEQ ID NO: 5189145 - DNA, 25 bp, Homo sapien
ccttcatagtgccatcaataaacat

SEQ ID NO: 5189146 - DNA, 25 bp, Homo sapien
gaattgccactataaagtctgccaa

SEQ ID NO: 5189147 - DNA, 25 bp, Homo sapien
tttccttcatagtgccatcaataaa

SEQ ID NO: 5189148 - DNA, 25 bp, Homo sapien
gtgctgacctcataataaggttgag

SEQ ID NO: 5189149 - DNA, 25 bp, Homo sapien
gctgacctcataataaggttgaggg

SEQ ID NO: 5189150 - DNA, 25 bp, Homo sapien
atgtgctgacctcataataaggttg

SEQ ID NO: 5189151 - DNA, 25 bp, Homo sapien
aaggttgagggtggcacatttcaca

SEQ ID NO: 5189152 - DNA, 25 bp, Homo sapien
tgtggctgggtgattggatggagcc

SEQ ID NO: 5189153 - DNA, 25 bp, Homo sapien
ctgtggctgggtgattggatggagc

SEQ ID NO: 5189154 - DNA, 25 bp, Homo sapien
gtggctgggtgattggatggagccc

SEQ ID NO: 5189155 - DNA, 25 bp, Homo sapien
tggctgggtgattggatggagccca

SEQ ID NO: 5189156 - DNA, 25 bp, Homo sapien
gcccctgacgcctgcatagaggcta

SEQ ID NO: 5189157 - DNA, 25 bp, Homo sapien
caagcccctgacgcctgcatagagg

SEQ ID NO: 5189158 - DNA, 25 bp, Homo sapien
ccctgacgcctgcatagaggctaac

SEQ ID NO: 5189159 - DNA, 25 bp, Homo sapien
aaagatccaggagcccaagcccctg

SEQ ID NO: 5189160 - DNA, 25 bp, Homo sapien
ggctgttcaggctttgaatggtccc

SEQ ID NO: 5189161 - DNA, 25 bp, Homo sapien
ctgttcaggctttgaatggtcccct

SEQ ID NO: 5189162 - DNA, 25 bp, Homo sapien
gcctggtggctgttcaggctttgaa

SEQ ID NO: 5189163 - DNA, 25 bp, Homo sapien
tggtccccttgttctggatgccccg

SEQ ID NO: 5189164 - DNA, 25 bp, Homo sapien
gatgtggccattgttcatagaattt

SEQ ID NO: 5189165 - DNA, 25 bp, Homo sapien
gtggccattgttcatagaatttgca

SEQ ID NO: 5189166 - DNA, 25 bp, Homo sapien
tgatgtggccattgttcatagaatt

SEQ ID NO: 5189167 - DNA, 25 bp, Homo sapien
tgtggccattgttcatagaatttgc

SEQ ID NO: 5189168 - DNA, 25 bp, Homo sapien
gctgagtgacattggcgtcatcgac

SEQ ID NO: 5189169 - DNA, 25 bp, Homo sapien
cattggcgtcatcgacgactttgtg

SEQ ID NO: 5189170 - DNA, 25 bp, Homo sapien
tttgtgaagcccatgaatgttgcta

SEQ ID NO: 5189171 - DNA, 25 bp, Homo sapien
gcgtcatcgacgactttgtgaagcc

SEQ ID NO: 5189172 - DNA, 25 bp, Homo sapien
ccatgatcttgctaaggtcctgaga

SEQ ID NO: 5189173 - DNA, 25 bp, Homo sapien
atgtctgccatgatcttgctaaggt

SEQ ID NO: 5189174 - DNA, 25 bp, Homo sapien
tctgccatgatcttgctaaggtcct

SEQ ID NO: 5189175 - DNA, 25 bp, Homo sapien
gatcttgctaaggtcctgagatttg

SEQ ID NO: 5189176 - DNA, 25 bp, Homo sapien
ctctgatcttggtggactgtgtggt

SEQ ID NO: 5189177 - DNA, 25 bp, Homo sapien
atcaagtacaagtcaatctccaagg

SEQ ID NO: 5189178 - DNA, 25 bp, Homo sapien
gtacatcttagctccatgacggtca

SEQ ID NO: 5189179 - DNA, 25 bp, Homo sapien
tatcaagtacaagtcaatctccaag

SEQ ID NO: 5189180 - DNA, 25 bp, Homo sapien
tcaggacccagtttagctgctccat

SEQ ID NO: 5189181 - DNA, 25 bp, Homo sapien
ctcaggacccagtttagctgctcca

SEQ ID NO: 5189182 - DNA, 25 bp, Homo sapien
caggacccagtttagctgctccatc

SEQ ID NO: 5189183 - DNA, 25 bp, Homo sapien
cctgcaggcagtggtctgttggatg

SEQ ID NO: 5189184 - DNA, 25 bp, Homo sapien
cagcaggcagctggcaatctcagcc

SEQ ID NO: 5189185 - DNA, 25 bp, Homo sapien
caggcagtggtctgttggatggttt

SEQ ID NO: 5189186 - DNA, 25 bp, Homo sapien
tccccatattccagcaggcagctgg

SEQ ID NO: 5189187 - DNA, 25 bp, Homo sapien
tgagaattcctctgaaagaattctg

SEQ ID NO: 5189188 - DNA, 25 bp, Homo sapien
ctgtgggtgtggatgagaattcctc

SEQ ID NO: 5189189 - DNA, 25 bp, Homo sapien
cctctgaaagaattctgttagccat

SEQ ID NO: 5189190 - DNA, 25 bp, Homo sapien
attcctctgaaagaattctgttagc

SEQ ID NO: 5189191 - DNA, 25 bp, Homo sapien
ttcctgtggtctggtagacatagat

SEQ ID NO: 5189192 - DNA, 25 bp, Homo sapien
atgttaattcctgtggtctggtaga

SEQ ID NO: 5189193 - DNA, 25 bp, Homo sapien
aattcctgtggtctggtagacatag

SEQ ID NO: 5189194 - DNA, 25 bp, Homo sapien
ttaattcctgtggtctggtagacat

SEQ ID NO: 5189195 - DNA, 25 bp, Homo sapien
acagcaagcaatgctacaagtctaa

SEQ ID NO: 5189196 - DNA, 25 bp, Homo sapien
aagcaatgctacaagtctaatgggc

SEQ ID NO: 5189197 - DNA, 25 bp, Homo sapien
gcaagcaatgctacaagtctaatgg

SEQ ID NO: 5189198 - DNA, 25 bp, Homo sapien
cggtaagagagatcccccaagccct

SEQ ID NO: 5189199 - DNA, 25 bp, Homo sapien
tgctggccaggttttgcactgaatg

SEQ ID NO: 5189200 - DNA, 25 bp, Homo sapien
gctgctggccaggttttgcactgaa

SEQ ID NO: 5189201 - DNA, 25 bp, Homo sapien
tcgggctgctggccaggttttgcac

SEQ ID NO: 5189202 - DNA, 25 bp, Homo sapien
ggctgctggccaggttttgcactga

SEQ ID NO: 5189203 - DNA, 25 bp, Homo sapien
ggcaattgcacactccaactcacca

SEQ ID NO: 5189204 - DNA, 25 bp, Homo sapien
attgcacactccaactcaccagagt

SEQ ID NO: 5189205 - DNA, 25 bp, Homo sapien
aattgcacactccaactcaccagag

SEQ ID NO: 5189206 - DNA, 25 bp, Homo sapien
gaggcaattgcacactccaactcac

SEQ ID NO: 5189207 - DNA, 25 bp, Homo sapien
ctgcttagtattcggatcaggtagc

SEQ ID NO: 5189208 - DNA, 25 bp, Homo sapien
ctctgcttagtattcggatcaggta

SEQ ID NO: 5189209 - DNA, 25 bp, Homo sapien
tctgcttagtattcggatcaggtag

SEQ ID NO: 5189210 - DNA, 25 bp, Homo sapien
tgcttagtattcggatcaggtagct

SEQ ID NO: 5189211 - DNA, 25 bp, Homo sapien
cagcagcggctccatttgggctccc

SEQ ID NO: 5189212 - DNA, 25 bp, Homo sapien
gcagcagcggctccatttgggctcc

SEQ ID NO: 5189213 - DNA, 25 bp, Homo sapien
agcagcggctccatttgggctccct

SEQ ID NO: 5189214 - DNA, 25 bp, Homo sapien
ccagtcccttccgcgcaaggtgggt

SEQ ID NO: 5189215 - DNA, 25 bp, Homo sapien
cgccagtcccttccgcgcaaggtgg

SEQ ID NO: 5189216 - DNA, 25 bp, Homo sapien
cagtcccttccgcgcaaggtgggtc

SEQ ID NO: 5189217 - DNA, 25 bp, Homo sapien
gccagtcccttccgcgcaaggtggg

SEQ ID NO: 5189218 - DNA, 25 bp, Homo sapien
cataagccacatcaaactggcttta

SEQ ID NO: 5189219 - DNA, 25 bp, Homo sapien
ttctaggacaggttccaacacccca

SEQ ID NO: 5189220 - DNA, 25 bp, Homo sapien
catcaaactggctttagcctgcttt

SEQ ID NO: 5189221 - DNA, 25 bp, Homo sapien
ctttaactgttccccacaagtgaca

SEQ ID NO: 5189222 - DNA, 25 bp, Homo sapien
cagccagatctgttacatcaggtgt

SEQ ID NO: 5189223 - DNA, 25 bp, Homo sapien
cataatatcagccagatctgttaca

SEQ ID NO: 5189224 - DNA, 25 bp, Homo sapien
tatcagccagatctgttacatcagg

SEQ ID NO: 5189225 - DNA, 25 bp, Homo sapien
cagatctgttacatcaggtgtcaga

SEQ ID NO: 5189226 - DNA, 25 bp, Homo sapien
cctggaacactttaaatccacccat

SEQ ID NO: 5189227 - DNA, 25 bp, Homo sapien
gattcctggaacactttaaatccac

SEQ ID NO: 5189228 - DNA, 25 bp, Homo sapien
gtgattcctggaacactttaaatcc

SEQ ID NO: 5189229 - DNA, 25 bp, Homo sapien
tcaagtgattcctggaacactttaa

SEQ ID NO: 5189230 - DNA, 25 bp, Homo sapien
agtcctcggaggaattcatttgggc

SEQ ID NO: 5189231 - DNA, 25 bp, Homo sapien
taagccagtcatccagattaggaca

SEQ ID NO: 5189232 - DNA, 25 bp, Homo sapien
tccagattaggacagatatgagtcc

SEQ ID NO: 5189233 - DNA, 25 bp, Homo sapien
ttcccagattcattatctaagccag

SEQ ID NO: 5189234 - DNA, 25 bp, Homo sapien
gagttcaaatgcaatgctctattct

SEQ ID NO: 5189235 - DNA, 25 bp, Homo sapien
tgagttcaaatgcaatgctctattc

SEQ ID NO: 5189236 - DNA, 25 bp, Homo sapien
tcaaatgcaatgctctattctcatt

SEQ ID NO: 5189237 - DNA, 25 bp, Homo sapien
gttcaaatgcaatgctctattctca

SEQ ID NO: 5189238 - DNA, 25 bp, Homo sapien
ctgcctatttctggctataccacct

SEQ ID NO: 5189239 - DNA, 25 bp, Homo sapien
gaagatgactgcctatttctggcta

SEQ ID NO: 5189240 - DNA, 25 bp, Homo sapien
gactgcctatttctggctataccac

SEQ ID NO: 5189241 - DNA, 25 bp, Homo sapien
gatgactgcctatttctggctatac

SEQ ID NO: 5189242 - DNA, 25 bp, Homo sapien
gtacataacgaaggatgatcagttc

SEQ ID NO: 5189243 - DNA, 25 bp, Homo sapien
cattggaaacatttgcctcacaatc

SEQ ID NO: 5189244 - DNA, 25 bp, Homo sapien
ttaaaaagtcgataagctaaatgta

SEQ ID NO: 5189245 - DNA, 25 bp, Homo sapien
cttctttccacatccaatggccatt

SEQ ID NO: 5189246 - DNA, 25 bp, Homo sapien
tgatataatttaatatttcaaggct

SEQ ID NO: 5189247 - DNA, 25 bp, Homo sapien
gatataatttaatatttcaaggctt

SEQ ID NO: 5189248 - DNA, 25 bp, Homo sapien
aatatttcaaggcttaattcagtca

SEQ ID NO: 5189249 - DNA, 25 bp, Homo sapien
tttaatatttcaaggcttaattcag

SEQ ID NO: 5189250 - DNA, 25 bp, Homo sapien
gtgttttgagaatagaacgagttcc

SEQ ID NO: 5189251 - DNA, 25 bp, Homo sapien
gaacgagttccacctctatccacaa

SEQ ID NO: 5189252 - DNA, 25 bp, Homo sapien
gagaatagaacgagttccacctcta

SEQ ID NO: 5189253 - DNA, 25 bp, Homo sapien
tctcaaagtgtgttttgagaataga

SEQ ID NO: 5189254 - DNA, 25 bp, Homo sapien
tgaagaaagcgtcaaaagtgtaggt

SEQ ID NO: 5189255 - DNA, 25 bp, Homo sapien
taggtggcaatgttagcatcagttg

SEQ ID NO: 5189256 - DNA, 25 bp, Homo sapien
tgtcaaaattagtactacctgtgtg

SEQ ID NO: 5189257 - DNA, 25 bp, Homo sapien
gaagtagagatgctacctgtcaaaa

SEQ ID NO: 5189258 - DNA, 25 bp, Homo sapien
catcctctaatcctgaatctctttc

SEQ ID NO: 5189259 - DNA, 25 bp, Homo sapien
tctgtgtttatgaccacgatgcctg

SEQ ID NO: 5189260 - DNA, 25 bp, Homo sapien
ctgtgacgtcgatggctttttcttc

SEQ ID NO: 5189261 - DNA, 25 bp, Homo sapien
caaaagaaggtgactcccttccatc

SEQ ID NO: 5189262 - DNA, 25 bp, Homo sapien
cactgcaacactcatccaaatcaaa

SEQ ID NO: 5189263 - DNA, 25 bp, Homo sapien
actcaggaactaaaaccaaattcat

SEQ ID NO: 5189264 - DNA, 25 bp, Homo sapien
gcaacactcatccaaatcaaactca

SEQ ID NO: 5189265 - DNA, 25 bp, Homo sapien
aacactcatccaaatcaaactcagg

SEQ ID NO: 5189266 - DNA, 25 bp, Homo sapien
gaatgtgttcctcgtcatcatcctc

SEQ ID NO: 5189267 - DNA, 25 bp, Homo sapien
tcatcctcggttccaagaataaact

SEQ ID NO: 5189268 - DNA, 25 bp, Homo sapien
caacaaatctcatccagttctgtga

SEQ ID NO: 5189269 - DNA, 25 bp, Homo sapien
ctggctgtttctcgccactcagcgt

SEQ ID NO: 5189270 - DNA, 25 bp, Homo sapien
tttttatcccatgtatagatagatg

SEQ ID NO: 5189271 - DNA, 25 bp, Homo sapien
gatgtaacctctaccacaatcaaca

SEQ ID NO: 5189272 - DNA, 25 bp, Homo sapien
caatcaacatacgaagctgttccat

SEQ ID NO: 5189273 - DNA, 25 bp, Homo sapien
tgggactacatagccaggtactatg

SEQ ID NO: 5189274 - DNA, 25 bp, Homo sapien
agctgtgcaatgaaagagtagccac

SEQ ID NO: 5189275 - DNA, 25 bp, Homo sapien
ttctcaattcaaacaagctgtgcaa

SEQ ID NO: 5189276 - DNA, 25 bp, Homo sapien
gttccattcagaatacaacttctca

SEQ ID NO: 5189277 - DNA, 25 bp, Homo sapien
aacacagttccattcagaatacaac

SEQ ID NO: 5189278 - DNA, 25 bp, Homo sapien
gaaaatgtgtgatactatagaataa

SEQ ID NO: 5189279 - DNA, 25 bp, Homo sapien
gatcagtagttataatacccctggg

SEQ ID NO: 5189280 - DNA, 25 bp, Homo sapien
ttggagatcagtagttataataccc

SEQ ID NO: 5189281 - DNA, 25 bp, Homo sapien
gagatcagtagttataatacccctg

SEQ ID NO: 5189282 - DNA, 25 bp, Homo sapien
gagctcacttgttggtcaagaacca

SEQ ID NO: 5189283 - DNA, 25 bp, Homo sapien
gctgtttcatcaatgcctcatggac

SEQ ID NO: 5189284 - DNA, 25 bp, Homo sapien
tatcagcaaaggaacgaacaatggg

SEQ ID NO: 5189285 - DNA, 25 bp, Homo sapien
tcatggaccctatggcgtacatctt

SEQ ID NO: 5189286 - DNA, 25 bp, Homo sapien
cttgctaaagtcaacagtgctgttt

SEQ ID NO: 5189287 - DNA, 25 bp, Homo sapien
caacacaggctggagcagactgagg

SEQ ID NO: 5189288 - DNA, 25 bp, Homo sapien
gcagactgaggagaaacaacctgac

SEQ ID NO: 5189289 - DNA, 25 bp, Homo sapien
ttattttcaacacaggctggagcag

SEQ ID NO: 5189290 - DNA, 25 bp, Homo sapien
gtatgccccttttgttggcctccca

SEQ ID NO: 5189291 - DNA, 25 bp, Homo sapien
tttcatgcctttgtttcatcccaca

SEQ ID NO: 5189292 - DNA, 25 bp, Homo sapien
acatggactagtatgccccttttgt

SEQ ID NO: 5189293 - DNA, 25 bp, Homo sapien
tggtgtggaggtcctttttcatgcc

SEQ ID NO: 5189294 - DNA, 25 bp, Homo sapien
taagatgttcgatgcttcagcacct

SEQ ID NO: 5189295 - DNA, 25 bp, Homo sapien
tgttcgatccaagaactccagttct

SEQ ID NO: 5189296 - DNA, 25 bp, Homo sapien
ctggttgggattgggacttcagcca

SEQ ID NO: 5189297 - DNA, 25 bp, Homo sapien
ggagacaacctgacaaacgcaacta

SEQ ID NO: 5189298 - DNA, 25 bp, Homo sapien
gggttgcaattgatctgccaatctc

SEQ ID NO: 5189299 - DNA, 25 bp, Homo sapien
ctcatctgtcattagggttgcaatt

SEQ ID NO: 5189300 - DNA, 25 bp, Homo sapien
aatctcatggtactgttgacccttt

SEQ ID NO: 5189301 - DNA, 25 bp, Homo sapien
atggtactgttgaccctttcccagg

SEQ ID NO: 5189302 - DNA, 25 bp, Homo sapien
caattcctgataccaagtcattacg

SEQ ID NO: 5189303 - DNA, 25 bp, Homo sapien
gagggagaacagtaacctgatccag

SEQ ID NO: 5189304 - DNA, 25 bp, Homo sapien
gaatgcttggatcccattctccagg

SEQ ID NO: 5189305 - DNA, 25 bp, Homo sapien
acatttttgggaggctctattcgaa

SEQ ID NO: 5189306 - DNA, 25 bp, Homo sapien
tccatttggtacagcaggaatcttc

SEQ ID NO: 5189307 - DNA, 25 bp, Homo sapien
tgagctgctgttccatttggtacag

SEQ ID NO: 5189308 - DNA, 25 bp, Homo sapien
cttccagttcgctggagttcaggtc

SEQ ID NO: 5189309 - DNA, 25 bp, Homo sapien
tcaggtccactatgtcctccgtggg

SEQ ID NO: 5189310 - DNA, 25 bp, Homo sapien
cccagcagtcctccaaacgtgatga

SEQ ID NO: 5189311 - DNA, 25 bp, Homo sapien
gaaaagatgctaagcactgcaggct

SEQ ID NO: 5189312 - DNA, 25 bp, Homo sapien
tgatgacaggagacatacacgcgca

SEQ ID NO: 5189313 - DNA, 25 bp, Homo sapien
gaagtcactccagaagtatggagct

SEQ ID NO: 5189314 - DNA, 25 bp, Homo sapien
gagaataggctatcccggtcatgga

SEQ ID NO: 5189315 - DNA, 25 bp, Homo sapien
ccaaaactggtcctgtactgcctaa

SEQ ID NO: 5189316 - DNA, 25 bp, Homo sapien
ctccaaagagagattcaattgcact

SEQ ID NO: 5189317 - DNA, 25 bp, Homo sapien
tatggtaagaggctgtccaccaaag

SEQ ID NO: 5189318 - DNA, 25 bp, Homo sapien
tctccagggcctcataaatgaaaat

SEQ ID NO: 5189319 - DNA, 25 bp, Homo sapien
gattggatatgcttcactgagttca

SEQ ID NO: 5189320 - DNA, 25 bp, Homo sapien
caagggaactagcatctgtggccac

SEQ ID NO: 5189321 - DNA, 25 bp, Homo sapien
taaaccgagtgatgtagcagacaag

SEQ ID NO: 5189322 - DNA, 25 bp, Homo sapien
gagtttatctgtattcatcagtgta

SEQ ID NO: 5189323 - DNA, 25 bp, Homo sapien
tgttttacatagtttcttttggaga

SEQ ID NO: 5189324 - DNA, 25 bp, Homo sapien
tacatagtttcttttggagagttta

SEQ ID NO: 5189325 - DNA, 25 bp, Homo sapien
gtttcttttggagagtttatctgta

SEQ ID NO: 5189326 - DNA, 25 bp, Homo sapien
tccttgttagtttttgcaaactggc

SEQ ID NO: 5189327 - DNA, 25 bp, Homo sapien
tagtttttgcaaactggcttcccat

SEQ ID NO: 5189328 - DNA, 25 bp, Homo sapien
cttccttgttagtttttgcaaactg

SEQ ID NO: 5189329 - DNA, 25 bp, Homo sapien
ttgttagtttttgcaaactggcttc

SEQ ID NO: 5189330 - DNA, 25 bp, Homo sapien
gatgctcacattgatccaaggaaaa

SEQ ID NO: 5189331 - DNA, 25 bp, Homo sapien
catcagcacacattcatgttcagcc

SEQ ID NO: 5189332 - DNA, 25 bp, Homo sapien
cacttgggcaatggaacacagtcat

SEQ ID NO: 5189333 - DNA, 25 bp, Homo sapien
aagaattaggttttagatgctcaca

SEQ ID NO: 5189334 - DNA, 25 bp, Homo sapien
tcttgcatgaaagatttactcaagg

SEQ ID NO: 5189335 - DNA, 25 bp, Homo sapien
tcgttttagcgacatcaggcacaaa

SEQ ID NO: 5189336 - DNA, 25 bp, Homo sapien
ggatgatgtgacagtattccataag

SEQ ID NO: 5189337 - DNA, 25 bp, Homo sapien
gctctcctgtttttgatactttgac

SEQ ID NO: 5189338 - DNA, 25 bp, Homo sapien
ttgagtctgggtgttcaaggaaaac

SEQ ID NO: 5189339 - DNA, 25 bp, Homo sapien
gagtctgggtgttcaaggaaaactg

SEQ ID NO: 5189340 - DNA, 25 bp, Homo sapien
ctgggtgttcaaggaaaactgagat

SEQ ID NO: 5189341 - DNA, 25 bp, Homo sapien
gtctgggtgttcaaggaaaactgag

SEQ ID NO: 5189342 - DNA, 25 bp, Homo sapien
gaagactaatgtataacggctccat

SEQ ID NO: 5189343 - DNA, 25 bp, Homo sapien
gctttttgtgactgtaccgaagact

SEQ ID NO: 5189344 - DNA, 25 bp, Homo sapien
tgtgactgtaccgaagactaatgta

SEQ ID NO: 5189345 - DNA, 25 bp, Homo sapien
tgtaccgaagactaatgtataacgg

SEQ ID NO: 5189346 - DNA, 25 bp, Homo sapien
gaggcagaaatattggattccctcc

SEQ ID NO: 5189347 - DNA, 25 bp, Homo sapien
ccattccttcaatgtgccattgctg

SEQ ID NO: 5189348 - DNA, 25 bp, Homo sapien
cattgctgggattatgcggttccac

SEQ ID NO: 5189349 - DNA, 25 bp, Homo sapien
tctcccaaattatgtcagaggcaga

SEQ ID NO: 5189350 - DNA, 25 bp, Homo sapien
gccagaggaagtaaaacaaatggag

SEQ ID NO: 5189351 - DNA, 25 bp, Homo sapien
tgccagaggaagtaaaacaaatgga

SEQ ID NO: 5189352 - DNA, 25 bp, Homo sapien
ctgccagaggaagtaaaacaaatgg

SEQ ID NO: 5189353 - DNA, 25 bp, Homo sapien
tagtcttgaactgcttcagggtggc

SEQ ID NO: 5189354 - DNA, 25 bp, Homo sapien
gaccaaaatagaacatctggaacat

SEQ ID NO: 5189355 - DNA, 25 bp, Homo sapien
gctgacagagtaactgtggaaaaga

SEQ ID NO: 5189356 - DNA, 25 bp, Homo sapien
ggttggaaaatatctgctagtcttg

SEQ ID NO: 5189357 - DNA, 25 bp, Homo sapien
atttagatcaagaaatagtctaagt

SEQ ID NO: 5189358 - DNA, 25 bp, Homo sapien
tttagatcaagaaatagtctaagta

SEQ ID NO: 5189359 - DNA, 25 bp, Homo sapien
ttagatcaagaaatagtctaagtac

SEQ ID NO: 5189360 - DNA, 25 bp, Homo sapien
ttttatgcatactataagattacca

SEQ ID NO: 5189361 - DNA, 25 bp, Homo sapien
taaatatcaaggaatactcaggaac

SEQ ID NO: 5189362 - DNA, 25 bp, Homo sapien
atcactgtcgttaagattggtacac

SEQ ID NO: 5189363 - DNA, 25 bp, Homo sapien
ggaacataatctagagtcacacttt

SEQ ID NO: 5189364 - DNA, 25 bp, Homo sapien
tacacagaattgtaagaaagacagc

SEQ ID NO: 5189365 - DNA, 25 bp, Homo sapien
cacttggtacttgtagttttggaga

SEQ ID NO: 5189366 - DNA, 25 bp, Homo sapien
gagatgggatcccaatggcatagtc

SEQ ID NO: 5189367 - DNA, 25 bp, Homo sapien
tagtcaattaaaaccatacacagaa

SEQ ID NO: 5189368 - DNA, 25 bp, Homo sapien
gagttataggtatcatctaaatgaa

SEQ ID NO: 5189369 - DNA, 25 bp, Homo sapien
tagacctaaattttagccatgctgt

SEQ ID NO: 5189370 - DNA, 25 bp, Homo sapien
aaatcctaagtactagagttatagg

SEQ ID NO: 5189371 - DNA, 25 bp, Homo sapien
ttcaactggcagaattgacaggaaa

SEQ ID NO: 5189372 - DNA, 25 bp, Homo sapien
caagatcccaaagctagtacgtggt

SEQ ID NO: 5189373 - DNA, 25 bp, Homo sapien
ggaaggattccaaacatggctgctg

SEQ ID NO: 5189374 - DNA, 25 bp, Homo sapien
acattgaccactgtgctagaactga

SEQ ID NO: 5189375 - DNA, 25 bp, Homo sapien
tatagaagtccccagccctgtttga

SEQ ID NO: 5189376 - DNA, 25 bp, Homo sapien
taaaggcgtaacaaaccagccacga

SEQ ID NO: 5189377 - DNA, 25 bp, Homo sapien
aaaggcgtaacaaaccagccacgat

SEQ ID NO: 5189378 - DNA, 25 bp, Homo sapien
ctaaaggcgtaacaaaccagccacg

SEQ ID NO: 5189379 - DNA, 25 bp, Homo sapien
gagctggaattatagcagctattac

SEQ ID NO: 5189380 - DNA, 25 bp, Homo sapien
aaattagaatagtacaaagcagagc

SEQ ID NO: 5189381 - DNA, 25 bp, Homo sapien
gaattatagcagctattactgtcca

SEQ ID NO: 5189382 - DNA, 25 bp, Homo sapien
taatctgttggtccataaaaattag

SEQ ID NO: 5189383 - DNA, 25 bp, Homo sapien
cattaaaatggatgttaaaatatac

SEQ ID NO: 5189384 - DNA, 25 bp, Homo sapien
cagttgtcataattatttacattaa

SEQ ID NO: 5189385 - DNA, 25 bp, Homo sapien
tatttacattaaaatggatgttaaa

SEQ ID NO: 5189386 - DNA, 25 bp, Homo sapien
taattatttacattaaaatggatgt

SEQ ID NO: 5189387 - DNA, 25 bp, Homo sapien
agccaccattaataggtccagatgg

SEQ ID NO: 5189388 - DNA, 25 bp, Homo sapien
aataggtccagatggtacccacaac

SEQ ID NO: 5189389 - DNA, 25 bp, Homo sapien
cattaataggtccagatggtaccca

SEQ ID NO: 5189390 - DNA, 25 bp, Homo sapien
gacagccaccattaataggtccaga

SEQ ID NO: 5189391 - DNA, 25 bp, Homo sapien
ctgattccagttttaggctattgac

SEQ ID NO: 5189392 - DNA, 25 bp, Homo sapien
taaagactgatgaacccataagaat

SEQ ID NO: 5189393 - DNA, 25 bp, Homo sapien
agtaaccctttgctcccgaatgccg

SEQ ID NO: 5189394 - DNA, 25 bp, Homo sapien
ccgaatgccgagaaatttgggttgt

SEQ ID NO: 5189395 - DNA, 25 bp, Homo sapien
atataaagaaacactccatatagca

SEQ ID NO: 5189396 - DNA, 25 bp, Homo sapien
aagaaacactccatatagcactggc

SEQ ID NO: 5189397 - DNA, 25 bp, Homo sapien
tataaagaaacactccatatagcac

SEQ ID NO: 5189398 - DNA, 25 bp, Homo sapien
taaagaaacactccatatagcactg

SEQ ID NO: 5189399 - DNA, 25 bp, Homo sapien
ccaaacaagcaggtaacatagattc

SEQ ID NO: 5189400 - DNA, 25 bp, Homo sapien
tattgccaaacaagcaggtaacata

SEQ ID NO: 5189401 - DNA, 25 bp, Homo sapien
gtgagaagcccagataataagtttc

SEQ ID NO: 5189402 - DNA, 25 bp, Homo sapien
aatatagatgtgggtatatatctga

SEQ ID NO: 5189403 - DNA, 25 bp, Homo sapien
cgaagcggtacgtgccttaggtata

SEQ ID NO: 5189404 - DNA, 25 bp, Homo sapien
aaatctggttgatgttttgccggca

SEQ ID NO: 5189405 - DNA, 25 bp, Homo sapien
aggccaaggcaactcatctgaataa

SEQ ID NO: 5189406 - DNA, 25 bp, Homo sapien
gaagagatgcacttttcgaagcggt

SEQ ID NO: 5189407 - DNA, 25 bp, Homo sapien
gtgaacaacaagtccatcaactttc

SEQ ID NO: 5189408 - DNA, 25 bp, Homo sapien
tttcttacaaataccagggctaaca

SEQ ID NO: 5189409 - DNA, 25 bp, Homo sapien
accagctgagttcccgcttcgtgaa

SEQ ID NO: 5189410 - DNA, 25 bp, Homo sapien
tctttttcttactctcgggcatcaa

SEQ ID NO: 5189411 - DNA, 25 bp, Homo sapien
tttctttataaaacattgattttgc

SEQ ID NO: 5189412 - DNA, 25 bp, Homo sapien
tataaaacattgattttgctcttac

SEQ ID NO: 5189413 - DNA, 25 bp, Homo sapien
ctttataaaacattgattttgctct

SEQ ID NO: 5189414 - DNA, 25 bp, Homo sapien
ctttctttataaaacattgattttg

SEQ ID NO: 5189415 - DNA, 25 bp, Homo sapien
atattttcttgaagagtatctgagg

SEQ ID NO: 5189416 - DNA, 25 bp, Homo sapien
ctgaggatgaaagcaaacgtttact

SEQ ID NO: 5189417 - DNA, 25 bp, Homo sapien
gaggatgaaagcaaacgtttactaa

SEQ ID NO: 5189418 - DNA, 25 bp, Homo sapien
ttgaagagtatctgaggatgaaagc

SEQ ID NO: 5189419 - DNA, 25 bp, Homo sapien
catatgcatatgcatgaagtacatg

SEQ ID NO: 5189420 - DNA, 25 bp, Homo sapien
tgtgcaaaatgtcagggttccaata

SEQ ID NO: 5189421 - DNA, 25 bp, Homo sapien
gaagtacatgaaaatttggaacaga

SEQ ID NO: 5189422 - DNA, 25 bp, Homo sapien
tctgcgaccttggactggcctgtgt

SEQ ID NO: 5189423 - DNA, 25 bp, Homo sapien
caagccatgcttatctgaagagaag

SEQ ID NO: 5189424 - DNA, 25 bp, Homo sapien
agatagcttttccaagccatgctta

SEQ ID NO: 5189425 - DNA, 25 bp, Homo sapien
gccatgcttatctgaagagaagggt

SEQ ID NO: 5189426 - DNA, 25 bp, Homo sapien
ttttccaagccatgcttatctgaag

SEQ ID NO: 5189427 - DNA, 25 bp, Homo sapien
caatgggagttgtactgtgccctca

SEQ ID NO: 5189428 - DNA, 25 bp, Homo sapien
cttccaatgggagttgtactgtgcc

SEQ ID NO: 5189429 - DNA, 25 bp, Homo sapien
gtgcccttccaatgggagttgtact

SEQ ID NO: 5189430 - DNA, 25 bp, Homo sapien
gggagttgtactgtgccctcatctt

SEQ ID NO: 5189431 - DNA, 25 bp, Homo sapien
ccacaaggcagtctttgacatttca

SEQ ID NO: 5189432 - DNA, 25 bp, Homo sapien
cttttggaaggaaagcttgactcct

SEQ ID NO: 5189433 - DNA, 25 bp, Homo sapien
tatcggcagtaatcagaaggttcct

SEQ ID NO: 5189434 - DNA, 25 bp, Homo sapien
ccttatcttttgagttatcggcagt

SEQ ID NO: 5189435 - DNA, 25 bp, Homo sapien
tttggggaatcagcttctagagtga

SEQ ID NO: 5189436 - DNA, 25 bp, Homo sapien
ctttggggaatcagcttctagagtg

SEQ ID NO: 5189437 - DNA, 25 bp, Homo sapien
gatgatagttgaaaatgtcagccat

SEQ ID NO: 5189438 - DNA, 25 bp, Homo sapien
tgatgatagttgaaaatgtcagcca

SEQ ID NO: 5189439 - DNA, 25 bp, Homo sapien
tcatagacaagtctccctgtcaaca

SEQ ID NO: 5189440 - DNA, 25 bp, Homo sapien
cctgtcaacacctttccctgagtca

SEQ ID NO: 5189441 - DNA, 25 bp, Homo sapien
catagacaagtctccctgtcaacac

SEQ ID NO: 5189442 - DNA, 25 bp, Homo sapien
tagacaagtctccctgtcaacacct

SEQ ID NO: 5189443 - DNA, 25 bp, Homo sapien
aaattatcaggcatcttcaggtcac

SEQ ID NO: 5189444 - DNA, 25 bp, Homo sapien
tgtctaacgtacagcaaggaacaca

SEQ ID NO: 5189445 - DNA, 25 bp, Homo sapien
tcacagggatgtctcactgctcaga

SEQ ID NO: 5189446 - DNA, 25 bp, Homo sapien
aaaacatctgttgtcagtgggagac

SEQ ID NO: 5189447 - DNA, 25 bp, Homo sapien
tgagaacatgattcaggaccagcat

SEQ ID NO: 5189448 - DNA, 25 bp, Homo sapien
caattggagagctgttggtctaaca

SEQ ID NO: 5189449 - DNA, 25 bp, Homo sapien
ttaagcagtgcatgaccattagctg

SEQ ID NO: 5189450 - DNA, 25 bp, Homo sapien
tcatgtgcacttccaacagagtaca

SEQ ID NO: 5189451 - DNA, 25 bp, Homo sapien
catgtccgtgacaattctttttgga

SEQ ID NO: 5189452 - DNA, 25 bp, Homo sapien
caatactgacatgtccgtgacaatt

SEQ ID NO: 5189453 - DNA, 25 bp, Homo sapien
tgaaggtactcattaagcatttgct

SEQ ID NO: 5189454 - DNA, 25 bp, Homo sapien
tgctgggcacttgaaggtactcatt

SEQ ID NO: 5189455 - DNA, 25 bp, Homo sapien
gcataccaacacgagcaggctactg

SEQ ID NO: 5189456 - DNA, 25 bp, Homo sapien
tgtaagggaaactgccagcaacgca

SEQ ID NO: 5189457 - DNA, 25 bp, Homo sapien
cagaagtttgaattatccggtcggg

SEQ ID NO: 5189458 - DNA, 25 bp, Homo sapien
tcccctcggagaagagctgttcaca

SEQ ID NO: 5189459 - DNA, 25 bp, Homo sapien
tcatcttaagtagggacttctgtct

SEQ ID NO: 5189460 - DNA, 25 bp, Homo sapien
ctatcatcttaagtagggacttctg

SEQ ID NO: 5189461 - DNA, 25 bp, Homo sapien
tcttaagtagggacttctgtcttca

SEQ ID NO: 5189462 - DNA, 25 bp, Homo sapien
acctatcatcttaagtagggacttc

SEQ ID NO: 5189463 - DNA, 25 bp, Homo sapien
tgaagaccatggaatagctagcagc

SEQ ID NO: 5189464 - DNA, 25 bp, Homo sapien
tgagccacttcataaaacaatgttt

SEQ ID NO: 5189465 - DNA, 25 bp, Homo sapien
taagaagagtactgacttcctaatt

SEQ ID NO: 5189466 - DNA, 25 bp, Homo sapien
tcaaaactgcactgtcaagatgatg

SEQ ID NO: 5189467 - DNA, 25 bp, Homo sapien
ctgtggagtcggcactgccactgga

SEQ ID NO: 5189468 - DNA, 25 bp, Homo sapien
cgagcagctacagatggttcttctt

SEQ ID NO: 5189469 - DNA, 25 bp, Homo sapien
actgaaggaaaagctcctcagagat

SEQ ID NO: 5189470 - DNA, 25 bp, Homo sapien
cagcatgatccaacgagcagctaca

SEQ ID NO: 5189471 - DNA, 25 bp, Homo sapien
tatttgttggaaggtaactgaggaa

SEQ ID NO: 5189472 - DNA, 25 bp, Homo sapien
ttatttgttggaaggtaactgagga

SEQ ID NO: 5189473 - DNA, 25 bp, Homo sapien
cgttaggttatgcaaaacagggtgc

SEQ ID NO: 5189474 - DNA, 25 bp, Homo sapien
tgttgagtgctgataaaatgttgac

SEQ ID NO: 5189475 - DNA, 25 bp, Homo sapien
cccatgggtacagttgtttgataga

SEQ ID NO: 5189476 - DNA, 25 bp, Homo sapien
attatcccagaatatgccaaaggga

SEQ ID NO: 5189477 - DNA, 25 bp, Homo sapien
catttaattatggtctctggctaca

SEQ ID NO: 5189478 - DNA, 25 bp, Homo sapien
gtgacagagatgtggaccacaatgc

SEQ ID NO: 5189479 - DNA, 25 bp, Homo sapien
cattgggcagatgcagaagcgtcag

SEQ ID NO: 5189480 - DNA, 25 bp, Homo sapien
gcctttcttgggtaaagtgtattca

SEQ ID NO: 5189481 - DNA, 25 bp, Homo sapien
ggaccagtgccccgaagtgtagctg

SEQ ID NO: 5189482 - DNA, 25 bp, Homo sapien
accagtgccccgaagtgtagctgag

SEQ ID NO: 5189483 - DNA, 25 bp, Homo sapien
gattttgcgtggggttggaccagtg

SEQ ID NO: 5189484 - DNA, 25 bp, Homo sapien
attttgcgtggggttggaccagtgc

SEQ ID NO: 5189485 - DNA, 25 bp, Homo sapien
aacatttgaaaaagataggacagtt

SEQ ID NO: 5189486 - DNA, 25 bp, Homo sapien
tggagctcaggtcaggctccgtctt

SEQ ID NO: 5189487 - DNA, 25 bp, Homo sapien
gagctcaggtcaggctccgtcttac

SEQ ID NO: 5189488 - DNA, 25 bp, Homo sapien
ttgaaaaagataggacagttggagc

SEQ ID NO: 5189489 - DNA, 25 bp, Homo sapien
gtcaccatcatcaccgtgcccgtgg

SEQ ID NO: 5189490 - DNA, 25 bp, Homo sapien
tcaccatcatcaccgtgcccgtggt

SEQ ID NO: 5189491 - DNA, 25 bp, Homo sapien
catcatcaccgtgcccgtggttctg

SEQ ID NO: 5189492 - DNA, 25 bp, Homo sapien
accatcatcaccgtgcccgtggttc

SEQ ID NO: 5189493 - DNA, 25 bp, Homo sapien
cttccctctaattggacttgatctg

SEQ ID NO: 5189494 - DNA, 25 bp, Homo sapien
tggacttgatctgctcggcttgcag

SEQ ID NO: 5189495 - DNA, 25 bp, Homo sapien
attggacttgatctgctcggcttgc

SEQ ID NO: 5189496 - DNA, 25 bp, Homo sapien
tctaattggacttgatctgctcggc

SEQ ID NO: 5189497 - DNA, 25 bp, Homo sapien
ctctgacaggtgaagggacgtccca

SEQ ID NO: 5189498 - DNA, 25 bp, Homo sapien
tctcgcttagctttcggaccctggc

SEQ ID NO: 5189499 - DNA, 25 bp, Homo sapien
ggcgtcgagctttgaatgtcccgga

SEQ ID NO: 5189500 - DNA, 25 bp, Homo sapien
ggtagagaaaccaacgctaatgtgc

SEQ ID NO: 5189501 - DNA, 25 bp, Homo sapien
cttgaaaagactatgagaggccgca

SEQ ID NO: 5189502 - DNA, 25 bp, Homo sapien
taatcatgtggtaatgccccatcgg

SEQ ID NO: 5189503 - DNA, 25 bp, Homo sapien
aacttcctagctgaatggcttggcc

SEQ ID NO: 5189504 - DNA, 25 bp, Homo sapien
tagagtagccattaagaccttgaac

SEQ ID NO: 5189505 - DNA, 25 bp, Homo sapien
tcgtctctgcaagcatggttgtcct

SEQ ID NO: 5189506 - DNA, 25 bp, Homo sapien
gattaactaggtcgtggagacacgt

SEQ ID NO: 5189507 - DNA, 25 bp, Homo sapien
ctttgttgggagaagtgcatggaca

SEQ ID NO: 5189508 - DNA, 25 bp, Homo sapien
gttttgtgaactgcattgagcgctt

SEQ ID NO: 5189509 - DNA, 25 bp, Homo sapien
cagttctaggagctataagtccaaa

SEQ ID NO: 5189510 - DNA, 25 bp, Homo sapien
gagacaaagaaagatccactgtaat

SEQ ID NO: 5189511 - DNA, 25 bp, Homo sapien
tcccatatggtgtgagagtgaccca

SEQ ID NO: 5189512 - DNA, 25 bp, Homo sapien
aagtccaaaatcaatacatcacagg

SEQ ID NO: 5189513 - DNA, 25 bp, Homo sapien
tggcctggtgaatggctgcaagaag

SEQ ID NO: 5189514 - DNA, 25 bp, Homo sapien
cctacggccttgcaggtggcctggt

SEQ ID NO: 5189515 - DNA, 25 bp, Homo sapien
tttgtcttctccctacggccttgca

SEQ ID NO: 5189516 - DNA, 25 bp, Homo sapien
tgtcttctccctacggccttgcagg

SEQ ID NO: 5189517 - DNA, 25 bp, Homo sapien
gaagctcaggctgtcttgtccctgg

SEQ ID NO: 5189518 - DNA, 25 bp, Homo sapien
tcttctctgtgaggccggtgaccat

SEQ ID NO: 5189519 - DNA, 25 bp, Homo sapien
tctgcctgggtcatatggaaccaag

SEQ ID NO: 5189520 - DNA, 25 bp, Homo sapien
tggaaccaaggatactcttttatag

SEQ ID NO: 5189521 - DNA, 25 bp, Homo sapien
atctttgggtagaaactcttgccgt

SEQ ID NO: 5189522 - DNA, 25 bp, Homo sapien
cttgtttagcaatagaagtagcttg

SEQ ID NO: 5189523 - DNA, 25 bp, Homo sapien
tctatccatatgtgcattctcagtc

SEQ ID NO: 5189524 - DNA, 25 bp, Homo sapien
ctctgaggggctaagggatgccata

SEQ ID NO: 5189525 - DNA, 25 bp, Homo sapien
tgctggcacactgaacccttgcact

SEQ ID NO: 5189526 - DNA, 25 bp, Homo sapien
cccttgcactgctgagatccaagaa

SEQ ID NO: 5189527 - DNA, 25 bp, Homo sapien
aatttgagaacctggtttgtccagg

SEQ ID NO: 5189528 - DNA, 25 bp, Homo sapien
aaagtgagaatactttggtcacttc

SEQ ID NO: 5189529 - DNA, 25 bp, Homo sapien
caggaccgttcatactgctatagta

SEQ ID NO: 5189530 - DNA, 25 bp, Homo sapien
agttcaggctccctacaggaccgtt

SEQ ID NO: 5189531 - DNA, 25 bp, Homo sapien
gctccctacaggaccgttcatactg

SEQ ID NO: 5189532 - DNA, 25 bp, Homo sapien
tagtaataaaagtgagttatgagga

SEQ ID NO: 5189533 - DNA, 25 bp, Homo sapien
atggtaaagggccaggaaatgtcct

SEQ ID NO: 5189534 - DNA, 25 bp, Homo sapien
tcttgtactggcttcgggctttcca

SEQ ID NO: 5189535 - DNA, 25 bp, Homo sapien
ccagtttctgggctaaggccagagc

SEQ ID NO: 5189536 - DNA, 25 bp, Homo sapien
atgtttgcagatgagtctttctttc

SEQ ID NO: 5189537 - DNA, 25 bp, Homo sapien
tctaatattcacgagctcaattaaa

SEQ ID NO: 5189538 - DNA, 25 bp, Homo sapien
ctaatattcacgagctcaattaaaa

SEQ ID NO: 5189539 - DNA, 25 bp, Homo sapien
tctctaatattcacgagctcaatta

SEQ ID NO: 5189540 - DNA, 25 bp, Homo sapien
tcttctctaatattcacgagctcaa

SEQ ID NO: 5189541 - DNA, 25 bp, Homo sapien
agcagtatagagttacatcctagat

SEQ ID NO: 5189542 - DNA, 25 bp, Homo sapien
gaaagcagtatagagttacatccta

SEQ ID NO: 5189543 - DNA, 25 bp, Homo sapien
ttttaaggtaatgaagatgacatgg

SEQ ID NO: 5189544 - DNA, 25 bp, Homo sapien
cttttaaggtaatgaagatgacatg

SEQ ID NO: 5189545 - DNA, 25 bp, Homo sapien
gatgaagtaccccaacctgtttaca

SEQ ID NO: 5189546 - DNA, 25 bp, Homo sapien
aaaatatgaaagtgctagattctgt

SEQ ID NO: 5189547 - DNA, 25 bp, Homo sapien
gaagaactggtagccacagtggtga

SEQ ID NO: 5189548 - DNA, 25 bp, Homo sapien
aattattccgatctgacatatctgc

SEQ ID NO: 5189549 - DNA, 25 bp, Homo sapien
ttgttgacataatcttctttgatga

SEQ ID NO: 5189550 - DNA, 25 bp, Homo sapien
aggttgcaaaagaacttccaacata

SEQ ID NO: 5189551 - DNA, 25 bp, Homo sapien
caagttacagtatcaggagtcataa

SEQ ID NO: 5189552 - DNA, 25 bp, Homo sapien
tctttgatgaagaagccgtgctcag

SEQ ID NO: 5189553 - DNA, 25 bp, Homo sapien
tgaattggcatacagtttctgtacc

SEQ ID NO: 5189554 - DNA, 25 bp, Homo sapien
caggtcaattcaattactccctgca

SEQ ID NO: 5189555 - DNA, 25 bp, Homo sapien
ggcatacagtttctgtaccacagtg

SEQ ID NO: 5189556 - DNA, 25 bp, Homo sapien
ctccctgcatgccaactgaattggc

SEQ ID NO: 5189557 - DNA, 25 bp, Homo sapien
ctggattctaatattgatctgcagt

SEQ ID NO: 5189558 - DNA, 25 bp, Homo sapien
gcagtaagttgtctccagcctcagg

SEQ ID NO: 5189559 - DNA, 25 bp, Homo sapien
tattgatctgcagtaagttgtctcc

SEQ ID NO: 5189560 - DNA, 25 bp, Homo sapien
tctaatattgatctgcagtaagttg

SEQ ID NO: 5189561 - DNA, 25 bp, Homo sapien
tttccaggtgcaggttgaatcccct

SEQ ID NO: 5189562 - DNA, 25 bp, Homo sapien
gttagaaactactggtgacctgcca

SEQ ID NO: 5189563 - DNA, 25 bp, Homo sapien
cagaagaaccaatcctggcctggaa

SEQ ID NO: 5189564 - DNA, 25 bp, Homo sapien
ggacaacaccttcccagattcagga

SEQ ID NO: 5189565 - DNA, 25 bp, Homo sapien
attttctggtactctgtgaaagaag

SEQ ID NO: 5189566 - DNA, 25 bp, Homo sapien
aagagaaaagggagtcatgcatttt

SEQ ID NO: 5189567 - DNA, 25 bp, Homo sapien
agagaaaagggagtcatgcattttg

SEQ ID NO: 5189568 - DNA, 25 bp, Homo sapien
caggtcctgagagcacaaaaaagtc

SEQ ID NO: 5189569 - DNA, 25 bp, Homo sapien
gcttagagtccctgcaaaacctgag

SEQ ID NO: 5189570 - DNA, 25 bp, Homo sapien
gatgatgcgagatctcagccactga

SEQ ID NO: 5189571 - DNA, 25 bp, Homo sapien
taaaaacgatgcagatgcaagcctg

SEQ ID NO: 5189572 - DNA, 25 bp, Homo sapien
tcattctttcatctacatagtacat

SEQ ID NO: 5189573 - DNA, 25 bp, Homo sapien
tgttcattctttcatctacatagta

SEQ ID NO: 5189574 - DNA, 25 bp, Homo sapien
gttcattctttcatctacatagtac

SEQ ID NO: 5189575 - DNA, 25 bp, Homo sapien
ttgttcattctttcatctacatagt

SEQ ID NO: 5189576 - DNA, 25 bp, Homo sapien
ccttcaaagaagatttcctgtttca

SEQ ID NO: 5189577 - DNA, 25 bp, Homo sapien
cagccatttgtgcctgggttgtttt

SEQ ID NO: 5189578 - DNA, 25 bp, Homo sapien
tctgaatttgtacatttgcaagtca

SEQ ID NO: 5189579 - DNA, 25 bp, Homo sapien
tcactttttggtctgaatttgtaca

SEQ ID NO: 5189580 - DNA, 25 bp, Homo sapien
tgaaatgttaatgttgcaacataat

SEQ ID NO: 5189581 - DNA, 25 bp, Homo sapien
tggataatctgggcttcaaaatggt

SEQ ID NO: 5189582 - DNA, 25 bp, Homo sapien
tggaaacagtcagtttggataatct

SEQ ID NO: 5189583 - DNA, 25 bp, Homo sapien
cataatttaatctgtcaatggaaac

SEQ ID NO: 5189584 - DNA, 25 bp, Homo sapien
ttctcctctataccatgagcagcat

SEQ ID NO: 5189585 - DNA, 25 bp, Homo sapien
ttcagaatcagtgtcgggtaagctg

SEQ ID NO: 5189586 - DNA, 25 bp, Homo sapien
tccatttgctactgcatttcttctc

SEQ ID NO: 5189587 - DNA, 25 bp, Homo sapien
agctgtgactaacggggcctcttcc

SEQ ID NO: 5189588 - DNA, 25 bp, Homo sapien
tcatctgtggtctttactggaagag

SEQ ID NO: 5189589 - DNA, 25 bp, Homo sapien
tctgtggtctttactggaagagtca

SEQ ID NO: 5189590 - DNA, 25 bp, Homo sapien
gtccaaccagatcatcatctgtggt

SEQ ID NO: 5189591 - DNA, 25 bp, Homo sapien
ctgtggtctttactggaagagtcat

SEQ ID NO: 5189592 - DNA, 25 bp, Homo sapien
cagccactattcttacagccatgga

SEQ ID NO: 5189593 - DNA, 25 bp, Homo sapien
attcttacagccatggaataagttg

SEQ ID NO: 5189594 - DNA, 25 bp, Homo sapien
ctattcttacagccatggaataagt

SEQ ID NO: 5189595 - DNA, 25 bp, Homo sapien
gccactattcttacagccatggaat

SEQ ID NO: 5189596 - DNA, 25 bp, Homo sapien
catgattagtggaaaaggaaccaac

SEQ ID NO: 5189597 - DNA, 25 bp, Homo sapien
tgttcaaaacatgcaggttaccact

SEQ ID NO: 5189598 - DNA, 25 bp, Homo sapien
caacccttttgcaatactagtaacg

SEQ ID NO: 5189599 - DNA, 25 bp, Homo sapien
gcactatctgcagtgttgtacacaa

SEQ ID NO: 5189600 - DNA, 25 bp, Homo sapien
ggattagcacttgattgaagattct

SEQ ID NO: 5189601 - DNA, 25 bp, Homo sapien
ggtagaattacctatcacatttccc

SEQ ID NO: 5189602 - DNA, 25 bp, Homo sapien
ccaatcttgactattcagaatgctg

SEQ ID NO: 5189603 - DNA, 25 bp, Homo sapien
gcttggggaacaatgatggtgcaca

SEQ ID NO: 5189604 - DNA, 25 bp, Homo sapien
tgtgccgactatcaaataaatggtg

SEQ ID NO: 5189605 - DNA, 25 bp, Homo sapien
caaataaatggtgaaatcatctgca

SEQ ID NO: 5189606 - DNA, 25 bp, Homo sapien
caaaagaagtgtgccgactatcaaa

SEQ ID NO: 5189607 - DNA, 25 bp, Homo sapien
gcactgcaaaagaagtgtgccgact

SEQ ID NO: 5189608 - DNA, 25 bp, Homo sapien
agtgcaaatgagattcatttatttt

SEQ ID NO: 5189609 - DNA, 25 bp, Homo sapien
tcctttagcctctcaattatattcc

SEQ ID NO: 5189610 - DNA, 25 bp, Homo sapien
tatccgccggaggagctttgctaga

SEQ ID NO: 5189611 - DNA, 25 bp, Homo sapien
ttcaccagccgagggtaactccctg

SEQ ID NO: 5189612 - DNA, 25 bp, Homo sapien
gccctgcacattttggcctacaaag

SEQ ID NO: 5189613 - DNA, 25 bp, Homo sapien
tattgttaaggcagaacctgctggg

SEQ ID NO: 5189614 - DNA, 25 bp, Homo sapien
tgtttattgttactcactttttcga

SEQ ID NO: 5189615 - DNA, 25 bp, Homo sapien
gctgagttggtggttcaagtccatc

SEQ ID NO: 5189616 - DNA, 25 bp, Homo sapien
gtcttggcttccttctaagctgagt

SEQ ID NO: 5189617 - DNA, 25 bp, Homo sapien
ctgagttggtggttcaagtccatcc

SEQ ID NO: 5189618 - DNA, 25 bp, Homo sapien
gatctaggaaactttaagtcttggc

SEQ ID NO: 5189619 - DNA, 25 bp, Homo sapien
ggaaagttgtatattaaagaatata

SEQ ID NO: 5189620 - DNA, 25 bp, Homo sapien
gaaagttgtatattaaagaatatag

SEQ ID NO: 5189621 - DNA, 25 bp, Homo sapien
aagttgtatattaaagaatataggg

SEQ ID NO: 5189622 - DNA, 25 bp, Homo sapien
tatattaaagaatatagggaactta

SEQ ID NO: 5189623 - DNA, 25 bp, Homo sapien
taagacgatgtctaggatttggcct

SEQ ID NO: 5189624 - DNA, 25 bp, Homo sapien
ggttccagggaataagatgagcctt

SEQ ID NO: 5189625 - DNA, 25 bp, Homo sapien
gctatctctagggttcactgtgggt

SEQ ID NO: 5189626 - DNA, 25 bp, Homo sapien
tatcagggatcactcacagtccatg

SEQ ID NO: 5189627 - DNA, 25 bp, Homo sapien
tcacacttaatcactatagctaggg

SEQ ID NO: 5189628 - DNA, 25 bp, Homo sapien
gttaaactaataaggctccagctca

SEQ ID NO: 5189629 - DNA, 25 bp, Homo sapien
taattgggttccgtgttcacactta

SEQ ID NO: 5189630 - DNA, 25 bp, Homo sapien
taatcactatagctagggagtggga

SEQ ID NO: 5189631 - DNA, 25 bp, Homo sapien
gacattctggaggtatctgtaggaa

SEQ ID NO: 5189632 - DNA, 25 bp, Homo sapien
ctctaaatggagtacttgggtagct

SEQ ID NO: 5189633 - DNA, 25 bp, Homo sapien
gcagggagaacagacaatagtaagt

SEQ ID NO: 5189634 - DNA, 25 bp, Homo sapien
gagcaaaaacttagaggtcatgaat

SEQ ID NO: 5189635 - DNA, 25 bp, Homo sapien
tgaaaggcgcactaaccgcacagtt

SEQ ID NO: 5189636 - DNA, 25 bp, Homo sapien
gacgagcggagcgagcgtcaccctc

SEQ ID NO: 5189637 - DNA, 25 bp, Homo sapien
ggcgcaggtgcaaggaggcgcagct

SEQ ID NO: 5189638 - DNA, 25 bp, Homo sapien
cctcgagtcgcgtccgcagtgctgg

SEQ ID NO: 5189639 - DNA, 25 bp, Homo sapien
ctcctccgtatcccgggtaggccat

SEQ ID NO: 5189640 - DNA, 25 bp, Homo sapien
ttactggaacaagaagagggtggct

SEQ ID NO: 5189641 - DNA, 25 bp, Homo sapien
gaccagaaaacctgcggctccaagt

SEQ ID NO: 5189642 - DNA, 25 bp, Homo sapien
aagtcagcccaggatcaatgctcgc

SEQ ID NO: 5189643 - DNA, 25 bp, Homo sapien
gagggtggcttgttcctccattcca

SEQ ID NO: 5189644 - DNA, 25 bp, Homo sapien
taagtatacacggagtcaccagctg

SEQ ID NO: 5189645 - DNA, 25 bp, Homo sapien
tccatcgaggagtatagctgggcct

SEQ ID NO: 5189646 - DNA, 25 bp, Homo sapien
tcaccagctgaggaataagtgtctg

SEQ ID NO: 5189647 - DNA, 25 bp, Homo sapien
tgctggcccagagtatccatcgagg

SEQ ID NO: 5189648 - DNA, 25 bp, Homo sapien
aaacatctctgaagttcttcagcat

SEQ ID NO: 5189649 - DNA, 25 bp, Homo sapien
tgtgtcaaacatctctgaagttctt

SEQ ID NO: 5189650 - DNA, 25 bp, Homo sapien
cattaattccagactgtgtcaaaca

SEQ ID NO: 5189651 - DNA, 25 bp, Homo sapien
ccattaattccagactgtgtcaaac

SEQ ID NO: 5189652 - DNA, 25 bp, Homo sapien
aaagaagtgtcctctatgagcagtt

SEQ ID NO: 5189653 - DNA, 25 bp, Homo sapien
catagcaggatatcaatagataatc

SEQ ID NO: 5189654 - DNA, 25 bp, Homo sapien
actatgtgcatgtataactgtgata

SEQ ID NO: 5189655 - DNA, 25 bp, Homo sapien
taatgttaaggagacaggaatacac

SEQ ID NO: 5189656 - DNA, 25 bp, Homo sapien
ccagagttctaggataatacctgac

SEQ ID NO: 5189657 - DNA, 25 bp, Homo sapien
ggagatctaactcaagagaaacggg

SEQ ID NO: 5189658 - DNA, 25 bp, Homo sapien
tttaaaagaggacaacaagagatgg

SEQ ID NO: 5189659 - DNA, 25 bp, Homo sapien
tataactacattggaaggacaggag

SEQ ID NO: 5189660 - DNA, 25 bp, Homo sapien
gagaagcaacccttggagaagaccc

SEQ ID NO: 5189661 - DNA, 25 bp, Homo sapien
tacctaaggagcattctaagcctca

SEQ ID NO: 5189662 - DNA, 25 bp, Homo sapien
gctgatggatgtgagttaaccaacc

SEQ ID NO: 5189663 - DNA, 25 bp, Homo sapien
gaattggctgaatgtctacctaagg

SEQ ID NO: 5189664 - DNA, 25 bp, Homo sapien
catggcaatcataattctgcaggtt

SEQ ID NO: 5189665 - DNA, 25 bp, Homo sapien
ccaacatggcaatcataattctgca

SEQ ID NO: 5189666 - DNA, 25 bp, Homo sapien
aacatggcaatcataattctgcagg

SEQ ID NO: 5189667 - DNA, 25 bp, Homo sapien
atccaacatggcaatcataattctg

SEQ ID NO: 5189668 - DNA, 25 bp, Homo sapien
catgagtatgcttctgtagacttag

SEQ ID NO: 5189669 - DNA, 25 bp, Homo sapien
ttactacaggcactgaaatctaacc

SEQ ID NO: 5189670 - DNA, 25 bp, Homo sapien
gaaagcctagaatttaaacaggatc

SEQ ID NO: 5189671 - DNA, 25 bp, Homo sapien
ccactggcttgatagtcagaaagca

SEQ ID NO: 5189672 - DNA, 25 bp, Homo sapien
tccttccaggcattaagagctgccc

SEQ ID NO: 5189673 - DNA, 25 bp, Homo sapien
catgatgttctactgtgccacttcc

SEQ ID NO: 5189674 - DNA, 25 bp, Homo sapien
ccataagaccaatggcttgacgcaa

SEQ ID NO: 5189675 - DNA, 25 bp, Homo sapien
tggcttgacgcaactcatgatgttc

SEQ ID NO: 5189676 - DNA, 25 bp, Homo sapien
tacagacttttgactgactgaggca

SEQ ID NO: 5189677 - DNA, 25 bp, Homo sapien
gcaagctttggctcccaattagata

SEQ ID NO: 5189678 - DNA, 25 bp, Homo sapien
caatctaactggtaagtactaacaa

SEQ ID NO: 5189679 - DNA, 25 bp, Homo sapien
gatatcctgccaagttataaaagaa

SEQ ID NO: 5189680 - DNA, 25 bp, Homo sapien
aactaagagaaatttgaggatcaac

SEQ ID NO: 5189681 - DNA, 25 bp, Homo sapien
tgtacccttatagatggtcctatgc

SEQ ID NO: 5189682 - DNA, 25 bp, Homo sapien
ggatcaacatgattactctacaggg

SEQ ID NO: 5189683 - DNA, 25 bp, Homo sapien
ccactgaacatattacttgcaagta

SEQ ID NO: 5189684 - DNA, 25 bp, Homo sapien
tgccattcttgctataacgtttaac

SEQ ID NO: 5189685 - DNA, 25 bp, Homo sapien
caatagtagttaatgtttgaggact

SEQ ID NO: 5189686 - DNA, 25 bp, Homo sapien
tgctataacgtttaacaatagtagt

SEQ ID NO: 5189687 - DNA, 25 bp, Homo sapien
aatgtttgaggactcaacctataac

SEQ ID NO: 5189688 - DNA, 25 bp, Homo sapien
ttataaacttgctggaggaaatgag

SEQ ID NO: 5189689 - DNA, 25 bp, Homo sapien
aaatagctacataacactgtgcact

SEQ ID NO: 5189690 - DNA, 25 bp, Homo sapien
ttcaaatatttagtgcacccaggta

SEQ ID NO: 5189691 - DNA, 25 bp, Homo sapien
aatgagacacattattcaagaaaaa

SEQ ID NO: 5189692 - DNA, 25 bp, Homo sapien
tcgtcatatatgaaattcgcagacc

SEQ ID NO: 5189693 - DNA, 25 bp, Homo sapien
catatatgaaattcgcagacccttg

SEQ ID NO: 5189694 - DNA, 25 bp, Homo sapien
gacccttgttgcaagtggtctcttt

SEQ ID NO: 5189695 - DNA, 25 bp, Homo sapien
gaaattcgcagacccttgttgcaag

SEQ ID NO: 5189696 - DNA, 25 bp, Homo sapien
ggcacctataccaatattaatctta

SEQ ID NO: 5189697 - DNA, 25 bp, Homo sapien
aaattgtttggcacctataccaata

SEQ ID NO: 5189698 - DNA, 25 bp, Homo sapien
tggaaaagtatgtggcataccaaat

SEQ ID NO: 5189699 - DNA, 25 bp, Homo sapien
actaactgagaactatctagaatgc

SEQ ID NO: 5189700 - DNA, 25 bp, Homo sapien
cagtaatgttgaccccataacttcc

SEQ ID NO: 5189701 - DNA, 25 bp, Homo sapien
tgtttccaaggcttataattcaagc

SEQ ID NO: 5189702 - DNA, 25 bp, Homo sapien
taaatatcagtaatgttgaccccat

SEQ ID NO: 5189703 - DNA, 25 bp, Homo sapien
cttataattcaagccaataaatatc

SEQ ID NO: 5189704 - DNA, 25 bp, Homo sapien
gtttaacaggtaggaagaacataga

SEQ ID NO: 5189705 - DNA, 25 bp, Homo sapien
tttaacaggtaggaagaacatagaa

SEQ ID NO: 5189706 - DNA, 25 bp, Homo sapien
aagaattcacagtgtctcttcaggt

SEQ ID NO: 5189707 - DNA, 25 bp, Homo sapien
taacaggtaggaagaacatagaaaa

SEQ ID NO: 5189708 - DNA, 25 bp, Homo sapien
gtctaatttgtaaccttcagataag

SEQ ID NO: 5189709 - DNA, 25 bp, Homo sapien
ttcatttctagccaaccctcaaaca

SEQ ID NO: 5189710 - DNA, 25 bp, Homo sapien
ttggcttcttatacaatctatcttg

SEQ ID NO: 5189711 - DNA, 25 bp, Homo sapien
aacatggcacaaaatccaggctttc

SEQ ID NO: 5189712 - DNA, 25 bp, Homo sapien
tagtcttatttcactacagattgaa

SEQ ID NO: 5189713 - DNA, 25 bp, Homo sapien
gattgaactagggagataattttct

SEQ ID NO: 5189714 - DNA, 25 bp, Homo sapien
cactacagattgaactagggagata

SEQ ID NO: 5189715 - DNA, 25 bp, Homo sapien
aaaacaatgccttctgtagtcttat

SEQ ID NO: 5189716 - DNA, 25 bp, Homo sapien
taagtttataaagagttgacattac

SEQ ID NO: 5189717 - DNA, 25 bp, Homo sapien
gccattttaggtgaactatgtcttc

SEQ ID NO: 5189718 - DNA, 25 bp, Homo sapien
caattttgaatgttgacatatcatc

SEQ ID NO: 5189719 - DNA, 25 bp, Homo sapien
aaaaagtctagattcagagcaggat

SEQ ID NO: 5189720 - DNA, 25 bp, Homo sapien
cacatagatgcactcaaaatactta

SEQ ID NO: 5189721 - DNA, 25 bp, Homo sapien
tgtggtgcctactatgctcaaaaca

SEQ ID NO: 5189722 - DNA, 25 bp, Homo sapien
tttcggcagttttagtaccacgcag

SEQ ID NO: 5189723 - DNA, 25 bp, Homo sapien
gattctacgtcgcattttcggcagt

SEQ ID NO: 5189724 - DNA, 25 bp, Homo sapien
tttaaagcatcgaaaaagtgaactg

SEQ ID NO: 5189725 - DNA, 25 bp, Homo sapien
taaagtgcagaagagttgcctggca

SEQ ID NO: 5189726 - DNA, 25 bp, Homo sapien
ggtgtaagttaaccagtgcaaacta

SEQ ID NO: 5189727 - DNA, 25 bp, Homo sapien
cctggcaattaagttggatcggcat

SEQ ID NO: 5189728 - DNA, 25 bp, Homo sapien
tgtccagtttagtaatgccataaga

SEQ ID NO: 5189729 - DNA, 25 bp, Homo sapien
taaactgccactcagaatagaagtg

SEQ ID NO: 5189730 - DNA, 25 bp, Homo sapien
taagattacaggcaaacttaatgtc

SEQ ID NO: 5189731 - DNA, 25 bp, Homo sapien
tctggatgcatgtgtaaataggtca

SEQ ID NO: 5189732 - DNA, 25 bp, Homo sapien
ttcttcaaagattggtatgtggtat

SEQ ID NO: 5189733 - DNA, 25 bp, Homo sapien
ctacttgcacaactagttttgcaat

SEQ ID NO: 5189734 - DNA, 25 bp, Homo sapien
gcacaactagttttgcaataagctt

SEQ ID NO: 5189735 - DNA, 25 bp, Homo sapien
caaagattggtatgtggtattgaca

SEQ ID NO: 5189736 - DNA, 25 bp, Homo sapien
tagtcacttttgcacacagattcag

SEQ ID NO: 5189737 - DNA, 25 bp, Homo sapien
ccagtacttcgttatgaaaatgcct

SEQ ID NO: 5189738 - DNA, 25 bp, Homo sapien
gatcctcaactcatgggaattccag

SEQ ID NO: 5189739 - DNA, 25 bp, Homo sapien
gaaaatgccttccacgcaaataaga

SEQ ID NO: 5189740 - DNA, 25 bp, Homo sapien
tgatgagaaccagtcaaccggaagc

SEQ ID NO: 5189741 - DNA, 25 bp, Homo sapien
gggtcacctaatcagaatcacttgg

SEQ ID NO: 5189742 - DNA, 25 bp, Homo sapien
cagcctacagtatggtaacagcagg

SEQ ID NO: 5189743 - DNA, 25 bp, Homo sapien
ggataccatccaaccaagagtgtct

SEQ ID NO: 5189744 - DNA, 25 bp, Homo sapien
ccagatgggtcattagaagcaagtg

SEQ ID NO: 5189745 - DNA, 25 bp, Homo sapien
tatcctgggatgctacagttatgaa

SEQ ID NO: 5189746 - DNA, 25 bp, Homo sapien
ccaaaggccatgacatattaagagg

SEQ ID NO: 5189747 - DNA, 25 bp, Homo sapien
gaatgaaattaacaggccagttggc

SEQ ID NO: 5189748 - DNA, 25 bp, Homo sapien
tatcctggaattcccatgggtagtg

SEQ ID NO: 5189749 - DNA, 25 bp, Homo sapien
taatccttgacctgtaaatggtgca

SEQ ID NO: 5189750 - DNA, 25 bp, Homo sapien
cccaggacaatacaccatggtcgag

SEQ ID NO: 5189751 - DNA, 25 bp, Homo sapien
gacataaacacatattcctagggaa

SEQ ID NO: 5189752 - DNA, 25 bp, Homo sapien
tagctcagctaggtctggcttcttg

SEQ ID NO: 5189753 - DNA, 25 bp, Homo sapien
caaccaggaagaagtaggcatgcgg

SEQ ID NO: 5189754 - DNA, 25 bp, Homo sapien
taggcatgcggaggcttgaagagtg

SEQ ID NO: 5189755 - DNA, 25 bp, Homo sapien
catcctgtgcgagctcccaaaatga

SEQ ID NO: 5189756 - DNA, 25 bp, Homo sapien
gcagcagcacccttaacatcattta

SEQ ID NO: 5189757 - DNA, 25 bp, Homo sapien
gaaatcacattatcctgaattgcat

SEQ ID NO: 5189758 - DNA, 25 bp, Homo sapien
tctaagaacagatggaaatcacatt

SEQ ID NO: 5189759 - DNA, 25 bp, Homo sapien
gctcattctacatagtaatatctct

SEQ ID NO: 5189760 - DNA, 25 bp, Homo sapien
tcctaaggagctttaattggttctg

SEQ ID NO: 5189761 - DNA, 25 bp, Homo sapien
ggagctttaattggttctgcaggtc

SEQ ID NO: 5189762 - DNA, 25 bp, Homo sapien
ccagaacatagggctcctgggcctg

SEQ ID NO: 5189763 - DNA, 25 bp, Homo sapien
taatagaactctgttctacaaggaa

SEQ ID NO: 5189764 - DNA, 25 bp, Homo sapien
cagatgagatcacatgtactcaggg

SEQ ID NO: 5189765 - DNA, 25 bp, Homo sapien
tcagatgagatcacatgtactcagg

SEQ ID NO: 5189766 - DNA, 25 bp, Homo sapien
gatcagatgagatcacatgtactca

SEQ ID NO: 5189767 - DNA, 25 bp, Homo sapien
agatgagatcacatgtactcagggt

SEQ ID NO: 5189768 - DNA, 25 bp, Homo sapien
tggttttcagcttactgtagtagta

SEQ ID NO: 5189769 - DNA, 25 bp, Homo sapien
actagtttcacgttcctggatggca

SEQ ID NO: 5189770 - DNA, 25 bp, Homo sapien
gcagggggtatggttttcagcttac

SEQ ID NO: 5189771 - DNA, 25 bp, Homo sapien
tcaaaactagtttcacgttcctgga

SEQ ID NO: 5189772 - DNA, 25 bp, Homo sapien
actcagtcatggcttgattttgtaa

SEQ ID NO: 5189773 - DNA, 25 bp, Homo sapien
ccttgatgttctcacactcagtcat

SEQ ID NO: 5189774 - DNA, 25 bp, Homo sapien
gttctcacactcagtcatggcttga

SEQ ID NO: 5189775 - DNA, 25 bp, Homo sapien
catggcttgattttgtaattcctcc

SEQ ID NO: 5189776 - DNA, 25 bp, Homo sapien
ccactagcatttgataccatatgcc

SEQ ID NO: 5189777 - DNA, 25 bp, Homo sapien
tgcccaacacttccactagcatttg

SEQ ID NO: 5189778 - DNA, 25 bp, Homo sapien
tttagtattctcatctacctgagca

SEQ ID NO: 5189779 - DNA, 25 bp, Homo sapien
tgccaaggatagctcatacaatatt

SEQ ID NO: 5189780 - DNA, 25 bp, Homo sapien
acaagacccttggtcatcattagag

SEQ ID NO: 5189781 - DNA, 25 bp, Homo sapien
gagtctttgctagctctaaaagtgt

SEQ ID NO: 5189782 - DNA, 25 bp, Homo sapien
ctttgctagctctaaaagtgtatgt

SEQ ID NO: 5189783 - DNA, 25 bp, Homo sapien
tcttttattacaagacccttggtca

SEQ ID NO: 5189784 - DNA, 25 bp, Homo sapien
agaagcatgcaaaaaaggtatagta

SEQ ID NO: 5189785 - DNA, 25 bp, Homo sapien
aaatcagggcttaaattggacatgg

SEQ ID NO: 5189786 - DNA, 25 bp, Homo sapien
gacatggagtcttgactaaattttg

SEQ ID NO: 5189787 - DNA, 25 bp, Homo sapien
ggtcatgacgatgatagaagcatgc

SEQ ID NO: 5189788 - DNA, 25 bp, Homo sapien
aaaggtgggcatgaaatatttagca

SEQ ID NO: 5189789 - DNA, 25 bp, Homo sapien
ggtaaaggtgggcatgaaatattta

SEQ ID NO: 5189790 - DNA, 25 bp, Homo sapien
cttgtgaggtaaaggtgggcatgaa

SEQ ID NO: 5189791 - DNA, 25 bp, Homo sapien
tgaggtaaaggtgggcatgaaatat

SEQ ID NO: 5189792 - DNA, 25 bp, Homo sapien
cacacggtttatggcctgcactggg

SEQ ID NO: 5189793 - DNA, 25 bp, Homo sapien
tctcccgattcacacggtttatggc

SEQ ID NO: 5189794 - DNA, 25 bp, Homo sapien
tgcactgggagtcgttcggtctaca

SEQ ID NO: 5189795 - DNA, 25 bp, Homo sapien
ggaattctagttgcatttcttctac

SEQ ID NO: 5189796 - DNA, 25 bp, Homo sapien
cctgctagaactcttcgataatgaa

SEQ ID NO: 5189797 - DNA, 25 bp, Homo sapien
ggcctgtgtaattcaagatcttgtt

SEQ ID NO: 5189798 - DNA, 25 bp, Homo sapien
tgtcattgccataatcagcatttgc

SEQ ID NO: 5189799 - DNA, 25 bp, Homo sapien
tgactttggctagggaatactatgt

SEQ ID NO: 5189800 - DNA, 25 bp, Homo sapien
tccactaatgcaagatgatccaggg

SEQ ID NO: 5189801 - DNA, 25 bp, Homo sapien
catggaaagttgcaaggggaatcac

SEQ ID NO: 5189802 - DNA, 25 bp, Homo sapien
gttaaatggattagagaacaaggct

SEQ ID NO: 5189803 - DNA, 25 bp, Homo sapien
tgtttggccacttggaactatcggg

SEQ ID NO: 5189804 - DNA, 25 bp, Homo sapien
tctctgttgtcaatatccagttgga

SEQ ID NO: 5189805 - DNA, 25 bp, Homo sapien
gatatatctggcttggatctcttgc

SEQ ID NO: 5189806 - DNA, 25 bp, Homo sapien
gggtcccggcatgtcagtttcaaga

SEQ ID NO: 5189807 - DNA, 25 bp, Homo sapien
agctacagggcctaaaccgctgctg

SEQ ID NO: 5189808 - DNA, 25 bp, Homo sapien
gaactacttggctcctcttatttgg

SEQ ID NO: 5189809 - DNA, 25 bp, Homo sapien
agtttctgcaatccaattaattctc

SEQ ID NO: 5189810 - DNA, 25 bp, Homo sapien
ctacttggctcctcttatttggatt

SEQ ID NO: 5189811 - DNA, 25 bp, Homo sapien
tctgcaatccaattaattctcccca

SEQ ID NO: 5189812 - DNA, 25 bp, Homo sapien
cccaggtactgacatgtcacacctg

SEQ ID NO: 5189813 - DNA, 25 bp, Homo sapien
catgtcacacctgtctgttacttct

SEQ ID NO: 5189814 - DNA, 25 bp, Homo sapien
gcttttaagtaccaggcatggaact

SEQ ID NO: 5189815 - DNA, 25 bp, Homo sapien
aggcatggaactagaaccaccccag

SEQ ID NO: 5189816 - DNA, 25 bp, Homo sapien
gatttctattgaaacatcattaccg

SEQ ID NO: 5189817 - DNA, 25 bp, Homo sapien
gttgagcacggtatgactgtaataa

SEQ ID NO: 5189818 - DNA, 25 bp, Homo sapien
acatcattaccgttgttgagcacgg

SEQ ID NO: 5189819 - DNA, 25 bp, Homo sapien
tctctttaattcgatgtactcctga

SEQ ID NO: 5189820 - DNA, 25 bp, Homo sapien
cctgccaccagcaaccaaaaagaag

SEQ ID NO: 5189821 - DNA, 25 bp, Homo sapien
tccataatatccctgccaccagcaa

SEQ ID NO: 5189822 - DNA, 25 bp, Homo sapien
ccaccagcaaccaaaaagaagcagc

SEQ ID NO: 5189823 - DNA, 25 bp, Homo sapien
accagcaaccaaaaagaagcagctg

SEQ ID NO: 5189824 - DNA, 25 bp, Homo sapien
gggattgtgttctttcacgcacatt

SEQ ID NO: 5189825 - DNA, 25 bp, Homo sapien
ttgtgttctttcacgcacatttctt

SEQ ID NO: 5189826 - DNA, 25 bp, Homo sapien
ggattgtgttctttcacgcacattt

SEQ ID NO: 5189827 - DNA, 25 bp, Homo sapien
tacctcactctcatgcgtctgttgc

SEQ ID NO: 5189828 - DNA, 25 bp, Homo sapien
gctggtgacttcaatcgccctcaga

SEQ ID NO: 5189829 - DNA, 25 bp, Homo sapien
caatcgccctcagataaatacctca

SEQ ID NO: 5189830 - DNA, 25 bp, Homo sapien
cagataaatacctcactctcatgcg

SEQ ID NO: 5189831 - DNA, 25 bp, Homo sapien
ctgggacctcatggtctgtcctcaa

SEQ ID NO: 5189832 - DNA, 25 bp, Homo sapien
tgtttggaggtagaacagattcagc

SEQ ID NO: 5189833 - DNA, 25 bp, Homo sapien
catttggatacaagaacctgaaaac

SEQ ID NO: 5189834 - DNA, 25 bp, Homo sapien
cagaaaatctaactacaagagggtt

SEQ ID NO: 5189835 - DNA, 25 bp, Homo sapien
aagcccagagcatccacatgccagt

SEQ ID NO: 5189836 - DNA, 25 bp, Homo sapien
acacaagcccagagcatccacatgc

SEQ ID NO: 5189837 - DNA, 25 bp, Homo sapien
ccagagcatccacatgccagttcat

SEQ ID NO: 5189838 - DNA, 25 bp, Homo sapien
cacacaagcccagagcatccacatg

SEQ ID NO: 5189839 - DNA, 25 bp, Homo sapien
ttattcttaaaccttggatcaagct

SEQ ID NO: 5189840 - DNA, 25 bp, Homo sapien
ccaaattgacagcattcggaagcag

SEQ ID NO: 5189841 - DNA, 25 bp, Homo sapien
taaaaccacattccgtctgctacag

SEQ ID NO: 5189842 - DNA, 25 bp, Homo sapien
tgctgaggcatcagactagcaaata

SEQ ID NO: 5189843 - DNA, 25 bp, Homo sapien
ttctgtaggcgaagtaatcttgctt

SEQ ID NO: 5189844 - DNA, 25 bp, Homo sapien
acaatgaaactcagagagacatttg

SEQ ID NO: 5189845 - DNA, 25 bp, Homo sapien
gacatttgtccaaatttgccaagtt

SEQ ID NO: 5189846 - DNA, 25 bp, Homo sapien
tttgtccaaatttgccaagtttgca

SEQ ID NO: 5189847 - DNA, 25 bp, Homo sapien
tcataccctcatggtctggtcataa

SEQ ID NO: 5189848 - DNA, 25 bp, Homo sapien
cataccctcatggtctggtcataat

SEQ ID NO: 5189849 - DNA, 25 bp, Homo sapien
gaggtctaaggaattatgactccct

SEQ ID NO: 5189850 - DNA, 25 bp, Homo sapien
ggaattatgactccctccaaaacag

SEQ ID NO: 5189851 - DNA, 25 bp, Homo sapien
gagttccagttgtcagaggtctaag

SEQ ID NO: 5189852 - DNA, 25 bp, Homo sapien
tattgggctcatgtcagctttcact

SEQ ID NO: 5189853 - DNA, 25 bp, Homo sapien
gacagatattgctaactggtgtatt

SEQ ID NO: 5189854 - DNA, 25 bp, Homo sapien
tatttaagactgtcaatcttaagga

SEQ ID NO: 5189855 - DNA, 25 bp, Homo sapien
tagctaaatgtgattcatatcagtc

SEQ ID NO: 5189856 - DNA, 25 bp, Homo sapien
aactggtgtatttagctaaatgtga

SEQ ID NO: 5189857 - DNA, 25 bp, Homo sapien
tgaacaccattatagcctagattcc

SEQ ID NO: 5189858 - DNA, 25 bp, Homo sapien
tttgaacaccattatagcctagatt

SEQ ID NO: 5189859 - DNA, 25 bp, Homo sapien
ccattatagcctagattcctcattt

SEQ ID NO: 5189860 - DNA, 25 bp, Homo sapien
caccattatagcctagattcctcat

SEQ ID NO: 5189861 - DNA, 25 bp, Homo sapien
tcaagagctgctaggagtcaatggg

SEQ ID NO: 5189862 - DNA, 25 bp, Homo sapien
gtgactatcaaagtacggatcctga

SEQ ID NO: 5189863 - DNA, 25 bp, Homo sapien
cagaggagtctttggtgtcagaatc

SEQ ID NO: 5189864 - DNA, 25 bp, Homo sapien
tcaaagctaattgtcagtgactatc

SEQ ID NO: 5189865 - DNA, 25 bp, Homo sapien
taaaaagtcccaggtatggccaaca

SEQ ID NO: 5189866 - DNA, 25 bp, Homo sapien
tggccataagacacgagagacaggg

SEQ ID NO: 5189867 - DNA, 25 bp, Homo sapien
gagtaagatacccaacatcggactg

SEQ ID NO: 5189868 - DNA, 25 bp, Homo sapien
aagtaaatttcccagtgtcatgcag

SEQ ID NO: 5189869 - DNA, 25 bp, Homo sapien
gaaatgggccactataagcatacgc

SEQ ID NO: 5189870 - DNA, 25 bp, Homo sapien
cacgcctgactagggcagaatggag

SEQ ID NO: 5189871 - DNA, 25 bp, Homo sapien
taagccttggtatagtcacgcctga

SEQ ID NO: 5189872 - DNA, 25 bp, Homo sapien
ggtatatggcttggcttgtatctcc

SEQ ID NO: 5189873 - DNA, 25 bp, Homo sapien
ctgaaggttaaagtgggttgaccat

SEQ ID NO: 5189874 - DNA, 25 bp, Homo sapien
tacacatttggcattcctttttatc

SEQ ID NO: 5189875 - DNA, 25 bp, Homo sapien
aagagtacacatttggcattccttt

SEQ ID NO: 5189876 - DNA, 25 bp, Homo sapien
gagtacacatttggcattccttttt

SEQ ID NO: 5189877 - DNA, 25 bp, Homo sapien
ctggcaggtggaagagtacacattt

SEQ ID NO: 5189878 - DNA, 25 bp, Homo sapien
aaaccaaggccaagcaattgcccaa

SEQ ID NO: 5189879 - DNA, 25 bp, Homo sapien
ccaaggtcgcttggcatcagaacca

SEQ ID NO: 5189880 - DNA, 25 bp, Homo sapien
agcaattgcccaaggtcgcttggca

SEQ ID NO: 5189881 - DNA, 25 bp, Homo sapien
tgcccaaggtcgcttggcatcagaa

SEQ ID NO: 5189882 - DNA, 25 bp, Homo sapien
cttcggtgtgaagaatatttattcc

SEQ ID NO: 5189883 - DNA, 25 bp, Homo sapien
cctccaaaagagagcatgccagtga

SEQ ID NO: 5189884 - DNA, 25 bp, Homo sapien
gacaagcataagttcaagagggtta

SEQ ID NO: 5189885 - DNA, 25 bp, Homo sapien
gctagacaccatgatcgtagaagga

SEQ ID NO: 5189886 - DNA, 25 bp, Homo sapien
ttaagtggcaaatagatcttcaata

SEQ ID NO: 5189887 - DNA, 25 bp, Homo sapien
cagggtagggtactttctattgatt

SEQ ID NO: 5189888 - DNA, 25 bp, Homo sapien
ttcagggtagggtactttctattga

SEQ ID NO: 5189889 - DNA, 25 bp, Homo sapien
ggcaaatagatcttcaatagtctct

SEQ ID NO: 5189890 - DNA, 25 bp, Homo sapien
cctctaaagaataaatggcaccttc

SEQ ID NO: 5189891 - DNA, 25 bp, Homo sapien
ccctctgtaaattccatgttgaagg

SEQ ID NO: 5189892 - DNA, 25 bp, Homo sapien
agacagtatcttgcaatctggagaa

SEQ ID NO: 5189893 - DNA, 25 bp, Homo sapien
gaaccatagtaagtcatgagcacag

SEQ ID NO: 5189894 - DNA, 25 bp, Homo sapien
gtgtaacagcaagtggactttcacc

SEQ ID NO: 5189895 - DNA, 25 bp, Homo sapien
cagtgtaacagcaagtggactttca

SEQ ID NO: 5189896 - DNA, 25 bp, Homo sapien
gtaacagcaagtggactttcaccat

SEQ ID NO: 5189897 - DNA, 25 bp, Homo sapien
acagtgtaacagcaagtggactttc

SEQ ID NO: 5189898 - DNA, 25 bp, Homo sapien
agtaggaatatttgacagctcttcc

SEQ ID NO: 5189899 - DNA, 25 bp, Homo sapien
ctagttatttgcagtaggaatattt

SEQ ID NO: 5189900 - DNA, 25 bp, Homo sapien
ttaagtcattattgcataaatcatc

SEQ ID NO: 5189901 - DNA, 25 bp, Homo sapien
gtcattattgcataaatcatccttg

SEQ ID NO: 5189902 - DNA, 25 bp, Homo sapien
agttcgtttgttctcttctctcgcc

SEQ ID NO: 5189903 - DNA, 25 bp, Homo sapien
tgccttgttagtgcacttggcgtcc

SEQ ID NO: 5189904 - DNA, 25 bp, Homo sapien
tggcgtccaccgcttccaaggtggg

SEQ ID NO: 5189905 - DNA, 25 bp, Homo sapien
gggaccatcattcggaaatttgaag

SEQ ID NO: 5189906 - DNA, 25 bp, Homo sapien
gctgagcgccaacagagcttacaaa

SEQ ID NO: 5189907 - DNA, 25 bp, Homo sapien
gcagggacctgcgtgccaattcagt

SEQ ID NO: 5189908 - DNA, 25 bp, Homo sapien
taagggtgctttagctactgcggcg

SEQ ID NO: 5189909 - DNA, 25 bp, Homo sapien
ggctaaatctgcacccttaggtggt

SEQ ID NO: 5189910 - DNA, 25 bp, Homo sapien
caggttgcctgagcacttaccaaaa

SEQ ID NO: 5189911 - DNA, 25 bp, Homo sapien
tcagctcttcacattctttacccat

SEQ ID NO: 5189912 - DNA, 25 bp, Homo sapien
ctcagctcttcacattctttaccca

SEQ ID NO: 5189913 - DNA, 25 bp, Homo sapien
cagtcacgaaatccttcctctgaga

SEQ ID NO: 5189914 - DNA, 25 bp, Homo sapien
cctctgagatgtcccaggtatttca

SEQ ID NO: 5189915 - DNA, 25 bp, Homo sapien
gaaattctttcgttgtctcagtcac

SEQ ID NO: 5189916 - DNA, 25 bp, Homo sapien
tatgcacatcgtatatgttgaaatt

SEQ ID NO: 5189917 - DNA, 25 bp, Homo sapien
aacaaattccttgacattactgtcc

SEQ ID NO: 5189918 - DNA, 25 bp, Homo sapien
ccttgacattactgtcctctgtgcc

SEQ ID NO: 5189919 - DNA, 25 bp, Homo sapien
aattccttgacattactgtcctctg

SEQ ID NO: 5189920 - DNA, 25 bp, Homo sapien
tccaacaaattccttgacattactg

SEQ ID NO: 5189921 - DNA, 25 bp, Homo sapien
gtgactttctacttagaacattttg

SEQ ID NO: 5189922 - DNA, 25 bp, Homo sapien
cgcagttctcttagcctcacagaag

SEQ ID NO: 5189923 - DNA, 25 bp, Homo sapien
ctggagtgcacagcgcagttctctt

SEQ ID NO: 5189924 - DNA, 25 bp, Homo sapien
gcacagcgcagttctcttagcctca

SEQ ID NO: 5189925 - DNA, 25 bp, Homo sapien
ttctttgtgatgaaccccagagtca

SEQ ID NO: 5189926 - DNA, 25 bp, Homo sapien
tggaagatgaaaggatgttcaggcc

SEQ ID NO: 5189927 - DNA, 25 bp, Homo sapien
gaaaggatgttcaggccacgtgtct

SEQ ID NO: 5189928 - DNA, 25 bp, Homo sapien
gacagatcctactggcatggaagat

SEQ ID NO: 5189929 - DNA, 25 bp, Homo sapien
cttctgtggccagcaacttattctt

SEQ ID NO: 5189930 - DNA, 25 bp, Homo sapien
cataggaatatagactggggtccaa

SEQ ID NO: 5189931 - DNA, 25 bp, Homo sapien
tccagactgtcacacatagcaccat

SEQ ID NO: 5189932 - DNA, 25 bp, Homo sapien
taagagtgggatgttgccttctgtg

SEQ ID NO: 5189933 - DNA, 25 bp, Homo sapien
tcattcatatttagcaccccatgac

SEQ ID NO: 5189934 - DNA, 25 bp, Homo sapien
atccagtctcgccacacgggaacat

SEQ ID NO: 5189935 - DNA, 25 bp, Homo sapien
atcaatccagtctcgccacacggga

SEQ ID NO: 5189936 - DNA, 25 bp, Homo sapien
ctctcattggtatttgcaatcaatc

SEQ ID NO: 5189937 - DNA, 25 bp, Homo sapien
tatttgcaatcaatccagtctcgcc

SEQ ID NO: 5189938 - DNA, 25 bp, Homo sapien
aagttgagtgcacctaatgacccca

SEQ ID NO: 5189939 - DNA, 25 bp, Homo sapien
tcctttcaattccaagttgagtgca

SEQ ID NO: 5189940 - DNA, 25 bp, Homo sapien
gtgcacctaatgaccccaacttgga

SEQ ID NO: 5189941 - DNA, 25 bp, Homo sapien
taatgaccccaacttggatcttcca

SEQ ID NO: 5189942 - DNA, 25 bp, Homo sapien
tacctaagagcaggttaacacctta

SEQ ID NO: 5189943 - DNA, 25 bp, Homo sapien
cagcataattaagggcgtgtgtgtc

SEQ ID NO: 5189944 - DNA, 25 bp, Homo sapien
taccctggccttaccaactgtgaag

SEQ ID NO: 5189945 - DNA, 25 bp, Homo sapien
tgtgtgtcccatatgtaccctggcc

SEQ ID NO: 5189946 - DNA, 25 bp, Homo sapien
ggtagactgatgtgaatctttgcct

SEQ ID NO: 5189947 - DNA, 25 bp, Homo sapien
tgaagatggtagactgatgtgaatc

SEQ ID NO: 5189948 - DNA, 25 bp, Homo sapien
aacattgattggatttagattggtg

SEQ ID NO: 5189949 - DNA, 25 bp, Homo sapien
cattgattggatttagattggtgaa

SEQ ID NO: 5189950 - DNA, 25 bp, Homo sapien
tcatatccttgaaatgtggcagatt

SEQ ID NO: 5189951 - DNA, 25 bp, Homo sapien
ccatggtatgctgacatgagcatga

SEQ ID NO: 5189952 - DNA, 25 bp, Homo sapien
ttcagtttaacaccagatatgtcag

SEQ ID NO: 5189953 - DNA, 25 bp, Homo sapien
tacatggaatcgttttgttttcaca

SEQ ID NO: 5189954 - DNA, 25 bp, Homo sapien
tttaaaaccgtttgacatgattgaa

SEQ ID NO: 5189955 - DNA, 25 bp, Homo sapien
tgtgttaggaaacgttaagtatctg

SEQ ID NO: 5189956 - DNA, 25 bp, Homo sapien
cgtttgacatgattgaaagccttca

SEQ ID NO: 5189957 - DNA, 25 bp, Homo sapien
taggaaacgttaagtatctggagag

SEQ ID NO: 5189958 - DNA, 25 bp, Homo sapien
tagctgctgcttaatgacagcaagg

SEQ ID NO: 5189959 - DNA, 25 bp, Homo sapien
ttgttgtgacagttgggtaggcact

SEQ ID NO: 5189960 - DNA, 25 bp, Homo sapien
gccctttctgctggctgttctgggc

SEQ ID NO: 5189961 - DNA, 25 bp, Homo sapien
tgttctgggcaccagatgcttcttc

SEQ ID NO: 5189962 - DNA, 25 bp, Homo sapien
ggcagatgcctgtgagctccacaca

SEQ ID NO: 5189963 - DNA, 25 bp, Homo sapien
gggcagatgcctgtgagctccacac

SEQ ID NO: 5189964 - DNA, 25 bp, Homo sapien
gcagatgcctgtgagctccacacat

SEQ ID NO: 5189965 - DNA, 25 bp, Homo sapien
tctgctgagacaaatcatggacaac

SEQ ID NO: 5189966 - DNA, 25 bp, Homo sapien
ggacaacatgtctctcagcaacaaa

SEQ ID NO: 5189967 - DNA, 25 bp, Homo sapien
tcctcaatggcgaaagtcttagggc

SEQ ID NO: 5189968 - DNA, 25 bp, Homo sapien
taaactgataaagagaagtgcctca

SEQ ID NO: 5189969 - DNA, 25 bp, Homo sapien
gaactactcactaatcacattctcc

SEQ ID NO: 5189970 - DNA, 25 bp, Homo sapien
gatgggactcttcaagttggtggaa

SEQ ID NO: 5189971 - DNA, 25 bp, Homo sapien
gcaggacagtgatgggactcttcaa

SEQ ID NO: 5189972 - DNA, 25 bp, Homo sapien
tggtggaaagaactactcactaatc

SEQ ID NO: 5189973 - DNA, 25 bp, Homo sapien
ttagctgtcacaagggaaatccatg

SEQ ID NO: 5189974 - DNA, 25 bp, Homo sapien
gaacacatagctagtaaacccaagg

SEQ ID NO: 5189975 - DNA, 25 bp, Homo sapien
tatccatggctggttgctcaactga

SEQ ID NO: 5189976 - DNA, 25 bp, Homo sapien
tatgcaatggttatggatcacaccc

SEQ ID NO: 5189977 - DNA, 25 bp, Homo sapien
cactggccaagcagtgaatcacgca

SEQ ID NO: 5189978 - DNA, 25 bp, Homo sapien
gaatgtgtgggagttcactggccaa

SEQ ID NO: 5189979 - DNA, 25 bp, Homo sapien
tatgaagaaatgtaagggatggcac

SEQ ID NO: 5189980 - DNA, 25 bp, Homo sapien
ccaggtgtctccagtaatgttggaa

SEQ ID NO: 5189981 - DNA, 25 bp, Homo sapien
tatgctgagtaaaaaaggcgattac

SEQ ID NO: 5189982 - DNA, 25 bp, Homo sapien
agactgaggtacatatctaccatgg

SEQ ID NO: 5189983 - DNA, 25 bp, Homo sapien
aaacctatgtttatacaagcacttg

SEQ ID NO: 5189984 - DNA, 25 bp, Homo sapien
gaacagagtatgagttgccaagggt

SEQ ID NO: 5189985 - DNA, 25 bp, Homo sapien
ggtttagaagacaactgcagactgg

SEQ ID NO: 5189986 - DNA, 25 bp, Homo sapien
gtttagaagacaactgcagactgga

SEQ ID NO: 5189987 - DNA, 25 bp, Homo sapien
tttagaagacaactgcagactggaa

SEQ ID NO: 5189988 - DNA, 25 bp, Homo sapien
cacagggctatgctaatattctcgg

SEQ ID NO: 5189989 - DNA, 25 bp, Homo sapien
cagggctatgctaatattctcggta

SEQ ID NO: 5189990 - DNA, 25 bp, Homo sapien
acagggctatgctaatattctcggt

SEQ ID NO: 5189991 - DNA, 25 bp, Homo sapien
tggaaaaccgattcttcagaggaca

SEQ ID NO: 5189992 - DNA, 25 bp, Homo sapien
gggagtggaaaaccgattcttcaga

SEQ ID NO: 5189993 - DNA, 25 bp, Homo sapien
ctgggagtggaaaaccgattcttca

SEQ ID NO: 5189994 - DNA, 25 bp, Homo sapien
gagtggaaaaccgattcttcagagg

SEQ ID NO: 5189995 - DNA, 25 bp, Homo sapien
aaaggataaagtactcttgctagcc

SEQ ID NO: 5189996 - DNA, 25 bp, Homo sapien
tccatatgtatagggtaaaggataa

SEQ ID NO: 5189997 - DNA, 25 bp, Homo sapien
taaagtactcttgctagcccaggat

SEQ ID NO: 5189998 - DNA, 25 bp, Homo sapien
agaaaccatagcaattccatatgta

SEQ ID NO: 5189999 - DNA, 25 bp, Homo sapien
ttattttacttgaatcatggacaca

SEQ ID NO: 5190000 - DNA, 25 bp, Homo sapien
tatttgctctcatgattattttact

SEQ ID NO: 5190001 - DNA, 25 bp, Homo sapien
tttacttgaatcatggacacaggga

SEQ ID NO: 5190002 - DNA, 25 bp, Homo sapien
ttttacttgaatcatggacacaggg

SEQ ID NO: 5190003 - DNA, 25 bp, Homo sapien
gcttgctatgtcaggtctcagatca

SEQ ID NO: 5190004 - DNA, 25 bp, Homo sapien
atgaacacagcttgctatgtcaggt

SEQ ID NO: 5190005 - DNA, 25 bp, Homo sapien
acacagcttgctatgtcaggtctca

SEQ ID NO: 5190006 - DNA, 25 bp, Homo sapien
cagcttgctatgtcaggtctcagat

SEQ ID NO: 5190007 - DNA, 25 bp, Homo sapien
gatcaagctgtgatgttaacaccac

SEQ ID NO: 5190008 - DNA, 25 bp, Homo sapien
cctgatcaagctgtgatgttaacac

SEQ ID NO: 5190009 - DNA, 25 bp, Homo sapien
atctctgtgtccctgatcaagctgt

SEQ ID NO: 5190010 - DNA, 25 bp, Homo sapien
caagctgtgatgttaacaccacacc

SEQ ID NO: 5190011 - DNA, 25 bp, Homo sapien
cagatgctgaattctactgtactca

SEQ ID NO: 5190012 - DNA, 25 bp, Homo sapien
ggtgcttagtctacagttggacgtg

SEQ ID NO: 5190013 - DNA, 25 bp, Homo sapien
tggactccctcttaagagctctgat

SEQ ID NO: 5190014 - DNA, 25 bp, Homo sapien
gagtagagtgtgtcgcatcagatgc

SEQ ID NO: 5190015 - DNA, 25 bp, Homo sapien
cttgtgcactgccaatctttttttg

SEQ ID NO: 5190016 - DNA, 25 bp, Homo sapien
tacactctgggagatatagttccca

SEQ ID NO: 5190017 - DNA, 25 bp, Homo sapien
acactctgggagatatagttcccat

SEQ ID NO: 5190018 - DNA, 25 bp, Homo sapien
tgtacactctgggagatatagttcc

SEQ ID NO: 5190019 - DNA, 25 bp, Homo sapien
cttcggatttccacacaaaaattag

SEQ ID NO: 5190020 - DNA, 25 bp, Homo sapien
caaaaattagatggcgccagctctc

SEQ ID NO: 5190021 - DNA, 25 bp, Homo sapien
gcccttaggacatcttcggatttcc

SEQ ID NO: 5190022 - DNA, 25 bp, Homo sapien
atgcccttaggacatcttcggattt

SEQ ID NO: 5190023 - DNA, 25 bp, Homo sapien
gttatatgcttctgcttaataatct

SEQ ID NO: 5190024 - DNA, 25 bp, Homo sapien
tgccaccctttatctgctacgttca

SEQ ID NO: 5190025 - DNA, 25 bp, Homo sapien
tgttatatgcttctgcttaataatc

SEQ ID NO: 5190026 - DNA, 25 bp, Homo sapien
tatgccaccctttatctgctacgtt

SEQ ID NO: 5190027 - DNA, 25 bp, Homo sapien
cctaagtagttgtagacagagctgt

SEQ ID NO: 5190028 - DNA, 25 bp, Homo sapien
gagctgtttccctccggatagataa

SEQ ID NO: 5190029 - DNA, 25 bp, Homo sapien
gcagcccactccagggtttgtaata

SEQ ID NO: 5190030 - DNA, 25 bp, Homo sapien
gataattggtttacatagcagctca

SEQ ID NO: 5190031 - DNA, 25 bp, Homo sapien
tagcacaatccaactggaacttgcc

SEQ ID NO: 5190032 - DNA, 25 bp, Homo sapien
gattcatgaatatgtgcattagcac

SEQ ID NO: 5190033 - DNA, 25 bp, Homo sapien
tgcattagcacaatccaactggaac

SEQ ID NO: 5190034 - DNA, 25 bp, Homo sapien
tcctgtttggagagattcatgaata

SEQ ID NO: 5190035 - DNA, 25 bp, Homo sapien
ttcatacccaaaagacagtgttcct

SEQ ID NO: 5190036 - DNA, 25 bp, Homo sapien
gatgtgaataccctaatttgtgagc

SEQ ID NO: 5190037 - DNA, 25 bp, Homo sapien
tgtgagctacataactcctttgttt

SEQ ID NO: 5190038 - DNA, 25 bp, Homo sapien
caatagatgttgtattaaactgtcc

SEQ ID NO: 5190039 - DNA, 25 bp, Homo sapien
cactgagtactatgttggatgacaa

SEQ ID NO: 5190040 - DNA, 25 bp, Homo sapien
ccactgagtactatgttggatgaca

SEQ ID NO: 5190041 - DNA, 25 bp, Homo sapien
attccactgagtactatgttggatg

SEQ ID NO: 5190042 - DNA, 25 bp, Homo sapien
tccactgagtactatgttggatgac

SEQ ID NO: 5190043 - DNA, 25 bp, Homo sapien
atttgtacaatctattttgatgact

SEQ ID NO: 5190044 - DNA, 25 bp, Homo sapien
gatttgtacaatctattttgatgac

SEQ ID NO: 5190045 - DNA, 25 bp, Homo sapien
gtgatttgtacaatctattttgatg

SEQ ID NO: 5190046 - DNA, 25 bp, Homo sapien
ctattttgatgactacacaacttac

SEQ ID NO: 5190047 - DNA, 25 bp, Homo sapien
ttgtttgttttgtgccttattttga

SEQ ID NO: 5190048 - DNA, 25 bp, Homo sapien
ttgttttgtgccttattttgatttc

SEQ ID NO: 5190049 - DNA, 25 bp, Homo sapien
tgtttgttttgtgccttattttgat

SEQ ID NO: 5190050 - DNA, 25 bp, Homo sapien
ttttgtgccttattttgatttccat

SEQ ID NO: 5190051 - DNA, 25 bp, Homo sapien
gccactgggaatgttagtccaaaca

SEQ ID NO: 5190052 - DNA, 25 bp, Homo sapien
tctggccactgggaatgttagtcca

SEQ ID NO: 5190053 - DNA, 25 bp, Homo sapien
gggaatgttagtccaaacatcatcc

SEQ ID NO: 5190054 - DNA, 25 bp, Homo sapien
tctcaatttgcatcttgtagctgtt

SEQ ID NO: 5190055 - DNA, 25 bp, Homo sapien
gcatcagagatctccataaccagct

SEQ ID NO: 5190056 - DNA, 25 bp, Homo sapien
tccataaccagcttgcactatctcc

SEQ ID NO: 5190057 - DNA, 25 bp, Homo sapien
catcagagatctccataaccagctt

SEQ ID NO: 5190058 - DNA, 25 bp, Homo sapien
ataaccagcttgcactatctccttg

SEQ ID NO: 5190059 - DNA, 25 bp, Homo sapien
tatttccatgaactgtacagaatgg

SEQ ID NO: 5190060 - DNA, 25 bp, Homo sapien
ttatttccatgaactgtacagaatg

SEQ ID NO: 5190061 - DNA, 25 bp, Homo sapien
aaggctgccattgtttggagaagca

SEQ ID NO: 5190062 - DNA, 25 bp, Homo sapien
taagatccaggagacctttttgctc

SEQ ID NO: 5190063 - DNA, 25 bp, Homo sapien
cagggaaccaggctcagattcaggc

SEQ ID NO: 5190064 - DNA, 25 bp, Homo sapien
tagtgggagcaactgctaatggctg

SEQ ID NO: 5190065 - DNA, 25 bp, Homo sapien
tattgatatgtgttggttacgagac

SEQ ID NO: 5190066 - DNA, 25 bp, Homo sapien
aatattgatatgtgttggttacgag

SEQ ID NO: 5190067 - DNA, 25 bp, Homo sapien
tgatatgtgttggttacgagacata

SEQ ID NO: 5190068 - DNA, 25 bp, Homo sapien
tatgtgttggttacgagacataaca

SEQ ID NO: 5190069 - DNA, 25 bp, Homo sapien
tctaagtggctaatcatgtgtgtct

SEQ ID NO: 5190070 - DNA, 25 bp, Homo sapien
aaaatattctaagtggctaatcatg

SEQ ID NO: 5190071 - DNA, 25 bp, Homo sapien
tgaatccagtgggaaagtttttatg

SEQ ID NO: 5190072 - DNA, 25 bp, Homo sapien
tggctaatcatgtgtgtctttacct

SEQ ID NO: 5190073 - DNA, 25 bp, Homo sapien
caagcctctgataccttctgtaaga

SEQ ID NO: 5190074 - DNA, 25 bp, Homo sapien
tctgtaagaaaccttagcttctcgg

SEQ ID NO: 5190075 - DNA, 25 bp, Homo sapien
ctacgcatgatagtatctgggcttt

SEQ ID NO: 5190076 - DNA, 25 bp, Homo sapien
tttaatggtaccattctgtggtttc

SEQ ID NO: 5190077 - DNA, 25 bp, Homo sapien
tttgtacttgatcccatgggcctga

SEQ ID NO: 5190078 - DNA, 25 bp, Homo sapien
tgtacttgatcccatgggcctgaac

SEQ ID NO: 5190079 - DNA, 25 bp, Homo sapien
ctttgtacttgatcccatgggcctg

SEQ ID NO: 5190080 - DNA, 25 bp, Homo sapien
tacttgatcccatgggcctgaacat

SEQ ID NO: 5190081 - DNA, 25 bp, Homo sapien
aactgaagaccatgaaattgtatac

SEQ ID NO: 5190082 - DNA, 25 bp, Homo sapien
taatagtatggcacaaatggtttgg

SEQ ID NO: 5190083 - DNA, 25 bp, Homo sapien
cagcaaagtaaatgggcaggaacat

SEQ ID NO: 5190084 - DNA, 25 bp, Homo sapien
cagaaacacagattgcatgcaaaga

SEQ ID NO: 5190085 - DNA, 25 bp, Homo sapien
aaccatgagcaacagattctcttta

SEQ ID NO: 5190086 - DNA, 25 bp, Homo sapien
gaaggcacagtatattgccaatggc

SEQ ID NO: 5190087 - DNA, 25 bp, Homo sapien
catcagataagaattgccattgttt

SEQ ID NO: 5190088 - DNA, 25 bp, Homo sapien
tgggagcctcgttttgccaaatggt

SEQ ID NO: 5190089 - DNA, 25 bp, Homo sapien
tccacccagctgagataccatgcgg

SEQ ID NO: 5190090 - DNA, 25 bp, Homo sapien
catgcggacaactctgggcagggaa

SEQ ID NO: 5190091 - DNA, 25 bp, Homo sapien
tttatgactatgtacagtaaactcc

SEQ ID NO: 5190092 - DNA, 25 bp, Homo sapien
aaacatccataagcagcaggaacca

SEQ ID NO: 5190093 - DNA, 25 bp, Homo sapien
gatttcctttgcagtggctccttag

SEQ ID NO: 5190094 - DNA, 25 bp, Homo sapien
gctccttaggatattctgaaactgg

SEQ ID NO: 5190095 - DNA, 25 bp, Homo sapien
gcttgaaccaggtggaggtactgca

SEQ ID NO: 5190096 - DNA, 25 bp, Homo sapien
cctgcaggaaagcatagtgagggca

SEQ ID NO: 5190097 - DNA, 25 bp, Homo sapien
tgcacaggcctaagctgacagttca

SEQ ID NO: 5190098 - DNA, 25 bp, Homo sapien
tatgaaacccacctccggaggtctg

SEQ ID NO: 5190099 - DNA, 25 bp, Homo sapien
gaaagtctggaacacgtttcggatc

SEQ ID NO: 5190100 - DNA, 25 bp, Homo sapien
aagtgtggtcttagcatttgccctg

SEQ ID NO: 5190101 - DNA, 25 bp, Homo sapien
ggtgattcctacctagcatttggtg

SEQ ID NO: 5190102 - DNA, 25 bp, Homo sapien
cacacctgagcatcggtgattccta

SEQ ID NO: 5190103 - DNA, 25 bp, Homo sapien
tatggattgcaaaccacacctgagc

SEQ ID NO: 5190104 - DNA, 25 bp, Homo sapien
taaggtacatatggattgcaaacca

SEQ ID NO: 5190105 - DNA, 25 bp, Homo sapien
ccaattataatattgtgatggctgg

SEQ ID NO: 5190106 - DNA, 25 bp, Homo sapien
tactgttaacatgtgttctacagag

SEQ ID NO: 5190107 - DNA, 25 bp, Homo sapien
gctttctgagatgtgaaaaattgga

SEQ ID NO: 5190108 - DNA, 25 bp, Homo sapien
tgtgttctacagaggacataccctt

SEQ ID NO: 5190109 - DNA, 25 bp, Homo sapien
aaatgtttactggatatttggagag

SEQ ID NO: 5190110 - DNA, 25 bp, Homo sapien
tggagagcctaattctttgattaat

SEQ ID NO: 5190111 - DNA, 25 bp, Homo sapien
aaaatcacagcaaatggggttgccg

SEQ ID NO: 5190112 - DNA, 25 bp, Homo sapien
ttttttgcacagataagtcctctcc

SEQ ID NO: 5190113 - DNA, 25 bp, Homo sapien
atcttccaacatctaaagtttcttg

SEQ ID NO: 5190114 - DNA, 25 bp, Homo sapien
tccaacatctaaagtttcttgtagt

SEQ ID NO: 5190115 - DNA, 25 bp, Homo sapien
catctaaagtttcttgtagtggtcc

SEQ ID NO: 5190116 - DNA, 25 bp, Homo sapien
cttgtagtggtccacagatgggaaa

SEQ ID NO: 5190117 - DNA, 25 bp, Homo sapien
tatatcccaggtttacaaggcgtgc

SEQ ID NO: 5190118 - DNA, 25 bp, Homo sapien
tttctttcaatgaggtcactgccct

SEQ ID NO: 5190119 - DNA, 25 bp, Homo sapien
caaggcgtgctactttgatgtgaag

SEQ ID NO: 5190120 - DNA, 25 bp, Homo sapien
taaatcccaacatgaataaggcctg

SEQ ID NO: 5190121 - DNA, 25 bp, Homo sapien
tatgcaacctcagatttcttgggcc

SEQ ID NO: 5190122 - DNA, 25 bp, Homo sapien
tgtttgatcttaagaccaagacggc

SEQ ID NO: 5190123 - DNA, 25 bp, Homo sapien
ccaagacggctactacagaccaaat

SEQ ID NO: 5190124 - DNA, 25 bp, Homo sapien
gatcccatcagtgagtctttgacca

SEQ ID NO: 5190125 - DNA, 25 bp, Homo sapien
tatgtagtactggatccatcagagc

SEQ ID NO: 5190126 - DNA, 25 bp, Homo sapien
gagcaatgaacgtttctgcttccaa

SEQ ID NO: 5190127 - DNA, 25 bp, Homo sapien
tagtaatatatgtagtactggatcc

SEQ ID NO: 5190128 - DNA, 25 bp, Homo sapien
tggatccatcagagcaatgaacgtt

SEQ ID NO: 5190129 - DNA, 25 bp, Homo sapien
ggcttaacgtactttatacctgtga

SEQ ID NO: 5190130 - DNA, 25 bp, Homo sapien
ttttctgtggacactcgtaaaatat

SEQ ID NO: 5190131 - DNA, 25 bp, Homo sapien
ggacactcgtaaaatatattaagag

SEQ ID NO: 5190132 - DNA, 25 bp, Homo sapien
aatatattaagaggcttaacgtact

SEQ ID NO: 5190133 - DNA, 25 bp, Homo sapien
aaacagcacaagaaggttctgattc

SEQ ID NO: 5190134 - DNA, 25 bp, Homo sapien
cattgtctacaagcatttgaaaggt

SEQ ID NO: 5190135 - DNA, 25 bp, Homo sapien
catcattgtctacaagcatttgaaa

SEQ ID NO: 5190136 - DNA, 25 bp, Homo sapien
cttcatcattgtctacaagcatttg

SEQ ID NO: 5190137 - DNA, 25 bp, Homo sapien
tgtgcaactctataaactgctctga

SEQ ID NO: 5190138 - DNA, 25 bp, Homo sapien
actgctctgatttcaaaaagtttac

SEQ ID NO: 5190139 - DNA, 25 bp, Homo sapien
agtcctgttccacagccgtttccgg

SEQ ID NO: 5190140 - DNA, 25 bp, Homo sapien
ttacctaacactactgggagaatta

SEQ ID NO: 5190141 - DNA, 25 bp, Homo sapien
tttgagccttcttggaaacatcttt

SEQ ID NO: 5190142 - DNA, 25 bp, Homo sapien
ccttcttggaaacatcttttataca

SEQ ID NO: 5190143 - DNA, 25 bp, Homo sapien
catgtgtcttcataacatatttcat

SEQ ID NO: 5190144 - DNA, 25 bp, Homo sapien
tttatacatgtgtcttcataacata

SEQ ID NO: 5190145 - DNA, 25 bp, Homo sapien
tccgcctgagatcttggcgacctaa

SEQ ID NO: 5190146 - DNA, 25 bp, Homo sapien
gatcttggcgacctaatttctcaga

SEQ ID NO: 5190147 - DNA, 25 bp, Homo sapien
aatagctccgcctgagatcttggcg

SEQ ID NO: 5190148 - DNA, 25 bp, Homo sapien
tttatcaaaatagctccgcctgaga

SEQ ID NO: 5190149 - DNA, 25 bp, Homo sapien
tgtgatttgatgtggtgagcatgtc

SEQ ID NO: 5190150 - DNA, 25 bp, Homo sapien
gaacaaagctttgcaagcaatgtct

SEQ ID NO: 5190151 - DNA, 25 bp, Homo sapien
gtcttctatagctgtgatttgatgt

SEQ ID NO: 5190152 - DNA, 25 bp, Homo sapien
gatttgatgtggtgagcatgtcctc

SEQ ID NO: 5190153 - DNA, 25 bp, Homo sapien
ctttacatctttcagacacctttag

SEQ ID NO: 5190154 - DNA, 25 bp, Homo sapien
gctgattctctttacatctttcaga

SEQ ID NO: 5190155 - DNA, 25 bp, Homo sapien
ctctgtgattccactttctgctgat

SEQ ID NO: 5190156 - DNA, 25 bp, Homo sapien
cctttaggtgctcctcatctactgc

SEQ ID NO: 5190157 - DNA, 25 bp, Homo sapien
caaattgccattgatcttctatgta

SEQ ID NO: 5190158 - DNA, 25 bp, Homo sapien
cattttgtcaagactatccattaat

SEQ ID NO: 5190159 - DNA, 25 bp, Homo sapien
aatccatacacccaacaaattgcca

SEQ ID NO: 5190160 - DNA, 25 bp, Homo sapien
cttgatgccccaaatttcattagca

SEQ ID NO: 5190161 - DNA, 25 bp, Homo sapien
tggaaccaagatttacccagcatat

SEQ ID NO: 5190162 - DNA, 25 bp, Homo sapien
taggagcatctatactaaggctgcc

SEQ ID NO: 5190163 - DNA, 25 bp, Homo sapien
taaggctgccatataagtagtaatg

SEQ ID NO: 5190164 - DNA, 25 bp, Homo sapien
ggaaagaagcgaagttaggagcatc

SEQ ID NO: 5190165 - DNA, 25 bp, Homo sapien
ggaaactataacaattaattcatcc

SEQ ID NO: 5190166 - DNA, 25 bp, Homo sapien
taagactccttggaaactataacaa

SEQ ID NO: 5190167 - DNA, 25 bp, Homo sapien
ttaattcatccaggctgttaaaaat

SEQ ID NO: 5190168 - DNA, 25 bp, Homo sapien
taaaaatcagtacttcagacagttg

SEQ ID NO: 5190169 - DNA, 25 bp, Homo sapien
tgggacagagccattggaataggtt

SEQ ID NO: 5190170 - DNA, 25 bp, Homo sapien
tagggaaatgaactctggtgaacca

SEQ ID NO: 5190171 - DNA, 25 bp, Homo sapien
taggttttgtgaacgtaattactca

SEQ ID NO: 5190172 - DNA, 25 bp, Homo sapien
agtcaaacctatggaaagactcagt

SEQ ID NO: 5190173 - DNA, 25 bp, Homo sapien
tgggatttcctagcttcaatataca

SEQ ID NO: 5190174 - DNA, 25 bp, Homo sapien
tatacaaatatataggagtacaaat

SEQ ID NO: 5190175 - DNA, 25 bp, Homo sapien
cgcactgttggatgaagcagataaa

SEQ ID NO: 5190176 - DNA, 25 bp, Homo sapien
tacaaatatgatatcgcactgttgg

SEQ ID NO: 5190177 - DNA, 25 bp, Homo sapien
aagtctattttgtctccttggactt

SEQ ID NO: 5190178 - DNA, 25 bp, Homo sapien
gaaatcttccagcatccgaataaaa

SEQ ID NO: 5190179 - DNA, 25 bp, Homo sapien
gtgacatttcacattggttctgaga

SEQ ID NO: 5190180 - DNA, 25 bp, Homo sapien
ctgcctgaccattgagcatgaaatc

SEQ ID NO: 5190181 - DNA, 25 bp, Homo sapien
caaataatattgtcgaatcttcaac

SEQ ID NO: 5190182 - DNA, 25 bp, Homo sapien
taagaatagctacattgttactcat

SEQ ID NO: 5190183 - DNA, 25 bp, Homo sapien
ctcgagattaataagaatagctaca

SEQ ID NO: 5190184 - DNA, 25 bp, Homo sapien
tgagtgctgtagattttgcaaataa

SEQ ID NO: 5190185 - DNA, 25 bp, Homo sapien
atctaacaaatctggctggtgtttc

SEQ ID NO: 5190186 - DNA, 25 bp, Homo sapien
gcaatatttgaaagaatcaaccaat

SEQ ID NO: 5190187 - DNA, 25 bp, Homo sapien
aggaatctaacaaatctggctggtg

SEQ ID NO: 5190188 - DNA, 25 bp, Homo sapien
ctagggtccagttagagcaatattt

SEQ ID NO: 5190189 - DNA, 25 bp, Homo sapien
acgatttttcatgagttaccgcact

SEQ ID NO: 5190190 - DNA, 25 bp, Homo sapien
taatttgcagcaaggttgaaaactt

SEQ ID NO: 5190191 - DNA, 25 bp, Homo sapien
aacatgaacttgttaatttgcagca

SEQ ID NO: 5190192 - DNA, 25 bp, Homo sapien
tgagttaccgcactcatttttatat

SEQ ID NO: 5190193 - DNA, 25 bp, Homo sapien
tagcctggagccctttggtgagaac

SEQ ID NO: 5190194 - DNA, 25 bp, Homo sapien
ttcacctagccgtgggagagtcctg

SEQ ID NO: 5190195 - DNA, 25 bp, Homo sapien
tggatcccggcatagccataggctt

SEQ ID NO: 5190196 - DNA, 25 bp, Homo sapien
catgatgccattaactttctgagcc

SEQ ID NO: 5190197 - DNA, 25 bp, Homo sapien
catactgcttgatgaatgcttctta

SEQ ID NO: 5190198 - DNA, 25 bp, Homo sapien
tagcttttggaatgtttctgcgggc

SEQ ID NO: 5190199 - DNA, 25 bp, Homo sapien
gtttctgcgggcagttgatgtaaat

SEQ ID NO: 5190200 - DNA, 25 bp, Homo sapien
ggtactctacttgttctattctcca

SEQ ID NO: 5190201 - DNA, 25 bp, Homo sapien
gtgttcggcagagacaggcacagtc

SEQ ID NO: 5190202 - DNA, 25 bp, Homo sapien
aaattgggactcagggtgttcggca

SEQ ID NO: 5190203 - DNA, 25 bp, Homo sapien
gttcggcagagacaggcacagtcat

SEQ ID NO: 5190204 - DNA, 25 bp, Homo sapien
taatccagcccttcgtaatcacaaa

SEQ ID NO: 5190205 - DNA, 25 bp, Homo sapien
ttctgcataaatccagcaagatggc

SEQ ID NO: 5190206 - DNA, 25 bp, Homo sapien
gatttatcagtccagtgattctgca

SEQ ID NO: 5190207 - DNA, 25 bp, Homo sapien
aagagatccagaagagagtttagac

SEQ ID NO: 5190208 - DNA, 25 bp, Homo sapien
cataaggctagggatcacaatggat

SEQ ID NO: 5190209 - DNA, 25 bp, Homo sapien
agggagattccttttatgctggagg

SEQ ID NO: 5190210 - DNA, 25 bp, Homo sapien
gagattccttttatgctggagggtt

SEQ ID NO: 5190211 - DNA, 25 bp, Homo sapien
cagggagattccttttatgctggag

SEQ ID NO: 5190212 - DNA, 25 bp, Homo sapien
atcagggagattccttttatgctgg

SEQ ID NO: 5190213 - DNA, 25 bp, Homo sapien
taggccatgattagatttggacaaa

SEQ ID NO: 5190214 - DNA, 25 bp, Homo sapien
taaatgaactagaaccagatccatc

SEQ ID NO: 5190215 - DNA, 25 bp, Homo sapien
gatctgtaggccatgattagatttg

SEQ ID NO: 5190216 - DNA, 25 bp, Homo sapien
agaaccagatccatcatatacgttg

SEQ ID NO: 5190217 - DNA, 25 bp, Homo sapien
gatgccagtggtgtgctcatttcag

SEQ ID NO: 5190218 - DNA, 25 bp, Homo sapien
gaaagagcatcagatgcagattgta

SEQ ID NO: 5190219 - DNA, 25 bp, Homo sapien
aatccaggtatgttttacctagaag

SEQ ID NO: 5190220 - DNA, 25 bp, Homo sapien
cagattgtattttgggtaggcacac

SEQ ID NO: 5190221 - DNA, 25 bp, Homo sapien
aatacagaagacaataggaaattaa

SEQ ID NO: 5190222 - DNA, 25 bp, Homo sapien
ttggaagaagattagaaacaatacg

SEQ ID NO: 5190223 - DNA, 25 bp, Homo sapien
cttggaagaagattagaaacaatac

SEQ ID NO: 5190224 - DNA, 25 bp, Homo sapien
tggaagaagattagaaacaatacgg

SEQ ID NO: 5190225 - DNA, 25 bp, Homo sapien
cattactttcattaggactctttta

SEQ ID NO: 5190226 - DNA, 25 bp, Homo sapien
tttcattaggactcttttatttgct

SEQ ID NO: 5190227 - DNA, 25 bp, Homo sapien
ctagtggggtacattactttcatta

SEQ ID NO: 5190228 - DNA, 25 bp, Homo sapien
ctttcattaggactcttttatttgc

SEQ ID NO: 5190229 - DNA, 25 bp, Homo sapien
tcttctctaagatcacatttgtcgt

SEQ ID NO: 5190230 - DNA, 25 bp, Homo sapien
taagatcacatttgtcgtttttagg

SEQ ID NO: 5190231 - DNA, 25 bp, Homo sapien
tctctaagatcacatttgtcgtttt

SEQ ID NO: 5190232 - DNA, 25 bp, Homo sapien
tttcattagattcttctctaagatc

SEQ ID NO: 5190233 - DNA, 25 bp, Homo sapien
tgtaagctagacagagagagcctgc

SEQ ID NO: 5190234 - DNA, 25 bp, Homo sapien
tagacaacaagagtccacattgcct

SEQ ID NO: 5190235 - DNA, 25 bp, Homo sapien
tagtccaatcacattaaaacgctgc

SEQ ID NO: 5190236 - DNA, 25 bp, Homo sapien
tgtcagctgcaagggtaattactgc

SEQ ID NO: 5190237 - DNA, 25 bp, Homo sapien
tatgtcaaactgatgcaacatgaat

SEQ ID NO: 5190238 - DNA, 25 bp, Homo sapien
cctttaactagccagggtaatccag

SEQ ID NO: 5190239 - DNA, 25 bp, Homo sapien
atttttagatctttgaattcttagc

SEQ ID NO: 5190240 - DNA, 25 bp, Homo sapien
ccagggtaatccagtgcctcttgtg

SEQ ID NO: 5190241 - DNA, 25 bp, Homo sapien
tgaggcggacagaagctcagtgaac

SEQ ID NO: 5190242 - DNA, 25 bp, Homo sapien
aagcttatgcatctctgtacagggc

SEQ ID NO: 5190243 - DNA, 25 bp, Homo sapien
gaccatggctttggtgaagttgtaa

SEQ ID NO: 5190244 - DNA, 25 bp, Homo sapien
taaatgtcactattggagggcttcc

SEQ ID NO: 5190245 - DNA, 25 bp, Homo sapien
ttattgtcataaaaggaccatggct

SEQ ID NO: 5190246 - DNA, 25 bp, Homo sapien
aacaagcagttctacgttagcatcg

SEQ ID NO: 5190247 - DNA, 25 bp, Homo sapien
ttaaaatgctgtgaatcggcagctg

SEQ ID NO: 5190248 - DNA, 25 bp, Homo sapien
tgcccgcagcggtcgcaacaacaag

SEQ ID NO: 5190249 - DNA, 25 bp, Homo sapien
aatcccagaggtactcttgaatttc

SEQ ID NO: 5190250 - DNA, 25 bp, Homo sapien
taccagaatgtgttatcgttttgcc

SEQ ID NO: 5190251 - DNA, 25 bp, Homo sapien
ccttggtgcatctatttcattgcag

SEQ ID NO: 5190252 - DNA, 25 bp, Homo sapien
atataacctcagttagcatgtgcac

SEQ ID NO: 5190253 - DNA, 25 bp, Homo sapien
gccttgccactgaagtccctttcta

SEQ ID NO: 5190254 - DNA, 25 bp, Homo sapien
ccaagtgctgcccagaaataaggat

SEQ ID NO: 5190255 - DNA, 25 bp, Homo sapien
cccagaaataaggatagccccagtg

SEQ ID NO: 5190256 - DNA, 25 bp, Homo sapien
tgctgcccagaaataaggatagccc

SEQ ID NO: 5190257 - DNA, 25 bp, Homo sapien
aacatttgccaagtgctgcccagaa

SEQ ID NO: 5190258 - DNA, 25 bp, Homo sapien
cacaaagagttattatggacgctgc

SEQ ID NO: 5190259 - DNA, 25 bp, Homo sapien
tcacaaaggccagtgacagctgtct

SEQ ID NO: 5190260 - DNA, 25 bp, Homo sapien
acagctgtctgggttcagttgggaa

SEQ ID NO: 5190261 - DNA, 25 bp, Homo sapien
cagagtcaacatggccttcacaaag

SEQ ID NO: 5190262 - DNA, 25 bp, Homo sapien
ctgtttctttcgaatgtacactgat

SEQ ID NO: 5190263 - DNA, 25 bp, Homo sapien
tacactgatttctagtggctccatc

SEQ ID NO: 5190264 - DNA, 25 bp, Homo sapien
gtgctttggaataatgccctgtttc

SEQ ID NO: 5190265 - DNA, 25 bp, Homo sapien
ataactgtgctttggaataatgccc

SEQ ID NO: 5190266 - DNA, 25 bp, Homo sapien
gcttactttcctcacaatctgcatg

SEQ ID NO: 5190267 - DNA, 25 bp, Homo sapien
tagcattcatagagtcttcgcttac

SEQ ID NO: 5190268 - DNA, 25 bp, Homo sapien
gatacacttgcacagccctttaaac

SEQ ID NO: 5190269 - DNA, 25 bp, Homo sapien
catccactctcagatttagtttgaa

SEQ ID NO: 5190270 - DNA, 25 bp, Homo sapien
aatgactctagatcactaaaggtgg

SEQ ID NO: 5190271 - DNA, 25 bp, Homo sapien
ggagccatgctgattttagccatag

SEQ ID NO: 5190272 - DNA, 25 bp, Homo sapien
cacacttgagtgttagcatgcagga

SEQ ID NO: 5190273 - DNA, 25 bp, Homo sapien
gtcttttagatctcaaaggagccat

SEQ ID NO: 5190274 - DNA, 25 bp, Homo sapien
aatagaatgatatattgtgacaaaa

SEQ ID NO: 5190275 - DNA, 25 bp, Homo sapien
aaatattagagcagcttccatcttt

SEQ ID NO: 5190276 - DNA, 25 bp, Homo sapien
gagcagcttccatctttcaattctg

SEQ ID NO: 5190277 - DNA, 25 bp, Homo sapien
gatgtatataaccattagcagtggc

SEQ ID NO: 5190278 - DNA, 25 bp, Homo sapien
tcaaagcacctagtttcttcgaggg

SEQ ID NO: 5190279 - DNA, 25 bp, Homo sapien
atagaactgtatacccaaagggcac

SEQ ID NO: 5190280 - DNA, 25 bp, Homo sapien
caggcgtgaacttcaagatctgtct

SEQ ID NO: 5190281 - DNA, 25 bp, Homo sapien
aacccattgccacacacaggcgtga

SEQ ID NO: 5190282 - DNA, 25 bp, Homo sapien
gccagtccgtgagtctgatagaagt

SEQ ID NO: 5190283 - DNA, 25 bp, Homo sapien
cagtattgtaggctgcaggcagcca

SEQ ID NO: 5190284 - DNA, 25 bp, Homo sapien
gtctgatagaagtgtactcaccttc

SEQ ID NO: 5190285 - DNA, 25 bp, Homo sapien
tccgtgagtctgatagaagtgtact

SEQ ID NO: 5190286 - DNA, 25 bp, Homo sapien
taaactcaaagatagtggtgtcaat

SEQ ID NO: 5190287 - DNA, 25 bp, Homo sapien
cagtaaactcaaagatagtggtgtc

SEQ ID NO: 5190288 - DNA, 25 bp, Homo sapien
caaagatagtggtgtcaatctccat

SEQ ID NO: 5190289 - DNA, 25 bp, Homo sapien
actcaaagatagtggtgtcaatctc

SEQ ID NO: 5190290 - DNA, 25 bp, Homo sapien
tttcctgggcagcatatggttttaa

SEQ ID NO: 5190291 - DNA, 25 bp, Homo sapien
tactgcttgctaatgctgaatttcc

SEQ ID NO: 5190292 - DNA, 25 bp, Homo sapien
tcaatagggcaaggaaaaagactga

SEQ ID NO: 5190293 - DNA, 25 bp, Homo sapien
tagtatgtttgtggcaacacccaga

SEQ ID NO: 5190294 - DNA, 25 bp, Homo sapien
cagcgtgtggaacaaactactacag

SEQ ID NO: 5190295 - DNA, 25 bp, Homo sapien
tgttgacctagaagtacagcgtgtg

SEQ ID NO: 5190296 - DNA, 25 bp, Homo sapien
tctcttttctgatcgtgtgcttccc

SEQ ID NO: 5190297 - DNA, 25 bp, Homo sapien
gatttacacaggtgaaatgttgacc

SEQ ID NO: 5190298 - DNA, 25 bp, Homo sapien
atacaatttgtgcaccccccgtagg

SEQ ID NO: 5190299 - DNA, 25 bp, Homo sapien
acttctacctgtattagatacaatt

SEQ ID NO: 5190300 - DNA, 25 bp, Homo sapien
ccgtaggtatctttggcacctgctg

SEQ ID NO: 5190301 - DNA, 25 bp, Homo sapien
taattgtccacatgatcggatttca

SEQ ID NO: 5190302 - DNA, 25 bp, Homo sapien
ctaattctggaaggaaactggaatg

SEQ ID NO: 5190303 - DNA, 25 bp, Homo sapien
taacaataaggctgattacactcaa

SEQ ID NO: 5190304 - DNA, 25 bp, Homo sapien
ctgattacactcaaaatgaccaggg

SEQ ID NO: 5190305 - DNA, 25 bp, Homo sapien
tcacagctgcaaaattgtaccataa

SEQ ID NO: 5190306 - DNA, 25 bp, Homo sapien
tgtaccataacaataaggctgatta

SEQ ID NO: 5190307 - DNA, 25 bp, Homo sapien
ccggagttaaactgagaattttgca

SEQ ID NO: 5190308 - DNA, 25 bp, Homo sapien
actttcagaaatgtcatggctgaca

SEQ ID NO: 5190309 - DNA, 25 bp, Homo sapien
tattgtacatatctagagccggagt

SEQ ID NO: 5190310 - DNA, 25 bp, Homo sapien
ggctgacacatttagctgctggaca

SEQ ID NO: 5190311 - DNA, 25 bp, Homo sapien
cagcttttgtgtaaatggatttgat

SEQ ID NO: 5190312 - DNA, 25 bp, Homo sapien
aggacccctcggagtgtcaccctgg

SEQ ID NO: 5190313 - DNA, 25 bp, Homo sapien
cagatgaatctaggacccctcggag

SEQ ID NO: 5190314 - DNA, 25 bp, Homo sapien
ttgtgtaaatggatttgatggctct

SEQ ID NO: 5190315 - DNA, 25 bp, Homo sapien
caactgcgctgccattgatcttact

SEQ ID NO: 5190316 - DNA, 25 bp, Homo sapien
aagttactagatttactcctctgat

SEQ ID NO: 5190317 - DNA, 25 bp, Homo sapien
tcatcgaagatctacacaacctcct

SEQ ID NO: 5190318 - DNA, 25 bp, Homo sapien
tcaaaactactcatcgaagatctac

SEQ ID NO: 5190319 - DNA, 25 bp, Homo sapien
aaagtagggaagccttcagtctgtg

SEQ ID NO: 5190320 - DNA, 25 bp, Homo sapien
gaaaagtagggaagccttcagtctg

SEQ ID NO: 5190321 - DNA, 25 bp, Homo sapien
aaaagtagggaagccttcagtctgt

SEQ ID NO: 5190322 - DNA, 25 bp, Homo sapien
gaggagctgctgataaggttaagaa

SEQ ID NO: 5190323 - DNA, 25 bp, Homo sapien
cctttcggtgcataatagttaagcc

SEQ ID NO: 5190324 - DNA, 25 bp, Homo sapien
taagcctttatcacttgaggagctg

SEQ ID NO: 5190325 - DNA, 25 bp, Homo sapien
cagctgactgctttgccgaacagga

SEQ ID NO: 5190326 - DNA, 25 bp, Homo sapien
attcttgtcctgacaggaggaggct

SEQ ID NO: 5190327 - DNA, 25 bp, Homo sapien
gcaggtatcattcttgtcctgacag

SEQ ID NO: 5190328 - DNA, 25 bp, Homo sapien
tatcattcttgtcctgacaggagga

SEQ ID NO: 5190329 - DNA, 25 bp, Homo sapien
taagcagcaggtatcattcttgtcc

SEQ ID NO: 5190330 - DNA, 25 bp, Homo sapien
tcctctctgagagcaggcattaagc

SEQ ID NO: 5190331 - DNA, 25 bp, Homo sapien
gagcaggcattaagcacagagcatg

SEQ ID NO: 5190332 - DNA, 25 bp, Homo sapien
cacagagcatggtgcgtggtcactg

SEQ ID NO: 5190333 - DNA, 25 bp, Homo sapien
agcatggtgcgtggtcactgttgtg

SEQ ID NO: 5190334 - DNA, 25 bp, Homo sapien
taacctccgcaccaagttgcacaaa

SEQ ID NO: 5190335 - DNA, 25 bp, Homo sapien
gccagactgcaatccatcaatgaca

SEQ ID NO: 5190336 - DNA, 25 bp, Homo sapien
cagaagtgtgaacaccgccagactg

SEQ ID NO: 5190337 - DNA, 25 bp, Homo sapien
taatcgcttctgatggacacggcag

SEQ ID NO: 5190338 - DNA, 25 bp, Homo sapien
aactaaatgtgttattattgcactc

SEQ ID NO: 5190339 - DNA, 25 bp, Homo sapien
ctttagatgatgaaagcttaaatta

SEQ ID NO: 5190340 - DNA, 25 bp, Homo sapien
gaaactaaatgtgttattattgcac

SEQ ID NO: 5190341 - DNA, 25 bp, Homo sapien
gaaaaaaatgacaagctttagatga

SEQ ID NO: 5190342 - DNA, 25 bp, Homo sapien
tgaccagattttgaccccttgaaag

SEQ ID NO: 5190343 - DNA, 25 bp, Homo sapien
ttactgtattaggtgaggaatgcca

SEQ ID NO: 5190344 - DNA, 25 bp, Homo sapien
gaaatgcatctgaaactccggtatg

SEQ ID NO: 5190345 - DNA, 25 bp, Homo sapien
tgtgcactttgcttccctgaccata

SEQ ID NO: 5190346 - DNA, 25 bp, Homo sapien
gctacatattgtacatgtagtattt

SEQ ID NO: 5190347 - DNA, 25 bp, Homo sapien
gaacttgaacagtctacctcagaaa

SEQ ID NO: 5190348 - DNA, 25 bp, Homo sapien
gaatgtcatgcatttcgtaagaaaa

SEQ ID NO: 5190349 - DNA, 25 bp, Homo sapien
tgtctttacactgaacagtattagc

SEQ ID NO: 5190350 - DNA, 25 bp, Homo sapien
ctttgtgcgatgaaagcgatggagc

SEQ ID NO: 5190351 - DNA, 25 bp, Homo sapien
tgcactccacgaagcagatttgaaa

SEQ ID NO: 5190352 - DNA, 25 bp, Homo sapien
tttgctgcactccacgaagcagatt

SEQ ID NO: 5190353 - DNA, 25 bp, Homo sapien
cgagttgtaggctttgtgcgatgaa

SEQ ID NO: 5190354 - DNA, 25 bp, Homo sapien
aatttaatgaaagtatgattcctga

SEQ ID NO: 5190355 - DNA, 25 bp, Homo sapien
gacactagaagcatttagatactga

SEQ ID NO: 5190356 - DNA, 25 bp, Homo sapien
gattacttgcgattggttcctggtg

SEQ ID NO: 5190357 - DNA, 25 bp, Homo sapien
ggtgatttgctcttaataatttcca

SEQ ID NO: 5190358 - DNA, 25 bp, Homo sapien
caagggtagtgctctgttgtgacac

SEQ ID NO: 5190359 - DNA, 25 bp, Homo sapien
cacataagagggttgatactgcaga

SEQ ID NO: 5190360 - DNA, 25 bp, Homo sapien
cagaacatacatattcattagccac

SEQ ID NO: 5190361 - DNA, 25 bp, Homo sapien
tttacacacataagagggttgatac

SEQ ID NO: 5190362 - DNA, 25 bp, Homo sapien
gaagatgctgatatcctctcctgtt

SEQ ID NO: 5190363 - DNA, 25 bp, Homo sapien
gttgggcaccctctccaggaaagga

SEQ ID NO: 5190364 - DNA, 25 bp, Homo sapien
tcctttgaagatgctgatatcctct

SEQ ID NO: 5190365 - DNA, 25 bp, Homo sapien
cctgtttctgctcattatgcagcat

SEQ ID NO: 5190366 - DNA, 25 bp, Homo sapien
tacctaataagcatctttggtggtg

SEQ ID NO: 5190367 - DNA, 25 bp, Homo sapien
cttcatttcaattacgacagcttgt

SEQ ID NO: 5190368 - DNA, 25 bp, Homo sapien
tctttggtggtgcaaattgctgaaa

SEQ ID NO: 5190369 - DNA, 25 bp, Homo sapien
taagcatctttggtggtgcaaattg

SEQ ID NO: 5190370 - DNA, 25 bp, Homo sapien
cctgctcatacaagtctttggcgac

SEQ ID NO: 5190371 - DNA, 25 bp, Homo sapien
ctttggcgactctcacactagcgta

SEQ ID NO: 5190372 - DNA, 25 bp, Homo sapien
aagattcctgctcatacaagtcttt

SEQ ID NO: 5190373 - DNA, 25 bp, Homo sapien
catacaagtctttggcgactctcac

SEQ ID NO: 5190374 - DNA, 25 bp, Homo sapien
tctaactcatttgcctctgaaggag

SEQ ID NO: 5190375 - DNA, 25 bp, Homo sapien
ccgcatcggatttctaactcatttg

SEQ ID NO: 5190376 - DNA, 25 bp, Homo sapien
ttctaactcatttgcctctgaagga

SEQ ID NO: 5190377 - DNA, 25 bp, Homo sapien
tttcttcttccgcatcggatttcta

SEQ ID NO: 5190378 - DNA, 25 bp, Homo sapien
tacaaataagtaatttgggattctg

SEQ ID NO: 5190379 - DNA, 25 bp, Homo sapien
caagaactgtcttagctgctggtga

SEQ ID NO: 5190380 - DNA, 25 bp, Homo sapien
ttgaaattgagaactgtgactcctc

SEQ ID NO: 5190381 - DNA, 25 bp, Homo sapien
ggacctaccatggaccaagaactgt

SEQ ID NO: 5190382 - DNA, 25 bp, Homo sapien
gtattgccattagtcctttcacaga

SEQ ID NO: 5190383 - DNA, 25 bp, Homo sapien
taaagcagtggcctgatattcctga

SEQ ID NO: 5190384 - DNA, 25 bp, Homo sapien
cctcttcataaatagaattgcaagc

SEQ ID NO: 5190385 - DNA, 25 bp, Homo sapien
caaaagtgtttacggtatgggagca

SEQ ID NO: 5190386 - DNA, 25 bp, Homo sapien
ccttttctgccatagtcatgtgaca

SEQ ID NO: 5190387 - DNA, 25 bp, Homo sapien
tgggttctcctaaatcctaaagcac

SEQ ID NO: 5190388 - DNA, 25 bp, Homo sapien
catgtgacatgcaccatggtggctt

SEQ ID NO: 5190389 - DNA, 25 bp, Homo sapien
ccagaatctgatagagtaatatgtg

SEQ ID NO: 5190390 - DNA, 25 bp, Homo sapien
tataaatctgctagtcaccactccc

SEQ ID NO: 5190391 - DNA, 25 bp, Homo sapien
aacctagcctctgaattctggattt

SEQ ID NO: 5190392 - DNA, 25 bp, Homo sapien
ccattgcttgtaaccttgactgaac

SEQ ID NO: 5190393 - DNA, 25 bp, Homo sapien
acatagcctattatgacattgctgc

SEQ ID NO: 5190394 - DNA, 25 bp, Homo sapien
tttacactcagcctctggttgcacc

SEQ ID NO: 5190395 - DNA, 25 bp, Homo sapien
ccatccgcaggttctactgatttgt

SEQ ID NO: 5190396 - DNA, 25 bp, Homo sapien
tcatctttggtagttgcagtgtgtg

SEQ ID NO: 5190397 - DNA, 25 bp, Homo sapien
tggtttccagggaaccatccgcagg

SEQ ID NO: 5190398 - DNA, 25 bp, Homo sapien
gaaataacctgatatcaggcagagt

SEQ ID NO: 5190399 - DNA, 25 bp, Homo sapien
gctatttcgccttggccacagattt

SEQ ID NO: 5190400 - DNA, 25 bp, Homo sapien
gcccggttcacctttgtccacatta

SEQ ID NO: 5190401 - DNA, 25 bp, Homo sapien
cagatttcatcagttgcccggttca

SEQ ID NO: 5190402 - DNA, 25 bp, Homo sapien
tgaaatgacctcctccgttagtgct

SEQ ID NO: 5190403 - DNA, 25 bp, Homo sapien
tgtctgctttatgcagtgtggccca

SEQ ID NO: 5190404 - DNA, 25 bp, Homo sapien
cattgactatgaaatcctgggtacc

SEQ ID NO: 5190405 - DNA, 25 bp, Homo sapien
aaacagttatgtggtgagggaatgc

SEQ ID NO: 5190406 - DNA, 25 bp, Homo sapien
tctgtgcagtctggtaaatcctgtc

SEQ ID NO: 5190407 - DNA, 25 bp, Homo sapien
gcctgaatcttgcgacagtcactca

SEQ ID NO: 5190408 - DNA, 25 bp, Homo sapien
cctgaatcttgcgacagtcactcat

SEQ ID NO: 5190409 - DNA, 25 bp, Homo sapien
tgcctgaatcttgcgacagtcactc

SEQ ID NO: 5190410 - DNA, 25 bp, Homo sapien
ccgctcccactcagagcggctggag

SEQ ID NO: 5190411 - DNA, 25 bp, Homo sapien
cctgaaaccgctcccactcagagcg

SEQ ID NO: 5190412 - DNA, 25 bp, Homo sapien
gccctgaaaccgctcccactcagag

SEQ ID NO: 5190413 - DNA, 25 bp, Homo sapien
gaaaccgctcccactcagagcggct

SEQ ID NO: 5190414 - DNA, 25 bp, Homo sapien
agcatccatagatctgctccagtaa

SEQ ID NO: 5190415 - DNA, 25 bp, Homo sapien
agtggcactggaagagacatttgcc

SEQ ID NO: 5190416 - DNA, 25 bp, Homo sapien
taccataccccaagtggcactggaa

SEQ ID NO: 5190417 - DNA, 25 bp, Homo sapien
ctggacttgtggaagattcagaagc

SEQ ID NO: 5190418 - DNA, 25 bp, Homo sapien
tcatgcaaatggaacaaatcccatt

SEQ ID NO: 5190419 - DNA, 25 bp, Homo sapien
catgcaaatggaacaaatcccattt

SEQ ID NO: 5190420 - DNA, 25 bp, Homo sapien
atcatgcaaatggaacaaatcccat

SEQ ID NO: 5190421 - DNA, 25 bp, Homo sapien
ttccagtaataacccggtccagata

SEQ ID NO: 5190422 - DNA, 25 bp, Homo sapien
gaaacggggcttggcttattctgta

SEQ ID NO: 5190423 - DNA, 25 bp, Homo sapien
tccagattccagtaataacccggtc

SEQ ID NO: 5190424 - DNA, 25 bp, Homo sapien
acattgtggaaacggggcttggctt

SEQ ID NO: 5190425 - DNA, 25 bp, Homo sapien
gagaggaactacaagacccgttgcg

SEQ ID NO: 5190426 - DNA, 25 bp, Homo sapien
gatgcacataatttgccctgagaaa

SEQ ID NO: 5190427 - DNA, 25 bp, Homo sapien
cgttgcgcgacatacacgtctggtt

SEQ ID NO: 5190428 - DNA, 25 bp, Homo sapien
tacacaccacacttacacgatagga

SEQ ID NO: 5190429 - DNA, 25 bp, Homo sapien
tggacttgcattcctggtcatgtgc

SEQ ID NO: 5190430 - DNA, 25 bp, Homo sapien
aaagggcccacgtttcaaggcagtg

SEQ ID NO: 5190431 - DNA, 25 bp, Homo sapien
tccccggagctcttgttagtttcaa

SEQ ID NO: 5190432 - DNA, 25 bp, Homo sapien
taaatgaatacctgacgaaagggcc

SEQ ID NO: 5190433 - DNA, 25 bp, Homo sapien
actgcatagtaagcgtctggatgcc

SEQ ID NO: 5190434 - DNA, 25 bp, Homo sapien
catagtaagcgtctggatgccgcac

SEQ ID NO: 5190435 - DNA, 25 bp, Homo sapien
tagtaagcgtctggatgccgcacat

SEQ ID NO: 5190436 - DNA, 25 bp, Homo sapien
aagcgtctggatgccgcacatttac

SEQ ID NO: 5190437 - DNA, 25 bp, Homo sapien
tgaaaacgaagagaaattatgaccc

SEQ ID NO: 5190438 - DNA, 25 bp, Homo sapien
tcctaaagaactttgccgggcacat

SEQ ID NO: 5190439 - DNA, 25 bp, Homo sapien
tatgacccaattcactctctttctc

SEQ ID NO: 5190440 - DNA, 25 bp, Homo sapien
tatctcgtagacatcatgatcaaat

SEQ ID NO: 5190441 - DNA, 25 bp, Homo sapien
ctttccttctagaaggtaaacattg

SEQ ID NO: 5190442 - DNA, 25 bp, Homo sapien
ctagaaggtaaacattggcaatggc

SEQ ID NO: 5190443 - DNA, 25 bp, Homo sapien
ctcttcgtcctttccttctagaagg

SEQ ID NO: 5190444 - DNA, 25 bp, Homo sapien
ccttctagaaggtaaacattggcaa

SEQ ID NO: 5190445 - DNA, 25 bp, Homo sapien
tccagcggagcatatcaaagataat

SEQ ID NO: 5190446 - DNA, 25 bp, Homo sapien
tttctccagggatatgcgtctctcc

SEQ ID NO: 5190447 - DNA, 25 bp, Homo sapien
taatacaggacaactttctccaggg

SEQ ID NO: 5190448 - DNA, 25 bp, Homo sapien
tcctccacatacaagacgtttccag

SEQ ID NO: 5190449 - DNA, 25 bp, Homo sapien
gtattctaggagcataactttactt

SEQ ID NO: 5190450 - DNA, 25 bp, Homo sapien
gagcataactttacttacttgggta

SEQ ID NO: 5190451 - DNA, 25 bp, Homo sapien
ggaagcaatgagttctgctccatgt

SEQ ID NO: 5190452 - DNA, 25 bp, Homo sapien
ccaggtggaagcaatgagttctgct

SEQ ID NO: 5190453 - DNA, 25 bp, Homo sapien
ctttttcacactttattttctctgc

SEQ ID NO: 5190454 - DNA, 25 bp, Homo sapien
tgccctcttgtttttccatgtcttt

SEQ ID NO: 5190455 - DNA, 25 bp, Homo sapien
ccaattcactgggaagaaattcagg

SEQ ID NO: 5190456 - DNA, 25 bp, Homo sapien
acaactttcggggtgtgccctcttg

SEQ ID NO: 5190457 - DNA, 25 bp, Homo sapien
ctaggctcttaagtccacagaatca

SEQ ID NO: 5190458 - DNA, 25 bp, Homo sapien
ggagcgtatttcactagatttacat

SEQ ID NO: 5190459 - DNA, 25 bp, Homo sapien
aagggtgctggagcgtatttcacta

SEQ ID NO: 5190460 - DNA, 25 bp, Homo sapien
gaatcagctataactgggcttgcca

SEQ ID NO: 5190461 - DNA, 25 bp, Homo sapien
ttcaccattgctgatactggcagaa

SEQ ID NO: 5190462 - DNA, 25 bp, Homo sapien
caccattgctgatactggcagaaat

SEQ ID NO: 5190463 - DNA, 25 bp, Homo sapien
tcaccattgctgatactggcagaaa

SEQ ID NO: 5190464 - DNA, 25 bp, Homo sapien
cttcaccattgctgatactggcaga

SEQ ID NO: 5190465 - DNA, 25 bp, Homo sapien
ggtgttttggcattcctggtctgac

SEQ ID NO: 5190466 - DNA, 25 bp, Homo sapien
cactttacctaggccacgttctttg

SEQ ID NO: 5190467 - DNA, 25 bp, Homo sapien
gtctgactttggaaggagtccaggc

SEQ ID NO: 5190468 - DNA, 25 bp, Homo sapien
gttcttgccctgcaggtgttttggc

SEQ ID NO: 5190469 - DNA, 25 bp, Homo sapien
tcatcctcgatacaaaggcaatgcc

SEQ ID NO: 5190470 - DNA, 25 bp, Homo sapien
attgaatgataacttgaggaggagg

SEQ ID NO: 5190471 - DNA, 25 bp, Homo sapien
cagcatccttagttgggctgcattc

SEQ ID NO: 5190472 - DNA, 25 bp, Homo sapien
tttcataaactcaatagagcagagg

SEQ ID NO: 5190473 - DNA, 25 bp, Homo sapien
taagccctgcatcaatatagatgcg

SEQ ID NO: 5190474 - DNA, 25 bp, Homo sapien
tcctctgagacatgactatgcctat

SEQ ID NO: 5190475 - DNA, 25 bp, Homo sapien
tcttatgcagacaacactgcagtca

SEQ ID NO: 5190476 - DNA, 25 bp, Homo sapien
tagccgttctgctggagtttctcct

SEQ ID NO: 5190477 - DNA, 25 bp, Homo sapien
gactttactccttcctgtctgactg

SEQ ID NO: 5190478 - DNA, 25 bp, Homo sapien
tcttgtagtagttctactcaactgc

SEQ ID NO: 5190479 - DNA, 25 bp, Homo sapien
ccacatctgcgtaattggctttgac

SEQ ID NO: 5190480 - DNA, 25 bp, Homo sapien
tgtctccacatctgcgtaattggct

SEQ ID NO: 5190481 - DNA, 25 bp, Homo sapien
tcttgctagactccttttgattaaa

SEQ ID NO: 5190482 - DNA, 25 bp, Homo sapien
caatatatgactccctcaacaagaa

SEQ ID NO: 5190483 - DNA, 25 bp, Homo sapien
gatgtcgcagagaatcagactgttc

SEQ ID NO: 5190484 - DNA, 25 bp, Homo sapien
caagaatgcaatccttaccatgcgt

SEQ ID NO: 5190485 - DNA, 25 bp, Homo sapien
tgagcaccgggctttgagggaatca

SEQ ID NO: 5190486 - DNA, 25 bp, Homo sapien
taacagcgaaggatgtgagcaccgg

SEQ ID NO: 5190487 - DNA, 25 bp, Homo sapien
cattgcctcaagagtgtgccatggc

SEQ ID NO: 5190488 - DNA, 25 bp, Homo sapien
gagggaatcataaacggtagcagcg

SEQ ID NO: 5190489 - DNA, 25 bp, Homo sapien
aggtttttcgttgaagccactctca

SEQ ID NO: 5190490 - DNA, 25 bp, Homo sapien
tcaaggaattcagccattaggtcct

SEQ ID NO: 5190491 - DNA, 25 bp, Homo sapien
cacgatggcagctccagatgtagct

SEQ ID NO: 5190492 - DNA, 25 bp, Homo sapien
ggatcccatattcaactctcagagg

SEQ ID NO: 5190493 - DNA, 25 bp, Homo sapien
gagctgaacagcacctaagagtggg

SEQ ID NO: 5190494 - DNA, 25 bp, Homo sapien
gcttggtcccaagccataccagaat

SEQ ID NO: 5190495 - DNA, 25 bp, Homo sapien
cagaattccagtagacagggtcagc

SEQ ID NO: 5190496 - DNA, 25 bp, Homo sapien
caggattttgacagcctctaagcca

SEQ ID NO: 5190497 - DNA, 25 bp, Homo sapien
tctgagtcttaatacatggagcata

SEQ ID NO: 5190498 - DNA, 25 bp, Homo sapien
gcagattcatcagcattggctgtct

SEQ ID NO: 5190499 - DNA, 25 bp, Homo sapien
gctgtcttgtcgagaaatggctcca

SEQ ID NO: 5190500 - DNA, 25 bp, Homo sapien
ccgcaagccgcaagaagggtatagt

SEQ ID NO: 5190501 - DNA, 25 bp, Homo sapien
tccaagcctctttcttgctattgta

SEQ ID NO: 5190502 - DNA, 25 bp, Homo sapien
cctctttcttgctattgtaaggcac

SEQ ID NO: 5190503 - DNA, 25 bp, Homo sapien
aagcctctttcttgctattgtaagg

SEQ ID NO: 5190504 - DNA, 25 bp, Homo sapien
caagcctctttcttgctattgtaag

SEQ ID NO: 5190505 - DNA, 25 bp, Homo sapien
tatccatgtgtcatggcaatgccac

SEQ ID NO: 5190506 - DNA, 25 bp, Homo sapien
aacagtccaatatccatgtgtcatg

SEQ ID NO: 5190507 - DNA, 25 bp, Homo sapien
acataaaattcaaccaaacagtcca

SEQ ID NO: 5190508 - DNA, 25 bp, Homo sapien
tagggatttgggaaagcaatgcttt

SEQ ID NO: 5190509 - DNA, 25 bp, Homo sapien
tcgaggcttctgtttcacatacttg

SEQ ID NO: 5190510 - DNA, 25 bp, Homo sapien
aacgttatctgtacttagatgtgga

SEQ ID NO: 5190511 - DNA, 25 bp, Homo sapien
tagatgtggaatataatctcgaggc

SEQ ID NO: 5190512 - DNA, 25 bp, Homo sapien
ggagacataaacgttatctgtactt

SEQ ID NO: 5190513 - DNA, 25 bp, Homo sapien
acaccagcaagcacttcttaattgg

SEQ ID NO: 5190514 - DNA, 25 bp, Homo sapien
ttaattggggccccattcagtagca

SEQ ID NO: 5190515 - DNA, 25 bp, Homo sapien
tttgcaggtaccaccacagaggtga

SEQ ID NO: 5190516 - DNA, 25 bp, Homo sapien
ctttgcaggtaccaccacagaggtg

SEQ ID NO: 5190517 - DNA, 25 bp, Homo sapien
ctgaaaccagaatggtggaagggaa

SEQ ID NO: 5190518 - DNA, 25 bp, Homo sapien
gggcccacataccaatcgctgagaa

SEQ ID NO: 5190519 - DNA, 25 bp, Homo sapien
agattgttttctcgctcaaatccag

SEQ ID NO: 5190520 - DNA, 25 bp, Homo sapien
caatcctgggtcaagcgtgtttggg

SEQ ID NO: 5190521 - DNA, 25 bp, Homo sapien
acattattctctcccgctgccatga

SEQ ID NO: 5190522 - DNA, 25 bp, Homo sapien
ccgtaaccatcctccttttcttcat

SEQ ID NO: 5190523 - DNA, 25 bp, Homo sapien
tcatacacaattttaaaacataaaa

SEQ ID NO: 5190524 - DNA, 25 bp, Homo sapien
gtcatacacaattttaaaacataaa

SEQ ID NO: 5190525 - DNA, 25 bp, Homo sapien
tgtcatacacaattttaaaacataa

SEQ ID NO: 5190526 - DNA, 25 bp, Homo sapien
ccagttaatttttcagcggtgccaa

SEQ ID NO: 5190527 - DNA, 25 bp, Homo sapien
cacactgtttttcgctgtttttcct

SEQ ID NO: 5190528 - DNA, 25 bp, Homo sapien
ggtgccaatattctgcatcccacac

SEQ ID NO: 5190529 - DNA, 25 bp, Homo sapien
ctctgaaattcaagacgcagttcca

SEQ ID NO: 5190530 - DNA, 25 bp, Homo sapien
taagttcacctgaagatcacaagat

SEQ ID NO: 5190531 - DNA, 25 bp, Homo sapien
acctgaagatcacaagatgcagatg

SEQ ID NO: 5190532 - DNA, 25 bp, Homo sapien
acaagatgcagatgcaaacaggccc

SEQ ID NO: 5190533 - DNA, 25 bp, Homo sapien
cttgcttaagttcacctgaagatca

SEQ ID NO: 5190534 - DNA, 25 bp, Homo sapien
cacacagctgctccgaggaagaaag

SEQ ID NO: 5190535 - DNA, 25 bp, Homo sapien
tgtgccctgagatgctggatcctgt

SEQ ID NO: 5190536 - DNA, 25 bp, Homo sapien
tcagccatgcaagatactgtgccct

SEQ ID NO: 5190537 - DNA, 25 bp, Homo sapien
gaaagtgagatcaagtcagccatgc

SEQ ID NO: 5190538 - DNA, 25 bp, Homo sapien
cctgtcagggacgcatctgttcaca

SEQ ID NO: 5190539 - DNA, 25 bp, Homo sapien
tgtcagggacgcatctgttcacact

SEQ ID NO: 5190540 - DNA, 25 bp, Homo sapien
gcctgtcagggacgcatctgttcac

SEQ ID NO: 5190541 - DNA, 25 bp, Homo sapien
ctgtcagggacgcatctgttcacac

SEQ ID NO: 5190542 - DNA, 25 bp, Homo sapien
cactggccagatggaccctgaccat

SEQ ID NO: 5190543 - DNA, 25 bp, Homo sapien
ctgcactggccagatggaccctgac

SEQ ID NO: 5190544 - DNA, 25 bp, Homo sapien
agctgcactggccagatggaccctg

SEQ ID NO: 5190545 - DNA, 25 bp, Homo sapien
ttctgtccgagctgcactggccaga

SEQ ID NO: 5190546 - DNA, 25 bp, Homo sapien
catggcccaggattgatgacagtca

SEQ ID NO: 5190547 - DNA, 25 bp, Homo sapien
cagcatagctgtcatttacgctatc

SEQ ID NO: 5190548 - DNA, 25 bp, Homo sapien
tcattcgctgatgaagctgtataca

SEQ ID NO: 5190549 - DNA, 25 bp, Homo sapien
tcatttacgctatccatggcccagg

SEQ ID NO: 5190550 - DNA, 25 bp, Homo sapien
attcttaaatcagtcctcctcagtc

SEQ ID NO: 5190551 - DNA, 25 bp, Homo sapien
gcattcttaaatcagtcctcctcag

SEQ ID NO: 5190552 - DNA, 25 bp, Homo sapien
agcattcttaaatcagtcctcctca

SEQ ID NO: 5190553 - DNA, 25 bp, Homo sapien
ccagcattcttaaatcagtcctcct

SEQ ID NO: 5190554 - DNA, 25 bp, Homo sapien
agctgtaccctgcaggtagaatgaa

SEQ ID NO: 5190555 - DNA, 25 bp, Homo sapien
gaatgaaaaggtcctcgatgaggtc

SEQ ID NO: 5190556 - DNA, 25 bp, Homo sapien
tcttggatgtgtgtccttacatgct

SEQ ID NO: 5190557 - DNA, 25 bp, Homo sapien
taatgtgcagttgcagaccacccca

SEQ ID NO: 5190558 - DNA, 25 bp, Homo sapien
agttagccttgttggtttgccctag

SEQ ID NO: 5190559 - DNA, 25 bp, Homo sapien
cctgctctattagacttttactatg

SEQ ID NO: 5190560 - DNA, 25 bp, Homo sapien
gattctagagttagccttgttggtt

SEQ ID NO: 5190561 - DNA, 25 bp, Homo sapien
tcctcctggattctagagttagcct

SEQ ID NO: 5190562 - DNA, 25 bp, Homo sapien
ccagaggtgtaaagaaaccttgctg

SEQ ID NO: 5190563 - DNA, 25 bp, Homo sapien
ctcttccatctcatcacagagcccc

SEQ ID NO: 5190564 - DNA, 25 bp, Homo sapien
aaaccttgctgtagatctttgtacc

SEQ ID NO: 5190565 - DNA, 25 bp, Homo sapien
tcacagagccccagaggtgtaaaga

SEQ ID NO: 5190566 - DNA, 25 bp, Homo sapien
aaaactggaagtaggccaagccttg

SEQ ID NO: 5190567 - DNA, 25 bp, Homo sapien
tagctattaacaggagaaggcaggt

SEQ ID NO: 5190568 - DNA, 25 bp, Homo sapien
tccatgggataacaacacaagacag

SEQ ID NO: 5190569 - DNA, 25 bp, Homo sapien
taagcccctccaaggcataattatg

SEQ ID NO: 5190570 - DNA, 25 bp, Homo sapien
gacagattgaaagacctatgatcta

SEQ ID NO: 5190571 - DNA, 25 bp, Homo sapien
gggcagatgtaaccaattagcacac

SEQ ID NO: 5190572 - DNA, 25 bp, Homo sapien
gctgggttctgtccagataccatca

SEQ ID NO: 5190573 - DNA, 25 bp, Homo sapien
cgcaaagaacgtcatctatgttgtt

SEQ ID NO: 5190574 - DNA, 25 bp, Homo sapien
ttcagacaggtgaatttgaggtatg

SEQ ID NO: 5190575 - DNA, 25 bp, Homo sapien
tggaaataggctttagaacctagac

SEQ ID NO: 5190576 - DNA, 25 bp, Homo sapien
tgaggtatgggtgtaacatctatgt

SEQ ID NO: 5190577 - DNA, 25 bp, Homo sapien
tggagaatagtgaatttagcttcag

SEQ ID NO: 5190578 - DNA, 25 bp, Homo sapien
agcaaaagccttcaagtttgaaagc

SEQ ID NO: 5190579 - DNA, 25 bp, Homo sapien
gcaaaagccttcaagtttgaaagcg

SEQ ID NO: 5190580 - DNA, 25 bp, Homo sapien
ctgttaatttcttggcaaaaaattg

SEQ ID NO: 5190581 - DNA, 25 bp, Homo sapien
gcaaaaaattgagacagtaaaaagc

SEQ ID NO: 5190582 - DNA, 25 bp, Homo sapien
ttgactctacaatagctggcactgt

SEQ ID NO: 5190583 - DNA, 25 bp, Homo sapien
caggcattctttagatacagtcttg

SEQ ID NO: 5190584 - DNA, 25 bp, Homo sapien
tatttttgactctacaatagctggc

SEQ ID NO: 5190585 - DNA, 25 bp, Homo sapien
aaatcccaggcattctttagataca

SEQ ID NO: 5190586 - DNA, 25 bp, Homo sapien
cagtccatgagttctacacatctgt

SEQ ID NO: 5190587 - DNA, 25 bp, Homo sapien
tcaccagtccatgagttctacacat

SEQ ID NO: 5190588 - DNA, 25 bp, Homo sapien
catgagttctacacatctgtgccat

SEQ ID NO: 5190589 - DNA, 25 bp, Homo sapien
cttcttcaccagtccatgagttcta

SEQ ID NO: 5190590 - DNA, 25 bp, Homo sapien
ctcatgggcatcactttacccgtgg

SEQ ID NO: 5190591 - DNA, 25 bp, Homo sapien
acataccaattcatcgtcctcatgg

SEQ ID NO: 5190592 - DNA, 25 bp, Homo sapien
agcccatctcggaaacataccaatt

SEQ ID NO: 5190593 - DNA, 25 bp, Homo sapien
tacccgtggcaatgcattcaaacag

SEQ ID NO: 5190594 - DNA, 25 bp, Homo sapien
gaatcaaaggtagattggcaacacg

SEQ ID NO: 5190595 - DNA, 25 bp, Homo sapien
tttcacgtggataaagatgtgcggt

SEQ ID NO: 5190596 - DNA, 25 bp, Homo sapien
ggcatcaaggcagctgtaataggca

SEQ ID NO: 5190597 - DNA, 25 bp, Homo sapien
tggcaacacgttcagtaaatggcaa

SEQ ID NO: 5190598 - DNA, 25 bp, Homo sapien
gaaatgccactttccttgagcagca

SEQ ID NO: 5190599 - DNA, 25 bp, Homo sapien
taaataagatcttgacacctgtgtc

SEQ ID NO: 5190600 - DNA, 25 bp, Homo sapien
tgctgctgagcagtactgtacctta

SEQ ID NO: 5190601 - DNA, 25 bp, Homo sapien
cactacctgtggctggtatcaggca

SEQ ID NO: 5190602 - DNA, 25 bp, Homo sapien
caaggttggatttagcaagataagg

SEQ ID NO: 5190603 - DNA, 25 bp, Homo sapien
gcaccaactgccaaatatgatactg

SEQ ID NO: 5190604 - DNA, 25 bp, Homo sapien
aaacagataatgatgcacaggtaaa

SEQ ID NO: 5190605 - DNA, 25 bp, Homo sapien
ggccattgtacaccaaccagatcta

SEQ ID NO: 5190606 - DNA, 25 bp, Homo sapien
gcaagttccacttgtaggcaattat

SEQ ID NO: 5190607 - DNA, 25 bp, Homo sapien
cagttgatgtagattcgtagcatgc

SEQ ID NO: 5190608 - DNA, 25 bp, Homo sapien
taacatgcagtcctttgggtaaaaa

SEQ ID NO: 5190609 - DNA, 25 bp, Homo sapien
tttcggatacagtccagcaagttcc

SEQ ID NO: 5190610 - DNA, 25 bp, Homo sapien
tgtagttgcgctaacgagagaccaa

SEQ ID NO: 5190611 - DNA, 25 bp, Homo sapien
gacaagaagaagagtgtagttgcgc

SEQ ID NO: 5190612 - DNA, 25 bp, Homo sapien
ctgcatattgttatcccaagacaag

SEQ ID NO: 5190613 - DNA, 25 bp, Homo sapien
cgagagaccaataaatccacttgct

SEQ ID NO: 5190614 - DNA, 25 bp, Homo sapien
ctccttacagctgatccattgaatt

SEQ ID NO: 5190615 - DNA, 25 bp, Homo sapien
agagccctgagcactgttgagagaa

SEQ ID NO: 5190616 - DNA, 25 bp, Homo sapien
agccctgagcactgttgagagaaga

SEQ ID NO: 5190617 - DNA, 25 bp, Homo sapien
cagctgatccattgaattttaggtg

SEQ ID NO: 5190618 - DNA, 25 bp, Homo sapien
cctcttccacagtgaatagctctgg

SEQ ID NO: 5190619 - DNA, 25 bp, Homo sapien
aatttggcatcggtttcatctggga

SEQ ID NO: 5190620 - DNA, 25 bp, Homo sapien
tccccaggcctgattgagggaagaa

SEQ ID NO: 5190621 - DNA, 25 bp, Homo sapien
gaaaatgtcctgtgctttcaacagt

SEQ ID NO: 5190622 - DNA, 25 bp, Homo sapien
tccaaggtggtgatctataagttcc

SEQ ID NO: 5190623 - DNA, 25 bp, Homo sapien
gcttagtattttacccgacagacag

SEQ ID NO: 5190624 - DNA, 25 bp, Homo sapien
tcatagtagctcaacaaagcgggta

SEQ ID NO: 5190625 - DNA, 25 bp, Homo sapien
gatgagtacaacaccttgctttagg

SEQ ID NO: 5190626 - DNA, 25 bp, Homo sapien
tgtttgtgagtgcatgtgcaaaagg

SEQ ID NO: 5190627 - DNA, 25 bp, Homo sapien
tttggtatgaaaaggagcagtgtct

SEQ ID NO: 5190628 - DNA, 25 bp, Homo sapien
gtatgaaaaggagcagtgtctgtgt

SEQ ID NO: 5190629 - DNA, 25 bp, Homo sapien
tgaaaaggagcagtgtctgtgttcc

SEQ ID NO: 5190630 - DNA, 25 bp, Homo sapien
gaagtcattcgccatgtcctctgct

SEQ ID NO: 5190631 - DNA, 25 bp, Homo sapien
gatgctgtaccatgtgcaatgaatg

SEQ ID NO: 5190632 - DNA, 25 bp, Homo sapien
gaatgagaagtcattcgccatgtcc

SEQ ID NO: 5190633 - DNA, 25 bp, Homo sapien
ttgatgctgtaccatgtgcaatgaa

SEQ ID NO: 5190634 - DNA, 25 bp, Homo sapien
ctaagtcctgatgcctctagtagca

SEQ ID NO: 5190635 - DNA, 25 bp, Homo sapien
agcggagaaaactttctaagtcctg

SEQ ID NO: 5190636 - DNA, 25 bp, Homo sapien
tctataaagcggagaaaactttcta

SEQ ID NO: 5190637 - DNA, 25 bp, Homo sapien
gaaaactttctaagtcctgatgcct

SEQ ID NO: 5190638 - DNA, 25 bp, Homo sapien
tgctgcacattctttcaacttggcc

SEQ ID NO: 5190639 - DNA, 25 bp, Homo sapien
gctgcacattctttcaacttggcca

SEQ ID NO: 5190640 - DNA, 25 bp, Homo sapien
cttgctgcacattctttcaacttgg

SEQ ID NO: 5190641 - DNA, 25 bp, Homo sapien
ctgcacattctttcaacttggccat

SEQ ID NO: 5190642 - DNA, 25 bp, Homo sapien
tgtccacggccactcgtctaccttc

SEQ ID NO: 5190643 - DNA, 25 bp, Homo sapien
ttctattcattaagttgcccattgc

SEQ ID NO: 5190644 - DNA, 25 bp, Homo sapien
accttcttgctgtgtatgttgcttg

SEQ ID NO: 5190645 - DNA, 25 bp, Homo sapien
aagttgcccattgcactgtccacgg

SEQ ID NO: 5190646 - DNA, 25 bp, Homo sapien
tttggcatgcctgaaatctgcaagc

SEQ ID NO: 5190647 - DNA, 25 bp, Homo sapien
tggcatgcctgaaatctgcaagccg

SEQ ID NO: 5190648 - DNA, 25 bp, Homo sapien
catgcctgaaatctgcaagccgcat

SEQ ID NO: 5190649 - DNA, 25 bp, Homo sapien
gcatgcctgaaatctgcaagccgca

SEQ ID NO: 5190650 - DNA, 25 bp, Homo sapien
ggaagtcacacaccggatttgaaag

SEQ ID NO: 5190651 - DNA, 25 bp, Homo sapien
agtcacacaccggatttgaaagttc

SEQ ID NO: 5190652 - DNA, 25 bp, Homo sapien
tcacacaccggatttgaaagttcat

SEQ ID NO: 5190653 - DNA, 25 bp, Homo sapien
aaggaagtcacacaccggatttgaa

SEQ ID NO: 5190654 - DNA, 25 bp, Homo sapien
ggaatgttttctttcgtcattgtct

SEQ ID NO: 5190655 - DNA, 25 bp, Homo sapien
tgtaatgagctattactttgtaagg

SEQ ID NO: 5190656 - DNA, 25 bp, Homo sapien
cccttgatctagcctgtaatgagct

SEQ ID NO: 5190657 - DNA, 25 bp, Homo sapien
aggaatgttttctttcgtcattgtc

SEQ ID NO: 5190658 - DNA, 25 bp, Homo sapien
ggtaaactcatgagacattagcagt

SEQ ID NO: 5190659 - DNA, 25 bp, Homo sapien
tactgtttgacagggatctgtgctt

SEQ ID NO: 5190660 - DNA, 25 bp, Homo sapien
ctgtttaaagtactgtgtccagcca

SEQ ID NO: 5190661 - DNA, 25 bp, Homo sapien
catcttccggtaagtgaaaattgat

SEQ ID NO: 5190662 - DNA, 25 bp, Homo sapien
gaggtctcgtcctgaaagatttctg

SEQ ID NO: 5190663 - DNA, 25 bp, Homo sapien
atggatcctacctccttgagtttgc

SEQ ID NO: 5190664 - DNA, 25 bp, Homo sapien
tccacagcgtatgatggggcaaaga

SEQ ID NO: 5190665 - DNA, 25 bp, Homo sapien
tgagcacctgcaatggatcctacct

SEQ ID NO: 5190666 - DNA, 25 bp, Homo sapien
tggctaacatatagtgatgtccctg

SEQ ID NO: 5190667 - DNA, 25 bp, Homo sapien
gctatctatctgtttggcagcagga

SEQ ID NO: 5190668 - DNA, 25 bp, Homo sapien
gcagcaggaaagttacgttttggtc

SEQ ID NO: 5190669 - DNA, 25 bp, Homo sapien
gatgtccctgttttgtaaattgagt

SEQ ID NO: 5190670 - DNA, 25 bp, Homo sapien
ataggtggctgtgcaagaagagcat

SEQ ID NO: 5190671 - DNA, 25 bp, Homo sapien
tcccataggtggctgtgcaagaaga

SEQ ID NO: 5190672 - DNA, 25 bp, Homo sapien
gcaagaagagcatttgttgtaagat

SEQ ID NO: 5190673 - DNA, 25 bp, Homo sapien
ctttcccataggtggctgtgcaaga

SEQ ID NO: 5190674 - DNA, 25 bp, Homo sapien
tgtcttcacagaaatctccctcaat

SEQ ID NO: 5190675 - DNA, 25 bp, Homo sapien
caaatttcattgtcagacttccttc

SEQ ID NO: 5190676 - DNA, 25 bp, Homo sapien
tgtatttataccaggctaacatgga

SEQ ID NO: 5190677 - DNA, 25 bp, Homo sapien
gaaatctccctcaatgatgttaaat

SEQ ID NO: 5190678 - DNA, 25 bp, Homo sapien
gaagcagcaaagctaagagaaactc

SEQ ID NO: 5190679 - DNA, 25 bp, Homo sapien
acatgaagtagttgaggcccataga

SEQ ID NO: 5190680 - DNA, 25 bp, Homo sapien
tagttgaggcccatagaagctgtag

SEQ ID NO: 5190681 - DNA, 25 bp, Homo sapien
aagcagcaaagctaagagaaactcc

SEQ ID NO: 5190682 - DNA, 25 bp, Homo sapien
gacaagacacaagtgaggactgatg

SEQ ID NO: 5190683 - DNA, 25 bp, Homo sapien
gcacatttgtcgtagcagttcaggc

SEQ ID NO: 5190684 - DNA, 25 bp, Homo sapien
tttagatgacaagacacaagtgagg

SEQ ID NO: 5190685 - DNA, 25 bp, Homo sapien
caggcatacttgaagcattatgaag

SEQ ID NO: 5190686 - DNA, 25 bp, Homo sapien
cagtgtctgccaactgcatggtccg

SEQ ID NO: 5190687 - DNA, 25 bp, Homo sapien
ccagtgtctgccaactgcatggtcc

SEQ ID NO: 5190688 - DNA, 25 bp, Homo sapien
tgccaactgcatggtccgtctcttc

SEQ ID NO: 5190689 - DNA, 25 bp, Homo sapien
tgtctgccaactgcatggtccgtct

SEQ ID NO: 5190690 - DNA, 25 bp, Homo sapien
gattaaagaaagtactgcatgagca

SEQ ID NO: 5190691 - DNA, 25 bp, Homo sapien
tattgaccaatctttgatccgagag

SEQ ID NO: 5190692 - DNA, 25 bp, Homo sapien
tgagcagcgagaaggataacaccac

SEQ ID NO: 5190693 - DNA, 25 bp, Homo sapien
gtttgtttgctctccacaaaagcag

SEQ ID NO: 5190694 - DNA, 25 bp, Homo sapien
tcagtcgtctctctgcttttcaggc

SEQ ID NO: 5190695 - DNA, 25 bp, Homo sapien
ggcatcaatgaacctaaaggaaacc

SEQ ID NO: 5190696 - DNA, 25 bp, Homo sapien
ctttaaatcccacatgcgtttcctt

SEQ ID NO: 5190697 - DNA, 25 bp, Homo sapien
atcccacatgcgtttccttctcttg

SEQ ID NO: 5190698 - DNA, 25 bp, Homo sapien
ggtgacgcgttaactcggctggaac

SEQ ID NO: 5190699 - DNA, 25 bp, Homo sapien
tatttcagccaatttgaagagttca

SEQ ID NO: 5190700 - DNA, 25 bp, Homo sapien
ttaagcttggagcttaaccttttga

SEQ ID NO: 5190701 - DNA, 25 bp, Homo sapien
gaagagttcataatgatgaataaga

SEQ ID NO: 5190702 - DNA, 25 bp, Homo sapien
caggaatgagcgaagtagtaagaac

SEQ ID NO: 5190703 - DNA, 25 bp, Homo sapien
agtggtttccatgcttctcacataa

SEQ ID NO: 5190704 - DNA, 25 bp, Homo sapien
cagcactatctccttctaagaaggg

SEQ ID NO: 5190705 - DNA, 25 bp, Homo sapien
agggccaatctccttctacgacagt

SEQ ID NO: 5190706 - DNA, 25 bp, Homo sapien
tggtgttcaccgtcttttcctttga

SEQ ID NO: 5190707 - DNA, 25 bp, Homo sapien
gcaaaagcaaacttcaggatactaa

SEQ ID NO: 5190708 - DNA, 25 bp, Homo sapien
aagcaaacttcaggatactaataag

SEQ ID NO: 5190709 - DNA, 25 bp, Homo sapien
tcaggatactaataagaataggcat

SEQ ID NO: 5190710 - DNA, 25 bp, Homo sapien
cagcaaaagcaaacttcaggatact

SEQ ID NO: 5190711 - DNA, 25 bp, Homo sapien
tgccccagaggagttcgggttgttc

SEQ ID NO: 5190712 - DNA, 25 bp, Homo sapien
tggaaaagtccgcaggaggcgactc

SEQ ID NO: 5190713 - DNA, 25 bp, Homo sapien
aaaagtcacccctggcacaactgaa

SEQ ID NO: 5190714 - DNA, 25 bp, Homo sapien
aaggcaggattctattccacagagc

SEQ ID NO: 5190715 - DNA, 25 bp, Homo sapien
cattctgctacgtggaatttaatca

SEQ ID NO: 5190716 - DNA, 25 bp, Homo sapien
gaatttaatcatgactggaaccatc

SEQ ID NO: 5190717 - DNA, 25 bp, Homo sapien
tctgctacgtggaatttaatcatga

SEQ ID NO: 5190718 - DNA, 25 bp, Homo sapien
taatcatgactggaaccatcagcag

SEQ ID NO: 5190719 - DNA, 25 bp, Homo sapien
aaactaccctgaacatcagcttctg

SEQ ID NO: 5190720 - DNA, 25 bp, Homo sapien
cgtggagacccctgtccatattcta

SEQ ID NO: 5190721 - DNA, 25 bp, Homo sapien
ctgcatccaagccttagaggagtta

SEQ ID NO: 5190722 - DNA, 25 bp, Homo sapien
agaggagttacatccgctgagcagg

SEQ ID NO: 5190723 - DNA, 25 bp, Homo sapien
tttttcctcatgcagaccatctcat

SEQ ID NO: 5190724 - DNA, 25 bp, Homo sapien
agatggaacatgctgtatgtaacag

SEQ ID NO: 5190725 - DNA, 25 bp, Homo sapien
gggtgtgaaatatgtgctaagaatg

SEQ ID NO: 5190726 - DNA, 25 bp, Homo sapien
aaaccttgcaagacttgatccaggg

SEQ ID NO: 5190727 - DNA, 25 bp, Homo sapien
gacatctgtctaatacttgagttgt

SEQ ID NO: 5190728 - DNA, 25 bp, Homo sapien
agcactgagtactgccttcacaaaa

SEQ ID NO: 5190729 - DNA, 25 bp, Homo sapien
tgtcccttttgataggctcttttca

SEQ ID NO: 5190730 - DNA, 25 bp, Homo sapien
catttatgtttgtactcctcgagtc

SEQ ID NO: 5190731 - DNA, 25 bp, Homo sapien
tcattttaatgtcaaggtgctgctt

SEQ ID NO: 5190732 - DNA, 25 bp, Homo sapien
tctgtaataagaatggcaagtgaac

SEQ ID NO: 5190733 - DNA, 25 bp, Homo sapien
aatttcaagattgtctacttacggg

SEQ ID NO: 5190734 - DNA, 25 bp, Homo sapien
taaaagacccaagcataaattctgc

SEQ ID NO: 5190735 - DNA, 25 bp, Homo sapien
gatgatggccacacaagatttacag

SEQ ID NO: 5190736 - DNA, 25 bp, Homo sapien
aaataagggcgaaaacattaccatg

SEQ ID NO: 5190737 - DNA, 25 bp, Homo sapien
taatacagctggtggagttctatca

SEQ ID NO: 5190738 - DNA, 25 bp, Homo sapien
tatcaactcaataagggcgttcttc

SEQ ID NO: 5190739 - DNA, 25 bp, Homo sapien
tacgggatagtcagagtaaccccaa

SEQ ID NO: 5190740 - DNA, 25 bp, Homo sapien
ttcgtactgtcaatgagtcatggac

SEQ ID NO: 5190741 - DNA, 25 bp, Homo sapien
ccagtaagtaattcgtgatttcaca

SEQ ID NO: 5190742 - DNA, 25 bp, Homo sapien
tagaaatgaccttaatgcataagct

SEQ ID NO: 5190743 - DNA, 25 bp, Homo sapien
agaaaaacagctctgctggaatgtt

SEQ ID NO: 5190744 - DNA, 25 bp, Homo sapien
ttatggctctatgaaatggacagaa

SEQ ID NO: 5190745 - DNA, 25 bp, Homo sapien
ggttttggcagttggcattcttact

SEQ ID NO: 5190746 - DNA, 25 bp, Homo sapien
gacagaattgcagaatctaggggaa

SEQ ID NO: 5190747 - DNA, 25 bp, Homo sapien
caccacgcccgaccgttattagtat

SEQ ID NO: 5190748 - DNA, 25 bp, Homo sapien
tactagtgtgcatagagtatgtatt

SEQ ID NO: 5190749 - DNA, 25 bp, Homo sapien
tgtgtgatagctactactagtgtgc

SEQ ID NO: 5190750 - DNA, 25 bp, Homo sapien
aatataaatgcatatgtgtgatagc

SEQ ID NO: 5190751 - DNA, 25 bp, Homo sapien
cagttcttctcccgctgaaggcagt

SEQ ID NO: 5190752 - DNA, 25 bp, Homo sapien
agttcttctcccgctgaaggcagtg

SEQ ID NO: 5190753 - DNA, 25 bp, Homo sapien
gttcttctcccgctgaaggcagtgg

SEQ ID NO: 5190754 - DNA, 25 bp, Homo sapien
aagagacgggcatgaatattgagaa

SEQ ID NO: 5190755 - DNA, 25 bp, Homo sapien
tgaagagacgggcatgaatattgag

SEQ ID NO: 5190756 - DNA, 25 bp, Homo sapien
gaagagacgggcatgaatattgaga

SEQ ID NO: 5190757 - DNA, 25 bp, Homo sapien
agactgcattgttacccataaccac

SEQ ID NO: 5190758 - DNA, 25 bp, Homo sapien
catctggcttctaaaggaaaggctt

SEQ ID NO: 5190759 - DNA, 25 bp, Homo sapien
gactgcattgttacccataaccaca

SEQ ID NO: 5190760 - DNA, 25 bp, Homo sapien
agatggcaaaggctgtacaattact

SEQ ID NO: 5190761 - DNA, 25 bp, Homo sapien
cctgagatggcaaaggctgtacaat

SEQ ID NO: 5190762 - DNA, 25 bp, Homo sapien
tgagatggcaaaggctgtacaatta

SEQ ID NO: 5190763 - DNA, 25 bp, Homo sapien
atggcaaaggctgtacaattacttt

SEQ ID NO: 5190764 - DNA, 25 bp, Homo sapien
catttgtgagaagggtagagagtca

SEQ ID NO: 5190765 - DNA, 25 bp, Homo sapien
caaggttcttagtgagatcaactct

SEQ ID NO: 5190766 - DNA, 25 bp, Homo sapien
ggttcagccaatgagagaccatggc

SEQ ID NO: 5190767 - DNA, 25 bp, Homo sapien
aaagctagagctctgttgagtaatc

SEQ ID NO: 5190768 - DNA, 25 bp, Homo sapien
gcttacagctcttccggagtctaga

SEQ ID NO: 5190769 - DNA, 25 bp, Homo sapien
cactaaaactactgggatatctgcc

SEQ ID NO: 5190770 - DNA, 25 bp, Homo sapien
tgtgccagaagccttaaacatcttt

SEQ ID NO: 5190771 - DNA, 25 bp, Homo sapien
gagcctgttggtgttctgtccctac

SEQ ID NO: 5190772 - DNA, 25 bp, Homo sapien
atatctgtgaatggaaggtcaagac

SEQ ID NO: 5190773 - DNA, 25 bp, Homo sapien
atctgtgaatggaaggtcaagactc

SEQ ID NO: 5190774 - DNA, 25 bp, Homo sapien
tatctgtgaatggaaggtcaagact

SEQ ID NO: 5190775 - DNA, 25 bp, Homo sapien
gtggcaactcttcttaccgtatcct

SEQ ID NO: 5190776 - DNA, 25 bp, Homo sapien
catcctggattcatcagacaatcga

SEQ ID NO: 5190777 - DNA, 25 bp, Homo sapien
aagcgaagcgcaaggaagccaagtc

SEQ ID NO: 5190778 - DNA, 25 bp, Homo sapien
tccttttaggtgtgtagcgtcaatc

SEQ ID NO: 5190779 - DNA, 25 bp, Homo sapien
tctaagggaccttgataataggcct

SEQ ID NO: 5190780 - DNA, 25 bp, Homo sapien
taccctattacaagtaaggtctgaa

SEQ ID NO: 5190781 - DNA, 25 bp, Homo sapien
gattgctctagtgtaaatgtagtca

SEQ ID NO: 5190782 - DNA, 25 bp, Homo sapien
caactttggctttcagtacttgatg

SEQ ID NO: 5190783 - DNA, 25 bp, Homo sapien
gattaattcattacccttggcctgt

SEQ ID NO: 5190784 - DNA, 25 bp, Homo sapien
gctctgacccagaacagatgcgaca

SEQ ID NO: 5190785 - DNA, 25 bp, Homo sapien
ttaacattccaaagctctgacccag

SEQ ID NO: 5190786 - DNA, 25 bp, Homo sapien
ctgcaatccgttcgggagaggctgc

SEQ ID NO: 5190787 - DNA, 25 bp, Homo sapien
gatgcgacagagtttgctgactgca

SEQ ID NO: 5190788 - DNA, 25 bp, Homo sapien
tttcagtaaagagcgcaccgagtca

SEQ ID NO: 5190789 - DNA, 25 bp, Homo sapien
gagtcacctagtgccagtgcattgg

SEQ ID NO: 5190790 - DNA, 25 bp, Homo sapien
tgcagctgccaagagtgtccatgct

SEQ ID NO: 5190791 - DNA, 25 bp, Homo sapien
tgatgtcatcggtcaggctcctgct

SEQ ID NO: 5190792 - DNA, 25 bp, Homo sapien
tagtacctaacacagttggcaaaga

SEQ ID NO: 5190793 - DNA, 25 bp, Homo sapien
tggcaaagagcatggctaactcaaa

SEQ ID NO: 5190794 - DNA, 25 bp, Homo sapien
ggaggcagctctttaccaactagta

SEQ ID NO: 5190795 - DNA, 25 bp, Homo sapien
ttggtaaaatctccctggtgccacc

SEQ ID NO: 5190796 - DNA, 25 bp, Homo sapien
tgcaccgtatctgctgaccaagagt

SEQ ID NO: 5190797 - DNA, 25 bp, Homo sapien
gaaatgccatttgtgcaacaagaca

SEQ ID NO: 5190798 - DNA, 25 bp, Homo sapien
aatgggaagtcagaaattcgattac

SEQ ID NO: 5190799 - DNA, 25 bp, Homo sapien
tcagaaatctagtttctgcaccgta

SEQ ID NO: 5190800 - DNA, 25 bp, Homo sapien
ttcagaatggaatggccccacttcc

SEQ ID NO: 5190801 - DNA, 25 bp, Homo sapien
catcttttgtagagaaatccaggac

SEQ ID NO: 5190802 - DNA, 25 bp, Homo sapien
gaaattctcaacgtggcaagctgct

SEQ ID NO: 5190803 - DNA, 25 bp, Homo sapien
cagaaattttgcatagcttgttgtc

SEQ ID NO: 5190804 - DNA, 25 bp, Homo sapien
taacttactaacatctatttgtatg

SEQ ID NO: 5190805 - DNA, 25 bp, Homo sapien
agcaatagggtagaattttatgggt

SEQ ID NO: 5190806 - DNA, 25 bp, Homo sapien
aaattgttctattgctataagcaat

SEQ ID NO: 5190807 - DNA, 25 bp, Homo sapien
tctaaactattaatgtgtgccacac

SEQ ID NO: 5190808 - DNA, 25 bp, Homo sapien
tatctattgaagacaagcattctaa

SEQ ID NO: 5190809 - DNA, 25 bp, Homo sapien
tggcctgtagcttgacctgtagttc

SEQ ID NO: 5190810 - DNA, 25 bp, Homo sapien
caataacgggtaatgaaatactctt

SEQ ID NO: 5190811 - DNA, 25 bp, Homo sapien
tcctcaaaacaataacgggtaatga

SEQ ID NO: 5190812 - DNA, 25 bp, Homo sapien
actgaatggtgggatttctagcccc

SEQ ID NO: 5190813 - DNA, 25 bp, Homo sapien
taaagtgaatcccatgaacctatgc

SEQ ID NO: 5190814 - DNA, 25 bp, Homo sapien
taaaaatacgatgtacacactgcgg

SEQ ID NO: 5190815 - DNA, 25 bp, Homo sapien
tccttgtctggaagaactgcatcag

SEQ ID NO: 5190816 - DNA, 25 bp, Homo sapien
tctacacaaggaatcaaattgttct

SEQ ID NO: 5190817 - DNA, 25 bp, Homo sapien
gagggaataggccattatgttaata

SEQ ID NO: 5190818 - DNA, 25 bp, Homo sapien
tagtagaaaacatataggcagtgtt

SEQ ID NO: 5190819 - DNA, 25 bp, Homo sapien
caaaggtcatgatatagtcggcaac

SEQ ID NO: 5190820 - DNA, 25 bp, Homo sapien
tctctagtaatgaactatagaaatg

SEQ ID NO: 5190821 - DNA, 25 bp, Homo sapien
tctagtaatgaactatagaaatgac

SEQ ID NO: 5190822 - DNA, 25 bp, Homo sapien
cttctctagtaatgaactatagaaa

SEQ ID NO: 5190823 - DNA, 25 bp, Homo sapien
ctagtaatgaactatagaaatgacc

SEQ ID NO: 5190824 - DNA, 25 bp, Homo sapien
ggctctttcgctcttgttactcagg

SEQ ID NO: 5190825 - DNA, 25 bp, Homo sapien
caatgatgcgagcttggctctttcg

SEQ ID NO: 5190826 - DNA, 25 bp, Homo sapien
gcgagcttggctctttcgctcttgt

SEQ ID NO: 5190827 - DNA, 25 bp, Homo sapien
atgcgagcttggctctttcgctctt

SEQ ID NO: 5190828 - DNA, 25 bp, Homo sapien
gaagaagccattcaggagaacacat

SEQ ID NO: 5190829 - DNA, 25 bp, Homo sapien
tcatgcaatggcattctattaggga

SEQ ID NO: 5190830 - DNA, 25 bp, Homo sapien
tacaacacgggtgaacctcaagagc

SEQ ID NO: 5190831 - DNA, 25 bp, Homo sapien
gcaaagatttgtatgtgagtgttca

SEQ ID NO: 5190832 - DNA, 25 bp, Homo sapien
gctgaagggagcaaggaacttccct

SEQ ID NO: 5190833 - DNA, 25 bp, Homo sapien
ggctctttaatatcgttcttaaggc

SEQ ID NO: 5190834 - DNA, 25 bp, Homo sapien
tttaatatcgttcttaaggctgaag

SEQ ID NO: 5190835 - DNA, 25 bp, Homo sapien
ggtgaaggctctttaatatcgttct

SEQ ID NO: 5190836 - DNA, 25 bp, Homo sapien
actgtgtggaatatgagcagtcaga

SEQ ID NO: 5190837 - DNA, 25 bp, Homo sapien
ctgggtttgtgaagttttgatccac

SEQ ID NO: 5190838 - DNA, 25 bp, Homo sapien
agagtgtaggaaaagccctctgggt

SEQ ID NO: 5190839 - DNA, 25 bp, Homo sapien
tacatgtatcaaagtactgtgtgga

SEQ ID NO: 5190840 - DNA, 25 bp, Homo sapien
gaaggataagcttaccattagccag

SEQ ID NO: 5190841 - DNA, 25 bp, Homo sapien
tggtgacagcactaaggaaggataa

SEQ ID NO: 5190842 - DNA, 25 bp, Homo sapien
aatggagtgcaagtttggaaaggcc

SEQ ID NO: 5190843 - DNA, 25 bp, Homo sapien
agttgtatcagtcaccatgccatgc

SEQ ID NO: 5190844 - DNA, 25 bp, Homo sapien
tgccatggccggagtaatgtcaaca

SEQ ID NO: 5190845 - DNA, 25 bp, Homo sapien
acttgtggcctcactctgaactaga

SEQ ID NO: 5190846 - DNA, 25 bp, Homo sapien
taaccgagtggccaaagcagttgcc

SEQ ID NO: 5190847 - DNA, 25 bp, Homo sapien
tcatagtactaagtttgggagatcc

SEQ ID NO: 5190848 - DNA, 25 bp, Homo sapien
tggtgacaccatttgtctggcctgc

SEQ ID NO: 5190849 - DNA, 25 bp, Homo sapien
ggcctgccagaggtactgctacctc

SEQ ID NO: 5190850 - DNA, 25 bp, Homo sapien
gctacctctgctaccatcaggaagg

SEQ ID NO: 5190851 - DNA, 25 bp, Homo sapien
caagcttagttgtgatccaggagtc

SEQ ID NO: 5190852 - DNA, 25 bp, Homo sapien
tgaaaagagtcctcgaaggaagtgg

SEQ ID NO: 5190853 - DNA, 25 bp, Homo sapien
atgaaaagagtcctcgaaggaagtg

SEQ ID NO: 5190854 - DNA, 25 bp, Homo sapien
gatgaaaagagtcctcgaaggaagt

SEQ ID NO: 5190855 - DNA, 25 bp, Homo sapien
tacttgatatgtggaaccaactttc

SEQ ID NO: 5190856 - DNA, 25 bp, Homo sapien
acttgatatgtggaaccaactttcc

SEQ ID NO: 5190857 - DNA, 25 bp, Homo sapien
tcaaatgactggttctgtccgtagg

SEQ ID NO: 5190858 - DNA, 25 bp, Homo sapien
tccgtaggagcttcactgtagccca

SEQ ID NO: 5190859 - DNA, 25 bp, Homo sapien
ttcactgtagcccagtcttctttca

SEQ ID NO: 5190860 - DNA, 25 bp, Homo sapien
ggttctgtccgtaggagcttcactg

SEQ ID NO: 5190861 - DNA, 25 bp, Homo sapien
tataacttgtggtaatggcttagaa

SEQ ID NO: 5190862 - DNA, 25 bp, Homo sapien
gcttagaaattgcagatgaaatgga

SEQ ID NO: 5190863 - DNA, 25 bp, Homo sapien
tgcctggtcctatgtagccattttt

SEQ ID NO: 5190864 - DNA, 25 bp, Homo sapien
atggctttccagagttagatataac

SEQ ID NO: 5190865 - DNA, 25 bp, Homo sapien
gaataagaaattcaactcatgatac

SEQ ID NO: 5190866 - DNA, 25 bp, Homo sapien
caactcatgatactaaaacaacaaa

SEQ ID NO: 5190867 - DNA, 25 bp, Homo sapien
agtggaaaatgagaacatgaataag

SEQ ID NO: 5190868 - DNA, 25 bp, Homo sapien
gatgcaaataagtatctgtactgta

SEQ ID NO: 5190869 - DNA, 25 bp, Homo sapien
gagtgtagagaacccctcataacta

SEQ ID NO: 5190870 - DNA, 25 bp, Homo sapien
agaccttggctgttgtgtttcatcc

SEQ ID NO: 5190871 - DNA, 25 bp, Homo sapien
ttaggcctgggctattttgataacc

SEQ ID NO: 5190872 - DNA, 25 bp, Homo sapien
gatatctgtttagtagagtgtagag

SEQ ID NO: 5190873 - DNA, 25 bp, Homo sapien
gaaggctttcaactgtgggttccaa

SEQ ID NO: 5190874 - DNA, 25 bp, Homo sapien
tggttaatccagacaaagcctcttc

SEQ ID NO: 5190875 - DNA, 25 bp, Homo sapien
tgcatatacctcactggagtcctga

SEQ ID NO: 5190876 - DNA, 25 bp, Homo sapien
gaattctgtggcctccataaccagc

SEQ ID NO: 5190877 - DNA, 25 bp, Homo sapien
tcccaccccagcagtgacgcgccgc

SEQ ID NO: 5190878 - DNA, 25 bp, Homo sapien
gcctctcccaccccagcagtgacgc

SEQ ID NO: 5190879 - DNA, 25 bp, Homo sapien
ctctcccaccccagcagtgacgcgc

SEQ ID NO: 5190880 - DNA, 25 bp, Homo sapien
ccgccggcctctcccaccccagcag

SEQ ID NO: 5190881 - DNA, 25 bp, Homo sapien
tttcctagggcgttttgtttgtgca

SEQ ID NO: 5190882 - DNA, 25 bp, Homo sapien
tttgtttgtgcaaactcggccggag

SEQ ID NO: 5190883 - DNA, 25 bp, Homo sapien
gcgttttgtttgtgcaaactcggcc

SEQ ID NO: 5190884 - DNA, 25 bp, Homo sapien
ttcctagggcgttttgtttgtgcaa

SEQ ID NO: 5190885 - DNA, 25 bp, Homo sapien
agccgagcggcaagagcgcgggccg

SEQ ID NO: 5190886 - DNA, 25 bp, Homo sapien
aggaagccgcgagggagaacaggcg

SEQ ID NO: 5190887 - DNA, 25 bp, Homo sapien
tcctggcttgagagccgagcggcaa

SEQ ID NO: 5190888 - DNA, 25 bp, Homo sapien
caggcgagctactgtctcctttgga

SEQ ID NO: 5190889 - DNA, 25 bp, Homo sapien
tggtccccacttatgtgcggccgtg

SEQ ID NO: 5190890 - DNA, 25 bp, Homo sapien
gagctggtccccacttatgtgcggc

SEQ ID NO: 5190891 - DNA, 25 bp, Homo sapien
gctggtccccacttatgtgcggccg

SEQ ID NO: 5190892 - DNA, 25 bp, Homo sapien
tccccacttatgtgcggccgtgctg

SEQ ID NO: 5190893 - DNA, 25 bp, Homo sapien
gaatgggaacacctcgtctgggagc

SEQ ID NO: 5190894 - DNA, 25 bp, Homo sapien
tctgggagctttctttcggttcagc

SEQ ID NO: 5190895 - DNA, 25 bp, Homo sapien
cgaagcgcagcctagcggtgggaat

SEQ ID NO: 5190896 - DNA, 25 bp, Homo sapien
tgtccggttcaggcgcaccagcctt

SEQ ID NO: 5190897 - DNA, 25 bp, Homo sapien
gacatactgttgtccagttctcatg

SEQ ID NO: 5190898 - DNA, 25 bp, Homo sapien
tcagagctgttataggcttttacaa

SEQ ID NO: 5190899 - DNA, 25 bp, Homo sapien
tacaatctattacttaattcttagt

SEQ ID NO: 5190900 - DNA, 25 bp, Homo sapien
cttgtaaaagttccaataagtgaat

SEQ ID NO: 5190901 - DNA, 25 bp, Homo sapien
gactgctatgactgatttcgactga

SEQ ID NO: 5190902 - DNA, 25 bp, Homo sapien
taattcattggttttgctagactgc

SEQ ID NO: 5190903 - DNA, 25 bp, Homo sapien
tttcgactgaagcacagaactcacg

SEQ ID NO: 5190904 - DNA, 25 bp, Homo sapien
acaaatagtccccatgtagaaggag

SEQ ID NO: 5190905 - DNA, 25 bp, Homo sapien
gctacttgcaccagttagcgaagtt

SEQ ID NO: 5190906 - DNA, 25 bp, Homo sapien
ggtcactgattgatcaagttcgcca

SEQ ID NO: 5190907 - DNA, 25 bp, Homo sapien
ctttgagcctccctagtttttgaga

SEQ ID NO: 5190908 - DNA, 25 bp, Homo sapien
aaggaagagtcacacgatgctcact

SEQ ID NO: 5190909 - DNA, 25 bp, Homo sapien
tttattgtgtttccctttatcatgc

SEQ ID NO: 5190910 - DNA, 25 bp, Homo sapien
atttattgtgtttccctttatcatg

SEQ ID NO: 5190911 - DNA, 25 bp, Homo sapien
catgcttcgcaaatgttgcattttt

SEQ ID NO: 5190912 - DNA, 25 bp, Homo sapien
tttatcatgcttcgcaaatgttgca

SEQ ID NO: 5190913 - DNA, 25 bp, Homo sapien
gagatcagccgctttcagtgtggta

SEQ ID NO: 5190914 - DNA, 25 bp, Homo sapien
atcagccgctttcagtgtggtatgg

SEQ ID NO: 5190915 - DNA, 25 bp, Homo sapien
cagacgagatcagccgctttcagtg

SEQ ID NO: 5190916 - DNA, 25 bp, Homo sapien
cgagatcagccgctttcagtgtggt

SEQ ID NO: 5190917 - DNA, 25 bp, Homo sapien
caacatttgaggggctacagccact

SEQ ID NO: 5190918 - DNA, 25 bp, Homo sapien
gcaacatttgaggggctacagccac

SEQ ID NO: 5190919 - DNA, 25 bp, Homo sapien
ccaggaaaaatatgagcaacatttg

SEQ ID NO: 5190920 - DNA, 25 bp, Homo sapien
aacatttgaggggctacagccactg

SEQ ID NO: 5190921 - DNA, 25 bp, Homo sapien
cccaacatggttgcaagaggaggtc

SEQ ID NO: 5190922 - DNA, 25 bp, Homo sapien
caagaaccgaactagagtgagcaca

SEQ ID NO: 5190923 - DNA, 25 bp, Homo sapien
catgagctggatctgcatgaagacc

SEQ ID NO: 5190924 - DNA, 25 bp, Homo sapien
gagaatcttatgcttcccatcgagt

SEQ ID NO: 5190925 - DNA, 25 bp, Homo sapien
tcagtactttggtttaccttacaca

SEQ ID NO: 5190926 - DNA, 25 bp, Homo sapien
gtccactcattttaagcctcaaaaa

SEQ ID NO: 5190927 - DNA, 25 bp, Homo sapien
gcatccggcctagaatcttattttc

SEQ ID NO: 5190928 - DNA, 25 bp, Homo sapien
gcctaaggcactcaattagcattga

SEQ ID NO: 5190929 - DNA, 25 bp, Homo sapien
tttggacgccatccagcagaaagtg

SEQ ID NO: 5190930 - DNA, 25 bp, Homo sapien
gcagcggcacataggatgcttggaa

SEQ ID NO: 5190931 - DNA, 25 bp, Homo sapien
gaatgtagggtcaagtgcaagctgt

SEQ ID NO: 5190932 - DNA, 25 bp, Homo sapien
tgtgctttatttggaggccgctctg

SEQ ID NO: 5190933 - DNA, 25 bp, Homo sapien
taaatgcaccattagacttgtaaac

SEQ ID NO: 5190934 - DNA, 25 bp, Homo sapien
ctaaatgcaccattagacttgtaaa

SEQ ID NO: 5190935 - DNA, 25 bp, Homo sapien
tacagaacttgtagtctcctcttct

SEQ ID NO: 5190936 - DNA, 25 bp, Homo sapien
agaacttgtagtctcctcttcttta

SEQ ID NO: 5190937 - DNA, 25 bp, Homo sapien
ttacagaacttgtagtctcctcttc

SEQ ID NO: 5190938 - DNA, 25 bp, Homo sapien
acttgtagtctcctcttctttatac

SEQ ID NO: 5190939 - DNA, 25 bp, Homo sapien
gtggtgttgtaggcattatattcca

SEQ ID NO: 5190940 - DNA, 25 bp, Homo sapien
tggtgttgtaggcattatattccat

SEQ ID NO: 5190941 - DNA, 25 bp, Homo sapien
tgtggtgttgtaggcattatattcc

SEQ ID NO: 5190942 - DNA, 25 bp, Homo sapien
ctgtggtgttgtaggcattatattc

SEQ ID NO: 5190943 - DNA, 25 bp, Homo sapien
aatcatcaccttgcttaacttcagc

SEQ ID NO: 5190944 - DNA, 25 bp, Homo sapien
acaatcatcaccttgcttaacttca

SEQ ID NO: 5190945 - DNA, 25 bp, Homo sapien
tcatcaccttgcttaacttcagcag

SEQ ID NO: 5190946 - DNA, 25 bp, Homo sapien
atcaccttgcttaacttcagcagac

SEQ ID NO: 5190947 - DNA, 25 bp, Homo sapien
actcttcctgccaagataattcatg

SEQ ID NO: 5190948 - DNA, 25 bp, Homo sapien
tgagcatactgccttcagactcttc

SEQ ID NO: 5190949 - DNA, 25 bp, Homo sapien
cagactcttcctgccaagataattc

SEQ ID NO: 5190950 - DNA, 25 bp, Homo sapien
ttcagactcttcctgccaagataat

SEQ ID NO: 5190951 - DNA, 25 bp, Homo sapien
tttgctacctcaatagaataagcgc

SEQ ID NO: 5190952 - DNA, 25 bp, Homo sapien
tagaataagcgcttttaagaatgta

SEQ ID NO: 5190953 - DNA, 25 bp, Homo sapien
gaatgctttactaactgtggcaagg

SEQ ID NO: 5190954 - DNA, 25 bp, Homo sapien
aagaatttgccaagatagcagagca

SEQ ID NO: 5190955 - DNA, 25 bp, Homo sapien
ttctgggagctcttgttgactgggt

SEQ ID NO: 5190956 - DNA, 25 bp, Homo sapien
tagaaacgtgtaagaagaatcaggg

SEQ ID NO: 5190957 - DNA, 25 bp, Homo sapien
tttctgggagctcttgttgactggg

SEQ ID NO: 5190958 - DNA, 25 bp, Homo sapien
ttgtgttgtataccctctatccatg

SEQ ID NO: 5190959 - DNA, 25 bp, Homo sapien
ccttttgttggagcattctcggtag

SEQ ID NO: 5190960 - DNA, 25 bp, Homo sapien
ctcggtagctttctggtatctctga

SEQ ID NO: 5190961 - DNA, 25 bp, Homo sapien
tgccctccattctagacagattgct

SEQ ID NO: 5190962 - DNA, 25 bp, Homo sapien
gaatgcaagaatccaaactgagaca

SEQ ID NO: 5190963 - DNA, 25 bp, Homo sapien
tatcagtctatagagactggagctc

SEQ ID NO: 5190964 - DNA, 25 bp, Homo sapien
tctcctgatccagaggtttaagttc

SEQ ID NO: 5190965 - DNA, 25 bp, Homo sapien
gagctccctttgatgggacttgctt

SEQ ID NO: 5190966 - DNA, 25 bp, Homo sapien
tggatattggaactttgtcatatac

SEQ ID NO: 5190967 - DNA, 25 bp, Homo sapien
ccaaggccaatgtcgggaagggtat

SEQ ID NO: 5190968 - DNA, 25 bp, Homo sapien
tatcgctatttctactagtgtgaga

SEQ ID NO: 5190969 - DNA, 25 bp, Homo sapien
tagccataaattcctcgccaaggcc

SEQ ID NO: 5190970 - DNA, 25 bp, Homo sapien
cttcctctctacttatttgcatgcc

SEQ ID NO: 5190971 - DNA, 25 bp, Homo sapien
ttcctctctacttatttgcatgccc

SEQ ID NO: 5190972 - DNA, 25 bp, Homo sapien
cttcctgatttggcactctgcttga

SEQ ID NO: 5190973 - DNA, 25 bp, Homo sapien
cctgatttggcactctgcttgactg

SEQ ID NO: 5190974 - DNA, 25 bp, Homo sapien
tgtgttgtgatcttttagctcccgc

SEQ ID NO: 5190975 - DNA, 25 bp, Homo sapien
cattctgacgaatattagccactga

SEQ ID NO: 5190976 - DNA, 25 bp, Homo sapien
ctacacataaagaagaactagaggg

SEQ ID NO: 5190977 - DNA, 25 bp, Homo sapien
gaattctgcagttttatgctacaca

SEQ ID NO: 5190978 - DNA, 25 bp, Homo sapien
aaatgttaatgttcactaatggcca

SEQ ID NO: 5190979 - DNA, 25 bp, Homo sapien
tattattcctcactttatgcagcac

SEQ ID NO: 5190980 - DNA, 25 bp, Homo sapien
tggaaggtattgttcaaaccactag

SEQ ID NO: 5190981 - DNA, 25 bp, Homo sapien
gaatgtcacctagcacttcttaaaa

SEQ ID NO: 5190982 - DNA, 25 bp, Homo sapien
gtattacatgtaatctgacatttaa

SEQ ID NO: 5190983 - DNA, 25 bp, Homo sapien
gaacagatacctaccagtctttggt

SEQ ID NO: 5190984 - DNA, 25 bp, Homo sapien
aactttcggctttccagggtatctg

SEQ ID NO: 5190985 - DNA, 25 bp, Homo sapien
gctctgctaatactgcagcattaaa

SEQ ID NO: 5190986 - DNA, 25 bp, Homo sapien
tagaaatagcgttagttcccactca

SEQ ID NO: 5190987 - DNA, 25 bp, Homo sapien
gcattgtggtggacattaaacacca

SEQ ID NO: 5190988 - DNA, 25 bp, Homo sapien
ttaaatgggcatgataaccagcacc

SEQ ID NO: 5190989 - DNA, 25 bp, Homo sapien
ctcagcttctataagacagtaggca

SEQ ID NO: 5190990 - DNA, 25 bp, Homo sapien
aagctaacttaggaacggactgcaa

SEQ ID NO: 5190991 - DNA, 25 bp, Homo sapien
ttcagaccccagcaaaggagaagct

SEQ ID NO: 5190992 - DNA, 25 bp, Homo sapien
aacggactgcaacgaggcggtcata

SEQ ID NO: 5190993 - DNA, 25 bp, Homo sapien
gcggtcataactctgtgagatcggg

SEQ ID NO: 5190994 - DNA, 25 bp, Homo sapien
cggccattgctacggtcttttatga

SEQ ID NO: 5190995 - DNA, 25 bp, Homo sapien
cactcacttggtattgggaagaggc

SEQ ID NO: 5190996 - DNA, 25 bp, Homo sapien
tgaggttgcagttaggatgctgaca

SEQ ID NO: 5190997 - DNA, 25 bp, Homo sapien
gccagttgctttctcccagagtgag

SEQ ID NO: 5190998 - DNA, 25 bp, Homo sapien
tacatgcatgtgtacctttctcaaa

SEQ ID NO: 5190999 - DNA, 25 bp, Homo sapien
tagatttgtggttgtctgagctaag

SEQ ID NO: 5191000 - DNA, 25 bp, Homo sapien
gaagattgacggactgcaaagtgca

SEQ ID NO: 5191001 - DNA, 25 bp, Homo sapien
ttatcctatgttaatgaagccagac

SEQ ID NO: 5191002 - DNA, 25 bp, Homo sapien
tgttcccctccaccagtggttgctt

SEQ ID NO: 5191003 - DNA, 25 bp, Homo sapien
caccagtggttgcttgagcctttct

SEQ ID NO: 5191004 - DNA, 25 bp, Homo sapien
ttgagcctttctgctgtttagcctc

SEQ ID NO: 5191005 - DNA, 25 bp, Homo sapien
tgagcctttctgctgtttagcctca

SEQ ID NO: 5191006 - DNA, 25 bp, Homo sapien
gggccacagagctaaatgtacaagc

SEQ ID NO: 5191007 - DNA, 25 bp, Homo sapien
caatagcctatgtaagcaccactga

SEQ ID NO: 5191008 - DNA, 25 bp, Homo sapien
gattaaggcagggttcctcacccca

SEQ ID NO: 5191009 - DNA, 25 bp, Homo sapien
caaatgcttcctgaaaggttggtgc

SEQ ID NO: 5191010 - DNA, 25 bp, Homo sapien
gaagtagacaggtgccataggatgc

SEQ ID NO: 5191011 - DNA, 25 bp, Homo sapien
agcactgtgctagcctctgtgggga

SEQ ID NO: 5191012 - DNA, 25 bp, Homo sapien
acaggtgccataggatgcgcagaag

SEQ ID NO: 5191013 - DNA, 25 bp, Homo sapien
tagacaggtgccataggatgcgcag

SEQ ID NO: 5191014 - DNA, 25 bp, Homo sapien
gtgagaccaagaacccaccagttcc

SEQ ID NO: 5191015 - DNA, 25 bp, Homo sapien
cgcgagggtccgcagcttcattctt

SEQ ID NO: 5191016 - DNA, 25 bp, Homo sapien
gaagtcagtgagaccaagaacccac

SEQ ID NO: 5191017 - DNA, 25 bp, Homo sapien
aagaacccaccagttccggacacag

SEQ ID NO: 5191018 - DNA, 25 bp, Homo sapien
gatagactatcagcaattaagccat

SEQ ID NO: 5191019 - DNA, 25 bp, Homo sapien
cctctcagaattgtatccaagtgaa

SEQ ID NO: 5191020 - DNA, 25 bp, Homo sapien
tctatcctgatatgggctcacctca

SEQ ID NO: 5191021 - DNA, 25 bp, Homo sapien
taagccattgagtcagcaactaagg

SEQ ID NO: 5191022 - DNA, 25 bp, Homo sapien
taggcttagatccttagcaacggaa

SEQ ID NO: 5191023 - DNA, 25 bp, Homo sapien
caaacaggtttgtctcaggattgct

SEQ ID NO: 5191024 - DNA, 25 bp, Homo sapien
aaaggcttatgcaaccatcttgagc

SEQ ID NO: 5191025 - DNA, 25 bp, Homo sapien
ggcataaagcctactaaaccaccag

SEQ ID NO: 5191026 - DNA, 25 bp, Homo sapien
ttgtcaaatgtttgctgagaagcac

SEQ ID NO: 5191027 - DNA, 25 bp, Homo sapien
caaatgtttgctgagaagcactgat

SEQ ID NO: 5191028 - DNA, 25 bp, Homo sapien
aaatgtttgctgagaagcactgatg

SEQ ID NO: 5191029 - DNA, 25 bp, Homo sapien
tgagattgtcaaatgtttgctgaga

SEQ ID NO: 5191030 - DNA, 25 bp, Homo sapien
taggaagatatgatccaggaagctg

SEQ ID NO: 5191031 - DNA, 25 bp, Homo sapien
tgactcaagattaccttctgggtcc

SEQ ID NO: 5191032 - DNA, 25 bp, Homo sapien
tagtactccttgcagtcaataccac

SEQ ID NO: 5191033 - DNA, 25 bp, Homo sapien
tgctttcatggccacaggatttagt

SEQ ID NO: 5191034 - DNA, 25 bp, Homo sapien
cagttgaggttcacagatattcagt

SEQ ID NO: 5191035 - DNA, 25 bp, Homo sapien
tgttttcaggtcatatgctaagcac

SEQ ID NO: 5191036 - DNA, 25 bp, Homo sapien
cctataagagagtgaccaatggtcc

SEQ ID NO: 5191037 - DNA, 25 bp, Homo sapien
gacctgttggtcactctatctgtac

SEQ ID NO: 5191038 - DNA, 25 bp, Homo sapien
taactcgcagggattttgactgaga

SEQ ID NO: 5191039 - DNA, 25 bp, Homo sapien
tcatggctggtataaaggaaactaa

SEQ ID NO: 5191040 - DNA, 25 bp, Homo sapien
gattttccacattggcagttatgtc

SEQ ID NO: 5191041 - DNA, 25 bp, Homo sapien
tatactaagtatttcatcttgggtg

SEQ ID NO: 5191042 - DNA, 25 bp, Homo sapien
gagttaatgatttgggacctgaccc

SEQ ID NO: 5191043 - DNA, 25 bp, Homo sapien
gaattctactctttaggaggcacag

SEQ ID NO: 5191044 - DNA, 25 bp, Homo sapien
tcactgacagtgaagtatagcctgg

SEQ ID NO: 5191045 - DNA, 25 bp, Homo sapien
ggcagaagccatcatacacaagatc

SEQ ID NO: 5191046 - DNA, 25 bp, Homo sapien
gcctcacaagaaatcaatcctgatg

SEQ ID NO: 5191047 - DNA, 25 bp, Homo sapien
cacaagaaatcaatcctgatggcac

SEQ ID NO: 5191048 - DNA, 25 bp, Homo sapien
gaaatcaatcctgatggcaccttga

SEQ ID NO: 5191049 - DNA, 25 bp, Homo sapien
aaaggcctcacaagaaatcaatcct

SEQ ID NO: 5191050 - DNA, 25 bp, Homo sapien
aaagctaatcgacatttgcattacc

SEQ ID NO: 5191051 - DNA, 25 bp, Homo sapien
gaacttagtcctcttatctaatgaa

SEQ ID NO: 5191052 - DNA, 25 bp, Homo sapien
ctcccaccaccttcagttattcatg

SEQ ID NO: 5191053 - DNA, 25 bp, Homo sapien
tcaactacatagtcaccaggttgca

SEQ ID NO: 5191054 - DNA, 25 bp, Homo sapien
tagtgtattgaagaactgcatgcag

SEQ ID NO: 5191055 - DNA, 25 bp, Homo sapien
ctaaaaagaatggtgagctacgtca

SEQ ID NO: 5191056 - DNA, 25 bp, Homo sapien
caagcagtactacagaacaaaggca

SEQ ID NO: 5191057 - DNA, 25 bp, Homo sapien
caaactagtgcatgattcaccaagc

SEQ ID NO: 5191058 - DNA, 25 bp, Homo sapien
tgctctttgctttgatgatgtccct

SEQ ID NO: 5191059 - DNA, 25 bp, Homo sapien
cgttgtttaacatcggcctcctgct

SEQ ID NO: 5191060 - DNA, 25 bp, Homo sapien
tcaaaggagcaaaggggatccgcac

SEQ ID NO: 5191061 - DNA, 25 bp, Homo sapien
tgatgtcccttcctgcgttgtttaa

SEQ ID NO: 5191062 - DNA, 25 bp, Homo sapien
atttaaaaatcatccaggtgggcca

SEQ ID NO: 5191063 - DNA, 25 bp, Homo sapien
taaaaatcatccaggtgggccaggc

SEQ ID NO: 5191064 - DNA, 25 bp, Homo sapien
ttagccaatcatggtggcgggcgcc

SEQ ID NO: 5191065 - DNA, 25 bp, Homo sapien
acggtggctcacgcctgtaatccca

SEQ ID NO: 5191066 - DNA, 25 bp, Homo sapien
ggtgctttagtgtacttctgctgaa

SEQ ID NO: 5191067 - DNA, 25 bp, Homo sapien
cccttctggacatgactttgtgcta

SEQ ID NO: 5191068 - DNA, 25 bp, Homo sapien
tagatgtttgactaaggtccggagc

SEQ ID NO: 5191069 - DNA, 25 bp, Homo sapien
tgtgtttataacaggattccctcct

SEQ ID NO: 5191070 - DNA, 25 bp, Homo sapien
tgatgtccacccataatgaattgct

SEQ ID NO: 5191071 - DNA, 25 bp, Homo sapien
tactttcgtgtgtagtacagggtcc

SEQ ID NO: 5191072 - DNA, 25 bp, Homo sapien
tgatcataacactccccatccatgg

SEQ ID NO: 5191073 - DNA, 25 bp, Homo sapien
tgctctaggatcactccctgcctgt

SEQ ID NO: 5191074 - DNA, 25 bp, Homo sapien
tacagcatccctcctcagtaatgga

SEQ ID NO: 5191075 - DNA, 25 bp, Homo sapien
cataaaaatcccgacagagagaggg

SEQ ID NO: 5191076 - DNA, 25 bp, Homo sapien
tcaacaggtaattcatcggtcaatc

SEQ ID NO: 5191077 - DNA, 25 bp, Homo sapien
cagacaatcattagctctcagtgaa

SEQ ID NO: 5191078 - DNA, 25 bp, Homo sapien
taaaacctctttgctctgagctaga

SEQ ID NO: 5191079 - DNA, 25 bp, Homo sapien
tccagtgtggtttaccatttgcacc

SEQ ID NO: 5191080 - DNA, 25 bp, Homo sapien
ctcaaaggagcgcagataacatgtg

SEQ ID NO: 5191081 - DNA, 25 bp, Homo sapien
tgctgatgaagaatcaaatggcagc

SEQ ID NO: 5191082 - DNA, 25 bp, Homo sapien
tatgtgcagagaccttttactctgc

SEQ ID NO: 5191083 - DNA, 25 bp, Homo sapien
ttagcctcaaaagaattgagcactg

SEQ ID NO: 5191084 - DNA, 25 bp, Homo sapien
agcatccccttcctgtccttatgtg

SEQ ID NO: 5191085 - DNA, 25 bp, Homo sapien
gaattgagcactgaacagcatcccc

SEQ ID NO: 5191086 - DNA, 25 bp, Homo sapien
tccaagggggaaacaactcaaatca

SEQ ID NO: 5191087 - DNA, 25 bp, Homo sapien
aataggcataagaagctttcttcaa

SEQ ID NO: 5191088 - DNA, 25 bp, Homo sapien
cactgctcctaaatttgtgcgtgtg

SEQ ID NO: 5191089 - DNA, 25 bp, Homo sapien
cgtgtgttttgaaataggcataaga

SEQ ID NO: 5191090 - DNA, 25 bp, Homo sapien
cagaatccacgtatgtgttgaatat

SEQ ID NO: 5191091 - DNA, 25 bp, Homo sapien
aacaagaaaggatgaccacagcatc

SEQ ID NO: 5191092 - DNA, 25 bp, Homo sapien
taacacagaatccacgtatgtgttg

SEQ ID NO: 5191093 - DNA, 25 bp, Homo sapien
tgtgctctatcctcattaaagaaga

SEQ ID NO: 5191094 - DNA, 25 bp, Homo sapien
caacgcctgtgccttcttcaagtct

SEQ ID NO: 5191095 - DNA, 25 bp, Homo sapien
tgccttcttcaagtctttccactgc

SEQ ID NO: 5191096 - DNA, 25 bp, Homo sapien
tgtgccttcttcaagtctttccact

SEQ ID NO: 5191097 - DNA, 25 bp, Homo sapien
cttcttcaagtctttccactgccat

SEQ ID NO: 5191098 - DNA, 25 bp, Homo sapien
tgttgttgttgtctggttggttggt

SEQ ID NO: 5191099 - DNA, 25 bp, Homo sapien
ttgttgttgttgtctggttggttgg

SEQ ID NO: 5191100 - DNA, 25 bp, Homo sapien
ttggtttggtttggctagattttgc

SEQ ID NO: 5191101 - DNA, 25 bp, Homo sapien
tttggtttggctagattttgcttac

SEQ ID NO: 5191102 - DNA, 25 bp, Homo sapien
gagactgttcgtttcccattttgtg

SEQ ID NO: 5191103 - DNA, 25 bp, Homo sapien
aggtgttctgtaagttgttaatcca

SEQ ID NO: 5191104 - DNA, 25 bp, Homo sapien
ggcagtgtgatgcaaccaagtttca

SEQ ID NO: 5191105 - DNA, 25 bp, Homo sapien
taatgtattttgagatcaggcagtg

SEQ ID NO: 5191106 - DNA, 25 bp, Homo sapien
cctgaatttggactatggcaacctg

SEQ ID NO: 5191107 - DNA, 25 bp, Homo sapien
cacattagtgagtagggaagcctga

SEQ ID NO: 5191108 - DNA, 25 bp, Homo sapien
tggcaacctgaatgtgagtccaagt

SEQ ID NO: 5191109 - DNA, 25 bp, Homo sapien
ccatgtttgcttggtggctaaaacc

SEQ ID NO: 5191110 - DNA, 25 bp, Homo sapien
cagttaggtctgcaggtttgatccc

SEQ ID NO: 5191111 - DNA, 25 bp, Homo sapien
tggcctagcataacaccacctgtgg

SEQ ID NO: 5191112 - DNA, 25 bp, Homo sapien
cagttgacagaattcccatcgagta

SEQ ID NO: 5191113 - DNA, 25 bp, Homo sapien
tccaagacagcaaggtagtacccga

SEQ ID NO: 5191114 - DNA, 25 bp, Homo sapien
atatattcattaccaggctgacact

SEQ ID NO: 5191115 - DNA, 25 bp, Homo sapien
tatatattcattaccaggctgacac

SEQ ID NO: 5191116 - DNA, 25 bp, Homo sapien
ctatatattcattaccaggctgaca

SEQ ID NO: 5191117 - DNA, 25 bp, Homo sapien
tctatatattcattaccaggctgac

SEQ ID NO: 5191118 - DNA, 25 bp, Homo sapien
gaataaggataatccctctcctggt

SEQ ID NO: 5191119 - DNA, 25 bp, Homo sapien
actgcctgtccttaatgcctggaaa

SEQ ID NO: 5191120 - DNA, 25 bp, Homo sapien
taaatatcaagttttgcctacagga

SEQ ID NO: 5191121 - DNA, 25 bp, Homo sapien
tagacgtcagagaagtggacaaggc

SEQ ID NO: 5191122 - DNA, 25 bp, Homo sapien
taggcctgccatctggtttcacagc

SEQ ID NO: 5191123 - DNA, 25 bp, Homo sapien
ggaaaaatccaaacctggatggctg

SEQ ID NO: 5191124 - DNA, 25 bp, Homo sapien
ccagtgacacctgtgacataaatgt

SEQ ID NO: 5191125 - DNA, 25 bp, Homo sapien
cagacccggagaagcaacaatcata

SEQ ID NO: 5191126 - DNA, 25 bp, Homo sapien
tgaaatgtctactaagggccagtct

SEQ ID NO: 5191127 - DNA, 25 bp, Homo sapien
tcatgagcctccctagatgaatggg

SEQ ID NO: 5191128 - DNA, 25 bp, Homo sapien
gagaatctagccaagtcatgagcct

SEQ ID NO: 5191129 - DNA, 25 bp, Homo sapien
cccagtggagggatacagataatgc

SEQ ID NO: 5191130 - DNA, 25 bp, Homo sapien
gatcaaatccccgacaggcttaagg

SEQ ID NO: 5191131 - DNA, 25 bp, Homo sapien
gaactctgcacctgacatgcctgga

SEQ ID NO: 5191132 - DNA, 25 bp, Homo sapien
gaaacacttgcagggcaaacacaga

SEQ ID NO: 5191133 - DNA, 25 bp, Homo sapien
gccatatgagtgtccctgattcaga

SEQ ID NO: 5191134 - DNA, 25 bp, Homo sapien
tttggctcctggtggaacagtctac

SEQ ID NO: 5191135 - DNA, 25 bp, Homo sapien
ctttggctcctggtggaacagtcta

SEQ ID NO: 5191136 - DNA, 25 bp, Homo sapien
tggctcctggtggaacagtctactg

SEQ ID NO: 5191137 - DNA, 25 bp, Homo sapien
ggctcctggtggaacagtctactgc

SEQ ID NO: 5191138 - DNA, 25 bp, Homo sapien
gcccctgagcacaattgttccatct

SEQ ID NO: 5191139 - DNA, 25 bp, Homo sapien
taggttgtcattggtgactgatgtc

SEQ ID NO: 5191140 - DNA, 25 bp, Homo sapien
ccaggccagtatgccacgtagaatt

SEQ ID NO: 5191141 - DNA, 25 bp, Homo sapien
aaagcaacaataagcagcccctgag

SEQ ID NO: 5191142 - DNA, 25 bp, Homo sapien
tgaatgaattcaaaattgtcctgaa

SEQ ID NO: 5191143 - DNA, 25 bp, Homo sapien
ctgaatgaattcaaaattgtcctga

SEQ ID NO: 5191144 - DNA, 25 bp, Homo sapien
aatgaattcaaaattgtcctgaaag

SEQ ID NO: 5191145 - DNA, 25 bp, Homo sapien
tgaattcaaaattgtcctgaaagtt

SEQ ID NO: 5191146 - DNA, 25 bp, Homo sapien
ttttcattgcagtttgcatcaaaaa

SEQ ID NO: 5191147 - DNA, 25 bp, Homo sapien
aactggagcaacaatagagggagcc

SEQ ID NO: 5191148 - DNA, 25 bp, Homo sapien
gagcaacaatagagggagccacttc

SEQ ID NO: 5191149 - DNA, 25 bp, Homo sapien
acaatagagggagccacttcagttt

SEQ ID NO: 5191150 - DNA, 25 bp, Homo sapien
cattgttccttagctttctgaagta

SEQ ID NO: 5191151 - DNA, 25 bp, Homo sapien
cattttgcccctcgttctgctggca

SEQ ID NO: 5191152 - DNA, 25 bp, Homo sapien
cagggtcattttgcccctcgttctg

SEQ ID NO: 5191153 - DNA, 25 bp, Homo sapien
tgtggcacagagcatgtctacagtc

SEQ ID NO: 5191154 - DNA, 25 bp, Homo sapien
tcctgtgggcccctttcatcggata

SEQ ID NO: 5191155 - DNA, 25 bp, Homo sapien
ggcccctttcatcggatatcacgaa

SEQ ID NO: 5191156 - DNA, 25 bp, Homo sapien
tcatcggatatcacgaagtcttcat

SEQ ID NO: 5191157 - DNA, 25 bp, Homo sapien
cctttcatcggatatcacgaagtct

SEQ ID NO: 5191158 - DNA, 25 bp, Homo sapien
gggattgataagctggcaccaagaa

SEQ ID NO: 5191159 - DNA, 25 bp, Homo sapien
ccctgtagaatcttttacacccaga

SEQ ID NO: 5191160 - DNA, 25 bp, Homo sapien
cctgtagaatcttttacacccagag

SEQ ID NO: 5191161 - DNA, 25 bp, Homo sapien
agagtttgggattgataagctggca

SEQ ID NO: 5191162 - DNA, 25 bp, Homo sapien
atcactgtttagctccttgcataag

SEQ ID NO: 5191163 - DNA, 25 bp, Homo sapien
aatcactgtttagctccttgcataa

SEQ ID NO: 5191164 - DNA, 25 bp, Homo sapien
tcactgtttagctccttgcataaga

SEQ ID NO: 5191165 - DNA, 25 bp, Homo sapien
cactgtttagctccttgcataagaa

SEQ ID NO: 5191166 - DNA, 25 bp, Homo sapien
cttgcgttcctgtttgggtctctta

SEQ ID NO: 5191167 - DNA, 25 bp, Homo sapien
gcgttcctgtttgggtctcttagct

SEQ ID NO: 5191168 - DNA, 25 bp, Homo sapien
tgttcaatagcagcaagggattccc

SEQ ID NO: 5191169 - DNA, 25 bp, Homo sapien
caagggattccctggtaaagaagcg

SEQ ID NO: 5191170 - DNA, 25 bp, Homo sapien
tagggaatcagggtcaatttacact

SEQ ID NO: 5191171 - DNA, 25 bp, Homo sapien
caaagtgacttatggagagctagag

SEQ ID NO: 5191172 - DNA, 25 bp, Homo sapien
taaacccactgaagatcaaagtgac

SEQ ID NO: 5191173 - DNA, 25 bp, Homo sapien
ttaattcccgcgctggaggatgcct

SEQ ID NO: 5191174 - DNA, 25 bp, Homo sapien
taattaccatcatatgacatgaaga

SEQ ID NO: 5191175 - DNA, 25 bp, Homo sapien
tctcatgagaacttcaaggttttcc

SEQ ID NO: 5191176 - DNA, 25 bp, Homo sapien
cagaatcttatttggcacctacaag

SEQ ID NO: 5191177 - DNA, 25 bp, Homo sapien
gaaaatttgtgatcaatgccatagg

SEQ ID NO: 5191178 - DNA, 25 bp, Homo sapien
ggcactgaatcgagagattgctttc

SEQ ID NO: 5191179 - DNA, 25 bp, Homo sapien
tgaatcgagagattgctttcccttt

SEQ ID NO: 5191180 - DNA, 25 bp, Homo sapien
atagctaattttctaatagggttga

SEQ ID NO: 5191181 - DNA, 25 bp, Homo sapien
aatagctaattttctaatagggttg

SEQ ID NO: 5191182 - DNA, 25 bp, Homo sapien
taagtgacgatttgaaaaaggatat

SEQ ID NO: 5191183 - DNA, 25 bp, Homo sapien
caagactggctgtcaacaagacttg

SEQ ID NO: 5191184 - DNA, 25 bp, Homo sapien
ctctcatttccaactactctattta

SEQ ID NO: 5191185 - DNA, 25 bp, Homo sapien
aaggaatcaatcaaattgccatctc

SEQ ID NO: 5191186 - DNA, 25 bp, Homo sapien
aatttcaaggaatcaatcaaattgc

SEQ ID NO: 5191187 - DNA, 25 bp, Homo sapien
tcctggatcatacagaacacagttt

SEQ ID NO: 5191188 - DNA, 25 bp, Homo sapien
ccagagaggaaatacgtgctcttca

SEQ ID NO: 5191189 - DNA, 25 bp, Homo sapien
tgcaggtatagccaatgcccttcac

SEQ ID NO: 5191190 - DNA, 25 bp, Homo sapien
tagatgctcaatgaattgcttcctg

SEQ ID NO: 5191191 - DNA, 25 bp, Homo sapien
acacagttggtaagaatcgtgcaca

SEQ ID NO: 5191192 - DNA, 25 bp, Homo sapien
cacagttggtaagaatcgtgcacat

SEQ ID NO: 5191193 - DNA, 25 bp, Homo sapien
aatacacagttggtaagaatcgtgc

SEQ ID NO: 5191194 - DNA, 25 bp, Homo sapien
tacacagttggtaagaatcgtgcac

SEQ ID NO: 5191195 - DNA, 25 bp, Homo sapien
ttgtccagtctggagggttactcat

SEQ ID NO: 5191196 - DNA, 25 bp, Homo sapien
cacattctttgtccagtctggaggg

SEQ ID NO: 5191197 - DNA, 25 bp, Homo sapien
ctttgtccagtctggagggttactc

SEQ ID NO: 5191198 - DNA, 25 bp, Homo sapien
tccacattctttgtccagtctggag

SEQ ID NO: 5191199 - DNA, 25 bp, Homo sapien
caattccatggatcccgtaaaaatg

SEQ ID NO: 5191200 - DNA, 25 bp, Homo sapien
tccaaccaattccatggatcccgta

SEQ ID NO: 5191201 - DNA, 25 bp, Homo sapien
tccatggatcccgtaaaaatgtgaa

SEQ ID NO: 5191202 - DNA, 25 bp, Homo sapien
ctgtgaaatccaaccaattccatgg

SEQ ID NO: 5191203 - DNA, 25 bp, Homo sapien
ttttcaaagctctcaagactctgaa

SEQ ID NO: 5191204 - DNA, 25 bp, Homo sapien
gttttcaaagctctcaagactctga

SEQ ID NO: 5191205 - DNA, 25 bp, Homo sapien
tagttttcaaagctctcaagactct

SEQ ID NO: 5191206 - DNA, 25 bp, Homo sapien
agttttcaaagctctcaagactctg

SEQ ID NO: 5191207 - DNA, 25 bp, Homo sapien
ttgttttcaatgctcggagaactct

SEQ ID NO: 5191208 - DNA, 25 bp, Homo sapien
tgttttcaatgctcggagaactctg

SEQ ID NO: 5191209 - DNA, 25 bp, Homo sapien
tatgctcactgtcctattgaaagta

SEQ ID NO: 5191210 - DNA, 25 bp, Homo sapien
tgaacaactgcaatcctattagcgc

SEQ ID NO: 5191211 - DNA, 25 bp, Homo sapien
aacatttatttcgtaggttgcccat

SEQ ID NO: 5191212 - DNA, 25 bp, Homo sapien
tattagcgcaaacacgcttagacag

SEQ ID NO: 5191213 - DNA, 25 bp, Homo sapien
acaacttaatggtttatagagtata

SEQ ID NO: 5191214 - DNA, 25 bp, Homo sapien
aattagtctaagtcacttgattcac

SEQ ID NO: 5191215 - DNA, 25 bp, Homo sapien
cttaaattagtctaagtcacttgat

SEQ ID NO: 5191216 - DNA, 25 bp, Homo sapien
aatcatcttaaattagtctaagtca

SEQ ID NO: 5191217 - DNA, 25 bp, Homo sapien
tgagctgttgccacaaagcagagca

SEQ ID NO: 5191218 - DNA, 25 bp, Homo sapien
tctgagctgttgccacaaagcagag

SEQ ID NO: 5191219 - DNA, 25 bp, Homo sapien
agctgttgccacaaagcagagcatc

SEQ ID NO: 5191220 - DNA, 25 bp, Homo sapien
tgcatctgagctgttgccacaaagc

SEQ ID NO: 5191221 - DNA, 25 bp, Homo sapien
gagtcatgagacgaaataaggacaa

SEQ ID NO: 5191222 - DNA, 25 bp, Homo sapien
gtcatgagacgaaataaggacaaaa

SEQ ID NO: 5191223 - DNA, 25 bp, Homo sapien
tcttgagtcatgagacgaaataagg

SEQ ID NO: 5191224 - DNA, 25 bp, Homo sapien
ttgagtcatgagacgaaataaggac

SEQ ID NO: 5191225 - DNA, 25 bp, Homo sapien
tatcatgtacgttttcccagcagca

SEQ ID NO: 5191226 - DNA, 25 bp, Homo sapien
aaatatcatgtacgttttcccagca

SEQ ID NO: 5191227 - DNA, 25 bp, Homo sapien
aaaaatatcatgtacgttttcccag

SEQ ID NO: 5191228 - DNA, 25 bp, Homo sapien
aatatcatgtacgttttcccagcag

SEQ ID NO: 5191229 - DNA, 25 bp, Homo sapien
tgattcagcagatgcggctgcagct

SEQ ID NO: 5191230 - DNA, 25 bp, Homo sapien
tttggagctcaacttagatgctact

SEQ ID NO: 5191231 - DNA, 25 bp, Homo sapien
ttggagctcaacttagatgctactg

SEQ ID NO: 5191232 - DNA, 25 bp, Homo sapien
ttttggagctcaacttagatgctac

SEQ ID NO: 5191233 - DNA, 25 bp, Homo sapien
ctcttcttctccagactgttctttc

SEQ ID NO: 5191234 - DNA, 25 bp, Homo sapien
tcttctccagactgttctttctgtt

SEQ ID NO: 5191235 - DNA, 25 bp, Homo sapien
cttcttctccagactgttctttctg

SEQ ID NO: 5191236 - DNA, 25 bp, Homo sapien
ttctcttcttctccagactgttctt

SEQ ID NO: 5191237 - DNA, 25 bp, Homo sapien
ctgtcttcagattccgattttcgga

SEQ ID NO: 5191238 - DNA, 25 bp, Homo sapien
gctgtcttcagattccgattttcgg

SEQ ID NO: 5191239 - DNA, 25 bp, Homo sapien
caggatgtgtgacatactgctcctc

SEQ ID NO: 5191240 - DNA, 25 bp, Homo sapien
tgtgtgacatactgctcctcattag

SEQ ID NO: 5191241 - DNA, 25 bp, Homo sapien
tttgcaggatgtgtgacatactgct

SEQ ID NO: 5191242 - DNA, 25 bp, Homo sapien
ggatgtgtgacatactgctcctcat

SEQ ID NO: 5191243 - DNA, 25 bp, Homo sapien
tgctcccacaacagaagtcatctct

SEQ ID NO: 5191244 - DNA, 25 bp, Homo sapien
aacagaagtcatctctcctcttgtt

SEQ ID NO: 5191245 - DNA, 25 bp, Homo sapien
cagaagtcatctctcctcttgttgt

SEQ ID NO: 5191246 - DNA, 25 bp, Homo sapien
gaagtcatctctcctcttgttgttc

SEQ ID NO: 5191247 - DNA, 25 bp, Homo sapien
tttcactctcgctttttctccttcc

SEQ ID NO: 5191248 - DNA, 25 bp, Homo sapien
tctatttcactctcgctttttctcc

SEQ ID NO: 5191249 - DNA, 25 bp, Homo sapien
atttcactctcgctttttctccttc

SEQ ID NO: 5191250 - DNA, 25 bp, Homo sapien
ctatttcactctcgctttttctcct

SEQ ID NO: 5191251 - DNA, 25 bp, Homo sapien
gctgacattgctgtggcgccgttct

SEQ ID NO: 5191252 - DNA, 25 bp, Homo sapien
ccctactgttgcgtcttggagagaa

SEQ ID NO: 5191253 - DNA, 25 bp, Homo sapien
tctgaagctgaaaaggctcgcccta

SEQ ID NO: 5191254 - DNA, 25 bp, Homo sapien
tgcggcacgaacagagagtctcttc

SEQ ID NO: 5191255 - DNA, 25 bp, Homo sapien
tctttgccttgatgtaggatcttcc

SEQ ID NO: 5191256 - DNA, 25 bp, Homo sapien
catggaaacatgataagaactggac

SEQ ID NO: 5191257 - DNA, 25 bp, Homo sapien
cttccatggtgttggtcaaaatact

SEQ ID NO: 5191258 - DNA, 25 bp, Homo sapien
ggtcaaaatactggctatactcatt

SEQ ID NO: 5191259 - DNA, 25 bp, Homo sapien
caagtaactgtgacgcaggactttt

SEQ ID NO: 5191260 - DNA, 25 bp, Homo sapien
ctgtgacgcaggacttttaacatac

SEQ ID NO: 5191261 - DNA, 25 bp, Homo sapien
taactgtgacgcaggacttttaaca

SEQ ID NO: 5191262 - DNA, 25 bp, Homo sapien
agcaccaagtaactgtgacgcagga

SEQ ID NO: 5191263 - DNA, 25 bp, Homo sapien
agtgcaagctaacgcaggcgaggtt

SEQ ID NO: 5191264 - DNA, 25 bp, Homo sapien
ggaagagggagtgcaagctaacgca

SEQ ID NO: 5191265 - DNA, 25 bp, Homo sapien
cagggaggagcaagctactggcagc

SEQ ID NO: 5191266 - DNA, 25 bp, Homo sapien
gaggagcaagctactggcagctggg

SEQ ID NO: 5191267 - DNA, 25 bp, Homo sapien
tcctgctttagggagcagacatgct

SEQ ID NO: 5191268 - DNA, 25 bp, Homo sapien
caaggagcggaaggccagacaatct

SEQ ID NO: 5191269 - DNA, 25 bp, Homo sapien
gacatcggtagcagaaccactggca

SEQ ID NO: 5191270 - DNA, 25 bp, Homo sapien
tggcagcttcctctcagtggttttg

SEQ ID NO: 5191271 - DNA, 25 bp, Homo sapien
ttacaacagtcccaaatcaaacaca

SEQ ID NO: 5191272 - DNA, 25 bp, Homo sapien
tttacaacagtcccaaatcaaacac

SEQ ID NO: 5191273 - DNA, 25 bp, Homo sapien
tacaacagtcccaaatcaaacacat

SEQ ID NO: 5191274 - DNA, 25 bp, Homo sapien
gtttacaacagtcccaaatcaaaca

SEQ ID NO: 5191275 - DNA, 25 bp, Homo sapien
actgctccgtcatgggatagtgctc

SEQ ID NO: 5191276 - DNA, 25 bp, Homo sapien
ctgaactgctccgtcatgggatagt

SEQ ID NO: 5191277 - DNA, 25 bp, Homo sapien
actgctgaactgctccgtcatggga

SEQ ID NO: 5191278 - DNA, 25 bp, Homo sapien
caggtttccaacagacagtacactg

SEQ ID NO: 5191279 - DNA, 25 bp, Homo sapien
aagttccattaaactaaggctcaca

SEQ ID NO: 5191280 - DNA, 25 bp, Homo sapien
cagccggaatgatcggagaactgac

SEQ ID NO: 5191281 - DNA, 25 bp, Homo sapien
tccacatttgccaaaccaagttcca

SEQ ID NO: 5191282 - DNA, 25 bp, Homo sapien
ctaaggctcacaataaaaccatcaa

SEQ ID NO: 5191283 - DNA, 25 bp, Homo sapien
cgtgggagttcacaatcattggaaa

SEQ ID NO: 5191284 - DNA, 25 bp, Homo sapien
agcgtgggagttcacaatcattgga

SEQ ID NO: 5191285 - DNA, 25 bp, Homo sapien
atcattggaaatcttgcagacacat

SEQ ID NO: 5191286 - DNA, 25 bp, Homo sapien
caatcattggaaatcttgcagacac

SEQ ID NO: 5191287 - DNA, 25 bp, Homo sapien
tgaggaaaatgtttttgctacatac

SEQ ID NO: 5191288 - DNA, 25 bp, Homo sapien
tgaaaatgaggaaaatgtttttgct

SEQ ID NO: 5191289 - DNA, 25 bp, Homo sapien
cttttaatgaaaatgaggaaaatgt

SEQ ID NO: 5191290 - DNA, 25 bp, Homo sapien
taatgattacattatcttttaatga

SEQ ID NO: 5191291 - DNA, 25 bp, Homo sapien
gctgcctatgccactagtagttcca

SEQ ID NO: 5191292 - DNA, 25 bp, Homo sapien
gtggcagcaagattgtcagaactga

SEQ ID NO: 5191293 - DNA, 25 bp, Homo sapien
agtagttccatttccgtctttgaga

SEQ ID NO: 5191294 - DNA, 25 bp, Homo sapien
actgtcacagtgaggctagggttgt

SEQ ID NO: 5191295 - DNA, 25 bp, Homo sapien
ccctcggcgggagctccaatatcaa

SEQ ID NO: 5191296 - DNA, 25 bp, Homo sapien
ttcaagggattcctcaggttcaacc

SEQ ID NO: 5191297 - DNA, 25 bp, Homo sapien
ctcaggttcaacctcaggctgttct

SEQ ID NO: 5191298 - DNA, 25 bp, Homo sapien
gctccaatatcaaccgtgctgcctt

SEQ ID NO: 5191299 - DNA, 25 bp, Homo sapien
tgtgctccactatcttatagcatgt

SEQ ID NO: 5191300 - DNA, 25 bp, Homo sapien
atgcttatctgacaacacttgaact

SEQ ID NO: 5191301 - DNA, 25 bp, Homo sapien
ttatctgacaacacttgaacttccg

SEQ ID NO: 5191302 - DNA, 25 bp, Homo sapien
gaaggtttcgaaccaattgtgctcc

SEQ ID NO: 5191303 - DNA, 25 bp, Homo sapien
gcatattctaacatggtcttaatgg

SEQ ID NO: 5191304 - DNA, 25 bp, Homo sapien
cttaatggtttttcgctgctcaatg

SEQ ID NO: 5191305 - DNA, 25 bp, Homo sapien
tatgcaacccactttagcagcattt

SEQ ID NO: 5191306 - DNA, 25 bp, Homo sapien
gcaccaggcattggtaaaatacact

SEQ ID NO: 5191307 - DNA, 25 bp, Homo sapien
gcatgtcatgcaccaacgttttaac

SEQ ID NO: 5191308 - DNA, 25 bp, Homo sapien
ccttcctcaagtaaagaggtggcac

SEQ ID NO: 5191309 - DNA, 25 bp, Homo sapien
caactgtaagctactgcaggactag

SEQ ID NO: 5191310 - DNA, 25 bp, Homo sapien
caggtgtcgacttactgtgtacgca

SEQ ID NO: 5191311 - DNA, 25 bp, Homo sapien
ggcatttgcagttaagctaaccagt

SEQ ID NO: 5191312 - DNA, 25 bp, Homo sapien
tgttctgagggatttgatggcacca

SEQ ID NO: 5191313 - DNA, 25 bp, Homo sapien
ccttcaaaccgggacaaagctctca

SEQ ID NO: 5191314 - DNA, 25 bp, Homo sapien
ccaaggcatttgcagttaagctaac

SEQ ID NO: 5191315 - DNA, 25 bp, Homo sapien
acttgccagcaaagagattcactcc

SEQ ID NO: 5191316 - DNA, 25 bp, Homo sapien
gatcagacaaaccagaagtacattc

SEQ ID NO: 5191317 - DNA, 25 bp, Homo sapien
taatacaatggtaaaacttgccagc

SEQ ID NO: 5191318 - DNA, 25 bp, Homo sapien
cactcactgtagttgttgaccacgc

SEQ ID NO: 5191319 - DNA, 25 bp, Homo sapien
atatccatccatcccttaaacgtgg

SEQ ID NO: 5191320 - DNA, 25 bp, Homo sapien
tcaacagctgcatacataatatcca

SEQ ID NO: 5191321 - DNA, 25 bp, Homo sapien
cataatatccatccatcccttaaac

SEQ ID NO: 5191322 - DNA, 25 bp, Homo sapien
taatatccatccatcccttaaacgt

SEQ ID NO: 5191323 - DNA, 25 bp, Homo sapien
agagttctgcaagactattcattac

SEQ ID NO: 5191324 - DNA, 25 bp, Homo sapien
ttatgaaccttcaaatctcacatgc

SEQ ID NO: 5191325 - DNA, 25 bp, Homo sapien
tatgaaccttcaaatctcacatgct

SEQ ID NO: 5191326 - DNA, 25 bp, Homo sapien
tgaagagttctgcaagactattcat

SEQ ID NO: 5191327 - DNA, 25 bp, Homo sapien
cttcatacttgggttgtaattctac

SEQ ID NO: 5191328 - DNA, 25 bp, Homo sapien
tcttcatacttgggttgtaattcta

SEQ ID NO: 5191329 - DNA, 25 bp, Homo sapien
aggttgtcttcatacttgggttgta

SEQ ID NO: 5191330 - DNA, 25 bp, Homo sapien
gttgtcttcatacttgggttgtaat

SEQ ID NO: 5191331 - DNA, 25 bp, Homo sapien
tatttcagagcaaggatgaagtttt

SEQ ID NO: 5191332 - DNA, 25 bp, Homo sapien
gagcaaggatgaagttttaatatac

SEQ ID NO: 5191333 - DNA, 25 bp, Homo sapien
ttcagagcaaggatgaagttttaat

SEQ ID NO: 5191334 - DNA, 25 bp, Homo sapien
tcatatttcagagcaaggatgaagt

SEQ ID NO: 5191335 - DNA, 25 bp, Homo sapien
agcaggtcgaggtatgggtttttgt

SEQ ID NO: 5191336 - DNA, 25 bp, Homo sapien
tcttctgtcataaaaatgtcttgac

SEQ ID NO: 5191337 - DNA, 25 bp, Homo sapien
tctttgaacccagttttttcattgc

SEQ ID NO: 5191338 - DNA, 25 bp, Homo sapien
tttcattgcattgtagtatttcttc

SEQ ID NO: 5191339 - DNA, 25 bp, Homo sapien
tccagtacagaatgtttgtcatttc

SEQ ID NO: 5191340 - DNA, 25 bp, Homo sapien
taaacaccagattaatccagtacag

SEQ ID NO: 5191341 - DNA, 25 bp, Homo sapien
catccaatagtgaaatagtagtaac

SEQ ID NO: 5191342 - DNA, 25 bp, Homo sapien
aagagagatcagtttcagcacacat

SEQ ID NO: 5191343 - DNA, 25 bp, Homo sapien
tccttaactgaataaaagcacctct

SEQ ID NO: 5191344 - DNA, 25 bp, Homo sapien
tattccttaactgaataaaagcacc

SEQ ID NO: 5191345 - DNA, 25 bp, Homo sapien
ttccttaactgaataaaagcacctc

SEQ ID NO: 5191346 - DNA, 25 bp, Homo sapien
ctatattccttaactgaataaaagc

SEQ ID NO: 5191347 - DNA, 25 bp, Homo sapien
ggtttggtcacactatcatacgagg

SEQ ID NO: 5191348 - DNA, 25 bp, Homo sapien
ggtagcgtctgtaagccctctggat

SEQ ID NO: 5191349 - DNA, 25 bp, Homo sapien
caacgtggtcgtaatgggctcataa

SEQ ID NO: 5191350 - DNA, 25 bp, Homo sapien
tccagggtgatctttgtcagggtca

SEQ ID NO: 5191351 - DNA, 25 bp, Homo sapien
tgcaacatgtttgtacagtcgggct

SEQ ID NO: 5191352 - DNA, 25 bp, Homo sapien
tacagttctagtgccatatgggtca

SEQ ID NO: 5191353 - DNA, 25 bp, Homo sapien
ttcaagcaatgccaagagtatcagc
